United States Patent Application Publication US 2005/0244851 A1 - sequence listing, part 12

SEQ ID NO: 438919 - DNA, 25 bp, Homo sapien
gaaggacaggaacggaacccaggca

SEQ ID NO: 438920 - DNA, 25 bp, Homo sapien
gggtgcggattctgcccggctctca

SEQ ID NO: 438921 - DNA, 25 bp, Homo sapien
tgtccgatgcagtctctccatctac

SEQ ID NO: 438922 - DNA, 25 bp, Homo sapien
ggacctccggggtatcatctgcaga

SEQ ID NO: 438923 - DNA, 25 bp, Homo sapien
tggaaagggccctattgaggacctc

SEQ ID NO: 438924 - DNA, 25 bp, Homo sapien
aaaaatgcaatcatggccaaagtca

SEQ ID NO: 438925 - DNA, 25 bp, Homo sapien
tgggatcacaggcaataaagtcagt

SEQ ID NO: 438926 - DNA, 25 bp, Homo sapien
acaaccgggcctgcagcaaaaactg

SEQ ID NO: 438927 - DNA, 25 bp, Homo sapien
acacctcgcacttaagacaaccggg

SEQ ID NO: 438928 - DNA, 25 bp, Homo sapien
ccaatgaccctccaggtggctactg

SEQ ID NO: 438929 - DNA, 25 bp, Homo sapien
tcacagggagtagatccaattttcc

SEQ ID NO: 438930 - DNA, 25 bp, Homo sapien
cataccatcccacagagcaatgcag

SEQ ID NO: 438931 - DNA, 25 bp, Homo sapien
gcaatgcagccctctatgtcacagg

SEQ ID NO: 438932 - DNA, 25 bp, Homo sapien
cttaagaaaaatatcgggcctccag

SEQ ID NO: 438933 - DNA, 25 bp, Homo sapien
aacacttaatctgaacgcacatcac

SEQ ID NO: 438934 - DNA, 25 bp, Homo sapien
catatgagtggtagacgttgtagcc

SEQ ID NO: 438935 - DNA, 25 bp, Homo sapien
caatagtgattatctcatggaaaca

SEQ ID NO: 438936 - DNA, 25 bp, Homo sapien
cagctgagcgtcctgaaccagggca

SEQ ID NO: 438937 - DNA, 25 bp, Homo sapien
taactataagactcctgcaaggcca

SEQ ID NO: 438938 - DNA, 25 bp, Homo sapien
gaaaaacgggatcatcatgcagagt

SEQ ID NO: 438939 - DNA, 25 bp, Homo sapien
tccaaatagcgaggcaaacacagtc

SEQ ID NO: 438940 - DNA, 25 bp, Homo sapien
tgtgcgagtctgtggcaatcacctc

SEQ ID NO: 438941 - DNA, 25 bp, Homo sapien
caggcctcctgagtatgttaacaaa

SEQ ID NO: 438942 - DNA, 25 bp, Homo sapien
agaaggtccacatttgccccaggtc

SEQ ID NO: 438943 - DNA, 25 bp, Homo sapien
tggcaatcccaattccatctggagg

SEQ ID NO: 438944 - DNA, 25 bp, Homo sapien
aaaagggacctgcatcttaagccag

SEQ ID NO: 438945 - DNA, 25 bp, Homo sapien
ttgccgtggggagcacccttgcctt

SEQ ID NO: 438946 - DNA, 25 bp, Homo sapien
taaatgaagacaggtcattgccgtg

SEQ ID NO: 438947 - DNA, 25 bp, Homo sapien
aatgaagacaggtcattgccgtggg

SEQ ID NO: 438948 - DNA, 25 bp, Homo sapien
acagcaaggcagtcagacatcccag

SEQ ID NO: 438949 - DNA, 25 bp, Homo sapien
ggtatttactgagaatccgcaaagg

SEQ ID NO: 438950 - DNA, 25 bp, Homo sapien
cactgtctcaccatagaagaaatag

SEQ ID NO: 438951 - DNA, 25 bp, Homo sapien
cggtggtatttactgagaatccgca

SEQ ID NO: 438952 - DNA, 25 bp, Homo sapien
cagggtgaagaagtaatccgtcact

SEQ ID NO: 438953 - DNA, 25 bp, Homo sapien
ttagatagagagtaaaggaaatgaa

SEQ ID NO: 438954 - DNA, 25 bp, Homo sapien
tagatagagagtaaaggaaatgaac

SEQ ID NO: 438955 - DNA, 25 bp, Homo sapien
ctattagatagagagtaaaggaaat

SEQ ID NO: 438956 - DNA, 25 bp, Homo sapien
tattagatagagagtaaaggaaatg

SEQ ID NO: 438957 - DNA, 25 bp, Homo sapien
gacacaagaaatggtgaactgctta

SEQ ID NO: 438958 - DNA, 25 bp, Homo sapien
caaaaacaatacagacacaagaaat

SEQ ID NO: 438959 - DNA, 25 bp, Homo sapien
taatgtcacaaaactgtatactaac

SEQ ID NO: 438960 - DNA, 25 bp, Homo sapien
caaaactgtatactaaccaagaaat

SEQ ID NO: 438961 - DNA, 25 bp, Homo sapien
gcttaacatagagcatcagctctgc

SEQ ID NO: 438962 - DNA, 25 bp, Homo sapien
ctgctacagcttaacatagagcatc

SEQ ID NO: 438963 - DNA, 25 bp, Homo sapien
tgtagaactgcagtcgataatgctt

SEQ ID NO: 438964 - DNA, 25 bp, Homo sapien
catgtagaactgcagtcgataatgc

SEQ ID NO: 438965 - DNA, 25 bp, Homo sapien
gaactgcagtcgataatgcttcttg

SEQ ID NO: 438966 - DNA, 25 bp, Homo sapien
tgcagtcgataatgcttcttgacca

SEQ ID NO: 438967 - DNA, 25 bp, Homo sapien
ttccttcaaataggttgtggataac

SEQ ID NO: 438968 - DNA, 25 bp, Homo sapien
aagatgtgactgtgttacaacaatc

SEQ ID NO: 438969 - DNA, 25 bp, Homo sapien
atcagcaatgtcacatgggtccagc

SEQ ID NO: 438970 - DNA, 25 bp, Homo sapien
gatcattccttcaaataggttgtgg

SEQ ID NO: 438971 - DNA, 25 bp, Homo sapien
gatgagtggggtccgaccaaagaaa

SEQ ID NO: 438972 - DNA, 25 bp, Homo sapien
aaaagccaaacatataggccatgat

SEQ ID NO: 438973 - DNA, 25 bp, Homo sapien
cacacaagatatggggacaatgaac

SEQ ID NO: 438974 - DNA, 25 bp, Homo sapien
catataggccatgatgtcattacag

SEQ ID NO: 438975 - DNA, 25 bp, Homo sapien
tcaaatccagatcaaagtcccaaaa

SEQ ID NO: 438976 - DNA, 25 bp, Homo sapien
taaccatgtcaccttttaaagctcc

SEQ ID NO: 438977 - DNA, 25 bp, Homo sapien
tctcagcaaagggtgttttgataac

SEQ ID NO: 438978 - DNA, 25 bp, Homo sapien
tagctttgcgaacaatgattacttg

SEQ ID NO: 438979 - DNA, 25 bp, Homo sapien
caaagaagcccccaatgaagccttc

SEQ ID NO: 438980 - DNA, 25 bp, Homo sapien
atgaagccttcccaggtcttcttcg

SEQ ID NO: 438981 - DNA, 25 bp, Homo sapien
tagcaaagaagcccccaatgaagcc

SEQ ID NO: 438982 - DNA, 25 bp, Homo sapien
tgaagccttcccaggtcttcttcgg

SEQ ID NO: 438983 - DNA, 25 bp, Homo sapien
tagcaccctgcctgaaagctggtgg

SEQ ID NO: 438984 - DNA, 25 bp, Homo sapien
ctggaaagcaacaaagctgggcggt

SEQ ID NO: 438985 - DNA, 25 bp, Homo sapien
tacaagaagactctccccatttggg

SEQ ID NO: 438986 - DNA, 25 bp, Homo sapien
gccatgttcctgagggtgcctagta

SEQ ID NO: 438987 - DNA, 25 bp, Homo sapien
ggaatgttgtactcctgcaggcgaa

SEQ ID NO: 438988 - DNA, 25 bp, Homo sapien
ggcagacaaagcatctgtacccgga

SEQ ID NO: 438989 - DNA, 25 bp, Homo sapien
gactgactggatcaccccaggaatg

SEQ ID NO: 438990 - DNA, 25 bp, Homo sapien
tgtacccggacatcacataggacag

SEQ ID NO: 438991 - DNA, 25 bp, Homo sapien
gcatgaggaacccactgccttaacg

SEQ ID NO: 438992 - DNA, 25 bp, Homo sapien
cctgacctggcgtgagcaattctcc

SEQ ID NO: 438993 - DNA, 25 bp, Homo sapien
tccctttaggcaagcactgtactac

SEQ ID NO: 438994 - DNA, 25 bp, Homo sapien
cactgctgcttttgcgccgtatcac

SEQ ID NO: 438995 - DNA, 25 bp, Homo sapien
gaagtaaaagtttaggtgcatacat

SEQ ID NO: 438996 - DNA, 25 bp, Homo sapien
ttgatcctcattgtggcctcactgg

SEQ ID NO: 438997 - DNA, 25 bp, Homo sapien
ttgagttgtcaactcatgttgaaat

SEQ ID NO: 438998 - DNA, 25 bp, Homo sapien
catacatgcccagtgttacggtttg

SEQ ID NO: 438999 - DNA, 25 bp, Homo sapien
cacttgcgaagaatcctccaaaggg

SEQ ID NO: 439000 - DNA, 25 bp, Homo sapien
tggagagagcgatgctgtgaatctg

SEQ ID NO: 439001 - DNA, 25 bp, Homo sapien
taaaggctcgtttgaatccacttgc

SEQ ID NO: 439002 - DNA, 25 bp, Homo sapien
tccaaaggggccaatgagcgaggca

SEQ ID NO: 439003 - DNA, 25 bp, Homo sapien
cagtcaaagcgatccatgatgcctc

SEQ ID NO: 439004 - DNA, 25 bp, Homo sapien
atggccaggaatggtattggcaaag

SEQ ID NO: 439005 - DNA, 25 bp, Homo sapien
caaaggtggccatcagatactggca

SEQ ID NO: 439006 - DNA, 25 bp, Homo sapien
gataaaactggcgatgtatacattg

SEQ ID NO: 439007 - DNA, 25 bp, Homo sapien
cagcatccctttgtcgatcagatga

SEQ ID NO: 439008 - DNA, 25 bp, Homo sapien
tctggccgtaaagtcaggaactgct

SEQ ID NO: 439009 - DNA, 25 bp, Homo sapien
tgaatcagtttgcttgggttagggc

SEQ ID NO: 439010 - DNA, 25 bp, Homo sapien
tgagaccgcagcgtgttgaagatgt

SEQ ID NO: 439011 - DNA, 25 bp, Homo sapien
tcagttctgttcctgttctcctggc

SEQ ID NO: 439012 - DNA, 25 bp, Homo sapien
ttctgttcctgttctcctggccctg

SEQ ID NO: 439013 - DNA, 25 bp, Homo sapien
cttggagacctgcccctgctcagtt

SEQ ID NO: 439014 - DNA, 25 bp, Homo sapien
ggagacctgcccctgctcagttctg

SEQ ID NO: 439015 - DNA, 25 bp, Homo sapien
ccctgatttggtcagacacagatga

SEQ ID NO: 439016 - DNA, 25 bp, Homo sapien
gacagtgagttgaagcctcgtcatt

SEQ ID NO: 439017 - DNA, 25 bp, Homo sapien
tctaaacacatagactgtatataca

SEQ ID NO: 439018 - DNA, 25 bp, Homo sapien
caaagctgtagtttacttacaacac

SEQ ID NO: 439019 - DNA, 25 bp, Homo sapien
tgtggatgcatagaaggcttacctg

SEQ ID NO: 439020 - DNA, 25 bp, Homo sapien
taggtggacctacaggagacattgg

SEQ ID NO: 439021 - DNA, 25 bp, Homo sapien
tcagtctgcgatgaaggtgaaccca

SEQ ID NO: 439022 - DNA, 25 bp, Homo sapien
ggtgcatgaacgagaagccctctgc

SEQ ID NO: 439023 - DNA, 25 bp, Homo sapien
ctgactgtgcactttcagggaggca

SEQ ID NO: 439024 - DNA, 25 bp, Homo sapien
gacactctagagacctgggctgact

SEQ ID NO: 439025 - DNA, 25 bp, Homo sapien
gcaatgaaaacatccacggcacgga

SEQ ID NO: 439026 - DNA, 25 bp, Homo sapien
gcaaatcattacaccctcgttggca

SEQ ID NO: 439027 - DNA, 25 bp, Homo sapien
caatactgaaatgaaagcccttgcg

SEQ ID NO: 439028 - DNA, 25 bp, Homo sapien
caaaggcagccctattcaagagcag

SEQ ID NO: 439029 - DNA, 25 bp, Homo sapien
ggtgcccaggacctcacttaatgag

SEQ ID NO: 439030 - DNA, 25 bp, Homo sapien
gagtagctccgaaaaagaggccctg

SEQ ID NO: 439031 - DNA, 25 bp, Homo sapien
gaagtgataaacagggaattcacga

SEQ ID NO: 439032 - DNA, 25 bp, Homo sapien
taaacagggaattcacgacaaggga

SEQ ID NO: 439033 - DNA, 25 bp, Homo sapien
aacagggaattcacgacaagggagg

SEQ ID NO: 439034 - DNA, 25 bp, Homo sapien
tgataaacagggaattcacgacaag

SEQ ID NO: 439035 - DNA, 25 bp, Homo sapien
tgtaaacccttagcactatgcctgg

SEQ ID NO: 439036 - DNA, 25 bp, Homo sapien
cacactgatatctcattggctcaag

SEQ ID NO: 439037 - DNA, 25 bp, Homo sapien
ttagagcagcctagaaacctgcccg

SEQ ID NO: 439038 - DNA, 25 bp, Homo sapien
tgcccgcacctagggtgatttgatc

SEQ ID NO: 439039 - DNA, 25 bp, Homo sapien
taaggttggcgtgcttctctcggag

SEQ ID NO: 439040 - DNA, 25 bp, Homo sapien
cagtgtggtggctgacaatcccatc

SEQ ID NO: 439041 - DNA, 25 bp, Homo sapien
tgaggacatccacccatacagggaa

SEQ ID NO: 439042 - DNA, 25 bp, Homo sapien
aggagatggccttcccacaagcagt

SEQ ID NO: 439043 - DNA, 25 bp, Homo sapien
cattccttcaaagtgaggcagcctc

SEQ ID NO: 439044 - DNA, 25 bp, Homo sapien
tcatggatcctgttagccaacacca

SEQ ID NO: 439045 - DNA, 25 bp, Homo sapien
aatagcaatgtgctgttgggtccca

SEQ ID NO: 439046 - DNA, 25 bp, Homo sapien
aaacagagggaccattatttccata

SEQ ID NO: 439047 - DNA, 25 bp, Homo sapien
taggtctattcaacaacacaatgag

SEQ ID NO: 439048 - DNA, 25 bp, Homo sapien
ggctgcctaggtctattcaacaaca

SEQ ID NO: 439049 - DNA, 25 bp, Homo sapien
acaacacaatgagggaggaagcacc

SEQ ID NO: 439050 - DNA, 25 bp, Homo sapien
ggatacaaggctgcctaggtctatt

SEQ ID NO: 439051 - DNA, 25 bp, Homo sapien
tgttcaacatggatcacgagtgcac

SEQ ID NO: 439052 - DNA, 25 bp, Homo sapien
tgcttgatttccagagggcccttac

SEQ ID NO: 439053 - DNA, 25 bp, Homo sapien
tcaaggtcgcctgtgtctgagtgcg

SEQ ID NO: 439054 - DNA, 25 bp, Homo sapien
catttagtgaaacgccaagttggga

SEQ ID NO: 439055 - DNA, 25 bp, Homo sapien
aatgtcccatgtttaggagcctctt

SEQ ID NO: 439056 - DNA, 25 bp, Homo sapien
ccttactgatgttcaaaatgtccca

SEQ ID NO: 439057 - DNA, 25 bp, Homo sapien
taaatagagttggtttgcccacatc

SEQ ID NO: 439058 - DNA, 25 bp, Homo sapien
acatcctccaatactgataacatga

SEQ ID NO: 439059 - DNA, 25 bp, Homo sapien
gaaccaggttttgcaatcactcaag

SEQ ID NO: 439060 - DNA, 25 bp, Homo sapien
gaaaacaatcggctttattatgaac

SEQ ID NO: 439061 - DNA, 25 bp, Homo sapien
tttgcctactctgaggtcatgaagg

SEQ ID NO: 439062 - DNA, 25 bp, Homo sapien
ggtatctaatacagtggccctttag

SEQ ID NO: 439063 - DNA, 25 bp, Homo sapien
gaacaatcccagctagtaaagaaag

SEQ ID NO: 439064 - DNA, 25 bp, Homo sapien
gaatgactaggctgaagctccgtac

SEQ ID NO: 439065 - DNA, 25 bp, Homo sapien
tcatcacggattggcaacttcacaa

SEQ ID NO: 439066 - DNA, 25 bp, Homo sapien
taaacagaggccgatctaggccagg

SEQ ID NO: 439067 - DNA, 25 bp, Homo sapien
gcccatcaggaagggcatctaagga

SEQ ID NO: 439068 - DNA, 25 bp, Homo sapien
tgcccatcaggaagggcatctaagg

SEQ ID NO: 439069 - DNA, 25 bp, Homo sapien
cccatcaggaagggcatctaaggat

SEQ ID NO: 439070 - DNA, 25 bp, Homo sapien
gccccattagggagagacaccaata

SEQ ID NO: 439071 - DNA, 25 bp, Homo sapien
gacaccaatatgttccgagggtgcg

SEQ ID NO: 439072 - DNA, 25 bp, Homo sapien
atgtacagagtaggctgccccatta

SEQ ID NO: 439073 - DNA, 25 bp, Homo sapien
ggccaggatcatataagctcacatt

SEQ ID NO: 439074 - DNA, 25 bp, Homo sapien
tcctggatgtgttagaaaatcccca

SEQ ID NO: 439075 - DNA, 25 bp, Homo sapien
ggctttttgccaatggctaatccta

SEQ ID NO: 439076 - DNA, 25 bp, Homo sapien
tccccatagatgtgtagaagataaa

SEQ ID NO: 439077 - DNA, 25 bp, Homo sapien
tagaaattccaggaccctgaagact

SEQ ID NO: 439078 - DNA, 25 bp, Homo sapien
tgaaaggagactggcaactcatgct

SEQ ID NO: 439079 - DNA, 25 bp, Homo sapien
agacatgttgctgggacttctggga

SEQ ID NO: 439080 - DNA, 25 bp, Homo sapien
tccccaaagtggtgtatgactgtga

SEQ ID NO: 439081 - DNA, 25 bp, Homo sapien
tagcatttatcaagaccccattgtg

SEQ ID NO: 439082 - DNA, 25 bp, Homo sapien
taaagcatcagcaaaaacttgctgt

SEQ ID NO: 439083 - DNA, 25 bp, Homo sapien
ctaaagcatcagcaaaaacttgctg

SEQ ID NO: 439084 - DNA, 25 bp, Homo sapien
aagcatcagcaaaaacttgctgtgg

SEQ ID NO: 439085 - DNA, 25 bp, Homo sapien
gcatcagcaaaaacttgctgtggct

SEQ ID NO: 439086 - DNA, 25 bp, Homo sapien
aagtggctctttcaatctatgactg

SEQ ID NO: 439087 - DNA, 25 bp, Homo sapien
aaaagtggctctttcaatctatgac

SEQ ID NO: 439088 - DNA, 25 bp, Homo sapien
ggctctttcaatctatgactgacat

SEQ ID NO: 439089 - DNA, 25 bp, Homo sapien
attaaaaagtggctctttcaatcta

SEQ ID NO: 439090 - DNA, 25 bp, Homo sapien
atcctggctaaccagaggtcctgag

SEQ ID NO: 439091 - DNA, 25 bp, Homo sapien
taaccagtatctgagaaagctagca

SEQ ID NO: 439092 - DNA, 25 bp, Homo sapien
cacatcaagggattgccccacaaga

SEQ ID NO: 439093 - DNA, 25 bp, Homo sapien
tctttctacaaccaaggactcacag

SEQ ID NO: 439094 - DNA, 25 bp, Homo sapien
ctggcttattccgtttagtgtacta

SEQ ID NO: 439095 - DNA, 25 bp, Homo sapien
ttcaagtttataccccttgatcaac

SEQ ID NO: 439096 - DNA, 25 bp, Homo sapien
atttttcatacctccctgcccctgg

SEQ ID NO: 439097 - DNA, 25 bp, Homo sapien
gtgtactattctccaggtttttcca

SEQ ID NO: 439098 - DNA, 25 bp, Homo sapien
caaggctgaaagtgtaggccctcca

SEQ ID NO: 439099 - DNA, 25 bp, Homo sapien
ggaaagtctgggctacctactcaat

SEQ ID NO: 439100 - DNA, 25 bp, Homo sapien
agtgctttccattgacgctgtggta

SEQ ID NO: 439101 - DNA, 25 bp, Homo sapien
gagagcagacttcacttggactttt

SEQ ID NO: 439102 - DNA, 25 bp, Homo sapien
tacagtgagaagatagcagtctgca

SEQ ID NO: 439103 - DNA, 25 bp, Homo sapien
tgccctataaaaggtaccccagaga

SEQ ID NO: 439104 - DNA, 25 bp, Homo sapien
tggaatgcttgtgtacccgccaaaa

SEQ ID NO: 439105 - DNA, 25 bp, Homo sapien
tccaccatgggaaagtacagtgaga

SEQ ID NO: 439106 - DNA, 25 bp, Homo sapien
tgtggctacaccaagatgggaccac

SEQ ID NO: 439107 - DNA, 25 bp, Homo sapien
gtggctacaccaagatgggaccaca

SEQ ID NO: 439108 - DNA, 25 bp, Homo sapien
tggctacaccaagatgggaccacag

SEQ ID NO: 439109 - DNA, 25 bp, Homo sapien
tcatggctttgcaatgaggaaggac

SEQ ID NO: 439110 - DNA, 25 bp, Homo sapien
gaaggactgtgagttgttcttctgc

SEQ ID NO: 439111 - DNA, 25 bp, Homo sapien
tttgcaatgaggaaggactgtgagt

SEQ ID NO: 439112 - DNA, 25 bp, Homo sapien
aggactgtgagttgttcttctgctc

SEQ ID NO: 439113 - DNA, 25 bp, Homo sapien
atggggcagtccacgttctctgcac

SEQ ID NO: 439114 - DNA, 25 bp, Homo sapien
catggggcagtccacgttctctgca

SEQ ID NO: 439115 - DNA, 25 bp, Homo sapien
tggggcagtccacgttctctgcacc

SEQ ID NO: 439116 - DNA, 25 bp, Homo sapien
gctatttagatagcgtagctttaaa

SEQ ID NO: 439117 - DNA, 25 bp, Homo sapien
tttagatagcgtagctttaaagtgc

SEQ ID NO: 439118 - DNA, 25 bp, Homo sapien
agatagcgtagctttaaagtgctgc

SEQ ID NO: 439119 - DNA, 25 bp, Homo sapien
tatttagatagcgtagctttaaagt

SEQ ID NO: 439120 - DNA, 25 bp, Homo sapien
agataagtacaacagaatatctcgg

SEQ ID NO: 439121 - DNA, 25 bp, Homo sapien
ataagtacaacagaatatctcggga

SEQ ID NO: 439122 - DNA, 25 bp, Homo sapien
gataagtacaacagaatatctcggg

SEQ ID NO: 439123 - DNA, 25 bp, Homo sapien
aaagggtcaccttctagtgggcgcg

SEQ ID NO: 439124 - DNA, 25 bp, Homo sapien
caatctacgaaaatgcggctgggac

SEQ ID NO: 439125 - DNA, 25 bp, Homo sapien
cattcttggtcccacgctgagcaga

SEQ ID NO: 439126 - DNA, 25 bp, Homo sapien
gaaacccggctactgtgtggtccga

SEQ ID NO: 439127 - DNA, 25 bp, Homo sapien
tgagttctctgtcccctttatacac

SEQ ID NO: 439128 - DNA, 25 bp, Homo sapien
gagttctctgtcccctttatacaca

SEQ ID NO: 439129 - DNA, 25 bp, Homo sapien
cctgagttctctgtcccctttatac

SEQ ID NO: 439130 - DNA, 25 bp, Homo sapien
ctgagttctctgtcccctttataca

SEQ ID NO: 439131 - DNA, 25 bp, Homo sapien
actgaccctgataccttgtctcagt

SEQ ID NO: 439132 - DNA, 25 bp, Homo sapien
accctgataccttgtctcagtcttg

SEQ ID NO: 439133 - DNA, 25 bp, Homo sapien
tcagtcttgactatcaccttcctcc

SEQ ID NO: 439134 - DNA, 25 bp, Homo sapien
tgaccctgataccttgtctcagtct

SEQ ID NO: 439135 - DNA, 25 bp, Homo sapien
gggtctttctccatagacagggagc

SEQ ID NO: 439136 - DNA, 25 bp, Homo sapien
ttttcttgggtctttctccatagac

SEQ ID NO: 439137 - DNA, 25 bp, Homo sapien
gtctttctccatagacagggagcat

SEQ ID NO: 439138 - DNA, 25 bp, Homo sapien
ttgggtctttctccatagacaggga

SEQ ID NO: 439139 - DNA, 25 bp, Homo sapien
ctgagtgttcccaaacgcccctgcc

SEQ ID NO: 439140 - DNA, 25 bp, Homo sapien
tcagggcaagacagcatgtgaacac

SEQ ID NO: 439141 - DNA, 25 bp, Homo sapien
ctgacctcaggcgaaggagggggtt

SEQ ID NO: 439142 - DNA, 25 bp, Homo sapien
cctcaggcgaaggagggggttctca

SEQ ID NO: 439143 - DNA, 25 bp, Homo sapien
agcaccaatgtcccatggccctgga

SEQ ID NO: 439144 - DNA, 25 bp, Homo sapien
ctagggatatcttttatctcttcca

SEQ ID NO: 439145 - DNA, 25 bp, Homo sapien
ccctggatgcctttgtctagggata

SEQ ID NO: 439146 - DNA, 25 bp, Homo sapien
gcacagcaccaatgtcccatggccc

SEQ ID NO: 439147 - DNA, 25 bp, Homo sapien
cttatgtcttgtaatgtactaggac

SEQ ID NO: 439148 - DNA, 25 bp, Homo sapien
tgttcacataatctatgtctgtaca

SEQ ID NO: 439149 - DNA, 25 bp, Homo sapien
aattatctgagaaggccccatgttc

SEQ ID NO: 439150 - DNA, 25 bp, Homo sapien
ctgtacatggacagtgtatccaatt

SEQ ID NO: 439151 - DNA, 25 bp, Homo sapien
gacagacccgtctcagcttagcggt

SEQ ID NO: 439152 - DNA, 25 bp, Homo sapien
tataccgcccatcgcctttagggag

SEQ ID NO: 439153 - DNA, 25 bp, Homo sapien
gagtacccagttgccacaaaattag

SEQ ID NO: 439154 - DNA, 25 bp, Homo sapien
caatctggtcctgtgtataccgccc

SEQ ID NO: 439155 - DNA, 25 bp, Homo sapien
gaatcctatagcaacccaagaagtc

SEQ ID NO: 439156 - DNA, 25 bp, Homo sapien
cttgagaatcctatagcaacccaag

SEQ ID NO: 439157 - DNA, 25 bp, Homo sapien
cctatagcaacccaagaagtcttcc

SEQ ID NO: 439158 - DNA, 25 bp, Homo sapien
ggctcagactgaacacctgcatttc

SEQ ID NO: 439159 - DNA, 25 bp, Homo sapien
agcagcaccgggtctctgttggtca

SEQ ID NO: 439160 - DNA, 25 bp, Homo sapien
gcagcaccgggtctctgttggtcac

SEQ ID NO: 439161 - DNA, 25 bp, Homo sapien
tcatccctgttgccgacaccgcagc

SEQ ID NO: 439162 - DNA, 25 bp, Homo sapien
ccctgttgccgacaccgcagcagca

SEQ ID NO: 439163 - DNA, 25 bp, Homo sapien
cctgacaccagataccccctggatg

SEQ ID NO: 439164 - DNA, 25 bp, Homo sapien
tgacaccagataccccctggatgga

SEQ ID NO: 439165 - DNA, 25 bp, Homo sapien
gacaccagataccccctggatggag

SEQ ID NO: 439166 - DNA, 25 bp, Homo sapien
tccctgacaccagataccccctgga

SEQ ID NO: 439167 - DNA, 25 bp, Homo sapien
tgcggtaagaacaggctacatgctg

SEQ ID NO: 439168 - DNA, 25 bp, Homo sapien
tgagggctcaactccacaagtctct

SEQ ID NO: 439169 - DNA, 25 bp, Homo sapien
ttagggctcaaagtacagggttcca

SEQ ID NO: 439170 - DNA, 25 bp, Homo sapien
tcaacagtagagcatccctggacag

SEQ ID NO: 439171 - DNA, 25 bp, Homo sapien
cagcttgctcgttgtttgcagatcg

SEQ ID NO: 439172 - DNA, 25 bp, Homo sapien
gagaatacagcgttggcttggccaa

SEQ ID NO: 439173 - DNA, 25 bp, Homo sapien
tctgtggagaaatcaggttcaaccc

SEQ ID NO: 439174 - DNA, 25 bp, Homo sapien
ggaggcctcctttggtcatcagctt

SEQ ID NO: 439175 - DNA, 25 bp, Homo sapien
ccctcacactgctgccagaagggat

SEQ ID NO: 439176 - DNA, 25 bp, Homo sapien
ggaggaggaatgagaaacacctgtc

SEQ ID NO: 439177 - DNA, 25 bp, Homo sapien
cctcacactgctgccagaagggatc

SEQ ID NO: 439178 - DNA, 25 bp, Homo sapien
ggaggaatgagaaacacctgtcccc

SEQ ID NO: 439179 - DNA, 25 bp, Homo sapien
gagcatggtattctggggaggagct

SEQ ID NO: 439180 - DNA, 25 bp, Homo sapien
catgcacgacagcatctggcccttt

SEQ ID NO: 439181 - DNA, 25 bp, Homo sapien
tgacagcagcctgattgcatattgc

SEQ ID NO: 439182 - DNA, 25 bp, Homo sapien
tttgctgtataatgcaccacctggt

SEQ ID NO: 439183 - DNA, 25 bp, Homo sapien
cattccacgggaaccatttgctgta

SEQ ID NO: 439184 - DNA, 25 bp, Homo sapien
gctactgatggctctcccctttgtg

SEQ ID NO: 439185 - DNA, 25 bp, Homo sapien
ggaactattttatctctaaggagct

SEQ ID NO: 439186 - DNA, 25 bp, Homo sapien
gagcttttcatatatatcgttctca

SEQ ID NO: 439187 - DNA, 25 bp, Homo sapien
gaacaacacatattcttcacaaact

SEQ ID NO: 439188 - DNA, 25 bp, Homo sapien
atggacattgccagttcttccttgt

SEQ ID NO: 439189 - DNA, 25 bp, Homo sapien
tgggagcaggctcttttagatgcaa

SEQ ID NO: 439190 - DNA, 25 bp, Homo sapien
tgtgtgggagcaggctcttttagat

SEQ ID NO: 439191 - DNA, 25 bp, Homo sapien
tgtgggagcaggctcttttagatgc

SEQ ID NO: 439192 - DNA, 25 bp, Homo sapien
ggagcaggctcttttagatgcaaag

SEQ ID NO: 439193 - DNA, 25 bp, Homo sapien
aaatatcaaattgcctgaggttccc

SEQ ID NO: 439194 - DNA, 25 bp, Homo sapien
agtctcctactccagacctctcgtg

SEQ ID NO: 439195 - DNA, 25 bp, Homo sapien
tttccagaaatatcaaattgcctga

SEQ ID NO: 439196 - DNA, 25 bp, Homo sapien
tactccagacctctcgtgttcttcc

SEQ ID NO: 439197 - DNA, 25 bp, Homo sapien
aatttgctcttctacaacaatctaa

SEQ ID NO: 439198 - DNA, 25 bp, Homo sapien
tgtgcattcctcaaacacatcttct

SEQ ID NO: 439199 - DNA, 25 bp, Homo sapien
tttgctcttctacaacaatctaagt

SEQ ID NO: 439200 - DNA, 25 bp, Homo sapien
aggtttctctacatggatgtcctgt

SEQ ID NO: 439201 - DNA, 25 bp, Homo sapien
tcactggaagatagtagaccttatg

SEQ ID NO: 439202 - DNA, 25 bp, Homo sapien
tatttttgatcaccttgcctaatga

SEQ ID NO: 439203 - DNA, 25 bp, Homo sapien
ccttgcctaatgaagcaaacaagga

SEQ ID NO: 439204 - DNA, 25 bp, Homo sapien
tactattctcaattatcactggaag

SEQ ID NO: 439205 - DNA, 25 bp, Homo sapien
cacggatagagctgctgtggcttcc

SEQ ID NO: 439206 - DNA, 25 bp, Homo sapien
tcacggatagagctgctgtggcttc

SEQ ID NO: 439207 - DNA, 25 bp, Homo sapien
agaaatgagtgaggcgggaaattcc

SEQ ID NO: 439208 - DNA, 25 bp, Homo sapien
tctatatggaggtggttcaaatgct

SEQ ID NO: 439209 - DNA, 25 bp, Homo sapien
tatagtttgggtctccttaacagga

SEQ ID NO: 439210 - DNA, 25 bp, Homo sapien
caggagacttggacatttagcagga

SEQ ID NO: 439211 - DNA, 25 bp, Homo sapien
tctgtgttgtgttgggcagtgccac

SEQ ID NO: 439212 - DNA, 25 bp, Homo sapien
tctttgccactcaaaccatctccca

SEQ ID NO: 439213 - DNA, 25 bp, Homo sapien
atttgcaacccccagtgccatgctg

SEQ ID NO: 439214 - DNA, 25 bp, Homo sapien
cagtgccaccatggattgctgacca

SEQ ID NO: 439215 - DNA, 25 bp, Homo sapien
gaccaagtgacaaatgctgttctga

SEQ ID NO: 439216 - DNA, 25 bp, Homo sapien
taaggatgagcaggcctttgtccat

SEQ ID NO: 439217 - DNA, 25 bp, Homo sapien
caaaaagtgctcaatgggaaatgcc

SEQ ID NO: 439218 - DNA, 25 bp, Homo sapien
gaaatgcctacgtattctccccagt

SEQ ID NO: 439219 - DNA, 25 bp, Homo sapien
agtgatgagtggcaaatgacagtcc

SEQ ID NO: 439220 - DNA, 25 bp, Homo sapien
tgatgagtggcaaatgacagtccct

SEQ ID NO: 439221 - DNA, 25 bp, Homo sapien
gtgatgagtggcaaatgacagtccc

SEQ ID NO: 439222 - DNA, 25 bp, Homo sapien
gagtgatgagtggcaaatgacagtc

SEQ ID NO: 439223 - DNA, 25 bp, Homo sapien
aaaggcgtccctgacaggcgtcgtt

SEQ ID NO: 439224 - DNA, 25 bp, Homo sapien
aaagctgggtttgatgcgtctggaa

SEQ ID NO: 439225 - DNA, 25 bp, Homo sapien
tgtcgccctcacaggatgtcacctt

SEQ ID NO: 439226 - DNA, 25 bp, Homo sapien
ataactgctgctgtcgccctcacag

SEQ ID NO: 439227 - DNA, 25 bp, Homo sapien
cccaggccaggatatcgttgtacat

SEQ ID NO: 439228 - DNA, 25 bp, Homo sapien
catttcaatgatatcaggtgacagc

SEQ ID NO: 439229 - DNA, 25 bp, Homo sapien
gtgatcctcttagcacctgctctgt

SEQ ID NO: 439230 - DNA, 25 bp, Homo sapien
ccctgccccaaacatttcaatgata

SEQ ID NO: 439231 - DNA, 25 bp, Homo sapien
ttctactttgttcagagggataatg

SEQ ID NO: 439232 - DNA, 25 bp, Homo sapien
tcattcttccgttctctcctctctg

SEQ ID NO: 439233 - DNA, 25 bp, Homo sapien
atcattcttccgttctctcctctct

SEQ ID NO: 439234 - DNA, 25 bp, Homo sapien
catcattcttccgttctctcctctc

SEQ ID NO: 439235 - DNA, 25 bp, Homo sapien
ttgggtacagaaggcagattgatgc

SEQ ID NO: 439236 - DNA, 25 bp, Homo sapien
gatgctgctggtgtggaatttcctg

SEQ ID NO: 439237 - DNA, 25 bp, Homo sapien
cctgggctccaagttttgatccctc

SEQ ID NO: 439238 - DNA, 25 bp, Homo sapien
tgatccctcagcattgggtacagaa

SEQ ID NO: 439239 - DNA, 25 bp, Homo sapien
ctaaatgtaaggctctcttcctgca

SEQ ID NO: 439240 - DNA, 25 bp, Homo sapien
aatgtaaggctctcttcctgcatca

SEQ ID NO: 439241 - DNA, 25 bp, Homo sapien
atgtaaggctctcttcctgcatcat

SEQ ID NO: 439242 - DNA, 25 bp, Homo sapien
aaatgtaaggctctcttcctgcatc

SEQ ID NO: 439243 - DNA, 25 bp, Homo sapien
gatgggttaaccagagaaccaggac

SEQ ID NO: 439244 - DNA, 25 bp, Homo sapien
tgaacattcccatgtccaagtttgt

SEQ ID NO: 439245 - DNA, 25 bp, Homo sapien
ctcagatgggttaaccagagaacca

SEQ ID NO: 439246 - DNA, 25 bp, Homo sapien
ctgaacattcccatgtccaagtttg

SEQ ID NO: 439247 - DNA, 25 bp, Homo sapien
atcacagagaacaaatctgtctcct

SEQ ID NO: 439248 - DNA, 25 bp, Homo sapien
ctaagaatcacagagaacaaatctg

SEQ ID NO: 439249 - DNA, 25 bp, Homo sapien
tgctgttctccagagggtagttgga

SEQ ID NO: 439250 - DNA, 25 bp, Homo sapien
gctgttctccagagggtagttggac

SEQ ID NO: 439251 - DNA, 25 bp, Homo sapien
catcagagaggcctggattcaagtc

SEQ ID NO: 439252 - DNA, 25 bp, Homo sapien
caagacagcctgtgatggttcctgc

SEQ ID NO: 439253 - DNA, 25 bp, Homo sapien
gacattacacttagagggatccaca

SEQ ID NO: 439254 - DNA, 25 bp, Homo sapien
ccattctgtactgttgcaggctgaa

SEQ ID NO: 439255 - DNA, 25 bp, Homo sapien
agtaactctgtagcagtcatcgaca

SEQ ID NO: 439256 - DNA, 25 bp, Homo sapien
tctgtagcagtcatcgacagtaggt

SEQ ID NO: 439257 - DNA, 25 bp, Homo sapien
ctgaattcttctagagtaactctgt

SEQ ID NO: 439258 - DNA, 25 bp, Homo sapien
tagcagtcatcgacagtaggtccca

SEQ ID NO: 439259 - DNA, 25 bp, Homo sapien
tgtggctccagagtgaactcctcac

SEQ ID NO: 439260 - DNA, 25 bp, Homo sapien
ccactgtggctccagagtgaactcc

SEQ ID NO: 439261 - DNA, 25 bp, Homo sapien
actgtggctccagagtgaactcctc

SEQ ID NO: 439262 - DNA, 25 bp, Homo sapien
cggccactgtggctccagagtgaac

SEQ ID NO: 439263 - DNA, 25 bp, Homo sapien
ttttcttccccggtgtagacatgtg

SEQ ID NO: 439264 - DNA, 25 bp, Homo sapien
gggttgattcctggagtgatttagc

SEQ ID NO: 439265 - DNA, 25 bp, Homo sapien
catgtgcttcagaagacgcccaggg

SEQ ID NO: 439266 - DNA, 25 bp, Homo sapien
tagtgttatggaggaggttttcttc

SEQ ID NO: 439267 - DNA, 25 bp, Homo sapien
tagccactatgctgaccagctgtcc

SEQ ID NO: 439268 - DNA, 25 bp, Homo sapien
aaatcgggacccacactctaacctg

SEQ ID NO: 439269 - DNA, 25 bp, Homo sapien
cctatagccactatgctgaccagct

SEQ ID NO: 439270 - DNA, 25 bp, Homo sapien
cagttctgggaaatcgggacccaca

SEQ ID NO: 439271 - DNA, 25 bp, Homo sapien
tggcacctgccacttggagctggaa

SEQ ID NO: 439272 - DNA, 25 bp, Homo sapien
tgagtgtatacagggacattggagt

SEQ ID NO: 439273 - DNA, 25 bp, Homo sapien
cacctgagtgtatacagggacattg

SEQ ID NO: 439274 - DNA, 25 bp, Homo sapien
tgtgcacctgagtgtatacagggac

SEQ ID NO: 439275 - DNA, 25 bp, Homo sapien
tgccatatgcaaggcgcactggtgt

SEQ ID NO: 439276 - DNA, 25 bp, Homo sapien
agagcagttgccatatgcaaggcgc

SEQ ID NO: 439277 - DNA, 25 bp, Homo sapien
tatgcaaggcgcactggtgtaaggt

SEQ ID NO: 439278 - DNA, 25 bp, Homo sapien
cactggtgtaaggtggaagtctccc

SEQ ID NO: 439279 - DNA, 25 bp, Homo sapien
gctttgtcagtttaatggattccac

SEQ ID NO: 439280 - DNA, 25 bp, Homo sapien
ctttgtcagtttaatggattccacc

SEQ ID NO: 439281 - DNA, 25 bp, Homo sapien
gagtacccaggatgacctaatagtc

SEQ ID NO: 439282 - DNA, 25 bp, Homo sapien
tacccaggatgacctaatagtcccg

SEQ ID NO: 439283 - DNA, 25 bp, Homo sapien
ctgagtacccaggatgacctaatag

SEQ ID NO: 439284 - DNA, 25 bp, Homo sapien
gtacccaggatgacctaatagtccc

SEQ ID NO: 439285 - DNA, 25 bp, Homo sapien
ctgtccccgagtgaccaaggcagct

SEQ ID NO: 439286 - DNA, 25 bp, Homo sapien
tgaccaaggcagctcagtctagagt

SEQ ID NO: 439287 - DNA, 25 bp, Homo sapien
ccgagtgaccaaggcagctcagtct

SEQ ID NO: 439288 - DNA, 25 bp, Homo sapien
caaggcagctcagtctagagtctag

SEQ ID NO: 439289 - DNA, 25 bp, Homo sapien
ggcctggcgcagaagcaccctttgt

SEQ ID NO: 439290 - DNA, 25 bp, Homo sapien
tggtgactcccctatctgcggccga

SEQ ID NO: 439291 - DNA, 25 bp, Homo sapien
atctgcggccgaccccgagtcccca

SEQ ID NO: 439292 - DNA, 25 bp, Homo sapien
aggtggtgactcccctatctgcggc

SEQ ID NO: 439293 - DNA, 25 bp, Homo sapien
tatctgcggccgaccccgagtcccc

SEQ ID NO: 439294 - DNA, 25 bp, Homo sapien
ggcttgtcccgagccagctctgaag

SEQ ID NO: 439295 - DNA, 25 bp, Homo sapien
caggcttgtcccgagccagctctga

SEQ ID NO: 439296 - DNA, 25 bp, Homo sapien
ttccatcccaggcttgtcccgagcc

SEQ ID NO: 439297 - DNA, 25 bp, Homo sapien
catcccaggcttgtcccgagccagc

SEQ ID NO: 439298 - DNA, 25 bp, Homo sapien
ccaccagaaacccacttgtgtcggt

SEQ ID NO: 439299 - DNA, 25 bp, Homo sapien
gagttggagggaagcgcttcccacc

SEQ ID NO: 439300 - DNA, 25 bp, Homo sapien
caaatgatcaaagtgatagcgtttt

SEQ ID NO: 439301 - DNA, 25 bp, Homo sapien
tagcgttttctatgttacgtgtctg

SEQ ID NO: 439302 - DNA, 25 bp, Homo sapien
tgactatgctgctgtgcatatctca

SEQ ID NO: 439303 - DNA, 25 bp, Homo sapien
cagctgactatgctgctgtgcatat

SEQ ID NO: 439304 - DNA, 25 bp, Homo sapien
gctgactatgctgctgtgcatatct

SEQ ID NO: 439305 - DNA, 25 bp, Homo sapien
cacagctgactatgctgctgtgcat

SEQ ID NO: 439306 - DNA, 25 bp, Homo sapien
tgacacggagttcccttcccatgag

SEQ ID NO: 439307 - DNA, 25 bp, Homo sapien
agcatggacagtgcaaaggcagtca

SEQ ID NO: 439308 - DNA, 25 bp, Homo sapien
gcatggacagtgcaaaggcagtcat

SEQ ID NO: 439309 - DNA, 25 bp, Homo sapien
gagcatggacagtgcaaaggcagtc

SEQ ID NO: 439310 - DNA, 25 bp, Homo sapien
tggtcttcgtctccagtgttagcca

SEQ ID NO: 439311 - DNA, 25 bp, Homo sapien
tggccagggtccatcttcagcagtt

SEQ ID NO: 439312 - DNA, 25 bp, Homo sapien
tcttggtcttcgtctccagtgttag

SEQ ID NO: 439313 - DNA, 25 bp, Homo sapien
ttcagcagttgtggattgaggcctt

SEQ ID NO: 439314 - DNA, 25 bp, Homo sapien
ggagcagaaatagcctgctcatatg

SEQ ID NO: 439315 - DNA, 25 bp, Homo sapien
gctcatatggacatggaagcaagat

SEQ ID NO: 439316 - DNA, 25 bp, Homo sapien
gcaagatgtccttcaggcccctaaa

SEQ ID NO: 439317 - DNA, 25 bp, Homo sapien
ctcttcgcctgcagatagctgggca

SEQ ID NO: 439318 - DNA, 25 bp, Homo sapien
tttgagctcaggcacatgacttggc

SEQ ID NO: 439319 - DNA, 25 bp, Homo sapien
gacttccagcagtgagagccaagga

SEQ ID NO: 439320 - DNA, 25 bp, Homo sapien
ttgtacatagaacttaatagcagcc

SEQ ID NO: 439321 - DNA, 25 bp, Homo sapien
gaaggactgagtgtaaatcccaggc

SEQ ID NO: 439322 - DNA, 25 bp, Homo sapien
ggccctggcaacagcccattattta

SEQ ID NO: 439323 - DNA, 25 bp, Homo sapien
cagtgttcctggcagtaaattgtaa

SEQ ID NO: 439324 - DNA, 25 bp, Homo sapien
gagtcgttgttagaggagggtgtga

SEQ ID NO: 439325 - DNA, 25 bp, Homo sapien
gtagtcgggacgaaagaggccagga

SEQ ID NO: 439326 - DNA, 25 bp, Homo sapien
gaccagggacagcaggcgccaccct

SEQ ID NO: 439327 - DNA, 25 bp, Homo sapien
caggcgccaccctgagcaggatcaa

SEQ ID NO: 439328 - DNA, 25 bp, Homo sapien
ggaccagggacagcaggcgccaccc

SEQ ID NO: 439329 - DNA, 25 bp, Homo sapien
ggcgccaccctgagcaggatcaagg

SEQ ID NO: 439330 - DNA, 25 bp, Homo sapien
tccttttcactctgtaggttgcata

SEQ ID NO: 439331 - DNA, 25 bp, Homo sapien
ggttgcatatgtcacctgcactgtg

SEQ ID NO: 439332 - DNA, 25 bp, Homo sapien
ggtggaagccccgtctgtgccctgt

SEQ ID NO: 439333 - DNA, 25 bp, Homo sapien
tggtcagtcgcctggtgaccccagg

SEQ ID NO: 439334 - DNA, 25 bp, Homo sapien
attgtgagtagtgccaaaataaact

SEQ ID NO: 439335 - DNA, 25 bp, Homo sapien
tgtgagtagtgccaaaataaactta

SEQ ID NO: 439336 - DNA, 25 bp, Homo sapien
agtagtgccaaaataaacttacgtg

SEQ ID NO: 439337 - DNA, 25 bp, Homo sapien
tgagtagtgccaaaataaacttacg

SEQ ID NO: 439338 - DNA, 25 bp, Homo sapien
cctcaccccatgacaggccccagtg

SEQ ID NO: 439339 - DNA, 25 bp, Homo sapien
ccctcccctcaccccatgacaggcc

SEQ ID NO: 439340 - DNA, 25 bp, Homo sapien
tcccctcaccccatgacaggcccca

SEQ ID NO: 439341 - DNA, 25 bp, Homo sapien
ccctcaccccatgacaggccccagt

SEQ ID NO: 439342 - DNA, 25 bp, Homo sapien
ggtgaaggctgtttgtgcttgacct

SEQ ID NO: 439343 - DNA, 25 bp, Homo sapien
cctgggagtttgtgcttggccaggg

SEQ ID NO: 439344 - DNA, 25 bp, Homo sapien
tgaaggctgtttgtgcttgacctgg

SEQ ID NO: 439345 - DNA, 25 bp, Homo sapien
tgcttggccagggagcttcaccagg

SEQ ID NO: 439346 - DNA, 25 bp, Homo sapien
atgtatgctgtgagtcccagcttct

SEQ ID NO: 439347 - DNA, 25 bp, Homo sapien
aaaaacaagtaagtatgatagtagc

SEQ ID NO: 439348 - DNA, 25 bp, Homo sapien
tatattatatgctcaccattttgat

SEQ ID NO: 439349 - DNA, 25 bp, Homo sapien
aatttttatgtatgctgtgagtccc

SEQ ID NO: 439350 - DNA, 25 bp, Homo sapien
gcaactcagcagtaacgggacacgg

SEQ ID NO: 439351 - DNA, 25 bp, Homo sapien
gacacaagaacataggagtctccaa

SEQ ID NO: 439352 - DNA, 25 bp, Homo sapien
cagaatgggatgacaggcaactcag

SEQ ID NO: 439353 - DNA, 25 bp, Homo sapien
tgctgttgagctccccgggtttgaa

SEQ ID NO: 439354 - DNA, 25 bp, Homo sapien
tgccatcaagagtgatagcccagat

SEQ ID NO: 439355 - DNA, 25 bp, Homo sapien
atgttgccatcaagagtgatagccc

SEQ ID NO: 439356 - DNA, 25 bp, Homo sapien
tgttgccatcaagagtgatagccca

SEQ ID NO: 439357 - DNA, 25 bp, Homo sapien
gttgccatcaagagtgatagcccag

SEQ ID NO: 439358 - DNA, 25 bp, Homo sapien
ttagcactggatgccggggtttcca

SEQ ID NO: 439359 - DNA, 25 bp, Homo sapien
agcactggatgccggggtttccatg

SEQ ID NO: 439360 - DNA, 25 bp, Homo sapien
ctgttagcactggatgccggggttt

SEQ ID NO: 439361 - DNA, 25 bp, Homo sapien
cactggatgccggggtttccatggt

SEQ ID NO: 439362 - DNA, 25 bp, Homo sapien
acagcagatgcaactggcggggctg

SEQ ID NO: 439363 - DNA, 25 bp, Homo sapien
gcggggctgaaggtcagtgggaact

SEQ ID NO: 439364 - DNA, 25 bp, Homo sapien
aactggcggggctgaaggtcagtgg

SEQ ID NO: 439365 - DNA, 25 bp, Homo sapien
gggctgaaggtcagtgggaactcca

SEQ ID NO: 439366 - DNA, 25 bp, Homo sapien
ctgagcaaggacagagggaagaagg

SEQ ID NO: 439367 - DNA, 25 bp, Homo sapien
gatttggagagtcgttgtgaccgtg

SEQ ID NO: 439368 - DNA, 25 bp, Homo sapien
tgatttggagagtcgttgtgaccgt

SEQ ID NO: 439369 - DNA, 25 bp, Homo sapien
tgtggagtcattaatatggtcagtg

SEQ ID NO: 439370 - DNA, 25 bp, Homo sapien
tggtggacccaggattgattttgtg

SEQ ID NO: 439371 - DNA, 25 bp, Homo sapien
gcttcaggtaacagaatgtttggtg

SEQ ID NO: 439372 - DNA, 25 bp, Homo sapien
gattttgtggagtcattaatatggt

SEQ ID NO: 439373 - DNA, 25 bp, Homo sapien
tgtgaggacagggatgtatctaatg

SEQ ID NO: 439374 - DNA, 25 bp, Homo sapien
taatgcatctaactccaccttctac

SEQ ID NO: 439375 - DNA, 25 bp, Homo sapien
tctgagcagttatcaggagaagatg

SEQ ID NO: 439376 - DNA, 25 bp, Homo sapien
cagggatgtatctaatgcatctaac

SEQ ID NO: 439377 - DNA, 25 bp, Homo sapien
cttctttcggctctcactccatctc

SEQ ID NO: 439378 - DNA, 25 bp, Homo sapien
tcttagcaccttggcagtccttgtc

SEQ ID NO: 439379 - DNA, 25 bp, Homo sapien
ctgcccggagcaacattgggtgaca

SEQ ID NO: 439380 - DNA, 25 bp, Homo sapien
attgggtgacagaacttcttagcac

SEQ ID NO: 439381 - DNA, 25 bp, Homo sapien
cccggagcaacattgggtgacagaa

SEQ ID NO: 439382 - DNA, 25 bp, Homo sapien
tctttgagggttagtacagaccaca

SEQ ID NO: 439383 - DNA, 25 bp, Homo sapien
taggttttgagtgcccagatgccca

SEQ ID NO: 439384 - DNA, 25 bp, Homo sapien
cacttggctattcagggagtttcca

SEQ ID NO: 439385 - DNA, 25 bp, Homo sapien
ccgtttggataatgagggagcctga

SEQ ID NO: 439386 - DNA, 25 bp, Homo sapien
aagggaactggctttattatggtca

SEQ ID NO: 439387 - DNA, 25 bp, Homo sapien
tagtcagctgtgtggtgcattctca

SEQ ID NO: 439388 - DNA, 25 bp, Homo sapien
ttgctcagcagcgtagtcagctgtg

SEQ ID NO: 439389 - DNA, 25 bp, Homo sapien
tagggggagttctcaacaaatgtca

SEQ ID NO: 439390 - DNA, 25 bp, Homo sapien
ctgcaccgggccttggagaaggaca

SEQ ID NO: 439391 - DNA, 25 bp, Homo sapien
agctgtctcggtcactcaggaggca

SEQ ID NO: 439392 - DNA, 25 bp, Homo sapien
gcagttggcagagtattcgtggtca

SEQ ID NO: 439393 - DNA, 25 bp, Homo sapien
gaggtgacccgtggtcagcagggtc

SEQ ID NO: 439394 - DNA, 25 bp, Homo sapien
ctggatcctgctcaacccaacacct

SEQ ID NO: 439395 - DNA, 25 bp, Homo sapien
cacctgccttctctcggtccctggg

SEQ ID NO: 439396 - DNA, 25 bp, Homo sapien
tcctgctcaacccaacacctgcctt

SEQ ID NO: 439397 - DNA, 25 bp, Homo sapien
acctgccttctctcggtccctgggt

SEQ ID NO: 439398 - DNA, 25 bp, Homo sapien
tgaagtgtgaatgccaccttttctg

SEQ ID NO: 439399 - DNA, 25 bp, Homo sapien
tgcaaacttgggacgtttactgagg

SEQ ID NO: 439400 - DNA, 25 bp, Homo sapien
tactgagggacactgaatagttggg

SEQ ID NO: 439401 - DNA, 25 bp, Homo sapien
tctagcagcgtcttgaaacagctgg

SEQ ID NO: 439402 - DNA, 25 bp, Homo sapien
ctcagatgcttatgtggtatagtgt

SEQ ID NO: 439403 - DNA, 25 bp, Homo sapien
cataaaaggctcccctaaagcttca

SEQ ID NO: 439404 - DNA, 25 bp, Homo sapien
ggtatagtgtataccaatccaattc

SEQ ID NO: 439405 - DNA, 25 bp, Homo sapien
gcctgcctgttaaacccatttttga

SEQ ID NO: 439406 - DNA, 25 bp, Homo sapien
tgaggctcagattgggtaacacggc

SEQ ID NO: 439407 - DNA, 25 bp, Homo sapien
ttgcacaagagacaaacctgaggct

SEQ ID NO: 439408 - DNA, 25 bp, Homo sapien
gagaacgttcctgtatccttgattc

SEQ ID NO: 439409 - DNA, 25 bp, Homo sapien
tctattccctgtcctaagtttgcac

SEQ ID NO: 439410 - DNA, 25 bp, Homo sapien
aaaagctattttccgatgcccatca

SEQ ID NO: 439411 - DNA, 25 bp, Homo sapien
cacatccaccttatgctcagtgagt

SEQ ID NO: 439412 - DNA, 25 bp, Homo sapien
caccacaggagcgtatcttcaacac

SEQ ID NO: 439413 - DNA, 25 bp, Homo sapien
tatcttcaacacacgcccttgatgg

SEQ ID NO: 439414 - DNA, 25 bp, Homo sapien
tctcacagaggttgttatccagacc

SEQ ID NO: 439415 - DNA, 25 bp, Homo sapien
ttatccagaccattggccaggtcct

SEQ ID NO: 439416 - DNA, 25 bp, Homo sapien
caggttctcacagaggttgttatcc

SEQ ID NO: 439417 - DNA, 25 bp, Homo sapien
ttgttatccagaccattggccaggt

SEQ ID NO: 439418 - DNA, 25 bp, Homo sapien
acccatggtatggccacagcggcca

SEQ ID NO: 439419 - DNA, 25 bp, Homo sapien
tacacccatggtatggccacagcgg

SEQ ID NO: 439420 - DNA, 25 bp, Homo sapien
gatacacccatggtatggccacagc

SEQ ID NO: 439421 - DNA, 25 bp, Homo sapien
atttcttcttagatacacccatggt

SEQ ID NO: 439422 - DNA, 25 bp, Homo sapien
ggtgtgaaccacctcacccagctaa

SEQ ID NO: 439423 - DNA, 25 bp, Homo sapien
tgtgaaccacctcacccagctaaat

SEQ ID NO: 439424 - DNA, 25 bp, Homo sapien
gtgaaccacctcacccagctaaatt

SEQ ID NO: 439425 - DNA, 25 bp, Homo sapien
caggtgtgaaccacctcacccagct

SEQ ID NO: 439426 - DNA, 25 bp, Homo sapien
tgttcatcgtaaacaaaattctagg

SEQ ID NO: 439427 - DNA, 25 bp, Homo sapien
ccgttggcctaatgcagagggaata

SEQ ID NO: 439428 - DNA, 25 bp, Homo sapien
gagactcttacccaacattctgttc

SEQ ID NO: 439429 - DNA, 25 bp, Homo sapien
actgtttcagctcaagagactctta

SEQ ID NO: 439430 - DNA, 25 bp, Homo sapien
caaccgtggtatgggttgtatcagg

SEQ ID NO: 439431 - DNA, 25 bp, Homo sapien
aggaggggaaggcaaccgtggtatg

SEQ ID NO: 439432 - DNA, 25 bp, Homo sapien
ggcaaccgtggtatgggttgtatca

SEQ ID NO: 439433 - DNA, 25 bp, Homo sapien
aaggcaaccgtggtatgggttgtat

SEQ ID NO: 439434 - DNA, 25 bp, Homo sapien
ggcagggacgtctttgcatctctag

SEQ ID NO: 439435 - DNA, 25 bp, Homo sapien
tagctcatgcttccttgtagtccag

SEQ ID NO: 439436 - DNA, 25 bp, Homo sapien
gaattatgtgctgtaaatgatcggc

SEQ ID NO: 439437 - DNA, 25 bp, Homo sapien
tgttctcaaactacgctgccttccg

SEQ ID NO: 439438 - DNA, 25 bp, Homo sapien
gatgaatccgtctttgtgctccacg

SEQ ID NO: 439439 - DNA, 25 bp, Homo sapien
tccacggctcgtaccttgatcaggc

SEQ ID NO: 439440 - DNA, 25 bp, Homo sapien
taagtccgggccttcgtatcactag

SEQ ID NO: 439441 - DNA, 25 bp, Homo sapien
taaaacatgacaagcaatggctcct

SEQ ID NO: 439442 - DNA, 25 bp, Homo sapien
gcactggtgattccaactgcacaaa

SEQ ID NO: 439443 - DNA, 25 bp, Homo sapien
caaggactggacgtattttgttgcc

SEQ ID NO: 439444 - DNA, 25 bp, Homo sapien
gcctgaaggtgaacctcgaaacttg

SEQ ID NO: 439445 - DNA, 25 bp, Homo sapien
gccaggtataattgccagtcagtct

SEQ ID NO: 439446 - DNA, 25 bp, Homo sapien
cagtagagtctctagccaaaagtga

SEQ ID NO: 439447 - DNA, 25 bp, Homo sapien
gattgaggtcccttcatctctgctg

SEQ ID NO: 439448 - DNA, 25 bp, Homo sapien
gctgcacatatatcatcactgagtc

SEQ ID NO: 439449 - DNA, 25 bp, Homo sapien
gctctaacattaagaacagctgcac

SEQ ID NO: 439450 - DNA, 25 bp, Homo sapien
tgtgtgtgcgcttaaatgctagtct

SEQ ID NO: 439451 - DNA, 25 bp, Homo sapien
ctgttaccagttctcaggagtaggc

SEQ ID NO: 439452 - DNA, 25 bp, Homo sapien
tgcggcaacccagtacacagataag

SEQ ID NO: 439453 - DNA, 25 bp, Homo sapien
taggtctctagctcagcacatctgc

SEQ ID NO: 439454 - DNA, 25 bp, Homo sapien
agaccgtgtcccctcaaatctttat

SEQ ID NO: 439455 - DNA, 25 bp, Homo sapien
tgttgcatgtagctataccttactc

SEQ ID NO: 439456 - DNA, 25 bp, Homo sapien
atgattagtgacttggagcctttga

SEQ ID NO: 439457 - DNA, 25 bp, Homo sapien
gaaaatttgcacttaggatgatgag

SEQ ID NO: 439458 - DNA, 25 bp, Homo sapien
gacaagatttgtgttctaggcagag

SEQ ID NO: 439459 - DNA, 25 bp, Homo sapien
ttgtagagtatacaaatttcaggca

SEQ ID NO: 439460 - DNA, 25 bp, Homo sapien
cagggcatgactgttgagggtttca

SEQ ID NO: 439461 - DNA, 25 bp, Homo sapien
taggcagaggcaagagtgtaaatca

SEQ ID NO: 439462 - DNA, 25 bp, Homo sapien
tgccaggaaaaagtagctgtgcttt

SEQ ID NO: 439463 - DNA, 25 bp, Homo sapien
acaaaaatttcttacgttcttgcag

SEQ ID NO: 439464 - DNA, 25 bp, Homo sapien
ttcttacgttcttgcagtttgagag

SEQ ID NO: 439465 - DNA, 25 bp, Homo sapien
aatttcttacgttcttgcagtttga

SEQ ID NO: 439466 - DNA, 25 bp, Homo sapien
ggaatattagttaacttggacctca

SEQ ID NO: 439467 - DNA, 25 bp, Homo sapien
ttggacctcaacgaaagatgctctg

SEQ ID NO: 439468 - DNA, 25 bp, Homo sapien
tatttaattaccagtgcgatagctc

SEQ ID NO: 439469 - DNA, 25 bp, Homo sapien
tcttctcaacagacattagattgta

SEQ ID NO: 439470 - DNA, 25 bp, Homo sapien
ccgcacgtggccttgattcctcaga

SEQ ID NO: 439471 - DNA, 25 bp, Homo sapien
tattgcatgtacaatgagaccagga

SEQ ID NO: 439472 - DNA, 25 bp, Homo sapien
tgtgaaatagctctaccagtactgt

SEQ ID NO: 439473 - DNA, 25 bp, Homo sapien
gaaacatttctacagtcgtgtgaca

SEQ ID NO: 439474 - DNA, 25 bp, Homo sapien
aatggtagtgcagagaggactgacc

SEQ ID NO: 439475 - DNA, 25 bp, Homo sapien
tagatgactctgtacgtgccaagga

SEQ ID NO: 439476 - DNA, 25 bp, Homo sapien
gaccctctgctaaatgtggcgagaa

SEQ ID NO: 439477 - DNA, 25 bp, Homo sapien
caaatggactgaccgcagaactggc

SEQ ID NO: 439478 - DNA, 25 bp, Homo sapien
cattttaatgccgaatgcacaagac

SEQ ID NO: 439479 - DNA, 25 bp, Homo sapien
ccgaatgcacaagactgagaggcat

SEQ ID NO: 439480 - DNA, 25 bp, Homo sapien
tgataaaatgatagccagtgaattg

SEQ ID NO: 439481 - DNA, 25 bp, Homo sapien
tgatagccagtgaattgctgaaaca

SEQ ID NO: 439482 - DNA, 25 bp, Homo sapien
tgttcacagtaaggatataccctgc

SEQ ID NO: 439483 - DNA, 25 bp, Homo sapien
ctggtgtgtggtaaccgcgctgtta

SEQ ID NO: 439484 - DNA, 25 bp, Homo sapien
aacagcagctcattctgtggacagt

SEQ ID NO: 439485 - DNA, 25 bp, Homo sapien
taaccgcgctgttaaagctcttttg

SEQ ID NO: 439486 - DNA, 25 bp, Homo sapien
aacagggcttcgtgttcatcacatc

SEQ ID NO: 439487 - DNA, 25 bp, Homo sapien
ggtgcaacagggcttcgtgttcatc

SEQ ID NO: 439488 - DNA, 25 bp, Homo sapien
gggcttcgtgttcatcacatctgcc

SEQ ID NO: 439489 - DNA, 25 bp, Homo sapien
agaggtgcaacagggcttcgtgttc

SEQ ID NO: 439490 - DNA, 25 bp, Homo sapien
gaagggatgtggtgtagacctctaa

SEQ ID NO: 439491 - DNA, 25 bp, Homo sapien
taaagcaaaaccagttgtgatggct

SEQ ID NO: 439492 - DNA, 25 bp, Homo sapien
ggtcgcacagaccaacgtaaatgtc

SEQ ID NO: 439493 - DNA, 25 bp, Homo sapien
gaacttattcaagaacaggcttgga

SEQ ID NO: 439494 - DNA, 25 bp, Homo sapien
aactgttgtgggctaaactgcgtcc

SEQ ID NO: 439495 - DNA, 25 bp, Homo sapien
tgcgtccctcaagcagatatgttaa

SEQ ID NO: 439496 - DNA, 25 bp, Homo sapien
gacagataaagtagctgccacccag

SEQ ID NO: 439497 - DNA, 25 bp, Homo sapien
cagcagaaaataagcccacgacgga

SEQ ID NO: 439498 - DNA, 25 bp, Homo sapien
gcccagagtgggtaacccgtggcca

SEQ ID NO: 439499 - DNA, 25 bp, Homo sapien
cccagagtgggtaacccgtggccat

SEQ ID NO: 439500 - DNA, 25 bp, Homo sapien
cagagtgggtaacccgtggcccaga

SEQ ID NO: 439501 - DNA, 25 bp, Homo sapien
ctgtgacccagagtgggtaacccgt

SEQ ID NO: 439502 - DNA, 25 bp, Homo sapien
cccctttagtgtgactggctacctc

SEQ ID NO: 439503 - DNA, 25 bp, Homo sapien
aagaagtccccctttagtgtgactg

SEQ ID NO: 439504 - DNA, 25 bp, Homo sapien
gtgactggctacctctttccagaca

SEQ ID NO: 439505 - DNA, 25 bp, Homo sapien
tagtgtgactggctacctctttcca

SEQ ID NO: 439506 - DNA, 25 bp, Homo sapien
aaaaaatcaatgatcgaatcagcct

SEQ ID NO: 439507 - DNA, 25 bp, Homo sapien
aaatcaatgatcgaatcagcctctc

SEQ ID NO: 439508 - DNA, 25 bp, Homo sapien
ttatactcggaggaaaaacataagc

SEQ ID NO: 439509 - DNA, 25 bp, Homo sapien
caatgatcgaatcagcctctctaat

SEQ ID NO: 439510 - DNA, 25 bp, Homo sapien
ggtggtggaaaatctatgccatctg

SEQ ID NO: 439511 - DNA, 25 bp, Homo sapien
cgaccaactgagattctgagaaggc

SEQ ID NO: 439512 - DNA, 25 bp, Homo sapien
tctgtgctccaaggcgaccaactga

SEQ ID NO: 439513 - DNA, 25 bp, Homo sapien
cccgaggatggacagcctctgtgct

SEQ ID NO: 439514 - DNA, 25 bp, Homo sapien
tggtgacttcgtccctcacatgctt

SEQ ID NO: 439515 - DNA, 25 bp, Homo sapien
ggactctcacatagccagccctgtt

SEQ ID NO: 439516 - DNA, 25 bp, Homo sapien
acttcgtccctcacatgcttagtca

SEQ ID NO: 439517 - DNA, 25 bp, Homo sapien
ttaggactctcacatagccagccct

SEQ ID NO: 439518 - DNA, 25 bp, Homo sapien
tatcctccttgggtcttgtagaaga

SEQ ID NO: 439519 - DNA, 25 bp, Homo sapien
cttgggtcttgtagaagattcaggc

SEQ ID NO: 439520 - DNA, 25 bp, Homo sapien
tgatttttatcctccttgggtcttg

SEQ ID NO: 439521 - DNA, 25 bp, Homo sapien
gtcttgtagaagattcaggctcttg

SEQ ID NO: 439522 - DNA, 25 bp, Homo sapien
attttaatcacggctataatcctag

SEQ ID NO: 439523 - DNA, 25 bp, Homo sapien
aataattttaatcacggctataatc

SEQ ID NO: 439524 - DNA, 25 bp, Homo sapien
ttttaatcacggctataatcctagc

SEQ ID NO: 439525 - DNA, 25 bp, Homo sapien
taattttaatcacggctataatcct

SEQ ID NO: 439526 - DNA, 25 bp, Homo sapien
tgcaggcagtttgtgggctaaaagc

SEQ ID NO: 439527 - DNA, 25 bp, Homo sapien
tcttcggtagtgcaggcagtttgtg

SEQ ID NO: 439528 - DNA, 25 bp, Homo sapien
tcttcttcggtagtgcaggcagttt

SEQ ID NO: 439529 - DNA, 25 bp, Homo sapien
agtgcaggcagtttgtgggctaaaa

SEQ ID NO: 439530 - DNA, 25 bp, Homo sapien
caaaagcagagttgaacaattggtt

SEQ ID NO: 439531 - DNA, 25 bp, Homo sapien
ttaaggctaaccttaaatgacttga

SEQ ID NO: 439532 - DNA, 25 bp, Homo sapien
agcagagttgaacaattggtttcct

SEQ ID NO: 439533 - DNA, 25 bp, Homo sapien
taaggctaaccttaaatgacttgaa

SEQ ID NO: 439534 - DNA, 25 bp, Homo sapien
gtctctgcagggttgccgaccagag

SEQ ID NO: 439535 - DNA, 25 bp, Homo sapien
tgcagggttgccgaccagaggtatc

SEQ ID NO: 439536 - DNA, 25 bp, Homo sapien
cagggttgccgaccagaggtatcat

SEQ ID NO: 439537 - DNA, 25 bp, Homo sapien
ggttgccgaccagaggtatcatttt

SEQ ID NO: 439538 - DNA, 25 bp, Homo sapien
cgtttgacaggaaccaatatataac

SEQ ID NO: 439539 - DNA, 25 bp, Homo sapien
taggaatatgggacaacctgcagga

SEQ ID NO: 439540 - DNA, 25 bp, Homo sapien
ttcaaccacagtactaggaatatgg

SEQ ID NO: 439541 - DNA, 25 bp, Homo sapien
tcccacgctgctgtatgagctggcg

SEQ ID NO: 439542 - DNA, 25 bp, Homo sapien
tgctttatctattggttgcttctgg

SEQ ID NO: 439543 - DNA, 25 bp, Homo sapien
tagccttgctgctttatctattggt

SEQ ID NO: 439544 - DNA, 25 bp, Homo sapien
cagatactgctagttctacagtggg

SEQ ID NO: 439545 - DNA, 25 bp, Homo sapien
gggatgacagccagaaccggatgcc

SEQ ID NO: 439546 - DNA, 25 bp, Homo sapien
ttttggagttgagatcgaccttggg

SEQ ID NO: 439547 - DNA, 25 bp, Homo sapien
ttgagatcgaccttgggtctggata

SEQ ID NO: 439548 - DNA, 25 bp, Homo sapien
agttgagatcgaccttgggtctgga

SEQ ID NO: 439549 - DNA, 25 bp, Homo sapien
tggagttgagatcgaccttgggtct

SEQ ID NO: 439550 - DNA, 25 bp, Homo sapien
caggttttatgaatgccggagggta

SEQ ID NO: 439551 - DNA, 25 bp, Homo sapien
gagggtagtggaagacttgttcatt

SEQ ID NO: 439552 - DNA, 25 bp, Homo sapien
tatgaatgccggagggtagtggaag

SEQ ID NO: 439553 - DNA, 25 bp, Homo sapien
ggtagtggaagacttgttcattcac

SEQ ID NO: 439554 - DNA, 25 bp, Homo sapien
tatagccacagcttcgagcagccca

SEQ ID NO: 439555 - DNA, 25 bp, Homo sapien
cagcgaggctgaggatctggcaacc

SEQ ID NO: 439556 - DNA, 25 bp, Homo sapien
tcgagcagcccagtcacaaagacag

SEQ ID NO: 439557 - DNA, 25 bp, Homo sapien
agtcacaaagacagcgaggctgagg

SEQ ID NO: 439558 - DNA, 25 bp, Homo sapien
ctggcacctcggttaattgtgcact

SEQ ID NO: 439559 - DNA, 25 bp, Homo sapien
gcctgctttaaaccttcactatctt

SEQ ID NO: 439560 - DNA, 25 bp, Homo sapien
cccatgaagcctgctttaaaccttc

SEQ ID NO: 439561 - DNA, 25 bp, Homo sapien
agaccctggcacctcggttaattgt

SEQ ID NO: 439562 - DNA, 25 bp, Homo sapien
tagtagtaattaaactgctttttgc

SEQ ID NO: 439563 - DNA, 25 bp, Homo sapien
taattaaactgctttttgctgacca

SEQ ID NO: 439564 - DNA, 25 bp, Homo sapien
agtaattaaactgctttttgctgac

SEQ ID NO: 439565 - DNA, 25 bp, Homo sapien
gtagtaattaaactgctttttgctg

SEQ ID NO: 439566 - DNA, 25 bp, Homo sapien
caggtcaacataacccacagaaaca

SEQ ID NO: 439567 - DNA, 25 bp, Homo sapien
agcccacgctgacaatctaccttca

SEQ ID NO: 439568 - DNA, 25 bp, Homo sapien
agggctggaagacttccaggtcaac

SEQ ID NO: 439569 - DNA, 25 bp, Homo sapien
acgctgacaatctaccttcaaacag

SEQ ID NO: 439570 - DNA, 25 bp, Homo sapien
gagggagacacagaccttcttgcct

SEQ ID NO: 439571 - DNA, 25 bp, Homo sapien
cagctctctgcataggcagtaagtt

SEQ ID NO: 439572 - DNA, 25 bp, Homo sapien
tctttgagtcctgtggagtccccct

SEQ ID NO: 439573 - DNA, 25 bp, Homo sapien
gaagctgggttattagaatgatgcc

SEQ ID NO: 439574 - DNA, 25 bp, Homo sapien
gctgtccactaatagtgtctagttg

SEQ ID NO: 439575 - DNA, 25 bp, Homo sapien
cacttaacctgctgtccactaatag

SEQ ID NO: 439576 - DNA, 25 bp, Homo sapien
taacctgctgtccactaatagtgtc

SEQ ID NO: 439577 - DNA, 25 bp, Homo sapien
aaagcacttaacctgctgtccacta

SEQ ID NO: 439578 - DNA, 25 bp, Homo sapien
aagggcaatggaagccggtcgcggc

SEQ ID NO: 439579 - DNA, 25 bp, Homo sapien
gaagggcaatggaagccggtcgcgg

SEQ ID NO: 439580 - DNA, 25 bp, Homo sapien
ggcaatggaagccggtcgcggccat

SEQ ID NO: 439581 - DNA, 25 bp, Homo sapien
agggcaatggaagccggtcgcggcc

SEQ ID NO: 439582 - DNA, 25 bp, Homo sapien
ccggaacgcggaagcaatggcgcca

SEQ ID NO: 439583 - DNA, 25 bp, Homo sapien
catccgcaaccggaacgcggaagca

SEQ ID NO: 439584 - DNA, 25 bp, Homo sapien
ccgcaaccggaacgcggaagcaatg

SEQ ID NO: 439585 - DNA, 25 bp, Homo sapien
ggaaatgtgaggttcgaaggaagtc

SEQ ID NO: 439586 - DNA, 25 bp, Homo sapien
tccaaagcactccagaaaactgagg

SEQ ID NO: 439587 - DNA, 25 bp, Homo sapien
ctgaggagaaaagccgccaagcccc

SEQ ID NO: 439588 - DNA, 25 bp, Homo sapien
aaactgaggagaaaagccgccaagc

SEQ ID NO: 439589 - DNA, 25 bp, Homo sapien
aaagcactccagaaaactgaggaga

SEQ ID NO: 439590 - DNA, 25 bp, Homo sapien
ggggcggggagctagcaggaaatcc

SEQ ID NO: 439591 - DNA, 25 bp, Homo sapien
cagacaccgtgtgttggggcggaag

SEQ ID NO: 439592 - DNA, 25 bp, Homo sapien
ggaaatcctgacatgcctaggaaag

SEQ ID NO: 439593 - DNA, 25 bp, Homo sapien
tgacatgcctaggaaagcctccata

SEQ ID NO: 439594 - DNA, 25 bp, Homo sapien
ttgggaagctgatggaagacggagg

SEQ ID NO: 439595 - DNA, 25 bp, Homo sapien
ctttgggaagctgatggaagacgga

SEQ ID NO: 439596 - DNA, 25 bp, Homo sapien
tagaaaatcctaggccagatgtggt

SEQ ID NO: 439597 - DNA, 25 bp, Homo sapien
atatagaaaatcctaggccagatgt

SEQ ID NO: 439598 - DNA, 25 bp, Homo sapien
catactcatttgtggagttaaagag

SEQ ID NO: 439599 - DNA, 25 bp, Homo sapien
gaatgggtttgaacccctgctgtca

SEQ ID NO: 439600 - DNA, 25 bp, Homo sapien
catttttgaacactctgttagctga

SEQ ID NO: 439601 - DNA, 25 bp, Homo sapien
tgaaggaagcatgaattggagaacc

SEQ ID NO: 439602 - DNA, 25 bp, Homo sapien
tcgcttgaggccaggagttcaagac

SEQ ID NO: 439603 - DNA, 25 bp, Homo sapien
gcttgaggccaggagttcaagacca

SEQ ID NO: 439604 - DNA, 25 bp, Homo sapien
ttgaggccaggagttcaagaccagc

SEQ ID NO: 439605 - DNA, 25 bp, Homo sapien
ttgcgaggccaagttgggaggatcg

SEQ ID NO: 439606 - DNA, 25 bp, Homo sapien
tggcaggtccaaagcactgctctcc

SEQ ID NO: 439607 - DNA, 25 bp, Homo sapien
ggtccctgcaggacgtaatctctta

SEQ ID NO: 439608 - DNA, 25 bp, Homo sapien
ctcttatgtcacacgctgatggcag

SEQ ID NO: 439609 - DNA, 25 bp, Homo sapien
gctgcctgaagtggcgtccctggct

SEQ ID NO: 439610 - DNA, 25 bp, Homo sapien
cacacacccgtattgctgctagttg

SEQ ID NO: 439611 - DNA, 25 bp, Homo sapien
tcacacacccgtattgctgctagtt

SEQ ID NO: 439612 - DNA, 25 bp, Homo sapien
cacacccgtattgctgctagttgtt

SEQ ID NO: 439613 - DNA, 25 bp, Homo sapien
cacccgtattgctgctagttgtttt

SEQ ID NO: 439614 - DNA, 25 bp, Homo sapien
taacaggcccacattgctattttct

SEQ ID NO: 439615 - DNA, 25 bp, Homo sapien
attgctgtgccaggtaagctgtcct

SEQ ID NO: 439616 - DNA, 25 bp, Homo sapien
gaaagagacctgagattaacagcaa

SEQ ID NO: 439617 - DNA, 25 bp, Homo sapien
ttgttgaaccaaatattcccctgct

SEQ ID NO: 439618 - DNA, 25 bp, Homo sapien
gaaagtgctcttaagtctcatgtcc

SEQ ID NO: 439619 - DNA, 25 bp, Homo sapien
cagttgggcacatagcaaaaggaca

SEQ ID NO: 439620 - DNA, 25 bp, Homo sapien
tcctccagagtatgaacagtgatgc

SEQ ID NO: 439621 - DNA, 25 bp, Homo sapien
cagagaagcgtccatccagtttggc

SEQ ID NO: 439622 - DNA, 25 bp, Homo sapien
ttataactgcctgccagctatggcc

SEQ ID NO: 439623 - DNA, 25 bp, Homo sapien
tgtctacatgcaaccaatttccccg

SEQ ID NO: 439624 - DNA, 25 bp, Homo sapien
gaaaactccttgtcctatattagaa

SEQ ID NO: 439625 - DNA, 25 bp, Homo sapien
taacaacgacttcagagaaaactcc

SEQ ID NO: 439626 - DNA, 25 bp, Homo sapien
gtcttatggcctacggtctttggga

SEQ ID NO: 439627 - DNA, 25 bp, Homo sapien
tgaatgaaactagtgacggtgtctg

SEQ ID NO: 439628 - DNA, 25 bp, Homo sapien
tgagaatcaaaagaacaacgtgtgt

SEQ ID NO: 439629 - DNA, 25 bp, Homo sapien
cattaatatgaaacgagcctctcta

SEQ ID NO: 439630 - DNA, 25 bp, Homo sapien
cttttaattctacctcgagtaggca

SEQ ID NO: 439631 - DNA, 25 bp, Homo sapien
attctacctcgagtaggcacagaac

SEQ ID NO: 439632 - DNA, 25 bp, Homo sapien
tttaattctacctcgagtaggcaca

SEQ ID NO: 439633 - DNA, 25 bp, Homo sapien
taattctacctcgagtaggcacaga

SEQ ID NO: 439634 - DNA, 25 bp, Homo sapien
tccaggacaatagcgatcctcccag

SEQ ID NO: 439635 - DNA, 25 bp, Homo sapien
gggactacatgagtgccccatcaca

SEQ ID NO: 439636 - DNA, 25 bp, Homo sapien
gcctcgacctccaggacaatagcga

SEQ ID NO: 439637 - DNA, 25 bp, Homo sapien
cccagctcagttcccgaagtagctg

SEQ ID NO: 439638 - DNA, 25 bp, Homo sapien
aaaagaaggtctctccaacaaatgg

SEQ ID NO: 439639 - DNA, 25 bp, Homo sapien
gaatacatacagacctccaaatagc

SEQ ID NO: 439640 - DNA, 25 bp, Homo sapien
ctactcaatagggaaaagaaggtct

SEQ ID NO: 439641 - DNA, 25 bp, Homo sapien
gcaaaagaacaaagtcgaggccagg

SEQ ID NO: 439642 - DNA, 25 bp, Homo sapien
cactatatgcgcatgccactctgcc

SEQ ID NO: 439643 - DNA, 25 bp, Homo sapien
ctggcactatatgcgcatgccactc

SEQ ID NO: 439644 - DNA, 25 bp, Homo sapien
gcactatatgcgcatgccactctgc

SEQ ID NO: 439645 - DNA, 25 bp, Homo sapien
ggcactatatgcgcatgccactctg

SEQ ID NO: 439646 - DNA, 25 bp, Homo sapien
tcattctgcaatgacatggtgatgc

SEQ ID NO: 439647 - DNA, 25 bp, Homo sapien
gggcagccaaggtggttaacaaagc

SEQ ID NO: 439648 - DNA, 25 bp, Homo sapien
ccctcaacagctcctgggacaacac

SEQ ID NO: 439649 - DNA, 25 bp, Homo sapien
tgatcagtgcatcacgggcagccaa

SEQ ID NO: 439650 - DNA, 25 bp, Homo sapien
gaccttcctccaaagactagtagca

SEQ ID NO: 439651 - DNA, 25 bp, Homo sapien
ctggggaccttcctccaaagactag

SEQ ID NO: 439652 - DNA, 25 bp, Homo sapien
ccttcctccaaagactagtagcagt

SEQ ID NO: 439653 - DNA, 25 bp, Homo sapien
cctccaaagactagtagcagtaagt

SEQ ID NO: 439654 - DNA, 25 bp, Homo sapien
tctaccattctactgccagaagaca

SEQ ID NO: 439655 - DNA, 25 bp, Homo sapien
cagaagacaccagtctggtcctaat

SEQ ID NO: 439656 - DNA, 25 bp, Homo sapien
ttttttgtctaccattctactgcca

SEQ ID NO: 439657 - DNA, 25 bp, Homo sapien
tgccagaagacaccagtctggtcct

SEQ ID NO: 439658 - DNA, 25 bp, Homo sapien
gctttgagcacttactttaaatctc

SEQ ID NO: 439659 - DNA, 25 bp, Homo sapien
tagttcacctgagtcaacacaaaga

SEQ ID NO: 439660 - DNA, 25 bp, Homo sapien
gaacaactgaagcagtaaatgttag

SEQ ID NO: 439661 - DNA, 25 bp, Homo sapien
aatgaacaactgaagcagtaaatgt

SEQ ID NO: 439662 - DNA, 25 bp, Homo sapien
gaaagaaggccagtgcggctgggaa

SEQ ID NO: 439663 - DNA, 25 bp, Homo sapien
tgtcctaagcgcactgaaaggtttt

SEQ ID NO: 439664 - DNA, 25 bp, Homo sapien
accagcaagtgcaaaatcccggagg

SEQ ID NO: 439665 - DNA, 25 bp, Homo sapien
tgagcttatgtgtgaagaccagaaa

SEQ ID NO: 439666 - DNA, 25 bp, Homo sapien
aagccatcctgtggttttgaaaagg

SEQ ID NO: 439667 - DNA, 25 bp, Homo sapien
cagtcaaagtacgtacagaagtcac

SEQ ID NO: 439668 - DNA, 25 bp, Homo sapien
aagcttcgagtgaccgtagcagtca

SEQ ID NO: 439669 - DNA, 25 bp, Homo sapien
ttaggatcttcgaataaaactggga

SEQ ID NO: 439670 - DNA, 25 bp, Homo sapien
tgtaacgaggactccattaaccagc

SEQ ID NO: 439671 - DNA, 25 bp, Homo sapien
taaccaagactgtaacgaggactcc

SEQ ID NO: 439672 - DNA, 25 bp, Homo sapien
ttaaatgtgctagcttaaccaagac

SEQ ID NO: 439673 - DNA, 25 bp, Homo sapien
tgcactgcgggctgttaaatgtgct

SEQ ID NO: 439674 - DNA, 25 bp, Homo sapien
ttaaccttggatcactgtcattttc

SEQ ID NO: 439675 - DNA, 25 bp, Homo sapien
tttaaccttggatcactgtcatttt

SEQ ID NO: 439676 - DNA, 25 bp, Homo sapien
atggtctgcactgctgtggtgttcc

SEQ ID NO: 439677 - DNA, 25 bp, Homo sapien
ctgcactgctgtggtgttccttttc

SEQ ID NO: 439678 - DNA, 25 bp, Homo sapien
ttaaagacaattaaatacttgtgtg

SEQ ID NO: 439679 - DNA, 25 bp, Homo sapien
aaagacaattaaatacttgtgtgac

SEQ ID NO: 439680 - DNA, 25 bp, Homo sapien
taaagacaattaaatacttgtgtga

SEQ ID NO: 439681 - DNA, 25 bp, Homo sapien
gccagtcaccgcatggttccagaaa

SEQ ID NO: 439682 - DNA, 25 bp, Homo sapien
cagcaggacactcagttagatggac

SEQ ID NO: 439683 - DNA, 25 bp, Homo sapien
gcaacataatcaagcagaggcctag

SEQ ID NO: 439684 - DNA, 25 bp, Homo sapien
caagctcagaggagtctcgtggaaa

SEQ ID NO: 439685 - DNA, 25 bp, Homo sapien
tggcctttgcaaaagttcattgcca

SEQ ID NO: 439686 - DNA, 25 bp, Homo sapien
attgccatagatcagaaatctggtt

SEQ ID NO: 439687 - DNA, 25 bp, Homo sapien
tgccatagatcagaaatctggtttt

SEQ ID NO: 439688 - DNA, 25 bp, Homo sapien
ttgtaaggtagacttaagttctggc

SEQ ID NO: 439689 - DNA, 25 bp, Homo sapien
ggatcggaacctaacactttatagc

SEQ ID NO: 439690 - DNA, 25 bp, Homo sapien
ggaattatctggatcaactctccca

SEQ ID NO: 439691 - DNA, 25 bp, Homo sapien
aactgaggcttaccccgaggcttgt

SEQ ID NO: 439692 - DNA, 25 bp, Homo sapien
tcccactttctggaccttgcagctt

SEQ ID NO: 439693 - DNA, 25 bp, Homo sapien
ggtgcctccatgtgtgatactatca

SEQ ID NO: 439694 - DNA, 25 bp, Homo sapien
gataaggtgcctccatgtgtgatac

SEQ ID NO: 439695 - DNA, 25 bp, Homo sapien
ttttagtatatgaggggccatgggc

SEQ ID NO: 439696 - DNA, 25 bp, Homo sapien
catgccctggataaggtgcctccat

SEQ ID NO: 439697 - DNA, 25 bp, Homo sapien
ggcgcaacacagctcactgcctgag

SEQ ID NO: 439698 - DNA, 25 bp, Homo sapien
ctcactgcctgagcccaccttctgg

SEQ ID NO: 439699 - DNA, 25 bp, Homo sapien
gtgccatggcgcaacacagctcact

SEQ ID NO: 439700 - DNA, 25 bp, Homo sapien
cgtgagccagggcacctggtttttt

SEQ ID NO: 439701 - DNA, 25 bp, Homo sapien
aatctatccagggatttccgaaggc

SEQ ID NO: 439702 - DNA, 25 bp, Homo sapien
gcctggctgtggatgaccaaacatt

SEQ ID NO: 439703 - DNA, 25 bp, Homo sapien
ttcacagcagggtcaagccagaagt

SEQ ID NO: 439704 - DNA, 25 bp, Homo sapien
agccagaagttctcagcggtccagg

SEQ ID NO: 439705 - DNA, 25 bp, Homo sapien
cagtgggtagaagtgggtgtccctg

SEQ ID NO: 439706 - DNA, 25 bp, Homo sapien
ggttgaagatcacccgggccatttg

SEQ ID NO: 439707 - DNA, 25 bp, Homo sapien
cggagcagccgtcccggttgaagat

SEQ ID NO: 439708 - DNA, 25 bp, Homo sapien
tccctggaatgcctctgtaagacgg

SEQ ID NO: 439709 - DNA, 25 bp, Homo sapien
gaaatgagtaatatcctttgacagt

SEQ ID NO: 439710 - DNA, 25 bp, Homo sapien
ggcttttcatcatccaaagatgtac

SEQ ID NO: 439711 - DNA, 25 bp, Homo sapien
gtaatatcctttgacagtcctgggt

SEQ ID NO: 439712 - DNA, 25 bp, Homo sapien
tgagtaatatcctttgacagtcctg

SEQ ID NO: 439713 - DNA, 25 bp, Homo sapien
caggtctttcattacattctgctgc

SEQ ID NO: 439714 - DNA, 25 bp, Homo sapien
ggtctttcattacattctgctgcaa

SEQ ID NO: 439715 - DNA, 25 bp, Homo sapien
aggtctttcattacattctgctgca

SEQ ID NO: 439716 - DNA, 25 bp, Homo sapien
gactcgtagcccagtcagtcagcgg

SEQ ID NO: 439717 - DNA, 25 bp, Homo sapien
gatctgggtggccaccaacactgct

SEQ ID NO: 439718 - DNA, 25 bp, Homo sapien
cacttaattgggattgggcacacag

SEQ ID NO: 439719 - DNA, 25 bp, Homo sapien
tctccatatgggctgactggctcca

SEQ ID NO: 439720 - DNA, 25 bp, Homo sapien
taaggctgacccgtttgcataatcc

SEQ ID NO: 439721 - DNA, 25 bp, Homo sapien
cgatagggattagcatgaggcttcc

SEQ ID NO: 439722 - DNA, 25 bp, Homo sapien
cccggtgccaggtgatgtaattcta

SEQ ID NO: 439723 - DNA, 25 bp, Homo sapien
ggctatttaaagagctccctggtga

SEQ ID NO: 439724 - DNA, 25 bp, Homo sapien
ctctccatccaagagtccctgggat

SEQ ID NO: 439725 - DNA, 25 bp, Homo sapien
ttctctctccatccaagagtccctg

SEQ ID NO: 439726 - DNA, 25 bp, Homo sapien
ctctctccatccaagagtccctggg

SEQ ID NO: 439727 - DNA, 25 bp, Homo sapien
ctccatccaagagtccctgggatac

SEQ ID NO: 439728 - DNA, 25 bp, Homo sapien
gtttctgcgctcttagttctgatgt

SEQ ID NO: 439729 - DNA, 25 bp, Homo sapien
gatgtttctgcgctcttagttctga

SEQ ID NO: 439730 - DNA, 25 bp, Homo sapien
ggttgtgatgtttctgcgctcttag

SEQ ID NO: 439731 - DNA, 25 bp, Homo sapien
tgtgatgtttctgcgctcttagttc

SEQ ID NO: 439732 - DNA, 25 bp, Homo sapien
gctatctctgatgcacagctttcgg

SEQ ID NO: 439733 - DNA, 25 bp, Homo sapien
tcggttgctggtaaaactgctatct

SEQ ID NO: 439734 - DNA, 25 bp, Homo sapien
tggagaactcttggttcggttgctg

SEQ ID NO: 439735 - DNA, 25 bp, Homo sapien
caatgagagaataaggccttcgggt

SEQ ID NO: 439736 - DNA, 25 bp, Homo sapien
ctgtggagtaggggagtggttggaa

SEQ ID NO: 439737 - DNA, 25 bp, Homo sapien
agtaggggagtggttggaagctcat

SEQ ID NO: 439738 - DNA, 25 bp, Homo sapien
tggagtaggggagtggttggaagct

SEQ ID NO: 439739 - DNA, 25 bp, Homo sapien
gagtaggggagtggttggaagctca

SEQ ID NO: 439740 - DNA, 25 bp, Homo sapien
tggcccgtttggattcttctgttgc

SEQ ID NO: 439741 - DNA, 25 bp, Homo sapien
ctaatacgggcagattgagccccct

SEQ ID NO: 439742 - DNA, 25 bp, Homo sapien
ttggcccgtttggattcttctgttg

SEQ ID NO: 439743 - DNA, 25 bp, Homo sapien
cgggcagattgagccccctgctgct

SEQ ID NO: 439744 - DNA, 25 bp, Homo sapien
cctggtgtggagcagtagatgacct

SEQ ID NO: 439745 - DNA, 25 bp, Homo sapien
ctgctgtcacctggtgtggagcagt

SEQ ID NO: 439746 - DNA, 25 bp, Homo sapien
tcacctggtgtggagcagtagatga

SEQ ID NO: 439747 - DNA, 25 bp, Homo sapien
tgtcacctggtgtggagcagtagat

SEQ ID NO: 439748 - DNA, 25 bp, Homo sapien
caaatgagtagctgggtagagccgt

SEQ ID NO: 439749 - DNA, 25 bp, Homo sapien
cagatgtacacatgttaacagttaa

SEQ ID NO: 439750 - DNA, 25 bp, Homo sapien
aagtgcaaatgagtagctgggtaga

SEQ ID NO: 439751 - DNA, 25 bp, Homo sapien
agttaaagtgcaaatgagtagctgg

SEQ ID NO: 439752 - DNA, 25 bp, Homo sapien
cctgctgaaagtgcattggctgtga

SEQ ID NO: 439753 - DNA, 25 bp, Homo sapien
aggacctgctgaaagtgcattggct

SEQ ID NO: 439754 - DNA, 25 bp, Homo sapien
agtgcattggctgtgaactgtggca

SEQ ID NO: 439755 - DNA, 25 bp, Homo sapien
gctgaaagtgcattggctgtgaact

SEQ ID NO: 439756 - DNA, 25 bp, Homo sapien
tagtgagaacatagttcccactgcc

SEQ ID NO: 439757 - DNA, 25 bp, Homo sapien
ggatagtgagaacatagttcccact

SEQ ID NO: 439758 - DNA, 25 bp, Homo sapien
tgagaacatagttcccactgccaca

SEQ ID NO: 439759 - DNA, 25 bp, Homo sapien
agtgcagtggaacctcaccctggga

SEQ ID NO: 439760 - DNA, 25 bp, Homo sapien
gcggctggaccggagaagcgaggcg

SEQ ID NO: 439761 - DNA, 25 bp, Homo sapien
cggaaaaccagcgtgcctcctggtc

SEQ ID NO: 439762 - DNA, 25 bp, Homo sapien
aggaaggcgcgatggagcggccccg

SEQ ID NO: 439763 - DNA, 25 bp, Homo sapien
cccctgtgcggaaaggaagatggcg

SEQ ID NO: 439764 - DNA, 25 bp, Homo sapien
ggctgagaagcagcgttggctgcat

SEQ ID NO: 439765 - DNA, 25 bp, Homo sapien
gaggctgagaagcagcgttggctgc

SEQ ID NO: 439766 - DNA, 25 bp, Homo sapien
aggctgagaagcagcgttggctgca

SEQ ID NO: 439767 - DNA, 25 bp, Homo sapien
ttccgctggaaatctgtaatatctt

SEQ ID NO: 439768 - DNA, 25 bp, Homo sapien
ttcatcctccaaatggctacttgag

SEQ ID NO: 439769 - DNA, 25 bp, Homo sapien
tctctttccgctggaaatctgtaat

SEQ ID NO: 439770 - DNA, 25 bp, Homo sapien
ccaaatggctacttgagaacacacc

SEQ ID NO: 439771 - DNA, 25 bp, Homo sapien
aatcaaatctagaccacagacaagg

SEQ ID NO: 439772 - DNA, 25 bp, Homo sapien
taatctcagtgctggttacacaggt

SEQ ID NO: 439773 - DNA, 25 bp, Homo sapien
tgaacaagctcgtttatgcatccgt

SEQ ID NO: 439774 - DNA, 25 bp, Homo sapien
ttacacaggtgtgcgtattaagctg

SEQ ID NO: 439775 - DNA, 25 bp, Homo sapien
ttcattgtggttcctgttatccact

SEQ ID NO: 439776 - DNA, 25 bp, Homo sapien
cttcattgtggttcctgttatccac

SEQ ID NO: 439777 - DNA, 25 bp, Homo sapien
ccttcattgtggttcctgttatcca

SEQ ID NO: 439778 - DNA, 25 bp, Homo sapien
ggacctcaatgatgcagcgagtcac

SEQ ID NO: 439779 - DNA, 25 bp, Homo sapien
gtgatgggtggagcgctggacttcg

SEQ ID NO: 439780 - DNA, 25 bp, Homo sapien
gctggacttcgacaaggcatttgag

SEQ ID NO: 439781 - DNA, 25 bp, Homo sapien
caaggcatttgagaggacctcaatg

SEQ ID NO: 439782 - DNA, 25 bp, Homo sapien
gtgaccaagatctgcctgccgtgtg

SEQ ID NO: 439783 - DNA, 25 bp, Homo sapien
tatagtcacacagctgcgaagtggt

SEQ ID NO: 439784 - DNA, 25 bp, Homo sapien
ggaatgcactgcctctacctgaaac

SEQ ID NO: 439785 - DNA, 25 bp, Homo sapien
taggaacaaggatcactgcagtgac

SEQ ID NO: 439786 - DNA, 25 bp, Homo sapien
tcttctcagaatggcgtgtcttcac

SEQ ID NO: 439787 - DNA, 25 bp, Homo sapien
tctcctgagaatgcccggcagcatg

SEQ ID NO: 439788 - DNA, 25 bp, Homo sapien
cagcatgtgtttccgatctggccac

SEQ ID NO: 439789 - DNA, 25 bp, Homo sapien
cagctgggtctcttaacaatcttac

SEQ ID NO: 439790 - DNA, 25 bp, Homo sapien
tccacctcagaggtggcatcttcct

SEQ ID NO: 439791 - DNA, 25 bp, Homo sapien
actggccatgctgacgtttgactcc

SEQ ID NO: 439792 - DNA, 25 bp, Homo sapien
tgggcctcgtgcgtcgtttgtccac

SEQ ID NO: 439793 - DNA, 25 bp, Homo sapien
tccttgagaggacctgtcgggcctg

SEQ ID NO: 439794 - DNA, 25 bp, Homo sapien
ccatcttatcaagctctaagctggg

SEQ ID NO: 439795 - DNA, 25 bp, Homo sapien
catgaaataggcacgtggctcccct

SEQ ID NO: 439796 - DNA, 25 bp, Homo sapien
tcctctgaagccctgtagtgggttg

SEQ ID NO: 439797 - DNA, 25 bp, Homo sapien
cactctgaggtcttggagccctgta

SEQ ID NO: 439798 - DNA, 25 bp, Homo sapien
tcgtagtatgggttgaacagttccc

SEQ ID NO: 439799 - DNA, 25 bp, Homo sapien
ccagttgggccaccctgtcatattg

SEQ ID NO: 439800 - DNA, 25 bp, Homo sapien
tgtcatattgccttttcaggtccag

SEQ ID NO: 439801 - DNA, 25 bp, Homo sapien
tcatagaagtctggaaactcagctg

SEQ ID NO: 439802 - DNA, 25 bp, Homo sapien
tctgtcaggactgtctggtcagccc

SEQ ID NO: 439803 - DNA, 25 bp, Homo sapien
ctcgtcctctgtcaggactgtctgg

SEQ ID NO: 439804 - DNA, 25 bp, Homo sapien
tggtcagccctgtccttttcatttt

SEQ ID NO: 439805 - DNA, 25 bp, Homo sapien
aggactgtctggtcagccctgtcct

SEQ ID NO: 439806 - DNA, 25 bp, Homo sapien
aagtggaggcatgaggtcccgaacc

SEQ ID NO: 439807 - DNA, 25 bp, Homo sapien
ttgctgtagtttgatggagcatgag

SEQ ID NO: 439808 - DNA, 25 bp, Homo sapien
gaggcatgaggtcccgaaccaattt

SEQ ID NO: 439809 - DNA, 25 bp, Homo sapien
tagtttgatggagcatgagtgcaaa

SEQ ID NO: 439810 - DNA, 25 bp, Homo sapien
atccattgcagccaagttttcgagt

SEQ ID NO: 439811 - DNA, 25 bp, Homo sapien
tgcagccaagttttcgagttctttt

SEQ ID NO: 439812 - DNA, 25 bp, Homo sapien
ctgtagttccaaatccattgcagcc

SEQ ID NO: 439813 - DNA, 25 bp, Homo sapien
tctcagctatcttctgtagttccaa

SEQ ID NO: 439814 - DNA, 25 bp, Homo sapien
tccaaagacagtagcacagtcattg

SEQ ID NO: 439815 - DNA, 25 bp, Homo sapien
cccttgggtagataaatggtgtctt

SEQ ID NO: 439816 - DNA, 25 bp, Homo sapien
ggtgaaaaacagatcatgtgatggc

SEQ ID NO: 439817 - DNA, 25 bp, Homo sapien
ttaacagtgcccaccgctccaatga

SEQ ID NO: 439818 - DNA, 25 bp, Homo sapien
ggctccaggatacgcgcagatctgt

SEQ ID NO: 439819 - DNA, 25 bp, Homo sapien
tcctagttcacaactgggccggctc

SEQ ID NO: 439820 - DNA, 25 bp, Homo sapien
tggcgcttcagtgatccaacttccg

SEQ ID NO: 439821 - DNA, 25 bp, Homo sapien
aagtccgcagttctcttcagccgca

SEQ ID NO: 439822 - DNA, 25 bp, Homo sapien
tttacatctcctaaggctaaagttc

SEQ ID NO: 439823 - DNA, 25 bp, Homo sapien
atttacatctcctaaggctaaagtt

SEQ ID NO: 439824 - DNA, 25 bp, Homo sapien
catctcctaaggctaaagttcttac

SEQ ID NO: 439825 - DNA, 25 bp, Homo sapien
tacatctcctaaggctaaagttctt

SEQ ID NO: 439826 - DNA, 25 bp, Homo sapien
gttaagaagtaggactggagaaaga

SEQ ID NO: 439827 - DNA, 25 bp, Homo sapien
taagaagtaggactggagaaagagt

SEQ ID NO: 439828 - DNA, 25 bp, Homo sapien
ttaagaagtaggactggagaaagag

SEQ ID NO: 439829 - DNA, 25 bp, Homo sapien
gatagtaactagaaagttcacgatt

SEQ ID NO: 439830 - DNA, 25 bp, Homo sapien
agatagtaactagaaagttcacgat

SEQ ID NO: 439831 - DNA, 25 bp, Homo sapien
aagatagtaactagaaagttcacga

SEQ ID NO: 439832 - DNA, 25 bp, Homo sapien
ccagctttgaaatcttcctcgtcca

SEQ ID NO: 439833 - DNA, 25 bp, Homo sapien
aatcctctgcctctatactctccat

SEQ ID NO: 439834 - DNA, 25 bp, Homo sapien
tttcctgagaagttcccaccacctc

SEQ ID NO: 439835 - DNA, 25 bp, Homo sapien
gctttgaaatcttcctcgtccaaat

SEQ ID NO: 439836 - DNA, 25 bp, Homo sapien
cctgtggttttactcagatcaggtc

SEQ ID NO: 439837 - DNA, 25 bp, Homo sapien
ggttttactcagatcaggtctgtgt

SEQ ID NO: 439838 - DNA, 25 bp, Homo sapien
actcagatcaggtctgtgttctctt

SEQ ID NO: 439839 - DNA, 25 bp, Homo sapien
tcagatcaggtctgtgttctctttc

SEQ ID NO: 439840 - DNA, 25 bp, Homo sapien
tgactgtggggtctttgttgaaagc

SEQ ID NO: 439841 - DNA, 25 bp, Homo sapien
ctgcattgactgtggggtctttgtt

SEQ ID NO: 439842 - DNA, 25 bp, Homo sapien
cattgactgtggggtctttgttgaa

SEQ ID NO: 439843 - DNA, 25 bp, Homo sapien
tctttgttgaaagcaaaaactgtgg

SEQ ID NO: 439844 - DNA, 25 bp, Homo sapien
tatggtatgaatcgatccaatgttg

SEQ ID NO: 439845 - DNA, 25 bp, Homo sapien
ttatatggtatgaatcgatccaatg

SEQ ID NO: 439846 - DNA, 25 bp, Homo sapien
tcagagaaataaagcttccagcctt

SEQ ID NO: 439847 - DNA, 25 bp, Homo sapien
gcttccagcctttatatggtatgaa

SEQ ID NO: 439848 - DNA, 25 bp, Homo sapien
gtacatgcacatttttcatgagaca

SEQ ID NO: 439849 - DNA, 25 bp, Homo sapien
aaataatcacacaggtacatgcaca

SEQ ID NO: 439850 - DNA, 25 bp, Homo sapien
ggcattagcacaaataatcacacag

SEQ ID NO: 439851 - DNA, 25 bp, Homo sapien
catttttcatgagacaaaagcagca

SEQ ID NO: 439852 - DNA, 25 bp, Homo sapien
gcttgaatcttctcaatcaaaggag

SEQ ID NO: 439853 - DNA, 25 bp, Homo sapien
ttgaatcttctcaatcaaaggagag

SEQ ID NO: 439854 - DNA, 25 bp, Homo sapien
acaaatcaatatgccttgtgaaaaa

SEQ ID NO: 439855 - DNA, 25 bp, Homo sapien
catacaaatcaatatgccttgtgaa

SEQ ID NO: 439856 - DNA, 25 bp, Homo sapien
atgcaagccaaggttttctcaggtg

SEQ ID NO: 439857 - DNA, 25 bp, Homo sapien
ttgccaaacccatgcaagccaaggt

SEQ ID NO: 439858 - DNA, 25 bp, Homo sapien
tgatgtattgccaaacccatgcaag

SEQ ID NO: 439859 - DNA, 25 bp, Homo sapien
caggtgcatctcttagttcagttgc

SEQ ID NO: 439860 - DNA, 25 bp, Homo sapien
tgtggcacatttaccattgtttctc

SEQ ID NO: 439861 - DNA, 25 bp, Homo sapien
cttgcatgaatatgtggcacattta

SEQ ID NO: 439862 - DNA, 25 bp, Homo sapien
gcttgtaactcagctgcatgccttt

SEQ ID NO: 439863 - DNA, 25 bp, Homo sapien
gaatatgtggcacatttaccattgt

SEQ ID NO: 439864 - DNA, 25 bp, Homo sapien
gtgcccagccaaaccattcttaaca

SEQ ID NO: 439865 - DNA, 25 bp, Homo sapien
aatctacagattcaaaaacctttgg

SEQ ID NO: 439866 - DNA, 25 bp, Homo sapien
cattcttaacaagaaacaacactaa

SEQ ID NO: 439867 - DNA, 25 bp, Homo sapien
atctacagattcaaaaacctttggg

SEQ ID NO: 439868 - DNA, 25 bp, Homo sapien
atttctccacatgcagcacaaagaa

SEQ ID NO: 439869 - DNA, 25 bp, Homo sapien
tcttggtgcaaagaggctttatatt

SEQ ID NO: 439870 - DNA, 25 bp, Homo sapien
tattactgacacgaaccactgtccc

SEQ ID NO: 439871 - DNA, 25 bp, Homo sapien
cactgtccctcttagagcaatgtat

SEQ ID NO: 439872 - DNA, 25 bp, Homo sapien
agtaaatgacctgcctcgacacaca

SEQ ID NO: 439873 - DNA, 25 bp, Homo sapien
gtccatcgtaactgtgagaggagag

SEQ ID NO: 439874 - DNA, 25 bp, Homo sapien
tgattgactgccagtccatcgtaac

SEQ ID NO: 439875 - DNA, 25 bp, Homo sapien
ggagagctgcggagagcagtaaatg

SEQ ID NO: 439876 - DNA, 25 bp, Homo sapien
agtgactgtgaataatcaactgaaa

SEQ ID NO: 439877 - DNA, 25 bp, Homo sapien
gaaataacttactacctccagacta

SEQ ID NO: 439878 - DNA, 25 bp, Homo sapien
aactgaaataacttactacctccag

SEQ ID NO: 439879 - DNA, 25 bp, Homo sapien
tcaactgaaataacttactacctcc

SEQ ID NO: 439880 - DNA, 25 bp, Homo sapien
ggaccgccataataaggacttacca

SEQ ID NO: 439881 - DNA, 25 bp, Homo sapien
ccactgaagacgcaagtaggagtag

SEQ ID NO: 439882 - DNA, 25 bp, Homo sapien
agacagtggaacgtgaagatggtca

SEQ ID NO: 439883 - DNA, 25 bp, Homo sapien
gtttgatattgggacaaagctggag

SEQ ID NO: 439884 - DNA, 25 bp, Homo sapien
tcttccgcatttgagactttgacaa

SEQ ID NO: 439885 - DNA, 25 bp, Homo sapien
ggaatccgacctgcttctctctgat

SEQ ID NO: 439886 - DNA, 25 bp, Homo sapien
cattctattgttcgtggaatccgac

SEQ ID NO: 439887 - DNA, 25 bp, Homo sapien
tatccacaagatcatgaacaagctc

SEQ ID NO: 439888 - DNA, 25 bp, Homo sapien
tcaatatacaaaaggaacatacact

SEQ ID NO: 439889 - DNA, 25 bp, Homo sapien
cacttgtcattcttatttcgagaac

SEQ ID NO: 439890 - DNA, 25 bp, Homo sapien
acacttgtcattcttatttcgagaa

SEQ ID NO: 439891 - DNA, 25 bp, Homo sapien
tatacaaaaggaacatacacttgtc

SEQ ID NO: 439892 - DNA, 25 bp, Homo sapien
tctgtcctttgctattactaataga

SEQ ID NO: 439893 - DNA, 25 bp, Homo sapien
agaactccatcaacattccatgctt

SEQ ID NO: 439894 - DNA, 25 bp, Homo sapien
tgaatctcttggatggcataaaggt

SEQ ID NO: 439895 - DNA, 25 bp, Homo sapien
catgcttacacccatcctcagaact

SEQ ID NO: 439896 - DNA, 25 bp, Homo sapien
ccagatgctagtgggtcacctgttc

SEQ ID NO: 439897 - DNA, 25 bp, Homo sapien
ccaggaggattatgtcccagatgct

SEQ ID NO: 439898 - DNA, 25 bp, Homo sapien
agtgctgaggtgtttaatactcctg

SEQ ID NO: 439899 - DNA, 25 bp, Homo sapien
gcagtcccaaatgtaggcccttaaa

SEQ ID NO: 439900 - DNA, 25 bp, Homo sapien
gatgaagctttggctaacaggtttc

SEQ ID NO: 439901 - DNA, 25 bp, Homo sapien
agtgatttgtagaaccagaaagtcc

SEQ ID NO: 439902 - DNA, 25 bp, Homo sapien
catgggcttccagcctacaggtaaa

SEQ ID NO: 439903 - DNA, 25 bp, Homo sapien
ggtgcagtgatttgtagaaccagaa

SEQ ID NO: 439904 - DNA, 25 bp, Homo sapien
catgaccaaaaatgacagggcaaag

SEQ ID NO: 439905 - DNA, 25 bp, Homo sapien
gaccaaaaatgacagggcaaagcga

SEQ ID NO: 439906 - DNA, 25 bp, Homo sapien
ttcatgaccaaaaatgacagggcaa

SEQ ID NO: 439907 - DNA, 25 bp, Homo sapien
tgaccaaaaatgacagggcaaagcg

SEQ ID NO: 439908 - DNA, 25 bp, Homo sapien
tgaggtgggagaactgtttgaactt

SEQ ID NO: 439909 - DNA, 25 bp, Homo sapien
agcctgggcgacagagcaagactcc

SEQ ID NO: 439910 - DNA, 25 bp, Homo sapien
aggtgggagaactgtttgaacttgg

SEQ ID NO: 439911 - DNA, 25 bp, Homo sapien
cctgggcgacagagcaagactccat

SEQ ID NO: 439912 - DNA, 25 bp, Homo sapien
ggaattctgtttttgtcatctgcgt

SEQ ID NO: 439913 - DNA, 25 bp, Homo sapien
taggcctggatctccaacaacaagg

SEQ ID NO: 439914 - DNA, 25 bp, Homo sapien
cctccaaagagtgctaatgccaaac

SEQ ID NO: 439915 - DNA, 25 bp, Homo sapien
ggatctccaacaacaaggatgtggg

SEQ ID NO: 439916 - DNA, 25 bp, Homo sapien
aaaccctggcttagtgtggcttaca

SEQ ID NO: 439917 - DNA, 25 bp, Homo sapien
gaattttgggcgtgagctgtctctg

SEQ ID NO: 439918 - DNA, 25 bp, Homo sapien
ggcgtttctctataactcgcatggt

SEQ ID NO: 439919 - DNA, 25 bp, Homo sapien
tcgcatggttacaacaacctcagct

SEQ ID NO: 439920 - DNA, 25 bp, Homo sapien
gcttccttatgttttatcacagcat

SEQ ID NO: 439921 - DNA, 25 bp, Homo sapien
ttccttatgttttatcacagcattg

SEQ ID NO: 439922 - DNA, 25 bp, Homo sapien
tccttatgttttatcacagcattgc

SEQ ID NO: 439923 - DNA, 25 bp, Homo sapien
ccttatgttttatcacagcattgcc

SEQ ID NO: 439924 - DNA, 25 bp, Homo sapien
taccacaaacatacacgccacgtgg

SEQ ID NO: 439925 - DNA, 25 bp, Homo sapien
ttttgaaagagttaccgtcagacca

SEQ ID NO: 439926 - DNA, 25 bp, Homo sapien
cacgtggggcaacattgcacgctgc

SEQ ID NO: 439927 - DNA, 25 bp, Homo sapien
agagttaccgtcagaccagaggtgg

SEQ ID NO: 439928 - DNA, 25 bp, Homo sapien
ttgcagcagcaataatggaagttct

SEQ ID NO: 439929 - DNA, 25 bp, Homo sapien
agccttagcaagactaatactttgc

SEQ ID NO: 439930 - DNA, 25 bp, Homo sapien
ggctttattgtaatgtcctccaact

SEQ ID NO: 439931 - DNA, 25 bp, Homo sapien
caaggcttgatgttgattccccatc

SEQ ID NO: 439932 - DNA, 25 bp, Homo sapien
tcagagagtaagtgatcatgatgct

SEQ ID NO: 439933 - DNA, 25 bp, Homo sapien
tgactattcatacgagctactgtgg

SEQ ID NO: 439934 - DNA, 25 bp, Homo sapien
caaatctggatagtagtgcactccc

SEQ ID NO: 439935 - DNA, 25 bp, Homo sapien
gctactgtggcactgctaatggttc

SEQ ID NO: 439936 - DNA, 25 bp, Homo sapien
aaaatcttgaagaactcgagcagct

SEQ ID NO: 439937 - DNA, 25 bp, Homo sapien
gcttctgtggatagccttgggtaca

SEQ ID NO: 439938 - DNA, 25 bp, Homo sapien
tccggagctcaaggtaaaaatcttg

SEQ ID NO: 439939 - DNA, 25 bp, Homo sapien
tgggtacacatactgccgagcatag

SEQ ID NO: 439940 - DNA, 25 bp, Homo sapien
tatcctcagcgtcttctttggttgc

SEQ ID NO: 439941 - DNA, 25 bp, Homo sapien
tccactatatcctcagcgtcttctt

SEQ ID NO: 439942 - DNA, 25 bp, Homo sapien
tctctcaattccaaccttgctcgtg

SEQ ID NO: 439943 - DNA, 25 bp, Homo sapien
taatttccactatatcctcagcgtc

SEQ ID NO: 439944 - DNA, 25 bp, Homo sapien
catggactccctctaagggcaggaa

SEQ ID NO: 439945 - DNA, 25 bp, Homo sapien
tgcagattcttgtaccttcaggagg

SEQ ID NO: 439946 - DNA, 25 bp, Homo sapien
aaagacagccagtagaacctcacgg

SEQ ID NO: 439947 - DNA, 25 bp, Homo sapien
cacggttgcttacaaactctgagac

SEQ ID NO: 439948 - DNA, 25 bp, Homo sapien
aataaatcttttcgctgttgacctg

SEQ ID NO: 439949 - DNA, 25 bp, Homo sapien
aattcatcagagtaagttcctagca

SEQ ID NO: 439950 - DNA, 25 bp, Homo sapien
ggcaatctgccgaagttgatgaaat

SEQ ID NO: 439951 - DNA, 25 bp, Homo sapien
cagaaccatgctgggatcgctcaaa

SEQ ID NO: 439952 - DNA, 25 bp, Homo sapien
ttacatagtttgaagctggtaaact

SEQ ID NO: 439953 - DNA, 25 bp, Homo sapien
aaccctggtcatttagtgatccaat

SEQ ID NO: 439954 - DNA, 25 bp, Homo sapien
tacatagtttgaagctggtaaactt

SEQ ID NO: 439955 - DNA, 25 bp, Homo sapien
catttagtgatccaataaaattttc

SEQ ID NO: 439956 - DNA, 25 bp, Homo sapien
gctactgcatctggagactttatca

SEQ ID NO: 439957 - DNA, 25 bp, Homo sapien
tgcgtgcacgcatatcttcactgag

SEQ ID NO: 439958 - DNA, 25 bp, Homo sapien
caggaggccctaacttggtgaagtc

SEQ ID NO: 439959 - DNA, 25 bp, Homo sapien
tctgtatgcctacatctgatatgca

SEQ ID NO: 439960 - DNA, 25 bp, Homo sapien
ggaaaactccctagcagcctatgaa

SEQ ID NO: 439961 - DNA, 25 bp, Homo sapien
tcatcttcgtttgcgggaagccgta

SEQ ID NO: 439962 - DNA, 25 bp, Homo sapien
gatagtttggctggcaaccctgtaa

SEQ ID NO: 439963 - DNA, 25 bp, Homo sapien
tattgatcccaccacctgaaagtag

SEQ ID NO: 439964 - DNA, 25 bp, Homo sapien
tggcaatagtctccacatcttagtt

SEQ ID NO: 439965 - DNA, 25 bp, Homo sapien
acagtaggtaggacaataggcatgc

SEQ ID NO: 439966 - DNA, 25 bp, Homo sapien
ccacagtaggtaggacaataggcat

SEQ ID NO: 439967 - DNA, 25 bp, Homo sapien
tctggtcctatagttaaacatctga

SEQ ID NO: 439968 - DNA, 25 bp, Homo sapien
caagtgaaaagcctaggccagagct

SEQ ID NO: 439969 - DNA, 25 bp, Homo sapien
tcatctcccaagagggcgtgccatg

SEQ ID NO: 439970 - DNA, 25 bp, Homo sapien
tgtttgcacacccataaaagctgga

SEQ ID NO: 439971 - DNA, 25 bp, Homo sapien
gacacccactattgggcaggaagtg

SEQ ID NO: 439972 - DNA, 25 bp, Homo sapien
taagtatagtacatgacccaggtgg

SEQ ID NO: 439973 - DNA, 25 bp, Homo sapien
tctggaaatctacctgcaaagggag

SEQ ID NO: 439974 - DNA, 25 bp, Homo sapien
gcgctgctaccccacaataatgaga

SEQ ID NO: 439975 - DNA, 25 bp, Homo sapien
tggaattcaataggtgcactctgcc

SEQ ID NO: 439976 - DNA, 25 bp, Homo sapien
gacattgcactccacatagactcgc

SEQ ID NO: 439977 - DNA, 25 bp, Homo sapien
gagaagaaccttcaaatgcgagcac

SEQ ID NO: 439978 - DNA, 25 bp, Homo sapien
gactcgctctgtacctagtctggaa

SEQ ID NO: 439979 - DNA, 25 bp, Homo sapien
taaaaaccatgtcgccacacaagcg

SEQ ID NO: 439980 - DNA, 25 bp, Homo sapien
ccactactgaccaggacgggaattt

SEQ ID NO: 439981 - DNA, 25 bp, Homo sapien
catactactttacacaccccagcac

SEQ ID NO: 439982 - DNA, 25 bp, Homo sapien
atggagacccggcaaccactcagac

SEQ ID NO: 439983 - DNA, 25 bp, Homo sapien
ggacactggcgagccgcttctccat

SEQ ID NO: 439984 - DNA, 25 bp, Homo sapien
ggtctcgggcggcgagagctcagca

SEQ ID NO: 439985 - DNA, 25 bp, Homo sapien
cgcgcgccacgcgcaaggctagcat

SEQ ID NO: 439986 - DNA, 25 bp, Homo sapien
ggcgcgtcgcttactcggccgcgtt

SEQ ID NO: 439987 - DNA, 25 bp, Homo sapien
acagtggttccgctggccgatcccg

SEQ ID NO: 439988 - DNA, 25 bp, Homo sapien
cagccgcaagccaagagcggccgga

SEQ ID NO: 439989 - DNA, 25 bp, Homo sapien
gacgcagcctccagcgttcggccag

SEQ ID NO: 439990 - DNA, 25 bp, Homo sapien
cccgccgccgcctcatcggtacgta

SEQ ID NO: 439991 - DNA, 25 bp, Homo sapien
tgcaggggcggcgaccccagcccag

SEQ ID NO: 439992 - DNA, 25 bp, Homo sapien
tgagtgcaggggcggcgaccccagc

SEQ ID NO: 439993 - DNA, 25 bp, Homo sapien
ccgccgccgcctcatcggtacgtac

SEQ ID NO: 439994 - DNA, 25 bp, Homo sapien
aggaaacggaagcgtccgagctgca

SEQ ID NO: 439995 - DNA, 25 bp, Homo sapien
taggaaacggaagcgtccgagctgc

SEQ ID NO: 439996 - DNA, 25 bp, Homo sapien
tcagggaagagtctaaaagttagga

SEQ ID NO: 439997 - DNA, 25 bp, Homo sapien
ttaggaaacggaagcgtccgagctg

SEQ ID NO: 439998 - DNA, 25 bp, Homo sapien
gagaggatttctaacttgaccacag

SEQ ID NO: 439999 - DNA, 25 bp, Homo sapien
tcaatgcaatatgcagaggcggccc

SEQ ID NO: 440000 - DNA, 25 bp, Homo sapien
ggcccttccagcaacgggtgcagat

SEQ ID NO: 440001 - DNA, 25 bp, Homo sapien
tgaccacagagaccgtaggtggacc

SEQ ID NO: 440002 - DNA, 25 bp, Homo sapien
tatcagtggagttgagacccctgcc

SEQ ID NO: 440003 - DNA, 25 bp, Homo sapien
tcaggatatggcaacttcaaagtat

SEQ ID NO: 440004 - DNA, 25 bp, Homo sapien
gataacctgtggcatactcgaccaa

SEQ ID NO: 440005 - DNA, 25 bp, Homo sapien
caactactgccgttctgggaaggac

SEQ ID NO: 440006 - DNA, 25 bp, Homo sapien
agtaaaatactatgaattcatactt

SEQ ID NO: 440007 - DNA, 25 bp, Homo sapien
taaaatactatgaattcatactttg

SEQ ID NO: 440008 - DNA, 25 bp, Homo sapien
gtaaaatactatgaattcatacttt

SEQ ID NO: 440009 - DNA, 25 bp, Homo sapien
caagccaattctcgtcattgacaac

SEQ ID NO: 440010 - DNA, 25 bp, Homo sapien
catattcgggattgtccatgggttt

SEQ ID NO: 440011 - DNA, 25 bp, Homo sapien
caaatctgttagtccagctaaagca

SEQ ID NO: 440012 - DNA, 25 bp, Homo sapien
gctaaagcaaaaactcctagtgcaa

SEQ ID NO: 440013 - DNA, 25 bp, Homo sapien
catactctgactgtatctgcattac

SEQ ID NO: 440014 - DNA, 25 bp, Homo sapien
ccatactctgactgtatctgcatta

SEQ ID NO: 440015 - DNA, 25 bp, Homo sapien
cccaaagctgatctttgattggccc

SEQ ID NO: 440016 - DNA, 25 bp, Homo sapien
ggatcaagagcacttcccaaagctg

SEQ ID NO: 440017 - DNA, 25 bp, Homo sapien
taagatctgcataggtcaagctaac

SEQ ID NO: 440018 - DNA, 25 bp, Homo sapien
cagtttcgagcaataaatccatcca

SEQ ID NO: 440019 - DNA, 25 bp, Homo sapien
gcaaactcttagactgacagtgaag

SEQ ID NO: 440020 - DNA, 25 bp, Homo sapien
cagatatgattcctagctcttggga

SEQ ID NO: 440021 - DNA, 25 bp, Homo sapien
cagtttaacttggtctgagggagaa

SEQ ID NO: 440022 - DNA, 25 bp, Homo sapien
tgataccgagggaccatgtggcagc

SEQ ID NO: 440023 - DNA, 25 bp, Homo sapien
gaaattaccttgcactgagtctgaa

SEQ ID NO: 440024 - DNA, 25 bp, Homo sapien
tctccaagtctatggaagagggtct

SEQ ID NO: 440025 - DNA, 25 bp, Homo sapien
gaagaatgccactgatgcaaagaca

SEQ ID NO: 440026 - DNA, 25 bp, Homo sapien
taagagactgttccgtagcaagttg

SEQ ID NO: 440027 - DNA, 25 bp, Homo sapien
caagaactatcatgtacttaggaat

SEQ ID NO: 440028 - DNA, 25 bp, Homo sapien
gaactatcatgtacttaggaataag

SEQ ID NO: 440029 - DNA, 25 bp, Homo sapien
agaactatcatgtacttaggaataa

SEQ ID NO: 440030 - DNA, 25 bp, Homo sapien
ccaagaactatcatgtacttaggaa

SEQ ID NO: 440031 - DNA, 25 bp, Homo sapien
cattactacagctatagagggtcac

SEQ ID NO: 440032 - DNA, 25 bp, Homo sapien
ctatatgggttaagacaaaatgggt

SEQ ID NO: 440033 - DNA, 25 bp, Homo sapien
tttaacagcataacttcaagacata

SEQ ID NO: 440034 - DNA, 25 bp, Homo sapien
tcaagacatacaaagcaggccgggt

SEQ ID NO: 440035 - DNA, 25 bp, Homo sapien
aaatcttctctggtgagtaatgcct

SEQ ID NO: 440036 - DNA, 25 bp, Homo sapien
aaaatcttctctggtgagtaatgcc

SEQ ID NO: 440037 - DNA, 25 bp, Homo sapien
gtggtcccagactgttagcattcct

SEQ ID NO: 440038 - DNA, 25 bp, Homo sapien
tatgtggtcccagactgttagcatt

SEQ ID NO: 440039 - DNA, 25 bp, Homo sapien
tctatgtggtcccagactgttagca

SEQ ID NO: 440040 - DNA, 25 bp, Homo sapien
tggtctatgtggtcccagactgtta

SEQ ID NO: 440041 - DNA, 25 bp, Homo sapien
gaagttgggctctgataaaccacct

SEQ ID NO: 440042 - DNA, 25 bp, Homo sapien
tgacagtagctaaagcccagagccc

SEQ ID NO: 440043 - DNA, 25 bp, Homo sapien
aatcaatccatgaagctcagttatg

SEQ ID NO: 440044 - DNA, 25 bp, Homo sapien
caccttctagcctgcagctaggata

SEQ ID NO: 440045 - DNA, 25 bp, Homo sapien
taaactcactggcttcattggcctc

SEQ ID NO: 440046 - DNA, 25 bp, Homo sapien
gaatcagcctgttctttcaagccca

SEQ ID NO: 440047 - DNA, 25 bp, Homo sapien
ttaaactgcacaaaccaaggttggc

SEQ ID NO: 440048 - DNA, 25 bp, Homo sapien
tggcctctagcaagagaatcagcct

SEQ ID NO: 440049 - DNA, 25 bp, Homo sapien
tcaatgttgacagctgctgactgat

SEQ ID NO: 440050 - DNA, 25 bp, Homo sapien
ctcaatgttgacagctgctgactga

SEQ ID NO: 440051 - DNA, 25 bp, Homo sapien
caatgttgacagctgctgactgatc

SEQ ID NO: 440052 - DNA, 25 bp, Homo sapien
aatgttgacagctgctgactgatca

SEQ ID NO: 440053 - DNA, 25 bp, Homo sapien
tggttaacatcaacactataggttt

SEQ ID NO: 440054 - DNA, 25 bp, Homo sapien
tacacacagatctaagttcagtgga

SEQ ID NO: 440055 - DNA, 25 bp, Homo sapien
tcacatagcccacaaagccagacat

SEQ ID NO: 440056 - DNA, 25 bp, Homo sapien
gttcagtggacataaatctaagtag

SEQ ID NO: 440057 - DNA, 25 bp, Homo sapien
gctttcacactacaacagcagagct

SEQ ID NO: 440058 - DNA, 25 bp, Homo sapien
ttaaatattttctgtggctgctttc

SEQ ID NO: 440059 - DNA, 25 bp, Homo sapien
tgctttcacactacaacagcagagc

SEQ ID NO: 440060 - DNA, 25 bp, Homo sapien
ggctgctttcacactacaacagcag

SEQ ID NO: 440061 - DNA, 25 bp, Homo sapien
caagtcacggcatttggagcaaaca

SEQ ID NO: 440062 - DNA, 25 bp, Homo sapien
ccttggcctagtccttgatggataa

SEQ ID NO: 440063 - DNA, 25 bp, Homo sapien
aaatgcttatccactcaagtcacgg

SEQ ID NO: 440064 - DNA, 25 bp, Homo sapien
gatgtacatattgatccttggccta

SEQ ID NO: 440065 - DNA, 25 bp, Homo sapien
gagtactcatatgcattatgaatac

SEQ ID NO: 440066 - DNA, 25 bp, Homo sapien
tatgaatacaataatatgtcattca

SEQ ID NO: 440067 - DNA, 25 bp, Homo sapien
aatacaataatatgtcattcagcct

SEQ ID NO: 440068 - DNA, 25 bp, Homo sapien
atgtcattcagccttaccacaaact

SEQ ID NO: 440069 - DNA, 25 bp, Homo sapien
tgttggaagagttcggtatctgaca

SEQ ID NO: 440070 - DNA, 25 bp, Homo sapien
gagttcggtatctgacataaaaaac

SEQ ID NO: 440071 - DNA, 25 bp, Homo sapien
acagcagcaatcaacattacatctc

SEQ ID NO: 440072 - DNA, 25 bp, Homo sapien
catctctcgaaatgatcatgtaagt

SEQ ID NO: 440073 - DNA, 25 bp, Homo sapien
ggcctggacctatatgaaacacctt

SEQ ID NO: 440074 - DNA, 25 bp, Homo sapien
aattctagactatccatggtagagg

SEQ ID NO: 440075 - DNA, 25 bp, Homo sapien
tagtctgggtttcacgtgccatcaa

SEQ ID NO: 440076 - DNA, 25 bp, Homo sapien
tattttcagtacattgggagccaaa

SEQ ID NO: 440077 - DNA, 25 bp, Homo sapien
gattgaaatacttggcaagtgttcg

SEQ ID NO: 440078 - DNA, 25 bp, Homo sapien
catagcaaggattgaaatacttggc

SEQ ID NO: 440079 - DNA, 25 bp, Homo sapien
ctagcagtggcatagcaaggattga

SEQ ID NO: 440080 - DNA, 25 bp, Homo sapien
cagtggcatagcaaggattgaaata

SEQ ID NO: 440081 - DNA, 25 bp, Homo sapien
cttgctgatgaatgttggttttaac

SEQ ID NO: 440082 - DNA, 25 bp, Homo sapien
gcactttccatgtaacgctacactc

SEQ ID NO: 440083 - DNA, 25 bp, Homo sapien
actttccatgtaacgctacactcaa

SEQ ID NO: 440084 - DNA, 25 bp, Homo sapien
agcactttccatgtaacgctacact

SEQ ID NO: 440085 - DNA, 25 bp, Homo sapien
cactttccatgtaacgctacactca

SEQ ID NO: 440086 - DNA, 25 bp, Homo sapien
tatctgaagataaatgctgtcagca

SEQ ID NO: 440087 - DNA, 25 bp, Homo sapien
gaagataaatgctgtcagcatagtt

SEQ ID NO: 440088 - DNA, 25 bp, Homo sapien
ctgaagataaatgctgtcagcatag

SEQ ID NO: 440089 - DNA, 25 bp, Homo sapien
atctgaagataaatgctgtcagcat

SEQ ID NO: 440090 - DNA, 25 bp, Homo sapien
tcttaacaatggtatcaatcaccaa

SEQ ID NO: 440091 - DNA, 25 bp, Homo sapien
cagctttacccagtcagtgctcaac

SEQ ID NO: 440092 - DNA, 25 bp, Homo sapien
tttaatttgtatgaaagctaacttc

SEQ ID NO: 440093 - DNA, 25 bp, Homo sapien
tgtatgaaagctaacttctccatct

SEQ ID NO: 440094 - DNA, 25 bp, Homo sapien
ctgaacagtcttccggccataatga

SEQ ID NO: 440095 - DNA, 25 bp, Homo sapien
tagtaactataagctgatgcagctg

SEQ ID NO: 440096 - DNA, 25 bp, Homo sapien
cagtcttccggccataatgatagta

SEQ ID NO: 440097 - DNA, 25 bp, Homo sapien
aatgatagtaactataagctgatgc

SEQ ID NO: 440098 - DNA, 25 bp, Homo sapien
cttactaacagtgagggatgacttt

SEQ ID NO: 440099 - DNA, 25 bp, Homo sapien
gaaattctgcatattcccatgatca

SEQ ID NO: 440100 - DNA, 25 bp, Homo sapien
ttttgatgacacagttgattctgac

SEQ ID NO: 440101 - DNA, 25 bp, Homo sapien
ttcaagctgaacaccaaaataggga

SEQ ID NO: 440102 - DNA, 25 bp, Homo sapien
atagggaaactcctgtacatttcca

SEQ ID NO: 440103 - DNA, 25 bp, Homo sapien
tggaaggcaggaacgtaactcactg

SEQ ID NO: 440104 - DNA, 25 bp, Homo sapien
tgaaccccatgacatttcctagtgc

SEQ ID NO: 440105 - DNA, 25 bp, Homo sapien
ttaaaagagaggtgtcaattctgcc

SEQ ID NO: 440106 - DNA, 25 bp, Homo sapien
caaaaatgtattgcccagttgtgta

SEQ ID NO: 440107 - DNA, 25 bp, Homo sapien
actgcttaacaaaagaaagagtctc

SEQ ID NO: 440108 - DNA, 25 bp, Homo sapien
ccagctcttttattcctttaactgc

SEQ ID NO: 440109 - DNA, 25 bp, Homo sapien
tgcttaacaaaagaaagagtctcca

SEQ ID NO: 440110 - DNA, 25 bp, Homo sapien
taactgcttaacaaaagaaagagtc

SEQ ID NO: 440111 - DNA, 25 bp, Homo sapien
taagcagcagcaactagtcaccact

SEQ ID NO: 440112 - DNA, 25 bp, Homo sapien
caataggccataggttaagcagcag

SEQ ID NO: 440113 - DNA, 25 bp, Homo sapien
catgaatggactctgtgaatcggaa

SEQ ID NO: 440114 - DNA, 25 bp, Homo sapien
tcggaaaacttacgtaacagcagag

SEQ ID NO: 440115 - DNA, 25 bp, Homo sapien
acaaccaggaccagcaagccacaga

SEQ ID NO: 440116 - DNA, 25 bp, Homo sapien
caagcgcagctcagctgccagtctg

SEQ ID NO: 440117 - DNA, 25 bp, Homo sapien
gccagtctgagaacaaccaggacca

SEQ ID NO: 440118 - DNA, 25 bp, Homo sapien
cacagagggacacgctggtgcagaa

SEQ ID NO: 440119 - DNA, 25 bp, Homo sapien
aatgaggccccgactaaaattcgct

SEQ ID NO: 440120 - DNA, 25 bp, Homo sapien
cgtttattaaccagagccagattga

SEQ ID NO: 440121 - DNA, 25 bp, Homo sapien
gagagcaagaatagccagccacatg

SEQ ID NO: 440122 - DNA, 25 bp, Homo sapien
tcctacagttcaggccggaaatccc

SEQ ID NO: 440123 - DNA, 25 bp, Homo sapien
gagccaccaaacaaactgtcctcgg

SEQ ID NO: 440124 - DNA, 25 bp, Homo sapien
tgcaagcttcctctagactcggatg

SEQ ID NO: 440125 - DNA, 25 bp, Homo sapien
ggtctctaaacaaagctcactcaag

SEQ ID NO: 440126 - DNA, 25 bp, Homo sapien
tccttacgagagacaaacgtccaca

SEQ ID NO: 440127 - DNA, 25 bp, Homo sapien
taatttctggatgaacagagctcac

SEQ ID NO: 440128 - DNA, 25 bp, Homo sapien
catggtctcaagatacatgtgctga

SEQ ID NO: 440129 - DNA, 25 bp, Homo sapien
cttctaggctgggaactgcttgagg

SEQ ID NO: 440130 - DNA, 25 bp, Homo sapien
gagcacctgggtcgtacactagcat

SEQ ID NO: 440131 - DNA, 25 bp, Homo sapien
ggtgtaaggataaggcaaaagctcc

SEQ ID NO: 440132 - DNA, 25 bp, Homo sapien
caggcacccgctgaatttctgaggc

SEQ ID NO: 440133 - DNA, 25 bp, Homo sapien
ggttctgagccagtagctgccatct

SEQ ID NO: 440134 - DNA, 25 bp, Homo sapien
aagtgagacctcagcaattccggga

SEQ ID NO: 440135 - DNA, 25 bp, Homo sapien
cacaggtccttagtaacaggtgctg

SEQ ID NO: 440136 - DNA, 25 bp, Homo sapien
gagattcatactggccacaggtcct

SEQ ID NO: 440137 - DNA, 25 bp, Homo sapien
cgtggcagctacaatcaaatctaag

SEQ ID NO: 440138 - DNA, 25 bp, Homo sapien
gaagaaagaacacccatgaagccac

SEQ ID NO: 440139 - DNA, 25 bp, Homo sapien
ggcagagacagacactaaccaataa

SEQ ID NO: 440140 - DNA, 25 bp, Homo sapien
tagggatatagtagcaatacagagc

SEQ ID NO: 440141 - DNA, 25 bp, Homo sapien
ttaaaatgggatggatagtacccca

SEQ ID NO: 440142 - DNA, 25 bp, Homo sapien
gcaagcatgaggacaccttgtgttt

SEQ ID NO: 440143 - DNA, 25 bp, Homo sapien
tccttcctgctctccatccctccat

SEQ ID NO: 440144 - DNA, 25 bp, Homo sapien
gactgtttccccctcatctttcctc

SEQ ID NO: 440145 - DNA, 25 bp, Homo sapien
cttcagatattccaggggaagggtc

SEQ ID NO: 440146 - DNA, 25 bp, Homo sapien
tcctccttcctgctctccatccctc

SEQ ID NO: 440147 - DNA, 25 bp, Homo sapien
gtagtttgtagggacgcagctctcc

SEQ ID NO: 440148 - DNA, 25 bp, Homo sapien
cgcagccttagctgagcagccgccg

SEQ ID NO: 440149 - DNA, 25 bp, Homo sapien
actgcgaggctggacgctacgggct

SEQ ID NO: 440150 - DNA, 25 bp, Homo sapien
agctctccacgtgcgcgactgcgag

SEQ ID NO: 440151 - DNA, 25 bp, Homo sapien
cggccttaaagcgtcaggatgagac

SEQ ID NO: 440152 - DNA, 25 bp, Homo sapien
gatgagacatcgcaagaggagctgc

SEQ ID NO: 440153 - DNA, 25 bp, Homo sapien
gaatcgttttgtcgttgccttcacc

SEQ ID NO: 440154 - DNA, 25 bp, Homo sapien
gaagtggcgcggctttaatcatctg

SEQ ID NO: 440155 - DNA, 25 bp, Homo sapien
cctatatttgccaacaatgttcaac

SEQ ID NO: 440156 - DNA, 25 bp, Homo sapien
tgaaatccctccgtggaagagcacg

SEQ ID NO: 440157 - DNA, 25 bp, Homo sapien
gctaaagcctgtactatattgcatg

SEQ ID NO: 440158 - DNA, 25 bp, Homo sapien
gaagagcacgcattctatctctgta

SEQ ID NO: 440159 - DNA, 25 bp, Homo sapien
ctctcggttgagtcctaagctgctg

SEQ ID NO: 440160 - DNA, 25 bp, Homo sapien
ctgccccagtgtctctcggttgagt

SEQ ID NO: 440161 - DNA, 25 bp, Homo sapien
gctgctggactgaacgccccacctt

SEQ ID NO: 440162 - DNA, 25 bp, Homo sapien
ggaatcttcttgaagctagagtctg

SEQ ID NO: 440163 - DNA, 25 bp, Homo sapien
cacagtcaagctaacaagctcctga

SEQ ID NO: 440164 - DNA, 25 bp, Homo sapien
ctctggaaggtgctgcaagccacac

SEQ ID NO: 440165 - DNA, 25 bp, Homo sapien
tggaaggtgctgcaagccacacagt

SEQ ID NO: 440166 - DNA, 25 bp, Homo sapien
gctgcaagccacacagtcaagctaa

SEQ ID NO: 440167 - DNA, 25 bp, Homo sapien
gaatggcactctcctcaagatgctt

SEQ ID NO: 440168 - DNA, 25 bp, Homo sapien
ggcttctagaatggcactctcctca

SEQ ID NO: 440169 - DNA, 25 bp, Homo sapien
tctagaatggcactctcctcaagat

SEQ ID NO: 440170 - DNA, 25 bp, Homo sapien
taaccggcttctagaatggcactct

SEQ ID NO: 440171 - DNA, 25 bp, Homo sapien
aaatcaagatgtggtcccaagcctc

SEQ ID NO: 440172 - DNA, 25 bp, Homo sapien
catcatggaaatcttgtggaaggcg

SEQ ID NO: 440173 - DNA, 25 bp, Homo sapien
tgtcaacaagctaggaagagaccag

SEQ ID NO: 440174 - DNA, 25 bp, Homo sapien
aggccaactgctcacttagtgcgag

SEQ ID NO: 440175 - DNA, 25 bp, Homo sapien
agcgctgtaaatatcctgccataga

SEQ ID NO: 440176 - DNA, 25 bp, Homo sapien
catagaaatacttctgtctacatgc

SEQ ID NO: 440177 - DNA, 25 bp, Homo sapien
ttgattcactatgctttatttcatg

SEQ ID NO: 440178 - DNA, 25 bp, Homo sapien
gattcactatgctttatttcatgga

SEQ ID NO: 440179 - DNA, 25 bp, Homo sapien
ctgatgagggcagtacagtttttgc

SEQ ID NO: 440180 - DNA, 25 bp, Homo sapien
gctgatgagggcagtacagtttttg

SEQ ID NO: 440181 - DNA, 25 bp, Homo sapien
tgttgtcccaatactgccaaagaaa

SEQ ID NO: 440182 - DNA, 25 bp, Homo sapien
gaaaccaatagccatcatagcagcc

SEQ ID NO: 440183 - DNA, 25 bp, Homo sapien
aagccatggcggtccccagtggcct

SEQ ID NO: 440184 - DNA, 25 bp, Homo sapien
gccaaagaaaccaatagccatcata

SEQ ID NO: 440185 - DNA, 25 bp, Homo sapien
atggcggccgaagctcacgccgctg

SEQ ID NO: 440186 - DNA, 25 bp, Homo sapien
tcctgtccgatggtaccaggttgca

SEQ ID NO: 440187 - DNA, 25 bp, Homo sapien
gatggtaccaggttgcaagaaaggc

SEQ ID NO: 440188 - DNA, 25 bp, Homo sapien
aaagatctccccgttggactgaggg

SEQ ID NO: 440189 - DNA, 25 bp, Homo sapien
tgcaagaaaggcgtgctcgctgctc

SEQ ID NO: 440190 - DNA, 25 bp, Homo sapien
cctataaggtttcatgactccacat

SEQ ID NO: 440191 - DNA, 25 bp, Homo sapien
tcagtgccaacagaaggctgctgac

SEQ ID NO: 440192 - DNA, 25 bp, Homo sapien
ctcagtgccaacagaaggctgctga

SEQ ID NO: 440193 - DNA, 25 bp, Homo sapien
gatctcttgggatctttcccacaaa

SEQ ID NO: 440194 - DNA, 25 bp, Homo sapien
caaataatggaacaagttcatcctc

SEQ ID NO: 440195 - DNA, 25 bp, Homo sapien
tcattagacgaagatcccatatagg

SEQ ID NO: 440196 - DNA, 25 bp, Homo sapien
gagaccagtgagtggatccatcatt

SEQ ID NO: 440197 - DNA, 25 bp, Homo sapien
ctcccgagctgcttttgtacaaaaa

SEQ ID NO: 440198 - DNA, 25 bp, Homo sapien
acagttttaacagcctcccgagctg

SEQ ID NO: 440199 - DNA, 25 bp, Homo sapien
tatacagttttaacagcctcccgag

SEQ ID NO: 440200 - DNA, 25 bp, Homo sapien
taacagcctcccgagctgcttttgt

SEQ ID NO: 440201 - DNA, 25 bp, Homo sapien
tcttaggaatagagcccacaaaaag

SEQ ID NO: 440202 - DNA, 25 bp, Homo sapien
caaaaagcctattgttggcaactga

SEQ ID NO: 440203 - DNA, 25 bp, Homo sapien
tcttgtcatccggttggtggtataa

SEQ ID NO: 440204 - DNA, 25 bp, Homo sapien
ggtggtataaaatgacgtctgtaag

SEQ ID NO: 440205 - DNA, 25 bp, Homo sapien
tgccataacctcaggatcaggatct

SEQ ID NO: 440206 - DNA, 25 bp, Homo sapien
ttaccactcattaacctacgccttg

SEQ ID NO: 440207 - DNA, 25 bp, Homo sapien
ataggatcagcccattcaacagttc

SEQ ID NO: 440208 - DNA, 25 bp, Homo sapien
gatcagcccattcaacagttccaac

SEQ ID NO: 440209 - DNA, 25 bp, Homo sapien
tggcaaggttgcgtacaaacagcac

SEQ ID NO: 440210 - DNA, 25 bp, Homo sapien
ttacagtattggcaaggttgcgtac

SEQ ID NO: 440211 - DNA, 25 bp, Homo sapien
aggttgcgtacaaacagcactttta

SEQ ID NO: 440212 - DNA, 25 bp, Homo sapien
tattggcaaggttgcgtacaaacag

SEQ ID NO: 440213 - DNA, 25 bp, Homo sapien
tcaatattttctccctccaagtctt

SEQ ID NO: 440214 - DNA, 25 bp, Homo sapien
ttctgatttggtggcttggcaaaaa

SEQ ID NO: 440215 - DNA, 25 bp, Homo sapien
atttggtggcttggcaaaaacaatt

SEQ ID NO: 440216 - DNA, 25 bp, Homo sapien
cttttctgatttggtggcttggcaa

SEQ ID NO: 440217 - DNA, 25 bp, Homo sapien
gattttttgctgcttgcctctgagc

SEQ ID NO: 440218 - DNA, 25 bp, Homo sapien
tttttgctgcttgcctctgagcttt

SEQ ID NO: 440219 - DNA, 25 bp, Homo sapien
attttttgctgcttgcctctgagct

SEQ ID NO: 440220 - DNA, 25 bp, Homo sapien
ttgattttttgctgcttgcctctga

SEQ ID NO: 440221 - DNA, 25 bp, Homo sapien
taaccatagtatggatcttcatatc

SEQ ID NO: 440222 - DNA, 25 bp, Homo sapien
tcgcacctcgaacgcctcttgctga

SEQ ID NO: 440223 - DNA, 25 bp, Homo sapien
ccaccacgatagttatggtaatcat

SEQ ID NO: 440224 - DNA, 25 bp, Homo sapien
ctctttgttgttgggcacctcctct

SEQ ID NO: 440225 - DNA, 25 bp, Homo sapien
catgctaggagttatgaaggatttc

SEQ ID NO: 440226 - DNA, 25 bp, Homo sapien
aatagaatatgctcctatacagccg

SEQ ID NO: 440227 - DNA, 25 bp, Homo sapien
tagtttaataacttgcactgcagag

SEQ ID NO: 440228 - DNA, 25 bp, Homo sapien
cccgtatttgattccatgatcttca

SEQ ID NO: 440229 - DNA, 25 bp, Homo sapien
agggaaccacactctccatgaccag

SEQ ID NO: 440230 - DNA, 25 bp, Homo sapien
ggaatggtcactgtccaagggaacc

SEQ ID NO: 440231 - DNA, 25 bp, Homo sapien
caccgtgcaggtggaatggtcactg

SEQ ID NO: 440232 - DNA, 25 bp, Homo sapien
tgttctccaccgtgcaggtggaatg

SEQ ID NO: 440233 - DNA, 25 bp, Homo sapien
tacagcatatacatctgctggatgc

SEQ ID NO: 440234 - DNA, 25 bp, Homo sapien
gcatatacatctgctggatgctata

SEQ ID NO: 440235 - DNA, 25 bp, Homo sapien
atacatctgctggatgctataaaac

SEQ ID NO: 440236 - DNA, 25 bp, Homo sapien
catcaggtacagcatatacatctgc

SEQ ID NO: 440237 - DNA, 25 bp, Homo sapien
tggcagctagcacagaggtctgtct

SEQ ID NO: 440238 - DNA, 25 bp, Homo sapien
taactctcattggaaggctaattgg

SEQ ID NO: 440239 - DNA, 25 bp, Homo sapien
gcatctccaaggtagttaagctggg

SEQ ID NO: 440240 - DNA, 25 bp, Homo sapien
tctgcccttgaactggctgcctaag

SEQ ID NO: 440241 - DNA, 25 bp, Homo sapien
agctgacagctgacatggatttctc

SEQ ID NO: 440242 - DNA, 25 bp, Homo sapien
tccagcaggtcatcgaccagaactc

SEQ ID NO: 440243 - DNA, 25 bp, Homo sapien
ccgctagattaaagcatttgcctct

SEQ ID NO: 440244 - DNA, 25 bp, Homo sapien
gaactcccaccgctagattaaagca

SEQ ID NO: 440245 - DNA, 25 bp, Homo sapien
cttggccgtatacttgcaacctgtt

SEQ ID NO: 440246 - DNA, 25 bp, Homo sapien
aacctgttgacactccattggccac

SEQ ID NO: 440247 - DNA, 25 bp, Homo sapien
tgacactccattggccacggcaagt

SEQ ID NO: 440248 - DNA, 25 bp, Homo sapien
ttccacagagtgtggcttgacctcc

SEQ ID NO: 440249 - DNA, 25 bp, Homo sapien
gccttcctttcattattagcctcag

SEQ ID NO: 440250 - DNA, 25 bp, Homo sapien
cagtgtaacgatccagcaaccaagt

SEQ ID NO: 440251 - DNA, 25 bp, Homo sapien
tgtagctaaccaaggccctttattc

SEQ ID NO: 440252 - DNA, 25 bp, Homo sapien
tgtccgataggatcctgtagctaac

SEQ ID NO: 440253 - DNA, 25 bp, Homo sapien
tcctcaaaagacaaaatgagcttac

SEQ ID NO: 440254 - DNA, 25 bp, Homo sapien
tctcctcaaaagacaaaatgagctt

SEQ ID NO: 440255 - DNA, 25 bp, Homo sapien
agtctcctcaaaagacaaaatgagc

SEQ ID NO: 440256 - DNA, 25 bp, Homo sapien
tcacatagcagtctcctcaaaagac

SEQ ID NO: 440257 - DNA, 25 bp, Homo sapien
tatagcagccagatctattccagcc

SEQ ID NO: 440258 - DNA, 25 bp, Homo sapien
agccagatctattccagccagctct

SEQ ID NO: 440259 - DNA, 25 bp, Homo sapien
gctgttcttctaactggaagtcatc

SEQ ID NO: 440260 - DNA, 25 bp, Homo sapien
gggcttctatagcagccagatctat

SEQ ID NO: 440261 - DNA, 25 bp, Homo sapien
tctgatctgtcagcaccgggaaacg

SEQ ID NO: 440262 - DNA, 25 bp, Homo sapien
gcagccatgttgtcgcgtctggtcc

SEQ ID NO: 440263 - DNA, 25 bp, Homo sapien
ccgggaaacgtggaactcacacatt

SEQ ID NO: 440264 - DNA, 25 bp, Homo sapien
tggtccttaagagtccctggcccag

SEQ ID NO: 440265 - DNA, 25 bp, Homo sapien
gaagtcacatgaagaccttgaccct

SEQ ID NO: 440266 - DNA, 25 bp, Homo sapien
agcatgaagtcacatgaagaccttg

SEQ ID NO: 440267 - DNA, 25 bp, Homo sapien
ctcaactactgacagtgtgcagcat

SEQ ID NO: 440268 - DNA, 25 bp, Homo sapien
agccaaactcaactactgacagtgt

SEQ ID NO: 440269 - DNA, 25 bp, Homo sapien
tgatcaagctcaaaagtcccgtact

SEQ ID NO: 440270 - DNA, 25 bp, Homo sapien
tgtttatcacggcaggccagccggt

SEQ ID NO: 440271 - DNA, 25 bp, Homo sapien
gccagccggtcactgatcaagctca

SEQ ID NO: 440272 - DNA, 25 bp, Homo sapien
tttatcacggcaggccagccggtca

SEQ ID NO: 440273 - DNA, 25 bp, Homo sapien
gagcagtggctcacgcctgtaatcc

SEQ ID NO: 440274 - DNA, 25 bp, Homo sapien
cattaaagaagcaacaacaggctgg

SEQ ID NO: 440275 - DNA, 25 bp, Homo sapien
cagcactttgggaggccgagacggg

SEQ ID NO: 440276 - DNA, 25 bp, Homo sapien
agccgggcatagtggcgggcaactg

SEQ ID NO: 440277 - DNA, 25 bp, Homo sapien
gaagtttgatgcctgttggctacag

SEQ ID NO: 440278 - DNA, 25 bp, Homo sapien
ttcatccaagaagccaagaagtttt

SEQ ID NO: 440279 - DNA, 25 bp, Homo sapien
tcatacaacaaagctattcagggct

SEQ ID NO: 440280 - DNA, 25 bp, Homo sapien
gtttttccaagaagtttgatgcctg

SEQ ID NO: 440281 - DNA, 25 bp, Homo sapien
ttcctctggcattggcagaagccat

SEQ ID NO: 440282 - DNA, 25 bp, Homo sapien
gttcctctggcattggcagaagcca

SEQ ID NO: 440283 - DNA, 25 bp, Homo sapien
tgttcctctggcattggcagaagcc

SEQ ID NO: 440284 - DNA, 25 bp, Homo sapien
ctgttcctctggcattggcagaagc

SEQ ID NO: 440285 - DNA, 25 bp, Homo sapien
catgtactgtcataatccgtatgca

SEQ ID NO: 440286 - DNA, 25 bp, Homo sapien
caagtctgttgactaatctgtcccc

SEQ ID NO: 440287 - DNA, 25 bp, Homo sapien
ccttgttctcaacagacagtattag

SEQ ID NO: 440288 - DNA, 25 bp, Homo sapien
tctgtgaccacaggacttgtacctt

SEQ ID NO: 440289 - DNA, 25 bp, Homo sapien
gtcaaagtatgtcgcctaacacaat

SEQ ID NO: 440290 - DNA, 25 bp, Homo sapien
gggagtcaaagtatgtcgcctaaca

SEQ ID NO: 440291 - DNA, 25 bp, Homo sapien
gtatgtcgcctaacacaatatctgt

SEQ ID NO: 440292 - DNA, 25 bp, Homo sapien
tttaggggagtcaaagtatgtcgcc

SEQ ID NO: 440293 - DNA, 25 bp, Homo sapien
gatgctgcgatgtaaggacaagctt

SEQ ID NO: 440294 - DNA, 25 bp, Homo sapien
ggatgctgcgatgtaaggacaagct

SEQ ID NO: 440295 - DNA, 25 bp, Homo sapien
agggatgctgcgatgtaaggacaag

SEQ ID NO: 440296 - DNA, 25 bp, Homo sapien
tgctgcgatgtaaggacaagcttca

SEQ ID NO: 440297 - DNA, 25 bp, Homo sapien
aagagagtcaaagcggacattgtgg

SEQ ID NO: 440298 - DNA, 25 bp, Homo sapien
gataaagagagtcaaagcggacatt

SEQ ID NO: 440299 - DNA, 25 bp, Homo sapien
taaagagagtcaaagcggacattgt

SEQ ID NO: 440300 - DNA, 25 bp, Homo sapien
gaggataaagagagtcaaagcggac

SEQ ID NO: 440301 - DNA, 25 bp, Homo sapien
cagaccaaacaggacttaggtcggg

SEQ ID NO: 440302 - DNA, 25 bp, Homo sapien
aaaagaacgcggacagcctggtcca

SEQ ID NO: 440303 - DNA, 25 bp, Homo sapien
tgctccagccaaaagaacgcggaca

SEQ ID NO: 440304 - DNA, 25 bp, Homo sapien
tggtccaccaggcaagtaagagtgt

SEQ ID NO: 440305 - DNA, 25 bp, Homo sapien
ggcaagtaagagtgtgctgccccat

SEQ ID NO: 440306 - DNA, 25 bp, Homo sapien
tgagaagaaaggagctggagctcat

SEQ ID NO: 440307 - DNA, 25 bp, Homo sapien
gagaagaaaggagctggagctcatg

SEQ ID NO: 440308 - DNA, 25 bp, Homo sapien
ctgagaagaaaggagctggagctca

SEQ ID NO: 440309 - DNA, 25 bp, Homo sapien
agaagaaaggagctggagctcatga

SEQ ID NO: 440310 - DNA, 25 bp, Homo sapien
gtcatccaacccctgggataatgat

SEQ ID NO: 440311 - DNA, 25 bp, Homo sapien
tctacctatggacccagcagagagc

SEQ ID NO: 440312 - DNA, 25 bp, Homo sapien
tgaagctcagctgttcgtccagcct

SEQ ID NO: 440313 - DNA, 25 bp, Homo sapien
tagcaatggtcataaggaaggaccc

SEQ ID NO: 440314 - DNA, 25 bp, Homo sapien
ctcaggtgttatcttagattctttg

SEQ ID NO: 440315 - DNA, 25 bp, Homo sapien
tggagtagctacatagaatgctgac

SEQ ID NO: 440316 - DNA, 25 bp, Homo sapien
aggaatgcaaagatgctcagtgtct

SEQ ID NO: 440317 - DNA, 25 bp, Homo sapien
cccacaagctcaaaagaaatggagt

SEQ ID NO: 440318 - DNA, 25 bp, Homo sapien
gtcatgggcatgacctcgtggtctc

SEQ ID NO: 440319 - DNA, 25 bp, Homo sapien
tattcctcaagtttgttcccaatga

SEQ ID NO: 440320 - DNA, 25 bp, Homo sapien
ccaatgactaagtctgccagcttaa

SEQ ID NO: 440321 - DNA, 25 bp, Homo sapien
tctctgacgccaaatgaccagggca

SEQ ID NO: 440322 - DNA, 25 bp, Homo sapien
ggcagattcacgtactcactgtctc

SEQ ID NO: 440323 - DNA, 25 bp, Homo sapien
atattccccccactcccaacttctg

SEQ ID NO: 440324 - DNA, 25 bp, Homo sapien
gattcacgtactcactgtctcccaa

SEQ ID NO: 440325 - DNA, 25 bp, Homo sapien
tctgcaggcagattcacgtactcac

SEQ ID NO: 440326 - DNA, 25 bp, Homo sapien
ccaactagattcatgggcccaagca

SEQ ID NO: 440327 - DNA, 25 bp, Homo sapien
tgcagacctagctggccagacattt

SEQ ID NO: 440328 - DNA, 25 bp, Homo sapien
gaacagagcctattaagacctgcag

SEQ ID NO: 440329 - DNA, 25 bp, Homo sapien
cagacatttgtaaacctagctggtt

SEQ ID NO: 440330 - DNA, 25 bp, Homo sapien
ttagtgctcacatgaccaattaatg

SEQ ID NO: 440331 - DNA, 25 bp, Homo sapien
tgagcaccatgttggttatttcagc

SEQ ID NO: 440332 - DNA, 25 bp, Homo sapien
agggtggttatccttagtgctcaca

SEQ ID NO: 440333 - DNA, 25 bp, Homo sapien
catgaccaattaatgagcaccatgt

SEQ ID NO: 440334 - DNA, 25 bp, Homo sapien
atcacttcctgatgagacctccatc

SEQ ID NO: 440335 - DNA, 25 bp, Homo sapien
catttcacccagcttgaaatccata

SEQ ID NO: 440336 - DNA, 25 bp, Homo sapien
agtcatttcacccagcttgaaatcc

SEQ ID NO: 440337 - DNA, 25 bp, Homo sapien
ttcacccagcttgaaatccatatga

SEQ ID NO: 440338 - DNA, 25 bp, Homo sapien
acatggctttaaaacggccacaaag

SEQ ID NO: 440339 - DNA, 25 bp, Homo sapien
ttaaaacggccacaaagtgttgata

SEQ ID NO: 440340 - DNA, 25 bp, Homo sapien
aaacggccacaaagtgttgataatg

SEQ ID NO: 440341 - DNA, 25 bp, Homo sapien
atggctttaaaacggccacaaagtg

SEQ ID NO: 440342 - DNA, 25 bp, Homo sapien
acacacaggtttcattggagaagaa

SEQ ID NO: 440343 - DNA, 25 bp, Homo sapien
catcaagaactgtagaatgtgacca

SEQ ID NO: 440344 - DNA, 25 bp, Homo sapien
ccattgctccagagaaagctcatca

SEQ ID NO: 440345 - DNA, 25 bp, Homo sapien
ttcttgtctagttcacaaagcagtg

SEQ ID NO: 440346 - DNA, 25 bp, Homo sapien
aaaagtacaacctacctgccagaca

SEQ ID NO: 440347 - DNA, 25 bp, Homo sapien
tccaaaagtacaacctacctgccag

SEQ ID NO: 440348 - DNA, 25 bp, Homo sapien
caaaagtacaacctacctgccagac

SEQ ID NO: 440349 - DNA, 25 bp, Homo sapien
taatccaaaagtacaacctacctgc

SEQ ID NO: 440350 - DNA, 25 bp, Homo sapien
ttggttttactggtgacaagcagat

SEQ ID NO: 440351 - DNA, 25 bp, Homo sapien
tgcctgccctgtgcaaggcaatcca

SEQ ID NO: 440352 - DNA, 25 bp, Homo sapien
tgacaagcagatgtcacccagagca

SEQ ID NO: 440353 - DNA, 25 bp, Homo sapien
tgtccttttggttttactggtgaca

SEQ ID NO: 440354 - DNA, 25 bp, Homo sapien
ggccaacacatctgatgggcagact

SEQ ID NO: 440355 - DNA, 25 bp, Homo sapien
catttattaaggttcttttgtgcga

SEQ ID NO: 440356 - DNA, 25 bp, Homo sapien
taaagaggttggacacctggatcct

SEQ ID NO: 440357 - DNA, 25 bp, Homo sapien
aacacatctgatgggcagactgccc

SEQ ID NO: 440358 - DNA, 25 bp, Homo sapien
gggtgaaatgtatctcttggctgct

SEQ ID NO: 440359 - DNA, 25 bp, Homo sapien
gcctgagtattctctgctgaggtct

SEQ ID NO: 440360 - DNA, 25 bp, Homo sapien
cgatccaacagattccaactctggg

SEQ ID NO: 440361 - DNA, 25 bp, Homo sapien
gaatgatttatgttcacacggcctg

SEQ ID NO: 440362 - DNA, 25 bp, Homo sapien
cctatagaaactctccgattgaaaa

SEQ ID NO: 440363 - DNA, 25 bp, Homo sapien
ctggtcatcagatcaaggtcacaga

SEQ ID NO: 440364 - DNA, 25 bp, Homo sapien
gaaaacacacgagtaacttaattgc

SEQ ID NO: 440365 - DNA, 25 bp, Homo sapien
gcctgctgactggattcaatgccaa

SEQ ID NO: 440366 - DNA, 25 bp, Homo sapien
tgccctgtgtcccttgacaacggaa

SEQ ID NO: 440367 - DNA, 25 bp, Homo sapien
cattgttcagcagcagaaaccttgc

SEQ ID NO: 440368 - DNA, 25 bp, Homo sapien
tcaagattgaccaaccagagttcat

SEQ ID NO: 440369 - DNA, 25 bp, Homo sapien
cttacgaggtaaccctgccctgtgt

SEQ ID NO: 440370 - DNA, 25 bp, Homo sapien
catagatcgggttggaacactggtg

SEQ ID NO: 440371 - DNA, 25 bp, Homo sapien
ggtctgaggaaggtaaacagctgct

SEQ ID NO: 440372 - DNA, 25 bp, Homo sapien
aacagctgctcgagccatagatcgg

SEQ ID NO: 440373 - DNA, 25 bp, Homo sapien
gggcatcacggtcaaaaaggatgca

SEQ ID NO: 440374 - DNA, 25 bp, Homo sapien
ctgggtaattcagtaagcgccaggc

SEQ ID NO: 440375 - DNA, 25 bp, Homo sapien
caggacaccaagtacccagaatggt

SEQ ID NO: 440376 - DNA, 25 bp, Homo sapien
cagaatggttctactgggtaattca

SEQ ID NO: 440377 - DNA, 25 bp, Homo sapien
ggcgctctcccttaagactattaaa

SEQ ID NO: 440378 - DNA, 25 bp, Homo sapien
catgagtcactacatctggacaaag

SEQ ID NO: 440379 - DNA, 25 bp, Homo sapien
gaaatgcatggtctcacatggacag

SEQ ID NO: 440380 - DNA, 25 bp, Homo sapien
aaaatacttatgatgggctgggtgc

SEQ ID NO: 440381 - DNA, 25 bp, Homo sapien
gaaaaggagttaccacataccacca

SEQ ID NO: 440382 - DNA, 25 bp, Homo sapien
tctgccatttgggttactgggggct

SEQ ID NO: 440383 - DNA, 25 bp, Homo sapien
tgagaggtggcttatcccacccgct

SEQ ID NO: 440384 - DNA, 25 bp, Homo sapien
gggcttgagaggtggcttatcccac

SEQ ID NO: 440385 - DNA, 25 bp, Homo sapien
gaggtggcttatcccacccgctcat

SEQ ID NO: 440386 - DNA, 25 bp, Homo sapien
ctttttgacccactgacacagctgt

SEQ ID NO: 440387 - DNA, 25 bp, Homo sapien
tttgacccactgacacagctgtagg

SEQ ID NO: 440388 - DNA, 25 bp, Homo sapien
ttttgacccactgacacagctgtag

SEQ ID NO: 440389 - DNA, 25 bp, Homo sapien
gacccactgacacagctgtaggttt

SEQ ID NO: 440390 - DNA, 25 bp, Homo sapien
tgtttgtgacagactgtagttcctt

SEQ ID NO: 440391 - DNA, 25 bp, Homo sapien
tcctgctgccagcattaggtttagc

SEQ ID NO: 440392 - DNA, 25 bp, Homo sapien
caggatagtggtctctacattcata

SEQ ID NO: 440393 - DNA, 25 bp, Homo sapien
gcgaggtgtgcatctctctgtttgt

SEQ ID NO: 440394 - DNA, 25 bp, Homo sapien
tcttgccaacaatgtctaaagctgt

SEQ ID NO: 440395 - DNA, 25 bp, Homo sapien
ccttctcacacttgatgatacaaca

SEQ ID NO: 440396 - DNA, 25 bp, Homo sapien
gaaggaagtgttgggagaagtgggc

SEQ ID NO: 440397 - DNA, 25 bp, Homo sapien
ctgcttatagacaatctcttgccaa

SEQ ID NO: 440398 - DNA, 25 bp, Homo sapien
ctttcctaagacaggagtgaccctt

SEQ ID NO: 440399 - DNA, 25 bp, Homo sapien
ttcctaagacaggagtgaccctttc

SEQ ID NO: 440400 - DNA, 25 bp, Homo sapien
ctaagacaggagtgaccctttcttc

SEQ ID NO: 440401 - DNA, 25 bp, Homo sapien
aagacaggagtgaccctttcttctg

SEQ ID NO: 440402 - DNA, 25 bp, Homo sapien
gaaagcttaaggattcatcttgatt

SEQ ID NO: 440403 - DNA, 25 bp, Homo sapien
aaagcttaaggattcatcttgattt

SEQ ID NO: 440404 - DNA, 25 bp, Homo sapien
aagcttaaggattcatcttgatttt

SEQ ID NO: 440405 - DNA, 25 bp, Homo sapien
cctggagctgttaaagtgtgcgtga

SEQ ID NO: 440406 - DNA, 25 bp, Homo sapien
gaaaagccatttttgtgtgcttgga

SEQ ID NO: 440407 - DNA, 25 bp, Homo sapien
ttatcggccttcctgcaatggtgct

SEQ ID NO: 440408 - DNA, 25 bp, Homo sapien
gagctctaatttgaagacgccctgg

SEQ ID NO: 440409 - DNA, 25 bp, Homo sapien
gatgtttctgtgctgctttagcatg

SEQ ID NO: 440410 - DNA, 25 bp, Homo sapien
ttgacagaagtagtggtgctccagg

SEQ ID NO: 440411 - DNA, 25 bp, Homo sapien
ccagggagccattgggctgctgcta

SEQ ID NO: 440412 - DNA, 25 bp, Homo sapien
tgctgctaataaggcatcatgatac

SEQ ID NO: 440413 - DNA, 25 bp, Homo sapien
gcatgatagtcacggctgacggtca

SEQ ID NO: 440414 - DNA, 25 bp, Homo sapien
cacctggtataaatagagggagaaa

SEQ ID NO: 440415 - DNA, 25 bp, Homo sapien
ttttttgttcaatcacctggtataa

SEQ ID NO: 440416 - DNA, 25 bp, Homo sapien
ttggcatgatagtcacggctgacgg

SEQ ID NO: 440417 - DNA, 25 bp, Homo sapien
atacagagtatccttcttactgctg

SEQ ID NO: 440418 - DNA, 25 bp, Homo sapien
cgttgattatatggatcccgctggc

SEQ ID NO: 440419 - DNA, 25 bp, Homo sapien
tcatgtcctcgtgcgagtcatacag

SEQ ID NO: 440420 - DNA, 25 bp, Homo sapien
tggcacaagccaagacgttgattat

SEQ ID NO: 440421 - DNA, 25 bp, Homo sapien
cacattccagaagtcagcggtaaaa

SEQ ID NO: 440422 - DNA, 25 bp, Homo sapien
cattccagaagtcagcggtaaaagc

SEQ ID NO: 440423 - DNA, 25 bp, Homo sapien
attccagaagtcagcggtaaaagca

SEQ ID NO: 440424 - DNA, 25 bp, Homo sapien
aacacattccagaagtcagcggtaa

SEQ ID NO: 440425 - DNA, 25 bp, Homo sapien
tgaagacatcagtgacttaggattc

SEQ ID NO: 440426 - DNA, 25 bp, Homo sapien
tcactgatgattgggttgatgaaga

SEQ ID NO: 440427 - DNA, 25 bp, Homo sapien
catcagtgacttaggattcttttga

SEQ ID NO: 440428 - DNA, 25 bp, Homo sapien
tagaggtcactgatgattgggttga

SEQ ID NO: 440429 - DNA, 25 bp, Homo sapien
atcaggtgtgcttctagtggaaccc

SEQ ID NO: 440430 - DNA, 25 bp, Homo sapien
ggtgtgcttctagtggaaccctttc

SEQ ID NO: 440431 - DNA, 25 bp, Homo sapien
tataatcaggtgtgcttctagtgga

SEQ ID NO: 440432 - DNA, 25 bp, Homo sapien
ctttctttgcataaaggcatgtctg

SEQ ID NO: 440433 - DNA, 25 bp, Homo sapien
tagccctgtctaagtccgatactga

SEQ ID NO: 440434 - DNA, 25 bp, Homo sapien
ccgatgatgccacctccttgtagag

SEQ ID NO: 440435 - DNA, 25 bp, Homo sapien
gatctgattgagcttggtatcgcca

SEQ ID NO: 440436 - DNA, 25 bp, Homo sapien
gagaattctcgggagctgtagatct

SEQ ID NO: 440437 - DNA, 25 bp, Homo sapien
ctgtaggcttggcagacaggcaaac

SEQ ID NO: 440438 - DNA, 25 bp, Homo sapien
caatatttttgtggtctagaatcct

SEQ ID NO: 440439 - DNA, 25 bp, Homo sapien
gcttccttcctcagaccatgatggc

SEQ ID NO: 440440 - DNA, 25 bp, Homo sapien
gagaatgaactgtaaccctctactt

SEQ ID NO: 440441 - DNA, 25 bp, Homo sapien
cgttattaacctgtaaccagcaagg

SEQ ID NO: 440442 - DNA, 25 bp, Homo sapien
cttttcctgtttgccaactgccttt

SEQ ID NO: 440443 - DNA, 25 bp, Homo sapien
ctgtcgttattaacctgtaaccagc

SEQ ID NO: 440444 - DNA, 25 bp, Homo sapien
tcctgtttgccaactgcctttgtac

SEQ ID NO: 440445 - DNA, 25 bp, Homo sapien
caaatatcctcttggaagctgtgcc

SEQ ID NO: 440446 - DNA, 25 bp, Homo sapien
tcttggaagctgtgcctgtctggga

SEQ ID NO: 440447 - DNA, 25 bp, Homo sapien
aagctgtgcctgtctgggaaggcat

SEQ ID NO: 440448 - DNA, 25 bp, Homo sapien
gttttcattgtttgccatagttttc

SEQ ID NO: 440449 - DNA, 25 bp, Homo sapien
gatcacaataaggtgtccacatggg

SEQ ID NO: 440450 - DNA, 25 bp, Homo sapien
gaaggattgggctgtcagtctgcaa

SEQ ID NO: 440451 - DNA, 25 bp, Homo sapien
tcagctaccataaaaactacgacgt

SEQ ID NO: 440452 - DNA, 25 bp, Homo sapien
cacatgggcccacgggaagaaggat

SEQ ID NO: 440453 - DNA, 25 bp, Homo sapien
acataaggatatgatgtgacactgt

SEQ ID NO: 440454 - DNA, 25 bp, Homo sapien
cacataaggatatgatgtgacactg

SEQ ID NO: 440455 - DNA, 25 bp, Homo sapien
aagctttccctgccacataaggata

SEQ ID NO: 440456 - DNA, 25 bp, Homo sapien
gctttccctgccacataaggatatg

SEQ ID NO: 440457 - DNA, 25 bp, Homo sapien
ctgagagatccagcacgtataaagg

SEQ ID NO: 440458 - DNA, 25 bp, Homo sapien
acagcattgttggtcctgagagatc

SEQ ID NO: 440459 - DNA, 25 bp, Homo sapien
ttagcctgaagagctacagcattgt

SEQ ID NO: 440460 - DNA, 25 bp, Homo sapien
tcactgcttagcctgaagagctaca

SEQ ID NO: 440461 - DNA, 25 bp, Homo sapien
gaccctgcctgcacgaactctccat

SEQ ID NO: 440462 - DNA, 25 bp, Homo sapien
ctgatccacagtgtaggtggtagac

SEQ ID NO: 440463 - DNA, 25 bp, Homo sapien
taggtggtagacaaatgaccctgcc

SEQ ID NO: 440464 - DNA, 25 bp, Homo sapien
cagtgtaggtggtagacaaatgacc

SEQ ID NO: 440465 - DNA, 25 bp, Homo sapien
ggatggagtgtcttctctggactct

SEQ ID NO: 440466 - DNA, 25 bp, Homo sapien
gctaatctgaagtgcccagaggcag

SEQ ID NO: 440467 - DNA, 25 bp, Homo sapien
aggcaggatgtgtccgaacagtcca

SEQ ID NO: 440468 - DNA, 25 bp, Homo sapien
tcatcaaacactctagtaccgaagc

SEQ ID NO: 440469 - DNA, 25 bp, Homo sapien
cttgatttttcttaccactgctggg

SEQ ID NO: 440470 - DNA, 25 bp, Homo sapien
ttcttgatttttcttaccactgctg

SEQ ID NO: 440471 - DNA, 25 bp, Homo sapien
gatttttcttaccactgctgggcat

SEQ ID NO: 440472 - DNA, 25 bp, Homo sapien
ttgatttttcttaccactgctgggc

SEQ ID NO: 440473 - DNA, 25 bp, Homo sapien
tggatgactctggtataccaacccg

SEQ ID NO: 440474 - DNA, 25 bp, Homo sapien
gagatttcgtttcctgaagtctgag

SEQ ID NO: 440475 - DNA, 25 bp, Homo sapien
cgttgatgctggcagtctcacggca

SEQ ID NO: 440476 - DNA, 25 bp, Homo sapien
tataccaacccgatgctccgagatt

SEQ ID NO: 440477 - DNA, 25 bp, Homo sapien
tgattctttaactgagtgaaacaaa

SEQ ID NO: 440478 - DNA, 25 bp, Homo sapien
tatttggacatctagcaaacacagg

SEQ ID NO: 440479 - DNA, 25 bp, Homo sapien
tgagtgaaacaaatggcttgactaa

SEQ ID NO: 440480 - DNA, 25 bp, Homo sapien
tggacatctagcaaacacagggtct

SEQ ID NO: 440481 - DNA, 25 bp, Homo sapien
gggtgcccctgcaatatgccaacgt

SEQ ID NO: 440482 - DNA, 25 bp, Homo sapien
tccttatatgatccctggtgaagac

SEQ ID NO: 440483 - DNA, 25 bp, Homo sapien
tgattggccgaaaatccttatatga

SEQ ID NO: 440484 - DNA, 25 bp, Homo sapien
cgtagaaactagttaaggcataagc

SEQ ID NO: 440485 - DNA, 25 bp, Homo sapien
cattaggccgctgatgagtcactct

SEQ ID NO: 440486 - DNA, 25 bp, Homo sapien
cctcctcgcagatcaatgctggcag

SEQ ID NO: 440487 - DNA, 25 bp, Homo sapien
tcctcgcagatcaatgctggcagct

SEQ ID NO: 440488 - DNA, 25 bp, Homo sapien
ctttgctgcattaggccgctgatga

SEQ ID NO: 440489 - DNA, 25 bp, Homo sapien
tgtctttgaggcaactttgccttaa

SEQ ID NO: 440490 - DNA, 25 bp, Homo sapien
gctcttataagagcatctgtgctaa

SEQ ID NO: 440491 - DNA, 25 bp, Homo sapien
caggcagtgaccattgatggtaatt

SEQ ID NO: 440492 - DNA, 25 bp, Homo sapien
taacaagactatgaccatccagcat

SEQ ID NO: 440493 - DNA, 25 bp, Homo sapien
ctgcaaaacctcgaagacctgtaca

SEQ ID NO: 440494 - DNA, 25 bp, Homo sapien
gcaaaacctcgaagacctgtacact

SEQ ID NO: 440495 - DNA, 25 bp, Homo sapien
aacctcgaagacctgtacactctca

SEQ ID NO: 440496 - DNA, 25 bp, Homo sapien
aaaacctcgaagacctgtacactct

SEQ ID NO: 440497 - DNA, 25 bp, Homo sapien
tttcatgagggcgacaactccattt

SEQ ID NO: 440498 - DNA, 25 bp, Homo sapien
tgtatggtggactagattctgcttg

SEQ ID NO: 440499 - DNA, 25 bp, Homo sapien
gcttgaaaactccaacggcattgag

SEQ ID NO: 440500 - DNA, 25 bp, Homo sapien
caagtctgttggctaggatcatgca

SEQ ID NO: 440501 - DNA, 25 bp, Homo sapien
atagttaccaacaggtactccctca

SEQ ID NO: 440502 - DNA, 25 bp, Homo sapien
tagttaccaacaggtactccctcat

SEQ ID NO: 440503 - DNA, 25 bp, Homo sapien
tgtctaaaatagttaccaacaggta

SEQ ID NO: 440504 - DNA, 25 bp, Homo sapien
catggaaacctgtggcaactgccct

SEQ ID NO: 440505 - DNA, 25 bp, Homo sapien
taattgtcattccatggaaacctgt

SEQ ID NO: 440506 - DNA, 25 bp, Homo sapien
cttgtaattgtcattccatggaaac

SEQ ID NO: 440507 - DNA, 25 bp, Homo sapien
tggaaacctgtggcaactgccctga

SEQ ID NO: 440508 - DNA, 25 bp, Homo sapien
tcagaggcaggcgattagcagctca

SEQ ID NO: 440509 - DNA, 25 bp, Homo sapien
tagggctgtgacacgtggccaagtc

SEQ ID NO: 440510 - DNA, 25 bp, Homo sapien
tgggaccttggaaccttctacgcca

SEQ ID NO: 440511 - DNA, 25 bp, Homo sapien
aaataacgcactgtgtgaaccaagc

SEQ ID NO: 440512 - DNA, 25 bp, Homo sapien
tgtgggaagcggagcgactagcgca

SEQ ID NO: 440513 - DNA, 25 bp, Homo sapien
actcggcgctggccccgagaacgtt

SEQ ID NO: 440514 - DNA, 25 bp, Homo sapien
gctagggatcggctccggagtcccc

SEQ ID NO: 440515 - DNA, 25 bp, Homo sapien
aggctgtggcggcagatgtgcggcg

SEQ ID NO: 440516 - DNA, 25 bp, Homo sapien
ccccgatctcctgcagtaggtgctc

SEQ ID NO: 440517 - DNA, 25 bp, Homo sapien
ccgatctcctgcagtaggtgctccg

SEQ ID NO: 440518 - DNA, 25 bp, Homo sapien
aggcccccgatctcctgcagtaggt

SEQ ID NO: 440519 - DNA, 25 bp, Homo sapien
gatctcctgcagtaggtgctccgca

SEQ ID NO: 440520 - DNA, 25 bp, Homo sapien
ccagttgaaagcaccgcggctctgg

SEQ ID NO: 440521 - DNA, 25 bp, Homo sapien
caagtgccctttgtggctagcctgg

SEQ ID NO: 440522 - DNA, 25 bp, Homo sapien
tcgggcgcattctccggcgagtcga

SEQ ID NO: 440523 - DNA, 25 bp, Homo sapien
cccattcgcgctcgccagttgaaag

SEQ ID NO: 440524 - DNA, 25 bp, Homo sapien
gatctcggtgccaggcgagttgccc

SEQ ID NO: 440525 - DNA, 25 bp, Homo sapien
agtgctgacacacaacaacagcgag

SEQ ID NO: 440526 - DNA, 25 bp, Homo sapien
aagttcaagaagtccccagccaagt

SEQ ID NO: 440527 - DNA, 25 bp, Homo sapien
gctggtgctgtcgtcctccttagga

SEQ ID NO: 440528 - DNA, 25 bp, Homo sapien
tggtcaaaggacctggcgcaaggac

SEQ ID NO: 440529 - DNA, 25 bp, Homo sapien
gcagtccgtctaagaagcacgcggg

SEQ ID NO: 440530 - DNA, 25 bp, Homo sapien
aacagcgtctcagtgtcgggcaagg

SEQ ID NO: 440531 - DNA, 25 bp, Homo sapien
gacacgtccattgaaagagcgtcca

SEQ ID NO: 440532 - DNA, 25 bp, Homo sapien
gcggacaggaccgacgtgagtcacc

SEQ ID NO: 440533 - DNA, 25 bp, Homo sapien
ctgcggacaggaccgacgtgagtca

SEQ ID NO: 440534 - DNA, 25 bp, Homo sapien
gaccgacgtgagtcacccgagttcc

SEQ ID NO: 440535 - DNA, 25 bp, Homo sapien
acaggaccgacgtgagtcacccgag

SEQ ID NO: 440536 - DNA, 25 bp, Homo sapien
agaagacagcgggtcccggccacca

SEQ ID NO: 440537 - DNA, 25 bp, Homo sapien
ctagaagacagcgggtcccggccac

SEQ ID NO: 440538 - DNA, 25 bp, Homo sapien
gaagacagcgggtcccggccaccat

SEQ ID NO: 440539 - DNA, 25 bp, Homo sapien
tagaagacagcgggtcccggccacc

SEQ ID NO: 440540 - DNA, 25 bp, Homo sapien
tgagcagccgcaactcgaactcgct

SEQ ID NO: 440541 - DNA, 25 bp, Homo sapien
aactcgctcaggacctcgtcagagg

SEQ ID NO: 440542 - DNA, 25 bp, Homo sapien
tcaggccgaacatgctgagcagccg

SEQ ID NO: 440543 - DNA, 25 bp, Homo sapien
tgagtgcctgcgatacaggtctagc

SEQ ID NO: 440544 - DNA, 25 bp, Homo sapien
aagctgcgcacagtgttggctcggc

SEQ ID NO: 440545 - DNA, 25 bp, Homo sapien
cctctccaaccggtggtctggggcg

SEQ ID NO: 440546 - DNA, 25 bp, Homo sapien
gcgcacagtgttggctcggctggct

SEQ ID NO: 440547 - DNA, 25 bp, Homo sapien
ggtctggggcgggtgagcccggctg

SEQ ID NO: 440548 - DNA, 25 bp, Homo sapien
tggaattcttgcacgtttagctgac

SEQ ID NO: 440549 - DNA, 25 bp, Homo sapien
catcacttgatttctctccaattct

SEQ ID NO: 440550 - DNA, 25 bp, Homo sapien
cttgcacgtttagctgactagaggc

SEQ ID NO: 440551 - DNA, 25 bp, Homo sapien
tttagctgactagaggcatgccttt

SEQ ID NO: 440552 - DNA, 25 bp, Homo sapien
ccttcatcatcaaagcaacagtcat

SEQ ID NO: 440553 - DNA, 25 bp, Homo sapien
taagccttcatcatcaaagcaacag

SEQ ID NO: 440554 - DNA, 25 bp, Homo sapien
gccttcatcatcaaagcaacagtca

SEQ ID NO: 440555 - DNA, 25 bp, Homo sapien
ccgtgtaagccttcatcatcaaagc

SEQ ID NO: 440556 - DNA, 25 bp, Homo sapien
tctccgtggcagtaaaaggcgtgat

SEQ ID NO: 440557 - DNA, 25 bp, Homo sapien
tcactgaagtccacgtacaaagggt

SEQ ID NO: 440558 - DNA, 25 bp, Homo sapien
tagcactgagttctgtcgggacaca

SEQ ID NO: 440559 - DNA, 25 bp, Homo sapien
tacagctggacttaaggcgtttccg

SEQ ID NO: 440560 - DNA, 25 bp, Homo sapien
ggattggacaatcactctgcaacat

SEQ ID NO: 440561 - DNA, 25 bp, Homo sapien
tgtgaactcaacagtagcactgcaa

SEQ ID NO: 440562 - DNA, 25 bp, Homo sapien
tttgccagagtaaccttccatgtag

SEQ ID NO: 440563 - DNA, 25 bp, Homo sapien
tcagcccctttgaagggatcactaa

SEQ ID NO: 440564 - DNA, 25 bp, Homo sapien
tgggcagaaaacacgatgtgcataa

SEQ ID NO: 440565 - DNA, 25 bp, Homo sapien
ctctcagatgaggtaaaggtaaaac

SEQ ID NO: 440566 - DNA, 25 bp, Homo sapien
cataattttgctgcgtgttgggcaa

SEQ ID NO: 440567 - DNA, 25 bp, Homo sapien
gagggccacgagatatcaattttaa

SEQ ID NO: 440568 - DNA, 25 bp, Homo sapien
gaattcctggtaattcggatgcaca

SEQ ID NO: 440569 - DNA, 25 bp, Homo sapien
aaacttggtccaacttctgcagtga

SEQ ID NO: 440570 - DNA, 25 bp, Homo sapien
gcaatttacccaagctgagcagacc

SEQ ID NO: 440571 - DNA, 25 bp, Homo sapien
gcagtgacggcgaagctattcatta

SEQ ID NO: 440572 - DNA, 25 bp, Homo sapien
tccaggcctagctcaagtcttcaaa

SEQ ID NO: 440573 - DNA, 25 bp, Homo sapien
ccatcttaggagcaaatcttccagg

SEQ ID NO: 440574 - DNA, 25 bp, Homo sapien
agattctgaggtagtagtgccaccc

SEQ ID NO: 440575 - DNA, 25 bp, Homo sapien
aatgactttagctctggttgacacc

SEQ ID NO: 440576 - DNA, 25 bp, Homo sapien
tcttattgtttaatactgcagggag

SEQ ID NO: 440577 - DNA, 25 bp, Homo sapien
gaataatccaaattgtgtcatcgac

SEQ ID NO: 440578 - DNA, 25 bp, Homo sapien
gactggatttagtggctcctaatag

SEQ ID NO: 440579 - DNA, 25 bp, Homo sapien
gacttctgagactgaggcaaacagg

SEQ ID NO: 440580 - DNA, 25 bp, Homo sapien
aaagaagtttctatcaagttgttgg

SEQ ID NO: 440581 - DNA, 25 bp, Homo sapien
ggcaccacacctgctgacatggtaa

SEQ ID NO: 440582 - DNA, 25 bp, Homo sapien
caaaaggtagtttagattggcacca

SEQ ID NO: 440583 - DNA, 25 bp, Homo sapien
taattagttggtatttaagctcact

SEQ ID NO: 440584 - DNA, 25 bp, Homo sapien
gatcagatagatgctcttcacaagg

SEQ ID NO: 440585 - DNA, 25 bp, Homo sapien
cagagaaaccgagtctcacacattg

SEQ ID NO: 440586 - DNA, 25 bp, Homo sapien
gaacacaagctacacaacttttggc

SEQ ID NO: 440587 - DNA, 25 bp, Homo sapien
gatacgtgcaacaacccggatacat

SEQ ID NO: 440588 - DNA, 25 bp, Homo sapien
aaattggtcccaagcccagagattt

SEQ ID NO: 440589 - DNA, 25 bp, Homo sapien
accttgctgcccaaattggtcccaa

SEQ ID NO: 440590 - DNA, 25 bp, Homo sapien
tgcccaaattggtcccaagcccaga

SEQ ID NO: 440591 - DNA, 25 bp, Homo sapien
tctctatcagcaaaatatgctgttt

SEQ ID NO: 440592 - DNA, 25 bp, Homo sapien
actggccaccccagcgggaagagca

SEQ ID NO: 440593 - DNA, 25 bp, Homo sapien
actcttcaccggaatgggcaggcag

SEQ ID NO: 440594 - DNA, 25 bp, Homo sapien
gcagctgcacttctcagaatttccc

SEQ ID NO: 440595 - DNA, 25 bp, Homo sapien
ttagtagctcattggattccacact

SEQ ID NO: 440596 - DNA, 25 bp, Homo sapien
tttagctttcatcatgatagcaagg

SEQ ID NO: 440597 - DNA, 25 bp, Homo sapien
tgtgacctgcttgaggttgtgaata

SEQ ID NO: 440598 - DNA, 25 bp, Homo sapien
gtctgtgacctgcttgaggttgtga

SEQ ID NO: 440599 - DNA, 25 bp, Homo sapien
ttcatcatgatagcaagggtgtctg

SEQ ID NO: 440600 - DNA, 25 bp, Homo sapien
gaggagttctacaaagggtctccag

SEQ ID NO: 440601 - DNA, 25 bp, Homo sapien
gagttctacaaagggtctccagtgg

SEQ ID NO: 440602 - DNA, 25 bp, Homo sapien
ttctacaaagggtctccagtggtac

SEQ ID NO: 440603 - DNA, 25 bp, Homo sapien
ttgaggagttctacaaagggtctcc

SEQ ID NO: 440604 - DNA, 25 bp, Homo sapien
gatgttttgaggaccaacgatgtca

SEQ ID NO: 440605 - DNA, 25 bp, Homo sapien
gtcagtaagaacatctaaatctggc

SEQ ID NO: 440606 - DNA, 25 bp, Homo sapien
tagaagtaaggctcaatctcaggga

SEQ ID NO: 440607 - DNA, 25 bp, Homo sapien
aatctgtatattggtattatccttc

SEQ ID NO: 440608 - DNA, 25 bp, Homo sapien
cattagttgcccctgcaattttcac

SEQ ID NO: 440609 - DNA, 25 bp, Homo sapien
gtgatgaaatgcagctcaccattag

SEQ ID NO: 440610 - DNA, 25 bp, Homo sapien
cctaatacaggagtaattagttcca

SEQ ID NO: 440611 - DNA, 25 bp, Homo sapien
ttgagggtgcaggtggcctaataca

SEQ ID NO: 440612 - DNA, 25 bp, Homo sapien
ggcctgtaagagctcgattttcaag

SEQ ID NO: 440613 - DNA, 25 bp, Homo sapien
aagagctcgattttcaagcgtcacc

SEQ ID NO: 440614 - DNA, 25 bp, Homo sapien
ctcctggtggcctgtaagagctcga

SEQ ID NO: 440615 - DNA, 25 bp, Homo sapien
gctcgattttcaagcgtcaccacat

SEQ ID NO: 440616 - DNA, 25 bp, Homo sapien
tgcactcagcgaaatcaaggaactt

SEQ ID NO: 440617 - DNA, 25 bp, Homo sapien
taataactgataagaggctgtcact

SEQ ID NO: 440618 - DNA, 25 bp, Homo sapien
ggctgtcactaaatgagaagttgga

SEQ ID NO: 440619 - DNA, 25 bp, Homo sapien
gaagttggatctcccatactgagct

SEQ ID NO: 440620 - DNA, 25 bp, Homo sapien
gggttccagggagatctgtcttgca

SEQ ID NO: 440621 - DNA, 25 bp, Homo sapien
gctgaagtcaatatggccagagtga

SEQ ID NO: 440622 - DNA, 25 bp, Homo sapien
atcccacactcattttttgcagcgg

SEQ ID NO: 440623 - DNA, 25 bp, Homo sapien
ttttggtattgcctgaactagctgc

SEQ ID NO: 440624 - DNA, 25 bp, Homo sapien
ttttaactccggcttccacagtgag

SEQ ID NO: 440625 - DNA, 25 bp, Homo sapien
gtcacttttaactccggcttccaca

SEQ ID NO: 440626 - DNA, 25 bp, Homo sapien
aactccggcttccacagtgagtgag

SEQ ID NO: 440627 - DNA, 25 bp, Homo sapien
tcacttttaactccggcttccacag

SEQ ID NO: 440628 - DNA, 25 bp, Homo sapien
cccctgcagtcttagctcctaaaat

SEQ ID NO: 440629 - DNA, 25 bp, Homo sapien
acactgcgcatgctggatttcccac

SEQ ID NO: 440630 - DNA, 25 bp, Homo sapien
acccctgcagtcttagctcctaaaa

SEQ ID NO: 440631 - DNA, 25 bp, Homo sapien
gcgcgtagggcagtgggccaaggaa

SEQ ID NO: 440632 - DNA, 25 bp, Homo sapien
agggcagtgggccaaggaaggaagc

SEQ ID NO: 440633 - DNA, 25 bp, Homo sapien
cgcgcgtagggcagtgggccaagga

SEQ ID NO: 440634 - DNA, 25 bp, Homo sapien
gcagtgggccaaggaaggaagccat

SEQ ID NO: 440635 - DNA, 25 bp, Homo sapien
gtctacttcctaaatcagtcttatt

SEQ ID NO: 440636 - DNA, 25 bp, Homo sapien
aaatcagtcttattccctccaactt

SEQ ID NO: 440637 - DNA, 25 bp, Homo sapien
agtctacttcctaaatcagtcttat

SEQ ID NO: 440638 - DNA, 25 bp, Homo sapien
aaatatgaaagtgaacgtttctatt

SEQ ID NO: 440639 - DNA, 25 bp, Homo sapien
atatgaaagtgaacgtttctatttt

SEQ ID NO: 440640 - DNA, 25 bp, Homo sapien
aatatgaaagtgaacgtttctattt

SEQ ID NO: 440641 - DNA, 25 bp, Homo sapien
aaaatatgaaagtgaacgtttctat

SEQ ID NO: 440642 - DNA, 25 bp, Homo sapien
tggtaccttccggatgagaagttgc

SEQ ID NO: 440643 - DNA, 25 bp, Homo sapien
ccggatgagaagttgctagctcatg

SEQ ID NO: 440644 - DNA, 25 bp, Homo sapien
tggctctcccacacctactgatggt

SEQ ID NO: 440645 - DNA, 25 bp, Homo sapien
cctactgatggtttggtaccttccg

SEQ ID NO: 440646 - DNA, 25 bp, Homo sapien
gtgacctgaagggttaggtagcttc

SEQ ID NO: 440647 - DNA, 25 bp, Homo sapien
agtgacctgaagggttaggtagctt

SEQ ID NO: 440648 - DNA, 25 bp, Homo sapien
tgacctgaagggttaggtagcttct

SEQ ID NO: 440649 - DNA, 25 bp, Homo sapien
tttatcttcatggttcatggatttc

SEQ ID NO: 440650 - DNA, 25 bp, Homo sapien
gcactctggttagcattattttatc

SEQ ID NO: 440651 - DNA, 25 bp, Homo sapien
ttctttacttagcactctggttagc

SEQ ID NO: 440652 - DNA, 25 bp, Homo sapien
tatcttcatggttcatggatttctg

SEQ ID NO: 440653 - DNA, 25 bp, Homo sapien
tatgaattcatataacaagggtgga

SEQ ID NO: 440654 - DNA, 25 bp, Homo sapien
gatttttaaggctacactgaggata

SEQ ID NO: 440655 - DNA, 25 bp, Homo sapien
tgccaattgacagaaatgtgcagtc

SEQ ID NO: 440656 - DNA, 25 bp, Homo sapien
tgtggtctgacctataataaatgta

SEQ ID NO: 440657 - DNA, 25 bp, Homo sapien
actcttttcatccagcttggtctgg

SEQ ID NO: 440658 - DNA, 25 bp, Homo sapien
ttctcttcccaatttgacactcttt

SEQ ID NO: 440659 - DNA, 25 bp, Homo sapien
agcatttcctagctgccattctttc

SEQ ID NO: 440660 - DNA, 25 bp, Homo sapien
tggtctggcttccaaatcacccttt

SEQ ID NO: 440661 - DNA, 25 bp, Homo sapien
cactgtcatcaattcctcgagaggt

SEQ ID NO: 440662 - DNA, 25 bp, Homo sapien
ccactgtcatcaattcctcgagagg

SEQ ID NO: 440663 - DNA, 25 bp, Homo sapien
actgtcatcaattcctcgagaggtc

SEQ ID NO: 440664 - DNA, 25 bp, Homo sapien
tccactgtcatcaattcctcgagag

SEQ ID NO: 440665 - DNA, 25 bp, Homo sapien
atgtttatactctggagctactgac

SEQ ID NO: 440666 - DNA, 25 bp, Homo sapien
caatgtttatactctggagctactg

SEQ ID NO: 440667 - DNA, 25 bp, Homo sapien
gttcccaatgtttatactctggagc

SEQ ID NO: 440668 - DNA, 25 bp, Homo sapien
tcccaatgtttatactctggagcta

SEQ ID NO: 440669 - DNA, 25 bp, Homo sapien
gtcagggtactggctagagccttca

SEQ ID NO: 440670 - DNA, 25 bp, Homo sapien
tcagggtactggctagagccttcat

SEQ ID NO: 440671 - DNA, 25 bp, Homo sapien
gcagggagttagtcagggtactggc

SEQ ID NO: 440672 - DNA, 25 bp, Homo sapien
ggccaggcaatcgtcagctctgttc

SEQ ID NO: 440673 - DNA, 25 bp, Homo sapien
aaacaacaagttaagagccagctgc

SEQ ID NO: 440674 - DNA, 25 bp, Homo sapien
tgcgcttggctctgaaatcagcagg

SEQ ID NO: 440675 - DNA, 25 bp, Homo sapien
ccgccagtctcggaaaagcgcactg

SEQ ID NO: 440676 - DNA, 25 bp, Homo sapien
agctgacccacttgggaaagtacac

SEQ ID NO: 440677 - DNA, 25 bp, Homo sapien
tgtaaatccagcctgagagagccca

SEQ ID NO: 440678 - DNA, 25 bp, Homo sapien
tagtcctaaatccagctgtaaatcc

SEQ ID NO: 440679 - DNA, 25 bp, Homo sapien
agagagcccatcaaaccggcatgat

SEQ ID NO: 440680 - DNA, 25 bp, Homo sapien
catgattcatgtgccatcctgtttg

SEQ ID NO: 440681 - DNA, 25 bp, Homo sapien
gatatagctactttgtgcctcactg

SEQ ID NO: 440682 - DNA, 25 bp, Homo sapien
tatagctactttgtgcctcactgcc

SEQ ID NO: 440683 - DNA, 25 bp, Homo sapien
tcagggatatagctactttgtgcct

SEQ ID NO: 440684 - DNA, 25 bp, Homo sapien
gggatatagctactttgtgcctcac

SEQ ID NO: 440685 - DNA, 25 bp, Homo sapien
atcaaggaacggcttataaaattca

SEQ ID NO: 440686 - DNA, 25 bp, Homo sapien
taaaattcatccaaaaggactccca

SEQ ID NO: 440687 - DNA, 25 bp, Homo sapien
taagcatgcagtatctgtatcaagg

SEQ ID NO: 440688 - DNA, 25 bp, Homo sapien
tatcttggcaacctgtagcgtctaa

SEQ ID NO: 440689 - DNA, 25 bp, Homo sapien
acctaaaatcttgctatctagttta

SEQ ID NO: 440690 - DNA, 25 bp, Homo sapien
tacacttttattatgcagtggagca

SEQ ID NO: 440691 - DNA, 25 bp, Homo sapien
cacacagtactccaatacactttta

SEQ ID NO: 440692 - DNA, 25 bp, Homo sapien
aagaagccagtgctcgaatccacac

SEQ ID NO: 440693 - DNA, 25 bp, Homo sapien
aatattcattgctaacagggtcctc

SEQ ID NO: 440694 - DNA, 25 bp, Homo sapien
ggtcctctgcttcaaatccctgctg

SEQ ID NO: 440695 - DNA, 25 bp, Homo sapien
gctcagggagaacaaaagaattcat

SEQ ID NO: 440696 - DNA, 25 bp, Homo sapien
tcattgctaacagggtcctctgctt

SEQ ID NO: 440697 - DNA, 25 bp, Homo sapien
cctggacaacttgggctgtgtcagc

SEQ ID NO: 440698 - DNA, 25 bp, Homo sapien
ggggatgctaacaggcctggacaac

SEQ ID NO: 440699 - DNA, 25 bp, Homo sapien
tgtctattgagggggatgctaacag

SEQ ID NO: 440700 - DNA, 25 bp, Homo sapien
tattgagggggatgctaacaggcct

SEQ ID NO: 440701 - DNA, 25 bp, Homo sapien
tcagaagctagaacatagctcttca

SEQ ID NO: 440702 - DNA, 25 bp, Homo sapien
attttacaaacctcagaagctagaa

SEQ ID NO: 440703 - DNA, 25 bp, Homo sapien
gaagctagaacatagctcttcacca

SEQ ID NO: 440704 - DNA, 25 bp, Homo sapien
caaacctcagaagctagaacatagc

SEQ ID NO: 440705 - DNA, 25 bp, Homo sapien
gatgttgccagaagagaattctccg

SEQ ID NO: 440706 - DNA, 25 bp, Homo sapien
cattggcatcctgaacattgagctc

SEQ ID NO: 440707 - DNA, 25 bp, Homo sapien
aattctccggggctcacaccgtcta

SEQ ID NO: 440708 - DNA, 25 bp, Homo sapien
ggctcacaccgtctactcccctctt

SEQ ID NO: 440709 - DNA, 25 bp, Homo sapien
ccagcttatcttggtccattgagga

SEQ ID NO: 440710 - DNA, 25 bp, Homo sapien
agccagcttatcttggtccattgag

SEQ ID NO: 440711 - DNA, 25 bp, Homo sapien
ccagccagcttatcttggtccattg

SEQ ID NO: 440712 - DNA, 25 bp, Homo sapien
gcttatcttggtccattgaggaatt

SEQ ID NO: 440713 - DNA, 25 bp, Homo sapien
caaatgatgtcgtaagtccctgagt

SEQ ID NO: 440714 - DNA, 25 bp, Homo sapien
tgattttcaccatagccccatgaga

SEQ ID NO: 440715 - DNA, 25 bp, Homo sapien
tacaggtcagctgaggcttcatcca

SEQ ID NO: 440716 - DNA, 25 bp, Homo sapien
tcacagaactacagtgggcagaggc

SEQ ID NO: 440717 - DNA, 25 bp, Homo sapien
catgaacttcataggtgggtaaaaa

SEQ ID NO: 440718 - DNA, 25 bp, Homo sapien
gagccactgaaccaccttctgtcca

SEQ ID NO: 440719 - DNA, 25 bp, Homo sapien
gaaccaccttctgtccagaagccat

SEQ ID NO: 440720 - DNA, 25 bp, Homo sapien
cactgaaccaccttctgtccagaag

SEQ ID NO: 440721 - DNA, 25 bp, Homo sapien
gtctctaatccagagccactgaacc

SEQ ID NO: 440722 - DNA, 25 bp, Homo sapien
gccattcaaggcttcttcacatgct

SEQ ID NO: 440723 - DNA, 25 bp, Homo sapien
caggcccagctctcaagacttcttc

SEQ ID NO: 440724 - DNA, 25 bp, Homo sapien
aggcccagctctcaagacttcttcc

SEQ ID NO: 440725 - DNA, 25 bp, Homo sapien
tgccattcaaggcttcttcacatgc

SEQ ID NO: 440726 - DNA, 25 bp, Homo sapien
atcctggcaattgagtcggaatgcc

SEQ ID NO: 440727 - DNA, 25 bp, Homo sapien
cctggcaattgagtcggaatgcccc

SEQ ID NO: 440728 - DNA, 25 bp, Homo sapien
tggcaattgagtcggaatgccccca

SEQ ID NO: 440729 - DNA, 25 bp, Homo sapien
caattgagtcggaatgcccccagaa

SEQ ID NO: 440730 - DNA, 25 bp, Homo sapien
cttgggtattttcacccctgtgcca

SEQ ID NO: 440731 - DNA, 25 bp, Homo sapien
cacaagtttcccgaaccctgctaag

SEQ ID NO: 440732 - DNA, 25 bp, Homo sapien
tcccgaaccctgctaaggagctggg

SEQ ID NO: 440733 - DNA, 25 bp, Homo sapien
tcctcctgctggctaacactgcagc

SEQ ID NO: 440734 - DNA, 25 bp, Homo sapien
ccacatagaccgtgaagagcatcat

SEQ ID NO: 440735 - DNA, 25 bp, Homo sapien
catagaccgtgaagagcatcatctg

SEQ ID NO: 440736 - DNA, 25 bp, Homo sapien
tccacatagaccgtgaagagcatca

SEQ ID NO: 440737 - DNA, 25 bp, Homo sapien
cacatagaccgtgaagagcatcatc

SEQ ID NO: 440738 - DNA, 25 bp, Homo sapien
tgggctcaagtaccagccatttaaa

SEQ ID NO: 440739 - DNA, 25 bp, Homo sapien
tcatgttgttgacctctggagagtt

SEQ ID NO: 440740 - DNA, 25 bp, Homo sapien
agcctgggctcctttttcaaacaat

SEQ ID NO: 440741 - DNA, 25 bp, Homo sapien
tgtttatgggctagaagcctgggct

SEQ ID NO: 440742 - DNA, 25 bp, Homo sapien
gggtgtttctgcagtagcagtccag

SEQ ID NO: 440743 - DNA, 25 bp, Homo sapien
caagcctgtggaattgtgggtgttt

SEQ ID NO: 440744 - DNA, 25 bp, Homo sapien
cagtagcagtccagtgcctgtcctt

SEQ ID NO: 440745 - DNA, 25 bp, Homo sapien
cctttagtttcttgggagtagacag

SEQ ID NO: 440746 - DNA, 25 bp, Homo sapien
agagtgtgctcccattatactacag

SEQ ID NO: 440747 - DNA, 25 bp, Homo sapien
aaaatctctggaagcttcaagaggc

SEQ ID NO: 440748 - DNA, 25 bp, Homo sapien
gaaagagtagcaggtattatccatg

SEQ ID NO: 440749 - DNA, 25 bp, Homo sapien
gagaacacttttacctagtgcagaa

SEQ ID NO: 440750 - DNA, 25 bp, Homo sapien
tctgcttctatagtatgcacagatg

SEQ ID NO: 440751 - DNA, 25 bp, Homo sapien
tctatagtatgcacagatgttgctg

SEQ ID NO: 440752 - DNA, 25 bp, Homo sapien
ttccatgaatctattcacagccggg

SEQ ID NO: 440753 - DNA, 25 bp, Homo sapien
attcacagccgggaagccaactcca

SEQ ID NO: 440754 - DNA, 25 bp, Homo sapien
gagacagtatatatagacttgccag

SEQ ID NO: 440755 - DNA, 25 bp, Homo sapien
ctggagggtccttcgtcaggagaca

SEQ ID NO: 440756 - DNA, 25 bp, Homo sapien
gacttgccagaagtgcaataattat

SEQ ID NO: 440757 - DNA, 25 bp, Homo sapien
tcatttcagcccgaagttgctggag

SEQ ID NO: 440758 - DNA, 25 bp, Homo sapien
aaacagtggagtcctgctaagttta

SEQ ID NO: 440759 - DNA, 25 bp, Homo sapien
gagtcagtgtctgctgaattcccaa

SEQ ID NO: 440760 - DNA, 25 bp, Homo sapien
ctgctaagtttatccttagagggac

SEQ ID NO: 440761 - DNA, 25 bp, Homo sapien
catcataaaaagtgcgaagaattca

SEQ ID NO: 440762 - DNA, 25 bp, Homo sapien
ggttagctcgaatcaggtcacggaa

SEQ ID NO: 440763 - DNA, 25 bp, Homo sapien
cgaatcaggtcacggaagtagaacc

SEQ ID NO: 440764 - DNA, 25 bp, Homo sapien
ctgctggttagctcgaatcaggtca

SEQ ID NO: 440765 - DNA, 25 bp, Homo sapien
ggatatctttctattctgctggtta

SEQ ID NO: 440766 - DNA, 25 bp, Homo sapien
ggtaatttctactgtggtgagcaga

SEQ ID NO: 440767 - DNA, 25 bp, Homo sapien
ccaaggagcactgtataagcagcag

SEQ ID NO: 440768 - DNA, 25 bp, Homo sapien
gcagtaagacatttgcaaccaagca

SEQ ID NO: 440769 - DNA, 25 bp, Homo sapien
aatgccaaacctgctagatgtctgg

SEQ ID NO: 440770 - DNA, 25 bp, Homo sapien
tctggcagcgaagaacttcatgtgc

SEQ ID NO: 440771 - DNA, 25 bp, Homo sapien
gaaccaatatcttcccatgacaaag

SEQ ID NO: 440772 - DNA, 25 bp, Homo sapien
tctgctgggtgtgtattctctttcc

SEQ ID NO: 440773 - DNA, 25 bp, Homo sapien
tggtgatatcacacactatctggca

SEQ ID NO: 440774 - DNA, 25 bp, Homo sapien
tcttcctcgcttttctgagttccta

SEQ ID NO: 440775 - DNA, 25 bp, Homo sapien
cttttctgagttcctagaaattcat

SEQ ID NO: 440776 - DNA, 25 bp, Homo sapien
aagcagcaaggatgagctgaatttg

SEQ ID NO: 440777 - DNA, 25 bp, Homo sapien
gctgaatttgacttggcaatgctct

SEQ ID NO: 440778 - DNA, 25 bp, Homo sapien
tatctcctgatctgaagatgacgga

SEQ ID NO: 440779 - DNA, 25 bp, Homo sapien
cagaaaatgagcttgaggaagacca

SEQ ID NO: 440780 - DNA, 25 bp, Homo sapien
tgacggaagatgtgactcatcaggg

SEQ ID NO: 440781 - DNA, 25 bp, Homo sapien
tatctttgacatagatgattatctc

SEQ ID NO: 440782 - DNA, 25 bp, Homo sapien
aaaagaagccaggtgacctataatc

SEQ ID NO: 440783 - DNA, 25 bp, Homo sapien
aagccaggtgacctataatctccat

SEQ ID NO: 440784 - DNA, 25 bp, Homo sapien
aagaagccaggtgacctataatctc

SEQ ID NO: 440785 - DNA, 25 bp, Homo sapien
ctaggaccataaaaagaagccaggt

SEQ ID NO: 440786 - DNA, 25 bp, Homo sapien
ttgcaggagatgatgaattctttta

SEQ ID NO: 440787 - DNA, 25 bp, Homo sapien
attctcagttgtacattcatgtatt

SEQ ID NO: 440788 - DNA, 25 bp, Homo sapien
ttctgattgttcaccaacattctca

SEQ ID NO: 440789 - DNA, 25 bp, Homo sapien
ctgccatcaaggctttctgattgtt

SEQ ID NO: 440790 - DNA, 25 bp, Homo sapien
tagctggctccaacttgtcctcctt

SEQ ID NO: 440791 - DNA, 25 bp, Homo sapien
cccttcaatttagtatagttgacag

SEQ ID NO: 440792 - DNA, 25 bp, Homo sapien
cgtggagttcctgacggatgttagc

SEQ ID NO: 440793 - DNA, 25 bp, Homo sapien
tctttgcaccagagggactagagcc

SEQ ID NO: 440794 - DNA, 25 bp, Homo sapien
ggatgtcttgccattcaatcagata

SEQ ID NO: 440795 - DNA, 25 bp, Homo sapien
cttagctaattcactaggccttccc

SEQ ID NO: 440796 - DNA, 25 bp, Homo sapien
gctaattcactaggccttcccttca

SEQ ID NO: 440797 - DNA, 25 bp, Homo sapien
ccttcattaacatgaggatgtcttg

SEQ ID NO: 440798 - DNA, 25 bp, Homo sapien
ggagatgacccccaacttcagagac

SEQ ID NO: 440799 - DNA, 25 bp, Homo sapien
gggagatgacccccaacttcagaga

SEQ ID NO: 440800 - DNA, 25 bp, Homo sapien
aggggagatgacccccaacttcaga

SEQ ID NO: 440801 - DNA, 25 bp, Homo sapien
ggggagatgacccccaacttcagag

SEQ ID NO: 440802 - DNA, 25 bp, Homo sapien
tgcctgaagctataccaccctgaga

SEQ ID NO: 440803 - DNA, 25 bp, Homo sapien
gaaagaattcatgtgcctgaagcta

SEQ ID NO: 440804 - DNA, 25 bp, Homo sapien
gagccccggaaagaattcatgtgcc

SEQ ID NO: 440805 - DNA, 25 bp, Homo sapien
ttcatgtgcctgaagctataccacc

SEQ ID NO: 440806 - DNA, 25 bp, Homo sapien
tgtcaacaaatttggcttttaggtg

SEQ ID NO: 440807 - DNA, 25 bp, Homo sapien
tgaggatttcccttgtcaacaaatt

SEQ ID NO: 440808 - DNA, 25 bp, Homo sapien
gatctgaatgaggatttcccttgtc

SEQ ID NO: 440809 - DNA, 25 bp, Homo sapien
aaactcagatctgaatgaggatttc

SEQ ID NO: 440810 - DNA, 25 bp, Homo sapien
tgcttcacatggtctaagttctttc

SEQ ID NO: 440811 - DNA, 25 bp, Homo sapien
tctgtcctgcttcacatggtctaag

SEQ ID NO: 440812 - DNA, 25 bp, Homo sapien
tcctgcttcacatggtctaagttct

SEQ ID NO: 440813 - DNA, 25 bp, Homo sapien
tttctgtcctgcttcacatggtcta

SEQ ID NO: 440814 - DNA, 25 bp, Homo sapien
tggattgtacttcccaaggcttaga

SEQ ID NO: 440815 - DNA, 25 bp, Homo sapien
tcaaatcggcctgtctcaatattgg

SEQ ID NO: 440816 - DNA, 25 bp, Homo sapien
cactttctcgaaacactggctagag

SEQ ID NO: 440817 - DNA, 25 bp, Homo sapien
tagagtgtaggaggctagaaatcac

SEQ ID NO: 440818 - DNA, 25 bp, Homo sapien
gttcagcaggaaatggcacatgctg

SEQ ID NO: 440819 - DNA, 25 bp, Homo sapien
aatggcacatgctgaaacttcggag

SEQ ID NO: 440820 - DNA, 25 bp, Homo sapien
cacactaactggtgattgctgatgt

SEQ ID NO: 440821 - DNA, 25 bp, Homo sapien
gaaacttcggagtatcacacactaa

SEQ ID NO: 440822 - DNA, 25 bp, Homo sapien
ctagcaagacttgtaactgacagaa

SEQ ID NO: 440823 - DNA, 25 bp, Homo sapien
gaatggtgactgatttaaacgtggc

SEQ ID NO: 440824 - DNA, 25 bp, Homo sapien
gacacatgttgaagaatactcactg

SEQ ID NO: 440825 - DNA, 25 bp, Homo sapien
tcatccattatatagtcctagcaag

SEQ ID NO: 440826 - DNA, 25 bp, Homo sapien
aatctaaatccttgtgacagcacag

SEQ ID NO: 440827 - DNA, 25 bp, Homo sapien
ccaggaaaggtgacattggtaactt

SEQ ID NO: 440828 - DNA, 25 bp, Homo sapien
taggcaaatctaaatccttgtgaca

SEQ ID NO: 440829 - DNA, 25 bp, Homo sapien
ggaaaggtgacattggtaacttcat

SEQ ID NO: 440830 - DNA, 25 bp, Homo sapien
cataattaagtggatgtggggcatc

SEQ ID NO: 440831 - DNA, 25 bp, Homo sapien
tgtgtcctaggtcataattaagtgg

SEQ ID NO: 440832 - DNA, 25 bp, Homo sapien
cctaggtcataattaagtggatgtg

SEQ ID NO: 440833 - DNA, 25 bp, Homo sapien
taggtcataattaagtggatgtggg

SEQ ID NO: 440834 - DNA, 25 bp, Homo sapien
aatggtagcagaggcatgaggtctc

SEQ ID NO: 440835 - DNA, 25 bp, Homo sapien
aatccacaatgtactcaaacctgcc

SEQ ID NO: 440836 - DNA, 25 bp, Homo sapien
tgactgaaaagcaacgaacctcact

SEQ ID NO: 440837 - DNA, 25 bp, Homo sapien
tgaggtctctctcccgatcataatc

SEQ ID NO: 440838 - DNA, 25 bp, Homo sapien
atatttctgtgtcttggcctgattc

SEQ ID NO: 440839 - DNA, 25 bp, Homo sapien
ttacattttggcatgcagtatattt

SEQ ID NO: 440840 - DNA, 25 bp, Homo sapien
agtatatttctgtgtcttggcctga

SEQ ID NO: 440841 - DNA, 25 bp, Homo sapien
tacattttggcatgcagtatatttc

SEQ ID NO: 440842 - DNA, 25 bp, Homo sapien
gagagtttctcccttgacctttcac

SEQ ID NO: 440843 - DNA, 25 bp, Homo sapien
ctacatgctgagagtttctcccttg

SEQ ID NO: 440844 - DNA, 25 bp, Homo sapien
atgctgagagtttctcccttgacct

SEQ ID NO: 440845 - DNA, 25 bp, Homo sapien
catgctgagagtttctcccttgacc

SEQ ID NO: 440846 - DNA, 25 bp, Homo sapien
aaagactgtcttgggctgtgcagca

SEQ ID NO: 440847 - DNA, 25 bp, Homo sapien
ccactttggaatgtagctgacctca

SEQ ID NO: 440848 - DNA, 25 bp, Homo sapien
cagtgccgcagccactttggaatgt

SEQ ID NO: 440849 - DNA, 25 bp, Homo sapien
cttcaaagactgtcttgggctgtgc

SEQ ID NO: 440850 - DNA, 25 bp, Homo sapien
ctgggacaacagcatgaaaaagcga

SEQ ID NO: 440851 - DNA, 25 bp, Homo sapien
gaaggagcctggctcaagattacct

SEQ ID NO: 440852 - DNA, 25 bp, Homo sapien
gcatgaaaaagcgaaatataatcag

SEQ ID NO: 440853 - DNA, 25 bp, Homo sapien
tcaagattacctcagagagtgtggg

SEQ ID NO: 440854 - DNA, 25 bp, Homo sapien
gacggacggcgctactgtgtctctg

SEQ ID NO: 440855 - DNA, 25 bp, Homo sapien
aattgaacctctgaagacggacggc

SEQ ID NO: 440856 - DNA, 25 bp, Homo sapien
catgtcctgcgtgtcacaagcttaa

SEQ ID NO: 440857 - DNA, 25 bp, Homo sapien
ttaatttctaacactggccgccttg

SEQ ID NO: 440858 - DNA, 25 bp, Homo sapien
ccacaccttgtcctagaagtccatg

SEQ ID NO: 440859 - DNA, 25 bp, Homo sapien
tgccaaagtccacaccttgtcctag

SEQ ID NO: 440860 - DNA, 25 bp, Homo sapien
acattttaggtctgccaaagtccac

SEQ ID NO: 440861 - DNA, 25 bp, Homo sapien
aacattttaggtctgccaaagtcca

SEQ ID NO: 440862 - DNA, 25 bp, Homo sapien
tctgcacttattctgcaatgcactc

SEQ ID NO: 440863 - DNA, 25 bp, Homo sapien
tgagatccccaattaaaacggattg

SEQ ID NO: 440864 - DNA, 25 bp, Homo sapien
gtctcaagacataggagcacattgc

SEQ ID NO: 440865 - DNA, 25 bp, Homo sapien
tacgtatatgacaaggtcatgcatc

SEQ ID NO: 440866 - DNA, 25 bp, Homo sapien
gacagaccaacctggttgatttcat

SEQ ID NO: 440867 - DNA, 25 bp, Homo sapien
agcagacagaccaacctggttgatt

SEQ ID NO: 440868 - DNA, 25 bp, Homo sapien
tgagaacagcggaggcatgagcaga

SEQ ID NO: 440869 - DNA, 25 bp, Homo sapien
acagcggaggcatgagcagacagac

SEQ ID NO: 440870 - DNA, 25 bp, Homo sapien
aaggccaggatcaaagggacctgag

SEQ ID NO: 440871 - DNA, 25 bp, Homo sapien
ccagctttgagtagaatccatctaa

SEQ ID NO: 440872 - DNA, 25 bp, Homo sapien
atatgtgcaagacccgcaggaaggc

SEQ ID NO: 440873 - DNA, 25 bp, Homo sapien
gcccatcagactgtgaggcccatag

SEQ ID NO: 440874 - DNA, 25 bp, Homo sapien
ttggaaaagatctagccagcgaaca

SEQ ID NO: 440875 - DNA, 25 bp, Homo sapien
tagagagttctcacaaggctcaatg

SEQ ID NO: 440876 - DNA, 25 bp, Homo sapien
catccgaatggcaaacgacttcctt

SEQ ID NO: 440877 - DNA, 25 bp, Homo sapien
gagtcacatgctctgttggaaaaga

SEQ ID NO: 440878 - DNA, 25 bp, Homo sapien
tgtaagattattcccctctggagaa

SEQ ID NO: 440879 - DNA, 25 bp, Homo sapien
gaaactgatgacctgtttgcacagc

SEQ ID NO: 440880 - DNA, 25 bp, Homo sapien
tgtccaagggcgtcctgccagggtt

SEQ ID NO: 440881 - DNA, 25 bp, Homo sapien
gaatgcttgataccttggcacacca

SEQ ID NO: 440882 - DNA, 25 bp, Homo sapien
tgtataaagcaactagcacagtgtg

SEQ ID NO: 440883 - DNA, 25 bp, Homo sapien
gattttccccttcaacgcttcagca

SEQ ID NO: 440884 - DNA, 25 bp, Homo sapien
gggcaacccttactacagcactgga

SEQ ID NO: 440885 - DNA, 25 bp, Homo sapien
catgttgtatgtggcctctgtggct

SEQ ID NO: 440886 - DNA, 25 bp, Homo sapien
gaaaatggcttgagtccaattgcat

SEQ ID NO: 440887 - DNA, 25 bp, Homo sapien
cttgagtccaattgcatccagctgt

SEQ ID NO: 440888 - DNA, 25 bp, Homo sapien
tcaatcagcttgtaaatcagctgac

SEQ ID NO: 440889 - DNA, 25 bp, Homo sapien
caatcagcttgtaaatcagctgaca

SEQ ID NO: 440890 - DNA, 25 bp, Homo sapien
tcaagaggggtaatcctggactcat

SEQ ID NO: 440891 - DNA, 25 bp, Homo sapien
tgtccacctctttgtggatactccc

SEQ ID NO: 440892 - DNA, 25 bp, Homo sapien
ctctcttttgaaagctgttattttc

SEQ ID NO: 440893 - DNA, 25 bp, Homo sapien
ggatactccctttatgtacacactc

SEQ ID NO: 440894 - DNA, 25 bp, Homo sapien
tttgtcttgcgagtaatcctgtatg

SEQ ID NO: 440895 - DNA, 25 bp, Homo sapien
tcttgcgagtaatcctgtatgtttt

SEQ ID NO: 440896 - DNA, 25 bp, Homo sapien
tatttgtcttgcgagtaatcctgta

SEQ ID NO: 440897 - DNA, 25 bp, Homo sapien
tgtcttgcgagtaatcctgtatgtt

SEQ ID NO: 440898 - DNA, 25 bp, Homo sapien
gttatgatctcaggctgattagcca

SEQ ID NO: 440899 - DNA, 25 bp, Homo sapien
gcaccaaactttcgataatcaacag

SEQ ID NO: 440900 - DNA, 25 bp, Homo sapien
taatcaacagacaactaggttctgc

SEQ ID NO: 440901 - DNA, 25 bp, Homo sapien
tgattagccatgcagatatctgaag

SEQ ID NO: 440902 - DNA, 25 bp, Homo sapien
cgctaaggcgggtattttgaaacat

SEQ ID NO: 440903 - DNA, 25 bp, Homo sapien
tcagacttcctgaaaaacatgctgg

SEQ ID NO: 440904 - DNA, 25 bp, Homo sapien
tctcagttcgttctgcgctaaggcg

SEQ ID NO: 440905 - DNA, 25 bp, Homo sapien
tggctattaggtccccaaaagatga

SEQ ID NO: 440906 - DNA, 25 bp, Homo sapien
ttgcactccaaccacaaagtacctg

SEQ ID NO: 440907 - DNA, 25 bp, Homo sapien
tctgactgcaggcttagtaggccca

SEQ ID NO: 440908 - DNA, 25 bp, Homo sapien
caatttgcactccaaccacaaagta

SEQ ID NO: 440909 - DNA, 25 bp, Homo sapien
cttggaaatcctgtgtaatctgact

SEQ ID NO: 440910 - DNA, 25 bp, Homo sapien
catccaaaggggattcccagaccat

SEQ ID NO: 440911 - DNA, 25 bp, Homo sapien
gttttatacgatgccatatccttca

SEQ ID NO: 440912 - DNA, 25 bp, Homo sapien
gtagttttatacgatgccatatcct

SEQ ID NO: 440913 - DNA, 25 bp, Homo sapien
agttttatacgatgccatatccttc

SEQ ID NO: 440914 - DNA, 25 bp, Homo sapien
aagtagttttatacgatgccatatc

SEQ ID NO: 440915 - DNA, 25 bp, Homo sapien
tgcctttctcagacacatggatgag

SEQ ID NO: 440916 - DNA, 25 bp, Homo sapien
tacactggagagttgtagaaactcc

SEQ ID NO: 440917 - DNA, 25 bp, Homo sapien
gaaactccgacatcaaagacacttg

SEQ ID NO: 440918 - DNA, 25 bp, Homo sapien
catggatgagaacagtgctcttgca

SEQ ID NO: 440919 - DNA, 25 bp, Homo sapien
ttcatcagaatcatacacctgctca

SEQ ID NO: 440920 - DNA, 25 bp, Homo sapien
atcagaatcatacacctgctcaaat

SEQ ID NO: 440921 - DNA, 25 bp, Homo sapien
catcagaatcatacacctgctcaaa

SEQ ID NO: 440922 - DNA, 25 bp, Homo sapien
tcatcagaatcatacacctgctcaa

SEQ ID NO: 440923 - DNA, 25 bp, Homo sapien
taccagcagatgtctcgtcgttcat

SEQ ID NO: 440924 - DNA, 25 bp, Homo sapien
ttaccagcagatgtctcgtcgttca

SEQ ID NO: 440925 - DNA, 25 bp, Homo sapien
tgtgcacatgtttggctctgagttg

SEQ ID NO: 440926 - DNA, 25 bp, Homo sapien
actgtgcacatgtttggctctgagt

SEQ ID NO: 440927 - DNA, 25 bp, Homo sapien
tgaaatatttcccacagatgatgtc

SEQ ID NO: 440928 - DNA, 25 bp, Homo sapien
atctgggcctgttgttttatgaaat

SEQ ID NO: 440929 - DNA, 25 bp, Homo sapien
ctgggcctgttgttttatgaaatat

SEQ ID NO: 440930 - DNA, 25 bp, Homo sapien
atgtcaattataatttttgtcccgg

SEQ ID NO: 440931 - DNA, 25 bp, Homo sapien
ccttttcttgctcctaatgtgccag

SEQ ID NO: 440932 - DNA, 25 bp, Homo sapien
tgctcctaatgtgccagcccagcat

SEQ ID NO: 440933 - DNA, 25 bp, Homo sapien
ttcttgctcctaatgtgccagccca

SEQ ID NO: 440934 - DNA, 25 bp, Homo sapien
tcttgctcctaatgtgccagcccag

SEQ ID NO: 440935 - DNA, 25 bp, Homo sapien
gaggatttctatagctctcgtagtt

SEQ ID NO: 440936 - DNA, 25 bp, Homo sapien
tttggctttcagatggtatggaaga

SEQ ID NO: 440937 - DNA, 25 bp, Homo sapien
ttggctttcagatggtatggaagag

SEQ ID NO: 440938 - DNA, 25 bp, Homo sapien
ggtatggaagaggatttctatagct

SEQ ID NO: 440939 - DNA, 25 bp, Homo sapien
gaggcaactggatcttctttgctgt

SEQ ID NO: 440940 - DNA, 25 bp, Homo sapien
ttagtaagaggcaactggatcttct

SEQ ID NO: 440941 - DNA, 25 bp, Homo sapien
tctttgctgtcccaacttttatccc

SEQ ID NO: 440942 - DNA, 25 bp, Homo sapien
tatcccagcacctcttgtctttatt

SEQ ID NO: 440943 - DNA, 25 bp, Homo sapien
ctctggccagtattcaatggtaaac

SEQ ID NO: 440944 - DNA, 25 bp, Homo sapien
tgtctcatggaatgaaacacctgtt

SEQ ID NO: 440945 - DNA, 25 bp, Homo sapien
gactgcagcaagacttctagctggg

SEQ ID NO: 440946 - DNA, 25 bp, Homo sapien
tctagctgggtatagtacctccaca

SEQ ID NO: 440947 - DNA, 25 bp, Homo sapien
tgtcaggttcatgacctcagtgagc

SEQ ID NO: 440948 - DNA, 25 bp, Homo sapien
ttactcttgccaggaaatctccagg

SEQ ID NO: 440949 - DNA, 25 bp, Homo sapien
cagtcaggttttactagaccagaaa

SEQ ID NO: 440950 - DNA, 25 bp, Homo sapien
gatttcagttggacgatttgcttca

SEQ ID NO: 440951 - DNA, 25 bp, Homo sapien
tagctgcttctgtcattgccacata

SEQ ID NO: 440952 - DNA, 25 bp, Homo sapien
tgtcattgccacataaacccgttct

SEQ ID NO: 440953 - DNA, 25 bp, Homo sapien
attgccacataaacccgttctacct

SEQ ID NO: 440954 - DNA, 25 bp, Homo sapien
ttctgtcattgccacataaacccgt

SEQ ID NO: 440955 - DNA, 25 bp, Homo sapien
ttatcttgatctggaatttgaggac

SEQ ID NO: 440956 - DNA, 25 bp, Homo sapien
actctctgccatgttatcttgatct

SEQ ID NO: 440957 - DNA, 25 bp, Homo sapien
gatctggaatttgaggactgtcatc

SEQ ID NO: 440958 - DNA, 25 bp, Homo sapien
tgctcaaagactgtcaacacattcc

SEQ ID NO: 440959 - DNA, 25 bp, Homo sapien
gtttgagagggtgttgactgaacaa

SEQ ID NO: 440960 - DNA, 25 bp, Homo sapien
ggtgttgactgaacaatattgttcc

SEQ ID NO: 440961 - DNA, 25 bp, Homo sapien
tccaacctctagctttttccttgaa

SEQ ID NO: 440962 - DNA, 25 bp, Homo sapien
gagggtgttgactgaacaatattgt

SEQ ID NO: 440963 - DNA, 25 bp, Homo sapien
tcacctccataaatactgttcccat

SEQ ID NO: 440964 - DNA, 25 bp, Homo sapien
cctccataaatactgttcccattct

SEQ ID NO: 440965 - DNA, 25 bp, Homo sapien
cttcctcacctccataaatactgtt

SEQ ID NO: 440966 - DNA, 25 bp, Homo sapien
ctcctagttctgtaatatcatcttc

SEQ ID NO: 440967 - DNA, 25 bp, Homo sapien
gtgacaggacctgacaggactgagc

SEQ ID NO: 440968 - DNA, 25 bp, Homo sapien
tgtgacaggacctgacaggactgag

SEQ ID NO: 440969 - DNA, 25 bp, Homo sapien
gaaggaaacagtcacaccagggtaa

SEQ ID NO: 440970 - DNA, 25 bp, Homo sapien
ggaaggaaacagtcacaccagggta

SEQ ID NO: 440971 - DNA, 25 bp, Homo sapien
cagctatcgtttgcattactaggag

SEQ ID NO: 440972 - DNA, 25 bp, Homo sapien
aagtggcagctatcgtttgcattac

SEQ ID NO: 440973 - DNA, 25 bp, Homo sapien
ttagtcaaaagtggcagctatcgtt

SEQ ID NO: 440974 - DNA, 25 bp, Homo sapien
tttgcattactaggaggcttatgac

SEQ ID NO: 440975 - DNA, 25 bp, Homo sapien
tcaggtcttcccttgtaatcaggaa

SEQ ID NO: 440976 - DNA, 25 bp, Homo sapien
tagatgtgtcaatgtcattggaggg

SEQ ID NO: 440977 - DNA, 25 bp, Homo sapien
ggaaggcatgtgttccttatcatag

SEQ ID NO: 440978 - DNA, 25 bp, Homo sapien
taacacttggcctatcatatagctc

SEQ ID NO: 440979 - DNA, 25 bp, Homo sapien
aaacagacacggatgccttccaatg

SEQ ID NO: 440980 - DNA, 25 bp, Homo sapien
gacacggatgccttccaatgtaatg

SEQ ID NO: 440981 - DNA, 25 bp, Homo sapien
cggatgccttccaatgtaatgaata

SEQ ID NO: 440982 - DNA, 25 bp, Homo sapien
gccttccaatgtaatgaatattggt

SEQ ID NO: 440983 - DNA, 25 bp, Homo sapien
tttcctctaaatgcttcattgtatg

SEQ ID NO: 440984 - DNA, 25 bp, Homo sapien
tcattgtatgcgctttcccaggcag

SEQ ID NO: 440985 - DNA, 25 bp, Homo sapien
taaatgcttcattgtatgcgctttc

SEQ ID NO: 440986 - DNA, 25 bp, Homo sapien
gcttcattgtatgcgctttcccagg

SEQ ID NO: 440987 - DNA, 25 bp, Homo sapien
aactcctgtgcgctcagtcaattcc

SEQ ID NO: 440988 - DNA, 25 bp, Homo sapien
aagaactcctgtgcgctcagtcaat

SEQ ID NO: 440989 - DNA, 25 bp, Homo sapien
ttataagaactcctgtgcgctcagt

SEQ ID NO: 440990 - DNA, 25 bp, Homo sapien
taagaactcctgtgcgctcagtcaa

SEQ ID NO: 440991 - DNA, 25 bp, Homo sapien
tcttggcaatattaatgtagcttgc

SEQ ID NO: 440992 - DNA, 25 bp, Homo sapien
attcttggcaatattaatgtagctt

SEQ ID NO: 440993 - DNA, 25 bp, Homo sapien
gcaatattaatgtagcttgcatata

SEQ ID NO: 440994 - DNA, 25 bp, Homo sapien
tggcaatattaatgtagcttgcata

SEQ ID NO: 440995 - DNA, 25 bp, Homo sapien
ctttttgccaaatggagcgaggagc

SEQ ID NO: 440996 - DNA, 25 bp, Homo sapien
cacctggcctcgcagaaatctgagt

SEQ ID NO: 440997 - DNA, 25 bp, Homo sapien
taggactggctttgatgtaagtacc

SEQ ID NO: 440998 - DNA, 25 bp, Homo sapien
tgggcctttcagataattggtgaga

SEQ ID NO: 440999 - DNA, 25 bp, Homo sapien
tgccaggttgtgtgtcgtgaagaca

SEQ ID NO: 441000 - DNA, 25 bp, Homo sapien
cagagctttgtctagagtacagttg

SEQ ID NO: 441001 - DNA, 25 bp, Homo sapien
taaaattgccgtaggtctgttgtga

SEQ ID NO: 441002 - DNA, 25 bp, Homo sapien
cagttgattgggaagattgtgtgcc

SEQ ID NO: 441003 - DNA, 25 bp, Homo sapien
acatttgatggtagcatcttgaggg

SEQ ID NO: 441004 - DNA, 25 bp, Homo sapien
gcatcttgagggggtaagatgaaat

SEQ ID NO: 441005 - DNA, 25 bp, Homo sapien
tagcatcttgagggggtaagatgaa

SEQ ID NO: 441006 - DNA, 25 bp, Homo sapien
tcacatttgatggtagcatcttgag

SEQ ID NO: 441007 - DNA, 25 bp, Homo sapien
ttttgagaaattccaggacactggg

SEQ ID NO: 441008 - DNA, 25 bp, Homo sapien
caccagtattactttctttggcaac

SEQ ID NO: 441009 - DNA, 25 bp, Homo sapien
tccaaacaattcagctgtcggaagt

SEQ ID NO: 441010 - DNA, 25 bp, Homo sapien
aagtagcatgccaattattttccaa

SEQ ID NO: 441011 - DNA, 25 bp, Homo sapien
tcagcaggcctaattcagggaacta

SEQ ID NO: 441012 - DNA, 25 bp, Homo sapien
tgaaggaattgctactggaagctcc

SEQ ID NO: 441013 - DNA, 25 bp, Homo sapien
gaccaacaggaacaagtgtcagcct

SEQ ID NO: 441014 - DNA, 25 bp, Homo sapien
gaagctccactagcctaactcagag

SEQ ID NO: 441015 - DNA, 25 bp, Homo sapien
cttcttagaggtcttcttgcctctt

SEQ ID NO: 441016 - DNA, 25 bp, Homo sapien
ttgtggcctctcagaaggtcttgtt

SEQ ID NO: 441017 - DNA, 25 bp, Homo sapien
gttgcttccttggaagtcttatggc

SEQ ID NO: 441018 - DNA, 25 bp, Homo sapien
cttgaaggttttgtggccttcttag

SEQ ID NO: 441019 - DNA, 25 bp, Homo sapien
agaaagtcagctgcatccacgctgt

SEQ ID NO: 441020 - DNA, 25 bp, Homo sapien
ggtgaagaaagtcagctgcatccac

SEQ ID NO: 441021 - DNA, 25 bp, Homo sapien
gaagaaagtcagctgcatccacgct

SEQ ID NO: 441022 - DNA, 25 bp, Homo sapien
tgaagaaagtcagctgcatccacgc

SEQ ID NO: 441023 - DNA, 25 bp, Homo sapien
gcagcagcaattctagtggaatcac

SEQ ID NO: 441024 - DNA, 25 bp, Homo sapien
tgagggcatgatccgatttctgtac

SEQ ID NO: 441025 - DNA, 25 bp, Homo sapien
tcttcagatgggcatgtgatgagaa

SEQ ID NO: 441026 - DNA, 25 bp, Homo sapien
tccgatttctgtacttaggttaaga

SEQ ID NO: 441027 - DNA, 25 bp, Homo sapien
caaaggtaattaaactagagattga

SEQ ID NO: 441028 - DNA, 25 bp, Homo sapien
aaaggtaattaaactagagattgag

SEQ ID NO: 441029 - DNA, 25 bp, Homo sapien
gcagcaaggaaaccactgattagat

SEQ ID NO: 441030 - DNA, 25 bp, Homo sapien
gaacaaatgtatggctccatgaagg

SEQ ID NO: 441031 - DNA, 25 bp, Homo sapien
gatttactatcactcctggcatcat

SEQ ID NO: 441032 - DNA, 25 bp, Homo sapien
gggcaacatttgaactctttggagc

SEQ ID NO: 441033 - DNA, 25 bp, Homo sapien
tcatcaggccttattctggtgaggg

SEQ ID NO: 441034 - DNA, 25 bp, Homo sapien
tagctcttcatcaggccttattctg

SEQ ID NO: 441035 - DNA, 25 bp, Homo sapien
ctgtatgctgtccagtttttcctgc

SEQ ID NO: 441036 - DNA, 25 bp, Homo sapien
tgtatgctgtccagtttttcctgca

SEQ ID NO: 441037 - DNA, 25 bp, Homo sapien
caactttgagaaggtagcactggag

SEQ ID NO: 441038 - DNA, 25 bp, Homo sapien
tcttaaattgtaagctcaggttcaa

SEQ ID NO: 441039 - DNA, 25 bp, Homo sapien
tggtaatgcctgattcacaactttg

SEQ ID NO: 441040 - DNA, 25 bp, Homo sapien
tcaggttcaaagtgttggtaatgcc

SEQ ID NO: 441041 - DNA, 25 bp, Homo sapien
cacttcaatacaaagggtgtcgttc

SEQ ID NO: 441042 - DNA, 25 bp, Homo sapien
gagggtgaccacagtctgtaattcc

SEQ ID NO: 441043 - DNA, 25 bp, Homo sapien
tgtttagacaacgtcatcccctggc

SEQ ID NO: 441044 - DNA, 25 bp, Homo sapien
tgacttttcaatgggtgtcctagga

SEQ ID NO: 441045 - DNA, 25 bp, Homo sapien
tattagattaagctactgttagaac

SEQ ID NO: 441046 - DNA, 25 bp, Homo sapien
gatgaggatggttgaaattcacacg

SEQ ID NO: 441047 - DNA, 25 bp, Homo sapien
tttggcttgtgcatcatgggtgaat

SEQ ID NO: 441048 - DNA, 25 bp, Homo sapien
gaattagatgtccatgatgaaaggg

SEQ ID NO: 441049 - DNA, 25 bp, Homo sapien
gaagtaaacaccaatcatgtccagt

SEQ ID NO: 441050 - DNA, 25 bp, Homo sapien
ccattcctcgggtaaagaaagatga

SEQ ID NO: 441051 - DNA, 25 bp, Homo sapien
taccctcagggtggaaactatcact

SEQ ID NO: 441052 - DNA, 25 bp, Homo sapien
tcctcccagtttggctaggcagaca

SEQ ID NO: 441053 - DNA, 25 bp, Homo sapien
cagtattgtatataatccctgatcc

SEQ ID NO: 441054 - DNA, 25 bp, Homo sapien
aaatccagatatgtgtttcaagtag

SEQ ID NO: 441055 - DNA, 25 bp, Homo sapien
tgcagcaattggaatgagaaatcca

SEQ ID NO: 441056 - DNA, 25 bp, Homo sapien
caagtagtacattgcctgaatcaca

SEQ ID NO: 441057 - DNA, 25 bp, Homo sapien
tggaatccctgtctgttagccacag

SEQ ID NO: 441058 - DNA, 25 bp, Homo sapien
cctgttgggttcacagggccttgca

SEQ ID NO: 441059 - DNA, 25 bp, Homo sapien
taaaagctcttgtgcatggaatccc

SEQ ID NO: 441060 - DNA, 25 bp, Homo sapien
tgctagatctgctaaaccaacccag

SEQ ID NO: 441061 - DNA, 25 bp, Homo sapien
tcttggagaagaggacccattaaaa

SEQ ID NO: 441062 - DNA, 25 bp, Homo sapien
cacccaaagtgccatggttctgatg

SEQ ID NO: 441063 - DNA, 25 bp, Homo sapien
caaaatcgaggccatcactgggctg

SEQ ID NO: 441064 - DNA, 25 bp, Homo sapien
cttttctcgatcagagcagagcggg

SEQ ID NO: 441065 - DNA, 25 bp, Homo sapien
tgtgcttttcagacagtagtgcagc

SEQ ID NO: 441066 - DNA, 25 bp, Homo sapien
cagcagcggtgcatgttctaactta

SEQ ID NO: 441067 - DNA, 25 bp, Homo sapien
caaccctgcccttattggagcctgg

SEQ ID NO: 441068 - DNA, 25 bp, Homo sapien
aaacatacgtgtaccttgcagcccg

SEQ ID NO: 441069 - DNA, 25 bp, Homo sapien
taacttaggcaacgttgggtcatct

SEQ ID NO: 441070 - DNA, 25 bp, Homo sapien
tggtctgtgactccttacggcaagg

SEQ ID NO: 441071 - DNA, 25 bp, Homo sapien
tatattaacggtgtggtggtcccaa

SEQ ID NO: 441072 - DNA, 25 bp, Homo sapien
tgaaatttgctctcatgtgccctga

SEQ ID NO: 441073 - DNA, 25 bp, Homo sapien
taccgaggttcatggtttgcacaac

SEQ ID NO: 441074 - DNA, 25 bp, Homo sapien
gtcttacgcggatggcagcaggcca

SEQ ID NO: 441075 - DNA, 25 bp, Homo sapien
tggcagcaggccaaaagagagacag

SEQ ID NO: 441076 - DNA, 25 bp, Homo sapien
gtaagtcatgtcttacgcggatggc

SEQ ID NO: 441077 - DNA, 25 bp, Homo sapien
acggaggagtaagtcatgtcttacg

SEQ ID NO: 441078 - DNA, 25 bp, Homo sapien
tgtctatcccaagtacatctatggg

SEQ ID NO: 441079 - DNA, 25 bp, Homo sapien
ggaggagtgccagaagctgtctatc

SEQ ID NO: 441080 - DNA, 25 bp, Homo sapien
tgccagaagctgtctatcccaagta

SEQ ID NO: 441081 - DNA, 25 bp, Homo sapien
ccaagtacatctatgggatgggtat

SEQ ID NO: 441082 - DNA, 25 bp, Homo sapien
ccagcaaaatggaagtctcaggttt

SEQ ID NO: 441083 - DNA, 25 bp, Homo sapien
tccagttctttgagggctgttgggc

SEQ ID NO: 441084 - DNA, 25 bp, Homo sapien
tgcttctaggtcactcatgtggttg

SEQ ID NO: 441085 - DNA, 25 bp, Homo sapien
tcaagagcactggtgacagatttgc

SEQ ID NO: 441086 - DNA, 25 bp, Homo sapien
gctgctctggtcttgtagactctta

SEQ ID NO: 441087 - DNA, 25 bp, Homo sapien
tagactcttagatcatgatcttttc

SEQ ID NO: 441088 - DNA, 25 bp, Homo sapien
gggaaccacccaatgctgctattct

SEQ ID NO: 441089 - DNA, 25 bp, Homo sapien
tgtgccggtgattaaatacttcagc

SEQ ID NO: 441090 - DNA, 25 bp, Homo sapien
tagggactggtgattattagagagc

SEQ ID NO: 441091 - DNA, 25 bp, Homo sapien
gtattaatcaaaatgacatctaggg

SEQ ID NO: 441092 - DNA, 25 bp, Homo sapien
caatttgaggcacacaattggtata

SEQ ID NO: 441093 - DNA, 25 bp, Homo sapien
gtttccttaatgtacaatttgaggc

SEQ ID NO: 441094 - DNA, 25 bp, Homo sapien
cattgtttatggatcacaagccaag

SEQ ID NO: 441095 - DNA, 25 bp, Homo sapien
ccttaagagctcttaagtgattagg

SEQ ID NO: 441096 - DNA, 25 bp, Homo sapien
tcttttttcaggaagagcccattca

SEQ ID NO: 441097 - DNA, 25 bp, Homo sapien
ttctctgctcatgacctgagttgac

SEQ ID NO: 441098 - DNA, 25 bp, Homo sapien
ctgcctttagatatgctaaagacat

SEQ ID NO: 441099 - DNA, 25 bp, Homo sapien
tccctgctacagcacgtgcactctc

SEQ ID NO: 441100 - DNA, 25 bp, Homo sapien
acctttccagaaggcggcactgtcc

SEQ ID NO: 441101 - DNA, 25 bp, Homo sapien
ctgtcctgatgattcacatttttag

SEQ ID NO: 441102 - DNA, 25 bp, Homo sapien
gctctaacttggctcttgctactgt

SEQ ID NO: 441103 - DNA, 25 bp, Homo sapien
catttttgagatctcctccattctt

SEQ ID NO: 441104 - DNA, 25 bp, Homo sapien
gaattgtggtgacttaagctctaac

SEQ ID NO: 441105 - DNA, 25 bp, Homo sapien
tgagacatgctgtgactaggatcat

SEQ ID NO: 441106 - DNA, 25 bp, Homo sapien
taccaacagcaaattgtgtctctct

SEQ ID NO: 441107 - DNA, 25 bp, Homo sapien
tgtctctctaccattctgggaccca

SEQ ID NO: 441108 - DNA, 25 bp, Homo sapien
tctgggacccaatagaacctggaaa

SEQ ID NO: 441109 - DNA, 25 bp, Homo sapien
aatctccatcaaagggctaccaaca

SEQ ID NO: 441110 - DNA, 25 bp, Homo sapien
tacgcccacggagtctcgctggttg

SEQ ID NO: 441111 - DNA, 25 bp, Homo sapien
cacggagtctcgctggttgctagca

SEQ ID NO: 441112 - DNA, 25 bp, Homo sapien
cgcccacggagtctcgctggttgct

SEQ ID NO: 441113 - DNA, 25 bp, Homo sapien
tcctacgcccacggagtctcgctgg

SEQ ID NO: 441114 - DNA, 25 bp, Homo sapien
cagcccaactttgcacgctgggtca

SEQ ID NO: 441115 - DNA, 25 bp, Homo sapien
cgccaccctcgctcgctgggtcctt

SEQ ID NO: 441116 - DNA, 25 bp, Homo sapien
gctcccagcccaactttgcacgctg

SEQ ID NO: 441117 - DNA, 25 bp, Homo sapien
aactttgcacgctgggtcaggcgcc

SEQ ID NO: 441118 - DNA, 25 bp, Homo sapien
gaggctgccagtcgcggcggattct

SEQ ID NO: 441119 - DNA, 25 bp, Homo sapien
ctcaaagcgcaccattcagcacatc

SEQ ID NO: 441120 - DNA, 25 bp, Homo sapien
aagagaagccgagccggtcagccga

SEQ ID NO: 441121 - DNA, 25 bp, Homo sapien
agtcgcggcggattctgctcctccg

SEQ ID NO: 441122 - DNA, 25 bp, Homo sapien
atgccccgggcgggacgcgaggtct

SEQ ID NO: 441123 - DNA, 25 bp, Homo sapien
ccatgccccgggcgggacgcgaggt

SEQ ID NO: 441124 - DNA, 25 bp, Homo sapien
tgccccgggcgggacgcgaggtctg

SEQ ID NO: 441125 - DNA, 25 bp, Homo sapien
ggccatgccccgggcgggacgcgag

SEQ ID NO: 441126 - DNA, 25 bp, Homo sapien
gcagggactggggaccgtgcgcggg

SEQ ID NO: 441127 - DNA, 25 bp, Homo sapien
actggggaccgtgcgcggggcgcgg

SEQ ID NO: 441128 - DNA, 25 bp, Homo sapien
ccggaggcgctcgactctgctcccc

SEQ ID NO: 441129 - DNA, 25 bp, Homo sapien
gaggcgctcgactctgctccccgcc

SEQ ID NO: 441130 - DNA, 25 bp, Homo sapien
tgacgaatttggtgcccttcttgag

SEQ ID NO: 441131 - DNA, 25 bp, Homo sapien
aaggcgtgcactccgggttgagccc

SEQ ID NO: 441132 - DNA, 25 bp, Homo sapien
ttcttgaggctgtcggacacgcaca

SEQ ID NO: 441133 - DNA, 25 bp, Homo sapien
cacgcacacgggcttgagttgcaag

SEQ ID NO: 441134 - DNA, 25 bp, Homo sapien
ccacaaaagcgccaagagggttcgc

SEQ ID NO: 441135 - DNA, 25 bp, Homo sapien
aagagggttcgcaatcactaaagtg

SEQ ID NO: 441136 - DNA, 25 bp, Homo sapien
gcgccaagagggttcgcaatcacta

SEQ ID NO: 441137 - DNA, 25 bp, Homo sapien
caaaagcgccaagagggttcgcaat

SEQ ID NO: 441138 - DNA, 25 bp, Homo sapien
tggaccgttgtgtcctccgccgcct

SEQ ID NO: 441139 - DNA, 25 bp, Homo sapien
ttggctggaccgttgtgtcctccgc

SEQ ID NO: 441140 - DNA, 25 bp, Homo sapien
acctgttggctggaccgttgtgtcc

SEQ ID NO: 441141 - DNA, 25 bp, Homo sapien
cacctgttggctggaccgttgtgtc

SEQ ID NO: 441142 - DNA, 25 bp, Homo sapien
cggagccaggcgctgaagtttggca

SEQ ID NO: 441143 - DNA, 25 bp, Homo sapien
aaatatagacacagacgcactcagc

SEQ ID NO: 441144 - DNA, 25 bp, Homo sapien
caagttccgtttgcgcttccagctg

SEQ ID NO: 441145 - DNA, 25 bp, Homo sapien
ctgtggttcatactccaagttccgt

SEQ ID NO: 441146 - DNA, 25 bp, Homo sapien
aagtaattggattcactacctggaa

SEQ ID NO: 441147 - DNA, 25 bp, Homo sapien
gtctaccatattcttgttcttccat

SEQ ID NO: 441148 - DNA, 25 bp, Homo sapien
ccttcatgtctaccatattcttgtt

SEQ ID NO: 441149 - DNA, 25 bp, Homo sapien
catttccttcatgtctaccatattc

SEQ ID NO: 441150 - DNA, 25 bp, Homo sapien
tctacatttccttcatgtctaccat

SEQ ID NO: 441151 - DNA, 25 bp, Homo sapien
ctggcctctcagttgacactgtctt

SEQ ID NO: 441152 - DNA, 25 bp, Homo sapien
agttgacactgtcttgcattctgca

SEQ ID NO: 441153 - DNA, 25 bp, Homo sapien
catcgtgcttgagagcaggcaactc

SEQ ID NO: 441154 - DNA, 25 bp, Homo sapien
attctgcatcgtgcttgagagcagg

SEQ ID NO: 441155 - DNA, 25 bp, Homo sapien
caaaatcttggtggcgattccctgc

SEQ ID NO: 441156 - DNA, 25 bp, Homo sapien
taatcaaaatcttggtggcgattcc

SEQ ID NO: 441157 - DNA, 25 bp, Homo sapien
tcttggtggcgattccctgcaagga

SEQ ID NO: 441158 - DNA, 25 bp, Homo sapien
tctaatcaaaatcttggtggcgatt

SEQ ID NO: 441159 - DNA, 25 bp, Homo sapien
taattggagtaacaatagttgagtc

SEQ ID NO: 441160 - DNA, 25 bp, Homo sapien
ccctgagggtcagtcctcaaaataa

SEQ ID NO: 441161 - DNA, 25 bp, Homo sapien
cttgttttgatctgtccagtaaaag

SEQ ID NO: 441162 - DNA, 25 bp, Homo sapien
tgttttgatctgtccagtaaaagaa

SEQ ID NO: 441163 - DNA, 25 bp, Homo sapien
gagtgttctcatctaactgcccatt

SEQ ID NO: 441164 - DNA, 25 bp, Homo sapien
tgacaactgaaggaataggctaaag

SEQ ID NO: 441165 - DNA, 25 bp, Homo sapien
taggactgtggcaacgatgcttgaa

SEQ ID NO: 441166 - DNA, 25 bp, Homo sapien
aataaattcatgctattgtgggcag

SEQ ID NO: 441167 - DNA, 25 bp, Homo sapien
cataaacagcattgcaaccaagatt

SEQ ID NO: 441168 - DNA, 25 bp, Homo sapien
cacattatctgtttcgcttggtcat

SEQ ID NO: 441169 - DNA, 25 bp, Homo sapien
taaaaggaattgctaccacattatc

SEQ ID NO: 441170 - DNA, 25 bp, Homo sapien
tatgatcactaagaaatgagcctcc

SEQ ID NO: 441171 - DNA, 25 bp, Homo sapien
atgaatcactcttactggttccagg

SEQ ID NO: 441172 - DNA, 25 bp, Homo sapien
ggagtcgtccatctcctaaaagtgg

SEQ ID NO: 441173 - DNA, 25 bp, Homo sapien
gaatcactcttactggttccagggc

SEQ ID NO: 441174 - DNA, 25 bp, Homo sapien
ctctaattcatcacttggagtcgtc

SEQ ID NO: 441175 - DNA, 25 bp, Homo sapien
gcataggcaaccatgattgtgtcca

SEQ ID NO: 441176 - DNA, 25 bp, Homo sapien
agttcactggtgcaaaatctctgag

SEQ ID NO: 441177 - DNA, 25 bp, Homo sapien
ctgaaccttggcttagtggctaaac

SEQ ID NO: 441178 - DNA, 25 bp, Homo sapien
catgtctattctatgctagccagag

SEQ ID NO: 441179 - DNA, 25 bp, Homo sapien
ctcagcttgatttcccgtatgttgt

SEQ ID NO: 441180 - DNA, 25 bp, Homo sapien
gatttcccgtatgttgtgggtgaga

SEQ ID NO: 441181 - DNA, 25 bp, Homo sapien
gaagggaattgctttatctcggatt

SEQ ID NO: 441182 - DNA, 25 bp, Homo sapien
tatctcggattagacttgggactgt

SEQ ID NO: 441183 - DNA, 25 bp, Homo sapien
cttgggtaccgttaaagatattcag

SEQ ID NO: 441184 - DNA, 25 bp, Homo sapien
gcttgggtaccgttaaagatattca

SEQ ID NO: 441185 - DNA, 25 bp, Homo sapien
tatgccaacggacagcttccagctg

SEQ ID NO: 441186 - DNA, 25 bp, Homo sapien
ttaaagccaccagagtggttgctgc

SEQ ID NO: 441187 - DNA, 25 bp, Homo sapien
cagctgcatctatgtctgagggatt

SEQ ID NO: 441188 - DNA, 25 bp, Homo sapien
ttctcaaagcctagggcccactggc

SEQ ID NO: 441189 - DNA, 25 bp, Homo sapien
aggacttggttcttcactggcttgt

SEQ ID NO: 441190 - DNA, 25 bp, Homo sapien
aagtggcatctgagctactccaata

SEQ ID NO: 441191 - DNA, 25 bp, Homo sapien
gcagggctagcttcccctttgagct

SEQ ID NO: 441192 - DNA, 25 bp, Homo sapien
tggcttgtcttctgcagggctagct

SEQ ID NO: 441193 - DNA, 25 bp, Homo sapien
ccttcaccgcatgccctgttgaccc

SEQ ID NO: 441194 - DNA, 25 bp, Homo sapien
ccgcatgccctgttgacccagatat

SEQ ID NO: 441195 - DNA, 25 bp, Homo sapien
tccccttcaccgcatgccctgttga

SEQ ID NO: 441196 - DNA, 25 bp, Homo sapien
tcaccgcatgccctgttgacccaga

SEQ ID NO: 441197 - DNA, 25 bp, Homo sapien
tctggtacagtagaagtagtacagc

SEQ ID NO: 441198 - DNA, 25 bp, Homo sapien
gacaaaaagtcatcctccagacagg

SEQ ID NO: 441199 - DNA, 25 bp, Homo sapien
gacaggctatgcacacacgtttcat

SEQ ID NO: 441200 - DNA, 25 bp, Homo sapien
tctggcttgcatggactttacaatg

SEQ ID NO: 441201 - DNA, 25 bp, Homo sapien
ttttaaattagcttctcgggcaaga

SEQ ID NO: 441202 - DNA, 25 bp, Homo sapien
ggcaagaaaatccatcagacttaat

SEQ ID NO: 441203 - DNA, 25 bp, Homo sapien
gcagttcacctagtgaatacgattt

SEQ ID NO: 441204 - DNA, 25 bp, Homo sapien
cagtctgcagttcacctagtgaata

SEQ ID NO: 441205 - DNA, 25 bp, Homo sapien
gagtttttccaccattggcactttg

SEQ ID NO: 441206 - DNA, 25 bp, Homo sapien
tgcaacacactttaccagataatag

SEQ ID NO: 441207 - DNA, 25 bp, Homo sapien
gcactttggactgcaacacacttta

SEQ ID NO: 441208 - DNA, 25 bp, Homo sapien
tttaccagataatagtcacatctca

SEQ ID NO: 441209 - DNA, 25 bp, Homo sapien
cattaagtaccaaatcataatgttg

SEQ ID NO: 441210 - DNA, 25 bp, Homo sapien
caatagcagttctcttgggcacccc

SEQ ID NO: 441211 - DNA, 25 bp, Homo sapien
gaattacgtagagattcaggtttat

SEQ ID NO: 441212 - DNA, 25 bp, Homo sapien
taaacctgaaaccaatagcagttct

SEQ ID NO: 441213 - DNA, 25 bp, Homo sapien
ctgatagcatcattgattgtaaagc

SEQ ID NO: 441214 - DNA, 25 bp, Homo sapien
taataacctatatgagatggaaagc

SEQ ID NO: 441215 - DNA, 25 bp, Homo sapien
tccagttatatgttgagttgaaggc

SEQ ID NO: 441216 - DNA, 25 bp, Homo sapien
taacttgcttcagtatgcttgggaa

SEQ ID NO: 441217 - DNA, 25 bp, Homo sapien
tctcttcaaggcctagaccaaattc

SEQ ID NO: 441218 - DNA, 25 bp, Homo sapien
agtgttttgactcgctccccctcat

SEQ ID NO: 441219 - DNA, 25 bp, Homo sapien
caaattctactttctctgcgtgttc

SEQ ID NO: 441220 - DNA, 25 bp, Homo sapien
gactcgctccccctcatatgaaata

SEQ ID NO: 441221 - DNA, 25 bp, Homo sapien
cagaaaatcataggtgtgacacata

SEQ ID NO: 441222 - DNA, 25 bp, Homo sapien
ttagaatgaatggactatcccagtg

SEQ ID NO: 441223 - DNA, 25 bp, Homo sapien
tgtcagaaagcagaagcaaccagta

SEQ ID NO: 441224 - DNA, 25 bp, Homo sapien
gccgtacccgaagcatgtgccagca

SEQ ID NO: 441225 - DNA, 25 bp, Homo sapien
gcactttcttccctgtaggatggta

SEQ ID NO: 441226 - DNA, 25 bp, Homo sapien
caatataattagagtttttcatggc

SEQ ID NO: 441227 - DNA, 25 bp, Homo sapien
tggcagttcattgcaaatcattcac

SEQ ID NO: 441228 - DNA, 25 bp, Homo sapien
taaatatcatataacagcagaagag

SEQ ID NO: 441229 - DNA, 25 bp, Homo sapien
aggacagagaggagattctctgcat

SEQ ID NO: 441230 - DNA, 25 bp, Homo sapien
taagaaggacagagaggagattctc

SEQ ID NO: 441231 - DNA, 25 bp, Homo sapien
tttaagaaggacagagaggagattc

SEQ ID NO: 441232 - DNA, 25 bp, Homo sapien
ctgtttaagaaggacagagaggaga

SEQ ID NO: 441233 - DNA, 25 bp, Homo sapien
tgaagcttatcttcatagtgatgcc

SEQ ID NO: 441234 - DNA, 25 bp, Homo sapien
cagcactgtactggacattaggtga

SEQ ID NO: 441235 - DNA, 25 bp, Homo sapien
tatcttcatagtgatgccatgcttc

SEQ ID NO: 441236 - DNA, 25 bp, Homo sapien
tggacattaggtgaagcttatcttc

SEQ ID NO: 441237 - DNA, 25 bp, Homo sapien
ttccacagtgtttggtaagtaccca

SEQ ID NO: 441238 - DNA, 25 bp, Homo sapien
atagaggaacaaaatggggcaatgg

SEQ ID NO: 441239 - DNA, 25 bp, Homo sapien
tccacagtgtttggtaagtacccac

SEQ ID NO: 441240 - DNA, 25 bp, Homo sapien
aggggaaggatcttctacttcccag

SEQ ID NO: 441241 - DNA, 25 bp, Homo sapien
gaaactacctttggttgagtggaca

SEQ ID NO: 441242 - DNA, 25 bp, Homo sapien
ctacctttggttgagtggacaccat

SEQ ID NO: 441243 - DNA, 25 bp, Homo sapien
ccaggaaactacctttggttgagtg

SEQ ID NO: 441244 - DNA, 25 bp, Homo sapien
tgtcctccaagctcaaccttcctcc

SEQ ID NO: 441245 - DNA, 25 bp, Homo sapien
gtcctccaagctcaaccttcctcct

SEQ ID NO: 441246 - DNA, 25 bp, Homo sapien
aagtgtctcacagacctcaagaggc

SEQ ID NO: 441247 - DNA, 25 bp, Homo sapien
tatatttctgatggtcacaactggg

SEQ ID NO: 441248 - DNA, 25 bp, Homo sapien
actcattgtgttagagacaagggcc

SEQ ID NO: 441249 - DNA, 25 bp, Homo sapien
ggctctccttagaaaacagataggt

SEQ ID NO: 441250 - DNA, 25 bp, Homo sapien
ggaagttacatgaatttaggcaaca

SEQ ID NO: 441251 - DNA, 25 bp, Homo sapien
tactttgaaagatagccacatatgg

SEQ ID NO: 441252 - DNA, 25 bp, Homo sapien
tatctttgaggagacataacatgta

SEQ ID NO: 441253 - DNA, 25 bp, Homo sapien
catggtgctctgttgttatctttga

SEQ ID NO: 441254 - DNA, 25 bp, Homo sapien
gagtgctatattagttgtcttacac

SEQ ID NO: 441255 - DNA, 25 bp, Homo sapien
cactatgttatctgggctgatttca

SEQ ID NO: 441256 - DNA, 25 bp, Homo sapien
tagttgtcttacactatatttgaaa

SEQ ID NO: 441257 - DNA, 25 bp, Homo sapien
gatttccatatcaatagagtgctat

SEQ ID NO: 441258 - DNA, 25 bp, Homo sapien
tccaggaagtttaagagtacaaatc

SEQ ID NO: 441259 - DNA, 25 bp, Homo sapien
tcacagtcataccttggctattccc

SEQ ID NO: 441260 - DNA, 25 bp, Homo sapien
gtcataccttggctattcccaccaa

SEQ ID NO: 441261 - DNA, 25 bp, Homo sapien
ccaggaagtttaagagtacaaatca

SEQ ID NO: 441262 - DNA, 25 bp, Homo sapien
caaatgcctgctggatacttccacg

SEQ ID NO: 441263 - DNA, 25 bp, Homo sapien
tatgtgaatgataagccctggagct

SEQ ID NO: 441264 - DNA, 25 bp, Homo sapien
tacttccacgcaggtaaattgtcag

SEQ ID NO: 441265 - DNA, 25 bp, Homo sapien
ggctctgcactaacctggaattcat

SEQ ID NO: 441266 - DNA, 25 bp, Homo sapien
tagcactgccttgcctaagatggct

SEQ ID NO: 441267 - DNA, 25 bp, Homo sapien
caccggatggtgactttacaaaagc

SEQ ID NO: 441268 - DNA, 25 bp, Homo sapien
gttgcattcaatactcatcggacca

SEQ ID NO: 441269 - DNA, 25 bp, Homo sapien
tctgttctggaaggcgttagttccc

SEQ ID NO: 441270 - DNA, 25 bp, Homo sapien
cctagtgatgctagtagctggaatc

SEQ ID NO: 441271 - DNA, 25 bp, Homo sapien
ggatagacatctggcccgtggaatc

SEQ ID NO: 441272 - DNA, 25 bp, Homo sapien
ttgctgcagctgatgtgaccacacg

SEQ ID NO: 441273 - DNA, 25 bp, Homo sapien
cgtggaatctggcactgaggcctag

SEQ ID NO: 441274 - DNA, 25 bp, Homo sapien
atataaaagaacctgctcccaggct

SEQ ID NO: 441275 - DNA, 25 bp, Homo sapien
catgatataaaagaacctgctccca

SEQ ID NO: 441276 - DNA, 25 bp, Homo sapien
gatataaaagaacctgctcccaggc

SEQ ID NO: 441277 - DNA, 25 bp, Homo sapien
tgatataaaagaacctgctcccagg

SEQ ID NO: 441278 - DNA, 25 bp, Homo sapien
cccaagaggacgtagcagatactgc

SEQ ID NO: 441279 - DNA, 25 bp, Homo sapien
ttttgacctcagtagtagacctgcc

SEQ ID NO: 441280 - DNA, 25 bp, Homo sapien
tagacctgcccttcccgtcagaagg

SEQ ID NO: 441281 - DNA, 25 bp, Homo sapien
gccctaacactatggagagctggaa

SEQ ID NO: 441282 - DNA, 25 bp, Homo sapien
cagaaatatccatgcaagtcttagg

SEQ ID NO: 441283 - DNA, 25 bp, Homo sapien
tttacccacacaaggataatgtgag

SEQ ID NO: 441284 - DNA, 25 bp, Homo sapien
gacgtcaaagaccactaacagcgtt

SEQ ID NO: 441285 - DNA, 25 bp, Homo sapien
ggaatagtcctatatagcctgaaaa

SEQ ID NO: 441286 - DNA, 25 bp, Homo sapien
gagttaaaggatgctacatcattcc

SEQ ID NO: 441287 - DNA, 25 bp, Homo sapien
tctttccaattacttccaatgatgg

SEQ ID NO: 441288 - DNA, 25 bp, Homo sapien
ccattcatgatttaagggttccagt

SEQ ID NO: 441289 - DNA, 25 bp, Homo sapien
gatactttctgtcgatcacaataag

SEQ ID NO: 441290 - DNA, 25 bp, Homo sapien
ctttaatgacagctcagatttcaga

SEQ ID NO: 441291 - DNA, 25 bp, Homo sapien
acagacagacacgaagacatggctt

SEQ ID NO: 441292 - DNA, 25 bp, Homo sapien
catggctttaatgacagctcagatt

SEQ ID NO: 441293 - DNA, 25 bp, Homo sapien
gggtcacacacagcgacagactgtc

SEQ ID NO: 441294 - DNA, 25 bp, Homo sapien
ttttcacagatatgggatggcgccc

SEQ ID NO: 441295 - DNA, 25 bp, Homo sapien
gatgcaaagcaatgccccttgggag

SEQ ID NO: 441296 - DNA, 25 bp, Homo sapien
tgtagaccgacagcctcaaagtaag

SEQ ID NO: 441297 - DNA, 25 bp, Homo sapien
aaatctctggcaacaggcttgagcc

SEQ ID NO: 441298 - DNA, 25 bp, Homo sapien
cctaagggttgagctgttctttgct

SEQ ID NO: 441299 - DNA, 25 bp, Homo sapien
ttacatctgctgtgaatcatggtca

SEQ ID NO: 441300 - DNA, 25 bp, Homo sapien
caacgattaacaagtgcctggtgct

SEQ ID NO: 441301 - DNA, 25 bp, Homo sapien
tgatgataaagtacttgcctaaggg

SEQ ID NO: 441302 - DNA, 25 bp, Homo sapien
tctttatggaaacttgactgaagga

SEQ ID NO: 441303 - DNA, 25 bp, Homo sapien
gcaggaaagagggtctttatggaaa

SEQ ID NO: 441304 - DNA, 25 bp, Homo sapien
taagtcttctactcttaatcctgga

SEQ ID NO: 441305 - DNA, 25 bp, Homo sapien
tttagtaggagctcagccagaagca

SEQ ID NO: 441306 - DNA, 25 bp, Homo sapien
gatattatgactggactagcctgag

SEQ ID NO: 441307 - DNA, 25 bp, Homo sapien
ggatattagctgactcgattcaaga

SEQ ID NO: 441308 - DNA, 25 bp, Homo sapien
taatagcctccatgtagccacatcg

SEQ ID NO: 441309 - DNA, 25 bp, Homo sapien
ggcttccatatgcagtggatccatg

SEQ ID NO: 441310 - DNA, 25 bp, Homo sapien
ctttttgccccaaagactggcttga

SEQ ID NO: 441311 - DNA, 25 bp, Homo sapien
tttgccccaaagactggcttgatca

SEQ ID NO: 441312 - DNA, 25 bp, Homo sapien
atctaagctcttctttttgccccaa

SEQ ID NO: 441313 - DNA, 25 bp, Homo sapien
tctttttgccccaaagactggcttg

SEQ ID NO: 441314 - DNA, 25 bp, Homo sapien
taaacatattcttagttaactgttc

SEQ ID NO: 441315 - DNA, 25 bp, Homo sapien
tgttcttgaccgttttccttagaca

SEQ ID NO: 441316 - DNA, 25 bp, Homo sapien
tagacacaattcttaaagggtccag

SEQ ID NO: 441317 - DNA, 25 bp, Homo sapien
tgaccgttttccttagacacaattc

SEQ ID NO: 441318 - DNA, 25 bp, Homo sapien
aggacaataggaaacaataatttct

SEQ ID NO: 441319 - DNA, 25 bp, Homo sapien
gaggacaataggaaacaataatttc

SEQ ID NO: 441320 - DNA, 25 bp, Homo sapien
ctgaggacaataggaaacaataatt

SEQ ID NO: 441321 - DNA, 25 bp, Homo sapien
tgaggacaataggaaacaataattt

SEQ ID NO: 441322 - DNA, 25 bp, Homo sapien
caagttgaatgggtgtcctggtagt

SEQ ID NO: 441323 - DNA, 25 bp, Homo sapien
gtctgagtaatagcaaagatgcttc

SEQ ID NO: 441324 - DNA, 25 bp, Homo sapien
gaaacaagttgaatgggtgtcctgg

SEQ ID NO: 441325 - DNA, 25 bp, Homo sapien
tcctggtagtttccctagtctgagt

SEQ ID NO: 441326 - DNA, 25 bp, Homo sapien
cctcctccaagtcaatggttgagtc

SEQ ID NO: 441327 - DNA, 25 bp, Homo sapien
ctcctccaagtcaatggttgagtcc

SEQ ID NO: 441328 - DNA, 25 bp, Homo sapien
ccatggttaaagataagttgtatcc

SEQ ID NO: 441329 - DNA, 25 bp, Homo sapien
tgagtactcaaatatgactgtggga

SEQ ID NO: 441330 - DNA, 25 bp, Homo sapien
caaagattctatgttgttcacaaag

SEQ ID NO: 441331 - DNA, 25 bp, Homo sapien
gaaaaacagataacggtcatataga

SEQ ID NO: 441332 - DNA, 25 bp, Homo sapien
gccctgtaggaatcatctacatgga

SEQ ID NO: 441333 - DNA, 25 bp, Homo sapien
gactggtactgagtaattgctttcc

SEQ ID NO: 441334 - DNA, 25 bp, Homo sapien
ccttgtaaagatgaatgcggggaac

SEQ ID NO: 441335 - DNA, 25 bp, Homo sapien
gaatgcggggaacatgcctgccttg

SEQ ID NO: 441336 - DNA, 25 bp, Homo sapien
taaaacctaagtgtgaacctgtgct

SEQ ID NO: 441337 - DNA, 25 bp, Homo sapien
taatgtgaaaaagtagccctcaacc

SEQ ID NO: 441338 - DNA, 25 bp, Homo sapien
gaatcttgattatgggctctacaca

SEQ ID NO: 441339 - DNA, 25 bp, Homo sapien
ccatgaggtctattctgagcactga

SEQ ID NO: 441340 - DNA, 25 bp, Homo sapien
tatactgagatagaaaaggctgcga

SEQ ID NO: 441341 - DNA, 25 bp, Homo sapien
tctaggtctgctccacactttatga

SEQ ID NO: 441342 - DNA, 25 bp, Homo sapien
tgtctgcatgaagctacaacgatgg

SEQ ID NO: 441343 - DNA, 25 bp, Homo sapien
aaggctgcgactgagtagaaaatac

SEQ ID NO: 441344 - DNA, 25 bp, Homo sapien
cagcctcttgcttcaccttattaaa

SEQ ID NO: 441345 - DNA, 25 bp, Homo sapien
caagaagcatgtgagcctgcaaaat

SEQ ID NO: 441346 - DNA, 25 bp, Homo sapien
ccatgtgcaccactatatctgtata

SEQ ID NO: 441347 - DNA, 25 bp, Homo sapien
taaaatggcaaacaagaagcatgtg

SEQ ID NO: 441348 - DNA, 25 bp, Homo sapien
caggcaaggctctccgtaatgcagc

SEQ ID NO: 441349 - DNA, 25 bp, Homo sapien
caatcacagcctcgggaactggtac

SEQ ID NO: 441350 - DNA, 25 bp, Homo sapien
tctggtccagggtgagaagtacatc

SEQ ID NO: 441351 - DNA, 25 bp, Homo sapien
agcattgtagaactgactcctgccc

SEQ ID NO: 441352 - DNA, 25 bp, Homo sapien
cagccctaagtgtttaggcaaacac

SEQ ID NO: 441353 - DNA, 25 bp, Homo sapien
cctaagtgtttaggcaaacactcag

SEQ ID NO: 441354 - DNA, 25 bp, Homo sapien
cttcagcagccctaagtgtttaggc

SEQ ID NO: 441355 - DNA, 25 bp, Homo sapien
ctttgccctcagcatctgacttcag

SEQ ID NO: 441356 - DNA, 25 bp, Homo sapien
caggatcccttgaatgctatcaaga

SEQ ID NO: 441357 - DNA, 25 bp, Homo sapien
aaaaatgaacactcgtctgatgcaa

SEQ ID NO: 441358 - DNA, 25 bp, Homo sapien
tgtcaataagtttgtcctcaaagca

SEQ ID NO: 441359 - DNA, 25 bp, Homo sapien
ctctgctgactttgcaggatccctt

SEQ ID NO: 441360 - DNA, 25 bp, Homo sapien
gggcttattaacttgcctcgaatca

SEQ ID NO: 441361 - DNA, 25 bp, Homo sapien
gttacaggtgaaggaagtgaagctt

SEQ ID NO: 441362 - DNA, 25 bp, Homo sapien
gcgccaggcccaaagctaatgtttt

SEQ ID NO: 441363 - DNA, 25 bp, Homo sapien
aacagaaagatctagctttaaagct

SEQ ID NO: 441364 - DNA, 25 bp, Homo sapien
tttctgaagtatagatagacggcat

SEQ ID NO: 441365 - DNA, 25 bp, Homo sapien
ttttctgaagtatagatagacggca

SEQ ID NO: 441366 - DNA, 25 bp, Homo sapien
attttctgaagtatagatagacggc

SEQ ID NO: 441367 - DNA, 25 bp, Homo sapien
gatacatttgagtgagtaaccaacg

SEQ ID NO: 441368 - DNA, 25 bp, Homo sapien
ccagactgtgtcaaggagaggttct

SEQ ID NO: 441369 - DNA, 25 bp, Homo sapien
aatttccacattgggccctagaggc

SEQ ID NO: 441370 - DNA, 25 bp, Homo sapien
cagtatggcatatctggtgacttcc

SEQ ID NO: 441371 - DNA, 25 bp, Homo sapien
tgaatccatcacttatctgcttata

SEQ ID NO: 441372 - DNA, 25 bp, Homo sapien
tatctgcttataggacttaaatgcc

SEQ ID NO: 441373 - DNA, 25 bp, Homo sapien
gcttataggacttaaatgccttcat

SEQ ID NO: 441374 - DNA, 25 bp, Homo sapien
ccatcacttatctgcttataggact

SEQ ID NO: 441375 - DNA, 25 bp, Homo sapien
ctggcatctttgacaaggctgagat

SEQ ID NO: 441376 - DNA, 25 bp, Homo sapien
caaggctgagatccagtagctctgt

SEQ ID NO: 441377 - DNA, 25 bp, Homo sapien
gctttggcgtgtctcccacatctgg

SEQ ID NO: 441378 - DNA, 25 bp, Homo sapien
ggagctttggcgtgtctcccacatc

SEQ ID NO: 441379 - DNA, 25 bp, Homo sapien
aattaattgatattgtgacacagcc

SEQ ID NO: 441380 - DNA, 25 bp, Homo sapien
aattagaggacataaagcaagcccc

SEQ ID NO: 441381 - DNA, 25 bp, Homo sapien
tcccatatgtttacgaggttcaaag

SEQ ID NO: 441382 - DNA, 25 bp, Homo sapien
tgaaagtgtttagggcatactggct

SEQ ID NO: 441383 - DNA, 25 bp, Homo sapien
gtggctttctacaattctgacttga

SEQ ID NO: 441384 - DNA, 25 bp, Homo sapien
caatgttactaccaacaatattggc

SEQ ID NO: 441385 - DNA, 25 bp, Homo sapien
caatttgattcttatggtaccagca

SEQ ID NO: 441386 - DNA, 25 bp, Homo sapien
tacaccaagagtaagttaaggcagt

SEQ ID NO: 441387 - DNA, 25 bp, Homo sapien
aggccctacaccttcttctacaagg

SEQ ID NO: 441388 - DNA, 25 bp, Homo sapien
gaaagtcttgcactcaatctgtcct

SEQ ID NO: 441389 - DNA, 25 bp, Homo sapien
tgttctaaccaactcaatggtctag

SEQ ID NO: 441390 - DNA, 25 bp, Homo sapien
cagggtaacacatggaagcttttcc

SEQ ID NO: 441391 - DNA, 25 bp, Homo sapien
tacactttatgctgtgactcagaac

SEQ ID NO: 441392 - DNA, 25 bp, Homo sapien
aacttctccgatatgtattgcccac

SEQ ID NO: 441393 - DNA, 25 bp, Homo sapien
caatctgtaaggtggaaagtcatgg

SEQ ID NO: 441394 - DNA, 25 bp, Homo sapien
gaatcaagggctaacggaacttaca

SEQ ID NO: 441395 - DNA, 25 bp, Homo sapien
ccaccactttctcactcttaaataa

SEQ ID NO: 441396 - DNA, 25 bp, Homo sapien
ctttggcaataaggtaataggacag

SEQ ID NO: 441397 - DNA, 25 bp, Homo sapien
aataaggtaataggacagatgctgg

SEQ ID NO: 441398 - DNA, 25 bp, Homo sapien
gcaataaggtaataggacagatgct

SEQ ID NO: 441399 - DNA, 25 bp, Homo sapien
tggcaataaggtaataggacagatg

SEQ ID NO: 441400 - DNA, 25 bp, Homo sapien
cttctctacaacctctccaggtcct

SEQ ID NO: 441401 - DNA, 25 bp, Homo sapien
ttctctacaacctctccaggtcctt

SEQ ID NO: 441402 - DNA, 25 bp, Homo sapien
tctacaacctctccaggtcctttag

SEQ ID NO: 441403 - DNA, 25 bp, Homo sapien
tacaacctctccaggtcctttagaa

SEQ ID NO: 441404 - DNA, 25 bp, Homo sapien
gacattaatttcaggagttccggaa

SEQ ID NO: 441405 - DNA, 25 bp, Homo sapien
ttatttgaccagtcacccaggccgg

SEQ ID NO: 441406 - DNA, 25 bp, Homo sapien
tacagaagtaccaggtggcatagag

SEQ ID NO: 441407 - DNA, 25 bp, Homo sapien
caagcagcatttgagtacagaagta

SEQ ID NO: 441408 - DNA, 25 bp, Homo sapien
tgaatccccttggatccaccacaga

SEQ ID NO: 441409 - DNA, 25 bp, Homo sapien
tacaagccgaatatttgagggacat

SEQ ID NO: 441410 - DNA, 25 bp, Homo sapien
gcttgatgagtttccagacacttgg

SEQ ID NO: 441411 - DNA, 25 bp, Homo sapien
tccttgagtgaacgttgccacacct

SEQ ID NO: 441412 - DNA, 25 bp, Homo sapien
caccaacaggaaattcgaatatacc

SEQ ID NO: 441413 - DNA, 25 bp, Homo sapien
acatcaaagcattgtttgaggcagc

SEQ ID NO: 441414 - DNA, 25 bp, Homo sapien
tatacctgtattgtgcccaaagatg

SEQ ID NO: 441415 - DNA, 25 bp, Homo sapien
taatctcttcgctgagccatttggc

SEQ ID NO: 441416 - DNA, 25 bp, Homo sapien
gtaatgttagatgacctggcagcca

SEQ ID NO: 441417 - DNA, 25 bp, Homo sapien
ctggcagccatctagagtaacataa

SEQ ID NO: 441418 - DNA, 25 bp, Homo sapien
cattatgagctcactaatcactggt

SEQ ID NO: 441419 - DNA, 25 bp, Homo sapien
cctttcacccctgggcatactggaa

SEQ ID NO: 441420 - DNA, 25 bp, Homo sapien
tatcatttgggacttcacacagtga

SEQ ID NO: 441421 - DNA, 25 bp, Homo sapien
tctaactcacaaagagtttagaatc

SEQ ID NO: 441422 - DNA, 25 bp, Homo sapien
taaatagttctaactcacaaagagt

SEQ ID NO: 441423 - DNA, 25 bp, Homo sapien
gatatcatatacaacactgattaat

SEQ ID NO: 441424 - DNA, 25 bp, Homo sapien
caaaacacgcggagatgagtaggga

SEQ ID NO: 441425 - DNA, 25 bp, Homo sapien
gaccttgagacttgctttgggcgaa

SEQ ID NO: 441426 - DNA, 25 bp, Homo sapien
taagggagagctgaacaaaacacgc

SEQ ID NO: 441427 - DNA, 25 bp, Homo sapien
cctcgaaacatgtgagagaccccag

SEQ ID NO: 441428 - DNA, 25 bp, Homo sapien
actgcttcagttacatgaggtgagc

SEQ ID NO: 441429 - DNA, 25 bp, Homo sapien
tgctctgctagacgttttgtccaat

SEQ ID NO: 441430 - DNA, 25 bp, Homo sapien
gctgctgcttgtggctcgagtccat

SEQ ID NO: 441431 - DNA, 25 bp, Homo sapien
caggctactgcttcagttacatgag

SEQ ID NO: 441432 - DNA, 25 bp, Homo sapien
tttgtaacttcaccctagcctctga

SEQ ID NO: 441433 - DNA, 25 bp, Homo sapien
tgtaacttcaccctagcctctgatt

SEQ ID NO: 441434 - DNA, 25 bp, Homo sapien
ttgtaacttcaccctagcctctgat

SEQ ID NO: 441435 - DNA, 25 bp, Homo sapien
ctttgtaacttcaccctagcctctg

SEQ ID NO: 441436 - DNA, 25 bp, Homo sapien
gtgaagatctaacatggaagcccat

SEQ ID NO: 441437 - DNA, 25 bp, Homo sapien
catttctcaaggagttggcccttag

SEQ ID NO: 441438 - DNA, 25 bp, Homo sapien
ccttagtgaagagcgatggctgtgc

SEQ ID NO: 441439 - DNA, 25 bp, Homo sapien
tgggctctgctgacatatgtgccag

SEQ ID NO: 441440 - DNA, 25 bp, Homo sapien
caataagcaaaaccagtgcgcgtgg

SEQ ID NO: 441441 - DNA, 25 bp, Homo sapien
taagcaaaaccagtgcgcgtggtcg

SEQ ID NO: 441442 - DNA, 25 bp, Homo sapien
agcaaaaccagtgcgcgtggtcggt

SEQ ID NO: 441443 - DNA, 25 bp, Homo sapien
aataagcaaaaccagtgcgcgtggt

SEQ ID NO: 441444 - DNA, 25 bp, Homo sapien
gaaacagacaactaggcaggttcaa

SEQ ID NO: 441445 - DNA, 25 bp, Homo sapien
gacaactaggcaggttcaagttaat

SEQ ID NO: 441446 - DNA, 25 bp, Homo sapien
ctaggcaggttcaagttaatttatc

SEQ ID NO: 441447 - DNA, 25 bp, Homo sapien
ggcaggttcaagttaatttatctgt

SEQ ID NO: 441448 - DNA, 25 bp, Homo sapien
cacactgaattctgactaacacagg

SEQ ID NO: 441449 - DNA, 25 bp, Homo sapien
gcttactgcggctaaaatgaatcca

SEQ ID NO: 441450 - DNA, 25 bp, Homo sapien
ggcaccattgtctctacctggaata

SEQ ID NO: 441451 - DNA, 25 bp, Homo sapien
aatgaatccatgttcgaattctggc

SEQ ID NO: 441452 - DNA, 25 bp, Homo sapien
gatctatctgtagattcacacccag

SEQ ID NO: 441453 - DNA, 25 bp, Homo sapien
tccttcatgggcttatcttctagtt

SEQ ID NO: 441454 - DNA, 25 bp, Homo sapien
aataacccctggctttactccagca

SEQ ID NO: 441455 - DNA, 25 bp, Homo sapien
tcacacccagtcacagtgtaaataa

SEQ ID NO: 441456 - DNA, 25 bp, Homo sapien
gagatgttcccaatcagacttaata

SEQ ID NO: 441457 - DNA, 25 bp, Homo sapien
tgtgtacacatacagaaacccagag

SEQ ID NO: 441458 - DNA, 25 bp, Homo sapien
gcagactaatacagcattcaagccc

SEQ ID NO: 441459 - DNA, 25 bp, Homo sapien
cataaaaactcagaccccagcgtaa

SEQ ID NO: 441460 - DNA, 25 bp, Homo sapien
ccttaggagtagcaataaagcagtg

SEQ ID NO: 441461 - DNA, 25 bp, Homo sapien
tgttggacacatataggcattcaat

SEQ ID NO: 441462 - DNA, 25 bp, Homo sapien
cagagaccaatctgacttatgtgaa

SEQ ID NO: 441463 - DNA, 25 bp, Homo sapien
gataacaccattaaggacagagacc

SEQ ID NO: 441464 - DNA, 25 bp, Homo sapien
gggctttcacctaattaagtcaggc

SEQ ID NO: 441465 - DNA, 25 bp, Homo sapien
gcatggacaccaacggatgggattc

SEQ ID NO: 441466 - DNA, 25 bp, Homo sapien
gctgcttgcagttccggaggctgtc

SEQ ID NO: 441467 - DNA, 25 bp, Homo sapien
cctttgtcatattctaccgggtaga

SEQ ID NO: 441468 - DNA, 25 bp, Homo sapien
tcccagagccccagtaaaagtggta

SEQ ID NO: 441469 - DNA, 25 bp, Homo sapien
tctggtgcacatttttgatagccat

SEQ ID NO: 441470 - DNA, 25 bp, Homo sapien
tttgccactctggtgcacatttttg

SEQ ID NO: 441471 - DNA, 25 bp, Homo sapien
cccagagccccagtaaaagtggtat

SEQ ID NO: 441472 - DNA, 25 bp, Homo sapien
cagagtgggtgccttgcatcgtctt

SEQ ID NO: 441473 - DNA, 25 bp, Homo sapien
caaagtcaacaaccaaagagcaaag

SEQ ID NO: 441474 - DNA, 25 bp, Homo sapien
catgtgcaaggccagtcatgctcca

SEQ ID NO: 441475 - DNA, 25 bp, Homo sapien
aggccagtcatgctccatctcatca

SEQ ID NO: 441476 - DNA, 25 bp, Homo sapien
acgagagcacgtcgctgactctcct

SEQ ID NO: 441477 - DNA, 25 bp, Homo sapien
cgagagcacgtcgctgactctcctt

SEQ ID NO: 441478 - DNA, 25 bp, Homo sapien
tacgagagcacgtcgctgactctcc

SEQ ID NO: 441479 - DNA, 25 bp, Homo sapien
ttacgagagcacgtcgctgactctc

SEQ ID NO: 441480 - DNA, 25 bp, Homo sapien
gagagagtggtcttctaagatgacc

SEQ ID NO: 441481 - DNA, 25 bp, Homo sapien
tggagagagtggtcttctaagatga

SEQ ID NO: 441482 - DNA, 25 bp, Homo sapien
ggagagagtggtcttctaagatgac

SEQ ID NO: 441483 - DNA, 25 bp, Homo sapien
tgtaaagccctagggatacacaggt

SEQ ID NO: 441484 - DNA, 25 bp, Homo sapien
ggcaatttgcactccatcgactgtt

SEQ ID NO: 441485 - DNA, 25 bp, Homo sapien
tattttagccactgaccctgaatgc

SEQ ID NO: 441486 - DNA, 25 bp, Homo sapien
taaatgcttcggtgtgctaatgccc

SEQ ID NO: 441487 - DNA, 25 bp, Homo sapien
cagtggcgccctaacacagcaatta

SEQ ID NO: 441488 - DNA, 25 bp, Homo sapien
aatgtgctgagtatctacgaaaagc

SEQ ID NO: 441489 - DNA, 25 bp, Homo sapien
gaaaggattttcacaatcttgggca

SEQ ID NO: 441490 - DNA, 25 bp, Homo sapien
gcaattttgccatacaaaggctctg

SEQ ID NO: 441491 - DNA, 25 bp, Homo sapien
tgagttaatgcttcaatttggcccc

SEQ ID NO: 441492 - DNA, 25 bp, Homo sapien
gggcttgacttatccatcatctggc

SEQ ID NO: 441493 - DNA, 25 bp, Homo sapien
tggcttaaagagaacacggctattc

SEQ ID NO: 441494 - DNA, 25 bp, Homo sapien
ttaagtggtcaccagaaccccagtg

SEQ ID NO: 441495 - DNA, 25 bp, Homo sapien
tagcatgatgctaggcacaaaatag

SEQ ID NO: 441496 - DNA, 25 bp, Homo sapien
gcggttgtcaccataatccttagca

SEQ ID NO: 441497 - DNA, 25 bp, Homo sapien
cctttacttgagtttcagccagtga

SEQ ID NO: 441498 - DNA, 25 bp, Homo sapien
gtgccatgaaactaaccttttgcgg

SEQ ID NO: 441499 - DNA, 25 bp, Homo sapien
ccctcctcattggtgacacagaaca

SEQ ID NO: 441500 - DNA, 25 bp, Homo sapien
tatggcaatcatcaacagttacaga

SEQ ID NO: 441501 - DNA, 25 bp, Homo sapien
aatctggctacactaggcaaactag

SEQ ID NO: 441502 - DNA, 25 bp, Homo sapien
tacctggaggacttgacaggaaacc

SEQ ID NO: 441503 - DNA, 25 bp, Homo sapien
ttgacaaatatgacctaccacagga

SEQ ID NO: 441504 - DNA, 25 bp, Homo sapien
catctgcactctggctgaccttagg

SEQ ID NO: 441505 - DNA, 25 bp, Homo sapien
tcattgttcaaagcaaagcacgtgc

SEQ ID NO: 441506 - DNA, 25 bp, Homo sapien
gattcagatgtagaagactccagag

SEQ ID NO: 441507 - DNA, 25 bp, Homo sapien
tctgcaatttctctgatgtccatta

SEQ ID NO: 441508 - DNA, 25 bp, Homo sapien
gccttgtattccagatctgcaattt

SEQ ID NO: 441509 - DNA, 25 bp, Homo sapien
tttattgccttgtattccagatctg

SEQ ID NO: 441510 - DNA, 25 bp, Homo sapien
tctctgatgtccattaaatcctgct

SEQ ID NO: 441511 - DNA, 25 bp, Homo sapien
catgaagcagctctctctggcttac

SEQ ID NO: 441512 - DNA, 25 bp, Homo sapien
caccatgaagcagctctctctggct

SEQ ID NO: 441513 - DNA, 25 bp, Homo sapien
accatgaagcagctctctctggctt

SEQ ID NO: 441514 - DNA, 25 bp, Homo sapien
ccatgaagcagctctctctggctta

SEQ ID NO: 441515 - DNA, 25 bp, Homo sapien
tacaagaattgatgctcggatgcgc

SEQ ID NO: 441516 - DNA, 25 bp, Homo sapien
tcggatgcgctctcctgtggaatgt

SEQ ID NO: 441517 - DNA, 25 bp, Homo sapien
tcatttcccagttgtcttacaagaa

SEQ ID NO: 441518 - DNA, 25 bp, Homo sapien
catgttgaagcacggaactatttcc

SEQ ID NO: 441519 - DNA, 25 bp, Homo sapien
tgatatctcatagcaactggcaggg

SEQ ID NO: 441520 - DNA, 25 bp, Homo sapien
catttctgtgctgaagagacaaccc

SEQ ID NO: 441521 - DNA, 25 bp, Homo sapien
tcatacaggtggtaacgtgcgactg

SEQ ID NO: 441522 - DNA, 25 bp, Homo sapien
gagacaacccagagcgagagaaaat

SEQ ID NO: 441523 - DNA, 25 bp, Homo sapien
tgcacagccgtaacaaagggcacat

SEQ ID NO: 441524 - DNA, 25 bp, Homo sapien
tgtgttgtacttagctgcacagccg

SEQ ID NO: 441525 - DNA, 25 bp, Homo sapien
gggcacataggaaatctttgatgga

SEQ ID NO: 441526 - DNA, 25 bp, Homo sapien
cactctaagaactgtaaagcctgga

SEQ ID NO: 441527 - DNA, 25 bp, Homo sapien
gaggatgatgagcatctacagcaat

SEQ ID NO: 441528 - DNA, 25 bp, Homo sapien
ccacgaatcatgctctatggccaac

SEQ ID NO: 441529 - DNA, 25 bp, Homo sapien
gcaatctcatcctcaactgccgatt

SEQ ID NO: 441530 - DNA, 25 bp, Homo sapien
caactgccgattccattgaggacca

SEQ ID NO: 441531 - DNA, 25 bp, Homo sapien
agaataaccgggcatggcagcgcct

SEQ ID NO: 441532 - DNA, 25 bp, Homo sapien
tgactgccaatgctctaaaccatga

SEQ ID NO: 441533 - DNA, 25 bp, Homo sapien
gtaacaggctgtcaaagaagtaaat

SEQ ID NO: 441534 - DNA, 25 bp, Homo sapien
tccaattttagggagtgactgccaa

SEQ ID NO: 441535 - DNA, 25 bp, Homo sapien
tgctgatataaggaaactgtaggct

SEQ ID NO: 441536 - DNA, 25 bp, Homo sapien
cttgagcccttctcagggaaaatct

SEQ ID NO: 441537 - DNA, 25 bp, Homo sapien
gtgtctacacctgtcaagatggata

SEQ ID NO: 441538 - DNA, 25 bp, Homo sapien
tgtccatcaccgcaaaagctccatt

SEQ ID NO: 441539 - DNA, 25 bp, Homo sapien
tagtgccccaaacataagctgtctc

SEQ ID NO: 441540 - DNA, 25 bp, Homo sapien
tactcaacagagctgccaaagtcct

SEQ ID NO: 441541 - DNA, 25 bp, Homo sapien
gacacactttgagtcatacgacgct

SEQ ID NO: 441542 - DNA, 25 bp, Homo sapien
aattggccttcctaccactggtctg

SEQ ID NO: 441543 - DNA, 25 bp, Homo sapien
gcaagtgtatatgaccatgcaatca

SEQ ID NO: 441544 - DNA, 25 bp, Homo sapien
ttaacgtagaacagcaacaggtgat

SEQ ID NO: 441545 - DNA, 25 bp, Homo sapien
tgcaaaagtacacgtcccagtaatt

SEQ ID NO: 441546 - DNA, 25 bp, Homo sapien
acatatggatcaatgcaatttggca

SEQ ID NO: 441547 - DNA, 25 bp, Homo sapien
tctattttgttagcttgtggttagc

SEQ ID NO: 441548 - DNA, 25 bp, Homo sapien
ccaaatggtgtcaagtggtatctca

SEQ ID NO: 441549 - DNA, 25 bp, Homo sapien
tcctgagggattactgatgttatgc

SEQ ID NO: 441550 - DNA, 25 bp, Homo sapien
tgttgtatggactctgaagtctcta

SEQ ID NO: 441551 - DNA, 25 bp, Homo sapien
taaagtcttagttagtagatccaat

SEQ ID NO: 441552 - DNA, 25 bp, Homo sapien
caggctctggtaatcacccgttttg

SEQ ID NO: 441553 - DNA, 25 bp, Homo sapien
ttattatgtggtaactccagaaacc

SEQ ID NO: 441554 - DNA, 25 bp, Homo sapien
ttgtgtacagttgagtgacattaac

SEQ ID NO: 441555 - DNA, 25 bp, Homo sapien
tgcaactctcttgctaatttcaaga

SEQ ID NO: 441556 - DNA, 25 bp, Homo sapien
tgagagttttacaaccattatgtct

SEQ ID NO: 441557 - DNA, 25 bp, Homo sapien
acaatttctcttagtgtggctgtct

SEQ ID NO: 441558 - DNA, 25 bp, Homo sapien
ggagttcatcaagcttcctgaatgt

SEQ ID NO: 441559 - DNA, 25 bp, Homo sapien
actgatcagcaatgaagtttcgact

SEQ ID NO: 441560 - DNA, 25 bp, Homo sapien
actactgatcagcaatgaagtttcg

SEQ ID NO: 441561 - DNA, 25 bp, Homo sapien
cactactgatcagcaatgaagtttc

SEQ ID NO: 441562 - DNA, 25 bp, Homo sapien
tactgatcagcaatgaagtttcgac

SEQ ID NO: 441563 - DNA, 25 bp, Homo sapien
tcaggaggacagactaaactaccac

SEQ ID NO: 441564 - DNA, 25 bp, Homo sapien
aaatcaggttaagtgcttcaggagg

SEQ ID NO: 441565 - DNA, 25 bp, Homo sapien
cagtccccaaactcctaaatagtgt

SEQ ID NO: 441566 - DNA, 25 bp, Homo sapien
gaatggctttcacagcatagcacag

SEQ ID NO: 441567 - DNA, 25 bp, Homo sapien
ggcttgtttacaaaggtggaggctc

SEQ ID NO: 441568 - DNA, 25 bp, Homo sapien
gcacagacccagttataatgagaat

SEQ ID NO: 441569 - DNA, 25 bp, Homo sapien
agctcacacgcacagacccagttat

SEQ ID NO: 441570 - DNA, 25 bp, Homo sapien
taggcttgtttacaaaggtggaggc

SEQ ID NO: 441571 - DNA, 25 bp, Homo sapien
gagaaagagtctcaccatgtgggcc

SEQ ID NO: 441572 - DNA, 25 bp, Homo sapien
agaaagagtctcaccatgtgggcca

SEQ ID NO: 441573 - DNA, 25 bp, Homo sapien
gtagagaaagagtctcaccatgtgg

SEQ ID NO: 441574 - DNA, 25 bp, Homo sapien
taaggccaaataatattacattgta

SEQ ID NO: 441575 - DNA, 25 bp, Homo sapien
gctcagattttagaattaataccat

SEQ ID NO: 441576 - DNA, 25 bp, Homo sapien
tgagggccccagctttagtagctca

SEQ ID NO: 441577 - DNA, 25 bp, Homo sapien
cagctttagtagctcagattttaga

SEQ ID NO: 441578 - DNA, 25 bp, Homo sapien
gccccagctttagtagctcagattt

SEQ ID NO: 441579 - DNA, 25 bp, Homo sapien
caagtgtcctttcccaagattgtgt

SEQ ID NO: 441580 - DNA, 25 bp, Homo sapien
ttcccaagattgtgttctagttttg

SEQ ID NO: 441581 - DNA, 25 bp, Homo sapien
agtgtcctttcccaagattgtgttc

SEQ ID NO: 441582 - DNA, 25 bp, Homo sapien
gtcctttcccaagattgtgttctag

SEQ ID NO: 441583 - DNA, 25 bp, Homo sapien
atgatgtcggacacccctcacaaga

SEQ ID NO: 441584 - DNA, 25 bp, Homo sapien
tgtcttgtccgatatgtgtttgtag

SEQ ID NO: 441585 - DNA, 25 bp, Homo sapien
gcccaatgtgggttgtcttgtccga

SEQ ID NO: 441586 - DNA, 25 bp, Homo sapien
cctcacaagacactggcccaatgtg

SEQ ID NO: 441587 - DNA, 25 bp, Homo sapien
aagaaccagagacatgtcagcatga

SEQ ID NO: 441588 - DNA, 25 bp, Homo sapien
gaaggggtctatgaagctggaaaag

SEQ ID NO: 441589 - DNA, 25 bp, Homo sapien
aggactcagcctaatcttgctgcct

SEQ ID NO: 441590 - DNA, 25 bp, Homo sapien
aaccagagacatgtcagcatgagaa

SEQ ID NO: 441591 - DNA, 25 bp, Homo sapien
ctaagagataaaagggtgatgatgg

SEQ ID NO: 441592 - DNA, 25 bp, Homo sapien
agacctaagagataaaagggtgatg

SEQ ID NO: 441593 - DNA, 25 bp, Homo sapien
tcaagacctaagagataaaagggtg

SEQ ID NO: 441594 - DNA, 25 bp, Homo sapien
taagagataaaagggtgatgatggt

SEQ ID NO: 441595 - DNA, 25 bp, Homo sapien
atttgtgtgcacatttaggaatata

SEQ ID NO: 441596 - DNA, 25 bp, Homo sapien
tttgagatttgtcgatcagtatgta

SEQ ID NO: 441597 - DNA, 25 bp, Homo sapien
gagatttgtcgatcagtatgtatat

SEQ ID NO: 441598 - DNA, 25 bp, Homo sapien
tttgtgtgcacatttaggaatatat

SEQ ID NO: 441599 - DNA, 25 bp, Homo sapien
cacgaaggcgatcatccagataata

SEQ ID NO: 441600 - DNA, 25 bp, Homo sapien
aaaaacgagctggtagaggactgcc

SEQ ID NO: 441601 - DNA, 25 bp, Homo sapien
tcatatcccgcagtggcattaccat

SEQ ID NO: 441602 - DNA, 25 bp, Homo sapien
taaagcggtttgaagctgtcaggct

SEQ ID NO: 441603 - DNA, 25 bp, Homo sapien
tcctcagttgttttcagactttcag

SEQ ID NO: 441604 - DNA, 25 bp, Homo sapien
cagactttcagagaatacacaaaga

SEQ ID NO: 441605 - DNA, 25 bp, Homo sapien
actttcagagaatacacaaagaggg

SEQ ID NO: 441606 - DNA, 25 bp, Homo sapien
gtcctcagttgttttcagactttca

SEQ ID NO: 441607 - DNA, 25 bp, Homo sapien
aaacttgtaattataaatcacacgt

SEQ ID NO: 441608 - DNA, 25 bp, Homo sapien
tttacttccacagtctttagtggga

SEQ ID NO: 441609 - DNA, 25 bp, Homo sapien
tgtaattataaatcacacgttttaa

SEQ ID NO: 441610 - DNA, 25 bp, Homo sapien
tacttccacagtctttagtgggaaa

SEQ ID NO: 441611 - DNA, 25 bp, Homo sapien
ggtcaggcccatacaccactgtgat

SEQ ID NO: 441612 - DNA, 25 bp, Homo sapien
tgtgatcatgcgctgctccaggcgc

SEQ ID NO: 441613 - DNA, 25 bp, Homo sapien
tcaaatgggagatgttcacgaggtc

SEQ ID NO: 441614 - DNA, 25 bp, Homo sapien
tggaaagccacgagattcaaatggg

SEQ ID NO: 441615 - DNA, 25 bp, Homo sapien
ctttagcaatttccatccaccatac

SEQ ID NO: 441616 - DNA, 25 bp, Homo sapien
gctttagcaatttccatccaccata

SEQ ID NO: 441617 - DNA, 25 bp, Homo sapien
gtttttatcttgttccgcattcata

SEQ ID NO: 441618 - DNA, 25 bp, Homo sapien
tgctaggccatatattagaatatat

SEQ ID NO: 441619 - DNA, 25 bp, Homo sapien
cttgttccgcattcataattatgac

SEQ ID NO: 441620 - DNA, 25 bp, Homo sapien
catgagtatgaaattgcaactataa

SEQ ID NO: 441621 - DNA, 25 bp, Homo sapien
tgggccagcaggtttgttgccaaac

SEQ ID NO: 441622 - DNA, 25 bp, Homo sapien
ttgttgccaaactgaaaacctcatt

SEQ ID NO: 441623 - DNA, 25 bp, Homo sapien
ttttgggccagcaggtttgttgcca

SEQ ID NO: 441624 - DNA, 25 bp, Homo sapien
tgttgccaaactgaaaacctcattt

SEQ ID NO: 441625 - DNA, 25 bp, Homo sapien
tttccagaaatgcatccctggacat

SEQ ID NO: 441626 - DNA, 25 bp, Homo sapien
tttttccagaaatgcatccctggac

SEQ ID NO: 441627 - DNA, 25 bp, Homo sapien
ttttccagaaatgcatccctggaca

SEQ ID NO: 441628 - DNA, 25 bp, Homo sapien
gctttttccagaaatgcatccctgg

SEQ ID NO: 441629 - DNA, 25 bp, Homo sapien
ttttgagaggaatacgcccttctgg

SEQ ID NO: 441630 - DNA, 25 bp, Homo sapien
ccttctggagtgacttgcagcttaa

SEQ ID NO: 441631 - DNA, 25 bp, Homo sapien
gaggaatacgcccttctggagtgac

SEQ ID NO: 441632 - DNA, 25 bp, Homo sapien
tacgcccttctggagtgacttgcag

SEQ ID NO: 441633 - DNA, 25 bp, Homo sapien
tggaagactacaagcctctaaagca

SEQ ID NO: 441634 - DNA, 25 bp, Homo sapien
gatggaagactacaagcctctaaag

SEQ ID NO: 441635 - DNA, 25 bp, Homo sapien
tcgcttccgatctgctgaaaacaag

SEQ ID NO: 441636 - DNA, 25 bp, Homo sapien
aagcagtttcaactcgcttccgatc

SEQ ID NO: 441637 - DNA, 25 bp, Homo sapien
ggaggggctgaacattcaaactata

SEQ ID NO: 441638 - DNA, 25 bp, Homo sapien
aactatagcataacacacatgctca

SEQ ID NO: 441639 - DNA, 25 bp, Homo sapien
actatagcataacacacatgctcac

SEQ ID NO: 441640 - DNA, 25 bp, Homo sapien
ccaaagtagggcttagcctgcgagg

SEQ ID NO: 441641 - DNA, 25 bp, Homo sapien
taaacataacggcttcacactgatc

SEQ ID NO: 441642 - DNA, 25 bp, Homo sapien
tttaccaccgtatgagcaaagtagg

SEQ ID NO: 441643 - DNA, 25 bp, Homo sapien
gaattcaaggacgagccagtggtag

SEQ ID NO: 441644 - DNA, 25 bp, Homo sapien
tctgctcacttttcgcagcctcatt

SEQ ID NO: 441645 - DNA, 25 bp, Homo sapien
acagctctgctcacttttcgcagcc

SEQ ID NO: 441646 - DNA, 25 bp, Homo sapien
gctcacttttcgcagcctcattagc

SEQ ID NO: 441647 - DNA, 25 bp, Homo sapien
tttcgcagcctcattagctttttcc

SEQ ID NO: 441648 - DNA, 25 bp, Homo sapien
tgttgaagtcggggacaggacctta

SEQ ID NO: 441649 - DNA, 25 bp, Homo sapien
aatatttgttgaagtcggggacagg

SEQ ID NO: 441650 - DNA, 25 bp, Homo sapien
gaaatatttgttgaagtcggggaca

SEQ ID NO: 441651 - DNA, 25 bp, Homo sapien
tatttgttgaagtcggggacaggac

SEQ ID NO: 441652 - DNA, 25 bp, Homo sapien
gactctattgtccttgaaaccttga

SEQ ID NO: 441653 - DNA, 25 bp, Homo sapien
tccagcctcagggatttgcgagcat

SEQ ID NO: 441654 - DNA, 25 bp, Homo sapien
gcttattggctagtttccccagaag

SEQ ID NO: 441655 - DNA, 25 bp, Homo sapien
gatacatcatagtcagttcacagaa

SEQ ID NO: 441656 - DNA, 25 bp, Homo sapien
tcttcttcgttaaaatgcaactccg

SEQ ID NO: 441657 - DNA, 25 bp, Homo sapien
tgcaactccgtatgccagtgctgtg

SEQ ID NO: 441658 - DNA, 25 bp, Homo sapien
cagtgctgtggcaagactattatac

SEQ ID NO: 441659 - DNA, 25 bp, Homo sapien
tctctttgtattacatgtgtgccca

SEQ ID NO: 441660 - DNA, 25 bp, Homo sapien
aggcaacatactaataagttacaca

SEQ ID NO: 441661 - DNA, 25 bp, Homo sapien
aacatactaataagttacacacaga

SEQ ID NO: 441662 - DNA, 25 bp, Homo sapien
gaaaggcaacatactaataagttac

SEQ ID NO: 441663 - DNA, 25 bp, Homo sapien
catactaataagttacacacagaag

SEQ ID NO: 441664 - DNA, 25 bp, Homo sapien
tggagaaatggatagcgagcacgca

SEQ ID NO: 441665 - DNA, 25 bp, Homo sapien
taatctgcagatgtacacgagctag

SEQ ID NO: 441666 - DNA, 25 bp, Homo sapien
tgcaagaacatgctcaatggcactg

SEQ ID NO: 441667 - DNA, 25 bp, Homo sapien
tctctttagccggagagtgctcact

SEQ ID NO: 441668 - DNA, 25 bp, Homo sapien
gcaagtcattgatataaaaggccac

SEQ ID NO: 441669 - DNA, 25 bp, Homo sapien
tcaagcctttgttaacaggaaagac

SEQ ID NO: 441670 - DNA, 25 bp, Homo sapien
gttttcataagtaggacagcaccag

SEQ ID NO: 441671 - DNA, 25 bp, Homo sapien
tgggctgccatggaaaccggaagca

SEQ ID NO: 441672 - DNA, 25 bp, Homo sapien
taagaattgtctcctgctaaaggga

SEQ ID NO: 441673 - DNA, 25 bp, Homo sapien
aaccgtagcgttcatttggacactg

SEQ ID NO: 441674 - DNA, 25 bp, Homo sapien
tcttctaggaggtcagggtaaacat

SEQ ID NO: 441675 - DNA, 25 bp, Homo sapien
cacacctatgaggtcaaccgtagcg

SEQ ID NO: 441676 - DNA, 25 bp, Homo sapien
aaagatgttatcaatttcaggtcga

SEQ ID NO: 441677 - DNA, 25 bp, Homo sapien
caatttcaggtcgagggcaaaggtt

SEQ ID NO: 441678 - DNA, 25 bp, Homo sapien
gaaatcttcttgaggtattgaatca

SEQ ID NO: 441679 - DNA, 25 bp, Homo sapien
ctctgtacacttctggagtgaaatc

SEQ ID NO: 441680 - DNA, 25 bp, Homo sapien
tcatctgatcaacggtaagatatgg

SEQ ID NO: 441681 - DNA, 25 bp, Homo sapien
cgctgcttaaggttgataaaatcca

SEQ ID NO: 441682 - DNA, 25 bp, Homo sapien
ttcattaagccgaggatctcgctgc

SEQ ID NO: 441683 - DNA, 25 bp, Homo sapien
gtaagatatggtttgctttttgcac

SEQ ID NO: 441684 - DNA, 25 bp, Homo sapien
tacttggacttgctcttgttttaga

SEQ ID NO: 441685 - DNA, 25 bp, Homo sapien
tgggttcatacttctcaatcaatac

SEQ ID NO: 441686 - DNA, 25 bp, Homo sapien
cttttctggcgaggctgttgttggg

SEQ ID NO: 441687 - DNA, 25 bp, Homo sapien
caatcaatacttggacttgctcttg

SEQ ID NO: 441688 - DNA, 25 bp, Homo sapien
ggaccagttccagattaaacacaat

SEQ ID NO: 441689 - DNA, 25 bp, Homo sapien
tttcctccctatggaatatctaggc

SEQ ID NO: 441690 - DNA, 25 bp, Homo sapien
cattttcaatttagaggaccagttc

SEQ ID NO: 441691 - DNA, 25 bp, Homo sapien
ttgatgaccataagcttgctagagc

SEQ ID NO: 441692 - DNA, 25 bp, Homo sapien
catgagcaggtgcatcttctaggtg

SEQ ID NO: 441693 - DNA, 25 bp, Homo sapien
cttcactttatttacatctcttcca

SEQ ID NO: 441694 - DNA, 25 bp, Homo sapien
cactttatttacatctcttccatag

SEQ ID NO: 441695 - DNA, 25 bp, Homo sapien
ggccttcactttatttacatctctt

SEQ ID NO: 441696 - DNA, 25 bp, Homo sapien
gccttcactttatttacatctcttc

SEQ ID NO: 441697 - DNA, 25 bp, Homo sapien
gttccttgatcaaattggacattgg

SEQ ID NO: 441698 - DNA, 25 bp, Homo sapien
ttgatcaaattggacattggcgttg

SEQ ID NO: 441699 - DNA, 25 bp, Homo sapien
gacattggcgttgtatgagcaagga

SEQ ID NO: 441700 - DNA, 25 bp, Homo sapien
acattggcgttgtatgagcaaggac

SEQ ID NO: 441701 - DNA, 25 bp, Homo sapien
ctgaccgtaatgcaagggaggaaaa

SEQ ID NO: 441702 - DNA, 25 bp, Homo sapien
ttatgagaggagaccctccacagtg

SEQ ID NO: 441703 - DNA, 25 bp, Homo sapien
accgtaatgcaagggaggaaaaatg

SEQ ID NO: 441704 - DNA, 25 bp, Homo sapien
ccacagtggttcctgaccgtaatgc

SEQ ID NO: 441705 - DNA, 25 bp, Homo sapien
gaggacattctcataccgaggcttc

SEQ ID NO: 441706 - DNA, 25 bp, Homo sapien
gagaaaccgcagacaagcctgatgt

SEQ ID NO: 441707 - DNA, 25 bp, Homo sapien
gcctgatgtcctgaagagagaagct

SEQ ID NO: 441708 - DNA, 25 bp, Homo sapien
gaaagttgctgctggtattcccaag

SEQ ID NO: 441709 - DNA, 25 bp, Homo sapien
tatgttgatacttgattcaatcgcc

SEQ ID NO: 441710 - DNA, 25 bp, Homo sapien
acttgattcaatcgccaggaaatta

SEQ ID NO: 441711 - DNA, 25 bp, Homo sapien
gccaggaaattatgtccagatttgt

SEQ ID NO: 441712 - DNA, 25 bp, Homo sapien
tcagatatgttgatacttgattcaa

SEQ ID NO: 441713 - DNA, 25 bp, Homo sapien
tggtgacttgtccaactcccgtcat

SEQ ID NO: 441714 - DNA, 25 bp, Homo sapien
ctggctgggacttatcatgggattc

SEQ ID NO: 441715 - DNA, 25 bp, Homo sapien
gagctcccaggtacttattaggtgg

SEQ ID NO: 441716 - DNA, 25 bp, Homo sapien
ggtcttctgctttgcctggctggga

SEQ ID NO: 441717 - DNA, 25 bp, Homo sapien
gcaccatatggatgatctgtcaggt

SEQ ID NO: 441718 - DNA, 25 bp, Homo sapien
tgtgtcatcctcacactctctgttt

SEQ ID NO: 441719 - DNA, 25 bp, Homo sapien
caaagtgttggcatcgcaggcggga

SEQ ID NO: 441720 - DNA, 25 bp, Homo sapien
cgcccggcctgtagcctgctttcat

SEQ ID NO: 441721 - DNA, 25 bp, Homo sapien
ggcctgtagcctgctttcatctggg

SEQ ID NO: 441722 - DNA, 25 bp, Homo sapien
ttctgctgcccaagtctggttgaag

SEQ ID NO: 441723 - DNA, 25 bp, Homo sapien
gaaaaatcagtcagcgttgattgcc

SEQ ID NO: 441724 - DNA, 25 bp, Homo sapien
tcagtcagcgttgattgccgatggg

SEQ ID NO: 441725 - DNA, 25 bp, Homo sapien
gcccaagtctggttgaagatgaaga

SEQ ID NO: 441726 - DNA, 25 bp, Homo sapien
cagctctgctccagtttcctttcta

SEQ ID NO: 441727 - DNA, 25 bp, Homo sapien
gaaagaagcaattcattttgatcca

SEQ ID NO: 441728 - DNA, 25 bp, Homo sapien
gactcttctgaaagaagcaattcat

SEQ ID NO: 441729 - DNA, 25 bp, Homo sapien
gaagcaattcattttgatccagctc

SEQ ID NO: 441730 - DNA, 25 bp, Homo sapien
tgaaacgactccgttttcttctcca

SEQ ID NO: 441731 - DNA, 25 bp, Homo sapien
ggtgttgtgcgaggaattaatgaaa

SEQ ID NO: 441732 - DNA, 25 bp, Homo sapien
gaaaggggctgagacatgtcttcat

SEQ ID NO: 441733 - DNA, 25 bp, Homo sapien
tctcaggtgaaacgactccgttttc

SEQ ID NO: 441734 - DNA, 25 bp, Homo sapien
tctcagaggcacttcgcaggaaatg

SEQ ID NO: 441735 - DNA, 25 bp, Homo sapien
gaggctttagtggtggaaccccaga

SEQ ID NO: 441736 - DNA, 25 bp, Homo sapien
cagccgtggttgcattttagaagac

SEQ ID NO: 441737 - DNA, 25 bp, Homo sapien
gaacttcggagctgtcatgtagatg

SEQ ID NO: 441738 - DNA, 25 bp, Homo sapien
ggttgcccaagtttccaatgctagg

SEQ ID NO: 441739 - DNA, 25 bp, Homo sapien
ccatgtgccaattacaggtttttgg

SEQ ID NO: 441740 - DNA, 25 bp, Homo sapien
aatggcacagagttcggttgcccaa

SEQ ID NO: 441741 - DNA, 25 bp, Homo sapien
caaaaaatctctgtggcataactat

SEQ ID NO: 441742 - DNA, 25 bp, Homo sapien
ctcttctgcagtccgtcccttccag

SEQ ID NO: 441743 - DNA, 25 bp, Homo sapien
ggagcacttggcgatacatctcaac

SEQ ID NO: 441744 - DNA, 25 bp, Homo sapien
gctccacacagcgacaaccagacag

SEQ ID NO: 441745 - DNA, 25 bp, Homo sapien
tcaacagaggagtttccagccagtt

SEQ ID NO: 441746 - DNA, 25 bp, Homo sapien
ttctcaaacgaaaggagaattggaa

SEQ ID NO: 441747 - DNA, 25 bp, Homo sapien
gttctcaaacgaaaggagaattgga

SEQ ID NO: 441748 - DNA, 25 bp, Homo sapien
tcttaaatgcacactccgcaattgc

SEQ ID NO: 441749 - DNA, 25 bp, Homo sapien
tgcacactccgcaattgcttctatc

SEQ ID NO: 441750 - DNA, 25 bp, Homo sapien
gcatgtcatttgctgtaactggagc

SEQ ID NO: 441751 - DNA, 25 bp, Homo sapien
tgaaattcccagagttagaggctca

SEQ ID NO: 441752 - DNA, 25 bp, Homo sapien
tagggaggcttatccaaagaacctg

SEQ ID NO: 441753 - DNA, 25 bp, Homo sapien
cacagatggacagcgaaggcactga

SEQ ID NO: 441754 - DNA, 25 bp, Homo sapien
ggatatttttccaggggctccatga

SEQ ID NO: 441755 - DNA, 25 bp, Homo sapien
atccccaaagatcagtcggcagtac

SEQ ID NO: 441756 - DNA, 25 bp, Homo sapien
agatcagtcggcagtactccgccat

SEQ ID NO: 441757 - DNA, 25 bp, Homo sapien
gggctccatgagaagggcatcccca

SEQ ID NO: 441758 - DNA, 25 bp, Homo sapien
ggctcgaacatgctggaggagtcac

SEQ ID NO: 441759 - DNA, 25 bp, Homo sapien
tgagagcttctttttgccgcttcct

SEQ ID NO: 441760 - DNA, 25 bp, Homo sapien
ccttctgatgacttgtgtgatttct

SEQ ID NO: 441761 - DNA, 25 bp, Homo sapien
tatacattaaatccatagggcttgg

SEQ ID NO: 441762 - DNA, 25 bp, Homo sapien
taatgcgattttcagattgccaagc

SEQ ID NO: 441763 - DNA, 25 bp, Homo sapien
caatgacaatgcatccagtgctcag

SEQ ID NO: 441764 - DNA, 25 bp, Homo sapien
ccttgacatgggagcaattatcctg

SEQ ID NO: 441765 - DNA, 25 bp, Homo sapien
tcccaaggaaatgagtgccactgaa

SEQ ID NO: 441766 - DNA, 25 bp, Homo sapien
cattcaaaagctacaggacaaaacc

SEQ ID NO: 441767 - DNA, 25 bp, Homo sapien
gataaatcagagtctcaggctactt

SEQ ID NO: 441768 - DNA, 25 bp, Homo sapien
taactgatgtataacaggcgtacag

SEQ ID NO: 441769 - DNA, 25 bp, Homo sapien
tacacgtcgtaagtccacagtgcaa

SEQ ID NO: 441770 - DNA, 25 bp, Homo sapien
tcgtcactttccgtatcagcttctc

SEQ ID NO: 441771 - DNA, 25 bp, Homo sapien
tcgtcgtcgtcactttccgtatcag

SEQ ID NO: 441772 - DNA, 25 bp, Homo sapien
gtcgtcgtcactttccgtatcagct

SEQ ID NO: 441773 - DNA, 25 bp, Homo sapien
tcatcgtcgtcgtcactttccgtat

SEQ ID NO: 441774 - DNA, 25 bp, Homo sapien
gaatatagttcaccagattagacat

SEQ ID NO: 441775 - DNA, 25 bp, Homo sapien
gttcaccagattagacatttcttct

SEQ ID NO: 441776 - DNA, 25 bp, Homo sapien
cttgactggctgaatatagttcacc

SEQ ID NO: 441777 - DNA, 25 bp, Homo sapien
tcaaatgactcaaacttgactggct

SEQ ID NO: 441778 - DNA, 25 bp, Homo sapien
tgttcaagtcctttggtttccacga

SEQ ID NO: 441779 - DNA, 25 bp, Homo sapien
ttaagtgccaccatctgacaacctg

SEQ ID NO: 441780 - DNA, 25 bp, Homo sapien
tttggatatatcctgctaagctgca

SEQ ID NO: 441781 - DNA, 25 bp, Homo sapien
gttggatgaatccacacgtgttcct

SEQ ID NO: 441782 - DNA, 25 bp, Homo sapien
gaagagctgaggcatatagttggat

SEQ ID NO: 441783 - DNA, 25 bp, Homo sapien
tacgatgccttcagtaaatggatca

SEQ ID NO: 441784 - DNA, 25 bp, Homo sapien
tggatcaaaatgcttgtcaggcctc

SEQ ID NO: 441785 - DNA, 25 bp, Homo sapien
tctgtagccactcttcccgttgtat

SEQ ID NO: 441786 - DNA, 25 bp, Homo sapien
gtgtttgccactatcccatctacga

SEQ ID NO: 441787 - DNA, 25 bp, Homo sapien
tatctacttccacgtaagtcccaac

SEQ ID NO: 441788 - DNA, 25 bp, Homo sapien
gcatttccttgggatgttttggtct

SEQ ID NO: 441789 - DNA, 25 bp, Homo sapien
tccttgtatccacaggcaaaccaaa

SEQ ID NO: 441790 - DNA, 25 bp, Homo sapien
acacaataggttcttcttcccagac

SEQ ID NO: 441791 - DNA, 25 bp, Homo sapien
gctattctcaaacaggccagagtag

SEQ ID NO: 441792 - DNA, 25 bp, Homo sapien
ctggccgaatggcttgcactggcaa

SEQ ID NO: 441793 - DNA, 25 bp, Homo sapien
tattctcaaacaggccagagtagga

SEQ ID NO: 441794 - DNA, 25 bp, Homo sapien
ggcaagatacggtggccaatgaatt

SEQ ID NO: 441795 - DNA, 25 bp, Homo sapien
tctatgtagacaaagacagcaggca

SEQ ID NO: 441796 - DNA, 25 bp, Homo sapien
tttcattccttagacagatatagtg

SEQ ID NO: 441797 - DNA, 25 bp, Homo sapien
ttccttagacagatatagtgatagc

SEQ ID NO: 441798 - DNA, 25 bp, Homo sapien
tcacttctatgtagacaaagacagc

SEQ ID NO: 441799 - DNA, 25 bp, Homo sapien
caattgcttagctctctgttccatc

SEQ ID NO: 441800 - DNA, 25 bp, Homo sapien
tcggattgggtttgataaagcttcg

SEQ ID NO: 441801 - DNA, 25 bp, Homo sapien
catcaggttcacatatcggattggg

SEQ ID NO: 441802 - DNA, 25 bp, Homo sapien
gggtttgataaagcttcgatgacat

SEQ ID NO: 441803 - DNA, 25 bp, Homo sapien
atgaaacagacgatgttgggaattc

SEQ ID NO: 441804 - DNA, 25 bp, Homo sapien
gtgagtcagacaatacaaaaagtag

SEQ ID NO: 441805 - DNA, 25 bp, Homo sapien
tgaaacagacgatgttgggaattct

SEQ ID NO: 441806 - DNA, 25 bp, Homo sapien
tgagtctcataatttcatcatgcag

SEQ ID NO: 441807 - DNA, 25 bp, Homo sapien
agcgtattacgggtgagtctcataa

SEQ ID NO: 441808 - DNA, 25 bp, Homo sapien
aggccatcagtttttccagcgtatt

SEQ ID NO: 441809 - DNA, 25 bp, Homo sapien
gctttggatgggcaccacatgggta

SEQ ID NO: 441810 - DNA, 25 bp, Homo sapien
tgataacagcagcttaaggaaccgt

SEQ ID NO: 441811 - DNA, 25 bp, Homo sapien
taacatggtaagtgaagggcctttc

SEQ ID NO: 441812 - DNA, 25 bp, Homo sapien
gaaaagatttccgtcctgggcattg

SEQ ID NO: 441813 - DNA, 25 bp, Homo sapien
gccctctagtggacaaatgcaatca

SEQ ID NO: 441814 - DNA, 25 bp, Homo sapien
tctcgcttcacttggagcctctgat

SEQ ID NO: 441815 - DNA, 25 bp, Homo sapien
gctggagtcgttctcgcttcacttg

SEQ ID NO: 441816 - DNA, 25 bp, Homo sapien
tgtcagggttgtagtgtgattcacc

SEQ ID NO: 441817 - DNA, 25 bp, Homo sapien
ggttgtagtgtgattcaccccattt

SEQ ID NO: 441818 - DNA, 25 bp, Homo sapien
ctgttaagacactctgaataagatc

SEQ ID NO: 441819 - DNA, 25 bp, Homo sapien
tgttaagacactctgaataagatct

SEQ ID NO: 441820 - DNA, 25 bp, Homo sapien
gttaagacactctgaataagatctt

SEQ ID NO: 441821 - DNA, 25 bp, Homo sapien
tacttggtagtgtgttctttgataa

SEQ ID NO: 441822 - DNA, 25 bp, Homo sapien
tggtgtctcttaaccaggtctttca

SEQ ID NO: 441823 - DNA, 25 bp, Homo sapien
ggctctccttctcaagtagtcattc

SEQ ID NO: 441824 - DNA, 25 bp, Homo sapien
tttcttgtggtgtctcttaaccagg

SEQ ID NO: 441825 - DNA, 25 bp, Homo sapien
gtttaatatgttctcgcttctggta

SEQ ID NO: 441826 - DNA, 25 bp, Homo sapien
tcttgccgaagattaagcagctgct

SEQ ID NO: 441827 - DNA, 25 bp, Homo sapien
tgatgaaccatgatcagggctgctg

SEQ ID NO: 441828 - DNA, 25 bp, Homo sapien
cagcgaggtcttgctcaatcgttga

SEQ ID NO: 441829 - DNA, 25 bp, Homo sapien
tgctgtatattttaccccccatctc

SEQ ID NO: 441830 - DNA, 25 bp, Homo sapien
caagataattggtccaggggaggca

SEQ ID NO: 441831 - DNA, 25 bp, Homo sapien
gttgggtcagtcatactctgacttc

SEQ ID NO: 441832 - DNA, 25 bp, Homo sapien
gggaggcattaatccaagttgggtc

SEQ ID NO: 441833 - DNA, 25 bp, Homo sapien
tctgacactcttctgcgacatccgt

SEQ ID NO: 441834 - DNA, 25 bp, Homo sapien
tctttaactgattgttctgacactc

SEQ ID NO: 441835 - DNA, 25 bp, Homo sapien
gattgttctgacactcttctgcgac

SEQ ID NO: 441836 - DNA, 25 bp, Homo sapien
gcgacatccgtcaacttttgaataa

SEQ ID NO: 441837 - DNA, 25 bp, Homo sapien
tcttccatctgacttttgtctttgg

SEQ ID NO: 441838 - DNA, 25 bp, Homo sapien
tctgacttttgtctttggatttagc

SEQ ID NO: 441839 - DNA, 25 bp, Homo sapien
ttggatttagcttctgttatcttct

SEQ ID NO: 441840 - DNA, 25 bp, Homo sapien
ttctgttatcttctcctgcctcttt

SEQ ID NO: 441841 - DNA, 25 bp, Homo sapien
ctcttgatatactgcaccacttcct

SEQ ID NO: 441842 - DNA, 25 bp, Homo sapien
tgcaccacttcctggatatatgacc

SEQ ID NO: 441843 - DNA, 25 bp, Homo sapien
cacttcctggatatatgaccggatc

SEQ ID NO: 441844 - DNA, 25 bp, Homo sapien
ctggatatatgaccggatcatctct

SEQ ID NO: 441845 - DNA, 25 bp, Homo sapien
aaaggagagagcgtgatgagcccac

SEQ ID NO: 441846 - DNA, 25 bp, Homo sapien
gagagagcgtgatgagcccacatac

SEQ ID NO: 441847 - DNA, 25 bp, Homo sapien
ggagagagcgtgatgagcccacata

SEQ ID NO: 441848 - DNA, 25 bp, Homo sapien
ttttgcaaaggagagagcgtgatga

SEQ ID NO: 441849 - DNA, 25 bp, Homo sapien
cttgtgtttctctacgagtttttct

SEQ ID NO: 441850 - DNA, 25 bp, Homo sapien
tttcttgccgtttactttgcgcttc

SEQ ID NO: 441851 - DNA, 25 bp, Homo sapien
tgtttctctacgagtttttcttgcc

SEQ ID NO: 441852 - DNA, 25 bp, Homo sapien
gccgtttactttgcgcttcttctag

SEQ ID NO: 441853 - DNA, 25 bp, Homo sapien
gagaatctatattgccaaccctaaa

SEQ ID NO: 441854 - DNA, 25 bp, Homo sapien
cataatcaacctgagagggtggctg

SEQ ID NO: 441855 - DNA, 25 bp, Homo sapien
caaaaactagctgagccatcaacca

SEQ ID NO: 441856 - DNA, 25 bp, Homo sapien
cattgttgaaccaaaacacgcatga

SEQ ID NO: 441857 - DNA, 25 bp, Homo sapien
aagaaatgctttagtttgacatgga

SEQ ID NO: 441858 - DNA, 25 bp, Homo sapien
taaggcacaacgtttttaagccatg

SEQ ID NO: 441859 - DNA, 25 bp, Homo sapien
tagtttgacatggaaccaacaatct

SEQ ID NO: 441860 - DNA, 25 bp, Homo sapien
aaagatggtcatggagcaacctcat

SEQ ID NO: 441861 - DNA, 25 bp, Homo sapien
catgcagtcgaatgtttctccagaa

SEQ ID NO: 441862 - DNA, 25 bp, Homo sapien
caaacccaggtatggaaatccccag

SEQ ID NO: 441863 - DNA, 25 bp, Homo sapien
cactcaaggactgaatcgaatatct

SEQ ID NO: 441864 - DNA, 25 bp, Homo sapien
gactggccagtgtttactgcgtcca

SEQ ID NO: 441865 - DNA, 25 bp, Homo sapien
cagtagaccgcatgaaaggaacttc

SEQ ID NO: 441866 - DNA, 25 bp, Homo sapien
cctctcaagaacagcaatagatgct

SEQ ID NO: 441867 - DNA, 25 bp, Homo sapien
caatgccctggtattgcccagaagg

SEQ ID NO: 441868 - DNA, 25 bp, Homo sapien
tcccaaatgggcagaagatacaaga

SEQ ID NO: 441869 - DNA, 25 bp, Homo sapien
ccttgaaaggtgaggagcctacagt

SEQ ID NO: 441870 - DNA, 25 bp, Homo sapien
ctttgatagccttgaaaggtgagga

SEQ ID NO: 441871 - DNA, 25 bp, Homo sapien
aaggtgaggagcctacagtcaagag

SEQ ID NO: 441872 - DNA, 25 bp, Homo sapien
tagccttgaaaggtgaggagcctac

SEQ ID NO: 441873 - DNA, 25 bp, Homo sapien
gccctgataggcttttgctcatgat

SEQ ID NO: 441874 - DNA, 25 bp, Homo sapien
tatctttaaagacccagagaactac

SEQ ID NO: 441875 - DNA, 25 bp, Homo sapien
ctgcttttgccctgataggcttttg

SEQ ID NO: 441876 - DNA, 25 bp, Homo sapien
caaactgaaggggacattgaaccta

SEQ ID NO: 441877 - DNA, 25 bp, Homo sapien
ccctaagggacagcttcttcttagc

SEQ ID NO: 441878 - DNA, 25 bp, Homo sapien
gcagccctaagggacagcttcttct

SEQ ID NO: 441879 - DNA, 25 bp, Homo sapien
tcttcttagctttagaaattctttg

SEQ ID NO: 441880 - DNA, 25 bp, Homo sapien
tcttagctttagaaattctttgcat

SEQ ID NO: 441881 - DNA, 25 bp, Homo sapien
ggcaagtttccgacaagaatgagga

SEQ ID NO: 441882 - DNA, 25 bp, Homo sapien
gcaagtttccgacaagaatgaggag

SEQ ID NO: 441883 - DNA, 25 bp, Homo sapien
tggcaagtttccgacaagaatgagg

SEQ ID NO: 441884 - DNA, 25 bp, Homo sapien
ggaagccaaatttgccaatagagaa

SEQ ID NO: 441885 - DNA, 25 bp, Homo sapien
gatgaaggacaaacgagcaagtccg

SEQ ID NO: 441886 - DNA, 25 bp, Homo sapien
cctgaaaactggatggctacacacc

SEQ ID NO: 441887 - DNA, 25 bp, Homo sapien
gagaaattaataccagaggaaggca

SEQ ID NO: 441888 - DNA, 25 bp, Homo sapien
gcaagagctttcgtgtcccttctaa

SEQ ID NO: 441889 - DNA, 25 bp, Homo sapien
caggacatgcaagagctttcgtgtc

SEQ ID NO: 441890 - DNA, 25 bp, Homo sapien
tcccttctaagacacacaagatatg

SEQ ID NO: 441891 - DNA, 25 bp, Homo sapien
gaggtgtcatgagcctgctccagaa

SEQ ID NO: 441892 - DNA, 25 bp, Homo sapien
agcccccgctcacaccaccatttcc

SEQ ID NO: 441893 - DNA, 25 bp, Homo sapien
cccccgctcacaccaccatttccca

SEQ ID NO: 441894 - DNA, 25 bp, Homo sapien
cccgctcacaccaccatttcccatc

SEQ ID NO: 441895 - DNA, 25 bp, Homo sapien
cagcccccgctcacaccaccatttc

SEQ ID NO: 441896 - DNA, 25 bp, Homo sapien
gataaatttaacttgcccatggccc

SEQ ID NO: 441897 - DNA, 25 bp, Homo sapien
aatagcagagcatggcactacagtc

SEQ ID NO: 441898 - DNA, 25 bp, Homo sapien
tagcaatggctctttcatcccaccg

SEQ ID NO: 441899 - DNA, 25 bp, Homo sapien
gaacaccagatattgccagaagtct

SEQ ID NO: 441900 - DNA, 25 bp, Homo sapien
gatgccaaaatccacggatgcacaa

SEQ ID NO: 441901 - DNA, 25 bp, Homo sapien
ccaggaccctctttggatgccaaaa

SEQ ID NO: 441902 - DNA, 25 bp, Homo sapien
cttatttaaagtggtgcaggcaggg

SEQ ID NO: 441903 - DNA, 25 bp, Homo sapien
tgtacacgaattgattagcaaccta

SEQ ID NO: 441904 - DNA, 25 bp, Homo sapien
ctccgtcattatccacaggactctg

SEQ ID NO: 441905 - DNA, 25 bp, Homo sapien
cctgtgctcccctatgctacttgga

SEQ ID NO: 441906 - DNA, 25 bp, Homo sapien
tgcatgtgcagagttgaggtccagc

SEQ ID NO: 441907 - DNA, 25 bp, Homo sapien
gacagtacatcatggggacagagcc

SEQ ID NO: 441908 - DNA, 25 bp, Homo sapien
ttcgatgacaatagaagccaatctc

SEQ ID NO: 441909 - DNA, 25 bp, Homo sapien
tctattgacagagtacaccacggac

SEQ ID NO: 441910 - DNA, 25 bp, Homo sapien
tatacacagtcaccaaaatctttgc

SEQ ID NO: 441911 - DNA, 25 bp, Homo sapien
ggcagacatagcagctttgagatca

SEQ ID NO: 441912 - DNA, 25 bp, Homo sapien
tataagtcaggagttgcatgcacac

SEQ ID NO: 441913 - DNA, 25 bp, Homo sapien
gaaactgtgacctgcgtggttcaga

SEQ ID NO: 441914 - DNA, 25 bp, Homo sapien
tcttacggaaagacagaggtaggaa

SEQ ID NO: 441915 - DNA, 25 bp, Homo sapien
catcaaggatatgcgctcagagtcc

SEQ ID NO: 441916 - DNA, 25 bp, Homo sapien
gccaggagatcctaactttgaaata

SEQ ID NO: 441917 - DNA, 25 bp, Homo sapien
aaatttctgtctaggtgatggtacc

SEQ ID NO: 441918 - DNA, 25 bp, Homo sapien
cactaaaaggtattgggttgccaat

SEQ ID NO: 441919 - DNA, 25 bp, Homo sapien
acacatgtgttagtctagtaatacc

SEQ ID NO: 441920 - DNA, 25 bp, Homo sapien
ttgggtggtagtttcagcaactgag

SEQ ID NO: 441921 - DNA, 25 bp, Homo sapien
tagtttcagcaactgaggactgtgc

SEQ ID NO: 441922 - DNA, 25 bp, Homo sapien
tcagcaactgaggactgtgcaattg

SEQ ID NO: 441923 - DNA, 25 bp, Homo sapien
actgaggactgtgcaattgagtttt

SEQ ID NO: 441924 - DNA, 25 bp, Homo sapien
agaaaacgattgtcagccaaaggtc

SEQ ID NO: 441925 - DNA, 25 bp, Homo sapien
gaagaaaacgattgtcagccaaagg

SEQ ID NO: 441926 - DNA, 25 bp, Homo sapien
aggcagaagaaaacgattgtcagcc

SEQ ID NO: 441927 - DNA, 25 bp, Homo sapien
gcagaagaaaacgattgtcagccaa

SEQ ID NO: 441928 - DNA, 25 bp, Homo sapien
cgttcgccagcgtggagacgtgaaa

SEQ ID NO: 441929 - DNA, 25 bp, Homo sapien
cgagtttgtcgttcgccagcgtgga

SEQ ID NO: 441930 - DNA, 25 bp, Homo sapien
cgtggagacgtgaaaacagactgct

SEQ ID NO: 441931 - DNA, 25 bp, Homo sapien
aggaggctccttgccgagtttgtcg

SEQ ID NO: 441932 - DNA, 25 bp, Homo sapien
caagaactgagataacgaggacagg

SEQ ID NO: 441933 - DNA, 25 bp, Homo sapien
gcaagaactgagataacgaggacag

SEQ ID NO: 441934 - DNA, 25 bp, Homo sapien
tgatacctctaagaaagttgtgtcc

SEQ ID NO: 441935 - DNA, 25 bp, Homo sapien
gtagaaacgccacttatcaagacat

SEQ ID NO: 441936 - DNA, 25 bp, Homo sapien
taaatcagtaaccaacttctttgga

SEQ ID NO: 441937 - DNA, 25 bp, Homo sapien
tcctacttgggatacaaatacaacc

SEQ ID NO: 441938 - DNA, 25 bp, Homo sapien
tgcagcacttcaaatcaaattttaa

SEQ ID NO: 441939 - DNA, 25 bp, Homo sapien
ttctctttgcagcacttcaaatcaa

SEQ ID NO: 441940 - DNA, 25 bp, Homo sapien
tctttgcagcacttcaaatcaaatt

SEQ ID NO: 441941 - DNA, 25 bp, Homo sapien
ttccccctttctctttgcagcactt

SEQ ID NO: 441942 - DNA, 25 bp, Homo sapien
taaagtcctgcctatgaaccagtcc

SEQ ID NO: 441943 - DNA, 25 bp, Homo sapien
caaggattgttggaaagtgaccaca

SEQ ID NO: 441944 - DNA, 25 bp, Homo sapien
tattacccctgtgaattgagtaccc

SEQ ID NO: 441945 - DNA, 25 bp, Homo sapien
aattcagaatgttcgggttcctcgg

SEQ ID NO: 441946 - DNA, 25 bp, Homo sapien
tcatggcttcctgcacgaattccaa

SEQ ID NO: 441947 - DNA, 25 bp, Homo sapien
gggcagaaccgtgattgctgtcttc

SEQ ID NO: 441948 - DNA, 25 bp, Homo sapien
tgcacgaattccaaaatctcgaggg

SEQ ID NO: 441949 - DNA, 25 bp, Homo sapien
gaaccgtgattgctgtcttcactga

SEQ ID NO: 441950 - DNA, 25 bp, Homo sapien
cacagaggagtatcaaattcttttc

SEQ ID NO: 441951 - DNA, 25 bp, Homo sapien
gattcctctggaactctccctttgg

SEQ ID NO: 441952 - DNA, 25 bp, Homo sapien
taataagagagagtccgatgacgct

SEQ ID NO: 441953 - DNA, 25 bp, Homo sapien
cgatgacgctggagtggccatgcaa

SEQ ID NO: 441954 - DNA, 25 bp, Homo sapien
gcattcttcactagcagacctgtgg

SEQ ID NO: 441955 - DNA, 25 bp, Homo sapien
gaagaaacaatgctcaaagtcggct

SEQ ID NO: 441956 - DNA, 25 bp, Homo sapien
tcattaaaagttccatggagcctgc

SEQ ID NO: 441957 - DNA, 25 bp, Homo sapien
ttcactgggcaaggatacaatcaag

SEQ ID NO: 441958 - DNA, 25 bp, Homo sapien
ttaaaaggcaagagtcacaacgtcc

SEQ ID NO: 441959 - DNA, 25 bp, Homo sapien
tgaaagatcatatggtgtattagtt

SEQ ID NO: 441960 - DNA, 25 bp, Homo sapien
tttttgaatgagaaatgccaggaag

SEQ ID NO: 441961 - DNA, 25 bp, Homo sapien
tgagtaaatgaaagatcatatggtg

SEQ ID NO: 441962 - DNA, 25 bp, Homo sapien
gaaacacagaaaggcttgacttttg

SEQ ID NO: 441963 - DNA, 25 bp, Homo sapien
tgtttcaaccttgggaattctggaa

SEQ ID NO: 441964 - DNA, 25 bp, Homo sapien
ttccatgccacactagaatataggg

SEQ ID NO: 441965 - DNA, 25 bp, Homo sapien
tgagacatccaccactctacgttgt

SEQ ID NO: 441966 - DNA, 25 bp, Homo sapien
gagaacccactgatcctcaatgtcg

SEQ ID NO: 441967 - DNA, 25 bp, Homo sapien
cttggggtgacgtcccagagtccag

SEQ ID NO: 441968 - DNA, 25 bp, Homo sapien
acttggggtgacgtcccagagtcca

SEQ ID NO: 441969 - DNA, 25 bp, Homo sapien
ttggggtgacgtcccagagtccagc

SEQ ID NO: 441970 - DNA, 25 bp, Homo sapien
tggcccacaccccactgagaatccc

SEQ ID NO: 441971 - DNA, 25 bp, Homo sapien
gaccatgtggaccatcaggacttgg

SEQ ID NO: 441972 - DNA, 25 bp, Homo sapien
ctgagaatcccgcatctgctcaggg

SEQ ID NO: 441973 - DNA, 25 bp, Homo sapien
caggacttggtagtgaagggaaata

SEQ ID NO: 441974 - DNA, 25 bp, Homo sapien
gcctgttgcccgctaggagatgcat

SEQ ID NO: 441975 - DNA, 25 bp, Homo sapien
tgcccgctaggagatgcatactcag

SEQ ID NO: 441976 - DNA, 25 bp, Homo sapien
gagatgcatactcagctgctgatgg

SEQ ID NO: 441977 - DNA, 25 bp, Homo sapien
gagagcctgttgcccgctaggagat

SEQ ID NO: 441978 - DNA, 25 bp, Homo sapien
ctttttctcagggatggactgagca

SEQ ID NO: 441979 - DNA, 25 bp, Homo sapien
tggctgcctctagagcagagagcat

SEQ ID NO: 441980 - DNA, 25 bp, Homo sapien
cagggatggactgagcagctccttc

SEQ ID NO: 441981 - DNA, 25 bp, Homo sapien
tctctggctgcctctagagcagaga

SEQ ID NO: 441982 - DNA, 25 bp, Homo sapien
ctgtacagtggttaccagtaaagat

SEQ ID NO: 441983 - DNA, 25 bp, Homo sapien
aaaagcatttccctcaaagtcaaga

SEQ ID NO: 441984 - DNA, 25 bp, Homo sapien
tgtcctggaacacctgagtcaaatt

SEQ ID NO: 441985 - DNA, 25 bp, Homo sapien
caaagtcaagatggcaatttcctca

SEQ ID NO: 441986 - DNA, 25 bp, Homo sapien
cctggaacacctgagtcaaatttct

SEQ ID NO: 441987 - DNA, 25 bp, Homo sapien
taagtaatagaggttgatgtcttgt

SEQ ID NO: 441988 - DNA, 25 bp, Homo sapien
ccaaaagcaaactgggggcctcagt

SEQ ID NO: 441989 - DNA, 25 bp, Homo sapien
gtagcaccattcataaccaaaagca

SEQ ID NO: 441990 - DNA, 25 bp, Homo sapien
tattccctttcatctgacaggagac

SEQ ID NO: 441991 - DNA, 25 bp, Homo sapien
tgttacagaaagaaagtgaaggttc

SEQ ID NO: 441992 - DNA, 25 bp, Homo sapien
gttacagaaagaaagtgaaggttca

SEQ ID NO: 441993 - DNA, 25 bp, Homo sapien
ctgttacagaaagaaagtgaaggtt

SEQ ID NO: 441994 - DNA, 25 bp, Homo sapien
ttacagaaagaaagtgaaggttcat

SEQ ID NO: 441995 - DNA, 25 bp, Homo sapien
ttcaatgttgattctcacaagccaa

SEQ ID NO: 441996 - DNA, 25 bp, Homo sapien
tagtttattgccttgactagggctg

SEQ ID NO: 441997 - DNA, 25 bp, Homo sapien
gtgtctacttgttcggatgccatca

SEQ ID NO: 441998 - DNA, 25 bp, Homo sapien
ctcctctgtctttagtgtagtttat

SEQ ID NO: 441999 - DNA, 25 bp, Homo sapien
agtacacaaaccacacaacggcatg

SEQ ID NO: 442000 - DNA, 25 bp, Homo sapien
tccttggctgagtacaactatgcag

SEQ ID NO: 442001 - DNA, 25 bp, Homo sapien
tgaaacaagtcccaatgagcaggca

SEQ ID NO: 442002 - DNA, 25 bp, Homo sapien
caatttagactatgctcagtgggac

SEQ ID NO: 442003 - DNA, 25 bp, Homo sapien
cctgggctgtaagattaccttgctg

SEQ ID NO: 442004 - DNA, 25 bp, Homo sapien
tgtaagattaccttgctgtggtctg

SEQ ID NO: 442005 - DNA, 25 bp, Homo sapien
gggctgtaagattaccttgctgtgg

SEQ ID NO: 442006 - DNA, 25 bp, Homo sapien
agtcctgggctgtaagattaccttg

SEQ ID NO: 442007 - DNA, 25 bp, Homo sapien
cctcgagcctgaggaaatgtcactt

SEQ ID NO: 442008 - DNA, 25 bp, Homo sapien
tgtcctcgagcctgaggaaatgtca

SEQ ID NO: 442009 - DNA, 25 bp, Homo sapien
ctcgggatgtcctcgagcctgagga

SEQ ID NO: 442010 - DNA, 25 bp, Homo sapien
ggatgtcctcgagcctgaggaaatg

SEQ ID NO: 442011 - DNA, 25 bp, Homo sapien
aatcatcaaagtaggtttcaggagt

SEQ ID NO: 442012 - DNA, 25 bp, Homo sapien
tcatcaaagtaggtttcaggagttc

SEQ ID NO: 442013 - DNA, 25 bp, Homo sapien
gaaatcatcaaagtaggtttcagga

SEQ ID NO: 442014 - DNA, 25 bp, Homo sapien
ctgaaatcatcaaagtaggtttcag

SEQ ID NO: 442015 - DNA, 25 bp, Homo sapien
gcaggcaccacacatggttgtctct

SEQ ID NO: 442016 - DNA, 25 bp, Homo sapien
ccacacatggttgtctctgtttcat

SEQ ID NO: 442017 - DNA, 25 bp, Homo sapien
caccgtgttttactctttgtctcct

SEQ ID NO: 442018 - DNA, 25 bp, Homo sapien
cgcaggccaagaatgcaggcaccac

SEQ ID NO: 442019 - DNA, 25 bp, Homo sapien
gaagatgacaaccttcctgtggtca

SEQ ID NO: 442020 - DNA, 25 bp, Homo sapien
cattggagagtgtgctttatcaccc

SEQ ID NO: 442021 - DNA, 25 bp, Homo sapien
tagtgtgtaagttaatcagggtccc

SEQ ID NO: 442022 - DNA, 25 bp, Homo sapien
tatgtcccaggcagtcaattgctcc

SEQ ID NO: 442023 - DNA, 25 bp, Homo sapien
cagtttctgcaaatgagcctttgca

SEQ ID NO: 442024 - DNA, 25 bp, Homo sapien
cagtttgtttattctgctgatttga

SEQ ID NO: 442025 - DNA, 25 bp, Homo sapien
aaataagaaccagtgagccaaatgg

SEQ ID NO: 442026 - DNA, 25 bp, Homo sapien
caaatggttttgactggctgtagca

SEQ ID NO: 442027 - DNA, 25 bp, Homo sapien
aagaagaggacagcagaaccagttc

SEQ ID NO: 442028 - DNA, 25 bp, Homo sapien
gaagaggacagcagaaccagttcct

SEQ ID NO: 442029 - DNA, 25 bp, Homo sapien
agaggacagcagaaccagttcctac

SEQ ID NO: 442030 - DNA, 25 bp, Homo sapien
ttaaaagaagaggacagcagaacca

SEQ ID NO: 442031 - DNA, 25 bp, Homo sapien
tcttggatgacatcactgtgttgtc

SEQ ID NO: 442032 - DNA, 25 bp, Homo sapien
gaaggctcagttatgcaggctctcc

SEQ ID NO: 442033 - DNA, 25 bp, Homo sapien
tgaagactccctggcgattttacct

SEQ ID NO: 442034 - DNA, 25 bp, Homo sapien
gcagtctgtctgaataatccccaca

SEQ ID NO: 442035 - DNA, 25 bp, Homo sapien
ggatattggaaccaccatacatcat

SEQ ID NO: 442036 - DNA, 25 bp, Homo sapien
caaatctcataagctttctgtaatc

SEQ ID NO: 442037 - DNA, 25 bp, Homo sapien
catcatgagtgaaggatcatgttta

SEQ ID NO: 442038 - DNA, 25 bp, Homo sapien
tggggataatccagaaacaaagctg

SEQ ID NO: 442039 - DNA, 25 bp, Homo sapien
tgttagccaggtttttgtcacgtgt

SEQ ID NO: 442040 - DNA, 25 bp, Homo sapien
gccaggtttttgtcacgtgtagaca

SEQ ID NO: 442041 - DNA, 25 bp, Homo sapien
agattgctttttactttgagcaggc

SEQ ID NO: 442042 - DNA, 25 bp, Homo sapien
tctttgttaaggctgtgttagccag

SEQ ID NO: 442043 - DNA, 25 bp, Homo sapien
tgctgtgcaacttccggaataactt

SEQ ID NO: 442044 - DNA, 25 bp, Homo sapien
tccatttcctgacttaattgtaagc

SEQ ID NO: 442045 - DNA, 25 bp, Homo sapien
aagcatagtacccagaagcatagta

SEQ ID NO: 442046 - DNA, 25 bp, Homo sapien
tgcaacttccggaataacttttgct

SEQ ID NO: 442047 - DNA, 25 bp, Homo sapien
ttggcatgtttccggagtcttgtgg

SEQ ID NO: 442048 - DNA, 25 bp, Homo sapien
tggagctgtacgcatgctcgcttga

SEQ ID NO: 442049 - DNA, 25 bp, Homo sapien
gcatgctcgcttgaggtattcttcc

SEQ ID NO: 442050 - DNA, 25 bp, Homo sapien
ttgatttgaagttttatatgttggc

SEQ ID NO: 442051 - DNA, 25 bp, Homo sapien
aacttccagagtagaattgttacta

SEQ ID NO: 442052 - DNA, 25 bp, Homo sapien
tgtctctggataaacatgtcccatc

SEQ ID NO: 442053 - DNA, 25 bp, Homo sapien
tctggagtaacttccagagtagaat

SEQ ID NO: 442054 - DNA, 25 bp, Homo sapien
aaaacccgtctctcttcacttctgg

SEQ ID NO: 442055 - DNA, 25 bp, Homo sapien
tccagttctggcgacccaagccttt

SEQ ID NO: 442056 - DNA, 25 bp, Homo sapien
tagatttccatgttaccacttttaa

SEQ ID NO: 442057 - DNA, 25 bp, Homo sapien
gtagatttccatgttaccactttta

SEQ ID NO: 442058 - DNA, 25 bp, Homo sapien
aatttccagttctggcgacccaagc

SEQ ID NO: 442059 - DNA, 25 bp, Homo sapien
ccaagaaagtgagatgtttgtcatc

SEQ ID NO: 442060 - DNA, 25 bp, Homo sapien
gtttgtcatctgataggacagaagg

SEQ ID NO: 442061 - DNA, 25 bp, Homo sapien
gggagagcacaaacttggagaaagt

SEQ ID NO: 442062 - DNA, 25 bp, Homo sapien
gtctggcatttgcttattcttggag

SEQ ID NO: 442063 - DNA, 25 bp, Homo sapien
ccatgctcgcagctgcactaggcat

SEQ ID NO: 442064 - DNA, 25 bp, Homo sapien
gccaccaaaacccggagacgtggca

SEQ ID NO: 442065 - DNA, 25 bp, Homo sapien
gggccatgctcgcagctgcactagg

SEQ ID NO: 442066 - DNA, 25 bp, Homo sapien
acccggagacgtggcacctgcgcat

SEQ ID NO: 442067 - DNA, 25 bp, Homo sapien
caacctgcccaggctacggagcatg

SEQ ID NO: 442068 - DNA, 25 bp, Homo sapien
gccggccgcccagttgccgcgagcc

SEQ ID NO: 442069 - DNA, 25 bp, Homo sapien
tggctccccagcgagcccacggggc

SEQ ID NO: 442070 - DNA, 25 bp, Homo sapien
cctcctcgttctcgcctcccggctc

SEQ ID NO: 442071 - DNA, 25 bp, Homo sapien
gggatgcggcgacggccgctgcctg

SEQ ID NO: 442072 - DNA, 25 bp, Homo sapien
ggtgcagctcacttactgctcccgg

SEQ ID NO: 442073 - DNA, 25 bp, Homo sapien
ctggagacccagtgtgtacgcgcgt

SEQ ID NO: 442074 - DNA, 25 bp, Homo sapien
agagatcttgttggcggtgcagctc

SEQ ID NO: 442075 - DNA, 25 bp, Homo sapien
gcggaaagcaaacaagccctgaggg

SEQ ID NO: 442076 - DNA, 25 bp, Homo sapien
gtccgggacgcacccgcggaaagca

SEQ ID NO: 442077 - DNA, 25 bp, Homo sapien
aaggcgggcgggagcatcctcgggc

SEQ ID NO: 442078 - DNA, 25 bp, Homo sapien
aaacaagccctgagggccaaggcgg

SEQ ID NO: 442079 - DNA, 25 bp, Homo sapien
catttacatgcgttgcacggtgcca

SEQ ID NO: 442080 - DNA, 25 bp, Homo sapien
taatcatatacacgtcgagccgagc

SEQ ID NO: 442081 - DNA, 25 bp, Homo sapien
caaaaggttactcgtctggcagcaa

SEQ ID NO: 442082 - DNA, 25 bp, Homo sapien
tagtgagggattacaccacatgccc

SEQ ID NO: 442083 - DNA, 25 bp, Homo sapien
tgggaggaagcatttctcgagcaca

SEQ ID NO: 442084 - DNA, 25 bp, Homo sapien
gggaggaagcatttctcgagcacat

SEQ ID NO: 442085 - DNA, 25 bp, Homo sapien
tgagagccataatactagtagtacc

SEQ ID NO: 442086 - DNA, 25 bp, Homo sapien
ttgttcaggagcataagaaaggcaa

SEQ ID NO: 442087 - DNA, 25 bp, Homo sapien
cctgggcacacccaaagatcctggg

SEQ ID NO: 442088 - DNA, 25 bp, Homo sapien
ggtgtttccgtagctacaggtggaa

SEQ ID NO: 442089 - DNA, 25 bp, Homo sapien
gtccaaaggaagatctggtacttca

SEQ ID NO: 442090 - DNA, 25 bp, Homo sapien
taggtccctctgtccaaatgcagtc

SEQ ID NO: 442091 - DNA, 25 bp, Homo sapien
ctcaggctgctttgtatggataagg

SEQ ID NO: 442092 - DNA, 25 bp, Homo sapien
tgcagagtggcaaagtaagtgtccc

SEQ ID NO: 442093 - DNA, 25 bp, Homo sapien
aataagagtcaaggacattaaattc

SEQ ID NO: 442094 - DNA, 25 bp, Homo sapien
gacattaaattcaagtatccattaa

SEQ ID NO: 442095 - DNA, 25 bp, Homo sapien
caaacacacctggataggatttttc

SEQ ID NO: 442096 - DNA, 25 bp, Homo sapien
aaacctaaagctacaaacacacctg

SEQ ID NO: 442097 - DNA, 25 bp, Homo sapien
taaaatgctcccttctggttttgga

SEQ ID NO: 442098 - DNA, 25 bp, Homo sapien
tcaaaccactacgaataaaatgctc

SEQ ID NO: 442099 - DNA, 25 bp, Homo sapien
tctgtttggcactgatgtacttgca

SEQ ID NO: 442100 - DNA, 25 bp, Homo sapien
gtctcctctggatctagtatactga

SEQ ID NO: 442101 - DNA, 25 bp, Homo sapien
gagaaagcaccaactaactaaagag

SEQ ID NO: 442102 - DNA, 25 bp, Homo sapien
taccccaggacttacattgatagca

SEQ ID NO: 442103 - DNA, 25 bp, Homo sapien
gccagcaagcatggtttctcctgag

SEQ ID NO: 442104 - DNA, 25 bp, Homo sapien
tttggcttgacgactgctaccttct

SEQ ID NO: 442105 - DNA, 25 bp, Homo sapien
cttgctacacatggccaagccagtc

SEQ ID NO: 442106 - DNA, 25 bp, Homo sapien
tcaatgccaaaggtgatatgatgag

SEQ ID NO: 442107 - DNA, 25 bp, Homo sapien
gccaaaggtgatatgatgagttcct

SEQ ID NO: 442108 - DNA, 25 bp, Homo sapien
caagccagtccagagatcacctcca

SEQ ID NO: 442109 - DNA, 25 bp, Homo sapien
ctttttaagggagatcacattttca

SEQ ID NO: 442110 - DNA, 25 bp, Homo sapien
attttcaggattctgaatcagagag

SEQ ID NO: 442111 - DNA, 25 bp, Homo sapien
ttttaagggagatcacattttcagg

SEQ ID NO: 442112 - DNA, 25 bp, Homo sapien
ttaagggagatcacattttcaggat

SEQ ID NO: 442113 - DNA, 25 bp, Homo sapien
tgatttcgatgggatccttttcatc

SEQ ID NO: 442114 - DNA, 25 bp, Homo sapien
tcaaatgatttcgatgggatccttt

SEQ ID NO: 442115 - DNA, 25 bp, Homo sapien
gatagatgttgatcaaatgatttcg

SEQ ID NO: 442116 - DNA, 25 bp, Homo sapien
gatgttgatcaaatgatttcgatgg

SEQ ID NO: 442117 - DNA, 25 bp, Homo sapien
tgcattttcatcttgagtagcagct

SEQ ID NO: 442118 - DNA, 25 bp, Homo sapien
catcttgagtagcagctctagtaca

SEQ ID NO: 442119 - DNA, 25 bp, Homo sapien
gagtagcagctctagtacaagaaac

SEQ ID NO: 442120 - DNA, 25 bp, Homo sapien
gctctagtacaagaaacttcatctg

SEQ ID NO: 442121 - DNA, 25 bp, Homo sapien
ttacagtaggacatttgaggcacaa

SEQ ID NO: 442122 - DNA, 25 bp, Homo sapien
gcccacctggagttgacactgatgt

SEQ ID NO: 442123 - DNA, 25 bp, Homo sapien
catgtcttacgttgtctctcaaagc

SEQ ID NO: 442124 - DNA, 25 bp, Homo sapien
tacctggagtattgtgaagcccacc

SEQ ID NO: 442125 - DNA, 25 bp, Homo sapien
tgcaattctttctgagtgcacacag

SEQ ID NO: 442126 - DNA, 25 bp, Homo sapien
cagtgatctgccaatccctccacat

SEQ ID NO: 442127 - DNA, 25 bp, Homo sapien
ttctgagtgcacacagaagttgcca

SEQ ID NO: 442128 - DNA, 25 bp, Homo sapien
gaagttgccagtgatctgccaatcc

SEQ ID NO: 442129 - DNA, 25 bp, Homo sapien
gaggctataggcaattcatgacgaa

SEQ ID NO: 442130 - DNA, 25 bp, Homo sapien
caagacttggccctgtcaaccacag

SEQ ID NO: 442131 - DNA, 25 bp, Homo sapien
gaaagtttccgtgaatagtggtggc

SEQ ID NO: 442132 - DNA, 25 bp, Homo sapien
agcaaccaatatgaatgtcccttgg

SEQ ID NO: 442133 - DNA, 25 bp, Homo sapien
atgggcaagggctcaagcaggaaca

SEQ ID NO: 442134 - DNA, 25 bp, Homo sapien
tgtgttgagaacagactgcagatgg

SEQ ID NO: 442135 - DNA, 25 bp, Homo sapien
caggaacagacaagctccaaggcta

SEQ ID NO: 442136 - DNA, 25 bp, Homo sapien
gttgagaacagactgcagatgggca

SEQ ID NO: 442137 - DNA, 25 bp, Homo sapien
ctgcaaagggctgtatagtattttc

SEQ ID NO: 442138 - DNA, 25 bp, Homo sapien
aaaacacatctgcatcccctgggaa

SEQ ID NO: 442139 - DNA, 25 bp, Homo sapien
gtacaagcaagaacctagccattag

SEQ ID NO: 442140 - DNA, 25 bp, Homo sapien
tcaaccttaaagatgtggtacagcc

SEQ ID NO: 442141 - DNA, 25 bp, Homo sapien
acatacacaaatcgccacattttgc

SEQ ID NO: 442142 - DNA, 25 bp, Homo sapien
aaacatacacaaatcgccacatttt

SEQ ID NO: 442143 - DNA, 25 bp, Homo sapien
acacaaatcgccacattttgcttcc

SEQ ID NO: 442144 - DNA, 25 bp, Homo sapien
ctcttgcccaatacccaaaacatac

SEQ ID NO: 442145 - DNA, 25 bp, Homo sapien
tttcaacgcacttggtaaaatcatt

SEQ ID NO: 442146 - DNA, 25 bp, Homo sapien
gacaagttttcaacgcacttggtaa

SEQ ID NO: 442147 - DNA, 25 bp, Homo sapien
ttcaacgcacttggtaaaatcatta

SEQ ID NO: 442148 - DNA, 25 bp, Homo sapien
gttttcaacgcacttggtaaaatca

SEQ ID NO: 442149 - DNA, 25 bp, Homo sapien
atattgccgaggaacactgcccggg

SEQ ID NO: 442150 - DNA, 25 bp, Homo sapien
gaggccccaaacataacaagaagag

SEQ ID NO: 442151 - DNA, 25 bp, Homo sapien
taacgctggtcctttcacgcagagt

SEQ ID NO: 442152 - DNA, 25 bp, Homo sapien
tcacaggtctaggataagctcgccc

SEQ ID NO: 442153 - DNA, 25 bp, Homo sapien
cagggaccatgaaaataaaaccgtg

SEQ ID NO: 442154 - DNA, 25 bp, Homo sapien
atgaaaataaaaccgtgatagccct

SEQ ID NO: 442155 - DNA, 25 bp, Homo sapien
gaccatgaaaataaaaccgtgatag

SEQ ID NO: 442156 - DNA, 25 bp, Homo sapien
ccatgaaaataaaaccgtgatagcc

SEQ ID NO: 442157 - DNA, 25 bp, Homo sapien
ggtcttctcaacagcagcttcatca

SEQ ID NO: 442158 - DNA, 25 bp, Homo sapien
tgggtcttctcaacagcagcttcat

SEQ ID NO: 442159 - DNA, 25 bp, Homo sapien
ttgggtcttctcaacagcagcttca

SEQ ID NO: 442160 - DNA, 25 bp, Homo sapien
gggtcttctcaacagcagcttcatc

SEQ ID NO: 442161 - DNA, 25 bp, Homo sapien
tcagcagaggtgacaatcccacaca

SEQ ID NO: 442162 - DNA, 25 bp, Homo sapien
gagcccttggtggttgtagcaaccg

SEQ ID NO: 442163 - DNA, 25 bp, Homo sapien
tcctgattggcaggacatgagggca

SEQ ID NO: 442164 - DNA, 25 bp, Homo sapien
tgacgagtcctggaaaagactgctg

SEQ ID NO: 442165 - DNA, 25 bp, Homo sapien
acctgctcaaggatcacatgagtag

SEQ ID NO: 442166 - DNA, 25 bp, Homo sapien
ctgatgctagaagaggttaataacc

SEQ ID NO: 442167 - DNA, 25 bp, Homo sapien
ttggctacccctaatcttcatgact

SEQ ID NO: 442168 - DNA, 25 bp, Homo sapien
tagttttggctacccctaatcttca

SEQ ID NO: 442169 - DNA, 25 bp, Homo sapien
caggtaccatattgaaaacaagggc

SEQ ID NO: 442170 - DNA, 25 bp, Homo sapien
tttcatgacccagaacacagctgct

SEQ ID NO: 442171 - DNA, 25 bp, Homo sapien
ttttcatgacccagaacacagctgc

SEQ ID NO: 442172 - DNA, 25 bp, Homo sapien
gccctgagacaggtaccatattgaa

SEQ ID NO: 442173 - DNA, 25 bp, Homo sapien
gtccacttcgtcaaactcacagcag

SEQ ID NO: 442174 - DNA, 25 bp, Homo sapien
ggtgatgtccacttcgtcaaactca

SEQ ID NO: 442175 - DNA, 25 bp, Homo sapien
gatgtccacttcgtcaaactcacag

SEQ ID NO: 442176 - DNA, 25 bp, Homo sapien
actgcaggtgatgtccacttcgtca

SEQ ID NO: 442177 - DNA, 25 bp, Homo sapien
tcagccattaaatgccaacagccca

SEQ ID NO: 442178 - DNA, 25 bp, Homo sapien
agcccagaggaacagatcctccagg

SEQ ID NO: 442179 - DNA, 25 bp, Homo sapien
taatgaagtatctcacatgatatgc

SEQ ID NO: 442180 - DNA, 25 bp, Homo sapien
aaaacactcagccattaaatgccaa

SEQ ID NO: 442181 - DNA, 25 bp, Homo sapien
tatggtagtctacaccaaagaaaga

SEQ ID NO: 442182 - DNA, 25 bp, Homo sapien
tagagtcacatgtaaacaaagtcct

SEQ ID NO: 442183 - DNA, 25 bp, Homo sapien
gatggaatcatcctccatgagaaca

SEQ ID NO: 442184 - DNA, 25 bp, Homo sapien
aagttacatgccctgtttccagaaa

SEQ ID NO: 442185 - DNA, 25 bp, Homo sapien
cctgttagtgaaagatctcgaagcc

SEQ ID NO: 442186 - DNA, 25 bp, Homo sapien
tatcgtacattatttcagggtcaag

SEQ ID NO: 442187 - DNA, 25 bp, Homo sapien
tgtcatcttggaagcccaaagaacc

SEQ ID NO: 442188 - DNA, 25 bp, Homo sapien
catttctggccaagtcaggaatagt

SEQ ID NO: 442189 - DNA, 25 bp, Homo sapien
ggaatgattctctaatgtctccact

SEQ ID NO: 442190 - DNA, 25 bp, Homo sapien
gtgtgtgcgcatctttatttcctcc

SEQ ID NO: 442191 - DNA, 25 bp, Homo sapien
gaaaatgtgtttagttactggtcca

SEQ ID NO: 442192 - DNA, 25 bp, Homo sapien
tattagaagatgtaggaccacgtgg

SEQ ID NO: 442193 - DNA, 25 bp, Homo sapien
catggcacccatatttgtgctggga

SEQ ID NO: 442194 - DNA, 25 bp, Homo sapien
ggatgctagttaagagctgcctgaa

SEQ ID NO: 442195 - DNA, 25 bp, Homo sapien
gtcaattttagagaactccagccca

SEQ ID NO: 442196 - DNA, 25 bp, Homo sapien
actggaccaaggagggacatgtgct

SEQ ID NO: 442197 - DNA, 25 bp, Homo sapien
ggaagaagccatctcagtagccctg

SEQ ID NO: 442198 - DNA, 25 bp, Homo sapien
gactctaacacaataggcctaggga

SEQ ID NO: 442199 - DNA, 25 bp, Homo sapien
cagggtatcttgttaccacgcgact

SEQ ID NO: 442200 - DNA, 25 bp, Homo sapien
tgccagataaaaggagacaggtacc

SEQ ID NO: 442201 - DNA, 25 bp, Homo sapien
tcagcctgatcctctttccacatgt

SEQ ID NO: 442202 - DNA, 25 bp, Homo sapien
ttcagcctgatcctctttccacatg

SEQ ID NO: 442203 - DNA, 25 bp, Homo sapien
cttcagcctgatcctctttccacat

SEQ ID NO: 442204 - DNA, 25 bp, Homo sapien
gattaggccctagaggaaatttcag

SEQ ID NO: 442205 - DNA, 25 bp, Homo sapien
tcaaaatccgatcacgattaggccc

SEQ ID NO: 442206 - DNA, 25 bp, Homo sapien
atgtgacaatctcaaaatccgatca

SEQ ID NO: 442207 - DNA, 25 bp, Homo sapien
tccgatcacgattaggccctagagg

SEQ ID NO: 442208 - DNA, 25 bp, Homo sapien
gaacatattataagtaggaaacaca

SEQ ID NO: 442209 - DNA, 25 bp, Homo sapien
tacgaattggttaaattcacttata

SEQ ID NO: 442210 - DNA, 25 bp, Homo sapien
actaagcatagtaaatacgaattgg

SEQ ID NO: 442211 - DNA, 25 bp, Homo sapien
tatctaagaagtttgaaaatgcagg

SEQ ID NO: 442212 - DNA, 25 bp, Homo sapien
cagttaaattcataaggtttggcca

SEQ ID NO: 442213 - DNA, 25 bp, Homo sapien
tctgccagttaaattcataaggttt

SEQ ID NO: 442214 - DNA, 25 bp, Homo sapien
ctcgtatctgtcaaaaactgctcct

SEQ ID NO: 442215 - DNA, 25 bp, Homo sapien
ctcctcgtatctgtcaaaaactgct

SEQ ID NO: 442216 - DNA, 25 bp, Homo sapien
ggctgttcatgtaccaaccatagaa

SEQ ID NO: 442217 - DNA, 25 bp, Homo sapien
caaaaggtacctttgctatgacact

SEQ ID NO: 442218 - DNA, 25 bp, Homo sapien
tggctctggctctaaagaactgagt

SEQ ID NO: 442219 - DNA, 25 bp, Homo sapien
gaaacgaaccttttctgcttacatg

SEQ ID NO: 442220 - DNA, 25 bp, Homo sapien
ccttgtaaatctagtgggaccccag

SEQ ID NO: 442221 - DNA, 25 bp, Homo sapien
gagcagtctgttatgtatgcagcaa

SEQ ID NO: 442222 - DNA, 25 bp, Homo sapien
gaacccctaggtgcttacacttata

SEQ ID NO: 442223 - DNA, 25 bp, Homo sapien
tgccctaccccacaaaaatgagagc

SEQ ID NO: 442224 - DNA, 25 bp, Homo sapien
cagaagagccgtggaggtgccagca

SEQ ID NO: 442225 - DNA, 25 bp, Homo sapien
agaaaagttgacagcagaagagccg

SEQ ID NO: 442226 - DNA, 25 bp, Homo sapien
tcacatgtctacaaagttaagagga

SEQ ID NO: 442227 - DNA, 25 bp, Homo sapien
catgtctacaaagttaagaggatca

SEQ ID NO: 442228 - DNA, 25 bp, Homo sapien
tggtacaatcatagtactccagctt

SEQ ID NO: 442229 - DNA, 25 bp, Homo sapien
tggaaggatatagaatgttcattcc

SEQ ID NO: 442230 - DNA, 25 bp, Homo sapien
tctcctatctgctttaagatcccag

SEQ ID NO: 442231 - DNA, 25 bp, Homo sapien
tctgctttaagatcccaggagataa

SEQ ID NO: 442232 - DNA, 25 bp, Homo sapien
atagaatgttcattccatttgtgcc

SEQ ID NO: 442233 - DNA, 25 bp, Homo sapien
gtctgtatcttatactgtggagttg

SEQ ID NO: 442234 - DNA, 25 bp, Homo sapien
tgtatcttatactgtggagttggca

SEQ ID NO: 442235 - DNA, 25 bp, Homo sapien
taagttaactgcaaatgtctgtatc

SEQ ID NO: 442236 - DNA, 25 bp, Homo sapien
tctctcgccatcacttcctaagtta

SEQ ID NO: 442237 - DNA, 25 bp, Homo sapien
gtctctttctactgcccttggtgca

SEQ ID NO: 442238 - DNA, 25 bp, Homo sapien
gatctgggatccttcaaattttatc

SEQ ID NO: 442239 - DNA, 25 bp, Homo sapien
ctggccgaaaaggtcctgaacgatc

SEQ ID NO: 442240 - DNA, 25 bp, Homo sapien
tcattctacagaccttgtcttcatt

SEQ ID NO: 442241 - DNA, 25 bp, Homo sapien
cactagcatctggtcacttattgaa

SEQ ID NO: 442242 - DNA, 25 bp, Homo sapien
tctggccagtccagcatgctgcaaa

SEQ ID NO: 442243 - DNA, 25 bp, Homo sapien
tgaccctcaaatttgtaagagcagc

SEQ ID NO: 442244 - DNA, 25 bp, Homo sapien
tagtcctcaggacttggttctggga

SEQ ID NO: 442245 - DNA, 25 bp, Homo sapien
cattaccacctggacatttcaattc

SEQ ID NO: 442246 - DNA, 25 bp, Homo sapien
tatcccttttgattatccctgccaa

SEQ ID NO: 442247 - DNA, 25 bp, Homo sapien
tcacaggtggttcgcaacttccatg

SEQ ID NO: 442248 - DNA, 25 bp, Homo sapien
ttctagcccctagctctacagttct

SEQ ID NO: 442249 - DNA, 25 bp, Homo sapien
cattagctattacccaaaaggccat

SEQ ID NO: 442250 - DNA, 25 bp, Homo sapien
agcattagctattacccaaaaggcc

SEQ ID NO: 442251 - DNA, 25 bp, Homo sapien
aaagcattagctattacccaaaagg

SEQ ID NO: 442252 - DNA, 25 bp, Homo sapien
ctgaaaagcattagctattacccaa

SEQ ID NO: 442253 - DNA, 25 bp, Homo sapien
caaactcatccactttgaagaggca

SEQ ID NO: 442254 - DNA, 25 bp, Homo sapien
ctccatgtcagaaagaagccaaact

SEQ ID NO: 442255 - DNA, 25 bp, Homo sapien
aatactgttgatgagggagcattct

SEQ ID NO: 442256 - DNA, 25 bp, Homo sapien
gctcccgaccgaatactgttgatga

SEQ ID NO: 442257 - DNA, 25 bp, Homo sapien
accgaatactgttgatgagggagca

SEQ ID NO: 442258 - DNA, 25 bp, Homo sapien
ctttggtatggctcccgaccgaata

SEQ ID NO: 442259 - DNA, 25 bp, Homo sapien
tttcagccaccatgtaggtaaaact

SEQ ID NO: 442260 - DNA, 25 bp, Homo sapien
atctgtgccactgcagacacaaact

SEQ ID NO: 442261 - DNA, 25 bp, Homo sapien
tatccgcccttccagatcattttct

SEQ ID NO: 442262 - DNA, 25 bp, Homo sapien
caccatgtaggtaaaactaatgttc

SEQ ID NO: 442263 - DNA, 25 bp, Homo sapien
acaaggtgagctaccaaggtgtctc

SEQ ID NO: 442264 - DNA, 25 bp, Homo sapien
tgatttgggacttaccggtagagga

SEQ ID NO: 442265 - DNA, 25 bp, Homo sapien
tatatagaactgagcacaaatctcc

SEQ ID NO: 442266 - DNA, 25 bp, Homo sapien
cctaaataggtaagagtggcaacac

SEQ ID NO: 442267 - DNA, 25 bp, Homo sapien
ttcaactttgctagacaccaaaatc

SEQ ID NO: 442268 - DNA, 25 bp, Homo sapien
tcaactttgctagacaccaaaatcc

SEQ ID NO: 442269 - DNA, 25 bp, Homo sapien
caactttgctagacaccaaaatcct

SEQ ID NO: 442270 - DNA, 25 bp, Homo sapien
actttgctagacaccaaaatccttc

SEQ ID NO: 442271 - DNA, 25 bp, Homo sapien
ggagatgttgaatgaggcctgcatt

SEQ ID NO: 442272 - DNA, 25 bp, Homo sapien
gaatgaggcctgcatttccatctta

SEQ ID NO: 442273 - DNA, 25 bp, Homo sapien
gatgttgaatgaggcctgcatttcc

SEQ ID NO: 442274 - DNA, 25 bp, Homo sapien
tatggagatgttgaatgaggcctgc

SEQ ID NO: 442275 - DNA, 25 bp, Homo sapien
tggacaagcccctaaggatcctaag

SEQ ID NO: 442276 - DNA, 25 bp, Homo sapien
taactgattgaagccgagaacaact

SEQ ID NO: 442277 - DNA, 25 bp, Homo sapien
catagcaggtcatgcaactaacagg

SEQ ID NO: 442278 - DNA, 25 bp, Homo sapien
tatcctagtagctgactcctggtgt

SEQ ID NO: 442279 - DNA, 25 bp, Homo sapien
aggctaagggccagcgttcccaaag

SEQ ID NO: 442280 - DNA, 25 bp, Homo sapien
gaggctaagggccagcgttcccaaa

SEQ ID NO: 442281 - DNA, 25 bp, Homo sapien
ccagaggctaagggccagcgttccc

SEQ ID NO: 442282 - DNA, 25 bp, Homo sapien
agaggctaagggccagcgttcccaa

SEQ ID NO: 442283 - DNA, 25 bp, Homo sapien
gggccaccaactgtccagtccagac

SEQ ID NO: 442284 - DNA, 25 bp, Homo sapien
tgggccaccaactgtccagtccaga

SEQ ID NO: 442285 - DNA, 25 bp, Homo sapien
ttgggccaccaactgtccagtccag

SEQ ID NO: 442286 - DNA, 25 bp, Homo sapien
catgcacttggagcaaactatgaag

SEQ ID NO: 442287 - DNA, 25 bp, Homo sapien
caaggtgcctaaattgctctatcca

SEQ ID NO: 442288 - DNA, 25 bp, Homo sapien
gctattcagtgcaggaactacacct

SEQ ID NO: 442289 - DNA, 25 bp, Homo sapien
gaattctgttaagacctaaagggca

SEQ ID NO: 442290 - DNA, 25 bp, Homo sapien
gattgaagttcacatttcttgtatg

SEQ ID NO: 442291 - DNA, 25 bp, Homo sapien
tgcaagatgctataggcagcagctt

SEQ ID NO: 442292 - DNA, 25 bp, Homo sapien
cttgtatgtggaagcaagaggatgc

SEQ ID NO: 442293 - DNA, 25 bp, Homo sapien
caagaggatgcaagatgctataggc

SEQ ID NO: 442294 - DNA, 25 bp, Homo sapien
aggcctccggctgaatcaatcttca

SEQ ID NO: 442295 - DNA, 25 bp, Homo sapien
ataggaatccacgttttaatcagcc

SEQ ID NO: 442296 - DNA, 25 bp, Homo sapien
gaagcactgttgcaaacccttacta

SEQ ID NO: 442297 - DNA, 25 bp, Homo sapien
cattttagcatgatccccagatgac

SEQ ID NO: 442298 - DNA, 25 bp, Homo sapien
tagatgggattgtgggtgcccacca

SEQ ID NO: 442299 - DNA, 25 bp, Homo sapien
gtcggccagggtgtgttgaactcct

SEQ ID NO: 442300 - DNA, 25 bp, Homo sapien
accatgtcggccagggtgtgttgaa

SEQ ID NO: 442301 - DNA, 25 bp, Homo sapien
agcctcatgagtagatgggattgtg

SEQ ID NO: 442302 - DNA, 25 bp, Homo sapien
tgaggcatgtcattggactgacgtt

SEQ ID NO: 442303 - DNA, 25 bp, Homo sapien
tggactgacgttgttggccctgaag

SEQ ID NO: 442304 - DNA, 25 bp, Homo sapien
tgtttcttgaggcatgtcattggac

SEQ ID NO: 442305 - DNA, 25 bp, Homo sapien
tggccctgaagttgtgtatgattga

SEQ ID NO: 442306 - DNA, 25 bp, Homo sapien
gccaagaaaaacgagtaatgcaaac

SEQ ID NO: 442307 - DNA, 25 bp, Homo sapien
ctgccaagaaaaacgagtaatgcaa

SEQ ID NO: 442308 - DNA, 25 bp, Homo sapien
gaaaaacgagtaatgcaaacaacac

SEQ ID NO: 442309 - DNA, 25 bp, Homo sapien
caagaaaaacgagtaatgcaaacaa

SEQ ID NO: 442310 - DNA, 25 bp, Homo sapien
ggcccattgccaagtgagtatgatg

SEQ ID NO: 442311 - DNA, 25 bp, Homo sapien
taggactaacctcttggcccattgc

SEQ ID NO: 442312 - DNA, 25 bp, Homo sapien
tgccacaatgaccagaagataagac

SEQ ID NO: 442313 - DNA, 25 bp, Homo sapien
gacatgacagtacctttaggactaa

SEQ ID NO: 442314 - DNA, 25 bp, Homo sapien
tgtgttggtcataaatgccaatttc

SEQ ID NO: 442315 - DNA, 25 bp, Homo sapien
ccatttgtgttggtcataaatgcca

SEQ ID NO: 442316 - DNA, 25 bp, Homo sapien
catttgtgttggtcataaatgccaa

SEQ ID NO: 442317 - DNA, 25 bp, Homo sapien
ctaactggaattttaccatttgtgt

SEQ ID NO: 442318 - DNA, 25 bp, Homo sapien
gcagcacgaagccagagaagtatcc

SEQ ID NO: 442319 - DNA, 25 bp, Homo sapien
acatgtagagagtaggcagcacgaa

SEQ ID NO: 442320 - DNA, 25 bp, Homo sapien
cacagagtgtgtggtgtcagttaca

SEQ ID NO: 442321 - DNA, 25 bp, Homo sapien
tggaaaggatagctccacagagtgt

SEQ ID NO: 442322 - DNA, 25 bp, Homo sapien
aaattacctctcattgcagatgttt

SEQ ID NO: 442323 - DNA, 25 bp, Homo sapien
gatgcaacttgaatctaagaccagg

SEQ ID NO: 442324 - DNA, 25 bp, Homo sapien
gagctggttagtctagtgatgcaac

SEQ ID NO: 442325 - DNA, 25 bp, Homo sapien
aagatccaggtcctactatggagag

SEQ ID NO: 442326 - DNA, 25 bp, Homo sapien
aacacacattccagttattgttcat

SEQ ID NO: 442327 - DNA, 25 bp, Homo sapien
aaagaaacacacattccagttattg

SEQ ID NO: 442328 - DNA, 25 bp, Homo sapien
aagaaacacacattccagttattgt

SEQ ID NO: 442329 - DNA, 25 bp, Homo sapien
gaaacacacattccagttattgttc

SEQ ID NO: 442330 - DNA, 25 bp, Homo sapien
tgggaagacctaactccttgagtgc

SEQ ID NO: 442331 - DNA, 25 bp, Homo sapien
gagtgcttgaaagatcaccttttct

SEQ ID NO: 442332 - DNA, 25 bp, Homo sapien
tctgtttttcccgatgcaaatgttc

SEQ ID NO: 442333 - DNA, 25 bp, Homo sapien
tcccgatgcaaatgttctagtaata

SEQ ID NO: 442334 - DNA, 25 bp, Homo sapien
tatctgtccgaggacaaatcttttg

SEQ ID NO: 442335 - DNA, 25 bp, Homo sapien
aaagatcttctatatctgtccgagg

SEQ ID NO: 442336 - DNA, 25 bp, Homo sapien
tccgaggacaaatcttttgtgtcag

SEQ ID NO: 442337 - DNA, 25 bp, Homo sapien
aaatgctgtgggctcaatttcatca

SEQ ID NO: 442338 - DNA, 25 bp, Homo sapien
gaaagctcactaattggtctaccgt

SEQ ID NO: 442339 - DNA, 25 bp, Homo sapien
cgttaaataatcagttttgtctcca

SEQ ID NO: 442340 - DNA, 25 bp, Homo sapien
aattggtctaccgttaaataatcag

SEQ ID NO: 442341 - DNA, 25 bp, Homo sapien
ttcatttagaaagctcactaattgg

SEQ ID NO: 442342 - DNA, 25 bp, Homo sapien
gactatgtggctaaggcattttgaa

SEQ ID NO: 442343 - DNA, 25 bp, Homo sapien
tcattatatgaaccagtggagtgga

SEQ ID NO: 442344 - DNA, 25 bp, Homo sapien
gaagccattgaaccttcacaaggaa

SEQ ID NO: 442345 - DNA, 25 bp, Homo sapien
tgcaaatgagactaggaccttgtcc

SEQ ID NO: 442346 - DNA, 25 bp, Homo sapien
catcgtctggcttcaatccaagtag

SEQ ID NO: 442347 - DNA, 25 bp, Homo sapien
gtgctgagaagaggcatcgtctggc

SEQ ID NO: 442348 - DNA, 25 bp, Homo sapien
tcgtctggcttcaatccaagtagca

SEQ ID NO: 442349 - DNA, 25 bp, Homo sapien
gctgagaagaggcatcgtctggctt

SEQ ID NO: 442350 - DNA, 25 bp, Homo sapien
taaataggaccttggtgacaactct

SEQ ID NO: 442351 - DNA, 25 bp, Homo sapien
tacccaaatatatgcacggactgaa

SEQ ID NO: 442352 - DNA, 25 bp, Homo sapien
tgggcattggaaaagtgagctatac

SEQ ID NO: 442353 - DNA, 25 bp, Homo sapien
tgtccctgcaatggtatcatcctaa

SEQ ID NO: 442354 - DNA, 25 bp, Homo sapien
aaatttcattcaatcgaggatctcg

SEQ ID NO: 442355 - DNA, 25 bp, Homo sapien
taaaatttcattcaatcgaggatct

SEQ ID NO: 442356 - DNA, 25 bp, Homo sapien
tttcattcaatcgaggatctcgttg

SEQ ID NO: 442357 - DNA, 25 bp, Homo sapien
aataaaatttcattcaatcgaggat

SEQ ID NO: 442358 - DNA, 25 bp, Homo sapien
tcttcatcaggttcatacatctcaa

SEQ ID NO: 442359 - DNA, 25 bp, Homo sapien
ttcatcaggttcatacatctcaatg

SEQ ID NO: 442360 - DNA, 25 bp, Homo sapien
ggttcatacatctcaatgatctgca

SEQ ID NO: 442361 - DNA, 25 bp, Homo sapien
tcaggttcatacatctcaatgatct

SEQ ID NO: 442362 - DNA, 25 bp, Homo sapien
ttcagtcaggattgactaattctga

SEQ ID NO: 442363 - DNA, 25 bp, Homo sapien
gcaaagcatttacagatacctttaa

SEQ ID NO: 442364 - DNA, 25 bp, Homo sapien
aatttatacgaacttaagagcagga

SEQ ID NO: 442365 - DNA, 25 bp, Homo sapien
caataaatgtaacagtatacttcag

SEQ ID NO: 442366 - DNA, 25 bp, Homo sapien
ttctaaacgatctaggaagactggg

SEQ ID NO: 442367 - DNA, 25 bp, Homo sapien
gatatctgcaaaacccatcacttga

SEQ ID NO: 442368 - DNA, 25 bp, Homo sapien
gaagaactgatgaagtagtgagcca

SEQ ID NO: 442369 - DNA, 25 bp, Homo sapien
tacatttctaccgaagacttcccgc

SEQ ID NO: 442370 - DNA, 25 bp, Homo sapien
ttgcttttccatgagttattattgg

SEQ ID NO: 442371 - DNA, 25 bp, Homo sapien
acattgcttttccatgagttattat

SEQ ID NO: 442372 - DNA, 25 bp, Homo sapien
cttttccatgagttattattggttc

SEQ ID NO: 442373 - DNA, 25 bp, Homo sapien
ttccatgagttattattggttcttg

SEQ ID NO: 442374 - DNA, 25 bp, Homo sapien
tacaggatattctgatgtgacaaat

SEQ ID NO: 442375 - DNA, 25 bp, Homo sapien
ttacaggatattctgatgtgacaaa

SEQ ID NO: 442376 - DNA, 25 bp, Homo sapien
tggacatcttgtactgttgatattt

SEQ ID NO: 442377 - DNA, 25 bp, Homo sapien
caggagatccccaaatagatcttcg

SEQ ID NO: 442378 - DNA, 25 bp, Homo sapien
tagatcttcgcaatatttggacatc

SEQ ID NO: 442379 - DNA, 25 bp, Homo sapien
tcaagtgcttgtttcaacaggagat

SEQ ID NO: 442380 - DNA, 25 bp, Homo sapien
gctgtcaatagcaggtctttccact

SEQ ID NO: 442381 - DNA, 25 bp, Homo sapien
tgtgatgttcttctgccactacctc

SEQ ID NO: 442382 - DNA, 25 bp, Homo sapien
catgctaccaggtttgagcccatca

SEQ ID NO: 442383 - DNA, 25 bp, Homo sapien
tggagctcataacatcttgtgattg

SEQ ID NO: 442384 - DNA, 25 bp, Homo sapien
ccccaagtgtcaggctgtatagtaa

SEQ ID NO: 442385 - DNA, 25 bp, Homo sapien
ggttcagaattagctttcccaagtg

SEQ ID NO: 442386 - DNA, 25 bp, Homo sapien
tatctggtaaagtgcaagggacaat

SEQ ID NO: 442387 - DNA, 25 bp, Homo sapien
gaaatccacatagtttccagaggtg

SEQ ID NO: 442388 - DNA, 25 bp, Homo sapien
cttcaggtttcagccgcttgttttt

SEQ ID NO: 442389 - DNA, 25 bp, Homo sapien
cattatcgtcctctaagatgtttgc

SEQ ID NO: 442390 - DNA, 25 bp, Homo sapien
ctcctcttcattatcgtcctctaag

SEQ ID NO: 442391 - DNA, 25 bp, Homo sapien
atcgtcctctaagatgtttgctggg

SEQ ID NO: 442392 - DNA, 25 bp, Homo sapien
tcttcattatcgtcctctaagatgt

SEQ ID NO: 442393 - DNA, 25 bp, Homo sapien
gtagaacataagcacttttagagaa

SEQ ID NO: 442394 - DNA, 25 bp, Homo sapien
ggtagaacataagcacttttagaga

SEQ ID NO: 442395 - DNA, 25 bp, Homo sapien
ccaagtagtcagaccttgttcacaa

SEQ ID NO: 442396 - DNA, 25 bp, Homo sapien
gaaaatccatgacaccaaaccactg

SEQ ID NO: 442397 - DNA, 25 bp, Homo sapien
caaatggaaaatccatgacaccaaa

SEQ ID NO: 442398 - DNA, 25 bp, Homo sapien
aaccactgccaagtagtcagacctt

SEQ ID NO: 442399 - DNA, 25 bp, Homo sapien
caaatttgaattcggggtgagcttc

SEQ ID NO: 442400 - DNA, 25 bp, Homo sapien
tccaaatttgaattcggggtgagct

SEQ ID NO: 442401 - DNA, 25 bp, Homo sapien
acgctatttgcaacagcttccttgt

SEQ ID NO: 442402 - DNA, 25 bp, Homo sapien
agcttccttgtgacccaagtcatca

SEQ ID NO: 442403 - DNA, 25 bp, Homo sapien
tataggttactttattctcttgtgg

SEQ ID NO: 442404 - DNA, 25 bp, Homo sapien
taaataacagctgctacctcttgag

SEQ ID NO: 442405 - DNA, 25 bp, Homo sapien
gctgctacctcttgagagtgatgaa

SEQ ID NO: 442406 - DNA, 25 bp, Homo sapien
gtgatgaaagaaaggggactctgac

SEQ ID NO: 442407 - DNA, 25 bp, Homo sapien
cccaaagttagacagttaggaaatg

SEQ ID NO: 442408 - DNA, 25 bp, Homo sapien
gttaggaaatgaacccagagaaaga

SEQ ID NO: 442409 - DNA, 25 bp, Homo sapien
gacagttaggaaatgaacccagaga

SEQ ID NO: 442410 - DNA, 25 bp, Homo sapien
gttagacagttaggaaatgaaccca

SEQ ID NO: 442411 - DNA, 25 bp, Homo sapien
tgaaataggtgttatcgtcttcact

SEQ ID NO: 442412 - DNA, 25 bp, Homo sapien
accacgctaagctcttgacatgtca

SEQ ID NO: 442413 - DNA, 25 bp, Homo sapien
ggtgttatcgtcttcactttgcaga

SEQ ID NO: 442414 - DNA, 25 bp, Homo sapien
ttacaggagttaccatgtaccaggc

SEQ ID NO: 442415 - DNA, 25 bp, Homo sapien
gacgccagtgatcatgaggataatg

SEQ ID NO: 442416 - DNA, 25 bp, Homo sapien
ggctccacttttaactagggctcca

SEQ ID NO: 442417 - DNA, 25 bp, Homo sapien
tatatacgcgtgataatgacgccag

SEQ ID NO: 442418 - DNA, 25 bp, Homo sapien
gctcaacctgtcttctatatacgcg

SEQ ID NO: 442419 - DNA, 25 bp, Homo sapien
ggtggccaactattcaacctctgtt

SEQ ID NO: 442420 - DNA, 25 bp, Homo sapien
tgtgtgatccagtgtcaccaccctg

SEQ ID NO: 442421 - DNA, 25 bp, Homo sapien
taaggttgccaacgacctccatgct

SEQ ID NO: 442422 - DNA, 25 bp, Homo sapien
tgctcctgtgaagggccacaccttt

SEQ ID NO: 442423 - DNA, 25 bp, Homo sapien
tttgttgttttcatgttcaaggtca

SEQ ID NO: 442424 - DNA, 25 bp, Homo sapien
tgttgttttcatgttcaaggtcatc

SEQ ID NO: 442425 - DNA, 25 bp, Homo sapien
ttgttttcatgttcaaggtcatctg

SEQ ID NO: 442426 - DNA, 25 bp, Homo sapien
tgttttcatgttcaaggtcatctga

SEQ ID NO: 442427 - DNA, 25 bp, Homo sapien
gatacgtgctgcagatttccttaat

SEQ ID NO: 442428 - DNA, 25 bp, Homo sapien
caattatgctaaaggatactttaag

SEQ ID NO: 442429 - DNA, 25 bp, Homo sapien
cacacaaattgaaaggtaaaggctt

SEQ ID NO: 442430 - DNA, 25 bp, Homo sapien
ttgatgacttcagtaggacccacgg

SEQ ID NO: 442431 - DNA, 25 bp, Homo sapien
gatggatattagtggtagcacctac

SEQ ID NO: 442432 - DNA, 25 bp, Homo sapien
ctgggcgtagttgatcattgtggac

SEQ ID NO: 442433 - DNA, 25 bp, Homo sapien
tataagatgccatccacgcctgctc

SEQ ID NO: 442434 - DNA, 25 bp, Homo sapien
cattgtggacaaatatggatggata

SEQ ID NO: 442435 - DNA, 25 bp, Homo sapien
aacaaattagataaaagctcatcag

SEQ ID NO: 442436 - DNA, 25 bp, Homo sapien
gcccccatgcccacaaagaaaaatg

SEQ ID NO: 442437 - DNA, 25 bp, Homo sapien
gataaaagctcatcagcaccataaa

SEQ ID NO: 442438 - DNA, 25 bp, Homo sapien
caaaaataaggtgaggtggaacagc

SEQ ID NO: 442439 - DNA, 25 bp, Homo sapien
caccacataccaaggtggcttctat

SEQ ID NO: 442440 - DNA, 25 bp, Homo sapien
caatgtaatgtcaccacataccaag

SEQ ID NO: 442441 - DNA, 25 bp, Homo sapien
ccacataccaaggtggcttctatgg

SEQ ID NO: 442442 - DNA, 25 bp, Homo sapien
cacataccaaggtggcttctatggt

SEQ ID NO: 442443 - DNA, 25 bp, Homo sapien
gaagaagctacatgcccagcactaa

SEQ ID NO: 442444 - DNA, 25 bp, Homo sapien
tgatgattacgatggcttctctagc

SEQ ID NO: 442445 - DNA, 25 bp, Homo sapien
ggccttggaggctaatgctacatta

SEQ ID NO: 442446 - DNA, 25 bp, Homo sapien
gcaattacaccctgaatcatgaggc

SEQ ID NO: 442447 - DNA, 25 bp, Homo sapien
tagccaagaccgactgattcattaa

SEQ ID NO: 442448 - DNA, 25 bp, Homo sapien
tcttcaagtagccaagaccgactga

SEQ ID NO: 442449 - DNA, 25 bp, Homo sapien
catgtgtcttcaagtagccaagacc

SEQ ID NO: 442450 - DNA, 25 bp, Homo sapien
gacatgttataatgaatattgcgtt

SEQ ID NO: 442451 - DNA, 25 bp, Homo sapien
actcattccacttgatacataagga

SEQ ID NO: 442452 - DNA, 25 bp, Homo sapien
cattccacttgatacataaggatac

SEQ ID NO: 442453 - DNA, 25 bp, Homo sapien
caaccactcattccacttgatacat

SEQ ID NO: 442454 - DNA, 25 bp, Homo sapien
ccactcattccacttgatacataag

SEQ ID NO: 442455 - DNA, 25 bp, Homo sapien
ctggaatcgactcggcctcccttgg

SEQ ID NO: 442456 - DNA, 25 bp, Homo sapien
gggtaaatgcgactcatttgccgtt

SEQ ID NO: 442457 - DNA, 25 bp, Homo sapien
aatctgaggcatgtaattactggaa

SEQ ID NO: 442458 - DNA, 25 bp, Homo sapien
agtgaaaccatctggcagccagcgt

SEQ ID NO: 442459 - DNA, 25 bp, Homo sapien
atgcccacagccaactgatgggaag

SEQ ID NO: 442460 - DNA, 25 bp, Homo sapien
tatataaatccaataacacattgct

SEQ ID NO: 442461 - DNA, 25 bp, Homo sapien
cagccaactgatgggaagtgctggc

SEQ ID NO: 442462 - DNA, 25 bp, Homo sapien
cattgctttgccatatgtctgcttc

SEQ ID NO: 442463 - DNA, 25 bp, Homo sapien
gactttgagtacactttggaggacc

SEQ ID NO: 442464 - DNA, 25 bp, Homo sapien
catgggcagttctcttaatagcaaa

SEQ ID NO: 442465 - DNA, 25 bp, Homo sapien
taagaaccatgctgtagaattgacc

SEQ ID NO: 442466 - DNA, 25 bp, Homo sapien
tatttgtttagtgaagtgcccctgc

SEQ ID NO: 442467 - DNA, 25 bp, Homo sapien
cgcacgatccattatactcaaattt

SEQ ID NO: 442468 - DNA, 25 bp, Homo sapien
ccgcacgatccattatactcaaatt

SEQ ID NO: 442469 - DNA, 25 bp, Homo sapien
ccctgattcaattgcatcgctaaat

SEQ ID NO: 442470 - DNA, 25 bp, Homo sapien
tttccctgattcaattgcatcgcta

SEQ ID NO: 442471 - DNA, 25 bp, Homo sapien
tcagtagaggacaaaggtttattcc

SEQ ID NO: 442472 - DNA, 25 bp, Homo sapien
gaatgaaattcagctcgacacccac

SEQ ID NO: 442473 - DNA, 25 bp, Homo sapien
tccagttaatgtccaagtgtgcagg

SEQ ID NO: 442474 - DNA, 25 bp, Homo sapien
tgcagggattattacctgtcccaga

SEQ ID NO: 442475 - DNA, 25 bp, Homo sapien
catcaaggataaggacttctggcca

SEQ ID NO: 442476 - DNA, 25 bp, Homo sapien
gagtacaacaaaccctgtgcgacag

SEQ ID NO: 442477 - DNA, 25 bp, Homo sapien
ccatggagtaaggtgagcgccagca

SEQ ID NO: 442478 - DNA, 25 bp, Homo sapien
tgaaggcaggccaaagtgacaggat

SEQ ID NO: 442479 - DNA, 25 bp, Homo sapien
ccatcgccatggaacacagaggcat

SEQ ID NO: 442480 - DNA, 25 bp, Homo sapien
caggtgacggcaatttcttctcttt

SEQ ID NO: 442481 - DNA, 25 bp, Homo sapien
ccacatctaccatcgccatggaaca

SEQ ID NO: 442482 - DNA, 25 bp, Homo sapien
gaggcatgcaggtgacggcaatttc

SEQ ID NO: 442483 - DNA, 25 bp, Homo sapien
tcccaggagggtatctgacgttttg

SEQ ID NO: 442484 - DNA, 25 bp, Homo sapien
tcccacaagatcagccagggagcac

SEQ ID NO: 442485 - DNA, 25 bp, Homo sapien
tactttgcacactgatgttctatat

SEQ ID NO: 442486 - DNA, 25 bp, Homo sapien
taacattcacacttattgggcccag

SEQ ID NO: 442487 - DNA, 25 bp, Homo sapien
cacaggagctaggattttaggcaga

SEQ ID NO: 442488 - DNA, 25 bp, Homo sapien
acacaggagctaggattttaggcag

SEQ ID NO: 442489 - DNA, 25 bp, Homo sapien
ctgtaacacaggagctaggatttta

SEQ ID NO: 442490 - DNA, 25 bp, Homo sapien
taacacaggagctaggattttaggc

SEQ ID NO: 442491 - DNA, 25 bp, Homo sapien
tagcatagaagtttattagtaggtt

SEQ ID NO: 442492 - DNA, 25 bp, Homo sapien
actcgctagttgaaacaatggatgc

SEQ ID NO: 442493 - DNA, 25 bp, Homo sapien
ttacaaagactaaaacactcgctag

SEQ ID NO: 442494 - DNA, 25 bp, Homo sapien
ctggtaggacaatagcatagaagtt

SEQ ID NO: 442495 - DNA, 25 bp, Homo sapien
catgaaatctggtttgagaaggtac

SEQ ID NO: 442496 - DNA, 25 bp, Homo sapien
gggtcaaatgttcgatcaggccgcc

SEQ ID NO: 442497 - DNA, 25 bp, Homo sapien
tgagcaagtggctgcaataacacca

SEQ ID NO: 442498 - DNA, 25 bp, Homo sapien
caggagtttcagagaaggggtcaaa

SEQ ID NO: 442499 - DNA, 25 bp, Homo sapien
cctctacgtaggtgccaattttctt

SEQ ID NO: 442500 - DNA, 25 bp, Homo sapien
tacgtatggtgtcagtgggcaaccc

SEQ ID NO: 442501 - DNA, 25 bp, Homo sapien
cgagttcggaattccttacgtatgg

SEQ ID NO: 442502 - DNA, 25 bp, Homo sapien
ggattgagtccattattcataacca

SEQ ID NO: 442503 - DNA, 25 bp, Homo sapien
gatcctctggccaatcagcttgttg

SEQ ID NO: 442504 - DNA, 25 bp, Homo sapien
gaaatgtgtcgatatccggcttgga

SEQ ID NO: 442505 - DNA, 25 bp, Homo sapien
gccatcaagcgggaggatcctctgg

SEQ ID NO: 442506 - DNA, 25 bp, Homo sapien
tcatacacagctattctcaagacag

SEQ ID NO: 442507 - DNA, 25 bp, Homo sapien
cccagataaaatagtgatgtgttcc

SEQ ID NO: 442508 - DNA, 25 bp, Homo sapien
ttgaacccttggctaatcggatgcc

SEQ ID NO: 442509 - DNA, 25 bp, Homo sapien
cacaataatgctatgagggaggtag

SEQ ID NO: 442510 - DNA, 25 bp, Homo sapien
tcaacaggctgacaatatagaggat

SEQ ID NO: 442511 - DNA, 25 bp, Homo sapien
gagggaatatcaatactccagggaa

SEQ ID NO: 442512 - DNA, 25 bp, Homo sapien
gcagcagatttgtgagtgaccctca

SEQ ID NO: 442513 - DNA, 25 bp, Homo sapien
ggaagtccctgacaccgcataatgt

SEQ ID NO: 442514 - DNA, 25 bp, Homo sapien
tatgaatgtgggaggttggctaaac

SEQ ID NO: 442515 - DNA, 25 bp, Homo sapien
taacttaccaagaggtacaggcaga

SEQ ID NO: 442516 - DNA, 25 bp, Homo sapien
tacagacttccagatgcttattggc

SEQ ID NO: 442517 - DNA, 25 bp, Homo sapien
gaagatagcaattccttagtacaga

SEQ ID NO: 442518 - DNA, 25 bp, Homo sapien
caatgtaggtgtctctaagaatgga

SEQ ID NO: 442519 - DNA, 25 bp, Homo sapien
catttcaagtatacacaaaagtgga

SEQ ID NO: 442520 - DNA, 25 bp, Homo sapien
gaacagtacaataacccctcatata

SEQ ID NO: 442521 - DNA, 25 bp, Homo sapien
taaggtgaattccatatatcagaac

SEQ ID NO: 442522 - DNA, 25 bp, Homo sapien
atttaatttggagccaaccatccca

SEQ ID NO: 442523 - DNA, 25 bp, Homo sapien
ggatctgataaagcatccacgatat

SEQ ID NO: 442524 - DNA, 25 bp, Homo sapien
tagctctcatttggtctgctctctt

SEQ ID NO: 442525 - DNA, 25 bp, Homo sapien
caatgcccatagctctcatttggtc

SEQ ID NO: 442526 - DNA, 25 bp, Homo sapien
cttttctgtaattgagagaaatttc

SEQ ID NO: 442527 - DNA, 25 bp, Homo sapien
tcttgtcatttttggaagtgtcact

SEQ ID NO: 442528 - DNA, 25 bp, Homo sapien
cactgggcacgtcggctatgtcact

SEQ ID NO: 442529 - DNA, 25 bp, Homo sapien
cacatttgctttggcggtgttggcc

SEQ ID NO: 442530 - DNA, 25 bp, Homo sapien
tggttggtctgagctcagagctact

SEQ ID NO: 442531 - DNA, 25 bp, Homo sapien
ttgcccttagcatgcccactttcaa

SEQ ID NO: 442532 - DNA, 25 bp, Homo sapien
tagcatgcccactttcaatgaattc

SEQ ID NO: 442533 - DNA, 25 bp, Homo sapien
caatgaattcttctgccaagactat

SEQ ID NO: 442534 - DNA, 25 bp, Homo sapien
tgcccactttcaatgaattcttctg

SEQ ID NO: 442535 - DNA, 25 bp, Homo sapien
tatccttacttgagggataagttca

SEQ ID NO: 442536 - DNA, 25 bp, Homo sapien
gctttaagtcttctatccttacttg

SEQ ID NO: 442537 - DNA, 25 bp, Homo sapien
aagtcttctatccttacttgaggga

SEQ ID NO: 442538 - DNA, 25 bp, Homo sapien
cttacttgagggataagttcaatac

SEQ ID NO: 442539 - DNA, 25 bp, Homo sapien
ctttaaagaatttagctccttctgc

SEQ ID NO: 442540 - DNA, 25 bp, Homo sapien
tctttaaagaatttagctccttctg

SEQ ID NO: 442541 - DNA, 25 bp, Homo sapien
ttctctttgtcatactgtgccacaa

SEQ ID NO: 442542 - DNA, 25 bp, Homo sapien
tcaacttgcgtgcagtgtaacttct

SEQ ID NO: 442543 - DNA, 25 bp, Homo sapien
tgtgccacaattttgtcaacttgcg

SEQ ID NO: 442544 - DNA, 25 bp, Homo sapien
ctctaggattttctcatgagtcgac

SEQ ID NO: 442545 - DNA, 25 bp, Homo sapien
gtgatctgatgtcagcgtctgaatt

SEQ ID NO: 442546 - DNA, 25 bp, Homo sapien
cttagatttgtgatctgatgtcagc

SEQ ID NO: 442547 - DNA, 25 bp, Homo sapien
tttgtgatctgatgtcagcgtctga

SEQ ID NO: 442548 - DNA, 25 bp, Homo sapien
tagatttgtgatctgatgtcagcgt

SEQ ID NO: 442549 - DNA, 25 bp, Homo sapien
tagacactagggtagaaagtcctcc

SEQ ID NO: 442550 - DNA, 25 bp, Homo sapien
tctgactgagcctgtgctagcctgc

SEQ ID NO: 442551 - DNA, 25 bp, Homo sapien
gacttactgtgtcaaccctgataga

SEQ ID NO: 442552 - DNA, 25 bp, Homo sapien
gctggaaagtacttgcccttctgct

SEQ ID NO: 442553 - DNA, 25 bp, Homo sapien
actgtgggtattgatcatttctgac

SEQ ID NO: 442554 - DNA, 25 bp, Homo sapien
ttgatcatttctgaccattcctttg

SEQ ID NO: 442555 - DNA, 25 bp, Homo sapien
gctgggtttgctgctcgtgggcatt

SEQ ID NO: 442556 - DNA, 25 bp, Homo sapien
cattgatgagtagctttttcagcag

SEQ ID NO: 442557 - DNA, 25 bp, Homo sapien
gtctgatagactttcctttgtgggt

SEQ ID NO: 442558 - DNA, 25 bp, Homo sapien
tctttgcggtgttctctgtctttct

SEQ ID NO: 442559 - DNA, 25 bp, Homo sapien
gttagtctgatagactttcctttgt

SEQ ID NO: 442560 - DNA, 25 bp, Homo sapien
ctttgcggtgttctctgtctttctt

SEQ ID NO: 442561 - DNA, 25 bp, Homo sapien
ttagcctggtgtgctcgcatttcct

SEQ ID NO: 442562 - DNA, 25 bp, Homo sapien
tttatcttggctgatggctttgcta

SEQ ID NO: 442563 - DNA, 25 bp, Homo sapien
tagatttatcttggctgatggcttt

SEQ ID NO: 442564 - DNA, 25 bp, Homo sapien
gatttatcttggctgatggctttgc

SEQ ID NO: 442565 - DNA, 25 bp, Homo sapien
atttatcttggctgatggctttgct

SEQ ID NO: 442566 - DNA, 25 bp, Homo sapien
gaggcttgcagaatgacccagtgga

SEQ ID NO: 442567 - DNA, 25 bp, Homo sapien
gagaggcttgcagaatgacccagtg

SEQ ID NO: 442568 - DNA, 25 bp, Homo sapien
ggcttgcagaatgacccagtggaac

SEQ ID NO: 442569 - DNA, 25 bp, Homo sapien
gggagaggcttgcagaatgacccag

SEQ ID NO: 442570 - DNA, 25 bp, Homo sapien
tggcccatccagaacggactgacac

SEQ ID NO: 442571 - DNA, 25 bp, Homo sapien
ctggcccatccagaacggactgaca

SEQ ID NO: 442572 - DNA, 25 bp, Homo sapien
aagaccgccctcctgactgttgctg

SEQ ID NO: 442573 - DNA, 25 bp, Homo sapien
agaaactttttagtgttgctgctgt

SEQ ID NO: 442574 - DNA, 25 bp, Homo sapien
gctgctgtttaactccctgactcgc

SEQ ID NO: 442575 - DNA, 25 bp, Homo sapien
gaaactttttagtgttgctgctgtt

SEQ ID NO: 442576 - DNA, 25 bp, Homo sapien
ttgctgctgtttaactccctgactc

SEQ ID NO: 442577 - DNA, 25 bp, Homo sapien
aactgatccatttctttggactgct

SEQ ID NO: 442578 - DNA, 25 bp, Homo sapien
gctggacttttttcaactgatccat

SEQ ID NO: 442579 - DNA, 25 bp, Homo sapien
taggaattctagatgttcaagctgg

SEQ ID NO: 442580 - DNA, 25 bp, Homo sapien
gaattctagatgttcaagctggact

SEQ ID NO: 442581 - DNA, 25 bp, Homo sapien
ggcatgtgtatcccaaagctggcta

SEQ ID NO: 442582 - DNA, 25 bp, Homo sapien
aattacaatatgcaagccactggtc

SEQ ID NO: 442583 - DNA, 25 bp, Homo sapien
gctgcctgcatgtttttacgtattt

SEQ ID NO: 442584 - DNA, 25 bp, Homo sapien
ttcaattacaatatgcaagccactg

SEQ ID NO: 442585 - DNA, 25 bp, Homo sapien
cgcccggcctggataactctttatt

SEQ ID NO: 442586 - DNA, 25 bp, Homo sapien
ggctcatgactttagataccacctg

SEQ ID NO: 442587 - DNA, 25 bp, Homo sapien
tcttgtcttgcagggaaaaagacca

SEQ ID NO: 442588 - DNA, 25 bp, Homo sapien
gactatggtatccactcatgctcag

SEQ ID NO: 442589 - DNA, 25 bp, Homo sapien
tgcccacctgtactatgcaccagat

SEQ ID NO: 442590 - DNA, 25 bp, Homo sapien
tgcccattggcctaactaaacagtt

SEQ ID NO: 442591 - DNA, 25 bp, Homo sapien
tgggctgtagcccatttggaaaggt

SEQ ID NO: 442592 - DNA, 25 bp, Homo sapien
ttaccttggtgctggtatatgccca

SEQ ID NO: 442593 - DNA, 25 bp, Homo sapien
aaccatgtattgtccccttggagtg

SEQ ID NO: 442594 - DNA, 25 bp, Homo sapien
tccccttggagtggacttgcttatg

SEQ ID NO: 442595 - DNA, 25 bp, Homo sapien
tggacttgcttatgaatagaagcac

SEQ ID NO: 442596 - DNA, 25 bp, Homo sapien
cttgcttatgaatagaagcacttag

SEQ ID NO: 442597 - DNA, 25 bp, Homo sapien
gagcaaaaacataagctaggtaact

SEQ ID NO: 442598 - DNA, 25 bp, Homo sapien
tatgagttggtcaaatgaattgtac

SEQ ID NO: 442599 - DNA, 25 bp, Homo sapien
gatggtgactttatccttactcata

SEQ ID NO: 442600 - DNA, 25 bp, Homo sapien
tgttgaatcactgaagtggcttcta

SEQ ID NO: 442601 - DNA, 25 bp, Homo sapien
caccgattaggagtagggtcacagg

SEQ ID NO: 442602 - DNA, 25 bp, Homo sapien
tactgacgcctggtttgtttctgcc

SEQ ID NO: 442603 - DNA, 25 bp, Homo sapien
caagtaggcaaggacataaagtggc

SEQ ID NO: 442604 - DNA, 25 bp, Homo sapien
caacactggtttagctaatggactg

SEQ ID NO: 442605 - DNA, 25 bp, Homo sapien
tgagtcatacatacaaaacgaagaa

SEQ ID NO: 442606 - DNA, 25 bp, Homo sapien
aaaattgagtcatacatacaaaacg

SEQ ID NO: 442607 - DNA, 25 bp, Homo sapien
tagtaatgtcaaaattgagtcatac

SEQ ID NO: 442608 - DNA, 25 bp, Homo sapien
aaaatagtaatgtcaaaattgagtc

SEQ ID NO: 442609 - DNA, 25 bp, Homo sapien
acactgcatgacaggatttcaaaag

SEQ ID NO: 442610 - DNA, 25 bp, Homo sapien
cttgcgtttgggacactgcatgaca

SEQ ID NO: 442611 - DNA, 25 bp, Homo sapien
gcgtttgggacactgcatgacagga

SEQ ID NO: 442612 - DNA, 25 bp, Homo sapien
gggacactgcatgacaggatttcaa

SEQ ID NO: 442613 - DNA, 25 bp, Homo sapien
gattttgcccaaccaaatgcacgta

SEQ ID NO: 442614 - DNA, 25 bp, Homo sapien
ccagctaattcgagaagaggaaagg

SEQ ID NO: 442615 - DNA, 25 bp, Homo sapien
gaatgttacaggaacatgcaggctt

SEQ ID NO: 442616 - DNA, 25 bp, Homo sapien
caacctcatgagttcagattgtcac

SEQ ID NO: 442617 - DNA, 25 bp, Homo sapien
ggccttacgtgtgttgaaatcctta

SEQ ID NO: 442618 - DNA, 25 bp, Homo sapien
catggccttacgtgtgttgaaatcc

SEQ ID NO: 442619 - DNA, 25 bp, Homo sapien
catcagaaacatggccttacgtgtg

SEQ ID NO: 442620 - DNA, 25 bp, Homo sapien
ctataacatcagaaacatggcctta

SEQ ID NO: 442621 - DNA, 25 bp, Homo sapien
tcggcttccaatttcaccatctgct

SEQ ID NO: 442622 - DNA, 25 bp, Homo sapien
actactgttgctggtctgcggtcca

SEQ ID NO: 442623 - DNA, 25 bp, Homo sapien
tgcggtccatctcggcttccaattt

SEQ ID NO: 442624 - DNA, 25 bp, Homo sapien
tccaatttcaccatctgctgcatct

SEQ ID NO: 442625 - DNA, 25 bp, Homo sapien
tggtggcatggctcaattcccagcg

SEQ ID NO: 442626 - DNA, 25 bp, Homo sapien
tagactaccgggtttccatgcgctc

SEQ ID NO: 442627 - DNA, 25 bp, Homo sapien
aatggttggactctgccttactgga

SEQ ID NO: 442628 - DNA, 25 bp, Homo sapien
tacaggaaattagcctctgatggca

SEQ ID NO: 442629 - DNA, 25 bp, Homo sapien
catttgggtgaaaaacatgctgagg

SEQ ID NO: 442630 - DNA, 25 bp, Homo sapien
tgttagtgccaaaagatatgtagtc

SEQ ID NO: 442631 - DNA, 25 bp, Homo sapien
tcttgggagcaaatactcttgacga

SEQ ID NO: 442632 - DNA, 25 bp, Homo sapien
cccctttgaaaataacgatgatatc

SEQ ID NO: 442633 - DNA, 25 bp, Homo sapien
gatttgatgatgagaagccactcag

SEQ ID NO: 442634 - DNA, 25 bp, Homo sapien
tataaatgcttatggtggcctagga

SEQ ID NO: 442635 - DNA, 25 bp, Homo sapien
tgcaatatgaactgacaatagcagg

SEQ ID NO: 442636 - DNA, 25 bp, Homo sapien
aactagtagtacctctccaaagcag

SEQ ID NO: 442637 - DNA, 25 bp, Homo sapien
taaagctattgagtcctgatgcaag

SEQ ID NO: 442638 - DNA, 25 bp, Homo sapien
caatattaaattggccttccttgga

SEQ ID NO: 442639 - DNA, 25 bp, Homo sapien
caaagttccgaaatgacagatggtc

SEQ ID NO: 442640 - DNA, 25 bp, Homo sapien
tctgtagggttcaatatgctgtgct

SEQ ID NO: 442641 - DNA, 25 bp, Homo sapien
tgacagctgccacctttcctaagtg

SEQ ID NO: 442642 - DNA, 25 bp, Homo sapien
tgtcccttgtgagaggctctctctt

SEQ ID NO: 442643 - DNA, 25 bp, Homo sapien
tctgggttctctttaatctgacagc

SEQ ID NO: 442644 - DNA, 25 bp, Homo sapien
tctgttgcagacttggagagttggc

SEQ ID NO: 442645 - DNA, 25 bp, Homo sapien
cttcagaaaccctgtgtctttgagg

SEQ ID NO: 442646 - DNA, 25 bp, Homo sapien
tctgcaaaggttccaaaagcagcag

SEQ ID NO: 442647 - DNA, 25 bp, Homo sapien
gtccaacccagcaagggcaagcgtg

SEQ ID NO: 442648 - DNA, 25 bp, Homo sapien
ttgtctgcaaaggttccaaaagcag

SEQ ID NO: 442649 - DNA, 25 bp, Homo sapien
gtaaaagtttacagcctgccaagtg

SEQ ID NO: 442650 - DNA, 25 bp, Homo sapien
tggtcctgaggcatgtgtactgaac

SEQ ID NO: 442651 - DNA, 25 bp, Homo sapien
caacaggttatacgaagagcttcaa

SEQ ID NO: 442652 - DNA, 25 bp, Homo sapien
tccagcaaagaccagaaataggcac

SEQ ID NO: 442653 - DNA, 25 bp, Homo sapien
gaggctgcttgtccctgtcctgaca

SEQ ID NO: 442654 - DNA, 25 bp, Homo sapien
gggagaggctgcttgtccctgtcct

SEQ ID NO: 442655 - DNA, 25 bp, Homo sapien
gtcctgacaccccaccccatggctc

SEQ ID NO: 442656 - DNA, 25 bp, Homo sapien
tgtcctgacaccccaccccatggct

SEQ ID NO: 442657 - DNA, 25 bp, Homo sapien
tgaccctccagcaagacgaagaaag

SEQ ID NO: 442658 - DNA, 25 bp, Homo sapien
cacgccaaccagtttggaggaagga

SEQ ID NO: 442659 - DNA, 25 bp, Homo sapien
aaagtccgcatctccccgtggaatg

SEQ ID NO: 442660 - DNA, 25 bp, Homo sapien
tgcggaagcaaaggactcgcccttc

SEQ ID NO: 442661 - DNA, 25 bp, Homo sapien
cgcgccacgtggcatcttttcccac

SEQ ID NO: 442662 - DNA, 25 bp, Homo sapien
gcgccacgcccgttttcgccaggga

SEQ ID NO: 442663 - DNA, 25 bp, Homo sapien
tcacggtctgagcactggcgccacg

SEQ ID NO: 442664 - DNA, 25 bp, Homo sapien
ctgagtaagtggcagttcccggggg

SEQ ID NO: 442665 - DNA, 25 bp, Homo sapien
ttccacttcacggtctgagcactgg

SEQ ID NO: 442666 - DNA, 25 bp, Homo sapien
gggccggaacctgggatagctgtgc

SEQ ID NO: 442667 - DNA, 25 bp, Homo sapien
catttcccaacttgatgggccggaa

SEQ ID NO: 442668 - DNA, 25 bp, Homo sapien
ctggcactgatggatcgtctcattt

SEQ ID NO: 442669 - DNA, 25 bp, Homo sapien
tgatggatcgtctcatttcccaact

SEQ ID NO: 442670 - DNA, 25 bp, Homo sapien
cccgacgccgcaggcgggatgtaag

SEQ ID NO: 442671 - DNA, 25 bp, Homo sapien
cgggatgtaagatcccgtgtctggc

SEQ ID NO: 442672 - DNA, 25 bp, Homo sapien
agcccgccaggtgcgctgcccgacg

SEQ ID NO: 442673 - DNA, 25 bp, Homo sapien
tggctgcgctcaagggtggcctgtc

SEQ ID NO: 442674 - DNA, 25 bp, Homo sapien
ctcccctcggaaggtctccaccgct

SEQ ID NO: 442675 - DNA, 25 bp, Homo sapien
ctccaccgctaaggctgcttgggag

SEQ ID NO: 442676 - DNA, 25 bp, Homo sapien
ggaaggtctccaccgctaaggctgc

SEQ ID NO: 442677 - DNA, 25 bp, Homo sapien
cctcggaaggtctccaccgctaagg

SEQ ID NO: 442678 - DNA, 25 bp, Homo sapien
gagacagaccctggcgatcactggc

SEQ ID NO: 442679 - DNA, 25 bp, Homo sapien
ctggcgatcactggccgcgggcttc

SEQ ID NO: 442680 - DNA, 25 bp, Homo sapien
ggcgacgagacagaccctggcgatc

SEQ ID NO: 442681 - DNA, 25 bp, Homo sapien
gggaggatgggcgacgagacagacc

SEQ ID NO: 442682 - DNA, 25 bp, Homo sapien
cgatgggtgataaaagtcatgccta

SEQ ID NO: 442683 - DNA, 25 bp, Homo sapien
ggtgataaaagtcatgcctacttgc

SEQ ID NO: 442684 - DNA, 25 bp, Homo sapien
taaaagtcatgcctacttgcaacgg

SEQ ID NO: 442685 - DNA, 25 bp, Homo sapien
ctgggtatagcgatgggtgataaaa

SEQ ID NO: 442686 - DNA, 25 bp, Homo sapien
gcggactccagacttgacggcttct

SEQ ID NO: 442687 - DNA, 25 bp, Homo sapien
caacctgggaaagacgtcggcgctt

SEQ ID NO: 442688 - DNA, 25 bp, Homo sapien
tttgcacccgagttgggctccttgg

SEQ ID NO: 442689 - DNA, 25 bp, Homo sapien
ttctgcccgcgggaaggaagatgca

SEQ ID NO: 442690 - DNA, 25 bp, Homo sapien
tggcaacagtttcctgaatttggag

SEQ ID NO: 442691 - DNA, 25 bp, Homo sapien
aaaatgctatggcaacagtttcctg

SEQ ID NO: 442692 - DNA, 25 bp, Homo sapien
aatagagaagggaaaatgctatggc

SEQ ID NO: 442693 - DNA, 25 bp, Homo sapien
gaatttggagacatccccttctctc

SEQ ID NO: 442694 - DNA, 25 bp, Homo sapien
cactggagtactgtcttctgaaaac

SEQ ID NO: 442695 - DNA, 25 bp, Homo sapien
gaaaacgcatctggttcccgaaaga

SEQ ID NO: 442696 - DNA, 25 bp, Homo sapien
cttctgaaaacgcatctggttcccg

SEQ ID NO: 442697 - DNA, 25 bp, Homo sapien
cttatcactggagtactgtcttctg

SEQ ID NO: 442698 - DNA, 25 bp, Homo sapien
ggtacagttattaagtggtgtagat

SEQ ID NO: 442699 - DNA, 25 bp, Homo sapien
tacagttattaagtggtgtagatac

SEQ ID NO: 442700 - DNA, 25 bp, Homo sapien
aggtacagttattaagtggtgtaga

SEQ ID NO: 442701 - DNA, 25 bp, Homo sapien
caggtacagttattaagtggtgtag

SEQ ID NO: 442702 - DNA, 25 bp, Homo sapien
ctgttctgagaaacttaataccacc

SEQ ID NO: 442703 - DNA, 25 bp, Homo sapien
agaaacttaataccaccctcagcct

SEQ ID NO: 442704 - DNA, 25 bp, Homo sapien
tctgagaaacttaataccaccctca

SEQ ID NO: 442705 - DNA, 25 bp, Homo sapien
tgttctgagaaacttaataccaccc

SEQ ID NO: 442706 - DNA, 25 bp, Homo sapien
aaagcaatccgattgtgtggcagga

SEQ ID NO: 442707 - DNA, 25 bp, Homo sapien
gcaaatcggctcactgcggaggaaa

SEQ ID NO: 442708 - DNA, 25 bp, Homo sapien
gctgcgagtgctgaaagcaatccga

SEQ ID NO: 442709 - DNA, 25 bp, Homo sapien
cttgtgcggagggccaatgagatct

SEQ ID NO: 442710 - DNA, 25 bp, Homo sapien
ctagctaggactcggtgtcgagcgc

SEQ ID NO: 442711 - DNA, 25 bp, Homo sapien
gggagggagggagcgcgtattctgt

SEQ ID NO: 442712 - DNA, 25 bp, Homo sapien
ggagcgcgtattctgtgagcgccta

SEQ ID NO: 442713 - DNA, 25 bp, Homo sapien
tgtgagcgcctagctaggactcggt

SEQ ID NO: 442714 - DNA, 25 bp, Homo sapien
cagaggccgccagagagggaatccc

SEQ ID NO: 442715 - DNA, 25 bp, Homo sapien
gagagggaatccctcaaagtcgccg

SEQ ID NO: 442716 - DNA, 25 bp, Homo sapien
gtgccccgaatgaggccggctgtgc

SEQ ID NO: 442717 - DNA, 25 bp, Homo sapien
tgccccgaatgaggccggctgtgct

SEQ ID NO: 442718 - DNA, 25 bp, Homo sapien
gaactcgaagtctgtcgatgctggg

SEQ ID NO: 442719 - DNA, 25 bp, Homo sapien
caacatcaggagaactcgaagtctg

SEQ ID NO: 442720 - DNA, 25 bp, Homo sapien
ggaacaacatcaggagaactcgaag

SEQ ID NO: 442721 - DNA, 25 bp, Homo sapien
caggagaactcgaagtctgtcgatg

SEQ ID NO: 442722 - DNA, 25 bp, Homo sapien
tttcccgcaccacaaatatatcttt

SEQ ID NO: 442723 - DNA, 25 bp, Homo sapien
tcttgttctgccatgatttgagcca

SEQ ID NO: 442724 - DNA, 25 bp, Homo sapien
aactctgccatgagacacgtcgtcc

SEQ ID NO: 442725 - DNA, 25 bp, Homo sapien
tctacgtagttgctggcccacacat

SEQ ID NO: 442726 - DNA, 25 bp, Homo sapien
aaactctgggttgcacgcttgggcg

SEQ ID NO: 442727 - DNA, 25 bp, Homo sapien
tggaatccccatgcagcattcggga

SEQ ID NO: 442728 - DNA, 25 bp, Homo sapien
gttagatgctctacgtgcagccccg

SEQ ID NO: 442729 - DNA, 25 bp, Homo sapien
gaaggcattacaagctggaatcccc

SEQ ID NO: 442730 - DNA, 25 bp, Homo sapien
tgggaacacagacgccccgcgcccc

SEQ ID NO: 442731 - DNA, 25 bp, Homo sapien
ctgggaacacagacgccccgcgccc

SEQ ID NO: 442732 - DNA, 25 bp, Homo sapien
caaagagcattttgagtgcatatgc

SEQ ID NO: 442733 - DNA, 25 bp, Homo sapien
agctccccgggtcaatgcgatatcg

SEQ ID NO: 442734 - DNA, 25 bp, Homo sapien
gtgcatatgcgcgatccacccagaa

SEQ ID NO: 442735 - DNA, 25 bp, Homo sapien
cgatatcggcctgttctgtgatcag

SEQ ID NO: 442736 - DNA, 25 bp, Homo sapien
caatcgtccccgcagcgtctgggtt

SEQ ID NO: 442737 - DNA, 25 bp, Homo sapien
cggggaggtgcgcttcaatcgtccc

SEQ ID NO: 442738 - DNA, 25 bp, Homo sapien
gagccggggaggtgcgcttcaatcg

SEQ ID NO: 442739 - DNA, 25 bp, Homo sapien
gaggtgcgcttcaatcgtccccgca

SEQ ID NO: 442740 - DNA, 25 bp, Homo sapien
gtcccttggacatgttgtggctttc

SEQ ID NO: 442741 - DNA, 25 bp, Homo sapien
caagtcgcctcaggtcccttggaca

SEQ ID NO: 442742 - DNA, 25 bp, Homo sapien
tgaagtgggttttctccgaggagtc

SEQ ID NO: 442743 - DNA, 25 bp, Homo sapien
tagacaaactgcactttgctcagcc

SEQ ID NO: 442744 - DNA, 25 bp, Homo sapien
cactagaggccagtgaaatggtttg

SEQ ID NO: 442745 - DNA, 25 bp, Homo sapien
gacactcataggacttcccagcggg

SEQ ID NO: 442746 - DNA, 25 bp, Homo sapien
tcaaaaggttggatgtggaccgcag

SEQ ID NO: 442747 - DNA, 25 bp, Homo sapien
ggtgaccgtcttctgcggatcacta

SEQ ID NO: 442748 - DNA, 25 bp, Homo sapien
gaaatccaagtggtaacatcctggg

SEQ ID NO: 442749 - DNA, 25 bp, Homo sapien
ggaaatccaagtggtaacatcctgg

SEQ ID NO: 442750 - DNA, 25 bp, Homo sapien
agaggaaatccaagtggtaacatcc

SEQ ID NO: 442751 - DNA, 25 bp, Homo sapien
cctggtaggtccctctctcatcctt

SEQ ID NO: 442752 - DNA, 25 bp, Homo sapien
ttttatgaaagctagatgccttgga

SEQ ID NO: 442753 - DNA, 25 bp, Homo sapien
cattggcattgttgtattcacctgg

SEQ ID NO: 442754 - DNA, 25 bp, Homo sapien
gatgacaaaggtggagattctctaa

SEQ ID NO: 442755 - DNA, 25 bp, Homo sapien
ataacctcctttgtgagggagagag

SEQ ID NO: 442756 - DNA, 25 bp, Homo sapien
ataaaggcccagtgatagatcccga

SEQ ID NO: 442757 - DNA, 25 bp, Homo sapien
aaggcccagtgatagatcccgaaaa

SEQ ID NO: 442758 - DNA, 25 bp, Homo sapien
ccagtgatagatcccgaaaaggcac

SEQ ID NO: 442759 - DNA, 25 bp, Homo sapien
cctgagcttgtattctggggataaa

SEQ ID NO: 442760 - DNA, 25 bp, Homo sapien
ttcgtggacactaccttgattttct

SEQ ID NO: 442761 - DNA, 25 bp, Homo sapien
cgacttcgtggacactaccttgatt

SEQ ID NO: 442762 - DNA, 25 bp, Homo sapien
cttcgtggacactaccttgattttc

SEQ ID NO: 442763 - DNA, 25 bp, Homo sapien
gacttcgtggacactaccttgattt

SEQ ID NO: 442764 - DNA, 25 bp, Homo sapien
ttaggatccctcatgcctttgctct

SEQ ID NO: 442765 - DNA, 25 bp, Homo sapien
caggacttaggatccctcatgcctt

SEQ ID NO: 442766 - DNA, 25 bp, Homo sapien
ccacaggacttaggatccctcatgc

SEQ ID NO: 442767 - DNA, 25 bp, Homo sapien
gacttaggatccctcatgcctttgc

SEQ ID NO: 442768 - DNA, 25 bp, Homo sapien
taccatgatgacgaggcccaagatg

SEQ ID NO: 442769 - DNA, 25 bp, Homo sapien
gtaaatcgcgagtgttaccatgatg

SEQ ID NO: 442770 - DNA, 25 bp, Homo sapien
cgctcatccactgggcatttatgct

SEQ ID NO: 442771 - DNA, 25 bp, Homo sapien
ttttgtggtggacgtggtaaatcgc

SEQ ID NO: 442772 - DNA, 25 bp, Homo sapien
gcccatgtgcttatactgggatctg

SEQ ID NO: 442773 - DNA, 25 bp, Homo sapien
tatactgggatctgtcccgagggat

SEQ ID NO: 442774 - DNA, 25 bp, Homo sapien
ctagcccatgtgcttatactgggat

SEQ ID NO: 442775 - DNA, 25 bp, Homo sapien
gggatctgtcccgagggatctgcac

SEQ ID NO: 442776 - DNA, 25 bp, Homo sapien
ggtttaagcatggacacaagccaag

SEQ ID NO: 442777 - DNA, 25 bp, Homo sapien
tacccaggcctgtttgattgtagct

SEQ ID NO: 442778 - DNA, 25 bp, Homo sapien
caagccaccatgagcacgaaagctg

SEQ ID NO: 442779 - DNA, 25 bp, Homo sapien
tcaccctacaaatccgaaagagtct

SEQ ID NO: 442780 - DNA, 25 bp, Homo sapien
ccagaagcatgaatcactttcaggg

SEQ ID NO: 442781 - DNA, 25 bp, Homo sapien
ccaagacaatcactaaacatgcaga

SEQ ID NO: 442782 - DNA, 25 bp, Homo sapien
gcagtgaaacattcccaagacaatc

SEQ ID NO: 442783 - DNA, 25 bp, Homo sapien
ctgcagtcgctggatgcgggtagca

SEQ ID NO: 442784 - DNA, 25 bp, Homo sapien
acacagattgattcttcaggtcccc

SEQ ID NO: 442785 - DNA, 25 bp, Homo sapien
ctcacacagattgattcttcaggtc

SEQ ID NO: 442786 - DNA, 25 bp, Homo sapien
gtcccccgacttggacctggcacag

SEQ ID NO: 442787 - DNA, 25 bp, Homo sapien
gactcacacagattgattcttcagg

SEQ ID NO: 442788 - DNA, 25 bp, Homo sapien
tgcaaacatgcaaaatccgtcttca

SEQ ID NO: 442789 - DNA, 25 bp, Homo sapien
caaacatgcaaaatccgtcttcatc

SEQ ID NO: 442790 - DNA, 25 bp, Homo sapien
tcttctggacgccaaagacaccatt

SEQ ID NO: 442791 - DNA, 25 bp, Homo sapien
gacgccaaagacaccattttagctt

SEQ ID NO: 442792 - DNA, 25 bp, Homo sapien
cataggagagtcgtgctgctgtcta

SEQ ID NO: 442793 - DNA, 25 bp, Homo sapien
tctgaactgactctagaggatgaat

SEQ ID NO: 442794 - DNA, 25 bp, Homo sapien
tataatgtgtttccgacataggaga

SEQ ID NO: 442795 - DNA, 25 bp, Homo sapien
gacttcagttgtgcccatgttataa

SEQ ID NO: 442796 - DNA, 25 bp, Homo sapien
ccatcatgtaggatggaatccttga

SEQ ID NO: 442797 - DNA, 25 bp, Homo sapien
gagaagttccttaatgtcacccaga

SEQ ID NO: 442798 - DNA, 25 bp, Homo sapien
gacaggtggatttgctgtgcccatg

SEQ ID NO: 442799 - DNA, 25 bp, Homo sapien
tgtgcccatggaatgctgtttattc

SEQ ID NO: 442800 - DNA, 25 bp, Homo sapien
gaaatagcggtcacgactcagatga

SEQ ID NO: 442801 - DNA, 25 bp, Homo sapien
tctctgaaaagacggaggtgcctgt

SEQ ID NO: 442802 - DNA, 25 bp, Homo sapien
catttggatttccagctgagggaag

SEQ ID NO: 442803 - DNA, 25 bp, Homo sapien
gatgagtcggccttgcttgcagaga

SEQ ID NO: 442804 - DNA, 25 bp, Homo sapien
gcctttggtggactcatttgctcca

SEQ ID NO: 442805 - DNA, 25 bp, Homo sapien
taatgttttgtgttgctggtgtaaa

SEQ ID NO: 442806 - DNA, 25 bp, Homo sapien
tgctggtgtaaaatcttccaggata

SEQ ID NO: 442807 - DNA, 25 bp, Homo sapien
gcagcagaactccaggactgtgcct

SEQ ID NO: 442808 - DNA, 25 bp, Homo sapien
gaaaggccatgtagctttcaccggt

SEQ ID NO: 442809 - DNA, 25 bp, Homo sapien
tcaccggttttcttgggttgcttgc

SEQ ID NO: 442810 - DNA, 25 bp, Homo sapien
tttgacatgcttcccatcagaggtg

SEQ ID NO: 442811 - DNA, 25 bp, Homo sapien
cattgagaaaactccatgctggaga

SEQ ID NO: 442812 - DNA, 25 bp, Homo sapien
gaaccagcagagaataactggagat

SEQ ID NO: 442813 - DNA, 25 bp, Homo sapien
tgtcacatctatcacacctgcagct

SEQ ID NO: 442814 - DNA, 25 bp, Homo sapien
gaataactggagattcatggtccat

SEQ ID NO: 442815 - DNA, 25 bp, Homo sapien
tcacaaatgggtgatgtcacatcta

SEQ ID NO: 442816 - DNA, 25 bp, Homo sapien
tccctctgttcttataggccttggg

SEQ ID NO: 442817 - DNA, 25 bp, Homo sapien
tctcctttgaagaagccgctcgagt

SEQ ID NO: 442818 - DNA, 25 bp, Homo sapien
taggccttggggtatttcaggtctc

SEQ ID NO: 442819 - DNA, 25 bp, Homo sapien
gtttaaagagattctctgtcctctc

SEQ ID NO: 442820 - DNA, 25 bp, Homo sapien
tagatggtgtgtcgctgtcagcctg

SEQ ID NO: 442821 - DNA, 25 bp, Homo sapien
tcctttgcctttctgaccagggaca

SEQ ID NO: 442822 - DNA, 25 bp, Homo sapien
ccagggacagttcggctgacagttt

SEQ ID NO: 442823 - DNA, 25 bp, Homo sapien
ttttctatcagctgacctaagtgag

SEQ ID NO: 442824 - DNA, 25 bp, Homo sapien
ctattcagtcaaggtggtacagact

SEQ ID NO: 442825 - DNA, 25 bp, Homo sapien
tgtcctcagtaatcaagtgctttcc

SEQ ID NO: 442826 - DNA, 25 bp, Homo sapien
tacagatgtctgttgggactctatg

SEQ ID NO: 442827 - DNA, 25 bp, Homo sapien
tcttatgattttcgtgacagttgcc

SEQ ID NO: 442828 - DNA, 25 bp, Homo sapien
tcagcagaatcagcttggacaggtg

SEQ ID NO: 442829 - DNA, 25 bp, Homo sapien
gaaggttagtgaattcacacactcc

SEQ ID NO: 442830 - DNA, 25 bp, Homo sapien
gtcttaggaaatctaaactcagcag

SEQ ID NO: 442831 - DNA, 25 bp, Homo sapien
cccatctcatcttttgtcttaggaa

SEQ ID NO: 442832 - DNA, 25 bp, Homo sapien
ttttttggtaaaggcttgtgacgca

SEQ ID NO: 442833 - DNA, 25 bp, Homo sapien
gagcctgagacactcgtaagcgtgc

SEQ ID NO: 442834 - DNA, 25 bp, Homo sapien
taaaggcttgtgacgcagaagaaat

SEQ ID NO: 442835 - DNA, 25 bp, Homo sapien
tcgtaagcgtgcatatattcttgct

SEQ ID NO: 442836 - DNA, 25 bp, Homo sapien
gaggcagccctcaatgggaaagcgc

SEQ ID NO: 442837 - DNA, 25 bp, Homo sapien
gatagagaaaagatgcgttccaaga

SEQ ID NO: 442838 - DNA, 25 bp, Homo sapien
aatgtctgtgcggtttctggacaag

SEQ ID NO: 442839 - DNA, 25 bp, Homo sapien
tctggttcagctcgaggaatgtctg

SEQ ID NO: 442840 - DNA, 25 bp, Homo sapien
gagccccagagcctgttttgttggt

SEQ ID NO: 442841 - DNA, 25 bp, Homo sapien
agccccagagcctgttttgttggta

SEQ ID NO: 442842 - DNA, 25 bp, Homo sapien
gccccagagcctgttttgttggtaa

SEQ ID NO: 442843 - DNA, 25 bp, Homo sapien
aaggctgcctgtatccaaaatcaaa

SEQ ID NO: 442844 - DNA, 25 bp, Homo sapien
gatgacataactgcatgtggcctga

SEQ ID NO: 442845 - DNA, 25 bp, Homo sapien
tctgtgtattttggccgaacgtggg

SEQ ID NO: 442846 - DNA, 25 bp, Homo sapien
tcctccatgcaatatcaaaggctgc

SEQ ID NO: 442847 - DNA, 25 bp, Homo sapien
ctgtcctcatcgatgaccctggcat

SEQ ID NO: 442848 - DNA, 25 bp, Homo sapien
tcctcatcgatgaccctggcatagc

SEQ ID NO: 442849 - DNA, 25 bp, Homo sapien
tcatcgatgaccctggcatagccca

SEQ ID NO: 442850 - DNA, 25 bp, Homo sapien
catcgatgaccctggcatagcccat

SEQ ID NO: 442851 - DNA, 25 bp, Homo sapien
cctttgcctctgcataaagcaggct

SEQ ID NO: 442852 - DNA, 25 bp, Homo sapien
aattatggcatagtgtgtcttcagc

SEQ ID NO: 442853 - DNA, 25 bp, Homo sapien
cacaatagcaggacccgtagaggaa

SEQ ID NO: 442854 - DNA, 25 bp, Homo sapien
aagcagtagattgcaggaacttcaa

SEQ ID NO: 442855 - DNA, 25 bp, Homo sapien
gcatagtaatggttacagtagaaaa

SEQ ID NO: 442856 - DNA, 25 bp, Homo sapien
atcatctgcatagtaatggttacag

SEQ ID NO: 442857 - DNA, 25 bp, Homo sapien
agaactgataccagtagtaatagtc

SEQ ID NO: 442858 - DNA, 25 bp, Homo sapien
aactgataccagtagtaatagtcat

SEQ ID NO: 442859 - DNA, 25 bp, Homo sapien
tattagaactatatcctttttcgca

SEQ ID NO: 442860 - DNA, 25 bp, Homo sapien
tgctgtctttattagaactatatcc

SEQ ID NO: 442861 - DNA, 25 bp, Homo sapien
gaactatatcctttttcgcaatgga

SEQ ID NO: 442862 - DNA, 25 bp, Homo sapien
atcctttttcgcaatggaggaacca

SEQ ID NO: 442863 - DNA, 25 bp, Homo sapien
agtcatttatgaatgttccagcacc

SEQ ID NO: 442864 - DNA, 25 bp, Homo sapien
tgtggcattacaaggggtaagccca

SEQ ID NO: 442865 - DNA, 25 bp, Homo sapien
cttagctccgtttcccctaagtcat

SEQ ID NO: 442866 - DNA, 25 bp, Homo sapien
taagtccggcatctccttagctccg

SEQ ID NO: 442867 - DNA, 25 bp, Homo sapien
tggttgctccctgaaaggtctgtgg

SEQ ID NO: 442868 - DNA, 25 bp, Homo sapien
tcctcttggttgctccctgaaaggt

SEQ ID NO: 442869 - DNA, 25 bp, Homo sapien
cttggttgctccctgaaaggtctgt

SEQ ID NO: 442870 - DNA, 25 bp, Homo sapien
ctcttggttgctccctgaaaggtct

SEQ ID NO: 442871 - DNA, 25 bp, Homo sapien
ggagctctgatagctttgcactaaa

SEQ ID NO: 442872 - DNA, 25 bp, Homo sapien
tttctctcagtggactcgatatcaa

SEQ ID NO: 442873 - DNA, 25 bp, Homo sapien
cagtggactcgatatcaatgatttt

SEQ ID NO: 442874 - DNA, 25 bp, Homo sapien
gatagctttgcactaaattctgaat

SEQ ID NO: 442875 - DNA, 25 bp, Homo sapien
agtggaacgaagaagagcttgagaa

SEQ ID NO: 442876 - DNA, 25 bp, Homo sapien
tacaatcactcatgtctttcaggag

SEQ ID NO: 442877 - DNA, 25 bp, Homo sapien
ctttcaggagtggaacgaagaagag

SEQ ID NO: 442878 - DNA, 25 bp, Homo sapien
taaaagacttatacaatcactcatg

SEQ ID NO: 442879 - DNA, 25 bp, Homo sapien
gtgttcacagatccattttgaagca

SEQ ID NO: 442880 - DNA, 25 bp, Homo sapien
ggtgttcacagatccattttgaagc

SEQ ID NO: 442881 - DNA, 25 bp, Homo sapien
ccaggtgttcacagatccattttga

SEQ ID NO: 442882 - DNA, 25 bp, Homo sapien
caggtgttcacagatccattttgaa

SEQ ID NO: 442883 - DNA, 25 bp, Homo sapien
ttagcatccttaccatatgcatgag

SEQ ID NO: 442884 - DNA, 25 bp, Homo sapien
tttcagctttgggtttattagcatc

SEQ ID NO: 442885 - DNA, 25 bp, Homo sapien
agcatccttaccatatgcatgagca

SEQ ID NO: 442886 - DNA, 25 bp, Homo sapien
ttattagcatccttaccatatgcat

SEQ ID NO: 442887 - DNA, 25 bp, Homo sapien
cattttcttccagagggtgtttctt

SEQ ID NO: 442888 - DNA, 25 bp, Homo sapien
gccattttcttccagagggtgtttc

SEQ ID NO: 442889 - DNA, 25 bp, Homo sapien
tcagccattttcttccagagggtgt

SEQ ID NO: 442890 - DNA, 25 bp, Homo sapien
cagccattttcttccagagggtgtt

SEQ ID NO: 442891 - DNA, 25 bp, Homo sapien
tcacttagatttgcgtgggacccaa

SEQ ID NO: 442892 - DNA, 25 bp, Homo sapien
gctagtcctcacattttgctcctgg

SEQ ID NO: 442893 - DNA, 25 bp, Homo sapien
tttgctcctggctatgatcctgaag

SEQ ID NO: 442894 - DNA, 25 bp, Homo sapien
tgaagcaaccgccaatcacttagat

SEQ ID NO: 442895 - DNA, 25 bp, Homo sapien
attctcctcactggactgctacacg

SEQ ID NO: 442896 - DNA, 25 bp, Homo sapien
gcgagaagttaggtgcaggagccat

SEQ ID NO: 442897 - DNA, 25 bp, Homo sapien
ttctcctcactggactgctacacgg

SEQ ID NO: 442898 - DNA, 25 bp, Homo sapien
ctgctacacggcgagaagttaggtg

SEQ ID NO: 442899 - DNA, 25 bp, Homo sapien
catttccactgatgtcgaggtttgg

SEQ ID NO: 442900 - DNA, 25 bp, Homo sapien
tgtcatttccactgatgtcgaggtt

SEQ ID NO: 442901 - DNA, 25 bp, Homo sapien
ccatgggctttgatgaaagcaggac

SEQ ID NO: 442902 - DNA, 25 bp, Homo sapien
attctcagttttggtttgaccccat

SEQ ID NO: 442903 - DNA, 25 bp, Homo sapien
ctcttttctggagccttgcctgacc

SEQ ID NO: 442904 - DNA, 25 bp, Homo sapien
agtcccaaaggcatctaccacgtga

SEQ ID NO: 442905 - DNA, 25 bp, Homo sapien
tgctagaatccagcgcccagattcg

SEQ ID NO: 442906 - DNA, 25 bp, Homo sapien
ccagattcggcgcttgttgaagtca

SEQ ID NO: 442907 - DNA, 25 bp, Homo sapien
caaaaatggccaaagcaagcgtgag

SEQ ID NO: 442908 - DNA, 25 bp, Homo sapien
tgctctttagaagagaggaccactg

SEQ ID NO: 442909 - DNA, 25 bp, Homo sapien
ccttgctctttagaagagaggacca

SEQ ID NO: 442910 - DNA, 25 bp, Homo sapien
gggcaggaaagacccttctcctaca

SEQ ID NO: 442911 - DNA, 25 bp, Homo sapien
ggtgggtgcagtgttctgggaagtc

SEQ ID NO: 442912 - DNA, 25 bp, Homo sapien
catctggtcagaagcatagactaca

SEQ ID NO: 442913 - DNA, 25 bp, Homo sapien
cttttcctgaggtcgtgaagtccta

SEQ ID NO: 442914 - DNA, 25 bp, Homo sapien
tcatgaaggatgctcctcttgggct

SEQ ID NO: 442915 - DNA, 25 bp, Homo sapien
gaacattttgatggctcgctctcga

SEQ ID NO: 442916 - DNA, 25 bp, Homo sapien
tcccttcctagtggctcctcacaca

SEQ ID NO: 442917 - DNA, 25 bp, Homo sapien
caattgctctgacatcaacatggtc

SEQ ID NO: 442918 - DNA, 25 bp, Homo sapien
caagtttctggggaacactatgctg

SEQ ID NO: 442919 - DNA, 25 bp, Homo sapien
tggaccaattgctctgacatcaaca

SEQ ID NO: 442920 - DNA, 25 bp, Homo sapien
cccaatctatgtccgtcagccaaat

SEQ ID NO: 442921 - DNA, 25 bp, Homo sapien
agctgcgcgacacacccatgtcttt

SEQ ID NO: 442922 - DNA, 25 bp, Homo sapien
tcttggcagtacaggagtttgctct

SEQ ID NO: 442923 - DNA, 25 bp, Homo sapien
taatctcagaatgtattgtagaagc

SEQ ID NO: 442924 - DNA, 25 bp, Homo sapien
agatgctagaagaagactgttgcta

SEQ ID NO: 442925 - DNA, 25 bp, Homo sapien
tagatgctagaagaagactgttgct

SEQ ID NO: 442926 - DNA, 25 bp, Homo sapien
ctagatgctagaagaagactgttgc

SEQ ID NO: 442927 - DNA, 25 bp, Homo sapien
gcagttcactcagtccactaggcag

SEQ ID NO: 442928 - DNA, 25 bp, Homo sapien
catacaggttatgccaggtctgcta

SEQ ID NO: 442929 - DNA, 25 bp, Homo sapien
gaagacatagcagcccatgggacat

SEQ ID NO: 442930 - DNA, 25 bp, Homo sapien
tacatggccaaatctagaatcaagg

SEQ ID NO: 442931 - DNA, 25 bp, Homo sapien
tcatctactcagatcatccacaatc

SEQ ID NO: 442932 - DNA, 25 bp, Homo sapien
catctactcagatcatccacaatca

SEQ ID NO: 442933 - DNA, 25 bp, Homo sapien
gactagtaatgccaaattgatttcc

SEQ ID NO: 442934 - DNA, 25 bp, Homo sapien
tttagaagtggatacacacatgtgc

SEQ ID NO: 442935 - DNA, 25 bp, Homo sapien
actgcataccagtccattctattga

SEQ ID NO: 442936 - DNA, 25 bp, Homo sapien
gattgaggttatttccatcggtcac

SEQ ID NO: 442937 - DNA, 25 bp, Homo sapien
tttaattgattatggtagtaaccag

SEQ ID NO: 442938 - DNA, 25 bp, Homo sapien
ggtccaaggacgtcactttgagtgg

SEQ ID NO: 442939 - DNA, 25 bp, Homo sapien
tgcatttctaagtagcccccaggta

SEQ ID NO: 442940 - DNA, 25 bp, Homo sapien
gagtaaaagtaaaagtccatcttca

SEQ ID NO: 442941 - DNA, 25 bp, Homo sapien
atattgtgaaaggattatctccaca

SEQ ID NO: 442942 - DNA, 25 bp, Homo sapien
aatattgtgaaaggattatctccac

SEQ ID NO: 442943 - DNA, 25 bp, Homo sapien
ttgtgtttaacatttgaacatttaa

SEQ ID NO: 442944 - DNA, 25 bp, Homo sapien
tgtctggtaatggagtatgaaccat

SEQ ID NO: 442945 - DNA, 25 bp, Homo sapien
ctttggggaatgctaagtaggaatt

SEQ ID NO: 442946 - DNA, 25 bp, Homo sapien
aggaatttgggtgagatttatgtga

SEQ ID NO: 442947 - DNA, 25 bp, Homo sapien
tgtgagaggttgtgaaggtgtgaag

SEQ ID NO: 442948 - DNA, 25 bp, Homo sapien
catcatattgatggcgagctaagtg

SEQ ID NO: 442949 - DNA, 25 bp, Homo sapien
tattgatggcgagctaagtgtggac

SEQ ID NO: 442950 - DNA, 25 bp, Homo sapien
tggcgagctaagtgtggacacctga

SEQ ID NO: 442951 - DNA, 25 bp, Homo sapien
gtcatcatattgatggcgagctaag

SEQ ID NO: 442952 - DNA, 25 bp, Homo sapien
gcccaggcgtgaatgatgtcccttg

SEQ ID NO: 442953 - DNA, 25 bp, Homo sapien
agtcttccgggcgatcagaagccag

SEQ ID NO: 442954 - DNA, 25 bp, Homo sapien
gaccgggctgattgtgagcttccgc

SEQ ID NO: 442955 - DNA, 25 bp, Homo sapien
tgctctcgtcctctgacgctcagcg

SEQ ID NO: 442956 - DNA, 25 bp, Homo sapien
tctgtgaactggcaatagcaatggt

SEQ ID NO: 442957 - DNA, 25 bp, Homo sapien
atctgtgaactggcaatagcaatgg

SEQ ID NO: 442958 - DNA, 25 bp, Homo sapien
gcttgaccagctccttgaaaatgct

SEQ ID NO: 442959 - DNA, 25 bp, Homo sapien
ttgaaaatgctttctggaccaaaac

SEQ ID NO: 442960 - DNA, 25 bp, Homo sapien
cttgaccagctccttgaaaatgctt

SEQ ID NO: 442961 - DNA, 25 bp, Homo sapien
aatgctttctggaccaaaactaaag

SEQ ID NO: 442962 - DNA, 25 bp, Homo sapien
caaggagaaagctgaccatatcaat

SEQ ID NO: 442963 - DNA, 25 bp, Homo sapien
ttgtgggagtacagcccattcggtc

SEQ ID NO: 442964 - DNA, 25 bp, Homo sapien
ccattcggtcttgcacatcagggtg

SEQ ID NO: 442965 - DNA, 25 bp, Homo sapien
tcagggtatccaagcttggtcagct

SEQ ID NO: 442966 - DNA, 25 bp, Homo sapien
ctggagaggatgtcgggatttttac

SEQ ID NO: 442967 - DNA, 25 bp, Homo sapien
caaaatgaattgcaatctgctggag

SEQ ID NO: 442968 - DNA, 25 bp, Homo sapien
taggtataggagtgagaatttagcc

SEQ ID NO: 442969 - DNA, 25 bp, Homo sapien
gttattgctttctggctacaaaatg

SEQ ID NO: 442970 - DNA, 25 bp, Homo sapien
cggcattgaggactgagtacacatg

SEQ ID NO: 442971 - DNA, 25 bp, Homo sapien
tggcatacggcattgaggactgagt

SEQ ID NO: 442972 - DNA, 25 bp, Homo sapien
catagaactggcatacggcattgag

SEQ ID NO: 442973 - DNA, 25 bp, Homo sapien
cttatcatagaactggcatacggca

SEQ ID NO: 442974 - DNA, 25 bp, Homo sapien
ttcttggaatgtgaagggctacagc

SEQ ID NO: 442975 - DNA, 25 bp, Homo sapien
tgccaaagggctactggtaagtccc

SEQ ID NO: 442976 - DNA, 25 bp, Homo sapien
ggctacagctatgtgtgccaaaggg

SEQ ID NO: 442977 - DNA, 25 bp, Homo sapien
tcttggaatgtgaagggctacagct

SEQ ID NO: 442978 - DNA, 25 bp, Homo sapien
gatcagagcacagcgataatgccgc

SEQ ID NO: 442979 - DNA, 25 bp, Homo sapien
ggcacacatctttaacatcatgtgc

SEQ ID NO: 442980 - DNA, 25 bp, Homo sapien
cataggtagaattgttgacatctgc

SEQ ID NO: 442981 - DNA, 25 bp, Homo sapien
gacatctgcaccatgttcaagggcg

SEQ ID NO: 442982 - DNA, 25 bp, Homo sapien
gtcaaatgcattcacttcacctcct

SEQ ID NO: 442983 - DNA, 25 bp, Homo sapien
tatgcctcgaactatttccactacc

SEQ ID NO: 442984 - DNA, 25 bp, Homo sapien
gcaaaatgagcagcgtgatgcctgt

SEQ ID NO: 442985 - DNA, 25 bp, Homo sapien
gaaaaagcctcctttagcagcaaaa

SEQ ID NO: 442986 - DNA, 25 bp, Homo sapien
gaagactctagtatgtaatgaagtc

SEQ ID NO: 442987 - DNA, 25 bp, Homo sapien
tatcatcgagtgtacagaaaaatac

SEQ ID NO: 442988 - DNA, 25 bp, Homo sapien
cagaaaaatgtctgccttagcgtac

SEQ ID NO: 442989 - DNA, 25 bp, Homo sapien
gagggcattgttctcccataattag

SEQ ID NO: 442990 - DNA, 25 bp, Homo sapien
aatcagccccacgtctccattgtag

SEQ ID NO: 442991 - DNA, 25 bp, Homo sapien
cagcataatgaagtggtgtgttccc

SEQ ID NO: 442992 - DNA, 25 bp, Homo sapien
gtgttcccatttatcgaaatcagcc

SEQ ID NO: 442993 - DNA, 25 bp, Homo sapien
ctccattgtaggcaaaaagaagctt

SEQ ID NO: 442994 - DNA, 25 bp, Homo sapien
ccaattgctccagcagggggacgag

SEQ ID NO: 442995 - DNA, 25 bp, Homo sapien
agggagttgccaattgctccagcag

SEQ ID NO: 442996 - DNA, 25 bp, Homo sapien
ggagttgccaattgctccagcaggg

SEQ ID NO: 442997 - DNA, 25 bp, Homo sapien
tgccaattgctccagcagggggacg

SEQ ID NO: 442998 - DNA, 25 bp, Homo sapien
tggtaaagttgttcaacttccagct

SEQ ID NO: 442999 - DNA, 25 bp, Homo sapien
gctcctctgtggtaaagttgttcaa

SEQ ID NO: 443000 - DNA, 25 bp, Homo sapien
ggaggaggactccacgagctcctct

SEQ ID NO: 443001 - DNA, 25 bp, Homo sapien
aggaggaggactccacgagctcctc

SEQ ID NO: 443002 - DNA, 25 bp, Homo sapien
gcgttttatgatctaaattcttcca

SEQ ID NO: 443003 - DNA, 25 bp, Homo sapien
ttgaagccgccttccttagccacag

SEQ ID NO: 443004 - DNA, 25 bp, Homo sapien
tttgaagccgccttccttagccaca

SEQ ID NO: 443005 - DNA, 25 bp, Homo sapien
gccacagccctgggcgttttatgat

SEQ ID NO: 443006 - DNA, 25 bp, Homo sapien
cctggcctggctagtttattagcga

SEQ ID NO: 443007 - DNA, 25 bp, Homo sapien
ttattagcgattctctctgctcggc

SEQ ID NO: 443008 - DNA, 25 bp, Homo sapien
tctgctcggcgtatttctttgcttg

SEQ ID NO: 443009 - DNA, 25 bp, Homo sapien
gctagtttattagcgattctctctg

SEQ ID NO: 443010 - DNA, 25 bp, Homo sapien
tacggaccaatcgtgcagtctaagg

SEQ ID NO: 443011 - DNA, 25 bp, Homo sapien
aatcgtgcagtctaagggcccacag

SEQ ID NO: 443012 - DNA, 25 bp, Homo sapien
aaagcctcacgttctacggaccaat

SEQ ID NO: 443013 - DNA, 25 bp, Homo sapien
cgttctacggaccaatcgtgcagtc

SEQ ID NO: 443014 - DNA, 25 bp, Homo sapien
tggaaacgcgtactcaggaatgaca

SEQ ID NO: 443015 - DNA, 25 bp, Homo sapien
gatgatctctattaaaccggctgct

SEQ ID NO: 443016 - DNA, 25 bp, Homo sapien
tatgtttccacttgcacacgccgtc

SEQ ID NO: 443017 - DNA, 25 bp, Homo sapien
caatcatgtaatacggtggcccacc

SEQ ID NO: 443018 - DNA, 25 bp, Homo sapien
caaaatgaagtggagtccacagaaa

SEQ ID NO: 443019 - DNA, 25 bp, Homo sapien
gcaaaatgaagtggagtccacagaa

SEQ ID NO: 443020 - DNA, 25 bp, Homo sapien
agtccacagaaagttatctgttgca

SEQ ID NO: 443021 - DNA, 25 bp, Homo sapien
aaatgaagtggagtccacagaaagt

SEQ ID NO: 443022 - DNA, 25 bp, Homo sapien
tgttgattgaagctgcatctattaa

SEQ ID NO: 443023 - DNA, 25 bp, Homo sapien
ttccagctggaatttagcaccaata

SEQ ID NO: 443024 - DNA, 25 bp, Homo sapien
gaatttagcaccaatatcaagtagg

SEQ ID NO: 443025 - DNA, 25 bp, Homo sapien
tattttactgtatccagtctgcagc

SEQ ID NO: 443026 - DNA, 25 bp, Homo sapien
tcagtataggaggtgtcttgccttt

SEQ ID NO: 443027 - DNA, 25 bp, Homo sapien
tcttcagtataggaggtgtcttgcc

SEQ ID NO: 443028 - DNA, 25 bp, Homo sapien
agtcttcagtataggaggtgtcttg

SEQ ID NO: 443029 - DNA, 25 bp, Homo sapien
cttcagtataggaggtgtcttgcct

SEQ ID NO: 443030 - DNA, 25 bp, Homo sapien
ctgatgtggttggtacaccataaat

SEQ ID NO: 443031 - DNA, 25 bp, Homo sapien
gtggttggtacaccataaattgatg

SEQ ID NO: 443032 - DNA, 25 bp, Homo sapien
tggtacaccataaattgatgacagc

SEQ ID NO: 443033 - DNA, 25 bp, Homo sapien
gtacaccataaattgatgacagcag

SEQ ID NO: 443034 - DNA, 25 bp, Homo sapien
ttagtataaccactggtaatcaatg

SEQ ID NO: 443035 - DNA, 25 bp, Homo sapien
ggtaatcaatgaattcagatgaacc

SEQ ID NO: 443036 - DNA, 25 bp, Homo sapien
tgtgatatccactttcttagtataa

SEQ ID NO: 443037 - DNA, 25 bp, Homo sapien
gatgaaccacattacccttctgtac

SEQ ID NO: 443038 - DNA, 25 bp, Homo sapien
ctcatgtgtaaacctctctcgccgt

SEQ ID NO: 443039 - DNA, 25 bp, Homo sapien
gccgtagttccctcttcctgatcag

SEQ ID NO: 443040 - DNA, 25 bp, Homo sapien
tccagtgctcgagctttctctgtga

SEQ ID NO: 443041 - DNA, 25 bp, Homo sapien
ctgaaaaggcatcataaaatcgtcg

SEQ ID NO: 443042 - DNA, 25 bp, Homo sapien
tatctagggctagggctatctatct

SEQ ID NO: 443043 - DNA, 25 bp, Homo sapien
tatctagggctagggctatcgatct

SEQ ID NO: 443044 - DNA, 25 bp, Homo sapien
tggtccctgggcctcaaagcattta

SEQ ID NO: 443045 - DNA, 25 bp, Homo sapien
tacctagctgtcaggttggagcaaa

SEQ ID NO: 443046 - DNA, 25 bp, Homo sapien
tgttcggtacccactgcatttcttg

SEQ ID NO: 443047 - DNA, 25 bp, Homo sapien
tcttgggatccaaatgcaatgcttg

SEQ ID NO: 443048 - DNA, 25 bp, Homo sapien
caacttggctaggttgtagcaccca

SEQ ID NO: 443049 - DNA, 25 bp, Homo sapien
ctggtaaggcagattctaaagtggc

SEQ ID NO: 443050 - DNA, 25 bp, Homo sapien
tcaacggacacacagatagttcggg

SEQ ID NO: 443051 - DNA, 25 bp, Homo sapien
gggcaagcgaatgtatttcatgacc

SEQ ID NO: 443052 - DNA, 25 bp, Homo sapien
tactgagaagggtgcaatgacatct

SEQ ID NO: 443053 - DNA, 25 bp, Homo sapien
tcatgacctgggagtacaaaggaaa

SEQ ID NO: 443054 - DNA, 25 bp, Homo sapien
tttcatttccgtgtcctgtttcata

SEQ ID NO: 443055 - DNA, 25 bp, Homo sapien
catttccgtgtcctgtttcataccc

SEQ ID NO: 443056 - DNA, 25 bp, Homo sapien
tcatttccgtgtcctgtttcatacc

SEQ ID NO: 443057 - DNA, 25 bp, Homo sapien
cctttcatttccgtgtcctgtttca

SEQ ID NO: 443058 - DNA, 25 bp, Homo sapien
gcctctctttggatccaataggcat

SEQ ID NO: 443059 - DNA, 25 bp, Homo sapien
ggcctctctttggatccaataggca

SEQ ID NO: 443060 - DNA, 25 bp, Homo sapien
tttgttgcagcgtgtcttaaaaatt

SEQ ID NO: 443061 - DNA, 25 bp, Homo sapien
ttgcagcgtgtcttaaaaatttcaa

SEQ ID NO: 443062 - DNA, 25 bp, Homo sapien
gagtcagcccttgctctttgaatat

SEQ ID NO: 443063 - DNA, 25 bp, Homo sapien
tattggagttgaagccagctgatta

SEQ ID NO: 443064 - DNA, 25 bp, Homo sapien
tacaggagattggtacagcggcaga

SEQ ID NO: 443065 - DNA, 25 bp, Homo sapien
tcttctgcaggttcagaattatagg

SEQ ID NO: 443066 - DNA, 25 bp, Homo sapien
aatttagaagtggacaggaaacatc

SEQ ID NO: 443067 - DNA, 25 bp, Homo sapien
tttcactaagacaagaatttagaag

SEQ ID NO: 443068 - DNA, 25 bp, Homo sapien
ttttagttttcactgtgcgaagact

SEQ ID NO: 443069 - DNA, 25 bp, Homo sapien
gacttttatgtctactattgggaac

SEQ ID NO: 443070 - DNA, 25 bp, Homo sapien
tgacttatctctttgtggtgttaca

SEQ ID NO: 443071 - DNA, 25 bp, Homo sapien
ctgacttatctctttgtggtgttac

SEQ ID NO: 443072 - DNA, 25 bp, Homo sapien
tttgtggtgttacatgtgtacattg

SEQ ID NO: 443073 - DNA, 25 bp, Homo sapien
tggtgttacatgtgtacattgtaga

SEQ ID NO: 443074 - DNA, 25 bp, Homo sapien
gtatgaaacaaactcccacatacca

SEQ ID NO: 443075 - DNA, 25 bp, Homo sapien
ggtgtatgaaacaaactcccacata

SEQ ID NO: 443076 - DNA, 25 bp, Homo sapien
tggtgtatgaaacaaactcccacat

SEQ ID NO: 443077 - DNA, 25 bp, Homo sapien
tgtatgaaacaaactcccacatacc

SEQ ID NO: 443078 - DNA, 25 bp, Homo sapien
aaagaacttgaccaagacatatcag

SEQ ID NO: 443079 - DNA, 25 bp, Homo sapien
taagggtgggtggtgtagctaaaga

SEQ ID NO: 443080 - DNA, 25 bp, Homo sapien
gctaaagaacttgaccaagacatat

SEQ ID NO: 443081 - DNA, 25 bp, Homo sapien
agctaaagaacttgaccaagacata

SEQ ID NO: 443082 - DNA, 25 bp, Homo sapien
gcagtagtatcatgaggaaatacag

SEQ ID NO: 443083 - DNA, 25 bp, Homo sapien
agcagtagtatcatgaggaaataca

SEQ ID NO: 443084 - DNA, 25 bp, Homo sapien
cagtagtatcatgaggaaatacagt

SEQ ID NO: 443085 - DNA, 25 bp, Homo sapien
tgtcacagaagcgataaatctatca

SEQ ID NO: 443086 - DNA, 25 bp, Homo sapien
tgtctgtcacagaagcgataaatct

SEQ ID NO: 443087 - DNA, 25 bp, Homo sapien
tcactgtctgtcacagaagcgataa

SEQ ID NO: 443088 - DNA, 25 bp, Homo sapien
tctgtcacagaagcgataaatctat

SEQ ID NO: 443089 - DNA, 25 bp, Homo sapien
gactttccaatgtggtctttgcagc

SEQ ID NO: 443090 - DNA, 25 bp, Homo sapien
caaagacggtacaacttccttggag

SEQ ID NO: 443091 - DNA, 25 bp, Homo sapien
cagtatcatttggttccacttcaga

SEQ ID NO: 443092 - DNA, 25 bp, Homo sapien
gaaagggttagttgagaccattcac

SEQ ID NO: 443093 - DNA, 25 bp, Homo sapien
tccagtccactttcagaggcttcag

SEQ ID NO: 443094 - DNA, 25 bp, Homo sapien
tgcctgctttactgcaagaatgcag

SEQ ID NO: 443095 - DNA, 25 bp, Homo sapien
ttttggtaggctagaaatacgtggc

SEQ ID NO: 443096 - DNA, 25 bp, Homo sapien
gtcatatgacctgaaaaacttgcat

SEQ ID NO: 443097 - DNA, 25 bp, Homo sapien
gggagataaaatcactttgtaaaca

SEQ ID NO: 443098 - DNA, 25 bp, Homo sapien
ctaaagtcttctcatagggagataa

SEQ ID NO: 443099 - DNA, 25 bp, Homo sapien
aacatacagtttagttgctaagtga

SEQ ID NO: 443100 - DNA, 25 bp, Homo sapien
ttcactgagctattcactaaagtct

SEQ ID NO: 443101 - DNA, 25 bp, Homo sapien
ccaaaagagctagttaaggacaaag

SEQ ID NO: 443102 - DNA, 25 bp, Homo sapien
catgactaggtttgacagaacatcc

SEQ ID NO: 443103 - DNA, 25 bp, Homo sapien
tcaggtggcaacagctcaacgtttt

SEQ ID NO: 443104 - DNA, 25 bp, Homo sapien
tgggttcgtttacacaagtcaagtc

SEQ ID NO: 443105 - DNA, 25 bp, Homo sapien
tgatttgaaattggacctaagagtc

SEQ ID NO: 443106 - DNA, 25 bp, Homo sapien
gtgatttgaaattggacctaagagt

SEQ ID NO: 443107 - DNA, 25 bp, Homo sapien
tcttcttaatgttatgttcagagag

SEQ ID NO: 443108 - DNA, 25 bp, Homo sapien
gctaaactagtaggatattgttctt

SEQ ID NO: 443109 - DNA, 25 bp, Homo sapien
aagctaaactagtaggatattgttc

SEQ ID NO: 443110 - DNA, 25 bp, Homo sapien
ctaaactagtaggatattgttcttc

SEQ ID NO: 443111 - DNA, 25 bp, Homo sapien
catcacgttcgggttgtccctggaa

SEQ ID NO: 443112 - DNA, 25 bp, Homo sapien
gctgtctacctgaccaatcgatggg

SEQ ID NO: 443113 - DNA, 25 bp, Homo sapien
caaaaaccttatgtgaatgcgtgct

SEQ ID NO: 443114 - DNA, 25 bp, Homo sapien
tggtctcacatgctaattcaaggtc

SEQ ID NO: 443115 - DNA, 25 bp, Homo sapien
taagtagtaacaccgttgaaagcat

SEQ ID NO: 443116 - DNA, 25 bp, Homo sapien
taagcatatatacctcagaatttca

SEQ ID NO: 443117 - DNA, 25 bp, Homo sapien
tatacttcagtatgcacaagaacag

SEQ ID NO: 443118 - DNA, 25 bp, Homo sapien
tccctaggtggaaagtcaatatact

SEQ ID NO: 443119 - DNA, 25 bp, Homo sapien
tggagtgctttttgaagcctttaag

SEQ ID NO: 443120 - DNA, 25 bp, Homo sapien
tttctattatcctgtcaaattcatt

SEQ ID NO: 443121 - DNA, 25 bp, Homo sapien
ttttctattatcctgtcaaattcat

SEQ ID NO: 443122 - DNA, 25 bp, Homo sapien
tctggagtgctttttgaagccttta

SEQ ID NO: 443123 - DNA, 25 bp, Homo sapien
taaacaatcttcgatcttttattgt

SEQ ID NO: 443124 - DNA, 25 bp, Homo sapien
cataaacaatcttcgatcttttatt

SEQ ID NO: 443125 - DNA, 25 bp, Homo sapien
aacaatcttcgatcttttattgtgc

SEQ ID NO: 443126 - DNA, 25 bp, Homo sapien
tgcataaacaatcttcgatctttta

SEQ ID NO: 443127 - DNA, 25 bp, Homo sapien
cgaaagggtacacaggtaatcggct

SEQ ID NO: 443128 - DNA, 25 bp, Homo sapien
tgagacctgagtgtaaaatcgttgg

SEQ ID NO: 443129 - DNA, 25 bp, Homo sapien
gcaccacccaattctaaagataaga

SEQ ID NO: 443130 - DNA, 25 bp, Homo sapien
accgtacccggcgagtattgcttct

SEQ ID NO: 443131 - DNA, 25 bp, Homo sapien
gaagccaccaattcctagtcttttg

SEQ ID NO: 443132 - DNA, 25 bp, Homo sapien
gacagaaattcttgaccaggtgcgg

SEQ ID NO: 443133 - DNA, 25 bp, Homo sapien
tatctcttgacgttccttagttgtg

SEQ ID NO: 443134 - DNA, 25 bp, Homo sapien
aaaatggatgtcctgaaactgctaa

SEQ ID NO: 443135 - DNA, 25 bp, Homo sapien
ccaggtgcggtaaaatttggattct

SEQ ID NO: 443136 - DNA, 25 bp, Homo sapien
taaactgatgaatctcattgtcatt

SEQ ID NO: 443137 - DNA, 25 bp, Homo sapien
tgtgaaagttacagctactgcttga

SEQ ID NO: 443138 - DNA, 25 bp, Homo sapien
ctgttcaactctgtgaaaatgtgat

SEQ ID NO: 443139 - DNA, 25 bp, Homo sapien
cagctactgcttgattggagttgtt

SEQ ID NO: 443140 - DNA, 25 bp, Homo sapien
tatgagaacacgcagagggaacttg

SEQ ID NO: 443141 - DNA, 25 bp, Homo sapien
attcgcatatcctgtatatctctgg

SEQ ID NO: 443142 - DNA, 25 bp, Homo sapien
tggctgtggaaagacgcgttgcctt

SEQ ID NO: 443143 - DNA, 25 bp, Homo sapien
gtttcttcttaattcgcatatcctg

SEQ ID NO: 443144 - DNA, 25 bp, Homo sapien
aaaagactctgcatttttgctgtta

SEQ ID NO: 443145 - DNA, 25 bp, Homo sapien
tgcaatgtttagaaacgccatacgt

SEQ ID NO: 443146 - DNA, 25 bp, Homo sapien
catcagccaactgtattccttttcc

SEQ ID NO: 443147 - DNA, 25 bp, Homo sapien
cattggagggtatgagccatccacc

SEQ ID NO: 443148 - DNA, 25 bp, Homo sapien
gctgccagtttccatatgatccatc

SEQ ID NO: 443149 - DNA, 25 bp, Homo sapien
aaataagctttggatccacacctgg

SEQ ID NO: 443150 - DNA, 25 bp, Homo sapien
cacacctggagtgtcacacagagcc

SEQ ID NO: 443151 - DNA, 25 bp, Homo sapien
tctgggcttaggcatctattagcaa

SEQ ID NO: 443152 - DNA, 25 bp, Homo sapien
gggaggatctaactgggccttaaca

SEQ ID NO: 443153 - DNA, 25 bp, Homo sapien
caagaggtgtacaggcatcaggaga

SEQ ID NO: 443154 - DNA, 25 bp, Homo sapien
aatggccactttttgggtatctgca

SEQ ID NO: 443155 - DNA, 25 bp, Homo sapien
atcaggagagcccaccagttctgct

SEQ ID NO: 443156 - DNA, 25 bp, Homo sapien
ctgtatagggtatgctctttgaata

SEQ ID NO: 443157 - DNA, 25 bp, Homo sapien
aagtttggtataccagcgagcaggc

SEQ ID NO: 443158 - DNA, 25 bp, Homo sapien
aaaagcgatgataagggcagaggaa

SEQ ID NO: 443159 - DNA, 25 bp, Homo sapien
tttcctccatcactgaaaagcgatg

SEQ ID NO: 443160 - DNA, 25 bp, Homo sapien
aaattcctcctgaattttagtgaat

SEQ ID NO: 443161 - DNA, 25 bp, Homo sapien
aatatgtataatccagatgatgtct

SEQ ID NO: 443162 - DNA, 25 bp, Homo sapien
tcattgcgaaatatgtataatccag

SEQ ID NO: 443163 - DNA, 25 bp, Homo sapien
tctagtctcttttgttgggcctcca

SEQ ID NO: 443164 - DNA, 25 bp, Homo sapien
tcttgcaaagcacgaacttgctgtc

SEQ ID NO: 443165 - DNA, 25 bp, Homo sapien
tagtgcacgtgatggtaaatatggt

SEQ ID NO: 443166 - DNA, 25 bp, Homo sapien
acttgctgtcttgttagtgcacgtg

SEQ ID NO: 443167 - DNA, 25 bp, Homo sapien
tcttcactgcttcataaagctctgc

SEQ ID NO: 443168 - DNA, 25 bp, Homo sapien
ttgtttcttatcattcaacatttgc

SEQ ID NO: 443169 - DNA, 25 bp, Homo sapien
cctgtgattattcaaggctcttaac

SEQ ID NO: 443170 - DNA, 25 bp, Homo sapien
aatacgcaacttccacacggttgtg

SEQ ID NO: 443171 - DNA, 25 bp, Homo sapien
ccttttgttcagcagattccatggc

SEQ ID NO: 443172 - DNA, 25 bp, Homo sapien
tctgatgatggacgccaaatactca

SEQ ID NO: 443173 - DNA, 25 bp, Homo sapien
gatggacgccaaatactcagtataa

SEQ ID NO: 443174 - DNA, 25 bp, Homo sapien
cagagaatataaatctgatgatgga

SEQ ID NO: 443175 - DNA, 25 bp, Homo sapien
tataaatctgatgatggacgccaaa

SEQ ID NO: 443176 - DNA, 25 bp, Homo sapien
taactgtatgttagctctttcagat

SEQ ID NO: 443177 - DNA, 25 bp, Homo sapien
cggtagttgttgatactgagttttt

SEQ ID NO: 443178 - DNA, 25 bp, Homo sapien
tgtcgctgctaactgtatgttagct

SEQ ID NO: 443179 - DNA, 25 bp, Homo sapien
ttttttgtcgctgctaactgtatgt

SEQ ID NO: 443180 - DNA, 25 bp, Homo sapien
gaacaagatggctgaaagtctggat

SEQ ID NO: 443181 - DNA, 25 bp, Homo sapien
tattaggtccacctcagaacaagat

SEQ ID NO: 443182 - DNA, 25 bp, Homo sapien
aatttgctgaagtgaaggggctccc

SEQ ID NO: 443183 - DNA, 25 bp, Homo sapien
cacaacagaaacgacaaatcctatt

SEQ ID NO: 443184 - DNA, 25 bp, Homo sapien
taaagtaacatcttaactgctccag

SEQ ID NO: 443185 - DNA, 25 bp, Homo sapien
taacatcttaactgctccagactat

SEQ ID NO: 443186 - DNA, 25 bp, Homo sapien
tcatctttaattgatacctcccatg

SEQ ID NO: 443187 - DNA, 25 bp, Homo sapien
taattgatacctcccatgtaaagta

SEQ ID NO: 443188 - DNA, 25 bp, Homo sapien
tgtattgtgtattcccacactgtat

SEQ ID NO: 443189 - DNA, 25 bp, Homo sapien
ttgtgtattgtgtattcccacactg

SEQ ID NO: 443190 - DNA, 25 bp, Homo sapien
agtaggttgtgtattgtgtattccc

SEQ ID NO: 443191 - DNA, 25 bp, Homo sapien
gtaggttgtgtattgtgtattccca

SEQ ID NO: 443192 - DNA, 25 bp, Homo sapien
cccaggttaccaggcttctcaaatc

SEQ ID NO: 443193 - DNA, 25 bp, Homo sapien
tgccccaggttaccaggcttctcaa

SEQ ID NO: 443194 - DNA, 25 bp, Homo sapien
gccccaggttaccaggcttctcaaa

SEQ ID NO: 443195 - DNA, 25 bp, Homo sapien
gttgccccaggttaccaggcttctc

SEQ ID NO: 443196 - DNA, 25 bp, Homo sapien
acagaaaggacttgaaaacttcttg

SEQ ID NO: 443197 - DNA, 25 bp, Homo sapien
ctgtgacagaaaggacttgaaaact

SEQ ID NO: 443198 - DNA, 25 bp, Homo sapien
gaaaggacttgaaaacttcttgcaa

SEQ ID NO: 443199 - DNA, 25 bp, Homo sapien
tctacatttagcctgacagcctgcc

SEQ ID NO: 443200 - DNA, 25 bp, Homo sapien
agccactgccagatccttttcaaag

SEQ ID NO: 443201 - DNA, 25 bp, Homo sapien
cttagggtaggcaaagaaaatgact

SEQ ID NO: 443202 - DNA, 25 bp, Homo sapien
gacaggcggtgatttcatacccagt

SEQ ID NO: 443203 - DNA, 25 bp, Homo sapien
caaagcttcagggcaagaagaacct

SEQ ID NO: 443204 - DNA, 25 bp, Homo sapien
ccaaagcttcagggcaagaagaacc

SEQ ID NO: 443205 - DNA, 25 bp, Homo sapien
tcccaaagcttcagggcaagaagaa

SEQ ID NO: 443206 - DNA, 25 bp, Homo sapien
ttcatcccaaagcttcagggcaaga

SEQ ID NO: 443207 - DNA, 25 bp, Homo sapien
gacaaaggtctgcatggacgtattg

SEQ ID NO: 443208 - DNA, 25 bp, Homo sapien
ttcagtaagaagagaagacatatcc

SEQ ID NO: 443209 - DNA, 25 bp, Homo sapien
caaagacatatccaaagacaaaggt

SEQ ID NO: 443210 - DNA, 25 bp, Homo sapien
gcatggacgtattggccagagctcc

SEQ ID NO: 443211 - DNA, 25 bp, Homo sapien
cctgcaaggaggtttttaagagctc

SEQ ID NO: 443212 - DNA, 25 bp, Homo sapien
tatataggcaacctcaaatgtgggc

SEQ ID NO: 443213 - DNA, 25 bp, Homo sapien
tctaggctgcttgttggtagcttcc

SEQ ID NO: 443214 - DNA, 25 bp, Homo sapien
tgtcctgtcacaaagccctatatgg

SEQ ID NO: 443215 - DNA, 25 bp, Homo sapien
tacagaaacctaaggaggcttaagc

SEQ ID NO: 443216 - DNA, 25 bp, Homo sapien
agggcccactcacagtactctagag

SEQ ID NO: 443217 - DNA, 25 bp, Homo sapien
ccaggtctaacgcatttctctgaag

SEQ ID NO: 443218 - DNA, 25 bp, Homo sapien
taacggataattgcactgacatcag

SEQ ID NO: 443219 - DNA, 25 bp, Homo sapien
cagggaccaaacaggtgaccaggac

SEQ ID NO: 443220 - DNA, 25 bp, Homo sapien
gggaccaaacaggtgaccaggactg

SEQ ID NO: 443221 - DNA, 25 bp, Homo sapien
tgccagggaccaaacaggtgaccag

SEQ ID NO: 443222 - DNA, 25 bp, Homo sapien
ggaccaaacaggtgaccaggactga

SEQ ID NO: 443223 - DNA, 25 bp, Homo sapien
ctttttcttcttctgaacagaaatg

SEQ ID NO: 443224 - DNA, 25 bp, Homo sapien
tttcttcttctgaacagaaatgaga

SEQ ID NO: 443225 - DNA, 25 bp, Homo sapien
ttttcttcttctgaacagaaatgag

SEQ ID NO: 443226 - DNA, 25 bp, Homo sapien
tcttcttctgaacagaaatgagaaa

SEQ ID NO: 443227 - DNA, 25 bp, Homo sapien
gatttggattctggtcgccactgga

SEQ ID NO: 443228 - DNA, 25 bp, Homo sapien
tcttttggactagcagaaaacacag

SEQ ID NO: 443229 - DNA, 25 bp, Homo sapien
tccagcaaataaagtaagaaggcct

SEQ ID NO: 443230 - DNA, 25 bp, Homo sapien
gaatgtctcttgaaagtggccctct

SEQ ID NO: 443231 - DNA, 25 bp, Homo sapien
gtgatccgagattgtgctattgtac

SEQ ID NO: 443232 - DNA, 25 bp, Homo sapien
gatccgagattgtgctattgtactc

SEQ ID NO: 443233 - DNA, 25 bp, Homo sapien
aggcagacactgcagtgatccgaga

SEQ ID NO: 443234 - DNA, 25 bp, Homo sapien
cagtgatccgagattgtgctattgt

SEQ ID NO: 443235 - DNA, 25 bp, Homo sapien
gcttcattgcaaagtatgtcaatat

SEQ ID NO: 443236 - DNA, 25 bp, Homo sapien
gcatgcagtatatgcataagcttgt

SEQ ID NO: 443237 - DNA, 25 bp, Homo sapien
gaatgatttgagcagtgtacggccc

SEQ ID NO: 443238 - DNA, 25 bp, Homo sapien
cacttgggatcatttgcatgcagta

SEQ ID NO: 443239 - DNA, 25 bp, Homo sapien
gaaaatatttaagcacgcaaatatt

SEQ ID NO: 443240 - DNA, 25 bp, Homo sapien
tcctaataggttaggtgatttcagt

SEQ ID NO: 443241 - DNA, 25 bp, Homo sapien
tcacattattcctattctagatgaa

SEQ ID NO: 443242 - DNA, 25 bp, Homo sapien
ggttaggtgatttcagttcacatta

SEQ ID NO: 443243 - DNA, 25 bp, Homo sapien
ataaaggactttgataatatatctc

SEQ ID NO: 443244 - DNA, 25 bp, Homo sapien
tatatctcacaattaggagaagaca

SEQ ID NO: 443245 - DNA, 25 bp, Homo sapien
cagacttccttttggccatacaaag

SEQ ID NO: 443246 - DNA, 25 bp, Homo sapien
tttggccatacaaagtgataaagga

SEQ ID NO: 443247 - DNA, 25 bp, Homo sapien
tcccctttacaagactttgaagtca

SEQ ID NO: 443248 - DNA, 25 bp, Homo sapien
gaaacaaatgtacaaatgggactaa

SEQ ID NO: 443249 - DNA, 25 bp, Homo sapien
caaatgggactaacaggtggaggta

SEQ ID NO: 443250 - DNA, 25 bp, Homo sapien
tcttttggtcatcaatctctttctc

SEQ ID NO: 443251 - DNA, 25 bp, Homo sapien
tcctgttgaaccagacaaaagagct

SEQ ID NO: 443252 - DNA, 25 bp, Homo sapien
tgggagcagtcctagtggattcact

SEQ ID NO: 443253 - DNA, 25 bp, Homo sapien
tctgagataatcttctgaactggtg

SEQ ID NO: 443254 - DNA, 25 bp, Homo sapien
gagatgtagtacaacgtcgtttcag

SEQ ID NO: 443255 - DNA, 25 bp, Homo sapien
taatacttgtagtgatcaaatccaa

SEQ ID NO: 443256 - DNA, 25 bp, Homo sapien
tctcattgtgcaacataagtactaa

SEQ ID NO: 443257 - DNA, 25 bp, Homo sapien
ccaatacggaatcgggcaaaacgat

SEQ ID NO: 443258 - DNA, 25 bp, Homo sapien
gatatgcaactgaagcaaaagtata

SEQ ID NO: 443259 - DNA, 25 bp, Homo sapien
gacttttgaacaggatggaactata

SEQ ID NO: 443260 - DNA, 25 bp, Homo sapien
tatttgcattaaggagaactatttc

SEQ ID NO: 443261 - DNA, 25 bp, Homo sapien
tctgcatcaaaataactgtactaag

SEQ ID NO: 443262 - DNA, 25 bp, Homo sapien
tggaactatagcagaaccaacatat

SEQ ID NO: 443263 - DNA, 25 bp, Homo sapien
attttctcaagtttgagtttggatg

SEQ ID NO: 443264 - DNA, 25 bp, Homo sapien
tattttctcaagtttgagtttggat

SEQ ID NO: 443265 - DNA, 25 bp, Homo sapien
tctcaagtttgagtttggatgacca

SEQ ID NO: 443266 - DNA, 25 bp, Homo sapien
ttctcaagtttgagtttggatgacc

SEQ ID NO: 443267 - DNA, 25 bp, Homo sapien
aacatgatattatacagacatttaa

SEQ ID NO: 443268 - DNA, 25 bp, Homo sapien
tgaaaacatgatattatacagacat

SEQ ID NO: 443269 - DNA, 25 bp, Homo sapien
gatattatacagacatttaaggcat

SEQ ID NO: 443270 - DNA, 25 bp, Homo sapien
atgatattatacagacatttaaggc

SEQ ID NO: 443271 - DNA, 25 bp, Homo sapien
tcacatgagcggttcaaaggaccag

SEQ ID NO: 443272 - DNA, 25 bp, Homo sapien
aaggaccagattcaagccctcctga

SEQ ID NO: 443273 - DNA, 25 bp, Homo sapien
caatagcagttgtaccaaggattca

SEQ ID NO: 443274 - DNA, 25 bp, Homo sapien
tctacatgagaacagacaatagcag

SEQ ID NO: 443275 - DNA, 25 bp, Homo sapien
tgctctatttcttgttggccaacag

SEQ ID NO: 443276 - DNA, 25 bp, Homo sapien
gaatgtcttcttatactgatgctga

SEQ ID NO: 443277 - DNA, 25 bp, Homo sapien
gaccacagaggacgtatgctctatt

SEQ ID NO: 443278 - DNA, 25 bp, Homo sapien
gagatcatgatagacaagaccacag

SEQ ID NO: 443279 - DNA, 25 bp, Homo sapien
atataagcttcagtaccatttgctc

SEQ ID NO: 443280 - DNA, 25 bp, Homo sapien
cagtaccatttgctctgaagtgatc

SEQ ID NO: 443281 - DNA, 25 bp, Homo sapien
catttgctctgaagtgatctattta

SEQ ID NO: 443282 - DNA, 25 bp, Homo sapien
aggaaattcatctccatcggtaaag

SEQ ID NO: 443283 - DNA, 25 bp, Homo sapien
tctgcagatttgagtaaacagtctc

SEQ ID NO: 443284 - DNA, 25 bp, Homo sapien
tagtcagagctccaattccagtgta

SEQ ID NO: 443285 - DNA, 25 bp, Homo sapien
tctctagggtaagaatttgaaacca

SEQ ID NO: 443286 - DNA, 25 bp, Homo sapien
gtgtaaatagctgaactcaaaagtt

SEQ ID NO: 443287 - DNA, 25 bp, Homo sapien
atttaaatccttcccagttgagaag

SEQ ID NO: 443288 - DNA, 25 bp, Homo sapien
ttgagaagcgcccatctcaagaatg

SEQ ID NO: 443289 - DNA, 25 bp, Homo sapien
ttaattcgacttagaaatgagaggt

SEQ ID NO: 443290 - DNA, 25 bp, Homo sapien
ggcccagagcattgacccaaattgt

SEQ ID NO: 443291 - DNA, 25 bp, Homo sapien
tactgaattagatggcgctcgtagt

SEQ ID NO: 443292 - DNA, 25 bp, Homo sapien
acaggacggttctgcctctggtgag

SEQ ID NO: 443293 - DNA, 25 bp, Homo sapien
gagaagcacccaccgaaatgttcag

SEQ ID NO: 443294 - DNA, 25 bp, Homo sapien
gagctacaggtcacaacaggacggt

SEQ ID NO: 443295 - DNA, 25 bp, Homo sapien
ttaattactttcctacggcaaggca

SEQ ID NO: 443296 - DNA, 25 bp, Homo sapien
gagatgctaatctcacttgaggata

SEQ ID NO: 443297 - DNA, 25 bp, Homo sapien
ccttggcaaatggtctttggtgtga

SEQ ID NO: 443298 - DNA, 25 bp, Homo sapien
tgtttctctgctgttcaatggctga

SEQ ID NO: 443299 - DNA, 25 bp, Homo sapien
gacgaatagagattacgctcacctt

SEQ ID NO: 443300 - DNA, 25 bp, Homo sapien
gggccctgattttcagcacggatga

SEQ ID NO: 443301 - DNA, 25 bp, Homo sapien
ttgataataccaacctccacgcctg

SEQ ID NO: 443302 - DNA, 25 bp, Homo sapien
gcacatagattgtagctgctgcaga

SEQ ID NO: 443303 - DNA, 25 bp, Homo sapien
tattcaacatgctactatggctgct

SEQ ID NO: 443304 - DNA, 25 bp, Homo sapien
actgactggctgaagagatatctaa

SEQ ID NO: 443305 - DNA, 25 bp, Homo sapien
cacttctgaagctgatggaatggta

SEQ ID NO: 443306 - DNA, 25 bp, Homo sapien
gactttctcagtgagtgactgactg

SEQ ID NO: 443307 - DNA, 25 bp, Homo sapien
gagacttaagggacatggcaaccaa

SEQ ID NO: 443308 - DNA, 25 bp, Homo sapien
cactgatgagacaagcagggagact

SEQ ID NO: 443309 - DNA, 25 bp, Homo sapien
tgttgcacgcacaccaactggagga

SEQ ID NO: 443310 - DNA, 25 bp, Homo sapien
catagatgaagggtaagcagcgttc

SEQ ID NO: 443311 - DNA, 25 bp, Homo sapien
ttctgggagtgccagagttaaagtg

SEQ ID NO: 443312 - DNA, 25 bp, Homo sapien
taggcggtgataagtgctgttgaaa

SEQ ID NO: 443313 - DNA, 25 bp, Homo sapien
gattaggagtctaaaatacgaagga

SEQ ID NO: 443314 - DNA, 25 bp, Homo sapien
tatgagctttaggtggtgtgtatgc

SEQ ID NO: 443315 - DNA, 25 bp, Homo sapien
aagaatgaatgggatatggaggaca

SEQ ID NO: 443316 - DNA, 25 bp, Homo sapien
gaatgaatgggatatggaggacaga

SEQ ID NO: 443317 - DNA, 25 bp, Homo sapien
aaaagaatgaatgggatatggagga

SEQ ID NO: 443318 - DNA, 25 bp, Homo sapien
aaagaatgaatgggatatggaggac

SEQ ID NO: 443319 - DNA, 25 bp, Homo sapien
ctgtcctttccgctacctcaatgaa

SEQ ID NO: 443320 - DNA, 25 bp, Homo sapien
ttccgctacctcaatgaaagcatcc

SEQ ID NO: 443321 - DNA, 25 bp, Homo sapien
ggaactgcacctgtcctttccgcta

SEQ ID NO: 443322 - DNA, 25 bp, Homo sapien
tggaactgcacctgtcctttccgct

SEQ ID NO: 443323 - DNA, 25 bp, Homo sapien
tactagctggcgactttggtcagtc

SEQ ID NO: 443324 - DNA, 25 bp, Homo sapien
gcctgggagtctgaagattgtgcct

SEQ ID NO: 443325 - DNA, 25 bp, Homo sapien
gtcagtcatctagtttttccgggcc

SEQ ID NO: 443326 - DNA, 25 bp, Homo sapien
gattgtgccttcagacctacttcgt

SEQ ID NO: 443327 - DNA, 25 bp, Homo sapien
gtatcttctgaatgtcaaatcctgt

SEQ ID NO: 443328 - DNA, 25 bp, Homo sapien
gacactgagtgtcaaagaaggaagt

SEQ ID NO: 443329 - DNA, 25 bp, Homo sapien
ctgagtgtcaaagagacactgagtg

SEQ ID NO: 443330 - DNA, 25 bp, Homo sapien
atttcactttcgctttgctgatctg

SEQ ID NO: 443331 - DNA, 25 bp, Homo sapien
cgcttctctccttgacgctggcctt

SEQ ID NO: 443332 - DNA, 25 bp, Homo sapien
ttctctccttgacgctggccttcct

SEQ ID NO: 443333 - DNA, 25 bp, Homo sapien
ccaagccgcttctctccttgacgct

SEQ ID NO: 443334 - DNA, 25 bp, Homo sapien
ctgtaaaccaagccgcttctctcct

SEQ ID NO: 443335 - DNA, 25 bp, Homo sapien
ggcgcccaaattcgttcacttgcga

SEQ ID NO: 443336 - DNA, 25 bp, Homo sapien
ccctgccttgcgcttgatgttccag

SEQ ID NO: 443337 - DNA, 25 bp, Homo sapien
ccaacctctgggaattacgcgggct

SEQ ID NO: 443338 - DNA, 25 bp, Homo sapien
cacttgcgaattgcgtaagcggccc

SEQ ID NO: 443339 - DNA, 25 bp, Homo sapien
ctgcgaaggcgcacaggtgcacggg

SEQ ID NO: 443340 - DNA, 25 bp, Homo sapien
caggtgcacgggggcggggggctgg

SEQ ID NO: 443341 - DNA, 25 bp, Homo sapien
cgcacaggtgcacgggggcgggggg

SEQ ID NO: 443342 - DNA, 25 bp, Homo sapien
cacaggtgcacgggggcggggggct

SEQ ID NO: 443343 - DNA, 25 bp, Homo sapien
tacagtgcgtcaacaggcgctgtaa

SEQ ID NO: 443344 - DNA, 25 bp, Homo sapien
gctggcagcccgctttgaaaatctg

SEQ ID NO: 443345 - DNA, 25 bp, Homo sapien
gctgtaatccgagcgcataaacgag

SEQ ID NO: 443346 - DNA, 25 bp, Homo sapien
aagtcggggagcctgcgtttgcttt

SEQ ID NO: 443347 - DNA, 25 bp, Homo sapien
ccggtggcgactgcagagaaaaccg

SEQ ID NO: 443348 - DNA, 25 bp, Homo sapien
aaacccggtggcgactgcagagaaa

SEQ ID NO: 443349 - DNA, 25 bp, Homo sapien
ccaggtcgggagggactcttcttcg

SEQ ID NO: 443350 - DNA, 25 bp, Homo sapien
tcgggaaaacccggtggcgactgca

SEQ ID NO: 443351 - DNA, 25 bp, Homo sapien
cagctttaggaaacacctctacctc

SEQ ID NO: 443352 - DNA, 25 bp, Homo sapien
ggctccgggaaaactacactggcca

SEQ ID NO: 443353 - DNA, 25 bp, Homo sapien
tctacctcctgcgaggcctcccggg

SEQ ID NO: 443354 - DNA, 25 bp, Homo sapien
gggacacctcctcgccgccacagct

SEQ ID NO: 443355 - DNA, 25 bp, Homo sapien
gattctatgcctcgcttaccttgag

SEQ ID NO: 443356 - DNA, 25 bp, Homo sapien
gggcaccagaatgcatcaagacact

SEQ ID NO: 443357 - DNA, 25 bp, Homo sapien
tctgagatcgtagtccaaggtccat

SEQ ID NO: 443358 - DNA, 25 bp, Homo sapien
catagatttaatcggctcctcagag

SEQ ID NO: 443359 - DNA, 25 bp, Homo sapien
ctgggcataggctcagcaaaaccaa

SEQ ID NO: 443360 - DNA, 25 bp, Homo sapien
gggcataggctcagcaaaaccaaac

SEQ ID NO: 443361 - DNA, 25 bp, Homo sapien
tgggcataggctcagcaaaaccaaa

SEQ ID NO: 443362 - DNA, 25 bp, Homo sapien
ggtagccatgtcttaatcctctgaa

SEQ ID NO: 443363 - DNA, 25 bp, Homo sapien
ggaacctatccctgctgaaacctcg

SEQ ID NO: 443364 - DNA, 25 bp, Homo sapien
agaataatgcttcccctgtacccaa

SEQ ID NO: 443365 - DNA, 25 bp, Homo sapien
gaaacgtgactatgggagaaaggca

SEQ ID NO: 443366 - DNA, 25 bp, Homo sapien
aaagggagactgacacattgatcac

SEQ ID NO: 443367 - DNA, 25 bp, Homo sapien
aatcaactgaggttcactggaagac

SEQ ID NO: 443368 - DNA, 25 bp, Homo sapien
tctccatccagattaggcgttgcta

SEQ ID NO: 443369 - DNA, 25 bp, Homo sapien
ggaatcaaggacatgaccaagagca

SEQ ID NO: 443370 - DNA, 25 bp, Homo sapien
tcttcgttgagattgaatgttctgg

SEQ ID NO: 443371 - DNA, 25 bp, Homo sapien
ccaagttcttcgttgagattgaatg

SEQ ID NO: 443372 - DNA, 25 bp, Homo sapien
tgcccaagttcttcgttgagattga

SEQ ID NO: 443373 - DNA, 25 bp, Homo sapien
tcgttgagattgaatgttctggcca

SEQ ID NO: 443374 - DNA, 25 bp, Homo sapien
cacctgcagtggtacgcttcttaaa

SEQ ID NO: 443375 - DNA, 25 bp, Homo sapien
gatgggttaatgtctcctgaacaaa

SEQ ID NO: 443376 - DNA, 25 bp, Homo sapien
catctctcaggaataacagtgtggc

SEQ ID NO: 443377 - DNA, 25 bp, Homo sapien
cagagccgtcccataagggttcaga

SEQ ID NO: 443378 - DNA, 25 bp, Homo sapien
tatcaaatgtttcctagtaagacag

SEQ ID NO: 443379 - DNA, 25 bp, Homo sapien
aatatcaaatgtttcctagtaagac

SEQ ID NO: 443380 - DNA, 25 bp, Homo sapien
gtgtgactgaagaaatatcaaatgt

SEQ ID NO: 443381 - DNA, 25 bp, Homo sapien
caaatgtttcctagtaagacagcaa

SEQ ID NO: 443382 - DNA, 25 bp, Homo sapien
actggctacccagaaaatttcaggc

SEQ ID NO: 443383 - DNA, 25 bp, Homo sapien
gactaggactagcatccaggacacc

SEQ ID NO: 443384 - DNA, 25 bp, Homo sapien
tatgcctcaggcagttatatgaagg

SEQ ID NO: 443385 - DNA, 25 bp, Homo sapien
gaatccttgtcagttgccacactgg

SEQ ID NO: 443386 - DNA, 25 bp, Homo sapien
cagtccttaggctggtaagaagtag

SEQ ID NO: 443387 - DNA, 25 bp, Homo sapien
cattaaaacagttggcttccctgta

SEQ ID NO: 443388 - DNA, 25 bp, Homo sapien
agtaatttggaagatctcctacaga

SEQ ID NO: 443389 - DNA, 25 bp, Homo sapien
gcatggtttgtaagtttcagagcaa

SEQ ID NO: 443390 - DNA, 25 bp, Homo sapien
taatcagcacatcacttagttcaaa

SEQ ID NO: 443391 - DNA, 25 bp, Homo sapien
ggacagttgcttaacatggtcataa

SEQ ID NO: 443392 - DNA, 25 bp, Homo sapien
ccccagcaaatgttagatagtaggt

SEQ ID NO: 443393 - DNA, 25 bp, Homo sapien
gatagtaggtatatcagtcacctgg

SEQ ID NO: 443394 - DNA, 25 bp, Homo sapien
tcagctaacacatttgttgttgcac

SEQ ID NO: 443395 - DNA, 25 bp, Homo sapien
cccagcaagttgttaaagtgtaaat

SEQ ID NO: 443396 - DNA, 25 bp, Homo sapien
cacaaaggatgttcccagcaagttg

SEQ ID NO: 443397 - DNA, 25 bp, Homo sapien
tctcttggctcacataatcgtgtct

SEQ ID NO: 443398 - DNA, 25 bp, Homo sapien
gtaatgaattcagtggaaccatcac

SEQ ID NO: 443399 - DNA, 25 bp, Homo sapien
tattgtaatgaattcagtggaacca

SEQ ID NO: 443400 - DNA, 25 bp, Homo sapien
ttgtaatgaattcagtggaaccatc

SEQ ID NO: 443401 - DNA, 25 bp, Homo sapien
tctattgtaatgaattcagtggaac

SEQ ID NO: 443402 - DNA, 25 bp, Homo sapien
tctcatagtgcaaaagatggcattt

SEQ ID NO: 443403 - DNA, 25 bp, Homo sapien
taatcatctgcggtaactttcccaa

SEQ ID NO: 443404 - DNA, 25 bp, Homo sapien
gaactatgatttttagctacttggc

SEQ ID NO: 443405 - DNA, 25 bp, Homo sapien
tacagcaactcacaatttgaggacc

SEQ ID NO: 443406 - DNA, 25 bp, Homo sapien
tctcaaagctgccaactagggttgc

SEQ ID NO: 443407 - DNA, 25 bp, Homo sapien
ggtgagcttaatcagtagctgcaca

SEQ ID NO: 443408 - DNA, 25 bp, Homo sapien
tgggactacatacgtgtaccagcac

SEQ ID NO: 443409 - DNA, 25 bp, Homo sapien
cctggctgaggatggtttcgagtta

SEQ ID NO: 443410 - DNA, 25 bp, Homo sapien
tcctctgttgttcgaaaaaatctct

SEQ ID NO: 443411 - DNA, 25 bp, Homo sapien
tcagtgccgttatcacacatttaaa

SEQ ID NO: 443412 - DNA, 25 bp, Homo sapien
taacccagtgtgtaattgaatctcc

SEQ ID NO: 443413 - DNA, 25 bp, Homo sapien
gatccaaacgaagtcctcaaaatgc

SEQ ID NO: 443414 - DNA, 25 bp, Homo sapien
tactttggaggatcacagattgttc

SEQ ID NO: 443415 - DNA, 25 bp, Homo sapien
gattatcattgacctgaactgagag

SEQ ID NO: 443416 - DNA, 25 bp, Homo sapien
ccaaatgcctaatggttcaaggaga

SEQ ID NO: 443417 - DNA, 25 bp, Homo sapien
aactatttccgactttcactagagg

SEQ ID NO: 443418 - DNA, 25 bp, Homo sapien
cagcctagataacctgggtatccca

SEQ ID NO: 443419 - DNA, 25 bp, Homo sapien
gacttcaaggatcctggtctgtacc

SEQ ID NO: 443420 - DNA, 25 bp, Homo sapien
tggaggaccaaattaaaagactggc

SEQ ID NO: 443421 - DNA, 25 bp, Homo sapien
tgtagtcttatacgtgactcctgac

SEQ ID NO: 443422 - DNA, 25 bp, Homo sapien
gatttgggatataccatcagagaca

SEQ ID NO: 443423 - DNA, 25 bp, Homo sapien
cacaaacatgggctgtcttctagat

SEQ ID NO: 443424 - DNA, 25 bp, Homo sapien
tgtagtaccaacaagtaccattcgt

SEQ ID NO: 443425 - DNA, 25 bp, Homo sapien
taaaagagtctgctagttaggacca

SEQ ID NO: 443426 - DNA, 25 bp, Homo sapien
gattcaagatttgtgccggacaagg

SEQ ID NO: 443427 - DNA, 25 bp, Homo sapien
ttgagaactgtcctggcctaccctt

SEQ ID NO: 443428 - DNA, 25 bp, Homo sapien
tgagcactgtgccatgttcatacca

SEQ ID NO: 443429 - DNA, 25 bp, Homo sapien
tgttcaaggaaagttggactcagtg

SEQ ID NO: 443430 - DNA, 25 bp, Homo sapien
ggttctgggaaaacaacattgtctc

SEQ ID NO: 443431 - DNA, 25 bp, Homo sapien
tgagaataggagtagtgttcatccc

SEQ ID NO: 443432 - DNA, 25 bp, Homo sapien
gaacagacaggtttgtgaaccagca

SEQ ID NO: 443433 - DNA, 25 bp, Homo sapien
gacaaatatccctgtaatggacaag

SEQ ID NO: 443434 - DNA, 25 bp, Homo sapien
ccacagagtcgtatgtttttcacaa

SEQ ID NO: 443435 - DNA, 25 bp, Homo sapien
tccgcagacgatgagatatatagca

SEQ ID NO: 443436 - DNA, 25 bp, Homo sapien
cctagagaagaagtaacgagtgagc

SEQ ID NO: 443437 - DNA, 25 bp, Homo sapien
gaagcacgtcctccattagtatccg

SEQ ID NO: 443438 - DNA, 25 bp, Homo sapien
ccgagaggaggccttttggcgttct

SEQ ID NO: 443439 - DNA, 25 bp, Homo sapien
gtggcctgcttgcatcattctgtag

SEQ ID NO: 443440 - DNA, 25 bp, Homo sapien
tctgacacatttcgaatgaggaaag

SEQ ID NO: 443441 - DNA, 25 bp, Homo sapien
gttctccgcagttgtcttcctccag

SEQ ID NO: 443442 - DNA, 25 bp, Homo sapien
tgaccgccatcttgcgtacggaggt

SEQ ID NO: 443443 - DNA, 25 bp, Homo sapien
tgaacgccagaggaggtcgctgctt

SEQ ID NO: 443444 - DNA, 25 bp, Homo sapien
cacgccatggattctgggagaccta

SEQ ID NO: 443445 - DNA, 25 bp, Homo sapien
cacagaggttcgtgtcttcctaaaa

SEQ ID NO: 443446 - DNA, 25 bp, Homo sapien
ttcttaccaggagctcgctgttcta

SEQ ID NO: 443447 - DNA, 25 bp, Homo sapien
tcttaccaggagctcgctgttctac

SEQ ID NO: 443448 - DNA, 25 bp, Homo sapien
ttaccaggagctcgctgttctactt

SEQ ID NO: 443449 - DNA, 25 bp, Homo sapien
accaggagctcgctgttctacttgc

SEQ ID NO: 443450 - DNA, 25 bp, Homo sapien
ctctccgcttcaaaatggcgccaag

SEQ ID NO: 443451 - DNA, 25 bp, Homo sapien
aaatggcgccaagcgctcttcggcg

SEQ ID NO: 443452 - DNA, 25 bp, Homo sapien
ctcttcggcggctgctccaatcgaa

SEQ ID NO: 443453 - DNA, 25 bp, Homo sapien
ttcggcggctgctccaatcgaaccg

SEQ ID NO: 443454 - DNA, 25 bp, Homo sapien
cactccggggctctccgggatccgc

SEQ ID NO: 443455 - DNA, 25 bp, Homo sapien
ctcactccggggctctccgggatcc

SEQ ID NO: 443456 - DNA, 25 bp, Homo sapien
cgctcactccggggctctccgggat

SEQ ID NO: 443457 - DNA, 25 bp, Homo sapien
tccgctcactccggggctctccggg

SEQ ID NO: 443458 - DNA, 25 bp, Homo sapien
tacttccctaaaatcacctctgagg

SEQ ID NO: 443459 - DNA, 25 bp, Homo sapien
tgaaagctaactgaaactacctggt

SEQ ID NO: 443460 - DNA, 25 bp, Homo sapien
caatggtcttggttataagagcccc

SEQ ID NO: 443461 - DNA, 25 bp, Homo sapien
taatagagtacttaaggcctgcaac

SEQ ID NO: 443462 - DNA, 25 bp, Homo sapien
agtttgggatatattgtactggagg

SEQ ID NO: 443463 - DNA, 25 bp, Homo sapien
tactggaggtgttgtgtccaacagt

SEQ ID NO: 443464 - DNA, 25 bp, Homo sapien
attgtactggaggtgttgtgtccaa

SEQ ID NO: 443465 - DNA, 25 bp, Homo sapien
tgtactggaggtgttgtgtccaaca

SEQ ID NO: 443466 - DNA, 25 bp, Homo sapien
cgagaagggcaactccaacacacac

SEQ ID NO: 443467 - DNA, 25 bp, Homo sapien
cacagggtagcaactgggctcacag

SEQ ID NO: 443468 - DNA, 25 bp, Homo sapien
tatagaaagcggtgaatatgtccac

SEQ ID NO: 443469 - DNA, 25 bp, Homo sapien
caaaccctagctgacagagatggaa

SEQ ID NO: 443470 - DNA, 25 bp, Homo sapien
taaagtgtgccatatctactgccca

SEQ ID NO: 443471 - DNA, 25 bp, Homo sapien
taggtgtggctatattccagcaaga

SEQ ID NO: 443472 - DNA, 25 bp, Homo sapien
tctggtgacgctgatcaagaataga

SEQ ID NO: 443473 - DNA, 25 bp, Homo sapien
ccaaaattagcaggtctctggtgac

SEQ ID NO: 443474 - DNA, 25 bp, Homo sapien
taagagaatgcatctaaatagccca

SEQ ID NO: 443475 - DNA, 25 bp, Homo sapien
gcttggactctagaaagttcccagg

SEQ ID NO: 443476 - DNA, 25 bp, Homo sapien
tagtccaaaagaggtgcacaaactg

SEQ ID NO: 443477 - DNA, 25 bp, Homo sapien
taatactgtatatcctgaaaggccc

SEQ ID NO: 443478 - DNA, 25 bp, Homo sapien
tgaaaggcccaataaatccagcaga

SEQ ID NO: 443479 - DNA, 25 bp, Homo sapien
aacccaggaaatgaactacatattt

SEQ ID NO: 443480 - DNA, 25 bp, Homo sapien
gaaaatggttctgctagaaaaaaga

SEQ ID NO: 443481 - DNA, 25 bp, Homo sapien
tggcaatccttaatacttatcactc

SEQ ID NO: 443482 - DNA, 25 bp, Homo sapien
catgtacttgcagtttttggcaatc

SEQ ID NO: 443483 - DNA, 25 bp, Homo sapien
taattaaattaatgggaagtataga

SEQ ID NO: 443484 - DNA, 25 bp, Homo sapien
taatgggaagtatagagcataattt

SEQ ID NO: 443485 - DNA, 25 bp, Homo sapien
ttaaattaatgggaagtatagagca

SEQ ID NO: 443486 - DNA, 25 bp, Homo sapien
tgggaagtatagagcataatttttt

SEQ ID NO: 443487 - DNA, 25 bp, Homo sapien
ggtatccaatgtagccaacactcgg

SEQ ID NO: 443488 - DNA, 25 bp, Homo sapien
tgcagccaacacaaggtatccaaaa

SEQ ID NO: 443489 - DNA, 25 bp, Homo sapien
caacactcggtatccaaatatacaa

SEQ ID NO: 443490 - DNA, 25 bp, Homo sapien
tcaatgcaagccaaagtacaattca

SEQ ID NO: 443491 - DNA, 25 bp, Homo sapien
tatccaactgacaacttaggtaaga

SEQ ID NO: 443492 - DNA, 25 bp, Homo sapien
caaacttgccacaatacagactcag

SEQ ID NO: 443493 - DNA, 25 bp, Homo sapien
ttgatctctaaaacattgggctctg

SEQ ID NO: 443494 - DNA, 25 bp, Homo sapien
gaatataactgtaggagaaagccaa

SEQ ID NO: 443495 - DNA, 25 bp, Homo sapien
cctgttacagcacttatcagagctt

SEQ ID NO: 443496 - DNA, 25 bp, Homo sapien
gaaagaaacttgtaaccattaagca

SEQ ID NO: 443497 - DNA, 25 bp, Homo sapien
taagcaataacatcccatgccctgt

SEQ ID NO: 443498 - DNA, 25 bp, Homo sapien
gcctatccttaagtgcctcatgtaa

SEQ ID NO: 443499 - DNA, 25 bp, Homo sapien
gagggactgcaagaggctcactgaa

SEQ ID NO: 443500 - DNA, 25 bp, Homo sapien
ccaggaggcattgcataacattaca

SEQ ID NO: 443501 - DNA, 25 bp, Homo sapien
ccagctagaacacaggaagactgca

SEQ ID NO: 443502 - DNA, 25 bp, Homo sapien
gactgcaggaatctatgagggactg

SEQ ID NO: 443503 - DNA, 25 bp, Homo sapien
tactggaccagaagtatgactgaag

SEQ ID NO: 443504 - DNA, 25 bp, Homo sapien
taactttttctgacctcaaccaggc

SEQ ID NO: 443505 - DNA, 25 bp, Homo sapien
gcaaaacacgtaaaatgggtctcaa

SEQ ID NO: 443506 - DNA, 25 bp, Homo sapien
gggaggttactcaatttgcacttca

SEQ ID NO: 443507 - DNA, 25 bp, Homo sapien
atttttccatcattggtcctagtct

SEQ ID NO: 443508 - DNA, 25 bp, Homo sapien
tggtcctagtctttgaatgagccat

SEQ ID NO: 443509 - DNA, 25 bp, Homo sapien
tgatatttccttgaccccaggcgga

SEQ ID NO: 443510 - DNA, 25 bp, Homo sapien
tgaccccaggcggatatgtaatttt

SEQ ID NO: 443511 - DNA, 25 bp, Homo sapien
gagatcaccaccaccctaaaggaaa

SEQ ID NO: 443512 - DNA, 25 bp, Homo sapien
tagatacaacctcgatcggaaatgc

SEQ ID NO: 443513 - DNA, 25 bp, Homo sapien
cattactacatgtcagaagcagagg

SEQ ID NO: 443514 - DNA, 25 bp, Homo sapien
tatagccccatgtgatttccacagg

SEQ ID NO: 443515 - DNA, 25 bp, Homo sapien
atcaggggatgtgtaaggagcttca

SEQ ID NO: 443516 - DNA, 25 bp, Homo sapien
gcttcaggagcataaatcctgaaaa

SEQ ID NO: 443517 - DNA, 25 bp, Homo sapien
tcaggatgcttgagaaaaaaatctg

SEQ ID NO: 443518 - DNA, 25 bp, Homo sapien
ggctaccagtaagcgaacatcttta

SEQ ID NO: 443519 - DNA, 25 bp, Homo sapien
caaagtatcggtcaatcttggagtt

SEQ ID NO: 443520 - DNA, 25 bp, Homo sapien
aaatcaaagtatcggtcaatcttgg

SEQ ID NO: 443521 - DNA, 25 bp, Homo sapien
atcaaagtatcggtcaatcttggag

SEQ ID NO: 443522 - DNA, 25 bp, Homo sapien
gataaatcaaagtatcggtcaatct

SEQ ID NO: 443523 - DNA, 25 bp, Homo sapien
tcatctaaataccttaactcccatt

SEQ ID NO: 443524 - DNA, 25 bp, Homo sapien
agattactgtagctaatgtcaaaga

SEQ ID NO: 443525 - DNA, 25 bp, Homo sapien
aaaagattactgtagctaatgtcaa

SEQ ID NO: 443526 - DNA, 25 bp, Homo sapien
gaatccaaggaaatcatctaaatac

SEQ ID NO: 443527 - DNA, 25 bp, Homo sapien
taatggccatggtcttcaatatgga

SEQ ID NO: 443528 - DNA, 25 bp, Homo sapien
actcatgtttatactaggtattatg

SEQ ID NO: 443529 - DNA, 25 bp, Homo sapien
agaaacagagctaatgatgacatga

SEQ ID NO: 443530 - DNA, 25 bp, Homo sapien
acactgtattaatctacttcttaac

SEQ ID NO: 443531 - DNA, 25 bp, Homo sapien
gaggctttaacactccactgacaga

SEQ ID NO: 443532 - DNA, 25 bp, Homo sapien
gttaaagaagcaaggcccaactgta

SEQ ID NO: 443533 - DNA, 25 bp, Homo sapien
tgatgacaggaccaaaccagcacat

SEQ ID NO: 443534 - DNA, 25 bp, Homo sapien
tatgcaacgacactgatagggtcaa

SEQ ID NO: 443535 - DNA, 25 bp, Homo sapien
ttcatcttatagcaaaagttaaaca

SEQ ID NO: 443536 - DNA, 25 bp, Homo sapien
taaaaaatgttgcaatgactgagag

SEQ ID NO: 443537 - DNA, 25 bp, Homo sapien
gaagcttagactcttagaagtcaac

SEQ ID NO: 443538 - DNA, 25 bp, Homo sapien
aagtcaacttgtcaagcttcctacc

SEQ ID NO: 443539 - DNA, 25 bp, Homo sapien
acctattgaattgtgggctctttgt

SEQ ID NO: 443540 - DNA, 25 bp, Homo sapien
aatacctattgaattgtgggctctt

SEQ ID NO: 443541 - DNA, 25 bp, Homo sapien
tttgtatcctctagccccttcaact

SEQ ID NO: 443542 - DNA, 25 bp, Homo sapien
ttgtatcctctagccccttcaactg

SEQ ID NO: 443543 - DNA, 25 bp, Homo sapien
tctaactcaaagcatatgttatatg

SEQ ID NO: 443544 - DNA, 25 bp, Homo sapien
tcattgctatcttctaactcaaagc

SEQ ID NO: 443545 - DNA, 25 bp, Homo sapien
taaggttctgtatagctgggtgaaa

SEQ ID NO: 443546 - DNA, 25 bp, Homo sapien
tatatgacttgacccaagcaatgtt

SEQ ID NO: 443547 - DNA, 25 bp, Homo sapien
caattcaaaacagattttgtttcaa

SEQ ID NO: 443548 - DNA, 25 bp, Homo sapien
ctgcaattcaaaacagattttgttt

SEQ ID NO: 443549 - DNA, 25 bp, Homo sapien
tcaaaacagattttgtttcaattac

SEQ ID NO: 443550 - DNA, 25 bp, Homo sapien
ttcaaaacagattttgtttcaatta

SEQ ID NO: 443551 - DNA, 25 bp, Homo sapien
atggactttctgattgtggccattg

SEQ ID NO: 443552 - DNA, 25 bp, Homo sapien
aataatagagctcataaggtctacc

SEQ ID NO: 443553 - DNA, 25 bp, Homo sapien
taaaaccgtatccaaaagctcctga

SEQ ID NO: 443554 - DNA, 25 bp, Homo sapien
aaagctcctgagacactgtatcacc

SEQ ID NO: 443555 - DNA, 25 bp, Homo sapien
cttatgagcaggtaccagatttact

SEQ ID NO: 443556 - DNA, 25 bp, Homo sapien
tgaaaggcttagcaggtctcccctg

SEQ ID NO: 443557 - DNA, 25 bp, Homo sapien
tagtttctggaagtacctacaggtc

SEQ ID NO: 443558 - DNA, 25 bp, Homo sapien
cacgacaatcaacggatggaggcct

SEQ ID NO: 443559 - DNA, 25 bp, Homo sapien
gatggcagctgactaggaacccaca

SEQ ID NO: 443560 - DNA, 25 bp, Homo sapien
tgcacctggtttccctaggaagatt

SEQ ID NO: 443561 - DNA, 25 bp, Homo sapien
ggagtagtcctttctataatctgga

SEQ ID NO: 443562 - DNA, 25 bp, Homo sapien
gctgaaagttaggaatatttgccac

SEQ ID NO: 443563 - DNA, 25 bp, Homo sapien
ttaaataatcaacagaaatccctgg

SEQ ID NO: 443564 - DNA, 25 bp, Homo sapien
taatggactacagggaatcagaagg

SEQ ID NO: 443565 - DNA, 25 bp, Homo sapien
aatagcatgcttaagatatggaacc

SEQ ID NO: 443566 - DNA, 25 bp, Homo sapien
gtttgcctttttgcctgaacagaag

SEQ ID NO: 443567 - DNA, 25 bp, Homo sapien
aaactataggtacacaaaggcacac

SEQ ID NO: 443568 - DNA, 25 bp, Homo sapien
tcaatagcttgagctgtcctcttca

SEQ ID NO: 443569 - DNA, 25 bp, Homo sapien
tctcagcggagaaggagtcaaggat

SEQ ID NO: 443570 - DNA, 25 bp, Homo sapien
cagcggagaaggagtcaaggattct

SEQ ID NO: 443571 - DNA, 25 bp, Homo sapien
cggagaaggagtcaaggattcttta

SEQ ID NO: 443572 - DNA, 25 bp, Homo sapien
tgagtctcagcggagaaggagtcaa

SEQ ID NO: 443573 - DNA, 25 bp, Homo sapien
tgggaaaccaatataggctacatga

SEQ ID NO: 443574 - DNA, 25 bp, Homo sapien
gacattcatctcctatccttggaca

SEQ ID NO: 443575 - DNA, 25 bp, Homo sapien
gcaggcatcatccaaataggctgga

SEQ ID NO: 443576 - DNA, 25 bp, Homo sapien
gattggcttgtagactgagtggaaa

SEQ ID NO: 443577 - DNA, 25 bp, Homo sapien
gactatcaatattgtagagctccaa

SEQ ID NO: 443578 - DNA, 25 bp, Homo sapien
tcccaagcatcagaacctgattaaa

SEQ ID NO: 443579 - DNA, 25 bp, Homo sapien
aaagacatgctctgacaaatcgctg

SEQ ID NO: 443580 - DNA, 25 bp, Homo sapien
tcgctgatagatgttttcccaagca

SEQ ID NO: 443581 - DNA, 25 bp, Homo sapien
tttaacaacttgtaggcgctcctca

SEQ ID NO: 443582 - DNA, 25 bp, Homo sapien
gtaggcgctcctcattatcattgct

SEQ ID NO: 443583 - DNA, 25 bp, Homo sapien
cagtagtttaacaacttgtaggcgc

SEQ ID NO: 443584 - DNA, 25 bp, Homo sapien
tttgccagtagtttaacaacttgta

SEQ ID NO: 443585 - DNA, 25 bp, Homo sapien
gcttgttttgagaagccaattctga

SEQ ID NO: 443586 - DNA, 25 bp, Homo sapien
cttgttttgagaagccaattctgaa

SEQ ID NO: 443587 - DNA, 25 bp, Homo sapien
ttgttttgagaagccaattctgaat

SEQ ID NO: 443588 - DNA, 25 bp, Homo sapien
gagacaatggctagcaaatttcaca

SEQ ID NO: 443589 - DNA, 25 bp, Homo sapien
ctaaatcaggatggttcatgagaca

SEQ ID NO: 443590 - DNA, 25 bp, Homo sapien
cacattccaggcggattggtacatg

SEQ ID NO: 443591 - DNA, 25 bp, Homo sapien
ggttcatgagacaatggctagcaaa

SEQ ID NO: 443592 - DNA, 25 bp, Homo sapien
gacacaataacatcatgtctaatag

SEQ ID NO: 443593 - DNA, 25 bp, Homo sapien
taagtaagtgatcattgaccagaag

SEQ ID NO: 443594 - DNA, 25 bp, Homo sapien
tgaccagaagaatatcctttttagc

SEQ ID NO: 443595 - DNA, 25 bp, Homo sapien
tagcagctgtaactattgacacaat

SEQ ID NO: 443596 - DNA, 25 bp, Homo sapien
gatccatgctatctgttttgcagca

SEQ ID NO: 443597 - DNA, 25 bp, Homo sapien
tgtagcaatttgtctttgatccatg

SEQ ID NO: 443598 - DNA, 25 bp, Homo sapien
gctgctgactgtaaagcatatttct

SEQ ID NO: 443599 - DNA, 25 bp, Homo sapien
tcatggcttctttgcgtactctcca

SEQ ID NO: 443600 - DNA, 25 bp, Homo sapien
tgaggaaccatgtattgagcaaaga

SEQ ID NO: 443601 - DNA, 25 bp, Homo sapien
aattgtgaggaaccatgtattgagc

SEQ ID NO: 443602 - DNA, 25 bp, Homo sapien
gagcaaagatccgttcaacaagtag

SEQ ID NO: 443603 - DNA, 25 bp, Homo sapien
agcatttaaatccagtgtggcatac

SEQ ID NO: 443604 - DNA, 25 bp, Homo sapien
tgtttacactacatagattacattt

SEQ ID NO: 443605 - DNA, 25 bp, Homo sapien
aatgtttacactacatagattacat

SEQ ID NO: 443606 - DNA, 25 bp, Homo sapien
caatgtttacactacatagattaca

SEQ ID NO: 443607 - DNA, 25 bp, Homo sapien
acaatgtttacactacatagattac

SEQ ID NO: 443608 - DNA, 25 bp, Homo sapien
catttgctggaatactaagggtcta

SEQ ID NO: 443609 - DNA, 25 bp, Homo sapien
gattgagtgcgaatcctggctccct

SEQ ID NO: 443610 - DNA, 25 bp, Homo sapien
taacacggtgctgctcaggctatgc

SEQ ID NO: 443611 - DNA, 25 bp, Homo sapien
gctttgtgggcaatcagatctctct

SEQ ID NO: 443612 - DNA, 25 bp, Homo sapien
gtgcaagaaggtcctggagacattc

SEQ ID NO: 443613 - DNA, 25 bp, Homo sapien
gaatcatgggcagtgcaagaaggtc

SEQ ID NO: 443614 - DNA, 25 bp, Homo sapien
aaaggcatcaggcatcaaccagtca

SEQ ID NO: 443615 - DNA, 25 bp, Homo sapien
ggcatcaaccagtcagaatcatggg

SEQ ID NO: 443616 - DNA, 25 bp, Homo sapien
gaaccttggaacaccttcatactca

SEQ ID NO: 443617 - DNA, 25 bp, Homo sapien
tcagaggtgactgttaaatgcccac

SEQ ID NO: 443618 - DNA, 25 bp, Homo sapien
catagttagtcaagatgtctgccct

SEQ ID NO: 443619 - DNA, 25 bp, Homo sapien
caatatatctcttgtgaatggcact

SEQ ID NO: 443620 - DNA, 25 bp, Homo sapien
tcaaatttgggacacctgaattcct

SEQ ID NO: 443621 - DNA, 25 bp, Homo sapien
gaaatgtcaagctattttaaagccc

SEQ ID NO: 443622 - DNA, 25 bp, Homo sapien
cacgtcaaaatggtactggcaaaag

SEQ ID NO: 443623 - DNA, 25 bp, Homo sapien
ggcaaaagcaacattattaggacat

SEQ ID NO: 443624 - DNA, 25 bp, Homo sapien
aagcaaatcctttacttgatgtcgg

SEQ ID NO: 443625 - DNA, 25 bp, Homo sapien
ttgcttaatcaagtcaagcaaatcc

SEQ ID NO: 443626 - DNA, 25 bp, Homo sapien
tttgggttgcttaatcaagtcaagc

SEQ ID NO: 443627 - DNA, 25 bp, Homo sapien
acttgatgtcggagcagattttgac

SEQ ID NO: 443628 - DNA, 25 bp, Homo sapien
cccttagatgaaaacaacactgctc

SEQ ID NO: 443629 - DNA, 25 bp, Homo sapien
gggtcactataaaccactcaaatgg

SEQ ID NO: 443630 - DNA, 25 bp, Homo sapien
gacctctgtcctatgaagtgtatgt

SEQ ID NO: 443631 - DNA, 25 bp, Homo sapien
tttaaaatgaccaggcgcactgctt

SEQ ID NO: 443632 - DNA, 25 bp, Homo sapien
taaatcacacaaaaaaatgcaaaat

SEQ ID NO: 443633 - DNA, 25 bp, Homo sapien
gtaaatcacacaaaaaaatgcaaaa

SEQ ID NO: 443634 - DNA, 25 bp, Homo sapien
tttgaaaatatggccttgacactgg

SEQ ID NO: 443635 - DNA, 25 bp, Homo sapien
ttttgaaaatatggccttgacactg

SEQ ID NO: 443636 - DNA, 25 bp, Homo sapien
cttttgaaaatatggccttgacact

SEQ ID NO: 443637 - DNA, 25 bp, Homo sapien
ttgaaaatatggccttgacactggc

SEQ ID NO: 443638 - DNA, 25 bp, Homo sapien
agcatgttggactaacaagtacttc

SEQ ID NO: 443639 - DNA, 25 bp, Homo sapien
aacaagtacttctaactgctttctt

SEQ ID NO: 443640 - DNA, 25 bp, Homo sapien
caagtacttctaactgctttcttat

SEQ ID NO: 443641 - DNA, 25 bp, Homo sapien
tcatcttctaacacctgtgtgaatt

SEQ ID NO: 443642 - DNA, 25 bp, Homo sapien
gacgctggaataaacaaactgtaag

SEQ ID NO: 443643 - DNA, 25 bp, Homo sapien
taaggtccctgtctcatatattaca

SEQ ID NO: 443644 - DNA, 25 bp, Homo sapien
ttcaagtaatcagggaaaaggtaga

SEQ ID NO: 443645 - DNA, 25 bp, Homo sapien
aactgtaagaattgaacaagcccag

SEQ ID NO: 443646 - DNA, 25 bp, Homo sapien
tgtaggctgtttggggttgcccaac

SEQ ID NO: 443647 - DNA, 25 bp, Homo sapien
tgcccaacttcttagttatttcacg

SEQ ID NO: 443648 - DNA, 25 bp, Homo sapien
gttgcccaacttcttagttatttca

SEQ ID NO: 443649 - DNA, 25 bp, Homo sapien
ttccaggaaaggatttgtaggctgt

SEQ ID NO: 443650 - DNA, 25 bp, Homo sapien
ctatgtgcacaggtgctatcctctc

SEQ ID NO: 443651 - DNA, 25 bp, Homo sapien
ctgatagattcggtatctatgtgca

SEQ ID NO: 443652 - DNA, 25 bp, Homo sapien
gatagattcggtatctatgtgcaca

SEQ ID NO: 443653 - DNA, 25 bp, Homo sapien
tatctatgtgcacaggtgctatcct

SEQ ID NO: 443654 - DNA, 25 bp, Homo sapien
ctgatggcttgatcagttggaacac

SEQ ID NO: 443655 - DNA, 25 bp, Homo sapien
tgatcagttggaacaccctcatctt

SEQ ID NO: 443656 - DNA, 25 bp, Homo sapien
gatcagttggaacaccctcatcttc

SEQ ID NO: 443657 - DNA, 25 bp, Homo sapien
ctgctctgatggcttgatcagttgg

SEQ ID NO: 443658 - DNA, 25 bp, Homo sapien
tcagacaagccagtaatgattcaaa

SEQ ID NO: 443659 - DNA, 25 bp, Homo sapien
cagacaagccagtaatgattcaaat

SEQ ID NO: 443660 - DNA, 25 bp, Homo sapien
agatgggatgtgtaaatgagagtac

SEQ ID NO: 443661 - DNA, 25 bp, Homo sapien
atgagatgggatgtgtaaatgagag

SEQ ID NO: 443662 - DNA, 25 bp, Homo sapien
tatgactacgccagtatcagaacca

SEQ ID NO: 443663 - DNA, 25 bp, Homo sapien
gaggtgaaagcaaccacctatgact

SEQ ID NO: 443664 - DNA, 25 bp, Homo sapien
gcaaccacctatgactacgccagta

SEQ ID NO: 443665 - DNA, 25 bp, Homo sapien
tgaaagcaaccacctatgactacgc

SEQ ID NO: 443666 - DNA, 25 bp, Homo sapien
ctcatcactaaactttgctcttcct

SEQ ID NO: 443667 - DNA, 25 bp, Homo sapien
catcactaaactttgctcttcctgg

SEQ ID NO: 443668 - DNA, 25 bp, Homo sapien
aactttgctcttcctggtaaacagg

SEQ ID NO: 443669 - DNA, 25 bp, Homo sapien
cactaaactttgctcttcctggtaa

SEQ ID NO: 443670 - DNA, 25 bp, Homo sapien
gcaggataacaacaatcgttcaggg

SEQ ID NO: 443671 - DNA, 25 bp, Homo sapien
gagggcataagcaaaactgagttcc

SEQ ID NO: 443672 - DNA, 25 bp, Homo sapien
tacttaaaagtagctagggctgcct

SEQ ID NO: 443673 - DNA, 25 bp, Homo sapien
agaaagagaatacgcacctggaggt

SEQ ID NO: 443674 - DNA, 25 bp, Homo sapien
tgaatggcatatttggcttgacggg

SEQ ID NO: 443675 - DNA, 25 bp, Homo sapien
atatcgcatggatacaatgaatggc

SEQ ID NO: 443676 - DNA, 25 bp, Homo sapien
gcaaactgggtctctttactagaaa

SEQ ID NO: 443677 - DNA, 25 bp, Homo sapien
tccttttttagatttgtgatgtaaa

SEQ ID NO: 443678 - DNA, 25 bp, Homo sapien
tgcttggatctaggctcttatgcag

SEQ ID NO: 443679 - DNA, 25 bp, Homo sapien
caaattgatcaggtgcaaggagagc

SEQ ID NO: 443680 - DNA, 25 bp, Homo sapien
ccaatggtgttatgagatgttccag

SEQ ID NO: 443681 - DNA, 25 bp, Homo sapien
gagcaatatgaccaatagtaaccaa

SEQ ID NO: 443682 - DNA, 25 bp, Homo sapien
catctggaacccaaagtttagttgt

SEQ ID NO: 443683 - DNA, 25 bp, Homo sapien
tcatctggaacccaaagtttagttg

SEQ ID NO: 443684 - DNA, 25 bp, Homo sapien
tttgaccattgtctcaggagatact

SEQ ID NO: 443685 - DNA, 25 bp, Homo sapien
gaccattgtctcaggagatacttct

SEQ ID NO: 443686 - DNA, 25 bp, Homo sapien
gttgttagcaatcttaaggtagaag

SEQ ID NO: 443687 - DNA, 25 bp, Homo sapien
tttcattccaagtagccatcgaacc

SEQ ID NO: 443688 - DNA, 25 bp, Homo sapien
ttcccctgttctgtcaagtctccat

SEQ ID NO: 443689 - DNA, 25 bp, Homo sapien
tctccatcactatgcaatattgttg

SEQ ID NO: 443690 - DNA, 25 bp, Homo sapien
agcttcacaatagcactcccagcag

SEQ ID NO: 443691 - DNA, 25 bp, Homo sapien
gctgatattgttctaatgtgatgat

SEQ ID NO: 443692 - DNA, 25 bp, Homo sapien
gttgatagctaatgcacatagctga

SEQ ID NO: 443693 - DNA, 25 bp, Homo sapien
gcaagtctcagacgtgacatatctg

SEQ ID NO: 443694 - DNA, 25 bp, Homo sapien
gcttcagatactcccgccttacatt

SEQ ID NO: 443695 - DNA, 25 bp, Homo sapien
tcctttacaggatcttttgcacaaa

SEQ ID NO: 443696 - DNA, 25 bp, Homo sapien
tatactcaagtggaagccgtaaacg

SEQ ID NO: 443697 - DNA, 25 bp, Homo sapien
tcaccaaacattgcctagcatgagc

SEQ ID NO: 443698 - DNA, 25 bp, Homo sapien
gaaaagtaggcacgcaaacacctga

SEQ ID NO: 443699 - DNA, 25 bp, Homo sapien
tagcaatgtgatacagcaggcagtg

SEQ ID NO: 443700 - DNA, 25 bp, Homo sapien
caggaacaattacaacagggaggca

SEQ ID NO: 443701 - DNA, 25 bp, Homo sapien
cagggaggcaatgtatacaacaatc

SEQ ID NO: 443702 - DNA, 25 bp, Homo sapien
cataatctgggtcatgtgccaaaag

SEQ ID NO: 443703 - DNA, 25 bp, Homo sapien
ctttaagttgttcaatatcctgtac

SEQ ID NO: 443704 - DNA, 25 bp, Homo sapien
tatcctgtactttgacataatctgg

SEQ ID NO: 443705 - DNA, 25 bp, Homo sapien
tgtgccaaaaggtgaattgtatatg

SEQ ID NO: 443706 - DNA, 25 bp, Homo sapien
ccaggcctggccgaactaatttctt

SEQ ID NO: 443707 - DNA, 25 bp, Homo sapien
tattgtaactgaacaaggaccaggg

SEQ ID NO: 443708 - DNA, 25 bp, Homo sapien
ggaccagggtctcgagcttatttaa

SEQ ID NO: 443709 - DNA, 25 bp, Homo sapien
tgaagtggctccctgatagaatgga

SEQ ID NO: 443710 - DNA, 25 bp, Homo sapien
ctttctgataaaagcgtgactgtta

SEQ ID NO: 443711 - DNA, 25 bp, Homo sapien
aaaagcgtgactgttattttcattt

SEQ ID NO: 443712 - DNA, 25 bp, Homo sapien
tctgataaaagcgtgactgttattt

SEQ ID NO: 443713 - DNA, 25 bp, Homo sapien
gataaaagcgtgactgttattttca

SEQ ID NO: 443714 - DNA, 25 bp, Homo sapien
tgcatcatctggtccttgggcatct

SEQ ID NO: 443715 - DNA, 25 bp, Homo sapien
tttttgcatcatctggtccttgggc

SEQ ID NO: 443716 - DNA, 25 bp, Homo sapien
catctggtccttgggcatcttttgt

SEQ ID NO: 443717 - DNA, 25 bp, Homo sapien
tcatttttgcatcatctggtccttg

SEQ ID NO: 443718 - DNA, 25 bp, Homo sapien
ggcaacatcacacacagtgtacagt

SEQ ID NO: 443719 - DNA, 25 bp, Homo sapien
gcaacatcacacacagtgtacagtt

SEQ ID NO: 443720 - DNA, 25 bp, Homo sapien
caacatcacacacagtgtacagttt

SEQ ID NO: 443721 - DNA, 25 bp, Homo sapien
tgtagtactctttgacatgatgata

SEQ ID NO: 443722 - DNA, 25 bp, Homo sapien
ggagattccaaactgtatgtagtac

SEQ ID NO: 443723 - DNA, 25 bp, Homo sapien
cgagctggtagtaccgggtctttag

SEQ ID NO: 443724 - DNA, 25 bp, Homo sapien
tgagtgaagaaacgagctggtagta

SEQ ID NO: 443725 - DNA, 25 bp, Homo sapien
aaaatgatttcatttcaggaggcag

SEQ ID NO: 443726 - DNA, 25 bp, Homo sapien
gcagataatttttggtgttactgaa

SEQ ID NO: 443727 - DNA, 25 bp, Homo sapien
ttttccaggagtgaaaaatgatttc

SEQ ID NO: 443728 - DNA, 25 bp, Homo sapien
ggaggcagataatttttggtgttac

SEQ ID NO: 443729 - DNA, 25 bp, Homo sapien
gatgaaagtggcttgttaacagctc

SEQ ID NO: 443730 - DNA, 25 bp, Homo sapien
tgatgaaagtggcttgttaacagct

SEQ ID NO: 443731 - DNA, 25 bp, Homo sapien
gcttacagtttccattcgtgatgat

SEQ ID NO: 443732 - DNA, 25 bp, Homo sapien
gctgcttgcattgcttacagtttcc

SEQ ID NO: 443733 - DNA, 25 bp, Homo sapien
tccattcgtgatgatttggtctgag

SEQ ID NO: 443734 - DNA, 25 bp, Homo sapien
gctgctgcttgcattgcttacagtt

SEQ ID NO: 443735 - DNA, 25 bp, Homo sapien
gtcgtctctcttgtcactttttttc

SEQ ID NO: 443736 - DNA, 25 bp, Homo sapien
ggcaaaggtgaagacattgtgtaat

SEQ ID NO: 443737 - DNA, 25 bp, Homo sapien
caaaggtgaagacattgtgtaatct

SEQ ID NO: 443738 - DNA, 25 bp, Homo sapien
agagtcgtctctcttgtcacttttt

SEQ ID NO: 443739 - DNA, 25 bp, Homo sapien
tgtaaatttgatagtcatgttaact

SEQ ID NO: 443740 - DNA, 25 bp, Homo sapien
aatgtaaatttgatagtcatgttaa

SEQ ID NO: 443741 - DNA, 25 bp, Homo sapien
taaatttgatagtcatgttaactgg

SEQ ID NO: 443742 - DNA, 25 bp, Homo sapien
aatttgatagtcatgttaactggtt

SEQ ID NO: 443743 - DNA, 25 bp, Homo sapien
gaagcacagattctatatacttaaa

SEQ ID NO: 443744 - DNA, 25 bp, Homo sapien
gaacaattgagattacttatcacat

SEQ ID NO: 443745 - DNA, 25 bp, Homo sapien
tgagtatgcaactggcaagtctaat

SEQ ID NO: 443746 - DNA, 25 bp, Homo sapien
ttatcacattgataagaagcacaga

SEQ ID NO: 443747 - DNA, 25 bp, Homo sapien
attccccttctctaaggctaagtct

SEQ ID NO: 443748 - DNA, 25 bp, Homo sapien
aagtctaaatatcctatgttaacaa

SEQ ID NO: 443749 - DNA, 25 bp, Homo sapien
gctaagtctaaatatcctatgttaa

SEQ ID NO: 443750 - DNA, 25 bp, Homo sapien
ccattccccttctctaaggctaagt

SEQ ID NO: 443751 - DNA, 25 bp, Homo sapien
gataaagcttaccagctaagtatcc

SEQ ID NO: 443752 - DNA, 25 bp, Homo sapien
gctaagtcacttactctgataaagc

SEQ ID NO: 443753 - DNA, 25 bp, Homo sapien
gtccattgagttgtgttagaagaca

SEQ ID NO: 443754 - DNA, 25 bp, Homo sapien
taaggaaatgatctgaagctgaact

SEQ ID NO: 443755 - DNA, 25 bp, Homo sapien
gaagaatggcattgactactgattt

SEQ ID NO: 443756 - DNA, 25 bp, Homo sapien
tacataggtagggatagattttcaa

SEQ ID NO: 443757 - DNA, 25 bp, Homo sapien
aacaattggtcaaacattctagagc

SEQ ID NO: 443758 - DNA, 25 bp, Homo sapien
gaatctgtcaatcagtcaatctatg

SEQ ID NO: 443759 - DNA, 25 bp, Homo sapien
atttgcactcttacttttcagctag

SEQ ID NO: 443760 - DNA, 25 bp, Homo sapien
cttatctgggataaaagggtacatt

SEQ ID NO: 443761 - DNA, 25 bp, Homo sapien
aattgtgagtatacatattttgagg

SEQ ID NO: 443762 - DNA, 25 bp, Homo sapien
aatgttgtcctagatatgtacctaa

SEQ ID NO: 443763 - DNA, 25 bp, Homo sapien
gctgtgctctccttgacactcggtg

SEQ ID NO: 443764 - DNA, 25 bp, Homo sapien
tttttggcggactattctgttcatc

SEQ ID NO: 443765 - DNA, 25 bp, Homo sapien
gtaccaacttagtcaagtcatccat

SEQ ID NO: 443766 - DNA, 25 bp, Homo sapien
aagccgtatggcctcttttccgact

SEQ ID NO: 443767 - DNA, 25 bp, Homo sapien
gcagtttagagttacacatgcttac

SEQ ID NO: 443768 - DNA, 25 bp, Homo sapien
tataatatagtaacgaaacagatgc

SEQ ID NO: 443769 - DNA, 25 bp, Homo sapien
ctttggggaagacccaaatgtggat

SEQ ID NO: 443770 - DNA, 25 bp, Homo sapien
aacagatgcagtttagagttacaca

SEQ ID NO: 443771 - DNA, 25 bp, Homo sapien
actgtgtggattcaattgcactaga

SEQ ID NO: 443772 - DNA, 25 bp, Homo sapien
tgcactagattcaggagattctgct

SEQ ID NO: 443773 - DNA, 25 bp, Homo sapien
atggcgtttttgatggtcttcctcg

SEQ ID NO: 443774 - DNA, 25 bp, Homo sapien
ttttgatggtcttcctcgtcctttc

SEQ ID NO: 443775 - DNA, 25 bp, Homo sapien
tagtgtaatggggctaaatatatgg

SEQ ID NO: 443776 - DNA, 25 bp, Homo sapien
taatggggctaaatatatggaattt

SEQ ID NO: 443777 - DNA, 25 bp, Homo sapien
ctagtgtaatggggctaaatatatg

SEQ ID NO: 443778 - DNA, 25 bp, Homo sapien
gtaatggggctaaatatatggaatt

SEQ ID NO: 443779 - DNA, 25 bp, Homo sapien
tacagcagtgatactctggtgacac

SEQ ID NO: 443780 - DNA, 25 bp, Homo sapien
gaagatttgcctgcacctgtaaaaa

SEQ ID NO: 443781 - DNA, 25 bp, Homo sapien
gaagtactggctagacacccaggca

SEQ ID NO: 443782 - DNA, 25 bp, Homo sapien
cattggcaactctgaaaagtcgagc

SEQ ID NO: 443783 - DNA, 25 bp, Homo sapien
cagtagattacctcgttagaagaaa

SEQ ID NO: 443784 - DNA, 25 bp, Homo sapien
ctgctttgaatatagtgtacctgtc

SEQ ID NO: 443785 - DNA, 25 bp, Homo sapien
catctatgtctactgagctgctcaa

SEQ ID NO: 443786 - DNA, 25 bp, Homo sapien
gaacataccataacctaaagtctgc

SEQ ID NO: 443787 - DNA, 25 bp, Homo sapien
tgcttgtttggagcgtcctacacgg

SEQ ID NO: 443788 - DNA, 25 bp, Homo sapien
ttcctgtggaatatcatcgacagga

SEQ ID NO: 443789 - DNA, 25 bp, Homo sapien
aatatcatcgacaggagagctaccc

SEQ ID NO: 443790 - DNA, 25 bp, Homo sapien
ggagagctaccctgaaacacatcta

SEQ ID NO: 443791 - DNA, 25 bp, Homo sapien
ttagacctctataacatttgatccc

SEQ ID NO: 443792 - DNA, 25 bp, Homo sapien
atgggtatatgtgcataagatatgc

SEQ ID NO: 443793 - DNA, 25 bp, Homo sapien
gccctggcatcacatatttagacct

SEQ ID NO: 443794 - DNA, 25 bp, Homo sapien
aacatttgatcccttacaggctcac

SEQ ID NO: 443795 - DNA, 25 bp, Homo sapien
tcccttttagcacttcgccgccgta

SEQ ID NO: 443796 - DNA, 25 bp, Homo sapien
tcgccgttcccttttagcacttcgc

SEQ ID NO: 443797 - DNA, 25 bp, Homo sapien
atcgccgttcccttttagcacttcg

SEQ ID NO: 443798 - DNA, 25 bp, Homo sapien
tcatcgccgttcccttttagcactt

SEQ ID NO: 443799 - DNA, 25 bp, Homo sapien
tcaatagatccaataaacagtcggg

SEQ ID NO: 443800 - DNA, 25 bp, Homo sapien
gggtactgtcagtttaaagccgcag

SEQ ID NO: 443801 - DNA, 25 bp, Homo sapien
cctctgaagattaagggtgcccagg

SEQ ID NO: 443802 - DNA, 25 bp, Homo sapien
gaggcatccttctggtgtaatggca

SEQ ID NO: 443803 - DNA, 25 bp, Homo sapien
ttacagaattttattgatacagtag

SEQ ID NO: 443804 - DNA, 25 bp, Homo sapien
aaattacagaattttattgatacag

SEQ ID NO: 443805 - DNA, 25 bp, Homo sapien
cattcaaattacagaattttattga

SEQ ID NO: 443806 - DNA, 25 bp, Homo sapien
tacagaattttattgatacagtaga

SEQ ID NO: 443807 - DNA, 25 bp, Homo sapien
tgttgatcccacctgagctgctttg

SEQ ID NO: 443808 - DNA, 25 bp, Homo sapien
taagataatcccctaagatggagac

SEQ ID NO: 443809 - DNA, 25 bp, Homo sapien
actgtaaagtatgtggctctccaaa

SEQ ID NO: 443810 - DNA, 25 bp, Homo sapien
tgcagcaagataacctcactgagga

SEQ ID NO: 443811 - DNA, 25 bp, Homo sapien
caaatatccaaagcacccaaagact

SEQ ID NO: 443812 - DNA, 25 bp, Homo sapien
cacgcttccatatccatcagcaaag

SEQ ID NO: 443813 - DNA, 25 bp, Homo sapien
tcagcaaagggctactaactgtaac

SEQ ID NO: 443814 - DNA, 25 bp, Homo sapien
gcttccttcatatcagtaaatgaca

SEQ ID NO: 443815 - DNA, 25 bp, Homo sapien
gaattatagcccaaagcacatgctg

SEQ ID NO: 443816 - DNA, 25 bp, Homo sapien
cttgaacacgaaagatggaggctgc

SEQ ID NO: 443817 - DNA, 25 bp, Homo sapien
tctacagtgtaatcaagttgggcca

SEQ ID NO: 443818 - DNA, 25 bp, Homo sapien
taggtccaaaaaatgagctgctctc

SEQ ID NO: 443819 - DNA, 25 bp, Homo sapien
tgtccactgtccaatcatctgaagg

SEQ ID NO: 443820 - DNA, 25 bp, Homo sapien
ggctccagtcccactgagatctagg

SEQ ID NO: 443821 - DNA, 25 bp, Homo sapien
ggctatcgtcccatgaacaaggtga

SEQ ID NO: 443822 - DNA, 25 bp, Homo sapien
ccatctgccagatatgcgtgactgt

SEQ ID NO: 443823 - DNA, 25 bp, Homo sapien
gaacgggctactcttctctgtgagg

SEQ ID NO: 443824 - DNA, 25 bp, Homo sapien
ggaagacaagatcatgcaactcagt

SEQ ID NO: 443825 - DNA, 25 bp, Homo sapien
caactcagtagaggcaatgtgccac

SEQ ID NO: 443826 - DNA, 25 bp, Homo sapien
tacataggtcattgtgaacgggcta

SEQ ID NO: 443827 - DNA, 25 bp, Homo sapien
gatgtggcataattactgaggtgca

SEQ ID NO: 443828 - DNA, 25 bp, Homo sapien
attactgaggtgcactcaaaatcca

SEQ ID NO: 443829 - DNA, 25 bp, Homo sapien
ggcataattactgaggtgcactcaa

SEQ ID NO: 443830 - DNA, 25 bp, Homo sapien
cagtacattgatgtggcataattac

SEQ ID NO: 443831 - DNA, 25 bp, Homo sapien
gggagaggacagacaccatgttcca

SEQ ID NO: 443832 - DNA, 25 bp, Homo sapien
taagagaccttgaagcttgggttcg

SEQ ID NO: 443833 - DNA, 25 bp, Homo sapien
catatggaagatggaaagcacctac

SEQ ID NO: 443834 - DNA, 25 bp, Homo sapien
gaacaagcgttctgtgtcccatgag

SEQ ID NO: 443835 - DNA, 25 bp, Homo sapien
tagtctcacatgacactccctgggc

SEQ ID NO: 443836 - DNA, 25 bp, Homo sapien
ctgctcttgtgggtacacaggatct

SEQ ID NO: 443837 - DNA, 25 bp, Homo sapien
cactgagcctctacccagcagagtt

SEQ ID NO: 443838 - DNA, 25 bp, Homo sapien
tgggcactgagcctctacccagcag

SEQ ID NO: 443839 - DNA, 25 bp, Homo sapien
tgcttgacatttacagtactggctc

SEQ ID NO: 443840 - DNA, 25 bp, Homo sapien
cattgcagttgagttgaagtgtcca

SEQ ID NO: 443841 - DNA, 25 bp, Homo sapien
aagtgtccatggcacggttgtctgc

SEQ ID NO: 443842 - DNA, 25 bp, Homo sapien
ctttgcaaacaaatcgacattgcag

SEQ ID NO: 443843 - DNA, 25 bp, Homo sapien
gttgggaattcaggtacttgtggaa

SEQ ID NO: 443844 - DNA, 25 bp, Homo sapien
cacagggccaaggttgggaattcag

SEQ ID NO: 443845 - DNA, 25 bp, Homo sapien
tccacagggccaaggttgggaattc

SEQ ID NO: 443846 - DNA, 25 bp, Homo sapien
ccaaggttgggaattcaggtacttg

SEQ ID NO: 443847 - DNA, 25 bp, Homo sapien
ggcactactgtctggtgtgcagcac

SEQ ID NO: 443848 - DNA, 25 bp, Homo sapien
tggcagtggcactactgtctggtgt

SEQ ID NO: 443849 - DNA, 25 bp, Homo sapien
cagtggcactactgtctggtgtgca

SEQ ID NO: 443850 - DNA, 25 bp, Homo sapien
gcatgctcatggtggcagtggcact

SEQ ID NO: 443851 - DNA, 25 bp, Homo sapien
ctcagctgacagaactgtagagagg

SEQ ID NO: 443852 - DNA, 25 bp, Homo sapien
tcagctgacagaactgtagagaggt

SEQ ID NO: 443853 - DNA, 25 bp, Homo sapien
gagaggtaggggtcctcagtggcca

SEQ ID NO: 443854 - DNA, 25 bp, Homo sapien
gtgaaatggcctcgaacagccaggg

SEQ ID NO: 443855 - DNA, 25 bp, Homo sapien
gggacttgtctatgttccaagctcc

SEQ ID NO: 443856 - DNA, 25 bp, Homo sapien
gccccagggatgaaccgctggcgaa

SEQ ID NO: 443857 - DNA, 25 bp, Homo sapien
tatgttccaagctccctcaagggct

SEQ ID NO: 443858 - DNA, 25 bp, Homo sapien
taaatgatataattcagatgtcatc

SEQ ID NO: 443859 - DNA, 25 bp, Homo sapien
tttgagggccactgttgaaagggtg

SEQ ID NO: 443860 - DNA, 25 bp, Homo sapien
tgaaagggtggtgatggatgtcagg

SEQ ID NO: 443861 - DNA, 25 bp, Homo sapien
gtgtggttcccgtgggcattttgtg

SEQ ID NO: 443862 - DNA, 25 bp, Homo sapien
taagacttgtggaaagagggctgat

SEQ ID NO: 443863 - DNA, 25 bp, Homo sapien
ctgcatcacaggtgtaagtaagact

SEQ ID NO: 443864 - DNA, 25 bp, Homo sapien
gaaggtgcgtgcaaggcatgtggct

SEQ ID NO: 443865 - DNA, 25 bp, Homo sapien
tgacactcggtgactcacccagctt

SEQ ID NO: 443866 - DNA, 25 bp, Homo sapien
ggtgcccacacgcagtggctcttca

SEQ ID NO: 443867 - DNA, 25 bp, Homo sapien
caccgaattaagacccacactggga

SEQ ID NO: 443868 - DNA, 25 bp, Homo sapien
gggtagctcactcatgaaggtagaa

SEQ ID NO: 443869 - DNA, 25 bp, Homo sapien
tgtgtatttggacatccgcccgcag

SEQ ID NO: 443870 - DNA, 25 bp, Homo sapien
ttcttcctgaactgtggagtaagcc

SEQ ID NO: 443871 - DNA, 25 bp, Homo sapien
tcttcctgaactgtggagtaagcca

SEQ ID NO: 443872 - DNA, 25 bp, Homo sapien
cttcctgaactgtggagtaagccat

SEQ ID NO: 443873 - DNA, 25 bp, Homo sapien
tgaagacaacggtggaggtgtcccc

SEQ ID NO: 443874 - DNA, 25 bp, Homo sapien
ctgaagacaacggtggaggtgtccc

SEQ ID NO: 443875 - DNA, 25 bp, Homo sapien
tgtccccatgagtcactgtctctcc

SEQ ID NO: 443876 - DNA, 25 bp, Homo sapien
gtacatcgcccaggacactcaaggt

SEQ ID NO: 443877 - DNA, 25 bp, Homo sapien
gacactcaaggtgcttagtagcaaa

SEQ ID NO: 443878 - DNA, 25 bp, Homo sapien
tgagtcatggcatcgttggacccca

SEQ ID NO: 443879 - DNA, 25 bp, Homo sapien
ttggaccccacggagccagtacatc

SEQ ID NO: 443880 - DNA, 25 bp, Homo sapien
ttggccaattccagcgctgtggatg

SEQ ID NO: 443881 - DNA, 25 bp, Homo sapien
tggcaaagtcattggcattatcacc

SEQ ID NO: 443882 - DNA, 25 bp, Homo sapien
tatcaccaagaacatattggccaat

SEQ ID NO: 443883 - DNA, 25 bp, Homo sapien
aggagccagagccttgagagacaat

SEQ ID NO: 443884 - DNA, 25 bp, Homo sapien
tggttggactattcctgcaccccag

SEQ ID NO: 443885 - DNA, 25 bp, Homo sapien
cacgctctgcggttttggttggact

SEQ ID NO: 443886 - DNA, 25 bp, Homo sapien
catcatcacgatggctgacagggac

SEQ ID NO: 443887 - DNA, 25 bp, Homo sapien
gctcagaagctaaaggagatgctct

SEQ ID NO: 443888 - DNA, 25 bp, Homo sapien
tgtgggttcttagggtctgattgcc

SEQ ID NO: 443889 - DNA, 25 bp, Homo sapien
tgttgtgggttcttagggtctgatt

SEQ ID NO: 443890 - DNA, 25 bp, Homo sapien
ctttgttgtgggttcttagggtctg

SEQ ID NO: 443891 - DNA, 25 bp, Homo sapien
ggttcttagggtctgattgccttta

SEQ ID NO: 443892 - DNA, 25 bp, Homo sapien
ccactgtcacctctaccaccaccct

SEQ ID NO: 443893 - DNA, 25 bp, Homo sapien
ctgtcacctctaccaccaccctcta

SEQ ID NO: 443894 - DNA, 25 bp, Homo sapien
tgactcttcccactgtcacctctac

SEQ ID NO: 443895 - DNA, 25 bp, Homo sapien
cctctaccaccaccctctaccacca

SEQ ID NO: 443896 - DNA, 25 bp, Homo sapien
cacatttctgagctcctggcttcct

SEQ ID NO: 443897 - DNA, 25 bp, Homo sapien
aacacatttctgagctcctggcttc

SEQ ID NO: 443898 - DNA, 25 bp, Homo sapien
tgaacacatttctgagctcctggct

SEQ ID NO: 443899 - DNA, 25 bp, Homo sapien
cagatgaacacatttctgagctcct

SEQ ID NO: 443900 - DNA, 25 bp, Homo sapien
cttctttatttactaggacaacaga

SEQ ID NO: 443901 - DNA, 25 bp, Homo sapien
gttttgtgaagttggttgattcttc

SEQ ID NO: 443902 - DNA, 25 bp, Homo sapien
ggagggacactggacctttggtcca

SEQ ID NO: 443903 - DNA, 25 bp, Homo sapien
cccctgtgggattgtggcacatgca

SEQ ID NO: 443904 - DNA, 25 bp, Homo sapien
catgcataattcctcggagggacac

SEQ ID NO: 443905 - DNA, 25 bp, Homo sapien
gatacataggatgcactctgatact

SEQ ID NO: 443906 - DNA, 25 bp, Homo sapien
tgaagcaatgcaagggtagtggttt

SEQ ID NO: 443907 - DNA, 25 bp, Homo sapien
tatgtgtcatcatagaggagaccaa

SEQ ID NO: 443908 - DNA, 25 bp, Homo sapien
gagaccaaatgctgaactagaggct

SEQ ID NO: 443909 - DNA, 25 bp, Homo sapien
gtctggtcctctttgtaagaactat

SEQ ID NO: 443910 - DNA, 25 bp, Homo sapien
tgcattcttcctaaaaacttgacga

SEQ ID NO: 443911 - DNA, 25 bp, Homo sapien
gcattcttcctaaaaacttgacgaa

SEQ ID NO: 443912 - DNA, 25 bp, Homo sapien
tggaaacacagccagtcatggaggc

SEQ ID NO: 443913 - DNA, 25 bp, Homo sapien
ctggaaacacagccagtcatggagg

SEQ ID NO: 443914 - DNA, 25 bp, Homo sapien
ggaagctcacaggtgatgtgatcct

SEQ ID NO: 443915 - DNA, 25 bp, Homo sapien
cccaggtaaatactgtcacaattca

SEQ ID NO: 443916 - DNA, 25 bp, Homo sapien
tcacaggtgatgtgatcctttcctc

SEQ ID NO: 443917 - DNA, 25 bp, Homo sapien
ggtaaatactgtcacaattcaattt

SEQ ID NO: 443918 - DNA, 25 bp, Homo sapien
gtgtcactttatggtggccttctat

SEQ ID NO: 443919 - DNA, 25 bp, Homo sapien
tccttactctggatggtgagagtca

SEQ ID NO: 443920 - DNA, 25 bp, Homo sapien
tgtcactttatggtggccttctatt

SEQ ID NO: 443921 - DNA, 25 bp, Homo sapien
ttttgatccttgcaaccagtccctt

SEQ ID NO: 443922 - DNA, 25 bp, Homo sapien
ccttttgatccttgcaaccagtccc

SEQ ID NO: 443923 - DNA, 25 bp, Homo sapien
ttgatccttgcaaccagtccctttc

SEQ ID NO: 443924 - DNA, 25 bp, Homo sapien
tgcaaccagtccctttccacttccc

SEQ ID NO: 443925 - DNA, 25 bp, Homo sapien
cagctcccctttcattggggtggca

SEQ ID NO: 443926 - DNA, 25 bp, Homo sapien
cattggggtggcagctacgtttgca

SEQ ID NO: 443927 - DNA, 25 bp, Homo sapien
cagctacgtttgcaggtgctatcac

SEQ ID NO: 443928 - DNA, 25 bp, Homo sapien
gtggcagctacgtttgcaggtgcta

SEQ ID NO: 443929 - DNA, 25 bp, Homo sapien
tcctacaactgttgcagcaaatgtc

SEQ ID NO: 443930 - DNA, 25 bp, Homo sapien
tagcaaaagcttatctctgaggcac

SEQ ID NO: 443931 - DNA, 25 bp, Homo sapien
tgcacaaatgcccactgtatcacag

SEQ ID NO: 443932 - DNA, 25 bp, Homo sapien
caactttggcggagagtaatttatc

SEQ ID NO: 443933 - DNA, 25 bp, Homo sapien
tgattctggcttggtgaggagtttc

SEQ ID NO: 443934 - DNA, 25 bp, Homo sapien
tctggcttggtgaggagtttcttct

SEQ ID NO: 443935 - DNA, 25 bp, Homo sapien
tcttgttgattctggcttggtgagg

SEQ ID NO: 443936 - DNA, 25 bp, Homo sapien
tggcttggtgaggagtttcttcttc

SEQ ID NO: 443937 - DNA, 25 bp, Homo sapien
tcacagacatcaccttctacggaca

SEQ ID NO: 443938 - DNA, 25 bp, Homo sapien
cacagacatcaccttctacggacat

SEQ ID NO: 443939 - DNA, 25 bp, Homo sapien
cagtcacagacatcaccttctacgg

SEQ ID NO: 443940 - DNA, 25 bp, Homo sapien
agtcacagacatcaccttctacgga

SEQ ID NO: 443941 - DNA, 25 bp, Homo sapien
tcaacactgaaagttgtcaacaatc

SEQ ID NO: 443942 - DNA, 25 bp, Homo sapien
attgtgttcccaggacgatgggagc

SEQ ID NO: 443943 - DNA, 25 bp, Homo sapien
cactgaaagttgtcaacaatctgat

SEQ ID NO: 443944 - DNA, 25 bp, Homo sapien
tctctttcctattgtgttcccagga

SEQ ID NO: 443945 - DNA, 25 bp, Homo sapien
cgggaggtccctgggtcgcacattt

SEQ ID NO: 443946 - DNA, 25 bp, Homo sapien
aagttgtgcgcacaggtctgctgga

SEQ ID NO: 443947 - DNA, 25 bp, Homo sapien
tagcaggtaatctgtgcaaagttgt

SEQ ID NO: 443948 - DNA, 25 bp, Homo sapien
cctgggtcgcacatttgccatctga

SEQ ID NO: 443949 - DNA, 25 bp, Homo sapien
cattgctggagccaattagggactg

SEQ ID NO: 443950 - DNA, 25 bp, Homo sapien
cactcggaggcccaaagaagctccg

SEQ ID NO: 443951 - DNA, 25 bp, Homo sapien
gactggccgaaatcctagagggact

SEQ ID NO: 443952 - DNA, 25 bp, Homo sapien
gaagctccggctggacattgctgga

SEQ ID NO: 443953 - DNA, 25 bp, Homo sapien
gccgctggggaagcacctgctctca

SEQ ID NO: 443954 - DNA, 25 bp, Homo sapien
ggagcgcgccgctggggaagcacct

SEQ ID NO: 443955 - DNA, 25 bp, Homo sapien
gcgccgctggggaagcacctgctct

SEQ ID NO: 443956 - DNA, 25 bp, Homo sapien
tagcggagcgcgccgctggggaagc

SEQ ID NO: 443957 - DNA, 25 bp, Homo sapien
gcagccctggagcggcttcgtcggg

SEQ ID NO: 443958 - DNA, 25 bp, Homo sapien
tggagcggcttcgtcggggagaaaa

SEQ ID NO: 443959 - DNA, 25 bp, Homo sapien
ttgcctgccgcgcgtcctctgagag

SEQ ID NO: 443960 - DNA, 25 bp, Homo sapien
gtttcgtggacgctcaggttcattc

SEQ ID NO: 443961 - DNA, 25 bp, Homo sapien
ataattacctgcgagccgggactgc

SEQ ID NO: 443962 - DNA, 25 bp, Homo sapien
cggcgggctccgctggcaataatta

SEQ ID NO: 443963 - DNA, 25 bp, Homo sapien
agcgggcaaggtgcggcaggcgtcg

SEQ ID NO: 443964 - DNA, 25 bp, Homo sapien
ccgcggacgtcggagaaaggcacct

SEQ ID NO: 443965 - DNA, 25 bp, Homo sapien
agaaacgggcccaggtctgcgcgcc

SEQ ID NO: 443966 - DNA, 25 bp, Homo sapien
cgtcgcccggctccgcacgcaggcg

SEQ ID NO: 443967 - DNA, 25 bp, Homo sapien
ggtctgcgcgccgtcgcccggctcc

SEQ ID NO: 443968 - DNA, 25 bp, Homo sapien
gggcaggaggccgcgagaaacgggc

SEQ ID NO: 443969 - DNA, 25 bp, Homo sapien
tgaacgtatcccagatggacgcacc

SEQ ID NO: 443970 - DNA, 25 bp, Homo sapien
cactcgcgcccacgagatggagaag

SEQ ID NO: 443971 - DNA, 25 bp, Homo sapien
gtacttgacctgaccgccgaagtgg

SEQ ID NO: 443972 - DNA, 25 bp, Homo sapien
agagctccgcgtaatccctgaagtg

SEQ ID NO: 443973 - DNA, 25 bp, Homo sapien
tacacgtgtccaagtgaagcctcgt

SEQ ID NO: 443974 - DNA, 25 bp, Homo sapien
agaactgctcagtttcccccggtga

SEQ ID NO: 443975 - DNA, 25 bp, Homo sapien
gtgaccacatacacgtgtccaagtg

SEQ ID NO: 443976 - DNA, 25 bp, Homo sapien
gtgtccaagtgaagcctcgtctggg

SEQ ID NO: 443977 - DNA, 25 bp, Homo sapien
tttctgacagtgcagaaacttggaa

SEQ ID NO: 443978 - DNA, 25 bp, Homo sapien
tctgacagtgcagaaacttggaaat

SEQ ID NO: 443979 - DNA, 25 bp, Homo sapien
tgacagtgcagaaacttggaaatgg

SEQ ID NO: 443980 - DNA, 25 bp, Homo sapien
gacagtgcagaaacttggaaatggc

SEQ ID NO: 443981 - DNA, 25 bp, Homo sapien
cctatggtctctgcctgaaatccaa

SEQ ID NO: 443982 - DNA, 25 bp, Homo sapien
ctccaacttgccctatggtctctgc

SEQ ID NO: 443983 - DNA, 25 bp, Homo sapien
tgttctccaacttgccctatggtct

SEQ ID NO: 443984 - DNA, 25 bp, Homo sapien
gttctccaacttgccctatggtctc

SEQ ID NO: 443985 - DNA, 25 bp, Homo sapien
cttgaggactttaacaaggctcaga

SEQ ID NO: 443986 - DNA, 25 bp, Homo sapien
ttgaggactttaacaaggctcagag

SEQ ID NO: 443987 - DNA, 25 bp, Homo sapien
tgaggactttaacaaggctcagagg

SEQ ID NO: 443988 - DNA, 25 bp, Homo sapien
ctgagtgggacggaaagaagtattg

SEQ ID NO: 443989 - DNA, 25 bp, Homo sapien
aagaagtattgtagagatgccagac

SEQ ID NO: 443990 - DNA, 25 bp, Homo sapien
ggacggaaagaagtattgtagagat

SEQ ID NO: 443991 - DNA, 25 bp, Homo sapien
agagatgccagactttggcatgagc

SEQ ID NO: 443992 - DNA, 25 bp, Homo sapien
gattgatccagtgagagcttagggc

SEQ ID NO: 443993 - DNA, 25 bp, Homo sapien
aaggttattcttcatgctctcggga

SEQ ID NO: 443994 - DNA, 25 bp, Homo sapien
tgaaaactcaaggtgggtccaaagc

SEQ ID NO: 443995 - DNA, 25 bp, Homo sapien
gatagtcaccatcaataaatacggg

SEQ ID NO: 443996 - DNA, 25 bp, Homo sapien
gatgctgtaacctctgtgccactcg

SEQ ID NO: 443997 - DNA, 25 bp, Homo sapien
catgagggaccatgcggtatacccg

SEQ ID NO: 443998 - DNA, 25 bp, Homo sapien
tgccactcgaaaccatccatgaggg

SEQ ID NO: 443999 - DNA, 25 bp, Homo sapien
tagaagagtccacgcctgatgctgt

SEQ ID NO: 444000 - DNA, 25 bp, Homo sapien
tagggcttggtgagactgctgattg

SEQ ID NO: 444001 - DNA, 25 bp, Homo sapien
tgattggttttgtcagctgacttac

SEQ ID NO: 444002 - DNA, 25 bp, Homo sapien
gcatacaaaggactgaacctgccag

SEQ ID NO: 444003 - DNA, 25 bp, Homo sapien
ctggctgggagattgtgccgcatac

SEQ ID NO: 444004 - DNA, 25 bp, Homo sapien
acaggagaagtagggctccctccga

SEQ ID NO: 444005 - DNA, 25 bp, Homo sapien
gcattcgttcccatgatctgcacag

SEQ ID NO: 444006 - DNA, 25 bp, Homo sapien
ctccattaatttgttaactaagatt

SEQ ID NO: 444007 - DNA, 25 bp, Homo sapien
taaacattcaggtcggtaaactgag

SEQ ID NO: 444008 - DNA, 25 bp, Homo sapien
tcaggtcggtaaactgagacagagt

SEQ ID NO: 444009 - DNA, 25 bp, Homo sapien
catttcctggagtaaagcgatctgg

SEQ ID NO: 444010 - DNA, 25 bp, Homo sapien
tggtggacatcccacaggtaaacat

SEQ ID NO: 444011 - DNA, 25 bp, Homo sapien
ccagggagaagcgaaaatgtgtaac

SEQ ID NO: 444012 - DNA, 25 bp, Homo sapien
gcccagtccagggagaagcgaaaat

SEQ ID NO: 444013 - DNA, 25 bp, Homo sapien
gttacccagagggagaatcagggcc

SEQ ID NO: 444014 - DNA, 25 bp, Homo sapien
acccagagggagaatcagggcccag

SEQ ID NO: 444015 - DNA, 25 bp, Homo sapien
gctcttgaaagcacagtcgggcata

SEQ ID NO: 444016 - DNA, 25 bp, Homo sapien
ccttcagaaggttgtggccagcact

SEQ ID NO: 444017 - DNA, 25 bp, Homo sapien
gatgttgacacggacaagctcgctg

SEQ ID NO: 444018 - DNA, 25 bp, Homo sapien
tatccaaagcttgacgtgatggccg

SEQ ID NO: 444019 - DNA, 25 bp, Homo sapien
cggagctgtgcggtcgttaaacgaa

SEQ ID NO: 444020 - DNA, 25 bp, Homo sapien
ttctgggcccgggaaaccattgctg

SEQ ID NO: 444021 - DNA, 25 bp, Homo sapien
gatctgcagcataacgatagaggcc

SEQ ID NO: 444022 - DNA, 25 bp, Homo sapien
gatagaggccaaacctcggagctgt

SEQ ID NO: 444023 - DNA, 25 bp, Homo sapien
aagccagtaaagactttcgggtgtg

SEQ ID NO: 444024 - DNA, 25 bp, Homo sapien
cttctgcctttcttcgagtagtaaa

SEQ ID NO: 444025 - DNA, 25 bp, Homo sapien
atgaaagccagtaaagactttcggg

SEQ ID NO: 444026 - DNA, 25 bp, Homo sapien
gccagtaaagactttcgggtgtgaa

SEQ ID NO: 444027 - DNA, 25 bp, Homo sapien
tgcaaggccctcaacaagatgccag

SEQ ID NO: 444028 - DNA, 25 bp, Homo sapien
cctagagccactgcggtatactgta

SEQ ID NO: 444029 - DNA, 25 bp, Homo sapien
gacacagggtttagacaggacctca

SEQ ID NO: 444030 - DNA, 25 bp, Homo sapien
cagtgagacagatccctcagggaca

SEQ ID NO: 444031 - DNA, 25 bp, Homo sapien
gccgcctagtgtcccggggctgatc

SEQ ID NO: 444032 - DNA, 25 bp, Homo sapien
ccggggctgatcctagaggtgccct

SEQ ID NO: 444033 - DNA, 25 bp, Homo sapien
cagcgccgccgcctagtgtcccggg

SEQ ID NO: 444034 - DNA, 25 bp, Homo sapien
tgccctcctttcgttcaccccaagc

SEQ ID NO: 444035 - DNA, 25 bp, Homo sapien
atgtacaccagaattcatgagagga

SEQ ID NO: 444036 - DNA, 25 bp, Homo sapien
ctgtattatatgtacaccagaattc

SEQ ID NO: 444037 - DNA, 25 bp, Homo sapien
tgtattatatgtacaccagaattca

SEQ ID NO: 444038 - DNA, 25 bp, Homo sapien
acaccagaattcatgagaggaaagc

SEQ ID NO: 444039 - DNA, 25 bp, Homo sapien
ggaaccacaagtcggccacttagcg

SEQ ID NO: 444040 - DNA, 25 bp, Homo sapien
tagaattggcccacaaaggaagaag

SEQ ID NO: 444041 - DNA, 25 bp, Homo sapien
gatcaaaggaatacgccgcgaatgc

SEQ ID NO: 444042 - DNA, 25 bp, Homo sapien
cacttagcgcccctgtagaattggc

SEQ ID NO: 444043 - DNA, 25 bp, Homo sapien
gcagggcaaaatgaacggcggataa

SEQ ID NO: 444044 - DNA, 25 bp, Homo sapien
tccttccaaagcagggcaaaatgaa

SEQ ID NO: 444045 - DNA, 25 bp, Homo sapien
tgacgtgtcactaatgaaactggaa

SEQ ID NO: 444046 - DNA, 25 bp, Homo sapien
tcaaagataaaatgacgtgtcacta

SEQ ID NO: 444047 - DNA, 25 bp, Homo sapien
gaatatttcctatgttcagcactgt

SEQ ID NO: 444048 - DNA, 25 bp, Homo sapien
tagaaggcttcaggatgaatcattt

SEQ ID NO: 444049 - DNA, 25 bp, Homo sapien
gtttccgttgaagataatgtataca

SEQ ID NO: 444050 - DNA, 25 bp, Homo sapien
cattaagggtaagttgtatgagtct

SEQ ID NO: 444051 - DNA, 25 bp, Homo sapien
gttgccaacactgctggaatcttgc

SEQ ID NO: 444052 - DNA, 25 bp, Homo sapien
cactgctggaatcttgcagctcatc

SEQ ID NO: 444053 - DNA, 25 bp, Homo sapien
gccaacactgctggaatcttgcagc

SEQ ID NO: 444054 - DNA, 25 bp, Homo sapien
aacactgctggaatcttgcagctca

SEQ ID NO: 444055 - DNA, 25 bp, Homo sapien
tgtctgagtgaaccagtgcagccat

SEQ ID NO: 444056 - DNA, 25 bp, Homo sapien
tccttcctctctgtctgagtgaacc

SEQ ID NO: 444057 - DNA, 25 bp, Homo sapien
tcctctctgtctgagtgaaccagtg

SEQ ID NO: 444058 - DNA, 25 bp, Homo sapien
ctaatttctggtttccctcagctcc

SEQ ID NO: 444059 - DNA, 25 bp, Homo sapien
gggagtgatcccttaccaagccatg

SEQ ID NO: 444060 - DNA, 25 bp, Homo sapien
tatcctggaggaacactccctgagc

SEQ ID NO: 444061 - DNA, 25 bp, Homo sapien
ccaaaggcactttcgaaagcgtggg

SEQ ID NO: 444062 - DNA, 25 bp, Homo sapien
aacagggtgtcagaatcagtcggga

SEQ ID NO: 444063 - DNA, 25 bp, Homo sapien
ggaggagaaatttgtcttgaattca

SEQ ID NO: 444064 - DNA, 25 bp, Homo sapien
ctaagatgattaggctgggcagaag

SEQ ID NO: 444065 - DNA, 25 bp, Homo sapien
tcttgtattcttccggattccccaa

SEQ ID NO: 444066 - DNA, 25 bp, Homo sapien
ggcagccttgctgacatgacccttc

SEQ ID NO: 444067 - DNA, 25 bp, Homo sapien
ctctttatgacttgggaattggccc

SEQ ID NO: 444068 - DNA, 25 bp, Homo sapien
gagtctgtgtgtagaacctccctcc

SEQ ID NO: 444069 - DNA, 25 bp, Homo sapien
aatgcaggcagtttataagggtggc

SEQ ID NO: 444070 - DNA, 25 bp, Homo sapien
tgcaataggctctgggtatgccaag

SEQ ID NO: 444071 - DNA, 25 bp, Homo sapien
aaaactagaccaaggggacactcat

SEQ ID NO: 444072 - DNA, 25 bp, Homo sapien
catagctaggtttttaggtgaaaga

SEQ ID NO: 444073 - DNA, 25 bp, Homo sapien
gatcacatacaagagagatgcttat

SEQ ID NO: 444074 - DNA, 25 bp, Homo sapien
tcatcactcgccttttatcttcaaa

SEQ ID NO: 444075 - DNA, 25 bp, Homo sapien
tagtagtgtgtaagaggagccttgc

SEQ ID NO: 444076 - DNA, 25 bp, Homo sapien
tcctgatgaatatgaagtcaccgca

SEQ ID NO: 444077 - DNA, 25 bp, Homo sapien
tcaccgcagtgagaggctgaacctg

SEQ ID NO: 444078 - DNA, 25 bp, Homo sapien
tctgccctaaatcaactgtgcacag

SEQ ID NO: 444079 - DNA, 25 bp, Homo sapien
gattagccaagaccgtcatactgac

SEQ ID NO: 444080 - DNA, 25 bp, Homo sapien
ggcaggcagattagccaagaccgtc

SEQ ID NO: 444081 - DNA, 25 bp, Homo sapien
tagccaagaccgtcatactgacttt

SEQ ID NO: 444082 - DNA, 25 bp, Homo sapien
ggcagattagccaagaccgtcatac

SEQ ID NO: 444083 - DNA, 25 bp, Homo sapien
tactttatccactagagacatccat

SEQ ID NO: 444084 - DNA, 25 bp, Homo sapien
tatccactagagacatccatttcag

SEQ ID NO: 444085 - DNA, 25 bp, Homo sapien
tccactagagacatccatttcagaa

SEQ ID NO: 444086 - DNA, 25 bp, Homo sapien
tttatccactagagacatccatttc

SEQ ID NO: 444087 - DNA, 25 bp, Homo sapien
tgcctttggccagtgctctttccca

SEQ ID NO: 444088 - DNA, 25 bp, Homo sapien
gcctttggccagtgctctttcccat

SEQ ID NO: 444089 - DNA, 25 bp, Homo sapien
ctgcctttggccagtgctctttccc

SEQ ID NO: 444090 - DNA, 25 bp, Homo sapien
tgcatcacttccaggcctactgaag

SEQ ID NO: 444091 - DNA, 25 bp, Homo sapien
tccaggcctactgaagttccatcac

SEQ ID NO: 444092 - DNA, 25 bp, Homo sapien
cacctccacatgaagcttctaggtc

SEQ ID NO: 444093 - DNA, 25 bp, Homo sapien
aagcttctaggtcacctgggcactg

SEQ ID NO: 444094 - DNA, 25 bp, Homo sapien
cactgtgtcgaatgctgggcagacc

SEQ ID NO: 444095 - DNA, 25 bp, Homo sapien
aattggctcgctgacggagaggaaa

SEQ ID NO: 444096 - DNA, 25 bp, Homo sapien
gcagaccgaagtggaattggctcgc

SEQ ID NO: 444097 - DNA, 25 bp, Homo sapien
ttataaagtttgttccttcatcaga

SEQ ID NO: 444098 - DNA, 25 bp, Homo sapien
catcctgattagtgttctttgggcc

SEQ ID NO: 444099 - DNA, 25 bp, Homo sapien
gcatcctgattagtgttctttgggc

SEQ ID NO: 444100 - DNA, 25 bp, Homo sapien
ttgtgttccatgtgcaacaacagag

SEQ ID NO: 444101 - DNA, 25 bp, Homo sapien
gttcagttgtgttccatgtgcaaca

SEQ ID NO: 444102 - DNA, 25 bp, Homo sapien
cagttgtgttccatgtgcaacaaca

SEQ ID NO: 444103 - DNA, 25 bp, Homo sapien
tcagttgtgttccatgtgcaacaac

SEQ ID NO: 444104 - DNA, 25 bp, Homo sapien
cactcggtgacagatgcaccatctg

SEQ ID NO: 444105 - DNA, 25 bp, Homo sapien
accatctgtcagtttctgaggagca

SEQ ID NO: 444106 - DNA, 25 bp, Homo sapien
gcaccatctgtcagtttctgaggag

SEQ ID NO: 444107 - DNA, 25 bp, Homo sapien
gctggcagagataacgaagagaaaa

SEQ ID NO: 444108 - DNA, 25 bp, Homo sapien
tacacctagatattgcttggaatgg

SEQ ID NO: 444109 - DNA, 25 bp, Homo sapien
agatctgtcctaattgttgttgctg

SEQ ID NO: 444110 - DNA, 25 bp, Homo sapien
ttaaggatggcaggactgacgacca

SEQ ID NO: 444111 - DNA, 25 bp, Homo sapien
cttggaatggttaattggcttctta

SEQ ID NO: 444112 - DNA, 25 bp, Homo sapien
gctgttgaagctgcacacccactct

SEQ ID NO: 444113 - DNA, 25 bp, Homo sapien
tcgaccccagcgtctgctgttgaag

SEQ ID NO: 444114 - DNA, 25 bp, Homo sapien
ttcaaagaacactgcggctgttgtc

SEQ ID NO: 444115 - DNA, 25 bp, Homo sapien
gcggctgttgtcgaccccagcgtct

SEQ ID NO: 444116 - DNA, 25 bp, Homo sapien
gtgtgcccaagcaactcagtgtcca

SEQ ID NO: 444117 - DNA, 25 bp, Homo sapien
ctcagtgtccaaatctgaaaggttg

SEQ ID NO: 444118 - DNA, 25 bp, Homo sapien
caggacccctgaggattaatacatg

SEQ ID NO: 444119 - DNA, 25 bp, Homo sapien
tgcaggacccctgaggattaataca

SEQ ID NO: 444120 - DNA, 25 bp, Homo sapien
gaaattgagttggaggcatatgtag

SEQ ID NO: 444121 - DNA, 25 bp, Homo sapien
gcatatgtagtagcctgagaacctg

SEQ ID NO: 444122 - DNA, 25 bp, Homo sapien
ggaatgcttgcgagtgaaattgagt

SEQ ID NO: 444123 - DNA, 25 bp, Homo sapien
cctgagaacctcaagttgcgacttg

SEQ ID NO: 444124 - DNA, 25 bp, Homo sapien
aatgcatgaaattggcttgccccag

SEQ ID NO: 444125 - DNA, 25 bp, Homo sapien
tttctctacctcgagagagccagag

SEQ ID NO: 444126 - DNA, 25 bp, Homo sapien
actttccctggtctgcggctgttga

SEQ ID NO: 444127 - DNA, 25 bp, Homo sapien
gaagaacagcagtgccagttgcaag

SEQ ID NO: 444128 - DNA, 25 bp, Homo sapien
gacctaattcgtatttatcacagag

SEQ ID NO: 444129 - DNA, 25 bp, Homo sapien
gggctttggaattacatgctttgga

SEQ ID NO: 444130 - DNA, 25 bp, Homo sapien
ctctgctgtgttaaggtatggcagc

SEQ ID NO: 444131 - DNA, 25 bp, Homo sapien
aaacaggttcctatgagtcagacaa

SEQ ID NO: 444132 - DNA, 25 bp, Homo sapien
gaaataatcttacaggtattctctg

SEQ ID NO: 444133 - DNA, 25 bp, Homo sapien
cgtgttgttcagcataaccaagcat

SEQ ID NO: 444134 - DNA, 25 bp, Homo sapien
ttttcagtgccgtgttgttcagcat

SEQ ID NO: 444135 - DNA, 25 bp, Homo sapien
tcagtgccgtgttgttcagcataac

SEQ ID NO: 444136 - DNA, 25 bp, Homo sapien
aactgtggcgtactgcatggtgacc

SEQ ID NO: 444137 - DNA, 25 bp, Homo sapien
tgaccgtctccctcagtccatggaa

SEQ ID NO: 444138 - DNA, 25 bp, Homo sapien
ggaagacgccctgtagatttccagg

SEQ ID NO: 444139 - DNA, 25 bp, Homo sapien
cagggcccttatttgtagagtcatc

SEQ ID NO: 444140 - DNA, 25 bp, Homo sapien
accactaagccactctccaaaaaag

SEQ ID NO: 444141 - DNA, 25 bp, Homo sapien
agctgtgggattcactagggtttgt

SEQ ID NO: 444142 - DNA, 25 bp, Homo sapien
gtgggattcactagggtttgtctct

SEQ ID NO: 444143 - DNA, 25 bp, Homo sapien
agcaggcaaccaccactaagccact

SEQ ID NO: 444144 - DNA, 25 bp, Homo sapien
ctcctctccttaggtgtatccatct

SEQ ID NO: 444145 - DNA, 25 bp, Homo sapien
aggtgtatccatctcaaatgtcttc

SEQ ID NO: 444146 - DNA, 25 bp, Homo sapien
tccttaggtgtatccatctcaaatg

SEQ ID NO: 444147 - DNA, 25 bp, Homo sapien
tctccttaggtgtatccatctcaaa

SEQ ID NO: 444148 - DNA, 25 bp, Homo sapien
ccactgttgaagcagcgttggcaat

SEQ ID NO: 444149 - DNA, 25 bp, Homo sapien
cagaccaccagctggaaatccaccc

SEQ ID NO: 444150 - DNA, 25 bp, Homo sapien
ccactgtgagctgcagcgagcacag

SEQ ID NO: 444151 - DNA, 25 bp, Homo sapien
tgcctccactgttgaagcagcgttg

SEQ ID NO: 444152 - DNA, 25 bp, Homo sapien
aacaaaaggaatgggctgccctgcc

SEQ ID NO: 444153 - DNA, 25 bp, Homo sapien
tcgtgggcccgagttcaccagggaa

SEQ ID NO: 444154 - DNA, 25 bp, Homo sapien
gcaacccgtgcatacagtgttttaa

SEQ ID NO: 444155 - DNA, 25 bp, Homo sapien
aagccttctagggttgagcaacaga

SEQ ID NO: 444156 - DNA, 25 bp, Homo sapien
tttgatgggcggaccttaaacaggc

SEQ ID NO: 444157 - DNA, 25 bp, Homo sapien
gggatataacaacgcattcaaatac

SEQ ID NO: 444158 - DNA, 25 bp, Homo sapien
ggtgctctcaggtccttgggatata

SEQ ID NO: 444159 - DNA, 25 bp, Homo sapien
aatgtcataggtgcgggaacggaca

SEQ ID NO: 444160 - DNA, 25 bp, Homo sapien
tgttctctagacagtggatctggaa

SEQ ID NO: 444161 - DNA, 25 bp, Homo sapien
tctgacactagggagtacaaggagt

SEQ ID NO: 444162 - DNA, 25 bp, Homo sapien
gaattgggtaagacctgtgttgttc

SEQ ID NO: 444163 - DNA, 25 bp, Homo sapien
agagctcagggcctcttgtgacttc

SEQ ID NO: 444164 - DNA, 25 bp, Homo sapien
ggcaggaagtgttcctagctctcgg

SEQ ID NO: 444165 - DNA, 25 bp, Homo sapien
agtccttggcaggaagtgttcctag

SEQ ID NO: 444166 - DNA, 25 bp, Homo sapien
gttcctagctctcggaatcacttgg

SEQ ID NO: 444167 - DNA, 25 bp, Homo sapien
gaagtgttcctagctctcggaatca

SEQ ID NO: 444168 - DNA, 25 bp, Homo sapien
gtgccaatcttccaggagttactct

SEQ ID NO: 444169 - DNA, 25 bp, Homo sapien
ttgtgccttcttctgtgccaatctt

SEQ ID NO: 444170 - DNA, 25 bp, Homo sapien
gccaatcttccaggagttactctgt

SEQ ID NO: 444171 - DNA, 25 bp, Homo sapien
atcttccaggagttactctgttggc

SEQ ID NO: 444172 - DNA, 25 bp, Homo sapien
tatctttggttatataaaggctctc

SEQ ID NO: 444173 - DNA, 25 bp, Homo sapien
tccaaaaatatctttggttatataa

SEQ ID NO: 444174 - DNA, 25 bp, Homo sapien
gtccaaaaatatctttggttatata

SEQ ID NO: 444175 - DNA, 25 bp, Homo sapien
aaatatctttggttatataaaggct

SEQ ID NO: 444176 - DNA, 25 bp, Homo sapien
ctcaggcactgatgggtggctccga

SEQ ID NO: 444177 - DNA, 25 bp, Homo sapien
caggcactgatgggtggctccgaga

SEQ ID NO: 444178 - DNA, 25 bp, Homo sapien
ggtggctccgagaatttctgaattc

SEQ ID NO: 444179 - DNA, 25 bp, Homo sapien
gtggctccgagaatttctgaattca

SEQ ID NO: 444180 - DNA, 25 bp, Homo sapien
ctcctttgccgtgggtgacatggga

SEQ ID NO: 444181 - DNA, 25 bp, Homo sapien
cgtgggtgacatgggatatggactc

SEQ ID NO: 444182 - DNA, 25 bp, Homo sapien
actcttcagaagtcttagagtctcc

SEQ ID NO: 444183 - DNA, 25 bp, Homo sapien
tgggaagtggagtcactgccccaca

SEQ ID NO: 444184 - DNA, 25 bp, Homo sapien
ctaacattaatgtagctaattcagg

SEQ ID NO: 444185 - DNA, 25 bp, Homo sapien
atcgtccaggagttactctgttggc

SEQ ID NO: 444186 - DNA, 25 bp, Homo sapien
tctgtgccaatcgtccaggagttac

SEQ ID NO: 444187 - DNA, 25 bp, Homo sapien
tgttgttcagatgcagacagttgcc

SEQ ID NO: 444188 - DNA, 25 bp, Homo sapien
gcagacagttgccaaatttgggttc

SEQ ID NO: 444189 - DNA, 25 bp, Homo sapien
cagtagcacagggtgtacagagatg

SEQ ID NO: 444190 - DNA, 25 bp, Homo sapien
gtggccaatccattggagttgcctg

SEQ ID NO: 444191 - DNA, 25 bp, Homo sapien
agggtggccaatccattggagttgc

SEQ ID NO: 444192 - DNA, 25 bp, Homo sapien
gagcagcacatgacacagtagcaca

SEQ ID NO: 444193 - DNA, 25 bp, Homo sapien
gaagtccgtgtgtgtgcctcttacc

SEQ ID NO: 444194 - DNA, 25 bp, Homo sapien
tcaaaaggcatcttgggaatttgcc

SEQ ID NO: 444195 - DNA, 25 bp, Homo sapien
caacctaagtggtgaacatggccca

SEQ ID NO: 444196 - DNA, 25 bp, Homo sapien
cgactactttcaaacctggagggtg

SEQ ID NO: 444197 - DNA, 25 bp, Homo sapien
gaacataaacgtaacatactagaac

SEQ ID NO: 444198 - DNA, 25 bp, Homo sapien
tagaaagcaggggaacataaacgta

SEQ ID NO: 444199 - DNA, 25 bp, Homo sapien
ctctttgaacaggattgtagaaagc

SEQ ID NO: 444200 - DNA, 25 bp, Homo sapien
tctggaatcctctctgtggttaagt

SEQ ID NO: 444201 - DNA, 25 bp, Homo sapien
ctttggtttttgatgagacaatgaa

SEQ ID NO: 444202 - DNA, 25 bp, Homo sapien
tttttgatgagacaatgaagtggat

SEQ ID NO: 444203 - DNA, 25 bp, Homo sapien
ttgatgagacaatgaagtggatgga

SEQ ID NO: 444204 - DNA, 25 bp, Homo sapien
tttggtttttgatgagacaatgaag

SEQ ID NO: 444205 - DNA, 25 bp, Homo sapien
tagaagctccttcgctcctttacag

SEQ ID NO: 444206 - DNA, 25 bp, Homo sapien
catccaggctctgtatagaagctcc

SEQ ID NO: 444207 - DNA, 25 bp, Homo sapien
tccggattgcagtcaagtccactga

SEQ ID NO: 444208 - DNA, 25 bp, Homo sapien
cctttacagcgttgagttccagagc

SEQ ID NO: 444209 - DNA, 25 bp, Homo sapien
gatgagccggattctagcacgccat

SEQ ID NO: 444210 - DNA, 25 bp, Homo sapien
aattcaacaaggtgagtggccggca

SEQ ID NO: 444211 - DNA, 25 bp, Homo sapien
ctaaattccatgacacctgagggcc

SEQ ID NO: 444212 - DNA, 25 bp, Homo sapien
tgccgagatgttcagtcaggtgccc

SEQ ID NO: 444213 - DNA, 25 bp, Homo sapien
acagtatggccccatagatctttct

SEQ ID NO: 444214 - DNA, 25 bp, Homo sapien
tggaaagtgcacagtatggccccat

SEQ ID NO: 444215 - DNA, 25 bp, Homo sapien
agtatggccccatagatctttcttt

SEQ ID NO: 444216 - DNA, 25 bp, Homo sapien
aaagtgcacagtatggccccataga

SEQ ID NO: 444217 - DNA, 25 bp, Homo sapien
gatgcaagcaccttaattggacggc

SEQ ID NO: 444218 - DNA, 25 bp, Homo sapien
ttggaccatcaagccgaaagcacgt

SEQ ID NO: 444219 - DNA, 25 bp, Homo sapien
caactttgcaatatggtgctcgacc

SEQ ID NO: 444220 - DNA, 25 bp, Homo sapien
cacagacgatgctatggaacagaaa

SEQ ID NO: 444221 - DNA, 25 bp, Homo sapien
caggagtttgccatcagcttaggaa

SEQ ID NO: 444222 - DNA, 25 bp, Homo sapien
taaatacaaacttatgatcttaatg

SEQ ID NO: 444223 - DNA, 25 bp, Homo sapien
gttttcagaaccagacaccccagca

SEQ ID NO: 444224 - DNA, 25 bp, Homo sapien
agcttaggaagcaaagagagacccc

SEQ ID NO: 444225 - DNA, 25 bp, Homo sapien
gagaagaggaccagctctctcagtt

SEQ ID NO: 444226 - DNA, 25 bp, Homo sapien
tctttgattccataggacttcatgc

SEQ ID NO: 444227 - DNA, 25 bp, Homo sapien
gaagatgcttgtgatttgggcactc

SEQ ID NO: 444228 - DNA, 25 bp, Homo sapien
tctccctctttgattccataggact

SEQ ID NO: 444229 - DNA, 25 bp, Homo sapien
tgattccataggacttcatgcactc

SEQ ID NO: 444230 - DNA, 25 bp, Homo sapien
gcatcaggtagtgttgctgttatca

SEQ ID NO: 444231 - DNA, 25 bp, Homo sapien
tattatcaggggtacaatgactttc

SEQ ID NO: 444232 - DNA, 25 bp, Homo sapien
tcctccaggtaggtatgaatttgtt

SEQ ID NO: 444233 - DNA, 25 bp, Homo sapien
tctactccaattatccatgagaagc

SEQ ID NO: 444234 - DNA, 25 bp, Homo sapien
catatgatcaagcagtcctacagga

SEQ ID NO: 444235 - DNA, 25 bp, Homo sapien
tatcaggtaaatgcaggtcaaaacc

SEQ ID NO: 444236 - DNA, 25 bp, Homo sapien
aaaatgtgattttggccaggagcgg

SEQ ID NO: 444237 - DNA, 25 bp, Homo sapien
gcagcattttacacgatagtcaaca

SEQ ID NO: 444238 - DNA, 25 bp, Homo sapien
gcctcggtgcccttacttggatttg

SEQ ID NO: 444239 - DNA, 25 bp, Homo sapien
cagaaatacgtgtggtgattacaga

SEQ ID NO: 444240 - DNA, 25 bp, Homo sapien
tggatttgcaagtttagagttaaag

SEQ ID NO: 444241 - DNA, 25 bp, Homo sapien
acactttgtagccaataatttccat

SEQ ID NO: 444242 - DNA, 25 bp, Homo sapien
cacagaggaggtctctgagttgagc

SEQ ID NO: 444243 - DNA, 25 bp, Homo sapien
tcacagaggaggtctctgagttgag

SEQ ID NO: 444244 - DNA, 25 bp, Homo sapien
tttgagattacagcccaacttcaag

SEQ ID NO: 444245 - DNA, 25 bp, Homo sapien
tgaagtattagagcacatggatgtc

SEQ ID NO: 444246 - DNA, 25 bp, Homo sapien
taagtgaaatcatacttggccactc

SEQ ID NO: 444247 - DNA, 25 bp, Homo sapien
tgttgcaggtcacctatctccttag

SEQ ID NO: 444248 - DNA, 25 bp, Homo sapien
agtgctgacctttcccgtcactttc

SEQ ID NO: 444249 - DNA, 25 bp, Homo sapien
ttaatgagacaaatgaggataggaa

SEQ ID NO: 444250 - DNA, 25 bp, Homo sapien
gattgtaacaaaagtccctcacagg

SEQ ID NO: 444251 - DNA, 25 bp, Homo sapien
gacaaagctggtgccgtgatctcta

SEQ ID NO: 444252 - DNA, 25 bp, Homo sapien
caagtgaagtggcagattagaggaa

SEQ ID NO: 444253 - DNA, 25 bp, Homo sapien
ggaattctgacatgctataccaaat

SEQ ID NO: 444254 - DNA, 25 bp, Homo sapien
agtaatcaccccagtgttttccaag

SEQ ID NO: 444255 - DNA, 25 bp, Homo sapien
ataaattagtaatcaccccagtgtt

SEQ ID NO: 444256 - DNA, 25 bp, Homo sapien
cagaaaaagatgaacgcagggcagt

SEQ ID NO: 444257 - DNA, 25 bp, Homo sapien
tgttctgtatggttccagaaaaaga

SEQ ID NO: 444258 - DNA, 25 bp, Homo sapien
gactagttgttgtgctgatgcttgg

SEQ ID NO: 444259 - DNA, 25 bp, Homo sapien
gacattataatgaagtgaaccacat

SEQ ID NO: 444260 - DNA, 25 bp, Homo sapien
agcaaatattgcaggcttatccttc

SEQ ID NO: 444261 - DNA, 25 bp, Homo sapien
aaatattgcaggcttatccttcctc

SEQ ID NO: 444262 - DNA, 25 bp, Homo sapien
gcaaatattgcaggcttatccttcc

SEQ ID NO: 444263 - DNA, 25 bp, Homo sapien
atattgcaggcttatccttcctctg

SEQ ID NO: 444264 - DNA, 25 bp, Homo sapien
aactacatatttcgcgggaggctga

SEQ ID NO: 444265 - DNA, 25 bp, Homo sapien
gagactaaaagaattgctaaactta

SEQ ID NO: 444266 - DNA, 25 bp, Homo sapien
aaagattccttgctgaaaacatgaa

SEQ ID NO: 444267 - DNA, 25 bp, Homo sapien
cactaagcagttgagtttgttatgc

SEQ ID NO: 444268 - DNA, 25 bp, Homo sapien
ccagatccctggttgaccaggatcc

SEQ ID NO: 444269 - DNA, 25 bp, Homo sapien
cttttcccgttatgtttcctgcttg

SEQ ID NO: 444270 - DNA, 25 bp, Homo sapien
atctcttttcccgttatgtttcctg

SEQ ID NO: 444271 - DNA, 25 bp, Homo sapien
tccctggttgaccaggatcccaatc

SEQ ID NO: 444272 - DNA, 25 bp, Homo sapien
tggcatttcactggcaatgccacag

SEQ ID NO: 444273 - DNA, 25 bp, Homo sapien
gctgtttgctgagccttggcatttc

SEQ ID NO: 444274 - DNA, 25 bp, Homo sapien
tgggtttgggcactgaaaattcgcc

SEQ ID NO: 444275 - DNA, 25 bp, Homo sapien
gccctacgagttaggcattctctgg

SEQ ID NO: 444276 - DNA, 25 bp, Homo sapien
cattactaatgaagtgtcctttaca

SEQ ID NO: 444277 - DNA, 25 bp, Homo sapien
gaacattcacctttcgggccaggca

SEQ ID NO: 444278 - DNA, 25 bp, Homo sapien
ccaaatgatagcaataatgctccca

SEQ ID NO: 444279 - DNA, 25 bp, Homo sapien
ggagggatccaacaaaccaaatgat

SEQ ID NO: 444280 - DNA, 25 bp, Homo sapien
gttcattacttttactaagatctga

SEQ ID NO: 444281 - DNA, 25 bp, Homo sapien
taagatctgattttccctgggccac

SEQ ID NO: 444282 - DNA, 25 bp, Homo sapien
gacgtcatgattctttactgtcctc

SEQ ID NO: 444283 - DNA, 25 bp, Homo sapien
ctgttttagttggtgtaagttctat

SEQ ID NO: 444284 - DNA, 25 bp, Homo sapien
taactaccaaagcaagatagcagta

SEQ ID NO: 444285 - DNA, 25 bp, Homo sapien
ttatcttgatttactgtaactacca

SEQ ID NO: 444286 - DNA, 25 bp, Homo sapien
taccaaagcaagatagcagtagccc

SEQ ID NO: 444287 - DNA, 25 bp, Homo sapien
tactgtaactaccaaagcaagatag

SEQ ID NO: 444288 - DNA, 25 bp, Homo sapien
cttagaaagcgggacaggatattga

SEQ ID NO: 444289 - DNA, 25 bp, Homo sapien
tgctctccttcattagaaactgttc

SEQ ID NO: 444290 - DNA, 25 bp, Homo sapien
gagcctgctctccttcattagaaac

SEQ ID NO: 444291 - DNA, 25 bp, Homo sapien
ggacaggatattgagcctgctctcc

SEQ ID NO: 444292 - DNA, 25 bp, Homo sapien
gactgttcctgtaattagggaagga

SEQ ID NO: 444293 - DNA, 25 bp, Homo sapien
atcaccatcacctttcatgtagagc

SEQ ID NO: 444294 - DNA, 25 bp, Homo sapien
ctagacatctccgtagttgtctggg

SEQ ID NO: 444295 - DNA, 25 bp, Homo sapien
gggctaccgtagtctagactgttcc

SEQ ID NO: 444296 - DNA, 25 bp, Homo sapien
tagataaattatatcaggatctttg

SEQ ID NO: 444297 - DNA, 25 bp, Homo sapien
ttttagataaattatatcaggatct

SEQ ID NO: 444298 - DNA, 25 bp, Homo sapien
tttggccaatgtgggcaggatatct

SEQ ID NO: 444299 - DNA, 25 bp, Homo sapien
aaaatgtagaatttggccaatgtgg

SEQ ID NO: 444300 - DNA, 25 bp, Homo sapien
tgctccctataaagctccctctgag

SEQ ID NO: 444301 - DNA, 25 bp, Homo sapien
cattattaggcaagtgtctggcata

SEQ ID NO: 444302 - DNA, 25 bp, Homo sapien
tttgcagttaaagagtcccatatag

SEQ ID NO: 444303 - DNA, 25 bp, Homo sapien
tagccaactggcgtagaaacagtgt

SEQ ID NO: 444304 - DNA, 25 bp, Homo sapien
tggactggtctatatttcaactgta

SEQ ID NO: 444305 - DNA, 25 bp, Homo sapien
ctggactggtctatatttcaactgt

SEQ ID NO: 444306 - DNA, 25 bp, Homo sapien
aactgtactcatagttattgtttag

SEQ ID NO: 444307 - DNA, 25 bp, Homo sapien
tttcaactgtactcatagttattgt

SEQ ID NO: 444308 - DNA, 25 bp, Homo sapien
tcagtgggtggagttcaaacaaaat

SEQ ID NO: 444309 - DNA, 25 bp, Homo sapien
cagtggagcgcggagcattcagcac

SEQ ID NO: 444310 - DNA, 25 bp, Homo sapien
ttcctggtaaccagagacaagttgc

SEQ ID NO: 444311 - DNA, 25 bp, Homo sapien
gaattgacttccataaatctagggc

SEQ ID NO: 444312 - DNA, 25 bp, Homo sapien
gacaagttgcacaatcggtgtggca

SEQ ID NO: 444313 - DNA, 25 bp, Homo sapien
ctgaagattctcacaagtaattgat

SEQ ID NO: 444314 - DNA, 25 bp, Homo sapien
cctgcatggaactgaaggatctcct

SEQ ID NO: 444315 - DNA, 25 bp, Homo sapien
tgccttaagagctttcctcaaattg

SEQ ID NO: 444316 - DNA, 25 bp, Homo sapien
gggacatttacaagcctgcatggaa

SEQ ID NO: 444317 - DNA, 25 bp, Homo sapien
aggtgagagaggcgctggggggaag

SEQ ID NO: 444318 - DNA, 25 bp, Homo sapien
ggtgagagaggcgctggggggaagt

SEQ ID NO: 444319 - DNA, 25 bp, Homo sapien
tgagagaggcgctggggggaagtga

SEQ ID NO: 444320 - DNA, 25 bp, Homo sapien
ctgagcagccgacagccatgatgtg

SEQ ID NO: 444321 - DNA, 25 bp, Homo sapien
tatcccgaggcagaatgtttttccc

SEQ ID NO: 444322 - DNA, 25 bp, Homo sapien
gaattcgcagaacttcccagagtcc

SEQ ID NO: 444323 - DNA, 25 bp, Homo sapien
tgaacccatgagtgcttcgtgtcct

SEQ ID NO: 444324 - DNA, 25 bp, Homo sapien
ccactaagaacctctgcttctaata

SEQ ID NO: 444325 - DNA, 25 bp, Homo sapien
cattttcaagcatgttcttgcaagt

SEQ ID NO: 444326 - DNA, 25 bp, Homo sapien
ttcccattttcaagcatgttcttgc

SEQ ID NO: 444327 - DNA, 25 bp, Homo sapien
ttcaagcatgttcttgcaagtttct

SEQ ID NO: 444328 - DNA, 25 bp, Homo sapien
tgtgcttccagtgttccctgatgat

SEQ ID NO: 444329 - DNA, 25 bp, Homo sapien
ctcctgtgcttccagtgttccctga

SEQ ID NO: 444330 - DNA, 25 bp, Homo sapien
ccagtgttccctgatgattctgtaa

SEQ ID NO: 444331 - DNA, 25 bp, Homo sapien
tgcttccagtgttccctgatgattc

SEQ ID NO: 444332 - DNA, 25 bp, Homo sapien
gcattatgcgcaatagcaaaaatgt

SEQ ID NO: 444333 - DNA, 25 bp, Homo sapien
catggcagcattatgcgcaatagca

SEQ ID NO: 444334 - DNA, 25 bp, Homo sapien
aatgcggtatgtacatacaacggac

SEQ ID NO: 444335 - DNA, 25 bp, Homo sapien
catacaacggactgctcttcagcct

SEQ ID NO: 444336 - DNA, 25 bp, Homo sapien
cttagctcaggatgtcattttcttg

SEQ ID NO: 444337 - DNA, 25 bp, Homo sapien
atggcacagttgaggggtaagcgag

SEQ ID NO: 444338 - DNA, 25 bp, Homo sapien
tgaggggtaagcgagagacagtctg

SEQ ID NO: 444339 - DNA, 25 bp, Homo sapien
agcattagacaaagtttgaattttc

SEQ ID NO: 444340 - DNA, 25 bp, Homo sapien
tcacgggttgccacgtaactgttcg

SEQ ID NO: 444341 - DNA, 25 bp, Homo sapien
taactgttcgtagctaaacggattc

SEQ ID NO: 444342 - DNA, 25 bp, Homo sapien
cacgtaactgttcgtagctaaacgg

SEQ ID NO: 444343 - DNA, 25 bp, Homo sapien
ggttgccacgtaactgttcgtagct

SEQ ID NO: 444344 - DNA, 25 bp, Homo sapien
ttccttcaatgccattgagctgttg

SEQ ID NO: 444345 - DNA, 25 bp, Homo sapien
gagctgttggtgtagaaatgcagcc

SEQ ID NO: 444346 - DNA, 25 bp, Homo sapien
ccattgagctgttggtgtagaaatg

SEQ ID NO: 444347 - DNA, 25 bp, Homo sapien
gttccttcaatgccattgagctgtt

SEQ ID NO: 444348 - DNA, 25 bp, Homo sapien
caagctcagtgttccctcatagaga

SEQ ID NO: 444349 - DNA, 25 bp, Homo sapien
tgtggtgcacctctagcaatggcag

SEQ ID NO: 444350 - DNA, 25 bp, Homo sapien
gggccctctgcttagaatctcataa

SEQ ID NO: 444351 - DNA, 25 bp, Homo sapien
gcaatggcagatagggtatgtctca

SEQ ID NO: 444352 - DNA, 25 bp, Homo sapien
caagctggcaccctttttatgggcg

SEQ ID NO: 444353 - DNA, 25 bp, Homo sapien
gaaggttctgtacggtcagggccca

SEQ ID NO: 444354 - DNA, 25 bp, Homo sapien
tgggcgagccttccttctggaaatt

SEQ ID NO: 444355 - DNA, 25 bp, Homo sapien
tcattagtgggtgtggtttcaggca

SEQ ID NO: 444356 - DNA, 25 bp, Homo sapien
acagcttaaggttaaaatctatggg

SEQ ID NO: 444357 - DNA, 25 bp, Homo sapien
aaaatctatggggactttcacagca

SEQ ID NO: 444358 - DNA, 25 bp, Homo sapien
tatggggactttcacagcatctgtc

SEQ ID NO: 444359 - DNA, 25 bp, Homo sapien
ctgaccagagcaacagcttaaggtt

SEQ ID NO: 444360 - DNA, 25 bp, Homo sapien
agcaacctgtctacctctgtttcac

SEQ ID NO: 444361 - DNA, 25 bp, Homo sapien
cagcaacctgtctacctctgtttca

SEQ ID NO: 444362 - DNA, 25 bp, Homo sapien
acacactgatgaatgggtggaggcc

SEQ ID NO: 444363 - DNA, 25 bp, Homo sapien
tcactgtcagtgtggagactactct

SEQ ID NO: 444364 - DNA, 25 bp, Homo sapien
cagtgtggagactactctatgtggg

SEQ ID NO: 444365 - DNA, 25 bp, Homo sapien
ctgggactctacacacactgatgaa

SEQ ID NO: 444366 - DNA, 25 bp, Homo sapien
cagtcaggggcaagttgtaggactc

SEQ ID NO: 444367 - DNA, 25 bp, Homo sapien
ttgtaggactcttagcaataacctc

SEQ ID NO: 444368 - DNA, 25 bp, Homo sapien
ttagcaataacctctgctgcagggt

SEQ ID NO: 444369 - DNA, 25 bp, Homo sapien
gcaataacctctgctgcagggtgga

SEQ ID NO: 444370 - DNA, 25 bp, Homo sapien
gcagcatagtaactaccgttcacat

SEQ ID NO: 444371 - DNA, 25 bp, Homo sapien
tgctgagcagcatagtaactaccgt

SEQ ID NO: 444372 - DNA, 25 bp, Homo sapien
cctcttgctgagcagcatagtaact

SEQ ID NO: 444373 - DNA, 25 bp, Homo sapien
tagtaactaccgttcacatcacctc

SEQ ID NO: 444374 - DNA, 25 bp, Homo sapien
cctaaaggaccaggctttctcttgg

SEQ ID NO: 444375 - DNA, 25 bp, Homo sapien
cctacactggcaacaacagttaaat

SEQ ID NO: 444376 - DNA, 25 bp, Homo sapien
cactggcaacaacagttaaatttga

SEQ ID NO: 444377 - DNA, 25 bp, Homo sapien
tacactggcaacaacagttaaattt

SEQ ID NO: 444378 - DNA, 25 bp, Homo sapien
gtacaagaccctggttctctagtct

SEQ ID NO: 444379 - DNA, 25 bp, Homo sapien
caatgtacaagaccctggttctcta

SEQ ID NO: 444380 - DNA, 25 bp, Homo sapien
tctctagtcttcctaacactaagca

SEQ ID NO: 444381 - DNA, 25 bp, Homo sapien
ctctagtcttcctaacactaagcat

SEQ ID NO: 444382 - DNA, 25 bp, Homo sapien
gcttttgccagttgctagggttcca

SEQ ID NO: 444383 - DNA, 25 bp, Homo sapien
atgattcctcctaatctttgctttt

SEQ ID NO: 444384 - DNA, 25 bp, Homo sapien
tgcttttgccagttgctagggttcc

SEQ ID NO: 444385 - DNA, 25 bp, Homo sapien
tcaatgattcctcctaatctttgct

SEQ ID NO: 444386 - DNA, 25 bp, Homo sapien
cattcaattctctatatctgtcaag

SEQ ID NO: 444387 - DNA, 25 bp, Homo sapien
gatatgatcgatccttctccatgcc

SEQ ID NO: 444388 - DNA, 25 bp, Homo sapien
gcataatgcatcatcaccttccaaa

SEQ ID NO: 444389 - DNA, 25 bp, Homo sapien
tgtgaattgcataatgcatcatcac

SEQ ID NO: 444390 - DNA, 25 bp, Homo sapien
agagtccaagagtcagcccagaaca

SEQ ID NO: 444391 - DNA, 25 bp, Homo sapien
agttgcagtaatgaatgctgtactc

SEQ ID NO: 444392 - DNA, 25 bp, Homo sapien
ggataagccccaacaacataagagt

SEQ ID NO: 444393 - DNA, 25 bp, Homo sapien
agaacaccgctctgttactgtatag

SEQ ID NO: 444394 - DNA, 25 bp, Homo sapien
tatttcctacgactgttgttcactg

SEQ ID NO: 444395 - DNA, 25 bp, Homo sapien
gaaatatcccttggtaccattctcc

SEQ ID NO: 444396 - DNA, 25 bp, Homo sapien
attctccacgtatttcctacgactg

SEQ ID NO: 444397 - DNA, 25 bp, Homo sapien
gatatcagatatcagctctcgatgc

SEQ ID NO: 444398 - DNA, 25 bp, Homo sapien
cgttatggactggttttgtacagag

SEQ ID NO: 444399 - DNA, 25 bp, Homo sapien
gaatgtgtgcttgtagattcctaac

SEQ ID NO: 444400 - DNA, 25 bp, Homo sapien
ggccacctctgccagtcgttatgga

SEQ ID NO: 444401 - DNA, 25 bp, Homo sapien
gaggaagacgtgtaccaatcagtta

SEQ ID NO: 444402 - DNA, 25 bp, Homo sapien
ggcacactggtaatagatcttcaag

SEQ ID NO: 444403 - DNA, 25 bp, Homo sapien
gtgttttgcgaaaagccccagtctg

SEQ ID NO: 444404 - DNA, 25 bp, Homo sapien
tgttttgcgaaaagccccagtctgg

SEQ ID NO: 444405 - DNA, 25 bp, Homo sapien
gccccccaagcaggatgctggcaca

SEQ ID NO: 444406 - DNA, 25 bp, Homo sapien
tccccacaacgcagagacaagtttt

SEQ ID NO: 444407 - DNA, 25 bp, Homo sapien
tacgcttgaaaatcccgcgcgagcg

SEQ ID NO: 444408 - DNA, 25 bp, Homo sapien
gctccaaatctcgtgacgtcactac

SEQ ID NO: 444409 - DNA, 25 bp, Homo sapien
cagagacaagttttcccgcgagctc

SEQ ID NO: 444410 - DNA, 25 bp, Homo sapien
gtcccaaggagcagggccgatactt

SEQ ID NO: 444411 - DNA, 25 bp, Homo sapien
gccgcctgctccttgtgatagtcca

SEQ ID NO: 444412 - DNA, 25 bp, Homo sapien
gggccgatacttgtccacccagagg

SEQ ID NO: 444413 - DNA, 25 bp, Homo sapien
tgtgatagtccagccgtcccaagga

SEQ ID NO: 444414 - DNA, 25 bp, Homo sapien
tgatggtctgatgttcaattctcaa

SEQ ID NO: 444415 - DNA, 25 bp, Homo sapien
caacaccataaagttcacgtagaat

SEQ ID NO: 444416 - DNA, 25 bp, Homo sapien
gatggtccgtacactaacagatgag

SEQ ID NO: 444417 - DNA, 25 bp, Homo sapien
gatgaggaaagtcaccacactgcac

SEQ ID NO: 444418 - DNA, 25 bp, Homo sapien
aacttcaaggtggtagttacttgca

SEQ ID NO: 444419 - DNA, 25 bp, Homo sapien
agttacttgcaatggtgctaatttc

SEQ ID NO: 444420 - DNA, 25 bp, Homo sapien
ctaggattaacttcaaggtggtagt

SEQ ID NO: 444421 - DNA, 25 bp, Homo sapien
ggtagttacttgcaatggtgctaat

SEQ ID NO: 444422 - DNA, 25 bp, Homo sapien
gtttcaagttgttgtgattgtgcca

SEQ ID NO: 444423 - DNA, 25 bp, Homo sapien
tactcggtcactatttccagcatca

SEQ ID NO: 444424 - DNA, 25 bp, Homo sapien
tcctgaatgactactcggtcactat

SEQ ID NO: 444425 - DNA, 25 bp, Homo sapien
tgtttcaagttgttgtgattgtgcc

SEQ ID NO: 444426 - DNA, 25 bp, Homo sapien
tggttcttcgcaaggcatgctgagc

SEQ ID NO: 444427 - DNA, 25 bp, Homo sapien
tatatttttccatggttcttcgcaa

SEQ ID NO: 444428 - DNA, 25 bp, Homo sapien
gatcaatctgcaggtagacatatat

SEQ ID NO: 444429 - DNA, 25 bp, Homo sapien
tactacgaataggtgggatcacttt

SEQ ID NO: 444430 - DNA, 25 bp, Homo sapien
ttacacacagtagataacacgtggc

SEQ ID NO: 444431 - DNA, 25 bp, Homo sapien
tacacacagtagataacacgtggca

SEQ ID NO: 444432 - DNA, 25 bp, Homo sapien
gttgtgaaggaagattcagaccttc

SEQ ID NO: 444433 - DNA, 25 bp, Homo sapien
gagccagttgtgaaggaagattcag

SEQ ID NO: 444434 - DNA, 25 bp, Homo sapien
ctatgagccagttgtgaaggaagat

SEQ ID NO: 444435 - DNA, 25 bp, Homo sapien
ccagttgtgaaggaagattcagacc

SEQ ID NO: 444436 - DNA, 25 bp, Homo sapien
gggcttttctgagatttctacaaga

SEQ ID NO: 444437 - DNA, 25 bp, Homo sapien
cagggcttttctgagatttctacaa

SEQ ID NO: 444438 - DNA, 25 bp, Homo sapien
ggcttttctgagatttctacaagac

SEQ ID NO: 444439 - DNA, 25 bp, Homo sapien
atttctacaagacttctctgcaagt

SEQ ID NO: 444440 - DNA, 25 bp, Homo sapien
gatacacctcccaatctgtctcagg

SEQ ID NO: 444441 - DNA, 25 bp, Homo sapien
tgctgactgacaatagcatttgcag

SEQ ID NO: 444442 - DNA, 25 bp, Homo sapien
catttgcagtctccctcagatacac

SEQ ID NO: 444443 - DNA, 25 bp, Homo sapien
ctttgtggagtttgctgactgacaa

SEQ ID NO: 444444 - DNA, 25 bp, Homo sapien
cattagaccaaggaagagtaagctc

SEQ ID NO: 444445 - DNA, 25 bp, Homo sapien
gtaaggtccaaagatcatttctcag

SEQ ID NO: 444446 - DNA, 25 bp, Homo sapien
gatcaactaccctctgtaaggtcca

SEQ ID NO: 444447 - DNA, 25 bp, Homo sapien
gagtaagctctattggctgcagtct

SEQ ID NO: 444448 - DNA, 25 bp, Homo sapien
caaccaggctaagcgaataggaaca

SEQ ID NO: 444449 - DNA, 25 bp, Homo sapien
caatgccactgcctagattgcacag

SEQ ID NO: 444450 - DNA, 25 bp, Homo sapien
ggtgacacaagataatatacgcatg

SEQ ID NO: 444451 - DNA, 25 bp, Homo sapien
tttacaggtaagcacgcaaccaggc

SEQ ID NO: 444452 - DNA, 25 bp, Homo sapien
acaaaataattggtattttgtgaag

SEQ ID NO: 444453 - DNA, 25 bp, Homo sapien
tattttgtgaagaaaataagaggta

SEQ ID NO: 444454 - DNA, 25 bp, Homo sapien
ataattggtattttgtgaagaaaat

SEQ ID NO: 444455 - DNA, 25 bp, Homo sapien
ctacataaaacaaaataattggtat

SEQ ID NO: 444456 - DNA, 25 bp, Homo sapien
gaggaatacaatgagttagaagctc

SEQ ID NO: 444457 - DNA, 25 bp, Homo sapien
gaagctcatacagccttccacgaac

SEQ ID NO: 444458 - DNA, 25 bp, Homo sapien
tcattattatctcaggaggaataca

SEQ ID NO: 444459 - DNA, 25 bp, Homo sapien
cagccttccacgaacttcaaggagc

SEQ ID NO: 444460 - DNA, 25 bp, Homo sapien
taacttcactttaggcaggccctcc

SEQ ID NO: 444461 - DNA, 25 bp, Homo sapien
tcttgatactgcaaaaagccctatg

SEQ ID NO: 444462 - DNA, 25 bp, Homo sapien
taaatacgtgcaattaatgcgctgg

SEQ ID NO: 444463 - DNA, 25 bp, Homo sapien
caatggaggtcatattcggaaaagc

SEQ ID NO: 444464 - DNA, 25 bp, Homo sapien
taaatggctttgctacccagctgta

SEQ ID NO: 444465 - DNA, 25 bp, Homo sapien
tagacgatgctcatagtaagctgcc

SEQ ID NO: 444466 - DNA, 25 bp, Homo sapien
caaacgcttccaagtgataaatggc

SEQ ID NO: 444467 - DNA, 25 bp, Homo sapien
tccatgaacttcttataaagtgcca

SEQ ID NO: 444468 - DNA, 25 bp, Homo sapien
caagatcagtgatcatctgggccag

SEQ ID NO: 444469 - DNA, 25 bp, Homo sapien
ataaaagttggaaatctgcagcctc

SEQ ID NO: 444470 - DNA, 25 bp, Homo sapien
gacggcatctataccttgattggga

SEQ ID NO: 444471 - DNA, 25 bp, Homo sapien
ccagggtagggatgaactgactgca

SEQ ID NO: 444472 - DNA, 25 bp, Homo sapien
caatgcggtggagacaaattacaca

SEQ ID NO: 444473 - DNA, 25 bp, Homo sapien
taagttgcaggcctagttcatggcc

SEQ ID NO: 444474 - DNA, 25 bp, Homo sapien
cacacatataactgacggacggcta

SEQ ID NO: 444475 - DNA, 25 bp, Homo sapien
tggatgcagccagagcagtggactt

SEQ ID NO: 444476 - DNA, 25 bp, Homo sapien
gatacagtctggatccactggacaa

SEQ ID NO: 444477 - DNA, 25 bp, Homo sapien
gaagggagttacacagaaaagcact

SEQ ID NO: 444478 - DNA, 25 bp, Homo sapien
tcacacatggaaaccagggccttag

SEQ ID NO: 444479 - DNA, 25 bp, Homo sapien
taacacgcaagtagcagatacagtc

SEQ ID NO: 444480 - DNA, 25 bp, Homo sapien
tagaaacatatgtccgttgggcagt

SEQ ID NO: 444481 - DNA, 25 bp, Homo sapien
ggcagcttctctaccgtattaggag

SEQ ID NO: 444482 - DNA, 25 bp, Homo sapien
aaaaggcattgtggagacttgatca

SEQ ID NO: 444483 - DNA, 25 bp, Homo sapien
gtggcacccatgatcagctggatcc

SEQ ID NO: 444484 - DNA, 25 bp, Homo sapien
taatcaacaattggaaggtgggcag

SEQ ID NO: 444485 - DNA, 25 bp, Homo sapien
tgcaaacctgatagcaacctcaaat

SEQ ID NO: 444486 - DNA, 25 bp, Homo sapien
gcagaaactggaaggtaatcaacaa

SEQ ID NO: 444487 - DNA, 25 bp, Homo sapien
gagaaaatcacgtaagcaggcaagc

SEQ ID NO: 444488 - DNA, 25 bp, Homo sapien
gacagcacacttggtagagtcctga

SEQ ID NO: 444489 - DNA, 25 bp, Homo sapien
ggatgacctttgtagacacaccctg

SEQ ID NO: 444490 - DNA, 25 bp, Homo sapien
gaaaaacatcagttgtacccaggca

SEQ ID NO: 444491 - DNA, 25 bp, Homo sapien
gctcccggatgacctttgtagacac

SEQ ID NO: 444492 - DNA, 25 bp, Homo sapien
ggctgacaatcttacagtagataac

SEQ ID NO: 444493 - DNA, 25 bp, Homo sapien
tctggtatggctgacaatcttacag

SEQ ID NO: 444494 - DNA, 25 bp, Homo sapien
tttctgcttctggtatggctgacaa

SEQ ID NO: 444495 - DNA, 25 bp, Homo sapien
tacagtagataacaactataagctt

SEQ ID NO: 444496 - DNA, 25 bp, Homo sapien
caagctcattaaatatgggcaaagg

SEQ ID NO: 444497 - DNA, 25 bp, Homo sapien
ggaatgggcaaagatctaatggcaa

SEQ ID NO: 444498 - DNA, 25 bp, Homo sapien
gacaacctacgaaatgtcattctgg

SEQ ID NO: 444499 - DNA, 25 bp, Homo sapien
cagataacctagagaatggtagaac

SEQ ID NO: 444500 - DNA, 25 bp, Homo sapien
aagggcaggcggcttaaatgtcatc

SEQ ID NO: 444501 - DNA, 25 bp, Homo sapien
catgaagcctatggtcagccagaga

SEQ ID NO: 444502 - DNA, 25 bp, Homo sapien
gaatctgcagtgagtcagaaccata

SEQ ID NO: 444503 - DNA, 25 bp, Homo sapien
tttccttgaggttccaagggcaggc

SEQ ID NO: 444504 - DNA, 25 bp, Homo sapien
gaatgtagaggaaacatacaagccc

SEQ ID NO: 444505 - DNA, 25 bp, Homo sapien
cacaggcctaggttgtttagcccaa

SEQ ID NO: 444506 - DNA, 25 bp, Homo sapien
aatctagccctttctagtcacaggc

SEQ ID NO: 444507 - DNA, 25 bp, Homo sapien
agttaattggctctttcagtcatca

SEQ ID NO: 444508 - DNA, 25 bp, Homo sapien
caaaaggcgatttctgaagtctcag

SEQ ID NO: 444509 - DNA, 25 bp, Homo sapien
gaaaaagtcctccatggcagtcacc

SEQ ID NO: 444510 - DNA, 25 bp, Homo sapien
ggcatgtggctatgtctacgcggct

SEQ ID NO: 444511 - DNA, 25 bp, Homo sapien
tatgaccatcactagttgcaagaga

SEQ ID NO: 444512 - DNA, 25 bp, Homo sapien
tattgaagaggtcatagtaccctgc

SEQ ID NO: 444513 - DNA, 25 bp, Homo sapien
aatgctttccatgagttaaggcagg

SEQ ID NO: 444514 - DNA, 25 bp, Homo sapien
ggaaatactttgtgcacttggtgct

SEQ ID NO: 444515 - DNA, 25 bp, Homo sapien
tcttcagtgctaggttgttgcctcc

SEQ ID NO: 444516 - DNA, 25 bp, Homo sapien
ccctgtgtatagatatcaagaagtg

SEQ ID NO: 444517 - DNA, 25 bp, Homo sapien
cagctgtctttatgatataacgact

SEQ ID NO: 444518 - DNA, 25 bp, Homo sapien
gagaaatgtctatcatgtactctga

SEQ ID NO: 444519 - DNA, 25 bp, Homo sapien
tagagaaatatccagacctttaaga

SEQ ID NO: 444520 - DNA, 25 bp, Homo sapien
aaaatgcagtttcactccctgttgg

SEQ ID NO: 444521 - DNA, 25 bp, Homo sapien
tctcccagcttttgtctcaataaga

SEQ ID NO: 444522 - DNA, 25 bp, Homo sapien
tagttctactagtggtgaattctcc

SEQ ID NO: 444523 - DNA, 25 bp, Homo sapien
tgttgctagacaaaaagaggataga

SEQ ID NO: 444524 - DNA, 25 bp, Homo sapien
tttgtatcaaccaaatagttcttag

SEQ ID NO: 444525 - DNA, 25 bp, Homo sapien
tgttcgtccgcaccaaagctcatgt

SEQ ID NO: 444526 - DNA, 25 bp, Homo sapien
tggatgagctctgacaagaagaagc

SEQ ID NO: 444527 - DNA, 25 bp, Homo sapien
tagttcttagatttgcaatgaggag

SEQ ID NO: 444528 - DNA, 25 bp, Homo sapien
tgcccaatttgtgtatacccgtgaa

SEQ ID NO: 444529 - DNA, 25 bp, Homo sapien
tacccgtgaatatcaagctcagagc

SEQ ID NO: 444530 - DNA, 25 bp, Homo sapien
catggtatttcctccgagtgaactc

SEQ ID NO: 444531 - DNA, 25 bp, Homo sapien
tttatgagaggtgagcaatcctgcc

SEQ ID NO: 444532 - DNA, 25 bp, Homo sapien
caaacatccttggacttagtgggag

SEQ ID NO: 444533 - DNA, 25 bp, Homo sapien
tgagacactaggagagccagatact

SEQ ID NO: 444534 - DNA, 25 bp, Homo sapien
tttagataaggagtccggctacacc

SEQ ID NO: 444535 - DNA, 25 bp, Homo sapien
gacttgccacatgctagctaggtga

SEQ ID NO: 444536 - DNA, 25 bp, Homo sapien
tgactacaagtatacagctaacgtg

SEQ ID NO: 444537 - DNA, 25 bp, Homo sapien
caaagcatcgcatgtaccccgtaaa

SEQ ID NO: 444538 - DNA, 25 bp, Homo sapien
caaaccaacaagtgatgcaggcatt

SEQ ID NO: 444539 - DNA, 25 bp, Homo sapien
gatgagcccactgccattgatgttg

SEQ ID NO: 444540 - DNA, 25 bp, Homo sapien
agagcctcgttacccagacaggcca

SEQ ID NO: 444541 - DNA, 25 bp, Homo sapien
gatgtacagagcctcgttacccaga

SEQ ID NO: 444542 - DNA, 25 bp, Homo sapien
tgactcaactttagggtgaagagag

SEQ ID NO: 444543 - DNA, 25 bp, Homo sapien
tttagggtgaagagagatgtacaga

SEQ ID NO: 444544 - DNA, 25 bp, Homo sapien
catacacttcatccgtagcaacata

SEQ ID NO: 444545 - DNA, 25 bp, Homo sapien
tgcaactaacctttaggaaactgcc

SEQ ID NO: 444546 - DNA, 25 bp, Homo sapien
aaagctcaccgacatggtttcagat

SEQ ID NO: 444547 - DNA, 25 bp, Homo sapien
tatagctgcgtacaaaaagctcacc

SEQ ID NO: 444548 - DNA, 25 bp, Homo sapien
caccaaggcttaaagcttgaaccct

SEQ ID NO: 444549 - DNA, 25 bp, Homo sapien
tcttaggtctcggtctgtgatggaa

SEQ ID NO: 444550 - DNA, 25 bp, Homo sapien
ggaatccaaccgcacatttactttc

SEQ ID NO: 444551 - DNA, 25 bp, Homo sapien
cacaggcctaacaccacaggtaagc

SEQ ID NO: 444552 - DNA, 25 bp, Homo sapien
tcaatgtgagctaacgacttcaaag

SEQ ID NO: 444553 - DNA, 25 bp, Homo sapien
tcctacaggttaatacggaacatcc

SEQ ID NO: 444554 - DNA, 25 bp, Homo sapien
gacttcaaagacaactgtatgcatg

SEQ ID NO: 444555 - DNA, 25 bp, Homo sapien
gaccgctaataattcagagcaacag

SEQ ID NO: 444556 - DNA, 25 bp, Homo sapien
cacattaatcttcctgtagcttgct

SEQ ID NO: 444557 - DNA, 25 bp, Homo sapien
aatttttccgtcttggtagctcagt

SEQ ID NO: 444558 - DNA, 25 bp, Homo sapien
ccgtcttggtagctcagtgatgtca

SEQ ID NO: 444559 - DNA, 25 bp, Homo sapien
cactcttgttcattaaccctataat

SEQ ID NO: 444560 - DNA, 25 bp, Homo sapien
atcactttgtacagccagaagaagg

SEQ ID NO: 444561 - DNA, 25 bp, Homo sapien
tcactttgtacagccagaagaaggg

SEQ ID NO: 444562 - DNA, 25 bp, Homo sapien
agaagggcttgcctgacactcccaa

SEQ ID NO: 444563 - DNA, 25 bp, Homo sapien
agggcttgcctgacactcccaagcc

SEQ ID NO: 444564 - DNA, 25 bp, Homo sapien
gcagacagcccagttagcatttagg

SEQ ID NO: 444565 - DNA, 25 bp, Homo sapien
ggactatgcactacttctgaatgga

SEQ ID NO: 444566 - DNA, 25 bp, Homo sapien
ggacatagcatagttgagcctcaga

SEQ ID NO: 444567 - DNA, 25 bp, Homo sapien
tgtgattcccatagccagagctggt

SEQ ID NO: 444568 - DNA, 25 bp, Homo sapien
gctgagggcatatgtcaaggacacc

SEQ ID NO: 444569 - DNA, 25 bp, Homo sapien
tctatctgataagaggtggtgatcc

SEQ ID NO: 444570 - DNA, 25 bp, Homo sapien
ccctgtccaggtgcttagagaaaac

SEQ ID NO: 444571 - DNA, 25 bp, Homo sapien
ggtcaaactaggtccactcaatggg

SEQ ID NO: 444572 - DNA, 25 bp, Homo sapien
tgacaaataggtaccagcagatgag

SEQ ID NO: 444573 - DNA, 25 bp, Homo sapien
gattagcaggtggacctaaccagca

SEQ ID NO: 444574 - DNA, 25 bp, Homo sapien
gctaaaagatgagagaagtccagtc

SEQ ID NO: 444575 - DNA, 25 bp, Homo sapien
gcaagttgttctttggaggtcctca

SEQ ID NO: 444576 - DNA, 25 bp, Homo sapien
gaatctgtaaaaaatggtgccactt

SEQ ID NO: 444577 - DNA, 25 bp, Homo sapien
tgagtgccagctggtgaaaatgctt

SEQ ID NO: 444578 - DNA, 25 bp, Homo sapien
cttggaaatagtcacacatgtgtcc

SEQ ID NO: 444579 - DNA, 25 bp, Homo sapien
taaatgtaggctgtattaagagacc

SEQ ID NO: 444580 - DNA, 25 bp, Homo sapien
tgttgctacaagttacaggacttca

SEQ ID NO: 444581 - DNA, 25 bp, Homo sapien
ggcagcaactttatcagccacagtg

SEQ ID NO: 444582 - DNA, 25 bp, Homo sapien
taatccacatacctgttgggcagca

SEQ ID NO: 444583 - DNA, 25 bp, Homo sapien
tacaatcagtcgcttctccaaagaa

SEQ ID NO: 444584 - DNA, 25 bp, Homo sapien
ccccgtgagaggcttctaagttcat

SEQ ID NO: 444585 - DNA, 25 bp, Homo sapien
ctgttgtgtgtgattgtctaggtat

SEQ ID NO: 444586 - DNA, 25 bp, Homo sapien
taggtataccccgtgagaggcttct

SEQ ID NO: 444587 - DNA, 25 bp, Homo sapien
gattgtctaggtataccccgtgaga

SEQ ID NO: 444588 - DNA, 25 bp, Homo sapien
catcagctctccacgcttttcatat

SEQ ID NO: 444589 - DNA, 25 bp, Homo sapien
tcccaatatgactgatcaggatcaa

SEQ ID NO: 444590 - DNA, 25 bp, Homo sapien
tcaggatcaagaatcatcagctctc

SEQ ID NO: 444591 - DNA, 25 bp, Homo sapien
ttaacataaggaaatcgagttccca

SEQ ID NO: 444592 - DNA, 25 bp, Homo sapien
ctgtgctacaataaggaaatggccc

SEQ ID NO: 444593 - DNA, 25 bp, Homo sapien
tcctatggtagactgtggaggctgt

SEQ ID NO: 444594 - DNA, 25 bp, Homo sapien
gaggctgtgctacaataaggaaatg

SEQ ID NO: 444595 - DNA, 25 bp, Homo sapien
cacagacagacatcgtctttcttcc

SEQ ID NO: 444596 - DNA, 25 bp, Homo sapien
tacattgaggcagtttgaagtaata

SEQ ID NO: 444597 - DNA, 25 bp, Homo sapien
tttcaggtgttgatgccatcagggt

SEQ ID NO: 444598 - DNA, 25 bp, Homo sapien
ccaggactgcgccttggttgcgtga

SEQ ID NO: 444599 - DNA, 25 bp, Homo sapien
tgctggagtggaagaccccattatg

SEQ ID NO: 444600 - DNA, 25 bp, Homo sapien
ttgggccacctgttatctttattcc

SEQ ID NO: 444601 - DNA, 25 bp, Homo sapien
ggttgagtatttcaggagaaacagt

SEQ ID NO: 444602 - DNA, 25 bp, Homo sapien
tggtatttgggccacctgttatctt

SEQ ID NO: 444603 - DNA, 25 bp, Homo sapien
aggttgagtatttcaggagaaacag

SEQ ID NO: 444604 - DNA, 25 bp, Homo sapien
gcttaaaagggccagaaggtactgc

SEQ ID NO: 444605 - DNA, 25 bp, Homo sapien
cttaaaagggccagaaggtactgct

SEQ ID NO: 444606 - DNA, 25 bp, Homo sapien
tgcttaaaagggccagaaggtactg

SEQ ID NO: 444607 - DNA, 25 bp, Homo sapien
tgattccaagtcaagctgactcaga

SEQ ID NO: 444608 - DNA, 25 bp, Homo sapien
gttttgcaataagagatacagccat

SEQ ID NO: 444609 - DNA, 25 bp, Homo sapien
aatagattgacttctagccagaata

SEQ ID NO: 444610 - DNA, 25 bp, Homo sapien
atagattgacttctagccagaataa

SEQ ID NO: 444611 - DNA, 25 bp, Homo sapien
agttcagactgggtagaagccacca

SEQ ID NO: 444612 - DNA, 25 bp, Homo sapien
ccgtgcctcctgaaatatggaacta

SEQ ID NO: 444613 - DNA, 25 bp, Homo sapien
gcgcccgagctctgctaatggacat

SEQ ID NO: 444614 - DNA, 25 bp, Homo sapien
attccccaaccaggcaagacaggac

SEQ ID NO: 444615 - DNA, 25 bp, Homo sapien
tcaaatccgattttttggtgactat

SEQ ID NO: 444616 - DNA, 25 bp, Homo sapien
tttggtgactattacctacaattac

SEQ ID NO: 444617 - DNA, 25 bp, Homo sapien
tacctacaattaccaggtaactcat

SEQ ID NO: 444618 - DNA, 25 bp, Homo sapien
tgttatcttcaaatccgattttttg

SEQ ID NO: 444619 - DNA, 25 bp, Homo sapien
tttcaagttaactgccatgacggac

SEQ ID NO: 444620 - DNA, 25 bp, Homo sapien
tgttctctgcgatgggacactctaa

SEQ ID NO: 444621 - DNA, 25 bp, Homo sapien
cataggccccacaatgctggatgcc

SEQ ID NO: 444622 - DNA, 25 bp, Homo sapien
tggatgccgtacagatcaagccacc

SEQ ID NO: 444623 - DNA, 25 bp, Homo sapien
gggcataaaatgcaagcgtgcactt

SEQ ID NO: 444624 - DNA, 25 bp, Homo sapien
gccaggttagtgtctgtgattgcca

SEQ ID NO: 444625 - DNA, 25 bp, Homo sapien
gcattcctctgacaaagaacgtatt

SEQ ID NO: 444626 - DNA, 25 bp, Homo sapien
ttgccctgacttaccgccaggttag

SEQ ID NO: 444627 - DNA, 25 bp, Homo sapien
acttcatttcgatccccacactgtt

SEQ ID NO: 444628 - DNA, 25 bp, Homo sapien
tttttgcttcacttcatttcgatcc

SEQ ID NO: 444629 - DNA, 25 bp, Homo sapien
catttcgatccccacactgtttatc

SEQ ID NO: 444630 - DNA, 25 bp, Homo sapien
ttgcttcacttcatttcgatcccca

SEQ ID NO: 444631 - DNA, 25 bp, Homo sapien
aattaccatgctattagatagctca

SEQ ID NO: 444632 - DNA, 25 bp, Homo sapien
tagatagctcagaattaagataagt

SEQ ID NO: 444633 - DNA, 25 bp, Homo sapien
gctattagatagctcagaattaaga

SEQ ID NO: 444634 - DNA, 25 bp, Homo sapien
gctcagaattaagataagtcttggc

SEQ ID NO: 444635 - DNA, 25 bp, Homo sapien
agactatgcccatccatggacctct

SEQ ID NO: 444636 - DNA, 25 bp, Homo sapien
cacttggtacacaatcagtcttcct

SEQ ID NO: 444637 - DNA, 25 bp, Homo sapien
gccatggacatgtgagtgctgtttt

SEQ ID NO: 444638 - DNA, 25 bp, Homo sapien
tatccctctcggattcaccctgatg

SEQ ID NO: 444639 - DNA, 25 bp, Homo sapien
gctcattgagacacactactagttg

SEQ ID NO: 444640 - DNA, 25 bp, Homo sapien
taagatagtcacagcaaagttctgc

SEQ ID NO: 444641 - DNA, 25 bp, Homo sapien
tgacctcaggttgtctaactagaag

SEQ ID NO: 444642 - DNA, 25 bp, Homo sapien
catgtacggtattttcaagaagata

SEQ ID NO: 444643 - DNA, 25 bp, Homo sapien
gggttattattctggctaaggtgta

SEQ ID NO: 444644 - DNA, 25 bp, Homo sapien
gaaaattaaggttgtgagcctcttg

SEQ ID NO: 444645 - DNA, 25 bp, Homo sapien
gaatgacatccagcgatattaagca

SEQ ID NO: 444646 - DNA, 25 bp, Homo sapien
tattaagcaagtgcagataatgctc

SEQ ID NO: 444647 - DNA, 25 bp, Homo sapien
aaagttgaatgcacctttggcctcg

SEQ ID NO: 444648 - DNA, 25 bp, Homo sapien
cttcagctgccggtggatttttgca

SEQ ID NO: 444649 - DNA, 25 bp, Homo sapien
cagatgttcgcactgtgtatctgcc

SEQ ID NO: 444650 - DNA, 25 bp, Homo sapien
tgcaatgacccttgcttctcccaga

SEQ ID NO: 444651 - DNA, 25 bp, Homo sapien
acagcttctgctaggatctttttag

SEQ ID NO: 444652 - DNA, 25 bp, Homo sapien
tcaggcttttacaggtggcaagtcc

SEQ ID NO: 444653 - DNA, 25 bp, Homo sapien
tacaggtggcaagtccacagcttct

SEQ ID NO: 444654 - DNA, 25 bp, Homo sapien
tggcaagtccacagcttctgctagg

SEQ ID NO: 444655 - DNA, 25 bp, Homo sapien
agagggtgtgaatctccaaatagga

SEQ ID NO: 444656 - DNA, 25 bp, Homo sapien
aatgttaccagtccagctgatgttc

SEQ ID NO: 444657 - DNA, 25 bp, Homo sapien
ggtgtgaatctccaaataggatttt

SEQ ID NO: 444658 - DNA, 25 bp, Homo sapien
aataaatgttaccagtccagctgat

SEQ ID NO: 444659 - DNA, 25 bp, Homo sapien
ttttgttcgtgtgtgaaatggcatc

SEQ ID NO: 444660 - DNA, 25 bp, Homo sapien
catcgataattttgttcgtgtgtga

SEQ ID NO: 444661 - DNA, 25 bp, Homo sapien
tgtgacaacagcatcgataattttg

SEQ ID NO: 444662 - DNA, 25 bp, Homo sapien
tgtgaaatggcatcacagctttcct

SEQ ID NO: 444663 - DNA, 25 bp, Homo sapien
tgcacccggccgtaagtctttatct

SEQ ID NO: 444664 - DNA, 25 bp, Homo sapien
tcctcgaaacaggaagactgtactg

SEQ ID NO: 444665 - DNA, 25 bp, Homo sapien
tactgtaaagctttattccagaccc

SEQ ID NO: 444666 - DNA, 25 bp, Homo sapien
tcacttgggctccttacatgtacaa

SEQ ID NO: 444667 - DNA, 25 bp, Homo sapien
tcatcatactcaatacttggtacct

SEQ ID NO: 444668 - DNA, 25 bp, Homo sapien
ggtaccttccacaattgaatactgg

SEQ ID NO: 444669 - DNA, 25 bp, Homo sapien
tacttggtaccttccacaattgaat

SEQ ID NO: 444670 - DNA, 25 bp, Homo sapien
tactcaatacttggtaccttccaca

SEQ ID NO: 444671 - DNA, 25 bp, Homo sapien
aatttcagtaaattgtcctgggtgg

SEQ ID NO: 444672 - DNA, 25 bp, Homo sapien
atttcagtaaattgtcctgggtggc

SEQ ID NO: 444673 - DNA, 25 bp, Homo sapien
gaatttcagtaaattgtcctgggtg

SEQ ID NO: 444674 - DNA, 25 bp, Homo sapien
gaaagtgaccaaacctgctagaaag

SEQ ID NO: 444675 - DNA, 25 bp, Homo sapien
taggcagcatagaagtacgatttga

SEQ ID NO: 444676 - DNA, 25 bp, Homo sapien
tcagaactggctttacatataggca

SEQ ID NO: 444677 - DNA, 25 bp, Homo sapien
tgctagaaagtttctcagcatagga

SEQ ID NO: 444678 - DNA, 25 bp, Homo sapien
acagttcctgggtcgagccataacc

SEQ ID NO: 444679 - DNA, 25 bp, Homo sapien
actcacagttcctgggtcgagccat

SEQ ID NO: 444680 - DNA, 25 bp, Homo sapien
ttcctgggtcgagccataaccagac

SEQ ID NO: 444681 - DNA, 25 bp, Homo sapien
tgggtcgagccataaccagacccat

SEQ ID NO: 444682 - DNA, 25 bp, Homo sapien
tctcataatagctttgctcgggatg

SEQ ID NO: 444683 - DNA, 25 bp, Homo sapien
gtctgtatggatgttattctactcc

SEQ ID NO: 444684 - DNA, 25 bp, Homo sapien
actgcattatctattgtgcttaatt

SEQ ID NO: 444685 - DNA, 25 bp, Homo sapien
tatcttatgtcatttaatcaaagtc

SEQ ID NO: 444686 - DNA, 25 bp, Homo sapien
gacaaatcaatgagtggcatcaagg

SEQ ID NO: 444687 - DNA, 25 bp, Homo sapien
tttgaacttgcctctgtgtgtgcac

SEQ ID NO: 444688 - DNA, 25 bp, Homo sapien
tggaagggtactattccagagtttg

SEQ ID NO: 444689 - DNA, 25 bp, Homo sapien
ggcctgtacccttatgtgtgattga

SEQ ID NO: 444690 - DNA, 25 bp, Homo sapien
tcgacggtagcatcatcttgaagca

SEQ ID NO: 444691 - DNA, 25 bp, Homo sapien
tgtgcttggtaacactaaccccagg

SEQ ID NO: 444692 - DNA, 25 bp, Homo sapien
accccaggttcgcattttgaaacat

SEQ ID NO: 444693 - DNA, 25 bp, Homo sapien
tataatgcagaagcaagaaacaccg

SEQ ID NO: 444694 - DNA, 25 bp, Homo sapien
tacatcactcttgctaccggggcca

SEQ ID NO: 444695 - DNA, 25 bp, Homo sapien
gggccagatcatgacgtgcagcttc

SEQ ID NO: 444696 - DNA, 25 bp, Homo sapien
gcagcttcattgaacaaatgcctaa

SEQ ID NO: 444697 - DNA, 25 bp, Homo sapien
gcagcagccagctttaaagcttctc

SEQ ID NO: 444698 - DNA, 25 bp, Homo sapien
gactattgactggaacgtttttggc

SEQ ID NO: 444699 - DNA, 25 bp, Homo sapien
tgactggaacgtttttggccgacat

SEQ ID NO: 444700 - DNA, 25 bp, Homo sapien
tgttaggactattgactggaacgtt

SEQ ID NO: 444701 - DNA, 25 bp, Homo sapien
tgtggtgtgttaggactattgactg

SEQ ID NO: 444702 - DNA, 25 bp, Homo sapien
tctgctaatccacacactgtgttga

SEQ ID NO: 444703 - DNA, 25 bp, Homo sapien
caattgggtattgataaatcctgca

SEQ ID NO: 444704 - DNA, 25 bp, Homo sapien
acttcaaggcttggagctcatacac

SEQ ID NO: 444705 - DNA, 25 bp, Homo sapien
gctcatacactagaggattctcatg

SEQ ID NO: 444706 - DNA, 25 bp, Homo sapien
tcctgagggcaacccccagttgctg

SEQ ID NO: 444707 - DNA, 25 bp, Homo sapien
gtcctggatgccgacctgcctcatt

SEQ ID NO: 444708 - DNA, 25 bp, Homo sapien
cacagatgggatgaagccctctgag

SEQ ID NO: 444709 - DNA, 25 bp, Homo sapien
agttgctgcccaactgatcatgtcc

SEQ ID NO: 444710 - DNA, 25 bp, Homo sapien
ctggagtgatgtcccttgacctgtg

SEQ ID NO: 444711 - DNA, 25 bp, Homo sapien
tggagtgatgtcccttgacctgtgt

SEQ ID NO: 444712 - DNA, 25 bp, Homo sapien
tcatctcctaatggcaggcaagagg

SEQ ID NO: 444713 - DNA, 25 bp, Homo sapien
gggttgagcaggaagactccacacg

SEQ ID NO: 444714 - DNA, 25 bp, Homo sapien
gaagctacagcctcctgcaggattt

SEQ ID NO: 444715 - DNA, 25 bp, Homo sapien
agccagctgcagtaagcccaacaga

SEQ ID NO: 444716 - DNA, 25 bp, Homo sapien
tggtgaaaagcatcctcaggcaaca

SEQ ID NO: 444717 - DNA, 25 bp, Homo sapien
ggtgaaaagcatcctcaggcaacat

SEQ ID NO: 444718 - DNA, 25 bp, Homo sapien
gtgaaaagcatcctcaggcaacatc

SEQ ID NO: 444719 - DNA, 25 bp, Homo sapien
ctggtgaaaagcatcctcaggcaac

SEQ ID NO: 444720 - DNA, 25 bp, Homo sapien
acagcacagtattagcttcaggcag

SEQ ID NO: 444721 - DNA, 25 bp, Homo sapien
ttaagggtgatgtttcaaacagcac

SEQ ID NO: 444722 - DNA, 25 bp, Homo sapien
gcacagtattagcttcaggcagaaa

SEQ ID NO: 444723 - DNA, 25 bp, Homo sapien
tcatcccattgttaagggtgatgtt

SEQ ID NO: 444724 - DNA, 25 bp, Homo sapien
cctggcccttttggccgacaattca

SEQ ID NO: 444725 - DNA, 25 bp, Homo sapien
gcccttttggccgacaattcatcat

SEQ ID NO: 444726 - DNA, 25 bp, Homo sapien
ttttggccgacaattcatcatgtct

SEQ ID NO: 444727 - DNA, 25 bp, Homo sapien
ggccgacaattcatcatgtctatta

SEQ ID NO: 444728 - DNA, 25 bp, Homo sapien
ctggattctgggttgctgtgtcaca

SEQ ID NO: 444729 - DNA, 25 bp, Homo sapien
ctgtccaaaccatccccgaatttct

SEQ ID NO: 444730 - DNA, 25 bp, Homo sapien
aaccatccccgaatttcttcagtcg

SEQ ID NO: 444731 - DNA, 25 bp, Homo sapien
tccaaaccatccccgaatttcttca

SEQ ID NO: 444732 - DNA, 25 bp, Homo sapien
ccatccccgaatttcttcagtcgca

SEQ ID NO: 444733 - DNA, 25 bp, Homo sapien
tgtctgacttatgtgcacagtgccc

SEQ ID NO: 444734 - DNA, 25 bp, Homo sapien
tagggtgtctgtatactcacaagag

SEQ ID NO: 444735 - DNA, 25 bp, Homo sapien
tgcccgtcacagatagggtggtaaa

SEQ ID NO: 444736 - DNA, 25 bp, Homo sapien
gcactttgggtcagaatatggacag

SEQ ID NO: 444737 - DNA, 25 bp, Homo sapien
cagggctggagtaacatatggttcc

SEQ ID NO: 444738 - DNA, 25 bp, Homo sapien
gttcgtaccctctagcagttctgcc

SEQ ID NO: 444739 - DNA, 25 bp, Homo sapien
gctttagggttcgtaccctctagca

SEQ ID NO: 444740 - DNA, 25 bp, Homo sapien
ccagggctggagtaacatatggttc

SEQ ID NO: 444741 - DNA, 25 bp, Homo sapien
gtcaggtgcttatcgttgttccaat

SEQ ID NO: 444742 - DNA, 25 bp, Homo sapien
tcttcagtcaggtgcttatcgttgt

SEQ ID NO: 444743 - DNA, 25 bp, Homo sapien
ttcagtcaggtgcttatcgttgttc

SEQ ID NO: 444744 - DNA, 25 bp, Homo sapien
cagtcaggtgcttatcgttgttcca

SEQ ID NO: 444745 - DNA, 25 bp, Homo sapien
ggtaccctcgtggatgaagaaggct

SEQ ID NO: 444746 - DNA, 25 bp, Homo sapien
gactcatggcgtaccagcatggtag

SEQ ID NO: 444747 - DNA, 25 bp, Homo sapien
gtttaatgttgttgcagtcagctgc

SEQ ID NO: 444748 - DNA, 25 bp, Homo sapien
cagcatacgcaagaggagggtaccc

SEQ ID NO: 444749 - DNA, 25 bp, Homo sapien
tgtttcgacggtctaagctcctggc

SEQ ID NO: 444750 - DNA, 25 bp, Homo sapien
tgggctagtcccatagtcatgtgaa

SEQ ID NO: 444751 - DNA, 25 bp, Homo sapien
tgatggtatgtgatgggctagtccc

SEQ ID NO: 444752 - DNA, 25 bp, Homo sapien
gaagtagttgggcaaattgtgccca

SEQ ID NO: 444753 - DNA, 25 bp, Homo sapien
tttgtcctcaaagtcctgctctagg

SEQ ID NO: 444754 - DNA, 25 bp, Homo sapien
cttttgtcctcaaagtcctgctcta

SEQ ID NO: 444755 - DNA, 25 bp, Homo sapien
ttttgtcctcaaagtcctgctctag

SEQ ID NO: 444756 - DNA, 25 bp, Homo sapien
tgtcctcaaagtcctgctctaggtc

SEQ ID NO: 444757 - DNA, 25 bp, Homo sapien
ttttaataagaccacttattgaaca

SEQ ID NO: 444758 - DNA, 25 bp, Homo sapien
tttaataagaccacttattgaacac

SEQ ID NO: 444759 - DNA, 25 bp, Homo sapien
tcttcaggtggttcctcaagcttgt

SEQ ID NO: 444760 - DNA, 25 bp, Homo sapien
cttctttcttcaggtggttcctcaa

SEQ ID NO: 444761 - DNA, 25 bp, Homo sapien
tggttcctcaagcttgttcaccttc

SEQ ID NO: 444762 - DNA, 25 bp, Homo sapien
taacagccacttgaatggtgatgct

SEQ ID NO: 444763 - DNA, 25 bp, Homo sapien
tggggggagagctcgcttttttggc

SEQ ID NO: 444764 - DNA, 25 bp, Homo sapien
gggggagagctcgcttttttggctc

SEQ ID NO: 444765 - DNA, 25 bp, Homo sapien
tgatctatttaaagtcaggagactg

SEQ ID NO: 444766 - DNA, 25 bp, Homo sapien
ccaaatgacgtctttagtccttcca

SEQ ID NO: 444767 - DNA, 25 bp, Homo sapien
gcatggtgaatgaatctcgcaaaaa

SEQ ID NO: 444768 - DNA, 25 bp, Homo sapien
acaaagttctgtgccactgagcatg

SEQ ID NO: 444769 - DNA, 25 bp, Homo sapien
gaaggatcatcttgtttcctgagag

SEQ ID NO: 444770 - DNA, 25 bp, Homo sapien
gggaaggatcatcttgtttcctgag

SEQ ID NO: 444771 - DNA, 25 bp, Homo sapien
ttgtttcctgagaggcgcatcaggg

SEQ ID NO: 444772 - DNA, 25 bp, Homo sapien
agaagggaaggatcatcttgtttcc

SEQ ID NO: 444773 - DNA, 25 bp, Homo sapien
ggacatgaattcatggccaggtaaa

SEQ ID NO: 444774 - DNA, 25 bp, Homo sapien
aggacatgaattcatggccaggtaa

SEQ ID NO: 444775 - DNA, 25 bp, Homo sapien
gatggtgatacagacaggggtatcc

SEQ ID NO: 444776 - DNA, 25 bp, Homo sapien
aggatggtgatacagacaggggtat

SEQ ID NO: 444777 - DNA, 25 bp, Homo sapien
ctataggatggtgatacagacaggg

SEQ ID NO: 444778 - DNA, 25 bp, Homo sapien
tggtgatacagacaggggtatccag

SEQ ID NO: 444779 - DNA, 25 bp, Homo sapien
cagaaagaggtaataataggttggg

SEQ ID NO: 444780 - DNA, 25 bp, Homo sapien
aatcagaaagaggtaataataggtt

SEQ ID NO: 444781 - DNA, 25 bp, Homo sapien
gaacaatcagaaagaggtaataata

SEQ ID NO: 444782 - DNA, 25 bp, Homo sapien
aagaggtaataataggttgggagag

SEQ ID NO: 444783 - DNA, 25 bp, Homo sapien
ttctccgcttctttgtctagaacca

SEQ ID NO: 444784 - DNA, 25 bp, Homo sapien
tctttgtctagaaccacattagggc

SEQ ID NO: 444785 - DNA, 25 bp, Homo sapien
gcttctttgtctagaaccacattag

SEQ ID NO: 444786 - DNA, 25 bp, Homo sapien
tccgcttctttgtctagaaccacat

SEQ ID NO: 444787 - DNA, 25 bp, Homo sapien
tgaagtctcaaaggactgataagaa

SEQ ID NO: 444788 - DNA, 25 bp, Homo sapien
aaaatcaggtagaatgtgtgaagtc

SEQ ID NO: 444789 - DNA, 25 bp, Homo sapien
ggagtgaagcctgattttgccttca

SEQ ID NO: 444790 - DNA, 25 bp, Homo sapien
gctcccaacgactcccatgaaattg

SEQ ID NO: 444791 - DNA, 25 bp, Homo sapien
ctgtccgtcttagagttcttagtta

SEQ ID NO: 444792 - DNA, 25 bp, Homo sapien
gaaacatccctgctattcttagggc

SEQ ID NO: 444793 - DNA, 25 bp, Homo sapien
tatggaaatagccagtgccggcagt

SEQ ID NO: 444794 - DNA, 25 bp, Homo sapien
tgccggcagtaatttcgatttgttc

SEQ ID NO: 444795 - DNA, 25 bp, Homo sapien
tgaaaatctcaagttccacgcaatt

SEQ ID NO: 444796 - DNA, 25 bp, Homo sapien
tcaagttccacgcaatttggctaag

SEQ ID NO: 444797 - DNA, 25 bp, Homo sapien
tttggctaagtgtccaccgacaagc

SEQ ID NO: 444798 - DNA, 25 bp, Homo sapien
gacaagccatccaagcggtgtggaa

SEQ ID NO: 444799 - DNA, 25 bp, Homo sapien
ctagtgagttcagagtaaggaaaaa

SEQ ID NO: 444800 - DNA, 25 bp, Homo sapien
tgagttcagagtaaggaaaaattta

SEQ ID NO: 444801 - DNA, 25 bp, Homo sapien
tcagagtaaggaaaaatttattcat

SEQ ID NO: 444802 - DNA, 25 bp, Homo sapien
ttcagagtaaggaaaaatttattca

SEQ ID NO: 444803 - DNA, 25 bp, Homo sapien
tagaggtgacactcgcagtaaagga

SEQ ID NO: 444804 - DNA, 25 bp, Homo sapien
cctgatggccgttcatgactgtgta

SEQ ID NO: 444805 - DNA, 25 bp, Homo sapien
gaaaatgcagggttggatccacagc

SEQ ID NO: 444806 - DNA, 25 bp, Homo sapien
gatccacagcgatgtaatctggtgt

SEQ ID NO: 444807 - DNA, 25 bp, Homo sapien
caatggctggaactagctgggcact

SEQ ID NO: 444808 - DNA, 25 bp, Homo sapien
tctgactcaagggacaagcatggca

SEQ ID NO: 444809 - DNA, 25 bp, Homo sapien
gctgaactggtacagggcttccctg

SEQ ID NO: 444810 - DNA, 25 bp, Homo sapien
tcaagtggagatccttgaggctgcc

SEQ ID NO: 444811 - DNA, 25 bp, Homo sapien
gtgcctggcacagcaccatcctcta

SEQ ID NO: 444812 - DNA, 25 bp, Homo sapien
tgctttccatatccctgtgcctggc

SEQ ID NO: 444813 - DNA, 25 bp, Homo sapien
gtctcttctgctttccatatccctg

SEQ ID NO: 444814 - DNA, 25 bp, Homo sapien
ttctgctttccatatccctgtgcct

SEQ ID NO: 444815 - DNA, 25 bp, Homo sapien
atggcagttgccaatgcaacatgac

SEQ ID NO: 444816 - DNA, 25 bp, Homo sapien
cagttgccaatgcaacatgacatct

SEQ ID NO: 444817 - DNA, 25 bp, Homo sapien
ttgccaatgcaacatgacatctgag

SEQ ID NO: 444818 - DNA, 25 bp, Homo sapien
gccaatgcaacatgacatctgagaa

SEQ ID NO: 444819 - DNA, 25 bp, Homo sapien
ttctgagccttaaggtctgcatcct

SEQ ID NO: 444820 - DNA, 25 bp, Homo sapien
ctgaaccattctgagccttaaggtc

SEQ ID NO: 444821 - DNA, 25 bp, Homo sapien
taaggtctgcatccttcttaggagg

SEQ ID NO: 444822 - DNA, 25 bp, Homo sapien
gccttaaggtctgcatccttcttag

SEQ ID NO: 444823 - DNA, 25 bp, Homo sapien
taggcactgctgagacatgcttggc

SEQ ID NO: 444824 - DNA, 25 bp, Homo sapien
agctgggctgtttgaatgtgtaggc

SEQ ID NO: 444825 - DNA, 25 bp, Homo sapien
aggcactgctgagacatgcttggct

SEQ ID NO: 444826 - DNA, 25 bp, Homo sapien
gtaggcactgctgagacatgcttgg

SEQ ID NO: 444827 - DNA, 25 bp, Homo sapien
aactcaggatggcatgaccggccaa

SEQ ID NO: 444828 - DNA, 25 bp, Homo sapien
gaccggccaactctgctgagagaag

SEQ ID NO: 444829 - DNA, 25 bp, Homo sapien
gcagcatctggtgccgaaatgagga

SEQ ID NO: 444830 - DNA, 25 bp, Homo sapien
caaatgatatgcaaggaacctctcc

SEQ ID NO: 444831 - DNA, 25 bp, Homo sapien
caaaaattgcaatgtgccagtgctg

SEQ ID NO: 444832 - DNA, 25 bp, Homo sapien
cacagccacgtgatacaatgagtgt

SEQ ID NO: 444833 - DNA, 25 bp, Homo sapien
tgccctgtgctataactcagagacc

SEQ ID NO: 444834 - DNA, 25 bp, Homo sapien
tatgctatgcggtacacaagaggga

SEQ ID NO: 444835 - DNA, 25 bp, Homo sapien
tagagggcctatgactttcttgctc

SEQ ID NO: 444836 - DNA, 25 bp, Homo sapien
tgttgagtcactccagtagggcctg

SEQ ID NO: 444837 - DNA, 25 bp, Homo sapien
aatgcatgcctgaacagtactttga

SEQ ID NO: 444838 - DNA, 25 bp, Homo sapien
gatatgggccaagaatccgtcatca

SEQ ID NO: 444839 - DNA, 25 bp, Homo sapien
tacagggattccaagctcggtttcc

SEQ ID NO: 444840 - DNA, 25 bp, Homo sapien
taccatgacgtgttggatgcttagc

SEQ ID NO: 444841 - DNA, 25 bp, Homo sapien
gctgcttcccggctcctatagtgaa

SEQ ID NO: 444842 - DNA, 25 bp, Homo sapien
ttagctttgggagtgctgacatagg

SEQ ID NO: 444843 - DNA, 25 bp, Homo sapien
agaagtgacattaggaggctgctta

SEQ ID NO: 444844 - DNA, 25 bp, Homo sapien
ccttccacgacatgttgcttccttg

SEQ ID NO: 444845 - DNA, 25 bp, Homo sapien
tcatttgatagaggagccatgggca

SEQ ID NO: 444846 - DNA, 25 bp, Homo sapien
aataccccgaagtgagaaatcacag

SEQ ID NO: 444847 - DNA, 25 bp, Homo sapien
taattctgtgagagacattagcaca

SEQ ID NO: 444848 - DNA, 25 bp, Homo sapien
ccttctacccgttgaattgacacta

SEQ ID NO: 444849 - DNA, 25 bp, Homo sapien
cctgggagctagacagattggagcc

SEQ ID NO: 444850 - DNA, 25 bp, Homo sapien
gcccagaggaatgatatccttgcct

SEQ ID NO: 444851 - DNA, 25 bp, Homo sapien
ctggaggcaggggctctgctttctg

SEQ ID NO: 444852 - DNA, 25 bp, Homo sapien
gcaggggctctgctttctgtcttca

SEQ ID NO: 444853 - DNA, 25 bp, Homo sapien
gaggcaggggctctgctttctgtct

SEQ ID NO: 444854 - DNA, 25 bp, Homo sapien
ggctctgctttctgtcttcactaac

SEQ ID NO: 444855 - DNA, 25 bp, Homo sapien
ggaagagcaggctgcagctttaggc

SEQ ID NO: 444856 - DNA, 25 bp, Homo sapien
tttggaagagcaggctgcagcttta

SEQ ID NO: 444857 - DNA, 25 bp, Homo sapien
ttggaagagcaggctgcagctttag

SEQ ID NO: 444858 - DNA, 25 bp, Homo sapien
ctttggaagagcaggctgcagcttt

SEQ ID NO: 444859 - DNA, 25 bp, Homo sapien
ggagctccaagggttgctgaccccc

SEQ ID NO: 444860 - DNA, 25 bp, Homo sapien
tggacccattagagatcttctggga

SEQ ID NO: 444861 - DNA, 25 bp, Homo sapien
ctggacccattagagatcttctggg

SEQ ID NO: 444862 - DNA, 25 bp, Homo sapien
agctccaagggttgctgacccccct

SEQ ID NO: 444863 - DNA, 25 bp, Homo sapien
catttgtggctttggaagacacgct

SEQ ID NO: 444864 - DNA, 25 bp, Homo sapien
gtggaagaacagtccggtaattgac

SEQ ID NO: 444865 - DNA, 25 bp, Homo sapien
gaagacacgctgtattctgcagtcc

SEQ ID NO: 444866 - DNA, 25 bp, Homo sapien
ggaactatggccatcatttcgccct

SEQ ID NO: 444867 - DNA, 25 bp, Homo sapien
gagtcgatgactcatagggttcagg

SEQ ID NO: 444868 - DNA, 25 bp, Homo sapien
ggacatgaccgcataacaacagtaa

SEQ ID NO: 444869 - DNA, 25 bp, Homo sapien
ctttcaaggttagttgagcgaggac

SEQ ID NO: 444870 - DNA, 25 bp, Homo sapien
ctttcacagctgaggcattgctaat

SEQ ID NO: 444871 - DNA, 25 bp, Homo sapien
gaagtaaatcgtcttgacagtgcat

SEQ ID NO: 444872 - DNA, 25 bp, Homo sapien
ctgtggttgagaaagatatccgttt

SEQ ID NO: 444873 - DNA, 25 bp, Homo sapien
aagactgacgatacagccctgtggt

SEQ ID NO: 444874 - DNA, 25 bp, Homo sapien
aacaagtatttgcagaatggagaca

SEQ ID NO: 444875 - DNA, 25 bp, Homo sapien
ggacagtatatttttggtggcagaa

SEQ ID NO: 444876 - DNA, 25 bp, Homo sapien
cagtccatgttcttgagtgaagagg

SEQ ID NO: 444877 - DNA, 25 bp, Homo sapien
tgtcctcagggataccgagaacaca

SEQ ID NO: 444878 - DNA, 25 bp, Homo sapien
gataccgagaacacagtttttagag

SEQ ID NO: 444879 - DNA, 25 bp, Homo sapien
catagtctctcatgtgaagggcagc

SEQ ID NO: 444880 - DNA, 25 bp, Homo sapien
gaagcagtttttgcttcgtaagcca

SEQ ID NO: 444881 - DNA, 25 bp, Homo sapien
ttcccagtgttctcactatgctgtg

SEQ ID NO: 444882 - DNA, 25 bp, Homo sapien
tcgtaagccatttctgagcacccca

SEQ ID NO: 444883 - DNA, 25 bp, Homo sapien
cccggcacctggctccaagcttccc

SEQ ID NO: 444884 - DNA, 25 bp, Homo sapien
attcagctcgagcactccctctaat

SEQ ID NO: 444885 - DNA, 25 bp, Homo sapien
gaaacatacattcagctcgagcact

SEQ ID NO: 444886 - DNA, 25 bp, Homo sapien
tgctgacactgaaagaaacatacat

SEQ ID NO: 444887 - DNA, 25 bp, Homo sapien
agctcgagcactccctctaatttct

SEQ ID NO: 444888 - DNA, 25 bp, Homo sapien
catgttggaacgatggtactgtctt

SEQ ID NO: 444889 - DNA, 25 bp, Homo sapien
tgttggaacgatggtactgtctttg

SEQ ID NO: 444890 - DNA, 25 bp, Homo sapien
ttggaacgatggtactgtctttggg

SEQ ID NO: 444891 - DNA, 25 bp, Homo sapien
ctgacatgttggaacgatggtactg

SEQ ID NO: 444892 - DNA, 25 bp, Homo sapien
tatattacacccagtgatcactgaa

SEQ ID NO: 444893 - DNA, 25 bp, Homo sapien
gcattcaacttcagattagcatata

SEQ ID NO: 444894 - DNA, 25 bp, Homo sapien
tcaacttcagattagcatatattac

SEQ ID NO: 444895 - DNA, 25 bp, Homo sapien
gatcactgaacatgctctaaagatg

SEQ ID NO: 444896 - DNA, 25 bp, Homo sapien
gggtcaaagccttcataatgatatc

SEQ ID NO: 444897 - DNA, 25 bp, Homo sapien
ggtttctggatcactacagcagtga

SEQ ID NO: 444898 - DNA, 25 bp, Homo sapien
acagcagtgagatattctactttgg

SEQ ID NO: 444899 - DNA, 25 bp, Homo sapien
tctactttggctttgcgagtcagaa

SEQ ID NO: 444900 - DNA, 25 bp, Homo sapien
caacagtgaatgcagccaccatgag

SEQ ID NO: 444901 - DNA, 25 bp, Homo sapien
tgaatgcagccaccatgagtcaggg

SEQ ID NO: 444902 - DNA, 25 bp, Homo sapien
gccaccatgagtcagggccagactc

SEQ ID NO: 444903 - DNA, 25 bp, Homo sapien
cttgggacacaacagtgaatgcagc

SEQ ID NO: 444904 - DNA, 25 bp, Homo sapien
gctgctcctgtcattaacgtctgtt

SEQ ID NO: 444905 - DNA, 25 bp, Homo sapien
ctctcttttagggactggcttttgg

SEQ ID NO: 444906 - DNA, 25 bp, Homo sapien
cttgaacccctgctgaaacgatgac

SEQ ID NO: 444907 - DNA, 25 bp, Homo sapien
tgaccccaggcatacgttctgttgc

SEQ ID NO: 444908 - DNA, 25 bp, Homo sapien
cctggcatccccagaccagtggtgc

SEQ ID NO: 444909 - DNA, 25 bp, Homo sapien
tccattctgtgactagagcagacat

SEQ ID NO: 444910 - DNA, 25 bp, Homo sapien
tttctccattctgtgactagagcag

SEQ ID NO: 444911 - DNA, 25 bp, Homo sapien
tagagcagacattaccaatgatcat

SEQ ID NO: 444912 - DNA, 25 bp, Homo sapien
actagagcagacattaccaatgatc

SEQ ID NO: 444913 - DNA, 25 bp, Homo sapien
tgggatgaaacgaatttttccatta

SEQ ID NO: 444914 - DNA, 25 bp, Homo sapien
tactttgagtctaagttttgggatg

SEQ ID NO: 444915 - DNA, 25 bp, Homo sapien
taagtgacaccttaatcgtcttcgg

SEQ ID NO: 444916 - DNA, 25 bp, Homo sapien
tcagtattgctgtgctggttgaagt

SEQ ID NO: 444917 - DNA, 25 bp, Homo sapien
tgctaaaaacactagaagcaactaa

SEQ ID NO: 444918 - DNA, 25 bp, Homo sapien
ctgctaaaaacactagaagcaacta

SEQ ID NO: 444919 - DNA, 25 bp, Homo sapien
gctaaaaacactagaagcaactaaa

SEQ ID NO: 444920 - DNA, 25 bp, Homo sapien
ccataagagggtaagggtataggct

SEQ ID NO: 444921 - DNA, 25 bp, Homo sapien
gaggcagtccataagagggtaaggg

SEQ ID NO: 444922 - DNA, 25 bp, Homo sapien
ctgtgaggtccctttttgaggactt

SEQ ID NO: 444923 - DNA, 25 bp, Homo sapien
taagggtataggcttgagaatgacc

SEQ ID NO: 444924 - DNA, 25 bp, Homo sapien
gtatctgattggcctcagtacatac

SEQ ID NO: 444925 - DNA, 25 bp, Homo sapien
tgtatctgattggcctcagtacata

SEQ ID NO: 444926 - DNA, 25 bp, Homo sapien
ggcactatggtgtcagataaagata

SEQ ID NO: 444927 - DNA, 25 bp, Homo sapien
ctgtggtgccctctagttctttgca

SEQ ID NO: 444928 - DNA, 25 bp, Homo sapien
cctgctctgtggagttctactgctc

SEQ ID NO: 444929 - DNA, 25 bp, Homo sapien
tctttgcaggcaccgccctcgtgca

SEQ ID NO: 444930 - DNA, 25 bp, Homo sapien
ggggtgctgtttggctgttaccatt

SEQ ID NO: 444931 - DNA, 25 bp, Homo sapien
gtgctgtttggctgttaccattgac

SEQ ID NO: 444932 - DNA, 25 bp, Homo sapien
aaggggtgctgtttggctgttacca

SEQ ID NO: 444933 - DNA, 25 bp, Homo sapien
ggtgctgtttggctgttaccattga

SEQ ID NO: 444934 - DNA, 25 bp, Homo sapien
caagctataacataggtgagctggg

SEQ ID NO: 444935 - DNA, 25 bp, Homo sapien
gtgcagtaccagagctcgggaacca

SEQ ID NO: 444936 - DNA, 25 bp, Homo sapien
cacttcaatgcccagcgtatcctta

SEQ ID NO: 444937 - DNA, 25 bp, Homo sapien
gaaccaccgaatgcaggtacaagct

SEQ ID NO: 444938 - DNA, 25 bp, Homo sapien
gttcagtatgcgcttctgatcttca

SEQ ID NO: 444939 - DNA, 25 bp, Homo sapien
taacaaagtcagttgcttgttcagt

SEQ ID NO: 444940 - DNA, 25 bp, Homo sapien
tcttcattttcatcgcacgattttc

SEQ ID NO: 444941 - DNA, 25 bp, Homo sapien
ttcttctgatattacccgcccttgg

SEQ ID NO: 444942 - DNA, 25 bp, Homo sapien
tagtgcggctgggatgctccacctc

SEQ ID NO: 444943 - DNA, 25 bp, Homo sapien
actttctgtagtgcggctgggatgc

SEQ ID NO: 444944 - DNA, 25 bp, Homo sapien
tctgtagtgcggctgggatgctcca

SEQ ID NO: 444945 - DNA, 25 bp, Homo sapien
ttaactttctgtagtgcggctggga

SEQ ID NO: 444946 - DNA, 25 bp, Homo sapien
tgtatgctgtggaaagccacagaaa

SEQ ID NO: 444947 - DNA, 25 bp, Homo sapien
ctgcatctctatgtgtatgctgtgg

SEQ ID NO: 444948 - DNA, 25 bp, Homo sapien
cacagaaaagcatgtcagcctttct

SEQ ID NO: 444949 - DNA, 25 bp, Homo sapien
tctatgtgtatgctgtggaaagcca

SEQ ID NO: 444950 - DNA, 25 bp, Homo sapien
tattccatttatagaatcctttgtc

SEQ ID NO: 444951 - DNA, 25 bp, Homo sapien
ctgttattccatttatagaatcctt

SEQ ID NO: 444952 - DNA, 25 bp, Homo sapien
ttccatttatagaatcctttgtctt

SEQ ID NO: 444953 - DNA, 25 bp, Homo sapien
gttattccatttatagaatcctttg

SEQ ID NO: 444954 - DNA, 25 bp, Homo sapien
gacagccatgctatgggtgcactca

SEQ ID NO: 444955 - DNA, 25 bp, Homo sapien
tagtggaagtagactgggaagtggc

SEQ ID NO: 444956 - DNA, 25 bp, Homo sapien
tgatgtcacagtatgtcttataatg

SEQ ID NO: 444957 - DNA, 25 bp, Homo sapien
tgcaattgtcatcccctctcctgtg

SEQ ID NO: 444958 - DNA, 25 bp, Homo sapien
gctgatgacgtacttgtaaccaagg

SEQ ID NO: 444959 - DNA, 25 bp, Homo sapien
cagggtgcctgccaagtaaacaagc

SEQ ID NO: 444960 - DNA, 25 bp, Homo sapien
tatcgagtgtacttcctgagagccc

SEQ ID NO: 444961 - DNA, 25 bp, Homo sapien
aagcacttctatctggctaccaggg

SEQ ID NO: 444962 - DNA, 25 bp, Homo sapien
catctgttgactctcggtatctccc

SEQ ID NO: 444963 - DNA, 25 bp, Homo sapien
tccgtcgcgtcggtctccatggaga

SEQ ID NO: 444964 - DNA, 25 bp, Homo sapien
tgcacagtttctagccaggagcctc

SEQ ID NO: 444965 - DNA, 25 bp, Homo sapien
tgtggtctccacctggcccggtgtg

SEQ ID NO: 444966 - DNA, 25 bp, Homo sapien
ccatgggaataactttctcctgaat

SEQ ID NO: 444967 - DNA, 25 bp, Homo sapien
tcccacaaggaagcatgaatttctt

SEQ ID NO: 444968 - DNA, 25 bp, Homo sapien
tcctgaatcatgtcacatttcccac

SEQ ID NO: 444969 - DNA, 25 bp, Homo sapien
tttggaaatacctgcaccatgggaa

SEQ ID NO: 444970 - DNA, 25 bp, Homo sapien
atgttcctgtgaatatgccttctgc

SEQ ID NO: 444971 - DNA, 25 bp, Homo sapien
tgctgcaggttcattaagttggagg

SEQ ID NO: 444972 - DNA, 25 bp, Homo sapien
gaggcatagctgcaagatcttgctg

SEQ ID NO: 444973 - DNA, 25 bp, Homo sapien
ccttctgcaactctaggtgaggcat

SEQ ID NO: 444974 - DNA, 25 bp, Homo sapien
gtggcacccattgtgagaactttgc

SEQ ID NO: 444975 - DNA, 25 bp, Homo sapien
tcagctgtccatccacaggaagcag

SEQ ID NO: 444976 - DNA, 25 bp, Homo sapien
gctgcagtggcacccattgtgagaa

SEQ ID NO: 444977 - DNA, 25 bp, Homo sapien
tgagaactttgctgcattgggagag

SEQ ID NO: 444978 - DNA, 25 bp, Homo sapien
agcaccaaataaggtcgctcatgga

SEQ ID NO: 444979 - DNA, 25 bp, Homo sapien
gctgtgtcccacttagaatcacttt

SEQ ID NO: 444980 - DNA, 25 bp, Homo sapien
ggtcgctcatggaaagaacctttag

SEQ ID NO: 444981 - DNA, 25 bp, Homo sapien
gcacagattgaaaaacgaggacttt

SEQ ID NO: 444982 - DNA, 25 bp, Homo sapien
aagcagttgtcacttcctggaacac

SEQ ID NO: 444983 - DNA, 25 bp, Homo sapien
tggaacaccattctttgtcattgct

SEQ ID NO: 444984 - DNA, 25 bp, Homo sapien
ctaagcagttgtcacttcctggaac

SEQ ID NO: 444985 - DNA, 25 bp, Homo sapien
gcagttgtcacttcctggaacacca

SEQ ID NO: 444986 - DNA, 25 bp, Homo sapien
cttctctgggctcagaggctcctcc

SEQ ID NO: 444987 - DNA, 25 bp, Homo sapien
tggtctcttctctgggctcagaggc

SEQ ID NO: 444988 - DNA, 25 bp, Homo sapien
ctgctgctggtgagctcctggtctc

SEQ ID NO: 444989 - DNA, 25 bp, Homo sapien
ctgctggtgagctcctggtctcttc

SEQ ID NO: 444990 - DNA, 25 bp, Homo sapien
aagatctttatgatggctctgcatg

SEQ ID NO: 444991 - DNA, 25 bp, Homo sapien
aaggactgaaaaggcggttgcttat

SEQ ID NO: 444992 - DNA, 25 bp, Homo sapien
gcggttgcttatagataaatgttca

SEQ ID NO: 444993 - DNA, 25 bp, Homo sapien
tatgatggctctgcatgttgggctt

SEQ ID NO: 444994 - DNA, 25 bp, Homo sapien
tcatccacgtggctgtaaggagttc

SEQ ID NO: 444995 - DNA, 25 bp, Homo sapien
taaggagttcctgctggtctattga

SEQ ID NO: 444996 - DNA, 25 bp, Homo sapien
gtttgtcccattgatgtccctgctg

SEQ ID NO: 444997 - DNA, 25 bp, Homo sapien
tctattgagcctaaatggtatcttg

SEQ ID NO: 444998 - DNA, 25 bp, Homo sapien
gtatttataatcatgcttaagtcta

SEQ ID NO: 444999 - DNA, 25 bp, Homo sapien
tcacttaggggtttgggcctgatcg

SEQ ID NO: 445000 - DNA, 25 bp, Homo sapien
gtttgggcctgatcggaataaggag

SEQ ID NO: 445001 - DNA, 25 bp, Homo sapien
agtctaactttgtattcacttaggg

SEQ ID NO: 445002 - DNA, 25 bp, Homo sapien
tggagccaagggggtaagatcagag

SEQ ID NO: 445003 - DNA, 25 bp, Homo sapien
ggagccaagggggtaagatcagagt

SEQ ID NO: 445004 - DNA, 25 bp, Homo sapien
ctggagccaagggggtaagatcaga

SEQ ID NO: 445005 - DNA, 25 bp, Homo sapien
gttggttcttgcaggtccagttgga

SEQ ID NO: 445006 - DNA, 25 bp, Homo sapien
tggttcttgcaggtccagttggaga

SEQ ID NO: 445007 - DNA, 25 bp, Homo sapien
ctagttggttcttgcaggtccagtt

SEQ ID NO: 445008 - DNA, 25 bp, Homo sapien
tagttggttcttgcaggtccagttg

SEQ ID NO: 445009 - DNA, 25 bp, Homo sapien
ttccttcagatgtgaggattctgtt

SEQ ID NO: 445010 - DNA, 25 bp, Homo sapien
aatgcatgtacaaatattccttcag

SEQ ID NO: 445011 - DNA, 25 bp, Homo sapien
tattcttgtgctaaagtcattttgc

SEQ ID NO: 445012 - DNA, 25 bp, Homo sapien
gaggattctgtttcatatatcttta

SEQ ID NO: 445013 - DNA, 25 bp, Homo sapien
cttcagcaattgcagctccccgcat

SEQ ID NO: 445014 - DNA, 25 bp, Homo sapien
gatgtagagtcgctcatccgattcc

SEQ ID NO: 445015 - DNA, 25 bp, Homo sapien
gattcccactggaaggcaggactga

SEQ ID NO: 445016 - DNA, 25 bp, Homo sapien
ccaccatggatgtagagtcgctcat

SEQ ID NO: 445017 - DNA, 25 bp, Homo sapien
tcgctcatccgattcccactggaag

SEQ ID NO: 445018 - DNA, 25 bp, Homo sapien
ttaaccacagagtacagcaacacag

SEQ ID NO: 445019 - DNA, 25 bp, Homo sapien
aaaagtaggcatcttctggcctctg

SEQ ID NO: 445020 - DNA, 25 bp, Homo sapien
tgtcagtgacaacgcaggtgcaaaa

SEQ ID NO: 445021 - DNA, 25 bp, Homo sapien
acacagttgcaacagcggcagtggc

SEQ ID NO: 445022 - DNA, 25 bp, Homo sapien
gttactatccctggtgctgaaactg

SEQ ID NO: 445023 - DNA, 25 bp, Homo sapien
cattcactgctagccaagaaggtta

SEQ ID NO: 445024 - DNA, 25 bp, Homo sapien
cagtattagagcattcactgctagc

SEQ ID NO: 445025 - DNA, 25 bp, Homo sapien
tagccaagaaggttactatccctgg

SEQ ID NO: 445026 - DNA, 25 bp, Homo sapien
catgggtaatcttcgtaaaggtcca

SEQ ID NO: 445027 - DNA, 25 bp, Homo sapien
tcagatcccagtcacttcatacctg

SEQ ID NO: 445028 - DNA, 25 bp, Homo sapien
tccttacatgggtaatcttcgtaaa

SEQ ID NO: 445029 - DNA, 25 bp, Homo sapien
ttcatacctggtctcctcttttcca

SEQ ID NO: 445030 - DNA, 25 bp, Homo sapien
ccgctgctacggccaccactgttgt

SEQ ID NO: 445031 - DNA, 25 bp, Homo sapien
tgttgttgtgaagccccgacgccgc

SEQ ID NO: 445032 - DNA, 25 bp, Homo sapien
cgctgctacggccaccactgttgtt

SEQ ID NO: 445033 - DNA, 25 bp, Homo sapien
actgttgttgtgaagccccgacgcc

SEQ ID NO: 445034 - DNA, 25 bp, Homo sapien
tggccgatgctattgacgctgctgc

SEQ ID NO: 445035 - DNA, 25 bp, Homo sapien
tggcggtaccgctaaccgctgccgg

SEQ ID NO: 445036 - DNA, 25 bp, Homo sapien
tccgagaagcccgaggacgcgagca

SEQ ID NO: 445037 - DNA, 25 bp, Homo sapien
gggatccgcaggcttattctcggcg

SEQ ID NO: 445038 - DNA, 25 bp, Homo sapien
cgccggtaccgttatacctgcctcg

SEQ ID NO: 445039 - DNA, 25 bp, Homo sapien
cccggccgtcgcctcggagccccag

SEQ ID NO: 445040 - DNA, 25 bp, Homo sapien
gctgccgccgccggtaccgttatac

SEQ ID NO: 445041 - DNA, 25 bp, Homo sapien
cgacggcaatgagccccacgggctg

SEQ ID NO: 445042 - DNA, 25 bp, Homo sapien
catccggatgttgcggatcggcacc

SEQ ID NO: 445043 - DNA, 25 bp, Homo sapien
tgtatgagtccaatcaacactgcga

SEQ ID NO: 445044 - DNA, 25 bp, Homo sapien
caccgaagggttaatcatccccgcg

SEQ ID NO: 445045 - DNA, 25 bp, Homo sapien
tgagcaccgtctccacgatgtccct

SEQ ID NO: 445046 - DNA, 25 bp, Homo sapien
atgtccctgttgctgacctctccga

SEQ ID NO: 445047 - DNA, 25 bp, Homo sapien
aggttgagcaccgtctccacgatgt

SEQ ID NO: 445048 - DNA, 25 bp, Homo sapien
acgatgtccctgttgctgacctctc

SEQ ID NO: 445049 - DNA, 25 bp, Homo sapien
taattatcctcaatgtatgattctc

SEQ ID NO: 445050 - DNA, 25 bp, Homo sapien
tcctcaatgtatgattctcctctcc

SEQ ID NO: 445051 - DNA, 25 bp, Homo sapien
ctgacatcttaaacgcttctgagcc

SEQ ID NO: 445052 - DNA, 25 bp, Homo sapien
tttccctgacatcttaaacgcttct

SEQ ID NO: 445053 - DNA, 25 bp, Homo sapien
tgaccctttcgagccaatctcaggg

SEQ ID NO: 445054 - DNA, 25 bp, Homo sapien
atctggaatgccctcactccaccag

SEQ ID NO: 445055 - DNA, 25 bp, Homo sapien
caccagtctactgtgcaaactgcag

SEQ ID NO: 445056 - DNA, 25 bp, Homo sapien
aactgcagctgaccctttcgagcca

SEQ ID NO: 445057 - DNA, 25 bp, Homo sapien
ttccgcactatagctcatttcaggg

SEQ ID NO: 445058 - DNA, 25 bp, Homo sapien
aactggtagggatagtctccacact

SEQ ID NO: 445059 - DNA, 25 bp, Homo sapien
gatagacattatagcctgtcggcac

SEQ ID NO: 445060 - DNA, 25 bp, Homo sapien
gcactactctatgttgtaaccaggg

SEQ ID NO: 445061 - DNA, 25 bp, Homo sapien
taggttgattccaccttttgagtac

SEQ ID NO: 445062 - DNA, 25 bp, Homo sapien
gatatatcctatgtagtgggactgc

SEQ ID NO: 445063 - DNA, 25 bp, Homo sapien
cagacacattgacaagcacctatag

SEQ ID NO: 445064 - DNA, 25 bp, Homo sapien
gaaaagatttaagaactacgccaca

SEQ ID NO: 445065 - DNA, 25 bp, Homo sapien
ctggtggcctgtctcgtgctcttca

SEQ ID NO: 445066 - DNA, 25 bp, Homo sapien
tgctcttcaacctctcccagtgctg

SEQ ID NO: 445067 - DNA, 25 bp, Homo sapien
ctgaagccaaaggtcatgctgctga

SEQ ID NO: 445068 - DNA, 25 bp, Homo sapien
aagccaaaggtcatgctgctgacag

SEQ ID NO: 445069 - DNA, 25 bp, Homo sapien
accccagatctggatgatttcacag

SEQ ID NO: 445070 - DNA, 25 bp, Homo sapien
gaattctatcaatcactcgtgagag

SEQ ID NO: 445071 - DNA, 25 bp, Homo sapien
aaagtcatgactatagatctgcaga

SEQ ID NO: 445072 - DNA, 25 bp, Homo sapien
tctgcagacactatgaagagataag

SEQ ID NO: 445073 - DNA, 25 bp, Homo sapien
tgttacatcacagtgctccaaaagc

SEQ ID NO: 445074 - DNA, 25 bp, Homo sapien
ctgtcatacatgttatactctcagc

SEQ ID NO: 445075 - DNA, 25 bp, Homo sapien
gaacactttttcgtagaatggctgt

SEQ ID NO: 445076 - DNA, 25 bp, Homo sapien
gcccaacttctgtgctagtctgtaa

SEQ ID NO: 445077 - DNA, 25 bp, Homo sapien
tatactttcctgtcagacaacccca

SEQ ID NO: 445078 - DNA, 25 bp, Homo sapien
ttatactttcctgtcagacaacccc

SEQ ID NO: 445079 - DNA, 25 bp, Homo sapien
tactttcctgtcagacaaccccata

SEQ ID NO: 445080 - DNA, 25 bp, Homo sapien
actttcctgtcagacaaccccatac

SEQ ID NO: 445081 - DNA, 25 bp, Homo sapien
tcctcgaagcatgctgaacaaaagc

SEQ ID NO: 445082 - DNA, 25 bp, Homo sapien
attccactttctcctcgaagcatgc

SEQ ID NO: 445083 - DNA, 25 bp, Homo sapien
cttcaactccttgacagtgatgctg

SEQ ID NO: 445084 - DNA, 25 bp, Homo sapien
tgatgctgtagctggcaagaacccc

SEQ ID NO: 445085 - DNA, 25 bp, Homo sapien
atcaggaccgtgtctctgtggcatc

SEQ ID NO: 445086 - DNA, 25 bp, Homo sapien
gtatcaggaccgtgtctctgtggca

SEQ ID NO: 445087 - DNA, 25 bp, Homo sapien
tatcaggaccgtgtctctgtggcat

SEQ ID NO: 445088 - DNA, 25 bp, Homo sapien
aattgaaaaaagtatcaggaccgtg

SEQ ID NO: 445089 - DNA, 25 bp, Homo sapien
ccaagtgtttaaggtgaagccattc

SEQ ID NO: 445090 - DNA, 25 bp, Homo sapien
taatggatccatacgaaaccaagtg

SEQ ID NO: 445091 - DNA, 25 bp, Homo sapien
tttgcaataggaggcaaggcaattg

SEQ ID NO: 445092 - DNA, 25 bp, Homo sapien
tctgataaggccactttgcaatagg

SEQ ID NO: 445093 - DNA, 25 bp, Homo sapien
aaaatgagcagagtaaccaactcct

SEQ ID NO: 445094 - DNA, 25 bp, Homo sapien
atgagcagagtaaccaactcctttg

SEQ ID NO: 445095 - DNA, 25 bp, Homo sapien
caaaatgagcagagtaaccaactcc

SEQ ID NO: 445096 - DNA, 25 bp, Homo sapien
aacaaaatgagcagagtaaccaact

SEQ ID NO: 445097 - DNA, 25 bp, Homo sapien
cataagataccagttgtccattaac

SEQ ID NO: 445098 - DNA, 25 bp, Homo sapien
catgccaagccatatcaccataaga

SEQ ID NO: 445099 - DNA, 25 bp, Homo sapien
tcatttgtgttaacatgccaagcca

SEQ ID NO: 445100 - DNA, 25 bp, Homo sapien
ctccatcgattgtaaatgtggacaa

SEQ ID NO: 445101 - DNA, 25 bp, Homo sapien
acatacacggcaccaagttgaccac

SEQ ID NO: 445102 - DNA, 25 bp, Homo sapien
tgctgggttgagtgcttcactgaac

SEQ ID NO: 445103 - DNA, 25 bp, Homo sapien
agaataccctatttgcatcagcagt

SEQ ID NO: 445104 - DNA, 25 bp, Homo sapien
gatccaagaaagcacttgtcatagc

SEQ ID NO: 445105 - DNA, 25 bp, Homo sapien
gtttatgatgttctgccaaatgaat

SEQ ID NO: 445106 - DNA, 25 bp, Homo sapien
tgtttatgatgttctgccaaatgaa

SEQ ID NO: 445107 - DNA, 25 bp, Homo sapien
ttgcactatgaattgaatgtgttac

SEQ ID NO: 445108 - DNA, 25 bp, Homo sapien
taagggcagaacccaaatactgtaa

SEQ ID NO: 445109 - DNA, 25 bp, Homo sapien
ttaagggcagaacccaaatactgta

SEQ ID NO: 445110 - DNA, 25 bp, Homo sapien
ctttaagggcagaacccaaatactg

SEQ ID NO: 445111 - DNA, 25 bp, Homo sapien
aagggcagaacccaaatactgtaat

SEQ ID NO: 445112 - DNA, 25 bp, Homo sapien
caggctgtcttgaaattccggactc

SEQ ID NO: 445113 - DNA, 25 bp, Homo sapien
ccatgtttgtctgacttgaaagtcc

SEQ ID NO: 445114 - DNA, 25 bp, Homo sapien
cataaaacaactataagtggccttc

SEQ ID NO: 445115 - DNA, 25 bp, Homo sapien
tgtgatcacaactgatggcaacctc

SEQ ID NO: 445116 - DNA, 25 bp, Homo sapien
ggagtgaagggtcaaagataaaagc

SEQ ID NO: 445117 - DNA, 25 bp, Homo sapien
tccatggtcgccagaatttctgcaa

SEQ ID NO: 445118 - DNA, 25 bp, Homo sapien
tttctgcaaggaataatttgtagtt

SEQ ID NO: 445119 - DNA, 25 bp, Homo sapien
gaagggtcaaagataaaagcataaa

SEQ ID NO: 445120 - DNA, 25 bp, Homo sapien
catcggattgttgcagggctcacaa

SEQ ID NO: 445121 - DNA, 25 bp, Homo sapien
agcccattcctatatctcctacata

SEQ ID NO: 445122 - DNA, 25 bp, Homo sapien
tactgccatacaaaatttctctcca

SEQ ID NO: 445123 - DNA, 25 bp, Homo sapien
aattctgtgtactgccatacaaaat

SEQ ID NO: 445124 - DNA, 25 bp, Homo sapien
ggctactgaacttttaagtagttca

SEQ ID NO: 445125 - DNA, 25 bp, Homo sapien
ctgaacttttaagtagttcaaccag

SEQ ID NO: 445126 - DNA, 25 bp, Homo sapien
gctactgaacttttaagtagttcaa

SEQ ID NO: 445127 - DNA, 25 bp, Homo sapien
gtaagtagccaatgactaaaaagcc

SEQ ID NO: 445128 - DNA, 25 bp, Homo sapien
caagtaagtagccaatgactaaaaa

SEQ ID NO: 445129 - DNA, 25 bp, Homo sapien
tagccaatgactaaaaagccttttc

SEQ ID NO: 445130 - DNA, 25 bp, Homo sapien
cttttcaagtaagtagccaatgact

SEQ ID NO: 445131 - DNA, 25 bp, Homo sapien
ctctagttatatgaactcttgatga

SEQ ID NO: 445132 - DNA, 25 bp, Homo sapien
cagcaaaggtgctccatgagataaa

SEQ ID NO: 445133 - DNA, 25 bp, Homo sapien
tgcaggtgtatgtatccagatggct

SEQ ID NO: 445134 - DNA, 25 bp, Homo sapien
ctccaggacagctctagttatatga

SEQ ID NO: 445135 - DNA, 25 bp, Homo sapien
tactgttcctactctgcgtatggtg

SEQ ID NO: 445136 - DNA, 25 bp, Homo sapien
atactgttcctactctgcgtatggt

SEQ ID NO: 445137 - DNA, 25 bp, Homo sapien
cagaataatcataggcaaatgtaaa

SEQ ID NO: 445138 - DNA, 25 bp, Homo sapien
tcaggagggtggcagtgccaaagaa

SEQ ID NO: 445139 - DNA, 25 bp, Homo sapien
tggcagtgccaaagaaacaactggg

SEQ ID NO: 445140 - DNA, 25 bp, Homo sapien
ggtggcagtgccaaagaaacaactg

SEQ ID NO: 445141 - DNA, 25 bp, Homo sapien
aggagggtggcagtgccaaagaaac

SEQ ID NO: 445142 - DNA, 25 bp, Homo sapien
aaaaagtagcataaatgccctcagt

SEQ ID NO: 445143 - DNA, 25 bp, Homo sapien
aatgccctcagtgatataatttctt

SEQ ID NO: 445144 - DNA, 25 bp, Homo sapien
agcataaatgccctcagtgatataa

SEQ ID NO: 445145 - DNA, 25 bp, Homo sapien
ttctttttgtgatggccggggacca

SEQ ID NO: 445146 - DNA, 25 bp, Homo sapien
ctcatgcatcgtaagtaggtaattt

SEQ ID NO: 445147 - DNA, 25 bp, Homo sapien
tgcatcgtaagtaggtaatttaata

SEQ ID NO: 445148 - DNA, 25 bp, Homo sapien
catgcatcgtaagtaggtaatttaa

SEQ ID NO: 445149 - DNA, 25 bp, Homo sapien
catcgtaagtaggtaatttaatata

SEQ ID NO: 445150 - DNA, 25 bp, Homo sapien
acattaaagccaccagtaactgtag

SEQ ID NO: 445151 - DNA, 25 bp, Homo sapien
caaaaacacactacatgctttacag

SEQ ID NO: 445152 - DNA, 25 bp, Homo sapien
taaaaactagcatgctttaataatt

SEQ ID NO: 445153 - DNA, 25 bp, Homo sapien
tcttctcaggattataattctttgg

SEQ ID NO: 445154 - DNA, 25 bp, Homo sapien
ctttaaacagtccttcagccataca

SEQ ID NO: 445155 - DNA, 25 bp, Homo sapien
ccagaaccttcaaagcttgaaccca

SEQ ID NO: 445156 - DNA, 25 bp, Homo sapien
aagcttgaacccaaatactttcact

SEQ ID NO: 445157 - DNA, 25 bp, Homo sapien
gcttcagaaagtatcccagaacctt

SEQ ID NO: 445158 - DNA, 25 bp, Homo sapien
tgcttcagaaagtatcccagaacct

SEQ ID NO: 445159 - DNA, 25 bp, Homo sapien
tccgctgttagatttttcaagtcaa

SEQ ID NO: 445160 - DNA, 25 bp, Homo sapien
tacattacatagaaaactcataaaa

SEQ ID NO: 445161 - DNA, 25 bp, Homo sapien
cataatctcaatagttatttctaga

SEQ ID NO: 445162 - DNA, 25 bp, Homo sapien
taccacagaaagctattattttccg

SEQ ID NO: 445163 - DNA, 25 bp, Homo sapien
acctggccaatttatgccattatgg

SEQ ID NO: 445164 - DNA, 25 bp, Homo sapien
tttttctcccatgtcgctcattttc

SEQ ID NO: 445165 - DNA, 25 bp, Homo sapien
gctactagccagagttttgcctttg

SEQ ID NO: 445166 - DNA, 25 bp, Homo sapien
tctgtgtatttcactatgctactag

SEQ ID NO: 445167 - DNA, 25 bp, Homo sapien
aaatttattcagtgctcaccagcgg

SEQ ID NO: 445168 - DNA, 25 bp, Homo sapien
tgctgtatggctaaaaaatatttga

SEQ ID NO: 445169 - DNA, 25 bp, Homo sapien
caatttcctcaagatttagtcacag

SEQ ID NO: 445170 - DNA, 25 bp, Homo sapien
tcaccagcggtccttagcaatagtt

SEQ ID NO: 445171 - DNA, 25 bp, Homo sapien
cattgatttcttgtttaattgcact

SEQ ID NO: 445172 - DNA, 25 bp, Homo sapien
aatttcttgagcctactttatggtc

SEQ ID NO: 445173 - DNA, 25 bp, Homo sapien
gtgtatgacactcaagccaatggat

SEQ ID NO: 445174 - DNA, 25 bp, Homo sapien
gaaaagaacgtgtatgacactcaag

SEQ ID NO: 445175 - DNA, 25 bp, Homo sapien
gaagtcactccagaatctctgggtt

SEQ ID NO: 445176 - DNA, 25 bp, Homo sapien
ttttttcgctgtcaatattttgcat

SEQ ID NO: 445177 - DNA, 25 bp, Homo sapien
aagtcactccagaatctctgggttc

SEQ ID NO: 445178 - DNA, 25 bp, Homo sapien
agactatgggtgtgcataatttcaa

SEQ ID NO: 445179 - DNA, 25 bp, Homo sapien
aagagtgaaaagactatgggtgtgc

SEQ ID NO: 445180 - DNA, 25 bp, Homo sapien
gtttgtatgcaacatcagcctttct

SEQ ID NO: 445181 - DNA, 25 bp, Homo sapien
gtcacagtgtttgtatgcaacatca

SEQ ID NO: 445182 - DNA, 25 bp, Homo sapien
aggtaatggttgctgcttcaagtgt

SEQ ID NO: 445183 - DNA, 25 bp, Homo sapien
ttaaaggtaatggttgctgcttcaa

SEQ ID NO: 445184 - DNA, 25 bp, Homo sapien
aaaggtaatggttgctgcttcaagt

SEQ ID NO: 445185 - DNA, 25 bp, Homo sapien
aacttaaaggtaatggttgctgctt

SEQ ID NO: 445186 - DNA, 25 bp, Homo sapien
cataggcatcattgaccaaaccagt

SEQ ID NO: 445187 - DNA, 25 bp, Homo sapien
gaagcctaatctgatattgtagcag

SEQ ID NO: 445188 - DNA, 25 bp, Homo sapien
gctgtcaactgaggagagattctga

SEQ ID NO: 445189 - DNA, 25 bp, Homo sapien
caatataaagttgcactgactactc

SEQ ID NO: 445190 - DNA, 25 bp, Homo sapien
taatcttacacattcgtagagttgt

SEQ ID NO: 445191 - DNA, 25 bp, Homo sapien
cgtagagttgtagtaatatttattc

SEQ ID NO: 445192 - DNA, 25 bp, Homo sapien
tatcaacaccataagttggttcttt

SEQ ID NO: 445193 - DNA, 25 bp, Homo sapien
ttctgcacttaatcttacacattcg

SEQ ID NO: 445194 - DNA, 25 bp, Homo sapien
ttctgattagaaaaggaccacgaca

SEQ ID NO: 445195 - DNA, 25 bp, Homo sapien
gaccacgacatccagaagtttcatt

SEQ ID NO: 445196 - DNA, 25 bp, Homo sapien
tgggagcaggattttgaacatcatc

SEQ ID NO: 445197 - DNA, 25 bp, Homo sapien
tgctcagactaagacaggacattta

SEQ ID NO: 445198 - DNA, 25 bp, Homo sapien
ctttttaatgaattccacatacttc

SEQ ID NO: 445199 - DNA, 25 bp, Homo sapien
ccagaaccagtatctatagaaggaa

SEQ ID NO: 445200 - DNA, 25 bp, Homo sapien
gaattccacatacttctaaactctt

SEQ ID NO: 445201 - DNA, 25 bp, Homo sapien
tatctatagaaggaaagattaggaa

SEQ ID NO: 445202 - DNA, 25 bp, Homo sapien
gatgtggtttgtgtacgacctgagt

SEQ ID NO: 445203 - DNA, 25 bp, Homo sapien
tgtgtacgacctgagtacatacttg

SEQ ID NO: 445204 - DNA, 25 bp, Homo sapien
cgacctgagtacatacttgttctgt

SEQ ID NO: 445205 - DNA, 25 bp, Homo sapien
gagtacatacttgttctgtcaagat

SEQ ID NO: 445206 - DNA, 25 bp, Homo sapien
tgcacttggtgtagagttttttaac

SEQ ID NO: 445207 - DNA, 25 bp, Homo sapien
acgacgaacttccatcagctctgca

SEQ ID NO: 445208 - DNA, 25 bp, Homo sapien
aaagttgccaccactttaagaatca

SEQ ID NO: 445209 - DNA, 25 bp, Homo sapien
cttctattttcacggctgttactga

SEQ ID NO: 445210 - DNA, 25 bp, Homo sapien
gaatccggaagatattgtagaccat

SEQ ID NO: 445211 - DNA, 25 bp, Homo sapien
tgggctattgagagggtatccaccc

SEQ ID NO: 445212 - DNA, 25 bp, Homo sapien
cagaatttttaggattgatatagcc

SEQ ID NO: 445213 - DNA, 25 bp, Homo sapien
gaccatttcggtaatcttctgttcc

SEQ ID NO: 445214 - DNA, 25 bp, Homo sapien
taaagtctccggtgataaatccata

SEQ ID NO: 445215 - DNA, 25 bp, Homo sapien
aagtctcgagtatctgtgctgacag

SEQ ID NO: 445216 - DNA, 25 bp, Homo sapien
ggtaatcggtctcactttctgggct

SEQ ID NO: 445217 - DNA, 25 bp, Homo sapien
gaccagagatggtgctcacattccc

SEQ ID NO: 445218 - DNA, 25 bp, Homo sapien
gatgtactactattgggaaggtctt

SEQ ID NO: 445219 - DNA, 25 bp, Homo sapien
aacacttccatgtacattgttctgg

SEQ ID NO: 445220 - DNA, 25 bp, Homo sapien
catctgctaatgttatcaatggacc

SEQ ID NO: 445221 - DNA, 25 bp, Homo sapien
tcaatggaccattatccttttcttc

SEQ ID NO: 445222 - DNA, 25 bp, Homo sapien
caagttaagtctacgctaccggtca

SEQ ID NO: 445223 - DNA, 25 bp, Homo sapien
tcagtttccagagttgtagcagtca

SEQ ID NO: 445224 - DNA, 25 bp, Homo sapien
ccagccccttagttgatgacgctaa

SEQ ID NO: 445225 - DNA, 25 bp, Homo sapien
taccggtcatgtgagcaagcaatcc

SEQ ID NO: 445226 - DNA, 25 bp, Homo sapien
gaagccgctggtgcattggagacca

SEQ ID NO: 445227 - DNA, 25 bp, Homo sapien
cgaaacattgtagtccgtggacctg

SEQ ID NO: 445228 - DNA, 25 bp, Homo sapien
ctgggctaaactggcgtcgctgttc

SEQ ID NO: 445229 - DNA, 25 bp, Homo sapien
tcttgttgggtgatagaccgaccct

SEQ ID NO: 445230 - DNA, 25 bp, Homo sapien
atgatgttgtctaccatttgggaaa

SEQ ID NO: 445231 - DNA, 25 bp, Homo sapien
tgctattgacaaaatccattacaga

SEQ ID NO: 445232 - DNA, 25 bp, Homo sapien
tgttgtctaccatttgggaaatgag

SEQ ID NO: 445233 - DNA, 25 bp, Homo sapien
tcctccacaagcaatgatgatgttg

SEQ ID NO: 445234 - DNA, 25 bp, Homo sapien
caaccatagccatcagccggctgag

SEQ ID NO: 445235 - DNA, 25 bp, Homo sapien
gagagcttgcaaacacaagtacatc

SEQ ID NO: 445236 - DNA, 25 bp, Homo sapien
tcgcattaaacctccagaagacatg

SEQ ID NO: 445237 - DNA, 25 bp, Homo sapien
gccggctgaggaaagttactgctgt

SEQ ID NO: 445238 - DNA, 25 bp, Homo sapien
tgctgtagcagtcacactttgagga

SEQ ID NO: 445239 - DNA, 25 bp, Homo sapien
ctctctgtctttgccgacattctaa

SEQ ID NO: 445240 - DNA, 25 bp, Homo sapien
aacttcctgaggtttactgcttcca

SEQ ID NO: 445241 - DNA, 25 bp, Homo sapien
gacattctaaacagtttctcacagc

SEQ ID NO: 445242 - DNA, 25 bp, Homo sapien
tatccggatccttaataggagaaag

SEQ ID NO: 445243 - DNA, 25 bp, Homo sapien
ggcgattgatatcaacatcctgaag

SEQ ID NO: 445244 - DNA, 25 bp, Homo sapien
tcctgaagaagtctatccggatcct

SEQ ID NO: 445245 - DNA, 25 bp, Homo sapien
catcccgaaagacaacagcacgaag

SEQ ID NO: 445246 - DNA, 25 bp, Homo sapien
cttccagttcttgtagtctctctct

SEQ ID NO: 445247 - DNA, 25 bp, Homo sapien
tctaatatgtcacgatacttggaaa

SEQ ID NO: 445248 - DNA, 25 bp, Homo sapien
ctctctggggttctaatatgtcacg

SEQ ID NO: 445249 - DNA, 25 bp, Homo sapien
gcttccagttcttgtagtctctctc

SEQ ID NO: 445250 - DNA, 25 bp, Homo sapien
tgtacttgttggtgaatttatttct

SEQ ID NO: 445251 - DNA, 25 bp, Homo sapien
ctgtacttgttggtgaatttatttc

SEQ ID NO: 445252 - DNA, 25 bp, Homo sapien
tccatggttcaaacttggatgaggg

SEQ ID NO: 445253 - DNA, 25 bp, Homo sapien
tgtaaaatgagtggccaaagctctg

SEQ ID NO: 445254 - DNA, 25 bp, Homo sapien
gatgagggatagatggtatgaccac

SEQ ID NO: 445255 - DNA, 25 bp, Homo sapien
tgctcaggaattaacttggcaagga

SEQ ID NO: 445256 - DNA, 25 bp, Homo sapien
cactgaagtattgtatcacctggag

SEQ ID NO: 445257 - DNA, 25 bp, Homo sapien
aactccaggtgatgtttgctgacaa

SEQ ID NO: 445258 - DNA, 25 bp, Homo sapien
tctgggcagatacaaccggatactt

SEQ ID NO: 445259 - DNA, 25 bp, Homo sapien
gatataggctccttaatctgggcag

SEQ ID NO: 445260 - DNA, 25 bp, Homo sapien
tatgtcaataacactcaaagaggag

SEQ ID NO: 445261 - DNA, 25 bp, Homo sapien
gcaactcgggaataataaatactta

SEQ ID NO: 445262 - DNA, 25 bp, Homo sapien
tgaactggcaataaagcaactcggg

SEQ ID NO: 445263 - DNA, 25 bp, Homo sapien
tagtctgcccaatccataaaatgac

SEQ ID NO: 445264 - DNA, 25 bp, Homo sapien
tgaactttctacctgaatatcttca

SEQ ID NO: 445265 - DNA, 25 bp, Homo sapien
gaactttctacctgaatatcttcac

SEQ ID NO: 445266 - DNA, 25 bp, Homo sapien
cattcaggatgctagccacttgctc

SEQ ID NO: 445267 - DNA, 25 bp, Homo sapien
tgcctttggtttgactaatgctaga

SEQ ID NO: 445268 - DNA, 25 bp, Homo sapien
tcagggccacattctgctatttcaa

SEQ ID NO: 445269 - DNA, 25 bp, Homo sapien
gcaggcttcaacgtttcactaggat

SEQ ID NO: 445270 - DNA, 25 bp, Homo sapien
tgtaataagaatctacgttaataaa

SEQ ID NO: 445271 - DNA, 25 bp, Homo sapien
tataaagccctgtgaataataagtt

SEQ ID NO: 445272 - DNA, 25 bp, Homo sapien
tgtataaagccctgtgaataataag

SEQ ID NO: 445273 - DNA, 25 bp, Homo sapien
aaagccctgtgaataataagttcag

SEQ ID NO: 445274 - DNA, 25 bp, Homo sapien
caaactgaaatgactataccgccac

SEQ ID NO: 445275 - DNA, 25 bp, Homo sapien
gaataggcattaaccccagtgatca

SEQ ID NO: 445276 - DNA, 25 bp, Homo sapien
tatgtacatgaaacgactaagtcca

SEQ ID NO: 445277 - DNA, 25 bp, Homo sapien
gataaaccttggacagatgtgaccc

SEQ ID NO: 445278 - DNA, 25 bp, Homo sapien
gatacactcgacgtagaacacaagt

SEQ ID NO: 445279 - DNA, 25 bp, Homo sapien
gaaacatcataaggaacacccaggg

SEQ ID NO: 445280 - DNA, 25 bp, Homo sapien
gaaactaagttgtatgcagggccta

SEQ ID NO: 445281 - DNA, 25 bp, Homo sapien
tgagttacgtgcagtgcaaggccgc

SEQ ID NO: 445282 - DNA, 25 bp, Homo sapien
gtatttcctctttacatacagtgtt

SEQ ID NO: 445283 - DNA, 25 bp, Homo sapien
ctttacatacagtgtttgctcatta

SEQ ID NO: 445284 - DNA, 25 bp, Homo sapien
tttcctctttacatacagtgtttgc

SEQ ID NO: 445285 - DNA, 25 bp, Homo sapien
tgtatttcctctttacatacagtgt

SEQ ID NO: 445286 - DNA, 25 bp, Homo sapien
gagaacttggcaacttgatttaaga

SEQ ID NO: 445287 - DNA, 25 bp, Homo sapien
aaatatttctctctgcctcacagta

SEQ ID NO: 445288 - DNA, 25 bp, Homo sapien
taaaccatcgataaatatagcaatc

SEQ ID NO: 445289 - DNA, 25 bp, Homo sapien
taattggtggctttagataaaagca

SEQ ID NO: 445290 - DNA, 25 bp, Homo sapien
tgtatgagaagcacattgccctcta

SEQ ID NO: 445291 - DNA, 25 bp, Homo sapien
taatttgaatacaggaggtttgcaa

SEQ ID NO: 445292 - DNA, 25 bp, Homo sapien
tgtaagtttgaggtctgttagccaa

SEQ ID NO: 445293 - DNA, 25 bp, Homo sapien
gttagccaaagaagcaacacaacta

SEQ ID NO: 445294 - DNA, 25 bp, Homo sapien
taaggcttgaaaactggaccactct

SEQ ID NO: 445295 - DNA, 25 bp, Homo sapien
cattccctatattggcaagtcctca

SEQ ID NO: 445296 - DNA, 25 bp, Homo sapien
cattgagaggtagtgtgacattgca

SEQ ID NO: 445297 - DNA, 25 bp, Homo sapien
ggaccactctcaaactgtatgatct

SEQ ID NO: 445298 - DNA, 25 bp, Homo sapien
ggtactgcctgttggcagcccactt

SEQ ID NO: 445299 - DNA, 25 bp, Homo sapien
tatattagaggtactgcctgttggc

SEQ ID NO: 445300 - DNA, 25 bp, Homo sapien
ttttggtgtagctccagtagcagca

SEQ ID NO: 445301 - DNA, 25 bp, Homo sapien
ttacagctaaactacctggaggtgg

SEQ ID NO: 445302 - DNA, 25 bp, Homo sapien
ggaggaggaccctgaatccacggca

SEQ ID NO: 445303 - DNA, 25 bp, Homo sapien
gaagaggaggaggaccctgaatcca

SEQ ID NO: 445304 - DNA, 25 bp, Homo sapien
aggaagaggaggaggaccctgaatc

SEQ ID NO: 445305 - DNA, 25 bp, Homo sapien
agaggaggaggaccctgaatccacg

SEQ ID NO: 445306 - DNA, 25 bp, Homo sapien
tttgctagtagcaccattcacaaaa

SEQ ID NO: 445307 - DNA, 25 bp, Homo sapien
ttctggcattggagcaacagtttgt

SEQ ID NO: 445308 - DNA, 25 bp, Homo sapien
agtttgtacagctggaaggtttttg

SEQ ID NO: 445309 - DNA, 25 bp, Homo sapien
ctgaatcttctggcattggagcaac

SEQ ID NO: 445310 - DNA, 25 bp, Homo sapien
gttgaatgctttgccaaagtaggca

SEQ ID NO: 445311 - DNA, 25 bp, Homo sapien
tcgttgtaatacagttgaatgcttt

SEQ ID NO: 445312 - DNA, 25 bp, Homo sapien
gaataactgaaattcgttgtaatac

SEQ ID NO: 445313 - DNA, 25 bp, Homo sapien
tacagttgaatgctttgccaaagta

SEQ ID NO: 445314 - DNA, 25 bp, Homo sapien
aacgctctttcaagttttgcagtga

SEQ ID NO: 445315 - DNA, 25 bp, Homo sapien
aaatttcacgaagaagaggagcaac

SEQ ID NO: 445316 - DNA, 25 bp, Homo sapien
aaaaatttcacgaagaagaggagca

SEQ ID NO: 445317 - DNA, 25 bp, Homo sapien
gagcaactttttctaacgctctttc

SEQ ID NO: 445318 - DNA, 25 bp, Homo sapien
gctcttgtccatgactgccaagaag

SEQ ID NO: 445319 - DNA, 25 bp, Homo sapien
cttctatcaatagctcttgtccatg

SEQ ID NO: 445320 - DNA, 25 bp, Homo sapien
caagaagtgtacgagataggaatgg

SEQ ID NO: 445321 - DNA, 25 bp, Homo sapien
gactgccaagaagtgtacgagatag

SEQ ID NO: 445322 - DNA, 25 bp, Homo sapien
gtagaagcagttgggacaataacag

SEQ ID NO: 445323 - DNA, 25 bp, Homo sapien
tgtgtagaagcagttgggacaataa

SEQ ID NO: 445324 - DNA, 25 bp, Homo sapien
gcagttgggacaataacagaacagg

SEQ ID NO: 445325 - DNA, 25 bp, Homo sapien
gaagcagttgggacaataacagaac

SEQ ID NO: 445326 - DNA, 25 bp, Homo sapien
tgtgagctcccaatagaacataaac

SEQ ID NO: 445327 - DNA, 25 bp, Homo sapien
gaatggtcttaaaaggtgaactaca

SEQ ID NO: 445328 - DNA, 25 bp, Homo sapien
aggacaccgacaataaaaactgcca

SEQ ID NO: 445329 - DNA, 25 bp, Homo sapien
gctatatccgcatcataactaagtt

SEQ ID NO: 445330 - DNA, 25 bp, Homo sapien
tggttggaatgagaccggccatctg

SEQ ID NO: 445331 - DNA, 25 bp, Homo sapien
gccatctgggttgagtgggaactgg

SEQ ID NO: 445332 - DNA, 25 bp, Homo sapien
gttgagtgggaactgggtgagtcct

SEQ ID NO: 445333 - DNA, 25 bp, Homo sapien
ctggaaacaaacttgatgctgttgg

SEQ ID NO: 445334 - DNA, 25 bp, Homo sapien
cagaatcagtcaaagaaaacagctc

SEQ ID NO: 445335 - DNA, 25 bp, Homo sapien
agttcaccatgcctcgtgcaatggc

SEQ ID NO: 445336 - DNA, 25 bp, Homo sapien
acagaatcagtcaaagaaaacagct

SEQ ID NO: 445337 - DNA, 25 bp, Homo sapien
tgcctcgtgcaatggctaaggccag

SEQ ID NO: 445338 - DNA, 25 bp, Homo sapien
gcagcagtggaatgccattggtttc

SEQ ID NO: 445339 - DNA, 25 bp, Homo sapien
cagcagtggaatgccattggtttct

SEQ ID NO: 445340 - DNA, 25 bp, Homo sapien
agcagcagtggaatgccattggttt

SEQ ID NO: 445341 - DNA, 25 bp, Homo sapien
gcagtggaatgccattggtttctgt

SEQ ID NO: 445342 - DNA, 25 bp, Homo sapien
agggatgctggcatactatgaatct

SEQ ID NO: 445343 - DNA, 25 bp, Homo sapien
gatgctggcatactatgaatctgct

SEQ ID NO: 445344 - DNA, 25 bp, Homo sapien
ggatgctggcatactatgaatctgc

SEQ ID NO: 445345 - DNA, 25 bp, Homo sapien
tgctggcatactatgaatctgctac

SEQ ID NO: 445346 - DNA, 25 bp, Homo sapien
tggtgaggatgtgaggaagctggca

SEQ ID NO: 445347 - DNA, 25 bp, Homo sapien
ggatgtgaggaagctggcagtgaca

SEQ ID NO: 445348 - DNA, 25 bp, Homo sapien
ctggtgaggatgtgaggaagctggc

SEQ ID NO: 445349 - DNA, 25 bp, Homo sapien
tgaggatgtgaggaagctggcagtg

SEQ ID NO: 445350 - DNA, 25 bp, Homo sapien
gacgaggatctctgtagtgacagat

SEQ ID NO: 445351 - DNA, 25 bp, Homo sapien
atggcagaacaccagcacacagtca

SEQ ID NO: 445352 - DNA, 25 bp, Homo sapien
ccaccactgacgaggatctctgtag

SEQ ID NO: 445353 - DNA, 25 bp, Homo sapien
gatggcagaacaccagcacacagtc

SEQ ID NO: 445354 - DNA, 25 bp, Homo sapien
gctcactccacaaggtcatcactca

SEQ ID NO: 445355 - DNA, 25 bp, Homo sapien
ctgctcactccacaaggtcatcact

SEQ ID NO: 445356 - DNA, 25 bp, Homo sapien
tgctcactccacaaggtcatcactc

SEQ ID NO: 445357 - DNA, 25 bp, Homo sapien
ctcactccacaaggtcatcactcac

SEQ ID NO: 445358 - DNA, 25 bp, Homo sapien
cgtccaggatgagcccagaggtggc

SEQ ID NO: 445359 - DNA, 25 bp, Homo sapien
acgtccaggatgagcccagaggtgg

SEQ ID NO: 445360 - DNA, 25 bp, Homo sapien
gacgtccaggatgagcccagaggtg

SEQ ID NO: 445361 - DNA, 25 bp, Homo sapien
tccaggatgagcccagaggtggccg

SEQ ID NO: 445362 - DNA, 25 bp, Homo sapien
tgaaggtcacatgcatcaaggacat

SEQ ID NO: 445363 - DNA, 25 bp, Homo sapien
ctgaaggtcacatgcatcaaggaca

SEQ ID NO: 445364 - DNA, 25 bp, Homo sapien
catatcataggcagagatgatagcc

SEQ ID NO: 445365 - DNA, 25 bp, Homo sapien
agccatatcataggcagagatgata

SEQ ID NO: 445366 - DNA, 25 bp, Homo sapien
ggcagagatgatagccgcctctttc

SEQ ID NO: 445367 - DNA, 25 bp, Homo sapien
tcataggcagagatgatagccgcct

SEQ ID NO: 445368 - DNA, 25 bp, Homo sapien
ctcttggtggctttgagcatgtaca

SEQ ID NO: 445369 - DNA, 25 bp, Homo sapien
gagcatgtacagctccatcgggtag

SEQ ID NO: 445370 - DNA, 25 bp, Homo sapien
tgggtaacattctgagagcacaaga

SEQ ID NO: 445371 - DNA, 25 bp, Homo sapien
agagctggtaagcaacgctcttggt

SEQ ID NO: 445372 - DNA, 25 bp, Homo sapien
cagtctgtgaatgagtgagccagga

SEQ ID NO: 445373 - DNA, 25 bp, Homo sapien
caggatgcatacttcctcggcaggc

SEQ ID NO: 445374 - DNA, 25 bp, Homo sapien
cacgaagtgagcacgtttttggaaa

SEQ ID NO: 445375 - DNA, 25 bp, Homo sapien
atcactatggctaacaatcacaaag

SEQ ID NO: 445376 - DNA, 25 bp, Homo sapien
ctgttgactactcaaagatttgaat

SEQ ID NO: 445377 - DNA, 25 bp, Homo sapien
tgttgactactcaaagatttgaatt

SEQ ID NO: 445378 - DNA, 25 bp, Homo sapien
caagctcaaccacagatgtgctgga

SEQ ID NO: 445379 - DNA, 25 bp, Homo sapien
cagcataacaagctcaaccacagat

SEQ ID NO: 445380 - DNA, 25 bp, Homo sapien
gtgctggacttcatacaaacaaggc

SEQ ID NO: 445381 - DNA, 25 bp, Homo sapien
tgtgctggacttcatacaaacaagg

SEQ ID NO: 445382 - DNA, 25 bp, Homo sapien
tccttcattgatgagctcaataaat

SEQ ID NO: 445383 - DNA, 25 bp, Homo sapien
tcaataaatgcaagtcctgcattct

SEQ ID NO: 445384 - DNA, 25 bp, Homo sapien
aataaatgcaagtcctgcattcttc

SEQ ID NO: 445385 - DNA, 25 bp, Homo sapien
caataaatgcaagtcctgcattctt

SEQ ID NO: 445386 - DNA, 25 bp, Homo sapien
gttaattcacttctacctgcatcca

SEQ ID NO: 445387 - DNA, 25 bp, Homo sapien
cctgttagtgtagcccctgttaatt

SEQ ID NO: 445388 - DNA, 25 bp, Homo sapien
cttcctgttagtgtagcccctgtta

SEQ ID NO: 445389 - DNA, 25 bp, Homo sapien
ctgttaattcacttctacctgcatc

SEQ ID NO: 445390 - DNA, 25 bp, Homo sapien
tgtatcctttggctacgtgcacaac

SEQ ID NO: 445391 - DNA, 25 bp, Homo sapien
ctttggtgtatcctttggctacgtg

SEQ ID NO: 445392 - DNA, 25 bp, Homo sapien
ggtgtatcctttggctacgtgcaca

SEQ ID NO: 445393 - DNA, 25 bp, Homo sapien
tatcctttggctacgtgcacaacat

SEQ ID NO: 445394 - DNA, 25 bp, Homo sapien
tataagagacatgttatagaagaaa

SEQ ID NO: 445395 - DNA, 25 bp, Homo sapien
tggctgggactggatctttataaga

SEQ ID NO: 445396 - DNA, 25 bp, Homo sapien
tgtttggctgggactggatctttat

SEQ ID NO: 445397 - DNA, 25 bp, Homo sapien
tgggactggatctttataagagaca

SEQ ID NO: 445398 - DNA, 25 bp, Homo sapien
acttaattcctgatctacctgctgc

SEQ ID NO: 445399 - DNA, 25 bp, Homo sapien
tgggatcccacaattccatgtttta

SEQ ID NO: 445400 - DNA, 25 bp, Homo sapien
tgtgaccctgggttaacacactggt

SEQ ID NO: 445401 - DNA, 25 bp, Homo sapien
cactggagtcaaagatgtgtgaccc

SEQ ID NO: 445402 - DNA, 25 bp, Homo sapien
tcggctctttgtctgttcaaaataa

SEQ ID NO: 445403 - DNA, 25 bp, Homo sapien
tttgcaacacggactatatggtcct

SEQ ID NO: 445404 - DNA, 25 bp, Homo sapien
agcttcatttgcaacacggactata

SEQ ID NO: 445405 - DNA, 25 bp, Homo sapien
tatatggtccttcatagcatggcac

SEQ ID NO: 445406 - DNA, 25 bp, Homo sapien
ttttcccataattatcagttgtcat

SEQ ID NO: 445407 - DNA, 25 bp, Homo sapien
tgatctcgatgtttagcagcactga

SEQ ID NO: 445408 - DNA, 25 bp, Homo sapien
cagcagcatattgggcacactgtga

SEQ ID NO: 445409 - DNA, 25 bp, Homo sapien
ttgtgagaatattgagaatcttctg

SEQ ID NO: 445410 - DNA, 25 bp, Homo sapien
gcagcactgataagatggtcacaca

SEQ ID NO: 445411 - DNA, 25 bp, Homo sapien
tatggaggtcactgtcctttagctg

SEQ ID NO: 445412 - DNA, 25 bp, Homo sapien
ctgctatggaggtcactgtccttta

SEQ ID NO: 445413 - DNA, 25 bp, Homo sapien
gacgcatctgacatgttaccacatg

SEQ ID NO: 445414 - DNA, 25 bp, Homo sapien
cagaaaggttgttgactagctagca

SEQ ID NO: 445415 - DNA, 25 bp, Homo sapien
ctctatgtcttagctcttcaaggaa

SEQ ID NO: 445416 - DNA, 25 bp, Homo sapien
ggtaccacatggtcaaccggaggca

SEQ ID NO: 445417 - DNA, 25 bp, Homo sapien
ggaatgtgggacagggcctctcaat

SEQ ID NO: 445418 - DNA, 25 bp, Homo sapien
tattacagcatgtgcccacaacttc

SEQ ID NO: 445419 - DNA, 25 bp, Homo sapien
gacccataaacagcacatctataat

SEQ ID NO: 445420 - DNA, 25 bp, Homo sapien
gcacatctataattttgtaatgcga

SEQ ID NO: 445421 - DNA, 25 bp, Homo sapien
tatccaagacccataaacagcacat

SEQ ID NO: 445422 - DNA, 25 bp, Homo sapien
cttctttgaatatccaagacccata

SEQ ID NO: 445423 - DNA, 25 bp, Homo sapien
gagccagagcgttaccatttatcat

SEQ ID NO: 445424 - DNA, 25 bp, Homo sapien
tcatttcaccacaaagtaattatgc

SEQ ID NO: 445425 - DNA, 25 bp, Homo sapien
atgctgagccagagcgttaccattt

SEQ ID NO: 445426 - DNA, 25 bp, Homo sapien
catttcaccacaaagtaattatgct

SEQ ID NO: 445427 - DNA, 25 bp, Homo sapien
gatagatcacaacagtcacaacatt

SEQ ID NO: 445428 - DNA, 25 bp, Homo sapien
tggattatgggtgcagtttacccca

SEQ ID NO: 445429 - DNA, 25 bp, Homo sapien
aaaagtttgagtggcctcgatagat

SEQ ID NO: 445430 - DNA, 25 bp, Homo sapien
taccccatgttgttatcctgacagc

SEQ ID NO: 445431 - DNA, 25 bp, Homo sapien
tagaatctttactcccttctgactg

SEQ ID NO: 445432 - DNA, 25 bp, Homo sapien
tttagaatctttactcccttctgac

SEQ ID NO: 445433 - DNA, 25 bp, Homo sapien
ttagaatctttactcccttctgact

SEQ ID NO: 445434 - DNA, 25 bp, Homo sapien
tgaagtaaatttcctatgctgcttc

SEQ ID NO: 445435 - DNA, 25 bp, Homo sapien
gaattgcattttcactcttcgcgtc

SEQ ID NO: 445436 - DNA, 25 bp, Homo sapien
tcttcgcgtctttaacaagctcttt

SEQ ID NO: 445437 - DNA, 25 bp, Homo sapien
gcattttcactcttcgcgtctttaa

SEQ ID NO: 445438 - DNA, 25 bp, Homo sapien
ttcactcttcgcgtctttaacaagc

SEQ ID NO: 445439 - DNA, 25 bp, Homo sapien
ttattctgggttttggtccttctga

SEQ ID NO: 445440 - DNA, 25 bp, Homo sapien
ggtccttctgatatctatctcagag

SEQ ID NO: 445441 - DNA, 25 bp, Homo sapien
tatctcagagctttgtgttgttcct

SEQ ID NO: 445442 - DNA, 25 bp, Homo sapien
ttgtgttgttccttggcacttctgt

SEQ ID NO: 445443 - DNA, 25 bp, Homo sapien
catcaaaagaaggagtggatactgt

SEQ ID NO: 445444 - DNA, 25 bp, Homo sapien
tgtgaaagactctacacacataaat

SEQ ID NO: 445445 - DNA, 25 bp, Homo sapien
ggatatcactagtgactctgaagac

SEQ ID NO: 445446 - DNA, 25 bp, Homo sapien
cactgacacacctctaaaaagactg

SEQ ID NO: 445447 - DNA, 25 bp, Homo sapien
ttcattgaaataattccccgctgcc

SEQ ID NO: 445448 - DNA, 25 bp, Homo sapien
attgaaataattccccgctgcccac

SEQ ID NO: 445449 - DNA, 25 bp, Homo sapien
cgctgcccacagcaacctgagaaaa

SEQ ID NO: 445450 - DNA, 25 bp, Homo sapien
ataatgtgctgaaatattcattgaa

SEQ ID NO: 445451 - DNA, 25 bp, Homo sapien
gccaaatgcattgcgaacaaatcgt

SEQ ID NO: 445452 - DNA, 25 bp, Homo sapien
taatccaaacgccagaaatcatgca

SEQ ID NO: 445453 - DNA, 25 bp, Homo sapien
tctccttcgacgaagatcatcttcc

SEQ ID NO: 445454 - DNA, 25 bp, Homo sapien
cttcccagtaatccaaacgccagaa

SEQ ID NO: 445455 - DNA, 25 bp, Homo sapien
cagtcctaaagtccatagacttgtg

SEQ ID NO: 445456 - DNA, 25 bp, Homo sapien
tcagtcctaaagtccatagacttgt

SEQ ID NO: 445457 - DNA, 25 bp, Homo sapien
agtcctaaagtccatagacttgtga

SEQ ID NO: 445458 - DNA, 25 bp, Homo sapien
ctcagtcctaaagtccatagacttg

SEQ ID NO: 445459 - DNA, 25 bp, Homo sapien
ctacgtatagatcactccagggaga

SEQ ID NO: 445460 - DNA, 25 bp, Homo sapien
gtatagatcactccagggagagctt

SEQ ID NO: 445461 - DNA, 25 bp, Homo sapien
acgtatagatcactccagggagagc

SEQ ID NO: 445462 - DNA, 25 bp, Homo sapien
actccagggagagcttcccactcac

SEQ ID NO: 445463 - DNA, 25 bp, Homo sapien
caggaatctgttgaacaggatggca

SEQ ID NO: 445464 - DNA, 25 bp, Homo sapien
aacaggatggcattctttttcaaag

SEQ ID NO: 445465 - DNA, 25 bp, Homo sapien
taaatgtattatcaggtaattctgt

SEQ ID NO: 445466 - DNA, 25 bp, Homo sapien
ctaaacattcaggaatctgttgaac

SEQ ID NO: 445467 - DNA, 25 bp, Homo sapien
ggttcactattgcttgacttctgaa

SEQ ID NO: 445468 - DNA, 25 bp, Homo sapien
ccagcataagttctgtctctgcatt

SEQ ID NO: 445469 - DNA, 25 bp, Homo sapien
tcgtctccttccagcataagttctg

SEQ ID NO: 445470 - DNA, 25 bp, Homo sapien
gactttactacatcttcttccgtgc

SEQ ID NO: 445471 - DNA, 25 bp, Homo sapien
ctgcaaggttgtcaatttctttctc

SEQ ID NO: 445472 - DNA, 25 bp, Homo sapien
caaggttgtcaatttctttctcctg

SEQ ID NO: 445473 - DNA, 25 bp, Homo sapien
tgcaaggttgtcaatttctttctcc

SEQ ID NO: 445474 - DNA, 25 bp, Homo sapien
aggttgtcaatttctttctcctgta

SEQ ID NO: 445475 - DNA, 25 bp, Homo sapien
tctatgcctatgtcagcaaaacggg

SEQ ID NO: 445476 - DNA, 25 bp, Homo sapien
gctaatcagcaggtttaggtttacc

SEQ ID NO: 445477 - DNA, 25 bp, Homo sapien
gaaagtacatttctcatactaataa

SEQ ID NO: 445478 - DNA, 25 bp, Homo sapien
aagttttctgtactaattagcatac

SEQ ID NO: 445479 - DNA, 25 bp, Homo sapien
catatccatttgtcaatattttcag

SEQ ID NO: 445480 - DNA, 25 bp, Homo sapien
gtgggacaaccacattcacccgagt

SEQ ID NO: 445481 - DNA, 25 bp, Homo sapien
cacattcacccgagtgaagtttcga

SEQ ID NO: 445482 - DNA, 25 bp, Homo sapien
tgtcttacatagagttgatatccga

SEQ ID NO: 445483 - DNA, 25 bp, Homo sapien
gttgatatccgatacttatatttgt

SEQ ID NO: 445484 - DNA, 25 bp, Homo sapien
gtttaaggagcactgaatctttttg

SEQ ID NO: 445485 - DNA, 25 bp, Homo sapien
ccaattacaacttccaattccatag

SEQ ID NO: 445486 - DNA, 25 bp, Homo sapien
attccatagcatgtttaaggagcac

SEQ ID NO: 445487 - DNA, 25 bp, Homo sapien
cctcgtcctttggaaatctccaatt

SEQ ID NO: 445488 - DNA, 25 bp, Homo sapien
cagtcgatctgaagcaccactttaa

SEQ ID NO: 445489 - DNA, 25 bp, Homo sapien
cacctcggttgcacaaggtttttct

SEQ ID NO: 445490 - DNA, 25 bp, Homo sapien
cagctttcagccctgtcgggactgc

SEQ ID NO: 445491 - DNA, 25 bp, Homo sapien
tgctcaagtaattacgcccgaatct

SEQ ID NO: 445492 - DNA, 25 bp, Homo sapien
aatctgcgaccgtcctgcacaatgc

SEQ ID NO: 445493 - DNA, 25 bp, Homo sapien
tgcgaccgtcctgcacaatgccggg

SEQ ID NO: 445494 - DNA, 25 bp, Homo sapien
ccaatctgcgaccgtcctgcacaat

SEQ ID NO: 445495 - DNA, 25 bp, Homo sapien
tctgcgaccgtcctgcacaatgccg

SEQ ID NO: 445496 - DNA, 25 bp, Homo sapien
gccctcgcgccgacaccgccctcgg

SEQ ID NO: 445497 - DNA, 25 bp, Homo sapien
agttggctttccctggcgcagcaca

SEQ ID NO: 445498 - DNA, 25 bp, Homo sapien
ccaagttggctttccctggcgcagc

SEQ ID NO: 445499 - DNA, 25 bp, Homo sapien
tccgggcggagagccctcgcgccga

SEQ ID NO: 445500 - DNA, 25 bp, Homo sapien
gggagccattcttcgcaatcctgga

SEQ ID NO: 445501 - DNA, 25 bp, Homo sapien
gatgcgtcacaataacagtcggaga

SEQ ID NO: 445502 - DNA, 25 bp, Homo sapien
caaatgcatacagtcagatgcgtca

SEQ ID NO: 445503 - DNA, 25 bp, Homo sapien
gtagcaagggcgcatcataatccct

SEQ ID NO: 445504 - DNA, 25 bp, Homo sapien
gacgcttgaacaaaacggttctcaa

SEQ ID NO: 445505 - DNA, 25 bp, Homo sapien
tctcaaaaaaccgtgcgaaagtgct

SEQ ID NO: 445506 - DNA, 25 bp, Homo sapien
gaaagtgctacttctcaacttttga

SEQ ID NO: 445507 - DNA, 25 bp, Homo sapien
catacgcgtgcatacggacattaca

SEQ ID NO: 445508 - DNA, 25 bp, Homo sapien
tcagagcggtttgcctcttgcagga

SEQ ID NO: 445509 - DNA, 25 bp, Homo sapien
taaaagtgcagaacggacaaatgcc

SEQ ID NO: 445510 - DNA, 25 bp, Homo sapien
ggtcaggataccgaataacgctcaa

SEQ ID NO: 445511 - DNA, 25 bp, Homo sapien
tctaatatcggtctcctaaggcgcg

SEQ ID NO: 445512 - DNA, 25 bp, Homo sapien
tagatttctgtcgtggtgatggaga

SEQ ID NO: 445513 - DNA, 25 bp, Homo sapien
gtgatggagagagtccccttggcca

SEQ ID NO: 445514 - DNA, 25 bp, Homo sapien
tcttgaaggcagaatcatcctcatc

SEQ ID NO: 445515 - DNA, 25 bp, Homo sapien
tcctcatctacctcgaagtagattt

SEQ ID NO: 445516 - DNA, 25 bp, Homo sapien
ccaaagccactagtattagaagact

SEQ ID NO: 445517 - DNA, 25 bp, Homo sapien
cgtggcgactggcaagagagatcct

SEQ ID NO: 445518 - DNA, 25 bp, Homo sapien
tcctaatattccactccgcagtgca

SEQ ID NO: 445519 - DNA, 25 bp, Homo sapien
agagatcctgaccaacccgaaaagt

SEQ ID NO: 445520 - DNA, 25 bp, Homo sapien
tgccattgccaaaactatccgggaa

SEQ ID NO: 445521 - DNA, 25 bp, Homo sapien
ccatttctgagtgttgcggcccgtt

SEQ ID NO: 445522 - DNA, 25 bp, Homo sapien
aatccggtccaggtttcagacgctg

SEQ ID NO: 445523 - DNA, 25 bp, Homo sapien
gatggacaatcgctacgagggcctc

SEQ ID NO: 445524 - DNA, 25 bp, Homo sapien
catgcggttctctcacacaaggatt

SEQ ID NO: 445525 - DNA, 25 bp, Homo sapien
ttgactactggaagagctttgctgg

SEQ ID NO: 445526 - DNA, 25 bp, Homo sapien
caatgattacgggaaagcgcaaata

SEQ ID NO: 445527 - DNA, 25 bp, Homo sapien
tcactttaagaacggctgggctcaa

SEQ ID NO: 445528 - DNA, 25 bp, Homo sapien
gagcccagtggcgattggccgcccg

SEQ ID NO: 445529 - DNA, 25 bp, Homo sapien
ttagccgggttggagctgaaggagg

SEQ ID NO: 445530 - DNA, 25 bp, Homo sapien
ccagtggcgattggccgcccgcctg

SEQ ID NO: 445531 - DNA, 25 bp, Homo sapien
ggctgtcgtgacgagcccagtggcg

SEQ ID NO: 445532 - DNA, 25 bp, Homo sapien
ttgtgtgcctatatccatgagtggg

SEQ ID NO: 445533 - DNA, 25 bp, Homo sapien
ctttagtttgtgtgcctatatccat

SEQ ID NO: 445534 - DNA, 25 bp, Homo sapien
gtttgtgtgcctatatccatgagtg

SEQ ID NO: 445535 - DNA, 25 bp, Homo sapien
tagtttgtgtgcctatatccatgag

SEQ ID NO: 445536 - DNA, 25 bp, Homo sapien
tccaaactgtctaggtggcctgagt

SEQ ID NO: 445537 - DNA, 25 bp, Homo sapien
aattagaagtctactgccaggtcac

SEQ ID NO: 445538 - DNA, 25 bp, Homo sapien
gacaagcaggttttcggcacagaag

SEQ ID NO: 445539 - DNA, 25 bp, Homo sapien
catttcagcggtaaaagacaagcag

SEQ ID NO: 445540 - DNA, 25 bp, Homo sapien
tgtctacaaacatgttaccgggagt

SEQ ID NO: 445541 - DNA, 25 bp, Homo sapien
tataggatttgacgggaaatattct

SEQ ID NO: 445542 - DNA, 25 bp, Homo sapien
tcttgttaaaagtgactctgaaagt

SEQ ID NO: 445543 - DNA, 25 bp, Homo sapien
taattggaaagacgtggcatctaaa

SEQ ID NO: 445544 - DNA, 25 bp, Homo sapien
caattaagctgcacagtgagccccg

SEQ ID NO: 445545 - DNA, 25 bp, Homo sapien
cacagtgataatcgcggaccggtga

SEQ ID NO: 445546 - DNA, 25 bp, Homo sapien
taaagcgtagcgatcttgagcccag

SEQ ID NO: 445547 - DNA, 25 bp, Homo sapien
tgcaaatcgttagtgaaaaggcgct

SEQ ID NO: 445548 - DNA, 25 bp, Homo sapien
tatcccatataagtaagcaggtctg

SEQ ID NO: 445549 - DNA, 25 bp, Homo sapien
taatacttgtgaatagactagcagc

SEQ ID NO: 445550 - DNA, 25 bp, Homo sapien
tacattttaaatcgagcctgcctca

SEQ ID NO: 445551 - DNA, 25 bp, Homo sapien
caaagccactccagcagtagggata

SEQ ID NO: 445552 - DNA, 25 bp, Homo sapien
ggttacattgcattatcctccagag

SEQ ID NO: 445553 - DNA, 25 bp, Homo sapien
tccctgatactaactgcatgacaca

SEQ ID NO: 445554 - DNA, 25 bp, Homo sapien
gaagattcagacagttatgaagagg

SEQ ID NO: 445555 - DNA, 25 bp, Homo sapien
tgtctgacttatgcggcagaattac

SEQ ID NO: 445556 - DNA, 25 bp, Homo sapien
cctatgtttaagctatctcagtcac

SEQ ID NO: 445557 - DNA, 25 bp, Homo sapien
tgatcttggagatagagagacctcc

SEQ ID NO: 445558 - DNA, 25 bp, Homo sapien
ctccttcatctagggttgccaggta

SEQ ID NO: 445559 - DNA, 25 bp, Homo sapien
ctcagtcccagtgctttaagtgcca

SEQ ID NO: 445560 - DNA, 25 bp, Homo sapien
ttattttaattcagtcgacagtctc

SEQ ID NO: 445561 - DNA, 25 bp, Homo sapien
atctggttgtatgtagagagcacag

SEQ ID NO: 445562 - DNA, 25 bp, Homo sapien
taattcagtcgacagtctctgattt

SEQ ID NO: 445563 - DNA, 25 bp, Homo sapien
tgcggcttcaatctctatgggctca

SEQ ID NO: 445564 - DNA, 25 bp, Homo sapien
tcagtggagcttaatggaaaactct

SEQ ID NO: 445565 - DNA, 25 bp, Homo sapien
gtaatataccaatctgacttgaagg

SEQ ID NO: 445566 - DNA, 25 bp, Homo sapien
tgagaatggctcagttcagtggagc

SEQ ID NO: 445567 - DNA, 25 bp, Homo sapien
tttgaaccgcaataaataacctgtg

SEQ ID NO: 445568 - DNA, 25 bp, Homo sapien
gccacttgcagtatgcctgttccag

SEQ ID NO: 445569 - DNA, 25 bp, Homo sapien
cagccttagtctcatacagagccag

SEQ ID NO: 445570 - DNA, 25 bp, Homo sapien
tctggatgaccgaaagagctgttaa

SEQ ID NO: 445571 - DNA, 25 bp, Homo sapien
gcatttcccggtgcccatcattgaa

SEQ ID NO: 445572 - DNA, 25 bp, Homo sapien
tgtgcatgtgtacagacacaaacac

SEQ ID NO: 445573 - DNA, 25 bp, Homo sapien
ctttttgtgcatgtgtacagacaca

SEQ ID NO: 445574 - DNA, 25 bp, Homo sapien
ttgtgcatgtgtacagacacaaaca

SEQ ID NO: 445575 - DNA, 25 bp, Homo sapien
ttttgtgcatgtgtacagacacaaa

SEQ ID NO: 445576 - DNA, 25 bp, Homo sapien
tgtagaaggtaacgtcttgaaaata

SEQ ID NO: 445577 - DNA, 25 bp, Homo sapien
gaagtccctcagtgtatgcaagaac

SEQ ID NO: 445578 - DNA, 25 bp, Homo sapien
gaacatccattttccgtgaagtccc

SEQ ID NO: 445579 - DNA, 25 bp, Homo sapien
gaaaatacagctcgtatctcgctga

SEQ ID NO: 445580 - DNA, 25 bp, Homo sapien
caacccgaggcaagctatagacaac

SEQ ID NO: 445581 - DNA, 25 bp, Homo sapien
cttgatcagggaaattaaacataac

SEQ ID NO: 445582 - DNA, 25 bp, Homo sapien
atagctggtccctactccaacccga

SEQ ID NO: 445583 - DNA, 25 bp, Homo sapien
tggcttgtggcagaccatagctggt

SEQ ID NO: 445584 - DNA, 25 bp, Homo sapien
gcaattaagcacagcataacaaaca

SEQ ID NO: 445585 - DNA, 25 bp, Homo sapien
tagcaattaagcacagcataacaaa

SEQ ID NO: 445586 - DNA, 25 bp, Homo sapien
caattaagcacagcataacaaacat

SEQ ID NO: 445587 - DNA, 25 bp, Homo sapien
ctagcaattaagcacagcataacaa

SEQ ID NO: 445588 - DNA, 25 bp, Homo sapien
tttataaagctgtcgaggagtggcc

SEQ ID NO: 445589 - DNA, 25 bp, Homo sapien
gaacatcaaatattcgaagtttgaa

SEQ ID NO: 445590 - DNA, 25 bp, Homo sapien
tttgccagcgctgagtcatattgga

SEQ ID NO: 445591 - DNA, 25 bp, Homo sapien
gcaatagtattaaggaacatcaaat

SEQ ID NO: 445592 - DNA, 25 bp, Homo sapien
taaggatgccctatcataagagtca

SEQ ID NO: 445593 - DNA, 25 bp, Homo sapien
agtgtggtccctagatcaatggcat

SEQ ID NO: 445594 - DNA, 25 bp, Homo sapien
cagaacttatggcagtagggaacca

SEQ ID NO: 445595 - DNA, 25 bp, Homo sapien
catgtgtgatactgacggtgctata

SEQ ID NO: 445596 - DNA, 25 bp, Homo sapien
aatttctgcataagagccttgtaaa

SEQ ID NO: 445597 - DNA, 25 bp, Homo sapien
tcaataatctttgagaggtcctttg

SEQ ID NO: 445598 - DNA, 25 bp, Homo sapien
gtaaaatggacagtcatatatgtat

SEQ ID NO: 445599 - DNA, 25 bp, Homo sapien
aaatatgacattaatgcttgttttt

SEQ ID NO: 445600 - DNA, 25 bp, Homo sapien
tggttcagatcattatatgtccgtc

SEQ ID NO: 445601 - DNA, 25 bp, Homo sapien
taacacccacggaaacactggatat

SEQ ID NO: 445602 - DNA, 25 bp, Homo sapien
cctggaagagtcaggtccaactctt

SEQ ID NO: 445603 - DNA, 25 bp, Homo sapien
gattcatagttggttaacacccacg

SEQ ID NO: 445604 - DNA, 25 bp, Homo sapien
gaatgaagactgattgacccaatta

SEQ ID NO: 445605 - DNA, 25 bp, Homo sapien
taacccagtagtgtagcccttcgaa

SEQ ID NO: 445606 - DNA, 25 bp, Homo sapien
taaagccttacatgacaccatctgg

SEQ ID NO: 445607 - DNA, 25 bp, Homo sapien
tacctgaacctttttaagcgagcaa

SEQ ID NO: 445608 - DNA, 25 bp, Homo sapien
tagggtgggctttgatcatcttccc

SEQ ID NO: 445609 - DNA, 25 bp, Homo sapien
gccaggataaagtagatgttgctgt

SEQ ID NO: 445610 - DNA, 25 bp, Homo sapien
cccatgtctcataacgctctgcata

SEQ ID NO: 445611 - DNA, 25 bp, Homo sapien
taatgggtattataatggtagggtg

SEQ ID NO: 445612 - DNA, 25 bp, Homo sapien
caaatactgatcttcctcaatatct

SEQ ID NO: 445613 - DNA, 25 bp, Homo sapien
gctgttggagtaaaagcaacaaata

SEQ ID NO: 445614 - DNA, 25 bp, Homo sapien
aagcaacaaatactgatcttcctca

SEQ ID NO: 445615 - DNA, 25 bp, Homo sapien
ggctggctgttggagtaaaagcaac

SEQ ID NO: 445616 - DNA, 25 bp, Homo sapien
cccaaattaaggcagtaggagatgc

SEQ ID NO: 445617 - DNA, 25 bp, Homo sapien
tgggcttgactaggccaaggcagca

SEQ ID NO: 445618 - DNA, 25 bp, Homo sapien
gatcagggtcctagaaagatgcccc

SEQ ID NO: 445619 - DNA, 25 bp, Homo sapien
cagctgccctcgttcctttgtgaaa

SEQ ID NO: 445620 - DNA, 25 bp, Homo sapien
tcatttgcattgaggaagaaggttg

SEQ ID NO: 445621 - DNA, 25 bp, Homo sapien
ctttacatcagaagtatctctctga

SEQ ID NO: 445622 - DNA, 25 bp, Homo sapien
tttacatcagaagtatctctctgac

SEQ ID NO: 445623 - DNA, 25 bp, Homo sapien
tagttctccaagaccttgcaacgga

SEQ ID NO: 445624 - DNA, 25 bp, Homo sapien
accttgcaacggatgagaaggttcg

SEQ ID NO: 445625 - DNA, 25 bp, Homo sapien
ctctggtaggtagtagaactctgga

SEQ ID NO: 445626 - DNA, 25 bp, Homo sapien
ctggtaggtagtagaactctggaat

SEQ ID NO: 445627 - DNA, 25 bp, Homo sapien
taggtagtagaactctggaattagt

SEQ ID NO: 445628 - DNA, 25 bp, Homo sapien
ggtagtagaactctggaattagttc

SEQ ID NO: 445629 - DNA, 25 bp, Homo sapien
gactccaagattatatccattactg

SEQ ID NO: 445630 - DNA, 25 bp, Homo sapien
gggaagatcaacatcatttaccact

SEQ ID NO: 445631 - DNA, 25 bp, Homo sapien
tctctgactccaagattatatccat

SEQ ID NO: 445632 - DNA, 25 bp, Homo sapien
acatcatttaccactacttcatctt

SEQ ID NO: 445633 - DNA, 25 bp, Homo sapien
gccagatagctgtttgcatgtaaga

SEQ ID NO: 445634 - DNA, 25 bp, Homo sapien
gatgactcaggactatcactagggt

SEQ ID NO: 445635 - DNA, 25 bp, Homo sapien
tggcacagaatacacactcaaatgg

SEQ ID NO: 445636 - DNA, 25 bp, Homo sapien
gaagaatgccttaggccagccagat

SEQ ID NO: 445637 - DNA, 25 bp, Homo sapien
gagacactgagagacgagcagctgc

SEQ ID NO: 445638 - DNA, 25 bp, Homo sapien
tcatgcagccacatttcacgagatg

SEQ ID NO: 445639 - DNA, 25 bp, Homo sapien
acttcaagttgaagcagcacaggag

SEQ ID NO: 445640 - DNA, 25 bp, Homo sapien
cgagatgtctttgcgtagcgttgat

SEQ ID NO: 445641 - DNA, 25 bp, Homo sapien
tcctagtagtaggatgagaaaaccg

SEQ ID NO: 445642 - DNA, 25 bp, Homo sapien
cctagtagtaggatgagaaaaccga

SEQ ID NO: 445643 - DNA, 25 bp, Homo sapien
ctagtagtaggatgagaaaaccgac

SEQ ID NO: 445644 - DNA, 25 bp, Homo sapien
tagataaaccaattcccaatccaga

SEQ ID NO: 445645 - DNA, 25 bp, Homo sapien
gcagaagcaattgcgttaagcctag

SEQ ID NO: 445646 - DNA, 25 bp, Homo sapien
ctaaaggcagaagcaattgcgttaa

SEQ ID NO: 445647 - DNA, 25 bp, Homo sapien
caattgcgttaagcctagataaacc

SEQ ID NO: 445648 - DNA, 25 bp, Homo sapien
gactagcccattgcttctcatggct

SEQ ID NO: 445649 - DNA, 25 bp, Homo sapien
tcactgtgtgactagcccattgctt

SEQ ID NO: 445650 - DNA, 25 bp, Homo sapien
catggctgcacaaaactcccctggt

SEQ ID NO: 445651 - DNA, 25 bp, Homo sapien
tgtgtcactgtgtgactagcccatt

SEQ ID NO: 445652 - DNA, 25 bp, Homo sapien
ccactgatgaagttggcaagaaaca

SEQ ID NO: 445653 - DNA, 25 bp, Homo sapien
ggtcctcgctgcttatagccaaata

SEQ ID NO: 445654 - DNA, 25 bp, Homo sapien
gccaaatataaggtcgatccactga

SEQ ID NO: 445655 - DNA, 25 bp, Homo sapien
tgatactatccaggttcacagagcc

SEQ ID NO: 445656 - DNA, 25 bp, Homo sapien
agaaatttttggaataatatgggat

SEQ ID NO: 445657 - DNA, 25 bp, Homo sapien
gaataatatgggatttaacacctac

SEQ ID NO: 445658 - DNA, 25 bp, Homo sapien
ggaataatatgggatttaacaccta

SEQ ID NO: 445659 - DNA, 25 bp, Homo sapien
tggaataatatgggatttaacacct

SEQ ID NO: 445660 - DNA, 25 bp, Homo sapien
tgttttgcatacgacagatggcaga

SEQ ID NO: 445661 - DNA, 25 bp, Homo sapien
gtagcagctgttgcatcttcactct

SEQ ID NO: 445662 - DNA, 25 bp, Homo sapien
cagatatctggtagaatggaagact

SEQ ID NO: 445663 - DNA, 25 bp, Homo sapien
gaagactgggatatcacttccttga

SEQ ID NO: 445664 - DNA, 25 bp, Homo sapien
tgtatcgtgttctaagaactgacac

SEQ ID NO: 445665 - DNA, 25 bp, Homo sapien
gaactgacacagaattatagggttg

SEQ ID NO: 445666 - DNA, 25 bp, Homo sapien
tggcaattatgtgcttcgaatgagc

SEQ ID NO: 445667 - DNA, 25 bp, Homo sapien
ctaatgaaacctgagtgtctggcaa

SEQ ID NO: 445668 - DNA, 25 bp, Homo sapien
cctatcaatggtgcacaaagtttcc

SEQ ID NO: 445669 - DNA, 25 bp, Homo sapien
caaatcctttaccacaggtgagaac

SEQ ID NO: 445670 - DNA, 25 bp, Homo sapien
gacttagggattcgcctacctggaa

SEQ ID NO: 445671 - DNA, 25 bp, Homo sapien
taggaaaggctgtagagtctcattg

SEQ ID NO: 445672 - DNA, 25 bp, Homo sapien
aatttttgaacgattgccatattgt

SEQ ID NO: 445673 - DNA, 25 bp, Homo sapien
tttaatttttgaacgattgccatat

SEQ ID NO: 445674 - DNA, 25 bp, Homo sapien
ttgaacgattgccatattgtttttc

SEQ ID NO: 445675 - DNA, 25 bp, Homo sapien
ttttgaacgattgccatattgtttt

SEQ ID NO: 445676 - DNA, 25 bp, Homo sapien
tataggttatggtacccacaatgca

SEQ ID NO: 445677 - DNA, 25 bp, Homo sapien
gaaaggttacttaatggcagactac

SEQ ID NO: 445678 - DNA, 25 bp, Homo sapien
gagccatgacaaacagcatgaagga

SEQ ID NO: 445679 - DNA, 25 bp, Homo sapien
tgccgtcaggtctacagagccatga

SEQ ID NO: 445680 - DNA, 25 bp, Homo sapien
ccttgggcaaggatctaaatccttc

SEQ ID NO: 445681 - DNA, 25 bp, Homo sapien
aatccttctaaatcataatgaatgc

SEQ ID NO: 445682 - DNA, 25 bp, Homo sapien
ttgggcaaggatctaaatccttcta

SEQ ID NO: 445683 - DNA, 25 bp, Homo sapien
ctccttgggcaaggatctaaatcct

SEQ ID NO: 445684 - DNA, 25 bp, Homo sapien
tgtgggggtctctaatgaaataagc

SEQ ID NO: 445685 - DNA, 25 bp, Homo sapien
gaaagtgtgggggtctctaatgaaa

SEQ ID NO: 445686 - DNA, 25 bp, Homo sapien
agtgtgggggtctctaatgaaataa

SEQ ID NO: 445687 - DNA, 25 bp, Homo sapien
tgggggtctctaatgaaataagctt

SEQ ID NO: 445688 - DNA, 25 bp, Homo sapien
tgagatggcgtctgtccaaagttct

SEQ ID NO: 445689 - DNA, 25 bp, Homo sapien
caataagcaactgagatggcgtctg

SEQ ID NO: 445690 - DNA, 25 bp, Homo sapien
gctccgaggcggatgtggctcaata

SEQ ID NO: 445691 - DNA, 25 bp, Homo sapien
caggtgcatggcagagctccgaggc

SEQ ID NO: 445692 - DNA, 25 bp, Homo sapien
tcactgcaaagagtcggctgcaagt

SEQ ID NO: 445693 - DNA, 25 bp, Homo sapien
ggagaatttgaaggaaacttcagca

SEQ ID NO: 445694 - DNA, 25 bp, Homo sapien
gctgccacatgggttactggagaat

SEQ ID NO: 445695 - DNA, 25 bp, Homo sapien
tatcacatcctgttgcatctgatct

SEQ ID NO: 445696 - DNA, 25 bp, Homo sapien
tgggcttgatccaaggagtatcctg

SEQ ID NO: 445697 - DNA, 25 bp, Homo sapien
tggtgggcttgatccaaggagtatc

SEQ ID NO: 445698 - DNA, 25 bp, Homo sapien
gatccaaggagtatcctggagctcc

SEQ ID NO: 445699 - DNA, 25 bp, Homo sapien
gaagatggtgggcttgatccaagga

SEQ ID NO: 445700 - DNA, 25 bp, Homo sapien
ggtctgtgatctgccgtttgtttac

SEQ ID NO: 445701 - DNA, 25 bp, Homo sapien
taagaatatagcgattatctgctgt

SEQ ID NO: 445702 - DNA, 25 bp, Homo sapien
taccacaaaacaatgtgcattgatt

SEQ ID NO: 445703 - DNA, 25 bp, Homo sapien
tactctggtcaacgaggtctgtgat

SEQ ID NO: 445704 - DNA, 25 bp, Homo sapien
tgtctcctatgatatggtgccgccc

SEQ ID NO: 445705 - DNA, 25 bp, Homo sapien
ggtggcatctcgagatccggacacg

SEQ ID NO: 445706 - DNA, 25 bp, Homo sapien
caatgtatgactcggacctggccaa

SEQ ID NO: 445707 - DNA, 25 bp, Homo sapien
tccggacacgatgtagcagtcccca

SEQ ID NO: 445708 - DNA, 25 bp, Homo sapien
tatctgcacccctgtgttgactgca

SEQ ID NO: 445709 - DNA, 25 bp, Homo sapien
gacagcagctcatgctagtttgcca

SEQ ID NO: 445710 - DNA, 25 bp, Homo sapien
tttgcattttctcagacccatcagc

SEQ ID NO: 445711 - DNA, 25 bp, Homo sapien
gagtgtccatttataatgtcagcag

SEQ ID NO: 445712 - DNA, 25 bp, Homo sapien
cccaagttctgcacagacagaaaca

SEQ ID NO: 445713 - DNA, 25 bp, Homo sapien
gacggctcttggtgccggatagtca

SEQ ID NO: 445714 - DNA, 25 bp, Homo sapien
tggtcatggcctgtgaggacggctc

SEQ ID NO: 445715 - DNA, 25 bp, Homo sapien
caagcccaagttctgcacagacaga

SEQ ID NO: 445716 - DNA, 25 bp, Homo sapien
ccgtgttgaatcattgatctccatt

SEQ ID NO: 445717 - DNA, 25 bp, Homo sapien
tgctgaaattactgaatcgccctcg

SEQ ID NO: 445718 - DNA, 25 bp, Homo sapien
tcaagcgtgggaataagcagttttc

SEQ ID NO: 445719 - DNA, 25 bp, Homo sapien
tgatacagtggccttcgctggagac

SEQ ID NO: 445720 - DNA, 25 bp, Homo sapien
tgtttaataatgacaacccagcaat

SEQ ID NO: 445721 - DNA, 25 bp, Homo sapien
tatcattattgcctactgtcagtca

SEQ ID NO: 445722 - DNA, 25 bp, Homo sapien
tgaaaagtactcagtacagttccct

SEQ ID NO: 445723 - DNA, 25 bp, Homo sapien
ccattgtggaattcatcgaagttct

SEQ ID NO: 445724 - DNA, 25 bp, Homo sapien
gacaagtccattgctctaatgccag

SEQ ID NO: 445725 - DNA, 25 bp, Homo sapien
ctccggtgaccaggttctggccgtc

SEQ ID NO: 445726 - DNA, 25 bp, Homo sapien
tccagggtaaatgtacagttgcttg

SEQ ID NO: 445727 - DNA, 25 bp, Homo sapien
acaggcctgccagacctctactacc

SEQ ID NO: 445728 - DNA, 25 bp, Homo sapien
ttttcagggatattcctccccagtc

SEQ ID NO: 445729 - DNA, 25 bp, Homo sapien
aaccctcagattcaacatgtccacc

SEQ ID NO: 445730 - DNA, 25 bp, Homo sapien
tgctggttaagtcaccttgtctcct

SEQ ID NO: 445731 - DNA, 25 bp, Homo sapien
tcctaactgatcagctgttcagctc

SEQ ID NO: 445732 - DNA, 25 bp, Homo sapien
agccccagatgctgatttcccattg

SEQ ID NO: 445733 - DNA, 25 bp, Homo sapien
cacagtctccctggacgtaaaggca

SEQ ID NO: 445734 - DNA, 25 bp, Homo sapien
tgcctgtccgctgccttgttttggg

SEQ ID NO: 445735 - DNA, 25 bp, Homo sapien
aacgacgtctcattctgaagcccca

SEQ ID NO: 445736 - DNA, 25 bp, Homo sapien
cactagacaatatcacgatctcaag

SEQ ID NO: 445737 - DNA, 25 bp, Homo sapien
caaagtttggcattttacactagac

SEQ ID NO: 445738 - DNA, 25 bp, Homo sapien
cgatctcaaggtttgccaagtctta

SEQ ID NO: 445739 - DNA, 25 bp, Homo sapien
cactagacagtatctcaaagtttgg

SEQ ID NO: 445740 - DNA, 25 bp, Homo sapien
tcagtatctgttctgatgctcataa

SEQ ID NO: 445741 - DNA, 25 bp, Homo sapien
cataatgccaccgattaaaatctat

SEQ ID NO: 445742 - DNA, 25 bp, Homo sapien
aaagctacaatgctaccagaagcca

SEQ ID NO: 445743 - DNA, 25 bp, Homo sapien
gctacaatgctaccagaagccatgc

SEQ ID NO: 445744 - DNA, 25 bp, Homo sapien
tgttcagtcgtgaaaaaacacacaa

SEQ ID NO: 445745 - DNA, 25 bp, Homo sapien
gcttgcttgatagcagctggtgttc

SEQ ID NO: 445746 - DNA, 25 bp, Homo sapien
tgatggaatgtacaaacggaggtcg

SEQ ID NO: 445747 - DNA, 25 bp, Homo sapien
gactacaatgtacagctattgctgg

SEQ ID NO: 445748 - DNA, 25 bp, Homo sapien
gaatgcacctgttccatcaagccaa

SEQ ID NO: 445749 - DNA, 25 bp, Homo sapien
tgtaacaactggacacaaggttcct

SEQ ID NO: 445750 - DNA, 25 bp, Homo sapien
tgtatacacaccaagccagtgggat

SEQ ID NO: 445751 - DNA, 25 bp, Homo sapien
tcttcaaattatgcagggtagggct

SEQ ID NO: 445752 - DNA, 25 bp, Homo sapien
gaatagacaatgagggccgtttccc

SEQ ID NO: 445753 - DNA, 25 bp, Homo sapien
ccaaagtggattatgcagaatagac

SEQ ID NO: 445754 - DNA, 25 bp, Homo sapien
cagatccctgccagatggctcggca

SEQ ID NO: 445755 - DNA, 25 bp, Homo sapien
gcaaattgcagaacctcattaggac

SEQ ID NO: 445756 - DNA, 25 bp, Homo sapien
ctttagtctcgggaatgcggatgga

SEQ ID NO: 445757 - DNA, 25 bp, Homo sapien
gtggctgcccttgctaccacccatg

SEQ ID NO: 445758 - DNA, 25 bp, Homo sapien
ttaggctactgttgggtctgtccct

SEQ ID NO: 445759 - DNA, 25 bp, Homo sapien
tgcagttctgtcattctctgggcct

SEQ ID NO: 445760 - DNA, 25 bp, Homo sapien
aaggtcacataaaaactgtgtttgc

SEQ ID NO: 445761 - DNA, 25 bp, Homo sapien
tcacataaaaactgtgtttgcacat

SEQ ID NO: 445762 - DNA, 25 bp, Homo sapien
tgggaaaggtcacataaaaactgtg

SEQ ID NO: 445763 - DNA, 25 bp, Homo sapien
ggtcacataaaaactgtgtttgcac

SEQ ID NO: 445764 - DNA, 25 bp, Homo sapien
tgagctgctttcacatcatttcctt

SEQ ID NO: 445765 - DNA, 25 bp, Homo sapien
ggtttgatgccctgagctgctttca

SEQ ID NO: 445766 - DNA, 25 bp, Homo sapien
ttagcacgtccaagggtttgatgcc

SEQ ID NO: 445767 - DNA, 25 bp, Homo sapien
gaaggctgcaaacctggtcctgctc

SEQ ID NO: 445768 - DNA, 25 bp, Homo sapien
tggagccagacgcatcccttctccc

SEQ ID NO: 445769 - DNA, 25 bp, Homo sapien
ctggagccagacgcatcccttctcc

SEQ ID NO: 445770 - DNA, 25 bp, Homo sapien
gagccagacgcatcccttctcccac

SEQ ID NO: 445771 - DNA, 25 bp, Homo sapien
ggagccagacgcatcccttctccca

SEQ ID NO: 445772 - DNA, 25 bp, Homo sapien
ccaggattctggcttaacaagcgac

SEQ ID NO: 445773 - DNA, 25 bp, Homo sapien
cacaatatccattggcgtccaggat

SEQ ID NO: 445774 - DNA, 25 bp, Homo sapien
caggattctggcttaacaagcgaca

SEQ ID NO: 445775 - DNA, 25 bp, Homo sapien
cagagtggcgatcacaatatccatt

SEQ ID NO: 445776 - DNA, 25 bp, Homo sapien
tctgagcacctatggactggacgcc

SEQ ID NO: 445777 - DNA, 25 bp, Homo sapien
ctatggactggacgccccggagctg

SEQ ID NO: 445778 - DNA, 25 bp, Homo sapien
ttctcatcaggttgccaggagatgg

SEQ ID NO: 445779 - DNA, 25 bp, Homo sapien
gacgccccggagctgattctcatca

SEQ ID NO: 445780 - DNA, 25 bp, Homo sapien
gcctcgagttcagggatccgcagaa

SEQ ID NO: 445781 - DNA, 25 bp, Homo sapien
tttactgagtatctgcaatccgcgc

SEQ ID NO: 445782 - DNA, 25 bp, Homo sapien
catagggcgtggagagagaagaagc

SEQ ID NO: 445783 - DNA, 25 bp, Homo sapien
gctgagtgtgagcagacaaagggct

SEQ ID NO: 445784 - DNA, 25 bp, Homo sapien
ccaggttccccgtagttcaggtgag

SEQ ID NO: 445785 - DNA, 25 bp, Homo sapien
gtgagagagcgggatggagctgtcc

SEQ ID NO: 445786 - DNA, 25 bp, Homo sapien
tgcagagagttgaaatccatcccca

SEQ ID NO: 445787 - DNA, 25 bp, Homo sapien
acctgagcccgtgcttttctttgaa

SEQ ID NO: 445788 - DNA, 25 bp, Homo sapien
tatctaaggaacttggtcccacgcc

SEQ ID NO: 445789 - DNA, 25 bp, Homo sapien
gcttggctatgctgtgacacctgac

SEQ ID NO: 445790 - DNA, 25 bp, Homo sapien
gagagaacggttactcatcaccact

SEQ ID NO: 445791 - DNA, 25 bp, Homo sapien
tcaccactggagattaacaaggtct

SEQ ID NO: 445792 - DNA, 25 bp, Homo sapien
aacaaggtctcatctgctcgtctgg

SEQ ID NO: 445793 - DNA, 25 bp, Homo sapien
caaccagaggtagcaagcaagtagc

SEQ ID NO: 445794 - DNA, 25 bp, Homo sapien
tatgtggcaaccaaacacaaccagg

SEQ ID NO: 445795 - DNA, 25 bp, Homo sapien
gaagtctgcgatttcagtacacgtg

SEQ ID NO: 445796 - DNA, 25 bp, Homo sapien
cagcaggagcacaagaacagaagtt

SEQ ID NO: 445797 - DNA, 25 bp, Homo sapien
cggcttgcacccgacacagaaaggg

SEQ ID NO: 445798 - DNA, 25 bp, Homo sapien
gaggccgccggagtcctcatctccc

SEQ ID NO: 445799 - DNA, 25 bp, Homo sapien
agaaagggcgacaaccctcatcagc

SEQ ID NO: 445800 - DNA, 25 bp, Homo sapien
agcaagaactaaagacaccacagtg

SEQ ID NO: 445801 - DNA, 25 bp, Homo sapien
ttgaagtgtccctggtgctcgtgcc

SEQ ID NO: 445802 - DNA, 25 bp, Homo sapien
tcttccacagactatgagggccatg

SEQ ID NO: 445803 - DNA, 25 bp, Homo sapien
aattcagccccatcagtaatactgg

SEQ ID NO: 445804 - DNA, 25 bp, Homo sapien
tgaaggatcatttcatgacccagct

SEQ ID NO: 445805 - DNA, 25 bp, Homo sapien
tctcgcggcctgtcttttccaagaa

SEQ ID NO: 445806 - DNA, 25 bp, Homo sapien
agccagaagaaagtgtgcttgctgt

SEQ ID NO: 445807 - DNA, 25 bp, Homo sapien
ttcagggggcaccagcgaagcattc

SEQ ID NO: 445808 - DNA, 25 bp, Homo sapien
tgcttgctgtggctgtgcattcagg

SEQ ID NO: 445809 - DNA, 25 bp, Homo sapien
actgcgctattgtgacaggtgtcaa

SEQ ID NO: 445810 - DNA, 25 bp, Homo sapien
gacaggtgtcaaacgggtctgtttc

SEQ ID NO: 445811 - DNA, 25 bp, Homo sapien
ttctcaactgcgctattgtgacagg

SEQ ID NO: 445812 - DNA, 25 bp, Homo sapien
ttctttctcaactgcgctattgtga

SEQ ID NO: 445813 - DNA, 25 bp, Homo sapien
tctaatcatgatcacttccactcta

SEQ ID NO: 445814 - DNA, 25 bp, Homo sapien
tgatcacttccactctacgcttcag

SEQ ID NO: 445815 - DNA, 25 bp, Homo sapien
tcatgatcacttccactctacgctt

SEQ ID NO: 445816 - DNA, 25 bp, Homo sapien
taatcatgatcacttccactctacg

SEQ ID NO: 445817 - DNA, 25 bp, Homo sapien
tggcttctccaccataagcactcat

SEQ ID NO: 445818 - DNA, 25 bp, Homo sapien
tcccagcgcatagttccactcagtt

SEQ ID NO: 445819 - DNA, 25 bp, Homo sapien
cactgcttgaaatccatgtggcttc

SEQ ID NO: 445820 - DNA, 25 bp, Homo sapien
gcaaaaacagccaggtaaaccactg

SEQ ID NO: 445821 - DNA, 25 bp, Homo sapien
gcgtggctggctcatcgttcagaat

SEQ ID NO: 445822 - DNA, 25 bp, Homo sapien
cagtgaacttgtcagcgtggctggc

SEQ ID NO: 445823 - DNA, 25 bp, Homo sapien
cgttcagaatatgaaatatcctttc

SEQ ID NO: 445824 - DNA, 25 bp, Homo sapien
gattaagcagtgaacttgtcagcgt

SEQ ID NO: 445825 - DNA, 25 bp, Homo sapien
gatgctatgtgggaatcgtggaaca

SEQ ID NO: 445826 - DNA, 25 bp, Homo sapien
tgtgggaatcgtggaacacattttg

SEQ ID NO: 445827 - DNA, 25 bp, Homo sapien
tggaacacattttggtatgagtttg

SEQ ID NO: 445828 - DNA, 25 bp, Homo sapien
tggtatgagtttgacatgggtcttg

SEQ ID NO: 445829 - DNA, 25 bp, Homo sapien
tgtaaatcatctctgtagacatgtg

SEQ ID NO: 445830 - DNA, 25 bp, Homo sapien
gatttgctccagatcgttagaagga

SEQ ID NO: 445831 - DNA, 25 bp, Homo sapien
gaactctttcattacttgcatcgtg

SEQ ID NO: 445832 - DNA, 25 bp, Homo sapien
tagccctcatctaacttacacgtgg

SEQ ID NO: 445833 - DNA, 25 bp, Homo sapien
ttgggccaagtcctgtctgagacct

SEQ ID NO: 445834 - DNA, 25 bp, Homo sapien
tttgggccaagtcctgtctgagacc

SEQ ID NO: 445835 - DNA, 25 bp, Homo sapien
gtgggttagtacatccgagagaaaa

SEQ ID NO: 445836 - DNA, 25 bp, Homo sapien
tagtacatccgagagaaaaagaaaa

SEQ ID NO: 445837 - DNA, 25 bp, Homo sapien
aaaattatgacaacgacacatctca

SEQ ID NO: 445838 - DNA, 25 bp, Homo sapien
gaaaaattatgacaacgacacatct

SEQ ID NO: 445839 - DNA, 25 bp, Homo sapien
attcagtgcaaagtactgacagcac

SEQ ID NO: 445840 - DNA, 25 bp, Homo sapien
tgctgttggcaagaggcttaattga

SEQ ID NO: 445841 - DNA, 25 bp, Homo sapien
ccccagggccacttcattatgattc

SEQ ID NO: 445842 - DNA, 25 bp, Homo sapien
tagtcaccaggctttagaagagtta

SEQ ID NO: 445843 - DNA, 25 bp, Homo sapien
tccttgcacccagtattgtttccct

SEQ ID NO: 445844 - DNA, 25 bp, Homo sapien
ccttgcacccagtattgtttccctc

SEQ ID NO: 445845 - DNA, 25 bp, Homo sapien
ttctccttgcacccagtattgtttc

SEQ ID NO: 445846 - DNA, 25 bp, Homo sapien
tctccttgcacccagtattgtttcc

SEQ ID NO: 445847 - DNA, 25 bp, Homo sapien
tggatctgcacacttcctgaggagt

SEQ ID NO: 445848 - DNA, 25 bp, Homo sapien
gagtattattcaacaatgcgctgtg

SEQ ID NO: 445849 - DNA, 25 bp, Homo sapien
ggatccctgacaggcttaggtgaca

SEQ ID NO: 445850 - DNA, 25 bp, Homo sapien
cggtatatgctgttggatccctgac

SEQ ID NO: 445851 - DNA, 25 bp, Homo sapien
acagatgacacgttgcaccaccttg

SEQ ID NO: 445852 - DNA, 25 bp, Homo sapien
taaagtctgagagcaggggttcttt

SEQ ID NO: 445853 - DNA, 25 bp, Homo sapien
gggttctttgtgcattctacagtga

SEQ ID NO: 445854 - DNA, 25 bp, Homo sapien
tttgtgcattctacagtgactgtga

SEQ ID NO: 445855 - DNA, 25 bp, Homo sapien
ctcgctgtccagggtcttccccagc

SEQ ID NO: 445856 - DNA, 25 bp, Homo sapien
tccccagccctgcagtactgcagca

SEQ ID NO: 445857 - DNA, 25 bp, Homo sapien
gctgtccagggtcttccccagccct

SEQ ID NO: 445858 - DNA, 25 bp, Homo sapien
ttccccagccctgcagtactgcagc

SEQ ID NO: 445859 - DNA, 25 bp, Homo sapien
gacctctgccactttcccggatcac

SEQ ID NO: 445860 - DNA, 25 bp, Homo sapien
tgggcaccaatgtccaacctgctgc

SEQ ID NO: 445861 - DNA, 25 bp, Homo sapien
tcaagtgaaggacatcttcctttcc

SEQ ID NO: 445862 - DNA, 25 bp, Homo sapien
gccctgggcaccaatgtccaacctg

SEQ ID NO: 445863 - DNA, 25 bp, Homo sapien
acttgttctcaagtgaaggacatct

SEQ ID NO: 445864 - DNA, 25 bp, Homo sapien
tctccctatggtgatgccattgctg

SEQ ID NO: 445865 - DNA, 25 bp, Homo sapien
caccattctccctatggtgatgcca

SEQ ID NO: 445866 - DNA, 25 bp, Homo sapien
cattctccctatggtgatgccattg

SEQ ID NO: 445867 - DNA, 25 bp, Homo sapien
ttctccctatggtgatgccattgct

SEQ ID NO: 445868 - DNA, 25 bp, Homo sapien
tcatcaccaactcttttctctccac

SEQ ID NO: 445869 - DNA, 25 bp, Homo sapien
aaatcatcaccaactcttttctctc

SEQ ID NO: 445870 - DNA, 25 bp, Homo sapien
cccaaatcatcaccaactcttttct

SEQ ID NO: 445871 - DNA, 25 bp, Homo sapien
caaatcatcaccaactcttttctct

SEQ ID NO: 445872 - DNA, 25 bp, Homo sapien
gtagtcatcctggaatgaaattgtc

SEQ ID NO: 445873 - DNA, 25 bp, Homo sapien
ggccaggaaggctctatgaggccat

SEQ ID NO: 445874 - DNA, 25 bp, Homo sapien
ctacacatgaaaggccaagggccag

SEQ ID NO: 445875 - DNA, 25 bp, Homo sapien
ctctatgaggccattgtagtcatcc

SEQ ID NO: 445876 - DNA, 25 bp, Homo sapien
ctgacacaggatgagcagagggtgt

SEQ ID NO: 445877 - DNA, 25 bp, Homo sapien
tgacacaggatgagcagagggtgtg

SEQ ID NO: 445878 - DNA, 25 bp, Homo sapien
cacaggatgagcagagggtgtgtga

SEQ ID NO: 445879 - DNA, 25 bp, Homo sapien
caggatgagcagagggtgtgtgaag

SEQ ID NO: 445880 - DNA, 25 bp, Homo sapien
atagcttcatcatcccgcaggagca

SEQ ID NO: 445881 - DNA, 25 bp, Homo sapien
gtaaagcagcagaggggattttgaa

SEQ ID NO: 445882 - DNA, 25 bp, Homo sapien
caggaccgtccaggcgtagcaagtc

SEQ ID NO: 445883 - DNA, 25 bp, Homo sapien
ccaaaatagcttcatcatcccgcag

SEQ ID NO: 445884 - DNA, 25 bp, Homo sapien
aagtggaggttctcctgccaccggg

SEQ ID NO: 445885 - DNA, 25 bp, Homo sapien
tctaagtggaggttctcctgccacc

SEQ ID NO: 445886 - DNA, 25 bp, Homo sapien
tttctaagtggaggttctcctgcca

SEQ ID NO: 445887 - DNA, 25 bp, Homo sapien
taagtggaggttctcctgccaccgg

SEQ ID NO: 445888 - DNA, 25 bp, Homo sapien
ctggagttcttgactatcatctctg

SEQ ID NO: 445889 - DNA, 25 bp, Homo sapien
ggcaggctcatcttgcaaggtgcta

SEQ ID NO: 445890 - DNA, 25 bp, Homo sapien
aaggcaggctcatcttgcaaggtgc

SEQ ID NO: 445891 - DNA, 25 bp, Homo sapien
aggctcatcttgcaaggtgctagag

SEQ ID NO: 445892 - DNA, 25 bp, Homo sapien
aacaaggcaggctcatcttgcaagg

SEQ ID NO: 445893 - DNA, 25 bp, Homo sapien
aagagcctggtcctgttttcgctga

SEQ ID NO: 445894 - DNA, 25 bp, Homo sapien
tcctttatataggagcccctccttc

SEQ ID NO: 445895 - DNA, 25 bp, Homo sapien
aacacctggacaagggtatgtgcct

SEQ ID NO: 445896 - DNA, 25 bp, Homo sapien
tgttcccgatcaagcttgatgccca

SEQ ID NO: 445897 - DNA, 25 bp, Homo sapien
gattaaattctatcccagtgagact

SEQ ID NO: 445898 - DNA, 25 bp, Homo sapien
tacttttgcatggtaaggccctgat

SEQ ID NO: 445899 - DNA, 25 bp, Homo sapien
cctgctgtctaagagaacttctgct

SEQ ID NO: 445900 - DNA, 25 bp, Homo sapien
tgtgctacccatcaattccctgaaa

SEQ ID NO: 445901 - DNA, 25 bp, Homo sapien
cttctggcgttgtcttccctgggca

SEQ ID NO: 445902 - DNA, 25 bp, Homo sapien
cagtccaagaagtgggaataagatt

SEQ ID NO: 445903 - DNA, 25 bp, Homo sapien
agaagacaatttactcagtccaaga

SEQ ID NO: 445904 - DNA, 25 bp, Homo sapien
tactcagtccaagaagtgggaataa

SEQ ID NO: 445905 - DNA, 25 bp, Homo sapien
caatttactcagtccaagaagtggg

SEQ ID NO: 445906 - DNA, 25 bp, Homo sapien
gagacacgagggaatgatttctctg

SEQ ID NO: 445907 - DNA, 25 bp, Homo sapien
tgccaaggccgagtgcagaagagac

SEQ ID NO: 445908 - DNA, 25 bp, Homo sapien
tttactggatgcctcaataagacga

SEQ ID NO: 445909 - DNA, 25 bp, Homo sapien
gcctcaataagacgaactttgctgt

SEQ ID NO: 445910 - DNA, 25 bp, Homo sapien
gggactgcgtcctcttcatcttatc

SEQ ID NO: 445911 - DNA, 25 bp, Homo sapien
ctgaggtagggactgcgtcctcttc

SEQ ID NO: 445912 - DNA, 25 bp, Homo sapien
ggtagggactgcgtcctcttcatct

SEQ ID NO: 445913 - DNA, 25 bp, Homo sapien
tagggactgcgtcctcttcatctta

SEQ ID NO: 445914 - DNA, 25 bp, Homo sapien
aggagaaggatggaggacagcctgg

SEQ ID NO: 445915 - DNA, 25 bp, Homo sapien
tgggccagggtctaagagaggaggc

SEQ ID NO: 445916 - DNA, 25 bp, Homo sapien
ggctgggccagggtctaagagagga

SEQ ID NO: 445917 - DNA, 25 bp, Homo sapien
gaggctgggccagggtctaagagag

SEQ ID NO: 445918 - DNA, 25 bp, Homo sapien
gagtgagtcccctccttggtgttca

SEQ ID NO: 445919 - DNA, 25 bp, Homo sapien
ccaagcttgcgtaggaaatcgatta

SEQ ID NO: 445920 - DNA, 25 bp, Homo sapien
gcaactggtgtcatgattgaagcct

SEQ ID NO: 445921 - DNA, 25 bp, Homo sapien
tatcttctggcagcatcctcaggac

SEQ ID NO: 445922 - DNA, 25 bp, Homo sapien
ccatgcttagcttgaacctctgagc

SEQ ID NO: 445923 - DNA, 25 bp, Homo sapien
gggaatcacagaatagcaatttggg

SEQ ID NO: 445924 - DNA, 25 bp, Homo sapien
tgagggtctgaggatagttcacaag

SEQ ID NO: 445925 - DNA, 25 bp, Homo sapien
gagccatagtgtcccctaatccctg

SEQ ID NO: 445926 - DNA, 25 bp, Homo sapien
taaattcaacttagaggagctggag

SEQ ID NO: 445927 - DNA, 25 bp, Homo sapien
caatcgctgcagagtacattttgtc

SEQ ID NO: 445928 - DNA, 25 bp, Homo sapien
ttcattcatctcctgtagaggcaga

SEQ ID NO: 445929 - DNA, 25 bp, Homo sapien
gaacacgtgtctggatttgtagctc

SEQ ID NO: 445930 - DNA, 25 bp, Homo sapien
gcttggactacaggcatccaccatc

SEQ ID NO: 445931 - DNA, 25 bp, Homo sapien
agcttggactacaggcatccaccat

SEQ ID NO: 445932 - DNA, 25 bp, Homo sapien
taatgcaggctagaatttaagaaaa

SEQ ID NO: 445933 - DNA, 25 bp, Homo sapien
aactgccaagttctagtcattgaat

SEQ ID NO: 445934 - DNA, 25 bp, Homo sapien
tagacagcacttggttacctaccct

SEQ ID NO: 445935 - DNA, 25 bp, Homo sapien
taatcatctttcctggacagtgccc

SEQ ID NO: 445936 - DNA, 25 bp, Homo sapien
tgctgagctggtaacatttgctctg

SEQ ID NO: 445937 - DNA, 25 bp, Homo sapien
ctggtaacatttgctctgaaatttc

SEQ ID NO: 445938 - DNA, 25 bp, Homo sapien
gtaacatttgctctgaaatttcctg

SEQ ID NO: 445939 - DNA, 25 bp, Homo sapien
aatttcctgttatagattctccact

SEQ ID NO: 445940 - DNA, 25 bp, Homo sapien
accagccactgtaatggctgtgtct

SEQ ID NO: 445941 - DNA, 25 bp, Homo sapien
agccactgtaatggctgtgtctgtc

SEQ ID NO: 445942 - DNA, 25 bp, Homo sapien
tagcgactgcaaacgcttgtttcca

SEQ ID NO: 445943 - DNA, 25 bp, Homo sapien
gtgtctgtctgtagcgactgcaaac

SEQ ID NO: 445944 - DNA, 25 bp, Homo sapien
gatttctgctctacgatgattttcc

SEQ ID NO: 445945 - DNA, 25 bp, Homo sapien
catgcgtgttccattcacactggaa

SEQ ID NO: 445946 - DNA, 25 bp, Homo sapien
ttgagatttctgctctacgatgatt

SEQ ID NO: 445947 - DNA, 25 bp, Homo sapien
ctgtgaaattagagccatgcgtgtt

SEQ ID NO: 445948 - DNA, 25 bp, Homo sapien
ctgttttccattgtcagaatgaaat

SEQ ID NO: 445949 - DNA, 25 bp, Homo sapien
ttaactgttttccattgtcagaatg

SEQ ID NO: 445950 - DNA, 25 bp, Homo sapien
aactgttttccattgtcagaatgaa

SEQ ID NO: 445951 - DNA, 25 bp, Homo sapien
ttttccattgtcagaatgaaattaa

SEQ ID NO: 445952 - DNA, 25 bp, Homo sapien
tagaactgccatcaactgggacatg

SEQ ID NO: 445953 - DNA, 25 bp, Homo sapien
tgttcttgcaggttgatatccaaag

SEQ ID NO: 445954 - DNA, 25 bp, Homo sapien
tggtttccgtccttaagttatgata

SEQ ID NO: 445955 - DNA, 25 bp, Homo sapien
tgggacatgccagagagtgttcttg

SEQ ID NO: 445956 - DNA, 25 bp, Homo sapien
atatcttccggttcccttagtgtag

SEQ ID NO: 445957 - DNA, 25 bp, Homo sapien
gttcccttagtgtagttcatctgcc

SEQ ID NO: 445958 - DNA, 25 bp, Homo sapien
tccggttcccttagtgtagttcatc

SEQ ID NO: 445959 - DNA, 25 bp, Homo sapien
aatatagaatatcttccggttccct

SEQ ID NO: 445960 - DNA, 25 bp, Homo sapien
ccagcaactccaagagattgcaaat

SEQ ID NO: 445961 - DNA, 25 bp, Homo sapien
aaatggtttgataacatttctccca

SEQ ID NO: 445962 - DNA, 25 bp, Homo sapien
agagattgcaaatggtttgataaca

SEQ ID NO: 445963 - DNA, 25 bp, Homo sapien
cagcaactccaagagattgcaaatg

SEQ ID NO: 445964 - DNA, 25 bp, Homo sapien
tctgttttctacataggcttggatc

SEQ ID NO: 445965 - DNA, 25 bp, Homo sapien
taatcacaggaaccatcttatcagt

SEQ ID NO: 445966 - DNA, 25 bp, Homo sapien
gatcttgggaatacgggatagtttg

SEQ ID NO: 445967 - DNA, 25 bp, Homo sapien
gaaacagtggccaagttatttgaaa

SEQ ID NO: 445968 - DNA, 25 bp, Homo sapien
gagttgctaagggaacaatgcctcc

SEQ ID NO: 445969 - DNA, 25 bp, Homo sapien
tctgaaataacaaggtgctgggccg

SEQ ID NO: 445970 - DNA, 25 bp, Homo sapien
agggcaatgttctttcttcgagttg

SEQ ID NO: 445971 - DNA, 25 bp, Homo sapien
caatgcctcccaagacgcagaggtc

SEQ ID NO: 445972 - DNA, 25 bp, Homo sapien
tccgcttttataactggctcattcc

SEQ ID NO: 445973 - DNA, 25 bp, Homo sapien
gcttttataactggctcattccctg

SEQ ID NO: 445974 - DNA, 25 bp, Homo sapien
ctaagcctttccgcttttataactg

SEQ ID NO: 445975 - DNA, 25 bp, Homo sapien
cctttccgcttttataactggctca

SEQ ID NO: 445976 - DNA, 25 bp, Homo sapien
aggggcagggatggacccatggtgg

SEQ ID NO: 445977 - DNA, 25 bp, Homo sapien
gggacagtgacctgtcctgcctctt

SEQ ID NO: 445978 - DNA, 25 bp, Homo sapien
gtggggacagtgacctgtcctgcct

SEQ ID NO: 445979 - DNA, 25 bp, Homo sapien
ccatggtggggacagtgacctgtcc

SEQ ID NO: 445980 - DNA, 25 bp, Homo sapien
caaatattccctcatgtgtgatcca

SEQ ID NO: 445981 - DNA, 25 bp, Homo sapien
gtaaaactggacaggatgccaaata

SEQ ID NO: 445982 - DNA, 25 bp, Homo sapien
ccatttgtcctgtccccaatttgaa

SEQ ID NO: 445983 - DNA, 25 bp, Homo sapien
tctggctttacactgtgttcacagc

SEQ ID NO: 445984 - DNA, 25 bp, Homo sapien
ggccatccatgcttaaaggctctga

SEQ ID NO: 445985 - DNA, 25 bp, Homo sapien
gaacccagtgaccagttttgtgaaa

SEQ ID NO: 445986 - DNA, 25 bp, Homo sapien
gaacggctgttcttctggccatcca

SEQ ID NO: 445987 - DNA, 25 bp, Homo sapien
gagtcctctctaatctctttatttg

SEQ ID NO: 445988 - DNA, 25 bp, Homo sapien
tttcttccagcctatggatcattcc

SEQ ID NO: 445989 - DNA, 25 bp, Homo sapien
tccagcctatggatcattcctgcag

SEQ ID NO: 445990 - DNA, 25 bp, Homo sapien
tcatcacatctgacataatgatcac

SEQ ID NO: 445991 - DNA, 25 bp, Homo sapien
cctatggatcattcctgcagacacg

SEQ ID NO: 445992 - DNA, 25 bp, Homo sapien
aagtaattcttttgtcagacatatt

SEQ ID NO: 445993 - DNA, 25 bp, Homo sapien
ttaaacctctactatttactctatc

SEQ ID NO: 445994 - DNA, 25 bp, Homo sapien
tatcaaagtaattcttttgtcagac

SEQ ID NO: 445995 - DNA, 25 bp, Homo sapien
aattcttttgtcagacatatttctt

SEQ ID NO: 445996 - DNA, 25 bp, Homo sapien
cttctgtgtctagtgttgcctttac

SEQ ID NO: 445997 - DNA, 25 bp, Homo sapien
tccttggaaacccagttgtcgacat

SEQ ID NO: 445998 - DNA, 25 bp, Homo sapien
ttccttggaaacccagttgtcgaca

SEQ ID NO: 445999 - DNA, 25 bp, Homo sapien
tgtgtctagtgttgcctttacagtt

SEQ ID NO: 446000 - DNA, 25 bp, Homo sapien
cctccacccgaacactggttatccg

SEQ ID NO: 446001 - DNA, 25 bp, Homo sapien
tgccctccacccgaacactggttat

SEQ ID NO: 446002 - DNA, 25 bp, Homo sapien
ttcctttcttatgccctccacccga

SEQ ID NO: 446003 - DNA, 25 bp, Homo sapien
gccctccacccgaacactggttatc

SEQ ID NO: 446004 - DNA, 25 bp, Homo sapien
cagaggaagaatgattcgaaatggg

SEQ ID NO: 446005 - DNA, 25 bp, Homo sapien
gatatgtgacattgtacagaggaag

SEQ ID NO: 446006 - DNA, 25 bp, Homo sapien
tacagaggaagaatgattcgaaatg

SEQ ID NO: 446007 - DNA, 25 bp, Homo sapien
tatttattcgcagatatgtgacatt

SEQ ID NO: 446008 - DNA, 25 bp, Homo sapien
tgtaaagtgcttcccggctgatagc

SEQ ID NO: 446009 - DNA, 25 bp, Homo sapien
aatgtaaagtgcttcccggctgata

SEQ ID NO: 446010 - DNA, 25 bp, Homo sapien
taaagtgcttcccggctgatagctc

SEQ ID NO: 446011 - DNA, 25 bp, Homo sapien
atgtaaagtgcttcccggctgatag

SEQ ID NO: 446012 - DNA, 25 bp, Homo sapien
atattcctggcccgaaattgtttct

SEQ ID NO: 446013 - DNA, 25 bp, Homo sapien
gaaatcatattcctggcccgaaatt

SEQ ID NO: 446014 - DNA, 25 bp, Homo sapien
aatcatattcctggcccgaaattgt

SEQ ID NO: 446015 - DNA, 25 bp, Homo sapien
aggaaatcatattcctggcccgaaa

SEQ ID NO: 446016 - DNA, 25 bp, Homo sapien
cattgaaaatgcctttgtacttcag

SEQ ID NO: 446017 - DNA, 25 bp, Homo sapien
tttggattccagaaaagattgtgta

SEQ ID NO: 446018 - DNA, 25 bp, Homo sapien
tacttcagtgttaagatgctgctgg

SEQ ID NO: 446019 - DNA, 25 bp, Homo sapien
gtgtattcagtgtatacttatcttc

SEQ ID NO: 446020 - DNA, 25 bp, Homo sapien
aaatgttgagaaagctactgaaatg

SEQ ID NO: 446021 - DNA, 25 bp, Homo sapien
cattccagtgttagacactttgacc

SEQ ID NO: 446022 - DNA, 25 bp, Homo sapien
tctgcatttgcagtcaatctgggct

SEQ ID NO: 446023 - DNA, 25 bp, Homo sapien
tctgcttattagtcacatcagcttt

SEQ ID NO: 446024 - DNA, 25 bp, Homo sapien
tgtaacattgccttcgtactttaaa

SEQ ID NO: 446025 - DNA, 25 bp, Homo sapien
cacatttgtatgttcatgggagtat

SEQ ID NO: 446026 - DNA, 25 bp, Homo sapien
tatgagatgattgatacagttaatc

SEQ ID NO: 446027 - DNA, 25 bp, Homo sapien
gaaaatgtgactgccgaaacactgt

SEQ ID NO: 446028 - DNA, 25 bp, Homo sapien
tcttgttttgtacatgccaggtaac

SEQ ID NO: 446029 - DNA, 25 bp, Homo sapien
aacaggctttttaggtcaatgggag

SEQ ID NO: 446030 - DNA, 25 bp, Homo sapien
tctgattccataagtccagtcttgt

SEQ ID NO: 446031 - DNA, 25 bp, Homo sapien
tctgctttgtctagaatcctcttag

SEQ ID NO: 446032 - DNA, 25 bp, Homo sapien
cagcaaggtccttacgggtcatggc

SEQ ID NO: 446033 - DNA, 25 bp, Homo sapien
tatggctccagtattcagcaaggtc

SEQ ID NO: 446034 - DNA, 25 bp, Homo sapien
tatccactcggcattagcatatggc

SEQ ID NO: 446035 - DNA, 25 bp, Homo sapien
cgggtcatggccatataggagctgc

SEQ ID NO: 446036 - DNA, 25 bp, Homo sapien
cccagaggccatttggagtataact

SEQ ID NO: 446037 - DNA, 25 bp, Homo sapien
gaatccgtccttagaaacatagaac

SEQ ID NO: 446038 - DNA, 25 bp, Homo sapien
tagaacagctagtgcctaagtaggt

SEQ ID NO: 446039 - DNA, 25 bp, Homo sapien
gatttgctacaaagatacccttgca

SEQ ID NO: 446040 - DNA, 25 bp, Homo sapien
cctcatctctcggccatatcacctc

SEQ ID NO: 446041 - DNA, 25 bp, Homo sapien
cctggctcagactcagccctgtcca

SEQ ID NO: 446042 - DNA, 25 bp, Homo sapien
ctggctcagactcagccctgtccac

SEQ ID NO: 446043 - DNA, 25 bp, Homo sapien
atctctcggccatatcacctctgtg

SEQ ID NO: 446044 - DNA, 25 bp, Homo sapien
gtgcatcccgggcaaaaaggatgag

SEQ ID NO: 446045 - DNA, 25 bp, Homo sapien
aagaggcactgcgtgggtgcatccc

SEQ ID NO: 446046 - DNA, 25 bp, Homo sapien
gatgggtgggatccatgaacagatc

SEQ ID NO: 446047 - DNA, 25 bp, Homo sapien
gagggttggtcatccgaagaggcac

SEQ ID NO: 446048 - DNA, 25 bp, Homo sapien
gtcttgggagtggtctccatcttct

SEQ ID NO: 446049 - DNA, 25 bp, Homo sapien
cttccccattggtcttgggagtggt

SEQ ID NO: 446050 - DNA, 25 bp, Homo sapien
cattggtcttgggagtggtctccat

SEQ ID NO: 446051 - DNA, 25 bp, Homo sapien
cccattggtcttgggagtggtctcc

SEQ ID NO: 446052 - DNA, 25 bp, Homo sapien
gcgtttacacgcagcctgtgagcca

SEQ ID NO: 446053 - DNA, 25 bp, Homo sapien
gcgtgaccgggcgtttacacgcagc

SEQ ID NO: 446054 - DNA, 25 bp, Homo sapien
gtgagccagcgcctggaaattcctt

SEQ ID NO: 446055 - DNA, 25 bp, Homo sapien
gattagtaatcgtctccatcctcca

SEQ ID NO: 446056 - DNA, 25 bp, Homo sapien
ctgcccttgcgcctgacagctgggc

SEQ ID NO: 446057 - DNA, 25 bp, Homo sapien
gacagctgggccccgagcctcccct

SEQ ID NO: 446058 - DNA, 25 bp, Homo sapien
ctctgcccttgcgcctgacagctgg

SEQ ID NO: 446059 - DNA, 25 bp, Homo sapien
cagctgggccccgagcctcccctgc

SEQ ID NO: 446060 - DNA, 25 bp, Homo sapien
tggtgcttcccaacgagtgttatgg

SEQ ID NO: 446061 - DNA, 25 bp, Homo sapien
accatttcaacaggcatccatttca

SEQ ID NO: 446062 - DNA, 25 bp, Homo sapien
tcttgctaaagggagtgtaaaggtc

SEQ ID NO: 446063 - DNA, 25 bp, Homo sapien
tgtcatcaaacagtggtgccaggga

SEQ ID NO: 446064 - DNA, 25 bp, Homo sapien
cacacaagcagcaattcctccctgt

SEQ ID NO: 446065 - DNA, 25 bp, Homo sapien
tgtggggatgcccaagattctgtga

SEQ ID NO: 446066 - DNA, 25 bp, Homo sapien
acacaagcagcaattcctccctgtt

SEQ ID NO: 446067 - DNA, 25 bp, Homo sapien
tgaacgatcactcttgtggggatgc

SEQ ID NO: 446068 - DNA, 25 bp, Homo sapien
ttatgccaggagattcctccccaca

SEQ ID NO: 446069 - DNA, 25 bp, Homo sapien
acctgccccatcattataagccaaa

SEQ ID NO: 446070 - DNA, 25 bp, Homo sapien
ttttcttcccccatcacgacatgac

SEQ ID NO: 446071 - DNA, 25 bp, Homo sapien
gggccacaaggagagccattgattt

SEQ ID NO: 446072 - DNA, 25 bp, Homo sapien
caaggagagccattgatttttcttc

SEQ ID NO: 446073 - DNA, 25 bp, Homo sapien
gagttcagaactatgaagtaagtgt

SEQ ID NO: 446074 - DNA, 25 bp, Homo sapien
tagatgaatgtagccccagatgcag

SEQ ID NO: 446075 - DNA, 25 bp, Homo sapien
aagtaagtgtgaagtgctcgatgtg

SEQ ID NO: 446076 - DNA, 25 bp, Homo sapien
tgcagagttcagaactatgaagtaa

SEQ ID NO: 446077 - DNA, 25 bp, Homo sapien
cttcttgcccacattcgaagtggat

SEQ ID NO: 446078 - DNA, 25 bp, Homo sapien
ttagtagccactggctccagtccgt

SEQ ID NO: 446079 - DNA, 25 bp, Homo sapien
tgctcttgggaggaatgttcttgtc

SEQ ID NO: 446080 - DNA, 25 bp, Homo sapien
cattgggaagatatggtgaaagccc

SEQ ID NO: 446081 - DNA, 25 bp, Homo sapien
tgtcaataacagtctcaaaagcaaa

SEQ ID NO: 446082 - DNA, 25 bp, Homo sapien
aggcactcatcccggcagcttcagg

SEQ ID NO: 446083 - DNA, 25 bp, Homo sapien
catagactgtggtatccgagggagc

SEQ ID NO: 446084 - DNA, 25 bp, Homo sapien
tgcaggcactcatcccggcagcttc

SEQ ID NO: 446085 - DNA, 25 bp, Homo sapien
ctacatagactgtggtatccgaggg

SEQ ID NO: 446086 - DNA, 25 bp, Homo sapien
tgtgtgtcattcttgcacagggact

SEQ ID NO: 446087 - DNA, 25 bp, Homo sapien
tcattcttgcacagggactatgcta

SEQ ID NO: 446088 - DNA, 25 bp, Homo sapien
cattcttgcacagggactatgctaa

SEQ ID NO: 446089 - DNA, 25 bp, Homo sapien
gtgtcattcttgcacagggactatg

SEQ ID NO: 446090 - DNA, 25 bp, Homo sapien
agtgaagccgactttgccgtccggg

SEQ ID NO: 446091 - DNA, 25 bp, Homo sapien
gcagtcttcccgagttcaggaggta

SEQ ID NO: 446092 - DNA, 25 bp, Homo sapien
gaagggcgcagctaatcttggatcc

SEQ ID NO: 446093 - DNA, 25 bp, Homo sapien
taatctggagggttagcagtcttcc

SEQ ID NO: 446094 - DNA, 25 bp, Homo sapien
tcttcggtcgattggctgaggccca

SEQ ID NO: 446095 - DNA, 25 bp, Homo sapien
gtttggctgtaggagctccctctta

SEQ ID NO: 446096 - DNA, 25 bp, Homo sapien
gaatttgcccgtacaattatgaagg

SEQ ID NO: 446097 - DNA, 25 bp, Homo sapien
caagcaaactgatgtgcagtcccag

SEQ ID NO: 446098 - DNA, 25 bp, Homo sapien
catagaactgatggaggcttttcct

SEQ ID NO: 446099 - DNA, 25 bp, Homo sapien
ccttagacgtaatccatggtggata

SEQ ID NO: 446100 - DNA, 25 bp, Homo sapien
gacctcgttatcacatgagcttata

SEQ ID NO: 446101 - DNA, 25 bp, Homo sapien
tatggtttccactttggcagaaggc

SEQ ID NO: 446102 - DNA, 25 bp, Homo sapien
cttgcatctggccttagaaatgtga

SEQ ID NO: 446103 - DNA, 25 bp, Homo sapien
gactgtattgttatgagcctaggaa

SEQ ID NO: 446104 - DNA, 25 bp, Homo sapien
ttatatctgctgtctttcagaaggc

SEQ ID NO: 446105 - DNA, 25 bp, Homo sapien
gatagtacatgtgttgttcaaacct

SEQ ID NO: 446106 - DNA, 25 bp, Homo sapien
tagaacttgaaactacttacgtgac

SEQ ID NO: 446107 - DNA, 25 bp, Homo sapien
gggagaatgccatagaatctctgtt

SEQ ID NO: 446108 - DNA, 25 bp, Homo sapien
tcctaaggcctttgagtgcttggtg

SEQ ID NO: 446109 - DNA, 25 bp, Homo sapien
catagccaaagtctggttaaggtag

SEQ ID NO: 446110 - DNA, 25 bp, Homo sapien
gacaggtgtcatattacccaaaacc

SEQ ID NO: 446111 - DNA, 25 bp, Homo sapien
taaaatccgacttaatgagctctaa

SEQ ID NO: 446112 - DNA, 25 bp, Homo sapien
tctaaggcatattggaaagcaggag

SEQ ID NO: 446113 - DNA, 25 bp, Homo sapien
gaatctcgttgacttatttaggcct

SEQ ID NO: 446114 - DNA, 25 bp, Homo sapien
cacctgtggcctgaactctaatatt

SEQ ID NO: 446115 - DNA, 25 bp, Homo sapien
cagttttaccaagagttgagagata

SEQ ID NO: 446116 - DNA, 25 bp, Homo sapien
ccctgaggttactttggatcagtca

SEQ ID NO: 446117 - DNA, 25 bp, Homo sapien
cacctggccagagtatcagttttac

SEQ ID NO: 446118 - DNA, 25 bp, Homo sapien
cccacacagatgggacggggcttag

SEQ ID NO: 446119 - DNA, 25 bp, Homo sapien
cgattttcagtggggtcccacacag

SEQ ID NO: 446120 - DNA, 25 bp, Homo sapien
gtcccacacagatgggacggggctt

SEQ ID NO: 446121 - DNA, 25 bp, Homo sapien
gggtcccacacagatgggacggggc

SEQ ID NO: 446122 - DNA, 25 bp, Homo sapien
tctacagaatgtacgcaccaggctg

SEQ ID NO: 446123 - DNA, 25 bp, Homo sapien
cagaatgatcttcaggaggtgccca

SEQ ID NO: 446124 - DNA, 25 bp, Homo sapien
gaggtgcccaagttatatccagaat

SEQ ID NO: 446125 - DNA, 25 bp, Homo sapien
tgctgaagtaaatggaaacacctca

SEQ ID NO: 446126 - DNA, 25 bp, Homo sapien
gatcaaagcactcagtctttcaggg

SEQ ID NO: 446127 - DNA, 25 bp, Homo sapien
gacgtaagtgcagctgcgtctctga

SEQ ID NO: 446128 - DNA, 25 bp, Homo sapien
tgtagagaaacagcgtcctgattgc

SEQ ID NO: 446129 - DNA, 25 bp, Homo sapien
cctttggaggttcttgatgtgacgt

SEQ ID NO: 446130 - DNA, 25 bp, Homo sapien
tgttctcagtcccttctctcgcggg

SEQ ID NO: 446131 - DNA, 25 bp, Homo sapien
cccatggccccgtcaaggttgggca

SEQ ID NO: 446132 - DNA, 25 bp, Homo sapien
ggcccacgaacaactgcggttatat

SEQ ID NO: 446133 - DNA, 25 bp, Homo sapien
tatcgcggagtcctttcggagcatc

SEQ ID NO: 446134 - DNA, 25 bp, Homo sapien
tctgtggcgggagcgaggccgacgg

SEQ ID NO: 446135 - DNA, 25 bp, Homo sapien
ctctgtggcgggagcgaggccgacg

SEQ ID NO: 446136 - DNA, 25 bp, Homo sapien
ctgtggcgggagcgaggccgacggg

SEQ ID NO: 446137 - DNA, 25 bp, Homo sapien
tattgtctctcgtgcactgtgccca

SEQ ID NO: 446138 - DNA, 25 bp, Homo sapien
tctccggaggcctcggtttcgctgg

SEQ ID NO: 446139 - DNA, 25 bp, Homo sapien
tccccttctagagtgttacggtgac

SEQ ID NO: 446140 - DNA, 25 bp, Homo sapien
cactctctactaggctctccggagg

SEQ ID NO: 446141 - DNA, 25 bp, Homo sapien
tttatctctctcaagatttttgttg

SEQ ID NO: 446142 - DNA, 25 bp, Homo sapien
ttatctctctcaagatttttgttgt

SEQ ID NO: 446143 - DNA, 25 bp, Homo sapien
tctctctcaagatttttgttgtaaa

SEQ ID NO: 446144 - DNA, 25 bp, Homo sapien
ctctcaagatttttgttgtaaacat

SEQ ID NO: 446145 - DNA, 25 bp, Homo sapien
tcaggggctttttccgaggaggcca

SEQ ID NO: 446146 - DNA, 25 bp, Homo sapien
caagcagtgtttaaacagaagttct

SEQ ID NO: 446147 - DNA, 25 bp, Homo sapien
ctttgctgttttgccaaagggttct

SEQ ID NO: 446148 - DNA, 25 bp, Homo sapien
tgcacagcgtaggacattcctcttc

SEQ ID NO: 446149 - DNA, 25 bp, Homo sapien
ggctcggatggaccagctccaagaa

SEQ ID NO: 446150 - DNA, 25 bp, Homo sapien
tctcccaagacaatcaaggatgttc

SEQ ID NO: 446151 - DNA, 25 bp, Homo sapien
gagaatacctgaacataaccagtga

SEQ ID NO: 446152 - DNA, 25 bp, Homo sapien
gttcatttgggcaatcaggctcgga

SEQ ID NO: 446153 - DNA, 25 bp, Homo sapien
ctagaactgctgatttcatttgaca

SEQ ID NO: 446154 - DNA, 25 bp, Homo sapien
tagggtagctctaacattcatcatt

SEQ ID NO: 446155 - DNA, 25 bp, Homo sapien
acattcatcattctagaactgctga

SEQ ID NO: 446156 - DNA, 25 bp, Homo sapien
tcatcattctagaactgctgatttc

SEQ ID NO: 446157 - DNA, 25 bp, Homo sapien
ctggcaagttgattcacttgcatat

SEQ ID NO: 446158 - DNA, 25 bp, Homo sapien
agttgattcacttgcatatatggca

SEQ ID NO: 446159 - DNA, 25 bp, Homo sapien
tcacttgcatatatggcaaaacaca

SEQ ID NO: 446160 - DNA, 25 bp, Homo sapien
gattcacttgcatatatggcaaaac

SEQ ID NO: 446161 - DNA, 25 bp, Homo sapien
tgggtaggtatcaataggcggttta

SEQ ID NO: 446162 - DNA, 25 bp, Homo sapien
gagaagtgggtaggtatcaataggc

SEQ ID NO: 446163 - DNA, 25 bp, Homo sapien
taggtatcaataggcggtttatagg

SEQ ID NO: 446164 - DNA, 25 bp, Homo sapien
atcaataggcggtttataggagaag

SEQ ID NO: 446165 - DNA, 25 bp, Homo sapien
cattgcagacgttgtgctagatgct

SEQ ID NO: 446166 - DNA, 25 bp, Homo sapien
tcacagctcgcctgttccattgcag

SEQ ID NO: 446167 - DNA, 25 bp, Homo sapien
ggtctttagtccacccatgcattcc

SEQ ID NO: 446168 - DNA, 25 bp, Homo sapien
ctgggcattctagagtgaggtgata

SEQ ID NO: 446169 - DNA, 25 bp, Homo sapien
ggacccagtttctgatagccagcat

SEQ ID NO: 446170 - DNA, 25 bp, Homo sapien
ccagtttctgatagccagcatttgc

SEQ ID NO: 446171 - DNA, 25 bp, Homo sapien
gtggacccagtttctgatagccagc

SEQ ID NO: 446172 - DNA, 25 bp, Homo sapien
gtttctgatagccagcatttgcata

SEQ ID NO: 446173 - DNA, 25 bp, Homo sapien
aagcatgttgcaatgagaatagaga

SEQ ID NO: 446174 - DNA, 25 bp, Homo sapien
tatatttagccctaaagcatgttgc

SEQ ID NO: 446175 - DNA, 25 bp, Homo sapien
catgtttaaaatatgcccgactctt

SEQ ID NO: 446176 - DNA, 25 bp, Homo sapien
tattaatgtacgtatattgaatcct

SEQ ID NO: 446177 - DNA, 25 bp, Homo sapien
agcagctcatatagtgcttaacatg

SEQ ID NO: 446178 - DNA, 25 bp, Homo sapien
tcagcagctcatatagtgcttaaca

SEQ ID NO: 446179 - DNA, 25 bp, Homo sapien
cagcagctcatatagtgcttaacat

SEQ ID NO: 446180 - DNA, 25 bp, Homo sapien
gttcatttggaagctcatttatgcc

SEQ ID NO: 446181 - DNA, 25 bp, Homo sapien
aaaagccttccagatttgtttgtgt

SEQ ID NO: 446182 - DNA, 25 bp, Homo sapien
tcctcaaaagccttccagatttgtt

SEQ ID NO: 446183 - DNA, 25 bp, Homo sapien
gctcatttatgcctggtttgggcag

SEQ ID NO: 446184 - DNA, 25 bp, Homo sapien
atttcagtgatggataaacatgatc

SEQ ID NO: 446185 - DNA, 25 bp, Homo sapien
cagtgatggataaacatgatctcaa

SEQ ID NO: 446186 - DNA, 25 bp, Homo sapien
tttggagcgtattttatttcagtga

SEQ ID NO: 446187 - DNA, 25 bp, Homo sapien
tggagcgtattttatttcagtgatg

SEQ ID NO: 446188 - DNA, 25 bp, Homo sapien
tttgtgctccaaaaacgtagagtgt

SEQ ID NO: 446189 - DNA, 25 bp, Homo sapien
aaaggcagctttctattggcaggtt

SEQ ID NO: 446190 - DNA, 25 bp, Homo sapien
tagctaacagtatgacttgcatgca

SEQ ID NO: 446191 - DNA, 25 bp, Homo sapien
catgcaatctactaggaaaggcagc

SEQ ID NO: 446192 - DNA, 25 bp, Homo sapien
gaccaggccacaacatcgtcaaagt

SEQ ID NO: 446193 - DNA, 25 bp, Homo sapien
taaagtcaccctaaagtagaggatg

SEQ ID NO: 446194 - DNA, 25 bp, Homo sapien
gagagagctcctgagagttgactcc

SEQ ID NO: 446195 - DNA, 25 bp, Homo sapien
aattcaacagaaagccaaaggtatg

SEQ ID NO: 446196 - DNA, 25 bp, Homo sapien
tacatcctgcttaagggaaagatgg

SEQ ID NO: 446197 - DNA, 25 bp, Homo sapien
gaactgtctacccaaatatcacgaa

SEQ ID NO: 446198 - DNA, 25 bp, Homo sapien
cattagctaaatgcactgcaaaggc

SEQ ID NO: 446199 - DNA, 25 bp, Homo sapien
tccaccttgttaccctgacttgagt

SEQ ID NO: 446200 - DNA, 25 bp, Homo sapien
cttcagggctcctgattcgtttttc

SEQ ID NO: 446201 - DNA, 25 bp, Homo sapien
ttcagggctcctgattcgtttttct

SEQ ID NO: 446202 - DNA, 25 bp, Homo sapien
tcagggctcctgattcgtttttctt

SEQ ID NO: 446203 - DNA, 25 bp, Homo sapien
gcttcagggctcctgattcgttttt

SEQ ID NO: 446204 - DNA, 25 bp, Homo sapien
cctcaaattctctttcgcttacagt

SEQ ID NO: 446205 - DNA, 25 bp, Homo sapien
caaattctctttcgcttacagtctc

SEQ ID NO: 446206 - DNA, 25 bp, Homo sapien
aattctctttcgcttacagtctcca

SEQ ID NO: 446207 - DNA, 25 bp, Homo sapien
attctctttcgcttacagtctccat

SEQ ID NO: 446208 - DNA, 25 bp, Homo sapien
tgctatctatactagaaagtctccc

SEQ ID NO: 446209 - DNA, 25 bp, Homo sapien
aaagtctcccttttgaacaacactg

SEQ ID NO: 446210 - DNA, 25 bp, Homo sapien
tcagtggtccatgagtgactacacc

SEQ ID NO: 446211 - DNA, 25 bp, Homo sapien
tgctgctgctaggaatgatatctaa

SEQ ID NO: 446212 - DNA, 25 bp, Homo sapien
ttattccactgtgttacatccaccc

SEQ ID NO: 446213 - DNA, 25 bp, Homo sapien
tacgtgtctctttattccactgtgt

SEQ ID NO: 446214 - DNA, 25 bp, Homo sapien
ctacgtgtctctttattccactgtg

SEQ ID NO: 446215 - DNA, 25 bp, Homo sapien
tccactgtgttacatccaccctcat

SEQ ID NO: 446216 - DNA, 25 bp, Homo sapien
tggatctacgggctttacatctgat

SEQ ID NO: 446217 - DNA, 25 bp, Homo sapien
tacaggtgcatattttggatctacg

SEQ ID NO: 446218 - DNA, 25 bp, Homo sapien
taaaataagtcagaaccatagtcat

SEQ ID NO: 446219 - DNA, 25 bp, Homo sapien
tctacgggctttacatctgatggct

SEQ ID NO: 446220 - DNA, 25 bp, Homo sapien
agtgtaaattgtcgcttaagcttca

SEQ ID NO: 446221 - DNA, 25 bp, Homo sapien
taatagtagtgtaaattgtcgctta

SEQ ID NO: 446222 - DNA, 25 bp, Homo sapien
tagtagtgtaaattgtcgcttaagc

SEQ ID NO: 446223 - DNA, 25 bp, Homo sapien
tatataatagtagtgtaaattgtcg

SEQ ID NO: 446224 - DNA, 25 bp, Homo sapien
gggaaagctctaaattgtgatgtcc

SEQ ID NO: 446225 - DNA, 25 bp, Homo sapien
tctactggctcaggtacagactcca

SEQ ID NO: 446226 - DNA, 25 bp, Homo sapien
gtgatgtccaaaaatacccctcacg

SEQ ID NO: 446227 - DNA, 25 bp, Homo sapien
aaaatacccctcacgactgtctcta

SEQ ID NO: 446228 - DNA, 25 bp, Homo sapien
tttcagaggcagtttttctattgca

SEQ ID NO: 446229 - DNA, 25 bp, Homo sapien
ccggtatttcagaggcagtttttct

SEQ ID NO: 446230 - DNA, 25 bp, Homo sapien
cggtatttcagaggcagtttttcta

SEQ ID NO: 446231 - DNA, 25 bp, Homo sapien
cagaggcagtttttctattgcattt

SEQ ID NO: 446232 - DNA, 25 bp, Homo sapien
tctgaggctggtttttctcaactca

SEQ ID NO: 446233 - DNA, 25 bp, Homo sapien
gaggctggtttttctcaactcagat

SEQ ID NO: 446234 - DNA, 25 bp, Homo sapien
tgcagaggcggatctgaggctggtt

SEQ ID NO: 446235 - DNA, 25 bp, Homo sapien
ctgcagaggcggatctgaggctggt

SEQ ID NO: 446236 - DNA, 25 bp, Homo sapien
ccggcgcagtgtttgttcgtggaac

SEQ ID NO: 446237 - DNA, 25 bp, Homo sapien
tttctccaaagtagaggcgccggcg

SEQ ID NO: 446238 - DNA, 25 bp, Homo sapien
gtcgttttgatccacttttctggga

SEQ ID NO: 446239 - DNA, 25 bp, Homo sapien
cagtgtttgttcgtggaacctgtcg

SEQ ID NO: 446240 - DNA, 25 bp, Homo sapien
ggactcagtggctaactccgtctgg

SEQ ID NO: 446241 - DNA, 25 bp, Homo sapien
gccaacagtgttgttatttcctggg

SEQ ID NO: 446242 - DNA, 25 bp, Homo sapien
tccgtctgggactctacagcaagtc

SEQ ID NO: 446243 - DNA, 25 bp, Homo sapien
ggctaactccgtctgggactctaca

SEQ ID NO: 446244 - DNA, 25 bp, Homo sapien
tgcctgacgccactattggatatct

SEQ ID NO: 446245 - DNA, 25 bp, Homo sapien
caacagagagtcagaggccaacggg

SEQ ID NO: 446246 - DNA, 25 bp, Homo sapien
aatgctctgcttcgaaaggtgaatg

SEQ ID NO: 446247 - DNA, 25 bp, Homo sapien
tagattgccgcaacagagagtcaga

SEQ ID NO: 446248 - DNA, 25 bp, Homo sapien
aaaagcgccggttgaaagccttgca

SEQ ID NO: 446249 - DNA, 25 bp, Homo sapien
ggaggaacgcagaaacggatcttgt

SEQ ID NO: 446250 - DNA, 25 bp, Homo sapien
taagcatctggagaatcaaggctgg

SEQ ID NO: 446251 - DNA, 25 bp, Homo sapien
ctttgaatatgaaggaaacacggga

SEQ ID NO: 446252 - DNA, 25 bp, Homo sapien
cctgggcgttcaggcccctgagggc

SEQ ID NO: 446253 - DNA, 25 bp, Homo sapien
atggccccggctttggaagggactg

SEQ ID NO: 446254 - DNA, 25 bp, Homo sapien
agctgtgcgtctccgcccgggcgag

SEQ ID NO: 446255 - DNA, 25 bp, Homo sapien
agaaccctggctcgggagagcgacg

SEQ ID NO: 446256 - DNA, 25 bp, Homo sapien
gagcgtttccatgccgaccgcggca

SEQ ID NO: 446257 - DNA, 25 bp, Homo sapien
tgttgaatcggccaatcagcggcgc

SEQ ID NO: 446258 - DNA, 25 bp, Homo sapien
ccgcgtctgttgaatcggccaatca

SEQ ID NO: 446259 - DNA, 25 bp, Homo sapien
cggacctagcgggagcgtttccatg

SEQ ID NO: 446260 - DNA, 25 bp, Homo sapien
gatcgcggttaagaggtggccggct

SEQ ID NO: 446261 - DNA, 25 bp, Homo sapien
gcactggaggatcgcggttaagagg

SEQ ID NO: 446262 - DNA, 25 bp, Homo sapien
gaacaactggcaagtgcactggagg

SEQ ID NO: 446263 - DNA, 25 bp, Homo sapien
ctatgtgtccggaacaactggcaag

SEQ ID NO: 446264 - DNA, 25 bp, Homo sapien
caccagacaggaggccccaaaacct

SEQ ID NO: 446265 - DNA, 25 bp, Homo sapien
caagtgacgagcagggtgctgcgct

SEQ ID NO: 446266 - DNA, 25 bp, Homo sapien
ccaagtgacgagcagggtgctgcgc

SEQ ID NO: 446267 - DNA, 25 bp, Homo sapien
cccaagtgacgagcagggtgctgcg

SEQ ID NO: 446268 - DNA, 25 bp, Homo sapien
ttcccagctgagatactcttctccc

SEQ ID NO: 446269 - DNA, 25 bp, Homo sapien
cttcccagctgagatactcttctcc

SEQ ID NO: 446270 - DNA, 25 bp, Homo sapien
gcattgcttcagactccacgggctg

SEQ ID NO: 446271 - DNA, 25 bp, Homo sapien
gggttgctgcagtgcattgcttcag

SEQ ID NO: 446272 - DNA, 25 bp, Homo sapien
ttgctgcagtgcattgcttcagact

SEQ ID NO: 446273 - DNA, 25 bp, Homo sapien
gcagtgcattgcttcagactccacg

SEQ ID NO: 446274 - DNA, 25 bp, Homo sapien
gtatctgacaagcatcgggacctcg

SEQ ID NO: 446275 - DNA, 25 bp, Homo sapien
tgcccatttgcagttagcagcccta

SEQ ID NO: 446276 - DNA, 25 bp, Homo sapien
cagttagcagccctagcactgtcct

SEQ ID NO: 446277 - DNA, 25 bp, Homo sapien
gggctctggtgagtatctgacaagc

SEQ ID NO: 446278 - DNA, 25 bp, Homo sapien
gaataacacctgattcttgtgatcc

SEQ ID NO: 446279 - DNA, 25 bp, Homo sapien
cctgctctagttcatccatgtagat

SEQ ID NO: 446280 - DNA, 25 bp, Homo sapien
tgagtgtgccggtgtctacttcata

SEQ ID NO: 446281 - DNA, 25 bp, Homo sapien
caggaagtgcaggtctgacttgagt

SEQ ID NO: 446282 - DNA, 25 bp, Homo sapien
aatttcttcagcatattcagtcaca

SEQ ID NO: 446283 - DNA, 25 bp, Homo sapien
gatatatcttcagactgggagagga

SEQ ID NO: 446284 - DNA, 25 bp, Homo sapien
acatttatcacatctgtgccaagac

SEQ ID NO: 446285 - DNA, 25 bp, Homo sapien
ctgtgccaagactggatatatcttc

SEQ ID NO: 446286 - DNA, 25 bp, Homo sapien
tgttcctacgagctgcagtttccct

SEQ ID NO: 446287 - DNA, 25 bp, Homo sapien
catacatgaaaggaacctgtccagg

SEQ ID NO: 446288 - DNA, 25 bp, Homo sapien
gaatcgtgcgcatgccttccgtgat

SEQ ID NO: 446289 - DNA, 25 bp, Homo sapien
agttgacagccagatacagggtctc

SEQ ID NO: 446290 - DNA, 25 bp, Homo sapien
actcctgtgctaccataagccacgc

SEQ ID NO: 446291 - DNA, 25 bp, Homo sapien
taccataagccacgcctctccgcat

SEQ ID NO: 446292 - DNA, 25 bp, Homo sapien
tgtgctaccataagccacgcctctc

SEQ ID NO: 446293 - DNA, 25 bp, Homo sapien
tcctgtgctaccataagccacgcct

SEQ ID NO: 446294 - DNA, 25 bp, Homo sapien
tgtcagatcaaaagctagaactttc

SEQ ID NO: 446295 - DNA, 25 bp, Homo sapien
atcatcggtgatatagacaaactcg

SEQ ID NO: 446296 - DNA, 25 bp, Homo sapien
tagaactttcagaagcaagtgttcc

SEQ ID NO: 446297 - DNA, 25 bp, Homo sapien
gacaaactcgtctacttcaggagga

SEQ ID NO: 446298 - DNA, 25 bp, Homo sapien
ccaggttctcagtcctgacgcacac

SEQ ID NO: 446299 - DNA, 25 bp, Homo sapien
gccaggttctcagtcctgacgcaca

SEQ ID NO: 446300 - DNA, 25 bp, Homo sapien
tgttcacagtatagtttgccaggca

SEQ ID NO: 446301 - DNA, 25 bp, Homo sapien
gatctgcttcaagtagactcagctc

SEQ ID NO: 446302 - DNA, 25 bp, Homo sapien
tgctgcagctatcagtgaaggaaga

SEQ ID NO: 446303 - DNA, 25 bp, Homo sapien
tatagtttgccaggcaaaaagctgc

SEQ ID NO: 446304 - DNA, 25 bp, Homo sapien
tttgaagccttgtacttctccctaa

SEQ ID NO: 446305 - DNA, 25 bp, Homo sapien
ctaattgcttgctgaggtcgatggg

SEQ ID NO: 446306 - DNA, 25 bp, Homo sapien
tatgaagctcactcaggcaaggcac

SEQ ID NO: 446307 - DNA, 25 bp, Homo sapien
ggcaaggcacaatttcacttaatga

SEQ ID NO: 446308 - DNA, 25 bp, Homo sapien
aaggtcagcacaagccaaggacttt

SEQ ID NO: 446309 - DNA, 25 bp, Homo sapien
caagccaaggactttggtttgataa

SEQ ID NO: 446310 - DNA, 25 bp, Homo sapien
gaagctggctgactacaagtattaa

SEQ ID NO: 446311 - DNA, 25 bp, Homo sapien
ttccagtagttttaacagaatggaa

SEQ ID NO: 446312 - DNA, 25 bp, Homo sapien
aactgcaggtggctccatgagggac

SEQ ID NO: 446313 - DNA, 25 bp, Homo sapien
tgcaggtggctccatgagggacaca

SEQ ID NO: 446314 - DNA, 25 bp, Homo sapien
gcaggtggctccatgagggacacac

SEQ ID NO: 446315 - DNA, 25 bp, Homo sapien
aagaactgcaggtggctccatgagg

SEQ ID NO: 446316 - DNA, 25 bp, Homo sapien
tgttggactatattacaaactacta

SEQ ID NO: 446317 - DNA, 25 bp, Homo sapien
ctatgacgattattggcacttctga

SEQ ID NO: 446318 - DNA, 25 bp, Homo sapien
gaggtgaagttctggaagtgcttcc

SEQ ID NO: 446319 - DNA, 25 bp, Homo sapien
tccaacgtgcagaagcctatgacga

SEQ ID NO: 446320 - DNA, 25 bp, Homo sapien
tgactaggatggtagagtgaagcta

SEQ ID NO: 446321 - DNA, 25 bp, Homo sapien
attcaaatctcttcacccatctgtc

SEQ ID NO: 446322 - DNA, 25 bp, Homo sapien
gagcaggcagcgcatattcaaatct

SEQ ID NO: 446323 - DNA, 25 bp, Homo sapien
cctttactaatctatggcgagctac

SEQ ID NO: 446324 - DNA, 25 bp, Homo sapien
tagtcaaatttcacaggtagcaaca

SEQ ID NO: 446325 - DNA, 25 bp, Homo sapien
caagttgatgcaaataattgtgtct

SEQ ID NO: 446326 - DNA, 25 bp, Homo sapien
aattgtgtcttgattgatgtgagca

SEQ ID NO: 446327 - DNA, 25 bp, Homo sapien
tgtgagcaaacacacggagatgctc

SEQ ID NO: 446328 - DNA, 25 bp, Homo sapien
gtcagaactgtcacaccaaattgtc

SEQ ID NO: 446329 - DNA, 25 bp, Homo sapien
gctcttgccctaaatgtcagaactg

SEQ ID NO: 446330 - DNA, 25 bp, Homo sapien
acagtatgtcaatcttcccgcttcc

SEQ ID NO: 446331 - DNA, 25 bp, Homo sapien
gaactgtcacaccaaattgtccatc

SEQ ID NO: 446332 - DNA, 25 bp, Homo sapien
catctggaggattccatctgaggcc

SEQ ID NO: 446333 - DNA, 25 bp, Homo sapien
tacctgaagctcatgttagtcacag

SEQ ID NO: 446334 - DNA, 25 bp, Homo sapien
caggaaacactacgtcattagggta

SEQ ID NO: 446335 - DNA, 25 bp, Homo sapien
acactgcaaatgtgatacctgaagc

SEQ ID NO: 446336 - DNA, 25 bp, Homo sapien
gaaagtaagggctgatatgccactg

SEQ ID NO: 446337 - DNA, 25 bp, Homo sapien
cagctggccagttgcaataatgaag

SEQ ID NO: 446338 - DNA, 25 bp, Homo sapien
gaagacatgtatcatcctgcaccac

SEQ ID NO: 446339 - DNA, 25 bp, Homo sapien
caagaagactgagagtcacctcaag

SEQ ID NO: 446340 - DNA, 25 bp, Homo sapien
gcaactctgaatcataaggtactgg

SEQ ID NO: 446341 - DNA, 25 bp, Homo sapien
cagaagcacttgcagttgaggcaat

SEQ ID NO: 446342 - DNA, 25 bp, Homo sapien
caccaagtattaaggacagctccag

SEQ ID NO: 446343 - DNA, 25 bp, Homo sapien
gagattattgttagcacaccaagta

SEQ ID NO: 446344 - DNA, 25 bp, Homo sapien
cttcctcagtctgcccctcggagtt

SEQ ID NO: 446345 - DNA, 25 bp, Homo sapien
gagttctcgagaagctggtaatgag

SEQ ID NO: 446346 - DNA, 25 bp, Homo sapien
ctcggagttctcgagttctcgagaa

SEQ ID NO: 446347 - DNA, 25 bp, Homo sapien
agtgcacttccagccctacccgtgt

SEQ ID NO: 446348 - DNA, 25 bp, Homo sapien
accaccggaggactgtgcgtatcgg

SEQ ID NO: 446349 - DNA, 25 bp, Homo sapien
cgtatcggggcttgaggcaataaat

SEQ ID NO: 446350 - DNA, 25 bp, Homo sapien
ccgcaccaccggaggactgtgcgta

SEQ ID NO: 446351 - DNA, 25 bp, Homo sapien
gcaataaataagaggccaagcccca

SEQ ID NO: 446352 - DNA, 25 bp, Homo sapien
tcatttttggtcttagagatagtct

SEQ ID NO: 446353 - DNA, 25 bp, Homo sapien
gaagcagccattcacaacattttca

SEQ ID NO: 446354 - DNA, 25 bp, Homo sapien
attttcatctccaagaccaatttca

SEQ ID NO: 446355 - DNA, 25 bp, Homo sapien
gaagataggcttaagaccattttca

SEQ ID NO: 446356 - DNA, 25 bp, Homo sapien
tgtttctgtaccctccattcagctg

SEQ ID NO: 446357 - DNA, 25 bp, Homo sapien
ctggtatctgtcaaaaggtggctgc

SEQ ID NO: 446358 - DNA, 25 bp, Homo sapien
agcagagcttgggttaagcctccac

SEQ ID NO: 446359 - DNA, 25 bp, Homo sapien
tgggttaagcctccaccaaagtggc

SEQ ID NO: 446360 - DNA, 25 bp, Homo sapien
tgactggccgccagctttgaagaca

SEQ ID NO: 446361 - DNA, 25 bp, Homo sapien
tggctgctaatgagtcctccactcc

SEQ ID NO: 446362 - DNA, 25 bp, Homo sapien
gcttctgactggccgccagctttga

SEQ ID NO: 446363 - DNA, 25 bp, Homo sapien
gccgccagctttgaagacacatttc

SEQ ID NO: 446364 - DNA, 25 bp, Homo sapien
ttgggcccagttccttcttcgtgtg

SEQ ID NO: 446365 - DNA, 25 bp, Homo sapien
ccagttccttcttcgtgtgtatcag

SEQ ID NO: 446366 - DNA, 25 bp, Homo sapien
tgtgtatcagtcttggcttctggct

SEQ ID NO: 446367 - DNA, 25 bp, Homo sapien
ggaaattttgatcaggataactggg

SEQ ID NO: 446368 - DNA, 25 bp, Homo sapien
ccttcccagagacaaagagctcaga

SEQ ID NO: 446369 - DNA, 25 bp, Homo sapien
tccacaagtatagatccactggctt

SEQ ID NO: 446370 - DNA, 25 bp, Homo sapien
gagaagcactgggtttggccaactg

SEQ ID NO: 446371 - DNA, 25 bp, Homo sapien
ccaaaggaaggcagaaacacactca

SEQ ID NO: 446372 - DNA, 25 bp, Homo sapien
ttgcaagtgctactgacacctgttt

SEQ ID NO: 446373 - DNA, 25 bp, Homo sapien
catttctgatgatgttgctggtgac

SEQ ID NO: 446374 - DNA, 25 bp, Homo sapien
tgttcttttgcaagtgctactgaca

SEQ ID NO: 446375 - DNA, 25 bp, Homo sapien
tggccacaggaggtatgttcttttg

SEQ ID NO: 446376 - DNA, 25 bp, Homo sapien
tcagagcacgctcattcattctgcc

SEQ ID NO: 446377 - DNA, 25 bp, Homo sapien
caccagtatgcccagatttcagagc

SEQ ID NO: 446378 - DNA, 25 bp, Homo sapien
taaaactgcagtttgggcaccctga

SEQ ID NO: 446379 - DNA, 25 bp, Homo sapien
gggcaccctgaaaatgagtaggagc

SEQ ID NO: 446380 - DNA, 25 bp, Homo sapien
cagatagtttacagccgtagcagga

SEQ ID NO: 446381 - DNA, 25 bp, Homo sapien
gactggtaacagatagtttacagcc

SEQ ID NO: 446382 - DNA, 25 bp, Homo sapien
taatttcgaaagagacggactggta

SEQ ID NO: 446383 - DNA, 25 bp, Homo sapien
tacagccgtagcaggatttcttgtg

SEQ ID NO: 446384 - DNA, 25 bp, Homo sapien
aagagttcattgtctatgtcaggga

SEQ ID NO: 446385 - DNA, 25 bp, Homo sapien
tctacgagtctgctgaagagttcat

SEQ ID NO: 446386 - DNA, 25 bp, Homo sapien
tagcagttgcagatggtcaccagag

SEQ ID NO: 446387 - DNA, 25 bp, Homo sapien
tgctgtggaaagacgcatgaggtcc

SEQ ID NO: 446388 - DNA, 25 bp, Homo sapien
taggtagacagctgaagaagcccct

SEQ ID NO: 446389 - DNA, 25 bp, Homo sapien
atggcaagaagttggcatgggtttt

SEQ ID NO: 446390 - DNA, 25 bp, Homo sapien
gaatataaacactgatgcctgattt

SEQ ID NO: 446391 - DNA, 25 bp, Homo sapien
tctgtctggaatattgtgaagatag

SEQ ID NO: 446392 - DNA, 25 bp, Homo sapien
cctatataagagaagatgatcacca

SEQ ID NO: 446393 - DNA, 25 bp, Homo sapien
ttcctaccctcctagacaagtactg

SEQ ID NO: 446394 - DNA, 25 bp, Homo sapien
tccagccaccgtcagcctatataag

SEQ ID NO: 446395 - DNA, 25 bp, Homo sapien
cctaccctcctagacaagtactggg

SEQ ID NO: 446396 - DNA, 25 bp, Homo sapien
aaagagagaagacactgtaacccct

SEQ ID NO: 446397 - DNA, 25 bp, Homo sapien
gagagaagacactgtaacccctttc

SEQ ID NO: 446398 - DNA, 25 bp, Homo sapien
agagaagacactgtaacccctttct

SEQ ID NO: 446399 - DNA, 25 bp, Homo sapien
agagagaagacactgtaaccccttt

SEQ ID NO: 446400 - DNA, 25 bp, Homo sapien
gggtacacatatcacgctctgcaaa

SEQ ID NO: 446401 - DNA, 25 bp, Homo sapien
gcggactaagactcatgccacaact

SEQ ID NO: 446402 - DNA, 25 bp, Homo sapien
ttcccagctctgacggcggactaag

SEQ ID NO: 446403 - DNA, 25 bp, Homo sapien
gctctgcaaatgatccctctgtagt

SEQ ID NO: 446404 - DNA, 25 bp, Homo sapien
ttctgtgcatgtacagccatatgac

SEQ ID NO: 446405 - DNA, 25 bp, Homo sapien
tacagccatatgactgggtctctgc

SEQ ID NO: 446406 - DNA, 25 bp, Homo sapien
tgcatgtacagccatatgactgggt

SEQ ID NO: 446407 - DNA, 25 bp, Homo sapien
tgtacagccatatgactgggtctct

SEQ ID NO: 446408 - DNA, 25 bp, Homo sapien
tcttcttcttgaactttctgtgctc

SEQ ID NO: 446409 - DNA, 25 bp, Homo sapien
cactcttcttcttgaactttctgtg

SEQ ID NO: 446410 - DNA, 25 bp, Homo sapien
caaatcactcttcttcttgaacttt

SEQ ID NO: 446411 - DNA, 25 bp, Homo sapien
ttcttcttgaactttctgtgctcat

SEQ ID NO: 446412 - DNA, 25 bp, Homo sapien
gcctagttgtataacaaacgcttcc

SEQ ID NO: 446413 - DNA, 25 bp, Homo sapien
ggtttatgttgtagcctagttgtat

SEQ ID NO: 446414 - DNA, 25 bp, Homo sapien
tataacaaacgcttccatcaggagt

SEQ ID NO: 446415 - DNA, 25 bp, Homo sapien
tgtagcctagttgtataacaaacgc

SEQ ID NO: 446416 - DNA, 25 bp, Homo sapien
tccagccttaagtgctaaagggaga

SEQ ID NO: 446417 - DNA, 25 bp, Homo sapien
tgtgacaacgtgtgtgttcgtctct

SEQ ID NO: 446418 - DNA, 25 bp, Homo sapien
gaaacgatgaggcattgtgacaacg

SEQ ID NO: 446419 - DNA, 25 bp, Homo sapien
tgtgtgttcgtctctgtggttccag

SEQ ID NO: 446420 - DNA, 25 bp, Homo sapien
gttgagatagatctctctgaagaag

SEQ ID NO: 446421 - DNA, 25 bp, Homo sapien
gaagcgttgagatagatctctctga

SEQ ID NO: 446422 - DNA, 25 bp, Homo sapien
aatgaagcgttgagatagatctctc

SEQ ID NO: 446423 - DNA, 25 bp, Homo sapien
tacaaatgaagcgttgagatagatc

SEQ ID NO: 446424 - DNA, 25 bp, Homo sapien
gcacatttgctctttgtctatgata

SEQ ID NO: 446425 - DNA, 25 bp, Homo sapien
catttctgtgcttggggcacatttg

SEQ ID NO: 446426 - DNA, 25 bp, Homo sapien
tttgctctttgtctatgatactatg

SEQ ID NO: 446427 - DNA, 25 bp, Homo sapien
gggcacatttgctctttgtctatga

SEQ ID NO: 446428 - DNA, 25 bp, Homo sapien
taatgaggtagacaccagcaccaaa

SEQ ID NO: 446429 - DNA, 25 bp, Homo sapien
gcatagtggctgttctaatgaggta

SEQ ID NO: 446430 - DNA, 25 bp, Homo sapien
ttgcacgattttctttacccttctg

SEQ ID NO: 446431 - DNA, 25 bp, Homo sapien
agctgcagagtgagagtttgcacga

SEQ ID NO: 446432 - DNA, 25 bp, Homo sapien
tgaatttcacctgttcatgtgccac

SEQ ID NO: 446433 - DNA, 25 bp, Homo sapien
tataagagggtggattcagagaact

SEQ ID NO: 446434 - DNA, 25 bp, Homo sapien
tccctcggtgtctattttataagag

SEQ ID NO: 446435 - DNA, 25 bp, Homo sapien
tggtgacaaggtaaggtaagctttc

SEQ ID NO: 446436 - DNA, 25 bp, Homo sapien
ctgtgttgtcaagagggcagattca

SEQ ID NO: 446437 - DNA, 25 bp, Homo sapien
tgtgttgtcaagagggcagattcag

SEQ ID NO: 446438 - DNA, 25 bp, Homo sapien
ccttctctagggcaattgtgggtgg

SEQ ID NO: 446439 - DNA, 25 bp, Homo sapien
ggtacataagtaaaggctctctgtc

SEQ ID NO: 446440 - DNA, 25 bp, Homo sapien
aatctctcttatgtggatccttctg

SEQ ID NO: 446441 - DNA, 25 bp, Homo sapien
taactctgaagctccgtggtacata

SEQ ID NO: 446442 - DNA, 25 bp, Homo sapien
ccttgagcccctactccatctggtt

SEQ ID NO: 446443 - DNA, 25 bp, Homo sapien
ttgagcccctactccatctggttct

SEQ ID NO: 446444 - DNA, 25 bp, Homo sapien
ttccttgagcccctactccatctgg

SEQ ID NO: 446445 - DNA, 25 bp, Homo sapien
tgagcccctactccatctggttctg

SEQ ID NO: 446446 - DNA, 25 bp, Homo sapien
gcacggcggacagcaggcgcagcgg

SEQ ID NO: 446447 - DNA, 25 bp, Homo sapien
ctcctggccgcacaaccaatggccg

SEQ ID NO: 446448 - DNA, 25 bp, Homo sapien
gcgggagtggatccgggctgccggc

SEQ ID NO: 446449 - DNA, 25 bp, Homo sapien
cgcacaaccaatggccgcgagcggg

SEQ ID NO: 446450 - DNA, 25 bp, Homo sapien
ccggcaggtctcctgcgctagcggt

SEQ ID NO: 446451 - DNA, 25 bp, Homo sapien
cgcgaagccgtcctcgggaatgttg

SEQ ID NO: 446452 - DNA, 25 bp, Homo sapien
ctgcaggtcaggacacgcgacttcc

SEQ ID NO: 446453 - DNA, 25 bp, Homo sapien
gtgctccggtctggacgatacgcgc

SEQ ID NO: 446454 - DNA, 25 bp, Homo sapien
gacacctcaaaagggatagatttgg

SEQ ID NO: 446455 - DNA, 25 bp, Homo sapien
ttgcttctcgggacagtaaggacac

SEQ ID NO: 446456 - DNA, 25 bp, Homo sapien
tggagtcaccccaagactcggagag

SEQ ID NO: 446457 - DNA, 25 bp, Homo sapien
gagagccgggctgcgattgcttctc

SEQ ID NO: 446458 - DNA, 25 bp, Homo sapien
tccagcgccttagcaggtgcaaagc

SEQ ID NO: 446459 - DNA, 25 bp, Homo sapien
tgtcagtgtgcgcatggcgagtccc

SEQ ID NO: 446460 - DNA, 25 bp, Homo sapien
cgcccctgggaaacgcaagtgttca

SEQ ID NO: 446461 - DNA, 25 bp, Homo sapien
taagacgggcgaaaagactctccag

SEQ ID NO: 446462 - DNA, 25 bp, Homo sapien
cagaactgaagcaatttgcccatca

SEQ ID NO: 446463 - DNA, 25 bp, Homo sapien
gatatttctgtgaatgaatccctct

SEQ ID NO: 446464 - DNA, 25 bp, Homo sapien
cctcaacaagatatttctgtgaatg

SEQ ID NO: 446465 - DNA, 25 bp, Homo sapien
tttcctaaatcagaactgaagcaat

SEQ ID NO: 446466 - DNA, 25 bp, Homo sapien
cagggcttacacaggacagattggc

SEQ ID NO: 446467 - DNA, 25 bp, Homo sapien
gatcgtgtttgcagaattcacaggc

SEQ ID NO: 446468 - DNA, 25 bp, Homo sapien
gattggcattttttcacgatcgtgt

SEQ ID NO: 446469 - DNA, 25 bp, Homo sapien
aaaggcagcaggtatcagatgtgca

SEQ ID NO: 446470 - DNA, 25 bp, Homo sapien
tgtagacgtttgacaggtggcctga

SEQ ID NO: 446471 - DNA, 25 bp, Homo sapien
tgaaagaacttccagcgtcgcttgg

SEQ ID NO: 446472 - DNA, 25 bp, Homo sapien
ttgaaaaagtggacctctgagagga

SEQ ID NO: 446473 - DNA, 25 bp, Homo sapien
cctctggagggcaatgattaaaagc

SEQ ID NO: 446474 - DNA, 25 bp, Homo sapien
aatgaagtgcgagtccatgtccagc

SEQ ID NO: 446475 - DNA, 25 bp, Homo sapien
aaacggtgtgttgaagccccactgc

SEQ ID NO: 446476 - DNA, 25 bp, Homo sapien
taagttcagtgtttaccctgtgggc

SEQ ID NO: 446477 - DNA, 25 bp, Homo sapien
tatcagagacgcaacattcgtggag

SEQ ID NO: 446478 - DNA, 25 bp, Homo sapien
tcgtgtttctttggccttgggcatg

SEQ ID NO: 446479 - DNA, 25 bp, Homo sapien
gaagcaggacccttgttcgtgtttc

SEQ ID NO: 446480 - DNA, 25 bp, Homo sapien
tgtgtccatatttacgtaagaaagc

SEQ ID NO: 446481 - DNA, 25 bp, Homo sapien
cttgggcatgtcagtgagtaaggag

SEQ ID NO: 446482 - DNA, 25 bp, Homo sapien
cctggaagcgccctaatgagtgttt

SEQ ID NO: 446483 - DNA, 25 bp, Homo sapien
cgccctaatgagtgttttgtcatcc

SEQ ID NO: 446484 - DNA, 25 bp, Homo sapien
accactgcctggaagcgccctaatg

SEQ ID NO: 446485 - DNA, 25 bp, Homo sapien
gaagcgccctaatgagtgttttgtc

SEQ ID NO: 446486 - DNA, 25 bp, Homo sapien
tgtgctttgtttgcttgatgcttca

SEQ ID NO: 446487 - DNA, 25 bp, Homo sapien
gtttgcttgatgcttcaagtcacca

SEQ ID NO: 446488 - DNA, 25 bp, Homo sapien
ttgcttgatgcttcaagtcaccatc

SEQ ID NO: 446489 - DNA, 25 bp, Homo sapien
tgctccactctgtgctttgtttgct

SEQ ID NO: 446490 - DNA, 25 bp, Homo sapien
ccttagcctaactatcctccacagt

SEQ ID NO: 446491 - DNA, 25 bp, Homo sapien
agaagatggtgcaaagggaattttc

SEQ ID NO: 446492 - DNA, 25 bp, Homo sapien
ggcaatgtcaaagaagatggtgcaa

SEQ ID NO: 446493 - DNA, 25 bp, Homo sapien
actatcctccacagtcctctctcaa

SEQ ID NO: 446494 - DNA, 25 bp, Homo sapien
catctgtgatcagaatgtgactagg

SEQ ID NO: 446495 - DNA, 25 bp, Homo sapien
gttcgccttgataatttgaattggc

SEQ ID NO: 446496 - DNA, 25 bp, Homo sapien
attcatgaatccactcatctgtgat

SEQ ID NO: 446497 - DNA, 25 bp, Homo sapien
tcagaatgtgactaggaagttcgcc

SEQ ID NO: 446498 - DNA, 25 bp, Homo sapien
gacagagctaagtaccactgctggg

SEQ ID NO: 446499 - DNA, 25 bp, Homo sapien
gtccctgagggagcttaaacaaaga

SEQ ID NO: 446500 - DNA, 25 bp, Homo sapien
cctaatgagtcatgcccagtggaat

SEQ ID NO: 446501 - DNA, 25 bp, Homo sapien
aatcgggatatacgagaccaatggc

SEQ ID NO: 446502 - DNA, 25 bp, Homo sapien
tgccaaatctattgacttcaacctt

SEQ ID NO: 446503 - DNA, 25 bp, Homo sapien
aatactgccaaatctattgacttca

SEQ ID NO: 446504 - DNA, 25 bp, Homo sapien
tgtaaccagacacctaatactgcca

SEQ ID NO: 446505 - DNA, 25 bp, Homo sapien
tttgccagtgttgaaaggagccctg

SEQ ID NO: 446506 - DNA, 25 bp, Homo sapien
acatgaggaccatgtagttgaaaac

SEQ ID NO: 446507 - DNA, 25 bp, Homo sapien
caatgaagggatcattggtggcaat

SEQ ID NO: 446508 - DNA, 25 bp, Homo sapien
tcaccccattggaggttggtgggac

SEQ ID NO: 446509 - DNA, 25 bp, Homo sapien
tcccactgatgatgagcgtcccatt

SEQ ID NO: 446510 - DNA, 25 bp, Homo sapien
caggtgttgttgctgatagtcttga

SEQ ID NO: 446511 - DNA, 25 bp, Homo sapien
tatgtttctcatggttcactctcct

SEQ ID NO: 446512 - DNA, 25 bp, Homo sapien
ttaagtgaaccccaatcttcttgaa

SEQ ID NO: 446513 - DNA, 25 bp, Homo sapien
aagaagcagcgatgaggacttttgt

SEQ ID NO: 446514 - DNA, 25 bp, Homo sapien
ctgatggcattgtttataacagtga

SEQ ID NO: 446515 - DNA, 25 bp, Homo sapien
ggcattgtttataacagtgaggtcc

SEQ ID NO: 446516 - DNA, 25 bp, Homo sapien
attgtttataacagtgaggtcctcc

SEQ ID NO: 446517 - DNA, 25 bp, Homo sapien
gatggcattgtttataacagtgagg

SEQ ID NO: 446518 - DNA, 25 bp, Homo sapien
cttggcaatgttctcaaggtggcaa

SEQ ID NO: 446519 - DNA, 25 bp, Homo sapien
ggtttgccagaaggaccatccacag

SEQ ID NO: 446520 - DNA, 25 bp, Homo sapien
gcaagtcagattcatgacagtcttg

SEQ ID NO: 446521 - DNA, 25 bp, Homo sapien
gatgaccactgcaccatggtttgcc

SEQ ID NO: 446522 - DNA, 25 bp, Homo sapien
caggaggctcttcggaagcccccat

SEQ ID NO: 446523 - DNA, 25 bp, Homo sapien
tcaggaggctcttcggaagccccca

SEQ ID NO: 446524 - DNA, 25 bp, Homo sapien
ctcaggaggctcttcggaagccccc

SEQ ID NO: 446525 - DNA, 25 bp, Homo sapien
gcgttacactattagagtcatggga

SEQ ID NO: 446526 - DNA, 25 bp, Homo sapien
tcctcgggagacctgattactataa

SEQ ID NO: 446527 - DNA, 25 bp, Homo sapien
tgcatccacagcgttacactattag

SEQ ID NO: 446528 - DNA, 25 bp, Homo sapien
gccttgaaacaaggctatcttactc

SEQ ID NO: 446529 - DNA, 25 bp, Homo sapien
cagcagttaatggtaatttactcat

SEQ ID NO: 446530 - DNA, 25 bp, Homo sapien
gaagtagttcgtatgcagtctgatc

SEQ ID NO: 446531 - DNA, 25 bp, Homo sapien
cagcccccttttatgtgtgccagtt

SEQ ID NO: 446532 - DNA, 25 bp, Homo sapien
gcagaaacccatgggttgaaggtga

SEQ ID NO: 446533 - DNA, 25 bp, Homo sapien
gcacacaatctttcagctgtacttg

SEQ ID NO: 446534 - DNA, 25 bp, Homo sapien
ttattgcctcttactaattagaagt

SEQ ID NO: 446535 - DNA, 25 bp, Homo sapien
cattagcagttcagtactggtgatg

SEQ ID NO: 446536 - DNA, 25 bp, Homo sapien
cctcttactaattagaagtttcagc

SEQ ID NO: 446537 - DNA, 25 bp, Homo sapien
tctgcttctagtctgtactcccata

SEQ ID NO: 446538 - DNA, 25 bp, Homo sapien
tcacttaaagactttatggccatga

SEQ ID NO: 446539 - DNA, 25 bp, Homo sapien
gccatgaaaaggtcgctccctttct

SEQ ID NO: 446540 - DNA, 25 bp, Homo sapien
tatggccatgaaaaggtcgctccct

SEQ ID NO: 446541 - DNA, 25 bp, Homo sapien
aaatcttcatccatgataatgtcct

SEQ ID NO: 446542 - DNA, 25 bp, Homo sapien
gagaagggcacaatgaagccttctt

SEQ ID NO: 446543 - DNA, 25 bp, Homo sapien
tatccaaccgcagcatcaaaatgtg

SEQ ID NO: 446544 - DNA, 25 bp, Homo sapien
tgaagccttcttctaaagcacccat

SEQ ID NO: 446545 - DNA, 25 bp, Homo sapien
actttcctgccaaagaaatatattc

SEQ ID NO: 446546 - DNA, 25 bp, Homo sapien
tttcttctatatactgttcttctat

SEQ ID NO: 446547 - DNA, 25 bp, Homo sapien
tcttctatatactgttcttctatat

SEQ ID NO: 446548 - DNA, 25 bp, Homo sapien
cttctatatactttcctgccaaaga

SEQ ID NO: 446549 - DNA, 25 bp, Homo sapien
ccaaagaaatatattcattaaaaat

SEQ ID NO: 446550 - DNA, 25 bp, Homo sapien
gccaaagaaatatattcattaaaaa

SEQ ID NO: 446551 - DNA, 25 bp, Homo sapien
ctgccaaagaaatatattcattaaa

SEQ ID NO: 446552 - DNA, 25 bp, Homo sapien
tgccaaagaaatatattcattaaaa

SEQ ID NO: 446553 - DNA, 25 bp, Homo sapien
taaaccacggcttaagtccagtctc

SEQ ID NO: 446554 - DNA, 25 bp, Homo sapien
gctgtaacgttgtgaaagttgccat

SEQ ID NO: 446555 - DNA, 25 bp, Homo sapien
gagcagcatttggagtatgtcacca

SEQ ID NO: 446556 - DNA, 25 bp, Homo sapien
tctgagaagctgtcatagaagatga

SEQ ID NO: 446557 - DNA, 25 bp, Homo sapien
tactgagcccgtgaaattgagaatg

SEQ ID NO: 446558 - DNA, 25 bp, Homo sapien
accattcattgtctggaggtaggtc

SEQ ID NO: 446559 - DNA, 25 bp, Homo sapien
gagccgagcctattgaactactgag

SEQ ID NO: 446560 - DNA, 25 bp, Homo sapien
ttctcctgtcatcatgagccgagcc

SEQ ID NO: 446561 - DNA, 25 bp, Homo sapien
gaagcacctgagagaggtacctact

SEQ ID NO: 446562 - DNA, 25 bp, Homo sapien
aaaatttatgcaaaccctgctggga

SEQ ID NO: 446563 - DNA, 25 bp, Homo sapien
tgcaaggctactcagacaactaggt

SEQ ID NO: 446564 - DNA, 25 bp, Homo sapien
ccagggcagtcatagcaggtaattt

SEQ ID NO: 446565 - DNA, 25 bp, Homo sapien
gtgtcatttgcttgtttaattttgt

SEQ ID NO: 446566 - DNA, 25 bp, Homo sapien
cagtgtcatttgcttgtttaatttt

SEQ ID NO: 446567 - DNA, 25 bp, Homo sapien
agtgtcatttgcttgtttaattttg

SEQ ID NO: 446568 - DNA, 25 bp, Homo sapien
tcagtgtcatttgcttgtttaattt

SEQ ID NO: 446569 - DNA, 25 bp, Homo sapien
catcagtcgaggtggtatatcaatg

SEQ ID NO: 446570 - DNA, 25 bp, Homo sapien
tcgaggtggtatatcaatgtgtacc

SEQ ID NO: 446571 - DNA, 25 bp, Homo sapien
gaggtggtatatcaatgtgtacccc

SEQ ID NO: 446572 - DNA, 25 bp, Homo sapien
cagtcgaggtggtatatcaatgtgt

SEQ ID NO: 446573 - DNA, 25 bp, Homo sapien
cctttgtctaccagctttcttcaga

SEQ ID NO: 446574 - DNA, 25 bp, Homo sapien
ctttgtctaccagctttcttcagat

SEQ ID NO: 446575 - DNA, 25 bp, Homo sapien
ttgtctaccagctttcttcagatcc

SEQ ID NO: 446576 - DNA, 25 bp, Homo sapien
ttcctttgtctaccagctttcttca

SEQ ID NO: 446577 - DNA, 25 bp, Homo sapien
accccgggcttttagcacctgcttg

SEQ ID NO: 446578 - DNA, 25 bp, Homo sapien
aaccaaagactcaggacacgctggg

SEQ ID NO: 446579 - DNA, 25 bp, Homo sapien
cacgctggggtaaaaggcgcctata

SEQ ID NO: 446580 - DNA, 25 bp, Homo sapien
tgcttggcctaacggcacttcgcga

SEQ ID NO: 446581 - DNA, 25 bp, Homo sapien
ctggcgccaaggtgggagccgcagc

SEQ ID NO: 446582 - DNA, 25 bp, Homo sapien
cgccaaggtgggagccgcagccggg

SEQ ID NO: 446583 - DNA, 25 bp, Homo sapien
cgcgccctccgctacaccctgcgcc

SEQ ID NO: 446584 - DNA, 25 bp, Homo sapien
ccgcgccctccgctacaccctgcgc

SEQ ID NO: 446585 - DNA, 25 bp, Homo sapien
cactagcagggtgaattgagaggcc

SEQ ID NO: 446586 - DNA, 25 bp, Homo sapien
cagggtgaattgagaggccgcggcc

SEQ ID NO: 446587 - DNA, 25 bp, Homo sapien
tagcagggtgaattgagaggccgcg

SEQ ID NO: 446588 - DNA, 25 bp, Homo sapien
ctagcagggtgaattgagaggccgc

SEQ ID NO: 446589 - DNA, 25 bp, Homo sapien
gccatccccggccccttcgcacagg

SEQ ID NO: 446590 - DNA, 25 bp, Homo sapien
cgcacaggtacctaacgggcttgcc

SEQ ID NO: 446591 - DNA, 25 bp, Homo sapien
cacaggtacctaacgggcttgcccg

SEQ ID NO: 446592 - DNA, 25 bp, Homo sapien
catccccggccccttcgcacaggta

SEQ ID NO: 446593 - DNA, 25 bp, Homo sapien
tcgagtttgacgtttcccgcgctgc

SEQ ID NO: 446594 - DNA, 25 bp, Homo sapien
catccacggtttgcgctgcttggcc

SEQ ID NO: 446595 - DNA, 25 bp, Homo sapien
gaagtgtctaacaggtccgcctcgt

SEQ ID NO: 446596 - DNA, 25 bp, Homo sapien
ccttcgtaggtgcaggtcttgctca

SEQ ID NO: 446597 - DNA, 25 bp, Homo sapien
ccccaggcctcagctaagtctgata

SEQ ID NO: 446598 - DNA, 25 bp, Homo sapien
cccaggcctcagctaagtctgatac

SEQ ID NO: 446599 - DNA, 25 bp, Homo sapien
catacctggcttggatcacttgtaa

SEQ ID NO: 446600 - DNA, 25 bp, Homo sapien
gccacaaggccagtaaatgatgcaa

SEQ ID NO: 446601 - DNA, 25 bp, Homo sapien
gacactgtgtgaaccctcaatatgg

SEQ ID NO: 446602 - DNA, 25 bp, Homo sapien
caacagggatttgcacccagaagtc

SEQ ID NO: 446603 - DNA, 25 bp, Homo sapien
tatccaggccgaaacataatctgct

SEQ ID NO: 446604 - DNA, 25 bp, Homo sapien
tagtaatactgtgagaggtgggcca

SEQ ID NO: 446605 - DNA, 25 bp, Homo sapien
cagtctctgggcaactctgggaaag

SEQ ID NO: 446606 - DNA, 25 bp, Homo sapien
ccactaagattgaggcagagttact

SEQ ID NO: 446607 - DNA, 25 bp, Homo sapien
ggacgatccccaaaagatcctgttc

SEQ ID NO: 446608 - DNA, 25 bp, Homo sapien
cacttgttctaaaagagtaggtctt

SEQ ID NO: 446609 - DNA, 25 bp, Homo sapien
tctttgtttaacaatggagagtatg

SEQ ID NO: 446610 - DNA, 25 bp, Homo sapien
caatggagagtatgttatctgcact

SEQ ID NO: 446611 - DNA, 25 bp, Homo sapien
actacttctggacttcttagtaacg

SEQ ID NO: 446612 - DNA, 25 bp, Homo sapien
cttgctgatttaatagctgttgctg

SEQ ID NO: 446613 - DNA, 25 bp, Homo sapien
ctacttctggacttcttagtaacga

SEQ ID NO: 446614 - DNA, 25 bp, Homo sapien
ccaaaacttgctgatttaatagctg

SEQ ID NO: 446615 - DNA, 25 bp, Homo sapien
atgtagatgttcttggtaagttccc

SEQ ID NO: 446616 - DNA, 25 bp, Homo sapien
tgctcatctattacaataagataaa

SEQ ID NO: 446617 - DNA, 25 bp, Homo sapien
aaaatatgctcatctattacaataa

SEQ ID NO: 446618 - DNA, 25 bp, Homo sapien
aatatgctcatctattacaataaga

SEQ ID NO: 446619 - DNA, 25 bp, Homo sapien
ccaactacatgttagcaccacaaaa

SEQ ID NO: 446620 - DNA, 25 bp, Homo sapien
actgcgggtgagacaatctttagta

SEQ ID NO: 446621 - DNA, 25 bp, Homo sapien
tatgtgggactacccctgacactgc

SEQ ID NO: 446622 - DNA, 25 bp, Homo sapien
aattgacccttgatgagaaccactg

SEQ ID NO: 446623 - DNA, 25 bp, Homo sapien
taagagatcagcactaacaggtaac

SEQ ID NO: 446624 - DNA, 25 bp, Homo sapien
catcccagtgtgcttagttaatccg

SEQ ID NO: 446625 - DNA, 25 bp, Homo sapien
gagagaagccaactgtaggagacac

SEQ ID NO: 446626 - DNA, 25 bp, Homo sapien
cagttttcagatagctcaattgcga

SEQ ID NO: 446627 - DNA, 25 bp, Homo sapien
caacaactggactttaatgaattaa

SEQ ID NO: 446628 - DNA, 25 bp, Homo sapien
taatattggatatactctcttgaca

SEQ ID NO: 446629 - DNA, 25 bp, Homo sapien
gaacaaaaacgttcttgctctccat

SEQ ID NO: 446630 - DNA, 25 bp, Homo sapien
gaacagccatgattaagtcgaactt

SEQ ID NO: 446631 - DNA, 25 bp, Homo sapien
ccttggtaaagattctgagcctctc

SEQ ID NO: 446632 - DNA, 25 bp, Homo sapien
gagcctctcagttatctatcccacg

SEQ ID NO: 446633 - DNA, 25 bp, Homo sapien
agctaatgttttccaccataaaggg

SEQ ID NO: 446634 - DNA, 25 bp, Homo sapien
cctctgcatctagtaagaataaact

SEQ ID NO: 446635 - DNA, 25 bp, Homo sapien
tgtggcagtttggattagctacacc

SEQ ID NO: 446636 - DNA, 25 bp, Homo sapien
cactgcaatgtcataggaacctcca

SEQ ID NO: 446637 - DNA, 25 bp, Homo sapien
taaaatcgttttcgcaatgctccag

SEQ ID NO: 446638 - DNA, 25 bp, Homo sapien
gctgagcatttctaagggccaagtg

SEQ ID NO: 446639 - DNA, 25 bp, Homo sapien
taaacggtagttcagcccattttca

SEQ ID NO: 446640 - DNA, 25 bp, Homo sapien
ggcaagtctgctagataaacggtag

SEQ ID NO: 446641 - DNA, 25 bp, Homo sapien
tttacaccctgagctagaaaaagga

SEQ ID NO: 446642 - DNA, 25 bp, Homo sapien
taaaagcttctatggcaaacgatac

SEQ ID NO: 446643 - DNA, 25 bp, Homo sapien
agaaagttcatctccaatgctttag

SEQ ID NO: 446644 - DNA, 25 bp, Homo sapien
tttggaggatggagtactacacgtt

SEQ ID NO: 446645 - DNA, 25 bp, Homo sapien
tgattaaaaggtgagatcaactcac

SEQ ID NO: 446646 - DNA, 25 bp, Homo sapien
gctttagaataatccaaacaactat

SEQ ID NO: 446647 - DNA, 25 bp, Homo sapien
tctaaagcccaagctacaaatagct

SEQ ID NO: 446648 - DNA, 25 bp, Homo sapien
ccttttctgctacgagggtaaagct

SEQ ID NO: 446649 - DNA, 25 bp, Homo sapien
catcttaaggcaggctacatccttt

SEQ ID NO: 446650 - DNA, 25 bp, Homo sapien
ttggaacctctaaagcccaagctac

SEQ ID NO: 446651 - DNA, 25 bp, Homo sapien
tagggtccttcttaacagctgtcag

SEQ ID NO: 446652 - DNA, 25 bp, Homo sapien
tagcaagcattatgcgagcagaggt

SEQ ID NO: 446653 - DNA, 25 bp, Homo sapien
tacggtaggtttcacttcagtgacc

SEQ ID NO: 446654 - DNA, 25 bp, Homo sapien
acatcccagtgttgatggccaccca

SEQ ID NO: 446655 - DNA, 25 bp, Homo sapien
agagcacactgtaagagacgcccac

SEQ ID NO: 446656 - DNA, 25 bp, Homo sapien
gggtctatcgagctgattaacataa

SEQ ID NO: 446657 - DNA, 25 bp, Homo sapien
taacataatccttctgcagacggca

SEQ ID NO: 446658 - DNA, 25 bp, Homo sapien
ccgattcttcttgtacactgggcaa

SEQ ID NO: 446659 - DNA, 25 bp, Homo sapien
gagtggcagagagtgacaaagagcg

SEQ ID NO: 446660 - DNA, 25 bp, Homo sapien
tccgtctaccgagaacagcaggact

SEQ ID NO: 446661 - DNA, 25 bp, Homo sapien
gagaaggaaggaggcgtccgtctac

SEQ ID NO: 446662 - DNA, 25 bp, Homo sapien
tggacattgagaggagcagagaaag

SEQ ID NO: 446663 - DNA, 25 bp, Homo sapien
ggattcctgttttcgcacccaaatg

SEQ ID NO: 446664 - DNA, 25 bp, Homo sapien
tagagcccatccagataattcaggt

SEQ ID NO: 446665 - DNA, 25 bp, Homo sapien
gttgcacttcccaagaccactatgg

SEQ ID NO: 446666 - DNA, 25 bp, Homo sapien
tctactactgatactagagggaggc

SEQ ID NO: 446667 - DNA, 25 bp, Homo sapien
aatattgcatattctaacttgaggg

SEQ ID NO: 446668 - DNA, 25 bp, Homo sapien
attggccactattgtgtatactagc

SEQ ID NO: 446669 - DNA, 25 bp, Homo sapien
tagcatacaatctaattggccacta

SEQ ID NO: 446670 - DNA, 25 bp, Homo sapien
gattcagagtatgcaattggctggg

SEQ ID NO: 446671 - DNA, 25 bp, Homo sapien
aagagagggctcttcaacttgctga

SEQ ID NO: 446672 - DNA, 25 bp, Homo sapien
tgcaaacaaaagttggcagagttcc

SEQ ID NO: 446673 - DNA, 25 bp, Homo sapien
tggcttgacataaaggagagaggca

SEQ ID NO: 446674 - DNA, 25 bp, Homo sapien
taaactgagacatttgaactacagg

SEQ ID NO: 446675 - DNA, 25 bp, Homo sapien
ttacactgtaagtttctggagagca

SEQ ID NO: 446676 - DNA, 25 bp, Homo sapien
taacgaaatggagctctgtattcaa

SEQ ID NO: 446677 - DNA, 25 bp, Homo sapien
tggttcccgaccctgtgcttgcatc

SEQ ID NO: 446678 - DNA, 25 bp, Homo sapien
gggaaactctattacctataagcag

SEQ ID NO: 446679 - DNA, 25 bp, Homo sapien
ggttgccacggacaaggatcacaca

SEQ ID NO: 446680 - DNA, 25 bp, Homo sapien
taaatcaggagaagttagccaacca

SEQ ID NO: 446681 - DNA, 25 bp, Homo sapien
gattcactgtatgtgggtctgcagc

SEQ ID NO: 446682 - DNA, 25 bp, Homo sapien
gcactgcagcacacgtttaaggttg

SEQ ID NO: 446683 - DNA, 25 bp, Homo sapien
gggtgctgagtatcatcgccaggat

SEQ ID NO: 446684 - DNA, 25 bp, Homo sapien
gagtatcatcgccaggatgtcacca

SEQ ID NO: 446685 - DNA, 25 bp, Homo sapien
tatcatcgccaggatgtcaccagca

SEQ ID NO: 446686 - DNA, 25 bp, Homo sapien
tgctgagtatcatcgccaggatgtc

SEQ ID NO: 446687 - DNA, 25 bp, Homo sapien
agaatcactgctcccagtcacagaa

SEQ ID NO: 446688 - DNA, 25 bp, Homo sapien
tatcagttgcaggtatggacaggga

SEQ ID NO: 446689 - DNA, 25 bp, Homo sapien
caggcagcatggttgtgttgaaatc

SEQ ID NO: 446690 - DNA, 25 bp, Homo sapien
aaggccaagtatgtggatgcaggtc

SEQ ID NO: 446691 - DNA, 25 bp, Homo sapien
gctagtatggatgactcttctgagg

SEQ ID NO: 446692 - DNA, 25 bp, Homo sapien
gatggctagtatggatgactcttct

SEQ ID NO: 446693 - DNA, 25 bp, Homo sapien
gagatggctagtatggatgactctt

SEQ ID NO: 446694 - DNA, 25 bp, Homo sapien
tggctagtatggatgactcttctga

SEQ ID NO: 446695 - DNA, 25 bp, Homo sapien
gttgttgtaagaggcggtgtttgca

SEQ ID NO: 446696 - DNA, 25 bp, Homo sapien
ggttgttgtaagaggcggtgtttgc

SEQ ID NO: 446697 - DNA, 25 bp, Homo sapien
ttgttgtaagaggcggtgtttgcat

SEQ ID NO: 446698 - DNA, 25 bp, Homo sapien
gccaaagtggactgtggttgcagat

SEQ ID NO: 446699 - DNA, 25 bp, Homo sapien
tgccaaagtggactgtggttgcaga

SEQ ID NO: 446700 - DNA, 25 bp, Homo sapien
ttgccaaagtggactgtggttgcag

SEQ ID NO: 446701 - DNA, 25 bp, Homo sapien
ttctaggaacctgtctgcaagtcgc

SEQ ID NO: 446702 - DNA, 25 bp, Homo sapien
tattaaaggagtgctgaatgtgttc

SEQ ID NO: 446703 - DNA, 25 bp, Homo sapien
tggtgccagtggatccaaagacagg

SEQ ID NO: 446704 - DNA, 25 bp, Homo sapien
cacataatgttgtgaagcagtttgc

SEQ ID NO: 446705 - DNA, 25 bp, Homo sapien
gaaaacagctccgtcgttcctgatg

SEQ ID NO: 446706 - DNA, 25 bp, Homo sapien
aaacagctccgtcgttcctgatgta

SEQ ID NO: 446707 - DNA, 25 bp, Homo sapien
tgagaaaacagctccgtcgttcctg

SEQ ID NO: 446708 - DNA, 25 bp, Homo sapien
acagctccgtcgttcctgatgtagt

SEQ ID NO: 446709 - DNA, 25 bp, Homo sapien
gggacctcaatcagcatgatgccac

SEQ ID NO: 446710 - DNA, 25 bp, Homo sapien
gggctaaaggaaccacaggctccag

SEQ ID NO: 446711 - DNA, 25 bp, Homo sapien
tatgataagtacaaagcatcgggca

SEQ ID NO: 446712 - DNA, 25 bp, Homo sapien
gccacacaggataagtgacatatga

SEQ ID NO: 446713 - DNA, 25 bp, Homo sapien
aataagaattttcgtccaggcgcag

SEQ ID NO: 446714 - DNA, 25 bp, Homo sapien
tagctgccattccttagagtctttg

SEQ ID NO: 446715 - DNA, 25 bp, Homo sapien
cgtggaattccataacatacggtca

SEQ ID NO: 446716 - DNA, 25 bp, Homo sapien
tagccagcataagagataacagtcc

SEQ ID NO: 446717 - DNA, 25 bp, Homo sapien
aggcttccaggtaccgatggcacat

SEQ ID NO: 446718 - DNA, 25 bp, Homo sapien
tcagtacttctgcacaaaaggtagt

SEQ ID NO: 446719 - DNA, 25 bp, Homo sapien
gaataaacagaagtatacctccatg

SEQ ID NO: 446720 - DNA, 25 bp, Homo sapien
cattatatcatgttgcctcttgctt

SEQ ID NO: 446721 - DNA, 25 bp, Homo sapien
gacagtgatggtactagcactcaga

SEQ ID NO: 446722 - DNA, 25 bp, Homo sapien
ggcgctgccttcacgggactttctg

SEQ ID NO: 446723 - DNA, 25 bp, Homo sapien
tccttcgagctcctgtggctcttcg

SEQ ID NO: 446724 - DNA, 25 bp, Homo sapien
tgtatgccctgttcaggcgctgcct

SEQ ID NO: 446725 - DNA, 25 bp, Homo sapien
ggtcccaggtatgtcctccttcgag

SEQ ID NO: 446726 - DNA, 25 bp, Homo sapien
tgtgcacctttaccccacgctgagg

SEQ ID NO: 446727 - DNA, 25 bp, Homo sapien
gtgcacctttaccccacgctgaggc

SEQ ID NO: 446728 - DNA, 25 bp, Homo sapien
tcctgtgcacctttaccccacgctg

SEQ ID NO: 446729 - DNA, 25 bp, Homo sapien
ctgtgcacctttaccccacgctgag

SEQ ID NO: 446730 - DNA, 25 bp, Homo sapien
tccaggcttatcttcccggtctttc

SEQ ID NO: 446731 - DNA, 25 bp, Homo sapien
ccttttgtgttaggctgacccaaga

SEQ ID NO: 446732 - DNA, 25 bp, Homo sapien
tagcattaggagtcattatacccat

SEQ ID NO: 446733 - DNA, 25 bp, Homo sapien
tgacccaagaccacttttccaggct

SEQ ID NO: 446734 - DNA, 25 bp, Homo sapien
tttcggtggcttgccagatttctcg

SEQ ID NO: 446735 - DNA, 25 bp, Homo sapien
tactagtaccatttcggtggcttgc

SEQ ID NO: 446736 - DNA, 25 bp, Homo sapien
ggatggatccagtttactagtacca

SEQ ID NO: 446737 - DNA, 25 bp, Homo sapien
tggagtgctttggatggatccagtt

SEQ ID NO: 446738 - DNA, 25 bp, Homo sapien
gaggcatgcgaactgagaaaaaaag

SEQ ID NO: 446739 - DNA, 25 bp, Homo sapien
gatacaggagactgcctgacgccag

SEQ ID NO: 446740 - DNA, 25 bp, Homo sapien
ccctcggtgccagctctccgcagag

SEQ ID NO: 446741 - DNA, 25 bp, Homo sapien
tccgggctcgcgcttggactgtgtc

SEQ ID NO: 446742 - DNA, 25 bp, Homo sapien
cgtgtgagcgcattgagtggagggc

SEQ ID NO: 446743 - DNA, 25 bp, Homo sapien
tcggccgcgcgctgcttgtgtgcgt

SEQ ID NO: 446744 - DNA, 25 bp, Homo sapien
gaagttgttcgtcctcggggcagcc

SEQ ID NO: 446745 - DNA, 25 bp, Homo sapien
gctcctcggcgtgaggcttggcttt

SEQ ID NO: 446746 - DNA, 25 bp, Homo sapien
tcagaagggtctccagactgatggg

SEQ ID NO: 446747 - DNA, 25 bp, Homo sapien
ctgatgggccggtgatcctatattc

SEQ ID NO: 446748 - DNA, 25 bp, Homo sapien
ccaggtgctggcaagaaatctcaga

SEQ ID NO: 446749 - DNA, 25 bp, Homo sapien
tcttgttgggctgacaactcttctg

SEQ ID NO: 446750 - DNA, 25 bp, Homo sapien
atgaatcgctttaggtcatccgcca

SEQ ID NO: 446751 - DNA, 25 bp, Homo sapien
tgaatcgctttaggtcatccgccat

SEQ ID NO: 446752 - DNA, 25 bp, Homo sapien
gagcccttcaacactttgtaacatt

SEQ ID NO: 446753 - DNA, 25 bp, Homo sapien
tagcatggagcccttcaacactttg

SEQ ID NO: 446754 - DNA, 25 bp, Homo sapien
caacaatagcatggagcccttcaac

SEQ ID NO: 446755 - DNA, 25 bp, Homo sapien
tgacacaacaatagcatggagccct

SEQ ID NO: 446756 - DNA, 25 bp, Homo sapien
tgctctggagcattatcaatggcca

SEQ ID NO: 446757 - DNA, 25 bp, Homo sapien
ctgttgcaagggcaaaagtaggtaa

SEQ ID NO: 446758 - DNA, 25 bp, Homo sapien
taggtaagaaaccaggtctcaaagc

SEQ ID NO: 446759 - DNA, 25 bp, Homo sapien
aaccaggtctcaaagcatgctctgg

SEQ ID NO: 446760 - DNA, 25 bp, Homo sapien
aactgaatcaccaggtaggtgtaac

SEQ ID NO: 446761 - DNA, 25 bp, Homo sapien
caattagttctgtattggcattgct

SEQ ID NO: 446762 - DNA, 25 bp, Homo sapien
accaggtaggtgtaacagtaacaga

SEQ ID NO: 446763 - DNA, 25 bp, Homo sapien
gaatcaccaggtaggtgtaacagta

SEQ ID NO: 446764 - DNA, 25 bp, Homo sapien
taaagacattagcttccacttccag

SEQ ID NO: 446765 - DNA, 25 bp, Homo sapien
aggaagccacggcttacgatgcaga

SEQ ID NO: 446766 - DNA, 25 bp, Homo sapien
aattaaagacattagcttccacttc

SEQ ID NO: 446767 - DNA, 25 bp, Homo sapien
cggcttacgatgcagacatgtctaa

SEQ ID NO: 446768 - DNA, 25 bp, Homo sapien
agagacaatggccctgatgggatgg

SEQ ID NO: 446769 - DNA, 25 bp, Homo sapien
gagacaatggccctgatgggatgga

SEQ ID NO: 446770 - DNA, 25 bp, Homo sapien
gacaatggccctgatgggatggagc

SEQ ID NO: 446771 - DNA, 25 bp, Homo sapien
caatggccctgatgggatggagcct

SEQ ID NO: 446772 - DNA, 25 bp, Homo sapien
caaactcggaaaatgaattaggttg

SEQ ID NO: 446773 - DNA, 25 bp, Homo sapien
tgtgttcttatgcttcagtgtcaca

SEQ ID NO: 446774 - DNA, 25 bp, Homo sapien
gtgcctggaggcttgagcaaactcg

SEQ ID NO: 446775 - DNA, 25 bp, Homo sapien
tcttatgcttcagtgtcacatttca

SEQ ID NO: 446776 - DNA, 25 bp, Homo sapien
taggcctactaccttgtcgaagaaa

SEQ ID NO: 446777 - DNA, 25 bp, Homo sapien
tctgaaattagaaggttgatagtct

SEQ ID NO: 446778 - DNA, 25 bp, Homo sapien
cttcctacaatagacaaagtcatgg

SEQ ID NO: 446779 - DNA, 25 bp, Homo sapien
gatattaattaggtacctgcaaacc

SEQ ID NO: 446780 - DNA, 25 bp, Homo sapien
gataagtcactagctatatactgat

SEQ ID NO: 446781 - DNA, 25 bp, Homo sapien
taactcagcccactagctaatattt

SEQ ID NO: 446782 - DNA, 25 bp, Homo sapien
tctttttcaggttatcaagtatcat

SEQ ID NO: 446783 - DNA, 25 bp, Homo sapien
gtatcattagaactaactcagccca

SEQ ID NO: 446784 - DNA, 25 bp, Homo sapien
ccaaaggaggttgcccaaggctgaa

SEQ ID NO: 446785 - DNA, 25 bp, Homo sapien
tgttgacagacccttaggttgattg

SEQ ID NO: 446786 - DNA, 25 bp, Homo sapien
gattggataacttggctgttgtgaa

SEQ ID NO: 446787 - DNA, 25 bp, Homo sapien
tttcccataatcactatactaattt

SEQ ID NO: 446788 - DNA, 25 bp, Homo sapien
gaattttaacataacgcatgcccct

SEQ ID NO: 446789 - DNA, 25 bp, Homo sapien
gattattgttcgtacatgtgacatc

SEQ ID NO: 446790 - DNA, 25 bp, Homo sapien
agcaaaatttagtgtcctcttagta

SEQ ID NO: 446791 - DNA, 25 bp, Homo sapien
cctcttagtatgattaggcttctca

SEQ ID NO: 446792 - DNA, 25 bp, Homo sapien
ctctttgtgtgctcagagacttgta

SEQ ID NO: 446793 - DNA, 25 bp, Homo sapien
tccgcgctaccagttctcggagaag

SEQ ID NO: 446794 - DNA, 25 bp, Homo sapien
ggcctggcatcatcgccgcttccat

SEQ ID NO: 446795 - DNA, 25 bp, Homo sapien
tcctgacctcggagtttcctggagt

SEQ ID NO: 446796 - DNA, 25 bp, Homo sapien
tcacgccacgggaaatgccaaggtg

SEQ ID NO: 446797 - DNA, 25 bp, Homo sapien
gctgttaaagaaggagcgggtctcc

SEQ ID NO: 446798 - DNA, 25 bp, Homo sapien
tcagaataacaccaacagttcggag

SEQ ID NO: 446799 - DNA, 25 bp, Homo sapien
tcttcactggtcaagggctccgtgc

SEQ ID NO: 446800 - DNA, 25 bp, Homo sapien
tccaggtgagagaatcccagctaag

SEQ ID NO: 446801 - DNA, 25 bp, Homo sapien
tcgcagcgggtatggaactctacag

SEQ ID NO: 446802 - DNA, 25 bp, Homo sapien
agttaaaggaagctgccgtccgcca

SEQ ID NO: 446803 - DNA, 25 bp, Homo sapien
gtctcctgggactgcacgttcacta

SEQ ID NO: 446804 - DNA, 25 bp, Homo sapien
ttaacaaccacggagaccacagatg

SEQ ID NO: 446805 - DNA, 25 bp, Homo sapien
agaccacagatgttttcgtttgcac

SEQ ID NO: 446806 - DNA, 25 bp, Homo sapien
ggagaccacagatgttttcgtttgc

SEQ ID NO: 446807 - DNA, 25 bp, Homo sapien
ctgcaactttaacaaccacggagac

SEQ ID NO: 446808 - DNA, 25 bp, Homo sapien
agaatcatgtcgttcttgctctgaa

SEQ ID NO: 446809 - DNA, 25 bp, Homo sapien
gattggcgtctaaaagccctttgag

SEQ ID NO: 446810 - DNA, 25 bp, Homo sapien
ggtgatgcagcataaatctccacaa

SEQ ID NO: 446811 - DNA, 25 bp, Homo sapien
cataaacgattagaagattggcgtc

SEQ ID NO: 446812 - DNA, 25 bp, Homo sapien
gaaatctcctgtaatactccagagg

SEQ ID NO: 446813 - DNA, 25 bp, Homo sapien
tctcctgtaatactccagaggttcc

SEQ ID NO: 446814 - DNA, 25 bp, Homo sapien
tcctgtaatactccagaggttccac

SEQ ID NO: 446815 - DNA, 25 bp, Homo sapien
tgtaatactccagaggttccacggt

SEQ ID NO: 446816 - DNA, 25 bp, Homo sapien
tgttgacagttgtggttctgaattc

SEQ ID NO: 446817 - DNA, 25 bp, Homo sapien
agttgtggttctgaattcaccaagt

SEQ ID NO: 446818 - DNA, 25 bp, Homo sapien
cagttgtggttctgaattcaccaag

SEQ ID NO: 446819 - DNA, 25 bp, Homo sapien
tgacagttgtggttctgaattcacc

SEQ ID NO: 446820 - DNA, 25 bp, Homo sapien
gctacaaaattatccacataataat

SEQ ID NO: 446821 - DNA, 25 bp, Homo sapien
ctacaaaattatccacataataatt

SEQ ID NO: 446822 - DNA, 25 bp, Homo sapien
cagctacaaaattatccacataata

SEQ ID NO: 446823 - DNA, 25 bp, Homo sapien
agctacaaaattatccacataataa

SEQ ID NO: 446824 - DNA, 25 bp, Homo sapien
taaagcagaaccatctgcggtacta

SEQ ID NO: 446825 - DNA, 25 bp, Homo sapien
gcagaaccatctgcggtactaattg

SEQ ID NO: 446826 - DNA, 25 bp, Homo sapien
cttcactaaagcagaaccatctgcg

SEQ ID NO: 446827 - DNA, 25 bp, Homo sapien
gaaccatctgcggtactaattgaac

SEQ ID NO: 446828 - DNA, 25 bp, Homo sapien
aaggtgtctggaacatagcaagtac

SEQ ID NO: 446829 - DNA, 25 bp, Homo sapien
cacttagtcattaaacttgggtcat

SEQ ID NO: 446830 - DNA, 25 bp, Homo sapien
tacatgtcatcactggctaaaagga

SEQ ID NO: 446831 - DNA, 25 bp, Homo sapien
gtaactcaaatctcaataggacata

SEQ ID NO: 446832 - DNA, 25 bp, Homo sapien
tcagggcctctacggacattggtgc

SEQ ID NO: 446833 - DNA, 25 bp, Homo sapien
gaaaatagtgtctactcctagggac

SEQ ID NO: 446834 - DNA, 25 bp, Homo sapien
tacactacagtgctgctcggcaaga

SEQ ID NO: 446835 - DNA, 25 bp, Homo sapien
cagcttagggaattgtgtcagggcc

SEQ ID NO: 446836 - DNA, 25 bp, Homo sapien
gtagcaaagaaatgtttcctattga

SEQ ID NO: 446837 - DNA, 25 bp, Homo sapien
tatagtagcaaagaaatgtttccta

SEQ ID NO: 446838 - DNA, 25 bp, Homo sapien
ctatagtagcaaagaaatgtttcct

SEQ ID NO: 446839 - DNA, 25 bp, Homo sapien
tagtagcaaagaaatgtttcctatt

SEQ ID NO: 446840 - DNA, 25 bp, Homo sapien
caacgtatcctttatcaggggcatc

SEQ ID NO: 446841 - DNA, 25 bp, Homo sapien
aacgtatcctttatcaggggcatct

SEQ ID NO: 446842 - DNA, 25 bp, Homo sapien
tcctttatcaggggcatctgttgat

SEQ ID NO: 446843 - DNA, 25 bp, Homo sapien
gacaggctcttctgagtagaataca

SEQ ID NO: 446844 - DNA, 25 bp, Homo sapien
ggtctctctaagactcccagccatg

SEQ ID NO: 446845 - DNA, 25 bp, Homo sapien
tatgctatcttttactaacacacgg

SEQ ID NO: 446846 - DNA, 25 bp, Homo sapien
ggttcctaccataaagaacagatgg

SEQ ID NO: 446847 - DNA, 25 bp, Homo sapien
tgaaagaaacactctgcagctatga

SEQ ID NO: 446848 - DNA, 25 bp, Homo sapien
ctgaaagaaacactctgcagctatg

SEQ ID NO: 446849 - DNA, 25 bp, Homo sapien
caggggtggtagatccacattagga

SEQ ID NO: 446850 - DNA, 25 bp, Homo sapien
atgaacacaggggtggtagatccac

SEQ ID NO: 446851 - DNA, 25 bp, Homo sapien
ctcgatgaacacaggggtggtagat

SEQ ID NO: 446852 - DNA, 25 bp, Homo sapien
gaacacaggggtggtagatccacat

SEQ ID NO: 446853 - DNA, 25 bp, Homo sapien
gcaatgaactggctagccacttggg

SEQ ID NO: 446854 - DNA, 25 bp, Homo sapien
tctgcaatgaactggctagccactt

SEQ ID NO: 446855 - DNA, 25 bp, Homo sapien
catctgcaatgaactggctagccac

SEQ ID NO: 446856 - DNA, 25 bp, Homo sapien
atgaactggctagccacttgggcct

SEQ ID NO: 446857 - DNA, 25 bp, Homo sapien
gtaataaaattttatcatggtgctc

SEQ ID NO: 446858 - DNA, 25 bp, Homo sapien
aataaaattttatcatggtgctctt

SEQ ID NO: 446859 - DNA, 25 bp, Homo sapien
ctgaaaatgaattgtaataaaattt

SEQ ID NO: 446860 - DNA, 25 bp, Homo sapien
taaaattttatcatggtgctcttac

SEQ ID NO: 446861 - DNA, 25 bp, Homo sapien
cttgatttaatgacaaagagcaaag

SEQ ID NO: 446862 - DNA, 25 bp, Homo sapien
agagcaaagtaaatgaaaagcccaa

SEQ ID NO: 446863 - DNA, 25 bp, Homo sapien
gacaaagagcaaagtaaatgaaaag

SEQ ID NO: 446864 - DNA, 25 bp, Homo sapien
caaagagcaaagtaaatgaaaagcc

SEQ ID NO: 446865 - DNA, 25 bp, Homo sapien
agaaatgcataagtcctctttctga

SEQ ID NO: 446866 - DNA, 25 bp, Homo sapien
gaaatgcataagtcctctttctgaa

SEQ ID NO: 446867 - DNA, 25 bp, Homo sapien
gagaaatgcataagtcctctttctg

SEQ ID NO: 446868 - DNA, 25 bp, Homo sapien
tcccttaatggagctacagatgtag

SEQ ID NO: 446869 - DNA, 25 bp, Homo sapien
tttaaaaggtagctcccagacaggc

SEQ ID NO: 446870 - DNA, 25 bp, Homo sapien
tgccaggctgacaaatgacaaacat

SEQ ID NO: 446871 - DNA, 25 bp, Homo sapien
tatgatctagtaggaaagcctctct

SEQ ID NO: 446872 - DNA, 25 bp, Homo sapien
gagatcacagtatagaacccagaca

SEQ ID NO: 446873 - DNA, 25 bp, Homo sapien
tcgtagtcgaggcaaatgagatcac

SEQ ID NO: 446874 - DNA, 25 bp, Homo sapien
ttaaagccgctagcaaagcaaatgt

SEQ ID NO: 446875 - DNA, 25 bp, Homo sapien
caaaatgtttccatcgtagtcgagg

SEQ ID NO: 446876 - DNA, 25 bp, Homo sapien
gagtgagagagccaggaatctactt

SEQ ID NO: 446877 - DNA, 25 bp, Homo sapien
attcacctaatcaatactcttacaa

SEQ ID NO: 446878 - DNA, 25 bp, Homo sapien
ggaatctactttaaccagtctatta

SEQ ID NO: 446879 - DNA, 25 bp, Homo sapien
tttttaaatttatatctgccaggta

SEQ ID NO: 446880 - DNA, 25 bp, Homo sapien
tctttaaattaacttctgctaaagc

SEQ ID NO: 446881 - DNA, 25 bp, Homo sapien
ttaaattaacttctgctaaagcagt

SEQ ID NO: 446882 - DNA, 25 bp, Homo sapien
caactggatgagttctaatattcaa

SEQ ID NO: 446883 - DNA, 25 bp, Homo sapien
gaagttgcaactggatgagttctaa

SEQ ID NO: 446884 - DNA, 25 bp, Homo sapien
actattgttaaggttcctgttgcca

SEQ ID NO: 446885 - DNA, 25 bp, Homo sapien
cagtagggtcaactataagcaaagt

SEQ ID NO: 446886 - DNA, 25 bp, Homo sapien
acaacagagtttgccttcctcatcc

SEQ ID NO: 446887 - DNA, 25 bp, Homo sapien
tcctcctctccagtagggtcaacta

SEQ ID NO: 446888 - DNA, 25 bp, Homo sapien
catctacatatgtttaggactgaag

SEQ ID NO: 446889 - DNA, 25 bp, Homo sapien
tccctaatttaaggctcacactgag

SEQ ID NO: 446890 - DNA, 25 bp, Homo sapien
taaatcagggtacagtctcaagatc

SEQ ID NO: 446891 - DNA, 25 bp, Homo sapien
catattctatttggccctccctaat

SEQ ID NO: 446892 - DNA, 25 bp, Homo sapien
gtgtcttgtaactgctcggctcata

SEQ ID NO: 446893 - DNA, 25 bp, Homo sapien
gtaactgctcggctcatacagtcct

SEQ ID NO: 446894 - DNA, 25 bp, Homo sapien
ctcatacagtcctgaagtttagctc

SEQ ID NO: 446895 - DNA, 25 bp, Homo sapien
catacagtcctgaagtttagctcca

SEQ ID NO: 446896 - DNA, 25 bp, Homo sapien
tataaaacgtttgtgcacagtgtta

SEQ ID NO: 446897 - DNA, 25 bp, Homo sapien
agtataaaacgtttgtgcacagtgt

SEQ ID NO: 446898 - DNA, 25 bp, Homo sapien
tttagtataaaacgtttgtgcacag

SEQ ID NO: 446899 - DNA, 25 bp, Homo sapien
tatttagtataaaacgtttgtgcac

SEQ ID NO: 446900 - DNA, 25 bp, Homo sapien
actagggttggtttgcctaagtcat

SEQ ID NO: 446901 - DNA, 25 bp, Homo sapien
aaactttatacagaagcacaacctt

SEQ ID NO: 446902 - DNA, 25 bp, Homo sapien
agtattttacattgctagatgtaca

SEQ ID NO: 446903 - DNA, 25 bp, Homo sapien
ctagggttggtttgcctaagtcatt

SEQ ID NO: 446904 - DNA, 25 bp, Homo sapien
cataatcttttgtctcgttctggta

SEQ ID NO: 446905 - DNA, 25 bp, Homo sapien
tatccactttactaggttaccagag

SEQ ID NO: 446906 - DNA, 25 bp, Homo sapien
tcccttgcaaccagtaaacaggaaa

SEQ ID NO: 446907 - DNA, 25 bp, Homo sapien
ttgatagtggattaagagctttgac

SEQ ID NO: 446908 - DNA, 25 bp, Homo sapien
tacacagttactgttaaagatgcag

SEQ ID NO: 446909 - DNA, 25 bp, Homo sapien
tgtcagtgctaagtaagattccatt

SEQ ID NO: 446910 - DNA, 25 bp, Homo sapien
gatttttaggtgatatactgcatcc

SEQ ID NO: 446911 - DNA, 25 bp, Homo sapien
catgtgtagaaattaacacttgcag

SEQ ID NO: 446912 - DNA, 25 bp, Homo sapien
tttcaggtgtacgccaccacacccg

SEQ ID NO: 446913 - DNA, 25 bp, Homo sapien
tctctctatgtcgtccaggctgcag

SEQ ID NO: 446914 - DNA, 25 bp, Homo sapien
cgaactccagggctgaagcaatcca

SEQ ID NO: 446915 - DNA, 25 bp, Homo sapien
cacacccggctgatttttgtgtttt

SEQ ID NO: 446916 - DNA, 25 bp, Homo sapien
tctccttggctgctcagtccttttt

SEQ ID NO: 446917 - DNA, 25 bp, Homo sapien
tccttggctgctcagtccttttttc

SEQ ID NO: 446918 - DNA, 25 bp, Homo sapien
cttggctgctcagtccttttttcca

SEQ ID NO: 446919 - DNA, 25 bp, Homo sapien
ctctccttggctgctcagtcctttt

SEQ ID NO: 446920 - DNA, 25 bp, Homo sapien
gtcccagataagaagcattgcttgc

SEQ ID NO: 446921 - DNA, 25 bp, Homo sapien
gggcctgaagacagtcccagataag

SEQ ID NO: 446922 - DNA, 25 bp, Homo sapien
agaagcattgcttgcctcctgctgc

SEQ ID NO: 446923 - DNA, 25 bp, Homo sapien
gatgggcctgaagacagtcccagat

SEQ ID NO: 446924 - DNA, 25 bp, Homo sapien
cacctttggactcacagcgctgatc

SEQ ID NO: 446925 - DNA, 25 bp, Homo sapien
gaccgaggtatgtttcacacaaagc

SEQ ID NO: 446926 - DNA, 25 bp, Homo sapien
gctgatcagccaagaccgaggtatg

SEQ ID NO: 446927 - DNA, 25 bp, Homo sapien
tcacagcgctgatcagccaagaccg

SEQ ID NO: 446928 - DNA, 25 bp, Homo sapien
tgaagcaaccaatgttagctgctgc

SEQ ID NO: 446929 - DNA, 25 bp, Homo sapien
taatgtccaggaagtaatgtgccct

SEQ ID NO: 446930 - DNA, 25 bp, Homo sapien
cattttgcaactgggtgctgaagta

SEQ ID NO: 446931 - DNA, 25 bp, Homo sapien
gtgccctttgatgaagcaaccaatg

SEQ ID NO: 446932 - DNA, 25 bp, Homo sapien
cagagactgggatgactgcctggcc

SEQ ID NO: 446933 - DNA, 25 bp, Homo sapien
tccctggtagctcctaaaagtgctg

SEQ ID NO: 446934 - DNA, 25 bp, Homo sapien
gaagtgagcagaggttaactcccaa

SEQ ID NO: 446935 - DNA, 25 bp, Homo sapien
gccaactctcaccagtggaatgtaa

SEQ ID NO: 446936 - DNA, 25 bp, Homo sapien
ctcctattatcctgtgcctgcagtt

SEQ ID NO: 446937 - DNA, 25 bp, Homo sapien
caccgggatctcctattatcctgtg

SEQ ID NO: 446938 - DNA, 25 bp, Homo sapien
gtaggctctcaggtgttcgcccctt

SEQ ID NO: 446939 - DNA, 25 bp, Homo sapien
acagccttccaactccaccgggatc

SEQ ID NO: 446940 - DNA, 25 bp, Homo sapien
gcaccatcatctacccctgggtatg

SEQ ID NO: 446941 - DNA, 25 bp, Homo sapien
tgtatgacagccagtgcaccatcat

SEQ ID NO: 446942 - DNA, 25 bp, Homo sapien
gcaacacagtgccagtgtatgacag

SEQ ID NO: 446943 - DNA, 25 bp, Homo sapien
cacagtgccagtgtatgacagccag

SEQ ID NO: 446944 - DNA, 25 bp, Homo sapien
ggaccaggcaacacataccgtacag

SEQ ID NO: 446945 - DNA, 25 bp, Homo sapien
tatgttagccgaccagatgatcagc

SEQ ID NO: 446946 - DNA, 25 bp, Homo sapien
gaagataaacacctcattggcactg

SEQ ID NO: 446947 - DNA, 25 bp, Homo sapien
tggtttggccaaaaagtacagagac

SEQ ID NO: 446948 - DNA, 25 bp, Homo sapien
agaggagggcatccgagagggggag

SEQ ID NO: 446949 - DNA, 25 bp, Homo sapien
gcagaggagggcatccgagaggggg

SEQ ID NO: 446950 - DNA, 25 bp, Homo sapien
gagatggcagaggagggcatccgag

SEQ ID NO: 446951 - DNA, 25 bp, Homo sapien
gatggcagaggagggcatccgagag

SEQ ID NO: 446952 - DNA, 25 bp, Homo sapien
gagggcatccacgttgagtagcagc

SEQ ID NO: 446953 - DNA, 25 bp, Homo sapien
cagctggtaaaggatgtcggattct

SEQ ID NO: 446954 - DNA, 25 bp, Homo sapien
gatgtctccgcataaatgctggctg

SEQ ID NO: 446955 - DNA, 25 bp, Homo sapien
caatattgagtgttggagcccatga

SEQ ID NO: 446956 - DNA, 25 bp, Homo sapien
gatagcacagacctttgtgcctaag

SEQ ID NO: 446957 - DNA, 25 bp, Homo sapien
gtgcctaagaggtctgcccctccag

SEQ ID NO: 446958 - DNA, 25 bp, Homo sapien
gctgttgcagttgatcccaagcgca

SEQ ID NO: 446959 - DNA, 25 bp, Homo sapien
cgtgcaggtctgtcgttcaacaaga

SEQ ID NO: 446960 - DNA, 25 bp, Homo sapien
ttatttgacctctggtaatcctctc

SEQ ID NO: 446961 - DNA, 25 bp, Homo sapien
tatttgacctctggtaatcctctca

SEQ ID NO: 446962 - DNA, 25 bp, Homo sapien
atttgacctctggtaatcctctcaa

SEQ ID NO: 446963 - DNA, 25 bp, Homo sapien
aaatggactaccgataatgtagaac

SEQ ID NO: 446964 - DNA, 25 bp, Homo sapien
aatgaatcttaaaaccatgatgctg

SEQ ID NO: 446965 - DNA, 25 bp, Homo sapien
gaacaataggcgcatgaataaacaa

SEQ ID NO: 446966 - DNA, 25 bp, Homo sapien
gaaacgacccaaatgcgaacaatag

SEQ ID NO: 446967 - DNA, 25 bp, Homo sapien
cctccagcaaagcagaggaatccat

SEQ ID NO: 446968 - DNA, 25 bp, Homo sapien
atacttcctccagcaaagcagagga

SEQ ID NO: 446969 - DNA, 25 bp, Homo sapien
catacttcctccagcaaagcagagg

SEQ ID NO: 446970 - DNA, 25 bp, Homo sapien
cttcctccagcaaagcagaggaatc

SEQ ID NO: 446971 - DNA, 25 bp, Homo sapien
ctctccccatgcaatattattccct

SEQ ID NO: 446972 - DNA, 25 bp, Homo sapien
tctccccatgcaatattattccctt

SEQ ID NO: 446973 - DNA, 25 bp, Homo sapien
ctccccatgcaatattattcccttc

SEQ ID NO: 446974 - DNA, 25 bp, Homo sapien
cctctccccatgcaatattattccc

SEQ ID NO: 446975 - DNA, 25 bp, Homo sapien
gacagcacatagctgcagaacctga

SEQ ID NO: 446976 - DNA, 25 bp, Homo sapien
atgcagaggacagcacatagctgca

SEQ ID NO: 446977 - DNA, 25 bp, Homo sapien
ctcagttcctcagaaattgggtgtt

SEQ ID NO: 446978 - DNA, 25 bp, Homo sapien
cactcagttcctcagaaattgggtg

SEQ ID NO: 446979 - DNA, 25 bp, Homo sapien
tgctctcaaaaagtccatgggttct

SEQ ID NO: 446980 - DNA, 25 bp, Homo sapien
tcattccgtttttggaatgtatgtt

SEQ ID NO: 446981 - DNA, 25 bp, Homo sapien
ctctcaaaaagtccatgggttcttt

SEQ ID NO: 446982 - DNA, 25 bp, Homo sapien
ttgctctcaaaaagtccatgggttc

SEQ ID NO: 446983 - DNA, 25 bp, Homo sapien
caaatggtagtctgtttttggctct

SEQ ID NO: 446984 - DNA, 25 bp, Homo sapien
tgttagaaggtaaattgtgccacag

SEQ ID NO: 446985 - DNA, 25 bp, Homo sapien
tttaggttcgggtacatctgcaggt

SEQ ID NO: 446986 - DNA, 25 bp, Homo sapien
catatgcatgcatgcgtccttatgg

SEQ ID NO: 446987 - DNA, 25 bp, Homo sapien
cacctagttggaacacacaggccac

SEQ ID NO: 446988 - DNA, 25 bp, Homo sapien
tctctggtgcctcacctagttggaa

SEQ ID NO: 446989 - DNA, 25 bp, Homo sapien
tactttccgtcagtgagttggtgtt

SEQ ID NO: 446990 - DNA, 25 bp, Homo sapien
tttactttccgtcagtgagttggtg

SEQ ID NO: 446991 - DNA, 25 bp, Homo sapien
tgtttctgatcgtgtcaactttaag

SEQ ID NO: 446992 - DNA, 25 bp, Homo sapien
tgtcaactttaagtcatccaaactg

SEQ ID NO: 446993 - DNA, 25 bp, Homo sapien
caggggccagcttagacttttgtta

SEQ ID NO: 446994 - DNA, 25 bp, Homo sapien
catgaggtattattgattccagatc

SEQ ID NO: 446995 - DNA, 25 bp, Homo sapien
ggtattgcacaattccggatgagac

SEQ ID NO: 446996 - DNA, 25 bp, Homo sapien
gccacagttccagcataggagtaaa

SEQ ID NO: 446997 - DNA, 25 bp, Homo sapien
gtgccaccctccatgctaagtgttt

SEQ ID NO: 446998 - DNA, 25 bp, Homo sapien
aagtataccattgcctaaaggaagg

SEQ ID NO: 446999 - DNA, 25 bp, Homo sapien
caatgctcaagcgtggaacgatcat

SEQ ID NO: 447000 - DNA, 25 bp, Homo sapien
atgagctgtgctgcgcctccactgg

SEQ ID NO: 447001 - DNA, 25 bp, Homo sapien
agctcccctgacatgagctgtgctg

SEQ ID NO: 447002 - DNA, 25 bp, Homo sapien
tcccctgacatgagctgtgctgcgc

SEQ ID NO: 447003 - DNA, 25 bp, Homo sapien
ctgacatgagctgtgctgcgcctcc

SEQ ID NO: 447004 - DNA, 25 bp, Homo sapien
ctgctttggactcttgtgggccttt

SEQ ID NO: 447005 - DNA, 25 bp, Homo sapien
cactaggtgcatagtagtctctgcc

SEQ ID NO: 447006 - DNA, 25 bp, Homo sapien
gatagacactaggtgcatagtagtc

SEQ ID NO: 447007 - DNA, 25 bp, Homo sapien
gacactaggtgcatagtagtctctg

SEQ ID NO: 447008 - DNA, 25 bp, Homo sapien
aagagatagacactaggtgcatagt

SEQ ID NO: 447009 - DNA, 25 bp, Homo sapien
gggagtctgtccagggctcagagag

SEQ ID NO: 447010 - DNA, 25 bp, Homo sapien
caaacctgagatgggctgtttgctg

SEQ ID NO: 447011 - DNA, 25 bp, Homo sapien
tgaagctgtgctccaaacctgagat

SEQ ID NO: 447012 - DNA, 25 bp, Homo sapien
tttcaaaagtattgctgaagctgtg

SEQ ID NO: 447013 - DNA, 25 bp, Homo sapien
gttgctcagaaccaaggtcactgtg

SEQ ID NO: 447014 - DNA, 25 bp, Homo sapien
tcagtccagggtagtcacagcaggt

SEQ ID NO: 447015 - DNA, 25 bp, Homo sapien
aacggccagactctttgtatttgga

SEQ ID NO: 447016 - DNA, 25 bp, Homo sapien
tctggactggtcctgatctggttgc

SEQ ID NO: 447017 - DNA, 25 bp, Homo sapien
gttaccaacactggagcagaggcca

SEQ ID NO: 447018 - DNA, 25 bp, Homo sapien
cggagggagcagaatagccggtaca

SEQ ID NO: 447019 - DNA, 25 bp, Homo sapien
tgtttctgctcccgcaaaccattgg

SEQ ID NO: 447020 - DNA, 25 bp, Homo sapien
agggttaccaacactggagcagagg

SEQ ID NO: 447021 - DNA, 25 bp, Homo sapien
tgccttgtgccccctctttctccac

SEQ ID NO: 447022 - DNA, 25 bp, Homo sapien
ctgccttgtgccccctctttctcca

SEQ ID NO: 447023 - DNA, 25 bp, Homo sapien
tttctccaccccacagttcccgcat

SEQ ID NO: 447024 - DNA, 25 bp, Homo sapien
ctctttctccaccccacagttcccg

SEQ ID NO: 447025 - DNA, 25 bp, Homo sapien
agagtggccctctctagcaagctca

SEQ ID NO: 447026 - DNA, 25 bp, Homo sapien
tgtccaggcagtccactctctctgg

SEQ ID NO: 447027 - DNA, 25 bp, Homo sapien
tctctctggcgtggccatacacctt

SEQ ID NO: 447028 - DNA, 25 bp, Homo sapien
tcagctcccatggatgctaacaacc

SEQ ID NO: 447029 - DNA, 25 bp, Homo sapien
gtaagtgatcatacagctgaggaga

SEQ ID NO: 447030 - DNA, 25 bp, Homo sapien
gaaagcatcacagtgaccagtcctc

SEQ ID NO: 447031 - DNA, 25 bp, Homo sapien
aatagttacttgctccttgtcggac

SEQ ID NO: 447032 - DNA, 25 bp, Homo sapien
tcaaaggacttaaaagctagcattc

SEQ ID NO: 447033 - DNA, 25 bp, Homo sapien
gtgatggcattaatagcctccagga

SEQ ID NO: 447034 - DNA, 25 bp, Homo sapien
gatggcattaatagcctccaggaga

SEQ ID NO: 447035 - DNA, 25 bp, Homo sapien
ggcattaatagcctccaggagatgc

SEQ ID NO: 447036 - DNA, 25 bp, Homo sapien
atggcattaatagcctccaggagat

SEQ ID NO: 447037 - DNA, 25 bp, Homo sapien
taagatgtctctaaagcagcaatta

SEQ ID NO: 447038 - DNA, 25 bp, Homo sapien
aagtcaatgtgcttttgaagatcca

SEQ ID NO: 447039 - DNA, 25 bp, Homo sapien
ttttgtagtatagaactcagcacgc

SEQ ID NO: 447040 - DNA, 25 bp, Homo sapien
caataattagggtaatgtgtccacc

SEQ ID NO: 447041 - DNA, 25 bp, Homo sapien
gcaaaggtaggcaccaagggtaaga

SEQ ID NO: 447042 - DNA, 25 bp, Homo sapien
caagggtaagaacccattcatgttg

SEQ ID NO: 447043 - DNA, 25 bp, Homo sapien
tcatgtcctggcaaggcaaaggtag

SEQ ID NO: 447044 - DNA, 25 bp, Homo sapien
taatgcggcttctaaatcaggtggt

SEQ ID NO: 447045 - DNA, 25 bp, Homo sapien
aatcattgaaatttaatcgtaaggc

SEQ ID NO: 447046 - DNA, 25 bp, Homo sapien
cattgaaatttaatcgtaaggccat

SEQ ID NO: 447047 - DNA, 25 bp, Homo sapien
ctccagacaaatcattgaaatttaa

SEQ ID NO: 447048 - DNA, 25 bp, Homo sapien
cagacaaatcattgaaatttaatcg

SEQ ID NO: 447049 - DNA, 25 bp, Homo sapien
ccgtggtctgagacttccgagttcg

SEQ ID NO: 447050 - DNA, 25 bp, Homo sapien
ttaggggctgctcaaaccactggca

SEQ ID NO: 447051 - DNA, 25 bp, Homo sapien
acatctgattctgccgtggtctgag

SEQ ID NO: 447052 - DNA, 25 bp, Homo sapien
atattctggacatctgattctgccg

SEQ ID NO: 447053 - DNA, 25 bp, Homo sapien
actgttatcactttcagatggggca

SEQ ID NO: 447054 - DNA, 25 bp, Homo sapien
gcctaggtctacaatactgttatca

SEQ ID NO: 447055 - DNA, 25 bp, Homo sapien
ctggttcagtgcctaggtctacaat

SEQ ID NO: 447056 - DNA, 25 bp, Homo sapien
tcactttcagatggggcatgaagct

SEQ ID NO: 447057 - DNA, 25 bp, Homo sapien
ttcatccttttccataaaagtgtga

SEQ ID NO: 447058 - DNA, 25 bp, Homo sapien
tcattcatccttttccataaaagtg

SEQ ID NO: 447059 - DNA, 25 bp, Homo sapien
cattcatccttttccataaaagtgt

SEQ ID NO: 447060 - DNA, 25 bp, Homo sapien
tcatccttttccataaaagtgtgac

SEQ ID NO: 447061 - DNA, 25 bp, Homo sapien
actactggtcttggtgaacatctat

SEQ ID NO: 447062 - DNA, 25 bp, Homo sapien
ttgagaactactggtcttggtgaac

SEQ ID NO: 447063 - DNA, 25 bp, Homo sapien
tactggtcttggtgaacatctattc

SEQ ID NO: 447064 - DNA, 25 bp, Homo sapien
agaactactggtcttggtgaacatc

SEQ ID NO: 447065 - DNA, 25 bp, Homo sapien
tactagatcttcaactggaacatct

SEQ ID NO: 447066 - DNA, 25 bp, Homo sapien
ctttaattactagatcttcaactgg

SEQ ID NO: 447067 - DNA, 25 bp, Homo sapien
ggaacatctcggtagacacattggg

SEQ ID NO: 447068 - DNA, 25 bp, Homo sapien
tcttcaactggaacatctcggtaga

SEQ ID NO: 447069 - DNA, 25 bp, Homo sapien
catcctttgtaatgatgacatccat

SEQ ID NO: 447070 - DNA, 25 bp, Homo sapien
gacatccatgtacactccttgcaaa

SEQ ID NO: 447071 - DNA, 25 bp, Homo sapien
aaagctgctcctttattcgtgatct

SEQ ID NO: 447072 - DNA, 25 bp, Homo sapien
ctgtgtaatctctgcaaacccaaag

SEQ ID NO: 447073 - DNA, 25 bp, Homo sapien
gtaaattaaggatccagcacagtgg

SEQ ID NO: 447074 - DNA, 25 bp, Homo sapien
gactttgggactcgcactttctgaa

SEQ ID NO: 447075 - DNA, 25 bp, Homo sapien
gaggccccataatcatcccagaagg

SEQ ID NO: 447076 - DNA, 25 bp, Homo sapien
tcgggtccctcctaggatacatggg

SEQ ID NO: 447077 - DNA, 25 bp, Homo sapien
gaccgagccttgtatgtatgttatg

SEQ ID NO: 447078 - DNA, 25 bp, Homo sapien
catgagggaaattgtggagttagcc

SEQ ID NO: 447079 - DNA, 25 bp, Homo sapien
gttatcccattgaaaagaccgagcc

SEQ ID NO: 447080 - DNA, 25 bp, Homo sapien
tgagagccaagttgacttcaggaac

SEQ ID NO: 447081 - DNA, 25 bp, Homo sapien
gaaggtaaagcgctttagcggtaca

SEQ ID NO: 447082 - DNA, 25 bp, Homo sapien
tgtgccttagtatcctacagagaca

SEQ ID NO: 447083 - DNA, 25 bp, Homo sapien
gttcaacacctggacatgagaagat

SEQ ID NO: 447084 - DNA, 25 bp, Homo sapien
tctgactgcctgaacatattaccac

SEQ ID NO: 447085 - DNA, 25 bp, Homo sapien
tgtgggtcaacttgggcaaatgatt

SEQ ID NO: 447086 - DNA, 25 bp, Homo sapien
atgtgggtcaacttgggcaaatgat

SEQ ID NO: 447087 - DNA, 25 bp, Homo sapien
aaatgtgggtcaacttgggcaaatg

SEQ ID NO: 447088 - DNA, 25 bp, Homo sapien
aatgtgggtcaacttgggcaaatga

SEQ ID NO: 447089 - DNA, 25 bp, Homo sapien
ccaggacagctccatagtaaccatt

SEQ ID NO: 447090 - DNA, 25 bp, Homo sapien
ccatagtaaccattccaatgatgca

SEQ ID NO: 447091 - DNA, 25 bp, Homo sapien
tgtcttcactattgctatagaagag

SEQ ID NO: 447092 - DNA, 25 bp, Homo sapien
ctatagaagagtatcccaggacagc

SEQ ID NO: 447093 - DNA, 25 bp, Homo sapien
gaaggaggaagcgtttaccatacac

SEQ ID NO: 447094 - DNA, 25 bp, Homo sapien
gaccacaagattgtgatacttgaag

SEQ ID NO: 447095 - DNA, 25 bp, Homo sapien
ccacgaagattacgtgaccacaaga

SEQ ID NO: 447096 - DNA, 25 bp, Homo sapien
tacgtattttccgtagtgctctggg

SEQ ID NO: 447097 - DNA, 25 bp, Homo sapien
ggctcttttcagagtaggtccataa

SEQ ID NO: 447098 - DNA, 25 bp, Homo sapien
taaagcaatgcatagcatctttcct

SEQ ID NO: 447099 - DNA, 25 bp, Homo sapien
tagaacttgacctagtcataatgtg

SEQ ID NO: 447100 - DNA, 25 bp, Homo sapien
gacctggatgttaaacctaaagcaa

SEQ ID NO: 447101 - DNA, 25 bp, Homo sapien
tatgcctgaaagtgtacatgcctct

SEQ ID NO: 447102 - DNA, 25 bp, Homo sapien
tatgcagaagactagccacagacgt

SEQ ID NO: 447103 - DNA, 25 bp, Homo sapien
ttgaggcaataagtcaggagctgag

SEQ ID NO: 447104 - DNA, 25 bp, Homo sapien
tgttgccaccgtcagtttcagtgca

SEQ ID NO: 447105 - DNA, 25 bp, Homo sapien
gaggagagggatgctgacttttaaa

SEQ ID NO: 447106 - DNA, 25 bp, Homo sapien
agattctctgccagaggagagggat

SEQ ID NO: 447107 - DNA, 25 bp, Homo sapien
atagattctctgccagaggagaggg

SEQ ID NO: 447108 - DNA, 25 bp, Homo sapien
ccagaggagagggatgctgactttt

SEQ ID NO: 447109 - DNA, 25 bp, Homo sapien
tatgctcgatgtcttctatgccttc

SEQ ID NO: 447110 - DNA, 25 bp, Homo sapien
gatgtcttctatgccttccttgcaa

SEQ ID NO: 447111 - DNA, 25 bp, Homo sapien
tgatgatattatgctcgatgtcttc

SEQ ID NO: 447112 - DNA, 25 bp, Homo sapien
gatattatgctcgatgtcttctatg

SEQ ID NO: 447113 - DNA, 25 bp, Homo sapien
tccttcatagttatgttcatttctt

SEQ ID NO: 447114 - DNA, 25 bp, Homo sapien
aatgcacaggccattatttccttca

SEQ ID NO: 447115 - DNA, 25 bp, Homo sapien
atgcacaggccattatttccttcat

SEQ ID NO: 447116 - DNA, 25 bp, Homo sapien
gattcagtaaagttgaatgaaggaa

SEQ ID NO: 447117 - DNA, 25 bp, Homo sapien
tcagattcagtaaagttgaatgaag

SEQ ID NO: 447118 - DNA, 25 bp, Homo sapien
tgtcagattcagtaaagttgaatga

SEQ ID NO: 447119 - DNA, 25 bp, Homo sapien
cagattcagtaaagttgaatgaagg

SEQ ID NO: 447120 - DNA, 25 bp, Homo sapien
aggaggagagtatcttttcattttt

SEQ ID NO: 447121 - DNA, 25 bp, Homo sapien
taagtaaagaaccactcacaggaag

SEQ ID NO: 447122 - DNA, 25 bp, Homo sapien
catttttaagatcgtcagctgccca

SEQ ID NO: 447123 - DNA, 25 bp, Homo sapien
tctagacccaaaggcaaggctaagt

SEQ ID NO: 447124 - DNA, 25 bp, Homo sapien
tctactactcctgtcagtatcttgg

SEQ ID NO: 447125 - DNA, 25 bp, Homo sapien
gtctgcacacgtcttcctttctcta

SEQ ID NO: 447126 - DNA, 25 bp, Homo sapien
cctgtcagtatcttgggtgttctca

SEQ ID NO: 447127 - DNA, 25 bp, Homo sapien
gtgacttctgctacgtcactgtctg

SEQ ID NO: 447128 - DNA, 25 bp, Homo sapien
tcatgagtactgatgaccaggacca

SEQ ID NO: 447129 - DNA, 25 bp, Homo sapien
aagttgttcttgataataatttcag

SEQ ID NO: 447130 - DNA, 25 bp, Homo sapien
ccctggtctgcttgaagttgttctt

SEQ ID NO: 447131 - DNA, 25 bp, Homo sapien
ttttatatttgacagaaaggcatta

SEQ ID NO: 447132 - DNA, 25 bp, Homo sapien
aatctaggtcctggcaatgggctgt

SEQ ID NO: 447133 - DNA, 25 bp, Homo sapien
cctggcaatgggctgtagtgggacc

SEQ ID NO: 447134 - DNA, 25 bp, Homo sapien
ggcaatgggctgtagtgggacctca

SEQ ID NO: 447135 - DNA, 25 bp, Homo sapien
ctaggtcctggcaatgggctgtagt

SEQ ID NO: 447136 - DNA, 25 bp, Homo sapien
cccttctatgaagggcgtgagcctc

SEQ ID NO: 447137 - DNA, 25 bp, Homo sapien
tcacctctgagatacccttctatga

SEQ ID NO: 447138 - DNA, 25 bp, Homo sapien
tctgagatacccttctatgaagggc

SEQ ID NO: 447139 - DNA, 25 bp, Homo sapien
gagatacccttctatgaagggcgtg

SEQ ID NO: 447140 - DNA, 25 bp, Homo sapien
tcaacccaaagtctgatgacttggt

SEQ ID NO: 447141 - DNA, 25 bp, Homo sapien
tttgactttgttcctcaacactaca

SEQ ID NO: 447142 - DNA, 25 bp, Homo sapien
tgggctgacatccttaatctgtccc

SEQ ID NO: 447143 - DNA, 25 bp, Homo sapien
gataaaattctagactcagtggctg

SEQ ID NO: 447144 - DNA, 25 bp, Homo sapien
tccattggaatttgccgggcgtgct

SEQ ID NO: 447145 - DNA, 25 bp, Homo sapien
cttcagcccgaagattgcaactttg

SEQ ID NO: 447146 - DNA, 25 bp, Homo sapien
tgcgtgggctccagcttcgatcgtt

SEQ ID NO: 447147 - DNA, 25 bp, Homo sapien
tccaaaactcagcagcgactaaggg

SEQ ID NO: 447148 - DNA, 25 bp, Homo sapien
ggaccttaaggatgccccgtattga

SEQ ID NO: 447149 - DNA, 25 bp, Homo sapien
tgacacagggctgtattactaggaa

SEQ ID NO: 447150 - DNA, 25 bp, Homo sapien
tgaggacataattagagatacagac

SEQ ID NO: 447151 - DNA, 25 bp, Homo sapien
caaaaatgcttgtgtaacggctttc

SEQ ID NO: 447152 - DNA, 25 bp, Homo sapien
taggcaggagtaactaattctagga

SEQ ID NO: 447153 - DNA, 25 bp, Homo sapien
gagtaactaattctaggatacatac

SEQ ID NO: 447154 - DNA, 25 bp, Homo sapien
caggagtaactaattctaggataca

SEQ ID NO: 447155 - DNA, 25 bp, Homo sapien
ggcaggagtaactaattctaggata

SEQ ID NO: 447156 - DNA, 25 bp, Homo sapien
tttcagttacagcaatggcatctgg

SEQ ID NO: 447157 - DNA, 25 bp, Homo sapien
ttttttcagttacagcaatggcatc

SEQ ID NO: 447158 - DNA, 25 bp, Homo sapien
ttcagttacagcaatggcatctggg

SEQ ID NO: 447159 - DNA, 25 bp, Homo sapien
atggcatctgggccaacaagtttaa

SEQ ID NO: 447160 - DNA, 25 bp, Homo sapien
cattgaattaccatccccggagaaa

SEQ ID NO: 447161 - DNA, 25 bp, Homo sapien
gcaatgcattgaattaccatccccg

SEQ ID NO: 447162 - DNA, 25 bp, Homo sapien
tgcattgaattaccatccccggaga

SEQ ID NO: 447163 - DNA, 25 bp, Homo sapien
aaagggcagatgtggagcggctctc

SEQ ID NO: 447164 - DNA, 25 bp, Homo sapien
gagctcagtatcgtgtcataatggg

SEQ ID NO: 447165 - DNA, 25 bp, Homo sapien
ccattttgagctcagtatcgtgtca

SEQ ID NO: 447166 - DNA, 25 bp, Homo sapien
cagggtggccagtagcatctcagca

SEQ ID NO: 447167 - DNA, 25 bp, Homo sapien
tcaattcgttctttcttcgtcctcc

SEQ ID NO: 447168 - DNA, 25 bp, Homo sapien
gatattgtacttcgggacatttaga

SEQ ID NO: 447169 - DNA, 25 bp, Homo sapien
attgtacttcgggacatttagaggg

SEQ ID NO: 447170 - DNA, 25 bp, Homo sapien
ctgttgatattgtacttcgggacat

SEQ ID NO: 447171 - DNA, 25 bp, Homo sapien
gttgatattgtacttcgggacattt

SEQ ID NO: 447172 - DNA, 25 bp, Homo sapien
cccaacccaaacacatgtaacaact

SEQ ID NO: 447173 - DNA, 25 bp, Homo sapien
ttgtaactcacatatcaagtgcccc

SEQ ID NO: 447174 - DNA, 25 bp, Homo sapien
tgaagatcccctaatgcctgcttgc

SEQ ID NO: 447175 - DNA, 25 bp, Homo sapien
taggctttaagtggcctacagctcc

SEQ ID NO: 447176 - DNA, 25 bp, Homo sapien
taaacttgcatgaccagattgtaac

SEQ ID NO: 447177 - DNA, 25 bp, Homo sapien
tggcaattcctgtaactatttctgg

SEQ ID NO: 447178 - DNA, 25 bp, Homo sapien
gaatgcatgtggcaattcctgtaac

SEQ ID NO: 447179 - DNA, 25 bp, Homo sapien
tgcatgtggcaattcctgtaactat

SEQ ID NO: 447180 - DNA, 25 bp, Homo sapien
tgtggcaattcctgtaactatttct

SEQ ID NO: 447181 - DNA, 25 bp, Homo sapien
ttgacagtataactttggagaagaa

SEQ ID NO: 447182 - DNA, 25 bp, Homo sapien
gtgacagccgctttcattggcaata

SEQ ID NO: 447183 - DNA, 25 bp, Homo sapien
tggccagacttcaggtacctaccca

SEQ ID NO: 447184 - DNA, 25 bp, Homo sapien
ttggagaagaatccagctgccgtag

SEQ ID NO: 447185 - DNA, 25 bp, Homo sapien
tatcaaggataataggaaacatctc

SEQ ID NO: 447186 - DNA, 25 bp, Homo sapien
catggcacattatcaaggataatag

SEQ ID NO: 447187 - DNA, 25 bp, Homo sapien
tatgttcatggcacattatcaagga

SEQ ID NO: 447188 - DNA, 25 bp, Homo sapien
ttatcaaggataataggaaacatct

SEQ ID NO: 447189 - DNA, 25 bp, Homo sapien
ctatacagccaaccagatgttagtg

SEQ ID NO: 447190 - DNA, 25 bp, Homo sapien
tgttgttctccatagcgatgttggg

SEQ ID NO: 447191 - DNA, 25 bp, Homo sapien
tcttcttatatagaatctcacaggg

SEQ ID NO: 447192 - DNA, 25 bp, Homo sapien
gttggggaagtcttcatagatgata

SEQ ID NO: 447193 - DNA, 25 bp, Homo sapien
tctgactgagttcagagatgttgcc

SEQ ID NO: 447194 - DNA, 25 bp, Homo sapien
gggcacttagccccttcactttcaa

SEQ ID NO: 447195 - DNA, 25 bp, Homo sapien
cacttagccccttcactttcaaggt

SEQ ID NO: 447196 - DNA, 25 bp, Homo sapien
gttaatattggtatttgctgatttg

SEQ ID NO: 447197 - DNA, 25 bp, Homo sapien
ttcattggggcacttagccccttca

SEQ ID NO: 447198 - DNA, 25 bp, Homo sapien
ttgggcaatgagctcacgtaatggt

SEQ ID NO: 447199 - DNA, 25 bp, Homo sapien
caatgagctcacgtaatggtgtcat

SEQ ID NO: 447200 - DNA, 25 bp, Homo sapien
tgctgctcggctttgggcaatgagc

SEQ ID NO: 447201 - DNA, 25 bp, Homo sapien
gctgctcggctttgggcaatgagct

SEQ ID NO: 447202 - DNA, 25 bp, Homo sapien
ctgacaggtgatcggtgaactgaga

SEQ ID NO: 447203 - DNA, 25 bp, Homo sapien
tgacaggtgatcggtgaactgagaa

SEQ ID NO: 447204 - DNA, 25 bp, Homo sapien
gacaggtgatcggtgaactgagaac

SEQ ID NO: 447205 - DNA, 25 bp, Homo sapien
ggaccagatgtgtcccgtgcttggg

SEQ ID NO: 447206 - DNA, 25 bp, Homo sapien
cataaccctggcttttggggaccag

SEQ ID NO: 447207 - DNA, 25 bp, Homo sapien
tgtgtcccgtgcttggggaattaaa

SEQ ID NO: 447208 - DNA, 25 bp, Homo sapien
tttggggaccagatgtgtcccgtgc

SEQ ID NO: 447209 - DNA, 25 bp, Homo sapien
gctgtctacattcttttactggctc

SEQ ID NO: 447210 - DNA, 25 bp, Homo sapien
cagtgttccatcagatctgtgatcc

SEQ ID NO: 447211 - DNA, 25 bp, Homo sapien
agtctgacacttgctcatggcccag

SEQ ID NO: 447212 - DNA, 25 bp, Homo sapien
ttattgaccaatccggcagagccaa

SEQ ID NO: 447213 - DNA, 25 bp, Homo sapien
attttggttcttggataagagccat

SEQ ID NO: 447214 - DNA, 25 bp, Homo sapien
gaatgaagctttctcaagactactt

SEQ ID NO: 447215 - DNA, 25 bp, Homo sapien
aattttggttcttggataagagcca

SEQ ID NO: 447216 - DNA, 25 bp, Homo sapien
tgaagctttctcaagactacttaat

SEQ ID NO: 447217 - DNA, 25 bp, Homo sapien
gtgactacaaactgtaggtgaaagg

SEQ ID NO: 447218 - DNA, 25 bp, Homo sapien
cacctgctgcttggggcctctccag

SEQ ID NO: 447219 - DNA, 25 bp, Homo sapien
tttgtgactacaaactgtaggtgaa

SEQ ID NO: 447220 - DNA, 25 bp, Homo sapien
ttcattattcttgcaccaactctgt

SEQ ID NO: 447221 - DNA, 25 bp, Homo sapien
atgatcacgtaagtgtaaaacttcc

SEQ ID NO: 447222 - DNA, 25 bp, Homo sapien
tgatcacgtaagtgtaaaacttccc

SEQ ID NO: 447223 - DNA, 25 bp, Homo sapien
ttatttggaaccaatgacatgctca

SEQ ID NO: 447224 - DNA, 25 bp, Homo sapien
tatttggaaccaatgacatgctcat

SEQ ID NO: 447225 - DNA, 25 bp, Homo sapien
caaaggtggttgctactgctatttc

SEQ ID NO: 447226 - DNA, 25 bp, Homo sapien
ccaaatacaccaaatacatcaagga

SEQ ID NO: 447227 - DNA, 25 bp, Homo sapien
tatttctctaaatactgtcaccaaa

SEQ ID NO: 447228 - DNA, 25 bp, Homo sapien
tccttgattttactactaccagaag

SEQ ID NO: 447229 - DNA, 25 bp, Homo sapien
tgactagatcatgagcttaagaggt

SEQ ID NO: 447230 - DNA, 25 bp, Homo sapien
cttaagaggtagctcagctgaggct

SEQ ID NO: 447231 - DNA, 25 bp, Homo sapien
tagagtacaggacattgatcagcaa

SEQ ID NO: 447232 - DNA, 25 bp, Homo sapien
catacctttcttctaatagacctga

SEQ ID NO: 447233 - DNA, 25 bp, Homo sapien
ttagggttgttactgtctcttgact

SEQ ID NO: 447234 - DNA, 25 bp, Homo sapien
agggttgttactgtctcttgactgc

SEQ ID NO: 447235 - DNA, 25 bp, Homo sapien
tagggttgttactgtctcttgactg

SEQ ID NO: 447236 - DNA, 25 bp, Homo sapien
ggttgttactgtctcttgactgctc

SEQ ID NO: 447237 - DNA, 25 bp, Homo sapien
aatattcacaccattgaccaaattt

SEQ ID NO: 447238 - DNA, 25 bp, Homo sapien
caatattcacaccattgaccaaatt

SEQ ID NO: 447239 - DNA, 25 bp, Homo sapien
ccaatattcacaccattgaccaaat

SEQ ID NO: 447240 - DNA, 25 bp, Homo sapien
ataggaccagtatttgaagttttca

SEQ ID NO: 447241 - DNA, 25 bp, Homo sapien
tcatgaataggaccagtatttgaag

SEQ ID NO: 447242 - DNA, 25 bp, Homo sapien
tgaataggaccagtatttgaagttt

SEQ ID NO: 447243 - DNA, 25 bp, Homo sapien
taggaccagtatttgaagttttcaa

SEQ ID NO: 447244 - DNA, 25 bp, Homo sapien
taataaggcataatgcttatcttct

SEQ ID NO: 447245 - DNA, 25 bp, Homo sapien
aataaggcataatgcttatcttcta

SEQ ID NO: 447246 - DNA, 25 bp, Homo sapien
ctcttgggatgaaggattgcttatt

SEQ ID NO: 447247 - DNA, 25 bp, Homo sapien
catcaaccttccttgtagcgtccat

SEQ ID NO: 447248 - DNA, 25 bp, Homo sapien
ttgggatgaaggattgcttattgac

SEQ ID NO: 447249 - DNA, 25 bp, Homo sapien
gattgcttattgacatcaaccttcc

SEQ ID NO: 447250 - DNA, 25 bp, Homo sapien
ggtggtgccggaatgaatccagaac

SEQ ID NO: 447251 - DNA, 25 bp, Homo sapien
gctccactcacgtccacgtctccct

SEQ ID NO: 447252 - DNA, 25 bp, Homo sapien
tgaatccagaacacacgacaactcc

SEQ ID NO: 447253 - DNA, 25 bp, Homo sapien
tccgcgggggtagcacgacttcctc

SEQ ID NO: 447254 - DNA, 25 bp, Homo sapien
ccgtgggtccgacgtcagcgtgatc

SEQ ID NO: 447255 - DNA, 25 bp, Homo sapien
gggtccgacgtcagcgtgatcttaa

SEQ ID NO: 447256 - DNA, 25 bp, Homo sapien
actttgtacggcagccgtgggtccg

SEQ ID NO: 447257 - DNA, 25 bp, Homo sapien
tacggcagccgtgggtccgacgtca

SEQ ID NO: 447258 - DNA, 25 bp, Homo sapien
aaaaggcccatctcggccgagctac

SEQ ID NO: 447259 - DNA, 25 bp, Homo sapien
caaaaggcccatctcggccgagcta

SEQ ID NO: 447260 - DNA, 25 bp, Homo sapien
tgaagagatgaagactgcgtggggt

SEQ ID NO: 447261 - DNA, 25 bp, Homo sapien
tggaagggcgcgagccaggaaagta

SEQ ID NO: 447262 - DNA, 25 bp, Homo sapien
aagggcgcgagccaggaaagtagat

SEQ ID NO: 447263 - DNA, 25 bp, Homo sapien
gcgcgagccaggaaagtagatgaag

SEQ ID NO: 447264 - DNA, 25 bp, Homo sapien
tcgcaggctccggtgggaaaggctc

SEQ ID NO: 447265 - DNA, 25 bp, Homo sapien
tctcctcgcaggctccggtgggaaa

SEQ ID NO: 447266 - DNA, 25 bp, Homo sapien
tcctcgcaggctccggtgggaaagg

SEQ ID NO: 447267 - DNA, 25 bp, Homo sapien
ctcgcaggctccggtgggaaaggct

SEQ ID NO: 447268 - DNA, 25 bp, Homo sapien
tgacacttagcgagcaagtacggac

SEQ ID NO: 447269 - DNA, 25 bp, Homo sapien
aaatgaattccgaggggaggtcact

SEQ ID NO: 447270 - DNA, 25 bp, Homo sapien
gggccaagctgccaagctgacactt

SEQ ID NO: 447271 - DNA, 25 bp, Homo sapien
gggaggtcactaatcagaaacacac

SEQ ID NO: 447272 - DNA, 25 bp, Homo sapien
tgctgtgaaaggtgtactttcagga

SEQ ID NO: 447273 - DNA, 25 bp, Homo sapien
taagactgctgtgaaaggtgtactt

SEQ ID NO: 447274 - DNA, 25 bp, Homo sapien
gaagcatattggcaaaccgcattcc

SEQ ID NO: 447275 - DNA, 25 bp, Homo sapien
ttggcaaaccgcattccataaaggt

SEQ ID NO: 447276 - DNA, 25 bp, Homo sapien
tccataaaggttgttccaacttctg

SEQ ID NO: 447277 - DNA, 25 bp, Homo sapien
gcatattggcaaaccgcattccata

SEQ ID NO: 447278 - DNA, 25 bp, Homo sapien
gagggatttgcatcatgtcacatag

SEQ ID NO: 447279 - DNA, 25 bp, Homo sapien
gaaggacaggtattaactacttcca

SEQ ID NO: 447280 - DNA, 25 bp, Homo sapien
caggaaccctaagtctccgaagtca

SEQ ID NO: 447281 - DNA, 25 bp, Homo sapien
taatgacgcacctacaacaggaacc

SEQ ID NO: 447282 - DNA, 25 bp, Homo sapien
gaaataatgtttttactcgaaatca

SEQ ID NO: 447283 - DNA, 25 bp, Homo sapien
cagggcaggattgtgtgttaagcta

SEQ ID NO: 447284 - DNA, 25 bp, Homo sapien
cctgacaatacaaggagctttgagc

SEQ ID NO: 447285 - DNA, 25 bp, Homo sapien
ggattctgttatgccccagactaga

SEQ ID NO: 447286 - DNA, 25 bp, Homo sapien
cactgatggattggctgacttgcca

SEQ ID NO: 447287 - DNA, 25 bp, Homo sapien
gcacaggctgtaatctcaataagaa

SEQ ID NO: 447288 - DNA, 25 bp, Homo sapien
cagatttccaaagctagagtactac

SEQ ID NO: 447289 - DNA, 25 bp, Homo sapien
ttgtctgggaaacactactctaggc

SEQ ID NO: 447290 - DNA, 25 bp, Homo sapien
taaggccttaaacatacctgagaac

SEQ ID NO: 447291 - DNA, 25 bp, Homo sapien
gccatttggccaacagtgatagcaa

SEQ ID NO: 447292 - DNA, 25 bp, Homo sapien
tacctagacaattaagtgaaagcca

SEQ ID NO: 447293 - DNA, 25 bp, Homo sapien
tctgtgtttaatgggaggtgcctac

SEQ ID NO: 447294 - DNA, 25 bp, Homo sapien
tttcaggtaacaaccaaggcttgta

SEQ ID NO: 447295 - DNA, 25 bp, Homo sapien
gcacttgttgcagcaggaactttaa

SEQ ID NO: 447296 - DNA, 25 bp, Homo sapien
cattggtaataattgcacttgttgc

SEQ ID NO: 447297 - DNA, 25 bp, Homo sapien
tggtaataattgcacttgttgcagc

SEQ ID NO: 447298 - DNA, 25 bp, Homo sapien
aataattgcacttgttgcagcagga

SEQ ID NO: 447299 - DNA, 25 bp, Homo sapien
cagtctgtgcaggatttattcctat

SEQ ID NO: 447300 - DNA, 25 bp, Homo sapien
tctgtgcaggatttattcctattcc

SEQ ID NO: 447301 - DNA, 25 bp, Homo sapien
tgtgcaggatttattcctattccat

SEQ ID NO: 447302 - DNA, 25 bp, Homo sapien
cagcagtctgtgcaggatttattcc

SEQ ID NO: 447303 - DNA, 25 bp, Homo sapien
cacccactcctctatgagttttcaa

SEQ ID NO: 447304 - DNA, 25 bp, Homo sapien
cccacccactcctctatgagttttc

SEQ ID NO: 447305 - DNA, 25 bp, Homo sapien
aattgacatatataaccccacccac

SEQ ID NO: 447306 - DNA, 25 bp, Homo sapien
acccactcctctatgagttttcaaa

SEQ ID NO: 447307 - DNA, 25 bp, Homo sapien
gaaacaacttattactcagacacac

SEQ ID NO: 447308 - DNA, 25 bp, Homo sapien
taaataatccaagctatgaagcact

SEQ ID NO: 447309 - DNA, 25 bp, Homo sapien
tctcctggtcaggacaccaatatat

SEQ ID NO: 447310 - DNA, 25 bp, Homo sapien
cagacacacaggtaaagactggtat

SEQ ID NO: 447311 - DNA, 25 bp, Homo sapien
tttatggctgaatttcaactgcaag

SEQ ID NO: 447312 - DNA, 25 bp, Homo sapien
ctttatggctgaatttcaactgcaa

SEQ ID NO: 447313 - DNA, 25 bp, Homo sapien
tatggctgaatttcaactgcaaggc

SEQ ID NO: 447314 - DNA, 25 bp, Homo sapien
ttatggctgaatttcaactgcaagg

SEQ ID NO: 447315 - DNA, 25 bp, Homo sapien
tccatacaataaagtgcctcacgat

SEQ ID NO: 447316 - DNA, 25 bp, Homo sapien
tgggtacaaaagctcaagcatcatg

SEQ ID NO: 447317 - DNA, 25 bp, Homo sapien
tcatgagaccccaattccaagcttt

SEQ ID NO: 447318 - DNA, 25 bp, Homo sapien
caccagccatgaaaactctgacgaa

SEQ ID NO: 447319 - DNA, 25 bp, Homo sapien
tctaggaataatccgcagttctgaa

SEQ ID NO: 447320 - DNA, 25 bp, Homo sapien
ctctaggaataatccgcagttctga

SEQ ID NO: 447321 - DNA, 25 bp, Homo sapien
gatctctaggaataatccgcagttc

SEQ ID NO: 447322 - DNA, 25 bp, Homo sapien
tctctaggaataatccgcagttctg

SEQ ID NO: 447323 - DNA, 25 bp, Homo sapien
tattctgaaaggcaatcgtatgttc

SEQ ID NO: 447324 - DNA, 25 bp, Homo sapien
tgaaaggcaatcgtatgttccaagt

SEQ ID NO: 447325 - DNA, 25 bp, Homo sapien
aaaggcaatcgtatgttccaagtag

SEQ ID NO: 447326 - DNA, 25 bp, Homo sapien
tctgaaaggcaatcgtatgttccaa

SEQ ID NO: 447327 - DNA, 25 bp, Homo sapien
gcaaatcagatgctatcaagcaaat

SEQ ID NO: 447328 - DNA, 25 bp, Homo sapien
taactgaggtctgaatcttaaaaaa

SEQ ID NO: 447329 - DNA, 25 bp, Homo sapien
caagcaaattgccatccagggtcca

SEQ ID NO: 447330 - DNA, 25 bp, Homo sapien
cagatgagtcacctttcattaatca

SEQ ID NO: 447331 - DNA, 25 bp, Homo sapien
ttaatagaagcctggtgatctgggc

SEQ ID NO: 447332 - DNA, 25 bp, Homo sapien
cattaaaagctggtatgggacacca

SEQ ID NO: 447333 - DNA, 25 bp, Homo sapien
gatactgatttcttccggaagggca

SEQ ID NO: 447334 - DNA, 25 bp, Homo sapien
gaagtctgtatgttgacaaggccag

SEQ ID NO: 447335 - DNA, 25 bp, Homo sapien
ttcattagatattaattataaacca

SEQ ID NO: 447336 - DNA, 25 bp, Homo sapien
accaataacgcatgtaaactgaata

SEQ ID NO: 447337 - DNA, 25 bp, Homo sapien
aaccaataacgcatgtaaactgaat

SEQ ID NO: 447338 - DNA, 25 bp, Homo sapien
ccaataacgcatgtaaactgaatac

SEQ ID NO: 447339 - DNA, 25 bp, Homo sapien
gcaacatgggtataccggttaacca

SEQ ID NO: 447340 - DNA, 25 bp, Homo sapien
tcatgtccatgattactagaccagg

SEQ ID NO: 447341 - DNA, 25 bp, Homo sapien
tgtaaagtgcctcacactgtgccca

SEQ ID NO: 447342 - DNA, 25 bp, Homo sapien
gacctaggagtcaatctcaccgtaa

SEQ ID NO: 447343 - DNA, 25 bp, Homo sapien
actggtcaatagcaaaggtcgcggc

SEQ ID NO: 447344 - DNA, 25 bp, Homo sapien
gcaacaggttttcgtgatgcccggg

SEQ ID NO: 447345 - DNA, 25 bp, Homo sapien
tcagtgggtgcaaaaacagtttctc

SEQ ID NO: 447346 - DNA, 25 bp, Homo sapien
cccagatcggctgcagataagatca

SEQ ID NO: 447347 - DNA, 25 bp, Homo sapien
cattttttattagctctgggacgag

SEQ ID NO: 447348 - DNA, 25 bp, Homo sapien
gggacgagagtcagatcattgatcc

SEQ ID NO: 447349 - DNA, 25 bp, Homo sapien
taattccgctaagattgccctttac

SEQ ID NO: 447350 - DNA, 25 bp, Homo sapien
aaacgtatgtatacctagagtcagg

SEQ ID NO: 447351 - DNA, 25 bp, Homo sapien
gggttaggagcatcacacttcaatg

SEQ ID NO: 447352 - DNA, 25 bp, Homo sapien
tcagcaggggctctatgggcacctg

SEQ ID NO: 447353 - DNA, 25 bp, Homo sapien
acttcaatggaggtagtagggcttg

SEQ ID NO: 447354 - DNA, 25 bp, Homo sapien
gattagggtcagtgttctcagcagg

SEQ ID NO: 447355 - DNA, 25 bp, Homo sapien
caaatgacaaccttaaagtggacgc

SEQ ID NO: 447356 - DNA, 25 bp, Homo sapien
agctaactagagatgcttctcccca

SEQ ID NO: 447357 - DNA, 25 bp, Homo sapien
gacgctttgtcccagtatcacagat

SEQ ID NO: 447358 - DNA, 25 bp, Homo sapien
gaactgaaaaggatctctcttgtac

SEQ ID NO: 447359 - DNA, 25 bp, Homo sapien
gacttctttgctaacccatttacca

SEQ ID NO: 447360 - DNA, 25 bp, Homo sapien
acttctttgctaacccatttaccat

SEQ ID NO: 447361 - DNA, 25 bp, Homo sapien
taagctgttctttccaaccatttcc

SEQ ID NO: 447362 - DNA, 25 bp, Homo sapien
ggcaattggcctagagggatcacaa

SEQ ID NO: 447363 - DNA, 25 bp, Homo sapien
gaggtatagagataagcctgttttc

SEQ ID NO: 447364 - DNA, 25 bp, Homo sapien
cacaaaggaattgctgttcccatac

SEQ ID NO: 447365 - DNA, 25 bp, Homo sapien
cttttcatccacacctaaattcatt

SEQ ID NO: 447366 - DNA, 25 bp, Homo sapien
catccacacctaaattcattgccat

SEQ ID NO: 447367 - DNA, 25 bp, Homo sapien
tttcatccacacctaaattcattgc

SEQ ID NO: 447368 - DNA, 25 bp, Homo sapien
tcatccacacctaaattcattgcca

SEQ ID NO: 447369 - DNA, 25 bp, Homo sapien
ttgcctgcaatccatgctctgaatt

SEQ ID NO: 447370 - DNA, 25 bp, Homo sapien
tgcactgaacttgcctgcaatccat

SEQ ID NO: 447371 - DNA, 25 bp, Homo sapien
tgaacttgcctgcaatccatgctct

SEQ ID NO: 447372 - DNA, 25 bp, Homo sapien
tgaattgcactgaacttgcctgcaa

SEQ ID NO: 447373 - DNA, 25 bp, Homo sapien
tcatccaacctttaccttgagtcta

SEQ ID NO: 447374 - DNA, 25 bp, Homo sapien
ttaatgtaacttgccaccctatgcc

SEQ ID NO: 447375 - DNA, 25 bp, Homo sapien
ccatttgtatgatagatcttcatcc

SEQ ID NO: 447376 - DNA, 25 bp, Homo sapien
tgtcattacatgtgacatggacctc

SEQ ID NO: 447377 - DNA, 25 bp, Homo sapien
gacaaagaagatcatttgtccagct

SEQ ID NO: 447378 - DNA, 25 bp, Homo sapien
gactgcattgcacaagccttttccc

SEQ ID NO: 447379 - DNA, 25 bp, Homo sapien
aagaagatcatttgtccagctttgg

SEQ ID NO: 447380 - DNA, 25 bp, Homo sapien
ctaggactgcattgcacaagccttt

SEQ ID NO: 447381 - DNA, 25 bp, Homo sapien
ttttctggtactcttggatatagtc

SEQ ID NO: 447382 - DNA, 25 bp, Homo sapien
agaactgcagaacgtcaccccctgt

SEQ ID NO: 447383 - DNA, 25 bp, Homo sapien
ctctggtctaggaattccagcctcc

SEQ ID NO: 447384 - DNA, 25 bp, Homo sapien
tgcaccatctccactttattggaaa

SEQ ID NO: 447385 - DNA, 25 bp, Homo sapien
gaacgtcaccccctgttattcatgc

SEQ ID NO: 447386 - DNA, 25 bp, Homo sapien
gatcatctctaagccttttggctaa

SEQ ID NO: 447387 - DNA, 25 bp, Homo sapien
ggctaagatcaagtaaagagtggta

SEQ ID NO: 447388 - DNA, 25 bp, Homo sapien
aagagcggtttggagagatcatctc

SEQ ID NO: 447389 - DNA, 25 bp, Homo sapien
gtagttcgaatgtaggaaattcagc

SEQ ID NO: 447390 - DNA, 25 bp, Homo sapien
gatggtagggaacaagtagaatatt

SEQ ID NO: 447391 - DNA, 25 bp, Homo sapien
gaataaacggttggtgtctagagga

SEQ ID NO: 447392 - DNA, 25 bp, Homo sapien
gaatacagaacagatgagagctttg

SEQ ID NO: 447393 - DNA, 25 bp, Homo sapien
gaaggagccgaggagatatatttca

SEQ ID NO: 447394 - DNA, 25 bp, Homo sapien
tttcaacatgaggtacgaagaagtc

SEQ ID NO: 447395 - DNA, 25 bp, Homo sapien
catgaggtacgaagaagtcaaatat

SEQ ID NO: 447396 - DNA, 25 bp, Homo sapien
gattatgaaacattcctattacgaa

SEQ ID NO: 447397 - DNA, 25 bp, Homo sapien
tatccaaaccataacagaatcacta

SEQ ID NO: 447398 - DNA, 25 bp, Homo sapien
ctttcttggctcctgccgtagcatg

SEQ ID NO: 447399 - DNA, 25 bp, Homo sapien
ctctcaatcgaaggccactgttatc

SEQ ID NO: 447400 - DNA, 25 bp, Homo sapien
accttctctcaatcgaaggccactg

SEQ ID NO: 447401 - DNA, 25 bp, Homo sapien
ctgccgtagcatgcaggcagctctg

SEQ ID NO: 447402 - DNA, 25 bp, Homo sapien
tagttagggctgtgatcagtgatac

SEQ ID NO: 447403 - DNA, 25 bp, Homo sapien
ggatttgagaattatgaagaagagc

SEQ ID NO: 447404 - DNA, 25 bp, Homo sapien
caggttgtcattagtctggatttga

SEQ ID NO: 447405 - DNA, 25 bp, Homo sapien
gccattctggaagataagtcagctg

SEQ ID NO: 447406 - DNA, 25 bp, Homo sapien
aaatccaggtaaggtgatcacattg

SEQ ID NO: 447407 - DNA, 25 bp, Homo sapien
tacgttgtgacaatagagtctttct

SEQ ID NO: 447408 - DNA, 25 bp, Homo sapien
catggctccctatcttgctttctca

SEQ ID NO: 447409 - DNA, 25 bp, Homo sapien
gaaatgtgagcgttagatatgaagc

SEQ ID NO: 447410 - DNA, 25 bp, Homo sapien
tgaagcatggaagagactgccttct

SEQ ID NO: 447411 - DNA, 25 bp, Homo sapien
ggctgaagcatggaagagactgcct

SEQ ID NO: 447412 - DNA, 25 bp, Homo sapien
gagtgtcaatgatctcccagtggct

SEQ ID NO: 447413 - DNA, 25 bp, Homo sapien
caagtatttgagtgtcaatgatctc

SEQ ID NO: 447414 - DNA, 25 bp, Homo sapien
tgaaaatatcccgatgtatgtgtgt

SEQ ID NO: 447415 - DNA, 25 bp, Homo sapien
tgtgttgtctttctcatccataacc

SEQ ID NO: 447416 - DNA, 25 bp, Homo sapien
gagggtcctacaccttccttagatc

SEQ ID NO: 447417 - DNA, 25 bp, Homo sapien
agggttgaaaatatcccgatgtatg

SEQ ID NO: 447418 - DNA, 25 bp, Homo sapien
ctttcatgtcttcccaatattttct

SEQ ID NO: 447419 - DNA, 25 bp, Homo sapien
tcatgtcttcccaatattttctata

SEQ ID NO: 447420 - DNA, 25 bp, Homo sapien
ttcctcaggactctgctgaaaactc

SEQ ID NO: 447421 - DNA, 25 bp, Homo sapien
gtcttcccaatattttctatatctt

SEQ ID NO: 447422 - DNA, 25 bp, Homo sapien
tgactgggattgcttctaacgtacg

SEQ ID NO: 447423 - DNA, 25 bp, Homo sapien
ttgcttctaacgtacgatatcaggt

SEQ ID NO: 447424 - DNA, 25 bp, Homo sapien
tttgtacatggtgcttttgactggg

SEQ ID NO: 447425 - DNA, 25 bp, Homo sapien
ctgggattgcttctaacgtacgata

SEQ ID NO: 447426 - DNA, 25 bp, Homo sapien
tccacgcattcacactcagacacag

SEQ ID NO: 447427 - DNA, 25 bp, Homo sapien
catggggtgagactgccagcgacct

SEQ ID NO: 447428 - DNA, 25 bp, Homo sapien
ccttgatcaacagtggagataagac

SEQ ID NO: 447429 - DNA, 25 bp, Homo sapien
gactgccagcgaccttgatcaacag

SEQ ID NO: 447430 - DNA, 25 bp, Homo sapien
acatggatagagaaccttaagggac

SEQ ID NO: 447431 - DNA, 25 bp, Homo sapien
gaaacatggatagagaaccttaagg

SEQ ID NO: 447432 - DNA, 25 bp, Homo sapien
taagggaccagtagggcttataaga

SEQ ID NO: 447433 - DNA, 25 bp, Homo sapien
gatgaaacatggatagagaacctta

SEQ ID NO: 447434 - DNA, 25 bp, Homo sapien
tgtgcctgagcctattggaatgcag

SEQ ID NO: 447435 - DNA, 25 bp, Homo sapien
gagaggactggctcagtatctgagc

SEQ ID NO: 447436 - DNA, 25 bp, Homo sapien
taacctgctcctatacattaatgtg

SEQ ID NO: 447437 - DNA, 25 bp, Homo sapien
gctcctatacattaatgtgcctgag

SEQ ID NO: 447438 - DNA, 25 bp, Homo sapien
gatgtcaaatccttccttttccgtg

SEQ ID NO: 447439 - DNA, 25 bp, Homo sapien
caaggactggtgtctatatcctaca

SEQ ID NO: 447440 - DNA, 25 bp, Homo sapien
tacaaactgcgcaacttttaactgt

SEQ ID NO: 447441 - DNA, 25 bp, Homo sapien
tatggacagtttgacctgcaaggat

SEQ ID NO: 447442 - DNA, 25 bp, Homo sapien
tgttcgggcttggacaggtcagcct

SEQ ID NO: 447443 - DNA, 25 bp, Homo sapien
gaagtgccaggaactccgcgcgttg

SEQ ID NO: 447444 - DNA, 25 bp, Homo sapien
agtcccggctgagtgcatggtcccg

SEQ ID NO: 447445 - DNA, 25 bp, Homo sapien
gcctgagagcatgcgaagtcggtcc

SEQ ID NO: 447446 - DNA, 25 bp, Homo sapien
gcggcggtggcggtcctggttgaaa

SEQ ID NO: 447447 - DNA, 25 bp, Homo sapien
cggcggtggcggtcctggttgaaag

SEQ ID NO: 447448 - DNA, 25 bp, Homo sapien
gattcctgtaccaccatacgaaggg

SEQ ID NO: 447449 - DNA, 25 bp, Homo sapien
gatagcgcacgcctagttcctggaa

SEQ ID NO: 447450 - DNA, 25 bp, Homo sapien
caattccagttcaaagaggcgctcc

SEQ ID NO: 447451 - DNA, 25 bp, Homo sapien
cattatgggcataggaaactcggcc

SEQ ID NO: 447452 - DNA, 25 bp, Homo sapien
gaaagcctgcttcgattttaattca

SEQ ID NO: 447453 - DNA, 25 bp, Homo sapien
taaggtgccaaaatgcttcatgaac

SEQ ID NO: 447454 - DNA, 25 bp, Homo sapien
taattcaccaaagttcacctcctgc

SEQ ID NO: 447455 - DNA, 25 bp, Homo sapien
catacaacacagaggatgcgttgga

SEQ ID NO: 447456 - DNA, 25 bp, Homo sapien
ggcattagccccttctcttaagaca

SEQ ID NO: 447457 - DNA, 25 bp, Homo sapien
taagacatagcatattttcatgtca

SEQ ID NO: 447458 - DNA, 25 bp, Homo sapien
ttctcttaagacatagcatattttc

SEQ ID NO: 447459 - DNA, 25 bp, Homo sapien
atcacttgtggcattagccccttct

SEQ ID NO: 447460 - DNA, 25 bp, Homo sapien
gcaaccaagaaaagcgtctctcctt

SEQ ID NO: 447461 - DNA, 25 bp, Homo sapien
taatgtcatcagagagcaaccaaga

SEQ ID NO: 447462 - DNA, 25 bp, Homo sapien
gacttcttgtaataatgtcatcaga

SEQ ID NO: 447463 - DNA, 25 bp, Homo sapien
ctccttgcggtcactaccaggagag

SEQ ID NO: 447464 - DNA, 25 bp, Homo sapien
tgtcagaagatttatacggcaatgc

SEQ ID NO: 447465 - DNA, 25 bp, Homo sapien
cagaagatttatacggcaatgcaaa

SEQ ID NO: 447466 - DNA, 25 bp, Homo sapien
aatgtcagaagatttatacggcaat

SEQ ID NO: 447467 - DNA, 25 bp, Homo sapien
gtcagaagatttatacggcaatgca

SEQ ID NO: 447468 - DNA, 25 bp, Homo sapien
gcctccgtagcattgaaacgttgca

SEQ ID NO: 447469 - DNA, 25 bp, Homo sapien
tagcattgaaacgttgcactacaga

SEQ ID NO: 447470 - DNA, 25 bp, Homo sapien
ggaagcctccgtagcattgaaacgt

SEQ ID NO: 447471 - DNA, 25 bp, Homo sapien
tgaaacgttgcactacagaagggct

SEQ ID NO: 447472 - DNA, 25 bp, Homo sapien
gaatcacatatggagctagtaaaac

SEQ ID NO: 447473 - DNA, 25 bp, Homo sapien
tcataggggctacatcttgctgatt

SEQ ID NO: 447474 - DNA, 25 bp, Homo sapien
cactttttcataggggctacatctt

SEQ ID NO: 447475 - DNA, 25 bp, Homo sapien
attttgaatcacatatggagctagt

SEQ ID NO: 447476 - DNA, 25 bp, Homo sapien
tcgccaaaggttgtctctgtgcacc

SEQ ID NO: 447477 - DNA, 25 bp, Homo sapien
ggaaatgctgccaaatcgccaaagg

SEQ ID NO: 447478 - DNA, 25 bp, Homo sapien
caacctggccggtgtttggaactct

SEQ ID NO: 447479 - DNA, 25 bp, Homo sapien
ttctaccaaggacccaggaaatgct

SEQ ID NO: 447480 - DNA, 25 bp, Homo sapien
actccattccttagagcaaacagac

SEQ ID NO: 447481 - DNA, 25 bp, Homo sapien
cttagagcaaacagacagttctttt

SEQ ID NO: 447482 - DNA, 25 bp, Homo sapien
tccttagagcaaacagacagttctt

SEQ ID NO: 447483 - DNA, 25 bp, Homo sapien
ttccactccattccttagagcaaac

SEQ ID NO: 447484 - DNA, 25 bp, Homo sapien
tcagacgaaaattctggtacgttaa

SEQ ID NO: 447485 - DNA, 25 bp, Homo sapien
gagtcctcattgaccaggtaatatt

SEQ ID NO: 447486 - DNA, 25 bp, Homo sapien
tccatgcccaattcagacgaaaatt

SEQ ID NO: 447487 - DNA, 25 bp, Homo sapien
ctctacgtttaagaacaacatctag

SEQ ID NO: 447488 - DNA, 25 bp, Homo sapien
tcgcttggattattaagattttcct

SEQ ID NO: 447489 - DNA, 25 bp, Homo sapien
ttcattttcgcttggattattaaga

SEQ ID NO: 447490 - DNA, 25 bp, Homo sapien
tcttagtttcattttcgcttggatt

SEQ ID NO: 447491 - DNA, 25 bp, Homo sapien
cttagtttcattttcgcttggatta

SEQ ID NO: 447492 - DNA, 25 bp, Homo sapien
cctgggttgaactgcacttgtttct

SEQ ID NO: 447493 - DNA, 25 bp, Homo sapien
gtttcagactgctcatgctccccat

SEQ ID NO: 447494 - DNA, 25 bp, Homo sapien
caacgatctcaacagtggcgactgt

SEQ ID NO: 447495 - DNA, 25 bp, Homo sapien
agcacgggctctgagagtaccacct

SEQ ID NO: 447496 - DNA, 25 bp, Homo sapien
aacataaaccagttgacgatggctc

SEQ ID NO: 447497 - DNA, 25 bp, Homo sapien
acagcaacaacataaaccagttgac

SEQ ID NO: 447498 - DNA, 25 bp, Homo sapien
taaaccagttgacgatggctcttac

SEQ ID NO: 447499 - DNA, 25 bp, Homo sapien
gcaacaacataaaccagttgacgat

SEQ ID NO: 447500 - DNA, 25 bp, Homo sapien
gccaaggtgtgcattgacaagaaaa

SEQ ID NO: 447501 - DNA, 25 bp, Homo sapien
aacactgtgttcactacaaaatggg

SEQ ID NO: 447502 - DNA, 25 bp, Homo sapien
tctgactagatcaagacaagccagg

SEQ ID NO: 447503 - DNA, 25 bp, Homo sapien
aaggttcacttttaccagcatcagc

SEQ ID NO: 447504 - DNA, 25 bp, Homo sapien
ctttacatgagggtcagctctattg

SEQ ID NO: 447505 - DNA, 25 bp, Homo sapien
gagggtcagctctattgatcgcaga

SEQ ID NO: 447506 - DNA, 25 bp, Homo sapien
tgatcgcagagccatggttcccaac

SEQ ID NO: 447507 - DNA, 25 bp, Homo sapien
tctattgatcgcagagccatggttc

SEQ ID NO: 447508 - DNA, 25 bp, Homo sapien
caacatcttcttcaacggagtattt

SEQ ID NO: 447509 - DNA, 25 bp, Homo sapien
gactggggaataaacacagttggct

SEQ ID NO: 447510 - DNA, 25 bp, Homo sapien
tcttcttcaacggagtatttggact

SEQ ID NO: 447511 - DNA, 25 bp, Homo sapien
tcttcaacggagtatttggactggg

SEQ ID NO: 447512 - DNA, 25 bp, Homo sapien
tcaactcctggctcacatctccgct

SEQ ID NO: 447513 - DNA, 25 bp, Homo sapien
atctccgctcctcctgatgggaatg

SEQ ID NO: 447514 - DNA, 25 bp, Homo sapien
cttgttgggtataacagaccaccat

SEQ ID NO: 447515 - DNA, 25 bp, Homo sapien
ttgggtataacagaccaccatcaac

SEQ ID NO: 447516 - DNA, 25 bp, Homo sapien
cgattgtaacttgagcccctgggaa

SEQ ID NO: 447517 - DNA, 25 bp, Homo sapien
taagacaacacggaagtcggcacag

SEQ ID NO: 447518 - DNA, 25 bp, Homo sapien
tgactatccgacacagtttctcccg

SEQ ID NO: 447519 - DNA, 25 bp, Homo sapien
tcaaagcggacaacactggtgtggt

SEQ ID NO: 447520 - DNA, 25 bp, Homo sapien
cagtttggtcttttgactgtcttcc

SEQ ID NO: 447521 - DNA, 25 bp, Homo sapien
tccagcttctttccaaaccgaaaga

SEQ ID NO: 447522 - DNA, 25 bp, Homo sapien
tcagtttggtcttttgactgtcttc

SEQ ID NO: 447523 - DNA, 25 bp, Homo sapien
cagcttctttccaaaccgaaagatt

SEQ ID NO: 447524 - DNA, 25 bp, Homo sapien
tcttcctgacgatggcaaagtttgc

SEQ ID NO: 447525 - DNA, 25 bp, Homo sapien
tgcatggtactcagttgcctcaaaa

SEQ ID NO: 447526 - DNA, 25 bp, Homo sapien
gaagcaatggcaataatcaccaaga

SEQ ID NO: 447527 - DNA, 25 bp, Homo sapien
tgctggtctaatgtctgcatggtac

SEQ ID NO: 447528 - DNA, 25 bp, Homo sapien
tataagcacgtgaagtgaggccagg

SEQ ID NO: 447529 - DNA, 25 bp, Homo sapien
gctgtttgtctatttccgtctcgaa

SEQ ID NO: 447530 - DNA, 25 bp, Homo sapien
ccgtctcgaagttctctatagattg

SEQ ID NO: 447531 - DNA, 25 bp, Homo sapien
cctttgccttgttggagctgtttgt

SEQ ID NO: 447532 - DNA, 25 bp, Homo sapien
agctgtaggcaataacaccttccat

SEQ ID NO: 447533 - DNA, 25 bp, Homo sapien
gtctcatttccactaatccagctgt

SEQ ID NO: 447534 - DNA, 25 bp, Homo sapien
ggtgaacttctccataacggaatcc

SEQ ID NO: 447535 - DNA, 25 bp, Homo sapien
tctccataacggaatccacagggtc

SEQ ID NO: 447536 - DNA, 25 bp, Homo sapien
atttcctacaaacgtagaagaggtg

SEQ ID NO: 447537 - DNA, 25 bp, Homo sapien
agcacagataggatcacatttattt

SEQ ID NO: 447538 - DNA, 25 bp, Homo sapien
tacaaacgtagaagaggtggacagg

SEQ ID NO: 447539 - DNA, 25 bp, Homo sapien
gcacagataggatcacatttatttc

SEQ ID NO: 447540 - DNA, 25 bp, Homo sapien
ctgcatccaacaagtgatctctgta

SEQ ID NO: 447541 - DNA, 25 bp, Homo sapien
ctgttaagaaaggaacagaaatcat

SEQ ID NO: 447542 - DNA, 25 bp, Homo sapien
aggtcagtgcccgttctccacacct

SEQ ID NO: 447543 - DNA, 25 bp, Homo sapien
cactgtgacactagaagacttggac

SEQ ID NO: 447544 - DNA, 25 bp, Homo sapien
cagagtattccacatcaccgaagta

SEQ ID NO: 447545 - DNA, 25 bp, Homo sapien
tgttttccgagacctcactgtgaca

SEQ ID NO: 447546 - DNA, 25 bp, Homo sapien
gctgatgcccacatagtctgttcca

SEQ ID NO: 447547 - DNA, 25 bp, Homo sapien
aaatctaaattacggctgatgccca

SEQ ID NO: 447548 - DNA, 25 bp, Homo sapien
cggctgatgcccacatagtctgttc

SEQ ID NO: 447549 - DNA, 25 bp, Homo sapien
gcaaaatctaaattacggctgatgc

SEQ ID NO: 447550 - DNA, 25 bp, Homo sapien
tccagaatgacaacacgaacaggct

SEQ ID NO: 447551 - DNA, 25 bp, Homo sapien
ctttgctgggctcgccaagggctgc

SEQ ID NO: 447552 - DNA, 25 bp, Homo sapien
caagggctgcgttcataggcatgcg

SEQ ID NO: 447553 - DNA, 25 bp, Homo sapien
taggcatgcgaagcaccagttcaaa

SEQ ID NO: 447554 - DNA, 25 bp, Homo sapien
tgccgggtgtagcatctcactgaag

SEQ ID NO: 447555 - DNA, 25 bp, Homo sapien
ggtatcagtgtttgggcgttcttca

SEQ ID NO: 447556 - DNA, 25 bp, Homo sapien
tgaagatctgtactggacatcccca

SEQ ID NO: 447557 - DNA, 25 bp, Homo sapien
caaagtccatcatcacctgtgcaga

SEQ ID NO: 447558 - DNA, 25 bp, Homo sapien
ctcggatccttatgagagtttcatt

SEQ ID NO: 447559 - DNA, 25 bp, Homo sapien
catctcggatccttatgagagtttc

SEQ ID NO: 447560 - DNA, 25 bp, Homo sapien
agcatcatctcggatccttatgaga

SEQ ID NO: 447561 - DNA, 25 bp, Homo sapien
catcatctcggatccttatgagagt

SEQ ID NO: 447562 - DNA, 25 bp, Homo sapien
cagaggtggccgagccatccttggt

SEQ ID NO: 447563 - DNA, 25 bp, Homo sapien
tctgacacagggtggtagtcttctc

SEQ ID NO: 447564 - DNA, 25 bp, Homo sapien
tctcacaatggaaacctttgaagtg

SEQ ID NO: 447565 - DNA, 25 bp, Homo sapien
cttggtgtggactctcacaatggaa

SEQ ID NO: 447566 - DNA, 25 bp, Homo sapien
cagagttggcatgatccatcaggag

SEQ ID NO: 447567 - DNA, 25 bp, Homo sapien
cacagagttggcatgatccatcagg

SEQ ID NO: 447568 - DNA, 25 bp, Homo sapien
acagagttggcatgatccatcagga

SEQ ID NO: 447569 - DNA, 25 bp, Homo sapien
tcatctctctcaccccgtcaaaggt

SEQ ID NO: 447570 - DNA, 25 bp, Homo sapien
cttcgatttcaaccacgtgctgggt

SEQ ID NO: 447571 - DNA, 25 bp, Homo sapien
tcaaaggtaacttcgatttcaacca

SEQ ID NO: 447572 - DNA, 25 bp, Homo sapien
aggtaacttcgatttcaaccacgtg

SEQ ID NO: 447573 - DNA, 25 bp, Homo sapien
gaagtgtcgtcatacatcaacaggg

SEQ ID NO: 447574 - DNA, 25 bp, Homo sapien
ggttcagcactctccttagctttgg

SEQ ID NO: 447575 - DNA, 25 bp, Homo sapien
agatgacaggatagccagacatggg

SEQ ID NO: 447576 - DNA, 25 bp, Homo sapien
tctatgtacacaatggctttcgtca

SEQ ID NO: 447577 - DNA, 25 bp, Homo sapien
tggtgttcacagcacgagctgcgca

SEQ ID NO: 447578 - DNA, 25 bp, Homo sapien
tctgctgatggttacaatagggctc

SEQ ID NO: 447579 - DNA, 25 bp, Homo sapien
gaagtccacttctctcatagggctg

SEQ ID NO: 447580 - DNA, 25 bp, Homo sapien
ccggtaccgcgtcaaagtgtcattg

SEQ ID NO: 447581 - DNA, 25 bp, Homo sapien
tcagggcctgtgtagcgcaatttag

SEQ ID NO: 447582 - DNA, 25 bp, Homo sapien
cattgtgacagtgagcttgataagg

SEQ ID NO: 447583 - DNA, 25 bp, Homo sapien
tttagctgagaacggctctgctcca

SEQ ID NO: 447584 - DNA, 25 bp, Homo sapien
gataaggtttgtgtagtctgcatcc

SEQ ID NO: 447585 - DNA, 25 bp, Homo sapien
tctaggttcaggttccggtagaagc

SEQ ID NO: 447586 - DNA, 25 bp, Homo sapien
cacttcagtataatccaggaggttg

SEQ ID NO: 447587 - DNA, 25 bp, Homo sapien
tagaagcgcaaggtagtggaacctc

SEQ ID NO: 447588 - DNA, 25 bp, Homo sapien
ggtttccaactcttgtgccatcagg

SEQ ID NO: 447589 - DNA, 25 bp, Homo sapien
tggagttgggacttagtacaaatct

SEQ ID NO: 447590 - DNA, 25 bp, Homo sapien
caattggtttatccagtgaccaaac

SEQ ID NO: 447591 - DNA, 25 bp, Homo sapien
actggagttgggacttagtacaaat

SEQ ID NO: 447592 - DNA, 25 bp, Homo sapien
aacaaaccaattggtttatccagtg

SEQ ID NO: 447593 - DNA, 25 bp, Homo sapien
catccatgccagttgtctggtccct

SEQ ID NO: 447594 - DNA, 25 bp, Homo sapien
gtctggtcccttgctgtcaataatt

SEQ ID NO: 447595 - DNA, 25 bp, Homo sapien
ttgtctggtcccttgctgtcaataa

SEQ ID NO: 447596 - DNA, 25 bp, Homo sapien
ctggtcccttgctgtcaataattac

SEQ ID NO: 447597 - DNA, 25 bp, Homo sapien
gattttgagcttaaggcaataatta

SEQ ID NO: 447598 - DNA, 25 bp, Homo sapien
gatataatgtttctagcccattgtc

SEQ ID NO: 447599 - DNA, 25 bp, Homo sapien
tgtcaaaaactacgtatattctggc

SEQ ID NO: 447600 - DNA, 25 bp, Homo sapien
attctggcccattgttaagaaatag

SEQ ID NO: 447601 - DNA, 25 bp, Homo sapien
tggagtctgtgctgatggtttgctt

SEQ ID NO: 447602 - DNA, 25 bp, Homo sapien
aaccacgaagcctctgaagcacatg

SEQ ID NO: 447603 - DNA, 25 bp, Homo sapien
gtggtcaataaaaccacgaagcctc

SEQ ID NO: 447604 - DNA, 25 bp, Homo sapien
ctctgaagcacatggagtctgtgct

SEQ ID NO: 447605 - DNA, 25 bp, Homo sapien
cattttcttagtacccatggctagg

SEQ ID NO: 447606 - DNA, 25 bp, Homo sapien
ggtgactaagtcaacccatatgcca

SEQ ID NO: 447607 - DNA, 25 bp, Homo sapien
taagttacttggagtacagctcccc

SEQ ID NO: 447608 - DNA, 25 bp, Homo sapien
tctatgggcggctgttattacctca

SEQ ID NO: 447609 - DNA, 25 bp, Homo sapien
cagagggactcgaagggtcacatag

SEQ ID NO: 447610 - DNA, 25 bp, Homo sapien
cacaagatggcggtgtcgtacacaa

SEQ ID NO: 447611 - DNA, 25 bp, Homo sapien
tacacaaaagttagacgaagctctg

SEQ ID NO: 447612 - DNA, 25 bp, Homo sapien
ggaatggaacacgtaggaaacatac

SEQ ID NO: 447613 - DNA, 25 bp, Homo sapien
cgcatgctggttggatagagagaac

SEQ ID NO: 447614 - DNA, 25 bp, Homo sapien
cctcatcaccgatgcgcatgctggt

SEQ ID NO: 447615 - DNA, 25 bp, Homo sapien
tgtcttgaagtgcacggccaagcgc

SEQ ID NO: 447616 - DNA, 25 bp, Homo sapien
cgggatgtgacagcacaaataagcc

SEQ ID NO: 447617 - DNA, 25 bp, Homo sapien
gtctattagtatccacacagctggg

SEQ ID NO: 447618 - DNA, 25 bp, Homo sapien
gcctgcaatcatggctacacaaaga

SEQ ID NO: 447619 - DNA, 25 bp, Homo sapien
tgggcaaacccaatttatgaatgga

SEQ ID NO: 447620 - DNA, 25 bp, Homo sapien
tgtgcactgaagttacgagctgaac

SEQ ID NO: 447621 - DNA, 25 bp, Homo sapien
cctggatgatcagctgacatgatca

SEQ ID NO: 447622 - DNA, 25 bp, Homo sapien
catgatcactgagcttgtaaaggat

SEQ ID NO: 447623 - DNA, 25 bp, Homo sapien
ccttatgaggcggagggaaaatgtc

SEQ ID NO: 447624 - DNA, 25 bp, Homo sapien
actggctggttataggttggttcac

SEQ ID NO: 447625 - DNA, 25 bp, Homo sapien
tataggtccctgagtagtcacgtac

SEQ ID NO: 447626 - DNA, 25 bp, Homo sapien
gactggcaggcggtattcctgatgt

SEQ ID NO: 447627 - DNA, 25 bp, Homo sapien
ctgttggaatcggatgtcaaggtca

SEQ ID NO: 447628 - DNA, 25 bp, Homo sapien
caaggtcaaaggtgacaggttctct

SEQ ID NO: 447629 - DNA, 25 bp, Homo sapien
ttctgcaaaagcaacatcactctct

SEQ ID NO: 447630 - DNA, 25 bp, Homo sapien
aactcagcagccactggatcactga

SEQ ID NO: 447631 - DNA, 25 bp, Homo sapien
gcaggtacatttgggtgttcaagct

SEQ ID NO: 447632 - DNA, 25 bp, Homo sapien
ccagagactcttcttagagagcagg

SEQ ID NO: 447633 - DNA, 25 bp, Homo sapien
tatacttgggaacatagccatcagc

SEQ ID NO: 447634 - DNA, 25 bp, Homo sapien
tatataagagtgaaggagagtcggc

SEQ ID NO: 447635 - DNA, 25 bp, Homo sapien
tggacaggatccaccatgacacgac

SEQ ID NO: 447636 - DNA, 25 bp, Homo sapien
caatgctgcagtaaaaggagtcacc

SEQ ID NO: 447637 - DNA, 25 bp, Homo sapien
ctgaaagagtggtgttgagtcgact

SEQ ID NO: 447638 - DNA, 25 bp, Homo sapien
aaaactggtcgcttgtgtctctggc

SEQ ID NO: 447639 - DNA, 25 bp, Homo sapien
cagatccaggctgattcactaagag

SEQ ID NO: 447640 - DNA, 25 bp, Homo sapien
ttcagggtcatccactgctagtttg

SEQ ID NO: 447641 - DNA, 25 bp, Homo sapien
tatataccattctcggcctagagcg

SEQ ID NO: 447642 - DNA, 25 bp, Homo sapien
gatctgcctcttggtgcggtccagg

SEQ ID NO: 447643 - DNA, 25 bp, Homo sapien
cagtgagggtgtgctcctgatctct

SEQ ID NO: 447644 - DNA, 25 bp, Homo sapien
tggtgagtaaccctaccgtggtgcc

SEQ ID NO: 447645 - DNA, 25 bp, Homo sapien
gactccaaattgcatgataggctcg

SEQ ID NO: 447646 - DNA, 25 bp, Homo sapien
tcagaatgatccatacccagtaggg

SEQ ID NO: 447647 - DNA, 25 bp, Homo sapien
cccagtgaggttttgcgaaggtcaa

SEQ ID NO: 447648 - DNA, 25 bp, Homo sapien
tgtgtgattacgctactccgaggga

SEQ ID NO: 447649 - DNA, 25 bp, Homo sapien
caaaagtaggtgtcagggctggacc

SEQ ID NO: 447650 - DNA, 25 bp, Homo sapien
tggccatacgcttagtgaagacact

SEQ ID NO: 447651 - DNA, 25 bp, Homo sapien
aatgttaaagaagctcccatgagag

SEQ ID NO: 447652 - DNA, 25 bp, Homo sapien
gaacagattgaacgtttgggtccca

SEQ ID NO: 447653 - DNA, 25 bp, Homo sapien
cacagatatgtcactcagaggctag

SEQ ID NO: 447654 - DNA, 25 bp, Homo sapien
tatgaaacacaagcggcagcaagac

SEQ ID NO: 447655 - DNA, 25 bp, Homo sapien
cacttggtaaggaagcaggcacgta

SEQ ID NO: 447656 - DNA, 25 bp, Homo sapien
tcagtgtaggcaacatttggcatag

SEQ ID NO: 447657 - DNA, 25 bp, Homo sapien
tctttataactagtgggcagatgcc

SEQ ID NO: 447658 - DNA, 25 bp, Homo sapien
caggaccctgcaggtggattctact

SEQ ID NO: 447659 - DNA, 25 bp, Homo sapien
taagtttaaggctccagaaccagaa

SEQ ID NO: 447660 - DNA, 25 bp, Homo sapien
taccatcagtatgagtggcagtgga

SEQ ID NO: 447661 - DNA, 25 bp, Homo sapien
cagatagtggagagccccgtccatt

SEQ ID NO: 447662 - DNA, 25 bp, Homo sapien
tgttaagacgaactccagatagtgg

SEQ ID NO: 447663 - DNA, 25 bp, Homo sapien
tgcaatgtgggaaaggcactcatgc

SEQ ID NO: 447664 - DNA, 25 bp, Homo sapien
ccaaggtggcacttgggtatgtgtc

SEQ ID NO: 447665 - DNA, 25 bp, Homo sapien
gtggtttacagcctaaatgtctaac

SEQ ID NO: 447666 - DNA, 25 bp, Homo sapien
ggtgtggtttacagcctaaatgtct

SEQ ID NO: 447667 - DNA, 25 bp, Homo sapien
gtccaggtgtggtttacagcctaaa

SEQ ID NO: 447668 - DNA, 25 bp, Homo sapien
gctgtccaggtgtggtttacagcct

SEQ ID NO: 447669 - DNA, 25 bp, Homo sapien
atgccatcttcacctgatccttcct

SEQ ID NO: 447670 - DNA, 25 bp, Homo sapien
acctgatccttcctcagacaccctg

SEQ ID NO: 447671 - DNA, 25 bp, Homo sapien
tcttcacctgatccttcctcagaca

SEQ ID NO: 447672 - DNA, 25 bp, Homo sapien
catcttcacctgatccttcctcaga

SEQ ID NO: 447673 - DNA, 25 bp, Homo sapien
ctgggcccggtattgattaaattct

SEQ ID NO: 447674 - DNA, 25 bp, Homo sapien
tctgttagcctggatgcagtttgcc

SEQ ID NO: 447675 - DNA, 25 bp, Homo sapien
tcatttctcagtgtagccgtctctt

SEQ ID NO: 447676 - DNA, 25 bp, Homo sapien
tcagtacctgttgctccatcttggc

SEQ ID NO: 447677 - DNA, 25 bp, Homo sapien
aagtctttgcaaggatccttctccc

SEQ ID NO: 447678 - DNA, 25 bp, Homo sapien
tctccctggacttccgtctgtgttt

SEQ ID NO: 447679 - DNA, 25 bp, Homo sapien
gaaagtctttgcaaggatccttctc

SEQ ID NO: 447680 - DNA, 25 bp, Homo sapien
gtctttgcaaggatccttctccctg

SEQ ID NO: 447681 - DNA, 25 bp, Homo sapien
cagacaacatatgctcattgcacac

SEQ ID NO: 447682 - DNA, 25 bp, Homo sapien
catctgctctgctatctgtgagaca

SEQ ID NO: 447683 - DNA, 25 bp, Homo sapien
tctggagagtgtgaagtggatgaat

SEQ ID NO: 447684 - DNA, 25 bp, Homo sapien
tcacttcagggcacaaatacttcca

SEQ ID NO: 447685 - DNA, 25 bp, Homo sapien
tgtgagacaatgtatgcctgtcctt

SEQ ID NO: 447686 - DNA, 25 bp, Homo sapien
atcctgtggctgttcccccgagaca

SEQ ID NO: 447687 - DNA, 25 bp, Homo sapien
cctgtggctgttcccccgagacaag

SEQ ID NO: 447688 - DNA, 25 bp, Homo sapien
gtggctgttcccccgagacaaggct

SEQ ID NO: 447689 - DNA, 25 bp, Homo sapien
gttcccccgagacaaggctgtgcat

SEQ ID NO: 447690 - DNA, 25 bp, Homo sapien
acgctcttctggcaattccatgtcg

SEQ ID NO: 447691 - DNA, 25 bp, Homo sapien
ctgggctgcgctggtgctcgtgggc

SEQ ID NO: 447692 - DNA, 25 bp, Homo sapien
cgctgaacatgagttgccaggatgt

SEQ ID NO: 447693 - DNA, 25 bp, Homo sapien
ggccctgacccctctcagaagtcct

SEQ ID NO: 447694 - DNA, 25 bp, Homo sapien
agagagctgtcgaggagcacatgac

SEQ ID NO: 447695 - DNA, 25 bp, Homo sapien
gaactgctgacatggctctaatcta

SEQ ID NO: 447696 - DNA, 25 bp, Homo sapien
catgacacatccattcacagtccat

SEQ ID NO: 447697 - DNA, 25 bp, Homo sapien
tcgaggagcacatgacacatccatt

SEQ ID NO: 447698 - DNA, 25 bp, Homo sapien
cagccaaaagatgcagtagcagcaa

SEQ ID NO: 447699 - DNA, 25 bp, Homo sapien
tgcagccaaaagatgcagtagcagc

SEQ ID NO: 447700 - DNA, 25 bp, Homo sapien
gcagccaaaagatgcagtagcagca

SEQ ID NO: 447701 - DNA, 25 bp, Homo sapien
ctgcagccaaaagatgcagtagcag

SEQ ID NO: 447702 - DNA, 25 bp, Homo sapien
tcagaagcaggtgacgcatccattt

SEQ ID NO: 447703 - DNA, 25 bp, Homo sapien
tccattttgcttgcgatgatctagc

SEQ ID NO: 447704 - DNA, 25 bp, Homo sapien
cgatgatctagcaggcacagtgtgg

SEQ ID NO: 447705 - DNA, 25 bp, Homo sapien
tcttgattcctggatagaagctcgg

SEQ ID NO: 447706 - DNA, 25 bp, Homo sapien
tttggaactgaattaagtgggagag

SEQ ID NO: 447707 - DNA, 25 bp, Homo sapien
agtttggaactgaattaagtgggag

SEQ ID NO: 447708 - DNA, 25 bp, Homo sapien
gtttggaactgaattaagtgggaga

SEQ ID NO: 447709 - DNA, 25 bp, Homo sapien
gctaatgtattttacttcaacatag

SEQ ID NO: 447710 - DNA, 25 bp, Homo sapien
aatgtattttacttcaacataggga

SEQ ID NO: 447711 - DNA, 25 bp, Homo sapien
ataaagatggtgtccggaagatgtt

SEQ ID NO: 447712 - DNA, 25 bp, Homo sapien
gatggtgtccggaagatgttgctaa

SEQ ID NO: 447713 - DNA, 25 bp, Homo sapien
cttcaagctgcaggcagttctgttt

SEQ ID NO: 447714 - DNA, 25 bp, Homo sapien
tcaagctgcaggcagttctgttttt

SEQ ID NO: 447715 - DNA, 25 bp, Homo sapien
aagctgcaggcagttctgtttttcc

SEQ ID NO: 447716 - DNA, 25 bp, Homo sapien
acttcaagctgcaggcagttctgtt

SEQ ID NO: 447717 - DNA, 25 bp, Homo sapien
gacattgggccgtgcatatacttca

SEQ ID NO: 447718 - DNA, 25 bp, Homo sapien
taatccgtcagtatctctcccaggg

SEQ ID NO: 447719 - DNA, 25 bp, Homo sapien
gtaattgctggtggctctactccca

SEQ ID NO: 447720 - DNA, 25 bp, Homo sapien
tggcactttaggtttgtcagggaca

SEQ ID NO: 447721 - DNA, 25 bp, Homo sapien
tttctggaatgaacctgctgaatac

SEQ ID NO: 447722 - DNA, 25 bp, Homo sapien
gaatgaacctgctgaatactgtcct

SEQ ID NO: 447723 - DNA, 25 bp, Homo sapien
tactgcatccccagtcaaggcaatt

SEQ ID NO: 447724 - DNA, 25 bp, Homo sapien
gttcctactgcatccccagtcaagg

SEQ ID NO: 447725 - DNA, 25 bp, Homo sapien
ctgaaacggaagaaattgttgccat

SEQ ID NO: 447726 - DNA, 25 bp, Homo sapien
cccttgactgaaacggaagaaattg

SEQ ID NO: 447727 - DNA, 25 bp, Homo sapien
tgactgaaacggaagaaattgttgc

SEQ ID NO: 447728 - DNA, 25 bp, Homo sapien
tacgacccttgactgaaacggaaga

SEQ ID NO: 447729 - DNA, 25 bp, Homo sapien
gttcttaggaattggccgtcaataa

SEQ ID NO: 447730 - DNA, 25 bp, Homo sapien
gccgtcaataacttgagcttcaaaa

SEQ ID NO: 447731 - DNA, 25 bp, Homo sapien
gctgttgtgtggatcgcatttccca

SEQ ID NO: 447732 - DNA, 25 bp, Homo sapien
catttcccagagtgaaccagacagc

SEQ ID NO: 447733 - DNA, 25 bp, Homo sapien
ttcaagagctacctctggcggcacc

SEQ ID NO: 447734 - DNA, 25 bp, Homo sapien
aaaccacgtcgggatagtagtcaag

SEQ ID NO: 447735 - DNA, 25 bp, Homo sapien
tattttttactatcggcggagcaga

SEQ ID NO: 447736 - DNA, 25 bp, Homo sapien
ttcgcatcctctcttgctcgtggag

SEQ ID NO: 447737 - DNA, 25 bp, Homo sapien
tggtaacaaagagcctgccgggccg

SEQ ID NO: 447738 - DNA, 25 bp, Homo sapien
gtaacaaagagcctgccgggccgcc

SEQ ID NO: 447739 - DNA, 25 bp, Homo sapien
ctggtaacaaagagcctgccgggcc

SEQ ID NO: 447740 - DNA, 25 bp, Homo sapien
aacaaagagcctgccgggccgcctg

SEQ ID NO: 447741 - DNA, 25 bp, Homo sapien
tacttgggcgcgactggctttattg

SEQ ID NO: 447742 - DNA, 25 bp, Homo sapien
tattgtaggtccccatgagctggtg

SEQ ID NO: 447743 - DNA, 25 bp, Homo sapien
gggtaaccaggcagggcgtctggcg

SEQ ID NO: 447744 - DNA, 25 bp, Homo sapien
ctggcggcgcagtgttgagtttact

SEQ ID NO: 447745 - DNA, 25 bp, Homo sapien
ccgccctcatgtcaggtgcttcggg

SEQ ID NO: 447746 - DNA, 25 bp, Homo sapien
gtgcttcgggctgacccagtgacca

SEQ ID NO: 447747 - DNA, 25 bp, Homo sapien
gaccagttccggacttcgtgtgcat

SEQ ID NO: 447748 - DNA, 25 bp, Homo sapien
gccgctgactttcagtggccaccaa

SEQ ID NO: 447749 - DNA, 25 bp, Homo sapien
ctttgagtacgaaagggaacagaga

SEQ ID NO: 447750 - DNA, 25 bp, Homo sapien
gacagcctcaggctgcaacggtttg

SEQ ID NO: 447751 - DNA, 25 bp, Homo sapien
tttgcagcggcacagagggtctgcc

SEQ ID NO: 447752 - DNA, 25 bp, Homo sapien
tgcaacggtttgcagcggcacagag

SEQ ID NO: 447753 - DNA, 25 bp, Homo sapien
caggctgcaacggtttgcagcggca

SEQ ID NO: 447754 - DNA, 25 bp, Homo sapien
tggagagccacaaaaacgcgaatgc

SEQ ID NO: 447755 - DNA, 25 bp, Homo sapien
ctacgcagacccagaatctcgccat

SEQ ID NO: 447756 - DNA, 25 bp, Homo sapien
cacaaaaacgcgaatgcaaaaccaa

SEQ ID NO: 447757 - DNA, 25 bp, Homo sapien
caagaaagaagccagcaccggctac

SEQ ID NO: 447758 - DNA, 25 bp, Homo sapien
aaactcaaagggtcaaggcagtttg

SEQ ID NO: 447759 - DNA, 25 bp, Homo sapien
tagatgcctaaagaccaacacgacc

SEQ ID NO: 447760 - DNA, 25 bp, Homo sapien
tttgagacaagctactgagggaacc

SEQ ID NO: 447761 - DNA, 25 bp, Homo sapien
tttaagcatgccttgacaactagaa

SEQ ID NO: 447762 - DNA, 25 bp, Homo sapien
ctccaggaaactgcaaaagtaaagt

SEQ ID NO: 447763 - DNA, 25 bp, Homo sapien
gggtgcttaggccaacccacatcca

SEQ ID NO: 447764 - DNA, 25 bp, Homo sapien
tccattgagggagtcaactgcaaca

SEQ ID NO: 447765 - DNA, 25 bp, Homo sapien
cacatccagccggtaaagaattttc

SEQ ID NO: 447766 - DNA, 25 bp, Homo sapien
tgttccggtaaaatattctgggtgc

SEQ ID NO: 447767 - DNA, 25 bp, Homo sapien
taacatatctttcacattcgaaacc

SEQ ID NO: 447768 - DNA, 25 bp, Homo sapien
ggtaatctgtatcttggcgaagaaa

SEQ ID NO: 447769 - DNA, 25 bp, Homo sapien
gcttaaaggaaaggtaatctgtatc

SEQ ID NO: 447770 - DNA, 25 bp, Homo sapien
aaggaaaggtaatctgtatcttggc

SEQ ID NO: 447771 - DNA, 25 bp, Homo sapien
tccagacggattgttcatatagagt

SEQ ID NO: 447772 - DNA, 25 bp, Homo sapien
gagtactggctgcaaatataccatg

SEQ ID NO: 447773 - DNA, 25 bp, Homo sapien
tccaggctcgtaggaaatatccatc

SEQ ID NO: 447774 - DNA, 25 bp, Homo sapien
ttcctacatccgtgatccagacgga

SEQ ID NO: 447775 - DNA, 25 bp, Homo sapien
cacggcgtccagcccttgttaaatt

SEQ ID NO: 447776 - DNA, 25 bp, Homo sapien
gtgatttcatgaatcgttaaagaaa

SEQ ID NO: 447777 - DNA, 25 bp, Homo sapien
gcaaagatgtgatttccagtaagat

SEQ ID NO: 447778 - DNA, 25 bp, Homo sapien
tgatttcatgaatcgttaaagaaat

SEQ ID NO: 447779 - DNA, 25 bp, Homo sapien
ttcaagaacataactgggccaagga

SEQ ID NO: 447780 - DNA, 25 bp, Homo sapien
gaggaaaagaccctagacaagttca

SEQ ID NO: 447781 - DNA, 25 bp, Homo sapien
tgtcttaagctacagccacaggtga

SEQ ID NO: 447782 - DNA, 25 bp, Homo sapien
taatggcactacttacagaaactga

SEQ ID NO: 447783 - DNA, 25 bp, Homo sapien
aatgtaaatatctcctgtgtcctct

SEQ ID NO: 447784 - DNA, 25 bp, Homo sapien
actgcaaaggattcaaactagtgcc

SEQ ID NO: 447785 - DNA, 25 bp, Homo sapien
gatcaatctgttattcaatcctcca

SEQ ID NO: 447786 - DNA, 25 bp, Homo sapien
gcctggagtacccaagacttgaaca

SEQ ID NO: 447787 - DNA, 25 bp, Homo sapien
ttctccaggcaatttagtttctcct

SEQ ID NO: 447788 - DNA, 25 bp, Homo sapien
aggcaatttagtttctcctcctaag

SEQ ID NO: 447789 - DNA, 25 bp, Homo sapien
gaatcaatagcatagactacatttc

SEQ ID NO: 447790 - DNA, 25 bp, Homo sapien
aatagcatagactacatttcattgt

SEQ ID NO: 447791 - DNA, 25 bp, Homo sapien
gacatcagagttttgctgccacaag

SEQ ID NO: 447792 - DNA, 25 bp, Homo sapien
cagaaactagaagcggcaaggcagg

SEQ ID NO: 447793 - DNA, 25 bp, Homo sapien
gaatgcttgagccaccagaaactag

SEQ ID NO: 447794 - DNA, 25 bp, Homo sapien
tctcctttattacgcactacggtgg

SEQ ID NO: 447795 - DNA, 25 bp, Homo sapien
tccatgcagccaaaggatcatgaaa

SEQ ID NO: 447796 - DNA, 25 bp, Homo sapien
ttgaacttagcaggccctgtcccat

SEQ ID NO: 447797 - DNA, 25 bp, Homo sapien
ccgaccagctgaatcaagtgtaaca

SEQ ID NO: 447798 - DNA, 25 bp, Homo sapien
tgaggtatgttgaacttagcaggcc

SEQ ID NO: 447799 - DNA, 25 bp, Homo sapien
cctaatggtatgaaggcaagtagcc

SEQ ID NO: 447800 - DNA, 25 bp, Homo sapien
gattaacgtcttatggcagatcaga

SEQ ID NO: 447801 - DNA, 25 bp, Homo sapien
caaagtcccagacacaatgacgctg

SEQ ID NO: 447802 - DNA, 25 bp, Homo sapien
tactatgatacgaagtacaggctgc

SEQ ID NO: 447803 - DNA, 25 bp, Homo sapien
ttttttcttagcacacaatgagtca

SEQ ID NO: 447804 - DNA, 25 bp, Homo sapien
ttaccaaggtatgtacagagtgctg

SEQ ID NO: 447805 - DNA, 25 bp, Homo sapien
gaaaagcagccttacttctcaagag

SEQ ID NO: 447806 - DNA, 25 bp, Homo sapien
tggagtactctaccataatgcaggg

SEQ ID NO: 447807 - DNA, 25 bp, Homo sapien
cagagtgctgaaccaactgaagaag

SEQ ID NO: 447808 - DNA, 25 bp, Homo sapien
ctttatcaaatacttggattctttt

SEQ ID NO: 447809 - DNA, 25 bp, Homo sapien
ttatttcctcggtcagcaacccaca

SEQ ID NO: 447810 - DNA, 25 bp, Homo sapien
ttcttttatttcctcggtcagcaac

SEQ ID NO: 447811 - DNA, 25 bp, Homo sapien
cctcttctgtgaaacaattattcca

SEQ ID NO: 447812 - DNA, 25 bp, Homo sapien
gatcacagaacactccccaatgctt

SEQ ID NO: 447813 - DNA, 25 bp, Homo sapien
ttctgtcgacttctaggagatgtgg

SEQ ID NO: 447814 - DNA, 25 bp, Homo sapien
cagctgggccacaatcaagtacttc

SEQ ID NO: 447815 - DNA, 25 bp, Homo sapien
gctgctacgactgagagcctgctaa

SEQ ID NO: 447816 - DNA, 25 bp, Homo sapien
aatgaaggaacatagctattcaaag

SEQ ID NO: 447817 - DNA, 25 bp, Homo sapien
aacatagctattcaaagggacatat

SEQ ID NO: 447818 - DNA, 25 bp, Homo sapien
ggaacatagctattcaaagggacat

SEQ ID NO: 447819 - DNA, 25 bp, Homo sapien
caaatgaaggaacatagctattcaa

SEQ ID NO: 447820 - DNA, 25 bp, Homo sapien
tacccagggagaatcagtctaccag

SEQ ID NO: 447821 - DNA, 25 bp, Homo sapien
cttggaatacagagtacagggcttc

SEQ ID NO: 447822 - DNA, 25 bp, Homo sapien
aaagtcccactatgctccaaggtcg

SEQ ID NO: 447823 - DNA, 25 bp, Homo sapien
taaggtcatacagtccgatcagtgg

SEQ ID NO: 447824 - DNA, 25 bp, Homo sapien
tcaaactttaattggggagccagat

SEQ ID NO: 447825 - DNA, 25 bp, Homo sapien
aatcaaactttaattggggagccag

SEQ ID NO: 447826 - DNA, 25 bp, Homo sapien
tgacaataaaatcaaactttaattg

SEQ ID NO: 447827 - DNA, 25 bp, Homo sapien
caaactttaattggggagccagata

SEQ ID NO: 447828 - DNA, 25 bp, Homo sapien
gacctaagaacaaagtcctagcact

SEQ ID NO: 447829 - DNA, 25 bp, Homo sapien
caaaataggactttattgccgtagc

SEQ ID NO: 447830 - DNA, 25 bp, Homo sapien
tacactacattgcttgaagcagtct

SEQ ID NO: 447831 - DNA, 25 bp, Homo sapien
aatgctgactatccaatctgtcctg

SEQ ID NO: 447832 - DNA, 25 bp, Homo sapien
tccttaagatgtaagcaagtggcag

SEQ ID NO: 447833 - DNA, 25 bp, Homo sapien
tgtggacaagtccaattaaccagta

SEQ ID NO: 447834 - DNA, 25 bp, Homo sapien
caaccaaagtatgaagtttagccca

SEQ ID NO: 447835 - DNA, 25 bp, Homo sapien
taagcagaacgctactgacctcttg

SEQ ID NO: 447836 - DNA, 25 bp, Homo sapien
gtaaagtcccataacaggccacctg

SEQ ID NO: 447837 - DNA, 25 bp, Homo sapien
gccacctgcaagctgcggagcaaga

SEQ ID NO: 447838 - DNA, 25 bp, Homo sapien
cacctgcaagctgcggagcaagaaa

SEQ ID NO: 447839 - DNA, 25 bp, Homo sapien
ccacctgcaagctgcggagcaagaa

SEQ ID NO: 447840 - DNA, 25 bp, Homo sapien
tacatcaatgtcaaaagccagttaa

SEQ ID NO: 447841 - DNA, 25 bp, Homo sapien
tccaagcaagacatcatgattaaaa

SEQ ID NO: 447842 - DNA, 25 bp, Homo sapien
aatagaactctactgccctttgtgt

SEQ ID NO: 447843 - DNA, 25 bp, Homo sapien
aattggtgtagtgcaaacatttcca

SEQ ID NO: 447844 - DNA, 25 bp, Homo sapien
tcaattgtgaaaagctacaagtagc

SEQ ID NO: 447845 - DNA, 25 bp, Homo sapien
gagagagacgaatgtgctccaaatt

SEQ ID NO: 447846 - DNA, 25 bp, Homo sapien
accttactcaattgtgaaaagctac

SEQ ID NO: 447847 - DNA, 25 bp, Homo sapien
tcaggtagagagagacgaatgtgct

SEQ ID NO: 447848 - DNA, 25 bp, Homo sapien
cgaggcaggtaacgatctttatgtg

SEQ ID NO: 447849 - DNA, 25 bp, Homo sapien
ttaagggcctgagaagctgaagaca

SEQ ID NO: 447850 - DNA, 25 bp, Homo sapien
tggagttataccctagaggatcctc

SEQ ID NO: 447851 - DNA, 25 bp, Homo sapien
tccttttctccagtagagtcatcca

SEQ ID NO: 447852 - DNA, 25 bp, Homo sapien
gcattctagtcttagggctgctcag

SEQ ID NO: 447853 - DNA, 25 bp, Homo sapien
gaagttactcaagcactgccctgtg

SEQ ID NO: 447854 - DNA, 25 bp, Homo sapien
ggcagtctatcaagggcaggctctt

SEQ ID NO: 447855 - DNA, 25 bp, Homo sapien
tatcctccctctacgaagttggcat

SEQ ID NO: 447856 - DNA, 25 bp, Homo sapien
catttgtatatcagggaaagcctta

SEQ ID NO: 447857 - DNA, 25 bp, Homo sapien
caagtgtagagtgttactgaatccc

SEQ ID NO: 447858 - DNA, 25 bp, Homo sapien
tgttctaaatatgctgtggtgcggc

SEQ ID NO: 447859 - DNA, 25 bp, Homo sapien
aaagggcacaccaatcgagcatagt

SEQ ID NO: 447860 - DNA, 25 bp, Homo sapien
cccggtgtgcccgtgtcatcaggtg

SEQ ID NO: 447861 - DNA, 25 bp, Homo sapien
catcaggtgtactgccttcctttcc

SEQ ID NO: 447862 - DNA, 25 bp, Homo sapien
ggtgtgcccgtgtcatcaggtgtac

SEQ ID NO: 447863 - DNA, 25 bp, Homo sapien
cgtgtcatcaggtgtactgccttcc

SEQ ID NO: 447864 - DNA, 25 bp, Homo sapien
atagatatctatagaaaccacccta

SEQ ID NO: 447865 - DNA, 25 bp, Homo sapien
taacaaagtctctcggcttacagca

SEQ ID NO: 447866 - DNA, 25 bp, Homo sapien
aaaattcaagattacgaagcccact

SEQ ID NO: 447867 - DNA, 25 bp, Homo sapien
aaatttttctcggtgccacatggca

SEQ ID NO: 447868 - DNA, 25 bp, Homo sapien
aagaacaaagggagcattctctgtg

SEQ ID NO: 447869 - DNA, 25 bp, Homo sapien
gctcctcaggaaatgccacgcatag

SEQ ID NO: 447870 - DNA, 25 bp, Homo sapien
caatgctattgttggggatgggctc

SEQ ID NO: 447871 - DNA, 25 bp, Homo sapien
cataggaagggaagcattgtctgtg

SEQ ID NO: 447872 - DNA, 25 bp, Homo sapien
cactggaggaaattgaactgttgga

SEQ ID NO: 447873 - DNA, 25 bp, Homo sapien
cagatacatctaatgccattacaaa

SEQ ID NO: 447874 - DNA, 25 bp, Homo sapien
tgctgtatgattcctggacctattc

SEQ ID NO: 447875 - DNA, 25 bp, Homo sapien
aatttgtcactagttttccagatac

SEQ ID NO: 447876 - DNA, 25 bp, Homo sapien
tctgaattcgtatcagccgctgcca

SEQ ID NO: 447877 - DNA, 25 bp, Homo sapien
ccatgggtagaataatcaggctgcc

SEQ ID NO: 447878 - DNA, 25 bp, Homo sapien
gcagttgtgaaagaccgatgagtat

SEQ ID NO: 447879 - DNA, 25 bp, Homo sapien
tacaagctaggtgctctctgctgtt

SEQ ID NO: 447880 - DNA, 25 bp, Homo sapien
gcagttttcttggtgcagatagaca

SEQ ID NO: 447881 - DNA, 25 bp, Homo sapien
tgctagagacctcttgtctgcagtt

SEQ ID NO: 447882 - DNA, 25 bp, Homo sapien
tagagacctcttgtctgcagttttc

SEQ ID NO: 447883 - DNA, 25 bp, Homo sapien
ctattgctagagacctcttgtctgc

SEQ ID NO: 447884 - DNA, 25 bp, Homo sapien
tggctgagcgttctacgttgctttg

SEQ ID NO: 447885 - DNA, 25 bp, Homo sapien
cctgaggtggctgagcgttctacgt

SEQ ID NO: 447886 - DNA, 25 bp, Homo sapien
tgagcgttctacgttgctttgctct

SEQ ID NO: 447887 - DNA, 25 bp, Homo sapien
aggtggctgagcgttctacgttgct

SEQ ID NO: 447888 - DNA, 25 bp, Homo sapien
ccccatctagtgatagctccttgca

SEQ ID NO: 447889 - DNA, 25 bp, Homo sapien
catacgttgggtcaaactctttgga

SEQ ID NO: 447890 - DNA, 25 bp, Homo sapien
ttatcttaagactcctgcttctaag

SEQ ID NO: 447891 - DNA, 25 bp, Homo sapien
tccactcgtcctggtgaatcagctt

SEQ ID NO: 447892 - DNA, 25 bp, Homo sapien
gtacatcaaagatattggcttgaag

SEQ ID NO: 447893 - DNA, 25 bp, Homo sapien
tttgtacctatgtacatcaaagata

SEQ ID NO: 447894 - DNA, 25 bp, Homo sapien
tcaacgataccagccctactttgtc

SEQ ID NO: 447895 - DNA, 25 bp, Homo sapien
ggaatagtttcagtatcaacgatac

SEQ ID NO: 447896 - DNA, 25 bp, Homo sapien
agaggtcattgtcctcgccaggtcc

SEQ ID NO: 447897 - DNA, 25 bp, Homo sapien
tgtgagtgaggcatgtggatttaaa

SEQ ID NO: 447898 - DNA, 25 bp, Homo sapien
gggagcaagaggtcattgtcctcgc

SEQ ID NO: 447899 - DNA, 25 bp, Homo sapien
aaatgaagtaacacatggagcccag

SEQ ID NO: 447900 - DNA, 25 bp, Homo sapien
tttctggatgttgcgctaactgctc

SEQ ID NO: 447901 - DNA, 25 bp, Homo sapien
agttttctggatgttgcgctaactg

SEQ ID NO: 447902 - DNA, 25 bp, Homo sapien
ggatgttgcgctaactgctcacact

SEQ ID NO: 447903 - DNA, 25 bp, Homo sapien
ctggatgttgcgctaactgctcaca

SEQ ID NO: 447904 - DNA, 25 bp, Homo sapien
tgctttcggtcagatgagcaacttt

SEQ ID NO: 447905 - DNA, 25 bp, Homo sapien
ttcccctgctttcggtcagatgagc

SEQ ID NO: 447906 - DNA, 25 bp, Homo sapien
ctttcccctgctttcggtcagatga

SEQ ID NO: 447907 - DNA, 25 bp, Homo sapien
ctctttcccctgctttcggtcagat

SEQ ID NO: 447908 - DNA, 25 bp, Homo sapien
accaacttcttgcaagccgtgtaga

SEQ ID NO: 447909 - DNA, 25 bp, Homo sapien
caagccgtgtagaggataggctttc

SEQ ID NO: 447910 - DNA, 25 bp, Homo sapien
tcttgcaagccgtgtagaggatagg

SEQ ID NO: 447911 - DNA, 25 bp, Homo sapien
cgtgtagaggataggctttcaatct

SEQ ID NO: 447912 - DNA, 25 bp, Homo sapien
tgtcaaaaccagttccctggagccc

SEQ ID NO: 447913 - DNA, 25 bp, Homo sapien
ctgtttcaatcacttctgtagttgt

SEQ ID NO: 447914 - DNA, 25 bp, Homo sapien
tcaaaaccagttccctggagcccat

SEQ ID NO: 447915 - DNA, 25 bp, Homo sapien
ttcaatcacttctgtagttgtcaaa

SEQ ID NO: 447916 - DNA, 25 bp, Homo sapien
tttgcagtaagtctcatacttggac

SEQ ID NO: 447917 - DNA, 25 bp, Homo sapien
ttggactttctgagtgctgtatttg

SEQ ID NO: 447918 - DNA, 25 bp, Homo sapien
cagtaagtctcatacttggactttc

SEQ ID NO: 447919 - DNA, 25 bp, Homo sapien
taagtctcatacttggactttctga

SEQ ID NO: 447920 - DNA, 25 bp, Homo sapien
cacttggatgcctctaagacttgca

SEQ ID NO: 447921 - DNA, 25 bp, Homo sapien
gataccgtggagcactacagatagt

SEQ ID NO: 447922 - DNA, 25 bp, Homo sapien
ggcaatagcatagccggataccgtg

SEQ ID NO: 447923 - DNA, 25 bp, Homo sapien
gctgaagtgtttagggaagtctttc

SEQ ID NO: 447924 - DNA, 25 bp, Homo sapien
tacaaggttatgcacagaacaagag

SEQ ID NO: 447925 - DNA, 25 bp, Homo sapien
agggacctctttcagcgcttttgtg

SEQ ID NO: 447926 - DNA, 25 bp, Homo sapien
ccgggtgagtctggtcaagaattct

SEQ ID NO: 447927 - DNA, 25 bp, Homo sapien
gacacagccaaaggcttcagaaccg

SEQ ID NO: 447928 - DNA, 25 bp, Homo sapien
tgctgggtggacatagaagtaatac

SEQ ID NO: 447929 - DNA, 25 bp, Homo sapien
gaggaactcaaataccagggatctg

SEQ ID NO: 447930 - DNA, 25 bp, Homo sapien
cagtgaggaaatccttaaggccagc

SEQ ID NO: 447931 - DNA, 25 bp, Homo sapien
caactctagaaatcccagtgaggaa

SEQ ID NO: 447932 - DNA, 25 bp, Homo sapien
taggaacctgctcgtctcacagagg

SEQ ID NO: 447933 - DNA, 25 bp, Homo sapien
ggatcaaccccaaggaatgcaaatt

SEQ ID NO: 447934 - DNA, 25 bp, Homo sapien
gccaaagggcgtcctttttggatca

SEQ ID NO: 447935 - DNA, 25 bp, Homo sapien
accatgatgccaaacctgtgagtgt

SEQ ID NO: 447936 - DNA, 25 bp, Homo sapien
tgtgtggcttgcagattaccctcac

SEQ ID NO: 447937 - DNA, 25 bp, Homo sapien
gtgtggcttgcagattaccctcaca

SEQ ID NO: 447938 - DNA, 25 bp, Homo sapien
agatctgccagcaggagtaatgaaa

SEQ ID NO: 447939 - DNA, 25 bp, Homo sapien
gatctgccagcaggagtaatgaaag

SEQ ID NO: 447940 - DNA, 25 bp, Homo sapien
tcttccacggttctggaggtgacac

SEQ ID NO: 447941 - DNA, 25 bp, Homo sapien
gcaagtttctctagaacattcatct

SEQ ID NO: 447942 - DNA, 25 bp, Homo sapien
agaagaggcagggtatatgcaagtt

SEQ ID NO: 447943 - DNA, 25 bp, Homo sapien
gccagctgttgccaacgcgtttttt

SEQ ID NO: 447944 - DNA, 25 bp, Homo sapien
aatcgcatatcatgtctggaagaag

SEQ ID NO: 447945 - DNA, 25 bp, Homo sapien
aacatttaggacaagaatgaagaca

SEQ ID NO: 447946 - DNA, 25 bp, Homo sapien
tgaagacaaacaatcgcatatcatg

SEQ ID NO: 447947 - DNA, 25 bp, Homo sapien
catttaggacaagaatgaagacaaa

SEQ ID NO: 447948 - DNA, 25 bp, Homo sapien
cgtggattatcgcacagactgggag

SEQ ID NO: 447949 - DNA, 25 bp, Homo sapien
ttatgcagacctttagagttaagcc

SEQ ID NO: 447950 - DNA, 25 bp, Homo sapien
gaattcagccgaagatatgagagta

SEQ ID NO: 447951 - DNA, 25 bp, Homo sapien
gggcaactttctgtccactatagga

SEQ ID NO: 447952 - DNA, 25 bp, Homo sapien
caaggatgacacctaggttgaggac

SEQ ID NO: 447953 - DNA, 25 bp, Homo sapien
caaggtaaaagtggctgtgttccgc

SEQ ID NO: 447954 - DNA, 25 bp, Homo sapien
tacttctccagtaaacgtccagtga

SEQ ID NO: 447955 - DNA, 25 bp, Homo sapien
tgctgttgactcatggtgaccacaa

SEQ ID NO: 447956 - DNA, 25 bp, Homo sapien
ggacacaggtcctgcacacttattc

SEQ ID NO: 447957 - DNA, 25 bp, Homo sapien
acacaggtcctgcacacttattcat

SEQ ID NO: 447958 - DNA, 25 bp, Homo sapien
ctctgtgccccgatgtgtttccctc

SEQ ID NO: 447959 - DNA, 25 bp, Homo sapien
tctgtgccccgatgtgtttccctca

SEQ ID NO: 447960 - DNA, 25 bp, Homo sapien
agttctcagatcttccagggccggt

SEQ ID NO: 447961 - DNA, 25 bp, Homo sapien
tctcagatcttccagggccggtttc

SEQ ID NO: 447962 - DNA, 25 bp, Homo sapien
gttctcagatcttccagggccggtt

SEQ ID NO: 447963 - DNA, 25 bp, Homo sapien
tcagatcttccagggccggtttctc

SEQ ID NO: 447964 - DNA, 25 bp, Homo sapien
ttgccaaagagaacagaatcctgcc

SEQ ID NO: 447965 - DNA, 25 bp, Homo sapien
gcttgatcatccctaaagtgttcag

SEQ ID NO: 447966 - DNA, 25 bp, Homo sapien
ccctagcagtttattcaagaagttg

SEQ ID NO: 447967 - DNA, 25 bp, Homo sapien
taggaatggtatccacggcttgatc

SEQ ID NO: 447968 - DNA, 25 bp, Homo sapien
aacttggctccaaatgatgcaggga

SEQ ID NO: 447969 - DNA, 25 bp, Homo sapien
gcagctgctgtgaattcaacaaaga

SEQ ID NO: 447970 - DNA, 25 bp, Homo sapien
cccagagctctagcacagaatcaca

SEQ ID NO: 447971 - DNA, 25 bp, Homo sapien
gacccaaattgtataggaacccatg

SEQ ID NO: 447972 - DNA, 25 bp, Homo sapien
ttatggcggtgacaaaggaatttgg

SEQ ID NO: 447973 - DNA, 25 bp, Homo sapien
gctgacttgcttcacaacatctttc

SEQ ID NO: 447974 - DNA, 25 bp, Homo sapien
ccaaaatgtgtgaaactgacgcctt

SEQ ID NO: 447975 - DNA, 25 bp, Homo sapien
tccactcgtatgcacaaatttccaa

SEQ ID NO: 447976 - DNA, 25 bp, Homo sapien
tttacggccagtgtatccaagctca

SEQ ID NO: 447977 - DNA, 25 bp, Homo sapien
tccaagctcacgtttgggcccaagg

SEQ ID NO: 447978 - DNA, 25 bp, Homo sapien
cgctcctgtaggtggtttacggcca

SEQ ID NO: 447979 - DNA, 25 bp, Homo sapien
gaagagtttctactaggaacgctcc

SEQ ID NO: 447980 - DNA, 25 bp, Homo sapien
aaaagctgcaaaactagatgttcca

SEQ ID NO: 447981 - DNA, 25 bp, Homo sapien
tcctttctgaagtaaaaccctatgc

SEQ ID NO: 447982 - DNA, 25 bp, Homo sapien
cctgcagaggttcaagggtcacagc

SEQ ID NO: 447983 - DNA, 25 bp, Homo sapien
aaaccctatgccttcatagcaggca

SEQ ID NO: 447984 - DNA, 25 bp, Homo sapien
tggcagtcagagttttctgatcttg

SEQ ID NO: 447985 - DNA, 25 bp, Homo sapien
tttcttatttaaccctggcagtcag

SEQ ID NO: 447986 - DNA, 25 bp, Homo sapien
ggcagtcagagttttctgatcttgg

SEQ ID NO: 447987 - DNA, 25 bp, Homo sapien
gcagtcagagttttctgatcttgga

SEQ ID NO: 447988 - DNA, 25 bp, Homo sapien
gtgaacttcaaactgcagtatggcc

SEQ ID NO: 447989 - DNA, 25 bp, Homo sapien
aaggtgaacttcaaactgcagtatg

SEQ ID NO: 447990 - DNA, 25 bp, Homo sapien
tgggggtactcagaagggcttggtc

SEQ ID NO: 447991 - DNA, 25 bp, Homo sapien
tcaaactgcagtatggccagaaggt

SEQ ID NO: 447992 - DNA, 25 bp, Homo sapien
gatgagtaagtagtctctggcatcc

SEQ ID NO: 447993 - DNA, 25 bp, Homo sapien
aagatgagtaagtagtctctggcat

SEQ ID NO: 447994 - DNA, 25 bp, Homo sapien
tgagtaagtagtctctggcatccat

SEQ ID NO: 447995 - DNA, 25 bp, Homo sapien
atgagtaagtagtctctggcatcca

SEQ ID NO: 447996 - DNA, 25 bp, Homo sapien
tatagttctacttcccgacaattcc

SEQ ID NO: 447997 - DNA, 25 bp, Homo sapien
gatatgtcatagcaatcaggcccca

SEQ ID NO: 447998 - DNA, 25 bp, Homo sapien
cacagctgatatgaaagggtcctcg

SEQ ID NO: 447999 - DNA, 25 bp, Homo sapien
aatcatagcgccttttctgaagctc

SEQ ID NO: 448000 - DNA, 25 bp, Homo sapien
ttaatcaatcgccagaaagctctga

SEQ ID NO: 448001 - DNA, 25 bp, Homo sapien
cctgattcagttaggtaggtgggac

SEQ ID NO: 448002 - DNA, 25 bp, Homo sapien
gaagtagtggtcagtcaaaagtcat

SEQ ID NO: 448003 - DNA, 25 bp, Homo sapien
gcccaagtagatattaccagtcagc

SEQ ID NO: 448004 - DNA, 25 bp, Homo sapien
aaactagtcggttgtgatgacacac

SEQ ID NO: 448005 - DNA, 25 bp, Homo sapien
tgagctctgaccttatatgtacact

SEQ ID NO: 448006 - DNA, 25 bp, Homo sapien
catatgttcacttattaaagacagc

SEQ ID NO: 448007 - DNA, 25 bp, Homo sapien
tcaggaggtaggataacccttggga

SEQ ID NO: 448008 - DNA, 25 bp, Homo sapien
tgagcatcactttggtgaattttgg

SEQ ID NO: 448009 - DNA, 25 bp, Homo sapien
ctgagcatcactttggtgaattttg

SEQ ID NO: 448010 - DNA, 25 bp, Homo sapien
aggaattcttatacttttaggctga

SEQ ID NO: 448011 - DNA, 25 bp, Homo sapien
caggaaatcgatgggttgaagggag

SEQ ID NO: 448012 - DNA, 25 bp, Homo sapien
acaggagcaggaaatcgatgggttg

SEQ ID NO: 448013 - DNA, 25 bp, Homo sapien
tgggatggataggaattcttatact

SEQ ID NO: 448014 - DNA, 25 bp, Homo sapien
caaagaatccattggtagatgtggt

SEQ ID NO: 448015 - DNA, 25 bp, Homo sapien
agaatccattggtagatgtggttgc

SEQ ID NO: 448016 - DNA, 25 bp, Homo sapien
aatccattggtagatgtggttgcag

SEQ ID NO: 448017 - DNA, 25 bp, Homo sapien
atcaaagaatccattggtagatgtg

SEQ ID NO: 448018 - DNA, 25 bp, Homo sapien
cagctttcaattggccagtttcccc

SEQ ID NO: 448019 - DNA, 25 bp, Homo sapien
gaggcagttttagaaggtctgacag

SEQ ID NO: 448020 - DNA, 25 bp, Homo sapien
gctgcagactagcaataagtttcca

SEQ ID NO: 448021 - DNA, 25 bp, Homo sapien
tctgacagcattgggattagctccc

SEQ ID NO: 448022 - DNA, 25 bp, Homo sapien
cctgtgtcctgtggattgcttcact

SEQ ID NO: 448023 - DNA, 25 bp, Homo sapien
aatctggaccggctgaagattgttt

SEQ ID NO: 448024 - DNA, 25 bp, Homo sapien
gtcctcctagtactccataatctgg

SEQ ID NO: 448025 - DNA, 25 bp, Homo sapien
aagccttgtctggattaaacctgtg

SEQ ID NO: 448026 - DNA, 25 bp, Homo sapien
tcctgagcagggtggaaccgcttgt

SEQ ID NO: 448027 - DNA, 25 bp, Homo sapien
gggtggaaccgcttgtggctttgtg

SEQ ID NO: 448028 - DNA, 25 bp, Homo sapien
cgcttgtggctttgtgtccctggca

SEQ ID NO: 448029 - DNA, 25 bp, Homo sapien
ccagatcctgagcagggtggaaccg

SEQ ID NO: 448030 - DNA, 25 bp, Homo sapien
tttgctaacatttcctaaagctgtg

SEQ ID NO: 448031 - DNA, 25 bp, Homo sapien
taaaggtggtgttagcagtgtcatc

SEQ ID NO: 448032 - DNA, 25 bp, Homo sapien
cagcatggttttgaaggagcaaggc

SEQ ID NO: 448033 - DNA, 25 bp, Homo sapien
ttctgagggttgagctgcctcttct

SEQ ID NO: 448034 - DNA, 25 bp, Homo sapien
cttgaagttaaccatgccagcaccc

SEQ ID NO: 448035 - DNA, 25 bp, Homo sapien
aagaatgaatccaagcttctcaggg

SEQ ID NO: 448036 - DNA, 25 bp, Homo sapien
ccatcccgaagaatgaatccaagct

SEQ ID NO: 448037 - DNA, 25 bp, Homo sapien
cttttccttgaagttaaccatgcca

SEQ ID NO: 448038 - DNA, 25 bp, Homo sapien
tctacacatgataagcaaggccttc

SEQ ID NO: 448039 - DNA, 25 bp, Homo sapien
ggtcctgggaccacttgaatcaaga

SEQ ID NO: 448040 - DNA, 25 bp, Homo sapien
gcatgtctaagattgtcaccctcca

SEQ ID NO: 448041 - DNA, 25 bp, Homo sapien
tctgtctgtcggctgtgtggttctc

SEQ ID NO: 448042 - DNA, 25 bp, Homo sapien
gtgtgctgtgatcacggcatcctgt

SEQ ID NO: 448043 - DNA, 25 bp, Homo sapien
actgctatttctcgtgtacactggc

SEQ ID NO: 448044 - DNA, 25 bp, Homo sapien
tactggaaccgataactgatgtttc

SEQ ID NO: 448045 - DNA, 25 bp, Homo sapien
tcattgtggagctctttccttgggt

SEQ ID NO: 448046 - DNA, 25 bp, Homo sapien
agcaggcaccatcatctctctactg

SEQ ID NO: 448047 - DNA, 25 bp, Homo sapien
tgttccctcttagcagtcatcagag

SEQ ID NO: 448048 - DNA, 25 bp, Homo sapien
gctctcaactttcaatccatgcttg

SEQ ID NO: 448049 - DNA, 25 bp, Homo sapien
gttctttcaccctataatctgttcc

SEQ ID NO: 448050 - DNA, 25 bp, Homo sapien
tacaaatgtagatgaggtgaaagct

SEQ ID NO: 448051 - DNA, 25 bp, Homo sapien
gactacagcctcctgcgtagatgct

SEQ ID NO: 448052 - DNA, 25 bp, Homo sapien
gaattcacactgtttacaaatcagg

SEQ ID NO: 448053 - DNA, 25 bp, Homo sapien
cgtagatgcttggtccttcctgagg

SEQ ID NO: 448054 - DNA, 25 bp, Homo sapien
ggagagcatcaacatcacttgggaa

SEQ ID NO: 448055 - DNA, 25 bp, Homo sapien
taacagaacagatcgggcacctatg

SEQ ID NO: 448056 - DNA, 25 bp, Homo sapien
tagaaattcacattgtcacgcccca

SEQ ID NO: 448057 - DNA, 25 bp, Homo sapien
cagcaaatataacaacaccgggaat

SEQ ID NO: 448058 - DNA, 25 bp, Homo sapien
ttagttgtactgcagacctcctggg

SEQ ID NO: 448059 - DNA, 25 bp, Homo sapien
ctgtaaatgggagccatgtagggcc

SEQ ID NO: 448060 - DNA, 25 bp, Homo sapien
caggcattggccaagctacttaacc

SEQ ID NO: 448061 - DNA, 25 bp, Homo sapien
gatcaggaggagcatttgcgaatca

SEQ ID NO: 448062 - DNA, 25 bp, Homo sapien
tgggcacctgtaatttcacctactc

SEQ ID NO: 448063 - DNA, 25 bp, Homo sapien
gatgcaggagaatcgcttgaacctg

SEQ ID NO: 448064 - DNA, 25 bp, Homo sapien
cctgggaggcggaggttgcagtgag

SEQ ID NO: 448065 - DNA, 25 bp, Homo sapien
tgtaatttcacctactcgggaagct

SEQ ID NO: 448066 - DNA, 25 bp, Homo sapien
tgtggttcttgatacaggcccttca

SEQ ID NO: 448067 - DNA, 25 bp, Homo sapien
tggttgacttgacctgctgcgtttc

SEQ ID NO: 448068 - DNA, 25 bp, Homo sapien
tcagggtagctttgtgctggttgac

SEQ ID NO: 448069 - DNA, 25 bp, Homo sapien
ccagtgtttgttccagtgtagaggc

SEQ ID NO: 448070 - DNA, 25 bp, Homo sapien
cttgatgaattgctactagaatgtc

SEQ ID NO: 448071 - DNA, 25 bp, Homo sapien
catatggggattgaagccttgcttg

SEQ ID NO: 448072 - DNA, 25 bp, Homo sapien
tgcttgatgaattgctactagaatg

SEQ ID NO: 448073 - DNA, 25 bp, Homo sapien
ttgcttgatgaattgctactagaat

SEQ ID NO: 448074 - DNA, 25 bp, Homo sapien
ctgttgttgtctggccgtgacatgg

SEQ ID NO: 448075 - DNA, 25 bp, Homo sapien
gattgaggtgaatgctcttcagctc

SEQ ID NO: 448076 - DNA, 25 bp, Homo sapien
tcagctcagcgatgccatcgctgtt

SEQ ID NO: 448077 - DNA, 25 bp, Homo sapien
catggctccactatttgatagctca

SEQ ID NO: 448078 - DNA, 25 bp, Homo sapien
agaaatctaaccctccataataggg

SEQ ID NO: 448079 - DNA, 25 bp, Homo sapien
tagttgtgtcacattgtcggtgttt

SEQ ID NO: 448080 - DNA, 25 bp, Homo sapien
cacattgtcggtgtttactgagttt

SEQ ID NO: 448081 - DNA, 25 bp, Homo sapien
ataataataagagttaacagagacc

SEQ ID NO: 448082 - DNA, 25 bp, Homo sapien
ctggaaactctccggtaacagaacg

SEQ ID NO: 448083 - DNA, 25 bp, Homo sapien
ctccggtaacagaacgtctcctcat

SEQ ID NO: 448084 - DNA, 25 bp, Homo sapien
actctccggtaacagaacgtctcct

SEQ ID NO: 448085 - DNA, 25 bp, Homo sapien
tgcactggaaactctccggtaacag

SEQ ID NO: 448086 - DNA, 25 bp, Homo sapien
gatgcatcatccataaagccacgtg

SEQ ID NO: 448087 - DNA, 25 bp, Homo sapien
tgtgcgtgccgaggactgtgaactt

SEQ ID NO: 448088 - DNA, 25 bp, Homo sapien
gcctttgcaagaggagcgctagagt

SEQ ID NO: 448089 - DNA, 25 bp, Homo sapien
tgtgaacttagagctgccagtagcc

SEQ ID NO: 448090 - DNA, 25 bp, Homo sapien
gctggctcctgcatagagtgaagaa

SEQ ID NO: 448091 - DNA, 25 bp, Homo sapien
gaatttgcataacccagcagggcgc

SEQ ID NO: 448092 - DNA, 25 bp, Homo sapien
gacctaagactccagtcagcaggga

SEQ ID NO: 448093 - DNA, 25 bp, Homo sapien
tcagctctgtttgccatggtaagac

SEQ ID NO: 448094 - DNA, 25 bp, Homo sapien
gctgtgggcagcatttagcctgtgt

SEQ ID NO: 448095 - DNA, 25 bp, Homo sapien
tgtgttctgtagtttgcccatccct

SEQ ID NO: 448096 - DNA, 25 bp, Homo sapien
agagtaggaaactatgccccagggc

SEQ ID NO: 448097 - DNA, 25 bp, Homo sapien
tcgtgggccatagggtctctgttaa

SEQ ID NO: 448098 - DNA, 25 bp, Homo sapien
ttggacccgtatgtaaacctggcga

SEQ ID NO: 448099 - DNA, 25 bp, Homo sapien
gatcaggtgcgtcaaaatctgttcc

SEQ ID NO: 448100 - DNA, 25 bp, Homo sapien
tctttctaagatagtgtgggccctg

SEQ ID NO: 448101 - DNA, 25 bp, Homo sapien
gaagtcaggagtatgcagcaggcta

SEQ ID NO: 448102 - DNA, 25 bp, Homo sapien
ttttttgatgaaggaatcacactgc

SEQ ID NO: 448103 - DNA, 25 bp, Homo sapien
tgatgaaggaatcacactgcctcat

SEQ ID NO: 448104 - DNA, 25 bp, Homo sapien
tttgatgaaggaatcacactgcctc

SEQ ID NO: 448105 - DNA, 25 bp, Homo sapien
ctgttttttgatgaaggaatcacac

SEQ ID NO: 448106 - DNA, 25 bp, Homo sapien
cccgtgtatgtggtcatcattgtgt

SEQ ID NO: 448107 - DNA, 25 bp, Homo sapien
tattcccaggaaaggtagtatagct

SEQ ID NO: 448108 - DNA, 25 bp, Homo sapien
gtagtatagctctggttacccgtgt

SEQ ID NO: 448109 - DNA, 25 bp, Homo sapien
ttacatctgtgctctgctattccca

SEQ ID NO: 448110 - DNA, 25 bp, Homo sapien
gggcagaagcgaaccggaccccaca

SEQ ID NO: 448111 - DNA, 25 bp, Homo sapien
ggcagaagcgaaccggaccccacag

SEQ ID NO: 448112 - DNA, 25 bp, Homo sapien
taggagcaggctagagtctgcacca

SEQ ID NO: 448113 - DNA, 25 bp, Homo sapien
cgtcaatctgaagataggagcaggc

SEQ ID NO: 448114 - DNA, 25 bp, Homo sapien
ctgaagataggagcaggctagagtc

SEQ ID NO: 448115 - DNA, 25 bp, Homo sapien
agctgctgaacgtcaatctgaagat

SEQ ID NO: 448116 - DNA, 25 bp, Homo sapien
ttcccgtggatgttcccgcccgaga

SEQ ID NO: 448117 - DNA, 25 bp, Homo sapien
ctgctcttccaggtcgggccccggg

SEQ ID NO: 448118 - DNA, 25 bp, Homo sapien
tctgcggctgttagggacagaggca

SEQ ID NO: 448119 - DNA, 25 bp, Homo sapien
aagacagcaagttgtgtgtgcgccc

SEQ ID NO: 448120 - DNA, 25 bp, Homo sapien
gctcctctgcgtgcgatccccggcg

SEQ ID NO: 448121 - DNA, 25 bp, Homo sapien
tgcgtgcctcgcctgccaaagggag

SEQ ID NO: 448122 - DNA, 25 bp, Homo sapien
aggaggcggtgcgtgcctcgcctgc

SEQ ID NO: 448123 - DNA, 25 bp, Homo sapien
ccaaagggagatccgctcctctgcg

SEQ ID NO: 448124 - DNA, 25 bp, Homo sapien
ccctggctcgtctggaaaggcagct

SEQ ID NO: 448125 - DNA, 25 bp, Homo sapien
tggaaaaagtcctcaagtccagagg

SEQ ID NO: 448126 - DNA, 25 bp, Homo sapien
tctacggcttcttttaacggcggca

SEQ ID NO: 448127 - DNA, 25 bp, Homo sapien
aaaagccccaacaggcaaagtgtgt

SEQ ID NO: 448128 - DNA, 25 bp, Homo sapien
tggtaaagctttatatgtccgcgca

SEQ ID NO: 448129 - DNA, 25 bp, Homo sapien
ctgcaggttgtacggaggtgactcc

SEQ ID NO: 448130 - DNA, 25 bp, Homo sapien
taatatgtctccagccagcacttgc

SEQ ID NO: 448131 - DNA, 25 bp, Homo sapien
gaatctcgggtctttaccaactaga

SEQ ID NO: 448132 - DNA, 25 bp, Homo sapien
gaggcctccttagcaaactcattgg

SEQ ID NO: 448133 - DNA, 25 bp, Homo sapien
taagacactggaagaatttcgagcc

SEQ ID NO: 448134 - DNA, 25 bp, Homo sapien
tactgggtagccaaccaagagtgtt

SEQ ID NO: 448135 - DNA, 25 bp, Homo sapien
agagaatacaatcttccccagaggc

SEQ ID NO: 448136 - DNA, 25 bp, Homo sapien
tagcatgctcctggcaaaccaattg

SEQ ID NO: 448137 - DNA, 25 bp, Homo sapien
cagatcaatcctgtcttggtagcag

SEQ ID NO: 448138 - DNA, 25 bp, Homo sapien
gaaaatctgaaaaaagcacgtagac

SEQ ID NO: 448139 - DNA, 25 bp, Homo sapien
cacaggaggtatttctatggctaaa

SEQ ID NO: 448140 - DNA, 25 bp, Homo sapien
ctcacaaacatggcgggagacaagg

SEQ ID NO: 448141 - DNA, 25 bp, Homo sapien
gattcttcctacaacgcatgggaat

SEQ ID NO: 448142 - DNA, 25 bp, Homo sapien
tcacaaacatggcgggagacaagga

SEQ ID NO: 448143 - DNA, 25 bp, Homo sapien
agattcttcctacaacgcatgggaa

SEQ ID NO: 448144 - DNA, 25 bp, Homo sapien
cagcttctcttatcgggaggcataa

SEQ ID NO: 448145 - DNA, 25 bp, Homo sapien
tcagaccaattccatcttgagtagg

SEQ ID NO: 448146 - DNA, 25 bp, Homo sapien
gaaagcattctacagggtgggaaat

SEQ ID NO: 448147 - DNA, 25 bp, Homo sapien
taaaggagatgttagtgccagaggt

SEQ ID NO: 448148 - DNA, 25 bp, Homo sapien
gcgcatgtgcaaatcggccgcgcat

SEQ ID NO: 448149 - DNA, 25 bp, Homo sapien
gtattgcgcatgtgcaaatcggccg

SEQ ID NO: 448150 - DNA, 25 bp, Homo sapien
gcatgtgcaaatcggccgcgcatgc

SEQ ID NO: 448151 - DNA, 25 bp, Homo sapien
attgcgcatgtgcaaatcggccgcg

SEQ ID NO: 448152 - DNA, 25 bp, Homo sapien
agcgctgcgcgtcccgccccctgct

SEQ ID NO: 448153 - DNA, 25 bp, Homo sapien
aggcagggaccacggaggcagcgcg

SEQ ID NO: 448154 - DNA, 25 bp, Homo sapien
gccaggcagggaccacggaggcagc

SEQ ID NO: 448155 - DNA, 25 bp, Homo sapien
cctcagccaggcagggaccacggag

SEQ ID NO: 448156 - DNA, 25 bp, Homo sapien
tcttatgcagcttgcgcgacagcgg

SEQ ID NO: 448157 - DNA, 25 bp, Homo sapien
acagcgggttgcaggtcgtcgccga

SEQ ID NO: 448158 - DNA, 25 bp, Homo sapien
ccccattgttgaggccgttggcagc

SEQ ID NO: 448159 - DNA, 25 bp, Homo sapien
gcgtctccaggatcttatgcagctt

SEQ ID NO: 448160 - DNA, 25 bp, Homo sapien
agtcctcaaataacaaccatgagaa

SEQ ID NO: 448161 - DNA, 25 bp, Homo sapien
aataacaaccatgagaaacttaaca

SEQ ID NO: 448162 - DNA, 25 bp, Homo sapien
actgagtcctcaaataacaaccatg

SEQ ID NO: 448163 - DNA, 25 bp, Homo sapien
tgagtcctcaaataacaaccatgag

SEQ ID NO: 448164 - DNA, 25 bp, Homo sapien
cttcattgatggctaaacttttacg

SEQ ID NO: 448165 - DNA, 25 bp, Homo sapien
gaaagtgccttgagagcttctaaca

SEQ ID NO: 448166 - DNA, 25 bp, Homo sapien
aacttttacgttcaatatctccacg

SEQ ID NO: 448167 - DNA, 25 bp, Homo sapien
acgtaaatttcttcgagtccgcaga

SEQ ID NO: 448168 - DNA, 25 bp, Homo sapien
attgcttgaacatcttcgcttatgc

SEQ ID NO: 448169 - DNA, 25 bp, Homo sapien
caacagttgctcattgcttgaacat

SEQ ID NO: 448170 - DNA, 25 bp, Homo sapien
aacagttgctcattgcttgaacatc

SEQ ID NO: 448171 - DNA, 25 bp, Homo sapien
gcttgaacatcttcgcttatgcttt

SEQ ID NO: 448172 - DNA, 25 bp, Homo sapien
gattgaagcttagtggtttttacta

SEQ ID NO: 448173 - DNA, 25 bp, Homo sapien
ctttcagattgaagcttagtggttt

SEQ ID NO: 448174 - DNA, 25 bp, Homo sapien
cagattgaagcttagtggtttttac

SEQ ID NO: 448175 - DNA, 25 bp, Homo sapien
tgaagcttagtggtttttactatta

SEQ ID NO: 448176 - DNA, 25 bp, Homo sapien
catttcatcagaagtcagttggaac

SEQ ID NO: 448177 - DNA, 25 bp, Homo sapien
ccttctcttgtacctcggagaagac

SEQ ID NO: 448178 - DNA, 25 bp, Homo sapien
cagttggaacttggataagaaggca

SEQ ID NO: 448179 - DNA, 25 bp, Homo sapien
tgtacctcggagaagactcatttca

SEQ ID NO: 448180 - DNA, 25 bp, Homo sapien
gagaactttgacatcattatgaatc

SEQ ID NO: 448181 - DNA, 25 bp, Homo sapien
cctgccgtttgttgatttgtacgca

SEQ ID NO: 448182 - DNA, 25 bp, Homo sapien
gatttgtacgcaagagaactttgac

SEQ ID NO: 448183 - DNA, 25 bp, Homo sapien
tctgttttactcttcccagtgcctt

SEQ ID NO: 448184 - DNA, 25 bp, Homo sapien
cagcaatgcaattagttcagtgagc

SEQ ID NO: 448185 - DNA, 25 bp, Homo sapien
tgttttagcctaaacctgtcagagt

SEQ ID NO: 448186 - DNA, 25 bp, Homo sapien
cagatacatctaagcacctaattat

SEQ ID NO: 448187 - DNA, 25 bp, Homo sapien
tgtcagagtataacttcaccattct

SEQ ID NO: 448188 - DNA, 25 bp, Homo sapien
taagccgtttcttgaagtaaggcca

SEQ ID NO: 448189 - DNA, 25 bp, Homo sapien
aagtctttcataagccgtttcttga

SEQ ID NO: 448190 - DNA, 25 bp, Homo sapien
ttgagcccatcggtaaagtctttca

SEQ ID NO: 448191 - DNA, 25 bp, Homo sapien
catcggtaaagtctttcataagccg

SEQ ID NO: 448192 - DNA, 25 bp, Homo sapien
tcttgtgtcaatgttctgcattcac

SEQ ID NO: 448193 - DNA, 25 bp, Homo sapien
ttatataagacaggtctgtcctgca

SEQ ID NO: 448194 - DNA, 25 bp, Homo sapien
caatactggagatacgtcacatgat

SEQ ID NO: 448195 - DNA, 25 bp, Homo sapien
gatacgtcacatgattcttgtgtca

SEQ ID NO: 448196 - DNA, 25 bp, Homo sapien
aagcttatgctaatactactccagg

SEQ ID NO: 448197 - DNA, 25 bp, Homo sapien
tacaggatcaaagacctgggccctc

SEQ ID NO: 448198 - DNA, 25 bp, Homo sapien
tcaaagcaggatgcactaccttggt

SEQ ID NO: 448199 - DNA, 25 bp, Homo sapien
tctgaaagggatgattcaaagcagg

SEQ ID NO: 448200 - DNA, 25 bp, Homo sapien
tgtagacaatgcaacagctgttaaa

SEQ ID NO: 448201 - DNA, 25 bp, Homo sapien
gctgatcaatggtaaacattaactt

SEQ ID NO: 448202 - DNA, 25 bp, Homo sapien
taagtgctaaaagactcataattaa

SEQ ID NO: 448203 - DNA, 25 bp, Homo sapien
gctcctaattcaatagccagtgcaa

SEQ ID NO: 448204 - DNA, 25 bp, Homo sapien
aacactgagtatggcaactttcccc

SEQ ID NO: 448205 - DNA, 25 bp, Homo sapien
tatttgagacacaataatggacagt

SEQ ID NO: 448206 - DNA, 25 bp, Homo sapien
cttattaagttcatatagtgccatc

SEQ ID NO: 448207 - DNA, 25 bp, Homo sapien
tacttaatgaaaggccaattttctc

SEQ ID NO: 448208 - DNA, 25 bp, Homo sapien
tgtggtgacatactacagaaaaggg

SEQ ID NO: 448209 - DNA, 25 bp, Homo sapien
tggagtgcccatttctttgacttga

SEQ ID NO: 448210 - DNA, 25 bp, Homo sapien
ggttttgagattccctgtggtgaca

SEQ ID NO: 448211 - DNA, 25 bp, Homo sapien
gaggactgtttactattaaccagac

SEQ ID NO: 448212 - DNA, 25 bp, Homo sapien
caattggtctaggtgtacctccggg

SEQ ID NO: 448213 - DNA, 25 bp, Homo sapien
caaagggtcatgagaatgcatttca

SEQ ID NO: 448214 - DNA, 25 bp, Homo sapien
actgtacttcttctggctgttccaa

SEQ ID NO: 448215 - DNA, 25 bp, Homo sapien
tcttgtgagcgcatcaataaatcca

SEQ ID NO: 448216 - DNA, 25 bp, Homo sapien
tgttaatgaagatttcctttggaaa

SEQ ID NO: 448217 - DNA, 25 bp, Homo sapien
aactcctcttctgctgtctgattac

SEQ ID NO: 448218 - DNA, 25 bp, Homo sapien
cctttggaaaaacatcaactcctct

SEQ ID NO: 448219 - DNA, 25 bp, Homo sapien
aactaaatgttaatgaagatttcct

SEQ ID NO: 448220 - DNA, 25 bp, Homo sapien
cagtagcttgatggagccaagccaa

SEQ ID NO: 448221 - DNA, 25 bp, Homo sapien
gccaagccaacatatctcctacata

SEQ ID NO: 448222 - DNA, 25 bp, Homo sapien
taagagagcttcaaggtgttccttt

SEQ ID NO: 448223 - DNA, 25 bp, Homo sapien
cttgtgtagttacatgctttaagag

SEQ ID NO: 448224 - DNA, 25 bp, Homo sapien
gtgatatgcccaacaacttcttgaa

SEQ ID NO: 448225 - DNA, 25 bp, Homo sapien
caccttcagtgatatgcccaacaac

SEQ ID NO: 448226 - DNA, 25 bp, Homo sapien
cttcagtgatatgcccaacaacttc

SEQ ID NO: 448227 - DNA, 25 bp, Homo sapien
gcacacaccttcagtgatatgccca

SEQ ID NO: 448228 - DNA, 25 bp, Homo sapien
gataaaatttgaggagattagaaat

SEQ ID NO: 448229 - DNA, 25 bp, Homo sapien
caggttcagcaactattacttgctc

SEQ ID NO: 448230 - DNA, 25 bp, Homo sapien
ctgattgtatggtgataaaatttga

SEQ ID NO: 448231 - DNA, 25 bp, Homo sapien
ggttcagcaactattacttgctcaa

SEQ ID NO: 448232 - DNA, 25 bp, Homo sapien
gggtggctactctctgtcactaagg

SEQ ID NO: 448233 - DNA, 25 bp, Homo sapien
tattcctgatactggcatactgcat

SEQ ID NO: 448234 - DNA, 25 bp, Homo sapien
taacagttggcctactattcctgat

SEQ ID NO: 448235 - DNA, 25 bp, Homo sapien
taagatgtgaaatccattccctagc

SEQ ID NO: 448236 - DNA, 25 bp, Homo sapien
tgaacggaactcttcattacccacc

SEQ ID NO: 448237 - DNA, 25 bp, Homo sapien
atctcagcaaacaataccattcacc

SEQ ID NO: 448238 - DNA, 25 bp, Homo sapien
atcaaatctgacaaggccaaaactg

SEQ ID NO: 448239 - DNA, 25 bp, Homo sapien
cagttcctttccagcattccctatc

SEQ ID NO: 448240 - DNA, 25 bp, Homo sapien
tctcttttagcaaaaccgtgggtca

SEQ ID NO: 448241 - DNA, 25 bp, Homo sapien
tttgagttaggtgatgaaaaaataa

SEQ ID NO: 448242 - DNA, 25 bp, Homo sapien
tagcaaaaccgtgggtcagaacaga

SEQ ID NO: 448243 - DNA, 25 bp, Homo sapien
cagttccttaactgagtagaatgct

SEQ ID NO: 448244 - DNA, 25 bp, Homo sapien
tgcatttcttcaatggtagtcaata

SEQ ID NO: 448245 - DNA, 25 bp, Homo sapien
gcatttcttcaatggtagtcaataa

SEQ ID NO: 448246 - DNA, 25 bp, Homo sapien
tgtgaaacattcacataatttaata

SEQ ID NO: 448247 - DNA, 25 bp, Homo sapien
gaaacattcacataatttaataatt

SEQ ID NO: 448248 - DNA, 25 bp, Homo sapien
taataattacatttttcaaacatac

SEQ ID NO: 448249 - DNA, 25 bp, Homo sapien
ctttaatgtgaaacattcacataat

SEQ ID NO: 448250 - DNA, 25 bp, Homo sapien
aaaagaacacagaatgtaatgggaa

SEQ ID NO: 448251 - DNA, 25 bp, Homo sapien
gggaaaagttatcaatcaatacaaa

SEQ ID NO: 448252 - DNA, 25 bp, Homo sapien
aatgtaatgggaaaagttatcaatc

SEQ ID NO: 448253 - DNA, 25 bp, Homo sapien
ctcaaaagaacacagaatgtaatgg

SEQ ID NO: 448254 - DNA, 25 bp, Homo sapien
tcaacttaggtccagtaagccatct

SEQ ID NO: 448255 - DNA, 25 bp, Homo sapien
gttatactgtttcaggaacaaagac

SEQ ID NO: 448256 - DNA, 25 bp, Homo sapien
tagtaaaattggagcctgagatgcc

SEQ ID NO: 448257 - DNA, 25 bp, Homo sapien
tgccatctccaattataactcaatg

SEQ ID NO: 448258 - DNA, 25 bp, Homo sapien
taaaacttcacgcagcaacatgagt

SEQ ID NO: 448259 - DNA, 25 bp, Homo sapien
caactgaagaatcgtgagatgctaa

SEQ ID NO: 448260 - DNA, 25 bp, Homo sapien
ttagtgcagaacttggtccaagatc

SEQ ID NO: 448261 - DNA, 25 bp, Homo sapien
tgcacaaaatcagcttgacgagcat

SEQ ID NO: 448262 - DNA, 25 bp, Homo sapien
taggagaggatccaagacacatgat

SEQ ID NO: 448263 - DNA, 25 bp, Homo sapien
aggagaggatccaagacacatgata

SEQ ID NO: 448264 - DNA, 25 bp, Homo sapien
ctgtaggagaggatccaagacacat

SEQ ID NO: 448265 - DNA, 25 bp, Homo sapien
tgtaggagaggatccaagacacatg

SEQ ID NO: 448266 - DNA, 25 bp, Homo sapien
tagcatttccagacgtctgtcagtg

SEQ ID NO: 448267 - DNA, 25 bp, Homo sapien
ggccatgtcagctgtgcctaaattg

SEQ ID NO: 448268 - DNA, 25 bp, Homo sapien
catatatagtgaattgaccatgaaa

SEQ ID NO: 448269 - DNA, 25 bp, Homo sapien
tctgtcagtgaattcaaatagagct

SEQ ID NO: 448270 - DNA, 25 bp, Homo sapien
caagggatctataggaattaggtca

SEQ ID NO: 448271 - DNA, 25 bp, Homo sapien
tcagaaagcttcaatctactatcac

SEQ ID NO: 448272 - DNA, 25 bp, Homo sapien
gttcagaaactaaaatccacataca

SEQ ID NO: 448273 - DNA, 25 bp, Homo sapien
cattctggttcctctaaagctgaaa

SEQ ID NO: 448274 - DNA, 25 bp, Homo sapien
tatctgttaccatctaaatgattgc

SEQ ID NO: 448275 - DNA, 25 bp, Homo sapien
cattttccaagcaactccaatagct

SEQ ID NO: 448276 - DNA, 25 bp, Homo sapien
ggcaacactactgaaagacataaag

SEQ ID NO: 448277 - DNA, 25 bp, Homo sapien
cactgtcaactatggtatctgttac

SEQ ID NO: 448278 - DNA, 25 bp, Homo sapien
gttcaggtttatgttgctgtacagt

SEQ ID NO: 448279 - DNA, 25 bp, Homo sapien
taagtgtgtccaaatgtgcttcgat

SEQ ID NO: 448280 - DNA, 25 bp, Homo sapien
tcaagcctaccctagttaaaacata

SEQ ID NO: 448281 - DNA, 25 bp, Homo sapien
cagtgttatagatgtaactcaagcc

SEQ ID NO: 448282 - DNA, 25 bp, Homo sapien
cacagaatctaggttgggcatatta

SEQ ID NO: 448283 - DNA, 25 bp, Homo sapien
agtgtcacagaatctaggttgggca

SEQ ID NO: 448284 - DNA, 25 bp, Homo sapien
tgtcacagaatctaggttgggcata

SEQ ID NO: 448285 - DNA, 25 bp, Homo sapien
gtcacagaatctaggttgggcatat

SEQ ID NO: 448286 - DNA, 25 bp, Homo sapien
gtctggggctgacagataacgatca

SEQ ID NO: 448287 - DNA, 25 bp, Homo sapien
aagaaagttcagctgtggtatcaat

SEQ ID NO: 448288 - DNA, 25 bp, Homo sapien
ctgtggtatcaataggttgtctggg

SEQ ID NO: 448289 - DNA, 25 bp, Homo sapien
ggctgacagataacgatcaaactga

SEQ ID NO: 448290 - DNA, 25 bp, Homo sapien
aatgttttattgtcagcagtctgat

SEQ ID NO: 448291 - DNA, 25 bp, Homo sapien
cagacctgttccattagtatgtaat

SEQ ID NO: 448292 - DNA, 25 bp, Homo sapien
aatgcccactttctcagacctgttc

SEQ ID NO: 448293 - DNA, 25 bp, Homo sapien
gatagacagaagttctcgttgtttc

SEQ ID NO: 448294 - DNA, 25 bp, Homo sapien
tataggtacatgctttatttctagc

SEQ ID NO: 448295 - DNA, 25 bp, Homo sapien
tctataatggaggaaaaaccttgaa

SEQ ID NO: 448296 - DNA, 25 bp, Homo sapien
tcccatatgctcactttaggaagca

SEQ ID NO: 448297 - DNA, 25 bp, Homo sapien
tggatattcctgatagtacaagtga

SEQ ID NO: 448298 - DNA, 25 bp, Homo sapien
ctaaagcattcagttcacagctgtc

SEQ ID NO: 448299 - DNA, 25 bp, Homo sapien
ctctaaagcattcagttcacagctg

SEQ ID NO: 448300 - DNA, 25 bp, Homo sapien
tctaaagcattcagttcacagctgt

SEQ ID NO: 448301 - DNA, 25 bp, Homo sapien
gtctctaaagcattcagttcacagc

SEQ ID NO: 448302 - DNA, 25 bp, Homo sapien
gtctgtggtatcagtggtgatattc

SEQ ID NO: 448303 - DNA, 25 bp, Homo sapien
attagtttcagagaacatctttatt

SEQ ID NO: 448304 - DNA, 25 bp, Homo sapien
tccctcacacactgctttaaatgtg

SEQ ID NO: 448305 - DNA, 25 bp, Homo sapien
ctcattagtttcagagaacatcttt

SEQ ID NO: 448306 - DNA, 25 bp, Homo sapien
taacaaccacatctcctagctttct

SEQ ID NO: 448307 - DNA, 25 bp, Homo sapien
tttacactaacaaccacatctccta

SEQ ID NO: 448308 - DNA, 25 bp, Homo sapien
agcttttacactaacaaccacatct

SEQ ID NO: 448309 - DNA, 25 bp, Homo sapien
actaacaaccacatctcctagcttt

SEQ ID NO: 448310 - DNA, 25 bp, Homo sapien
tgcatacacttcaccataggctctg

SEQ ID NO: 448311 - DNA, 25 bp, Homo sapien
tgcggcgatcggtgaagaatgttct

SEQ ID NO: 448312 - DNA, 25 bp, Homo sapien
gattggattcatcacggctgcatac

SEQ ID NO: 448313 - DNA, 25 bp, Homo sapien
taggctctgcagactaattctgtag

SEQ ID NO: 448314 - DNA, 25 bp, Homo sapien
tacttccctgttactgagaccaaaa

SEQ ID NO: 448315 - DNA, 25 bp, Homo sapien
catctcatttagagtagatacacag

SEQ ID NO: 448316 - DNA, 25 bp, Homo sapien
gagctggagagatggctagcaaaaa

SEQ ID NO: 448317 - DNA, 25 bp, Homo sapien
tactagctcaggtcaacatgttact

SEQ ID NO: 448318 - DNA, 25 bp, Homo sapien
tatacaccaggagcacattcactgt

SEQ ID NO: 448319 - DNA, 25 bp, Homo sapien
gacaagaatgtcaaatcaggcacac

SEQ ID NO: 448320 - DNA, 25 bp, Homo sapien
caacatggagataagacacactgcc

SEQ ID NO: 448321 - DNA, 25 bp, Homo sapien
ttgagttccatcgaaggctcccaca

SEQ ID NO: 448322 - DNA, 25 bp, Homo sapien
ttcactcatagcaaggtatcaatct

SEQ ID NO: 448323 - DNA, 25 bp, Homo sapien
ggaattcactcatagcaaggtatca

SEQ ID NO: 448324 - DNA, 25 bp, Homo sapien
aggaattcactcatagcaaggtatc

SEQ ID NO: 448325 - DNA, 25 bp, Homo sapien
aattcactcatagcaaggtatcaat

SEQ ID NO: 448326 - DNA, 25 bp, Homo sapien
gaagggacagggatctcttgagcct

SEQ ID NO: 448327 - DNA, 25 bp, Homo sapien
cactgtaacgtcacatggtagaagg

SEQ ID NO: 448328 - DNA, 25 bp, Homo sapien
taatatccacctgctcaaatgaagg

SEQ ID NO: 448329 - DNA, 25 bp, Homo sapien
ccacataagggttttgccattcaaa

SEQ ID NO: 448330 - DNA, 25 bp, Homo sapien
ggaattcctcaacgggaaacacata

SEQ ID NO: 448331 - DNA, 25 bp, Homo sapien
aacctcttataccaaggacatccgg

SEQ ID NO: 448332 - DNA, 25 bp, Homo sapien
ggacatccggctgaattataaagga

SEQ ID NO: 448333 - DNA, 25 bp, Homo sapien
taactatcattgtgcaagacaggga

SEQ ID NO: 448334 - DNA, 25 bp, Homo sapien
tactccgttgagcaatcacttaggg

SEQ ID NO: 448335 - DNA, 25 bp, Homo sapien
tccactgatgtctatgggatctagg

SEQ ID NO: 448336 - DNA, 25 bp, Homo sapien
agctactgagtgttcgatttccttg

SEQ ID NO: 448337 - DNA, 25 bp, Homo sapien
tcatttcagctccaagtactccgtt

SEQ ID NO: 448338 - DNA, 25 bp, Homo sapien
gaagcactgtgccatatattgagac

SEQ ID NO: 448339 - DNA, 25 bp, Homo sapien
gacctgaggttacaaagagcaacac

SEQ ID NO: 448340 - DNA, 25 bp, Homo sapien
gctaatgatttaccacttgcagaga

SEQ ID NO: 448341 - DNA, 25 bp, Homo sapien
gccagctcttgcctgaatcccgaaa

SEQ ID NO: 448342 - DNA, 25 bp, Homo sapien
cctgttggccacttgcgtctggttt

SEQ ID NO: 448343 - DNA, 25 bp, Homo sapien
tgttggccacttgcgtctggttttc

SEQ ID NO: 448344 - DNA, 25 bp, Homo sapien
cagttgtttgaggtccttgtatgtt

SEQ ID NO: 448345 - DNA, 25 bp, Homo sapien
gtttgaggtccttgtatgttctaaa

SEQ ID NO: 448346 - DNA, 25 bp, Homo sapien
gagttgaggctgttggcctgagtga

SEQ ID NO: 448347 - DNA, 25 bp, Homo sapien
gggacttttcatgtctagttgcctt

SEQ ID NO: 448348 - DNA, 25 bp, Homo sapien
gcaagctgtaaaattgggacttttc

SEQ ID NO: 448349 - DNA, 25 bp, Homo sapien
tggcatggctaccagagcaagctgt

SEQ ID NO: 448350 - DNA, 25 bp, Homo sapien
caaggtaattggaagaaggatgtct

SEQ ID NO: 448351 - DNA, 25 bp, Homo sapien
gaggctctgtaaaagccttcagttc

SEQ ID NO: 448352 - DNA, 25 bp, Homo sapien
tagcaactgctttgcaactagagcc

SEQ ID NO: 448353 - DNA, 25 bp, Homo sapien
gcaggagagcccaaggtaattggaa

SEQ ID NO: 448354 - DNA, 25 bp, Homo sapien
ctatctacaagccaaaaagctgttt

SEQ ID NO: 448355 - DNA, 25 bp, Homo sapien
ctacaagccaaaaagctgttttggt

SEQ ID NO: 448356 - DNA, 25 bp, Homo sapien
tctacaagccaaaaagctgttttgg

SEQ ID NO: 448357 - DNA, 25 bp, Homo sapien
tatctacaagccaaaaagctgtttt

SEQ ID NO: 448358 - DNA, 25 bp, Homo sapien
ttataaggccctgccaacagtggca

SEQ ID NO: 448359 - DNA, 25 bp, Homo sapien
tgctggagtggacacccccctctgt

SEQ ID NO: 448360 - DNA, 25 bp, Homo sapien
gaatatgctgtgttgacactatcta

SEQ ID NO: 448361 - DNA, 25 bp, Homo sapien
gacctctgccctcgttccttgctct

SEQ ID NO: 448362 - DNA, 25 bp, Homo sapien
tcaatgaagccacgttaagaatctg

SEQ ID NO: 448363 - DNA, 25 bp, Homo sapien
tatttggtagccagattcttgagca

SEQ ID NO: 448364 - DNA, 25 bp, Homo sapien
gaaccctggagaggtcttcgttcaa

SEQ ID NO: 448365 - DNA, 25 bp, Homo sapien
cctgagaagtcacatagcctggctg

SEQ ID NO: 448366 - DNA, 25 bp, Homo sapien
atcacctagaaccacatgcccttgt

SEQ ID NO: 448367 - DNA, 25 bp, Homo sapien
acaacaaactctgcaggatcccacg

SEQ ID NO: 448368 - DNA, 25 bp, Homo sapien
tgacaacaaactctgcaggatccca

SEQ ID NO: 448369 - DNA, 25 bp, Homo sapien
gcaggatcccacgatcacctagaac

SEQ ID NO: 448370 - DNA, 25 bp, Homo sapien
ccaacaatcaaagacaatgttgctg

SEQ ID NO: 448371 - DNA, 25 bp, Homo sapien
atgccaacaatcaaagacaatgttg

SEQ ID NO: 448372 - DNA, 25 bp, Homo sapien
gccaacaatcaaagacaatgttgct

SEQ ID NO: 448373 - DNA, 25 bp, Homo sapien
tgccaacaatcaaagacaatgttgc

SEQ ID NO: 448374 - DNA, 25 bp, Homo sapien
ctccagaagcacaaggtcctgcact

SEQ ID NO: 448375 - DNA, 25 bp, Homo sapien
gaagcacaaggtcctgcactggtta

SEQ ID NO: 448376 - DNA, 25 bp, Homo sapien
caactggaatggctccagaagcaca

SEQ ID NO: 448377 - DNA, 25 bp, Homo sapien
cccacaactggaatggctccagaag

SEQ ID NO: 448378 - DNA, 25 bp, Homo sapien
gccttactgcctaaacacaagggag

SEQ ID NO: 448379 - DNA, 25 bp, Homo sapien
tctctgccaggtgaagtaagcaact

SEQ ID NO: 448380 - DNA, 25 bp, Homo sapien
caatcttatactgttcctgaggcaa

SEQ ID NO: 448381 - DNA, 25 bp, Homo sapien
aaggcagagttttccgagacatcac

SEQ ID NO: 448382 - DNA, 25 bp, Homo sapien
gatccagaaataatttatgtacttc

SEQ ID NO: 448383 - DNA, 25 bp, Homo sapien
ctctaacaaatcgctgatccagaaa

SEQ ID NO: 448384 - DNA, 25 bp, Homo sapien
aacaaatcgctgatccagaaataat

SEQ ID NO: 448385 - DNA, 25 bp, Homo sapien
tctaacaaatcgctgatccagaaat

SEQ ID NO: 448386 - DNA, 25 bp, Homo sapien
ttgtctaccgctgatgggttctgaa

SEQ ID NO: 448387 - DNA, 25 bp, Homo sapien
tgatctccaacactagatctttcac

SEQ ID NO: 448388 - DNA, 25 bp, Homo sapien
ggttctgaaagggtttgttgatctc

SEQ ID NO: 448389 - DNA, 25 bp, Homo sapien
tagcagcaaggatttttgtctaccg

SEQ ID NO: 448390 - DNA, 25 bp, Homo sapien
tggtgtgcagtttcccactgtgcct

SEQ ID NO: 448391 - DNA, 25 bp, Homo sapien
agtttcccactgtgcctctagggcc

SEQ ID NO: 448392 - DNA, 25 bp, Homo sapien
cactgctgtcaccagtaccactcat

SEQ ID NO: 448393 - DNA, 25 bp, Homo sapien
actgtgcctctagggccactgctgt

SEQ ID NO: 448394 - DNA, 25 bp, Homo sapien
cacatgatataagctgagcctcccc

SEQ ID NO: 448395 - DNA, 25 bp, Homo sapien
caagagtcacatgatataagctgag

SEQ ID NO: 448396 - DNA, 25 bp, Homo sapien
gaggttccacaagatgcccagatgt

SEQ ID NO: 448397 - DNA, 25 bp, Homo sapien
gagagacccctacgacaaacagagg

SEQ ID NO: 448398 - DNA, 25 bp, Homo sapien
gcttgtttcaggaatacacaggcag

SEQ ID NO: 448399 - DNA, 25 bp, Homo sapien
acaggcagctgacttcgcagagcag

SEQ ID NO: 448400 - DNA, 25 bp, Homo sapien
ctgtccttgaaggcggcgagcgcag

SEQ ID NO: 448401 - DNA, 25 bp, Homo sapien
ttgaaggcggcgagcgcaggcacca

SEQ ID NO: 448402 - DNA, 25 bp, Homo sapien
gcagacgcaaaccacagtgtgcctt

SEQ ID NO: 448403 - DNA, 25 bp, Homo sapien
gcctttgccattgttcgccctggaa

SEQ ID NO: 448404 - DNA, 25 bp, Homo sapien
ttagttgttagcaggcagacgcaaa

SEQ ID NO: 448405 - DNA, 25 bp, Homo sapien
ttccagaggcatctaggccacttgg

SEQ ID NO: 448406 - DNA, 25 bp, Homo sapien
caatgcacactgttattcggggacc

SEQ ID NO: 448407 - DNA, 25 bp, Homo sapien
tgcacactgttattcggggacccca

SEQ ID NO: 448408 - DNA, 25 bp, Homo sapien
agcctctccttcaatgcacactgtt

SEQ ID NO: 448409 - DNA, 25 bp, Homo sapien
cacactgttattcggggaccccatt

SEQ ID NO: 448410 - DNA, 25 bp, Homo sapien
catcactcacaaatactatttcggg

SEQ ID NO: 448411 - DNA, 25 bp, Homo sapien
atttcgggggctagattgaaagaag

SEQ ID NO: 448412 - DNA, 25 bp, Homo sapien
aattcatcactcacaaatactattt

SEQ ID NO: 448413 - DNA, 25 bp, Homo sapien
ctatttcgggggctagattgaaaga

SEQ ID NO: 448414 - DNA, 25 bp, Homo sapien
aagtgaaacagctctgagaaggtct

SEQ ID NO: 448415 - DNA, 25 bp, Homo sapien
tgagagtagcttcaactccatgctc

SEQ ID NO: 448416 - DNA, 25 bp, Homo sapien
tcaatcatagtgagcagcccttgtt

SEQ ID NO: 448417 - DNA, 25 bp, Homo sapien
aacgttggctccttcatatttgtcc

SEQ ID NO: 448418 - DNA, 25 bp, Homo sapien
ctcctgggatgcaagcgagtactcc

SEQ ID NO: 448419 - DNA, 25 bp, Homo sapien
tccgaagtcaacagattctctttgg

SEQ ID NO: 448420 - DNA, 25 bp, Homo sapien
tatgttgctcccaattgcctcggat

SEQ ID NO: 448421 - DNA, 25 bp, Homo sapien
tctttggtgcattctatgttgctcc

SEQ ID NO: 448422 - DNA, 25 bp, Homo sapien
ggtcccagtatgtctgctcaaatta

SEQ ID NO: 448423 - DNA, 25 bp, Homo sapien
gtctgtactgtggtcccagtatgtc

SEQ ID NO: 448424 - DNA, 25 bp, Homo sapien
tacccagtaggagtgtcccatccat

SEQ ID NO: 448425 - DNA, 25 bp, Homo sapien
gctcaaattacccagtaggagtgtc

SEQ ID NO: 448426 - DNA, 25 bp, Homo sapien
gaccagctgtgtccttgatgtatct

SEQ ID NO: 448427 - DNA, 25 bp, Homo sapien
ttttcttgtccggctccccagtggc

SEQ ID NO: 448428 - DNA, 25 bp, Homo sapien
ttctaatctttgtttcccatgggca

SEQ ID NO: 448429 - DNA, 25 bp, Homo sapien
ctgcttcctgtggatatccattcga

SEQ ID NO: 448430 - DNA, 25 bp, Homo sapien
acagtgggagcatgcaccagctgcc

SEQ ID NO: 448431 - DNA, 25 bp, Homo sapien
ctgtgaagctgacctccccagcggt

SEQ ID NO: 448432 - DNA, 25 bp, Homo sapien
cggtgtggtgctggggtcgctgcac

SEQ ID NO: 448433 - DNA, 25 bp, Homo sapien
gctgacctccccagcggtgtggtgc

SEQ ID NO: 448434 - DNA, 25 bp, Homo sapien
gaccatccgtgagaatggctgaccc

SEQ ID NO: 448435 - DNA, 25 bp, Homo sapien
ccagcagatgtgttccatacggacc

SEQ ID NO: 448436 - DNA, 25 bp, Homo sapien
catacggaccatccgtgagaatggc

SEQ ID NO: 448437 - DNA, 25 bp, Homo sapien
gatgtgttccatacggaccatccgt

SEQ ID NO: 448438 - DNA, 25 bp, Homo sapien
gattcaggatcaggggatcgtgatc

SEQ ID NO: 448439 - DNA, 25 bp, Homo sapien
cctccgtgatgctgggggcccacga

SEQ ID NO: 448440 - DNA, 25 bp, Homo sapien
ggatcgtgatcttgattcaggatca

SEQ ID NO: 448441 - DNA, 25 bp, Homo sapien
ctggtccgtcctgacttccagctga

SEQ ID NO: 448442 - DNA, 25 bp, Homo sapien
gtcagccacatgtttaacagctggc

SEQ ID NO: 448443 - DNA, 25 bp, Homo sapien
cagccctcatgtcagccacatgttt

SEQ ID NO: 448444 - DNA, 25 bp, Homo sapien
catgtcagccacatgtttaacagct

SEQ ID NO: 448445 - DNA, 25 bp, Homo sapien
cctcatgtcagccacatgtttaaca

SEQ ID NO: 448446 - DNA, 25 bp, Homo sapien
agatggatgtaaagcctctgaggcc

SEQ ID NO: 448447 - DNA, 25 bp, Homo sapien
actacaagatggatgtaaagcctct

SEQ ID NO: 448448 - DNA, 25 bp, Homo sapien
tgtgattggactacaagatggatgt

SEQ ID NO: 448449 - DNA, 25 bp, Homo sapien
tgaattgtgattggactacaagatg

SEQ ID NO: 448450 - DNA, 25 bp, Homo sapien
gctgtgggtggtcttgttaaagaaa

SEQ ID NO: 448451 - DNA, 25 bp, Homo sapien
ctaatgaggataccctagcatccaa

SEQ ID NO: 448452 - DNA, 25 bp, Homo sapien
catttgaaacttcattgctgtgggt

SEQ ID NO: 448453 - DNA, 25 bp, Homo sapien
taatcattaagtggtccaatgtcca

SEQ ID NO: 448454 - DNA, 25 bp, Homo sapien
tgaatctcatgaccaacttccaaca

SEQ ID NO: 448455 - DNA, 25 bp, Homo sapien
tggcaacttgcttgaactacctctg

SEQ ID NO: 448456 - DNA, 25 bp, Homo sapien
ctgtccacacctgctaaacaggact

SEQ ID NO: 448457 - DNA, 25 bp, Homo sapien
ccttgtggaattattctctgatgct

SEQ ID NO: 448458 - DNA, 25 bp, Homo sapien
agcgaaaagcaaccagtaggtactg

SEQ ID NO: 448459 - DNA, 25 bp, Homo sapien
ggacagtaagaagcaatttccatcc

SEQ ID NO: 448460 - DNA, 25 bp, Homo sapien
ggggacagtaagaagcaatttccat

SEQ ID NO: 448461 - DNA, 25 bp, Homo sapien
aagcgaaaagcaaccagtaggtact

SEQ ID NO: 448462 - DNA, 25 bp, Homo sapien
aattggttccactgatatgaaaatg

SEQ ID NO: 448463 - DNA, 25 bp, Homo sapien
caggaaattggttccactgatatga

SEQ ID NO: 448464 - DNA, 25 bp, Homo sapien
ggaaattggttccactgatatgaaa

SEQ ID NO: 448465 - DNA, 25 bp, Homo sapien
tcaggaaattggttccactgatatg

SEQ ID NO: 448466 - DNA, 25 bp, Homo sapien
tctcagaggacccacggtgacctcg

SEQ ID NO: 448467 - DNA, 25 bp, Homo sapien
gaaggccagagggttcagccgcact

SEQ ID NO: 448468 - DNA, 25 bp, Homo sapien
tgttaaatcaaaggctctctcagag

SEQ ID NO: 448469 - DNA, 25 bp, Homo sapien
tcagccgcactgtgcggcagcagga

SEQ ID NO: 448470 - DNA, 25 bp, Homo sapien
agaaactccaaaagcagggtcagag

SEQ ID NO: 448471 - DNA, 25 bp, Homo sapien
ctgggcctggaacgatgtaatctgt

SEQ ID NO: 448472 - DNA, 25 bp, Homo sapien
tgaagacggccatcgggcatggcaa

SEQ ID NO: 448473 - DNA, 25 bp, Homo sapien
aatctgttcccgatgtgagagaggc

SEQ ID NO: 448474 - DNA, 25 bp, Homo sapien
caaatctacattacacaacgtgaaa

SEQ ID NO: 448475 - DNA, 25 bp, Homo sapien
aagtgttctatcttctgatgcctcg

SEQ ID NO: 448476 - DNA, 25 bp, Homo sapien
aaaggatgtaaggtcacaagtgttc

SEQ ID NO: 448477 - DNA, 25 bp, Homo sapien
gatgcctcgaatgtaccaatgcaca

SEQ ID NO: 448478 - DNA, 25 bp, Homo sapien
gaggaactgtggtgtcactgagtgt

SEQ ID NO: 448479 - DNA, 25 bp, Homo sapien
actggaggaactgtggtgtcactga

SEQ ID NO: 448480 - DNA, 25 bp, Homo sapien
tggaggaactgtggtgtcactgagt

SEQ ID NO: 448481 - DNA, 25 bp, Homo sapien
cactggaggaactgtggtgtcactg

SEQ ID NO: 448482 - DNA, 25 bp, Homo sapien
cttcacctcctcttcatctgtagac

SEQ ID NO: 448483 - DNA, 25 bp, Homo sapien
tctggtatgtgatggtcttgaatcc

SEQ ID NO: 448484 - DNA, 25 bp, Homo sapien
tcttgaatccaattttataagcact

SEQ ID NO: 448485 - DNA, 25 bp, Homo sapien
ggtatgtgatggtcttgaatccaat

SEQ ID NO: 448486 - DNA, 25 bp, Homo sapien
gtcttgaatccaattttataagcac

SEQ ID NO: 448487 - DNA, 25 bp, Homo sapien
tacttcatatatacagtcccggagc

SEQ ID NO: 448488 - DNA, 25 bp, Homo sapien
ccaaagcttcagtagtagttgtaac

SEQ ID NO: 448489 - DNA, 25 bp, Homo sapien
tcccggagcttgcaggcagttgact

SEQ ID NO: 448490 - DNA, 25 bp, Homo sapien
gctccctctttgcactccatgtaaa

SEQ ID NO: 448491 - DNA, 25 bp, Homo sapien
caccaaataaggctgaagttgcctc

SEQ ID NO: 448492 - DNA, 25 bp, Homo sapien
ccaaataaggctgaagttgcctctg

SEQ ID NO: 448493 - DNA, 25 bp, Homo sapien
accaaataaggctgaagttgcctct

SEQ ID NO: 448494 - DNA, 25 bp, Homo sapien
caaataaggctgaagttgcctctga

SEQ ID NO: 448495 - DNA, 25 bp, Homo sapien
tttaaccggcaccttctgcccctca

SEQ ID NO: 448496 - DNA, 25 bp, Homo sapien
cctgcagtttgaatctactctatca

SEQ ID NO: 448497 - DNA, 25 bp, Homo sapien
gcagtttgaatctactctatcatct

SEQ ID NO: 448498 - DNA, 25 bp, Homo sapien
gagcctgcagtttgaatctactcta

SEQ ID NO: 448499 - DNA, 25 bp, Homo sapien
tcaactactggggcaaatgtggtct

SEQ ID NO: 448500 - DNA, 25 bp, Homo sapien
gattggcttccttgatccacctttg

SEQ ID NO: 448501 - DNA, 25 bp, Homo sapien
gtttgggctacacgaacacccttga

SEQ ID NO: 448502 - DNA, 25 bp, Homo sapien
gagagacagacactagtaggtccag

SEQ ID NO: 448503 - DNA, 25 bp, Homo sapien
tcatttgagtgatctggctcctggt

SEQ ID NO: 448504 - DNA, 25 bp, Homo sapien
ttctctcttcgcagactgttttttc

SEQ ID NO: 448505 - DNA, 25 bp, Homo sapien
gagtgtcagaaatgtgttgcctaac

SEQ ID NO: 448506 - DNA, 25 bp, Homo sapien
ttgtctctgcatcgttccccagtct

SEQ ID NO: 448507 - DNA, 25 bp, Homo sapien
cacttctctctggatatcagcatta

SEQ ID NO: 448508 - DNA, 25 bp, Homo sapien
gatgacttgctaaacttcctttcat

SEQ ID NO: 448509 - DNA, 25 bp, Homo sapien
aggatgacttgctaaacttcctttc

SEQ ID NO: 448510 - DNA, 25 bp, Homo sapien
gaaggatgacttgctaaacttcctt

SEQ ID NO: 448511 - DNA, 25 bp, Homo sapien
ggatgacttgctaaacttcctttca

SEQ ID NO: 448512 - DNA, 25 bp, Homo sapien
tctgctctggcttccaaggtcatct

SEQ ID NO: 448513 - DNA, 25 bp, Homo sapien
ttcaaagactgctccgcacagcttc

SEQ ID NO: 448514 - DNA, 25 bp, Homo sapien
tcctccttcaaagactgctccgcac

SEQ ID NO: 448515 - DNA, 25 bp, Homo sapien
gttttttaagaagtctgctctggct

SEQ ID NO: 448516 - DNA, 25 bp, Homo sapien
ctgcacgtgcttctcctaatcattc

SEQ ID NO: 448517 - DNA, 25 bp, Homo sapien
cagtcaggcttactgcacgtgcttc

SEQ ID NO: 448518 - DNA, 25 bp, Homo sapien
ttcagcattaacagccttgcagtca

SEQ ID NO: 448519 - DNA, 25 bp, Homo sapien
gcattaacagccttgcagtcaggct

SEQ ID NO: 448520 - DNA, 25 bp, Homo sapien
tgggcatgctcagttcggtcatctc

SEQ ID NO: 448521 - DNA, 25 bp, Homo sapien
ctgtaagtgggaggacatgttgtct

SEQ ID NO: 448522 - DNA, 25 bp, Homo sapien
caagggtaaagatctgaggtatttc

SEQ ID NO: 448523 - DNA, 25 bp, Homo sapien
gggctctctgcacgtaataatttgc

SEQ ID NO: 448524 - DNA, 25 bp, Homo sapien
gctttgccaccacgtgatacacagg

SEQ ID NO: 448525 - DNA, 25 bp, Homo sapien
gatacacaggagatgaccaggcagc

SEQ ID NO: 448526 - DNA, 25 bp, Homo sapien
caaggacggtcctctgtttactgaa

SEQ ID NO: 448527 - DNA, 25 bp, Homo sapien
gaaaaggcatggtgtcaagtgaagc

SEQ ID NO: 448528 - DNA, 25 bp, Homo sapien
ttatgagaagttctctgagaactga

SEQ ID NO: 448529 - DNA, 25 bp, Homo sapien
tatgagaagttctctgagaactgac

SEQ ID NO: 448530 - DNA, 25 bp, Homo sapien
tttatgagaagttctctgagaactg

SEQ ID NO: 448531 - DNA, 25 bp, Homo sapien
ctgtgtagggcctggttttgaagtg

SEQ ID NO: 448532 - DNA, 25 bp, Homo sapien
aaacaagaaggctgtgtagggcctg

SEQ ID NO: 448533 - DNA, 25 bp, Homo sapien
aaggaggtgtgtgtactgcacattc

SEQ ID NO: 448534 - DNA, 25 bp, Homo sapien
agagaaggaggtgtgtgtactgcac

SEQ ID NO: 448535 - DNA, 25 bp, Homo sapien
agaaggaggtgtgtgtactgcacat

SEQ ID NO: 448536 - DNA, 25 bp, Homo sapien
ctagagaaggaggtgtgtgtactgc

SEQ ID NO: 448537 - DNA, 25 bp, Homo sapien
ggcagcagggatggtagctagcgag

SEQ ID NO: 448538 - DNA, 25 bp, Homo sapien
catcctccacgggtcttagctcaat

SEQ ID NO: 448539 - DNA, 25 bp, Homo sapien
tagctcaatgtctagaaggaggaac

SEQ ID NO: 448540 - DNA, 25 bp, Homo sapien
tagccccaccgccatctagccacat

SEQ ID NO: 448541 - DNA, 25 bp, Homo sapien
ctttggaatttagatctgaatgcct

SEQ ID NO: 448542 - DNA, 25 bp, Homo sapien
gaatttagatctgaatgcctccctg

SEQ ID NO: 448543 - DNA, 25 bp, Homo sapien
atttagatctgaatgcctccctgac

SEQ ID NO: 448544 - DNA, 25 bp, Homo sapien
tggaatttagatctgaatgcctccc

SEQ ID NO: 448545 - DNA, 25 bp, Homo sapien
gaaatggagaacgtagaagttgatc

SEQ ID NO: 448546 - DNA, 25 bp, Homo sapien
tggccacagcgctagcatagctgct

SEQ ID NO: 448547 - DNA, 25 bp, Homo sapien
gagatttgcttaacccgtggccaca

SEQ ID NO: 448548 - DNA, 25 bp, Homo sapien
ctggatctaacagtgggctctgcag

SEQ ID NO: 448549 - DNA, 25 bp, Homo sapien
attgcacagcagaatctgaaagctt

SEQ ID NO: 448550 - DNA, 25 bp, Homo sapien
ggctacatttatattgcacagcaga

SEQ ID NO: 448551 - DNA, 25 bp, Homo sapien
cactctttccctggctacatttata

SEQ ID NO: 448552 - DNA, 25 bp, Homo sapien
gaagaggcagtcgtctgtgtatcta

SEQ ID NO: 448553 - DNA, 25 bp, Homo sapien
tgtgtgcactccttatcatcaacgt

SEQ ID NO: 448554 - DNA, 25 bp, Homo sapien
tcatccacggtaacccggaagcagt

SEQ ID NO: 448555 - DNA, 25 bp, Homo sapien
gcagtggcccactagtgtctggaag

SEQ ID NO: 448556 - DNA, 25 bp, Homo sapien
gagtttttgactaagcagccagtcc

SEQ ID NO: 448557 - DNA, 25 bp, Homo sapien
ttctgggagagggagtttttgacta

SEQ ID NO: 448558 - DNA, 25 bp, Homo sapien
gagagggagtttttgactaagcagc

SEQ ID NO: 448559 - DNA, 25 bp, Homo sapien
gagggagtttttgactaagcagcca

SEQ ID NO: 448560 - DNA, 25 bp, Homo sapien
tcccctctgttgtcgatgacttggg

SEQ ID NO: 448561 - DNA, 25 bp, Homo sapien
gaataagtcccctctgttgtcgatg

SEQ ID NO: 448562 - DNA, 25 bp, Homo sapien
ctgttgtcgatgacttgggacagtc

SEQ ID NO: 448563 - DNA, 25 bp, Homo sapien
ggttgaataagtcccctctgttgtc

SEQ ID NO: 448564 - DNA, 25 bp, Homo sapien
ggtgcataagagagctggaatctga

SEQ ID NO: 448565 - DNA, 25 bp, Homo sapien
gaaatcaccaagcatctgctgctgg

SEQ ID NO: 448566 - DNA, 25 bp, Homo sapien
tgcccactagttagaaggagagccc

SEQ ID NO: 448567 - DNA, 25 bp, Homo sapien
gagcccaggaacgaaggtgcataag

SEQ ID NO: 448568 - DNA, 25 bp, Homo sapien
cactgcttgcttattgcaaaggctt

SEQ ID NO: 448569 - DNA, 25 bp, Homo sapien
ttgtttcatgcatctgctcagacac

SEQ ID NO: 448570 - DNA, 25 bp, Homo sapien
gaaactcttgtttcatgcatctgct

SEQ ID NO: 448571 - DNA, 25 bp, Homo sapien
acacaggatatgctgtgctcactgc

SEQ ID NO: 448572 - DNA, 25 bp, Homo sapien
ctaaggatccatttgctcccatggg

SEQ ID NO: 448573 - DNA, 25 bp, Homo sapien
ggagccaagcccgtggcactatcat

SEQ ID NO: 448574 - DNA, 25 bp, Homo sapien
aagcccgtggcactatcatcttcca

SEQ ID NO: 448575 - DNA, 25 bp, Homo sapien
catatggaggggtgaagaaccagct

SEQ ID NO: 448576 - DNA, 25 bp, Homo sapien
tttcttctttatgtatccaccatct

SEQ ID NO: 448577 - DNA, 25 bp, Homo sapien
ttctttatgtatccaccatctttct

SEQ ID NO: 448578 - DNA, 25 bp, Homo sapien
tgtaggcacattctggtctttcttc

SEQ ID NO: 448579 - DNA, 25 bp, Homo sapien
ttcaattgtaggcacattctggtct

SEQ ID NO: 448580 - DNA, 25 bp, Homo sapien
ttgtgacctgcccttgtgggattct

SEQ ID NO: 448581 - DNA, 25 bp, Homo sapien
ttaaagctgtgtagtcttcccaaag

SEQ ID NO: 448582 - DNA, 25 bp, Homo sapien
ccaaaggatctgacggttgtgacct

SEQ ID NO: 448583 - DNA, 25 bp, Homo sapien
ccttgttagctacagatagaagtcc

SEQ ID NO: 448584 - DNA, 25 bp, Homo sapien
ccaagagccctggtatggattgcac

SEQ ID NO: 448585 - DNA, 25 bp, Homo sapien
ggccaagagccctggtatggattgc

SEQ ID NO: 448586 - DNA, 25 bp, Homo sapien
gccaagagccctggtatggattgca

SEQ ID NO: 448587 - DNA, 25 bp, Homo sapien
aggccaagagccctggtatggattg

SEQ ID NO: 448588 - DNA, 25 bp, Homo sapien
cagagactggggcttacagcagagg

SEQ ID NO: 448589 - DNA, 25 bp, Homo sapien
ggcaggcccaagccagcagatgcag

SEQ ID NO: 448590 - DNA, 25 bp, Homo sapien
caggcccaagccagcagatgcaggt

SEQ ID NO: 448591 - DNA, 25 bp, Homo sapien
gactggggcttacagcagaggaccc

SEQ ID NO: 448592 - DNA, 25 bp, Homo sapien
caagtccagctcgaggtatttaatc

SEQ ID NO: 448593 - DNA, 25 bp, Homo sapien
tgctcagcagggcatgcatttaagc

SEQ ID NO: 448594 - DNA, 25 bp, Homo sapien
tagaaagcccggaatgagattgcct

SEQ ID NO: 448595 - DNA, 25 bp, Homo sapien
tttgtggaatcaaaccagggtgtct

SEQ ID NO: 448596 - DNA, 25 bp, Homo sapien
tcaaagccacaaccatgggccagtg

SEQ ID NO: 448597 - DNA, 25 bp, Homo sapien
tccagcgtagtctgtgtttgagggc

SEQ ID NO: 448598 - DNA, 25 bp, Homo sapien
tcctgttgaatgagcgtcttctctg

SEQ ID NO: 448599 - DNA, 25 bp, Homo sapien
tctctgtactcctctgatgcaagtc

SEQ ID NO: 448600 - DNA, 25 bp, Homo sapien
gaccgaatgactagctaactgagag

SEQ ID NO: 448601 - DNA, 25 bp, Homo sapien
tgaaaggctccgttgactgcttgag

SEQ ID NO: 448602 - DNA, 25 bp, Homo sapien
ccagatgcaggtaggaggaactcca

SEQ ID NO: 448603 - DNA, 25 bp, Homo sapien
gctcagcctgaaaaagcgcagtttg

SEQ ID NO: 448604 - DNA, 25 bp, Homo sapien
caaacctgtgtggtcccagttcaga

SEQ ID NO: 448605 - DNA, 25 bp, Homo sapien
agagccctgggccttttcaagaact

SEQ ID NO: 448606 - DNA, 25 bp, Homo sapien
catcatggagtagcttgaagtcgtc

SEQ ID NO: 448607 - DNA, 25 bp, Homo sapien
gaagtcgtctgtggctacatggtca

SEQ ID NO: 448608 - DNA, 25 bp, Homo sapien
gagtggaggagaccttagggacgcc

SEQ ID NO: 448609 - DNA, 25 bp, Homo sapien
ggagaccttagggacgccaggagag

SEQ ID NO: 448610 - DNA, 25 bp, Homo sapien
cagagtggaggagaccttagggacg

SEQ ID NO: 448611 - DNA, 25 bp, Homo sapien
tggaggagaccttagggacgccagg

SEQ ID NO: 448612 - DNA, 25 bp, Homo sapien
gggtgtctttggtgacacaggcaat

SEQ ID NO: 448613 - DNA, 25 bp, Homo sapien
tctgggtgtctttggtgacacaggc

SEQ ID NO: 448614 - DNA, 25 bp, Homo sapien
ggtgtctttggtgacacaggcaatg

SEQ ID NO: 448615 - DNA, 25 bp, Homo sapien
ctgggtgtctttggtgacacaggca

SEQ ID NO: 448616 - DNA, 25 bp, Homo sapien
ccgtcacacagttagacctgcccat

SEQ ID NO: 448617 - DNA, 25 bp, Homo sapien
aagaagagggcgctccataccacca

SEQ ID NO: 448618 - DNA, 25 bp, Homo sapien
caccaccgtcacacagttagacctg

SEQ ID NO: 448619 - DNA, 25 bp, Homo sapien
ctgtaacaaagaagagggcgctcca

SEQ ID NO: 448620 - DNA, 25 bp, Homo sapien
gactgtagctagctgcaggctgtcc

SEQ ID NO: 448621 - DNA, 25 bp, Homo sapien
gctccttaacattccagcttcctgt

SEQ ID NO: 448622 - DNA, 25 bp, Homo sapien
ggaccaaataactttgctgcccact

SEQ ID NO: 448623 - DNA, 25 bp, Homo sapien
gactctcagcgtcccttgaggccag

SEQ ID NO: 448624 - DNA, 25 bp, Homo sapien
aaatctgttttagagtctatgtgct

SEQ ID NO: 448625 - DNA, 25 bp, Homo sapien
gagtctatgtgcttcttagatactg

SEQ ID NO: 448626 - DNA, 25 bp, Homo sapien
tcagtaaatgtcgatgacgatgaca

SEQ ID NO: 448627 - DNA, 25 bp, Homo sapien
tgtgcttcttagatactgctgtgtt

SEQ ID NO: 448628 - DNA, 25 bp, Homo sapien
cttgatttgtcacttgctataatcc

SEQ ID NO: 448629 - DNA, 25 bp, Homo sapien
tttgtcacttgctataatccatggg

SEQ ID NO: 448630 - DNA, 25 bp, Homo sapien
tctttctcaggtgagtttcacttga

SEQ ID NO: 448631 - DNA, 25 bp, Homo sapien
tttggcgctaccaccattgccagca

SEQ ID NO: 448632 - DNA, 25 bp, Homo sapien
ttgctaagcagtgagggagcctccc

SEQ ID NO: 448633 - DNA, 25 bp, Homo sapien
gtttttcggagcgaagggcacgcca

SEQ ID NO: 448634 - DNA, 25 bp, Homo sapien
tccctacacggacggactatgaccg

SEQ ID NO: 448635 - DNA, 25 bp, Homo sapien
ttgagtgtcgcccaggtcacaagga

SEQ ID NO: 448636 - DNA, 25 bp, Homo sapien
agccccagggagaatgggaagtttg

SEQ ID NO: 448637 - DNA, 25 bp, Homo sapien
ctgagccccagggagaatgggaagt

SEQ ID NO: 448638 - DNA, 25 bp, Homo sapien
tgagccccagggagaatgggaagtt

SEQ ID NO: 448639 - DNA, 25 bp, Homo sapien
gccccagggagaatgggaagtttga

SEQ ID NO: 448640 - DNA, 25 bp, Homo sapien
tggggagaataacgtccactgtgcg

SEQ ID NO: 448641 - DNA, 25 bp, Homo sapien
aatgtcacctcgtgtgtcaagtggg

SEQ ID NO: 448642 - DNA, 25 bp, Homo sapien
gtggccgcaaggatggagtccaggt

SEQ ID NO: 448643 - DNA, 25 bp, Homo sapien
cgtccactgtgcgaggtggccgcaa

SEQ ID NO: 448644 - DNA, 25 bp, Homo sapien
tattctcaaagaattcctggcacag

SEQ ID NO: 448645 - DNA, 25 bp, Homo sapien
gctggcatctctgactgacccgaga

SEQ ID NO: 448646 - DNA, 25 bp, Homo sapien
cagagtgtctgacggtggcattgca

SEQ ID NO: 448647 - DNA, 25 bp, Homo sapien
tggcattgcacgagggcacagaaca

SEQ ID NO: 448648 - DNA, 25 bp, Homo sapien
aggagtctgccttcgtttgctgtgg

SEQ ID NO: 448649 - DNA, 25 bp, Homo sapien
tctatgctgaggtccgttctggttc

SEQ ID NO: 448650 - DNA, 25 bp, Homo sapien
taagagtgctctgtttgctgaaact

SEQ ID NO: 448651 - DNA, 25 bp, Homo sapien
tcacccactgggataaactgaatgg

SEQ ID NO: 448652 - DNA, 25 bp, Homo sapien
ccattcgttgaatcagcatgtctct

SEQ ID NO: 448653 - DNA, 25 bp, Homo sapien
actctgttctttgactagttaggtg

SEQ ID NO: 448654 - DNA, 25 bp, Homo sapien
ctcttgtaactctgttctttgacta

SEQ ID NO: 448655 - DNA, 25 bp, Homo sapien
gtaactctgttctttgactagttag

SEQ ID NO: 448656 - DNA, 25 bp, Homo sapien
ttgtaacatctttaaattcttacta

SEQ ID NO: 448657 - DNA, 25 bp, Homo sapien
tgtaacatctttaaattcttactag

SEQ ID NO: 448658 - DNA, 25 bp, Homo sapien
cttgtaacatctttaaattcttact

SEQ ID NO: 448659 - DNA, 25 bp, Homo sapien
taacatctttaaattcttactagta

SEQ ID NO: 448660 - DNA, 25 bp, Homo sapien
tgtgcaggcttccttgtgacaggga

SEQ ID NO: 448661 - DNA, 25 bp, Homo sapien
gctcagctgtcaagtctctttcaag

SEQ ID NO: 448662 - DNA, 25 bp, Homo sapien
gaggtggctacagatggtctccctg

SEQ ID NO: 448663 - DNA, 25 bp, Homo sapien
tctttcaagtcatctaagctctctg

SEQ ID NO: 448664 - DNA, 25 bp, Homo sapien
ccaggccgtgctgggatcgcatttt

SEQ ID NO: 448665 - DNA, 25 bp, Homo sapien
atatatttcgtctctatgggaggtc

SEQ ID NO: 448666 - DNA, 25 bp, Homo sapien
ccaggaacacgccaggccgtgctgg

SEQ ID NO: 448667 - DNA, 25 bp, Homo sapien
tccttgcaagggcagtgaccctttt

SEQ ID NO: 448668 - DNA, 25 bp, Homo sapien
taagccaactgaatcgcaagtgcca

SEQ ID NO: 448669 - DNA, 25 bp, Homo sapien
ctttcctcgggagcctactgagcct

SEQ ID NO: 448670 - DNA, 25 bp, Homo sapien
tgaagtcaaacggaaaaagttgctc

SEQ ID NO: 448671 - DNA, 25 bp, Homo sapien
taacgcttatggtgcattgggcgcc

SEQ ID NO: 448672 - DNA, 25 bp, Homo sapien
gcctggcatcttctacagcataaat

SEQ ID NO: 448673 - DNA, 25 bp, Homo sapien
aaataccgtgtttctgagcatgcca

SEQ ID NO: 448674 - DNA, 25 bp, Homo sapien
caagccaatgctttcagcgtctgaa

SEQ ID NO: 448675 - DNA, 25 bp, Homo sapien
gtggacagcagaggacattccactg

SEQ ID NO: 448676 - DNA, 25 bp, Homo sapien
gtgggtgcagttgcctaggcacaaa

SEQ ID NO: 448677 - DNA, 25 bp, Homo sapien
tagagcagatatggatgagtggttc

SEQ ID NO: 448678 - DNA, 25 bp, Homo sapien
tcactggagtcgattgtgctagggc

SEQ ID NO: 448679 - DNA, 25 bp, Homo sapien
tgctaggcagggcaatgatgattgg

SEQ ID NO: 448680 - DNA, 25 bp, Homo sapien
cctgccctcatgccactgttcctct

SEQ ID NO: 448681 - DNA, 25 bp, Homo sapien
gccctcatgccactgttcctcttca

SEQ ID NO: 448682 - DNA, 25 bp, Homo sapien
ctgccctcatgccactgttcctctt

SEQ ID NO: 448683 - DNA, 25 bp, Homo sapien
tgccctcatgccactgttcctcttc

SEQ ID NO: 448684 - DNA, 25 bp, Homo sapien
tataattcatgtctctgtagaggtc

SEQ ID NO: 448685 - DNA, 25 bp, Homo sapien
tgtgctataattcatgtctctgtag

SEQ ID NO: 448686 - DNA, 25 bp, Homo sapien
ctctgtagaggtcattgctctttgc

SEQ ID NO: 448687 - DNA, 25 bp, Homo sapien
tcatgtctctgtagaggtcattgct

SEQ ID NO: 448688 - DNA, 25 bp, Homo sapien
ctttcctgcagccaaattctactgt

SEQ ID NO: 448689 - DNA, 25 bp, Homo sapien
caaattctactgtatagccacaagc

SEQ ID NO: 448690 - DNA, 25 bp, Homo sapien
tcatgtgagtagagaagcaattgta

SEQ ID NO: 448691 - DNA, 25 bp, Homo sapien
tatagccacaagcttcatgtgagta

SEQ ID NO: 448692 - DNA, 25 bp, Homo sapien
tggggtggcccacaaaagccagtct

SEQ ID NO: 448693 - DNA, 25 bp, Homo sapien
ctggggtggcccacaaaagccagtc

SEQ ID NO: 448694 - DNA, 25 bp, Homo sapien
cattgctgactcttacatgctgagc

SEQ ID NO: 448695 - DNA, 25 bp, Homo sapien
caaaaccctggccgaggcaccagtt

SEQ ID NO: 448696 - DNA, 25 bp, Homo sapien
tggaatcgtgctcaggccaggctct

SEQ ID NO: 448697 - DNA, 25 bp, Homo sapien
gctctgagcttccatatgggtgtct

SEQ ID NO: 448698 - DNA, 25 bp, Homo sapien
ttcagttgaagacacccttcttcac

SEQ ID NO: 448699 - DNA, 25 bp, Homo sapien
acttcctctcctaaaaacagtcatg

SEQ ID NO: 448700 - DNA, 25 bp, Homo sapien
tctgttggggtttcagttgaagaca

SEQ ID NO: 448701 - DNA, 25 bp, Homo sapien
aaacagtcatgtcttgtgtcccaag

SEQ ID NO: 448702 - DNA, 25 bp, Homo sapien
ttggcccagtactgccttgggccct

SEQ ID NO: 448703 - DNA, 25 bp, Homo sapien
tggcccagtactgccttgggccctg

SEQ ID NO: 448704 - DNA, 25 bp, Homo sapien
gctgttggcccagtactgccttggg

SEQ ID NO: 448705 - DNA, 25 bp, Homo sapien
tgttggcccagtactgccttgggcc

SEQ ID NO: 448706 - DNA, 25 bp, Homo sapien
atggtgcttgggatgacaagcaccc

SEQ ID NO: 448707 - DNA, 25 bp, Homo sapien
tagatggtgcttgggatgacaagca

SEQ ID NO: 448708 - DNA, 25 bp, Homo sapien
gggtagatggtgcttgggatgacaa

SEQ ID NO: 448709 - DNA, 25 bp, Homo sapien
ctgtagggtagatggtgcttgggat

SEQ ID NO: 448710 - DNA, 25 bp, Homo sapien
cattgtccctagagctatggattca

SEQ ID NO: 448711 - DNA, 25 bp, Homo sapien
ttgtccctagagctatggattcaac

SEQ ID NO: 448712 - DNA, 25 bp, Homo sapien
tccctagagctatggattcaactgg

SEQ ID NO: 448713 - DNA, 25 bp, Homo sapien
ggattcaactggatccttccagatt

SEQ ID NO: 448714 - DNA, 25 bp, Homo sapien
acatctgttctatctcttttcttaa

SEQ ID NO: 448715 - DNA, 25 bp, Homo sapien
acttcttcctggcttgccttacaca

SEQ ID NO: 448716 - DNA, 25 bp, Homo sapien
gctccacatctgttctatctctttt

SEQ ID NO: 448717 - DNA, 25 bp, Homo sapien
ttcagctccacatctgttctatctc

SEQ ID NO: 448718 - DNA, 25 bp, Homo sapien
tctcccagaaggcaaagacttggca

SEQ ID NO: 448719 - DNA, 25 bp, Homo sapien
ctctcccagaaggcaaagacttggc

SEQ ID NO: 448720 - DNA, 25 bp, Homo sapien
gttacagtaaggaacttgaactcga

SEQ ID NO: 448721 - DNA, 25 bp, Homo sapien
gtggccaagttagaaagagccttgt

SEQ ID NO: 448722 - DNA, 25 bp, Homo sapien
agagccttgtaagttacagtaagga

SEQ ID NO: 448723 - DNA, 25 bp, Homo sapien
taaggaacttgaactcgatcctatt

SEQ ID NO: 448724 - DNA, 25 bp, Homo sapien
aaagaggggacattgcgtgcgaagg

SEQ ID NO: 448725 - DNA, 25 bp, Homo sapien
ttgctgaagcatccctttgagaaag

SEQ ID NO: 448726 - DNA, 25 bp, Homo sapien
gggacattgcgtgcgaaggtgcagg

SEQ ID NO: 448727 - DNA, 25 bp, Homo sapien
gtgcaggttgctgaagcatcccttt

SEQ ID NO: 448728 - DNA, 25 bp, Homo sapien
aagtcagactgtctggggcgtttga

SEQ ID NO: 448729 - DNA, 25 bp, Homo sapien
ggaagtcagactgtctggggcgttt

SEQ ID NO: 448730 - DNA, 25 bp, Homo sapien
gggcgtttgaacagctctgaagcaa

SEQ ID NO: 448731 - DNA, 25 bp, Homo sapien
ggcgtttgaacagctctgaagcaag

SEQ ID NO: 448732 - DNA, 25 bp, Homo sapien
gaagataatcttccttacaaaggca

SEQ ID NO: 448733 - DNA, 25 bp, Homo sapien
gggagaggtggtggtatggagtggg

SEQ ID NO: 448734 - DNA, 25 bp, Homo sapien
caaaggcaaaacctgtccagtgtca

SEQ ID NO: 448735 - DNA, 25 bp, Homo sapien
cactgactgccacatcagtggagga

SEQ ID NO: 448736 - DNA, 25 bp, Homo sapien
gacatttgtaactggttgtaattga

SEQ ID NO: 448737 - DNA, 25 bp, Homo sapien
caaagacatttgtaactggttgtaa

SEQ ID NO: 448738 - DNA, 25 bp, Homo sapien
aagaacaaagacatttgtaactggt

SEQ ID NO: 448739 - DNA, 25 bp, Homo sapien
ttgtaactggttgtaattgattagt

SEQ ID NO: 448740 - DNA, 25 bp, Homo sapien
tggctgtccttgactactgcacggc

SEQ ID NO: 448741 - DNA, 25 bp, Homo sapien
catgctcaggatccagagaaccagg

SEQ ID NO: 448742 - DNA, 25 bp, Homo sapien
tcttgggctagaggcatagcaggtt

SEQ ID NO: 448743 - DNA, 25 bp, Homo sapien
ggttcctggagtcttcgatgcttaa

SEQ ID NO: 448744 - DNA, 25 bp, Homo sapien
gcagcattgggcattagggagttct

SEQ ID NO: 448745 - DNA, 25 bp, Homo sapien
gcattgggcattagggagttctgat

SEQ ID NO: 448746 - DNA, 25 bp, Homo sapien
tggtctgcagcattgggcattaggg

SEQ ID NO: 448747 - DNA, 25 bp, Homo sapien
tgcagcattgggcattagggagttc

SEQ ID NO: 448748 - DNA, 25 bp, Homo sapien
gcttggctcttgaacaccaaaaggg

SEQ ID NO: 448749 - DNA, 25 bp, Homo sapien
caggcttggctcttgaacaccaaaa

SEQ ID NO: 448750 - DNA, 25 bp, Homo sapien
ttggctcttgaacaccaaaagggtg

SEQ ID NO: 448751 - DNA, 25 bp, Homo sapien
agtcaggcttggctcttgaacacca

SEQ ID NO: 448752 - DNA, 25 bp, Homo sapien
cgtggacaccactgatagagcaggt

SEQ ID NO: 448753 - DNA, 25 bp, Homo sapien
tggagcatcattttccccttgtggg

SEQ ID NO: 448754 - DNA, 25 bp, Homo sapien
gcaggttaatccctggcgtggacac

SEQ ID NO: 448755 - DNA, 25 bp, Homo sapien
ccttgtgggccttttgtgagggatc

SEQ ID NO: 448756 - DNA, 25 bp, Homo sapien
gtcaggtttaagaaatctctggaag

SEQ ID NO: 448757 - DNA, 25 bp, Homo sapien
catggagtcaggtttaagaaatctc

SEQ ID NO: 448758 - DNA, 25 bp, Homo sapien
ggagtcaggtttaagaaatctctgg

SEQ ID NO: 448759 - DNA, 25 bp, Homo sapien
aggtttaagaaatctctggaagtgg

SEQ ID NO: 448760 - DNA, 25 bp, Homo sapien
gaagagagacttcgtgatggcaaag

SEQ ID NO: 448761 - DNA, 25 bp, Homo sapien
ggaatcctaatactgactcaggtcc

SEQ ID NO: 448762 - DNA, 25 bp, Homo sapien
gcttcgctattaggaaaatgatggt

SEQ ID NO: 448763 - DNA, 25 bp, Homo sapien
gaacactggtgttggagcttcgcta

SEQ ID NO: 448764 - DNA, 25 bp, Homo sapien
ggcctcaggcaggctgggcagcagc

SEQ ID NO: 448765 - DNA, 25 bp, Homo sapien
ctcaggcaggctgggcagcagcatg

SEQ ID NO: 448766 - DNA, 25 bp, Homo sapien
tggggcctcaggcaggctgggcagc

SEQ ID NO: 448767 - DNA, 25 bp, Homo sapien
ctggggcctcaggcaggctgggcag

SEQ ID NO: 448768 - DNA, 25 bp, Homo sapien
atttaatacaaatgcaagggtgtcc

SEQ ID NO: 448769 - DNA, 25 bp, Homo sapien
caaatgcaagggtgtcccaaatcac

SEQ ID NO: 448770 - DNA, 25 bp, Homo sapien
ctgggtgaggctaggtgggcatgac

SEQ ID NO: 448771 - DNA, 25 bp, Homo sapien
tgatcttagcatggtgatattgtcc

SEQ ID NO: 448772 - DNA, 25 bp, Homo sapien
tagtcaaatagtgagctggagtctc

SEQ ID NO: 448773 - DNA, 25 bp, Homo sapien
gactgttgtaaggtcaccagaatag

SEQ ID NO: 448774 - DNA, 25 bp, Homo sapien
tgttaataataccacctttgaaagc

SEQ ID NO: 448775 - DNA, 25 bp, Homo sapien
gactatgggattggtgactgttgta

SEQ ID NO: 448776 - DNA, 25 bp, Homo sapien
caaagaggctccatatgggaaggtg

SEQ ID NO: 448777 - DNA, 25 bp, Homo sapien
tcttggttggctttcatgaaaccac

SEQ ID NO: 448778 - DNA, 25 bp, Homo sapien
ctgatcaaggggtcgaggaagcact

SEQ ID NO: 448779 - DNA, 25 bp, Homo sapien
agcactgtgtcttcgggtttttcct

SEQ ID NO: 448780 - DNA, 25 bp, Homo sapien
tgtccacaccattgagcttgggttt

SEQ ID NO: 448781 - DNA, 25 bp, Homo sapien
caccattgagcttgggtttggactc

SEQ ID NO: 448782 - DNA, 25 bp, Homo sapien
ctaaaactgttcttgtggggctgct

SEQ ID NO: 448783 - DNA, 25 bp, Homo sapien
ggtttggactcatgaaggggaccat

SEQ ID NO: 448784 - DNA, 25 bp, Homo sapien
accagggttggccagtctgagccca

SEQ ID NO: 448785 - DNA, 25 bp, Homo sapien
atccccacaaccagggttggccagt

SEQ ID NO: 448786 - DNA, 25 bp, Homo sapien
acaaccagggttggccagtctgagc

SEQ ID NO: 448787 - DNA, 25 bp, Homo sapien
cccacaaccagggttggccagtctg

SEQ ID NO: 448788 - DNA, 25 bp, Homo sapien
ctggcgcggataatgatagctggtg

SEQ ID NO: 448789 - DNA, 25 bp, Homo sapien
ggagctggcgcggataatgatagct

SEQ ID NO: 448790 - DNA, 25 bp, Homo sapien
ttctctctgataaatggctccacag

SEQ ID NO: 448791 - DNA, 25 bp, Homo sapien
ggataatgatagctggtgggcttca

SEQ ID NO: 448792 - DNA, 25 bp, Homo sapien
tcattgtctgcgctctgctaaggtc

SEQ ID NO: 448793 - DNA, 25 bp, Homo sapien
ccagtcccagatgcagtgtgcagct

SEQ ID NO: 448794 - DNA, 25 bp, Homo sapien
ctgttgatctccaggatgtcaaggc

SEQ ID NO: 448795 - DNA, 25 bp, Homo sapien
gctgtatttgctgcatggagagcct

SEQ ID NO: 448796 - DNA, 25 bp, Homo sapien
gaacactgtaggataatgtgctcag

SEQ ID NO: 448797 - DNA, 25 bp, Homo sapien
cacagctggtgacaagcatcggtca

SEQ ID NO: 448798 - DNA, 25 bp, Homo sapien
tgtgctcagggaaagaatgcaggta

SEQ ID NO: 448799 - DNA, 25 bp, Homo sapien
gcatcggtcattagcatcagtagtg

SEQ ID NO: 448800 - DNA, 25 bp, Homo sapien
gcaaaaagatgtaaaggtgacccca

SEQ ID NO: 448801 - DNA, 25 bp, Homo sapien
caaaaagatgtaaaggtgaccccat

SEQ ID NO: 448802 - DNA, 25 bp, Homo sapien
ctggaatgtattccgtatgagtgtt

SEQ ID NO: 448803 - DNA, 25 bp, Homo sapien
ttccgtatgagtgtttcttagcaaa

SEQ ID NO: 448804 - DNA, 25 bp, Homo sapien
cctgaagtaggataggttctgacat

SEQ ID NO: 448805 - DNA, 25 bp, Homo sapien
gcagttcaacacagtatatgtcggg

SEQ ID NO: 448806 - DNA, 25 bp, Homo sapien
tttatacctgaagtaggataggttc

SEQ ID NO: 448807 - DNA, 25 bp, Homo sapien
tggacaataggctgtacacaagcag

SEQ ID NO: 448808 - DNA, 25 bp, Homo sapien
tttcttattgagtctcatgggtaac

SEQ ID NO: 448809 - DNA, 25 bp, Homo sapien
tggaaagcagtccagtagaactggg

SEQ ID NO: 448810 - DNA, 25 bp, Homo sapien
ggtatgatagcaatagtaattgaca

SEQ ID NO: 448811 - DNA, 25 bp, Homo sapien
gtaattgacattcaaatagcatttg

SEQ ID NO: 448812 - DNA, 25 bp, Homo sapien
ttccttgatgggcaatgccaatctt

SEQ ID NO: 448813 - DNA, 25 bp, Homo sapien
aatgccaatcttcttataggagaat

SEQ ID NO: 448814 - DNA, 25 bp, Homo sapien
tgatttcttgtcaggtttagaggtg

SEQ ID NO: 448815 - DNA, 25 bp, Homo sapien
tcttgtcaggtttagaggtgatttg

SEQ ID NO: 448816 - DNA, 25 bp, Homo sapien
aaatctcctccaccatgtccttcac

SEQ ID NO: 448817 - DNA, 25 bp, Homo sapien
tagaaatctcctccaccatgtcctt

SEQ ID NO: 448818 - DNA, 25 bp, Homo sapien
gaaatctcctccaccatgtccttca

SEQ ID NO: 448819 - DNA, 25 bp, Homo sapien
ttagaaatctcctccaccatgtcct

SEQ ID NO: 448820 - DNA, 25 bp, Homo sapien
tactctgacagtactgggacatcgc

SEQ ID NO: 448821 - DNA, 25 bp, Homo sapien
tatagcttagcctaggatggctcag

SEQ ID NO: 448822 - DNA, 25 bp, Homo sapien
tactttctgtccaaccgctgatgtg

SEQ ID NO: 448823 - DNA, 25 bp, Homo sapien
gggacatcgctggagactttgttac

SEQ ID NO: 448824 - DNA, 25 bp, Homo sapien
tgtcctcatgtgcagaataaagcct

SEQ ID NO: 448825 - DNA, 25 bp, Homo sapien
gcagcccatgcatttcggaggtatt

SEQ ID NO: 448826 - DNA, 25 bp, Homo sapien
gagtatgtgcaaacagcggccagca

SEQ ID NO: 448827 - DNA, 25 bp, Homo sapien
tacatagctatgtgtgcagcccatg

SEQ ID NO: 448828 - DNA, 25 bp, Homo sapien
ggatgagtttcccagttggcagaac

SEQ ID NO: 448829 - DNA, 25 bp, Homo sapien
tttgagttgcacaggagtgctgacg

SEQ ID NO: 448830 - DNA, 25 bp, Homo sapien
gaactcgtgagctactttgctggcc

SEQ ID NO: 448831 - DNA, 25 bp, Homo sapien
cctctgacctgatggacatattggg

SEQ ID NO: 448832 - DNA, 25 bp, Homo sapien
ggccacttctgcaacttgatggcct

SEQ ID NO: 448833 - DNA, 25 bp, Homo sapien
ttggttgtggagtttatgggccact

SEQ ID NO: 448834 - DNA, 25 bp, Homo sapien
ctcctctgatccctgggcctgttgg

SEQ ID NO: 448835 - DNA, 25 bp, Homo sapien
gggccacttctgcaacttgatggcc

SEQ ID NO: 448836 - DNA, 25 bp, Homo sapien
gaataccatcggagctcctctggaa

SEQ ID NO: 448837 - DNA, 25 bp, Homo sapien
cagaataccatcggagctcctctgg

SEQ ID NO: 448838 - DNA, 25 bp, Homo sapien
agaataccatcggagctcctctgga

SEQ ID NO: 448839 - DNA, 25 bp, Homo sapien
tccatagctaattaggagcctggtg

SEQ ID NO: 448840 - DNA, 25 bp, Homo sapien
aagtgacgcaatgcaaagtgtgtgc

SEQ ID NO: 448841 - DNA, 25 bp, Homo sapien
ctctgtgccacgcatgctgatgtgt

SEQ ID NO: 448842 - DNA, 25 bp, Homo sapien
gacacggagagatgcaagtgacgca

SEQ ID NO: 448843 - DNA, 25 bp, Homo sapien
gtgggagtaggaaagttgtagacat

SEQ ID NO: 448844 - DNA, 25 bp, Homo sapien
cttttatcgatggagctgtgttgga

SEQ ID NO: 448845 - DNA, 25 bp, Homo sapien
tagaaggcaaatatgacttttatcg

SEQ ID NO: 448846 - DNA, 25 bp, Homo sapien
tatgacttttatcgatggagctgtg

SEQ ID NO: 448847 - DNA, 25 bp, Homo sapien
aattgtaactggttagcctggctcc

SEQ ID NO: 448848 - DNA, 25 bp, Homo sapien
ttgggagaattgtaactggttagcc

SEQ ID NO: 448849 - DNA, 25 bp, Homo sapien
gctgacttgggagaattgtaactgg

SEQ ID NO: 448850 - DNA, 25 bp, Homo sapien
tcctgctgacttgggagaattgtaa

SEQ ID NO: 448851 - DNA, 25 bp, Homo sapien
cagggctcctgagctacccactggg

SEQ ID NO: 448852 - DNA, 25 bp, Homo sapien
tatgaagcgaagccataggcagcca

SEQ ID NO: 448853 - DNA, 25 bp, Homo sapien
ttatgccggcctcatcacttccttt

SEQ ID NO: 448854 - DNA, 25 bp, Homo sapien
ctacccactgggtagttgcaaacat

SEQ ID NO: 448855 - DNA, 25 bp, Homo sapien
tcagctttacttcactcagttgcat

SEQ ID NO: 448856 - DNA, 25 bp, Homo sapien
ctgaagccagagttgtaacaacagc

SEQ ID NO: 448857 - DNA, 25 bp, Homo sapien
tcgatggtgatggttgtttaaagcc

SEQ ID NO: 448858 - DNA, 25 bp, Homo sapien
tgttccacttctctggtattgtagt

SEQ ID NO: 448859 - DNA, 25 bp, Homo sapien
tttctgtctttggacatgtggcttg

SEQ ID NO: 448860 - DNA, 25 bp, Homo sapien
ggggcacctagaggtggtctcagag

SEQ ID NO: 448861 - DNA, 25 bp, Homo sapien
tggggcacctagaggtggtctcaga

SEQ ID NO: 448862 - DNA, 25 bp, Homo sapien
gagctggggcacctagaggtggtct

SEQ ID NO: 448863 - DNA, 25 bp, Homo sapien
ggagctggggcacctagaggtggtc

SEQ ID NO: 448864 - DNA, 25 bp, Homo sapien
gttgtgatgcagcattgaccatgag

SEQ ID NO: 448865 - DNA, 25 bp, Homo sapien
agggaatgggtaaactcactcctca

SEQ ID NO: 448866 - DNA, 25 bp, Homo sapien
taaagcgcaagaggtgtctttctcc

SEQ ID NO: 448867 - DNA, 25 bp, Homo sapien
tgttccatcagcattgtttcagttg

SEQ ID NO: 448868 - DNA, 25 bp, Homo sapien
tctttcagaccacggctttcttcgc

SEQ ID NO: 448869 - DNA, 25 bp, Homo sapien
gggctctcccgtggacacctgtgct

SEQ ID NO: 448870 - DNA, 25 bp, Homo sapien
cagtgtccctggttaagggaccctg

SEQ ID NO: 448871 - DNA, 25 bp, Homo sapien
aacatccccaagttgccttgctctg

SEQ ID NO: 448872 - DNA, 25 bp, Homo sapien
tccccgttcctcatttggtggggca

SEQ ID NO: 448873 - DNA, 25 bp, Homo sapien
atgggacagcggcaaagtccccgtt

SEQ ID NO: 448874 - DNA, 25 bp, Homo sapien
ctctcagaatgggacagcggcaaag

SEQ ID NO: 448875 - DNA, 25 bp, Homo sapien
tcagaatgggacagcggcaaagtcc

SEQ ID NO: 448876 - DNA, 25 bp, Homo sapien
ggactcggaggcagttgcgaggacg

SEQ ID NO: 448877 - DNA, 25 bp, Homo sapien
acagagcaggcggaccgctcctgtg

SEQ ID NO: 448878 - DNA, 25 bp, Homo sapien
caggcggaccgctcctgtgtcctag

SEQ ID NO: 448879 - DNA, 25 bp, Homo sapien
ttgcgaggacggacagagcaggcgg

SEQ ID NO: 448880 - DNA, 25 bp, Homo sapien
gattccctcagggagacacatgtgc

SEQ ID NO: 448881 - DNA, 25 bp, Homo sapien
gcctccctggaagagtcacagtcta

SEQ ID NO: 448882 - DNA, 25 bp, Homo sapien
ccggcaagggctgtccggtggtttg

SEQ ID NO: 448883 - DNA, 25 bp, Homo sapien
tgtccggtggtttggcgaaggcctc

SEQ ID NO: 448884 - DNA, 25 bp, Homo sapien
ggcacactttccgcttgtcctcaga

SEQ ID NO: 448885 - DNA, 25 bp, Homo sapien
cttgtcctcagaggcgttccttttt

SEQ ID NO: 448886 - DNA, 25 bp, Homo sapien
tcctcagaggcgttcctttttcggc

SEQ ID NO: 448887 - DNA, 25 bp, Homo sapien
ggcgttcctttttcggctgtgatca

SEQ ID NO: 448888 - DNA, 25 bp, Homo sapien
tctaggactaagagacgacaacttg

SEQ ID NO: 448889 - DNA, 25 bp, Homo sapien
tagggcacgaccttggaaaaagcta

SEQ ID NO: 448890 - DNA, 25 bp, Homo sapien
cccaagggtggttgccagtctgtaa

SEQ ID NO: 448891 - DNA, 25 bp, Homo sapien
ggtagggcccaaagactcaaagctg

SEQ ID NO: 448892 - DNA, 25 bp, Homo sapien
ctgctcggcactgttttgtgagccc

SEQ ID NO: 448893 - DNA, 25 bp, Homo sapien
tggtcgctatgctccctctgttccc

SEQ ID NO: 448894 - DNA, 25 bp, Homo sapien
ttgtgagcccacatagcaatcaggg

SEQ ID NO: 448895 - DNA, 25 bp, Homo sapien
cctggccagaaataagtgatgcctt

SEQ ID NO: 448896 - DNA, 25 bp, Homo sapien
ctgcagcagagaggacggggcacac

SEQ ID NO: 448897 - DNA, 25 bp, Homo sapien
agcagagaggacggggcacacagag

SEQ ID NO: 448898 - DNA, 25 bp, Homo sapien
agaggacggggcacacagaggacag

SEQ ID NO: 448899 - DNA, 25 bp, Homo sapien
aggacggggcacacagaggacagtg

SEQ ID NO: 448900 - DNA, 25 bp, Homo sapien
cttctagagtgtcaaggaggaggac

SEQ ID NO: 448901 - DNA, 25 bp, Homo sapien
tctgtgcagcgccaataaccacatc

SEQ ID NO: 448902 - DNA, 25 bp, Homo sapien
ccatgggccacgatggcatgtgcgt

SEQ ID NO: 448903 - DNA, 25 bp, Homo sapien
tcctgttgtaaactctgccgcctcg

SEQ ID NO: 448904 - DNA, 25 bp, Homo sapien
ttccgtaacagggtgactttgctcc

SEQ ID NO: 448905 - DNA, 25 bp, Homo sapien
tgggctggcattgctgcatttagac

SEQ ID NO: 448906 - DNA, 25 bp, Homo sapien
tgctccaatgtgtcccttcatttcc

SEQ ID NO: 448907 - DNA, 25 bp, Homo sapien
tcttaagtctgttttgggctgctcc

SEQ ID NO: 448908 - DNA, 25 bp, Homo sapien
atgattgtagcccttggaatgcagc

SEQ ID NO: 448909 - DNA, 25 bp, Homo sapien
ggttgccaactgtaaaatatcacca

SEQ ID NO: 448910 - DNA, 25 bp, Homo sapien
tctgtgcgggagttggccgatctgc

SEQ ID NO: 448911 - DNA, 25 bp, Homo sapien
ttttgagcagcgaagtacaggttgc

SEQ ID NO: 448912 - DNA, 25 bp, Homo sapien
gatggtttgggctccccatacctaa

SEQ ID NO: 448913 - DNA, 25 bp, Homo sapien
aatgatccatctcgtcgcatcccat

SEQ ID NO: 448914 - DNA, 25 bp, Homo sapien
gcagcatgcgctcagccgatggttt

SEQ ID NO: 448915 - DNA, 25 bp, Homo sapien
taacccagtgcctgtaaagcccctg

SEQ ID NO: 448916 - DNA, 25 bp, Homo sapien
gccaataacataacacacccaggtt

SEQ ID NO: 448917 - DNA, 25 bp, Homo sapien
tttggccaataacataacacaccca

SEQ ID NO: 448918 - DNA, 25 bp, Homo sapien
ataacacacccaggtttcataactt

SEQ ID NO: 448919 - DNA, 25 bp, Homo sapien
tggccaataacataacacacccagg

SEQ ID NO: 448920 - DNA, 25 bp, Homo sapien
cttgtccacagagcaagcttttggt

SEQ ID NO: 448921 - DNA, 25 bp, Homo sapien
tccacagagcaagcttttggttttg

SEQ ID NO: 448922 - DNA, 25 bp, Homo sapien
tgtccacagagcaagcttttggttt

SEQ ID NO: 448923 - DNA, 25 bp, Homo sapien
ccacagagcaagcttttggttttgt

SEQ ID NO: 448924 - DNA, 25 bp, Homo sapien
gctggtgaacaggtcacagtggctc

SEQ ID NO: 448925 - DNA, 25 bp, Homo sapien
tctttcttggtcactgcccagctca

SEQ ID NO: 448926 - DNA, 25 bp, Homo sapien
ctggatagtttgaacagagctggtg

SEQ ID NO: 448927 - DNA, 25 bp, Homo sapien
tggaggggatgcagtttgctctttc

SEQ ID NO: 448928 - DNA, 25 bp, Homo sapien
aattccaagaaaatctccagagcat

SEQ ID NO: 448929 - DNA, 25 bp, Homo sapien
cagtgctgacagatttaactgttgg

SEQ ID NO: 448930 - DNA, 25 bp, Homo sapien
gaagattattgacgtcagtgctgac

SEQ ID NO: 448931 - DNA, 25 bp, Homo sapien
tcttttggaagattattgacgtcag

SEQ ID NO: 448932 - DNA, 25 bp, Homo sapien
atggggtctgatgcccttctgacct

SEQ ID NO: 448933 - DNA, 25 bp, Homo sapien
cccttggagtttgatggggtctgat

SEQ ID NO: 448934 - DNA, 25 bp, Homo sapien
ggggtctgatgcccttctgacctgg

SEQ ID NO: 448935 - DNA, 25 bp, Homo sapien
ctccttcccttggagtttgatgggg

SEQ ID NO: 448936 - DNA, 25 bp, Homo sapien
ggcaattcccctttcgcacaataaa

SEQ ID NO: 448937 - DNA, 25 bp, Homo sapien
gcaattcccctttcgcacaataaaa

SEQ ID NO: 448938 - DNA, 25 bp, Homo sapien
caatcaacttgataccaaaggttaa

SEQ ID NO: 448939 - DNA, 25 bp, Homo sapien
ggctagtgccatctgagacttcaat

SEQ ID NO: 448940 - DNA, 25 bp, Homo sapien
tgagtacgagatgggatgaatggcc

SEQ ID NO: 448941 - DNA, 25 bp, Homo sapien
gatgaatggccagcggctagtgcca

SEQ ID NO: 448942 - DNA, 25 bp, Homo sapien
gttcccatatcgagttgcttgccag

SEQ ID NO: 448943 - DNA, 25 bp, Homo sapien
tgcttgccagccctttggtaagcct

SEQ ID NO: 448944 - DNA, 25 bp, Homo sapien
gaaagctccagttcccatatcgagt

SEQ ID NO: 448945 - DNA, 25 bp, Homo sapien
cagccctttggtaagccttggcagg

SEQ ID NO: 448946 - DNA, 25 bp, Homo sapien
taactggtccctgaatgcagcagct

SEQ ID NO: 448947 - DNA, 25 bp, Homo sapien
tggtgtgggttacatcaacaaattc

SEQ ID NO: 448948 - DNA, 25 bp, Homo sapien
cgacaaaaggcatcttaacacgggc

SEQ ID NO: 448949 - DNA, 25 bp, Homo sapien
gcagctggaggcataaactgccttt

SEQ ID NO: 448950 - DNA, 25 bp, Homo sapien
tctaaaaccatctttgaacgtgaac

SEQ ID NO: 448951 - DNA, 25 bp, Homo sapien
gcatttactgtggacagttccctct

SEQ ID NO: 448952 - DNA, 25 bp, Homo sapien
cagctacttggtttgaagtccctcc

SEQ ID NO: 448953 - DNA, 25 bp, Homo sapien
aacatggtcctacggcagctacttg

SEQ ID NO: 448954 - DNA, 25 bp, Homo sapien
ttggggttcatgagtttgggccttg

SEQ ID NO: 448955 - DNA, 25 bp, Homo sapien
aggagagagattcatgtggtaggaa

SEQ ID NO: 448956 - DNA, 25 bp, Homo sapien
ggttcatgagtttgggccttgggca

SEQ ID NO: 448957 - DNA, 25 bp, Homo sapien
agagagattcatgtggtaggaagat

SEQ ID NO: 448958 - DNA, 25 bp, Homo sapien
ttgtgattgctgtttgcccaaagtc

SEQ ID NO: 448959 - DNA, 25 bp, Homo sapien
ggactgtgcacagcattctcattgc

SEQ ID NO: 448960 - DNA, 25 bp, Homo sapien
tgcccaaagtcatgagctccgtaaa

SEQ ID NO: 448961 - DNA, 25 bp, Homo sapien
cgtaaacgttgcctgagaaggctga

SEQ ID NO: 448962 - DNA, 25 bp, Homo sapien
ggaactgaatgccagaaggagtcaa

SEQ ID NO: 448963 - DNA, 25 bp, Homo sapien
tctgatagagctctctgtaagtggg

SEQ ID NO: 448964 - DNA, 25 bp, Homo sapien
gcaatatgcctctcttagaagagaa

SEQ ID NO: 448965 - DNA, 25 bp, Homo sapien
gcaggcatttgaatggagatattga

SEQ ID NO: 448966 - DNA, 25 bp, Homo sapien
gctgcgaagcgaatcctgaaaatga

SEQ ID NO: 448967 - DNA, 25 bp, Homo sapien
cagagtttgttcagcgtgcgtgtac

SEQ ID NO: 448968 - DNA, 25 bp, Homo sapien
tgaaaatgaccctaggatcgtgccc

SEQ ID NO: 448969 - DNA, 25 bp, Homo sapien
tcctccatgggagtgagctcgtgtt

SEQ ID NO: 448970 - DNA, 25 bp, Homo sapien
tacagggatctctagagcttccaag

SEQ ID NO: 448971 - DNA, 25 bp, Homo sapien
tccaagtcctgcttagctggaacgt

SEQ ID NO: 448972 - DNA, 25 bp, Homo sapien
gaacgttttgcccattgatcagcag

SEQ ID NO: 448973 - DNA, 25 bp, Homo sapien
tacgagaccctgtattcaaagaggc

SEQ ID NO: 448974 - DNA, 25 bp, Homo sapien
tgaatgaattcctctccaaggagat

SEQ ID NO: 448975 - DNA, 25 bp, Homo sapien
tgttctgcgcaccatgggagagatg

SEQ ID NO: 448976 - DNA, 25 bp, Homo sapien
gggaagagggtcacgatccttgaaa

SEQ ID NO: 448977 - DNA, 25 bp, Homo sapien
tgatctctgcatacccattgctgtg

SEQ ID NO: 448978 - DNA, 25 bp, Homo sapien
cacttccgatggattcctgtgctca

SEQ ID NO: 448979 - DNA, 25 bp, Homo sapien
ggatagaaggcatacgtgcttgtgt

SEQ ID NO: 448980 - DNA, 25 bp, Homo sapien
aggtggtcacgctctcacacttcct

SEQ ID NO: 448981 - DNA, 25 bp, Homo sapien
ctctgatatttaaaaggtgtaatgg

SEQ ID NO: 448982 - DNA, 25 bp, Homo sapien
gttaaccttcctgagcaattcaggg

SEQ ID NO: 448983 - DNA, 25 bp, Homo sapien
tgacagagccttttaggtgtcctgg

SEQ ID NO: 448984 - DNA, 25 bp, Homo sapien
ggtgtcctgggctcgcacagtaagc

SEQ ID NO: 448985 - DNA, 25 bp, Homo sapien
tcctgattgagcttcagtgtgatca

SEQ ID NO: 448986 - DNA, 25 bp, Homo sapien
gtaagccagcacatctgactgccct

SEQ ID NO: 448987 - DNA, 25 bp, Homo sapien
ggagaagcgttttcaaagcgaggcc

SEQ ID NO: 448988 - DNA, 25 bp, Homo sapien
tgggaggcaaagagcgcttaacctt

SEQ ID NO: 448989 - DNA, 25 bp, Homo sapien
tgctcctgggaagcgtacatttcat

SEQ ID NO: 448990 - DNA, 25 bp, Homo sapien
tgaaaggcgctttttgttcaccctc

SEQ ID NO: 448991 - DNA, 25 bp, Homo sapien
atggaggcacgcacacaaccttgct

SEQ ID NO: 448992 - DNA, 25 bp, Homo sapien
ccttaccaccatggcagtgcgaggg

SEQ ID NO: 448993 - DNA, 25 bp, Homo sapien
tctccttaccaccatggcagtgcga

SEQ ID NO: 448994 - DNA, 25 bp, Homo sapien
gcgaggggcagcgtttctgctctgc

SEQ ID NO: 448995 - DNA, 25 bp, Homo sapien
gggcacatatggggcaagccagaat

SEQ ID NO: 448996 - DNA, 25 bp, Homo sapien
tgggcacatatggggcaagccagaa

SEQ ID NO: 448997 - DNA, 25 bp, Homo sapien
tttccctacaggagaccaaggtcca

SEQ ID NO: 448998 - DNA, 25 bp, Homo sapien
tttgcttgtgctggtgttgtggccc

SEQ ID NO: 448999 - DNA, 25 bp, Homo sapien
tctgatgtctctctgatggtgtcgc

SEQ ID NO: 449000 - DNA, 25 bp, Homo sapien
ttgtggcccgtgaggtaagcatttc

SEQ ID NO: 449001 - DNA, 25 bp, Homo sapien
cacttttgttaagttgaggaatcct

SEQ ID NO: 449002 - DNA, 25 bp, Homo sapien
tcaggtctggttctaacccaacgaa

SEQ ID NO: 449003 - DNA, 25 bp, Homo sapien
tgttaagttgaggaatcctcaatgg

SEQ ID NO: 449004 - DNA, 25 bp, Homo sapien
tgggaggatggcaatcccggaagac

SEQ ID NO: 449005 - DNA, 25 bp, Homo sapien
ctgccaagccgtctggttgggatag

SEQ ID NO: 449006 - DNA, 25 bp, Homo sapien
ctggttgggataggtaggacaggtg

SEQ ID NO: 449007 - DNA, 25 bp, Homo sapien
tgggataggtaggacaggtggtgtg

SEQ ID NO: 449008 - DNA, 25 bp, Homo sapien
gggcaccaagagccttctcccaata

SEQ ID NO: 449009 - DNA, 25 bp, Homo sapien
gtcactctgtacagtccacacataa

SEQ ID NO: 449010 - DNA, 25 bp, Homo sapien
ccatgtctttaagggtggaatatct

SEQ ID NO: 449011 - DNA, 25 bp, Homo sapien
tgttgggagctctttcacttggctt

SEQ ID NO: 449012 - DNA, 25 bp, Homo sapien
tgcataggagatttctctcttctct

SEQ ID NO: 449013 - DNA, 25 bp, Homo sapien
ccgcttggcgctggcgttagcgtcc

SEQ ID NO: 449014 - DNA, 25 bp, Homo sapien
ggagatcttagggtcttcattttga

SEQ ID NO: 449015 - DNA, 25 bp, Homo sapien
gctttctgctcatctcctcgaagga

SEQ ID NO: 449016 - DNA, 25 bp, Homo sapien
tggcgttagcgtccgcagctctgcg

SEQ ID NO: 449017 - DNA, 25 bp, Homo sapien
atggtgtggggccggaacagcacag

SEQ ID NO: 449018 - DNA, 25 bp, Homo sapien
cggaacagcacagggagtgtcggca

SEQ ID NO: 449019 - DNA, 25 bp, Homo sapien
aagacgaccttgttttccagatggt

SEQ ID NO: 449020 - DNA, 25 bp, Homo sapien
gtaagacgaccttgttttccagatg

SEQ ID NO: 449021 - DNA, 25 bp, Homo sapien
tcaaactcgggagggagattagccc

SEQ ID NO: 449022 - DNA, 25 bp, Homo sapien
ccgaagatatcgtgtgctggcatga

SEQ ID NO: 449023 - DNA, 25 bp, Homo sapien
tgcaatagggctaaggccttcatgg

SEQ ID NO: 449024 - DNA, 25 bp, Homo sapien
catctgggtggacccgatgtcaggc

SEQ ID NO: 449025 - DNA, 25 bp, Homo sapien
tcctgtcattgccagtggaaatgcc

SEQ ID NO: 449026 - DNA, 25 bp, Homo sapien
gatgtgtggtgtttggcccgattcc

SEQ ID NO: 449027 - DNA, 25 bp, Homo sapien
gagggaaaatactctgcttgtcaga

SEQ ID NO: 449028 - DNA, 25 bp, Homo sapien
tctgactcatcctagcaagtggcta

SEQ ID NO: 449029 - DNA, 25 bp, Homo sapien
tcatacacagtcaagcgtcgcttaa

SEQ ID NO: 449030 - DNA, 25 bp, Homo sapien
aatggtacagcctgtggctcctagg

SEQ ID NO: 449031 - DNA, 25 bp, Homo sapien
tggacatcgtagagtgcacttggac

SEQ ID NO: 449032 - DNA, 25 bp, Homo sapien
caattctgttgttacgtggacatcg

SEQ ID NO: 449033 - DNA, 25 bp, Homo sapien
tttcttaaagctgcgaaagagaagc

SEQ ID NO: 449034 - DNA, 25 bp, Homo sapien
gagcataagctagacccagttgttg

SEQ ID NO: 449035 - DNA, 25 bp, Homo sapien
agatctttgagggagcataagctag

SEQ ID NO: 449036 - DNA, 25 bp, Homo sapien
gcaactcctcttgcaagatctttga

SEQ ID NO: 449037 - DNA, 25 bp, Homo sapien
ttgccagcacaaggatcaatccctg

SEQ ID NO: 449038 - DNA, 25 bp, Homo sapien
tctggaaaccggcttatttgatccg

SEQ ID NO: 449039 - DNA, 25 bp, Homo sapien
tgcataagtgagttggacagcctgg

SEQ ID NO: 449040 - DNA, 25 bp, Homo sapien
cgtttgagcgaaaggcagatctgga

SEQ ID NO: 449041 - DNA, 25 bp, Homo sapien
gcatctccaccatatgcaccagtca

SEQ ID NO: 449042 - DNA, 25 bp, Homo sapien
catatgcaccagtcacactccattc

SEQ ID NO: 449043 - DNA, 25 bp, Homo sapien
tgcaccagtcacactccattccctt

SEQ ID NO: 449044 - DNA, 25 bp, Homo sapien
tccaccatatgcaccagtcacactc

SEQ ID NO: 449045 - DNA, 25 bp, Homo sapien
cttaggtaatagtaggccttgggat

SEQ ID NO: 449046 - DNA, 25 bp, Homo sapien
cgtagtggggcttctgacagcatct

SEQ ID NO: 449047 - DNA, 25 bp, Homo sapien
gatgtttccgtagtggggcttctga

SEQ ID NO: 449048 - DNA, 25 bp, Homo sapien
taggtaatagtaggccttgggatgt

SEQ ID NO: 449049 - DNA, 25 bp, Homo sapien
aactctgtactgagaaggcattcac

SEQ ID NO: 449050 - DNA, 25 bp, Homo sapien
gagggaactctgtactgagaaggca

SEQ ID NO: 449051 - DNA, 25 bp, Homo sapien
gggaactctgtactgagaaggcatt

SEQ ID NO: 449052 - DNA, 25 bp, Homo sapien
gaggagggaactctgtactgagaag

SEQ ID NO: 449053 - DNA, 25 bp, Homo sapien
ctagagagcttttgaagccaacggg

SEQ ID NO: 449054 - DNA, 25 bp, Homo sapien
ctgttcaagtgcttggctttggtga

SEQ ID NO: 449055 - DNA, 25 bp, Homo sapien
cagacgtgaagtggagccgtaggcc

SEQ ID NO: 449056 - DNA, 25 bp, Homo sapien
ccttgggaggaagctatggagtgtc

SEQ ID NO: 449057 - DNA, 25 bp, Homo sapien
tgatctgtgaatcggccacactgga

SEQ ID NO: 449058 - DNA, 25 bp, Homo sapien
tagaatcaggatgtgtacctaggct

SEQ ID NO: 449059 - DNA, 25 bp, Homo sapien
gcccttgatgtgaccagagctgata

SEQ ID NO: 449060 - DNA, 25 bp, Homo sapien
tggacagttatctaggcccttgatg

SEQ ID NO: 449061 - DNA, 25 bp, Homo sapien
gggtatgtaactgaacttggtgcca

SEQ ID NO: 449062 - DNA, 25 bp, Homo sapien
taagcacagcctcccgggtatgtaa

SEQ ID NO: 449063 - DNA, 25 bp, Homo sapien
tcaagtcatgtggaaagcccaaagt

SEQ ID NO: 449064 - DNA, 25 bp, Homo sapien
gaatccttggtagctctctgagaac

SEQ ID NO: 449065 - DNA, 25 bp, Homo sapien
ttgcatattcaacgtttcaggccct

SEQ ID NO: 449066 - DNA, 25 bp, Homo sapien
aactggtttgtacactttgggatgc

SEQ ID NO: 449067 - DNA, 25 bp, Homo sapien
tgcgtactgcatagcatcaagtctt

SEQ ID NO: 449068 - DNA, 25 bp, Homo sapien
tgcttctactgaactatgcgtactg

SEQ ID NO: 449069 - DNA, 25 bp, Homo sapien
tgctgctgtagataaggactgtgcc

SEQ ID NO: 449070 - DNA, 25 bp, Homo sapien
tggacctgttcacgttgccacagaa

SEQ ID NO: 449071 - DNA, 25 bp, Homo sapien
ttttctgcggaactgacggatcaca

SEQ ID NO: 449072 - DNA, 25 bp, Homo sapien
tcctgtacaggatgtttgcccaatg

SEQ ID NO: 449073 - DNA, 25 bp, Homo sapien
gatgctcaatccagagggtggcaag

SEQ ID NO: 449074 - DNA, 25 bp, Homo sapien
gatgtgcattctatggtgtacccgc

SEQ ID NO: 449075 - DNA, 25 bp, Homo sapien
taactggagtacatttcgccctcga

SEQ ID NO: 449076 - DNA, 25 bp, Homo sapien
taaatttgctaagagccgaagccga

SEQ ID NO: 449077 - DNA, 25 bp, Homo sapien
agctgagccttgcatccagttggca

SEQ ID NO: 449078 - DNA, 25 bp, Homo sapien
tgctgaaacttggagagaccacctc

SEQ ID NO: 449079 - DNA, 25 bp, Homo sapien
ccagaagctataagacaaggccctt

SEQ ID NO: 449080 - DNA, 25 bp, Homo sapien
aacaaggtgtagtggctgtgtgccc

SEQ ID NO: 449081 - DNA, 25 bp, Homo sapien
tgtgtggaacaatccatggttacat

SEQ ID NO: 449082 - DNA, 25 bp, Homo sapien
gtattttgttgcagctttatccatg

SEQ ID NO: 449083 - DNA, 25 bp, Homo sapien
ccagggtactgactaatgcatgagt

SEQ ID NO: 449084 - DNA, 25 bp, Homo sapien
gtgcatccaccagggtactgactaa

SEQ ID NO: 449085 - DNA, 25 bp, Homo sapien
cttagggatggacttaagaaatttg

SEQ ID NO: 449086 - DNA, 25 bp, Homo sapien
aagaaatttggacccagtacagcca

SEQ ID NO: 449087 - DNA, 25 bp, Homo sapien
tttggacccagtacagccagcatgc

SEQ ID NO: 449088 - DNA, 25 bp, Homo sapien
tgttaggtaaagctccatgaactgt

SEQ ID NO: 449089 - DNA, 25 bp, Homo sapien
gctttcatctcatgaaagcgcattc

SEQ ID NO: 449090 - DNA, 25 bp, Homo sapien
aattatttccgcagaagctttcatc

SEQ ID NO: 449091 - DNA, 25 bp, Homo sapien
tcatctcatgaaagcgcattccact

SEQ ID NO: 449092 - DNA, 25 bp, Homo sapien
gaatcaattatttccgcagaagctt

SEQ ID NO: 449093 - DNA, 25 bp, Homo sapien
catctggacatcttgtcgtttagct

SEQ ID NO: 449094 - DNA, 25 bp, Homo sapien
tgtcgtttagcttttgtatacaacc

SEQ ID NO: 449095 - DNA, 25 bp, Homo sapien
tttcatccatctggacatcttgtcg

SEQ ID NO: 449096 - DNA, 25 bp, Homo sapien
gacatcttgtcgtttagcttttgta

SEQ ID NO: 449097 - DNA, 25 bp, Homo sapien
caggctgctgaacagcttcacaagg

SEQ ID NO: 449098 - DNA, 25 bp, Homo sapien
aacagcttcacaagggggtgcctct

SEQ ID NO: 449099 - DNA, 25 bp, Homo sapien
agtaggtgttcttgatgggattggg

SEQ ID NO: 449100 - DNA, 25 bp, Homo sapien
ctctgttgcctgtgaggagtaggtg

SEQ ID NO: 449101 - DNA, 25 bp, Homo sapien
cagtcttgtgcaggtaaaaggttta

SEQ ID NO: 449102 - DNA, 25 bp, Homo sapien
ttttcctcgtttgcctgagccacgg

SEQ ID NO: 449103 - DNA, 25 bp, Homo sapien
cccttgtgctgactttgcatgtcag

SEQ ID NO: 449104 - DNA, 25 bp, Homo sapien
gtaacttccgtacccatcagagagg

SEQ ID NO: 449105 - DNA, 25 bp, Homo sapien
accaactttgactgaagtgcactgc

SEQ ID NO: 449106 - DNA, 25 bp, Homo sapien
cctatgagctactttctgcctagac

SEQ ID NO: 449107 - DNA, 25 bp, Homo sapien
tcagctgctcaaaattcaattgcac

SEQ ID NO: 449108 - DNA, 25 bp, Homo sapien
gctggcctgcccagtaagtatggca

SEQ ID NO: 449109 - DNA, 25 bp, Homo sapien
tgctgtctgtcctttccatcatccc

SEQ ID NO: 449110 - DNA, 25 bp, Homo sapien
ccatcatccctcttgggcgccctac

SEQ ID NO: 449111 - DNA, 25 bp, Homo sapien
tttccatcatccctcttgggcgccc

SEQ ID NO: 449112 - DNA, 25 bp, Homo sapien
tgtcctttccatcatccctcttggg

SEQ ID NO: 449113 - DNA, 25 bp, Homo sapien
catgtttgggaggaatgtagtaatc

SEQ ID NO: 449114 - DNA, 25 bp, Homo sapien
tggagatattcagaacatgtttggg

SEQ ID NO: 449115 - DNA, 25 bp, Homo sapien
tcaagacaaggttaacctgatgctg

SEQ ID NO: 449116 - DNA, 25 bp, Homo sapien
gatgctgtagttctggttgtgttcc

SEQ ID NO: 449117 - DNA, 25 bp, Homo sapien
tacagtggtaagaacttttctttgc

SEQ ID NO: 449118 - DNA, 25 bp, Homo sapien
gcacagtctacagtggtaagaactt

SEQ ID NO: 449119 - DNA, 25 bp, Homo sapien
attttaccatagttgaagtgtgaac

SEQ ID NO: 449120 - DNA, 25 bp, Homo sapien
tttaaagcacagtctacagtggtaa

SEQ ID NO: 449121 - DNA, 25 bp, Homo sapien
gtgatcaggtgggtctttttgttca

SEQ ID NO: 449122 - DNA, 25 bp, Homo sapien
catagaagtgatcaggtgggtcttt

SEQ ID NO: 449123 - DNA, 25 bp, Homo sapien
gaagtgatcaggtgggtctttttgt

SEQ ID NO: 449124 - DNA, 25 bp, Homo sapien
ccagaagagcatagaagtgatcagg

SEQ ID NO: 449125 - DNA, 25 bp, Homo sapien
tgtagttgaattacataggtgattc

SEQ ID NO: 449126 - DNA, 25 bp, Homo sapien
aatgtgtgtagttgaattacatagg

SEQ ID NO: 449127 - DNA, 25 bp, Homo sapien
tctgtcagaaatgtgtgtagttgaa

SEQ ID NO: 449128 - DNA, 25 bp, Homo sapien
ctgataaaaaagggccttgggctct

SEQ ID NO: 449129 - DNA, 25 bp, Homo sapien
ggtgggctgtcctttacaggtcctg

SEQ ID NO: 449130 - DNA, 25 bp, Homo sapien
taccattttggcacaggaccttgtt

SEQ ID NO: 449131 - DNA, 25 bp, Homo sapien
ggctccaaccttgactcagcattgc

SEQ ID NO: 449132 - DNA, 25 bp, Homo sapien
gaagccatgactaagggcctccagg

SEQ ID NO: 449133 - DNA, 25 bp, Homo sapien
catctgaaaggcccatctttccagc

SEQ ID NO: 449134 - DNA, 25 bp, Homo sapien
atctgaaaggcccatctttccagct

SEQ ID NO: 449135 - DNA, 25 bp, Homo sapien
aggaggggcactccctccctttgag

SEQ ID NO: 449136 - DNA, 25 bp, Homo sapien
acttgggtcactacactggtctttt

SEQ ID NO: 449137 - DNA, 25 bp, Homo sapien
tgggtcactacactggtcttttcat

SEQ ID NO: 449138 - DNA, 25 bp, Homo sapien
tcttttcatcggcttgctgcctcca

SEQ ID NO: 449139 - DNA, 25 bp, Homo sapien
actggtcttttcatcggcttgctgc

SEQ ID NO: 449140 - DNA, 25 bp, Homo sapien
tagcccagactcatgtttccaaaca

SEQ ID NO: 449141 - DNA, 25 bp, Homo sapien
tttcgacagaccagtcatagcccag

SEQ ID NO: 449142 - DNA, 25 bp, Homo sapien
tgaatgcccagtttattggattgcc

SEQ ID NO: 449143 - DNA, 25 bp, Homo sapien
tgcttgaggaaagacccctgttgat

SEQ ID NO: 449144 - DNA, 25 bp, Homo sapien
actgtagtctgatgaaagggaagat

SEQ ID NO: 449145 - DNA, 25 bp, Homo sapien
tactgtagtctgatgaaagggaaga

SEQ ID NO: 449146 - DNA, 25 bp, Homo sapien
ttactgtagtctgatgaaagggaag

SEQ ID NO: 449147 - DNA, 25 bp, Homo sapien
tgtagtctgatgaaagggaagatgg

SEQ ID NO: 449148 - DNA, 25 bp, Homo sapien
tcaaagactgggctttaatgaacaa

SEQ ID NO: 449149 - DNA, 25 bp, Homo sapien
caaagactgggctttaatgaacaaa

SEQ ID NO: 449150 - DNA, 25 bp, Homo sapien
aaaagccttggagatgacacttcaa

SEQ ID NO: 449151 - DNA, 25 bp, Homo sapien
caggaaaagccttggagatgacact

SEQ ID NO: 449152 - DNA, 25 bp, Homo sapien
gatgacacttcaatttgtagacaat

SEQ ID NO: 449153 - DNA, 25 bp, Homo sapien
gccttggagatgacacttcaatttg

SEQ ID NO: 449154 - DNA, 25 bp, Homo sapien
attcttctccacatgcgtttggccc

SEQ ID NO: 449155 - DNA, 25 bp, Homo sapien
ctgtgagtttaccaatgggcttctc

SEQ ID NO: 449156 - DNA, 25 bp, Homo sapien
tgttcattagatgagcatcgtctca

SEQ ID NO: 449157 - DNA, 25 bp, Homo sapien
gagtttaccaatgggcttctcattc

SEQ ID NO: 449158 - DNA, 25 bp, Homo sapien
gaatacaatcccgttctgtggaaca

SEQ ID NO: 449159 - DNA, 25 bp, Homo sapien
gccaaatcatccaccagaatacaat

SEQ ID NO: 449160 - DNA, 25 bp, Homo sapien
ataacaattattgtcctctctgccc

SEQ ID NO: 449161 - DNA, 25 bp, Homo sapien
tcatcactcggcttagccaaatcat

SEQ ID NO: 449162 - DNA, 25 bp, Homo sapien
gataaggtttcgtcaccaccaccat

SEQ ID NO: 449163 - DNA, 25 bp, Homo sapien
caaatgattacggtcttgagataag

SEQ ID NO: 449164 - DNA, 25 bp, Homo sapien
tgctagttgtttgttgaccccatct

SEQ ID NO: 449165 - DNA, 25 bp, Homo sapien
gataatcttcatcgagttctcaggc

SEQ ID NO: 449166 - DNA, 25 bp, Homo sapien
gggacttctgagtctctgtaatttg

SEQ ID NO: 449167 - DNA, 25 bp, Homo sapien
tttctctggggacttctgagtctct

SEQ ID NO: 449168 - DNA, 25 bp, Homo sapien
ctatgctagaagagaatattcattt

SEQ ID NO: 449169 - DNA, 25 bp, Homo sapien
aatattcatttgaactttctctggg

SEQ ID NO: 449170 - DNA, 25 bp, Homo sapien
aatctccatgaatttcagatcctct

SEQ ID NO: 449171 - DNA, 25 bp, Homo sapien
taatctccatgaatttcagatcctc

SEQ ID NO: 449172 - DNA, 25 bp, Homo sapien
ataatctccatgaatttcagatcct

SEQ ID NO: 449173 - DNA, 25 bp, Homo sapien
agtgcgtgaagcactagctctggga

SEQ ID NO: 449174 - DNA, 25 bp, Homo sapien
gggaatgccagctgatcccccagtt

SEQ ID NO: 449175 - DNA, 25 bp, Homo sapien
tagctgccacccgactggtttgtgt

SEQ ID NO: 449176 - DNA, 25 bp, Homo sapien
gccacccgactggtttgtgtgacta

SEQ ID NO: 449177 - DNA, 25 bp, Homo sapien
tgaattggtgaacagcttcggctac

SEQ ID NO: 449178 - DNA, 25 bp, Homo sapien
gaacagcttcggctacttatagtag

SEQ ID NO: 449179 - DNA, 25 bp, Homo sapien
gacttgagttatacctctcctcctg

SEQ ID NO: 449180 - DNA, 25 bp, Homo sapien
cttatagtagatcttattggcccta

SEQ ID NO: 449181 - DNA, 25 bp, Homo sapien
tggatgagttctgtttgcaatactg

SEQ ID NO: 449182 - DNA, 25 bp, Homo sapien
gatgagttctgtttgcaatactgtc

SEQ ID NO: 449183 - DNA, 25 bp, Homo sapien
tgagttctgtttgcaatactgtcct

SEQ ID NO: 449184 - DNA, 25 bp, Homo sapien
tctggatgagttctgtttgcaatac

SEQ ID NO: 449185 - DNA, 25 bp, Homo sapien
tgactgtatgttctgttagccctac

SEQ ID NO: 449186 - DNA, 25 bp, Homo sapien
tagtgactgtatgttctgttagccc

SEQ ID NO: 449187 - DNA, 25 bp, Homo sapien
ttgaatagtgactgtatgttctgtt

SEQ ID NO: 449188 - DNA, 25 bp, Homo sapien
gaatagtgactgtatgttctgttag

SEQ ID NO: 449189 - DNA, 25 bp, Homo sapien
aacgagaaatgattcggcagaagcc

SEQ ID NO: 449190 - DNA, 25 bp, Homo sapien
aaacgagaaatgattcggcagaagc

SEQ ID NO: 449191 - DNA, 25 bp, Homo sapien
ctaaacgagaaatgattcggcagaa

SEQ ID NO: 449192 - DNA, 25 bp, Homo sapien
cgagaaatgattcggcagaagcccc

SEQ ID NO: 449193 - DNA, 25 bp, Homo sapien
tctcagaaatcctaggaagaattat

SEQ ID NO: 449194 - DNA, 25 bp, Homo sapien
ttctctctagtggttgaaccctccc

SEQ ID NO: 449195 - DNA, 25 bp, Homo sapien
tgacttggagaaccagagcttctct

SEQ ID NO: 449196 - DNA, 25 bp, Homo sapien
acttggagaaccagagcttctctct

SEQ ID NO: 449197 - DNA, 25 bp, Homo sapien
ctgacttggagaaccagagcttctc

SEQ ID NO: 449198 - DNA, 25 bp, Homo sapien
tcaatgcatctctggtaaatgctga

SEQ ID NO: 449199 - DNA, 25 bp, Homo sapien
caatgcatctctggtaaatgctgac

SEQ ID NO: 449200 - DNA, 25 bp, Homo sapien
ggaaagattgtcagtctgctctttg

SEQ ID NO: 449201 - DNA, 25 bp, Homo sapien
aaagattgtcagtctgctctttggt

SEQ ID NO: 449202 - DNA, 25 bp, Homo sapien
ggtggaaagattgtcagtctgctct

SEQ ID NO: 449203 - DNA, 25 bp, Homo sapien
tgggtggaaagattgtcagtctgct

SEQ ID NO: 449204 - DNA, 25 bp, Homo sapien
ctatcaatactgttatgctctagcg

SEQ ID NO: 449205 - DNA, 25 bp, Homo sapien
ttgtttccagttatgtggtcactga

SEQ ID NO: 449206 - DNA, 25 bp, Homo sapien
atgtggtcactgatacaaacactac

SEQ ID NO: 449207 - DNA, 25 bp, Homo sapien
ttggaccctaaaacaggctgctgac

SEQ ID NO: 449208 - DNA, 25 bp, Homo sapien
tgctatgttggaccctaaaacaggc

SEQ ID NO: 449209 - DNA, 25 bp, Homo sapien
cattgtttgctatgttggaccctaa

SEQ ID NO: 449210 - DNA, 25 bp, Homo sapien
tacccattgtttgctatgttggacc

SEQ ID NO: 449211 - DNA, 25 bp, Homo sapien
agttttgtcaagaggcgtgtgaacc

SEQ ID NO: 449212 - DNA, 25 bp, Homo sapien
tccctgtgcttgaggagtggaccct

SEQ ID NO: 449213 - DNA, 25 bp, Homo sapien
tcactggatgagatagttggtcagc

SEQ ID NO: 449214 - DNA, 25 bp, Homo sapien
tggtcttggaatcggcctgtccctg

SEQ ID NO: 449215 - DNA, 25 bp, Homo sapien
catttagcagttgatgactacattt

SEQ ID NO: 449216 - DNA, 25 bp, Homo sapien
ttttaaacatttagcagttgatgac

SEQ ID NO: 449217 - DNA, 25 bp, Homo sapien
taaacatttagcagttgatgactac

SEQ ID NO: 449218 - DNA, 25 bp, Homo sapien
aacatttagcagttgatgactacat

SEQ ID NO: 449219 - DNA, 25 bp, Homo sapien
ggcagccgcgcaagagcagctcgtc

SEQ ID NO: 449220 - DNA, 25 bp, Homo sapien
tcctacgccgacctcatcaccaagg

SEQ ID NO: 449221 - DNA, 25 bp, Homo sapien
cgccgcaacgcgtggggcaacctgt

SEQ ID NO: 449222 - DNA, 25 bp, Homo sapien
gccgctgtcgcagcacccgccggtg

SEQ ID NO: 449223 - DNA, 25 bp, Homo sapien
gatcgacccggacttcgagccgctg

SEQ ID NO: 449224 - DNA, 25 bp, Homo sapien
gctgtcagcgccgacttcatgagca

SEQ ID NO: 449225 - DNA, 25 bp, Homo sapien
tggtggagatcgacccggacttcga

SEQ ID NO: 449226 - DNA, 25 bp, Homo sapien
caggccggagtttagccagtccaac

SEQ ID NO: 449227 - DNA, 25 bp, Homo sapien
ctctagatgccactttttccattgc

SEQ ID NO: 449228 - DNA, 25 bp, Homo sapien
ggccccactgatccttgacaggatg

SEQ ID NO: 449229 - DNA, 25 bp, Homo sapien
agatatttaaaaccctactgtccat

SEQ ID NO: 449230 - DNA, 25 bp, Homo sapien
cttccatcctaagtggtcccatctt

SEQ ID NO: 449231 - DNA, 25 bp, Homo sapien
tcaccaaggtgatctccgagtttac

SEQ ID NO: 449232 - DNA, 25 bp, Homo sapien
tagcttgatataacccttgtggagc

SEQ ID NO: 449233 - DNA, 25 bp, Homo sapien
tacgaatgggtatacctgctgaccc

SEQ ID NO: 449234 - DNA, 25 bp, Homo sapien
tgtgcctttcaaaactacgaatggg

SEQ ID NO: 449235 - DNA, 25 bp, Homo sapien
ggaggcagcagcatgagaatcattt

SEQ ID NO: 449236 - DNA, 25 bp, Homo sapien
atgagaatcatttgaggtaaggagc

SEQ ID NO: 449237 - DNA, 25 bp, Homo sapien
tgagaatcatttgaggtaaggagct

SEQ ID NO: 449238 - DNA, 25 bp, Homo sapien
agaactttgggaggcagcagcatga

SEQ ID NO: 449239 - DNA, 25 bp, Homo sapien
aaaaataatttttcatccaggcaca

SEQ ID NO: 449240 - DNA, 25 bp, Homo sapien
aaataatttttcatccaggcacagt

SEQ ID NO: 449241 - DNA, 25 bp, Homo sapien
ttcatccaggcacagtggctcatgc

SEQ ID NO: 449242 - DNA, 25 bp, Homo sapien
ttaaaaataatttttcatccaggca

SEQ ID NO: 449243 - DNA, 25 bp, Homo sapien
ttcagcctggtttactgaaagcaag

SEQ ID NO: 449244 - DNA, 25 bp, Homo sapien
agcaagaggtaatgagcctttgtgg

SEQ ID NO: 449245 - DNA, 25 bp, Homo sapien
aagcaagaggtaatgagcctttgtg

SEQ ID NO: 449246 - DNA, 25 bp, Homo sapien
ctaagggctgccagctgcctcgggc

SEQ ID NO: 449247 - DNA, 25 bp, Homo sapien
tgccagctgcctcgggcaggctctc

SEQ ID NO: 449248 - DNA, 25 bp, Homo sapien
ggctgccagctgcctcgggcaggct

SEQ ID NO: 449249 - DNA, 25 bp, Homo sapien
agctgcctcgggcaggctctccaga

SEQ ID NO: 449250 - DNA, 25 bp, Homo sapien
gaggatatcctatgggagttagcca

SEQ ID NO: 449251 - DNA, 25 bp, Homo sapien
ccacatgagatagcgggaggatatc

SEQ ID NO: 449252 - DNA, 25 bp, Homo sapien
ggatctggtctaagcttaacttgaa

SEQ ID NO: 449253 - DNA, 25 bp, Homo sapien
gatcctatggctatccccacatgag

SEQ ID NO: 449254 - DNA, 25 bp, Homo sapien
cagtaatgtgagctgaaaggaatgc

SEQ ID NO: 449255 - DNA, 25 bp, Homo sapien
tggagcagctgcagtaatgtgagct

SEQ ID NO: 449256 - DNA, 25 bp, Homo sapien
gtatgtcgagagtgccaatttccaa

SEQ ID NO: 449257 - DNA, 25 bp, Homo sapien
tctcttcgtatggtgagggacctgt

SEQ ID NO: 449258 - DNA, 25 bp, Homo sapien
ctgcactggacacaagatgagatgg

SEQ ID NO: 449259 - DNA, 25 bp, Homo sapien
cactgcactggacacaagatgagat

SEQ ID NO: 449260 - DNA, 25 bp, Homo sapien
tcactgcactggacacaagatgaga

SEQ ID NO: 449261 - DNA, 25 bp, Homo sapien
tgcactggacacaagatgagatggt

SEQ ID NO: 449262 - DNA, 25 bp, Homo sapien
atacctaatgttaaaagatgcctgt

SEQ ID NO: 449263 - DNA, 25 bp, Homo sapien
tagaacaaaagatgcagacaagtca

SEQ ID NO: 449264 - DNA, 25 bp, Homo sapien
tccccaaattatgcaactgataaac

SEQ ID NO: 449265 - DNA, 25 bp, Homo sapien
aagatgcctgtataatgaacaataa

SEQ ID NO: 449266 - DNA, 25 bp, Homo sapien
cataagtttcaggagggttatcctt

SEQ ID NO: 449267 - DNA, 25 bp, Homo sapien
tgcacttaataagcaatccactcgc

SEQ ID NO: 449268 - DNA, 25 bp, Homo sapien
cctagattcattgtatgtgatctct

SEQ ID NO: 449269 - DNA, 25 bp, Homo sapien
ctccactgtcttatgttgttgagaa

SEQ ID NO: 449270 - DNA, 25 bp, Homo sapien
acttgggtgttccaaatcctcatgg

SEQ ID NO: 449271 - DNA, 25 bp, Homo sapien
tcctcatggttaaaaacctgattta

SEQ ID NO: 449272 - DNA, 25 bp, Homo sapien
ccaaatcctcatggttaaaaacctg

SEQ ID NO: 449273 - DNA, 25 bp, Homo sapien
gaaacttgggtgttccaaatcctca

SEQ ID NO: 449274 - DNA, 25 bp, Homo sapien
cagtaaatgtacgaacaacaaagcc

SEQ ID NO: 449275 - DNA, 25 bp, Homo sapien
gtctgttcgaactgaggagacttcc

SEQ ID NO: 449276 - DNA, 25 bp, Homo sapien
gcatgaaagttgaattaagcacagt

SEQ ID NO: 449277 - DNA, 25 bp, Homo sapien
aaagacttgttaggcattattaagg

SEQ ID NO: 449278 - DNA, 25 bp, Homo sapien
tcttggttcatttcgtgtctcggcg

SEQ ID NO: 449279 - DNA, 25 bp, Homo sapien
tatgctactcactgttcggcacgga

SEQ ID NO: 449280 - DNA, 25 bp, Homo sapien
tcggcgatgtttcctagagtctcga

SEQ ID NO: 449281 - DNA, 25 bp, Homo sapien
gcacggaacagtcaggtaccgcagt

SEQ ID NO: 449282 - DNA, 25 bp, Homo sapien
tttgggcactaaagaccttgtgaag

SEQ ID NO: 449283 - DNA, 25 bp, Homo sapien
taaagaccttgtgaaggaggtaatg

SEQ ID NO: 449284 - DNA, 25 bp, Homo sapien
tgaaggaggtaatgggctctaggag

SEQ ID NO: 449285 - DNA, 25 bp, Homo sapien
taatgggctctaggagactcatcca

SEQ ID NO: 449286 - DNA, 25 bp, Homo sapien
tctctgctccaggtaaccgtttgct

SEQ ID NO: 449287 - DNA, 25 bp, Homo sapien
gctgtacttggaattgcacgattca

SEQ ID NO: 449288 - DNA, 25 bp, Homo sapien
gaattgcacgattcagagatttcaa

SEQ ID NO: 449289 - DNA, 25 bp, Homo sapien
tgggtggcaagtgtgacgcaggtca

SEQ ID NO: 449290 - DNA, 25 bp, Homo sapien
ggccgtgcccgagccgagaccggga

SEQ ID NO: 449291 - DNA, 25 bp, Homo sapien
cccgcgaagctcaggagcgcccctg

SEQ ID NO: 449292 - DNA, 25 bp, Homo sapien
gcgaagctcaggagcgcccctgcgg

SEQ ID NO: 449293 - DNA, 25 bp, Homo sapien
cggccccgcgaagctcaggagcgcc

SEQ ID NO: 449294 - DNA, 25 bp, Homo sapien
cacttaacacccacgtcggcaacgg

SEQ ID NO: 449295 - DNA, 25 bp, Homo sapien
cacgtcggcaacggccggcccttcg

SEQ ID NO: 449296 - DNA, 25 bp, Homo sapien
gagagtcagtagatgaggctgcatt

SEQ ID NO: 449297 - DNA, 25 bp, Homo sapien
cagggaacacgaactgctgcgggaa

SEQ ID NO: 449298 - DNA, 25 bp, Homo sapien
actgctgcgggaagatcccagcttc

SEQ ID NO: 449299 - DNA, 25 bp, Homo sapien
tgcattttccaccagggaacacgaa

SEQ ID NO: 449300 - DNA, 25 bp, Homo sapien
tctctggagcttatgacaggcacca

SEQ ID NO: 449301 - DNA, 25 bp, Homo sapien
cactcttctgctggtcttgtggaag

SEQ ID NO: 449302 - DNA, 25 bp, Homo sapien
ttctgctggtcttgtggaaggcagc

SEQ ID NO: 449303 - DNA, 25 bp, Homo sapien
gagcttatgacaggcaccacatatc

SEQ ID NO: 449304 - DNA, 25 bp, Homo sapien
agcctggatagcaggattggatttc

SEQ ID NO: 449305 - DNA, 25 bp, Homo sapien
gtgaccatattcatgaccatactca

SEQ ID NO: 449306 - DNA, 25 bp, Homo sapien
gaggtgaccatattcatgaccatac

SEQ ID NO: 449307 - DNA, 25 bp, Homo sapien
gactgatgaggtgaccatattcatg

SEQ ID NO: 449308 - DNA, 25 bp, Homo sapien
gatgaggtgaccatattcatgacca

SEQ ID NO: 449309 - DNA, 25 bp, Homo sapien
gcccaagagcattcactcgctggtg

SEQ ID NO: 449310 - DNA, 25 bp, Homo sapien
gagactatatgtggctaaacaccct

SEQ ID NO: 449311 - DNA, 25 bp, Homo sapien
gcaccattctcagggtcagcgtcct

SEQ ID NO: 449312 - DNA, 25 bp, Homo sapien
ggcaggcagatgtttgcaccattct

SEQ ID NO: 449313 - DNA, 25 bp, Homo sapien
cagtgcagtgaatatgtaggagcct

SEQ ID NO: 449314 - DNA, 25 bp, Homo sapien
gagacagacatgtgttcaacagcgg

SEQ ID NO: 449315 - DNA, 25 bp, Homo sapien
gactatggctttgctgtgagatcct

SEQ ID NO: 449316 - DNA, 25 bp, Homo sapien
cagtaaacaatttagagcaggtcct

SEQ ID NO: 449317 - DNA, 25 bp, Homo sapien
tgactgctctagtacgaggctacag

SEQ ID NO: 449318 - DNA, 25 bp, Homo sapien
gctctagtacgaggctacagttcca

SEQ ID NO: 449319 - DNA, 25 bp, Homo sapien
caggacagatgactgctctagtacg

SEQ ID NO: 449320 - DNA, 25 bp, Homo sapien
cagatgactgctctagtacgaggct

SEQ ID NO: 449321 - DNA, 25 bp, Homo sapien
ctgcccggtcagtacacatgctgta

SEQ ID NO: 449322 - DNA, 25 bp, Homo sapien
ctgggagtaagtcttcaggcagcag

SEQ ID NO: 449323 - DNA, 25 bp, Homo sapien
tagtgctggactggtacccttgtag

SEQ ID NO: 449324 - DNA, 25 bp, Homo sapien
tctcagcgatgttggcgattagtgc

SEQ ID NO: 449325 - DNA, 25 bp, Homo sapien
gtacccttgtagaagccacggaagc

SEQ ID NO: 449326 - DNA, 25 bp, Homo sapien
actgagttctcagcgatgttggcga

SEQ ID NO: 449327 - DNA, 25 bp, Homo sapien
gccaccatgtcttgccagttttgtg

SEQ ID NO: 449328 - DNA, 25 bp, Homo sapien
atgtcttgccagttttgtggggttt

SEQ ID NO: 449329 - DNA, 25 bp, Homo sapien
aaaaaagtgtgtgtccttgactcac

SEQ ID NO: 449330 - DNA, 25 bp, Homo sapien
actctcagcctcaagccattttcct

SEQ ID NO: 449331 - DNA, 25 bp, Homo sapien
tccaatgctgttcagtccactcctt

SEQ ID NO: 449332 - DNA, 25 bp, Homo sapien
tctgttgtcttgcagccagcctgca

SEQ ID NO: 449333 - DNA, 25 bp, Homo sapien
tttatggggtgtggaaaccatccaa

SEQ ID NO: 449334 - DNA, 25 bp, Homo sapien
aaaccatccaatgctgttcagtcca

SEQ ID NO: 449335 - DNA, 25 bp, Homo sapien
tctggctcttggctatcttccctga

SEQ ID NO: 449336 - DNA, 25 bp, Homo sapien
tcacgagctccgtggggcagagcac

SEQ ID NO: 449337 - DNA, 25 bp, Homo sapien
aggaaccggcggctgcattctgcag

SEQ ID NO: 449338 - DNA, 25 bp, Homo sapien
gcagagcaccagtgcagcaaaggca

SEQ ID NO: 449339 - DNA, 25 bp, Homo sapien
gtctgactccccttcatgattgagg

SEQ ID NO: 449340 - DNA, 25 bp, Homo sapien
cagaacacaggacactctttgtctg

SEQ ID NO: 449341 - DNA, 25 bp, Homo sapien
gaatttcttctaagcagccctgctc

SEQ ID NO: 449342 - DNA, 25 bp, Homo sapien
cagggatgcgggagaatttcttcta

SEQ ID NO: 449343 - DNA, 25 bp, Homo sapien
tatcgctgtgattcctatttcctca

SEQ ID NO: 449344 - DNA, 25 bp, Homo sapien
ggaattatctaaactcagcaaacat

SEQ ID NO: 449345 - DNA, 25 bp, Homo sapien
gaaatttgttcaggtgtttacagga

SEQ ID NO: 449346 - DNA, 25 bp, Homo sapien
tgtattgcccagtcccttatcgctg

SEQ ID NO: 449347 - DNA, 25 bp, Homo sapien
ctaagaatacttttgatgacagacc

SEQ ID NO: 449348 - DNA, 25 bp, Homo sapien
atacttttgatgacagaccacactg

SEQ ID NO: 449349 - DNA, 25 bp, Homo sapien
aagaatacttttgatgacagaccac

SEQ ID NO: 449350 - DNA, 25 bp, Homo sapien
gaatacttttgatgacagaccacac

SEQ ID NO: 449351 - DNA, 25 bp, Homo sapien
tagccaccgaagaagaagaaatagc

SEQ ID NO: 449352 - DNA, 25 bp, Homo sapien
tagcctggtacttctcgaagtaaag

SEQ ID NO: 449353 - DNA, 25 bp, Homo sapien
taaagtgcttgagagtccatggtag

SEQ ID NO: 449354 - DNA, 25 bp, Homo sapien
atgcaaaaaaggaccggctcagttc

SEQ ID NO: 449355 - DNA, 25 bp, Homo sapien
caccaatgtggggaggagagcacaa

SEQ ID NO: 449356 - DNA, 25 bp, Homo sapien
agccaccaatgtggggaggagagca

SEQ ID NO: 449357 - DNA, 25 bp, Homo sapien
ccaccaatgtggggaggagagcaca

SEQ ID NO: 449358 - DNA, 25 bp, Homo sapien
ggagccaccaatgtggggaggagag

SEQ ID NO: 449359 - DNA, 25 bp, Homo sapien
tgggtataccgcaagccagaggcaa

SEQ ID NO: 449360 - DNA, 25 bp, Homo sapien
ggatttgatacaatccactgggtat

SEQ ID NO: 449361 - DNA, 25 bp, Homo sapien
caccacttaacatcaaaggtacagg

SEQ ID NO: 449362 - DNA, 25 bp, Homo sapien
ccagaggcaaatcccaccaactcca

SEQ ID NO: 449363 - DNA, 25 bp, Homo sapien
ggcccgtatctcagattttaagatg

SEQ ID NO: 449364 - DNA, 25 bp, Homo sapien
acgcccggcccgtatctcagatttt

SEQ ID NO: 449365 - DNA, 25 bp, Homo sapien
ccggcccgtatctcagattttaaga

SEQ ID NO: 449366 - DNA, 25 bp, Homo sapien
gcccggcccgtatctcagattttaa

SEQ ID NO: 449367 - DNA, 25 bp, Homo sapien
ctagcaaataaaagggcggtcaaag

SEQ ID NO: 449368 - DNA, 25 bp, Homo sapien
caaataaaagggcggtcaaagactg

SEQ ID NO: 449369 - DNA, 25 bp, Homo sapien
taaaagggcggtcaaagactgcaac

SEQ ID NO: 449370 - DNA, 25 bp, Homo sapien
aataaaagggcggtcaaagactgca

SEQ ID NO: 449371 - DNA, 25 bp, Homo sapien
tcagtccagaatataaggccgttat

SEQ ID NO: 449372 - DNA, 25 bp, Homo sapien
gagtgctccattggcagggaatgct

SEQ ID NO: 449373 - DNA, 25 bp, Homo sapien
caacttcctgctatattcgtaggcc

SEQ ID NO: 449374 - DNA, 25 bp, Homo sapien
ttcgtaggccaaaaagagtgctcca

SEQ ID NO: 449375 - DNA, 25 bp, Homo sapien
ccaagagcaagagcggtcacttttc

SEQ ID NO: 449376 - DNA, 25 bp, Homo sapien
ttttaccaagagcaagagcggtcac

SEQ ID NO: 449377 - DNA, 25 bp, Homo sapien
gagcaagagcggtcacttttctatt

SEQ ID NO: 449378 - DNA, 25 bp, Homo sapien
catgtacaagtggaggtttacgtaa

SEQ ID NO: 449379 - DNA, 25 bp, Homo sapien
aatcccagctactcaggaggctgag

SEQ ID NO: 449380 - DNA, 25 bp, Homo sapien
gtgagagaatcgcttgaacccagga

SEQ ID NO: 449381 - DNA, 25 bp, Homo sapien
gctggacatggtggcgcgtacctgt

SEQ ID NO: 449382 - DNA, 25 bp, Homo sapien
cccaggaggcggaggttgcagtgag

SEQ ID NO: 449383 - DNA, 25 bp, Homo sapien
tgtggaagccacaccagtatgcagg

SEQ ID NO: 449384 - DNA, 25 bp, Homo sapien
tatagtcagcgtggaatatgatccc

SEQ ID NO: 449385 - DNA, 25 bp, Homo sapien
gggccacccctagcaatatagtcag

SEQ ID NO: 449386 - DNA, 25 bp, Homo sapien
taagcgctgttgctagccacatggg

SEQ ID NO: 449387 - DNA, 25 bp, Homo sapien
taccatatggccaaagaacagctgt

SEQ ID NO: 449388 - DNA, 25 bp, Homo sapien
taaatctctaatggacggcctgtgg

SEQ ID NO: 449389 - DNA, 25 bp, Homo sapien
gacttctttccggacactgagcagg

SEQ ID NO: 449390 - DNA, 25 bp, Homo sapien
gatttactgccaacagggatgactg

SEQ ID NO: 449391 - DNA, 25 bp, Homo sapien
cagagtggcacagatgagagtagag

SEQ ID NO: 449392 - DNA, 25 bp, Homo sapien
agatgagagtagagccccgagccat

SEQ ID NO: 449393 - DNA, 25 bp, Homo sapien
tattcttattcgaatgattttcctt

SEQ ID NO: 449394 - DNA, 25 bp, Homo sapien
tcaggccatgattgtccttgaaaaa

SEQ ID NO: 449395 - DNA, 25 bp, Homo sapien
cttcattgccactgtatcttcaggc

SEQ ID NO: 449396 - DNA, 25 bp, Homo sapien
ttgccactgtatcttcaggccatga

SEQ ID NO: 449397 - DNA, 25 bp, Homo sapien
caccatgcccagcccgtgggtgtta

SEQ ID NO: 449398 - DNA, 25 bp, Homo sapien
ccatgcccagcccgtgggtgttact

SEQ ID NO: 449399 - DNA, 25 bp, Homo sapien
catgcccagcccgtgggtgttactt

SEQ ID NO: 449400 - DNA, 25 bp, Homo sapien
tgcccagcccgtgggtgttacttta

SEQ ID NO: 449401 - DNA, 25 bp, Homo sapien
atgctactgctcaaggtcctctcca

SEQ ID NO: 449402 - DNA, 25 bp, Homo sapien
ggtttcattcatacctagcctgact

SEQ ID NO: 449403 - DNA, 25 bp, Homo sapien
cctctccaaggtctgatcgtaaaaa

SEQ ID NO: 449404 - DNA, 25 bp, Homo sapien
ttaaaagaatcagcggctgggcggc

SEQ ID NO: 449405 - DNA, 25 bp, Homo sapien
cagtaggcactgatttaccaatgac

SEQ ID NO: 449406 - DNA, 25 bp, Homo sapien
gcaaaaaatcctcgagccaccattg

SEQ ID NO: 449407 - DNA, 25 bp, Homo sapien
cactgttgcagtatcctcaaggtcc

SEQ ID NO: 449408 - DNA, 25 bp, Homo sapien
gttgttcttgagacccactgttgca

SEQ ID NO: 449409 - DNA, 25 bp, Homo sapien
gagaggtggtcactgatatattcac

SEQ ID NO: 449410 - DNA, 25 bp, Homo sapien
gcaggtttcctacagggaggtccac

SEQ ID NO: 449411 - DNA, 25 bp, Homo sapien
ttaatgcaagcagccgtgagtgtct

SEQ ID NO: 449412 - DNA, 25 bp, Homo sapien
ttgggatgtaaggtgctatctgagc

SEQ ID NO: 449413 - DNA, 25 bp, Homo sapien
gcttataccactgggcgtgatggtg

SEQ ID NO: 449414 - DNA, 25 bp, Homo sapien
tatggacataaccttcagaagagtg

SEQ ID NO: 449415 - DNA, 25 bp, Homo sapien
gaaaagcacagggattatggacata

SEQ ID NO: 449416 - DNA, 25 bp, Homo sapien
tgccaggattagctgtgtgagccat

SEQ ID NO: 449417 - DNA, 25 bp, Homo sapien
ggaaactcatcgtgggacttattct

SEQ ID NO: 449418 - DNA, 25 bp, Homo sapien
tgttgcgggacaatcaaagatggga

SEQ ID NO: 449419 - DNA, 25 bp, Homo sapien
tcttgcaggaagacctaggtagtga

SEQ ID NO: 449420 - DNA, 25 bp, Homo sapien
caggaagcacacttagagaagcaag

SEQ ID NO: 449421 - DNA, 25 bp, Homo sapien
tctccctgtgactgttagtatgagg

SEQ ID NO: 449422 - DNA, 25 bp, Homo sapien
aagatggccatctgcctgcaagtag

SEQ ID NO: 449423 - DNA, 25 bp, Homo sapien
aagaggcaggctatctattgcccca

SEQ ID NO: 449424 - DNA, 25 bp, Homo sapien
aagtagagataagctgcattctccg

SEQ ID NO: 449425 - DNA, 25 bp, Homo sapien
tacccctctatgcagtgtcttttca

SEQ ID NO: 449426 - DNA, 25 bp, Homo sapien
tgctccagttaggccactccctgtg

SEQ ID NO: 449427 - DNA, 25 bp, Homo sapien
tcacaccccagtgctccagttaggc

SEQ ID NO: 449428 - DNA, 25 bp, Homo sapien
tcaagtcaagtcctggacttgaggc

SEQ ID NO: 449429 - DNA, 25 bp, Homo sapien
tgcctttggctttataaaggcctct

SEQ ID NO: 449430 - DNA, 25 bp, Homo sapien
gaagcggaggtcagcttgtctcagc

SEQ ID NO: 449431 - DNA, 25 bp, Homo sapien
aaggcctctttgttcatgctgcaca

SEQ ID NO: 449432 - DNA, 25 bp, Homo sapien
acaggttgttactaagagctttgcc

SEQ ID NO: 449433 - DNA, 25 bp, Homo sapien
ggcgcttggccagtactccttcttt

SEQ ID NO: 449434 - DNA, 25 bp, Homo sapien
taggatcaggttggtctgtgtcatg

SEQ ID NO: 449435 - DNA, 25 bp, Homo sapien
tatacaaagtcatgtagcatactgt

SEQ ID NO: 449436 - DNA, 25 bp, Homo sapien
aggaagtgcaaagtgaagtagtttt

SEQ ID NO: 449437 - DNA, 25 bp, Homo sapien
cagataatatttaactatcactcaa

SEQ ID NO: 449438 - DNA, 25 bp, Homo sapien
tacaatagaattaatattcagataa

SEQ ID NO: 449439 - DNA, 25 bp, Homo sapien
attcagataatatttaactatcact

SEQ ID NO: 449440 - DNA, 25 bp, Homo sapien
caatagaattaatattcagataata

SEQ ID NO: 449441 - DNA, 25 bp, Homo sapien
catgagtatacatccatattgtgtg

SEQ ID NO: 449442 - DNA, 25 bp, Homo sapien
aatcatatagtaggtggttcgttca

SEQ ID NO: 449443 - DNA, 25 bp, Homo sapien
ggttcgttcaatgtaggcagtctgt

SEQ ID NO: 449444 - DNA, 25 bp, Homo sapien
tactgtcctgctgactcctgttttc

SEQ ID NO: 449445 - DNA, 25 bp, Homo sapien
caaaggcgctcattgctatgggtta

SEQ ID NO: 449446 - DNA, 25 bp, Homo sapien
tgtaggtgtgcagtgaagacaaact

SEQ ID NO: 449447 - DNA, 25 bp, Homo sapien
taaaagtgtcggtatgaagtcagtc

SEQ ID NO: 449448 - DNA, 25 bp, Homo sapien
tagctaacctagagatcactgcttg

SEQ ID NO: 449449 - DNA, 25 bp, Homo sapien
acattgactacgaggaatggcggcg

SEQ ID NO: 449450 - DNA, 25 bp, Homo sapien
gcgtggctgctcgttggctgcttaa

SEQ ID NO: 449451 - DNA, 25 bp, Homo sapien
gctccggcggcagcaacattgacta

SEQ ID NO: 449452 - DNA, 25 bp, Homo sapien
tgagcgcgatagtagcagctccggc

SEQ ID NO: 449453 - DNA, 25 bp, Homo sapien
gtgcacatgtcttgcatatctcttg

SEQ ID NO: 449454 - DNA, 25 bp, Homo sapien
ttatagtttccagtgcacatgtctt

SEQ ID NO: 449455 - DNA, 25 bp, Homo sapien
tccagtgcacatgtcttgcatatct

SEQ ID NO: 449456 - DNA, 25 bp, Homo sapien
ctcggcctcccgagtcttctttaat

SEQ ID NO: 449457 - DNA, 25 bp, Homo sapien
gccactgtgctttgcggtccattag

SEQ ID NO: 449458 - DNA, 25 bp, Homo sapien
gaatactgctattttgagagagtca

SEQ ID NO: 449459 - DNA, 25 bp, Homo sapien
gaaagcaacttgagccttgggctaa

SEQ ID NO: 449460 - DNA, 25 bp, Homo sapien
catctgttatgggtaagatctgcca

SEQ ID NO: 449461 - DNA, 25 bp, Homo sapien
tgaaacaaaacgaactgctggaacc

SEQ ID NO: 449462 - DNA, 25 bp, Homo sapien
cagccttatgtgatggtagtgtcca

SEQ ID NO: 449463 - DNA, 25 bp, Homo sapien
acactgagaaaacggagcagcagcc

SEQ ID NO: 449464 - DNA, 25 bp, Homo sapien
ccaatggatttacttctcaggtagc

SEQ ID NO: 449465 - DNA, 25 bp, Homo sapien
cagccagaccttacacaaatcaagc

SEQ ID NO: 449466 - DNA, 25 bp, Homo sapien
agccagaccttacacaaatcaagca

SEQ ID NO: 449467 - DNA, 25 bp, Homo sapien
gccagaccttacacaaatcaagcaa

SEQ ID NO: 449468 - DNA, 25 bp, Homo sapien
gcctgatacgtgaatcttcttggaa

SEQ ID NO: 449469 - DNA, 25 bp, Homo sapien
gctttattatggctgctgttgtcca

SEQ ID NO: 449470 - DNA, 25 bp, Homo sapien
tctcatgtggatctaaggggaatgc

SEQ ID NO: 449471 - DNA, 25 bp, Homo sapien
attttgctgcctgatacgtgaatct

SEQ ID NO: 449472 - DNA, 25 bp, Homo sapien
tcctgatcagtgtttcatgtagctt

SEQ ID NO: 449473 - DNA, 25 bp, Homo sapien
agatttactggtatattcagtgttt

SEQ ID NO: 449474 - DNA, 25 bp, Homo sapien
gatttactggtatattcagtgtttc

SEQ ID NO: 449475 - DNA, 25 bp, Homo sapien
cagatttactggtatattcagtgtt

SEQ ID NO: 449476 - DNA, 25 bp, Homo sapien
aattcggtgcgaaatcgtccacagt

SEQ ID NO: 449477 - DNA, 25 bp, Homo sapien
gtgcgaaatcgtccacagtgtggcc

SEQ ID NO: 449478 - DNA, 25 bp, Homo sapien
tcggtgcgaaatcgtccacagtgtg

SEQ ID NO: 449479 - DNA, 25 bp, Homo sapien
tcaattcggtgcgaaatcgtccaca

SEQ ID NO: 449480 - DNA, 25 bp, Homo sapien
gtttagtgaacttacagatctgcat

SEQ ID NO: 449481 - DNA, 25 bp, Homo sapien
tggattttatctgtttagtgaactt

SEQ ID NO: 449482 - DNA, 25 bp, Homo sapien
ctgtttagtgaacttacagatctgc

SEQ ID NO: 449483 - DNA, 25 bp, Homo sapien
taattcacacttatttttccactga

SEQ ID NO: 449484 - DNA, 25 bp, Homo sapien
cagcaggcagaaagttggttcacaa

SEQ ID NO: 449485 - DNA, 25 bp, Homo sapien
tttgtaagataccaggacgaaggct

SEQ ID NO: 449486 - DNA, 25 bp, Homo sapien
tgtgctctcaactatgcctctggta

SEQ ID NO: 449487 - DNA, 25 bp, Homo sapien
taataagtattcacccagaggccag

SEQ ID NO: 449488 - DNA, 25 bp, Homo sapien
ccagggaacaagtgaatctcccgtg

SEQ ID NO: 449489 - DNA, 25 bp, Homo sapien
gaatctcccgtgactgctcagcgga

SEQ ID NO: 449490 - DNA, 25 bp, Homo sapien
gaacaagtgaatctcccgtgactgc

SEQ ID NO: 449491 - DNA, 25 bp, Homo sapien
cgtgactgctcagcggaccttgttt

SEQ ID NO: 449492 - DNA, 25 bp, Homo sapien
ctgtttagtatggtgcttgaatgtt

SEQ ID NO: 449493 - DNA, 25 bp, Homo sapien
taaggtgtcccagcgcatgaattgg

SEQ ID NO: 449494 - DNA, 25 bp, Homo sapien
tgaaatagaaaggaagggtacagcc

SEQ ID NO: 449495 - DNA, 25 bp, Homo sapien
tagaaaggaagggtacagccacagg

SEQ ID NO: 449496 - DNA, 25 bp, Homo sapien
aaagagaatgggataaggtgtccca

SEQ ID NO: 449497 - DNA, 25 bp, Homo sapien
tcaaacgtctgtgtttatcatcgat

SEQ ID NO: 449498 - DNA, 25 bp, Homo sapien
caaacgtctgtgtttatcatcgata

SEQ ID NO: 449499 - DNA, 25 bp, Homo sapien
gttcaaacgtctgtgtttatcatcg

SEQ ID NO: 449500 - DNA, 25 bp, Homo sapien
aaacgtctgtgtttatcatcgatac

SEQ ID NO: 449501 - DNA, 25 bp, Homo sapien
aggaagtagttgcatcatctctgta

SEQ ID NO: 449502 - DNA, 25 bp, Homo sapien
gatttatctttcgtgtagttgtgca

SEQ ID NO: 449503 - DNA, 25 bp, Homo sapien
aaaacacagatttatctttcgtgta

SEQ ID NO: 449504 - DNA, 25 bp, Homo sapien
cacagatttatctttcgtgtagttg

SEQ ID NO: 449505 - DNA, 25 bp, Homo sapien
tttgaccagcggagcaaccgggacc

SEQ ID NO: 449506 - DNA, 25 bp, Homo sapien
gagtcgctaggcttcgcctcaaact

SEQ ID NO: 449507 - DNA, 25 bp, Homo sapien
gtgaaactgcgggaccggcgctgcg

SEQ ID NO: 449508 - DNA, 25 bp, Homo sapien
caaactttgctgttgcagcggagcg

SEQ ID NO: 449509 - DNA, 25 bp, Homo sapien
gaaggacgggatctcaagcctcaag

SEQ ID NO: 449510 - DNA, 25 bp, Homo sapien
gatccaatccgcgttcgaaatcgcc

SEQ ID NO: 449511 - DNA, 25 bp, Homo sapien
caaacagctgttcccagagacgtct

SEQ ID NO: 449512 - DNA, 25 bp, Homo sapien
ttctaggctcgctggctcaaggcca

SEQ ID NO: 449513 - DNA, 25 bp, Homo sapien
cagacaccttactcagtccccggga

SEQ ID NO: 449514 - DNA, 25 bp, Homo sapien
cgggacgagtcgagctcttccagcc

SEQ ID NO: 449515 - DNA, 25 bp, Homo sapien
tccactcagactcgcgctttcccag

SEQ ID NO: 449516 - DNA, 25 bp, Homo sapien
gccagccgctctgcaagtcgtccag

SEQ ID NO: 449517 - DNA, 25 bp, Homo sapien
cggtcccgagcgagttaagaacgcg

SEQ ID NO: 449518 - DNA, 25 bp, Homo sapien
cagggcgttcagcggggtaacattt

SEQ ID NO: 449519 - DNA, 25 bp, Homo sapien
gcgttcagcggggtaacatttctac

SEQ ID NO: 449520 - DNA, 25 bp, Homo sapien
cccagggcgttcagcggggtaacat

SEQ ID NO: 449521 - DNA, 25 bp, Homo sapien
ggcgttcagcggggtaacatttcta

SEQ ID NO: 449522 - DNA, 25 bp, Homo sapien
gaaacccaaggggtgcatgcgaccc

SEQ ID NO: 449523 - DNA, 25 bp, Homo sapien
ccccgacagcgtcgtagagagagca

SEQ ID NO: 449524 - DNA, 25 bp, Homo sapien
tagagagagcactgcgtcgcttcac

SEQ ID NO: 449525 - DNA, 25 bp, Homo sapien
cagcgtcgtagagagagcactgcgt

SEQ ID NO: 449526 - DNA, 25 bp, Homo sapien
gaaaactgtagttcctcccagactc

SEQ ID NO: 449527 - DNA, 25 bp, Homo sapien
tgggacttcgtagacggccgacaaa

SEQ ID NO: 449528 - DNA, 25 bp, Homo sapien
gaaaagccatgggacttcgtagacg

SEQ ID NO: 449529 - DNA, 25 bp, Homo sapien
tcccagactctcagttaaaacaaac

SEQ ID NO: 449530 - DNA, 25 bp, Homo sapien
cacttgcagtaatcacagaatttct

SEQ ID NO: 449531 - DNA, 25 bp, Homo sapien
tattgtctgctatccagcacttgca

SEQ ID NO: 449532 - DNA, 25 bp, Homo sapien
ggcctattgtctgctatccagcact

SEQ ID NO: 449533 - DNA, 25 bp, Homo sapien
tatccagcacttgcagtaatcacag

SEQ ID NO: 449534 - DNA, 25 bp, Homo sapien
gaatctctaacagcggaattatcat

SEQ ID NO: 449535 - DNA, 25 bp, Homo sapien
ggtgcttcataacatgaatgatatg

SEQ ID NO: 449536 - DNA, 25 bp, Homo sapien
taatatataatcaaagtcaggttga

SEQ ID NO: 449537 - DNA, 25 bp, Homo sapien
gaatgatatgaccaactcattgccc

SEQ ID NO: 449538 - DNA, 25 bp, Homo sapien
tccaaatcctaaacaccttgcaggt

SEQ ID NO: 449539 - DNA, 25 bp, Homo sapien
ccctagtgtttatgtggtatgtaca

SEQ ID NO: 449540 - DNA, 25 bp, Homo sapien
catagtattttgacatgcaagaggg

SEQ ID NO: 449541 - DNA, 25 bp, Homo sapien
cattttacagcctaggtacctccaa

SEQ ID NO: 449542 - DNA, 25 bp, Homo sapien
tttccttatgattctttcctctttc

SEQ ID NO: 449543 - DNA, 25 bp, Homo sapien
ttcctctttcatgaaattcaacact

SEQ ID NO: 449544 - DNA, 25 bp, Homo sapien
tttcctctttcatgaaattcaacac

SEQ ID NO: 449545 - DNA, 25 bp, Homo sapien
ttctttcctctttcatgaaattcaa

SEQ ID NO: 449546 - DNA, 25 bp, Homo sapien
cctttgccttatccaggcttttctg

SEQ ID NO: 449547 - DNA, 25 bp, Homo sapien
tgccttttcttcttcctttgcctta

SEQ ID NO: 449548 - DNA, 25 bp, Homo sapien
tgatgccttttcttcttcctttgcc

SEQ ID NO: 449549 - DNA, 25 bp, Homo sapien
tgcagcaaactcctttgatgccttt

SEQ ID NO: 449550 - DNA, 25 bp, Homo sapien
tcttggtatgctttcagggcagctg

SEQ ID NO: 449551 - DNA, 25 bp, Homo sapien
ctgactctaagccaagtcttttcaa

SEQ ID NO: 449552 - DNA, 25 bp, Homo sapien
tcttttcaaatcctcttggtatgct

SEQ ID NO: 449553 - DNA, 25 bp, Homo sapien
aaatcctcttggtatgctttcaggg

SEQ ID NO: 449554 - DNA, 25 bp, Homo sapien
caatcaaagcttacttagcttgacc

SEQ ID NO: 449555 - DNA, 25 bp, Homo sapien
caaagcttacttagcttgacctctg

SEQ ID NO: 449556 - DNA, 25 bp, Homo sapien
ttacttagcttgacctctgatgtta

SEQ ID NO: 449557 - DNA, 25 bp, Homo sapien
aagcaatcaaagcttacttagcttg

SEQ ID NO: 449558 - DNA, 25 bp, Homo sapien
gttgtatgtttgaatatgtatccta

SEQ ID NO: 449559 - DNA, 25 bp, Homo sapien
taaaacaaccggcaaatagaccgca

SEQ ID NO: 449560 - DNA, 25 bp, Homo sapien
tgtactgcattgttgtatgtttgaa

SEQ ID NO: 449561 - DNA, 25 bp, Homo sapien
caaggctatggtaatatttaatagg

SEQ ID NO: 449562 - DNA, 25 bp, Homo sapien
gcaatcatagcccacattagtagcc

SEQ ID NO: 449563 - DNA, 25 bp, Homo sapien
aatactaggtcaaagatagttacaa

SEQ ID NO: 449564 - DNA, 25 bp, Homo sapien
aaattaagatattctgtatgacaaa

SEQ ID NO: 449565 - DNA, 25 bp, Homo sapien
attaaatactaggtcaaagatagtt

SEQ ID NO: 449566 - DNA, 25 bp, Homo sapien
gatgtcgaggtaggtgggatagtgc

SEQ ID NO: 449567 - DNA, 25 bp, Homo sapien
tgggatagtgctggttactggtgtt

SEQ ID NO: 449568 - DNA, 25 bp, Homo sapien
cgaggtaggtgggatagtgctggtt

SEQ ID NO: 449569 - DNA, 25 bp, Homo sapien
tgttgatttgatgtcgaggtaggtg

SEQ ID NO: 449570 - DNA, 25 bp, Homo sapien
taatggtaaccctcagaggttatgc

SEQ ID NO: 449571 - DNA, 25 bp, Homo sapien
tcataatagtaatggtaaccctcag

SEQ ID NO: 449572 - DNA, 25 bp, Homo sapien
ctcctgagataagatcataatagta

SEQ ID NO: 449573 - DNA, 25 bp, Homo sapien
agaggttatgccttctacccatctg

SEQ ID NO: 449574 - DNA, 25 bp, Homo sapien
cagtggcccaatctacgctcaccgc

SEQ ID NO: 449575 - DNA, 25 bp, Homo sapien
gcttcctgggttcagtggcccaatc

SEQ ID NO: 449576 - DNA, 25 bp, Homo sapien
gtggcccaatctacgctcaccgcaa

SEQ ID NO: 449577 - DNA, 25 bp, Homo sapien
cttcctgggttcagtggcccaatct

SEQ ID NO: 449578 - DNA, 25 bp, Homo sapien
ttagagatcagctcaaaagtaattc

SEQ ID NO: 449579 - DNA, 25 bp, Homo sapien
cacagagtgtctacactgtgctagg

SEQ ID NO: 449580 - DNA, 25 bp, Homo sapien
tgttaggcgccaggaatacaatggt

SEQ ID NO: 449581 - DNA, 25 bp, Homo sapien
caatggtgagtaaggcatcattcct

SEQ ID NO: 449582 - DNA, 25 bp, Homo sapien
cttccagtctaactctactaagacg

SEQ ID NO: 449583 - DNA, 25 bp, Homo sapien
tctactaagacgtcttcaaagaact

SEQ ID NO: 449584 - DNA, 25 bp, Homo sapien
taactctactaagacgtcttcaaag

SEQ ID NO: 449585 - DNA, 25 bp, Homo sapien
gtctaactctactaagacgtcttca

SEQ ID NO: 449586 - DNA, 25 bp, Homo sapien
gcttgcgatctcatatactcctaaa

SEQ ID NO: 449587 - DNA, 25 bp, Homo sapien
catcaattagctaccaaaagctgtc

SEQ ID NO: 449588 - DNA, 25 bp, Homo sapien
catccccagactcaattttgctcag

SEQ ID NO: 449589 - DNA, 25 bp, Homo sapien
tgtaggtacctcatattcaacgtat

SEQ ID NO: 449590 - DNA, 25 bp, Homo sapien
taagtctccttgaaatccttcaggt

SEQ ID NO: 449591 - DNA, 25 bp, Homo sapien
ttttaagtctccttgaaatccttca

SEQ ID NO: 449592 - DNA, 25 bp, Homo sapien
ttaagtctccttgaaatccttcagg

SEQ ID NO: 449593 - DNA, 25 bp, Homo sapien
tttaagtctccttgaaatccttcag

SEQ ID NO: 449594 - DNA, 25 bp, Homo sapien
caggcaactgcgactgcgcctggct

SEQ ID NO: 449595 - DNA, 25 bp, Homo sapien
ggcaactgcgactgcgcctggctaa

SEQ ID NO: 449596 - DNA, 25 bp, Homo sapien
tctaacaaaagcattatgggaaaaa

SEQ ID NO: 449597 - DNA, 25 bp, Homo sapien
tcactgttaacctctgccgccccag

SEQ ID NO: 449598 - DNA, 25 bp, Homo sapien
gcaagctaccctgagatctggtcat

SEQ ID NO: 449599 - DNA, 25 bp, Homo sapien
cacctttggtgctgttgttgaaata

SEQ ID NO: 449600 - DNA, 25 bp, Homo sapien
ggtggtagtactaatcatggccagg

SEQ ID NO: 449601 - DNA, 25 bp, Homo sapien
tgttgaaatagtgagcaagctaccc

SEQ ID NO: 449602 - DNA, 25 bp, Homo sapien
tattatagtaataggtaaaaccatc

SEQ ID NO: 449603 - DNA, 25 bp, Homo sapien
tgtattatagtaataggtaaaacca

SEQ ID NO: 449604 - DNA, 25 bp, Homo sapien
catcttcacttaaaccttctaccca

SEQ ID NO: 449605 - DNA, 25 bp, Homo sapien
ctacccaaacggtcttcactgctgt

SEQ ID NO: 449606 - DNA, 25 bp, Homo sapien
tttatcacttacaattattaaatga

SEQ ID NO: 449607 - DNA, 25 bp, Homo sapien
gaaggcagatcactagtgtgtggaa

SEQ ID NO: 449608 - DNA, 25 bp, Homo sapien
gcagatcactagtgtgtggaatgaa

SEQ ID NO: 449609 - DNA, 25 bp, Homo sapien
ttactagaaggcagatcactagtgt

SEQ ID NO: 449610 - DNA, 25 bp, Homo sapien
tcactagtgtgtggaatgaaatcat

SEQ ID NO: 449611 - DNA, 25 bp, Homo sapien
gaatcactatgcgaatctgatgatt

SEQ ID NO: 449612 - DNA, 25 bp, Homo sapien
tcagaatcactatgcgaatctgatg

SEQ ID NO: 449613 - DNA, 25 bp, Homo sapien
tcactatgcgaatctgatgatttgg

SEQ ID NO: 449614 - DNA, 25 bp, Homo sapien
cagaatcactatgcgaatctgatga

SEQ ID NO: 449615 - DNA, 25 bp, Homo sapien
ccatgcctggcctccttctagggtt

SEQ ID NO: 449616 - DNA, 25 bp, Homo sapien
catgcctggcctccttctagggttt

SEQ ID NO: 449617 - DNA, 25 bp, Homo sapien
atgcctggcctccttctagggtttt

SEQ ID NO: 449618 - DNA, 25 bp, Homo sapien
ggtcacttcctccatcactattttt

SEQ ID NO: 449619 - DNA, 25 bp, Homo sapien
gagactcaacctcttgtttaatttc

SEQ ID NO: 449620 - DNA, 25 bp, Homo sapien
atttgaacctaatgaattctgtttc

SEQ ID NO: 449621 - DNA, 25 bp, Homo sapien
tgagactcaacctcttgtttaattt

SEQ ID NO: 449622 - DNA, 25 bp, Homo sapien
attttcagtgcttggaagttccaaa

SEQ ID NO: 449623 - DNA, 25 bp, Homo sapien
tgcttggaagttccaaatctacctc

SEQ ID NO: 449624 - DNA, 25 bp, Homo sapien
tgaagactggggccactccatctgc

SEQ ID NO: 449625 - DNA, 25 bp, Homo sapien
cagtgcttggaagttccaaatctac

SEQ ID NO: 449626 - DNA, 25 bp, Homo sapien
taaactttgggtgtataagtctcca

SEQ ID NO: 449627 - DNA, 25 bp, Homo sapien
aacacagataaactttgggtgtata

SEQ ID NO: 449628 - DNA, 25 bp, Homo sapien
gggtgtataagtctccattctgtcc

SEQ ID NO: 449629 - DNA, 25 bp, Homo sapien
ggtgtataagtctccattctgtcct

SEQ ID NO: 449630 - DNA, 25 bp, Homo sapien
ctgctaaaaagagtgcatgactggg

SEQ ID NO: 449631 - DNA, 25 bp, Homo sapien
gaatatgaatggaataaaggccctg

SEQ ID NO: 449632 - DNA, 25 bp, Homo sapien
gcctcagaaccaaatcatcactggg

SEQ ID NO: 449633 - DNA, 25 bp, Homo sapien
ttaagcacatctgaagtacctgagc

SEQ ID NO: 449634 - DNA, 25 bp, Homo sapien
ccctagtacagttcttggaatgtat

SEQ ID NO: 449635 - DNA, 25 bp, Homo sapien
tggtagggttgattcccctagtaca

SEQ ID NO: 449636 - DNA, 25 bp, Homo sapien
tatctggtagggttgattcccctag

SEQ ID NO: 449637 - DNA, 25 bp, Homo sapien
gttgattcccctagtacagttcttg

SEQ ID NO: 449638 - DNA, 25 bp, Homo sapien
gatcctctgaataggtctatatcta

SEQ ID NO: 449639 - DNA, 25 bp, Homo sapien
ccagaccatatgctcccctgatgaa

SEQ ID NO: 449640 - DNA, 25 bp, Homo sapien
agatattttctaaagtttgctataa

SEQ ID NO: 449641 - DNA, 25 bp, Homo sapien
cttatatgcgaaatagatcctctga

SEQ ID NO: 449642 - DNA, 25 bp, Homo sapien
acttgctccatttccgtgctgggcc

SEQ ID NO: 449643 - DNA, 25 bp, Homo sapien
ctcctgctcttgcaagatcaccata

SEQ ID NO: 449644 - DNA, 25 bp, Homo sapien
tggtctcctgctcttgcaagatcac

SEQ ID NO: 449645 - DNA, 25 bp, Homo sapien
ggtggtctcctgctcttgcaagatc

SEQ ID NO: 449646 - DNA, 25 bp, Homo sapien
gactaaatagtaatatatcgtggga

SEQ ID NO: 449647 - DNA, 25 bp, Homo sapien
catgacagtgcttatctcaaacaga

SEQ ID NO: 449648 - DNA, 25 bp, Homo sapien
tacaagacattcacgtttaacatca

SEQ ID NO: 449649 - DNA, 25 bp, Homo sapien
ctagtatgtgcttcaaaagggcaaa

SEQ ID NO: 449650 - DNA, 25 bp, Homo sapien
taaatgggctcgtgctgctgtctct

SEQ ID NO: 449651 - DNA, 25 bp, Homo sapien
cactgtctaaacgataacgggaggc

SEQ ID NO: 449652 - DNA, 25 bp, Homo sapien
tactactcccgacatgcaaagcgga

SEQ ID NO: 449653 - DNA, 25 bp, Homo sapien
gaaaattggcgctctcgagtgtcgt

SEQ ID NO: 449654 - DNA, 25 bp, Homo sapien
tggtttttgacaaagcttcaaatgc

SEQ ID NO: 449655 - DNA, 25 bp, Homo sapien
tttgacaaagcttcaaatgcaactg

SEQ ID NO: 449656 - DNA, 25 bp, Homo sapien
cagttggtgctggagcaattggata

SEQ ID NO: 449657 - DNA, 25 bp, Homo sapien
gcttcaaatgcaactgagtagaaga

SEQ ID NO: 449658 - DNA, 25 bp, Homo sapien
tccagcctgggtgacagtacaagac

SEQ ID NO: 449659 - DNA, 25 bp, Homo sapien
tactcaggaggctgaggcaggagaa

SEQ ID NO: 449660 - DNA, 25 bp, Homo sapien
ccgagatggcaccactgcactccag

SEQ ID NO: 449661 - DNA, 25 bp, Homo sapien
ggtgcacgcctgtaacctcagctac

SEQ ID NO: 449662 - DNA, 25 bp, Homo sapien
gtgcccagactattcatcttatttc

SEQ ID NO: 449663 - DNA, 25 bp, Homo sapien
gcccagactattcatcttatttctt

SEQ ID NO: 449664 - DNA, 25 bp, Homo sapien
tgtgcccagactattcatcttattt

SEQ ID NO: 449665 - DNA, 25 bp, Homo sapien
ctgtgcccagactattcatcttatt

SEQ ID NO: 449666 - DNA, 25 bp, Homo sapien
ctcatttcctcaaagcaatgtggtc

SEQ ID NO: 449667 - DNA, 25 bp, Homo sapien
gatagaagaacctgtgtctccaatt

SEQ ID NO: 449668 - DNA, 25 bp, Homo sapien
ccagtcaaggccttgatagaagaac

SEQ ID NO: 449669 - DNA, 25 bp, Homo sapien
cagaggtaggctggcctttctgtgg

SEQ ID NO: 449670 - DNA, 25 bp, Homo sapien
ccaactgactgaaaggcagactgca

SEQ ID NO: 449671 - DNA, 25 bp, Homo sapien
ttagtgcaacagaacttcaccatgt

SEQ ID NO: 449672 - DNA, 25 bp, Homo sapien
gagagaatttaacagatgacgaggt

SEQ ID NO: 449673 - DNA, 25 bp, Homo sapien
taacaacaaggaatcaggaactgta

SEQ ID NO: 449674 - DNA, 25 bp, Homo sapien
tttctcacactatagagggacgctg

SEQ ID NO: 449675 - DNA, 25 bp, Homo sapien
caaaaccgaagcagtaagacacaca

SEQ ID NO: 449676 - DNA, 25 bp, Homo sapien
catcacaggagggaccacgtctatt

SEQ ID NO: 449677 - DNA, 25 bp, Homo sapien
ttgttatagcaacccactggcctct

SEQ ID NO: 449678 - DNA, 25 bp, Homo sapien
tttaattcgacctatttcagagtac

SEQ ID NO: 449679 - DNA, 25 bp, Homo sapien
acaactcacacaccgggagaaaata

SEQ ID NO: 449680 - DNA, 25 bp, Homo sapien
cactctgtatacagcttgatgtaca

SEQ ID NO: 449681 - DNA, 25 bp, Homo sapien
gcttcaaatcataacatcaacatac

SEQ ID NO: 449682 - DNA, 25 bp, Homo sapien
tgtttcagccttatatcagtcccct

SEQ ID NO: 449683 - DNA, 25 bp, Homo sapien
gtcacctagacctttgccaacagct

SEQ ID NO: 449684 - DNA, 25 bp, Homo sapien
aaggtaccattcagagaagttgcca

SEQ ID NO: 449685 - DNA, 25 bp, Homo sapien
ggtgactagcaatcccaagagaatt

SEQ ID NO: 449686 - DNA, 25 bp, Homo sapien
agttttggttagtgccacaaggaat

SEQ ID NO: 449687 - DNA, 25 bp, Homo sapien
tcaaaattttacactagtcagttct

SEQ ID NO: 449688 - DNA, 25 bp, Homo sapien
tggttagtgccacaaggaatttaac

SEQ ID NO: 449689 - DNA, 25 bp, Homo sapien
aactgaactaggaattgttagcggg

SEQ ID NO: 449690 - DNA, 25 bp, Homo sapien
tgttatagctaaagtgtgaatcagc

SEQ ID NO: 449691 - DNA, 25 bp, Homo sapien
ctgttatagctaaagtgtgaatcag

SEQ ID NO: 449692 - DNA, 25 bp, Homo sapien
cttcacacaaatggtcatacagtgt

SEQ ID NO: 449693 - DNA, 25 bp, Homo sapien
cactgtaggaatatgctgatgtggt

SEQ ID NO: 449694 - DNA, 25 bp, Homo sapien
cagtgtctactcttgtgtatctggc

SEQ ID NO: 449695 - DNA, 25 bp, Homo sapien
tattatatatcagaggttgtttctt

SEQ ID NO: 449696 - DNA, 25 bp, Homo sapien
tcttgctagtgggtaatttgcaaag

SEQ ID NO: 449697 - DNA, 25 bp, Homo sapien
ggccttcttgctagtgggtaatttg

SEQ ID NO: 449698 - DNA, 25 bp, Homo sapien
ctgagaaatcaaggtcaaggggtca

SEQ ID NO: 449699 - DNA, 25 bp, Homo sapien
ccttcttgctagtgggtaatttgca

SEQ ID NO: 449700 - DNA, 25 bp, Homo sapien
ctggaaagttgaagggactggcact

SEQ ID NO: 449701 - DNA, 25 bp, Homo sapien
gggatcccaacctgataaccttatc

SEQ ID NO: 449702 - DNA, 25 bp, Homo sapien
cacattcgaagcataacatccccgt

SEQ ID NO: 449703 - DNA, 25 bp, Homo sapien
cacatagagaacaagagcgtatagc

SEQ ID NO: 449704 - DNA, 25 bp, Homo sapien
ctggcctagtcacactgattttaaa

SEQ ID NO: 449705 - DNA, 25 bp, Homo sapien
gttccagatgccaacattaaagtat

SEQ ID NO: 449706 - DNA, 25 bp, Homo sapien
cctttaccttaatttgagagatgtg

SEQ ID NO: 449707 - DNA, 25 bp, Homo sapien
gaactgtagacgagacttcagggaa

SEQ ID NO: 449708 - DNA, 25 bp, Homo sapien
tataataatttgagtaccaggtaca

SEQ ID NO: 449709 - DNA, 25 bp, Homo sapien
aatgtgtttgactcccagtagaggg

SEQ ID NO: 449710 - DNA, 25 bp, Homo sapien
gcctctgaaagttaggaactatgac

SEQ ID NO: 449711 - DNA, 25 bp, Homo sapien
gttctacttagactgttagcctctg

SEQ ID NO: 449712 - DNA, 25 bp, Homo sapien
caagaaaactccagacaaatacctg

SEQ ID NO: 449713 - DNA, 25 bp, Homo sapien
gagagtcaagaaaactccagacaaa

SEQ ID NO: 449714 - DNA, 25 bp, Homo sapien
caaatacctggaagatgggggccag

SEQ ID NO: 449715 - DNA, 25 bp, Homo sapien
atacctggaagatgggggccagcca

SEQ ID NO: 449716 - DNA, 25 bp, Homo sapien
tctgtagaccttttctcttgtgagt

SEQ ID NO: 449717 - DNA, 25 bp, Homo sapien
attagggacccccagatgtctatat

SEQ ID NO: 449718 - DNA, 25 bp, Homo sapien
agggacccccagatgtctatatctg

SEQ ID NO: 449719 - DNA, 25 bp, Homo sapien
tttattagggacccccagatgtcta

SEQ ID NO: 449720 - DNA, 25 bp, Homo sapien
cctcggcttgaaacgataacactct

SEQ ID NO: 449721 - DNA, 25 bp, Homo sapien
gtattagattccagccttgacccag

SEQ ID NO: 449722 - DNA, 25 bp, Homo sapien
gggagccacctttcaatcactaata

SEQ ID NO: 449723 - DNA, 25 bp, Homo sapien
tattagctaaatccagctgagcgtg

SEQ ID NO: 449724 - DNA, 25 bp, Homo sapien
gaacctctgaattttactaaaagca

SEQ ID NO: 449725 - DNA, 25 bp, Homo sapien
tcaaagctcaatctttagaaagact

SEQ ID NO: 449726 - DNA, 25 bp, Homo sapien
gctttattctaacatagggaaccaa

SEQ ID NO: 449727 - DNA, 25 bp, Homo sapien
taattatagccaacctgatcacatg

SEQ ID NO: 449728 - DNA, 25 bp, Homo sapien
gtagggactcttagtaacaacatgg

SEQ ID NO: 449729 - DNA, 25 bp, Homo sapien
cagaaggcaatcacatgtgacctgc

SEQ ID NO: 449730 - DNA, 25 bp, Homo sapien
cattgaaggacagagttaccatccc

SEQ ID NO: 449731 - DNA, 25 bp, Homo sapien
gccacaacatcagtgttagaaccag

SEQ ID NO: 449732 - DNA, 25 bp, Homo sapien
aaaaaaggacacatgcacgtgtatg

SEQ ID NO: 449733 - DNA, 25 bp, Homo sapien
aaaaaaaaaggacacatgcacgtgt

SEQ ID NO: 449734 - DNA, 25 bp, Homo sapien
tgggcaacaaactgcctcaaaaaaa

SEQ ID NO: 449735 - DNA, 25 bp, Homo sapien
ctgggcaacaaactgcctcaaaaaa

SEQ ID NO: 449736 - DNA, 25 bp, Homo sapien
cccgcgcactgcaagatggcagcca

SEQ ID NO: 449737 - DNA, 25 bp, Homo sapien
gcgcactgcaagatggcagccaggg

SEQ ID NO: 449738 - DNA, 25 bp, Homo sapien
cgcgcactgcaagatggcagccagg

SEQ ID NO: 449739 - DNA, 25 bp, Homo sapien
ccgcgcactgcaagatggcagccag

SEQ ID NO: 449740 - DNA, 25 bp, Homo sapien
ctggctgttcggcacgggtggcaat

SEQ ID NO: 449741 - DNA, 25 bp, Homo sapien
atggagaaggaaggcggtctgagca

SEQ ID NO: 449742 - DNA, 25 bp, Homo sapien
tacagttgcaattgggcagcctggc

SEQ ID NO: 449743 - DNA, 25 bp, Homo sapien
tgggctccgctttttggccagcggc

SEQ ID NO: 449744 - DNA, 25 bp, Homo sapien
gtgcccgggcgctccgcttcgcggg

SEQ ID NO: 449745 - DNA, 25 bp, Homo sapien
tgctgagagtcgggctgcgggcgat

SEQ ID NO: 449746 - DNA, 25 bp, Homo sapien
gctgcgggcgatggattagttcatt

SEQ ID NO: 449747 - DNA, 25 bp, Homo sapien
caccgggacgaaccgctgctgagag

SEQ ID NO: 449748 - DNA, 25 bp, Homo sapien
gtttgaagaggttgctctccttggg

SEQ ID NO: 449749 - DNA, 25 bp, Homo sapien
tgcgtttgaagaggttgctctcctt

SEQ ID NO: 449750 - DNA, 25 bp, Homo sapien
caagatgcgtttgaagaggttgctc

SEQ ID NO: 449751 - DNA, 25 bp, Homo sapien
gatgcgtttgaagaggttgctctcc

SEQ ID NO: 449752 - DNA, 25 bp, Homo sapien
actttttccttatgacactgatcca

SEQ ID NO: 449753 - DNA, 25 bp, Homo sapien
taatgtaactttttccttatgacac

SEQ ID NO: 449754 - DNA, 25 bp, Homo sapien
gtaactttttccttatgacactgat

SEQ ID NO: 449755 - DNA, 25 bp, Homo sapien
tgtaatttaagaataataatgtaac

SEQ ID NO: 449756 - DNA, 25 bp, Homo sapien
cagaaactgcactaaaagcctttgc

SEQ ID NO: 449757 - DNA, 25 bp, Homo sapien
aaagcctttgctaccgcaagaatga

SEQ ID NO: 449758 - DNA, 25 bp, Homo sapien
ccgcaagaatgaaaccaaagtgcat

SEQ ID NO: 449759 - DNA, 25 bp, Homo sapien
gaaactgcactaaaagcctttgcta

SEQ ID NO: 449760 - DNA, 25 bp, Homo sapien
ccatttttgtactgcttctgttcat

SEQ ID NO: 449761 - DNA, 25 bp, Homo sapien
cttgcaaaacttgaggccatttttg

SEQ ID NO: 449762 - DNA, 25 bp, Homo sapien
tgcaaaacttgaggccatttttgta

SEQ ID NO: 449763 - DNA, 25 bp, Homo sapien
tgtactgcttctgttcataacattt

SEQ ID NO: 449764 - DNA, 25 bp, Homo sapien
gttcagcaaattttgggttcgacag

SEQ ID NO: 449765 - DNA, 25 bp, Homo sapien
agcaaattttgggttcgacagaatc

SEQ ID NO: 449766 - DNA, 25 bp, Homo sapien
caaattttgggttcgacagaatcat

SEQ ID NO: 449767 - DNA, 25 bp, Homo sapien
tcagcaaattttgggttcgacagaa

SEQ ID NO: 449768 - DNA, 25 bp, Homo sapien
ctttacgaacaaactcataagcttc

SEQ ID NO: 449769 - DNA, 25 bp, Homo sapien
cgaacaaactcataagcttcttctt

SEQ ID NO: 449770 - DNA, 25 bp, Homo sapien
ttacgaacaaactcataagcttctt

SEQ ID NO: 449771 - DNA, 25 bp, Homo sapien
cctttacgaacaaactcataagctt

SEQ ID NO: 449772 - DNA, 25 bp, Homo sapien
ctgcaagagtccatatacatgccaa

SEQ ID NO: 449773 - DNA, 25 bp, Homo sapien
tgcaagagtccatatacatgccaac

SEQ ID NO: 449774 - DNA, 25 bp, Homo sapien
cttcatcatattttttatcagaacg

SEQ ID NO: 449775 - DNA, 25 bp, Homo sapien
caaaatttgcaggttatctttatct

SEQ ID NO: 449776 - DNA, 25 bp, Homo sapien
tcatttggatctgcaacagtgagag

SEQ ID NO: 449777 - DNA, 25 bp, Homo sapien
gtgagagatccctcaaaatttgcag

SEQ ID NO: 449778 - DNA, 25 bp, Homo sapien
taatttgagggcatttcggtaacat

SEQ ID NO: 449779 - DNA, 25 bp, Homo sapien
attcttccaacagttttagggccat

SEQ ID NO: 449780 - DNA, 25 bp, Homo sapien
tcagcaaatggtatgcaatagcata

SEQ ID NO: 449781 - DNA, 25 bp, Homo sapien
ggccatatcataatctttcagcaaa

SEQ ID NO: 449782 - DNA, 25 bp, Homo sapien
gcaaatggtatgcaatagcatatcc

SEQ ID NO: 449783 - DNA, 25 bp, Homo sapien
ttccaccaaaagtttatcacatatt

SEQ ID NO: 449784 - DNA, 25 bp, Homo sapien
gattcctgcaacagatctgcctctc

SEQ ID NO: 449785 - DNA, 25 bp, Homo sapien
tctggtataatatcaattcactata

SEQ ID NO: 449786 - DNA, 25 bp, Homo sapien
ctatattcataatctattttgtttg

SEQ ID NO: 449787 - DNA, 25 bp, Homo sapien
tcaatcaagtttttgaacacttcac

SEQ ID NO: 449788 - DNA, 25 bp, Homo sapien
agccttcataataacaccaattttc

SEQ ID NO: 449789 - DNA, 25 bp, Homo sapien
aagccttcataataacaccaatttt

SEQ ID NO: 449790 - DNA, 25 bp, Homo sapien
tatacttcaatcagtagttatgaga

SEQ ID NO: 449791 - DNA, 25 bp, Homo sapien
tcagtagttatgagaaagaggagaa

SEQ ID NO: 449792 - DNA, 25 bp, Homo sapien
ctatcacaggtaagggtcaaggaac

SEQ ID NO: 449793 - DNA, 25 bp, Homo sapien
tatctgcaatcacttacacttaagt

SEQ ID NO: 449794 - DNA, 25 bp, Homo sapien
cataaatttgaagcctctcttctaa

SEQ ID NO: 449795 - DNA, 25 bp, Homo sapien
agagtcaaaggtaatcttctgggtg

SEQ ID NO: 449796 - DNA, 25 bp, Homo sapien
aatttgaagcctctcttctaaagtg

SEQ ID NO: 449797 - DNA, 25 bp, Homo sapien
gggtgctgcttactaatttcttcat

SEQ ID NO: 449798 - DNA, 25 bp, Homo sapien
tcttttgctatcctgaaatatacag

SEQ ID NO: 449799 - DNA, 25 bp, Homo sapien
gagaacgtgtaacgatcaagtcagg

SEQ ID NO: 449800 - DNA, 25 bp, Homo sapien
gtatttagggtacctatcgcctcga

SEQ ID NO: 449801 - DNA, 25 bp, Homo sapien
taactacacattgaagtatcacact

SEQ ID NO: 449802 - DNA, 25 bp, Homo sapien
tttcagagaccgaacctttccagta

SEQ ID NO: 449803 - DNA, 25 bp, Homo sapien
aatgaaggcaataccatcactgacc

SEQ ID NO: 449804 - DNA, 25 bp, Homo sapien
tgtggtagacaataagagacgctgt

SEQ ID NO: 449805 - DNA, 25 bp, Homo sapien
gagacgctgtttcttagaggaatgc

SEQ ID NO: 449806 - DNA, 25 bp, Homo sapien
ctgaagttaaccctcaggaacttat

SEQ ID NO: 449807 - DNA, 25 bp, Homo sapien
ggaacttatccattagttctctaaa

SEQ ID NO: 449808 - DNA, 25 bp, Homo sapien
cagcctttactgaagttaaccctca

SEQ ID NO: 449809 - DNA, 25 bp, Homo sapien
agttaaccctcaggaacttatccat

SEQ ID NO: 449810 - DNA, 25 bp, Homo sapien
taacagctacattagatcaagatgg

SEQ ID NO: 449811 - DNA, 25 bp, Homo sapien
taaagtatgtccttggtgaccagct

SEQ ID NO: 449812 - DNA, 25 bp, Homo sapien
actttaccagcaaggaccaaaattg

SEQ ID NO: 449813 - DNA, 25 bp, Homo sapien
cacttaagtatctgagatcgcaaca

SEQ ID NO: 449814 - DNA, 25 bp, Homo sapien
ttagtaacaagttcctggattatag

SEQ ID NO: 449815 - DNA, 25 bp, Homo sapien
tagtaacaagttcctggattataga

SEQ ID NO: 449816 - DNA, 25 bp, Homo sapien
gtaacaagttcctggattatagaaa

SEQ ID NO: 449817 - DNA, 25 bp, Homo sapien
taacaagttcctggattatagaaac

SEQ ID NO: 449818 - DNA, 25 bp, Homo sapien
cacacgttttaagagaggcttcata

SEQ ID NO: 449819 - DNA, 25 bp, Homo sapien
agtcacacgttttaagagaggcttc

SEQ ID NO: 449820 - DNA, 25 bp, Homo sapien
gtcacacgttttaagagaggcttca

SEQ ID NO: 449821 - DNA, 25 bp, Homo sapien
aaagtcacacgttttaagagaggct

SEQ ID NO: 449822 - DNA, 25 bp, Homo sapien
aaagtgctgtgccaggaaatactga

SEQ ID NO: 449823 - DNA, 25 bp, Homo sapien
ctgaacccagagtagtgttgtcggg

SEQ ID NO: 449824 - DNA, 25 bp, Homo sapien
gcaattgcagcattaatataatcca

SEQ ID NO: 449825 - DNA, 25 bp, Homo sapien
tagagttggagtactagcaattgca

SEQ ID NO: 449826 - DNA, 25 bp, Homo sapien
ctactcaaaaaacaggattcagatt

SEQ ID NO: 449827 - DNA, 25 bp, Homo sapien
tcaactactcaaaaaacaggattca

SEQ ID NO: 449828 - DNA, 25 bp, Homo sapien
tactcaaaaaacaggattcagattt

SEQ ID NO: 449829 - DNA, 25 bp, Homo sapien
aactactcaaaaaacaggattcaga

SEQ ID NO: 449830 - DNA, 25 bp, Homo sapien
aactccaaggattcttaaagtagct

SEQ ID NO: 449831 - DNA, 25 bp, Homo sapien
taacatgaaactacacaggattatt

SEQ ID NO: 449832 - DNA, 25 bp, Homo sapien
gaaaaagattatcagggtgccctag

SEQ ID NO: 449833 - DNA, 25 bp, Homo sapien
tttactaagagctcaaatgattaca

SEQ ID NO: 449834 - DNA, 25 bp, Homo sapien
gaattgatgaatctatcagctgtgt

SEQ ID NO: 449835 - DNA, 25 bp, Homo sapien
tatcatatttgctcgaagcatgtat

SEQ ID NO: 449836 - DNA, 25 bp, Homo sapien
tatttgctcgaagcatgtattttgc

SEQ ID NO: 449837 - DNA, 25 bp, Homo sapien
gaatctatcagctgtgtccaaagac

SEQ ID NO: 449838 - DNA, 25 bp, Homo sapien
tttttcaaggcatccccgtatctcc

SEQ ID NO: 449839 - DNA, 25 bp, Homo sapien
attttttcaaggcatccccgtatct

SEQ ID NO: 449840 - DNA, 25 bp, Homo sapien
ccccagacgctgataagctgaaatg

SEQ ID NO: 449841 - DNA, 25 bp, Homo sapien
ccgtatctccccagacgctgataag

SEQ ID NO: 449842 - DNA, 25 bp, Homo sapien
taaaataagcctgcaaactggccat

SEQ ID NO: 449843 - DNA, 25 bp, Homo sapien
gaaagaggttgccatcagctgtgtg

SEQ ID NO: 449844 - DNA, 25 bp, Homo sapien
ggctgactgcggaccagatcctgat

SEQ ID NO: 449845 - DNA, 25 bp, Homo sapien
cctcttagggtggtgatgaatatca

SEQ ID NO: 449846 - DNA, 25 bp, Homo sapien
gtgcatttgcggctcttttcctcct

SEQ ID NO: 449847 - DNA, 25 bp, Homo sapien
catttgcggctcttttcctcctgtg

SEQ ID NO: 449848 - DNA, 25 bp, Homo sapien
tcaggggtgcatttgcggctctttt

SEQ ID NO: 449849 - DNA, 25 bp, Homo sapien
cctcctgtggtccatgtggaaggag

SEQ ID NO: 449850 - DNA, 25 bp, Homo sapien
tgactacgatgcctgtggttctata

SEQ ID NO: 449851 - DNA, 25 bp, Homo sapien
gatgcctgtggttctatactgcgtc

SEQ ID NO: 449852 - DNA, 25 bp, Homo sapien
tgggaacagtggtgccgattgcccc

SEQ ID NO: 449853 - DNA, 25 bp, Homo sapien
tatactgcgtcaggatgggaacagt

SEQ ID NO: 449854 - DNA, 25 bp, Homo sapien
taggccctctcttctagaccagatt

SEQ ID NO: 449855 - DNA, 25 bp, Homo sapien
gataatccaatcaccagcagtctaa

SEQ ID NO: 449856 - DNA, 25 bp, Homo sapien
gctcactgcagaaaagtacgtattc

SEQ ID NO: 449857 - DNA, 25 bp, Homo sapien
cccggatgtgactagtaagagctta

SEQ ID NO: 449858 - DNA, 25 bp, Homo sapien
taatggtgatagacagaatatggct

SEQ ID NO: 449859 - DNA, 25 bp, Homo sapien
ttaaaaacaagtgggatactgcagc

SEQ ID NO: 449860 - DNA, 25 bp, Homo sapien
cagcctcaagcaaacctggcttgtt

SEQ ID NO: 449861 - DNA, 25 bp, Homo sapien
gaaagcactgtgtcttgcgaaccca

SEQ ID NO: 449862 - DNA, 25 bp, Homo sapien
gtcacaattttcacttagctgccct

SEQ ID NO: 449863 - DNA, 25 bp, Homo sapien
ttatttttggcattcaacttgaact

SEQ ID NO: 449864 - DNA, 25 bp, Homo sapien
gttttgtgatgatactcaacttcta

SEQ ID NO: 449865 - DNA, 25 bp, Homo sapien
tgcccattccctacaaatcatgttt

SEQ ID NO: 449866 - DNA, 25 bp, Homo sapien
tatggaagtcgaattggtcatcagt

SEQ ID NO: 449867 - DNA, 25 bp, Homo sapien
gtatggaagtcgaattggtcatcag

SEQ ID NO: 449868 - DNA, 25 bp, Homo sapien
ggtcaacataggcacgaagggtcat

SEQ ID NO: 449869 - DNA, 25 bp, Homo sapien
tatttcaatcgctgatctagcagcc

SEQ ID NO: 449870 - DNA, 25 bp, Homo sapien
aaaaggcatgtcttctgagtatatc

SEQ ID NO: 449871 - DNA, 25 bp, Homo sapien
gagtatatcttctaatctcaaaagg

SEQ ID NO: 449872 - DNA, 25 bp, Homo sapien
cttctctgcttgctaagcattttct

SEQ ID NO: 449873 - DNA, 25 bp, Homo sapien
tgccagctcttggtgagaagttaat

SEQ ID NO: 449874 - DNA, 25 bp, Homo sapien
ctcactgggcttacaatcaaggtgt

SEQ ID NO: 449875 - DNA, 25 bp, Homo sapien
gaggtgctatctctttgtagctaca

SEQ ID NO: 449876 - DNA, 25 bp, Homo sapien
cacttgagaaaatcctggaggtgct

SEQ ID NO: 449877 - DNA, 25 bp, Homo sapien
ttcaaatgctaacagatgagtgtca

SEQ ID NO: 449878 - DNA, 25 bp, Homo sapien
gaacttaacggcttcctctaatgga

SEQ ID NO: 449879 - DNA, 25 bp, Homo sapien
gcaacaaggttcttaagaggtataa

SEQ ID NO: 449880 - DNA, 25 bp, Homo sapien
ttatcagcaacaaggttcttaagag

SEQ ID NO: 449881 - DNA, 25 bp, Homo sapien
tctggctatcaaagtcaactatggc

SEQ ID NO: 449882 - DNA, 25 bp, Homo sapien
caaagattacactgaatatggtcac

SEQ ID NO: 449883 - DNA, 25 bp, Homo sapien
tcataaaaattgcttcaggtagaca

SEQ ID NO: 449884 - DNA, 25 bp, Homo sapien
tttcgagtagccaaggaaaagagcc

SEQ ID NO: 449885 - DNA, 25 bp, Homo sapien
gaaaatctaattaaacattcatgta

SEQ ID NO: 449886 - DNA, 25 bp, Homo sapien
caaaagctcgtttgacagactgcag

SEQ ID NO: 449887 - DNA, 25 bp, Homo sapien
tattactgttaatggcaaaagctcg

SEQ ID NO: 449888 - DNA, 25 bp, Homo sapien
cattcatgtaaccatgggttattac

SEQ ID NO: 449889 - DNA, 25 bp, Homo sapien
tccaccagcttaatgtaagacaact

SEQ ID NO: 449890 - DNA, 25 bp, Homo sapien
gatcaacagagatttaacaacctcc

SEQ ID NO: 449891 - DNA, 25 bp, Homo sapien
tctaccatctcttggctaacaggtt

SEQ ID NO: 449892 - DNA, 25 bp, Homo sapien
agtggcatcccactgacagcttggg

SEQ ID NO: 449893 - DNA, 25 bp, Homo sapien
gagaggtagcgttacgtttcagaaa

SEQ ID NO: 449894 - DNA, 25 bp, Homo sapien
tagcgttacgtttcagaaaatcctc

SEQ ID NO: 449895 - DNA, 25 bp, Homo sapien
ctgaagagaggtagcgttacgtttc

SEQ ID NO: 449896 - DNA, 25 bp, Homo sapien
gcatttcttgagatagaactttgct

SEQ ID NO: 449897 - DNA, 25 bp, Homo sapien
tctctttgttcgctttttccataag

SEQ ID NO: 449898 - DNA, 25 bp, Homo sapien
tctttgttcgctttttccataagta

SEQ ID NO: 449899 - DNA, 25 bp, Homo sapien
ctctttgttcgctttttccataagt

SEQ ID NO: 449900 - DNA, 25 bp, Homo sapien
ctttgttcgctttttccataagtat

SEQ ID NO: 449901 - DNA, 25 bp, Homo sapien
tgaaaatacactacaaatcagagct

SEQ ID NO: 449902 - DNA, 25 bp, Homo sapien
tatgtgatatcaactggccagtgac

SEQ ID NO: 449903 - DNA, 25 bp, Homo sapien
tattcagtagcatcccattgatagg

SEQ ID NO: 449904 - DNA, 25 bp, Homo sapien
gagagccaagtgtgacatttcttcc

SEQ ID NO: 449905 - DNA, 25 bp, Homo sapien
ggctatagcaattgctttctcctgc

SEQ ID NO: 449906 - DNA, 25 bp, Homo sapien
agtttcatctagtctagtggctata

SEQ ID NO: 449907 - DNA, 25 bp, Homo sapien
tctagtggctatagcaattgctttc

SEQ ID NO: 449908 - DNA, 25 bp, Homo sapien
tcatctagtctagtggctatagcaa

SEQ ID NO: 449909 - DNA, 25 bp, Homo sapien
gaagcaggttatgacaggccatcct

SEQ ID NO: 449910 - DNA, 25 bp, Homo sapien
aattagctgtatggttcagtgccac

SEQ ID NO: 449911 - DNA, 25 bp, Homo sapien
tcagtgccacattaggattgtcgac

SEQ ID NO: 449912 - DNA, 25 bp, Homo sapien
tgccatcaagcagtgcttcagaaac

SEQ ID NO: 449913 - DNA, 25 bp, Homo sapien
gatcggagctaccacaaaactgtgt

SEQ ID NO: 449914 - DNA, 25 bp, Homo sapien
caattcagctttgagtctataggag

SEQ ID NO: 449915 - DNA, 25 bp, Homo sapien
taattatacagaagcgatcggagct

SEQ ID NO: 449916 - DNA, 25 bp, Homo sapien
tgcaccctggaaaagaaaccctgat

SEQ ID NO: 449917 - DNA, 25 bp, Homo sapien
cctccatattgttaacatatagtta

SEQ ID NO: 449918 - DNA, 25 bp, Homo sapien
ccagcctccatattgttaacatata

SEQ ID NO: 449919 - DNA, 25 bp, Homo sapien
catattgttaacatatagttaacac

SEQ ID NO: 449920 - DNA, 25 bp, Homo sapien
cagcctccatattgttaacatatag

SEQ ID NO: 449921 - DNA, 25 bp, Homo sapien
tggtcaatgcatggctataacaaca

SEQ ID NO: 449922 - DNA, 25 bp, Homo sapien
cagcgagtttttcccgtctcaataa

SEQ ID NO: 449923 - DNA, 25 bp, Homo sapien
tctgccctataatgctcccttgaag

SEQ ID NO: 449924 - DNA, 25 bp, Homo sapien
tagagtacccttattcaaccagaaa

SEQ ID NO: 449925 - DNA, 25 bp, Homo sapien
ggaacatccctgactgtggaatggt

SEQ ID NO: 449926 - DNA, 25 bp, Homo sapien
catccagatgccatttagaaccaac

SEQ ID NO: 449927 - DNA, 25 bp, Homo sapien
catctgtccagttaatatttctctc

SEQ ID NO: 449928 - DNA, 25 bp, Homo sapien
aagaagctgggtctcatccagatgc

SEQ ID NO: 449929 - DNA, 25 bp, Homo sapien
caggatgccaccgcagaagaggagg

SEQ ID NO: 449930 - DNA, 25 bp, Homo sapien
ctgctgtgagcttagcctggaccct

SEQ ID NO: 449931 - DNA, 25 bp, Homo sapien
gtgggtctcacctgtcagttgtttg

SEQ ID NO: 449932 - DNA, 25 bp, Homo sapien
atttttggaggcatggaagagagac

SEQ ID NO: 449933 - DNA, 25 bp, Homo sapien
ctttgccatttttggaggcatggaa

SEQ ID NO: 449934 - DNA, 25 bp, Homo sapien
ttgccatttttggaggcatggaaga

SEQ ID NO: 449935 - DNA, 25 bp, Homo sapien
gccatttttggaggcatggaagaga

SEQ ID NO: 449936 - DNA, 25 bp, Homo sapien
gctcatcatcctggccatcagccct

SEQ ID NO: 449937 - DNA, 25 bp, Homo sapien
ttcctgtccatgtgcctggtcacgg

SEQ ID NO: 449938 - DNA, 25 bp, Homo sapien
gacatccagtctcacagcagagtca

SEQ ID NO: 449939 - DNA, 25 bp, Homo sapien
tcatcctggccatcagccctgactc

SEQ ID NO: 449940 - DNA, 25 bp, Homo sapien
tacttgtttccgatttctcaacctc

SEQ ID NO: 449941 - DNA, 25 bp, Homo sapien
aatgcagacacgatgctgggtgttg

SEQ ID NO: 449942 - DNA, 25 bp, Homo sapien
ttctaggcaaaaggtgttcaatctc

SEQ ID NO: 449943 - DNA, 25 bp, Homo sapien
tgaattgcttctatccaaaatgcag

SEQ ID NO: 449944 - DNA, 25 bp, Homo sapien
catgtgaaaaggtcttccaatgaag

SEQ ID NO: 449945 - DNA, 25 bp, Homo sapien
gtgaaaaggtcttccaatgaagaac

SEQ ID NO: 449946 - DNA, 25 bp, Homo sapien
gaagaactcttaagtttcgagttca

SEQ ID NO: 449947 - DNA, 25 bp, Homo sapien
atgaagaactcttaagtttcgagtt

SEQ ID NO: 449948 - DNA, 25 bp, Homo sapien
ctgccgttctggatcctctgtagtt

SEQ ID NO: 449949 - DNA, 25 bp, Homo sapien
gtctgtagagattggacaccttttg

SEQ ID NO: 449950 - DNA, 25 bp, Homo sapien
tggatcctctgtagttctaggagga

SEQ ID NO: 449951 - DNA, 25 bp, Homo sapien
tcctctgtagttctaggaggaggaa

SEQ ID NO: 449952 - DNA, 25 bp, Homo sapien
ggacaggaacagcccagtgaggacc

SEQ ID NO: 449953 - DNA, 25 bp, Homo sapien
tgactctgctgtgagactggatgtc

SEQ ID NO: 449954 - DNA, 25 bp, Homo sapien
taggagatgactctgctgtgagact

SEQ ID NO: 449955 - DNA, 25 bp, Homo sapien
acaggaacagcccagtgaggaccgg

SEQ ID NO: 449956 - DNA, 25 bp, Homo sapien
ctcaggagcatgtctctcttccatg

SEQ ID NO: 449957 - DNA, 25 bp, Homo sapien
ctcttccatgcctccaaaaatggca

SEQ ID NO: 449958 - DNA, 25 bp, Homo sapien
tctctcttccatgcctccaaaaatg

SEQ ID NO: 449959 - DNA, 25 bp, Homo sapien
actcaggagcatgtctctcttccat

SEQ ID NO: 449960 - DNA, 25 bp, Homo sapien
ctacaaaccggtcataggccatcac

SEQ ID NO: 449961 - DNA, 25 bp, Homo sapien
ggttcatgatggctgaatgatatag

SEQ ID NO: 449962 - DNA, 25 bp, Homo sapien
catgatggctgaatgatatagaggg

SEQ ID NO: 449963 - DNA, 25 bp, Homo sapien
gggttcatgatggctgaatgatata

SEQ ID NO: 449964 - DNA, 25 bp, Homo sapien
ttcatgatggctgaatgatatagag

SEQ ID NO: 449965 - DNA, 25 bp, Homo sapien
caaaactaggaagccacagaaacac

SEQ ID NO: 449966 - DNA, 25 bp, Homo sapien
gacaacaaaactaggaagccacaga

SEQ ID NO: 449967 - DNA, 25 bp, Homo sapien
tgaggacagaaaaaaaaagacaaca

SEQ ID NO: 449968 - DNA, 25 bp, Homo sapien
aagacaacaaaactaggaagccaca

SEQ ID NO: 449969 - DNA, 25 bp, Homo sapien
gggaaatacatgattatcttattgg

SEQ ID NO: 449970 - DNA, 25 bp, Homo sapien
gagtaagagaaaagggtccctgaga

SEQ ID NO: 449971 - DNA, 25 bp, Homo sapien
tagagtaagagaaaagggtccctga

SEQ ID NO: 449972 - DNA, 25 bp, Homo sapien
cagcagggaaatacatgattatctt

SEQ ID NO: 449973 - DNA, 25 bp, Homo sapien
gtggagaaggctttatacttcccac

SEQ ID NO: 449974 - DNA, 25 bp, Homo sapien
ggtggagaaggctttatacttccca

SEQ ID NO: 449975 - DNA, 25 bp, Homo sapien
ctgttccataaactcagcaaacaac

SEQ ID NO: 449976 - DNA, 25 bp, Homo sapien
tgttccataaactcagcaaacaact

SEQ ID NO: 449977 - DNA, 25 bp, Homo sapien
tccataaactcagcaaacaactgac

SEQ ID NO: 449978 - DNA, 25 bp, Homo sapien
gttccataaactcagcaaacaactg

SEQ ID NO: 449979 - DNA, 25 bp, Homo sapien
ggccactgcaccatttctgggggaa

SEQ ID NO: 449980 - DNA, 25 bp, Homo sapien
ctgaggccactgcaccatttctggg

SEQ ID NO: 449981 - DNA, 25 bp, Homo sapien
gaggccactgcaccatttctggggg

SEQ ID NO: 449982 - DNA, 25 bp, Homo sapien
ccactgcaccatttctgggggaaga

SEQ ID NO: 449983 - DNA, 25 bp, Homo sapien
gggcttgctgtcccgcacacttcag

SEQ ID NO: 449984 - DNA, 25 bp, Homo sapien
ctaccaccggctcgggttcctagat

SEQ ID NO: 449985 - DNA, 25 bp, Homo sapien
gccttgggtcctgcgaggtggcagc

SEQ ID NO: 449986 - DNA, 25 bp, Homo sapien
gatcttatagccttcggcggccgga

SEQ ID NO: 449987 - DNA, 25 bp, Homo sapien
cgcggcggccgcggggctgccctgc

SEQ ID NO: 449988 - DNA, 25 bp, Homo sapien
ccgcggcggccgcggggctgccctg

SEQ ID NO: 449989 - DNA, 25 bp, Homo sapien
gcggcggccgcggggctgccctgcg

SEQ ID NO: 449990 - DNA, 25 bp, Homo sapien
cggcggccgcggggctgccctgcgc

SEQ ID NO: 449991 - DNA, 25 bp, Homo sapien
cccgggcgcgcgcggagctggtggt

SEQ ID NO: 449992 - DNA, 25 bp, Homo sapien
cgggcgcgcgcggagctggtggtgg

SEQ ID NO: 449993 - DNA, 25 bp, Homo sapien
ggcgcgcgcggagctggtggtggag

SEQ ID NO: 449994 - DNA, 25 bp, Homo sapien
ccaaccccgggcgcgcgcggagctg

SEQ ID NO: 449995 - DNA, 25 bp, Homo sapien
caagaaaactgagccttcgccaggc

SEQ ID NO: 449996 - DNA, 25 bp, Homo sapien
taccaagtccgttttacagacaaga

SEQ ID NO: 449997 - DNA, 25 bp, Homo sapien
ccccgaagtgcgttctattaccaag

SEQ ID NO: 449998 - DNA, 25 bp, Homo sapien
acccagcgacttggcgcggccagat

SEQ ID NO: 449999 - DNA, 25 bp, Homo sapien
gaagataactgacacttggcgcctc

SEQ ID NO: 450000 - DNA, 25 bp, Homo sapien
gccacggttcccgaagataactgac

SEQ ID NO: 450001 - DNA, 25 bp, Homo sapien
taactgacacttggcgcctctgcca

SEQ ID NO: 450002 - DNA, 25 bp, Homo sapien
caagtgacagccacgcagtcgctgt

SEQ ID NO: 450003 - DNA, 25 bp, Homo sapien
tcctcgtagtggaagtggcgctcgt

SEQ ID NO: 450004 - DNA, 25 bp, Homo sapien
aactcgcacagcgcgtccgacaggt

SEQ ID NO: 450005 - DNA, 25 bp, Homo sapien
tcgtggaagggcgacgcgaagtcgg

SEQ ID NO: 450006 - DNA, 25 bp, Homo sapien
cgagtcgctgaagccgctgctgtcg

SEQ ID NO: 450007 - DNA, 25 bp, Homo sapien
ccctcattccactggcacttgttcc

SEQ ID NO: 450008 - DNA, 25 bp, Homo sapien
tgaatatttccgttctgcgccctcc

SEQ ID NO: 450009 - DNA, 25 bp, Homo sapien
gaacagcagtttgggcttatgaaac

SEQ ID NO: 450010 - DNA, 25 bp, Homo sapien
gtttcatgaatatttccgttctgcg

SEQ ID NO: 450011 - DNA, 25 bp, Homo sapien
gaaagatcaccaggaaccaccttca

SEQ ID NO: 450012 - DNA, 25 bp, Homo sapien
ggtagtctccattgtgagaaagatc

SEQ ID NO: 450013 - DNA, 25 bp, Homo sapien
gaccctggggtagtctccattgtga

SEQ ID NO: 450014 - DNA, 25 bp, Homo sapien
cattgtgagaaagatcaccaggaac

SEQ ID NO: 450015 - DNA, 25 bp, Homo sapien
ttgacaaacaggcatgtgatctggg

SEQ ID NO: 450016 - DNA, 25 bp, Homo sapien
cacagctagagaaactaaatcccac

SEQ ID NO: 450017 - DNA, 25 bp, Homo sapien
aaatattttcatgcgagacactggc

SEQ ID NO: 450018 - DNA, 25 bp, Homo sapien
tcaatctaagctctactgaccctgc

SEQ ID NO: 450019 - DNA, 25 bp, Homo sapien
tcttccttgtaaggttggtgcacct

SEQ ID NO: 450020 - DNA, 25 bp, Homo sapien
cttgtaaggttggtgcaccttcaga

SEQ ID NO: 450021 - DNA, 25 bp, Homo sapien
gtaaggttggtgcaccttcagacag

SEQ ID NO: 450022 - DNA, 25 bp, Homo sapien
tccttgtaaggttggtgcaccttca

SEQ ID NO: 450023 - DNA, 25 bp, Homo sapien
aaaatcactcccactaaagtgcctg

SEQ ID NO: 450024 - DNA, 25 bp, Homo sapien
cttcatgtcttaagaggcctccctg

SEQ ID NO: 450025 - DNA, 25 bp, Homo sapien
tacatgttggaatcaagtctaaacg

SEQ ID NO: 450026 - DNA, 25 bp, Homo sapien
taccctaactcttaattgcattgcc

SEQ ID NO: 450027 - DNA, 25 bp, Homo sapien
ttcttgagagagagcagcaacattc

SEQ ID NO: 450028 - DNA, 25 bp, Homo sapien
tgggcaaaatctcacgcaagacaga

SEQ ID NO: 450029 - DNA, 25 bp, Homo sapien
ggctcgaaggacctagaacagtgat

SEQ ID NO: 450030 - DNA, 25 bp, Homo sapien
tattgccccgcgtgggtatcaggtg

SEQ ID NO: 450031 - DNA, 25 bp, Homo sapien
cagctgaggcgcaccctgtgatgat

SEQ ID NO: 450032 - DNA, 25 bp, Homo sapien
tgaggtgtacaatctgggacagacc

SEQ ID NO: 450033 - DNA, 25 bp, Homo sapien
tagcatctatgccactgtcgagtgg

SEQ ID NO: 450034 - DNA, 25 bp, Homo sapien
gaggccacgtgaaaactgcatgacc

SEQ ID NO: 450035 - DNA, 25 bp, Homo sapien
ggagagcaactttccacaccactgc

SEQ ID NO: 450036 - DNA, 25 bp, Homo sapien
gccgtagatccagaatattgccagg

SEQ ID NO: 450037 - DNA, 25 bp, Homo sapien
caaggaggccaaacgctattgaatg

SEQ ID NO: 450038 - DNA, 25 bp, Homo sapien
caatttgttcacctcacaggcaagg

SEQ ID NO: 450039 - DNA, 25 bp, Homo sapien
ggaagccttactgttgtcaccatgc

SEQ ID NO: 450040 - DNA, 25 bp, Homo sapien
tcaggacccttggactccgtggaac

SEQ ID NO: 450041 - DNA, 25 bp, Homo sapien
tgagccagaaaataccaggcccttg

SEQ ID NO: 450042 - DNA, 25 bp, Homo sapien
catgcagtcaccaggagaatcgcca

SEQ ID NO: 450043 - DNA, 25 bp, Homo sapien
tgacaccgccatcttgtccactttt

SEQ ID NO: 450044 - DNA, 25 bp, Homo sapien
caatctttgcttccttcagaggtcc

SEQ ID NO: 450045 - DNA, 25 bp, Homo sapien
agaagacccttgagagcaaccctca

SEQ ID NO: 450046 - DNA, 25 bp, Homo sapien
cccctgctctttttcgctgacaccg

SEQ ID NO: 450047 - DNA, 25 bp, Homo sapien
tagggtgcctttgagctagtacatc

SEQ ID NO: 450048 - DNA, 25 bp, Homo sapien
taagtgacaagagataggcccagta

SEQ ID NO: 450049 - DNA, 25 bp, Homo sapien
gagattctctaagtcctgctaaggg

SEQ ID NO: 450050 - DNA, 25 bp, Homo sapien
tatcaatagaatgggaaggcggact

SEQ ID NO: 450051 - DNA, 25 bp, Homo sapien
tctgaggagtgacagtggcagagag

SEQ ID NO: 450052 - DNA, 25 bp, Homo sapien
agtttttcatcactgaagctgaagc

SEQ ID NO: 450053 - DNA, 25 bp, Homo sapien
gctgaagctgttcctataaagtgaa

SEQ ID NO: 450054 - DNA, 25 bp, Homo sapien
ggtagagtctgttggagaattcagt

SEQ ID NO: 450055 - DNA, 25 bp, Homo sapien
ctcaaattccaactaatgaccttac

SEQ ID NO: 450056 - DNA, 25 bp, Homo sapien
actcaaattccaactaatgacctta

SEQ ID NO: 450057 - DNA, 25 bp, Homo sapien
tttgagaaagattgtttagggataa

SEQ ID NO: 450058 - DNA, 25 bp, Homo sapien
catttgagaaagattgtttagggat

SEQ ID NO: 450059 - DNA, 25 bp, Homo sapien
ttaacacctgctggctacaaatggc

SEQ ID NO: 450060 - DNA, 25 bp, Homo sapien
tatcaaaatggtacagggaaggtgc

SEQ ID NO: 450061 - DNA, 25 bp, Homo sapien
ttcccagtgggtgctaacgttgcta

SEQ ID NO: 450062 - DNA, 25 bp, Homo sapien
cctagattgtgtcattcctgcggca

SEQ ID NO: 450063 - DNA, 25 bp, Homo sapien
gtcaagatcagcaatgaaggcttct

SEQ ID NO: 450064 - DNA, 25 bp, Homo sapien
tcaagatcagcaatgaaggcttcta

SEQ ID NO: 450065 - DNA, 25 bp, Homo sapien
tgtcaagatcagcaatgaaggcttc

SEQ ID NO: 450066 - DNA, 25 bp, Homo sapien
cattcctagccactagagtcctgtt

SEQ ID NO: 450067 - DNA, 25 bp, Homo sapien
taacacaagcttatcccagaatttc

SEQ ID NO: 450068 - DNA, 25 bp, Homo sapien
aaatgccattgtttgctagtgacct

SEQ ID NO: 450069 - DNA, 25 bp, Homo sapien
tgtttggaaacgcacatggtctact

SEQ ID NO: 450070 - DNA, 25 bp, Homo sapien
ggtaatgctccagtcttgctcgctc

SEQ ID NO: 450071 - DNA, 25 bp, Homo sapien
tggtaatgctccagtcttgctcgct

SEQ ID NO: 450072 - DNA, 25 bp, Homo sapien
taatgctccagtcttgctcgctctc

SEQ ID NO: 450073 - DNA, 25 bp, Homo sapien
gatggtaatgctccagtcttgctcg

SEQ ID NO: 450074 - DNA, 25 bp, Homo sapien
tctctgaaaagcctgacaggccatc

SEQ ID NO: 450075 - DNA, 25 bp, Homo sapien
tctgaaaagcctgacaggccatcat

SEQ ID NO: 450076 - DNA, 25 bp, Homo sapien
gcccatgggatggaagacttttggc

SEQ ID NO: 450077 - DNA, 25 bp, Homo sapien
cacttgtggttaatcagttcatttc

SEQ ID NO: 450078 - DNA, 25 bp, Homo sapien
taaggttatccactcagaggctcac

SEQ ID NO: 450079 - DNA, 25 bp, Homo sapien
gctgggcttcccacacgatgagtgt

SEQ ID NO: 450080 - DNA, 25 bp, Homo sapien
gattaactggaatgactgggcaacc

SEQ ID NO: 450081 - DNA, 25 bp, Homo sapien
caagccctggtcttctgatgtaaga

SEQ ID NO: 450082 - DNA, 25 bp, Homo sapien
cctggtagaaggttgagtgcacgtc

SEQ ID NO: 450083 - DNA, 25 bp, Homo sapien
tgcacgtctttgtcccctctggcag

SEQ ID NO: 450084 - DNA, 25 bp, Homo sapien
caggtcctcggaactttctgaagct

SEQ ID NO: 450085 - DNA, 25 bp, Homo sapien
gattctagtagctgattttagcagg

SEQ ID NO: 450086 - DNA, 25 bp, Homo sapien
caatattagcatggatcgtctgttc

SEQ ID NO: 450087 - DNA, 25 bp, Homo sapien
tattataatgggaaagcttactgct

SEQ ID NO: 450088 - DNA, 25 bp, Homo sapien
tgctgcaagcaggtaaacaaagtca

SEQ ID NO: 450089 - DNA, 25 bp, Homo sapien
tcgtctgttctaatatgctgcaagc

SEQ ID NO: 450090 - DNA, 25 bp, Homo sapien
tccctcgtatttaagtcctggattg

SEQ ID NO: 450091 - DNA, 25 bp, Homo sapien
gtcctggattgtaagaactggtact

SEQ ID NO: 450092 - DNA, 25 bp, Homo sapien
cctcgtatttaagtcctggattgta

SEQ ID NO: 450093 - DNA, 25 bp, Homo sapien
tggattgtaagaactggtacttccc

SEQ ID NO: 450094 - DNA, 25 bp, Homo sapien
aacacagttagatcttccattccag

SEQ ID NO: 450095 - DNA, 25 bp, Homo sapien
cacagttagatcttccattccagaa

SEQ ID NO: 450096 - DNA, 25 bp, Homo sapien
agcagccaaacacagttagatcttc

SEQ ID NO: 450097 - DNA, 25 bp, Homo sapien
cagcagccaaacacagttagatctt

SEQ ID NO: 450098 - DNA, 25 bp, Homo sapien
aggctggctggtgtataaatatttg

SEQ ID NO: 450099 - DNA, 25 bp, Homo sapien
ctctgtcatgatcccccagggaaaa

SEQ ID NO: 450100 - DNA, 25 bp, Homo sapien
gcctcttactcttgggtgtgtgcag

SEQ ID NO: 450101 - DNA, 25 bp, Homo sapien
ggcactagagcctcttactcttggg

SEQ ID NO: 450102 - DNA, 25 bp, Homo sapien
tgtgctgcatgaaaccccagttagg

SEQ ID NO: 450103 - DNA, 25 bp, Homo sapien
gaatgggcccttcccatgtgctgca

SEQ ID NO: 450104 - DNA, 25 bp, Homo sapien
aagcaagggcgagcttccagaggcc

SEQ ID NO: 450105 - DNA, 25 bp, Homo sapien
cataatcctgttctgtaatgtcgac

SEQ ID NO: 450106 - DNA, 25 bp, Homo sapien
tttgtggtctgagcaggaatatgca

SEQ ID NO: 450107 - DNA, 25 bp, Homo sapien
aaaatcgcaggtgttggtggcccgt

SEQ ID NO: 450108 - DNA, 25 bp, Homo sapien
cactccagggtactcaaacgttata

SEQ ID NO: 450109 - DNA, 25 bp, Homo sapien
cagtttggagttatccactccaggg

SEQ ID NO: 450110 - DNA, 25 bp, Homo sapien
gggtaggctggaaccacctcgtgct

SEQ ID NO: 450111 - DNA, 25 bp, Homo sapien
ctaggaggtgaaactaacacgcagc

SEQ ID NO: 450112 - DNA, 25 bp, Homo sapien
gctggaaccacctcgtgctgtggaa

SEQ ID NO: 450113 - DNA, 25 bp, Homo sapien
aggtgaaactaacacgcagcgggag

SEQ ID NO: 450114 - DNA, 25 bp, Homo sapien
ctcagacacgaagtacgagaggagg

SEQ ID NO: 450115 - DNA, 25 bp, Homo sapien
agacacgaagtacgagaggaggaag

SEQ ID NO: 450116 - DNA, 25 bp, Homo sapien
tcagacacgaagtacgagaggagga

SEQ ID NO: 450117 - DNA, 25 bp, Homo sapien
gcctcagacacgaagtacgagagga

SEQ ID NO: 450118 - DNA, 25 bp, Homo sapien
tgtctgtcctggtgcagaggattcc

SEQ ID NO: 450119 - DNA, 25 bp, Homo sapien
tcacggtgtctgtcctggtgcagag

SEQ ID NO: 450120 - DNA, 25 bp, Homo sapien
gaaggcatcacggtgtctgtcctgg

SEQ ID NO: 450121 - DNA, 25 bp, Homo sapien
ctcatagaaggcatcacggtgtctg

SEQ ID NO: 450122 - DNA, 25 bp, Homo sapien
ggtgatggtgtcccgaactccctct

SEQ ID NO: 450123 - DNA, 25 bp, Homo sapien
gtgtcccgaactccctctccatctg

SEQ ID NO: 450124 - DNA, 25 bp, Homo sapien
agccagttggcctgtagcctcctca

SEQ ID NO: 450125 - DNA, 25 bp, Homo sapien
tccatctggccacaatgcgggcttc

SEQ ID NO: 450126 - DNA, 25 bp, Homo sapien
tccccatgaggatgtgcgtgcctgc

SEQ ID NO: 450127 - DNA, 25 bp, Homo sapien
tggcctcccagtagtcacactctga

SEQ ID NO: 450128 - DNA, 25 bp, Homo sapien
ttggctatatcaagtacccagtagc

SEQ ID NO: 450129 - DNA, 25 bp, Homo sapien
aaattggccacctttctagctagta

SEQ ID NO: 450130 - DNA, 25 bp, Homo sapien
ccagccaaacgtaggtgggcaagag

SEQ ID NO: 450131 - DNA, 25 bp, Homo sapien
gcaagaggaacacggtaggaccaga

SEQ ID NO: 450132 - DNA, 25 bp, Homo sapien
gtgggacatcggctaaagggcctct

SEQ ID NO: 450133 - DNA, 25 bp, Homo sapien
tctcactgcggcttcagcaattctt

SEQ ID NO: 450134 - DNA, 25 bp, Homo sapien
gaatgatgagaaaccagccagtcct

SEQ ID NO: 450135 - DNA, 25 bp, Homo sapien
gaaagaacacatccgacaaggaggg

SEQ ID NO: 450136 - DNA, 25 bp, Homo sapien
tctggaggcattgctcaggacaacc

SEQ ID NO: 450137 - DNA, 25 bp, Homo sapien
taggcaccgtcaacacggatctgga

SEQ ID NO: 450138 - DNA, 25 bp, Homo sapien
cacaaaccacattggaatccaagtg

SEQ ID NO: 450139 - DNA, 25 bp, Homo sapien
tcccacaaaccacattggaatccaa

SEQ ID NO: 450140 - DNA, 25 bp, Homo sapien
gctttctccattattaggcgccaca

SEQ ID NO: 450141 - DNA, 25 bp, Homo sapien
taggcgccacatgaatcattcccac

SEQ ID NO: 450142 - DNA, 25 bp, Homo sapien
catgtgaagatgagatgcagagagg

SEQ ID NO: 450143 - DNA, 25 bp, Homo sapien
ccatgtgaagatgagatgcagagag

SEQ ID NO: 450144 - DNA, 25 bp, Homo sapien
agcaaggaacgggtatctgcggccc

SEQ ID NO: 450145 - DNA, 25 bp, Homo sapien
gcagggccatgaggtaatggactga

SEQ ID NO: 450146 - DNA, 25 bp, Homo sapien
tagacgaattgtcactttagtaagc

SEQ ID NO: 450147 - DNA, 25 bp, Homo sapien
catgaggtaatggactgagaacagg

SEQ ID NO: 450148 - DNA, 25 bp, Homo sapien
tggacttggacgcagccacggtgcc

SEQ ID NO: 450149 - DNA, 25 bp, Homo sapien
actggacttggacgcagccacggtg

SEQ ID NO: 450150 - DNA, 25 bp, Homo sapien
ccgactggacttggacgcagccacg

SEQ ID NO: 450151 - DNA, 25 bp, Homo sapien
cacggtgccgctctgtgcaccgacg

SEQ ID NO: 450152 - DNA, 25 bp, Homo sapien
ggacgggtctggcttcagcgtctgg

SEQ ID NO: 450153 - DNA, 25 bp, Homo sapien
ggtcaggtgaatgaatgacttccaa

SEQ ID NO: 450154 - DNA, 25 bp, Homo sapien
cgggtctggcttcagcgtctggtca

SEQ ID NO: 450155 - DNA, 25 bp, Homo sapien
ggtggggacgggtctggcttcagcg

SEQ ID NO: 450156 - DNA, 25 bp, Homo sapien
ctgcaaacaggtccaatttcaattc

SEQ ID NO: 450157 - DNA, 25 bp, Homo sapien
caaacaggtccaatttcaattccag

SEQ ID NO: 450158 - DNA, 25 bp, Homo sapien
ttcaattccagatgcaggaagctga

SEQ ID NO: 450159 - DNA, 25 bp, Homo sapien
gtccaatttcaattccagatgcagg

SEQ ID NO: 450160 - DNA, 25 bp, Homo sapien
tttgctgattccaactgtgcttagc

SEQ ID NO: 450161 - DNA, 25 bp, Homo sapien
tgctgattccaactgtgcttagcaa

SEQ ID NO: 450162 - DNA, 25 bp, Homo sapien
atgtttgctgattccaactgtgctt

SEQ ID NO: 450163 - DNA, 25 bp, Homo sapien
gtttgctgattccaactgtgcttag

SEQ ID NO: 450164 - DNA, 25 bp, Homo sapien
caactgagatcctctttcctccggt

SEQ ID NO: 450165 - DNA, 25 bp, Homo sapien
gatgcagtcccagttatggcatgac

SEQ ID NO: 450166 - DNA, 25 bp, Homo sapien
atgactttagcggtgtcttcccgag

SEQ ID NO: 450167 - DNA, 25 bp, Homo sapien
tgtccgaatgtactgggaagcagca

SEQ ID NO: 450168 - DNA, 25 bp, Homo sapien
tgagaaccttctttacccaagatta

SEQ ID NO: 450169 - DNA, 25 bp, Homo sapien
cttcttgaaaatgagctgagaacct

SEQ ID NO: 450170 - DNA, 25 bp, Homo sapien
gccctaaggcaggaatttgcaagtc

SEQ ID NO: 450171 - DNA, 25 bp, Homo sapien
ttacaagttgggttggtgatgaaag

SEQ ID NO: 450172 - DNA, 25 bp, Homo sapien
tcttgtttatctttggcctggccct

SEQ ID NO: 450173 - DNA, 25 bp, Homo sapien
tttatctttggcctggccctgaaaa

SEQ ID NO: 450174 - DNA, 25 bp, Homo sapien
gcctggccctgaaaagtggttaata

SEQ ID NO: 450175 - DNA, 25 bp, Homo sapien
ttggcctggccctgaaaagtggtta

SEQ ID NO: 450176 - DNA, 25 bp, Homo sapien
atcattctttccatatcggccttcc

SEQ ID NO: 450177 - DNA, 25 bp, Homo sapien
catcattctttccatatcggccttc

SEQ ID NO: 450178 - DNA, 25 bp, Homo sapien
tcatcattctttccatatcggcctt

SEQ ID NO: 450179 - DNA, 25 bp, Homo sapien
gcacgacaagacatgaggaagttct

SEQ ID NO: 450180 - DNA, 25 bp, Homo sapien
tgccccactgttcggcacgacaaga

SEQ ID NO: 450181 - DNA, 25 bp, Homo sapien
ggaaagcgcactggaattcctgagc

SEQ ID NO: 450182 - DNA, 25 bp, Homo sapien
ggaagttcttgtggaaagcgcactg

SEQ ID NO: 450183 - DNA, 25 bp, Homo sapien
ctacttctcaagattcccctcttct

SEQ ID NO: 450184 - DNA, 25 bp, Homo sapien
tcttctgcaggtgccagagacttgg

SEQ ID NO: 450185 - DNA, 25 bp, Homo sapien
tggaagtactttggggctgctagct

SEQ ID NO: 450186 - DNA, 25 bp, Homo sapien
ccagagacttggagtcttccctctt

SEQ ID NO: 450187 - DNA, 25 bp, Homo sapien
aaaggaggcccttaccggctggatg

SEQ ID NO: 450188 - DNA, 25 bp, Homo sapien
gatgcagttcccgaagaggtcaaga

SEQ ID NO: 450189 - DNA, 25 bp, Homo sapien
gatgcaggccatacggtgtaccagg

SEQ ID NO: 450190 - DNA, 25 bp, Homo sapien
gaggtcagtgctcccatcacattta

SEQ ID NO: 450191 - DNA, 25 bp, Homo sapien
caatgataacatttggtttccctta

SEQ ID NO: 450192 - DNA, 25 bp, Homo sapien
taagtatagcatcttaatccgtgaa

SEQ ID NO: 450193 - DNA, 25 bp, Homo sapien
gaatcatcctcttgacttcatcatt

SEQ ID NO: 450194 - DNA, 25 bp, Homo sapien
gcattccatattcccagattttcca

SEQ ID NO: 450195 - DNA, 25 bp, Homo sapien
tccttggctatggaggtctgatggc

SEQ ID NO: 450196 - DNA, 25 bp, Homo sapien
tgctgtctctcaatctaattagcgg

SEQ ID NO: 450197 - DNA, 25 bp, Homo sapien
gaaagggtagactctgtgaagacct

SEQ ID NO: 450198 - DNA, 25 bp, Homo sapien
gatggctgggctttaatttaccata

SEQ ID NO: 450199 - DNA, 25 bp, Homo sapien
ggtttatctaactcagaagcccgtg

SEQ ID NO: 450200 - DNA, 25 bp, Homo sapien
aatgcttataggtgccagacaggca

SEQ ID NO: 450201 - DNA, 25 bp, Homo sapien
tcaggtgaacaggaagttgtgcccc

SEQ ID NO: 450202 - DNA, 25 bp, Homo sapien
gtttgtatgcctcttccccatgtgg

SEQ ID NO: 450203 - DNA, 25 bp, Homo sapien
ctggaagagcagctgtgtgcacagc

SEQ ID NO: 450204 - DNA, 25 bp, Homo sapien
ccatggaaagaacatctggaagagc

SEQ ID NO: 450205 - DNA, 25 bp, Homo sapien
gtgtgcacagcccagagccagctgg

SEQ ID NO: 450206 - DNA, 25 bp, Homo sapien
ctgccatggaaagaacatctggaag

SEQ ID NO: 450207 - DNA, 25 bp, Homo sapien
atgtactccctcacattgccactga

SEQ ID NO: 450208 - DNA, 25 bp, Homo sapien
gacctatattgcaatcacatctgct

SEQ ID NO: 450209 - DNA, 25 bp, Homo sapien
acctgctttggcctacttatcctag

SEQ ID NO: 450210 - DNA, 25 bp, Homo sapien
actgagccctcacaacacagcggtt

SEQ ID NO: 450211 - DNA, 25 bp, Homo sapien
ctcatggattacgtattagtctgtt

SEQ ID NO: 450212 - DNA, 25 bp, Homo sapien
catcacggtggaaggtgagaggcat

SEQ ID NO: 450213 - DNA, 25 bp, Homo sapien
ggaactctcatggattacgtattag

SEQ ID NO: 450214 - DNA, 25 bp, Homo sapien
gatggaactctcatggattacgtat

SEQ ID NO: 450215 - DNA, 25 bp, Homo sapien
ctctccttggtttgactcctgtctg

SEQ ID NO: 450216 - DNA, 25 bp, Homo sapien
tcctgcttctcctaacccggtagtg

SEQ ID NO: 450217 - DNA, 25 bp, Homo sapien
tctcagaaattagaagcatgtttac

SEQ ID NO: 450218 - DNA, 25 bp, Homo sapien
tactcctgcttctgcgaaaatcctt

SEQ ID NO: 450219 - DNA, 25 bp, Homo sapien
tccctgctgatcgacacaggagttt

SEQ ID NO: 450220 - DNA, 25 bp, Homo sapien
ggcgcgatctccctgctgatcgaca

SEQ ID NO: 450221 - DNA, 25 bp, Homo sapien
cagtcagtatagtgcattacaaccc

SEQ ID NO: 450222 - DNA, 25 bp, Homo sapien
tacccagtcagtatagtgcattaca

SEQ ID NO: 450223 - DNA, 25 bp, Homo sapien
catgtgttacccctcatgtggctga

SEQ ID NO: 450224 - DNA, 25 bp, Homo sapien
cagaagtggaattgaatcccagcct

SEQ ID NO: 450225 - DNA, 25 bp, Homo sapien
tactgtcctgaattgtgaactgaga

SEQ ID NO: 450226 - DNA, 25 bp, Homo sapien
attaaataaccattaggtgccaggc

SEQ ID NO: 450227 - DNA, 25 bp, Homo sapien
ggtttcgccatgtacaattcactgg

SEQ ID NO: 450228 - DNA, 25 bp, Homo sapien
tttttagggcaaagtcatattctgt

SEQ ID NO: 450229 - DNA, 25 bp, Homo sapien
ctctcagaccctggtaaactctact

SEQ ID NO: 450230 - DNA, 25 bp, Homo sapien
tagggcaaagtcatattctgttgta

SEQ ID NO: 450231 - DNA, 25 bp, Homo sapien
gtatatgtgctgccgaagcaagcac

SEQ ID NO: 450232 - DNA, 25 bp, Homo sapien
ggaggggtcatgctaatcttctttg

SEQ ID NO: 450233 - DNA, 25 bp, Homo sapien
tgcatgtcatccttgaggaggggtc

SEQ ID NO: 450234 - DNA, 25 bp, Homo sapien
tatcattccaattttagtatatgtg

SEQ ID NO: 450235 - DNA, 25 bp, Homo sapien
tgtcaagggacaccactgaaactga

SEQ ID NO: 450236 - DNA, 25 bp, Homo sapien
gaaactgatctcaaacagcgacgag

SEQ ID NO: 450237 - DNA, 25 bp, Homo sapien
caaacgggaggtcgaatacattgcc

SEQ ID NO: 450238 - DNA, 25 bp, Homo sapien
gacgagagatccgtgcaggcacagc

SEQ ID NO: 450239 - DNA, 25 bp, Homo sapien
ttcttcagatttgcctctaggccca

SEQ ID NO: 450240 - DNA, 25 bp, Homo sapien
taatttgagtgtaaactcaggagcc

SEQ ID NO: 450241 - DNA, 25 bp, Homo sapien
atttgagtgtaaactcaggagccta

SEQ ID NO: 450242 - DNA, 25 bp, Homo sapien
tgagtgtaaactcaggagcctattc

SEQ ID NO: 450243 - DNA, 25 bp, Homo sapien
gatctcttcagctcattcttgctca

SEQ ID NO: 450244 - DNA, 25 bp, Homo sapien
gctcagttttggcttgctgccatcc

SEQ ID NO: 450245 - DNA, 25 bp, Homo sapien
gctgccatccactttcacctcagcc

SEQ ID NO: 450246 - DNA, 25 bp, Homo sapien
ttcttggctttcagggatctcttca

SEQ ID NO: 450247 - DNA, 25 bp, Homo sapien
ctgtggcctggtttaactttctcac

SEQ ID NO: 450248 - DNA, 25 bp, Homo sapien
gtcagtggtatggttggtgacagca

SEQ ID NO: 450249 - DNA, 25 bp, Homo sapien
ctgtcagtggtatggttggtgacag

SEQ ID NO: 450250 - DNA, 25 bp, Homo sapien
tgtcagtggtatggttggtgacagc

SEQ ID NO: 450251 - DNA, 25 bp, Homo sapien
ctgggattcaccatgacttgcaact

SEQ ID NO: 450252 - DNA, 25 bp, Homo sapien
gggtgttccccattgacattcagtt

SEQ ID NO: 450253 - DNA, 25 bp, Homo sapien
aactgcctgactatggatcttgtag

SEQ ID NO: 450254 - DNA, 25 bp, Homo sapien
ggtcatagaagatgaactttccctc

SEQ ID NO: 450255 - DNA, 25 bp, Homo sapien
tgcagtttcttactaatatgaataa

SEQ ID NO: 450256 - DNA, 25 bp, Homo sapien
ttgatgcagtttcttactaatatga

SEQ ID NO: 450257 - DNA, 25 bp, Homo sapien
tgatgcagtttcttactaatatgaa

SEQ ID NO: 450258 - DNA, 25 bp, Homo sapien
gatgcagtttcttactaatatgaat

SEQ ID NO: 450259 - DNA, 25 bp, Homo sapien
taacatatgcatgtggggagacagc

SEQ ID NO: 450260 - DNA, 25 bp, Homo sapien
gtatcaagtccaagtatttctgatg

SEQ ID NO: 450261 - DNA, 25 bp, Homo sapien
aatcatttagtatcaagtccaagta

SEQ ID NO: 450262 - DNA, 25 bp, Homo sapien
tatttctgatgataccttgtttcct

SEQ ID NO: 450263 - DNA, 25 bp, Homo sapien
gtccagcgcattgtcataagtgatg

SEQ ID NO: 450264 - DNA, 25 bp, Homo sapien
cttatgatagagttccggagcaatt

SEQ ID NO: 450265 - DNA, 25 bp, Homo sapien
tatgatagagttccggagcaattct

SEQ ID NO: 450266 - DNA, 25 bp, Homo sapien
tgatagagttccggagcaattctca

SEQ ID NO: 450267 - DNA, 25 bp, Homo sapien
gatagagttccggagcaattctcat

SEQ ID NO: 450268 - DNA, 25 bp, Homo sapien
tttccaagagattgtggtagtctgc

SEQ ID NO: 450269 - DNA, 25 bp, Homo sapien
tgcttggtgccaccaaccactagca

SEQ ID NO: 450270 - DNA, 25 bp, Homo sapien
tccagtttcataaatctgcttggtg

SEQ ID NO: 450271 - DNA, 25 bp, Homo sapien
agagattgtggtagtctgcataggc

SEQ ID NO: 450272 - DNA, 25 bp, Homo sapien
ttgtaactgcctgtaatatgcttta

SEQ ID NO: 450273 - DNA, 25 bp, Homo sapien
tgtaactgcctgtaatatgctttac

SEQ ID NO: 450274 - DNA, 25 bp, Homo sapien
cttgtaactgcctgtaatatgcttt

SEQ ID NO: 450275 - DNA, 25 bp, Homo sapien
ggtggggtgaagtcagtatcatagg

SEQ ID NO: 450276 - DNA, 25 bp, Homo sapien
ataggcctggccctatgggccatct

SEQ ID NO: 450277 - DNA, 25 bp, Homo sapien
gggtgaagtcagtatcataggcctg

SEQ ID NO: 450278 - DNA, 25 bp, Homo sapien
aagtcagtatcataggcctggccct

SEQ ID NO: 450279 - DNA, 25 bp, Homo sapien
caagttcttctaccatgctgattct

SEQ ID NO: 450280 - DNA, 25 bp, Homo sapien
gaactcccctacaagcttgtcaagg

SEQ ID NO: 450281 - DNA, 25 bp, Homo sapien
tgccacacagatatcattaagaagt

SEQ ID NO: 450282 - DNA, 25 bp, Homo sapien
tggtccaaggtagagggcattcaac

SEQ ID NO: 450283 - DNA, 25 bp, Homo sapien
tggatgatcacagattaatgtagga

SEQ ID NO: 450284 - DNA, 25 bp, Homo sapien
agagcggtgccatttgccatagcgc

SEQ ID NO: 450285 - DNA, 25 bp, Homo sapien
ttaggcatcgcttatctctttcttc

SEQ ID NO: 450286 - DNA, 25 bp, Homo sapien
cagctcaaagtgcttggacagattc

SEQ ID NO: 450287 - DNA, 25 bp, Homo sapien
tggacagattctctttagagcggtg

SEQ ID NO: 450288 - DNA, 25 bp, Homo sapien
gttgttcaaaaacccgctgctgcgg

SEQ ID NO: 450289 - DNA, 25 bp, Homo sapien
gaaaaatggtgacttggtcaatgcc

SEQ ID NO: 450290 - DNA, 25 bp, Homo sapien
cttggctttggcctgttgttcaaaa

SEQ ID NO: 450291 - DNA, 25 bp, Homo sapien
ggtcaatgcccatgcctgtacgtat

SEQ ID NO: 450292 - DNA, 25 bp, Homo sapien
ttgggttttatagcaggaaatagaa

SEQ ID NO: 450293 - DNA, 25 bp, Homo sapien
tgccagctgttgtgctttccagcat

SEQ ID NO: 450294 - DNA, 25 bp, Homo sapien
ccagctgttgtgctttccagcatat

SEQ ID NO: 450295 - DNA, 25 bp, Homo sapien
aatagaagtacttccttgatgttgt

SEQ ID NO: 450296 - DNA, 25 bp, Homo sapien
gctgaatggaactgtggtagtcaaa

SEQ ID NO: 450297 - DNA, 25 bp, Homo sapien
ttgcagatgtgcaaagatgcttgac

SEQ ID NO: 450298 - DNA, 25 bp, Homo sapien
aactgtggtagtcaaatggaaagca

SEQ ID NO: 450299 - DNA, 25 bp, Homo sapien
cttctgatggctgaatggaactgtg

SEQ ID NO: 450300 - DNA, 25 bp, Homo sapien
tggcagcctgtggttgacccaagct

SEQ ID NO: 450301 - DNA, 25 bp, Homo sapien
ttgaacacggtctcatcagttggca

SEQ ID NO: 450302 - DNA, 25 bp, Homo sapien
gcctgtggttgacccaagctcagct

SEQ ID NO: 450303 - DNA, 25 bp, Homo sapien
agttggcagcctgtggttgacccaa

SEQ ID NO: 450304 - DNA, 25 bp, Homo sapien
gcttctactcctcggggcacccgga

SEQ ID NO: 450305 - DNA, 25 bp, Homo sapien
acggcggcccggcctcgcggcgcat

SEQ ID NO: 450306 - DNA, 25 bp, Homo sapien
gccacggcggcccggcctcgcggcg

SEQ ID NO: 450307 - DNA, 25 bp, Homo sapien
gcaatcccggcttctactcctcggg

SEQ ID NO: 450308 - DNA, 25 bp, Homo sapien
ccgggctgagtctactgagccggcc

SEQ ID NO: 450309 - DNA, 25 bp, Homo sapien
gtgcctgcacgggacgccgctcgat

SEQ ID NO: 450310 - DNA, 25 bp, Homo sapien
tttccggcggactcggctaggtgcc

SEQ ID NO: 450311 - DNA, 25 bp, Homo sapien
tcacggactgcgaggcgcttgccag

SEQ ID NO: 450312 - DNA, 25 bp, Homo sapien
tctgaagccgaatacagggaaagct

SEQ ID NO: 450313 - DNA, 25 bp, Homo sapien
ggaaagctccctatacttactgggc

SEQ ID NO: 450314 - DNA, 25 bp, Homo sapien
tctgaagagtcacaccgacaaatgc

SEQ ID NO: 450315 - DNA, 25 bp, Homo sapien
caagttcttccgctggatgcccaaa

SEQ ID NO: 450316 - DNA, 25 bp, Homo sapien
ggtcaagcactatgaggccaaatca

SEQ ID NO: 450317 - DNA, 25 bp, Homo sapien
tagtaatcaaggcttctagacacgc

SEQ ID NO: 450318 - DNA, 25 bp, Homo sapien
tctcgaattaaagccaagatggccc

SEQ ID NO: 450319 - DNA, 25 bp, Homo sapien
caaagctctctgattggtgccgggt

SEQ ID NO: 450320 - DNA, 25 bp, Homo sapien
agggaatttcctcaagcttacagag

SEQ ID NO: 450321 - DNA, 25 bp, Homo sapien
tcctcaagcttacagagtaataaaa

SEQ ID NO: 450322 - DNA, 25 bp, Homo sapien
gaatttcctcaagcttacagagtaa

SEQ ID NO: 450323 - DNA, 25 bp, Homo sapien
gactttgaagggtgccgagtgaagg

SEQ ID NO: 450324 - DNA, 25 bp, Homo sapien
gcactttggatatagtgctcagcca

SEQ ID NO: 450325 - DNA, 25 bp, Homo sapien
cagtgtgtgaggcactttggatata

SEQ ID NO: 450326 - DNA, 25 bp, Homo sapien
ggatatagtgctcagccagaccatc

SEQ ID NO: 450327 - DNA, 25 bp, Homo sapien
gaccatccttctgaagcttaggctc

SEQ ID NO: 450328 - DNA, 25 bp, Homo sapien
cagccaaatgtagagacgcataggg

SEQ ID NO: 450329 - DNA, 25 bp, Homo sapien
taaagagactcctatttgtgccagg

SEQ ID NO: 450330 - DNA, 25 bp, Homo sapien
taaagggtactaggcaggaacagcc

SEQ ID NO: 450331 - DNA, 25 bp, Homo sapien
caaactgaagagtgttcgcaaaggc

SEQ ID NO: 450332 - DNA, 25 bp, Homo sapien
cggagggcaaccccagcagcaaagg

SEQ ID NO: 450333 - DNA, 25 bp, Homo sapien
tgcagctgttccccccggagggcaa

SEQ ID NO: 450334 - DNA, 25 bp, Homo sapien
ttgcctgcaggcaaactagagtcct

SEQ ID NO: 450335 - DNA, 25 bp, Homo sapien
tcaggggcatgttgtgttgcctgca

SEQ ID NO: 450336 - DNA, 25 bp, Homo sapien
cctgcagatctttgagcgttaagac

SEQ ID NO: 450337 - DNA, 25 bp, Homo sapien
tcttctaccatacagggtcctgcag

SEQ ID NO: 450338 - DNA, 25 bp, Homo sapien
gaaagacttcgtgagctggtcctga

SEQ ID NO: 450339 - DNA, 25 bp, Homo sapien
tggccaatgccagtgtgttatctat

SEQ ID NO: 450340 - DNA, 25 bp, Homo sapien
ttaaatccataagtggcacaaactg

SEQ ID NO: 450341 - DNA, 25 bp, Homo sapien
gggccaattcagttcagggtgatat

SEQ ID NO: 450342 - DNA, 25 bp, Homo sapien
gacatttccagattggctggacagg

SEQ ID NO: 450343 - DNA, 25 bp, Homo sapien
gaatcccattcaaggtgccagttct

SEQ ID NO: 450344 - DNA, 25 bp, Homo sapien
tggagactcctcctagtgtcacaac

SEQ ID NO: 450345 - DNA, 25 bp, Homo sapien
tcaaagtccatggaacggttgtgac

SEQ ID NO: 450346 - DNA, 25 bp, Homo sapien
catctgtgagggatgtatgacacct

SEQ ID NO: 450347 - DNA, 25 bp, Homo sapien
gtgacttccaactatccctgtcttg

SEQ ID NO: 450348 - DNA, 25 bp, Homo sapien
gctattttaatagagcacaataaag

SEQ ID NO: 450349 - DNA, 25 bp, Homo sapien
taattggagtgatcccttgtaaata

SEQ ID NO: 450350 - DNA, 25 bp, Homo sapien
tgtaaatataacctagatctccttg

SEQ ID NO: 450351 - DNA, 25 bp, Homo sapien
tagaaaagacggacatgtagtaatt

SEQ ID NO: 450352 - DNA, 25 bp, Homo sapien
tcaggtgttcctgatgcaggtggtc

SEQ ID NO: 450353 - DNA, 25 bp, Homo sapien
tgttgtgaagccatcacctctatcc

SEQ ID NO: 450354 - DNA, 25 bp, Homo sapien
gctggctaaacatgcaagctttgaa

SEQ ID NO: 450355 - DNA, 25 bp, Homo sapien
catgagatggggctctagaatctgc

SEQ ID NO: 450356 - DNA, 25 bp, Homo sapien
tccactcccttaccagttttgggca

SEQ ID NO: 450357 - DNA, 25 bp, Homo sapien
gcacagtgacaagtagagagagtcc

SEQ ID NO: 450358 - DNA, 25 bp, Homo sapien
ctgcagaattaggaagtccactccc

SEQ ID NO: 450359 - DNA, 25 bp, Homo sapien
cccttaccagttttgggcacagtga

SEQ ID NO: 450360 - DNA, 25 bp, Homo sapien
tgggttgaggtctccttcagcgttc

SEQ ID NO: 450361 - DNA, 25 bp, Homo sapien
gaggtctccttcagcgttccctcag

SEQ ID NO: 450362 - DNA, 25 bp, Homo sapien
cctcagcatatagctttaacttagc

SEQ ID NO: 450363 - DNA, 25 bp, Homo sapien
cttcagcgttccctcagcatatagc

SEQ ID NO: 450364 - DNA, 25 bp, Homo sapien
tatcgtgaggctggccatatttggc

SEQ ID NO: 450365 - DNA, 25 bp, Homo sapien
tgcttctccaacattatcgtgaggc

SEQ ID NO: 450366 - DNA, 25 bp, Homo sapien
caacattatcgtgaggctggccata

SEQ ID NO: 450367 - DNA, 25 bp, Homo sapien
ttctccaacattatcgtgaggctgg

SEQ ID NO: 450368 - DNA, 25 bp, Homo sapien
cgggagcctggcacgttttaactgg

SEQ ID NO: 450369 - DNA, 25 bp, Homo sapien
tggctccctccggttcagcaatgga

SEQ ID NO: 450370 - DNA, 25 bp, Homo sapien
gagcctcagctagggagaaatcttg

SEQ ID NO: 450371 - DNA, 25 bp, Homo sapien
taagaggcccgtgtgactaggttag

SEQ ID NO: 450372 - DNA, 25 bp, Homo sapien
aaagcagaggatgtgccttgacaga

SEQ ID NO: 450373 - DNA, 25 bp, Homo sapien
aaatcagctaaatcactccttccct

SEQ ID NO: 450374 - DNA, 25 bp, Homo sapien
aatcagctaaatcactccttccctg

SEQ ID NO: 450375 - DNA, 25 bp, Homo sapien
atcagctaaatcactccttccctgg

SEQ ID NO: 450376 - DNA, 25 bp, Homo sapien
gattatggagtagctcaggaagtcc

SEQ ID NO: 450377 - DNA, 25 bp, Homo sapien
taatgggctgtacatggcttgtgtt

SEQ ID NO: 450378 - DNA, 25 bp, Homo sapien
tagcctgcaagcctctagctctgac

SEQ ID NO: 450379 - DNA, 25 bp, Homo sapien
catgcacctgtgtgtactgtccctg

SEQ ID NO: 450380 - DNA, 25 bp, Homo sapien
tgccacggtggagggcgaatggaca

SEQ ID NO: 450381 - DNA, 25 bp, Homo sapien
cgaatggacagcagtagcccagagc

SEQ ID NO: 450382 - DNA, 25 bp, Homo sapien
tgggcaccaaagtagatgctagtgt

SEQ ID NO: 450383 - DNA, 25 bp, Homo sapien
agatctgaccgatagctggccacct

SEQ ID NO: 450384 - DNA, 25 bp, Homo sapien
ccaggaagcagactccggtttcatg

SEQ ID NO: 450385 - DNA, 25 bp, Homo sapien
gcagactccggtttcatggaaagaa

SEQ ID NO: 450386 - DNA, 25 bp, Homo sapien
aggaagcagactccggtttcatgga

SEQ ID NO: 450387 - DNA, 25 bp, Homo sapien
aagcagactccggtttcatggaaag

SEQ ID NO: 450388 - DNA, 25 bp, Homo sapien
ggacgttctctttgctgtcgtgaca

SEQ ID NO: 450389 - DNA, 25 bp, Homo sapien
cgtgacacaggagcatagagagaga

SEQ ID NO: 450390 - DNA, 25 bp, Homo sapien
gaaggtgtgccaggccgatgggcct

SEQ ID NO: 450391 - DNA, 25 bp, Homo sapien
agaggtagaaggtgtgccaggccga

SEQ ID NO: 450392 - DNA, 25 bp, Homo sapien
aatagctcccgtatctctccgcaat

SEQ ID NO: 450393 - DNA, 25 bp, Homo sapien
ccctccgcggagtgtgcttcggcat

SEQ ID NO: 450394 - DNA, 25 bp, Homo sapien
tccctccgcggagtgtgcttcggct

SEQ ID NO: 450395 - DNA, 25 bp, Homo sapien
tctgcctctaacaagtgtgcttcgg

SEQ ID NO: 450396 - DNA, 25 bp, Homo sapien
tgagtcactgctaacacctagactt

SEQ ID NO: 450397 - DNA, 25 bp, Homo sapien
gctgagtcactgctaacacctagac

SEQ ID NO: 450398 - DNA, 25 bp, Homo sapien
agtcactgctaacacctagacttac

SEQ ID NO: 450399 - DNA, 25 bp, Homo sapien
gagtcactgctaacacctagactta

SEQ ID NO: 450400 - DNA, 25 bp, Homo sapien
ccttgtttctgttttaatttgcctg

SEQ ID NO: 450401 - DNA, 25 bp, Homo sapien
cttgtttctgttttaatttgcctgt

SEQ ID NO: 450402 - DNA, 25 bp, Homo sapien
ctgttttaatttgcctgtttgtttg

SEQ ID NO: 450403 - DNA, 25 bp, Homo sapien
ttatataagcccaactctgagtcct

SEQ ID NO: 450404 - DNA, 25 bp, Homo sapien
ggttctgagagctggtctgagacaa

SEQ ID NO: 450405 - DNA, 25 bp, Homo sapien
ggtctgagacaatagtgcctcttcg

SEQ ID NO: 450406 - DNA, 25 bp, Homo sapien
tgcctcttcgaataacaggcaaata

SEQ ID NO: 450407 - DNA, 25 bp, Homo sapien
acagtggaatactaccttggatcca

SEQ ID NO: 450408 - DNA, 25 bp, Homo sapien
cacccgccgtctccggcttccgccg

SEQ ID NO: 450409 - DNA, 25 bp, Homo sapien
cggggcgcacgtgctgaggctccat

SEQ ID NO: 450410 - DNA, 25 bp, Homo sapien
gcggggcgcacgtgctgaggctcca

SEQ ID NO: 450411 - DNA, 25 bp, Homo sapien
ggcgcgcgaggaggagcccgggcgg

SEQ ID NO: 450412 - DNA, 25 bp, Homo sapien
agctggggacctcatcccgggccat

SEQ ID NO: 450413 - DNA, 25 bp, Homo sapien
tggggacctcatcccgggccatttc

SEQ ID NO: 450414 - DNA, 25 bp, Homo sapien
gcggcggaggaagcgctaacccggc

SEQ ID NO: 450415 - DNA, 25 bp, Homo sapien
cagcggtttgccagcggttcctcgg

SEQ ID NO: 450416 - DNA, 25 bp, Homo sapien
gtgaagccgggaaacggtcctcgca

SEQ ID NO: 450417 - DNA, 25 bp, Homo sapien
ttcctcggggagagcctcgatcagc

SEQ ID NO: 450418 - DNA, 25 bp, Homo sapien
acggtcctcgcagggccgtcgccag

SEQ ID NO: 450419 - DNA, 25 bp, Homo sapien
gaatcaggccgagaaacgtactctg

SEQ ID NO: 450420 - DNA, 25 bp, Homo sapien
cgaacacgttgaccggaacatgggt

SEQ ID NO: 450421 - DNA, 25 bp, Homo sapien
gagtcaaaattcgacgccagggaaa

SEQ ID NO: 450422 - DNA, 25 bp, Homo sapien
tgggaaaacagcatccgaacacgtt

SEQ ID NO: 450423 - DNA, 25 bp, Homo sapien
taggcccaatgacttccccagaatg

SEQ ID NO: 450424 - DNA, 25 bp, Homo sapien
cccagaatgctaaggctgatcgttt

SEQ ID NO: 450425 - DNA, 25 bp, Homo sapien
catccatgcccaccactaaagtatt

SEQ ID NO: 450426 - DNA, 25 bp, Homo sapien
ttaataagtgtactctagcatcccc

SEQ ID NO: 450427 - DNA, 25 bp, Homo sapien
taaggaaccatgcaaagaatactgc

SEQ ID NO: 450428 - DNA, 25 bp, Homo sapien
tactgcaggttgaccaagtacaggc

SEQ ID NO: 450429 - DNA, 25 bp, Homo sapien
gactgaagatgtgtaagtcacagcc

SEQ ID NO: 450430 - DNA, 25 bp, Homo sapien
ttacttaatagagatcctggcccat

SEQ ID NO: 450431 - DNA, 25 bp, Homo sapien
caagaagtgtctaagctgaagcgct

SEQ ID NO: 450432 - DNA, 25 bp, Homo sapien
gaagcgctaaccgagattgcctgga

SEQ ID NO: 450433 - DNA, 25 bp, Homo sapien
ttcagaaagagcgatccccttcggc

SEQ ID NO: 450434 - DNA, 25 bp, Homo sapien
gaaaacaatacactcgagccatgcg

SEQ ID NO: 450435 - DNA, 25 bp, Homo sapien
ccagcctcggataggaccagcgcgg

SEQ ID NO: 450436 - DNA, 25 bp, Homo sapien
cggataggaccagcgcgggtagaga

SEQ ID NO: 450437 - DNA, 25 bp, Homo sapien
gaccagcgcgggtagagaggatggg

SEQ ID NO: 450438 - DNA, 25 bp, Homo sapien
cctcggataggaccagcgcgggtag

SEQ ID NO: 450439 - DNA, 25 bp, Homo sapien
ggtagacactttgcggatcagtttc

SEQ ID NO: 450440 - DNA, 25 bp, Homo sapien
gctccgcttcgctgtcagacgaatc

SEQ ID NO: 450441 - DNA, 25 bp, Homo sapien
ggatctgccccgaggtagacacttt

SEQ ID NO: 450442 - DNA, 25 bp, Homo sapien
ttctggggtccctcttgctccgctt

SEQ ID NO: 450443 - DNA, 25 bp, Homo sapien
gcgaacaccatgtcccacttgcctg

SEQ ID NO: 450444 - DNA, 25 bp, Homo sapien
ttaagccgcgaacaccatgtcccac

SEQ ID NO: 450445 - DNA, 25 bp, Homo sapien
tctgccttccagaccgcagcaggag

SEQ ID NO: 450446 - DNA, 25 bp, Homo sapien
caggaaaggctgaccggtgtcacct

SEQ ID NO: 450447 - DNA, 25 bp, Homo sapien
ctgtgcggagacacagaaagtattt

SEQ ID NO: 450448 - DNA, 25 bp, Homo sapien
tgcggagacacagaaagtatttgtc

SEQ ID NO: 450449 - DNA, 25 bp, Homo sapien
tgtgcggagacacagaaagtatttg

SEQ ID NO: 450450 - DNA, 25 bp, Homo sapien
cggagacacagaaagtatttgtctt

SEQ ID NO: 450451 - DNA, 25 bp, Homo sapien
tatactgccttaccataaaggaaca

SEQ ID NO: 450452 - DNA, 25 bp, Homo sapien
ccagcatacttcacctagggtttgt

SEQ ID NO: 450453 - DNA, 25 bp, Homo sapien
tatgacccagtaatgggctgccacc

SEQ ID NO: 450454 - DNA, 25 bp, Homo sapien
aatgctggccatgaaccatatgacc

SEQ ID NO: 450455 - DNA, 25 bp, Homo sapien
gtttcagagcaataaggctgtcagt

SEQ ID NO: 450456 - DNA, 25 bp, Homo sapien
ctgacctggatgtgtgttaattgct

SEQ ID NO: 450457 - DNA, 25 bp, Homo sapien
aatgtaaaagttcctacttgcttct

SEQ ID NO: 450458 - DNA, 25 bp, Homo sapien
catttcatattgagtttcagagcaa

SEQ ID NO: 450459 - DNA, 25 bp, Homo sapien
gcaaaacctgttattaacgcatctc

SEQ ID NO: 450460 - DNA, 25 bp, Homo sapien
ggacttaacctctgccaacagtctt

SEQ ID NO: 450461 - DNA, 25 bp, Homo sapien
catgagctagagattttccccagca

SEQ ID NO: 450462 - DNA, 25 bp, Homo sapien
ggttactccctaggacctgactcga

SEQ ID NO: 450463 - DNA, 25 bp, Homo sapien
taacgctgctacgaacatggtgtag

SEQ ID NO: 450464 - DNA, 25 bp, Homo sapien
tcaaccttagctgcgaatgtgcaca

SEQ ID NO: 450465 - DNA, 25 bp, Homo sapien
cctgacacctgaaaatgcgaccttt

SEQ ID NO: 450466 - DNA, 25 bp, Homo sapien
catgaataaggaagatcgaccctat

SEQ ID NO: 450467 - DNA, 25 bp, Homo sapien
gcagaaacaaggtgacaatgagctt

SEQ ID NO: 450468 - DNA, 25 bp, Homo sapien
ttgtaaaatgtagatagcagtctga

SEQ ID NO: 450469 - DNA, 25 bp, Homo sapien
gccatggtaaccatgatgactggat

SEQ ID NO: 450470 - DNA, 25 bp, Homo sapien
aagctgctgaaacaggtagcagcca

SEQ ID NO: 450471 - DNA, 25 bp, Homo sapien
gaatgctgcccatccccgtgtcgtt

SEQ ID NO: 450472 - DNA, 25 bp, Homo sapien
tagagacgggcaggaatgctgccca

SEQ ID NO: 450473 - DNA, 25 bp, Homo sapien
ctgcattccaggtagagacgggcag

SEQ ID NO: 450474 - DNA, 25 bp, Homo sapien
aggaatgctgcccatccccgtgtcg

SEQ ID NO: 450475 - DNA, 25 bp, Homo sapien
aatattgtcaggctttgtagtggga

SEQ ID NO: 450476 - DNA, 25 bp, Homo sapien
taatgttacactgttgggatctgga

SEQ ID NO: 450477 - DNA, 25 bp, Homo sapien
tcactagaagttgaatctgagtcct

SEQ ID NO: 450478 - DNA, 25 bp, Homo sapien
cctccttgaacaaacgaagtatact

SEQ ID NO: 450479 - DNA, 25 bp, Homo sapien
catatcccactacccatttgttttc

SEQ ID NO: 450480 - DNA, 25 bp, Homo sapien
tatagttagggaactagctgacaca

SEQ ID NO: 450481 - DNA, 25 bp, Homo sapien
tctgctacctttctacaggttttct

SEQ ID NO: 450482 - DNA, 25 bp, Homo sapien
ttcatatcctgctgcccaatttttc

SEQ ID NO: 450483 - DNA, 25 bp, Homo sapien
caggaaagcgtctcaggaggaccca

SEQ ID NO: 450484 - DNA, 25 bp, Homo sapien
gcaggaaagcgtctcaggaggaccc

SEQ ID NO: 450485 - DNA, 25 bp, Homo sapien
aggaaagcgtctcaggaggacccac

SEQ ID NO: 450486 - DNA, 25 bp, Homo sapien
gccacattgtccattggcaggaagg

SEQ ID NO: 450487 - DNA, 25 bp, Homo sapien
aacatctgcgtctgctgggcacacc

SEQ ID NO: 450488 - DNA, 25 bp, Homo sapien
cacttagaatgctgcctacactcca

SEQ ID NO: 450489 - DNA, 25 bp, Homo sapien
ggtccaagcaggtggtcacttagaa

SEQ ID NO: 450490 - DNA, 25 bp, Homo sapien
catgggaaatcagaaatcagttaga

SEQ ID NO: 450491 - DNA, 25 bp, Homo sapien
cataaactccactccaatgatgatt

SEQ ID NO: 450492 - DNA, 25 bp, Homo sapien
tgatggaccagactgatacccctaa

SEQ ID NO: 450493 - DNA, 25 bp, Homo sapien
gtcagttctctggatgggtagacag

SEQ ID NO: 450494 - DNA, 25 bp, Homo sapien
tgaactaccatgcattaccacaagg

SEQ ID NO: 450495 - DNA, 25 bp, Homo sapien
taacgtaccgttacatgcagaaggt

SEQ ID NO: 450496 - DNA, 25 bp, Homo sapien
cacaaggtggcagtggtgctatgct

SEQ ID NO: 450497 - DNA, 25 bp, Homo sapien
cccgtaactggtaaatgcctgaatg

SEQ ID NO: 450498 - DNA, 25 bp, Homo sapien
aatagtttactaggtgctctccatg

SEQ ID NO: 450499 - DNA, 25 bp, Homo sapien
catggcatgtcaagatattatcatc

SEQ ID NO: 450500 - DNA, 25 bp, Homo sapien
cctcttgctattgccttagtttggg

SEQ ID NO: 450501 - DNA, 25 bp, Homo sapien
tcaatatgttcaaggtgtacccatc

SEQ ID NO: 450502 - DNA, 25 bp, Homo sapien
tcaggtgttctaagcaagaaaaatg

SEQ ID NO: 450503 - DNA, 25 bp, Homo sapien
gcactcatgccctctcattccactt

SEQ ID NO: 450504 - DNA, 25 bp, Homo sapien
gccactctttatgtggcataatgag

SEQ ID NO: 450505 - DNA, 25 bp, Homo sapien
gatgacatcatgaagcactcatgcc

SEQ ID NO: 450506 - DNA, 25 bp, Homo sapien
gctttgcatatgtgcaaagccccaa

SEQ ID NO: 450507 - DNA, 25 bp, Homo sapien
cacagctttgcatatgtgcaaagcc

SEQ ID NO: 450508 - DNA, 25 bp, Homo sapien
catatgtgcaaagccccaaagagca

SEQ ID NO: 450509 - DNA, 25 bp, Homo sapien
ccaaagagcaaaagtgaatgtgaca

SEQ ID NO: 450510 - DNA, 25 bp, Homo sapien
cacctttggaaagaactggtttgct

SEQ ID NO: 450511 - DNA, 25 bp, Homo sapien
gaagtttgaagtatcgctttttcca

SEQ ID NO: 450512 - DNA, 25 bp, Homo sapien
gcatagtaaagggtgcggcctcgaa

SEQ ID NO: 450513 - DNA, 25 bp, Homo sapien
aatagctgtccctctttaatactgg

SEQ ID NO: 450514 - DNA, 25 bp, Homo sapien
ctagcatctgagaggtcaacttcat

SEQ ID NO: 450515 - DNA, 25 bp, Homo sapien
ttcgtgcttgcttcagctacactag

SEQ ID NO: 450516 - DNA, 25 bp, Homo sapien
cgtgaagctgttgttagcatttttc

SEQ ID NO: 450517 - DNA, 25 bp, Homo sapien
tctgagaggtcaacttcatcaaata

SEQ ID NO: 450518 - DNA, 25 bp, Homo sapien
ctactctttgtactgtagtctcaaa

SEQ ID NO: 450519 - DNA, 25 bp, Homo sapien
actctttgtactgtagtctcaaaaa

SEQ ID NO: 450520 - DNA, 25 bp, Homo sapien
tactctttgtactgtagtctcaaaa

SEQ ID NO: 450521 - DNA, 25 bp, Homo sapien
agcacctaaagctgagtctgctctg

SEQ ID NO: 450522 - DNA, 25 bp, Homo sapien
caatgacagtatcagctcaggacca

SEQ ID NO: 450523 - DNA, 25 bp, Homo sapien
gcactctgcatagcttagaagcctc

SEQ ID NO: 450524 - DNA, 25 bp, Homo sapien
cacagtgacgtctaggtaaattcca

SEQ ID NO: 450525 - DNA, 25 bp, Homo sapien
catctatttggagtctgtaaaaggc

SEQ ID NO: 450526 - DNA, 25 bp, Homo sapien
atgagacaagccattgtcttttaca

SEQ ID NO: 450527 - DNA, 25 bp, Homo sapien
gagacaagccattgtcttttacaga

SEQ ID NO: 450528 - DNA, 25 bp, Homo sapien
gacaagccattgtcttttacagagt

SEQ ID NO: 450529 - DNA, 25 bp, Homo sapien
caagccattgtcttttacagagttt

SEQ ID NO: 450530 - DNA, 25 bp, Homo sapien
taaaaattgtactaccatttgacac

SEQ ID NO: 450531 - DNA, 25 bp, Homo sapien
ctaaaaattgtactaccatttgaca

SEQ ID NO: 450532 - DNA, 25 bp, Homo sapien
tcctggctctaatgactggcacagc

SEQ ID NO: 450533 - DNA, 25 bp, Homo sapien
cattacttaggagccaaatggatgc

SEQ ID NO: 450534 - DNA, 25 bp, Homo sapien
tgcagcagagaggtaccattaaatc

SEQ ID NO: 450535 - DNA, 25 bp, Homo sapien
ggacagctcatgagatgcagcagag

SEQ ID NO: 450536 - DNA, 25 bp, Homo sapien
tccacgaccctctttggataaagct

SEQ ID NO: 450537 - DNA, 25 bp, Homo sapien
cagtcagctctggatatttgttaat

SEQ ID NO: 450538 - DNA, 25 bp, Homo sapien
gaagaggagcaccaatcagtcagct

SEQ ID NO: 450539 - DNA, 25 bp, Homo sapien
cagccaaaagtcacatggaagagga

SEQ ID NO: 450540 - DNA, 25 bp, Homo sapien
agtcattgccgcctctcatttgtca

SEQ ID NO: 450541 - DNA, 25 bp, Homo sapien
gctacagaatccttccttaaaccca

SEQ ID NO: 450542 - DNA, 25 bp, Homo sapien
tgggtttaggctacagaatccttcc

SEQ ID NO: 450543 - DNA, 25 bp, Homo sapien
ctcatttgtcatgggtttaggctac

SEQ ID NO: 450544 - DNA, 25 bp, Homo sapien
taaggctatggacccaaatacacaa

SEQ ID NO: 450545 - DNA, 25 bp, Homo sapien
tctaaggctatggacccaaatacac

SEQ ID NO: 450546 - DNA, 25 bp, Homo sapien
gctatggacccaaatacacaatgca

SEQ ID NO: 450547 - DNA, 25 bp, Homo sapien
ttttctaaggctatggacccaaata

SEQ ID NO: 450548 - DNA, 25 bp, Homo sapien
tcctttctgttctcagcacacagca

SEQ ID NO: 450549 - DNA, 25 bp, Homo sapien
cctttctgttctcagcacacagcat

SEQ ID NO: 450550 - DNA, 25 bp, Homo sapien
ctcctttctgttctcagcacacagc

SEQ ID NO: 450551 - DNA, 25 bp, Homo sapien
gggttctctggtctgtacagacttc

SEQ ID NO: 450552 - DNA, 25 bp, Homo sapien
ctcgtagggttctctggtctgtaca

SEQ ID NO: 450553 - DNA, 25 bp, Homo sapien
tcagtgagctgatccaatcctccat

SEQ ID NO: 450554 - DNA, 25 bp, Homo sapien
tggtctgtacagacttcagtgagct

SEQ ID NO: 450555 - DNA, 25 bp, Homo sapien
catgggaggtgactccagaaagact

SEQ ID NO: 450556 - DNA, 25 bp, Homo sapien
ggcgtgggagcaggcgtaccagttg

SEQ ID NO: 450557 - DNA, 25 bp, Homo sapien
tgcacacgttacagaaggtgggtcg

SEQ ID NO: 450558 - DNA, 25 bp, Homo sapien
aatgttccacattaaactgggccac

SEQ ID NO: 450559 - DNA, 25 bp, Homo sapien
ggccagggtagtccatttacagtta

SEQ ID NO: 450560 - DNA, 25 bp, Homo sapien
gttgctctcactgcacatcttttgt

SEQ ID NO: 450561 - DNA, 25 bp, Homo sapien
cttttgtgagccttgaatttacaca

SEQ ID NO: 450562 - DNA, 25 bp, Homo sapien
tataatgtccttcccgatggaggcc

SEQ ID NO: 450563 - DNA, 25 bp, Homo sapien
cattgtcttacaccaaaggcatttc

SEQ ID NO: 450564 - DNA, 25 bp, Homo sapien
gaacactgccacatgttttgtcgca

SEQ ID NO: 450565 - DNA, 25 bp, Homo sapien
aggttgccctcaagccactggtgag

SEQ ID NO: 450566 - DNA, 25 bp, Homo sapien
gacagcacacttggcacttacaggc

SEQ ID NO: 450567 - DNA, 25 bp, Homo sapien
tacctaatgctaaatgatgagttaa

SEQ ID NO: 450568 - DNA, 25 bp, Homo sapien
catcggaatcggtgctgtttagtgc

SEQ ID NO: 450569 - DNA, 25 bp, Homo sapien
cattgaccaagtggacatattggat

SEQ ID NO: 450570 - DNA, 25 bp, Homo sapien
ggtataaatctttgcaggcagtgtg

SEQ ID NO: 450571 - DNA, 25 bp, Homo sapien
tgcaattggaggtatgatagatact

SEQ ID NO: 450572 - DNA, 25 bp, Homo sapien
tgagccggatttagcaactgtttaa

SEQ ID NO: 450573 - DNA, 25 bp, Homo sapien
gcgacggaggaactttactccctga

SEQ ID NO: 450574 - DNA, 25 bp, Homo sapien
acacagaacgaaaatgttgctctac

SEQ ID NO: 450575 - DNA, 25 bp, Homo sapien
accaatagaggactaacacagaacg

SEQ ID NO: 450576 - DNA, 25 bp, Homo sapien
cctaaatgaggacctccattcatta

SEQ ID NO: 450577 - DNA, 25 bp, Homo sapien
taaatgaggacctccattcattaaa

SEQ ID NO: 450578 - DNA, 25 bp, Homo sapien
ggacctccattcattaaatcaaaca

SEQ ID NO: 450579 - DNA, 25 bp, Homo sapien
atgaggacctccattcattaaatca

SEQ ID NO: 450580 - DNA, 25 bp, Homo sapien
ctcaattctttgttattctgtatca

SEQ ID NO: 450581 - DNA, 25 bp, Homo sapien
caattctttgttattctgtatcagt

SEQ ID NO: 450582 - DNA, 25 bp, Homo sapien
ctttcctcaattctttgttattctg

SEQ ID NO: 450583 - DNA, 25 bp, Homo sapien
tcctcaattctttgttattctgtat

SEQ ID NO: 450584 - DNA, 25 bp, Homo sapien
cacaaacaagaatccggaaattgtc

SEQ ID NO: 450585 - DNA, 25 bp, Homo sapien
gcctccacaaacaagaatccggaaa

SEQ ID NO: 450586 - DNA, 25 bp, Homo sapien
ttccatcgcctccacaaacaagaat

SEQ ID NO: 450587 - DNA, 25 bp, Homo sapien
caagaatccggaaattgtcaaactt

SEQ ID NO: 450588 - DNA, 25 bp, Homo sapien
ttcaagttgagcttatcgatttctg

SEQ ID NO: 450589 - DNA, 25 bp, Homo sapien
tgagcttatcgatttctgacaaaac

SEQ ID NO: 450590 - DNA, 25 bp, Homo sapien
tcgatttctgacaaaacccaaccta

SEQ ID NO: 450591 - DNA, 25 bp, Homo sapien
gcttatcgatttctgacaaaaccca

SEQ ID NO: 450592 - DNA, 25 bp, Homo sapien
caacattttggtactggctcgttcc

SEQ ID NO: 450593 - DNA, 25 bp, Homo sapien
tcatatgaacctccccagccaagaa

SEQ ID NO: 450594 - DNA, 25 bp, Homo sapien
ggctcgttccagtttctctaggatc

SEQ ID NO: 450595 - DNA, 25 bp, Homo sapien
gaggaagttgggtgtcatcgtcata

SEQ ID NO: 450596 - DNA, 25 bp, Homo sapien
catctagttgtagaaaagaatttac

SEQ ID NO: 450597 - DNA, 25 bp, Homo sapien
tccatctagttgtagaaaagaattt

SEQ ID NO: 450598 - DNA, 25 bp, Homo sapien
atctagttgtagaaaagaatttact

SEQ ID NO: 450599 - DNA, 25 bp, Homo sapien
ttccatctagttgtagaaaagaatt

SEQ ID NO: 450600 - DNA, 25 bp, Homo sapien
cctggaagtagggaagcttttggtg

SEQ ID NO: 450601 - DNA, 25 bp, Homo sapien
ggaagtagggaagcttttggtggca

SEQ ID NO: 450602 - DNA, 25 bp, Homo sapien
gagttcatatgtcattatactccac

SEQ ID NO: 450603 - DNA, 25 bp, Homo sapien
atttgagttcatatgtcattatact

SEQ ID NO: 450604 - DNA, 25 bp, Homo sapien
ttggcagaagatatgaccactgcat

SEQ ID NO: 450605 - DNA, 25 bp, Homo sapien
taagatgcgttgcaactgagtcttc

SEQ ID NO: 450606 - DNA, 25 bp, Homo sapien
tgttcatcagaattgaggatttttg

SEQ ID NO: 450607 - DNA, 25 bp, Homo sapien
gatatgaccactgcatgttcatcag

SEQ ID NO: 450608 - DNA, 25 bp, Homo sapien
ttagtatgtatactttgagtagaga

SEQ ID NO: 450609 - DNA, 25 bp, Homo sapien
gtgccatcttagctctagtacaacc

SEQ ID NO: 450610 - DNA, 25 bp, Homo sapien
ggttcaaatacaatcttacacagaa

SEQ ID NO: 450611 - DNA, 25 bp, Homo sapien
catcttagctctagtacaacctcca

SEQ ID NO: 450612 - DNA, 25 bp, Homo sapien
tactgggtcaactatcatgggaatg

SEQ ID NO: 450613 - DNA, 25 bp, Homo sapien
tatactgggtcaactatcatgggaa

SEQ ID NO: 450614 - DNA, 25 bp, Homo sapien
ggcatatactgggtcaactatcatg

SEQ ID NO: 450615 - DNA, 25 bp, Homo sapien
tgctgtggggcatatactgggtcaa

SEQ ID NO: 450616 - DNA, 25 bp, Homo sapien
aagtcctttacagtttcacatagcg

SEQ ID NO: 450617 - DNA, 25 bp, Homo sapien
tactggccacggcatcagctacaac

SEQ ID NO: 450618 - DNA, 25 bp, Homo sapien
tgtcatacgtcttttctactttggc

SEQ ID NO: 450619 - DNA, 25 bp, Homo sapien
cagctacaacggcattttccaaggt

SEQ ID NO: 450620 - DNA, 25 bp, Homo sapien
tatttgcccgcaacatgatttccct

SEQ ID NO: 450621 - DNA, 25 bp, Homo sapien
cgagcttctcgtttaggactgaaca

SEQ ID NO: 450622 - DNA, 25 bp, Homo sapien
tttgtaacgtcatccccaagctgct

SEQ ID NO: 450623 - DNA, 25 bp, Homo sapien
ttcttccacaatgagagggctgagg

SEQ ID NO: 450624 - DNA, 25 bp, Homo sapien
ttctgtgctgtcataatcagaggac

SEQ ID NO: 450625 - DNA, 25 bp, Homo sapien
tctgtgctgtcataatcagaggact

SEQ ID NO: 450626 - DNA, 25 bp, Homo sapien
tagcttcctccttagattcatctgt

SEQ ID NO: 450627 - DNA, 25 bp, Homo sapien
tctttagcttcctccttagattcat

SEQ ID NO: 450628 - DNA, 25 bp, Homo sapien
catctggagaccgaggtgcagtttt

SEQ ID NO: 450629 - DNA, 25 bp, Homo sapien
ggaatggccataacttgcccgggca

SEQ ID NO: 450630 - DNA, 25 bp, Homo sapien
gacagaatcagtttgggaatggcca

SEQ ID NO: 450631 - DNA, 25 bp, Homo sapien
tattctggtattgagcacagggagg

SEQ ID NO: 450632 - DNA, 25 bp, Homo sapien
tacacgatgtttcagaatctgtact

SEQ ID NO: 450633 - DNA, 25 bp, Homo sapien
gaaaaatacacgatgtttcagaatc

SEQ ID NO: 450634 - DNA, 25 bp, Homo sapien
aaatactgaaaaatacacgatgttt

SEQ ID NO: 450635 - DNA, 25 bp, Homo sapien
tactgaaaaatacacgatgtttcag

SEQ ID NO: 450636 - DNA, 25 bp, Homo sapien
tactttctaggcaactgttacacag

SEQ ID NO: 450637 - DNA, 25 bp, Homo sapien
acagagagactcatggcttaaaacc

SEQ ID NO: 450638 - DNA, 25 bp, Homo sapien
taccgactcataatttcccagggca

SEQ ID NO: 450639 - DNA, 25 bp, Homo sapien
tgcacctggccgaaacaagtgtttt

SEQ ID NO: 450640 - DNA, 25 bp, Homo sapien
attttaatgtttaggcaattatcaa

SEQ ID NO: 450641 - DNA, 25 bp, Homo sapien
cagcactatgctcttcttagggaat

SEQ ID NO: 450642 - DNA, 25 bp, Homo sapien
ctatgctcttcttagggaattatta

SEQ ID NO: 450643 - DNA, 25 bp, Homo sapien
taatgtttaggcaattatcaaatac

SEQ ID NO: 450644 - DNA, 25 bp, Homo sapien
gccagtaacattttgttgataatcg

SEQ ID NO: 450645 - DNA, 25 bp, Homo sapien
tctagatccgggtcaataaacggcg

SEQ ID NO: 450646 - DNA, 25 bp, Homo sapien
caataaacggcgtggcaccaaaagg

SEQ ID NO: 450647 - DNA, 25 bp, Homo sapien
cccagcaattgaggcagccagtcct

SEQ ID NO: 450648 - DNA, 25 bp, Homo sapien
caatcccaaagtaattgttcatgac

SEQ ID NO: 450649 - DNA, 25 bp, Homo sapien
aatccaatcccaaagtaattgttca

SEQ ID NO: 450650 - DNA, 25 bp, Homo sapien
gcatttttcagggtgctcctctctt

SEQ ID NO: 450651 - DNA, 25 bp, Homo sapien
agggtgctcctctcttttattatta

SEQ ID NO: 450652 - DNA, 25 bp, Homo sapien
ccacatcaagtttttagttcggctc

SEQ ID NO: 450653 - DNA, 25 bp, Homo sapien
aattcttgtacgatctctgtaataa

SEQ ID NO: 450654 - DNA, 25 bp, Homo sapien
tgtacgatctctgtaataactcccg

SEQ ID NO: 450655 - DNA, 25 bp, Homo sapien
tctctgtaataactcccgggttcca

SEQ ID NO: 450656 - DNA, 25 bp, Homo sapien
atttgatacggtaacgatgaaacac

SEQ ID NO: 450657 - DNA, 25 bp, Homo sapien
catcatcaatcgaaatgagacattt

SEQ ID NO: 450658 - DNA, 25 bp, Homo sapien
aaaaggcattagtaacacccgtgat

SEQ ID NO: 450659 - DNA, 25 bp, Homo sapien
tgttcactaacctctgaagtttagc

SEQ ID NO: 450660 - DNA, 25 bp, Homo sapien
ctccttgcagtccttactttctcat

SEQ ID NO: 450661 - DNA, 25 bp, Homo sapien
tacttcaagtacaagtcagaaccaa

SEQ ID NO: 450662 - DNA, 25 bp, Homo sapien
cagactgggtaagagaaagttgatc

SEQ ID NO: 450663 - DNA, 25 bp, Homo sapien
tctagttggctattaaggaaacaat

SEQ ID NO: 450664 - DNA, 25 bp, Homo sapien
ggccttttatgtactttcacctgca

SEQ ID NO: 450665 - DNA, 25 bp, Homo sapien
aggccttttatgtactttcacctgc

SEQ ID NO: 450666 - DNA, 25 bp, Homo sapien
gccttttatgtactttcacctgcat

SEQ ID NO: 450667 - DNA, 25 bp, Homo sapien
tcaggccttttatgtactttcacct

SEQ ID NO: 450668 - DNA, 25 bp, Homo sapien
gtctgctctctacacgttaccaaat

SEQ ID NO: 450669 - DNA, 25 bp, Homo sapien
cacagtgtgttcgtaatgtctgctc

SEQ ID NO: 450670 - DNA, 25 bp, Homo sapien
gacaatggagcacagtgtgttcgta

SEQ ID NO: 450671 - DNA, 25 bp, Homo sapien
aaagatgaaggacaatggagcacag

SEQ ID NO: 450672 - DNA, 25 bp, Homo sapien
gggaagaggaatatactgcccatca

SEQ ID NO: 450673 - DNA, 25 bp, Homo sapien
ggaagaggaatatactgcccatcac

SEQ ID NO: 450674 - DNA, 25 bp, Homo sapien
gaagaggaatatactgcccatcaca

SEQ ID NO: 450675 - DNA, 25 bp, Homo sapien
tgggaagaggaatatactgcccatc

SEQ ID NO: 450676 - DNA, 25 bp, Homo sapien
tcatcctctttagttccaccccaaa

SEQ ID NO: 450677 - DNA, 25 bp, Homo sapien
gttcaacacggctatgccttgcaag

SEQ ID NO: 450678 - DNA, 25 bp, Homo sapien
tgggaatgttcaacacggctatgcc

SEQ ID NO: 450679 - DNA, 25 bp, Homo sapien
atagctgggaatgttcaacacggct

SEQ ID NO: 450680 - DNA, 25 bp, Homo sapien
tgccatttgcatgctatcaaatatt

SEQ ID NO: 450681 - DNA, 25 bp, Homo sapien
tgctgcagtttaatgacccttgaaa

SEQ ID NO: 450682 - DNA, 25 bp, Homo sapien
caaatattgctacaacttccaggat

SEQ ID NO: 450683 - DNA, 25 bp, Homo sapien
tgggctattcgatgatgctgcagtt

SEQ ID NO: 450684 - DNA, 25 bp, Homo sapien
ccttcgtcaccaaatatagtgattt

SEQ ID NO: 450685 - DNA, 25 bp, Homo sapien
tccttcgtcaccaaatatagtgatt

SEQ ID NO: 450686 - DNA, 25 bp, Homo sapien
ggactccttcgtcaccaaatatagt

SEQ ID NO: 450687 - DNA, 25 bp, Homo sapien
actccttcgtcaccaaatatagtga

SEQ ID NO: 450688 - DNA, 25 bp, Homo sapien
aatccctggaggctgaacccacgct

SEQ ID NO: 450689 - DNA, 25 bp, Homo sapien
catttgtgctctgtttttgtgcaca

SEQ ID NO: 450690 - DNA, 25 bp, Homo sapien
tgtcccttgttagcatttgtgctct

SEQ ID NO: 450691 - DNA, 25 bp, Homo sapien
ggaggctgaacccacgcttcaccat

SEQ ID NO: 450692 - DNA, 25 bp, Homo sapien
tgtacaaatgggttcggagaactgg

SEQ ID NO: 450693 - DNA, 25 bp, Homo sapien
gagcatagctgcatctgcgacacct

SEQ ID NO: 450694 - DNA, 25 bp, Homo sapien
caatggcgtgatggatgtacaaatg

SEQ ID NO: 450695 - DNA, 25 bp, Homo sapien
tcttcccaagatttcagagtgctct

SEQ ID NO: 450696 - DNA, 25 bp, Homo sapien
attcacagcatgggccagttcttgc

SEQ ID NO: 450697 - DNA, 25 bp, Homo sapien
ttggctttattcagggcatgggagc

SEQ ID NO: 450698 - DNA, 25 bp, Homo sapien
agtgaattgtggctgcgtcacatat

SEQ ID NO: 450699 - DNA, 25 bp, Homo sapien
gtgaattgtggctgcgtcacatatc

SEQ ID NO: 450700 - DNA, 25 bp, Homo sapien
gaaccctgccaactagcaaagattc

SEQ ID NO: 450701 - DNA, 25 bp, Homo sapien
cattgatggctatttcagtggcagt

SEQ ID NO: 450702 - DNA, 25 bp, Homo sapien
cagtggcagtgtctcttgtaagact

SEQ ID NO: 450703 - DNA, 25 bp, Homo sapien
tatacagcgccttcacattgatggc

SEQ ID NO: 450704 - DNA, 25 bp, Homo sapien
tctcgaagctgaatggggcagagca

SEQ ID NO: 450705 - DNA, 25 bp, Homo sapien
acgtctctcgaagctgaatggggca

SEQ ID NO: 450706 - DNA, 25 bp, Homo sapien
tcacgtctctcgaagctgaatgggg

SEQ ID NO: 450707 - DNA, 25 bp, Homo sapien
gtctctcgaagctgaatggggcaga

SEQ ID NO: 450708 - DNA, 25 bp, Homo sapien
aaggatgccccaaaggtggcacttt

SEQ ID NO: 450709 - DNA, 25 bp, Homo sapien
tcttctcagagcaaaggatgcccca

SEQ ID NO: 450710 - DNA, 25 bp, Homo sapien
ggtaagagtgatggctttcatgcag

SEQ ID NO: 450711 - DNA, 25 bp, Homo sapien
tgatggctttcatgcagcctttcag

SEQ ID NO: 450712 - DNA, 25 bp, Homo sapien
tactcgctcttcatgtggcgattcc

SEQ ID NO: 450713 - DNA, 25 bp, Homo sapien
taaagccaaggaatctctgtcagtt

SEQ ID NO: 450714 - DNA, 25 bp, Homo sapien
ctcatcctcatttgggtgtaagata

SEQ ID NO: 450715 - DNA, 25 bp, Homo sapien
gtgtaaggcattggatactcgctct

SEQ ID NO: 450716 - DNA, 25 bp, Homo sapien
ttaaactttggcactattcgaaata

SEQ ID NO: 450717 - DNA, 25 bp, Homo sapien
cgaaatacggtgcttctgttgttcc

SEQ ID NO: 450718 - DNA, 25 bp, Homo sapien
cactattcgaaatacggtgcttctg

SEQ ID NO: 450719 - DNA, 25 bp, Homo sapien
ctttggcactattcgaaatacggtg

SEQ ID NO: 450720 - DNA, 25 bp, Homo sapien
tctacatgctcaatgcattacaaag

SEQ ID NO: 450721 - DNA, 25 bp, Homo sapien
caatgcattacaaagcaaaggttgg

SEQ ID NO: 450722 - DNA, 25 bp, Homo sapien
gctcaatgcattacaaagcaaaggt

SEQ ID NO: 450723 - DNA, 25 bp, Homo sapien
catgctcaatgcattacaaagcaaa

SEQ ID NO: 450724 - DNA, 25 bp, Homo sapien
tgcaaaagttcagcccctctgatgt

SEQ ID NO: 450725 - DNA, 25 bp, Homo sapien
aaattgagcagatccagccaagcag

SEQ ID NO: 450726 - DNA, 25 bp, Homo sapien
gaagatatctttgtactctcccaaa

SEQ ID NO: 450727 - DNA, 25 bp, Homo sapien
gatgtcatgacggatgaagatatct

SEQ ID NO: 450728 - DNA, 25 bp, Homo sapien
tttgtgctacagaagactctttctg

SEQ ID NO: 450729 - DNA, 25 bp, Homo sapien
gagaacaatgggagctcttctctag

SEQ ID NO: 450730 - DNA, 25 bp, Homo sapien
ttatgattttgtgctacagaagact

SEQ ID NO: 450731 - DNA, 25 bp, Homo sapien
gaacaatgggagctcttctctagct

SEQ ID NO: 450732 - DNA, 25 bp, Homo sapien
gcatttagaggcatcggtctgaagg

SEQ ID NO: 450733 - DNA, 25 bp, Homo sapien
tctgaaggacttgccgctgctgaca

SEQ ID NO: 450734 - DNA, 25 bp, Homo sapien
gcatcggtctgaaggacttgccgct

SEQ ID NO: 450735 - DNA, 25 bp, Homo sapien
gaggcatcggtctgaaggacttgcc

SEQ ID NO: 450736 - DNA, 25 bp, Homo sapien
tgtttaccattttctttggtgtctc

SEQ ID NO: 450737 - DNA, 25 bp, Homo sapien
ttggtgtctcttttttctcctactg

SEQ ID NO: 450738 - DNA, 25 bp, Homo sapien
catatgtttaccattttctttggtg

SEQ ID NO: 450739 - DNA, 25 bp, Homo sapien
ggtgtctcttttttctcctactgtg

SEQ ID NO: 450740 - DNA, 25 bp, Homo sapien
cacttacaagaacgtgtggtgtttg

SEQ ID NO: 450741 - DNA, 25 bp, Homo sapien
cccacaacaggacccagtgtatgtt

SEQ ID NO: 450742 - DNA, 25 bp, Homo sapien
tactgaggacaatgacttccagctc

SEQ ID NO: 450743 - DNA, 25 bp, Homo sapien
tatttatcctgatattctcccctcc

SEQ ID NO: 450744 - DNA, 25 bp, Homo sapien
cactttgtgaaaacataggtatgca

SEQ ID NO: 450745 - DNA, 25 bp, Homo sapien
aatacattgtattctcaagactaaa

SEQ ID NO: 450746 - DNA, 25 bp, Homo sapien
ttctcaagactaaatcttctttggg

SEQ ID NO: 450747 - DNA, 25 bp, Homo sapien
ctttgtgaaaacataggtatgcaac

SEQ ID NO: 450748 - DNA, 25 bp, Homo sapien
tatacatttcctgaatacgtgcaaa

SEQ ID NO: 450749 - DNA, 25 bp, Homo sapien
tagtcctaaggcaactatacatttc

SEQ ID NO: 450750 - DNA, 25 bp, Homo sapien
aaagcaaggccaaatcctagaggaa

SEQ ID NO: 450751 - DNA, 25 bp, Homo sapien
aaagtatcaagcttaaaagcaaggc

SEQ ID NO: 450752 - DNA, 25 bp, Homo sapien
ggtttaagtcttcggtcattgtctc

SEQ ID NO: 450753 - DNA, 25 bp, Homo sapien
taagtcttcggtcattgtctctctc

SEQ ID NO: 450754 - DNA, 25 bp, Homo sapien
ctggtttaagtcttcggtcattgtc

SEQ ID NO: 450755 - DNA, 25 bp, Homo sapien
ctcgtttaccctttaagagctcttg

SEQ ID NO: 450756 - DNA, 25 bp, Homo sapien
ctggagaattcgcttcacatgaccc

SEQ ID NO: 450757 - DNA, 25 bp, Homo sapien
ggagaattcgcttcacatgacccac

SEQ ID NO: 450758 - DNA, 25 bp, Homo sapien
atgacccactttcggtatccccaga

SEQ ID NO: 450759 - DNA, 25 bp, Homo sapien
gaattcgcttcacatgacccacttt

SEQ ID NO: 450760 - DNA, 25 bp, Homo sapien
ttacacctccgactgtggagtgctc

SEQ ID NO: 450761 - DNA, 25 bp, Homo sapien
cacctccgactgtggagtgctcctt

SEQ ID NO: 450762 - DNA, 25 bp, Homo sapien
tacacctccgactgtggagtgctcc

SEQ ID NO: 450763 - DNA, 25 bp, Homo sapien
ctccgactgtggagtgctccttcca

SEQ ID NO: 450764 - DNA, 25 bp, Homo sapien
tattaagtggcaataacttctcttc

SEQ ID NO: 450765 - DNA, 25 bp, Homo sapien
tccaaggactttgtattaagtggca

SEQ ID NO: 450766 - DNA, 25 bp, Homo sapien
aactacaagaacagccacttgcttc

SEQ ID NO: 450767 - DNA, 25 bp, Homo sapien
tcttccaagaaatagcaccaatatg

SEQ ID NO: 450768 - DNA, 25 bp, Homo sapien
cactaggagttggaggtgataccaa

SEQ ID NO: 450769 - DNA, 25 bp, Homo sapien
gaacatgtcaggtttgcacaaaaag

SEQ ID NO: 450770 - DNA, 25 bp, Homo sapien
tatttgaccactaagcactaggagt

SEQ ID NO: 450771 - DNA, 25 bp, Homo sapien
tgcagttgcacagtaggaacattcc

SEQ ID NO: 450772 - DNA, 25 bp, Homo sapien
gaaaagtgcagtgcccttaaccaac

SEQ ID NO: 450773 - DNA, 25 bp, Homo sapien
taaatctcagttgacacctcaggga

SEQ ID NO: 450774 - DNA, 25 bp, Homo sapien
agagaattttcttaacgtgcacgcc

SEQ ID NO: 450775 - DNA, 25 bp, Homo sapien
acaagttttgtcaggtaagggagca

SEQ ID NO: 450776 - DNA, 25 bp, Homo sapien
tcagacatacttggtcaggaatccc

SEQ ID NO: 450777 - DNA, 25 bp, Homo sapien
taaaaattgtcaccactgagtcagt

SEQ ID NO: 450778 - DNA, 25 bp, Homo sapien
tatatctattaagcacctagcaggc

SEQ ID NO: 450779 - DNA, 25 bp, Homo sapien
aactacttgatataactgtctttgg

SEQ ID NO: 450780 - DNA, 25 bp, Homo sapien
ccaggatgtaggaaagaaactcaga

SEQ ID NO: 450781 - DNA, 25 bp, Homo sapien
ggaggtgaagagacactaaagagaa

SEQ ID NO: 450782 - DNA, 25 bp, Homo sapien
catagatcaaagcatagaggcccca

SEQ ID NO: 450783 - DNA, 25 bp, Homo sapien
ccgatcctccaggtgaggaagagcc

SEQ ID NO: 450784 - DNA, 25 bp, Homo sapien
tacaaccactgggtaggtagggctc

SEQ ID NO: 450785 - DNA, 25 bp, Homo sapien
cagtggatgaaggaacaagctattc

SEQ ID NO: 450786 - DNA, 25 bp, Homo sapien
tgtgtactgctatgtgtcctcatgc

SEQ ID NO: 450787 - DNA, 25 bp, Homo sapien
taggccagtgctaatcgtttgagaa

SEQ ID NO: 450788 - DNA, 25 bp, Homo sapien
tagaagtgctgtatagtggcagccc

SEQ ID NO: 450789 - DNA, 25 bp, Homo sapien
gaaagtccactatgttgacagccca

SEQ ID NO: 450790 - DNA, 25 bp, Homo sapien
ctctgggaggctattctattggcta

SEQ ID NO: 450791 - DNA, 25 bp, Homo sapien
gtggcagcccctataactttctaag

SEQ ID NO: 450792 - DNA, 25 bp, Homo sapien
tatcatgaacagagtttaacagtct

SEQ ID NO: 450793 - DNA, 25 bp, Homo sapien
cacaaacaggtacagtccagctgtc

SEQ ID NO: 450794 - DNA, 25 bp, Homo sapien
gaaatgcagttcctatgaaataccc

SEQ ID NO: 450795 - DNA, 25 bp, Homo sapien
taccttaatggccttatcaactgaa

SEQ ID NO: 450796 - DNA, 25 bp, Homo sapien
tccataacggttactatcccagaac

SEQ ID NO: 450797 - DNA, 25 bp, Homo sapien
tatccaccctggaacctagaactgc

SEQ ID NO: 450798 - DNA, 25 bp, Homo sapien
taaaatctcaccgacttgacagaaa

SEQ ID NO: 450799 - DNA, 25 bp, Homo sapien
ttattctgtgtcgtatgttgtgcca

SEQ ID NO: 450800 - DNA, 25 bp, Homo sapien
aacagtacacaatacatcaaccgct

SEQ ID NO: 450801 - DNA, 25 bp, Homo sapien
ttaaacagtacacaatacatcaacc

SEQ ID NO: 450802 - DNA, 25 bp, Homo sapien
cagtacacaatacatcaaccgctaa

SEQ ID NO: 450803 - DNA, 25 bp, Homo sapien
gtacacaatacatcaaccgctaaca

SEQ ID NO: 450804 - DNA, 25 bp, Homo sapien
gctaagatctagatacagtctcgga

SEQ ID NO: 450805 - DNA, 25 bp, Homo sapien
gaaaggacacaatgagccaatgcca

SEQ ID NO: 450806 - DNA, 25 bp, Homo sapien
ggtctgcagggtatggtctgatcca

SEQ ID NO: 450807 - DNA, 25 bp, Homo sapien
ggatgtgctccctgaattcactagt

SEQ ID NO: 450808 - DNA, 25 bp, Homo sapien
taagacagatcaaaattccacggtg

SEQ ID NO: 450809 - DNA, 25 bp, Homo sapien
tcaggtcattatgggaagcaaattc

SEQ ID NO: 450810 - DNA, 25 bp, Homo sapien
tccacggtgatgaactccaatcttt

SEQ ID NO: 450811 - DNA, 25 bp, Homo sapien
gagatgcaacaggagctccaaatta

SEQ ID NO: 450812 - DNA, 25 bp, Homo sapien
cctagggaagtcaggtagggcttca

SEQ ID NO: 450813 - DNA, 25 bp, Homo sapien
tggtttgcccagagtgcacacatgc

SEQ ID NO: 450814 - DNA, 25 bp, Homo sapien
tactataggcatggagaaaatacct

SEQ ID NO: 450815 - DNA, 25 bp, Homo sapien
tgaatgcacacttacctcatgtgga

SEQ ID NO: 450816 - DNA, 25 bp, Homo sapien
caggcccagaggtaatagtttttat

SEQ ID NO: 450817 - DNA, 25 bp, Homo sapien
gggtgataagagtcacaagccttct

SEQ ID NO: 450818 - DNA, 25 bp, Homo sapien
gaaaggctttatctaatcccaaaga

SEQ ID NO: 450819 - DNA, 25 bp, Homo sapien
ctgtgttagcctttatgagtatttg

SEQ ID NO: 450820 - DNA, 25 bp, Homo sapien
cagtcactgggatcacatgtacggc

SEQ ID NO: 450821 - DNA, 25 bp, Homo sapien
ctgtgaatacacatacaagtcgggt

SEQ ID NO: 450822 - DNA, 25 bp, Homo sapien
gactcctctctgaagtaacctgaaa

SEQ ID NO: 450823 - DNA, 25 bp, Homo sapien
caaatggagcctctgaagtatacca

SEQ ID NO: 450824 - DNA, 25 bp, Homo sapien
ggatcaaccattactttcagcaaag

SEQ ID NO: 450825 - DNA, 25 bp, Homo sapien
cgtcagtgacttccgtacaataaat

SEQ ID NO: 450826 - DNA, 25 bp, Homo sapien
agaaggatgatctcaaggcagtgcc

SEQ ID NO: 450827 - DNA, 25 bp, Homo sapien
ggcaccgaaaactggtcacttagta

SEQ ID NO: 450828 - DNA, 25 bp, Homo sapien
tctcccttatgtttcagcaacagca

SEQ ID NO: 450829 - DNA, 25 bp, Homo sapien
atctctcccttatgtttcagcaaca

SEQ ID NO: 450830 - DNA, 25 bp, Homo sapien
cttgcctactccagttccaccttct

SEQ ID NO: 450831 - DNA, 25 bp, Homo sapien
tctatctctcccttatgtttcagca

SEQ ID NO: 450832 - DNA, 25 bp, Homo sapien
catgggatccctattctgtggctct

SEQ ID NO: 450833 - DNA, 25 bp, Homo sapien
gggatccctattctgtggctctttc

SEQ ID NO: 450834 - DNA, 25 bp, Homo sapien
catccatgggatccctattctgtgg

SEQ ID NO: 450835 - DNA, 25 bp, Homo sapien
ctgagcatccatgggatccctattc

SEQ ID NO: 450836 - DNA, 25 bp, Homo sapien
gggacacaaactagactatagcact

SEQ ID NO: 450837 - DNA, 25 bp, Homo sapien
tatagcactcagcataaaggtgaac

SEQ ID NO: 450838 - DNA, 25 bp, Homo sapien
tgtaggaggccggtcaagaccaacc

SEQ ID NO: 450839 - DNA, 25 bp, Homo sapien
gccacaccttcaactttagggtaga

SEQ ID NO: 450840 - DNA, 25 bp, Homo sapien
attttgcagcaaccttctctatcag

SEQ ID NO: 450841 - DNA, 25 bp, Homo sapien
ttttgcagcaaccttctctatcagt

SEQ ID NO: 450842 - DNA, 25 bp, Homo sapien
aaacgaatattatttgctatcgtca

SEQ ID NO: 450843 - DNA, 25 bp, Homo sapien
acgaatattatttgctatcgtcatc

SEQ ID NO: 450844 - DNA, 25 bp, Homo sapien
gccagaacccagaaaacgaatatta

SEQ ID NO: 450845 - DNA, 25 bp, Homo sapien
cagaacccagaaaacgaatattatt

SEQ ID NO: 450846 - DNA, 25 bp, Homo sapien
cttgcctggcatgatactacttcct

SEQ ID NO: 450847 - DNA, 25 bp, Homo sapien
cattttcaggcaagatcagttctcc

SEQ ID NO: 450848 - DNA, 25 bp, Homo sapien
gttcaccttgcctggcatgatacta

SEQ ID NO: 450849 - DNA, 25 bp, Homo sapien
ggcatgatactacttcctggttcat

SEQ ID NO: 450850 - DNA, 25 bp, Homo sapien
tacgctatacgaggattgagagctg

SEQ ID NO: 450851 - DNA, 25 bp, Homo sapien
gctgccttgtcatacgctatacgag

SEQ ID NO: 450852 - DNA, 25 bp, Homo sapien
gcctccaactgttacagcaacatga

SEQ ID NO: 450853 - DNA, 25 bp, Homo sapien
tgtcatacgctatacgaggattgag

SEQ ID NO: 450854 - DNA, 25 bp, Homo sapien
tggactcagcatgtccttagttttt

SEQ ID NO: 450855 - DNA, 25 bp, Homo sapien
gactcagcatgtccttagtttttac

SEQ ID NO: 450856 - DNA, 25 bp, Homo sapien
tttggactcagcatgtccttagttt

SEQ ID NO: 450857 - DNA, 25 bp, Homo sapien
ggactcagcatgtccttagttttta

SEQ ID NO: 450858 - DNA, 25 bp, Homo sapien
aaattatatacacgtttattttcat

SEQ ID NO: 450859 - DNA, 25 bp, Homo sapien
aattatatacacgtttattttcatt

SEQ ID NO: 450860 - DNA, 25 bp, Homo sapien
ttatatacacgtttattttcattat

SEQ ID NO: 450861 - DNA, 25 bp, Homo sapien
attatatacacgtttattttcatta

SEQ ID NO: 450862 - DNA, 25 bp, Homo sapien
taaagaggttttgagcctagagcct

SEQ ID NO: 450863 - DNA, 25 bp, Homo sapien
aagaggttttgagcctagagccttg

SEQ ID NO: 450864 - DNA, 25 bp, Homo sapien
gaggttttgagcctagagccttgct

SEQ ID NO: 450865 - DNA, 25 bp, Homo sapien
ctaaagaggttttgagcctagagcc

SEQ ID NO: 450866 - DNA, 25 bp, Homo sapien
tcagagttccatgttccagagacag

SEQ ID NO: 450867 - DNA, 25 bp, Homo sapien
caagagagctaggtggaaattcagt

SEQ ID NO: 450868 - DNA, 25 bp, Homo sapien
tagattggaacaggttttaggcaag

SEQ ID NO: 450869 - DNA, 25 bp, Homo sapien
caccaagtataagagatgatccaaa

SEQ ID NO: 450870 - DNA, 25 bp, Homo sapien
gcttcctggtccgttgccttggaaa

SEQ ID NO: 450871 - DNA, 25 bp, Homo sapien
cggcggacgtcttgcgcgcttcctg

SEQ ID NO: 450872 - DNA, 25 bp, Homo sapien
ctacgaacctgcggcggacgtcttg

SEQ ID NO: 450873 - DNA, 25 bp, Homo sapien
gtcttgcgcgcttcctggtccgttg

SEQ ID NO: 450874 - DNA, 25 bp, Homo sapien
ctcaacgacccgtgagcgagccggg

SEQ ID NO: 450875 - DNA, 25 bp, Homo sapien
atgtcaccggcctcaacgacccgtg

SEQ ID NO: 450876 - DNA, 25 bp, Homo sapien
cgcagcctccgcagctcacagacat

SEQ ID NO: 450877 - DNA, 25 bp, Homo sapien
agctcacagacatgtcaccggcctc

SEQ ID NO: 450878 - DNA, 25 bp, Homo sapien
tgggagaatcgagacacttggatct

SEQ ID NO: 450879 - DNA, 25 bp, Homo sapien
gggagaatcgagacacttggatctt

SEQ ID NO: 450880 - DNA, 25 bp, Homo sapien
tgccagtagccgaaataagtcaaca

SEQ ID NO: 450881 - DNA, 25 bp, Homo sapien
gcagatgggccagtcataggaagca

SEQ ID NO: 450882 - DNA, 25 bp, Homo sapien
tatccaagaggctaggtacagtggg

SEQ ID NO: 450883 - DNA, 25 bp, Homo sapien
ggatctatcctaagctgccagtagc

SEQ ID NO: 450884 - DNA, 25 bp, Homo sapien
catggtaggacacttagcagcttcc

SEQ ID NO: 450885 - DNA, 25 bp, Homo sapien
tgccagtagcactcagttgcagtaa

SEQ ID NO: 450886 - DNA, 25 bp, Homo sapien
cattcaccaagcgtctaagtaacag

SEQ ID NO: 450887 - DNA, 25 bp, Homo sapien
cactggactgtaagtactaccaacg

SEQ ID NO: 450888 - DNA, 25 bp, Homo sapien
tttattgcaaagtgtcaaagagaaa

SEQ ID NO: 450889 - DNA, 25 bp, Homo sapien
ttttattgcaaagtgtcaaagagaa

SEQ ID NO: 450890 - DNA, 25 bp, Homo sapien
ttttttattgcaaagtgtcaaagag

SEQ ID NO: 450891 - DNA, 25 bp, Homo sapien
tttttattgcaaagtgtcaaagaga

SEQ ID NO: 450892 - DNA, 25 bp, Homo sapien
tatataatcaatgaagagttaatcc

SEQ ID NO: 450893 - DNA, 25 bp, Homo sapien
gtatataatcaatgaagagttaatc

SEQ ID NO: 450894 - DNA, 25 bp, Homo sapien
taatcaatgaagagttaatccacaa

SEQ ID NO: 450895 - DNA, 25 bp, Homo sapien
tataatcaatgaagagttaatccac

SEQ ID NO: 450896 - DNA, 25 bp, Homo sapien
tctgacagatgctttagtcttcatg

SEQ ID NO: 450897 - DNA, 25 bp, Homo sapien
tctgcaataaagactttacagactg

SEQ ID NO: 450898 - DNA, 25 bp, Homo sapien
ctcagttaaattggcatgctcatcc

SEQ ID NO: 450899 - DNA, 25 bp, Homo sapien
taaagactttacagactggaacaca

SEQ ID NO: 450900 - DNA, 25 bp, Homo sapien
gctgttacactgcatagttccttct

SEQ ID NO: 450901 - DNA, 25 bp, Homo sapien
gatttgaaacactggatgtagcaga

SEQ ID NO: 450902 - DNA, 25 bp, Homo sapien
cagttgctgaatatagtaggcatca

SEQ ID NO: 450903 - DNA, 25 bp, Homo sapien
tcagttgtgagctgcaacgacctaa

SEQ ID NO: 450904 - DNA, 25 bp, Homo sapien
tagcagagaaataggtgagcaaggt

SEQ ID NO: 450905 - DNA, 25 bp, Homo sapien
aaagcactgcgacctatccgagctg

SEQ ID NO: 450906 - DNA, 25 bp, Homo sapien
actgcgacctatccgagctggaaaa

SEQ ID NO: 450907 - DNA, 25 bp, Homo sapien
cgacctatccgagctggaaaaccac

SEQ ID NO: 450908 - DNA, 25 bp, Homo sapien
cttggaaaagcactgcgacctatcc

SEQ ID NO: 450909 - DNA, 25 bp, Homo sapien
taaaatgctgtctgcttgaaaagga

SEQ ID NO: 450910 - DNA, 25 bp, Homo sapien
atatttttcaccaaagattgggctc

SEQ ID NO: 450911 - DNA, 25 bp, Homo sapien
ctttcaggctggtgacagagctgac

SEQ ID NO: 450912 - DNA, 25 bp, Homo sapien
aaaaacagacaaagcattaaaatgc

SEQ ID NO: 450913 - DNA, 25 bp, Homo sapien
tgtctcttcattaaaacccagaaat

SEQ ID NO: 450914 - DNA, 25 bp, Homo sapien
gtatatgagcagcatctgtctcttc

SEQ ID NO: 450915 - DNA, 25 bp, Homo sapien
tctgtctcttcattaaaacccagaa

SEQ ID NO: 450916 - DNA, 25 bp, Homo sapien
ctgtatatgagcagcatctgtctct

SEQ ID NO: 450917 - DNA, 25 bp, Homo sapien
ctgatttagaggatcactgcttata

SEQ ID NO: 450918 - DNA, 25 bp, Homo sapien
atttagaggatcactgcttatatct

SEQ ID NO: 450919 - DNA, 25 bp, Homo sapien
cactgcttatatctaatggtttatt

SEQ ID NO: 450920 - DNA, 25 bp, Homo sapien
gaagtggagtgaattcagaatatct

SEQ ID NO: 450921 - DNA, 25 bp, Homo sapien
gcaagaatgtgtccaaggtgtacct

SEQ ID NO: 450922 - DNA, 25 bp, Homo sapien
taggtgacactctcatgacacaaag

SEQ ID NO: 450923 - DNA, 25 bp, Homo sapien
ggtgtaccttataccagtagcatat

SEQ ID NO: 450924 - DNA, 25 bp, Homo sapien
caagttggtgcttctgatgcaagaa

SEQ ID NO: 450925 - DNA, 25 bp, Homo sapien
taaatgatgaccagtaaccgtctgg

SEQ ID NO: 450926 - DNA, 25 bp, Homo sapien
gctgggagagctggacgatcaaact

SEQ ID NO: 450927 - DNA, 25 bp, Homo sapien
cttcactgggcgaggagaatccgga

SEQ ID NO: 450928 - DNA, 25 bp, Homo sapien
tatggtgggtacgaagaactgagcc

SEQ ID NO: 450929 - DNA, 25 bp, Homo sapien
caagggcaccggtatagaagtaaca

SEQ ID NO: 450930 - DNA, 25 bp, Homo sapien
gacagcctgtgtcgatggcactaca

SEQ ID NO: 450931 - DNA, 25 bp, Homo sapien
tatccgtagagacactaactgctgc

SEQ ID NO: 450932 - DNA, 25 bp, Homo sapien
aaagtcaaacgacccacactgtgga

SEQ ID NO: 450933 - DNA, 25 bp, Homo sapien
ccttggcctgacatgcagtagatga

SEQ ID NO: 450934 - DNA, 25 bp, Homo sapien
tttactatcgtatgcaccactgctg

SEQ ID NO: 450935 - DNA, 25 bp, Homo sapien
tggcagtgtctctagggaggatcca

SEQ ID NO: 450936 - DNA, 25 bp, Homo sapien
gataaccggtcagcaaacatgtcct

SEQ ID NO: 450937 - DNA, 25 bp, Homo sapien
gaataaacggatccacttctcttgg

SEQ ID NO: 450938 - DNA, 25 bp, Homo sapien
cattcagaactagcccgggatggta

SEQ ID NO: 450939 - DNA, 25 bp, Homo sapien
tttaacagatcggtaggcaagccta

SEQ ID NO: 450940 - DNA, 25 bp, Homo sapien
gtgtagcaggtgcaaactctttggc

SEQ ID NO: 450941 - DNA, 25 bp, Homo sapien
cacttgtgaacttggcacagggaac

SEQ ID NO: 450942 - DNA, 25 bp, Homo sapien
cttgtgaacttggcacagggaacat

SEQ ID NO: 450943 - DNA, 25 bp, Homo sapien
ttgtgaacttggcacagggaacatt

SEQ ID NO: 450944 - DNA, 25 bp, Homo sapien
acttgtgaacttggcacagggaaca

SEQ ID NO: 450945 - DNA, 25 bp, Homo sapien
ggtctcagacactcggaacactgta

SEQ ID NO: 450946 - DNA, 25 bp, Homo sapien
taggcaattctggtgtaacgtgaca

SEQ ID NO: 450947 - DNA, 25 bp, Homo sapien
gaagctggcttactactggcgagag

SEQ ID NO: 450948 - DNA, 25 bp, Homo sapien
actgccagtgctgtggtaaaacctg

SEQ ID NO: 450949 - DNA, 25 bp, Homo sapien
gctgccaggctggtactgctcagct

SEQ ID NO: 450950 - DNA, 25 bp, Homo sapien
gcactgccttcttatcaagattaac

SEQ ID NO: 450951 - DNA, 25 bp, Homo sapien
gattaacatgaatctgagggacact

SEQ ID NO: 450952 - DNA, 25 bp, Homo sapien
tttttcaatggcttcagcaactatc

SEQ ID NO: 450953 - DNA, 25 bp, Homo sapien
taaattggaccagctaccagtgctg

SEQ ID NO: 450954 - DNA, 25 bp, Homo sapien
tgctgtcatcaccaatactgaggtt

SEQ ID NO: 450955 - DNA, 25 bp, Homo sapien
cagactcggttgactgaaagtcttc

SEQ ID NO: 450956 - DNA, 25 bp, Homo sapien
gctggctactgacagactcggttga

SEQ ID NO: 450957 - DNA, 25 bp, Homo sapien
ttccacacatgcctgaaaccagcaa

SEQ ID NO: 450958 - DNA, 25 bp, Homo sapien
ctttccacacatgcctgaaaccagc

SEQ ID NO: 450959 - DNA, 25 bp, Homo sapien
tccacacatgcctgaaaccagcaat

SEQ ID NO: 450960 - DNA, 25 bp, Homo sapien
acacatgcctgaaaccagcaatatg

SEQ ID NO: 450961 - DNA, 25 bp, Homo sapien
aagttcaactgatggtccacaggtc

SEQ ID NO: 450962 - DNA, 25 bp, Homo sapien
cattcccttttccaagagttgcctt

SEQ ID NO: 450963 - DNA, 25 bp, Homo sapien
gggctaagttcaactgatggtccac

SEQ ID NO: 450964 - DNA, 25 bp, Homo sapien
catttccaggggctaagttcaactg

SEQ ID NO: 450965 - DNA, 25 bp, Homo sapien
gaggtctctgaatcacctgcactga

SEQ ID NO: 450966 - DNA, 25 bp, Homo sapien
gacactgtatatgcaacgagcacac

SEQ ID NO: 450967 - DNA, 25 bp, Homo sapien
cattttaacgccaggatttcctagg

SEQ ID NO: 450968 - DNA, 25 bp, Homo sapien
tgtgccagaaccttaatgccacgca

SEQ ID NO: 450969 - DNA, 25 bp, Homo sapien
taaaatttttctacccatcacacag

SEQ ID NO: 450970 - DNA, 25 bp, Homo sapien
aaaacccatgtagttcattgtcaga

SEQ ID NO: 450971 - DNA, 25 bp, Homo sapien
tctaacatgatcaaactgtcacaaa

SEQ ID NO: 450972 - DNA, 25 bp, Homo sapien
tccaaatgggtatttgaagtcattc

SEQ ID NO: 450973 - DNA, 25 bp, Homo sapien
aaatctccttctaaaccaagactgc

SEQ ID NO: 450974 - DNA, 25 bp, Homo sapien
gatgttggaaaggataaattgtcct

SEQ ID NO: 450975 - DNA, 25 bp, Homo sapien
caagactgctccagctactgctgtt

SEQ ID NO: 450976 - DNA, 25 bp, Homo sapien
gctccagctactgctgttaccatta

SEQ ID NO: 450977 - DNA, 25 bp, Homo sapien
gtggtgacagactcatcagttttta

SEQ ID NO: 450978 - DNA, 25 bp, Homo sapien
catgcattagtggtgacagactcat

SEQ ID NO: 450979 - DNA, 25 bp, Homo sapien
tagtggtgacagactcatcagtttt

SEQ ID NO: 450980 - DNA, 25 bp, Homo sapien
cattagtggtgacagactcatcagt

SEQ ID NO: 450981 - DNA, 25 bp, Homo sapien
gaagctttgcttctcacatcatttc

SEQ ID NO: 450982 - DNA, 25 bp, Homo sapien
aaaatctgaattgcaaatgatccct

SEQ ID NO: 450983 - DNA, 25 bp, Homo sapien
tgatccctaaagttatcaaaaccaa

SEQ ID NO: 450984 - DNA, 25 bp, Homo sapien
gaaatcctaccttaccatgatacat

SEQ ID NO: 450985 - DNA, 25 bp, Homo sapien
tctacttcgtcctcatgctcttcat

SEQ ID NO: 450986 - DNA, 25 bp, Homo sapien
cttctacttcgtcctcatgctcttc

SEQ ID NO: 450987 - DNA, 25 bp, Homo sapien
ttcatctttatcatctggtccatca

SEQ ID NO: 450988 - DNA, 25 bp, Homo sapien
acttcgtcctcatgctcttcatctt

SEQ ID NO: 450989 - DNA, 25 bp, Homo sapien
gaaaatgcataaagactcttctagg

SEQ ID NO: 450990 - DNA, 25 bp, Homo sapien
gaaaccttatacaaaacacatgcca

SEQ ID NO: 450991 - DNA, 25 bp, Homo sapien
caatttcattagtgtagcaatcaaa

SEQ ID NO: 450992 - DNA, 25 bp, Homo sapien
tgttttacactgataacctagagcc

SEQ ID NO: 450993 - DNA, 25 bp, Homo sapien
gagttcagggggctagaagctaatc

SEQ ID NO: 450994 - DNA, 25 bp, Homo sapien
ctgaggagttcagggggctagaagc

SEQ ID NO: 450995 - DNA, 25 bp, Homo sapien
gttcagggggctagaagctaatcat

SEQ ID NO: 450996 - DNA, 25 bp, Homo sapien
cagggggctagaagctaatcatccc

SEQ ID NO: 450997 - DNA, 25 bp, Homo sapien
atggtacaaggcatggtctctgggc

SEQ ID NO: 450998 - DNA, 25 bp, Homo sapien
catggtacaaggcatggtctctggg

SEQ ID NO: 450999 - DNA, 25 bp, Homo sapien
tcatgccaacatgtaccagtaatgg

SEQ ID NO: 451000 - DNA, 25 bp, Homo sapien
gcttgcaggccattctagaccacta

SEQ ID NO: 451001 - DNA, 25 bp, Homo sapien
tatgggccaatatcatgcgtttaac

SEQ ID NO: 451002 - DNA, 25 bp, Homo sapien
gagggatccatctctgttgacagaa

SEQ ID NO: 451003 - DNA, 25 bp, Homo sapien
catcaatttaactctcaatactctg

SEQ ID NO: 451004 - DNA, 25 bp, Homo sapien
taactctcaatactctggttgtcaa

SEQ ID NO: 451005 - DNA, 25 bp, Homo sapien
ctctggttgtcaagtagatacaaat

SEQ ID NO: 451006 - DNA, 25 bp, Homo sapien
ttcttaggattctaatgaatggtga

SEQ ID NO: 451007 - DNA, 25 bp, Homo sapien
attcgtaattagcagtgtctttcca

SEQ ID NO: 451008 - DNA, 25 bp, Homo sapien
atattcgtaattagcagtgtctttc

SEQ ID NO: 451009 - DNA, 25 bp, Homo sapien
caatattcgtaattagcagtgtctt

SEQ ID NO: 451010 - DNA, 25 bp, Homo sapien
gtcaatattcgtaattagcagtgtc

SEQ ID NO: 451011 - DNA, 25 bp, Homo sapien
agccactgaagaataatccttagct

SEQ ID NO: 451012 - DNA, 25 bp, Homo sapien
gggggtctaccgtgcatggctccat

SEQ ID NO: 451013 - DNA, 25 bp, Homo sapien
ccttagctgggggtctaccgtgcat

SEQ ID NO: 451014 - DNA, 25 bp, Homo sapien
taaactccttatttgcagagtcatg

SEQ ID NO: 451015 - DNA, 25 bp, Homo sapien
aaactgttggacactacagcctaag

SEQ ID NO: 451016 - DNA, 25 bp, Homo sapien
gagctgatgtctgaacccaaactgt

SEQ ID NO: 451017 - DNA, 25 bp, Homo sapien
taagaatttaaccatcaccaggcat

SEQ ID NO: 451018 - DNA, 25 bp, Homo sapien
gacagactggtgaacctgcctctgg

SEQ ID NO: 451019 - DNA, 25 bp, Homo sapien
tatgttctccaagttgaatgcaacc

SEQ ID NO: 451020 - DNA, 25 bp, Homo sapien
tcacccaaagtgtcctagtcaatgg

SEQ ID NO: 451021 - DNA, 25 bp, Homo sapien
tcttgactaataaggtacttggcac

SEQ ID NO: 451022 - DNA, 25 bp, Homo sapien
ggcttttaattatgacagctgctca

SEQ ID NO: 451023 - DNA, 25 bp, Homo sapien
tcatagtattgaagcacagcctgca

SEQ ID NO: 451024 - DNA, 25 bp, Homo sapien
caatcaaacagcgacttgcatctct

SEQ ID NO: 451025 - DNA, 25 bp, Homo sapien
aaacagcgacttgcatctctcctca

SEQ ID NO: 451026 - DNA, 25 bp, Homo sapien
ccatcacttcatagtattgaagcac

SEQ ID NO: 451027 - DNA, 25 bp, Homo sapien
aacatctttattggcttgttcccct

SEQ ID NO: 451028 - DNA, 25 bp, Homo sapien
tcgtaagggccaaaatgtacagcac

SEQ ID NO: 451029 - DNA, 25 bp, Homo sapien
aaactactgggcttctctaaatgca

SEQ ID NO: 451030 - DNA, 25 bp, Homo sapien
tgcccctgcactgaattgatgtaag

SEQ ID NO: 451031 - DNA, 25 bp, Homo sapien
tgtagagcccagaaagatcgtgtca

SEQ ID NO: 451032 - DNA, 25 bp, Homo sapien
gaagaactcttagctgggagaagaa

SEQ ID NO: 451033 - DNA, 25 bp, Homo sapien
aagaaagatcacaggcttaaacaat

SEQ ID NO: 451034 - DNA, 25 bp, Homo sapien
tcacaggcttaaacaattgtaagat

SEQ ID NO: 451035 - DNA, 25 bp, Homo sapien
tattgaagaactcttagctgggaga

SEQ ID NO: 451036 - DNA, 25 bp, Homo sapien
ggtggcgcctatgaagacaggcccc

SEQ ID NO: 451037 - DNA, 25 bp, Homo sapien
ccaggtggcgcctatgaagacaggc

SEQ ID NO: 451038 - DNA, 25 bp, Homo sapien
caggtccaggtggcgcctatgaaga

SEQ ID NO: 451039 - DNA, 25 bp, Homo sapien
caggtggcgcctatgaagacaggcc

SEQ ID NO: 451040 - DNA, 25 bp, Homo sapien
cgtgggagaatatgtgaggacggca

SEQ ID NO: 451041 - DNA, 25 bp, Homo sapien
tgttgacaatgcagcctgccagtgg

SEQ ID NO: 451042 - DNA, 25 bp, Homo sapien
acctggaggaagttcttacatttca

SEQ ID NO: 451043 - DNA, 25 bp, Homo sapien
gaagattacctggaggaagttctta

SEQ ID NO: 451044 - DNA, 25 bp, Homo sapien
gtccttgctgaattaaatggcaccc

SEQ ID NO: 451045 - DNA, 25 bp, Homo sapien
ttaacagagttgatccacacgtcaa

SEQ ID NO: 451046 - DNA, 25 bp, Homo sapien
agaaactgtccttgctgaattaaat

SEQ ID NO: 451047 - DNA, 25 bp, Homo sapien
ccacacgtcaacagcaagagaaact

SEQ ID NO: 451048 - DNA, 25 bp, Homo sapien
atcttgggtaaatctggccttaggg

SEQ ID NO: 451049 - DNA, 25 bp, Homo sapien
tccaaattgccttggtccatgacct

SEQ ID NO: 451050 - DNA, 25 bp, Homo sapien
ggatccttggggaagatagagcaca

SEQ ID NO: 451051 - DNA, 25 bp, Homo sapien
atgattctccaaattgccttggtcc

SEQ ID NO: 451052 - DNA, 25 bp, Homo sapien
tgaccttttttacaccctcatcctg

SEQ ID NO: 451053 - DNA, 25 bp, Homo sapien
tatttttcactccaactggatacag

SEQ ID NO: 451054 - DNA, 25 bp, Homo sapien
tcactccaactggatacagccacat

SEQ ID NO: 451055 - DNA, 25 bp, Homo sapien
gttcatatttttcactccaactgga

SEQ ID NO: 451056 - DNA, 25 bp, Homo sapien
tttttcactccaactggatacagcc

SEQ ID NO: 451057 - DNA, 25 bp, Homo sapien
accttcagcaactcagctttacctc

SEQ ID NO: 451058 - DNA, 25 bp, Homo sapien
gaccttcagcaactcagctttacct

SEQ ID NO: 451059 - DNA, 25 bp, Homo sapien
gcgtggccaggtacttgacaaggca

SEQ ID NO: 451060 - DNA, 25 bp, Homo sapien
cattggcgtggccaggtacttgaca

SEQ ID NO: 451061 - DNA, 25 bp, Homo sapien
ggtacttgacaaggcaagtgggcat

SEQ ID NO: 451062 - DNA, 25 bp, Homo sapien
tggccaggtacttgacaaggcaagt

SEQ ID NO: 451063 - DNA, 25 bp, Homo sapien
gcagaccttaagaactatcagatag

SEQ ID NO: 451064 - DNA, 25 bp, Homo sapien
caagctataagtgaacctactccag

SEQ ID NO: 451065 - DNA, 25 bp, Homo sapien
cctactccaggagataagtgaagga

SEQ ID NO: 451066 - DNA, 25 bp, Homo sapien
taggatgacacctatgcagcagacc

SEQ ID NO: 451067 - DNA, 25 bp, Homo sapien
tcttgcaaccaacctggaatggcag

SEQ ID NO: 451068 - DNA, 25 bp, Homo sapien
agcttcccgtcccagcattcttgca

SEQ ID NO: 451069 - DNA, 25 bp, Homo sapien
ccaacctggaatggcagggttgagt

SEQ ID NO: 451070 - DNA, 25 bp, Homo sapien
tgcaaccaacctggaatggcagggt

SEQ ID NO: 451071 - DNA, 25 bp, Homo sapien
ctttggtcagtggtatctcttcctg

SEQ ID NO: 451072 - DNA, 25 bp, Homo sapien
tccttgacaacatccctgcagtaaa

SEQ ID NO: 451073 - DNA, 25 bp, Homo sapien
ctgttcccgtacaaatttgcagagg

SEQ ID NO: 451074 - DNA, 25 bp, Homo sapien
tgacattcctcagtgtcgccaggtt

SEQ ID NO: 451075 - DNA, 25 bp, Homo sapien
tccacgagagacaaatctgcaagca

SEQ ID NO: 451076 - DNA, 25 bp, Homo sapien
tatttctgtgactcggtccacgaga

SEQ ID NO: 451077 - DNA, 25 bp, Homo sapien
ctcggtccacgagagacaaatctgc

SEQ ID NO: 451078 - DNA, 25 bp, Homo sapien
tctgtgactcggtccacgagagaca

SEQ ID NO: 451079 - DNA, 25 bp, Homo sapien
gacttcccatattagctctgtaggg

SEQ ID NO: 451080 - DNA, 25 bp, Homo sapien
tccaagattaagtaggtgtagatag

SEQ ID NO: 451081 - DNA, 25 bp, Homo sapien
attccaggctttggaagaacctgct

SEQ ID NO: 451082 - DNA, 25 bp, Homo sapien
aggtgtagataggaagaatccactg

SEQ ID NO: 451083 - DNA, 25 bp, Homo sapien
ctgttgccactctccctcattttcc

SEQ ID NO: 451084 - DNA, 25 bp, Homo sapien
cccgtctacatgggcggtttcccat

SEQ ID NO: 451085 - DNA, 25 bp, Homo sapien
tcccgtctacatgggcggtttccca

SEQ ID NO: 451086 - DNA, 25 bp, Homo sapien
tgttgccactctccctcattttcca

SEQ ID NO: 451087 - DNA, 25 bp, Homo sapien
taggacaaatgtacagggtcaatcc

SEQ ID NO: 451088 - DNA, 25 bp, Homo sapien
acccagtgtgggtcttcagatcgta

SEQ ID NO: 451089 - DNA, 25 bp, Homo sapien
tcagatcgtaggacaaatgtacagg

SEQ ID NO: 451090 - DNA, 25 bp, Homo sapien
gggtcttcagatcgtaggacaaatg

SEQ ID NO: 451091 - DNA, 25 bp, Homo sapien
aagtttgcttataatttccaacatg

SEQ ID NO: 451092 - DNA, 25 bp, Homo sapien
agtttgcttataatttccaacatgt

SEQ ID NO: 451093 - DNA, 25 bp, Homo sapien
gtttgcttataatttccaacatgtt

SEQ ID NO: 451094 - DNA, 25 bp, Homo sapien
acactgaggttgtctatgaaactaa

SEQ ID NO: 451095 - DNA, 25 bp, Homo sapien
ctctgtcctggcaagattgataact

SEQ ID NO: 451096 - DNA, 25 bp, Homo sapien
ttgtaagatactttggaagaatgcc

SEQ ID NO: 451097 - DNA, 25 bp, Homo sapien
cactgaggttgtctatgaaactaaa

SEQ ID NO: 451098 - DNA, 25 bp, Homo sapien
gctgctggtctcagtctgtgcgtaa

SEQ ID NO: 451099 - DNA, 25 bp, Homo sapien
gggttaaggctgctggtctcagtct

SEQ ID NO: 451100 - DNA, 25 bp, Homo sapien
cagtctgtgcgtaagcgagtggtca

SEQ ID NO: 451101 - DNA, 25 bp, Homo sapien
tgtgcgtaagcgagtggtcacagtc

SEQ ID NO: 451102 - DNA, 25 bp, Homo sapien
accctgggtcgtcctgagcgtgtct

SEQ ID NO: 451103 - DNA, 25 bp, Homo sapien
aaggcgctgcaaccatgcttaatgg

SEQ ID NO: 451104 - DNA, 25 bp, Homo sapien
taatggcattgaagcgaaggaagtg

SEQ ID NO: 451105 - DNA, 25 bp, Homo sapien
ctcaaaacattcacaaaggcgctgc

SEQ ID NO: 451106 - DNA, 25 bp, Homo sapien
aatcctggggctctgatgagagccc

SEQ ID NO: 451107 - DNA, 25 bp, Homo sapien
tcctggggctctgatgagagcccag

SEQ ID NO: 451108 - DNA, 25 bp, Homo sapien
ctggggctctgatgagagcccagac

SEQ ID NO: 451109 - DNA, 25 bp, Homo sapien
caaatcctggggctctgatgagagc

SEQ ID NO: 451110 - DNA, 25 bp, Homo sapien
cactggatttcactgagacaccaaa

SEQ ID NO: 451111 - DNA, 25 bp, Homo sapien
gataaaggagatggccgttggctct

SEQ ID NO: 451112 - DNA, 25 bp, Homo sapien
caaggagggcagtttggcaacacca

SEQ ID NO: 451113 - DNA, 25 bp, Homo sapien
cagatgactacaactgcatggcttc

SEQ ID NO: 451114 - DNA, 25 bp, Homo sapien
tccatttagaaggacagcaggtcca

SEQ ID NO: 451115 - DNA, 25 bp, Homo sapien
ccccttagcagtgcgatggtcccat

SEQ ID NO: 451116 - DNA, 25 bp, Homo sapien
ggtgccccttagcagtgcgatggtc

SEQ ID NO: 451117 - DNA, 25 bp, Homo sapien
ccttagcagtgcgatggtcccattc

SEQ ID NO: 451118 - DNA, 25 bp, Homo sapien
tagcagtgcgatggtcccattcagg

SEQ ID NO: 451119 - DNA, 25 bp, Homo sapien
gaggagccagaagaatcccacagga

SEQ ID NO: 451120 - DNA, 25 bp, Homo sapien
gaagcactggctggacattccctat

SEQ ID NO: 451121 - DNA, 25 bp, Homo sapien
caaggaaaagcgctgtcacaaagtc

SEQ ID NO: 451122 - DNA, 25 bp, Homo sapien
tccctatagtaaaggacagccactg

SEQ ID NO: 451123 - DNA, 25 bp, Homo sapien
gcgtgcagcttggtcttagctatgc

SEQ ID NO: 451124 - DNA, 25 bp, Homo sapien
tggttccccacgtcacatccctggt

SEQ ID NO: 451125 - DNA, 25 bp, Homo sapien
catccctggtacacattctgccttg

SEQ ID NO: 451126 - DNA, 25 bp, Homo sapien
actgtgttttcactgcgtgcagctt

SEQ ID NO: 451127 - DNA, 25 bp, Homo sapien
cctgaatatgttccttcatttgatc

SEQ ID NO: 451128 - DNA, 25 bp, Homo sapien
cttcatttgatctagatctgtgttc

SEQ ID NO: 451129 - DNA, 25 bp, Homo sapien
catttgatctagatctgtgttcaat

SEQ ID NO: 451130 - DNA, 25 bp, Homo sapien
atcctgaatatgttccttcatttga

SEQ ID NO: 451131 - DNA, 25 bp, Homo sapien
tatgaaactggtgggctttgtcttt

SEQ ID NO: 451132 - DNA, 25 bp, Homo sapien
gtcttctgatctccggtccaggctc

SEQ ID NO: 451133 - DNA, 25 bp, Homo sapien
actttatgaaactggtgggctttgt

SEQ ID NO: 451134 - DNA, 25 bp, Homo sapien
gtctgttcccgcgtcttctgatctc

SEQ ID NO: 451135 - DNA, 25 bp, Homo sapien
taagtgttgttgataaagtcgaaac

SEQ ID NO: 451136 - DNA, 25 bp, Homo sapien
gttgttgataaagtcgaaactctga

SEQ ID NO: 451137 - DNA, 25 bp, Homo sapien
ttctaagtgttgttgataaagtcga

SEQ ID NO: 451138 - DNA, 25 bp, Homo sapien
taaagtcgaaactctgaagattaaa

SEQ ID NO: 451139 - DNA, 25 bp, Homo sapien
tctgcggccaactccggaggctgcg

SEQ ID NO: 451140 - DNA, 25 bp, Homo sapien
cttcttgtctgcggccaactccgga

SEQ ID NO: 451141 - DNA, 25 bp, Homo sapien
tgcggcggagcctcgacgtggggcg

SEQ ID NO: 451142 - DNA, 25 bp, Homo sapien
ggcgccgacttggagcccggctttg

SEQ ID NO: 451143 - DNA, 25 bp, Homo sapien
cgctcggccctctcgcttcggagct

SEQ ID NO: 451144 - DNA, 25 bp, Homo sapien
gctcggccctctcgcttcggagctc

SEQ ID NO: 451145 - DNA, 25 bp, Homo sapien
tcggccctctcgcttcggagctctc

SEQ ID NO: 451146 - DNA, 25 bp, Homo sapien
ggcgctcggccctctcgcttcggag

SEQ ID NO: 451147 - DNA, 25 bp, Homo sapien
ggtgtagtctctgctggcgcggcgc

SEQ ID NO: 451148 - DNA, 25 bp, Homo sapien
gagccacgcaggtacttggtgtagt

SEQ ID NO: 451149 - DNA, 25 bp, Homo sapien
ctccgagccacgcaggtacttggtg

SEQ ID NO: 451150 - DNA, 25 bp, Homo sapien
ccgagccacgcaggtacttggtgta

SEQ ID NO: 451151 - DNA, 25 bp, Homo sapien
gggggctggtgcggcgcaggcggcg

SEQ ID NO: 451152 - DNA, 25 bp, Homo sapien
gcagggggctggtgcggcgcaggcg

SEQ ID NO: 451153 - DNA, 25 bp, Homo sapien
gggctggtgcggcgcaggcggcggc

SEQ ID NO: 451154 - DNA, 25 bp, Homo sapien
gcggcagggggctggtgcggcgcag

SEQ ID NO: 451155 - DNA, 25 bp, Homo sapien
aatagaagaacagggcgacgctgca

SEQ ID NO: 451156 - DNA, 25 bp, Homo sapien
ctctgaaatagaagaacagggcgac

SEQ ID NO: 451157 - DNA, 25 bp, Homo sapien
cagggcgacgctgcagacaacctgg

SEQ ID NO: 451158 - DNA, 25 bp, Homo sapien
gggcgacgctgcagacaacctggcc

SEQ ID NO: 451159 - DNA, 25 bp, Homo sapien
gagatgggcgctctcagccgcgatc

SEQ ID NO: 451160 - DNA, 25 bp, Homo sapien
gccagactcagtttccaagtgcggg

SEQ ID NO: 451161 - DNA, 25 bp, Homo sapien
ggaatatgcaagctctgggtggccc

SEQ ID NO: 451162 - DNA, 25 bp, Homo sapien
tcaaacccatcgtccggccagggga

SEQ ID NO: 451163 - DNA, 25 bp, Homo sapien
cttctgatattctattaggatccat

SEQ ID NO: 451164 - DNA, 25 bp, Homo sapien
gactctccagagttgtgtcttgaaa

SEQ ID NO: 451165 - DNA, 25 bp, Homo sapien
ctcctacatgaatcaggtattaatt

SEQ ID NO: 451166 - DNA, 25 bp, Homo sapien
tccttgaaaggcctgtttaattctc

SEQ ID NO: 451167 - DNA, 25 bp, Homo sapien
gctgtcggtgtaagagaagtcattg

SEQ ID NO: 451168 - DNA, 25 bp, Homo sapien
gaattctcaagtggctttgtccagg

SEQ ID NO: 451169 - DNA, 25 bp, Homo sapien
tataacgtacacacaggttttgcac

SEQ ID NO: 451170 - DNA, 25 bp, Homo sapien
tactctggaatgaccagagacccag

SEQ ID NO: 451171 - DNA, 25 bp, Homo sapien
agttggaactacagcacaggttgcc

SEQ ID NO: 451172 - DNA, 25 bp, Homo sapien
accgtgcctgcccttgttcgtaata

SEQ ID NO: 451173 - DNA, 25 bp, Homo sapien
cctgagcagttggaactacagcaca

SEQ ID NO: 451174 - DNA, 25 bp, Homo sapien
ggagttacaacatgagtcaatctaa

SEQ ID NO: 451175 - DNA, 25 bp, Homo sapien
tgcttcctaccttcttccctgggtc

SEQ ID NO: 451176 - DNA, 25 bp, Homo sapien
ctcttgcaaaccctcctgcttccta

SEQ ID NO: 451177 - DNA, 25 bp, Homo sapien
ttcctcttgcaaaccctcctgcttc

SEQ ID NO: 451178 - DNA, 25 bp, Homo sapien
tattttcctcttgcaaaccctcctg

SEQ ID NO: 451179 - DNA, 25 bp, Homo sapien
ggaaggttagcccaagatcccaggc

SEQ ID NO: 451180 - DNA, 25 bp, Homo sapien
tgctgtcatgctctccaaccaagga

SEQ ID NO: 451181 - DNA, 25 bp, Homo sapien
gatcccaggccacataatgaaggct

SEQ ID NO: 451182 - DNA, 25 bp, Homo sapien
aaggctcctctttcaagcatgtcct

SEQ ID NO: 451183 - DNA, 25 bp, Homo sapien
ttcagatgtgcattttcgaagtccc

SEQ ID NO: 451184 - DNA, 25 bp, Homo sapien
ctgttcagatgtgcattttcgaagt

SEQ ID NO: 451185 - DNA, 25 bp, Homo sapien
gatgtgcattttcgaagtccctcag

SEQ ID NO: 451186 - DNA, 25 bp, Homo sapien
cagatgtgcattttcgaagtccctc

SEQ ID NO: 451187 - DNA, 25 bp, Homo sapien
tggcatctggctgctggggatcctg

SEQ ID NO: 451188 - DNA, 25 bp, Homo sapien
actggcatctggctgctggggatcc

SEQ ID NO: 451189 - DNA, 25 bp, Homo sapien
cttgactggcatctggctgctgggg

SEQ ID NO: 451190 - DNA, 25 bp, Homo sapien
catctggctgctggggatcctggga

SEQ ID NO: 451191 - DNA, 25 bp, Homo sapien
tcccagttcttgtcaggcaggtgga

SEQ ID NO: 451192 - DNA, 25 bp, Homo sapien
caaatgtgagtgtaactgtgcggtc

SEQ ID NO: 451193 - DNA, 25 bp, Homo sapien
taattctgagattgaacgctacccc

SEQ ID NO: 451194 - DNA, 25 bp, Homo sapien
ttataatcaagaaagccaggccagg

SEQ ID NO: 451195 - DNA, 25 bp, Homo sapien
tctgatgtgctgtgatccaacgata

SEQ ID NO: 451196 - DNA, 25 bp, Homo sapien
gatgtgctgtgatccaacgatatgt

SEQ ID NO: 451197 - DNA, 25 bp, Homo sapien
gctgtgatccaacgatatgttgtaa

SEQ ID NO: 451198 - DNA, 25 bp, Homo sapien
tgctctgatgtgctgtgatccaacg

SEQ ID NO: 451199 - DNA, 25 bp, Homo sapien
ctcctcttggccagatctaaccatg

SEQ ID NO: 451200 - DNA, 25 bp, Homo sapien
cagatgggatgtcggtggcattaat

SEQ ID NO: 451201 - DNA, 25 bp, Homo sapien
agatctaaccatgagccatccacca

SEQ ID NO: 451202 - DNA, 25 bp, Homo sapien
tggcattaatagtgagatgagcaaa

SEQ ID NO: 451203 - DNA, 25 bp, Homo sapien
gatactctgtagctaggtctcctga

SEQ ID NO: 451204 - DNA, 25 bp, Homo sapien
gaggacagactcactttatgggaac

SEQ ID NO: 451205 - DNA, 25 bp, Homo sapien
catgatgtcgaaagcaaatgttggc

SEQ ID NO: 451206 - DNA, 25 bp, Homo sapien
caaccccgatcatggtaccaagagg

SEQ ID NO: 451207 - DNA, 25 bp, Homo sapien
taaatacgcgtgttctctacaaggt

SEQ ID NO: 451208 - DNA, 25 bp, Homo sapien
gggccatgcctcttagtagtctcac

SEQ ID NO: 451209 - DNA, 25 bp, Homo sapien
tctacaaggtcaagagcatggatac

SEQ ID NO: 451210 - DNA, 25 bp, Homo sapien
gcatggatactgagtcgtgtaccgt

SEQ ID NO: 451211 - DNA, 25 bp, Homo sapien
tttttgcacaggcttgacaagtctg

SEQ ID NO: 451212 - DNA, 25 bp, Homo sapien
cagtttctcataaggtcaccccgta

SEQ ID NO: 451213 - DNA, 25 bp, Homo sapien
tccccagggaatttacaaagtgcac

SEQ ID NO: 451214 - DNA, 25 bp, Homo sapien
gatccttcaattgcgctagatgaca

SEQ ID NO: 451215 - DNA, 25 bp, Homo sapien
ggtcactttaccaaagacttcagag

SEQ ID NO: 451216 - DNA, 25 bp, Homo sapien
caggaatgcaaccacaacaaactca

SEQ ID NO: 451217 - DNA, 25 bp, Homo sapien
gacttcagagtcaccaatatggttc

SEQ ID NO: 451218 - DNA, 25 bp, Homo sapien
ttgtagcgccagtcaaactctgcct

SEQ ID NO: 451219 - DNA, 25 bp, Homo sapien
aattgaaaggaccagagtggctggt

SEQ ID NO: 451220 - DNA, 25 bp, Homo sapien
ccaaattgaaaggaccagagtggct

SEQ ID NO: 451221 - DNA, 25 bp, Homo sapien
gccaaattgaaaggaccagagtggc

SEQ ID NO: 451222 - DNA, 25 bp, Homo sapien
caaattgaaaggaccagagtggctg

SEQ ID NO: 451223 - DNA, 25 bp, Homo sapien
caggtacctgaaccaggaagaccat

SEQ ID NO: 451224 - DNA, 25 bp, Homo sapien
caggcagaaaacaggtacctgaacc

SEQ ID NO: 451225 - DNA, 25 bp, Homo sapien
caccaggcagaaaacaggtacctga

SEQ ID NO: 451226 - DNA, 25 bp, Homo sapien
gcaccaggcagaaaacaggtacctg

SEQ ID NO: 451227 - DNA, 25 bp, Homo sapien
agggaaggcagaggagatggaatag

SEQ ID NO: 451228 - DNA, 25 bp, Homo sapien
ctaaagggaaggcagaggagatgga

SEQ ID NO: 451229 - DNA, 25 bp, Homo sapien
gaaggcagaggagatggaataggta

SEQ ID NO: 451230 - DNA, 25 bp, Homo sapien
aggcagaggagatggaataggtaga

SEQ ID NO: 451231 - DNA, 25 bp, Homo sapien
acaaagaaagaccattgctgtttct

SEQ ID NO: 451232 - DNA, 25 bp, Homo sapien
cacaagtaccgcatctgcagtctgg

SEQ ID NO: 451233 - DNA, 25 bp, Homo sapien
tcacaagtaccgcatctgcagtctg

SEQ ID NO: 451234 - DNA, 25 bp, Homo sapien
acaagtaccgcatctgcagtctggc

SEQ ID NO: 451235 - DNA, 25 bp, Homo sapien
gttgctgggcttatggctcaaatcc

SEQ ID NO: 451236 - DNA, 25 bp, Homo sapien
agcaaccctcgccggcttcatccat

SEQ ID NO: 451237 - DNA, 25 bp, Homo sapien
catctcccatacgaaactgtcctca

SEQ ID NO: 451238 - DNA, 25 bp, Homo sapien
tgctgggcttatggctcaaatccaa

SEQ ID NO: 451239 - DNA, 25 bp, Homo sapien
acaaccagagctgtttgggacccaa

SEQ ID NO: 451240 - DNA, 25 bp, Homo sapien
ccatgcaaatgggaaggtgcttgcc

SEQ ID NO: 451241 - DNA, 25 bp, Homo sapien
aggccaggtctcacgttgtcacaca

SEQ ID NO: 451242 - DNA, 25 bp, Homo sapien
ggcatacaggcagaaggataaaccc

SEQ ID NO: 451243 - DNA, 25 bp, Homo sapien
gcttttgtgttgtgctggcccctag

SEQ ID NO: 451244 - DNA, 25 bp, Homo sapien
tcaagttgcctgtgacaacgggata

SEQ ID NO: 451245 - DNA, 25 bp, Homo sapien
ctactatcagagcttaaagggtaaa

SEQ ID NO: 451246 - DNA, 25 bp, Homo sapien
cactactatcagagcttaaagggta

SEQ ID NO: 451247 - DNA, 25 bp, Homo sapien
ttgcctgtgacaacgggatagtggt

SEQ ID NO: 451248 - DNA, 25 bp, Homo sapien
gagtctggtttaagatcttttctcc

SEQ ID NO: 451249 - DNA, 25 bp, Homo sapien
agtctggtttaagatcttttctcct

SEQ ID NO: 451250 - DNA, 25 bp, Homo sapien
tgagaattcctgtcttatgttcttc

SEQ ID NO: 451251 - DNA, 25 bp, Homo sapien
tacatacaacctttgagaattcctg

SEQ ID NO: 451252 - DNA, 25 bp, Homo sapien
taagtctattgttttccggcctctg

SEQ ID NO: 451253 - DNA, 25 bp, Homo sapien
tctgctgctaagtctattgttttcc

SEQ ID NO: 451254 - DNA, 25 bp, Homo sapien
tcaccccttgatccatatccatatt

SEQ ID NO: 451255 - DNA, 25 bp, Homo sapien
cttgatccatatccatattcccact

SEQ ID NO: 451256 - DNA, 25 bp, Homo sapien
agggactcaccccttgatccatatc

SEQ ID NO: 451257 - DNA, 25 bp, Homo sapien
gatccatatccatattcccactgag

SEQ ID NO: 451258 - DNA, 25 bp, Homo sapien
caaacaaacaaaaacctgaatcaat

SEQ ID NO: 451259 - DNA, 25 bp, Homo sapien
aacaaacaaaaacctgaatcaatag

SEQ ID NO: 451260 - DNA, 25 bp, Homo sapien
tacaaacaaacaaaaacctgaatca

SEQ ID NO: 451261 - DNA, 25 bp, Homo sapien
caaacaaaaacctgaatcaatagtt

SEQ ID NO: 451262 - DNA, 25 bp, Homo sapien
tggtggctttcgaaatgaataagcc

SEQ ID NO: 451263 - DNA, 25 bp, Homo sapien
aaccatcacttgtggtggctttcga

SEQ ID NO: 451264 - DNA, 25 bp, Homo sapien
gccatgaatactgcttctgagttat

SEQ ID NO: 451265 - DNA, 25 bp, Homo sapien
ttctgagttatcataaccactagga

SEQ ID NO: 451266 - DNA, 25 bp, Homo sapien
gatcttcaggatacttagcgcttgg

SEQ ID NO: 451267 - DNA, 25 bp, Homo sapien
tagcgcttggttcagctctcttgaa

SEQ ID NO: 451268 - DNA, 25 bp, Homo sapien
cttcagggtccttagatcttagatc

SEQ ID NO: 451269 - DNA, 25 bp, Homo sapien
tgtgagttcactgctcagcgttgcc

SEQ ID NO: 451270 - DNA, 25 bp, Homo sapien
ccctacgcagtcctttaacattgaa

SEQ ID NO: 451271 - DNA, 25 bp, Homo sapien
tggcccagccaagctgtatagcttt

SEQ ID NO: 451272 - DNA, 25 bp, Homo sapien
gcctgttgtgttccttgatccatag

SEQ ID NO: 451273 - DNA, 25 bp, Homo sapien
gaagtaaaacgtcatgtccaaagca

SEQ ID NO: 451274 - DNA, 25 bp, Homo sapien
agagtatgtcttttgcccttatgtg

SEQ ID NO: 451275 - DNA, 25 bp, Homo sapien
ccagagtatgtcttttgcccttatg

SEQ ID NO: 451276 - DNA, 25 bp, Homo sapien
actccagaagtagccacttgtgact

SEQ ID NO: 451277 - DNA, 25 bp, Homo sapien
agtagccacttgtgactcaaaccca

SEQ ID NO: 451278 - DNA, 25 bp, Homo sapien
gaggataccaccacatgaggctgac

SEQ ID NO: 451279 - DNA, 25 bp, Homo sapien
cagactgtatctgggtcctcctggg

SEQ ID NO: 451280 - DNA, 25 bp, Homo sapien
cataccagggaatgaacggcagagg

SEQ ID NO: 451281 - DNA, 25 bp, Homo sapien
aactttgccgcaataagagtggagc

SEQ ID NO: 451282 - DNA, 25 bp, Homo sapien
gagatgtgaaatgctctaaatctca

SEQ ID NO: 451283 - DNA, 25 bp, Homo sapien
cagagattggcacttcctacaaggc

SEQ ID NO: 451284 - DNA, 25 bp, Homo sapien
tgcaagacgcctctaagagctataa

SEQ ID NO: 451285 - DNA, 25 bp, Homo sapien
tccatcatgtagtttgtagattgtg

SEQ ID NO: 451286 - DNA, 25 bp, Homo sapien
caaagtcataaagaacatccttcct

SEQ ID NO: 451287 - DNA, 25 bp, Homo sapien
tttagaaaagtaggccaaagtcata

SEQ ID NO: 451288 - DNA, 25 bp, Homo sapien
cattaatcacctccttgtgaacaac

SEQ ID NO: 451289 - DNA, 25 bp, Homo sapien
ttcctgagtggtgactttcaggctc

SEQ ID NO: 451290 - DNA, 25 bp, Homo sapien
tttccagctttactattcctcagaa

SEQ ID NO: 451291 - DNA, 25 bp, Homo sapien
gaatcaggggaggtttcagtttcac

SEQ ID NO: 451292 - DNA, 25 bp, Homo sapien
tcagtttcacaaagacgtatggtca

SEQ ID NO: 451293 - DNA, 25 bp, Homo sapien
gctgaatcaggggaggtttcagttt

SEQ ID NO: 451294 - DNA, 25 bp, Homo sapien
cagtttcacaaagacgtatggtcat

SEQ ID NO: 451295 - DNA, 25 bp, Homo sapien
tgtagttttcttacgcggactctgt

SEQ ID NO: 451296 - DNA, 25 bp, Homo sapien
tcagtgtagttttcttacgcggact

SEQ ID NO: 451297 - DNA, 25 bp, Homo sapien
gccattcctattcagtgtagttttc

SEQ ID NO: 451298 - DNA, 25 bp, Homo sapien
ctgccattcctattcagtgtagttt

SEQ ID NO: 451299 - DNA, 25 bp, Homo sapien
tattgtaatacatgtggagactgat

SEQ ID NO: 451300 - DNA, 25 bp, Homo sapien
taaacatacacatgcttaaggagta

SEQ ID NO: 451301 - DNA, 25 bp, Homo sapien
tgcacactcataggttcataaacat

SEQ ID NO: 451302 - DNA, 25 bp, Homo sapien
tacccgaccttcacgcatgttcatg

SEQ ID NO: 451303 - DNA, 25 bp, Homo sapien
ctttagtaaggaagtgtcatagatg

SEQ ID NO: 451304 - DNA, 25 bp, Homo sapien
aagtgtcatagatggagggaggaac

SEQ ID NO: 451305 - DNA, 25 bp, Homo sapien
gaagtgtcatagatggagggaggaa

SEQ ID NO: 451306 - DNA, 25 bp, Homo sapien
tagtaaggaagtgtcatagatggag

SEQ ID NO: 451307 - DNA, 25 bp, Homo sapien
caacagggagccatagtgtggccaa

SEQ ID NO: 451308 - DNA, 25 bp, Homo sapien
tcagccacgaagaggtgaccgtcta

SEQ ID NO: 451309 - DNA, 25 bp, Homo sapien
gagctcctgaaatgggacgagtgta

SEQ ID NO: 451310 - DNA, 25 bp, Homo sapien
tggccaattagtgagtttcccatca

SEQ ID NO: 451311 - DNA, 25 bp, Homo sapien
gggcctggagttgtaaatcctcata

SEQ ID NO: 451312 - DNA, 25 bp, Homo sapien
tgaatgtagcgggtctgcagggcct

SEQ ID NO: 451313 - DNA, 25 bp, Homo sapien
taaatcctcataatgctgtaaaagt

SEQ ID NO: 451314 - DNA, 25 bp, Homo sapien
taaaagtagcgctgttgcccttggt

SEQ ID NO: 451315 - DNA, 25 bp, Homo sapien
caaggcttcccgttgagtaatatag

SEQ ID NO: 451316 - DNA, 25 bp, Homo sapien
taagtacaagagcataagacaaggc

SEQ ID NO: 451317 - DNA, 25 bp, Homo sapien
ctgaggctctcttggttgaatctct

SEQ ID NO: 451318 - DNA, 25 bp, Homo sapien
tggttgaatctctaagtacaagagc

SEQ ID NO: 451319 - DNA, 25 bp, Homo sapien
ggtagtactgatggacatcttcttg

SEQ ID NO: 451320 - DNA, 25 bp, Homo sapien
gaaccacagatacaggtagtactga

SEQ ID NO: 451321 - DNA, 25 bp, Homo sapien
tcagttcctgagcacttggcgcctt

SEQ ID NO: 451322 - DNA, 25 bp, Homo sapien
ctttgggccctaggtagaaccacag

SEQ ID NO: 451323 - DNA, 25 bp, Homo sapien
tagtataggccaagttaggtctccc

SEQ ID NO: 451324 - DNA, 25 bp, Homo sapien
caacaattgtgggttactgggactc

SEQ ID NO: 451325 - DNA, 25 bp, Homo sapien
ttcaagtaaggtctcaagtgcaggg

SEQ ID NO: 451326 - DNA, 25 bp, Homo sapien
gctttatgagggctaccacgcagct

SEQ ID NO: 451327 - DNA, 25 bp, Homo sapien
ttgtgctcctaggaaactatccagg

SEQ ID NO: 451328 - DNA, 25 bp, Homo sapien
agtacacactgaatccacgccacag

SEQ ID NO: 451329 - DNA, 25 bp, Homo sapien
cacagttaccagtaagatggtgact

SEQ ID NO: 451330 - DNA, 25 bp, Homo sapien
aattaagcctaaatctgccatgtga

SEQ ID NO: 451331 - DNA, 25 bp, Homo sapien
tttggtagtggtgatagggtgttga

SEQ ID NO: 451332 - DNA, 25 bp, Homo sapien
cagtgcctaaagattttggtagtgg

SEQ ID NO: 451333 - DNA, 25 bp, Homo sapien
ctaatacagtgcctaaagattttgg

SEQ ID NO: 451334 - DNA, 25 bp, Homo sapien
ggtgatagggtgttgatttctgaac

SEQ ID NO: 451335 - DNA, 25 bp, Homo sapien
ggtacaggaactcttgaacacattc

SEQ ID NO: 451336 - DNA, 25 bp, Homo sapien
caaggagatatttccgctacccaaa

SEQ ID NO: 451337 - DNA, 25 bp, Homo sapien
tctacatgagatattgagggttatc

SEQ ID NO: 451338 - DNA, 25 bp, Homo sapien
aagccaaggattcatttggtaacac

SEQ ID NO: 451339 - DNA, 25 bp, Homo sapien
caaagcccaagtttatgactcaggg

SEQ ID NO: 451340 - DNA, 25 bp, Homo sapien
tgagatctgccgtgagtttgtcaca

SEQ ID NO: 451341 - DNA, 25 bp, Homo sapien
gtcaccagcgtagggcagtcagaga

SEQ ID NO: 451342 - DNA, 25 bp, Homo sapien
gacatgggagtcaaggacaaagccc

SEQ ID NO: 451343 - DNA, 25 bp, Homo sapien
gtattttagcaccatatgctcattt

SEQ ID NO: 451344 - DNA, 25 bp, Homo sapien
tattcatttttattaatagaaaaca

SEQ ID NO: 451345 - DNA, 25 bp, Homo sapien
ctttattccaaatttgttatacttg

SEQ ID NO: 451346 - DNA, 25 bp, Homo sapien
gttatacttgaaattgctaatttaa

SEQ ID NO: 451347 - DNA, 25 bp, Homo sapien
ttttgtcactattcatttttattaa

SEQ ID NO: 451348 - DNA, 25 bp, Homo sapien
atgaagcctcttcactgtactgctc

SEQ ID NO: 451349 - DNA, 25 bp, Homo sapien
atccagagagaggtgccgttgaatc

SEQ ID NO: 451350 - DNA, 25 bp, Homo sapien
agaatgccattgaatccagagagag

SEQ ID NO: 451351 - DNA, 25 bp, Homo sapien
cattgaatccagagagaggtgccgt

SEQ ID NO: 451352 - DNA, 25 bp, Homo sapien
catgcagtgccagctgtcactgaaa

SEQ ID NO: 451353 - DNA, 25 bp, Homo sapien
gccagctgtcactgaaagctgcttc

SEQ ID NO: 451354 - DNA, 25 bp, Homo sapien
aagctgcttccaaaccaatttctat

SEQ ID NO: 451355 - DNA, 25 bp, Homo sapien
tcctcctttaccatgcagtgccagc

SEQ ID NO: 451356 - DNA, 25 bp, Homo sapien
aagctgggagtgtgtcaccaggcat

SEQ ID NO: 451357 - DNA, 25 bp, Homo sapien
gaagctgggagtgtgtcaccaggca

SEQ ID NO: 451358 - DNA, 25 bp, Homo sapien
gggaagctgggagtgtgtcaccagg

SEQ ID NO: 451359 - DNA, 25 bp, Homo sapien
cttgggaagctgggagtgtgtcacc

SEQ ID NO: 451360 - DNA, 25 bp, Homo sapien
gttgctcttggagtcatttaggctg

SEQ ID NO: 451361 - DNA, 25 bp, Homo sapien
ctttgttgcacaatgaacgggttga

SEQ ID NO: 451362 - DNA, 25 bp, Homo sapien
aacgggttgatgtgtgttgctcttg

SEQ ID NO: 451363 - DNA, 25 bp, Homo sapien
cagttgctgatatccatgaccagga

SEQ ID NO: 451364 - DNA, 25 bp, Homo sapien
aggctggtcacagcatcccgtgctg

SEQ ID NO: 451365 - DNA, 25 bp, Homo sapien
gtaaaagccatgactccatagccct

SEQ ID NO: 451366 - DNA, 25 bp, Homo sapien
tgacatcaacgcaagggcaccgtgt

SEQ ID NO: 451367 - DNA, 25 bp, Homo sapien
catagccctgtgtgtccgtgctcct

SEQ ID NO: 451368 - DNA, 25 bp, Homo sapien
gacattggaatagcgaacacccaga

SEQ ID NO: 451369 - DNA, 25 bp, Homo sapien
tagtaatccattacgagacattgga

SEQ ID NO: 451370 - DNA, 25 bp, Homo sapien
gagtggtctatctgggcctgctgtt

SEQ ID NO: 451371 - DNA, 25 bp, Homo sapien
tggccccgcagggatgaactttcct

SEQ ID NO: 451372 - DNA, 25 bp, Homo sapien
gcctcaacagagagcaaccacatgg

SEQ ID NO: 451373 - DNA, 25 bp, Homo sapien
catggccagctctagacaaagtggg

SEQ ID NO: 451374 - DNA, 25 bp, Homo sapien
ccttataaaccagttcttggctgtg

SEQ ID NO: 451375 - DNA, 25 bp, Homo sapien
caattccgatgagggctgacagctg

SEQ ID NO: 451376 - DNA, 25 bp, Homo sapien
agctgaaggaatcgtcgtcagtcat

SEQ ID NO: 451377 - DNA, 25 bp, Homo sapien
catttaatctgccacgttgaatcaa

SEQ ID NO: 451378 - DNA, 25 bp, Homo sapien
caagaaaatcgttccaatgtaagat

SEQ ID NO: 451379 - DNA, 25 bp, Homo sapien
taaaacctgactcgcaggtgactgg

SEQ ID NO: 451380 - DNA, 25 bp, Homo sapien
caaagttccaccatttctatgctta

SEQ ID NO: 451381 - DNA, 25 bp, Homo sapien
tctctactgccagggaaatgctaca

SEQ ID NO: 451382 - DNA, 25 bp, Homo sapien
catttatgcatgtttggaggagctg

SEQ ID NO: 451383 - DNA, 25 bp, Homo sapien
aactgacctcgaaaagcctcatgag

SEQ ID NO: 451384 - DNA, 25 bp, Homo sapien
cacacttgaccgtgcagtcaggagt

SEQ ID NO: 451385 - DNA, 25 bp, Homo sapien
ctgggtgctctgtctacactattct

SEQ ID NO: 451386 - DNA, 25 bp, Homo sapien
tatccatatggtttgtcctccttca

SEQ ID NO: 451387 - DNA, 25 bp, Homo sapien
aggtgctgcatgatccagactcctt

SEQ ID NO: 451388 - DNA, 25 bp, Homo sapien
tcttgaattccacggtctcagtgag

SEQ ID NO: 451389 - DNA, 25 bp, Homo sapien
ctgttctcgatacaagactgacaga

SEQ ID NO: 451390 - DNA, 25 bp, Homo sapien
agccgaagtccttccagcagcttac

SEQ ID NO: 451391 - DNA, 25 bp, Homo sapien
ctctgcatacccctccaatggcttt

SEQ ID NO: 451392 - DNA, 25 bp, Homo sapien
agattctgactctgcatacccctcc

SEQ ID NO: 451393 - DNA, 25 bp, Homo sapien
gcagcaagttttctactcacacaca

SEQ ID NO: 451394 - DNA, 25 bp, Homo sapien
gactccaaggcaaaagtcaaccagg

SEQ ID NO: 451395 - DNA, 25 bp, Homo sapien
ggaagctatccccatggtcagttca

SEQ ID NO: 451396 - DNA, 25 bp, Homo sapien
aatgcttttctggaccgactccaag

SEQ ID NO: 451397 - DNA, 25 bp, Homo sapien
tttgcagtctgcactcatcatccat

SEQ ID NO: 451398 - DNA, 25 bp, Homo sapien
cttatgtcttcatgacaaggcatca

SEQ ID NO: 451399 - DNA, 25 bp, Homo sapien
tgacaaggcatcagtcttcgcaggg

SEQ ID NO: 451400 - DNA, 25 bp, Homo sapien
tcttcgcagggtttgagtgaattga

SEQ ID NO: 451401 - DNA, 25 bp, Homo sapien
gaacagggcaccatcagacaattgg

SEQ ID NO: 451402 - DNA, 25 bp, Homo sapien
tcttattattgacctgggctcgaag

SEQ ID NO: 451403 - DNA, 25 bp, Homo sapien
tgctggaaatggcaacccctcttct

SEQ ID NO: 451404 - DNA, 25 bp, Homo sapien
tatagttgacccttctgtagaacag

SEQ ID NO: 451405 - DNA, 25 bp, Homo sapien
aaattttgggtggtagcttctgcct

SEQ ID NO: 451406 - DNA, 25 bp, Homo sapien
cctttgatttggttggtgctctgaa

SEQ ID NO: 451407 - DNA, 25 bp, Homo sapien
caaaggtattactgtggatgccgga

SEQ ID NO: 451408 - DNA, 25 bp, Homo sapien
tccccattcttgatagccaaggcca

SEQ ID NO: 451409 - DNA, 25 bp, Homo sapien
tccttcttctagaaacttatttgta

SEQ ID NO: 451410 - DNA, 25 bp, Homo sapien
ttctatatcttcaatacattcttct

SEQ ID NO: 451411 - DNA, 25 bp, Homo sapien
tatatcttcaatacattcttctcca

SEQ ID NO: 451412 - DNA, 25 bp, Homo sapien
tctagaaacttatttgtaattcctc

SEQ ID NO: 451413 - DNA, 25 bp, Homo sapien
tggtggctccttctggtcaaaactt

SEQ ID NO: 451414 - DNA, 25 bp, Homo sapien
ggatctgctgtagttggtgccagta

SEQ ID NO: 451415 - DNA, 25 bp, Homo sapien
tcaccaagaagatgatagagcactg

SEQ ID NO: 451416 - DNA, 25 bp, Homo sapien
tagcctcatggatgcacagtggatc

SEQ ID NO: 451417 - DNA, 25 bp, Homo sapien
tgcaaaagatgaaggatgaacaaca

SEQ ID NO: 451418 - DNA, 25 bp, Homo sapien
tcctgaaaacaagaatacaagcatt

SEQ ID NO: 451419 - DNA, 25 bp, Homo sapien
agctgggcttacagagattctctaa

SEQ ID NO: 451420 - DNA, 25 bp, Homo sapien
caagcccctactagttattgctaac

SEQ ID NO: 451421 - DNA, 25 bp, Homo sapien
acatgtagaaatgccccgcatactg

SEQ ID NO: 451422 - DNA, 25 bp, Homo sapien
agaaatgccccgcatactgcgtgct

SEQ ID NO: 451423 - DNA, 25 bp, Homo sapien
gaaatgccccgcatactgcgtgctc

SEQ ID NO: 451424 - DNA, 25 bp, Homo sapien
gagacatgtagaaatgccccgcata

SEQ ID NO: 451425 - DNA, 25 bp, Homo sapien
taagaagcggcagtcagtaaactga

SEQ ID NO: 451426 - DNA, 25 bp, Homo sapien
gctttatatcctgcggcatgagtgg

SEQ ID NO: 451427 - DNA, 25 bp, Homo sapien
cctgcacttggcttaggatattcag

SEQ ID NO: 451428 - DNA, 25 bp, Homo sapien
gcagtgataattggcacaaggacca

SEQ ID NO: 451429 - DNA, 25 bp, Homo sapien
tccaacaggcagtagagtcacggta

SEQ ID NO: 451430 - DNA, 25 bp, Homo sapien
ccagttggacttcccacgaggatgt

SEQ ID NO: 451431 - DNA, 25 bp, Homo sapien
gagtccagggttcttagtccagttg

SEQ ID NO: 451432 - DNA, 25 bp, Homo sapien
ccccaagggcaaggtgaaaacagtg

SEQ ID NO: 451433 - DNA, 25 bp, Homo sapien
agcaaaaacaggtcataacataacc

SEQ ID NO: 451434 - DNA, 25 bp, Homo sapien
taacataaccaactagcaccaaagc

SEQ ID NO: 451435 - DNA, 25 bp, Homo sapien
agcaccaaagccagtagagcaggaa

SEQ ID NO: 451436 - DNA, 25 bp, Homo sapien
gcaccaaagccagtagagcaggaag

SEQ ID NO: 451437 - DNA, 25 bp, Homo sapien
taatgaaggtatggtttcatgtatg

SEQ ID NO: 451438 - DNA, 25 bp, Homo sapien
gaaggtatggtttcatgtatggaag

SEQ ID NO: 451439 - DNA, 25 bp, Homo sapien
agaggtagtgaagcaatctttacat

SEQ ID NO: 451440 - DNA, 25 bp, Homo sapien
tagtgaagcaatctttacatggctt

SEQ ID NO: 451441 - DNA, 25 bp, Homo sapien
taaacgggtttacaatcagaagcag

SEQ ID NO: 451442 - DNA, 25 bp, Homo sapien
taacgatggtcaaaacggtgcacac

SEQ ID NO: 451443 - DNA, 25 bp, Homo sapien
gaactagcttttgacggtagcccag

SEQ ID NO: 451444 - DNA, 25 bp, Homo sapien
ccagaatcagttacacaagttaggg

SEQ ID NO: 451445 - DNA, 25 bp, Homo sapien
gcgttccaagcccagatgcagttgt

SEQ ID NO: 451446 - DNA, 25 bp, Homo sapien
gaaagtattaataactggcgttcca

SEQ ID NO: 451447 - DNA, 25 bp, Homo sapien
gaaacgcagtgctcacaatggccat

SEQ ID NO: 451448 - DNA, 25 bp, Homo sapien
gccaaagccgtcaacatcaagaggt

SEQ ID NO: 451449 - DNA, 25 bp, Homo sapien
aaagatctctcaaagtttgctccag

SEQ ID NO: 451450 - DNA, 25 bp, Homo sapien
caaccaggtacagagcaaagcacag

SEQ ID NO: 451451 - DNA, 25 bp, Homo sapien
tcaagtctataaactggaagtgtcc

SEQ ID NO: 451452 - DNA, 25 bp, Homo sapien
gacaattgttagaaaggtcaggaac

SEQ ID NO: 451453 - DNA, 25 bp, Homo sapien
tttaaagcctattgagaaacacaag

SEQ ID NO: 451454 - DNA, 25 bp, Homo sapien
aaagatggatcgtctatatgacaag

SEQ ID NO: 451455 - DNA, 25 bp, Homo sapien
caagaagaggtatatgtgtgaggtt

SEQ ID NO: 451456 - DNA, 25 bp, Homo sapien
gaccaataactcatgaaataagcag

SEQ ID NO: 451457 - DNA, 25 bp, Homo sapien
cactcttgcttaagattgggttgga

SEQ ID NO: 451458 - DNA, 25 bp, Homo sapien
gcttaagattgggttggatatagaa

SEQ ID NO: 451459 - DNA, 25 bp, Homo sapien
tgggttggatatagaatttctctct

SEQ ID NO: 451460 - DNA, 25 bp, Homo sapien
gattgggttggatatagaatttctc

SEQ ID NO: 451461 - DNA, 25 bp, Homo sapien
gaaggggccattagcccaggaatgt

SEQ ID NO: 451462 - DNA, 25 bp, Homo sapien
gagcgtatcctgcaatatccaggtg

SEQ ID NO: 451463 - DNA, 25 bp, Homo sapien
cttaaaatagagagcgtatcctgca

SEQ ID NO: 451464 - DNA, 25 bp, Homo sapien
ctgcaatatccaggtgcccaatata

SEQ ID NO: 451465 - DNA, 25 bp, Homo sapien
ggaagattcatgcttaggtcttgtg

SEQ ID NO: 451466 - DNA, 25 bp, Homo sapien
tagaggaggcactctctttacggag

SEQ ID NO: 451467 - DNA, 25 bp, Homo sapien
gaggcactctctttacggagcatag

SEQ ID NO: 451468 - DNA, 25 bp, Homo sapien
tgcttaggtcttgtgattctagagg

SEQ ID NO: 451469 - DNA, 25 bp, Homo sapien
taagccctgcgaactgatgttggtc

SEQ ID NO: 451470 - DNA, 25 bp, Homo sapien
ggcactgggacgttcttgaatcaca

SEQ ID NO: 451471 - DNA, 25 bp, Homo sapien
tgtgctattaaaggcgaggttcccg

SEQ ID NO: 451472 - DNA, 25 bp, Homo sapien
tgggtaacgtgtcccgtgcaagcac

SEQ ID NO: 451473 - DNA, 25 bp, Homo sapien
tcgccaactggagcgatgacaccac

SEQ ID NO: 451474 - DNA, 25 bp, Homo sapien
gagggctgcaagtactcagcgtagc

SEQ ID NO: 451475 - DNA, 25 bp, Homo sapien
tcagcgtagcgcaaactctcgccaa

SEQ ID NO: 451476 - DNA, 25 bp, Homo sapien
tctctgctggtcgacgtcggcgtct

SEQ ID NO: 451477 - DNA, 25 bp, Homo sapien
gggtgaggcggtagagggggctgaa

SEQ ID NO: 451478 - DNA, 25 bp, Homo sapien
tcaagggtgaggcggtagagggggc

SEQ ID NO: 451479 - DNA, 25 bp, Homo sapien
aagggtgaggcggtagagggggctg

SEQ ID NO: 451480 - DNA, 25 bp, Homo sapien
tgaggcggtagagggggctgaagca

SEQ ID NO: 451481 - DNA, 25 bp, Homo sapien
agaataactacattgatcttcggtg

SEQ ID NO: 451482 - DNA, 25 bp, Homo sapien
attgatcttcggtgtctcccttttt

SEQ ID NO: 451483 - DNA, 25 bp, Homo sapien
ggtgtctccctttttatccttgcac

SEQ ID NO: 451484 - DNA, 25 bp, Homo sapien
ttatccttgcacttaaatctgcacc

SEQ ID NO: 451485 - DNA, 25 bp, Homo sapien
tctttttcacactgtcagaaaaggt

SEQ ID NO: 451486 - DNA, 25 bp, Homo sapien
ttaagaataatctttttcacactgt

SEQ ID NO: 451487 - DNA, 25 bp, Homo sapien
agaataatctttttcacactgtcag

SEQ ID NO: 451488 - DNA, 25 bp, Homo sapien
ataatctttttcacactgtcagaaa

SEQ ID NO: 451489 - DNA, 25 bp, Homo sapien
tctttgttatcttgcagtgagttaa

SEQ ID NO: 451490 - DNA, 25 bp, Homo sapien
tactattaggttcagtctccacaaa

SEQ ID NO: 451491 - DNA, 25 bp, Homo sapien
gctgaactcagtgttttatgctgtc

SEQ ID NO: 451492 - DNA, 25 bp, Homo sapien
tatacatgcagattagaataaggag

SEQ ID NO: 451493 - DNA, 25 bp, Homo sapien
gctcttggtcgaacagtcaaggaga

SEQ ID NO: 451494 - DNA, 25 bp, Homo sapien
ggaggtcgcgaacacacactacaca

SEQ ID NO: 451495 - DNA, 25 bp, Homo sapien
caaggctcttggtcgaacagtcaag

SEQ ID NO: 451496 - DNA, 25 bp, Homo sapien
gacggaggtcgcgaacacacactac

SEQ ID NO: 451497 - DNA, 25 bp, Homo sapien
caaaaatctgtatacaatttgaggg

SEQ ID NO: 451498 - DNA, 25 bp, Homo sapien
gacacgtgagacacaaacatcacaa

SEQ ID NO: 451499 - DNA, 25 bp, Homo sapien
cgtgggttttcctgaagtccttcag

SEQ ID NO: 451500 - DNA, 25 bp, Homo sapien
ttcacacggacacgtgagacacaaa

SEQ ID NO: 451501 - DNA, 25 bp, Homo sapien
ggcccaagggtctatatcatatgag

SEQ ID NO: 451502 - DNA, 25 bp, Homo sapien
gaacatgacaggtaggctaatctcc

SEQ ID NO: 451503 - DNA, 25 bp, Homo sapien
caaatccctaatgaacggcttgggc

SEQ ID NO: 451504 - DNA, 25 bp, Homo sapien
caagtgctgctagtccctaagtgat

SEQ ID NO: 451505 - DNA, 25 bp, Homo sapien
gcctacaactctcactgagttctgg

SEQ ID NO: 451506 - DNA, 25 bp, Homo sapien
atgcctacaactctcactgagttct

SEQ ID NO: 451507 - DNA, 25 bp, Homo sapien
ctcctgttgagaaggctcctctttc

SEQ ID NO: 451508 - DNA, 25 bp, Homo sapien
agctcctgttgagaaggctcctctt

SEQ ID NO: 451509 - DNA, 25 bp, Homo sapien
ttcacttgccatttagcttctggtt

SEQ ID NO: 451510 - DNA, 25 bp, Homo sapien
agttttatctgccttgctctgcatc

SEQ ID NO: 451511 - DNA, 25 bp, Homo sapien
ctctgccttgccttatttctaggga

SEQ ID NO: 451512 - DNA, 25 bp, Homo sapien
taagtattgagcactctgttgatta

SEQ ID NO: 451513 - DNA, 25 bp, Homo sapien
taccagagaggcaaactatctttgg

SEQ ID NO: 451514 - DNA, 25 bp, Homo sapien
tgtctagcctgcctgaaataggtta

SEQ ID NO: 451515 - DNA, 25 bp, Homo sapien
cctggcagaggagcgaaagcctaga

SEQ ID NO: 451516 - DNA, 25 bp, Homo sapien
gcctagagctgcctaccagagaggc

SEQ ID NO: 451517 - DNA, 25 bp, Homo sapien
ttcacaaggcaatgacagcaaggcc

SEQ ID NO: 451518 - DNA, 25 bp, Homo sapien
cttttcacaaggcaatgacagcaag

SEQ ID NO: 451519 - DNA, 25 bp, Homo sapien
tttcacaaggcaatgacagcaaggc

SEQ ID NO: 451520 - DNA, 25 bp, Homo sapien
ttttcacaaggcaatgacagcaagg

SEQ ID NO: 451521 - DNA, 25 bp, Homo sapien
ctgagaaatctagagccggaggaca

SEQ ID NO: 451522 - DNA, 25 bp, Homo sapien
tcaaagtcccaaccttcaaggaatg

SEQ ID NO: 451523 - DNA, 25 bp, Homo sapien
catcagttccagttttaagtcacac

SEQ ID NO: 451524 - DNA, 25 bp, Homo sapien
tgagaaacatcaggtcagcaagggc

SEQ ID NO: 451525 - DNA, 25 bp, Homo sapien
agcaaccctcttggataaagtagga

SEQ ID NO: 451526 - DNA, 25 bp, Homo sapien
taagcgttggcacgtaagatacaac

SEQ ID NO: 451527 - DNA, 25 bp, Homo sapien
taggtatggctatgctaactaagcg

SEQ ID NO: 451528 - DNA, 25 bp, Homo sapien
caaccagagtagtgtatgcaacttc

SEQ ID NO: 451529 - DNA, 25 bp, Homo sapien
gctgcaacacccagtcctacagcta

SEQ ID NO: 451530 - DNA, 25 bp, Homo sapien
aacacccagtcctacagctatcaaa

SEQ ID NO: 451531 - DNA, 25 bp, Homo sapien
acccagtcctacagctatcaaactt

SEQ ID NO: 451532 - DNA, 25 bp, Homo sapien
cagtcctacagctatcaaacttctt

SEQ ID NO: 451533 - DNA, 25 bp, Homo sapien
aggagttgaaatcttctttgcagtt

SEQ ID NO: 451534 - DNA, 25 bp, Homo sapien
ttccagatccgaaatgcgtagcgac

SEQ ID NO: 451535 - DNA, 25 bp, Homo sapien
tctttgcagtttctgtgataacttg

SEQ ID NO: 451536 - DNA, 25 bp, Homo sapien
aacttgttctagaggtttccagatc

SEQ ID NO: 451537 - DNA, 25 bp, Homo sapien
tcaaatagatggagtaaatggtcct

SEQ ID NO: 451538 - DNA, 25 bp, Homo sapien
caactagagaagaactggatcatcc

SEQ ID NO: 451539 - DNA, 25 bp, Homo sapien
tagcctgaaacacaaaagtcctcca

SEQ ID NO: 451540 - DNA, 25 bp, Homo sapien
caaaagggcacttgttcaaaagagc

SEQ ID NO: 451541 - DNA, 25 bp, Homo sapien
caaatcctcctttatagtaggatga

SEQ ID NO: 451542 - DNA, 25 bp, Homo sapien
gttcaaatcctcctttatagtagga

SEQ ID NO: 451543 - DNA, 25 bp, Homo sapien
aatcctcctttatagtaggatgaaa

SEQ ID NO: 451544 - DNA, 25 bp, Homo sapien
agaccagcttctcgcctactcattt

SEQ ID NO: 451545 - DNA, 25 bp, Homo sapien
tttctcctctgccacctactcataa

SEQ ID NO: 451546 - DNA, 25 bp, Homo sapien
cctctgccacctactcataatttta

SEQ ID NO: 451547 - DNA, 25 bp, Homo sapien
aacaaaacaatacttatgctgcaca

SEQ ID NO: 451548 - DNA, 25 bp, Homo sapien
acaaaacaatacttatgctgcacac

SEQ ID NO: 451549 - DNA, 25 bp, Homo sapien
catgtcatgggaggggaaccggtgg

SEQ ID NO: 451550 - DNA, 25 bp, Homo sapien
aatcatgactctcctatgagctgtt

SEQ ID NO: 451551 - DNA, 25 bp, Homo sapien
atctgggtgattcaaaatcatgact

SEQ ID NO: 451552 - DNA, 25 bp, Homo sapien
gagctgttctaatcttagccttgcc

SEQ ID NO: 451553 - DNA, 25 bp, Homo sapien
ctctcctatgagctgttctaatctt

SEQ ID NO: 451554 - DNA, 25 bp, Homo sapien
ttggctgctacgtaaggagatccac

SEQ ID NO: 451555 - DNA, 25 bp, Homo sapien
ttgtttctagcaagtcttttgcttc

SEQ ID NO: 451556 - DNA, 25 bp, Homo sapien
tgtttctagcaagtcttttgcttca

SEQ ID NO: 451557 - DNA, 25 bp, Homo sapien
ttcatttattttggctgctacgtaa

SEQ ID NO: 451558 - DNA, 25 bp, Homo sapien
tttattgttatacagcttaatggtg

SEQ ID NO: 451559 - DNA, 25 bp, Homo sapien
ggaagataagactgtggtcaatcca

SEQ ID NO: 451560 - DNA, 25 bp, Homo sapien
aagactgtggtcaatccatatagaa

SEQ ID NO: 451561 - DNA, 25 bp, Homo sapien
tatacagcttaatggtggaagataa

SEQ ID NO: 451562 - DNA, 25 bp, Homo sapien
tcagtttacctggaatgaacccaag

SEQ ID NO: 451563 - DNA, 25 bp, Homo sapien
tatctccaagaggtatcagccagtg

SEQ ID NO: 451564 - DNA, 25 bp, Homo sapien
cacaactgatgagaaacgactagtc

SEQ ID NO: 451565 - DNA, 25 bp, Homo sapien
catgctttggctatagggtctcaga

SEQ ID NO: 451566 - DNA, 25 bp, Homo sapien
tttattgggtgccaatgtaacacca

SEQ ID NO: 451567 - DNA, 25 bp, Homo sapien
attgggtgccaatgtaacaccaaac

SEQ ID NO: 451568 - DNA, 25 bp, Homo sapien
tattgggtgccaatgtaacaccaaa

SEQ ID NO: 451569 - DNA, 25 bp, Homo sapien
tatttattgggtgccaatgtaacac

SEQ ID NO: 451570 - DNA, 25 bp, Homo sapien
taaggtatgttacaccaagagttgc

SEQ ID NO: 451571 - DNA, 25 bp, Homo sapien
tcacaaggtaccaagctatagcccc

SEQ ID NO: 451572 - DNA, 25 bp, Homo sapien
gctaaatgcaagtgctccagagtaa

SEQ ID NO: 451573 - DNA, 25 bp, Homo sapien
gcccctatagttatgtaccatgtga

SEQ ID NO: 451574 - DNA, 25 bp, Homo sapien
gggtgactcaaattctcatgaataa

SEQ ID NO: 451575 - DNA, 25 bp, Homo sapien
gagggtgccccaatattccttagca

SEQ ID NO: 451576 - DNA, 25 bp, Homo sapien
taaggaaattccaagctaatgctgg

SEQ ID NO: 451577 - DNA, 25 bp, Homo sapien
cacataacaggaagatagtattcaa

SEQ ID NO: 451578 - DNA, 25 bp, Homo sapien
gcctatgtaaagaggaacctgtgca

SEQ ID NO: 451579 - DNA, 25 bp, Homo sapien
tatggtgacgatgctctagtagccc

SEQ ID NO: 451580 - DNA, 25 bp, Homo sapien
ccctttgaatcgaggcaggctctgt

SEQ ID NO: 451581 - DNA, 25 bp, Homo sapien
caagtgatgccctgacagtttccag

SEQ ID NO: 451582 - DNA, 25 bp, Homo sapien
tttggcacaggtactaaacgttagc

SEQ ID NO: 451583 - DNA, 25 bp, Homo sapien
tacataatagtacctcttaggctgg

SEQ ID NO: 451584 - DNA, 25 bp, Homo sapien
gagtgatcatattccacccgtgtga

SEQ ID NO: 451585 - DNA, 25 bp, Homo sapien
ggacatcgtaagcttccagggaaga

SEQ ID NO: 451586 - DNA, 25 bp, Homo sapien
gatgttctccttgaaagctcttgtc

SEQ ID NO: 451587 - DNA, 25 bp, Homo sapien
tctgctcctttcaatatattcggtt

SEQ ID NO: 451588 - DNA, 25 bp, Homo sapien
tcagataaaatcttatcaaagcttc

SEQ ID NO: 451589 - DNA, 25 bp, Homo sapien
ttcatttcttgtgccaggtctgctg

SEQ ID NO: 451590 - DNA, 25 bp, Homo sapien
taactgcatcgggaaaaccacatag

SEQ ID NO: 451591 - DNA, 25 bp, Homo sapien
tatggcatggacaaataaccctgtt

SEQ ID NO: 451592 - DNA, 25 bp, Homo sapien
tcagatccaagcagggttaaccagg

SEQ ID NO: 451593 - DNA, 25 bp, Homo sapien
gagcaaaggcaccactaatccaaga

SEQ ID NO: 451594 - DNA, 25 bp, Homo sapien
ctggaaagctgagggccaaagccat

SEQ ID NO: 451595 - DNA, 25 bp, Homo sapien
tgctggaaagctgagggccaaagcc

SEQ ID NO: 451596 - DNA, 25 bp, Homo sapien
cagcttcgggttggctgctggaaag

SEQ ID NO: 451597 - DNA, 25 bp, Homo sapien
ggctgctggaaagctgagggccaaa

SEQ ID NO: 451598 - DNA, 25 bp, Homo sapien
cgtgaatcaaggaactgatacgcac

SEQ ID NO: 451599 - DNA, 25 bp, Homo sapien
cagcgtgaatcaaggaactgatacg

SEQ ID NO: 451600 - DNA, 25 bp, Homo sapien
ctgaccagctgtgaacagcgtgaat

SEQ ID NO: 451601 - DNA, 25 bp, Homo sapien
tgtgaacagcgtgaatcaaggaact

SEQ ID NO: 451602 - DNA, 25 bp, Homo sapien
tgatggtgagaacttgacccaaggt

SEQ ID NO: 451603 - DNA, 25 bp, Homo sapien
gaatgatggtgagaacttgacccaa

SEQ ID NO: 451604 - DNA, 25 bp, Homo sapien
tgagaatgatggtgagaacttgacc

SEQ ID NO: 451605 - DNA, 25 bp, Homo sapien
gtgagaacttgacccaaggttgtct

SEQ ID NO: 451606 - DNA, 25 bp, Homo sapien
cgatgtgcgaaaaagccacaaagag

SEQ ID NO: 451607 - DNA, 25 bp, Homo sapien
aaagagtctcccttgggcaggtttg

SEQ ID NO: 451608 - DNA, 25 bp, Homo sapien
aaaggacacgatgtgcgaaaaagcc

SEQ ID NO: 451609 - DNA, 25 bp, Homo sapien
cgaaaaagccacaaagagtctccct

SEQ ID NO: 451610 - DNA, 25 bp, Homo sapien
gtgtgcagcgggaacgatgacttac

SEQ ID NO: 451611 - DNA, 25 bp, Homo sapien
ctggagatggtgggcgcgtgtgcag

SEQ ID NO: 451612 - DNA, 25 bp, Homo sapien
gcgtgtgcagcgggaacgatgactt

SEQ ID NO: 451613 - DNA, 25 bp, Homo sapien
cgtgtgcagcgggaacgatgactta

SEQ ID NO: 451614 - DNA, 25 bp, Homo sapien
tcagagagctccttccgttgccagg

SEQ ID NO: 451615 - DNA, 25 bp, Homo sapien
catggcctgagtccgagaacgtgat

SEQ ID NO: 451616 - DNA, 25 bp, Homo sapien
cgtgattaaatctctgagccgttca

SEQ ID NO: 451617 - DNA, 25 bp, Homo sapien
ggccgcgtggctccaagattcactg

SEQ ID NO: 451618 - DNA, 25 bp, Homo sapien
gcaattgcaatgaagttggtgccaa

SEQ ID NO: 451619 - DNA, 25 bp, Homo sapien
agttggtgccaatgggaaaaatatc

SEQ ID NO: 451620 - DNA, 25 bp, Homo sapien
ccagggccttgagcaacaagattgt

SEQ ID NO: 451621 - DNA, 25 bp, Homo sapien
ctttgaggttacaaccagggccttg

SEQ ID NO: 451622 - DNA, 25 bp, Homo sapien
gtctgcttacatagagatcaggcca

SEQ ID NO: 451623 - DNA, 25 bp, Homo sapien
cactttgtaaatgccatgttcccag

SEQ ID NO: 451624 - DNA, 25 bp, Homo sapien
cccgagtgtttctgctgaatgacca

SEQ ID NO: 451625 - DNA, 25 bp, Homo sapien
atgttcccaggttccccttgcttgg

SEQ ID NO: 451626 - DNA, 25 bp, Homo sapien
acatggggaccacatgctgaaccat

SEQ ID NO: 451627 - DNA, 25 bp, Homo sapien
gacatggggaccacatgctgaacca

SEQ ID NO: 451628 - DNA, 25 bp, Homo sapien
agacatggggaccacatgctgaacc

SEQ ID NO: 451629 - DNA, 25 bp, Homo sapien
gcagacatggggaccacatgctgaa

SEQ ID NO: 451630 - DNA, 25 bp, Homo sapien
aagaccaacttggatttgtgcaaat

SEQ ID NO: 451631 - DNA, 25 bp, Homo sapien
tctatacccttctaccaaattatag

SEQ ID NO: 451632 - DNA, 25 bp, Homo sapien
ccattgagaagaccaacttggattt

SEQ ID NO: 451633 - DNA, 25 bp, Homo sapien
tgagaagaccaacttggatttgtgc

SEQ ID NO: 451634 - DNA, 25 bp, Homo sapien
aatttaactctgtcagcaagaacaa

SEQ ID NO: 451635 - DNA, 25 bp, Homo sapien
aagacagttgttcagcacagttcag

SEQ ID NO: 451636 - DNA, 25 bp, Homo sapien
cagagcaaacacagaccaaatttaa

SEQ ID NO: 451637 - DNA, 25 bp, Homo sapien
tcaagacagttgttcagcacagttc

SEQ ID NO: 451638 - DNA, 25 bp, Homo sapien
tcctaactgcagattccaacagctc

SEQ ID NO: 451639 - DNA, 25 bp, Homo sapien
agctcaggtgaaaagctcctgactc

SEQ ID NO: 451640 - DNA, 25 bp, Homo sapien
ggacatggaattgttcacaccttct

SEQ ID NO: 451641 - DNA, 25 bp, Homo sapien
agtccaacctgaacccgaagcagca

SEQ ID NO: 451642 - DNA, 25 bp, Homo sapien
ttcctaaagttcctggagggatgtc

SEQ ID NO: 451643 - DNA, 25 bp, Homo sapien
gcttgcctgcaggaaatgggtcttc

SEQ ID NO: 451644 - DNA, 25 bp, Homo sapien
agtgtccttatgctatttcctaaag

SEQ ID NO: 451645 - DNA, 25 bp, Homo sapien
cctggagggatgtctcatctgtatt

SEQ ID NO: 451646 - DNA, 25 bp, Homo sapien
gaggaggatagaaatagtcaggaat

SEQ ID NO: 451647 - DNA, 25 bp, Homo sapien
aggaggatagaaatagtcaggaata

SEQ ID NO: 451648 - DNA, 25 bp, Homo sapien
ccagaatgttcgtgcgtctcatgat

SEQ ID NO: 451649 - DNA, 25 bp, Homo sapien
tgttcgtgcgtctcatgattctgcc

SEQ ID NO: 451650 - DNA, 25 bp, Homo sapien
gcgtctcatgattctgcctttagct

SEQ ID NO: 451651 - DNA, 25 bp, Homo sapien
taacgaccagaatgttcgtgcgtct

SEQ ID NO: 451652 - DNA, 25 bp, Homo sapien
ttaatgtatgctggctcacggcatc

SEQ ID NO: 451653 - DNA, 25 bp, Homo sapien
gctgtgtttgtatcatgataaattt

SEQ ID NO: 451654 - DNA, 25 bp, Homo sapien
gtgctgtgtttgtatcatgataaat

SEQ ID NO: 451655 - DNA, 25 bp, Homo sapien
tgctgtgtttgtatcatgataaatt

SEQ ID NO: 451656 - DNA, 25 bp, Homo sapien
caggatactggtgatagactttgca

SEQ ID NO: 451657 - DNA, 25 bp, Homo sapien
cactggcagtgatctggttgctgat

SEQ ID NO: 451658 - DNA, 25 bp, Homo sapien
gactttgcaaactgctctcagaaga

SEQ ID NO: 451659 - DNA, 25 bp, Homo sapien
tgagaaattccacaggtcccctttg

SEQ ID NO: 451660 - DNA, 25 bp, Homo sapien
cattcttcgacaggcaaagaaggca

SEQ ID NO: 451661 - DNA, 25 bp, Homo sapien
tgaattgcttcagaacaaccaccat

SEQ ID NO: 451662 - DNA, 25 bp, Homo sapien
acccaacctcttattctgaattgct

SEQ ID NO: 451663 - DNA, 25 bp, Homo sapien
ggtctgatcaaaatagagcctctgc

SEQ ID NO: 451664 - DNA, 25 bp, Homo sapien
tcagaagcaggggagtatagacata

SEQ ID NO: 451665 - DNA, 25 bp, Homo sapien
taactgagagtttcataatttggag

SEQ ID NO: 451666 - DNA, 25 bp, Homo sapien
tttcataatttggagacatgctgga

SEQ ID NO: 451667 - DNA, 25 bp, Homo sapien
gcaggggagtatagacataacaaga

SEQ ID NO: 451668 - DNA, 25 bp, Homo sapien
atgttgagttatgttggctacttct

SEQ ID NO: 451669 - DNA, 25 bp, Homo sapien
ctgaggctgtagtgttaagggaaat

SEQ ID NO: 451670 - DNA, 25 bp, Homo sapien
gttgagttatgttggctacttcttg

SEQ ID NO: 451671 - DNA, 25 bp, Homo sapien
agttatgttggctacttcttgaagc

SEQ ID NO: 451672 - DNA, 25 bp, Homo sapien
gaataggctggatgtctgtaacact

SEQ ID NO: 451673 - DNA, 25 bp, Homo sapien
ttagttgcagtaaatagagcagcac

SEQ ID NO: 451674 - DNA, 25 bp, Homo sapien
cagtgagggtccagctagaataggc

SEQ ID NO: 451675 - DNA, 25 bp, Homo sapien
tgcttgtcatgccttgagattccaa

SEQ ID NO: 451676 - DNA, 25 bp, Homo sapien
tggctgtgctccaaatcgctctccg

SEQ ID NO: 451677 - DNA, 25 bp, Homo sapien
aactaagatcaataggcatgatccc

SEQ ID NO: 451678 - DNA, 25 bp, Homo sapien
gatcccatggcaaacgctgctgtct

SEQ ID NO: 451679 - DNA, 25 bp, Homo sapien
aagggaagacagatggtttatctat

SEQ ID NO: 451680 - DNA, 25 bp, Homo sapien
tctgtggcgttctcttgtaagtgga

SEQ ID NO: 451681 - DNA, 25 bp, Homo sapien
ttgtggagccatcgaagcctgcctt

SEQ ID NO: 451682 - DNA, 25 bp, Homo sapien
taaaactacctaactgcgaagagca

SEQ ID NO: 451683 - DNA, 25 bp, Homo sapien
gttggtccagcacgcaacctttgtg

SEQ ID NO: 451684 - DNA, 25 bp, Homo sapien
gactgttcagtgtacgctggtgagc

SEQ ID NO: 451685 - DNA, 25 bp, Homo sapien
taaatggcttgagtcagcaggtcaa

SEQ ID NO: 451686 - DNA, 25 bp, Homo sapien
gacttgtggccgtgatgctcagtaa

SEQ ID NO: 451687 - DNA, 25 bp, Homo sapien
ttgaacaacccacttctgacaggct

SEQ ID NO: 451688 - DNA, 25 bp, Homo sapien
tgtttgatcctagcttagacctggg

SEQ ID NO: 451689 - DNA, 25 bp, Homo sapien
aagtttcctgcatgacagcccagca

SEQ ID NO: 451690 - DNA, 25 bp, Homo sapien
gtctccacaaagtttcctgcatgac

SEQ ID NO: 451691 - DNA, 25 bp, Homo sapien
tgatcctagcttagacctgggtggg

SEQ ID NO: 451692 - DNA, 25 bp, Homo sapien
catagaaggataagctgttttcaca

SEQ ID NO: 451693 - DNA, 25 bp, Homo sapien
aggatctgagctccgggcgccagca

SEQ ID NO: 451694 - DNA, 25 bp, Homo sapien
ctgaggccacatgccaggatctgag

SEQ ID NO: 451695 - DNA, 25 bp, Homo sapien
catgtaatgacagccgagggcacca

SEQ ID NO: 451696 - DNA, 25 bp, Homo sapien
gaaagcccagcgcaagaacatagac

SEQ ID NO: 451697 - DNA, 25 bp, Homo sapien
tcaccaaagttgagcagattgtggc

SEQ ID NO: 451698 - DNA, 25 bp, Homo sapien
gaacatagacatttggcgaaagcat

SEQ ID NO: 451699 - DNA, 25 bp, Homo sapien
cgttttcaacgcttctaccagacaa

SEQ ID NO: 451700 - DNA, 25 bp, Homo sapien
ttactctgtccctggacttgagggt

SEQ ID NO: 451701 - DNA, 25 bp, Homo sapien
ctctgtccctggacttgagggtcca

SEQ ID NO: 451702 - DNA, 25 bp, Homo sapien
tctgtccctggacttgagggtccat

SEQ ID NO: 451703 - DNA, 25 bp, Homo sapien
tactctgtccctggacttgagggtc

SEQ ID NO: 451704 - DNA, 25 bp, Homo sapien
gaactcggacggtccctccatctgt

SEQ ID NO: 451705 - DNA, 25 bp, Homo sapien
tgaactagaactcggacggtccctc

SEQ ID NO: 451706 - DNA, 25 bp, Homo sapien
actagaactcggacggtccctccat

SEQ ID NO: 451707 - DNA, 25 bp, Homo sapien
ggacggtccctccatctgtctgctg

SEQ ID NO: 451708 - DNA, 25 bp, Homo sapien
ctctgagtttctaatgttgagggat

SEQ ID NO: 451709 - DNA, 25 bp, Homo sapien
gtatgtttttcatgtgaggaattaa

SEQ ID NO: 451710 - DNA, 25 bp, Homo sapien
tctctgagtttctaatgttgaggga

SEQ ID NO: 451711 - DNA, 25 bp, Homo sapien
gattttcatccccagcaggatagtg

SEQ ID NO: 451712 - DNA, 25 bp, Homo sapien
taaaccctgaatactgtgcatcctg

SEQ ID NO: 451713 - DNA, 25 bp, Homo sapien
taccaccctggagactacaaacaag

SEQ ID NO: 451714 - DNA, 25 bp, Homo sapien
tccctgtgattccagtgacactgtg

SEQ ID NO: 451715 - DNA, 25 bp, Homo sapien
agaggcctaccgatctggaatgttc

SEQ ID NO: 451716 - DNA, 25 bp, Homo sapien
gcaagaggcctaccgatctggaatg

SEQ ID NO: 451717 - DNA, 25 bp, Homo sapien
tcagcttgcaagaggcctaccgatc

SEQ ID NO: 451718 - DNA, 25 bp, Homo sapien
cttgcaagaggcctaccgatctgga

SEQ ID NO: 451719 - DNA, 25 bp, Homo sapien
cagggccccggagtaatgcagagcc

SEQ ID NO: 451720 - DNA, 25 bp, Homo sapien
cacctcgtggcccttgtttgaggcc

SEQ ID NO: 451721 - DNA, 25 bp, Homo sapien
gatgttcgtgccagcggctatgcct

SEQ ID NO: 451722 - DNA, 25 bp, Homo sapien
gccactttcctcatggaagccatga

SEQ ID NO: 451723 - DNA, 25 bp, Homo sapien
cttaggtggcctaacaatggtggca

SEQ ID NO: 451724 - DNA, 25 bp, Homo sapien
gaacattcgtgttccactgttgtaa

SEQ ID NO: 451725 - DNA, 25 bp, Homo sapien
ttctcaaagagtgggatctactacg

SEQ ID NO: 451726 - DNA, 25 bp, Homo sapien
gcaaactctgggttaaacgtagata

SEQ ID NO: 451727 - DNA, 25 bp, Homo sapien
tgaataccttttggacactcaggcc

SEQ ID NO: 451728 - DNA, 25 bp, Homo sapien
gatgatgcctgacctccaaaagcag

SEQ ID NO: 451729 - DNA, 25 bp, Homo sapien
ccagcagcactaaaggtttgaccca

SEQ ID NO: 451730 - DNA, 25 bp, Homo sapien
gataaccaggtgtagccaattcctg

SEQ ID NO: 451731 - DNA, 25 bp, Homo sapien
cacatggttgtcaccagggtgacca

SEQ ID NO: 451732 - DNA, 25 bp, Homo sapien
gagcagggtcaggtatttctgttag

SEQ ID NO: 451733 - DNA, 25 bp, Homo sapien
gagcacatggttgtcaccagggtga

SEQ ID NO: 451734 - DNA, 25 bp, Homo sapien
ggtatttctgttagagagcacatgg

SEQ ID NO: 451735 - DNA, 25 bp, Homo sapien
tcttggaggaggtgggcctttatat

SEQ ID NO: 451736 - DNA, 25 bp, Homo sapien
ttggaggaggtgggcctttatatga

SEQ ID NO: 451737 - DNA, 25 bp, Homo sapien
ggaggaggtgggcctttatatgagc

SEQ ID NO: 451738 - DNA, 25 bp, Homo sapien
atggtgtcttggaggaggtgggcct

SEQ ID NO: 451739 - DNA, 25 bp, Homo sapien
aggagcaagtggttgtagaaaattg

SEQ ID NO: 451740 - DNA, 25 bp, Homo sapien
ggagcaagtggttgtagaaaattga

SEQ ID NO: 451741 - DNA, 25 bp, Homo sapien
gagcaagtggttgtagaaaattgat

SEQ ID NO: 451742 - DNA, 25 bp, Homo sapien
ggtgtgacccacgggtgcctgtaat

SEQ ID NO: 451743 - DNA, 25 bp, Homo sapien
aggtgtgacccacgggtgcctgtaa

SEQ ID NO: 451744 - DNA, 25 bp, Homo sapien
atttgagctattgtcacccctggcc

SEQ ID NO: 451745 - DNA, 25 bp, Homo sapien
tcctagaacccagctgaagacaagg

SEQ ID NO: 451746 - DNA, 25 bp, Homo sapien
ttctcagccatttaccggccatctt

SEQ ID NO: 451747 - DNA, 25 bp, Homo sapien
tgtgaaacgggtcacagtctgtctt

SEQ ID NO: 451748 - DNA, 25 bp, Homo sapien
tggaggaggaatagctgaggtgcac

SEQ ID NO: 451749 - DNA, 25 bp, Homo sapien
cttcagattcatgcacgggatgctg

SEQ ID NO: 451750 - DNA, 25 bp, Homo sapien
ggatgctgtggaggcttaggagtca

SEQ ID NO: 451751 - DNA, 25 bp, Homo sapien
agcaaagccttcagattcatgcacg

SEQ ID NO: 451752 - DNA, 25 bp, Homo sapien
tgatgcgttgcttccaggtgaccag

SEQ ID NO: 451753 - DNA, 25 bp, Homo sapien
gctaactgatgcgttgcttccaggt

SEQ ID NO: 451754 - DNA, 25 bp, Homo sapien
cagtggctaactgatgcgttgcttc

SEQ ID NO: 451755 - DNA, 25 bp, Homo sapien
ccttttcagtggctaactgatgcgt

SEQ ID NO: 451756 - DNA, 25 bp, Homo sapien
ctataggagggagcatcaatcaatc

SEQ ID NO: 451757 - DNA, 25 bp, Homo sapien
gaagtcgcagagcaactcatccagt

SEQ ID NO: 451758 - DNA, 25 bp, Homo sapien
caaaattgccagaggtaccctggtc

SEQ ID NO: 451759 - DNA, 25 bp, Homo sapien
gctggtatcatggtatagtcctgca

SEQ ID NO: 451760 - DNA, 25 bp, Homo sapien
accatcccaggccatgaccacgtcc

SEQ ID NO: 451761 - DNA, 25 bp, Homo sapien
aggccatgaccacgtcctccttggt

SEQ ID NO: 451762 - DNA, 25 bp, Homo sapien
catgaccacgtcctccttggttggc

SEQ ID NO: 451763 - DNA, 25 bp, Homo sapien
accacgtcctccttggttggcggtg

SEQ ID NO: 451764 - DNA, 25 bp, Homo sapien
cattagccattccaaggtgatgctt

SEQ ID NO: 451765 - DNA, 25 bp, Homo sapien
gtagttgtcagtaaagctagctgca

SEQ ID NO: 451766 - DNA, 25 bp, Homo sapien
cacatggtgcgtactttacagtaaa

SEQ ID NO: 451767 - DNA, 25 bp, Homo sapien
tctgctggtgtttgaagtagttgtc

SEQ ID NO: 451768 - DNA, 25 bp, Homo sapien
cctctgtcccaggttggggtaactg

SEQ ID NO: 451769 - DNA, 25 bp, Homo sapien
gttggggtaactggtacacaggcat

SEQ ID NO: 451770 - DNA, 25 bp, Homo sapien
ccaggttggggtaactggtacacag

SEQ ID NO: 451771 - DNA, 25 bp, Homo sapien
ctctgtcccaggttggggtaactgg

SEQ ID NO: 451772 - DNA, 25 bp, Homo sapien
gaacagctgtgaaggcattggagta

SEQ ID NO: 451773 - DNA, 25 bp, Homo sapien
cctggaggaactctgatctgttcca

SEQ ID NO: 451774 - DNA, 25 bp, Homo sapien
gcattggagtatggagcaggacatc

SEQ ID NO: 451775 - DNA, 25 bp, Homo sapien
aagatttccacgagcagttgctctc

SEQ ID NO: 451776 - DNA, 25 bp, Homo sapien
gaccaacatccagtataagctttct

SEQ ID NO: 451777 - DNA, 25 bp, Homo sapien
ggtctcctggtctttgggtggccca

SEQ ID NO: 451778 - DNA, 25 bp, Homo sapien
cgcaggggattcagagttccttgga

SEQ ID NO: 451779 - DNA, 25 bp, Homo sapien
tgtctggctgccagaccaacatcca

SEQ ID NO: 451780 - DNA, 25 bp, Homo sapien
ctgaatgtgtagaacggtgcaagac

SEQ ID NO: 451781 - DNA, 25 bp, Homo sapien
ctgccgctgaatgtgtagaacggtg

SEQ ID NO: 451782 - DNA, 25 bp, Homo sapien
tagaacggtgcaagacagaacctca

SEQ ID NO: 451783 - DNA, 25 bp, Homo sapien
tgtagaacggtgcaagacagaacct

SEQ ID NO: 451784 - DNA, 25 bp, Homo sapien
gagtggctatatcagcgtgcacaca

SEQ ID NO: 451785 - DNA, 25 bp, Homo sapien
ggctcagaggcagcctgatcagatg

SEQ ID NO: 451786 - DNA, 25 bp, Homo sapien
gggagatcagctagcgctaagagca

SEQ ID NO: 451787 - DNA, 25 bp, Homo sapien
tacaggctgagggagatcagctagc

SEQ ID NO: 451788 - DNA, 25 bp, Homo sapien
ttcggagggattcttttgacataac

SEQ ID NO: 451789 - DNA, 25 bp, Homo sapien
ttttcggagggattcttttgacata

SEQ ID NO: 451790 - DNA, 25 bp, Homo sapien
gattcttttgacataacttttataa

SEQ ID NO: 451791 - DNA, 25 bp, Homo sapien
ggattcttttgacataacttttata

SEQ ID NO: 451792 - DNA, 25 bp, Homo sapien
caagcatcaactgtgtgtcgggcca

SEQ ID NO: 451793 - DNA, 25 bp, Homo sapien
tgagggcagggaccttattcagcac

SEQ ID NO: 451794 - DNA, 25 bp, Homo sapien
caccctagggtcagctggaaaggct

SEQ ID NO: 451795 - DNA, 25 bp, Homo sapien
tatttagaggcgcagacacattgtt

SEQ ID NO: 451796 - DNA, 25 bp, Homo sapien
tatatccctagtaccagagagtccc

SEQ ID NO: 451797 - DNA, 25 bp, Homo sapien
cccagagggaggtattggcaactca

SEQ ID NO: 451798 - DNA, 25 bp, Homo sapien
tggctgggccggcttaacaaacaat

SEQ ID NO: 451799 - DNA, 25 bp, Homo sapien
cttcagatgtggtaagcagggctcc

SEQ ID NO: 451800 - DNA, 25 bp, Homo sapien
ctattcttgacatgtgcctaatttc

SEQ ID NO: 451801 - DNA, 25 bp, Homo sapien
tctccctacttataccatctcttgg

SEQ ID NO: 451802 - DNA, 25 bp, Homo sapien
tctcttgggaagtcctcacagccca

SEQ ID NO: 451803 - DNA, 25 bp, Homo sapien
tccagtatgacacccaactgctgat

SEQ ID NO: 451804 - DNA, 25 bp, Homo sapien
caggcattggtagacagccgtcatc

SEQ ID NO: 451805 - DNA, 25 bp, Homo sapien
ggacttaatacaactcccttctatg

SEQ ID NO: 451806 - DNA, 25 bp, Homo sapien
tctgtgaccacttggacttaataca

SEQ ID NO: 451807 - DNA, 25 bp, Homo sapien
gctgcttaaagcataacagaatagg

SEQ ID NO: 451808 - DNA, 25 bp, Homo sapien
ttgctcgctgaaggtaattagagtt

SEQ ID NO: 451809 - DNA, 25 bp, Homo sapien
ggtctggagcttgagtgcagttcat

SEQ ID NO: 451810 - DNA, 25 bp, Homo sapien
tggtctggagcttgagtgcagttca

SEQ ID NO: 451811 - DNA, 25 bp, Homo sapien
acgtagggagaacagtaaggagcca

SEQ ID NO: 451812 - DNA, 25 bp, Homo sapien
tggcctgagcagacgtagggagaac

SEQ ID NO: 451813 - DNA, 25 bp, Homo sapien
ggcagtttggtgaatggcctgccca

SEQ ID NO: 451814 - DNA, 25 bp, Homo sapien
gcccagcttggggttggcgaaggga

SEQ ID NO: 451815 - DNA, 25 bp, Homo sapien
ttgggcgcagtaagagacaatcact

SEQ ID NO: 451816 - DNA, 25 bp, Homo sapien
tctccttccttgctagtatctctgg

SEQ ID NO: 451817 - DNA, 25 bp, Homo sapien
tgaccttgtagagatacctccagac

SEQ ID NO: 451818 - DNA, 25 bp, Homo sapien
caatcacttaggtaggagcacatct

SEQ ID NO: 451819 - DNA, 25 bp, Homo sapien
tatctgtacacacaccctctattct

SEQ ID NO: 451820 - DNA, 25 bp, Homo sapien
tctattctacattgaggctcacaag

SEQ ID NO: 451821 - DNA, 25 bp, Homo sapien
ttgagaagttgcagtatatctgtac

SEQ ID NO: 451822 - DNA, 25 bp, Homo sapien
cacaccctctattctacattgaggc

SEQ ID NO: 451823 - DNA, 25 bp, Homo sapien
gaagaagttgtcttccgtgagaacg

SEQ ID NO: 451824 - DNA, 25 bp, Homo sapien
tgtcttccgtgagaacgttgtcaga

SEQ ID NO: 451825 - DNA, 25 bp, Homo sapien
tgatggtgactggtggatggcagag

SEQ ID NO: 451826 - DNA, 25 bp, Homo sapien
tgagaacgttgtcagaggtgttgat

SEQ ID NO: 451827 - DNA, 25 bp, Homo sapien
cctgatggtgaggccttgaggttcc

SEQ ID NO: 451828 - DNA, 25 bp, Homo sapien
ccctgatggtgaggccttgaggttc

SEQ ID NO: 451829 - DNA, 25 bp, Homo sapien
aagtcaggtcatcttgcactgtgaa

SEQ ID NO: 451830 - DNA, 25 bp, Homo sapien
cactatgaaagtcaggtcatcttgc

SEQ ID NO: 451831 - DNA, 25 bp, Homo sapien
ctgcccactatgaaagtcaggtcat

SEQ ID NO: 451832 - DNA, 25 bp, Homo sapien
tcaggtcatcttgcactgtgaaact

SEQ ID NO: 451833 - DNA, 25 bp, Homo sapien
gagtccaaagcaaggcctcccagac

SEQ ID NO: 451834 - DNA, 25 bp, Homo sapien
agtccaaagcaaggcctcccagacc

SEQ ID NO: 451835 - DNA, 25 bp, Homo sapien
ccaaagcaaggcctcccagaccttc

SEQ ID NO: 451836 - DNA, 25 bp, Homo sapien
ctgagtccaaagcaaggcctcccag

SEQ ID NO: 451837 - DNA, 25 bp, Homo sapien
tcatcaccggcattccggctactca

SEQ ID NO: 451838 - DNA, 25 bp, Homo sapien
gctcatcaccggcattccggctact

SEQ ID NO: 451839 - DNA, 25 bp, Homo sapien
atcaccggcattccggctactcagc

SEQ ID NO: 451840 - DNA, 25 bp, Homo sapien
accggcattccggctactcagcttg

SEQ ID NO: 451841 - DNA, 25 bp, Homo sapien
aggcagggagctccagtcatccttg

SEQ ID NO: 451842 - DNA, 25 bp, Homo sapien
catccttgactttgccatgaccttt

SEQ ID NO: 451843 - DNA, 25 bp, Homo sapien
gactttgccatgaccttttctcctc

SEQ ID NO: 451844 - DNA, 25 bp, Homo sapien
aatctgtttagggttctgccatgca

SEQ ID NO: 451845 - DNA, 25 bp, Homo sapien
acctgcctgtgctgcgcaactgagg

SEQ ID NO: 451846 - DNA, 25 bp, Homo sapien
gagcagcatattgtacttccaggtg

SEQ ID NO: 451847 - DNA, 25 bp, Homo sapien
caggatactcccagagagggactct

SEQ ID NO: 451848 - DNA, 25 bp, Homo sapien
ttgccttggcaactaaaacacagcc

SEQ ID NO: 451849 - DNA, 25 bp, Homo sapien
tccagaacgggaacatattaagagg

SEQ ID NO: 451850 - DNA, 25 bp, Homo sapien
ccgaatcaggaatggtggaaaacca

SEQ ID NO: 451851 - DNA, 25 bp, Homo sapien
gaatcaaggaaacccaccagctctt

SEQ ID NO: 451852 - DNA, 25 bp, Homo sapien
caaaccttaagatccccgaatcagg

SEQ ID NO: 451853 - DNA, 25 bp, Homo sapien
tcctccagcagctacatggactgct

SEQ ID NO: 451854 - DNA, 25 bp, Homo sapien
ctgcacaaagtgaaggggtgctttc

SEQ ID NO: 451855 - DNA, 25 bp, Homo sapien
agctacatggactgcttctgcacaa

SEQ ID NO: 451856 - DNA, 25 bp, Homo sapien
tgtttctagtgcctctcagcagagc

SEQ ID NO: 451857 - DNA, 25 bp, Homo sapien
aggagagagagctcaccatgctcag

SEQ ID NO: 451858 - DNA, 25 bp, Homo sapien
cactgagagccttcaattactccca

SEQ ID NO: 451859 - DNA, 25 bp, Homo sapien
ggcatctgccaaatagccagtgtcc

SEQ ID NO: 451860 - DNA, 25 bp, Homo sapien
tagccagtgtcccttgctgaagaca

SEQ ID NO: 451861 - DNA, 25 bp, Homo sapien
gagagccttcaattactcccagcag

SEQ ID NO: 451862 - DNA, 25 bp, Homo sapien
tatattattattctccagttgttac

SEQ ID NO: 451863 - DNA, 25 bp, Homo sapien
cctcagagatgttccagggcctcaa

SEQ ID NO: 451864 - DNA, 25 bp, Homo sapien
tctctgtagggcgatagtcctcaga

SEQ ID NO: 451865 - DNA, 25 bp, Homo sapien
cagttgttactgtcactagtgtgga

SEQ ID NO: 451866 - DNA, 25 bp, Homo sapien
cattcagtaactgccagaacatctg

SEQ ID NO: 451867 - DNA, 25 bp, Homo sapien
gaacatctgagacacccaatactcc

SEQ ID NO: 451868 - DNA, 25 bp, Homo sapien
cgtccaatatgactgtgtcagccat

SEQ ID NO: 451869 - DNA, 25 bp, Homo sapien
caatactccagattgacatgatcca

SEQ ID NO: 451870 - DNA, 25 bp, Homo sapien
ttataacaggccacttttcttctcc

SEQ ID NO: 451871 - DNA, 25 bp, Homo sapien
ggtcagtttcccaagcccttgcatg

SEQ ID NO: 451872 - DNA, 25 bp, Homo sapien
tcctctttgagggtaagttataaca

SEQ ID NO: 451873 - DNA, 25 bp, Homo sapien
cttgcatggccttgtcctggtcttc

SEQ ID NO: 451874 - DNA, 25 bp, Homo sapien
gattctggtgtgatggagcatctgg

SEQ ID NO: 451875 - DNA, 25 bp, Homo sapien
ctggaagcttagcttcagtcagttt

SEQ ID NO: 451876 - DNA, 25 bp, Homo sapien
tctggaagcttagcttcagtcagtt

SEQ ID NO: 451877 - DNA, 25 bp, Homo sapien
tctggtgtgatggagcatctggaag

SEQ ID NO: 451878 - DNA, 25 bp, Homo sapien
tcagcatgccccgttcttccagatt

SEQ ID NO: 451879 - DNA, 25 bp, Homo sapien
ggtgagttacagagtaggaattcag

SEQ ID NO: 451880 - DNA, 25 bp, Homo sapien
tgccccgttcttccagatttgcctg

SEQ ID NO: 451881 - DNA, 25 bp, Homo sapien
ttacagagtaggaattcagcatgcc

SEQ ID NO: 451882 - DNA, 25 bp, Homo sapien
ctcccacccattgtggatccactgg

SEQ ID NO: 451883 - DNA, 25 bp, Homo sapien
cttgtacttggctttgagtcttgtt

SEQ ID NO: 451884 - DNA, 25 bp, Homo sapien
ttcctcccacccattgtggatccac

SEQ ID NO: 451885 - DNA, 25 bp, Homo sapien
tacttggctttgagtcttgttagac

SEQ ID NO: 451886 - DNA, 25 bp, Homo sapien
aataacagggtattccgtggaggca

SEQ ID NO: 451887 - DNA, 25 bp, Homo sapien
tggctttgtcatgcccaataacagg

SEQ ID NO: 451888 - DNA, 25 bp, Homo sapien
ttggctttgtcatgcccaataacag

SEQ ID NO: 451889 - DNA, 25 bp, Homo sapien
aacagggtattccgtggaggcagct

SEQ ID NO: 451890 - DNA, 25 bp, Homo sapien
agtgaaaagttgcttgctggtcctt

SEQ ID NO: 451891 - DNA, 25 bp, Homo sapien
cacggatgttgaagcatgaagtttt

SEQ ID NO: 451892 - DNA, 25 bp, Homo sapien
aaacacatgacgagagtgaaaagtt

SEQ ID NO: 451893 - DNA, 25 bp, Homo sapien
gatttgccttgttgcctcctccagg

SEQ ID NO: 451894 - DNA, 25 bp, Homo sapien
tgcacttttacgggaagtttccaga

SEQ ID NO: 451895 - DNA, 25 bp, Homo sapien
cttctgtaatgttgcacttttacgg

SEQ ID NO: 451896 - DNA, 25 bp, Homo sapien
tctgtaatgttgcacttttacggga

SEQ ID NO: 451897 - DNA, 25 bp, Homo sapien
tgtaatgttgcacttttacgggaag

SEQ ID NO: 451898 - DNA, 25 bp, Homo sapien
tagcacaggatcctatcttatgacc

SEQ ID NO: 451899 - DNA, 25 bp, Homo sapien
gacagacagcttgctcacctgatgg

SEQ ID NO: 451900 - DNA, 25 bp, Homo sapien
gtttgtccacaaccgttagcacagg

SEQ ID NO: 451901 - DNA, 25 bp, Homo sapien
ctagagggccatactgcggagacaa

SEQ ID NO: 451902 - DNA, 25 bp, Homo sapien
tttgtcttgtcaccaggcctgagga

SEQ ID NO: 451903 - DNA, 25 bp, Homo sapien
ggcctgaggaaagatttacatcttc

SEQ ID NO: 451904 - DNA, 25 bp, Homo sapien
tgtgtgtcttggagatccttggcat

SEQ ID NO: 451905 - DNA, 25 bp, Homo sapien
tttaggattccatttggtctttgtc

SEQ ID NO: 451906 - DNA, 25 bp, Homo sapien
tctagacgtgactgccaaagagccc

SEQ ID NO: 451907 - DNA, 25 bp, Homo sapien
cagttcctagagtagttcatcacgt

SEQ ID NO: 451908 - DNA, 25 bp, Homo sapien
cttccattcctctagacgtgactgc

SEQ ID NO: 451909 - DNA, 25 bp, Homo sapien
tagagtagttcatcacgtcttccat

SEQ ID NO: 451910 - DNA, 25 bp, Homo sapien
gctgatgttgtccttgctgttgtca

SEQ ID NO: 451911 - DNA, 25 bp, Homo sapien
atgctgatgttgtccttgctgttgt

SEQ ID NO: 451912 - DNA, 25 bp, Homo sapien
tgctgatgttgtccttgctgttgtc

SEQ ID NO: 451913 - DNA, 25 bp, Homo sapien
agtcaaaccttgctaattgcccgtg

SEQ ID NO: 451914 - DNA, 25 bp, Homo sapien
caaaccttgctaattgcccgtgagg

SEQ ID NO: 451915 - DNA, 25 bp, Homo sapien
gcccgtgaggagcaaagctggttcc

SEQ ID NO: 451916 - DNA, 25 bp, Homo sapien
accttgctaattgcccgtgaggagc

SEQ ID NO: 451917 - DNA, 25 bp, Homo sapien
ctgttactctcagtacagaaaataa

SEQ ID NO: 451918 - DNA, 25 bp, Homo sapien
tcagagatcagtggttgtgtaggct

SEQ ID NO: 451919 - DNA, 25 bp, Homo sapien
cagtcatattctcagagatcagtgg

SEQ ID NO: 451920 - DNA, 25 bp, Homo sapien
actgttactctcagtacagaaaata

SEQ ID NO: 451921 - DNA, 25 bp, Homo sapien
aatgaggcttgagggttgaactgag

SEQ ID NO: 451922 - DNA, 25 bp, Homo sapien
tctcagaggtattcatttctggtat

SEQ ID NO: 451923 - DNA, 25 bp, Homo sapien
gacattgtacttaggaagttctcag

SEQ ID NO: 451924 - DNA, 25 bp, Homo sapien
cagacttgttttgaatagagtcctc

SEQ ID NO: 451925 - DNA, 25 bp, Homo sapien
aagtggggtcgacaggtgggcaagc

SEQ ID NO: 451926 - DNA, 25 bp, Homo sapien
cgcggcgagcacatggggaaagtgg

SEQ ID NO: 451927 - DNA, 25 bp, Homo sapien
tcatcccgcggcgagcacatgggga

SEQ ID NO: 451928 - DNA, 25 bp, Homo sapien
aaagtggggtcgacaggtgggcaag

SEQ ID NO: 451929 - DNA, 25 bp, Homo sapien
cgcgcgtgcgcacgcccgcgcgcct

SEQ ID NO: 451930 - DNA, 25 bp, Homo sapien
gcgcgtgcgcacgcccgcgcgcctc

SEQ ID NO: 451931 - DNA, 25 bp, Homo sapien
tacaatgtagttgggatggaggatc

SEQ ID NO: 451932 - DNA, 25 bp, Homo sapien
gcactgcttagatgcctgcacagct

SEQ ID NO: 451933 - DNA, 25 bp, Homo sapien
ggaggccggcattcttacctgggaa

SEQ ID NO: 451934 - DNA, 25 bp, Homo sapien
gagcggttcttggacgagcctgact

SEQ ID NO: 451935 - DNA, 25 bp, Homo sapien
tcaacagcatttcagctaacggtcc

SEQ ID NO: 451936 - DNA, 25 bp, Homo sapien
taatggactaagtgatctgggacct

SEQ ID NO: 451937 - DNA, 25 bp, Homo sapien
tatccttatgtgtgctcacagccac

SEQ ID NO: 451938 - DNA, 25 bp, Homo sapien
tgtactatactctggactgtgttgg

SEQ ID NO: 451939 - DNA, 25 bp, Homo sapien
gtacgctctggtcaaaccacacaca

SEQ ID NO: 451940 - DNA, 25 bp, Homo sapien
cacagtacgctctggtcaaaccaca

SEQ ID NO: 451941 - DNA, 25 bp, Homo sapien
cactgttcacagtacgctctggtca

SEQ ID NO: 451942 - DNA, 25 bp, Homo sapien
ttcacagtacgctctggtcaaacca

SEQ ID NO: 451943 - DNA, 25 bp, Homo sapien
gtcaattttcacaaaggtctccaga

SEQ ID NO: 451944 - DNA, 25 bp, Homo sapien
atgagtcaattttcacaaaggtctc

SEQ ID NO: 451945 - DNA, 25 bp, Homo sapien
tctccagaagcaaggctctattcat

SEQ ID NO: 451946 - DNA, 25 bp, Homo sapien
caattttcacaaaggtctccagaag

SEQ ID NO: 451947 - DNA, 25 bp, Homo sapien
atgaatgttgtcccctggaatcgta

SEQ ID NO: 451948 - DNA, 25 bp, Homo sapien
tgttgtcccctggaatcgtataaca

SEQ ID NO: 451949 - DNA, 25 bp, Homo sapien
tgtcccctggaatcgtataacacat

SEQ ID NO: 451950 - DNA, 25 bp, Homo sapien
gaatgttgtcccctggaatcgtata

SEQ ID NO: 451951 - DNA, 25 bp, Homo sapien
caagctttctgggggccgaacagga

SEQ ID NO: 451952 - DNA, 25 bp, Homo sapien
ctagccaagattagacaagctttct

SEQ ID NO: 451953 - DNA, 25 bp, Homo sapien
gacaagctttctgggggccgaacag

SEQ ID NO: 451954 - DNA, 25 bp, Homo sapien
ctgggggccgaacaggaaccaggag

SEQ ID NO: 451955 - DNA, 25 bp, Homo sapien
ggacttgtatcaggccccagttttg

SEQ ID NO: 451956 - DNA, 25 bp, Homo sapien
tactcagatgggttgtgtcagccaa

SEQ ID NO: 451957 - DNA, 25 bp, Homo sapien
gattttaagggccaacgctctgttc

SEQ ID NO: 451958 - DNA, 25 bp, Homo sapien
cctgcgggcattcactacagtggca

SEQ ID NO: 451959 - DNA, 25 bp, Homo sapien
aggacgctgggtttcctcaccgcag

SEQ ID NO: 451960 - DNA, 25 bp, Homo sapien
tgggtttcctcaccgcagcccaggg

SEQ ID NO: 451961 - DNA, 25 bp, Homo sapien
ctcaccgcagcccagggccagtccc

SEQ ID NO: 451962 - DNA, 25 bp, Homo sapien
cagcagtgtggtcaggacgctgggt

SEQ ID NO: 451963 - DNA, 25 bp, Homo sapien
gccaggcgggttagcgggcaggagt

SEQ ID NO: 451964 - DNA, 25 bp, Homo sapien
gaatcccgggatgagccaagcgccg

SEQ ID NO: 451965 - DNA, 25 bp, Homo sapien
agccccggcggcgttagaggaacag

SEQ ID NO: 451966 - DNA, 25 bp, Homo sapien
ggtctgggcggtccgcggagtcggc

SEQ ID NO: 451967 - DNA, 25 bp, Homo sapien
cattcgggacttcctgtcggacaac

SEQ ID NO: 451968 - DNA, 25 bp, Homo sapien
ctcaacgaaattgggcagccgcgag

SEQ ID NO: 451969 - DNA, 25 bp, Homo sapien
tcagctggagtcgtaagctcggccc

SEQ ID NO: 451970 - DNA, 25 bp, Homo sapien
tacggcgacctctgtgacaatttgc

SEQ ID NO: 451971 - DNA, 25 bp, Homo sapien
ccttgaaagaatacttttatgccaa

SEQ ID NO: 451972 - DNA, 25 bp, Homo sapien
cttgaaagaatacttttatgccaaa

SEQ ID NO: 451973 - DNA, 25 bp, Homo sapien
agaatacttttatgccaaataaatc

SEQ ID NO: 451974 - DNA, 25 bp, Homo sapien
gaaagaatacttttatgccaaataa

SEQ ID NO: 451975 - DNA, 25 bp, Homo sapien
aacacattatacagagaaacttggc

SEQ ID NO: 451976 - DNA, 25 bp, Homo sapien
tgagagttcaatttcaaaccaaaaa

SEQ ID NO: 451977 - DNA, 25 bp, Homo sapien
ggtggtattggacagcattcaaagt

SEQ ID NO: 451978 - DNA, 25 bp, Homo sapien
ttggccttggcagcatggtggtatt

SEQ ID NO: 451979 - DNA, 25 bp, Homo sapien
ccatgctgggacagctaacaatctc

SEQ ID NO: 451980 - DNA, 25 bp, Homo sapien
gagctgataatccattgcttgtttc

SEQ ID NO: 451981 - DNA, 25 bp, Homo sapien
atggtatacaaagtggcagccatgc

SEQ ID NO: 451982 - DNA, 25 bp, Homo sapien
tcttccaagagagctgataatccat

SEQ ID NO: 451983 - DNA, 25 bp, Homo sapien
tcttcctgtgcctgggtacaattac

SEQ ID NO: 451984 - DNA, 25 bp, Homo sapien
tcttagttcttgagctgtgattacg

SEQ ID NO: 451985 - DNA, 25 bp, Homo sapien
cctctcagtgctggcagacttctca

SEQ ID NO: 451986 - DNA, 25 bp, Homo sapien
tgattacgtttatttcaatggactg

SEQ ID NO: 451987 - DNA, 25 bp, Homo sapien
ggtatataagatatcccacctgttc

SEQ ID NO: 451988 - DNA, 25 bp, Homo sapien
cacctgttcttgtagtaaatccatg

SEQ ID NO: 451989 - DNA, 25 bp, Homo sapien
aactactgaagagattgaatgagct

SEQ ID NO: 451990 - DNA, 25 bp, Homo sapien
ggatctctccgtttggaactactga

SEQ ID NO: 451991 - DNA, 25 bp, Homo sapien
atttctccacattaaatcctgcagc

SEQ ID NO: 451992 - DNA, 25 bp, Homo sapien
aatcctgcagcattcgccaacctac

SEQ ID NO: 451993 - DNA, 25 bp, Homo sapien
tgcaaaaactatcggtatacagtct

SEQ ID NO: 451994 - DNA, 25 bp, Homo sapien
gagctgctattgtgactcctctctg

SEQ ID NO: 451995 - DNA, 25 bp, Homo sapien
tatacagtctgcaccaagagctgct

SEQ ID NO: 451996 - DNA, 25 bp, Homo sapien
ttccatcataagagtcaggctcctt

SEQ ID NO: 451997 - DNA, 25 bp, Homo sapien
tacatatggtatctgattttctgtt

SEQ ID NO: 451998 - DNA, 25 bp, Homo sapien
cagacagttcttcagtcgtcaccct

SEQ ID NO: 451999 - DNA, 25 bp, Homo sapien
agtggacatagtaccgaacagacag

SEQ ID NO: 452000 - DNA, 25 bp, Homo sapien
taagtaagcccccatgtccattgtc

SEQ ID NO: 452001 - DNA, 25 bp, Homo sapien
tacggatgtcgatacagggatttgg

SEQ ID NO: 452002 - DNA, 25 bp, Homo sapien
tacacatgcaggatgaagattatga

SEQ ID NO: 452003 - DNA, 25 bp, Homo sapien
gcaaggtcctactgaaggtccaagt

SEQ ID NO: 452004 - DNA, 25 bp, Homo sapien
ggtccaagtacaacaacaatgtctt

SEQ ID NO: 452005 - DNA, 25 bp, Homo sapien
gagatcttggttctggtcctgaata

SEQ ID NO: 452006 - DNA, 25 bp, Homo sapien
tgggagaaaaacttgtcaggatggc

SEQ ID NO: 452007 - DNA, 25 bp, Homo sapien
tctgtgtaccaaaattaaggccatc

SEQ ID NO: 452008 - DNA, 25 bp, Homo sapien
ggcaagatgtacagaggttgagatc

SEQ ID NO: 452009 - DNA, 25 bp, Homo sapien
tcaaggtaagagtcatgaagtctat

SEQ ID NO: 452010 - DNA, 25 bp, Homo sapien
tacatagaaatcaaatatgagacgc

SEQ ID NO: 452011 - DNA, 25 bp, Homo sapien
aattcagctagaagtaaccttaggg

SEQ ID NO: 452012 - DNA, 25 bp, Homo sapien
gagacgcttactggtgttattagaa

SEQ ID NO: 452013 - DNA, 25 bp, Homo sapien
cacaatgcctgaccaatagagggta

SEQ ID NO: 452014 - DNA, 25 bp, Homo sapien
taaatatcctgagggctacaactgt

SEQ ID NO: 452015 - DNA, 25 bp, Homo sapien
ttccttgaagatgtagtccccagct

SEQ ID NO: 452016 - DNA, 25 bp, Homo sapien
gcctagatgatcaaacctgctccaa

SEQ ID NO: 452017 - DNA, 25 bp, Homo sapien
ctatgctttatgtttagtgccttcc

SEQ ID NO: 452018 - DNA, 25 bp, Homo sapien
tattttggatgagttcaacatttct

SEQ ID NO: 452019 - DNA, 25 bp, Homo sapien
tgtgtctgcaggatactccaaattt

SEQ ID NO: 452020 - DNA, 25 bp, Homo sapien
ttatcaaccttactcaatacatgga

SEQ ID NO: 452021 - DNA, 25 bp, Homo sapien
ggttgtagaatgttgtagtacataa

SEQ ID NO: 452022 - DNA, 25 bp, Homo sapien
gggagtcctggtattctgtagataa

SEQ ID NO: 452023 - DNA, 25 bp, Homo sapien
attctgtagataagtccaattatat

SEQ ID NO: 452024 - DNA, 25 bp, Homo sapien
tattctgtagataagtccaattata

SEQ ID NO: 452025 - DNA, 25 bp, Homo sapien
cacttggactgatgttttgatgcat

SEQ ID NO: 452026 - DNA, 25 bp, Homo sapien
tgaagtggatgtcagccacttggac

SEQ ID NO: 452027 - DNA, 25 bp, Homo sapien
aaagcatttagaactcctatttgca

SEQ ID NO: 452028 - DNA, 25 bp, Homo sapien
atttgcaaacaaatagctgaagtgg

SEQ ID NO: 452029 - DNA, 25 bp, Homo sapien
tcctctcatggacctgtgactgtgc

SEQ ID NO: 452030 - DNA, 25 bp, Homo sapien
ctaattttgctcttagattcagctc

SEQ ID NO: 452031 - DNA, 25 bp, Homo sapien
gctggatgacttgccattcttacag

SEQ ID NO: 452032 - DNA, 25 bp, Homo sapien
ctttcatcgccttccagctggatga

SEQ ID NO: 452033 - DNA, 25 bp, Homo sapien
aatttgccaggactggcgatttgcc

SEQ ID NO: 452034 - DNA, 25 bp, Homo sapien
ggactggcgatttgccacatttcag

SEQ ID NO: 452035 - DNA, 25 bp, Homo sapien
tttgccaggactggcgatttgccac

SEQ ID NO: 452036 - DNA, 25 bp, Homo sapien
ttcccaatttgccaggactggcgat

SEQ ID NO: 452037 - DNA, 25 bp, Homo sapien
tcagaaattgcatcgagggcagtgt

SEQ ID NO: 452038 - DNA, 25 bp, Homo sapien
gctaaggtctggaggccatttcaaa

SEQ ID NO: 452039 - DNA, 25 bp, Homo sapien
tgctcaacagtgatcgctcctttgg

SEQ ID NO: 452040 - DNA, 25 bp, Homo sapien
catttcaaaatccatgacggtcact

SEQ ID NO: 452041 - DNA, 25 bp, Homo sapien
ctcagtggccccacattcatatgac

SEQ ID NO: 452042 - DNA, 25 bp, Homo sapien
cctcagtggccccacattcatatga

SEQ ID NO: 452043 - DNA, 25 bp, Homo sapien
cagtatatgagaggatcggtggatt

SEQ ID NO: 452044 - DNA, 25 bp, Homo sapien
taaagtgagtccctaactctgaggc

SEQ ID NO: 452045 - DNA, 25 bp, Homo sapien
tagtcatgtgcccactactgcatcc

SEQ ID NO: 452046 - DNA, 25 bp, Homo sapien
ctctgaggccagtatgagtcattcc

SEQ ID NO: 452047 - DNA, 25 bp, Homo sapien
ctttgatttccagtactcctagtaa

SEQ ID NO: 452048 - DNA, 25 bp, Homo sapien
tcgccttactctaggcctcatatca

SEQ ID NO: 452049 - DNA, 25 bp, Homo sapien
ggcctcatatcaccattgcctttga

SEQ ID NO: 452050 - DNA, 25 bp, Homo sapien
taaggcctgtttattcttgttcaaa

SEQ ID NO: 452051 - DNA, 25 bp, Homo sapien
ccaagggggtgccaccttcaagcca

SEQ ID NO: 452052 - DNA, 25 bp, Homo sapien
ccacaggtgctttgtgtgatggagt

SEQ ID NO: 452053 - DNA, 25 bp, Homo sapien
ggtgccaccttcaagccactccaca

SEQ ID NO: 452054 - DNA, 25 bp, Homo sapien
gggttatgggttcttgccagcattc

SEQ ID NO: 452055 - DNA, 25 bp, Homo sapien
tgtccccttctacgtggctaaagct

SEQ ID NO: 452056 - DNA, 25 bp, Homo sapien
ccccttctacgtggctaaagctctg

SEQ ID NO: 452057 - DNA, 25 bp, Homo sapien
attctgtccccttctacgtggctaa

SEQ ID NO: 452058 - DNA, 25 bp, Homo sapien
taagagaatgacattctgtcccctt

SEQ ID NO: 452059 - DNA, 25 bp, Homo sapien
gagggcccgcgggagacgcccatgc

SEQ ID NO: 452060 - DNA, 25 bp, Homo sapien
gcgggagacgcccatgccgggccgg

SEQ ID NO: 452061 - DNA, 25 bp, Homo sapien
gcccgcgggagacgcccatgccggg

SEQ ID NO: 452062 - DNA, 25 bp, Homo sapien
ggagacgcccatgccgggccggcgg

SEQ ID NO: 452063 - DNA, 25 bp, Homo sapien
tccgggctaccgtcccgcggctcca

SEQ ID NO: 452064 - DNA, 25 bp, Homo sapien
gaggcggaagccgactcgcagtcgc

SEQ ID NO: 452065 - DNA, 25 bp, Homo sapien
cggaagccgactcgcagtcgctgct

SEQ ID NO: 452066 - DNA, 25 bp, Homo sapien
ccgggctaccgtcccgcggctccat

SEQ ID NO: 452067 - DNA, 25 bp, Homo sapien
tgtccggctcgggaccggcgtcgcg

SEQ ID NO: 452068 - DNA, 25 bp, Homo sapien
gcagccccgggaagcgccgcttgtt

SEQ ID NO: 452069 - DNA, 25 bp, Homo sapien
gaagcgccgcttgttgagtcgccgc

SEQ ID NO: 452070 - DNA, 25 bp, Homo sapien
cgcttgttgagtcgccgcggcgcct

SEQ ID NO: 452071 - DNA, 25 bp, Homo sapien
ggatctgccgctctgactcgctgca

SEQ ID NO: 452072 - DNA, 25 bp, Homo sapien
gtactccggatctgccgctctgact

SEQ ID NO: 452073 - DNA, 25 bp, Homo sapien
agtccactgtactccggatctgccg

SEQ ID NO: 452074 - DNA, 25 bp, Homo sapien
actgtactccggatctgccgctctg

SEQ ID NO: 452075 - DNA, 25 bp, Homo sapien
cgtagcagaagtccccggacacgtt

SEQ ID NO: 452076 - DNA, 25 bp, Homo sapien
acgttggtctcgaaccagatgtgct

SEQ ID NO: 452077 - DNA, 25 bp, Homo sapien
ccaacgtagcagaagtccccggaca

SEQ ID NO: 452078 - DNA, 25 bp, Homo sapien
cagaagtccccggacacgttggtct

SEQ ID NO: 452079 - DNA, 25 bp, Homo sapien
tccagctgctcgatgcagggcgtgt

SEQ ID NO: 452080 - DNA, 25 bp, Homo sapien
gctgcgcactttcttcgagacactg

SEQ ID NO: 452081 - DNA, 25 bp, Homo sapien
gcaccacaatcttgcaggctgcgca

SEQ ID NO: 452082 - DNA, 25 bp, Homo sapien
gatgcagggcgtgtgcaccacaatc

SEQ ID NO: 452083 - DNA, 25 bp, Homo sapien
tcctggagcctgattcacggaagga

SEQ ID NO: 452084 - DNA, 25 bp, Homo sapien
acttgccgtcctggcgtcgtctgtg

SEQ ID NO: 452085 - DNA, 25 bp, Homo sapien
acagtgccgacacttgccgtcctgg

SEQ ID NO: 452086 - DNA, 25 bp, Homo sapien
gtgccgacacttgccgtcctggcgt

SEQ ID NO: 452087 - DNA, 25 bp, Homo sapien
tcctggcgtcgtctgtgtacccagt

SEQ ID NO: 452088 - DNA, 25 bp, Homo sapien
atgaccacggctgcgtggaccccca

SEQ ID NO: 452089 - DNA, 25 bp, Homo sapien
ccccagcgagcacggctcctcgatc

SEQ ID NO: 452090 - DNA, 25 bp, Homo sapien
agcgagcacggctcctcgatctgct

SEQ ID NO: 452091 - DNA, 25 bp, Homo sapien
tgcgtggacccccagcgagcacggc

SEQ ID NO: 452092 - DNA, 25 bp, Homo sapien
ccctttcttgctggacttcctcttg

SEQ ID NO: 452093 - DNA, 25 bp, Homo sapien
ttcttgcttgctttcagagtattct

SEQ ID NO: 452094 - DNA, 25 bp, Homo sapien
cttcctcttgaaggatgccctcttc

SEQ ID NO: 452095 - DNA, 25 bp, Homo sapien
tttcagagtattctggggcctccgg

SEQ ID NO: 452096 - DNA, 25 bp, Homo sapien
cctgatgatgaagggtctccagcgg

SEQ ID NO: 452097 - DNA, 25 bp, Homo sapien
tgatgatgaagggtctccagcggcc

SEQ ID NO: 452098 - DNA, 25 bp, Homo sapien
ctgatgatgaagggtctccagcggc

SEQ ID NO: 452099 - DNA, 25 bp, Homo sapien
tgtcggggattgagataccagagga

SEQ ID NO: 452100 - DNA, 25 bp, Homo sapien
ttgtcggggattgagataccagagg

SEQ ID NO: 452101 - DNA, 25 bp, Homo sapien
tcggggattgagataccagaggaaa

SEQ ID NO: 452102 - DNA, 25 bp, Homo sapien
gtcggggattgagataccagaggaa

SEQ ID NO: 452103 - DNA, 25 bp, Homo sapien
ctccttgggccctccctggctcagg

SEQ ID NO: 452104 - DNA, 25 bp, Homo sapien
cctccttgggccctccctggctcag

SEQ ID NO: 452105 - DNA, 25 bp, Homo sapien
ctccagcgcctccttgggccctccc

SEQ ID NO: 452106 - DNA, 25 bp, Homo sapien
cagcgcctccttgggccctccctgg

SEQ ID NO: 452107 - DNA, 25 bp, Homo sapien
aggatccgcaggttgtgcactttgc

SEQ ID NO: 452108 - DNA, 25 bp, Homo sapien
tccgcaggttgtgcactttgcggta

SEQ ID NO: 452109 - DNA, 25 bp, Homo sapien
ccgcacgccaggatccgcaggttgt

SEQ ID NO: 452110 - DNA, 25 bp, Homo sapien
gcaggttgtgcactttgcggtacat

SEQ ID NO: 452111 - DNA, 25 bp, Homo sapien
ggtccagggtggagaggatccagcc

SEQ ID NO: 452112 - DNA, 25 bp, Homo sapien
ccagggtggagaggatccagcccac

SEQ ID NO: 452113 - DNA, 25 bp, Homo sapien
ctggtccagggtggagaggatccag

SEQ ID NO: 452114 - DNA, 25 bp, Homo sapien
tccagggtggagaggatccagccca

SEQ ID NO: 452115 - DNA, 25 bp, Homo sapien
ggccaagtcgttgccagtacccagg

SEQ ID NO: 452116 - DNA, 25 bp, Homo sapien
ccagttgagggttcgggccaagtcg

SEQ ID NO: 452117 - DNA, 25 bp, Homo sapien
ttcgggccaagtcgttgccagtacc

SEQ ID NO: 452118 - DNA, 25 bp, Homo sapien
gagggttcgggccaagtcgttgcca

SEQ ID NO: 452119 - DNA, 25 bp, Homo sapien
ggtcggtggcgccttcatctcggtc

SEQ ID NO: 452120 - DNA, 25 bp, Homo sapien
gctgaagtagttgttgaagacatcc

SEQ ID NO: 452121 - DNA, 25 bp, Homo sapien
gagaggatcttggacacaggctcat

SEQ ID NO: 452122 - DNA, 25 bp, Homo sapien
actccagggtgacgtgggcgtcaaa

SEQ ID NO: 452123 - DNA, 25 bp, Homo sapien
agagaaagctgtcccggcgtagaac

SEQ ID NO: 452124 - DNA, 25 bp, Homo sapien
tcagagaaagctgtcccggcgtaga

SEQ ID NO: 452125 - DNA, 25 bp, Homo sapien
cagagaaagctgtcccggcgtagaa

SEQ ID NO: 452126 - DNA, 25 bp, Homo sapien
tggccaggtccttggagctgcccat

SEQ ID NO: 452127 - DNA, 25 bp, Homo sapien
gcttggccaggtccttggagctgcc

SEQ ID NO: 452128 - DNA, 25 bp, Homo sapien
tgtgcttggccaggtccttggagct

SEQ ID NO: 452129 - DNA, 25 bp, Homo sapien
tcggatgtgcttggccaggtccttg

SEQ ID NO: 452130 - DNA, 25 bp, Homo sapien
caggtcctggatcttgggagtcaag

SEQ ID NO: 452131 - DNA, 25 bp, Homo sapien
aggtcctggatcttgggagtcaagt

SEQ ID NO: 452132 - DNA, 25 bp, Homo sapien
cgcggccaatgacgtcatggtgaag

SEQ ID NO: 452133 - DNA, 25 bp, Homo sapien
agcgcggccaatgacgtcatggtga

SEQ ID NO: 452134 - DNA, 25 bp, Homo sapien
gcgcggccaatgacgtcatggtgaa

SEQ ID NO: 452135 - DNA, 25 bp, Homo sapien
cttgggggacagtttctggcatgtc

SEQ ID NO: 452136 - DNA, 25 bp, Homo sapien
cacttgggggacagtttctggcatg

SEQ ID NO: 452137 - DNA, 25 bp, Homo sapien
tttctggcatgtcggggacttggct

SEQ ID NO: 452138 - DNA, 25 bp, Homo sapien
gacagtttctggcatgtcggggact

SEQ ID NO: 452139 - DNA, 25 bp, Homo sapien
ctggcagtggtggcgtccaggaagc

SEQ ID NO: 452140 - DNA, 25 bp, Homo sapien
ggcagtggtggcgtccaggaagcac

SEQ ID NO: 452141 - DNA, 25 bp, Homo sapien
tggcagtggtggcgtccaggaagca

SEQ ID NO: 452142 - DNA, 25 bp, Homo sapien
ggtccaggatataaatctcatcctg

SEQ ID NO: 452143 - DNA, 25 bp, Homo sapien
tcctgtgcgatctcagtcacatagt

SEQ ID NO: 452144 - DNA, 25 bp, Homo sapien
cagggtccaggatataaatctcatc

SEQ ID NO: 452145 - DNA, 25 bp, Homo sapien
tcaggccgggccgatgcccccagca

SEQ ID NO: 452146 - DNA, 25 bp, Homo sapien
tgagggggtgcagcatccccttgca

SEQ ID NO: 452147 - DNA, 25 bp, Homo sapien
ggggtgcagcatccccttgcagtga

SEQ ID NO: 452148 - DNA, 25 bp, Homo sapien
cttgagggggtgcagcatccccttg

SEQ ID NO: 452149 - DNA, 25 bp, Homo sapien
agggggtgcagcatccccttgcagt

SEQ ID NO: 452150 - DNA, 25 bp, Homo sapien
cagaagtcgttcctcttggcagcct

SEQ ID NO: 452151 - DNA, 25 bp, Homo sapien
ttggcagcctcaatcagctcttcac

SEQ ID NO: 452152 - DNA, 25 bp, Homo sapien
gcgtggtgcaggagcgtgcgactct

SEQ ID NO: 452153 - DNA, 25 bp, Homo sapien
ctgccagtgctgactgcgtggtgca

SEQ ID NO: 452154 - DNA, 25 bp, Homo sapien
tgcttggtgcaaacaggtctccccg

SEQ ID NO: 452155 - DNA, 25 bp, Homo sapien
tgtagtggcagatggtgcgctggcc

SEQ ID NO: 452156 - DNA, 25 bp, Homo sapien
ctccaccgcatcaaggatctctggg

SEQ ID NO: 452157 - DNA, 25 bp, Homo sapien
ttttcctccaccgcatcaaggatct

SEQ ID NO: 452158 - DNA, 25 bp, Homo sapien
catctggtagtgctgccggttctcc

SEQ ID NO: 452159 - DNA, 25 bp, Homo sapien
tctggtagtgctgccggttctccag

SEQ ID NO: 452160 - DNA, 25 bp, Homo sapien
tggatcatctggtagtgctgccggt

SEQ ID NO: 452161 - DNA, 25 bp, Homo sapien
cagctcggtgtcctgagccttctca

SEQ ID NO: 452162 - DNA, 25 bp, Homo sapien
tccactgggttatgacttgtacagc

SEQ ID NO: 452163 - DNA, 25 bp, Homo sapien
tgaacaacagtcagatactcccctg

SEQ ID NO: 452164 - DNA, 25 bp, Homo sapien
tactcccctgtgttgcttaatttgt

SEQ ID NO: 452165 - DNA, 25 bp, Homo sapien
aaaaagaggttgtaatgatgctcac

SEQ ID NO: 452166 - DNA, 25 bp, Homo sapien
ccaagaatctatcccaatgaggtag

SEQ ID NO: 452167 - DNA, 25 bp, Homo sapien
aagcagtatggttgatataatccca

SEQ ID NO: 452168 - DNA, 25 bp, Homo sapien
gatacgaggtattcatacaagagac

SEQ ID NO: 452169 - DNA, 25 bp, Homo sapien
tgtggttcaattcagcccagtgtca

SEQ ID NO: 452170 - DNA, 25 bp, Homo sapien
catgtgaattcttcctactggcagc

SEQ ID NO: 452171 - DNA, 25 bp, Homo sapien
gagacctggtggtatagtgatcaca

SEQ ID NO: 452172 - DNA, 25 bp, Homo sapien
agctttaacccagaatccgattcag

SEQ ID NO: 452173 - DNA, 25 bp, Homo sapien
tgatgacatcggctgcctgtccacg

SEQ ID NO: 452174 - DNA, 25 bp, Homo sapien
cagccaggctaatatcagggaaaag

SEQ ID NO: 452175 - DNA, 25 bp, Homo sapien
catcagcctgagaggcttcacaggg

SEQ ID NO: 452176 - DNA, 25 bp, Homo sapien
gagcacgcggcaatttgccaggcat

SEQ ID NO: 452177 - DNA, 25 bp, Homo sapien
ccatccatcagcctgagaggcttca

SEQ ID NO: 452178 - DNA, 25 bp, Homo sapien
caggggatatgtagtcaactgcaga

SEQ ID NO: 452179 - DNA, 25 bp, Homo sapien
gcagtgcaggggatatgtagtcaac

SEQ ID NO: 452180 - DNA, 25 bp, Homo sapien
gatatgtagtcaactgcagatcagc

SEQ ID NO: 452181 - DNA, 25 bp, Homo sapien
agcagtgcaggggatatgtagtcaa

SEQ ID NO: 452182 - DNA, 25 bp, Homo sapien
tatgtcttggctctcaacactgtgt

SEQ ID NO: 452183 - DNA, 25 bp, Homo sapien
tctcagggcttggtctggtcaatct

SEQ ID NO: 452184 - DNA, 25 bp, Homo sapien
gagcagagtcttcatggtgttactg

SEQ ID NO: 452185 - DNA, 25 bp, Homo sapien
tatgcatgtggtcataacctggcac

SEQ ID NO: 452186 - DNA, 25 bp, Homo sapien
cattagggtccatgcacagtctgta

SEQ ID NO: 452187 - DNA, 25 bp, Homo sapien
acagcaagcatagaaccagttcact

SEQ ID NO: 452188 - DNA, 25 bp, Homo sapien
tttcaaggtcagacacagagggaga

SEQ ID NO: 452189 - DNA, 25 bp, Homo sapien
tgcacatggcattctcagtgcctag

SEQ ID NO: 452190 - DNA, 25 bp, Homo sapien
ttgtgactcattaggtctgggctgg

SEQ ID NO: 452191 - DNA, 25 bp, Homo sapien
gaccaggatttcttaaatgttagca

SEQ ID NO: 452192 - DNA, 25 bp, Homo sapien
cacatacttcgtgctccagccagag

SEQ ID NO: 452193 - DNA, 25 bp, Homo sapien
gcatgctgcgtgcatcaaaatcacc

SEQ ID NO: 452194 - DNA, 25 bp, Homo sapien
gaaacacagtcagatcgtaacaccc

SEQ ID NO: 452195 - DNA, 25 bp, Homo sapien
tgtataacagaacacatacgccctg

SEQ ID NO: 452196 - DNA, 25 bp, Homo sapien
aaaactctattaggtgccgagaggc

SEQ ID NO: 452197 - DNA, 25 bp, Homo sapien
gaagcccctactgatttttccctga

SEQ ID NO: 452198 - DNA, 25 bp, Homo sapien
ttgctcagtgctgaacgctgccttt

SEQ ID NO: 452199 - DNA, 25 bp, Homo sapien
ttctccaacatggacttgctcagtg

SEQ ID NO: 452200 - DNA, 25 bp, Homo sapien
ctttctccaacatggacttgctcag

SEQ ID NO: 452201 - DNA, 25 bp, Homo sapien
gtgctgaacgctgcctttccttcac

SEQ ID NO: 452202 - DNA, 25 bp, Homo sapien
tttaattggcctctcatacaaagag

SEQ ID NO: 452203 - DNA, 25 bp, Homo sapien
gatattggcaataaaactaaacttg

SEQ ID NO: 452204 - DNA, 25 bp, Homo sapien
tcaaagcaatagtcataacacccac

SEQ ID NO: 452205 - DNA, 25 bp, Homo sapien
aattttggaagcatacagatctaga

SEQ ID NO: 452206 - DNA, 25 bp, Homo sapien
taagcaccaagtcacgctgtcatgc

SEQ ID NO: 452207 - DNA, 25 bp, Homo sapien
gccaggaaccacgaagacaaggatt

SEQ ID NO: 452208 - DNA, 25 bp, Homo sapien
aagacctaaagcctcgagtgcctgc

SEQ ID NO: 452209 - DNA, 25 bp, Homo sapien
tttggtgaccacagctatgccttcc

SEQ ID NO: 452210 - DNA, 25 bp, Homo sapien
tactcatggagccaaaagagagact

SEQ ID NO: 452211 - DNA, 25 bp, Homo sapien
tataagcaccgacttagacgtgatg

SEQ ID NO: 452212 - DNA, 25 bp, Homo sapien
taacataacctgctaggcatgctca

SEQ ID NO: 452213 - DNA, 25 bp, Homo sapien
ttaactgctatggtgcttcctgaca

SEQ ID NO: 452214 - DNA, 25 bp, Homo sapien
gagcatagcccagttttgacataat

SEQ ID NO: 452215 - DNA, 25 bp, Homo sapien
caatcatagtaatttgagcatagcc

SEQ ID NO: 452216 - DNA, 25 bp, Homo sapien
tttgcaggtgttcacagattttaca

SEQ ID NO: 452217 - DNA, 25 bp, Homo sapien
ttgtttatttaactggagctgccac

SEQ ID NO: 452218 - DNA, 25 bp, Homo sapien
ctatcattgagttgaggctctactt

SEQ ID NO: 452219 - DNA, 25 bp, Homo sapien
tgtcttgtgagagctccagcaaaga

SEQ ID NO: 452220 - DNA, 25 bp, Homo sapien
tacttgctctataattgcttcacgg

SEQ ID NO: 452221 - DNA, 25 bp, Homo sapien
ataattgcttcacggaaatgtcttg

SEQ ID NO: 452222 - DNA, 25 bp, Homo sapien
taagcaactgcgcagaggagcagct

SEQ ID NO: 452223 - DNA, 25 bp, Homo sapien
aagagttgtctgagcctgtgcttct

SEQ ID NO: 452224 - DNA, 25 bp, Homo sapien
gagcctggcatcacactgatcatta

SEQ ID NO: 452225 - DNA, 25 bp, Homo sapien
cagacgtaactgcagtcctgagtgg

SEQ ID NO: 452226 - DNA, 25 bp, Homo sapien
taggtctgagtgcattttaattata

SEQ ID NO: 452227 - DNA, 25 bp, Homo sapien
tcataggtctgagtgcattttaatt

SEQ ID NO: 452228 - DNA, 25 bp, Homo sapien
aggtctgagtgcattttaattatac

SEQ ID NO: 452229 - DNA, 25 bp, Homo sapien
cataggtctgagtgcattttaatta

SEQ ID NO: 452230 - DNA, 25 bp, Homo sapien
cctaactgccacagatttgaggcaa

SEQ ID NO: 452231 - DNA, 25 bp, Homo sapien
gaaggcactcaagaccaaaggacca

SEQ ID NO: 452232 - DNA, 25 bp, Homo sapien
tgttccaagcctgttgaattgcccc

SEQ ID NO: 452233 - DNA, 25 bp, Homo sapien
aatgtggctctttatgctgatggat

SEQ ID NO: 452234 - DNA, 25 bp, Homo sapien
tgaaagttggacttgagtaatcaaa

SEQ ID NO: 452235 - DNA, 25 bp, Homo sapien
gaaatcatatttaccacgggtccag

SEQ ID NO: 452236 - DNA, 25 bp, Homo sapien
tggccatcccgagtggctcatctag

SEQ ID NO: 452237 - DNA, 25 bp, Homo sapien
catgctatttggtcactggccatcc

SEQ ID NO: 452238 - DNA, 25 bp, Homo sapien
ttggatgtctgatgtccgctaacat

SEQ ID NO: 452239 - DNA, 25 bp, Homo sapien
gccttcactcatcagaaggtgacgt

SEQ ID NO: 452240 - DNA, 25 bp, Homo sapien
catcagaaggtgacgtttttgtttt

SEQ ID NO: 452241 - DNA, 25 bp, Homo sapien
ttgttttggatgtctgatgtccgct

SEQ ID NO: 452242 - DNA, 25 bp, Homo sapien
tgagttcctgtgatggaaatctgat

SEQ ID NO: 452243 - DNA, 25 bp, Homo sapien
cttgagctccgcattgcacacaggc

SEQ ID NO: 452244 - DNA, 25 bp, Homo sapien
tgagctccgcattgcacacaggccc

SEQ ID NO: 452245 - DNA, 25 bp, Homo sapien
ctgagttcctgtgatggaaatctga

SEQ ID NO: 452246 - DNA, 25 bp, Homo sapien
tgtgcaagtacctgtagacagcaag

SEQ ID NO: 452247 - DNA, 25 bp, Homo sapien
gaagatgatagattatagtcaggga

SEQ ID NO: 452248 - DNA, 25 bp, Homo sapien
caagtacctgtagacagcaagggag

SEQ ID NO: 452249 - DNA, 25 bp, Homo sapien
gaagtttgtgcaagtacctgtagac

SEQ ID NO: 452250 - DNA, 25 bp, Homo sapien
aaacacgtttgcagtccacaccaga

SEQ ID NO: 452251 - DNA, 25 bp, Homo sapien
tgcccaagattctagccagccaaga

SEQ ID NO: 452252 - DNA, 25 bp, Homo sapien
cataatatgagactgttcctgctgg

SEQ ID NO: 452253 - DNA, 25 bp, Homo sapien
gccaagagtcaatcagtcgatgagc

SEQ ID NO: 452254 - DNA, 25 bp, Homo sapien
ccgccagtaacaatctcttcttctc

SEQ ID NO: 452255 - DNA, 25 bp, Homo sapien
ctgccgccagtaacaatctcttctt

SEQ ID NO: 452256 - DNA, 25 bp, Homo sapien
tgccgccagtaacaatctcttcttc

SEQ ID NO: 452257 - DNA, 25 bp, Homo sapien
gccgccagtaacaatctcttcttct

SEQ ID NO: 452258 - DNA, 25 bp, Homo sapien
aaaaatcacgggaaagggatgcaag

SEQ ID NO: 452259 - DNA, 25 bp, Homo sapien
ggcagctcacctcaagagaaaaatc

SEQ ID NO: 452260 - DNA, 25 bp, Homo sapien
agggtaaggagggtactacacatgt

SEQ ID NO: 452261 - DNA, 25 bp, Homo sapien
agtcctaggatcatggttaaacacc

SEQ ID NO: 452262 - DNA, 25 bp, Homo sapien
gactcattccgacattatcattggg

SEQ ID NO: 452263 - DNA, 25 bp, Homo sapien
cacacattgagaactatggcctaga

SEQ ID NO: 452264 - DNA, 25 bp, Homo sapien
tgctgaaggctatggcgtatgactt

SEQ ID NO: 452265 - DNA, 25 bp, Homo sapien
ggtgcctgtcacatttacaaatatg

SEQ ID NO: 452266 - DNA, 25 bp, Homo sapien
agataaagtcttggatgatagcacc

SEQ ID NO: 452267 - DNA, 25 bp, Homo sapien
gctctgtgaattggatggccatttt

SEQ ID NO: 452268 - DNA, 25 bp, Homo sapien
gaactatccttcatgaagttcctct

SEQ ID NO: 452269 - DNA, 25 bp, Homo sapien
tattcttgcagactctgtcataaag

SEQ ID NO: 452270 - DNA, 25 bp, Homo sapien
gggagccatggccaattctcttccc

SEQ ID NO: 452271 - DNA, 25 bp, Homo sapien
cacttgacttctccatgaccatgac

SEQ ID NO: 452272 - DNA, 25 bp, Homo sapien
gccatggccaattctcttcccaggt

SEQ ID NO: 452273 - DNA, 25 bp, Homo sapien
gtcacttgacttctccatgaccatg

SEQ ID NO: 452274 - DNA, 25 bp, Homo sapien
caaaaggagagtagcccaagttagc

SEQ ID NO: 452275 - DNA, 25 bp, Homo sapien
tgtccaatcctcagaagctggcgca

SEQ ID NO: 452276 - DNA, 25 bp, Homo sapien
tggaaagttgaacgggtcatggccc

SEQ ID NO: 452277 - DNA, 25 bp, Homo sapien
tcatggttgcagcaccacctggctt

SEQ ID NO: 452278 - DNA, 25 bp, Homo sapien
cacaggagcttcgtgcacaggaggc

SEQ ID NO: 452279 - DNA, 25 bp, Homo sapien
gtgtgtttcatgaatccgtaggtaa

SEQ ID NO: 452280 - DNA, 25 bp, Homo sapien
caggagcttcgtgcacaggaggctc

SEQ ID NO: 452281 - DNA, 25 bp, Homo sapien
catgaatccgtaggtaaagagtaaa

SEQ ID NO: 452282 - DNA, 25 bp, Homo sapien
tgcttgagaaagtgccccaggtggg

SEQ ID NO: 452283 - DNA, 25 bp, Homo sapien
aagtttaagctcaaaattgaaggcg

SEQ ID NO: 452284 - DNA, 25 bp, Homo sapien
aattgaaggcggctgagagttttgc

SEQ ID NO: 452285 - DNA, 25 bp, Homo sapien
gctcaaaattgaaggcggctgagag

SEQ ID NO: 452286 - DNA, 25 bp, Homo sapien
attggagagtcagggccagactggg

SEQ ID NO: 452287 - DNA, 25 bp, Homo sapien
agagtcagggccagactgggaggct

SEQ ID NO: 452288 - DNA, 25 bp, Homo sapien
tggagagtcagggccagactgggag

SEQ ID NO: 452289 - DNA, 25 bp, Homo sapien
gactgggaggctggcagggaaacag

SEQ ID NO: 452290 - DNA, 25 bp, Homo sapien
tagtttctttgcagtttcactgtga

SEQ ID NO: 452291 - DNA, 25 bp, Homo sapien
ttctttgcagtttcactgtgaagtg

SEQ ID NO: 452292 - DNA, 25 bp, Homo sapien
cactgtgaagtgactgaaacttcat

SEQ ID NO: 452293 - DNA, 25 bp, Homo sapien
ttccatttagtttctttgcagtttc

SEQ ID NO: 452294 - DNA, 25 bp, Homo sapien
tgtgtccccttaaatgatgcccctg

SEQ ID NO: 452295 - DNA, 25 bp, Homo sapien
taacatctaacacacaacccagcat

SEQ ID NO: 452296 - DNA, 25 bp, Homo sapien
tacggctactagcacagatctttgc

SEQ ID NO: 452297 - DNA, 25 bp, Homo sapien
tgcctgtcaatatgcactcaatcag

SEQ ID NO: 452298 - DNA, 25 bp, Homo sapien
tgatgtggtttctggagtccgttct

SEQ ID NO: 452299 - DNA, 25 bp, Homo sapien
cttcatttgaaaacttgatgtggtt

SEQ ID NO: 452300 - DNA, 25 bp, Homo sapien
gagtccgttctctcttaatctccag

SEQ ID NO: 452301 - DNA, 25 bp, Homo sapien
ggtttctggagtccgttctctctta

SEQ ID NO: 452302 - DNA, 25 bp, Homo sapien
cacagttagaacatgatcaggccaa

SEQ ID NO: 452303 - DNA, 25 bp, Homo sapien
cagttagaacatgatcaggccaaaa

SEQ ID NO: 452304 - DNA, 25 bp, Homo sapien
ggcacagttagaacatgatcaggcc

SEQ ID NO: 452305 - DNA, 25 bp, Homo sapien
tagaacatgatcaggccaaaatctt

SEQ ID NO: 452306 - DNA, 25 bp, Homo sapien
cataggagatcttgctgctgagcaa

SEQ ID NO: 452307 - DNA, 25 bp, Homo sapien
tgtcaccaccgtgctagacatttgg

SEQ ID NO: 452308 - DNA, 25 bp, Homo sapien
ctgttccaggtgcataggagatctt

SEQ ID NO: 452309 - DNA, 25 bp, Homo sapien
tgctgacgtggtttagcacagagcc

SEQ ID NO: 452310 - DNA, 25 bp, Homo sapien
acaagctgacccctgtattgggcgg

SEQ ID NO: 452311 - DNA, 25 bp, Homo sapien
gccactactgcttttggcaacaagc

SEQ ID NO: 452312 - DNA, 25 bp, Homo sapien
gacccctgtattgggcggtgcagct

SEQ ID NO: 452313 - DNA, 25 bp, Homo sapien
tactgcttttggcaacaagctgacc

SEQ ID NO: 452314 - DNA, 25 bp, Homo sapien
cagccataagtatcaagccaccctt

SEQ ID NO: 452315 - DNA, 25 bp, Homo sapien
catttcacagccataagtatcaagc

SEQ ID NO: 452316 - DNA, 25 bp, Homo sapien
gccataagtatcaagccacccttct

SEQ ID NO: 452317 - DNA, 25 bp, Homo sapien
tcacagccataagtatcaagccacc

SEQ ID NO: 452318 - DNA, 25 bp, Homo sapien
cactcttctagtggaagacttctgc

SEQ ID NO: 452319 - DNA, 25 bp, Homo sapien
cagttctctgtgtatcaacagagtc

SEQ ID NO: 452320 - DNA, 25 bp, Homo sapien
agcccacttttgtgcactcttctag

SEQ ID NO: 452321 - DNA, 25 bp, Homo sapien
gaacatactcaagaagaactggacc

SEQ ID NO: 452322 - DNA, 25 bp, Homo sapien
ttgcagaggcaagccagtattcaca

SEQ ID NO: 452323 - DNA, 25 bp, Homo sapien
gctgtggaatccgggcgtcgggacc

SEQ ID NO: 452324 - DNA, 25 bp, Homo sapien
ggctgtggaatccgggcgtcgggac

SEQ ID NO: 452325 - DNA, 25 bp, Homo sapien
aggctgtggaatccgggcgtcggga

SEQ ID NO: 452326 - DNA, 25 bp, Homo sapien
tgttggtgaagtcacgacgtagtgc

SEQ ID NO: 452327 - DNA, 25 bp, Homo sapien
aagtcacgacgtagtgccagtggcc

SEQ ID NO: 452328 - DNA, 25 bp, Homo sapien
ttaacgagtactgcaggctgttggt

SEQ ID NO: 452329 - DNA, 25 bp, Homo sapien
tcccgctctgctcaagggaccctca

SEQ ID NO: 452330 - DNA, 25 bp, Homo sapien
tgccgtcggaactgcgatgccaaac

SEQ ID NO: 452331 - DNA, 25 bp, Homo sapien
gaaagtgtttatgcaagtccgccgt

SEQ ID NO: 452332 - DNA, 25 bp, Homo sapien
gtaaacctcaaggacaagcgagccg

SEQ ID NO: 452333 - DNA, 25 bp, Homo sapien
gtcggcgtcaaacaggaatatcact

SEQ ID NO: 452334 - DNA, 25 bp, Homo sapien
taagaatccctagtttagcagaaag

SEQ ID NO: 452335 - DNA, 25 bp, Homo sapien
tggatctcccgaagtctctggacct

SEQ ID NO: 452336 - DNA, 25 bp, Homo sapien
agacctgggaatgttcatagcccca

SEQ ID NO: 452337 - DNA, 25 bp, Homo sapien
tctgcagtttagaactcagggaccc

SEQ ID NO: 452338 - DNA, 25 bp, Homo sapien
aatgaggcacatagggtttgtagtc

SEQ ID NO: 452339 - DNA, 25 bp, Homo sapien
tgaatgaggcacatagggtttgtag

SEQ ID NO: 452340 - DNA, 25 bp, Homo sapien
gttgaatgaggcacatagggtttgt

SEQ ID NO: 452341 - DNA, 25 bp, Homo sapien
ttgaatgaggcacatagggtttgta

SEQ ID NO: 452342 - DNA, 25 bp, Homo sapien
tttcaccctctaagcgagtaagtgc

SEQ ID NO: 452343 - DNA, 25 bp, Homo sapien
caaattggccctgtaggcaaattca

SEQ ID NO: 452344 - DNA, 25 bp, Homo sapien
taagcgagtaagtgcttgttcccaa

SEQ ID NO: 452345 - DNA, 25 bp, Homo sapien
tttggtctcctctggtctatcagct

SEQ ID NO: 452346 - DNA, 25 bp, Homo sapien
aaatcatatggttatctctgcctgg

SEQ ID NO: 452347 - DNA, 25 bp, Homo sapien
tttaactggagatcctgcaagcctc

SEQ ID NO: 452348 - DNA, 25 bp, Homo sapien
ggaacactcactcctagagacctag

SEQ ID NO: 452349 - DNA, 25 bp, Homo sapien
cttggagacgcctaaagccctttga

SEQ ID NO: 452350 - DNA, 25 bp, Homo sapien
cttgtgagaatggattagtttccac

SEQ ID NO: 452351 - DNA, 25 bp, Homo sapien
catgggtctcaccaagtgactgagt

SEQ ID NO: 452352 - DNA, 25 bp, Homo sapien
ttcgtgaatggcttgtcatgggtct

SEQ ID NO: 452353 - DNA, 25 bp, Homo sapien
gaggctagactagttcttgtgagaa

SEQ ID NO: 452354 - DNA, 25 bp, Homo sapien
tttaaaatcctccaatggctcttca

SEQ ID NO: 452355 - DNA, 25 bp, Homo sapien
tatttaaaatcctccaatggctctt

SEQ ID NO: 452356 - DNA, 25 bp, Homo sapien
cttatttaaaatcctccaatggctc

SEQ ID NO: 452357 - DNA, 25 bp, Homo sapien
tccttatttaaaatcctccaatggc

SEQ ID NO: 452358 - DNA, 25 bp, Homo sapien
ggtctctgcgcctctattttcagac

SEQ ID NO: 452359 - DNA, 25 bp, Homo sapien
ctgcgcctctattttcagactccat

SEQ ID NO: 452360 - DNA, 25 bp, Homo sapien
cggtctctgcgcctctattttcaga

SEQ ID NO: 452361 - DNA, 25 bp, Homo sapien
tctctgcgcctctattttcagactc

SEQ ID NO: 452362 - DNA, 25 bp, Homo sapien
tctgaaagataaggagtgctcctgg

SEQ ID NO: 452363 - DNA, 25 bp, Homo sapien
taggcccagaggtcaatctagatct

SEQ ID NO: 452364 - DNA, 25 bp, Homo sapien
cagtcactctcgaagcgcatcgatt

SEQ ID NO: 452365 - DNA, 25 bp, Homo sapien
tccagtgtttcggtgtttcaaggac

SEQ ID NO: 452366 - DNA, 25 bp, Homo sapien
ctataatatgatgctatgagaacac

SEQ ID NO: 452367 - DNA, 25 bp, Homo sapien
ggcgtttgtgatccattctataata

SEQ ID NO: 452368 - DNA, 25 bp, Homo sapien
taaataggcaactgcaaaggcgttt

SEQ ID NO: 452369 - DNA, 25 bp, Homo sapien
ggcaactgcaaaggcgtttgtgatc

SEQ ID NO: 452370 - DNA, 25 bp, Homo sapien
cacttgtggcatttgggtgtttttc

SEQ ID NO: 452371 - DNA, 25 bp, Homo sapien
gggatgcacttgtggcatttgggtg

SEQ ID NO: 452372 - DNA, 25 bp, Homo sapien
tgcacttgtggcatttgggtgtttt

SEQ ID NO: 452373 - DNA, 25 bp, Homo sapien
ctccctggggatgcacttgtggcat

SEQ ID NO: 452374 - DNA, 25 bp, Homo sapien
cccacaggacttagcaagaatgcca

SEQ ID NO: 452375 - DNA, 25 bp, Homo sapien
catcagcgtggaatgaaaagagtca

SEQ ID NO: 452376 - DNA, 25 bp, Homo sapien
cattgcaagttctcccctgaggcgc

SEQ ID NO: 452377 - DNA, 25 bp, Homo sapien
tctgctgcagaatgccttgggagcc

SEQ ID NO: 452378 - DNA, 25 bp, Homo sapien
caaggaagatttggacaatgcacag

SEQ ID NO: 452379 - DNA, 25 bp, Homo sapien
cattatcagcacaatccccaaaggt

SEQ ID NO: 452380 - DNA, 25 bp, Homo sapien
ttcaagagaccatgacaggtaggct

SEQ ID NO: 452381 - DNA, 25 bp, Homo sapien
catgcgccagggtgctaagtgcaag

SEQ ID NO: 452382 - DNA, 25 bp, Homo sapien
cttcctaagtgactgacaaacactc

SEQ ID NO: 452383 - DNA, 25 bp, Homo sapien
acactcaccctttaaggcagctctt

SEQ ID NO: 452384 - DNA, 25 bp, Homo sapien
ccagccaacaatggcttctctgttg

SEQ ID NO: 452385 - DNA, 25 bp, Homo sapien
tccagccaacaatggcttctctgtt

SEQ ID NO: 452386 - DNA, 25 bp, Homo sapien
tagacttcagcatcaactccagtat

SEQ ID NO: 452387 - DNA, 25 bp, Homo sapien
aaccttgagtcctcttcaagaattg

SEQ ID NO: 452388 - DNA, 25 bp, Homo sapien
cattgttatagacttcagcatcaac

SEQ ID NO: 452389 - DNA, 25 bp, Homo sapien
gagtcctcttcaagaattgttagtt

SEQ ID NO: 452390 - DNA, 25 bp, Homo sapien
tatccattggctgggcccacaatgg

SEQ ID NO: 452391 - DNA, 25 bp, Homo sapien
cccagagtatccattggctgggccc

SEQ ID NO: 452392 - DNA, 25 bp, Homo sapien
cccacaatggatacaccctgagtat

SEQ ID NO: 452393 - DNA, 25 bp, Homo sapien
atggatacaccctgagtattgttac

SEQ ID NO: 452394 - DNA, 25 bp, Homo sapien
catcttgtaaactgctccaggccac

SEQ ID NO: 452395 - DNA, 25 bp, Homo sapien
tagtcggcattagtatacgtgagtc

SEQ ID NO: 452396 - DNA, 25 bp, Homo sapien
tgatgaggaatgagccagcatcttg

SEQ ID NO: 452397 - DNA, 25 bp, Homo sapien
aaatgtgcttgcgtaaatagtcggc

SEQ ID NO: 452398 - DNA, 25 bp, Homo sapien
tgatgagccatacgccagaatccag

SEQ ID NO: 452399 - DNA, 25 bp, Homo sapien
gacacctacatagtcctcgcttgga

SEQ ID NO: 452400 - DNA, 25 bp, Homo sapien
gcaatgccacgcagaagaggaccaa

SEQ ID NO: 452401 - DNA, 25 bp, Homo sapien
tagcatcctgttcggcttctggacg

SEQ ID NO: 452402 - DNA, 25 bp, Homo sapien
tagttactgccaagagtctgtaagt

SEQ ID NO: 452403 - DNA, 25 bp, Homo sapien
gagtagcccaaggaacttcaaccac

SEQ ID NO: 452404 - DNA, 25 bp, Homo sapien
gaacttcaaccacttttgctacagg

SEQ ID NO: 452405 - DNA, 25 bp, Homo sapien
aagagtctgtaagtgttcatgggcc

SEQ ID NO: 452406 - DNA, 25 bp, Homo sapien
ttactgatgtatttgacctgttgag

SEQ ID NO: 452407 - DNA, 25 bp, Homo sapien
tccactttttgtgttccaacaggac

SEQ ID NO: 452408 - DNA, 25 bp, Homo sapien
gactaaggccagaagcgaatgtcct

SEQ ID NO: 452409 - DNA, 25 bp, Homo sapien
tccaacagcattgcagactccactt

SEQ ID NO: 452410 - DNA, 25 bp, Homo sapien
caaagcagagtatttggcacgtgag

SEQ ID NO: 452411 - DNA, 25 bp, Homo sapien
tcctcacttgctagttggtcaccaa

SEQ ID NO: 452412 - DNA, 25 bp, Homo sapien
taggtgagggcacccattgtgtgct

SEQ ID NO: 452413 - DNA, 25 bp, Homo sapien
ttgtgtgcttgtgcaacaccctgtg

SEQ ID NO: 452414 - DNA, 25 bp, Homo sapien
ttgtggtgagagagtttcagccagc

SEQ ID NO: 452415 - DNA, 25 bp, Homo sapien
caagcccctagaatgacagacagca

SEQ ID NO: 452416 - DNA, 25 bp, Homo sapien
gacaagtgacttacatggagtgatg

SEQ ID NO: 452417 - DNA, 25 bp, Homo sapien
gggcaagaaggctgaatcatagatg

SEQ ID NO: 452418 - DNA, 25 bp, Homo sapien
tgcacatctgcaaagctcagctatg

SEQ ID NO: 452419 - DNA, 25 bp, Homo sapien
gaagggctttgtcagtgcacatctg

SEQ ID NO: 452420 - DNA, 25 bp, Homo sapien
taggtgctcttctatgacagtaagc

SEQ ID NO: 452421 - DNA, 25 bp, Homo sapien
ccagagtggccgctttgtagtcaca

SEQ ID NO: 452422 - DNA, 25 bp, Homo sapien
taatccagtgtatggttgttggaca

SEQ ID NO: 452423 - DNA, 25 bp, Homo sapien
ttttcttaatccagtgtatggttgt

SEQ ID NO: 452424 - DNA, 25 bp, Homo sapien
cttaatccagtgtatggttgttgga

SEQ ID NO: 452425 - DNA, 25 bp, Homo sapien
ccagtgtatggttgttggacatttg

SEQ ID NO: 452426 - DNA, 25 bp, Homo sapien
tcaaatccactgcccccttcagtgc

SEQ ID NO: 452427 - DNA, 25 bp, Homo sapien
gcatcaaatccactgcccccttcag

SEQ ID NO: 452428 - DNA, 25 bp, Homo sapien
agcatcaaatccactgcccccttca

SEQ ID NO: 452429 - DNA, 25 bp, Homo sapien
atcaaatccactgcccccttcagtg

SEQ ID NO: 452430 - DNA, 25 bp, Homo sapien
aaacagcaggactgatggccctgga

SEQ ID NO: 452431 - DNA, 25 bp, Homo sapien
tgaacaaacagcaggactgatggcc

SEQ ID NO: 452432 - DNA, 25 bp, Homo sapien
aacaaacagcaggactgatggccct

SEQ ID NO: 452433 - DNA, 25 bp, Homo sapien
cttgaacaaacagcaggactgatgg

SEQ ID NO: 452434 - DNA, 25 bp, Homo sapien
ctatgctccgggtggccgtttttca

SEQ ID NO: 452435 - DNA, 25 bp, Homo sapien
acagtgagtgtggtgccgagtgaca

SEQ ID NO: 452436 - DNA, 25 bp, Homo sapien
tgttgtcaagaaagttctgtcacct

SEQ ID NO: 452437 - DNA, 25 bp, Homo sapien
tcttctctttggatcagggactctc

SEQ ID NO: 452438 - DNA, 25 bp, Homo sapien
ttcctgttaagagaggaccagctct

SEQ ID NO: 452439 - DNA, 25 bp, Homo sapien
gagctcaacaggatactccacactg

SEQ ID NO: 452440 - DNA, 25 bp, Homo sapien
tgttgtgaagataaggacagcacct

SEQ ID NO: 452441 - DNA, 25 bp, Homo sapien
cagctctacctgtctagggttgcaa

SEQ ID NO: 452442 - DNA, 25 bp, Homo sapien
gccaatataaattgtactataaggg

SEQ ID NO: 452443 - DNA, 25 bp, Homo sapien
taggttcttaggccggcaaaccaca

SEQ ID NO: 452444 - DNA, 25 bp, Homo sapien
ttcttaggccggcaaaccacagcca

SEQ ID NO: 452445 - DNA, 25 bp, Homo sapien
caaacaagtgtaggatttgtccacc

SEQ ID NO: 452446 - DNA, 25 bp, Homo sapien
gaactgggaggatgtaaagtaagcc

SEQ ID NO: 452447 - DNA, 25 bp, Homo sapien
gtgcattctcaacagtgaaaactga

SEQ ID NO: 452448 - DNA, 25 bp, Homo sapien
taaagtaagcctcagtgcattctca

SEQ ID NO: 452449 - DNA, 25 bp, Homo sapien
tgaaagcttgtaggcatttatgcca

SEQ ID NO: 452450 - DNA, 25 bp, Homo sapien
ccagtagggctgagagcatgatgtt

SEQ ID NO: 452451 - DNA, 25 bp, Homo sapien
acagccttgacaataacatgatttg

SEQ ID NO: 452452 - DNA, 25 bp, Homo sapien
ttctcttccaaagccgaaaatggca

SEQ ID NO: 452453 - DNA, 25 bp, Homo sapien
gttctcagtaacagccttgacaata

SEQ ID NO: 452454 - DNA, 25 bp, Homo sapien
tgaaattcatggcaaacagctttgt

SEQ ID NO: 452455 - DNA, 25 bp, Homo sapien
tgaaacaaattctagggcattcgaa

SEQ ID NO: 452456 - DNA, 25 bp, Homo sapien
tcgaattgagagtggaattagggta

SEQ ID NO: 452457 - DNA, 25 bp, Homo sapien
tgatgaaattcatggcaaacagctt

SEQ ID NO: 452458 - DNA, 25 bp, Homo sapien
acaggtgtactcagcatttttggtt

SEQ ID NO: 452459 - DNA, 25 bp, Homo sapien
gttgaagctaaagagtcacaatttg

SEQ ID NO: 452460 - DNA, 25 bp, Homo sapien
ctctcttgcaggccggaacttccct

SEQ ID NO: 452461 - DNA, 25 bp, Homo sapien
ttttggttgaagctaaagagtcaca

SEQ ID NO: 452462 - DNA, 25 bp, Homo sapien
tcagcctgactgcaggataagcttc

SEQ ID NO: 452463 - DNA, 25 bp, Homo sapien
gctgatgagaactatagtgaactca

SEQ ID NO: 452464 - DNA, 25 bp, Homo sapien
agagatcagcctgactgcaggataa

SEQ ID NO: 452465 - DNA, 25 bp, Homo sapien
ctgactgcaggataagcttcctgag

SEQ ID NO: 452466 - DNA, 25 bp, Homo sapien
tggattcaggcaggcccacggggcc

SEQ ID NO: 452467 - DNA, 25 bp, Homo sapien
tggcagttggattcaggcaggccca

SEQ ID NO: 452468 - DNA, 25 bp, Homo sapien
ttgggcaaagggccctggccctctg

SEQ ID NO: 452469 - DNA, 25 bp, Homo sapien
cagttggattcaggcaggcccacgg

SEQ ID NO: 452470 - DNA, 25 bp, Homo sapien
aagtgaggatgatgcctcttttgtc

SEQ ID NO: 452471 - DNA, 25 bp, Homo sapien
aatcaaatgcatcctctggtggcca

SEQ ID NO: 452472 - DNA, 25 bp, Homo sapien
tgtctattcccaatcaaatgcatcc

SEQ ID NO: 452473 - DNA, 25 bp, Homo sapien
tcatctttacggtccctttcaaggc

SEQ ID NO: 452474 - DNA, 25 bp, Homo sapien
agtgtggccctcaatgtgcagttcg

SEQ ID NO: 452475 - DNA, 25 bp, Homo sapien
gatggtatgcaaacaactcggtggc

SEQ ID NO: 452476 - DNA, 25 bp, Homo sapien
tggtagccacagtcggcggtcagtt

SEQ ID NO: 452477 - DNA, 25 bp, Homo sapien
cagttggcgagctggctacattcga

SEQ ID NO: 452478 - DNA, 25 bp, Homo sapien
agtaatgacagctttggagagcagc

SEQ ID NO: 452479 - DNA, 25 bp, Homo sapien
ccacatgaaaaacgcagaggccagc

SEQ ID NO: 452480 - DNA, 25 bp, Homo sapien
tattgcccttaatcatggtactggg

SEQ ID NO: 452481 - DNA, 25 bp, Homo sapien
gaacctgcttgcaagcgtctccttg

SEQ ID NO: 452482 - DNA, 25 bp, Homo sapien
gaattttagcaaggcctgacctata

SEQ ID NO: 452483 - DNA, 25 bp, Homo sapien
ttttcatcgtgaagagccacatgcc

SEQ ID NO: 452484 - DNA, 25 bp, Homo sapien
ggaatcgaatggtgcttccatagca

SEQ ID NO: 452485 - DNA, 25 bp, Homo sapien
catttttggcaatgggaggtgccag

SEQ ID NO: 452486 - DNA, 25 bp, Homo sapien
tataaaatgagaggcactaccgtcc

SEQ ID NO: 452487 - DNA, 25 bp, Homo sapien
cagaagcttgctcagtgatcacaga

SEQ ID NO: 452488 - DNA, 25 bp, Homo sapien
caaagcgaattgcaaaatctcaggg

SEQ ID NO: 452489 - DNA, 25 bp, Homo sapien
tcctggtggatgaagtactcttgtc

SEQ ID NO: 452490 - DNA, 25 bp, Homo sapien
gttctttgagggttgtgcaagaaag

SEQ ID NO: 452491 - DNA, 25 bp, Homo sapien
aggtaagttctttgagggttgtgca

SEQ ID NO: 452492 - DNA, 25 bp, Homo sapien
ttcacagtggagtggctaaaagagg

SEQ ID NO: 452493 - DNA, 25 bp, Homo sapien
tttgaagcctctagttttcacagtg

SEQ ID NO: 452494 - DNA, 25 bp, Homo sapien
aatggagaagtgatgttatggctgc

SEQ ID NO: 452495 - DNA, 25 bp, Homo sapien
gctgccagtgtcaaagtcagaccca

SEQ ID NO: 452496 - DNA, 25 bp, Homo sapien
cattggtaaagtccgttcctccttg

SEQ ID NO: 452497 - DNA, 25 bp, Homo sapien
tgagaaccatgggactgaacattgg

SEQ ID NO: 452498 - DNA, 25 bp, Homo sapien
tctcagagtccaactggtccatgat

SEQ ID NO: 452499 - DNA, 25 bp, Homo sapien
agagtccaactggtccatgatggtt

SEQ ID NO: 452500 - DNA, 25 bp, Homo sapien
ttctcagagtccaactggtccatga

SEQ ID NO: 452501 - DNA, 25 bp, Homo sapien
tcagagtccaactggtccatgatgg

SEQ ID NO: 452502 - DNA, 25 bp, Homo sapien
ggtgaatttggtcaagacacgaagg

SEQ ID NO: 452503 - DNA, 25 bp, Homo sapien
ttaattctctatgaggagaaacagt

SEQ ID NO: 452504 - DNA, 25 bp, Homo sapien
gaagatgttctagacctctatattc

SEQ ID NO: 452505 - DNA, 25 bp, Homo sapien
aatttggtcaagacacgaaggaaag

SEQ ID NO: 452506 - DNA, 25 bp, Homo sapien
ccgtggacaagtcctgagagagctg

SEQ ID NO: 452507 - DNA, 25 bp, Homo sapien
tcttcctgagtggagagaactggca

SEQ ID NO: 452508 - DNA, 25 bp, Homo sapien
tgtggcctcactcgccgtggacaag

SEQ ID NO: 452509 - DNA, 25 bp, Homo sapien
ttccttagcactgggtatgttcttc

SEQ ID NO: 452510 - DNA, 25 bp, Homo sapien
tcccttaaggccttcatcaattact

SEQ ID NO: 452511 - DNA, 25 bp, Homo sapien
tgtggttttgctcaatagcgctttg

SEQ ID NO: 452512 - DNA, 25 bp, Homo sapien
ttaaggccttcatcaattactcttc

SEQ ID NO: 452513 - DNA, 25 bp, Homo sapien
tagcgctttgatatcccttaaggcc

SEQ ID NO: 452514 - DNA, 25 bp, Homo sapien
acacttctttccctccctgccgcag

SEQ ID NO: 452515 - DNA, 25 bp, Homo sapien
ttctttccctccctgccgcaggaag

SEQ ID NO: 452516 - DNA, 25 bp, Homo sapien
ctttccctccctgccgcaggaagca

SEQ ID NO: 452517 - DNA, 25 bp, Homo sapien
taaagacacttctttccctccctgc

SEQ ID NO: 452518 - DNA, 25 bp, Homo sapien
tttccttcggtgaagagtggaattg

SEQ ID NO: 452519 - DNA, 25 bp, Homo sapien
ggcttaatgccctgaagactctctg

SEQ ID NO: 452520 - DNA, 25 bp, Homo sapien
ggaaacatggcctggcaatggcctc

SEQ ID NO: 452521 - DNA, 25 bp, Homo sapien
aattgtcaatattccgatggcttaa

SEQ ID NO: 452522 - DNA, 25 bp, Homo sapien
cttaggccataagtaaggacattga

SEQ ID NO: 452523 - DNA, 25 bp, Homo sapien
cagtattcttcgcaggctctttgtg

SEQ ID NO: 452524 - DNA, 25 bp, Homo sapien
tccaggatcttaggccataagtaag

SEQ ID NO: 452525 - DNA, 25 bp, Homo sapien
tgaggaatttctctgggtccagagc

SEQ ID NO: 452526 - DNA, 25 bp, Homo sapien
cactctcatggtgccttagagtatc

SEQ ID NO: 452527 - DNA, 25 bp, Homo sapien
gggctccttatgcaaggaggctgct

SEQ ID NO: 452528 - DNA, 25 bp, Homo sapien
gaagcctccggctcccaacaaagat

SEQ ID NO: 452529 - DNA, 25 bp, Homo sapien
aatcagcaatcagaagcctccggct

SEQ ID NO: 452530 - DNA, 25 bp, Homo sapien
tgctgatggcatccatcgtgagctc

SEQ ID NO: 452531 - DNA, 25 bp, Homo sapien
tctccaattgccttgagccctctgg

SEQ ID NO: 452532 - DNA, 25 bp, Homo sapien
caattgccttgagccctctgggcag

SEQ ID NO: 452533 - DNA, 25 bp, Homo sapien
catcgtgagctctccaattgccttg

SEQ ID NO: 452534 - DNA, 25 bp, Homo sapien
tggctggttggcagttcccatccag

SEQ ID NO: 452535 - DNA, 25 bp, Homo sapien
tggttggcagttcccatccagcaca

SEQ ID NO: 452536 - DNA, 25 bp, Homo sapien
tctgtgattgggtctaagcccacat

SEQ ID NO: 452537 - DNA, 25 bp, Homo sapien
gcacacccctctgtgattgggtcta

SEQ ID NO: 452538 - DNA, 25 bp, Homo sapien
ttctctcatcacacaggggtatgca

SEQ ID NO: 452539 - DNA, 25 bp, Homo sapien
cattggctgtccttgcggggcctgt

SEQ ID NO: 452540 - DNA, 25 bp, Homo sapien
gaccctcctgcattggctgtccttg

SEQ ID NO: 452541 - DNA, 25 bp, Homo sapien
cttctctcatcacacaggggtatgc

SEQ ID NO: 452542 - DNA, 25 bp, Homo sapien
tcttctgagagctgatttggctgtg

SEQ ID NO: 452543 - DNA, 25 bp, Homo sapien
gcctggaatactgaagtcaggagtg

SEQ ID NO: 452544 - DNA, 25 bp, Homo sapien
gattgtaacagctgtgacccagaat

SEQ ID NO: 452545 - DNA, 25 bp, Homo sapien
cagcagcgacagcaggagtatgttt

SEQ ID NO: 452546 - DNA, 25 bp, Homo sapien
ttcaaagaccacatcagtcagtgtg

SEQ ID NO: 452547 - DNA, 25 bp, Homo sapien
gtgtcgctgtgcagaggagctgagt

SEQ ID NO: 452548 - DNA, 25 bp, Homo sapien
tttcaaagaccacatcagtcagtgt

SEQ ID NO: 452549 - DNA, 25 bp, Homo sapien
tgtgtcgctgtgcagaggagctgag

SEQ ID NO: 452550 - DNA, 25 bp, Homo sapien
cacttgtaagagaggcagcttccac

SEQ ID NO: 452551 - DNA, 25 bp, Homo sapien
gggtgccttcctcacttgtaagaga

SEQ ID NO: 452552 - DNA, 25 bp, Homo sapien
ggcagcatttttgagatccctggaa

SEQ ID NO: 452553 - DNA, 25 bp, Homo sapien
taccacaagggaatgacagctaatt

SEQ ID NO: 452554 - DNA, 25 bp, Homo sapien
tagggctcgtctatgggttccagaa

SEQ ID NO: 452555 - DNA, 25 bp, Homo sapien
gggactcataggaacccggcaagag

SEQ ID NO: 452556 - DNA, 25 bp, Homo sapien
gaacccggcaagaggcacagaagag

SEQ ID NO: 452557 - DNA, 25 bp, Homo sapien
caatatcctcaaaggggatgtgcct

SEQ ID NO: 452558 - DNA, 25 bp, Homo sapien
ctgagaattttgtaggaaaagagca

SEQ ID NO: 452559 - DNA, 25 bp, Homo sapien
tgagaattttgtaggaaaagagcaa

SEQ ID NO: 452560 - DNA, 25 bp, Homo sapien
tcccctttcaagccccaaatatgca

SEQ ID NO: 452561 - DNA, 25 bp, Homo sapien
ttcccctttcaagccccaaatatgc

SEQ ID NO: 452562 - DNA, 25 bp, Homo sapien
ttgcgagtcccttgcacaccttcat

SEQ ID NO: 452563 - DNA, 25 bp, Homo sapien
ccagaaaagctctcctctttgcgag

SEQ ID NO: 452564 - DNA, 25 bp, Homo sapien
tgttgggctaggattccccgtccca

SEQ ID NO: 452565 - DNA, 25 bp, Homo sapien
tgggctaggattccccgtcccagaa

SEQ ID NO: 452566 - DNA, 25 bp, Homo sapien
acttgctcgtagagagttttggttc

SEQ ID NO: 452567 - DNA, 25 bp, Homo sapien
cctccgggggtaagatgagagccaa

SEQ ID NO: 452568 - DNA, 25 bp, Homo sapien
ctgaatgtaaacttgctcgtagaga

SEQ ID NO: 452569 - DNA, 25 bp, Homo sapien
cttcctccgggggtaagatgagagc

SEQ ID NO: 452570 - DNA, 25 bp, Homo sapien
tgatgactgtgaagtcttgggtagc

SEQ ID NO: 452571 - DNA, 25 bp, Homo sapien
ctcttggatgaactacatgatgact

SEQ ID NO: 452572 - DNA, 25 bp, Homo sapien
gtgaagtcttgggtagcggctgccc

SEQ ID NO: 452573 - DNA, 25 bp, Homo sapien
ggatgaactacatgatgactgtgaa

SEQ ID NO: 452574 - DNA, 25 bp, Homo sapien
tttccctgcttcctcgtgcctgcaa

SEQ ID NO: 452575 - DNA, 25 bp, Homo sapien
gtgcctgcaagccacagaattccca

SEQ ID NO: 452576 - DNA, 25 bp, Homo sapien
gagctgctgtaaaagaggttgctag

SEQ ID NO: 452577 - DNA, 25 bp, Homo sapien
agggccagattggtgtggctgcaac

SEQ ID NO: 452578 - DNA, 25 bp, Homo sapien
aaggcatttctggtggtgaaaacat

SEQ ID NO: 452579 - DNA, 25 bp, Homo sapien
tgaagggtaataagatttccccaga

SEQ ID NO: 452580 - DNA, 25 bp, Homo sapien
gacatttgttggtcttccctgaagg

SEQ ID NO: 452581 - DNA, 25 bp, Homo sapien
catttgttggtcttccctgaagggt

SEQ ID NO: 452582 - DNA, 25 bp, Homo sapien
cccaactctgttctcgaagttgctg

SEQ ID NO: 452583 - DNA, 25 bp, Homo sapien
aactctgttctcgaagttgctggaa

SEQ ID NO: 452584 - DNA, 25 bp, Homo sapien
ccaactctgttctcgaagttgctgg

SEQ ID NO: 452585 - DNA, 25 bp, Homo sapien
tcaattgcagatgtaaccacgtccc

SEQ ID NO: 452586 - DNA, 25 bp, Homo sapien
gatgtaaccacgtcccctcatgttc

SEQ ID NO: 452587 - DNA, 25 bp, Homo sapien
cacgtcccctcatgttccaatgagg

SEQ ID NO: 452588 - DNA, 25 bp, Homo sapien
ccctcatgttccaatgaggaccaac

SEQ ID NO: 452589 - DNA, 25 bp, Homo sapien
catttgctcccgtgtaacctgtggc

SEQ ID NO: 452590 - DNA, 25 bp, Homo sapien
tggtgatccaacagacttcggtgtg

SEQ ID NO: 452591 - DNA, 25 bp, Homo sapien
ccaaggagaaactaatgtgcagcca

SEQ ID NO: 452592 - DNA, 25 bp, Homo sapien
ttaatcagtctagggtgcagcctgg

SEQ ID NO: 452593 - DNA, 25 bp, Homo sapien
tcttgatgaggttccccatgcatac

SEQ ID NO: 452594 - DNA, 25 bp, Homo sapien
tttatcttgatgaggttccccatgc

SEQ ID NO: 452595 - DNA, 25 bp, Homo sapien
cccatgcatactcatacgctggcat

SEQ ID NO: 452596 - DNA, 25 bp, Homo sapien
tgcatactcatacgctggcatctct

SEQ ID NO: 452597 - DNA, 25 bp, Homo sapien
catttggtgacctcccagaggctgt

SEQ ID NO: 452598 - DNA, 25 bp, Homo sapien
gaatgagccctaacataggtccctg

SEQ ID NO: 452599 - DNA, 25 bp, Homo sapien
actggagtcacatgggaatgagccc

SEQ ID NO: 452600 - DNA, 25 bp, Homo sapien
cagacaggcttggactgcaaactcc

SEQ ID NO: 452601 - DNA, 25 bp, Homo sapien
tccagcgtttctggccgcttctgga

SEQ ID NO: 452602 - DNA, 25 bp, Homo sapien
tgggtgagttccagcgtttctggcc

SEQ ID NO: 452603 - DNA, 25 bp, Homo sapien
tttctggccgcttctggacagctgg

SEQ ID NO: 452604 - DNA, 25 bp, Homo sapien
ctttgtgtgggtgagttccagcgtt

SEQ ID NO: 452605 - DNA, 25 bp, Homo sapien
tggcttgcttagattcctttggaca

SEQ ID NO: 452606 - DNA, 25 bp, Homo sapien
caagggccaaatgtttgagtgggac

SEQ ID NO: 452607 - DNA, 25 bp, Homo sapien
gttaattttgtctgacttggcttgc

SEQ ID NO: 452608 - DNA, 25 bp, Homo sapien
cctttggacatatgatccttatgaa

SEQ ID NO: 452609 - DNA, 25 bp, Homo sapien
gcaggatgcaattgaccaatggcca

SEQ ID NO: 452610 - DNA, 25 bp, Homo sapien
agacacagctgacgccacgctgaag

SEQ ID NO: 452611 - DNA, 25 bp, Homo sapien
gatgcaattgaccaatggccagaga

SEQ ID NO: 452612 - DNA, 25 bp, Homo sapien
tccctcactccagctactgcaggat

SEQ ID NO: 452613 - DNA, 25 bp, Homo sapien
tgatgggactaattaactctggaaa

SEQ ID NO: 452614 - DNA, 25 bp, Homo sapien
ccatttgggactgggtgatgttcgt

SEQ ID NO: 452615 - DNA, 25 bp, Homo sapien
caggcaaccagggtgcccatttggg

SEQ ID NO: 452616 - DNA, 25 bp, Homo sapien
tgatgttcgtcgtgatgggactaat

SEQ ID NO: 452617 - DNA, 25 bp, Homo sapien
cttggaaattgccccattgaacctt

SEQ ID NO: 452618 - DNA, 25 bp, Homo sapien
tggaaattgccccattgaaccttct

SEQ ID NO: 452619 - DNA, 25 bp, Homo sapien
ccttggaaattgccccattgaacct

SEQ ID NO: 452620 - DNA, 25 bp, Homo sapien
gccttggaaattgccccattgaacc

SEQ ID NO: 452621 - DNA, 25 bp, Homo sapien
caagggatacggataggaagtataa

SEQ ID NO: 452622 - DNA, 25 bp, Homo sapien
tctccaggctttacccgtttgttgc

SEQ ID NO: 452623 - DNA, 25 bp, Homo sapien
ggcatccctggttgaatgtcaaggg

SEQ ID NO: 452624 - DNA, 25 bp, Homo sapien
ataatgtggttacttctatagccag

SEQ ID NO: 452625 - DNA, 25 bp, Homo sapien
gcatgtgacagaatgttatctggag

SEQ ID NO: 452626 - DNA, 25 bp, Homo sapien
tctctggtgcacatgcatgtgacag

SEQ ID NO: 452627 - DNA, 25 bp, Homo sapien
cagaatgttatctggaggtcaactt

SEQ ID NO: 452628 - DNA, 25 bp, Homo sapien
tctggtgcacatgcatgtgacagaa

SEQ ID NO: 452629 - DNA, 25 bp, Homo sapien
taaatgttgtgttcccatgtctatg

SEQ ID NO: 452630 - DNA, 25 bp, Homo sapien
tctaccagggcgtttaaatgttgtg

SEQ ID NO: 452631 - DNA, 25 bp, Homo sapien
ggcgtttaaatgttgtgttcccatg

SEQ ID NO: 452632 - DNA, 25 bp, Homo sapien
tgttgtgttcccatgtctatgataa

SEQ ID NO: 452633 - DNA, 25 bp, Homo sapien
gagcggagccctgagtaaacttgtt

SEQ ID NO: 452634 - DNA, 25 bp, Homo sapien
cagttctgggaagcttcagtttcat

SEQ ID NO: 452635 - DNA, 25 bp, Homo sapien
tgtaatcaggtgcttgtaaacagtt

SEQ ID NO: 452636 - DNA, 25 bp, Homo sapien
aaggcttttcagcttagatttcaag

SEQ ID NO: 452637 - DNA, 25 bp, Homo sapien
cattatttctgtcaaagggcccttc

SEQ ID NO: 452638 - DNA, 25 bp, Homo sapien
tcttcacgatacttaacaggtcttc

SEQ ID NO: 452639 - DNA, 25 bp, Homo sapien
gaaagtgcctgctcaacatgaccag

SEQ ID NO: 452640 - DNA, 25 bp, Homo sapien
gaccagctaactctacttttaccag

SEQ ID NO: 452641 - DNA, 25 bp, Homo sapien
gcagctctagggaacgcaggtccag

SEQ ID NO: 452642 - DNA, 25 bp, Homo sapien
tagtctgcccccgatctgcagggaa

SEQ ID NO: 452643 - DNA, 25 bp, Homo sapien
accaggagctttctccgagggccgc

SEQ ID NO: 452644 - DNA, 25 bp, Homo sapien
ggaaaccagggcaagcgtgctgctt

SEQ ID NO: 452645 - DNA, 25 bp, Homo sapien
acagctggagcagcccacacagcag

SEQ ID NO: 452646 - DNA, 25 bp, Homo sapien
tccatggtggaagaacacagctgga

SEQ ID NO: 452647 - DNA, 25 bp, Homo sapien
ccttccatggtggaagaacacagct

SEQ ID NO: 452648 - DNA, 25 bp, Homo sapien
acagcaggctgcagggggacagttc

SEQ ID NO: 452649 - DNA, 25 bp, Homo sapien
taaatggttatgaatactggactgg

SEQ ID NO: 452650 - DNA, 25 bp, Homo sapien
gtcagctttatatgggcagctctgc

SEQ ID NO: 452651 - DNA, 25 bp, Homo sapien
ctgcagagccatgaacttggaccag

SEQ ID NO: 452652 - DNA, 25 bp, Homo sapien
gactggaaaagtccattgttcttct

SEQ ID NO: 452653 - DNA, 25 bp, Homo sapien
tctattcctaggagagattccaggc

SEQ ID NO: 452654 - DNA, 25 bp, Homo sapien
cctgtgaagaaagcgctgcctctct

SEQ ID NO: 452655 - DNA, 25 bp, Homo sapien
tttgcagcgtgctccggacacatgt

SEQ ID NO: 452656 - DNA, 25 bp, Homo sapien
gacacatgtccctctaactctattc

SEQ ID NO: 452657 - DNA, 25 bp, Homo sapien
ctgtctgacggagacttctcagcac

SEQ ID NO: 452658 - DNA, 25 bp, Homo sapien
ctgacggagacttctcagcacagtt

SEQ ID NO: 452659 - DNA, 25 bp, Homo sapien
tctgacggagacttctcagcacagt

SEQ ID NO: 452660 - DNA, 25 bp, Homo sapien
gtctgacggagacttctcagcacag

SEQ ID NO: 452661 - DNA, 25 bp, Homo sapien
gactcttcagggatggctttaaatt

SEQ ID NO: 452662 - DNA, 25 bp, Homo sapien
cattcccaactgaggagtaggtctg

SEQ ID NO: 452663 - DNA, 25 bp, Homo sapien
ccaactgaggagtaggtctgactct

SEQ ID NO: 452664 - DNA, 25 bp, Homo sapien
gaggcacattttgaccgaaagagcc

SEQ ID NO: 452665 - DNA, 25 bp, Homo sapien
cagtgttactgattttcaggtctgc

SEQ ID NO: 452666 - DNA, 25 bp, Homo sapien
taaatgttgcgtcagtgttactgat

SEQ ID NO: 452667 - DNA, 25 bp, Homo sapien
cagagatttgaatggccatcccagc

SEQ ID NO: 452668 - DNA, 25 bp, Homo sapien
aggctccatgtaaatgttgcgtcag

SEQ ID NO: 452669 - DNA, 25 bp, Homo sapien
gggctgtaaggaagtacactgtaag

SEQ ID NO: 452670 - DNA, 25 bp, Homo sapien
aaaatacagattaatggggcagggg

SEQ ID NO: 452671 - DNA, 25 bp, Homo sapien
ttagaatatgccagaagatacaggc

SEQ ID NO: 452672 - DNA, 25 bp, Homo sapien
aagttgagcagtaatttcattagaa

SEQ ID NO: 452673 - DNA, 25 bp, Homo sapien
cctccagagatgctaccatctgggc

SEQ ID NO: 452674 - DNA, 25 bp, Homo sapien
catgggaacatctccgtgagtggct

SEQ ID NO: 452675 - DNA, 25 bp, Homo sapien
ttgggtcaaccctttccgctctgct

SEQ ID NO: 452676 - DNA, 25 bp, Homo sapien
ggcagcccatgggaacatctccgtg

SEQ ID NO: 452677 - DNA, 25 bp, Homo sapien
cattctgcagctctgttataataat

SEQ ID NO: 452678 - DNA, 25 bp, Homo sapien
atgcatgtagctcattctgcagctc

SEQ ID NO: 452679 - DNA, 25 bp, Homo sapien
gctcattctgcagctctgttataat

SEQ ID NO: 452680 - DNA, 25 bp, Homo sapien
aatgcatgtagctcattctgcagct

SEQ ID NO: 452681 - DNA, 25 bp, Homo sapien
ggagcaaaaatcaggaaaagagtca

SEQ ID NO: 452682 - DNA, 25 bp, Homo sapien
ctgggagcaaaaatcaggaaaagag

SEQ ID NO: 452683 - DNA, 25 bp, Homo sapien
tgggagcaaaaatcaggaaaagagt

SEQ ID NO: 452684 - DNA, 25 bp, Homo sapien
agcaaaaatcaggaaaagagtcaat

SEQ ID NO: 452685 - DNA, 25 bp, Homo sapien
ctctcccgcaacagacatgcacacc

SEQ ID NO: 452686 - DNA, 25 bp, Homo sapien
agcattgcaggcctcatgtcatctg

SEQ ID NO: 452687 - DNA, 25 bp, Homo sapien
cagagccatggtccctctcccgcaa

SEQ ID NO: 452688 - DNA, 25 bp, Homo sapien
aagaagcattgcaggcctcatgtca

SEQ ID NO: 452689 - DNA, 25 bp, Homo sapien
ggtagcttcttcctagaccatgtgt

SEQ ID NO: 452690 - DNA, 25 bp, Homo sapien
gaaaatggacagataggcattgcac

SEQ ID NO: 452691 - DNA, 25 bp, Homo sapien
ccagaggttagcatcatgacgtaaa

SEQ ID NO: 452692 - DNA, 25 bp, Homo sapien
gttcatcatggtatccccagaggtt

SEQ ID NO: 452693 - DNA, 25 bp, Homo sapien
agcatggatcctggcccttcttata

SEQ ID NO: 452694 - DNA, 25 bp, Homo sapien
ggatcctggcccttcttatactcag

SEQ ID NO: 452695 - DNA, 25 bp, Homo sapien
ggagctggggctaaagtctataagc

SEQ ID NO: 452696 - DNA, 25 bp, Homo sapien
tccagacccttatgtggggagctgg

SEQ ID NO: 452697 - DNA, 25 bp, Homo sapien
tcagtcctgtttattgccttgagga

SEQ ID NO: 452698 - DNA, 25 bp, Homo sapien
tctcagtcctgtttattgccttgag

SEQ ID NO: 452699 - DNA, 25 bp, Homo sapien
tgtttattgccttgaggatcaccat

SEQ ID NO: 452700 - DNA, 25 bp, Homo sapien
gtcctgtttattgccttgaggatca

SEQ ID NO: 452701 - DNA, 25 bp, Homo sapien
tggtattagggctcaagagctctac

SEQ ID NO: 452702 - DNA, 25 bp, Homo sapien
gactaaactgggcattttctgcagt

SEQ ID NO: 452703 - DNA, 25 bp, Homo sapien
agtgtctcccagactaaactgggca

SEQ ID NO: 452704 - DNA, 25 bp, Homo sapien
gataaaaatggaagcgtttacgcgc

SEQ ID NO: 452705 - DNA, 25 bp, Homo sapien
tgaagctttggcctgccttgactcc

SEQ ID NO: 452706 - DNA, 25 bp, Homo sapien
gaagctttggcctgccttgactccc

SEQ ID NO: 452707 - DNA, 25 bp, Homo sapien
tttggtggttactgtctaaatctga

SEQ ID NO: 452708 - DNA, 25 bp, Homo sapien
cagcccaggtcggatttggtggtta

SEQ ID NO: 452709 - DNA, 25 bp, Homo sapien
acgaagcggcatcccctgagggttg

SEQ ID NO: 452710 - DNA, 25 bp, Homo sapien
gcaaggagggccgcgttgtaaaata

SEQ ID NO: 452711 - DNA, 25 bp, Homo sapien
atggagttgggacaggcctttttgc

SEQ ID NO: 452712 - DNA, 25 bp, Homo sapien
tggaagatgggccagcggcagagcg

SEQ ID NO: 452713 - DNA, 25 bp, Homo sapien
gaacacaagtagaaccagtccaggc

SEQ ID NO: 452714 - DNA, 25 bp, Homo sapien
tggtccaccaaacgagccttctctt

SEQ ID NO: 452715 - DNA, 25 bp, Homo sapien
agggtctcgagaagggccccacgct

SEQ ID NO: 452716 - DNA, 25 bp, Homo sapien
tctctttaagggtctcgagaagggc

SEQ ID NO: 452717 - DNA, 25 bp, Homo sapien
ggacgcggcccctcctgtgtttgtc

SEQ ID NO: 452718 - DNA, 25 bp, Homo sapien
tcctgtgtttgtcggccggtgaccc

SEQ ID NO: 452719 - DNA, 25 bp, Homo sapien
ttcgggcgaccacggcgtttgtgag

SEQ ID NO: 452720 - DNA, 25 bp, Homo sapien
cccctcctgtgtttgtcggccggtg

SEQ ID NO: 452721 - DNA, 25 bp, Homo sapien
gaggcaggcgcgaccgcacgtcctc

SEQ ID NO: 452722 - DNA, 25 bp, Homo sapien
tgcagtgtcgcggtcctgtagccga

SEQ ID NO: 452723 - DNA, 25 bp, Homo sapien
ggccctgcagtgtcgcggtcctgta

SEQ ID NO: 452724 - DNA, 25 bp, Homo sapien
agtgtcgcggtcctgtagccgaatg

SEQ ID NO: 452725 - DNA, 25 bp, Homo sapien
gccgcagcccggacggaagtaatct

SEQ ID NO: 452726 - DNA, 25 bp, Homo sapien
cctttccgacttcctcgccatcctt

SEQ ID NO: 452727 - DNA, 25 bp, Homo sapien
cccggacggaagtaatctctcatct

SEQ ID NO: 452728 - DNA, 25 bp, Homo sapien
cggctagccgactccagagagaggc

SEQ ID NO: 452729 - DNA, 25 bp, Homo sapien
tgcaggtggcaaggcgtggccccga

SEQ ID NO: 452730 - DNA, 25 bp, Homo sapien
gtggcaaggcgtggccccgagccct

SEQ ID NO: 452731 - DNA, 25 bp, Homo sapien
ccacccgggcgctgcaggtggcaag

SEQ ID NO: 452732 - DNA, 25 bp, Homo sapien
aggtggcaaggcgtggccccgagcc

SEQ ID NO: 452733 - DNA, 25 bp, Homo sapien
ctgcaaggattccccctgcgttagc

SEQ ID NO: 452734 - DNA, 25 bp, Homo sapien
tgcaaggattccccctgcgttagct

SEQ ID NO: 452735 - DNA, 25 bp, Homo sapien
gcaaggattccccctgcgttagctc

SEQ ID NO: 452736 - DNA, 25 bp, Homo sapien
ggcttgtgcgctctgaaatgctccc

SEQ ID NO: 452737 - DNA, 25 bp, Homo sapien
ctcgttagccatccggatccgctgt

SEQ ID NO: 452738 - DNA, 25 bp, Homo sapien
gcttctcgttagccatccggatccg

SEQ ID NO: 452739 - DNA, 25 bp, Homo sapien
tagccatccggatccgctgtttggc

SEQ ID NO: 452740 - DNA, 25 bp, Homo sapien
ttggctacgttccccctctgggtga

SEQ ID NO: 452741 - DNA, 25 bp, Homo sapien
tgaaaccgtcacaaaggggctggaa

SEQ ID NO: 452742 - DNA, 25 bp, Homo sapien
cctccagtgaaaccgtcacaaaggg

SEQ ID NO: 452743 - DNA, 25 bp, Homo sapien
acacctccagtgaaaccgtcacaaa

SEQ ID NO: 452744 - DNA, 25 bp, Homo sapien
tttccacacctccagtgaaaccgtc

SEQ ID NO: 452745 - DNA, 25 bp, Homo sapien
gccaacagccatggtcccacaggat

SEQ ID NO: 452746 - DNA, 25 bp, Homo sapien
catggtcccacaggatatttctcct

SEQ ID NO: 452747 - DNA, 25 bp, Homo sapien
caacagccatggtcccacaggatat

SEQ ID NO: 452748 - DNA, 25 bp, Homo sapien
agccatggtcccacaggatatttct

SEQ ID NO: 452749 - DNA, 25 bp, Homo sapien
aaggcatgtgggagttgaagcaccc

SEQ ID NO: 452750 - DNA, 25 bp, Homo sapien
accagtgtgagaggtcgagtctgca

SEQ ID NO: 452751 - DNA, 25 bp, Homo sapien
catggcttgctgatagattgagacc

SEQ ID NO: 452752 - DNA, 25 bp, Homo sapien
caactgaacatgcagccgggaagga

SEQ ID NO: 452753 - DNA, 25 bp, Homo sapien
atgcatccaaagtgttatcacttac

SEQ ID NO: 452754 - DNA, 25 bp, Homo sapien
tcatgcatccaaagtgttatcactt

SEQ ID NO: 452755 - DNA, 25 bp, Homo sapien
catgcatccaaagtgttatcactta

SEQ ID NO: 452756 - DNA, 25 bp, Homo sapien
gacctggaccatccaaaacacaagg

SEQ ID NO: 452757 - DNA, 25 bp, Homo sapien
catccttaacagaacagccagtcct

SEQ ID NO: 452758 - DNA, 25 bp, Homo sapien
atccttaacagaacagccagtcctg

SEQ ID NO: 452759 - DNA, 25 bp, Homo sapien
tccttaacagaacagccagtcctgg

SEQ ID NO: 452760 - DNA, 25 bp, Homo sapien
tgactccctctggatgttacaactt

SEQ ID NO: 452761 - DNA, 25 bp, Homo sapien
ttgagaaagttctggcagtctccag

SEQ ID NO: 452762 - DNA, 25 bp, Homo sapien
tctggatgttacaactttgagaaag

SEQ ID NO: 452763 - DNA, 25 bp, Homo sapien
tccaggagaggccaatttatgtggt

SEQ ID NO: 452764 - DNA, 25 bp, Homo sapien
tctcagatcccgaggatgaactcca

SEQ ID NO: 452765 - DNA, 25 bp, Homo sapien
gcagatgaatggcctcagtctttcc

SEQ ID NO: 452766 - DNA, 25 bp, Homo sapien
agagcagatgaatggcctcagtctt

SEQ ID NO: 452767 - DNA, 25 bp, Homo sapien
catctcagatcccgaggatgaactc

SEQ ID NO: 452768 - DNA, 25 bp, Homo sapien
tgacataacaagtgggtcccatagg

SEQ ID NO: 452769 - DNA, 25 bp, Homo sapien
gagagcctctacacaatcccaaatg

SEQ ID NO: 452770 - DNA, 25 bp, Homo sapien
gcaaggaggcgctattaaaacccag

SEQ ID NO: 452771 - DNA, 25 bp, Homo sapien
tacaggccctctgagaaacaagctg

SEQ ID NO: 452772 - DNA, 25 bp, Homo sapien
gggaactatcgctaatcctgacgaa

SEQ ID NO: 452773 - DNA, 25 bp, Homo sapien
ctcaataggaatgtcaggaggcagc

SEQ ID NO: 452774 - DNA, 25 bp, Homo sapien
gagcagttggaagagaaagtaccct

SEQ ID NO: 452775 - DNA, 25 bp, Homo sapien
ccttgggtgggtcttaacaggagca

SEQ ID NO: 452776 - DNA, 25 bp, Homo sapien
gttagaattacgagtcaaatcagag

SEQ ID NO: 452777 - DNA, 25 bp, Homo sapien
ggtgttggtccaacaacttgtgata

SEQ ID NO: 452778 - DNA, 25 bp, Homo sapien
tgatatttaattctggatgtgctca

SEQ ID NO: 452779 - DNA, 25 bp, Homo sapien
ctcatctgtagatatggtgaaggtg

SEQ ID NO: 452780 - DNA, 25 bp, Homo sapien
ttgtattactacaccaatctgcagt

SEQ ID NO: 452781 - DNA, 25 bp, Homo sapien
atctgcagtgggtcctgtactatta

SEQ ID NO: 452782 - DNA, 25 bp, Homo sapien
ctattattttgttgccgtagactaa

SEQ ID NO: 452783 - DNA, 25 bp, Homo sapien
tcttgtattactacaccaatctgca

SEQ ID NO: 452784 - DNA, 25 bp, Homo sapien
gaggctgcgtgtgatctgacactga

SEQ ID NO: 452785 - DNA, 25 bp, Homo sapien
tgcttctggtcagctgcacttctgg

SEQ ID NO: 452786 - DNA, 25 bp, Homo sapien
gctgtgatctcattacagaggaggc

SEQ ID NO: 452787 - DNA, 25 bp, Homo sapien
cagtaactgatgagacgtgctgtga

SEQ ID NO: 452788 - DNA, 25 bp, Homo sapien
tggaatacatccaggatccacggta

SEQ ID NO: 452789 - DNA, 25 bp, Homo sapien
taagagtagacaaacatgaatgcat

SEQ ID NO: 452790 - DNA, 25 bp, Homo sapien
tcatcatctggcatcaatgagcaca

SEQ ID NO: 452791 - DNA, 25 bp, Homo sapien
tgtgtcagacactgcgcttcaagga

SEQ ID NO: 452792 - DNA, 25 bp, Homo sapien
ggccctgacgtgttagctcacagct

SEQ ID NO: 452793 - DNA, 25 bp, Homo sapien
cagttaaggccagaaatccctcagg

SEQ ID NO: 452794 - DNA, 25 bp, Homo sapien
caggcactgagaagagatttggccc

SEQ ID NO: 452795 - DNA, 25 bp, Homo sapien
tatgggctttcgtgcagaaactgca

SEQ ID NO: 452796 - DNA, 25 bp, Homo sapien
ttatgctctgaatgatctgaaagat

SEQ ID NO: 452797 - DNA, 25 bp, Homo sapien
atgctctgaatgatctgaaagatag

SEQ ID NO: 452798 - DNA, 25 bp, Homo sapien
tatgctctgaatgatctgaaagata

SEQ ID NO: 452799 - DNA, 25 bp, Homo sapien
gaaactggctgaccgcttccgttgt

SEQ ID NO: 452800 - DNA, 25 bp, Homo sapien
aaaatgtcctttccgcttgagaacg

SEQ ID NO: 452801 - DNA, 25 bp, Homo sapien
tgagaacgcggatgcaccaagatgt

SEQ ID NO: 452802 - DNA, 25 bp, Homo sapien
ccagtgatcgttcagagggccacat

SEQ ID NO: 452803 - DNA, 25 bp, Homo sapien
aggttgaacgaagacatttatttgt

SEQ ID NO: 452804 - DNA, 25 bp, Homo sapien
cgaagacatttatttgtaaaatcaa

SEQ ID NO: 452805 - DNA, 25 bp, Homo sapien
agacatttatttgtaaaatcaattc

SEQ ID NO: 452806 - DNA, 25 bp, Homo sapien
aaggttgaacgaagacatttatttg

SEQ ID NO: 452807 - DNA, 25 bp, Homo sapien
acatacattgtacatgccttttctg

SEQ ID NO: 452808 - DNA, 25 bp, Homo sapien
gagataatgactaatcggaccttca

SEQ ID NO: 452809 - DNA, 25 bp, Homo sapien
gaccacagaggagataatgactaat

SEQ ID NO: 452810 - DNA, 25 bp, Homo sapien
cggaccttcacatacattgtacatg

SEQ ID NO: 452811 - DNA, 25 bp, Homo sapien
cccagcttatctagcctgaagagag

SEQ ID NO: 452812 - DNA, 25 bp, Homo sapien
tgccgtaccctaggactggctgagg

SEQ ID NO: 452813 - DNA, 25 bp, Homo sapien
gcaatacggattttggaaccggaga

SEQ ID NO: 452814 - DNA, 25 bp, Homo sapien
tctctgtgcacaggcgacctagtgt

SEQ ID NO: 452815 - DNA, 25 bp, Homo sapien
gaaagatgtcccctgaaatacaggt

SEQ ID NO: 452816 - DNA, 25 bp, Homo sapien
gatagaaagaaacaccgagacagga

SEQ ID NO: 452817 - DNA, 25 bp, Homo sapien
tgactctaaccgtgaatggccccga

SEQ ID NO: 452818 - DNA, 25 bp, Homo sapien
tgttcccatatatgcagagcttgga

SEQ ID NO: 452819 - DNA, 25 bp, Homo sapien
ccgtcatcatttccggaatgttctt

SEQ ID NO: 452820 - DNA, 25 bp, Homo sapien
ccagaactctgtgcccaggaaacac

SEQ ID NO: 452821 - DNA, 25 bp, Homo sapien
ttattattgtgcaaccgtcatcatt

SEQ ID NO: 452822 - DNA, 25 bp, Homo sapien
caaaccagaactctgtgcccaggaa

SEQ ID NO: 452823 - DNA, 25 bp, Homo sapien
gattgttttcatcagacagagcaaa

SEQ ID NO: 452824 - DNA, 25 bp, Homo sapien
ccttcactacacaaatctccagtga

SEQ ID NO: 452825 - DNA, 25 bp, Homo sapien
agagcaaaccatgtgtagctccctc

SEQ ID NO: 452826 - DNA, 25 bp, Homo sapien
tcctggaccgttgggcccctctgcc

SEQ ID NO: 452827 - DNA, 25 bp, Homo sapien
ccaagattcaaaagagtattaccgt

SEQ ID NO: 452828 - DNA, 25 bp, Homo sapien
tatacatcaaaaatgctagaagcac

SEQ ID NO: 452829 - DNA, 25 bp, Homo sapien
ccgtacaacggcaatttggaaagct

SEQ ID NO: 452830 - DNA, 25 bp, Homo sapien
catctttgcctggtgggattcctga

SEQ ID NO: 452831 - DNA, 25 bp, Homo sapien
tgggagactcttccatcccagcaga

SEQ ID NO: 452832 - DNA, 25 bp, Homo sapien
tggccttgggagactcttccatccc

SEQ ID NO: 452833 - DNA, 25 bp, Homo sapien
tgtggccttgggagactcttccatc

SEQ ID NO: 452834 - DNA, 25 bp, Homo sapien
gccttgggagactcttccatcccag

SEQ ID NO: 452835 - DNA, 25 bp, Homo sapien
caagatggacttggatgagatgaga

SEQ ID NO: 452836 - DNA, 25 bp, Homo sapien
gagagatcacggagttgctgaccag

SEQ ID NO: 452837 - DNA, 25 bp, Homo sapien
gactctagggctggccatctgggct

SEQ ID NO: 452838 - DNA, 25 bp, Homo sapien
gagttgctgaccagggtagtttgca

SEQ ID NO: 452839 - DNA, 25 bp, Homo sapien
ctacaataaaatgcggacagccaac

SEQ ID NO: 452840 - DNA, 25 bp, Homo sapien
ggagtagaaaatacagctggtttcc

SEQ ID NO: 452841 - DNA, 25 bp, Homo sapien
ggagacatctatcttctggtgaaca

SEQ ID NO: 452842 - DNA, 25 bp, Homo sapien
aggagaggaatgtcggagacatcta

SEQ ID NO: 452843 - DNA, 25 bp, Homo sapien
ggacctaggctatcttaccatgaag

SEQ ID NO: 452844 - DNA, 25 bp, Homo sapien
ctatgagagtgacaaaatggtgaca

SEQ ID NO: 452845 - DNA, 25 bp, Homo sapien
gaaatctagctgctgaatacgctga

SEQ ID NO: 452846 - DNA, 25 bp, Homo sapien
taagaatttggcacagttactcact

SEQ ID NO: 452847 - DNA, 25 bp, Homo sapien
gatttattagggaagcgctggccaa

SEQ ID NO: 452848 - DNA, 25 bp, Homo sapien
ttcacacgacgggattttctcacgg

SEQ ID NO: 452849 - DNA, 25 bp, Homo sapien
tcttctagacggtgcacaaacgggt

SEQ ID NO: 452850 - DNA, 25 bp, Homo sapien
tcttgatgcgcgtagaaatgccggc

SEQ ID NO: 452851 - DNA, 25 bp, Homo sapien
ataatacaggtgaaagatagccagg

SEQ ID NO: 452852 - DNA, 25 bp, Homo sapien
gatagccaggcgaattcctttgtcc

SEQ ID NO: 452853 - DNA, 25 bp, Homo sapien
cttactaaaatagggagatgcctgg

SEQ ID NO: 452854 - DNA, 25 bp, Homo sapien
tgcaagtctggccagagaacaggct

SEQ ID NO: 452855 - DNA, 25 bp, Homo sapien
cctggcattggagagctgacctgat

SEQ ID NO: 452856 - DNA, 25 bp, Homo sapien
gctttctcaaaggacgcagttgctg

SEQ ID NO: 452857 - DNA, 25 bp, Homo sapien
tcttggcagtagcagtgcgctagca

SEQ ID NO: 452858 - DNA, 25 bp, Homo sapien
cattggctcatttcgtgaggctgcc

SEQ ID NO: 452859 - DNA, 25 bp, Homo sapien
ccttggagtggaggctgtttttggc

SEQ ID NO: 452860 - DNA, 25 bp, Homo sapien
ggagtggaggctgtttttggctctc

SEQ ID NO: 452861 - DNA, 25 bp, Homo sapien
tggcgccttggagtggaggctgttt

SEQ ID NO: 452862 - DNA, 25 bp, Homo sapien
gcgccttggagtggaggctgttttt

SEQ ID NO: 452863 - DNA, 25 bp, Homo sapien
tttgaaatttgactctcatgtcaga

SEQ ID NO: 452864 - DNA, 25 bp, Homo sapien
ttgaaatttgactctcatgtcagaa

SEQ ID NO: 452865 - DNA, 25 bp, Homo sapien
ttttgaaatttgactctcatgtcag

SEQ ID NO: 452866 - DNA, 25 bp, Homo sapien
ccagggagcccttggtgagtttgca

SEQ ID NO: 452867 - DNA, 25 bp, Homo sapien
gggctgggagcgcaaaagtgggaaa

SEQ ID NO: 452868 - DNA, 25 bp, Homo sapien
tgactgaacaagtccctgatgtggg

SEQ ID NO: 452869 - DNA, 25 bp, Homo sapien
ctggattgtttccatctatatctgt

SEQ ID NO: 452870 - DNA, 25 bp, Homo sapien
gcaagcagacgtccctagagtgtag

SEQ ID NO: 452871 - DNA, 25 bp, Homo sapien
cagaaggcaagcagacgtccctaga

SEQ ID NO: 452872 - DNA, 25 bp, Homo sapien
gaaggcaagcagacgtccctagagt

SEQ ID NO: 452873 - DNA, 25 bp, Homo sapien
ggcaagcagacgtccctagagtgta

SEQ ID NO: 452874 - DNA, 25 bp, Homo sapien
ggtgtagcctatggatagtggccca

SEQ ID NO: 452875 - DNA, 25 bp, Homo sapien
tagcctatggatagtggcccatggt

SEQ ID NO: 452876 - DNA, 25 bp, Homo sapien
gaataatgcctcgatttagtctctt

SEQ ID NO: 452877 - DNA, 25 bp, Homo sapien
attctgttcttactccacgtaggca

SEQ ID NO: 452878 - DNA, 25 bp, Homo sapien
gtgtatgtggctggtaacagcttgc

SEQ ID NO: 452879 - DNA, 25 bp, Homo sapien
tatgtggctggtaacagcttgccat

SEQ ID NO: 452880 - DNA, 25 bp, Homo sapien
tgtatgtggctggtaacagcttgcc

SEQ ID NO: 452881 - DNA, 25 bp, Homo sapien
tgtggctggtaacagcttgccattt

SEQ ID NO: 452882 - DNA, 25 bp, Homo sapien
tgtattagcgccatctactgttagg

SEQ ID NO: 452883 - DNA, 25 bp, Homo sapien
agagccctggttgcattcataaaaa

SEQ ID NO: 452884 - DNA, 25 bp, Homo sapien
tgaccagtctgtagaatgtgggcgt

SEQ ID NO: 452885 - DNA, 25 bp, Homo sapien
tgtctatgttcagggtcagccaatt

SEQ ID NO: 452886 - DNA, 25 bp, Homo sapien
tgttttactaactgattaggatagc

SEQ ID NO: 452887 - DNA, 25 bp, Homo sapien
tccaatattggttcgttctgttctt

SEQ ID NO: 452888 - DNA, 25 bp, Homo sapien
ggatagcactatccaatggaaatgc

SEQ ID NO: 452889 - DNA, 25 bp, Homo sapien
aatgcaacgttagccttatgcgtaa

SEQ ID NO: 452890 - DNA, 25 bp, Homo sapien
gaaaggtgaatctggcagcaacttc

SEQ ID NO: 452891 - DNA, 25 bp, Homo sapien
tcttggaagtaggaagactacaccc

SEQ ID NO: 452892 - DNA, 25 bp, Homo sapien
tgcccaggctgagcatagatcttgg

SEQ ID NO: 452893 - DNA, 25 bp, Homo sapien
gaacagtgctgttgacaactagaca

SEQ ID NO: 452894 - DNA, 25 bp, Homo sapien
acaacagcagagaatgtagtgttct

SEQ ID NO: 452895 - DNA, 25 bp, Homo sapien
gagaatgtagtgttctttataaaat

SEQ ID NO: 452896 - DNA, 25 bp, Homo sapien
aatgacaacagcagagaatgtagtg

SEQ ID NO: 452897 - DNA, 25 bp, Homo sapien
cagagaatgtagtgttctttataaa

SEQ ID NO: 452898 - DNA, 25 bp, Homo sapien
ttttcggtccatggcaggaacctct

SEQ ID NO: 452899 - DNA, 25 bp, Homo sapien
ccccaaagtctcaagtaaactaatg

SEQ ID NO: 452900 - DNA, 25 bp, Homo sapien
aactaatgatgttcaacaagagaac

SEQ ID NO: 452901 - DNA, 25 bp, Homo sapien
ttttttagtagcataggtgctaaag

SEQ ID NO: 452902 - DNA, 25 bp, Homo sapien
cattcagcgtcaatttctagtgccc

SEQ ID NO: 452903 - DNA, 25 bp, Homo sapien
aaagcaggttcttcagaattagagg

SEQ ID NO: 452904 - DNA, 25 bp, Homo sapien
taaaaagcaggttcttcagaattag

SEQ ID NO: 452905 - DNA, 25 bp, Homo sapien
caggttcttcagaattagagggagg

SEQ ID NO: 452906 - DNA, 25 bp, Homo sapien
ttcttcagaattagagggaggtaac

SEQ ID NO: 452907 - DNA, 25 bp, Homo sapien
aatgctacaagccacagtaagaatg

SEQ ID NO: 452908 - DNA, 25 bp, Homo sapien
ccacagtaagaatgagctgtattta

SEQ ID NO: 452909 - DNA, 25 bp, Homo sapien
gcgaggagtgattacagccaactgt

SEQ ID NO: 452910 - DNA, 25 bp, Homo sapien
tttataccactgaccccaaactgac

SEQ ID NO: 452911 - DNA, 25 bp, Homo sapien
gaaatacagtgcaaacattctgcta

SEQ ID NO: 452912 - DNA, 25 bp, Homo sapien
taggctagtagtccgtatctgcaaa

SEQ ID NO: 452913 - DNA, 25 bp, Homo sapien
gaagatggtgaagaagtagtcctga

SEQ ID NO: 452914 - DNA, 25 bp, Homo sapien
taaccaggcttgttggagacacttg

SEQ ID NO: 452915 - DNA, 25 bp, Homo sapien
gattacagcttttactcccgacttg

SEQ ID NO: 452916 - DNA, 25 bp, Homo sapien
ttgaactgaaatttccccagagagc

SEQ ID NO: 452917 - DNA, 25 bp, Homo sapien
caactgtccatcgttttaggaagaa

SEQ ID NO: 452918 - DNA, 25 bp, Homo sapien
tagaaaccgctttgtgtggcctgtg

SEQ ID NO: 452919 - DNA, 25 bp, Homo sapien
tttcagattggaattttacatggcc

SEQ ID NO: 452920 - DNA, 25 bp, Homo sapien
aacatttgtgggattgaaaatcacc

SEQ ID NO: 452921 - DNA, 25 bp, Homo sapien
gaaaatcaccttaatgaagtaggca

SEQ ID NO: 452922 - DNA, 25 bp, Homo sapien
aatagaggaagcttgagagactcct

SEQ ID NO: 452923 - DNA, 25 bp, Homo sapien
aaggcagtggtgaatggatccatgc

SEQ ID NO: 452924 - DNA, 25 bp, Homo sapien
cagtggtgaatggatccatgcaata

SEQ ID NO: 452925 - DNA, 25 bp, Homo sapien
tatctgtcacacatgccagcacctg

SEQ ID NO: 452926 - DNA, 25 bp, Homo sapien
atgatatctgtcacacatgccagca

SEQ ID NO: 452927 - DNA, 25 bp, Homo sapien
actccaggtatcttgataatgggag

SEQ ID NO: 452928 - DNA, 25 bp, Homo sapien
gtgactccaggtatcttgataatgg

SEQ ID NO: 452929 - DNA, 25 bp, Homo sapien
tccttggtggattccttctgtgact

SEQ ID NO: 452930 - DNA, 25 bp, Homo sapien
ccttggtggattccttctgtgactc

SEQ ID NO: 452931 - DNA, 25 bp, Homo sapien
gctaactagtactcattcaaaaatg

SEQ ID NO: 452932 - DNA, 25 bp, Homo sapien
taagaaccaggtgggactgcaatct

SEQ ID NO: 452933 - DNA, 25 bp, Homo sapien
ccattgcccatttaattctgtggta

SEQ ID NO: 452934 - DNA, 25 bp, Homo sapien
aatttatagattggagtgtccttcc

SEQ ID NO: 452935 - DNA, 25 bp, Homo sapien
cagaggtgcaaggagtgatcctaga

SEQ ID NO: 452936 - DNA, 25 bp, Homo sapien
tgcaaggagtgatcctagaaccaca

SEQ ID NO: 452937 - DNA, 25 bp, Homo sapien
ccacggagagcttttgacgtcaggg

SEQ ID NO: 452938 - DNA, 25 bp, Homo sapien
acagatacagccaagaccacggaga

SEQ ID NO: 452939 - DNA, 25 bp, Homo sapien
gttccttgaaacacagattgagaaa

SEQ ID NO: 452940 - DNA, 25 bp, Homo sapien
agattgagaaatgttcgtttgcttc

SEQ ID NO: 452941 - DNA, 25 bp, Homo sapien
cagtgttccttgaaacacagattga

SEQ ID NO: 452942 - DNA, 25 bp, Homo sapien
gattgagaaatgttcgtttgcttca

SEQ ID NO: 452943 - DNA, 25 bp, Homo sapien
cagtttcgtctagtacactcaagca

SEQ ID NO: 452944 - DNA, 25 bp, Homo sapien
gaacgttagtcttggcatcagccct

SEQ ID NO: 452945 - DNA, 25 bp, Homo sapien
tatgtgcaggtaatagctacccgtg

SEQ ID NO: 452946 - DNA, 25 bp, Homo sapien
gaaaggcatataatgcacctggctc

SEQ ID NO: 452947 - DNA, 25 bp, Homo sapien
cctatcttgcatgggtgggtgccac

SEQ ID NO: 452948 - DNA, 25 bp, Homo sapien
tatcttgcatgggtgggtgccacat

SEQ ID NO: 452949 - DNA, 25 bp, Homo sapien
ctcaaagtgcttgaagacaaggatg

SEQ ID NO: 452950 - DNA, 25 bp, Homo sapien
tcttgcatgggtgggtgccacatgt

SEQ ID NO: 452951 - DNA, 25 bp, Homo sapien
tatgaagctgttaagcatgacctgt

SEQ ID NO: 452952 - DNA, 25 bp, Homo sapien
tcagcacgattaggcctagttgacc

SEQ ID NO: 452953 - DNA, 25 bp, Homo sapien
ggaaatcttgacctttcagcacgat

SEQ ID NO: 452954 - DNA, 25 bp, Homo sapien
catgacctgttctgatgctgcagta

SEQ ID NO: 452955 - DNA, 25 bp, Homo sapien
ttgaaggtgctaccgctgacgacac

SEQ ID NO: 452956 - DNA, 25 bp, Homo sapien
tttcccgttgaaggtgctaccgctg

SEQ ID NO: 452957 - DNA, 25 bp, Homo sapien
tctcttttcccgttgaaggtgctac

SEQ ID NO: 452958 - DNA, 25 bp, Homo sapien
cgttgaaggtgctaccgctgacgac

SEQ ID NO: 452959 - DNA, 25 bp, Homo sapien
taatgttaacattactgctgtgggt

SEQ ID NO: 452960 - DNA, 25 bp, Homo sapien
tggcatgggcaatggtactatttct

SEQ ID NO: 452961 - DNA, 25 bp, Homo sapien
tgtgaatatcttgagtggcatgggc

SEQ ID NO: 452962 - DNA, 25 bp, Homo sapien
ggcctggagttaccagtggtgttaa

SEQ ID NO: 452963 - DNA, 25 bp, Homo sapien
cattagcgctaggaagatggcgcac

SEQ ID NO: 452964 - DNA, 25 bp, Homo sapien
ctgcagcatcttctacgtcgggacc

SEQ ID NO: 452965 - DNA, 25 bp, Homo sapien
tgcgccaggcggaactcaaatgaaa

SEQ ID NO: 452966 - DNA, 25 bp, Homo sapien
tagtaatgccacatcttccgaggat

SEQ ID NO: 452967 - DNA, 25 bp, Homo sapien
tgtgccgagtcgaggcgcctgccct

SEQ ID NO: 452968 - DNA, 25 bp, Homo sapien
ttcctccccgaggacgtgtgccgag

SEQ ID NO: 452969 - DNA, 25 bp, Homo sapien
gccgccctccggagaggctcgggtg

SEQ ID NO: 452970 - DNA, 25 bp, Homo sapien
ctccggagaggctcgggtgccggcc

SEQ ID NO: 452971 - DNA, 25 bp, Homo sapien
tttgaacggcgtcggctgcagtcgc

SEQ ID NO: 452972 - DNA, 25 bp, Homo sapien
accaacgccgcggagaaaggagccg

SEQ ID NO: 452973 - DNA, 25 bp, Homo sapien
tctcccgcccggtcgcgggagcagc

SEQ ID NO: 452974 - DNA, 25 bp, Homo sapien
tgcagtcgctgcaccagcccgtctg

SEQ ID NO: 452975 - DNA, 25 bp, Homo sapien
cagacccggctttatgtctgcggcg

SEQ ID NO: 452976 - DNA, 25 bp, Homo sapien
ccggctttatgtctgcggcgccgag

SEQ ID NO: 452977 - DNA, 25 bp, Homo sapien
cgccagacccggctttatgtctgcg

SEQ ID NO: 452978 - DNA, 25 bp, Homo sapien
gacccggctttatgtctgcggcgcc

SEQ ID NO: 452979 - DNA, 25 bp, Homo sapien
gattcgctccttcggccggaattcc

SEQ ID NO: 452980 - DNA, 25 bp, Homo sapien
ccggattcgctccttcggccggaat

SEQ ID NO: 452981 - DNA, 25 bp, Homo sapien
gaatcacgcagtccgacccggattc

SEQ ID NO: 452982 - DNA, 25 bp, Homo sapien
tgccagccttcggtaatttccgtcg

SEQ ID NO: 452983 - DNA, 25 bp, Homo sapien
ggacacacctaacctgggcgcgcgg

SEQ ID NO: 452984 - DNA, 25 bp, Homo sapien
cctcattacccattccgcaggcggg

SEQ ID NO: 452985 - DNA, 25 bp, Homo sapien
cgcgccggccgcgagtgtgaaaaga

SEQ ID NO: 452986 - DNA, 25 bp, Homo sapien
ctgcggagaaaagcctcattaccca

SEQ ID NO: 452987 - DNA, 25 bp, Homo sapien
ggaactgaaactcgtgatgctgttg

SEQ ID NO: 452988 - DNA, 25 bp, Homo sapien
ctgggaactgaaactcgtgatgctg

SEQ ID NO: 452989 - DNA, 25 bp, Homo sapien
tgactcatgtcgtggcagcggcagc

SEQ ID NO: 452990 - DNA, 25 bp, Homo sapien
ggaagaaagcctgactcatgtcgtg

SEQ ID NO: 452991 - DNA, 25 bp, Homo sapien
agggcatcccccgaggaggcaaggg

SEQ ID NO: 452992 - DNA, 25 bp, Homo sapien
ggagccaccggccttccatagaccc

SEQ ID NO: 452993 - DNA, 25 bp, Homo sapien
aaagacaacacctatcaccgggagc

SEQ ID NO: 452994 - DNA, 25 bp, Homo sapien
ggccttccatagaccccacagctcc

SEQ ID NO: 452995 - DNA, 25 bp, Homo sapien
gagctcaggcagttaactggaaaca

SEQ ID NO: 452996 - DNA, 25 bp, Homo sapien
tctgtcctccagttaaggatggatt

SEQ ID NO: 452997 - DNA, 25 bp, Homo sapien
cctcgttagagaagagcctagccca

SEQ ID NO: 452998 - DNA, 25 bp, Homo sapien
tcagtcgattacagggccggcctgc

SEQ ID NO: 452999 - DNA, 25 bp, Homo sapien
tgaatcagaggtctaaccataagcg

SEQ ID NO: 453000 - DNA, 25 bp, Homo sapien
ccaggacgatgaacgaaaaaggcgt

SEQ ID NO: 453001 - DNA, 25 bp, Homo sapien
caactagaggtgtatcaaaactgca

SEQ ID NO: 453002 - DNA, 25 bp, Homo sapien
aaaaggcgtcgctgcttggagacac

SEQ ID NO: 453003 - DNA, 25 bp, Homo sapien
tagtgggacttgatgcagcctaagc

SEQ ID NO: 453004 - DNA, 25 bp, Homo sapien
tggcccaaagggtatacagctgctg

SEQ ID NO: 453005 - DNA, 25 bp, Homo sapien
tcaacaatggatggcagcgattaac

SEQ ID NO: 453006 - DNA, 25 bp, Homo sapien
tcatggtgagttatttaggtggccc

SEQ ID NO: 453007 - DNA, 25 bp, Homo sapien
gagatccagtttctgtatgcctggg

SEQ ID NO: 453008 - DNA, 25 bp, Homo sapien
gaagaattctggacattacctcagt

SEQ ID NO: 453009 - DNA, 25 bp, Homo sapien
gaaggcatgcctgccccgaaaaata

SEQ ID NO: 453010 - DNA, 25 bp, Homo sapien
aatcctgtctacaattttgccgggc

SEQ ID NO: 453011 - DNA, 25 bp, Homo sapien
acacctggcctcctggaaaacattt

SEQ ID NO: 453012 - DNA, 25 bp, Homo sapien
tacaggtatgaaccttcacacctgg

SEQ ID NO: 453013 - DNA, 25 bp, Homo sapien
gtatgaaccttcacacctggcctcc

SEQ ID NO: 453014 - DNA, 25 bp, Homo sapien
ttcacacctggcctcctggaaaaca

SEQ ID NO: 453015 - DNA, 25 bp, Homo sapien
gagacaccatgggcagaaaaagcgc

SEQ ID NO: 453016 - DNA, 25 bp, Homo sapien
ccagctgttggtgggcgggtttcct

SEQ ID NO: 453017 - DNA, 25 bp, Homo sapien
aatggtaatagcggaggatgccctg

SEQ ID NO: 453018 - DNA, 25 bp, Homo sapien
ctgtcggtgagctgactgtatggat

SEQ ID NO: 453019 - DNA, 25 bp, Homo sapien
cctgtccttcgaggacctgcattct

SEQ ID NO: 453020 - DNA, 25 bp, Homo sapien
tgggtagtgactgtatgcttcattg

SEQ ID NO: 453021 - DNA, 25 bp, Homo sapien
ctctggaaatgggtagtgactgtat

SEQ ID NO: 453022 - DNA, 25 bp, Homo sapien
ctggacctgtccttcgaggacctgc

SEQ ID NO: 453023 - DNA, 25 bp, Homo sapien
ctcaggagtagacgtgccttcttca

SEQ ID NO: 453024 - DNA, 25 bp, Homo sapien
tcaggagtagacgtgccttcttcac

SEQ ID NO: 453025 - DNA, 25 bp, Homo sapien
tctgagccagtgttactatccctgg

SEQ ID NO: 453026 - DNA, 25 bp, Homo sapien
tcctccactgttgggctgttgctct

SEQ ID NO: 453027 - DNA, 25 bp, Homo sapien
tcccatcttctggtatgggatctgt

SEQ ID NO: 453028 - DNA, 25 bp, Homo sapien
tatgggatctgttggtggctcctcc

SEQ ID NO: 453029 - DNA, 25 bp, Homo sapien
ttagaacacataaaacaaggcaaca

SEQ ID NO: 453030 - DNA, 25 bp, Homo sapien
tagaacacataaaacaaggcaacat

SEQ ID NO: 453031 - DNA, 25 bp, Homo sapien
aagtatttagaacacataaaacaag

SEQ ID NO: 453032 - DNA, 25 bp, Homo sapien
tatttagaacacataaaacaaggca

SEQ ID NO: 453033 - DNA, 25 bp, Homo sapien
tccctttgcttcagagctatctcca

SEQ ID NO: 453034 - DNA, 25 bp, Homo sapien
tttgttaggctactgatcctgatag

SEQ ID NO: 453035 - DNA, 25 bp, Homo sapien
gcttcagagctatctccaatttccc

SEQ ID NO: 453036 - DNA, 25 bp, Homo sapien
tgatcctgatagcaccagcatctcc

SEQ ID NO: 453037 - DNA, 25 bp, Homo sapien
tttagaaaggcaaaccacctgtgat

SEQ ID NO: 453038 - DNA, 25 bp, Homo sapien
caatatctggtgtgtccgggaatgc

SEQ ID NO: 453039 - DNA, 25 bp, Homo sapien
cgcccttcagaacagtccagtgaca

SEQ ID NO: 453040 - DNA, 25 bp, Homo sapien
gaatgatctttctccacatgtgaag

SEQ ID NO: 453041 - DNA, 25 bp, Homo sapien
tccttgaggtctggtgctgcacaaa

SEQ ID NO: 453042 - DNA, 25 bp, Homo sapien
ttccttgaggtctggtgctgcacaa

SEQ ID NO: 453043 - DNA, 25 bp, Homo sapien
aggcctgtttttgcaaaggaggcat

SEQ ID NO: 453044 - DNA, 25 bp, Homo sapien
caggtgcatgtcaccccgcttggct

SEQ ID NO: 453045 - DNA, 25 bp, Homo sapien
tagggacagtgtttcaccatgttgg

SEQ ID NO: 453046 - DNA, 25 bp, Homo sapien
aggtgcatgtcaccccgcttggcta

SEQ ID NO: 453047 - DNA, 25 bp, Homo sapien
gtagggacagtgtttcaccatgttg

SEQ ID NO: 453048 - DNA, 25 bp, Homo sapien
caggaggatcatttgaatcatatga

SEQ ID NO: 453049 - DNA, 25 bp, Homo sapien
gcaggaggatcatttgaatcatatg

SEQ ID NO: 453050 - DNA, 25 bp, Homo sapien
catatgaggtccaagttcagctcca

SEQ ID NO: 453051 - DNA, 25 bp, Homo sapien
ccatatgaggtccaagttcagctcc

SEQ ID NO: 453052 - DNA, 25 bp, Homo sapien
gataacgtacctttgctctcaagca

SEQ ID NO: 453053 - DNA, 25 bp, Homo sapien
ggttgagacccagagcctgtatggc

SEQ ID NO: 453054 - DNA, 25 bp, Homo sapien
tagtcacggataaagatcagagctc

SEQ ID NO: 453055 - DNA, 25 bp, Homo sapien
catctcaagaaggttgccggctggt

SEQ ID NO: 453056 - DNA, 25 bp, Homo sapien
atcccaggggaggtgttcagtcaac

SEQ ID NO: 453057 - DNA, 25 bp, Homo sapien
ggtgttcagtcaacatgagtttcct

SEQ ID NO: 453058 - DNA, 25 bp, Homo sapien
cagggtggtgatggacatgaacaca

SEQ ID NO: 453059 - DNA, 25 bp, Homo sapien
tgtgaaagttctcatcccaggtccc

SEQ ID NO: 453060 - DNA, 25 bp, Homo sapien
tgtgggctggcaacagagtagaagg

SEQ ID NO: 453061 - DNA, 25 bp, Homo sapien
tagaaggcgatgcagccaaattcca

SEQ ID NO: 453062 - DNA, 25 bp, Homo sapien
ctggcaacagagtagaaggcgatgc

SEQ ID NO: 453063 - DNA, 25 bp, Homo sapien
agaaggcgatgcagccaaattccat

SEQ ID NO: 453064 - DNA, 25 bp, Homo sapien
tttccactgctttcactgggcagtc

SEQ ID NO: 453065 - DNA, 25 bp, Homo sapien
tgtagggtagaagtcatcttgctgg

SEQ ID NO: 453066 - DNA, 25 bp, Homo sapien
cagggatccatccagcatttgaaac

SEQ ID NO: 453067 - DNA, 25 bp, Homo sapien
ctcaacctctttgtagggtagaagt

SEQ ID NO: 453068 - DNA, 25 bp, Homo sapien
tagtggtctgtcacacgtgtccaga

SEQ ID NO: 453069 - DNA, 25 bp, Homo sapien
gatttcggtctaactcccttcttgc

SEQ ID NO: 453070 - DNA, 25 bp, Homo sapien
catgtctatatgctggtaacttcca

SEQ ID NO: 453071 - DNA, 25 bp, Homo sapien
tccagagagccttcaaaccgtacct

SEQ ID NO: 453072 - DNA, 25 bp, Homo sapien
catgagggaagctaccccagaatag

SEQ ID NO: 453073 - DNA, 25 bp, Homo sapien
gctctgaagagaaattgaacctgct

SEQ ID NO: 453074 - DNA, 25 bp, Homo sapien
gcggtggctgaattgcaaggaaata

SEQ ID NO: 453075 - DNA, 25 bp, Homo sapien
gagaaattgaacctgctccacagtt

SEQ ID NO: 453076 - DNA, 25 bp, Homo sapien
ttgtcatcacatgttctcatcagtg

SEQ ID NO: 453077 - DNA, 25 bp, Homo sapien
tcaccgcttgtcatcacatgttctc

SEQ ID NO: 453078 - DNA, 25 bp, Homo sapien
cagtggatggaccaagccattgcca

SEQ ID NO: 453079 - DNA, 25 bp, Homo sapien
gccattgccaatcggctcctgcctg

SEQ ID NO: 453080 - DNA, 25 bp, Homo sapien
taatagaagtcgatgagtctgggtg

SEQ ID NO: 453081 - DNA, 25 bp, Homo sapien
agaaagtgtgctctgctgcatgctt

SEQ ID NO: 453082 - DNA, 25 bp, Homo sapien
gactctggctttctggaggccgcca

SEQ ID NO: 453083 - DNA, 25 bp, Homo sapien
ttttccacgaggactctgacttcct

SEQ ID NO: 453084 - DNA, 25 bp, Homo sapien
ggttgtttttcatgcaaggttggta

SEQ ID NO: 453085 - DNA, 25 bp, Homo sapien
tccttctcggtgcttcagtgtcctc

SEQ ID NO: 453086 - DNA, 25 bp, Homo sapien
caaggttggtacaggagacagagct

SEQ ID NO: 453087 - DNA, 25 bp, Homo sapien
gtttccttctcggtgcttcagtgtc

SEQ ID NO: 453088 - DNA, 25 bp, Homo sapien
ccctgggcaattcggacaatggctt

SEQ ID NO: 453089 - DNA, 25 bp, Homo sapien
tctgacccacttggtcaacacggcg

SEQ ID NO: 453090 - DNA, 25 bp, Homo sapien
gactcaaagatatcagaggagagaa

SEQ ID NO: 453091 - DNA, 25 bp, Homo sapien
caacacggcgccttgactcaaagat

SEQ ID NO: 453092 - DNA, 25 bp, Homo sapien
ttgttccttttactcctgtcctgcc

SEQ ID NO: 453093 - DNA, 25 bp, Homo sapien
cttgttccttttactcctgtcctgc

SEQ ID NO: 453094 - DNA, 25 bp, Homo sapien
tcctggtgctttgccacatgaaaca

SEQ ID NO: 453095 - DNA, 25 bp, Homo sapien
ggtgacttctgtggattcctattgc

SEQ ID NO: 453096 - DNA, 25 bp, Homo sapien
tattgcattcggtttctcctggtgc

SEQ ID NO: 453097 - DNA, 25 bp, Homo sapien
gcttgtcccatcttggtgacttctg

SEQ ID NO: 453098 - DNA, 25 bp, Homo sapien
tctgctagaatttgagcagcaccga

SEQ ID NO: 453099 - DNA, 25 bp, Homo sapien
gtcttctctgctagaatttgagcag

SEQ ID NO: 453100 - DNA, 25 bp, Homo sapien
tctctgctagaatttgagcagcacc

SEQ ID NO: 453101 - DNA, 25 bp, Homo sapien
tcttctctgctagaatttgagcagc

SEQ ID NO: 453102 - DNA, 25 bp, Homo sapien
catgcccagttcttgaatttcagca

SEQ ID NO: 453103 - DNA, 25 bp, Homo sapien
tcatgcccagttcttgaatttcagc

SEQ ID NO: 453104 - DNA, 25 bp, Homo sapien
ttcatgcccagttcttgaatttcag

SEQ ID NO: 453105 - DNA, 25 bp, Homo sapien
tatcccccaggccatctggattggt

SEQ ID NO: 453106 - DNA, 25 bp, Homo sapien
catctggattggttcagcttgttca

SEQ ID NO: 453107 - DNA, 25 bp, Homo sapien
ccccaggccatctggattggttcag

SEQ ID NO: 453108 - DNA, 25 bp, Homo sapien
cagcttgttcaatcaagggaagcat

SEQ ID NO: 453109 - DNA, 25 bp, Homo sapien
catccacggacctgtgtatgcgtgt

SEQ ID NO: 453110 - DNA, 25 bp, Homo sapien
tttcctggcatacacaatctctttg

SEQ ID NO: 453111 - DNA, 25 bp, Homo sapien
cgtgtgtatgtcgttgtgtgatggg

SEQ ID NO: 453112 - DNA, 25 bp, Homo sapien
ttattaaagggagacatccacggac

SEQ ID NO: 453113 - DNA, 25 bp, Homo sapien
catctgatgcccagcattccctcag

SEQ ID NO: 453114 - DNA, 25 bp, Homo sapien
ccagcatctgatgcccagcattccc

SEQ ID NO: 453115 - DNA, 25 bp, Homo sapien
agcatctgatgcccagcattccctc

SEQ ID NO: 453116 - DNA, 25 bp, Homo sapien
tctgatgcccagcattccctcagac

SEQ ID NO: 453117 - DNA, 25 bp, Homo sapien
caccaccccaaggaacaactggagt

SEQ ID NO: 453118 - DNA, 25 bp, Homo sapien
ctggaagctcttggggcatttatac

SEQ ID NO: 453119 - DNA, 25 bp, Homo sapien
gggatgacaccaccccaaggaacaa

SEQ ID NO: 453120 - DNA, 25 bp, Homo sapien
caactggagtgagaactctggaagc

SEQ ID NO: 453121 - DNA, 25 bp, Homo sapien
cactggttctttgcacagggttcca

SEQ ID NO: 453122 - DNA, 25 bp, Homo sapien
tatgcactgtggtactcttatgggt

SEQ ID NO: 453123 - DNA, 25 bp, Homo sapien
ttgctctgttgaccctccaaggctg

SEQ ID NO: 453124 - DNA, 25 bp, Homo sapien
cagggttccacaaagtgtttcagca

SEQ ID NO: 453125 - DNA, 25 bp, Homo sapien
tgggccatttcctactctccttgtc

SEQ ID NO: 453126 - DNA, 25 bp, Homo sapien
ccttgtcacctccattatttgatgt

SEQ ID NO: 453127 - DNA, 25 bp, Homo sapien
tgaaggccagaatgactccatcagt

SEQ ID NO: 453128 - DNA, 25 bp, Homo sapien
ctccttgtcacctccattatttgat

SEQ ID NO: 453129 - DNA, 25 bp, Homo sapien
gaagataaggccctttttgcctcag

SEQ ID NO: 453130 - DNA, 25 bp, Homo sapien
cgtaaccaaaacgccgatctctttg

SEQ ID NO: 453131 - DNA, 25 bp, Homo sapien
agataaggccctttttgcctcaggt

SEQ ID NO: 453132 - DNA, 25 bp, Homo sapien
caaaacgccgatctctttgaagata

SEQ ID NO: 453133 - DNA, 25 bp, Homo sapien
catgacaactgtcccaacagaggtc

SEQ ID NO: 453134 - DNA, 25 bp, Homo sapien
tccaacttggcttagctcagaagag

SEQ ID NO: 453135 - DNA, 25 bp, Homo sapien
tgtttagtaatccatgccagtttcc

SEQ ID NO: 453136 - DNA, 25 bp, Homo sapien
tctccagcactttagaaccccagaa

SEQ ID NO: 453137 - DNA, 25 bp, Homo sapien
cagcattgcattctggtcaggagga

SEQ ID NO: 453138 - DNA, 25 bp, Homo sapien
gagaaacgctatgttgctgtggcca

SEQ ID NO: 453139 - DNA, 25 bp, Homo sapien
gcttagtctaatgcccaacccaggg

SEQ ID NO: 453140 - DNA, 25 bp, Homo sapien
caacatgtgtgcttcccagtaggtg

SEQ ID NO: 453141 - DNA, 25 bp, Homo sapien
gacctgcatgtgcttcgtgcacaca

SEQ ID NO: 453142 - DNA, 25 bp, Homo sapien
gcagtcgaccacacggacctgcatg

SEQ ID NO: 453143 - DNA, 25 bp, Homo sapien
ttcagaggcagtcgaccacacggac

SEQ ID NO: 453144 - DNA, 25 bp, Homo sapien
tcgtgcacacacagcgtaggtcctc

SEQ ID NO: 453145 - DNA, 25 bp, Homo sapien
ggcacatggtaggaatgttggtgat

SEQ ID NO: 453146 - DNA, 25 bp, Homo sapien
ggaatgttggtgatcccacaaggct

SEQ ID NO: 453147 - DNA, 25 bp, Homo sapien
tgttggtgatcccacaaggctcatt

SEQ ID NO: 453148 - DNA, 25 bp, Homo sapien
gaaggcacatggtaggaatgttggt

SEQ ID NO: 453149 - DNA, 25 bp, Homo sapien
gcttgaccgtaaatcttcacgaaag

SEQ ID NO: 453150 - DNA, 25 bp, Homo sapien
cgggaaagtgcttgaccgtaaatct

SEQ ID NO: 453151 - DNA, 25 bp, Homo sapien
gaaagtgcttgaccgtaaatcttca

SEQ ID NO: 453152 - DNA, 25 bp, Homo sapien
aatcttcacgaaagattaagcacat

SEQ ID NO: 453153 - DNA, 25 bp, Homo sapien
gctgacttcttaccaagaaaggatg

SEQ ID NO: 453154 - DNA, 25 bp, Homo sapien
gacttcttaccaagaaaggatgtgg

SEQ ID NO: 453155 - DNA, 25 bp, Homo sapien
cttcttaccaagaaaggatgtgggc

SEQ ID NO: 453156 - DNA, 25 bp, Homo sapien
acagctgacttcttaccaagaaagg

SEQ ID NO: 453157 - DNA, 25 bp, Homo sapien
gtgagctgggtagcagctgccattc

SEQ ID NO: 453158 - DNA, 25 bp, Homo sapien
gatttggtccaaggaatgggccggc

SEQ ID NO: 453159 - DNA, 25 bp, Homo sapien
tgcttgctggtaggatttggtccaa

SEQ ID NO: 453160 - DNA, 25 bp, Homo sapien
cattgtgttactgagaactcctggt

SEQ ID NO: 453161 - DNA, 25 bp, Homo sapien
cagaggactttgtggccttgttttc

SEQ ID NO: 453162 - DNA, 25 bp, Homo sapien
tcactctggagattcggtgaatttt

SEQ ID NO: 453163 - DNA, 25 bp, Homo sapien
actctggagattcggtgaattttct

SEQ ID NO: 453164 - DNA, 25 bp, Homo sapien
ttcagaggactttgtggccttgttt

SEQ ID NO: 453165 - DNA, 25 bp, Homo sapien
atcagttagggagtatttctttagc

SEQ ID NO: 453166 - DNA, 25 bp, Homo sapien
gtcatcagttagggagtatttcttt

SEQ ID NO: 453167 - DNA, 25 bp, Homo sapien
catcagttagggagtatttctttag

SEQ ID NO: 453168 - DNA, 25 bp, Homo sapien
tcatcagttagggagtatttcttta

SEQ ID NO: 453169 - DNA, 25 bp, Homo sapien
gcatctatgctttgtggccacaggg

SEQ ID NO: 453170 - DNA, 25 bp, Homo sapien
ggtgctccagatgcacaccaaggga

SEQ ID NO: 453171 - DNA, 25 bp, Homo sapien
ttgcctttgaatgacagccacatgc

SEQ ID NO: 453172 - DNA, 25 bp, Homo sapien
tgaattctgcgttgtcctggagtct

SEQ ID NO: 453173 - DNA, 25 bp, Homo sapien
agtctgcctctagctctcgggcgga

SEQ ID NO: 453174 - DNA, 25 bp, Homo sapien
gcctctagctctcgggcggacagca

SEQ ID NO: 453175 - DNA, 25 bp, Homo sapien
cagcccctcgtgtcccagcagtctg

SEQ ID NO: 453176 - DNA, 25 bp, Homo sapien
cagcagtctgcctctagctctcggg

SEQ ID NO: 453177 - DNA, 25 bp, Homo sapien
gaccatttcaaagagtgggcattgt

SEQ ID NO: 453178 - DNA, 25 bp, Homo sapien
ccttggatggaccatttcaaagagt

SEQ ID NO: 453179 - DNA, 25 bp, Homo sapien
tcttgaaatcccttggatggaccat

SEQ ID NO: 453180 - DNA, 25 bp, Homo sapien
tgaaatcccttggatggaccatttc

SEQ ID NO: 453181 - DNA, 25 bp, Homo sapien
tgaagacccacaacactgaagatat

SEQ ID NO: 453182 - DNA, 25 bp, Homo sapien
caagtggcagcaaaagtttgaggtc

SEQ ID NO: 453183 - DNA, 25 bp, Homo sapien
aactgtccaactgtaaaccgagaga

SEQ ID NO: 453184 - DNA, 25 bp, Homo sapien
tgttcttgaggctacaactgtccaa

SEQ ID NO: 453185 - DNA, 25 bp, Homo sapien
gttccgcagcgccttgttttgaagt

SEQ ID NO: 453186 - DNA, 25 bp, Homo sapien
aagcccaggacttcgcccagatgtc

SEQ ID NO: 453187 - DNA, 25 bp, Homo sapien
tgtcatcttgccgtatgcatgccat

SEQ ID NO: 453188 - DNA, 25 bp, Homo sapien
gcaatctgccttgcacactgctcca

SEQ ID NO: 453189 - DNA, 25 bp, Homo sapien
agcactgtcccagggtggaccccac

SEQ ID NO: 453190 - DNA, 25 bp, Homo sapien
caggagaaagctgcattggcactgc

SEQ ID NO: 453191 - DNA, 25 bp, Homo sapien
gatacctgattgagcagcactgtcc

SEQ ID NO: 453192 - DNA, 25 bp, Homo sapien
ttgactgatacctgattgagcagca

SEQ ID NO: 453193 - DNA, 25 bp, Homo sapien
tgctgccctgtttaaggattcaaag

SEQ ID NO: 453194 - DNA, 25 bp, Homo sapien
gcttgtctgcaaacactgctgtggt

SEQ ID NO: 453195 - DNA, 25 bp, Homo sapien
tatggctggaagcagtcattgctgc

SEQ ID NO: 453196 - DNA, 25 bp, Homo sapien
taggcagaggtatatctttgcagcc

SEQ ID NO: 453197 - DNA, 25 bp, Homo sapien
cagtcggagtttctggccttggctt

SEQ ID NO: 453198 - DNA, 25 bp, Homo sapien
gcaggcaaagcttgggtacttaatc

SEQ ID NO: 453199 - DNA, 25 bp, Homo sapien
tctagctatggccagtcggagtttc

SEQ ID NO: 453200 - DNA, 25 bp, Homo sapien
cttgggtacttaatctagctatggc

SEQ ID NO: 453201 - DNA, 25 bp, Homo sapien
aacagaaacgactggacagcagctg

SEQ ID NO: 453202 - DNA, 25 bp, Homo sapien
cttagataagtttccgattcttagg

SEQ ID NO: 453203 - DNA, 25 bp, Homo sapien
cagaaacgactggacagcagctggc

SEQ ID NO: 453204 - DNA, 25 bp, Homo sapien
taggctttgaggatccattagagga

SEQ ID NO: 453205 - DNA, 25 bp, Homo sapien
aatgttccaggcttccgggcagttc

SEQ ID NO: 453206 - DNA, 25 bp, Homo sapien
tttcggtgacacaaatcctgccttc

SEQ ID NO: 453207 - DNA, 25 bp, Homo sapien
gtcatcagaacctggaatgttccag

SEQ ID NO: 453208 - DNA, 25 bp, Homo sapien
gccttcagccgctgagtcatcagaa

SEQ ID NO: 453209 - DNA, 25 bp, Homo sapien
cagtagactgctaaggcatcaaccg

SEQ ID NO: 453210 - DNA, 25 bp, Homo sapien
ccttgaaatgcttcaaatcgaggag

SEQ ID NO: 453211 - DNA, 25 bp, Homo sapien
catgaacgcctgcagtaagagactt

SEQ ID NO: 453212 - DNA, 25 bp, Homo sapien
ggagtttccatctatcatgaacgcc

SEQ ID NO: 453213 - DNA, 25 bp, Homo sapien
catgggcgattaccaggactatttt

SEQ ID NO: 453214 - DNA, 25 bp, Homo sapien
taccaggactattttgtagagcatg

SEQ ID NO: 453215 - DNA, 25 bp, Homo sapien
gctgacttggtaacatgggcgatta

SEQ ID NO: 453216 - DNA, 25 bp, Homo sapien
ggtaacatgggcgattaccaggact

SEQ ID NO: 453217 - DNA, 25 bp, Homo sapien
ttttatgtactcaaaggttgctgcc

SEQ ID NO: 453218 - DNA, 25 bp, Homo sapien
ggctgtggccttcttaaatcttgtg

SEQ ID NO: 453219 - DNA, 25 bp, Homo sapien
tgctgcctgtaaccactaaactttc

SEQ ID NO: 453220 - DNA, 25 bp, Homo sapien
ttttacatgttaaggcgaccactca

SEQ ID NO: 453221 - DNA, 25 bp, Homo sapien
tttctttcatagagatcactttctg

SEQ ID NO: 453222 - DNA, 25 bp, Homo sapien
ttccagcacttatccttcctttgta

SEQ ID NO: 453223 - DNA, 25 bp, Homo sapien
catggtagtcttctcaatttttggt

SEQ ID NO: 453224 - DNA, 25 bp, Homo sapien
tgaacaatattatggctaggaggat

SEQ ID NO: 453225 - DNA, 25 bp, Homo sapien
gatggacagcttttttatggtggta

SEQ ID NO: 453226 - DNA, 25 bp, Homo sapien
acattctgtgatacccaaggaagtg

SEQ ID NO: 453227 - DNA, 25 bp, Homo sapien
cactaatgagtagctatggcagtct

SEQ ID NO: 453228 - DNA, 25 bp, Homo sapien
cagagagtgagccagaaggtaagtc

SEQ ID NO: 453229 - DNA, 25 bp, Homo sapien
aaaaactttgagtgggctggtcaca

SEQ ID NO: 453230 - DNA, 25 bp, Homo sapien
gctacaactaggcttgctgggcctg

SEQ ID NO: 453231 - DNA, 25 bp, Homo sapien
tgcttggtaaattctcatggttgcc

SEQ ID NO: 453232 - DNA, 25 bp, Homo sapien
tttggcaggcactttagtattatgc

SEQ ID NO: 453233 - DNA, 25 bp, Homo sapien
tcacttcggctgctcttgtcgatat

SEQ ID NO: 453234 - DNA, 25 bp, Homo sapien
ttccattatcctccattgcactcat

SEQ ID NO: 453235 - DNA, 25 bp, Homo sapien
gctcttgtcgatatctcagcttcct

SEQ ID NO: 453236 - DNA, 25 bp, Homo sapien
ttatcctccattgcactcatctggc

SEQ ID NO: 453237 - DNA, 25 bp, Homo sapien
gcccagtctccccttgattctcagc

SEQ ID NO: 453238 - DNA, 25 bp, Homo sapien
agcctcaacccagcggccagccttg

SEQ ID NO: 453239 - DNA, 25 bp, Homo sapien
agccccccatggaggcccagtctct

SEQ ID NO: 453240 - DNA, 25 bp, Homo sapien
caaagccttcctctgagtcgcagcc

SEQ ID NO: 453241 - DNA, 25 bp, Homo sapien
aagaatcccgcgatcagcagcgaag

SEQ ID NO: 453242 - DNA, 25 bp, Homo sapien
ccctatccaaaaagaatcccgcgat

SEQ ID NO: 453243 - DNA, 25 bp, Homo sapien
tatccacgaacgtcaaccctatcca

SEQ ID NO: 453244 - DNA, 25 bp, Homo sapien
cagcagcgaagaatggcaggtttcc

SEQ ID NO: 453245 - DNA, 25 bp, Homo sapien
tggcggacactggtcacagatatga

SEQ ID NO: 453246 - DNA, 25 bp, Homo sapien
gcggacactggtcacagatatgagt

SEQ ID NO: 453247 - DNA, 25 bp, Homo sapien
cggtggcggacactggtcacagata

SEQ ID NO: 453248 - DNA, 25 bp, Homo sapien
ccgcggtggcggacactggtcacag

SEQ ID NO: 453249 - DNA, 25 bp, Homo sapien
gggccggtccgatcaggtctcttgc

SEQ ID NO: 453250 - DNA, 25 bp, Homo sapien
ccggtccgatcaggtctcttgccat

SEQ ID NO: 453251 - DNA, 25 bp, Homo sapien
gcggcagggccggtccgatcaggtc

SEQ ID NO: 453252 - DNA, 25 bp, Homo sapien
cagggccggtccgatcaggtctctt

SEQ ID NO: 453253 - DNA, 25 bp, Homo sapien
ggctcgggtcccgctcttcgtcctc

SEQ ID NO: 453254 - DNA, 25 bp, Homo sapien
cagggctcgggtcccgctcttcgtc

SEQ ID NO: 453255 - DNA, 25 bp, Homo sapien
ggtgggcagcggagacgccgccgct

SEQ ID NO: 453256 - DNA, 25 bp, Homo sapien
gagtgggtagatgggcctggtgggc

SEQ ID NO: 453257 - DNA, 25 bp, Homo sapien
gcagggcccggccagggagtgggta

SEQ ID NO: 453258 - DNA, 25 bp, Homo sapien
tggtgggcagcggagacgccgccgc

SEQ ID NO: 453259 - DNA, 25 bp, Homo sapien
ttgggcgtacccatttgcaacatgg

SEQ ID NO: 453260 - DNA, 25 bp, Homo sapien
tctagacactggcatgggcttgggc

SEQ ID NO: 453261 - DNA, 25 bp, Homo sapien
aagagaaccgcttccttctaagtcg

SEQ ID NO: 453262 - DNA, 25 bp, Homo sapien
tacggcttaaatgactgagtgggta

SEQ ID NO: 453263 - DNA, 25 bp, Homo sapien
aggaatgcaaccagaggaagcccag

SEQ ID NO: 453264 - DNA, 25 bp, Homo sapien
gataggtatgcatgccggaatccga

SEQ ID NO: 453265 - DNA, 25 bp, Homo sapien
gaattgcgcagcaactcagactgga

SEQ ID NO: 453266 - DNA, 25 bp, Homo sapien
ggaagcccagaagcctagagcgtta

SEQ ID NO: 453267 - DNA, 25 bp, Homo sapien
ttagattcagaaatggcagggttac

SEQ ID NO: 453268 - DNA, 25 bp, Homo sapien
tagaaacatagcctccgggtagacc

SEQ ID NO: 453269 - DNA, 25 bp, Homo sapien
ctgtagtagaaacatagcctccggg

SEQ ID NO: 453270 - DNA, 25 bp, Homo sapien
ttctccaactgggtgtcggtgctag

SEQ ID NO: 453271 - DNA, 25 bp, Homo sapien
cttgtgccacctcgctcagctggaa

SEQ ID NO: 453272 - DNA, 25 bp, Homo sapien
ttgtgccacctcgctcagctggaag

SEQ ID NO: 453273 - DNA, 25 bp, Homo sapien
tgtgccacctcgctcagctggaagg

SEQ ID NO: 453274 - DNA, 25 bp, Homo sapien
gtaaacaaccatgcctgacccaagt

SEQ ID NO: 453275 - DNA, 25 bp, Homo sapien
tacaagcgtaaacaaccatgcctga

SEQ ID NO: 453276 - DNA, 25 bp, Homo sapien
actcatgggttcaagaatgcctgcc

SEQ ID NO: 453277 - DNA, 25 bp, Homo sapien
tcttaaacctagatgcacaagccaa

SEQ ID NO: 453278 - DNA, 25 bp, Homo sapien
cgccaaaaggaatctactgagtacc

SEQ ID NO: 453279 - DNA, 25 bp, Homo sapien
ctgagtacccactttgtgctgggta

SEQ ID NO: 453280 - DNA, 25 bp, Homo sapien
tagttgagactgcatgtgcatgcta

SEQ ID NO: 453281 - DNA, 25 bp, Homo sapien
tttttactgtcctctactccgccaa

SEQ ID NO: 453282 - DNA, 25 bp, Homo sapien
tcagcaacaggggatatgcattaga

SEQ ID NO: 453283 - DNA, 25 bp, Homo sapien
cagcaacaggggatatgcattagaa

SEQ ID NO: 453284 - DNA, 25 bp, Homo sapien
gagagatcagcaacaggggatatgc

SEQ ID NO: 453285 - DNA, 25 bp, Homo sapien
agatcagcaacaggggatatgcatt

SEQ ID NO: 453286 - DNA, 25 bp, Homo sapien
tgtggataccagaatgcatagcgca

SEQ ID NO: 453287 - DNA, 25 bp, Homo sapien
agtgtggataccagaatgcatagcg

SEQ ID NO: 453288 - DNA, 25 bp, Homo sapien
gtggtccttcactcccggaggtcac

SEQ ID NO: 453289 - DNA, 25 bp, Homo sapien
gataccagaatgcatagcgcactac

SEQ ID NO: 453290 - DNA, 25 bp, Homo sapien
cagtgcacaactcctatgcagggag

SEQ ID NO: 453291 - DNA, 25 bp, Homo sapien
caagcctgatgtgcttgaggaataa

SEQ ID NO: 453292 - DNA, 25 bp, Homo sapien
caatagtcagcaaccatccatccaa

SEQ ID NO: 453293 - DNA, 25 bp, Homo sapien
taacttcatacaactaagtagtggg

SEQ ID NO: 453294 - DNA, 25 bp, Homo sapien
ctaaagaacacttgttgtttgtcat

SEQ ID NO: 453295 - DNA, 25 bp, Homo sapien
tcttcatcgctgtctgatgaatctg

SEQ ID NO: 453296 - DNA, 25 bp, Homo sapien
cttttataattagggggcagagctg

SEQ ID NO: 453297 - DNA, 25 bp, Homo sapien
gcttttataattagggggcagagct

SEQ ID NO: 453298 - DNA, 25 bp, Homo sapien
tcatcgctgtctgatgaatctgaac

SEQ ID NO: 453299 - DNA, 25 bp, Homo sapien
gtgccaccggattccagtctgggct

SEQ ID NO: 453300 - DNA, 25 bp, Homo sapien
tgccaccggattccagtctgggcta

SEQ ID NO: 453301 - DNA, 25 bp, Homo sapien
ggaggagaatcatcctgctttttaa

SEQ ID NO: 453302 - DNA, 25 bp, Homo sapien
gggctggtccaaaaaacccatcatc

SEQ ID NO: 453303 - DNA, 25 bp, Homo sapien
catcgtcatcatcctgatttttcct

SEQ ID NO: 453304 - DNA, 25 bp, Homo sapien
agaatcatcctgctttttaaatcca

SEQ ID NO: 453305 - DNA, 25 bp, Homo sapien
tggcctaaaatattacacattatca

SEQ ID NO: 453306 - DNA, 25 bp, Homo sapien
ggcctaaaatattacacattatcac

SEQ ID NO: 453307 - DNA, 25 bp, Homo sapien
ggtggcaatgcaggacctattatgg

SEQ ID NO: 453308 - DNA, 25 bp, Homo sapien
caggtggcaatgcaggacctattat

SEQ ID NO: 453309 - DNA, 25 bp, Homo sapien
tctctgcccttgtcacttttctgtg

SEQ ID NO: 453310 - DNA, 25 bp, Homo sapien
tggcaatgcaggacctattatgggc

SEQ ID NO: 453311 - DNA, 25 bp, Homo sapien
cttagagttgaaatgggatgatgat

SEQ ID NO: 453312 - DNA, 25 bp, Homo sapien
tagagttgaaatgggatgatgatac

SEQ ID NO: 453313 - DNA, 25 bp, Homo sapien
ttagagttgaaatgggatgatgata

SEQ ID NO: 453314 - DNA, 25 bp, Homo sapien
cagtggttgtagtaactgcatgcat

SEQ ID NO: 453315 - DNA, 25 bp, Homo sapien
tggttgtagtaactgcatgcataaa

SEQ ID NO: 453316 - DNA, 25 bp, Homo sapien
ggttgtagtaactgcatgcataaag

SEQ ID NO: 453317 - DNA, 25 bp, Homo sapien
agtggttgtagtaactgcatgcata

SEQ ID NO: 453318 - DNA, 25 bp, Homo sapien
ttcctgtgtccatgacagacctcac

SEQ ID NO: 453319 - DNA, 25 bp, Homo sapien
ctgtgtccatgacagacctcactct

SEQ ID NO: 453320 - DNA, 25 bp, Homo sapien
tcctgtgtccatgacagacctcact

SEQ ID NO: 453321 - DNA, 25 bp, Homo sapien
gtgtccatgacagacctcactctct

SEQ ID NO: 453322 - DNA, 25 bp, Homo sapien
tacctgcatttaactgaaacttatt

SEQ ID NO: 453323 - DNA, 25 bp, Homo sapien
gcatttaactgaaacttattatcca

SEQ ID NO: 453324 - DNA, 25 bp, Homo sapien
cctgcatttaactgaaacttattat

SEQ ID NO: 453325 - DNA, 25 bp, Homo sapien
aaattacctgcatttaactgaaact

SEQ ID NO: 453326 - DNA, 25 bp, Homo sapien
taaaccaagagcagagctacaggtt

SEQ ID NO: 453327 - DNA, 25 bp, Homo sapien
cctttaaaccaagagcagagctaca

SEQ ID NO: 453328 - DNA, 25 bp, Homo sapien
gcagagctacaggttataaaaaata

SEQ ID NO: 453329 - DNA, 25 bp, Homo sapien
ccaagagcagagctacaggttataa

SEQ ID NO: 453330 - DNA, 25 bp, Homo sapien
tggtccaataatatcctcatcttca

SEQ ID NO: 453331 - DNA, 25 bp, Homo sapien
atatcctcatcttcactgctgtctg

SEQ ID NO: 453332 - DNA, 25 bp, Homo sapien
tatcctcatcttcactgctgtctgt

SEQ ID NO: 453333 - DNA, 25 bp, Homo sapien
cctcatcttcactgctgtctgtttc

SEQ ID NO: 453334 - DNA, 25 bp, Homo sapien
tcgttacattatagttaactggtcc

SEQ ID NO: 453335 - DNA, 25 bp, Homo sapien
ctctgggcccttttttcaaactctg

SEQ ID NO: 453336 - DNA, 25 bp, Homo sapien
tcaaactctgtcgttacattatagt

SEQ ID NO: 453337 - DNA, 25 bp, Homo sapien
ttatagttaactggtccttttgcag

SEQ ID NO: 453338 - DNA, 25 bp, Homo sapien
atcatctcctttggtcagtttttct

SEQ ID NO: 453339 - DNA, 25 bp, Homo sapien
ctcctttggtcagtttttctttcat

SEQ ID NO: 453340 - DNA, 25 bp, Homo sapien
tctcctttggtcagtttttctttca

SEQ ID NO: 453341 - DNA, 25 bp, Homo sapien
catctcctttggtcagtttttcttt

SEQ ID NO: 453342 - DNA, 25 bp, Homo sapien
tcatccatgactctcttacaatggg

SEQ ID NO: 453343 - DNA, 25 bp, Homo sapien
tctcttaaaagtccttggcccaaga

SEQ ID NO: 453344 - DNA, 25 bp, Homo sapien
tccctatcagctggagtatctgtcc

SEQ ID NO: 453345 - DNA, 25 bp, Homo sapien
tgtccagattgatcgatctccagat

SEQ ID NO: 453346 - DNA, 25 bp, Homo sapien
tcttcctgataatatatgttcttca

SEQ ID NO: 453347 - DNA, 25 bp, Homo sapien
cttatctcttcctgataatatatgt

SEQ ID NO: 453348 - DNA, 25 bp, Homo sapien
ttgtatgaagatacctgctcagcca

SEQ ID NO: 453349 - DNA, 25 bp, Homo sapien
attgtatgaagatacctgctcagcc

SEQ ID NO: 453350 - DNA, 25 bp, Homo sapien
caagaaactgtaaacacaggagggt

SEQ ID NO: 453351 - DNA, 25 bp, Homo sapien
gaaagtaagtctggtctggctgatc

SEQ ID NO: 453352 - DNA, 25 bp, Homo sapien
tcttcagggtatgagacaaaaaacc

SEQ ID NO: 453353 - DNA, 25 bp, Homo sapien
aaatggcacctagatcagaattcag

SEQ ID NO: 453354 - DNA, 25 bp, Homo sapien
tctttatcacggtcaaatggtattc

SEQ ID NO: 453355 - DNA, 25 bp, Homo sapien
atggtattctctcttgaggcttatt

SEQ ID NO: 453356 - DNA, 25 bp, Homo sapien
tttaactttttatgatgtatgtcca

SEQ ID NO: 453357 - DNA, 25 bp, Homo sapien
ttatgatgtatgtccataagagatt

SEQ ID NO: 453358 - DNA, 25 bp, Homo sapien
tctggtgtttagttctctagatttt

SEQ ID NO: 453359 - DNA, 25 bp, Homo sapien
tctgagcttcatcaaaccgattaac

SEQ ID NO: 453360 - DNA, 25 bp, Homo sapien
cctttgccgtgtgaaaatctggtgt

SEQ ID NO: 453361 - DNA, 25 bp, Homo sapien
aaacatattgcctttgccgtgtgaa

SEQ ID NO: 453362 - DNA, 25 bp, Homo sapien
agggatttttccagtaagacatatt

SEQ ID NO: 453363 - DNA, 25 bp, Homo sapien
gatttcagcacaattattaaagaca

SEQ ID NO: 453364 - DNA, 25 bp, Homo sapien
caatgccctattaggttattatgag

SEQ ID NO: 453365 - DNA, 25 bp, Homo sapien
gttcacattgatcagtattaaaata

SEQ ID NO: 453366 - DNA, 25 bp, Homo sapien
tgcatatttactcaagtatcaaacc

SEQ ID NO: 453367 - DNA, 25 bp, Homo sapien
atgcatatttactcaagtatcaaac

SEQ ID NO: 453368 - DNA, 25 bp, Homo sapien
gcatatttactcaagtatcaaacca

SEQ ID NO: 453369 - DNA, 25 bp, Homo sapien
agttgtcccaaagcaaagttccagg

SEQ ID NO: 453370 - DNA, 25 bp, Homo sapien
accttagagggtacttgtgagacac

SEQ ID NO: 453371 - DNA, 25 bp, Homo sapien
ggacttgacacactgactctagggc

SEQ ID NO: 453372 - DNA, 25 bp, Homo sapien
ttcttcattgcacagggaaatcccc

SEQ ID NO: 453373 - DNA, 25 bp, Homo sapien
tcatcaaaactagaatactagtgga

SEQ ID NO: 453374 - DNA, 25 bp, Homo sapien
ctagaatactagtggaacaattggg

SEQ ID NO: 453375 - DNA, 25 bp, Homo sapien
ggaacaattgggattaatctgcaag

SEQ ID NO: 453376 - DNA, 25 bp, Homo sapien
caattgggattaatctgcaagaaaa

SEQ ID NO: 453377 - DNA, 25 bp, Homo sapien
gcctggaacaatatatagtgaaacc

SEQ ID NO: 453378 - DNA, 25 bp, Homo sapien
ctggaacaatatatagtgaaacccc

SEQ ID NO: 453379 - DNA, 25 bp, Homo sapien
cagcctggaacaatatatagtgaaa

SEQ ID NO: 453380 - DNA, 25 bp, Homo sapien
accagcctggaacaatatatagtga

SEQ ID NO: 453381 - DNA, 25 bp, Homo sapien
taatagcaatgctcctttagtttgc

SEQ ID NO: 453382 - DNA, 25 bp, Homo sapien
tgtactgctattattagaggaagaa

SEQ ID NO: 453383 - DNA, 25 bp, Homo sapien
gctatggtttacactgatgctatgg

SEQ ID NO: 453384 - DNA, 25 bp, Homo sapien
gaagaataatttgtaccatcatata

SEQ ID NO: 453385 - DNA, 25 bp, Homo sapien
caaggtcatggtcactccaaaggtg

SEQ ID NO: 453386 - DNA, 25 bp, Homo sapien
aaaagaggccacattcctatgacac

SEQ ID NO: 453387 - DNA, 25 bp, Homo sapien
tcctggaagcaataggcggaaagca

SEQ ID NO: 453388 - DNA, 25 bp, Homo sapien
gcaaaacaacctctgaaactggcct

SEQ ID NO: 453389 - DNA, 25 bp, Homo sapien
gatctacatctaaacaaggttgcta

SEQ ID NO: 453390 - DNA, 25 bp, Homo sapien
tctaaaaactcttagatcagggctt

SEQ ID NO: 453391 - DNA, 25 bp, Homo sapien
catttatctggtaaggcagtcttag

SEQ ID NO: 453392 - DNA, 25 bp, Homo sapien
tgtcaagtggttgctacatctaaac

SEQ ID NO: 453393 - DNA, 25 bp, Homo sapien
aataaatcgttaatacaaagaatca

SEQ ID NO: 453394 - DNA, 25 bp, Homo sapien
agtgataagggcctcctattagtag

SEQ ID NO: 453395 - DNA, 25 bp, Homo sapien
caataaccattgatctattctgaag

SEQ ID NO: 453396 - DNA, 25 bp, Homo sapien
tgataagggcctcctattagtagtt

SEQ ID NO: 453397 - DNA, 25 bp, Homo sapien
tgaagcatgtaagccttggtaccat

SEQ ID NO: 453398 - DNA, 25 bp, Homo sapien
aaaatcatctaagtagcatgagctt

SEQ ID NO: 453399 - DNA, 25 bp, Homo sapien
gtgtacatactgcagtcacaagcaa

SEQ ID NO: 453400 - DNA, 25 bp, Homo sapien
ctgaaatagaagacttggctgtcga

SEQ ID NO: 453401 - DNA, 25 bp, Homo sapien
aagcattctcttagtaaagctcaaa

SEQ ID NO: 453402 - DNA, 25 bp, Homo sapien
tggccaacattaccccatcataaag

SEQ ID NO: 453403 - DNA, 25 bp, Homo sapien
gttgctttcagccattacctaaaaa

SEQ ID NO: 453404 - DNA, 25 bp, Homo sapien
taaactgtcatttgactgcaagcat

SEQ ID NO: 453405 - DNA, 25 bp, Homo sapien
gcaggacagcggtaagtaatcagag

SEQ ID NO: 453406 - DNA, 25 bp, Homo sapien
ccagagcagagatggtaggcacctc

SEQ ID NO: 453407 - DNA, 25 bp, Homo sapien
acatacgaaagcctcttcgggacat

SEQ ID NO: 453408 - DNA, 25 bp, Homo sapien
caggtacacagacagtgctggcgga

SEQ ID NO: 453409 - DNA, 25 bp, Homo sapien
gaagcagctatcagtattagaccac

SEQ ID NO: 453410 - DNA, 25 bp, Homo sapien
cgatgttctcatgtggagttcggga

SEQ ID NO: 453411 - DNA, 25 bp, Homo sapien
gctcatgaagccgatgttctcatgt

SEQ ID NO: 453412 - DNA, 25 bp, Homo sapien
ttgtgccccagccatcattctccag

SEQ ID NO: 453413 - DNA, 25 bp, Homo sapien
cagaccctgtacacgttgcctgtgg

SEQ ID NO: 453414 - DNA, 25 bp, Homo sapien
ttgagcacaactgaaggcacaggcc

SEQ ID NO: 453415 - DNA, 25 bp, Homo sapien
tagagaatcagaaagtaccagatct

SEQ ID NO: 453416 - DNA, 25 bp, Homo sapien
gagcagaacccattcccactagaga

SEQ ID NO: 453417 - DNA, 25 bp, Homo sapien
cctttctctatttgagcagaaccca

SEQ ID NO: 453418 - DNA, 25 bp, Homo sapien
gtgatcagtagggtgacagatattg

SEQ ID NO: 453419 - DNA, 25 bp, Homo sapien
tcgtcccctttgactgagcacacag

SEQ ID NO: 453420 - DNA, 25 bp, Homo sapien
tggtcgtcccctttgactgagcaca

SEQ ID NO: 453421 - DNA, 25 bp, Homo sapien
gagcttgaatggaggttctggtagg

SEQ ID NO: 453422 - DNA, 25 bp, Homo sapien
tgtaggcaccaggttcgtgggcagg

SEQ ID NO: 453423 - DNA, 25 bp, Homo sapien
ctgttgtaggcaccaggttcgtggg

SEQ ID NO: 453424 - DNA, 25 bp, Homo sapien
taggcaccaggttcgtgggcaggaa

SEQ ID NO: 453425 - DNA, 25 bp, Homo sapien
gttgtaggcaccaggttcgtgggca

SEQ ID NO: 453426 - DNA, 25 bp, Homo sapien
tctgatatcacatggttagaaccac

SEQ ID NO: 453427 - DNA, 25 bp, Homo sapien
tcgagggttgccacctggatccata

SEQ ID NO: 453428 - DNA, 25 bp, Homo sapien
ttacaggagtagacctctggcagct

SEQ ID NO: 453429 - DNA, 25 bp, Homo sapien
gggcaactgcttgacactctgtaga

SEQ ID NO: 453430 - DNA, 25 bp, Homo sapien
tttctgacggcaagtgttgaagaag

SEQ ID NO: 453431 - DNA, 25 bp, Homo sapien
tcatgagttgtttcaacagagggag

SEQ ID NO: 453432 - DNA, 25 bp, Homo sapien
ggagagccaatttctgacggcaagt

SEQ ID NO: 453433 - DNA, 25 bp, Homo sapien
tgtacggctttcatgagttgtttca

SEQ ID NO: 453434 - DNA, 25 bp, Homo sapien
ctgagcttgcgtttcaggataagcc

SEQ ID NO: 453435 - DNA, 25 bp, Homo sapien
ttcttgccttgctgagcttgcgttt

SEQ ID NO: 453436 - DNA, 25 bp, Homo sapien
gttccagtgactagagctctccaag

SEQ ID NO: 453437 - DNA, 25 bp, Homo sapien
tccagtgactagagctctccaagga

SEQ ID NO: 453438 - DNA, 25 bp, Homo sapien
cacagagcctctatttgcgagatcg

SEQ ID NO: 453439 - DNA, 25 bp, Homo sapien
gaagcattttcaagtggttcacaga

SEQ ID NO: 453440 - DNA, 25 bp, Homo sapien
taaacttcatactgcagtggtaaca

SEQ ID NO: 453441 - DNA, 25 bp, Homo sapien
caaagactctattggctgtgctaga

SEQ ID NO: 453442 - DNA, 25 bp, Homo sapien
cttgggcctttggtctagtgccttc

SEQ ID NO: 453443 - DNA, 25 bp, Homo sapien
tgggcctttggtctagtgccttcat

SEQ ID NO: 453444 - DNA, 25 bp, Homo sapien
ttgggcctttggtctagtgccttca

SEQ ID NO: 453445 - DNA, 25 bp, Homo sapien
cacagacggcagagctaaaagaaca

SEQ ID NO: 453446 - DNA, 25 bp, Homo sapien
ctgtccacagacggcagagctaaaa

SEQ ID NO: 453447 - DNA, 25 bp, Homo sapien
tccacagacggcagagctaaaagaa

SEQ ID NO: 453448 - DNA, 25 bp, Homo sapien
acagacggcagagctaaaagaacac

SEQ ID NO: 453449 - DNA, 25 bp, Homo sapien
acaagagcttgggatccactgaatg

SEQ ID NO: 453450 - DNA, 25 bp, Homo sapien
gaggcatttcccattgcctaacaca

SEQ ID NO: 453451 - DNA, 25 bp, Homo sapien
taacacaattctccaccttcaccat

SEQ ID NO: 453452 - DNA, 25 bp, Homo sapien
tatctcattcatcttagatgccaca

SEQ ID NO: 453453 - DNA, 25 bp, Homo sapien
taggtggctgagacgtgagaatctc

SEQ ID NO: 453454 - DNA, 25 bp, Homo sapien
ttaggtggctgagacgtgagaatct

SEQ ID NO: 453455 - DNA, 25 bp, Homo sapien
ctgtaatcccatgtacttaggtggc

SEQ ID NO: 453456 - DNA, 25 bp, Homo sapien
taatcccatgtacttaggtggctga

SEQ ID NO: 453457 - DNA, 25 bp, Homo sapien
tctgattgcatctccaaggtctcat

SEQ ID NO: 453458 - DNA, 25 bp, Homo sapien
gcacccggccctgctatacagtttt

SEQ ID NO: 453459 - DNA, 25 bp, Homo sapien
gatgaatgttgcctagatccagtaa

SEQ ID NO: 453460 - DNA, 25 bp, Homo sapien
tctgagcaaagatagtgtgacgttt

SEQ ID NO: 453461 - DNA, 25 bp, Homo sapien
ggatgacatgattccgttgaattgc

SEQ ID NO: 453462 - DNA, 25 bp, Homo sapien
gctgctgtgacctgcaagaagcctt

SEQ ID NO: 453463 - DNA, 25 bp, Homo sapien
gaagccttcactctcagtaagtcac

SEQ ID NO: 453464 - DNA, 25 bp, Homo sapien
tctgatgtgacatatggctgctgtg

SEQ ID NO: 453465 - DNA, 25 bp, Homo sapien
ggaaaagaggaacacgccgccagga

SEQ ID NO: 453466 - DNA, 25 bp, Homo sapien
aggaaaagaggaacacgccgccagg

SEQ ID NO: 453467 - DNA, 25 bp, Homo sapien
aagaggaacacgccgccaggagccg

SEQ ID NO: 453468 - DNA, 25 bp, Homo sapien
caaaggacaagccgcgctgagaggc

SEQ ID NO: 453469 - DNA, 25 bp, Homo sapien
gaggcgaagagccggcgttccttac

SEQ ID NO: 453470 - DNA, 25 bp, Homo sapien
tgaggagcgggcgtccggaacaaag

SEQ ID NO: 453471 - DNA, 25 bp, Homo sapien
cgtgcgggatgcagcagcgacccca

SEQ ID NO: 453472 - DNA, 25 bp, Homo sapien
gtcaagtcgagttccccgcgctcgg

SEQ ID NO: 453473 - DNA, 25 bp, Homo sapien
tgttctgtttggcgccggtcaagtc

SEQ ID NO: 453474 - DNA, 25 bp, Homo sapien
ggtcaagtcgagttccccgcgctcg

SEQ ID NO: 453475 - DNA, 25 bp, Homo sapien
tttggcgccggtcaagtcgagttcc

SEQ ID NO: 453476 - DNA, 25 bp, Homo sapien
tccaggaaagccgtgagaaagagat

SEQ ID NO: 453477 - DNA, 25 bp, Homo sapien
gaagatacaaggaattcttcagtct

SEQ ID NO: 453478 - DNA, 25 bp, Homo sapien
agatacaaggaattcttcagtctgg

SEQ ID NO: 453479 - DNA, 25 bp, Homo sapien
gcaggctcatggctaaaaccagttt

SEQ ID NO: 453480 - DNA, 25 bp, Homo sapien
accagtttcaccaagggaagataca

SEQ ID NO: 453481 - DNA, 25 bp, Homo sapien
ctttggtcaagcgtgcagcttcggg

SEQ ID NO: 453482 - DNA, 25 bp, Homo sapien
gagtacaaccatacatatacccttg

SEQ ID NO: 453483 - DNA, 25 bp, Homo sapien
gatgtcccagacagatcacactcac

SEQ ID NO: 453484 - DNA, 25 bp, Homo sapien
tggtcatcctctttggtcaagcgtg

SEQ ID NO: 453485 - DNA, 25 bp, Homo sapien
ttgtcaagttcatttcctggtaaga

SEQ ID NO: 453486 - DNA, 25 bp, Homo sapien
gtcaagttcatttcctggtaagaca

SEQ ID NO: 453487 - DNA, 25 bp, Homo sapien
ctttgtcaagttcatttcctggtaa

SEQ ID NO: 453488 - DNA, 25 bp, Homo sapien
aagttcatttcctggtaagacaatg

SEQ ID NO: 453489 - DNA, 25 bp, Homo sapien
ctcttccagaggctttagcccattg

SEQ ID NO: 453490 - DNA, 25 bp, Homo sapien
tggcaatccgcagtttcccaacttc

SEQ ID NO: 453491 - DNA, 25 bp, Homo sapien
gctttagcccattgctgtgacaaat

SEQ ID NO: 453492 - DNA, 25 bp, Homo sapien
aggctttagcccattgctgtgacaa

SEQ ID NO: 453493 - DNA, 25 bp, Homo sapien
tcagcggtcaattctagtaggtcag

SEQ ID NO: 453494 - DNA, 25 bp, Homo sapien
tcaagtctaggttaatggttaaatc

SEQ ID NO: 453495 - DNA, 25 bp, Homo sapien
tggttggctctaggtccgtggtcaa

SEQ ID NO: 453496 - DNA, 25 bp, Homo sapien
cttggtctgtggttaactctagatc

SEQ ID NO: 453497 - DNA, 25 bp, Homo sapien
gatttgtatggagagtaatctggag

SEQ ID NO: 453498 - DNA, 25 bp, Homo sapien
cccaaaatgatttgtatggagagta

SEQ ID NO: 453499 - DNA, 25 bp, Homo sapien
tatggagagtaatctggaggcttac

SEQ ID NO: 453500 - DNA, 25 bp, Homo sapien
gagagtaatctggaggcttacatac

SEQ ID NO: 453501 - DNA, 25 bp, Homo sapien
actgaagctggttttccaccaatat

SEQ ID NO: 453502 - DNA, 25 bp, Homo sapien
gacaaatggatgttctctaggagca

SEQ ID NO: 453503 - DNA, 25 bp, Homo sapien
aaatactgttaatgtctgtcctcca

SEQ ID NO: 453504 - DNA, 25 bp, Homo sapien
ttgcaagacaaatggatgttctcta

SEQ ID NO: 453505 - DNA, 25 bp, Homo sapien
ctgggccacagattcctctgagatt

SEQ ID NO: 453506 - DNA, 25 bp, Homo sapien
catgaccaaccaaggttaaaactag

SEQ ID NO: 453507 - DNA, 25 bp, Homo sapien
tcatgaccaaccaaggttaaaacta

SEQ ID NO: 453508 - DNA, 25 bp, Homo sapien
taatgggacaaaacgagctaaccta

SEQ ID NO: 453509 - DNA, 25 bp, Homo sapien
taaccatgagatacagtcctctgcc

SEQ ID NO: 453510 - DNA, 25 bp, Homo sapien
tgctcaatgctatactaggcaccgt

SEQ ID NO: 453511 - DNA, 25 bp, Homo sapien
taggcaccgtggagataaccatgag

SEQ ID NO: 453512 - DNA, 25 bp, Homo sapien
gagaggtagatatgacagtagtaac

SEQ ID NO: 453513 - DNA, 25 bp, Homo sapien
tagatatgacagtagtaactccagc

SEQ ID NO: 453514 - DNA, 25 bp, Homo sapien
ttgatgcctgagaggtagatatgac

SEQ ID NO: 453515 - DNA, 25 bp, Homo sapien
tatgacagtagtaactccagcagtc

SEQ ID NO: 453516 - DNA, 25 bp, Homo sapien
tgtaccctagcctgggtgaccaaga

SEQ ID NO: 453517 - DNA, 25 bp, Homo sapien
gtaccctagcctgggtgaccaagaa

SEQ ID NO: 453518 - DNA, 25 bp, Homo sapien
actgtaccctagcctgggtgaccaa

SEQ ID NO: 453519 - DNA, 25 bp, Homo sapien
ccactgtaccctagcctgggtgacc

SEQ ID NO: 453520 - DNA, 25 bp, Homo sapien
aaagtgtggctttagactgctgacc

SEQ ID NO: 453521 - DNA, 25 bp, Homo sapien
tccaaagggtcaattgttcacagcg

SEQ ID NO: 453522 - DNA, 25 bp, Homo sapien
gcatgcagccagcaagcttcggaaa

SEQ ID NO: 453523 - DNA, 25 bp, Homo sapien
aaatggcactcgacttgtactaaag

SEQ ID NO: 453524 - DNA, 25 bp, Homo sapien
cctgtgtcgacactctctgggaaaa

SEQ ID NO: 453525 - DNA, 25 bp, Homo sapien
cagaccagaggactactgaccaaca

SEQ ID NO: 453526 - DNA, 25 bp, Homo sapien
gaggcctttaagagaacttccagct

SEQ ID NO: 453527 - DNA, 25 bp, Homo sapien
tgatcctccagacctcgaagttact

SEQ ID NO: 453528 - DNA, 25 bp, Homo sapien
gaaaagactcaggaaattccctggc

SEQ ID NO: 453529 - DNA, 25 bp, Homo sapien
tatttccacaagaattcacctgggt

SEQ ID NO: 453530 - DNA, 25 bp, Homo sapien
aatgtctgctatgcaaaaggcccca

SEQ ID NO: 453531 - DNA, 25 bp, Homo sapien
gacacagtactgttttcaagaagca

SEQ ID NO: 453532 - DNA, 25 bp, Homo sapien
caaaggctagcatctattgtgtgcc

SEQ ID NO: 453533 - DNA, 25 bp, Homo sapien
gcctactggccaccaagcattgtgg

SEQ ID NO: 453534 - DNA, 25 bp, Homo sapien
tattgtgtaccagttcagcctgcca

SEQ ID NO: 453535 - DNA, 25 bp, Homo sapien
gacactgggcaggtctactgtctgg

SEQ ID NO: 453536 - DNA, 25 bp, Homo sapien
gaaaacacagctagtctaaaccact

SEQ ID NO: 453537 - DNA, 25 bp, Homo sapien
ttcttggcttagtaacaaactgggc

SEQ ID NO: 453538 - DNA, 25 bp, Homo sapien
gatttgtttattaggctgctgtggc

SEQ ID NO: 453539 - DNA, 25 bp, Homo sapien
taaaggctatcgtctttgacaaaga

SEQ ID NO: 453540 - DNA, 25 bp, Homo sapien
ttttaatcgcatgtagttttcactg

SEQ ID NO: 453541 - DNA, 25 bp, Homo sapien
cactattccttccaatgacagctta

SEQ ID NO: 453542 - DNA, 25 bp, Homo sapien
cagctctttgtaccactattccttc

SEQ ID NO: 453543 - DNA, 25 bp, Homo sapien
cactggcagctggtcggcattcagc

SEQ ID NO: 453544 - DNA, 25 bp, Homo sapien
catgccagtgctcaagtagttttgg

SEQ ID NO: 453545 - DNA, 25 bp, Homo sapien
caacctgtatcccattcaatatttg

SEQ ID NO: 453546 - DNA, 25 bp, Homo sapien
ataatcatatgggaacctgtgtttc

SEQ ID NO: 453547 - DNA, 25 bp, Homo sapien
taacatttgaagtctgaaatgagca

SEQ ID NO: 453548 - DNA, 25 bp, Homo sapien
ggaaccatggtactaacaatgttgg

SEQ ID NO: 453549 - DNA, 25 bp, Homo sapien
caatcatgctatcaaagttcgcttt

SEQ ID NO: 453550 - DNA, 25 bp, Homo sapien
tgaaggtcattcaataagagggagg

SEQ ID NO: 453551 - DNA, 25 bp, Homo sapien
tattttataatgtaacggaaccatg

SEQ ID NO: 453552 - DNA, 25 bp, Homo sapien
tcattgtgatcaaaccctgggcagc

SEQ ID NO: 453553 - DNA, 25 bp, Homo sapien
ctactgggaatactgctcattggca

SEQ ID NO: 453554 - DNA, 25 bp, Homo sapien
taatggagccgcgttctactgggaa

SEQ ID NO: 453555 - DNA, 25 bp, Homo sapien
gtatttatcacgcacctactaggtg

SEQ ID NO: 453556 - DNA, 25 bp, Homo sapien
aggtcggaggcaaaaagttcagacg

SEQ ID NO: 453557 - DNA, 25 bp, Homo sapien
gataaggtcggaggcaaaaagttca

SEQ ID NO: 453558 - DNA, 25 bp, Homo sapien
tcggaggcaaaaagttcagacggta

SEQ ID NO: 453559 - DNA, 25 bp, Homo sapien
taaggtcggaggcaaaaagttcaga

SEQ ID NO: 453560 - DNA, 25 bp, Homo sapien
aaacccttggaattacaatattgat

SEQ ID NO: 453561 - DNA, 25 bp, Homo sapien
aacccttggaattacaatattgatt

SEQ ID NO: 453562 - DNA, 25 bp, Homo sapien
tgaagcttgggctgtaaaacccttg

SEQ ID NO: 453563 - DNA, 25 bp, Homo sapien
caggccaacgttattcttataggaa

SEQ ID NO: 453564 - DNA, 25 bp, Homo sapien
ccaacaggccaacgttattcttata

SEQ ID NO: 453565 - DNA, 25 bp, Homo sapien
tataggaaagattaattattggtag

SEQ ID NO: 453566 - DNA, 25 bp, Homo sapien
cttataggaaagattaattattggt

SEQ ID NO: 453567 - DNA, 25 bp, Homo sapien
tatagctgggaaacttcttaaatgc

SEQ ID NO: 453568 - DNA, 25 bp, Homo sapien
gcaccactgtcccaatattaagggt

SEQ ID NO: 453569 - DNA, 25 bp, Homo sapien
caaataagtacaacaggcaccactg

SEQ ID NO: 453570 - DNA, 25 bp, Homo sapien
tgctctggctttctaatcacggttg

SEQ ID NO: 453571 - DNA, 25 bp, Homo sapien
ccccttctttgtatggcaaactcat

SEQ ID NO: 453572 - DNA, 25 bp, Homo sapien
tatggcaaactcatcccttgggcca

SEQ ID NO: 453573 - DNA, 25 bp, Homo sapien
tctttgtatggcaaactcatccctt

SEQ ID NO: 453574 - DNA, 25 bp, Homo sapien
tgtatggcaaactcatcccttgggc

SEQ ID NO: 453575 - DNA, 25 bp, Homo sapien
taaagtccttgtaatcctgtccact

SEQ ID NO: 453576 - DNA, 25 bp, Homo sapien
gaccttttgatgttacaatgccaca

SEQ ID NO: 453577 - DNA, 25 bp, Homo sapien
taaaccttgagacgaaaagccatgc

SEQ ID NO: 453578 - DNA, 25 bp, Homo sapien
tcagcagtgcttaagacataccaat

SEQ ID NO: 453579 - DNA, 25 bp, Homo sapien
tactcctcaatacatgaccaagtgg

SEQ ID NO: 453580 - DNA, 25 bp, Homo sapien
catctcgaaagttcggattccaaaa

SEQ ID NO: 453581 - DNA, 25 bp, Homo sapien
ttttcctgttaatcacgcactctag

SEQ ID NO: 453582 - DNA, 25 bp, Homo sapien
aaaacgttgagctgatcagggacca

SEQ ID NO: 453583 - DNA, 25 bp, Homo sapien
tatgctttcaaagtcaaggtaaggt

SEQ ID NO: 453584 - DNA, 25 bp, Homo sapien
atatgctttcaaagtcaaggtaagg

SEQ ID NO: 453585 - DNA, 25 bp, Homo sapien
atgctttcaaagtcaaggtaaggtt

SEQ ID NO: 453586 - DNA, 25 bp, Homo sapien
ttgttacaactttgtccagctgttg

SEQ ID NO: 453587 - DNA, 25 bp, Homo sapien
gttgttacaactttgtccagctgtt

SEQ ID NO: 453588 - DNA, 25 bp, Homo sapien
tagactgcctaagttcaacacctgg

SEQ ID NO: 453589 - DNA, 25 bp, Homo sapien
gaagcactcagaccaatacctggca

SEQ ID NO: 453590 - DNA, 25 bp, Homo sapien
tcaccagcggcaacatacacagtgg

SEQ ID NO: 453591 - DNA, 25 bp, Homo sapien
gactgataaattactggctgcacca

SEQ ID NO: 453592 - DNA, 25 bp, Homo sapien
tatgggtcatgtgcactccagttca

SEQ ID NO: 453593 - DNA, 25 bp, Homo sapien
gttcacacagtctctaacactgact

SEQ ID NO: 453594 - DNA, 25 bp, Homo sapien
cagttcacacagtctctaacactga

SEQ ID NO: 453595 - DNA, 25 bp, Homo sapien
gtatttatatgggtcatgtgcactc

SEQ ID NO: 453596 - DNA, 25 bp, Homo sapien
gattcaagtttcagacactcaatga

SEQ ID NO: 453597 - DNA, 25 bp, Homo sapien
gaaaatgctgacctacatgaactga

SEQ ID NO: 453598 - DNA, 25 bp, Homo sapien
agatttaaggtacaggaaatgccac

SEQ ID NO: 453599 - DNA, 25 bp, Homo sapien
cattatacccagatagtttgtgaac

SEQ ID NO: 453600 - DNA, 25 bp, Homo sapien
aacagtgcagaaatggtaatcttaa

SEQ ID NO: 453601 - DNA, 25 bp, Homo sapien
taatccaaattctgctctgtggtat

SEQ ID NO: 453602 - DNA, 25 bp, Homo sapien
tctgtggtatcagataagtagttcc

SEQ ID NO: 453603 - DNA, 25 bp, Homo sapien
tactatattcacaacttgacactac

SEQ ID NO: 453604 - DNA, 25 bp, Homo sapien
gcctcaggtagttagcttactctat

SEQ ID NO: 453605 - DNA, 25 bp, Homo sapien
tagcttcgaaaacaatgggatacat

SEQ ID NO: 453606 - DNA, 25 bp, Homo sapien
taattataatctggggactagcttc

SEQ ID NO: 453607 - DNA, 25 bp, Homo sapien
tccacaaatagcctcaggtagttag

SEQ ID NO: 453608 - DNA, 25 bp, Homo sapien
gtccaccaagtccttaagattatag

SEQ ID NO: 453609 - DNA, 25 bp, Homo sapien
tatagtattgatgtttctcaaaggc

SEQ ID NO: 453610 - DNA, 25 bp, Homo sapien
acaggttgctttgtgatgtccacca

SEQ ID NO: 453611 - DNA, 25 bp, Homo sapien
gctcgagctcgctttccgtcttctt

SEQ ID NO: 453612 - DNA, 25 bp, Homo sapien
agacgtggccctttgatcctggact

SEQ ID NO: 453613 - DNA, 25 bp, Homo sapien
cagacgtggccctttgatcctggac

SEQ ID NO: 453614 - DNA, 25 bp, Homo sapien
taatgttttcttaaacgcagagccc

SEQ ID NO: 453615 - DNA, 25 bp, Homo sapien
tagagatggcaagcccaaaaccaag

SEQ ID NO: 453616 - DNA, 25 bp, Homo sapien
gaacaccgatccaacaccacagaat

SEQ ID NO: 453617 - DNA, 25 bp, Homo sapien
agaaatgggaggcttcgaacaccga

SEQ ID NO: 453618 - DNA, 25 bp, Homo sapien
tcacagtttaagattagtgcagagg

SEQ ID NO: 453619 - DNA, 25 bp, Homo sapien
cagtttaagattagtgcagaggatg

SEQ ID NO: 453620 - DNA, 25 bp, Homo sapien
aaaggcatattacgccgggtgtgat

SEQ ID NO: 453621 - DNA, 25 bp, Homo sapien
agaaaaaggcatattacgccgggtg

SEQ ID NO: 453622 - DNA, 25 bp, Homo sapien
tgtctgtactctggcttcagctccc

SEQ ID NO: 453623 - DNA, 25 bp, Homo sapien
tgtgtttttgtggatcccttttaca

SEQ ID NO: 453624 - DNA, 25 bp, Homo sapien
catgtgtttttgtggatccctttta

SEQ ID NO: 453625 - DNA, 25 bp, Homo sapien
cccatgtgtttttgtggatcccttt

SEQ ID NO: 453626 - DNA, 25 bp, Homo sapien
tgctagtcgtttcactagcatgctg

SEQ ID NO: 453627 - DNA, 25 bp, Homo sapien
tatcagcgccttttgcatagcatcg

SEQ ID NO: 453628 - DNA, 25 bp, Homo sapien
cttccagtatcagcgccttttgcat

SEQ ID NO: 453629 - DNA, 25 bp, Homo sapien
ttttgcatagcatcgctgctagtcg

SEQ ID NO: 453630 - DNA, 25 bp, Homo sapien
tacggcaagggtagagagtcctcac

SEQ ID NO: 453631 - DNA, 25 bp, Homo sapien
ccgagagaaatcaaagtactgtcac

SEQ ID NO: 453632 - DNA, 25 bp, Homo sapien
tattacctcagctccttagatacgg

SEQ ID NO: 453633 - DNA, 25 bp, Homo sapien
tcctactgtgaataatctggtttaa

SEQ ID NO: 453634 - DNA, 25 bp, Homo sapien
gagtatgaacacgaaacgtgatcac

SEQ ID NO: 453635 - DNA, 25 bp, Homo sapien
ttattaacgttgagtatgaacacga

SEQ ID NO: 453636 - DNA, 25 bp, Homo sapien
tccttttattaacgttgagtatgaa

SEQ ID NO: 453637 - DNA, 25 bp, Homo sapien
ctctccttttattaacgttgagtat

SEQ ID NO: 453638 - DNA, 25 bp, Homo sapien
taacgttttctgtctcggctggacc

SEQ ID NO: 453639 - DNA, 25 bp, Homo sapien
caaacactatggcaacttgggcatt

SEQ ID NO: 453640 - DNA, 25 bp, Homo sapien
ttgagaagcttataatctgactggg

SEQ ID NO: 453641 - DNA, 25 bp, Homo sapien
tgatggtcaatacatgtctgctggg

SEQ ID NO: 453642 - DNA, 25 bp, Homo sapien
ctctcaggctgttttggaatgctac

SEQ ID NO: 453643 - DNA, 25 bp, Homo sapien
cagagctgatggaggttagccccgc

SEQ ID NO: 453644 - DNA, 25 bp, Homo sapien
tatgtccactcccacagggtgtgca

SEQ ID NO: 453645 - DNA, 25 bp, Homo sapien
cctgcaagtggtaagtcaggccaac

SEQ ID NO: 453646 - DNA, 25 bp, Homo sapien
tgagcgagtgctcacaaatgtctca

SEQ ID NO: 453647 - DNA, 25 bp, Homo sapien
gcatcactggtgagagaacattatt

SEQ ID NO: 453648 - DNA, 25 bp, Homo sapien
tgtctgaacatatggctgagcgagt

SEQ ID NO: 453649 - DNA, 25 bp, Homo sapien
tctgaagtgctaattggcagtttca

SEQ ID NO: 453650 - DNA, 25 bp, Homo sapien
ttgctttctcaaacatttggtgaat

SEQ ID NO: 453651 - DNA, 25 bp, Homo sapien
tttggtgaatcatcaaagcagaaat

SEQ ID NO: 453652 - DNA, 25 bp, Homo sapien
tcagtaggaaagttactcaaaattg

SEQ ID NO: 453653 - DNA, 25 bp, Homo sapien
cagtaggaaagttactcaaaattgc

SEQ ID NO: 453654 - DNA, 25 bp, Homo sapien
ccaaaccaggacaagtttctccatc

SEQ ID NO: 453655 - DNA, 25 bp, Homo sapien
caaaccaggacaagtttctccatcc

SEQ ID NO: 453656 - DNA, 25 bp, Homo sapien
cccaaaccaggacaagtttctccat

SEQ ID NO: 453657 - DNA, 25 bp, Homo sapien
tgggcaacaatcagattggtctggg

SEQ ID NO: 453658 - DNA, 25 bp, Homo sapien
ccaagatgggcaacaatcagattgg

SEQ ID NO: 453659 - DNA, 25 bp, Homo sapien
gatgggcaacaatcagattggtctg

SEQ ID NO: 453660 - DNA, 25 bp, Homo sapien
caacaatcagattggtctgggaaac

SEQ ID NO: 453661 - DNA, 25 bp, Homo sapien
cggcttttcatacccgttaatggct

SEQ ID NO: 453662 - DNA, 25 bp, Homo sapien
ttatggccatttcctgtgaggtagc

SEQ ID NO: 453663 - DNA, 25 bp, Homo sapien
tgtgtgaaatgcaggttatcttcac

SEQ ID NO: 453664 - DNA, 25 bp, Homo sapien
cctgtgaggtagctagaaatgtgtg

SEQ ID NO: 453665 - DNA, 25 bp, Homo sapien
cagtgctgttatcgcctgcagaaat

SEQ ID NO: 453666 - DNA, 25 bp, Homo sapien
tactcccagtgctgttatcgcctgc

SEQ ID NO: 453667 - DNA, 25 bp, Homo sapien
agttactcccagtgctgttatcgcc

SEQ ID NO: 453668 - DNA, 25 bp, Homo sapien
tcccagtgctgttatcgcctgcaga

SEQ ID NO: 453669 - DNA, 25 bp, Homo sapien
cccgcagagctagaagagttttctg

SEQ ID NO: 453670 - DNA, 25 bp, Homo sapien
ggcgctggaaagtgctgcggccaga

SEQ ID NO: 453671 - DNA, 25 bp, Homo sapien
gagttttctgtgtgaggaccgggcg

SEQ ID NO: 453672 - DNA, 25 bp, Homo sapien
gagccgcacccgcagagctagaaga

SEQ ID NO: 453673 - DNA, 25 bp, Homo sapien
agatcaaccaatcgcaatgtataaa

SEQ ID NO: 453674 - DNA, 25 bp, Homo sapien
aaccaatcgcaatgtataaacctta

SEQ ID NO: 453675 - DNA, 25 bp, Homo sapien
aagatcaaccaatcgcaatgtataa

SEQ ID NO: 453676 - DNA, 25 bp, Homo sapien
tcaaccaatcgcaatgtataaacct

SEQ ID NO: 453677 - DNA, 25 bp, Homo sapien
tgagaggcggatgacatcctgtcgc

SEQ ID NO: 453678 - DNA, 25 bp, Homo sapien
ggcggatgacatcctgtcgctctgg

SEQ ID NO: 453679 - DNA, 25 bp, Homo sapien
gcagcattttcaataggtgacccat

SEQ ID NO: 453680 - DNA, 25 bp, Homo sapien
gggatgccacatgacagcaccgcag

SEQ ID NO: 453681 - DNA, 25 bp, Homo sapien
gaagctagagcctgattgtaggcta

SEQ ID NO: 453682 - DNA, 25 bp, Homo sapien
acatctgaagtgtggagccttaccc

SEQ ID NO: 453683 - DNA, 25 bp, Homo sapien
gattgtaggctactactcatcaatt

SEQ ID NO: 453684 - DNA, 25 bp, Homo sapien
aaaggttctgattttgagttgcaat

SEQ ID NO: 453685 - DNA, 25 bp, Homo sapien
tccggcagacgatgagatgttctcc

SEQ ID NO: 453686 - DNA, 25 bp, Homo sapien
catctacaagatccgggagatcgcg

SEQ ID NO: 453687 - DNA, 25 bp, Homo sapien
tcttatccgtgaactattggcgtgg

SEQ ID NO: 453688 - DNA, 25 bp, Homo sapien
gacatgatgcttccggcttaggagc

SEQ ID NO: 453689 - DNA, 25 bp, Homo sapien
cgtgctaagctagcgccgtcgtcgt

SEQ ID NO: 453690 - DNA, 25 bp, Homo sapien
gtctcccttcagtcgccatcatgat

SEQ ID NO: 453691 - DNA, 25 bp, Homo sapien
catgattatctaccgggacctcatc

SEQ ID NO: 453692 - DNA, 25 bp, Homo sapien
ctccgagtttcaggctcgtgctaag

SEQ ID NO: 453693 - DNA, 25 bp, Homo sapien
gacgtgccctctatatgaggttggg

SEQ ID NO: 453694 - DNA, 25 bp, Homo sapien
ctgagtcggccttttccgcccgctc

SEQ ID NO: 453695 - DNA, 25 bp, Homo sapien
ggcgcagcgggcgatgacgtagagg

SEQ ID NO: 453696 - DNA, 25 bp, Homo sapien
gcctgcgtcgcttccggaggcgcag

SEQ ID NO: 453697 - DNA, 25 bp, Homo sapien
ccgctggcgtgcccagtggaacgga

SEQ ID NO: 453698 - DNA, 25 bp, Homo sapien
cgctggcgtgcccagtggaacggag

SEQ ID NO: 453699 - DNA, 25 bp, Homo sapien
cagaaaagggtggaacctaggctgg

SEQ ID NO: 453700 - DNA, 25 bp, Homo sapien
tttaattcctctaagctccacccag

SEQ ID NO: 453701 - DNA, 25 bp, Homo sapien
gaggcgcagggccaaagtttaattc

SEQ ID NO: 453702 - DNA, 25 bp, Homo sapien
gggtggaacctaggctggacgaggc

SEQ ID NO: 453703 - DNA, 25 bp, Homo sapien
tatgccaaagatgtgacgatgtgac

SEQ ID NO: 453704 - DNA, 25 bp, Homo sapien
atggaaaccctgtgcagactcccgt

SEQ ID NO: 453705 - DNA, 25 bp, Homo sapien
cagggtttcagtagttgcctcccaa

SEQ ID NO: 453706 - DNA, 25 bp, Homo sapien
tgtgtgaccctctagcaccagggat

SEQ ID NO: 453707 - DNA, 25 bp, Homo sapien
agttactttcaagatgtgactgttg

SEQ ID NO: 453708 - DNA, 25 bp, Homo sapien
tcctgcagttgcctcaagttacttt

SEQ ID NO: 453709 - DNA, 25 bp, Homo sapien
gttactttcaagatgtgactgttga

SEQ ID NO: 453710 - DNA, 25 bp, Homo sapien
cctgcagttgcctcaagttactttc

SEQ ID NO: 453711 - DNA, 25 bp, Homo sapien
aatagccggaactacagccgcctac

SEQ ID NO: 453712 - DNA, 25 bp, Homo sapien
tcaggcctcaaccacccgaatagcc

SEQ ID NO: 453713 - DNA, 25 bp, Homo sapien
accacccgaatagccggaactacag

SEQ ID NO: 453714 - DNA, 25 bp, Homo sapien
tcaaccacccgaatagccggaacta

SEQ ID NO: 453715 - DNA, 25 bp, Homo sapien
agttgctatcggcagctctctgagg

SEQ ID NO: 453716 - DNA, 25 bp, Homo sapien
gaaacttttaacactctgtagagga

SEQ ID NO: 453717 - DNA, 25 bp, Homo sapien
catgtacatctagtaggagtgaacc

SEQ ID NO: 453718 - DNA, 25 bp, Homo sapien
gaacctgatacatcgtgattgcgtc

SEQ ID NO: 453719 - DNA, 25 bp, Homo sapien
gtcttataaagtattaggaagtcac

SEQ ID NO: 453720 - DNA, 25 bp, Homo sapien
agtcacttgctcacagagtctctga

SEQ ID NO: 453721 - DNA, 25 bp, Homo sapien
taggaagtcacttgctcacagagtc

SEQ ID NO: 453722 - DNA, 25 bp, Homo sapien
aagtattaggaagtcacttgctcac

SEQ ID NO: 453723 - DNA, 25 bp, Homo sapien
agtggaggcttcagtaagtcgtgat

SEQ ID NO: 453724 - DNA, 25 bp, Homo sapien
cttcagtaagtcgtgatggtgccat

SEQ ID NO: 453725 - DNA, 25 bp, Homo sapien
gaggcttcagtaagtcgtgatggtg

SEQ ID NO: 453726 - DNA, 25 bp, Homo sapien
tcagtaagtcgtgatggtgccattg

SEQ ID NO: 453727 - DNA, 25 bp, Homo sapien
ggttacacaacattgggaatgtaac

SEQ ID NO: 453728 - DNA, 25 bp, Homo sapien
gttacacaacattgggaatgtaact

SEQ ID NO: 453729 - DNA, 25 bp, Homo sapien
tgaatgcttgaaaattgctgccaga

SEQ ID NO: 453730 - DNA, 25 bp, Homo sapien
gcttgaaaattgctgccagatattt

SEQ ID NO: 453731 - DNA, 25 bp, Homo sapien
ccttcacatctcttttgaatgcttg

SEQ ID NO: 453732 - DNA, 25 bp, Homo sapien
acgcctggcctgtttgagacagagt

SEQ ID NO: 453733 - DNA, 25 bp, Homo sapien
agggagcccatgtgcttgtctaagt

SEQ ID NO: 453734 - DNA, 25 bp, Homo sapien
tctacactagcaggtgacgggtggc

SEQ ID NO: 453735 - DNA, 25 bp, Homo sapien
tattcatttgtctacactagcaggt

SEQ ID NO: 453736 - DNA, 25 bp, Homo sapien
tcagtgtcaaagtctaggctggtat

SEQ ID NO: 453737 - DNA, 25 bp, Homo sapien
cggatgatgctatctagggagaaca

SEQ ID NO: 453738 - DNA, 25 bp, Homo sapien
gaggctgttggataaatcaccggca

SEQ ID NO: 453739 - DNA, 25 bp, Homo sapien
tgaaattcagagacgtccaggctag

SEQ ID NO: 453740 - DNA, 25 bp, Homo sapien
gagttaaatgagatgccggtgatac

SEQ ID NO: 453741 - DNA, 25 bp, Homo sapien
gcagaggctagagtgagccatgatt

SEQ ID NO: 453742 - DNA, 25 bp, Homo sapien
attagccgagtatggtggtgtcacc

SEQ ID NO: 453743 - DNA, 25 bp, Homo sapien
ggcagaggctagagtgagccatgat

SEQ ID NO: 453744 - DNA, 25 bp, Homo sapien
agccgagtatggtggtgtcacctgt

SEQ ID NO: 453745 - DNA, 25 bp, Homo sapien
aggtcacttgagtttaggagctgga

SEQ ID NO: 453746 - DNA, 25 bp, Homo sapien
aggtaggtcacttgagtttaggagc

SEQ ID NO: 453747 - DNA, 25 bp, Homo sapien
ggcaggtaggtcacttgagtttagg

SEQ ID NO: 453748 - DNA, 25 bp, Homo sapien
taggtcacttgagtttaggagctgg

SEQ ID NO: 453749 - DNA, 25 bp, Homo sapien
gacatggaatgagccaggcaaagca

SEQ ID NO: 453750 - DNA, 25 bp, Homo sapien
cagagagggattccaagtggcttca

SEQ ID NO: 453751 - DNA, 25 bp, Homo sapien
ccaagtggcttcatgagttctcaga

SEQ ID NO: 453752 - DNA, 25 bp, Homo sapien
ccggtgtgcggtgctcaggagtggc

SEQ ID NO: 453753 - DNA, 25 bp, Homo sapien
aggttttgagagctctattttagga

SEQ ID NO: 453754 - DNA, 25 bp, Homo sapien
tccttggagctgacctgaagtgaag

SEQ ID NO: 453755 - DNA, 25 bp, Homo sapien
caggttttgagagctctattttagg

SEQ ID NO: 453756 - DNA, 25 bp, Homo sapien
ggcctagccctatctttaccattag

SEQ ID NO: 453757 - DNA, 25 bp, Homo sapien
acaagttgtcatggggggtagtaca

SEQ ID NO: 453758 - DNA, 25 bp, Homo sapien
ggatcgcgcagctaaaaagcaacag

SEQ ID NO: 453759 - DNA, 25 bp, Homo sapien
gggtagtacacagaaggatcgcgca

SEQ ID NO: 453760 - DNA, 25 bp, Homo sapien
cccatgtttgaaggccacggcatca

SEQ ID NO: 453761 - DNA, 25 bp, Homo sapien
tcaatgagtccactagggaagtcca

SEQ ID NO: 453762 - DNA, 25 bp, Homo sapien
taatagtagggttctaggctgctcc

SEQ ID NO: 453763 - DNA, 25 bp, Homo sapien
catttggatgagctacagacagacc

SEQ ID NO: 453764 - DNA, 25 bp, Homo sapien
ctatccgacagcggtccaagacagg

SEQ ID NO: 453765 - DNA, 25 bp, Homo sapien
cgacagcggtccaagacaggggtcc

SEQ ID NO: 453766 - DNA, 25 bp, Homo sapien
cagcggtccaagacaggggtccaaa

SEQ ID NO: 453767 - DNA, 25 bp, Homo sapien
tatccgacagcggtccaagacaggg

SEQ ID NO: 453768 - DNA, 25 bp, Homo sapien
aaagctcaaatctgccgacggcagg

SEQ ID NO: 453769 - DNA, 25 bp, Homo sapien
gactctgggtattaggtgtccaaga

SEQ ID NO: 453770 - DNA, 25 bp, Homo sapien
caaatctgccgacggcaggtacctt

SEQ ID NO: 453771 - DNA, 25 bp, Homo sapien
aagaaagctcaaatctgccgacggc

SEQ ID NO: 453772 - DNA, 25 bp, Homo sapien
tgcgttatagacagaaaagatggca

SEQ ID NO: 453773 - DNA, 25 bp, Homo sapien
ccattgtatgcgttatagacagaaa

SEQ ID NO: 453774 - DNA, 25 bp, Homo sapien
tgtatgcgttatagacagaaaagat

SEQ ID NO: 453775 - DNA, 25 bp, Homo sapien
tccattgtatgcgttatagacagaa

SEQ ID NO: 453776 - DNA, 25 bp, Homo sapien
tactctccgacgggtccgatgccgc

SEQ ID NO: 453777 - DNA, 25 bp, Homo sapien
actctccgacgggtccgatgccgcc

SEQ ID NO: 453778 - DNA, 25 bp, Homo sapien
tctccgacgggtccgatgccgcccg

SEQ ID NO: 453779 - DNA, 25 bp, Homo sapien
ctccgacgggtccgatgccgcccgg

SEQ ID NO: 453780 - DNA, 25 bp, Homo sapien
caggtgagggaattctcaggggctg

SEQ ID NO: 453781 - DNA, 25 bp, Homo sapien
acgggtcgatgccacccgggaacag

SEQ ID NO: 453782 - DNA, 25 bp, Homo sapien
gatttactctccgacgggtcgatgc

SEQ ID NO: 453783 - DNA, 25 bp, Homo sapien
tttactctccgacgggtcgatgcca

SEQ ID NO: 453784 - DNA, 25 bp, Homo sapien
tccgacgggtcgatgccacccggga

SEQ ID NO: 453785 - DNA, 25 bp, Homo sapien
cggtggcctagttgtctaaacaact

SEQ ID NO: 453786 - DNA, 25 bp, Homo sapien
tggcccctcatgtttgagggccgtg

SEQ ID NO: 453787 - DNA, 25 bp, Homo sapien
agttgtctaaacaactagagagggt

SEQ ID NO: 453788 - DNA, 25 bp, Homo sapien
cgtggcatcaactgccctgatagta

SEQ ID NO: 453789 - DNA, 25 bp, Homo sapien
tcaaatctgctgacggcaggtacct

SEQ ID NO: 453790 - DNA, 25 bp, Homo sapien
aagctcaaatctgctgacggcaggt

SEQ ID NO: 453791 - DNA, 25 bp, Homo sapien
aagaaagctcaaatctgctgacggc

SEQ ID NO: 453792 - DNA, 25 bp, Homo sapien
aatctgctgacggcaggtaccttgc

SEQ ID NO: 453793 - DNA, 25 bp, Homo sapien
agcaggttatttacaatctaccgga

SEQ ID NO: 453794 - DNA, 25 bp, Homo sapien
aaagcaggttatttacaatctaccg

SEQ ID NO: 453795 - DNA, 25 bp, Homo sapien
caggttatttacaatctaccggagc

SEQ ID NO: 453796 - DNA, 25 bp, Homo sapien
ggtccgaacgcagcccgggaacaga

SEQ ID NO: 453797 - DNA, 25 bp, Homo sapien
aatctgctgacggcaggtaccttgc

SEQ ID NO: 453798 - DNA, 25 bp, Homo sapien
tcaaatctgctgacggcaggtacct

SEQ ID NO: 453799 - DNA, 25 bp, Homo sapien
aagctcaaatctgctgacggcaggt

SEQ ID NO: 453800 - DNA, 25 bp, Homo sapien
aagaaagctcaaatctgctgacggc

SEQ ID NO: 453801 - DNA, 25 bp, Homo sapien
tcccaagaacagaaagtctttcagg

SEQ ID NO: 453802 - DNA, 25 bp, Homo sapien
caggtgagggaattctcaggggctg

SEQ ID NO: 453803 - DNA, 25 bp, Homo sapien
tggaatggggatcccaagaacagaa

SEQ ID NO: 453804 - DNA, 25 bp, Homo sapien
ggctacccgatctggcaaaggcttt

SEQ ID NO: 453805 - DNA, 25 bp, Homo sapien
tccaatctgccgacggcaggtacct

SEQ ID NO: 453806 - DNA, 25 bp, Homo sapien
ggtccgaacgcagcccgggaacaga

SEQ ID NO: 453807 - DNA, 25 bp, Homo sapien
ccaagaagaaagctccaatctgccg

SEQ ID NO: 453808 - DNA, 25 bp, Homo sapien
acttgggagttactatccgacaggg

SEQ ID NO: 453809 - DNA, 25 bp, Homo sapien
tcggatttactctccgacaggggtc

SEQ ID NO: 453810 - DNA, 25 bp, Homo sapien
ggtccgaacgcagcccgggaacaga

SEQ ID NO: 453811 - DNA, 25 bp, Homo sapien
ccgaacgcagcccgggaacagaaag

SEQ ID NO: 453812 - DNA, 25 bp, Homo sapien
gcaggtcatttgcaatctaccggag

SEQ ID NO: 453813 - DNA, 25 bp, Homo sapien
tgcggatcctaagaaccttaggacc

SEQ ID NO: 453814 - DNA, 25 bp, Homo sapien
ccattgcggatcctaagaaccttag

SEQ ID NO: 453815 - DNA, 25 bp, Homo sapien
cctaagaaccttaggacccatctgg

SEQ ID NO: 453816 - DNA, 25 bp, Homo sapien
agaaccttaggacccatctggagga

SEQ ID NO: 453817 - DNA, 25 bp, Homo sapien
gacccctggcggtttgcagcaaatc

SEQ ID NO: 453818 - DNA, 25 bp, Homo sapien
catttctaggagttcagtggcctga

SEQ ID NO: 453819 - DNA, 25 bp, Homo sapien
tgccctggcccatttacgaaggaat

SEQ ID NO: 453820 - DNA, 25 bp, Homo sapien
gtatggagccttcaaccagccctga

SEQ ID NO: 453821 - DNA, 25 bp, Homo sapien
cagttactttcatgggcagcagggc

SEQ ID NO: 453822 - DNA, 25 bp, Homo sapien
tgaacaattttgcagacctggagcc

SEQ ID NO: 453823 - DNA, 25 bp, Homo sapien
aaaaaatgtgcggaggagagctcca

SEQ ID NO: 453824 - DNA, 25 bp, Homo sapien
tagcgggtatcctctgcctgctggg

SEQ ID NO: 453825 - DNA, 25 bp, Homo sapien
tctgttcaccactaggtaggagggc

SEQ ID NO: 453826 - DNA, 25 bp, Homo sapien
acaagttgggatcacgttcatgcag

SEQ ID NO: 453827 - DNA, 25 bp, Homo sapien
ggcccagaggacactccctttaatg

SEQ ID NO: 453828 - DNA, 25 bp, Homo sapien
aagttagccacctgacccttgtggg

SEQ ID NO: 453829 - DNA, 25 bp, Homo sapien
aacgactgcagacacgccaccttta

SEQ ID NO: 453830 - DNA, 25 bp, Homo sapien
tttccttagtcagccagaccaccaa

SEQ ID NO: 453831 - DNA, 25 bp, Homo sapien
agagaggaacaaacgactgcagaca

SEQ ID NO: 453832 - DNA, 25 bp, Homo sapien
tcatttccttagtcagccagaccac

SEQ ID NO: 453833 - DNA, 25 bp, Homo sapien
ttttcatgcttgtgagaggctccca

SEQ ID NO: 453834 - DNA, 25 bp, Homo sapien
caaaaaaccgctgtggccatgtaac

SEQ ID NO: 453835 - DNA, 25 bp, Homo sapien
ggttagagcagatcccacaactggg

SEQ ID NO: 453836 - DNA, 25 bp, Homo sapien
cctgtatctatacgcgggcatggcc

SEQ ID NO: 453837 - DNA, 25 bp, Homo sapien
aatatgcacagtaaatccatgtctt

SEQ ID NO: 453838 - DNA, 25 bp, Homo sapien
tatggatctgctaatatgcacagta

SEQ ID NO: 453839 - DNA, 25 bp, Homo sapien
ttccagtatggatctgctaatatgc

SEQ ID NO: 453840 - DNA, 25 bp, Homo sapien
ccagtatggatctgctaatatgcac

SEQ ID NO: 453841 - DNA, 25 bp, Homo sapien
tgtaagtggtgtatatgaaacctcc

SEQ ID NO: 453842 - DNA, 25 bp, Homo sapien
gtaagtggtgtatatgaaacctcca

SEQ ID NO: 453843 - DNA, 25 bp, Homo sapien
taagtggtgtatatgaaacctccat

SEQ ID NO: 453844 - DNA, 25 bp, Homo sapien
tgatagacactcaccagaatatggc

SEQ ID NO: 453845 - DNA, 25 bp, Homo sapien
gacaaagatgagattcgccactgga

SEQ ID NO: 453846 - DNA, 25 bp, Homo sapien
gattatgatcatgcacaggctgagg

SEQ ID NO: 453847 - DNA, 25 bp, Homo sapien
cgaattccgggatctgaacaaggac

SEQ ID NO: 453848 - DNA, 25 bp, Homo sapien
gctgccacgtgatgagagaagattc

SEQ ID NO: 453849 - DNA, 25 bp, Homo sapien
gaagattcaaagctgcagacctcaa

SEQ ID NO: 453850 - DNA, 25 bp, Homo sapien
tactccggaggagttcactgccttt

SEQ ID NO: 453851 - DNA, 25 bp, Homo sapien
tggtgacctgacagctactccggag

SEQ ID NO: 453852 - DNA, 25 bp, Homo sapien
taggaaaccccgcagagtttcatga

SEQ ID NO: 453853 - DNA, 25 bp, Homo sapien
aggaaaccccgcagagtttcatgat

SEQ ID NO: 453854 - DNA, 25 bp, Homo sapien
ggaaaccccgcagagtttcatgatt

SEQ ID NO: 453855 - DNA, 25 bp, Homo sapien
gaaaccccgcagagtttcatgattc

SEQ ID NO: 453856 - DNA, 25 bp, Homo sapien
tacaaacaagccacctatggttact

SEQ ID NO: 453857 - DNA, 25 bp, Homo sapien
tggatcaaacgggtgcagaaaagat

SEQ ID NO: 453858 - DNA, 25 bp, Homo sapien
gataatgtcgccaaagtctggaagg

SEQ ID NO: 453859 - DNA, 25 bp, Homo sapien
tctggaaggattatgatagggacaa

SEQ ID NO: 453860 - DNA, 25 bp, Homo sapien
tcgaatcgacaatgatgggtatggc

SEQ ID NO: 453861 - DNA, 25 bp, Homo sapien
cctgaggacaaccagagcttccagt

SEQ ID NO: 453862 - DNA, 25 bp, Homo sapien
gcttccagtacgaccacgaggcctt

SEQ ID NO: 453863 - DNA, 25 bp, Homo sapien
aaggaggactccaagaacttcgacg

SEQ ID NO: 453864 - DNA, 25 bp, Homo sapien
cattcccgagctgccgctgttgtcg

SEQ ID NO: 453865 - DNA, 25 bp, Homo sapien
aacataaaacttggccgccgcgctc

SEQ ID NO: 453866 - DNA, 25 bp, Homo sapien
ccccattcccgagctgccgctgttg

SEQ ID NO: 453867 - DNA, 25 bp, Homo sapien
taacataaaacttggccgccgcgct

SEQ ID NO: 453868 - DNA, 25 bp, Homo sapien
ctgtcagctagtgttcagttcaggc

SEQ ID NO: 453869 - DNA, 25 bp, Homo sapien
gaaatcaaaacgtctgtcagctagt

SEQ ID NO: 453870 - DNA, 25 bp, Homo sapien
caatggtgcatggtcatggcttgag

SEQ ID NO: 453871 - DNA, 25 bp, Homo sapien
ccacgattccgtgatggtcaaagaa

SEQ ID NO: 453872 - DNA, 25 bp, Homo sapien
tatggcccctctgtataatgcttgc

SEQ ID NO: 453873 - DNA, 25 bp, Homo sapien
taatgcttgccacgttcttcatgag

SEQ ID NO: 453874 - DNA, 25 bp, Homo sapien
tagtggaaccatgagtaccaagagc

SEQ ID NO: 453875 - DNA, 25 bp, Homo sapien
tagattcattctgtagcaaaggagg

SEQ ID NO: 453876 - DNA, 25 bp, Homo sapien
tggttgcctccatatgaagagcagt

SEQ ID NO: 453877 - DNA, 25 bp, Homo sapien
aaatcctcacttggatggtggcacc

SEQ ID NO: 453878 - DNA, 25 bp, Homo sapien
tacggagattcccatgtacccctgt

SEQ ID NO: 453879 - DNA, 25 bp, Homo sapien
gccggccgctggtgtgtctcaaatg

SEQ ID NO: 453880 - DNA, 25 bp, Homo sapien
cagggatccttggtcaactgtggac

SEQ ID NO: 453881 - DNA, 25 bp, Homo sapien
ggataatcttactcattgcctggca

SEQ ID NO: 453882 - DNA, 25 bp, Homo sapien
tacatacatgttcctaccaaggtgg

SEQ ID NO: 453883 - DNA, 25 bp, Homo sapien
tagaaatagtgttgcagctgcagac

SEQ ID NO: 453884 - DNA, 25 bp, Homo sapien
ttctccttccacagtagtgcggcca

SEQ ID NO: 453885 - DNA, 25 bp, Homo sapien
aattcccagtctggccagtctcttt

SEQ ID NO: 453886 - DNA, 25 bp, Homo sapien
ctctttgttgagactgaatagaagg

SEQ ID NO: 453887 - DNA, 25 bp, Homo sapien
taaaagatgactgtgagaaccccaa

SEQ ID NO: 453888 - DNA, 25 bp, Homo sapien
aacagacatggaagaatgaagggtt

SEQ ID NO: 453889 - DNA, 25 bp, Homo sapien
cagacatggaagaatgaagggtttt

SEQ ID NO: 453890 - DNA, 25 bp, Homo sapien
acagacatggaagaatgaagggttt

SEQ ID NO: 453891 - DNA, 25 bp, Homo sapien
gagacttggtccttggaatatcatt

SEQ ID NO: 453892 - DNA, 25 bp, Homo sapien
catgctcagcctcaaacacaagttt

SEQ ID NO: 453893 - DNA, 25 bp, Homo sapien
catttgtgacttcctcatcggttgg

SEQ ID NO: 453894 - DNA, 25 bp, Homo sapien
gggacacatcattgcttccagggct

SEQ ID NO: 453895 - DNA, 25 bp, Homo sapien
cagctgttgaatgccctgtgctggg

SEQ ID NO: 453896 - DNA, 25 bp, Homo sapien
attaaataagagaaacggctgggag

SEQ ID NO: 453897 - DNA, 25 bp, Homo sapien
gtggctcaggcctgtaatcccagca

SEQ ID NO: 453898 - DNA, 25 bp, Homo sapien
taaataagagaaacggctgggagcg

SEQ ID NO: 453899 - DNA, 25 bp, Homo sapien
caagaattaaataagagaaacggct

SEQ ID NO: 453900 - DNA, 25 bp, Homo sapien
ttgccgttgcgaagctttgtgaccg

SEQ ID NO: 453901 - DNA, 25 bp, Homo sapien
aaacaatgttggcactgccctgcgg

SEQ ID NO: 453902 - DNA, 25 bp, Homo sapien
cctggaaagttaatgtacctctggg

SEQ ID NO: 453903 - DNA, 25 bp, Homo sapien
tgaccgcgggctcagttaattaacg

SEQ ID NO: 453904 - DNA, 25 bp, Homo sapien
ggtcattcagatccgagtgcgaagc

SEQ ID NO: 453905 - DNA, 25 bp, Homo sapien
attcagatccgagtgcgaagcccgt

SEQ ID NO: 453906 - DNA, 25 bp, Homo sapien
tccagggtcattcagatccgagtgc

SEQ ID NO: 453907 - DNA, 25 bp, Homo sapien
gatccgagtgcgaagcccgtcctgg

SEQ ID NO: 453908 - DNA, 25 bp, Homo sapien
ggacagggctctgcttctcgggctg

SEQ ID NO: 453909 - DNA, 25 bp, Homo sapien
gctgctgcctccttgggtcgggccg

SEQ ID NO: 453910 - DNA, 25 bp, Homo sapien
gacagggctctgcttctcgggctgc

SEQ ID NO: 453911 - DNA, 25 bp, Homo sapien
ctccttgggtcgggccggtgccgcg

SEQ ID NO: 453912 - DNA, 25 bp, Homo sapien
gctcggggctgcctgtgctctccac

SEQ ID NO: 453913 - DNA, 25 bp, Homo sapien
cgggcgtgctcggggctgcctgtgc

SEQ ID NO: 453914 - DNA, 25 bp, Homo sapien
cgtgctcggggctgcctgtgctctc

SEQ ID NO: 453915 - DNA, 25 bp, Homo sapien
ggcgtgctcggggctgcctgtgctc

SEQ ID NO: 453916 - DNA, 25 bp, Homo sapien
aactgagtccgggttggaggaggtg

SEQ ID NO: 453917 - DNA, 25 bp, Homo sapien
aggtaagtcctggcccgtgcctcct

SEQ ID NO: 453918 - DNA, 25 bp, Homo sapien
taaggttgggctgcgatttccgagg

SEQ ID NO: 453919 - DNA, 25 bp, Homo sapien
gccgctgccgccaggtaagtcctgg

SEQ ID NO: 453920 - DNA, 25 bp, Homo sapien
gggctgcgtgcaggctcgtgggtct

SEQ ID NO: 453921 - DNA, 25 bp, Homo sapien
tgggagctgaggaggtcgcgtgttt

SEQ ID NO: 453922 - DNA, 25 bp, Homo sapien
gaggtcgcgtgtttgcgcggacggg

SEQ ID NO: 453923 - DNA, 25 bp, Homo sapien
caggggtgtggctagtgctggcaga

SEQ ID NO: 453924 - DNA, 25 bp, Homo sapien
tctcgatgcgttccccaaatttctc

SEQ ID NO: 453925 - DNA, 25 bp, Homo sapien
acatcaggtgtcaccgagtcccggg

SEQ ID NO: 453926 - DNA, 25 bp, Homo sapien
ggttgcttttccacggttctcgatg

SEQ ID NO: 453927 - DNA, 25 bp, Homo sapien
gtcgatatcggaggccacatcaggt

SEQ ID NO: 453928 - DNA, 25 bp, Homo sapien
agattgtttaagctcaacctggggc

SEQ ID NO: 453929 - DNA, 25 bp, Homo sapien
gagattgtttaagctcaacctgggg

SEQ ID NO: 453930 - DNA, 25 bp, Homo sapien
ttcaaaacattgtgtggccaaaaat

SEQ ID NO: 453931 - DNA, 25 bp, Homo sapien
tgagaagtgcctatatggccagact

SEQ ID NO: 453932 - DNA, 25 bp, Homo sapien
tgccaagatgatgaaaaccatgatg

SEQ ID NO: 453933 - DNA, 25 bp, Homo sapien
tggcatcatccacctaagggagtgt

SEQ ID NO: 453934 - DNA, 25 bp, Homo sapien
cagctcctcatagagattggcatca

SEQ ID NO: 453935 - DNA, 25 bp, Homo sapien
aattaaacaaacatttatcaaattg

SEQ ID NO: 453936 - DNA, 25 bp, Homo sapien
taaacaaacatttatcaaattgtag

SEQ ID NO: 453937 - DNA, 25 bp, Homo sapien
tgtaattaaacaaacatttatcaaa

SEQ ID NO: 453938 - DNA, 25 bp, Homo sapien
taatgtaattaaacaaacatttatc

SEQ ID NO: 453939 - DNA, 25 bp, Homo sapien
tgtgtctagtggaacacatctaagg

SEQ ID NO: 453940 - DNA, 25 bp, Homo sapien
gacttcacatgagtttccctgcact

SEQ ID NO: 453941 - DNA, 25 bp, Homo sapien
gggaagggacagacaatttgacaaa

SEQ ID NO: 453942 - DNA, 25 bp, Homo sapien
tttttagcaggacttacaactgtgg

SEQ ID NO: 453943 - DNA, 25 bp, Homo sapien
tgacgctccgaaaagccacacttta

SEQ ID NO: 453944 - DNA, 25 bp, Homo sapien
tctggctaaaattacctctgggagc

SEQ ID NO: 453945 - DNA, 25 bp, Homo sapien
ctctgggagccacctgtttagtacc

SEQ ID NO: 453946 - DNA, 25 bp, Homo sapien
cttgaatgttcgagggagtttctgc

SEQ ID NO: 453947 - DNA, 25 bp, Homo sapien
ctcgccgtcgatggcaatgttgcag

SEQ ID NO: 453948 - DNA, 25 bp, Homo sapien
gcaatgttgcagaaccccttggggt

SEQ ID NO: 453949 - DNA, 25 bp, Homo sapien
tgactgtggctgatagtacaaggct

SEQ ID NO: 453950 - DNA, 25 bp, Homo sapien
tagtacaaggctcctggtggcagca

SEQ ID NO: 453951 - DNA, 25 bp, Homo sapien
cctggtgctcagagcgcaaaagttt

SEQ ID NO: 453952 - DNA, 25 bp, Homo sapien
ggaataatgccgtgaaagcagggac

SEQ ID NO: 453953 - DNA, 25 bp, Homo sapien
tcagagcgcaaaagttttctcctct

SEQ ID NO: 453954 - DNA, 25 bp, Homo sapien
ctggaataatgccgtgaaagcaggg

SEQ ID NO: 453955 - DNA, 25 bp, Homo sapien
gaagtcaccaccctgacacacaaac

SEQ ID NO: 453956 - DNA, 25 bp, Homo sapien
gtgaagtcaccaccctgacacacaa

SEQ ID NO: 453957 - DNA, 25 bp, Homo sapien
ctgtgtgattatggcgtgtgaagtc

SEQ ID NO: 453958 - DNA, 25 bp, Homo sapien
gtgtgaagtcaccaccctgacacac

SEQ ID NO: 453959 - DNA, 25 bp, Homo sapien
cgctccacggccttcacaataatca

SEQ ID NO: 453960 - DNA, 25 bp, Homo sapien
caggatcacctggcttgttggtgac

SEQ ID NO: 453961 - DNA, 25 bp, Homo sapien
ggatcacctggcttgttggtgacag

SEQ ID NO: 453962 - DNA, 25 bp, Homo sapien
tgttggtgacagagctggccctcat

SEQ ID NO: 453963 - DNA, 25 bp, Homo sapien
cttgttggtgacagagctggccctc

SEQ ID NO: 453964 - DNA, 25 bp, Homo sapien
ctgcaccagcgacatcacctcccag

SEQ ID NO: 453965 - DNA, 25 bp, Homo sapien
aatgatgccgctttgaagccagtcc

SEQ ID NO: 453966 - DNA, 25 bp, Homo sapien
aggtctctgttatgctgaaacccgg

SEQ ID NO: 453967 - DNA, 25 bp, Homo sapien
tgaaacccggcatgacgtgcaggat

SEQ ID NO: 453968 - DNA, 25 bp, Homo sapien
caggataaaggtcagggacaagctt

SEQ ID NO: 453969 - DNA, 25 bp, Homo sapien
ggagcttccaacactgcaccggcgg

SEQ ID NO: 453970 - DNA, 25 bp, Homo sapien
tccgggagaaccggagcttccaaca

SEQ ID NO: 453971 - DNA, 25 bp, Homo sapien
cagcgagatggaggggaccccgaca

SEQ ID NO: 453972 - DNA, 25 bp, Homo sapien
gagatggaggggaccccgacagaga

SEQ ID NO: 453973 - DNA, 25 bp, Homo sapien
agcagcgagatggaggggaccccga

SEQ ID NO: 453974 - DNA, 25 bp, Homo sapien
agcagcagcgagatggaggggaccc

SEQ ID NO: 453975 - DNA, 25 bp, Homo sapien
agcagcaacagcgccgcctccgcca

SEQ ID NO: 453976 - DNA, 25 bp, Homo sapien
ctccgccgccgcctcaggcagcagc

SEQ ID NO: 453977 - DNA, 25 bp, Homo sapien
gcagcaacagcgccgcctccgccat

SEQ ID NO: 453978 - DNA, 25 bp, Homo sapien
gccgccgcctcaggcagcagcaaca

SEQ ID NO: 453979 - DNA, 25 bp, Homo sapien
ccgagtccgtctgcctgtcggtcag

SEQ ID NO: 453980 - DNA, 25 bp, Homo sapien
gtctccgatcccagagagccagctt

SEQ ID NO: 453981 - DNA, 25 bp, Homo sapien
ttcagctccaataccgagtccgtct

SEQ ID NO: 453982 - DNA, 25 bp, Homo sapien
agctggcaccggcaagttctctgcc

SEQ ID NO: 453983 - DNA, 25 bp, Homo sapien
ggccagggaggagtggagagatatc

SEQ ID NO: 453984 - DNA, 25 bp, Homo sapien
tcattaaggcggtaaacgagcacgc

SEQ ID NO: 453985 - DNA, 25 bp, Homo sapien
cgtccccaggcagaattagagtcgg

SEQ ID NO: 453986 - DNA, 25 bp, Homo sapien
caggattacgcctcggctgacagga

SEQ ID NO: 453987 - DNA, 25 bp, Homo sapien
gcagcacagcacctcgggttgactg

SEQ ID NO: 453988 - DNA, 25 bp, Homo sapien
ccccaagacccccatggacaaagca

SEQ ID NO: 453989 - DNA, 25 bp, Homo sapien
tcaggaccaagttttggtctcccca

SEQ ID NO: 453990 - DNA, 25 bp, Homo sapien
ccaagacccccatggacaaagcaac

SEQ ID NO: 453991 - DNA, 25 bp, Homo sapien
ctccccaagacccccatggacaaag

SEQ ID NO: 453992 - DNA, 25 bp, Homo sapien
ttcaatgtgcgataaatgaaactca

SEQ ID NO: 453993 - DNA, 25 bp, Homo sapien
agttcaatgtgcgataaatgaaact

SEQ ID NO: 453994 - DNA, 25 bp, Homo sapien
atagttcaatgtgcgataaatgaaa

SEQ ID NO: 453995 - DNA, 25 bp, Homo sapien
tcatagttcaatgtgcgataaatga

SEQ ID NO: 453996 - DNA, 25 bp, Homo sapien
tgctttgcaataggtgaaataaatc

SEQ ID NO: 453997 - DNA, 25 bp, Homo sapien
tgaaataaatctgatctcccataac

SEQ ID NO: 453998 - DNA, 25 bp, Homo sapien
gatctcccataacttgcacttgatt

SEQ ID NO: 453999 - DNA, 25 bp, Homo sapien
tattgctttgcaataggtgaaataa

SEQ ID NO: 454000 - DNA, 25 bp, Homo sapien
gatttcagatccacttccggtacca

SEQ ID NO: 454001 - DNA, 25 bp, Homo sapien
gctgcagtaggagccaaatcaatta

SEQ ID NO: 454002 - DNA, 25 bp, Homo sapien
gctattaagtccaagcatcctgctg

SEQ ID NO: 454003 - DNA, 25 bp, Homo sapien
taaaagagtttgatagctgagccaa

SEQ ID NO: 454004 - DNA, 25 bp, Homo sapien
taatcaatctgatcaattaattccc

SEQ ID NO: 454005 - DNA, 25 bp, Homo sapien
tctgatcaattaattccctaaatga

SEQ ID NO: 454006 - DNA, 25 bp, Homo sapien
caatctgatcaattaattccctaaa

SEQ ID NO: 454007 - DNA, 25 bp, Homo sapien
gatcaattaattccctaaatgaaac

SEQ ID NO: 454008 - DNA, 25 bp, Homo sapien
gttaaactgcacaagtcttcaattg

SEQ ID NO: 454009 - DNA, 25 bp, Homo sapien
ctgggatgttaaactgcacaagtct

SEQ ID NO: 454010 - DNA, 25 bp, Homo sapien
gggatgttaaactgcacaagtcttc

SEQ ID NO: 454011 - DNA, 25 bp, Homo sapien
gatgttaaactgcacaagtcttcaa

SEQ ID NO: 454012 - DNA, 25 bp, Homo sapien
aggcactactgaagtcagttcaatg

SEQ ID NO: 454013 - DNA, 25 bp, Homo sapien
gaagtgaagcccttcaagagaatgt

SEQ ID NO: 454014 - DNA, 25 bp, Homo sapien
gaagcccttcaagagaatgtcttct

SEQ ID NO: 454015 - DNA, 25 bp, Homo sapien
ctgaagtcagttcaatgggcagtga

SEQ ID NO: 454016 - DNA, 25 bp, Homo sapien
ccatctgagtttgcagctttgcaaa

SEQ ID NO: 454017 - DNA, 25 bp, Homo sapien
cttgatccatctgagtttgcagctt

SEQ ID NO: 454018 - DNA, 25 bp, Homo sapien
gcagctttgcaaaccatgagaaaaa

SEQ ID NO: 454019 - DNA, 25 bp, Homo sapien
tagttccttcatcttgatccatctg

SEQ ID NO: 454020 - DNA, 25 bp, Homo sapien
cccagacaagtaatccctcatctgt

SEQ ID NO: 454021 - DNA, 25 bp, Homo sapien
aacccagacaagtaatccctcatct

SEQ ID NO: 454022 - DNA, 25 bp, Homo sapien
gaaacccagacaagtaatccctcat

SEQ ID NO: 454023 - DNA, 25 bp, Homo sapien
ctgaaacccagacaagtaatccctc

SEQ ID NO: 454024 - DNA, 25 bp, Homo sapien
gatactgtttctgcaaagactccag

SEQ ID NO: 454025 - DNA, 25 bp, Homo sapien
tgaagagcactgtttacatcattca

SEQ ID NO: 454026 - DNA, 25 bp, Homo sapien
cattcaatatagcatcacactgctc

SEQ ID NO: 454027 - DNA, 25 bp, Homo sapien
gctgttcacaggcttcatgtagggt

SEQ ID NO: 454028 - DNA, 25 bp, Homo sapien
tcttttaggagctgttcacaggctt

SEQ ID NO: 454029 - DNA, 25 bp, Homo sapien
ttaggagctgttcacaggcttcatg

SEQ ID NO: 454030 - DNA, 25 bp, Homo sapien
tcacaggcttcatgtagggttcctg

SEQ ID NO: 454031 - DNA, 25 bp, Homo sapien
tgttttcagccagatcaacaagttc

SEQ ID NO: 454032 - DNA, 25 bp, Homo sapien
aaataggaaagcttttgttgaatgt

SEQ ID NO: 454033 - DNA, 25 bp, Homo sapien
tttcagccagatcaacaagttccga

SEQ ID NO: 454034 - DNA, 25 bp, Homo sapien
aatgttttcagccagatcaacaagt

SEQ ID NO: 454035 - DNA, 25 bp, Homo sapien
ggaatatctatcagcaagcaagcta

SEQ ID NO: 454036 - DNA, 25 bp, Homo sapien
gggatgcaactatacattttgagga

SEQ ID NO: 454037 - DNA, 25 bp, Homo sapien
tctgaactggtaatggtatctccac

SEQ ID NO: 454038 - DNA, 25 bp, Homo sapien
tacacacttgtctttattggaacta

SEQ ID NO: 454039 - DNA, 25 bp, Homo sapien
taacttggccagcataggtataaat

SEQ ID NO: 454040 - DNA, 25 bp, Homo sapien
gtataaatccgtcactattcaccga

SEQ ID NO: 454041 - DNA, 25 bp, Homo sapien
tatacaatcatctaacttggccagc

SEQ ID NO: 454042 - DNA, 25 bp, Homo sapien
tatgttatacaatcatctaacttgg

SEQ ID NO: 454043 - DNA, 25 bp, Homo sapien
acttcagcaaatatatgggataatc

SEQ ID NO: 454044 - DNA, 25 bp, Homo sapien
tagtgtgttcacagtatatgtcttc

SEQ ID NO: 454045 - DNA, 25 bp, Homo sapien
tcatgaggtgcaaagctttagaaag

SEQ ID NO: 454046 - DNA, 25 bp, Homo sapien
tttcagtaactgacttgtgagggtc

SEQ ID NO: 454047 - DNA, 25 bp, Homo sapien
gggcagcagctcgaaatttcacata

SEQ ID NO: 454048 - DNA, 25 bp, Homo sapien
gcagcagctcgaaatttcacataaa

SEQ ID NO: 454049 - DNA, 25 bp, Homo sapien
aatgtgaaggcattgtctgcattag

SEQ ID NO: 454050 - DNA, 25 bp, Homo sapien
ctgcattaggtacagatgaaggatc

SEQ ID NO: 454051 - DNA, 25 bp, Homo sapien
catggactcctgctacgtagaatga

SEQ ID NO: 454052 - DNA, 25 bp, Homo sapien
cagagtgtttagagtatccaccacc

SEQ ID NO: 454053 - DNA, 25 bp, Homo sapien
tcaattggctgactttcaagacaga

SEQ ID NO: 454054 - DNA, 25 bp, Homo sapien
ggcacatacccaacctcatgaaata

SEQ ID NO: 454055 - DNA, 25 bp, Homo sapien
ttcagaccgcagttctatttgttca

SEQ ID NO: 454056 - DNA, 25 bp, Homo sapien
tttcagaccgcagttctatttgttc

SEQ ID NO: 454057 - DNA, 25 bp, Homo sapien
cagaccgcagttctatttgttcaat

SEQ ID NO: 454058 - DNA, 25 bp, Homo sapien
tcagaccgcagttctatttgttcaa

SEQ ID NO: 454059 - DNA, 25 bp, Homo sapien
caagcaatactagggcccaaaagga

SEQ ID NO: 454060 - DNA, 25 bp, Homo sapien
taacactggtggatatcatttagca

SEQ ID NO: 454061 - DNA, 25 bp, Homo sapien
tcccgctgatcaaggtaacactggt

SEQ ID NO: 454062 - DNA, 25 bp, Homo sapien
ggctggttaactctgcaacagtgca

SEQ ID NO: 454063 - DNA, 25 bp, Homo sapien
tcatcctggcagacatgaaccatga

SEQ ID NO: 454064 - DNA, 25 bp, Homo sapien
gttcatcctggcagacatgaaccat

SEQ ID NO: 454065 - DNA, 25 bp, Homo sapien
gtaaagttggtgttcatcctggcag

SEQ ID NO: 454066 - DNA, 25 bp, Homo sapien
tgtaaagttggtgttcatcctggca

SEQ ID NO: 454067 - DNA, 25 bp, Homo sapien
tctacttcactatcaatcaaatggt

SEQ ID NO: 454068 - DNA, 25 bp, Homo sapien
cctcattacaagagtcatgagcttg

SEQ ID NO: 454069 - DNA, 25 bp, Homo sapien
tgtacttagtggagataaagggatc

SEQ ID NO: 454070 - DNA, 25 bp, Homo sapien
ttggtcatacgccaagtattttgag

SEQ ID NO: 454071 - DNA, 25 bp, Homo sapien
gaatcccacaaagttccgacagagt

SEQ ID NO: 454072 - DNA, 25 bp, Homo sapien
cgacagagtctctaagtgaataaca

SEQ ID NO: 454073 - DNA, 25 bp, Homo sapien
tgaataacatgaatgatcaatggcc

SEQ ID NO: 454074 - DNA, 25 bp, Homo sapien
tgcacatgatcttcaagcacctcat

SEQ ID NO: 454075 - DNA, 25 bp, Homo sapien
tgcctaacccaaaagtaacgatgtg

SEQ ID NO: 454076 - DNA, 25 bp, Homo sapien
tggtaacagtgtgctagaaatgcct

SEQ ID NO: 454077 - DNA, 25 bp, Homo sapien
gggtaaggcatcaagccaagcttca

SEQ ID NO: 454078 - DNA, 25 bp, Homo sapien
cgatgtgttctatctggattccaga

SEQ ID NO: 454079 - DNA, 25 bp, Homo sapien
gaccaagcctaagaaattgctaagg

SEQ ID NO: 454080 - DNA, 25 bp, Homo sapien
tgctaaggtagcttattaactgggc

SEQ ID NO: 454081 - DNA, 25 bp, Homo sapien
tattaactgggctatcatcatcccc

SEQ ID NO: 454082 - DNA, 25 bp, Homo sapien
ttgagtaccacagatattgaatgac

SEQ ID NO: 454083 - DNA, 25 bp, Homo sapien
ctgataaaaaagtgcaatcatccat

SEQ ID NO: 454084 - DNA, 25 bp, Homo sapien
cccgtgatgtccgtctgaatataga

SEQ ID NO: 454085 - DNA, 25 bp, Homo sapien
caggagctggtttatagcccgtgat

SEQ ID NO: 454086 - DNA, 25 bp, Homo sapien
gacgagccgctcctgtacatcttct

SEQ ID NO: 454087 - DNA, 25 bp, Homo sapien
ttatcgggatatgccagatctccag

SEQ ID NO: 454088 - DNA, 25 bp, Homo sapien
actagtaaaaaacatctaggctagg

SEQ ID NO: 454089 - DNA, 25 bp, Homo sapien
taaaaaacatctaggctaggcacag

SEQ ID NO: 454090 - DNA, 25 bp, Homo sapien
ttttatagcaaacttatcttgattt

SEQ ID NO: 454091 - DNA, 25 bp, Homo sapien
tagtaaaaaacatctaggctaggca

SEQ ID NO: 454092 - DNA, 25 bp, Homo sapien
caggagtgtaaagttatattccgtc

SEQ ID NO: 454093 - DNA, 25 bp, Homo sapien
gtcctgcttagccttgagtggtcat

SEQ ID NO: 454094 - DNA, 25 bp, Homo sapien
tacttagaaggagtaacccagaatc

SEQ ID NO: 454095 - DNA, 25 bp, Homo sapien
cagaatctattaaacttcaggagtg

SEQ ID NO: 454096 - DNA, 25 bp, Homo sapien
gataattccagctatggaccacaga

SEQ ID NO: 454097 - DNA, 25 bp, Homo sapien
tgctccctgttgttatccgcaatac

SEQ ID NO: 454098 - DNA, 25 bp, Homo sapien
gttatccgcaataccaagacacata

SEQ ID NO: 454099 - DNA, 25 bp, Homo sapien
aggcagctcctgcaaatggaccacc

SEQ ID NO: 454100 - DNA, 25 bp, Homo sapien
cagattttgtcagactgttagactc

SEQ ID NO: 454101 - DNA, 25 bp, Homo sapien
ttttgtcagactgttagactctcct

SEQ ID NO: 454102 - DNA, 25 bp, Homo sapien
gattttgtcagactgttagactctc

SEQ ID NO: 454103 - DNA, 25 bp, Homo sapien
attttgtcagactgttagactctcc

SEQ ID NO: 454104 - DNA, 25 bp, Homo sapien
caccccaagttctatcgccattgtg

SEQ ID NO: 454105 - DNA, 25 bp, Homo sapien
tatcgccattgtgataacactgata

SEQ ID NO: 454106 - DNA, 25 bp, Homo sapien
aagttctatcgccattgtgataaca

SEQ ID NO: 454107 - DNA, 25 bp, Homo sapien
tgactcagagccttgctttccaccc

SEQ ID NO: 454108 - DNA, 25 bp, Homo sapien
tagtacatccaattcccaggtgacc

SEQ ID NO: 454109 - DNA, 25 bp, Homo sapien
ctgtcttccacactctgagtcaaat

SEQ ID NO: 454110 - DNA, 25 bp, Homo sapien
cacatacaggcctagttagtacatc

SEQ ID NO: 454111 - DNA, 25 bp, Homo sapien
acatccaattcccaggtgaccagag

SEQ ID NO: 454112 - DNA, 25 bp, Homo sapien
gacaagagttcttcgaaccgtagga

SEQ ID NO: 454113 - DNA, 25 bp, Homo sapien
tgaagatctgctggagaaattgtgg

SEQ ID NO: 454114 - DNA, 25 bp, Homo sapien
ttcgaaccgtaggataccacattcc

SEQ ID NO: 454115 - DNA, 25 bp, Homo sapien
tgcatctgtataatttggagagaca

SEQ ID NO: 454116 - DNA, 25 bp, Homo sapien
ctggtggaataaaagagaataatca

SEQ ID NO: 454117 - DNA, 25 bp, Homo sapien
tggtggaataaaagagaataatcag

SEQ ID NO: 454118 - DNA, 25 bp, Homo sapien
ggtggaataaaagagaataatcagc

SEQ ID NO: 454119 - DNA, 25 bp, Homo sapien
aggactgaatgcaggcagacaatgc

SEQ ID NO: 454120 - DNA, 25 bp, Homo sapien
agactctgacgctccaagtaaggac

SEQ ID NO: 454121 - DNA, 25 bp, Homo sapien
aatgcttcctgtgataatccttgga

SEQ ID NO: 454122 - DNA, 25 bp, Homo sapien
ttcctgtgataatccttggaacact

SEQ ID NO: 454123 - DNA, 25 bp, Homo sapien
aaatcctactgccaaaacagcttta

SEQ ID NO: 454124 - DNA, 25 bp, Homo sapien
acaaatcctactgccaaaacagctt

SEQ ID NO: 454125 - DNA, 25 bp, Homo sapien
aaacaggatttcacctaacacttca

SEQ ID NO: 454126 - DNA, 25 bp, Homo sapien
aggatttcacctaacacttcatcaa

SEQ ID NO: 454127 - DNA, 25 bp, Homo sapien
agaaaagttgtccatcaatctgagt

SEQ ID NO: 454128 - DNA, 25 bp, Homo sapien
gtatcaaaaggtgcttaattaagaa

SEQ ID NO: 454129 - DNA, 25 bp, Homo sapien
gaaatggagcaatttgttcacgaag

SEQ ID NO: 454130 - DNA, 25 bp, Homo sapien
attaagaaaagttgtccatcaatct

SEQ ID NO: 454131 - DNA, 25 bp, Homo sapien
ctctagttttcttgaggtccaggga

SEQ ID NO: 454132 - DNA, 25 bp, Homo sapien
tctagttttcttgaggtccagggaa

SEQ ID NO: 454133 - DNA, 25 bp, Homo sapien
ccaagtgtgccagccaggacagcaa

SEQ ID NO: 454134 - DNA, 25 bp, Homo sapien
cacaaaggccgggaaatgatgggac

SEQ ID NO: 454135 - DNA, 25 bp, Homo sapien
aatgatcttgataacctcgtgaagg

SEQ ID NO: 454136 - DNA, 25 bp, Homo sapien
gacagctcagcttagtacgaacaaa

SEQ ID NO: 454137 - DNA, 25 bp, Homo sapien
aagtcattagcatggtgacagctca

SEQ ID NO: 454138 - DNA, 25 bp, Homo sapien
tagaagttcaaattgcaaaatgact

SEQ ID NO: 454139 - DNA, 25 bp, Homo sapien
ctagaagttcaaattgcaaaatgac

SEQ ID NO: 454140 - DNA, 25 bp, Homo sapien
agaagttcaaattgcaaaatgacta

SEQ ID NO: 454141 - DNA, 25 bp, Homo sapien
caccagtgatggctacagtactcac

SEQ ID NO: 454142 - DNA, 25 bp, Homo sapien
agtgatggctacagtactcacagag

SEQ ID NO: 454143 - DNA, 25 bp, Homo sapien
tgagcaccagtgatggctacagtac

SEQ ID NO: 454144 - DNA, 25 bp, Homo sapien
tgagatgagcaccagtgatggctac

SEQ ID NO: 454145 - DNA, 25 bp, Homo sapien
tcatccagtgaacatgtaaagtttc

SEQ ID NO: 454146 - DNA, 25 bp, Homo sapien
tgagtaacatacaccagttctctac

SEQ ID NO: 454147 - DNA, 25 bp, Homo sapien
caaggcaaaaagccaattcaccttc

SEQ ID NO: 454148 - DNA, 25 bp, Homo sapien
ttcaacagcaaagccatgagtaaca

SEQ ID NO: 454149 - DNA, 25 bp, Homo sapien
tagggttcaggattttaaatgctgc

SEQ ID NO: 454150 - DNA, 25 bp, Homo sapien
cagtcatagggttcaggattttaaa

SEQ ID NO: 454151 - DNA, 25 bp, Homo sapien
tccaacaagaactctatcaaggcat

SEQ ID NO: 454152 - DNA, 25 bp, Homo sapien
ggcattgttgctattcagcctaaaa

SEQ ID NO: 454153 - DNA, 25 bp, Homo sapien
aaaagaagataacaatttcctcctg

SEQ ID NO: 454154 - DNA, 25 bp, Homo sapien
aacaatttcctcctgtttttatgtg

SEQ ID NO: 454155 - DNA, 25 bp, Homo sapien
agaagataacaatttcctcctgttt

SEQ ID NO: 454156 - DNA, 25 bp, Homo sapien
acaatttcctcctgtttttatgtgc

SEQ ID NO: 454157 - DNA, 25 bp, Homo sapien
gtctacgtcttttttagagtcaaga

SEQ ID NO: 454158 - DNA, 25 bp, Homo sapien
cgatttcagatgacggtctacgtct

SEQ ID NO: 454159 - DNA, 25 bp, Homo sapien
agagtcaagataatgttctcttatc

SEQ ID NO: 454160 - DNA, 25 bp, Homo sapien
gttctacaaacagcttggtctgctg

SEQ ID NO: 454161 - DNA, 25 bp, Homo sapien
gaatagcattacattccctcaggcc

SEQ ID NO: 454162 - DNA, 25 bp, Homo sapien
caacaaggccaatttacagtagatg

SEQ ID NO: 454163 - DNA, 25 bp, Homo sapien
gcttctcttactccaggttccaggg

SEQ ID NO: 454164 - DNA, 25 bp, Homo sapien
gatgaaagggatccaaatcagaccc

SEQ ID NO: 454165 - DNA, 25 bp, Homo sapien
gagagagtatacttggggcctccct

SEQ ID NO: 454166 - DNA, 25 bp, Homo sapien
aaggctgctgtgagagagtatactt

SEQ ID NO: 454167 - DNA, 25 bp, Homo sapien
cctgactggccattgtttttaacgc

SEQ ID NO: 454168 - DNA, 25 bp, Homo sapien
tggccattgtttttaacgctgaaac

SEQ ID NO: 454169 - DNA, 25 bp, Homo sapien
aattctaatcccaagggctaaggca

SEQ ID NO: 454170 - DNA, 25 bp, Homo sapien
ggcagcaaaataactcccctagcat

SEQ ID NO: 454171 - DNA, 25 bp, Homo sapien
taagagatgcttagaccattcagaa

SEQ ID NO: 454172 - DNA, 25 bp, Homo sapien
ccctagcatgcttcaggacattcat

SEQ ID NO: 454173 - DNA, 25 bp, Homo sapien
gatgaactcggtatctttattggat

SEQ ID NO: 454174 - DNA, 25 bp, Homo sapien
cacaggtttaaacaagatgaactcg

SEQ ID NO: 454175 - DNA, 25 bp, Homo sapien
tcttatatgcagttgccgcaaggtc

SEQ ID NO: 454176 - DNA, 25 bp, Homo sapien
gataggtacaaggacatacttctca

SEQ ID NO: 454177 - DNA, 25 bp, Homo sapien
gctggcatgacctgatgaagactta

SEQ ID NO: 454178 - DNA, 25 bp, Homo sapien
ccaaagcgagtggaagcgatgtatc

SEQ ID NO: 454179 - DNA, 25 bp, Homo sapien
gaagactaaactctagcgagccttg

SEQ ID NO: 454180 - DNA, 25 bp, Homo sapien
tgagttgtcttaaacacgaagcacc

SEQ ID NO: 454181 - DNA, 25 bp, Homo sapien
atgtcttcagggctgaactcttcct

SEQ ID NO: 454182 - DNA, 25 bp, Homo sapien
catagatggacaggcaatgatctgg

SEQ ID NO: 454183 - DNA, 25 bp, Homo sapien
agatggacaggcaatgatctggatg

SEQ ID NO: 454184 - DNA, 25 bp, Homo sapien
cagggctgaactcttcctttaacag

SEQ ID NO: 454185 - DNA, 25 bp, Homo sapien
gaagaacttactcgtgtagccaaat

SEQ ID NO: 454186 - DNA, 25 bp, Homo sapien
gtactcagtaacttccatgttttca

SEQ ID NO: 454187 - DNA, 25 bp, Homo sapien
ggtactcagtaacttccatgttttc

SEQ ID NO: 454188 - DNA, 25 bp, Homo sapien
atctgctaatggctaaggggttttt

SEQ ID NO: 454189 - DNA, 25 bp, Homo sapien
ggatctgctaatggctaaggggttt

SEQ ID NO: 454190 - DNA, 25 bp, Homo sapien
atgcaggatctgctaatggctaagg

SEQ ID NO: 454191 - DNA, 25 bp, Homo sapien
caaaaagaagacggggaaatgcagg

SEQ ID NO: 454192 - DNA, 25 bp, Homo sapien
atgccaattctgaccaactgcagga

SEQ ID NO: 454193 - DNA, 25 bp, Homo sapien
tgaccaactgcaggagcaacctgcc

SEQ ID NO: 454194 - DNA, 25 bp, Homo sapien
caattctgaccaactgcaggagcaa

SEQ ID NO: 454195 - DNA, 25 bp, Homo sapien
ttctgaccaactgcaggagcaacct

SEQ ID NO: 454196 - DNA, 25 bp, Homo sapien
catggctataaagtagaaactggcc

SEQ ID NO: 454197 - DNA, 25 bp, Homo sapien
aacatggctataaagtagaaactgg

SEQ ID NO: 454198 - DNA, 25 bp, Homo sapien
agatttttatgagaccagtaaacat

SEQ ID NO: 454199 - DNA, 25 bp, Homo sapien
acatggctataaagtagaaactggc

SEQ ID NO: 454200 - DNA, 25 bp, Homo sapien
aataccgtcctcaagaaaagtcaag

SEQ ID NO: 454201 - DNA, 25 bp, Homo sapien
tagttctcctatggaataccgtcct

SEQ ID NO: 454202 - DNA, 25 bp, Homo sapien
ccacaagggttgaaaaacctcagca

SEQ ID NO: 454203 - DNA, 25 bp, Homo sapien
aaattaagagctatgttagttctcc

SEQ ID NO: 454204 - DNA, 25 bp, Homo sapien
tagaaaccaacagcagaaggctcag

SEQ ID NO: 454205 - DNA, 25 bp, Homo sapien
tttagaaaccaacagcagaaggctc

SEQ ID NO: 454206 - DNA, 25 bp, Homo sapien
ttatttagaaaccaacagcagaagg

SEQ ID NO: 454207 - DNA, 25 bp, Homo sapien
tatttagaaaccaacagcagaaggc

SEQ ID NO: 454208 - DNA, 25 bp, Homo sapien
tcagcactgagcagcacgctcgtgt

SEQ ID NO: 454209 - DNA, 25 bp, Homo sapien
gcagttatcaccaatcacagattaa

SEQ ID NO: 454210 - DNA, 25 bp, Homo sapien
tcttgtgaccatttaaacgaggcag

SEQ ID NO: 454211 - DNA, 25 bp, Homo sapien
gacgttcccacatacgattcctcgg

SEQ ID NO: 454212 - DNA, 25 bp, Homo sapien
gctgtagctgggctagagatccaca

SEQ ID NO: 454213 - DNA, 25 bp, Homo sapien
gcggcaaaaccaatccaatcaggaa

SEQ ID NO: 454214 - DNA, 25 bp, Homo sapien
tctatgatgagaatgctgcagctcc

SEQ ID NO: 454215 - DNA, 25 bp, Homo sapien
gatgctggagcttcacacaaagtcc

SEQ ID NO: 454216 - DNA, 25 bp, Homo sapien
tacgtctaatgagttacaggcaccc

SEQ ID NO: 454217 - DNA, 25 bp, Homo sapien
tcatttagcaaacaagttgggtcac

SEQ ID NO: 454218 - DNA, 25 bp, Homo sapien
tatgcaccctgcagaagtgctgcct

SEQ ID NO: 454219 - DNA, 25 bp, Homo sapien
tggcaaagaatgaatatgggccctc

SEQ ID NO: 454220 - DNA, 25 bp, Homo sapien
actggtaacagttaccaacttgaat

SEQ ID NO: 454221 - DNA, 25 bp, Homo sapien
tggtaacagttaccaacttgaattg

SEQ ID NO: 454222 - DNA, 25 bp, Homo sapien
ctggtaacagttaccaacttgaatt

SEQ ID NO: 454223 - DNA, 25 bp, Homo sapien
cactggtaacagttaccaacttgaa

SEQ ID NO: 454224 - DNA, 25 bp, Homo sapien
gccagagggaaacccagatggcaaa

SEQ ID NO: 454225 - DNA, 25 bp, Homo sapien
atggcaaacccacatcggcccaaat

SEQ ID NO: 454226 - DNA, 25 bp, Homo sapien
tgacctcattacacctcgtccaccc

SEQ ID NO: 454227 - DNA, 25 bp, Homo sapien
ggctctctccaaccctgacctcatt

SEQ ID NO: 454228 - DNA, 25 bp, Homo sapien
catttcagtggtgtggactgtctta

SEQ ID NO: 454229 - DNA, 25 bp, Homo sapien
tgttttctggttctcagatcagagc

SEQ ID NO: 454230 - DNA, 25 bp, Homo sapien
cttcccaataaggatgctccccagg

SEQ ID NO: 454231 - DNA, 25 bp, Homo sapien
tgaacacagagcgagtcaccttggc

SEQ ID NO: 454232 - DNA, 25 bp, Homo sapien
ctttcagggcagttcctttcctggg

SEQ ID NO: 454233 - DNA, 25 bp, Homo sapien
cctttcagggcagttcctttcctgg

SEQ ID NO: 454234 - DNA, 25 bp, Homo sapien
ccttgtgggtctctctatccctttc

SEQ ID NO: 454235 - DNA, 25 bp, Homo sapien
ccttggccccagatcaaccccttgt

SEQ ID NO: 454236 - DNA, 25 bp, Homo sapien
tgatactggtatggacttggcctct

SEQ ID NO: 454237 - DNA, 25 bp, Homo sapien
accttccacttgcttagctcctatg

SEQ ID NO: 454238 - DNA, 25 bp, Homo sapien
tggtatggacttggcctctcttctg

SEQ ID NO: 454239 - DNA, 25 bp, Homo sapien
tatgggatcaccaagcagagcagcc

SEQ ID NO: 454240 - DNA, 25 bp, Homo sapien
gacacttcataggacctctgtcttc

SEQ ID NO: 454241 - DNA, 25 bp, Homo sapien
tttggacacttcataggacctctgt

SEQ ID NO: 454242 - DNA, 25 bp, Homo sapien
tctttggacacttcataggacctct

SEQ ID NO: 454243 - DNA, 25 bp, Homo sapien
cttggggtgtggtctaaagagttct

SEQ ID NO: 454244 - DNA, 25 bp, Homo sapien
gagattctccaacgggatccaggaa

SEQ ID NO: 454245 - DNA, 25 bp, Homo sapien
gaagaactgtaaagaaggcttgcta

SEQ ID NO: 454246 - DNA, 25 bp, Homo sapien
cttgggctgggacaaccgctgagct

SEQ ID NO: 454247 - DNA, 25 bp, Homo sapien
gctaccaattgccaccagcattggg

SEQ ID NO: 454248 - DNA, 25 bp, Homo sapien
tcagtgtaaactggcatattgtagg

SEQ ID NO: 454249 - DNA, 25 bp, Homo sapien
tacatcagtgtaaactggcatattg

SEQ ID NO: 454250 - DNA, 25 bp, Homo sapien
gtaaactggcatattgtagggacag

SEQ ID NO: 454251 - DNA, 25 bp, Homo sapien
cagtacatcagtgtaaactggcata

SEQ ID NO: 454252 - DNA, 25 bp, Homo sapien
ctctttgtgattggccttagattgc

SEQ ID NO: 454253 - DNA, 25 bp, Homo sapien
gctggcagacaaagggcttaaatag

SEQ ID NO: 454254 - DNA, 25 bp, Homo sapien
tgagcagccactctttgtgattggc

SEQ ID NO: 454255 - DNA, 25 bp, Homo sapien
ggcaagggagtgagcagccactctt

SEQ ID NO: 454256 - DNA, 25 bp, Homo sapien
tctcccggatcagaacaagagctgt

SEQ ID NO: 454257 - DNA, 25 bp, Homo sapien
tcaaagccgtgtgggatgagaccat

SEQ ID NO: 454258 - DNA, 25 bp, Homo sapien
tggcagtgacagaacaaggcaaggt

SEQ ID NO: 454259 - DNA, 25 bp, Homo sapien
tcctagatgggactgacttcatgtc

SEQ ID NO: 454260 - DNA, 25 bp, Homo sapien
agggaaatggcttcatgctttcctc

SEQ ID NO: 454261 - DNA, 25 bp, Homo sapien
cagggtgtccagaggctcgactata

SEQ ID NO: 454262 - DNA, 25 bp, Homo sapien
aggccccctgcactgatcctgagtg

SEQ ID NO: 454263 - DNA, 25 bp, Homo sapien
tgagtggccacctagaccagggtgt

SEQ ID NO: 454264 - DNA, 25 bp, Homo sapien
tgttgcccctagtggtgtgcaggcc

SEQ ID NO: 454265 - DNA, 25 bp, Homo sapien
acaaaacaatatggtgtttttcagg

SEQ ID NO: 454266 - DNA, 25 bp, Homo sapien
aaacaatatggtgtttttcagggct

SEQ ID NO: 454267 - DNA, 25 bp, Homo sapien
caaaacaatatggtgtttttcaggg

SEQ ID NO: 454268 - DNA, 25 bp, Homo sapien
cacaaaacaatatggtgtttttcag

SEQ ID NO: 454269 - DNA, 25 bp, Homo sapien
actcagaacattccagaggtgacat

SEQ ID NO: 454270 - DNA, 25 bp, Homo sapien
aatgtgagttgccaggtataggtcc

SEQ ID NO: 454271 - DNA, 25 bp, Homo sapien
caggtataggtcctatgcagaagtt

SEQ ID NO: 454272 - DNA, 25 bp, Homo sapien
aagttggtcaccaaaacactcagaa

SEQ ID NO: 454273 - DNA, 25 bp, Homo sapien
gaggtagaaccacactgattggaat

SEQ ID NO: 454274 - DNA, 25 bp, Homo sapien
tgaggtagaaccacactgattggaa

SEQ ID NO: 454275 - DNA, 25 bp, Homo sapien
aaccacactgattggaatttctagg

SEQ ID NO: 454276 - DNA, 25 bp, Homo sapien
agaaccacactgattggaatttcta

SEQ ID NO: 454277 - DNA, 25 bp, Homo sapien
tcaccaattcattgactgaaaaagc

SEQ ID NO: 454278 - DNA, 25 bp, Homo sapien
ggacttcaccaattcattgactgaa

SEQ ID NO: 454279 - DNA, 25 bp, Homo sapien
tgtgaggacttcaccaattcattga

SEQ ID NO: 454280 - DNA, 25 bp, Homo sapien
agcctgtgaggacttcaccaattca

SEQ ID NO: 454281 - DNA, 25 bp, Homo sapien
tcctccatcctacatttcaacccct

SEQ ID NO: 454282 - DNA, 25 bp, Homo sapien
ttcctccatcctacatttcaacccc

SEQ ID NO: 454283 - DNA, 25 bp, Homo sapien
cctccatcctacatttcaacccctc

SEQ ID NO: 454284 - DNA, 25 bp, Homo sapien
attcctccatcctacatttcaaccc

SEQ ID NO: 454285 - DNA, 25 bp, Homo sapien
ttctcttctccttgatcgttgggct

SEQ ID NO: 454286 - DNA, 25 bp, Homo sapien
agacaagcttgagctgtcttaaacc

SEQ ID NO: 454287 - DNA, 25 bp, Homo sapien
agctgtcttaaaccaccttctcttc

SEQ ID NO: 454288 - DNA, 25 bp, Homo sapien
gcttgagctgtcttaaaccaccttc

SEQ ID NO: 454289 - DNA, 25 bp, Homo sapien
ctgaagtcccatctgtggattggaa

SEQ ID NO: 454290 - DNA, 25 bp, Homo sapien
tagctgtaacccaatgatgcattag

SEQ ID NO: 454291 - DNA, 25 bp, Homo sapien
tggtgccctccttggtaaatataag

SEQ ID NO: 454292 - DNA, 25 bp, Homo sapien
tgcattagtgacagggatccaggaa

SEQ ID NO: 454293 - DNA, 25 bp, Homo sapien
tcgtcctctcccctaaatggccaac

SEQ ID NO: 454294 - DNA, 25 bp, Homo sapien
cgtcctctcccctaaatggccaact

SEQ ID NO: 454295 - DNA, 25 bp, Homo sapien
tcctctcccctaaatggccaactct

SEQ ID NO: 454296 - DNA, 25 bp, Homo sapien
ctctcccctaaatggccaactcttc

SEQ ID NO: 454297 - DNA, 25 bp, Homo sapien
tttaacccatggcattcagctgcct

SEQ ID NO: 454298 - DNA, 25 bp, Homo sapien
ggcttttaacccatggcattcagct

SEQ ID NO: 454299 - DNA, 25 bp, Homo sapien
cttttaacccatggcattcagctgc

SEQ ID NO: 454300 - DNA, 25 bp, Homo sapien
taacccatggcattcagctgcctgt

SEQ ID NO: 454301 - DNA, 25 bp, Homo sapien
ggaacacgaacatctcgtcgctgag

SEQ ID NO: 454302 - DNA, 25 bp, Homo sapien
ctgtacaagttgtggagcctcggga

SEQ ID NO: 454303 - DNA, 25 bp, Homo sapien
ggcccggacatgttgctgaccatct

SEQ ID NO: 454304 - DNA, 25 bp, Homo sapien
ggcggcagttctcatttacccagcg

SEQ ID NO: 454305 - DNA, 25 bp, Homo sapien
ctcctggccggcatgaaggcgtaga

SEQ ID NO: 454306 - DNA, 25 bp, Homo sapien
tcagaccctgctaggcttcttgggg

SEQ ID NO: 454307 - DNA, 25 bp, Homo sapien
tgagcatttccatgcgcgcggtgac

SEQ ID NO: 454308 - DNA, 25 bp, Homo sapien
aaggcgtagagctcctcgatgagca

SEQ ID NO: 454309 - DNA, 25 bp, Homo sapien
aaactctgagtttaggaaggctgct

SEQ ID NO: 454310 - DNA, 25 bp, Homo sapien
caaactcggcgtcccggtgcaaggc

SEQ ID NO: 454311 - DNA, 25 bp, Homo sapien
tttcaataggtacgaactggctggg

SEQ ID NO: 454312 - DNA, 25 bp, Homo sapien
tcttttgcccagtgttcggtgtccc

SEQ ID NO: 454313 - DNA, 25 bp, Homo sapien
gacatttggttaagttatgttgact

SEQ ID NO: 454314 - DNA, 25 bp, Homo sapien
tatgttgacttgtaaaggagcccag

SEQ ID NO: 454315 - DNA, 25 bp, Homo sapien
ggatataacttccatgagataggga

SEQ ID NO: 454316 - DNA, 25 bp, Homo sapien
gagatagggatgacatttggttaag

SEQ ID NO: 454317 - DNA, 25 bp, Homo sapien
tcacgagagtgatcaacagtttgga

SEQ ID NO: 454318 - DNA, 25 bp, Homo sapien
tagagtatgaagtccacgatgggtc

SEQ ID NO: 454319 - DNA, 25 bp, Homo sapien
ccagctgcaatggtcacttttatca

SEQ ID NO: 454320 - DNA, 25 bp, Homo sapien
aacagtgccttaagggttagagtat

SEQ ID NO: 454321 - DNA, 25 bp, Homo sapien
ccctaatgcaggatccactgatttc

SEQ ID NO: 454322 - DNA, 25 bp, Homo sapien
aggaacccaaggacccctaatgcag

SEQ ID NO: 454323 - DNA, 25 bp, Homo sapien
ccaaggacccctaatgcaggatcca

SEQ ID NO: 454324 - DNA, 25 bp, Homo sapien
ttcctgatgttttcgcagaatttgc

SEQ ID NO: 454325 - DNA, 25 bp, Homo sapien
ggagccacgggcacaattcaaaggc

SEQ ID NO: 454326 - DNA, 25 bp, Homo sapien
tcaaatcctacgagaaggatccagt

SEQ ID NO: 454327 - DNA, 25 bp, Homo sapien
gatccagtgacctgttccatcagag

SEQ ID NO: 454328 - DNA, 25 bp, Homo sapien
tcactgggctcaaagcgggaaacag

SEQ ID NO: 454329 - DNA, 25 bp, Homo sapien
agagggacgtaaggagagctttcca

SEQ ID NO: 454330 - DNA, 25 bp, Homo sapien
tcgtgtaggatgctgtccttgaact

SEQ ID NO: 454331 - DNA, 25 bp, Homo sapien
ctgaagagggacgtaaggagagctt

SEQ ID NO: 454332 - DNA, 25 bp, Homo sapien
cggaaggagattcgtgtaggatgct

SEQ ID NO: 454333 - DNA, 25 bp, Homo sapien
gactgctcgtgctctagagtcctga

SEQ ID NO: 454334 - DNA, 25 bp, Homo sapien
tttatagactgctcgtgctctagag

SEQ ID NO: 454335 - DNA, 25 bp, Homo sapien
tatagactgctcgtgctctagagtc

SEQ ID NO: 454336 - DNA, 25 bp, Homo sapien
ctatttatagactgctcgtgctcta

SEQ ID NO: 454337 - DNA, 25 bp, Homo sapien
tagttaaagtagaggcttatggagg

SEQ ID NO: 454338 - DNA, 25 bp, Homo sapien
tctaggggacccaaaatatcattgt

SEQ ID NO: 454339 - DNA, 25 bp, Homo sapien
aatatcattgtcctctagttaaagt

SEQ ID NO: 454340 - DNA, 25 bp, Homo sapien
cattgtcctctagttaaagtagagg

SEQ ID NO: 454341 - DNA, 25 bp, Homo sapien
catgtggcagttggcaaatacagtt

SEQ ID NO: 454342 - DNA, 25 bp, Homo sapien
tacagttccacaaaagttctcactg

SEQ ID NO: 454343 - DNA, 25 bp, Homo sapien
cactactcatgtggcagttggcaaa

SEQ ID NO: 454344 - DNA, 25 bp, Homo sapien
caggaataggccactactcatgtgg

SEQ ID NO: 454345 - DNA, 25 bp, Homo sapien
gctttctcacctcgccttcagggca

SEQ ID NO: 454346 - DNA, 25 bp, Homo sapien
ctttctcacctcgccttcagggcac

SEQ ID NO: 454347 - DNA, 25 bp, Homo sapien
taggcagcttgaacacaataacctg

SEQ ID NO: 454348 - DNA, 25 bp, Homo sapien
gctctcactggcattagggcctccc

SEQ ID NO: 454349 - DNA, 25 bp, Homo sapien
taacctgaaccaacgttttcctgca

SEQ ID NO: 454350 - DNA, 25 bp, Homo sapien
gaaccaacgttttcctgcatgctct

SEQ ID NO: 454351 - DNA, 25 bp, Homo sapien
caggaagttcctgagcgctacacag

SEQ ID NO: 454352 - DNA, 25 bp, Homo sapien
catttgatgctgtgggagctcatgg

SEQ ID NO: 454353 - DNA, 25 bp, Homo sapien
ccacatttgatgctgtgggagctca

SEQ ID NO: 454354 - DNA, 25 bp, Homo sapien
agttcctgagcgctacacagagaga

SEQ ID NO: 454355 - DNA, 25 bp, Homo sapien
accttgatgcgagggactgaacttt

SEQ ID NO: 454356 - DNA, 25 bp, Homo sapien
tgcttggcaccttgatgcgagggac

SEQ ID NO: 454357 - DNA, 25 bp, Homo sapien
tctagcagaaatgccgctgctgctg

SEQ ID NO: 454358 - DNA, 25 bp, Homo sapien
ttggcaccttgatgcgagggactga

SEQ ID NO: 454359 - DNA, 25 bp, Homo sapien
atacactcaaagacctgcaccgtgg

SEQ ID NO: 454360 - DNA, 25 bp, Homo sapien
aatacactcaaagacctgcaccgtg

SEQ ID NO: 454361 - DNA, 25 bp, Homo sapien
tacactcaaagacctgcaccgtggt

SEQ ID NO: 454362 - DNA, 25 bp, Homo sapien
ttccagctaagtccattgaagcagg

SEQ ID NO: 454363 - DNA, 25 bp, Homo sapien
tgcatcagttactctgatcccagtg

SEQ ID NO: 454364 - DNA, 25 bp, Homo sapien
ggaaacttccagctaagtccattga

SEQ ID NO: 454365 - DNA, 25 bp, Homo sapien
gcaggcagaatcttcaaggtcaata

SEQ ID NO: 454366 - DNA, 25 bp, Homo sapien
gacctgagaatcaactgagtctttg

SEQ ID NO: 454367 - DNA, 25 bp, Homo sapien
cctgagaatcaactgagtctttgtc

SEQ ID NO: 454368 - DNA, 25 bp, Homo sapien
acctgagaatcaactgagtctttgt

SEQ ID NO: 454369 - DNA, 25 bp, Homo sapien
gggctgagactgcattccgtcagag

SEQ ID NO: 454370 - DNA, 25 bp, Homo sapien
gaggtgccagtcgatacaagattta

SEQ ID NO: 454371 - DNA, 25 bp, Homo sapien
caacaactgggttaattctccagcc

SEQ ID NO: 454372 - DNA, 25 bp, Homo sapien
tctggtcacacagtaatcgctgggc

SEQ ID NO: 454373 - DNA, 25 bp, Homo sapien
cttcctgtgacgggctcttgtcacc

SEQ ID NO: 454374 - DNA, 25 bp, Homo sapien
caaagtcctcagatttttgatgctt

SEQ ID NO: 454375 - DNA, 25 bp, Homo sapien
tggtgcggcaaagtctcaggagtca

SEQ ID NO: 454376 - DNA, 25 bp, Homo sapien
gctagaaatagggtagatgtgtgcc

SEQ ID NO: 454377 - DNA, 25 bp, Homo sapien
ttgtgggcacgccaccatgaggaac

SEQ ID NO: 454378 - DNA, 25 bp, Homo sapien
tgtagtcccagtgcacacgatcagc

SEQ ID NO: 454379 - DNA, 25 bp, Homo sapien
cccacttggtgctctcagagcccct

SEQ ID NO: 454380 - DNA, 25 bp, Homo sapien
tcagagcccctggtgtaccctgcat

SEQ ID NO: 454381 - DNA, 25 bp, Homo sapien
ctcccccacttggtgctctcagagc

SEQ ID NO: 454382 - DNA, 25 bp, Homo sapien
acttggtgctctcagagcccctggt

SEQ ID NO: 454383 - DNA, 25 bp, Homo sapien
tgggcaatatgacccgacatctcct

SEQ ID NO: 454384 - DNA, 25 bp, Homo sapien
cctgggcaatatgacccgacatctc

SEQ ID NO: 454385 - DNA, 25 bp, Homo sapien
gggcaatatgacccgacatctcctc

SEQ ID NO: 454386 - DNA, 25 bp, Homo sapien
ctgggcaatatgacccgacatctcc

SEQ ID NO: 454387 - DNA, 25 bp, Homo sapien
tcatcagtcggtggaaagcacagct

SEQ ID NO: 454388 - DNA, 25 bp, Homo sapien
ggcctcatcagtcggtggaaagcac

SEQ ID NO: 454389 - DNA, 25 bp, Homo sapien
tctcaaggcctcatcagtcggtgga

SEQ ID NO: 454390 - DNA, 25 bp, Homo sapien
tcagtcggtggaaagcacagctcct

SEQ ID NO: 454391 - DNA, 25 bp, Homo sapien
aaagctctctgtaatctgattgcac

SEQ ID NO: 454392 - DNA, 25 bp, Homo sapien
taatctgattgcaccttccttactt

SEQ ID NO: 454393 - DNA, 25 bp, Homo sapien
ctgattgcaccttccttacttagcc

SEQ ID NO: 454394 - DNA, 25 bp, Homo sapien
tctctgtaatctgattgcaccttcc

SEQ ID NO: 454395 - DNA, 25 bp, Homo sapien
tccaggtgggactgagcatcctcag

SEQ ID NO: 454396 - DNA, 25 bp, Homo sapien
catgatggagcgtcccagtgaatga

SEQ ID NO: 454397 - DNA, 25 bp, Homo sapien
gatctcctttgggtagtccaggtgg

SEQ ID NO: 454398 - DNA, 25 bp, Homo sapien
gaatgacggataggactgggccact

SEQ ID NO: 454399 - DNA, 25 bp, Homo sapien
cccaggccagaacccttctcataac

SEQ ID NO: 454400 - DNA, 25 bp, Homo sapien
tccagtgcaggcatgcccaggccag

SEQ ID NO: 454401 - DNA, 25 bp, Homo sapien
gattccagtgcaggcatgcccaggc

SEQ ID NO: 454402 - DNA, 25 bp, Homo sapien
ttccagtgcaggcatgcccaggcca

SEQ ID NO: 454403 - DNA, 25 bp, Homo sapien
ctaacagttgtgcatcggggagagt

SEQ ID NO: 454404 - DNA, 25 bp, Homo sapien
ttgtgcatcggggagagtggggctg

SEQ ID NO: 454405 - DNA, 25 bp, Homo sapien
gttgtgcatcggggagagtggggct

SEQ ID NO: 454406 - DNA, 25 bp, Homo sapien
acagttgtgcatcggggagagtggg

SEQ ID NO: 454407 - DNA, 25 bp, Homo sapien
ctccatctccaccggtgctgggcgg

SEQ ID NO: 454408 - DNA, 25 bp, Homo sapien
ccatctccaccggtgctgggcggca

SEQ ID NO: 454409 - DNA, 25 bp, Homo sapien
tccatctccaccggtgctgggcggc

SEQ ID NO: 454410 - DNA, 25 bp, Homo sapien
tctgcatcaggcagcgtgggcatca

SEQ ID NO: 454411 - DNA, 25 bp, Homo sapien
gtctgcatcaggcagcgtgggcatc

SEQ ID NO: 454412 - DNA, 25 bp, Homo sapien
ctgcatcaggcagcgtgggcatcac

SEQ ID NO: 454413 - DNA, 25 bp, Homo sapien
tcaccacgttcccactgggtccagg

SEQ ID NO: 454414 - DNA, 25 bp, Homo sapien
gttcccatcaggtccgggactcagt

SEQ ID NO: 454415 - DNA, 25 bp, Homo sapien
gggactcagtactgacccaggctca

SEQ ID NO: 454416 - DNA, 25 bp, Homo sapien
catcaggtccgggactcagtactga

SEQ ID NO: 454417 - DNA, 25 bp, Homo sapien
tcatactctgagctgtcacactgga

SEQ ID NO: 454418 - DNA, 25 bp, Homo sapien
cccttgctgaatgtaggtgatgtca

SEQ ID NO: 454419 - DNA, 25 bp, Homo sapien
tgtagttaccgtgggctgtttctcc

SEQ ID NO: 454420 - DNA, 25 bp, Homo sapien
ctgtaggcacatgtagttaccgtgg

SEQ ID NO: 454421 - DNA, 25 bp, Homo sapien
cttggactgggagcgccaaggagcc

SEQ ID NO: 454422 - DNA, 25 bp, Homo sapien
cacgtgtcacttgcagcaggggaca

SEQ ID NO: 454423 - DNA, 25 bp, Homo sapien
ggtccgcattgagaccccagtgtct

SEQ ID NO: 454424 - DNA, 25 bp, Homo sapien
cagtgggacaccatataggtccgca

SEQ ID NO: 454425 - DNA, 25 bp, Homo sapien
agctggaagcccaacgggacagcct

SEQ ID NO: 454426 - DNA, 25 bp, Homo sapien
tttgcgggcttgactctaggtggcc

SEQ ID NO: 454427 - DNA, 25 bp, Homo sapien
cccacagtaggtcggtttgcgggct

SEQ ID NO: 454428 - DNA, 25 bp, Homo sapien
tggaagggaggtgtcatgccccaca

SEQ ID NO: 454429 - DNA, 25 bp, Homo sapien
ggacatccaggaacgtccagcaaca

SEQ ID NO: 454430 - DNA, 25 bp, Homo sapien
gaccactggcaaatattacaggcaa

SEQ ID NO: 454431 - DNA, 25 bp, Homo sapien
ttacaggcaactggggacatccagg

SEQ ID NO: 454432 - DNA, 25 bp, Homo sapien
caaagtgaccactggcaaatattac

SEQ ID NO: 454433 - DNA, 25 bp, Homo sapien
tctggtaaacgcttccccttatgcc

SEQ ID NO: 454434 - DNA, 25 bp, Homo sapien
tctttttcaaacactgctgtgagaa

SEQ ID NO: 454435 - DNA, 25 bp, Homo sapien
catgtatccgggtcaaaagccagag

SEQ ID NO: 454436 - DNA, 25 bp, Homo sapien
gcgggatgatgcctacaagccatgt

SEQ ID NO: 454437 - DNA, 25 bp, Homo sapien
tcaccgggctcaggttcaagtcctt

SEQ ID NO: 454438 - DNA, 25 bp, Homo sapien
tctcgctctctaggtgattgggtgc

SEQ ID NO: 454439 - DNA, 25 bp, Homo sapien
tagtgaccgagtgttgtttccccag

SEQ ID NO: 454440 - DNA, 25 bp, Homo sapien
tggaacccggcgtgtttgcctcggc

SEQ ID NO: 454441 - DNA, 25 bp, Homo sapien
tcatgctcccacagatcagcctgct

SEQ ID NO: 454442 - DNA, 25 bp, Homo sapien
atgctcccacagatcagcctgctcc

SEQ ID NO: 454443 - DNA, 25 bp, Homo sapien
ctcatgctcccacagatcagcctgc

SEQ ID NO: 454444 - DNA, 25 bp, Homo sapien
gcctcatgctcccacagatcagcct

SEQ ID NO: 454445 - DNA, 25 bp, Homo sapien
cctacccgaaagcagacgggcagtc

SEQ ID NO: 454446 - DNA, 25 bp, Homo sapien
ctacccgaaagcagacgggcagtca

SEQ ID NO: 454447 - DNA, 25 bp, Homo sapien
tacccgaaagcagacgggcagtcac

SEQ ID NO: 454448 - DNA, 25 bp, Homo sapien
acccgaaagcagacgggcagtcact

SEQ ID NO: 454449 - DNA, 25 bp, Homo sapien
gctggcaccaataagcaagttcaga

SEQ ID NO: 454450 - DNA, 25 bp, Homo sapien
cctgttgaatggctatgtgtatgct

SEQ ID NO: 454451 - DNA, 25 bp, Homo sapien
ttgaatggctatgtgtatgctggca

SEQ ID NO: 454452 - DNA, 25 bp, Homo sapien
gtatgctggcaccaataagcaagtt

SEQ ID NO: 454453 - DNA, 25 bp, Homo sapien
tctgtaagtggaagcctcgccaagt

SEQ ID NO: 454454 - DNA, 25 bp, Homo sapien
tggtagtctgacacccagtttccgc

SEQ ID NO: 454455 - DNA, 25 bp, Homo sapien
cgtgtggccatcaggcggtccgtat

SEQ ID NO: 454456 - DNA, 25 bp, Homo sapien
ccattctcagagcaatcgtgtggcc

SEQ ID NO: 454457 - DNA, 25 bp, Homo sapien
gttgatcaacaaacactcggtgaat

SEQ ID NO: 454458 - DNA, 25 bp, Homo sapien
catagttgatcaacaaacactcggt

SEQ ID NO: 454459 - DNA, 25 bp, Homo sapien
tagttgatcaacaaacactcggtga

SEQ ID NO: 454460 - DNA, 25 bp, Homo sapien
ctgccatagttgatcaacaaacact

SEQ ID NO: 454461 - DNA, 25 bp, Homo sapien
tcttttcctctgaatcccaacctta

SEQ ID NO: 454462 - DNA, 25 bp, Homo sapien
ctcttttcctctgaatcccaacctt

SEQ ID NO: 454463 - DNA, 25 bp, Homo sapien
ggctactgtgaccatatcatctgga

SEQ ID NO: 454464 - DNA, 25 bp, Homo sapien
tcatctggattgggacacctttgag

SEQ ID NO: 454465 - DNA, 25 bp, Homo sapien
ctggattgggacacctttgagattg

SEQ ID NO: 454466 - DNA, 25 bp, Homo sapien
catctggattgggacacctttgaga

SEQ ID NO: 454467 - DNA, 25 bp, Homo sapien
ggttttcagcgtgtctccttggtct

SEQ ID NO: 454468 - DNA, 25 bp, Homo sapien
ctgcttccggatcccaaagacgctt

SEQ ID NO: 454469 - DNA, 25 bp, Homo sapien
ttccctgggttttcagcgtgtctcc

SEQ ID NO: 454470 - DNA, 25 bp, Homo sapien
tggctgcttccggatcccaaagacg

SEQ ID NO: 454471 - DNA, 25 bp, Homo sapien
tatagtgaagtgcaaacggacataa

SEQ ID NO: 454472 - DNA, 25 bp, Homo sapien
gaagtgcaaacggacataattgtga

SEQ ID NO: 454473 - DNA, 25 bp, Homo sapien
gcaaacggacataattgtgatgagg

SEQ ID NO: 454474 - DNA, 25 bp, Homo sapien
ttaaatgttattatagtgaagtgca

SEQ ID NO: 454475 - DNA, 25 bp, Homo sapien
aacctgtccagaggatccttccctg

SEQ ID NO: 454476 - DNA, 25 bp, Homo sapien
cttccctgatgtttgtcccggcact

SEQ ID NO: 454477 - DNA, 25 bp, Homo sapien
tctgggccaattcttggtcatcctc

SEQ ID NO: 454478 - DNA, 25 bp, Homo sapien
tgtttgtcccggcactgagcagcct

SEQ ID NO: 454479 - DNA, 25 bp, Homo sapien
tcctcctcatcaagccatactcctt

SEQ ID NO: 454480 - DNA, 25 bp, Homo sapien
cttaggtcgctgtacccgctgtgac

SEQ ID NO: 454481 - DNA, 25 bp, Homo sapien
agctcctgtgaatgattctttccac

SEQ ID NO: 454482 - DNA, 25 bp, Homo sapien
ctttccacctgacttaggtcgctgt

SEQ ID NO: 454483 - DNA, 25 bp, Homo sapien
cggtgagactttgtcctgagcctga

SEQ ID NO: 454484 - DNA, 25 bp, Homo sapien
ttgtcctgagcctgaactagagcta

SEQ ID NO: 454485 - DNA, 25 bp, Homo sapien
ggaggtgagaccaccacaagccaca

SEQ ID NO: 454486 - DNA, 25 bp, Homo sapien
ctgaacagagcacggtgagactttg

SEQ ID NO: 454487 - DNA, 25 bp, Homo sapien
ccatctctgcattcaatcgatggtg

SEQ ID NO: 454488 - DNA, 25 bp, Homo sapien
cagaattgccaggaatggcagatgt

SEQ ID NO: 454489 - DNA, 25 bp, Homo sapien
ggactcatcatggatcgtggcagaa

SEQ ID NO: 454490 - DNA, 25 bp, Homo sapien
gcattcaatcgatggtgctgtttct

SEQ ID NO: 454491 - DNA, 25 bp, Homo sapien
tgacagcaggggcaagtggttcttt

SEQ ID NO: 454492 - DNA, 25 bp, Homo sapien
tttcccagcctgtgtggctggtata

SEQ ID NO: 454493 - DNA, 25 bp, Homo sapien
cagcaggggcaagtggttcttttcc

SEQ ID NO: 454494 - DNA, 25 bp, Homo sapien
gcaggggcaagtggttcttttccca

SEQ ID NO: 454495 - DNA, 25 bp, Homo sapien
cctgccaccctcaccatactttcta

SEQ ID NO: 454496 - DNA, 25 bp, Homo sapien
ctttctaggctcagtggcctggctg

SEQ ID NO: 454497 - DNA, 25 bp, Homo sapien
tggagatccacttctgcagccaggg

SEQ ID NO: 454498 - DNA, 25 bp, Homo sapien
caccatactttctaggctcagtggc

SEQ ID NO: 454499 - DNA, 25 bp, Homo sapien
cacatcgatctgcacatctacctta

SEQ ID NO: 454500 - DNA, 25 bp, Homo sapien
ctcacatcgatctgcacatctacct

SEQ ID NO: 454501 - DNA, 25 bp, Homo sapien
acatcgatctgcacatctaccttac

SEQ ID NO: 454502 - DNA, 25 bp, Homo sapien
tcacatcgatctgcacatctacctt

SEQ ID NO: 454503 - DNA, 25 bp, Homo sapien
agacttgagctcacagccgctcggg

SEQ ID NO: 454504 - DNA, 25 bp, Homo sapien
ccctggtagaccatgcggaatgtgc

SEQ ID NO: 454505 - DNA, 25 bp, Homo sapien
caccccagaggatccgtctccagga

SEQ ID NO: 454506 - DNA, 25 bp, Homo sapien
atgccccagacttgagctcacagcc

SEQ ID NO: 454507 - DNA, 25 bp, Homo sapien
gcatccaaggaagtgggtgtgaggc

SEQ ID NO: 454508 - DNA, 25 bp, Homo sapien
tgagggcatccaaggaagtgggtgt

SEQ ID NO: 454509 - DNA, 25 bp, Homo sapien
agggcatccaaggaagtgggtgtga

SEQ ID NO: 454510 - DNA, 25 bp, Homo sapien
ctgagggcatccaaggaagtgggtg

SEQ ID NO: 454511 - DNA, 25 bp, Homo sapien
agggctcttcgaggactcaaagtct

SEQ ID NO: 454512 - DNA, 25 bp, Homo sapien
gggctcttcgaggactcaaagtctc

SEQ ID NO: 454513 - DNA, 25 bp, Homo sapien
ggctcttcgaggactcaaagtctct

SEQ ID NO: 454514 - DNA, 25 bp, Homo sapien
ccgcgtggggcttagcaagctcttc

SEQ ID NO: 454515 - DNA, 25 bp, Homo sapien
ctgttctgacggtggaggctgaagt

SEQ ID NO: 454516 - DNA, 25 bp, Homo sapien
aaagggcaccgcgtggggcttagca

SEQ ID NO: 454517 - DNA, 25 bp, Homo sapien
ggcctgttctgacggtggaggctga

SEQ ID NO: 454518 - DNA, 25 bp, Homo sapien
gtagacactttttgccctgagcttc

SEQ ID NO: 454519 - DNA, 25 bp, Homo sapien
cactttttgccctgagcttcaagtt

SEQ ID NO: 454520 - DNA, 25 bp, Homo sapien
gacactttttgccctgagcttcaag

SEQ ID NO: 454521 - DNA, 25 bp, Homo sapien
tagacactttttgccctgagcttca

SEQ ID NO: 454522 - DNA, 25 bp, Homo sapien
tgagctggctggtactagaagctcc

SEQ ID NO: 454523 - DNA, 25 bp, Homo sapien
tcagatagatcatttggtgccttca

SEQ ID NO: 454524 - DNA, 25 bp, Homo sapien
cagcaggatggaccgatccaacttc

SEQ ID NO: 454525 - DNA, 25 bp, Homo sapien
tgtggaaattagcaggattgtctgg

SEQ ID NO: 454526 - DNA, 25 bp, Homo sapien
tgagcatgctgctgtgtggagctca

SEQ ID NO: 454527 - DNA, 25 bp, Homo sapien
agctcagcaataaaaggggggaaat

SEQ ID NO: 454528 - DNA, 25 bp, Homo sapien
ctgctgtgtggagctcagcaataaa

SEQ ID NO: 454529 - DNA, 25 bp, Homo sapien
tgtgtggagctcagcaataaaaggg

SEQ ID NO: 454530 - DNA, 25 bp, Homo sapien
gaatgcccccaacggatgctcccat

SEQ ID NO: 454531 - DNA, 25 bp, Homo sapien
tcagatttgatagatggaatgcccc

SEQ ID NO: 454532 - DNA, 25 bp, Homo sapien
tttccagtgaccttcagatttgata

SEQ ID NO: 454533 - DNA, 25 bp, Homo sapien
tgaccttcagatttgatagatggaa

SEQ ID NO: 454534 - DNA, 25 bp, Homo sapien
gatcttgtagagtggcagcgctgca

SEQ ID NO: 454535 - DNA, 25 bp, Homo sapien
cagcgctgcacaggctttcgtggaa

SEQ ID NO: 454536 - DNA, 25 bp, Homo sapien
cactgggtgacgatacacattctga

SEQ ID NO: 454537 - DNA, 25 bp, Homo sapien
aatgtgtgaggatgagcaatgcagc

SEQ ID NO: 454538 - DNA, 25 bp, Homo sapien
gagggctgctacctgcaagccaagg

SEQ ID NO: 454539 - DNA, 25 bp, Homo sapien
atgctgtgcaccgagggatgagcac

SEQ ID NO: 454540 - DNA, 25 bp, Homo sapien
cagttcaagtataggtttgcatcat

SEQ ID NO: 454541 - DNA, 25 bp, Homo sapien
gcagcaagagggctgctacctgcaa

SEQ ID NO: 454542 - DNA, 25 bp, Homo sapien
tcacagccaatctcgctcttctctg

SEQ ID NO: 454543 - DNA, 25 bp, Homo sapien
atgtcatagaagcatgctggctcat

SEQ ID NO: 454544 - DNA, 25 bp, Homo sapien
tccttgtgattgcttgtgtaggtgg

SEQ ID NO: 454545 - DNA, 25 bp, Homo sapien
tgctggctcatgtaaatagggctcc

SEQ ID NO: 454546 - DNA, 25 bp, Homo sapien
tcttagaaggatttgaaatggactc

SEQ ID NO: 454547 - DNA, 25 bp, Homo sapien
cacagaatttgtgagcagacagtag

SEQ ID NO: 454548 - DNA, 25 bp, Homo sapien
gttactttatacaagatacctgcca

SEQ ID NO: 454549 - DNA, 25 bp, Homo sapien
tgtttaactcatgaagtggactctt

SEQ ID NO: 454550 - DNA, 25 bp, Homo sapien
gcaaatcaagagttaacaaacctaa

SEQ ID NO: 454551 - DNA, 25 bp, Homo sapien
cagatattttactgcttgtgtcctt

SEQ ID NO: 454552 - DNA, 25 bp, Homo sapien
gatacttaaggcatcttcttggaat

SEQ ID NO: 454553 - DNA, 25 bp, Homo sapien
tgttggacagctttaaacagagttg

SEQ ID NO: 454554 - DNA, 25 bp, Homo sapien
tatcattggttggtacaaacattgg

SEQ ID NO: 454555 - DNA, 25 bp, Homo sapien
caaggaagggtgtaggctcaatgca

SEQ ID NO: 454556 - DNA, 25 bp, Homo sapien
tcttgagtaatttggtgctgctcag

SEQ ID NO: 454557 - DNA, 25 bp, Homo sapien
tgctgctcagttcaaaactttaaag

SEQ ID NO: 454558 - DNA, 25 bp, Homo sapien
taaagattggccacgcaacagggat

SEQ ID NO: 454559 - DNA, 25 bp, Homo sapien
caacagggatcgagatagattgcga

SEQ ID NO: 454560 - DNA, 25 bp, Homo sapien
gaatgggaccgagatgctgataaag

SEQ ID NO: 454561 - DNA, 25 bp, Homo sapien
gatatgaacacgacagagagcgcga

SEQ ID NO: 454562 - DNA, 25 bp, Homo sapien
tgaggatgtccctgaccgtacagag

SEQ ID NO: 454563 - DNA, 25 bp, Homo sapien
caggacattataggacaccaccagt

SEQ ID NO: 454564 - DNA, 25 bp, Homo sapien
gaatggtattctagaggactcccag

SEQ ID NO: 454565 - DNA, 25 bp, Homo sapien
tcaaggcgctacgaagaacaggaac

SEQ ID NO: 454566 - DNA, 25 bp, Homo sapien
taagagactccagagacatgcggga

SEQ ID NO: 454567 - DNA, 25 bp, Homo sapien
gataccaaagagagccgtgatccca

SEQ ID NO: 454568 - DNA, 25 bp, Homo sapien
tgccagagatactagggaccgaagg

SEQ ID NO: 454569 - DNA, 25 bp, Homo sapien
tgacagagaacctcgagatggtcgg

SEQ ID NO: 454570 - DNA, 25 bp, Homo sapien
gacatgatcatgaacgaacttcaca

SEQ ID NO: 454571 - DNA, 25 bp, Homo sapien
tgatcgacgccatgaaaggagggaa

SEQ ID NO: 454572 - DNA, 25 bp, Homo sapien
gaacttcacagtctcatgatcgacg

SEQ ID NO: 454573 - DNA, 25 bp, Homo sapien
tctccaatgcgagagaaagggagac

SEQ ID NO: 454574 - DNA, 25 bp, Homo sapien
gtctagcaaatctccgaagcgaaaa

SEQ ID NO: 454575 - DNA, 25 bp, Homo sapien
aagtcttgttgtaccataagtggag

SEQ ID NO: 454576 - DNA, 25 bp, Homo sapien
tagatcaaaattgtccccgtcacct

SEQ ID NO: 454577 - DNA, 25 bp, Homo sapien
gaagcgaaaatcaagcccgaagtcg

SEQ ID NO: 454578 - DNA, 25 bp, Homo sapien
gcatttgttgcgatcagtgacctta

SEQ ID NO: 454579 - DNA, 25 bp, Homo sapien
cacagtgtaaagttcggctattctg

SEQ ID NO: 454580 - DNA, 25 bp, Homo sapien
gcaggacttgcaccactatcagtgt

SEQ ID NO: 454581 - DNA, 25 bp, Homo sapien
tatcagtgtctcacaccagtggtgc

SEQ ID NO: 454582 - DNA, 25 bp, Homo sapien
ggctctttgtcctattaccaattgg

SEQ ID NO: 454583 - DNA, 25 bp, Homo sapien
gcaaatacgttttcccagtgtgcag

SEQ ID NO: 454584 - DNA, 25 bp, Homo sapien
gaagtggttgttccattttgcatct

SEQ ID NO: 454585 - DNA, 25 bp, Homo sapien
ggctgtttctgatcttatgtatatc

SEQ ID NO: 454586 - DNA, 25 bp, Homo sapien
tatctgatagcacatcccgaagacc

SEQ ID NO: 454587 - DNA, 25 bp, Homo sapien
gaggcttggacccagcactggcagt

SEQ ID NO: 454588 - DNA, 25 bp, Homo sapien
cccgaagacccagtgtatttgagag

SEQ ID NO: 454589 - DNA, 25 bp, Homo sapien
tacagcagaggtgagttgtcactag

SEQ ID NO: 454590 - DNA, 25 bp, Homo sapien
taccatttgatgtaagcacgggaac

SEQ ID NO: 454591 - DNA, 25 bp, Homo sapien
tgttcgtatttgtgtgcgatggaag

SEQ ID NO: 454592 - DNA, 25 bp, Homo sapien
cacgggaacccttgtatggtgttcg

SEQ ID NO: 454593 - DNA, 25 bp, Homo sapien
gatggaagggtgcagcaatttgggc

SEQ ID NO: 454594 - DNA, 25 bp, Homo sapien
ctggcatttgtctaagggcgataag

SEQ ID NO: 454595 - DNA, 25 bp, Homo sapien
tgtgctcaggcgtaatttctcactc

SEQ ID NO: 454596 - DNA, 25 bp, Homo sapien
actgggattttgagctttccttgag

SEQ ID NO: 454597 - DNA, 25 bp, Homo sapien
ggaaggcattgagcggacccgtaat

SEQ ID NO: 454598 - DNA, 25 bp, Homo sapien
gcggtggtgcctccggactgcactt

SEQ ID NO: 454599 - DNA, 25 bp, Homo sapien
ctagccaagagccggttcccgggag

SEQ ID NO: 454600 - DNA, 25 bp, Homo sapien
gggagccgcgcgcgcatcgctttct

SEQ ID NO: 454601 - DNA, 25 bp, Homo sapien
gaagtaagcgttctgtgaattggtg

SEQ ID NO: 454602 - DNA, 25 bp, Homo sapien
tttcgcttgaccctggagaggcggc

SEQ ID NO: 454603 - DNA, 25 bp, Homo sapien
gcggcgggcgggttggttctgcttc

SEQ ID NO: 454604 - DNA, 25 bp, Homo sapien
gaggcggcgggcgggttggttctgc

SEQ ID NO: 454605 - DNA, 25 bp, Homo sapien
gcttgaccctggagaggcggcgggc

SEQ ID NO: 454606 - DNA, 25 bp, Homo sapien
agagcacagattcgatttccaagtc

SEQ ID NO: 454607 - DNA, 25 bp, Homo sapien
gcacagattcgatttccaagtcccg

SEQ ID NO: 454608 - DNA, 25 bp, Homo sapien
gattcgatttccaagtcccgccgca

SEQ ID NO: 454609 - DNA, 25 bp, Homo sapien
acagattcgatttccaagtcccgcc

SEQ ID NO: 454610 - DNA, 25 bp, Homo sapien
tctgtcagagaacctaataagtgct

SEQ ID NO: 454611 - DNA, 25 bp, Homo sapien
tgctgccggagcgttacatcaaacc

SEQ ID NO: 454612 - DNA, 25 bp, Homo sapien
gaacttcgagatacgggcacatacg

SEQ ID NO: 454613 - DNA, 25 bp, Homo sapien
aacccacctgtagagaagcttttgc

SEQ ID NO: 454614 - DNA, 25 bp, Homo sapien
cccaaactgtattagatagatgcta

SEQ ID NO: 454615 - DNA, 25 bp, Homo sapien
ccatctcaaaaaaggtcgaaactgt

SEQ ID NO: 454616 - DNA, 25 bp, Homo sapien
ctacttggttggctaatgcataaga

SEQ ID NO: 454617 - DNA, 25 bp, Homo sapien
ctggcaattgtagctttcatgagat

SEQ ID NO: 454618 - DNA, 25 bp, Homo sapien
cagccatggactcctgaggcagaga

SEQ ID NO: 454619 - DNA, 25 bp, Homo sapien
tatttagtggttatgtcttccccga

SEQ ID NO: 454620 - DNA, 25 bp, Homo sapien
taaggatagtgagtagcctcagcca

SEQ ID NO: 454621 - DNA, 25 bp, Homo sapien
tgaggattcatattagggcaccacc

SEQ ID NO: 454622 - DNA, 25 bp, Homo sapien
cttaatggtaaagcagagtctcgac

SEQ ID NO: 454623 - DNA, 25 bp, Homo sapien
cacagtgtgcttggttccatgtcta

SEQ ID NO: 454624 - DNA, 25 bp, Homo sapien
cctgaggctgagacgatgaagtagt

SEQ ID NO: 454625 - DNA, 25 bp, Homo sapien
tagttgcccaaattaacatgactgc

SEQ ID NO: 454626 - DNA, 25 bp, Homo sapien
tcgactatttaaaacatggcttccc

SEQ ID NO: 454627 - DNA, 25 bp, Homo sapien
ggaacaggctctcctaatatttttc

SEQ ID NO: 454628 - DNA, 25 bp, Homo sapien
gcatctattaaaagtttggcccatg

SEQ ID NO: 454629 - DNA, 25 bp, Homo sapien
tgtatttaactggttgctcgactat

SEQ ID NO: 454630 - DNA, 25 bp, Homo sapien
tctacccaaactgcttgctgaatct

SEQ ID NO: 454631 - DNA, 25 bp, Homo sapien
tattgactctaatttatatcggtga

SEQ ID NO: 454632 - DNA, 25 bp, Homo sapien
tatcactgaacatgagaagggccaa

SEQ ID NO: 454633 - DNA, 25 bp, Homo sapien
ggttgtccctaatgactgcccttct

SEQ ID NO: 454634 - DNA, 25 bp, Homo sapien
tttatgagtatgcagctatattgcc

SEQ ID NO: 454635 - DNA, 25 bp, Homo sapien
taagtgcccagaaactattagggac

SEQ ID NO: 454636 - DNA, 25 bp, Homo sapien
gaataaattcgcaggaggactttct

SEQ ID NO: 454637 - DNA, 25 bp, Homo sapien
tgtgcaggtgagacctcagcaagct

SEQ ID NO: 454638 - DNA, 25 bp, Homo sapien
aaaattgacatagtggatccctggg

SEQ ID NO: 454639 - DNA, 25 bp, Homo sapien
tgatgaaggtcatagaactctccct

SEQ ID NO: 454640 - DNA, 25 bp, Homo sapien
cattggcaaagctcaggcactggct

SEQ ID NO: 454641 - DNA, 25 bp, Homo sapien
cattatgcaactccacatttgaggc

SEQ ID NO: 454642 - DNA, 25 bp, Homo sapien
gctgggaagttcatgacaaagcacc

SEQ ID NO: 454643 - DNA, 25 bp, Homo sapien
tagacagaaccttcccgctatatat

SEQ ID NO: 454644 - DNA, 25 bp, Homo sapien
gggagggactatcttccgcatagac

SEQ ID NO: 454645 - DNA, 25 bp, Homo sapien
ccgctatatattcacatggtggaag

SEQ ID NO: 454646 - DNA, 25 bp, Homo sapien
tgtcttagtacgtttgggcagttat

SEQ ID NO: 454647 - DNA, 25 bp, Homo sapien
tagagcacattatattagcaagggt

SEQ ID NO: 454648 - DNA, 25 bp, Homo sapien
gtaatatgaagctaccatcactaag

SEQ ID NO: 454649 - DNA, 25 bp, Homo sapien
tagtattggctcaagggtagacaaa

SEQ ID NO: 454650 - DNA, 25 bp, Homo sapien
tctctagggaaggatgaacataact

SEQ ID NO: 454651 - DNA, 25 bp, Homo sapien
tctaattgcctacaagataaagtcc

SEQ ID NO: 454652 - DNA, 25 bp, Homo sapien
catgcattcaagaccttctctaggg

SEQ ID NO: 454653 - DNA, 25 bp, Homo sapien
taaacacccgtatcctatacttggc

SEQ ID NO: 454654 - DNA, 25 bp, Homo sapien
tatacagttgcagggtctttccttg

SEQ ID NO: 454655 - DNA, 25 bp, Homo sapien
tttgggaaaggactgaaggagtcat

SEQ ID NO: 454656 - DNA, 25 bp, Homo sapien
tttccttgtggggacctgattcctc

SEQ ID NO: 454657 - DNA, 25 bp, Homo sapien
gaaattctgggtctaagaacagctc

SEQ ID NO: 454658 - DNA, 25 bp, Homo sapien
cagtgactagctggtctctatgagg

SEQ ID NO: 454659 - DNA, 25 bp, Homo sapien
cagcaacagtagctagatcagcctt

SEQ ID NO: 454660 - DNA, 25 bp, Homo sapien
ccttaatgagaggagtccgtgctgc

SEQ ID NO: 454661 - DNA, 25 bp, Homo sapien
caactttggtctccgttgctggcaa

SEQ ID NO: 454662 - DNA, 25 bp, Homo sapien
gcacagctctcttcaggcaagggca

SEQ ID NO: 454663 - DNA, 25 bp, Homo sapien
ggcatgcctttgtaacccctgttta

SEQ ID NO: 454664 - DNA, 25 bp, Homo sapien
tgttcctgtggagagccttgaggct

SEQ ID NO: 454665 - DNA, 25 bp, Homo sapien
gagatctaggcagcaaaacgtgaca

SEQ ID NO: 454666 - DNA, 25 bp, Homo sapien
taggttttcacttgcgactccatcc

SEQ ID NO: 454667 - DNA, 25 bp, Homo sapien
catgcaggtttagctttatcaggag

SEQ ID NO: 454668 - DNA, 25 bp, Homo sapien
tatgtagcgactcaagttacgaggc

SEQ ID NO: 454669 - DNA, 25 bp, Homo sapien
cagttgcaggttagtttccccagga

SEQ ID NO: 454670 - DNA, 25 bp, Homo sapien
tgccccatgacattttgcgtagtgg

SEQ ID NO: 454671 - DNA, 25 bp, Homo sapien
tagaatgtcacctccaaccaaggta

SEQ ID NO: 454672 - DNA, 25 bp, Homo sapien
taggctgatcagttggccacatggg

SEQ ID NO: 454673 - DNA, 25 bp, Homo sapien
agttgtcttactgggcataggctga

SEQ ID NO: 454674 - DNA, 25 bp, Homo sapien
tcaggtgtgaagcaacaagatccac

SEQ ID NO: 454675 - DNA, 25 bp, Homo sapien
gtgtgagaatcaccctggcctagaa

SEQ ID NO: 454676 - DNA, 25 bp, Homo sapien
tagaagctccatgcaccacagtagc

SEQ ID NO: 454677 - DNA, 25 bp, Homo sapien
cccgggcttctcaaatgatgtttca

SEQ ID NO: 454678 - DNA, 25 bp, Homo sapien
gagacacatggaggacggtttccca

SEQ ID NO: 454679 - DNA, 25 bp, Homo sapien
gggagaattgtcatcctaacaaaat

SEQ ID NO: 454680 - DNA, 25 bp, Homo sapien
agttcacacttttgatggcatttga

SEQ ID NO: 454681 - DNA, 25 bp, Homo sapien
gtagcaagcagtacaagagacacat

SEQ ID NO: 454682 - DNA, 25 bp, Homo sapien
ccaagacccatagggtgatgtgaca

SEQ ID NO: 454683 - DNA, 25 bp, Homo sapien
gttgcattgcagaagaggtacactg

SEQ ID NO: 454684 - DNA, 25 bp, Homo sapien
tcatacctcaaagttgctctctgca

SEQ ID NO: 454685 - DNA, 25 bp, Homo sapien
tatcaagctgtaagaaagcctgttc

SEQ ID NO: 454686 - DNA, 25 bp, Homo sapien
tatatgggcattcgagttgctccac

SEQ ID NO: 454687 - DNA, 25 bp, Homo sapien
taatcttctgcccactttatattgg

SEQ ID NO: 454688 - DNA, 25 bp, Homo sapien
gcattttccctaacagctaatgatg

SEQ ID NO: 454689 - DNA, 25 bp, Homo sapien
cattcagcttattgagcattcagct

SEQ ID NO: 454690 - DNA, 25 bp, Homo sapien
tatagcctggagtactgcgccaaag

SEQ ID NO: 454691 - DNA, 25 bp, Homo sapien
caggcctcaggcttagtcttgcaag

SEQ ID NO: 454692 - DNA, 25 bp, Homo sapien
tgggcagaacaataacaggcactgt

SEQ ID NO: 454693 - DNA, 25 bp, Homo sapien
caggcacaggtggaacatcttaaca

SEQ ID NO: 454694 - DNA, 25 bp, Homo sapien
tctggacttgtctacaccatgggtc

SEQ ID NO: 454695 - DNA, 25 bp, Homo sapien
tctaggagccggttagaagtgctga

SEQ ID NO: 454696 - DNA, 25 bp, Homo sapien
gctctaagtgtagtgctcagaccgg

SEQ ID NO: 454697 - DNA, 25 bp, Homo sapien
tataagtcgcaatgttcaaacctgc

SEQ ID NO: 454698 - DNA, 25 bp, Homo sapien
gacgccctctatcatggtgaaaagc

SEQ ID NO: 454699 - DNA, 25 bp, Homo sapien
cacctagccagctgtcaagggcaga

SEQ ID NO: 454700 - DNA, 25 bp, Homo sapien
ttgtgaaccaatgcaagacgccctc

SEQ ID NO: 454701 - DNA, 25 bp, Homo sapien
tcaacatttggaggcaatcctacct

SEQ ID NO: 454702 - DNA, 25 bp, Homo sapien
gaatttgggcttggaccagatctaa

SEQ ID NO: 454703 - DNA, 25 bp, Homo sapien
tgtaatggagcatcaagccactcgg

SEQ ID NO: 454704 - DNA, 25 bp, Homo sapien
tcggcggcagcatggagctataact

SEQ ID NO: 454705 - DNA, 25 bp, Homo sapien
aactggagtcccaaatgtcatcagg

SEQ ID NO: 454706 - DNA, 25 bp, Homo sapien
tattagtgcagccaagtagcctctc

SEQ ID NO: 454707 - DNA, 25 bp, Homo sapien
gaaccccaaaatggtcatgaccgtg

SEQ ID NO: 454708 - DNA, 25 bp, Homo sapien
tcattctttgcaggaggcccaacct

SEQ ID NO: 454709 - DNA, 25 bp, Homo sapien
gcaagagtgtatgccctgccagaag

SEQ ID NO: 454710 - DNA, 25 bp, Homo sapien
cagcatattacagtttctgagccag

SEQ ID NO: 454711 - DNA, 25 bp, Homo sapien
tgttttaccattcaggtcacctgcc

SEQ ID NO: 454712 - DNA, 25 bp, Homo sapien
tattcatggataagaatgcacaggg

SEQ ID NO: 454713 - DNA, 25 bp, Homo sapien
tctagtgccagaatgggagcaagac

SEQ ID NO: 454714 - DNA, 25 bp, Homo sapien
gagtactttgcttgatgctcatgta

SEQ ID NO: 454715 - DNA, 25 bp, Homo sapien
taattaatctagagctcattttgct

SEQ ID NO: 454716 - DNA, 25 bp, Homo sapien
taatcctgggatagacttaagtaac

SEQ ID NO: 454717 - DNA, 25 bp, Homo sapien
gaatttgaccttgctgtgtactgga

SEQ ID NO: 454718 - DNA, 25 bp, Homo sapien
gagaagaattctgtaggctttgaga

SEQ ID NO: 454719 - DNA, 25 bp, Homo sapien
tgcagagagaagaattctgtaggct

SEQ ID NO: 454720 - DNA, 25 bp, Homo sapien
aattctgtaggctttgagagaatcc

SEQ ID NO: 454721 - DNA, 25 bp, Homo sapien
tgtaggctttgagagaatccatgta

SEQ ID NO: 454722 - DNA, 25 bp, Homo sapien
tgaggagaatgcatctagacagagc

SEQ ID NO: 454723 - DNA, 25 bp, Homo sapien
ggccagtgaggagaatgcatctaga

SEQ ID NO: 454724 - DNA, 25 bp, Homo sapien
cagctgagcagagcgcatctgcctg

SEQ ID NO: 454725 - DNA, 25 bp, Homo sapien
aacttccctgatctgtgcgggggca

SEQ ID NO: 454726 - DNA, 25 bp, Homo sapien
gagtatagcctgcatcaccgaggtt

SEQ ID NO: 454727 - DNA, 25 bp, Homo sapien
tgagtggagtatagcctgcatcacc

SEQ ID NO: 454728 - DNA, 25 bp, Homo sapien
tagcctgcatcaccgaggttttgcc

SEQ ID NO: 454729 - DNA, 25 bp, Homo sapien
tggtgagtggagtatagcctgcatc

SEQ ID NO: 454730 - DNA, 25 bp, Homo sapien
tcttaaaagtataatccatgtctat

SEQ ID NO: 454731 - DNA, 25 bp, Homo sapien
gttgcttcctgataatatgtctata

SEQ ID NO: 454732 - DNA, 25 bp, Homo sapien
tccagatgaccaagctgaggttcag

SEQ ID NO: 454733 - DNA, 25 bp, Homo sapien
tcttctaacatgatccactagttgc

SEQ ID NO: 454734 - DNA, 25 bp, Homo sapien
ggtcatacaccagtactaccaagga

SEQ ID NO: 454735 - DNA, 25 bp, Homo sapien
cagtactaccaaggacagctttttt

SEQ ID NO: 454736 - DNA, 25 bp, Homo sapien
caccagtactaccaaggacagcttt

SEQ ID NO: 454737 - DNA, 25 bp, Homo sapien
ggttcctggtcatacaccagtacta

SEQ ID NO: 454738 - DNA, 25 bp, Homo sapien
tctgatgaagtcaccacaccactgg

SEQ ID NO: 454739 - DNA, 25 bp, Homo sapien
ccagttcctcaagatagcccctgtg

SEQ ID NO: 454740 - DNA, 25 bp, Homo sapien
caccactggctaatgaagtagataa

SEQ ID NO: 454741 - DNA, 25 bp, Homo sapien
cgtctcgtcctgttcttccgcccac

SEQ ID NO: 454742 - DNA, 25 bp, Homo sapien
gcagggccccgaatgaagacagcat

SEQ ID NO: 454743 - DNA, 25 bp, Homo sapien
cagatcagggaggtccacagttaca

SEQ ID NO: 454744 - DNA, 25 bp, Homo sapien
caccagcaggacattatctacagag

SEQ ID NO: 454745 - DNA, 25 bp, Homo sapien
tagcgtgagcagtgctgtaacagtg

SEQ ID NO: 454746 - DNA, 25 bp, Homo sapien
cattggcagtacatagttgtgagac

SEQ ID NO: 454747 - DNA, 25 bp, Homo sapien
tgatgtccccagtgaaggtaaaaag

SEQ ID NO: 454748 - DNA, 25 bp, Homo sapien
gaagacagcactaatggggtcaatg

SEQ ID NO: 454749 - DNA, 25 bp, Homo sapien
cactaatggggtcaatgatgatacc

SEQ ID NO: 454750 - DNA, 25 bp, Homo sapien
cttgccctggaaagttttctcatgg

SEQ ID NO: 454751 - DNA, 25 bp, Homo sapien
aaagttttctcatggaaaacttgca

SEQ ID NO: 454752 - DNA, 25 bp, Homo sapien
gttttctcatggaaaacttgcatgg

SEQ ID NO: 454753 - DNA, 25 bp, Homo sapien
tctcatggaaaacttgcatggccat

SEQ ID NO: 454754 - DNA, 25 bp, Homo sapien
ctaacaaaggtgaaaaagggctgca

SEQ ID NO: 454755 - DNA, 25 bp, Homo sapien
gagagctcgtgcctgaaggagtcct

SEQ ID NO: 454756 - DNA, 25 bp, Homo sapien
gatgatgtatttcaaccggtaaccc

SEQ ID NO: 454757 - DNA, 25 bp, Homo sapien
tcaccattgattgagccgggctgaa

SEQ ID NO: 454758 - DNA, 25 bp, Homo sapien
tgtcatcgtcctctgttctggttat

SEQ ID NO: 454759 - DNA, 25 bp, Homo sapien
tcatcgtcctctgttctggttatca

SEQ ID NO: 454760 - DNA, 25 bp, Homo sapien
tctggttatcatattgtgacgtgtc

SEQ ID NO: 454761 - DNA, 25 bp, Homo sapien
tattgtgacgtgtcgcctctgtcat

SEQ ID NO: 454762 - DNA, 25 bp, Homo sapien
tgcagtgctctcgaaaagcgggcat

SEQ ID NO: 454763 - DNA, 25 bp, Homo sapien
taattttgcagtgctctcgaaaagc

SEQ ID NO: 454764 - DNA, 25 bp, Homo sapien
ggtcccggggctaattttgcagtgc

SEQ ID NO: 454765 - DNA, 25 bp, Homo sapien
gggctaattttgcagtgctctcgaa

SEQ ID NO: 454766 - DNA, 25 bp, Homo sapien
caaggagacacaccctagcaaccgg

SEQ ID NO: 454767 - DNA, 25 bp, Homo sapien
aggaggccaaggagacacaccctag

SEQ ID NO: 454768 - DNA, 25 bp, Homo sapien
ggccaaggagacacaccctagcaac

SEQ ID NO: 454769 - DNA, 25 bp, Homo sapien
gaggccaaggagacacaccctagca

SEQ ID NO: 454770 - DNA, 25 bp, Homo sapien
ccgaagaagcaccacggatccccac

SEQ ID NO: 454771 - DNA, 25 bp, Homo sapien
gttcccgaagaagcaccacggatcc

SEQ ID NO: 454772 - DNA, 25 bp, Homo sapien
gaagaagcaccacggatccccaccc

SEQ ID NO: 454773 - DNA, 25 bp, Homo sapien
ctgttcccgaagaagcaccacggat

SEQ ID NO: 454774 - DNA, 25 bp, Homo sapien
aaagataactgcacacaagcgctca

SEQ ID NO: 454775 - DNA, 25 bp, Homo sapien
taaaggtccagcgagggtcttcctg

SEQ ID NO: 454776 - DNA, 25 bp, Homo sapien
gataatcggccgctttccaaaccaa

SEQ ID NO: 454777 - DNA, 25 bp, Homo sapien
caagcgctcaaggtgtactccctgg

SEQ ID NO: 454778 - DNA, 25 bp, Homo sapien
tttgcagggcaacatcaaaagtgcc

SEQ ID NO: 454779 - DNA, 25 bp, Homo sapien
cattgatagcctagaagggaacacc

SEQ ID NO: 454780 - DNA, 25 bp, Homo sapien
gaaataatgcgagaagatgcacccc

SEQ ID NO: 454781 - DNA, 25 bp, Homo sapien
gcctggcacggcattattccattga

SEQ ID NO: 454782 - DNA, 25 bp, Homo sapien
ttcaaccactatgcttgggccaaaa

SEQ ID NO: 454783 - DNA, 25 bp, Homo sapien
tgtttttcaaccactatgcttgggc

SEQ ID NO: 454784 - DNA, 25 bp, Homo sapien
caaccactatgcttgggccaaaaca

SEQ ID NO: 454785 - DNA, 25 bp, Homo sapien
ttttcaaccactatgcttgggccaa

SEQ ID NO: 454786 - DNA, 25 bp, Homo sapien
ataataagtgctgtttttcataatc

SEQ ID NO: 454787 - DNA, 25 bp, Homo sapien
atgaataataagtgctgtttttcat

SEQ ID NO: 454788 - DNA, 25 bp, Homo sapien
gaataataagtgctgtttttcataa

SEQ ID NO: 454789 - DNA, 25 bp, Homo sapien
tttaatgaataataagtgctgtttt

SEQ ID NO: 454790 - DNA, 25 bp, Homo sapien
tggaggtaagggtcttcgaagaagc

SEQ ID NO: 454791 - DNA, 25 bp, Homo sapien
tgtaaagacagcttagtgaattttg

SEQ ID NO: 454792 - DNA, 25 bp, Homo sapien
aggtaagggtcttcgaagaagcagt

SEQ ID NO: 454793 - DNA, 25 bp, Homo sapien
cagcttagtgaattttggaggtaag

SEQ ID NO: 454794 - DNA, 25 bp, Homo sapien
ctcacggacatgcttagtagatttc

SEQ ID NO: 454795 - DNA, 25 bp, Homo sapien
gcagtatctggaatctgctcacgga

SEQ ID NO: 454796 - DNA, 25 bp, Homo sapien
cagtgaatgctacatgtagtgactc

SEQ ID NO: 454797 - DNA, 25 bp, Homo sapien
tcccaaaaattcgagtagaagctga

SEQ ID NO: 454798 - DNA, 25 bp, Homo sapien
gtttttgagcgataactgagccagg

SEQ ID NO: 454799 - DNA, 25 bp, Homo sapien
ctcaagtttttgagcgataactgag

SEQ ID NO: 454800 - DNA, 25 bp, Homo sapien
aagtttttgagcgataactgagcca

SEQ ID NO: 454801 - DNA, 25 bp, Homo sapien
tttttgagcgataactgagccagga

SEQ ID NO: 454802 - DNA, 25 bp, Homo sapien
gctgataagtatagcctggactctc

SEQ ID NO: 454803 - DNA, 25 bp, Homo sapien
taactcttagtgtcaatgtagcagt

SEQ ID NO: 454804 - DNA, 25 bp, Homo sapien
ttcatagatacagtcataggtggag

SEQ ID NO: 454805 - DNA, 25 bp, Homo sapien
actgttgcacttaagtctctcgaga

SEQ ID NO: 454806 - DNA, 25 bp, Homo sapien
tttgctctacttgactctataatta

SEQ ID NO: 454807 - DNA, 25 bp, Homo sapien
tataaaaggtgattccatcctccca

SEQ ID NO: 454808 - DNA, 25 bp, Homo sapien
ggaggggtaccattagcttgcatgc

SEQ ID NO: 454809 - DNA, 25 bp, Homo sapien
tataccgtgttcagattgtatttac

SEQ ID NO: 454810 - DNA, 25 bp, Homo sapien
ggtggtcttggtgggatttgctttg

SEQ ID NO: 454811 - DNA, 25 bp, Homo sapien
tgctactggtttgatgagagaaaat

SEQ ID NO: 454812 - DNA, 25 bp, Homo sapien
ctactggtttgatgagagaaaataa

SEQ ID NO: 454813 - DNA, 25 bp, Homo sapien
ttatgctactggtttgatgagagaa

SEQ ID NO: 454814 - DNA, 25 bp, Homo sapien
tatgctactggtttgatgagagaaa

SEQ ID NO: 454815 - DNA, 25 bp, Homo sapien
ctgattctattttttcagttttggt

SEQ ID NO: 454816 - DNA, 25 bp, Homo sapien
tgattctattttttcagttttggtg

SEQ ID NO: 454817 - DNA, 25 bp, Homo sapien
gtgttgctgcaacagtcttaaaacc

SEQ ID NO: 454818 - DNA, 25 bp, Homo sapien
gcatttctcccatatacttgacagt

SEQ ID NO: 454819 - DNA, 25 bp, Homo sapien
ttgacagtttactatggccaggttg

SEQ ID NO: 454820 - DNA, 25 bp, Homo sapien
tattgtttcatatcgtgttgctgca

SEQ ID NO: 454821 - DNA, 25 bp, Homo sapien
taattgataatacaggagggcactg

SEQ ID NO: 454822 - DNA, 25 bp, Homo sapien
aaataattgataatacaggagggca

SEQ ID NO: 454823 - DNA, 25 bp, Homo sapien
atctatattgggaaatttaaagcaa

SEQ ID NO: 454824 - DNA, 25 bp, Homo sapien
aattgataatacaggagggcactgt

SEQ ID NO: 454825 - DNA, 25 bp, Homo sapien
taaactgaaggcaaactaggaatat

SEQ ID NO: 454826 - DNA, 25 bp, Homo sapien
tagtactagatttgtcacagaacca

SEQ ID NO: 454827 - DNA, 25 bp, Homo sapien
ggcacatagtggatacttaacaaat

SEQ ID NO: 454828 - DNA, 25 bp, Homo sapien
tgttcagtgaaaagccatcctagta

SEQ ID NO: 454829 - DNA, 25 bp, Homo sapien
ttggtaatgtagttttcagctccag

SEQ ID NO: 454830 - DNA, 25 bp, Homo sapien
tatttctagtattgaaactttctag

SEQ ID NO: 454831 - DNA, 25 bp, Homo sapien
caattgaccgattttctagttctat

SEQ ID NO: 454832 - DNA, 25 bp, Homo sapien
tattctgcctaatcaatatttctag

SEQ ID NO: 454833 - DNA, 25 bp, Homo sapien
ttgataccaaattaactccaatggc

SEQ ID NO: 454834 - DNA, 25 bp, Homo sapien
acctttgtagttaccttcatcagag

SEQ ID NO: 454835 - DNA, 25 bp, Homo sapien
gggattgcacttggcatcctaaatt

SEQ ID NO: 454836 - DNA, 25 bp, Homo sapien
cacaaaatctctgttcctatatggc

SEQ ID NO: 454837 - DNA, 25 bp, Homo sapien
ccaaaggtgttaagtctggacaatt

SEQ ID NO: 454838 - DNA, 25 bp, Homo sapien
attaagatatatcaactggaaagcc

SEQ ID NO: 454839 - DNA, 25 bp, Homo sapien
taagatatatcaactggaaagccaa

SEQ ID NO: 454840 - DNA, 25 bp, Homo sapien
agccaaaggtgttaagtctggacaa

SEQ ID NO: 454841 - DNA, 25 bp, Homo sapien
tctttgataggattatttctcaatt

SEQ ID NO: 454842 - DNA, 25 bp, Homo sapien
ggaactcaagttgttgaatttcaga

SEQ ID NO: 454843 - DNA, 25 bp, Homo sapien
tcaagttgttgaatttcagaaggaa

SEQ ID NO: 454844 - DNA, 25 bp, Homo sapien
aactcaagttgttgaatttcagaag

SEQ ID NO: 454845 - DNA, 25 bp, Homo sapien
tttactcttactgagcttctctgtt

SEQ ID NO: 454846 - DNA, 25 bp, Homo sapien
tactcttactgagcttctctgttgt

SEQ ID NO: 454847 - DNA, 25 bp, Homo sapien
ttactcttactgagcttctctgttg

SEQ ID NO: 454848 - DNA, 25 bp, Homo sapien
ctttactcttactgagcttctctgt

SEQ ID NO: 454849 - DNA, 25 bp, Homo sapien
gaatctccacctgagctgatgactt

SEQ ID NO: 454850 - DNA, 25 bp, Homo sapien
gataatggttactcctcctgttcaa

SEQ ID NO: 454851 - DNA, 25 bp, Homo sapien
tccagttttaggagataatggttac

SEQ ID NO: 454852 - DNA, 25 bp, Homo sapien
tctgcttcatctgtcatccttccac

SEQ ID NO: 454853 - DNA, 25 bp, Homo sapien
gattgggaccactcaactaatccag

SEQ ID NO: 454854 - DNA, 25 bp, Homo sapien
taagatcagctgattagaaccctta

SEQ ID NO: 454855 - DNA, 25 bp, Homo sapien
gagctcatgtgatttgattgggacc

SEQ ID NO: 454856 - DNA, 25 bp, Homo sapien
gggaccattattcgccctatcacag

SEQ ID NO: 454857 - DNA, 25 bp, Homo sapien
caggttttcaagctgcctcattcct

SEQ ID NO: 454858 - DNA, 25 bp, Homo sapien
ttctttccggctgtagaactgaggc

SEQ ID NO: 454859 - DNA, 25 bp, Homo sapien
tccggctgtagaactgaggcccttg

SEQ ID NO: 454860 - DNA, 25 bp, Homo sapien
gctgtagaactgaggcccttgtttt

SEQ ID NO: 454861 - DNA, 25 bp, Homo sapien
aattatagttatataggtcagaagt

SEQ ID NO: 454862 - DNA, 25 bp, Homo sapien
tgcaaaggtctcactctactaaaat

SEQ ID NO: 454863 - DNA, 25 bp, Homo sapien
aagtaagttcattataggaaacatc

SEQ ID NO: 454864 - DNA, 25 bp, Homo sapien
aaagtaagttcattataggaaacat

SEQ ID NO: 454865 - DNA, 25 bp, Homo sapien
tgagtaagttgttgtggattattca

SEQ ID NO: 454866 - DNA, 25 bp, Homo sapien
gaatttttgtcaggttaagcttcaa

SEQ ID NO: 454867 - DNA, 25 bp, Homo sapien
gtttattttggacaatgaacaaaga

SEQ ID NO: 454868 - DNA, 25 bp, Homo sapien
gagtgaaattattctcaaactgaat

SEQ ID NO: 454869 - DNA, 25 bp, Homo sapien
tttagtaacttctgaacttctactg

SEQ ID NO: 454870 - DNA, 25 bp, Homo sapien
ttagtaacttctgaacttctactgg

SEQ ID NO: 454871 - DNA, 25 bp, Homo sapien
agtaacttctgaacttctactggga

SEQ ID NO: 454872 - DNA, 25 bp, Homo sapien
tagtaacttctgaacttctactggg

SEQ ID NO: 454873 - DNA, 25 bp, Homo sapien
aggcaccaccggctctgcggtttgg

SEQ ID NO: 454874 - DNA, 25 bp, Homo sapien
tctgcggtttggcgctcggtagcca

SEQ ID NO: 454875 - DNA, 25 bp, Homo sapien
ttgggactgatctgacagggaatgc

SEQ ID NO: 454876 - DNA, 25 bp, Homo sapien
tattgatccacgaacaaaggcacca

SEQ ID NO: 454877 - DNA, 25 bp, Homo sapien
ttctgttagaaactgtgccccccac

SEQ ID NO: 454878 - DNA, 25 bp, Homo sapien
agagaggtgcaagttctgttagaaa

SEQ ID NO: 454879 - DNA, 25 bp, Homo sapien
caagttctgttagaaactgtgcccc

SEQ ID NO: 454880 - DNA, 25 bp, Homo sapien
agaggtgcaagttctgttagaaact

SEQ ID NO: 454881 - DNA, 25 bp, Homo sapien
ttttcattcacttccatcgaacatc

SEQ ID NO: 454882 - DNA, 25 bp, Homo sapien
tcgccatctgagcagtaaatcttac

SEQ ID NO: 454883 - DNA, 25 bp, Homo sapien
cctctaacacaactagatacagtat

SEQ ID NO: 454884 - DNA, 25 bp, Homo sapien
gatacagtatattcttcgccatctg

SEQ ID NO: 454885 - DNA, 25 bp, Homo sapien
ttgtgtcagtaacccttctgttatg

SEQ ID NO: 454886 - DNA, 25 bp, Homo sapien
gacgtcactgttgtggcattaatgc

SEQ ID NO: 454887 - DNA, 25 bp, Homo sapien
tcatgacgtcactgttgtggcatta

SEQ ID NO: 454888 - DNA, 25 bp, Homo sapien
taatgcatttcaccatgacttcttc

SEQ ID NO: 454889 - DNA, 25 bp, Homo sapien
cgtcactgttgtggcattaatgcat

SEQ ID NO: 454890 - DNA, 25 bp, Homo sapien
tgcctgttcatacccatacttatta

SEQ ID NO: 454891 - DNA, 25 bp, Homo sapien
catttcctgcctgttcatacccata

SEQ ID NO: 454892 - DNA, 25 bp, Homo sapien
tcatacccatacttattactttgga

SEQ ID NO: 454893 - DNA, 25 bp, Homo sapien
tattactttggatcaatccctcctt

SEQ ID NO: 454894 - DNA, 25 bp, Homo sapien
gatgacacgaaaaccttcaccaaac

SEQ ID NO: 454895 - DNA, 25 bp, Homo sapien
ctggaagctgtgatgctccaaaaat

SEQ ID NO: 454896 - DNA, 25 bp, Homo sapien
caaaaatatcacaggatcggatgac

SEQ ID NO: 454897 - DNA, 25 bp, Homo sapien
gaagctgtgatgctccaaaaatatc

SEQ ID NO: 454898 - DNA, 25 bp, Homo sapien
aactccacatctagagctattcttc

SEQ ID NO: 454899 - DNA, 25 bp, Homo sapien
tactaggactaccatctaaaacaaa

SEQ ID NO: 454900 - DNA, 25 bp, Homo sapien
gagctattcttctactaggactacc

SEQ ID NO: 454901 - DNA, 25 bp, Homo sapien
catctagagctattcttctactagg

SEQ ID NO: 454902 - DNA, 25 bp, Homo sapien
tcacaaactttcataaggagctaga

SEQ ID NO: 454903 - DNA, 25 bp, Homo sapien
tccacagaaatgcacaagcattgag

SEQ ID NO: 454904 - DNA, 25 bp, Homo sapien
gacattgaagctctatgcagcacat

SEQ ID NO: 454905 - DNA, 25 bp, Homo sapien
gaaggtgctggtcagatttccacag

SEQ ID NO: 454906 - DNA, 25 bp, Homo sapien
ttaaccacagtcagctgagaatacc

SEQ ID NO: 454907 - DNA, 25 bp, Homo sapien
aaccacagtcagctgagaatacctg

SEQ ID NO: 454908 - DNA, 25 bp, Homo sapien
ttttaaccacagtcagctgagaata

SEQ ID NO: 454909 - DNA, 25 bp, Homo sapien
gagaatacctgctccacacaaaact

SEQ ID NO: 454910 - DNA, 25 bp, Homo sapien
agggggctcagaacaccttgctcta

SEQ ID NO: 454911 - DNA, 25 bp, Homo sapien
gaagggggctcagaacaccttgctc

SEQ ID NO: 454912 - DNA, 25 bp, Homo sapien
gggggctcagaacaccttgctctac

SEQ ID NO: 454913 - DNA, 25 bp, Homo sapien
gtgaagggggctcagaacaccttgc

SEQ ID NO: 454914 - DNA, 25 bp, Homo sapien
agaactaggatctgagtctatttga

SEQ ID NO: 454915 - DNA, 25 bp, Homo sapien
acagtgggctttcttgtagaactag

SEQ ID NO: 454916 - DNA, 25 bp, Homo sapien
tcttgtagaactaggatctgagtct

SEQ ID NO: 454917 - DNA, 25 bp, Homo sapien
tgggctttcttgtagaactaggatc

SEQ ID NO: 454918 - DNA, 25 bp, Homo sapien
gaagaggaacagagcaagcttcttt

SEQ ID NO: 454919 - DNA, 25 bp, Homo sapien
tctggttcctcagagtaaagaagct

SEQ ID NO: 454920 - DNA, 25 bp, Homo sapien
tagcgctgaagctctggctgttgag

SEQ ID NO: 454921 - DNA, 25 bp, Homo sapien
ggttcctcagagtaaagaagctgtt

SEQ ID NO: 454922 - DNA, 25 bp, Homo sapien
gaattgaggttacatggtgcctggc

SEQ ID NO: 454923 - DNA, 25 bp, Homo sapien
tctaacacaagctagccaaggcagg

SEQ ID NO: 454924 - DNA, 25 bp, Homo sapien
gatgcaactctttgacgcagtgtga

SEQ ID NO: 454925 - DNA, 25 bp, Homo sapien
gaacattgctattgcctccctagag

SEQ ID NO: 454926 - DNA, 25 bp, Homo sapien
ctgctgatctgatgagaaagggaac

SEQ ID NO: 454927 - DNA, 25 bp, Homo sapien
acagccctgcaagtgtgagtcagtg

SEQ ID NO: 454928 - DNA, 25 bp, Homo sapien
gtggcatgccatgcttattttctgg

SEQ ID NO: 454929 - DNA, 25 bp, Homo sapien
aagtgtgagtcagtggagcaccagc

SEQ ID NO: 454930 - DNA, 25 bp, Homo sapien
acaatgctgcctcttgaagtttatg

SEQ ID NO: 454931 - DNA, 25 bp, Homo sapien
ttgtcccctcacacaatgctgcctc

SEQ ID NO: 454932 - DNA, 25 bp, Homo sapien
aatgctgcctcttgaagtttatgca

SEQ ID NO: 454933 - DNA, 25 bp, Homo sapien
gtgtttgtcccctcacacaatgctg

SEQ ID NO: 454934 - DNA, 25 bp, Homo sapien
taggaagctcactgccgatgtgaaa

SEQ ID NO: 454935 - DNA, 25 bp, Homo sapien
acgtggcccactgcctagcctcctg

SEQ ID NO: 454936 - DNA, 25 bp, Homo sapien
catttgtgagtttaggaagctcact

SEQ ID NO: 454937 - DNA, 25 bp, Homo sapien
cactgccgatgtgaaatcccatgag

SEQ ID NO: 454938 - DNA, 25 bp, Homo sapien
aacttcaaggagcagaaaggcccca

SEQ ID NO: 454939 - DNA, 25 bp, Homo sapien
tagcagggtgcctagtgcatacctc

SEQ ID NO: 454940 - DNA, 25 bp, Homo sapien
gattggaaaccacgtggcaaaggca

SEQ ID NO: 454941 - DNA, 25 bp, Homo sapien
tggagccatagaggagaataagccc

SEQ ID NO: 454942 - DNA, 25 bp, Homo sapien
gggccagtcagatccttgcttttca

SEQ ID NO: 454943 - DNA, 25 bp, Homo sapien
cacctggtgtgaaagatgcgttggg

SEQ ID NO: 454944 - DNA, 25 bp, Homo sapien
gggtcccaggccttaagctggcctg

SEQ ID NO: 454945 - DNA, 25 bp, Homo sapien
ccaggccttaagctggcctgggaca

SEQ ID NO: 454946 - DNA, 25 bp, Homo sapien
gcaccaaaagtgttaacagcgtgcc

SEQ ID NO: 454947 - DNA, 25 bp, Homo sapien
acgcaccaaaagtgttaacagcgtg

SEQ ID NO: 454948 - DNA, 25 bp, Homo sapien
ccaaaagtgttaacagcgtgccagg

SEQ ID NO: 454949 - DNA, 25 bp, Homo sapien
aaacgcaccaaaagtgttaacagcg

SEQ ID NO: 454950 - DNA, 25 bp, Homo sapien
tggagttgaaaggtaggacagaaac

SEQ ID NO: 454951 - DNA, 25 bp, Homo sapien
tctctgtggagttgaaaggtaggac

SEQ ID NO: 454952 - DNA, 25 bp, Homo sapien
gttgaaaggtaggacagaaacgcca

SEQ ID NO: 454953 - DNA, 25 bp, Homo sapien
aaggtaggacagaaacgccatcttt

SEQ ID NO: 454954 - DNA, 25 bp, Homo sapien
tcagatgttgcagttataagccata

SEQ ID NO: 454955 - DNA, 25 bp, Homo sapien
gcagttataagccataggcgggtaa

SEQ ID NO: 454956 - DNA, 25 bp, Homo sapien
tgtggacctggtgagtacgacttac

SEQ ID NO: 454957 - DNA, 25 bp, Homo sapien
ccataggcgggtaaatgtggacctg

SEQ ID NO: 454958 - DNA, 25 bp, Homo sapien
caagtcgttcttcctcccgggtcag

SEQ ID NO: 454959 - DNA, 25 bp, Homo sapien
gaatgacaagtcgttcttcctcccg

SEQ ID NO: 454960 - DNA, 25 bp, Homo sapien
atgacaagtcgttcttcctcccggg

SEQ ID NO: 454961 - DNA, 25 bp, Homo sapien
cggaatgacaagtcgttcttcctcc

SEQ ID NO: 454962 - DNA, 25 bp, Homo sapien
tagtgagaaagtaccaagccactgg

SEQ ID NO: 454963 - DNA, 25 bp, Homo sapien
ctcttacatggatggttagttgatc

SEQ ID NO: 454964 - DNA, 25 bp, Homo sapien
aagccactggaaggagttatacttc

SEQ ID NO: 454965 - DNA, 25 bp, Homo sapien
tagttgatcttagaaccagggtagc

SEQ ID NO: 454966 - DNA, 25 bp, Homo sapien
ggccaactgaggatgctgatatatg

SEQ ID NO: 454967 - DNA, 25 bp, Homo sapien
acaattttcaggtctccatcgccca

SEQ ID NO: 454968 - DNA, 25 bp, Homo sapien
tgctgatatatgtgcatctgcacaa

SEQ ID NO: 454969 - DNA, 25 bp, Homo sapien
ttttcaggtctccatcgcccatctt

SEQ ID NO: 454970 - DNA, 25 bp, Homo sapien
gccaggcatgggtggcaggctcctg

SEQ ID NO: 454971 - DNA, 25 bp, Homo sapien
agacaggaaaattccttgaaaccag

SEQ ID NO: 454972 - DNA, 25 bp, Homo sapien
taatcccagctactcgggaggctga

SEQ ID NO: 454973 - DNA, 25 bp, Homo sapien
ctgagacaggaaaattccttgaaac

SEQ ID NO: 454974 - DNA, 25 bp, Homo sapien
catcatgactgacaaggctgtgtga

SEQ ID NO: 454975 - DNA, 25 bp, Homo sapien
tccagaatagcaaagtagggcagcg

SEQ ID NO: 454976 - DNA, 25 bp, Homo sapien
taagtacggataatggatcgcctgc

SEQ ID NO: 454977 - DNA, 25 bp, Homo sapien
tgtgtgatcaactaggaccgaggac

SEQ ID NO: 454978 - DNA, 25 bp, Homo sapien
ccttctgttgtgttcttctgacagc

SEQ ID NO: 454979 - DNA, 25 bp, Homo sapien
gaaaggtctcagtttgaaggtgatg

SEQ ID NO: 454980 - DNA, 25 bp, Homo sapien
gcagtacatggagagagtggttatc

SEQ ID NO: 454981 - DNA, 25 bp, Homo sapien
cagataaggaggtcagataggcaac

SEQ ID NO: 454982 - DNA, 25 bp, Homo sapien
gatccacaagagagtatgggtagag

SEQ ID NO: 454983 - DNA, 25 bp, Homo sapien
ggggctgggctaggttgctaataat

SEQ ID NO: 454984 - DNA, 25 bp, Homo sapien
cagtgccacctggacttgtgggttt

SEQ ID NO: 454985 - DNA, 25 bp, Homo sapien
tccaaacagtgccacctggacttgt

SEQ ID NO: 454986 - DNA, 25 bp, Homo sapien
tagctttaatagtcttcaccctacc

SEQ ID NO: 454987 - DNA, 25 bp, Homo sapien
tctgttcaccgctgtgcttgtagaa

SEQ ID NO: 454988 - DNA, 25 bp, Homo sapien
caggtaacgttgaaaagcacccaca

SEQ ID NO: 454989 - DNA, 25 bp, Homo sapien
gctcagggaggtagacatgtcaatg

SEQ ID NO: 454990 - DNA, 25 bp, Homo sapien
tgaaaatagctcctcaagtaggctg

SEQ ID NO: 454991 - DNA, 25 bp, Homo sapien
gatggcagcaactagtacatggtgc

SEQ ID NO: 454992 - DNA, 25 bp, Homo sapien
caacgggatttggttttatgcagca

SEQ ID NO: 454993 - DNA, 25 bp, Homo sapien
tatccagagttcttgcaggtcaaag

SEQ ID NO: 454994 - DNA, 25 bp, Homo sapien
tatgcagcagggaatcttctaagaa

SEQ ID NO: 454995 - DNA, 25 bp, Homo sapien
ctgggattcataagaagggaatgtt

SEQ ID NO: 454996 - DNA, 25 bp, Homo sapien
aacctgggattcataagaagggaat

SEQ ID NO: 454997 - DNA, 25 bp, Homo sapien
ctaaaaacctgggattcataagaag

SEQ ID NO: 454998 - DNA, 25 bp, Homo sapien
gcgggacaattcaaagccggcggtg

SEQ ID NO: 454999 - DNA, 25 bp, Homo sapien
tgcttcaaagatgcgtgtgtcatct

SEQ ID NO: 455000 - DNA, 25 bp, Homo sapien
gaatgcttcaaagatgcgtgtgtca

SEQ ID NO: 455001 - DNA, 25 bp, Homo sapien
tcaaagatgcgtgtgtcatctttgc

SEQ ID NO: 455002 - DNA, 25 bp, Homo sapien
caaagatgcgtgtgtcatctttgca

SEQ ID NO: 455003 - DNA, 25 bp, Homo sapien
tatagaaaccactgaagccgtggca

SEQ ID NO: 455004 - DNA, 25 bp, Homo sapien
tcctggcgacatatcatccagcgga

SEQ ID NO: 455005 - DNA, 25 bp, Homo sapien
gactgcctcgcactggccagtcaag

SEQ ID NO: 455006 - DNA, 25 bp, Homo sapien
ccttcctgtcgtaagatgggtgatg

SEQ ID NO: 455007 - DNA, 25 bp, Homo sapien
caactactctagtcttgtggagaaa

SEQ ID NO: 455008 - DNA, 25 bp, Homo sapien
agttgccgaatagctctgacctgag

SEQ ID NO: 455009 - DNA, 25 bp, Homo sapien
cattgttatcgtccagcagttgccg

SEQ ID NO: 455010 - DNA, 25 bp, Homo sapien
tgagcaaagcagtgaaacgcggtgc

SEQ ID NO: 455011 - DNA, 25 bp, Homo sapien
taattctcacggtataagtgaagac

SEQ ID NO: 455012 - DNA, 25 bp, Homo sapien
acttcaggaagtgggtattaattct

SEQ ID NO: 455013 - DNA, 25 bp, Homo sapien
ggtattaattctcacggtataagtg

SEQ ID NO: 455014 - DNA, 25 bp, Homo sapien
gaagtgggtattaattctcacggta

SEQ ID NO: 455015 - DNA, 25 bp, Homo sapien
ggccataggatccacggtgtcatct

SEQ ID NO: 455016 - DNA, 25 bp, Homo sapien
tatgactgtgttaatgatcataaca

SEQ ID NO: 455017 - DNA, 25 bp, Homo sapien
ccataggatccacggtgtcatctga

SEQ ID NO: 455018 - DNA, 25 bp, Homo sapien
taggatccacggtgtcatctgactg

SEQ ID NO: 455019 - DNA, 25 bp, Homo sapien
ctacagctgtggctatggctctggc

SEQ ID NO: 455020 - DNA, 25 bp, Homo sapien
tgggtatggctgtggttatggaact

SEQ ID NO: 455021 - DNA, 25 bp, Homo sapien
caactcctgtggctatggctgcagc

SEQ ID NO: 455022 - DNA, 25 bp, Homo sapien
ctggctacggctgtgggtatggctg

SEQ ID NO: 455023 - DNA, 25 bp, Homo sapien
aaaagacaaaactagaaagccacag

SEQ ID NO: 455024 - DNA, 25 bp, Homo sapien
agccacagaaacacgaggtcatgat

SEQ ID NO: 455025 - DNA, 25 bp, Homo sapien
aagacaaaactagaaagccacagaa

SEQ ID NO: 455026 - DNA, 25 bp, Homo sapien
aaagccacagaaacacgaggtcatg

SEQ ID NO: 455027 - DNA, 25 bp, Homo sapien
ggccttatacttcccacgtgatgat

SEQ ID NO: 455028 - DNA, 25 bp, Homo sapien
agaaggccttatacttcccacgtga

SEQ ID NO: 455029 - DNA, 25 bp, Homo sapien
aactaggaatttccgcatcctggaa

SEQ ID NO: 455030 - DNA, 25 bp, Homo sapien
agaaactaggaatttccgcatcctg

SEQ ID NO: 455031 - DNA, 25 bp, Homo sapien
ctgttccgtaaaatcagcaaacaac

SEQ ID NO: 455032 - DNA, 25 bp, Homo sapien
tgttccgtaaaatcagcaaacaact

SEQ ID NO: 455033 - DNA, 25 bp, Homo sapien
tccgtaaaatcagcaaacaactgac

SEQ ID NO: 455034 - DNA, 25 bp, Homo sapien
gttccgtaaaatcagcaaacaactg

SEQ ID NO: 455035 - DNA, 25 bp, Homo sapien
gctgccttttttaacccacactaca

SEQ ID NO: 455036 - DNA, 25 bp, Homo sapien
aagatactgaaattggacggtgctg

SEQ ID NO: 455037 - DNA, 25 bp, Homo sapien
taagaagatactgaaattggacggt

SEQ ID NO: 455038 - DNA, 25 bp, Homo sapien
tactgaaattggacggtgctgccgt

SEQ ID NO: 455039 - DNA, 25 bp, Homo sapien
tttagcactgaaggcgttgcatctg

SEQ ID NO: 455040 - DNA, 25 bp, Homo sapien
cagctttagcactgaaggcgttgca

SEQ ID NO: 455041 - DNA, 25 bp, Homo sapien
ggcgttgcatctgtgagtgtgcggg

SEQ ID NO: 455042 - DNA, 25 bp, Homo sapien
gctttagcactgaaggcgttgcatc

SEQ ID NO: 455043 - DNA, 25 bp, Homo sapien
ctatgagcggagacagccaaatcta

SEQ ID NO: 455044 - DNA, 25 bp, Homo sapien
tgagcggagacagccaaatctatgc

SEQ ID NO: 455045 - DNA, 25 bp, Homo sapien
atgagcggagacagccaaatctatg

SEQ ID NO: 455046 - DNA, 25 bp, Homo sapien
tatgagcggagacagccaaatctat

SEQ ID NO: 455047 - DNA, 25 bp, Homo sapien
gatacacgcatcgcgtgccttcttg

SEQ ID NO: 455048 - DNA, 25 bp, Homo sapien
atacacgcatcgcgtgccttcttgg

SEQ ID NO: 455049 - DNA, 25 bp, Homo sapien
tacacgcatcgcgtgccttcttggt

SEQ ID NO: 455050 - DNA, 25 bp, Homo sapien
gttcatcaaagaactcccaaaatta

SEQ ID NO: 455051 - DNA, 25 bp, Homo sapien
ccaaaattaatcttcttcatccttc

SEQ ID NO: 455052 - DNA, 25 bp, Homo sapien
tccacatatcaaagttcatcaaaga

SEQ ID NO: 455053 - DNA, 25 bp, Homo sapien
tttattcacacagcagaccaccatt

SEQ ID NO: 455054 - DNA, 25 bp, Homo sapien
accacataccgaactctctgagaag

SEQ ID NO: 455055 - DNA, 25 bp, Homo sapien
cacataccgaactctctgagaaggt

SEQ ID NO: 455056 - DNA, 25 bp, Homo sapien
gttcttccaaccacataccgaactc

SEQ ID NO: 455057 - DNA, 25 bp, Homo sapien
caaccacataccgaactctctgaga

SEQ ID NO: 455058 - DNA, 25 bp, Homo sapien
taccggtgtagtgcaacacgcagct

SEQ ID NO: 455059 - DNA, 25 bp, Homo sapien
gcatcgggaaggtgcacccttctcc

SEQ ID NO: 455060 - DNA, 25 bp, Homo sapien
gcaacacgcagctctggccatgcat

SEQ ID NO: 455061 - DNA, 25 bp, Homo sapien
agctctggccatgcatcgggaaggt

SEQ ID NO: 455062 - DNA, 25 bp, Homo sapien
cactcttctgagcaaccccttcttc

SEQ ID NO: 455063 - DNA, 25 bp, Homo sapien
ggagatgttgtcagtttgtctctct

SEQ ID NO: 455064 - DNA, 25 bp, Homo sapien
acactcttctgagcaaccccttctt

SEQ ID NO: 455065 - DNA, 25 bp, Homo sapien
cacactcttctgagcaaccccttct

SEQ ID NO: 455066 - DNA, 25 bp, Homo sapien
tacacaggacagcaaaggggtgaaa

SEQ ID NO: 455067 - DNA, 25 bp, Homo sapien
acacaggacagcaaaggggtgaaaa

SEQ ID NO: 455068 - DNA, 25 bp, Homo sapien
caggacagcaaaggggtgaaaaggg

SEQ ID NO: 455069 - DNA, 25 bp, Homo sapien
cacaggacagcaaaggggtgaaaag

SEQ ID NO: 455070 - DNA, 25 bp, Homo sapien
ctgagatcacacttttcagtgcata

SEQ ID NO: 455071 - DNA, 25 bp, Homo sapien
acttttcagtgcatagaaactgaac

SEQ ID NO: 455072 - DNA, 25 bp, Homo sapien
ttcagtgcatagaaactgaactgtg

SEQ ID NO: 455073 - DNA, 25 bp, Homo sapien
gatcacacttttcagtgcatagaaa

SEQ ID NO: 455074 - DNA, 25 bp, Homo sapien
gaagtgcaccaatatacttctgtgc

SEQ ID NO: 455075 - DNA, 25 bp, Homo sapien
ctttttgggtgtggacgagaagtgc

SEQ ID NO: 455076 - DNA, 25 bp, Homo sapien
acttctgtgcagatgtacttttgtg

SEQ ID NO: 455077 - DNA, 25 bp, Homo sapien
gtgcagatgtacttttgtgaatggg

SEQ ID NO: 455078 - DNA, 25 bp, Homo sapien
tctctggggaccaaacctcagctat

SEQ ID NO: 455079 - DNA, 25 bp, Homo sapien
aatcggagactccaaccttaggcat

SEQ ID NO: 455080 - DNA, 25 bp, Homo sapien
tggattcagatttcaacctgtgagg

SEQ ID NO: 455081 - DNA, 25 bp, Homo sapien
gctattgtatagaatcccatggatt

SEQ ID NO: 455082 - DNA, 25 bp, Homo sapien
cacagggccagtactggtttgagcc

SEQ ID NO: 455083 - DNA, 25 bp, Homo sapien
agggccagtactggtttgagccaag

SEQ ID NO: 455084 - DNA, 25 bp, Homo sapien
agccaagatcaggcagtaaaattga

SEQ ID NO: 455085 - DNA, 25 bp, Homo sapien
gagccaagatcaggcagtaaaattg

SEQ ID NO: 455086 - DNA, 25 bp, Homo sapien
aaatagaagcacttttgtaccactg

SEQ ID NO: 455087 - DNA, 25 bp, Homo sapien
aaacatctggatatttggaagcagc

SEQ ID NO: 455088 - DNA, 25 bp, Homo sapien
tccaatctgctcactgtccctaaga

SEQ ID NO: 455089 - DNA, 25 bp, Homo sapien
tggcctgagattgccttctgtccaa

SEQ ID NO: 455090 - DNA, 25 bp, Homo sapien
gattccactggctttgcatatgttg

SEQ ID NO: 455091 - DNA, 25 bp, Homo sapien
tgctaccagtgactcaagtgtctgt

SEQ ID NO: 455092 - DNA, 25 bp, Homo sapien
ggaactgcacaggtatcgacttggg

SEQ ID NO: 455093 - DNA, 25 bp, Homo sapien
tctgtgtcaataagcagggctctct

SEQ ID NO: 455094 - DNA, 25 bp, Homo sapien
agatgattcatcaaagagcccaact

SEQ ID NO: 455095 - DNA, 25 bp, Homo sapien
aaaaccactgattagaacttggatg

SEQ ID NO: 455096 - DNA, 25 bp, Homo sapien
tgaatccacagatgattcatcaaag

SEQ ID NO: 455097 - DNA, 25 bp, Homo sapien
ttaaaaccactgattagaacttgga

SEQ ID NO: 455098 - DNA, 25 bp, Homo sapien
tcttccaagcacgtattttcttggg

SEQ ID NO: 455099 - DNA, 25 bp, Homo sapien
ccaagcacgtattttcttgggaact

SEQ ID NO: 455100 - DNA, 25 bp, Homo sapien
gctgtcatcttccaagcacgtattt

SEQ ID NO: 455101 - DNA, 25 bp, Homo sapien
actttatgtgttcgatgggatggaa

SEQ ID NO: 455102 - DNA, 25 bp, Homo sapien
gctgagaatcagctaaaacctccag

SEQ ID NO: 455103 - DNA, 25 bp, Homo sapien
tctgctgactgtttaaggtaagtgc

SEQ ID NO: 455104 - DNA, 25 bp, Homo sapien
taaggtaagtgccagcccgttggtg

SEQ ID NO: 455105 - DNA, 25 bp, Homo sapien
atcagctaaaacctccagggtctgc

SEQ ID NO: 455106 - DNA, 25 bp, Homo sapien
ggaggtatgcctgctagtttggtgt

SEQ ID NO: 455107 - DNA, 25 bp, Homo sapien
aggtatgcctgctagtttggtgtgt

SEQ ID NO: 455108 - DNA, 25 bp, Homo sapien
gtggaggtatgcctgctagtttggt

SEQ ID NO: 455109 - DNA, 25 bp, Homo sapien
gtatgcctgctagtttggtgtgtat

SEQ ID NO: 455110 - DNA, 25 bp, Homo sapien
tcaaaatgtatgctgcagaaatgta

SEQ ID NO: 455111 - DNA, 25 bp, Homo sapien
caaaatgtatgctgcagaaatgtaa

SEQ ID NO: 455112 - DNA, 25 bp, Homo sapien
acaggcctgccctcgtgaacagcat

SEQ ID NO: 455113 - DNA, 25 bp, Homo sapien
ggttggggcacaggcctgccctcgt

SEQ ID NO: 455114 - DNA, 25 bp, Homo sapien
tggggcacaggcctgccctcgtgaa

SEQ ID NO: 455115 - DNA, 25 bp, Homo sapien
gggcacaggcctgccctcgtgaaca

SEQ ID NO: 455116 - DNA, 25 bp, Homo sapien
ccatgcttggggatctgcttgtgtc

SEQ ID NO: 455117 - DNA, 25 bp, Homo sapien
tagggtgctggcgtacagggctgac

SEQ ID NO: 455118 - DNA, 25 bp, Homo sapien
tctgagtggcttgttaaagggctgt

SEQ ID NO: 455119 - DNA, 25 bp, Homo sapien
ccttccatcagtggttcatttgctt

SEQ ID NO: 455120 - DNA, 25 bp, Homo sapien
aggtaatgtttggtactggagttgc

SEQ ID NO: 455121 - DNA, 25 bp, Homo sapien
ctggagtcccagatactcttctaag

SEQ ID NO: 455122 - DNA, 25 bp, Homo sapien
tctggtcacagccgctggagtccca

SEQ ID NO: 455123 - DNA, 25 bp, Homo sapien
gtctggtcacagccgctggagtccc

SEQ ID NO: 455124 - DNA, 25 bp, Homo sapien
gagtcccagatactcttctaagagc

SEQ ID NO: 455125 - DNA, 25 bp, Homo sapien
cagtgaccccaaacagcaaatcagt

SEQ ID NO: 455126 - DNA, 25 bp, Homo sapien
gctgaaagaaccatcgaagtctcct

SEQ ID NO: 455127 - DNA, 25 bp, Homo sapien
gcaaatcagtcacagctcgagtctg

SEQ ID NO: 455128 - DNA, 25 bp, Homo sapien
cgaacatgtccgcttgcaagtgaat

SEQ ID NO: 455129 - DNA, 25 bp, Homo sapien
ctccccgaaattgggtggtgccagg

SEQ ID NO: 455130 - DNA, 25 bp, Homo sapien
ggacagaagacattgtcgtaggaga

SEQ ID NO: 455131 - DNA, 25 bp, Homo sapien
agaaagatgagctggctgctccccg

SEQ ID NO: 455132 - DNA, 25 bp, Homo sapien
cattgtcgtaggagaaagatgagct

SEQ ID NO: 455133 - DNA, 25 bp, Homo sapien
ccagcgccaagggacgaatacgagt

SEQ ID NO: 455134 - DNA, 25 bp, Homo sapien
ccaagggacgaatacgagtgggaca

SEQ ID NO: 455135 - DNA, 25 bp, Homo sapien
acgaatacgagtgggacagagtgtt

SEQ ID NO: 455136 - DNA, 25 bp, Homo sapien
atacgagtgggacagagtgtttgct

SEQ ID NO: 455137 - DNA, 25 bp, Homo sapien
tggacgtctgctccggggcaactga

SEQ ID NO: 455138 - DNA, 25 bp, Homo sapien
atccgccccgcaatcgggtacacgg

SEQ ID NO: 455139 - DNA, 25 bp, Homo sapien
ccttttgccgcccaggaggctttag

SEQ ID NO: 455140 - DNA, 25 bp, Homo sapien
gaacctctctctgggcgtccttttg

SEQ ID NO: 455141 - DNA, 25 bp, Homo sapien
gctccaccgaaaggcgctggaagga

SEQ ID NO: 455142 - DNA, 25 bp, Homo sapien
aaaacggcagctcgggctgagtgcc

SEQ ID NO: 455143 - DNA, 25 bp, Homo sapien
tggcagctcggtcttgaaggtttcc

SEQ ID NO: 455144 - DNA, 25 bp, Homo sapien
tgtccccgggaagctaaggactgcg

SEQ ID NO: 455145 - DNA, 25 bp, Homo sapien
gggatgatgaagtgggtgcagagta

SEQ ID NO: 455146 - DNA, 25 bp, Homo sapien
gcgccggttcctccgtggtgctgat

SEQ ID NO: 455147 - DNA, 25 bp, Homo sapien
tgcagagtagctaccgaaagggccg

SEQ ID NO: 455148 - DNA, 25 bp, Homo sapien
aagtgggtgcagagtagctaccgaa

SEQ ID NO: 455149 - DNA, 25 bp, Homo sapien
ctccagaccccggttcaagggcagg

SEQ ID NO: 455150 - DNA, 25 bp, Homo sapien
caccgtgtccgagaggtcgtgcccg

SEQ ID NO: 455151 - DNA, 25 bp, Homo sapien
ggagttggccgcctcctcaagcgcg

SEQ ID NO: 455152 - DNA, 25 bp, Homo sapien
ctgcctgcaccgtgtccgagaggtc

SEQ ID NO: 455153 - DNA, 25 bp, Homo sapien
gcggttacttccctggcgcggcagc

SEQ ID NO: 455154 - DNA, 25 bp, Homo sapien
tggcactgcatcgccggaccaggca

SEQ ID NO: 455155 - DNA, 25 bp, Homo sapien
tgaaacctcccacttacactgcgcg

SEQ ID NO: 455156 - DNA, 25 bp, Homo sapien
cttcttcgggagacaacgggccgat

SEQ ID NO: 455157 - DNA, 25 bp, Homo sapien
cccaaactgtgtgggcggtgagcaa

SEQ ID NO: 455158 - DNA, 25 bp, Homo sapien
tcttttcccgcacaagcgcagggag

SEQ ID NO: 455159 - DNA, 25 bp, Homo sapien
gcagccgactgggattcactacaag

SEQ ID NO: 455160 - DNA, 25 bp, Homo sapien
tacgcctcgatgcaaagacggcttg

SEQ ID NO: 455161 - DNA, 25 bp, Homo sapien
ttattggcgcgagttacaacttgcc

SEQ ID NO: 455162 - DNA, 25 bp, Homo sapien
tggcgcgagttacaacttgccgggc

SEQ ID NO: 455163 - DNA, 25 bp, Homo sapien
gagttacaacttgccgggctcacac

SEQ ID NO: 455164 - DNA, 25 bp, Homo sapien
cgcgagttacaacttgccgggctca

SEQ ID NO: 455165 - DNA, 25 bp, Homo sapien
ttatagatcccgctcctggaactcc

SEQ ID NO: 455166 - DNA, 25 bp, Homo sapien
atagatcccgctcctggaactccaa

SEQ ID NO: 455167 - DNA, 25 bp, Homo sapien
tatagatcccgctcctggaactcca

SEQ ID NO: 455168 - DNA, 25 bp, Homo sapien
aactagaatgaactccacaagaagg

SEQ ID NO: 455169 - DNA, 25 bp, Homo sapien
tacaagccacctgaagtcaatacaa

SEQ ID NO: 455170 - DNA, 25 bp, Homo sapien
cacaagaagggatacagggattctc

SEQ ID NO: 455171 - DNA, 25 bp, Homo sapien
catttatactcttgctacaagccac

SEQ ID NO: 455172 - DNA, 25 bp, Homo sapien
cctcagtggcttcctggaactgtta

SEQ ID NO: 455173 - DNA, 25 bp, Homo sapien
ctgagtaagctctttgtttcccaca

SEQ ID NO: 455174 - DNA, 25 bp, Homo sapien
caggttcttactccacgtcttggca

SEQ ID NO: 455175 - DNA, 25 bp, Homo sapien
ggcaccatccttccaatcacagaat

SEQ ID NO: 455176 - DNA, 25 bp, Homo sapien
ggctttgaaaaagcacatgcagtac

SEQ ID NO: 455177 - DNA, 25 bp, Homo sapien
tagcaataacagaagctaggcttcc

SEQ ID NO: 455178 - DNA, 25 bp, Homo sapien
taagagcaagtaaatgctgcccagc

SEQ ID NO: 455179 - DNA, 25 bp, Homo sapien
atgcagtaccacacctgaagggaaa

SEQ ID NO: 455180 - DNA, 25 bp, Homo sapien
gtttgacctgagaaccctatggatg

SEQ ID NO: 455181 - DNA, 25 bp, Homo sapien
gcattgcttggagttattgagcccc

SEQ ID NO: 455182 - DNA, 25 bp, Homo sapien
aatgattatactctctgggccttag

SEQ ID NO: 455183 - DNA, 25 bp, Homo sapien
gaaacgaccctttgatgtgagcctg

SEQ ID NO: 455184 - DNA, 25 bp, Homo sapien
gatacctattattaggctcagagga

SEQ ID NO: 455185 - DNA, 25 bp, Homo sapien
cagtaggtgcgcaacaaatgctttc

SEQ ID NO: 455186 - DNA, 25 bp, Homo sapien
tccattagctaacatcattccagtg

SEQ ID NO: 455187 - DNA, 25 bp, Homo sapien
aataagatcgtgtctgcaaagtgtc

SEQ ID NO: 455188 - DNA, 25 bp, Homo sapien
catggctatgccacaggagcagaac

SEQ ID NO: 455189 - DNA, 25 bp, Homo sapien
taaggcagaggctcaatctctggaa

SEQ ID NO: 455190 - DNA, 25 bp, Homo sapien
gagcagaaccaaggagaggctccca

SEQ ID NO: 455191 - DNA, 25 bp, Homo sapien
aatcaactgttgagtgggcctgacc

SEQ ID NO: 455192 - DNA, 25 bp, Homo sapien
taggtcttgtctgaagagttgagag

SEQ ID NO: 455193 - DNA, 25 bp, Homo sapien
cagggagaaacagcccaatgttctt

SEQ ID NO: 455194 - DNA, 25 bp, Homo sapien
cagcccaatgttcttcatgagggag

SEQ ID NO: 455195 - DNA, 25 bp, Homo sapien
catgagggagtgaattttgtcggcc

SEQ ID NO: 455196 - DNA, 25 bp, Homo sapien
tgttaaactccaagaaaagagctgg

SEQ ID NO: 455197 - DNA, 25 bp, Homo sapien
aactgtgttctgtgggtccgcatca

SEQ ID NO: 455198 - DNA, 25 bp, Homo sapien
cagtcaagcatataagggcactcct

SEQ ID NO: 455199 - DNA, 25 bp, Homo sapien
cctgcttagacgagggactggacca

SEQ ID NO: 455200 - DNA, 25 bp, Homo sapien
cactgtacatgttcactggacgcca

SEQ ID NO: 455201 - DNA, 25 bp, Homo sapien
aaatcgaacgtgcttggaactgtgc

SEQ ID NO: 455202 - DNA, 25 bp, Homo sapien
tatgagtagcagaattccaaggacc

SEQ ID NO: 455203 - DNA, 25 bp, Homo sapien
ccataatttgggtatcgagctctca

SEQ ID NO: 455204 - DNA, 25 bp, Homo sapien
tgctcatgccagaaaaatacagcca

SEQ ID NO: 455205 - DNA, 25 bp, Homo sapien
gaagtatcattccttaacccaggga

SEQ ID NO: 455206 - DNA, 25 bp, Homo sapien
tcctgcttggaaagaaccaatgcct

SEQ ID NO: 455207 - DNA, 25 bp, Homo sapien
caacaatcagttgggtgttggtggc

SEQ ID NO: 455208 - DNA, 25 bp, Homo sapien
tcaacagtggctatagacctaagac

SEQ ID NO: 455209 - DNA, 25 bp, Homo sapien
gatggcctgattaggtgcattcaac

SEQ ID NO: 455210 - DNA, 25 bp, Homo sapien
gactgcctaggcttaaatgcctgca

SEQ ID NO: 455211 - DNA, 25 bp, Homo sapien
aaagaggagtccaggcaaaacagta

SEQ ID NO: 455212 - DNA, 25 bp, Homo sapien
ttttataccatagagcattgcccat

SEQ ID NO: 455213 - DNA, 25 bp, Homo sapien
tttttataccatagagcattgccca

SEQ ID NO: 455214 - DNA, 25 bp, Homo sapien
gtttttataccatagagcattgccc

SEQ ID NO: 455215 - DNA, 25 bp, Homo sapien
atctctttctatacatgctttgctg

SEQ ID NO: 455216 - DNA, 25 bp, Homo sapien
acatctctttctatacatgctttgc

SEQ ID NO: 455217 - DNA, 25 bp, Homo sapien
catctctttctatacatgctttgct

SEQ ID NO: 455218 - DNA, 25 bp, Homo sapien
aacaggtgacaaagaggccgagcac

SEQ ID NO: 455219 - DNA, 25 bp, Homo sapien
tattggcaatggaactgtcactccc

SEQ ID NO: 455220 - DNA, 25 bp, Homo sapien
gaacagcagtggatacgagtggtac

SEQ ID NO: 455221 - DNA, 25 bp, Homo sapien
cagcgagcctttgtggacattaaga

SEQ ID NO: 455222 - DNA, 25 bp, Homo sapien
gttcacccagtaagcacatttccta

SEQ ID NO: 455223 - DNA, 25 bp, Homo sapien
gacacttgtttaacgcttccaatgg

SEQ ID NO: 455224 - DNA, 25 bp, Homo sapien
tattgcctgtcactccctagactgt

SEQ ID NO: 455225 - DNA, 25 bp, Homo sapien
taacctctctttcatggacgtgcca

SEQ ID NO: 455226 - DNA, 25 bp, Homo sapien
tccttggagtggtctaactgacctc

SEQ ID NO: 455227 - DNA, 25 bp, Homo sapien
tatgagcctatctccccaaagaggc

SEQ ID NO: 455228 - DNA, 25 bp, Homo sapien
aaaattgagacatatgagcctatct

SEQ ID NO: 455229 - DNA, 25 bp, Homo sapien
gctagctatacgttttccccagaaa

SEQ ID NO: 455230 - DNA, 25 bp, Homo sapien
tatttgttacggtgatctgaaataa

SEQ ID NO: 455231 - DNA, 25 bp, Homo sapien
tacatatatgctaaactgggaacac

SEQ ID NO: 455232 - DNA, 25 bp, Homo sapien
catatatgctaaactgggaacacat

SEQ ID NO: 455233 - DNA, 25 bp, Homo sapien
ggtaatatttgttacggtgatctga

SEQ ID NO: 455234 - DNA, 25 bp, Homo sapien
gggccgggtgtcttagccagcctcc

SEQ ID NO: 455235 - DNA, 25 bp, Homo sapien
caggggccgggtgtcttagccagcc

SEQ ID NO: 455236 - DNA, 25 bp, Homo sapien
aggggccgggtgtcttagccagcct

SEQ ID NO: 455237 - DNA, 25 bp, Homo sapien
ggggccgggtgtcttagccagcctc

SEQ ID NO: 455238 - DNA, 25 bp, Homo sapien
tatctttcaaagacaagggttaggc

SEQ ID NO: 455239 - DNA, 25 bp, Homo sapien
gagcccctgcgagaaccttgttcat

SEQ ID NO: 455240 - DNA, 25 bp, Homo sapien
gggacctgcagttgagacgagcccc

SEQ ID NO: 455241 - DNA, 25 bp, Homo sapien
taggcaaggaccaacgacatccaaa

SEQ ID NO: 455242 - DNA, 25 bp, Homo sapien
gaactttagatgtgaagttagtctg

SEQ ID NO: 455243 - DNA, 25 bp, Homo sapien
cccaagaatctgacaggatttttct

SEQ ID NO: 455244 - DNA, 25 bp, Homo sapien
agttagtctgaagttcccaagaatc

SEQ ID NO: 455245 - DNA, 25 bp, Homo sapien
tatttgtaaactgtggcaccatcgc

SEQ ID NO: 455246 - DNA, 25 bp, Homo sapien
gaaggaagtggtttcacgccacaac

SEQ ID NO: 455247 - DNA, 25 bp, Homo sapien
tactgctgaatataagacccataga

SEQ ID NO: 455248 - DNA, 25 bp, Homo sapien
tgtaatacaaccaagggactatgct

SEQ ID NO: 455249 - DNA, 25 bp, Homo sapien
tatgtcattaccaagattcccaggc

SEQ ID NO: 455250 - DNA, 25 bp, Homo sapien
cagtgttgccagactccagtgggaa

SEQ ID NO: 455251 - DNA, 25 bp, Homo sapien
tacaacagagcactggacaacgtcc

SEQ ID NO: 455252 - DNA, 25 bp, Homo sapien
taagtggccaacaaccaagaaccat

SEQ ID NO: 455253 - DNA, 25 bp, Homo sapien
tgcatgcactaaggtaggtggacca

SEQ ID NO: 455254 - DNA, 25 bp, Homo sapien
ggtccactctaaccgttcctgtcat

SEQ ID NO: 455255 - DNA, 25 bp, Homo sapien
cagggtccactctaaccgttcctgt

SEQ ID NO: 455256 - DNA, 25 bp, Homo sapien
gggtccactctaaccgttcctgtca

SEQ ID NO: 455257 - DNA, 25 bp, Homo sapien
tatggataaaccaatgggtacattc

SEQ ID NO: 455258 - DNA, 25 bp, Homo sapien
gatgtttagcagcagtagagctgga

SEQ ID NO: 455259 - DNA, 25 bp, Homo sapien
tgtccagctacaagacatgtttcta

SEQ ID NO: 455260 - DNA, 25 bp, Homo sapien
tctatactgcgaatttgactggtca

SEQ ID NO: 455261 - DNA, 25 bp, Homo sapien
aaagtctggagttccactgagcacc

SEQ ID NO: 455262 - DNA, 25 bp, Homo sapien
caaagtctggagttccactgagcac

SEQ ID NO: 455263 - DNA, 25 bp, Homo sapien
gttactcaattttctagacctctgt

SEQ ID NO: 455264 - DNA, 25 bp, Homo sapien
tacatgtgcgtagaatatttcaaga

SEQ ID NO: 455265 - DNA, 25 bp, Homo sapien
tctacgaccacctgagatgtttgag

SEQ ID NO: 455266 - DNA, 25 bp, Homo sapien
gaaaccactctaacctgagagcaga

SEQ ID NO: 455267 - DNA, 25 bp, Homo sapien
ggactggttaagtattaatatacca

SEQ ID NO: 455268 - DNA, 25 bp, Homo sapien
gaggactggttaagtattaatatac

SEQ ID NO: 455269 - DNA, 25 bp, Homo sapien
aatagaggactggttaagtattaat

SEQ ID NO: 455270 - DNA, 25 bp, Homo sapien
ataaaatagaggactggttaagtat

SEQ ID NO: 455271 - DNA, 25 bp, Homo sapien
ggacatgtgggatttggaaaagcaa

SEQ ID NO: 455272 - DNA, 25 bp, Homo sapien
tctaccagacaagtatgcaaaatgc

SEQ ID NO: 455273 - DNA, 25 bp, Homo sapien
aatgctatcctttaacgtatctgaa

SEQ ID NO: 455274 - DNA, 25 bp, Homo sapien
gcacctctgttactacagcactgtg

SEQ ID NO: 455275 - DNA, 25 bp, Homo sapien
cgatggcctcaggaatgactctgat

SEQ ID NO: 455276 - DNA, 25 bp, Homo sapien
tgactctgatacagttgtgatacag

SEQ ID NO: 455277 - DNA, 25 bp, Homo sapien
cagcatctgcagattaacgatggcc

SEQ ID NO: 455278 - DNA, 25 bp, Homo sapien
tcaaccagtctgtttttagataagt

SEQ ID NO: 455279 - DNA, 25 bp, Homo sapien
tgtcctgacaaccaaactctttttc

SEQ ID NO: 455280 - DNA, 25 bp, Homo sapien
tattcatattcagggaagtctagca

SEQ ID NO: 455281 - DNA, 25 bp, Homo sapien
tacttgaagacaacataactacaac

SEQ ID NO: 455282 - DNA, 25 bp, Homo sapien
taactacaaccttacaaatgccaat

SEQ ID NO: 455283 - DNA, 25 bp, Homo sapien
gatacgggttataggaccatcagga

SEQ ID NO: 455284 - DNA, 25 bp, Homo sapien
gaaacactagcctacaattgagact

SEQ ID NO: 455285 - DNA, 25 bp, Homo sapien
gcaagacacttgtcccaatccaaga

SEQ ID NO: 455286 - DNA, 25 bp, Homo sapien
taaggcaaccctagcatgcaagaca

SEQ ID NO: 455287 - DNA, 25 bp, Homo sapien
ccttgaaaatagatgcccagtgagc

SEQ ID NO: 455288 - DNA, 25 bp, Homo sapien
aactccacatggttggccgtgcgta

SEQ ID NO: 455289 - DNA, 25 bp, Homo sapien
cgtgcgtatgcactggatgactcca

SEQ ID NO: 455290 - DNA, 25 bp, Homo sapien
cattggctacgggttccaccttgaa

SEQ ID NO: 455291 - DNA, 25 bp, Homo sapien
cattaactgtttgagctgacctatc

SEQ ID NO: 455292 - DNA, 25 bp, Homo sapien
aagactttgagaggcagaccacaca

SEQ ID NO: 455293 - DNA, 25 bp, Homo sapien
gatccaagtttgttgttacttgcga

SEQ ID NO: 455294 - DNA, 25 bp, Homo sapien
tatctcttctggtaatgatccaagt

SEQ ID NO: 455295 - DNA, 25 bp, Homo sapien
tggacaaacagcatggcgagcacgt

SEQ ID NO: 455296 - DNA, 25 bp, Homo sapien
tcagagattggaacgctacccaagc

SEQ ID NO: 455297 - DNA, 25 bp, Homo sapien
tttctcaagaaagctctgggatgac

SEQ ID NO: 455298 - DNA, 25 bp, Homo sapien
gaaatgcaccttccaacaagtcgtt

SEQ ID NO: 455299 - DNA, 25 bp, Homo sapien
gcacgatgtttcatgcctatattcc

SEQ ID NO: 455300 - DNA, 25 bp, Homo sapien
cgtgcccggctgactagaagtattt

SEQ ID NO: 455301 - DNA, 25 bp, Homo sapien
gtgaaaaccaacataggccgggcac

SEQ ID NO: 455302 - DNA, 25 bp, Homo sapien
tttagaccagcctagagaacattag

SEQ ID NO: 455303 - DNA, 25 bp, Homo sapien
ttctctaatcataaggtgatttttt

SEQ ID NO: 455304 - DNA, 25 bp, Homo sapien
tagctaggaaatcaaaatatgctgt

SEQ ID NO: 455305 - DNA, 25 bp, Homo sapien
gagttagctaggaaatcaaaatatg

SEQ ID NO: 455306 - DNA, 25 bp, Homo sapien
ggttgagttagctaggaaatcaaaa

SEQ ID NO: 455307 - DNA, 25 bp, Homo sapien
acgggctgagagcaccgggtgttca

SEQ ID NO: 455308 - DNA, 25 bp, Homo sapien
ctgagagcaccgggtgttcagcagc

SEQ ID NO: 455309 - DNA, 25 bp, Homo sapien
gcagcatcacccccaactgcggttg

SEQ ID NO: 455310 - DNA, 25 bp, Homo sapien
gggctgagagcaccgggtgttcagc

SEQ ID NO: 455311 - DNA, 25 bp, Homo sapien
gaatgaagttgtcctctataaaggc

SEQ ID NO: 455312 - DNA, 25 bp, Homo sapien
agaggaacagtatcactcttgctaa

SEQ ID NO: 455313 - DNA, 25 bp, Homo sapien
gataccacccgatgaagaggaacag

SEQ ID NO: 455314 - DNA, 25 bp, Homo sapien
gtgtgcacagtgcagatacctcccc

SEQ ID NO: 455315 - DNA, 25 bp, Homo sapien
ggatgctccaacatacataccaaat

SEQ ID NO: 455316 - DNA, 25 bp, Homo sapien
gaccctaggacccaggatgctccaa

SEQ ID NO: 455317 - DNA, 25 bp, Homo sapien
aggatgctccaacatacataccaaa

SEQ ID NO: 455318 - DNA, 25 bp, Homo sapien
ttctgtctccaggaccctaggaccc

SEQ ID NO: 455319 - DNA, 25 bp, Homo sapien
aacgctgtgatctcgttgcagctga

SEQ ID NO: 455320 - DNA, 25 bp, Homo sapien
ctgacattcagttctcgtagagatt

SEQ ID NO: 455321 - DNA, 25 bp, Homo sapien
actttaaggtaatttcttctgacat

SEQ ID NO: 455322 - DNA, 25 bp, Homo sapien
tgacctatctgctggggcaacgctg

SEQ ID NO: 455323 - DNA, 25 bp, Homo sapien
agaagcagaagaacaaatcccactc

SEQ ID NO: 455324 - DNA, 25 bp, Homo sapien
tccccactgctaagagaggcaatga

SEQ ID NO: 455325 - DNA, 25 bp, Homo sapien
cagtttcacaacaataaaacgaagg

SEQ ID NO: 455326 - DNA, 25 bp, Homo sapien
tatgagtaatcagaccacaattttg

SEQ ID NO: 455327 - DNA, 25 bp, Homo sapien
ttgcaggaaaagtcaaactttacca

SEQ ID NO: 455328 - DNA, 25 bp, Homo sapien
tgttgcaggaaaagtcaaactttac

SEQ ID NO: 455329 - DNA, 25 bp, Homo sapien
tgcaggaaaagtcaaactttaccaa

SEQ ID NO: 455330 - DNA, 25 bp, Homo sapien
ctctctaaaacaaattggaatcacg

SEQ ID NO: 455331 - DNA, 25 bp, Homo sapien
tctctaaaacaaattggaatcacga

SEQ ID NO: 455332 - DNA, 25 bp, Homo sapien
ctaaaacaaattggaatcacgagca

SEQ ID NO: 455333 - DNA, 25 bp, Homo sapien
tctaaaacaaattggaatcacgagc

SEQ ID NO: 455334 - DNA, 25 bp, Homo sapien
gcagagggttattctcaagtagtaa

SEQ ID NO: 455335 - DNA, 25 bp, Homo sapien
ctgcagagggttattctcaagtagt

SEQ ID NO: 455336 - DNA, 25 bp, Homo sapien
gactgcagagggttattctcaagta

SEQ ID NO: 455337 - DNA, 25 bp, Homo sapien
gagactgcagagggttattctcaag

SEQ ID NO: 455338 - DNA, 25 bp, Homo sapien
ggagtcagctgtcttaatctggcat

SEQ ID NO: 455339 - DNA, 25 bp, Homo sapien
cacgtgctggtgtaaatgtggcctc

SEQ ID NO: 455340 - DNA, 25 bp, Homo sapien
tctccatggtgtggagataaaggga

SEQ ID NO: 455341 - DNA, 25 bp, Homo sapien
gcttgtatgctcagatacttaaata

SEQ ID NO: 455342 - DNA, 25 bp, Homo sapien
ctcggtggcagataatcgcttatct

SEQ ID NO: 455343 - DNA, 25 bp, Homo sapien
ggtggcagataatcgcttatctcca

SEQ ID NO: 455344 - DNA, 25 bp, Homo sapien
gcagataatcgcttatctccattat

SEQ ID NO: 455345 - DNA, 25 bp, Homo sapien
ggcagataatcgcttatctccatta

SEQ ID NO: 455346 - DNA, 25 bp, Homo sapien
ggctaaggcgatggcacgagtcctc

SEQ ID NO: 455347 - DNA, 25 bp, Homo sapien
ttcttccatgatgtttgacattggc

SEQ ID NO: 455348 - DNA, 25 bp, Homo sapien
cattgaggctaacagtgtcttcgtc

SEQ ID NO: 455349 - DNA, 25 bp, Homo sapien
cgatggcacgagtcctccttgatga

SEQ ID NO: 455350 - DNA, 25 bp, Homo sapien
tttctccacatttttattctcagac

SEQ ID NO: 455351 - DNA, 25 bp, Homo sapien
gcttccaaccaagatatgaaacgta

SEQ ID NO: 455352 - DNA, 25 bp, Homo sapien
ttccaaccaagatatgaaacgtatt

SEQ ID NO: 455353 - DNA, 25 bp, Homo sapien
gggcttccaaccaagatatgaaacg

SEQ ID NO: 455354 - DNA, 25 bp, Homo sapien
caaccaagatatgaaacgtattaca

SEQ ID NO: 455355 - DNA, 25 bp, Homo sapien
aggtgacagcatgcccagatgtggc

SEQ ID NO: 455356 - DNA, 25 bp, Homo sapien
gggagcaaaaggaacaccctgcaga

SEQ ID NO: 455357 - DNA, 25 bp, Homo sapien
gcaaaaggaacaccctgcagaactc

SEQ ID NO: 455358 - DNA, 25 bp, Homo sapien
tgggggagcaaaaggaacaccctgc

SEQ ID NO: 455359 - DNA, 25 bp, Homo sapien
ttctcctgagttggtgctgtcaccc

SEQ ID NO: 455360 - DNA, 25 bp, Homo sapien
tctgctctatcagtaaactggtctc

SEQ ID NO: 455361 - DNA, 25 bp, Homo sapien
ggaaggctccggttgaaattcctga

SEQ ID NO: 455362 - DNA, 25 bp, Homo sapien
taaattccgaatggagaccatctgc

SEQ ID NO: 455363 - DNA, 25 bp, Homo sapien
ctaatcgggttgtgaagtagaacct

SEQ ID NO: 455364 - DNA, 25 bp, Homo sapien
caagcacctaatcgggttgtgaagt

SEQ ID NO: 455365 - DNA, 25 bp, Homo sapien
ttcagtatctgcttcagtaaagggc

SEQ ID NO: 455366 - DNA, 25 bp, Homo sapien
cagtatctgcttcagtaaagggcta

SEQ ID NO: 455367 - DNA, 25 bp, Homo sapien
gaagccttgtagaaccagtggcctg

SEQ ID NO: 455368 - DNA, 25 bp, Homo sapien
catggaagaatcgtcccacagagct

SEQ ID NO: 455369 - DNA, 25 bp, Homo sapien
taaacatgtcctgagcacacgaagg

SEQ ID NO: 455370 - DNA, 25 bp, Homo sapien
ccacagagctgatagatagggtcta

SEQ ID NO: 455371 - DNA, 25 bp, Homo sapien
gcacatcctcttctatccgtaacag

SEQ ID NO: 455372 - DNA, 25 bp, Homo sapien
tcttctatccgtaacagctcttcac

SEQ ID NO: 455373 - DNA, 25 bp, Homo sapien
agtgcacatcctcttctatccgtaa

SEQ ID NO: 455374 - DNA, 25 bp, Homo sapien
tctatccgtaacagctcttcacagt

SEQ ID NO: 455375 - DNA, 25 bp, Homo sapien
agataatcctttacagccagggttg

SEQ ID NO: 455376 - DNA, 25 bp, Homo sapien
ccaagtgggtctgactaggagttca

SEQ ID NO: 455377 - DNA, 25 bp, Homo sapien
gggtctgactaggagttcagcattt

SEQ ID NO: 455378 - DNA, 25 bp, Homo sapien
gataatcctttacagccagggttga

SEQ ID NO: 455379 - DNA, 25 bp, Homo sapien
ttctctcagctgctcgatcattgct

SEQ ID NO: 455380 - DNA, 25 bp, Homo sapien
ccattgggatcttgcagcaaatcta

SEQ ID NO: 455381 - DNA, 25 bp, Homo sapien
gatcttgcagcaaatctactgcttc

SEQ ID NO: 455382 - DNA, 25 bp, Homo sapien
ccatgtcctgatctttggatgaact

SEQ ID NO: 455383 - DNA, 25 bp, Homo sapien
tctgctgatcccataggatataggt

SEQ ID NO: 455384 - DNA, 25 bp, Homo sapien
gcttctgctgatcccataggatata

SEQ ID NO: 455385 - DNA, 25 bp, Homo sapien
ctgctgatcccataggatataggtt

SEQ ID NO: 455386 - DNA, 25 bp, Homo sapien
ttctgctgatcccataggatatagg

SEQ ID NO: 455387 - DNA, 25 bp, Homo sapien
ggagatgtctccagctgtatttgac

SEQ ID NO: 455388 - DNA, 25 bp, Homo sapien
gagatgtctccagctgtatttgacc

SEQ ID NO: 455389 - DNA, 25 bp, Homo sapien
cggagatgtctccagctgtatttga

SEQ ID NO: 455390 - DNA, 25 bp, Homo sapien
agatgtctccagctgtatttgacca

SEQ ID NO: 455391 - DNA, 25 bp, Homo sapien
tgcacacataagtataatggccgct

SEQ ID NO: 455392 - DNA, 25 bp, Homo sapien
cacataagtataatggccgctcttc

SEQ ID NO: 455393 - DNA, 25 bp, Homo sapien
ctggaagcattgttcatgcacacat

SEQ ID NO: 455394 - DNA, 25 bp, Homo sapien
tccatacccattcacattactggaa

SEQ ID NO: 455395 - DNA, 25 bp, Homo sapien
caaacagactcatcattagagggaa

SEQ ID NO: 455396 - DNA, 25 bp, Homo sapien
ggctgggccaactgactgaatgatt

SEQ ID NO: 455397 - DNA, 25 bp, Homo sapien
agagctgcagctcaacacctacagg

SEQ ID NO: 455398 - DNA, 25 bp, Homo sapien
cctacaggcttaatggccttggctg

SEQ ID NO: 455399 - DNA, 25 bp, Homo sapien
tctgtaatgttagatcactttgcac

SEQ ID NO: 455400 - DNA, 25 bp, Homo sapien
tactggctcccgttactctgtaatg

SEQ ID NO: 455401 - DNA, 25 bp, Homo sapien
tcatttggagaatactggctcccgt

SEQ ID NO: 455402 - DNA, 25 bp, Homo sapien
cccgttactctgtaatgttagatca

SEQ ID NO: 455403 - DNA, 25 bp, Homo sapien
tgtgctgtttgtggtaggagagact

SEQ ID NO: 455404 - DNA, 25 bp, Homo sapien
gagactgcaggggagttctctctaa

SEQ ID NO: 455405 - DNA, 25 bp, Homo sapien
agactgcaggggagttctctctaat

SEQ ID NO: 455406 - DNA, 25 bp, Homo sapien
gctgtttgtggtaggagagactgca

SEQ ID NO: 455407 - DNA, 25 bp, Homo sapien
tgccccttaactcagccgagcagca

SEQ ID NO: 455408 - DNA, 25 bp, Homo sapien
ggcaggctgccccttaactcagccg

SEQ ID NO: 455409 - DNA, 25 bp, Homo sapien
caggctgccccttaactcagccgag

SEQ ID NO: 455410 - DNA, 25 bp, Homo sapien
gctgccccttaactcagccgagcag

SEQ ID NO: 455411 - DNA, 25 bp, Homo sapien
gagccagtccgcgtacagttgcaca

SEQ ID NO: 455412 - DNA, 25 bp, Homo sapien
ccagagagccagtccgcgtacagtt

SEQ ID NO: 455413 - DNA, 25 bp, Homo sapien
ccgcgtacagttgcacaaggaccag

SEQ ID NO: 455414 - DNA, 25 bp, Homo sapien
cagtccgcgtacagttgcacaagga

SEQ ID NO: 455415 - DNA, 25 bp, Homo sapien
gtctccttcagatggaacactgtag

SEQ ID NO: 455416 - DNA, 25 bp, Homo sapien
tctgtgcctgtgtaagtgtgttgaa

SEQ ID NO: 455417 - DNA, 25 bp, Homo sapien
tgtagctagagctgtcccatgtctg

SEQ ID NO: 455418 - DNA, 25 bp, Homo sapien
tcccatgtctgtgcctgtgtaagtg

SEQ ID NO: 455419 - DNA, 25 bp, Homo sapien
gtagagacaaattgcaaataggaaa

SEQ ID NO: 455420 - DNA, 25 bp, Homo sapien
tatttgtaaagactatttcggtaca

SEQ ID NO: 455421 - DNA, 25 bp, Homo sapien
ctatttcggtacagaaatttttctg

SEQ ID NO: 455422 - DNA, 25 bp, Homo sapien
caaagatagcattacattagaaaat

SEQ ID NO: 455423 - DNA, 25 bp, Homo sapien
tacagtagagtgatatttcgctcca

SEQ ID NO: 455424 - DNA, 25 bp, Homo sapien
gagataagcatggaccctgcagggt

SEQ ID NO: 455425 - DNA, 25 bp, Homo sapien
tacttgcagatataggtcaaattcc

SEQ ID NO: 455426 - DNA, 25 bp, Homo sapien
tctgagctgggagtaatctctgtct

SEQ ID NO: 455427 - DNA, 25 bp, Homo sapien
ctgcttaaattaagcctatagttta

SEQ ID NO: 455428 - DNA, 25 bp, Homo sapien
gttctgcttaaattaagcctatagt

SEQ ID NO: 455429 - DNA, 25 bp, Homo sapien
taagttctgcttaaattaagcctat

SEQ ID NO: 455430 - DNA, 25 bp, Homo sapien
aataagttctgcttaaattaagcct

SEQ ID NO: 455431 - DNA, 25 bp, Homo sapien
aattgatctacaaaagaattattct

SEQ ID NO: 455432 - DNA, 25 bp, Homo sapien
cttttccttaatttcatatcactaa

SEQ ID NO: 455433 - DNA, 25 bp, Homo sapien
ctgggtccaggcttcaggaaattga

SEQ ID NO: 455434 - DNA, 25 bp, Homo sapien
tccaggcttcaggaaattgatctac

SEQ ID NO: 455435 - DNA, 25 bp, Homo sapien
ttacaacagaataacttcaccggga

SEQ ID NO: 455436 - DNA, 25 bp, Homo sapien
cagaataacttcaccgggaccatta

SEQ ID NO: 455437 - DNA, 25 bp, Homo sapien
gtacctctgattaaattacctacag

SEQ ID NO: 455438 - DNA, 25 bp, Homo sapien
ggaccattaaagtacctctgattaa

SEQ ID NO: 455439 - DNA, 25 bp, Homo sapien
tagagccctatgtgagatatcagga

SEQ ID NO: 455440 - DNA, 25 bp, Homo sapien
tctggaatctcagagaggagtcagc

SEQ ID NO: 455441 - DNA, 25 bp, Homo sapien
tgagggaagtcacaggcaaagaaca

SEQ ID NO: 455442 - DNA, 25 bp, Homo sapien
tttaaggtacgcaaggcctgtcgcc

SEQ ID NO: 455443 - DNA, 25 bp, Homo sapien
tagaaggctgcatggtgtactgaag

SEQ ID NO: 455444 - DNA, 25 bp, Homo sapien
tgaaagagctgttcagagccttggc

SEQ ID NO: 455445 - DNA, 25 bp, Homo sapien
aaagtcctgtgctcgcctaactaca

SEQ ID NO: 455446 - DNA, 25 bp, Homo sapien
caaagacttgagtccgctcggtgta

SEQ ID NO: 455447 - DNA, 25 bp, Homo sapien
cattttcctccggattgtaaactgc

SEQ ID NO: 455448 - DNA, 25 bp, Homo sapien
gcgggtctatagattccaaatttct

SEQ ID NO: 455449 - DNA, 25 bp, Homo sapien
ggattgtaaactgcgggtctataga

SEQ ID NO: 455450 - DNA, 25 bp, Homo sapien
ggtctatagattccaaatttctctg

SEQ ID NO: 455451 - DNA, 25 bp, Homo sapien
gctcactgctcatttgtagaactca

SEQ ID NO: 455452 - DNA, 25 bp, Homo sapien
gaatacagcctggtagagagtgaca

SEQ ID NO: 455453 - DNA, 25 bp, Homo sapien
taacaaagaggctgacctatcctaa

SEQ ID NO: 455454 - DNA, 25 bp, Homo sapien
tacatccattacctagaatacagcc

SEQ ID NO: 455455 - DNA, 25 bp, Homo sapien
ccagtttacatcacatccagatagt

SEQ ID NO: 455456 - DNA, 25 bp, Homo sapien
gagcttctgcaacaaaagccccttt

SEQ ID NO: 455457 - DNA, 25 bp, Homo sapien
tccagatagtccaggcaaatgacag

SEQ ID NO: 455458 - DNA, 25 bp, Homo sapien
ctgaatcacagcgtatgaaaggatg

SEQ ID NO: 455459 - DNA, 25 bp, Homo sapien
gacgagcttccttactgaccagtgg

SEQ ID NO: 455460 - DNA, 25 bp, Homo sapien
taccgccaggtgaatgcaggcatct

SEQ ID NO: 455461 - DNA, 25 bp, Homo sapien
taggtgcctccttactgctgagtgg

SEQ ID NO: 455462 - DNA, 25 bp, Homo sapien
cgtggtctccactgaaactctggga

SEQ ID NO: 455463 - DNA, 25 bp, Homo sapien
gatgggacatggatgcttgcaaccg

SEQ ID NO: 455464 - DNA, 25 bp, Homo sapien
gaggacgacaccatccatgagggct

SEQ ID NO: 455465 - DNA, 25 bp, Homo sapien
tgcttgcaaccgaccgtgggcggat

SEQ ID NO: 455466 - DNA, 25 bp, Homo sapien
tcttcgtgtagactgaccttcaatc

SEQ ID NO: 455467 - DNA, 25 bp, Homo sapien
ggctctatctcctctacagcagaga

SEQ ID NO: 455468 - DNA, 25 bp, Homo sapien
gctgtgatacctaggaagagagccc

SEQ ID NO: 455469 - DNA, 25 bp, Homo sapien
caaggacaagtttatctgtgattcc

SEQ ID NO: 455470 - DNA, 25 bp, Homo sapien
tctgaacaaccataaaactgactct

SEQ ID NO: 455471 - DNA, 25 bp, Homo sapien
cagctgcttcggtggttttgcccaa

SEQ ID NO: 455472 - DNA, 25 bp, Homo sapien
ccatcttgattagggaggaagtcac

SEQ ID NO: 455473 - DNA, 25 bp, Homo sapien
aggaagtcacgtccctcacgtgggc

SEQ ID NO: 455474 - DNA, 25 bp, Homo sapien
cacgtgggccctaaagagatgtcgc

SEQ ID NO: 455475 - DNA, 25 bp, Homo sapien
tgcatttggccatgctaagtttggg

SEQ ID NO: 455476 - DNA, 25 bp, Homo sapien
tcggcatgcttccaaaaagttttcc

SEQ ID NO: 455477 - DNA, 25 bp, Homo sapien
ctctggtactcctaattttcggcat

SEQ ID NO: 455478 - DNA, 25 bp, Homo sapien
tcttctgcatttggccatgctaagt

SEQ ID NO: 455479 - DNA, 25 bp, Homo sapien
agttatatgaagtaagtttgatgtt

SEQ ID NO: 455480 - DNA, 25 bp, Homo sapien
ttatatgaagtaagtttgatgttac

SEQ ID NO: 455481 - DNA, 25 bp, Homo sapien
gttatatgaagtaagtttgatgtta

SEQ ID NO: 455482 - DNA, 25 bp, Homo sapien
caatctcgccatggaggaacggcct

SEQ ID NO: 455483 - DNA, 25 bp, Homo sapien
ctagcaaatggcaggagtaacccct

SEQ ID NO: 455484 - DNA, 25 bp, Homo sapien
tacgcttgataaactctgggcaatg

SEQ ID NO: 455485 - DNA, 25 bp, Homo sapien
cgagggcagccattagaacagaaag

SEQ ID NO: 455486 - DNA, 25 bp, Homo sapien
gaatgtgacgaaaatccaactgcag

SEQ ID NO: 455487 - DNA, 25 bp, Homo sapien
gaagcctataaggtccctggagcgg

SEQ ID NO: 455488 - DNA, 25 bp, Homo sapien
cccgagtgccagcagagtgtcaaca

SEQ ID NO: 455489 - DNA, 25 bp, Homo sapien
tatgcggacagagcattccagtggt

SEQ ID NO: 455490 - DNA, 25 bp, Homo sapien
caagaatgttccacggctcatggct

SEQ ID NO: 455491 - DNA, 25 bp, Homo sapien
ttgagggcgacagagcacagcgttt

SEQ ID NO: 455492 - DNA, 25 bp, Homo sapien
gtttaagtgactcctccacgtgagg

SEQ ID NO: 455493 - DNA, 25 bp, Homo sapien
gcaaggtggcccctatacagctcaa

SEQ ID NO: 455494 - DNA, 25 bp, Homo sapien
atattattttaaggtggcaacccag

SEQ ID NO: 455495 - DNA, 25 bp, Homo sapien
taaatctactcttacatgagtgtcc

SEQ ID NO: 455496 - DNA, 25 bp, Homo sapien
cattaaagagaagcctcaatgcact

SEQ ID NO: 455497 - DNA, 25 bp, Homo sapien
tgaatacatgtatcaatgggctgat

SEQ ID NO: 455498 - DNA, 25 bp, Homo sapien
catatgggctggtgcacgggtacct

SEQ ID NO: 455499 - DNA, 25 bp, Homo sapien
gctttttgaggaccaggccatgtgt

SEQ ID NO: 455500 - DNA, 25 bp, Homo sapien
tgggtaatcccaacagaatctgcat

SEQ ID NO: 455501 - DNA, 25 bp, Homo sapien
ataaatcccaagaagtgcagcgcag

SEQ ID NO: 455502 - DNA, 25 bp, Homo sapien
agagccttcgttacggtgatgtcta

SEQ ID NO: 455503 - DNA, 25 bp, Homo sapien
atgcttgaatggtaatgcccacttt

SEQ ID NO: 455504 - DNA, 25 bp, Homo sapien
ttgaatggtaatgcccactttgacc

SEQ ID NO: 455505 - DNA, 25 bp, Homo sapien
aacagagccttcgttacggtgatgt

SEQ ID NO: 455506 - DNA, 25 bp, Homo sapien
tcaagtcttaaagtcggaggtcagc

SEQ ID NO: 455507 - DNA, 25 bp, Homo sapien
tgtcaatattgcctccccagaaaag

SEQ ID NO: 455508 - DNA, 25 bp, Homo sapien
ggtagaaaatcctcccttagactga

SEQ ID NO: 455509 - DNA, 25 bp, Homo sapien
taaactaccgcacaccaaagaggat

SEQ ID NO: 455510 - DNA, 25 bp, Homo sapien
cagaaggctgccgtgttccgtgaat

SEQ ID NO: 455511 - DNA, 25 bp, Homo sapien
tgagagcagcatgggttccactcct

SEQ ID NO: 455512 - DNA, 25 bp, Homo sapien
tctgatactcagtcgaagcttccct

SEQ ID NO: 455513 - DNA, 25 bp, Homo sapien
gcaggattttacagactacttggaa

SEQ ID NO: 455514 - DNA, 25 bp, Homo sapien
gataggaaataactgctagctgcca

SEQ ID NO: 455515 - DNA, 25 bp, Homo sapien
aggttaaagtgcacagtacatctga

SEQ ID NO: 455516 - DNA, 25 bp, Homo sapien
gaaaatatttcaggaccccgcattc

SEQ ID NO: 455517 - DNA, 25 bp, Homo sapien
tctgaatgcccgtgaaggtgcagca

SEQ ID NO: 455518 - DNA, 25 bp, Homo sapien
tatatacattctgtccactgacgat

SEQ ID NO: 455519 - DNA, 25 bp, Homo sapien
tgacgatactgtcagctggccatgc

SEQ ID NO: 455520 - DNA, 25 bp, Homo sapien
caaggatcttgaagacgtcttagcc

SEQ ID NO: 455521 - DNA, 25 bp, Homo sapien
cgtcttagccatagaaggactgcat

SEQ ID NO: 455522 - DNA, 25 bp, Homo sapien
gaagtaaagatgcagcgatggccac

SEQ ID NO: 455523 - DNA, 25 bp, Homo sapien
tggcaacagcagtagctaagaagac

SEQ ID NO: 455524 - DNA, 25 bp, Homo sapien
gcctagcctccaagtaatctgaaga

SEQ ID NO: 455525 - DNA, 25 bp, Homo sapien
gaagaaaggaaatgtcactgttggt

SEQ ID NO: 455526 - DNA, 25 bp, Homo sapien
cacatcagacatcatgctaaatacc

SEQ ID NO: 455527 - DNA, 25 bp, Homo sapien
tactgaccacatcagacatcatgct

SEQ ID NO: 455528 - DNA, 25 bp, Homo sapien
tgaccacatcagacatcatgctaaa

SEQ ID NO: 455529 - DNA, 25 bp, Homo sapien
cctttattactgaccacatcagaca

SEQ ID NO: 455530 - DNA, 25 bp, Homo sapien
cgtttacttatgtaactgcatatcc

SEQ ID NO: 455531 - DNA, 25 bp, Homo sapien
ctaatttgctaagggatgtcaggcc

SEQ ID NO: 455532 - DNA, 25 bp, Homo sapien
aaatgactggatagatagaaatctc

SEQ ID NO: 455533 - DNA, 25 bp, Homo sapien
tagaaatctctttcaacttaactgc

SEQ ID NO: 455534 - DNA, 25 bp, Homo sapien
tgtctgatggctcttaacacacaag

SEQ ID NO: 455535 - DNA, 25 bp, Homo sapien
tcagcaggataccaattgttcaaat

SEQ ID NO: 455536 - DNA, 25 bp, Homo sapien
aattcttgggccctcaatggcaggc

SEQ ID NO: 455537 - DNA, 25 bp, Homo sapien
tcgaattgtgtaacttcagcaggat

SEQ ID NO: 455538 - DNA, 25 bp, Homo sapien
taggcacagtgctttcaactagatt

SEQ ID NO: 455539 - DNA, 25 bp, Homo sapien
tggacagctaaagatcactagacat

SEQ ID NO: 455540 - DNA, 25 bp, Homo sapien
gatattgacctcttgacttcatagg

SEQ ID NO: 455541 - DNA, 25 bp, Homo sapien
tctcttaaataggagtggacagcta

SEQ ID NO: 455542 - DNA, 25 bp, Homo sapien
gaagtatcttcaagctttgacatga

SEQ ID NO: 455543 - DNA, 25 bp, Homo sapien
tgaggatctctaagtgtaggaaaaa

SEQ ID NO: 455544 - DNA, 25 bp, Homo sapien
gactttttgagaaagatggcacact

SEQ ID NO: 455545 - DNA, 25 bp, Homo sapien
caaaactctgactaacatggcatta

SEQ ID NO: 455546 - DNA, 25 bp, Homo sapien
cattattgtgagctggcgaactgcg

SEQ ID NO: 455547 - DNA, 25 bp, Homo sapien
tgactaacaattccacgtaggccgt

SEQ ID NO: 455548 - DNA, 25 bp, Homo sapien
gctgttggtagggatccgttgacca

SEQ ID NO: 455549 - DNA, 25 bp, Homo sapien
taaaaccctaggctttcatgcagga

SEQ ID NO: 455550 - DNA, 25 bp, Homo sapien
taaaatgctctcagagcgctgtggg

SEQ ID NO: 455551 - DNA, 25 bp, Homo sapien
tggaagtcatttctgatggggtcat

SEQ ID NO: 455552 - DNA, 25 bp, Homo sapien
ctgttcgggtcgtaaaatgctctca

SEQ ID NO: 455553 - DNA, 25 bp, Homo sapien
tgacaaaatctgttcgggtcgtaaa

SEQ ID NO: 455554 - DNA, 25 bp, Homo sapien
gtagaggcctggacgttgtcagcct

SEQ ID NO: 455555 - DNA, 25 bp, Homo sapien
gtatccgcaggcacgagcgcagaga

SEQ ID NO: 455556 - DNA, 25 bp, Homo sapien
ggtcactccgccaccgtaggtaaga

SEQ ID NO: 455557 - DNA, 25 bp, Homo sapien
gagtcctgcggtgcaggtatccgca

SEQ ID NO: 455558 - DNA, 25 bp, Homo sapien
caaggtgacagggactaacctaacg

SEQ ID NO: 455559 - DNA, 25 bp, Homo sapien
gactgatccccgacaaggtgacagg

SEQ ID NO: 455560 - DNA, 25 bp, Homo sapien
caagtttattaatgcctcgggttct

SEQ ID NO: 455561 - DNA, 25 bp, Homo sapien
ctgggaagagtctgagcacgcacag

SEQ ID NO: 455562 - DNA, 25 bp, Homo sapien
tacataagtgacacggaaaccctct

SEQ ID NO: 455563 - DNA, 25 bp, Homo sapien
tgatggagttcccactgcgtgtcgg

SEQ ID NO: 455564 - DNA, 25 bp, Homo sapien
tgcgtgtcggccactggagatttca

SEQ ID NO: 455565 - DNA, 25 bp, Homo sapien
tgtttaactcaagctaccaagtagg

SEQ ID NO: 455566 - DNA, 25 bp, Homo sapien
taatatttctatgaccttccattgc

SEQ ID NO: 455567 - DNA, 25 bp, Homo sapien
tttctatgaccttccattgctgcaa

SEQ ID NO: 455568 - DNA, 25 bp, Homo sapien
gaactttaagacaagtctatgagga

SEQ ID NO: 455569 - DNA, 25 bp, Homo sapien
tggcgaaaacaatggtccacatata

SEQ ID NO: 455570 - DNA, 25 bp, Homo sapien
gaaaagctcttccagcggtcgatcc

SEQ ID NO: 455571 - DNA, 25 bp, Homo sapien
tatcaagtcactccagaaagaagct

SEQ ID NO: 455572 - DNA, 25 bp, Homo sapien
tgtaagtgatcttggcacacgggcc

SEQ ID NO: 455573 - DNA, 25 bp, Homo sapien
tctttgggctacaggacgattcgaa

SEQ ID NO: 455574 - DNA, 25 bp, Homo sapien
aagtccaaagttggtctcaccaggc

SEQ ID NO: 455575 - DNA, 25 bp, Homo sapien
gtcagtagggctgcgttctttctgg

SEQ ID NO: 455576 - DNA, 25 bp, Homo sapien
gtgtcagtagggctgcgttctttct

SEQ ID NO: 455577 - DNA, 25 bp, Homo sapien
caaagttggtctcaccaggccaaaa

SEQ ID NO: 455578 - DNA, 25 bp, Homo sapien
cagtcacttgggctagtttttcctg

SEQ ID NO: 455579 - DNA, 25 bp, Homo sapien
gagtggagttgtcaggtcctgttac

SEQ ID NO: 455580 - DNA, 25 bp, Homo sapien
gtagactaactggaactgtagactt

SEQ ID NO: 455581 - DNA, 25 bp, Homo sapien
ccccagctcagtcacttgggctagt

SEQ ID NO: 455582 - DNA, 25 bp, Homo sapien
cccctgctatttgataatattccaa

SEQ ID NO: 455583 - DNA, 25 bp, Homo sapien
tagacttgacactaagtccactgtg

SEQ ID NO: 455584 - DNA, 25 bp, Homo sapien
tgttagctaagaatcaaatcctaga

SEQ ID NO: 455585 - DNA, 25 bp, Homo sapien
ttgcatttaatcgtcacaactcaga

SEQ ID NO: 455586 - DNA, 25 bp, Homo sapien
cactgtccagagcactcttcgtttt

SEQ ID NO: 455587 - DNA, 25 bp, Homo sapien
attgtgtactcttacaaaagatagg

SEQ ID NO: 455588 - DNA, 25 bp, Homo sapien
tgattataaatctacgagggattgt

SEQ ID NO: 455589 - DNA, 25 bp, Homo sapien
ggagagcatattgtcagcaaggaag

SEQ ID NO: 455590 - DNA, 25 bp, Homo sapien
tggcctctgccgagcaagctttgtg

SEQ ID NO: 455591 - DNA, 25 bp, Homo sapien
tagagaccatccaagcttaccgtgc

SEQ ID NO: 455592 - DNA, 25 bp, Homo sapien
gaggcacagggttgctcactgacac

SEQ ID NO: 455593 - DNA, 25 bp, Homo sapien
cataggatagggatacatgtgctcc

SEQ ID NO: 455594 - DNA, 25 bp, Homo sapien
gaagagtcgcggataacagcagctg

SEQ ID NO: 455595 - DNA, 25 bp, Homo sapien
ggacatgtgagaaacacgcatacag

SEQ ID NO: 455596 - DNA, 25 bp, Homo sapien
gaaataggtggctagatctcgacca

SEQ ID NO: 455597 - DNA, 25 bp, Homo sapien
tagcaccggagacgaagtgggatct

SEQ ID NO: 455598 - DNA, 25 bp, Homo sapien
tccatatccatgaggtggacaatgt

SEQ ID NO: 455599 - DNA, 25 bp, Homo sapien
agcatccatatccatgaggtggaca

SEQ ID NO: 455600 - DNA, 25 bp, Homo sapien
catccatatccatgaggtggacaat

SEQ ID NO: 455601 - DNA, 25 bp, Homo sapien
ccatatccatgaggtggacaatgta

SEQ ID NO: 455602 - DNA, 25 bp, Homo sapien
ttactctacgtacatctcagcagtg

SEQ ID NO: 455603 - DNA, 25 bp, Homo sapien
tactctacgtacatctcagcagtgt

SEQ ID NO: 455604 - DNA, 25 bp, Homo sapien
tctacgtacatctcagcagtgtgac

SEQ ID NO: 455605 - DNA, 25 bp, Homo sapien
actctacgtacatctcagcagtgtg

SEQ ID NO: 455606 - DNA, 25 bp, Homo sapien
caagctcttggcctatctaggccta

SEQ ID NO: 455607 - DNA, 25 bp, Homo sapien
aatgctgcccatgagtatcctcggg

SEQ ID NO: 455608 - DNA, 25 bp, Homo sapien
ttcttggttgaaacagccctgaatg

SEQ ID NO: 455609 - DNA, 25 bp, Homo sapien
ttggcctatctaggcctattcttct

SEQ ID NO: 455610 - DNA, 25 bp, Homo sapien
gtgcaatctcagctcactgcaacct

SEQ ID NO: 455611 - DNA, 25 bp, Homo sapien
agcgattcttctgcattagcctcct

SEQ ID NO: 455612 - DNA, 25 bp, Homo sapien
caccttggcctccaaaagtgctggg

SEQ ID NO: 455613 - DNA, 25 bp, Homo sapien
gtgtcacccaggctggagtgcggtg

SEQ ID NO: 455614 - DNA, 25 bp, Homo sapien
acataaccaagggatggtggtggac

SEQ ID NO: 455615 - DNA, 25 bp, Homo sapien
gttgcaagtctaatactgaaaaaga

SEQ ID NO: 455616 - DNA, 25 bp, Homo sapien
tggtggacacgatgaggagtcacag

SEQ ID NO: 455617 - DNA, 25 bp, Homo sapien
gtcacagtgtgatgagtcataatgc

SEQ ID NO: 455618 - DNA, 25 bp, Homo sapien
ttcctgtttaccacagcagcgattg

SEQ ID NO: 455619 - DNA, 25 bp, Homo sapien
gctgtgctgacacccctgagtgtct

SEQ ID NO: 455620 - DNA, 25 bp, Homo sapien
tactgaatcttcaagggaagcatcc

SEQ ID NO: 455621 - DNA, 25 bp, Homo sapien
catcctactgttcagatacttcctg

SEQ ID NO: 455622 - DNA, 25 bp, Homo sapien
cccagaatcaacatgaagtgcagat

SEQ ID NO: 455623 - DNA, 25 bp, Homo sapien
ttcaacaccaggtctgcacatgctg

SEQ ID NO: 455624 - DNA, 25 bp, Homo sapien
tgggatagaccctctcagagcactg

SEQ ID NO: 455625 - DNA, 25 bp, Homo sapien
tcttgtcgagtgagagttggcccaa

SEQ ID NO: 455626 - DNA, 25 bp, Homo sapien
ttgtcaaggctgtggcagaggattc

SEQ ID NO: 455627 - DNA, 25 bp, Homo sapien
tgtcaaggctgtggcagaggattcc

SEQ ID NO: 455628 - DNA, 25 bp, Homo sapien
ctgtcttgtcaaggctgtggcagag

SEQ ID NO: 455629 - DNA, 25 bp, Homo sapien
tcttgtcaaggctgtggcagaggat

SEQ ID NO: 455630 - DNA, 25 bp, Homo sapien
tatgtcaatcatgcaagttagcctg

SEQ ID NO: 455631 - DNA, 25 bp, Homo sapien
tcccgttaaattccagcatgccttg

SEQ ID NO: 455632 - DNA, 25 bp, Homo sapien
atcatgcaagttagcctggaaagga

SEQ ID NO: 455633 - DNA, 25 bp, Homo sapien
cagcatgccttgactatgtcaatca

SEQ ID NO: 455634 - DNA, 25 bp, Homo sapien
tatcccttttcctttgtctccagga

SEQ ID NO: 455635 - DNA, 25 bp, Homo sapien
atatcccttttcctttgtctccagg

SEQ ID NO: 455636 - DNA, 25 bp, Homo sapien
gatatcccttttcctttgtctccag

SEQ ID NO: 455637 - DNA, 25 bp, Homo sapien
cagatatcccttttcctttgtctcc

SEQ ID NO: 455638 - DNA, 25 bp, Homo sapien
caagggagaccacataccaggtcat

SEQ ID NO: 455639 - DNA, 25 bp, Homo sapien
cgatgtcatgcagggatgcagagaa

SEQ ID NO: 455640 - DNA, 25 bp, Homo sapien
tgcagagaagtatgtgtgctcacaa

SEQ ID NO: 455641 - DNA, 25 bp, Homo sapien
tatgtgtgctcacaagggagaccac

SEQ ID NO: 455642 - DNA, 25 bp, Homo sapien
tgtcttagggacctgaacacccaaa

SEQ ID NO: 455643 - DNA, 25 bp, Homo sapien
tgtacaaaagcagaatgttgattct

SEQ ID NO: 455644 - DNA, 25 bp, Homo sapien
aatcccataccagaggacattcact

SEQ ID NO: 455645 - DNA, 25 bp, Homo sapien
gacattcactccagcgaggcacata

SEQ ID NO: 455646 - DNA, 25 bp, Homo sapien
tacatcattgcgtatgcagtactgc

SEQ ID NO: 455647 - DNA, 25 bp, Homo sapien
cgtatgcagtactgctccagctgct

SEQ ID NO: 455648 - DNA, 25 bp, Homo sapien
caaagtgtacatcattgcgtatgca

SEQ ID NO: 455649 - DNA, 25 bp, Homo sapien
cattgcgtatgcagtactgctccag

SEQ ID NO: 455650 - DNA, 25 bp, Homo sapien
aatggtcaccttgcacatgtcagcc

SEQ ID NO: 455651 - DNA, 25 bp, Homo sapien
gccaaaaggctggaggtattcccat

SEQ ID NO: 455652 - DNA, 25 bp, Homo sapien
aaaacccgaaccctgcttgtcagtg

SEQ ID NO: 455653 - DNA, 25 bp, Homo sapien
gcaggactgcctttggagaatggtc

SEQ ID NO: 455654 - DNA, 25 bp, Homo sapien
gctctcccaacttatttccactctg

SEQ ID NO: 455655 - DNA, 25 bp, Homo sapien
ggttggagaaagtctttgccgtcat

SEQ ID NO: 455656 - DNA, 25 bp, Homo sapien
tatttccactctggttggagaaagt

SEQ ID NO: 455657 - DNA, 25 bp, Homo sapien
ccccagctctcccaacttatttcca

SEQ ID NO: 455658 - DNA, 25 bp, Homo sapien
tgaccctattagaggcctgcagcat

SEQ ID NO: 455659 - DNA, 25 bp, Homo sapien
catggtgatgttggctggaccacac

SEQ ID NO: 455660 - DNA, 25 bp, Homo sapien
gttatgccctaacctcaatgcagag

SEQ ID NO: 455661 - DNA, 25 bp, Homo sapien
cattggccagtcaagtcaaggaaag

SEQ ID NO: 455662 - DNA, 25 bp, Homo sapien
catgctattgtcgtccctgcagtat

SEQ ID NO: 455663 - DNA, 25 bp, Homo sapien
gtcgtccctgcagtatttgacaccc

SEQ ID NO: 455664 - DNA, 25 bp, Homo sapien
aattcccatgctattgtcgtccctg

SEQ ID NO: 455665 - DNA, 25 bp, Homo sapien
cttttcaattcccatgctattgtcg

SEQ ID NO: 455666 - DNA, 25 bp, Homo sapien
tctcaggttcttgagtgaacactgc

SEQ ID NO: 455667 - DNA, 25 bp, Homo sapien
ttctcaggttcttgagtgaacactg

SEQ ID NO: 455668 - DNA, 25 bp, Homo sapien
tctcatggctacagccccagtgtca

SEQ ID NO: 455669 - DNA, 25 bp, Homo sapien
tggaatctggcgttcttggcaaaga

SEQ ID NO: 455670 - DNA, 25 bp, Homo sapien
caagtgcctcgaggtgtcagtgtga

SEQ ID NO: 455671 - DNA, 25 bp, Homo sapien
ttaggagctgtccaagtgcctcgag

SEQ ID NO: 455672 - DNA, 25 bp, Homo sapien
tatttctgaatttgtttctgaactt

SEQ ID NO: 455673 - DNA, 25 bp, Homo sapien
atttctgaatttgtttctgaacttt

SEQ ID NO: 455674 - DNA, 25 bp, Homo sapien
ttatttctgaatttgtttctgaact

SEQ ID NO: 455675 - DNA, 25 bp, Homo sapien
tttctgaatttgtttctgaactttc

SEQ ID NO: 455676 - DNA, 25 bp, Homo sapien
ttttgagcctcaagcttgggttttg

SEQ ID NO: 455677 - DNA, 25 bp, Homo sapien
cagggtcccttgagacactttttgg

SEQ ID NO: 455678 - DNA, 25 bp, Homo sapien
ttgagcctcaagcttgggttttgcc

SEQ ID NO: 455679 - DNA, 25 bp, Homo sapien
ccttgagacactttttggatgctta

SEQ ID NO: 455680 - DNA, 25 bp, Homo sapien
cattaagtgaagattttgcagcttt

SEQ ID NO: 455681 - DNA, 25 bp, Homo sapien
ttaagtgaagattttgcagctttct

SEQ ID NO: 455682 - DNA, 25 bp, Homo sapien
attaagtgaagattttgcagctttc

SEQ ID NO: 455683 - DNA, 25 bp, Homo sapien
taagtgaagattttgcagctttctc

SEQ ID NO: 455684 - DNA, 25 bp, Homo sapien
aatcctcttaagagggaccagcatg

SEQ ID NO: 455685 - DNA, 25 bp, Homo sapien
cagggttactatctctctgccaacc

SEQ ID NO: 455686 - DNA, 25 bp, Homo sapien
cagcaaccacagtggcttcagggtt

SEQ ID NO: 455687 - DNA, 25 bp, Homo sapien
tcctttcaactccagcagcgatacc

SEQ ID NO: 455688 - DNA, 25 bp, Homo sapien
aactcttttcaatggcttagttcgg

SEQ ID NO: 455689 - DNA, 25 bp, Homo sapien
caatggcttagttcggtcctccact

SEQ ID NO: 455690 - DNA, 25 bp, Homo sapien
tgccctgcagagaggttttttaaac

SEQ ID NO: 455691 - DNA, 25 bp, Homo sapien
tttcaatggcttagttcggtcctcc

SEQ ID NO: 455692 - DNA, 25 bp, Homo sapien
agcccttgtgtttgagaaccacttc

SEQ ID NO: 455693 - DNA, 25 bp, Homo sapien
tcatatgggcaatctggaaatccct

SEQ ID NO: 455694 - DNA, 25 bp, Homo sapien
tatgggcaatctggaaatccctggt

SEQ ID NO: 455695 - DNA, 25 bp, Homo sapien
aactcatatgggcaatctggaaatc

SEQ ID NO: 455696 - DNA, 25 bp, Homo sapien
gctctccactgccaaggatggcctt

SEQ ID NO: 455697 - DNA, 25 bp, Homo sapien
ctctccactgccaaggatggccttt

SEQ ID NO: 455698 - DNA, 25 bp, Homo sapien
ggccttttcacactcccatgcaaaa

SEQ ID NO: 455699 - DNA, 25 bp, Homo sapien
tctccactgccaaggatggcctttt

SEQ ID NO: 455700 - DNA, 25 bp, Homo sapien
tataaggcatgagttcttccaagaa

SEQ ID NO: 455701 - DNA, 25 bp, Homo sapien
aattataaggcatgagttcttccaa

SEQ ID NO: 455702 - DNA, 25 bp, Homo sapien
gatgatgtgaacaatacagttaaat

SEQ ID NO: 455703 - DNA, 25 bp, Homo sapien
taaattataaggcatgagttcttcc

SEQ ID NO: 455704 - DNA, 25 bp, Homo sapien
tccaggggtgccagatagcagagcc

SEQ ID NO: 455705 - DNA, 25 bp, Homo sapien
ccttcacgatgttccaaaatacttc

SEQ ID NO: 455706 - DNA, 25 bp, Homo sapien
ttgggttggtgggtcatgggtccag

SEQ ID NO: 455707 - DNA, 25 bp, Homo sapien
gcacatgcaagagtctgactgatta

SEQ ID NO: 455708 - DNA, 25 bp, Homo sapien
tgcctgggaaatgtttacactgttg

SEQ ID NO: 455709 - DNA, 25 bp, Homo sapien
ggaaatgtttacactgttgagcctt

SEQ ID NO: 455710 - DNA, 25 bp, Homo sapien
gttgagccacttttttcataggaga

SEQ ID NO: 455711 - DNA, 25 bp, Homo sapien
cagagctgttgagccacttttttca

SEQ ID NO: 455712 - DNA, 25 bp, Homo sapien
gagaggtagacgttaaggattgata

SEQ ID NO: 455713 - DNA, 25 bp, Homo sapien
agtaaacgtctgtgtattatggcac

SEQ ID NO: 455714 - DNA, 25 bp, Homo sapien
aagtttagcactcttgaatattcac

SEQ ID NO: 455715 - DNA, 25 bp, Homo sapien
attcactggttcatgagaaatagtt

SEQ ID NO: 455716 - DNA, 25 bp, Homo sapien
gaaccacaatgtagtatcagcaaat

SEQ ID NO: 455717 - DNA, 25 bp, Homo sapien
atgaagatggctatagttattgctc

SEQ ID NO: 455718 - DNA, 25 bp, Homo sapien
ggctatagttattgctctctgttga

SEQ ID NO: 455719 - DNA, 25 bp, Homo sapien
cccaatcaaagaaccacaatgtagt

SEQ ID NO: 455720 - DNA, 25 bp, Homo sapien
taacttgtgtgagcacaggcgtgca

SEQ ID NO: 455721 - DNA, 25 bp, Homo sapien
tggtcctatggagcaaatgtcagta

SEQ ID NO: 455722 - DNA, 25 bp, Homo sapien
gaaatagtatttggacctgggacag

SEQ ID NO: 455723 - DNA, 25 bp, Homo sapien
tattgaaactcacgtcagtggtaca

SEQ ID NO: 455724 - DNA, 25 bp, Homo sapien
ggaatagctacccattttgccttct

SEQ ID NO: 455725 - DNA, 25 bp, Homo sapien
ttggccggaatagctacccattttg

SEQ ID NO: 455726 - DNA, 25 bp, Homo sapien
gccggaatagctacccattttgcct

SEQ ID NO: 455727 - DNA, 25 bp, Homo sapien
ctatttggccggaatagctacccat

SEQ ID NO: 455728 - DNA, 25 bp, Homo sapien
agcagacttcagatatgtgaaagaa

SEQ ID NO: 455729 - DNA, 25 bp, Homo sapien
tcagtagcagacttcagatatgtga

SEQ ID NO: 455730 - DNA, 25 bp, Homo sapien
gtagcagacttcagatatgtgaaag

SEQ ID NO: 455731 - DNA, 25 bp, Homo sapien
cagtagcagacttcagatatgtgaa

SEQ ID NO: 455732 - DNA, 25 bp, Homo sapien
ggattccctccaagcatgtcttgtg

SEQ ID NO: 455733 - DNA, 25 bp, Homo sapien
agcagttctagtgcagggttggtca

SEQ ID NO: 455734 - DNA, 25 bp, Homo sapien
gctctaaagtgtaactgacccagca

SEQ ID NO: 455735 - DNA, 25 bp, Homo sapien
ttaggaggttccgactcaaagatga

SEQ ID NO: 455736 - DNA, 25 bp, Homo sapien
taacttgcatctggtatggtagccc

SEQ ID NO: 455737 - DNA, 25 bp, Homo sapien
tacttaactgcgatgattcctggaa

SEQ ID NO: 455738 - DNA, 25 bp, Homo sapien
ttcctggaacactaatactgacctt

SEQ ID NO: 455739 - DNA, 25 bp, Homo sapien
tatggtagccctatacttaactgcg

SEQ ID NO: 455740 - DNA, 25 bp, Homo sapien
gcatgaatggccaaacaacttagtg

SEQ ID NO: 455741 - DNA, 25 bp, Homo sapien
gtgggataaccctatggctgtctct

SEQ ID NO: 455742 - DNA, 25 bp, Homo sapien
cctctggttgtgaacccgtgggtag

SEQ ID NO: 455743 - DNA, 25 bp, Homo sapien
aaacacagcttcagttcatggcagc

SEQ ID NO: 455744 - DNA, 25 bp, Homo sapien
gccgatttgtggcatattcttcagt

SEQ ID NO: 455745 - DNA, 25 bp, Homo sapien
cgatttgtggcatattcttcagtgt

SEQ ID NO: 455746 - DNA, 25 bp, Homo sapien
tttcagaatcaatgaatgccgattt

SEQ ID NO: 455747 - DNA, 25 bp, Homo sapien
caatgaatgccgatttgtggcatat

SEQ ID NO: 455748 - DNA, 25 bp, Homo sapien
gcaaggaactgtactcactcaaacc

SEQ ID NO: 455749 - DNA, 25 bp, Homo sapien
tgtactcactcaaaccatctctggg

SEQ ID NO: 455750 - DNA, 25 bp, Homo sapien
actacaggaattatctgggtcataa

SEQ ID NO: 455751 - DNA, 25 bp, Homo sapien
ggaaattcgtggaaacatatcacta

SEQ ID NO: 455752 - DNA, 25 bp, Homo sapien
aggttgaactcccatttgcttacta

SEQ ID NO: 455753 - DNA, 25 bp, Homo sapien
gcaggttgaactcccatttgcttac

SEQ ID NO: 455754 - DNA, 25 bp, Homo sapien
tgaactcccatttgcttactacttt

SEQ ID NO: 455755 - DNA, 25 bp, Homo sapien
actcccatttgcttactactttcaa

SEQ ID NO: 455756 - DNA, 25 bp, Homo sapien
ctgagaaggcaacaaggagagagaa

SEQ ID NO: 455757 - DNA, 25 bp, Homo sapien
ggcaacaaggagagagaatggagct

SEQ ID NO: 455758 - DNA, 25 bp, Homo sapien
acaaggagagagaatggagctagac

SEQ ID NO: 455759 - DNA, 25 bp, Homo sapien
tgagaaggcaacaaggagagagaat

SEQ ID NO: 455760 - DNA, 25 bp, Homo sapien
gcagtttccaaagactccacattgg

SEQ ID NO: 455761 - DNA, 25 bp, Homo sapien
cacattggcatagggacaaagggat

SEQ ID NO: 455762 - DNA, 25 bp, Homo sapien
gggcagtttccaaagactccacatt

SEQ ID NO: 455763 - DNA, 25 bp, Homo sapien
caaagactccacattggcataggga

SEQ ID NO: 455764 - DNA, 25 bp, Homo sapien
tggggtcaaccaatctgtaatgttt

SEQ ID NO: 455765 - DNA, 25 bp, Homo sapien
ttggggtcaaccaatctgtaatgtt

SEQ ID NO: 455766 - DNA, 25 bp, Homo sapien
cttggggtcaaccaatctgtaatgt

SEQ ID NO: 455767 - DNA, 25 bp, Homo sapien
tacaggataagacttgtagttggga

SEQ ID NO: 455768 - DNA, 25 bp, Homo sapien
gataagacttgtagttgggacacat

SEQ ID NO: 455769 - DNA, 25 bp, Homo sapien
ggataagacttgtagttgggacaca

SEQ ID NO: 455770 - DNA, 25 bp, Homo sapien
caggataagacttgtagttgggaca

SEQ ID NO: 455771 - DNA, 25 bp, Homo sapien
ttagaacactcgtatttttccatgg

SEQ ID NO: 455772 - DNA, 25 bp, Homo sapien
agaacactcgtatttttccatgggt

SEQ ID NO: 455773 - DNA, 25 bp, Homo sapien
tagaacactcgtatttttccatggg

SEQ ID NO: 455774 - DNA, 25 bp, Homo sapien
tttagaacactcgtatttttccatg

SEQ ID NO: 455775 - DNA, 25 bp, Homo sapien
gcttccatgaagtacttctattggc

SEQ ID NO: 455776 - DNA, 25 bp, Homo sapien
tggcacttagcacgttgtattcccc

SEQ ID NO: 455777 - DNA, 25 bp, Homo sapien
tgtattcccctactgattgaaaaag

SEQ ID NO: 455778 - DNA, 25 bp, Homo sapien
gtcatatttatgtgcttctccgagg

SEQ ID NO: 455779 - DNA, 25 bp, Homo sapien
cgctgaatccggcatcctgtgttta

SEQ ID NO: 455780 - DNA, 25 bp, Homo sapien
taatgggcatacgactaggaggaaa

SEQ ID NO: 455781 - DNA, 25 bp, Homo sapien
tgtatactcctctcaagacacgctg

SEQ ID NO: 455782 - DNA, 25 bp, Homo sapien
tattaatgcaacgaactccaggtca

SEQ ID NO: 455783 - DNA, 25 bp, Homo sapien
tctctttgaaaatgccaatgtgttt

SEQ ID NO: 455784 - DNA, 25 bp, Homo sapien
aatagcctaaagagaagtttcttct

SEQ ID NO: 455785 - DNA, 25 bp, Homo sapien
ttaactgggtcaatttctctttgaa

SEQ ID NO: 455786 - DNA, 25 bp, Homo sapien
tgaaaatgccaatgtgttttcttta

SEQ ID NO: 455787 - DNA, 25 bp, Homo sapien
actttgctgaaggttggccaatggc

SEQ ID NO: 455788 - DNA, 25 bp, Homo sapien
tggaaagccgaagaatgcagaacat

SEQ ID NO: 455789 - DNA, 25 bp, Homo sapien
gaattgcagggaacaagtccaacat

SEQ ID NO: 455790 - DNA, 25 bp, Homo sapien
ggccaatggccagatcattaagaag

SEQ ID NO: 455791 - DNA, 25 bp, Homo sapien
acacatatcctgaagaatttgtaga

SEQ ID NO: 455792 - DNA, 25 bp, Homo sapien
tacacatatcctgaagaatttgtag

SEQ ID NO: 455793 - DNA, 25 bp, Homo sapien
ctacacatatcctgaagaatttgta

SEQ ID NO: 455794 - DNA, 25 bp, Homo sapien
catttttctcctacaggtgccagtg

SEQ ID NO: 455795 - DNA, 25 bp, Homo sapien
cccgactaagtcatgtgaagacaca

SEQ ID NO: 455796 - DNA, 25 bp, Homo sapien
tcttgtctgctgtcccgactaagtc

SEQ ID NO: 455797 - DNA, 25 bp, Homo sapien
gggccattgtttgattactttctgc

SEQ ID NO: 455798 - DNA, 25 bp, Homo sapien
caaggaagcagttaggttccttggg

SEQ ID NO: 455799 - DNA, 25 bp, Homo sapien
tccagacctcctcaaatctttgtgt

SEQ ID NO: 455800 - DNA, 25 bp, Homo sapien
tgggtaaccctaggactgctgcctg

SEQ ID NO: 455801 - DNA, 25 bp, Homo sapien
agtcaactccggtagcatccaccaa

SEQ ID NO: 455802 - DNA, 25 bp, Homo sapien
gatagccgttgtacggctgtgaagc

SEQ ID NO: 455803 - DNA, 25 bp, Homo sapien
ttagcagggatagccgttgtacggc

SEQ ID NO: 455804 - DNA, 25 bp, Homo sapien
ttttagcagggatagccgttgtacg

SEQ ID NO: 455805 - DNA, 25 bp, Homo sapien
gggatagccgttgtacggctgtgaa

SEQ ID NO: 455806 - DNA, 25 bp, Homo sapien
ctctaaaaggacgatataatttgac

SEQ ID NO: 455807 - DNA, 25 bp, Homo sapien
gtctctaaaaggacgatataatttg

SEQ ID NO: 455808 - DNA, 25 bp, Homo sapien
ctaaaaggacgatataatttgacat

SEQ ID NO: 455809 - DNA, 25 bp, Homo sapien
gttgtctctaaaaggacgatataat

SEQ ID NO: 455810 - DNA, 25 bp, Homo sapien
gatttccagtgtgtgccgattttcc

SEQ ID NO: 455811 - DNA, 25 bp, Homo sapien
tgtcctagctaagtgcaattcatga

SEQ ID NO: 455812 - DNA, 25 bp, Homo sapien
gggtaatcttacgttctgtcctagc

SEQ ID NO: 455813 - DNA, 25 bp, Homo sapien
cacatcatcaggctcaaataaggat

SEQ ID NO: 455814 - DNA, 25 bp, Homo sapien
tcatttgccgatcaaaattagatag

SEQ ID NO: 455815 - DNA, 25 bp, Homo sapien
cacaccagcattgaaggataggtcc

SEQ ID NO: 455816 - DNA, 25 bp, Homo sapien
aggtcctttaatccctttgctgatc

SEQ ID NO: 455817 - DNA, 25 bp, Homo sapien
gaaatgaaagttccattcacaccag

SEQ ID NO: 455818 - DNA, 25 bp, Homo sapien
gataggtcctttaatccctttgctg

SEQ ID NO: 455819 - DNA, 25 bp, Homo sapien
tgacagtggtgagagggcaaacaca

SEQ ID NO: 455820 - DNA, 25 bp, Homo sapien
cagcagacttgggagtaaaagtcac

SEQ ID NO: 455821 - DNA, 25 bp, Homo sapien
tctgcaactcccatatagaaaggga

SEQ ID NO: 455822 - DNA, 25 bp, Homo sapien
ttggaagaacttcaaatggagtggg

SEQ ID NO: 455823 - DNA, 25 bp, Homo sapien
aatgcactttttattgtgaaggact

SEQ ID NO: 455824 - DNA, 25 bp, Homo sapien
tttctcttggatcagaaatgcactt

SEQ ID NO: 455825 - DNA, 25 bp, Homo sapien
gcactttttattgtgaaggactgca

SEQ ID NO: 455826 - DNA, 25 bp, Homo sapien
cagaaatgcactttttattgtgaag

SEQ ID NO: 455827 - DNA, 25 bp, Homo sapien
tatgaagttggaaccaattctcgga

SEQ ID NO: 455828 - DNA, 25 bp, Homo sapien
gaatcacacggtctgctcactctga

SEQ ID NO: 455829 - DNA, 25 bp, Homo sapien
tacatttgctgcttggatacacgct

SEQ ID NO: 455830 - DNA, 25 bp, Homo sapien
aattctcggaaagaaacactctcca

SEQ ID NO: 455831 - DNA, 25 bp, Homo sapien
caatctcatctcaatcagagttgtc

SEQ ID NO: 455832 - DNA, 25 bp, Homo sapien
tgaccttttacagactgcaatctca

SEQ ID NO: 455833 - DNA, 25 bp, Homo sapien
tgatcatggtagctagagtataaaa

SEQ ID NO: 455834 - DNA, 25 bp, Homo sapien
tccctgctttttggcacttttgtga

SEQ ID NO: 455835 - DNA, 25 bp, Homo sapien
caaggaaatctccaattgccttagt

SEQ ID NO: 455836 - DNA, 25 bp, Homo sapien
atctccaattgccttagttcctctt

SEQ ID NO: 455837 - DNA, 25 bp, Homo sapien
aggaaatctccaattgccttagttc

SEQ ID NO: 455838 - DNA, 25 bp, Homo sapien
gaaatctccaattgccttagttcct

SEQ ID NO: 455839 - DNA, 25 bp, Homo sapien
gctgatctatcaccacatttgaata

SEQ ID NO: 455840 - DNA, 25 bp, Homo sapien
actctgtgatgactttgtgattttc

SEQ ID NO: 455841 - DNA, 25 bp, Homo sapien
ctgccttcgccaagccaggcatata

SEQ ID NO: 455842 - DNA, 25 bp, Homo sapien
agttctcttaatgttcgtgacccac

SEQ ID NO: 455843 - DNA, 25 bp, Homo sapien
tatgtgttgaagttggtggatagac

SEQ ID NO: 455844 - DNA, 25 bp, Homo sapien
tgtgttgaagttggtggatagacat

SEQ ID NO: 455845 - DNA, 25 bp, Homo sapien
ttgtatgtgttgaagttggtggata

SEQ ID NO: 455846 - DNA, 25 bp, Homo sapien
aatttgtatgtgttgaagttggtgg

SEQ ID NO: 455847 - DNA, 25 bp, Homo sapien
ttgctgaatctccttactgtcccgg

SEQ ID NO: 455848 - DNA, 25 bp, Homo sapien
gaggtgctgaatcttttgctgaatc

SEQ ID NO: 455849 - DNA, 25 bp, Homo sapien
gaatctccttactgtcccggaccat

SEQ ID NO: 455850 - DNA, 25 bp, Homo sapien
ctaagggtgctaacaaggaggtgct

SEQ ID NO: 455851 - DNA, 25 bp, Homo sapien
gacgtcttcatcacttgagggctga

SEQ ID NO: 455852 - DNA, 25 bp, Homo sapien
agtatggacgtcttcatcacttgag

SEQ ID NO: 455853 - DNA, 25 bp, Homo sapien
tatggacgtcttcatcacttgaggg

SEQ ID NO: 455854 - DNA, 25 bp, Homo sapien
cttggaagtatggacgtcttcatca

SEQ ID NO: 455855 - DNA, 25 bp, Homo sapien
tccacagatgtgacattaagactga

SEQ ID NO: 455856 - DNA, 25 bp, Homo sapien
tgtccacagatgtgacattaagact

SEQ ID NO: 455857 - DNA, 25 bp, Homo sapien
gtgtccacagatgtgacattaagac

SEQ ID NO: 455858 - DNA, 25 bp, Homo sapien
gtccacagatgtgacattaagactg

SEQ ID NO: 455859 - DNA, 25 bp, Homo sapien
agaggaagcctcatcctgttgagtt

SEQ ID NO: 455860 - DNA, 25 bp, Homo sapien
caggatttctgcacatggccattag

SEQ ID NO: 455861 - DNA, 25 bp, Homo sapien
tgagttgacagtcaggatttctgca

SEQ ID NO: 455862 - DNA, 25 bp, Homo sapien
gaagactcactcctatcctggagag

SEQ ID NO: 455863 - DNA, 25 bp, Homo sapien
tcttccctgtgtcgtcttatgtcat

SEQ ID NO: 455864 - DNA, 25 bp, Homo sapien
cagggacatggcatactgggatctg

SEQ ID NO: 455865 - DNA, 25 bp, Homo sapien
tggcatactgggatctggccattgg

SEQ ID NO: 455866 - DNA, 25 bp, Homo sapien
gtcttatgtcataaggccccttttc

SEQ ID NO: 455867 - DNA, 25 bp, Homo sapien
gaagcctacagtgcagccttccatc

SEQ ID NO: 455868 - DNA, 25 bp, Homo sapien
ttccatctgcggctaaaggccagag

SEQ ID NO: 455869 - DNA, 25 bp, Homo sapien
gaagcaagatctcagcgtggagaga

SEQ ID NO: 455870 - DNA, 25 bp, Homo sapien
cggtagtagcccagtccaagtccta

SEQ ID NO: 455871 - DNA, 25 bp, Homo sapien
aagaactccaaatattggcagctag

SEQ ID NO: 455872 - DNA, 25 bp, Homo sapien
actccaaatattggcagctagtatg

SEQ ID NO: 455873 - DNA, 25 bp, Homo sapien
tccaaatattggcagctagtatggg

SEQ ID NO: 455874 - DNA, 25 bp, Homo sapien
gaactccaaatattggcagctagta

SEQ ID NO: 455875 - DNA, 25 bp, Homo sapien
tctactttttcagcgtcatccaaat

SEQ ID NO: 455876 - DNA, 25 bp, Homo sapien
tactttttcagcgtcatccaaatct

SEQ ID NO: 455877 - DNA, 25 bp, Homo sapien
ccttcttctactttttcagcgtcat

SEQ ID NO: 455878 - DNA, 25 bp, Homo sapien
tttttcagcgtcatccaaatcttga

SEQ ID NO: 455879 - DNA, 25 bp, Homo sapien
gaacagttagctgatgtgctttgat

SEQ ID NO: 455880 - DNA, 25 bp, Homo sapien
acagttagctgatgtgctttgattt

SEQ ID NO: 455881 - DNA, 25 bp, Homo sapien
aacagttagctgatgtgctttgatt

SEQ ID NO: 455882 - DNA, 25 bp, Homo sapien
tatcctgttggtgtttctattagac

SEQ ID NO: 455883 - DNA, 25 bp, Homo sapien
tgtatcctgttggtgtttctattag

SEQ ID NO: 455884 - DNA, 25 bp, Homo sapien
tcaatgtatcctgttggtgtttcta

SEQ ID NO: 455885 - DNA, 25 bp, Homo sapien
cctaggcaggctttcaatgtatcct

SEQ ID NO: 455886 - DNA, 25 bp, Homo sapien
tgagagcattcacttgttttttaac

SEQ ID NO: 455887 - DNA, 25 bp, Homo sapien
aggtgtttgagagcattcacttgtt

SEQ ID NO: 455888 - DNA, 25 bp, Homo sapien
gagcattcacttgttttttaactac

SEQ ID NO: 455889 - DNA, 25 bp, Homo sapien
ggtgtttgagagcattcacttgttt

SEQ ID NO: 455890 - DNA, 25 bp, Homo sapien
aacagcatacttcctttcaaaattg

SEQ ID NO: 455891 - DNA, 25 bp, Homo sapien
tttcaaaattgtgaacttcctcatt

SEQ ID NO: 455892 - DNA, 25 bp, Homo sapien
caaaattgtgaacttcctcattgaa

SEQ ID NO: 455893 - DNA, 25 bp, Homo sapien
aaattgtgaacttcctcattgaatt

SEQ ID NO: 455894 - DNA, 25 bp, Homo sapien
ctgtaggttcataattgcattaata

SEQ ID NO: 455895 - DNA, 25 bp, Homo sapien
ttgcattaataatctcaaattgctt

SEQ ID NO: 455896 - DNA, 25 bp, Homo sapien
tctcaaattgcttatcaaatagagg

SEQ ID NO: 455897 - DNA, 25 bp, Homo sapien
taataatctcaaattgcttatcaaa

SEQ ID NO: 455898 - DNA, 25 bp, Homo sapien
ttttttctcatcttcaatcatggcc

SEQ ID NO: 455899 - DNA, 25 bp, Homo sapien
ttctttcaactcctctgagatctca

SEQ ID NO: 455900 - DNA, 25 bp, Homo sapien
aattcaggaattcctttggaatctt

SEQ ID NO: 455901 - DNA, 25 bp, Homo sapien
tttctcatcttcaatcatggccttt

SEQ ID NO: 455902 - DNA, 25 bp, Homo sapien
tttagcatcatcatcccgatctctg

SEQ ID NO: 455903 - DNA, 25 bp, Homo sapien
tagcatcatcatcccgatctctgct

SEQ ID NO: 455904 - DNA, 25 bp, Homo sapien
ttgttttagcatcatcatcccgatc

SEQ ID NO: 455905 - DNA, 25 bp, Homo sapien
gttttagcatcatcatcccgatctc

SEQ ID NO: 455906 - DNA, 25 bp, Homo sapien
cagtaaagtgtaacactgatcctga

SEQ ID NO: 455907 - DNA, 25 bp, Homo sapien
gtaacactgatcctgagattatacg

SEQ ID NO: 455908 - DNA, 25 bp, Homo sapien
ctgagattatacgttcaggtaaaaa

SEQ ID NO: 455909 - DNA, 25 bp, Homo sapien
cactgatcctgagattatacgttca

SEQ ID NO: 455910 - DNA, 25 bp, Homo sapien
ccagaaacttctgggccatgtaagc

SEQ ID NO: 455911 - DNA, 25 bp, Homo sapien
aagcaccaaaagcactccggaggca

SEQ ID NO: 455912 - DNA, 25 bp, Homo sapien
caggagtaatactggtggcaagcat

SEQ ID NO: 455913 - DNA, 25 bp, Homo sapien
aagcactccggaggcaggagtaata

SEQ ID NO: 455914 - DNA, 25 bp, Homo sapien
aggttgtctgtcctttggtgaaact

SEQ ID NO: 455915 - DNA, 25 bp, Homo sapien
tgtcctttggtgaaactcttgccat

SEQ ID NO: 455916 - DNA, 25 bp, Homo sapien
gatacctgtcaaaaggttgtctgtc

SEQ ID NO: 455917 - DNA, 25 bp, Homo sapien
tgtctgtcctttggtgaaactcttg

SEQ ID NO: 455918 - DNA, 25 bp, Homo sapien
attttccgctgttcatctgcctcca

SEQ ID NO: 455919 - DNA, 25 bp, Homo sapien
tatgtataaatgactgttgtgactt

SEQ ID NO: 455920 - DNA, 25 bp, Homo sapien
atgtataaatgactgttgtgacttc

SEQ ID NO: 455921 - DNA, 25 bp, Homo sapien
tgtataaatgactgttgtgacttct

SEQ ID NO: 455922 - DNA, 25 bp, Homo sapien
atatgtataaatgactgttgtgact

SEQ ID NO: 455923 - DNA, 25 bp, Homo sapien
tccaggccagtacattcaaagagac

SEQ ID NO: 455924 - DNA, 25 bp, Homo sapien
tgtctccaggccagtacattcaaag

SEQ ID NO: 455925 - DNA, 25 bp, Homo sapien
caggccagtacattcaaagagacaa

SEQ ID NO: 455926 - DNA, 25 bp, Homo sapien
ctttgtctccaggccagtacattca

SEQ ID NO: 455927 - DNA, 25 bp, Homo sapien
gaaggtggtgatgttctagatgcct

SEQ ID NO: 455928 - DNA, 25 bp, Homo sapien
agaaggtggtgatgttctagatgcc

SEQ ID NO: 455929 - DNA, 25 bp, Homo sapien
catccagttaaccagagtgggacta

SEQ ID NO: 455930 - DNA, 25 bp, Homo sapien
tccccatccagttaaccagagtggg

SEQ ID NO: 455931 - DNA, 25 bp, Homo sapien
tcccctgatcctggaaccgaagtct

SEQ ID NO: 455932 - DNA, 25 bp, Homo sapien
tcatctggatggaacgtgcagtacc

SEQ ID NO: 455933 - DNA, 25 bp, Homo sapien
tctgcctgtgcacctggacagccag

SEQ ID NO: 455934 - DNA, 25 bp, Homo sapien
cagtacctttgtttccctgctgccg

SEQ ID NO: 455935 - DNA, 25 bp, Homo sapien
ctgtcttcttgtcaggcgcctcccc

SEQ ID NO: 455936 - DNA, 25 bp, Homo sapien
tcttgtcaggcgcctccccaggacc

SEQ ID NO: 455937 - DNA, 25 bp, Homo sapien
gtcttcttgtcaggcgcctccccag

SEQ ID NO: 455938 - DNA, 25 bp, Homo sapien
cttcttgtcaggcgcctccccagga

SEQ ID NO: 455939 - DNA, 25 bp, Homo sapien
tgattcaatcggtctggagtgcccc

SEQ ID NO: 455940 - DNA, 25 bp, Homo sapien
tcttggttagcctcacatttggcac

SEQ ID NO: 455941 - DNA, 25 bp, Homo sapien
tgatccgcccgcagatattctgatt

SEQ ID NO: 455942 - DNA, 25 bp, Homo sapien
tgactccaattcctcattgtgcagg

SEQ ID NO: 455943 - DNA, 25 bp, Homo sapien
tcctaataatttaccctgggtctca

SEQ ID NO: 455944 - DNA, 25 bp, Homo sapien
attgctgtaaccctggaattttggg

SEQ ID NO: 455945 - DNA, 25 bp, Homo sapien
tccttggtcagttgcagtatcatca

SEQ ID NO: 455946 - DNA, 25 bp, Homo sapien
cctggtaaagcagaacctaccacca

SEQ ID NO: 455947 - DNA, 25 bp, Homo sapien
caaaatgaggcccttctctcaattt

SEQ ID NO: 455948 - DNA, 25 bp, Homo sapien
aaaatgaggcccttctctcaatttc

SEQ ID NO: 455949 - DNA, 25 bp, Homo sapien
aaatgaggcccttctctcaatttcc

SEQ ID NO: 455950 - DNA, 25 bp, Homo sapien
gcaaacaaaactggaaccctggtca

SEQ ID NO: 455951 - DNA, 25 bp, Homo sapien
caaatgagctgtaggcaaacaaaac

SEQ ID NO: 455952 - DNA, 25 bp, Homo sapien
ctgaatcaaatgagctgtaggcaaa

SEQ ID NO: 455953 - DNA, 25 bp, Homo sapien
gaatcaaatgagctgtaggcaaaca

SEQ ID NO: 455954 - DNA, 25 bp, Homo sapien
tggaaggtcagtggaggtctgtgcc

SEQ ID NO: 455955 - DNA, 25 bp, Homo sapien
aggtggaaggtcagtggaggtctgt

SEQ ID NO: 455956 - DNA, 25 bp, Homo sapien
cacagtcatcgggagaatttttaaa

SEQ ID NO: 455957 - DNA, 25 bp, Homo sapien
gtggaaggtcagtggaggtctgtgc

SEQ ID NO: 455958 - DNA, 25 bp, Homo sapien
ctgcaactttcttccgggctgcatg

SEQ ID NO: 455959 - DNA, 25 bp, Homo sapien
cctcttctgacaccggataccaggg

SEQ ID NO: 455960 - DNA, 25 bp, Homo sapien
ttcttccgggctgcatgctcctggt

SEQ ID NO: 455961 - DNA, 25 bp, Homo sapien
gggagcctcttctgacaccggatac

SEQ ID NO: 455962 - DNA, 25 bp, Homo sapien
ccatgtgtgagacaagaatataata

SEQ ID NO: 455963 - DNA, 25 bp, Homo sapien
tccatgtgtgagacaagaatataat

SEQ ID NO: 455964 - DNA, 25 bp, Homo sapien
ccaaatggcctcacagcagagtgct

SEQ ID NO: 455965 - DNA, 25 bp, Homo sapien
ttgctaacatttcttggtcctggtg

SEQ ID NO: 455966 - DNA, 25 bp, Homo sapien
tctctcaacaggtgtctgctgcctg

SEQ ID NO: 455967 - DNA, 25 bp, Homo sapien
cagcagagtgctgccattgagacac

SEQ ID NO: 455968 - DNA, 25 bp, Homo sapien
tggtggttacgcggctacatgtgct

SEQ ID NO: 455969 - DNA, 25 bp, Homo sapien
taaatgccttggtggtggttacgcg

SEQ ID NO: 455970 - DNA, 25 bp, Homo sapien
ccttggtggtggttacgcggctaca

SEQ ID NO: 455971 - DNA, 25 bp, Homo sapien
tggttacgcggctacatgtgctcat

SEQ ID NO: 455972 - DNA, 25 bp, Homo sapien
ttctgattggcgttggacccaaaaa

SEQ ID NO: 455973 - DNA, 25 bp, Homo sapien
gattggcgttggacccaaaaacaga

SEQ ID NO: 455974 - DNA, 25 bp, Homo sapien
tggaagccggcttggtttgtgttac

SEQ ID NO: 455975 - DNA, 25 bp, Homo sapien
tgagcagaagaatcatggaagccgg

SEQ ID NO: 455976 - DNA, 25 bp, Homo sapien
gatcacggatacgtagggcggcaga

SEQ ID NO: 455977 - DNA, 25 bp, Homo sapien
cgtgttccactatgggcttgtgcat

SEQ ID NO: 455978 - DNA, 25 bp, Homo sapien
ctttgtgggctacatagggctgtgt

SEQ ID NO: 455979 - DNA, 25 bp, Homo sapien
atgttagtctgggaacgtgttccac

SEQ ID NO: 455980 - DNA, 25 bp, Homo sapien
taaaggcgatatgcaggctgtgttc

SEQ ID NO: 455981 - DNA, 25 bp, Homo sapien
gttgtgagggtaggacacagctcct

SEQ ID NO: 455982 - DNA, 25 bp, Homo sapien
tgatcctggtggagatacaatgaca

SEQ ID NO: 455983 - DNA, 25 bp, Homo sapien
tgcacttatgcaaagcctctctggt

SEQ ID NO: 455984 - DNA, 25 bp, Homo sapien
cttcaaaatcgtgggagccctcttg

SEQ ID NO: 455985 - DNA, 25 bp, Homo sapien
tcctctgcttcgaggaccttcttca

SEQ ID NO: 455986 - DNA, 25 bp, Homo sapien
ctcttggcccatgcacaggagcaac

SEQ ID NO: 455987 - DNA, 25 bp, Homo sapien
agtgggctgttccttgcaaggttgg

SEQ ID NO: 455988 - DNA, 25 bp, Homo sapien
gaggcagtcgactggctggttctcc

SEQ ID NO: 455989 - DNA, 25 bp, Homo sapien
cagctcagcctgaatggggaagtag

SEQ ID NO: 455990 - DNA, 25 bp, Homo sapien
tcattgccttcaggccgataaccag

SEQ ID NO: 455991 - DNA, 25 bp, Homo sapien
gataaccagattcaggtctcagctc

SEQ ID NO: 455992 - DNA, 25 bp, Homo sapien
taaatgcaatggtactgtgtagtgt

SEQ ID NO: 455993 - DNA, 25 bp, Homo sapien
tgtgtagtgtaagtgtaagtgaccc

SEQ ID NO: 455994 - DNA, 25 bp, Homo sapien
gaccccaggatatcaccagaagcaa

SEQ ID NO: 455995 - DNA, 25 bp, Homo sapien
taagtgtaagtgaccccaggatatc

SEQ ID NO: 455996 - DNA, 25 bp, Homo sapien
catgcagcggttcttaggagaaaga

SEQ ID NO: 455997 - DNA, 25 bp, Homo sapien
gaaaaactctctttggatcctagta

SEQ ID NO: 455998 - DNA, 25 bp, Homo sapien
tctctttggatcctagtatctctca

SEQ ID NO: 455999 - DNA, 25 bp, Homo sapien
tccatctagctgcatgcagcggttc

SEQ ID NO: 456000 - DNA, 25 bp, Homo sapien
gcaatgatgtgcaaggcttgcatag

SEQ ID NO: 456001 - DNA, 25 bp, Homo sapien
ggcaatgatgtgcaaggcttgcata

SEQ ID NO: 456002 - DNA, 25 bp, Homo sapien
catgttcttgccaactgtgccagac

SEQ ID NO: 456003 - DNA, 25 bp, Homo sapien
tttcctgatactgaacgatcaaggc

SEQ ID NO: 456004 - DNA, 25 bp, Homo sapien
tgccagaccacaaggctcgtccatt

SEQ ID NO: 456005 - DNA, 25 bp, Homo sapien
tcaaggcagtgacagtataaccacc

SEQ ID NO: 456006 - DNA, 25 bp, Homo sapien
tccatctgcgcagaacctctgatag

SEQ ID NO: 456007 - DNA, 25 bp, Homo sapien
cctctgataggtctgcaaatcaaaa

SEQ ID NO: 456008 - DNA, 25 bp, Homo sapien
gcatagcattgctgtgtaagatcac

SEQ ID NO: 456009 - DNA, 25 bp, Homo sapien
cacttgccaatctccgggaaatgtg

SEQ ID NO: 456010 - DNA, 25 bp, Homo sapien
acagcagcaagcaggttagactccg

SEQ ID NO: 456011 - DNA, 25 bp, Homo sapien
tgtcctctccgttctgctgtcagtg

SEQ ID NO: 456012 - DNA, 25 bp, Homo sapien
gaggactcttagcagtggacacagc

SEQ ID NO: 456013 - DNA, 25 bp, Homo sapien
ggttagactccggttggtgcctcat

SEQ ID NO: 456014 - DNA, 25 bp, Homo sapien
ttggccccttccagtcagagtctgg

SEQ ID NO: 456015 - DNA, 25 bp, Homo sapien
cagagtctggggctatcttttgctc

SEQ ID NO: 456016 - DNA, 25 bp, Homo sapien
ggggctatcttttgctcatcagcac

SEQ ID NO: 456017 - DNA, 25 bp, Homo sapien
tggccccttccagtcagagtctggg

SEQ ID NO: 456018 - DNA, 25 bp, Homo sapien
gaggaagaaaggaggaggctgtaca

SEQ ID NO: 456019 - DNA, 25 bp, Homo sapien
ggaagaaaggaggaggctgtacatt

SEQ ID NO: 456020 - DNA, 25 bp, Homo sapien
aagaaaggaggaggctgtacattct

SEQ ID NO: 456021 - DNA, 25 bp, Homo sapien
gagaggaagaaaggaggaggctgta

SEQ ID NO: 456022 - DNA, 25 bp, Homo sapien
tatgaggttgctagaatgatgaaat

SEQ ID NO: 456023 - DNA, 25 bp, Homo sapien
ttggatatgaggttgctagaatgat

SEQ ID NO: 456024 - DNA, 25 bp, Homo sapien
tgaggttgctagaatgatgaaattc

SEQ ID NO: 456025 - DNA, 25 bp, Homo sapien
gatatgaggttgctagaatgatgaa

SEQ ID NO: 456026 - DNA, 25 bp, Homo sapien
ttggttgtctgcactcttcaggcta

SEQ ID NO: 456027 - DNA, 25 bp, Homo sapien
cattttggttgtctgcactcttcag

SEQ ID NO: 456028 - DNA, 25 bp, Homo sapien
tcttcaggctagtcacagcttccat

SEQ ID NO: 456029 - DNA, 25 bp, Homo sapien
ctgttttgttgtggtttgccttgat

SEQ ID NO: 456030 - DNA, 25 bp, Homo sapien
ctggaaggataaacccactggcttt

SEQ ID NO: 456031 - DNA, 25 bp, Homo sapien
caatttggtcttgggttgctctgat

SEQ ID NO: 456032 - DNA, 25 bp, Homo sapien
tgctgtacccttagctgacgggctg

SEQ ID NO: 456033 - DNA, 25 bp, Homo sapien
gccctggaaggataaacccactggc

SEQ ID NO: 456034 - DNA, 25 bp, Homo sapien
ctgatgggcagagcccaggccacat

SEQ ID NO: 456035 - DNA, 25 bp, Homo sapien
gatgggcagagcccaggccacatat

SEQ ID NO: 456036 - DNA, 25 bp, Homo sapien
atgggcagagcccaggccacatatc

SEQ ID NO: 456037 - DNA, 25 bp, Homo sapien
tgatgggcagagcccaggccacata

SEQ ID NO: 456038 - DNA, 25 bp, Homo sapien
ctgctgttctgccgcatgtcatctg

SEQ ID NO: 456039 - DNA, 25 bp, Homo sapien
ggctgctgttctgccgcatgtcatc

SEQ ID NO: 456040 - DNA, 25 bp, Homo sapien
gctgctgttctgccgcatgtcatct

SEQ ID NO: 456041 - DNA, 25 bp, Homo sapien
actgtggatgggccacgctggctgc

SEQ ID NO: 456042 - DNA, 25 bp, Homo sapien
gggcttctgttgcaggcacctcctg

SEQ ID NO: 456043 - DNA, 25 bp, Homo sapien
tgcaggggcttctgttgcaggcacc

SEQ ID NO: 456044 - DNA, 25 bp, Homo sapien
gcttctgttgcaggcacctcctgga

SEQ ID NO: 456045 - DNA, 25 bp, Homo sapien
gagtcgcccttgccatcaggagcag

SEQ ID NO: 456046 - DNA, 25 bp, Homo sapien
ctatggagatgagtcgcccttgcca

SEQ ID NO: 456047 - DNA, 25 bp, Homo sapien
agatgagtcgcccttgccatcagga

SEQ ID NO: 456048 - DNA, 25 bp, Homo sapien
gcccttgccatcaggagcaggtcct

SEQ ID NO: 456049 - DNA, 25 bp, Homo sapien
cagacatcaaagatcagacaggata

SEQ ID NO: 456050 - DNA, 25 bp, Homo sapien
tcactttgtgagaaagccagagccc

SEQ ID NO: 456051 - DNA, 25 bp, Homo sapien
tggccccttcactttgtgagaaagc

SEQ ID NO: 456052 - DNA, 25 bp, Homo sapien
caaagatcagacaggataaggcagg

SEQ ID NO: 456053 - DNA, 25 bp, Homo sapien
catcagtgtattgatggcttggttg

SEQ ID NO: 456054 - DNA, 25 bp, Homo sapien
cacatcagtgtattgatggcttggt

SEQ ID NO: 456055 - DNA, 25 bp, Homo sapien
tcacatcagtgtattgatggcttgg

SEQ ID NO: 456056 - DNA, 25 bp, Homo sapien
atcagtgtattgatggcttggttgc

SEQ ID NO: 456057 - DNA, 25 bp, Homo sapien
tacagtttcaccagttatagctgag

SEQ ID NO: 456058 - DNA, 25 bp, Homo sapien
tatcatcattggaaagtccacacta

SEQ ID NO: 456059 - DNA, 25 bp, Homo sapien
tacttggttttagctgaaagactga

SEQ ID NO: 456060 - DNA, 25 bp, Homo sapien
tccacactatttgaccaggtaacag

SEQ ID NO: 456061 - DNA, 25 bp, Homo sapien
taccttgctggtcttaaagtggaag

SEQ ID NO: 456062 - DNA, 25 bp, Homo sapien
tctgcatgttaggagaactagatcg

SEQ ID NO: 456063 - DNA, 25 bp, Homo sapien
tgtgccttaccactcctgggattcg

SEQ ID NO: 456064 - DNA, 25 bp, Homo sapien
tttgtcattggcacgagcagtggcc

SEQ ID NO: 456065 - DNA, 25 bp, Homo sapien
catgactctcttgaaggggggcagt

SEQ ID NO: 456066 - DNA, 25 bp, Homo sapien
ctggtgtgccatgactctcttgaag

SEQ ID NO: 456067 - DNA, 25 bp, Homo sapien
ggtgtgccatgactctcttgaaggg

SEQ ID NO: 456068 - DNA, 25 bp, Homo sapien
gccatgactctcttgaaggggggca

SEQ ID NO: 456069 - DNA, 25 bp, Homo sapien
gaatggactgtttgtacgaagcatg

SEQ ID NO: 456070 - DNA, 25 bp, Homo sapien
tgcttctcctacaaaacgtaacttg

SEQ ID NO: 456071 - DNA, 25 bp, Homo sapien
taactagcctcattagtagagcagt

SEQ ID NO: 456072 - DNA, 25 bp, Homo sapien
ggagattgtaattgccatctaggca

SEQ ID NO: 456073 - DNA, 25 bp, Homo sapien
cagggtatagtcatggcagtaaaag

SEQ ID NO: 456074 - DNA, 25 bp, Homo sapien
tgatgttattgcacagggtatagtc

SEQ ID NO: 456075 - DNA, 25 bp, Homo sapien
ttggaggaatcatgcgctgtgatgt

SEQ ID NO: 456076 - DNA, 25 bp, Homo sapien
tagtcatggcagtaaaagacttgga

SEQ ID NO: 456077 - DNA, 25 bp, Homo sapien
tggctatggccacaatggatataat

SEQ ID NO: 456078 - DNA, 25 bp, Homo sapien
gtggtggtgctacagtccatcaagt

SEQ ID NO: 456079 - DNA, 25 bp, Homo sapien
cagtccatcaagtaacagaagcatt

SEQ ID NO: 456080 - DNA, 25 bp, Homo sapien
gctatggccacaatggatataataa

SEQ ID NO: 456081 - DNA, 25 bp, Homo sapien
tattgtgtatggatgcaaagatcaa

SEQ ID NO: 456082 - DNA, 25 bp, Homo sapien
ttaattagagtcctgaaaggtctct

SEQ ID NO: 456083 - DNA, 25 bp, Homo sapien
gatgttgaaagtcataagacagtca

SEQ ID NO: 456084 - DNA, 25 bp, Homo sapien
gcaagccctggaccataggtgatta

SEQ ID NO: 456085 - DNA, 25 bp, Homo sapien
tcaggaatgtcgtagaatcctggaa

SEQ ID NO: 456086 - DNA, 25 bp, Homo sapien
tattttgttacgcagactgtcccag

SEQ ID NO: 456087 - DNA, 25 bp, Homo sapien
cagaggccactttcaggcttgctcc

SEQ ID NO: 456088 - DNA, 25 bp, Homo sapien
tgccccattcgtttgtatcaggatg

SEQ ID NO: 456089 - DNA, 25 bp, Homo sapien
catagtgcacaatgtcaggaggtac

SEQ ID NO: 456090 - DNA, 25 bp, Homo sapien
gaaaacatggtcaagctttacagcc

SEQ ID NO: 456091 - DNA, 25 bp, Homo sapien
acctaatattgtggaatcagcagca

SEQ ID NO: 456092 - DNA, 25 bp, Homo sapien
cctttttctgaaatacgatgcaacc

SEQ ID NO: 456093 - DNA, 25 bp, Homo sapien
caatggtggaagattcagatggagc

SEQ ID NO: 456094 - DNA, 25 bp, Homo sapien
ggtcctgtattaataggaagttcac

SEQ ID NO: 456095 - DNA, 25 bp, Homo sapien
cctattgatattgaagaaggcatca

SEQ ID NO: 456096 - DNA, 25 bp, Homo sapien
taaagaacctattgatattgaagaa

SEQ ID NO: 456097 - DNA, 25 bp, Homo sapien
gagtctcctgaagcaataattaaag

SEQ ID NO: 456098 - DNA, 25 bp, Homo sapien
tactactttgcaataacaatggaaa

SEQ ID NO: 456099 - DNA, 25 bp, Homo sapien
gggcagaatatgcaatcaagtattg

SEQ ID NO: 456100 - DNA, 25 bp, Homo sapien
ccaagcaaacgggagaaaagggcag

SEQ ID NO: 456101 - DNA, 25 bp, Homo sapien
tctgtgagcgaaaatatcccaggag

SEQ ID NO: 456102 - DNA, 25 bp, Homo sapien
aaggcacaggttttagctggtggta

SEQ ID NO: 456103 - DNA, 25 bp, Homo sapien
gttcccaaaggatatgtggcaaagt

SEQ ID NO: 456104 - DNA, 25 bp, Homo sapien
cactacatgaatacatgagtatgga

SEQ ID NO: 456105 - DNA, 25 bp, Homo sapien
cagatgaagcttatgcaattgccaa

SEQ ID NO: 456106 - DNA, 25 bp, Homo sapien
aataaccatggactccaagtacagc

SEQ ID NO: 456107 - DNA, 25 bp, Homo sapien
ccaccggcctcggacggcccagcgg

SEQ ID NO: 456108 - DNA, 25 bp, Homo sapien
cctcggacggcccagcgggctgctg

SEQ ID NO: 456109 - DNA, 25 bp, Homo sapien
accaccggcctcggacggcccagcg

SEQ ID NO: 456110 - DNA, 25 bp, Homo sapien
ggacggcccagcgggctgctgctca

SEQ ID NO: 456111 - DNA, 25 bp, Homo sapien
ttcaggttgctctgaccgcagggca

SEQ ID NO: 456112 - DNA, 25 bp, Homo sapien
ttcattgctgtaggccaagggctca

SEQ ID NO: 456113 - DNA, 25 bp, Homo sapien
tgtttagcacgaagtagacactggg

SEQ ID NO: 456114 - DNA, 25 bp, Homo sapien
tgagcatcagaagcgcatgacaccg

SEQ ID NO: 456115 - DNA, 25 bp, Homo sapien
ttttctttgcagtcttgctggaggt

SEQ ID NO: 456116 - DNA, 25 bp, Homo sapien
tttgcagtcttgctggaggtttgtt

SEQ ID NO: 456117 - DNA, 25 bp, Homo sapien
ttcaaaaaccagatccttggctggg

SEQ ID NO: 456118 - DNA, 25 bp, Homo sapien
aaaaaccagatccttggctgggtgt

SEQ ID NO: 456119 - DNA, 25 bp, Homo sapien
cacagcgtaggcaatgattcttcta

SEQ ID NO: 456120 - DNA, 25 bp, Homo sapien
tggagcacagcgtaggcaatgattc

SEQ ID NO: 456121 - DNA, 25 bp, Homo sapien
gacacagtccactggagcacagcgt

SEQ ID NO: 456122 - DNA, 25 bp, Homo sapien
tgagctgacacagtccactggagca

SEQ ID NO: 456123 - DNA, 25 bp, Homo sapien
tgaagactgccttgtcctgcacctc

SEQ ID NO: 456124 - DNA, 25 bp, Homo sapien
ttcaaagtgaagactgccttgtcct

SEQ ID NO: 456125 - DNA, 25 bp, Homo sapien
tgggggggaagagtgtcgtgcattc

SEQ ID NO: 456126 - DNA, 25 bp, Homo sapien
acctccttctggcttagattgaaca

SEQ ID NO: 456127 - DNA, 25 bp, Homo sapien
tttcaccagagtaaagatcacagag

SEQ ID NO: 456128 - DNA, 25 bp, Homo sapien
taggtccgacttgcaggcatattgc

SEQ ID NO: 456129 - DNA, 25 bp, Homo sapien
ctcagatgggaagcacgacaaggct

SEQ ID NO: 456130 - DNA, 25 bp, Homo sapien
tataatttatggactagccctgatc

SEQ ID NO: 456131 - DNA, 25 bp, Homo sapien
ttttttccgtgaatgacctcgccca

SEQ ID NO: 456132 - DNA, 25 bp, Homo sapien
aacctcggcaccactgcacattctt

SEQ ID NO: 456133 - DNA, 25 bp, Homo sapien
tttttccgtgaatgacctcgcccac

SEQ ID NO: 456134 - DNA, 25 bp, Homo sapien
caacctcggcaccactgcacattct

SEQ ID NO: 456135 - DNA, 25 bp, Homo sapien
cggaggcgccgaaatcaaagcgaga

SEQ ID NO: 456136 - DNA, 25 bp, Homo sapien
cgtaatgcgtcgcggagggctatca

SEQ ID NO: 456137 - DNA, 25 bp, Homo sapien
cagctgtccgcggtgcgtaatgcgt

SEQ ID NO: 456138 - DNA, 25 bp, Homo sapien
aatctctccccgcgagggcggaggc

SEQ ID NO: 456139 - DNA, 25 bp, Homo sapien
tggcagcggcaggaagtgacgcgct

SEQ ID NO: 456140 - DNA, 25 bp, Homo sapien
ctggcagcggcaggaagtgacgcgc

SEQ ID NO: 456141 - DNA, 25 bp, Homo sapien
cagcggcaggaagtgacgcgctcac

SEQ ID NO: 456142 - DNA, 25 bp, Homo sapien
gcagcggcaggaagtgacgcgctca

SEQ ID NO: 456143 - DNA, 25 bp, Homo sapien
cgcgcggctgtgcgctggccgtcat

SEQ ID NO: 456144 - DNA, 25 bp, Homo sapien
ttccccaggaggacgcaacgcggat

SEQ ID NO: 456145 - DNA, 25 bp, Homo sapien
tccagggagttggaaactgccagct

SEQ ID NO: 456146 - DNA, 25 bp, Homo sapien
agctggtcaccacgactccgactcc

SEQ ID NO: 456147 - DNA, 25 bp, Homo sapien
aagcacggcgtgagttcgtccctct

SEQ ID NO: 456148 - DNA, 25 bp, Homo sapien
cggtttcctcgcgtccgcggctgct

SEQ ID NO: 456149 - DNA, 25 bp, Homo sapien
gcgtgagttcgtccctctgcgcacg

SEQ ID NO: 456150 - DNA, 25 bp, Homo sapien
acacggaagcaagcacggcgtgagt

SEQ ID NO: 456151 - DNA, 25 bp, Homo sapien
tgcccagaggacaccaatggatgga

SEQ ID NO: 456152 - DNA, 25 bp, Homo sapien
cagtcacctgaatggcttgctctct

SEQ ID NO: 456153 - DNA, 25 bp, Homo sapien
cctgagaaagcacacatgtggatat

SEQ ID NO: 456154 - DNA, 25 bp, Homo sapien
agcacacatgtggatatcatgccca

SEQ ID NO: 456155 - DNA, 25 bp, Homo sapien
tttttcaggctctacattctttggt

SEQ ID NO: 456156 - DNA, 25 bp, Homo sapien
taaaacctcgtcatgggagttagga

SEQ ID NO: 456157 - DNA, 25 bp, Homo sapien
tccaggttcacagacaacgatcttc

SEQ ID NO: 456158 - DNA, 25 bp, Homo sapien
tggcaacatactgtaatattcctcc

SEQ ID NO: 456159 - DNA, 25 bp, Homo sapien
gacaatagcattctcttcatatggc

SEQ ID NO: 456160 - DNA, 25 bp, Homo sapien
aaatacaggtatataggtacgtatt

SEQ ID NO: 456161 - DNA, 25 bp, Homo sapien
caggtatataggtacgtattttcac

SEQ ID NO: 456162 - DNA, 25 bp, Homo sapien
aatgcaggggccgaaaatccatgaa

SEQ ID NO: 456163 - DNA, 25 bp, Homo sapien
ctttgggaatgcaggggccgaaaat

SEQ ID NO: 456164 - DNA, 25 bp, Homo sapien
aatacagaaggagatgatttttaaa

SEQ ID NO: 456165 - DNA, 25 bp, Homo sapien
tctatcagttataaagtacatgaaa

SEQ ID NO: 456166 - DNA, 25 bp, Homo sapien
tctaagatatcctccatctcttaaa

SEQ ID NO: 456167 - DNA, 25 bp, Homo sapien
aacaaagatttaacagtgtctatca

SEQ ID NO: 456168 - DNA, 25 bp, Homo sapien
agaaaagctggtccaggggaggtag

SEQ ID NO: 456169 - DNA, 25 bp, Homo sapien
ccagaaaagctggtccaggggaggt

SEQ ID NO: 456170 - DNA, 25 bp, Homo sapien
gctggtccaggggaggtagttcttc

SEQ ID NO: 456171 - DNA, 25 bp, Homo sapien
aagctggtccaggggaggtagttct

SEQ ID NO: 456172 - DNA, 25 bp, Homo sapien
atggttcagatcttctttaaatgga

SEQ ID NO: 456173 - DNA, 25 bp, Homo sapien
taaatggatcatagccttgttcttt

SEQ ID NO: 456174 - DNA, 25 bp, Homo sapien
atggatcatagccttgttcttttaa

SEQ ID NO: 456175 - DNA, 25 bp, Homo sapien
ttctttaaatggatcatagccttgt

SEQ ID NO: 456176 - DNA, 25 bp, Homo sapien
agagatgatttcctttgtatcccac

SEQ ID NO: 456177 - DNA, 25 bp, Homo sapien
tagagatgatttcctttgtatccca

SEQ ID NO: 456178 - DNA, 25 bp, Homo sapien
ctagagatgatttcctttgtatccc

SEQ ID NO: 456179 - DNA, 25 bp, Homo sapien
gacctgtcctattccctgtaagttg

SEQ ID NO: 456180 - DNA, 25 bp, Homo sapien
tctcaattggaaacctgggaaatac

SEQ ID NO: 456181 - DNA, 25 bp, Homo sapien
cagctttgacctagaatacccttga

SEQ ID NO: 456182 - DNA, 25 bp, Homo sapien
tcttcatataaggaccctggacctc

SEQ ID NO: 456183 - DNA, 25 bp, Homo sapien
tcaatgtctgatgacagacgaaagc

SEQ ID NO: 456184 - DNA, 25 bp, Homo sapien
cagacgaaagctggaatcttgtatc

SEQ ID NO: 456185 - DNA, 25 bp, Homo sapien
cttttgcattcagcctattacaata

SEQ ID NO: 456186 - DNA, 25 bp, Homo sapien
tagtgagaagagtactgctgcttta

SEQ ID NO: 456187 - DNA, 25 bp, Homo sapien
gcaagtaacaagaaccaagtatata

SEQ ID NO: 456188 - DNA, 25 bp, Homo sapien
tttgcaagtaacaagaaccaagtat

SEQ ID NO: 456189 - DNA, 25 bp, Homo sapien
tgcaagtaacaagaaccaagtatat

SEQ ID NO: 456190 - DNA, 25 bp, Homo sapien
aagtaacaagaaccaagtatatata

SEQ ID NO: 456191 - DNA, 25 bp, Homo sapien
tacatatcactaataggcttcttgg

SEQ ID NO: 456192 - DNA, 25 bp, Homo sapien
ccctgttctgttccagttttgctgg

SEQ ID NO: 456193 - DNA, 25 bp, Homo sapien
ttaaactggcagtggatgactgaat

SEQ ID NO: 456194 - DNA, 25 bp, Homo sapien
ggatttgtacatagccattctagaa

SEQ ID NO: 456195 - DNA, 25 bp, Homo sapien
tgtagagattatgtcaacggactcc

SEQ ID NO: 456196 - DNA, 25 bp, Homo sapien
cctcaagcagtagtagtgagtctga

SEQ ID NO: 456197 - DNA, 25 bp, Homo sapien
catgtcgatgaatatgttaccacca

SEQ ID NO: 456198 - DNA, 25 bp, Homo sapien
catagtagtgactttttgttggaac

SEQ ID NO: 456199 - DNA, 25 bp, Homo sapien
gagcctaggtcagggcttcagtgat

SEQ ID NO: 456200 - DNA, 25 bp, Homo sapien
tgcttgagcctaggtcagggcttca

SEQ ID NO: 456201 - DNA, 25 bp, Homo sapien
gattgccaggtaatgttaagccgaa

SEQ ID NO: 456202 - DNA, 25 bp, Homo sapien
tcagcatgaaccagcgaaaatgagt

SEQ ID NO: 456203 - DNA, 25 bp, Homo sapien
gaacaatccttccactaatggcgtg

SEQ ID NO: 456204 - DNA, 25 bp, Homo sapien
ggagaccctacccaactgatttaga

SEQ ID NO: 456205 - DNA, 25 bp, Homo sapien
tgctgtctgcgcttgaggacttgga

SEQ ID NO: 456206 - DNA, 25 bp, Homo sapien
tcctgtctaggtaatgcggcgagcc

SEQ ID NO: 456207 - DNA, 25 bp, Homo sapien
gtggtaacagcacacgagagcggct

SEQ ID NO: 456208 - DNA, 25 bp, Homo sapien
aaatggctgcgtcttcgagtggtga

SEQ ID NO: 456209 - DNA, 25 bp, Homo sapien
actgagaagtcgtaaatttttaatg

SEQ ID NO: 456210 - DNA, 25 bp, Homo sapien
tctgagttactgagaagtcgtaaat

SEQ ID NO: 456211 - DNA, 25 bp, Homo sapien
cttcttctgagttactgagaagtcg

SEQ ID NO: 456212 - DNA, 25 bp, Homo sapien
atttctcgtatttgagagtctgata

SEQ ID NO: 456213 - DNA, 25 bp, Homo sapien
tggggccaccctgaacttatccagg

SEQ ID NO: 456214 - DNA, 25 bp, Homo sapien
tgacattgactgacagccagtccct

SEQ ID NO: 456215 - DNA, 25 bp, Homo sapien
ctggggccaccctgaacttatccag

SEQ ID NO: 456216 - DNA, 25 bp, Homo sapien
caacctctgacattgacattgactg

SEQ ID NO: 456217 - DNA, 25 bp, Homo sapien
tcatggccttagctatgaatttctt

SEQ ID NO: 456218 - DNA, 25 bp, Homo sapien
ctttcatggccttagctatgaattt

SEQ ID NO: 456219 - DNA, 25 bp, Homo sapien
tttcatggccttagctatgaatttc

SEQ ID NO: 456220 - DNA, 25 bp, Homo sapien
ttcatggccttagctatgaatttct

SEQ ID NO: 456221 - DNA, 25 bp, Homo sapien
cagacagtcgtcctctgttggagca

SEQ ID NO: 456222 - DNA, 25 bp, Homo sapien
gaattcagccgcagtggaccgactg

SEQ ID NO: 456223 - DNA, 25 bp, Homo sapien
ggcatctcccaagtctaccagacag

SEQ ID NO: 456224 - DNA, 25 bp, Homo sapien
gcaacacagtgtaagtctagcaagg

SEQ ID NO: 456225 - DNA, 25 bp, Homo sapien
caaaacagatgctccagcgctgtaa

SEQ ID NO: 456226 - DNA, 25 bp, Homo sapien
tagcaggcctcgtgtggaatgttcc

SEQ ID NO: 456227 - DNA, 25 bp, Homo sapien
cataagtcagagttcctgtggatcc

SEQ ID NO: 456228 - DNA, 25 bp, Homo sapien
tccagcgctgtaattagcaggcctc

SEQ ID NO: 456229 - DNA, 25 bp, Homo sapien
tctgtatagtttggctgataactcc

SEQ ID NO: 456230 - DNA, 25 bp, Homo sapien
taaatcaggctaaatggcattgtgc

SEQ ID NO: 456231 - DNA, 25 bp, Homo sapien
ttggctgataactcctcaatgcctc

SEQ ID NO: 456232 - DNA, 25 bp, Homo sapien
attgtgcattgcctcgcttatcagt

SEQ ID NO: 456233 - DNA, 25 bp, Homo sapien
ggactgatctttgccacatgcatct

SEQ ID NO: 456234 - DNA, 25 bp, Homo sapien
ggctaggggtcttggactgatcttt

SEQ ID NO: 456235 - DNA, 25 bp, Homo sapien
gggtcttggactgatctttgccaca

SEQ ID NO: 456236 - DNA, 25 bp, Homo sapien
gatctttgccacatgcatctttatc

SEQ ID NO: 456237 - DNA, 25 bp, Homo sapien
ccttaggagtaggttctctcagcat

SEQ ID NO: 456238 - DNA, 25 bp, Homo sapien
aggagtgggccttgctgtctgtagc

SEQ ID NO: 456239 - DNA, 25 bp, Homo sapien
gatcctgtggtaggcccaggctctc

SEQ ID NO: 456240 - DNA, 25 bp, Homo sapien
tcagcagtgcaggagtgggccttgc

SEQ ID NO: 456241 - DNA, 25 bp, Homo sapien
gagcctctgcttgcggtctctgctt

SEQ ID NO: 456242 - DNA, 25 bp, Homo sapien
gaagcttttggactgttcccttcca

SEQ ID NO: 456243 - DNA, 25 bp, Homo sapien
tctgataattgggttcttcgctttt

SEQ ID NO: 456244 - DNA, 25 bp, Homo sapien
ttgagcctctgcttgcggtctctgc

SEQ ID NO: 456245 - DNA, 25 bp, Homo sapien
catgggatcattgtgctcagtgtaa

SEQ ID NO: 456246 - DNA, 25 bp, Homo sapien
ccccatcatcatgggatcattgtgc

SEQ ID NO: 456247 - DNA, 25 bp, Homo sapien
cagtgtaagctggaactgtttttcc

SEQ ID NO: 456248 - DNA, 25 bp, Homo sapien
cattgtgctcagtgtaagctggaac

SEQ ID NO: 456249 - DNA, 25 bp, Homo sapien
tctcacgtcggtatggagagtggct

SEQ ID NO: 456250 - DNA, 25 bp, Homo sapien
cagggtctggtctcacgtcggtatg

SEQ ID NO: 456251 - DNA, 25 bp, Homo sapien
tctggtctcacgtcggtatggagag

SEQ ID NO: 456252 - DNA, 25 bp, Homo sapien
taaccagggtctggtctcacgtcgg

SEQ ID NO: 456253 - DNA, 25 bp, Homo sapien
gccattccatgctgcaggtcacaga

SEQ ID NO: 456254 - DNA, 25 bp, Homo sapien
tctgtcctcccagattaatgataac

SEQ ID NO: 456255 - DNA, 25 bp, Homo sapien
gagaatcttcatcacctgtgttctg

SEQ ID NO: 456256 - DNA, 25 bp, Homo sapien
gattaatgataacccaccggtactc

SEQ ID NO: 456257 - DNA, 25 bp, Homo sapien
gctctttgccgatcagctctcttgc

SEQ ID NO: 456258 - DNA, 25 bp, Homo sapien
acctgctctttgccgatcagctctc

SEQ ID NO: 456259 - DNA, 25 bp, Homo sapien
tctttgccgatcagctctcttgcca

SEQ ID NO: 456260 - DNA, 25 bp, Homo sapien
ctgctctttgccgatcagctctctt

SEQ ID NO: 456261 - DNA, 25 bp, Homo sapien
gatggagaatatcatcttgaccaaa

SEQ ID NO: 456262 - DNA, 25 bp, Homo sapien
atggagaatatcatcttgaccaaag

SEQ ID NO: 456263 - DNA, 25 bp, Homo sapien
aggatggagaatatcatcttgacca

SEQ ID NO: 456264 - DNA, 25 bp, Homo sapien
ggatggagaatatcatcttgaccaa

SEQ ID NO: 456265 - DNA, 25 bp, Homo sapien
aacttcattagcagtctctatctcc

SEQ ID NO: 456266 - DNA, 25 bp, Homo sapien
cataattattaacgggcttgaagcg

SEQ ID NO: 456267 - DNA, 25 bp, Homo sapien
cttcattagcagtctctatctccat

SEQ ID NO: 456268 - DNA, 25 bp, Homo sapien
tccaacacaattttgcttacaccat

SEQ ID NO: 456269 - DNA, 25 bp, Homo sapien
cttttgacaacaaggattgtaggag

SEQ ID NO: 456270 - DNA, 25 bp, Homo sapien
tgttgtcatagccattcttttgaca

SEQ ID NO: 456271 - DNA, 25 bp, Homo sapien
ggcaaatggcataaaggcattgatg

SEQ ID NO: 456272 - DNA, 25 bp, Homo sapien
taggaggagacactaatatttagca

SEQ ID NO: 456273 - DNA, 25 bp, Homo sapien
gctgatttgtgactcaaagtactcg

SEQ ID NO: 456274 - DNA, 25 bp, Homo sapien
cactcttgtgcgtacttggaaaaaa

SEQ ID NO: 456275 - DNA, 25 bp, Homo sapien
ctcgatgacgagtccctttattttt

SEQ ID NO: 456276 - DNA, 25 bp, Homo sapien
aaacatctcacactcgtaaaacgaa

SEQ ID NO: 456277 - DNA, 25 bp, Homo sapien
gcgaaatcgagtgaactttcctgag

SEQ ID NO: 456278 - DNA, 25 bp, Homo sapien
tgagttcgccgggtacaagggacta

SEQ ID NO: 456279 - DNA, 25 bp, Homo sapien
aagggactaacctttggcagcacca

SEQ ID NO: 456280 - DNA, 25 bp, Homo sapien
tgctgcaggtttgtagcgaaatcga

SEQ ID NO: 456281 - DNA, 25 bp, Homo sapien
ctactgcggtagggatctcgcagcc

SEQ ID NO: 456282 - DNA, 25 bp, Homo sapien
ggctgaagaggttcgggaagctccg

SEQ ID NO: 456283 - DNA, 25 bp, Homo sapien
ctccgggcggctgaagaggttcggg

SEQ ID NO: 456284 - DNA, 25 bp, Homo sapien
tccgggcggctgaagaggttcggga

SEQ ID NO: 456285 - DNA, 25 bp, Homo sapien
ggcggctgaagaggttcgggaagct

SEQ ID NO: 456286 - DNA, 25 bp, Homo sapien
gcggagttgaacgtcaccttcacca

SEQ ID NO: 456287 - DNA, 25 bp, Homo sapien
ccgctcttgggctcgtccttcttgg

SEQ ID NO: 456288 - DNA, 25 bp, Homo sapien
ggccagagcggagttgaacgtcacc

SEQ ID NO: 456289 - DNA, 25 bp, Homo sapien
ttgcagtccaccgcgacggcgtcgg

SEQ ID NO: 456290 - DNA, 25 bp, Homo sapien
tgccgctgcagtccgcgcagccctc

SEQ ID NO: 456291 - DNA, 25 bp, Homo sapien
gcccagcacccgcttcctcgacctc

SEQ ID NO: 456292 - DNA, 25 bp, Homo sapien
ctgcggacccacaggaaacgggagc

SEQ ID NO: 456293 - DNA, 25 bp, Homo sapien
aaaggagctgcggacccacaggaaa

SEQ ID NO: 456294 - DNA, 25 bp, Homo sapien
tactagtaatggtaagagacagccc

SEQ ID NO: 456295 - DNA, 25 bp, Homo sapien
tgttcaagcctagaaacgaaagtgg

SEQ ID NO: 456296 - DNA, 25 bp, Homo sapien
ggtccccagatcgaacaagccaagt

SEQ ID NO: 456297 - DNA, 25 bp, Homo sapien
catgtttagtttcacgcagcaggag

SEQ ID NO: 456298 - DNA, 25 bp, Homo sapien
catgaaggagacaatcttggaactt

SEQ ID NO: 456299 - DNA, 25 bp, Homo sapien
gaactttgaagaggacgatcagagg

SEQ ID NO: 456300 - DNA, 25 bp, Homo sapien
ggaaaataactaaggcacaccagca

SEQ ID NO: 456301 - DNA, 25 bp, Homo sapien
tacaaagttggtaatgagttgcctc

SEQ ID NO: 456302 - DNA, 25 bp, Homo sapien
gaagacagattttctctaccactgg

SEQ ID NO: 456303 - DNA, 25 bp, Homo sapien
ttggtgaagacagattttctctacc

SEQ ID NO: 456304 - DNA, 25 bp, Homo sapien
cagattttctctaccactggctgaa

SEQ ID NO: 456305 - DNA, 25 bp, Homo sapien
ctctaccactggctgaatgaaactc

SEQ ID NO: 456306 - DNA, 25 bp, Homo sapien
caaatactcattacctcagcagaag

SEQ ID NO: 456307 - DNA, 25 bp, Homo sapien
caaactctaataggaaaatgcacag

SEQ ID NO: 456308 - DNA, 25 bp, Homo sapien
gcactggaaatgtatgctctgccaa

SEQ ID NO: 456309 - DNA, 25 bp, Homo sapien
gacctgttagatcagtccggaaaac

SEQ ID NO: 456310 - DNA, 25 bp, Homo sapien
gatgacaagtttcaaggcattgtaa

SEQ ID NO: 456311 - DNA, 25 bp, Homo sapien
atgaatagccaaacagcacaggcag

SEQ ID NO: 456312 - DNA, 25 bp, Homo sapien
taaaagaatacgcagccccaactgg

SEQ ID NO: 456313 - DNA, 25 bp, Homo sapien
ggctttctcttccaatagtacataa

SEQ ID NO: 456314 - DNA, 25 bp, Homo sapien
caacatttggtatcagctgctggga

SEQ ID NO: 456315 - DNA, 25 bp, Homo sapien
gaagtatacatcttttgcttgagcc

SEQ ID NO: 456316 - DNA, 25 bp, Homo sapien
tatctaaggaggtaagaaatcattc

SEQ ID NO: 456317 - DNA, 25 bp, Homo sapien
tgctgggacagccaaatgtgcgcac

SEQ ID NO: 456318 - DNA, 25 bp, Homo sapien
taattcctagatattccctccctgt

SEQ ID NO: 456319 - DNA, 25 bp, Homo sapien
aatttctgatttgtacccaagttca

SEQ ID NO: 456320 - DNA, 25 bp, Homo sapien
tcatgacattcataattcctagata

SEQ ID NO: 456321 - DNA, 25 bp, Homo sapien
taacctgatccctctaatctgtcac

SEQ ID NO: 456322 - DNA, 25 bp, Homo sapien
ctagaaaaaccttaatgattatcat

SEQ ID NO: 456323 - DNA, 25 bp, Homo sapien
agaaaaaccttaatgattatcattt

SEQ ID NO: 456324 - DNA, 25 bp, Homo sapien
gacagaataacagaaggctcaggac

SEQ ID NO: 456325 - DNA, 25 bp, Homo sapien
acagaataacagaaggctcaggact

SEQ ID NO: 456326 - DNA, 25 bp, Homo sapien
tgtacaagtatgctcctcctagaat

SEQ ID NO: 456327 - DNA, 25 bp, Homo sapien
tcctagaataacacctgcaagcata

SEQ ID NO: 456328 - DNA, 25 bp, Homo sapien
gccaactggtaccacatcatctggg

SEQ ID NO: 456329 - DNA, 25 bp, Homo sapien
agcataaatgctagtccaaagcaca

SEQ ID NO: 456330 - DNA, 25 bp, Homo sapien
gcaattcagcatgagacaggttttt

SEQ ID NO: 456331 - DNA, 25 bp, Homo sapien
gaatacattccaaaactagtcaagt

SEQ ID NO: 456332 - DNA, 25 bp, Homo sapien
cagacctactctacctgtaagcagt

SEQ ID NO: 456333 - DNA, 25 bp, Homo sapien
taagctgccacctctatctaaatag

SEQ ID NO: 456334 - DNA, 25 bp, Homo sapien
taaagtcatgaacaatgttggcagg

SEQ ID NO: 456335 - DNA, 25 bp, Homo sapien
gctcatttaagatgacatcatcttt

SEQ ID NO: 456336 - DNA, 25 bp, Homo sapien
ttccacagtagtacacgtcatctgg

SEQ ID NO: 456337 - DNA, 25 bp, Homo sapien
tgttggcaggatcactatctgcaaa

SEQ ID NO: 456338 - DNA, 25 bp, Homo sapien
cacaaatacctaggtgagtacagca

SEQ ID NO: 456339 - DNA, 25 bp, Homo sapien
tataagctcaaatgccctctaaggt

SEQ ID NO: 456340 - DNA, 25 bp, Homo sapien
ggttacgtaggaggacaactcattc

SEQ ID NO: 456341 - DNA, 25 bp, Homo sapien
tctgtggttcaaatgagaaacgctg

SEQ ID NO: 456342 - DNA, 25 bp, Homo sapien
tttctgggtggcataacaatggaag

SEQ ID NO: 456343 - DNA, 25 bp, Homo sapien
gagggatcacatagcacttatccag

SEQ ID NO: 456344 - DNA, 25 bp, Homo sapien
catagcacttatccaggttaagatc

SEQ ID NO: 456345 - DNA, 25 bp, Homo sapien
agtgttcagagggatcacatagcac

SEQ ID NO: 456346 - DNA, 25 bp, Homo sapien
gaacaggttgccaaactactaccca

SEQ ID NO: 456347 - DNA, 25 bp, Homo sapien
gataaaatgggctcctatagggcta

SEQ ID NO: 456348 - DNA, 25 bp, Homo sapien
gggaattccagaacactatgaaggc

SEQ ID NO: 456349 - DNA, 25 bp, Homo sapien
tatagggctaatttctcaacaggga

SEQ ID NO: 456350 - DNA, 25 bp, Homo sapien
catgaatcagataggactgaggcaa

SEQ ID NO: 456351 - DNA, 25 bp, Homo sapien
gaaacccaggtgatcaatgttttca

SEQ ID NO: 456352 - DNA, 25 bp, Homo sapien
gacacagtcgataaataaagaaacc

SEQ ID NO: 456353 - DNA, 25 bp, Homo sapien
ctctgcgttgcagtttgtaagtttc

SEQ ID NO: 456354 - DNA, 25 bp, Homo sapien
caaccgccggagatgagagaacagt

SEQ ID NO: 456355 - DNA, 25 bp, Homo sapien
gaggtaccatcatctcaaggcaatg

SEQ ID NO: 456356 - DNA, 25 bp, Homo sapien
catggcacgtgtaaggctgacttta

SEQ ID NO: 456357 - DNA, 25 bp, Homo sapien
cactcatggcaggtatattggtaac

SEQ ID NO: 456358 - DNA, 25 bp, Homo sapien
ttgttttcaaaatgccgaattgcga

SEQ ID NO: 456359 - DNA, 25 bp, Homo sapien
gccgaattgcgaaacaattgctggc

SEQ ID NO: 456360 - DNA, 25 bp, Homo sapien
tcaaaatgccgaattgcgaaacaat

SEQ ID NO: 456361 - DNA, 25 bp, Homo sapien
aaatgccgaattgcgaaacaattgc

SEQ ID NO: 456362 - DNA, 25 bp, Homo sapien
ggtggggttatgctgtgatattaat

SEQ ID NO: 456363 - DNA, 25 bp, Homo sapien
cactgcacaaaatgtaaagggtggg

SEQ ID NO: 456364 - DNA, 25 bp, Homo sapien
aaaaataatcactgcacaaaatgta

SEQ ID NO: 456365 - DNA, 25 bp, Homo sapien
tcctcaataatgtttttcttgactg

SEQ ID NO: 456366 - DNA, 25 bp, Homo sapien
gaaaagatagtaaagccctgtttgc

SEQ ID NO: 456367 - DNA, 25 bp, Homo sapien
tgaaaagatagtaaagccctgtttg

SEQ ID NO: 456368 - DNA, 25 bp, Homo sapien
aaagatagtaaagccctgtttgcta

SEQ ID NO: 456369 - DNA, 25 bp, Homo sapien
agatagtaaagccctgtttgctact

SEQ ID NO: 456370 - DNA, 25 bp, Homo sapien
taacaaactaggtagcagggcaact

SEQ ID NO: 456371 - DNA, 25 bp, Homo sapien
tataaaagacaccacacttcgaaag

SEQ ID NO: 456372 - DNA, 25 bp, Homo sapien
tattatacgggaaaaacaacacgca

SEQ ID NO: 456373 - DNA, 25 bp, Homo sapien
aatattattacagcagatgcctagg

SEQ ID NO: 456374 - DNA, 25 bp, Homo sapien
tttaatagtatccacaaagaatctg

SEQ ID NO: 456375 - DNA, 25 bp, Homo sapien
actttaatagtatccacaaagaatc

SEQ ID NO: 456376 - DNA, 25 bp, Homo sapien
ctttaatagtatccacaaagaatct

SEQ ID NO: 456377 - DNA, 25 bp, Homo sapien
ttaatagtatccacaaagaatctgg

SEQ ID NO: 456378 - DNA, 25 bp, Homo sapien
ggcgggcattctcagagaagcacag

SEQ ID NO: 456379 - DNA, 25 bp, Homo sapien
gcacagttattttacgttccttgga

SEQ ID NO: 456380 - DNA, 25 bp, Homo sapien
gagaggaagcaaccttagaaacata

SEQ ID NO: 456381 - DNA, 25 bp, Homo sapien
caaaatgttccacttgtgaggcggg

SEQ ID NO: 456382 - DNA, 25 bp, Homo sapien
ccatactggactgtgatgaaagcat

SEQ ID NO: 456383 - DNA, 25 bp, Homo sapien
gcaaaacttcaatagtggcccatgg

SEQ ID NO: 456384 - DNA, 25 bp, Homo sapien
tctggaggttgcctgccatactgga

SEQ ID NO: 456385 - DNA, 25 bp, Homo sapien
tagattgtgagtctccacgacggca

SEQ ID NO: 456386 - DNA, 25 bp, Homo sapien
caggtgccctactaacgtattgagc

SEQ ID NO: 456387 - DNA, 25 bp, Homo sapien
taagagctgcaactatgtgtcaggt

SEQ ID NO: 456388 - DNA, 25 bp, Homo sapien
cgtattgagcagtctagtggtggaa

SEQ ID NO: 456389 - DNA, 25 bp, Homo sapien
tggttgggaaatataatacccagaa

SEQ ID NO: 456390 - DNA, 25 bp, Homo sapien
tccacatgggctatggaaatgacca

SEQ ID NO: 456391 - DNA, 25 bp, Homo sapien
gagcaatgctcatagccacagggat

SEQ ID NO: 456392 - DNA, 25 bp, Homo sapien
aatgaccatattgctcactgggcag

SEQ ID NO: 456393 - DNA, 25 bp, Homo sapien
gggcataagccttcttgaccaatga

SEQ ID NO: 456394 - DNA, 25 bp, Homo sapien
gtctgaatttcaatatactctttgc

SEQ ID NO: 456395 - DNA, 25 bp, Homo sapien
ctgtgaatcagtctgaatttcaata

SEQ ID NO: 456396 - DNA, 25 bp, Homo sapien
tcagtctgaatttcaatatactctt

SEQ ID NO: 456397 - DNA, 25 bp, Homo sapien
gtgaatcagtctgaatttcaatata

SEQ ID NO: 456398 - DNA, 25 bp, Homo sapien
gaaatatcattagaaactggacaac

SEQ ID NO: 456399 - DNA, 25 bp, Homo sapien
taatgaacatgtctgtctgctgaaa

SEQ ID NO: 456400 - DNA, 25 bp, Homo sapien
actggacaactaatgaacatgtctg

SEQ ID NO: 456401 - DNA, 25 bp, Homo sapien
ggcactatcagttcctgtacacaat

SEQ ID NO: 456402 - DNA, 25 bp, Homo sapien
cagcgagctgtggaggagcgccggg

SEQ ID NO: 456403 - DNA, 25 bp, Homo sapien
cgcacgtcggggcacgccccgtcct

SEQ ID NO: 456404 - DNA, 25 bp, Homo sapien
gggaggacgacgcgcgcgcacgtcg

SEQ ID NO: 456405 - DNA, 25 bp, Homo sapien
gacgcctttccgcggcgggagccag

SEQ ID NO: 456406 - DNA, 25 bp, Homo sapien
tcctccgggccgctgtcctgctctg

SEQ ID NO: 456407 - DNA, 25 bp, Homo sapien
gaggcaggtcctccgggccgctgtc

SEQ ID NO: 456408 - DNA, 25 bp, Homo sapien
aggtcctccgggccgctgtcctgct

SEQ ID NO: 456409 - DNA, 25 bp, Homo sapien
agaggcaggtcctccgggccgctgt

SEQ ID NO: 456410 - DNA, 25 bp, Homo sapien
aatatttgcttgcatggtaagtcaa

SEQ ID NO: 456411 - DNA, 25 bp, Homo sapien
tagtttgcacataacactactgtga

SEQ ID NO: 456412 - DNA, 25 bp, Homo sapien
taaggataccacacagtgaaaaata

SEQ ID NO: 456413 - DNA, 25 bp, Homo sapien
ggcatatacttataaatcaaattga

SEQ ID NO: 456414 - DNA, 25 bp, Homo sapien
cataatgcagtaaaatcaggttctt

SEQ ID NO: 456415 - DNA, 25 bp, Homo sapien
tctgacataatgcagtaaaatcagg

SEQ ID NO: 456416 - DNA, 25 bp, Homo sapien
aagttaaccaagctctctctctgac

SEQ ID NO: 456417 - DNA, 25 bp, Homo sapien
tctcccaagttaaccaagctctctc

SEQ ID NO: 456418 - DNA, 25 bp, Homo sapien
tttaatgttagcagaggtaaatttc

SEQ ID NO: 456419 - DNA, 25 bp, Homo sapien
tttgtatagtgatttgaagttgttt

SEQ ID NO: 456420 - DNA, 25 bp, Homo sapien
tatagtgatttgaagttgtttttaa

SEQ ID NO: 456421 - DNA, 25 bp, Homo sapien
ttaatgttagcagaggtaaatttcc

SEQ ID NO: 456422 - DNA, 25 bp, Homo sapien
aattcttatactattgccccagtac

SEQ ID NO: 456423 - DNA, 25 bp, Homo sapien
gccccagtacatataaaactctagt

SEQ ID NO: 456424 - DNA, 25 bp, Homo sapien
cactgattgcatattagaaggtata

SEQ ID NO: 456425 - DNA, 25 bp, Homo sapien
ctaattctgagtcagtcaggaaatc

SEQ ID NO: 456426 - DNA, 25 bp, Homo sapien
gaactagaagcagatcaaccattcg

SEQ ID NO: 456427 - DNA, 25 bp, Homo sapien
tgattctaacatctaaataaacccc

SEQ ID NO: 456428 - DNA, 25 bp, Homo sapien
gaagcagatcaaccattcgatccag

SEQ ID NO: 456429 - DNA, 25 bp, Homo sapien
tcaaagaactagaagcagatcaacc

SEQ ID NO: 456430 - DNA, 25 bp, Homo sapien
gcactttttatacagaggacacccc

SEQ ID NO: 456431 - DNA, 25 bp, Homo sapien
caaagtgtccgtcgggaagctcgca

SEQ ID NO: 456432 - DNA, 25 bp, Homo sapien
gatttaaagcacaatggccagcaag

SEQ ID NO: 456433 - DNA, 25 bp, Homo sapien
ccctgttgcatgtgaaatccccgcg

SEQ ID NO: 456434 - DNA, 25 bp, Homo sapien
gtcatcgatagggacgaccaggacc

SEQ ID NO: 456435 - DNA, 25 bp, Homo sapien
agtttgcccgacaggaggaactcgg

SEQ ID NO: 456436 - DNA, 25 bp, Homo sapien
tcgggctcggaggaaagcattttag

SEQ ID NO: 456437 - DNA, 25 bp, Homo sapien
tagtgacgccagtgacttcagcgac

SEQ ID NO: 456438 - DNA, 25 bp, Homo sapien
cccacacttgctggcgaagaaggac

SEQ ID NO: 456439 - DNA, 25 bp, Homo sapien
acagggcccgtccttctctgccttc

SEQ ID NO: 456440 - DNA, 25 bp, Homo sapien
tctttggaagcccacacttgctggc

SEQ ID NO: 456441 - DNA, 25 bp, Homo sapien
gaagcccacacttgctggcgaagaa

SEQ ID NO: 456442 - DNA, 25 bp, Homo sapien
aaactgcaagcagttactctcttaa

SEQ ID NO: 456443 - DNA, 25 bp, Homo sapien
aactgcaagcagttactctcttaac

SEQ ID NO: 456444 - DNA, 25 bp, Homo sapien
actgcaagcagttactctcttaact

SEQ ID NO: 456445 - DNA, 25 bp, Homo sapien
ctgcaagcagttactctcttaactc

SEQ ID NO: 456446 - DNA, 25 bp, Homo sapien
cactgatttgaatcctatgagagag

SEQ ID NO: 456447 - DNA, 25 bp, Homo sapien
agacttagggcttgactcttgactg

SEQ ID NO: 456448 - DNA, 25 bp, Homo sapien
gatatcctaactcatctggagccta

SEQ ID NO: 456449 - DNA, 25 bp, Homo sapien
catcaataattatgactatcaggcc

SEQ ID NO: 456450 - DNA, 25 bp, Homo sapien
agtcattccatatccacggtttcac

SEQ ID NO: 456451 - DNA, 25 bp, Homo sapien
ctatacaataagaagtgattacatc

SEQ ID NO: 456452 - DNA, 25 bp, Homo sapien
tatggaggtacaattgacaaacgaa

SEQ ID NO: 456453 - DNA, 25 bp, Homo sapien
tggtcaaccatggtttgaaaacagg

SEQ ID NO: 456454 - DNA, 25 bp, Homo sapien
gctcagtaaaagtgaacgacatctc

SEQ ID NO: 456455 - DNA, 25 bp, Homo sapien
aaaagtgaacgacatctcatctagg

SEQ ID NO: 456456 - DNA, 25 bp, Homo sapien
acatctcatctaggtcaactgctgc

SEQ ID NO: 456457 - DNA, 25 bp, Homo sapien
tgtagctcagtaaaagtgaacgaca

SEQ ID NO: 456458 - DNA, 25 bp, Homo sapien
actttggtactggtatcaatttctt

SEQ ID NO: 456459 - DNA, 25 bp, Homo sapien
aactttggtactggtatcaatttct

SEQ ID NO: 456460 - DNA, 25 bp, Homo sapien
ctgctgggttgtgtcaaatatataa

SEQ ID NO: 456461 - DNA, 25 bp, Homo sapien
gggttgtgtcaaatatataagttca

SEQ ID NO: 456462 - DNA, 25 bp, Homo sapien
gaactgctgggttgtgtcaaatata

SEQ ID NO: 456463 - DNA, 25 bp, Homo sapien
tgtcaaatatataagttcacatgtc

SEQ ID NO: 456464 - DNA, 25 bp, Homo sapien
caagaaacttttagcaccaatgcag

SEQ ID NO: 456465 - DNA, 25 bp, Homo sapien
gaaacttttagcaccaatgcagaat

SEQ ID NO: 456466 - DNA, 25 bp, Homo sapien
ataaaaatgtgatccaagaaacttt

SEQ ID NO: 456467 - DNA, 25 bp, Homo sapien
tccaagaaacttttagcaccaatgc

SEQ ID NO: 456468 - DNA, 25 bp, Homo sapien
tctattagattcatatggtctatat

SEQ ID NO: 456469 - DNA, 25 bp, Homo sapien
gattcatatggtctatatagtgcag

SEQ ID NO: 456470 - DNA, 25 bp, Homo sapien
gctatttctattgtattggggccta

SEQ ID NO: 456471 - DNA, 25 bp, Homo sapien
aatgttttaagcctaacacatggtc

SEQ ID NO: 456472 - DNA, 25 bp, Homo sapien
ctttactaggagactttattatggc

SEQ ID NO: 456473 - DNA, 25 bp, Homo sapien
ttctttactaggagactttattatg

SEQ ID NO: 456474 - DNA, 25 bp, Homo sapien
gtctattttccagaatactgtaagt

SEQ ID NO: 456475 - DNA, 25 bp, Homo sapien
ttttccagaatactgtaagtaggat

SEQ ID NO: 456476 - DNA, 25 bp, Homo sapien
tcatcttccatttgtaatacttccc

SEQ ID NO: 456477 - DNA, 25 bp, Homo sapien
caaggacacatagcattaactgaaa

SEQ ID NO: 456478 - DNA, 25 bp, Homo sapien
gttctttgagcaacatgggaggtga

SEQ ID NO: 456479 - DNA, 25 bp, Homo sapien
caacatgggaggtgagagtttaata

SEQ ID NO: 456480 - DNA, 25 bp, Homo sapien
atagtcaaggacacatagcattaac

SEQ ID NO: 456481 - DNA, 25 bp, Homo sapien
cttgaagccatgaaaggaagcaatt

SEQ ID NO: 456482 - DNA, 25 bp, Homo sapien
taagctgttcccttagaataggcca

SEQ ID NO: 456483 - DNA, 25 bp, Homo sapien
cacccactgaaatagtatgagttat

SEQ ID NO: 456484 - DNA, 25 bp, Homo sapien
gcaaggaattagtctgaccttaagt

SEQ ID NO: 456485 - DNA, 25 bp, Homo sapien
tctagttgttttgctatccgtgcac

SEQ ID NO: 456486 - DNA, 25 bp, Homo sapien
tcctgttctgacctcgcctgggtgt

SEQ ID NO: 456487 - DNA, 25 bp, Homo sapien
ctttacagagaacttcaataattct

SEQ ID NO: 456488 - DNA, 25 bp, Homo sapien
gttcgaggtgaaccattaatgggta

SEQ ID NO: 456489 - DNA, 25 bp, Homo sapien
ctctggaagtccattagatgttaca

SEQ ID NO: 456490 - DNA, 25 bp, Homo sapien
gttacaagtccaagagaattcataa

SEQ ID NO: 456491 - DNA, 25 bp, Homo sapien
tattggcatgccttctactgtgact

SEQ ID NO: 456492 - DNA, 25 bp, Homo sapien
tgttcctgtcctaccttagttgagg

SEQ ID NO: 456493 - DNA, 25 bp, Homo sapien
tagttgaggcactaattaccagtca

SEQ ID NO: 456494 - DNA, 25 bp, Homo sapien
caaagtgattccaacctcagagaag

SEQ ID NO: 456495 - DNA, 25 bp, Homo sapien
gattttaggtctatttcgtgcatag

SEQ ID NO: 456496 - DNA, 25 bp, Homo sapien
cagaaaattgcaacatttgttcaac

SEQ ID NO: 456497 - DNA, 25 bp, Homo sapien
gaattttatgtagacaaagatagcc

SEQ ID NO: 456498 - DNA, 25 bp, Homo sapien
taaggtctatctaaaagtgaggtac

SEQ ID NO: 456499 - DNA, 25 bp, Homo sapien
aaaagtcactgacaattatccttta

SEQ ID NO: 456500 - DNA, 25 bp, Homo sapien
gtcactgacaattatcctttacatg

SEQ ID NO: 456501 - DNA, 25 bp, Homo sapien
cactgacaattatcctttacatgtc

SEQ ID NO: 456502 - DNA, 25 bp, Homo sapien
gaaaaaagtcactgacaattatcct

SEQ ID NO: 456503 - DNA, 25 bp, Homo sapien
ctgtctatagaatcagtctgaagag

SEQ ID NO: 456504 - DNA, 25 bp, Homo sapien
agataaatttcttcgtatcgtttag

SEQ ID NO: 456505 - DNA, 25 bp, Homo sapien
gataaatttcttcgtatcgtttaga

SEQ ID NO: 456506 - DNA, 25 bp, Homo sapien
gtctatagaatcagtctgaagagtt

SEQ ID NO: 456507 - DNA, 25 bp, Homo sapien
aaggtaactgttataggacacacaa

SEQ ID NO: 456508 - DNA, 25 bp, Homo sapien
tacatgataataacagagactacac

SEQ ID NO: 456509 - DNA, 25 bp, Homo sapien
tctaaaggtcactaagctaaagact

SEQ ID NO: 456510 - DNA, 25 bp, Homo sapien
ggtagagaccactatttgaagaaac

SEQ ID NO: 456511 - DNA, 25 bp, Homo sapien
aattacattcacctcttcatcaagg

SEQ ID NO: 456512 - DNA, 25 bp, Homo sapien
ttactttttcgtggtgttctctgtg

SEQ ID NO: 456513 - DNA, 25 bp, Homo sapien
ggaggaattacattcacctcttcat

SEQ ID NO: 456514 - DNA, 25 bp, Homo sapien
cattcacctcttcatcaaggttact

SEQ ID NO: 456515 - DNA, 25 bp, Homo sapien
gctaatgaattgacatggctggcag

SEQ ID NO: 456516 - DNA, 25 bp, Homo sapien
gcaaattaatcgaacctaagaggtg

SEQ ID NO: 456517 - DNA, 25 bp, Homo sapien
ccagggagggcatagaagcttccca

SEQ ID NO: 456518 - DNA, 25 bp, Homo sapien
gctggtcactagaaagcccgaggca

SEQ ID NO: 456519 - DNA, 25 bp, Homo sapien
cattaattgttggatagtgttcata

SEQ ID NO: 456520 - DNA, 25 bp, Homo sapien
atcattaattgttggatagtgttca

SEQ ID NO: 456521 - DNA, 25 bp, Homo sapien
ttgttggatagtgttcataacagtc

SEQ ID NO: 456522 - DNA, 25 bp, Homo sapien
taattgttggatagtgttcataaca

SEQ ID NO: 456523 - DNA, 25 bp, Homo sapien
gaaaactgaagtgagcagatcacct

SEQ ID NO: 456524 - DNA, 25 bp, Homo sapien
tcatcagctacaaagatttattcta

SEQ ID NO: 456525 - DNA, 25 bp, Homo sapien
tctaaaattaagattatggccaggc

SEQ ID NO: 456526 - DNA, 25 bp, Homo sapien
aataattaaaacacatcacaagatg

SEQ ID NO: 456527 - DNA, 25 bp, Homo sapien
ccatgcccggaccatttcctaattt

SEQ ID NO: 456528 - DNA, 25 bp, Homo sapien
accatgcccggaccatttcctaatt

SEQ ID NO: 456529 - DNA, 25 bp, Homo sapien
ataggcaagcgcaccacgcctcact

SEQ ID NO: 456530 - DNA, 25 bp, Homo sapien
aatacaagatagggaaattgttgca

SEQ ID NO: 456531 - DNA, 25 bp, Homo sapien
gatccaatttcgacacaaccctgtc

SEQ ID NO: 456532 - DNA, 25 bp, Homo sapien
tccaatttcgacacaaccctgtccc

SEQ ID NO: 456533 - DNA, 25 bp, Homo sapien
atccaatttcgacacaaccctgtcc

SEQ ID NO: 456534 - DNA, 25 bp, Homo sapien
ttcactcttttcagtatactttctt

SEQ ID NO: 456535 - DNA, 25 bp, Homo sapien
acaagcgaactccaagtttgtatcg

SEQ ID NO: 456536 - DNA, 25 bp, Homo sapien
catggattccattactcggtaatac

SEQ ID NO: 456537 - DNA, 25 bp, Homo sapien
cattactcggtaatacaagcgaact

SEQ ID NO: 456538 - DNA, 25 bp, Homo sapien
tcggtaatacaagcgaactccaagt

SEQ ID NO: 456539 - DNA, 25 bp, Homo sapien
ttttgaatggataatcgttcttctt

SEQ ID NO: 456540 - DNA, 25 bp, Homo sapien
attttgaatggataatcgttcttct

SEQ ID NO: 456541 - DNA, 25 bp, Homo sapien
tttgaatggataatcgttcttcttc

SEQ ID NO: 456542 - DNA, 25 bp, Homo sapien
tcaagagcgcacgccaataaagaca

SEQ ID NO: 456543 - DNA, 25 bp, Homo sapien
aagagcgcacgccaataaagacata

SEQ ID NO: 456544 - DNA, 25 bp, Homo sapien
caagagcgcacgccaataaagacat

SEQ ID NO: 456545 - DNA, 25 bp, Homo sapien
ctcaagagcgcacgccaataaagac

SEQ ID NO: 456546 - DNA, 25 bp, Homo sapien
cgatgttcacatcgttctaaatgtt

SEQ ID NO: 456547 - DNA, 25 bp, Homo sapien
catgcaagggattccatgattcgat

SEQ ID NO: 456548 - DNA, 25 bp, Homo sapien
tgctttgataaaactttcgatcact

SEQ ID NO: 456549 - DNA, 25 bp, Homo sapien
tcgatcactttgtaaaaatcaaagg

SEQ ID NO: 456550 - DNA, 25 bp, Homo sapien
ggattatggcatacctaaagtctta

SEQ ID NO: 456551 - DNA, 25 bp, Homo sapien
gagcataacctcaagttgccacttt

SEQ ID NO: 456552 - DNA, 25 bp, Homo sapien
tttgtgcccctatattgattgaacc

SEQ ID NO: 456553 - DNA, 25 bp, Homo sapien
gatatatacttagcatgcaacacag

SEQ ID NO: 456554 - DNA, 25 bp, Homo sapien
ttcagaggcttatgacttccacgtc

SEQ ID NO: 456555 - DNA, 25 bp, Homo sapien
tctctcaattcaaggcatatggcgt

SEQ ID NO: 456556 - DNA, 25 bp, Homo sapien
aagtcctctatagtttcatctgcca

SEQ ID NO: 456557 - DNA, 25 bp, Homo sapien
tgggaggagaggacacataagcctt

SEQ ID NO: 456558 - DNA, 25 bp, Homo sapien
gaagagtccagaatagtccaggaaa

SEQ ID NO: 456559 - DNA, 25 bp, Homo sapien
ggcagcaactccagtttcagttcag

SEQ ID NO: 456560 - DNA, 25 bp, Homo sapien
taccagatgaatatgtcctccacag

SEQ ID NO: 456561 - DNA, 25 bp, Homo sapien
gaagagacccatagttttcccactg

SEQ ID NO: 456562 - DNA, 25 bp, Homo sapien
tgacaaagttgcctaaatgaagtat

SEQ ID NO: 456563 - DNA, 25 bp, Homo sapien
gtatccccatcatttagcaatgcct

SEQ ID NO: 456564 - DNA, 25 bp, Homo sapien
gaagtatttcctagaatgtatcccc

SEQ ID NO: 456565 - DNA, 25 bp, Homo sapien
taccatacaggtctgtagtctagaa

SEQ ID NO: 456566 - DNA, 25 bp, Homo sapien
gatagaacaatagcactgttttatg

SEQ ID NO: 456567 - DNA, 25 bp, Homo sapien
catttactttgttgcaatatgctgt

SEQ ID NO: 456568 - DNA, 25 bp, Homo sapien
gcaaagagctgaattttcctatccg

SEQ ID NO: 456569 - DNA, 25 bp, Homo sapien
gaatgtcttcactatctggcataac

SEQ ID NO: 456570 - DNA, 25 bp, Homo sapien
ttgctcatttttgtaaagtcttctt

SEQ ID NO: 456571 - DNA, 25 bp, Homo sapien
tttgctcatttttgtaaagtcttct

SEQ ID NO: 456572 - DNA, 25 bp, Homo sapien
ataatatagtttgctcatttttgta

SEQ ID NO: 456573 - DNA, 25 bp, Homo sapien
atatagtttgctcatttttgtaaag

SEQ ID NO: 456574 - DNA, 25 bp, Homo sapien
tgttacagaagtctcggtttacttc

SEQ ID NO: 456575 - DNA, 25 bp, Homo sapien
cagtacaatactttgttgtattttc

SEQ ID NO: 456576 - DNA, 25 bp, Homo sapien
tctttttctttaggtctgttacaga

SEQ ID NO: 456577 - DNA, 25 bp, Homo sapien
tttggcaccatcaggaaaccctagc

SEQ ID NO: 456578 - DNA, 25 bp, Homo sapien
tcccttcaaaggaacacagtaagct

SEQ ID NO: 456579 - DNA, 25 bp, Homo sapien
cccctataaaaactgtgcccactgt

SEQ ID NO: 456580 - DNA, 25 bp, Homo sapien
ttgattacctgaaaatgatagcact

SEQ ID NO: 456581 - DNA, 25 bp, Homo sapien
cataaaacggtagatgatttgacta

SEQ ID NO: 456582 - DNA, 25 bp, Homo sapien
aaaaccattaggactcactgggaca

SEQ ID NO: 456583 - DNA, 25 bp, Homo sapien
tattcagcataacctacagacctta

SEQ ID NO: 456584 - DNA, 25 bp, Homo sapien
gattctctgaagttcatggtgcaga

SEQ ID NO: 456585 - DNA, 25 bp, Homo sapien
tggtgcagagaattttattcagcat

SEQ ID NO: 456586 - DNA, 25 bp, Homo sapien
aactgtgatcggaggaagtgcaccc

SEQ ID NO: 456587 - DNA, 25 bp, Homo sapien
tcatctgcgtcctcaaagtccgaaa

SEQ ID NO: 456588 - DNA, 25 bp, Homo sapien
tgaatcccaaaggagactgcagctg

SEQ ID NO: 456589 - DNA, 25 bp, Homo sapien
tttacttcacaacacggaattggcc

SEQ ID NO: 456590 - DNA, 25 bp, Homo sapien
caacaagagctaacaagcttgggag

SEQ ID NO: 456591 - DNA, 25 bp, Homo sapien
tttataatcctatgggttggactcg

SEQ ID NO: 456592 - DNA, 25 bp, Homo sapien
tctggtcacagatcacagcttttct

SEQ ID NO: 456593 - DNA, 25 bp, Homo sapien
cttctgcttacccacaatctgggat

SEQ ID NO: 456594 - DNA, 25 bp, Homo sapien
ggaggagtttattattctctgtcca

SEQ ID NO: 456595 - DNA, 25 bp, Homo sapien
tttggcttggaggagtttattattc

SEQ ID NO: 456596 - DNA, 25 bp, Homo sapien
gattctttggaagagaaaaggcatt

SEQ ID NO: 456597 - DNA, 25 bp, Homo sapien
cttattttaggtagcaattcctcta

SEQ ID NO: 456598 - DNA, 25 bp, Homo sapien
cattatgatgctagccagttagttt

SEQ ID NO: 456599 - DNA, 25 bp, Homo sapien
atttagagcacgtgtctttgcatgt

SEQ ID NO: 456600 - DNA, 25 bp, Homo sapien
agccagttagtttgcccattagttg

SEQ ID NO: 456601 - DNA, 25 bp, Homo sapien
aattgtggcacttagcccgtttact

SEQ ID NO: 456602 - DNA, 25 bp, Homo sapien
acacctaatcagcatagcgcacagc

SEQ ID NO: 456603 - DNA, 25 bp, Homo sapien
ggacacctaatcagcatagcgcaca

SEQ ID NO: 456604 - DNA, 25 bp, Homo sapien
gtgtggacacctaatcagcatagcg

SEQ ID NO: 456605 - DNA, 25 bp, Homo sapien
gtggacacctaatcagcatagcgca

SEQ ID NO: 456606 - DNA, 25 bp, Homo sapien
ccaaagatcttggggacatgaacat

SEQ ID NO: 456607 - DNA, 25 bp, Homo sapien
cttttaattgggctgcttagagcac

SEQ ID NO: 456608 - DNA, 25 bp, Homo sapien
tgaagaaagaagctacaggccaaga

SEQ ID NO: 456609 - DNA, 25 bp, Homo sapien
tcttttagatagcatagagttgggt

SEQ ID NO: 456610 - DNA, 25 bp, Homo sapien
tatcaaccacctaatcacccatagt

SEQ ID NO: 456611 - DNA, 25 bp, Homo sapien
tgcccattgtcatgcttttaaccat

SEQ ID NO: 456612 - DNA, 25 bp, Homo sapien
tctttgcccattgtcatgcttttaa

SEQ ID NO: 456613 - DNA, 25 bp, Homo sapien
tttgcccattgtcatgcttttaacc

SEQ ID NO: 456614 - DNA, 25 bp, Homo sapien
ttctttgcccattgtcatgctttta

SEQ ID NO: 456615 - DNA, 25 bp, Homo sapien
ctgaatccaaagaaaaaaatcctgt

SEQ ID NO: 456616 - DNA, 25 bp, Homo sapien
tctgaatccaaagaaaaaaatcctg

SEQ ID NO: 456617 - DNA, 25 bp, Homo sapien
gcgggtgtaggcacagctccagaca

SEQ ID NO: 456618 - DNA, 25 bp, Homo sapien
aaagtattccaagtgatagggtcca

SEQ ID NO: 456619 - DNA, 25 bp, Homo sapien
tagggtccaccataatccatattgc

SEQ ID NO: 456620 - DNA, 25 bp, Homo sapien
tccaatgtctcaagaatatgccagg

SEQ ID NO: 456621 - DNA, 25 bp, Homo sapien
gaggacaagcagattcaaggtgatc

SEQ ID NO: 456622 - DNA, 25 bp, Homo sapien
gattcaaggtgatcagttggtcctt

SEQ ID NO: 456623 - DNA, 25 bp, Homo sapien
tgatcagttggtccttctcggtcct

SEQ ID NO: 456624 - DNA, 25 bp, Homo sapien
tggtccttctcggtcctttgattgt

SEQ ID NO: 456625 - DNA, 25 bp, Homo sapien
gtagaatttacacgcgtagttgaac

SEQ ID NO: 456626 - DNA, 25 bp, Homo sapien
tataaaacagtgaaagagaggtaga

SEQ ID NO: 456627 - DNA, 25 bp, Homo sapien
gcatttgcagtagaatttacacgcg

SEQ ID NO: 456628 - DNA, 25 bp, Homo sapien
ttgtgtctctgcatttgcagtagaa

SEQ ID NO: 456629 - DNA, 25 bp, Homo sapien
gagttcatactcattctgcagggtg

SEQ ID NO: 456630 - DNA, 25 bp, Homo sapien
tatttagccggagataggctagccg

SEQ ID NO: 456631 - DNA, 25 bp, Homo sapien
tgggtgctcagacagaaggcgttca

SEQ ID NO: 456632 - DNA, 25 bp, Homo sapien
gatatgttctaattctgggtgctca

SEQ ID NO: 456633 - DNA, 25 bp, Homo sapien
gtatgctgttacaatgattttgaat

SEQ ID NO: 456634 - DNA, 25 bp, Homo sapien
gattttgaatttaaggtctatattc

SEQ ID NO: 456635 - DNA, 25 bp, Homo sapien
ttgcatatgccatacatggaacaca

SEQ ID NO: 456636 - DNA, 25 bp, Homo sapien
tatgccatacatggaacacatcata

SEQ ID NO: 456637 - DNA, 25 bp, Homo sapien
gaatttacataataaggtcagacag

SEQ ID NO: 456638 - DNA, 25 bp, Homo sapien
tatctaatgttctatgactcatgtc

SEQ ID NO: 456639 - DNA, 25 bp, Homo sapien
caaatacctgcttattacagggata

SEQ ID NO: 456640 - DNA, 25 bp, Homo sapien
gatttgcaaggctgcatttatactg

SEQ ID NO: 456641 - DNA, 25 bp, Homo sapien
tcctcttctttgatcaaaacacgtt

SEQ ID NO: 456642 - DNA, 25 bp, Homo sapien
cagtctctgcatgaagaccgagtta

SEQ ID NO: 456643 - DNA, 25 bp, Homo sapien
catgaagaccgagttatagaatact

SEQ ID NO: 456644 - DNA, 25 bp, Homo sapien
cctggtggaagcatactgcaaaata

SEQ ID NO: 456645 - DNA, 25 bp, Homo sapien
caggaatccgtaagggtgaactagg

SEQ ID NO: 456646 - DNA, 25 bp, Homo sapien
aatgtgaggtattggtgacaaggta

SEQ ID NO: 456647 - DNA, 25 bp, Homo sapien
caggggtgaaatatagatgttccct

SEQ ID NO: 456648 - DNA, 25 bp, Homo sapien
ggtgttggcagaccttctgaaattt

SEQ ID NO: 456649 - DNA, 25 bp, Homo sapien
ccctctcattctttactacttccct

SEQ ID NO: 456650 - DNA, 25 bp, Homo sapien
ctctcattctttactacttccctaa

SEQ ID NO: 456651 - DNA, 25 bp, Homo sapien
cattctttactacttccctaaagag

SEQ ID NO: 456652 - DNA, 25 bp, Homo sapien
ctcattctttactacttccctaaag

SEQ ID NO: 456653 - DNA, 25 bp, Homo sapien
tcaaagctagagagcacttgtggtt

SEQ ID NO: 456654 - DNA, 25 bp, Homo sapien
actgaagcacttcaaagctagagag

SEQ ID NO: 456655 - DNA, 25 bp, Homo sapien
aatataatgatttgtagttgcatac

SEQ ID NO: 456656 - DNA, 25 bp, Homo sapien
cacttgtggttggatgtggaagata

SEQ ID NO: 456657 - DNA, 25 bp, Homo sapien
taactatactagctaatctgcctcc

SEQ ID NO: 456658 - DNA, 25 bp, Homo sapien
ggtacaaccatatgggctgataatt

SEQ ID NO: 456659 - DNA, 25 bp, Homo sapien
gtcagtttcaaatagcccatgataa

SEQ ID NO: 456660 - DNA, 25 bp, Homo sapien
ttttcttgcccattaggtacaacca

SEQ ID NO: 456661 - DNA, 25 bp, Homo sapien
tgattcaccaattgatactaagatt

SEQ ID NO: 456662 - DNA, 25 bp, Homo sapien
caccatacaggactacttttcagaa

SEQ ID NO: 456663 - DNA, 25 bp, Homo sapien
ttttcagaagtaggcaagtcagaac

SEQ ID NO: 456664 - DNA, 25 bp, Homo sapien
caggactacttttcagaagtaggca

SEQ ID NO: 456665 - DNA, 25 bp, Homo sapien
tttcagaacccaccatacaggacta

SEQ ID NO: 456666 - DNA, 25 bp, Homo sapien
cctccagcaactgcctactctgcaa

SEQ ID NO: 456667 - DNA, 25 bp, Homo sapien
ttcctccagcaactgcctactctgc

SEQ ID NO: 456668 - DNA, 25 bp, Homo sapien
tgtcttttcccatgcagctcacatt

SEQ ID NO: 456669 - DNA, 25 bp, Homo sapien
cctgtcttttcccatgcagctcaca

SEQ ID NO: 456670 - DNA, 25 bp, Homo sapien
ctacaaattacagaattctttactt

SEQ ID NO: 456671 - DNA, 25 bp, Homo sapien
tctgcttcattggaccaaataaaag

SEQ ID NO: 456672 - DNA, 25 bp, Homo sapien
ataactacctaattccatccccaat

SEQ ID NO: 456673 - DNA, 25 bp, Homo sapien
tagttagcaacctcaagttatagtt

SEQ ID NO: 456674 - DNA, 25 bp, Homo sapien
cggtcgctgttacataccatctgat

SEQ ID NO: 456675 - DNA, 25 bp, Homo sapien
tcagtggtttaggagggttgcttcc

SEQ ID NO: 456676 - DNA, 25 bp, Homo sapien
ttcttttgagcacacggtcgctgtt

SEQ ID NO: 456677 - DNA, 25 bp, Homo sapien
caatatcaaagcgtagttttttcag

SEQ ID NO: 456678 - DNA, 25 bp, Homo sapien
ctgaaatttggactctcctgggaga

SEQ ID NO: 456679 - DNA, 25 bp, Homo sapien
ctgctgaaatttggactctcctggg

SEQ ID NO: 456680 - DNA, 25 bp, Homo sapien
ttctgctgaaatttggactctcctg

SEQ ID NO: 456681 - DNA, 25 bp, Homo sapien
cagtttctgctgaaatttggactct

SEQ ID NO: 456682 - DNA, 25 bp, Homo sapien
gcctgattttggttatgagcctctt

SEQ ID NO: 456683 - DNA, 25 bp, Homo sapien
ttttggttatgagcctcttgtctat

SEQ ID NO: 456684 - DNA, 25 bp, Homo sapien
aggcctgattttggttatgagcctc

SEQ ID NO: 456685 - DNA, 25 bp, Homo sapien
tgattttggttatgagcctcttgtc

SEQ ID NO: 456686 - DNA, 25 bp, Homo sapien
tgtaggccactattctagagatgag

SEQ ID NO: 456687 - DNA, 25 bp, Homo sapien
tgacagtaccgtagggagttacagt

SEQ ID NO: 456688 - DNA, 25 bp, Homo sapien
agactagaatactcggctggcccag

SEQ ID NO: 456689 - DNA, 25 bp, Homo sapien
tcaggtatgccccattttgtaggcc

SEQ ID NO: 456690 - DNA, 25 bp, Homo sapien
ttttgcattcgtgttcgagtagaag

SEQ ID NO: 456691 - DNA, 25 bp, Homo sapien
gaggtatccatgctatcattcattt

SEQ ID NO: 456692 - DNA, 25 bp, Homo sapien
ttccttgtttgaggtatccatgcta

SEQ ID NO: 456693 - DNA, 25 bp, Homo sapien
tctgcttttgcattcgtgttcgagt

SEQ ID NO: 456694 - DNA, 25 bp, Homo sapien
tcaagtggcttaggaatcacccaaa

SEQ ID NO: 456695 - DNA, 25 bp, Homo sapien
catctgtgagagacaatgaatccag

SEQ ID NO: 456696 - DNA, 25 bp, Homo sapien
gacccagaaatagtaagcccttgac

SEQ ID NO: 456697 - DNA, 25 bp, Homo sapien
ggttatcaggactcccactctaggg

SEQ ID NO: 456698 - DNA, 25 bp, Homo sapien
tgagatactaggagagttatcttct

SEQ ID NO: 456699 - DNA, 25 bp, Homo sapien
gagatactaggagagttatcttcta

SEQ ID NO: 456700 - DNA, 25 bp, Homo sapien
gatactaggagagttatcttctatc

SEQ ID NO: 456701 - DNA, 25 bp, Homo sapien
ggatgagatactaggagagttatct

SEQ ID NO: 456702 - DNA, 25 bp, Homo sapien
tgtgggtacatctatctgaaaaaac

SEQ ID NO: 456703 - DNA, 25 bp, Homo sapien
gatgagaattagtggtttagccctt

SEQ ID NO: 456704 - DNA, 25 bp, Homo sapien
tctggtctttgaggataggcttgcc

SEQ ID NO: 456705 - DNA, 25 bp, Homo sapien
tgccattgacactcctatgggaagg

SEQ ID NO: 456706 - DNA, 25 bp, Homo sapien
tgtgtatctcacaatgtcatgtaat

SEQ ID NO: 456707 - DNA, 25 bp, Homo sapien
taatgtgtatctcacaatgtcatgt

SEQ ID NO: 456708 - DNA, 25 bp, Homo sapien
tctaatgtgtatctcacaatgtcat

SEQ ID NO: 456709 - DNA, 25 bp, Homo sapien
gtatctcacaatgtcatgtaatgta

SEQ ID NO: 456710 - DNA, 25 bp, Homo sapien
tggtctccacctaaaagatgctttg

SEQ ID NO: 456711 - DNA, 25 bp, Homo sapien
tgcttgtaacttaggaggcttgcca

SEQ ID NO: 456712 - DNA, 25 bp, Homo sapien
gggactggcctaaccctgcaaatat

SEQ ID NO: 456713 - DNA, 25 bp, Homo sapien
tttgcacagcactggattaggccag

SEQ ID NO: 456714 - DNA, 25 bp, Homo sapien
ccaaaccaggactgaattctaggga

SEQ ID NO: 456715 - DNA, 25 bp, Homo sapien
caaaccaggactgaattctagggac

SEQ ID NO: 456716 - DNA, 25 bp, Homo sapien
aaccaggactgaattctagggacac

SEQ ID NO: 456717 - DNA, 25 bp, Homo sapien
aaaccaggactgaattctagggaca

SEQ ID NO: 456718 - DNA, 25 bp, Homo sapien
cagtgacagatgaggcgcaaaggcc

SEQ ID NO: 456719 - DNA, 25 bp, Homo sapien
actgatatacctcaggttaagagaa

SEQ ID NO: 456720 - DNA, 25 bp, Homo sapien
gatgccaacagataatcgttgtggg

SEQ ID NO: 456721 - DNA, 25 bp, Homo sapien
cagcaggaaactgatatacctcagg

SEQ ID NO: 456722 - DNA, 25 bp, Homo sapien
tggttccatcgaacataagggatcc

SEQ ID NO: 456723 - DNA, 25 bp, Homo sapien
ctgcctggttccatcgaacataagg

SEQ ID NO: 456724 - DNA, 25 bp, Homo sapien
ccaggactgagtccatatggaagaa

SEQ ID NO: 456725 - DNA, 25 bp, Homo sapien
tttcctcagggactgcccaggactg

SEQ ID NO: 456726 - DNA, 25 bp, Homo sapien
tattgcatagcttctgctagagctg

SEQ ID NO: 456727 - DNA, 25 bp, Homo sapien
agacatattgcatagcttctgctag

SEQ ID NO: 456728 - DNA, 25 bp, Homo sapien
tagcttctgctagagctgctcctgc

SEQ ID NO: 456729 - DNA, 25 bp, Homo sapien
cagtccagacatattgcatagcttc

SEQ ID NO: 456730 - DNA, 25 bp, Homo sapien
taggcgaagccgttttggaactgcg

SEQ ID NO: 456731 - DNA, 25 bp, Homo sapien
caggaatagcgcgaaaagtttgact

SEQ ID NO: 456732 - DNA, 25 bp, Homo sapien
aactcagtggcagtatatgctttcg

SEQ ID NO: 456733 - DNA, 25 bp, Homo sapien
gatgggaagaaatcgccgagcgtct

SEQ ID NO: 456734 - DNA, 25 bp, Homo sapien
cctccccgccagagacagctgaggg

SEQ ID NO: 456735 - DNA, 25 bp, Homo sapien
actagagccgcgaccgtgccacagg

SEQ ID NO: 456736 - DNA, 25 bp, Homo sapien
gatcgcggccgtgacgtgggatgct

SEQ ID NO: 456737 - DNA, 25 bp, Homo sapien
cgtgggatgctgtcaggtaccactg

SEQ ID NO: 456738 - DNA, 25 bp, Homo sapien
cgtgcagtaaccgctacccaggagg

SEQ ID NO: 456739 - DNA, 25 bp, Homo sapien
gaggcggagcggacaaggctccggc

SEQ ID NO: 456740 - DNA, 25 bp, Homo sapien
caggaggcggagcggacaaggctcc

SEQ ID NO: 456741 - DNA, 25 bp, Homo sapien
gcagtaaccgctacccaggaggcgg

SEQ ID NO: 456742 - DNA, 25 bp, Homo sapien
cgcatcccgccgaggccgggccgtt

SEQ ID NO: 456743 - DNA, 25 bp, Homo sapien
cgtttcagggggaggcgccaactca

SEQ ID NO: 456744 - DNA, 25 bp, Homo sapien
tgcgctcccttcgtttccgtctcgg

SEQ ID NO: 456745 - DNA, 25 bp, Homo sapien
aggaggggcgagacgccgtcgccag

SEQ ID NO: 456746 - DNA, 25 bp, Homo sapien
aggcggccccaatgggagactcccg

SEQ ID NO: 456747 - DNA, 25 bp, Homo sapien
tctaggtcgggtatccacaaattcc

SEQ ID NO: 456748 - DNA, 25 bp, Homo sapien
tgcgagaacataaccctggagaagg

SEQ ID NO: 456749 - DNA, 25 bp, Homo sapien
tgacccacggaggaactccctggaa

SEQ ID NO: 456750 - DNA, 25 bp, Homo sapien
gctgttttcgaagcccttggcccca

SEQ ID NO: 456751 - DNA, 25 bp, Homo sapien
gaaaacgtgaagtgatcggagcccc

SEQ ID NO: 456752 - DNA, 25 bp, Homo sapien
ttggccccaaggtaactgaggtcat

SEQ ID NO: 456753 - DNA, 25 bp, Homo sapien
caaaggccaacagaagtgcagtgta

SEQ ID NO: 456754 - DNA, 25 bp, Homo sapien
caattgttgagataaagaatcatcc

SEQ ID NO: 456755 - DNA, 25 bp, Homo sapien
aaaggaacctttgttgatgggaatg

SEQ ID NO: 456756 - DNA, 25 bp, Homo sapien
actactgagtatatgtccaacaaaa

SEQ ID NO: 456757 - DNA, 25 bp, Homo sapien
tagtacaggcattacgaaaaccagt

SEQ ID NO: 456758 - DNA, 25 bp, Homo sapien
tcttccatgtgatctcaaggcttct

SEQ ID NO: 456759 - DNA, 25 bp, Homo sapien
ctccctgtggtttttccatacagtc

SEQ ID NO: 456760 - DNA, 25 bp, Homo sapien
tacttgtttactagtatagaggcag

SEQ ID NO: 456761 - DNA, 25 bp, Homo sapien
ttcaaacaactggatgctggctgga

SEQ ID NO: 456762 - DNA, 25 bp, Homo sapien
catgtcccaatggtaataagctgag

SEQ ID NO: 456763 - DNA, 25 bp, Homo sapien
tttctccaggataaggcaggatcac

SEQ ID NO: 456764 - DNA, 25 bp, Homo sapien
tcttggcctcttgcataacatttct

SEQ ID NO: 456765 - DNA, 25 bp, Homo sapien
tgaagactgtactgccatgtagaaa

SEQ ID NO: 456766 - DNA, 25 bp, Homo sapien
ggctctcagtttggttaacaatcat

SEQ ID NO: 456767 - DNA, 25 bp, Homo sapien
cacagtgtgatgtatggctctcagt

SEQ ID NO: 456768 - DNA, 25 bp, Homo sapien
cccttcccaaccacagtgtgatgta

SEQ ID NO: 456769 - DNA, 25 bp, Homo sapien
gtatggctctcagtttggttaacaa

SEQ ID NO: 456770 - DNA, 25 bp, Homo sapien
tgggcctctgttgccaaacgagtgg

SEQ ID NO: 456771 - DNA, 25 bp, Homo sapien
tttcacttccaatgctaactgggcc

SEQ ID NO: 456772 - DNA, 25 bp, Homo sapien
aagaactagccaacccactgcagtg

SEQ ID NO: 456773 - DNA, 25 bp, Homo sapien
gattttgtccaccagatttgaggca

SEQ ID NO: 456774 - DNA, 25 bp, Homo sapien
gaggcgtgtcccaatcccaatgtgt

SEQ ID NO: 456775 - DNA, 25 bp, Homo sapien
agtcctagctgaaccctctaaaggg

SEQ ID NO: 456776 - DNA, 25 bp, Homo sapien
tatagtcccatttcgaataagttgt

SEQ ID NO: 456777 - DNA, 25 bp, Homo sapien
tagcactttagcctgttcacaaact

SEQ ID NO: 456778 - DNA, 25 bp, Homo sapien
aactccaaagctgtcagttagctct

SEQ ID NO: 456779 - DNA, 25 bp, Homo sapien
taactccaaagctgtcagttagctc

SEQ ID NO: 456780 - DNA, 25 bp, Homo sapien
ttaactccaaagctgtcagttagct

SEQ ID NO: 456781 - DNA, 25 bp, Homo sapien
gcaaatcattaccctgttttggtta

SEQ ID NO: 456782 - DNA, 25 bp, Homo sapien
acaaagggaaccatactgccactgg

SEQ ID NO: 456783 - DNA, 25 bp, Homo sapien
actggacactggtttccctcactgc

SEQ ID NO: 456784 - DNA, 25 bp, Homo sapien
tgctacatcgccatgggcccctgaa

SEQ ID NO: 456785 - DNA, 25 bp, Homo sapien
actggtttccctcactgctacatcg

SEQ ID NO: 456786 - DNA, 25 bp, Homo sapien
tggcacctggggactggtgtaaggc

SEQ ID NO: 456787 - DNA, 25 bp, Homo sapien
ggcacctggggactggtgtaaggca

SEQ ID NO: 456788 - DNA, 25 bp, Homo sapien
tcggtccagagcacaactagcaccg

SEQ ID NO: 456789 - DNA, 25 bp, Homo sapien
gagcacaactagcaccgctgtcttg

SEQ ID NO: 456790 - DNA, 25 bp, Homo sapien
cctttctcggtccagagcacaacta

SEQ ID NO: 456791 - DNA, 25 bp, Homo sapien
cctacccctttctcggtccagagca

SEQ ID NO: 456792 - DNA, 25 bp, Homo sapien
tgccaggaacagtagctgaatttcc

SEQ ID NO: 456793 - DNA, 25 bp, Homo sapien
ccaggaacagtagctgaatttccat

SEQ ID NO: 456794 - DNA, 25 bp, Homo sapien
cagttgccaggaacagtagctgaat

SEQ ID NO: 456795 - DNA, 25 bp, Homo sapien
gttgccaggaacagtagctgaattt

SEQ ID NO: 456796 - DNA, 25 bp, Homo sapien
ggcacatgctcggacatctagcagt

SEQ ID NO: 456797 - DNA, 25 bp, Homo sapien
ctggctgccctctaggcgtggctca

SEQ ID NO: 456798 - DNA, 25 bp, Homo sapien
taggcgtggctcagtgcaggcacat

SEQ ID NO: 456799 - DNA, 25 bp, Homo sapien
acatctagcagtgcgggtggtagct

SEQ ID NO: 456800 - DNA, 25 bp, Homo sapien
gggcagagcacatgcaaggcaggag

SEQ ID NO: 456801 - DNA, 25 bp, Homo sapien
gcactgggcagagcacatgcaaggc

SEQ ID NO: 456802 - DNA, 25 bp, Homo sapien
actgggcagagcacatgcaaggcag

SEQ ID NO: 456803 - DNA, 25 bp, Homo sapien
tgggcagagcacatgcaaggcagga

SEQ ID NO: 456804 - DNA, 25 bp, Homo sapien
ttgcatattgagtgtatacaaggct

SEQ ID NO: 456805 - DNA, 25 bp, Homo sapien
cagggcttcttgcatattgagtgta

SEQ ID NO: 456806 - DNA, 25 bp, Homo sapien
tgatctggtcctgtttcagccaggc

SEQ ID NO: 456807 - DNA, 25 bp, Homo sapien
gatttgagagatgatctggtcctgt

SEQ ID NO: 456808 - DNA, 25 bp, Homo sapien
gcctttctcctccgagtaattcagg

SEQ ID NO: 456809 - DNA, 25 bp, Homo sapien
tgcctttctcctccgagtaattcag

SEQ ID NO: 456810 - DNA, 25 bp, Homo sapien
caagacactgaatggaaaaaatata

SEQ ID NO: 456811 - DNA, 25 bp, Homo sapien
taaaacaagacactgaatggaaaaa

SEQ ID NO: 456812 - DNA, 25 bp, Homo sapien
gaaatatatgtgctcagatttaact

SEQ ID NO: 456813 - DNA, 25 bp, Homo sapien
aatatatgtgctcagatttaacttc

SEQ ID NO: 456814 - DNA, 25 bp, Homo sapien
tacatattactctcaggtatatttc

SEQ ID NO: 456815 - DNA, 25 bp, Homo sapien
tacctccctttctcctaatacatat

SEQ ID NO: 456816 - DNA, 25 bp, Homo sapien
tatacctccctttctcctaatacat

SEQ ID NO: 456817 - DNA, 25 bp, Homo sapien
ttctcctaatacatattactctcag

SEQ ID NO: 456818 - DNA, 25 bp, Homo sapien
gccctggcataaactctatccactt

SEQ ID NO: 456819 - DNA, 25 bp, Homo sapien
ggagaaaccagaacgcagccctggc

SEQ ID NO: 456820 - DNA, 25 bp, Homo sapien
ggcataaactctatccactttcctc

SEQ ID NO: 456821 - DNA, 25 bp, Homo sapien
gaacgcagccctggcataaactcta

SEQ ID NO: 456822 - DNA, 25 bp, Homo sapien
tcctagcctgtagcaggctgagtgc

SEQ ID NO: 456823 - DNA, 25 bp, Homo sapien
ggatgattcctagcctgtagcaggc

SEQ ID NO: 456824 - DNA, 25 bp, Homo sapien
ggtctcattgggatgattcctagcc

SEQ ID NO: 456825 - DNA, 25 bp, Homo sapien
ggctgagtgcaacagcaaatgcttc

SEQ ID NO: 456826 - DNA, 25 bp, Homo sapien
ggtggtttgtcaacatatttctgat

SEQ ID NO: 456827 - DNA, 25 bp, Homo sapien
ctttagaaatctatgtgaagataat

SEQ ID NO: 456828 - DNA, 25 bp, Homo sapien
cccaaaaggtggtttgtcaacatat

SEQ ID NO: 456829 - DNA, 25 bp, Homo sapien
cttctttagaaatctatgtgaagat

SEQ ID NO: 456830 - DNA, 25 bp, Homo sapien
tggatatccataatttaactttgct

SEQ ID NO: 456831 - DNA, 25 bp, Homo sapien
taactttgcttgttgttggttcaga

SEQ ID NO: 456832 - DNA, 25 bp, Homo sapien
cttctatagactcccttggatatcc

SEQ ID NO: 456833 - DNA, 25 bp, Homo sapien
cttgcatggaccttctatagactcc

SEQ ID NO: 456834 - DNA, 25 bp, Homo sapien
tctcctggaacaactattcttgatt

SEQ ID NO: 456835 - DNA, 25 bp, Homo sapien
tccaaaattcaggacccaaattcag

SEQ ID NO: 456836 - DNA, 25 bp, Homo sapien
cttttgtgtctaaactatctttggg

SEQ ID NO: 456837 - DNA, 25 bp, Homo sapien
tactgtaatggctattaggtaacac

SEQ ID NO: 456838 - DNA, 25 bp, Homo sapien
ggatatctagttcagacaagtagtc

SEQ ID NO: 456839 - DNA, 25 bp, Homo sapien
tagttcagacaagtagtcaaaatgt

SEQ ID NO: 456840 - DNA, 25 bp, Homo sapien
caagggatatctagttcagacaagt

SEQ ID NO: 456841 - DNA, 25 bp, Homo sapien
gcacattcaagggatatctagttca

SEQ ID NO: 456842 - DNA, 25 bp, Homo sapien
ggatctgcagattggagctcttcct

SEQ ID NO: 456843 - DNA, 25 bp, Homo sapien
acgttgctcacactgggatctgcag

SEQ ID NO: 456844 - DNA, 25 bp, Homo sapien
cgtcttccacgttgctcacactggg

SEQ ID NO: 456845 - DNA, 25 bp, Homo sapien
cactgggatctgcagattggagctc

SEQ ID NO: 456846 - DNA, 25 bp, Homo sapien
tttctctctatgcttctcttcttgc

SEQ ID NO: 456847 - DNA, 25 bp, Homo sapien
ttacttttttctctctatgcttctc

SEQ ID NO: 456848 - DNA, 25 bp, Homo sapien
catgcgtcacatagttcttgtgctg

SEQ ID NO: 456849 - DNA, 25 bp, Homo sapien
gcatgcgtcacatagttcttgtgct

SEQ ID NO: 456850 - DNA, 25 bp, Homo sapien
gcagatttctcatcagaaactatgg

SEQ ID NO: 456851 - DNA, 25 bp, Homo sapien
agatttctcatcagaaactatggag

SEQ ID NO: 456852 - DNA, 25 bp, Homo sapien
gatttctcatcagaaactatggagg

SEQ ID NO: 456853 - DNA, 25 bp, Homo sapien
tttctcatcagaaactatggaggac

SEQ ID NO: 456854 - DNA, 25 bp, Homo sapien
taatttgtttggttgaagctgacgc

SEQ ID NO: 456855 - DNA, 25 bp, Homo sapien
ctacatgctgcattacatttcataa

SEQ ID NO: 456856 - DNA, 25 bp, Homo sapien
tccttcttgcttactgattacatct

SEQ ID NO: 456857 - DNA, 25 bp, Homo sapien
taatgaaacagggagcaatactatc

SEQ ID NO: 456858 - DNA, 25 bp, Homo sapien
tccatttctgatacggagatggatg

SEQ ID NO: 456859 - DNA, 25 bp, Homo sapien
tggttccatttctgatacggagatg

SEQ ID NO: 456860 - DNA, 25 bp, Homo sapien
ccatttctgatacggagatggatgg

SEQ ID NO: 456861 - DNA, 25 bp, Homo sapien
tatgaacaggagatctgaaatggcc

SEQ ID NO: 456862 - DNA, 25 bp, Homo sapien
ttaacagaacccgaatgatcagcag

SEQ ID NO: 456863 - DNA, 25 bp, Homo sapien
catgtcgtcaagtggacggtcctca

SEQ ID NO: 456864 - DNA, 25 bp, Homo sapien
taagataatagtcagccctgaaggg

SEQ ID NO: 456865 - DNA, 25 bp, Homo sapien
tccccagcaaagtaatagagcagag

SEQ ID NO: 456866 - DNA, 25 bp, Homo sapien
gcagtctgtctttgcataaacccac

SEQ ID NO: 456867 - DNA, 25 bp, Homo sapien
cagaggattgaagcaggcattggct

SEQ ID NO: 456868 - DNA, 25 bp, Homo sapien
gccaaggccagtgtgataaccaaag

SEQ ID NO: 456869 - DNA, 25 bp, Homo sapien
tactcttgtttcctttctcaaccac

SEQ ID NO: 456870 - DNA, 25 bp, Homo sapien
ttatactcttgtttcctttctcaac

SEQ ID NO: 456871 - DNA, 25 bp, Homo sapien
cttgtttcctttctcaaccacacac

SEQ ID NO: 456872 - DNA, 25 bp, Homo sapien
actcttgtttcctttctcaaccaca

SEQ ID NO: 456873 - DNA, 25 bp, Homo sapien
gaacctctctcccaatgcaaaatga

SEQ ID NO: 456874 - DNA, 25 bp, Homo sapien
ggtcaactaacctgcatctcaaaga

SEQ ID NO: 456875 - DNA, 25 bp, Homo sapien
tttcagcccacaggactctagtagg

SEQ ID NO: 456876 - DNA, 25 bp, Homo sapien
gagtgctcaaccctaatcctcagag

SEQ ID NO: 456877 - DNA, 25 bp, Homo sapien
tgactgacttagtccctccctactt

SEQ ID NO: 456878 - DNA, 25 bp, Homo sapien
acctccaccctttactgtactatga

SEQ ID NO: 456879 - DNA, 25 bp, Homo sapien
actatgagtcaacaactctgaagag

SEQ ID NO: 456880 - DNA, 25 bp, Homo sapien
ttcagaatgccatatcacctccacc

SEQ ID NO: 456881 - DNA, 25 bp, Homo sapien
aagttaggcaattacacagttcgta

SEQ ID NO: 456882 - DNA, 25 bp, Homo sapien
aatatggttgtacagctattcatca

SEQ ID NO: 456883 - DNA, 25 bp, Homo sapien
tctacctgtatttacctcctattgc

SEQ ID NO: 456884 - DNA, 25 bp, Homo sapien
gcttctccatagaggtaacccctgc

SEQ ID NO: 456885 - DNA, 25 bp, Homo sapien
tgtgactgtccttctagggtcctgc

SEQ ID NO: 456886 - DNA, 25 bp, Homo sapien
tgactgtccttctagggtcctgcat

SEQ ID NO: 456887 - DNA, 25 bp, Homo sapien
tctaagaggggtagtctggtctgca

SEQ ID NO: 456888 - DNA, 25 bp, Homo sapien
taaattgtttatgcctgagcttttc

SEQ ID NO: 456889 - DNA, 25 bp, Homo sapien
tggtctgcagcagtactgggtaggg

SEQ ID NO: 456890 - DNA, 25 bp, Homo sapien
ggttggtttggaatccaagatgcct

SEQ ID NO: 456891 - DNA, 25 bp, Homo sapien
gctttgtctgtaggcatctgccttt

SEQ ID NO: 456892 - DNA, 25 bp, Homo sapien
tcatggggctttccatcttgtcctt

SEQ ID NO: 456893 - DNA, 25 bp, Homo sapien
tttccatcttgtcctttctgcattg

SEQ ID NO: 456894 - DNA, 25 bp, Homo sapien
gatatttgggctagtttgggctctg

SEQ ID NO: 456895 - DNA, 25 bp, Homo sapien
catacgctggaaatctaggctctta

SEQ ID NO: 456896 - DNA, 25 bp, Homo sapien
gccacaatggatgctaagagacagt

SEQ ID NO: 456897 - DNA, 25 bp, Homo sapien
gacagtgcagcaaaatgggtagagc

SEQ ID NO: 456898 - DNA, 25 bp, Homo sapien
tagaggtgcggctttactctgagcc

SEQ ID NO: 456899 - DNA, 25 bp, Homo sapien
gctgtgctttactagtgggttctcc

SEQ ID NO: 456900 - DNA, 25 bp, Homo sapien
tctctccagcgaatttgccaatacg

SEQ ID NO: 456901 - DNA, 25 bp, Homo sapien
gctgtgctttactagtgggttctct

SEQ ID NO: 456902 - DNA, 25 bp, Homo sapien
tgccaatacgacctggcacacagag

SEQ ID NO: 456903 - DNA, 25 bp, Homo sapien
cccagagggttgaagttgtgctacc

SEQ ID NO: 456904 - DNA, 25 bp, Homo sapien
gttgaagttgtgctaccagcagctc

SEQ ID NO: 456905 - DNA, 25 bp, Homo sapien
gctaccagcagctctataggctgat

SEQ ID NO: 456906 - DNA, 25 bp, Homo sapien
aggctgattttcagagacactaggg

SEQ ID NO: 456907 - DNA, 25 bp, Homo sapien
gaagcgcctgcaggaaatgacaggt

SEQ ID NO: 456908 - DNA, 25 bp, Homo sapien
gcgtgccccggcagtcattactgtg

SEQ ID NO: 456909 - DNA, 25 bp, Homo sapien
aagctgcttgctgtgtgcgtgcccc

SEQ ID NO: 456910 - DNA, 25 bp, Homo sapien
agaacagcagggcagcacggcaaag

SEQ ID NO: 456911 - DNA, 25 bp, Homo sapien
acctccatgtcagtaacaatctgaa

SEQ ID NO: 456912 - DNA, 25 bp, Homo sapien
ctgaaccagtcttacatttgccaca

SEQ ID NO: 456913 - DNA, 25 bp, Homo sapien
aatctgaaccagtcttacatttgcc

SEQ ID NO: 456914 - DNA, 25 bp, Homo sapien
agtaacaatctgaaccagtcttaca

SEQ ID NO: 456915 - DNA, 25 bp, Homo sapien
ctctatgaccttgggagggcctcct

SEQ ID NO: 456916 - DNA, 25 bp, Homo sapien
tctgttagttgggtgcttaatgggc

SEQ ID NO: 456917 - DNA, 25 bp, Homo sapien
tccacaggcggtatgaaggaattag

SEQ ID NO: 456918 - DNA, 25 bp, Homo sapien
gacattgcccctctaatggtcttca

SEQ ID NO: 456919 - DNA, 25 bp, Homo sapien
catgactgaatggtgtcatgaaggg

SEQ ID NO: 456920 - DNA, 25 bp, Homo sapien
catggagttgactcatttggctgct

SEQ ID NO: 456921 - DNA, 25 bp, Homo sapien
gcagggcgctggctatcccattttg

SEQ ID NO: 456922 - DNA, 25 bp, Homo sapien
aaaaacactgctttgcagagaaaag

SEQ ID NO: 456923 - DNA, 25 bp, Homo sapien
cactggtgggggcactgatggtctt

SEQ ID NO: 456924 - DNA, 25 bp, Homo sapien
gtgggggcactgatggtcttgacca

SEQ ID NO: 456925 - DNA, 25 bp, Homo sapien
tggtgggggcactgatggtcttgac

SEQ ID NO: 456926 - DNA, 25 bp, Homo sapien
tgggggcactgatggtcttgaccat

SEQ ID NO: 456927 - DNA, 25 bp, Homo sapien
ctgagatcagatgaggtcaggcatg

SEQ ID NO: 456928 - DNA, 25 bp, Homo sapien
atcagatgaggtcaggcatgttcag

SEQ ID NO: 456929 - DNA, 25 bp, Homo sapien
cccgacctttcttagcttctgagat

SEQ ID NO: 456930 - DNA, 25 bp, Homo sapien
caggcccgacctttcttagcttctg

SEQ ID NO: 456931 - DNA, 25 bp, Homo sapien
cctgtttgcgctcaggcgcacccta

SEQ ID NO: 456932 - DNA, 25 bp, Homo sapien
ctccacctgtttgcgctcaggcgca

SEQ ID NO: 456933 - DNA, 25 bp, Homo sapien
tgtttgcgctcaggcgcaccctaca

SEQ ID NO: 456934 - DNA, 25 bp, Homo sapien
cacctgtttgcgctcaggcgcaccc

SEQ ID NO: 456935 - DNA, 25 bp, Homo sapien
agggagccctctcgcaagagctgat

SEQ ID NO: 456936 - DNA, 25 bp, Homo sapien
actgagggagccctctcgcaagagc

SEQ ID NO: 456937 - DNA, 25 bp, Homo sapien
caagaatctgtagaggaattcctca

SEQ ID NO: 456938 - DNA, 25 bp, Homo sapien
gagccctctcgcaagagctgattca

SEQ ID NO: 456939 - DNA, 25 bp, Homo sapien
gggcccggagggaagtcaggtcagc

SEQ ID NO: 456940 - DNA, 25 bp, Homo sapien
tctcatcatccttgggtggagggtc

SEQ ID NO: 456941 - DNA, 25 bp, Homo sapien
ttccatctcatcatccttgggtgga

SEQ ID NO: 456942 - DNA, 25 bp, Homo sapien
cccggagggaagtcaggtcagccac

SEQ ID NO: 456943 - DNA, 25 bp, Homo sapien
ccagggcaagcagggacaggacttt

SEQ ID NO: 456944 - DNA, 25 bp, Homo sapien
tgaatttctctttgagagtccagaa

SEQ ID NO: 456945 - DNA, 25 bp, Homo sapien
gtccagaattctggcttaaccaggg

SEQ ID NO: 456946 - DNA, 25 bp, Homo sapien
attaggtgctggatccatgtaatca

SEQ ID NO: 456947 - DNA, 25 bp, Homo sapien
tctccagcaccttctcctggattgc

SEQ ID NO: 456948 - DNA, 25 bp, Homo sapien
tccagcaccttctcctggattgcta

SEQ ID NO: 456949 - DNA, 25 bp, Homo sapien
cctctccagcaccttctcctggatt

SEQ ID NO: 456950 - DNA, 25 bp, Homo sapien
ccagcaccttctcctggattgctac

SEQ ID NO: 456951 - DNA, 25 bp, Homo sapien
aatggttgtctggaaagcttccact

SEQ ID NO: 456952 - DNA, 25 bp, Homo sapien
gaaatggttgtctggaaagcttcca

SEQ ID NO: 456953 - DNA, 25 bp, Homo sapien
tggttgtctggaaagcttccacttt

SEQ ID NO: 456954 - DNA, 25 bp, Homo sapien
ttggaaatggttgtctggaaagctt

SEQ ID NO: 456955 - DNA, 25 bp, Homo sapien
aggttgctgttgatgatatgataaa

SEQ ID NO: 456956 - DNA, 25 bp, Homo sapien
cctttgggttgacaattttctccag

SEQ ID NO: 456957 - DNA, 25 bp, Homo sapien
taaagctcagcatagaaggccctca

SEQ ID NO: 456958 - DNA, 25 bp, Homo sapien
atggccctgagctccccataggctg

SEQ ID NO: 456959 - DNA, 25 bp, Homo sapien
catttattttccttctagtcctggg

SEQ ID NO: 456960 - DNA, 25 bp, Homo sapien
aacatatagatcatttattttcctt

SEQ ID NO: 456961 - DNA, 25 bp, Homo sapien
acatatagatcatttattttccttc

SEQ ID NO: 456962 - DNA, 25 bp, Homo sapien
gatcatttattttccttctagtcct

SEQ ID NO: 456963 - DNA, 25 bp, Homo sapien
tagctgctggatagtagcccttcct

SEQ ID NO: 456964 - DNA, 25 bp, Homo sapien
gcagccccttcttgagctgatgtgt

SEQ ID NO: 456965 - DNA, 25 bp, Homo sapien
tcttctggttgagcacaaacatgtc

SEQ ID NO: 456966 - DNA, 25 bp, Homo sapien
aacatgtcgggctcagttattcctg

SEQ ID NO: 456967 - DNA, 25 bp, Homo sapien
acattcctgctaactactctgtctc

SEQ ID NO: 456968 - DNA, 25 bp, Homo sapien
ttgggcaaacttcccaatgatgtgg

SEQ ID NO: 456969 - DNA, 25 bp, Homo sapien
aattagttgggcaaacttcccaatg

SEQ ID NO: 456970 - DNA, 25 bp, Homo sapien
tcaactcgaattagttgggcaaact

SEQ ID NO: 456971 - DNA, 25 bp, Homo sapien
acagatctgtatttctcagggcagg

SEQ ID NO: 456972 - DNA, 25 bp, Homo sapien
cagggcaggacatggttcattaagc

SEQ ID NO: 456973 - DNA, 25 bp, Homo sapien
aggacatggttcattaagcttctgc

SEQ ID NO: 456974 - DNA, 25 bp, Homo sapien
tctgtatttctcagggcaggacatg

SEQ ID NO: 456975 - DNA, 25 bp, Homo sapien
ggtcactctgacaagtgctggccat

SEQ ID NO: 456976 - DNA, 25 bp, Homo sapien
cacggtacagtgactttcacattta

SEQ ID NO: 456977 - DNA, 25 bp, Homo sapien
cacatttaaagacttggtcactctg

SEQ ID NO: 456978 - DNA, 25 bp, Homo sapien
gaaatcctggataccccacggtaca

SEQ ID NO: 456979 - DNA, 25 bp, Homo sapien
tccagctgtgtgctgtattgctgca

SEQ ID NO: 456980 - DNA, 25 bp, Homo sapien
cttaaatttctgtatgtttctgctg

SEQ ID NO: 456981 - DNA, 25 bp, Homo sapien
ccagacatacagtgctgactgaaca

SEQ ID NO: 456982 - DNA, 25 bp, Homo sapien
tgctgccagacatacagtgctgact

SEQ ID NO: 456983 - DNA, 25 bp, Homo sapien
aaatttctgtatgtttctgctgcca

SEQ ID NO: 456984 - DNA, 25 bp, Homo sapien
gatttgctgcactgatcctccagcc

SEQ ID NO: 456985 - DNA, 25 bp, Homo sapien
tcccctgatttgctgcactgatcct

SEQ ID NO: 456986 - DNA, 25 bp, Homo sapien
cctgatttgctgcactgatcctcca

SEQ ID NO: 456987 - DNA, 25 bp, Homo sapien
ctcccctgatttgctgcactgatcc

SEQ ID NO: 456988 - DNA, 25 bp, Homo sapien
tttctacatgcaatggattatccac

SEQ ID NO: 456989 - DNA, 25 bp, Homo sapien
agtgaaggcatctcaccacagaggg

SEQ ID NO: 456990 - DNA, 25 bp, Homo sapien
acatgcaatggattatccacaagag

SEQ ID NO: 456991 - DNA, 25 bp, Homo sapien
ggccagtgcaaatagtgaaggcatc

SEQ ID NO: 456992 - DNA, 25 bp, Homo sapien
aatggtcaactgtgttagctgtgcc

SEQ ID NO: 456993 - DNA, 25 bp, Homo sapien
gtcaataggagcatgagaatggtca

SEQ ID NO: 456994 - DNA, 25 bp, Homo sapien
caactgtgttagctgtgccaaaagc

SEQ ID NO: 456995 - DNA, 25 bp, Homo sapien
catgagaatggtcaactgtgttagc

SEQ ID NO: 456996 - DNA, 25 bp, Homo sapien
ggtgcccttggtcatagaatagtta

SEQ ID NO: 456997 - DNA, 25 bp, Homo sapien
ctgggtataaacctggacaaagttg

SEQ ID NO: 456998 - DNA, 25 bp, Homo sapien
aagcagatcacaaagaccattttct

SEQ ID NO: 456999 - DNA, 25 bp, Homo sapien
tttttgaccactctttcctaagcag

SEQ ID NO: 457000 - DNA, 25 bp, Homo sapien
tctccagtcagcaccgggaaatctg

SEQ ID NO: 457001 - DNA, 25 bp, Homo sapien
tcctagatatgtgagtgggtcccct

SEQ ID NO: 457002 - DNA, 25 bp, Homo sapien
cagctagcatattaatgggatacat

SEQ ID NO: 457003 - DNA, 25 bp, Homo sapien
tgggatacatgatgccgattttctc

SEQ ID NO: 457004 - DNA, 25 bp, Homo sapien
cgtataaagtgaggcgttggtggct

SEQ ID NO: 457005 - DNA, 25 bp, Homo sapien
tcgtataaagtgaggcgttggtggc

SEQ ID NO: 457006 - DNA, 25 bp, Homo sapien
ttcgtataaagtgaggcgttggtgg

SEQ ID NO: 457007 - DNA, 25 bp, Homo sapien
gttatcattgaataggacaggtttg

SEQ ID NO: 457008 - DNA, 25 bp, Homo sapien
tgttatcattgaataggacaggttt

SEQ ID NO: 457009 - DNA, 25 bp, Homo sapien
cttctgggtctagatgttatcattg

SEQ ID NO: 457010 - DNA, 25 bp, Homo sapien
ctgggtctagatgttatcattgaat

SEQ ID NO: 457011 - DNA, 25 bp, Homo sapien
tgtaggagctgttgatgagttccat

SEQ ID NO: 457012 - DNA, 25 bp, Homo sapien
attgtaggagctgttgatgagttcc

SEQ ID NO: 457013 - DNA, 25 bp, Homo sapien
ttgtaggagctgttgatgagttcca

SEQ ID NO: 457014 - DNA, 25 bp, Homo sapien
tgcttcctctcaggaacgctaatgt

SEQ ID NO: 457015 - DNA, 25 bp, Homo sapien
acgctaatgtataagacacatggag

SEQ ID NO: 457016 - DNA, 25 bp, Homo sapien
aactgttattgattcgatttatttc

SEQ ID NO: 457017 - DNA, 25 bp, Homo sapien
tttccataatggttgcgttctgctt

SEQ ID NO: 457018 - DNA, 25 bp, Homo sapien
tgaagaagggcacttattgaaaggt

SEQ ID NO: 457019 - DNA, 25 bp, Homo sapien
tgagaagtcaatttagctctaaaga

SEQ ID NO: 457020 - DNA, 25 bp, Homo sapien
atttagctctaaagatatcctgtgg

SEQ ID NO: 457021 - DNA, 25 bp, Homo sapien
gaagggcacttattgaaaggtatta

SEQ ID NO: 457022 - DNA, 25 bp, Homo sapien
gcattgctgcatatcgatcctgaat

SEQ ID NO: 457023 - DNA, 25 bp, Homo sapien
cattgctgcatatcgatcctgaatt

SEQ ID NO: 457024 - DNA, 25 bp, Homo sapien
actgcattgctgcatatcgatcctg

SEQ ID NO: 457025 - DNA, 25 bp, Homo sapien
tgcattgctgcatatcgatcctgaa

SEQ ID NO: 457026 - DNA, 25 bp, Homo sapien
gggatagaggtacacgatatagtaa

SEQ ID NO: 457027 - DNA, 25 bp, Homo sapien
tagaggtacacgatatagtaaaggg

SEQ ID NO: 457028 - DNA, 25 bp, Homo sapien
gaggtacacgatatagtaaagggta

SEQ ID NO: 457029 - DNA, 25 bp, Homo sapien
ccagggatagaggtacacgatatag

SEQ ID NO: 457030 - DNA, 25 bp, Homo sapien
tctggctctgggtaagcgaggtcct

SEQ ID NO: 457031 - DNA, 25 bp, Homo sapien
tggctctgggtaagcgaggtcctgc

SEQ ID NO: 457032 - DNA, 25 bp, Homo sapien
aattctggctctgggtaagcgaggt

SEQ ID NO: 457033 - DNA, 25 bp, Homo sapien
gctctgggtaagcgaggtcctgcat

SEQ ID NO: 457034 - DNA, 25 bp, Homo sapien
taagaatccaatatcgtgggccagg

SEQ ID NO: 457035 - DNA, 25 bp, Homo sapien
ttaaatagcccctgttgtagctgcc

SEQ ID NO: 457036 - DNA, 25 bp, Homo sapien
caagatgtgactgccaaaacgaagc

SEQ ID NO: 457037 - DNA, 25 bp, Homo sapien
ttggtattacaagatcggagagcga

SEQ ID NO: 457038 - DNA, 25 bp, Homo sapien
agtaggtgctactcatcagtattgc

SEQ ID NO: 457039 - DNA, 25 bp, Homo sapien
gccggctggcagctgtctcagttga

SEQ ID NO: 457040 - DNA, 25 bp, Homo sapien
tcagtattgcccatgttgtacggat

SEQ ID NO: 457041 - DNA, 25 bp, Homo sapien
tctcagttgattggtctctgcagca

SEQ ID NO: 457042 - DNA, 25 bp, Homo sapien
ttcccaggtgcctttacagctgtga

SEQ ID NO: 457043 - DNA, 25 bp, Homo sapien
caggtgcctttacagctgtgaagtc

SEQ ID NO: 457044 - DNA, 25 bp, Homo sapien
gcctttacagctgtgaagtcagaga

SEQ ID NO: 457045 - DNA, 25 bp, Homo sapien
ggtgcctttacagctgtgaagtcag

SEQ ID NO: 457046 - DNA, 25 bp, Homo sapien
gtagcacagtcaggagtcaccaggt

SEQ ID NO: 457047 - DNA, 25 bp, Homo sapien
tgggtagcacagtcaggagtcacca

SEQ ID NO: 457048 - DNA, 25 bp, Homo sapien
ggtagcacagtcaggagtcaccagg

SEQ ID NO: 457049 - DNA, 25 bp, Homo sapien
cttgggtagcacagtcaggagtcac

SEQ ID NO: 457050 - DNA, 25 bp, Homo sapien
gcaatggacatgctgatgtctgctg

SEQ ID NO: 457051 - DNA, 25 bp, Homo sapien
gaaatcactggttgggcttccagtc

SEQ ID NO: 457052 - DNA, 25 bp, Homo sapien
tgctacagaaatcactggttgggct

SEQ ID NO: 457053 - DNA, 25 bp, Homo sapien
gggcttccagtcttggtgcaatgga

SEQ ID NO: 457054 - DNA, 25 bp, Homo sapien
tgaaagcatagggtgcagaaagcac

SEQ ID NO: 457055 - DNA, 25 bp, Homo sapien
gatttgaggataagtgtggtctcca

SEQ ID NO: 457056 - DNA, 25 bp, Homo sapien
taagaggcatgtcgttgagaagaac

SEQ ID NO: 457057 - DNA, 25 bp, Homo sapien
tgaagtacacaagcattaagaggca

SEQ ID NO: 457058 - DNA, 25 bp, Homo sapien
taccaaattgaaagtatgaaattcc

SEQ ID NO: 457059 - DNA, 25 bp, Homo sapien
tagaagtatggtgtgataaagtaaa

SEQ ID NO: 457060 - DNA, 25 bp, Homo sapien
tgataaagtaaaatttagactgtgt

SEQ ID NO: 457061 - DNA, 25 bp, Homo sapien
tcttcatgagattcccatttagaag

SEQ ID NO: 457062 - DNA, 25 bp, Homo sapien
cctggaacctcaaacaatgtgggac

SEQ ID NO: 457063 - DNA, 25 bp, Homo sapien
tacaagtgagcgtagcagcgacttc

SEQ ID NO: 457064 - DNA, 25 bp, Homo sapien
tgtgggacgctgcaataatgcctga

SEQ ID NO: 457065 - DNA, 25 bp, Homo sapien
ttttgacttacagttgccgccggag

SEQ ID NO: 457066 - DNA, 25 bp, Homo sapien
gaccacgaacgccgccgccgccatg

SEQ ID NO: 457067 - DNA, 25 bp, Homo sapien
acgaacgccgccgccgccatgctta

SEQ ID NO: 457068 - DNA, 25 bp, Homo sapien
ccacgaacgccgccgccgccatgct

SEQ ID NO: 457069 - DNA, 25 bp, Homo sapien
cgagggaccacgaacgccgccgccg

SEQ ID NO: 457070 - DNA, 25 bp, Homo sapien
ccgctcttcgctccctctccgcgta

SEQ ID NO: 457071 - DNA, 25 bp, Homo sapien
tcttcgctccctctccgcgtagctc

SEQ ID NO: 457072 - DNA, 25 bp, Homo sapien
gccccgctcttcgctccctctccgc

SEQ ID NO: 457073 - DNA, 25 bp, Homo sapien
cttcgctccctctccgcgtagctcc

SEQ ID NO: 457074 - DNA, 25 bp, Homo sapien
gttcctgatcgttgtctctctacct

SEQ ID NO: 457075 - DNA, 25 bp, Homo sapien
tgttggggttgtttcctggcagtga

SEQ ID NO: 457076 - DNA, 25 bp, Homo sapien
cttagggttcctgatcgttgtctct

SEQ ID NO: 457077 - DNA, 25 bp, Homo sapien
gccgccggcgcgctgactgttgggg

SEQ ID NO: 457078 - DNA, 25 bp, Homo sapien
gagtcacgccgttctgaggcagaag

SEQ ID NO: 457079 - DNA, 25 bp, Homo sapien
agtcacgccgttctgaggcagaagg

SEQ ID NO: 457080 - DNA, 25 bp, Homo sapien
ctccgagtcacgccgttctgaggca

SEQ ID NO: 457081 - DNA, 25 bp, Homo sapien
ccgagtcacgccgttctgaggcaga

SEQ ID NO: 457082 - DNA, 25 bp, Homo sapien
caaagccgtgtcaaaagttcgaaga

SEQ ID NO: 457083 - DNA, 25 bp, Homo sapien
gactgaacaggtggttaactcgccc

SEQ ID NO: 457084 - DNA, 25 bp, Homo sapien
agcagccacgcaggatcaaacagag

SEQ ID NO: 457085 - DNA, 25 bp, Homo sapien
cagaaaagcgttcaagttcggcggc

SEQ ID NO: 457086 - DNA, 25 bp, Homo sapien
tcaaccgagactgtaaatggcctgc

SEQ ID NO: 457087 - DNA, 25 bp, Homo sapien
gcagtcagcaaactaggtcccctgg

SEQ ID NO: 457088 - DNA, 25 bp, Homo sapien
gccaattattacctagcagtcagca

SEQ ID NO: 457089 - DNA, 25 bp, Homo sapien
gcactctacacaaaaagttggccga

SEQ ID NO: 457090 - DNA, 25 bp, Homo sapien
aaatgaatgatatgcaggatgcctg

SEQ ID NO: 457091 - DNA, 25 bp, Homo sapien
tgtaaaatgaacgaaccaaggctca

SEQ ID NO: 457092 - DNA, 25 bp, Homo sapien
gagaagtcaactaacaatcctgtgg

SEQ ID NO: 457093 - DNA, 25 bp, Homo sapien
tcatacaggtaaagtagcacactca

SEQ ID NO: 457094 - DNA, 25 bp, Homo sapien
tgaaactgccactgaggtcaaaaac

SEQ ID NO: 457095 - DNA, 25 bp, Homo sapien
catttttatatacagggcagtgatt

SEQ ID NO: 457096 - DNA, 25 bp, Homo sapien
caatttaacctaatgaaagtgttca

SEQ ID NO: 457097 - DNA, 25 bp, Homo sapien
ggcagtgattatagccatagtttca

SEQ ID NO: 457098 - DNA, 25 bp, Homo sapien
tttagtatatgtgctgccaaagcac

SEQ ID NO: 457099 - DNA, 25 bp, Homo sapien
ctaatcttctctgcatcgttccaat

SEQ ID NO: 457100 - DNA, 25 bp, Homo sapien
gtgtcatccttgcacaggggccatg

SEQ ID NO: 457101 - DNA, 25 bp, Homo sapien
aatacagaacgcttcatgaatttgt

SEQ ID NO: 457102 - DNA, 25 bp, Homo sapien
gacaaagtctaacatgccattaatg

SEQ ID NO: 457103 - DNA, 25 bp, Homo sapien
gacttgcttttacgatggattaggc

SEQ ID NO: 457104 - DNA, 25 bp, Homo sapien
tgtggctaagggactcggacaaagt

SEQ ID NO: 457105 - DNA, 25 bp, Homo sapien
tggattaggcaagaacagagctgca

SEQ ID NO: 457106 - DNA, 25 bp, Homo sapien
catacaagcattcggttttccactt

SEQ ID NO: 457107 - DNA, 25 bp, Homo sapien
cagtattcgataaattacacgagac

SEQ ID NO: 457108 - DNA, 25 bp, Homo sapien
gattttgttcatcaaccatatgata

SEQ ID NO: 457109 - DNA, 25 bp, Homo sapien
accatacatcaagtatccatacaag

SEQ ID NO: 457110 - DNA, 25 bp, Homo sapien
ggatttgtatcagatgtgcacacta

SEQ ID NO: 457111 - DNA, 25 bp, Homo sapien
gaacattagcaagattacactttcc

SEQ ID NO: 457112 - DNA, 25 bp, Homo sapien
gtaatatcattctagtgaaacacag

SEQ ID NO: 457113 - DNA, 25 bp, Homo sapien
gtaccatccatttgactgtcaagcc

SEQ ID NO: 457114 - DNA, 25 bp, Homo sapien
acaaaaaggctacaactaagattgt

SEQ ID NO: 457115 - DNA, 25 bp, Homo sapien
caagatttggtacacaaaaaggcta

SEQ ID NO: 457116 - DNA, 25 bp, Homo sapien
aaaggctacaactaagattgttatg

SEQ ID NO: 457117 - DNA, 25 bp, Homo sapien
cagtacaagatttggtacacaaaaa

SEQ ID NO: 457118 - DNA, 25 bp, Homo sapien
catctctgtatgacttataatacct

SEQ ID NO: 457119 - DNA, 25 bp, Homo sapien
catatttagtacagatgcaacaatc

SEQ ID NO: 457120 - DNA, 25 bp, Homo sapien
aaagaaaagctctgtacatatttag

SEQ ID NO: 457121 - DNA, 25 bp, Homo sapien
tgctacgtaaatagtgacactgtat

SEQ ID NO: 457122 - DNA, 25 bp, Homo sapien
taatatactgaataacgctccaatt

SEQ ID NO: 457123 - DNA, 25 bp, Homo sapien
tatcaataagacattaatatactga

SEQ ID NO: 457124 - DNA, 25 bp, Homo sapien
taagacattaatatactgaataacg

SEQ ID NO: 457125 - DNA, 25 bp, Homo sapien
acattaatatactgaataacgctcc

SEQ ID NO: 457126 - DNA, 25 bp, Homo sapien
aagagaaatatcactacttaagatc

SEQ ID NO: 457127 - DNA, 25 bp, Homo sapien
tgttccatctgcacttacaataggg

SEQ ID NO: 457128 - DNA, 25 bp, Homo sapien
ccagtagtggtggatgttctgccat

SEQ ID NO: 457129 - DNA, 25 bp, Homo sapien
ttaagatctgagttgtatccagtag

SEQ ID NO: 457130 - DNA, 25 bp, Homo sapien
caatcctagtatctaataaaacgac

SEQ ID NO: 457131 - DNA, 25 bp, Homo sapien
tgtgcactcaatacaggagcaccaa

SEQ ID NO: 457132 - DNA, 25 bp, Homo sapien
gcaaatttgataaaaagtcaggacc

SEQ ID NO: 457133 - DNA, 25 bp, Homo sapien
tcaatacaggagcaccaagactcat

SEQ ID NO: 457134 - DNA, 25 bp, Homo sapien
cactgttatgtttgatccatttaga

SEQ ID NO: 457135 - DNA, 25 bp, Homo sapien
ccatttagatgcaatgcacttaatg

SEQ ID NO: 457136 - DNA, 25 bp, Homo sapien
ataaggtaggatttgccttatcagt

SEQ ID NO: 457137 - DNA, 25 bp, Homo sapien
caatgcacttaatgataaggtagga

SEQ ID NO: 457138 - DNA, 25 bp, Homo sapien
gatgtctatcaggtttacagtgtcg

SEQ ID NO: 457139 - DNA, 25 bp, Homo sapien
taatattctacctattgaaggctcc

SEQ ID NO: 457140 - DNA, 25 bp, Homo sapien
ctttgatttcaagagtgtcctgggc

SEQ ID NO: 457141 - DNA, 25 bp, Homo sapien
tttggcagcttgatggttagaggca

SEQ ID NO: 457142 - DNA, 25 bp, Homo sapien
ttcctttaaccattacttcagcagt

SEQ ID NO: 457143 - DNA, 25 bp, Homo sapien
tgatttattctttggcctactggct

SEQ ID NO: 457144 - DNA, 25 bp, Homo sapien
catggttttcgttcataccaaagta

SEQ ID NO: 457145 - DNA, 25 bp, Homo sapien
cacaggcttttaagggtatacgtat

SEQ ID NO: 457146 - DNA, 25 bp, Homo sapien
tgtagacctttaagttattcttaca

SEQ ID NO: 457147 - DNA, 25 bp, Homo sapien
catgtagacctttaagttattctta

SEQ ID NO: 457148 - DNA, 25 bp, Homo sapien
tttaggctatttccaccttctggct

SEQ ID NO: 457149 - DNA, 25 bp, Homo sapien
ccagccccgcctcagcatttccttt

SEQ ID NO: 457150 - DNA, 25 bp, Homo sapien
ttatccattcaaatgatgacagaca

SEQ ID NO: 457151 - DNA, 25 bp, Homo sapien
aatgatgacagacatttaggctatt

SEQ ID NO: 457152 - DNA, 25 bp, Homo sapien
tagcaggaggtgaaatttattcatt

SEQ ID NO: 457153 - DNA, 25 bp, Homo sapien
ttaaacagctaccgtgtggcacaca

SEQ ID NO: 457154 - DNA, 25 bp, Homo sapien
ttcttaaacagctaccgtgtggcac

SEQ ID NO: 457155 - DNA, 25 bp, Homo sapien
tcttaaacagctaccgtgtggcaca

SEQ ID NO: 457156 - DNA, 25 bp, Homo sapien
tagaggtccaagacccaaagtagat

SEQ ID NO: 457157 - DNA, 25 bp, Homo sapien
acctgggtgtcatagataggattca

SEQ ID NO: 457158 - DNA, 25 bp, Homo sapien
taggatgttacttgagaccagcatg

SEQ ID NO: 457159 - DNA, 25 bp, Homo sapien
gcatggagataaagcacaagagttc

SEQ ID NO: 457160 - DNA, 25 bp, Homo sapien
aatgcttctcctgggttaacttgta

SEQ ID NO: 457161 - DNA, 25 bp, Homo sapien
taaatgcttctcctgggttaacttg

SEQ ID NO: 457162 - DNA, 25 bp, Homo sapien
gcttctcctgggttaacttgtacca

SEQ ID NO: 457163 - DNA, 25 bp, Homo sapien
ttctcctgggttaacttgtaccaga

SEQ ID NO: 457164 - DNA, 25 bp, Homo sapien
tatttggtctcaaatgattattctc

SEQ ID NO: 457165 - DNA, 25 bp, Homo sapien
tttggtctcaaatgattattctcaa

SEQ ID NO: 457166 - DNA, 25 bp, Homo sapien
tcaaatgattattctcaattaccat

SEQ ID NO: 457167 - DNA, 25 bp, Homo sapien
ggtctcaaatgattattctcaatta

SEQ ID NO: 457168 - DNA, 25 bp, Homo sapien
ttaaacagattggacagcctaggta

SEQ ID NO: 457169 - DNA, 25 bp, Homo sapien
agacagtcttgctttacatcagttg

SEQ ID NO: 457170 - DNA, 25 bp, Homo sapien
gatgacaaagtatacagacacctca

SEQ ID NO: 457171 - DNA, 25 bp, Homo sapien
tactgagctgattacttctctgaaa

SEQ ID NO: 457172 - DNA, 25 bp, Homo sapien
tttgaatgtccagcaactagcacag

SEQ ID NO: 457173 - DNA, 25 bp, Homo sapien
tgtctttccagaatgtatgctatac

SEQ ID NO: 457174 - DNA, 25 bp, Homo sapien
gtaactcacaaaatctgagcctcca

SEQ ID NO: 457175 - DNA, 25 bp, Homo sapien
gaactctgcccataactagctgtaa

SEQ ID NO: 457176 - DNA, 25 bp, Homo sapien
gcctgtgcacagatagacttgttaa

SEQ ID NO: 457177 - DNA, 25 bp, Homo sapien
taacacgctcattcagagtcctcat

SEQ ID NO: 457178 - DNA, 25 bp, Homo sapien
gacttgttaaatttaacacgctcat

SEQ ID NO: 457179 - DNA, 25 bp, Homo sapien
gtgcctgtgcacagatagacttgtt

SEQ ID NO: 457180 - DNA, 25 bp, Homo sapien
catacagattcatgggctgtaccca

SEQ ID NO: 457181 - DNA, 25 bp, Homo sapien
caaatggaagtgatcgagcttgagc

SEQ ID NO: 457182 - DNA, 25 bp, Homo sapien
aactggttgtgtactctgcatggaa

SEQ ID NO: 457183 - DNA, 25 bp, Homo sapien
tatttagtagatctaccactgagtc

SEQ ID NO: 457184 - DNA, 25 bp, Homo sapien
caataccgctagaagataagaaggc

SEQ ID NO: 457185 - DNA, 25 bp, Homo sapien
atgaaggcggtgtgatgattaatac

SEQ ID NO: 457186 - DNA, 25 bp, Homo sapien
taagaaggaacaatgtgaacaaagg

SEQ ID NO: 457187 - DNA, 25 bp, Homo sapien
gagagactgttgagacattcctcct

SEQ ID NO: 457188 - DNA, 25 bp, Homo sapien
tggtcctgattaaagcaaacaccta

SEQ ID NO: 457189 - DNA, 25 bp, Homo sapien
tataatcctaccatatacttggagg

SEQ ID NO: 457190 - DNA, 25 bp, Homo sapien
aacaccatggtatctcactttcctg

SEQ ID NO: 457191 - DNA, 25 bp, Homo sapien
gaatagagtaggctcaccctgtaag

SEQ ID NO: 457192 - DNA, 25 bp, Homo sapien
aatccataacgggatgtgatcaatt

SEQ ID NO: 457193 - DNA, 25 bp, Homo sapien
aaatccataacgggatgtgatcaat

SEQ ID NO: 457194 - DNA, 25 bp, Homo sapien
aagaaatccataacgggatgtgatc

SEQ ID NO: 457195 - DNA, 25 bp, Homo sapien
agcattacccttcctgttagtttat

SEQ ID NO: 457196 - DNA, 25 bp, Homo sapien
aggcctgtacacttaaagcattacc

SEQ ID NO: 457197 - DNA, 25 bp, Homo sapien
ttatgttgtaagactggcacttccc

SEQ ID NO: 457198 - DNA, 25 bp, Homo sapien
cctgttagtttatgttgtaagactg

SEQ ID NO: 457199 - DNA, 25 bp, Homo sapien
caaattggtgagtcagaacttggga

SEQ ID NO: 457200 - DNA, 25 bp, Homo sapien
aaattggtgagtcagaacttgggaa

SEQ ID NO: 457201 - DNA, 25 bp, Homo sapien
aattggtgagtcagaacttgggaac

SEQ ID NO: 457202 - DNA, 25 bp, Homo sapien
atcccgttcagaggccttaatcaac

SEQ ID NO: 457203 - DNA, 25 bp, Homo sapien
cagatagtcgctgatttctttctct

SEQ ID NO: 457204 - DNA, 25 bp, Homo sapien
ggccttaatcaacctgcatatctca

SEQ ID NO: 457205 - DNA, 25 bp, Homo sapien
gcatatctcaccagatagtcgctga

SEQ ID NO: 457206 - DNA, 25 bp, Homo sapien
ccaggtgctccatgggaaggagtct

SEQ ID NO: 457207 - DNA, 25 bp, Homo sapien
tccacagagtcgagggaccaaggaa

SEQ ID NO: 457208 - DNA, 25 bp, Homo sapien
tgaaatctgcaactaaccaggtgct

SEQ ID NO: 457209 - DNA, 25 bp, Homo sapien
aaggagtctattgccagggagtgac

SEQ ID NO: 457210 - DNA, 25 bp, Homo sapien
tccaaacaactgctatgacatgcca

SEQ ID NO: 457211 - DNA, 25 bp, Homo sapien
cagcttatagctgtgagacctttca

SEQ ID NO: 457212 - DNA, 25 bp, Homo sapien
tgaagaacatggactcagctagccc

SEQ ID NO: 457213 - DNA, 25 bp, Homo sapien
caatgtcacctaagcacagtgctag

SEQ ID NO: 457214 - DNA, 25 bp, Homo sapien
tcaatagtcactccgcctctgtgtt

SEQ ID NO: 457215 - DNA, 25 bp, Homo sapien
tcatctatttggaagttctgacagt

SEQ ID NO: 457216 - DNA, 25 bp, Homo sapien
gattatcattctgtatctcatccag

SEQ ID NO: 457217 - DNA, 25 bp, Homo sapien
ccatgataagttaatcttaagccag

SEQ ID NO: 457218 - DNA, 25 bp, Homo sapien
tctacacagagggagcaaccagtgt

SEQ ID NO: 457219 - DNA, 25 bp, Homo sapien
tgagggggaagattgaatactgcaa

SEQ ID NO: 457220 - DNA, 25 bp, Homo sapien
gccctaagggggaacatgactggca

SEQ ID NO: 457221 - DNA, 25 bp, Homo sapien
ttaagtactaagataggctgatggt

SEQ ID NO: 457222 - DNA, 25 bp, Homo sapien
tattcaagtaaatcacgaagtatat

SEQ ID NO: 457223 - DNA, 25 bp, Homo sapien
tcatattcaagtaaatcacgaagta

SEQ ID NO: 457224 - DNA, 25 bp, Homo sapien
aatcatattcaagtaaatcacgaag

SEQ ID NO: 457225 - DNA, 25 bp, Homo sapien
caagtaaatcacgaagtatatttga

SEQ ID NO: 457226 - DNA, 25 bp, Homo sapien
gaaaagatcctttgaccgagtcacg

SEQ ID NO: 457227 - DNA, 25 bp, Homo sapien
tccaacaaggaaacagcgtagtaca

SEQ ID NO: 457228 - DNA, 25 bp, Homo sapien
taacagctttaattggagaacggct

SEQ ID NO: 457229 - DNA, 25 bp, Homo sapien
tcatttcgtttttacagtagcagca

SEQ ID NO: 457230 - DNA, 25 bp, Homo sapien
gggcatatccaggaggcacatagat

SEQ ID NO: 457231 - DNA, 25 bp, Homo sapien
gaggcacagaaccatttggggacat

SEQ ID NO: 457232 - DNA, 25 bp, Homo sapien
tatccaggaggcacatagataggag

SEQ ID NO: 457233 - DNA, 25 bp, Homo sapien
aggcacatagataggaggcacagaa

SEQ ID NO: 457234 - DNA, 25 bp, Homo sapien
tcaataacatgatctaggtaggccc

SEQ ID NO: 457235 - DNA, 25 bp, Homo sapien
ggcaaaccaggacagaaccgtgtaa

SEQ ID NO: 457236 - DNA, 25 bp, Homo sapien
tcattgagtgtacaagccggctaca

SEQ ID NO: 457237 - DNA, 25 bp, Homo sapien
taaagattacagaacctcaactcgg

SEQ ID NO: 457238 - DNA, 25 bp, Homo sapien
tggtcattcaagttagcaattcctg

SEQ ID NO: 457239 - DNA, 25 bp, Homo sapien
tctgtgtggacatcgtgtttcttga

SEQ ID NO: 457240 - DNA, 25 bp, Homo sapien
tactttccttctagtagtcaggccc

SEQ ID NO: 457241 - DNA, 25 bp, Homo sapien
gatcctttgcaggaggcttttggaa

SEQ ID NO: 457242 - DNA, 25 bp, Homo sapien
tcccattcaggtagttcataaactt

SEQ ID NO: 457243 - DNA, 25 bp, Homo sapien
ttcaggagtcccattcaggtagttc

SEQ ID NO: 457244 - DNA, 25 bp, Homo sapien
gggagccattaccagaaaggcagaa

SEQ ID NO: 457245 - DNA, 25 bp, Homo sapien
gagtcccattcaggtagttcataaa

SEQ ID NO: 457246 - DNA, 25 bp, Homo sapien
aggcaccctctcattaccataacag

SEQ ID NO: 457247 - DNA, 25 bp, Homo sapien
cacgctatgcgatctacaattcctt

SEQ ID NO: 457248 - DNA, 25 bp, Homo sapien
caattccttccttgttaggcaccct

SEQ ID NO: 457249 - DNA, 25 bp, Homo sapien
tcccaaagtcgatatagtttctttc

SEQ ID NO: 457250 - DNA, 25 bp, Homo sapien
agcaagcacagctcaaaggagtaac

SEQ ID NO: 457251 - DNA, 25 bp, Homo sapien
aagctcttaaacaataacataggcc

SEQ ID NO: 457252 - DNA, 25 bp, Homo sapien
tctcatataaatctcttaggtctcc

SEQ ID NO: 457253 - DNA, 25 bp, Homo sapien
tcactcctgcgtgccatcataaaag

SEQ ID NO: 457254 - DNA, 25 bp, Homo sapien
tctttacaccatgaagctattaggg

SEQ ID NO: 457255 - DNA, 25 bp, Homo sapien
tacctagcacatgggttgatgctct

SEQ ID NO: 457256 - DNA, 25 bp, Homo sapien
ccaggacctggaatagtacctagca

SEQ ID NO: 457257 - DNA, 25 bp, Homo sapien
tgtgtatcttccttaccagaatata

SEQ ID NO: 457258 - DNA, 25 bp, Homo sapien
caggagcaggaaagtttgtgttaca

SEQ ID NO: 457259 - DNA, 25 bp, Homo sapien
gagtctgtggaagataccgtttgac

SEQ ID NO: 457260 - DNA, 25 bp, Homo sapien
tgaactcttccctaggtaccacaat

SEQ ID NO: 457261 - DNA, 25 bp, Homo sapien
gaaaaatgctagagtaatgtgtcct

SEQ ID NO: 457262 - DNA, 25 bp, Homo sapien
gaagactaagaatctgaccactgga

SEQ ID NO: 457263 - DNA, 25 bp, Homo sapien
caaggaggaaggattaactgtgtca

SEQ ID NO: 457264 - DNA, 25 bp, Homo sapien
tatactagtctgcaattctggaaag

SEQ ID NO: 457265 - DNA, 25 bp, Homo sapien
tggtatagtcatagggtcaaagccc

SEQ ID NO: 457266 - DNA, 25 bp, Homo sapien
ctgagggaccacgacaactcttcga

SEQ ID NO: 457267 - DNA, 25 bp, Homo sapien
gaacggtggagaactgtgtgactac

SEQ ID NO: 457268 - DNA, 25 bp, Homo sapien
taccagggtgaaactctggtgcctg

SEQ ID NO: 457269 - DNA, 25 bp, Homo sapien
tatactgtgttgtcatgtctccagc

SEQ ID NO: 457270 - DNA, 25 bp, Homo sapien
ggaccttccatgtgtagagtgagca

SEQ ID NO: 457271 - DNA, 25 bp, Homo sapien
catctctaaagttggaccttccatg

SEQ ID NO: 457272 - DNA, 25 bp, Homo sapien
gcaaacgttcatatgttttactaga

SEQ ID NO: 457273 - DNA, 25 bp, Homo sapien
cttggcgatccttcaattttttctg

SEQ ID NO: 457274 - DNA, 25 bp, Homo sapien
ttcattaatgggagaagggcatttc

SEQ ID NO: 457275 - DNA, 25 bp, Homo sapien
ccttttataagtccattatgttcat

SEQ ID NO: 457276 - DNA, 25 bp, Homo sapien
gtttataccaccagcaatttgtcct

SEQ ID NO: 457277 - DNA, 25 bp, Homo sapien
cctgtgtttataccaccagcaattt

SEQ ID NO: 457278 - DNA, 25 bp, Homo sapien
gacaatgttggaaagaagtgcttca

SEQ ID NO: 457279 - DNA, 25 bp, Homo sapien
ttgacaatgttggaaagaagtgctt

SEQ ID NO: 457280 - DNA, 25 bp, Homo sapien
tgacaatgttggaaagaagtgcttc

SEQ ID NO: 457281 - DNA, 25 bp, Homo sapien
cacatatatgctctattctcaagag

SEQ ID NO: 457282 - DNA, 25 bp, Homo sapien
tctgaacagagactgatgctaatca

SEQ ID NO: 457283 - DNA, 25 bp, Homo sapien
caggtattaaataatgcacatgtgc

SEQ ID NO: 457284 - DNA, 25 bp, Homo sapien
tagaataaagaaagctagagcaacc

SEQ ID NO: 457285 - DNA, 25 bp, Homo sapien
agaggaatcggcattcaaactataa

SEQ ID NO: 457286 - DNA, 25 bp, Homo sapien
gaggaatcggcattcaaactataaa

SEQ ID NO: 457287 - DNA, 25 bp, Homo sapien
gaactaagccttgtggcagagcccg

SEQ ID NO: 457288 - DNA, 25 bp, Homo sapien
catctgtcactttgtaagcggtaaa

SEQ ID NO: 457289 - DNA, 25 bp, Homo sapien
tgaactagagcatgcaaaaacaacc

SEQ ID NO: 457290 - DNA, 25 bp, Homo sapien
ttttgtcctggcacttcaccgttac

SEQ ID NO: 457291 - DNA, 25 bp, Homo sapien
tggggagtacagacagtagagaaaa

SEQ ID NO: 457292 - DNA, 25 bp, Homo sapien
ctgtggggagtacagacagtagaga

SEQ ID NO: 457293 - DNA, 25 bp, Homo sapien
ggagtacagacagtagagaaaatat

SEQ ID NO: 457294 - DNA, 25 bp, Homo sapien
gggagtacagacagtagagaaaata

SEQ ID NO: 457295 - DNA, 25 bp, Homo sapien
tttatgaagcttgctttatcaggat

SEQ ID NO: 457296 - DNA, 25 bp, Homo sapien
aactttgagaacgtgaataggacta

SEQ ID NO: 457297 - DNA, 25 bp, Homo sapien
gaaggtgggtcagtcaaaagcatta

SEQ ID NO: 457298 - DNA, 25 bp, Homo sapien
tatgtatacccataagtgtctcttg

SEQ ID NO: 457299 - DNA, 25 bp, Homo sapien
gtctcttgattttatgggatgataa

SEQ ID NO: 457300 - DNA, 25 bp, Homo sapien
tatttcccatcttttccagtacttg

SEQ ID NO: 457301 - DNA, 25 bp, Homo sapien
ggtggtgaccaggtaagtactactg

SEQ ID NO: 457302 - DNA, 25 bp, Homo sapien
catagagctctggtacactactttc

SEQ ID NO: 457303 - DNA, 25 bp, Homo sapien
ccagtacttgagatcagaacttcat

SEQ ID NO: 457304 - DNA, 25 bp, Homo sapien
gtccttagaggagcaatgtcatact

SEQ ID NO: 457305 - DNA, 25 bp, Homo sapien
tgaaccatctattagggagcctact

SEQ ID NO: 457306 - DNA, 25 bp, Homo sapien
gaatctttctaaggcttcgtggtgc

SEQ ID NO: 457307 - DNA, 25 bp, Homo sapien
ttaagaatacgtgaatactgaacca

SEQ ID NO: 457308 - DNA, 25 bp, Homo sapien
cacattataaagacaatacaccatg

SEQ ID NO: 457309 - DNA, 25 bp, Homo sapien
cacaaatcaataatgtgatacacca

SEQ ID NO: 457310 - DNA, 25 bp, Homo sapien
acagcacattataaagacaatacac

SEQ ID NO: 457311 - DNA, 25 bp, Homo sapien
gtgatacaccatatcaacataatga

SEQ ID NO: 457312 - DNA, 25 bp, Homo sapien
accaccacctagactaatcaagaga

SEQ ID NO: 457313 - DNA, 25 bp, Homo sapien
tcagaacagaactaaaccaccacct

SEQ ID NO: 457314 - DNA, 25 bp, Homo sapien
gcaatgcacatctcaagaactacaa

SEQ ID NO: 457315 - DNA, 25 bp, Homo sapien
aataaacaatctagcaatgcacatc

SEQ ID NO: 457316 - DNA, 25 bp, Homo sapien
cgagttagtggttagtgggtgcagc

SEQ ID NO: 457317 - DNA, 25 bp, Homo sapien
atgacgagttagtggttagtgggtg

SEQ ID NO: 457318 - DNA, 25 bp, Homo sapien
acgagttagtggttagtgggtgcag

SEQ ID NO: 457319 - DNA, 25 bp, Homo sapien
gacgagttagtggttagtgggtgca

SEQ ID NO: 457320 - DNA, 25 bp, Homo sapien
ctggcttgagatcatttaaagtgat

SEQ ID NO: 457321 - DNA, 25 bp, Homo sapien
ggctggcttgagatcatttaaagtg

SEQ ID NO: 457322 - DNA, 25 bp, Homo sapien
gctggcttgagatcatttaaagtga

SEQ ID NO: 457323 - DNA, 25 bp, Homo sapien
aagtacttgcagattaggaaggtgt

SEQ ID NO: 457324 - DNA, 25 bp, Homo sapien
cctctgaaggagttccctttataga

SEQ ID NO: 457325 - DNA, 25 bp, Homo sapien
tgagtgaatttttggtccgattggc

SEQ ID NO: 457326 - DNA, 25 bp, Homo sapien
tccttggtggattaggtatatcagg

SEQ ID NO: 457327 - DNA, 25 bp, Homo sapien
tatagaattatattctgcctggact

SEQ ID NO: 457328 - DNA, 25 bp, Homo sapien
caattgaaacttaatactaccaggg

SEQ ID NO: 457329 - DNA, 25 bp, Homo sapien
tgtccagttggaaacaccctaaaga

SEQ ID NO: 457330 - DNA, 25 bp, Homo sapien
catgtgcaatgtaataaggactgtt

SEQ ID NO: 457331 - DNA, 25 bp, Homo sapien
gcaggaacaaattaaagctctttgt

SEQ ID NO: 457332 - DNA, 25 bp, Homo sapien
gcaatctgggaaagactgcatttaa

SEQ ID NO: 457333 - DNA, 25 bp, Homo sapien
aattctatgtatggtatctgtccac

SEQ ID NO: 457334 - DNA, 25 bp, Homo sapien
cattgtatcttcttgtgtagctagg

SEQ ID NO: 457335 - DNA, 25 bp, Homo sapien
tgtagctaggaccaaacgtttatga

SEQ ID NO: 457336 - DNA, 25 bp, Homo sapien
aatatctcactgactggcaaagtag

SEQ ID NO: 457337 - DNA, 25 bp, Homo sapien
ggaaactccagctcttatgatatag

SEQ ID NO: 457338 - DNA, 25 bp, Homo sapien
tctagtctagttgctgaggtctctc

SEQ ID NO: 457339 - DNA, 25 bp, Homo sapien
tagtcctccaatcaactctatgaag

SEQ ID NO: 457340 - DNA, 25 bp, Homo sapien
cagctttaaggttgtaggattgatc

SEQ ID NO: 457341 - DNA, 25 bp, Homo sapien
tgacttggtcctgcgaaaatgttca

SEQ ID NO: 457342 - DNA, 25 bp, Homo sapien
ccaaagagtgaagaaccagggtgct

SEQ ID NO: 457343 - DNA, 25 bp, Homo sapien
gaagctactcaagtctttccgaaca

SEQ ID NO: 457344 - DNA, 25 bp, Homo sapien
gttttggattttagaaccattgtca

SEQ ID NO: 457345 - DNA, 25 bp, Homo sapien
gattttagaaccattgtcactaggt

SEQ ID NO: 457346 - DNA, 25 bp, Homo sapien
ttttagaaccattgtcactaggtgc

SEQ ID NO: 457347 - DNA, 25 bp, Homo sapien
tggattttagaaccattgtcactag

SEQ ID NO: 457348 - DNA, 25 bp, Homo sapien
aaatagggaagttaagtcaggaatg

SEQ ID NO: 457349 - DNA, 25 bp, Homo sapien
tcaatccactcatgcaccacacaaa

SEQ ID NO: 457350 - DNA, 25 bp, Homo sapien
ttgcctgaacatatgcacataatgt

SEQ ID NO: 457351 - DNA, 25 bp, Homo sapien
gtctttaaggctgatgtgaaaaaaa

SEQ ID NO: 457352 - DNA, 25 bp, Homo sapien
aaattgtttctgtgagcccatgtaa

SEQ ID NO: 457353 - DNA, 25 bp, Homo sapien
tgtttctgtgagcccatgtaacact

SEQ ID NO: 457354 - DNA, 25 bp, Homo sapien
tctgtgagcccatgtaacactgaca

SEQ ID NO: 457355 - DNA, 25 bp, Homo sapien
taattttaaattgtttctgtgagcc

SEQ ID NO: 457356 - DNA, 25 bp, Homo sapien
ttctggccgatagtctgaatttaca

SEQ ID NO: 457357 - DNA, 25 bp, Homo sapien
cttgtaccatagtcatttctggccg

SEQ ID NO: 457358 - DNA, 25 bp, Homo sapien
catagtcatttctggccgatagtct

SEQ ID NO: 457359 - DNA, 25 bp, Homo sapien
catttctggccgatagtctgaattt

SEQ ID NO: 457360 - DNA, 25 bp, Homo sapien
aaggagcacagcctgaggtgtaata

SEQ ID NO: 457361 - DNA, 25 bp, Homo sapien
cacagcctgaggtgtaatataagac

SEQ ID NO: 457362 - DNA, 25 bp, Homo sapien
gagcacagcctgaggtgtaatataa

SEQ ID NO: 457363 - DNA, 25 bp, Homo sapien
gcctgaggtgtaatataagacttct

SEQ ID NO: 457364 - DNA, 25 bp, Homo sapien
tctgatggtgttcctgagggcttac

SEQ ID NO: 457365 - DNA, 25 bp, Homo sapien
actccattgtaaggataaccaagta

SEQ ID NO: 457366 - DNA, 25 bp, Homo sapien
caagtaattccagccttggttaata

SEQ ID NO: 457367 - DNA, 25 bp, Homo sapien
tgtaagaaattccttcatctgatgg

SEQ ID NO: 457368 - DNA, 25 bp, Homo sapien
tacttactgtattaggagtggcaat

SEQ ID NO: 457369 - DNA, 25 bp, Homo sapien
ccaaacagtaacaagccaaggcttc

SEQ ID NO: 457370 - DNA, 25 bp, Homo sapien
ggactgggaaatgagctaactactg

SEQ ID NO: 457371 - DNA, 25 bp, Homo sapien
tgtattaggattaatgccacactaa

SEQ ID NO: 457372 - DNA, 25 bp, Homo sapien
tccatcatatttaggcttaaaacca

SEQ ID NO: 457373 - DNA, 25 bp, Homo sapien
tagtactacgtctgagatttttcac

SEQ ID NO: 457374 - DNA, 25 bp, Homo sapien
gtaagcaagatcttctccatcatat

SEQ ID NO: 457375 - DNA, 25 bp, Homo sapien
ttttcactgtgtaagcaagatcttc

SEQ ID NO: 457376 - DNA, 25 bp, Homo sapien
actgaaggctttacaggtatgcctg

SEQ ID NO: 457377 - DNA, 25 bp, Homo sapien
tctactacttcacttggattacttt

SEQ ID NO: 457378 - DNA, 25 bp, Homo sapien
ttatcagggcaagtagtaaattcta

SEQ ID NO: 457379 - DNA, 25 bp, Homo sapien
ttttaaaactgtgtgaatgtatctt

SEQ ID NO: 457380 - DNA, 25 bp, Homo sapien
gctccgccattgtcttttggtggat

SEQ ID NO: 457381 - DNA, 25 bp, Homo sapien
tggttgctccgccattgtcttttgg

SEQ ID NO: 457382 - DNA, 25 bp, Homo sapien
tctccactacatatttattgatggt

SEQ ID NO: 457383 - DNA, 25 bp, Homo sapien
ttattgatggttgctccgccattgt

SEQ ID NO: 457384 - DNA, 25 bp, Homo sapien
tcttgtagtaagacaacaactactt

SEQ ID NO: 457385 - DNA, 25 bp, Homo sapien
ctcatatggcatactagatatgttt

SEQ ID NO: 457386 - DNA, 25 bp, Homo sapien
gatatgtttgtcaataaacttatga

SEQ ID NO: 457387 - DNA, 25 bp, Homo sapien
gaagtggatcaaacttgaactcata

SEQ ID NO: 457388 - DNA, 25 bp, Homo sapien
catccgtcctcggtttctgtgcctt

SEQ ID NO: 457389 - DNA, 25 bp, Homo sapien
tcatccgtcctcggtttctgtgcct

SEQ ID NO: 457390 - DNA, 25 bp, Homo sapien
caatttaaagtggatcataacaggc

SEQ ID NO: 457391 - DNA, 25 bp, Homo sapien
ctaggtgtatagaggctgagcaatg

SEQ ID NO: 457392 - DNA, 25 bp, Homo sapien
gcaacgatacagttgttcagcactc

SEQ ID NO: 457393 - DNA, 25 bp, Homo sapien
cactgctaaatgtgtgattcaagaa

SEQ ID NO: 457394 - DNA, 25 bp, Homo sapien
ctcgtaaacgatagaaacagcctgg

SEQ ID NO: 457395 - DNA, 25 bp, Homo sapien
gatgttccctggtagcaccactgta

SEQ ID NO: 457396 - DNA, 25 bp, Homo sapien
aacagcctggattcagtcgatcaca

SEQ ID NO: 457397 - DNA, 25 bp, Homo sapien
cactgatgcagtaaactcgtaaacg

SEQ ID NO: 457398 - DNA, 25 bp, Homo sapien
tgatcttctccaaaaggatccataa

SEQ ID NO: 457399 - DNA, 25 bp, Homo sapien
tctcttctaaggagggatgttttaa

SEQ ID NO: 457400 - DNA, 25 bp, Homo sapien
tcacaggtatgattacagcctcaaa

SEQ ID NO: 457401 - DNA, 25 bp, Homo sapien
catttgtcactgcaccaagcttaac

SEQ ID NO: 457402 - DNA, 25 bp, Homo sapien
ggagtctgcacaagtaaagattcag

SEQ ID NO: 457403 - DNA, 25 bp, Homo sapien
ttgggtctaccctgtaatctgggag

SEQ ID NO: 457404 - DNA, 25 bp, Homo sapien
tttgctttgggtctaccctgtaatc

SEQ ID NO: 457405 - DNA, 25 bp, Homo sapien
cagctggagtctgcacaagtaaaga

SEQ ID NO: 457406 - DNA, 25 bp, Homo sapien
tgggtgatccaccatcaaccagagg

SEQ ID NO: 457407 - DNA, 25 bp, Homo sapien
ccttggtaaacttctctaggttcat

SEQ ID NO: 457408 - DNA, 25 bp, Homo sapien
gtacattctacttcagaaccttggt

SEQ ID NO: 457409 - DNA, 25 bp, Homo sapien
ggaaatgggtgatccaccatcaacc

SEQ ID NO: 457410 - DNA, 25 bp, Homo sapien
ccccattttgttagctgcacgtagt

SEQ ID NO: 457411 - DNA, 25 bp, Homo sapien
tttgttagctgcacgtagtctgaag

SEQ ID NO: 457412 - DNA, 25 bp, Homo sapien
tgcacgtagtctgaagctgtatgtc

SEQ ID NO: 457413 - DNA, 25 bp, Homo sapien
tagctgcacgtagtctgaagctgta

SEQ ID NO: 457414 - DNA, 25 bp, Homo sapien
tctctggaaatacggaaagtaaata

SEQ ID NO: 457415 - DNA, 25 bp, Homo sapien
tatcagtactgctctctggtaggca

SEQ ID NO: 457416 - DNA, 25 bp, Homo sapien
aaagcttcaccattctagcatgctg

SEQ ID NO: 457417 - DNA, 25 bp, Homo sapien
gaacaaggttaattcatgtcgacaa

SEQ ID NO: 457418 - DNA, 25 bp, Homo sapien
tgcagatctacatgtcacttgaggg

SEQ ID NO: 457419 - DNA, 25 bp, Homo sapien
gcttgcactgatctggtggcccagg

SEQ ID NO: 457420 - DNA, 25 bp, Homo sapien
acaagttgcagatctacatgtcact

SEQ ID NO: 457421 - DNA, 25 bp, Homo sapien
ccaggggctgtagtaatatcacatt

SEQ ID NO: 457422 - DNA, 25 bp, Homo sapien
aataggtagttgctggtgaaagtcc

SEQ ID NO: 457423 - DNA, 25 bp, Homo sapien
ccactccagtcgatattcagtgaca

SEQ ID NO: 457424 - DNA, 25 bp, Homo sapien
tgacatctgttccattactcaaagg

SEQ ID NO: 457425 - DNA, 25 bp, Homo sapien
tatttcataactgagaccaggccca

SEQ ID NO: 457426 - DNA, 25 bp, Homo sapien
tacttcactgaaagggcctgcaccc

SEQ ID NO: 457427 - DNA, 25 bp, Homo sapien
ggatttccgaaccatgatcacaagg

SEQ ID NO: 457428 - DNA, 25 bp, Homo sapien
tgatggtggagtcacacaggctact

SEQ ID NO: 457429 - DNA, 25 bp, Homo sapien
tccaaagtctatgctgtaggcaagg

SEQ ID NO: 457430 - DNA, 25 bp, Homo sapien
gctccaaggctattcaaggcttgaa

SEQ ID NO: 457431 - DNA, 25 bp, Homo sapien
aaggaccagctccaaggctattcaa

SEQ ID NO: 457432 - DNA, 25 bp, Homo sapien
ggctattcaaggcttgaattcgtat

SEQ ID NO: 457433 - DNA, 25 bp, Homo sapien
ccagctccaaggctattcaaggctt

SEQ ID NO: 457434 - DNA, 25 bp, Homo sapien
gtggtactgaatagaatcggttgac

SEQ ID NO: 457435 - DNA, 25 bp, Homo sapien
tagaatcggttgacaatgtctttgg

SEQ ID NO: 457436 - DNA, 25 bp, Homo sapien
gaaggtggtactgaatagaatcggt

SEQ ID NO: 457437 - DNA, 25 bp, Homo sapien
tctgaaggtggtactgaatagaatc

SEQ ID NO: 457438 - DNA, 25 bp, Homo sapien
caaaggctaacattcatcgatacag

SEQ ID NO: 457439 - DNA, 25 bp, Homo sapien
taattagacctgtttccagtaagcc

SEQ ID NO: 457440 - DNA, 25 bp, Homo sapien
taccccaaatgtatgctagaaaggg

SEQ ID NO: 457441 - DNA, 25 bp, Homo sapien
tagagagtggttatgtacaagcacc

SEQ ID NO: 457442 - DNA, 25 bp, Homo sapien
agttaccccaaaagtttgatgccag

SEQ ID NO: 457443 - DNA, 25 bp, Homo sapien
tatttaggagtgataagttacccca

SEQ ID NO: 457444 - DNA, 25 bp, Homo sapien
gccaggaactctatgtcacttaaaa

SEQ ID NO: 457445 - DNA, 25 bp, Homo sapien
tgttactaaatttcatgtccgacca

SEQ ID NO: 457446 - DNA, 25 bp, Homo sapien
tccccagcttcattacaagcttgaa

SEQ ID NO: 457447 - DNA, 25 bp, Homo sapien
ctttcaaggcagctgggacagattt

SEQ ID NO: 457448 - DNA, 25 bp, Homo sapien
tacagaatttataggatgttgactc

SEQ ID NO: 457449 - DNA, 25 bp, Homo sapien
cattacaagcttgaatacagaattt

SEQ ID NO: 457450 - DNA, 25 bp, Homo sapien
ttttcccaacataacttgaagactg

SEQ ID NO: 457451 - DNA, 25 bp, Homo sapien
ttgaagactgtaaataactggatca

SEQ ID NO: 457452 - DNA, 25 bp, Homo sapien
tttcattggctgtaaacactcccat

SEQ ID NO: 457453 - DNA, 25 bp, Homo sapien
aaataactggatcacctttcattgg

SEQ ID NO: 457454 - DNA, 25 bp, Homo sapien
tgttcagtgctatatcctgagtgcc

SEQ ID NO: 457455 - DNA, 25 bp, Homo sapien
tgtctgatcacgtgaataccctggt

SEQ ID NO: 457456 - DNA, 25 bp, Homo sapien
tacgtcactccataccacctatagg

SEQ ID NO: 457457 - DNA, 25 bp, Homo sapien
catttcacgtggagtaaaagccaca

SEQ ID NO: 457458 - DNA, 25 bp, Homo sapien
tatactagaactgttcacccctggc

SEQ ID NO: 457459 - DNA, 25 bp, Homo sapien
cacttagcgcagtgctcagcatgca

SEQ ID NO: 457460 - DNA, 25 bp, Homo sapien
tctccagttagttggtgggctacaa

SEQ ID NO: 457461 - DNA, 25 bp, Homo sapien
tgcagtcactgctcaatctgtagga

SEQ ID NO: 457462 - DNA, 25 bp, Homo sapien
tgttaataaaatattagaaggaaga

SEQ ID NO: 457463 - DNA, 25 bp, Homo sapien
ctgttaataaaatattagaaggaag

SEQ ID NO: 457464 - DNA, 25 bp, Homo sapien
ctggaataccggaaggaagagtcgg

SEQ ID NO: 457465 - DNA, 25 bp, Homo sapien
gcactgtggtgctgtagggacctac

SEQ ID NO: 457466 - DNA, 25 bp, Homo sapien
tgcccgtcgggtccttgtgctttcc

SEQ ID NO: 457467 - DNA, 25 bp, Homo sapien
ccagagagtcttggcactggcgaat

SEQ ID NO: 457468 - DNA, 25 bp, Homo sapien
ggcacatacacggaagcgatattca

SEQ ID NO: 457469 - DNA, 25 bp, Homo sapien
tacttgcagtcatcgacatctaggc

SEQ ID NO: 457470 - DNA, 25 bp, Homo sapien
gggctattacactcagactcatttg

SEQ ID NO: 457471 - DNA, 25 bp, Homo sapien
tagcctataccagacagagtgagtg

SEQ ID NO: 457472 - DNA, 25 bp, Homo sapien
gcactaattttgcagtgaggctcaa

SEQ ID NO: 457473 - DNA, 25 bp, Homo sapien
tctttactgggctttatataataaa

SEQ ID NO: 457474 - DNA, 25 bp, Homo sapien
gaaaaatgttttaagctcattggaa

SEQ ID NO: 457475 - DNA, 25 bp, Homo sapien
gaggggagaccataacatttcactt

SEQ ID NO: 457476 - DNA, 25 bp, Homo sapien
tttattctttactgggctttatata

SEQ ID NO: 457477 - DNA, 25 bp, Homo sapien
gatgatgagctagaagggcgctgga

SEQ ID NO: 457478 - DNA, 25 bp, Homo sapien
gctagaagggcgctggatcgccttt

SEQ ID NO: 457479 - DNA, 25 bp, Homo sapien
gcgctggatcgcctttatcctgtac

SEQ ID NO: 457480 - DNA, 25 bp, Homo sapien
gatcgcctttatcctgtacctggtt

SEQ ID NO: 457481 - DNA, 25 bp, Homo sapien
agagagctcgacttctctgtgctgc

SEQ ID NO: 457482 - DNA, 25 bp, Homo sapien
ggttgacagatcctagccataatga

SEQ ID NO: 457483 - DNA, 25 bp, Homo sapien
ttaagaggactgtatgagatgccca

SEQ ID NO: 457484 - DNA, 25 bp, Homo sapien
ttattagccatgagacctgtggcag

SEQ ID NO: 457485 - DNA, 25 bp, Homo sapien
gagaatttagatggatctggccctg

SEQ ID NO: 457486 - DNA, 25 bp, Homo sapien
tgagaatttagatggatctggccct

SEQ ID NO: 457487 - DNA, 25 bp, Homo sapien
tgtacgggcgcttttgtcagtctgg

SEQ ID NO: 457488 - DNA, 25 bp, Homo sapien
caccttcgaagggatctggtctggt

SEQ ID NO: 457489 - DNA, 25 bp, Homo sapien
tacaggactgagcactgtacgggcg

SEQ ID NO: 457490 - DNA, 25 bp, Homo sapien
ccggtccggtgagcgatgtctgcac

SEQ ID NO: 457491 - DNA, 25 bp, Homo sapien
cctggcgcgtggtccctctcggtga

SEQ ID NO: 457492 - DNA, 25 bp, Homo sapien
ctcggtgagcgcctcctttcccagc

SEQ ID NO: 457493 - DNA, 25 bp, Homo sapien
gtccctctcggtgagcgcctccttt

SEQ ID NO: 457494 - DNA, 25 bp, Homo sapien
tgggagcctggcgcgtggtccctct

SEQ ID NO: 457495 - DNA, 25 bp, Homo sapien
gcatgtcccggtagcgcccgatcag

SEQ ID NO: 457496 - DNA, 25 bp, Homo sapien
cgatcagcatcacggtcaccacgtt

SEQ ID NO: 457497 - DNA, 25 bp, Homo sapien
atgagtaggtcggacacggccatgc

SEQ ID NO: 457498 - DNA, 25 bp, Homo sapien
aacggcagcccgagcaggatgagta

SEQ ID NO: 457499 - DNA, 25 bp, Homo sapien
acgctgagcgcggtcatgtgcagca

SEQ ID NO: 457500 - DNA, 25 bp, Homo sapien
tagcgctcgacgctgagcgcggtca

SEQ ID NO: 457501 - DNA, 25 bp, Homo sapien
caggtagcgctcgacgctgagcgcg

SEQ ID NO: 457502 - DNA, 25 bp, Homo sapien
cgctcgacgctgagcgcggtcatgt

SEQ ID NO: 457503 - DNA, 25 bp, Homo sapien
ccgatgagcccgtagaggatgctga

SEQ ID NO: 457504 - DNA, 25 bp, Homo sapien
aacaagaagggaccggcagagagca

SEQ ID NO: 457505 - DNA, 25 bp, Homo sapien
gatccgcgcggtgccattgaggccc

SEQ ID NO: 457506 - DNA, 25 bp, Homo sapien
ggcattcgcggctgaacagcgccgc

SEQ ID NO: 457507 - DNA, 25 bp, Homo sapien
caggctgcatggatacttgctttaa

SEQ ID NO: 457508 - DNA, 25 bp, Homo sapien
tttaaaactgcatagtaggctccca

SEQ ID NO: 457509 - DNA, 25 bp, Homo sapien
gaaatctccctcgtcttctcaagag

SEQ ID NO: 457510 - DNA, 25 bp, Homo sapien
aatttctctgaacaagccgccttgg

SEQ ID NO: 457511 - DNA, 25 bp, Homo sapien
taacaaaagcattgggaagcaaata

SEQ ID NO: 457512 - DNA, 25 bp, Homo sapien
aacataagacacagcaccgggatta

SEQ ID NO: 457513 - DNA, 25 bp, Homo sapien
gcaccgggattaacaaaagcattgg

SEQ ID NO: 457514 - DNA, 25 bp, Homo sapien
cacagcaccgggattaacaaaagca

SEQ ID NO: 457515 - DNA, 25 bp, Homo sapien
ctgccaacgtggaagggcaaccagc

SEQ ID NO: 457516 - DNA, 25 bp, Homo sapien
aacgtggaagggcaaccagcaaatt

SEQ ID NO: 457517 - DNA, 25 bp, Homo sapien
tgccaacgtggaagggcaaccagca

SEQ ID NO: 457518 - DNA, 25 bp, Homo sapien
gtggaagggcaaccagcaaattata

SEQ ID NO: 457519 - DNA, 25 bp, Homo sapien
tgcagagcgacgatgttaaagtact

SEQ ID NO: 457520 - DNA, 25 bp, Homo sapien
gacttccttgcgagcagcagtttaa

SEQ ID NO: 457521 - DNA, 25 bp, Homo sapien
tactgagagaagtacatcatccgcg

SEQ ID NO: 457522 - DNA, 25 bp, Homo sapien
ggccgccgctctgtacttctttgaa

SEQ ID NO: 457523 - DNA, 25 bp, Homo sapien
gtcttcacgttagcgcttgtctcgg

SEQ ID NO: 457524 - DNA, 25 bp, Homo sapien
cgttagcgcttgtctcggtgtagcc

SEQ ID NO: 457525 - DNA, 25 bp, Homo sapien
catcgtcttcacgttagcgcttgtc

SEQ ID NO: 457526 - DNA, 25 bp, Homo sapien
ttatcccatcgtcttcacgttagcg

SEQ ID NO: 457527 - DNA, 25 bp, Homo sapien
ctaacaaaagtggttctgcctgcag

SEQ ID NO: 457528 - DNA, 25 bp, Homo sapien
gagggagtggctggcccatagcctc

SEQ ID NO: 457529 - DNA, 25 bp, Homo sapien
ggaatgccagcacgggtctctgttg

SEQ ID NO: 457530 - DNA, 25 bp, Homo sapien
ctcaaagagaagtggctggaatgcc

SEQ ID NO: 457531 - DNA, 25 bp, Homo sapien
gacttccacagagcattcctttgga

SEQ ID NO: 457532 - DNA, 25 bp, Homo sapien
aaaggctcctcgtagaagactaggg

SEQ ID NO: 457533 - DNA, 25 bp, Homo sapien
ccacagagcattcctttggagcctg

SEQ ID NO: 457534 - DNA, 25 bp, Homo sapien
gaagaggaaacgctgaattcaaagg

SEQ ID NO: 457535 - DNA, 25 bp, Homo sapien
tcttcctctgctgtaatagcctctt

SEQ ID NO: 457536 - DNA, 25 bp, Homo sapien
cagcaactgtaaggcaacggcccac

SEQ ID NO: 457537 - DNA, 25 bp, Homo sapien
gccaaggaaacctctcccagtcaga

SEQ ID NO: 457538 - DNA, 25 bp, Homo sapien
tctcagcaactgtaaggcaacggcc

SEQ ID NO: 457539 - DNA, 25 bp, Homo sapien
acctagcgtcctctgctgccaagga

SEQ ID NO: 457540 - DNA, 25 bp, Homo sapien
tctgggtgctgactgaccgcccggc

SEQ ID NO: 457541 - DNA, 25 bp, Homo sapien
gccctcgcgctctccagattttgca

SEQ ID NO: 457542 - DNA, 25 bp, Homo sapien
ctgccagtctgggtgctgactgacc

SEQ ID NO: 457543 - DNA, 25 bp, Homo sapien
cagtctgggtgctgactgaccgccc

SEQ ID NO: 457544 - DNA, 25 bp, Homo sapien
gcacagggcagagcgaaaggtaggg

SEQ ID NO: 457545 - DNA, 25 bp, Homo sapien
ggcgggcaggagacatccaaaagca

SEQ ID NO: 457546 - DNA, 25 bp, Homo sapien
gcaaagaggctcagacaaggaatct

SEQ ID NO: 457547 - DNA, 25 bp, Homo sapien
tggagttcaatgacgggagacgcac

SEQ ID NO: 457548 - DNA, 25 bp, Homo sapien
tgttcaggctctttgacctcagagg

SEQ ID NO: 457549 - DNA, 25 bp, Homo sapien
aagcgagacttcaaaagccagtgcg

SEQ ID NO: 457550 - DNA, 25 bp, Homo sapien
caaaagcgccgtttggaaatgttca

SEQ ID NO: 457551 - DNA, 25 bp, Homo sapien
gccccagctctaggtcctgtgagaa

SEQ ID NO: 457552 - DNA, 25 bp, Homo sapien
gtaaagcagtcgaaatacaggaaag

SEQ ID NO: 457553 - DNA, 25 bp, Homo sapien
cggtaaagcagtcgaaatacaggaa

SEQ ID NO: 457554 - DNA, 25 bp, Homo sapien
gacggtaaagcagtcgaaatacagg

SEQ ID NO: 457555 - DNA, 25 bp, Homo sapien
cttcgacggtaaagcagtcgaaata

SEQ ID NO: 457556 - DNA, 25 bp, Homo sapien
tctccacttaaaaagttgagccttc

SEQ ID NO: 457557 - DNA, 25 bp, Homo sapien
ctccacttaaaaagttgagccttct

SEQ ID NO: 457558 - DNA, 25 bp, Homo sapien
gagcagagtgaaaaggttgacttta

SEQ ID NO: 457559 - DNA, 25 bp, Homo sapien
ctgagatttttgccgctgggcttct

SEQ ID NO: 457560 - DNA, 25 bp, Homo sapien
tgagatttttgccgctgggcttctg

SEQ ID NO: 457561 - DNA, 25 bp, Homo sapien
agcagagtgaaaaggttgactttag

SEQ ID NO: 457562 - DNA, 25 bp, Homo sapien
gcttggaaatctactttcataaaat

SEQ ID NO: 457563 - DNA, 25 bp, Homo sapien
actacataaaatccctaacagcttg

SEQ ID NO: 457564 - DNA, 25 bp, Homo sapien
cagcttggaaatctactttcataaa

SEQ ID NO: 457565 - DNA, 25 bp, Homo sapien
caacactacataaaatccctaacag

SEQ ID NO: 457566 - DNA, 25 bp, Homo sapien
tcctaagggtccatgctttccctct

SEQ ID NO: 457567 - DNA, 25 bp, Homo sapien
ctgtcttttgtcagtagatactctg

SEQ ID NO: 457568 - DNA, 25 bp, Homo sapien
tgtcagtagatactctggtcctctc

SEQ ID NO: 457569 - DNA, 25 bp, Homo sapien
tatctcctaagggtccatgctttcc

SEQ ID NO: 457570 - DNA, 25 bp, Homo sapien
ccttcagggttgatcactgcaaaca

SEQ ID NO: 457571 - DNA, 25 bp, Homo sapien
tgagggtcctactgtttcacagcag

SEQ ID NO: 457572 - DNA, 25 bp, Homo sapien
gggagatattacctcaaccttcagg

SEQ ID NO: 457573 - DNA, 25 bp, Homo sapien
cacagcagaaagtaagccagattgc

SEQ ID NO: 457574 - DNA, 25 bp, Homo sapien
ccaccacaagaccagttctctttac

SEQ ID NO: 457575 - DNA, 25 bp, Homo sapien
accaccacaagaccagttctcttta

SEQ ID NO: 457576 - DNA, 25 bp, Homo sapien
aacagtggagaccaacaattttcat

SEQ ID NO: 457577 - DNA, 25 bp, Homo sapien
gtttttcagccttgacccatgttta

SEQ ID NO: 457578 - DNA, 25 bp, Homo sapien
gcccggcatgtaaatcttcactaga

SEQ ID NO: 457579 - DNA, 25 bp, Homo sapien
taataagagcaatctgcccggcatg

SEQ ID NO: 457580 - DNA, 25 bp, Homo sapien
tcattttcaaacaagcagaacatgg

SEQ ID NO: 457581 - DNA, 25 bp, Homo sapien
ttacaatcattttcaaacaagcaga

SEQ ID NO: 457582 - DNA, 25 bp, Homo sapien
tttcaaacaagcagaacatggtttt

SEQ ID NO: 457583 - DNA, 25 bp, Homo sapien
tttacaatcattttcaaacaagcag

SEQ ID NO: 457584 - DNA, 25 bp, Homo sapien
tgctcgaaatacttgttgcaggccg

SEQ ID NO: 457585 - DNA, 25 bp, Homo sapien
ggcactgaccttgacatagatctga

SEQ ID NO: 457586 - DNA, 25 bp, Homo sapien
ttgacatagatctgatcattactct

SEQ ID NO: 457587 - DNA, 25 bp, Homo sapien
tgccatttatagctcaaggcactga

SEQ ID NO: 457588 - DNA, 25 bp, Homo sapien
tgttcgagttctcataatccatttc

SEQ ID NO: 457589 - DNA, 25 bp, Homo sapien
tgtttcctccggttgcatttcacct

SEQ ID NO: 457590 - DNA, 25 bp, Homo sapien
tcagagtgtttcctccggttgcatt

SEQ ID NO: 457591 - DNA, 25 bp, Homo sapien
atttcaccttccctctgttcgagtt

SEQ ID NO: 457592 - DNA, 25 bp, Homo sapien
tacgaaaggtaattatgagatacat

SEQ ID NO: 457593 - DNA, 25 bp, Homo sapien
gatacatgctgaatttagggttttc

SEQ ID NO: 457594 - DNA, 25 bp, Homo sapien
tgcagtatatctagaaccctcaata

SEQ ID NO: 457595 - DNA, 25 bp, Homo sapien
aaaatccaccctatcattgcagtat

SEQ ID NO: 457596 - DNA, 25 bp, Homo sapien
gcctccgtaagcaaacttatttctg

SEQ ID NO: 457597 - DNA, 25 bp, Homo sapien
cactgctttggcatctaactttgca

SEQ ID NO: 457598 - DNA, 25 bp, Homo sapien
tgggcccgactgtttgacttcaatc

SEQ ID NO: 457599 - DNA, 25 bp, Homo sapien
tgcatcttcagaactagaagcctcc

SEQ ID NO: 457600 - DNA, 25 bp, Homo sapien
cacaccaaaggttgaagtaagacac

SEQ ID NO: 457601 - DNA, 25 bp, Homo sapien
ataacacaccaaaggttgaagtaag

SEQ ID NO: 457602 - DNA, 25 bp, Homo sapien
caccaaaggttgaagtaagacacac

SEQ ID NO: 457603 - DNA, 25 bp, Homo sapien
ccaaaggttgaagtaagacacacac

SEQ ID NO: 457604 - DNA, 25 bp, Homo sapien
tagcatccggcaatgtttttgtaat

SEQ ID NO: 457605 - DNA, 25 bp, Homo sapien
gtcacatttgtaagaggtctcctct

SEQ ID NO: 457606 - DNA, 25 bp, Homo sapien
taaagtcacatttgtaagaggtctc

SEQ ID NO: 457607 - DNA, 25 bp, Homo sapien
gtcagtgttagcatccggcaatgtt

SEQ ID NO: 457608 - DNA, 25 bp, Homo sapien
cctgaaccatgcagtgccttgcaat

SEQ ID NO: 457609 - DNA, 25 bp, Homo sapien
gctaaagtatggattttcacacagg

SEQ ID NO: 457610 - DNA, 25 bp, Homo sapien
gattgctacggtaaaatccgaagtg

SEQ ID NO: 457611 - DNA, 25 bp, Homo sapien
taaagttcggcacactggaagctac

SEQ ID NO: 457612 - DNA, 25 bp, Homo sapien
tttcaatggcgattctatttgctgc

SEQ ID NO: 457613 - DNA, 25 bp, Homo sapien
tgccagctgagaacctcccttctgt

SEQ ID NO: 457614 - DNA, 25 bp, Homo sapien
caacttgctgattgaagacatacca

SEQ ID NO: 457615 - DNA, 25 bp, Homo sapien
ccttctgttgactactgcagaccag

SEQ ID NO: 457616 - DNA, 25 bp, Homo sapien
tctttacaaagctggagttggcaaa

SEQ ID NO: 457617 - DNA, 25 bp, Homo sapien
gaattatagctacaacagctgttcc

SEQ ID NO: 457618 - DNA, 25 bp, Homo sapien
gaattgagcaattattaactctgcg

SEQ ID NO: 457619 - DNA, 25 bp, Homo sapien
tctgcgaacatcagaacaccttgtg

SEQ ID NO: 457620 - DNA, 25 bp, Homo sapien
tcacagctggtatgataaggtgttc

SEQ ID NO: 457621 - DNA, 25 bp, Homo sapien
tcgccctcttactctggaacacagg

SEQ ID NO: 457622 - DNA, 25 bp, Homo sapien
taaggtgttctatgagaagcaagag

SEQ ID NO: 457623 - DNA, 25 bp, Homo sapien
taaaatagcagattcacatcgccct

SEQ ID NO: 457624 - DNA, 25 bp, Homo sapien
aaattgaccatcaaatgcgtaagca

SEQ ID NO: 457625 - DNA, 25 bp, Homo sapien
cagtagtgtagagtatctaataaac

SEQ ID NO: 457626 - DNA, 25 bp, Homo sapien
caaatgcgtaagcagggctttatgt

SEQ ID NO: 457627 - DNA, 25 bp, Homo sapien
tacttataactatacagtagtgtag

SEQ ID NO: 457628 - DNA, 25 bp, Homo sapien
agtcaaattcctggggctctttgat

SEQ ID NO: 457629 - DNA, 25 bp, Homo sapien
aatcattgagtcaaattcctggggc

SEQ ID NO: 457630 - DNA, 25 bp, Homo sapien
ttgagtcaaattcctggggctcttt

SEQ ID NO: 457631 - DNA, 25 bp, Homo sapien
tcaaattcctggggctctttgatca

SEQ ID NO: 457632 - DNA, 25 bp, Homo sapien
tgccccaactcctgttttatgatcc

SEQ ID NO: 457633 - DNA, 25 bp, Homo sapien
ctgccccaactcctgttttatgatc

SEQ ID NO: 457634 - DNA, 25 bp, Homo sapien
ctacaaagtacatggcacctgttcc

SEQ ID NO: 457635 - DNA, 25 bp, Homo sapien
acaaagtacatggcacctgttccat

SEQ ID NO: 457636 - DNA, 25 bp, Homo sapien
caaagtacatggcacctgttccatc

SEQ ID NO: 457637 - DNA, 25 bp, Homo sapien
tacaaagtacatggcacctgttcca

SEQ ID NO: 457638 - DNA, 25 bp, Homo sapien
tccgcatgtatgatgtatctgaatt

SEQ ID NO: 457639 - DNA, 25 bp, Homo sapien
taaatgtcaaggcattctgttccgc

SEQ ID NO: 457640 - DNA, 25 bp, Homo sapien
tccatgtgtgggaagtcagcatact

SEQ ID NO: 457641 - DNA, 25 bp, Homo sapien
gtcatccatgtgtgggaagtcagca

SEQ ID NO: 457642 - DNA, 25 bp, Homo sapien
catcacatgggcactttgtcacaaa

SEQ ID NO: 457643 - DNA, 25 bp, Homo sapien
ctttaattaaaggtacacactcatc

SEQ ID NO: 457644 - DNA, 25 bp, Homo sapien
aacctcatgtaagagatgtctgcct

SEQ ID NO: 457645 - DNA, 25 bp, Homo sapien
tctacatctcctgcatagatttgtt

SEQ ID NO: 457646 - DNA, 25 bp, Homo sapien
ttttgttcaagaccataagctcctg

SEQ ID NO: 457647 - DNA, 25 bp, Homo sapien
ataagctcctgatggattcagctgc

SEQ ID NO: 457648 - DNA, 25 bp, Homo sapien
gaccataagctcctgatggattcag

SEQ ID NO: 457649 - DNA, 25 bp, Homo sapien
tcaagaccataagctcctgatggat

SEQ ID NO: 457650 - DNA, 25 bp, Homo sapien
gagtggtacaagcatggatcactgc

SEQ ID NO: 457651 - DNA, 25 bp, Homo sapien
tgtagcatagataaattaacctttt

SEQ ID NO: 457652 - DNA, 25 bp, Homo sapien
ttggagtagagtggtacaagcatgg

SEQ ID NO: 457653 - DNA, 25 bp, Homo sapien
caacctcttcatgcttaagagatcc

SEQ ID NO: 457654 - DNA, 25 bp, Homo sapien
gcttactgagatcaaacacttgttc

SEQ ID NO: 457655 - DNA, 25 bp, Homo sapien
taaatcctagatacaagccctttgt

SEQ ID NO: 457656 - DNA, 25 bp, Homo sapien
tgaactgtcacaaagcaaacatatg

SEQ ID NO: 457657 - DNA, 25 bp, Homo sapien
catggcttgcctttgcactcttgta

SEQ ID NO: 457658 - DNA, 25 bp, Homo sapien
ctgctactggcactgagagagtatc

SEQ ID NO: 457659 - DNA, 25 bp, Homo sapien
gagtggaagggcacttgagagttgt

SEQ ID NO: 457660 - DNA, 25 bp, Homo sapien
cctgctactggcactgagagagtat

SEQ ID NO: 457661 - DNA, 25 bp, Homo sapien
gtggaagggcacttgagagttgtca

SEQ ID NO: 457662 - DNA, 25 bp, Homo sapien
caagcaattggcccgcttcagtctc

SEQ ID NO: 457663 - DNA, 25 bp, Homo sapien
ccacatttaaccaatatatggtatg

SEQ ID NO: 457664 - DNA, 25 bp, Homo sapien
gcctaccacatttaaccaatatatg

SEQ ID NO: 457665 - DNA, 25 bp, Homo sapien
tcaagcaattggcccgcttcagtct

SEQ ID NO: 457666 - DNA, 25 bp, Homo sapien
aaactaaacataaagtgtatagctt

SEQ ID NO: 457667 - DNA, 25 bp, Homo sapien
ctaaacataaagtgtatagcttgat

SEQ ID NO: 457668 - DNA, 25 bp, Homo sapien
ttaaagtatgcaataaactaaacat

SEQ ID NO: 457669 - DNA, 25 bp, Homo sapien
taaagtatgcaataaactaaacata

SEQ ID NO: 457670 - DNA, 25 bp, Homo sapien
actgaattcactcaacagtgtacgg

SEQ ID NO: 457671 - DNA, 25 bp, Homo sapien
gggacgtcctattactagactggaa

SEQ ID NO: 457672 - DNA, 25 bp, Homo sapien
ggaagacggacttatctgactgggc

SEQ ID NO: 457673 - DNA, 25 bp, Homo sapien
ctgggaaaagagtatggcttcaacc

SEQ ID NO: 457674 - DNA, 25 bp, Homo sapien
gattccgaggcgcagcttcttgtcc

SEQ ID NO: 457675 - DNA, 25 bp, Homo sapien
tggattccgaggcgcagcttcttgt

SEQ ID NO: 457676 - DNA, 25 bp, Homo sapien
agtggattccgaggcgcagcttctt

SEQ ID NO: 457677 - DNA, 25 bp, Homo sapien
ttagtggattccgaggcgcagcttc

SEQ ID NO: 457678 - DNA, 25 bp, Homo sapien
cttgaggttcccctgcagtgtagac

SEQ ID NO: 457679 - DNA, 25 bp, Homo sapien
agaagtgcaatgaaaagttcttgag

SEQ ID NO: 457680 - DNA, 25 bp, Homo sapien
tttagaagtgcaatgaaaagttctt

SEQ ID NO: 457681 - DNA, 25 bp, Homo sapien
ttcttgaggttcccctgcagtgtag

SEQ ID NO: 457682 - DNA, 25 bp, Homo sapien
tacattggttgaagttattgctccc

SEQ ID NO: 457683 - DNA, 25 bp, Homo sapien
gtgaagcagaccctttcaaattggc

SEQ ID NO: 457684 - DNA, 25 bp, Homo sapien
cagaggcatgacctcttgtgaagca

SEQ ID NO: 457685 - DNA, 25 bp, Homo sapien
gatgacacttatttccctggagcag

SEQ ID NO: 457686 - DNA, 25 bp, Homo sapien
ttcctattgctacccaaagtctgtg

SEQ ID NO: 457687 - DNA, 25 bp, Homo sapien
caaagccatgagacaacctatgtta

SEQ ID NO: 457688 - DNA, 25 bp, Homo sapien
gagtcagtgatatcaagcagcgaca

SEQ ID NO: 457689 - DNA, 25 bp, Homo sapien
tgagaaatcacagacagcaatctgg

SEQ ID NO: 457690 - DNA, 25 bp, Homo sapien
catgcctctcttaatagtactgtgg

SEQ ID NO: 457691 - DNA, 25 bp, Homo sapien
tctgagaaactggtaggaagcccag

SEQ ID NO: 457692 - DNA, 25 bp, Homo sapien
caatttgggaggtaagcaatctcag

SEQ ID NO: 457693 - DNA, 25 bp, Homo sapien
caatgtttggatggtcgtgcgtgta

SEQ ID NO: 457694 - DNA, 25 bp, Homo sapien
cacagtaagtttccaggagaggtgg

SEQ ID NO: 457695 - DNA, 25 bp, Homo sapien
acagtaagtttccaggagaggtggg

SEQ ID NO: 457696 - DNA, 25 bp, Homo sapien
actttggtggtcctcgaggtcctgg

SEQ ID NO: 457697 - DNA, 25 bp, Homo sapien
gtgctggtgatcattgctgtgaatc

SEQ ID NO: 457698 - DNA, 25 bp, Homo sapien
cgcaggctgggaacagtcgtcagca

SEQ ID NO: 457699 - DNA, 25 bp, Homo sapien
gcacctgggaagagacgcaggctgg

SEQ ID NO: 457700 - DNA, 25 bp, Homo sapien
gggttctggtgaccctaatgccctg

SEQ ID NO: 457701 - DNA, 25 bp, Homo sapien
gttgggccgcatcgcttctcgcctg

SEQ ID NO: 457702 - DNA, 25 bp, Homo sapien
acactaaggtctgcaaacaaaactc

SEQ ID NO: 457703 - DNA, 25 bp, Homo sapien
ggataaatgtgaagtcccacactaa

SEQ ID NO: 457704 - DNA, 25 bp, Homo sapien
attgcagatgccgccagatgtgttc

SEQ ID NO: 457705 - DNA, 25 bp, Homo sapien
gacatacaccctgctaccatccttt

SEQ ID NO: 457706 - DNA, 25 bp, Homo sapien
agatgccgccagatgtgttctgccc

SEQ ID NO: 457707 - DNA, 25 bp, Homo sapien
cacgctcatgcttagcaaaacagac

SEQ ID NO: 457708 - DNA, 25 bp, Homo sapien
acgatgtgctcttgggaccaactct

SEQ ID NO: 457709 - DNA, 25 bp, Homo sapien
cacgatgtgctcttgggaccaactc

SEQ ID NO: 457710 - DNA, 25 bp, Homo sapien
cgatgtgctcttgggaccaactcta

SEQ ID NO: 457711 - DNA, 25 bp, Homo sapien
gatgtgctcttgggaccaactctaa

SEQ ID NO: 457712 - DNA, 25 bp, Homo sapien
gatccctctgccgaccctgaggaca

SEQ ID NO: 457713 - DNA, 25 bp, Homo sapien
aagggaggatagacaggaggtgagg

SEQ ID NO: 457714 - DNA, 25 bp, Homo sapien
atccctctgccgaccctgaggacat

SEQ ID NO: 457715 - DNA, 25 bp, Homo sapien
tccctctgccgaccctgaggacatg

SEQ ID NO: 457716 - DNA, 25 bp, Homo sapien
aggcctttgtaagtctgtcccctgc

SEQ ID NO: 457717 - DNA, 25 bp, Homo sapien
gaggcctttgtaagtctgtcccctg

SEQ ID NO: 457718 - DNA, 25 bp, Homo sapien
tcagaggcctttgtaagtctgtccc

SEQ ID NO: 457719 - DNA, 25 bp, Homo sapien
ggaatcagaggcctttgtaagtctg

SEQ ID NO: 457720 - DNA, 25 bp, Homo sapien
tgctggttagggatggatcctggga

SEQ ID NO: 457721 - DNA, 25 bp, Homo sapien
ttgctggttagggatggatcctggg

SEQ ID NO: 457722 - DNA, 25 bp, Homo sapien
tgggacaggaccccgagtgacacac

SEQ ID NO: 457723 - DNA, 25 bp, Homo sapien
ggatttgtttgcacaaagttcactg

SEQ ID NO: 457724 - DNA, 25 bp, Homo sapien
aggaagctccccctttgcacaaagg

SEQ ID NO: 457725 - DNA, 25 bp, Homo sapien
cctttgggcttgcattagctctttc

SEQ ID NO: 457726 - DNA, 25 bp, Homo sapien
tagcaacccattatcccagctcagt

SEQ ID NO: 457727 - DNA, 25 bp, Homo sapien
cattacttgagtgttgtgtagtttt

SEQ ID NO: 457728 - DNA, 25 bp, Homo sapien
gaaccctcccttatacattacttga

SEQ ID NO: 457729 - DNA, 25 bp, Homo sapien
cagtttctaaatcatgaatcgttgc

SEQ ID NO: 457730 - DNA, 25 bp, Homo sapien
gaatcgttgccttccacaggaaccc

SEQ ID NO: 457731 - DNA, 25 bp, Homo sapien
tttcagagccattgtatcagatgtt

SEQ ID NO: 457732 - DNA, 25 bp, Homo sapien
ttcagagccattgtatcagatgttg

SEQ ID NO: 457733 - DNA, 25 bp, Homo sapien
ttttcagagccattgtatcagatgt

SEQ ID NO: 457734 - DNA, 25 bp, Homo sapien
agaggatggatcaacaagggtcacg

SEQ ID NO: 457735 - DNA, 25 bp, Homo sapien
taggaatcagcatagtgggatgccc

SEQ ID NO: 457736 - DNA, 25 bp, Homo sapien
aacatgtggctctggatagagtgac

SEQ ID NO: 457737 - DNA, 25 bp, Homo sapien
cacaaaccatgggtccagggagtct

SEQ ID NO: 457738 - DNA, 25 bp, Homo sapien
tgctgtgtgagtgagtccatgacct

SEQ ID NO: 457739 - DNA, 25 bp, Homo sapien
ccattggttgtttcagaggagccta

SEQ ID NO: 457740 - DNA, 25 bp, Homo sapien
catgtgggctgccaagagactgtct

SEQ ID NO: 457741 - DNA, 25 bp, Homo sapien
cagtgttcccagagagggttctgta

SEQ ID NO: 457742 - DNA, 25 bp, Homo sapien
ctttagataagtagttaagaacatt

SEQ ID NO: 457743 - DNA, 25 bp, Homo sapien
gaaatagtcggtcactgccacacat

SEQ ID NO: 457744 - DNA, 25 bp, Homo sapien
acatttgaacgaaatagtcggtcac

SEQ ID NO: 457745 - DNA, 25 bp, Homo sapien
taagaacatttgaacgaaatagtcg

SEQ ID NO: 457746 - DNA, 25 bp, Homo sapien
ggttggccatgtcatcaggtaaatg

SEQ ID NO: 457747 - DNA, 25 bp, Homo sapien
cttgaggttggccatgtcatcaggt

SEQ ID NO: 457748 - DNA, 25 bp, Homo sapien
gccatgtcatcaggtaaatgacttc

SEQ ID NO: 457749 - DNA, 25 bp, Homo sapien
tgaggttggccatgtcatcaggtaa

SEQ ID NO: 457750 - DNA, 25 bp, Homo sapien
cattcgccagaccttccgatggagc

SEQ ID NO: 457751 - DNA, 25 bp, Homo sapien
aatgaggtcagcagcgtgtgtgctc

SEQ ID NO: 457752 - DNA, 25 bp, Homo sapien
tctatgttttgtgcaggcggcttcc

SEQ ID NO: 457753 - DNA, 25 bp, Homo sapien
gagctgaaggcctccgggaagaata

SEQ ID NO: 457754 - DNA, 25 bp, Homo sapien
actctaagtaatgctacaatgtgca

SEQ ID NO: 457755 - DNA, 25 bp, Homo sapien
gaaataagcattcagagagttccag

SEQ ID NO: 457756 - DNA, 25 bp, Homo sapien
caccatcatagtgtatcattgggta

SEQ ID NO: 457757 - DNA, 25 bp, Homo sapien
gctataccataagtaaccattttca

SEQ ID NO: 457758 - DNA, 25 bp, Homo sapien
ttttctcatttttctgtttctcctc

SEQ ID NO: 457759 - DNA, 25 bp, Homo sapien
tttcaactgttttctcatttttctg

SEQ ID NO: 457760 - DNA, 25 bp, Homo sapien
ttcaactgttttctcatttttctgt

SEQ ID NO: 457761 - DNA, 25 bp, Homo sapien
tctcatttttctgtttctcctccat

SEQ ID NO: 457762 - DNA, 25 bp, Homo sapien
ctttaatttcatcacctactgtttc

SEQ ID NO: 457763 - DNA, 25 bp, Homo sapien
taatttcatcacctactgtttcttt

SEQ ID NO: 457764 - DNA, 25 bp, Homo sapien
tctttgccctttgattcttctgcca

SEQ ID NO: 457765 - DNA, 25 bp, Homo sapien
tactgtttctttgccctttgattct

SEQ ID NO: 457766 - DNA, 25 bp, Homo sapien
ccttgccgttggaagagtctctgtt

SEQ ID NO: 457767 - DNA, 25 bp, Homo sapien
ttaaggaggtatgtccttgccgttg

SEQ ID NO: 457768 - DNA, 25 bp, Homo sapien
tgttgcagtttaggatgagttagga

SEQ ID NO: 457769 - DNA, 25 bp, Homo sapien
tctctgttttgttgcagtttaggat

SEQ ID NO: 457770 - DNA, 25 bp, Homo sapien
tcccgattgactgctagcgctctcg

SEQ ID NO: 457771 - DNA, 25 bp, Homo sapien
tctcggcttgtctcgcgcactgtag

SEQ ID NO: 457772 - DNA, 25 bp, Homo sapien
ttactcgtagtcgagaggccggcat

SEQ ID NO: 457773 - DNA, 25 bp, Homo sapien
gctgagccaatggagttactcgtag

SEQ ID NO: 457774 - DNA, 25 bp, Homo sapien
taaaccgatcactacatgggaggag

SEQ ID NO: 457775 - DNA, 25 bp, Homo sapien
caggagcccattgattggtcgcact

SEQ ID NO: 457776 - DNA, 25 bp, Homo sapien
ctccgttggcaaggctgggttcctc

SEQ ID NO: 457777 - DNA, 25 bp, Homo sapien
gctgcaccctgagacagacaggctg

SEQ ID NO: 457778 - DNA, 25 bp, Homo sapien
tatttaagggctcgtgtaatcttac

SEQ ID NO: 457779 - DNA, 25 bp, Homo sapien
tccatgatcttggatgaatgactga

SEQ ID NO: 457780 - DNA, 25 bp, Homo sapien
acttgctgtatttaagggctcgtgt

SEQ ID NO: 457781 - DNA, 25 bp, Homo sapien
tggatgaatgactgaacttgctgta

SEQ ID NO: 457782 - DNA, 25 bp, Homo sapien
cagagacaactggtgttaatatttc

SEQ ID NO: 457783 - DNA, 25 bp, Homo sapien
tcatccagagacaactggtgttaat

SEQ ID NO: 457784 - DNA, 25 bp, Homo sapien
cagcgttcacacctgaaaatttgaa

SEQ ID NO: 457785 - DNA, 25 bp, Homo sapien
atttgaaaactgaacgtgcacaagt

SEQ ID NO: 457786 - DNA, 25 bp, Homo sapien
tttaagcagctctcaccagcgttca

SEQ ID NO: 457787 - DNA, 25 bp, Homo sapien
actgaacgtgcacaagtaaaacatg

SEQ ID NO: 457788 - DNA, 25 bp, Homo sapien
aatgagtgacagtccaaccaaaaga

SEQ ID NO: 457789 - DNA, 25 bp, Homo sapien
caaaagacaagtccatgaatcttct

SEQ ID NO: 457790 - DNA, 25 bp, Homo sapien
ccattctaaacctggtatcctttga

SEQ ID NO: 457791 - DNA, 25 bp, Homo sapien
ggaatccaactgtggtctctataaa

SEQ ID NO: 457792 - DNA, 25 bp, Homo sapien
gctatggaagcccttaaccacagta

SEQ ID NO: 457793 - DNA, 25 bp, Homo sapien
gaaaatactgaatctgcttctacaa

SEQ ID NO: 457794 - DNA, 25 bp, Homo sapien
tagatccagttaacaacttctgtgc

SEQ ID NO: 457795 - DNA, 25 bp, Homo sapien
taaaatggcacttgttcctcatgtc

SEQ ID NO: 457796 - DNA, 25 bp, Homo sapien
tagaaatgccaatacatgctactaa

SEQ ID NO: 457797 - DNA, 25 bp, Homo sapien
agtcttagaaatgccaatacatgct

SEQ ID NO: 457798 - DNA, 25 bp, Homo sapien
aaagtcttagaaatgccaatacatg

SEQ ID NO: 457799 - DNA, 25 bp, Homo sapien
tcttagaaatgccaatacatgctac

SEQ ID NO: 457800 - DNA, 25 bp, Homo sapien
attttgtacttgttcaaaaatgaag

SEQ ID NO: 457801 - DNA, 25 bp, Homo sapien
atcttttgtttcagtgactgcagca

SEQ ID NO: 457802 - DNA, 25 bp, Homo sapien
tattggtggcagacccatctttgat

SEQ ID NO: 457803 - DNA, 25 bp, Homo sapien
gtttcagtgactgcagcacattttg

SEQ ID NO: 457804 - DNA, 25 bp, Homo sapien
cactagaatcattgcttggatgtat

SEQ ID NO: 457805 - DNA, 25 bp, Homo sapien
cctttattgatgttgaactgttaat

SEQ ID NO: 457806 - DNA, 25 bp, Homo sapien
tcattcactagaatcattgcttgga

SEQ ID NO: 457807 - DNA, 25 bp, Homo sapien
tgttaattatagttgcttcattcac

SEQ ID NO: 457808 - DNA, 25 bp, Homo sapien
tgcttcatggcaagaaaatatcaga

SEQ ID NO: 457809 - DNA, 25 bp, Homo sapien
gaatactctacaatgggaatagaga

SEQ ID NO: 457810 - DNA, 25 bp, Homo sapien
tcagagaatactctacaatgggaat

SEQ ID NO: 457811 - DNA, 25 bp, Homo sapien
ctgcttcatggcaagaaaatatcag

SEQ ID NO: 457812 - DNA, 25 bp, Homo sapien
cttatggtatgagtgtatagattcc

SEQ ID NO: 457813 - DNA, 25 bp, Homo sapien
gcactccctcaacatagagaggaga

SEQ ID NO: 457814 - DNA, 25 bp, Homo sapien
taatactatctaagaagccaggaca

SEQ ID NO: 457815 - DNA, 25 bp, Homo sapien
aaaagtcttgttaatactatctaag

SEQ ID NO: 457816 - DNA, 25 bp, Homo sapien
ctgctttgggcattcacttctttct

SEQ ID NO: 457817 - DNA, 25 bp, Homo sapien
cactgctttgggcattcacttcttt

SEQ ID NO: 457818 - DNA, 25 bp, Homo sapien
gctttgggcattcacttctttctgt

SEQ ID NO: 457819 - DNA, 25 bp, Homo sapien
ttgggcattcacttctttctgtgat

SEQ ID NO: 457820 - DNA, 25 bp, Homo sapien
ctttcacctattagggtggtataat

SEQ ID NO: 457821 - DNA, 25 bp, Homo sapien
tttcacttattctcataggacccat

SEQ ID NO: 457822 - DNA, 25 bp, Homo sapien
tattctcataggacccatttatctt

SEQ ID NO: 457823 - DNA, 25 bp, Homo sapien
ggtataatgtgctctcaaatctcac

SEQ ID NO: 457824 - DNA, 25 bp, Homo sapien
acagtgtcagttacataactctccc

SEQ ID NO: 457825 - DNA, 25 bp, Homo sapien
catttgccaacagtgtcagttacat

SEQ ID NO: 457826 - DNA, 25 bp, Homo sapien
gccaacagtgtcagttacataactc

SEQ ID NO: 457827 - DNA, 25 bp, Homo sapien
tacatttgccaacagtgtcagttac

SEQ ID NO: 457828 - DNA, 25 bp, Homo sapien
gaaagagacccttgtgactgttacc

SEQ ID NO: 457829 - DNA, 25 bp, Homo sapien
aatgttggacaacccacttagagtg

SEQ ID NO: 457830 - DNA, 25 bp, Homo sapien
tggtgtagcactggtcctcagatgg

SEQ ID NO: 457831 - DNA, 25 bp, Homo sapien
tagaatctctacctcaagcctggct

SEQ ID NO: 457832 - DNA, 25 bp, Homo sapien
ggcatgcaaaaccatgctgggctaa

SEQ ID NO: 457833 - DNA, 25 bp, Homo sapien
gcctggcccagtatatttattttct

SEQ ID NO: 457834 - DNA, 25 bp, Homo sapien
catgcctggcccagtatatttattt

SEQ ID NO: 457835 - DNA, 25 bp, Homo sapien
caggcatgcaaaaccatgctgggct

SEQ ID NO: 457836 - DNA, 25 bp, Homo sapien
aaatgcattggatttgttttcctgt

SEQ ID NO: 457837 - DNA, 25 bp, Homo sapien
gagggaaatgcattggatttgtttt

SEQ ID NO: 457838 - DNA, 25 bp, Homo sapien
ggagttttcacatgatgtagaggga

SEQ ID NO: 457839 - DNA, 25 bp, Homo sapien
ttttcacatgatgtagagggaaatg

SEQ ID NO: 457840 - DNA, 25 bp, Homo sapien
gatttagactgagtgaatttgttcc

SEQ ID NO: 457841 - DNA, 25 bp, Homo sapien
taaggagctaaagtgtgaacttagc

SEQ ID NO: 457842 - DNA, 25 bp, Homo sapien
gaaacagtgtctatctacaactctc

SEQ ID NO: 457843 - DNA, 25 bp, Homo sapien
tttgagacccactcaaactgcaatg

SEQ ID NO: 457844 - DNA, 25 bp, Homo sapien
tcacaaagcctagtaagaaccgagg

SEQ ID NO: 457845 - DNA, 25 bp, Homo sapien
tctgtgacagttaaagagagggtac

SEQ ID NO: 457846 - DNA, 25 bp, Homo sapien
tatcctcaagttctagctgccctga

SEQ ID NO: 457847 - DNA, 25 bp, Homo sapien
tacgcaacattggtacgaaactgta

SEQ ID NO: 457848 - DNA, 25 bp, Homo sapien
aaatattaatgtagatgactcaata

SEQ ID NO: 457849 - DNA, 25 bp, Homo sapien
tgggacgaaaggcatgcgtcacaaa

SEQ ID NO: 457850 - DNA, 25 bp, Homo sapien
gaaaggcatgcgtcacaaagcccag

SEQ ID NO: 457851 - DNA, 25 bp, Homo sapien
cctggcctcgggtatgaattttttg

SEQ ID NO: 457852 - DNA, 25 bp, Homo sapien
actaatacactatataaagcagtgc

SEQ ID NO: 457853 - DNA, 25 bp, Homo sapien
cattgatagaaatggtctatacctg

SEQ ID NO: 457854 - DNA, 25 bp, Homo sapien
taatacactatataaagcagtgcca

SEQ ID NO: 457855 - DNA, 25 bp, Homo sapien
aaaaacttcctccattgatagaaat

SEQ ID NO: 457856 - DNA, 25 bp, Homo sapien
tgtttgccttcaacaatagtaccaa

SEQ ID NO: 457857 - DNA, 25 bp, Homo sapien
tcaagaatcctttatactgtttgcc

SEQ ID NO: 457858 - DNA, 25 bp, Homo sapien
tcacaatcatattgatacatctgaa

SEQ ID NO: 457859 - DNA, 25 bp, Homo sapien
cataatatgtaatctacctcacaat

SEQ ID NO: 457860 - DNA, 25 bp, Homo sapien
agagagagaatttccttattttctg

SEQ ID NO: 457861 - DNA, 25 bp, Homo sapien
gagagagaatttccttattttctgt

SEQ ID NO: 457862 - DNA, 25 bp, Homo sapien
ttcaagagagagaatttccttattt

SEQ ID NO: 457863 - DNA, 25 bp, Homo sapien
caagagagagaatttccttattttc

SEQ ID NO: 457864 - DNA, 25 bp, Homo sapien
ttcgaagatgagtctttttctctaa

SEQ ID NO: 457865 - DNA, 25 bp, Homo sapien
tgactttggtaagataaattcgaag

SEQ ID NO: 457866 - DNA, 25 bp, Homo sapien
ccagagcagtcatgactttggtaag

SEQ ID NO: 457867 - DNA, 25 bp, Homo sapien
tttcatcagacaagcaccagagcag

SEQ ID NO: 457868 - DNA, 25 bp, Homo sapien
aatgagagtttgtctttgcatgtcg

SEQ ID NO: 457869 - DNA, 25 bp, Homo sapien
catgtcgtctttggaagtgacattt

SEQ ID NO: 457870 - DNA, 25 bp, Homo sapien
tggagtgctgaagaatgagagtttg

SEQ ID NO: 457871 - DNA, 25 bp, Homo sapien
tgtctttgcatgtcgtctttggaag

SEQ ID NO: 457872 - DNA, 25 bp, Homo sapien
cacgtttcgtagactccttccacaa

SEQ ID NO: 457873 - DNA, 25 bp, Homo sapien
cgtttcgtagactccttccacaagg

SEQ ID NO: 457874 - DNA, 25 bp, Homo sapien
tctcaagcaggtaacgaaaaacttc

SEQ ID NO: 457875 - DNA, 25 bp, Homo sapien
taaaaagttacactctgtctcaagc

SEQ ID NO: 457876 - DNA, 25 bp, Homo sapien
aaagaaatgggcactgattccactc

SEQ ID NO: 457877 - DNA, 25 bp, Homo sapien
tgctcgaggccacacagtctttctg

SEQ ID NO: 457878 - DNA, 25 bp, Homo sapien
cgagccaactgaacataggtattga

SEQ ID NO: 457879 - DNA, 25 bp, Homo sapien
tgctttgggtaattccgagccaact

SEQ ID NO: 457880 - DNA, 25 bp, Homo sapien
cattaatacaattccaggccctgtg

SEQ ID NO: 457881 - DNA, 25 bp, Homo sapien
ctttgaagagccaagtccccagatg

SEQ ID NO: 457882 - DNA, 25 bp, Homo sapien
tagttcctagtcttgtgcaggtacc

SEQ ID NO: 457883 - DNA, 25 bp, Homo sapien
cctgtgagatactggcctagttcct

SEQ ID NO: 457884 - DNA, 25 bp, Homo sapien
ctgctctacattgggtgctttctcc

SEQ ID NO: 457885 - DNA, 25 bp, Homo sapien
ggctctgaccccattggttttacag

SEQ ID NO: 457886 - DNA, 25 bp, Homo sapien
gggtttagtcctgtgtgctgctcta

SEQ ID NO: 457887 - DNA, 25 bp, Homo sapien
tttctccaacgctttggctctgacc

SEQ ID NO: 457888 - DNA, 25 bp, Homo sapien
tgacaagggggaagttttggcattc

SEQ ID NO: 457889 - DNA, 25 bp, Homo sapien
aagttttggcattccttgctgtcag

SEQ ID NO: 457890 - DNA, 25 bp, Homo sapien
gggaagttttggcattccttgctgt

SEQ ID NO: 457891 - DNA, 25 bp, Homo sapien
cttgacaagggggaagttttggcat

SEQ ID NO: 457892 - DNA, 25 bp, Homo sapien
ttgaggaccatgttggacaactcgg

SEQ ID NO: 457893 - DNA, 25 bp, Homo sapien
gaacacctgtaacctcacttgagga

SEQ ID NO: 457894 - DNA, 25 bp, Homo sapien
taaatgcaaacaaatgtccctctgt

SEQ ID NO: 457895 - DNA, 25 bp, Homo sapien
tgtcatctagacagcgtacacccca

SEQ ID NO: 457896 - DNA, 25 bp, Homo sapien
acgtctaggcaggatgtgtagaatg

SEQ ID NO: 457897 - DNA, 25 bp, Homo sapien
gtctaggcaggatgtgtagaatgtg

SEQ ID NO: 457898 - DNA, 25 bp, Homo sapien
aacgtctaggcaggatgtgtagaat

SEQ ID NO: 457899 - DNA, 25 bp, Homo sapien
cgtctaggcaggatgtgtagaatgt

SEQ ID NO: 457900 - DNA, 25 bp, Homo sapien
tcagtgttagctctgcttagtaatc

SEQ ID NO: 457901 - DNA, 25 bp, Homo sapien
gattattactgaactttggtggaca

SEQ ID NO: 457902 - DNA, 25 bp, Homo sapien
aggatgtgtttccaatcctaatggg

SEQ ID NO: 457903 - DNA, 25 bp, Homo sapien
catttctcagttttagcagttctag

SEQ ID NO: 457904 - DNA, 25 bp, Homo sapien
agtgttagacttaacaactttgaag

SEQ ID NO: 457905 - DNA, 25 bp, Homo sapien
acatctatgtttattcctttcccta

SEQ ID NO: 457906 - DNA, 25 bp, Homo sapien
ggatggtatattggctagattttta

SEQ ID NO: 457907 - DNA, 25 bp, Homo sapien
gaaaaagaaccaattgattgataat

SEQ ID NO: 457908 - DNA, 25 bp, Homo sapien
ctctttactcaagtacagataatat

SEQ ID NO: 457909 - DNA, 25 bp, Homo sapien
tttactcaagtacagataatatcca

SEQ ID NO: 457910 - DNA, 25 bp, Homo sapien
aaagttattctgtatcactaaaaat

SEQ ID NO: 457911 - DNA, 25 bp, Homo sapien
tattctgtatcactaaaaattctct

SEQ ID NO: 457912 - DNA, 25 bp, Homo sapien
ggattcaggatctctaataactgaa

SEQ ID NO: 457913 - DNA, 25 bp, Homo sapien
attcaggatctctaataactgaatg

SEQ ID NO: 457914 - DNA, 25 bp, Homo sapien
gattcaggatctctaataactgaat

SEQ ID NO: 457915 - DNA, 25 bp, Homo sapien
tagttcacaatgcaaagggtaccct

SEQ ID NO: 457916 - DNA, 25 bp, Homo sapien
taaaagaggcgtatatactcagcac

SEQ ID NO: 457917 - DNA, 25 bp, Homo sapien
tcatcaagtgtcaatcatcataggc

SEQ ID NO: 457918 - DNA, 25 bp, Homo sapien
gagtcaacaagtgtcatcccctttg

SEQ ID NO: 457919 - DNA, 25 bp, Homo sapien
tgacagactccgaggaaacaaattc

SEQ ID NO: 457920 - DNA, 25 bp, Homo sapien
gctctcggggtggtttaaatccatc

SEQ ID NO: 457921 - DNA, 25 bp, Homo sapien
ttctggagtgacagactccgaggaa

SEQ ID NO: 457922 - DNA, 25 bp, Homo sapien
gttttagagttcagatgctctcggg

SEQ ID NO: 457923 - DNA, 25 bp, Homo sapien
aagaggtaggcattcacagaagaaa

SEQ ID NO: 457924 - DNA, 25 bp, Homo sapien
ctacaggtattgagcaagagacaga

SEQ ID NO: 457925 - DNA, 25 bp, Homo sapien
tacaggtattgagcaagagacagag

SEQ ID NO: 457926 - DNA, 25 bp, Homo sapien
aacaggcagaagaggtaggcattca

SEQ ID NO: 457927 - DNA, 25 bp, Homo sapien
tttattatggaatctaagaaaatga

SEQ ID NO: 457928 - DNA, 25 bp, Homo sapien
tgtttattatggaatctaagaaaat

SEQ ID NO: 457929 - DNA, 25 bp, Homo sapien
gtttattatggaatctaagaaaatg

SEQ ID NO: 457930 - DNA, 25 bp, Homo sapien
gctgccaataaaaggcctaaccctg

SEQ ID NO: 457931 - DNA, 25 bp, Homo sapien
tatcgatccttacaatgtgttaggc

SEQ ID NO: 457932 - DNA, 25 bp, Homo sapien
tctgacccacaataacgagaactgg

SEQ ID NO: 457933 - DNA, 25 bp, Homo sapien
tctctgagggattaaggaattcatc

SEQ ID NO: 457934 - DNA, 25 bp, Homo sapien
catgctgtagatcgtccctcttggg

SEQ ID NO: 457935 - DNA, 25 bp, Homo sapien
gcaactcttcatcacaaaatacctg

SEQ ID NO: 457936 - DNA, 25 bp, Homo sapien
tctgattatccaatgtggtcgcctg

SEQ ID NO: 457937 - DNA, 25 bp, Homo sapien
tggtcgcctggttacatctgctcct

SEQ ID NO: 457938 - DNA, 25 bp, Homo sapien
attaaggaagcggccgacatttcct

SEQ ID NO: 457939 - DNA, 25 bp, Homo sapien
cagtattctttggacatatctgcca

SEQ ID NO: 457940 - DNA, 25 bp, Homo sapien
cttcactgataacttcctagccata

SEQ ID NO: 457941 - DNA, 25 bp, Homo sapien
tttaacttcactgataacttcctag

SEQ ID NO: 457942 - DNA, 25 bp, Homo sapien
gtattctttggacatatctgccacc

SEQ ID NO: 457943 - DNA, 25 bp, Homo sapien
aaaccagtatattgtggcaatcttt

SEQ ID NO: 457944 - DNA, 25 bp, Homo sapien
aaaaccagtatattgtggcaatctt

SEQ ID NO: 457945 - DNA, 25 bp, Homo sapien
aaccagtatattgtggcaatctttc

SEQ ID NO: 457946 - DNA, 25 bp, Homo sapien
aaaaaccagtatattgtggcaatct

SEQ ID NO: 457947 - DNA, 25 bp, Homo sapien
agattgtgccactggtgacaaagtg

SEQ ID NO: 457948 - DNA, 25 bp, Homo sapien
gagattgtgccactggtgacaaagt

SEQ ID NO: 457949 - DNA, 25 bp, Homo sapien
ctgagattgtgccactggtgacaaa

SEQ ID NO: 457950 - DNA, 25 bp, Homo sapien
agctgagattgtgccactggtgaca

SEQ ID NO: 457951 - DNA, 25 bp, Homo sapien
gaagatgtacagaacctaattttta

SEQ ID NO: 457952 - DNA, 25 bp, Homo sapien
tagccattatgtatcgtcgttccga

SEQ ID NO: 457953 - DNA, 25 bp, Homo sapien
caaacaagccttttggagaggagat

SEQ ID NO: 457954 - DNA, 25 bp, Homo sapien
tcgttccgaggcttctaaatagatg

SEQ ID NO: 457955 - DNA, 25 bp, Homo sapien
cagaaaagccctgttctgacgctct

SEQ ID NO: 457956 - DNA, 25 bp, Homo sapien
cagctcctgttaatagtgggaaccc

SEQ ID NO: 457957 - DNA, 25 bp, Homo sapien
tatttgcctaaagcagattggttaa

SEQ ID NO: 457958 - DNA, 25 bp, Homo sapien
gagaagctctgggtattaatatgga

SEQ ID NO: 457959 - DNA, 25 bp, Homo sapien
ctgtaccaagagatttgggcaacaa

SEQ ID NO: 457960 - DNA, 25 bp, Homo sapien
tctgtaccaagagatttgggcaaca

SEQ ID NO: 457961 - DNA, 25 bp, Homo sapien
tgaagaatgccaccaatggaaaatt

SEQ ID NO: 457962 - DNA, 25 bp, Homo sapien
tgggacccagtcatgtgttgaggcc

SEQ ID NO: 457963 - DNA, 25 bp, Homo sapien
agtgtattttgccaacagtgggacc

SEQ ID NO: 457964 - DNA, 25 bp, Homo sapien
cctatcaatatgaggaagaagtgta

SEQ ID NO: 457965 - DNA, 25 bp, Homo sapien
ttaaagattatgtagcactctgcat

SEQ ID NO: 457966 - DNA, 25 bp, Homo sapien
cacagtcccagcttcatagccataa

SEQ ID NO: 457967 - DNA, 25 bp, Homo sapien
tagccataatcccatgttagctctg

SEQ ID NO: 457968 - DNA, 25 bp, Homo sapien
aatcccatgttagctctgttcttgc

SEQ ID NO: 457969 - DNA, 25 bp, Homo sapien
cagcttcatagccataatcccatgt

SEQ ID NO: 457970 - DNA, 25 bp, Homo sapien
gataagctaatttcacaaacaggcg

SEQ ID NO: 457971 - DNA, 25 bp, Homo sapien
gcagtgaacaagataccctatgtgt

SEQ ID NO: 457972 - DNA, 25 bp, Homo sapien
cataaaattagatcctcaggcgctg

SEQ ID NO: 457973 - DNA, 25 bp, Homo sapien
tggacctagaccttcttttgcatgg

SEQ ID NO: 457974 - DNA, 25 bp, Homo sapien
ccactcaaatggttgatgggacagt

SEQ ID NO: 457975 - DNA, 25 bp, Homo sapien
tattgcttctccaacaagtgttaaa

SEQ ID NO: 457976 - DNA, 25 bp, Homo sapien
tatcgatccagatattgcttctcca

SEQ ID NO: 457977 - DNA, 25 bp, Homo sapien
tgggacagtgttttatcgatccaga

SEQ ID NO: 457978 - DNA, 25 bp, Homo sapien
aagagcttgccagaatcttacttac

SEQ ID NO: 457979 - DNA, 25 bp, Homo sapien
gaagactcatttcaaagagcttgcc

SEQ ID NO: 457980 - DNA, 25 bp, Homo sapien
gagaaaatctgtgggaaagaagact

SEQ ID NO: 457981 - DNA, 25 bp, Homo sapien
atctgtgggaaagaagactcatttc

SEQ ID NO: 457982 - DNA, 25 bp, Homo sapien
cctatggcaaagtgcttactctttg

SEQ ID NO: 457983 - DNA, 25 bp, Homo sapien
gatgatcacggccaagtaacctatg

SEQ ID NO: 457984 - DNA, 25 bp, Homo sapien
ctggtttcccagtctgcttgggctt

SEQ ID NO: 457985 - DNA, 25 bp, Homo sapien
ttccactagatagatgatcacggcc

SEQ ID NO: 457986 - DNA, 25 bp, Homo sapien
gaggaaagcctataatgtgaacgac

SEQ ID NO: 457987 - DNA, 25 bp, Homo sapien
ccgaaagaatacagagatgcatgcc

SEQ ID NO: 457988 - DNA, 25 bp, Homo sapien
gagactgacattagggtgttcccca

SEQ ID NO: 457989 - DNA, 25 bp, Homo sapien
ccagcaagatagctcaggtaggtca

SEQ ID NO: 457990 - DNA, 25 bp, Homo sapien
ttgtcacacacactgctccagattc

SEQ ID NO: 457991 - DNA, 25 bp, Homo sapien
gcagagaggggttgtcacacacact

SEQ ID NO: 457992 - DNA, 25 bp, Homo sapien
tgtgcagagaggggttgtcacacac

SEQ ID NO: 457993 - DNA, 25 bp, Homo sapien
tgtcacacacactgctccagattcc

SEQ ID NO: 457994 - DNA, 25 bp, Homo sapien
gctgcactaggtttcgttttcttaa

SEQ ID NO: 457995 - DNA, 25 bp, Homo sapien
aaatctgggctgtcgctttgagtca

SEQ ID NO: 457996 - DNA, 25 bp, Homo sapien
cggatagcgagatcccggaagtgcc

SEQ ID NO: 457997 - DNA, 25 bp, Homo sapien
agatcccggaagtgccccagctgca

SEQ ID NO: 457998 - DNA, 25 bp, Homo sapien
gctggcgccgagcaccctctcgggc

SEQ ID NO: 457999 - DNA, 25 bp, Homo sapien
tgctggcgccgagcaccctctcggg

SEQ ID NO: 458000 - DNA, 25 bp, Homo sapien
tggcgccgagcaccctctcgggccg

SEQ ID NO: 458001 - DNA, 25 bp, Homo sapien
gctgctggcgccgagcaccctctcg

SEQ ID NO: 458002 - DNA, 25 bp, Homo sapien
ccactcgcgcgaaaccatgggcagt

SEQ ID NO: 458003 - DNA, 25 bp, Homo sapien
cccaccaacaggcacgcgagtggtg

SEQ ID NO: 458004 - DNA, 25 bp, Homo sapien
gaggtaaaccgaagcgtgcccacca

SEQ ID NO: 458005 - DNA, 25 bp, Homo sapien
tggtgagccaagttcgtccagcgcc

SEQ ID NO: 458006 - DNA, 25 bp, Homo sapien
cggaggggcgctaggagagttgaca

SEQ ID NO: 458007 - DNA, 25 bp, Homo sapien
cgctaggagagttgacatcggttgt

SEQ ID NO: 458008 - DNA, 25 bp, Homo sapien
tgacatcggttgtggtggaagcact

SEQ ID NO: 458009 - DNA, 25 bp, Homo sapien
ttgacatcggttgtggtggaagcac

SEQ ID NO: 458010 - DNA, 25 bp, Homo sapien
atcagggcgcccctccactgtcctg

SEQ ID NO: 458011 - DNA, 25 bp, Homo sapien
cgcatcagggcgcccctccactgtc

SEQ ID NO: 458012 - DNA, 25 bp, Homo sapien
cagggcgcccctccactgtcctggt

SEQ ID NO: 458013 - DNA, 25 bp, Homo sapien
catcagggcgcccctccactgtcct

SEQ ID NO: 458014 - DNA, 25 bp, Homo sapien
acgtcctccgtgaacgtgagaccca

SEQ ID NO: 458015 - DNA, 25 bp, Homo sapien
tccgtgaacgtgagacccagctctt

SEQ ID NO: 458016 - DNA, 25 bp, Homo sapien
gaggactggaacgactggagaaggg

SEQ ID NO: 458017 - DNA, 25 bp, Homo sapien
ggagacgggttccagtcacgtcctc

SEQ ID NO: 458018 - DNA, 25 bp, Homo sapien
tctgctgggaacaccccttcaactt

SEQ ID NO: 458019 - DNA, 25 bp, Homo sapien
cagtccatatgtataccaatgaatg

SEQ ID NO: 458020 - DNA, 25 bp, Homo sapien
caactgattggcttgtggttgccac

SEQ ID NO: 458021 - DNA, 25 bp, Homo sapien
tgtgacgttttgtggtttggtgcct

SEQ ID NO: 458022 - DNA, 25 bp, Homo sapien
ccaagtacttgggttccaagagtct

SEQ ID NO: 458023 - DNA, 25 bp, Homo sapien
tacttgggttccaagagtcttggca

SEQ ID NO: 458024 - DNA, 25 bp, Homo sapien
ggttccaagagtcttggcatctggg

SEQ ID NO: 458025 - DNA, 25 bp, Homo sapien
aagagtcttggcatctgggaataca

SEQ ID NO: 458026 - DNA, 25 bp, Homo sapien
ttgagaaacgtgttgaaaggctgcc

SEQ ID NO: 458027 - DNA, 25 bp, Homo sapien
aaggtcaatcttggtcgggcacggt

SEQ ID NO: 458028 - DNA, 25 bp, Homo sapien
tcggagctgagacagtaaggcagcc

SEQ ID NO: 458029 - DNA, 25 bp, Homo sapien
caaagttgtttaagaaggtcaatct

SEQ ID NO: 458030 - DNA, 25 bp, Homo sapien
tcctcgtgggaaggagtattgtcaa

SEQ ID NO: 458031 - DNA, 25 bp, Homo sapien
aggtagccgaggaagtgctcctcgt

SEQ ID NO: 458032 - DNA, 25 bp, Homo sapien
cacaaagtgcaactgccaagtgagt

SEQ ID NO: 458033 - DNA, 25 bp, Homo sapien
caatacacgctaaggaggtagccga

SEQ ID NO: 458034 - DNA, 25 bp, Homo sapien
catttcaccaagtcagaaggctgca

SEQ ID NO: 458035 - DNA, 25 bp, Homo sapien
ggttaactgcttaagtgatccctaa

SEQ ID NO: 458036 - DNA, 25 bp, Homo sapien
gaaagccagctgttgagatctccac

SEQ ID NO: 458037 - DNA, 25 bp, Homo sapien
catttggagctagcgtttatttcac

SEQ ID NO: 458038 - DNA, 25 bp, Homo sapien
ctctgattgtgcaaagtataggaca

SEQ ID NO: 458039 - DNA, 25 bp, Homo sapien
ggacattatattcgacatctttggg

SEQ ID NO: 458040 - DNA, 25 bp, Homo sapien
gtataggacattatattcgacatct

SEQ ID NO: 458041 - DNA, 25 bp, Homo sapien
tctcatgagcagctatattctctga

SEQ ID NO: 458042 - DNA, 25 bp, Homo sapien
catcaaaacttctatcaggattaag

SEQ ID NO: 458043 - DNA, 25 bp, Homo sapien
caaaacttctatcaggattaagtgg

SEQ ID NO: 458044 - DNA, 25 bp, Homo sapien
tccacatcaaaacttctatcaggat

SEQ ID NO: 458045 - DNA, 25 bp, Homo sapien
gattaagtggatcctgatcctcaca

SEQ ID NO: 458046 - DNA, 25 bp, Homo sapien
ttttaagattctgataacctgcaga

SEQ ID NO: 458047 - DNA, 25 bp, Homo sapien
gaagaatgtttgtagcatactagat

SEQ ID NO: 458048 - DNA, 25 bp, Homo sapien
tgcagtagctatgatgtggcaggca

SEQ ID NO: 458049 - DNA, 25 bp, Homo sapien
ggaaaacagtagtggacaaagcaga

SEQ ID NO: 458050 - DNA, 25 bp, Homo sapien
tataaattcctcgaactccatcaga

SEQ ID NO: 458051 - DNA, 25 bp, Homo sapien
catcagactgtggaactgcgtcgtc

SEQ ID NO: 458052 - DNA, 25 bp, Homo sapien
tttttaaatcacatcccacggtggc

SEQ ID NO: 458053 - DNA, 25 bp, Homo sapien
cacggtggctcctcttttatgacaa

SEQ ID NO: 458054 - DNA, 25 bp, Homo sapien
tgtaacatagctcacaaaaatcata

SEQ ID NO: 458055 - DNA, 25 bp, Homo sapien
aatcatcttacgaatgtaacatagc

SEQ ID NO: 458056 - DNA, 25 bp, Homo sapien
catgctgtcctaacattgatctcat

SEQ ID NO: 458057 - DNA, 25 bp, Homo sapien
caaagtctccttgtcttaatccaac

SEQ ID NO: 458058 - DNA, 25 bp, Homo sapien
cagtgtcaacaattctcaaggccaa

SEQ ID NO: 458059 - DNA, 25 bp, Homo sapien
gaatcgttttatagagctgctcagg

SEQ ID NO: 458060 - DNA, 25 bp, Homo sapien
tcttagatttgacctacaaagggcc

SEQ ID NO: 458061 - DNA, 25 bp, Homo sapien
taccaacctacttttcatgacggcg

SEQ ID NO: 458062 - DNA, 25 bp, Homo sapien
agcgatgatcgggaattgagcatgt

SEQ ID NO: 458063 - DNA, 25 bp, Homo sapien
cgatgatcgggaattgagcatgttg

SEQ ID NO: 458064 - DNA, 25 bp, Homo sapien
tttgagcgatgatcgggaattgagc

SEQ ID NO: 458065 - DNA, 25 bp, Homo sapien
cactttgagcgatgatcgggaattg

SEQ ID NO: 458066 - DNA, 25 bp, Homo sapien
tagtcagtcatatcacatagtacac

SEQ ID NO: 458067 - DNA, 25 bp, Homo sapien
gaaaattagactattccttatgtta

SEQ ID NO: 458068 - DNA, 25 bp, Homo sapien
cacatagtacacaaagaagttgtca

SEQ ID NO: 458069 - DNA, 25 bp, Homo sapien
catttgtattttaattcaacgaggc

SEQ ID NO: 458070 - DNA, 25 bp, Homo sapien
caggatccagtctgccttaattaga

SEQ ID NO: 458071 - DNA, 25 bp, Homo sapien
catgtcttagtttggttctgtgagc

SEQ ID NO: 458072 - DNA, 25 bp, Homo sapien
ccccatgactccagttagccaggat

SEQ ID NO: 458073 - DNA, 25 bp, Homo sapien
gcagaacgaagtcttccaacgaggt

SEQ ID NO: 458074 - DNA, 25 bp, Homo sapien
tgcactcaatttcactcagaagata

SEQ ID NO: 458075 - DNA, 25 bp, Homo sapien
aagtatctgtaatagcctttcctgc

SEQ ID NO: 458076 - DNA, 25 bp, Homo sapien
taagtgtgtattgctggtgcttttc

SEQ ID NO: 458077 - DNA, 25 bp, Homo sapien
gggtaacgactgaaaaatgattgta

SEQ ID NO: 458078 - DNA, 25 bp, Homo sapien
tgtttgactacatgaaatatacaac

SEQ ID NO: 458079 - DNA, 25 bp, Homo sapien
gatatggcaaacttcaactaagtgt

SEQ ID NO: 458080 - DNA, 25 bp, Homo sapien
gaaaagattactgtttgactacatg

SEQ ID NO: 458081 - DNA, 25 bp, Homo sapien
aagtcaaaagatatggcaaacttca

SEQ ID NO: 458082 - DNA, 25 bp, Homo sapien
tacatgattgcctgagaggggtttc

SEQ ID NO: 458083 - DNA, 25 bp, Homo sapien
tcctctttttcttttcactcctgaa

SEQ ID NO: 458084 - DNA, 25 bp, Homo sapien
cttcctctttttcttttcactcctg

SEQ ID NO: 458085 - DNA, 25 bp, Homo sapien
tgtacatgattgcctgagaggggtt

SEQ ID NO: 458086 - DNA, 25 bp, Homo sapien
tcacctgacattcagactggtttaa

SEQ ID NO: 458087 - DNA, 25 bp, Homo sapien
cacctgacattcagactggtttaaa

SEQ ID NO: 458088 - DNA, 25 bp, Homo sapien
ctttcacctgacattcagactggtt

SEQ ID NO: 458089 - DNA, 25 bp, Homo sapien
cctgacattcagactggtttaaata

SEQ ID NO: 458090 - DNA, 25 bp, Homo sapien
tgaaaaccagtcttttgctgtgcat

SEQ ID NO: 458091 - DNA, 25 bp, Homo sapien
ggagagaaaatcaagattgcattac

SEQ ID NO: 458092 - DNA, 25 bp, Homo sapien
gaaaatcaagattgcattacattga

SEQ ID NO: 458093 - DNA, 25 bp, Homo sapien
aaatgaaaaccagtcttttgctgtg

SEQ ID NO: 458094 - DNA, 25 bp, Homo sapien
tgctcttctttcacttgtcttatga

SEQ ID NO: 458095 - DNA, 25 bp, Homo sapien
tcacttgtcttatgaatgtattaca

SEQ ID NO: 458096 - DNA, 25 bp, Homo sapien
tgccatgctcttctttcacttgtct

SEQ ID NO: 458097 - DNA, 25 bp, Homo sapien
tattacatttcattgtttcgggtgg

SEQ ID NO: 458098 - DNA, 25 bp, Homo sapien
ccttgcctagtggtggatgcacata

SEQ ID NO: 458099 - DNA, 25 bp, Homo sapien
gaataaagatttaggcgggatacca

SEQ ID NO: 458100 - DNA, 25 bp, Homo sapien
taagtctttgacataacagcccctg

SEQ ID NO: 458101 - DNA, 25 bp, Homo sapien
caagtttgaaacaggtgggttgaca

SEQ ID NO: 458102 - DNA, 25 bp, Homo sapien
taagaaaaggaactttcacagttgc

SEQ ID NO: 458103 - DNA, 25 bp, Homo sapien
aagaaaaggaactttcacagttgca

SEQ ID NO: 458104 - DNA, 25 bp, Homo sapien
agaaaaggaactttcacagttgcat

SEQ ID NO: 458105 - DNA, 25 bp, Homo sapien
gaagtagtctcatccatgagttttt

SEQ ID NO: 458106 - DNA, 25 bp, Homo sapien
tctgaagtagtctcatccatgagtt

SEQ ID NO: 458107 - DNA, 25 bp, Homo sapien
gattctgaagtagtctcatccatga

SEQ ID NO: 458108 - DNA, 25 bp, Homo sapien
ctgattctgaagtagtctcatccat

SEQ ID NO: 458109 - DNA, 25 bp, Homo sapien
tcgaaatattgctcttcatcagtac

SEQ ID NO: 458110 - DNA, 25 bp, Homo sapien
ttcgaaatattgctcttcatcagta

SEQ ID NO: 458111 - DNA, 25 bp, Homo sapien
atacttcgaaatattgctcttcatc

SEQ ID NO: 458112 - DNA, 25 bp, Homo sapien
ctatacttcgaaatattgctcttca

SEQ ID NO: 458113 - DNA, 25 bp, Homo sapien
gcaacaggaatgcagggcggtggca

SEQ ID NO: 458114 - DNA, 25 bp, Homo sapien
gaccgaatcaatctctgaatggcac

SEQ ID NO: 458115 - DNA, 25 bp, Homo sapien
gaatggcacattctcttagtggcca

SEQ ID NO: 458116 - DNA, 25 bp, Homo sapien
ttagtggccaacctgttagacacct

SEQ ID NO: 458117 - DNA, 25 bp, Homo sapien
cagaatctctgtgggataggcccag

SEQ ID NO: 458118 - DNA, 25 bp, Homo sapien
accagccctacaggtggttctcagg

SEQ ID NO: 458119 - DNA, 25 bp, Homo sapien
gtcctcaccagccctacaggtggtt

SEQ ID NO: 458120 - DNA, 25 bp, Homo sapien
aatctctgtgggataggcccagcta

SEQ ID NO: 458121 - DNA, 25 bp, Homo sapien
tttgtataggcagaaactcctccat

SEQ ID NO: 458122 - DNA, 25 bp, Homo sapien
caatattaaacagtttgtataggca

SEQ ID NO: 458123 - DNA, 25 bp, Homo sapien
agcagcactacagggaagctgtcag

SEQ ID NO: 458124 - DNA, 25 bp, Homo sapien
gtcatgtgccatggaactttaatgt

SEQ ID NO: 458125 - DNA, 25 bp, Homo sapien
aaaaagtgcactcccgatttcttca

SEQ ID NO: 458126 - DNA, 25 bp, Homo sapien
gtcttcgaacaatctacagtcaaaa

SEQ ID NO: 458127 - DNA, 25 bp, Homo sapien
aaatttacaaatgtgtcttcgaaca

SEQ ID NO: 458128 - DNA, 25 bp, Homo sapien
gtcaaaaagtgcactcccgatttct

SEQ ID NO: 458129 - DNA, 25 bp, Homo sapien
tcagtcgtaaccctccctgataaga

SEQ ID NO: 458130 - DNA, 25 bp, Homo sapien
ggaaaatatagcagtaaaagaacag

SEQ ID NO: 458131 - DNA, 25 bp, Homo sapien
tctcaccaagcgagagggaggcaag

SEQ ID NO: 458132 - DNA, 25 bp, Homo sapien
gatggtttatcatagcctcgccacc

SEQ ID NO: 458133 - DNA, 25 bp, Homo sapien
tgtggagggcactcactctgttgtg

SEQ ID NO: 458134 - DNA, 25 bp, Homo sapien
catgcagttctaagtagtggcaccc

SEQ ID NO: 458135 - DNA, 25 bp, Homo sapien
gaccagactcataaacaagtggagg

SEQ ID NO: 458136 - DNA, 25 bp, Homo sapien
cagccttgatagagaagtcagacca

SEQ ID NO: 458137 - DNA, 25 bp, Homo sapien
cacatttatagcagaacaagtccct

SEQ ID NO: 458138 - DNA, 25 bp, Homo sapien
caggtacagatacacaatcctcgtg

SEQ ID NO: 458139 - DNA, 25 bp, Homo sapien
gatccagagccttatgggcaggagc

SEQ ID NO: 458140 - DNA, 25 bp, Homo sapien
aattggagaatgtggctagaatacc

SEQ ID NO: 458141 - DNA, 25 bp, Homo sapien
cacctttgttgagatgcatgaattt

SEQ ID NO: 458142 - DNA, 25 bp, Homo sapien
tgttttaagtcctgaagtagctcaa

SEQ ID NO: 458143 - DNA, 25 bp, Homo sapien
tgatgtagaacttgacataagatct

SEQ ID NO: 458144 - DNA, 25 bp, Homo sapien
ataagacagggatgatattgatgta

SEQ ID NO: 458145 - DNA, 25 bp, Homo sapien
cacaagagtgtgcaaagagtgatca

SEQ ID NO: 458146 - DNA, 25 bp, Homo sapien
tatctaagaggctatcatgggctgt

SEQ ID NO: 458147 - DNA, 25 bp, Homo sapien
ggccaagaggagacgactagttcta

SEQ ID NO: 458148 - DNA, 25 bp, Homo sapien
catgggctgtaagtagaatcaaagg

SEQ ID NO: 458149 - DNA, 25 bp, Homo sapien
cctaatataagtgaaggaccacttc

SEQ ID NO: 458150 - DNA, 25 bp, Homo sapien
gagaacaggtctttcaaaaagcatt

SEQ ID NO: 458151 - DNA, 25 bp, Homo sapien
tatgaatatgtgtggcagtgaagag

SEQ ID NO: 458152 - DNA, 25 bp, Homo sapien
taatcatagcaggatatgacaactc

SEQ ID NO: 458153 - DNA, 25 bp, Homo sapien
cgtgaattaaagatgctgacctggg

SEQ ID NO: 458154 - DNA, 25 bp, Homo sapien
tgggccacgtatcaacaatcttctg

SEQ ID NO: 458155 - DNA, 25 bp, Homo sapien
tcaaccctcttacaagacttagtgg

SEQ ID NO: 458156 - DNA, 25 bp, Homo sapien
gatgaatggagaggccccatcgtga

SEQ ID NO: 458157 - DNA, 25 bp, Homo sapien
taggagttgctctggtaacagcacg

SEQ ID NO: 458158 - DNA, 25 bp, Homo sapien
cattccgggaatttgtacaagtgcc

SEQ ID NO: 458159 - DNA, 25 bp, Homo sapien
ggaaaatggttcatcccaggcttgg

SEQ ID NO: 458160 - DNA, 25 bp, Homo sapien
catagcagcttgattcgatgcctgg

SEQ ID NO: 458161 - DNA, 25 bp, Homo sapien
gacgtagattttatcacagatgaaa

SEQ ID NO: 458162 - DNA, 25 bp, Homo sapien
tttttgagtcattgttaaccgcaca

SEQ ID NO: 458163 - DNA, 25 bp, Homo sapien
gagtcattgttaaccgcacagttct

SEQ ID NO: 458164 - DNA, 25 bp, Homo sapien
gcacagttcttaagtctgacgtaga

SEQ ID NO: 458165 - DNA, 25 bp, Homo sapien
tccactgttgtttaatattgagaac

SEQ ID NO: 458166 - DNA, 25 bp, Homo sapien
gatcaaccctaaatttccactgttg

SEQ ID NO: 458167 - DNA, 25 bp, Homo sapien
taatattgagaacattatttcatca

SEQ ID NO: 458168 - DNA, 25 bp, Homo sapien
gttttcctgtaccatttctctccat

SEQ ID NO: 458169 - DNA, 25 bp, Homo sapien
ttttccttagctctaaggtcagtag

SEQ ID NO: 458170 - DNA, 25 bp, Homo sapien
ggattgcttactcttttcccactct

SEQ ID NO: 458171 - DNA, 25 bp, Homo sapien
gacaccagaagcgtcagaatcttgg

SEQ ID NO: 458172 - DNA, 25 bp, Homo sapien
gaatcttggtgctcgccaatgctga

SEQ ID NO: 458173 - DNA, 25 bp, Homo sapien
gctgtggccatgcaactgagtcctg

SEQ ID NO: 458174 - DNA, 25 bp, Homo sapien
tcttcacttaagttagctgtggcca

SEQ ID NO: 458175 - DNA, 25 bp, Homo sapien
tagcagcagtgaatctgtacaggtc

SEQ ID NO: 458176 - DNA, 25 bp, Homo sapien
ccaagcaggtaacgtgaaagattca

SEQ ID NO: 458177 - DNA, 25 bp, Homo sapien
tgtgttcctaagtcccaggctgcga

SEQ ID NO: 458178 - DNA, 25 bp, Homo sapien
cacccagcagccttagtggagagaa

SEQ ID NO: 458179 - DNA, 25 bp, Homo sapien
caggttcgtctcctcactgttggcg

SEQ ID NO: 458180 - DNA, 25 bp, Homo sapien
tggagagaaaacaacgcacctgcgt

SEQ ID NO: 458181 - DNA, 25 bp, Homo sapien
gggccaaagtcttgtgttcgctggg

SEQ ID NO: 458182 - DNA, 25 bp, Homo sapien
gccttgcctgagggccaaagtcttg

SEQ ID NO: 458183 - DNA, 25 bp, Homo sapien
gccaaagtcttgtgttcgctgggaa

SEQ ID NO: 458184 - DNA, 25 bp, Homo sapien
ggccaaagtcttgtgttcgctggga

SEQ ID NO: 458185 - DNA, 25 bp, Homo sapien
caagggcccgatttgcaggaagatt

SEQ ID NO: 458186 - DNA, 25 bp, Homo sapien
gactaagtcctgtccgggcccagct

SEQ ID NO: 458187 - DNA, 25 bp, Homo sapien
gcaggaatcctgcaagggcccgatt

SEQ ID NO: 458188 - DNA, 25 bp, Homo sapien
ccgggcccagctgctgagtcagcag

SEQ ID NO: 458189 - DNA, 25 bp, Homo sapien
ccctcagccctagggcgcctcagag

SEQ ID NO: 458190 - DNA, 25 bp, Homo sapien
tcagccctagggcgcctcagagcag

SEQ ID NO: 458191 - DNA, 25 bp, Homo sapien
cctagggcgcctcagagcagtcatc

SEQ ID NO: 458192 - DNA, 25 bp, Homo sapien
acagagaggtccccggctctgcagg

SEQ ID NO: 458193 - DNA, 25 bp, Homo sapien
agctgtgagatcctgcgtggctctc

SEQ ID NO: 458194 - DNA, 25 bp, Homo sapien
gcatgacccaagagcgagatgggaa

SEQ ID NO: 458195 - DNA, 25 bp, Homo sapien
ctctgtgttactattagactgcagc

SEQ ID NO: 458196 - DNA, 25 bp, Homo sapien
ttactattagactgcagctgtgaga

SEQ ID NO: 458197 - DNA, 25 bp, Homo sapien
gtggttgcaccacaacactaagctg

SEQ ID NO: 458198 - DNA, 25 bp, Homo sapien
cattcctgtaatgggtactgtaggc

SEQ ID NO: 458199 - DNA, 25 bp, Homo sapien
tgtcttcatgcagtgcctgactggg

SEQ ID NO: 458200 - DNA, 25 bp, Homo sapien
tgagaaggatggttcagctcacggt

SEQ ID NO: 458201 - DNA, 25 bp, Homo sapien
ctgtctctgggtcagataagagtgg

SEQ ID NO: 458202 - DNA, 25 bp, Homo sapien
gtcagataagagtggtccctgagca

SEQ ID NO: 458203 - DNA, 25 bp, Homo sapien
tctctgggtcagataagagtggtcc

SEQ ID NO: 458204 - DNA, 25 bp, Homo sapien
tgggtcagataagagtggtccctga

SEQ ID NO: 458205 - DNA, 25 bp, Homo sapien
tgcaggcaaacaacggaagagtttt

SEQ ID NO: 458206 - DNA, 25 bp, Homo sapien
atctgtgcaggcaaacaacggaaga

SEQ ID NO: 458207 - DNA, 25 bp, Homo sapien
tttgaaggaagtgaggatgtgtgag

SEQ ID NO: 458208 - DNA, 25 bp, Homo sapien
cagattttaaacagatgcctgggct

SEQ ID NO: 458209 - DNA, 25 bp, Homo sapien
tgctgtccagcacgtacacgaggat

SEQ ID NO: 458210 - DNA, 25 bp, Homo sapien
tgacacgtgcccaggagctttcaga

SEQ ID NO: 458211 - DNA, 25 bp, Homo sapien
tgtaaaggagcgtggtcttgcccgc

SEQ ID NO: 458212 - DNA, 25 bp, Homo sapien
taagcagcggaagtgcatcaggtgc

SEQ ID NO: 458213 - DNA, 25 bp, Homo sapien
cctgcagacacatgcagctgcgaga

SEQ ID NO: 458214 - DNA, 25 bp, Homo sapien
gggctctcgcctgcagacacatgca

SEQ ID NO: 458215 - DNA, 25 bp, Homo sapien
acacatgcagctgcgagatttcagg

SEQ ID NO: 458216 - DNA, 25 bp, Homo sapien
agatctcttgctgtctccgcgctca

SEQ ID NO: 458217 - DNA, 25 bp, Homo sapien
gaaaatcactcataaggatccgcga

SEQ ID NO: 458218 - DNA, 25 bp, Homo sapien
cctgctgttgtatgggccctgccta

SEQ ID NO: 458219 - DNA, 25 bp, Homo sapien
taaaatcgggagaggctaattagca

SEQ ID NO: 458220 - DNA, 25 bp, Homo sapien
tcattcacacttggtaacgagctat

SEQ ID NO: 458221 - DNA, 25 bp, Homo sapien
tgagaacaggtgctaaatataggcc

SEQ ID NO: 458222 - DNA, 25 bp, Homo sapien
tccagagatagagagaaccagtcca

SEQ ID NO: 458223 - DNA, 25 bp, Homo sapien
gaaataaccaagcatgcctaacctg

SEQ ID NO: 458224 - DNA, 25 bp, Homo sapien
gatggtcatctagccggtttcctgc

SEQ ID NO: 458225 - DNA, 25 bp, Homo sapien
tgggagtacagataatggaacaatc

SEQ ID NO: 458226 - DNA, 25 bp, Homo sapien
gaaagcagctataaccaaacacgta

SEQ ID NO: 458227 - DNA, 25 bp, Homo sapien
cagggttgttgggagtacagataat

SEQ ID NO: 458228 - DNA, 25 bp, Homo sapien
aagccaacaaatatatccggcaggg

SEQ ID NO: 458229 - DNA, 25 bp, Homo sapien
ggctgaaattaaagcacctgtgtga

SEQ ID NO: 458230 - DNA, 25 bp, Homo sapien
ctgtgtgagaataggacatgtggcc

SEQ ID NO: 458231 - DNA, 25 bp, Homo sapien
taagctggaaacctagagcccatgg

SEQ ID NO: 458232 - DNA, 25 bp, Homo sapien
cccatggaaattgcagaggagccaa

SEQ ID NO: 458233 - DNA, 25 bp, Homo sapien
ctgggtcaaaagacacctctggtct

SEQ ID NO: 458234 - DNA, 25 bp, Homo sapien
gatgctacctctacccaaatgctgc

SEQ ID NO: 458235 - DNA, 25 bp, Homo sapien
cttcaggatgctacctctacccaaa

SEQ ID NO: 458236 - DNA, 25 bp, Homo sapien
ttaacctgtctccttgccttcagga

SEQ ID NO: 458237 - DNA, 25 bp, Homo sapien
attcgatgcgagtgatttgatgttc

SEQ ID NO: 458238 - DNA, 25 bp, Homo sapien
ctgctgagtaattcgatgcgagtga

SEQ ID NO: 458239 - DNA, 25 bp, Homo sapien
gagtaattcgatgcgagtgatttga

SEQ ID NO: 458240 - DNA, 25 bp, Homo sapien
atgcgagtgatttgatgttcagtcc

SEQ ID NO: 458241 - DNA, 25 bp, Homo sapien
gtgcattcgaagtgcgtggagaggc

SEQ ID NO: 458242 - DNA, 25 bp, Homo sapien
tggagaggctcatgctgggctttcc

SEQ ID NO: 458243 - DNA, 25 bp, Homo sapien
cagtactcagactgcaagagctttg

SEQ ID NO: 458244 - DNA, 25 bp, Homo sapien
tggaggagggtgcattcgaagtgcg

SEQ ID NO: 458245 - DNA, 25 bp, Homo sapien
cttcccaaaacctcttgagtcatca

SEQ ID NO: 458246 - DNA, 25 bp, Homo sapien
tccttcccaaaacctcttgagtcat

SEQ ID NO: 458247 - DNA, 25 bp, Homo sapien
ccaaaacctcttgagtcatcactga

SEQ ID NO: 458248 - DNA, 25 bp, Homo sapien
tcccaaaacctcttgagtcatcact

SEQ ID NO: 458249 - DNA, 25 bp, Homo sapien
tacaatgcgacatgaaggatagaac

SEQ ID NO: 458250 - DNA, 25 bp, Homo sapien
tatgcagacgctgtctccagataca

SEQ ID NO: 458251 - DNA, 25 bp, Homo sapien
gaaggatagaacttcagctctgtgt

SEQ ID NO: 458252 - DNA, 25 bp, Homo sapien
gatcaaacttcgcttcactgctagt

SEQ ID NO: 458253 - DNA, 25 bp, Homo sapien
catgggtcagattacctccccaagg

SEQ ID NO: 458254 - DNA, 25 bp, Homo sapien
ctttggagaggtccagtttatagac

SEQ ID NO: 458255 - DNA, 25 bp, Homo sapien
gccctgggtggcattccgttggaat

SEQ ID NO: 458256 - DNA, 25 bp, Homo sapien
caaagtcacacttagaatcctagaa

SEQ ID NO: 458257 - DNA, 25 bp, Homo sapien
cctcatgaatactcagcatctcctg

SEQ ID NO: 458258 - DNA, 25 bp, Homo sapien
tgcagggccagccataaacctcatg

SEQ ID NO: 458259 - DNA, 25 bp, Homo sapien
ggctctggttgaggaaatctacccc

SEQ ID NO: 458260 - DNA, 25 bp, Homo sapien
atctaccccgacccttagtttgcat

SEQ ID NO: 458261 - DNA, 25 bp, Homo sapien
gagtcatggctcctccctgctgagt

SEQ ID NO: 458262 - DNA, 25 bp, Homo sapien
gctgaatgcagctatgcacttttga

SEQ ID NO: 458263 - DNA, 25 bp, Homo sapien
gattggctgcattaaactctgcctg

SEQ ID NO: 458264 - DNA, 25 bp, Homo sapien
gaagcccagaggctgacggacccca

SEQ ID NO: 458265 - DNA, 25 bp, Homo sapien
ctttaaaaccataatagcaggtctc

SEQ ID NO: 458266 - DNA, 25 bp, Homo sapien
tctttaaaaccataatagcaggtct

SEQ ID NO: 458267 - DNA, 25 bp, Homo sapien
gggctggccgcggccagagcggctc

SEQ ID NO: 458268 - DNA, 25 bp, Homo sapien
tgctgccggccccagttaaggaggg

SEQ ID NO: 458269 - DNA, 25 bp, Homo sapien
gacaacgtgctaacaggcctcactc

SEQ ID NO: 458270 - DNA, 25 bp, Homo sapien
gccccagttaaggaggggcttagca

SEQ ID NO: 458271 - DNA, 25 bp, Homo sapien
tcatgtccagtcagggatctaccct

SEQ ID NO: 458272 - DNA, 25 bp, Homo sapien
tcctcgaagacctcatcatgtccag

SEQ ID NO: 458273 - DNA, 25 bp, Homo sapien
gaaatgacagtacaggagtcctcga

SEQ ID NO: 458274 - DNA, 25 bp, Homo sapien
gatctaccctggtggtcgctgtgag

SEQ ID NO: 458275 - DNA, 25 bp, Homo sapien
tgcttggccatggaggttgacctgt

SEQ ID NO: 458276 - DNA, 25 bp, Homo sapien
acagctgtcacagaaaacctgggcc

SEQ ID NO: 458277 - DNA, 25 bp, Homo sapien
gccaaaggcttataggccaggtaga

SEQ ID NO: 458278 - DNA, 25 bp, Homo sapien
cagtagatgaaagccctgcaggagg

SEQ ID NO: 458279 - DNA, 25 bp, Homo sapien
gctgccatcaaattgaaagctatcc

SEQ ID NO: 458280 - DNA, 25 bp, Homo sapien
tgacacttcttaaagagaggagctc

SEQ ID NO: 458281 - DNA, 25 bp, Homo sapien
tcttaaagagaggagctctgtaggt

SEQ ID NO: 458282 - DNA, 25 bp, Homo sapien
ggacagtttcaagccaagcattccc

SEQ ID NO: 458283 - DNA, 25 bp, Homo sapien
gataaacaacacatagcaggtgtgc

SEQ ID NO: 458284 - DNA, 25 bp, Homo sapien
taaagcttcatatggtaactgcatc

SEQ ID NO: 458285 - DNA, 25 bp, Homo sapien
gaaactgtgtggtgttcgctaaaag

SEQ ID NO: 458286 - DNA, 25 bp, Homo sapien
tatgtatctgccaaggtggagccac

SEQ ID NO: 458287 - DNA, 25 bp, Homo sapien
aaaatggtgcgctgtggatcaagac

SEQ ID NO: 458288 - DNA, 25 bp, Homo sapien
tctaaagcaagccatgtctcagtca

SEQ ID NO: 458289 - DNA, 25 bp, Homo sapien
tcaatatgaagcaccaccagatggc

SEQ ID NO: 458290 - DNA, 25 bp, Homo sapien
caagttggaagactaaagaggtgca

SEQ ID NO: 458291 - DNA, 25 bp, Homo sapien
gactgcagagtcattgtagattttt

SEQ ID NO: 458292 - DNA, 25 bp, Homo sapien
cttgtaatgactgcagagtcattgt

SEQ ID NO: 458293 - DNA, 25 bp, Homo sapien
aacacaaatatggaaggtttgaagt

SEQ ID NO: 458294 - DNA, 25 bp, Homo sapien
tagggaaagtttgactgtaggtaga

SEQ ID NO: 458295 - DNA, 25 bp, Homo sapien
aaaataatagtgaattctctttctt

SEQ ID NO: 458296 - DNA, 25 bp, Homo sapien
gactcaaacaatcgtccttctgttg

SEQ ID NO: 458297 - DNA, 25 bp, Homo sapien
agaaaataatagtgaattctctttc

SEQ ID NO: 458298 - DNA, 25 bp, Homo sapien
tggactcaaacaatcgtccttctgt

SEQ ID NO: 458299 - DNA, 25 bp, Homo sapien
agtggcccactcgtggctcatggca

SEQ ID NO: 458300 - DNA, 25 bp, Homo sapien
cctctgattatatctcctcttgata

SEQ ID NO: 458301 - DNA, 25 bp, Homo sapien
gtccctctgattatatctcctcttg

SEQ ID NO: 458302 - DNA, 25 bp, Homo sapien
ctttcctatctcaagcttaacactt

SEQ ID NO: 458303 - DNA, 25 bp, Homo sapien
gaatcaactattacaaggtccacac

SEQ ID NO: 458304 - DNA, 25 bp, Homo sapien
tggaatccgaagaccatagaatctg

SEQ ID NO: 458305 - DNA, 25 bp, Homo sapien
atcaaatgcctgaccgcccgggttt

SEQ ID NO: 458306 - DNA, 25 bp, Homo sapien
tctgggccccagcttattgaatgct

SEQ ID NO: 458307 - DNA, 25 bp, Homo sapien
ggtaggtttgttgttggtactcaca

SEQ ID NO: 458308 - DNA, 25 bp, Homo sapien
gacttgttatggaaggtactttcac

SEQ ID NO: 458309 - DNA, 25 bp, Homo sapien
gatagattgtgatatcctcgtttcc

SEQ ID NO: 458310 - DNA, 25 bp, Homo sapien
ggtactttcactgtactgtcccaga

SEQ ID NO: 458311 - DNA, 25 bp, Homo sapien
tacgcttctggtaggatgtgcagca

SEQ ID NO: 458312 - DNA, 25 bp, Homo sapien
caagagaatactggagccttacaca

SEQ ID NO: 458313 - DNA, 25 bp, Homo sapien
tacaactctgtactagaaaccacgg

SEQ ID NO: 458314 - DNA, 25 bp, Homo sapien
gcagacaaactggaggagagcctat

SEQ ID NO: 458315 - DNA, 25 bp, Homo sapien
gaacaaacgactgagcctagataga

SEQ ID NO: 458316 - DNA, 25 bp, Homo sapien
gatgtggagagatcttgaagcagcc

SEQ ID NO: 458317 - DNA, 25 bp, Homo sapien
cgttaactatagagaatgaagggtc

SEQ ID NO: 458318 - DNA, 25 bp, Homo sapien
cacaggttagcttgaggaagacgta

SEQ ID NO: 458319 - DNA, 25 bp, Homo sapien
gatgcttgagtaaccagtagtttct

SEQ ID NO: 458320 - DNA, 25 bp, Homo sapien
tgcttgagtaaccagtagtttcttc

SEQ ID NO: 458321 - DNA, 25 bp, Homo sapien
agatgcttgagtaaccagtagtttc

SEQ ID NO: 458322 - DNA, 25 bp, Homo sapien
ttgagtaaccagtagtttcttcttc

SEQ ID NO: 458323 - DNA, 25 bp, Homo sapien
tgatgatgctgttcttcctccctct

SEQ ID NO: 458324 - DNA, 25 bp, Homo sapien
aacctggaatgaggatttgatgatg

SEQ ID NO: 458325 - DNA, 25 bp, Homo sapien
tacaacctggaatgaggatttgatg

SEQ ID NO: 458326 - DNA, 25 bp, Homo sapien
ctacaacctggaatgaggatttgat

SEQ ID NO: 458327 - DNA, 25 bp, Homo sapien
caggcttcggaaaagaggttgctcc

SEQ ID NO: 458328 - DNA, 25 bp, Homo sapien
tctttggactagtcgtgccgagctg

SEQ ID NO: 458329 - DNA, 25 bp, Homo sapien
agctgaaggtggacaatagtttgcc

SEQ ID NO: 458330 - DNA, 25 bp, Homo sapien
gctcatactcctgcaactgctggca

SEQ ID NO: 458331 - DNA, 25 bp, Homo sapien
cgatgggggagggtaggatgcgcca

SEQ ID NO: 458332 - DNA, 25 bp, Homo sapien
gacttgtttgagggtgatcgatggg

SEQ ID NO: 458333 - DNA, 25 bp, Homo sapien
gggtaggatgcgccaggaccatttt

SEQ ID NO: 458334 - DNA, 25 bp, Homo sapien
accagccgggtaactgacttgtttg

SEQ ID NO: 458335 - DNA, 25 bp, Homo sapien
cggctcacatggagcctcggctctg

SEQ ID NO: 458336 - DNA, 25 bp, Homo sapien
cggtgcaaccttccgtccggtgcag

SEQ ID NO: 458337 - DNA, 25 bp, Homo sapien
tcccgcgcggctcacatggagcctc

SEQ ID NO: 458338 - DNA, 25 bp, Homo sapien
caccggtgcaaccttccgtccggtg

SEQ ID NO: 458339 - DNA, 25 bp, Homo sapien
ctagctacaggcagcgaggtgcgct

SEQ ID NO: 458340 - DNA, 25 bp, Homo sapien
tactccaggcggatcgtggcatgat

SEQ ID NO: 458341 - DNA, 25 bp, Homo sapien
ttcctcctgatagggcgcaaggtgc

SEQ ID NO: 458342 - DNA, 25 bp, Homo sapien
ctcactaggcgtggagaattactcc

SEQ ID NO: 458343 - DNA, 25 bp, Homo sapien
tctgtgtctttttgcttccgttgtt

SEQ ID NO: 458344 - DNA, 25 bp, Homo sapien
ttctagacattggccacaagagaaa

SEQ ID NO: 458345 - DNA, 25 bp, Homo sapien
tgttcctgccaacaccacagactct

SEQ ID NO: 458346 - DNA, 25 bp, Homo sapien
aagagaaaccacttgtctttctgtg

SEQ ID NO: 458347 - DNA, 25 bp, Homo sapien
catttccatgactgatgctccccgc

SEQ ID NO: 458348 - DNA, 25 bp, Homo sapien
cttggagaggagaccttactttcct

SEQ ID NO: 458349 - DNA, 25 bp, Homo sapien
cctagagtctaaggactgtatttgt

SEQ ID NO: 458350 - DNA, 25 bp, Homo sapien
catgactgatgctccccgcacaggg

SEQ ID NO: 458351 - DNA, 25 bp, Homo sapien
acagatggggccaaaggctggatcc

SEQ ID NO: 458352 - DNA, 25 bp, Homo sapien
gtagccccagcggatgagcagcagc

SEQ ID NO: 458353 - DNA, 25 bp, Homo sapien
tgagcagcaattggcagtagcccca

SEQ ID NO: 458354 - DNA, 25 bp, Homo sapien
tgtcctcgagaagaagcttgtgacc

SEQ ID NO: 458355 - DNA, 25 bp, Homo sapien
tgaagacagcaagggactgagcagc

SEQ ID NO: 458356 - DNA, 25 bp, Homo sapien
ttgattttcatagactcgtaagaca

SEQ ID NO: 458357 - DNA, 25 bp, Homo sapien
ttttcatagactcgtaagacattat

SEQ ID NO: 458358 - DNA, 25 bp, Homo sapien
cacattaagggtgtcatatgattgg

SEQ ID NO: 458359 - DNA, 25 bp, Homo sapien
ccctgtagaaatttgataacacatt

SEQ ID NO: 458360 - DNA, 25 bp, Homo sapien
catatgattggtctgcgccattggg

SEQ ID NO: 458361 - DNA, 25 bp, Homo sapien
gaaatttgataacacattaagggtg

SEQ ID NO: 458362 - DNA, 25 bp, Homo sapien
cagcaagaggcagccagtcaactgc

SEQ ID NO: 458363 - DNA, 25 bp, Homo sapien
agatccaaactaaagccgcctttca

SEQ ID NO: 458364 - DNA, 25 bp, Homo sapien
aagccgcctttcacaggaaccacag

SEQ ID NO: 458365 - DNA, 25 bp, Homo sapien
gcaagaggcagccagtcaactgctc

SEQ ID NO: 458366 - DNA, 25 bp, Homo sapien
ggaagcctctattctgaacaagagc

SEQ ID NO: 458367 - DNA, 25 bp, Homo sapien
tctattctgaacaagagccccttac

SEQ ID NO: 458368 - DNA, 25 bp, Homo sapien
tcatgcatatttggaagcctctatt

SEQ ID NO: 458369 - DNA, 25 bp, Homo sapien
gcctctattctgaacaagagcccct

SEQ ID NO: 458370 - DNA, 25 bp, Homo sapien
gaggtaattacttccccaagccgca

SEQ ID NO: 458371 - DNA, 25 bp, Homo sapien
gactgcttcgttattctgaggtaat

SEQ ID NO: 458372 - DNA, 25 bp, Homo sapien
tattctgaggtaattacttccccaa

SEQ ID NO: 458373 - DNA, 25 bp, Homo sapien
tctggaagtgactgcttcgttattc

SEQ ID NO: 458374 - DNA, 25 bp, Homo sapien
ggatgccgttttttccagcttggga

SEQ ID NO: 458375 - DNA, 25 bp, Homo sapien
ggtttctccaaggattcttgaacca

SEQ ID NO: 458376 - DNA, 25 bp, Homo sapien
caggaacagggtggtcatctgggat

SEQ ID NO: 458377 - DNA, 25 bp, Homo sapien
gccagggaaagcctcaatactgact

SEQ ID NO: 458378 - DNA, 25 bp, Homo sapien
gcttcagctagcagtgattttaggg

SEQ ID NO: 458379 - DNA, 25 bp, Homo sapien
gtcaagtttcttgccatggttctgg

SEQ ID NO: 458380 - DNA, 25 bp, Homo sapien
aatattgtcaagtttcttgccatgg

SEQ ID NO: 458381 - DNA, 25 bp, Homo sapien
cattttgtctggctttctatcataa

SEQ ID NO: 458382 - DNA, 25 bp, Homo sapien
taaagaatgtgcttacttgggaaag

SEQ ID NO: 458383 - DNA, 25 bp, Homo sapien
tattctgcagacaaaaatgtgacaa

SEQ ID NO: 458384 - DNA, 25 bp, Homo sapien
catagatatacttgagtaacattta

SEQ ID NO: 458385 - DNA, 25 bp, Homo sapien
cactctgaagtttagacctcattaa

SEQ ID NO: 458386 - DNA, 25 bp, Homo sapien
tatcatgtaccgcttttcttaaaac

SEQ ID NO: 458387 - DNA, 25 bp, Homo sapien
aatatttgacatctacagttggata

SEQ ID NO: 458388 - DNA, 25 bp, Homo sapien
cagttggataattttgccgcttagt

SEQ ID NO: 458389 - DNA, 25 bp, Homo sapien
ggagtaatcactattgggtggcagt

SEQ ID NO: 458390 - DNA, 25 bp, Homo sapien
tgttctgcaacccaattcagctgcc

SEQ ID NO: 458391 - DNA, 25 bp, Homo sapien
gctcaagggtagagcatttgacacc

SEQ ID NO: 458392 - DNA, 25 bp, Homo sapien
cacaggtaaactggtgtcacggtgg

SEQ ID NO: 458393 - DNA, 25 bp, Homo sapien
tcctgctcacctgaagttgtaaagt

SEQ ID NO: 458394 - DNA, 25 bp, Homo sapien
tttcttctaacaggaatcagactgg

SEQ ID NO: 458395 - DNA, 25 bp, Homo sapien
ggacaatactgaccttgaaatcttg

SEQ ID NO: 458396 - DNA, 25 bp, Homo sapien
tcagactggtaagccttgaatccta

SEQ ID NO: 458397 - DNA, 25 bp, Homo sapien
ggcatgtcttggaagcagacagact

SEQ ID NO: 458398 - DNA, 25 bp, Homo sapien
tctttcttattgcttatgacttaga

SEQ ID NO: 458399 - DNA, 25 bp, Homo sapien
agcagacagactctttttttgaagt

SEQ ID NO: 458400 - DNA, 25 bp, Homo sapien
tctcagttctcgagttcctggcatg

SEQ ID NO: 458401 - DNA, 25 bp, Homo sapien
tcgtatgacccagtacagaatggga

SEQ ID NO: 458402 - DNA, 25 bp, Homo sapien
aattcactaacagaagacgtccagc

SEQ ID NO: 458403 - DNA, 25 bp, Homo sapien
cgtccagctggcataaaaaacatta

SEQ ID NO: 458404 - DNA, 25 bp, Homo sapien
caaatgtggtttggattagtctaag

SEQ ID NO: 458405 - DNA, 25 bp, Homo sapien
tcttcctaatgccaagtctctgcat

SEQ ID NO: 458406 - DNA, 25 bp, Homo sapien
caagtctccaacctggtttacctgt

SEQ ID NO: 458407 - DNA, 25 bp, Homo sapien
agtctccaacctggtttacctgtct

SEQ ID NO: 458408 - DNA, 25 bp, Homo sapien
cttcctaatgccaagtctctgcatt

SEQ ID NO: 458409 - DNA, 25 bp, Homo sapien
tgccaagttaaggacgcacccatca

SEQ ID NO: 458410 - DNA, 25 bp, Homo sapien
ctggctaggactctgtcattttaga

SEQ ID NO: 458411 - DNA, 25 bp, Homo sapien
tgatacgtgcccaagtgatcagggc

SEQ ID NO: 458412 - DNA, 25 bp, Homo sapien
ggtcctgatgatacgtgcccaagtg

SEQ ID NO: 458413 - DNA, 25 bp, Homo sapien
ttctttcactcatatattacttaga

SEQ ID NO: 458414 - DNA, 25 bp, Homo sapien
atatattacttagacgtatgttgtt

SEQ ID NO: 458415 - DNA, 25 bp, Homo sapien
tattacttagacgtatgttgtttaa

SEQ ID NO: 458416 - DNA, 25 bp, Homo sapien
attacttagacgtatgttgtttaat

SEQ ID NO: 458417 - DNA, 25 bp, Homo sapien
tctttgtctaatttgaatattaggg

SEQ ID NO: 458418 - DNA, 25 bp, Homo sapien
taatttgaatattagggtaatgcca

SEQ ID NO: 458419 - DNA, 25 bp, Homo sapien
gtctaatttgaatattagggtaatg

SEQ ID NO: 458420 - DNA, 25 bp, Homo sapien
ctttgtctaatttgaatattagggt

SEQ ID NO: 458421 - DNA, 25 bp, Homo sapien
tgtcctataactcaaatggcctagg

SEQ ID NO: 458422 - DNA, 25 bp, Homo sapien
gaaggaatagtgttcactgacaccc

SEQ ID NO: 458423 - DNA, 25 bp, Homo sapien
gcaaacataaacatagagcctcagc

SEQ ID NO: 458424 - DNA, 25 bp, Homo sapien
tctaggagaatgattacgtgcttac

SEQ ID NO: 458425 - DNA, 25 bp, Homo sapien
tactactcagtacagttgtcaaaca

SEQ ID NO: 458426 - DNA, 25 bp, Homo sapien
gaaccatggcctacaagaataccta

SEQ ID NO: 458427 - DNA, 25 bp, Homo sapien
taactgcattgcactagaaaccaca

SEQ ID NO: 458428 - DNA, 25 bp, Homo sapien
ggtagttcagggaattttagtcaca

SEQ ID NO: 458429 - DNA, 25 bp, Homo sapien
tctcaagcctgtacattgttactgg

SEQ ID NO: 458430 - DNA, 25 bp, Homo sapien
cacacatagtgattgtgtgtggtag

SEQ ID NO: 458431 - DNA, 25 bp, Homo sapien
gtggcaattgatcaataccccaatc

SEQ ID NO: 458432 - DNA, 25 bp, Homo sapien
tgtggtagtgattatgtgtggccta

SEQ ID NO: 458433 - DNA, 25 bp, Homo sapien
gccagggtcatccaactatgaggaa

SEQ ID NO: 458434 - DNA, 25 bp, Homo sapien
caaggaaatcatgctgtgacaccac

SEQ ID NO: 458435 - DNA, 25 bp, Homo sapien
gaggtagggtcaaagatccatctgc

SEQ ID NO: 458436 - DNA, 25 bp, Homo sapien
ccccgtctgtgaacaaaagagctag

SEQ ID NO: 458437 - DNA, 25 bp, Homo sapien
gagctcactcaccattatgtgctaa

SEQ ID NO: 458438 - DNA, 25 bp, Homo sapien
taccctgagaagtgtcaattatgat

SEQ ID NO: 458439 - DNA, 25 bp, Homo sapien
tatttgcaattgttggagagctcga

SEQ ID NO: 458440 - DNA, 25 bp, Homo sapien
cagttttcagtagctggtagatacc

SEQ ID NO: 458441 - DNA, 25 bp, Homo sapien
ctcctccagaatttacgatcttggg

SEQ ID NO: 458442 - DNA, 25 bp, Homo sapien
gatgcaaacatggatgatgaaggaa

SEQ ID NO: 458443 - DNA, 25 bp, Homo sapien
gaaggaatggctcctccagaattta

SEQ ID NO: 458444 - DNA, 25 bp, Homo sapien
tgtgaaggatgcaaacatggatgat

SEQ ID NO: 458445 - DNA, 25 bp, Homo sapien
aaagtctcccagttaagctgccgtg

SEQ ID NO: 458446 - DNA, 25 bp, Homo sapien
gtgggctcgactgaagcggcgcggt

SEQ ID NO: 458447 - DNA, 25 bp, Homo sapien
aagtggacgccgtttgcccagacgg

SEQ ID NO: 458448 - DNA, 25 bp, Homo sapien
agccgggtggtgagaccgcgttcct

SEQ ID NO: 458449 - DNA, 25 bp, Homo sapien
ccgtcctccaactacagggaccgca

SEQ ID NO: 458450 - DNA, 25 bp, Homo sapien
agccccaaaatggactcgcggctcc

SEQ ID NO: 458451 - DNA, 25 bp, Homo sapien
ccaaaatggactcgcggctccggct

SEQ ID NO: 458452 - DNA, 25 bp, Homo sapien
gggaccgcacggtacgcgccaagca

SEQ ID NO: 458453 - DNA, 25 bp, Homo sapien
gagccgggcggcgggtacttatctc

SEQ ID NO: 458454 - DNA, 25 bp, Homo sapien
cccaccctcgctgaaggttcgagga

SEQ ID NO: 458455 - DNA, 25 bp, Homo sapien
ctgaaggttcgaggaccaccccgct

SEQ ID NO: 458456 - DNA, 25 bp, Homo sapien
ctcgctgaaggttcgaggaccaccc

SEQ ID NO: 458457 - DNA, 25 bp, Homo sapien
aaagcccggctgtttagacctggtg

SEQ ID NO: 458458 - DNA, 25 bp, Homo sapien
tgccggactggagctcagacggcct

SEQ ID NO: 458459 - DNA, 25 bp, Homo sapien
tggcggcgcgctgtaacctaaggcc

SEQ ID NO: 458460 - DNA, 25 bp, Homo sapien
taagcagcttctcggttagggcgcc

SEQ ID NO: 458461 - DNA, 25 bp, Homo sapien
atttggcagggttactatttcccag

SEQ ID NO: 458462 - DNA, 25 bp, Homo sapien
aagctgatgtatttggcagggttac

SEQ ID NO: 458463 - DNA, 25 bp, Homo sapien
cacgttttgactaacgaactagagg

SEQ ID NO: 458464 - DNA, 25 bp, Homo sapien
ttcacgttttgactaacgaactaga

SEQ ID NO: 458465 - DNA, 25 bp, Homo sapien
tcccagggaggtttagtaagccagc

SEQ ID NO: 458466 - DNA, 25 bp, Homo sapien
tagggacgctcccattgtgcaagaa

SEQ ID NO: 458467 - DNA, 25 bp, Homo sapien
ggagcatcagtgtatcaagcaagaa

SEQ ID NO: 458468 - DNA, 25 bp, Homo sapien
gaagtatagccggttaacagctcca

SEQ ID NO: 458469 - DNA, 25 bp, Homo sapien
tacatagcccgtctaaagactggcc

SEQ ID NO: 458470 - DNA, 25 bp, Homo sapien
tacacccgtggttgtctcgagccaa

SEQ ID NO: 458471 - DNA, 25 bp, Homo sapien
taatagggaaaggttcctcacgctg

SEQ ID NO: 458472 - DNA, 25 bp, Homo sapien
tatatctgggaatggtgccacacac

SEQ ID NO: 458473 - DNA, 25 bp, Homo sapien
gagaaaagtcttgctccacagctct

SEQ ID NO: 458474 - DNA, 25 bp, Homo sapien
cacattttaacagaactggtagcat

SEQ ID NO: 458475 - DNA, 25 bp, Homo sapien
cccccatcatgatatgttctagaaa

SEQ ID NO: 458476 - DNA, 25 bp, Homo sapien
tggtattgtaacatttaggtaaaca

SEQ ID NO: 458477 - DNA, 25 bp, Homo sapien
catgtctatagttaacaccactgta

SEQ ID NO: 458478 - DNA, 25 bp, Homo sapien
ctagaaggtatgataaatagtttat

SEQ ID NO: 458479 - DNA, 25 bp, Homo sapien
tctgctcatgtctatagttaacacc

SEQ ID NO: 458480 - DNA, 25 bp, Homo sapien
cagagatctgctcatgtctatagtt

SEQ ID NO: 458481 - DNA, 25 bp, Homo sapien
actgcacccggccaggtgctgttat

SEQ ID NO: 458482 - DNA, 25 bp, Homo sapien
ctgcacccggccaggtgctgttatt

SEQ ID NO: 458483 - DNA, 25 bp, Homo sapien
tggaagtctctgaatccagacctgt

SEQ ID NO: 458484 - DNA, 25 bp, Homo sapien
gagactgtcccggtgacttatatga

SEQ ID NO: 458485 - DNA, 25 bp, Homo sapien
tgaggagactgacatacttgtctgg

SEQ ID NO: 458486 - DNA, 25 bp, Homo sapien
tgtattacacatagcacctctggca

SEQ ID NO: 458487 - DNA, 25 bp, Homo sapien
tatttgagatccctaatacaggcaa

SEQ ID NO: 458488 - DNA, 25 bp, Homo sapien
catatgacttaatcggtaggccatc

SEQ ID NO: 458489 - DNA, 25 bp, Homo sapien
tcagtttactcagggatatatgcac

SEQ ID NO: 458490 - DNA, 25 bp, Homo sapien
gattacaggccaggattctcaattt

SEQ ID NO: 458491 - DNA, 25 bp, Homo sapien
ggagatctgcaaaacacagtgaata

SEQ ID NO: 458492 - DNA, 25 bp, Homo sapien
tgaagttcacgaaagaccaacaggt

SEQ ID NO: 458493 - DNA, 25 bp, Homo sapien
cactaatgcatgttacaaatcaggc

SEQ ID NO: 458494 - DNA, 25 bp, Homo sapien
tttgatatttatgagcctgacagct

SEQ ID NO: 458495 - DNA, 25 bp, Homo sapien
aaaagcaatggtgtgtagacactgc

SEQ ID NO: 458496 - DNA, 25 bp, Homo sapien
gatcgagcaaagctgtaagaagcgc

SEQ ID NO: 458497 - DNA, 25 bp, Homo sapien
aaccaccagaacagtaacagaagcc

SEQ ID NO: 458498 - DNA, 25 bp, Homo sapien
tgaagccttaggagggatcgagcaa

SEQ ID NO: 458499 - DNA, 25 bp, Homo sapien
aactgcaagttgagccagcaggacc

SEQ ID NO: 458500 - DNA, 25 bp, Homo sapien
tagtagggcatcctatacacaaggc

SEQ ID NO: 458501 - DNA, 25 bp, Homo sapien
gacaagactcaggactaggacaact

SEQ ID NO: 458502 - DNA, 25 bp, Homo sapien
gaaatttggtaagggaatgcacacc

SEQ ID NO: 458503 - DNA, 25 bp, Homo sapien
cagaagacatgtttggtgtgctccc

SEQ ID NO: 458504 - DNA, 25 bp, Homo sapien
ttgtgggagcaaggcaaaacccgtg

SEQ ID NO: 458505 - DNA, 25 bp, Homo sapien
caaggtatccaagcgagaaagagca

SEQ ID NO: 458506 - DNA, 25 bp, Homo sapien
cagaaaatgttgagaggctgcccca

SEQ ID NO: 458507 - DNA, 25 bp, Homo sapien
aagacagcctttccaagttgccagg

SEQ ID NO: 458508 - DNA, 25 bp, Homo sapien
ggaactgaagtttgaaagacagcct

SEQ ID NO: 458509 - DNA, 25 bp, Homo sapien
cattctaggaacatggtaggaccaa

SEQ ID NO: 458510 - DNA, 25 bp, Homo sapien
aagacaatgacaaggccaagcagaa

SEQ ID NO: 458511 - DNA, 25 bp, Homo sapien
gccacattgttcagtaccaccaaag

SEQ ID NO: 458512 - DNA, 25 bp, Homo sapien
tgaaaatgaaaaacccatctgtcac

SEQ ID NO: 458513 - DNA, 25 bp, Homo sapien
tttatatttgcacacaaattctgcc

SEQ ID NO: 458514 - DNA, 25 bp, Homo sapien
caaagtaaaattcttgaatctttca

SEQ ID NO: 458515 - DNA, 25 bp, Homo sapien
tacctgtctaccacgcagaggctag

SEQ ID NO: 458516 - DNA, 25 bp, Homo sapien
caaccaaattagaggaggactgagg

SEQ ID NO: 458517 - DNA, 25 bp, Homo sapien
tgcaaattcgagttgcctgggaact

SEQ ID NO: 458518 - DNA, 25 bp, Homo sapien
tggtttcgaactggaactcctagcc

SEQ ID NO: 458519 - DNA, 25 bp, Homo sapien
tgctttatcgtagaaaaccttgtcg

SEQ ID NO: 458520 - DNA, 25 bp, Homo sapien
gaacgaagttcatagaaaagagcct

SEQ ID NO: 458521 - DNA, 25 bp, Homo sapien
tgccatctaacatgcgtgccaaacg

SEQ ID NO: 458522 - DNA, 25 bp, Homo sapien
tctggccaccaaccatcttgaattc

SEQ ID NO: 458523 - DNA, 25 bp, Homo sapien
ccctgaaaaaagcttgagtgttccg

SEQ ID NO: 458524 - DNA, 25 bp, Homo sapien
gcgctgaaggttgttctgtaaacac

SEQ ID NO: 458525 - DNA, 25 bp, Homo sapien
aagttaccattccaggtcggcgctg

SEQ ID NO: 458526 - DNA, 25 bp, Homo sapien
ctgcaagagccaaacaccctgaaaa

SEQ ID NO: 458527 - DNA, 25 bp, Homo sapien
ctgactccagtttggttatcagtag

SEQ ID NO: 458528 - DNA, 25 bp, Homo sapien
ccaggtcatggtaagaaggtctttg

SEQ ID NO: 458529 - DNA, 25 bp, Homo sapien
agtagtgctgtcagaaccacactgg

SEQ ID NO: 458530 - DNA, 25 bp, Homo sapien
tatcagtagtgctgtcagaaccaca

SEQ ID NO: 458531 - DNA, 25 bp, Homo sapien
tcaagagaaaccagtgagcgagcct

SEQ ID NO: 458532 - DNA, 25 bp, Homo sapien
gaaatcagcgttaggatccagccaa

SEQ ID NO: 458533 - DNA, 25 bp, Homo sapien
taagcaagaccaaggagtgtgtcgc

SEQ ID NO: 458534 - DNA, 25 bp, Homo sapien
gagcgagcctttatgtgaaccactg

SEQ ID NO: 458535 - DNA, 25 bp, Homo sapien
catctcaaaaaaagtttattatgtt

SEQ ID NO: 458536 - DNA, 25 bp, Homo sapien
aagtttattatgtttgatacaacag

SEQ ID NO: 458537 - DNA, 25 bp, Homo sapien
agtttattatgtttgatacaacaga

SEQ ID NO: 458538 - DNA, 25 bp, Homo sapien
aaagtttattatgtttgatacaaca

SEQ ID NO: 458539 - DNA, 25 bp, Homo sapien
aaccccagaggcggaggttgtggtg

SEQ ID NO: 458540 - DNA, 25 bp, Homo sapien
gccgagatcacgccattgcatacca

SEQ ID NO: 458541 - DNA, 25 bp, Homo sapien
cgagatcacgccattgcataccagc

SEQ ID NO: 458542 - DNA, 25 bp, Homo sapien
tgaaccccagaggcggaggttgtgg

SEQ ID NO: 458543 - DNA, 25 bp, Homo sapien
cgaggacatttgttccgttggccaa

SEQ ID NO: 458544 - DNA, 25 bp, Homo sapien
aatcagtaagccgaggacatttgtt

SEQ ID NO: 458545 - DNA, 25 bp, Homo sapien
tttaataaagtgtcaatcagtaagc

SEQ ID NO: 458546 - DNA, 25 bp, Homo sapien
tccgttggccaattttcggttatca

SEQ ID NO: 458547 - DNA, 25 bp, Homo sapien
cagaagatactgttctagtgctgac

SEQ ID NO: 458548 - DNA, 25 bp, Homo sapien
ttgctctggtatgatgatagtctct

SEQ ID NO: 458549 - DNA, 25 bp, Homo sapien
cacttcagggctttttatcctttca

SEQ ID NO: 458550 - DNA, 25 bp, Homo sapien
tttcattcgtgatgagcacttcagg

SEQ ID NO: 458551 - DNA, 25 bp, Homo sapien
tacatggagttgtctagagagcagc

SEQ ID NO: 458552 - DNA, 25 bp, Homo sapien
taggctgagtgtagatttggctaac

SEQ ID NO: 458553 - DNA, 25 bp, Homo sapien
gcccagagacggcatggcagcagat

SEQ ID NO: 458554 - DNA, 25 bp, Homo sapien
gcagcaggcattatggcttaagcac

SEQ ID NO: 458555 - DNA, 25 bp, Homo sapien
tattcactgagactatagtttccaa

SEQ ID NO: 458556 - DNA, 25 bp, Homo sapien
tcttccatctttgaatctactataa

SEQ ID NO: 458557 - DNA, 25 bp, Homo sapien
gcctggccccaagtaaactaattga

SEQ ID NO: 458558 - DNA, 25 bp, Homo sapien
gagcttgttagatgcccagcactat

SEQ ID NO: 458559 - DNA, 25 bp, Homo sapien
cttttcatgactcctaagttatgga

SEQ ID NO: 458560 - DNA, 25 bp, Homo sapien
aatgacctcaaattgggttacccag

SEQ ID NO: 458561 - DNA, 25 bp, Homo sapien
taaggaaacctagaatgttaatctg

SEQ ID NO: 458562 - DNA, 25 bp, Homo sapien
gatatatcaggatcttttggaccat

SEQ ID NO: 458563 - DNA, 25 bp, Homo sapien
tgagaactgactaaactactggtac

SEQ ID NO: 458564 - DNA, 25 bp, Homo sapien
taaattttgataccaccattgccgc

SEQ ID NO: 458565 - DNA, 25 bp, Homo sapien
gatgatcacctcagcagaaaactgt

SEQ ID NO: 458566 - DNA, 25 bp, Homo sapien
tacttagaccatgtggagaaggaac

SEQ ID NO: 458567 - DNA, 25 bp, Homo sapien
gggtcattagtgatctaaatgatca

SEQ ID NO: 458568 - DNA, 25 bp, Homo sapien
gggtatgaataatcaggcctgtgaa

SEQ ID NO: 458569 - DNA, 25 bp, Homo sapien
ttttgggcctttatttgtgtatctc

SEQ ID NO: 458570 - DNA, 25 bp, Homo sapien
gaggtggtagtagaataaagaatcc

SEQ ID NO: 458571 - DNA, 25 bp, Homo sapien
gagtgcttacacttatggagctaac

SEQ ID NO: 458572 - DNA, 25 bp, Homo sapien
tttaaatcgccccagagtttgcctg

SEQ ID NO: 458573 - DNA, 25 bp, Homo sapien
tcttataatcttcgggagtgcttac

SEQ ID NO: 458574 - DNA, 25 bp, Homo sapien
gagatacagcttcttatagtaacac

SEQ ID NO: 458575 - DNA, 25 bp, Homo sapien
catctcagggtaccaaattaactca

SEQ ID NO: 458576 - DNA, 25 bp, Homo sapien
gccagaaacagggaataggaagatt

SEQ ID NO: 458577 - DNA, 25 bp, Homo sapien
taggaagattaagagctatgggatt

SEQ ID NO: 458578 - DNA, 25 bp, Homo sapien
caaattaactcatcatcccaaggat

SEQ ID NO: 458579 - DNA, 25 bp, Homo sapien
atgatgaaaccacgtctgtaaaaaa

SEQ ID NO: 458580 - DNA, 25 bp, Homo sapien
aacatgatgaaaccacgtctgtaaa

SEQ ID NO: 458581 - DNA, 25 bp, Homo sapien
cactttgcgacaccaaggcgggagg

SEQ ID NO: 458582 - DNA, 25 bp, Homo sapien
ctttgcgacaccaaggcgggaggat

SEQ ID NO: 458583 - DNA, 25 bp, Homo sapien
attatggctcagtgctgcatcaaac

SEQ ID NO: 458584 - DNA, 25 bp, Homo sapien
gattatggctcagtgctgcatcaaa

SEQ ID NO: 458585 - DNA, 25 bp, Homo sapien
catgattatggctcagtgctgcatc

SEQ ID NO: 458586 - DNA, 25 bp, Homo sapien
tgattatggctcagtgctgcatcaa

SEQ ID NO: 458587 - DNA, 25 bp, Homo sapien
tgtatctggttaggcaaagtggctt

SEQ ID NO: 458588 - DNA, 25 bp, Homo sapien
tttcagccagcaaacgtaaaagcag

SEQ ID NO: 458589 - DNA, 25 bp, Homo sapien
tctgtatctggttaggcaaagtggc

SEQ ID NO: 458590 - DNA, 25 bp, Homo sapien
gcaaacgtaaaagcagagatttaag

SEQ ID NO: 458591 - DNA, 25 bp, Homo sapien
aagctgttcatttgtggaatgtgga

SEQ ID NO: 458592 - DNA, 25 bp, Homo sapien
gatgttcatgtatacaatcctgtca

SEQ ID NO: 458593 - DNA, 25 bp, Homo sapien
acagtgatgttcatgtatacaatcc

SEQ ID NO: 458594 - DNA, 25 bp, Homo sapien
tggatgttctagaagttgtagaaca

SEQ ID NO: 458595 - DNA, 25 bp, Homo sapien
tcatagacgatcagccattgaactc

SEQ ID NO: 458596 - DNA, 25 bp, Homo sapien
taagccagtttgcaaagtagtagtc

SEQ ID NO: 458597 - DNA, 25 bp, Homo sapien
cctatatagtacaggcttggattcc

SEQ ID NO: 458598 - DNA, 25 bp, Homo sapien
gtagtcaaatgccacaggtcacttt

SEQ ID NO: 458599 - DNA, 25 bp, Homo sapien
caagctctccctgagtaggatggca

SEQ ID NO: 458600 - DNA, 25 bp, Homo sapien
gccaggaccatgcatctttagcaag

SEQ ID NO: 458601 - DNA, 25 bp, Homo sapien
tctgtggtccatgcatagtgtaaag

SEQ ID NO: 458602 - DNA, 25 bp, Homo sapien
tagtgtaaagaaaccgctccgaaga

SEQ ID NO: 458603 - DNA, 25 bp, Homo sapien
taaatgagcccacaacctttcttgg

SEQ ID NO: 458604 - DNA, 25 bp, Homo sapien
tacataatcctctctattgaaagca

SEQ ID NO: 458605 - DNA, 25 bp, Homo sapien
taatattttcctgtgccaatcacag

SEQ ID NO: 458606 - DNA, 25 bp, Homo sapien
tgtgaagtcaagcatattcagccat

SEQ ID NO: 458607 - DNA, 25 bp, Homo sapien
ttttttgatctgtattagagatgct

SEQ ID NO: 458608 - DNA, 25 bp, Homo sapien
tgtttatttatctcgtagatcatat

SEQ ID NO: 458609 - DNA, 25 bp, Homo sapien
aaatttgtactggaataacttgtag

SEQ ID NO: 458610 - DNA, 25 bp, Homo sapien
gaataacttgtagtggtttctaaga

SEQ ID NO: 458611 - DNA, 25 bp, Homo sapien
tcccggaggagaatagaagagtgca

SEQ ID NO: 458612 - DNA, 25 bp, Homo sapien
tgacacgcttctttaggactgcctg

SEQ ID NO: 458613 - DNA, 25 bp, Homo sapien
aatattccggagatgctttctgcag

SEQ ID NO: 458614 - DNA, 25 bp, Homo sapien
tgcctacagagtttttccccgtgga

SEQ ID NO: 458615 - DNA, 25 bp, Homo sapien
gaaaattcaggacccggagtcatgg

SEQ ID NO: 458616 - DNA, 25 bp, Homo sapien
tctctaggtaggtaggactggccgc

SEQ ID NO: 458617 - DNA, 25 bp, Homo sapien
tgacgctgaagcgtgaggtgcccca

SEQ ID NO: 458618 - DNA, 25 bp, Homo sapien
tccggtgggtcgtggcaacagtccc

SEQ ID NO: 458619 - DNA, 25 bp, Homo sapien
gcccagcggatctgtcagcaagacc

SEQ ID NO: 458620 - DNA, 25 bp, Homo sapien
tctcgccgttttctcgacccggtga

SEQ ID NO: 458621 - DNA, 25 bp, Homo sapien
ttctcgacccggtgatggccgtcat

SEQ ID NO: 458622 - DNA, 25 bp, Homo sapien
cgctccttgacaggaggactggacg

SEQ ID NO: 458623 - DNA, 25 bp, Homo sapien
taggggcaacttgggcgtctgcgag

SEQ ID NO: 458624 - DNA, 25 bp, Homo sapien
aggggcaacttgggcgtctgcgagt

SEQ ID NO: 458625 - DNA, 25 bp, Homo sapien
gggcaacttgggcgtctgcgagtgg

SEQ ID NO: 458626 - DNA, 25 bp, Homo sapien
ttaggggcaacttgggcgtctgcga

SEQ ID NO: 458627 - DNA, 25 bp, Homo sapien
gaagcaaagggagagccgtgcacca

SEQ ID NO: 458628 - DNA, 25 bp, Homo sapien
caagaggactgcaaccgaagaagca

SEQ ID NO: 458629 - DNA, 25 bp, Homo sapien
tccgcggctttgcaaaagcgctaca

SEQ ID NO: 458630 - DNA, 25 bp, Homo sapien
acacgcacgcgcaagaagcaagagg

SEQ ID NO: 458631 - DNA, 25 bp, Homo sapien
gacactggctgtaagacgtttttct

SEQ ID NO: 458632 - DNA, 25 bp, Homo sapien
gactaaatgcctgtgggctggtagc

SEQ ID NO: 458633 - DNA, 25 bp, Homo sapien
cattccgttgtttggagtttagaca

SEQ ID NO: 458634 - DNA, 25 bp, Homo sapien
tggtagctataagacgacccctcgg

SEQ ID NO: 458635 - DNA, 25 bp, Homo sapien
tccgaggcttaagtgcgataacccc

SEQ ID NO: 458636 - DNA, 25 bp, Homo sapien
gataacccctgtaaagcgctggaga

SEQ ID NO: 458637 - DNA, 25 bp, Homo sapien
gcggttttaaatgcacgtgtatcca

SEQ ID NO: 458638 - DNA, 25 bp, Homo sapien
gcaaaagctctacaagccggcaggg

SEQ ID NO: 458639 - DNA, 25 bp, Homo sapien
tcgtacagcgtggtagagaactcca

SEQ ID NO: 458640 - DNA, 25 bp, Homo sapien
tagctgtcagtataccaacgtgttg

SEQ ID NO: 458641 - DNA, 25 bp, Homo sapien
cacaccgttgaagaaggagaccacg

SEQ ID NO: 458642 - DNA, 25 bp, Homo sapien
aatcattaactctaggcaggcgcgc

SEQ ID NO: 458643 - DNA, 25 bp, Homo sapien
gatttcttaatctgaacctcaggtg

SEQ ID NO: 458644 - DNA, 25 bp, Homo sapien
agatttcttaatctgaacctcaggt

SEQ ID NO: 458645 - DNA, 25 bp, Homo sapien
ttctaagactttggggcagatttct

SEQ ID NO: 458646 - DNA, 25 bp, Homo sapien
ttcttaatctgaacctcaggtgtcc

SEQ ID NO: 458647 - DNA, 25 bp, Homo sapien
tacaacagtccaatgaggtattaat

SEQ ID NO: 458648 - DNA, 25 bp, Homo sapien
tacccaacaaggcacagctagtaag

SEQ ID NO: 458649 - DNA, 25 bp, Homo sapien
tgggattcacccaggcagctcggtt

SEQ ID NO: 458650 - DNA, 25 bp, Homo sapien
tcatttacatccttacaacagtcca

SEQ ID NO: 458651 - DNA, 25 bp, Homo sapien
agcatgcctgcatcagtcaatacct

SEQ ID NO: 458652 - DNA, 25 bp, Homo sapien
agtcaatacctgcaacactgtccat

SEQ ID NO: 458653 - DNA, 25 bp, Homo sapien
cactgtccattgtccaggattccaa

SEQ ID NO: 458654 - DNA, 25 bp, Homo sapien
ctgtcagcatgcctgcatcagtcaa

SEQ ID NO: 458655 - DNA, 25 bp, Homo sapien
acctttcagtcattgttgtggcagg

SEQ ID NO: 458656 - DNA, 25 bp, Homo sapien
tggtgttgaacctttcagtcattgt

SEQ ID NO: 458657 - DNA, 25 bp, Homo sapien
gatggccatttggtgcaactcataa

SEQ ID NO: 458658 - DNA, 25 bp, Homo sapien
gcaactcataaataacctcttcacc

SEQ ID NO: 458659 - DNA, 25 bp, Homo sapien
gacagagatggccatttggtgcaac

SEQ ID NO: 458660 - DNA, 25 bp, Homo sapien
cttcaccacaacttggttgaaggta

SEQ ID NO: 458661 - DNA, 25 bp, Homo sapien
gcaggcccaactgctcatgtgcagt

SEQ ID NO: 458662 - DNA, 25 bp, Homo sapien
cccaactgctcatgtgcagtgcaca

SEQ ID NO: 458663 - DNA, 25 bp, Homo sapien
gggatttggctgcaggcccaactgc

SEQ ID NO: 458664 - DNA, 25 bp, Homo sapien
gggcacctcctgaacatggtcccca

SEQ ID NO: 458665 - DNA, 25 bp, Homo sapien
cttagtgtggctatgctgggttccc

SEQ ID NO: 458666 - DNA, 25 bp, Homo sapien
gtgccacagcctttgagggtgtcca

SEQ ID NO: 458667 - DNA, 25 bp, Homo sapien
gccagtacacttcttggcccttgtg

SEQ ID NO: 458668 - DNA, 25 bp, Homo sapien
acagggcttagtgtggctatgctgg

SEQ ID NO: 458669 - DNA, 25 bp, Homo sapien
tgtgcttgaatttctggtccctgga

SEQ ID NO: 458670 - DNA, 25 bp, Homo sapien
gatgtgcttgaatttctggtccctg

SEQ ID NO: 458671 - DNA, 25 bp, Homo sapien
tctgatgtgcttgaatttctggtcc

SEQ ID NO: 458672 - DNA, 25 bp, Homo sapien
ctgatgtgcttgaatttctggtccc

SEQ ID NO: 458673 - DNA, 25 bp, Homo sapien
caatctcccatttgatatttgtctg

SEQ ID NO: 458674 - DNA, 25 bp, Homo sapien
acaatctcccatttgatatttgtct

SEQ ID NO: 458675 - DNA, 25 bp, Homo sapien
tgcattgtgactcaattcctgaagg

SEQ ID NO: 458676 - DNA, 25 bp, Homo sapien
gcattgtgactcaattcctgaaggt

SEQ ID NO: 458677 - DNA, 25 bp, Homo sapien
aatactgcacatatgaaggttccca

SEQ ID NO: 458678 - DNA, 25 bp, Homo sapien
gaatggctggcaaaggcttcaatct

SEQ ID NO: 458679 - DNA, 25 bp, Homo sapien
gatacgacactttgataggaacaca

SEQ ID NO: 458680 - DNA, 25 bp, Homo sapien
caggataaggcaggtcatctcccag

SEQ ID NO: 458681 - DNA, 25 bp, Homo sapien
tgcttttatgtataggctgcccaac

SEQ ID NO: 458682 - DNA, 25 bp, Homo sapien
tcatagaagcactgcatggttgcac

SEQ ID NO: 458683 - DNA, 25 bp, Homo sapien
gcccagccagcaaatcttatgtaga

SEQ ID NO: 458684 - DNA, 25 bp, Homo sapien
tcatgagacaattaaggagtggcct

SEQ ID NO: 458685 - DNA, 25 bp, Homo sapien
atccaggagattaaaaccccaccag

SEQ ID NO: 458686 - DNA, 25 bp, Homo sapien
aaatactattgttggctctcctgtc

SEQ ID NO: 458687 - DNA, 25 bp, Homo sapien
aaaacagtatcatccctgagtgagg

SEQ ID NO: 458688 - DNA, 25 bp, Homo sapien
tgtactccggcctatacatggcttt

SEQ ID NO: 458689 - DNA, 25 bp, Homo sapien
tgagctcatagctaccacggaggca

SEQ ID NO: 458690 - DNA, 25 bp, Homo sapien
tacataatgcggttctgaaggagca

SEQ ID NO: 458691 - DNA, 25 bp, Homo sapien
gaaagtgtagtgaaactggcacatg

SEQ ID NO: 458692 - DNA, 25 bp, Homo sapien
gagcaacaaccccaaccaaactgtg

SEQ ID NO: 458693 - DNA, 25 bp, Homo sapien
taacctagtcttagaagccatgcag

SEQ ID NO: 458694 - DNA, 25 bp, Homo sapien
tttggacctcataggatcgctggca

SEQ ID NO: 458695 - DNA, 25 bp, Homo sapien
gtagctgtacctccacggtgatgaa

SEQ ID NO: 458696 - DNA, 25 bp, Homo sapien
tgttccagcaaagctaatcctgagc

SEQ ID NO: 458697 - DNA, 25 bp, Homo sapien
gggacgcgatcccagcagtcgttac

SEQ ID NO: 458698 - DNA, 25 bp, Homo sapien
gactcagcgcggtgagcgctattta

SEQ ID NO: 458699 - DNA, 25 bp, Homo sapien
ttggagtctgtcacagagccccgag

SEQ ID NO: 458700 - DNA, 25 bp, Homo sapien
ggaagtccgacgctgtcgactcggt

SEQ ID NO: 458701 - DNA, 25 bp, Homo sapien
ggcgaaaagcgcgtgtcctgacagt

SEQ ID NO: 458702 - DNA, 25 bp, Homo sapien
aattggcgcagaaacgaattcgccg

SEQ ID NO: 458703 - DNA, 25 bp, Homo sapien
tagaacgagtgcacacattggcagc

SEQ ID NO: 458704 - DNA, 25 bp, Homo sapien
agctattgcaactgatgcgccccgg

SEQ ID NO: 458705 - DNA, 25 bp, Homo sapien
aaatccacaaatattgccacaacaa

SEQ ID NO: 458706 - DNA, 25 bp, Homo sapien
cacaaatattgccacaacaaaatgt

SEQ ID NO: 458707 - DNA, 25 bp, Homo sapien
taggatcaccagattttaatacctg

SEQ ID NO: 458708 - DNA, 25 bp, Homo sapien
tccacattggactcatttaggatca

SEQ ID NO: 458709 - DNA, 25 bp, Homo sapien
tgcgccttgcgtcaggtgccagtga

SEQ ID NO: 458710 - DNA, 25 bp, Homo sapien
gaactccatcgtgcatctttgaaaa

SEQ ID NO: 458711 - DNA, 25 bp, Homo sapien
aagtctcccaggtttaaagagcgag

SEQ ID NO: 458712 - DNA, 25 bp, Homo sapien
gaataatctgcgatgcataggctaa

SEQ ID NO: 458713 - DNA, 25 bp, Homo sapien
tttctaagagaagtgcctaggagtc

SEQ ID NO: 458714 - DNA, 25 bp, Homo sapien
catcgtatagagaaatttgggcgga

SEQ ID NO: 458715 - DNA, 25 bp, Homo sapien
cctaggagtctatttcacctgtagc

SEQ ID NO: 458716 - DNA, 25 bp, Homo sapien
cagttgggactttctggtatttgcc

SEQ ID NO: 458717 - DNA, 25 bp, Homo sapien
gaaactgaggttcactttctggcat

SEQ ID NO: 458718 - DNA, 25 bp, Homo sapien
agaaactgaggttcactttctggca

SEQ ID NO: 458719 - DNA, 25 bp, Homo sapien
cagcggcaggatacagaagccacaa

SEQ ID NO: 458720 - DNA, 25 bp, Homo sapien
gaagccacaaaatctctctgctgga

SEQ ID NO: 458721 - DNA, 25 bp, Homo sapien
ggatacagaagccacaaaatctctc

SEQ ID NO: 458722 - DNA, 25 bp, Homo sapien
agggagaagtgcagcggcaggatac

SEQ ID NO: 458723 - DNA, 25 bp, Homo sapien
aggtgattctgcaccaccaaataga

SEQ ID NO: 458724 - DNA, 25 bp, Homo sapien
caaggtcaaagggctgaccaaggtg

SEQ ID NO: 458725 - DNA, 25 bp, Homo sapien
caaggtgattctgcaccaccaaata

SEQ ID NO: 458726 - DNA, 25 bp, Homo sapien
caggcaaggtcaaagggctgaccaa

SEQ ID NO: 458727 - DNA, 25 bp, Homo sapien
tgcagaaaatgccagtgtagaacca

SEQ ID NO: 458728 - DNA, 25 bp, Homo sapien
ctccaggtgaagctagacaaaatta

SEQ ID NO: 458729 - DNA, 25 bp, Homo sapien
aagtcttcactagcgtcaatgggag

SEQ ID NO: 458730 - DNA, 25 bp, Homo sapien
gaatctgcacgtctaatccatttag

SEQ ID NO: 458731 - DNA, 25 bp, Homo sapien
gagccctattctctgtggacttgta

SEQ ID NO: 458732 - DNA, 25 bp, Homo sapien
ccaataccacttaaggcaaatggct

SEQ ID NO: 458733 - DNA, 25 bp, Homo sapien
gtggagatgagcgtgtattttcatt

SEQ ID NO: 458734 - DNA, 25 bp, Homo sapien
accaggccccaacaacaaggagtgg

SEQ ID NO: 458735 - DNA, 25 bp, Homo sapien
caatggccggaatgacaccaatggg

SEQ ID NO: 458736 - DNA, 25 bp, Homo sapien
caccaatgggggaaatttcagacct

SEQ ID NO: 458737 - DNA, 25 bp, Homo sapien
gctccacaggaacatatttgcattt

SEQ ID NO: 458738 - DNA, 25 bp, Homo sapien
cccttctggaaacaatggccggaat

SEQ ID NO: 458739 - DNA, 25 bp, Homo sapien
actgtgagaactggactgagctgtc

SEQ ID NO: 458740 - DNA, 25 bp, Homo sapien
aactcttgtagatccattagctgga

SEQ ID NO: 458741 - DNA, 25 bp, Homo sapien
ccattagctggatgtcccaagttct

SEQ ID NO: 458742 - DNA, 25 bp, Homo sapien
tgccattgccgacttactaaaccct

SEQ ID NO: 458743 - DNA, 25 bp, Homo sapien
caggcccaggcgctggctcggcgtg

SEQ ID NO: 458744 - DNA, 25 bp, Homo sapien
gagatggtgggcgaagccggggggc

SEQ ID NO: 458745 - DNA, 25 bp, Homo sapien
ggtagggagatggtgggcgaagccg

SEQ ID NO: 458746 - DNA, 25 bp, Homo sapien
ggcccaggcgctggctcggcgtgac

SEQ ID NO: 458747 - DNA, 25 bp, Homo sapien
gggtgtgcagaatgcttggatcctt

SEQ ID NO: 458748 - DNA, 25 bp, Homo sapien
atttcctgggtgtgcagaatgcttg

SEQ ID NO: 458749 - DNA, 25 bp, Homo sapien
cctgggtgtgcagaatgcttggatc

SEQ ID NO: 458750 - DNA, 25 bp, Homo sapien
ttcctgggtgtgcagaatgcttgga

SEQ ID NO: 458751 - DNA, 25 bp, Homo sapien
ttctgagtagcagtacctcccatgc

SEQ ID NO: 458752 - DNA, 25 bp, Homo sapien
tctgagtagcagtacctcccatgct

SEQ ID NO: 458753 - DNA, 25 bp, Homo sapien
ctttctgagtagcagtacctcccat

SEQ ID NO: 458754 - DNA, 25 bp, Homo sapien
tgagtagcagtacctcccatgctct

SEQ ID NO: 458755 - DNA, 25 bp, Homo sapien
tccatcacctcctctgttatctccg

SEQ ID NO: 458756 - DNA, 25 bp, Homo sapien
catcacctcctctgttatctccgca

SEQ ID NO: 458757 - DNA, 25 bp, Homo sapien
cacctcctctgttatctccgcattt

SEQ ID NO: 458758 - DNA, 25 bp, Homo sapien
acctcctctgttatctccgcatttt

SEQ ID NO: 458759 - DNA, 25 bp, Homo sapien
tgctttcccccgcctcttgtaaggc

SEQ ID NO: 458760 - DNA, 25 bp, Homo sapien
ctgtcacagtctcggatggctgcat

SEQ ID NO: 458761 - DNA, 25 bp, Homo sapien
tctgtgtgctttcccccgcctcttg

SEQ ID NO: 458762 - DNA, 25 bp, Homo sapien
ttcccccgcctcttgtaaggctgag

SEQ ID NO: 458763 - DNA, 25 bp, Homo sapien
catgctcttttcgagccttcttaac

SEQ ID NO: 458764 - DNA, 25 bp, Homo sapien
ttcgagccttcttaactcgttctat

SEQ ID NO: 458765 - DNA, 25 bp, Homo sapien
tctcatgctcttttcgagccttctt

SEQ ID NO: 458766 - DNA, 25 bp, Homo sapien
ctcttttcgagccttcttaactcgt

SEQ ID NO: 458767 - DNA, 25 bp, Homo sapien
ttccagccattcctccaggaaaatt

SEQ ID NO: 458768 - DNA, 25 bp, Homo sapien
cccattccagccattcctccaggaa

SEQ ID NO: 458769 - DNA, 25 bp, Homo sapien
gcattccggccattccaggtatgcc

SEQ ID NO: 458770 - DNA, 25 bp, Homo sapien
ccaggcattccggccattccaggta

SEQ ID NO: 458771 - DNA, 25 bp, Homo sapien
ttgggttgctctggtactttgacat

SEQ ID NO: 458772 - DNA, 25 bp, Homo sapien
ggttgctctggtactttgacatatt

SEQ ID NO: 458773 - DNA, 25 bp, Homo sapien
acctttgggttgctctggtactttg

SEQ ID NO: 458774 - DNA, 25 bp, Homo sapien
cctttgggttgctctggtactttga

SEQ ID NO: 458775 - DNA, 25 bp, Homo sapien
tgtaattcctagtaggaaaacatta

SEQ ID NO: 458776 - DNA, 25 bp, Homo sapien
ggggtagggattatcttcaaagcac

SEQ ID NO: 458777 - DNA, 25 bp, Homo sapien
ggtttgtattattgcgacatccata

SEQ ID NO: 458778 - DNA, 25 bp, Homo sapien
tcctagtaggaaaacattatctgaa

SEQ ID NO: 458779 - DNA, 25 bp, Homo sapien
actgcgcttttcggaccagcttaaa

SEQ ID NO: 458780 - DNA, 25 bp, Homo sapien
tcggaccagcttaaaaaacggtgca

SEQ ID NO: 458781 - DNA, 25 bp, Homo sapien
agcttaaaaaacggtgcaccaccag

SEQ ID NO: 458782 - DNA, 25 bp, Homo sapien
aatactgcgcttttcggaccagctt

SEQ ID NO: 458783 - DNA, 25 bp, Homo sapien
cagtccttctgctcacccttgacat

SEQ ID NO: 458784 - DNA, 25 bp, Homo sapien
tccttctgctcacccttgacattcc

SEQ ID NO: 458785 - DNA, 25 bp, Homo sapien
ctagtcaatcgcttcaacaacactc

SEQ ID NO: 458786 - DNA, 25 bp, Homo sapien
tagtcaatcgcttcaacaacactct

SEQ ID NO: 458787 - DNA, 25 bp, Homo sapien
taggaatgactaccatagccctgcc

SEQ ID NO: 458788 - DNA, 25 bp, Homo sapien
caaggaagcctcgtatgtgacgtca

SEQ ID NO: 458789 - DNA, 25 bp, Homo sapien
taactttggtctggagaactcaggc

SEQ ID NO: 458790 - DNA, 25 bp, Homo sapien
cactgtatttcactagggatggctg

SEQ ID NO: 458791 - DNA, 25 bp, Homo sapien
tctgacacgaagctgttcaaagaca

SEQ ID NO: 458792 - DNA, 25 bp, Homo sapien
gcgaaagggctaaggtctgacacga

SEQ ID NO: 458793 - DNA, 25 bp, Homo sapien
ctactatgtgttgcctttgacaggc

SEQ ID NO: 458794 - DNA, 25 bp, Homo sapien
gcagctatttgtttaggacccagaa

SEQ ID NO: 458795 - DNA, 25 bp, Homo sapien
tatgtttcacacatgttggtttgga

SEQ ID NO: 458796 - DNA, 25 bp, Homo sapien
tgtttcacacatgttggtttggaag

SEQ ID NO: 458797 - DNA, 25 bp, Homo sapien
atgtttcacacatgttggtttggaa

SEQ ID NO: 458798 - DNA, 25 bp, Homo sapien
ttcaaatcgacgttctctgtggttt

SEQ ID NO: 458799 - DNA, 25 bp, Homo sapien
ctgtggtttaatttcgcaagacaca

SEQ ID NO: 458800 - DNA, 25 bp, Homo sapien
agtttcaaatcgacgttctctgtgg

SEQ ID NO: 458801 - DNA, 25 bp, Homo sapien
cgaaagtttcaaatcgacgttctct

SEQ ID NO: 458802 - DNA, 25 bp, Homo sapien
ggacaacattctgaatccatctcac

SEQ ID NO: 458803 - DNA, 25 bp, Homo sapien
aggacaacattctgaatccatctca

SEQ ID NO: 458804 - DNA, 25 bp, Homo sapien
taggacaacattctgaatccatctc

SEQ ID NO: 458805 - DNA, 25 bp, Homo sapien
aatgtttacaatgtgataacagcac

SEQ ID NO: 458806 - DNA, 25 bp, Homo sapien
taaatgctcagaaaataagaacgtc

SEQ ID NO: 458807 - DNA, 25 bp, Homo sapien
tctatcagtttgtgcatgccaattc

SEQ ID NO: 458808 - DNA, 25 bp, Homo sapien
aataagaacgtccactggcaattct

SEQ ID NO: 458809 - DNA, 25 bp, Homo sapien
ttttggttggctggcataggcttca

SEQ ID NO: 458810 - DNA, 25 bp, Homo sapien
aatatctgtgtaggccagtgcacac

SEQ ID NO: 458811 - DNA, 25 bp, Homo sapien
tcagtctgagctgtagacatttctg

SEQ ID NO: 458812 - DNA, 25 bp, Homo sapien
cacagaacctggtaactggtcagtc

SEQ ID NO: 458813 - DNA, 25 bp, Homo sapien
tcctgccagtttttaccattcacca

SEQ ID NO: 458814 - DNA, 25 bp, Homo sapien
ggcagacatcactgataaggataat

SEQ ID NO: 458815 - DNA, 25 bp, Homo sapien
gccaccaggcagacatcactgataa

SEQ ID NO: 458816 - DNA, 25 bp, Homo sapien
tttcccatcggattggtctctcctg

SEQ ID NO: 458817 - DNA, 25 bp, Homo sapien
cataaatccacaatttagtctaggc

SEQ ID NO: 458818 - DNA, 25 bp, Homo sapien
atccacaatttagtctaggcccttg

SEQ ID NO: 458819 - DNA, 25 bp, Homo sapien
ctgatctatcgctgaagactgactg

SEQ ID NO: 458820 - DNA, 25 bp, Homo sapien
ccttcgttccatatctgatctatcg

SEQ ID NO: 458821 - DNA, 25 bp, Homo sapien
agaagttggatgtagatcatggcct

SEQ ID NO: 458822 - DNA, 25 bp, Homo sapien
aggattgacagggacaatcgagtca

SEQ ID NO: 458823 - DNA, 25 bp, Homo sapien
tgacagggacaatcgagtcagagtt

SEQ ID NO: 458824 - DNA, 25 bp, Homo sapien
agggacaatcgagtcagagttcagg

SEQ ID NO: 458825 - DNA, 25 bp, Homo sapien
ggcagtaacatgtgtgagccgtcat

SEQ ID NO: 458826 - DNA, 25 bp, Homo sapien
tacaaaacattcgtcctttatatcc

SEQ ID NO: 458827 - DNA, 25 bp, Homo sapien
cttatcccaaaggaagtcttcaggg

SEQ ID NO: 458828 - DNA, 25 bp, Homo sapien
cacatccatatcttatcccaaagga

SEQ ID NO: 458829 - DNA, 25 bp, Homo sapien
cagcttgcaatactgatgtggtcca

SEQ ID NO: 458830 - DNA, 25 bp, Homo sapien
gactttaaagatggcaacgcagcac

SEQ ID NO: 458831 - DNA, 25 bp, Homo sapien
tggtccagtgggatgactttaaaga

SEQ ID NO: 458832 - DNA, 25 bp, Homo sapien
tcattaatgatacccaagcagcttg

SEQ ID NO: 458833 - DNA, 25 bp, Homo sapien
gttttctgacattgtcttctcgaaa

SEQ ID NO: 458834 - DNA, 25 bp, Homo sapien
ttgtcttctcgaaatgaacggaaag

SEQ ID NO: 458835 - DNA, 25 bp, Homo sapien
gacattgtcttctcgaaatgaacgg

SEQ ID NO: 458836 - DNA, 25 bp, Homo sapien
tctcgaaatgaacggaaagagggaa

SEQ ID NO: 458837 - DNA, 25 bp, Homo sapien
gaaggttgaatcagaaacagctctt

SEQ ID NO: 458838 - DNA, 25 bp, Homo sapien
aggaattggaaggttgaatcagaaa

SEQ ID NO: 458839 - DNA, 25 bp, Homo sapien
tggaaggttgaatcagaaacagctc

SEQ ID NO: 458840 - DNA, 25 bp, Homo sapien
attggaaggttgaatcagaaacagc

SEQ ID NO: 458841 - DNA, 25 bp, Homo sapien
taaggacagtggttagaaatgccca

SEQ ID NO: 458842 - DNA, 25 bp, Homo sapien
ccctttgtgaacgttgctaaggaca

SEQ ID NO: 458843 - DNA, 25 bp, Homo sapien
gctgcctttctgagtctaagacggg

SEQ ID NO: 458844 - DNA, 25 bp, Homo sapien
cagatcggtctgacaggagcctgca

SEQ ID NO: 458845 - DNA, 25 bp, Homo sapien
ccaagatccgagctatttattctca

SEQ ID NO: 458846 - DNA, 25 bp, Homo sapien
gaacaaatggacctgtctggccatt

SEQ ID NO: 458847 - DNA, 25 bp, Homo sapien
tgtctggccatttgagatcatgtgc

SEQ ID NO: 458848 - DNA, 25 bp, Homo sapien
ggcaccgactgctggaacccaagat

SEQ ID NO: 458849 - DNA, 25 bp, Homo sapien
ggagcaggcccttgaacggtaacaa

SEQ ID NO: 458850 - DNA, 25 bp, Homo sapien
ctgggccaaaaggcttagggctcct

SEQ ID NO: 458851 - DNA, 25 bp, Homo sapien
gaacggtaacaagacctatgttcaa

SEQ ID NO: 458852 - DNA, 25 bp, Homo sapien
taactcagcttttcaactgggccaa

SEQ ID NO: 458853 - DNA, 25 bp, Homo sapien
gtgctccaggtatcactcttttgaa

SEQ ID NO: 458854 - DNA, 25 bp, Homo sapien
tgctccaggtatcactcttttgaaa

SEQ ID NO: 458855 - DNA, 25 bp, Homo sapien
catttgggtgttctccaatccaagg

SEQ ID NO: 458856 - DNA, 25 bp, Homo sapien
gctgtcctccttctgtcagagaaca

SEQ ID NO: 458857 - DNA, 25 bp, Homo sapien
ctccttctgtcagagaacagggaaa

SEQ ID NO: 458858 - DNA, 25 bp, Homo sapien
gtcctccttctgtcagagaacaggg

SEQ ID NO: 458859 - DNA, 25 bp, Homo sapien
cctccttctgtcagagaacagggaa

SEQ ID NO: 458860 - DNA, 25 bp, Homo sapien
ctctatcaaactcgactgaaggcaa

SEQ ID NO: 458861 - DNA, 25 bp, Homo sapien
cacccttccactctatcaaactcga

SEQ ID NO: 458862 - DNA, 25 bp, Homo sapien
cactctatcaaactcgactgaaggc

SEQ ID NO: 458863 - DNA, 25 bp, Homo sapien
cttccactctatcaaactcgactga

SEQ ID NO: 458864 - DNA, 25 bp, Homo sapien
tcgaagtgctcagaactgtccagga

SEQ ID NO: 458865 - DNA, 25 bp, Homo sapien
tgcccacctactgtgacctgaattg

SEQ ID NO: 458866 - DNA, 25 bp, Homo sapien
tgtctccagggtctgaagtcctttg

SEQ ID NO: 458867 - DNA, 25 bp, Homo sapien
tgaattggatgcacttcgaagtgct

SEQ ID NO: 458868 - DNA, 25 bp, Homo sapien
tcaggagagccctgagtactggatg

SEQ ID NO: 458869 - DNA, 25 bp, Homo sapien
ttcaggagagccctgagtactggat

SEQ ID NO: 458870 - DNA, 25 bp, Homo sapien
atcccagtaggctctggaaagtgga

SEQ ID NO: 458871 - DNA, 25 bp, Homo sapien
aagtggatatctaccagcccacagc

SEQ ID NO: 458872 - DNA, 25 bp, Homo sapien
gctgcttttcattgattgcctgtag

SEQ ID NO: 458873 - DNA, 25 bp, Homo sapien
ttgcctgtagatcatgttccctcct

SEQ ID NO: 458874 - DNA, 25 bp, Homo sapien
ctgtagatcatgttccctcctgcct

SEQ ID NO: 458875 - DNA, 25 bp, Homo sapien
tcctgcctggaggaaaacgagaaaa

SEQ ID NO: 458876 - DNA, 25 bp, Homo sapien
agcaggcacatcttacatgatgctg

SEQ ID NO: 458877 - DNA, 25 bp, Homo sapien
gggagcaggcacatcttacatgatg

SEQ ID NO: 458878 - DNA, 25 bp, Homo sapien
ggagcaggcacatcttacatgatgc

SEQ ID NO: 458879 - DNA, 25 bp, Homo sapien
gggggagcaggcacatcttacatga

SEQ ID NO: 458880 - DNA, 25 bp, Homo sapien
gtctagtgcacaaagctggaaattt

SEQ ID NO: 458881 - DNA, 25 bp, Homo sapien
tctagtgcacaaagctggaaatttc

SEQ ID NO: 458882 - DNA, 25 bp, Homo sapien
tcctaaatgttcacagatccttttc

SEQ ID NO: 458883 - DNA, 25 bp, Homo sapien
tttcctaaatgttcacagatccttt

SEQ ID NO: 458884 - DNA, 25 bp, Homo sapien
cagatccttttctttagaaatctac

SEQ ID NO: 458885 - DNA, 25 bp, Homo sapien
ctaaatgttcacagatccttttctt

SEQ ID NO: 458886 - DNA, 25 bp, Homo sapien
gatgagccataatgccaaagaagag

SEQ ID NO: 458887 - DNA, 25 bp, Homo sapien
cataatgccaaagaagagatgaagt

SEQ ID NO: 458888 - DNA, 25 bp, Homo sapien
gccataatgccaaagaagagatgaa

SEQ ID NO: 458889 - DNA, 25 bp, Homo sapien
gagccataatgccaaagaagagatg

SEQ ID NO: 458890 - DNA, 25 bp, Homo sapien
cctctgtatcaacagggaagcccag

SEQ ID NO: 458891 - DNA, 25 bp, Homo sapien
ggcaaggcatggtcggctatgtcca

SEQ ID NO: 458892 - DNA, 25 bp, Homo sapien
ggtgagcaagtctcaagatatccag

SEQ ID NO: 458893 - DNA, 25 bp, Homo sapien
tatgaagtccactggaggccacaca

SEQ ID NO: 458894 - DNA, 25 bp, Homo sapien
ggcataagagtaagccttttctccc

SEQ ID NO: 458895 - DNA, 25 bp, Homo sapien
aaactgttgtttgttgatcgaaggc

SEQ ID NO: 458896 - DNA, 25 bp, Homo sapien
agctggtccagtttgctcgtggtcc

SEQ ID NO: 458897 - DNA, 25 bp, Homo sapien
gcttccatgaaatgaggtcccacag

SEQ ID NO: 458898 - DNA, 25 bp, Homo sapien
gatgtttctttaaacgctgcagctg

SEQ ID NO: 458899 - DNA, 25 bp, Homo sapien
cgaacgcacgtgcagaagctgatgt

SEQ ID NO: 458900 - DNA, 25 bp, Homo sapien
tcgtagatcctgacgctgcttgtgc

SEQ ID NO: 458901 - DNA, 25 bp, Homo sapien
tggctgaaaagcacactgacaggcc

SEQ ID NO: 458902 - DNA, 25 bp, Homo sapien
tctccagtagaagcctgattgatac

SEQ ID NO: 458903 - DNA, 25 bp, Homo sapien
ctatcctttgtctggaactcggcag

SEQ ID NO: 458904 - DNA, 25 bp, Homo sapien
tgcatccttcgtgatgtctccagta

SEQ ID NO: 458905 - DNA, 25 bp, Homo sapien
gattgatacttctcgatgcctaaca

SEQ ID NO: 458906 - DNA, 25 bp, Homo sapien
cggcctctttaatttctagcaaaag

SEQ ID NO: 458907 - DNA, 25 bp, Homo sapien
gtctcccaagctcaaacgattttcc

SEQ ID NO: 458908 - DNA, 25 bp, Homo sapien
ctgtctcccaagctcaaacgatttt

SEQ ID NO: 458909 - DNA, 25 bp, Homo sapien
ctttaatttctagcaaaagcaaact

SEQ ID NO: 458910 - DNA, 25 bp, Homo sapien
caaaccacattgaggtgagtgcact

SEQ ID NO: 458911 - DNA, 25 bp, Homo sapien
catgaatactgagactgaagtgtgc

SEQ ID NO: 458912 - DNA, 25 bp, Homo sapien
tctacgtcaggtttggaagctatgg

SEQ ID NO: 458913 - DNA, 25 bp, Homo sapien
gatttaggctgacttgggctaccct

SEQ ID NO: 458914 - DNA, 25 bp, Homo sapien
gctggttgcctgagtctgcctgtga

SEQ ID NO: 458915 - DNA, 25 bp, Homo sapien
tctaacagacgacaacaaagccgat

SEQ ID NO: 458916 - DNA, 25 bp, Homo sapien
aattaagctagcaatggcagatccc

SEQ ID NO: 458917 - DNA, 25 bp, Homo sapien
gtggaacagcactacagaagacagc

SEQ ID NO: 458918 - DNA, 25 bp, Homo sapien
atcagtgtttatcccagtggctatg

SEQ ID NO: 458919 - DNA, 25 bp, Homo sapien
gatggccccaacaggaactctttcc

SEQ ID NO: 458920 - DNA, 25 bp, Homo sapien
cactcattagttgagcaacaactac

SEQ ID NO: 458921 - DNA, 25 bp, Homo sapien
tctagggagggcacacgtttcaaaa

SEQ ID NO: 458922 - DNA, 25 bp, Homo sapien
agcatgctttccttatcgacgaaga

SEQ ID NO: 458923 - DNA, 25 bp, Homo sapien
tgtggaggacctcgcaaggttcgca

SEQ ID NO: 458924 - DNA, 25 bp, Homo sapien
tgcgtttgacacaccaacataggct

SEQ ID NO: 458925 - DNA, 25 bp, Homo sapien
aactaagctgtctggaacccctggt

SEQ ID NO: 458926 - DNA, 25 bp, Homo sapien
caaatacagacggagcttttgctaa

SEQ ID NO: 458927 - DNA, 25 bp, Homo sapien
tcagcactattgactttgagggtag

SEQ ID NO: 458928 - DNA, 25 bp, Homo sapien
ctgcagatgcgagtaaagttgacac

SEQ ID NO: 458929 - DNA, 25 bp, Homo sapien
taatatttccatggaggtgacttgc

SEQ ID NO: 458930 - DNA, 25 bp, Homo sapien
agctctctgatatctgcggtgagag

SEQ ID NO: 458931 - DNA, 25 bp, Homo sapien
gagtgtctacgcgaagattacccat

SEQ ID NO: 458932 - DNA, 25 bp, Homo sapien
catgagcctgagatgttgctaagct

SEQ ID NO: 458933 - DNA, 25 bp, Homo sapien
gaggaaaccagcgaggagtctgcat

SEQ ID NO: 458934 - DNA, 25 bp, Homo sapien
tctgtccagtaaccaaaccagatga

SEQ ID NO: 458935 - DNA, 25 bp, Homo sapien
gatgagagatgaccactcacatcat

SEQ ID NO: 458936 - DNA, 25 bp, Homo sapien
tatatgcaaggatattaaggtcaaa

SEQ ID NO: 458937 - DNA, 25 bp, Homo sapien
tatgcaaggatattaaggtcaaagc

SEQ ID NO: 458938 - DNA, 25 bp, Homo sapien
ctagagaacaacttgcctttttcac

SEQ ID NO: 458939 - DNA, 25 bp, Homo sapien
acaacttgcctttttcacatgaccg

SEQ ID NO: 458940 - DNA, 25 bp, Homo sapien
aacaacttgcctttttcacatgacc

SEQ ID NO: 458941 - DNA, 25 bp, Homo sapien
gagaacaacttgcctttttcacatg

SEQ ID NO: 458942 - DNA, 25 bp, Homo sapien
tccagaggtgagagcgaccatggaa

SEQ ID NO: 458943 - DNA, 25 bp, Homo sapien
tgccaaaacaagaacggcctccaga

SEQ ID NO: 458944 - DNA, 25 bp, Homo sapien
catggaaaccaagtgaccgcagagg

SEQ ID NO: 458945 - DNA, 25 bp, Homo sapien
ggcacagcgtaggtccccaatcctg

SEQ ID NO: 458946 - DNA, 25 bp, Homo sapien
gccaatttgaaacgctctgcagccc

SEQ ID NO: 458947 - DNA, 25 bp, Homo sapien
cacaacatggagaagtacaggtcaa

SEQ ID NO: 458948 - DNA, 25 bp, Homo sapien
agagctctcaaatggccccatctct

SEQ ID NO: 458949 - DNA, 25 bp, Homo sapien
aaagttctgaggagaagcacaacat

SEQ ID NO: 458950 - DNA, 25 bp, Homo sapien
ccaggaagggtgtggtcatcccaac

SEQ ID NO: 458951 - DNA, 25 bp, Homo sapien
taaattcagccagtttggagacctg

SEQ ID NO: 458952 - DNA, 25 bp, Homo sapien
aatgtagagctctccaacttctggg

SEQ ID NO: 458953 - DNA, 25 bp, Homo sapien
tcagcagaatagattaagacctcag

SEQ ID NO: 458954 - DNA, 25 bp, Homo sapien
ggcttccatttgcattcaaccagtg

SEQ ID NO: 458955 - DNA, 25 bp, Homo sapien
tttgcattcaaccagtggagaatac

SEQ ID NO: 458956 - DNA, 25 bp, Homo sapien
ggccaatctatatgaaaactgtgtc

SEQ ID NO: 458957 - DNA, 25 bp, Homo sapien
ccctggaggccaatctatatgaaaa

SEQ ID NO: 458958 - DNA, 25 bp, Homo sapien
tagtttacaacagggatccccagcc

SEQ ID NO: 458959 - DNA, 25 bp, Homo sapien
cagtgggcgagcaagggaagcttca

SEQ ID NO: 458960 - DNA, 25 bp, Homo sapien
tgggccacgtggaccaatactggtt

SEQ ID NO: 458961 - DNA, 25 bp, Homo sapien
gcctcacaagaacgcaaaccctatt

SEQ ID NO: 458962 - DNA, 25 bp, Homo sapien
gataccattaccacactaccttgat

SEQ ID NO: 458963 - DNA, 25 bp, Homo sapien
gatcaattgttaagaagactatgct

SEQ ID NO: 458964 - DNA, 25 bp, Homo sapien
tctctgttgaagtgcctttaaacct

SEQ ID NO: 458965 - DNA, 25 bp, Homo sapien
ttataaaagtcaattcaccagatac

SEQ ID NO: 458966 - DNA, 25 bp, Homo sapien
cattggcaagaactagtcacattgt

SEQ ID NO: 458967 - DNA, 25 bp, Homo sapien
gcaagaactagtcacattgtgtccg

SEQ ID NO: 458968 - DNA, 25 bp, Homo sapien
agaactagtcacattgtgtccggaa

SEQ ID NO: 458969 - DNA, 25 bp, Homo sapien
ttgcattggcaagaactagtcacat

SEQ ID NO: 458970 - DNA, 25 bp, Homo sapien
tacctcatccatacccaaaggacaa

SEQ ID NO: 458971 - DNA, 25 bp, Homo sapien
gagagtacagcaaacaacctcctgg

SEQ ID NO: 458972 - DNA, 25 bp, Homo sapien
agacagctaactgtacaagggagag

SEQ ID NO: 458973 - DNA, 25 bp, Homo sapien
tgcattcaggcactagagacagcta

SEQ ID NO: 458974 - DNA, 25 bp, Homo sapien
ttctcatgtggcctctcttcccagc

SEQ ID NO: 458975 - DNA, 25 bp, Homo sapien
ctctcttcccagcatccctttcctt

SEQ ID NO: 458976 - DNA, 25 bp, Homo sapien
cttctcatgtggcctctcttcccag

SEQ ID NO: 458977 - DNA, 25 bp, Homo sapien
tcttcccagcatccctttccttcat

SEQ ID NO: 458978 - DNA, 25 bp, Homo sapien
ggggcatatactttcttccctgctg

SEQ ID NO: 458979 - DNA, 25 bp, Homo sapien
caagcaacacttagtttgctgcagc

SEQ ID NO: 458980 - DNA, 25 bp, Homo sapien
cacggtggggcatatactttcttcc

SEQ ID NO: 458981 - DNA, 25 bp, Homo sapien
tctttagcaagcaacacttagtttg

SEQ ID NO: 458982 - DNA, 25 bp, Homo sapien
tcaaccgagccacatgaaagctggc

SEQ ID NO: 458983 - DNA, 25 bp, Homo sapien
gaaagctggcagtcgtgcagccatg

SEQ ID NO: 458984 - DNA, 25 bp, Homo sapien
gattttgtcaaggtcaacagctgga

SEQ ID NO: 458985 - DNA, 25 bp, Homo sapien
tactcttgggttgaggtactcctgc

SEQ ID NO: 458986 - DNA, 25 bp, Homo sapien
gaatcggaatccttggattgggtgg

SEQ ID NO: 458987 - DNA, 25 bp, Homo sapien
aatcggaatccttggattgggtgga

SEQ ID NO: 458988 - DNA, 25 bp, Homo sapien
tgaaattgtccatgccagatctcaa

SEQ ID NO: 458989 - DNA, 25 bp, Homo sapien
caaaagtaatcgtttcaggctgaaa

SEQ ID NO: 458990 - DNA, 25 bp, Homo sapien
gaatccataccctgcttcggagtac

SEQ ID NO: 458991 - DNA, 25 bp, Homo sapien
ccctgtggaaacaggcttgcattga

SEQ ID NO: 458992 - DNA, 25 bp, Homo sapien
gatccacagctctacatgactgttt

SEQ ID NO: 458993 - DNA, 25 bp, Homo sapien
taaaaagcgatccttgcacacatgg

SEQ ID NO: 458994 - DNA, 25 bp, Homo sapien
acacatgggtgcaagcagtttccag

SEQ ID NO: 458995 - DNA, 25 bp, Homo sapien
tccagtggttcattaggtctatgaa

SEQ ID NO: 458996 - DNA, 25 bp, Homo sapien
tcacatttactcacacatatggaac

SEQ ID NO: 458997 - DNA, 25 bp, Homo sapien
gaacttgactcattttctaagcgag

SEQ ID NO: 458998 - DNA, 25 bp, Homo sapien
gtgacaaggaagtgggaatgttcac

SEQ ID NO: 458999 - DNA, 25 bp, Homo sapien
tttctaagcgagcaacacattgatc

SEQ ID NO: 459000 - DNA, 25 bp, Homo sapien
caagctattggtatcccatttgtga

SEQ ID NO: 459001 - DNA, 25 bp, Homo sapien
tcccatttgtgaaattcgattttct

SEQ ID NO: 459002 - DNA, 25 bp, Homo sapien
ggatttttccaagctattggtatcc

SEQ ID NO: 459003 - DNA, 25 bp, Homo sapien
ttttccaagctattggtatcccatt

SEQ ID NO: 459004 - DNA, 25 bp, Homo sapien
gaacctggctacaggctcacactgc

SEQ ID NO: 459005 - DNA, 25 bp, Homo sapien
agagtagagtaaatatgtcattcac

SEQ ID NO: 459006 - DNA, 25 bp, Homo sapien
aacctcaagcgaaccttggaacctg

SEQ ID NO: 459007 - DNA, 25 bp, Homo sapien
catttcatgggaactaaggattggg

SEQ ID NO: 459008 - DNA, 25 bp, Homo sapien
tatcagaagcagtggttgaaatgcc

SEQ ID NO: 459009 - DNA, 25 bp, Homo sapien
gaagcagtggttgaaatgcccagaa

SEQ ID NO: 459010 - DNA, 25 bp, Homo sapien
gatgttatcagaagcagtggttgaa

SEQ ID NO: 459011 - DNA, 25 bp, Homo sapien
aaagctggaaacataatcctccttg

SEQ ID NO: 459012 - DNA, 25 bp, Homo sapien
tctgtgatgactacatagggatccc

SEQ ID NO: 459013 - DNA, 25 bp, Homo sapien
taagtcgctcactccatcttagagg

SEQ ID NO: 459014 - DNA, 25 bp, Homo sapien
tcctatcaatagacaggcatctgtg

SEQ ID NO: 459015 - DNA, 25 bp, Homo sapien
tttcaagccaccagaaaaaccaggc

SEQ ID NO: 459016 - DNA, 25 bp, Homo sapien
actctggtgccagttcctttcctcc

SEQ ID NO: 459017 - DNA, 25 bp, Homo sapien
ttctgtcccagtgtcagttccacca

SEQ ID NO: 459018 - DNA, 25 bp, Homo sapien
agcctccactctggtgccagttcct

SEQ ID NO: 459019 - DNA, 25 bp, Homo sapien
ccaattcagtccagattaaacccca

SEQ ID NO: 459020 - DNA, 25 bp, Homo sapien
gagatgcccataattagcagcttgg

SEQ ID NO: 459021 - DNA, 25 bp, Homo sapien
taagtacatgcatacccaaaccaca

SEQ ID NO: 459022 - DNA, 25 bp, Homo sapien
tcctgctagatgtcacaaaagggtc

SEQ ID NO: 459023 - DNA, 25 bp, Homo sapien
gcagcttgggtacagtcagatataa

SEQ ID NO: 459024 - DNA, 25 bp, Homo sapien
ccagagagccaagtgcatgtaccaa

SEQ ID NO: 459025 - DNA, 25 bp, Homo sapien
ttaccctgggacatagccaacagcc

SEQ ID NO: 459026 - DNA, 25 bp, Homo sapien
gacatgcacagtatttccccaaagg

SEQ ID NO: 459027 - DNA, 25 bp, Homo sapien
ggttagccaacaagcgcagatatct

SEQ ID NO: 459028 - DNA, 25 bp, Homo sapien
taaaggctgctgccctcaggaatga

SEQ ID NO: 459029 - DNA, 25 bp, Homo sapien
caaggcttcacacactctcttataa

SEQ ID NO: 459030 - DNA, 25 bp, Homo sapien
atcagaccccttagccagtggtggt

SEQ ID NO: 459031 - DNA, 25 bp, Homo sapien
ctctccatgatatccatcagacccc

SEQ ID NO: 459032 - DNA, 25 bp, Homo sapien
ggctctccatgatatccatcagacc

SEQ ID NO: 459033 - DNA, 25 bp, Homo sapien
tgggggctctccatgatatccatca

SEQ ID NO: 459034 - DNA, 25 bp, Homo sapien
gaagttcatctatcaggacctttgg

SEQ ID NO: 459035 - DNA, 25 bp, Homo sapien
tggggctgtttagagatacaattgc

SEQ ID NO: 459036 - DNA, 25 bp, Homo sapien
ggacctttggatcaactccaacaaa

SEQ ID NO: 459037 - DNA, 25 bp, Homo sapien
acaattcgaagttcatctatcagga

SEQ ID NO: 459038 - DNA, 25 bp, Homo sapien
agtaaagcccactgtgaaaagccca

SEQ ID NO: 459039 - DNA, 25 bp, Homo sapien
cacttttatttgatatagccagagc

SEQ ID NO: 459040 - DNA, 25 bp, Homo sapien
gctcactcttgacacttttatttga

SEQ ID NO: 459041 - DNA, 25 bp, Homo sapien
cactgctatcataatcaatggagaa

SEQ ID NO: 459042 - DNA, 25 bp, Homo sapien
aatcaaggtgttacatcatattaac

SEQ ID NO: 459043 - DNA, 25 bp, Homo sapien
gaccaaatcaacatcattcgtaatg

SEQ ID NO: 459044 - DNA, 25 bp, Homo sapien
caacatcattcgtaatgaaaactca

SEQ ID NO: 459045 - DNA, 25 bp, Homo sapien
gcatttgaccaaatcaacatcattc

SEQ ID NO: 459046 - DNA, 25 bp, Homo sapien
tctttgtctttatctctggtatttg

SEQ ID NO: 459047 - DNA, 25 bp, Homo sapien
tctccactttcagcttagagtttgc

SEQ ID NO: 459048 - DNA, 25 bp, Homo sapien
ctttgtctttatctctggtatttga

SEQ ID NO: 459049 - DNA, 25 bp, Homo sapien
agcttagagtttgcaaaaaagcctt

SEQ ID NO: 459050 - DNA, 25 bp, Homo sapien
gtctgccacggagttggcagacata

SEQ ID NO: 459051 - DNA, 25 bp, Homo sapien
gtgagtctgtctgccacggagttgg

SEQ ID NO: 459052 - DNA, 25 bp, Homo sapien
tctgccacggagttggcagacatac

SEQ ID NO: 459053 - DNA, 25 bp, Homo sapien
gtctgtctgccacggagttggcaga

SEQ ID NO: 459054 - DNA, 25 bp, Homo sapien
caagatgtctaagtccaggacttca

SEQ ID NO: 459055 - DNA, 25 bp, Homo sapien
tgttcctccaagatgtctaagtcca

SEQ ID NO: 459056 - DNA, 25 bp, Homo sapien
cctccaagatgtctaagtccaggac

SEQ ID NO: 459057 - DNA, 25 bp, Homo sapien
tccaagatgtctaagtccaggactt

SEQ ID NO: 459058 - DNA, 25 bp, Homo sapien
cctaaagtgagaatgtacgtccctg

SEQ ID NO: 459059 - DNA, 25 bp, Homo sapien
taactacagcaaacctatgaagtgg

SEQ ID NO: 459060 - DNA, 25 bp, Homo sapien
tcaaaaccctatgccaaggacctgg

SEQ ID NO: 459061 - DNA, 25 bp, Homo sapien
gcatctgtgggcataagcatccatt

SEQ ID NO: 459062 - DNA, 25 bp, Homo sapien
actctatgccgggtgcaggaaacac

SEQ ID NO: 459063 - DNA, 25 bp, Homo sapien
gctaactgcaagcttgaacacccgg

SEQ ID NO: 459064 - DNA, 25 bp, Homo sapien
tgcaagcttgaacacccgggctcaa

SEQ ID NO: 459065 - DNA, 25 bp, Homo sapien
ctctatgccgggtgcaggaaacaca

SEQ ID NO: 459066 - DNA, 25 bp, Homo sapien
ggaaattcttatatcagctcagctg

SEQ ID NO: 459067 - DNA, 25 bp, Homo sapien
gtcacagggcacattaatagcatac

SEQ ID NO: 459068 - DNA, 25 bp, Homo sapien
cataaagccaggaaaataggactgg

SEQ ID NO: 459069 - DNA, 25 bp, Homo sapien
gaaaataggactggggcatggaccc

SEQ ID NO: 459070 - DNA, 25 bp, Homo sapien
aagacacactatcctcatataggta

SEQ ID NO: 459071 - DNA, 25 bp, Homo sapien
taatccacacacttgccttccaaaa

SEQ ID NO: 459072 - DNA, 25 bp, Homo sapien
tctcatataaactaggtatcctcat

SEQ ID NO: 459073 - DNA, 25 bp, Homo sapien
gctgatgaaaagatccttaatccac

SEQ ID NO: 459074 - DNA, 25 bp, Homo sapien
ttgtatgtattacgtacccacacac

SEQ ID NO: 459075 - DNA, 25 bp, Homo sapien
aaaaatcattgccttggccggcgcg

SEQ ID NO: 459076 - DNA, 25 bp, Homo sapien
gatgctgaacctagtttattaaaag

SEQ ID NO: 459077 - DNA, 25 bp, Homo sapien
tatatttgtatgtattacgtaccca

SEQ ID NO: 459078 - DNA, 25 bp, Homo sapien
ctttcttcctggactcagacgccac

SEQ ID NO: 459079 - DNA, 25 bp, Homo sapien
tcctggactcagacgccacctccat

SEQ ID NO: 459080 - DNA, 25 bp, Homo sapien
ctcttgtttcataaacgtcctcttt

SEQ ID NO: 459081 - DNA, 25 bp, Homo sapien
cttgtttcataaacgtcctctttct

SEQ ID NO: 459082 - DNA, 25 bp, Homo sapien
tatggtgctagaggcattgcatagt

SEQ ID NO: 459083 - DNA, 25 bp, Homo sapien
ttatggtgctagaggcattgcatag

SEQ ID NO: 459084 - DNA, 25 bp, Homo sapien
tctgatctgcttacagtcgtgagac

SEQ ID NO: 459085 - DNA, 25 bp, Homo sapien
tggtgctagaggcattgcatagtca

SEQ ID NO: 459086 - DNA, 25 bp, Homo sapien
tttccaggtagactcctcagaaaac

SEQ ID NO: 459087 - DNA, 25 bp, Homo sapien
cattagcatagagtcggcattctga

SEQ ID NO: 459088 - DNA, 25 bp, Homo sapien
cggcattctgagaagaactactata

SEQ ID NO: 459089 - DNA, 25 bp, Homo sapien
gcatagagtcggcattctgagaaga

SEQ ID NO: 459090 - DNA, 25 bp, Homo sapien
tcctgcccaggaaatgcaatatcgt

SEQ ID NO: 459091 - DNA, 25 bp, Homo sapien
ccatcttgctaatccccaaaggagg

SEQ ID NO: 459092 - DNA, 25 bp, Homo sapien
cacaaggcatggtagtcgtttcagt

SEQ ID NO: 459093 - DNA, 25 bp, Homo sapien
taccacatgggtacacatggccaag

SEQ ID NO: 459094 - DNA, 25 bp, Homo sapien
tatttgattagttatcatgtccttc

SEQ ID NO: 459095 - DNA, 25 bp, Homo sapien
tttgattagttatcatgtccttcca

SEQ ID NO: 459096 - DNA, 25 bp, Homo sapien
atttgattagttatcatgtccttcc

SEQ ID NO: 459097 - DNA, 25 bp, Homo sapien
ttatttgattagttatcatgtcctt

SEQ ID NO: 459098 - DNA, 25 bp, Homo sapien
gaaagatctcatatgaacctacatg

SEQ ID NO: 459099 - DNA, 25 bp, Homo sapien
gagaggatccccgaaatgatgagac

SEQ ID NO: 459100 - DNA, 25 bp, Homo sapien
gagacttagagcttacatagggcag

SEQ ID NO: 459101 - DNA, 25 bp, Homo sapien
catgacttctaccacgatacagcag

SEQ ID NO: 459102 - DNA, 25 bp, Homo sapien
tggagtctcgctctgttgctggaca

SEQ ID NO: 459103 - DNA, 25 bp, Homo sapien
gagtctcgctctgttgctggacagg

SEQ ID NO: 459104 - DNA, 25 bp, Homo sapien
gtctcgctctgttgctggacaggct

SEQ ID NO: 459105 - DNA, 25 bp, Homo sapien
tctcgctctgttgctggacaggctg

SEQ ID NO: 459106 - DNA, 25 bp, Homo sapien
atatatggtaggatgccaaattata

SEQ ID NO: 459107 - DNA, 25 bp, Homo sapien
tatatatatggtaggatgccaaatt

SEQ ID NO: 459108 - DNA, 25 bp, Homo sapien
taaaagagtagatgttaaattatat

SEQ ID NO: 459109 - DNA, 25 bp, Homo sapien
aaaagagtagatgttaaattatata

SEQ ID NO: 459110 - DNA, 25 bp, Homo sapien
tatgcgctggaacccaaatgcactc

SEQ ID NO: 459111 - DNA, 25 bp, Homo sapien
tacaaaagaggaacttccaagcact

SEQ ID NO: 459112 - DNA, 25 bp, Homo sapien
tatgaacagtccataacccttcggc

SEQ ID NO: 459113 - DNA, 25 bp, Homo sapien
cagctgaagactggctccctatgtc

SEQ ID NO: 459114 - DNA, 25 bp, Homo sapien
tggctgcaacaagtccaggagcggc

SEQ ID NO: 459115 - DNA, 25 bp, Homo sapien
taactccaagtttagctgttttgga

SEQ ID NO: 459116 - DNA, 25 bp, Homo sapien
caggagcggccaaattgcagagaga

SEQ ID NO: 459117 - DNA, 25 bp, Homo sapien
gaatgtttcaataggcccagctgcc

SEQ ID NO: 459118 - DNA, 25 bp, Homo sapien
ccttcacaatgacgtgctgacatca

SEQ ID NO: 459119 - DNA, 25 bp, Homo sapien
ctccttcacaatgacgtgctgacat

SEQ ID NO: 459120 - DNA, 25 bp, Homo sapien
tccttcacaatgacgtgctgacatc

SEQ ID NO: 459121 - DNA, 25 bp, Homo sapien
cttcacaatgacgtgctgacatcat

SEQ ID NO: 459122 - DNA, 25 bp, Homo sapien
actgagtcagagaggatgcaacagc

SEQ ID NO: 459123 - DNA, 25 bp, Homo sapien
tttgggatccgacaataaaagtcat

SEQ ID NO: 459124 - DNA, 25 bp, Homo sapien
taaaagtcataaagtgagtcaactg

SEQ ID NO: 459125 - DNA, 25 bp, Homo sapien
gagtttggtttccaacacgctggga

SEQ ID NO: 459126 - DNA, 25 bp, Homo sapien
taacctgctcgtatgtgtctgctag

SEQ ID NO: 459127 - DNA, 25 bp, Homo sapien
agctgtagctttctgttgcccgacc

SEQ ID NO: 459128 - DNA, 25 bp, Homo sapien
gaccctgttattgctggctcctgct

SEQ ID NO: 459129 - DNA, 25 bp, Homo sapien
gctagtaccttgctggtaaactcca

SEQ ID NO: 459130 - DNA, 25 bp, Homo sapien
aggagggaacacatcaggtgagtgt

SEQ ID NO: 459131 - DNA, 25 bp, Homo sapien
gaggagggaacacatcaggtgagtg

SEQ ID NO: 459132 - DNA, 25 bp, Homo sapien
ctggccacgactgaggagggaacac

SEQ ID NO: 459133 - DNA, 25 bp, Homo sapien
tttgcttcattgtgggttccttctt

SEQ ID NO: 459134 - DNA, 25 bp, Homo sapien
ccagcttccagtttaggacaggtcc

SEQ ID NO: 459135 - DNA, 25 bp, Homo sapien
gtacacatgtggtgaacaccaggcg

SEQ ID NO: 459136 - DNA, 25 bp, Homo sapien
agagttaaacgcaacttttgcttca

SEQ ID NO: 459137 - DNA, 25 bp, Homo sapien
tccagtgatgcctcttaagcatccc

SEQ ID NO: 459138 - DNA, 25 bp, Homo sapien
accattctctgatcgtttcccacat

SEQ ID NO: 459139 - DNA, 25 bp, Homo sapien
tctctgatcgtttcccacatgcaaa

SEQ ID NO: 459140 - DNA, 25 bp, Homo sapien
aggctctggtctgtggtaccgtagg

SEQ ID NO: 459141 - DNA, 25 bp, Homo sapien
cacttggaaggcatagcgggacatc

SEQ ID NO: 459142 - DNA, 25 bp, Homo sapien
ctcacagagtccaccggcagagatg

SEQ ID NO: 459143 - DNA, 25 bp, Homo sapien
gaactggttgcatgacacttggaag

SEQ ID NO: 459144 - DNA, 25 bp, Homo sapien
tcttatcccggagacatgcaaggtt

SEQ ID NO: 459145 - DNA, 25 bp, Homo sapien
tgtttttcaagcttccaatcggagt

SEQ ID NO: 459146 - DNA, 25 bp, Homo sapien
caatcggagtcaaagctggccagta

SEQ ID NO: 459147 - DNA, 25 bp, Homo sapien
tctgtcactggatattctgcatagc

SEQ ID NO: 459148 - DNA, 25 bp, Homo sapien
cagtagaattcacccttttcaggca

SEQ ID NO: 459149 - DNA, 25 bp, Homo sapien
tatgccatgacgtggataaatcttg

SEQ ID NO: 459150 - DNA, 25 bp, Homo sapien
taggatagctacaataaaaggcaac

SEQ ID NO: 459151 - DNA, 25 bp, Homo sapien
gaaagaccagaactgtcatacaatg

SEQ ID NO: 459152 - DNA, 25 bp, Homo sapien
taggcaaatccattgtagaggcaga

SEQ ID NO: 459153 - DNA, 25 bp, Homo sapien
gctagagcggagtggcacgatcttg

SEQ ID NO: 459154 - DNA, 25 bp, Homo sapien
catgagccaccgtacctggccatca

SEQ ID NO: 459155 - DNA, 25 bp, Homo sapien
gagccaccgtacctggccatcattg

SEQ ID NO: 459156 - DNA, 25 bp, Homo sapien
acgatcttggttcactgcaacctcc

SEQ ID NO: 459157 - DNA, 25 bp, Homo sapien
ccacaaaaggtcccagtgtgtgatg

SEQ ID NO: 459158 - DNA, 25 bp, Homo sapien
cccacaaaaggtcccagtgtgtgat

SEQ ID NO: 459159 - DNA, 25 bp, Homo sapien
ccccacaaaaggtcccagtgtgtga

SEQ ID NO: 459160 - DNA, 25 bp, Homo sapien
cacaaaaggtcccagtgtgtgatgt

SEQ ID NO: 459161 - DNA, 25 bp, Homo sapien
gaaaactcttgatggtatgctgtca

SEQ ID NO: 459162 - DNA, 25 bp, Homo sapien
gatttcctcaaaggcaactactgag

SEQ ID NO: 459163 - DNA, 25 bp, Homo sapien
ccacggacaatcactaagagaagag

SEQ ID NO: 459164 - DNA, 25 bp, Homo sapien
tttagctgccaataagtagacttgc

SEQ ID NO: 459165 - DNA, 25 bp, Homo sapien
cactatggtgtgattcaaggtttac

SEQ ID NO: 459166 - DNA, 25 bp, Homo sapien
tacacaattccttagcatcacacag

SEQ ID NO: 459167 - DNA, 25 bp, Homo sapien
gccatgtatggtctctttgcataag

SEQ ID NO: 459168 - DNA, 25 bp, Homo sapien
catttaagcgaatactcacagcagg

SEQ ID NO: 459169 - DNA, 25 bp, Homo sapien
gggcaccttgttcatggataagtaa

SEQ ID NO: 459170 - DNA, 25 bp, Homo sapien
tgggaagctcagcttattatgcagt

SEQ ID NO: 459171 - DNA, 25 bp, Homo sapien
agcttattatgcagtatctctggca

SEQ ID NO: 459172 - DNA, 25 bp, Homo sapien
tacatgttccaacgggttaggggca

SEQ ID NO: 459173 - DNA, 25 bp, Homo sapien
ctttggcagttatttatggccctgg

SEQ ID NO: 459174 - DNA, 25 bp, Homo sapien
gatgagatttcctgagactataaaa

SEQ ID NO: 459175 - DNA, 25 bp, Homo sapien
tttggcagttatttatggccctgga

SEQ ID NO: 459176 - DNA, 25 bp, Homo sapien
ctatgatgagatttcctgagactat

SEQ ID NO: 459177 - DNA, 25 bp, Homo sapien
gacctgtgggcaatttaagtggacc

SEQ ID NO: 459178 - DNA, 25 bp, Homo sapien
tgacccagtcaaagcccacattgag

SEQ ID NO: 459179 - DNA, 25 bp, Homo sapien
gaagtagaatccaccagatcaacag

SEQ ID NO: 459180 - DNA, 25 bp, Homo sapien
gaacagcggaccaggatttgagaat

SEQ ID NO: 459181 - DNA, 25 bp, Homo sapien
tgtgtagcgtattacatctctgcat

SEQ ID NO: 459182 - DNA, 25 bp, Homo sapien
tgcataatttccaacaatagaggta

SEQ ID NO: 459183 - DNA, 25 bp, Homo sapien
ccaacaatagaggtaaagatgttta

SEQ ID NO: 459184 - DNA, 25 bp, Homo sapien
aaattatcggcactatgttttacaa

SEQ ID NO: 459185 - DNA, 25 bp, Homo sapien
tccctcctttgaatgacaggcctac

SEQ ID NO: 459186 - DNA, 25 bp, Homo sapien
ggataatagcttccctcctttgaat

SEQ ID NO: 459187 - DNA, 25 bp, Homo sapien
tgaatgacaggcctacttccggcag

SEQ ID NO: 459188 - DNA, 25 bp, Homo sapien
tgacaggcctacttccggcaggctc

SEQ ID NO: 459189 - DNA, 25 bp, Homo sapien
agtagctcaggaatggacaaccaat

SEQ ID NO: 459190 - DNA, 25 bp, Homo sapien
gagcctgcagagcaaactcagtttt

SEQ ID NO: 459191 - DNA, 25 bp, Homo sapien
gaggcattattgcagttcaaccaga

SEQ ID NO: 459192 - DNA, 25 bp, Homo sapien
taaatccccattgacccatgagtag

SEQ ID NO: 459193 - DNA, 25 bp, Homo sapien
tgtggaacacagaacaagcagtggg

SEQ ID NO: 459194 - DNA, 25 bp, Homo sapien
cagtgggttgacaagtcctaagctg

SEQ ID NO: 459195 - DNA, 25 bp, Homo sapien
tgttgtgttgctcatcctagccttc

SEQ ID NO: 459196 - DNA, 25 bp, Homo sapien
ccatgagggaagtatgagtaagtcc

SEQ ID NO: 459197 - DNA, 25 bp, Homo sapien
ctgaattacagcctcttggtgtgag

SEQ ID NO: 459198 - DNA, 25 bp, Homo sapien
gagtggggtctgtctctgaattaca

SEQ ID NO: 459199 - DNA, 25 bp, Homo sapien
tgaattacagcctcttggtgtgaga

SEQ ID NO: 459200 - DNA, 25 bp, Homo sapien
attacagcctcttggtgtgagagca

SEQ ID NO: 459201 - DNA, 25 bp, Homo sapien
aaataggtccgcaggtgatgtgtcc

SEQ ID NO: 459202 - DNA, 25 bp, Homo sapien
cagagcagcgacaaacacactgagg

SEQ ID NO: 459203 - DNA, 25 bp, Homo sapien
ttcttgtgttggcatccccagagag

SEQ ID NO: 459204 - DNA, 25 bp, Homo sapien
cttgcggcaagggagacatcccact

SEQ ID NO: 459205 - DNA, 25 bp, Homo sapien
gtgggtaaccagcagcgagcagact

SEQ ID NO: 459206 - DNA, 25 bp, Homo sapien
taactcgtggtgttgtgaattggtg

SEQ ID NO: 459207 - DNA, 25 bp, Homo sapien
cagcagcgagcagactgaaactcac

SEQ ID NO: 459208 - DNA, 25 bp, Homo sapien
ctaactcgtggtgttgtgaattggt

SEQ ID NO: 459209 - DNA, 25 bp, Homo sapien
ctctgaggagacctgttgtttgaaa

SEQ ID NO: 459210 - DNA, 25 bp, Homo sapien
cgaactgagctaacagagcttagat

SEQ ID NO: 459211 - DNA, 25 bp, Homo sapien
ccactggcctagaagatatccatgt

SEQ ID NO: 459212 - DNA, 25 bp, Homo sapien
tttcagcttcaaaggttgagattcc

SEQ ID NO: 459213 - DNA, 25 bp, Homo sapien
gttccacgtagctagcgaagcctca

SEQ ID NO: 459214 - DNA, 25 bp, Homo sapien
acgtagctagcgaagcctcacaatc

SEQ ID NO: 459215 - DNA, 25 bp, Homo sapien
cacgtagctagcgaagcctcacaat

SEQ ID NO: 459216 - DNA, 25 bp, Homo sapien
tccacgtagctagcgaagcctcaca

SEQ ID NO: 459217 - DNA, 25 bp, Homo sapien
agggagtcaacgcattaagtttggc

SEQ ID NO: 459218 - DNA, 25 bp, Homo sapien
gggagtcaacgcattaagtttggca

SEQ ID NO: 459219 - DNA, 25 bp, Homo sapien
ggagtcaacgcattaagtttggcag

SEQ ID NO: 459220 - DNA, 25 bp, Homo sapien
gatctctcaatagccagtgcagtta

SEQ ID NO: 459221 - DNA, 25 bp, Homo sapien
tatggatgatcctttgcatccggcc

SEQ ID NO: 459222 - DNA, 25 bp, Homo sapien
cctcactgagtagctcttgctggaa

SEQ ID NO: 459223 - DNA, 25 bp, Homo sapien
tatacagggagattccttgacagga

SEQ ID NO: 459224 - DNA, 25 bp, Homo sapien
atagaccaggcagccgccaaagaag

SEQ ID NO: 459225 - DNA, 25 bp, Homo sapien
ccgccaaagaagtgtcgatggaaca

SEQ ID NO: 459226 - DNA, 25 bp, Homo sapien
tgtcgatggaacacttttctcagaa

SEQ ID NO: 459227 - DNA, 25 bp, Homo sapien
ttttgttgacaaatagaccaggcag

SEQ ID NO: 459228 - DNA, 25 bp, Homo sapien
cgtaagtgcaataaacttaaggtca

SEQ ID NO: 459229 - DNA, 25 bp, Homo sapien
taaggtcatagagcacagctcttaa

SEQ ID NO: 459230 - DNA, 25 bp, Homo sapien
atgacatttctagaatcgtaagtgc

SEQ ID NO: 459231 - DNA, 25 bp, Homo sapien
tctagaatcgtaagtgcaataaact

SEQ ID NO: 459232 - DNA, 25 bp, Homo sapien
taccagttgcatcatagtcctccat

SEQ ID NO: 459233 - DNA, 25 bp, Homo sapien
acacaaagttcttcagtgcaaagcc

SEQ ID NO: 459234 - DNA, 25 bp, Homo sapien
aagccagcatgcgagttcagcttcc

SEQ ID NO: 459235 - DNA, 25 bp, Homo sapien
gccagcatgcgagttcagcttccat

SEQ ID NO: 459236 - DNA, 25 bp, Homo sapien
ccagcatgcgagttcagcttccatt

SEQ ID NO: 459237 - DNA, 25 bp, Homo sapien
aattgtaagatcatggatagaaccc

SEQ ID NO: 459238 - DNA, 25 bp, Homo sapien
taggaattgtaagatcatggataga

SEQ ID NO: 459239 - DNA, 25 bp, Homo sapien
ctgtttaggaattgtaagatcatgg

SEQ ID NO: 459240 - DNA, 25 bp, Homo sapien
gtttaggaattgtaagatcatggat

SEQ ID NO: 459241 - DNA, 25 bp, Homo sapien
cgtatgcaggcttatgacgccagga

SEQ ID NO: 459242 - DNA, 25 bp, Homo sapien
gcttatgacgccaggaacaaatacg

SEQ ID NO: 459243 - DNA, 25 bp, Homo sapien
tgaatgcctaccgtatgcaggctta

SEQ ID NO: 459244 - DNA, 25 bp, Homo sapien
tgacgccaggaacaaatacgtccat

SEQ ID NO: 459245 - DNA, 25 bp, Homo sapien
cttcctctgttagaccaatcagtac

SEQ ID NO: 459246 - DNA, 25 bp, Homo sapien
gatttcatagcctagtttattttat

SEQ ID NO: 459247 - DNA, 25 bp, Homo sapien
tattttataatcaagcccagcttcc

SEQ ID NO: 459248 - DNA, 25 bp, Homo sapien
tataatcaagcccagcttcctctgt

SEQ ID NO: 459249 - DNA, 25 bp, Homo sapien
cccgtgttgctgcctttaatgagct

SEQ ID NO: 459250 - DNA, 25 bp, Homo sapien
ccgtgttgctgcctttaatgagctt

SEQ ID NO: 459251 - DNA, 25 bp, Homo sapien
agggaggcaggtgggagacaacttc

SEQ ID NO: 459252 - DNA, 25 bp, Homo sapien
ggcaggtgggagacaacttccttac

SEQ ID NO: 459253 - DNA, 25 bp, Homo sapien
ggaggcaggtgggagacaacttcct

SEQ ID NO: 459254 - DNA, 25 bp, Homo sapien
gaggcaggtgggagacaacttcctt

SEQ ID NO: 459255 - DNA, 25 bp, Homo sapien
cttgagtttccaacagagcatggga

SEQ ID NO: 459256 - DNA, 25 bp, Homo sapien
ggtcgttttcacatctgcggaatga

SEQ ID NO: 459257 - DNA, 25 bp, Homo sapien
gcagcagttctgtaacacagccgac

SEQ ID NO: 459258 - DNA, 25 bp, Homo sapien
agccgacagtcttcatgagggtagg

SEQ ID NO: 459259 - DNA, 25 bp, Homo sapien
tcagtggctcaccagtaagcaggac

SEQ ID NO: 459260 - DNA, 25 bp, Homo sapien
gggtcctaggtcagctctccaagta

SEQ ID NO: 459261 - DNA, 25 bp, Homo sapien
tcagaaaatagccacgttgcccaag

SEQ ID NO: 459262 - DNA, 25 bp, Homo sapien
gaattccgccaacaaggcgcagagg

SEQ ID NO: 459263 - DNA, 25 bp, Homo sapien
ggttccttgtgtctcctgttggttc

SEQ ID NO: 459264 - DNA, 25 bp, Homo sapien
ggcaacatcccctttgctgcgccat

SEQ ID NO: 459265 - DNA, 25 bp, Homo sapien
ccttttgagtggagccccattctcg

SEQ ID NO: 459266 - DNA, 25 bp, Homo sapien
gatagcccagttccgttccctgagt

SEQ ID NO: 459267 - DNA, 25 bp, Homo sapien
cattaagcctggtgtactagatctc

SEQ ID NO: 459268 - DNA, 25 bp, Homo sapien
ggtttaaattaaatgcgtcatgtgt

SEQ ID NO: 459269 - DNA, 25 bp, Homo sapien
cctagaggcaattattgtcaacagt

SEQ ID NO: 459270 - DNA, 25 bp, Homo sapien
actctcatgtctctacctagaggca

SEQ ID NO: 459271 - DNA, 25 bp, Homo sapien
caaatggttccactgtctcaaagcc

SEQ ID NO: 459272 - DNA, 25 bp, Homo sapien
tcacaggacttcacgttcaatcaat

SEQ ID NO: 459273 - DNA, 25 bp, Homo sapien
gttagtagattccttctccagccaa

SEQ ID NO: 459274 - DNA, 25 bp, Homo sapien
cagaaaacatgcaatcccgtgaaga

SEQ ID NO: 459275 - DNA, 25 bp, Homo sapien
caagcacgactcaaatccaagatga

SEQ ID NO: 459276 - DNA, 25 bp, Homo sapien
ttcacaagcacgactcaaatccaag

SEQ ID NO: 459277 - DNA, 25 bp, Homo sapien
tggttgttgtaacacatgaaaattc

SEQ ID NO: 459278 - DNA, 25 bp, Homo sapien
tgaaaattcacaagcacgactcaaa

SEQ ID NO: 459279 - DNA, 25 bp, Homo sapien
cctaaaggatgtttcagcctgatct

SEQ ID NO: 459280 - DNA, 25 bp, Homo sapien
cagtttagtggtgctctcacataca

SEQ ID NO: 459281 - DNA, 25 bp, Homo sapien
caggaggcaaagcactagatctggc

SEQ ID NO: 459282 - DNA, 25 bp, Homo sapien
aaaactgtctaatagtctgggatgg

SEQ ID NO: 459283 - DNA, 25 bp, Homo sapien
ttaatgctagatgtattagtcaggg

SEQ ID NO: 459284 - DNA, 25 bp, Homo sapien
tattatttcccagtttatcacttgc

SEQ ID NO: 459285 - DNA, 25 bp, Homo sapien
aggtgaaatcccatgataggctgtc

SEQ ID NO: 459286 - DNA, 25 bp, Homo sapien
ggtctaagtgcgagagtccaaaagc

SEQ ID NO: 459287 - DNA, 25 bp, Homo sapien
tcataatgatacagaaacacaggag

SEQ ID NO: 459288 - DNA, 25 bp, Homo sapien
tgcctaacccactctgcaatagcgt

SEQ ID NO: 459289 - DNA, 25 bp, Homo sapien
gtttatggctatcttagtgttccca

SEQ ID NO: 459290 - DNA, 25 bp, Homo sapien
ctttacaccaaagcatgtcacatgg

SEQ ID NO: 459291 - DNA, 25 bp, Homo sapien
tgcaaactgctactattgggagaaa

SEQ ID NO: 459292 - DNA, 25 bp, Homo sapien
cctggttgccaggttgtactatagt

SEQ ID NO: 459293 - DNA, 25 bp, Homo sapien
ccatagcctctaaagttgttttgca

SEQ ID NO: 459294 - DNA, 25 bp, Homo sapien
tctgtgaaggtagccaagcattttg

SEQ ID NO: 459295 - DNA, 25 bp, Homo sapien
tcttcctgctaggtttcacttcttc

SEQ ID NO: 459296 - DNA, 25 bp, Homo sapien
cacttcttcagtaagaattattaga

SEQ ID NO: 459297 - DNA, 25 bp, Homo sapien
atacaattcttcctgctaggtttca

SEQ ID NO: 459298 - DNA, 25 bp, Homo sapien
aattcttcctgctaggtttcacttc

SEQ ID NO: 459299 - DNA, 25 bp, Homo sapien
cccagaaagattcataggtggaagc

SEQ ID NO: 459300 - DNA, 25 bp, Homo sapien
ggtggaagccctaagctccaatgtg

SEQ ID NO: 459301 - DNA, 25 bp, Homo sapien
caatggtagtacatgctcagtgaat

SEQ ID NO: 459302 - DNA, 25 bp, Homo sapien
tagactgaaccatactgcaccccag

SEQ ID NO: 459303 - DNA, 25 bp, Homo sapien
gctgggcacctctagcagatatatg

SEQ ID NO: 459304 - DNA, 25 bp, Homo sapien
gaaacatgaagtctccaggctcagt

SEQ ID NO: 459305 - DNA, 25 bp, Homo sapien
gaatctcagtaagtctagaaacatg

SEQ ID NO: 459306 - DNA, 25 bp, Homo sapien
tcagttatgagtggagctggttcca

SEQ ID NO: 459307 - DNA, 25 bp, Homo sapien
catgggtttgagttgctcagatctg

SEQ ID NO: 459308 - DNA, 25 bp, Homo sapien
cattctgcttacatggttgaccctt

SEQ ID NO: 459309 - DNA, 25 bp, Homo sapien
tactatctgcccagacaaactcttg

SEQ ID NO: 459310 - DNA, 25 bp, Homo sapien
aatctgctgggcttttctaattgca

SEQ ID NO: 459311 - DNA, 25 bp, Homo sapien
acttggccgacgaccactctggtca

SEQ ID NO: 459312 - DNA, 25 bp, Homo sapien
tatgcagtgtaaaaggagtagcctc

SEQ ID NO: 459313 - DNA, 25 bp, Homo sapien
gacttgggccacgacctgtctgatt

SEQ ID NO: 459314 - DNA, 25 bp, Homo sapien
tgaatcagccatggattccctgtct

SEQ ID NO: 459315 - DNA, 25 bp, Homo sapien
ctgtgttatagaaacgtgggtggca

SEQ ID NO: 459316 - DNA, 25 bp, Homo sapien
agaaagggtttccagtgatggcaaa

SEQ ID NO: 459317 - DNA, 25 bp, Homo sapien
cagccaagatgcacacgacacatgt

SEQ ID NO: 459318 - DNA, 25 bp, Homo sapien
taattgggagggacttgtattcagg

SEQ ID NO: 459319 - DNA, 25 bp, Homo sapien
atttgcaactacttcatcttggtgc

SEQ ID NO: 459320 - DNA, 25 bp, Homo sapien
tgcaactacttcatcttggtgcctt

SEQ ID NO: 459321 - DNA, 25 bp, Homo sapien
ttgcaactacttcatcttggtgcct

SEQ ID NO: 459322 - DNA, 25 bp, Homo sapien
tttgcaactacttcatcttggtgcc

SEQ ID NO: 459323 - DNA, 25 bp, Homo sapien
ggtcaccagtatgcccatttgcaaa

SEQ ID NO: 459324 - DNA, 25 bp, Homo sapien
gcaattggttgtttgttagcctccc

SEQ ID NO: 459325 - DNA, 25 bp, Homo sapien
tcagagcccctgacagggcatcttt

SEQ ID NO: 459326 - DNA, 25 bp, Homo sapien
catcttttgagcatgccagttgcca

SEQ ID NO: 459327 - DNA, 25 bp, Homo sapien
ggtccaatatttccctcacgggtca

SEQ ID NO: 459328 - DNA, 25 bp, Homo sapien
cactgagaatctaaaataggtccaa

SEQ ID NO: 459329 - DNA, 25 bp, Homo sapien
cccctgagttcttagcacactgaga

SEQ ID NO: 459330 - DNA, 25 bp, Homo sapien
ataggtccaatatttccctcacggg

SEQ ID NO: 459331 - DNA, 25 bp, Homo sapien
cacatgacattagcccctaactgtt

SEQ ID NO: 459332 - DNA, 25 bp, Homo sapien
gacagcatgaaagactgaattgtcc

SEQ ID NO: 459333 - DNA, 25 bp, Homo sapien
gcatgaaagactgaattgtccacta

SEQ ID NO: 459334 - DNA, 25 bp, Homo sapien
ttttgcacatgacattagcccctaa

SEQ ID NO: 459335 - DNA, 25 bp, Homo sapien
ggcaatgaaaacttgtggtacttcc

SEQ ID NO: 459336 - DNA, 25 bp, Homo sapien
ttccttgtgaaagcgacctggttgg

SEQ ID NO: 459337 - DNA, 25 bp, Homo sapien
gccatgtgatccacactgtatttgc

SEQ ID NO: 459338 - DNA, 25 bp, Homo sapien
ttccaagtagaagcatcaagagcag

SEQ ID NO: 459339 - DNA, 25 bp, Homo sapien
gtccctctgcgtgcagttggtgatc

SEQ ID NO: 459340 - DNA, 25 bp, Homo sapien
tcacacatcattgtccctctgcgtg

SEQ ID NO: 459341 - DNA, 25 bp, Homo sapien
catcattgtccctctgcgtgcagtt

SEQ ID NO: 459342 - DNA, 25 bp, Homo sapien
tcattgtccctctgcgtgcagttgg

SEQ ID NO: 459343 - DNA, 25 bp, Homo sapien
agcctaggtccttcggccatccaga

SEQ ID NO: 459344 - DNA, 25 bp, Homo sapien
tatagcctaggtccttcggccatcc

SEQ ID NO: 459345 - DNA, 25 bp, Homo sapien
acagctttctgtatagcctaggtcc

SEQ ID NO: 459346 - DNA, 25 bp, Homo sapien
tctgtatagcctaggtccttcggcc

SEQ ID NO: 459347 - DNA, 25 bp, Homo sapien
gctgtgcaattgtctcaaaaggtct

SEQ ID NO: 459348 - DNA, 25 bp, Homo sapien
catttccaactgtagtagctggttc

SEQ ID NO: 459349 - DNA, 25 bp, Homo sapien
tgaaactccgcaaatcccaaatagg

SEQ ID NO: 459350 - DNA, 25 bp, Homo sapien
taactgtatcatggtcaaactgctg

SEQ ID NO: 459351 - DNA, 25 bp, Homo sapien
tctcatagctatgggatggaaagaa

SEQ ID NO: 459352 - DNA, 25 bp, Homo sapien
gaatagaagagcacccacctgattt

SEQ ID NO: 459353 - DNA, 25 bp, Homo sapien
aaattcacggctcataggccaaatc

SEQ ID NO: 459354 - DNA, 25 bp, Homo sapien
taaaagagctggcactatgtgtgga

SEQ ID NO: 459355 - DNA, 25 bp, Homo sapien
agcaggagaaagcataggtgcccct

SEQ ID NO: 459356 - DNA, 25 bp, Homo sapien
tgtgtgagcaggagaaagcataggt

SEQ ID NO: 459357 - DNA, 25 bp, Homo sapien
cactgggcaggtgttgggtgtgtga

SEQ ID NO: 459358 - DNA, 25 bp, Homo sapien
ggagaaagcataggtgcccctgcat

SEQ ID NO: 459359 - DNA, 25 bp, Homo sapien
cctcacatggtcacctcctgtcagg

SEQ ID NO: 459360 - DNA, 25 bp, Homo sapien
acctcacatggtcacctcctgtcag

SEQ ID NO: 459361 - DNA, 25 bp, Homo sapien
gaacctcacatggtcacctcctgtc

SEQ ID NO: 459362 - DNA, 25 bp, Homo sapien
aacctcacatggtcacctcctgtca

SEQ ID NO: 459363 - DNA, 25 bp, Homo sapien
caaggtgtccaaaatggcataccac

SEQ ID NO: 459364 - DNA, 25 bp, Homo sapien
gaatattaatgagtggttgcagagc

SEQ ID NO: 459365 - DNA, 25 bp, Homo sapien
catttcatgtgggttaggtcacttt

SEQ ID NO: 459366 - DNA, 25 bp, Homo sapien
ggtcactttcaatgacttccttagt

SEQ ID NO: 459367 - DNA, 25 bp, Homo sapien
gaacaatgggagctggcatcatcag

SEQ ID NO: 459368 - DNA, 25 bp, Homo sapien
tgcctaggtgtcagtgtatgtccca

SEQ ID NO: 459369 - DNA, 25 bp, Homo sapien
caaggccctgcacacatgatttaag

SEQ ID NO: 459370 - DNA, 25 bp, Homo sapien
tatagtacaaagagtccccaggctg

SEQ ID NO: 459371 - DNA, 25 bp, Homo sapien
taaagtgtgagggaagagcctagca

SEQ ID NO: 459372 - DNA, 25 bp, Homo sapien
cattccaaattgagagtcagcccca

SEQ ID NO: 459373 - DNA, 25 bp, Homo sapien
ccaagcagagtatttgtccaaagca

SEQ ID NO: 459374 - DNA, 25 bp, Homo sapien
tcaaccgggctgagcattagccata

SEQ ID NO: 459375 - DNA, 25 bp, Homo sapien
tcattgccgtgacccactggtcagt

SEQ ID NO: 459376 - DNA, 25 bp, Homo sapien
gtcagcagtaaatgtctcattgccg

SEQ ID NO: 459377 - DNA, 25 bp, Homo sapien
ggtcagtccttatgcctcttcatct

SEQ ID NO: 459378 - DNA, 25 bp, Homo sapien
gacccactggtcagtccttatgcct

SEQ ID NO: 459379 - DNA, 25 bp, Homo sapien
cttcctggtgttgctgtcttatttc

SEQ ID NO: 459380 - DNA, 25 bp, Homo sapien
tttcttggcaccctcatctactcaa

SEQ ID NO: 459381 - DNA, 25 bp, Homo sapien
gaagaaacttcatagttggaggatc

SEQ ID NO: 459382 - DNA, 25 bp, Homo sapien
gaggatcttccttctatctatttat

SEQ ID NO: 459383 - DNA, 25 bp, Homo sapien
gaagtctggcatatatgagcactcc

SEQ ID NO: 459384 - DNA, 25 bp, Homo sapien
tgacaagcaaaagtagggctctccc

SEQ ID NO: 459385 - DNA, 25 bp, Homo sapien
tgtatgttcactggtaccacaggtt

SEQ ID NO: 459386 - DNA, 25 bp, Homo sapien
catggaacccctaggaagtctgtgt

SEQ ID NO: 459387 - DNA, 25 bp, Homo sapien
taaactgttgatcttgtcatggcct

SEQ ID NO: 459388 - DNA, 25 bp, Homo sapien
ctctgcagacataactgtggtaggg

SEQ ID NO: 459389 - DNA, 25 bp, Homo sapien
agtaacaccctgaatcctaattgtg

SEQ ID NO: 459390 - DNA, 25 bp, Homo sapien
ttatagactgaagtttatgcccctc

SEQ ID NO: 459391 - DNA, 25 bp, Homo sapien
tctagaacgaaagcgacagggatgt

SEQ ID NO: 459392 - DNA, 25 bp, Homo sapien
cacagctgtattctcagtacagcag

SEQ ID NO: 459393 - DNA, 25 bp, Homo sapien
tttttcctctctagaacgaaagcga

SEQ ID NO: 459394 - DNA, 25 bp, Homo sapien
cagggatgttgttcacagctgtatt

SEQ ID NO: 459395 - DNA, 25 bp, Homo sapien
tggagagagcatagcacagcagtca

SEQ ID NO: 459396 - DNA, 25 bp, Homo sapien
tgcagtggagagagcatagcacagc

SEQ ID NO: 459397 - DNA, 25 bp, Homo sapien
gagagcatagcacagcagtcaagtc

SEQ ID NO: 459398 - DNA, 25 bp, Homo sapien
cagtggagagagcatagcacagcag

SEQ ID NO: 459399 - DNA, 25 bp, Homo sapien
gcgcagatgacaggcattagagatc

SEQ ID NO: 459400 - DNA, 25 bp, Homo sapien
tcacttgaactaaagcccatggcgc

SEQ ID NO: 459401 - DNA, 25 bp, Homo sapien
actaaagcccatggcgcagatgaca

SEQ ID NO: 459402 - DNA, 25 bp, Homo sapien
cacggaaggtaggaggaagactcac

SEQ ID NO: 459403 - DNA, 25 bp, Homo sapien
gagagactgacaatcagttttacct

SEQ ID NO: 459404 - DNA, 25 bp, Homo sapien
catacagggcataggtaaggctggc

SEQ ID NO: 459405 - DNA, 25 bp, Homo sapien
tgtggtagccattcacaggtgcgat

SEQ ID NO: 459406 - DNA, 25 bp, Homo sapien
gtagctgcaactacaaacctgtacc

SEQ ID NO: 459407 - DNA, 25 bp, Homo sapien
ttctccacgattccacataggaacc

SEQ ID NO: 459408 - DNA, 25 bp, Homo sapien
cattgtgcccggcttctccacgatt

SEQ ID NO: 459409 - DNA, 25 bp, Homo sapien
cacgattccacataggaacctgcat

SEQ ID NO: 459410 - DNA, 25 bp, Homo sapien
cttcggttctcattgtgcccggctt

SEQ ID NO: 459411 - DNA, 25 bp, Homo sapien
tctctccaagtgaaaggatgttccg

SEQ ID NO: 459412 - DNA, 25 bp, Homo sapien
tgtctgctcggccataaagcctgcc

SEQ ID NO: 459413 - DNA, 25 bp, Homo sapien
gacaatgtgggaaggctctagtcca

SEQ ID NO: 459414 - DNA, 25 bp, Homo sapien
tacattgaacctccccagatgaagt

SEQ ID NO: 459415 - DNA, 25 bp, Homo sapien
cctttggagtttggctgttagtcag

SEQ ID NO: 459416 - DNA, 25 bp, Homo sapien
gaagagacagcgaagccatagatct

SEQ ID NO: 459417 - DNA, 25 bp, Homo sapien
tgcagcccaagttgttgcatggttg

SEQ ID NO: 459418 - DNA, 25 bp, Homo sapien
tcagggccataatgattcaccttcc

SEQ ID NO: 459419 - DNA, 25 bp, Homo sapien
tctttaacattagcatggtgtagct

SEQ ID NO: 459420 - DNA, 25 bp, Homo sapien
atgatgatagtttgttttaggccac

SEQ ID NO: 459421 - DNA, 25 bp, Homo sapien
taatagaaggatgatagtggacatc

SEQ ID NO: 459422 - DNA, 25 bp, Homo sapien
gattagaatctcctagaataacgtg

SEQ ID NO: 459423 - DNA, 25 bp, Homo sapien
cagtttgatattggcacgaagatac

SEQ ID NO: 459424 - DNA, 25 bp, Homo sapien
gggctaagacgacctgatttcaaag

SEQ ID NO: 459425 - DNA, 25 bp, Homo sapien
cacagacattaggtccagaagacag

SEQ ID NO: 459426 - DNA, 25 bp, Homo sapien
cagtgccaaggcaattcagtagaga

SEQ ID NO: 459427 - DNA, 25 bp, Homo sapien
agttgttaagtttctagacttgtct

SEQ ID NO: 459428 - DNA, 25 bp, Homo sapien
tgttaagtttctagacttgtctttg

SEQ ID NO: 459429 - DNA, 25 bp, Homo sapien
ctaatttctaatgctgcttctgtca

SEQ ID NO: 459430 - DNA, 25 bp, Homo sapien
cacacttggctaagactactaattt

SEQ ID NO: 459431 - DNA, 25 bp, Homo sapien
tacgcagtccgtgttcaaatgtccc

SEQ ID NO: 459432 - DNA, 25 bp, Homo sapien
tattatttcacctattacgcagtcc

SEQ ID NO: 459433 - DNA, 25 bp, Homo sapien
tcaggacccaccaggtacaccaagg

SEQ ID NO: 459434 - DNA, 25 bp, Homo sapien
tagtatataaatcgaacagatgagc

SEQ ID NO: 459435 - DNA, 25 bp, Homo sapien
ccatcacagtcaggtagttccaaat

SEQ ID NO: 459436 - DNA, 25 bp, Homo sapien
caaactgtatgtgctgtatctctgg

SEQ ID NO: 459437 - DNA, 25 bp, Homo sapien
tctgttgtgcatatttgacttgtcc

SEQ ID NO: 459438 - DNA, 25 bp, Homo sapien
cttcaaactgtatgtgctgtatctc

SEQ ID NO: 459439 - DNA, 25 bp, Homo sapien
gaaagcaaggtaagtgtctcatggg

SEQ ID NO: 459440 - DNA, 25 bp, Homo sapien
ggtccagctaaggatgcaaccacca

SEQ ID NO: 459441 - DNA, 25 bp, Homo sapien
gaaaaatcggctgaccaacgcagag

SEQ ID NO: 459442 - DNA, 25 bp, Homo sapien
caggtctcccttcggtactatcaag

SEQ ID NO: 459443 - DNA, 25 bp, Homo sapien
tccctcgcggctccgctagtggtag

SEQ ID NO: 459444 - DNA, 25 bp, Homo sapien
ctagtggtaggtgctcatcgcgcgc

SEQ ID NO: 459445 - DNA, 25 bp, Homo sapien
ctctgaatgccggccggtggccgca

SEQ ID NO: 459446 - DNA, 25 bp, Homo sapien
cctgctgctcgtgttacgtttttaa

SEQ ID NO: 459447 - DNA, 25 bp, Homo sapien
agaagggtctgttccgggtggcgcg

SEQ ID NO: 459448 - DNA, 25 bp, Homo sapien
aatggcgggagaagggtctgttccg

SEQ ID NO: 459449 - DNA, 25 bp, Homo sapien
ccagccccgccgaaaatggcgggag

SEQ ID NO: 459450 - DNA, 25 bp, Homo sapien
cgctgagggaccggcagcgcccggg

SEQ ID NO: 459451 - DNA, 25 bp, Homo sapien
ggaacacgtgctgccgggcgccaac

SEQ ID NO: 459452 - DNA, 25 bp, Homo sapien
gtccccgcagtccacgccagcggcc

SEQ ID NO: 459453 - DNA, 25 bp, Homo sapien
aaccaggaacacgtgctgccgggcg

SEQ ID NO: 459454 - DNA, 25 bp, Homo sapien
ctgaaaccaggaacacgtgctgccg

SEQ ID NO: 459455 - DNA, 25 bp, Homo sapien
tggatccctggttccaacccagtag

SEQ ID NO: 459456 - DNA, 25 bp, Homo sapien
cgtctgaggccacttcgagcctact

SEQ ID NO: 459457 - DNA, 25 bp, Homo sapien
acttcgagcctactggatccctggt

SEQ ID NO: 459458 - DNA, 25 bp, Homo sapien
ttccaacccagtaggatcacagaag

SEQ ID NO: 459459 - DNA, 25 bp, Homo sapien
taagggcccagctttactggagtat

SEQ ID NO: 459460 - DNA, 25 bp, Homo sapien
tcccgaatgggtaactaagcaggct

SEQ ID NO: 459461 - DNA, 25 bp, Homo sapien
cagccaagggcatatcgtttccaac

SEQ ID NO: 459462 - DNA, 25 bp, Homo sapien
tctaaaaccgaatacaagccgcctc

SEQ ID NO: 459463 - DNA, 25 bp, Homo sapien
accaacgtcccaagtctgcatatct

SEQ ID NO: 459464 - DNA, 25 bp, Homo sapien
cagcctatgaaaaccaacgtcccaa

SEQ ID NO: 459465 - DNA, 25 bp, Homo sapien
tggttctgtcttcaccagcctatga

SEQ ID NO: 459466 - DNA, 25 bp, Homo sapien
cttccaagttccagatttgtttatc

SEQ ID NO: 459467 - DNA, 25 bp, Homo sapien
tcggaggagtaagccagcctccagc

SEQ ID NO: 459468 - DNA, 25 bp, Homo sapien
ccagcttagctgtttcggggacaga

SEQ ID NO: 459469 - DNA, 25 bp, Homo sapien
caaatgttgagacctaggccctcgg

SEQ ID NO: 459470 - DNA, 25 bp, Homo sapien
tgaaacagggactagaacatgcagc

SEQ ID NO: 459471 - DNA, 25 bp, Homo sapien
ttagaaactagccttcagcaggacc

SEQ ID NO: 459472 - DNA, 25 bp, Homo sapien
catggatggagcatgaactatgtgg

SEQ ID NO: 459473 - DNA, 25 bp, Homo sapien
gggctgtccctatcaacaaccatgt

SEQ ID NO: 459474 - DNA, 25 bp, Homo sapien
agtaaaaatattcaggttcacagcc

SEQ ID NO: 459475 - DNA, 25 bp, Homo sapien
ttctttgaagcatcttttaaatatt

SEQ ID NO: 459476 - DNA, 25 bp, Homo sapien
cttctttgaagcatcttttaaatat

SEQ ID NO: 459477 - DNA, 25 bp, Homo sapien
tttacaaacattagcccatttttca

SEQ ID NO: 459478 - DNA, 25 bp, Homo sapien
ttacaaacattagcccatttttcat

SEQ ID NO: 459479 - DNA, 25 bp, Homo sapien
cagttttacaaacattagcccattt

SEQ ID NO: 459480 - DNA, 25 bp, Homo sapien
accagttttacaaacattagcccat

SEQ ID NO: 459481 - DNA, 25 bp, Homo sapien
agaaatatttctcacgtcaacttag

SEQ ID NO: 459482 - DNA, 25 bp, Homo sapien
gatttctaaatatagctgaccaatt

SEQ ID NO: 459483 - DNA, 25 bp, Homo sapien
ctttactgctacctaaaacttctct

SEQ ID NO: 459484 - DNA, 25 bp, Homo sapien
taaatgctttagaacctttactgct

SEQ ID NO: 459485 - DNA, 25 bp, Homo sapien
attgaacaagtaaatggctccttct

SEQ ID NO: 459486 - DNA, 25 bp, Homo sapien
ttgaacaagtaaatggctccttctc

SEQ ID NO: 459487 - DNA, 25 bp, Homo sapien
tgaactgattgatttataaaccaag

SEQ ID NO: 459488 - DNA, 25 bp, Homo sapien
tttacttcaaacagctgctgtagac

SEQ ID NO: 459489 - DNA, 25 bp, Homo sapien
tgattgaactgattgatttataaac

SEQ ID NO: 459490 - DNA, 25 bp, Homo sapien
acttttacttcaaacagctgctgta

SEQ ID NO: 459491 - DNA, 25 bp, Homo sapien
catgaggcagaacagttccgttggc

SEQ ID NO: 459492 - DNA, 25 bp, Homo sapien
gaggcagaacagttccgttggccta

SEQ ID NO: 459493 - DNA, 25 bp, Homo sapien
gaacagttccgttggcctactcttc

SEQ ID NO: 459494 - DNA, 25 bp, Homo sapien
ggcagaacagttccgttggcctact

SEQ ID NO: 459495 - DNA, 25 bp, Homo sapien
gaaatagaggatccacaggtgtggc

SEQ ID NO: 459496 - DNA, 25 bp, Homo sapien
tagaggatccacaggtgtggcaaaa

SEQ ID NO: 459497 - DNA, 25 bp, Homo sapien
ctccttatcagcctttatgaggtag

SEQ ID NO: 459498 - DNA, 25 bp, Homo sapien
cttatcagcctttatgaggtagtgg

SEQ ID NO: 459499 - DNA, 25 bp, Homo sapien
tgtgccctcgttataccggccatca

SEQ ID NO: 459500 - DNA, 25 bp, Homo sapien
gcttgtgtgccctcgttataccggc

SEQ ID NO: 459501 - DNA, 25 bp, Homo sapien
ctcgttataccggccatcacagtag

SEQ ID NO: 459502 - DNA, 25 bp, Homo sapien
tgtgtgccctcgttataccggccat

SEQ ID NO: 459503 - DNA, 25 bp, Homo sapien
aacacgttatccaccacaacttgat

SEQ ID NO: 459504 - DNA, 25 bp, Homo sapien
ttatccaccacaacttgatcaaggg

SEQ ID NO: 459505 - DNA, 25 bp, Homo sapien
ctttttcctctgtcacatgatgaag

SEQ ID NO: 459506 - DNA, 25 bp, Homo sapien
caagatgcaatttggaaacacgtta

SEQ ID NO: 459507 - DNA, 25 bp, Homo sapien
ttgcctcccaagacaacaaggattt

SEQ ID NO: 459508 - DNA, 25 bp, Homo sapien
cttctagaagctcaataattttcat

SEQ ID NO: 459509 - DNA, 25 bp, Homo sapien
gacagccaggtaggtaagttccaac

SEQ ID NO: 459510 - DNA, 25 bp, Homo sapien
tcattttaagccgtggacagccagg

SEQ ID NO: 459511 - DNA, 25 bp, Homo sapien
gcctccatgtgtctaaaacccagtg

SEQ ID NO: 459512 - DNA, 25 bp, Homo sapien
gaatatcgaggcctaaacctcagag

SEQ ID NO: 459513 - DNA, 25 bp, Homo sapien
tcatctggtgtgatctcctcctaga

SEQ ID NO: 459514 - DNA, 25 bp, Homo sapien
aaagccctgaactaagcctccatgt

SEQ ID NO: 459515 - DNA, 25 bp, Homo sapien
cattgtcaggagtgtcagaattcca

SEQ ID NO: 459516 - DNA, 25 bp, Homo sapien
tagtaatgtggctacctcaggagtc

SEQ ID NO: 459517 - DNA, 25 bp, Homo sapien
cccttgggcctgatgtgaatttacc

SEQ ID NO: 459518 - DNA, 25 bp, Homo sapien
tatctatgtctaacgtggaaacccc

SEQ ID NO: 459519 - DNA, 25 bp, Homo sapien
tttttccagccactttaatgtcttc

SEQ ID NO: 459520 - DNA, 25 bp, Homo sapien
agccactttaatgtcttctctttgc

SEQ ID NO: 459521 - DNA, 25 bp, Homo sapien
acttgtaatatttcttgttgtctat

SEQ ID NO: 459522 - DNA, 25 bp, Homo sapien
cttctctttgctgtacttgtaatat

SEQ ID NO: 459523 - DNA, 25 bp, Homo sapien
gactgtacccgggaactgacattca

SEQ ID NO: 459524 - DNA, 25 bp, Homo sapien
tccttgtcagtggaagcttggtcac

SEQ ID NO: 459525 - DNA, 25 bp, Homo sapien
gggaactgacattcacattattggt

SEQ ID NO: 459526 - DNA, 25 bp, Homo sapien
tattggtttttaatgctgccacagt

SEQ ID NO: 459527 - DNA, 25 bp, Homo sapien
ttctttagggatgtagtcagatatc

SEQ ID NO: 459528 - DNA, 25 bp, Homo sapien
tttaagtatttagataagtcatcac

SEQ ID NO: 459529 - DNA, 25 bp, Homo sapien
ccatgggcataacgaatataatcct

SEQ ID NO: 459530 - DNA, 25 bp, Homo sapien
tgtagtcagatatcagaccatgggc

SEQ ID NO: 459531 - DNA, 25 bp, Homo sapien
aggatttggcaatgaggctgaaggt

SEQ ID NO: 459532 - DNA, 25 bp, Homo sapien
gaggatttggcaatgaggctgaagg

SEQ ID NO: 459533 - DNA, 25 bp, Homo sapien
ctaggagataaacataccagctgca

SEQ ID NO: 459534 - DNA, 25 bp, Homo sapien
aggagataaacataccagctgcaga

SEQ ID NO: 459535 - DNA, 25 bp, Homo sapien
gataaacataccagctgcagaggag

SEQ ID NO: 459536 - DNA, 25 bp, Homo sapien
gagataaacataccagctgcagagg

SEQ ID NO: 459537 - DNA, 25 bp, Homo sapien
ccctgtcttggagcagagtttaact

SEQ ID NO: 459538 - DNA, 25 bp, Homo sapien
aagctggtgcacatgtttatttccc

SEQ ID NO: 459539 - DNA, 25 bp, Homo sapien
ggcatccgttactttgctggctgaa

SEQ ID NO: 459540 - DNA, 25 bp, Homo sapien
tgaaggaacgctgcaatttgcagtc

SEQ ID NO: 459541 - DNA, 25 bp, Homo sapien
taactaccggaatgaaagacgcatg

SEQ ID NO: 459542 - DNA, 25 bp, Homo sapien
gctactgtcagagattaactaccgg

SEQ ID NO: 459543 - DNA, 25 bp, Homo sapien
taagaagcacgctgagaacctaccc

SEQ ID NO: 459544 - DNA, 25 bp, Homo sapien
ttgcaagaaggaactcgggaacatc

SEQ ID NO: 459545 - DNA, 25 bp, Homo sapien
ctctacagaggcgaatgggacagca

SEQ ID NO: 459546 - DNA, 25 bp, Homo sapien
taattaccagatgaatgcaaggcac

SEQ ID NO: 459547 - DNA, 25 bp, Homo sapien
tctagggaattgagccacacatcac

SEQ ID NO: 459548 - DNA, 25 bp, Homo sapien
tggctgagccccttagctggtccag

SEQ ID NO: 459549 - DNA, 25 bp, Homo sapien
aaacttagtgtaatcttcttttgct

SEQ ID NO: 459550 - DNA, 25 bp, Homo sapien
tttgcttctacaggctcatctgata

SEQ ID NO: 459551 - DNA, 25 bp, Homo sapien
ttgcttctacaggctcatctgataa

SEQ ID NO: 459552 - DNA, 25 bp, Homo sapien
tagtattaaacttagtgtaatcttc

SEQ ID NO: 459553 - DNA, 25 bp, Homo sapien
cacgcactgagtatgaacgaaacac

SEQ ID NO: 459554 - DNA, 25 bp, Homo sapien
tgtattcatgcacatcacgcactga

SEQ ID NO: 459555 - DNA, 25 bp, Homo sapien
acaatcaagcgtgcaactgttcctc

SEQ ID NO: 459556 - DNA, 25 bp, Homo sapien
tcttcctggtcaaaactgtaatcac

SEQ ID NO: 459557 - DNA, 25 bp, Homo sapien
aaaatttaggcacactcttgataag

SEQ ID NO: 459558 - DNA, 25 bp, Homo sapien
tataatgccaatgttaaaggccaca

SEQ ID NO: 459559 - DNA, 25 bp, Homo sapien
gggtgaatgctgaatggtgaaatta

SEQ ID NO: 459560 - DNA, 25 bp, Homo sapien
taaaaagcccagaactgagtattat

SEQ ID NO: 459561 - DNA, 25 bp, Homo sapien
caggccgcaattgtcagaggtagga

SEQ ID NO: 459562 - DNA, 25 bp, Homo sapien
tagaggcacagtatatgattcccac

SEQ ID NO: 459563 - DNA, 25 bp, Homo sapien
taacttatcttgagatgggcaaggc

SEQ ID NO: 459564 - DNA, 25 bp, Homo sapien
cgagataactcgctatttgggcaga

SEQ ID NO: 459565 - DNA, 25 bp, Homo sapien
attccactcttgtcaactttagcca

SEQ ID NO: 459566 - DNA, 25 bp, Homo sapien
cactcttgtcaactttagccaaagc

SEQ ID NO: 459567 - DNA, 25 bp, Homo sapien
ttgtcaactttagccaaagccttct

SEQ ID NO: 459568 - DNA, 25 bp, Homo sapien
tcttgtcaactttagccaaagcctt

SEQ ID NO: 459569 - DNA, 25 bp, Homo sapien
tatttttgctagattttattttcaa

SEQ ID NO: 459570 - DNA, 25 bp, Homo sapien
cccaaccaaaggtagtcattaacag

SEQ ID NO: 459571 - DNA, 25 bp, Homo sapien
aggccatagccatgaagttagacac

SEQ ID NO: 459572 - DNA, 25 bp, Homo sapien
tttaagagaacatgaaattggcctc

SEQ ID NO: 459573 - DNA, 25 bp, Homo sapien
ttcattatgtcagatgagactccaa

SEQ ID NO: 459574 - DNA, 25 bp, Homo sapien
ctgaatgcaaagttgcattaaaaag

SEQ ID NO: 459575 - DNA, 25 bp, Homo sapien
gcaaagttgcattaaaaagcagtca

SEQ ID NO: 459576 - DNA, 25 bp, Homo sapien
gaatgcaaagttgcattaaaaagca

SEQ ID NO: 459577 - DNA, 25 bp, Homo sapien
atgcaaagttgcattaaaaagcagt

SEQ ID NO: 459578 - DNA, 25 bp, Homo sapien
ttacctcacagttttgtaatccagt

SEQ ID NO: 459579 - DNA, 25 bp, Homo sapien
agttttgtaatccagtttctctcag

SEQ ID NO: 459580 - DNA, 25 bp, Homo sapien
caatttacctcacagttttgtaatc

SEQ ID NO: 459581 - DNA, 25 bp, Homo sapien
agtaacaatttacctcacagttttg

SEQ ID NO: 459582 - DNA, 25 bp, Homo sapien
agacaatacattatctctgggtaat

SEQ ID NO: 459583 - DNA, 25 bp, Homo sapien
aagacaatacattatctctgggtaa

SEQ ID NO: 459584 - DNA, 25 bp, Homo sapien
taagacaatacattatctctgggta

SEQ ID NO: 459585 - DNA, 25 bp, Homo sapien
ggcagtgcagaaccgagaagcacaa

SEQ ID NO: 459586 - DNA, 25 bp, Homo sapien
cagtgcagaaccgagaagcacaaac

SEQ ID NO: 459587 - DNA, 25 bp, Homo sapien
ttggcagtgcagaaccgagaagcac

SEQ ID NO: 459588 - DNA, 25 bp, Homo sapien
tggcagtgcagaaccgagaagcaca

SEQ ID NO: 459589 - DNA, 25 bp, Homo sapien
catcgttgaggataaattgacctgc

SEQ ID NO: 459590 - DNA, 25 bp, Homo sapien
aaaggaacgaggcttaggcttggca

SEQ ID NO: 459591 - DNA, 25 bp, Homo sapien
catgcaaatgtaccagctaagtaga

SEQ ID NO: 459592 - DNA, 25 bp, Homo sapien
tgggcttggccacctactgtctgta

SEQ ID NO: 459593 - DNA, 25 bp, Homo sapien
gcaggaagccttgtgtagactccaa

SEQ ID NO: 459594 - DNA, 25 bp, Homo sapien
tgctgatagaagtagtagcacctaa

SEQ ID NO: 459595 - DNA, 25 bp, Homo sapien
gaaatcaaacttctatgccagaatg

SEQ ID NO: 459596 - DNA, 25 bp, Homo sapien
cgtattctggagctatatgttacaa

SEQ ID NO: 459597 - DNA, 25 bp, Homo sapien
ctgaaaccccaagcaccatctgcag

SEQ ID NO: 459598 - DNA, 25 bp, Homo sapien
aaaccgccaagccttgcgtggagcc

SEQ ID NO: 459599 - DNA, 25 bp, Homo sapien
agaagaaaaagtccgagtcctctgg

SEQ ID NO: 459600 - DNA, 25 bp, Homo sapien
cagaagaaaaagtccgagtcctctg

SEQ ID NO: 459601 - DNA, 25 bp, Homo sapien
aagccttgcgtggagccaccaccat

SEQ ID NO: 459602 - DNA, 25 bp, Homo sapien
tgaacaggtgcaccgctgggatgct

SEQ ID NO: 459603 - DNA, 25 bp, Homo sapien
tccatacctaaaacatgctggcctg

SEQ ID NO: 459604 - DNA, 25 bp, Homo sapien
gctggcctgacccaagcttgaggtc

SEQ ID NO: 459605 - DNA, 25 bp, Homo sapien
acggaaccgcctagctgagtgctcc

SEQ ID NO: 459606 - DNA, 25 bp, Homo sapien
cactttttggcatctacttccaacc

SEQ ID NO: 459607 - DNA, 25 bp, Homo sapien
agatgaaacgatgaaatggattgca

SEQ ID NO: 459608 - DNA, 25 bp, Homo sapien
gctcaataggattggattcttagat

SEQ ID NO: 459609 - DNA, 25 bp, Homo sapien
gaaatggattgcatgaacagtgact

SEQ ID NO: 459610 - DNA, 25 bp, Homo sapien
gattggattcttagatgaaacgatg

SEQ ID NO: 459611 - DNA, 25 bp, Homo sapien
aatttggttacaatctgctagggca

SEQ ID NO: 459612 - DNA, 25 bp, Homo sapien
catgtatctttgactgggttgggaa

SEQ ID NO: 459613 - DNA, 25 bp, Homo sapien
gaatcggatagtagagacctgaaac

SEQ ID NO: 459614 - DNA, 25 bp, Homo sapien
tatgtgctccaaaatcggtcaggag

SEQ ID NO: 459615 - DNA, 25 bp, Homo sapien
caatctccctgggtgttacaaagga

SEQ ID NO: 459616 - DNA, 25 bp, Homo sapien
cattccctgagcaatctccctgggt

SEQ ID NO: 459617 - DNA, 25 bp, Homo sapien
tgcatctcatggtctgctgtcttgt

SEQ ID NO: 459618 - DNA, 25 bp, Homo sapien
tgcttctagacacagattccattcc

SEQ ID NO: 459619 - DNA, 25 bp, Homo sapien
tagataactaatatggtaagacttc

SEQ ID NO: 459620 - DNA, 25 bp, Homo sapien
tattatgaataaaccccaatttgtc

SEQ ID NO: 459621 - DNA, 25 bp, Homo sapien
taaatctttcctgtacccaaatcaa

SEQ ID NO: 459622 - DNA, 25 bp, Homo sapien
acatggcgacaagaagaagtgctac

SEQ ID NO: 459623 - DNA, 25 bp, Homo sapien
atgaacaactcttgttccacagaga

SEQ ID NO: 459624 - DNA, 25 bp, Homo sapien
ggagggctgatgcaaggtctgggat

SEQ ID NO: 459625 - DNA, 25 bp, Homo sapien
tcaagaacggatcactcgagagctc

SEQ ID NO: 459626 - DNA, 25 bp, Homo sapien
aacaggaacatcaagccatgggagg

SEQ ID NO: 459627 - DNA, 25 bp, Homo sapien
ctgcctccatctcaggcacctgttc

SEQ ID NO: 459628 - DNA, 25 bp, Homo sapien
aggagcatggcagaccaggatccca

SEQ ID NO: 459629 - DNA, 25 bp, Homo sapien
gagcatggcagaccaggatcccagc

SEQ ID NO: 459630 - DNA, 25 bp, Homo sapien
tgcctccatctcaggcacctgttca

SEQ ID NO: 459631 - DNA, 25 bp, Homo sapien
gaaccctgttatgtggtagcattgc

SEQ ID NO: 459632 - DNA, 25 bp, Homo sapien
tttgaaatccttagctctgctgtga

SEQ ID NO: 459633 - DNA, 25 bp, Homo sapien
agaatcccatacagaacgaggaacc

SEQ ID NO: 459634 - DNA, 25 bp, Homo sapien
cctttgaaatccttagctctgctgt

SEQ ID NO: 459635 - DNA, 25 bp, Homo sapien
gaggcattaactgtctcagcaattc

SEQ ID NO: 459636 - DNA, 25 bp, Homo sapien
caaatgacactttgccgtctggttt

SEQ ID NO: 459637 - DNA, 25 bp, Homo sapien
gacactttgccgtctggtttctgtg

SEQ ID NO: 459638 - DNA, 25 bp, Homo sapien
tttccccctacttagttctgtggca

SEQ ID NO: 459639 - DNA, 25 bp, Homo sapien
aacttcttaagccgtgtctcttcct

SEQ ID NO: 459640 - DNA, 25 bp, Homo sapien
tggcacagggcagttcaaagaactc

SEQ ID NO: 459641 - DNA, 25 bp, Homo sapien
cagaagcaaagatgtgggtatgacc

SEQ ID NO: 459642 - DNA, 25 bp, Homo sapien
ggtctgtccgggctgtttggccttg

SEQ ID NO: 459643 - DNA, 25 bp, Homo sapien
tagccacaaggcagtggtctgtccg

SEQ ID NO: 459644 - DNA, 25 bp, Homo sapien
ttgagagtttcatgaaccttgattc

SEQ ID NO: 459645 - DNA, 25 bp, Homo sapien
ggttgcgccataccctataaaatgt

SEQ ID NO: 459646 - DNA, 25 bp, Homo sapien
tacttagctaactctggttgcgcca

SEQ ID NO: 459647 - DNA, 25 bp, Homo sapien
gattggccccaatatatgcatgagc

SEQ ID NO: 459648 - DNA, 25 bp, Homo sapien
gtcggactacactcaaacttcaagg

SEQ ID NO: 459649 - DNA, 25 bp, Homo sapien
gaacattcagaagtacgtaccagga

SEQ ID NO: 459650 - DNA, 25 bp, Homo sapien
cctttcccgatagtgagccacagaa

SEQ ID NO: 459651 - DNA, 25 bp, Homo sapien
ccacctgtttgagagattgatccga

SEQ ID NO: 459652 - DNA, 25 bp, Homo sapien
gccctgtctcctgtgtcaatgatgc

SEQ ID NO: 459653 - DNA, 25 bp, Homo sapien
aacgcataagcagcgcttcccttgg

SEQ ID NO: 459654 - DNA, 25 bp, Homo sapien
agagggtgtttctcacaggatctcc

SEQ ID NO: 459655 - DNA, 25 bp, Homo sapien
tcccttggggagactccttgcttct

SEQ ID NO: 459656 - DNA, 25 bp, Homo sapien
cctggatagctcatgagacctggaa

SEQ ID NO: 459657 - DNA, 25 bp, Homo sapien
ttgctgtgaattccaaatccagcca

SEQ ID NO: 459658 - DNA, 25 bp, Homo sapien
tgtcctctgtaggatttagccctgg

SEQ ID NO: 459659 - DNA, 25 bp, Homo sapien
aaccacagatactggtgatggtgag

SEQ ID NO: 459660 - DNA, 25 bp, Homo sapien
agaccatcctaggaagcaagcaggg

SEQ ID NO: 459661 - DNA, 25 bp, Homo sapien
tcagaccatcctaggaagcaagcag

SEQ ID NO: 459662 - DNA, 25 bp, Homo sapien
caagcaggggctggagagtgcccag

SEQ ID NO: 459663 - DNA, 25 bp, Homo sapien
agcaagcaggggctggagagtgccc

SEQ ID NO: 459664 - DNA, 25 bp, Homo sapien
tgttaagtcagaaagtttgagttca

SEQ ID NO: 459665 - DNA, 25 bp, Homo sapien
aaaagcttgttagaggtctccacac

SEQ ID NO: 459666 - DNA, 25 bp, Homo sapien
tgtaaaagcttgttagaggtctcca

SEQ ID NO: 459667 - DNA, 25 bp, Homo sapien
gagttcatgcaacactccaatgtaa

SEQ ID NO: 459668 - DNA, 25 bp, Homo sapien
aattgctgggacttttccagaccgc

SEQ ID NO: 459669 - DNA, 25 bp, Homo sapien
gggacttttccagaccgctctgcca

SEQ ID NO: 459670 - DNA, 25 bp, Homo sapien
gctgggacttttccagaccgctctg

SEQ ID NO: 459671 - DNA, 25 bp, Homo sapien
tgaagcaattgctgggacttttcca

SEQ ID NO: 459672 - DNA, 25 bp, Homo sapien
cataacatctattggcctatatcta

SEQ ID NO: 459673 - DNA, 25 bp, Homo sapien
caccgaaagccaacgtacatcactg

SEQ ID NO: 459674 - DNA, 25 bp, Homo sapien
tgtggtttctctctgcctagctttg

SEQ ID NO: 459675 - DNA, 25 bp, Homo sapien
tgcctagctttgaatgtcaggaatc

SEQ ID NO: 459676 - DNA, 25 bp, Homo sapien
caatgtgtgggctggcccacatcac

SEQ ID NO: 459677 - DNA, 25 bp, Homo sapien
tagaaccaaggttgtgtctgaggct

SEQ ID NO: 459678 - DNA, 25 bp, Homo sapien
tctgaggctggaaataaggcacaag

SEQ ID NO: 459679 - DNA, 25 bp, Homo sapien
ggcacaaggagtgaaacagtcattt

SEQ ID NO: 459680 - DNA, 25 bp, Homo sapien
tcctggaactcaggcgccaagagca

SEQ ID NO: 459681 - DNA, 25 bp, Homo sapien
gaccttccagggatccatatccagg

SEQ ID NO: 459682 - DNA, 25 bp, Homo sapien
catggctttcacatggcgctgtgac

SEQ ID NO: 459683 - DNA, 25 bp, Homo sapien
acatctcttctcatgttcctggtca

SEQ ID NO: 459684 - DNA, 25 bp, Homo sapien
ctcctggatgcagaagaccttccag

SEQ ID NO: 459685 - DNA, 25 bp, Homo sapien
atctgcctggacatgaaaatgccat

SEQ ID NO: 459686 - DNA, 25 bp, Homo sapien
tgctctccatcgcatattttcccat

SEQ ID NO: 459687 - DNA, 25 bp, Homo sapien
tgaaaatgccattgacagggtcata

SEQ ID NO: 459688 - DNA, 25 bp, Homo sapien
cccactgacaatgtacgtgtcctcc

SEQ ID NO: 459689 - DNA, 25 bp, Homo sapien
gctgagaatgtccagaatcgggatt

SEQ ID NO: 459690 - DNA, 25 bp, Homo sapien
cgggattctgacactgagttgggaa

SEQ ID NO: 459691 - DNA, 25 bp, Homo sapien
ttgggaaggaagaatcaagttagcc

SEQ ID NO: 459692 - DNA, 25 bp, Homo sapien
agagcagggacgcccggatctgcaa

SEQ ID NO: 459693 - DNA, 25 bp, Homo sapien
tatgactgaacacagatagcatggc

SEQ ID NO: 459694 - DNA, 25 bp, Homo sapien
tgactgaacacagatagcatggcca

SEQ ID NO: 459695 - DNA, 25 bp, Homo sapien
atgactgaacacagatagcatggcc

SEQ ID NO: 459696 - DNA, 25 bp, Homo sapien
gactgaacacagatagcatggccag

SEQ ID NO: 459697 - DNA, 25 bp, Homo sapien
ggccttccagaggatcagctgctcc

SEQ ID NO: 459698 - DNA, 25 bp, Homo sapien
gggccttccagaggatcagctgctc

SEQ ID NO: 459699 - DNA, 25 bp, Homo sapien
tgctcctatgcagagggcaaggcgt

SEQ ID NO: 459700 - DNA, 25 bp, Homo sapien
agctgctcctatgcagagggcaagg

SEQ ID NO: 459701 - DNA, 25 bp, Homo sapien
tcatcaaacagaggcacactatcgg

SEQ ID NO: 459702 - DNA, 25 bp, Homo sapien
attcatcaaacagaggcacactatc

SEQ ID NO: 459703 - DNA, 25 bp, Homo sapien
acatgactcaatggccctaaattca

SEQ ID NO: 459704 - DNA, 25 bp, Homo sapien
gctggaccacatgactcaatggccc

SEQ ID NO: 459705 - DNA, 25 bp, Homo sapien
cacatcgtgtgggatacattgcctc

SEQ ID NO: 459706 - DNA, 25 bp, Homo sapien
ccgcatatgctcgacacatcgtgtg

SEQ ID NO: 459707 - DNA, 25 bp, Homo sapien
gctcgacacatcgtgtgggatacat

SEQ ID NO: 459708 - DNA, 25 bp, Homo sapien
aaacaccaaggtccccgcatatgct

SEQ ID NO: 459709 - DNA, 25 bp, Homo sapien
gatggaggataaggctcaaggcacc

SEQ ID NO: 459710 - DNA, 25 bp, Homo sapien
gaaatagacctctggcaaacagccc

SEQ ID NO: 459711 - DNA, 25 bp, Homo sapien
tctgaccacaagtaatactcaggaa

SEQ ID NO: 459712 - DNA, 25 bp, Homo sapien
gagcctgaaacggaacagtgatggg

SEQ ID NO: 459713 - DNA, 25 bp, Homo sapien
caccaaagctagcatgtgtgttgga

SEQ ID NO: 459714 - DNA, 25 bp, Homo sapien
tgtgttggaacagctacaggcgaca

SEQ ID NO: 459715 - DNA, 25 bp, Homo sapien
cagctacaggcgacatttgttggac

SEQ ID NO: 459716 - DNA, 25 bp, Homo sapien
aggcgacatttgttggacctggtta

SEQ ID NO: 459717 - DNA, 25 bp, Homo sapien
ggctgcttcgagaaagactttggga

SEQ ID NO: 459718 - DNA, 25 bp, Homo sapien
gaagctgtccgctttcagcgcagca

SEQ ID NO: 459719 - DNA, 25 bp, Homo sapien
gaggactactatgagacagagaacc

SEQ ID NO: 459720 - DNA, 25 bp, Homo sapien
gacgtgtctcagactgggtccctga

SEQ ID NO: 459721 - DNA, 25 bp, Homo sapien
gaggcaccccatttatttgcccaag

SEQ ID NO: 459722 - DNA, 25 bp, Homo sapien
gccttcaacacctggaaatttaagc

SEQ ID NO: 459723 - DNA, 25 bp, Homo sapien
aggcaccccatttatttgcccaagg

SEQ ID NO: 459724 - DNA, 25 bp, Homo sapien
tatagaataggccatcaggaatccc

SEQ ID NO: 459725 - DNA, 25 bp, Homo sapien
tgacctacagcaattatggacctgg

SEQ ID NO: 459726 - DNA, 25 bp, Homo sapien
cagagctggatacagagagacgacc

SEQ ID NO: 459727 - DNA, 25 bp, Homo sapien
gaaatactcgcagttcagtgctgat

SEQ ID NO: 459728 - DNA, 25 bp, Homo sapien
taagcgtaattgtaaacccacaggc

SEQ ID NO: 459729 - DNA, 25 bp, Homo sapien
tgcactcgcctgattgagaccacag

SEQ ID NO: 459730 - DNA, 25 bp, Homo sapien
tctgaggactggttctgcactcgcc

SEQ ID NO: 459731 - DNA, 25 bp, Homo sapien
gcataatgggctggaagctggacaa

SEQ ID NO: 459732 - DNA, 25 bp, Homo sapien
tgcttgataagaagcctagatgcca

SEQ ID NO: 459733 - DNA, 25 bp, Homo sapien
tgataagaagcctagatgccactgt

SEQ ID NO: 459734 - DNA, 25 bp, Homo sapien
tagatgccactgtgaaccttgtgtc

SEQ ID NO: 459735 - DNA, 25 bp, Homo sapien
caaacctggtgcttgataagaagcc

SEQ ID NO: 459736 - DNA, 25 bp, Homo sapien
cccctgtcctcaagatagcttctgt

SEQ ID NO: 459737 - DNA, 25 bp, Homo sapien
aaggaacatggtgtgagcgtgcaca

SEQ ID NO: 459738 - DNA, 25 bp, Homo sapien
aggtgtgcggatgcctgctctcctg

SEQ ID NO: 459739 - DNA, 25 bp, Homo sapien
tcctgagggctggtgtagaggaccc

SEQ ID NO: 459740 - DNA, 25 bp, Homo sapien
tggtgatgggtgcaggccagacaga

SEQ ID NO: 459741 - DNA, 25 bp, Homo sapien
gtttggtgatgggtgcaggccagac

SEQ ID NO: 459742 - DNA, 25 bp, Homo sapien
ggtgatgggtgcaggccagacagac

SEQ ID NO: 459743 - DNA, 25 bp, Homo sapien
ctggtttggtgatgggtgcaggcca

SEQ ID NO: 459744 - DNA, 25 bp, Homo sapien
caatcctgaggttgatagaagccta

SEQ ID NO: 459745 - DNA, 25 bp, Homo sapien
gcctagggaagtactgtgagctttg

SEQ ID NO: 459746 - DNA, 25 bp, Homo sapien
actgaccaggggatcaaagcgggcc

SEQ ID NO: 459747 - DNA, 25 bp, Homo sapien
cttccagcaagggtaggcaatcctg

SEQ ID NO: 459748 - DNA, 25 bp, Homo sapien
agagactgttctcctgtgtaggaga

SEQ ID NO: 459749 - DNA, 25 bp, Homo sapien
tagtccaaggtctgagagcaatgtg

SEQ ID NO: 459750 - DNA, 25 bp, Homo sapien
tagatgctatgcagatgcagaacag

SEQ ID NO: 459751 - DNA, 25 bp, Homo sapien
gagcaatgtgtagatgctatgcaga

SEQ ID NO: 459752 - DNA, 25 bp, Homo sapien
cagcaagcccaaacggtcaatacgg

SEQ ID NO: 459753 - DNA, 25 bp, Homo sapien
caccctgtgggcgtccttcatgatg

SEQ ID NO: 459754 - DNA, 25 bp, Homo sapien
gatgttttcctgtgcgtcgctctcc

SEQ ID NO: 459755 - DNA, 25 bp, Homo sapien
gcatttgggccctcagccagttagg

SEQ ID NO: 459756 - DNA, 25 bp, Homo sapien
cccagcccgtgaccggcgctggagt

SEQ ID NO: 459757 - DNA, 25 bp, Homo sapien
agcccgtgaccggcgctggagtttt

SEQ ID NO: 459758 - DNA, 25 bp, Homo sapien
ttcccagcccgtgaccggcgctgga

SEQ ID NO: 459759 - DNA, 25 bp, Homo sapien
agaggccacttaccggattcgaaat

SEQ ID NO: 459760 - DNA, 25 bp, Homo sapien
gttgttgttttatagaaggtgcttg

SEQ ID NO: 459761 - DNA, 25 bp, Homo sapien
ccgcgctaaccacgcctaggaagga

SEQ ID NO: 459762 - DNA, 25 bp, Homo sapien
tttatagaaggtgcttgggtttgag

SEQ ID NO: 459763 - DNA, 25 bp, Homo sapien
gtatgaaaggcctctacttattttg

SEQ ID NO: 459764 - DNA, 25 bp, Homo sapien
gacaactcaggatgtctgattagag

SEQ ID NO: 459765 - DNA, 25 bp, Homo sapien
gaattgggacaactcaggatgtctg

SEQ ID NO: 459766 - DNA, 25 bp, Homo sapien
tgggacaactcaggatgtctgatta

SEQ ID NO: 459767 - DNA, 25 bp, Homo sapien
aaggcctaagaattgggacaactca

SEQ ID NO: 459768 - DNA, 25 bp, Homo sapien
aggatttgtaggatggcttcatggc

SEQ ID NO: 459769 - DNA, 25 bp, Homo sapien
cacaaattgaaaccatattaattgg

SEQ ID NO: 459770 - DNA, 25 bp, Homo sapien
gtgtaagcagcccaggatttgtagg

SEQ ID NO: 459771 - DNA, 25 bp, Homo sapien
catattaattggtgtgtaagcagcc

SEQ ID NO: 459772 - DNA, 25 bp, Homo sapien
tagggtggtccttgggttgagccca

SEQ ID NO: 459773 - DNA, 25 bp, Homo sapien
tggtccttgggttgagcccagtgct

SEQ ID NO: 459774 - DNA, 25 bp, Homo sapien
ccaggtgtgggcacttcgtcaatcg

SEQ ID NO: 459775 - DNA, 25 bp, Homo sapien
cgtcaatcgactgctgtgtgggaag

SEQ ID NO: 459776 - DNA, 25 bp, Homo sapien
agcctggataaccctgggttcgtag

SEQ ID NO: 459777 - DNA, 25 bp, Homo sapien
ctgtaagcctggataaccctgggtt

SEQ ID NO: 459778 - DNA, 25 bp, Homo sapien
cctgtaagcctggataaccctgggt

SEQ ID NO: 459779 - DNA, 25 bp, Homo sapien
tgtaagcctggataaccctgggttc

SEQ ID NO: 459780 - DNA, 25 bp, Homo sapien
gactcagatagatggatttggcaca

SEQ ID NO: 459781 - DNA, 25 bp, Homo sapien
aaatagaaatgtagagagcctgcgc

SEQ ID NO: 459782 - DNA, 25 bp, Homo sapien
gcattcaaatgcagtcagctgttct

SEQ ID NO: 459783 - DNA, 25 bp, Homo sapien
gaaggactacctctgggcaagaaga

SEQ ID NO: 459784 - DNA, 25 bp, Homo sapien
accacagagatggtcgtgcccagag

SEQ ID NO: 459785 - DNA, 25 bp, Homo sapien
cttatgattaccacagagatggtcg

SEQ ID NO: 459786 - DNA, 25 bp, Homo sapien
tgattaccacagagatggtcgtgcc

SEQ ID NO: 459787 - DNA, 25 bp, Homo sapien
catctgagtgctctgttgtggaaac

SEQ ID NO: 459788 - DNA, 25 bp, Homo sapien
gaaagtgagattggtgggcaatttt

SEQ ID NO: 459789 - DNA, 25 bp, Homo sapien
gataggaactgacagaaagtgagat

SEQ ID NO: 459790 - DNA, 25 bp, Homo sapien
aggcggttcgggcaacaccaagcct

SEQ ID NO: 459791 - DNA, 25 bp, Homo sapien
cggatgttttgaagtcagataggaa

SEQ ID NO: 459792 - DNA, 25 bp, Homo sapien
ggtttggatgtttctgcactgcagc

SEQ ID NO: 459793 - DNA, 25 bp, Homo sapien
tgttcagtacgtcaaatccaaccat

SEQ ID NO: 459794 - DNA, 25 bp, Homo sapien
gagggacctgtatttctgttcagta

SEQ ID NO: 459795 - DNA, 25 bp, Homo sapien
tgttgtaacagtgtcccatgggttg

SEQ ID NO: 459796 - DNA, 25 bp, Homo sapien
tgagacttgtccactccatcgcacg

SEQ ID NO: 459797 - DNA, 25 bp, Homo sapien
tcttccatcacgtgggagtaaagtg

SEQ ID NO: 459798 - DNA, 25 bp, Homo sapien
tgcttcttccatcacgtgggagtaa

SEQ ID NO: 459799 - DNA, 25 bp, Homo sapien
cacgtgggagtaaagtggctcttgc

SEQ ID NO: 459800 - DNA, 25 bp, Homo sapien
agggtagaggttgctaagcaccggg

SEQ ID NO: 459801 - DNA, 25 bp, Homo sapien
ttttggaggatgtagaatctttgcc

SEQ ID NO: 459802 - DNA, 25 bp, Homo sapien
aggttgctaagcaccgggaattgtt

SEQ ID NO: 459803 - DNA, 25 bp, Homo sapien
ttgttttttggaggatgtagaatct

SEQ ID NO: 459804 - DNA, 25 bp, Homo sapien
tgagcaaagcctcaggcacagacaa

SEQ ID NO: 459805 - DNA, 25 bp, Homo sapien
cggaccagtaggcagctgcctgact

SEQ ID NO: 459806 - DNA, 25 bp, Homo sapien
gcctgactagcttggctgtcctcag

SEQ ID NO: 459807 - DNA, 25 bp, Homo sapien
tgtcctcagggtggcaacaagaagc

SEQ ID NO: 459808 - DNA, 25 bp, Homo sapien
catagtccagctgtttaatgtcagt

SEQ ID NO: 459809 - DNA, 25 bp, Homo sapien
taatgtcagtctctttaatcatggg

SEQ ID NO: 459810 - DNA, 25 bp, Homo sapien
atggttcccacactccatagtccag

SEQ ID NO: 459811 - DNA, 25 bp, Homo sapien
taatcatgggggtacgatgctctcc

SEQ ID NO: 459812 - DNA, 25 bp, Homo sapien
ggctccctccgagcgtctggcggcc

SEQ ID NO: 459813 - DNA, 25 bp, Homo sapien
cttgcgggcgccgtcgtgacccggg

SEQ ID NO: 459814 - DNA, 25 bp, Homo sapien
agccggcaaacaactcaagcgccag

SEQ ID NO: 459815 - DNA, 25 bp, Homo sapien
cccgggagccggcaaacaactcaag

SEQ ID NO: 459816 - DNA, 25 bp, Homo sapien
cgagtccacgcagtcgtcctcctcg

SEQ ID NO: 459817 - DNA, 25 bp, Homo sapien
cggtctcggcgcccgagtccacgca

SEQ ID NO: 459818 - DNA, 25 bp, Homo sapien
cctccggtctcggcgcccgagtcca

SEQ ID NO: 459819 - DNA, 25 bp, Homo sapien
gtccacgcagtcgtcctcctcgccg

SEQ ID NO: 459820 - DNA, 25 bp, Homo sapien
catctcctgtctctagcgatgcaga

SEQ ID NO: 459821 - DNA, 25 bp, Homo sapien
ggcgctctgcatcgcctcacaggat

SEQ ID NO: 459822 - DNA, 25 bp, Homo sapien
gctacaggaggaaagtccccgagga

SEQ ID NO: 459823 - DNA, 25 bp, Homo sapien
gatgggtgggcttgcactgaacctt

SEQ ID NO: 459824 - DNA, 25 bp, Homo sapien
ctagggagtaaagtcccgcatttgg

SEQ ID NO: 459825 - DNA, 25 bp, Homo sapien
tgcaatgtcatcatgaagacctccc

SEQ ID NO: 459826 - DNA, 25 bp, Homo sapien
cagttgatttagtctctcccagagc

SEQ ID NO: 459827 - DNA, 25 bp, Homo sapien
cttggatgtcttgcaacacctcaga

SEQ ID NO: 459828 - DNA, 25 bp, Homo sapien
caaacttggtttggaatagatcacc

SEQ ID NO: 459829 - DNA, 25 bp, Homo sapien
atgcctctaacgagccatgtgccct

SEQ ID NO: 459830 - DNA, 25 bp, Homo sapien
gaattaattacagatcagacagctc

SEQ ID NO: 459831 - DNA, 25 bp, Homo sapien
tggagatccaggcttcaattcatgc

SEQ ID NO: 459832 - DNA, 25 bp, Homo sapien
gggaagcatactggagatccaggct

SEQ ID NO: 459833 - DNA, 25 bp, Homo sapien
ctggctatgcataagacattcagcc

SEQ ID NO: 459834 - DNA, 25 bp, Homo sapien
tagctggctatgcataagacattca

SEQ ID NO: 459835 - DNA, 25 bp, Homo sapien
gttagctggctatgcataagacatt

SEQ ID NO: 459836 - DNA, 25 bp, Homo sapien
ttagttagctggctatgcataagac

SEQ ID NO: 459837 - DNA, 25 bp, Homo sapien
ggacaagtctgtactctggacaagt

SEQ ID NO: 459838 - DNA, 25 bp, Homo sapien
ggtagctgccttgagatttctgttt

SEQ ID NO: 459839 - DNA, 25 bp, Homo sapien
ttttttaggcaagaggaacagcagt

SEQ ID NO: 459840 - DNA, 25 bp, Homo sapien
tatcatgggtggaaatatagactga

SEQ ID NO: 459841 - DNA, 25 bp, Homo sapien
gacaatcacgctgatcctgctgcag

SEQ ID NO: 459842 - DNA, 25 bp, Homo sapien
tttctagagactaagggcaccaccg

SEQ ID NO: 459843 - DNA, 25 bp, Homo sapien
tatgagtccctccacgtttctagag

SEQ ID NO: 459844 - DNA, 25 bp, Homo sapien
ttgggcccgccgaatggtcagcctt

SEQ ID NO: 459845 - DNA, 25 bp, Homo sapien
tggaggacaggtggctgtagtcgga

SEQ ID NO: 459846 - DNA, 25 bp, Homo sapien
tgctcgtggaggacaggtggctgta

SEQ ID NO: 459847 - DNA, 25 bp, Homo sapien
cgtggaggacaggtggctgtagtcg

SEQ ID NO: 459848 - DNA, 25 bp, Homo sapien
ctcgtggaggacaggtggctgtagt

SEQ ID NO: 459849 - DNA, 25 bp, Homo sapien
ttctgtatgatcagattctccagga

SEQ ID NO: 459850 - DNA, 25 bp, Homo sapien
cctagaagcatccacaagcagctga

SEQ ID NO: 459851 - DNA, 25 bp, Homo sapien
tctttggcaaagatgctttggtgat

SEQ ID NO: 459852 - DNA, 25 bp, Homo sapien
gataaagcctgggttacatccttca

SEQ ID NO: 459853 - DNA, 25 bp, Homo sapien
tctgagttactggagggacagagca

SEQ ID NO: 459854 - DNA, 25 bp, Homo sapien
ttctctcaataagagtgatccaggg

SEQ ID NO: 459855 - DNA, 25 bp, Homo sapien
tgcttcgagggcagttcagacacag

SEQ ID NO: 459856 - DNA, 25 bp, Homo sapien
gaaagcagtagggaggatgtcgaca

SEQ ID NO: 459857 - DNA, 25 bp, Homo sapien
cagaggtttcatttgccacttccat

SEQ ID NO: 459858 - DNA, 25 bp, Homo sapien
attccttcatctcagaggtttcatt

SEQ ID NO: 459859 - DNA, 25 bp, Homo sapien
tcagcttcagtagattccttcatct

SEQ ID NO: 459860 - DNA, 25 bp, Homo sapien
acgttcagcttcagtagattccttc

SEQ ID NO: 459861 - DNA, 25 bp, Homo sapien
aggttgaataaacacttatttgcat

SEQ ID NO: 459862 - DNA, 25 bp, Homo sapien
ccgacgaggccaacagactgtgaag

SEQ ID NO: 459863 - DNA, 25 bp, Homo sapien
gctgtgcgccattccagtgccaaaa

SEQ ID NO: 459864 - DNA, 25 bp, Homo sapien
ttgacggaataaactgctgtgcgcc

SEQ ID NO: 459865 - DNA, 25 bp, Homo sapien
ttactgccaacactgcagtgcccag

SEQ ID NO: 459866 - DNA, 25 bp, Homo sapien
tgtcaccgtgtgtacagtaaaggaa

SEQ ID NO: 459867 - DNA, 25 bp, Homo sapien
ggcatccgccaggtggagaatccat

SEQ ID NO: 459868 - DNA, 25 bp, Homo sapien
caggcaacatggcatccgccaggtg

SEQ ID NO: 459869 - DNA, 25 bp, Homo sapien
aggtatgttcaacctggaggctcca

SEQ ID NO: 459870 - DNA, 25 bp, Homo sapien
gaacgcagcttcaagctgtcatcag

SEQ ID NO: 459871 - DNA, 25 bp, Homo sapien
gaacacagaacgcagcttcaagctg

SEQ ID NO: 459872 - DNA, 25 bp, Homo sapien
gcttcaagctgtcatcaggtgttag

SEQ ID NO: 459873 - DNA, 25 bp, Homo sapien
gcaaagaacacagaacgcagcttca

SEQ ID NO: 459874 - DNA, 25 bp, Homo sapien
gcctggcttctttcggtttggttga

SEQ ID NO: 459875 - DNA, 25 bp, Homo sapien
gcagaagtacagttgacgcaaaagt

SEQ ID NO: 459876 - DNA, 25 bp, Homo sapien
gaacattcatgacacgatcggcaga

SEQ ID NO: 459877 - DNA, 25 bp, Homo sapien
tcccaacagtggagacatgcgactt

SEQ ID NO: 459878 - DNA, 25 bp, Homo sapien
tctctggcggaacacctgaaactgt

SEQ ID NO: 459879 - DNA, 25 bp, Homo sapien
ccaagcatgaagttgactgtttaac

SEQ ID NO: 459880 - DNA, 25 bp, Homo sapien
ccctgtgatctctggcggaacacct

SEQ ID NO: 459881 - DNA, 25 bp, Homo sapien
catgaagttgactgtttaacttggc

SEQ ID NO: 459882 - DNA, 25 bp, Homo sapien
aaagcagggtgagaccatgactgcc

SEQ ID NO: 459883 - DNA, 25 bp, Homo sapien
gctgaggttagggtggaaggaaagc

SEQ ID NO: 459884 - DNA, 25 bp, Homo sapien
agcagggtgagaccatgactgccca

SEQ ID NO: 459885 - DNA, 25 bp, Homo sapien
aggaaagcagggtgagaccatgact

SEQ ID NO: 459886 - DNA, 25 bp, Homo sapien
ggtcctgcgcctcttcaacggaaag

SEQ ID NO: 459887 - DNA, 25 bp, Homo sapien
gatttccttgccgtagtgcacgggc

SEQ ID NO: 459888 - DNA, 25 bp, Homo sapien
cagtagacggtgaagcgcacgattt

SEQ ID NO: 459889 - DNA, 25 bp, Homo sapien
tccggagaatcagctggtagaacct

SEQ ID NO: 459890 - DNA, 25 bp, Homo sapien
agacagacaggcgtccccccagtac

SEQ ID NO: 459891 - DNA, 25 bp, Homo sapien
ctcaggtcccctaaacagacagaca

SEQ ID NO: 459892 - DNA, 25 bp, Homo sapien
ttctcaggtcccctaaacagacaga

SEQ ID NO: 459893 - DNA, 25 bp, Homo sapien
ctggtttctcaggtcccctaaacag

SEQ ID NO: 459894 - DNA, 25 bp, Homo sapien
cctgtatggccactttgacttcgac

SEQ ID NO: 459895 - DNA, 25 bp, Homo sapien
agtcatgggtgtttagtggatgccc

SEQ ID NO: 459896 - DNA, 25 bp, Homo sapien
gcaaattccctagcttataagctca

SEQ ID NO: 459897 - DNA, 25 bp, Homo sapien
tgacttcgactaggagctgggcaga

SEQ ID NO: 459898 - DNA, 25 bp, Homo sapien
gaagctaaagagtttaccatggaag

SEQ ID NO: 459899 - DNA, 25 bp, Homo sapien
caagtgatcacaggatttcaacaac

SEQ ID NO: 459900 - DNA, 25 bp, Homo sapien
ctagggcagcctacttaaaatgaat

SEQ ID NO: 459901 - DNA, 25 bp, Homo sapien
ccttccaagcttagtgaaaccagaa

SEQ ID NO: 459902 - DNA, 25 bp, Homo sapien
taggaccagatgtaggatgttctgt

SEQ ID NO: 459903 - DNA, 25 bp, Homo sapien
caggtaggaccagatgtaggatgtt

SEQ ID NO: 459904 - DNA, 25 bp, Homo sapien
ctcaggtaggaccagatgtaggatg

SEQ ID NO: 459905 - DNA, 25 bp, Homo sapien
ggtaggaccagatgtaggatgttct

SEQ ID NO: 459906 - DNA, 25 bp, Homo sapien
tgattcaagtaaccacaatctttgc

SEQ ID NO: 459907 - DNA, 25 bp, Homo sapien
ttcgggtagccaagtgtgaaaattg

SEQ ID NO: 459908 - DNA, 25 bp, Homo sapien
tctttgcctcttaaggcaatgtccc

SEQ ID NO: 459909 - DNA, 25 bp, Homo sapien
aaaattgagacgtcagaggtagagg

SEQ ID NO: 459910 - DNA, 25 bp, Homo sapien
tcaaggtgacctttctgacgagaaa

SEQ ID NO: 459911 - DNA, 25 bp, Homo sapien
gaggcctggctgtagtctgaaccag

SEQ ID NO: 459912 - DNA, 25 bp, Homo sapien
tatagttctggtgcttaaagccaaa

SEQ ID NO: 459913 - DNA, 25 bp, Homo sapien
gaaccagttatctgacatgtgccaa

SEQ ID NO: 459914 - DNA, 25 bp, Homo sapien
atgcagctcggaaccctgacggctg

SEQ ID NO: 459915 - DNA, 25 bp, Homo sapien
tcggaaccctgacggctgccccggc

SEQ ID NO: 459916 - DNA, 25 bp, Homo sapien
cagacatctatggcccagggaagat

SEQ ID NO: 459917 - DNA, 25 bp, Homo sapien
agggaagatgcagctcggaaccctg

SEQ ID NO: 459918 - DNA, 25 bp, Homo sapien
aaagtggccgtgtcttaggtggtgg

SEQ ID NO: 459919 - DNA, 25 bp, Homo sapien
aaaagtggccgtgtcttaggtggtg

SEQ ID NO: 459920 - DNA, 25 bp, Homo sapien
aagtggccgtgtcttaggtggtggt

SEQ ID NO: 459921 - DNA, 25 bp, Homo sapien
caaatgggatgaaatcagtttgagg

SEQ ID NO: 459922 - DNA, 25 bp, Homo sapien
ttgagacttgtatttttgatggtct

SEQ ID NO: 459923 - DNA, 25 bp, Homo sapien
gctgtgtatcagacatcaggtgcaa

SEQ ID NO: 459924 - DNA, 25 bp, Homo sapien
acatcaggtgcaaatgggatgaaat

SEQ ID NO: 459925 - DNA, 25 bp, Homo sapien
gtagctggcatagacgaaatgaccc

SEQ ID NO: 459926 - DNA, 25 bp, Homo sapien
tgtcacttatacctgccgccggaat

SEQ ID NO: 459927 - DNA, 25 bp, Homo sapien
cccaagcgggagtaataaggcaagc

SEQ ID NO: 459928 - DNA, 25 bp, Homo sapien
aaatgaccctgtgcaggcaatgcag

SEQ ID NO: 459929 - DNA, 25 bp, Homo sapien
tggcttgtagccctgtgttccaggg

SEQ ID NO: 459930 - DNA, 25 bp, Homo sapien
gtgtggtttactcacaggcacagag

SEQ ID NO: 459931 - DNA, 25 bp, Homo sapien
catttttggtgtggtttactcacag

SEQ ID NO: 459932 - DNA, 25 bp, Homo sapien
gtggttggcttgtagccctgtgttc

SEQ ID NO: 459933 - DNA, 25 bp, Homo sapien
ggagctgttcaaagagtttgctgac

SEQ ID NO: 459934 - DNA, 25 bp, Homo sapien
aaggagctgttcaaagagtttgctg

SEQ ID NO: 459935 - DNA, 25 bp, Homo sapien
ctgaaaggagctgttcaaagagttt

SEQ ID NO: 459936 - DNA, 25 bp, Homo sapien
gaaaggagctgttcaaagagtttgc

SEQ ID NO: 459937 - DNA, 25 bp, Homo sapien
tgtccccctccagtactgtacctgt

SEQ ID NO: 459938 - DNA, 25 bp, Homo sapien
ttgtccccctccagtactgtacctg

SEQ ID NO: 459939 - DNA, 25 bp, Homo sapien
gctttgtgagatctagagcctggac

SEQ ID NO: 459940 - DNA, 25 bp, Homo sapien
tgagccatgccacagaacaatcgga

SEQ ID NO: 459941 - DNA, 25 bp, Homo sapien
ggagggtgtccctccaaagccacac

SEQ ID NO: 459942 - DNA, 25 bp, Homo sapien
tccctatgccgtggctctcatgagc

SEQ ID NO: 459943 - DNA, 25 bp, Homo sapien
tggagatgaaagtaggtttttgatc

SEQ ID NO: 459944 - DNA, 25 bp, Homo sapien
gatgaaagtaggtttttgatctggt

SEQ ID NO: 459945 - DNA, 25 bp, Homo sapien
gagatgaaagtaggtttttgatctg

SEQ ID NO: 459946 - DNA, 25 bp, Homo sapien
tgaaagtaggtttttgatctggtgt

SEQ ID NO: 459947 - DNA, 25 bp, Homo sapien
tgcagatgtctgaggccagtcgatg

SEQ ID NO: 459948 - DNA, 25 bp, Homo sapien
tcgatgctggtcatgtggcactaac

SEQ ID NO: 459949 - DNA, 25 bp, Homo sapien
tgctgagctagttgcctgggtaaat

SEQ ID NO: 459950 - DNA, 25 bp, Homo sapien
tccagaccacctcgggaagatagtg

SEQ ID NO: 459951 - DNA, 25 bp, Homo sapien
caaagggaccaaggaccattcaggc

SEQ ID NO: 459952 - DNA, 25 bp, Homo sapien
tcttcagggatgtggtgaggtccag

SEQ ID NO: 459953 - DNA, 25 bp, Homo sapien
gcaggggagaagaagcgtcttcagg

SEQ ID NO: 459954 - DNA, 25 bp, Homo sapien
attcaggccctttttccatcccatg

SEQ ID NO: 459955 - DNA, 25 bp, Homo sapien
gctcatgtagcagagggttcactcg

SEQ ID NO: 459956 - DNA, 25 bp, Homo sapien
tcttgttaatcccatcactctccag

SEQ ID NO: 459957 - DNA, 25 bp, Homo sapien
caagcgagggttcccctgagaggca

SEQ ID NO: 459958 - DNA, 25 bp, Homo sapien
ggttcactcgaccaagcgagggttc

SEQ ID NO: 459959 - DNA, 25 bp, Homo sapien
tacaggataatggaaacatggacaa

SEQ ID NO: 459960 - DNA, 25 bp, Homo sapien
ctacaggataatggaaacatggaca

SEQ ID NO: 459961 - DNA, 25 bp, Homo sapien
tttgagtttccgaggatgtacaagg

SEQ ID NO: 459962 - DNA, 25 bp, Homo sapien
agtttccgaggatgtacaaggtgaa

SEQ ID NO: 459963 - DNA, 25 bp, Homo sapien
tttccgaggatgtacaaggtgaagg

SEQ ID NO: 459964 - DNA, 25 bp, Homo sapien
cagggtttgagtttccgaggatgta

SEQ ID NO: 459965 - DNA, 25 bp, Homo sapien
gacatttttacaattgctataaact

SEQ ID NO: 459966 - DNA, 25 bp, Homo sapien
gttactggtaagtcatcagtctcca

SEQ ID NO: 459967 - DNA, 25 bp, Homo sapien
cagtgttgttactggtaagtcatca

SEQ ID NO: 459968 - DNA, 25 bp, Homo sapien
taaacttgcagtgttgttactggta

SEQ ID NO: 459969 - DNA, 25 bp, Homo sapien
tattcctgagtgtcactatgagggc

SEQ ID NO: 459970 - DNA, 25 bp, Homo sapien
cagagcaggcactctataaattggc

SEQ ID NO: 459971 - DNA, 25 bp, Homo sapien
gatgataatactcaagcttcctgcc

SEQ ID NO: 459972 - DNA, 25 bp, Homo sapien
taactacagtagcagatgctgtggc

SEQ ID NO: 459973 - DNA, 25 bp, Homo sapien
tcttcagccgttctcattactcctt

SEQ ID NO: 459974 - DNA, 25 bp, Homo sapien
atttcttcagccgttctcattactc

SEQ ID NO: 459975 - DNA, 25 bp, Homo sapien
cgttctcattactcctttccattgc

SEQ ID NO: 459976 - DNA, 25 bp, Homo sapien
agccgttctcattactcctttccat

SEQ ID NO: 459977 - DNA, 25 bp, Homo sapien
tcttattcagttggattgtgcatct

SEQ ID NO: 459978 - DNA, 25 bp, Homo sapien
ggattgtgcatctctcttgaggctt

SEQ ID NO: 459979 - DNA, 25 bp, Homo sapien
gtagccctctgataacttggtgttc

SEQ ID NO: 459980 - DNA, 25 bp, Homo sapien
gcctctgtagccctctgataacttg

SEQ ID NO: 459981 - DNA, 25 bp, Homo sapien
actgtttcccatttagcccggccat

SEQ ID NO: 459982 - DNA, 25 bp, Homo sapien
catctaggcatagacactgtttccc

SEQ ID NO: 459983 - DNA, 25 bp, Homo sapien
aagacaagagacaatcagtgcgggc

SEQ ID NO: 459984 - DNA, 25 bp, Homo sapien
gactcctgtcaattgctttctgtac

SEQ ID NO: 459985 - DNA, 25 bp, Homo sapien
gctgtgtaatgagcccgtgatggcc

SEQ ID NO: 459986 - DNA, 25 bp, Homo sapien
tgggcaacgggttcacattgagaaa

SEQ ID NO: 459987 - DNA, 25 bp, Homo sapien
tcactaaggatgctggccatgggca

SEQ ID NO: 459988 - DNA, 25 bp, Homo sapien
taagaatggacaaagcccgtacacg

SEQ ID NO: 459989 - DNA, 25 bp, Homo sapien
tgaaggttggagctcctttatgtgc

SEQ ID NO: 459990 - DNA, 25 bp, Homo sapien
gaaggttggagctcctttatgtgct

SEQ ID NO: 459991 - DNA, 25 bp, Homo sapien
catatgggcggatctggtggtattc

SEQ ID NO: 459992 - DNA, 25 bp, Homo sapien
gctttgaagagagatggtacccggt

SEQ ID NO: 459993 - DNA, 25 bp, Homo sapien
tctttttcactggagggtgcccacg

SEQ ID NO: 459994 - DNA, 25 bp, Homo sapien
cggaatttgaggctgatatggcatt

SEQ ID NO: 459995 - DNA, 25 bp, Homo sapien
catgacgaaggtaggaatccagaca

SEQ ID NO: 459996 - DNA, 25 bp, Homo sapien
acatgacgaaggtaggaatccagac

SEQ ID NO: 459997 - DNA, 25 bp, Homo sapien
cacatgacgaaggtaggaatccaga

SEQ ID NO: 459998 - DNA, 25 bp, Homo sapien
atgacgaaggtaggaatccagacaa

SEQ ID NO: 459999 - DNA, 25 bp, Homo sapien
caatgcgcatttgcaccagggtctg

SEQ ID NO: 460000 - DNA, 25 bp, Homo sapien
cagtaacccgtttctgttgtgcaga

SEQ ID NO: 460001 - DNA, 25 bp, Homo sapien
acctctcttccaatgcgcatttgca

SEQ ID NO: 460002 - DNA, 25 bp, Homo sapien
acccgtttctgttgtgcagaactgg

SEQ ID NO: 460003 - DNA, 25 bp, Homo sapien
actgtgtacaggaaagggagctgcc

SEQ ID NO: 460004 - DNA, 25 bp, Homo sapien
agctgccgcctgctgactgatcctg

SEQ ID NO: 460005 - DNA, 25 bp, Homo sapien
gctgactgatcctgcggatcctgca

SEQ ID NO: 460006 - DNA, 25 bp, Homo sapien
gcagctttgccctgtcatatcccag

SEQ ID NO: 460007 - DNA, 25 bp, Homo sapien
tgatagacactgtttgtaaatgtta

SEQ ID NO: 460008 - DNA, 25 bp, Homo sapien
ctgatagacactgtttgtaaatgtt

SEQ ID NO: 460009 - DNA, 25 bp, Homo sapien
cagaaagagttttcagtctgaggag

SEQ ID NO: 460010 - DNA, 25 bp, Homo sapien
gcagagctttgaggagcaccagaaa

SEQ ID NO: 460011 - DNA, 25 bp, Homo sapien
ttcagtctgaggagccatctccgag

SEQ ID NO: 460012 - DNA, 25 bp, Homo sapien
ggagcaccagaaagagttttcagtc

SEQ ID NO: 460013 - DNA, 25 bp, Homo sapien
gaaacttcttatgcaccctttgtgc

SEQ ID NO: 460014 - DNA, 25 bp, Homo sapien
ggaaacttcttatgcaccctttgtg

SEQ ID NO: 460015 - DNA, 25 bp, Homo sapien
taggaaacttcttatgcaccctttg

SEQ ID NO: 460016 - DNA, 25 bp, Homo sapien
ctctgccaggtttaggaaacttctt

SEQ ID NO: 460017 - DNA, 25 bp, Homo sapien
caaacaaaacaaggacttgcttctc

SEQ ID NO: 460018 - DNA, 25 bp, Homo sapien
tatggcttggtacagcagtgctcgg

SEQ ID NO: 460019 - DNA, 25 bp, Homo sapien
ggtgctgttggctcgtccggcaaat

SEQ ID NO: 460020 - DNA, 25 bp, Homo sapien
ctcggcaaaggagtggaatgacgtt

SEQ ID NO: 460021 - DNA, 25 bp, Homo sapien
gcaggcctgtgtccacgtctgtctc

SEQ ID NO: 460022 - DNA, 25 bp, Homo sapien
gagaccacagacaggtccgatgagg

SEQ ID NO: 460023 - DNA, 25 bp, Homo sapien
gtccgatgaggacagccgcaggcct

SEQ ID NO: 460024 - DNA, 25 bp, Homo sapien
tgggtgcagaatatgcagagaccac

SEQ ID NO: 460025 - DNA, 25 bp, Homo sapien
tgctgcatctttcggaggggagggg

SEQ ID NO: 460026 - DNA, 25 bp, Homo sapien
cagtggctgctgcatctttcggagg

SEQ ID NO: 460027 - DNA, 25 bp, Homo sapien
gggcagtggtccctccctggaatcc

SEQ ID NO: 460028 - DNA, 25 bp, Homo sapien
aatccttgtgagctgcccagtggct

SEQ ID NO: 460029 - DNA, 25 bp, Homo sapien
cacgagctgtcgctgaggagctgga

SEQ ID NO: 460030 - DNA, 25 bp, Homo sapien
ggagcagcacgagctgtcgctgagg

SEQ ID NO: 460031 - DNA, 25 bp, Homo sapien
ctgggggagcagcacgagctgtcgc

SEQ ID NO: 460032 - DNA, 25 bp, Homo sapien
gcacgagctgtcgctgaggagctgg

SEQ ID NO: 460033 - DNA, 25 bp, Homo sapien
ctccatcagtctgcttgactttggg

SEQ ID NO: 460034 - DNA, 25 bp, Homo sapien
tgactttgggggtatcgcatgggag

SEQ ID NO: 460035 - DNA, 25 bp, Homo sapien
tctgcttgactttgggggtatcgca

SEQ ID NO: 460036 - DNA, 25 bp, Homo sapien
tggtggcatgtctccatcagtctgc

SEQ ID NO: 460037 - DNA, 25 bp, Homo sapien
aggcaaatgtgctacgggctcctgg

SEQ ID NO: 460038 - DNA, 25 bp, Homo sapien
tgtgtctctagagatataccacccc

SEQ ID NO: 460039 - DNA, 25 bp, Homo sapien
aagaatgtggtgtgctcagtggcca

SEQ ID NO: 460040 - DNA, 25 bp, Homo sapien
tttcgagaacaagagcagagggcat

SEQ ID NO: 460041 - DNA, 25 bp, Homo sapien
aattcaggtagtggagtggtcttca

SEQ ID NO: 460042 - DNA, 25 bp, Homo sapien
gatatacgtttacttctcaagctga

SEQ ID NO: 460043 - DNA, 25 bp, Homo sapien
cagtgcttaaacatccctagggcca

SEQ ID NO: 460044 - DNA, 25 bp, Homo sapien
gaagcccctcatccattccagtgaa

SEQ ID NO: 460045 - DNA, 25 bp, Homo sapien
gataataaactatgacccttgggcc

SEQ ID NO: 460046 - DNA, 25 bp, Homo sapien
tcgtgttggaaaggactctgaggct

SEQ ID NO: 460047 - DNA, 25 bp, Homo sapien
gattaattcaaggagcaccagcctg

SEQ ID NO: 460048 - DNA, 25 bp, Homo sapien
tctgtgtgatcaaaatgctggctaa

SEQ ID NO: 460049 - DNA, 25 bp, Homo sapien
tggtatcatcacctctgaattattt

SEQ ID NO: 460050 - DNA, 25 bp, Homo sapien
tgttcattggaggtggtatcatcac

SEQ ID NO: 460051 - DNA, 25 bp, Homo sapien
tcctcatcagctattgactgaatca

SEQ ID NO: 460052 - DNA, 25 bp, Homo sapien
catcagctattgactgaatcacatt

SEQ ID NO: 460053 - DNA, 25 bp, Homo sapien
ggtcactcagtttggtagattggac

SEQ ID NO: 460054 - DNA, 25 bp, Homo sapien
tatgatgtcctttagggtcactcag

SEQ ID NO: 460055 - DNA, 25 bp, Homo sapien
tcctaggcgagcatgtgagcacact

SEQ ID NO: 460056 - DNA, 25 bp, Homo sapien
gggcgggtccagagttgtactctaa

SEQ ID NO: 460057 - DNA, 25 bp, Homo sapien
catgtggtctacagtgggcatcctc

SEQ ID NO: 460058 - DNA, 25 bp, Homo sapien
tctccgtggagggactgccatttcc

SEQ ID NO: 460059 - DNA, 25 bp, Homo sapien
ccagagagtattggaagcccttctg

SEQ ID NO: 460060 - DNA, 25 bp, Homo sapien
aaacgagtcaggatcctccagagag

SEQ ID NO: 460061 - DNA, 25 bp, Homo sapien
atgaatctattcagatgcctcttgg

SEQ ID NO: 460062 - DNA, 25 bp, Homo sapien
gagagggtgactattcagctattcc

SEQ ID NO: 460063 - DNA, 25 bp, Homo sapien
cttggctgacagtttggagcactaa

SEQ ID NO: 460064 - DNA, 25 bp, Homo sapien
tggtcactgataccggtctgagggt

SEQ ID NO: 460065 - DNA, 25 bp, Homo sapien
ctgaaatgaccaaatgaccaaagag

SEQ ID NO: 460066 - DNA, 25 bp, Homo sapien
aatgaccaaatgaccaaagaggtca

SEQ ID NO: 460067 - DNA, 25 bp, Homo sapien
gaaatgaccaaatgaccaaagaggt

SEQ ID NO: 460068 - DNA, 25 bp, Homo sapien
tgaaatgaccaaatgaccaaagagg

SEQ ID NO: 460069 - DNA, 25 bp, Homo sapien
agctgcagccagttcaccatttcca

SEQ ID NO: 460070 - DNA, 25 bp, Homo sapien
caagggtaaagctggccagagggaa

SEQ ID NO: 460071 - DNA, 25 bp, Homo sapien
aagggtaaagctggccagagggaat

SEQ ID NO: 460072 - DNA, 25 bp, Homo sapien
aaagtgtggctgaatgtgcaagaga

SEQ ID NO: 460073 - DNA, 25 bp, Homo sapien
tggctgaatgtgcaagagaggccag

SEQ ID NO: 460074 - DNA, 25 bp, Homo sapien
caggaagctgaaaattcaggtctag

SEQ ID NO: 460075 - DNA, 25 bp, Homo sapien
ggaagctgaaaattcaggtctagca

SEQ ID NO: 460076 - DNA, 25 bp, Homo sapien
tgtttttaccagtagagtgtgaacc

SEQ ID NO: 460077 - DNA, 25 bp, Homo sapien
taccaggagaattttggcagcagag

SEQ ID NO: 460078 - DNA, 25 bp, Homo sapien
tccagtggccctgatggctgatacc

SEQ ID NO: 460079 - DNA, 25 bp, Homo sapien
gggacagacagctatgaggccttct

SEQ ID NO: 460080 - DNA, 25 bp, Homo sapien
ctcccctcctgcaggattgttcttg

SEQ ID NO: 460081 - DNA, 25 bp, Homo sapien
tgtccactaagagttccttgcctcc

SEQ ID NO: 460082 - DNA, 25 bp, Homo sapien
ctagtgtccactaagagttccttgc

SEQ ID NO: 460083 - DNA, 25 bp, Homo sapien
cctcctgcaggattgttcttgtttg

SEQ ID NO: 460084 - DNA, 25 bp, Homo sapien
ggtcctccaaatggcctggcaggga

SEQ ID NO: 460085 - DNA, 25 bp, Homo sapien
catggtggctgacagctcttaacac

SEQ ID NO: 460086 - DNA, 25 bp, Homo sapien
cagggagggcagattaacacatggt

SEQ ID NO: 460087 - DNA, 25 bp, Homo sapien
attctgtagaagtggcaggagcccc

SEQ ID NO: 460088 - DNA, 25 bp, Homo sapien
ccggcagtgagcgtgttactgtaaa

SEQ ID NO: 460089 - DNA, 25 bp, Homo sapien
gtgttactgtaaaaagtgtggccca

SEQ ID NO: 460090 - DNA, 25 bp, Homo sapien
tctggagattcatgccggcagtgag

SEQ ID NO: 460091 - DNA, 25 bp, Homo sapien
gattcatgccggcagtgagcgtgtt

SEQ ID NO: 460092 - DNA, 25 bp, Homo sapien
gtggtctccactggcagagatcttg

SEQ ID NO: 460093 - DNA, 25 bp, Homo sapien
ctccactggcagagatcttggtctc

SEQ ID NO: 460094 - DNA, 25 bp, Homo sapien
tccagtggtctccactggcagagat

SEQ ID NO: 460095 - DNA, 25 bp, Homo sapien
tctcggttgatgcatccagtggtct

SEQ ID NO: 460096 - DNA, 25 bp, Homo sapien
ctgtcagggactggcccatctcccc

SEQ ID NO: 460097 - DNA, 25 bp, Homo sapien
ctcccccttggctttggctgccact

SEQ ID NO: 460098 - DNA, 25 bp, Homo sapien
ccccttggctttggctgccactcac

SEQ ID NO: 460099 - DNA, 25 bp, Homo sapien
ccatctcccccttggctttggctgc

SEQ ID NO: 460100 - DNA, 25 bp, Homo sapien
tttcaagaacagtggacttcccgga

SEQ ID NO: 460101 - DNA, 25 bp, Homo sapien
cggaacctctttgttgggattggca

SEQ ID NO: 460102 - DNA, 25 bp, Homo sapien
ttacacctttagtcaaagctagagc

SEQ ID NO: 460103 - DNA, 25 bp, Homo sapien
gggattggcaatgcacatagtagta

SEQ ID NO: 460104 - DNA, 25 bp, Homo sapien
ctggacacaatgtctgtgtgaatag

SEQ ID NO: 460105 - DNA, 25 bp, Homo sapien
tggacacaatgtctgtgtgaatagc

SEQ ID NO: 460106 - DNA, 25 bp, Homo sapien
ggacacaatgtctgtgtgaatagca

SEQ ID NO: 460107 - DNA, 25 bp, Homo sapien
aggctgttcctggaacagtgcagca

SEQ ID NO: 460108 - DNA, 25 bp, Homo sapien
attttccaggctgttcctggaacag

SEQ ID NO: 460109 - DNA, 25 bp, Homo sapien
gctgttcctggaacagtgcagcagg

SEQ ID NO: 460110 - DNA, 25 bp, Homo sapien
tgttcctggaacagtgcagcagggc

SEQ ID NO: 460111 - DNA, 25 bp, Homo sapien
tgcaacacggccctctggtacttca

SEQ ID NO: 460112 - DNA, 25 bp, Homo sapien
atagctgcaacacggccctctggta

SEQ ID NO: 460113 - DNA, 25 bp, Homo sapien
ctgctgtcccggctgatagctgcaa

SEQ ID NO: 460114 - DNA, 25 bp, Homo sapien
aggaaggcaacggcaaagcgctgcc

SEQ ID NO: 460115 - DNA, 25 bp, Homo sapien
tccactgataactttgcttgttggg

SEQ ID NO: 460116 - DNA, 25 bp, Homo sapien
gtcacattgaggaattccactgata

SEQ ID NO: 460117 - DNA, 25 bp, Homo sapien
cacattgaggaattccactgataac

SEQ ID NO: 460118 - DNA, 25 bp, Homo sapien
cactgataactttgcttgttgggct

SEQ ID NO: 460119 - DNA, 25 bp, Homo sapien
gaagctggcgattgccgtctctgcc

SEQ ID NO: 460120 - DNA, 25 bp, Homo sapien
gcgatgtctctaccactcggtccaa

SEQ ID NO: 460121 - DNA, 25 bp, Homo sapien
tgagccacgtactcacagacttttg

SEQ ID NO: 460122 - DNA, 25 bp, Homo sapien
tcggtccaaattcctggagcctgga

SEQ ID NO: 460123 - DNA, 25 bp, Homo sapien
caagtacaaatgcagtgcttggatg

SEQ ID NO: 460124 - DNA, 25 bp, Homo sapien
agccaagtacaaatgcagtgcttgg

SEQ ID NO: 460125 - DNA, 25 bp, Homo sapien
ctacagccaagtacaaatgcagtgc

SEQ ID NO: 460126 - DNA, 25 bp, Homo sapien
acagccaagtacaaatgcagtgctt

SEQ ID NO: 460127 - DNA, 25 bp, Homo sapien
gcaaggccactgagcacgatggtgc

SEQ ID NO: 460128 - DNA, 25 bp, Homo sapien
cgatggtgcctattttaggtaaagg

SEQ ID NO: 460129 - DNA, 25 bp, Homo sapien
tagaagtttacaagcaaggccactg

SEQ ID NO: 460130 - DNA, 25 bp, Homo sapien
cctcctgtagaagtttacaagcaag

SEQ ID NO: 460131 - DNA, 25 bp, Homo sapien
ggtgatcaggaaaggcggcatggag

SEQ ID NO: 460132 - DNA, 25 bp, Homo sapien
tggccatttgctcggaggcagcaag

SEQ ID NO: 460133 - DNA, 25 bp, Homo sapien
tttgctcggaggcagcaagagtgaa

SEQ ID NO: 460134 - DNA, 25 bp, Homo sapien
catttgctcggaggcagcaagagtg

SEQ ID NO: 460135 - DNA, 25 bp, Homo sapien
ttcgtctcatttctacacgcggcca

SEQ ID NO: 460136 - DNA, 25 bp, Homo sapien
aagtgcaaactcagtcttcagcaat

SEQ ID NO: 460137 - DNA, 25 bp, Homo sapien
gccagctgctgaccagtgctccctt

SEQ ID NO: 460138 - DNA, 25 bp, Homo sapien
gagatgacaaagttcgtctcatttc

SEQ ID NO: 460139 - DNA, 25 bp, Homo sapien
gtttgtaagtgcctccagcactgcc

SEQ ID NO: 460140 - DNA, 25 bp, Homo sapien
aaattcaagggtcaccaccatccca

SEQ ID NO: 460141 - DNA, 25 bp, Homo sapien
tatgctagggtgtgtcaaatgaaac

SEQ ID NO: 460142 - DNA, 25 bp, Homo sapien
ctggcacctaggaaggcactatgct

SEQ ID NO: 460143 - DNA, 25 bp, Homo sapien
caagttgggataagttgacaatggt

SEQ ID NO: 460144 - DNA, 25 bp, Homo sapien
tgagtgtgagtaaggagttagcaca

SEQ ID NO: 460145 - DNA, 25 bp, Homo sapien
taaggagttagcacaacctccagca

SEQ ID NO: 460146 - DNA, 25 bp, Homo sapien
tccagcacacattgcattgagatgg

SEQ ID NO: 460147 - DNA, 25 bp, Homo sapien
ggtgggtagtgtggcataaacagca

SEQ ID NO: 460148 - DNA, 25 bp, Homo sapien
taaacagcatgcaagaaatctttca

SEQ ID NO: 460149 - DNA, 25 bp, Homo sapien
cagcatgcaagaaatctttcaccct

SEQ ID NO: 460150 - DNA, 25 bp, Homo sapien
gtagtgtggcataaacagcatgcaa

SEQ ID NO: 460151 - DNA, 25 bp, Homo sapien
gttcccacttgcacaaaaaggctgc

SEQ ID NO: 460152 - DNA, 25 bp, Homo sapien
gaggccccttcgctagtctggatgg

SEQ ID NO: 460153 - DNA, 25 bp, Homo sapien
ggctcactgaggtcggctggttcca

SEQ ID NO: 460154 - DNA, 25 bp, Homo sapien
tgttagcccaccaggagacgtgctc

SEQ ID NO: 460155 - DNA, 25 bp, Homo sapien
gcacaagctgagcaaatgctgcact

SEQ ID NO: 460156 - DNA, 25 bp, Homo sapien
ggtgctcacaagcacaagctgagca

SEQ ID NO: 460157 - DNA, 25 bp, Homo sapien
atgctgcactgacttgctcccacgg

SEQ ID NO: 460158 - DNA, 25 bp, Homo sapien
gctgagcaaatgctgcactgacttg

SEQ ID NO: 460159 - DNA, 25 bp, Homo sapien
tggaggagaatctctttcgccaagt

SEQ ID NO: 460160 - DNA, 25 bp, Homo sapien
aatctctttcgccaagtgccttgga

SEQ ID NO: 460161 - DNA, 25 bp, Homo sapien
ggagaatctctttcgccaagtgcct

SEQ ID NO: 460162 - DNA, 25 bp, Homo sapien
ctttcgccaagtgccttggaaggac

SEQ ID NO: 460163 - DNA, 25 bp, Homo sapien
gacctgaaggacgaggccataggca

SEQ ID NO: 460164 - DNA, 25 bp, Homo sapien
aggccataggcacaggtgaaaggca

SEQ ID NO: 460165 - DNA, 25 bp, Homo sapien
cgtagttgacctcggtcgtttggtg

SEQ ID NO: 460166 - DNA, 25 bp, Homo sapien
gacctcggtcgtttggtgcatcatg

SEQ ID NO: 460167 - DNA, 25 bp, Homo sapien
aggtgtggctcgatgtggctcaggg

SEQ ID NO: 460168 - DNA, 25 bp, Homo sapien
gtgtctttgtcacggggcagcacca

SEQ ID NO: 460169 - DNA, 25 bp, Homo sapien
agcaccaggaacagactcactgcac

SEQ ID NO: 460170 - DNA, 25 bp, Homo sapien
tgtgaggtgtggctcgatgtggctc

SEQ ID NO: 460171 - DNA, 25 bp, Homo sapien
tggctccaccagatttatttccagc

SEQ ID NO: 460172 - DNA, 25 bp, Homo sapien
ctggctccaccagatttatttccag

SEQ ID NO: 460173 - DNA, 25 bp, Homo sapien
ttcaagttagctttgagtggatcaa

SEQ ID NO: 460174 - DNA, 25 bp, Homo sapien
tggatcaaaaagatcggtgactccc

SEQ ID NO: 460175 - DNA, 25 bp, Homo sapien
agatcggtgactccccaagaattta

SEQ ID NO: 460176 - DNA, 25 bp, Homo sapien
tcctttcaagttagctttgagtgga

SEQ ID NO: 460177 - DNA, 25 bp, Homo sapien
ctaaccacagaaaatgataaaaatg

SEQ ID NO: 460178 - DNA, 25 bp, Homo sapien
aaaatgataaaaatgtgagttgctc

SEQ ID NO: 460179 - DNA, 25 bp, Homo sapien
agaaaatgataaaaatgtgagttgc

SEQ ID NO: 460180 - DNA, 25 bp, Homo sapien
aatgataaaaatgtgagttgctcat

SEQ ID NO: 460181 - DNA, 25 bp, Homo sapien
tcttggccttgtggattgcttcaga

SEQ ID NO: 460182 - DNA, 25 bp, Homo sapien
ttcaatcttggccttgtggattgct

SEQ ID NO: 460183 - DNA, 25 bp, Homo sapien
tggccttgtggattgcttcagaaac

SEQ ID NO: 460184 - DNA, 25 bp, Homo sapien
aatcttggccttgtggattgcttca

SEQ ID NO: 460185 - DNA, 25 bp, Homo sapien
tgtgactgggtattctctgaacata

SEQ ID NO: 460186 - DNA, 25 bp, Homo sapien
actacaccacacctgaacttggggg

SEQ ID NO: 460187 - DNA, 25 bp, Homo sapien
cacacctgaacttgggggttatgga

SEQ ID NO: 460188 - DNA, 25 bp, Homo sapien
gtagatatgggtaagcagtgtgact

SEQ ID NO: 460189 - DNA, 25 bp, Homo sapien
ggaatccgagaccttttcaataaca

SEQ ID NO: 460190 - DNA, 25 bp, Homo sapien
ggttctctcaggaaatagatgaatg

SEQ ID NO: 460191 - DNA, 25 bp, Homo sapien
gatgaatggccgatctgctttaaaa

SEQ ID NO: 460192 - DNA, 25 bp, Homo sapien
aataggaatccgagaccttttcaat

SEQ ID NO: 460193 - DNA, 25 bp, Homo sapien
ctgaatcctgtcaaaaaatactgta

SEQ ID NO: 460194 - DNA, 25 bp, Homo sapien
gaatcctgtcaaaaaatactgtaat

SEQ ID NO: 460195 - DNA, 25 bp, Homo sapien
tgaatcctgtcaaaaaatactgtaa

SEQ ID NO: 460196 - DNA, 25 bp, Homo sapien
atcctgtcaaaaaatactgtaatac

SEQ ID NO: 460197 - DNA, 25 bp, Homo sapien
gatcatggtgaaatactaggaagac

SEQ ID NO: 460198 - DNA, 25 bp, Homo sapien
agcacaaggtacagcaggatgcaaa

SEQ ID NO: 460199 - DNA, 25 bp, Homo sapien
ggaagacatactctgttgatggact

SEQ ID NO: 460200 - DNA, 25 bp, Homo sapien
tctgccgcctgttctgggtgataag

SEQ ID NO: 460201 - DNA, 25 bp, Homo sapien
ggatttgaaactctcccaatactga

SEQ ID NO: 460202 - DNA, 25 bp, Homo sapien
gaagcaatcttatggcctgactcac

SEQ ID NO: 460203 - DNA, 25 bp, Homo sapien
caggataaggaaaaccacgctattc

SEQ ID NO: 460204 - DNA, 25 bp, Homo sapien
catggcctagagtatccgtactgag

SEQ ID NO: 460205 - DNA, 25 bp, Homo sapien
cacctctgttaaggttgaactttgc

SEQ ID NO: 460206 - DNA, 25 bp, Homo sapien
ggaaaaatacaccacttgaagttca

SEQ ID NO: 460207 - DNA, 25 bp, Homo sapien
taaaggccttgctttttagcattgg

SEQ ID NO: 460208 - DNA, 25 bp, Homo sapien
ttgcgtgtcaatttccctcaggttc

SEQ ID NO: 460209 - DNA, 25 bp, Homo sapien
taagacagactatacatggaaccat

SEQ ID NO: 460210 - DNA, 25 bp, Homo sapien
cgattgtgttacttccttattgagg

SEQ ID NO: 460211 - DNA, 25 bp, Homo sapien
ggcttcatgagtgtggtcctagact

SEQ ID NO: 460212 - DNA, 25 bp, Homo sapien
ggatgatgggagcacctaacctaat

SEQ ID NO: 460213 - DNA, 25 bp, Homo sapien
cctgaaattcagtctggcttagatt

SEQ ID NO: 460214 - DNA, 25 bp, Homo sapien
gcttttaacctcgagtgttgtacta

SEQ ID NO: 460215 - DNA, 25 bp, Homo sapien
tgcacaaggctacatagctaatatg

SEQ ID NO: 460216 - DNA, 25 bp, Homo sapien
taggcttttaacctcgagtgttgta

SEQ ID NO: 460217 - DNA, 25 bp, Homo sapien
accaaaatgattgctggaataggga

SEQ ID NO: 460218 - DNA, 25 bp, Homo sapien
tctaaaataagggtgtgtatcctat

SEQ ID NO: 460219 - DNA, 25 bp, Homo sapien
tagattggggagtaacatgcctttt

SEQ ID NO: 460220 - DNA, 25 bp, Homo sapien
tatcctatagagtttaccaaaatga

SEQ ID NO: 460221 - DNA, 25 bp, Homo sapien
gctaacaattcctgtgcatttttaa

SEQ ID NO: 460222 - DNA, 25 bp, Homo sapien
tacccactggtattgcactatccaa

SEQ ID NO: 460223 - DNA, 25 bp, Homo sapien
tatccaaatatgtaatcactgctaa

SEQ ID NO: 460224 - DNA, 25 bp, Homo sapien
caaaaaagataatacccactggtat

SEQ ID NO: 460225 - DNA, 25 bp, Homo sapien
tcactaggatcaggaatattcagag

SEQ ID NO: 460226 - DNA, 25 bp, Homo sapien
cagctttgaactggcacccttgtta

SEQ ID NO: 460227 - DNA, 25 bp, Homo sapien
tgggagggtgcacatttatattcat

SEQ ID NO: 460228 - DNA, 25 bp, Homo sapien
gcttggaggctataacattctcaca

SEQ ID NO: 460229 - DNA, 25 bp, Homo sapien
ctctacatttactcagatgtggtaa

SEQ ID NO: 460230 - DNA, 25 bp, Homo sapien
taagagctgtaaagatgtttgagat

SEQ ID NO: 460231 - DNA, 25 bp, Homo sapien
gatgtggtaagaatcactacattta

SEQ ID NO: 460232 - DNA, 25 bp, Homo sapien
ttgagattgctgtggtgtaataaaa

SEQ ID NO: 460233 - DNA, 25 bp, Homo sapien
gagtcttgcagcatattctcatggc

SEQ ID NO: 460234 - DNA, 25 bp, Homo sapien
gaggtgccagtataacatagcttca

SEQ ID NO: 460235 - DNA, 25 bp, Homo sapien
gccttctgccttacgtgccagagaa

SEQ ID NO: 460236 - DNA, 25 bp, Homo sapien
catagcttcactaggaaaactcttc

SEQ ID NO: 460237 - DNA, 25 bp, Homo sapien
tgtggcttagacacaggggtgtcca

SEQ ID NO: 460238 - DNA, 25 bp, Homo sapien
gaagaactgaaagaaggctactgtg

SEQ ID NO: 460239 - DNA, 25 bp, Homo sapien
ccaggggcacattggaaggaagaac

SEQ ID NO: 460240 - DNA, 25 bp, Homo sapien
ttggaaggaagaacaattgtcttgg

SEQ ID NO: 460241 - DNA, 25 bp, Homo sapien
gtactcccatgggagagagagagct

SEQ ID NO: 460242 - DNA, 25 bp, Homo sapien
agagagctcacgtgtgcgcttgtga

SEQ ID NO: 460243 - DNA, 25 bp, Homo sapien
acgtgtgcgcttgtgagcctcagca

SEQ ID NO: 460244 - DNA, 25 bp, Homo sapien
agagagagagctcacgtgtgcgctt

SEQ ID NO: 460245 - DNA, 25 bp, Homo sapien
ttttttaggatattggttcagcttc

SEQ ID NO: 460246 - DNA, 25 bp, Homo sapien
aaagcttctggcaaggtatattttt

SEQ ID NO: 460247 - DNA, 25 bp, Homo sapien
agcttctggcaaggtatatttttta

SEQ ID NO: 460248 - DNA, 25 bp, Homo sapien
tttttaggatattggttcagcttct

SEQ ID NO: 460249 - DNA, 25 bp, Homo sapien
tgaacattttaggtttttcagcctg

SEQ ID NO: 460250 - DNA, 25 bp, Homo sapien
aaacattttctttgaagggccagat

SEQ ID NO: 460251 - DNA, 25 bp, Homo sapien
tctttgaagggccagatagtgaaca

SEQ ID NO: 460252 - DNA, 25 bp, Homo sapien
ttgaagggccagatagtgaacattt

SEQ ID NO: 460253 - DNA, 25 bp, Homo sapien
cattcccagtgtatgcacattttta

SEQ ID NO: 460254 - DNA, 25 bp, Homo sapien
aaatgctaaagcttgtcctaagact

SEQ ID NO: 460255 - DNA, 25 bp, Homo sapien
cattgattgctaataacgttgatta

SEQ ID NO: 460256 - DNA, 25 bp, Homo sapien
ttaagtatgtaccattcccagtgta

SEQ ID NO: 460257 - DNA, 25 bp, Homo sapien
tgccattgtactcagcttaaaaaag

SEQ ID NO: 460258 - DNA, 25 bp, Homo sapien
agtttaccatggttgccagacttta

SEQ ID NO: 460259 - DNA, 25 bp, Homo sapien
tcatagggctttagaatggaagtga

SEQ ID NO: 460260 - DNA, 25 bp, Homo sapien
ggcatagaaaggttcagaggcttaa

SEQ ID NO: 460261 - DNA, 25 bp, Homo sapien
taggagcacatatgttgggtaaatc

SEQ ID NO: 460262 - DNA, 25 bp, Homo sapien
tgagaaggaatatccccaaacccag

SEQ ID NO: 460263 - DNA, 25 bp, Homo sapien
ccctagtgcgttttagatgagattt

SEQ ID NO: 460264 - DNA, 25 bp, Homo sapien
gattctttcaaatagggagctcccc

SEQ ID NO: 460265 - DNA, 25 bp, Homo sapien
taagcatcaacatacgcttgttggc

SEQ ID NO: 460266 - DNA, 25 bp, Homo sapien
cgttcctaccaacagtgcacgaggg

SEQ ID NO: 460267 - DNA, 25 bp, Homo sapien
tgcacgagggttacactttctttat

SEQ ID NO: 460268 - DNA, 25 bp, Homo sapien
cattagccatcctattgggtgtgag

SEQ ID NO: 460269 - DNA, 25 bp, Homo sapien
cgtttttgttactgacctgattcca

SEQ ID NO: 460270 - DNA, 25 bp, Homo sapien
cctgctacctgaagtatgttagtac

SEQ ID NO: 460271 - DNA, 25 bp, Homo sapien
tatatctttactctggcctgcaagt

SEQ ID NO: 460272 - DNA, 25 bp, Homo sapien
ttagtactgattaaattgttccagg

SEQ ID NO: 460273 - DNA, 25 bp, Homo sapien
gccaaaggcgcggtagagaccttca

SEQ ID NO: 460274 - DNA, 25 bp, Homo sapien
gtagagaccttcatgaaggtaccga

SEQ ID NO: 460275 - DNA, 25 bp, Homo sapien
aaggcgcggtagagaccttcatgaa

SEQ ID NO: 460276 - DNA, 25 bp, Homo sapien
ctggacacggccaaaggcgcggtag

SEQ ID NO: 460277 - DNA, 25 bp, Homo sapien
actgttcctgatagacacgtctgcc

SEQ ID NO: 460278 - DNA, 25 bp, Homo sapien
ggtgtccccggccagcactatgccc

SEQ ID NO: 460279 - DNA, 25 bp, Homo sapien
gatagacacgtctgcctctatgaac

SEQ ID NO: 460280 - DNA, 25 bp, Homo sapien
atgcccatcttactgttcctgatag

SEQ ID NO: 460281 - DNA, 25 bp, Homo sapien
tgggcgcccgccccagcgggcaggc

SEQ ID NO: 460282 - DNA, 25 bp, Homo sapien
ggtacgacggggagcactgggtctg

SEQ ID NO: 460283 - DNA, 25 bp, Homo sapien
tacgacggggagcactgggtctggg

SEQ ID NO: 460284 - DNA, 25 bp, Homo sapien
ctgggtctggggagtttcctctcaa

SEQ ID NO: 460285 - DNA, 25 bp, Homo sapien
tcggggacgtgtcaggggcggagcc

SEQ ID NO: 460286 - DNA, 25 bp, Homo sapien
tgcccgagttaaaaccggagtgtga

SEQ ID NO: 460287 - DNA, 25 bp, Homo sapien
gagaaaagcgcttcagtagcgagag

SEQ ID NO: 460288 - DNA, 25 bp, Homo sapien
aaagtggtgacaccgccggggtgcg

SEQ ID NO: 460289 - DNA, 25 bp, Homo sapien
tagggcctgaccagtagaacggcga

SEQ ID NO: 460290 - DNA, 25 bp, Homo sapien
aatatgctaatgaaaggatagggcc

SEQ ID NO: 460291 - DNA, 25 bp, Homo sapien
gtagaacggcgaggcggtgtatcac

SEQ ID NO: 460292 - DNA, 25 bp, Homo sapien
gctaatgaaaggatagggcctgacc

SEQ ID NO: 460293 - DNA, 25 bp, Homo sapien
gagccggcctacaagcttcccccgc

SEQ ID NO: 460294 - DNA, 25 bp, Homo sapien
ccgcctctgcgcgtgctcaataact

SEQ ID NO: 460295 - DNA, 25 bp, Homo sapien
gcctctgcgcgtgctcaataactgt

SEQ ID NO: 460296 - DNA, 25 bp, Homo sapien
gctcaataactgtccccggagccgg

SEQ ID NO: 460297 - DNA, 25 bp, Homo sapien
gtcggcccgcccgcccgctcgcgcg

SEQ ID NO: 460298 - DNA, 25 bp, Homo sapien
ggcccgcccgcccgctcgcgcgcac

SEQ ID NO: 460299 - DNA, 25 bp, Homo sapien
tcggcccgcccgcccgctcgcgcgc

SEQ ID NO: 460300 - DNA, 25 bp, Homo sapien
ggtcggcccgcccgcccgctcgcgc

SEQ ID NO: 460301 - DNA, 25 bp, Homo sapien
cggccctgacgcgcaggctcaccgc

SEQ ID NO: 460302 - DNA, 25 bp, Homo sapien
gcggccctgacgcgcaggctcaccg

SEQ ID NO: 460303 - DNA, 25 bp, Homo sapien
ccggcggccctgacgcgcaggctca

SEQ ID NO: 460304 - DNA, 25 bp, Homo sapien
gccggcggccctgacgcgcaggctc

SEQ ID NO: 460305 - DNA, 25 bp, Homo sapien
gggtcctccaatgacagggctcctg

SEQ ID NO: 460306 - DNA, 25 bp, Homo sapien
taaacacggcaagagacaggttatt

SEQ ID NO: 460307 - DNA, 25 bp, Homo sapien
tgcttcctttttggcgggtcctcca

SEQ ID NO: 460308 - DNA, 25 bp, Homo sapien
gactcgcggaggagattagtccccg

SEQ ID NO: 460309 - DNA, 25 bp, Homo sapien
gaaacccattctctgcgccatctgg

SEQ ID NO: 460310 - DNA, 25 bp, Homo sapien
tcagtttttccgctttctcacgagg

SEQ ID NO: 460311 - DNA, 25 bp, Homo sapien
gacatgcaggcgtggactccttact

SEQ ID NO: 460312 - DNA, 25 bp, Homo sapien
aaactgttttcctcggacatgcagg

SEQ ID NO: 460313 - DNA, 25 bp, Homo sapien
tgggagaggccctgtaaatacctac

SEQ ID NO: 460314 - DNA, 25 bp, Homo sapien
ttccggataaagaacaaactctgga

SEQ ID NO: 460315 - DNA, 25 bp, Homo sapien
taatacacagtacatcctcagcaag

SEQ ID NO: 460316 - DNA, 25 bp, Homo sapien
tcagaagttataccaagtcacgaga

SEQ ID NO: 460317 - DNA, 25 bp, Homo sapien
tttctgccttggagtagctagtaat

SEQ ID NO: 460318 - DNA, 25 bp, Homo sapien
tctgccttggagtagctagtaatat

SEQ ID NO: 460319 - DNA, 25 bp, Homo sapien
gagtagctagtaatatgtagcattt

SEQ ID NO: 460320 - DNA, 25 bp, Homo sapien
ccttggagtagctagtaatatgtag

SEQ ID NO: 460321 - DNA, 25 bp, Homo sapien
cacaactttgtctagggactgcttg

SEQ ID NO: 460322 - DNA, 25 bp, Homo sapien
tgagtactactagatgccaggtaca

SEQ ID NO: 460323 - DNA, 25 bp, Homo sapien
gaccaaggcctatctcaaatctact

SEQ ID NO: 460324 - DNA, 25 bp, Homo sapien
tttttaagccttatgggagatgccg

SEQ ID NO: 460325 - DNA, 25 bp, Homo sapien
tgtaacattacaaggctcagcacag

SEQ ID NO: 460326 - DNA, 25 bp, Homo sapien
tctagcactgcaagagctcactgtt

SEQ ID NO: 460327 - DNA, 25 bp, Homo sapien
tctggtgaaatacttgtcttgcatt

SEQ ID NO: 460328 - DNA, 25 bp, Homo sapien
tctagaatcacagatagaagttgag

SEQ ID NO: 460329 - DNA, 25 bp, Homo sapien
aagagagtggtatgtcagatgacga

SEQ ID NO: 460330 - DNA, 25 bp, Homo sapien
taggcaaggaaagagcgagcctctg

SEQ ID NO: 460331 - DNA, 25 bp, Homo sapien
aggaaagagcgagcctctgcttttg

SEQ ID NO: 460332 - DNA, 25 bp, Homo sapien
caggtgaccagtgtcgaatttgatg

SEQ ID NO: 460333 - DNA, 25 bp, Homo sapien
atcacatgatgtgactgagctcccc

SEQ ID NO: 460334 - DNA, 25 bp, Homo sapien
aattgggttttcctgaggtatctgc

SEQ ID NO: 460335 - DNA, 25 bp, Homo sapien
aaacattcagactacagcactccag

SEQ ID NO: 460336 - DNA, 25 bp, Homo sapien
gacctggtttgtagatggtgccttc

SEQ ID NO: 460337 - DNA, 25 bp, Homo sapien
tctccatacatttagggtcccagtg

SEQ ID NO: 460338 - DNA, 25 bp, Homo sapien
tatggctccccaggttatacagcat

SEQ ID NO: 460339 - DNA, 25 bp, Homo sapien
tattagttgcttagggaagccatcg

SEQ ID NO: 460340 - DNA, 25 bp, Homo sapien
tctgtcagaacccttattggcaaag

SEQ ID NO: 460341 - DNA, 25 bp, Homo sapien
cagagcagtaactagtgttcaaaaa

SEQ ID NO: 460342 - DNA, 25 bp, Homo sapien
caacattcagagcagtaactagtgt

SEQ ID NO: 460343 - DNA, 25 bp, Homo sapien
tacaaatatctatgtatagggctgt

SEQ ID NO: 460344 - DNA, 25 bp, Homo sapien
tagggctgttcaatgcaacattatt

SEQ ID NO: 460345 - DNA, 25 bp, Homo sapien
ttccatgttgctttgtgaccctgga

SEQ ID NO: 460346 - DNA, 25 bp, Homo sapien
tgttgctttgtgaccctggactatg

SEQ ID NO: 460347 - DNA, 25 bp, Homo sapien
ggttcttgttccatgttgctttgtg

SEQ ID NO: 460348 - DNA, 25 bp, Homo sapien
gctttgtgaccctggactatgttaa

SEQ ID NO: 460349 - DNA, 25 bp, Homo sapien
cctggtagttccctgtcccgagagg

SEQ ID NO: 460350 - DNA, 25 bp, Homo sapien
cctgtcccgagaggttaccatatta

SEQ ID NO: 460351 - DNA, 25 bp, Homo sapien
ctggtagttccctgtcccgagaggt

SEQ ID NO: 460352 - DNA, 25 bp, Homo sapien
ttccctgtcccgagaggttaccata

SEQ ID NO: 460353 - DNA, 25 bp, Homo sapien
cttaatgggatacattctgataaat

SEQ ID NO: 460354 - DNA, 25 bp, Homo sapien
gctttatttatgatacgatacataa

SEQ ID NO: 460355 - DNA, 25 bp, Homo sapien
gataaatgcaccactatatggtttc

SEQ ID NO: 460356 - DNA, 25 bp, Homo sapien
gatacgatacataatttaatgataa

SEQ ID NO: 460357 - DNA, 25 bp, Homo sapien
gacagctaagagaaatagggcatca

SEQ ID NO: 460358 - DNA, 25 bp, Homo sapien
tttttatctgcaaaaggctgagtgg

SEQ ID NO: 460359 - DNA, 25 bp, Homo sapien
ggagacagcaagtaacaagagtgac

SEQ ID NO: 460360 - DNA, 25 bp, Homo sapien
gagcaaactactggatctgaatagg

SEQ ID NO: 460361 - DNA, 25 bp, Homo sapien
tctggattcttactgttggaatttc

SEQ ID NO: 460362 - DNA, 25 bp, Homo sapien
tgttggaatttcttgacctgagcat

SEQ ID NO: 460363 - DNA, 25 bp, Homo sapien
ggttctggattcttactgttggaat

SEQ ID NO: 460364 - DNA, 25 bp, Homo sapien
tccaggttctggattcttactgttg

SEQ ID NO: 460365 - DNA, 25 bp, Homo sapien
cacagaacagagcttgaaatcagat

SEQ ID NO: 460366 - DNA, 25 bp, Homo sapien
cacaggccagtgacgagatttcaag

SEQ ID NO: 460367 - DNA, 25 bp, Homo sapien
taaggcactgaaaatgagatcgaaa

SEQ ID NO: 460368 - DNA, 25 bp, Homo sapien
catcttagaatatctgtaggccaca

SEQ ID NO: 460369 - DNA, 25 bp, Homo sapien
attcgatcccttaatgaatcttgta

SEQ ID NO: 460370 - DNA, 25 bp, Homo sapien
cgttatcactgaaattaagtggtgg

SEQ ID NO: 460371 - DNA, 25 bp, Homo sapien
ttatttatgggcaagacgttatcac

SEQ ID NO: 460372 - DNA, 25 bp, Homo sapien
gatcccttaatgaatcttgtaatgg

SEQ ID NO: 460373 - DNA, 25 bp, Homo sapien
atggtttgtgtagagcatgtagagt

SEQ ID NO: 460374 - DNA, 25 bp, Homo sapien
tagagcatgtagagtggctcctgtg

SEQ ID NO: 460375 - DNA, 25 bp, Homo sapien
agtctgtaccctgctatcttttcca

SEQ ID NO: 460376 - DNA, 25 bp, Homo sapien
tcctggttgagtttcgtcctccctc

SEQ ID NO: 460377 - DNA, 25 bp, Homo sapien
tccacctgcaacttaggagggacct

SEQ ID NO: 460378 - DNA, 25 bp, Homo sapien
tgaggacgtttgctgctccttggct

SEQ ID NO: 460379 - DNA, 25 bp, Homo sapien
tctaagagcactgtgagttgcttgt

SEQ ID NO: 460380 - DNA, 25 bp, Homo sapien
gcaaggtcgtgtcccagattgttga

SEQ ID NO: 460381 - DNA, 25 bp, Homo sapien
gcactaataccattgactctcctga

SEQ ID NO: 460382 - DNA, 25 bp, Homo sapien
ttttgaagcatgatggcttccggac

SEQ ID NO: 460383 - DNA, 25 bp, Homo sapien
ttcttggttttgaagcatgatggct

SEQ ID NO: 460384 - DNA, 25 bp, Homo sapien
gatggcttccggacaagcactaata

SEQ ID NO: 460385 - DNA, 25 bp, Homo sapien
ccttggattgtagtactgtgaacac

SEQ ID NO: 460386 - DNA, 25 bp, Homo sapien
cacaggagccggtcacttgaggata

SEQ ID NO: 460387 - DNA, 25 bp, Homo sapien
gatatggtccgggatgggatcatct

SEQ ID NO: 460388 - DNA, 25 bp, Homo sapien
tgggaaatccctgagaacgtctagc

SEQ ID NO: 460389 - DNA, 25 bp, Homo sapien
agagggttgatgcaagcactgcgat

SEQ ID NO: 460390 - DNA, 25 bp, Homo sapien
ggttgatgcaagcactgcgatggct

SEQ ID NO: 460391 - DNA, 25 bp, Homo sapien
caagcactgcgatggctttaacaca

SEQ ID NO: 460392 - DNA, 25 bp, Homo sapien
gatgcaagcactgcgatggctttaa

SEQ ID NO: 460393 - DNA, 25 bp, Homo sapien
tctattaaaatacggatagccctgc

SEQ ID NO: 460394 - DNA, 25 bp, Homo sapien
gccctgcctatgatcacaagttcaa

SEQ ID NO: 460395 - DNA, 25 bp, Homo sapien
taaaatacggatagccctgcctatg

SEQ ID NO: 460396 - DNA, 25 bp, Homo sapien
tgcttgcttgttgatgcctgcaact

SEQ ID NO: 460397 - DNA, 25 bp, Homo sapien
tactctgcgtgatcagggtactcct

SEQ ID NO: 460398 - DNA, 25 bp, Homo sapien
gacagtcaactgcacaggttctgag

SEQ ID NO: 460399 - DNA, 25 bp, Homo sapien
tggaccagactcactttacagcgta

SEQ ID NO: 460400 - DNA, 25 bp, Homo sapien
gctttactgtagatcgctgggaggt

SEQ ID NO: 460401 - DNA, 25 bp, Homo sapien
tctcttactttactgccctagaagt

SEQ ID NO: 460402 - DNA, 25 bp, Homo sapien
tgctctcttaagaattctgccgtca

SEQ ID NO: 460403 - DNA, 25 bp, Homo sapien
gtgcatttatcctgagtaggacagg

SEQ ID NO: 460404 - DNA, 25 bp, Homo sapien
gacttactggttgtagtgtttgctg

SEQ ID NO: 460405 - DNA, 25 bp, Homo sapien
ttcctcttctatgtccaataactgt

SEQ ID NO: 460406 - DNA, 25 bp, Homo sapien
cctcttctatgtccaataactgtga

SEQ ID NO: 460407 - DNA, 25 bp, Homo sapien
tcttctatgtccaataactgtgagt

SEQ ID NO: 460408 - DNA, 25 bp, Homo sapien
tctatgtccaataactgtgagtgca

SEQ ID NO: 460409 - DNA, 25 bp, Homo sapien
gttgtactgccccaagaatcaagca

SEQ ID NO: 460410 - DNA, 25 bp, Homo sapien
tctcctgttgtactgccccaagaat

SEQ ID NO: 460411 - DNA, 25 bp, Homo sapien
tcctctcctgttgtactgccccaag

SEQ ID NO: 460412 - DNA, 25 bp, Homo sapien
tcctgttgtactgccccaagaatca

SEQ ID NO: 460413 - DNA, 25 bp, Homo sapien
ctaggcaagtgtgtgctaacaatag

SEQ ID NO: 460414 - DNA, 25 bp, Homo sapien
aagtgtgtgctaacaataggttttc

SEQ ID NO: 460415 - DNA, 25 bp, Homo sapien
gcaagtgtgtgctaacaataggttt

SEQ ID NO: 460416 - DNA, 25 bp, Homo sapien
taggcaagtgtgtgctaacaatagg

SEQ ID NO: 460417 - DNA, 25 bp, Homo sapien
agccgcctaaggtttttgcaaggct

SEQ ID NO: 460418 - DNA, 25 bp, Homo sapien
ctgtgttggaagccgcctaaggttt

SEQ ID NO: 460419 - DNA, 25 bp, Homo sapien
tttttgcaaggcttccctctacact

SEQ ID NO: 460420 - DNA, 25 bp, Homo sapien
tttgcaaggcttccctctacacttt

SEQ ID NO: 460421 - DNA, 25 bp, Homo sapien
gtataaaacctacggtcacttggca

SEQ ID NO: 460422 - DNA, 25 bp, Homo sapien
tcctttcctggttcgctggcagcag

SEQ ID NO: 460423 - DNA, 25 bp, Homo sapien
cacttggcatttaactatcatgatg

SEQ ID NO: 460424 - DNA, 25 bp, Homo sapien
tgtcttttagttacaaccaggaaga

SEQ ID NO: 460425 - DNA, 25 bp, Homo sapien
ctgaaaagagggcggaggtggggcg

SEQ ID NO: 460426 - DNA, 25 bp, Homo sapien
ctggggacgcgcttgccagacgcca

SEQ ID NO: 460427 - DNA, 25 bp, Homo sapien
ttaacctcccgtgaacgcgcgtata

SEQ ID NO: 460428 - DNA, 25 bp, Homo sapien
tgccagacgccacgccccttcgaaa

SEQ ID NO: 460429 - DNA, 25 bp, Homo sapien
tatacacacccctggggacgcgctt

SEQ ID NO: 460430 - DNA, 25 bp, Homo sapien
tgcgctttccgttcctcgcggtctt

SEQ ID NO: 460431 - DNA, 25 bp, Homo sapien
gcatgcgctttccgttcctcgcggt

SEQ ID NO: 460432 - DNA, 25 bp, Homo sapien
gttcctcgcggtcttctctctgcct

SEQ ID NO: 460433 - DNA, 25 bp, Homo sapien
acgcatgcgctttccgttcctcgcg

SEQ ID NO: 460434 - DNA, 25 bp, Homo sapien
tggagcacggacacaggttgagaca

SEQ ID NO: 460435 - DNA, 25 bp, Homo sapien
aagccggcgccactacaagaggagg

SEQ ID NO: 460436 - DNA, 25 bp, Homo sapien
gaaaccggcgagcatagcctggccg

SEQ ID NO: 460437 - DNA, 25 bp, Homo sapien
accaaaaccgccacgacctgggatg

SEQ ID NO: 460438 - DNA, 25 bp, Homo sapien
cggaggagggggcgcgcctggggcg

SEQ ID NO: 460439 - DNA, 25 bp, Homo sapien
cgccgccaaccgcgccgcggggccg

SEQ ID NO: 460440 - DNA, 25 bp, Homo sapien
gagggggcgcgcctggggcgccgcc

SEQ ID NO: 460441 - DNA, 25 bp, Homo sapien
cgccgccgccaaccgcgccgcgggg

SEQ ID NO: 460442 - DNA, 25 bp, Homo sapien
atcggcttgcgggtcagaggcttgg

SEQ ID NO: 460443 - DNA, 25 bp, Homo sapien
ctgcagcaggatcggcttgcgggtc

SEQ ID NO: 460444 - DNA, 25 bp, Homo sapien
cagaggcttgggctggatctccgcc

SEQ ID NO: 460445 - DNA, 25 bp, Homo sapien
ggcttgggctggatctccgccgcca

SEQ ID NO: 460446 - DNA, 25 bp, Homo sapien
tcctctttgggcacgatcacggcca

SEQ ID NO: 460447 - DNA, 25 bp, Homo sapien
tgtcctcggagacgctgatgacgcc

SEQ ID NO: 460448 - DNA, 25 bp, Homo sapien
tgggcacgatcacggccatattcac

SEQ ID NO: 460449 - DNA, 25 bp, Homo sapien
gatgacgccctcctctttgggcacg

SEQ ID NO: 460450 - DNA, 25 bp, Homo sapien
gggagcaagtctacactcgcgccga

SEQ ID NO: 460451 - DNA, 25 bp, Homo sapien
acgtgaaggcacagcccctgacgcg

SEQ ID NO: 460452 - DNA, 25 bp, Homo sapien
gcttcccggagccacacagcggagg

SEQ ID NO: 460453 - DNA, 25 bp, Homo sapien
caccaccaggatgcgcattacaata

SEQ ID NO: 460454 - DNA, 25 bp, Homo sapien
gcccgagggccacccggctcccgca

SEQ ID NO: 460455 - DNA, 25 bp, Homo sapien
ccgagggccacccggctcccgcagg

SEQ ID NO: 460456 - DNA, 25 bp, Homo sapien
gagggccacccggctcccgcaggca

SEQ ID NO: 460457 - DNA, 25 bp, Homo sapien
ggccacccggctcccgcaggcacta

SEQ ID NO: 460458 - DNA, 25 bp, Homo sapien
gacacacaaagctccatagggaact

SEQ ID NO: 460459 - DNA, 25 bp, Homo sapien
tcaggtatggaacattacttgcggc

SEQ ID NO: 460460 - DNA, 25 bp, Homo sapien
gccaggtaccatgttaggccctaat

SEQ ID NO: 460461 - DNA, 25 bp, Homo sapien
gaggacgtattgcatgccaggtacc

SEQ ID NO: 460462 - DNA, 25 bp, Homo sapien
caactaggatcttataagggctgca

SEQ ID NO: 460463 - DNA, 25 bp, Homo sapien
taatctagataacccaggccctgac

SEQ ID NO: 460464 - DNA, 25 bp, Homo sapien
gaagcttagagtgatgaaatgcccc

SEQ ID NO: 460465 - DNA, 25 bp, Homo sapien
tgatgagtctcaagtgcgcagtgga

SEQ ID NO: 460466 - DNA, 25 bp, Homo sapien
atatcttcacctctcatggccagct

SEQ ID NO: 460467 - DNA, 25 bp, Homo sapien
cagccatggcagcatatcttcacct

SEQ ID NO: 460468 - DNA, 25 bp, Homo sapien
aaggggtctgcaggcgataatttca

SEQ ID NO: 460469 - DNA, 25 bp, Homo sapien
ggcagcatatcttcacctctcatgg

SEQ ID NO: 460470 - DNA, 25 bp, Homo sapien
gaggaattccttagggatcaggcca

SEQ ID NO: 460471 - DNA, 25 bp, Homo sapien
gatatagtagcaaaattctccggca

SEQ ID NO: 460472 - DNA, 25 bp, Homo sapien
taaatggcacttctaaggccgggag

SEQ ID NO: 460473 - DNA, 25 bp, Homo sapien
caaagcaatgttatccctctgggtg

SEQ ID NO: 460474 - DNA, 25 bp, Homo sapien
gaaacatgttccaagcagcaaaggc

SEQ ID NO: 460475 - DNA, 25 bp, Homo sapien
gatcacagcattcagtccaatctgg

SEQ ID NO: 460476 - DNA, 25 bp, Homo sapien
catgttccaagcagcaaaggcaatc

SEQ ID NO: 460477 - DNA, 25 bp, Homo sapien
acagcattcagtccaatctggaaac

SEQ ID NO: 460478 - DNA, 25 bp, Homo sapien
tcaagaaaccacaagtccccaggta

SEQ ID NO: 460479 - DNA, 25 bp, Homo sapien
caagaaaccacaagtccccaggtat

SEQ ID NO: 460480 - DNA, 25 bp, Homo sapien
ataagaagaaatataccacatgcta

SEQ ID NO: 460481 - DNA, 25 bp, Homo sapien
taagaagaaatataccacatgctac

SEQ ID NO: 460482 - DNA, 25 bp, Homo sapien
catgctactgatcacaatctctgca

SEQ ID NO: 460483 - DNA, 25 bp, Homo sapien
ataccacatgctactgatcacaatc

SEQ ID NO: 460484 - DNA, 25 bp, Homo sapien
agaaattcttctagcttggtgtaag

SEQ ID NO: 460485 - DNA, 25 bp, Homo sapien
ctagcttggtgtaagtgactgtatc

SEQ ID NO: 460486 - DNA, 25 bp, Homo sapien
attcttctagcttggtgtaagtgac

SEQ ID NO: 460487 - DNA, 25 bp, Homo sapien
tcttctagcttggtgtaagtgactg

SEQ ID NO: 460488 - DNA, 25 bp, Homo sapien
atgaagtgaagtggagcccgccaga

SEQ ID NO: 460489 - DNA, 25 bp, Homo sapien
acagtcttcaacagaggacaccagg

SEQ ID NO: 460490 - DNA, 25 bp, Homo sapien
acagtggtacgggagagataatgcc

SEQ ID NO: 460491 - DNA, 25 bp, Homo sapien
tttcagggaccactagggcaagagc

SEQ ID NO: 460492 - DNA, 25 bp, Homo sapien
tacctcaggctttattcagagaaaa

SEQ ID NO: 460493 - DNA, 25 bp, Homo sapien
tatattgtgtgtaagggcaggcagt

SEQ ID NO: 460494 - DNA, 25 bp, Homo sapien
ggcaggcagtactattctgacagga

SEQ ID NO: 460495 - DNA, 25 bp, Homo sapien
taggaaaggcttgtactacagcaga

SEQ ID NO: 460496 - DNA, 25 bp, Homo sapien
aagtgtacagttaaggccatgcacg

SEQ ID NO: 460497 - DNA, 25 bp, Homo sapien
tgtacagttaaggccatgcacggtg

SEQ ID NO: 460498 - DNA, 25 bp, Homo sapien
agtgtacagttaaggccatgcacgg

SEQ ID NO: 460499 - DNA, 25 bp, Homo sapien
gtgtacagttaaggccatgcacggt

SEQ ID NO: 460500 - DNA, 25 bp, Homo sapien
tgttaagtatatgaaatgctgcatc

SEQ ID NO: 460501 - DNA, 25 bp, Homo sapien
gtgttaagtatatgaaatgctgcat

SEQ ID NO: 460502 - DNA, 25 bp, Homo sapien
agcttccttttcgaagtcctggctg

SEQ ID NO: 460503 - DNA, 25 bp, Homo sapien
cagcttccttttcgaagtcctggct

SEQ ID NO: 460504 - DNA, 25 bp, Homo sapien
ctgtcaggccactggtgtaccagcc

SEQ ID NO: 460505 - DNA, 25 bp, Homo sapien
gcatcaatgttccttgatatatcaa

SEQ ID NO: 460506 - DNA, 25 bp, Homo sapien
gaattgtgcatcaatgttccttgat

SEQ ID NO: 460507 - DNA, 25 bp, Homo sapien
ctatagaattgtgcatcaatgttcc

SEQ ID NO: 460508 - DNA, 25 bp, Homo sapien
caatgttccttgatatatcaaagta

SEQ ID NO: 460509 - DNA, 25 bp, Homo sapien
tttgccacaactgaagtaacttggg

SEQ ID NO: 460510 - DNA, 25 bp, Homo sapien
ggaatacttttctacagatcacacc

SEQ ID NO: 460511 - DNA, 25 bp, Homo sapien
gaagtgaagcccactgggttttgaa

SEQ ID NO: 460512 - DNA, 25 bp, Homo sapien
cactgggttttgaaggccctgaatt

SEQ ID NO: 460513 - DNA, 25 bp, Homo sapien
ccagttagggctgttgcagagaaaa

SEQ ID NO: 460514 - DNA, 25 bp, Homo sapien
catcagcatataaggagtagttacc

SEQ ID NO: 460515 - DNA, 25 bp, Homo sapien
aagaccttagcacaagccagcagag

SEQ ID NO: 460516 - DNA, 25 bp, Homo sapien
cctgagtgcagggaaaatccagtta

SEQ ID NO: 460517 - DNA, 25 bp, Homo sapien
ggaggatgtaggcagcaaaccaagt

SEQ ID NO: 460518 - DNA, 25 bp, Homo sapien
ggatgtaggcagcaaaccaagtaaa

SEQ ID NO: 460519 - DNA, 25 bp, Homo sapien
gaggatgtaggcagcaaaccaagta

SEQ ID NO: 460520 - DNA, 25 bp, Homo sapien
atgtaggcagcaaaccaagtaaaaa

SEQ ID NO: 460521 - DNA, 25 bp, Homo sapien
ggcgagcaggagtcgtgagaatcca

SEQ ID NO: 460522 - DNA, 25 bp, Homo sapien
agaaggccaccgatgctgaggatga

SEQ ID NO: 460523 - DNA, 25 bp, Homo sapien
agagggcgtaggagcacattctgca

SEQ ID NO: 460524 - DNA, 25 bp, Homo sapien
gctggtcacaaaaccacgcttgttc

SEQ ID NO: 460525 - DNA, 25 bp, Homo sapien
gttacatgatacacaaatttgtcgc

SEQ ID NO: 460526 - DNA, 25 bp, Homo sapien
aatttgtcgcctaggaatgacaggc

SEQ ID NO: 460527 - DNA, 25 bp, Homo sapien
tactcaccatttgtgttacagttgc

SEQ ID NO: 460528 - DNA, 25 bp, Homo sapien
tcactgtcactttgaactactgaac

SEQ ID NO: 460529 - DNA, 25 bp, Homo sapien
aaaggactaaattcagtgcctgcct

SEQ ID NO: 460530 - DNA, 25 bp, Homo sapien
tacaaccttaaccaggacaagtgcg

SEQ ID NO: 460531 - DNA, 25 bp, Homo sapien
tctccaaaggactaaattcagtgcc

SEQ ID NO: 460532 - DNA, 25 bp, Homo sapien
aggacaagtgcgacctcagggacag

SEQ ID NO: 460533 - DNA, 25 bp, Homo sapien
cctctgactgcacctggacagacat

SEQ ID NO: 460534 - DNA, 25 bp, Homo sapien
tcctctgactgcacctggacagaca

SEQ ID NO: 460535 - DNA, 25 bp, Homo sapien
ctgtcagaaagtcctctgactgcac

SEQ ID NO: 460536 - DNA, 25 bp, Homo sapien
tgtccactgtcagaaagtcctctga

SEQ ID NO: 460537 - DNA, 25 bp, Homo sapien
ttgtaccaggaagcgaacattgtcc

SEQ ID NO: 460538 - DNA, 25 bp, Homo sapien
caggcagccatggagattgcggctc

SEQ ID NO: 460539 - DNA, 25 bp, Homo sapien
catgttccttgagtggcctgcttgt

SEQ ID NO: 460540 - DNA, 25 bp, Homo sapien
gccatggagattgcggctcatgttc

SEQ ID NO: 460541 - DNA, 25 bp, Homo sapien
cgcttggccaatactgtccactgtc

SEQ ID NO: 460542 - DNA, 25 bp, Homo sapien
cattgcatggtatacgcttggccaa

SEQ ID NO: 460543 - DNA, 25 bp, Homo sapien
tctctttaaccaaacacgaactgtc

SEQ ID NO: 460544 - DNA, 25 bp, Homo sapien
aaggcattgcatggtatacgcttgg

SEQ ID NO: 460545 - DNA, 25 bp, Homo sapien
tagacctatggacagtcttcttgtt

SEQ ID NO: 460546 - DNA, 25 bp, Homo sapien
ttgtttccgggttaaaagacatgca

SEQ ID NO: 460547 - DNA, 25 bp, Homo sapien
gagattgtaccattgtctagaccta

SEQ ID NO: 460548 - DNA, 25 bp, Homo sapien
taccattgtctagacctatggacag

SEQ ID NO: 460549 - DNA, 25 bp, Homo sapien
tcttgccttcaaagccaaatttatc

SEQ ID NO: 460550 - DNA, 25 bp, Homo sapien
caaagccaaatttatcagtatccat

SEQ ID NO: 460551 - DNA, 25 bp, Homo sapien
cttcaaagccaaatttatcagtatc

SEQ ID NO: 460552 - DNA, 25 bp, Homo sapien
tttcttgccttcaaagccaaattta

SEQ ID NO: 460553 - DNA, 25 bp, Homo sapien
ttaaatatggtatgaagtcttggag

SEQ ID NO: 460554 - DNA, 25 bp, Homo sapien
tactcatcctgaatcaaggctttca

SEQ ID NO: 460555 - DNA, 25 bp, Homo sapien
tccagtacctttacgttacataatg

SEQ ID NO: 460556 - DNA, 25 bp, Homo sapien
gagaatcttccatgttacgatccag

SEQ ID NO: 460557 - DNA, 25 bp, Homo sapien
cagtaggtggagcaacaccaggtga

SEQ ID NO: 460558 - DNA, 25 bp, Homo sapien
gtgacagcagttccgcaaccacagg

SEQ ID NO: 460559 - DNA, 25 bp, Homo sapien
tggagcaacaccaggtgacagcagt

SEQ ID NO: 460560 - DNA, 25 bp, Homo sapien
accaggtgacagcagttccgcaacc

SEQ ID NO: 460561 - DNA, 25 bp, Homo sapien
ctattataaacactcctgctgtggg

SEQ ID NO: 460562 - DNA, 25 bp, Homo sapien
tctttgacagtgacctgcgcatccc

SEQ ID NO: 460563 - DNA, 25 bp, Homo sapien
tttaggctattgatcacagtctgca

SEQ ID NO: 460564 - DNA, 25 bp, Homo sapien
catgtccagcatcgttcctaatata

SEQ ID NO: 460565 - DNA, 25 bp, Homo sapien
gaaattgaaaactgcttacacctaa

SEQ ID NO: 460566 - DNA, 25 bp, Homo sapien
tagcctaatggttatgaggctgaca

SEQ ID NO: 460567 - DNA, 25 bp, Homo sapien
aacagcaaatgatatgagatcagtt

SEQ ID NO: 460568 - DNA, 25 bp, Homo sapien
agtttagacagtttagttgctgata

SEQ ID NO: 460569 - DNA, 25 bp, Homo sapien
taaactaaagagcttctgcacagca

SEQ ID NO: 460570 - DNA, 25 bp, Homo sapien
attttcgcaacctactcatctgaca

SEQ ID NO: 460571 - DNA, 25 bp, Homo sapien
acaaaattgacaaacgggatccaat

SEQ ID NO: 460572 - DNA, 25 bp, Homo sapien
caaccaacctcatcaaaaagtgggt

SEQ ID NO: 460573 - DNA, 25 bp, Homo sapien
ccacagtcttgctgattgctagcac

SEQ ID NO: 460574 - DNA, 25 bp, Homo sapien
gtcctacgcccacagtcttgctgat

SEQ ID NO: 460575 - DNA, 25 bp, Homo sapien
tacgcccacagtcttgctgattgct

SEQ ID NO: 460576 - DNA, 25 bp, Homo sapien
cgcccacagtcttgctgattgctag

SEQ ID NO: 460577 - DNA, 25 bp, Homo sapien
aaatcacatttacaattttgattgg

SEQ ID NO: 460578 - DNA, 25 bp, Homo sapien
acaccctgcactagccaaagcaggg

SEQ ID NO: 460579 - DNA, 25 bp, Homo sapien
acaattttgattgggggctggagcc

SEQ ID NO: 460580 - DNA, 25 bp, Homo sapien
tgggtgcagcacaccctgcactagc

SEQ ID NO: 460581 - DNA, 25 bp, Homo sapien
tggtataagacaagaggtgcgaatt

SEQ ID NO: 460582 - DNA, 25 bp, Homo sapien
aaaactgtatttaagtagattctct

SEQ ID NO: 460583 - DNA, 25 bp, Homo sapien
ttacaacattcttcttgatagattg

SEQ ID NO: 460584 - DNA, 25 bp, Homo sapien
taatattttcgtttatgacttccat

SEQ ID NO: 460585 - DNA, 25 bp, Homo sapien
gaagacaattgttatctggccaagt

SEQ ID NO: 460586 - DNA, 25 bp, Homo sapien
tacagggtcccaaatatcgtgacac

SEQ ID NO: 460587 - DNA, 25 bp, Homo sapien
gaaacctgggaggtgcctaagcaac

SEQ ID NO: 460588 - DNA, 25 bp, Homo sapien
aaatggttctctgacctggtcaaaa

SEQ ID NO: 460589 - DNA, 25 bp, Homo sapien
cttgttataatcttctgacaatata

SEQ ID NO: 460590 - DNA, 25 bp, Homo sapien
cttgatagtttttcacaggagtcat

SEQ ID NO: 460591 - DNA, 25 bp, Homo sapien
aaaaatgtgctggcacagtggttct

SEQ ID NO: 460592 - DNA, 25 bp, Homo sapien
gggtatataattctatgttggaagt

SEQ ID NO: 460593 - DNA, 25 bp, Homo sapien
tgaaagatactttctctgggtatat

SEQ ID NO: 460594 - DNA, 25 bp, Homo sapien
ttttgtgtgtccaaaaaaatgctta

SEQ ID NO: 460595 - DNA, 25 bp, Homo sapien
tacgagtgttatggtcttctggcag

SEQ ID NO: 460596 - DNA, 25 bp, Homo sapien
tatagtttatacttgggtctcacct

SEQ ID NO: 460597 - DNA, 25 bp, Homo sapien
cactcagtctgatactaactgcctt

SEQ ID NO: 460598 - DNA, 25 bp, Homo sapien
taactgccttttaattgcctttaga

SEQ ID NO: 460599 - DNA, 25 bp, Homo sapien
tccttaaatactgctatggcatcat

SEQ ID NO: 460600 - DNA, 25 bp, Homo sapien
catgaacttctactgatctctcctt

SEQ ID NO: 460601 - DNA, 25 bp, Homo sapien
ctgttaatgagtcccttcttgtttt

SEQ ID NO: 460602 - DNA, 25 bp, Homo sapien
gcatcataccataaattctggtata

SEQ ID NO: 460603 - DNA, 25 bp, Homo sapien
gaggccacagcactggtccgataac

SEQ ID NO: 460604 - DNA, 25 bp, Homo sapien
tggtccgataacctcccaggcgctg

SEQ ID NO: 460605 - DNA, 25 bp, Homo sapien
gcagtgccaggcaaattgcttgtcc

SEQ ID NO: 460606 - DNA, 25 bp, Homo sapien
tcagagcagtgccaggcaaattgct

SEQ ID NO: 460607 - DNA, 25 bp, Homo sapien
gagatttttgtccagcaaaggatac

SEQ ID NO: 460608 - DNA, 25 bp, Homo sapien
tcccactaagagatttttgtccagc

SEQ ID NO: 460609 - DNA, 25 bp, Homo sapien
gttcccactaagagatttttgtcca

SEQ ID NO: 460610 - DNA, 25 bp, Homo sapien
aagagatttttgtccagcaaaggat

SEQ ID NO: 460611 - DNA, 25 bp, Homo sapien
gaccagggtgcagttttcttgctcc

SEQ ID NO: 460612 - DNA, 25 bp, Homo sapien
ggattgttacttggcctgagtggtc

SEQ ID NO: 460613 - DNA, 25 bp, Homo sapien
cacatgccgggtttcaacatcaaat

SEQ ID NO: 460614 - DNA, 25 bp, Homo sapien
tggtcaccgataaacacatgccggg

SEQ ID NO: 460615 - DNA, 25 bp, Homo sapien
gactgggtcccaacagagagcggtc

SEQ ID NO: 460616 - DNA, 25 bp, Homo sapien
gggtcccaacagagagcggtcaccc

SEQ ID NO: 460617 - DNA, 25 bp, Homo sapien
ctgagaacaacacccgctggactgg

SEQ ID NO: 460618 - DNA, 25 bp, Homo sapien
gaacaacacccgctggactgggtcc

SEQ ID NO: 460619 - DNA, 25 bp, Homo sapien
gctgttccttttctcccaccgatgt

SEQ ID NO: 460620 - DNA, 25 bp, Homo sapien
ggctgttccttttctcccaccgatg

SEQ ID NO: 460621 - DNA, 25 bp, Homo sapien
ccttggagctcgatggctgttcctt

SEQ ID NO: 460622 - DNA, 25 bp, Homo sapien
ttgtgtccttggagctcgatggctg

SEQ ID NO: 460623 - DNA, 25 bp, Homo sapien
tcaaatacgagaatcactgaatgcc

SEQ ID NO: 460624 - DNA, 25 bp, Homo sapien
tctaacagactgacactgactgatg

SEQ ID NO: 460625 - DNA, 25 bp, Homo sapien
tccttttctgccagatgatcccgaa

SEQ ID NO: 460626 - DNA, 25 bp, Homo sapien
ctttcagggtaaaggaatggcggct

SEQ ID NO: 460627 - DNA, 25 bp, Homo sapien
ggtatcttttcagcggaacttcagg

SEQ ID NO: 460628 - DNA, 25 bp, Homo sapien
tgttgtctagcacacttttctgggc

SEQ ID NO: 460629 - DNA, 25 bp, Homo sapien
gctgtgcgtctgctaacaaattcat

SEQ ID NO: 460630 - DNA, 25 bp, Homo sapien
tatagagtgccaccactgtgacact

SEQ ID NO: 460631 - DNA, 25 bp, Homo sapien
cagcacaatctaagccgaacacggt

SEQ ID NO: 460632 - DNA, 25 bp, Homo sapien
taagatttcccagagaggtcctaga

SEQ ID NO: 460633 - DNA, 25 bp, Homo sapien
gcagcagctttatcactaacgcgtt

SEQ ID NO: 460634 - DNA, 25 bp, Homo sapien
taacgcgttggctcctactgctgtg

SEQ ID NO: 460635 - DNA, 25 bp, Homo sapien
agttgaatcctcctaaaatcacaga

SEQ ID NO: 460636 - DNA, 25 bp, Homo sapien
gaaactgctagccaattcagtaata

SEQ ID NO: 460637 - DNA, 25 bp, Homo sapien
tattttgaacctgctagacttaaac

SEQ ID NO: 460638 - DNA, 25 bp, Homo sapien
cctcttgctgtgtgtggaatgcttt

SEQ ID NO: 460639 - DNA, 25 bp, Homo sapien
agcccccagtgtagatcttagaaac

SEQ ID NO: 460640 - DNA, 25 bp, Homo sapien
gagcccccagtgtagatcttagaaa

SEQ ID NO: 460641 - DNA, 25 bp, Homo sapien
cgagcccccagtgtagatcttagaa

SEQ ID NO: 460642 - DNA, 25 bp, Homo sapien
tccgagcccccagtgtagatcttag

SEQ ID NO: 460643 - DNA, 25 bp, Homo sapien
tccatgttccagacgacaatcccac

SEQ ID NO: 460644 - DNA, 25 bp, Homo sapien
caattgtcgcgtgtgctgtgcatag

SEQ ID NO: 460645 - DNA, 25 bp, Homo sapien
accatcaccgccacaggagatcaat

SEQ ID NO: 460646 - DNA, 25 bp, Homo sapien
caggagatcaattgtcgcgtgtgct

SEQ ID NO: 460647 - DNA, 25 bp, Homo sapien
tgacataaatcacgtgagtcctccg

SEQ ID NO: 460648 - DNA, 25 bp, Homo sapien
tacatgccaacttgtgagggaaaaa

SEQ ID NO: 460649 - DNA, 25 bp, Homo sapien
tataccaaaggactaatcaccagga

SEQ ID NO: 460650 - DNA, 25 bp, Homo sapien
gatttaaacagcttagtctcagtca

SEQ ID NO: 460651 - DNA, 25 bp, Homo sapien
atggttaacttcaaagtacttgtca

SEQ ID NO: 460652 - DNA, 25 bp, Homo sapien
ccagaataattctaacgtaattgga

SEQ ID NO: 460653 - DNA, 25 bp, Homo sapien
tgcattgtcaaagggaaagtctacc

SEQ ID NO: 460654 - DNA, 25 bp, Homo sapien
caaaagagatatgcaggaaacatat

SEQ ID NO: 460655 - DNA, 25 bp, Homo sapien
caggtgtgactgtccctaacccaaa

SEQ ID NO: 460656 - DNA, 25 bp, Homo sapien
cacagaaagaacgtgggagacccct

SEQ ID NO: 460657 - DNA, 25 bp, Homo sapien
ggacataatcaccagccatgcggga

SEQ ID NO: 460658 - DNA, 25 bp, Homo sapien
gaacatggttagcatgaccagcact

SEQ ID NO: 460659 - DNA, 25 bp, Homo sapien
ccaggctacgtgcaccaaaggaaaa

SEQ ID NO: 460660 - DNA, 25 bp, Homo sapien
taggctcataaacaaggttgctcaa

SEQ ID NO: 460661 - DNA, 25 bp, Homo sapien
tgtccataacgggtccaggctacgt

SEQ ID NO: 460662 - DNA, 25 bp, Homo sapien
ataacgggtccaggctacgtgcacc

SEQ ID NO: 460663 - DNA, 25 bp, Homo sapien
taaattagtcaatagtattggatgc

SEQ ID NO: 460664 - DNA, 25 bp, Homo sapien
aattagtcaatagtattggatgcct

SEQ ID NO: 460665 - DNA, 25 bp, Homo sapien
tagagtgttgactcactgaataaga

SEQ ID NO: 460666 - DNA, 25 bp, Homo sapien
tgcttatttagagtgttgactcact

SEQ ID NO: 460667 - DNA, 25 bp, Homo sapien
gagatgacttcaatatatgtcgcag

SEQ ID NO: 460668 - DNA, 25 bp, Homo sapien
tcagtacttcaggttagagatgact

SEQ ID NO: 460669 - DNA, 25 bp, Homo sapien
ttatcataaccacgaagcagctcca

SEQ ID NO: 460670 - DNA, 25 bp, Homo sapien
tatgtcgcagacctcccaaggtgag

SEQ ID NO: 460671 - DNA, 25 bp, Homo sapien
actctgttgatccttcagcacaatg

SEQ ID NO: 460672 - DNA, 25 bp, Homo sapien
tcctccctcaatccttcactgggaa

SEQ ID NO: 460673 - DNA, 25 bp, Homo sapien
actgggaacattagccaatgatgac

SEQ ID NO: 460674 - DNA, 25 bp, Homo sapien
tcactgggaacattagccaatgatg

SEQ ID NO: 460675 - DNA, 25 bp, Homo sapien
tgttcaacctatgcaatgtcactcg

SEQ ID NO: 460676 - DNA, 25 bp, Homo sapien
ataaggaagcatgcgtgttcaggac

SEQ ID NO: 460677 - DNA, 25 bp, Homo sapien
cgatctacatccagccactcaaggt

SEQ ID NO: 460678 - DNA, 25 bp, Homo sapien
gactgcttctctaaaccgctcatga

SEQ ID NO: 460679 - DNA, 25 bp, Homo sapien
tcatagcacagagttaagagagact

SEQ ID NO: 460680 - DNA, 25 bp, Homo sapien
aaacttatggagctatcaggatgtg

SEQ ID NO: 460681 - DNA, 25 bp, Homo sapien
tggaaaccactgaccctgatgaaac

SEQ ID NO: 460682 - DNA, 25 bp, Homo sapien
gaataagaatctccaccatcatgaa

SEQ ID NO: 460683 - DNA, 25 bp, Homo sapien
ttgtcaaataaagcacagaacaggt

SEQ ID NO: 460684 - DNA, 25 bp, Homo sapien
tgtcaaataaagcacagaacaggtc

SEQ ID NO: 460685 - DNA, 25 bp, Homo sapien
cttgtcaaataaagcacagaacagg

SEQ ID NO: 460686 - DNA, 25 bp, Homo sapien
gtcaaataaagcacagaacaggtca

SEQ ID NO: 460687 - DNA, 25 bp, Homo sapien
cacatttgcttgaagttccagaaga

SEQ ID NO: 460688 - DNA, 25 bp, Homo sapien
tactaggaactacagaggaaccacc

SEQ ID NO: 460689 - DNA, 25 bp, Homo sapien
tgactttggccatggtaagcctagg

SEQ ID NO: 460690 - DNA, 25 bp, Homo sapien
taactgcttactgggaaccaaccac

SEQ ID NO: 460691 - DNA, 25 bp, Homo sapien
ggatgctgaacaagagagccccaga

SEQ ID NO: 460692 - DNA, 25 bp, Homo sapien
acagaccctcacttcaaactcgaag

SEQ ID NO: 460693 - DNA, 25 bp, Homo sapien
actcgaagcccatcagggggatgga

SEQ ID NO: 460694 - DNA, 25 bp, Homo sapien
ggccttcccacacttgcggcagtgg

SEQ ID NO: 460695 - DNA, 25 bp, Homo sapien
agggggatggaggagcgcttggagc

SEQ ID NO: 460696 - DNA, 25 bp, Homo sapien
cggtctgcaggctgcaggaacttac

SEQ ID NO: 460697 - DNA, 25 bp, Homo sapien
gcggtctgcaggctgcaggaactta

SEQ ID NO: 460698 - DNA, 25 bp, Homo sapien
aagcggtctgcaggctgcaggaact

SEQ ID NO: 460699 - DNA, 25 bp, Homo sapien
ctgaagcggtctgcaggctgcagga

SEQ ID NO: 460700 - DNA, 25 bp, Homo sapien
caacctgagtgatggttgcggcgct

SEQ ID NO: 460701 - DNA, 25 bp, Homo sapien
ttctaaaccagcagaaactagagca

SEQ ID NO: 460702 - DNA, 25 bp, Homo sapien
cggcgctgagtgcaaggctcagatt

SEQ ID NO: 460703 - DNA, 25 bp, Homo sapien
gcttgccgtggactatattctaaac

SEQ ID NO: 460704 - DNA, 25 bp, Homo sapien
atctcttggtggcaaaggagagctt

SEQ ID NO: 460705 - DNA, 25 bp, Homo sapien
tcttggtggcaaaggagagctttta

SEQ ID NO: 460706 - DNA, 25 bp, Homo sapien
cacaaatctcttggtggcaaaggag

SEQ ID NO: 460707 - DNA, 25 bp, Homo sapien
caaatctcttggtggcaaaggagag

SEQ ID NO: 460708 - DNA, 25 bp, Homo sapien
cacagagatgaattctttgagtgta

SEQ ID NO: 460709 - DNA, 25 bp, Homo sapien
ttctgggagcagctaatttaaaggc

SEQ ID NO: 460710 - DNA, 25 bp, Homo sapien
ttgttctgggagcagctaatttaaa

SEQ ID NO: 460711 - DNA, 25 bp, Homo sapien
tcaagtaaatgagcagacagaaggg

SEQ ID NO: 460712 - DNA, 25 bp, Homo sapien
ccagcttgggacagaaagtgaatcc

SEQ ID NO: 460713 - DNA, 25 bp, Homo sapien
gaatcctgagcccttatactcctgg

SEQ ID NO: 460714 - DNA, 25 bp, Homo sapien
ggacagaaagtgaatcctgagccct

SEQ ID NO: 460715 - DNA, 25 bp, Homo sapien
tgtaaagataccagcttgggacaga

SEQ ID NO: 460716 - DNA, 25 bp, Homo sapien
ttactgggcaggtctgacaagcagc

SEQ ID NO: 460717 - DNA, 25 bp, Homo sapien
caagcagccagctgagtaactgggc

SEQ ID NO: 460718 - DNA, 25 bp, Homo sapien
taaagcgacttagctcttcccggaa

SEQ ID NO: 460719 - DNA, 25 bp, Homo sapien
tatttgcctcttgggtaaagcgact

SEQ ID NO: 460720 - DNA, 25 bp, Homo sapien
ggttgcatcgaaatgcacatgcaca

SEQ ID NO: 460721 - DNA, 25 bp, Homo sapien
tatgtttactgtcatggaaggtggc

SEQ ID NO: 460722 - DNA, 25 bp, Homo sapien
agtaaccatcctctggttgcatcga

SEQ ID NO: 460723 - DNA, 25 bp, Homo sapien
tcagttccagaagtcagtaaccatc

SEQ ID NO: 460724 - DNA, 25 bp, Homo sapien
accatggccggctacccaaggataa

SEQ ID NO: 460725 - DNA, 25 bp, Homo sapien
tatatgaggccaaagatggaaagct

SEQ ID NO: 460726 - DNA, 25 bp, Homo sapien
gaggccaaagatggaaagcttctta

SEQ ID NO: 460727 - DNA, 25 bp, Homo sapien
aacctttagaacagtgcctcccatg

SEQ ID NO: 460728 - DNA, 25 bp, Homo sapien
aagacacgactggggtcatatccca

SEQ ID NO: 460729 - DNA, 25 bp, Homo sapien
tcaagacacgactggggtcatatcc

SEQ ID NO: 460730 - DNA, 25 bp, Homo sapien
gacacgactggggtcatatcccaca

SEQ ID NO: 460731 - DNA, 25 bp, Homo sapien
caagacacgactggggtcatatccc

SEQ ID NO: 460732 - DNA, 25 bp, Homo sapien
ttcggtacactcaaaacaatgcagc

SEQ ID NO: 460733 - DNA, 25 bp, Homo sapien
cgctggccacgtgacacatgttgaa

SEQ ID NO: 460734 - DNA, 25 bp, Homo sapien
tcttcaggcaattccagcagctggc

SEQ ID NO: 460735 - DNA, 25 bp, Homo sapien
gaagagtccccttgcgagtgctcac

SEQ ID NO: 460736 - DNA, 25 bp, Homo sapien
caagcaattggcctgtgatcctcaa

SEQ ID NO: 460737 - DNA, 25 bp, Homo sapien
tcagcggtggcgtcagattctcaca

SEQ ID NO: 460738 - DNA, 25 bp, Homo sapien
gatgctcccgacacgtgaggttgaa

SEQ ID NO: 460739 - DNA, 25 bp, Homo sapien
tgtgagggcaaaaaacggctttcca

SEQ ID NO: 460740 - DNA, 25 bp, Homo sapien
ctgaggacagcttgtagtacttccc

SEQ ID NO: 460741 - DNA, 25 bp, Homo sapien
tgaggacagcttgtagtacttcccc

SEQ ID NO: 460742 - DNA, 25 bp, Homo sapien
tgacgcaagcaagggtagtctggac

SEQ ID NO: 460743 - DNA, 25 bp, Homo sapien
cagagctccggtcacatgggctgag

SEQ ID NO: 460744 - DNA, 25 bp, Homo sapien
tacaacagttttgactgacgcaagc

SEQ ID NO: 460745 - DNA, 25 bp, Homo sapien
aagtgacagcttccatgtaccgtgg

SEQ ID NO: 460746 - DNA, 25 bp, Homo sapien
tctgatgatgattctcaacaccagt

SEQ ID NO: 460747 - DNA, 25 bp, Homo sapien
ctgatgatgattctcaacaccagtg

SEQ ID NO: 460748 - DNA, 25 bp, Homo sapien
tctcaacaccagtgggctgtgaagt

SEQ ID NO: 460749 - DNA, 25 bp, Homo sapien
accagtgggctgtgaagtggcttca

SEQ ID NO: 460750 - DNA, 25 bp, Homo sapien
gccccatcaggtagagaacaactct

SEQ ID NO: 460751 - DNA, 25 bp, Homo sapien
tttctcagcgcaggcatgttaggca

SEQ ID NO: 460752 - DNA, 25 bp, Homo sapien
gaacaagagccaagtgctggcgcca

SEQ ID NO: 460753 - DNA, 25 bp, Homo sapien
taatgtcattcgtttggaggaacca

SEQ ID NO: 460754 - DNA, 25 bp, Homo sapien
cacacctttggcgttagtctgggag

SEQ ID NO: 460755 - DNA, 25 bp, Homo sapien
gctgtgcacccaaagatccagaatt

SEQ ID NO: 460756 - DNA, 25 bp, Homo sapien
gttgcgggccgtgcactgatagtct

SEQ ID NO: 460757 - DNA, 25 bp, Homo sapien
gatagtgacgagctcaattctggga

SEQ ID NO: 460758 - DNA, 25 bp, Homo sapien
ggaggacctcccacattgtactgga

SEQ ID NO: 460759 - DNA, 25 bp, Homo sapien
gccttcctgttgcaagtgcccctgt

SEQ ID NO: 460760 - DNA, 25 bp, Homo sapien
ctgaattgacgaaactctctgcctt

SEQ ID NO: 460761 - DNA, 25 bp, Homo sapien
caagtgcccctgtaaggaggacctc

SEQ ID NO: 460762 - DNA, 25 bp, Homo sapien
tgtgatagcaaagacaggcgctgcc

SEQ ID NO: 460763 - DNA, 25 bp, Homo sapien
gatagcaaagacaggcgctgccatg

SEQ ID NO: 460764 - DNA, 25 bp, Homo sapien
aaatgatgtgatagcaaagacaggc

SEQ ID NO: 460765 - DNA, 25 bp, Homo sapien
gccatgcccctgcacggtgttcctg

SEQ ID NO: 460766 - DNA, 25 bp, Homo sapien
aagggaagccagcaatatgcgggca

SEQ ID NO: 460767 - DNA, 25 bp, Homo sapien
catctctggcaaaggctctacactg

SEQ ID NO: 460768 - DNA, 25 bp, Homo sapien
gataggctctccgttatccaaggga

SEQ ID NO: 460769 - DNA, 25 bp, Homo sapien
acaaaggcatgtggtgataggctct

SEQ ID NO: 460770 - DNA, 25 bp, Homo sapien
tactactgacgtaaggctgccatcc

SEQ ID NO: 460771 - DNA, 25 bp, Homo sapien
caagtgacgctagggttttggccat

SEQ ID NO: 460772 - DNA, 25 bp, Homo sapien
aagtaacaaggtcagattctcaatc

SEQ ID NO: 460773 - DNA, 25 bp, Homo sapien
tcaatctaacttttcagccaacctg

SEQ ID NO: 460774 - DNA, 25 bp, Homo sapien
tagaccacacgggagaaatctgttc

SEQ ID NO: 460775 - DNA, 25 bp, Homo sapien
aaaccgtggcggcaactccgcattg

SEQ ID NO: 460776 - DNA, 25 bp, Homo sapien
gaagatccgtgtccctggttagaag

SEQ ID NO: 460777 - DNA, 25 bp, Homo sapien
catacggtaatatgcccactgcagc

SEQ ID NO: 460778 - DNA, 25 bp, Homo sapien
ctgtggtgaacagggctcatcttca

SEQ ID NO: 460779 - DNA, 25 bp, Homo sapien
ggcttgagcccgtgtgctgtgctta

SEQ ID NO: 460780 - DNA, 25 bp, Homo sapien
aacagcacagcaaggttgtcggtgt

SEQ ID NO: 460781 - DNA, 25 bp, Homo sapien
gcgtggccacatgtaaccgtgatgg

SEQ ID NO: 460782 - DNA, 25 bp, Homo sapien
caaaaggaggcgctatcaagcaagc

SEQ ID NO: 460783 - DNA, 25 bp, Homo sapien
gaaacatcagcgtctttctgacaaa

SEQ ID NO: 460784 - DNA, 25 bp, Homo sapien
aggaaaacccagacggctgcagctt

SEQ ID NO: 460785 - DNA, 25 bp, Homo sapien
tgatccagggctcatcatcagccaa

SEQ ID NO: 460786 - DNA, 25 bp, Homo sapien
aaccaatgagcagatttagaataca

SEQ ID NO: 460787 - DNA, 25 bp, Homo sapien
gagcagatttagaatacatctacat

SEQ ID NO: 460788 - DNA, 25 bp, Homo sapien
caatgagcagatttagaatacatct

SEQ ID NO: 460789 - DNA, 25 bp, Homo sapien
taaaaccaatgagcagatttagaat

SEQ ID NO: 460790 - DNA, 25 bp, Homo sapien
catttgcttaagattaggagtggct

SEQ ID NO: 460791 - DNA, 25 bp, Homo sapien
tgcttaagattaggagtggcttcag

SEQ ID NO: 460792 - DNA, 25 bp, Homo sapien
gtggcttcagtaatgcatctggcat

SEQ ID NO: 460793 - DNA, 25 bp, Homo sapien
cttaagattaggagtggcttcagta

SEQ ID NO: 460794 - DNA, 25 bp, Homo sapien
aagaattcgaagtttgagatgaacc

SEQ ID NO: 460795 - DNA, 25 bp, Homo sapien
aattcgaagtttgagatgaaccatc

SEQ ID NO: 460796 - DNA, 25 bp, Homo sapien
cgaagtttgagatgaaccatcattt

SEQ ID NO: 460797 - DNA, 25 bp, Homo sapien
ctaaagaattcgaagtttgagatga

SEQ ID NO: 460798 - DNA, 25 bp, Homo sapien
aagataccagaaggtgcggtctagg

SEQ ID NO: 460799 - DNA, 25 bp, Homo sapien
gaccagtgaataagaagaccccact

SEQ ID NO: 460800 - DNA, 25 bp, Homo sapien
cagaattgccttagaagataccaga

SEQ ID NO: 460801 - DNA, 25 bp, Homo sapien
cctcgaagacgttgtgcctcacagc

SEQ ID NO: 460802 - DNA, 25 bp, Homo sapien
cggccgaagaggagaaactcattga

SEQ ID NO: 460803 - DNA, 25 bp, Homo sapien
cagacatttaaataggccaacccag

SEQ ID NO: 460804 - DNA, 25 bp, Homo sapien
gagaaactcattgaaatcctggaac

SEQ ID NO: 460805 - DNA, 25 bp, Homo sapien
gacatttaaataggccaacccagac

SEQ ID NO: 460806 - DNA, 25 bp, Homo sapien
cacacttgcctctcgctacagcgtc

SEQ ID NO: 460807 - DNA, 25 bp, Homo sapien
acacttgcctctcgctacagcgtcc

SEQ ID NO: 460808 - DNA, 25 bp, Homo sapien
ttgcctctcgctacagcgtcctcct

SEQ ID NO: 460809 - DNA, 25 bp, Homo sapien
acttgcctctcgctacagcgtcctc

SEQ ID NO: 460810 - DNA, 25 bp, Homo sapien
tgatcacccaaacgtggtctcccgt

SEQ ID NO: 460811 - DNA, 25 bp, Homo sapien
tccagcaggcgtcggttcaaggcct

SEQ ID NO: 460812 - DNA, 25 bp, Homo sapien
tttacatatcaatccatgctgcctg

SEQ ID NO: 460813 - DNA, 25 bp, Homo sapien
aacagctgtagggtgctgccactcc

SEQ ID NO: 460814 - DNA, 25 bp, Homo sapien
tgagaaccacccttgcttgaggaat

SEQ ID NO: 460815 - DNA, 25 bp, Homo sapien
aggaattctgaagcgctggtgaccc

SEQ ID NO: 460816 - DNA, 25 bp, Homo sapien
gtgagtggacgccatccgaagacag

SEQ ID NO: 460817 - DNA, 25 bp, Homo sapien
gaagacagcacttgacctcgggtgg

SEQ ID NO: 460818 - DNA, 25 bp, Homo sapien
gcgctattcaaagctgcactgcaaa

SEQ ID NO: 460819 - DNA, 25 bp, Homo sapien
gctgcactgcaaagggagtaacgga

SEQ ID NO: 460820 - DNA, 25 bp, Homo sapien
caggaggggcgctattcaaagctgc

SEQ ID NO: 460821 - DNA, 25 bp, Homo sapien
ctgcaaagggagtaacggactctgc

SEQ ID NO: 460822 - DNA, 25 bp, Homo sapien
ttgggaatggaagattttctctgca

SEQ ID NO: 460823 - DNA, 25 bp, Homo sapien
cttgggaatggaagattttctctgc

SEQ ID NO: 460824 - DNA, 25 bp, Homo sapien
gggaatggaagattttctctgcagt

SEQ ID NO: 460825 - DNA, 25 bp, Homo sapien
aatggaagattttctctgcagtttg

SEQ ID NO: 460826 - DNA, 25 bp, Homo sapien
tgagaacgggagaggcagttcctac

SEQ ID NO: 460827 - DNA, 25 bp, Homo sapien
ctgtgagaacgggagaggcagttcc

SEQ ID NO: 460828 - DNA, 25 bp, Homo sapien
gtgagaacgggagaggcagttccta

SEQ ID NO: 460829 - DNA, 25 bp, Homo sapien
tgtgagaacgggagaggcagttcct

SEQ ID NO: 460830 - DNA, 25 bp, Homo sapien
tagttttgggaagcgcttcactcca

SEQ ID NO: 460831 - DNA, 25 bp, Homo sapien
cccagcggccgcttctttcaaggtg

SEQ ID NO: 460832 - DNA, 25 bp, Homo sapien
ttctttggcgagatgattgctttgc

SEQ ID NO: 460833 - DNA, 25 bp, Homo sapien
caggttggtagcttctttggagact

SEQ ID NO: 460834 - DNA, 25 bp, Homo sapien
ctggttccgagtggcttgggtgagt

SEQ ID NO: 460835 - DNA, 25 bp, Homo sapien
aactggttccgagtggcttgggtga

SEQ ID NO: 460836 - DNA, 25 bp, Homo sapien
ttctttggaactggttccgagtggc

SEQ ID NO: 460837 - DNA, 25 bp, Homo sapien
tttggaactggttccgagtggcttg

SEQ ID NO: 460838 - DNA, 25 bp, Homo sapien
gcttctcgattcttctcacggccta

SEQ ID NO: 460839 - DNA, 25 bp, Homo sapien
cctaatgggagacatgcttggttct

SEQ ID NO: 460840 - DNA, 25 bp, Homo sapien
cagagagcatggcttctcgattctt

SEQ ID NO: 460841 - DNA, 25 bp, Homo sapien
atgttctcagcaaagtatactaggg

SEQ ID NO: 460842 - DNA, 25 bp, Homo sapien
tctaaaaatacctgagcagccgcag

SEQ ID NO: 460843 - DNA, 25 bp, Homo sapien
aggattgactctccccaggaatgac

SEQ ID NO: 460844 - DNA, 25 bp, Homo sapien
agccgcaggattgactctccccagg

SEQ ID NO: 460845 - DNA, 25 bp, Homo sapien
cgcaggattgactctccccaggaat

SEQ ID NO: 460846 - DNA, 25 bp, Homo sapien
taaccataaagttatatgctcattg

SEQ ID NO: 460847 - DNA, 25 bp, Homo sapien
cagtgcagaaatgtatagcaaagga

SEQ ID NO: 460848 - DNA, 25 bp, Homo sapien
gagacctaatttagcggtattgcta

SEQ ID NO: 460849 - DNA, 25 bp, Homo sapien
ctgaattccacccttgagacctaat

SEQ ID NO: 460850 - DNA, 25 bp, Homo sapien
ggagagaggaggtgcccttcgcagg

SEQ ID NO: 460851 - DNA, 25 bp, Homo sapien
ctcgccatcctgagaggagagagga

SEQ ID NO: 460852 - DNA, 25 bp, Homo sapien
aggtgcccttcgcaggcagcagagc

SEQ ID NO: 460853 - DNA, 25 bp, Homo sapien
cagccgctggctttcatttcccttc

SEQ ID NO: 460854 - DNA, 25 bp, Homo sapien
ttggaccaggtgtcacccccctggc

SEQ ID NO: 460855 - DNA, 25 bp, Homo sapien
gcccagtccatctgcccgtggactg

SEQ ID NO: 460856 - DNA, 25 bp, Homo sapien
catctgcccgtggactgggcacatg

SEQ ID NO: 460857 - DNA, 25 bp, Homo sapien
tttgggtgggacagcttggaccagg

SEQ ID NO: 460858 - DNA, 25 bp, Homo sapien
tcatcacaactgcttcgttcactct

SEQ ID NO: 460859 - DNA, 25 bp, Homo sapien
ttccttgcatctgggtcacatatgg

SEQ ID NO: 460860 - DNA, 25 bp, Homo sapien
gttgtccatggactctcatcacaac

SEQ ID NO: 460861 - DNA, 25 bp, Homo sapien
acatatggctgccactgagtcacct

SEQ ID NO: 460862 - DNA, 25 bp, Homo sapien
gcagccctcacagaactcaatggca

SEQ ID NO: 460863 - DNA, 25 bp, Homo sapien
cacagaactcaatggcagagacaca

SEQ ID NO: 460864 - DNA, 25 bp, Homo sapien
ccctcacagaactcaatggcagaga

SEQ ID NO: 460865 - DNA, 25 bp, Homo sapien
gggcagccctcacagaactcaatgg

SEQ ID NO: 460866 - DNA, 25 bp, Homo sapien
caaagtagctttaattcaaggtggc

SEQ ID NO: 460867 - DNA, 25 bp, Homo sapien
aaaatgtcatactcaagatatataa

SEQ ID NO: 460868 - DNA, 25 bp, Homo sapien
tagtaaccaaagtagctttaattca

SEQ ID NO: 460869 - DNA, 25 bp, Homo sapien
taatagaaatgccaatcagttttcc

SEQ ID NO: 460870 - DNA, 25 bp, Homo sapien
gtccttttaatgagctgaggcccaa

SEQ ID NO: 460871 - DNA, 25 bp, Homo sapien
caatcccaaataagcacctttgtcc

SEQ ID NO: 460872 - DNA, 25 bp, Homo sapien
ggcccaagtgcccatactcgggttc

SEQ ID NO: 460873 - DNA, 25 bp, Homo sapien
ttaaaggtgtgctggtaacaaacat

SEQ ID NO: 460874 - DNA, 25 bp, Homo sapien
tggcctaggagcaccggccccaaat

SEQ ID NO: 460875 - DNA, 25 bp, Homo sapien
gtcttctggcctaggagcaccggcc

SEQ ID NO: 460876 - DNA, 25 bp, Homo sapien
aggctccgtggtgtctgcccttcta

SEQ ID NO: 460877 - DNA, 25 bp, Homo sapien
gtggtgcagagtcctcgccaggctc

SEQ ID NO: 460878 - DNA, 25 bp, Homo sapien
ctagaagggccccaggcgaggctct

SEQ ID NO: 460879 - DNA, 25 bp, Homo sapien
aagggccccaggcgaggctcttggt

SEQ ID NO: 460880 - DNA, 25 bp, Homo sapien
tagaagggccccaggcgaggctctt

SEQ ID NO: 460881 - DNA, 25 bp, Homo sapien
agaagggccccaggcgaggctcttg

SEQ ID NO: 460882 - DNA, 25 bp, Homo sapien
agtggttttatgaaataccgcctca

SEQ ID NO: 460883 - DNA, 25 bp, Homo sapien
gctcttccaggccaatgtggatttc

SEQ ID NO: 460884 - DNA, 25 bp, Homo sapien
caggccaatgtggatttctagcttc

SEQ ID NO: 460885 - DNA, 25 bp, Homo sapien
aaacgggtttcgactctccagctct

SEQ ID NO: 460886 - DNA, 25 bp, Homo sapien
cgagattgaaagctggctgtctgcc

SEQ ID NO: 460887 - DNA, 25 bp, Homo sapien
ctgcaagtgccgctgcgatctgcgg

SEQ ID NO: 460888 - DNA, 25 bp, Homo sapien
tctgcctgctgataactttcggtgg

SEQ ID NO: 460889 - DNA, 25 bp, Homo sapien
tgcgggctgcagttctcgagattga

SEQ ID NO: 460890 - DNA, 25 bp, Homo sapien
tttgaatggctaggtttgacaaggg

SEQ ID NO: 460891 - DNA, 25 bp, Homo sapien
gaagagggcctgtgtttgtgcttct

SEQ ID NO: 460892 - DNA, 25 bp, Homo sapien
ggcactgaggcttgaccgcatggtc

SEQ ID NO: 460893 - DNA, 25 bp, Homo sapien
ttggaagcagcctcggccagcaggg

SEQ ID NO: 460894 - DNA, 25 bp, Homo sapien
atttcgaccccgaggagactgcgga

SEQ ID NO: 460895 - DNA, 25 bp, Homo sapien
gacggtgttctctaaacggcgctga

SEQ ID NO: 460896 - DNA, 25 bp, Homo sapien
caaattctaggaggtgcgttgcagg

SEQ ID NO: 460897 - DNA, 25 bp, Homo sapien
ggctgcgcgagtacaccaagtaagg

SEQ ID NO: 460898 - DNA, 25 bp, Homo sapien
gacaattacttctcgggtgggagcc

SEQ ID NO: 460899 - DNA, 25 bp, Homo sapien
gatgtcgccaatctgactgcgcttg

SEQ ID NO: 460900 - DNA, 25 bp, Homo sapien
actgcgcttgctggagacgggaaat

SEQ ID NO: 460901 - DNA, 25 bp, Homo sapien
tgaagtcgcagaaccagtggcaaaa

SEQ ID NO: 460902 - DNA, 25 bp, Homo sapien
taacagggtgactaggagtgacagc

SEQ ID NO: 460903 - DNA, 25 bp, Homo sapien
taacagcaacgtagtggagcctcag

SEQ ID NO: 460904 - DNA, 25 bp, Homo sapien
tgctgacaccctccaagagacttgg

SEQ ID NO: 460905 - DNA, 25 bp, Homo sapien
cacgaggtgcgcatattcattccca

SEQ ID NO: 460906 - DNA, 25 bp, Homo sapien
gataaggcttttgtgattgaggctg

SEQ ID NO: 460907 - DNA, 25 bp, Homo sapien
cagtcgccttgggtttctgataagg

SEQ ID NO: 460908 - DNA, 25 bp, Homo sapien
ttttgtgattgaggctgggatccca

SEQ ID NO: 460909 - DNA, 25 bp, Homo sapien
aatgccagaaagcagtcgccttggg

SEQ ID NO: 460910 - DNA, 25 bp, Homo sapien
aagacgaacacgagtcccgtttgtg

SEQ ID NO: 460911 - DNA, 25 bp, Homo sapien
ttctccatcaacttggctacatgga

SEQ ID NO: 460912 - DNA, 25 bp, Homo sapien
ggcttcactactgccccactttggg

SEQ ID NO: 460913 - DNA, 25 bp, Homo sapien
gctacatggagactgaccaccctgg

SEQ ID NO: 460914 - DNA, 25 bp, Homo sapien
attttgctccataaaactcataatc

SEQ ID NO: 460915 - DNA, 25 bp, Homo sapien
cataatcctcaggtgagtagatgag

SEQ ID NO: 460916 - DNA, 25 bp, Homo sapien
tcctcataatcctcaggtgagtaga

SEQ ID NO: 460917 - DNA, 25 bp, Homo sapien
ataatcctcataatcctcaggtgag

SEQ ID NO: 460918 - DNA, 25 bp, Homo sapien
tacatcgggcatcattctaaaaacc

SEQ ID NO: 460919 - DNA, 25 bp, Homo sapien
gtttgcaatgcagaatcacagcccc

SEQ ID NO: 460920 - DNA, 25 bp, Homo sapien
tcaaatcttggtgaaccctgagagc

SEQ ID NO: 460921 - DNA, 25 bp, Homo sapien
tggccagagaaaccgcatgtgtgca

SEQ ID NO: 460922 - DNA, 25 bp, Homo sapien
gctgccgctgttgagagatgaagtc

SEQ ID NO: 460923 - DNA, 25 bp, Homo sapien
caggtctgttgtcagtgctcgctgg

SEQ ID NO: 460924 - DNA, 25 bp, Homo sapien
agtccaggtctgttgtcagtgctcg

SEQ ID NO: 460925 - DNA, 25 bp, Homo sapien
ctggctgccgctgttgagagatgaa

SEQ ID NO: 460926 - DNA, 25 bp, Homo sapien
gatgacgatgacgaatacccctgga

SEQ ID NO: 460927 - DNA, 25 bp, Homo sapien
tacctctttgcagtcggagtcctgg

SEQ ID NO: 460928 - DNA, 25 bp, Homo sapien
gctgctgtccaaggccgtggtgatt

SEQ ID NO: 460929 - DNA, 25 bp, Homo sapien
tgttgtacgactccaccaggatgag

SEQ ID NO: 460930 - DNA, 25 bp, Homo sapien
catcctccgtcatccaaggattctt

SEQ ID NO: 460931 - DNA, 25 bp, Homo sapien
ctgcttgcccttccatttcactcaa

SEQ ID NO: 460932 - DNA, 25 bp, Homo sapien
tcttggctcctgcttgcccttccat

SEQ ID NO: 460933 - DNA, 25 bp, Homo sapien
cgcctctgccagtcggccacatcct

SEQ ID NO: 460934 - DNA, 25 bp, Homo sapien
tgggccactagaccctgcatttcca

SEQ ID NO: 460935 - DNA, 25 bp, Homo sapien
cctgtgggccactagaccctgcatt

SEQ ID NO: 460936 - DNA, 25 bp, Homo sapien
ggaacaagtccaaatctggagttat

SEQ ID NO: 460937 - DNA, 25 bp, Homo sapien
acgggtaacccccagatctctgcca

SEQ ID NO: 460938 - DNA, 25 bp, Homo sapien
aacatccattcccagagtcactatc

SEQ ID NO: 460939 - DNA, 25 bp, Homo sapien
tttttgtacaacatccattcccaga

SEQ ID NO: 460940 - DNA, 25 bp, Homo sapien
catccattcccagagtcactatcac

SEQ ID NO: 460941 - DNA, 25 bp, Homo sapien
tatttttgtacaacatccattccca

SEQ ID NO: 460942 - DNA, 25 bp, Homo sapien
tgtgctctcgaatgtatttctctca

SEQ ID NO: 460943 - DNA, 25 bp, Homo sapien
gcagatcccacaagcatatggtttg

SEQ ID NO: 460944 - DNA, 25 bp, Homo sapien
ctgggctttgtgctctcgaatgtat

SEQ ID NO: 460945 - DNA, 25 bp, Homo sapien
tttctgcggtgtcaatccactgagc

SEQ ID NO: 460946 - DNA, 25 bp, Homo sapien
tgcaggatatctgggccttggcatc

SEQ ID NO: 460947 - DNA, 25 bp, Homo sapien
ccttggcatcggcaaagtgatcacg

SEQ ID NO: 460948 - DNA, 25 bp, Homo sapien
agtgatcacgagagatgttcagctc

SEQ ID NO: 460949 - DNA, 25 bp, Homo sapien
cagacttggagaggtcctgcaggat

SEQ ID NO: 460950 - DNA, 25 bp, Homo sapien
aagagaagaaccatctgccctgagt

SEQ ID NO: 460951 - DNA, 25 bp, Homo sapien
gaagaaccatctgccctgagtacag

SEQ ID NO: 460952 - DNA, 25 bp, Homo sapien
gagaagaaccatctgccctgagtac

SEQ ID NO: 460953 - DNA, 25 bp, Homo sapien
ttttatccagggaagagaagaacca

SEQ ID NO: 460954 - DNA, 25 bp, Homo sapien
agaacatttgcttccctgcagcctg

SEQ ID NO: 460955 - DNA, 25 bp, Homo sapien
catgtggagctgctaagtggtggcg

SEQ ID NO: 460956 - DNA, 25 bp, Homo sapien
tgccaccctggaggatcgctttcat

SEQ ID NO: 460957 - DNA, 25 bp, Homo sapien
gcttgtttatctgggcgttcatcca

SEQ ID NO: 460958 - DNA, 25 bp, Homo sapien
cctttctcacagtgtcaaccaactt

SEQ ID NO: 460959 - DNA, 25 bp, Homo sapien
tttgccgtcttgatgagctggagtt

SEQ ID NO: 460960 - DNA, 25 bp, Homo sapien
catttcaccgggcaggaaaatttgc

SEQ ID NO: 460961 - DNA, 25 bp, Homo sapien
tctcacagtgtcaaccaacttgctc

SEQ ID NO: 460962 - DNA, 25 bp, Homo sapien
cagggaggcaccgtgacctccttgc

SEQ ID NO: 460963 - DNA, 25 bp, Homo sapien
tgcttaatccctgactcactttggg

SEQ ID NO: 460964 - DNA, 25 bp, Homo sapien
ttgcttaatccctgactcactttgg

SEQ ID NO: 460965 - DNA, 25 bp, Homo sapien
cactgctacctgtctcttagggaac

SEQ ID NO: 460966 - DNA, 25 bp, Homo sapien
tctgtcttccctttcgggctggatg

SEQ ID NO: 460967 - DNA, 25 bp, Homo sapien
ctttcgggctggatgccaaagctga

SEQ ID NO: 460968 - DNA, 25 bp, Homo sapien
tgctacctgtctcttagggaacatt

SEQ ID NO: 460969 - DNA, 25 bp, Homo sapien
tcaagtccccaccataatagtgaat

SEQ ID NO: 460970 - DNA, 25 bp, Homo sapien
cccaccataatagtgaataggtctt

SEQ ID NO: 460971 - DNA, 25 bp, Homo sapien
gctgttgagggaccctcttttggaa

SEQ ID NO: 460972 - DNA, 25 bp, Homo sapien
aataggtcttttgtagtgtatttga

SEQ ID NO: 460973 - DNA, 25 bp, Homo sapien
caggacagcgagtggggaccacagg

SEQ ID NO: 460974 - DNA, 25 bp, Homo sapien
cggctgcaggacagcgagtggggac

SEQ ID NO: 460975 - DNA, 25 bp, Homo sapien
ctgcaggacagcgagtggggaccac

SEQ ID NO: 460976 - DNA, 25 bp, Homo sapien
tgcaggacagcgagtggggaccaca

SEQ ID NO: 460977 - DNA, 25 bp, Homo sapien
tcactgagtctaagggagatgggtt

SEQ ID NO: 460978 - DNA, 25 bp, Homo sapien
tggagaagagaacaatcgtaaagga

SEQ ID NO: 460979 - DNA, 25 bp, Homo sapien
gagggaacgaaaacaatcttcactg

SEQ ID NO: 460980 - DNA, 25 bp, Homo sapien
tcttaattgtgtggagggaacgaaa

SEQ ID NO: 460981 - DNA, 25 bp, Homo sapien
cgccccttagaggaaaagccacgag

SEQ ID NO: 460982 - DNA, 25 bp, Homo sapien
ctctccccacacgtgggagtgggaa

SEQ ID NO: 460983 - DNA, 25 bp, Homo sapien
tgaaatgaaatgtttcccgcgggaa

SEQ ID NO: 460984 - DNA, 25 bp, Homo sapien
caaggggtcggccatgtttccacag

SEQ ID NO: 460985 - DNA, 25 bp, Homo sapien
cattgatgtaagtgtaccagctgac

SEQ ID NO: 460986 - DNA, 25 bp, Homo sapien
taagtgtaccagctgactggtgtct

SEQ ID NO: 460987 - DNA, 25 bp, Homo sapien
aattgctcattgatgtaagtgtacc

SEQ ID NO: 460988 - DNA, 25 bp, Homo sapien
tgtaccagctgactggtgtctccat

SEQ ID NO: 460989 - DNA, 25 bp, Homo sapien
tctgtcagcattggttccgggagca

SEQ ID NO: 460990 - DNA, 25 bp, Homo sapien
gattctgtcagcattggttccggga

SEQ ID NO: 460991 - DNA, 25 bp, Homo sapien
ctgtcagcattggttccgggagcat

SEQ ID NO: 460992 - DNA, 25 bp, Homo sapien
ttctgtcagcattggttccgggagc

SEQ ID NO: 460993 - DNA, 25 bp, Homo sapien
ttgtcatgtcagatccccagtgatg

SEQ ID NO: 460994 - DNA, 25 bp, Homo sapien
cctgtctgtgccctttcagtcctga

SEQ ID NO: 460995 - DNA, 25 bp, Homo sapien
gatccccagtgatgcgtgcttgcag

SEQ ID NO: 460996 - DNA, 25 bp, Homo sapien
gtgcttgcaggcttgccccaacaat

SEQ ID NO: 460997 - DNA, 25 bp, Homo sapien
gatactgtctgtctgttactccact

SEQ ID NO: 460998 - DNA, 25 bp, Homo sapien
ccactattacttgtcacacttgatt

SEQ ID NO: 460999 - DNA, 25 bp, Homo sapien
gccacctctgcgatactgtctgtct

SEQ ID NO: 461000 - DNA, 25 bp, Homo sapien
cacttgattgaaattaggtgtggac

SEQ ID NO: 461001 - DNA, 25 bp, Homo sapien
gggcttgaattcctgtacatccttt

SEQ ID NO: 461002 - DNA, 25 bp, Homo sapien
ggcttgaattcctgtacatcctttc

SEQ ID NO: 461003 - DNA, 25 bp, Homo sapien
tcatccgtgagacctattggggaaa

SEQ ID NO: 461004 - DNA, 25 bp, Homo sapien
cccatcatccgtgagacctattggg

SEQ ID NO: 461005 - DNA, 25 bp, Homo sapien
catccgtgagacctattggggaaat

SEQ ID NO: 461006 - DNA, 25 bp, Homo sapien
caacccatcatccgtgagacctatt

SEQ ID NO: 461007 - DNA, 25 bp, Homo sapien
caggtccaggtcggctggtcagacc

SEQ ID NO: 461008 - DNA, 25 bp, Homo sapien
agggatgacaggacccttggccagg

SEQ ID NO: 461009 - DNA, 25 bp, Homo sapien
cttccttatcagccggaatggcggg

SEQ ID NO: 461010 - DNA, 25 bp, Homo sapien
tatcagccggaatggcggggtggcc

SEQ ID NO: 461011 - DNA, 25 bp, Homo sapien
tccttatcagccggaatggcggggt

SEQ ID NO: 461012 - DNA, 25 bp, Homo sapien
ccttatcagccggaatggcggggtg

SEQ ID NO: 461013 - DNA, 25 bp, Homo sapien
taaggcattgtcctctttccagaag

SEQ ID NO: 461014 - DNA, 25 bp, Homo sapien
cctcctgaagaaggttccggtctct

SEQ ID NO: 461015 - DNA, 25 bp, Homo sapien
tctggccccggaaagcatggatctt

SEQ ID NO: 461016 - DNA, 25 bp, Homo sapien
tcttctggcgaatactgggagagga

SEQ ID NO: 461017 - DNA, 25 bp, Homo sapien
ggagaccaatgagtgtgtattttct

SEQ ID NO: 461018 - DNA, 25 bp, Homo sapien
cctcaggactttattggatctttca

SEQ ID NO: 461019 - DNA, 25 bp, Homo sapien
ctttcaaagcaaggagaccaatgag

SEQ ID NO: 461020 - DNA, 25 bp, Homo sapien
ttgcctcaggactttattggatctt

SEQ ID NO: 461021 - DNA, 25 bp, Homo sapien
cctctgagaatcagaggacttgcag

SEQ ID NO: 461022 - DNA, 25 bp, Homo sapien
tgccctgggacccatggagagctga

SEQ ID NO: 461023 - DNA, 25 bp, Homo sapien
ctctgagaatcagaggacttgcagg

SEQ ID NO: 461024 - DNA, 25 bp, Homo sapien
gtccaggtcttgagtgtgggcccct

SEQ ID NO: 461025 - DNA, 25 bp, Homo sapien
gcagccctcttgaaatcgaattctc

SEQ ID NO: 461026 - DNA, 25 bp, Homo sapien
ctggcagccctcttgaaatcgaatt

SEQ ID NO: 461027 - DNA, 25 bp, Homo sapien
cgtccaggtcttgagtgtgggcccc

SEQ ID NO: 461028 - DNA, 25 bp, Homo sapien
tgcactggggttcctgcagtgtgaa

SEQ ID NO: 461029 - DNA, 25 bp, Homo sapien
ggtctagagtacacttttcatctcc

SEQ ID NO: 461030 - DNA, 25 bp, Homo sapien
cctgcagtgtgaataccatccaatg

SEQ ID NO: 461031 - DNA, 25 bp, Homo sapien
agtctgcaattgtggaggtctagag

SEQ ID NO: 461032 - DNA, 25 bp, Homo sapien
gaaggatccgaacctacatgagcac

SEQ ID NO: 461033 - DNA, 25 bp, Homo sapien
tgcagagcgtacttgagggtccaga

SEQ ID NO: 461034 - DNA, 25 bp, Homo sapien
tattcatccctcttcgactgcagga

SEQ ID NO: 461035 - DNA, 25 bp, Homo sapien
tctacttctacctcggaaggatccg

SEQ ID NO: 461036 - DNA, 25 bp, Homo sapien
ggcctggatacaaacctagatgtgt

SEQ ID NO: 461037 - DNA, 25 bp, Homo sapien
gtgtggggttataaggcctggatac

SEQ ID NO: 461038 - DNA, 25 bp, Homo sapien
ggtgtggggttataaggcctggata

SEQ ID NO: 461039 - DNA, 25 bp, Homo sapien
taaggcctggatacaaacctagatg

SEQ ID NO: 461040 - DNA, 25 bp, Homo sapien
ttccctggtgttaaagaggtgatcg

SEQ ID NO: 461041 - DNA, 25 bp, Homo sapien
taaagaggtgatcgtgatcttcaga

SEQ ID NO: 461042 - DNA, 25 bp, Homo sapien
ggtgatcgtgatcttcagaacggga

SEQ ID NO: 461043 - DNA, 25 bp, Homo sapien
tgatcttcagaacgggatcctccat

SEQ ID NO: 461044 - DNA, 25 bp, Homo sapien
cctcctgcagactggctttctctgt

SEQ ID NO: 461045 - DNA, 25 bp, Homo sapien
tatctctgcaagtgtgttttgttct

SEQ ID NO: 461046 - DNA, 25 bp, Homo sapien
ctcgctatctctgcaagtgtgtttt

SEQ ID NO: 461047 - DNA, 25 bp, Homo sapien
cgctatctctgcaagtgtgttttgt

SEQ ID NO: 461048 - DNA, 25 bp, Homo sapien
caaccagggtgtcaacttgaggcat

SEQ ID NO: 461049 - DNA, 25 bp, Homo sapien
gatgcccgtttgcaagtcaccgttg

SEQ ID NO: 461050 - DNA, 25 bp, Homo sapien
gagtcgtggcagtagacagctcatc

SEQ ID NO: 461051 - DNA, 25 bp, Homo sapien
taaagtctttgaggacgatgcccgt

SEQ ID NO: 461052 - DNA, 25 bp, Homo sapien
tgcattaatcttagtctcttctctc

SEQ ID NO: 461053 - DNA, 25 bp, Homo sapien
ttgagatctctacaccaccttccca

SEQ ID NO: 461054 - DNA, 25 bp, Homo sapien
tgcttgtcatctgcattaatcttag

SEQ ID NO: 461055 - DNA, 25 bp, Homo sapien
tctgcagtcatttggatgcttgtca

SEQ ID NO: 461056 - DNA, 25 bp, Homo sapien
tagtgagtaataaataaagtgtctc

SEQ ID NO: 461057 - DNA, 25 bp, Homo sapien
actgctgctgcctcgtgcatccagt

SEQ ID NO: 461058 - DNA, 25 bp, Homo sapien
tgctgcctcgtgcatccagttctag

SEQ ID NO: 461059 - DNA, 25 bp, Homo sapien
gtctctagatcaccttgctgcttcc

SEQ ID NO: 461060 - DNA, 25 bp, Homo sapien
gcatctgactccattagatgctcag

SEQ ID NO: 461061 - DNA, 25 bp, Homo sapien
tcatttttcggttgccactgaagtc

SEQ ID NO: 461062 - DNA, 25 bp, Homo sapien
ggacttctgggtgtttaacttagca

SEQ ID NO: 461063 - DNA, 25 bp, Homo sapien
cattagatgctcagggtctcctgca

SEQ ID NO: 461064 - DNA, 25 bp, Homo sapien
cttcttttccacgtccataccatga

SEQ ID NO: 461065 - DNA, 25 bp, Homo sapien
tttcacaatatcttgaaaacggacc

SEQ ID NO: 461066 - DNA, 25 bp, Homo sapien
tcttgaaaacggaccatgcttatct

SEQ ID NO: 461067 - DNA, 25 bp, Homo sapien
ttttccacgtccataccatgaattc

SEQ ID NO: 461068 - DNA, 25 bp, Homo sapien
ttagggccgttctctgttgactgct

SEQ ID NO: 461069 - DNA, 25 bp, Homo sapien
ctgcttagggccgttctctgttgac

SEQ ID NO: 461070 - DNA, 25 bp, Homo sapien
gtctctctccctgcacgaactgcct

SEQ ID NO: 461071 - DNA, 25 bp, Homo sapien
tgactgcttcgtgttgtctgctgtt

SEQ ID NO: 461072 - DNA, 25 bp, Homo sapien
tctgggccctcgtccagtgtcgtga

SEQ ID NO: 461073 - DNA, 25 bp, Homo sapien
gactgctctggaatcatggctctct

SEQ ID NO: 461074 - DNA, 25 bp, Homo sapien
tccagtgtcgtgacagctcttttct

SEQ ID NO: 461075 - DNA, 25 bp, Homo sapien
gttgttgctctgaagtcctgcctct

SEQ ID NO: 461076 - DNA, 25 bp, Homo sapien
tgctctccaaatgagagggcctcag

SEQ ID NO: 461077 - DNA, 25 bp, Homo sapien
ctggcatgctagaaagcatctcaaa

SEQ ID NO: 461078 - DNA, 25 bp, Homo sapien
actccggcttcccttgggttgctct

SEQ ID NO: 461079 - DNA, 25 bp, Homo sapien
gcatctccctgactgggtgagtcag

SEQ ID NO: 461080 - DNA, 25 bp, Homo sapien
gaagccttcattctcaatccgattg

SEQ ID NO: 461081 - DNA, 25 bp, Homo sapien
tcatagaaccatggggcattgtcct

SEQ ID NO: 461082 - DNA, 25 bp, Homo sapien
gctctccatcatagaaccatggggc

SEQ ID NO: 461083 - DNA, 25 bp, Homo sapien
ttgaagaagagaaggcggcatcaca

SEQ ID NO: 461084 - DNA, 25 bp, Homo sapien
ttctgcgtctaggtgtctcagtgag

SEQ ID NO: 461085 - DNA, 25 bp, Homo sapien
tgcgtctaggtgtctcagtgagact

SEQ ID NO: 461086 - DNA, 25 bp, Homo sapien
ctaggtgtctcagtgagactcctac

SEQ ID NO: 461087 - DNA, 25 bp, Homo sapien
cgtctaggtgtctcagtgagactcc

SEQ ID NO: 461088 - DNA, 25 bp, Homo sapien
agagttggcatggctttgggttgct

SEQ ID NO: 461089 - DNA, 25 bp, Homo sapien
gagttggcatggctttgggttgctg

SEQ ID NO: 461090 - DNA, 25 bp, Homo sapien
ggagagttggcatggctttgggttg

SEQ ID NO: 461091 - DNA, 25 bp, Homo sapien
gagagttggcatggctttgggttgc

SEQ ID NO: 461092 - DNA, 25 bp, Homo sapien
tcaagggtcagttggatgtttgtcc

SEQ ID NO: 461093 - DNA, 25 bp, Homo sapien
ccagcatcaagggtcagttggatgt

SEQ ID NO: 461094 - DNA, 25 bp, Homo sapien
caagggtcagttggatgtttgtcca

SEQ ID NO: 461095 - DNA, 25 bp, Homo sapien
gcatcaagggtcagttggatgtttg

SEQ ID NO: 461096 - DNA, 25 bp, Homo sapien
aatgcactctatggccagctctcag

SEQ ID NO: 461097 - DNA, 25 bp, Homo sapien
taagtaacagccgaaatcacagcca

SEQ ID NO: 461098 - DNA, 25 bp, Homo sapien
caattaaccattgccactcagggag

SEQ ID NO: 461099 - DNA, 25 bp, Homo sapien
gaagctggagttcaaacgtgggcct

SEQ ID NO: 461100 - DNA, 25 bp, Homo sapien
tgggtcagtccatgctcggatggct

SEQ ID NO: 461101 - DNA, 25 bp, Homo sapien
tcagtccatgctcggatggctggaa

SEQ ID NO: 461102 - DNA, 25 bp, Homo sapien
ccatgctcggatggctggaagggcc

SEQ ID NO: 461103 - DNA, 25 bp, Homo sapien
agggctgggtcagtccatgctcgga

SEQ ID NO: 461104 - DNA, 25 bp, Homo sapien
tgaggggctctgggccaatggcgcc

SEQ ID NO: 461105 - DNA, 25 bp, Homo sapien
gggctctgggccaatggcgccccag

SEQ ID NO: 461106 - DNA, 25 bp, Homo sapien
ctgggccaatggcgccccagggaac

SEQ ID NO: 461107 - DNA, 25 bp, Homo sapien
gggccaatggcgccccagggaacca

SEQ ID NO: 461108 - DNA, 25 bp, Homo sapien
ggcacccataagtcatattcatggt

SEQ ID NO: 461109 - DNA, 25 bp, Homo sapien
tgggtgggctggcacccataagtca

SEQ ID NO: 461110 - DNA, 25 bp, Homo sapien
ggctggcacccataagtcatattca

SEQ ID NO: 461111 - DNA, 25 bp, Homo sapien
ggtgggctggcacccataagtcata

SEQ ID NO: 461112 - DNA, 25 bp, Homo sapien
ctgggatgtcgctggtccactggca

SEQ ID NO: 461113 - DNA, 25 bp, Homo sapien
tccactggcaagtcacttagacgag

SEQ ID NO: 461114 - DNA, 25 bp, Homo sapien
tactcaggcttaataaaacttgtcc

SEQ ID NO: 461115 - DNA, 25 bp, Homo sapien
ccccagtcttttactcaggcttaat

SEQ ID NO: 461116 - DNA, 25 bp, Homo sapien
tttccagcccagtggaattagagac

SEQ ID NO: 461117 - DNA, 25 bp, Homo sapien
gatttctgtgagactttgggagcct

SEQ ID NO: 461118 - DNA, 25 bp, Homo sapien
ggaactgctctgagcttagacactg

SEQ ID NO: 461119 - DNA, 25 bp, Homo sapien
tgaagactgaggagcaaatccgctg

SEQ ID NO: 461120 - DNA, 25 bp, Homo sapien
ttgggcaggcacgtaaacaccattg

SEQ ID NO: 461121 - DNA, 25 bp, Homo sapien
tgtggagctaggaggaatcaaactg

SEQ ID NO: 461122 - DNA, 25 bp, Homo sapien
ccattgtccaggctttcattccaga

SEQ ID NO: 461123 - DNA, 25 bp, Homo sapien
gaaatgctttaagcagccacttagg

SEQ ID NO: 461124 - DNA, 25 bp, Homo sapien
ctttagaaccttgcctgatcatagg

SEQ ID NO: 461125 - DNA, 25 bp, Homo sapien
tacgtactttagaaccttgcctgat

SEQ ID NO: 461126 - DNA, 25 bp, Homo sapien
tccattgacacagactacgtacttt

SEQ ID NO: 461127 - DNA, 25 bp, Homo sapien
aaagggaaatagacattgtgacatc

SEQ ID NO: 461128 - DNA, 25 bp, Homo sapien
tttataaaatccaagcgcgctgttg

SEQ ID NO: 461129 - DNA, 25 bp, Homo sapien
cagtgccgtcttgtcttcacgaggg

SEQ ID NO: 461130 - DNA, 25 bp, Homo sapien
gaggtcatctgaccttcaccttgga

SEQ ID NO: 461131 - DNA, 25 bp, Homo sapien
gcacatttccgctgtccgtcagtaa

SEQ ID NO: 461132 - DNA, 25 bp, Homo sapien
tagaaggtgagaggcgagtcaccct

SEQ ID NO: 461133 - DNA, 25 bp, Homo sapien
tcacgggaccgtcagcatgggcttt

SEQ ID NO: 461134 - DNA, 25 bp, Homo sapien
ggatatgtccagtcatcctgccctg

SEQ ID NO: 461135 - DNA, 25 bp, Homo sapien
tgacgtccgacaagccatctcggca

SEQ ID NO: 461136 - DNA, 25 bp, Homo sapien
gctcagatgctgttgcgttcctgct

SEQ ID NO: 461137 - DNA, 25 bp, Homo sapien
tcctggaaccatagggagtttaatg

SEQ ID NO: 461138 - DNA, 25 bp, Homo sapien
ttagtggcagcctacaatgtgcaag

SEQ ID NO: 461139 - DNA, 25 bp, Homo sapien
cagctataagaagcctgacctggag

SEQ ID NO: 461140 - DNA, 25 bp, Homo sapien
tctgcagcagtcacatgccttggct

SEQ ID NO: 461141 - DNA, 25 bp, Homo sapien
ccttgctagggtcttcggtacagtt

SEQ ID NO: 461142 - DNA, 25 bp, Homo sapien
cagttgcttggaactattccaggga

SEQ ID NO: 461143 - DNA, 25 bp, Homo sapien
gtgaaaacgttcagacagggagcca

SEQ ID NO: 461144 - DNA, 25 bp, Homo sapien
gtgtctctgattcttatcctccgat

SEQ ID NO: 461145 - DNA, 25 bp, Homo sapien
tatcctccgatgtcatgcagactct

SEQ ID NO: 461146 - DNA, 25 bp, Homo sapien
ccgctcctgccccgttggtgggaga

SEQ ID NO: 461147 - DNA, 25 bp, Homo sapien
tcagaggcgttgtgccttgcccctc

SEQ ID NO: 461148 - DNA, 25 bp, Homo sapien
gctattcccactcctagctccttca

SEQ ID NO: 461149 - DNA, 25 bp, Homo sapien
gctccttcatgtattcatcaaagcc

SEQ ID NO: 461150 - DNA, 25 bp, Homo sapien
tttttgcaaagctattcccactcct

SEQ ID NO: 461151 - DNA, 25 bp, Homo sapien
ccagcaggcgccatcttccttccag

SEQ ID NO: 461152 - DNA, 25 bp, Homo sapien
aaactcatctcccagggtacaagaa

SEQ ID NO: 461153 - DNA, 25 bp, Homo sapien
ctcggtttttgtggtgaggtttctg

SEQ ID NO: 461154 - DNA, 25 bp, Homo sapien
gtaaagttgcagacagtctgtgttt

SEQ ID NO: 461155 - DNA, 25 bp, Homo sapien
ggtttttgtggtgaggtttctgcca

SEQ ID NO: 461156 - DNA, 25 bp, Homo sapien
tacgtggtccagagctgttgtcttc

SEQ ID NO: 461157 - DNA, 25 bp, Homo sapien
gtgtgccttctcctgtaagtgtggt

SEQ ID NO: 461158 - DNA, 25 bp, Homo sapien
cagatattcaggatgtacgtggtcc

SEQ ID NO: 461159 - DNA, 25 bp, Homo sapien
tctcttgtgtgttagcctggcttgc

SEQ ID NO: 461160 - DNA, 25 bp, Homo sapien
aggcctccgccctgcggcgccggca

SEQ ID NO: 461161 - DNA, 25 bp, Homo sapien
cgcgaggtggccgagaccgcggagg

SEQ ID NO: 461162 - DNA, 25 bp, Homo sapien
gcggcgccggcacggcagaggacat

SEQ ID NO: 461163 - DNA, 25 bp, Homo sapien
gccgagaccgcggaggaggacaggc

SEQ ID NO: 461164 - DNA, 25 bp, Homo sapien
tgagatcccagtacagtgtcggagc

SEQ ID NO: 461165 - DNA, 25 bp, Homo sapien
gatcccagtacagtgtcggagcgca

SEQ ID NO: 461166 - DNA, 25 bp, Homo sapien
cgcgtgagatcccagtacagtgtcg

SEQ ID NO: 461167 - DNA, 25 bp, Homo sapien
cgcacacgcgtgagatcccagtaca

SEQ ID NO: 461168 - DNA, 25 bp, Homo sapien
agcgcagagcggacccgacgcggcg

SEQ ID NO: 461169 - DNA, 25 bp, Homo sapien
cagccaggcgcagagtccgaggagg

SEQ ID NO: 461170 - DNA, 25 bp, Homo sapien
agccaggcgcagagtccgaggaggg

SEQ ID NO: 461171 - DNA, 25 bp, Homo sapien
ggcagcgcagagcggacccgacgcg

SEQ ID NO: 461172 - DNA, 25 bp, Homo sapien
gaactcaggaaacgcttcactttcc

SEQ ID NO: 461173 - DNA, 25 bp, Homo sapien
ctcaggaaacgcttcactttccttt

SEQ ID NO: 461174 - DNA, 25 bp, Homo sapien
tcactttccttttccctattggctc

SEQ ID NO: 461175 - DNA, 25 bp, Homo sapien
cccgaactcaggaaacgcttcactt

SEQ ID NO: 461176 - DNA, 25 bp, Homo sapien
accagctcctttcgccggccgccat

SEQ ID NO: 461177 - DNA, 25 bp, Homo sapien
agagaaaacgtctgtgagcccacac

SEQ ID NO: 461178 - DNA, 25 bp, Homo sapien
gtctgtgagcccacacgaccggctg

SEQ ID NO: 461179 - DNA, 25 bp, Homo sapien
aaacgtctgtgagcccacacgaccg

SEQ ID NO: 461180 - DNA, 25 bp, Homo sapien
gaaaacgtctgtgagcccacacgac

SEQ ID NO: 461181 - DNA, 25 bp, Homo sapien
gacaaggaaggccatttgcccgcaa

SEQ ID NO: 461182 - DNA, 25 bp, Homo sapien
tagctacactggacgggcaagtacc

SEQ ID NO: 461183 - DNA, 25 bp, Homo sapien
caaaatttagctacactggacgggc

SEQ ID NO: 461184 - DNA, 25 bp, Homo sapien
gccatttgcccgcaaaatttagcta

SEQ ID NO: 461185 - DNA, 25 bp, Homo sapien
taccgaaaagagacatgatagattg

SEQ ID NO: 461186 - DNA, 25 bp, Homo sapien
tttatgacagactaactggagtgtg

SEQ ID NO: 461187 - DNA, 25 bp, Homo sapien
gaaaatgtctcgtggctcaatcgta

SEQ ID NO: 461188 - DNA, 25 bp, Homo sapien
tattccagtctatatagaagacccc

SEQ ID NO: 461189 - DNA, 25 bp, Homo sapien
actggtactaatttatggtaccaag

SEQ ID NO: 461190 - DNA, 25 bp, Homo sapien
actagctctgcattggcccctttca

SEQ ID NO: 461191 - DNA, 25 bp, Homo sapien
cataagaggagtcacctttctccag

SEQ ID NO: 461192 - DNA, 25 bp, Homo sapien
aggcgtttctatacatcttctgcaa

SEQ ID NO: 461193 - DNA, 25 bp, Homo sapien
gtgtagttacacagtgtattacttc

SEQ ID NO: 461194 - DNA, 25 bp, Homo sapien
tgttttgtgtagttacacagtgtat

SEQ ID NO: 461195 - DNA, 25 bp, Homo sapien
tagttacacagtgtattacttcgtt

SEQ ID NO: 461196 - DNA, 25 bp, Homo sapien
cacagtgtattacttcgttttcaca

SEQ ID NO: 461197 - DNA, 25 bp, Homo sapien
caatgagcccagggaagaataatga

SEQ ID NO: 461198 - DNA, 25 bp, Homo sapien
ccaaaggacaatgaccaaacacaca

SEQ ID NO: 461199 - DNA, 25 bp, Homo sapien
tgtagcagcagtctgattccccaaa

SEQ ID NO: 461200 - DNA, 25 bp, Homo sapien
acatacaatgagcccagggaagaat

SEQ ID NO: 461201 - DNA, 25 bp, Homo sapien
ttgctagttgacactaattttttct

SEQ ID NO: 461202 - DNA, 25 bp, Homo sapien
gcagggctcttaaagcacaccataa

SEQ ID NO: 461203 - DNA, 25 bp, Homo sapien
tttcccatttttgctagttgacact

SEQ ID NO: 461204 - DNA, 25 bp, Homo sapien
agcattgcagtatggatgaaaaaat

SEQ ID NO: 461205 - DNA, 25 bp, Homo sapien
taagttgagactatccagctggtaa

SEQ ID NO: 461206 - DNA, 25 bp, Homo sapien
taaagattattcctgtgtgccacaa

SEQ ID NO: 461207 - DNA, 25 bp, Homo sapien
ggtggtgatgacgaagcctcaaata

SEQ ID NO: 461208 - DNA, 25 bp, Homo sapien
tcttctgtatatgctctcccaaggg

SEQ ID NO: 461209 - DNA, 25 bp, Homo sapien
tgatggagaccaaacatggcagccc

SEQ ID NO: 461210 - DNA, 25 bp, Homo sapien
catagactctaagggactggcagct

SEQ ID NO: 461211 - DNA, 25 bp, Homo sapien
gacagctgtcatgtacggagtccaa

SEQ ID NO: 461212 - DNA, 25 bp, Homo sapien
tacgcattgataaagacacccacag

SEQ ID NO: 461213 - DNA, 25 bp, Homo sapien
tcttacagttataaagaagatttga

SEQ ID NO: 461214 - DNA, 25 bp, Homo sapien
gttgtagataactattttcttacag

SEQ ID NO: 461215 - DNA, 25 bp, Homo sapien
ttgtagataactattttcttacagt

SEQ ID NO: 461216 - DNA, 25 bp, Homo sapien
agttgtagataactattttcttaca

SEQ ID NO: 461217 - DNA, 25 bp, Homo sapien
gagagactgagagccgagactgcat

SEQ ID NO: 461218 - DNA, 25 bp, Homo sapien
ccgagactgcatcactgcactcctg

SEQ ID NO: 461219 - DNA, 25 bp, Homo sapien
cctgagagactgagagccgagactg

SEQ ID NO: 461220 - DNA, 25 bp, Homo sapien
cgagactgcatcactgcactcctgc

SEQ ID NO: 461221 - DNA, 25 bp, Homo sapien
aaaacaaactgcactgggtgaatta

SEQ ID NO: 461222 - DNA, 25 bp, Homo sapien
aaagcaccttctagtatctgttgac

SEQ ID NO: 461223 - DNA, 25 bp, Homo sapien
ttgaccgttgacattaacatcgccg

SEQ ID NO: 461224 - DNA, 25 bp, Homo sapien
gggtgaattaatctgatgttaaatc

SEQ ID NO: 461225 - DNA, 25 bp, Homo sapien
agaaaaatggatcctagactttggc

SEQ ID NO: 461226 - DNA, 25 bp, Homo sapien
gatcctagactttggcccagcagtg

SEQ ID NO: 461227 - DNA, 25 bp, Homo sapien
aaatggatcctagactttggcccag

SEQ ID NO: 461228 - DNA, 25 bp, Homo sapien
gcagtgtgaagtgaggatacagtga

SEQ ID NO: 461229 - DNA, 25 bp, Homo sapien
ccctatatacttaaacagaggaagc

SEQ ID NO: 461230 - DNA, 25 bp, Homo sapien
cagaggaagcgtaaaagcgtatccc

SEQ ID NO: 461231 - DNA, 25 bp, Homo sapien
ttccaacttggcaaccccctatata

SEQ ID NO: 461232 - DNA, 25 bp, Homo sapien
aaaagcgtatcccattgaatcaatg

SEQ ID NO: 461233 - DNA, 25 bp, Homo sapien
atattttgattcttcactacagaga

SEQ ID NO: 461234 - DNA, 25 bp, Homo sapien
taatgaaggctgcattattaaatcc

SEQ ID NO: 461235 - DNA, 25 bp, Homo sapien
tttgattcttcactacagagagcat

SEQ ID NO: 461236 - DNA, 25 bp, Homo sapien
taaatagtagtagatgagctttact

SEQ ID NO: 461237 - DNA, 25 bp, Homo sapien
tacatcactgcaagaaccaacaagt

SEQ ID NO: 461238 - DNA, 25 bp, Homo sapien
tcactgcaagaaccaacaagtccat

SEQ ID NO: 461239 - DNA, 25 bp, Homo sapien
ctacatcactgcaagaaccaacaag

SEQ ID NO: 461240 - DNA, 25 bp, Homo sapien
catcactgcaagaaccaacaagtcc

SEQ ID NO: 461241 - DNA, 25 bp, Homo sapien
caaggtggataaacaatgttagtgc

SEQ ID NO: 461242 - DNA, 25 bp, Homo sapien
tgttagtgcaattcccaactttcca

SEQ ID NO: 461243 - DNA, 25 bp, Homo sapien
cccaactttccatagtgagagaata

SEQ ID NO: 461244 - DNA, 25 bp, Homo sapien
ctgcacatcacaaggtggataaaca

SEQ ID NO: 461245 - DNA, 25 bp, Homo sapien
taagcgaaggaggtgactcaaccat

SEQ ID NO: 461246 - DNA, 25 bp, Homo sapien
caaaggctctgatctgcaatggatg

SEQ ID NO: 461247 - DNA, 25 bp, Homo sapien
ttgttacgacaacctccaatgagga

SEQ ID NO: 461248 - DNA, 25 bp, Homo sapien
ccaatgaggacaagtttaagcgaag

SEQ ID NO: 461249 - DNA, 25 bp, Homo sapien
gctcgttccacatggtatgcagacc

SEQ ID NO: 461250 - DNA, 25 bp, Homo sapien
ttccacatggtatgcagaccaattg

SEQ ID NO: 461251 - DNA, 25 bp, Homo sapien
cgttccacatggtatgcagaccaat

SEQ ID NO: 461252 - DNA, 25 bp, Homo sapien
tcgttccacatggtatgcagaccaa

SEQ ID NO: 461253 - DNA, 25 bp, Homo sapien
tgtgtagcctgttggtaccaccaga

SEQ ID NO: 461254 - DNA, 25 bp, Homo sapien
cggcacggcacttgcctgtgtagcc

SEQ ID NO: 461255 - DNA, 25 bp, Homo sapien
cttgcctgtgtagcctgttggtacc

SEQ ID NO: 461256 - DNA, 25 bp, Homo sapien
tagcctgttggtaccaccagagggt

SEQ ID NO: 461257 - DNA, 25 bp, Homo sapien
cacttctgagtgcttgacttttgat

SEQ ID NO: 461258 - DNA, 25 bp, Homo sapien
caactctacttgttcacttctgagt

SEQ ID NO: 461259 - DNA, 25 bp, Homo sapien
acttgttcacttctgagtgcttgac

SEQ ID NO: 461260 - DNA, 25 bp, Homo sapien
tcacttctgagtgcttgacttttga

SEQ ID NO: 461261 - DNA, 25 bp, Homo sapien
gacaagtagatggaagactagccta

SEQ ID NO: 461262 - DNA, 25 bp, Homo sapien
gactagagaatgttagcaagatggt

SEQ ID NO: 461263 - DNA, 25 bp, Homo sapien
taagtgaagcatactatcgccgtgc

SEQ ID NO: 461264 - DNA, 25 bp, Homo sapien
aaaaagtgaatcacctaagtgaagc

SEQ ID NO: 461265 - DNA, 25 bp, Homo sapien
ggccccccgaattgtgtgcaaggat

SEQ ID NO: 461266 - DNA, 25 bp, Homo sapien
gataattgtgccagctgccatacac

SEQ ID NO: 461267 - DNA, 25 bp, Homo sapien
tttgggccccccgaattgtgtgcaa

SEQ ID NO: 461268 - DNA, 25 bp, Homo sapien
tgtgcaaggataattgtgccagctg

SEQ ID NO: 461269 - DNA, 25 bp, Homo sapien
cagatgcacgagcactttttctgat

SEQ ID NO: 461270 - DNA, 25 bp, Homo sapien
gccagttatatctccttcgtgagga

SEQ ID NO: 461271 - DNA, 25 bp, Homo sapien
tcctgatcagagaatctgcttacag

SEQ ID NO: 461272 - DNA, 25 bp, Homo sapien
aagaatgtgagcgatagtttcagca

SEQ ID NO: 461273 - DNA, 25 bp, Homo sapien
taaataacttttccacagatgatag

SEQ ID NO: 461274 - DNA, 25 bp, Homo sapien
aataacttttccacagatgatagga

SEQ ID NO: 461275 - DNA, 25 bp, Homo sapien
cttttccacagatgataggaatgtc

SEQ ID NO: 461276 - DNA, 25 bp, Homo sapien
tttccacagatgataggaatgtcac

SEQ ID NO: 461277 - DNA, 25 bp, Homo sapien
tatttacatatgaaggtgtttaacc

SEQ ID NO: 461278 - DNA, 25 bp, Homo sapien
tacatatgaaggtgtttaaccagtt

SEQ ID NO: 461279 - DNA, 25 bp, Homo sapien
catatgaaggtgtttaaccagttta

SEQ ID NO: 461280 - DNA, 25 bp, Homo sapien
tgaaggtgtttaaccagtttatata

SEQ ID NO: 461281 - DNA, 25 bp, Homo sapien
atgtataccaagaatggaagccgaa

SEQ ID NO: 461282 - DNA, 25 bp, Homo sapien
catgtataccaagaatggaagccga

SEQ ID NO: 461283 - DNA, 25 bp, Homo sapien
tgtataccaagaatggaagccgaag

SEQ ID NO: 461284 - DNA, 25 bp, Homo sapien
ctggtggctcaaagccagattctct

SEQ ID NO: 461285 - DNA, 25 bp, Homo sapien
tggtggctcaaagccagattctctg

SEQ ID NO: 461286 - DNA, 25 bp, Homo sapien
gtggctcaaagccagattctctgca

SEQ ID NO: 461287 - DNA, 25 bp, Homo sapien
ggctcaaagccagattctctgcaac

SEQ ID NO: 461288 - DNA, 25 bp, Homo sapien
gggagtcagtaaaggatctgtcact

SEQ ID NO: 461289 - DNA, 25 bp, Homo sapien
gttggattaaccttctgtagctgct

SEQ ID NO: 461290 - DNA, 25 bp, Homo sapien
gaggccttttccatgggagtcagta

SEQ ID NO: 461291 - DNA, 25 bp, Homo sapien
gagaggacctgtgaggttttactga

SEQ ID NO: 461292 - DNA, 25 bp, Homo sapien
actgttcctgcatagcttggcgagc

SEQ ID NO: 461293 - DNA, 25 bp, Homo sapien
ttggccataattgcctttgacttgg

SEQ ID NO: 461294 - DNA, 25 bp, Homo sapien
ctccaggtcatatttggccataatt

SEQ ID NO: 461295 - DNA, 25 bp, Homo sapien
caactgttcctgcatagcttggcga

SEQ ID NO: 461296 - DNA, 25 bp, Homo sapien
cctctgtagcaataggggttccgct

SEQ ID NO: 461297 - DNA, 25 bp, Homo sapien
cctgaacatccagggattcggtccg

SEQ ID NO: 461298 - DNA, 25 bp, Homo sapien
gatagtgccctcaattcggacagca

SEQ ID NO: 461299 - DNA, 25 bp, Homo sapien
gggattcggtccgtccacattcatc

SEQ ID NO: 461300 - DNA, 25 bp, Homo sapien
cacatcctctgcttttatgggctta

SEQ ID NO: 461301 - DNA, 25 bp, Homo sapien
tgccaaagacctcacggaaggagac

SEQ ID NO: 461302 - DNA, 25 bp, Homo sapien
catcctctgcttttatgggcttaat

SEQ ID NO: 461303 - DNA, 25 bp, Homo sapien
acctcacggaaggagactgtgtggt

SEQ ID NO: 461304 - DNA, 25 bp, Homo sapien
ttcttctttattgtgacgtgtggtg

SEQ ID NO: 461305 - DNA, 25 bp, Homo sapien
gacgctagcggacaaaccactttga

SEQ ID NO: 461306 - DNA, 25 bp, Homo sapien
gataagctggccacattgatgaatg

SEQ ID NO: 461307 - DNA, 25 bp, Homo sapien
tgtgggttcaaaacagcaggcttgg

SEQ ID NO: 461308 - DNA, 25 bp, Homo sapien
tgagatgcggcactgttaagggaca

SEQ ID NO: 461309 - DNA, 25 bp, Homo sapien
ttaatgtttcacaagcaagacaaac

SEQ ID NO: 461310 - DNA, 25 bp, Homo sapien
tatttaaatcaagtgtacgaagctc

SEQ ID NO: 461311 - DNA, 25 bp, Homo sapien
atcaagtgtacgaagctctgcagtt

SEQ ID NO: 461312 - DNA, 25 bp, Homo sapien
tctataagatgaccttataaaatcc

SEQ ID NO: 461313 - DNA, 25 bp, Homo sapien
taagatgaccttataaaatccctca

SEQ ID NO: 461314 - DNA, 25 bp, Homo sapien
aattccaacgttgaacatggcctgg

SEQ ID NO: 461315 - DNA, 25 bp, Homo sapien
tgagcaagaacaacaaggcatggtg

SEQ ID NO: 461316 - DNA, 25 bp, Homo sapien
catggcctggagcttaacagatgtt

SEQ ID NO: 461317 - DNA, 25 bp, Homo sapien
ctgatgttgacacaggaataaggca

SEQ ID NO: 461318 - DNA, 25 bp, Homo sapien
caaacatttatagtgcaagtagaga

SEQ ID NO: 461319 - DNA, 25 bp, Homo sapien
tcttataaagtgcatgtagttggtt

SEQ ID NO: 461320 - DNA, 25 bp, Homo sapien
tcctagccttttgttggttgacaaa

SEQ ID NO: 461321 - DNA, 25 bp, Homo sapien
taatggttagcttttatacactacc

SEQ ID NO: 461322 - DNA, 25 bp, Homo sapien
ggagagccagtccaaattcaaaacc

SEQ ID NO: 461323 - DNA, 25 bp, Homo sapien
acacttggtatggtcagttttaaca

SEQ ID NO: 461324 - DNA, 25 bp, Homo sapien
gccgtgctggcagccgaatagattg

SEQ ID NO: 461325 - DNA, 25 bp, Homo sapien
gccgaatagattgcgcccactcaga

SEQ ID NO: 461326 - DNA, 25 bp, Homo sapien
taaaaagttaatacagagggctgca

SEQ ID NO: 461327 - DNA, 25 bp, Homo sapien
tacgcaggttggagtttcggctcac

SEQ ID NO: 461328 - DNA, 25 bp, Homo sapien
gtagcttcataaggctttcatttgc

SEQ ID NO: 461329 - DNA, 25 bp, Homo sapien
gaagcaggttttgtagcttcataag

SEQ ID NO: 461330 - DNA, 25 bp, Homo sapien
cgagatggtgcaagtctacgtgact

SEQ ID NO: 461331 - DNA, 25 bp, Homo sapien
gaattctcaggcaaaatgctagggc

SEQ ID NO: 461332 - DNA, 25 bp, Homo sapien
gctgccctccgcttgcaaaattgaa

SEQ ID NO: 461333 - DNA, 25 bp, Homo sapien
gggctggtaccatctcgggcttgtc

SEQ ID NO: 461334 - DNA, 25 bp, Homo sapien
catggcctaattctgctgtgaccca

SEQ ID NO: 461335 - DNA, 25 bp, Homo sapien
gcaggcatcttattgaggatctcct

SEQ ID NO: 461336 - DNA, 25 bp, Homo sapien
catttacagaactgacttggctcag

SEQ ID NO: 461337 - DNA, 25 bp, Homo sapien
cacagccaaacgatatcagttacta

SEQ ID NO: 461338 - DNA, 25 bp, Homo sapien
cacttcttagacggggcggttgcca

SEQ ID NO: 461339 - DNA, 25 bp, Homo sapien
ttcttagacggggcggttgccaggc

SEQ ID NO: 461340 - DNA, 25 bp, Homo sapien
tagacggggcggttgccaggcggag

SEQ ID NO: 461341 - DNA, 25 bp, Homo sapien
ttagacggggcggttgccaggcgga

SEQ ID NO: 461342 - DNA, 25 bp, Homo sapien
atacatataacatcgcctttaccac

SEQ ID NO: 461343 - DNA, 25 bp, Homo sapien
tacatataacatcgcctttaccacc

SEQ ID NO: 461344 - DNA, 25 bp, Homo sapien
acatataacatcgcctttaccaccc

SEQ ID NO: 461345 - DNA, 25 bp, Homo sapien
tggtgatatgcccatcatggctgtt

SEQ ID NO: 461346 - DNA, 25 bp, Homo sapien
gttgcaaatccccatatgtgtgagt

SEQ ID NO: 461347 - DNA, 25 bp, Homo sapien
tggagtctcgctcacattgtgcagg

SEQ ID NO: 461348 - DNA, 25 bp, Homo sapien
tgcctgggcatactcactagctaag

SEQ ID NO: 461349 - DNA, 25 bp, Homo sapien
ttttactgagtcctccaaaatattc

SEQ ID NO: 461350 - DNA, 25 bp, Homo sapien
tactgagtcctccaaaatattcagc

SEQ ID NO: 461351 - DNA, 25 bp, Homo sapien
ctgagtcctccaaaatattcagcat

SEQ ID NO: 461352 - DNA, 25 bp, Homo sapien
ttactgagtcctccaaaatattcag

SEQ ID NO: 461353 - DNA, 25 bp, Homo sapien
tcttccaaggtcgttgcctgctgat

SEQ ID NO: 461354 - DNA, 25 bp, Homo sapien
gggctacttcttccaaggtcgttgc

SEQ ID NO: 461355 - DNA, 25 bp, Homo sapien
aaggtcgttgcctgctgatctccca

SEQ ID NO: 461356 - DNA, 25 bp, Homo sapien
tcgttgcctgctgatctcccagcat

SEQ ID NO: 461357 - DNA, 25 bp, Homo sapien
ctctccaagattgtagggccgcggg

SEQ ID NO: 461358 - DNA, 25 bp, Homo sapien
ggaatgtataggaagactctccaag

SEQ ID NO: 461359 - DNA, 25 bp, Homo sapien
taggaagactctccaagattgtagg

SEQ ID NO: 461360 - DNA, 25 bp, Homo sapien
gccgcggggtaatcctttattgtgc

SEQ ID NO: 461361 - DNA, 25 bp, Homo sapien
tgcttggcactactacccttggaaa

SEQ ID NO: 461362 - DNA, 25 bp, Homo sapien
tggtaaacctccaaaccgaagtgca

SEQ ID NO: 461363 - DNA, 25 bp, Homo sapien
ccagtgaagcgcgtggttttcccaa

SEQ ID NO: 461364 - DNA, 25 bp, Homo sapien
tgaacgtgacggcagcaaatgcaga

SEQ ID NO: 461365 - DNA, 25 bp, Homo sapien
cccggccccaagtccgtatgcgtct

SEQ ID NO: 461366 - DNA, 25 bp, Homo sapien
gtccgtatgcgtctctctcagaacc

SEQ ID NO: 461367 - DNA, 25 bp, Homo sapien
tcagaacccgatcctccggtgtctg

SEQ ID NO: 461368 - DNA, 25 bp, Homo sapien
tggctgcggagctggttcccagccc

SEQ ID NO: 461369 - DNA, 25 bp, Homo sapien
tcgggtacgggtaagcgtcttgcca

SEQ ID NO: 461370 - DNA, 25 bp, Homo sapien
tacgggtaagcgtcttgccactcac

SEQ ID NO: 461371 - DNA, 25 bp, Homo sapien
ctatggcaacgctccacacgcggag

SEQ ID NO: 461372 - DNA, 25 bp, Homo sapien
caacgctccacacgcggaggtcggg

SEQ ID NO: 461373 - DNA, 25 bp, Homo sapien
tctggtgcaccttaagcaagagcgg

SEQ ID NO: 461374 - DNA, 25 bp, Homo sapien
ggaactaacggtgcatgggaagccc

SEQ ID NO: 461375 - DNA, 25 bp, Homo sapien
gcccaaagagtaggaagccgttcca

SEQ ID NO: 461376 - DNA, 25 bp, Homo sapien
caacttttggactcctgctacgggc

SEQ ID NO: 461377 - DNA, 25 bp, Homo sapien
ctgggaagcttggggtggtctgcag

SEQ ID NO: 461378 - DNA, 25 bp, Homo sapien
agcttggggtggtctgcagatcttg

SEQ ID NO: 461379 - DNA, 25 bp, Homo sapien
gcttggggtggtctgcagatcttgt

SEQ ID NO: 461380 - DNA, 25 bp, Homo sapien
aagcttggggtggtctgcagatctt

SEQ ID NO: 461381 - DNA, 25 bp, Homo sapien
gagcatcgggctttgcagtcccata

SEQ ID NO: 461382 - DNA, 25 bp, Homo sapien
aacagaaatgggatgctagcgtgcc

SEQ ID NO: 461383 - DNA, 25 bp, Homo sapien
taatgcctacctcagagggatgctg

SEQ ID NO: 461384 - DNA, 25 bp, Homo sapien
tagcgtgccactacctacttgtgtg

SEQ ID NO: 461385 - DNA, 25 bp, Homo sapien
taaaattcctgattgagccctacac

SEQ ID NO: 461386 - DNA, 25 bp, Homo sapien
gatatgcatagaaagctgtagctgg

SEQ ID NO: 461387 - DNA, 25 bp, Homo sapien
ttttggatccagagcgacttgagcc

SEQ ID NO: 461388 - DNA, 25 bp, Homo sapien
tcttttgtctgggatgggtaatgcc

SEQ ID NO: 461389 - DNA, 25 bp, Homo sapien
catttgacaaacttaagttgagcca

SEQ ID NO: 461390 - DNA, 25 bp, Homo sapien
tggctctctaagtcaggtgatactt

SEQ ID NO: 461391 - DNA, 25 bp, Homo sapien
gggtcagctcaagcatgaaaatata

SEQ ID NO: 461392 - DNA, 25 bp, Homo sapien
tacacagaattctaggaaggaggct

SEQ ID NO: 461393 - DNA, 25 bp, Homo sapien
cagaggatgctggacctcccaggat

SEQ ID NO: 461394 - DNA, 25 bp, Homo sapien
tcagcctgagcttaacacagctggg

SEQ ID NO: 461395 - DNA, 25 bp, Homo sapien
acaatacgtcgtttggcctcactga

SEQ ID NO: 461396 - DNA, 25 bp, Homo sapien
caagtacacttagcgtggagaagct

SEQ ID NO: 461397 - DNA, 25 bp, Homo sapien
tctgtgatctctgctagatcaccag

SEQ ID NO: 461398 - DNA, 25 bp, Homo sapien
ggatgctgtcaacccaaactaactg

SEQ ID NO: 461399 - DNA, 25 bp, Homo sapien
ggatgatcccaaccaattctgcttg

SEQ ID NO: 461400 - DNA, 25 bp, Homo sapien
cactgaaatctgtgttagacgcagc

SEQ ID NO: 461401 - DNA, 25 bp, Homo sapien
tctcagaagccaaattggagcatcc

SEQ ID NO: 461402 - DNA, 25 bp, Homo sapien
tgaaggaaccagcggagggacctcc

SEQ ID NO: 461403 - DNA, 25 bp, Homo sapien
aaatgaaggaaccagcggaatgaag

SEQ ID NO: 461404 - DNA, 25 bp, Homo sapien
aggaaccagcggaatgaaggaacca

SEQ ID NO: 461405 - DNA, 25 bp, Homo sapien
ccagcggagggacctccgggaggag

SEQ ID NO: 461406 - DNA, 25 bp, Homo sapien
gaggtcatgggtttatggatgttat

SEQ ID NO: 461407 - DNA, 25 bp, Homo sapien
ataacttagatgcacatcccatgtt

SEQ ID NO: 461408 - DNA, 25 bp, Homo sapien
ctgcatgaggtcatgggtttatgga

SEQ ID NO: 461409 - DNA, 25 bp, Homo sapien
cttagatgcacatcccatgttgaga

SEQ ID NO: 461410 - DNA, 25 bp, Homo sapien
gaatgtcctggccaattgagtgatg

SEQ ID NO: 461411 - DNA, 25 bp, Homo sapien
tcagacagacagatcgcaaaaattg

SEQ ID NO: 461412 - DNA, 25 bp, Homo sapien
tgaaatccttacctgtgcctatgtt

SEQ ID NO: 461413 - DNA, 25 bp, Homo sapien
catttggatgaaaagagacactcta

SEQ ID NO: 461414 - DNA, 25 bp, Homo sapien
tcctggttgctaggatcagagagct

SEQ ID NO: 461415 - DNA, 25 bp, Homo sapien
tcagagagctggtaagtttcaacaa

SEQ ID NO: 461416 - DNA, 25 bp, Homo sapien
ttaactgccaaagcattcccgggat

SEQ ID NO: 461417 - DNA, 25 bp, Homo sapien
tacgtctatctattccaagtacaag

SEQ ID NO: 461418 - DNA, 25 bp, Homo sapien
agaaatgtggaagtcatcctgaact

SEQ ID NO: 461419 - DNA, 25 bp, Homo sapien
ttcctaaggtgtcactctggccaga

SEQ ID NO: 461420 - DNA, 25 bp, Homo sapien
tcctaaggtgtcactctggccagaa

SEQ ID NO: 461421 - DNA, 25 bp, Homo sapien
tcctgaactctttcctccttattct

SEQ ID NO: 461422 - DNA, 25 bp, Homo sapien
ctggtcattccagctgtggcagtct

SEQ ID NO: 461423 - DNA, 25 bp, Homo sapien
tctggtcattccagctgtggcagtc

SEQ ID NO: 461424 - DNA, 25 bp, Homo sapien
gaatatctgcgagctgagcgagcag

SEQ ID NO: 461425 - DNA, 25 bp, Homo sapien
actgtgctcatcacgctgtggagga

SEQ ID NO: 461426 - DNA, 25 bp, Homo sapien
gactgtcactggtatatccttgtgc

SEQ ID NO: 461427 - DNA, 25 bp, Homo sapien
cagcttccggaagaactcggacgag

SEQ ID NO: 461428 - DNA, 25 bp, Homo sapien
tatactgttgtccaaggctctcttc

SEQ ID NO: 461429 - DNA, 25 bp, Homo sapien
tggttatctgctgtgtgacaacact

SEQ ID NO: 461430 - DNA, 25 bp, Homo sapien
gccactggtgacaactaatctttta

SEQ ID NO: 461431 - DNA, 25 bp, Homo sapien
gatgaatttaaactcagtggccact

SEQ ID NO: 461432 - DNA, 25 bp, Homo sapien
ccatctcttggaacacccgtaacca

SEQ ID NO: 461433 - DNA, 25 bp, Homo sapien
ccgtaaccacttgggagcccacagg

SEQ ID NO: 461434 - DNA, 25 bp, Homo sapien
tttgtgccacccatctcttggaaca

SEQ ID NO: 461435 - DNA, 25 bp, Homo sapien
atctcttggaacacccgtaaccact

SEQ ID NO: 461436 - DNA, 25 bp, Homo sapien
gcaggaagacgctggaaaagggcag

SEQ ID NO: 461437 - DNA, 25 bp, Homo sapien
gagtttttcccacaccagcagcagc

SEQ ID NO: 461438 - DNA, 25 bp, Homo sapien
ctgtgtgtctaggtggagggtagtc

SEQ ID NO: 461439 - DNA, 25 bp, Homo sapien
gcttccattccatgtctaaaggctg

SEQ ID NO: 461440 - DNA, 25 bp, Homo sapien
tcaaatttagtagttgggggtcata

SEQ ID NO: 461441 - DNA, 25 bp, Homo sapien
tgataacctgctaccatcggaccag

SEQ ID NO: 461442 - DNA, 25 bp, Homo sapien
ttctgataacctgctaccatcggac

SEQ ID NO: 461443 - DNA, 25 bp, Homo sapien
tttagtagttgggggtcatatacca

SEQ ID NO: 461444 - DNA, 25 bp, Homo sapien
tgctgctggaactcatcaattgcat

SEQ ID NO: 461445 - DNA, 25 bp, Homo sapien
tggaactcatcaattgcatctttgt

SEQ ID NO: 461446 - DNA, 25 bp, Homo sapien
tgctggaactcatcaattgcatctt

SEQ ID NO: 461447 - DNA, 25 bp, Homo sapien
ggaactcatcaattgcatctttgtt

SEQ ID NO: 461448 - DNA, 25 bp, Homo sapien
gctggccgcgcgtttcctgcctgtt

SEQ ID NO: 461449 - DNA, 25 bp, Homo sapien
aggaccttggctggccgcgcgtttc

SEQ ID NO: 461450 - DNA, 25 bp, Homo sapien
ttggctggccgcgcgtttcctgcct

SEQ ID NO: 461451 - DNA, 25 bp, Homo sapien
tggccgcgcgtttcctgcctgtttc

SEQ ID NO: 461452 - DNA, 25 bp, Homo sapien
ggtatattctgcataccggatatta

SEQ ID NO: 461453 - DNA, 25 bp, Homo sapien
caaatggtatattctgcataccgga

SEQ ID NO: 461454 - DNA, 25 bp, Homo sapien
gcataccggatattagttttgctgt

SEQ ID NO: 461455 - DNA, 25 bp, Homo sapien
ttctgcataccggatattagttttg

SEQ ID NO: 461456 - DNA, 25 bp, Homo sapien
taatcccatcccttacgatctagag

SEQ ID NO: 461457 - DNA, 25 bp, Homo sapien
taatttggctccactttatcctact

SEQ ID NO: 461458 - DNA, 25 bp, Homo sapien
catggatgtattctaagagctgaga

SEQ ID NO: 461459 - DNA, 25 bp, Homo sapien
tctagagtataagctgcgcaagggc

SEQ ID NO: 461460 - DNA, 25 bp, Homo sapien
tgaattccactgttacctgaccatg

SEQ ID NO: 461461 - DNA, 25 bp, Homo sapien
ttttgcccaaaagtctcagagtctt

SEQ ID NO: 461462 - DNA, 25 bp, Homo sapien
cctaaggacaaaattgagcatgctc

SEQ ID NO: 461463 - DNA, 25 bp, Homo sapien
gagcatgctcagaatggtccttgaa

SEQ ID NO: 461464 - DNA, 25 bp, Homo sapien
tagttggaccattgtgtaagcttgt

SEQ ID NO: 461465 - DNA, 25 bp, Homo sapien
gtaactcagtgtctgactgcccaag

SEQ ID NO: 461466 - DNA, 25 bp, Homo sapien
tgttttccaaacctgtcactgactc

SEQ ID NO: 461467 - DNA, 25 bp, Homo sapien
tcactgactcttcattgtggtgaca

SEQ ID NO: 461468 - DNA, 25 bp, Homo sapien
cccaggggatcccaatcccttatct

SEQ ID NO: 461469 - DNA, 25 bp, Homo sapien
caggggatcccaatcccttatctct

SEQ ID NO: 461470 - DNA, 25 bp, Homo sapien
ctgggacccctaagacattgtcagt

SEQ ID NO: 461471 - DNA, 25 bp, Homo sapien
ggggatcccaatcccttatctctgc

SEQ ID NO: 461472 - DNA, 25 bp, Homo sapien
tcttcccaccctctagtgaccattt

SEQ ID NO: 461473 - DNA, 25 bp, Homo sapien
cagcttacttcactaaacaatgtct

SEQ ID NO: 461474 - DNA, 25 bp, Homo sapien
gcttacttcactaaacaatgtcttc

SEQ ID NO: 461475 - DNA, 25 bp, Homo sapien
ccagcttacttcactaaacaatgtc

SEQ ID NO: 461476 - DNA, 25 bp, Homo sapien
gaaattgggggtctgtcacctccag

SEQ ID NO: 461477 - DNA, 25 bp, Homo sapien
tcacctccagtgtttatcattcctt

SEQ ID NO: 461478 - DNA, 25 bp, Homo sapien
caattccacttttgtagttactttg

SEQ ID NO: 461479 - DNA, 25 bp, Homo sapien
aattgggggtctgtcacctccagtg

SEQ ID NO: 461480 - DNA, 25 bp, Homo sapien
catggaccgcttcgtttggaccagc

SEQ ID NO: 461481 - DNA, 25 bp, Homo sapien
tgctgatcaagggttctgaaaggcc

SEQ ID NO: 461482 - DNA, 25 bp, Homo sapien
aacgagaccctggtgatccagcagc

SEQ ID NO: 461483 - DNA, 25 bp, Homo sapien
tgcacaataagcaagtccaagctgt

SEQ ID NO: 461484 - DNA, 25 bp, Homo sapien
cccattggttcctgcgtgaattgaa

SEQ ID NO: 461485 - DNA, 25 bp, Homo sapien
tgcaccgcggctaagccgtcagacg

SEQ ID NO: 461486 - DNA, 25 bp, Homo sapien
gctttagcgccaagatagaacttcc

SEQ ID NO: 461487 - DNA, 25 bp, Homo sapien
ttgaataagccaatgggcgtaggga

SEQ ID NO: 461488 - DNA, 25 bp, Homo sapien
tcctggggcacggccggtgtgctca

SEQ ID NO: 461489 - DNA, 25 bp, Homo sapien
gtcctggggcacggccggtgtgctc

SEQ ID NO: 461490 - DNA, 25 bp, Homo sapien
tgaatgcggactgcgccctctgact

SEQ ID NO: 461491 - DNA, 25 bp, Homo sapien
ctttgaatgcggactgcgccctctg

SEQ ID NO: 461492 - DNA, 25 bp, Homo sapien
actgcgccctctgactcgggggcag

SEQ ID NO: 461493 - DNA, 25 bp, Homo sapien
gactgcgccctctgactcgggggca

SEQ ID NO: 461494 - DNA, 25 bp, Homo sapien
tgcaaaaagcgtttttcttctcaac

SEQ ID NO: 461495 - DNA, 25 bp, Homo sapien
aaagcgtttttcttctcaacagatg

SEQ ID NO: 461496 - DNA, 25 bp, Homo sapien
tgcttgtatgcaaaaagcgtttttc

SEQ ID NO: 461497 - DNA, 25 bp, Homo sapien
ttttcctgcttgtatgcaaaaagcg

SEQ ID NO: 461498 - DNA, 25 bp, Homo sapien
taagtttcagcactttagtcccttc

SEQ ID NO: 461499 - DNA, 25 bp, Homo sapien
cttgaacttggtcctcagatgtcac

SEQ ID NO: 461500 - DNA, 25 bp, Homo sapien
tactacagttgaattggttagttca

SEQ ID NO: 461501 - DNA, 25 bp, Homo sapien
actatccttaggtttatgtgtgtca

SEQ ID NO: 461502 - DNA, 25 bp, Homo sapien
tcagttagtaacaaatgcggagttt

SEQ ID NO: 461503 - DNA, 25 bp, Homo sapien
gcggagtttgattactatccttagg

SEQ ID NO: 461504 - DNA, 25 bp, Homo sapien
ggtgaaatgcctggcttaatgtcat

SEQ ID NO: 461505 - DNA, 25 bp, Homo sapien
ttgtttttaaggtgaaatgcctggc

SEQ ID NO: 461506 - DNA, 25 bp, Homo sapien
ttaaggtgaaatgcctggcttaatg

SEQ ID NO: 461507 - DNA, 25 bp, Homo sapien
tttttaaggtgaaatgcctggctta

SEQ ID NO: 461508 - DNA, 25 bp, Homo sapien
tggccacgataagatccaagcacag

SEQ ID NO: 461509 - DNA, 25 bp, Homo sapien
ctggccacgataagatccaagcaca

SEQ ID NO: 461510 - DNA, 25 bp, Homo sapien
acactgctggtgtttacaggctgag

SEQ ID NO: 461511 - DNA, 25 bp, Homo sapien
ttggaggatctattacttttcactg

SEQ ID NO: 461512 - DNA, 25 bp, Homo sapien
tttaggtatagtggctgaaagtttc

SEQ ID NO: 461513 - DNA, 25 bp, Homo sapien
aactctcatctttgacttgtagagg

SEQ ID NO: 461514 - DNA, 25 bp, Homo sapien
gctcacaaatttagtagtggcagtc

SEQ ID NO: 461515 - DNA, 25 bp, Homo sapien
gatgtagtgctcacaaatttagtag

SEQ ID NO: 461516 - DNA, 25 bp, Homo sapien
gagatgtagtgctcacaaatttagt

SEQ ID NO: 461517 - DNA, 25 bp, Homo sapien
tagtgctcacaaatttagtagtggc

SEQ ID NO: 461518 - DNA, 25 bp, Homo sapien
aataggaggtcgcacaagttgtgtg

SEQ ID NO: 461519 - DNA, 25 bp, Homo sapien
tgtgatgacttctaataggaggtcg

SEQ ID NO: 461520 - DNA, 25 bp, Homo sapien
gacttctaataggaggtcgcacaag

SEQ ID NO: 461521 - DNA, 25 bp, Homo sapien
ttctaataggaggtcgcacaagttg

SEQ ID NO: 461522 - DNA, 25 bp, Homo sapien
tgtttcacagtgtcccgggtattac

SEQ ID NO: 461523 - DNA, 25 bp, Homo sapien
gaactggttttgacactagataaag

SEQ ID NO: 461524 - DNA, 25 bp, Homo sapien
catgaggccctttccggattgtaac

SEQ ID NO: 461525 - DNA, 25 bp, Homo sapien
gcagaagttctactgatgccttgtt

SEQ ID NO: 461526 - DNA, 25 bp, Homo sapien
ggtcaacgggctctgacttttccat

SEQ ID NO: 461527 - DNA, 25 bp, Homo sapien
tcttcgctggtcaacgggctctgac

SEQ ID NO: 461528 - DNA, 25 bp, Homo sapien
ctgcagtatgtcttcgctggtcaac

SEQ ID NO: 461529 - DNA, 25 bp, Homo sapien
tactatcaacaattgcttttcctgc

SEQ ID NO: 461530 - DNA, 25 bp, Homo sapien
ctcttccgaggtttctttgggctga

SEQ ID NO: 461531 - DNA, 25 bp, Homo sapien
tctctcttccgaggtttctttgggc

SEQ ID NO: 461532 - DNA, 25 bp, Homo sapien
tccgaggtttctttgggctgagctg

SEQ ID NO: 461533 - DNA, 25 bp, Homo sapien
cttccgaggtttctttgggctgagc

SEQ ID NO: 461534 - DNA, 25 bp, Homo sapien
gaaaattctaatgcagtcaaggaaa

SEQ ID NO: 461535 - DNA, 25 bp, Homo sapien
tataaatttgcctgcatatgacaga

SEQ ID NO: 461536 - DNA, 25 bp, Homo sapien
tatcaacgtcaattatgctcaatga

SEQ ID NO: 461537 - DNA, 25 bp, Homo sapien
aacttttaggtcatattgttccaca

SEQ ID NO: 461538 - DNA, 25 bp, Homo sapien
ctatagttagaagcagatataaacg

SEQ ID NO: 461539 - DNA, 25 bp, Homo sapien
gatataaacgttactttgaaattgc

SEQ ID NO: 461540 - DNA, 25 bp, Homo sapien
agaagcagatataaacgttactttg

SEQ ID NO: 461541 - DNA, 25 bp, Homo sapien
agttagaagcagatataaacgttac

SEQ ID NO: 461542 - DNA, 25 bp, Homo sapien
ggcctttttagcactcttcctttgc

SEQ ID NO: 461543 - DNA, 25 bp, Homo sapien
tgagtaactactgaattagggggcc

SEQ ID NO: 461544 - DNA, 25 bp, Homo sapien
tgcaggctcatgctgagtaactact

SEQ ID NO: 461545 - DNA, 25 bp, Homo sapien
ttctgccatggtagtccaaaaagac

SEQ ID NO: 461546 - DNA, 25 bp, Homo sapien
caataagtgcaagacatatccaata

SEQ ID NO: 461547 - DNA, 25 bp, Homo sapien
taagtgcaagacatatccaatactt

SEQ ID NO: 461548 - DNA, 25 bp, Homo sapien
aataagtgcaagacatatccaatac

SEQ ID NO: 461549 - DNA, 25 bp, Homo sapien
tgagcccctgccagaatggctttct

SEQ ID NO: 461550 - DNA, 25 bp, Homo sapien
taattccgaattgtctactacactg

SEQ ID NO: 461551 - DNA, 25 bp, Homo sapien
ttttataatgcaatccttgcagcct

SEQ ID NO: 461552 - DNA, 25 bp, Homo sapien
caaccaggaaatgcatacaataata

SEQ ID NO: 461553 - DNA, 25 bp, Homo sapien
aatctgattattcccaatacaggaa

SEQ ID NO: 461554 - DNA, 25 bp, Homo sapien
gagactataggtatccactactgtg

SEQ ID NO: 461555 - DNA, 25 bp, Homo sapien
ttcagcttcccgtatagctgtgacc

SEQ ID NO: 461556 - DNA, 25 bp, Homo sapien
tagctgtgaccacaactgtctacca

SEQ ID NO: 461557 - DNA, 25 bp, Homo sapien
ctcactagtcttgaaccccagagct

SEQ ID NO: 461558 - DNA, 25 bp, Homo sapien
gaatatctacaatcgtgtgtcgcat

SEQ ID NO: 461559 - DNA, 25 bp, Homo sapien
atatctacaatcgtgtgtcgcatct

SEQ ID NO: 461560 - DNA, 25 bp, Homo sapien
agaatatctacaatcgtgtgtcgca

SEQ ID NO: 461561 - DNA, 25 bp, Homo sapien
tagaatatctacaatcgtgtgtcgc

SEQ ID NO: 461562 - DNA, 25 bp, Homo sapien
tgctagaaaacaccaactagtacta

SEQ ID NO: 461563 - DNA, 25 bp, Homo sapien
ctagaaaacaccaactagtactatc

SEQ ID NO: 461564 - DNA, 25 bp, Homo sapien
gctagaaaacaccaactagtactat

SEQ ID NO: 461565 - DNA, 25 bp, Homo sapien
ctgctagaaaacaccaactagtact

SEQ ID NO: 461566 - DNA, 25 bp, Homo sapien
caaatgtattaggagcgtcttatcc

SEQ ID NO: 461567 - DNA, 25 bp, Homo sapien
catgttaggctggaaatacttgtga

SEQ ID NO: 461568 - DNA, 25 bp, Homo sapien
tcagggaaggctactccaaggaact

SEQ ID NO: 461569 - DNA, 25 bp, Homo sapien
caggtgcactaaacctaggttgaga

SEQ ID NO: 461570 - DNA, 25 bp, Homo sapien
ctttgcaagtatggcgtagtagaca

SEQ ID NO: 461571 - DNA, 25 bp, Homo sapien
attaagcaacttgtcctcgtttctg

SEQ ID NO: 461572 - DNA, 25 bp, Homo sapien
tttctggatctacatcaacacctgt

SEQ ID NO: 461573 - DNA, 25 bp, Homo sapien
tccttgcttgcacaagacttctcca

SEQ ID NO: 461574 - DNA, 25 bp, Homo sapien
atgcggaatttgttccatcaaactg

SEQ ID NO: 461575 - DNA, 25 bp, Homo sapien
ggaatttgttccatcaaactgcacc

SEQ ID NO: 461576 - DNA, 25 bp, Homo sapien
gaatttgttccatcaaactgcacct

SEQ ID NO: 461577 - DNA, 25 bp, Homo sapien
gcggaatttgttccatcaaactgca

SEQ ID NO: 461578 - DNA, 25 bp, Homo sapien
ccaatgaagacacacaaggataatg

SEQ ID NO: 461579 - DNA, 25 bp, Homo sapien
tcgagaacgtctcactggtgttaaa

SEQ ID NO: 461580 - DNA, 25 bp, Homo sapien
caactccgttagctgttccaatgaa

SEQ ID NO: 461581 - DNA, 25 bp, Homo sapien
attagggcggcatacaaaagcatca

SEQ ID NO: 461582 - DNA, 25 bp, Homo sapien
tgttgtatcagcctcatagtacacc

SEQ ID NO: 461583 - DNA, 25 bp, Homo sapien
ttgtatcagcctcatagtacacccg

SEQ ID NO: 461584 - DNA, 25 bp, Homo sapien
tatcagcctcatagtacacccggca

SEQ ID NO: 461585 - DNA, 25 bp, Homo sapien
tgtatcagcctcatagtacacccgg

SEQ ID NO: 461586 - DNA, 25 bp, Homo sapien
tgttagtaaaggagctcactgccgt

SEQ ID NO: 461587 - DNA, 25 bp, Homo sapien
ccaagggacgcaagagaacacaagt

SEQ ID NO: 461588 - DNA, 25 bp, Homo sapien
tacataggtacatggccaactccag

SEQ ID NO: 461589 - DNA, 25 bp, Homo sapien
caatcaacaggcagtccaagggacg

SEQ ID NO: 461590 - DNA, 25 bp, Homo sapien
ggcatattttgggtcaaagtatgaa

SEQ ID NO: 461591 - DNA, 25 bp, Homo sapien
cttaagtgtcaaaaacctcaagtca

SEQ ID NO: 461592 - DNA, 25 bp, Homo sapien
aaacaagggcatagttatgtttttg

SEQ ID NO: 461593 - DNA, 25 bp, Homo sapien
gaaaatatatcattaagcatgtact

SEQ ID NO: 461594 - DNA, 25 bp, Homo sapien
gtttccacaggcgaagtcaaccgaa

SEQ ID NO: 461595 - DNA, 25 bp, Homo sapien
aaaggtccctcgagcatccagaaag

SEQ ID NO: 461596 - DNA, 25 bp, Homo sapien
agaaagctcgcctgacccttatagg

SEQ ID NO: 461597 - DNA, 25 bp, Homo sapien
gaaacggcccgccatgttgaagcct

SEQ ID NO: 461598 - DNA, 25 bp, Homo sapien
ggaccagctcccgagcagggctccg

SEQ ID NO: 461599 - DNA, 25 bp, Homo sapien
ctcgttggggaccagctcccgagca

SEQ ID NO: 461600 - DNA, 25 bp, Homo sapien
accagctcccgagcagggctccgag

SEQ ID NO: 461601 - DNA, 25 bp, Homo sapien
agctcccgagcagggctccgagcac

SEQ ID NO: 461602 - DNA, 25 bp, Homo sapien
tctctccgtggagttccagcaagaa

SEQ ID NO: 461603 - DNA, 25 bp, Homo sapien
ctccgtggagttccagcaagaaggg

SEQ ID NO: 461604 - DNA, 25 bp, Homo sapien
gttccagcaagaaggggttccacac

SEQ ID NO: 461605 - DNA, 25 bp, Homo sapien
agtctctccgtggagttccagcaag

SEQ ID NO: 461606 - DNA, 25 bp, Homo sapien
tagaggaactctgggccttatattc

SEQ ID NO: 461607 - DNA, 25 bp, Homo sapien
ctccatggctataatagaggaactc

SEQ ID NO: 461608 - DNA, 25 bp, Homo sapien
ggctctccatggctataatagagga

SEQ ID NO: 461609 - DNA, 25 bp, Homo sapien
atattccacctctcgcccaacccgt

SEQ ID NO: 461610 - DNA, 25 bp, Homo sapien
ctctggcactgtctaaagtgccttt

SEQ ID NO: 461611 - DNA, 25 bp, Homo sapien
actctggcactgtctaaagtgcctt

SEQ ID NO: 461612 - DNA, 25 bp, Homo sapien
tctggcactgtctaaagtgcctttc

SEQ ID NO: 461613 - DNA, 25 bp, Homo sapien
gcactggggttttcaggactggata

SEQ ID NO: 461614 - DNA, 25 bp, Homo sapien
caaggcactggggttttcaggactg

SEQ ID NO: 461615 - DNA, 25 bp, Homo sapien
tgtccttctgaccaatcctgatgtt

SEQ ID NO: 461616 - DNA, 25 bp, Homo sapien
ggttttcaggactggataagactgt

SEQ ID NO: 461617 - DNA, 25 bp, Homo sapien
tcacggctgggatcaactcttctgg

SEQ ID NO: 461618 - DNA, 25 bp, Homo sapien
aaggcatcatgcactttcacggctg

SEQ ID NO: 461619 - DNA, 25 bp, Homo sapien
catgcactttcacggctgggatcaa

SEQ ID NO: 461620 - DNA, 25 bp, Homo sapien
cctgcttcgctgaaggcatcatgca

SEQ ID NO: 461621 - DNA, 25 bp, Homo sapien
gaggaagagatctaacttcatccac

SEQ ID NO: 461622 - DNA, 25 bp, Homo sapien
catccacttgctgaagagactgttc

SEQ ID NO: 461623 - DNA, 25 bp, Homo sapien
ttctgtatgatgtgaggaagagatc

SEQ ID NO: 461624 - DNA, 25 bp, Homo sapien
cttcatccacttgctgaagagactg

SEQ ID NO: 461625 - DNA, 25 bp, Homo sapien
gggattcttcttatttacgctgatg

SEQ ID NO: 461626 - DNA, 25 bp, Homo sapien
tgaactttttatcaagtgttcggct

SEQ ID NO: 461627 - DNA, 25 bp, Homo sapien
tatttacgctgatgaactttttatc

SEQ ID NO: 461628 - DNA, 25 bp, Homo sapien
cttttgtatgtaatggaggggattc

SEQ ID NO: 461629 - DNA, 25 bp, Homo sapien
ccaaaaccaaagaccacaggataat

SEQ ID NO: 461630 - DNA, 25 bp, Homo sapien
caaaaccaaagaccacaggataatc

SEQ ID NO: 461631 - DNA, 25 bp, Homo sapien
taccaaaaccaaagaccacaggata

SEQ ID NO: 461632 - DNA, 25 bp, Homo sapien
aaaccaaagaccacaggataatcac

SEQ ID NO: 461633 - DNA, 25 bp, Homo sapien
ctgccacacatacagatactcatta

SEQ ID NO: 461634 - DNA, 25 bp, Homo sapien
ctcattaaagatgagggaaaagggc

SEQ ID NO: 461635 - DNA, 25 bp, Homo sapien
ccacacatacagatactcattaaag

SEQ ID NO: 461636 - DNA, 25 bp, Homo sapien
cattaaagatgagggaaaagggcat

SEQ ID NO: 461637 - DNA, 25 bp, Homo sapien
ggtgctcttgagattctcgtagagt

SEQ ID NO: 461638 - DNA, 25 bp, Homo sapien
gctcttgagattctcgtagagtagg

SEQ ID NO: 461639 - DNA, 25 bp, Homo sapien
cctggtgctcttgagattctcgtag

SEQ ID NO: 461640 - DNA, 25 bp, Homo sapien
tcttgagattctcgtagagtaggga

SEQ ID NO: 461641 - DNA, 25 bp, Homo sapien
tctcaggtctcgtgtcttcagtaca

SEQ ID NO: 461642 - DNA, 25 bp, Homo sapien
tcaggtctcgtgtcttcagtacaac

SEQ ID NO: 461643 - DNA, 25 bp, Homo sapien
tgacacaagtctcaggtctcgtgtc

SEQ ID NO: 461644 - DNA, 25 bp, Homo sapien
caagtctcaggtctcgtgtcttcag

SEQ ID NO: 461645 - DNA, 25 bp, Homo sapien
ccactgccgctcagaagaagttggg

SEQ ID NO: 461646 - DNA, 25 bp, Homo sapien
tgcttctggcgccactgccgctcag

SEQ ID NO: 461647 - DNA, 25 bp, Homo sapien
gcgccactgccgctcagaagaagtt

SEQ ID NO: 461648 - DNA, 25 bp, Homo sapien
ttctggcgccactgccgctcagaag

SEQ ID NO: 461649 - DNA, 25 bp, Homo sapien
atgtcatcggtgtctctatcaatga

SEQ ID NO: 461650 - DNA, 25 bp, Homo sapien
cggtgtctctatcaatgatgacttc

SEQ ID NO: 461651 - DNA, 25 bp, Homo sapien
tgacttccaccaggtcaacaggatg

SEQ ID NO: 461652 - DNA, 25 bp, Homo sapien
acttccaccaggtcaacaggatggg

SEQ ID NO: 461653 - DNA, 25 bp, Homo sapien
tcctcctgtcagttcacttgtgtgg

SEQ ID NO: 461654 - DNA, 25 bp, Homo sapien
cctcctgtcagttcacttgtgtggg

SEQ ID NO: 461655 - DNA, 25 bp, Homo sapien
ggttcctcctgtcagttcacttgtg

SEQ ID NO: 461656 - DNA, 25 bp, Homo sapien
ccttggttcctcctgtcagttcact

SEQ ID NO: 461657 - DNA, 25 bp, Homo sapien
gcaaataggattctcgcctcccctg

SEQ ID NO: 461658 - DNA, 25 bp, Homo sapien
taggctctcgaactcaggaactctg

SEQ ID NO: 461659 - DNA, 25 bp, Homo sapien
ggtctggacggtgagggacaagtcc

SEQ ID NO: 461660 - DNA, 25 bp, Homo sapien
ctcacatgttgacagaggtctggac

SEQ ID NO: 461661 - DNA, 25 bp, Homo sapien
tgcatccaatgagctggtgggtttg

SEQ ID NO: 461662 - DNA, 25 bp, Homo sapien
gcatccaatgagctggtgggtttgg

SEQ ID NO: 461663 - DNA, 25 bp, Homo sapien
catatgaagcgacatattcagcatt

SEQ ID NO: 461664 - DNA, 25 bp, Homo sapien
caaacctggaaagtcgttctgacac

SEQ ID NO: 461665 - DNA, 25 bp, Homo sapien
tatgaagcgacatattcagcatttt

SEQ ID NO: 461666 - DNA, 25 bp, Homo sapien
aaacctggaaagtcgttctgacaca

SEQ ID NO: 461667 - DNA, 25 bp, Homo sapien
taatgaaatgggattcgtatcgagg

SEQ ID NO: 461668 - DNA, 25 bp, Homo sapien
gattcgtatcgagggcaggtgctat

SEQ ID NO: 461669 - DNA, 25 bp, Homo sapien
tttttaatgaaatgggattcgtatc

SEQ ID NO: 461670 - DNA, 25 bp, Homo sapien
tgaaatgggattcgtatcgagggca

SEQ ID NO: 461671 - DNA, 25 bp, Homo sapien
gatgacacaattgaatgaacaattt

SEQ ID NO: 461672 - DNA, 25 bp, Homo sapien
caaaggatgacacaattgaatgaac

SEQ ID NO: 461673 - DNA, 25 bp, Homo sapien
caactgcaaaggatgacacaattga

SEQ ID NO: 461674 - DNA, 25 bp, Homo sapien
ccaactgcaaaggatgacacaattg

SEQ ID NO: 461675 - DNA, 25 bp, Homo sapien
aggtcagcaaagatcagagccacat

SEQ ID NO: 461676 - DNA, 25 bp, Homo sapien
aattaggtcagcaaagatcagagcc

SEQ ID NO: 461677 - DNA, 25 bp, Homo sapien
ttaggtcagcaaagatcagagccac

SEQ ID NO: 461678 - DNA, 25 bp, Homo sapien
taggtcagcaaagatcagagccaca

SEQ ID NO: 461679 - DNA, 25 bp, Homo sapien
ctagagaaatagaacgatactccaa

SEQ ID NO: 461680 - DNA, 25 bp, Homo sapien
tagagaaatagaacgatactccaaa

SEQ ID NO: 461681 - DNA, 25 bp, Homo sapien
gaaatagaacgatactccaaaggaa

SEQ ID NO: 461682 - DNA, 25 bp, Homo sapien
gagaaatagaacgatactccaaagg

SEQ ID NO: 461683 - DNA, 25 bp, Homo sapien
tcgaagaagaacatccatgagaaaa

SEQ ID NO: 461684 - DNA, 25 bp, Homo sapien
aagaacatccatgagaaaaaataaa

SEQ ID NO: 461685 - DNA, 25 bp, Homo sapien
caaatactcgaagaagaacatccat

SEQ ID NO: 461686 - DNA, 25 bp, Homo sapien
tctacaaatactcgaagaagaacat

SEQ ID NO: 461687 - DNA, 25 bp, Homo sapien
gcagaataatcacagtaacggcagt

SEQ ID NO: 461688 - DNA, 25 bp, Homo sapien
atcaaccagcagaataatcacagta

SEQ ID NO: 461689 - DNA, 25 bp, Homo sapien
ccagcagaataatcacagtaacggc

SEQ ID NO: 461690 - DNA, 25 bp, Homo sapien
taatcacagtaacggcagtatctaa

SEQ ID NO: 461691 - DNA, 25 bp, Homo sapien
gagccagacgaaaaactcttatcag

SEQ ID NO: 461692 - DNA, 25 bp, Homo sapien
gacgaaaaactcttatcagaatgat

SEQ ID NO: 461693 - DNA, 25 bp, Homo sapien
tttagatgagccagacgaaaaactc

SEQ ID NO: 461694 - DNA, 25 bp, Homo sapien
ccaagttgtctttttagatgagcca

SEQ ID NO: 461695 - DNA, 25 bp, Homo sapien
taagtgaggtctaggtcaaatccat

SEQ ID NO: 461696 - DNA, 25 bp, Homo sapien
aagtgaggtctaggtcaaatccatc

SEQ ID NO: 461697 - DNA, 25 bp, Homo sapien
ttggattccgatagaaagactggcc

SEQ ID NO: 461698 - DNA, 25 bp, Homo sapien
ttccgatagaaagactggcctcccg

SEQ ID NO: 461699 - DNA, 25 bp, Homo sapien
aaagactggcctcccgaagatggaa

SEQ ID NO: 461700 - DNA, 25 bp, Homo sapien
gatagaaagactggcctcccgaaga

SEQ ID NO: 461701 - DNA, 25 bp, Homo sapien
tcttgtctagaaactgtacgacttc

SEQ ID NO: 461702 - DNA, 25 bp, Homo sapien
gatagtggtttggatgtttcttgtc

SEQ ID NO: 461703 - DNA, 25 bp, Homo sapien
tttcttgtctagaaactgtacgact

SEQ ID NO: 461704 - DNA, 25 bp, Homo sapien
ttgtagactcgatagtggtttggat

SEQ ID NO: 461705 - DNA, 25 bp, Homo sapien
cagtagcaaaatacagagtaaggta

SEQ ID NO: 461706 - DNA, 25 bp, Homo sapien
tcagtaatctgttttctatctacag

SEQ ID NO: 461707 - DNA, 25 bp, Homo sapien
ctacagtagcaaaatacagagtaag

SEQ ID NO: 461708 - DNA, 25 bp, Homo sapien
gcaaaatacagagtaaggtacacac

SEQ ID NO: 461709 - DNA, 25 bp, Homo sapien
tcaaattgcaaggcggcagcgaggc

SEQ ID NO: 461710 - DNA, 25 bp, Homo sapien
tgagatcaaattgcaaggcggcagc

SEQ ID NO: 461711 - DNA, 25 bp, Homo sapien
gagatcaaattgcaaggcggcagcg

SEQ ID NO: 461712 - DNA, 25 bp, Homo sapien
gatcaaattgcaaggcggcagcgag

SEQ ID NO: 461713 - DNA, 25 bp, Homo sapien
gatcatcgatcatgattctactgac

SEQ ID NO: 461714 - DNA, 25 bp, Homo sapien
tcatcgatcatgattctactgaccc

SEQ ID NO: 461715 - DNA, 25 bp, Homo sapien
tctactgaccctattatggaagtgc

SEQ ID NO: 461716 - DNA, 25 bp, Homo sapien
atcgatcatgattctactgacccta

SEQ ID NO: 461717 - DNA, 25 bp, Homo sapien
ccactccaacacttccttggagaat

SEQ ID NO: 461718 - DNA, 25 bp, Homo sapien
tccactccaacacttccttggagaa

SEQ ID NO: 461719 - DNA, 25 bp, Homo sapien
ttgagccatccactccaacacttcc

SEQ ID NO: 461720 - DNA, 25 bp, Homo sapien
tcctggagctaatttaacgagagac

SEQ ID NO: 461721 - DNA, 25 bp, Homo sapien
ccaagtcctggagctaatttaacga

SEQ ID NO: 461722 - DNA, 25 bp, Homo sapien
gagctaatttaacgagagacttgga

SEQ ID NO: 461723 - DNA, 25 bp, Homo sapien
ctaatttaacgagagacttggagac

SEQ ID NO: 461724 - DNA, 25 bp, Homo sapien
tttcactggcaatcaggcaggcaca

SEQ ID NO: 461725 - DNA, 25 bp, Homo sapien
atatttcactggcaatcaggcaggc

SEQ ID NO: 461726 - DNA, 25 bp, Homo sapien
ttcactggcaatcaggcaggcacaa

SEQ ID NO: 461727 - DNA, 25 bp, Homo sapien
tatttcactggcaatcaggcaggca

SEQ ID NO: 461728 - DNA, 25 bp, Homo sapien
tgatgtttcagaactagcaaactca

SEQ ID NO: 461729 - DNA, 25 bp, Homo sapien
tgtttcagaactagcaaactcagtc

SEQ ID NO: 461730 - DNA, 25 bp, Homo sapien
cagtgatgtttcagaactagcaaac

SEQ ID NO: 461731 - DNA, 25 bp, Homo sapien
gtttcagaactagcaaactcagtca

SEQ ID NO: 461732 - DNA, 25 bp, Homo sapien
tttctactccctgatatttagtgcc

SEQ ID NO: 461733 - DNA, 25 bp, Homo sapien
ttcgccgttctccaaaatagtacaa

SEQ ID NO: 461734 - DNA, 25 bp, Homo sapien
tcgccgttctccaaaatagtacaat

SEQ ID NO: 461735 - DNA, 25 bp, Homo sapien
ttctactccctgatatttagtgcca

SEQ ID NO: 461736 - DNA, 25 bp, Homo sapien
tgtgcaaaatatccaacatatctat

SEQ ID NO: 461737 - DNA, 25 bp, Homo sapien
aacagtgtttttcttggagggagat

SEQ ID NO: 461738 - DNA, 25 bp, Homo sapien
agttgtagctatgtttcacttgtgc

SEQ ID NO: 461739 - DNA, 25 bp, Homo sapien
ataactaatctttttataaacagtg

SEQ ID NO: 461740 - DNA, 25 bp, Homo sapien
gaaaaagtgaagaacatctaagggc

SEQ ID NO: 461741 - DNA, 25 bp, Homo sapien
aagtccaccttgggttgtgaccaga

SEQ ID NO: 461742 - DNA, 25 bp, Homo sapien
aagaacatctaagggctggcaatca

SEQ ID NO: 461743 - DNA, 25 bp, Homo sapien
gggatgaagtcctccaaattggtga

SEQ ID NO: 461744 - DNA, 25 bp, Homo sapien
caactgtttaaggaagtgcaggaaa

SEQ ID NO: 461745 - DNA, 25 bp, Homo sapien
acaactgtttaaggaagtgcaggaa

SEQ ID NO: 461746 - DNA, 25 bp, Homo sapien
gacaactgtttaaggaagtgcagga

SEQ ID NO: 461747 - DNA, 25 bp, Homo sapien
aagaggaagcttgcactttcacatc

SEQ ID NO: 461748 - DNA, 25 bp, Homo sapien
gaacacatcaattattaccctgtct

SEQ ID NO: 461749 - DNA, 25 bp, Homo sapien
cagttgaacacatcaattattaccc

SEQ ID NO: 461750 - DNA, 25 bp, Homo sapien
catacagaggtggacagttgaacac

SEQ ID NO: 461751 - DNA, 25 bp, Homo sapien
taagaacagtggcagaggccgtttc

SEQ ID NO: 461752 - DNA, 25 bp, Homo sapien
cagaggccgtttcttgattactcac

SEQ ID NO: 461753 - DNA, 25 bp, Homo sapien
gataagaacagtggcagaggccgtt

SEQ ID NO: 461754 - DNA, 25 bp, Homo sapien
tcagataagaacagtggcagaggcc

SEQ ID NO: 461755 - DNA, 25 bp, Homo sapien
tatgggatgacatctatcatctccc

SEQ ID NO: 461756 - DNA, 25 bp, Homo sapien
acatctatcatctcccttgttggga

SEQ ID NO: 461757 - DNA, 25 bp, Homo sapien
ccctccctctatgggatgacatcta

SEQ ID NO: 461758 - DNA, 25 bp, Homo sapien
aaaaaattgttatagatctgattta

SEQ ID NO: 461759 - DNA, 25 bp, Homo sapien
tattaaagatgtgttaaaccagaag

SEQ ID NO: 461760 - DNA, 25 bp, Homo sapien
taactgaaaagccatgtagtaggca

SEQ ID NO: 461761 - DNA, 25 bp, Homo sapien
catgtagtaggcacccttgttagag

SEQ ID NO: 461762 - DNA, 25 bp, Homo sapien
tgaaaagccatgtagtaggcaccct

SEQ ID NO: 461763 - DNA, 25 bp, Homo sapien
cacccttgttagagcttgaagaaac

SEQ ID NO: 461764 - DNA, 25 bp, Homo sapien
catataactatgtggcagggttaga

SEQ ID NO: 461765 - DNA, 25 bp, Homo sapien
tctctactgcatattctggttgata

SEQ ID NO: 461766 - DNA, 25 bp, Homo sapien
gtgcagggaactatacttaatcagc

SEQ ID NO: 461767 - DNA, 25 bp, Homo sapien
caatatagatgtaccagcaaggaag

SEQ ID NO: 461768 - DNA, 25 bp, Homo sapien
cctgccctgataggtttcctctata

SEQ ID NO: 461769 - DNA, 25 bp, Homo sapien
actgtccctgccctgataggtttcc

SEQ ID NO: 461770 - DNA, 25 bp, Homo sapien
tccctgccctgataggtttcctcta

SEQ ID NO: 461771 - DNA, 25 bp, Homo sapien
tgtccctgccctgataggtttcctc

SEQ ID NO: 461772 - DNA, 25 bp, Homo sapien
taggagggtgtttagccacatgaga

SEQ ID NO: 461773 - DNA, 25 bp, Homo sapien
tagccacatgagagagtctcacctt

SEQ ID NO: 461774 - DNA, 25 bp, Homo sapien
gcagtaggagggtgtttagccacat

SEQ ID NO: 461775 - DNA, 25 bp, Homo sapien
gggtgtttagccacatgagagagtc

SEQ ID NO: 461776 - DNA, 25 bp, Homo sapien
tttctattccaagtgctacagcaag

SEQ ID NO: 461777 - DNA, 25 bp, Homo sapien
cagcaagctcataaatcagttctaa

SEQ ID NO: 461778 - DNA, 25 bp, Homo sapien
ggcgctgaagagtttttctattcca

SEQ ID NO: 461779 - DNA, 25 bp, Homo sapien
cctggtgtagtgtgagagggatcaa

SEQ ID NO: 461780 - DNA, 25 bp, Homo sapien
tccttggcggcaaaactggtttgca

SEQ ID NO: 461781 - DNA, 25 bp, Homo sapien
tgttccctggtggaaaatgcggcct

SEQ ID NO: 461782 - DNA, 25 bp, Homo sapien
cttaacctgttccttgcgaggccgg

SEQ ID NO: 461783 - DNA, 25 bp, Homo sapien
gggatcttcccgcagcagttagtgt

SEQ ID NO: 461784 - DNA, 25 bp, Homo sapien
gtcgtgtcatttggccgcgggcttc

SEQ ID NO: 461785 - DNA, 25 bp, Homo sapien
tcctttgcccccaagtcgtgtcatt

SEQ ID NO: 461786 - DNA, 25 bp, Homo sapien
ccccaagtcgtgtcatttggccgcg

SEQ ID NO: 461787 - DNA, 25 bp, Homo sapien
aagtcgtgtcatttggccgcgggct

SEQ ID NO: 461788 - DNA, 25 bp, Homo sapien
tagggactacaagatcagagctgac

SEQ ID NO: 461789 - DNA, 25 bp, Homo sapien
ggactaactagggtccggcctcaga

SEQ ID NO: 461790 - DNA, 25 bp, Homo sapien
tataattaaggacttggccgcccaa

SEQ ID NO: 461791 - DNA, 25 bp, Homo sapien
cagagctgacagtgttacggttttc

SEQ ID NO: 461792 - DNA, 25 bp, Homo sapien
ctaggaaattacactcggaacaaag

SEQ ID NO: 461793 - DNA, 25 bp, Homo sapien
cactttcttgatttagtgccaacca

SEQ ID NO: 461794 - DNA, 25 bp, Homo sapien
tcggaacaaagtttgcaaggacact

SEQ ID NO: 461795 - DNA, 25 bp, Homo sapien
gtgccaaccaggtgattttgaaatc

SEQ ID NO: 461796 - DNA, 25 bp, Homo sapien
aatgctgttctcaagaggccatagg

SEQ ID NO: 461797 - DNA, 25 bp, Homo sapien
cacgtggtgtcaggaccagggatac

SEQ ID NO: 461798 - DNA, 25 bp, Homo sapien
gacttgtgcaatccccagtgtagca

SEQ ID NO: 461799 - DNA, 25 bp, Homo sapien
gagttgagctacctctatagagagc

SEQ ID NO: 461800 - DNA, 25 bp, Homo sapien
tgtcatggataggaagggatgctcc

SEQ ID NO: 461801 - DNA, 25 bp, Homo sapien
tcagaaacaggtgctctcgggtggc

SEQ ID NO: 461802 - DNA, 25 bp, Homo sapien
cacaggataggtgctaaagggaagt

SEQ ID NO: 461803 - DNA, 25 bp, Homo sapien
gtgatttctttgaggctagccattg

SEQ ID NO: 461804 - DNA, 25 bp, Homo sapien
gctgtttccttgtcttccggcactc

SEQ ID NO: 461805 - DNA, 25 bp, Homo sapien
catgtagcgctgtttccttgtcttc

SEQ ID NO: 461806 - DNA, 25 bp, Homo sapien
ccattctgtcatgtagcgctgtttc

SEQ ID NO: 461807 - DNA, 25 bp, Homo sapien
tagccaagtcgaccttcccattctg

SEQ ID NO: 461808 - DNA, 25 bp, Homo sapien
gcggagacataaagccatccaggag

SEQ ID NO: 461809 - DNA, 25 bp, Homo sapien
catccaggagagcaactgaacagtg

SEQ ID NO: 461810 - DNA, 25 bp, Homo sapien
ggaaacaccgcggagacataaagcc

SEQ ID NO: 461811 - DNA, 25 bp, Homo sapien
gagagcaactgaacagtgcgcccca

SEQ ID NO: 461812 - DNA, 25 bp, Homo sapien
gagcagcgagtagcaaaattgcagc

SEQ ID NO: 461813 - DNA, 25 bp, Homo sapien
gccgagcagcgagtagcaaaattgc

SEQ ID NO: 461814 - DNA, 25 bp, Homo sapien
gcagcgagtagcaaaattgcagccg

SEQ ID NO: 461815 - DNA, 25 bp, Homo sapien
cgagtagcaaaattgcagccgctga

SEQ ID NO: 461816 - DNA, 25 bp, Homo sapien
ctggcacgctgtaaagttttccaat

SEQ ID NO: 461817 - DNA, 25 bp, Homo sapien
ggcacgctgtaaagttttccaataa

SEQ ID NO: 461818 - DNA, 25 bp, Homo sapien
tactggcacgctgtaaagttttcca

SEQ ID NO: 461819 - DNA, 25 bp, Homo sapien
gtactggcacgctgtaaagttttcc

SEQ ID NO: 461820 - DNA, 25 bp, Homo sapien
ttctttggagcatgtcctaaagctc

SEQ ID NO: 461821 - DNA, 25 bp, Homo sapien
tctttggagcatgtcctaaagctct

SEQ ID NO: 461822 - DNA, 25 bp, Homo sapien
ctttggagcatgtcctaaagctctt

SEQ ID NO: 461823 - DNA, 25 bp, Homo sapien
cttctttggagcatgtcctaaagct

SEQ ID NO: 461824 - DNA, 25 bp, Homo sapien
tacggagctgcctgagcagttctgg

SEQ ID NO: 461825 - DNA, 25 bp, Homo sapien
cttgtttgcttgtcaaaacagagca

SEQ ID NO: 461826 - DNA, 25 bp, Homo sapien
ttcctcatgctacggagctgcctga

SEQ ID NO: 461827 - DNA, 25 bp, Homo sapien
ctggcttgtttgcttgtcaaaacag

SEQ ID NO: 461828 - DNA, 25 bp, Homo sapien
ccacttatgtggtatatattatgtg

SEQ ID NO: 461829 - DNA, 25 bp, Homo sapien
agccacatgaaaatggcctattttg

SEQ ID NO: 461830 - DNA, 25 bp, Homo sapien
tataatcttacttaagacataagtt

SEQ ID NO: 461831 - DNA, 25 bp, Homo sapien
tgtgtattacttactagccacatga

SEQ ID NO: 461832 - DNA, 25 bp, Homo sapien
caatgtaggcagcaaggagtctaac

SEQ ID NO: 461833 - DNA, 25 bp, Homo sapien
tacacacgctcattgggaataacag

SEQ ID NO: 461834 - DNA, 25 bp, Homo sapien
ggcagtggtgcctatcttaactcaa

SEQ ID NO: 461835 - DNA, 25 bp, Homo sapien
tagaactgccggcacatgccacaat

SEQ ID NO: 461836 - DNA, 25 bp, Homo sapien
taattctagctgtagcacatctggc

SEQ ID NO: 461837 - DNA, 25 bp, Homo sapien
ggtcaaactgaatctgatgctctgg

SEQ ID NO: 461838 - DNA, 25 bp, Homo sapien
tgctctggccttatattaattctag

SEQ ID NO: 461839 - DNA, 25 bp, Homo sapien
ctaagatcagcagtcttctccaggc

SEQ ID NO: 461840 - DNA, 25 bp, Homo sapien
gaagcatggcctattttgatttaag

SEQ ID NO: 461841 - DNA, 25 bp, Homo sapien
gcaatcatacacacccacaataagg

SEQ ID NO: 461842 - DNA, 25 bp, Homo sapien
gcattcataatgctcacatatccaa

SEQ ID NO: 461843 - DNA, 25 bp, Homo sapien
ttctaaatcaaaggaaccctattca

SEQ ID NO: 461844 - DNA, 25 bp, Homo sapien
tctcaactaccactttcagggttta

SEQ ID NO: 461845 - DNA, 25 bp, Homo sapien
gattctaaaataactatgtaagaca

SEQ ID NO: 461846 - DNA, 25 bp, Homo sapien
ccttctcaactaccactttcagggt

SEQ ID NO: 461847 - DNA, 25 bp, Homo sapien
ctatgtaagacatggctcaccatct

SEQ ID NO: 461848 - DNA, 25 bp, Homo sapien
aatcaaatatgccatcccgatgtag

SEQ ID NO: 461849 - DNA, 25 bp, Homo sapien
tcaaatatgccatcccgatgtagct

SEQ ID NO: 461850 - DNA, 25 bp, Homo sapien
taaaaatcaaatatgccatcccgat

SEQ ID NO: 461851 - DNA, 25 bp, Homo sapien
aaaatcaaatatgccatcccgatgt

SEQ ID NO: 461852 - DNA, 25 bp, Homo sapien
cagagagtttatacgtggtttcttt

SEQ ID NO: 461853 - DNA, 25 bp, Homo sapien
gagaaagggaatggacatttgctga

SEQ ID NO: 461854 - DNA, 25 bp, Homo sapien
cttttctattcctcaagaaagccat

SEQ ID NO: 461855 - DNA, 25 bp, Homo sapien
agaggaatgcacaacagagaaaggg

SEQ ID NO: 461856 - DNA, 25 bp, Homo sapien
tctttctcaaccgaacgtccggtga

SEQ ID NO: 461857 - DNA, 25 bp, Homo sapien
ctgttaaaaagagtcaacacttgtt

SEQ ID NO: 461858 - DNA, 25 bp, Homo sapien
gaaacactgcaatgtttaattacaa

SEQ ID NO: 461859 - DNA, 25 bp, Homo sapien
tcttgcaaacttgataatcaactgt

SEQ ID NO: 461860 - DNA, 25 bp, Homo sapien
ttaatgaatataaactgtcaacaaa

SEQ ID NO: 461861 - DNA, 25 bp, Homo sapien
ttttaatgaatataaactgtcaaca

SEQ ID NO: 461862 - DNA, 25 bp, Homo sapien
taatgaatataaactgtcaacaaaa

SEQ ID NO: 461863 - DNA, 25 bp, Homo sapien
cattttaatgaatataaactgtcaa

SEQ ID NO: 461864 - DNA, 25 bp, Homo sapien
agtaactgccataatgtgaaatcta

SEQ ID NO: 461865 - DNA, 25 bp, Homo sapien
tagtaactgccataatgtgaaatct

SEQ ID NO: 461866 - DNA, 25 bp, Homo sapien
gaacactaaggacatcttgaaaaga

SEQ ID NO: 461867 - DNA, 25 bp, Homo sapien
tgccttcccaatttacagtcccaag

SEQ ID NO: 461868 - DNA, 25 bp, Homo sapien
catgattcgaatccaggccaatgac

SEQ ID NO: 461869 - DNA, 25 bp, Homo sapien
cagtaggtaagtcctagtaaactca

SEQ ID NO: 461870 - DNA, 25 bp, Homo sapien
gaaatgctcatcacttacactctgg

SEQ ID NO: 461871 - DNA, 25 bp, Homo sapien
tttaatgccaagcaagaggacactc

SEQ ID NO: 461872 - DNA, 25 bp, Homo sapien
caaaaaactaacttctattcgtcag

SEQ ID NO: 461873 - DNA, 25 bp, Homo sapien
tacactctggagaccatttgtactg

SEQ ID NO: 461874 - DNA, 25 bp, Homo sapien
tattaattgggaactctcagtttcc

SEQ ID NO: 461875 - DNA, 25 bp, Homo sapien
ttcattattaattgggaactctcag

SEQ ID NO: 461876 - DNA, 25 bp, Homo sapien
ttcaatctcattctcaaggggttgt

SEQ ID NO: 461877 - DNA, 25 bp, Homo sapien
tctcaaggggttgttcatattctgt

SEQ ID NO: 461878 - DNA, 25 bp, Homo sapien
cagctgaaattggtaaaggcagacc

SEQ ID NO: 461879 - DNA, 25 bp, Homo sapien
ggaaggccactgtagaactgttaaa

SEQ ID NO: 461880 - DNA, 25 bp, Homo sapien
tcaggagctggcaagcaaagacaca

SEQ ID NO: 461881 - DNA, 25 bp, Homo sapien
cgaagaacacaaagctaactgcagt

SEQ ID NO: 461882 - DNA, 25 bp, Homo sapien
aaagtccaccagagatcttagatat

SEQ ID NO: 461883 - DNA, 25 bp, Homo sapien
aagtccaccagagatcttagatatg

SEQ ID NO: 461884 - DNA, 25 bp, Homo sapien
agtccaccagagatcttagatatga

SEQ ID NO: 461885 - DNA, 25 bp, Homo sapien
ctgttcgggctcttttggagacgct

SEQ ID NO: 461886 - DNA, 25 bp, Homo sapien
agctgttcgggctcttttggagacg

SEQ ID NO: 461887 - DNA, 25 bp, Homo sapien
tgttcgggctcttttggagacgctg

SEQ ID NO: 461888 - DNA, 25 bp, Homo sapien
gttcgggctcttttggagacgctga

SEQ ID NO: 461889 - DNA, 25 bp, Homo sapien
tgtgtggcgttgtattcatagctgc

SEQ ID NO: 461890 - DNA, 25 bp, Homo sapien
cttgtgtggcgttgtattcatagct

SEQ ID NO: 461891 - DNA, 25 bp, Homo sapien
gcgttgtattcatagctgcatccac

SEQ ID NO: 461892 - DNA, 25 bp, Homo sapien
gtggcgttgtattcatagctgcatc

SEQ ID NO: 461893 - DNA, 25 bp, Homo sapien
agaatcttctctggagacagctctc

SEQ ID NO: 461894 - DNA, 25 bp, Homo sapien
atcttctctggagacagctctcttt

SEQ ID NO: 461895 - DNA, 25 bp, Homo sapien
tgagaatcttctctggagacagctc

SEQ ID NO: 461896 - DNA, 25 bp, Homo sapien
tttgagaatcttctctggagacagc

SEQ ID NO: 461897 - DNA, 25 bp, Homo sapien
ctgttcaaaataatctcttaggtga

SEQ ID NO: 461898 - DNA, 25 bp, Homo sapien
gttcaaaataatctcttaggtgatg

SEQ ID NO: 461899 - DNA, 25 bp, Homo sapien
cttaggtgatgttcttcagtgtctt

SEQ ID NO: 461900 - DNA, 25 bp, Homo sapien
ttcaatttttccatactgttcaaaa

SEQ ID NO: 461901 - DNA, 25 bp, Homo sapien
atcttatccacggagtcatggtcgt

SEQ ID NO: 461902 - DNA, 25 bp, Homo sapien
ttcacagttgtggcccttcacagta

SEQ ID NO: 461903 - DNA, 25 bp, Homo sapien
aatcttatccacggagtcatggtcg

SEQ ID NO: 461904 - DNA, 25 bp, Homo sapien
cagttgtggcccttcacagtatggt

SEQ ID NO: 461905 - DNA, 25 bp, Homo sapien
catctcttgctttggcagggctttt

SEQ ID NO: 461906 - DNA, 25 bp, Homo sapien
agccatctcttgctttggcagggct

SEQ ID NO: 461907 - DNA, 25 bp, Homo sapien
tctcttgctttggcagggcttttct

SEQ ID NO: 461908 - DNA, 25 bp, Homo sapien
cttgctttggcagggcttttctaac

SEQ ID NO: 461909 - DNA, 25 bp, Homo sapien
cgaccaaagttgtcattcccaccga

SEQ ID NO: 461910 - DNA, 25 bp, Homo sapien
ccaccacgaccactgaagtttcctc

SEQ ID NO: 461911 - DNA, 25 bp, Homo sapien
acgaccactgaagtttcctccacga

SEQ ID NO: 461912 - DNA, 25 bp, Homo sapien
aagttgtcattcccaccgaaaccat

SEQ ID NO: 461913 - DNA, 25 bp, Homo sapien
ctccaaaatttcctcccttcatggg

SEQ ID NO: 461914 - DNA, 25 bp, Homo sapien
agcttctgcctccaaaatttcctcc

SEQ ID NO: 461915 - DNA, 25 bp, Homo sapien
ctgcctccaaaatttcctcccttca

SEQ ID NO: 461916 - DNA, 25 bp, Homo sapien
cgccataggggccagagcttctgcc

SEQ ID NO: 461917 - DNA, 25 bp, Homo sapien
gccaccttggttttgtggttttgca

SEQ ID NO: 461918 - DNA, 25 bp, Homo sapien
tgctgctgctggaaacgccatagcc

SEQ ID NO: 461919 - DNA, 25 bp, Homo sapien
cgccatagccaccttggttttgtgg

SEQ ID NO: 461920 - DNA, 25 bp, Homo sapien
tttgtggttttgcaaagtattggcc

SEQ ID NO: 461921 - DNA, 25 bp, Homo sapien
tgtaacctgtagcttccctgtcact

SEQ ID NO: 461922 - DNA, 25 bp, Homo sapien
tgttgtaacctgtagcttccctgtc

SEQ ID NO: 461923 - DNA, 25 bp, Homo sapien
tctcctctcctgctaagctttgttt

SEQ ID NO: 461924 - DNA, 25 bp, Homo sapien
taacctgtagcttccctgtcacttc

SEQ ID NO: 461925 - DNA, 25 bp, Homo sapien
tttagcaatcaacagcatgggtgca

SEQ ID NO: 461926 - DNA, 25 bp, Homo sapien
ttggaatgctttacactttccacag

SEQ ID NO: 461927 - DNA, 25 bp, Homo sapien
aaatctacattaaaacactttgttg

SEQ ID NO: 461928 - DNA, 25 bp, Homo sapien
caatcaacagcatgggtgcaaaaaa

SEQ ID NO: 461929 - DNA, 25 bp, Homo sapien
ttagagacatttattcagcgtcaca

SEQ ID NO: 461930 - DNA, 25 bp, Homo sapien
ttttagagacatttattcagcgtca

SEQ ID NO: 461931 - DNA, 25 bp, Homo sapien
ttttttttagagacatttattcagc

SEQ ID NO: 461932 - DNA, 25 bp, Homo sapien
ttttttagagacatttattcagcgt

SEQ ID NO: 461933 - DNA, 25 bp, Homo sapien
ctaaagctgagcagccttagaaaga

SEQ ID NO: 461934 - DNA, 25 bp, Homo sapien
tcttcccagtgctcatattagatgt

SEQ ID NO: 461935 - DNA, 25 bp, Homo sapien
ttcccagtgctcatattagatgtgg

SEQ ID NO: 461936 - DNA, 25 bp, Homo sapien
agccttagaaagagtcttcttccca

SEQ ID NO: 461937 - DNA, 25 bp, Homo sapien
tctgtacagcgtaagatacgggcca

SEQ ID NO: 461938 - DNA, 25 bp, Homo sapien
tcaggatttacatacaagggtggtc

SEQ ID NO: 461939 - DNA, 25 bp, Homo sapien
tagggttagtctcaggtatgctccg

SEQ ID NO: 461940 - DNA, 25 bp, Homo sapien
tatggcctctgaaagggtgaattcc

SEQ ID NO: 461941 - DNA, 25 bp, Homo sapien
tctcttccgggagcagaggcccgga

SEQ ID NO: 461942 - DNA, 25 bp, Homo sapien
tctttagcggctgcgtggtctcttc

SEQ ID NO: 461943 - DNA, 25 bp, Homo sapien
gggattctaaacgactgggacttgc

SEQ ID NO: 461944 - DNA, 25 bp, Homo sapien
tggatccccgcgatctttgggctgg

SEQ ID NO: 461945 - DNA, 25 bp, Homo sapien
ctgggacagtggaggaccgattcct

SEQ ID NO: 461946 - DNA, 25 bp, Homo sapien
ggacagtggaggaccgattcctccc

SEQ ID NO: 461947 - DNA, 25 bp, Homo sapien
gggacgggaggcgacacgccggcgc

SEQ ID NO: 461948 - DNA, 25 bp, Homo sapien
gtggaggaccgattcctcccagccg

SEQ ID NO: 461949 - DNA, 25 bp, Homo sapien
gcttccgtcctaaatagccagcgag

SEQ ID NO: 461950 - DNA, 25 bp, Homo sapien
ttccgtcctaaatagccagcgagca

SEQ ID NO: 461951 - DNA, 25 bp, Homo sapien
cgagcttccgtcctaaatagccagc

SEQ ID NO: 461952 - DNA, 25 bp, Homo sapien
gtcctaaatagccagcgagcagcca

SEQ ID NO: 461953 - DNA, 25 bp, Homo sapien
tactatcacggttaccacctccacc

SEQ ID NO: 461954 - DNA, 25 bp, Homo sapien
ggagctgctactatcacggttacca

SEQ ID NO: 461955 - DNA, 25 bp, Homo sapien
gctgctactatcacggttaccacct

SEQ ID NO: 461956 - DNA, 25 bp, Homo sapien
actatcacggttaccacctccacca

SEQ ID NO: 461957 - DNA, 25 bp, Homo sapien
tgcagttcctgctgcagccgccgcc

SEQ ID NO: 461958 - DNA, 25 bp, Homo sapien
gttgcagttcctgctgcagccgccg

SEQ ID NO: 461959 - DNA, 25 bp, Homo sapien
cagttcctgctgcagccgccgccat

SEQ ID NO: 461960 - DNA, 25 bp, Homo sapien
ctctgggatgttgcagttcctgctg

SEQ ID NO: 461961 - DNA, 25 bp, Homo sapien
cgtcgattagggcatccgagaagct

SEQ ID NO: 461962 - DNA, 25 bp, Homo sapien
cctcgtcgattagggcatccgagaa

SEQ ID NO: 461963 - DNA, 25 bp, Homo sapien
gtcctcgtcgattagggcatccgag

SEQ ID NO: 461964 - DNA, 25 bp, Homo sapien
tcgtcgattagggcatccgagaagc

SEQ ID NO: 461965 - DNA, 25 bp, Homo sapien
gcccagctcccctaagaagagtgga

SEQ ID NO: 461966 - DNA, 25 bp, Homo sapien
tgagacgcagcatcaacaagagcct

SEQ ID NO: 461967 - DNA, 25 bp, Homo sapien
ctgggtccctgtccggcggtgcggg

SEQ ID NO: 461968 - DNA, 25 bp, Homo sapien
aggaagcagaaatgggctctctcac

SEQ ID NO: 461969 - DNA, 25 bp, Homo sapien
catgtacaagagtattcacagaagc

SEQ ID NO: 461970 - DNA, 25 bp, Homo sapien
ttagaataaattgcgccgtacttac

SEQ ID NO: 461971 - DNA, 25 bp, Homo sapien
ccgtacttacggctatacaacatat

SEQ ID NO: 461972 - DNA, 25 bp, Homo sapien
catgactatcctaggcaattcttct

SEQ ID NO: 461973 - DNA, 25 bp, Homo sapien
tactgtgcatcatctggtttctgtt

SEQ ID NO: 461974 - DNA, 25 bp, Homo sapien
taagctctttgacaataatactgtg

SEQ ID NO: 461975 - DNA, 25 bp, Homo sapien
aataagctctttgacaataatactg

SEQ ID NO: 461976 - DNA, 25 bp, Homo sapien
agctctttgacaataatactgtgca

SEQ ID NO: 461977 - DNA, 25 bp, Homo sapien
tatgtaattttactcaaggtattca

SEQ ID NO: 461978 - DNA, 25 bp, Homo sapien
aattcacctccttgtctcattaaca

SEQ ID NO: 461979 - DNA, 25 bp, Homo sapien
tttggcttaacatttagcttccttc

SEQ ID NO: 461980 - DNA, 25 bp, Homo sapien
gaatacagctgtgtcacaaaattca

SEQ ID NO: 461981 - DNA, 25 bp, Homo sapien
atttggattgagttctagagacttc

SEQ ID NO: 461982 - DNA, 25 bp, Homo sapien
ttgagttctagagacttctttgcat

SEQ ID NO: 461983 - DNA, 25 bp, Homo sapien
tctagagacttctttgcatcagcaa

SEQ ID NO: 461984 - DNA, 25 bp, Homo sapien
ctagagacttctttgcatcagcaac

SEQ ID NO: 461985 - DNA, 25 bp, Homo sapien
tataccaagctcaacaagaagagta

SEQ ID NO: 461986 - DNA, 25 bp, Homo sapien
ctataccaagctcaacaagaagagt

SEQ ID NO: 461987 - DNA, 25 bp, Homo sapien
ttctgtaaaagtttctagggcagca

SEQ ID NO: 461988 - DNA, 25 bp, Homo sapien
gtttttttcatggtattcacatatt

SEQ ID NO: 461989 - DNA, 25 bp, Homo sapien
ccttctgtaaaagtttctagggcag

SEQ ID NO: 461990 - DNA, 25 bp, Homo sapien
tgtaaaagtttctagggcagcagca

SEQ ID NO: 461991 - DNA, 25 bp, Homo sapien
tgacaccttttaatccagacactga

SEQ ID NO: 461992 - DNA, 25 bp, Homo sapien
tccagacactgaaattagcatctgc

SEQ ID NO: 461993 - DNA, 25 bp, Homo sapien
cttttaatccagacactgaaattag

SEQ ID NO: 461994 - DNA, 25 bp, Homo sapien
cagacactgaaattagcatctgcac

SEQ ID NO: 461995 - DNA, 25 bp, Homo sapien
ttatttcagtgcctagaggaaccag

SEQ ID NO: 461996 - DNA, 25 bp, Homo sapien
aatatatttggtagctgaaatttaa

SEQ ID NO: 461997 - DNA, 25 bp, Homo sapien
aaaaacatgaagaatgaaaactttg

SEQ ID NO: 461998 - DNA, 25 bp, Homo sapien
taaatatcagacagctcatcctgag

SEQ ID NO: 461999 - DNA, 25 bp, Homo sapien
tattaatttacccaacactgcagtt

SEQ ID NO: 462000 - DNA, 25 bp, Homo sapien
taatttacccaacactgcagttatt

SEQ ID NO: 462001 - DNA, 25 bp, Homo sapien
attattaatttacccaacactgcag

SEQ ID NO: 462002 - DNA, 25 bp, Homo sapien
catgtattattaatttacccaacac

SEQ ID NO: 462003 - DNA, 25 bp, Homo sapien
ctgggatgcagattgattttggtaa

SEQ ID NO: 462004 - DNA, 25 bp, Homo sapien
agatttttacaagtcagtttagcaa

SEQ ID NO: 462005 - DNA, 25 bp, Homo sapien
tgaaagagaaagatttttacaagtc

SEQ ID NO: 462006 - DNA, 25 bp, Homo sapien
agagaaagatttttacaagtcagtt

SEQ ID NO: 462007 - DNA, 25 bp, Homo sapien
tgagattctgtttgataccagtcat

SEQ ID NO: 462008 - DNA, 25 bp, Homo sapien
cttgagattctgtttgataccagtc

SEQ ID NO: 462009 - DNA, 25 bp, Homo sapien
agattctgtttgataccagtcatac

SEQ ID NO: 462010 - DNA, 25 bp, Homo sapien
ctacttgagattctgtttgatacca

SEQ ID NO: 462011 - DNA, 25 bp, Homo sapien
gaacattcttgatcataagtgtaat

SEQ ID NO: 462012 - DNA, 25 bp, Homo sapien
tcttctgaacattcttgatcataag

SEQ ID NO: 462013 - DNA, 25 bp, Homo sapien
ttctgaacattcttgatcataagtg

SEQ ID NO: 462014 - DNA, 25 bp, Homo sapien
cattcttctgaacattcttgatcat

SEQ ID NO: 462015 - DNA, 25 bp, Homo sapien
ctctttttctgaaaattccacattt

SEQ ID NO: 462016 - DNA, 25 bp, Homo sapien
tctttttctgaaaattccacattta

SEQ ID NO: 462017 - DNA, 25 bp, Homo sapien
gaaggaagtttaaccaaagcagaca

SEQ ID NO: 462018 - DNA, 25 bp, Homo sapien
ccagaaggaagtttaaccaaagcag

SEQ ID NO: 462019 - DNA, 25 bp, Homo sapien
tccagaaggaagtttaaccaaagca

SEQ ID NO: 462020 - DNA, 25 bp, Homo sapien
cagaaggaagtttaaccaaagcaga

SEQ ID NO: 462021 - DNA, 25 bp, Homo sapien
tggtattataggatgaagaagttcc

SEQ ID NO: 462022 - DNA, 25 bp, Homo sapien
tgttgaaagtactttaaacgtgctc

SEQ ID NO: 462023 - DNA, 25 bp, Homo sapien
taaacgtgctctgttctggtattat

SEQ ID NO: 462024 - DNA, 25 bp, Homo sapien
gtactttaaacgtgctctgttctgg

SEQ ID NO: 462025 - DNA, 25 bp, Homo sapien
aggccaaccccgatcctgttccaca

SEQ ID NO: 462026 - DNA, 25 bp, Homo sapien
cccgatcctgttccacaacaggaaa

SEQ ID NO: 462027 - DNA, 25 bp, Homo sapien
acttcacatgtccttagagcttcaa

SEQ ID NO: 462028 - DNA, 25 bp, Homo sapien
gcaggcccaattatcattcttcaca

SEQ ID NO: 462029 - DNA, 25 bp, Homo sapien
catcttacttaacggaatcacccta

SEQ ID NO: 462030 - DNA, 25 bp, Homo sapien
taagcaagcaactcaatctcagcga

SEQ ID NO: 462031 - DNA, 25 bp, Homo sapien
tcagttgtatagttagaagagtcac

SEQ ID NO: 462032 - DNA, 25 bp, Homo sapien
gactcatttagggttctcaagaaga

SEQ ID NO: 462033 - DNA, 25 bp, Homo sapien
tggaggaaacaccaaataaactcca

SEQ ID NO: 462034 - DNA, 25 bp, Homo sapien
ttggcgtaggcacatctccttgccc

SEQ ID NO: 462035 - DNA, 25 bp, Homo sapien
aattgttttggcgtaggcacatctc

SEQ ID NO: 462036 - DNA, 25 bp, Homo sapien
tacgaattgttttggcgtaggcaca

SEQ ID NO: 462037 - DNA, 25 bp, Homo sapien
ctgctacgaattgttttggcgtagg

SEQ ID NO: 462038 - DNA, 25 bp, Homo sapien
tttgatctcaccaaccaatttatcc

SEQ ID NO: 462039 - DNA, 25 bp, Homo sapien
tgatctcaccaaccaatttatccca

SEQ ID NO: 462040 - DNA, 25 bp, Homo sapien
gatctcaccaaccaatttatcccaa

SEQ ID NO: 462041 - DNA, 25 bp, Homo sapien
ctcaccaaccaatttatcccaattt

SEQ ID NO: 462042 - DNA, 25 bp, Homo sapien
tggttctatgaaagaccctattaag

SEQ ID NO: 462043 - DNA, 25 bp, Homo sapien
gattgccagatttgtgatcatcagg

SEQ ID NO: 462044 - DNA, 25 bp, Homo sapien
gactaggcaaagagttaataagacc

SEQ ID NO: 462045 - DNA, 25 bp, Homo sapien
gacctgaaactaaaagcatgatcca

SEQ ID NO: 462046 - DNA, 25 bp, Homo sapien
taaagtaggaggaatgagtctgccc

SEQ ID NO: 462047 - DNA, 25 bp, Homo sapien
tgagaaaagataggtgccagaacac

SEQ ID NO: 462048 - DNA, 25 bp, Homo sapien
cagctacagcttaagacagtgggac

SEQ ID NO: 462049 - DNA, 25 bp, Homo sapien
gagaccaccctaagcaatacggaga

SEQ ID NO: 462050 - DNA, 25 bp, Homo sapien
tagagcgaattattacaatataaac

SEQ ID NO: 462051 - DNA, 25 bp, Homo sapien
gaatagagcgaattattacaatata

SEQ ID NO: 462052 - DNA, 25 bp, Homo sapien
cacatcaaagaatagagcgaattat

SEQ ID NO: 462053 - DNA, 25 bp, Homo sapien
tcaaagaatagagcgaattattaca

SEQ ID NO: 462054 - DNA, 25 bp, Homo sapien
tttccttttacctacatcagaccag

SEQ ID NO: 462055 - DNA, 25 bp, Homo sapien
aatacacaatgggcattaggtgaat

SEQ ID NO: 462056 - DNA, 25 bp, Homo sapien
gaatgcaatatcaatacacaatggg

SEQ ID NO: 462057 - DNA, 25 bp, Homo sapien
taaagcacaaagaggtaaagaagta

SEQ ID NO: 462058 - DNA, 25 bp, Homo sapien
tgtctgaaacctttaaggacagaag

SEQ ID NO: 462059 - DNA, 25 bp, Homo sapien
ggcaataaccgaaaatataccatta

SEQ ID NO: 462060 - DNA, 25 bp, Homo sapien
aacacaatgtaacactgaaggtgaa

SEQ ID NO: 462061 - DNA, 25 bp, Homo sapien
tccatccccacaactagatagaatg

SEQ ID NO: 462062 - DNA, 25 bp, Homo sapien
taagctcacccaaagctgccaggtc

SEQ ID NO: 462063 - DNA, 25 bp, Homo sapien
gaatcctgtcgtgataaaagaagca

SEQ ID NO: 462064 - DNA, 25 bp, Homo sapien
gtgtgttaaaactcaggtatctatg

SEQ ID NO: 462065 - DNA, 25 bp, Homo sapien
gcagttaccataaaccaatgaaacc

SEQ ID NO: 462066 - DNA, 25 bp, Homo sapien
tttgccctaccttcacagattatcc

SEQ ID NO: 462067 - DNA, 25 bp, Homo sapien
tgcacctggtcagaaacagctattt

SEQ ID NO: 462068 - DNA, 25 bp, Homo sapien
gattatgaaggtagtcaatgacaga

SEQ ID NO: 462069 - DNA, 25 bp, Homo sapien
ccatggacctttaattataactcta

SEQ ID NO: 462070 - DNA, 25 bp, Homo sapien
aaagttaagcggcaaaaatatgctt

SEQ ID NO: 462071 - DNA, 25 bp, Homo sapien
actgcaccccctgcctcccggttca

SEQ ID NO: 462072 - DNA, 25 bp, Homo sapien
agcaattctccctgcctgagcctcc

SEQ ID NO: 462073 - DNA, 25 bp, Homo sapien
actacaggtgcatgccactacaccc

SEQ ID NO: 462074 - DNA, 25 bp, Homo sapien
tacaggtgcatgccactacacccag

SEQ ID NO: 462075 - DNA, 25 bp, Homo sapien
tagagtgggattcttaggcagcaat

SEQ ID NO: 462076 - DNA, 25 bp, Homo sapien
gaaaaacatgtattccaggactaac

SEQ ID NO: 462077 - DNA, 25 bp, Homo sapien
taaacaaagcagtactttagagtgg

SEQ ID NO: 462078 - DNA, 25 bp, Homo sapien
aattggagtctagaaacaaagaggg

SEQ ID NO: 462079 - DNA, 25 bp, Homo sapien
aatatttacttgaagttcataactg

SEQ ID NO: 462080 - DNA, 25 bp, Homo sapien
tcatttgagcctgaaagattaaggc

SEQ ID NO: 462081 - DNA, 25 bp, Homo sapien
catttgagcctgaaagattaaggct

SEQ ID NO: 462082 - DNA, 25 bp, Homo sapien
aatcatttgagcctgaaagattaag

SEQ ID NO: 462083 - DNA, 25 bp, Homo sapien
caaggatggctccaaatagtaacat

SEQ ID NO: 462084 - DNA, 25 bp, Homo sapien
gataatgccacccaatccataagaa

SEQ ID NO: 462085 - DNA, 25 bp, Homo sapien
gagtgacctgggcaaagaactttac

SEQ ID NO: 462086 - DNA, 25 bp, Homo sapien
cctgatgagaggattgcagttgtca

SEQ ID NO: 462087 - DNA, 25 bp, Homo sapien
tgtaacaatttcagcaggatcagtg

SEQ ID NO: 462088 - DNA, 25 bp, Homo sapien
cacttgtcatacagatgcacatgca

SEQ ID NO: 462089 - DNA, 25 bp, Homo sapien
taagatacctgtggagttacatgaa

SEQ ID NO: 462090 - DNA, 25 bp, Homo sapien
cattcaactaagaccatgaggcatg

SEQ ID NO: 462091 - DNA, 25 bp, Homo sapien
gattttgtaccttgtatttttcaca

SEQ ID NO: 462092 - DNA, 25 bp, Homo sapien
tcactgatgggaataacaagacaat

SEQ ID NO: 462093 - DNA, 25 bp, Homo sapien
tggtttataaactgcgtgattttgt

SEQ ID NO: 462094 - DNA, 25 bp, Homo sapien
atgaaaaccagagaacttccgaaag

SEQ ID NO: 462095 - DNA, 25 bp, Homo sapien
tcctgtcagaaacggtggtgcacgc

SEQ ID NO: 462096 - DNA, 25 bp, Homo sapien
aaaaagatctccatgggatgtgccc

SEQ ID NO: 462097 - DNA, 25 bp, Homo sapien
gagtctatcaccaacgatctgagtg

SEQ ID NO: 462098 - DNA, 25 bp, Homo sapien
acaaagatggaagctagaccgcgcc

SEQ ID NO: 462099 - DNA, 25 bp, Homo sapien
agaactgcagaaaatccaacacctt

SEQ ID NO: 462100 - DNA, 25 bp, Homo sapien
tagtgttgactgactgaagaactca

SEQ ID NO: 462101 - DNA, 25 bp, Homo sapien
gagagttgaccaaagtctacatgca

SEQ ID NO: 462102 - DNA, 25 bp, Homo sapien
tataaacatagcaaatagctgaggc

SEQ ID NO: 462103 - DNA, 25 bp, Homo sapien
ccatttaagagatatgccccactaa

SEQ ID NO: 462104 - DNA, 25 bp, Homo sapien
ccgttcggcctgcagagtcatcatg

SEQ ID NO: 462105 - DNA, 25 bp, Homo sapien
gaatgtaggcggagctacacccact

SEQ ID NO: 462106 - DNA, 25 bp, Homo sapien
taattatcaaggctgccgttcggcc

SEQ ID NO: 462107 - DNA, 25 bp, Homo sapien
ggaaagcatgacattcgaccctaga

SEQ ID NO: 462108 - DNA, 25 bp, Homo sapien
tctgttcgttcagtgctgatgggga

SEQ ID NO: 462109 - DNA, 25 bp, Homo sapien
gctccctaaaccttctgaaagagag

SEQ ID NO: 462110 - DNA, 25 bp, Homo sapien
cattccaggactttgttccaggccc

SEQ ID NO: 462111 - DNA, 25 bp, Homo sapien
cgtaactacaataacagtgccatga

SEQ ID NO: 462112 - DNA, 25 bp, Homo sapien
gagaagctctgtatggattcccagg

SEQ ID NO: 462113 - DNA, 25 bp, Homo sapien
gtgatctaattgctcctgcgacaag

SEQ ID NO: 462114 - DNA, 25 bp, Homo sapien
gatctaattgctcctgcgacaagga

SEQ ID NO: 462115 - DNA, 25 bp, Homo sapien
tccagtgatctaattgctcctgcga

SEQ ID NO: 462116 - DNA, 25 bp, Homo sapien
ctttccagtgatctaattgctcctg

SEQ ID NO: 462117 - DNA, 25 bp, Homo sapien
ggaagtgcttaaagtggacaaccat

SEQ ID NO: 462118 - DNA, 25 bp, Homo sapien
ccatagtttggaaatcaaggaggct

SEQ ID NO: 462119 - DNA, 25 bp, Homo sapien
gtaggtagaggcctactgaggcccc

SEQ ID NO: 462120 - DNA, 25 bp, Homo sapien
gacattgataaggaccggtaggtag

SEQ ID NO: 462121 - DNA, 25 bp, Homo sapien
tgttctctcaagacaggaccagagc

SEQ ID NO: 462122 - DNA, 25 bp, Homo sapien
tacagaggcctaagagatccagatg

SEQ ID NO: 462123 - DNA, 25 bp, Homo sapien
agaatatcataggtccccgctacgc

SEQ ID NO: 462124 - DNA, 25 bp, Homo sapien
attatccccgttccacaggtgaggc

SEQ ID NO: 462125 - DNA, 25 bp, Homo sapien
tgtacttgggcaatgtagaagctcc

SEQ ID NO: 462126 - DNA, 25 bp, Homo sapien
cattccagagccttgtacctaattg

SEQ ID NO: 462127 - DNA, 25 bp, Homo sapien
taaccactttgcgagttttccttga

SEQ ID NO: 462128 - DNA, 25 bp, Homo sapien
aagctcccagtcaaactcagaaacc

SEQ ID NO: 462129 - DNA, 25 bp, Homo sapien
catgtgggttcctttcatgaaacac

SEQ ID NO: 462130 - DNA, 25 bp, Homo sapien
caccctctgaggcatcctgttattt

SEQ ID NO: 462131 - DNA, 25 bp, Homo sapien
tgaggcatcctgttatttacccctt

SEQ ID NO: 462132 - DNA, 25 bp, Homo sapien
catcttcatatcctctagatgatct

SEQ ID NO: 462133 - DNA, 25 bp, Homo sapien
gggtcatctgatgaggtctccatcc

SEQ ID NO: 462134 - DNA, 25 bp, Homo sapien
gacatatggttcagtggaaagcgca

SEQ ID NO: 462135 - DNA, 25 bp, Homo sapien
tgtggcactcttttatttccggcat

SEQ ID NO: 462136 - DNA, 25 bp, Homo sapien
tgggtctcccctatgcaacacaatc

SEQ ID NO: 462137 - DNA, 25 bp, Homo sapien
ttctgtctgatgcaaacctgtgttc

SEQ ID NO: 462138 - DNA, 25 bp, Homo sapien
gaacatgaggacagtaataatgcct

SEQ ID NO: 462139 - DNA, 25 bp, Homo sapien
gattaaaaagtctccatgccactgc

SEQ ID NO: 462140 - DNA, 25 bp, Homo sapien
acactgccgcaacaatatagcttgg

SEQ ID NO: 462141 - DNA, 25 bp, Homo sapien
cgtgtctccactcaagagcggattc

SEQ ID NO: 462142 - DNA, 25 bp, Homo sapien
cagtgcctgcgtgtctccactcaag

SEQ ID NO: 462143 - DNA, 25 bp, Homo sapien
gcctgcgtgtctccactcaagagcg

SEQ ID NO: 462144 - DNA, 25 bp, Homo sapien
tgcgtgtctccactcaagagcggat

SEQ ID NO: 462145 - DNA, 25 bp, Homo sapien
gcaccttgtcaaaaggcttacctaa

SEQ ID NO: 462146 - DNA, 25 bp, Homo sapien
ccaccacaggatgcatcagcaaaca

SEQ ID NO: 462147 - DNA, 25 bp, Homo sapien
ggatgcatcagcaaacagcaccttg

SEQ ID NO: 462148 - DNA, 25 bp, Homo sapien
aacagcaccttgtcaaaaggcttac

SEQ ID NO: 462149 - DNA, 25 bp, Homo sapien
gtgtctccatgaagttgtacttttc

SEQ ID NO: 462150 - DNA, 25 bp, Homo sapien
gacagtcagtcttgagctcagagag

SEQ ID NO: 462151 - DNA, 25 bp, Homo sapien
tgtgcatgtggcctatggtatcccc

SEQ ID NO: 462152 - DNA, 25 bp, Homo sapien
tcttctccagtcaataggtcatggc

SEQ ID NO: 462153 - DNA, 25 bp, Homo sapien
agcctgagctggtgaatgtcccacc

SEQ ID NO: 462154 - DNA, 25 bp, Homo sapien
cttgacagtggatatgcgtttggcc

SEQ ID NO: 462155 - DNA, 25 bp, Homo sapien
gggctattgctgataaccatgacct

SEQ ID NO: 462156 - DNA, 25 bp, Homo sapien
tctgccatgagcaagagctggagcc

SEQ ID NO: 462157 - DNA, 25 bp, Homo sapien
taactggatcaactctgaaaccaag

SEQ ID NO: 462158 - DNA, 25 bp, Homo sapien
catagaggacccgaagtgagcccag

SEQ ID NO: 462159 - DNA, 25 bp, Homo sapien
tgagcccagagccttttaggaacac

SEQ ID NO: 462160 - DNA, 25 bp, Homo sapien
ccaagaggctttaaccgcagagctt

SEQ ID NO: 462161 - DNA, 25 bp, Homo sapien
ctgttgttattgaaggggaggccca

SEQ ID NO: 462162 - DNA, 25 bp, Homo sapien
ctggcagaggggatgcactaaacag

SEQ ID NO: 462163 - DNA, 25 bp, Homo sapien
acactgttgttattgaaggggaggc

SEQ ID NO: 462164 - DNA, 25 bp, Homo sapien
gcagaggggatgcactaaacagccc

SEQ ID NO: 462165 - DNA, 25 bp, Homo sapien
tggggttcctggcagcatctgcaaa

SEQ ID NO: 462166 - DNA, 25 bp, Homo sapien
tagtatggggttcctggcagcatct

SEQ ID NO: 462167 - DNA, 25 bp, Homo sapien
gatagtatggggttcctggcagcat

SEQ ID NO: 462168 - DNA, 25 bp, Homo sapien
ctgatagtatggggttcctggcagc

SEQ ID NO: 462169 - DNA, 25 bp, Homo sapien
tgaagaacacggtggggttgaccat

SEQ ID NO: 462170 - DNA, 25 bp, Homo sapien
ttgaagaacacggtggggttgacca

SEQ ID NO: 462171 - DNA, 25 bp, Homo sapien
gcacaagggctcatcattgacagcc

SEQ ID NO: 462172 - DNA, 25 bp, Homo sapien
gacgtggcacaagggctcatcattg

SEQ ID NO: 462173 - DNA, 25 bp, Homo sapien
gtggcacaagggctcatcattgaca

SEQ ID NO: 462174 - DNA, 25 bp, Homo sapien
ggagacgtggcacaagggctcatca

SEQ ID NO: 462175 - DNA, 25 bp, Homo sapien
gataagtaattggtttgggaatgtg

SEQ ID NO: 462176 - DNA, 25 bp, Homo sapien
attggtttgggaatgtgagggttca

SEQ ID NO: 462177 - DNA, 25 bp, Homo sapien
taagtaattggtttgggaatgtgag

SEQ ID NO: 462178 - DNA, 25 bp, Homo sapien
ggtttgggaatgtgagggttcagga

SEQ ID NO: 462179 - DNA, 25 bp, Homo sapien
agtcaacaatggtgatcttgctggt

SEQ ID NO: 462180 - DNA, 25 bp, Homo sapien
acagtcaacaatggtgatcttgctg

SEQ ID NO: 462181 - DNA, 25 bp, Homo sapien
ttgccattcctagatccaaagcgct

SEQ ID NO: 462182 - DNA, 25 bp, Homo sapien
attcctagatccaaagcgctccatg

SEQ ID NO: 462183 - DNA, 25 bp, Homo sapien
cactggatttcttgcacttacagaa

SEQ ID NO: 462184 - DNA, 25 bp, Homo sapien
gaaagagtgggtgaaactactactg

SEQ ID NO: 462185 - DNA, 25 bp, Homo sapien
gaaactactactggtgccctagcac

SEQ ID NO: 462186 - DNA, 25 bp, Homo sapien
gagtgccacactactaatcactgga

SEQ ID NO: 462187 - DNA, 25 bp, Homo sapien
gtcatcgtgcgcatccgagacgtca

SEQ ID NO: 462188 - DNA, 25 bp, Homo sapien
acctaacggcgacgtggtgttcgca

SEQ ID NO: 462189 - DNA, 25 bp, Homo sapien
tcaggacacctacgagctggacgtg

SEQ ID NO: 462190 - DNA, 25 bp, Homo sapien
cgcgtcctggatgcgaatgaccaca

SEQ ID NO: 462191 - DNA, 25 bp, Homo sapien
gaaccggacgagtgttgcttcccag

SEQ ID NO: 462192 - DNA, 25 bp, Homo sapien
gccaggtttcaacgtcacgctgtga

SEQ ID NO: 462193 - DNA, 25 bp, Homo sapien
cagattttggcagtgccgaagctcc

SEQ ID NO: 462194 - DNA, 25 bp, Homo sapien
gaatccgtcttgttgcagatccgag

SEQ ID NO: 462195 - DNA, 25 bp, Homo sapien
cttgtatttatggatggctggagct

SEQ ID NO: 462196 - DNA, 25 bp, Homo sapien
taagagcttgtatttatggatggct

SEQ ID NO: 462197 - DNA, 25 bp, Homo sapien
ccctccccagtcttataagagcttg

SEQ ID NO: 462198 - DNA, 25 bp, Homo sapien
ccccagtcttataagagcttgtatt

SEQ ID NO: 462199 - DNA, 25 bp, Homo sapien
gtggctacttccgatcgacgagggc

SEQ ID NO: 462200 - DNA, 25 bp, Homo sapien
cacggaaagacctgtgcgcgccggt

SEQ ID NO: 462201 - DNA, 25 bp, Homo sapien
ccataatcgagtggctgtccgctgc

SEQ ID NO: 462202 - DNA, 25 bp, Homo sapien
agctcacggtgttcgcgtgccttca

SEQ ID NO: 462203 - DNA, 25 bp, Homo sapien
tttccccaagtgcaagtgagaggac

SEQ ID NO: 462204 - DNA, 25 bp, Homo sapien
ttttgatcttggtggtaggttgatg

SEQ ID NO: 462205 - DNA, 25 bp, Homo sapien
aattaatgaagatggtttatgcaag

SEQ ID NO: 462206 - DNA, 25 bp, Homo sapien
aagtaaaagccattaggactgtaat

SEQ ID NO: 462207 - DNA, 25 bp, Homo sapien
cagaatgtgggcaccattcagcttt

SEQ ID NO: 462208 - DNA, 25 bp, Homo sapien
gggtcaactacaacattccagcagc

SEQ ID NO: 462209 - DNA, 25 bp, Homo sapien
tccagttaataagcatatatccagt

SEQ ID NO: 462210 - DNA, 25 bp, Homo sapien
tctccaggaataacaaacccatgtc

SEQ ID NO: 462211 - DNA, 25 bp, Homo sapien
ggcaccaagtttcacagttgcataa

SEQ ID NO: 462212 - DNA, 25 bp, Homo sapien
aatccatcttggagtctgcaggcac

SEQ ID NO: 462213 - DNA, 25 bp, Homo sapien
cagctcttctgcactaaaatgtaat

SEQ ID NO: 462214 - DNA, 25 bp, Homo sapien
tttctctgggaacaaggcaccaagt

SEQ ID NO: 462215 - DNA, 25 bp, Homo sapien
acgatgccaagatgccgctcagcag

SEQ ID NO: 462216 - DNA, 25 bp, Homo sapien
gaccattgcttcaacgatgccaaga

SEQ ID NO: 462217 - DNA, 25 bp, Homo sapien
ttgcttcaacgatgccaagatgccg

SEQ ID NO: 462218 - DNA, 25 bp, Homo sapien
agtgcatggaccattgcttcaacga

SEQ ID NO: 462219 - DNA, 25 bp, Homo sapien
gagccaaaaagcatgggagcattaa

SEQ ID NO: 462220 - DNA, 25 bp, Homo sapien
gaatgcttaactccttgatgcagtc

SEQ ID NO: 462221 - DNA, 25 bp, Homo sapien
aagccagcacagacgtttccaaagg

SEQ ID NO: 462222 - DNA, 25 bp, Homo sapien
tgcagtcaatagtcgcatctggtcc

SEQ ID NO: 462223 - DNA, 25 bp, Homo sapien
ttcccaaggctcaaaggagcagtca

SEQ ID NO: 462224 - DNA, 25 bp, Homo sapien
cccaaggctcaaaggagcagtcaga

SEQ ID NO: 462225 - DNA, 25 bp, Homo sapien
agagaggggtttgtcggcagccggc

SEQ ID NO: 462226 - DNA, 25 bp, Homo sapien
caaggctcaaaggagcagtcagaga

SEQ ID NO: 462227 - DNA, 25 bp, Homo sapien
aggaagcatcccctgggcggtgccc

SEQ ID NO: 462228 - DNA, 25 bp, Homo sapien
tcttcggcggttcatcttgactaac

SEQ ID NO: 462229 - DNA, 25 bp, Homo sapien
cacagtgactcttcggcggttcatc

SEQ ID NO: 462230 - DNA, 25 bp, Homo sapien
tccttgaggaactctcacagtgact

SEQ ID NO: 462231 - DNA, 25 bp, Homo sapien
ctcgacttcgccttcaccctgcagg

SEQ ID NO: 462232 - DNA, 25 bp, Homo sapien
gacttcgccttcaccctgcagggct

SEQ ID NO: 462233 - DNA, 25 bp, Homo sapien
ttcgccttcaccctgcagggctctc

SEQ ID NO: 462234 - DNA, 25 bp, Homo sapien
tgcagggctctctgattcttttcta

SEQ ID NO: 462235 - DNA, 25 bp, Homo sapien
gccaacccgatcttgctgcatgtct

SEQ ID NO: 462236 - DNA, 25 bp, Homo sapien
cagtgaccaaacagtcctataattg

SEQ ID NO: 462237 - DNA, 25 bp, Homo sapien
ccgatcttgctgcatgtctatcggc

SEQ ID NO: 462238 - DNA, 25 bp, Homo sapien
caatgggatcgacattctccaaagt

SEQ ID NO: 462239 - DNA, 25 bp, Homo sapien
gagttactacacgtccatccaaaag

SEQ ID NO: 462240 - DNA, 25 bp, Homo sapien
aaaaggatgtccttctaagaggcag

SEQ ID NO: 462241 - DNA, 25 bp, Homo sapien
taggtagttggtcttggagcaagca

SEQ ID NO: 462242 - DNA, 25 bp, Homo sapien
gcctttgagcttccattagccacag

SEQ ID NO: 462243 - DNA, 25 bp, Homo sapien
ggtccccttctatagaagctctgca

SEQ ID NO: 462244 - DNA, 25 bp, Homo sapien
ctagacaagcagataaacacgtagc

SEQ ID NO: 462245 - DNA, 25 bp, Homo sapien
taaacacgtagcacaaagagacagg

SEQ ID NO: 462246 - DNA, 25 bp, Homo sapien
tctatagaagctctgcacaataact

SEQ ID NO: 462247 - DNA, 25 bp, Homo sapien
aggtgaaggccacgctccagcagca

SEQ ID NO: 462248 - DNA, 25 bp, Homo sapien
gacagtcacatcatgtgataccttg

SEQ ID NO: 462249 - DNA, 25 bp, Homo sapien
agcagcatacttccccaacactgag

SEQ ID NO: 462250 - DNA, 25 bp, Homo sapien
ccttgctgtgcttcggatgctgaga

SEQ ID NO: 462251 - DNA, 25 bp, Homo sapien
tctccctcacctcagcatgaaagcc

SEQ ID NO: 462252 - DNA, 25 bp, Homo sapien
aaccaggtccgggagtgatgagtgt

SEQ ID NO: 462253 - DNA, 25 bp, Homo sapien
gagagaaaccaggtccgggagtgat

SEQ ID NO: 462254 - DNA, 25 bp, Homo sapien
caggtccgggagtgatgagtgtggt

SEQ ID NO: 462255 - DNA, 25 bp, Homo sapien
gagaaaccaggtccgggagtgatga

SEQ ID NO: 462256 - DNA, 25 bp, Homo sapien
gggtgaagtgctttcacctgggctc

SEQ ID NO: 462257 - DNA, 25 bp, Homo sapien
ctccccacagagggtgaagtgcttt

SEQ ID NO: 462258 - DNA, 25 bp, Homo sapien
ctgccttgagtgacgtgaaacataa

SEQ ID NO: 462259 - DNA, 25 bp, Homo sapien
cgtgaaacataatgccggtctccaa

SEQ ID NO: 462260 - DNA, 25 bp, Homo sapien
gagtgacgtgaaacataatgccggt

SEQ ID NO: 462261 - DNA, 25 bp, Homo sapien
ataatgccggtctccaaagctgcca

SEQ ID NO: 462262 - DNA, 25 bp, Homo sapien
tccgcaggttcacatgatactccag

SEQ ID NO: 462263 - DNA, 25 bp, Homo sapien
tgatactccagaaagggctcaggtg

SEQ ID NO: 462264 - DNA, 25 bp, Homo sapien
caaacctccagagggtagcagcaga

SEQ ID NO: 462265 - DNA, 25 bp, Homo sapien
gtgacccaacggctggcaacaaacc

SEQ ID NO: 462266 - DNA, 25 bp, Homo sapien
tctatatttcgcaggcaggtggaac

SEQ ID NO: 462267 - DNA, 25 bp, Homo sapien
tatcccaagggcttagtacagggcc

SEQ ID NO: 462268 - DNA, 25 bp, Homo sapien
tatttaaagagctctgcgtgcctgc

SEQ ID NO: 462269 - DNA, 25 bp, Homo sapien
taactggcgcgtgacctttacgaag

SEQ ID NO: 462270 - DNA, 25 bp, Homo sapien
aggtaagggatcaagatgctttttc

SEQ ID NO: 462271 - DNA, 25 bp, Homo sapien
gttgtccatccaaacactatagcct

SEQ ID NO: 462272 - DNA, 25 bp, Homo sapien
tagcctaaaggtaagggatcaagat

SEQ ID NO: 462273 - DNA, 25 bp, Homo sapien
atgttgtccatccaaacactatagc

SEQ ID NO: 462274 - DNA, 25 bp, Homo sapien
catacacagcggcaatcttcactca

SEQ ID NO: 462275 - DNA, 25 bp, Homo sapien
tttccatacacagcggcaatcttca

SEQ ID NO: 462276 - DNA, 25 bp, Homo sapien
gaagtttccatacacagcggcaatc

SEQ ID NO: 462277 - DNA, 25 bp, Homo sapien
attccaacaccagtgaagtttccat

SEQ ID NO: 462278 - DNA, 25 bp, Homo sapien
gaccttggcgttctctccatgcctg

SEQ ID NO: 462279 - DNA, 25 bp, Homo sapien
cttggactggatcaactggaaagcc

SEQ ID NO: 462280 - DNA, 25 bp, Homo sapien
gctgagggattcttccagagggctc

SEQ ID NO: 462281 - DNA, 25 bp, Homo sapien
tgcagtgagacctcagtaatgtccc

SEQ ID NO: 462282 - DNA, 25 bp, Homo sapien
cttgaaagggctccagagaagctct

SEQ ID NO: 462283 - DNA, 25 bp, Homo sapien
tgcttgaaagggctccagagaagct

SEQ ID NO: 462284 - DNA, 25 bp, Homo sapien
gaaagggctccagagaagctctgca

SEQ ID NO: 462285 - DNA, 25 bp, Homo sapien
ttgaaagggctccagagaagctctg

SEQ ID NO: 462286 - DNA, 25 bp, Homo sapien
actgagtcttcccactgggtggggt

SEQ ID NO: 462287 - DNA, 25 bp, Homo sapien
tgagtcttcccactgggtggggtcc

SEQ ID NO: 462288 - DNA, 25 bp, Homo sapien
ctcactgagtcttcccactgggtgg

SEQ ID NO: 462289 - DNA, 25 bp, Homo sapien
tcactgagtcttcccactgggtggg

SEQ ID NO: 462290 - DNA, 25 bp, Homo sapien
gcagctgccaacactcctaatgtta

SEQ ID NO: 462291 - DNA, 25 bp, Homo sapien
caggagtgaattaataattgctggc

SEQ ID NO: 462292 - DNA, 25 bp, Homo sapien
ccaagacggatccagcaggagtgaa

SEQ ID NO: 462293 - DNA, 25 bp, Homo sapien
taatgttattgtgcgcgggaggccc

SEQ ID NO: 462294 - DNA, 25 bp, Homo sapien
tccttgagccatcctcaggcctgat

SEQ ID NO: 462295 - DNA, 25 bp, Homo sapien
tgcataagttccagtctcttggccc

SEQ ID NO: 462296 - DNA, 25 bp, Homo sapien
ccaaaagcactgagcatttctccca

SEQ ID NO: 462297 - DNA, 25 bp, Homo sapien
tgtgtccttagcagcctgatcccag

SEQ ID NO: 462298 - DNA, 25 bp, Homo sapien
gccccataggcatttagaagtgtgg

SEQ ID NO: 462299 - DNA, 25 bp, Homo sapien
tctgagaaacctgacccttcaaaaa

SEQ ID NO: 462300 - DNA, 25 bp, Homo sapien
tcaagagaaaacgagggctcactgc

SEQ ID NO: 462301 - DNA, 25 bp, Homo sapien
tgaaagattatgttcctcctgaaga

SEQ ID NO: 462302 - DNA, 25 bp, Homo sapien
ggcagcccctggaactgttcagtgc

SEQ ID NO: 462303 - DNA, 25 bp, Homo sapien
aggactggcagcccctggaactgtt

SEQ ID NO: 462304 - DNA, 25 bp, Homo sapien
actggcagcccctggaactgttcag

SEQ ID NO: 462305 - DNA, 25 bp, Homo sapien
tggcagcccctggaactgttcagtg

SEQ ID NO: 462306 - DNA, 25 bp, Homo sapien
gaatagacagttttggctaggcaac

SEQ ID NO: 462307 - DNA, 25 bp, Homo sapien
gggaaggcctccacatttgaactta

SEQ ID NO: 462308 - DNA, 25 bp, Homo sapien
ccgtcccggctctatgattctatga

SEQ ID NO: 462309 - DNA, 25 bp, Homo sapien
taaatcaaaatccttggcgcagggt

SEQ ID NO: 462310 - DNA, 25 bp, Homo sapien
aggtaacataactgatttaagcggg

SEQ ID NO: 462311 - DNA, 25 bp, Homo sapien
taactgatttaagcgggtagttgtg

SEQ ID NO: 462312 - DNA, 25 bp, Homo sapien
ttaagcgggtagttgtgaaatgata

SEQ ID NO: 462313 - DNA, 25 bp, Homo sapien
taacataactgatttaagcgggtag

SEQ ID NO: 462314 - DNA, 25 bp, Homo sapien
agcttcctaatctctaaagtgaggg

SEQ ID NO: 462315 - DNA, 25 bp, Homo sapien
cagccagcagacaaacgatgtgatc

SEQ ID NO: 462316 - DNA, 25 bp, Homo sapien
aaaaaattgcttagagagtccagcc

SEQ ID NO: 462317 - DNA, 25 bp, Homo sapien
cccatgcccgcattttacagttagg

SEQ ID NO: 462318 - DNA, 25 bp, Homo sapien
ttaacctttgtcagtggaatctccc

SEQ ID NO: 462319 - DNA, 25 bp, Homo sapien
aacctttgtcagtggaatctcccca

SEQ ID NO: 462320 - DNA, 25 bp, Homo sapien
taacctttgtcagtggaatctcccc

SEQ ID NO: 462321 - DNA, 25 bp, Homo sapien
ggtattaactatcagacaagtggga

SEQ ID NO: 462322 - DNA, 25 bp, Homo sapien
tagggtcgatctaattgtttaggcc

SEQ ID NO: 462323 - DNA, 25 bp, Homo sapien
gatccagttgtttacggtgtacaca

SEQ ID NO: 462324 - DNA, 25 bp, Homo sapien
tagagggatcatatagcaatccaat

SEQ ID NO: 462325 - DNA, 25 bp, Homo sapien
gatcacgtggtgataacagagccaa

SEQ ID NO: 462326 - DNA, 25 bp, Homo sapien
aaactctctagaggcccaccttgag

SEQ ID NO: 462327 - DNA, 25 bp, Homo sapien
taaactatcaggtgtggtcaaggga

SEQ ID NO: 462328 - DNA, 25 bp, Homo sapien
gaatttagggcaatagacacctgtc

SEQ ID NO: 462329 - DNA, 25 bp, Homo sapien
tagccatatgactgaactcattttt

SEQ ID NO: 462330 - DNA, 25 bp, Homo sapien
gattaactgaatcatagccatatga

SEQ ID NO: 462331 - DNA, 25 bp, Homo sapien
ggcatgattaactgaatcatagcca

SEQ ID NO: 462332 - DNA, 25 bp, Homo sapien
ataggcatgattaactgaatcatag

SEQ ID NO: 462333 - DNA, 25 bp, Homo sapien
cctcccctgcttcacactcctgttt

SEQ ID NO: 462334 - DNA, 25 bp, Homo sapien
ctcctgtttctcctgccttccaatg

SEQ ID NO: 462335 - DNA, 25 bp, Homo sapien
cctgctgtctgtcctcccctgcttc

SEQ ID NO: 462336 - DNA, 25 bp, Homo sapien
cctgtttctcctgccttccaatgca

SEQ ID NO: 462337 - DNA, 25 bp, Homo sapien
ccatttatagtagtcttctgggcaa

SEQ ID NO: 462338 - DNA, 25 bp, Homo sapien
cctcttctggaaagtaaagacgtga

SEQ ID NO: 462339 - DNA, 25 bp, Homo sapien
gccgccaacttggtatgtgtcctta

SEQ ID NO: 462340 - DNA, 25 bp, Homo sapien
gaactttcccactcagcgattcaaa

SEQ ID NO: 462341 - DNA, 25 bp, Homo sapien
taatttgtactaagccgcagagggc

SEQ ID NO: 462342 - DNA, 25 bp, Homo sapien
tacccctgtctaggtaaggagctgg

SEQ ID NO: 462343 - DNA, 25 bp, Homo sapien
tgaagtgtctggttgtccccgtggc

SEQ ID NO: 462344 - DNA, 25 bp, Homo sapien
tgcctgtgacagtttgagtataccc

SEQ ID NO: 462345 - DNA, 25 bp, Homo sapien
gaagcactgagggtgcgctggttct

SEQ ID NO: 462346 - DNA, 25 bp, Homo sapien
cagcatggagatctgatggggagat

SEQ ID NO: 462347 - DNA, 25 bp, Homo sapien
aactgtggcgagaggaacggagcgt

SEQ ID NO: 462348 - DNA, 25 bp, Homo sapien
gtggcgagaggaacggagcgtcccc

SEQ ID NO: 462349 - DNA, 25 bp, Homo sapien
tccctagctgctccttgattgctgc

SEQ ID NO: 462350 - DNA, 25 bp, Homo sapien
tctctccctagctgctccttgattg

SEQ ID NO: 462351 - DNA, 25 bp, Homo sapien
gaatgcacttctctccctagctgct

SEQ ID NO: 462352 - DNA, 25 bp, Homo sapien
taattaataccagaatgcacttctc

SEQ ID NO: 462353 - DNA, 25 bp, Homo sapien
gcccagaagcattaacgaaaagcta

SEQ ID NO: 462354 - DNA, 25 bp, Homo sapien
ctctgggcccagaagcattaacgaa

SEQ ID NO: 462355 - DNA, 25 bp, Homo sapien
acgaaaagctattgatcatgttgag

SEQ ID NO: 462356 - DNA, 25 bp, Homo sapien
aaagctattgatcatgttgagtgaa

SEQ ID NO: 462357 - DNA, 25 bp, Homo sapien
aggaaggagtctcagcaagatccac

SEQ ID NO: 462358 - DNA, 25 bp, Homo sapien
cagacctgctaggttcaaggaagga

SEQ ID NO: 462359 - DNA, 25 bp, Homo sapien
ccagctggtgctccaagttctagct

SEQ ID NO: 462360 - DNA, 25 bp, Homo sapien
gctccaagttctagctcttttccag

SEQ ID NO: 462361 - DNA, 25 bp, Homo sapien
actgggtcctcaggccatcctgcta

SEQ ID NO: 462362 - DNA, 25 bp, Homo sapien
tcagcccgccacccccaattccact

SEQ ID NO: 462363 - DNA, 25 bp, Homo sapien
ttccactgggtcctcaggccatcct

SEQ ID NO: 462364 - DNA, 25 bp, Homo sapien
agcccgccacccccaattccactgg

SEQ ID NO: 462365 - DNA, 25 bp, Homo sapien
accttgaactaagtcaagttgccaa

SEQ ID NO: 462366 - DNA, 25 bp, Homo sapien
cttgaactaagtcaagttgccaaac

SEQ ID NO: 462367 - DNA, 25 bp, Homo sapien
ggcttccaaatcctcgcctccagac

SEQ ID NO: 462368 - DNA, 25 bp, Homo sapien
ctccagactctaacaggatgttctg

SEQ ID NO: 462369 - DNA, 25 bp, Homo sapien
tccaaacaccgaaatattgttgaga

SEQ ID NO: 462370 - DNA, 25 bp, Homo sapien
aaaactctgacccagttagatgcag

SEQ ID NO: 462371 - DNA, 25 bp, Homo sapien
gggagtggatgagacaaacacgaat

SEQ ID NO: 462372 - DNA, 25 bp, Homo sapien
acacgaatgtttgcgggtgctttaa

SEQ ID NO: 462373 - DNA, 25 bp, Homo sapien
ctgagctacagcacctgggttctga

SEQ ID NO: 462374 - DNA, 25 bp, Homo sapien
gagctacagcacctgggttctgagt

SEQ ID NO: 462375 - DNA, 25 bp, Homo sapien
gggttctgagtgacaactgttgtct

SEQ ID NO: 462376 - DNA, 25 bp, Homo sapien
ctgggttctgagtgacaactgttgt

SEQ ID NO: 462377 - DNA, 25 bp, Homo sapien
ggtttttcatatcccatacctcttg

SEQ ID NO: 462378 - DNA, 25 bp, Homo sapien
ctcttggatattgtaaatcacccac

SEQ ID NO: 462379 - DNA, 25 bp, Homo sapien
gatattgtaaatcacccacgggttc

SEQ ID NO: 462380 - DNA, 25 bp, Homo sapien
caaggccaggtcagttggtttctgc

SEQ ID NO: 462381 - DNA, 25 bp, Homo sapien
catgtggctgtaatgagccttcctt

SEQ ID NO: 462382 - DNA, 25 bp, Homo sapien
tggctgtaatgagccttccttgtac

SEQ ID NO: 462383 - DNA, 25 bp, Homo sapien
tgcatgtggctgtaatgagccttcc

SEQ ID NO: 462384 - DNA, 25 bp, Homo sapien
ctgttctcatttgctagtagcctct

SEQ ID NO: 462385 - DNA, 25 bp, Homo sapien
gagcccaggggcttcttatagtgcc

SEQ ID NO: 462386 - DNA, 25 bp, Homo sapien
tgcccagtggtgatttccccatggc

SEQ ID NO: 462387 - DNA, 25 bp, Homo sapien
gccagggaacgtgtgaactgcccca

SEQ ID NO: 462388 - DNA, 25 bp, Homo sapien
ggcttcttatagtgcccagtggtga

SEQ ID NO: 462389 - DNA, 25 bp, Homo sapien
gctgggaattggaggtcccacatcc

SEQ ID NO: 462390 - DNA, 25 bp, Homo sapien
tgggaattggaggtcccacatcccc

SEQ ID NO: 462391 - DNA, 25 bp, Homo sapien
gggctgggaattggaggtcccacat

SEQ ID NO: 462392 - DNA, 25 bp, Homo sapien
acatcccccaaatcccctgcagctt

SEQ ID NO: 462393 - DNA, 25 bp, Homo sapien
ggagctggagcccgacctggagctg

SEQ ID NO: 462394 - DNA, 25 bp, Homo sapien
ctccgctgcctaagctgcggctgga

SEQ ID NO: 462395 - DNA, 25 bp, Homo sapien
aacctccgctgcctaagctgcggct

SEQ ID NO: 462396 - DNA, 25 bp, Homo sapien
tccgctgcctaagctgcggctggag

SEQ ID NO: 462397 - DNA, 25 bp, Homo sapien
aaccaggccaagagaaatggtcagg

SEQ ID NO: 462398 - DNA, 25 bp, Homo sapien
tcactccctcgagggctactgttca

SEQ ID NO: 462399 - DNA, 25 bp, Homo sapien
ttcaactagggcactgcggctctca

SEQ ID NO: 462400 - DNA, 25 bp, Homo sapien
gtcagggcttcaactagggcactgc

SEQ ID NO: 462401 - DNA, 25 bp, Homo sapien
cagcctcgttgtaatgcatgacttt

SEQ ID NO: 462402 - DNA, 25 bp, Homo sapien
gaatgtccactggtaataacacttt

SEQ ID NO: 462403 - DNA, 25 bp, Homo sapien
aagagtgaacactcccctaggcgaa

SEQ ID NO: 462404 - DNA, 25 bp, Homo sapien
tgtttggagctggaaatggtcctga

SEQ ID NO: 462405 - DNA, 25 bp, Homo sapien
ctgtggaacatcagcctgaagggac

SEQ ID NO: 462406 - DNA, 25 bp, Homo sapien
catcagcctgaagggactttttatg

SEQ ID NO: 462407 - DNA, 25 bp, Homo sapien
cagcctgaagggactttttatgaaa

SEQ ID NO: 462408 - DNA, 25 bp, Homo sapien
gaacatcagcctgaagggacttttt

SEQ ID NO: 462409 - DNA, 25 bp, Homo sapien
tcatagaaacaagctaaaacagctt

SEQ ID NO: 462410 - DNA, 25 bp, Homo sapien
tgtacgaaaaccactacgccagcag

SEQ ID NO: 462411 - DNA, 25 bp, Homo sapien
cagcgtttagccacatcgccactgg

SEQ ID NO: 462412 - DNA, 25 bp, Homo sapien
ggcaagtaagtggagtccaatacat

SEQ ID NO: 462413 - DNA, 25 bp, Homo sapien
ccacggtcatccacggagccggtga

SEQ ID NO: 462414 - DNA, 25 bp, Homo sapien
tccacggagccggtgaaattggaaa

SEQ ID NO: 462415 - DNA, 25 bp, Homo sapien
gtcatccacggagccggtgaaattg

SEQ ID NO: 462416 - DNA, 25 bp, Homo sapien
tggcaggtcccacggtcatccacgg

SEQ ID NO: 462417 - DNA, 25 bp, Homo sapien
ttccactctgtccacgggaaaggtg

SEQ ID NO: 462418 - DNA, 25 bp, Homo sapien
tgtgaattccaagcgttccactctg

SEQ ID NO: 462419 - DNA, 25 bp, Homo sapien
gaaagaacatgagctgtgaattcca

SEQ ID NO: 462420 - DNA, 25 bp, Homo sapien
aagcgttccactctgtccacgggaa

SEQ ID NO: 462421 - DNA, 25 bp, Homo sapien
tctgcagatgcggaaccaaggctat

SEQ ID NO: 462422 - DNA, 25 bp, Homo sapien
cataactcggaggatgacaaagctg

SEQ ID NO: 462423 - DNA, 25 bp, Homo sapien
cactgctagtgtatctcctcgggca

SEQ ID NO: 462424 - DNA, 25 bp, Homo sapien
cagatatagggctgccaggttccag

SEQ ID NO: 462425 - DNA, 25 bp, Homo sapien
cagtgtaagaaatggtatccttctc

SEQ ID NO: 462426 - DNA, 25 bp, Homo sapien
taattaattggacatattccctcac

SEQ ID NO: 462427 - DNA, 25 bp, Homo sapien
tccatgatgtcaattcggacagtta

SEQ ID NO: 462428 - DNA, 25 bp, Homo sapien
caattcggacagttaggtttaacag

SEQ ID NO: 462429 - DNA, 25 bp, Homo sapien
caacaatttctgagcttccaccaaa

SEQ ID NO: 462430 - DNA, 25 bp, Homo sapien
ccttcagctgtatgaccagtttttc

SEQ ID NO: 462431 - DNA, 25 bp, Homo sapien
ccagctggtcaacaatttctgagct

SEQ ID NO: 462432 - DNA, 25 bp, Homo sapien
ttcagctgtatgaccagtttttcca

SEQ ID NO: 462433 - DNA, 25 bp, Homo sapien
gcttctctaccaagagagtcatatt

SEQ ID NO: 462434 - DNA, 25 bp, Homo sapien
ggtcttcagagccacgatttctcgg

SEQ ID NO: 462435 - DNA, 25 bp, Homo sapien
attgtttttgtctagtgtctcaagc

SEQ ID NO: 462436 - DNA, 25 bp, Homo sapien
tcggcgaatggcaaggacattgttt

SEQ ID NO: 462437 - DNA, 25 bp, Homo sapien
gtgttttgatctttagaggcctcac

SEQ ID NO: 462438 - DNA, 25 bp, Homo sapien
gggtgttttgatctttagaggcctc

SEQ ID NO: 462439 - DNA, 25 bp, Homo sapien
tggacgacaggggtgttttgatctt

SEQ ID NO: 462440 - DNA, 25 bp, Homo sapien
ggtggacgacaggggtgttttgatc

SEQ ID NO: 462441 - DNA, 25 bp, Homo sapien
tatcccaaaccgacagcaacaaaat

SEQ ID NO: 462442 - DNA, 25 bp, Homo sapien
aaaaagcaacgtgttttcagccaag

SEQ ID NO: 462443 - DNA, 25 bp, Homo sapien
tcagccaagagactattctccactg

SEQ ID NO: 462444 - DNA, 25 bp, Homo sapien
tcattgagtcttgccttcctgaaaa

SEQ ID NO: 462445 - DNA, 25 bp, Homo sapien
gatacaaatagtttaatatcctaag

SEQ ID NO: 462446 - DNA, 25 bp, Homo sapien
tttttcctgtcaaggttcaataaca

SEQ ID NO: 462447 - DNA, 25 bp, Homo sapien
ttcctgtcaaggttcaataacaaca

SEQ ID NO: 462448 - DNA, 25 bp, Homo sapien
ctaagcaccaaaggaatctataaat

SEQ ID NO: 462449 - DNA, 25 bp, Homo sapien
gctgaaccacagacggtttgctgat

SEQ ID NO: 462450 - DNA, 25 bp, Homo sapien
gaaaaccctctccagttgagctgaa

SEQ ID NO: 462451 - DNA, 25 bp, Homo sapien
taggtgatccgcaactctcgagcat

SEQ ID NO: 462452 - DNA, 25 bp, Homo sapien
catctgtattcaatggcgccaccca

SEQ ID NO: 462453 - DNA, 25 bp, Homo sapien
ttgttgtaaactgctgtaccactac

SEQ ID NO: 462454 - DNA, 25 bp, Homo sapien
tgttgttgtaaactgctgtaccact

SEQ ID NO: 462455 - DNA, 25 bp, Homo sapien
gttgttgttgtaaactgctgtacca

SEQ ID NO: 462456 - DNA, 25 bp, Homo sapien
gttgttgtaaactgctgtaccacta

SEQ ID NO: 462457 - DNA, 25 bp, Homo sapien
gttaactctggcaatattcccggtg

SEQ ID NO: 462458 - DNA, 25 bp, Homo sapien
taatcaccatgttaccagtgctggc

SEQ ID NO: 462459 - DNA, 25 bp, Homo sapien
catagtacgggtggcatacagaacc

SEQ ID NO: 462460 - DNA, 25 bp, Homo sapien
caatcgtgttggtggtcaggttaac

SEQ ID NO: 462461 - DNA, 25 bp, Homo sapien
acagaaagatcataattcagaaggt

SEQ ID NO: 462462 - DNA, 25 bp, Homo sapien
agacagaaagatcataattcagaag

SEQ ID NO: 462463 - DNA, 25 bp, Homo sapien
cagaaagatcataattcagaaggta

SEQ ID NO: 462464 - DNA, 25 bp, Homo sapien
gacagaaagatcataattcagaagg

SEQ ID NO: 462465 - DNA, 25 bp, Homo sapien
aagaatccctagacgccatactgag

SEQ ID NO: 462466 - DNA, 25 bp, Homo sapien
gaacacacttttagacacccctgca

SEQ ID NO: 462467 - DNA, 25 bp, Homo sapien
gactttattgcaaaatgcgcctgaa

SEQ ID NO: 462468 - DNA, 25 bp, Homo sapien
gtaggcttcactaggcccacagtgc

SEQ ID NO: 462469 - DNA, 25 bp, Homo sapien
tctggttctaatcttctgagctgcc

SEQ ID NO: 462470 - DNA, 25 bp, Homo sapien
taacaataaatgctagcactttgtc

SEQ ID NO: 462471 - DNA, 25 bp, Homo sapien
taaggtggacaatgagagaaaagaa

SEQ ID NO: 462472 - DNA, 25 bp, Homo sapien
tcttagatcagttccatagaaaact

SEQ ID NO: 462473 - DNA, 25 bp, Homo sapien
gaagcacatcacatacaccagcaag

SEQ ID NO: 462474 - DNA, 25 bp, Homo sapien
gcactgattaactagatactctcaa

SEQ ID NO: 462475 - DNA, 25 bp, Homo sapien
ttaaactgccaatcctatagactag

SEQ ID NO: 462476 - DNA, 25 bp, Homo sapien
tagcttttctatagctcgtcctaga

SEQ ID NO: 462477 - DNA, 25 bp, Homo sapien
tcttcctggtatagccagttagtcc

SEQ ID NO: 462478 - DNA, 25 bp, Homo sapien
ttctcttcctggtatagccagttag

SEQ ID NO: 462479 - DNA, 25 bp, Homo sapien
tcctggtatagccagttagtccttt

SEQ ID NO: 462480 - DNA, 25 bp, Homo sapien
ctggtatagccagttagtccttttg

SEQ ID NO: 462481 - DNA, 25 bp, Homo sapien
gcattttgaagggcatacctgtctc

SEQ ID NO: 462482 - DNA, 25 bp, Homo sapien
catatcttgttgcattttgaagggc

SEQ ID NO: 462483 - DNA, 25 bp, Homo sapien
ttatcttcatatcttgttgcatttt

SEQ ID NO: 462484 - DNA, 25 bp, Homo sapien
tcttcatatcttgttgcattttgaa

SEQ ID NO: 462485 - DNA, 25 bp, Homo sapien
agcagagatgagtgcttgtggcaaa

SEQ ID NO: 462486 - DNA, 25 bp, Homo sapien
gatttgaaaggtggaaggcttactg

SEQ ID NO: 462487 - DNA, 25 bp, Homo sapien
ggggatgacaccccaacggtagcag

SEQ ID NO: 462488 - DNA, 25 bp, Homo sapien
gagtccatagtccatcatctggtcc

SEQ ID NO: 462489 - DNA, 25 bp, Homo sapien
tatttcagtacgacaaaaatgaagt

SEQ ID NO: 462490 - DNA, 25 bp, Homo sapien
ggcccactccagaatcccctatttc

SEQ ID NO: 462491 - DNA, 25 bp, Homo sapien
aagtttctccccgtcggcaatgatg

SEQ ID NO: 462492 - DNA, 25 bp, Homo sapien
agtttctccccgtcggcaatgatgg

SEQ ID NO: 462493 - DNA, 25 bp, Homo sapien
atctaccctgctgttatcatcgtca

SEQ ID NO: 462494 - DNA, 25 bp, Homo sapien
ccaagtccagaatcaacaccagagg

SEQ ID NO: 462495 - DNA, 25 bp, Homo sapien
tccagaatcaacaccagaggctgct

SEQ ID NO: 462496 - DNA, 25 bp, Homo sapien
tatcttcatcatgttgccataaatc

SEQ ID NO: 462497 - DNA, 25 bp, Homo sapien
atgtcaaatcgttcctaatggtctc

SEQ ID NO: 462498 - DNA, 25 bp, Homo sapien
tagcaaggcaatctagcttttatgt

SEQ ID NO: 462499 - DNA, 25 bp, Homo sapien
ggtctctctaagcatagggttgttt

SEQ ID NO: 462500 - DNA, 25 bp, Homo sapien
tactcagtgttcgttatgggcaaat

SEQ ID NO: 462501 - DNA, 25 bp, Homo sapien
tgtctggctagcatactcttgttcg

SEQ ID NO: 462502 - DNA, 25 bp, Homo sapien
gataaatggcaagtactttagcctg

SEQ ID NO: 462503 - DNA, 25 bp, Homo sapien
tgcaacctaacatctgaccaggact

SEQ ID NO: 462504 - DNA, 25 bp, Homo sapien
tgaaatatcctgaatacacgtgcta

SEQ ID NO: 462505 - DNA, 25 bp, Homo sapien
ggtggagtctcattgtaatccctag

SEQ ID NO: 462506 - DNA, 25 bp, Homo sapien
tggtggagtctcattgtaatcccta

SEQ ID NO: 462507 - DNA, 25 bp, Homo sapien
caacatacctgaatctctgggacac

SEQ ID NO: 462508 - DNA, 25 bp, Homo sapien
aaagcaggaaagatccaaaattgac

SEQ ID NO: 462509 - DNA, 25 bp, Homo sapien
ggacacattcaaagcagtgtgtaga

SEQ ID NO: 462510 - DNA, 25 bp, Homo sapien
gatccaaaattgacaccctaacatc

SEQ ID NO: 462511 - DNA, 25 bp, Homo sapien
gataggagtcggactgtggctgcag

SEQ ID NO: 462512 - DNA, 25 bp, Homo sapien
tggagctcaatcaagtcagatctga

SEQ ID NO: 462513 - DNA, 25 bp, Homo sapien
gtcagatctgaaccaagaagccctg

SEQ ID NO: 462514 - DNA, 25 bp, Homo sapien
tgctgaagcccagatagtggtgata

SEQ ID NO: 462515 - DNA, 25 bp, Homo sapien
tgaaaaccaaccgtgatgaagaagg

SEQ ID NO: 462516 - DNA, 25 bp, Homo sapien
gaaccagacgggtctcctcaacaat

SEQ ID NO: 462517 - DNA, 25 bp, Homo sapien
cctcaacaatccataagttccaggg

SEQ ID NO: 462518 - DNA, 25 bp, Homo sapien
ggcagatgatgacctagaaccagac

SEQ ID NO: 462519 - DNA, 25 bp, Homo sapien
ctttcctggaaagtacccactctag

SEQ ID NO: 462520 - DNA, 25 bp, Homo sapien
tgtgaatttgcagaccccactctca

SEQ ID NO: 462521 - DNA, 25 bp, Homo sapien
agttccaggtctgcctcaaggccat

SEQ ID NO: 462522 - DNA, 25 bp, Homo sapien
cactctagatagatccataagcatc

SEQ ID NO: 462523 - DNA, 25 bp, Homo sapien
acagtggagttattctccaagtctc

SEQ ID NO: 462524 - DNA, 25 bp, Homo sapien
tcagatctgcttggctgttatctct

SEQ ID NO: 462525 - DNA, 25 bp, Homo sapien
cctgcgatttctcttcctgtgaatt

SEQ ID NO: 462526 - DNA, 25 bp, Homo sapien
gtgaattattccactgcttgtgtat

SEQ ID NO: 462527 - DNA, 25 bp, Homo sapien
aaggctgcataagccccagacaatt

SEQ ID NO: 462528 - DNA, 25 bp, Homo sapien
tcacataatcaattctcaggaaggc

SEQ ID NO: 462529 - DNA, 25 bp, Homo sapien
taagccccagacaattctttagctt

SEQ ID NO: 462530 - DNA, 25 bp, Homo sapien
tcacattccttacccctcaggggat

SEQ ID NO: 462531 - DNA, 25 bp, Homo sapien
gcaaagctagatgttgacaagtcca

SEQ ID NO: 462532 - DNA, 25 bp, Homo sapien
tacctcccatacattgttgctgtgg

SEQ ID NO: 462533 - DNA, 25 bp, Homo sapien
cattcacattgagccttaatcatca

SEQ ID NO: 462534 - DNA, 25 bp, Homo sapien
caacgaattgttcttccatagcaaa

SEQ ID NO: 462535 - DNA, 25 bp, Homo sapien
aaaaccacgctttccaagctacgca

SEQ ID NO: 462536 - DNA, 25 bp, Homo sapien
acccagtgtgttcgggatgagggcc

SEQ ID NO: 462537 - DNA, 25 bp, Homo sapien
gagatccacactttatatgtcctca

SEQ ID NO: 462538 - DNA, 25 bp, Homo sapien
ccaagctacgcagatccactgagat

SEQ ID NO: 462539 - DNA, 25 bp, Homo sapien
ttctgctgtatacctggatgaaagc

SEQ ID NO: 462540 - DNA, 25 bp, Homo sapien
ctcttctgctgtatacctggatgaa

SEQ ID NO: 462541 - DNA, 25 bp, Homo sapien
ctgtatacctggatgaaagcaaggc

SEQ ID NO: 462542 - DNA, 25 bp, Homo sapien
gctgtatacctggatgaaagcaagg

SEQ ID NO: 462543 - DNA, 25 bp, Homo sapien
gaaatagtactcatcgaagatgtgc

SEQ ID NO: 462544 - DNA, 25 bp, Homo sapien
tacaacaatctgctccacaaatttc

SEQ ID NO: 462545 - DNA, 25 bp, Homo sapien
cctgttggacagtgtaaaatgccac

SEQ ID NO: 462546 - DNA, 25 bp, Homo sapien
ggttgcctgcatatcatcaaaaggg

SEQ ID NO: 462547 - DNA, 25 bp, Homo sapien
gggagttattacaatcaggctcttt

SEQ ID NO: 462548 - DNA, 25 bp, Homo sapien
gacaagagtgcctaatgcacagcat

SEQ ID NO: 462549 - DNA, 25 bp, Homo sapien
gaaatgaagaatagttacactaggg

SEQ ID NO: 462550 - DNA, 25 bp, Homo sapien
tctttaaggcaattacaggcaaaga

SEQ ID NO: 462551 - DNA, 25 bp, Homo sapien
cccctagagctttatcgttgttgca

SEQ ID NO: 462552 - DNA, 25 bp, Homo sapien
tccaataataaacacccgagtacaa

SEQ ID NO: 462553 - DNA, 25 bp, Homo sapien
actggctaattagcataccaaagga

SEQ ID NO: 462554 - DNA, 25 bp, Homo sapien
gttgcaatccaataataaacacccg

SEQ ID NO: 462555 - DNA, 25 bp, Homo sapien
ggctggatataggtcctgtgacaac

SEQ ID NO: 462556 - DNA, 25 bp, Homo sapien
gtgatttcctgtagctcaaccaaaa

SEQ ID NO: 462557 - DNA, 25 bp, Homo sapien
atttaaatatcaacttgcttggtcc

SEQ ID NO: 462558 - DNA, 25 bp, Homo sapien
tttgtgaatgtgtatctgtaggggc

SEQ ID NO: 462559 - DNA, 25 bp, Homo sapien
ggcaagtgcagatgccaccagctgt

SEQ ID NO: 462560 - DNA, 25 bp, Homo sapien
ccgtgggcaagtgcagatgccacca

SEQ ID NO: 462561 - DNA, 25 bp, Homo sapien
ggcaccatcattagtgcctctggct

SEQ ID NO: 462562 - DNA, 25 bp, Homo sapien
tggctgcttttctctatatcctgct

SEQ ID NO: 462563 - DNA, 25 bp, Homo sapien
taaaatcaggcagatggactggtga

SEQ ID NO: 462564 - DNA, 25 bp, Homo sapien
gactggtgagtcctaaggtctttct

SEQ ID NO: 462565 - DNA, 25 bp, Homo sapien
tctttaacagaggttgcaacagtgt

SEQ ID NO: 462566 - DNA, 25 bp, Homo sapien
tatttacctagcacgcacaggtgca

SEQ ID NO: 462567 - DNA, 25 bp, Homo sapien
aggccagaacagttgtcccctgtca

SEQ ID NO: 462568 - DNA, 25 bp, Homo sapien
gccagaacagttgtcccctgtcaca

SEQ ID NO: 462569 - DNA, 25 bp, Homo sapien
ggccagaacagttgtcccctgtcac

SEQ ID NO: 462570 - DNA, 25 bp, Homo sapien
cagaacagttgtcccctgtcacatt

SEQ ID NO: 462571 - DNA, 25 bp, Homo sapien
tccttttaatccaaggcagacaagg

SEQ ID NO: 462572 - DNA, 25 bp, Homo sapien
cttctccttttaatccaaggcagac

SEQ ID NO: 462573 - DNA, 25 bp, Homo sapien
tctccttttaatccaaggcagacaa

SEQ ID NO: 462574 - DNA, 25 bp, Homo sapien
cttttaatccaaggcagacaaggct

SEQ ID NO: 462575 - DNA, 25 bp, Homo sapien
caaccaatcattgggtgtctttgtt

SEQ ID NO: 462576 - DNA, 25 bp, Homo sapien
tgtgtctagctgcacttatcccttc

SEQ ID NO: 462577 - DNA, 25 bp, Homo sapien
gcaactgctcctgatatgaggcatc

SEQ ID NO: 462578 - DNA, 25 bp, Homo sapien
ttgttcctcaaccaatcattgggtg

SEQ ID NO: 462579 - DNA, 25 bp, Homo sapien
atattttgagacacggattgtgtgt

SEQ ID NO: 462580 - DNA, 25 bp, Homo sapien
aagctgctgctcatattttgagaca

SEQ ID NO: 462581 - DNA, 25 bp, Homo sapien
agctgctgctcatattttgagacac

SEQ ID NO: 462582 - DNA, 25 bp, Homo sapien
tactaagttgagaggctgatctgca

SEQ ID NO: 462583 - DNA, 25 bp, Homo sapien
atactaagttgagaggctgatctgc

SEQ ID NO: 462584 - DNA, 25 bp, Homo sapien
tccttctagggtatgaaccatgtct

SEQ ID NO: 462585 - DNA, 25 bp, Homo sapien
tctagggtatgaaccatgtcttcat

SEQ ID NO: 462586 - DNA, 25 bp, Homo sapien
cttctagggtatgaaccatgtcttc

SEQ ID NO: 462587 - DNA, 25 bp, Homo sapien
gggtatgaaccatgtcttcatcaaa

SEQ ID NO: 462588 - DNA, 25 bp, Homo sapien
ccacaaaactaagcatctggatact

SEQ ID NO: 462589 - DNA, 25 bp, Homo sapien
tatgatattcaaatgcttgattgca

SEQ ID NO: 462590 - DNA, 25 bp, Homo sapien
tatgtttggaaacatccagctatga

SEQ ID NO: 462591 - DNA, 25 bp, Homo sapien
catctggatacttatgtttggaaac

SEQ ID NO: 462592 - DNA, 25 bp, Homo sapien
gccaggagagggacccatttaacca

SEQ ID NO: 462593 - DNA, 25 bp, Homo sapien
tatcctcaatggcatgttggacagc

SEQ ID NO: 462594 - DNA, 25 bp, Homo sapien
gagaagagctctacttcagcctggt

SEQ ID NO: 462595 - DNA, 25 bp, Homo sapien
gaagttcctggttattcagcctctg

SEQ ID NO: 462596 - DNA, 25 bp, Homo sapien
taatcatccatttgggccagtccac

SEQ ID NO: 462597 - DNA, 25 bp, Homo sapien
gaatatgcaaataatcatccatttg

SEQ ID NO: 462598 - DNA, 25 bp, Homo sapien
ccatttgggccagtccacagtctct

SEQ ID NO: 462599 - DNA, 25 bp, Homo sapien
gggccagtccacagtctctgggcct

SEQ ID NO: 462600 - DNA, 25 bp, Homo sapien
gaaatctgagcctccagcgagacat

SEQ ID NO: 462601 - DNA, 25 bp, Homo sapien
gtgtcagcaggaaatctgagcctcc

SEQ ID NO: 462602 - DNA, 25 bp, Homo sapien
tgtcagcaggaaatctgagcctcca

SEQ ID NO: 462603 - DNA, 25 bp, Homo sapien
aggaaatctgagcctccagcgagac

SEQ ID NO: 462604 - DNA, 25 bp, Homo sapien
cgaattaaactggacgtgatcagac

SEQ ID NO: 462605 - DNA, 25 bp, Homo sapien
gacagtatcggtacaaaatcctgac

SEQ ID NO: 462606 - DNA, 25 bp, Homo sapien
cacagaatcagcaaggactccaatc

SEQ ID NO: 462607 - DNA, 25 bp, Homo sapien
tgatcagacaaaacaccgacgctgg

SEQ ID NO: 462608 - DNA, 25 bp, Homo sapien
cagcgcctcgcagtccaggccggtg

SEQ ID NO: 462609 - DNA, 25 bp, Homo sapien
cctcaaacatctccaccgggatctg

SEQ ID NO: 462610 - DNA, 25 bp, Homo sapien
tcaaacatctccaccgggatctggg

SEQ ID NO: 462611 - DNA, 25 bp, Homo sapien
tggtcgttgacattcctcacctcca

SEQ ID NO: 462612 - DNA, 25 bp, Homo sapien
ccagggtgcgtgcacacggccgcac

SEQ ID NO: 462613 - DNA, 25 bp, Homo sapien
tccagggtgcgtgcacacggccgca

SEQ ID NO: 462614 - DNA, 25 bp, Homo sapien
ctccagggtgcgtgcacacggccgc

SEQ ID NO: 462615 - DNA, 25 bp, Homo sapien
cgcttctgcagctccacgcgaaaag

SEQ ID NO: 462616 - DNA, 25 bp, Homo sapien
gcgccgtccgcgcgcttctgcagct

SEQ ID NO: 462617 - DNA, 25 bp, Homo sapien
ccgtccgcgcgcttctgcagctcca

SEQ ID NO: 462618 - DNA, 25 bp, Homo sapien
ttctgcagctccacgcgaaaagggg

SEQ ID NO: 462619 - DNA, 25 bp, Homo sapien
tccaggctgtcggcggcctggctct

SEQ ID NO: 462620 - DNA, 25 bp, Homo sapien
ctgtcggcggcctggctctcgcggt

SEQ ID NO: 462621 - DNA, 25 bp, Homo sapien
aggctgtcggcggcctggctctcgc

SEQ ID NO: 462622 - DNA, 25 bp, Homo sapien
gctccaggctgtcggcggcctggct

SEQ ID NO: 462623 - DNA, 25 bp, Homo sapien
gttgaagacagccgtggcggagcgc

SEQ ID NO: 462624 - DNA, 25 bp, Homo sapien
agccgtggcggagcgcagcgggcgg

SEQ ID NO: 462625 - DNA, 25 bp, Homo sapien
acagccgtggcggagcgcagcgggc

SEQ ID NO: 462626 - DNA, 25 bp, Homo sapien
gaagacagccgtggcggagcgcagc

SEQ ID NO: 462627 - DNA, 25 bp, Homo sapien
tggtcattggcgtccaggacacaca

SEQ ID NO: 462628 - DNA, 25 bp, Homo sapien
ctgtggtcattggcgtccaggacac

SEQ ID NO: 462629 - DNA, 25 bp, Homo sapien
ggccgggctgtggtcattggcgtcc

SEQ ID NO: 462630 - DNA, 25 bp, Homo sapien
gccgggctgtggtcattggcgtcca

SEQ ID NO: 462631 - DNA, 25 bp, Homo sapien
gggtcggctgcgtccaggtcaagaa

SEQ ID NO: 462632 - DNA, 25 bp, Homo sapien
gtcggggtcggctgcgtccaggtca

SEQ ID NO: 462633 - DNA, 25 bp, Homo sapien
gcagggagcccacaggcgcgcctcc

SEQ ID NO: 462634 - DNA, 25 bp, Homo sapien
cggctgcgtccaggtcaagaagcag

SEQ ID NO: 462635 - DNA, 25 bp, Homo sapien
ccagaccgcgggtcgagctgaaaga

SEQ ID NO: 462636 - DNA, 25 bp, Homo sapien
gtcctgactctggtaatccacgggc

SEQ ID NO: 462637 - DNA, 25 bp, Homo sapien
agtgaggcggccagaccgcgggtcg

SEQ ID NO: 462638 - DNA, 25 bp, Homo sapien
cctctgggtgcaggcgccaaaagcg

SEQ ID NO: 462639 - DNA, 25 bp, Homo sapien
ttgcaggcggcagcgcggtcctgcg

SEQ ID NO: 462640 - DNA, 25 bp, Homo sapien
cggcagcgcggtcctgcgcccgcac

SEQ ID NO: 462641 - DNA, 25 bp, Homo sapien
aggcggcagcgcggtcctgcgcccg

SEQ ID NO: 462642 - DNA, 25 bp, Homo sapien
cttgcaggcggcagcgcggtcctgc

SEQ ID NO: 462643 - DNA, 25 bp, Homo sapien
gcggcgccagcctcgggcgtcctgg

SEQ ID NO: 462644 - DNA, 25 bp, Homo sapien
ctccggcaccagcgtggcggcgcca

SEQ ID NO: 462645 - DNA, 25 bp, Homo sapien
ctggctcccgccgactagctagcgt

SEQ ID NO: 462646 - DNA, 25 bp, Homo sapien
gcggcgaagggcgaggcagccggcg

SEQ ID NO: 462647 - DNA, 25 bp, Homo sapien
gcgcagcgcatctgccggttggcgc

SEQ ID NO: 462648 - DNA, 25 bp, Homo sapien
gcatctgccggttggcgcccgagtc

SEQ ID NO: 462649 - DNA, 25 bp, Homo sapien
aagtgcacctgccagtagagggcgc

SEQ ID NO: 462650 - DNA, 25 bp, Homo sapien
cagccggaagtgcacctgccagtag

SEQ ID NO: 462651 - DNA, 25 bp, Homo sapien
tcgcggtccaacgaccccgcggtca

SEQ ID NO: 462652 - DNA, 25 bp, Homo sapien
atgggctcgcggtccaacgaccccg

SEQ ID NO: 462653 - DNA, 25 bp, Homo sapien
ctaggcgatgggctcgcggtccaac

SEQ ID NO: 462654 - DNA, 25 bp, Homo sapien
aggcgatgggctcgcggtccaacga

SEQ ID NO: 462655 - DNA, 25 bp, Homo sapien
gagcattgtctttctcgtagcccac

SEQ ID NO: 462656 - DNA, 25 bp, Homo sapien
ttgtctttctcgtagcccacgcgca

SEQ ID NO: 462657 - DNA, 25 bp, Homo sapien
gcgtgaagagcggagcattgtcttt

SEQ ID NO: 462658 - DNA, 25 bp, Homo sapien
ggtccgcggtcaccagcgtcaggtt

SEQ ID NO: 462659 - DNA, 25 bp, Homo sapien
ctggtggttgggtccaccgagacct

SEQ ID NO: 462660 - DNA, 25 bp, Homo sapien
tggtggttgggtccaccgagaccta

SEQ ID NO: 462661 - DNA, 25 bp, Homo sapien
taagtaagtcggctcgacgtcggcg

SEQ ID NO: 462662 - DNA, 25 bp, Homo sapien
gccgtcgctgtcgaggactaagtaa

SEQ ID NO: 462663 - DNA, 25 bp, Homo sapien
tcttttgcctgcagacgggtcagca

SEQ ID NO: 462664 - DNA, 25 bp, Homo sapien
tcctcgcagtcaaagagccgtcgag

SEQ ID NO: 462665 - DNA, 25 bp, Homo sapien
agctcacccgaagccgggtgcagcg

SEQ ID NO: 462666 - DNA, 25 bp, Homo sapien
agagacagctcacccgaagccgggt

SEQ ID NO: 462667 - DNA, 25 bp, Homo sapien
gacagctcacccgaagccgggtgca

SEQ ID NO: 462668 - DNA, 25 bp, Homo sapien
tgcagagacagctcacccgaagccg

SEQ ID NO: 462669 - DNA, 25 bp, Homo sapien
tcgctgcctgatgcgtggctctcct

SEQ ID NO: 462670 - DNA, 25 bp, Homo sapien
agaacagggagggttcaagctgccc

SEQ ID NO: 462671 - DNA, 25 bp, Homo sapien
cgcgggcacgagaagcagtgtggct

SEQ ID NO: 462672 - DNA, 25 bp, Homo sapien
tgtgcactcagagtgggccggcctc

SEQ ID NO: 462673 - DNA, 25 bp, Homo sapien
tggctctgacacgtggaccagcatg

SEQ ID NO: 462674 - DNA, 25 bp, Homo sapien
gccttggcaagaacaagtcacagtg

SEQ ID NO: 462675 - DNA, 25 bp, Homo sapien
cactcgttgcctgaaatctgcttgg

SEQ ID NO: 462676 - DNA, 25 bp, Homo sapien
tgatgatggccactagcagaaggat

SEQ ID NO: 462677 - DNA, 25 bp, Homo sapien
ctgatatccaaatggctgtcattca

SEQ ID NO: 462678 - DNA, 25 bp, Homo sapien
ccttcatactgaattcatctagatt

SEQ ID NO: 462679 - DNA, 25 bp, Homo sapien
tgttttgcaatcatttgaaaggatg

SEQ ID NO: 462680 - DNA, 25 bp, Homo sapien
aatggctgtcattcaattcactgtc

SEQ ID NO: 462681 - DNA, 25 bp, Homo sapien
ctgaagtatgtgaaggtgatccatc

SEQ ID NO: 462682 - DNA, 25 bp, Homo sapien
catcattctgtccaacaatggggaa

SEQ ID NO: 462683 - DNA, 25 bp, Homo sapien
agttttgaactctgtcatagacact

SEQ ID NO: 462684 - DNA, 25 bp, Homo sapien
tctgtcatagacacttggcagccct

SEQ ID NO: 462685 - DNA, 25 bp, Homo sapien
ggaagactctcttattatgtagcaa

SEQ ID NO: 462686 - DNA, 25 bp, Homo sapien
tcactatcaataatctccccagtta

SEQ ID NO: 462687 - DNA, 25 bp, Homo sapien
tcttgcagggtattacaactacacc

SEQ ID NO: 462688 - DNA, 25 bp, Homo sapien
tccccagttacagtggcctgagcta

SEQ ID NO: 462689 - DNA, 25 bp, Homo sapien
gaacactacgtcataggcagaagga

SEQ ID NO: 462690 - DNA, 25 bp, Homo sapien
ggcagaaggaggaaggttgctcagg

SEQ ID NO: 462691 - DNA, 25 bp, Homo sapien
ctacacagaacactacgtcataggc

SEQ ID NO: 462692 - DNA, 25 bp, Homo sapien
cacagaacactacgtcataggcaga

SEQ ID NO: 462693 - DNA, 25 bp, Homo sapien
agcagatggctatagaaaagaaccc

SEQ ID NO: 462694 - DNA, 25 bp, Homo sapien
ggacaaccatctcaaccatcaggga

SEQ ID NO: 462695 - DNA, 25 bp, Homo sapien
ggaggttatctgaatcatcaaggac

SEQ ID NO: 462696 - DNA, 25 bp, Homo sapien
gggagctcactaagcaaggagcaga

SEQ ID NO: 462697 - DNA, 25 bp, Homo sapien
gctgtttcattaccctgaatacttc

SEQ ID NO: 462698 - DNA, 25 bp, Homo sapien
cagctgtttcattaccctgaatact

SEQ ID NO: 462699 - DNA, 25 bp, Homo sapien
agctgtttcattaccctgaatactt

SEQ ID NO: 462700 - DNA, 25 bp, Homo sapien
tcagctccttggttaagccctctct

SEQ ID NO: 462701 - DNA, 25 bp, Homo sapien
tgtcagctccttggttaagccctct

SEQ ID NO: 462702 - DNA, 25 bp, Homo sapien
tttgtcagctccttggttaagccct

SEQ ID NO: 462703 - DNA, 25 bp, Homo sapien
gctccttggttaagccctctctcca

SEQ ID NO: 462704 - DNA, 25 bp, Homo sapien
aatgatgcctgtgtatcagtgggag

SEQ ID NO: 462705 - DNA, 25 bp, Homo sapien
tgggcctggaggatgactttaagtc

SEQ ID NO: 462706 - DNA, 25 bp, Homo sapien
cagagaagacagtggaatggtaaat

SEQ ID NO: 462707 - DNA, 25 bp, Homo sapien
caagaggaagataatggtgcattaa

SEQ ID NO: 462708 - DNA, 25 bp, Homo sapien
cacttagtacttagcagcaggattt

SEQ ID NO: 462709 - DNA, 25 bp, Homo sapien
ttagtacttagcagcaggattttgc

SEQ ID NO: 462710 - DNA, 25 bp, Homo sapien
cttctcccacttagtacttagcagc

SEQ ID NO: 462711 - DNA, 25 bp, Homo sapien
ctcccacttagtacttagcagcagg

SEQ ID NO: 462712 - DNA, 25 bp, Homo sapien
gatttacccatttcaatcctatctc

SEQ ID NO: 462713 - DNA, 25 bp, Homo sapien
agatggaagaatccttgccagtatc

SEQ ID NO: 462714 - DNA, 25 bp, Homo sapien
gcaagtattactgtgcccctttgat

SEQ ID NO: 462715 - DNA, 25 bp, Homo sapien
ggcctctacctgttgatttacccat

SEQ ID NO: 462716 - DNA, 25 bp, Homo sapien
gggtagctggaaccttgccatgtgt

SEQ ID NO: 462717 - DNA, 25 bp, Homo sapien
ggtagctggaaccttgccatgtgtg

SEQ ID NO: 462718 - DNA, 25 bp, Homo sapien
agggtagctggaaccttgccatgtg

SEQ ID NO: 462719 - DNA, 25 bp, Homo sapien
ttctggtgctcagggtagctggaac

SEQ ID NO: 462720 - DNA, 25 bp, Homo sapien
atcagcatagcacaccacaatccag

SEQ ID NO: 462721 - DNA, 25 bp, Homo sapien
tggtccccagctcatgggagatcaa

SEQ ID NO: 462722 - DNA, 25 bp, Homo sapien
atgggagatcaacatattgttgcca

SEQ ID NO: 462723 - DNA, 25 bp, Homo sapien
cagtgccgattcacaggtgcaacct

SEQ ID NO: 462724 - DNA, 25 bp, Homo sapien
ttcagcgtaggagggtgtggtgacc

SEQ ID NO: 462725 - DNA, 25 bp, Homo sapien
tatccatagaggagtagcctagctt

SEQ ID NO: 462726 - DNA, 25 bp, Homo sapien
agcctagcttgcaattatcattctg

SEQ ID NO: 462727 - DNA, 25 bp, Homo sapien
tccaaaacgagaggccctcttcagc

SEQ ID NO: 462728 - DNA, 25 bp, Homo sapien
gagacaccagcagatgaacaccaag

SEQ ID NO: 462729 - DNA, 25 bp, Homo sapien
tgggcatgaggagacaccagcagat

SEQ ID NO: 462730 - DNA, 25 bp, Homo sapien
acaccagcagatgaacaccaagcac

SEQ ID NO: 462731 - DNA, 25 bp, Homo sapien
ctgggcatgaggagacaccagcaga

SEQ ID NO: 462732 - DNA, 25 bp, Homo sapien
accttgtcctctgacgacagccatt

SEQ ID NO: 462733 - DNA, 25 bp, Homo sapien
aatggaagccccagtaacgcatttg

SEQ ID NO: 462734 - DNA, 25 bp, Homo sapien
gaattttgcttaatcccatccacag

SEQ ID NO: 462735 - DNA, 25 bp, Homo sapien
ccatccacagaacccaatatagttg

SEQ ID NO: 462736 - DNA, 25 bp, Homo sapien
caaatattaataccttcatgaacaa

SEQ ID NO: 462737 - DNA, 25 bp, Homo sapien
atattaataccttcatgaacaagct

SEQ ID NO: 462738 - DNA, 25 bp, Homo sapien
tccaacaaatattaataccttcatg

SEQ ID NO: 462739 - DNA, 25 bp, Homo sapien
caacaaatattaataccttcatgaa

SEQ ID NO: 462740 - DNA, 25 bp, Homo sapien
ctggtaggtgcctaattaaactcat

SEQ ID NO: 462741 - DNA, 25 bp, Homo sapien
caaatttgttcagatgcaacctttt

SEQ ID NO: 462742 - DNA, 25 bp, Homo sapien
tttgttcagatgcaacctttttctt

SEQ ID NO: 462743 - DNA, 25 bp, Homo sapien
ggtgcctaattaaactcatgtagaa

SEQ ID NO: 462744 - DNA, 25 bp, Homo sapien
taggcttgcttctgattgctgctgc

SEQ ID NO: 462745 - DNA, 25 bp, Homo sapien
gagcctgacatgtatcttcaagttg

SEQ ID NO: 462746 - DNA, 25 bp, Homo sapien
caagccctgaaggtaggcttgcttc

SEQ ID NO: 462747 - DNA, 25 bp, Homo sapien
ctctccttaggagcctgacatgtat

SEQ ID NO: 462748 - DNA, 25 bp, Homo sapien
aacagttgtggcattggcccttggg

SEQ ID NO: 462749 - DNA, 25 bp, Homo sapien
tgtctccctacgactctgtgcaaag

SEQ ID NO: 462750 - DNA, 25 bp, Homo sapien
ggaagcaggcgatgagctctctgaa

SEQ ID NO: 462751 - DNA, 25 bp, Homo sapien
tgcaaagatgctaacagttgtggca

SEQ ID NO: 462752 - DNA, 25 bp, Homo sapien
tcatttgttaagagacattgctgaa

SEQ ID NO: 462753 - DNA, 25 bp, Homo sapien
tttctgaaagataggaatcaacaga

SEQ ID NO: 462754 - DNA, 25 bp, Homo sapien
ctgaggtttaccctgagcaaaggaa

SEQ ID NO: 462755 - DNA, 25 bp, Homo sapien
gaaggcctcgactctgaaccatctg

SEQ ID NO: 462756 - DNA, 25 bp, Homo sapien
tatctgcgaagtccaaacaaagtaa

SEQ ID NO: 462757 - DNA, 25 bp, Homo sapien
gatatctgcgaagtccaaacaaagt

SEQ ID NO: 462758 - DNA, 25 bp, Homo sapien
ctgatatctgcgaagtccaaacaaa

SEQ ID NO: 462759 - DNA, 25 bp, Homo sapien
ctgcgaagtccaaacaaagtaaaag

SEQ ID NO: 462760 - DNA, 25 bp, Homo sapien
tgtacaaatttgatataggcagccc

SEQ ID NO: 462761 - DNA, 25 bp, Homo sapien
taatttatctcctagtatagcacta

SEQ ID NO: 462762 - DNA, 25 bp, Homo sapien
cactgacctgtgaaacctggcattt

SEQ ID NO: 462763 - DNA, 25 bp, Homo sapien
gcagcccgtgtaccatttgaaaaga

SEQ ID NO: 462764 - DNA, 25 bp, Homo sapien
tggctgtcctgccaataacagaagc

SEQ ID NO: 462765 - DNA, 25 bp, Homo sapien
agtggtacagcttgccaggcatcaa

SEQ ID NO: 462766 - DNA, 25 bp, Homo sapien
gcatcaaaggtcctgtctgcctcct

SEQ ID NO: 462767 - DNA, 25 bp, Homo sapien
gctgtcctgccaataacagaagcat

SEQ ID NO: 462768 - DNA, 25 bp, Homo sapien
ggtcagggcgctgccgttttgtcat

SEQ ID NO: 462769 - DNA, 25 bp, Homo sapien
tgggtcagggcgctgccgttttgtc

SEQ ID NO: 462770 - DNA, 25 bp, Homo sapien
ggcgctgccgttttgtcatttttac

SEQ ID NO: 462771 - DNA, 25 bp, Homo sapien
cagggcgctgccgttttgtcatttt

SEQ ID NO: 462772 - DNA, 25 bp, Homo sapien
cactctgtggttttgtacttatctc

SEQ ID NO: 462773 - DNA, 25 bp, Homo sapien
gtggttttgtacttatctccttcaa

SEQ ID NO: 462774 - DNA, 25 bp, Homo sapien
acaaattcactctgtggttttgtac

SEQ ID NO: 462775 - DNA, 25 bp, Homo sapien
ttattcctgcacaaattcactctgt

SEQ ID NO: 462776 - DNA, 25 bp, Homo sapien
gcctagttagttgagagatttcact

SEQ ID NO: 462777 - DNA, 25 bp, Homo sapien
tcattaagctgttgtatatcctgtt

SEQ ID NO: 462778 - DNA, 25 bp, Homo sapien
tatgggtcttttgtgcaatatttca

SEQ ID NO: 462779 - DNA, 25 bp, Homo sapien
cactgctaccaaaactacgaggcct

SEQ ID NO: 462780 - DNA, 25 bp, Homo sapien
tatttctgaatcctccttggagaat

SEQ ID NO: 462781 - DNA, 25 bp, Homo sapien
ctatttctgaatcctccttggagaa

SEQ ID NO: 462782 - DNA, 25 bp, Homo sapien
ttggagaatgttttagagagattga

SEQ ID NO: 462783 - DNA, 25 bp, Homo sapien
tggagaatgttttagagagattgaa

SEQ ID NO: 462784 - DNA, 25 bp, Homo sapien
tttccaggagaacccagtaagtggc

SEQ ID NO: 462785 - DNA, 25 bp, Homo sapien
tggtagccatactgaaccttgaggg

SEQ ID NO: 462786 - DNA, 25 bp, Homo sapien
gcaacccttaggcagtagtccaaga

SEQ ID NO: 462787 - DNA, 25 bp, Homo sapien
taagtaagtcagcaactccagtggc

SEQ ID NO: 462788 - DNA, 25 bp, Homo sapien
gaaagatgtgaccaaatctctgaac

SEQ ID NO: 462789 - DNA, 25 bp, Homo sapien
tatggactcatatagcctgaaacac

SEQ ID NO: 462790 - DNA, 25 bp, Homo sapien
tctttaactttcactggtgtccagt

SEQ ID NO: 462791 - DNA, 25 bp, Homo sapien
cagtatggactcatatagcctgaaa

SEQ ID NO: 462792 - DNA, 25 bp, Homo sapien
aggagagctcatttctgtgtcgtac

SEQ ID NO: 462793 - DNA, 25 bp, Homo sapien
cttcttcaggagagctcatttctgt

SEQ ID NO: 462794 - DNA, 25 bp, Homo sapien
gtgtcgtacaaaagtggttctgctg

SEQ ID NO: 462795 - DNA, 25 bp, Homo sapien
tcatttctgtgtcgtacaaaagtgg

SEQ ID NO: 462796 - DNA, 25 bp, Homo sapien
gtctactcctactcctatggtgttg

SEQ ID NO: 462797 - DNA, 25 bp, Homo sapien
tctttttatatgcaataatccagca

SEQ ID NO: 462798 - DNA, 25 bp, Homo sapien
atgtctactcctactcctatggtgt

SEQ ID NO: 462799 - DNA, 25 bp, Homo sapien
tactcctactcctatggtgttgtat

SEQ ID NO: 462800 - DNA, 25 bp, Homo sapien
tttgcttctgatcccaaaagatttc

SEQ ID NO: 462801 - DNA, 25 bp, Homo sapien
gtggccctgggtccctgttcaggga

SEQ ID NO: 462802 - DNA, 25 bp, Homo sapien
tgttcagggaggagcaggtacaaaa

SEQ ID NO: 462803 - DNA, 25 bp, Homo sapien
cctcttgtggccctgggtccctgtt

SEQ ID NO: 462804 - DNA, 25 bp, Homo sapien
gggtcttagtgcccttaattctaca

SEQ ID NO: 462805 - DNA, 25 bp, Homo sapien
tgtttctgcaggttcaagctgccac

SEQ ID NO: 462806 - DNA, 25 bp, Homo sapien
ttagtgcccttaattctacatatgt

SEQ ID NO: 462807 - DNA, 25 bp, Homo sapien
gtcttagtgcccttaattctacata

SEQ ID NO: 462808 - DNA, 25 bp, Homo sapien
ggacaacggaggcatcaatttagat

SEQ ID NO: 462809 - DNA, 25 bp, Homo sapien
ctggacaacggaggcatcaatttag

SEQ ID NO: 462810 - DNA, 25 bp, Homo sapien
ggctggacaacggaggcatcaattt

SEQ ID NO: 462811 - DNA, 25 bp, Homo sapien
ccaggctggacaacggaggcatcaa

SEQ ID NO: 462812 - DNA, 25 bp, Homo sapien
tatgctccagcacaatcattcctga

SEQ ID NO: 462813 - DNA, 25 bp, Homo sapien
aaagctaacagcatgtgttccatcc

SEQ ID NO: 462814 - DNA, 25 bp, Homo sapien
cctgagctgtatacttaatgtggca

SEQ ID NO: 462815 - DNA, 25 bp, Homo sapien
ggagaatagattgaccatttgctaa

SEQ ID NO: 462816 - DNA, 25 bp, Homo sapien
gagataaggggggacgacaaggtga

SEQ ID NO: 462817 - DNA, 25 bp, Homo sapien
cacggtaaagatggattacttgatt

SEQ ID NO: 462818 - DNA, 25 bp, Homo sapien
taatctactttatgcaaccagtcac

SEQ ID NO: 462819 - DNA, 25 bp, Homo sapien
cagtcaccattctgaggcttctcaa

SEQ ID NO: 462820 - DNA, 25 bp, Homo sapien
tacaggtaataagtggaatacaaca

SEQ ID NO: 462821 - DNA, 25 bp, Homo sapien
tattttatagtcagtgtgagcagct

SEQ ID NO: 462822 - DNA, 25 bp, Homo sapien
acagaatcggcttcgtgcagcacca

SEQ ID NO: 462823 - DNA, 25 bp, Homo sapien
tctgccacagaatcggcttcgtgca

SEQ ID NO: 462824 - DNA, 25 bp, Homo sapien
cacttctgccacagaatcggcttcg

SEQ ID NO: 462825 - DNA, 25 bp, Homo sapien
aatcggcttcgtgcagcaccagcag

SEQ ID NO: 462826 - DNA, 25 bp, Homo sapien
ttaagaaccacagcaggatccacgc

SEQ ID NO: 462827 - DNA, 25 bp, Homo sapien
acagcaggatccacgcgaaccgcaa

SEQ ID NO: 462828 - DNA, 25 bp, Homo sapien
acgcgaaccgcaagcaccaccactg

SEQ ID NO: 462829 - DNA, 25 bp, Homo sapien
caaggccttccggtcagctgcccgg

SEQ ID NO: 462830 - DNA, 25 bp, Homo sapien
cagaagacccacaccacagggctgt

SEQ ID NO: 462831 - DNA, 25 bp, Homo sapien
gaagacccacaccacagggctgtac

SEQ ID NO: 462832 - DNA, 25 bp, Homo sapien
agaagacccacaccacagggctgta

SEQ ID NO: 462833 - DNA, 25 bp, Homo sapien
gggaggctccattagaaacaccagg

SEQ ID NO: 462834 - DNA, 25 bp, Homo sapien
tcttgaatcctgtggccacgaagag

SEQ ID NO: 462835 - DNA, 25 bp, Homo sapien
ggcaaggcctttgagtcccactaca

SEQ ID NO: 462836 - DNA, 25 bp, Homo sapien
ttgaaccacaacactcacaagacag

SEQ ID NO: 462837 - DNA, 25 bp, Homo sapien
gatcaatggagacaatagctctcag

SEQ ID NO: 462838 - DNA, 25 bp, Homo sapien
cctgcagccaatgtggcgagactta

SEQ ID NO: 462839 - DNA, 25 bp, Homo sapien
gagtcacatggatagctggatcaat

SEQ ID NO: 462840 - DNA, 25 bp, Homo sapien
cagctcaatggacctagtctgagtc

SEQ ID NO: 462841 - DNA, 25 bp, Homo sapien
taactctgtccagtataggcatgtg

SEQ ID NO: 462842 - DNA, 25 bp, Homo sapien
ggaatcacaatgtaggctgggttcc

SEQ ID NO: 462843 - DNA, 25 bp, Homo sapien
caacattttggccaaggacaggtgg

SEQ ID NO: 462844 - DNA, 25 bp, Homo sapien
tcacaatgtaggctgggttcctcag

SEQ ID NO: 462845 - DNA, 25 bp, Homo sapien
gatgaggctatggagtgaaggtcct

SEQ ID NO: 462846 - DNA, 25 bp, Homo sapien
aggctatggagtgaaggtcctcagc

SEQ ID NO: 462847 - DNA, 25 bp, Homo sapien
tgaggctatggagtgaaggtcctca

SEQ ID NO: 462848 - DNA, 25 bp, Homo sapien
gctatggagtgaaggtcctcagctg

SEQ ID NO: 462849 - DNA, 25 bp, Homo sapien
tcttcctattgacttcccactgagt

SEQ ID NO: 462850 - DNA, 25 bp, Homo sapien
cccactgagttgcaagtgacatgca

SEQ ID NO: 462851 - DNA, 25 bp, Homo sapien
catcgcctgggccaatgattgaatg

SEQ ID NO: 462852 - DNA, 25 bp, Homo sapien
aagtgatacttagcccatcgcctgg

SEQ ID NO: 462853 - DNA, 25 bp, Homo sapien
gtaaggatcgtgcttcttgctttcc

SEQ ID NO: 462854 - DNA, 25 bp, Homo sapien
ctatgctcttgtaaggatcgtgctt

SEQ ID NO: 462855 - DNA, 25 bp, Homo sapien
ctgggtgaggccacgtgactgtttc

SEQ ID NO: 462856 - DNA, 25 bp, Homo sapien
tgaggccacgtgactgtttctctgc

SEQ ID NO: 462857 - DNA, 25 bp, Homo sapien
cagcatttacctagctagaggccag

SEQ ID NO: 462858 - DNA, 25 bp, Homo sapien
ggaaattaaccccagcaccattgtg

SEQ ID NO: 462859 - DNA, 25 bp, Homo sapien
tgtgaaccctaccatgaactgctct

SEQ ID NO: 462860 - DNA, 25 bp, Homo sapien
caggcaggaactaggaccaacaatt

SEQ ID NO: 462861 - DNA, 25 bp, Homo sapien
tcattaaaagaattcggtgagttca

SEQ ID NO: 462862 - DNA, 25 bp, Homo sapien
tcaagacgtcttgctgtttatgttc

SEQ ID NO: 462863 - DNA, 25 bp, Homo sapien
ttattcaaaactgcactgtatcttg

SEQ ID NO: 462864 - DNA, 25 bp, Homo sapien
cacctctggtttcttgatagatccc

SEQ ID NO: 462865 - DNA, 25 bp, Homo sapien
tattttagcctctacttgccattct

SEQ ID NO: 462866 - DNA, 25 bp, Homo sapien
tctgggaccacctatagcacttctc

SEQ ID NO: 462867 - DNA, 25 bp, Homo sapien
gaagagttgtttcgaagcatcctcc

SEQ ID NO: 462868 - DNA, 25 bp, Homo sapien
tgccattcttggatatacatctgtt

SEQ ID NO: 462869 - DNA, 25 bp, Homo sapien
tctgtcatcactcggagagattcca

SEQ ID NO: 462870 - DNA, 25 bp, Homo sapien
agtagccccgtctgtcatcactcgg

SEQ ID NO: 462871 - DNA, 25 bp, Homo sapien
tcggagagattccatcgtctgcttt

SEQ ID NO: 462872 - DNA, 25 bp, Homo sapien
ctcatgggtaaaggggaccactggc

SEQ ID NO: 462873 - DNA, 25 bp, Homo sapien
ccagtagccttgtctaatcagggca

SEQ ID NO: 462874 - DNA, 25 bp, Homo sapien
tagccttgtctaatcagggcacctc

SEQ ID NO: 462875 - DNA, 25 bp, Homo sapien
agtagccttgtctaatcagggcacc

SEQ ID NO: 462876 - DNA, 25 bp, Homo sapien
gccttgtctaatcagggcacctcta

SEQ ID NO: 462877 - DNA, 25 bp, Homo sapien
catttgcttctattactgacacaaa

SEQ ID NO: 462878 - DNA, 25 bp, Homo sapien
tgacacaaagactgtccatgcattg

SEQ ID NO: 462879 - DNA, 25 bp, Homo sapien
gggaagagctacacaagccattcaa

SEQ ID NO: 462880 - DNA, 25 bp, Homo sapien
tccatgcattgtttgggacaggagg

SEQ ID NO: 462881 - DNA, 25 bp, Homo sapien
aaggagacttcgtgcctgtggctga

SEQ ID NO: 462882 - DNA, 25 bp, Homo sapien
tctgagtgacaagactaccaacagt

SEQ ID NO: 462883 - DNA, 25 bp, Homo sapien
tagaacaatctaaacgcagggcctg

SEQ ID NO: 462884 - DNA, 25 bp, Homo sapien
ccccaaagacggatgatactggttg

SEQ ID NO: 462885 - DNA, 25 bp, Homo sapien
gaagtatccccagtccttccaaatc

SEQ ID NO: 462886 - DNA, 25 bp, Homo sapien
attcctggggtggaagtatccccag

SEQ ID NO: 462887 - DNA, 25 bp, Homo sapien
cagatgtcctggaaattcctggggt

SEQ ID NO: 462888 - DNA, 25 bp, Homo sapien
ctggggtggaagtatccccagtcct

SEQ ID NO: 462889 - DNA, 25 bp, Homo sapien
tcttgattgaataagccctccaggg

SEQ ID NO: 462890 - DNA, 25 bp, Homo sapien
caactgtgcctcaaaagtgaaatct

SEQ ID NO: 462891 - DNA, 25 bp, Homo sapien
aacagaagttctcgccgcagcatgt

SEQ ID NO: 462892 - DNA, 25 bp, Homo sapien
gcatgtgccttgatgaaaccctttt

SEQ ID NO: 462893 - DNA, 25 bp, Homo sapien
tgtcttggtattcaagggcttgcca

SEQ ID NO: 462894 - DNA, 25 bp, Homo sapien
ggcttgccagacaatcctctgtagg

SEQ ID NO: 462895 - DNA, 25 bp, Homo sapien
cagatagtgatgtacaggattacac

SEQ ID NO: 462896 - DNA, 25 bp, Homo sapien
tctactagttgcgagtgtgtcttgg

SEQ ID NO: 462897 - DNA, 25 bp, Homo sapien
catctttgatgtaatcttttattgc

SEQ ID NO: 462898 - DNA, 25 bp, Homo sapien
gtcatctttgatgtaatcttttatt

SEQ ID NO: 462899 - DNA, 25 bp, Homo sapien
tcatctttgatgtaatcttttattg

SEQ ID NO: 462900 - DNA, 25 bp, Homo sapien
atctttgatgtaatcttttattgca

SEQ ID NO: 462901 - DNA, 25 bp, Homo sapien
taacatgcctaaggctttgtgattc

SEQ ID NO: 462902 - DNA, 25 bp, Homo sapien
gctggttaacatgcctaaggctttg

SEQ ID NO: 462903 - DNA, 25 bp, Homo sapien
tggttaacatgcctaaggctttgtg

SEQ ID NO: 462904 - DNA, 25 bp, Homo sapien
gttaacatgcctaaggctttgtgat

SEQ ID NO: 462905 - DNA, 25 bp, Homo sapien
tatcctatcaccagtaatagggtcg

SEQ ID NO: 462906 - DNA, 25 bp, Homo sapien
agtgttccacttctactgcaatctg

SEQ ID NO: 462907 - DNA, 25 bp, Homo sapien
tcgaacgtatcaggtagcagtttcc

SEQ ID NO: 462908 - DNA, 25 bp, Homo sapien
aaagctatttcttctaaccagctca

SEQ ID NO: 462909 - DNA, 25 bp, Homo sapien
ttgactcagtagaatcaagaatatt

SEQ ID NO: 462910 - DNA, 25 bp, Homo sapien
tccaccaactgatccatagatcctg

SEQ ID NO: 462911 - DNA, 25 bp, Homo sapien
aggaagttttgactcagtagaatca

SEQ ID NO: 462912 - DNA, 25 bp, Homo sapien
gatcctgacttatgctggctcagaa

SEQ ID NO: 462913 - DNA, 25 bp, Homo sapien
tctatcggaaataatgacccataac

SEQ ID NO: 462914 - DNA, 25 bp, Homo sapien
ctgctaggtctcagcgctgggacga

SEQ ID NO: 462915 - DNA, 25 bp, Homo sapien
gctgggacgattacatctatcggaa

SEQ ID NO: 462916 - DNA, 25 bp, Homo sapien
tacccaggataatgcctttcaccat

SEQ ID NO: 462917 - DNA, 25 bp, Homo sapien
cttcaaaaaccataatacctacatt

SEQ ID NO: 462918 - DNA, 25 bp, Homo sapien
tgatggctggacaatcttcaaaaac

SEQ ID NO: 462919 - DNA, 25 bp, Homo sapien
caaaaaccataatacctacattcat

SEQ ID NO: 462920 - DNA, 25 bp, Homo sapien
ctttaaagatgtcgctgatggctgg

SEQ ID NO: 462921 - DNA, 25 bp, Homo sapien
caacatctccggttttcagtgttta

SEQ ID NO: 462922 - DNA, 25 bp, Homo sapien
tcaacatctccggttttcagtgttt

SEQ ID NO: 462923 - DNA, 25 bp, Homo sapien
tctccggttttcagtgtttaaagca

SEQ ID NO: 462924 - DNA, 25 bp, Homo sapien
catctccggttttcagtgtttaaag

SEQ ID NO: 462925 - DNA, 25 bp, Homo sapien
tcattagaaaacagtcgcagataca

SEQ ID NO: 462926 - DNA, 25 bp, Homo sapien
gcaacattctaattgcaggttgtga

SEQ ID NO: 462927 - DNA, 25 bp, Homo sapien
ggattcatcacagcagcaacattct

SEQ ID NO: 462928 - DNA, 25 bp, Homo sapien
tacatgtacagtatggattcatcac

SEQ ID NO: 462929 - DNA, 25 bp, Homo sapien
gatgagtgtaccctactggctcagc

SEQ ID NO: 462930 - DNA, 25 bp, Homo sapien
gccacatatgtaggcagagtagatg

SEQ ID NO: 462931 - DNA, 25 bp, Homo sapien
cttgaaggggagatgagtgtaccct

SEQ ID NO: 462932 - DNA, 25 bp, Homo sapien
tactggctcagccacatatgtaggc

SEQ ID NO: 462933 - DNA, 25 bp, Homo sapien
ttaattacaattcttcgggtatatc

SEQ ID NO: 462934 - DNA, 25 bp, Homo sapien
taattacaattcttcgggtatatct

SEQ ID NO: 462935 - DNA, 25 bp, Homo sapien
tacaattcttcgggtatatcttctt

SEQ ID NO: 462936 - DNA, 25 bp, Homo sapien
attacaattcttcgggtatatcttc

SEQ ID NO: 462937 - DNA, 25 bp, Homo sapien
tcaagccttaacagcttcaaggaaa

SEQ ID NO: 462938 - DNA, 25 bp, Homo sapien
cttcaaggaaaaaagcagacaattc

SEQ ID NO: 462939 - DNA, 25 bp, Homo sapien
cttaacagcttcaaggaaaaaagca

SEQ ID NO: 462940 - DNA, 25 bp, Homo sapien
tcaaggaaaaaagcagacaattcaa

SEQ ID NO: 462941 - DNA, 25 bp, Homo sapien
agatttacagctggtgtcagtagca

SEQ ID NO: 462942 - DNA, 25 bp, Homo sapien
actctggagtctacttctttcagac

SEQ ID NO: 462943 - DNA, 25 bp, Homo sapien
gcatattaatgcctccacagtccat

SEQ ID NO: 462944 - DNA, 25 bp, Homo sapien
ttaggttgatcgtaggacagctgtt

SEQ ID NO: 462945 - DNA, 25 bp, Homo sapien
taacataccactgtgtgttactgtg

SEQ ID NO: 462946 - DNA, 25 bp, Homo sapien
tgtgcaccactcctgatgcctagtt

SEQ ID NO: 462947 - DNA, 25 bp, Homo sapien
ctgtgtgttactgtgcaccactcct

SEQ ID NO: 462948 - DNA, 25 bp, Homo sapien
gcctagttccacactcaaattctag

SEQ ID NO: 462949 - DNA, 25 bp, Homo sapien
aaaatttgagtctgtgagatctgta

SEQ ID NO: 462950 - DNA, 25 bp, Homo sapien
gaatgctacaggaagggcacttgga

SEQ ID NO: 462951 - DNA, 25 bp, Homo sapien
aacatagaatgctacaggaagggca

SEQ ID NO: 462952 - DNA, 25 bp, Homo sapien
agaaaatttgagtctgtgagatctg

SEQ ID NO: 462953 - DNA, 25 bp, Homo sapien
gctgccacagagcactgagctctat

SEQ ID NO: 462954 - DNA, 25 bp, Homo sapien
gagcactgagctctatattgttctc

SEQ ID NO: 462955 - DNA, 25 bp, Homo sapien
gaaaaaatgctggttcaatcagtac

SEQ ID NO: 462956 - DNA, 25 bp, Homo sapien
ctgtgttactgcaggctttctggag

SEQ ID NO: 462957 - DNA, 25 bp, Homo sapien
ttccatgaataatgattggaaagaa

SEQ ID NO: 462958 - DNA, 25 bp, Homo sapien
tccatgaataatgattggaaagaag

SEQ ID NO: 462959 - DNA, 25 bp, Homo sapien
actaggactgtctttgggctcattt

SEQ ID NO: 462960 - DNA, 25 bp, Homo sapien
ggacatggacgctcaaatgacatca

SEQ ID NO: 462961 - DNA, 25 bp, Homo sapien
caaaaatgcacaatctgcccacggg

SEQ ID NO: 462962 - DNA, 25 bp, Homo sapien
ggcacttcttctcttacaactgaca

SEQ ID NO: 462963 - DNA, 25 bp, Homo sapien
caaggcttctaggtagggtcctaca

SEQ ID NO: 462964 - DNA, 25 bp, Homo sapien
tctctagaagtacatttcatcacac

SEQ ID NO: 462965 - DNA, 25 bp, Homo sapien
taagcacctggccatagctgagcag

SEQ ID NO: 462966 - DNA, 25 bp, Homo sapien
cagccttccagggatcttattaagc

SEQ ID NO: 462967 - DNA, 25 bp, Homo sapien
ctgtttccatttcacgtctgactgt

SEQ ID NO: 462968 - DNA, 25 bp, Homo sapien
aattcacagcgttactattctgctt

SEQ ID NO: 462969 - DNA, 25 bp, Homo sapien
cagcgttactattctgcttcagaag

SEQ ID NO: 462970 - DNA, 25 bp, Homo sapien
cacgtctgactgttgtgctttcctt

SEQ ID NO: 462971 - DNA, 25 bp, Homo sapien
tgtgtgttagcggagtactgaagga

SEQ ID NO: 462972 - DNA, 25 bp, Homo sapien
tgtgttagcggagtactgaaggatg

SEQ ID NO: 462973 - DNA, 25 bp, Homo sapien
aagtgtgtgttagcggagtactgaa

SEQ ID NO: 462974 - DNA, 25 bp, Homo sapien
aaagtgtgtgttagcggagtactga

SEQ ID NO: 462975 - DNA, 25 bp, Homo sapien
ttggacacgcaaggaactttaattg

SEQ ID NO: 462976 - DNA, 25 bp, Homo sapien
ctgataattggacacgcaaggaact

SEQ ID NO: 462977 - DNA, 25 bp, Homo sapien
gacacgcaaggaactttaattgtac

SEQ ID NO: 462978 - DNA, 25 bp, Homo sapien
taattggacacgcaaggaactttaa

SEQ ID NO: 462979 - DNA, 25 bp, Homo sapien
ctggagcaggaaaattgagatattt

SEQ ID NO: 462980 - DNA, 25 bp, Homo sapien
caggaaaattgagatattttaaaat

SEQ ID NO: 462981 - DNA, 25 bp, Homo sapien
taactttctttaacacacttatgaa

SEQ ID NO: 462982 - DNA, 25 bp, Homo sapien
gtaactttctttaacacacttatga

SEQ ID NO: 462983 - DNA, 25 bp, Homo sapien
taaagattcaccttatcttcatttc

SEQ ID NO: 462984 - DNA, 25 bp, Homo sapien
tctatctataacagccaaattccat

SEQ ID NO: 462985 - DNA, 25 bp, Homo sapien
caaagtaaagattcaccttatcttc

SEQ ID NO: 462986 - DNA, 25 bp, Homo sapien
tcttcatttctatctataacagcca

SEQ ID NO: 462987 - DNA, 25 bp, Homo sapien
caggaccactgtgcttgggttctgt

SEQ ID NO: 462988 - DNA, 25 bp, Homo sapien
ttctgtgtgcgggtagattcacata

SEQ ID NO: 462989 - DNA, 25 bp, Homo sapien
ttcgttatgcgctgacaggaccact

SEQ ID NO: 462990 - DNA, 25 bp, Homo sapien
tttccctcaggttcacgatcaagtc

SEQ ID NO: 462991 - DNA, 25 bp, Homo sapien
ttgtgtggagactcttttttccatc

SEQ ID NO: 462992 - DNA, 25 bp, Homo sapien
tttgtgtggagactcttttttccat

SEQ ID NO: 462993 - DNA, 25 bp, Homo sapien
aagaacccagaaactccttgctgga

SEQ ID NO: 462994 - DNA, 25 bp, Homo sapien
attcactctcctaaaacccagagca

SEQ ID NO: 462995 - DNA, 25 bp, Homo sapien
cttcagagtttacaaattagaactt

SEQ ID NO: 462996 - DNA, 25 bp, Homo sapien
gtctggctcacatctcgaattcact

SEQ ID NO: 462997 - DNA, 25 bp, Homo sapien
tcataggcgtttgctcctaaaatgt

SEQ ID NO: 462998 - DNA, 25 bp, Homo sapien
ataagccaagccctttttacgagct

SEQ ID NO: 462999 - DNA, 25 bp, Homo sapien
tgtggtttgtcccagggcatgtacc

SEQ ID NO: 463000 - DNA, 25 bp, Homo sapien
ggcatgtaccttatcagttgtggag

SEQ ID NO: 463001 - DNA, 25 bp, Homo sapien
agaagcgaaggtgttcagaggctat

SEQ ID NO: 463002 - DNA, 25 bp, Homo sapien
ttttgcttcccagggagagaagcga

SEQ ID NO: 463003 - DNA, 25 bp, Homo sapien
gaaggtgttcagaggctattaaacc

SEQ ID NO: 463004 - DNA, 25 bp, Homo sapien
gcgaaggtgttcagaggctattaaa

SEQ ID NO: 463005 - DNA, 25 bp, Homo sapien
ttttttccccagacgcttgcaaatg

SEQ ID NO: 463006 - DNA, 25 bp, Homo sapien
tgcaaatgatacttcttcagaattg

SEQ ID NO: 463007 - DNA, 25 bp, Homo sapien
tccccagacgcttgcaaatgatact

SEQ ID NO: 463008 - DNA, 25 bp, Homo sapien
cttcagaattgttaaactcacttcc

SEQ ID NO: 463009 - DNA, 25 bp, Homo sapien
caggtgatgcactaacattctgaaa

SEQ ID NO: 463010 - DNA, 25 bp, Homo sapien
ctcaggtgatgcactaacattctga

SEQ ID NO: 463011 - DNA, 25 bp, Homo sapien
ttccctgattagctacaagccctgt

SEQ ID NO: 463012 - DNA, 25 bp, Homo sapien
taaaccaataagtgaaattccctga

SEQ ID NO: 463013 - DNA, 25 bp, Homo sapien
tcagcctctgattgactgcgggcgg

SEQ ID NO: 463014 - DNA, 25 bp, Homo sapien
tgtcgccgggttctttacagcttaa

SEQ ID NO: 463015 - DNA, 25 bp, Homo sapien
tgaaagacagcccttagaccaaagt

SEQ ID NO: 463016 - DNA, 25 bp, Homo sapien
taagtactgttggagtcacacacca

SEQ ID NO: 463017 - DNA, 25 bp, Homo sapien
cccaacacggacttaatgtattgat

SEQ ID NO: 463018 - DNA, 25 bp, Homo sapien
aacccaacacggacttaatgtattg

SEQ ID NO: 463019 - DNA, 25 bp, Homo sapien
cacggacttaatgtattgattcttt

SEQ ID NO: 463020 - DNA, 25 bp, Homo sapien
caacacggacttaatgtattgattc

SEQ ID NO: 463021 - DNA, 25 bp, Homo sapien
tataagaatccttcgactttggcac

SEQ ID NO: 463022 - DNA, 25 bp, Homo sapien
ttgtggttttcacctaatggcttgt

SEQ ID NO: 463023 - DNA, 25 bp, Homo sapien
gccattatgcccagtataagaatcc

SEQ ID NO: 463024 - DNA, 25 bp, Homo sapien
ttcacctaatggcttgttgaagcca

SEQ ID NO: 463025 - DNA, 25 bp, Homo sapien
gaaagaattcttgtccatatgagag

SEQ ID NO: 463026 - DNA, 25 bp, Homo sapien
tttctaaggatgacagctagcctct

SEQ ID NO: 463027 - DNA, 25 bp, Homo sapien
taaggatgacagctagcctctgatc

SEQ ID NO: 463028 - DNA, 25 bp, Homo sapien
tcttgtccatatgagagcagccagc

SEQ ID NO: 463029 - DNA, 25 bp, Homo sapien
gcagaaagtaaatgattgacactct

SEQ ID NO: 463030 - DNA, 25 bp, Homo sapien
gaaagtaaatgattgacactctgca

SEQ ID NO: 463031 - DNA, 25 bp, Homo sapien
tgctcttggaagaaggctcatttga

SEQ ID NO: 463032 - DNA, 25 bp, Homo sapien
ggaagaaggctcatttgaaaaggca

SEQ ID NO: 463033 - DNA, 25 bp, Homo sapien
gagtgcccaactgagcgtataaggc

SEQ ID NO: 463034 - DNA, 25 bp, Homo sapien
tgtaagttaacccacagcagagtgc

SEQ ID NO: 463035 - DNA, 25 bp, Homo sapien
caactgagcgtataaggcaaagcca

SEQ ID NO: 463036 - DNA, 25 bp, Homo sapien
agcagagtgcccaactgagcgtata

SEQ ID NO: 463037 - DNA, 25 bp, Homo sapien
tggtcattagttttcccagtcagga

SEQ ID NO: 463038 - DNA, 25 bp, Homo sapien
gatgactgagtccagtctgaaggcc

SEQ ID NO: 463039 - DNA, 25 bp, Homo sapien
ggccaggtcacagtcaggtctaaat

SEQ ID NO: 463040 - DNA, 25 bp, Homo sapien
ccatggctttcctattaacctcaga

SEQ ID NO: 463041 - DNA, 25 bp, Homo sapien
ctgacaatatgggcaagcagacaga

SEQ ID NO: 463042 - DNA, 25 bp, Homo sapien
tgacaatatgggcaagcagacagac

SEQ ID NO: 463043 - DNA, 25 bp, Homo sapien
ctctgacaatatgggcaagcagaca

SEQ ID NO: 463044 - DNA, 25 bp, Homo sapien
gacaatatgggcaagcagacagaca

SEQ ID NO: 463045 - DNA, 25 bp, Homo sapien
taaaatggaccacaaggtcttttca

SEQ ID NO: 463046 - DNA, 25 bp, Homo sapien
gatcagctaatacttgttccaactt

SEQ ID NO: 463047 - DNA, 25 bp, Homo sapien
aaagtactacatgatcagctaatac

SEQ ID NO: 463048 - DNA, 25 bp, Homo sapien
caaaaatgtcaaccttcatcaagac

SEQ ID NO: 463049 - DNA, 25 bp, Homo sapien
gtcaaaaatgtcaaccttcatcaag

SEQ ID NO: 463050 - DNA, 25 bp, Homo sapien
cctagttgagcagtcagagcacctg

SEQ ID NO: 463051 - DNA, 25 bp, Homo sapien
tggaaagcaaaggtatccctagttg

SEQ ID NO: 463052 - DNA, 25 bp, Homo sapien
tcaggtcaaattgcaagtgaattca

SEQ ID NO: 463053 - DNA, 25 bp, Homo sapien
gtgaattcagctcctgtgtaaaact

SEQ ID NO: 463054 - DNA, 25 bp, Homo sapien
gaattgtgagatattcatgcaccca

SEQ ID NO: 463055 - DNA, 25 bp, Homo sapien
tacctcactccatatgtctttgcat

SEQ ID NO: 463056 - DNA, 25 bp, Homo sapien
gtatagtattttatccttcatcccc

SEQ ID NO: 463057 - DNA, 25 bp, Homo sapien
tattcactcttcagtcagtgggcac

SEQ ID NO: 463058 - DNA, 25 bp, Homo sapien
gttacatgccttcgtccactgacag

SEQ ID NO: 463059 - DNA, 25 bp, Homo sapien
taaggctttgctataacaggtccag

SEQ ID NO: 463060 - DNA, 25 bp, Homo sapien
cctggagcccagcatgaaaaatagc

SEQ ID NO: 463061 - DNA, 25 bp, Homo sapien
gagatttcctcaccgtcttcagagc

SEQ ID NO: 463062 - DNA, 25 bp, Homo sapien
tcagaataactgaacttcctggacc

SEQ ID NO: 463063 - DNA, 25 bp, Homo sapien
cagaataactgaacttcctggaccc

SEQ ID NO: 463064 - DNA, 25 bp, Homo sapien
cccattataggacatagcgggataa

SEQ ID NO: 463065 - DNA, 25 bp, Homo sapien
cataaatttatggttccagatgcct

SEQ ID NO: 463066 - DNA, 25 bp, Homo sapien
taataaactaagctcagaagccatc

SEQ ID NO: 463067 - DNA, 25 bp, Homo sapien
tgcctgaagggagtccccattatag

SEQ ID NO: 463068 - DNA, 25 bp, Homo sapien
ctttgccctctggcatcacgtgcat

SEQ ID NO: 463069 - DNA, 25 bp, Homo sapien
tccttgagagaatttcctttgccct

SEQ ID NO: 463070 - DNA, 25 bp, Homo sapien
ccttgagagaatttcctttgccctc

SEQ ID NO: 463071 - DNA, 25 bp, Homo sapien
tttcctttgccctctggcatcacgt

SEQ ID NO: 463072 - DNA, 25 bp, Homo sapien
gttcctctttgataataccataccc

SEQ ID NO: 463073 - DNA, 25 bp, Homo sapien
tactcattctctcttgtaggcttaa

SEQ ID NO: 463074 - DNA, 25 bp, Homo sapien
tctttgataataccatacccaaagt

SEQ ID NO: 463075 - DNA, 25 bp, Homo sapien
ttctctcttgtaggcttaatgggaa

SEQ ID NO: 463076 - DNA, 25 bp, Homo sapien
gagtccaggtaactaagtgcttgca

SEQ ID NO: 463077 - DNA, 25 bp, Homo sapien
cctcctgggttctaataatgctgat

SEQ ID NO: 463078 - DNA, 25 bp, Homo sapien
caactaatgcctttcagaatgtctg

SEQ ID NO: 463079 - DNA, 25 bp, Homo sapien
gatgcaggctttgtatgaacagatg

SEQ ID NO: 463080 - DNA, 25 bp, Homo sapien
tgttagtagcgaatgtctccttggc

SEQ ID NO: 463081 - DNA, 25 bp, Homo sapien
catgcaaacaatatgtcaatgtggc

SEQ ID NO: 463082 - DNA, 25 bp, Homo sapien
aaatgggtgatgaaggtgcccacaa

SEQ ID NO: 463083 - DNA, 25 bp, Homo sapien
gagcgaaatacaggaataactagaa

SEQ ID NO: 463084 - DNA, 25 bp, Homo sapien
actttcatgcttaaatggtcgtcca

SEQ ID NO: 463085 - DNA, 25 bp, Homo sapien
aaaaagcctttgcacttaaacagtg

SEQ ID NO: 463086 - DNA, 25 bp, Homo sapien
gacattaactttatcgagaataata

SEQ ID NO: 463087 - DNA, 25 bp, Homo sapien
gaataataagtctcaatagagcttc

SEQ ID NO: 463088 - DNA, 25 bp, Homo sapien
caagacctgcattaggagcatgtgc

SEQ ID NO: 463089 - DNA, 25 bp, Homo sapien
ggaggaggcaatgcaagcaccttat

SEQ ID NO: 463090 - DNA, 25 bp, Homo sapien
gcaccttatgttgcatctgggcacc

SEQ ID NO: 463091 - DNA, 25 bp, Homo sapien
tgcaaaaggctaacagagactaact

SEQ ID NO: 463092 - DNA, 25 bp, Homo sapien
tagtgtctacctcatgtgcaaatcc

SEQ ID NO: 463093 - DNA, 25 bp, Homo sapien
gccaggaaattgatgagctagcttc

SEQ ID NO: 463094 - DNA, 25 bp, Homo sapien
ggctttattgcacatcttccagcag

SEQ ID NO: 463095 - DNA, 25 bp, Homo sapien
tatagaaccctaatgaaactgctgt

SEQ ID NO: 463096 - DNA, 25 bp, Homo sapien
ggtgtcatgtcacaattgtctcttt

SEQ ID NO: 463097 - DNA, 25 bp, Homo sapien
ttctcctaaacaccttgaaactctg

SEQ ID NO: 463098 - DNA, 25 bp, Homo sapien
tttaataagtgtgatgcgaggccca

SEQ ID NO: 463099 - DNA, 25 bp, Homo sapien
ccaggaattgtgttgtgcatactac

SEQ ID NO: 463100 - DNA, 25 bp, Homo sapien
tggaacatacccttcataccaggaa

SEQ ID NO: 463101 - DNA, 25 bp, Homo sapien
tcaatgggaaacctatggaagcaga

SEQ ID NO: 463102 - DNA, 25 bp, Homo sapien
gacagtaaaatcagctccaatagtg

SEQ ID NO: 463103 - DNA, 25 bp, Homo sapien
cccacatggagtctggaatactgaa

SEQ ID NO: 463104 - DNA, 25 bp, Homo sapien
cattggtcccacatgacacgtgtcc

SEQ ID NO: 463105 - DNA, 25 bp, Homo sapien
ccatgacagctgatgcagagcaatt

SEQ ID NO: 463106 - DNA, 25 bp, Homo sapien
gtacagtggcatcctaggccttcac

SEQ ID NO: 463107 - DNA, 25 bp, Homo sapien
tcaggcaggttcctcaacagatatc

SEQ ID NO: 463108 - DNA, 25 bp, Homo sapien
catacagcctatgtgtgcagtaagc

SEQ ID NO: 463109 - DNA, 25 bp, Homo sapien
acttatggttagtgccctatgcagg

SEQ ID NO: 463110 - DNA, 25 bp, Homo sapien
tggtgcggcagttatacatccaaac

SEQ ID NO: 463111 - DNA, 25 bp, Homo sapien
gcttgactttcatccgttgctttaa

SEQ ID NO: 463112 - DNA, 25 bp, Homo sapien
gcttcaatcctagctgtgacactag

SEQ ID NO: 463113 - DNA, 25 bp, Homo sapien
catccaaacactagaagcttcaatc

SEQ ID NO: 463114 - DNA, 25 bp, Homo sapien
tttcatcagtctgggagcaaatttt

SEQ ID NO: 463115 - DNA, 25 bp, Homo sapien
tttttcatcagtctgggagcaaatt

SEQ ID NO: 463116 - DNA, 25 bp, Homo sapien
catcagtctgggagcaaatttttcc

SEQ ID NO: 463117 - DNA, 25 bp, Homo sapien
tcatcagtctgggagcaaatttttc

SEQ ID NO: 463118 - DNA, 25 bp, Homo sapien
tggaccgtgtgaatttccttaggga

SEQ ID NO: 463119 - DNA, 25 bp, Homo sapien
agtgtgtggaccgtgtgaatttcct

SEQ ID NO: 463120 - DNA, 25 bp, Homo sapien
agccaggccatcaaggttgagtgtg

SEQ ID NO: 463121 - DNA, 25 bp, Homo sapien
tgtgtggaccgtgtgaatttcctta

SEQ ID NO: 463122 - DNA, 25 bp, Homo sapien
aaacttctggacacatacaacttac

SEQ ID NO: 463123 - DNA, 25 bp, Homo sapien
gagctaatatcaattctaccgaaac

SEQ ID NO: 463124 - DNA, 25 bp, Homo sapien
agtaaaacactgcacttgatgtctt

SEQ ID NO: 463125 - DNA, 25 bp, Homo sapien
aactttaatagaccaccaacaggca

SEQ ID NO: 463126 - DNA, 25 bp, Homo sapien
tcaaatattagacagtggacctccg

SEQ ID NO: 463127 - DNA, 25 bp, Homo sapien
tgattttgcttcagtgaatgggcct

SEQ ID NO: 463128 - DNA, 25 bp, Homo sapien
taatggtccaccataaaggaagagc

SEQ ID NO: 463129 - DNA, 25 bp, Homo sapien
ccgtgtgtccatgaactgttttata

SEQ ID NO: 463130 - DNA, 25 bp, Homo sapien
catcttcaattcttgagggatatcc

SEQ ID NO: 463131 - DNA, 25 bp, Homo sapien
atcttcaattcttgagggatatcca

SEQ ID NO: 463132 - DNA, 25 bp, Homo sapien
ccatcttcaattcttgagggatatc

SEQ ID NO: 463133 - DNA, 25 bp, Homo sapien
ggtattgcttctgaataaacagctc

SEQ ID NO: 463134 - DNA, 25 bp, Homo sapien
tctcactgtaactctgccctttagg

SEQ ID NO: 463135 - DNA, 25 bp, Homo sapien
gcaggcaggtattgcttctgaataa

SEQ ID NO: 463136 - DNA, 25 bp, Homo sapien
acagaggaatctttgtcaatctcac

SEQ ID NO: 463137 - DNA, 25 bp, Homo sapien
ggagagcacagagaatcccatttcc

SEQ ID NO: 463138 - DNA, 25 bp, Homo sapien
tggagagcacagagaatcccatttc

SEQ ID NO: 463139 - DNA, 25 bp, Homo sapien
ttggagagcacagagaatcccattt

SEQ ID NO: 463140 - DNA, 25 bp, Homo sapien
gccagttctgccatatagaccttga

SEQ ID NO: 463141 - DNA, 25 bp, Homo sapien
tccagtatacaacctagcaaatcag

SEQ ID NO: 463142 - DNA, 25 bp, Homo sapien
tagaccttgatactaggaagtcagc

SEQ ID NO: 463143 - DNA, 25 bp, Homo sapien
ccattaaggtcggtatccagtatac

SEQ ID NO: 463144 - DNA, 25 bp, Homo sapien
tattgtgcacgcagctttcaccagg

SEQ ID NO: 463145 - DNA, 25 bp, Homo sapien
gacgcatctcccctccatatgtgga

SEQ ID NO: 463146 - DNA, 25 bp, Homo sapien
ggatccactgatgaaagctgactac

SEQ ID NO: 463147 - DNA, 25 bp, Homo sapien
tagcctgtgacaagtgacgcatctc

SEQ ID NO: 463148 - DNA, 25 bp, Homo sapien
cttgacacatcaatgacaaggcata

SEQ ID NO: 463149 - DNA, 25 bp, Homo sapien
gcagtcaaaagtttacaacatgtaa

SEQ ID NO: 463150 - DNA, 25 bp, Homo sapien
gacacatcaatgacaaggcatatca

SEQ ID NO: 463151 - DNA, 25 bp, Homo sapien
caaggcatatcagagcagtcaaaag

SEQ ID NO: 463152 - DNA, 25 bp, Homo sapien
ttatgaaacgtattccattgcccaa

SEQ ID NO: 463153 - DNA, 25 bp, Homo sapien
gagcattcttgatttcaatcaggtc

SEQ ID NO: 463154 - DNA, 25 bp, Homo sapien
tcaggtcagacaccctgtcagagtc

SEQ ID NO: 463155 - DNA, 25 bp, Homo sapien
ggtcctacaacagacaatttcccat

SEQ ID NO: 463156 - DNA, 25 bp, Homo sapien
atcagatccttttcatccagtgagg

SEQ ID NO: 463157 - DNA, 25 bp, Homo sapien
ggattggtgtcatatctccctgcat

SEQ ID NO: 463158 - DNA, 25 bp, Homo sapien
cccttgtgggcatctgaagagtgct

SEQ ID NO: 463159 - DNA, 25 bp, Homo sapien
tacatttgaataccactcagtacag

SEQ ID NO: 463160 - DNA, 25 bp, Homo sapien
ggtgccattgtagctgttagtacca

SEQ ID NO: 463161 - DNA, 25 bp, Homo sapien
gaggagcttatttctctcaagggtg

SEQ ID NO: 463162 - DNA, 25 bp, Homo sapien
gaattgcggtagcatttgaggagct

SEQ ID NO: 463163 - DNA, 25 bp, Homo sapien
aaactgcaagggaattgcggtagca

SEQ ID NO: 463164 - DNA, 25 bp, Homo sapien
tgttcccatcggtttatagtaactg

SEQ ID NO: 463165 - DNA, 25 bp, Homo sapien
ttattcatctactagaatttctggt

SEQ ID NO: 463166 - DNA, 25 bp, Homo sapien
tattcatctactagaatttctggta

SEQ ID NO: 463167 - DNA, 25 bp, Homo sapien
ggactcctggtctgagcccaataaa

SEQ ID NO: 463168 - DNA, 25 bp, Homo sapien
gacaaatacacagaggtcctcaaga

SEQ ID NO: 463169 - DNA, 25 bp, Homo sapien
aggctacggaaacaggccgagaaga

SEQ ID NO: 463170 - DNA, 25 bp, Homo sapien
aaacaggccgagaagaacgtggaga

SEQ ID NO: 463171 - DNA, 25 bp, Homo sapien
gaactacctggctttcctccgcaag

SEQ ID NO: 463172 - DNA, 25 bp, Homo sapien
agcggatgaacaccagcccttccag

SEQ ID NO: 463173 - DNA, 25 bp, Homo sapien
tggtcgtatgctgcgaaggcatcaa

SEQ ID NO: 463174 - DNA, 25 bp, Homo sapien
cagaaacaagttgaactacctggct

SEQ ID NO: 463175 - DNA, 25 bp, Homo sapien
ttatgctaagcgaagaatgccaggc

SEQ ID NO: 463176 - DNA, 25 bp, Homo sapien
caatagccgcaaaatataaatggta

SEQ ID NO: 463177 - DNA, 25 bp, Homo sapien
gcataagctggttgtgtacattaaa

SEQ ID NO: 463178 - DNA, 25 bp, Homo sapien
cctagaacctggtaagtgtgctaca

SEQ ID NO: 463179 - DNA, 25 bp, Homo sapien
gtggcccctcatgtcccgctctcat

SEQ ID NO: 463180 - DNA, 25 bp, Homo sapien
ggcccctcatgtcccgctctcatgc

SEQ ID NO: 463181 - DNA, 25 bp, Homo sapien
aggtggcccctcatgtcccgctctc

SEQ ID NO: 463182 - DNA, 25 bp, Homo sapien
caggtggcccctcatgtcccgctct

SEQ ID NO: 463183 - DNA, 25 bp, Homo sapien
tctgttccaggtcttacaaggttaa

SEQ ID NO: 463184 - DNA, 25 bp, Homo sapien
ccttgtagttgtaggactgtttcct

SEQ ID NO: 463185 - DNA, 25 bp, Homo sapien
gtgttgactgggaaagactcttatc

SEQ ID NO: 463186 - DNA, 25 bp, Homo sapien
gtgtaacctattccacagatttggc

SEQ ID NO: 463187 - DNA, 25 bp, Homo sapien
gttgtgtttgattatatcctctccc

SEQ ID NO: 463188 - DNA, 25 bp, Homo sapien
tgctgttgtgtttgattatatcctc

SEQ ID NO: 463189 - DNA, 25 bp, Homo sapien
ctgaagtaagtctcttgctgttgtg

SEQ ID NO: 463190 - DNA, 25 bp, Homo sapien
gtgtttgattatatcctctcccctc

SEQ ID NO: 463191 - DNA, 25 bp, Homo sapien
tgaggtgacaagcaacgttcactat

SEQ ID NO: 463192 - DNA, 25 bp, Homo sapien
gacaagcaacgttcactatagggtt

SEQ ID NO: 463193 - DNA, 25 bp, Homo sapien
aagcaacgttcactatagggttttg

SEQ ID NO: 463194 - DNA, 25 bp, Homo sapien
gaaacagtgaggtgacaagcaacgt

SEQ ID NO: 463195 - DNA, 25 bp, Homo sapien
cgatcacggttgcaggactcatcaa

SEQ ID NO: 463196 - DNA, 25 bp, Homo sapien
catcaaccaccttagtgaatccagg

SEQ ID NO: 463197 - DNA, 25 bp, Homo sapien
ggtgacactgtgtggctgaacagca

SEQ ID NO: 463198 - DNA, 25 bp, Homo sapien
gacacatccgcatccgatcacggtt

SEQ ID NO: 463199 - DNA, 25 bp, Homo sapien
aggtgagaggtgacgcagctgacta

SEQ ID NO: 463200 - DNA, 25 bp, Homo sapien
ttatctgtaactgctgtattgcctc

SEQ ID NO: 463201 - DNA, 25 bp, Homo sapien
agaggtgacgcagctgactattcat

SEQ ID NO: 463202 - DNA, 25 bp, Homo sapien
gtaactgctgtattgcctcagtatg

SEQ ID NO: 463203 - DNA, 25 bp, Homo sapien
tttggagtggaagtacattttcctc

SEQ ID NO: 463204 - DNA, 25 bp, Homo sapien
ggagtggaagtacattttcctccat

SEQ ID NO: 463205 - DNA, 25 bp, Homo sapien
caatgtatgattttggagtggaagt

SEQ ID NO: 463206 - DNA, 25 bp, Homo sapien
tcaatgtatgattttggagtggaag

SEQ ID NO: 463207 - DNA, 25 bp, Homo sapien
tggtgctttctatcaggctcccagt

SEQ ID NO: 463208 - DNA, 25 bp, Homo sapien
caaaatgtatctagaatccaccctt

SEQ ID NO: 463209 - DNA, 25 bp, Homo sapien
tgtgcatgtgcctagccttgtgttt

SEQ ID NO: 463210 - DNA, 25 bp, Homo sapien
gttgttccttgcactagttctccag

SEQ ID NO: 463211 - DNA, 25 bp, Homo sapien
cactcagtggattgttagaaatctc

SEQ ID NO: 463212 - DNA, 25 bp, Homo sapien
caatgtttttctcaaggactcggga

SEQ ID NO: 463213 - DNA, 25 bp, Homo sapien
gattatgtcacaaaagccaatactg

SEQ ID NO: 463214 - DNA, 25 bp, Homo sapien
tacaattggcaagtacagatttcct

SEQ ID NO: 463215 - DNA, 25 bp, Homo sapien
catctatgatgtgtattgggaaagg

SEQ ID NO: 463216 - DNA, 25 bp, Homo sapien
tcactgcaggaaatggtaaaatatt

SEQ ID NO: 463217 - DNA, 25 bp, Homo sapien
cataggccccaattttctcacaaga

SEQ ID NO: 463218 - DNA, 25 bp, Homo sapien
aaaaacataggtggcatttggacct

SEQ ID NO: 463219 - DNA, 25 bp, Homo sapien
tacaagcctttaggtacataggaag

SEQ ID NO: 463220 - DNA, 25 bp, Homo sapien
gaattggtgtgcgaaaatgccctcc

SEQ ID NO: 463221 - DNA, 25 bp, Homo sapien
taatcagtcttgctaaggtggaaaa

SEQ ID NO: 463222 - DNA, 25 bp, Homo sapien
gagtagggccagacaaatgcatttt

SEQ ID NO: 463223 - DNA, 25 bp, Homo sapien
ctttcatagatgatttgccctactg

SEQ ID NO: 463224 - DNA, 25 bp, Homo sapien
ttgctttcatagatgatttgcccta

SEQ ID NO: 463225 - DNA, 25 bp, Homo sapien
catagatgatttgccctactgtaaa

SEQ ID NO: 463226 - DNA, 25 bp, Homo sapien
tgatttgccctactgtaaaatcatt

SEQ ID NO: 463227 - DNA, 25 bp, Homo sapien
cattgagtggcagatcataccattc

SEQ ID NO: 463228 - DNA, 25 bp, Homo sapien
ttgagtggcagatcataccattctt

SEQ ID NO: 463229 - DNA, 25 bp, Homo sapien
gagtggcagatcataccattctttt

SEQ ID NO: 463230 - DNA, 25 bp, Homo sapien
tcattgagtggcagatcataccatt

SEQ ID NO: 463231 - DNA, 25 bp, Homo sapien
tcttcctgattttgtactgttgttg

SEQ ID NO: 463232 - DNA, 25 bp, Homo sapien
gctcctagagaattttgacatagtg

SEQ ID NO: 463233 - DNA, 25 bp, Homo sapien
tgacatagtgagtattgttgcttac

SEQ ID NO: 463234 - DNA, 25 bp, Homo sapien
tgtactgttgttgctcctagagaat

SEQ ID NO: 463235 - DNA, 25 bp, Homo sapien
tgctgttttctgtcaactgtgtttt

SEQ ID NO: 463236 - DNA, 25 bp, Homo sapien
ctgttttctgtcaactgtgttttgc

SEQ ID NO: 463237 - DNA, 25 bp, Homo sapien
ttgctgttttctgtcaactgtgttt

SEQ ID NO: 463238 - DNA, 25 bp, Homo sapien
gctgttttctgtcaactgtgttttg

SEQ ID NO: 463239 - DNA, 25 bp, Homo sapien
ttataggatctctggtccaatgtat

SEQ ID NO: 463240 - DNA, 25 bp, Homo sapien
ctcatagatgagaatatgtggcatt

SEQ ID NO: 463241 - DNA, 25 bp, Homo sapien
agtttgatggcctccatccatgttc

SEQ ID NO: 463242 - DNA, 25 bp, Homo sapien
gtgctaatcccagtacccagtaatt

SEQ ID NO: 463243 - DNA, 25 bp, Homo sapien
tccctctttgtgtccgtgacttcat

SEQ ID NO: 463244 - DNA, 25 bp, Homo sapien
gaaaattgtgaccaccagaaagtgt

SEQ ID NO: 463245 - DNA, 25 bp, Homo sapien
tcacctagaaacacgctaagaaaat

SEQ ID NO: 463246 - DNA, 25 bp, Homo sapien
cgctaagaaaattgtgaccaccaga

SEQ ID NO: 463247 - DNA, 25 bp, Homo sapien
gaaacacgctaagaaaattgtgacc

SEQ ID NO: 463248 - DNA, 25 bp, Homo sapien
tagaggcagaacaacatctgctcca

SEQ ID NO: 463249 - DNA, 25 bp, Homo sapien
atgtagaggcagaacaacatctgct

SEQ ID NO: 463250 - DNA, 25 bp, Homo sapien
tgtagaggcagaacaacatctgctc

SEQ ID NO: 463251 - DNA, 25 bp, Homo sapien
gctccaatagtctgcactggtccat

SEQ ID NO: 463252 - DNA, 25 bp, Homo sapien
caggaacggactcttggtatcagag

SEQ ID NO: 463253 - DNA, 25 bp, Homo sapien
aaacactacatgattaatcactggt

SEQ ID NO: 463254 - DNA, 25 bp, Homo sapien
tcagttccaggaacggactcttggt

SEQ ID NO: 463255 - DNA, 25 bp, Homo sapien
tgattaatcactggttggaccaagg

SEQ ID NO: 463256 - DNA, 25 bp, Homo sapien
tacatgcgcctcatttgaaaagcct

SEQ ID NO: 463257 - DNA, 25 bp, Homo sapien
aataaagtcgctttgtgctggaaac

SEQ ID NO: 463258 - DNA, 25 bp, Homo sapien
tagcaaaggtcacaagcctccggtt

SEQ ID NO: 463259 - DNA, 25 bp, Homo sapien
ttttggatttcagggtacatgcgcc

SEQ ID NO: 463260 - DNA, 25 bp, Homo sapien
gctgcttttaagaacggtaacactc

SEQ ID NO: 463261 - DNA, 25 bp, Homo sapien
tgtttactctcagaaatacacagac

SEQ ID NO: 463262 - DNA, 25 bp, Homo sapien
gaatgacttaggactgtgagctctc

SEQ ID NO: 463263 - DNA, 25 bp, Homo sapien
tatagtctcgagtttactggtccca

SEQ ID NO: 463264 - DNA, 25 bp, Homo sapien
atgagcccttcagctcgaggctgca

SEQ ID NO: 463265 - DNA, 25 bp, Homo sapien
gatgagcccttcagctcgaggctgc

SEQ ID NO: 463266 - DNA, 25 bp, Homo sapien
ccactagctcttcagccttcttagt

SEQ ID NO: 463267 - DNA, 25 bp, Homo sapien
cccactagctcttcagccttcttag

SEQ ID NO: 463268 - DNA, 25 bp, Homo sapien
gggtttcactgagctatgaccgagg

SEQ ID NO: 463269 - DNA, 25 bp, Homo sapien
tctgcaacttctagagggtgcccac

SEQ ID NO: 463270 - DNA, 25 bp, Homo sapien
tctggtggtccgaatttcaaaatgg

SEQ ID NO: 463271 - DNA, 25 bp, Homo sapien
ggcaggattgtacactttctgaaca

SEQ ID NO: 463272 - DNA, 25 bp, Homo sapien
attcagcatactattttattgtagg

SEQ ID NO: 463273 - DNA, 25 bp, Homo sapien
tttattgtaggcctccttcatgtct

SEQ ID NO: 463274 - DNA, 25 bp, Homo sapien
tccttcatgtctaaatgacacttgg

SEQ ID NO: 463275 - DNA, 25 bp, Homo sapien
cttcatgtctaaatgacacttggga

SEQ ID NO: 463276 - DNA, 25 bp, Homo sapien
tgagcttgaaaacaccggattaaaa

SEQ ID NO: 463277 - DNA, 25 bp, Homo sapien
ccttggttatatgagcttgaaaaca

SEQ ID NO: 463278 - DNA, 25 bp, Homo sapien
tggttatatgagcttgaaaacaccg

SEQ ID NO: 463279 - DNA, 25 bp, Homo sapien
tatatgagcttgaaaacaccggatt

SEQ ID NO: 463280 - DNA, 25 bp, Homo sapien
gcttctttgtcaaaaactctatgaa

SEQ ID NO: 463281 - DNA, 25 bp, Homo sapien
tgccttcaggtgaatgattcttcta

SEQ ID NO: 463282 - DNA, 25 bp, Homo sapien
tattatatggattgattctgagagc

SEQ ID NO: 463283 - DNA, 25 bp, Homo sapien
cattgttgtcattaacttagtggct

SEQ ID NO: 463284 - DNA, 25 bp, Homo sapien
gtttgagtcattaagtctttcctca

SEQ ID NO: 463285 - DNA, 25 bp, Homo sapien
taaaagaagaatattgtcgctcaga

SEQ ID NO: 463286 - DNA, 25 bp, Homo sapien
ttttgtaaagcgttctgatcatctt

SEQ ID NO: 463287 - DNA, 25 bp, Homo sapien
ctcactcattttgtaaagcgttctg

SEQ ID NO: 463288 - DNA, 25 bp, Homo sapien
agaatattgtcgctcagatgatggg

SEQ ID NO: 463289 - DNA, 25 bp, Homo sapien
gcatataactttccctggccgtcta

SEQ ID NO: 463290 - DNA, 25 bp, Homo sapien
ccctggccgtctacattggcattgg

SEQ ID NO: 463291 - DNA, 25 bp, Homo sapien
ttctctctcaataggctagcatata

SEQ ID NO: 463292 - DNA, 25 bp, Homo sapien
ggtaagctgagtcaatttaaggtcc

SEQ ID NO: 463293 - DNA, 25 bp, Homo sapien
aaaaagcgttcgtcaatatcctggg

SEQ ID NO: 463294 - DNA, 25 bp, Homo sapien
taaaggtagcccgattctcagggca

SEQ ID NO: 463295 - DNA, 25 bp, Homo sapien
tgagctaatgaaaccctgaagtacc

SEQ ID NO: 463296 - DNA, 25 bp, Homo sapien
tatgaactacctgtcgacttgcacc

SEQ ID NO: 463297 - DNA, 25 bp, Homo sapien
tcaaacactgcagataaggcaactg

SEQ ID NO: 463298 - DNA, 25 bp, Homo sapien
gaccagtttattgggtgctagggcc

SEQ ID NO: 463299 - DNA, 25 bp, Homo sapien
ttacagcatggaaatcagcagactc

SEQ ID NO: 463300 - DNA, 25 bp, Homo sapien
catctagaggtcaagggtattaacg

SEQ ID NO: 463301 - DNA, 25 bp, Homo sapien
tcagaaattaacatccagagatcct

SEQ ID NO: 463302 - DNA, 25 bp, Homo sapien
taacatccagagatcctaggtccca

SEQ ID NO: 463303 - DNA, 25 bp, Homo sapien
cagagatcctaggtcccaagtttca

SEQ ID NO: 463304 - DNA, 25 bp, Homo sapien
gatcctaggtcccaagtttcagcaa

SEQ ID NO: 463305 - DNA, 25 bp, Homo sapien
ttccttacaccaggatttgtgcatg

SEQ ID NO: 463306 - DNA, 25 bp, Homo sapien
tattccttacaccaggatttgtgca

SEQ ID NO: 463307 - DNA, 25 bp, Homo sapien
tgatattgaagatatatgcttaaaa

SEQ ID NO: 463308 - DNA, 25 bp, Homo sapien
aaaatattccttacaccaggatttg

SEQ ID NO: 463309 - DNA, 25 bp, Homo sapien
tgtcttcacattgagtaggcagagg

SEQ ID NO: 463310 - DNA, 25 bp, Homo sapien
cattgtcttcacattgagtaggcag

SEQ ID NO: 463311 - DNA, 25 bp, Homo sapien
ggtgttcatcctcattgtcttcaca

SEQ ID NO: 463312 - DNA, 25 bp, Homo sapien
cagaggaggaggaagagtgttggtc

SEQ ID NO: 463313 - DNA, 25 bp, Homo sapien
tctctggtggaaagatatatgtctc

SEQ ID NO: 463314 - DNA, 25 bp, Homo sapien
tgttctcaagaggaaacaattctga

SEQ ID NO: 463315 - DNA, 25 bp, Homo sapien
taaaggcaagcaaagtctctggtgg

SEQ ID NO: 463316 - DNA, 25 bp, Homo sapien
tctgagatgcccctctgatctgtct

SEQ ID NO: 463317 - DNA, 25 bp, Homo sapien
ctttgactttggagagtaccaggga

SEQ ID NO: 463318 - DNA, 25 bp, Homo sapien
tagtttctgagatgactgacagtgc

SEQ ID NO: 463319 - DNA, 25 bp, Homo sapien
gaagagttatctagaaccgctgaga

SEQ ID NO: 463320 - DNA, 25 bp, Homo sapien
atctttgggtgtgtaatagctggca

SEQ ID NO: 463321 - DNA, 25 bp, Homo sapien
gacatggatttgctttcgcctgtag

SEQ ID NO: 463322 - DNA, 25 bp, Homo sapien
tggatttgctttcgcctgtagtaac

SEQ ID NO: 463323 - DNA, 25 bp, Homo sapien
aactggttacaagtttcatgtgtag

SEQ ID NO: 463324 - DNA, 25 bp, Homo sapien
ctgtagtaactggttacaagtttca

SEQ ID NO: 463325 - DNA, 25 bp, Homo sapien
gatcttatatccttatgtggaaacc

SEQ ID NO: 463326 - DNA, 25 bp, Homo sapien
tgttttacatcaatgatcttatatc

SEQ ID NO: 463327 - DNA, 25 bp, Homo sapien
aaaacatggtcaacaatatctctcc

SEQ ID NO: 463328 - DNA, 25 bp, Homo sapien
ggtcaacaatatctctccaatccat

SEQ ID NO: 463329 - DNA, 25 bp, Homo sapien
gggaaaacatggtcaacaatatctc

SEQ ID NO: 463330 - DNA, 25 bp, Homo sapien
catggtcaacaatatctctccaatc

SEQ ID NO: 463331 - DNA, 25 bp, Homo sapien
tatccagtggttcattatcttctcc

SEQ ID NO: 463332 - DNA, 25 bp, Homo sapien
taatcctagcgaatacatagctgcc

SEQ ID NO: 463333 - DNA, 25 bp, Homo sapien
aagcatggccttctatattacagtg

SEQ ID NO: 463334 - DNA, 25 bp, Homo sapien
cctatccttagcaatgtgtccctgt

SEQ ID NO: 463335 - DNA, 25 bp, Homo sapien
tgatagggagatacatgaagcctgt

SEQ ID NO: 463336 - DNA, 25 bp, Homo sapien
tccaacagacaaagttagacaggtt

SEQ ID NO: 463337 - DNA, 25 bp, Homo sapien
gggaaggatcttaggccatcggcat

SEQ ID NO: 463338 - DNA, 25 bp, Homo sapien
taaaatagatcacaaccatgggact

SEQ ID NO: 463339 - DNA, 25 bp, Homo sapien
tcttgtcagcaggaatacgtatcac

SEQ ID NO: 463340 - DNA, 25 bp, Homo sapien
aaagtctctggtgagcattcttgtc

SEQ ID NO: 463341 - DNA, 25 bp, Homo sapien
gagcattcttgtcagcaggaatacg

SEQ ID NO: 463342 - DNA, 25 bp, Homo sapien
caggaatacgtatcacgtacaaggt

SEQ ID NO: 463343 - DNA, 25 bp, Homo sapien
ttactaataagctcatataagagaa

SEQ ID NO: 463344 - DNA, 25 bp, Homo sapien
tttactaataagctcatataagaga

SEQ ID NO: 463345 - DNA, 25 bp, Homo sapien
tactaataagctcatataagagaaa

SEQ ID NO: 463346 - DNA, 25 bp, Homo sapien
catttactaataagctcatataaga

SEQ ID NO: 463347 - DNA, 25 bp, Homo sapien
tctccctagaatggacgtgaactaa

SEQ ID NO: 463348 - DNA, 25 bp, Homo sapien
ccttctgagtaggtgtcacataaaa

SEQ ID NO: 463349 - DNA, 25 bp, Homo sapien
ttctgagtaggtgtcacataaaact

SEQ ID NO: 463350 - DNA, 25 bp, Homo sapien
cctagaatggacgtgaactaagctt

SEQ ID NO: 463351 - DNA, 25 bp, Homo sapien
tgaggcccttgctcacagagttccc

SEQ ID NO: 463352 - DNA, 25 bp, Homo sapien
tttgtgttctctgacccgggattct

SEQ ID NO: 463353 - DNA, 25 bp, Homo sapien
ctttgtgttctctgacccgggattc

SEQ ID NO: 463354 - DNA, 25 bp, Homo sapien
gctttgtgttctctgacccgggatt

SEQ ID NO: 463355 - DNA, 25 bp, Homo sapien
gtggcccctgcgtataatccccgca

SEQ ID NO: 463356 - DNA, 25 bp, Homo sapien
tcaccaacgctgtttttaacagaat

SEQ ID NO: 463357 - DNA, 25 bp, Homo sapien
ctcaccaacgctgtttttaacagaa

SEQ ID NO: 463358 - DNA, 25 bp, Homo sapien
ggctgaaagcagtggcccctgcgta

SEQ ID NO: 463359 - DNA, 25 bp, Homo sapien
cctagacatttatcaggcctgtctc

SEQ ID NO: 463360 - DNA, 25 bp, Homo sapien
tcctagacatttatcaggcctgtct

SEQ ID NO: 463361 - DNA, 25 bp, Homo sapien
ctcctagacatttatcaggcctgtc

SEQ ID NO: 463362 - DNA, 25 bp, Homo sapien
tagacatttatcaggcctgtctctt

SEQ ID NO: 463363 - DNA, 25 bp, Homo sapien
tcagtagtgtgagcagcggcacttt

SEQ ID NO: 463364 - DNA, 25 bp, Homo sapien
gagagatttcctacgttgctatcag

SEQ ID NO: 463365 - DNA, 25 bp, Homo sapien
tacgttgctatcagtagtgtgagca

SEQ ID NO: 463366 - DNA, 25 bp, Homo sapien
gcaagcctttcagagagatttccta

SEQ ID NO: 463367 - DNA, 25 bp, Homo sapien
caagtagacgttgtggttggattcc

SEQ ID NO: 463368 - DNA, 25 bp, Homo sapien
gtgttcccatcactcaagtagacgt

SEQ ID NO: 463369 - DNA, 25 bp, Homo sapien
gatatcccaatagagtcactgaagc

SEQ ID NO: 463370 - DNA, 25 bp, Homo sapien
tccgactcagtacaaagtagaggtt

SEQ ID NO: 463371 - DNA, 25 bp, Homo sapien
tagattcttatcagtctttctcagg

SEQ ID NO: 463372 - DNA, 25 bp, Homo sapien
ttcttatcagtctttctcaggaagt

SEQ ID NO: 463373 - DNA, 25 bp, Homo sapien
tcagtctttctcaggaagtagacat

SEQ ID NO: 463374 - DNA, 25 bp, Homo sapien
aaattatgccttttagattcttatc

SEQ ID NO: 463375 - DNA, 25 bp, Homo sapien
tgaggattagagttacagtgcatat

SEQ ID NO: 463376 - DNA, 25 bp, Homo sapien
gaggattagagttacagtgcatatt

SEQ ID NO: 463377 - DNA, 25 bp, Homo sapien
aggattagagttacagtgcatatta

SEQ ID NO: 463378 - DNA, 25 bp, Homo sapien
gtgaggattagagttacagtgcata

SEQ ID NO: 463379 - DNA, 25 bp, Homo sapien
cactgaggctcgtattttgaagtct

SEQ ID NO: 463380 - DNA, 25 bp, Homo sapien
tcactgaggctcgtattttgaagtc

SEQ ID NO: 463381 - DNA, 25 bp, Homo sapien
tcaggttcgacactgctaaatggga

SEQ ID NO: 463382 - DNA, 25 bp, Homo sapien
agcccaatgcaggaacatgagaatc

SEQ ID NO: 463383 - DNA, 25 bp, Homo sapien
gtcttctaaatgtccgcttttcttc

SEQ ID NO: 463384 - DNA, 25 bp, Homo sapien
taaatgggaagtgtccaccttgtct

SEQ ID NO: 463385 - DNA, 25 bp, Homo sapien
agggtaaactggtcacccagggctg

SEQ ID NO: 463386 - DNA, 25 bp, Homo sapien
gggtaaactggtcacccagggctgc

SEQ ID NO: 463387 - DNA, 25 bp, Homo sapien
catcaatcatgccaacatatgcagc

SEQ ID NO: 463388 - DNA, 25 bp, Homo sapien
tcatcaatcatgccaacatatgcag

SEQ ID NO: 463389 - DNA, 25 bp, Homo sapien
ctgtactcctacagtgtacaatctt

SEQ ID NO: 463390 - DNA, 25 bp, Homo sapien
actcctacagtgtacaatcttggct

SEQ ID NO: 463391 - DNA, 25 bp, Homo sapien
tactcctacagtgtacaatcttggc

SEQ ID NO: 463392 - DNA, 25 bp, Homo sapien
gtactcctacagtgtacaatcttgg

SEQ ID NO: 463393 - DNA, 25 bp, Homo sapien
gagtttccctagtcagcaaaggcag

SEQ ID NO: 463394 - DNA, 25 bp, Homo sapien
caatgattatggaggcagatgctca

SEQ ID NO: 463395 - DNA, 25 bp, Homo sapien
cacttggtccctgtgtcaagagaaa

SEQ ID NO: 463396 - DNA, 25 bp, Homo sapien
ggctggaggatgctacgacctgttt

SEQ ID NO: 463397 - DNA, 25 bp, Homo sapien
taactgacatataaggtcccagagg

SEQ ID NO: 463398 - DNA, 25 bp, Homo sapien
ctctggaaccttggatgtcagttcc

SEQ ID NO: 463399 - DNA, 25 bp, Homo sapien
gacatataaggtcccagaggtcttt

SEQ ID NO: 463400 - DNA, 25 bp, Homo sapien
tcagttccacgagagataaatttat

SEQ ID NO: 463401 - DNA, 25 bp, Homo sapien
ctctcctgaaaatgacgatatcgta

SEQ ID NO: 463402 - DNA, 25 bp, Homo sapien
gacgatatcgtagtctcactgatgc

SEQ ID NO: 463403 - DNA, 25 bp, Homo sapien
gaaaatgacgatatcgtagtctcac

SEQ ID NO: 463404 - DNA, 25 bp, Homo sapien
gatatcgtagtctcactgatgccat

SEQ ID NO: 463405 - DNA, 25 bp, Homo sapien
atgggatgattgtactgatggtgtc

SEQ ID NO: 463406 - DNA, 25 bp, Homo sapien
gggatgattgtactgatggtgtctc

SEQ ID NO: 463407 - DNA, 25 bp, Homo sapien
ctatgggatgattgtactgatggtg

SEQ ID NO: 463408 - DNA, 25 bp, Homo sapien
atgattgtactgatggtgtctctgc

SEQ ID NO: 463409 - DNA, 25 bp, Homo sapien
tcataatcatgtcttaacacacaaa

SEQ ID NO: 463410 - DNA, 25 bp, Homo sapien
gataatgacagcaagaaagatccaa

SEQ ID NO: 463411 - DNA, 25 bp, Homo sapien
tccaataaccatagaagaactggct

SEQ ID NO: 463412 - DNA, 25 bp, Homo sapien
taagaagtgatggtatcataatcat

SEQ ID NO: 463413 - DNA, 25 bp, Homo sapien
catatttggtgagaaactttgctgc

SEQ ID NO: 463414 - DNA, 25 bp, Homo sapien
ggataccagtggtttatacatcaca

SEQ ID NO: 463415 - DNA, 25 bp, Homo sapien
gacgacagcttaactctgattacaa

SEQ ID NO: 463416 - DNA, 25 bp, Homo sapien
gaaaattaaagaacaacaagcaggc

SEQ ID NO: 463417 - DNA, 25 bp, Homo sapien
ttcattctctctgctgttataacta

SEQ ID NO: 463418 - DNA, 25 bp, Homo sapien
cccatttgattgtgtaaagcgtttc

SEQ ID NO: 463419 - DNA, 25 bp, Homo sapien
gaattctgtctaccccacactgtac

SEQ ID NO: 463420 - DNA, 25 bp, Homo sapien
cactgtacatcgattatgtgcacag

SEQ ID NO: 463421 - DNA, 25 bp, Homo sapien
tcactcttatcattactactgttgc

SEQ ID NO: 463422 - DNA, 25 bp, Homo sapien
atagttccaagtgacaaggtagaac

SEQ ID NO: 463423 - DNA, 25 bp, Homo sapien
gttgtcctggtacccatagttccaa

SEQ ID NO: 463424 - DNA, 25 bp, Homo sapien
tgacaaggtagaacacttcactctt

SEQ ID NO: 463425 - DNA, 25 bp, Homo sapien
attacttttgctgtatgggtccaat

SEQ ID NO: 463426 - DNA, 25 bp, Homo sapien
cttttgctgtatgggtccaattccg

SEQ ID NO: 463427 - DNA, 25 bp, Homo sapien
ttgctgtatgggtccaattccgtcg

SEQ ID NO: 463428 - DNA, 25 bp, Homo sapien
tgtatgggtccaattccgtcgccat

SEQ ID NO: 463429 - DNA, 25 bp, Homo sapien
tggttaaattgattcatagttattt

SEQ ID NO: 463430 - DNA, 25 bp, Homo sapien
aaattgattcatagttattttgtgt

SEQ ID NO: 463431 - DNA, 25 bp, Homo sapien
gatatttactgctggcatatataaa

SEQ ID NO: 463432 - DNA, 25 bp, Homo sapien
atatttactgctggcatatataaat

SEQ ID NO: 463433 - DNA, 25 bp, Homo sapien
tggagatcttcatataggcctgctt

SEQ ID NO: 463434 - DNA, 25 bp, Homo sapien
tcatataggcctgcttatatgtggc

SEQ ID NO: 463435 - DNA, 25 bp, Homo sapien
ggcctgcttatatgtggcatagata

SEQ ID NO: 463436 - DNA, 25 bp, Homo sapien
tgtggcatagataaagttgtattcc

SEQ ID NO: 463437 - DNA, 25 bp, Homo sapien
gtcaatggaatagttgatagcagat

SEQ ID NO: 463438 - DNA, 25 bp, Homo sapien
gatttcttctgtcgggtctcatgcc

SEQ ID NO: 463439 - DNA, 25 bp, Homo sapien
gaatagttgatagcagatttcttct

SEQ ID NO: 463440 - DNA, 25 bp, Homo sapien
cttccaacagatgatgtagtctcca

SEQ ID NO: 463441 - DNA, 25 bp, Homo sapien
ttatattttcaggtcacactgtgtt

SEQ ID NO: 463442 - DNA, 25 bp, Homo sapien
tatattttcaggtcacactgtgttc

SEQ ID NO: 463443 - DNA, 25 bp, Homo sapien
gcaaaatcttgcttagctgtgaaaa

SEQ ID NO: 463444 - DNA, 25 bp, Homo sapien
tgcacactagttcatagaaccaaag

SEQ ID NO: 463445 - DNA, 25 bp, Homo sapien
tactataatccacaacaaagttgct

SEQ ID NO: 463446 - DNA, 25 bp, Homo sapien
tgaggatgctccaccaagcatacag

SEQ ID NO: 463447 - DNA, 25 bp, Homo sapien
ctagccttagcttagcaacagtcat

SEQ ID NO: 463448 - DNA, 25 bp, Homo sapien
gcctgattataatagtgatgagatt

SEQ ID NO: 463449 - DNA, 25 bp, Homo sapien
caactctggtacattctagccttag

SEQ ID NO: 463450 - DNA, 25 bp, Homo sapien
tgcctgattataatagtgatgagat

SEQ ID NO: 463451 - DNA, 25 bp, Homo sapien
tgccttaagcccagatttccgatca

SEQ ID NO: 463452 - DNA, 25 bp, Homo sapien
tagcaaataattagagcactgcttg

SEQ ID NO: 463453 - DNA, 25 bp, Homo sapien
ctctttttcactaccagatggtgcc

SEQ ID NO: 463454 - DNA, 25 bp, Homo sapien
taatttcttactaggtcatctcttt

SEQ ID NO: 463455 - DNA, 25 bp, Homo sapien
ttttcttccgtatctctccagtagg

SEQ ID NO: 463456 - DNA, 25 bp, Homo sapien
tgagcctggtcctaaagcaaatggg

SEQ ID NO: 463457 - DNA, 25 bp, Homo sapien
gcctctatgtcattacacttgatct

SEQ ID NO: 463458 - DNA, 25 bp, Homo sapien
ttacccctgtgctcattacaatgag

SEQ ID NO: 463459 - DNA, 25 bp, Homo sapien
gggttcccattattgtagacaccaa

SEQ ID NO: 463460 - DNA, 25 bp, Homo sapien
cagaccataaagaactccttagatg

SEQ ID NO: 463461 - DNA, 25 bp, Homo sapien
caggcaatgctactctgctgctgat

SEQ ID NO: 463462 - DNA, 25 bp, Homo sapien
agaactccttagatgaaatggctgt

SEQ ID NO: 463463 - DNA, 25 bp, Homo sapien
ctgctgattgcaatatattctgaca

SEQ ID NO: 463464 - DNA, 25 bp, Homo sapien
tatttcaaagtaacgtattctcctg

SEQ ID NO: 463465 - DNA, 25 bp, Homo sapien
tttctgaagtgtaggggtatttcaa

SEQ ID NO: 463466 - DNA, 25 bp, Homo sapien
caaagtaacgtattctcctgtgtat

SEQ ID NO: 463467 - DNA, 25 bp, Homo sapien
tatctagctcaattccaaaatctgt

SEQ ID NO: 463468 - DNA, 25 bp, Homo sapien
ggaccttcattacacagattgctgc

SEQ ID NO: 463469 - DNA, 25 bp, Homo sapien
ggatgccagcttagcagtgtcagta

SEQ ID NO: 463470 - DNA, 25 bp, Homo sapien
aatggtgtttgtgcctgaattctgg

SEQ ID NO: 463471 - DNA, 25 bp, Homo sapien
tattcttgtttgatccccgctgtgg

SEQ ID NO: 463472 - DNA, 25 bp, Homo sapien
tatgaagttgtaaaggtgggatatt

SEQ ID NO: 463473 - DNA, 25 bp, Homo sapien
atgaagttgtaaaggtgggatattt

SEQ ID NO: 463474 - DNA, 25 bp, Homo sapien
agcgcctgaacagagttggtgttcc

SEQ ID NO: 463475 - DNA, 25 bp, Homo sapien
cgcctgaacagagttggtgttccac

SEQ ID NO: 463476 - DNA, 25 bp, Homo sapien
taactgaggtagaagacagcgcctg

SEQ ID NO: 463477 - DNA, 25 bp, Homo sapien
aggtagaagacagcgcctgaacaga

SEQ ID NO: 463478 - DNA, 25 bp, Homo sapien
cttttgagataggacgttcaaagac

SEQ ID NO: 463479 - DNA, 25 bp, Homo sapien
tggcttttgagataggacgttcaaa

SEQ ID NO: 463480 - DNA, 25 bp, Homo sapien
tttgagataggacgttcaaagacaa

SEQ ID NO: 463481 - DNA, 25 bp, Homo sapien
ttgagataggacgttcaaagacaag

SEQ ID NO: 463482 - DNA, 25 bp, Homo sapien
ctaccaaattagataactgattaga

SEQ ID NO: 463483 - DNA, 25 bp, Homo sapien
ataatctaccaaattagataactga

SEQ ID NO: 463484 - DNA, 25 bp, Homo sapien
ataactgattagaagcagtgaggaa

SEQ ID NO: 463485 - DNA, 25 bp, Homo sapien
ttcagatgtcgtggtcagcagggcc

SEQ ID NO: 463486 - DNA, 25 bp, Homo sapien
gaatagcctttgatgccaggaatca

SEQ ID NO: 463487 - DNA, 25 bp, Homo sapien
taggatagttttgcatacactgcca

SEQ ID NO: 463488 - DNA, 25 bp, Homo sapien
cagcagggccatagcattaaaaatg

SEQ ID NO: 463489 - DNA, 25 bp, Homo sapien
aaacaccaagcaggcctaacttaca

SEQ ID NO: 463490 - DNA, 25 bp, Homo sapien
tctggtttgttctcatggattatgc

SEQ ID NO: 463491 - DNA, 25 bp, Homo sapien
ttgtcaatctcaaatacaggtgtca

SEQ ID NO: 463492 - DNA, 25 bp, Homo sapien
gctgtttgtctcaatcttagtctgg

SEQ ID NO: 463493 - DNA, 25 bp, Homo sapien
gagaattctctatcgtacaaactgg

SEQ ID NO: 463494 - DNA, 25 bp, Homo sapien
cagatatttacaagctaaatccata

SEQ ID NO: 463495 - DNA, 25 bp, Homo sapien
ggtattttatccttgtatttacaga

SEQ ID NO: 463496 - DNA, 25 bp, Homo sapien
tatcttgtagaaccaatttgttaac

SEQ ID NO: 463497 - DNA, 25 bp, Homo sapien
tgagtggggtgcctcttatgggcag

SEQ ID NO: 463498 - DNA, 25 bp, Homo sapien
tggggtgcctcttatgggcagacat

SEQ ID NO: 463499 - DNA, 25 bp, Homo sapien
gcctcttatgggcagacattgggct

SEQ ID NO: 463500 - DNA, 25 bp, Homo sapien
ggtgcctcttatgggcagacattgg

SEQ ID NO: 463501 - DNA, 25 bp, Homo sapien
tatagtcttcaccaaatgtagcagc

SEQ ID NO: 463502 - DNA, 25 bp, Homo sapien
aagcttgactgctgatttcaacagt

SEQ ID NO: 463503 - DNA, 25 bp, Homo sapien
tcattgaaacctatgagactaaatt

SEQ ID NO: 463504 - DNA, 25 bp, Homo sapien
tggaatatttatagtcttcaccaaa

SEQ ID NO: 463505 - DNA, 25 bp, Homo sapien
tgtctgctcaaagagaaacttagat

SEQ ID NO: 463506 - DNA, 25 bp, Homo sapien
gtctgctcaaagagaaacttagatg

SEQ ID NO: 463507 - DNA, 25 bp, Homo sapien
ctgctcaaagagaaacttagatgat

SEQ ID NO: 463508 - DNA, 25 bp, Homo sapien
gtgtctgctcaaagagaaacttaga

SEQ ID NO: 463509 - DNA, 25 bp, Homo sapien
gttcagctcctcagggataggtgga

SEQ ID NO: 463510 - DNA, 25 bp, Homo sapien
cataggtagtaaaccctttgttcag

SEQ ID NO: 463511 - DNA, 25 bp, Homo sapien
cccatttgcataggtagtaaaccct

SEQ ID NO: 463512 - DNA, 25 bp, Homo sapien
ctcctcagggataggtggaaaccaa

SEQ ID NO: 463513 - DNA, 25 bp, Homo sapien
acacaattgaccaccatttcttact

SEQ ID NO: 463514 - DNA, 25 bp, Homo sapien
acaattgaccaccatttcttactgc

SEQ ID NO: 463515 - DNA, 25 bp, Homo sapien
cacaattgaccaccatttcttactg

SEQ ID NO: 463516 - DNA, 25 bp, Homo sapien
tattgttttataggggatgccaaca

SEQ ID NO: 463517 - DNA, 25 bp, Homo sapien
gattctatgtagtctcattttcttc

SEQ ID NO: 463518 - DNA, 25 bp, Homo sapien
ttcctctaaacttcttgattctatg

SEQ ID NO: 463519 - DNA, 25 bp, Homo sapien
aacttcttgattctatgtagtctca

SEQ ID NO: 463520 - DNA, 25 bp, Homo sapien
aaagcgtcaacattttccagggcag

SEQ ID NO: 463521 - DNA, 25 bp, Homo sapien
cctattgccctgatccatgttattt

SEQ ID NO: 463522 - DNA, 25 bp, Homo sapien
agaagcaaaagcgtcaacattttcc

SEQ ID NO: 463523 - DNA, 25 bp, Homo sapien
actcctattgccctgatccatgtta

SEQ ID NO: 463524 - DNA, 25 bp, Homo sapien
tttctaccccacactgtttctcgta

SEQ ID NO: 463525 - DNA, 25 bp, Homo sapien
tgtttctcgtatagataaaaagttg

SEQ ID NO: 463526 - DNA, 25 bp, Homo sapien
cacactgtttctcgtatagataaaa

SEQ ID NO: 463527 - DNA, 25 bp, Homo sapien
tttgtccaacacagattcttttgaa

SEQ ID NO: 463528 - DNA, 25 bp, Homo sapien
tacccaacttgtaatcccgacatgt

SEQ ID NO: 463529 - DNA, 25 bp, Homo sapien
ggacctggtgacacgtgattgaatc

SEQ ID NO: 463530 - DNA, 25 bp, Homo sapien
gagcctcctggtaattgcttactac

SEQ ID NO: 463531 - DNA, 25 bp, Homo sapien
tgtttgtcccattgagctatgagcc

SEQ ID NO: 463532 - DNA, 25 bp, Homo sapien
tttgatgtcacaggctcataagtgt

SEQ ID NO: 463533 - DNA, 25 bp, Homo sapien
tgtcacaggctcataagtgtaaggg

SEQ ID NO: 463534 - DNA, 25 bp, Homo sapien
gatgtcacaggctcataagtgtaag

SEQ ID NO: 463535 - DNA, 25 bp, Homo sapien
gtcacaggctcataagtgtaaggga

SEQ ID NO: 463536 - DNA, 25 bp, Homo sapien
aatatgtggtggatgaaagaggaag

SEQ ID NO: 463537 - DNA, 25 bp, Homo sapien
caaggtgtgtggtcacagaggtcat

SEQ ID NO: 463538 - DNA, 25 bp, Homo sapien
tctcccatttgaatctcaaggtgtg

SEQ ID NO: 463539 - DNA, 25 bp, Homo sapien
ttgaatctcaaggtgtgtggtcaca

SEQ ID NO: 463540 - DNA, 25 bp, Homo sapien
agtgaacgcattaaaaagtttagct

SEQ ID NO: 463541 - DNA, 25 bp, Homo sapien
ctgttgcaaggaatagaagaagtga

SEQ ID NO: 463542 - DNA, 25 bp, Homo sapien
caaggaatagaagaagtgaacgcat

SEQ ID NO: 463543 - DNA, 25 bp, Homo sapien
gaatagaagaagtgaacgcattaaa

SEQ ID NO: 463544 - DNA, 25 bp, Homo sapien
gaagagtgtataaagtggtgactgt

SEQ ID NO: 463545 - DNA, 25 bp, Homo sapien
taaagatcttcaacgctgagaagag

SEQ ID NO: 463546 - DNA, 25 bp, Homo sapien
gaaaggtgatcctgagaaatgcggt

SEQ ID NO: 463547 - DNA, 25 bp, Homo sapien
tcagcagaatctaacacagtgtggt

SEQ ID NO: 463548 - DNA, 25 bp, Homo sapien
cccaattctgagctaaagtacaacg

SEQ ID NO: 463549 - DNA, 25 bp, Homo sapien
acagtatgtcttgctatcaggccca

SEQ ID NO: 463550 - DNA, 25 bp, Homo sapien
aagctatttttgtggcccaccacac

SEQ ID NO: 463551 - DNA, 25 bp, Homo sapien
acgttattacagaggagtttgccac

SEQ ID NO: 463552 - DNA, 25 bp, Homo sapien
aaatgggtcaccacattctaagaat

SEQ ID NO: 463553 - DNA, 25 bp, Homo sapien
cattaatctctggttataagcagaa

SEQ ID NO: 463554 - DNA, 25 bp, Homo sapien
tgggtcaccacattctaagaatgat

SEQ ID NO: 463555 - DNA, 25 bp, Homo sapien
aatctctggttataagcagaataca

SEQ ID NO: 463556 - DNA, 25 bp, Homo sapien
ttctgctttgtgccattgaataatt

SEQ ID NO: 463557 - DNA, 25 bp, Homo sapien
tctgctttgtgccattgaataattc

SEQ ID NO: 463558 - DNA, 25 bp, Homo sapien
ctgctttgtgccattgaataattca

SEQ ID NO: 463559 - DNA, 25 bp, Homo sapien
ttttcctttatagcatccccacttc

SEQ ID NO: 463560 - DNA, 25 bp, Homo sapien
caccataagactgagaaatatatcc

SEQ ID NO: 463561 - DNA, 25 bp, Homo sapien
tccacactggtctttatcatcttca

SEQ ID NO: 463562 - DNA, 25 bp, Homo sapien
gaagatatcctgttactccaaatga

SEQ ID NO: 463563 - DNA, 25 bp, Homo sapien
tcagatatgatacagccgctcacag

SEQ ID NO: 463564 - DNA, 25 bp, Homo sapien
tttagatgacgtgtctgctggccag

SEQ ID NO: 463565 - DNA, 25 bp, Homo sapien
tagtgtgtcttcattattagaatca

SEQ ID NO: 463566 - DNA, 25 bp, Homo sapien
gccgctcacagaaagaggtcctctc

SEQ ID NO: 463567 - DNA, 25 bp, Homo sapien
tgtttgtatttgaagtgtgtttcat

SEQ ID NO: 463568 - DNA, 25 bp, Homo sapien
ttgtttgtatttgaagtgtgtttca

SEQ ID NO: 463569 - DNA, 25 bp, Homo sapien
cgtactgggtatgacacttatttgg

SEQ ID NO: 463570 - DNA, 25 bp, Homo sapien
gtgatgtgagcttgttgcactgaaa

SEQ ID NO: 463571 - DNA, 25 bp, Homo sapien
tcatcagtggtaaattggtttgagg

SEQ ID NO: 463572 - DNA, 25 bp, Homo sapien
tgaagtagtcaggtacgtactgggt

SEQ ID NO: 463573 - DNA, 25 bp, Homo sapien
gtgacagcaggacatttcatgtagt

SEQ ID NO: 463574 - DNA, 25 bp, Homo sapien
acagcaggacatttcatgtagtaat

SEQ ID NO: 463575 - DNA, 25 bp, Homo sapien
caagaaatttgatgtgacagcagga

SEQ ID NO: 463576 - DNA, 25 bp, Homo sapien
aggacatttcatgtagtaattatct

SEQ ID NO: 463577 - DNA, 25 bp, Homo sapien
tctttcccatgaggcagttttgcca

SEQ ID NO: 463578 - DNA, 25 bp, Homo sapien
tcagatgttatctccaaagtctttc

SEQ ID NO: 463579 - DNA, 25 bp, Homo sapien
tgaggcagttttgccatgattaagt

SEQ ID NO: 463580 - DNA, 25 bp, Homo sapien
tatctccaaagtctttcccatgagg

SEQ ID NO: 463581 - DNA, 25 bp, Homo sapien
tcctttgctacccttgtatttccat

SEQ ID NO: 463582 - DNA, 25 bp, Homo sapien
atttccattacacatctcagtataa

SEQ ID NO: 463583 - DNA, 25 bp, Homo sapien
cattacacatctcagtataacagat

SEQ ID NO: 463584 - DNA, 25 bp, Homo sapien
tccttgcttctatgtctgcatcaac

SEQ ID NO: 463585 - DNA, 25 bp, Homo sapien
ctttcactatccgagttcccaaatc

SEQ ID NO: 463586 - DNA, 25 bp, Homo sapien
tcactatccgagttcccaaatctat

SEQ ID NO: 463587 - DNA, 25 bp, Homo sapien
cagatggttacccactctcttggct

SEQ ID NO: 463588 - DNA, 25 bp, Homo sapien
tctatagatattcagatggttaccc

SEQ ID NO: 463589 - DNA, 25 bp, Homo sapien
attttactgactgtcatctccttgc

SEQ ID NO: 463590 - DNA, 25 bp, Homo sapien
atattttgtgctcattgaactgggc

SEQ ID NO: 463591 - DNA, 25 bp, Homo sapien
gggttatcacccacatgtacatttt

SEQ ID NO: 463592 - DNA, 25 bp, Homo sapien
catataattgcattaatttgagaaa

SEQ ID NO: 463593 - DNA, 25 bp, Homo sapien
ggatgccacctacatctgcacagga

SEQ ID NO: 463594 - DNA, 25 bp, Homo sapien
aaggttttccttagcatgatcccca

SEQ ID NO: 463595 - DNA, 25 bp, Homo sapien
tgttggtggcacctggatggttcca

SEQ ID NO: 463596 - DNA, 25 bp, Homo sapien
gaagagattgatgacccctgttttg

SEQ ID NO: 463597 - DNA, 25 bp, Homo sapien
tccaggtagacatttggagatgatc

SEQ ID NO: 463598 - DNA, 25 bp, Homo sapien
tgatcttcccagtcaagtcggcttt

SEQ ID NO: 463599 - DNA, 25 bp, Homo sapien
gaaaccactggaagagacccattgt

SEQ ID NO: 463600 - DNA, 25 bp, Homo sapien
tgacaagatggctcatttcacaaga

SEQ ID NO: 463601 - DNA, 25 bp, Homo sapien
caggttcattattgacaggcttcag

SEQ ID NO: 463602 - DNA, 25 bp, Homo sapien
gcttaaatgatcacaggttcattat

SEQ ID NO: 463603 - DNA, 25 bp, Homo sapien
cacaggttcattattgacaggcttc

SEQ ID NO: 463604 - DNA, 25 bp, Homo sapien
gatcacaggttcattattgacaggc

SEQ ID NO: 463605 - DNA, 25 bp, Homo sapien
gagatgtcaaggtatattttcaagc

SEQ ID NO: 463606 - DNA, 25 bp, Homo sapien
gcaaggaatactttgacaacacata

SEQ ID NO: 463607 - DNA, 25 bp, Homo sapien
gtattctccttggaaccagcttttg

SEQ ID NO: 463608 - DNA, 25 bp, Homo sapien
ggtttcctcaatgccaggcccgtgt

SEQ ID NO: 463609 - DNA, 25 bp, Homo sapien
gctgagattaggaactatgtttgca

SEQ ID NO: 463610 - DNA, 25 bp, Homo sapien
gcagtcacaatagtgctgtatcatg

SEQ ID NO: 463611 - DNA, 25 bp, Homo sapien
tgtagttgaacctaagttgagaacc

SEQ ID NO: 463612 - DNA, 25 bp, Homo sapien
accatgatgctggaattgaagcagc

SEQ ID NO: 463613 - DNA, 25 bp, Homo sapien
ttcagcaccactgacaaatcataaa

SEQ ID NO: 463614 - DNA, 25 bp, Homo sapien
aatgattgccttaggatatttatac

SEQ ID NO: 463615 - DNA, 25 bp, Homo sapien
cagcattcagcaccactgacaaatc

SEQ ID NO: 463616 - DNA, 25 bp, Homo sapien
gccttaggatatttataccaagtat

SEQ ID NO: 463617 - DNA, 25 bp, Homo sapien
attctgacatggcttgcaaactcag

SEQ ID NO: 463618 - DNA, 25 bp, Homo sapien
agtggagaatgtaggccatggacat

SEQ ID NO: 463619 - DNA, 25 bp, Homo sapien
ttctgacatggcttgcaaactcagt

SEQ ID NO: 463620 - DNA, 25 bp, Homo sapien
tcctgtttaagacccgcaggcccga

SEQ ID NO: 463621 - DNA, 25 bp, Homo sapien
tgaccctttctgcaaatctatgtac

SEQ ID NO: 463622 - DNA, 25 bp, Homo sapien
caggcccgatttctgagctctcata

SEQ ID NO: 463623 - DNA, 25 bp, Homo sapien
ttttcttcaaactccgacatgctgg

SEQ ID NO: 463624 - DNA, 25 bp, Homo sapien
tcttgccaattctggcatacaacat

SEQ ID NO: 463625 - DNA, 25 bp, Homo sapien
aatcttgccaattctggcatacaac

SEQ ID NO: 463626 - DNA, 25 bp, Homo sapien
caaatcttgccaattctggcataca

SEQ ID NO: 463627 - DNA, 25 bp, Homo sapien
acaaatcttgccaattctggcatac

SEQ ID NO: 463628 - DNA, 25 bp, Homo sapien
cttctactgttgctgttccgtactt

SEQ ID NO: 463629 - DNA, 25 bp, Homo sapien
gctgttccgtacttcttagctaata

SEQ ID NO: 463630 - DNA, 25 bp, Homo sapien
gattgtccttcagaattgcaattgc

SEQ ID NO: 463631 - DNA, 25 bp, Homo sapien
catcttcatatgattgtccttcaga

SEQ ID NO: 463632 - DNA, 25 bp, Homo sapien
gaactcccaataattggttcgcatg

SEQ ID NO: 463633 - DNA, 25 bp, Homo sapien
tagagaactcccaataattggttcg

SEQ ID NO: 463634 - DNA, 25 bp, Homo sapien
caataattggttcgcatgcagaagc

SEQ ID NO: 463635 - DNA, 25 bp, Homo sapien
tttggaaatagagaactcccaataa

SEQ ID NO: 463636 - DNA, 25 bp, Homo sapien
ctagactctctcagcaccttcattt

SEQ ID NO: 463637 - DNA, 25 bp, Homo sapien
tagactctctcagcaccttcattta

SEQ ID NO: 463638 - DNA, 25 bp, Homo sapien
actctctcagcaccttcatttactc

SEQ ID NO: 463639 - DNA, 25 bp, Homo sapien
gactctctcagcaccttcatttact

SEQ ID NO: 463640 - DNA, 25 bp, Homo sapien
cttgtatcacttaacgaactgttca

SEQ ID NO: 463641 - DNA, 25 bp, Homo sapien
actttttcacttgtatcacttaacg

SEQ ID NO: 463642 - DNA, 25 bp, Homo sapien
gaatcttactttttcacttgtatca

SEQ ID NO: 463643 - DNA, 25 bp, Homo sapien
ttttcacttgtatcacttaacgaac

SEQ ID NO: 463644 - DNA, 25 bp, Homo sapien
gccacactgtatgggtgatgagtag

SEQ ID NO: 463645 - DNA, 25 bp, Homo sapien
ccacactgtatgggtgatgagtagg

SEQ ID NO: 463646 - DNA, 25 bp, Homo sapien
tttaaaacagatctagaagacaact

SEQ ID NO: 463647 - DNA, 25 bp, Homo sapien
gacaacttggctgccggaatgtaaa

SEQ ID NO: 463648 - DNA, 25 bp, Homo sapien
tagaagacaacttggctgccggaat

SEQ ID NO: 463649 - DNA, 25 bp, Homo sapien
acagatctagaagacaacttggctg

SEQ ID NO: 463650 - DNA, 25 bp, Homo sapien
ttaatagattgagatactttttccc

SEQ ID NO: 463651 - DNA, 25 bp, Homo sapien
ttttcccacatcatcctccagtaag

SEQ ID NO: 463652 - DNA, 25 bp, Homo sapien
gagatactttttcccacatcatcct

SEQ ID NO: 463653 - DNA, 25 bp, Homo sapien
ccacatcatcctccagtaagcttac

SEQ ID NO: 463654 - DNA, 25 bp, Homo sapien
ataaatctagttccatctttagtct

SEQ ID NO: 463655 - DNA, 25 bp, Homo sapien
tagttccatctttagtctcttcgca

SEQ ID NO: 463656 - DNA, 25 bp, Homo sapien
cagctgtccttcaaatctaagtctg

SEQ ID NO: 463657 - DNA, 25 bp, Homo sapien
agtctcttcgcatttctgatcagcc

SEQ ID NO: 463658 - DNA, 25 bp, Homo sapien
tctctagatttagaatccttggtag

SEQ ID NO: 463659 - DNA, 25 bp, Homo sapien
ccatggctagccttgctgacactct

SEQ ID NO: 463660 - DNA, 25 bp, Homo sapien
cacaaagctgcttgacaatagagtc

SEQ ID NO: 463661 - DNA, 25 bp, Homo sapien
caaagtccgattggtcaagcctgca

SEQ ID NO: 463662 - DNA, 25 bp, Homo sapien
cagtttcaagaaccattaatgtgtt

SEQ ID NO: 463663 - DNA, 25 bp, Homo sapien
gaaccattaatgtgttttcaacaat

SEQ ID NO: 463664 - DNA, 25 bp, Homo sapien
tccttttgatgaccaatcggtgcaa

SEQ ID NO: 463665 - DNA, 25 bp, Homo sapien
ttagaacagtttcaagaaccattaa

SEQ ID NO: 463666 - DNA, 25 bp, Homo sapien
tcttcagcaaaagacagagaatcca

SEQ ID NO: 463667 - DNA, 25 bp, Homo sapien
cttcagcaaaagacagagaatccat

SEQ ID NO: 463668 - DNA, 25 bp, Homo sapien
cttttcttcagcaaaagacagagaa

SEQ ID NO: 463669 - DNA, 25 bp, Homo sapien
tttcttcagcaaaagacagagaatc

SEQ ID NO: 463670 - DNA, 25 bp, Homo sapien
ctgtgggctcttagaatttagaaac

SEQ ID NO: 463671 - DNA, 25 bp, Homo sapien
tctgtgggctcttagaatttagaaa

SEQ ID NO: 463672 - DNA, 25 bp, Homo sapien
aatctgtgggctcttagaatttaga

SEQ ID NO: 463673 - DNA, 25 bp, Homo sapien
atctgtgggctcttagaatttagaa

SEQ ID NO: 463674 - DNA, 25 bp, Homo sapien
aactgagccacaagtgaaacctctg

SEQ ID NO: 463675 - DNA, 25 bp, Homo sapien
tctgctatcatcaacccagaagggc

SEQ ID NO: 463676 - DNA, 25 bp, Homo sapien
taaccaagtggccacgttgaaggta

SEQ ID NO: 463677 - DNA, 25 bp, Homo sapien
cagaagggccttgttcacttatgca

SEQ ID NO: 463678 - DNA, 25 bp, Homo sapien
agacatacactcaaaggggccaaag

SEQ ID NO: 463679 - DNA, 25 bp, Homo sapien
aagacatacactcaaaggggccaaa

SEQ ID NO: 463680 - DNA, 25 bp, Homo sapien
tgaagtcctttagagagcctatcac

SEQ ID NO: 463681 - DNA, 25 bp, Homo sapien
tatcacttctataaaccaacaccca

SEQ ID NO: 463682 - DNA, 25 bp, Homo sapien
aagtgccctaaatttcgatgtggaa

SEQ ID NO: 463683 - DNA, 25 bp, Homo sapien
tagaagtgccctaaatttcgatgtg

SEQ ID NO: 463684 - DNA, 25 bp, Homo sapien
agtacctccacactgaactttccca

SEQ ID NO: 463685 - DNA, 25 bp, Homo sapien
ttctacagccaatgagattacttaa

SEQ ID NO: 463686 - DNA, 25 bp, Homo sapien
ctttagtacctccacactgaacttt

SEQ ID NO: 463687 - DNA, 25 bp, Homo sapien
attctacagccaatgagattactta

SEQ ID NO: 463688 - DNA, 25 bp, Homo sapien
aatgttcttccacggcctggaaatt

SEQ ID NO: 463689 - DNA, 25 bp, Homo sapien
ctaatgttcttccacggcctggaaa

SEQ ID NO: 463690 - DNA, 25 bp, Homo sapien
taatgttcttccacggcctggaaat

SEQ ID NO: 463691 - DNA, 25 bp, Homo sapien
gcacccccttcagggttgagaagcc

SEQ ID NO: 463692 - DNA, 25 bp, Homo sapien
cttcaccttcccataaacaggggag

SEQ ID NO: 463693 - DNA, 25 bp, Homo sapien
cattcagtgggggtatttgccattg

SEQ ID NO: 463694 - DNA, 25 bp, Homo sapien
gtacacagtttgggtgtacacagca

SEQ ID NO: 463695 - DNA, 25 bp, Homo sapien
acacagtttgggtgtacacagcacc

SEQ ID NO: 463696 - DNA, 25 bp, Homo sapien
cagtgggggtatttgccattgttcc

SEQ ID NO: 463697 - DNA, 25 bp, Homo sapien
tacagaagcttcagcagaaattaga

SEQ ID NO: 463698 - DNA, 25 bp, Homo sapien
tctcctcagtggatttacagaagct

SEQ ID NO: 463699 - DNA, 25 bp, Homo sapien
gctttttgctgagtattgaatatgg

SEQ ID NO: 463700 - DNA, 25 bp, Homo sapien
tctttctcagaggacctatctatct

SEQ ID NO: 463701 - DNA, 25 bp, Homo sapien
tcagatattggtgatcctacagtat

SEQ ID NO: 463702 - DNA, 25 bp, Homo sapien
cagatattggtgatcctacagtatc

SEQ ID NO: 463703 - DNA, 25 bp, Homo sapien
tgagtaagatcctgtgtagaaagct

SEQ ID NO: 463704 - DNA, 25 bp, Homo sapien
gagtaagatcctgtgtagaaagctc

SEQ ID NO: 463705 - DNA, 25 bp, Homo sapien
atgagtaagatcctgtgtagaaagc

SEQ ID NO: 463706 - DNA, 25 bp, Homo sapien
cagggagaagctgtttttagggcat

SEQ ID NO: 463707 - DNA, 25 bp, Homo sapien
ccagaaagtgtgaagtaacagccat

SEQ ID NO: 463708 - DNA, 25 bp, Homo sapien
gtgtgaagtaacagccatgcaggga

SEQ ID NO: 463709 - DNA, 25 bp, Homo sapien
tatttcagtagtccaattgttccaa

SEQ ID NO: 463710 - DNA, 25 bp, Homo sapien
tacacgaggtagtgaagacagagca

SEQ ID NO: 463711 - DNA, 25 bp, Homo sapien
tggaaagtggtagagactgaaaatg

SEQ ID NO: 463712 - DNA, 25 bp, Homo sapien
gcatccccaagtcccgatgaccttg

SEQ ID NO: 463713 - DNA, 25 bp, Homo sapien
gcaggcatccgtggtctcctcttcc

SEQ ID NO: 463714 - DNA, 25 bp, Homo sapien
ctttctaatctcttagaattgtcgg

SEQ ID NO: 463715 - DNA, 25 bp, Homo sapien
taatctcttagaattgtcggtctgg

SEQ ID NO: 463716 - DNA, 25 bp, Homo sapien
gaattgtcggtctgggacaggtaca

SEQ ID NO: 463717 - DNA, 25 bp, Homo sapien
tcttagaattgtcggtctgggacag

SEQ ID NO: 463718 - DNA, 25 bp, Homo sapien
aaaactgtgaagataatgctgtata

SEQ ID NO: 463719 - DNA, 25 bp, Homo sapien
aagaaattgtgtctgatataagcat

SEQ ID NO: 463720 - DNA, 25 bp, Homo sapien
ctacgttacaattggagattttcct

SEQ ID NO: 463721 - DNA, 25 bp, Homo sapien
tctcttcttaatgatctatactgtg

SEQ ID NO: 463722 - DNA, 25 bp, Homo sapien
aactttgcttacagaggtgttgcag

SEQ ID NO: 463723 - DNA, 25 bp, Homo sapien
tgtggctttacaggcaaaatgtgaa

SEQ ID NO: 463724 - DNA, 25 bp, Homo sapien
caggaactaggtgcattattacatg

SEQ ID NO: 463725 - DNA, 25 bp, Homo sapien
tcccaaataatttccagggtactga

SEQ ID NO: 463726 - DNA, 25 bp, Homo sapien
gggctagggcattgttgggtacctg

SEQ ID NO: 463727 - DNA, 25 bp, Homo sapien
tacatcaatcaattcctgatgcccc

SEQ ID NO: 463728 - DNA, 25 bp, Homo sapien
ggctagggcattgttgggtacctgg

SEQ ID NO: 463729 - DNA, 25 bp, Homo sapien
ctatcactacatcaatcaattcctg

SEQ ID NO: 463730 - DNA, 25 bp, Homo sapien
aaatgtcatctcttgttgtttttga

SEQ ID NO: 463731 - DNA, 25 bp, Homo sapien
ccagaattgtcaaggaaagagcttc

SEQ ID NO: 463732 - DNA, 25 bp, Homo sapien
tataaattgggagaacgtttttgca

SEQ ID NO: 463733 - DNA, 25 bp, Homo sapien
tttctaagccattatcttgcccaac

SEQ ID NO: 463734 - DNA, 25 bp, Homo sapien
cgttaaaagatggaataaacatatt

SEQ ID NO: 463735 - DNA, 25 bp, Homo sapien
tacgttaaaagatggaataaacata

SEQ ID NO: 463736 - DNA, 25 bp, Homo sapien
acgttaaaagatggaataaacatat

SEQ ID NO: 463737 - DNA, 25 bp, Homo sapien
tgaactgtggaacggatttagtcac

SEQ ID NO: 463738 - DNA, 25 bp, Homo sapien
caaaatttgaactgtggaacggatt

SEQ ID NO: 463739 - DNA, 25 bp, Homo sapien
tggaacggatttagtcacatccttc

SEQ ID NO: 463740 - DNA, 25 bp, Homo sapien
ttaaagcacaaaatttgaactgtgg

SEQ ID NO: 463741 - DNA, 25 bp, Homo sapien
tgaaatagaacattaggagtttagt

SEQ ID NO: 463742 - DNA, 25 bp, Homo sapien
ggcactcagtgtattcaaccattac

SEQ ID NO: 463743 - DNA, 25 bp, Homo sapien
ggctgcccagttttgaaatatggag

SEQ ID NO: 463744 - DNA, 25 bp, Homo sapien
cattaggagtttagtttggcactca

SEQ ID NO: 463745 - DNA, 25 bp, Homo sapien
ttcagtgcagggttgagtgaaaaat

SEQ ID NO: 463746 - DNA, 25 bp, Homo sapien
cagtgcagggttgagtgaaaaatat

SEQ ID NO: 463747 - DNA, 25 bp, Homo sapien
tcagtgcagggttgagtgaaaaata

SEQ ID NO: 463748 - DNA, 25 bp, Homo sapien
gacgctggaggggatcccacagtgg

SEQ ID NO: 463749 - DNA, 25 bp, Homo sapien
gggtggaggaagacagcgggaaaca

SEQ ID NO: 463750 - DNA, 25 bp, Homo sapien
cacagtgggttatttggttggtttg

SEQ ID NO: 463751 - DNA, 25 bp, Homo sapien
gtggaggaagacagcgggaaacaca

SEQ ID NO: 463752 - DNA, 25 bp, Homo sapien
tccctcttatatggcagcaaggcag

SEQ ID NO: 463753 - DNA, 25 bp, Homo sapien
gagggagcacgcagcaggttctggc

SEQ ID NO: 463754 - DNA, 25 bp, Homo sapien
cagcaaggcagtcgcgtaagggaca

SEQ ID NO: 463755 - DNA, 25 bp, Homo sapien
ggccgagcgccgtccctcttatatg

SEQ ID NO: 463756 - DNA, 25 bp, Homo sapien
tcttcgacgaagagaggcccgagga

SEQ ID NO: 463757 - DNA, 25 bp, Homo sapien
tgatcttcccacagctggctccgga

SEQ ID NO: 463758 - DNA, 25 bp, Homo sapien
tcttcccacagctggctccggagat

SEQ ID NO: 463759 - DNA, 25 bp, Homo sapien
ctgatcttcccacagctggctccgg

SEQ ID NO: 463760 - DNA, 25 bp, Homo sapien
atcttcccacagctggctccggaga

SEQ ID NO: 463761 - DNA, 25 bp, Homo sapien
ccgagatccgtccacgcctccggga

SEQ ID NO: 463762 - DNA, 25 bp, Homo sapien
gagatccgtccacgcctccgggacc

SEQ ID NO: 463763 - DNA, 25 bp, Homo sapien
gcctccgggacccccagacacacac

SEQ ID NO: 463764 - DNA, 25 bp, Homo sapien
cacgcctccgggacccccagacaca

SEQ ID NO: 463765 - DNA, 25 bp, Homo sapien
cgaagtcgcttcgaaggccttggtt

SEQ ID NO: 463766 - DNA, 25 bp, Homo sapien
tgattaggggccatggagcgaagtc

SEQ ID NO: 463767 - DNA, 25 bp, Homo sapien
ggagcgaagtcgcttcgaaggcctt

SEQ ID NO: 463768 - DNA, 25 bp, Homo sapien
ggccatggagcgaagtcgcttcgaa

SEQ ID NO: 463769 - DNA, 25 bp, Homo sapien
cagagccctaaacccgatgcaggga

SEQ ID NO: 463770 - DNA, 25 bp, Homo sapien
tttcacgtaagcgatgggttttgcg

SEQ ID NO: 463771 - DNA, 25 bp, Homo sapien
gggtcaagacgggttgccagtcaac

SEQ ID NO: 463772 - DNA, 25 bp, Homo sapien
tggtccagttggatgtgcacgtccg

SEQ ID NO: 463773 - DNA, 25 bp, Homo sapien
accccttgcacgtaggtgccctggg

SEQ ID NO: 463774 - DNA, 25 bp, Homo sapien
caatacgcaatgtcggtgaggaaca

SEQ ID NO: 463775 - DNA, 25 bp, Homo sapien
acactgggaccccttgcacgtaggt

SEQ ID NO: 463776 - DNA, 25 bp, Homo sapien
ttgaatgacttgtaaaaccgctgag

SEQ ID NO: 463777 - DNA, 25 bp, Homo sapien
gtttagcggttccagtgagtcatgc

SEQ ID NO: 463778 - DNA, 25 bp, Homo sapien
tcttggctgaaaaacgtgacgtgta

SEQ ID NO: 463779 - DNA, 25 bp, Homo sapien
tccaatcgccttgtacagaaagggt

SEQ ID NO: 463780 - DNA, 25 bp, Homo sapien
taagttgcgtactccaagttcaggg

SEQ ID NO: 463781 - DNA, 25 bp, Homo sapien
tatacagcaagaagatagtggcaca

SEQ ID NO: 463782 - DNA, 25 bp, Homo sapien
gaagtagcgtatcagcagaccacca

SEQ ID NO: 463783 - DNA, 25 bp, Homo sapien
tctggcttatggatgacagacccca

SEQ ID NO: 463784 - DNA, 25 bp, Homo sapien
ggcacatgtgcgtaggatgactgca

SEQ ID NO: 463785 - DNA, 25 bp, Homo sapien
tccctcttatatggcagcaaggcag

SEQ ID NO: 463786 - DNA, 25 bp, Homo sapien
cagcaaggcagtcgcgtaagggaca

SEQ ID NO: 463787 - DNA, 25 bp, Homo sapien
gagggagcacgcagcaggttctggc

SEQ ID NO: 463788 - DNA, 25 bp, Homo sapien
ggccgagcgccgtccctcttatatg

SEQ ID NO: 463789 - DNA, 25 bp, Homo sapien
tcttcgacgaagagaggcccgagga

SEQ ID NO: 463790 - DNA, 25 bp, Homo sapien
tgatcttcccacagctggctccgga

SEQ ID NO: 463791 - DNA, 25 bp, Homo sapien
tcttcccacagctggctccggagat

SEQ ID NO: 463792 - DNA, 25 bp, Homo sapien
atcttcccacagctggctccggaga

SEQ ID NO: 463793 - DNA, 25 bp, Homo sapien
ctgatcttcccacagctggctccgg

SEQ ID NO: 463794 - DNA, 25 bp, Homo sapien
ccgagatccgtccacgcctccggga

SEQ ID NO: 463795 - DNA, 25 bp, Homo sapien
gagatccgtccacgcctccgggacc

SEQ ID NO: 463796 - DNA, 25 bp, Homo sapien
gcctccgggacccccagacacacac

SEQ ID NO: 463797 - DNA, 25 bp, Homo sapien
cacgcctccgggacccccagacaca

SEQ ID NO: 463798 - DNA, 25 bp, Homo sapien
cgaagtcgcttcgaaggccttggtt

SEQ ID NO: 463799 - DNA, 25 bp, Homo sapien
tgattaggggccatggagcgaagtc

SEQ ID NO: 463800 - DNA, 25 bp, Homo sapien
ggagcgaagtcgcttcgaaggcctt

SEQ ID NO: 463801 - DNA, 25 bp, Homo sapien
ggccatggagcgaagtcgcttcgaa

SEQ ID NO: 463802 - DNA, 25 bp, Homo sapien
cagagccctaaacccgatgcaggga

SEQ ID NO: 463803 - DNA, 25 bp, Homo sapien
gggtcaagacgggttgccagtcaac

SEQ ID NO: 463804 - DNA, 25 bp, Homo sapien
tttcacgtaagcgatgggttttgcg

SEQ ID NO: 463805 - DNA, 25 bp, Homo sapien
tggtccagttggatgtgcacgtccg

SEQ ID NO: 463806 - DNA, 25 bp, Homo sapien
accccttgcacgtaggtgccctggg

SEQ ID NO: 463807 - DNA, 25 bp, Homo sapien
caatacgcaatgtcggtgaggaaca

SEQ ID NO: 463808 - DNA, 25 bp, Homo sapien
acactgggaccccttgcacgtaggt

SEQ ID NO: 463809 - DNA, 25 bp, Homo sapien
ttgaatgacttgtaaaaccgctgag

SEQ ID NO: 463810 - DNA, 25 bp, Homo sapien
tccaatcgccttgtacagaaagggt

SEQ ID NO: 463811 - DNA, 25 bp, Homo sapien
gtttagcggttccagtgagtcatgc

SEQ ID NO: 463812 - DNA, 25 bp, Homo sapien
tcttggctgaaaaacgtgacgtgta

SEQ ID NO: 463813 - DNA, 25 bp, Homo sapien
taagttgcgtactccaagttcaggg

SEQ ID NO: 463814 - DNA, 25 bp, Homo sapien
tatacagcaagaagatagtggcaca

SEQ ID NO: 463815 - DNA, 25 bp, Homo sapien
gaagtagcgtatcagcagaccacca

SEQ ID NO: 463816 - DNA, 25 bp, Homo sapien
tctggcttatggatgacagacccca

SEQ ID NO: 463817 - DNA, 25 bp, Homo sapien
ggcacatgtgcgtaggatgactgca

SEQ ID NO: 463818 - DNA, 25 bp, Homo sapien
tccctcttatatggcagcaaggcag

SEQ ID NO: 463819 - DNA, 25 bp, Homo sapien
cagcaaggcagtcgcgtaagggaca

SEQ ID NO: 463820 - DNA, 25 bp, Homo sapien
ggccgagcgccgtccctcttatatg

SEQ ID NO: 463821 - DNA, 25 bp, Homo sapien
gagggagcacgcagcaggttctggc

SEQ ID NO: 463822 - DNA, 25 bp, Homo sapien
tcttcgacgaagagaggcccgagga

SEQ ID NO: 463823 - DNA, 25 bp, Homo sapien
tcttcccacagctggctccggagat

SEQ ID NO: 463824 - DNA, 25 bp, Homo sapien
atcttcccacagctggctccggaga

SEQ ID NO: 463825 - DNA, 25 bp, Homo sapien
ctgatcttcccacagctggctccgg

SEQ ID NO: 463826 - DNA, 25 bp, Homo sapien
tgatcttcccacagctggctccgga

SEQ ID NO: 463827 - DNA, 25 bp, Homo sapien
ccgagatccgtccacgcctccggga

SEQ ID NO: 463828 - DNA, 25 bp, Homo sapien
gagatccgtccacgcctccgggacc

SEQ ID NO: 463829 - DNA, 25 bp, Homo sapien
cacgcctccgggacccccagacaca

SEQ ID NO: 463830 - DNA, 25 bp, Homo sapien
gcctccgggacccccagacacacac

SEQ ID NO: 463831 - DNA, 25 bp, Homo sapien
tgattaggggccatggagcgaagtc

SEQ ID NO: 463832 - DNA, 25 bp, Homo sapien
cgaagtcgcttcgaaggccttggtt

SEQ ID NO: 463833 - DNA, 25 bp, Homo sapien
ggagcgaagtcgcttcgaaggcctt

SEQ ID NO: 463834 - DNA, 25 bp, Homo sapien
ggccatggagcgaagtcgcttcgaa

SEQ ID NO: 463835 - DNA, 25 bp, Homo sapien
cagagccctaaacccgatgcaggga

SEQ ID NO: 463836 - DNA, 25 bp, Homo sapien
gggtcaagacgggttgccagtcaac

SEQ ID NO: 463837 - DNA, 25 bp, Homo sapien
tttcacgtaagcgatgggttttgcg

SEQ ID NO: 463838 - DNA, 25 bp, Homo sapien
tggtccagttggatgtgcacgtccg

SEQ ID NO: 463839 - DNA, 25 bp, Homo sapien
accccttgcacgtaggtgccctggg

SEQ ID NO: 463840 - DNA, 25 bp, Homo sapien
caatacgcaatgtcggtgaggaaca

SEQ ID NO: 463841 - DNA, 25 bp, Homo sapien
acactgggaccccttgcacgtaggt

SEQ ID NO: 463842 - DNA, 25 bp, Homo sapien
ttgaatgacttgtaaaaccgctgag

SEQ ID NO: 463843 - DNA, 25 bp, Homo sapien
tccaatcgccttgtacagaaagggt

SEQ ID NO: 463844 - DNA, 25 bp, Homo sapien
gtttagcggttccagtgagtcatgc

SEQ ID NO: 463845 - DNA, 25 bp, Homo sapien
tcttggctgaaaaacgtgacgtgta

SEQ ID NO: 463846 - DNA, 25 bp, Homo sapien
taagttgcgtactccaagttcaggg

SEQ ID NO: 463847 - DNA, 25 bp, Homo sapien
tatacagcaagaagatagtggcaca

SEQ ID NO: 463848 - DNA, 25 bp, Homo sapien
ggcacatgtgcgtaggatgactgca

SEQ ID NO: 463849 - DNA, 25 bp, Homo sapien
gaagtagcgtatcagcagaccacca

SEQ ID NO: 463850 - DNA, 25 bp, Homo sapien
tctggcttatggatgacagacccca

SEQ ID NO: 463851 - DNA, 25 bp, Homo sapien
tccctcttatatggcagcaaggcag

SEQ ID NO: 463852 - DNA, 25 bp, Homo sapien
gagggagcacgcagcaggttctggc

SEQ ID NO: 463853 - DNA, 25 bp, Homo sapien
ggccgagcgccgtccctcttatatg

SEQ ID NO: 463854 - DNA, 25 bp, Homo sapien
cagcaaggcagtcgcgtaagggaca

SEQ ID NO: 463855 - DNA, 25 bp, Homo sapien
tcttcgacgaagagaggcccgagga

SEQ ID NO: 463856 - DNA, 25 bp, Homo sapien
tgatcttcccacagctggctccgga

SEQ ID NO: 463857 - DNA, 25 bp, Homo sapien
tcttcccacagctggctccggagat

SEQ ID NO: 463858 - DNA, 25 bp, Homo sapien
atcttcccacagctggctccggaga

SEQ ID NO: 463859 - DNA, 25 bp, Homo sapien
ctgatcttcccacagctggctccgg

SEQ ID NO: 463860 - DNA, 25 bp, Homo sapien
ccgagatccgtccacgcctccggga

SEQ ID NO: 463861 - DNA, 25 bp, Homo sapien
gagatccgtccacgcctccgggacc

SEQ ID NO: 463862 - DNA, 25 bp, Homo sapien
gcctccgggacccccagacacacac

SEQ ID NO: 463863 - DNA, 25 bp, Homo sapien
cacgcctccgggacccccagacaca

SEQ ID NO: 463864 - DNA, 25 bp, Homo sapien
tgattaggggccatggagcgaagtc

SEQ ID NO: 463865 - DNA, 25 bp, Homo sapien
cgaagtcgcttcgaaggccttggtt

SEQ ID NO: 463866 - DNA, 25 bp, Homo sapien
ggagcgaagtcgcttcgaaggcctt

SEQ ID NO: 463867 - DNA, 25 bp, Homo sapien
ggccatggagcgaagtcgcttcgaa

SEQ ID NO: 463868 - DNA, 25 bp, Homo sapien
cagagccctaaacccgatgcaggga

SEQ ID NO: 463869 - DNA, 25 bp, Homo sapien
tttcacgtaagcgatgggttttgcg

SEQ ID NO: 463870 - DNA, 25 bp, Homo sapien
gggtcaagacgggttgccagtcaac

SEQ ID NO: 463871 - DNA, 25 bp, Homo sapien
tggtccagttggatgtgcacgtccg

SEQ ID NO: 463872 - DNA, 25 bp, Homo sapien
accccttgcacgtaggtgccctggg

SEQ ID NO: 463873 - DNA, 25 bp, Homo sapien
caatacgcaatgtcggtgaggaaca

SEQ ID NO: 463874 - DNA, 25 bp, Homo sapien
acactgggaccccttgcacgtaggt

SEQ ID NO: 463875 - DNA, 25 bp, Homo sapien
ttgaatgacttgtaaaaccgctgag

SEQ ID NO: 463876 - DNA, 25 bp, Homo sapien
tccaatcgccttgtacagaaagggt

SEQ ID NO: 463877 - DNA, 25 bp, Homo sapien
gtttagcggttccagtgagtcatgc

SEQ ID NO: 463878 - DNA, 25 bp, Homo sapien
tcttggctgaaaaacgtgacgtgta

SEQ ID NO: 463879 - DNA, 25 bp, Homo sapien
taagttgcgtactccaagttcaggg

SEQ ID NO: 463880 - DNA, 25 bp, Homo sapien
ggcacatgtgcgtaggatgactgca

SEQ ID NO: 463881 - DNA, 25 bp, Homo sapien
gaagtagcgtatcagcagaccacca

SEQ ID NO: 463882 - DNA, 25 bp, Homo sapien
tctggcttatggatgacagacccca

SEQ ID NO: 463883 - DNA, 25 bp, Homo sapien
tatacagcaagaagatagtggcaca

SEQ ID NO: 463884 - DNA, 25 bp, Homo sapien
tccctcttatatggcagcaaggcag

SEQ ID NO: 463885 - DNA, 25 bp, Homo sapien
gagggagcacgcagcaggttctggc

SEQ ID NO: 463886 - DNA, 25 bp, Homo sapien
ggccgagcgccgtccctcttatatg

SEQ ID NO: 463887 - DNA, 25 bp, Homo sapien
cagcaaggcagtcgcgtaagggaca

SEQ ID NO: 463888 - DNA, 25 bp, Homo sapien
tcttcgacgaagagaggcccgagga

SEQ ID NO: 463889 - DNA, 25 bp, Homo sapien
tgatcttcccacagctggctccgga

SEQ ID NO: 463890 - DNA, 25 bp, Homo sapien
tcttcccacagctggctccggagat

SEQ ID NO: 463891 - DNA, 25 bp, Homo sapien
atcttcccacagctggctccggaga

SEQ ID NO: 463892 - DNA, 25 bp, Homo sapien
ctgatcttcccacagctggctccgg

SEQ ID NO: 463893 - DNA, 25 bp, Homo sapien
ccgagatccgtccacgcctccggga

SEQ ID NO: 463894 - DNA, 25 bp, Homo sapien
gagatccgtccacgcctccgggacc

SEQ ID NO: 463895 - DNA, 25 bp, Homo sapien
gcctccgggacccccagacacacac

SEQ ID NO: 463896 - DNA, 25 bp, Homo sapien
cacgcctccgggacccccagacaca

SEQ ID NO: 463897 - DNA, 25 bp, Homo sapien
cgaagtcgcttcgaaggccttggtt

SEQ ID NO: 463898 - DNA, 25 bp, Homo sapien
tgattaggggccatggagcgaagtc

SEQ ID NO: 463899 - DNA, 25 bp, Homo sapien
ggagcgaagtcgcttcgaaggcctt

SEQ ID NO: 463900 - DNA, 25 bp, Homo sapien
ggccatggagcgaagtcgcttcgaa

SEQ ID NO: 463901 - DNA, 25 bp, Homo sapien
caatacgcaatgtcggtgaggaaca

SEQ ID NO: 463902 - DNA, 25 bp, Homo sapien
gggtcaagacgggttgccagtcaac

SEQ ID NO: 463903 - DNA, 25 bp, Homo sapien
tccagttggatgtgcacgtccggtg

SEQ ID NO: 463904 - DNA, 25 bp, Homo sapien
actgggaccccttgcacgtaggtgc

SEQ ID NO: 463905 - DNA, 25 bp, Homo sapien
tccaatcgccttgtacagaaagggt

SEQ ID NO: 463906 - DNA, 25 bp, Homo sapien
taagttgcgtactccaagttcaggg

SEQ ID NO: 463907 - DNA, 25 bp, Homo sapien
gtttagcggttccagtgagtcatgc

SEQ ID NO: 463908 - DNA, 25 bp, Homo sapien
tcttggctgaaaaacgtgacgtgta

SEQ ID NO: 463909 - DNA, 25 bp, Homo sapien
gcctggaccctatattcacttcagc

SEQ ID NO: 463910 - DNA, 25 bp, Homo sapien
tgcctggaccctatattcacttcag

SEQ ID NO: 463911 - DNA, 25 bp, Homo sapien
ctgcctggaccctatattcacttca

SEQ ID NO: 463912 - DNA, 25 bp, Homo sapien
ctggaccctatattcacttcagcat

SEQ ID NO: 463913 - DNA, 25 bp, Homo sapien
gaaacccataggctgatttggctgt

SEQ ID NO: 463914 - DNA, 25 bp, Homo sapien
ccataggctgatttggctgtggtct

SEQ ID NO: 463915 - DNA, 25 bp, Homo sapien
tgaaacccataggctgatttggctg

SEQ ID NO: 463916 - DNA, 25 bp, Homo sapien
aacccataggctgatttggctgtgg

SEQ ID NO: 463917 - DNA, 25 bp, Homo sapien
tgaaaatcactaccagaccttggcc

SEQ ID NO: 463918 - DNA, 25 bp, Homo sapien
gagcatagtatgacatgccccaggc

SEQ ID NO: 463919 - DNA, 25 bp, Homo sapien
ccctgggaggtaacatcacttctag

SEQ ID NO: 463920 - DNA, 25 bp, Homo sapien
caggcagcatggtctattgagaaac

SEQ ID NO: 463921 - DNA, 25 bp, Homo sapien
tataaagctatggttagacccgcag

SEQ ID NO: 463922 - DNA, 25 bp, Homo sapien
tgcattggccgtcgtaaagtcttgg

SEQ ID NO: 463923 - DNA, 25 bp, Homo sapien
tttgagtaatcatagctgtgctggc

SEQ ID NO: 463924 - DNA, 25 bp, Homo sapien
ggtggcatacacttgacagtaaggg

SEQ ID NO: 463925 - DNA, 25 bp, Homo sapien
tctcctacgaatttgaatttccaca

SEQ ID NO: 463926 - DNA, 25 bp, Homo sapien
tatactcttgatactctcctacgaa

SEQ ID NO: 463927 - DNA, 25 bp, Homo sapien
tgatactctcctacgaatttgaatt

SEQ ID NO: 463928 - DNA, 25 bp, Homo sapien
tatgtatactcttgatactctccta

SEQ ID NO: 463929 - DNA, 25 bp, Homo sapien
gtgtagacacccgaaggaatctgct

SEQ ID NO: 463930 - DNA, 25 bp, Homo sapien
tccagaggagtaaaccgttctgtct

SEQ ID NO: 463931 - DNA, 25 bp, Homo sapien
ttctgtcttgcggtattccaggtgc

SEQ ID NO: 463932 - DNA, 25 bp, Homo sapien
catgggggtgggttccattcagcaa

SEQ ID NO: 463933 - DNA, 25 bp, Homo sapien
cgagcaggcagctgacaatgctggc

SEQ ID NO: 463934 - DNA, 25 bp, Homo sapien
taatggacatctgtaagctttggtc

SEQ ID NO: 463935 - DNA, 25 bp, Homo sapien
gcgctctaattcttgccaggcctca

SEQ ID NO: 463936 - DNA, 25 bp, Homo sapien
agcctcttcccagcgggacgggctt

SEQ ID NO: 463937 - DNA, 25 bp, Homo sapien
tcaccactaagttccatcccttcac

SEQ ID NO: 463938 - DNA, 25 bp, Homo sapien
caggcctctgagaaatgagatatct

SEQ ID NO: 463939 - DNA, 25 bp, Homo sapien
gagaaatgagatatctgactctctc

SEQ ID NO: 463940 - DNA, 25 bp, Homo sapien
catcccttcaccaagcagttttgaa

SEQ ID NO: 463941 - DNA, 25 bp, Homo sapien
tttgaaattgagtgcaaaaacaatc

SEQ ID NO: 463942 - DNA, 25 bp, Homo sapien
aaattgagtgcaaaaacaatcctac

SEQ ID NO: 463943 - DNA, 25 bp, Homo sapien
tgaaattgagtgcaaaaacaatcct

SEQ ID NO: 463944 - DNA, 25 bp, Homo sapien
tacttttgaaattgagtgcaaaaac

SEQ ID NO: 463945 - DNA, 25 bp, Homo sapien
tctcatgctctgtgttagccatgca

SEQ ID NO: 463946 - DNA, 25 bp, Homo sapien
tgttcctgatcctctggagctgaac

SEQ ID NO: 463947 - DNA, 25 bp, Homo sapien
tgttagccatgcatgattccttgga

SEQ ID NO: 463948 - DNA, 25 bp, Homo sapien
gaagcaccatgttcctgatcctctg

SEQ ID NO: 463949 - DNA, 25 bp, Homo sapien
agtgtctgtctacggtcagctttac

SEQ ID NO: 463950 - DNA, 25 bp, Homo sapien
aatttaagcggcgtctggagtctgt

SEQ ID NO: 463951 - DNA, 25 bp, Homo sapien
tcagctttaccaagtgaagtggcat

SEQ ID NO: 463952 - DNA, 25 bp, Homo sapien
ggtgcatcgccaaccaatttaagcg

SEQ ID NO: 463953 - DNA, 25 bp, Homo sapien
tcttccaaactcatgagtcagataa

SEQ ID NO: 463954 - DNA, 25 bp, Homo sapien
tgtaaggccgacttgctccaaaggg

SEQ ID NO: 463955 - DNA, 25 bp, Homo sapien
gataactcattacttctaccatggg

SEQ ID NO: 463956 - DNA, 25 bp, Homo sapien
ctaccatgggaagatacaagtgaaa

SEQ ID NO: 463957 - DNA, 25 bp, Homo sapien
ctattacaggagatatgagagtata

SEQ ID NO: 463958 - DNA, 25 bp, Homo sapien
tatgagagtataaaaattgcattgc

SEQ ID NO: 463959 - DNA, 25 bp, Homo sapien
ggagatatgagagtataaaaattgc

SEQ ID NO: 463960 - DNA, 25 bp, Homo sapien
tataaaaattgcattgcatagtgca

SEQ ID NO: 463961 - DNA, 25 bp, Homo sapien
ttctgaatgtatcaccaaggcataa

SEQ ID NO: 463962 - DNA, 25 bp, Homo sapien
caaaggtgtagtttaagggcaatag

SEQ ID NO: 463963 - DNA, 25 bp, Homo sapien
tagttggatttatatgcttttggat

SEQ ID NO: 463964 - DNA, 25 bp, Homo sapien
tactaaggcctgtaatgcttccaaa

SEQ ID NO: 463965 - DNA, 25 bp, Homo sapien
tgtgtaacggtattctaaatttcta

SEQ ID NO: 463966 - DNA, 25 bp, Homo sapien
atgtgtaacggtattctaaatttct

SEQ ID NO: 463967 - DNA, 25 bp, Homo sapien
aacggtattctaaatttctaagctg

SEQ ID NO: 463968 - DNA, 25 bp, Homo sapien
aaggacacagcatcatctgtcatgt

SEQ ID NO: 463969 - DNA, 25 bp, Homo sapien
ctgttgaaggacacagcatcatctg

SEQ ID NO: 463970 - DNA, 25 bp, Homo sapien
ttgaaggacacagcatcatctgtca

SEQ ID NO: 463971 - DNA, 25 bp, Homo sapien
tgttgaaggacacagcatcatctgt

SEQ ID NO: 463972 - DNA, 25 bp, Homo sapien
tgccttagagatggctgtgaccacc

SEQ ID NO: 463973 - DNA, 25 bp, Homo sapien
ggtaatttccttggtggcatgctgc

SEQ ID NO: 463974 - DNA, 25 bp, Homo sapien
gcagcagcttgagccactcgatagg

SEQ ID NO: 463975 - DNA, 25 bp, Homo sapien
cgataggtgctcctgctgccttaga

SEQ ID NO: 463976 - DNA, 25 bp, Homo sapien
ctgggtggggaaatatctgatgaca

SEQ ID NO: 463977 - DNA, 25 bp, Homo sapien
tggggaaatatctgatgacattggc

SEQ ID NO: 463978 - DNA, 25 bp, Homo sapien
gggaaatatctgatgacattggcca

SEQ ID NO: 463979 - DNA, 25 bp, Homo sapien
ggtggggaaatatctgatgacattg

SEQ ID NO: 463980 - DNA, 25 bp, Homo sapien
catccactggtagattggtacagac

SEQ ID NO: 463981 - DNA, 25 bp, Homo sapien
catcgacatttagcagtgaacagtg

SEQ ID NO: 463982 - DNA, 25 bp, Homo sapien
catggtaaagccttggtgcaggccc

SEQ ID NO: 463983 - DNA, 25 bp, Homo sapien
gatgccaggttccttgcaacatagt

SEQ ID NO: 463984 - DNA, 25 bp, Homo sapien
gcaccactcatgccactgaaaacaa

SEQ ID NO: 463985 - DNA, 25 bp, Homo sapien
ttcagcagtcaaaaatgcctgtgta

SEQ ID NO: 463986 - DNA, 25 bp, Homo sapien
gccactgaaaacaatggaccatgaa

SEQ ID NO: 463987 - DNA, 25 bp, Homo sapien
actgaaaacaatggaccatgaaccc

SEQ ID NO: 463988 - DNA, 25 bp, Homo sapien
gagtgcaatagtcagtggaggtcat

SEQ ID NO: 463989 - DNA, 25 bp, Homo sapien
ctctcgagtgcaatagtcagtggag

SEQ ID NO: 463990 - DNA, 25 bp, Homo sapien
tcgagtgcaatagtcagtggaggtc

SEQ ID NO: 463991 - DNA, 25 bp, Homo sapien
tctcgagtgcaatagtcagtggagg

SEQ ID NO: 463992 - DNA, 25 bp, Homo sapien
gtaaacacttgaaggcaaagatcat

SEQ ID NO: 463993 - DNA, 25 bp, Homo sapien
tgtaaacacttgaaggcaaagatca

SEQ ID NO: 463994 - DNA, 25 bp, Homo sapien
ttgtaaacacttgaaggcaaagatc

SEQ ID NO: 463995 - DNA, 25 bp, Homo sapien
gttgtaaacacttgaaggcaaagat

SEQ ID NO: 463996 - DNA, 25 bp, Homo sapien
ccatcacctttcctaaagttgattt

SEQ ID NO: 463997 - DNA, 25 bp, Homo sapien
caaaccatcacctttcctaaagttg

SEQ ID NO: 463998 - DNA, 25 bp, Homo sapien
aaccatcacctttcctaaagttgat

SEQ ID NO: 463999 - DNA, 25 bp, Homo sapien
cttcaaaccatcacctttcctaaag

SEQ ID NO: 464000 - DNA, 25 bp, Homo sapien
ttgacttgacatccactgtggaacg

SEQ ID NO: 464001 - DNA, 25 bp, Homo sapien
ccgttgttatgggtttgaccagaca

SEQ ID NO: 464002 - DNA, 25 bp, Homo sapien
gtctccagacaatacttccagggta

SEQ ID NO: 464003 - DNA, 25 bp, Homo sapien
ggttcttctcactacatcttcccag

SEQ ID NO: 464004 - DNA, 25 bp, Homo sapien
gctaatcggccactggtagctcttt

SEQ ID NO: 464005 - DNA, 25 bp, Homo sapien
taagcccaaggaacaggtgagctga

SEQ ID NO: 464006 - DNA, 25 bp, Homo sapien
ctggtctactagtttagggttcagt

SEQ ID NO: 464007 - DNA, 25 bp, Homo sapien
tctactagtttagggttcagtaagc

SEQ ID NO: 464008 - DNA, 25 bp, Homo sapien
tggaaatgccagatgtactactgac

SEQ ID NO: 464009 - DNA, 25 bp, Homo sapien
tcataaacgcacttgtggagtgggg

SEQ ID NO: 464010 - DNA, 25 bp, Homo sapien
ttccttgacaactcagagagatcca

SEQ ID NO: 464011 - DNA, 25 bp, Homo sapien
gatgtactactgacaccaggctcaa

SEQ ID NO: 464012 - DNA, 25 bp, Homo sapien
cttcttgagggatcttcattttgtc

SEQ ID NO: 464013 - DNA, 25 bp, Homo sapien
cactacatgcattcaattctgagtc

SEQ ID NO: 464014 - DNA, 25 bp, Homo sapien
tcaacagcacctccacactacatgc

SEQ ID NO: 464015 - DNA, 25 bp, Homo sapien
tcttcttgagggatcttcattttgt

SEQ ID NO: 464016 - DNA, 25 bp, Homo sapien
cttggtgcattcatagacttttctg

SEQ ID NO: 464017 - DNA, 25 bp, Homo sapien
cttttctgtaaaacggtacatggct

SEQ ID NO: 464018 - DNA, 25 bp, Homo sapien
tagagatactcatggtgttccttca

SEQ ID NO: 464019 - DNA, 25 bp, Homo sapien
tgtaaaacggtacatggctttgcct

SEQ ID NO: 464020 - DNA, 25 bp, Homo sapien
aagcggcaagatagaaagtttttca

SEQ ID NO: 464021 - DNA, 25 bp, Homo sapien
ctaaagcggcaagatagaaagtttt

SEQ ID NO: 464022 - DNA, 25 bp, Homo sapien
cggcaagatagaaagtttttcatga

SEQ ID NO: 464023 - DNA, 25 bp, Homo sapien
caactaaagcggcaagatagaaagt

SEQ ID NO: 464024 - DNA, 25 bp, Homo sapien
ttgctttatagcatatctggttttc

SEQ ID NO: 464025 - DNA, 25 bp, Homo sapien
attgctttatagcatatctggtttt

SEQ ID NO: 464026 - DNA, 25 bp, Homo sapien
tgctttatagcatatctggttttca

SEQ ID NO: 464027 - DNA, 25 bp, Homo sapien
gctttatagcatatctggttttcat

SEQ ID NO: 464028 - DNA, 25 bp, Homo sapien
tctagcaattgtagatgatttgaca

SEQ ID NO: 464029 - DNA, 25 bp, Homo sapien
ttgtctgagcatgagcaggcagctc

SEQ ID NO: 464030 - DNA, 25 bp, Homo sapien
tttgacagtgttgtgagacctcctg

SEQ ID NO: 464031 - DNA, 25 bp, Homo sapien
gaagacaatgcagcagttctagcaa

SEQ ID NO: 464032 - DNA, 25 bp, Homo sapien
ggctctatttccataagttcatctc

SEQ ID NO: 464033 - DNA, 25 bp, Homo sapien
gcaaatactaaagtaaatgaattac

SEQ ID NO: 464034 - DNA, 25 bp, Homo sapien
cataagttcatctctgacttttagc

SEQ ID NO: 464035 - DNA, 25 bp, Homo sapien
tttagcttaaggtacagcaacaaaa

SEQ ID NO: 464036 - DNA, 25 bp, Homo sapien
taaggctctatttatgtgctgttct

SEQ ID NO: 464037 - DNA, 25 bp, Homo sapien
cattgcttaatcagaatgttattct

SEQ ID NO: 464038 - DNA, 25 bp, Homo sapien
cacttctactttcatgaagcttaga

SEQ ID NO: 464039 - DNA, 25 bp, Homo sapien
tctgaagcactgctaaggctctatt

SEQ ID NO: 464040 - DNA, 25 bp, Homo sapien
gatttggcaatgctcaggctgttgc

SEQ ID NO: 464041 - DNA, 25 bp, Homo sapien
tattcattgctcctgtgatttggca

SEQ ID NO: 464042 - DNA, 25 bp, Homo sapien
tgagtggcccggataactctattca

SEQ ID NO: 464043 - DNA, 25 bp, Homo sapien
ctcattgtgagtggcccggataact

SEQ ID NO: 464044 - DNA, 25 bp, Homo sapien
atattgtccaggtattcttcttcac

SEQ ID NO: 464045 - DNA, 25 bp, Homo sapien
catacggataatattgtccaggtat

SEQ ID NO: 464046 - DNA, 25 bp, Homo sapien
gagtagttgactatgtgttttaatg

SEQ ID NO: 464047 - DNA, 25 bp, Homo sapien
taatgatgtacagaggcgaaaggtc

SEQ ID NO: 464048 - DNA, 25 bp, Homo sapien
gatttgataacactcgaggaacacc

SEQ ID NO: 464049 - DNA, 25 bp, Homo sapien
tattacttttattgaccacgaggag

SEQ ID NO: 464050 - DNA, 25 bp, Homo sapien
taacactcgaggaacaccgaaagaa

SEQ ID NO: 464051 - DNA, 25 bp, Homo sapien
tgaccacgaggaggcactgatttga

SEQ ID NO: 464052 - DNA, 25 bp, Homo sapien
cacagcagtactaattcataggcag

SEQ ID NO: 464053 - DNA, 25 bp, Homo sapien
cattaagaaacaaccactgttgagc

SEQ ID NO: 464054 - DNA, 25 bp, Homo sapien
tgagcaaagttgataggcagtaagg

SEQ ID NO: 464055 - DNA, 25 bp, Homo sapien
gcgccataatgtgaataccagttgt

SEQ ID NO: 464056 - DNA, 25 bp, Homo sapien
tttctgcccgcgctggtacgaacat

SEQ ID NO: 464057 - DNA, 25 bp, Homo sapien
tgaattcgagggcgctcgtgagccc

SEQ ID NO: 464058 - DNA, 25 bp, Homo sapien
tgtgtgaatgcgcttccacgggctg

SEQ ID NO: 464059 - DNA, 25 bp, Homo sapien
ctgagatgtgtatttcggtgagtgt

SEQ ID NO: 464060 - DNA, 25 bp, Homo sapien
tactgattccctgtcagccaatccg

SEQ ID NO: 464061 - DNA, 25 bp, Homo sapien
gccgccgcttaaacattgatactga

SEQ ID NO: 464062 - DNA, 25 bp, Homo sapien
ttctcggcccgcgtccaatgggagg

SEQ ID NO: 464063 - DNA, 25 bp, Homo sapien
gtcagccaatccgagcgaggagcaa

SEQ ID NO: 464064 - DNA, 25 bp, Homo sapien
agtctgagaaagatatgcggatttc

SEQ ID NO: 464065 - DNA, 25 bp, Homo sapien
aataaatccatctccgcaagcaaag

SEQ ID NO: 464066 - DNA, 25 bp, Homo sapien
aacagttggagtagcgtctccccag

SEQ ID NO: 464067 - DNA, 25 bp, Homo sapien
gcaagcaaagcagcggatgaaagga

SEQ ID NO: 464068 - DNA, 25 bp, Homo sapien
cattatttcgggttctggaggcgcc

SEQ ID NO: 464069 - DNA, 25 bp, Homo sapien
aaatgcaggtgttccgatctgccgg

SEQ ID NO: 464070 - DNA, 25 bp, Homo sapien
ggcgcctcgacatacgggaatgaca

SEQ ID NO: 464071 - DNA, 25 bp, Homo sapien
tcagaagcagcggaacgaatcgtat

SEQ ID NO: 464072 - DNA, 25 bp, Homo sapien
ctccctctcttcctcggaaaaggct

SEQ ID NO: 464073 - DNA, 25 bp, Homo sapien
tctcttcctcggaaaaggctctccc

SEQ ID NO: 464074 - DNA, 25 bp, Homo sapien
ggctctcccccgaaatcaagaaagc

SEQ ID NO: 464075 - DNA, 25 bp, Homo sapien
aggctctcccccgaaatcaagaaag

SEQ ID NO: 464076 - DNA, 25 bp, Homo sapien
gggaggaaatgcagcgtaaagaact

SEQ ID NO: 464077 - DNA, 25 bp, Homo sapien
tagtgtcccgatttgtagtttcctc

SEQ ID NO: 464078 - DNA, 25 bp, Homo sapien
gcagcgtaaagaactagtgtcccga

SEQ ID NO: 464079 - DNA, 25 bp, Homo sapien
tgtcccgatttgtagtttcctctcc

SEQ ID NO: 464080 - DNA, 25 bp, Homo sapien
gaggtgtgtctctaggcagatccga

SEQ ID NO: 464081 - DNA, 25 bp, Homo sapien
tatattttgaagcttccccagcgca

SEQ ID NO: 464082 - DNA, 25 bp, Homo sapien
tgaaatgtctgcttgctgcgcgggc

SEQ ID NO: 464083 - DNA, 25 bp, Homo sapien
tcaaacttgagcgatgaggcaggcg

SEQ ID NO: 464084 - DNA, 25 bp, Homo sapien
cggtggtctctccttattctgctca

SEQ ID NO: 464085 - DNA, 25 bp, Homo sapien
cgagctgcggcacccggtggtctct

SEQ ID NO: 464086 - DNA, 25 bp, Homo sapien
cacccggtggtctctccttattctg

SEQ ID NO: 464087 - DNA, 25 bp, Homo sapien
tgcggcacccggtggtctctcctta

SEQ ID NO: 464088 - DNA, 25 bp, Homo sapien
ctatgggtccttttttccctctgca

SEQ ID NO: 464089 - DNA, 25 bp, Homo sapien
tatgggtccttttttccctctgcac

SEQ ID NO: 464090 - DNA, 25 bp, Homo sapien
gcgcagcgtgcgcgcgcgacgcgag

SEQ ID NO: 464091 - DNA, 25 bp, Homo sapien
tgcgcgcgcgacgcgagccacaagt

SEQ ID NO: 464092 - DNA, 25 bp, Homo sapien
cgtgcgcgcgcgacgcgagccacaa

SEQ ID NO: 464093 - DNA, 25 bp, Homo sapien
cctggcgcagcgtgcgcgcgcgacg

SEQ ID NO: 464094 - DNA, 25 bp, Homo sapien
taaggtgggggcaggagcaatcgga

SEQ ID NO: 464095 - DNA, 25 bp, Homo sapien
gtaaggtgggggcaggagcaatcgg

SEQ ID NO: 464096 - DNA, 25 bp, Homo sapien
tgtaaggtgggggcaggagcaatcg

SEQ ID NO: 464097 - DNA, 25 bp, Homo sapien
ctgtaaggtgggggcaggagcaatc

SEQ ID NO: 464098 - DNA, 25 bp, Homo sapien
cacgttgatctgtacggtggcggaa

SEQ ID NO: 464099 - DNA, 25 bp, Homo sapien
tccatttcgatctggtccgaggaga

SEQ ID NO: 464100 - DNA, 25 bp, Homo sapien
ttggcgaacacctcgagggacagct

SEQ ID NO: 464101 - DNA, 25 bp, Homo sapien
tccggcacggagtagttgaggttct

SEQ ID NO: 464102 - DNA, 25 bp, Homo sapien
ttccaccaagtaggatggcgcctcg

SEQ ID NO: 464103 - DNA, 25 bp, Homo sapien
accgggctgttgtcgttggagtcaa

SEQ ID NO: 464104 - DNA, 25 bp, Homo sapien
ttgcccttcacacggattaggccgg

SEQ ID NO: 464105 - DNA, 25 bp, Homo sapien
gagtagagcacttcaccattgggac

SEQ ID NO: 464106 - DNA, 25 bp, Homo sapien
ccgacactgcagctgtccgttcttg

SEQ ID NO: 464107 - DNA, 25 bp, Homo sapien
gcagctgtccgttcttgccagagtc

SEQ ID NO: 464108 - DNA, 25 bp, Homo sapien
ttcttgccagagtcccggtcagtga

SEQ ID NO: 464109 - DNA, 25 bp, Homo sapien
tcttgccagagtcccggtcagtgac

SEQ ID NO: 464110 - DNA, 25 bp, Homo sapien
cgccgcccgtccctcctccgcctag

SEQ ID NO: 464111 - DNA, 25 bp, Homo sapien
caaacaggtggtcgtcgttgccgtc

SEQ ID NO: 464112 - DNA, 25 bp, Homo sapien
tggacgggtcgatctcaaacaggtg

SEQ ID NO: 464113 - DNA, 25 bp, Homo sapien
tagagccctttggtgaaccgaggcg

SEQ ID NO: 464114 - DNA, 25 bp, Homo sapien
tgcacctgaagcacgtagagccctt

SEQ ID NO: 464115 - DNA, 25 bp, Homo sapien
tggaggccggtttgagatacatcac

SEQ ID NO: 464116 - DNA, 25 bp, Homo sapien
tgcccctgagggacagtcaggttgt

SEQ ID NO: 464117 - DNA, 25 bp, Homo sapien
gtggcagcccgcgtgcccctgaggg

SEQ ID NO: 464118 - DNA, 25 bp, Homo sapien
caggttgttggaggccggtttgaga

SEQ ID NO: 464119 - DNA, 25 bp, Homo sapien
tgcattagtcccttgtccggtgaag

SEQ ID NO: 464120 - DNA, 25 bp, Homo sapien
gggtctcgcttgcattagtcccttg

SEQ ID NO: 464121 - DNA, 25 bp, Homo sapien
ctgaattatggacatccgagtggca

SEQ ID NO: 464122 - DNA, 25 bp, Homo sapien
aattatggacatccgagtggcaggg

SEQ ID NO: 464123 - DNA, 25 bp, Homo sapien
caaagtgcttcagagtataactcac

SEQ ID NO: 464124 - DNA, 25 bp, Homo sapien
tgcagagcctgcatgtattcaaact

SEQ ID NO: 464125 - DNA, 25 bp, Homo sapien
tagttactagtcattatgcagagcc

SEQ ID NO: 464126 - DNA, 25 bp, Homo sapien
gaatatgatgtatacacagtgtcaa

SEQ ID NO: 464127 - DNA, 25 bp, Homo sapien
gatcatgatcttgggaacttatctg

SEQ ID NO: 464128 - DNA, 25 bp, Homo sapien
ggcatacagcgggtaatgttgctat

SEQ ID NO: 464129 - DNA, 25 bp, Homo sapien
tgggaagtctcccatcagtgagaag

SEQ ID NO: 464130 - DNA, 25 bp, Homo sapien
gaaaaggccatgtacatctatcaaa

SEQ ID NO: 464131 - DNA, 25 bp, Homo sapien
gcttctgcttagtcacagtagggat

SEQ ID NO: 464132 - DNA, 25 bp, Homo sapien
tccagaagaccaaagatcgcagtat

SEQ ID NO: 464133 - DNA, 25 bp, Homo sapien
caggtctgacgaagtttaaaagtgc

SEQ ID NO: 464134 - DNA, 25 bp, Homo sapien
cattgtcaaagctagtggtgaaagc

SEQ ID NO: 464135 - DNA, 25 bp, Homo sapien
gatgaagtgaaaaaggtggattcat

SEQ ID NO: 464136 - DNA, 25 bp, Homo sapien
gcaaagatgaagtgaaaaaggtgga

SEQ ID NO: 464137 - DNA, 25 bp, Homo sapien
aagatgaagtgaaaaaggtggattc

SEQ ID NO: 464138 - DNA, 25 bp, Homo sapien
gtcaaagtacatgcaaagatgaagt

SEQ ID NO: 464139 - DNA, 25 bp, Homo sapien
ttgcagctgactcagtgacaaagct

SEQ ID NO: 464140 - DNA, 25 bp, Homo sapien
cagctgactcagtgacaaagcttct

SEQ ID NO: 464141 - DNA, 25 bp, Homo sapien
tgcagctgactcagtgacaaagctt

SEQ ID NO: 464142 - DNA, 25 bp, Homo sapien
gctgactcagtgacaaagcttctcc

SEQ ID NO: 464143 - DNA, 25 bp, Homo sapien
gttaaagtaaacaatgagcctgtca

SEQ ID NO: 464144 - DNA, 25 bp, Homo sapien
ctgttaaagtaaacaatgagcctgt

SEQ ID NO: 464145 - DNA, 25 bp, Homo sapien
ttaaagtaaacaatgagcctgtcat

SEQ ID NO: 464146 - DNA, 25 bp, Homo sapien
tgttaaagtaaacaatgagcctgtc

SEQ ID NO: 464147 - DNA, 25 bp, Homo sapien
ttgggctctgcgggaaaattgtctg

SEQ ID NO: 464148 - DNA, 25 bp, Homo sapien
ctttgaacaaactgctgcctgctgc

SEQ ID NO: 464149 - DNA, 25 bp, Homo sapien
tgcctgctgcccatgtaattgggct

SEQ ID NO: 464150 - DNA, 25 bp, Homo sapien
aattgggctctgcgggaaaattgtc

SEQ ID NO: 464151 - DNA, 25 bp, Homo sapien
ctagtttgaatctgaagtgtagtct

SEQ ID NO: 464152 - DNA, 25 bp, Homo sapien
tactagtttgaatctgaagtgtagt

SEQ ID NO: 464153 - DNA, 25 bp, Homo sapien
ctctactagtttgaatctgaagtgt

SEQ ID NO: 464154 - DNA, 25 bp, Homo sapien
tctactagtttgaatctgaagtgta

SEQ ID NO: 464155 - DNA, 25 bp, Homo sapien
atataaagaaaaagaagagaaagtg

SEQ ID NO: 464156 - DNA, 25 bp, Homo sapien
catataaagaaaaagaagagaaagt

SEQ ID NO: 464157 - DNA, 25 bp, Homo sapien
ttctgggtccttaaacgtggagcta

SEQ ID NO: 464158 - DNA, 25 bp, Homo sapien
catcttgagtgcctccctaacagac

SEQ ID NO: 464159 - DNA, 25 bp, Homo sapien
gcttttagttgaagtagttttcatc

SEQ ID NO: 464160 - DNA, 25 bp, Homo sapien
gacatgtcacagcaggagcctttgt

SEQ ID NO: 464161 - DNA, 25 bp, Homo sapien
cttgttcaagtggttggcttttagt

SEQ ID NO: 464162 - DNA, 25 bp, Homo sapien
ttctgtctccgatctctgaccataa

SEQ ID NO: 464163 - DNA, 25 bp, Homo sapien
tgtctccgatctctgaccataattc

SEQ ID NO: 464164 - DNA, 25 bp, Homo sapien
tctccgatctctgaccataattcct

SEQ ID NO: 464165 - DNA, 25 bp, Homo sapien
tctgtctccgatctctgaccataat

SEQ ID NO: 464166 - DNA, 25 bp, Homo sapien
tatattgatactcagttttcttgaa

SEQ ID NO: 464167 - DNA, 25 bp, Homo sapien
ccagctccctctccattacttgcta

SEQ ID NO: 464168 - DNA, 25 bp, Homo sapien
tccctctccattacttgctacgttt

SEQ ID NO: 464169 - DNA, 25 bp, Homo sapien
tggatcaactgcctcagtatattga

SEQ ID NO: 464170 - DNA, 25 bp, Homo sapien
tttcctggatttcatgtagaagtaa

SEQ ID NO: 464171 - DNA, 25 bp, Homo sapien
ggatttcatgtagaagtaatctgat

SEQ ID NO: 464172 - DNA, 25 bp, Homo sapien
atttcctggatttcatgtagaagta

SEQ ID NO: 464173 - DNA, 25 bp, Homo sapien
tcatgtagaagtaatctgatgcttt

SEQ ID NO: 464174 - DNA, 25 bp, Homo sapien
tgtgtagggtgaggatagcaaagga

SEQ ID NO: 464175 - DNA, 25 bp, Homo sapien
ctacttgtgatggtgtgtagggtga

SEQ ID NO: 464176 - DNA, 25 bp, Homo sapien
tcaacagactgaagtctacttgtga

SEQ ID NO: 464177 - DNA, 25 bp, Homo sapien
ctggaggaagcagatcaacagactg

SEQ ID NO: 464178 - DNA, 25 bp, Homo sapien
gttctgcacaggtgtacatgtgcct

SEQ ID NO: 464179 - DNA, 25 bp, Homo sapien
cagttttcctggtgctcaatcacaa

SEQ ID NO: 464180 - DNA, 25 bp, Homo sapien
tgctcaatcacaacactagctctgt

SEQ ID NO: 464181 - DNA, 25 bp, Homo sapien
tgtgtttcttgttggtaaatggcca

SEQ ID NO: 464182 - DNA, 25 bp, Homo sapien
cggcagatgcttggaagtaaaggca

SEQ ID NO: 464183 - DNA, 25 bp, Homo sapien
gatgcttggaagtaaaggcacagct

SEQ ID NO: 464184 - DNA, 25 bp, Homo sapien
cttggaagtaaaggcacagctaaat

SEQ ID NO: 464185 - DNA, 25 bp, Homo sapien
gcagatgcttggaagtaaaggcaca

SEQ ID NO: 464186 - DNA, 25 bp, Homo sapien
tacggtctgcacaagtgttctgtag

SEQ ID NO: 464187 - DNA, 25 bp, Homo sapien
gctttaatggtataacagcagcttg

SEQ ID NO: 464188 - DNA, 25 bp, Homo sapien
gaatctaagctaagtacccatcaca

SEQ ID NO: 464189 - DNA, 25 bp, Homo sapien
ggctggcagttcatgctcagtaata

SEQ ID NO: 464190 - DNA, 25 bp, Homo sapien
ctgtgcaattaacacactcttctgg

SEQ ID NO: 464191 - DNA, 25 bp, Homo sapien
tgtgcaattaacacactcttctggt

SEQ ID NO: 464192 - DNA, 25 bp, Homo sapien
gtgcaattaacacactcttctggtt

SEQ ID NO: 464193 - DNA, 25 bp, Homo sapien
tgtcagaatgaccaagcactcggca

SEQ ID NO: 464194 - DNA, 25 bp, Homo sapien
ctgtcagaatgaccaagcactcggc

SEQ ID NO: 464195 - DNA, 25 bp, Homo sapien
tcagaatgaccaagcactcggcatt

SEQ ID NO: 464196 - DNA, 25 bp, Homo sapien
gaatgaccaagcactcggcattcat

SEQ ID NO: 464197 - DNA, 25 bp, Homo sapien
attagcttcaactgtaggtacaaag

SEQ ID NO: 464198 - DNA, 25 bp, Homo sapien
cacagtttcgtaagtctcagtctca

SEQ ID NO: 464199 - DNA, 25 bp, Homo sapien
cagtgggattcacagtttcgtaagt

SEQ ID NO: 464200 - DNA, 25 bp, Homo sapien
caaagagatttgtgcggtaatctgc

SEQ ID NO: 464201 - DNA, 25 bp, Homo sapien
aataaggtttaacgttggcaatgag

SEQ ID NO: 464202 - DNA, 25 bp, Homo sapien
cgttggcaatgagaatagtgtgctc

SEQ ID NO: 464203 - DNA, 25 bp, Homo sapien
taacgttggcaatgagaatagtgtg

SEQ ID NO: 464204 - DNA, 25 bp, Homo sapien
caatgagaatagtgtgctctcgctt

SEQ ID NO: 464205 - DNA, 25 bp, Homo sapien
tggaggagagggctcagggcacgtt

SEQ ID NO: 464206 - DNA, 25 bp, Homo sapien
gaggagagggctcagggcacgtttg

SEQ ID NO: 464207 - DNA, 25 bp, Homo sapien
cttggaggagagggctcagggcacg

SEQ ID NO: 464208 - DNA, 25 bp, Homo sapien
aggagagggctcagggcacgtttgg

SEQ ID NO: 464209 - DNA, 25 bp, Homo sapien
aaagacccttgccatctgatcggaa

SEQ ID NO: 464210 - DNA, 25 bp, Homo sapien
tctcttggttgcttactaggtgaca

SEQ ID NO: 464211 - DNA, 25 bp, Homo sapien
tccccggcagtcttgcaaaagctta

SEQ ID NO: 464212 - DNA, 25 bp, Homo sapien
ccttttgttgaggtgcaaggctcga

SEQ ID NO: 464213 - DNA, 25 bp, Homo sapien
taaaatgggttatcaccaggaggga

SEQ ID NO: 464214 - DNA, 25 bp, Homo sapien
tagagttcgacagctaccaaggcaa

SEQ ID NO: 464215 - DNA, 25 bp, Homo sapien
gatgactgctagaaatccaccacag

SEQ ID NO: 464216 - DNA, 25 bp, Homo sapien
tcagcataaatcacggaggacagtc

SEQ ID NO: 464217 - DNA, 25 bp, Homo sapien
gaaactcgctaaatgtcacaaggaa

SEQ ID NO: 464218 - DNA, 25 bp, Homo sapien
tataaaagcttagagtcctgactgc

SEQ ID NO: 464219 - DNA, 25 bp, Homo sapien
taaatcaacctgtagtctcctggca

SEQ ID NO: 464220 - DNA, 25 bp, Homo sapien
cagttttgcaaacgaggtacagtct

SEQ ID NO: 464221 - DNA, 25 bp, Homo sapien
aatagccaacctgcaaaacactggg

SEQ ID NO: 464222 - DNA, 25 bp, Homo sapien
tgattttggcatctcataggcttcc

SEQ ID NO: 464223 - DNA, 25 bp, Homo sapien
taacctatggagtagtgagccaatc

SEQ ID NO: 464224 - DNA, 25 bp, Homo sapien
cacttggtgcagctaagaactttat

SEQ ID NO: 464225 - DNA, 25 bp, Homo sapien
gatatgcacagggaagtgtgtaaca

SEQ ID NO: 464226 - DNA, 25 bp, Homo sapien
tgcacagggaagtgtgtaacacatc

SEQ ID NO: 464227 - DNA, 25 bp, Homo sapien
cttctgggttaatgaattcaaggga

SEQ ID NO: 464228 - DNA, 25 bp, Homo sapien
tgtgtaacacatcccttctgggtta

SEQ ID NO: 464229 - DNA, 25 bp, Homo sapien
cttgtccaacaagatagtaactctg

SEQ ID NO: 464230 - DNA, 25 bp, Homo sapien
tctggagtttcaggcatttactagg

SEQ ID NO: 464231 - DNA, 25 bp, Homo sapien
gaacgtttcccctgcggatgagaga

SEQ ID NO: 464232 - DNA, 25 bp, Homo sapien
tgaggcatcatagcccaaggcaaac

SEQ ID NO: 464233 - DNA, 25 bp, Homo sapien
taattgcagcatagccagacaggga

SEQ ID NO: 464234 - DNA, 25 bp, Homo sapien
tcatttgaaagactcagtacgccct

SEQ ID NO: 464235 - DNA, 25 bp, Homo sapien
ggatccttgtatagcacctagtgca

SEQ ID NO: 464236 - DNA, 25 bp, Homo sapien
cgagtaagcctgtgatatatgtccc

SEQ ID NO: 464237 - DNA, 25 bp, Homo sapien
aaatgaagaacgttaaaagaagctg

SEQ ID NO: 464238 - DNA, 25 bp, Homo sapien
cattcctctcaaagtgagatgtttc

SEQ ID NO: 464239 - DNA, 25 bp, Homo sapien
aatgttatgaagtaatttgaattac

SEQ ID NO: 464240 - DNA, 25 bp, Homo sapien
ctatttagagttaatgaacggtaag

SEQ ID NO: 464241 - DNA, 25 bp, Homo sapien
aaatggagtgtggaacaaataggaa

SEQ ID NO: 464242 - DNA, 25 bp, Homo sapien
tagagcccataccaccaatgttgtg

SEQ ID NO: 464243 - DNA, 25 bp, Homo sapien
tacataatcgtttctaagaagccga

SEQ ID NO: 464244 - DNA, 25 bp, Homo sapien
tacagtctacataattgcctccagg

SEQ ID NO: 464245 - DNA, 25 bp, Homo sapien
tccaggtgaaaatataccaagctca

SEQ ID NO: 464246 - DNA, 25 bp, Homo sapien
taaaacgcaacagaaggctagacct

SEQ ID NO: 464247 - DNA, 25 bp, Homo sapien
tactcattctacagcattcagggat

SEQ ID NO: 464248 - DNA, 25 bp, Homo sapien
cacactaaggtgacttcagatggag

SEQ ID NO: 464249 - DNA, 25 bp, Homo sapien
tagtatttggcctctacagtctccc

SEQ ID NO: 464250 - DNA, 25 bp, Homo sapien
cagtattgtcaagcgaggatgccta

SEQ ID NO: 464251 - DNA, 25 bp, Homo sapien
acaagtacttggacgtgcgcgtgca

SEQ ID NO: 464252 - DNA, 25 bp, Homo sapien
tgttccatctaagagagggcaggtg

SEQ ID NO: 464253 - DNA, 25 bp, Homo sapien
gaaagctggtacactcatacacgaa

SEQ ID NO: 464254 - DNA, 25 bp, Homo sapien
aaacaaagcagctgatatgtaattt

SEQ ID NO: 464255 - DNA, 25 bp, Homo sapien
tggagccactgaatgacagaggatt

SEQ ID NO: 464256 - DNA, 25 bp, Homo sapien
tgatgtgctgctgtcttaacgtact

SEQ ID NO: 464257 - DNA, 25 bp, Homo sapien
ttaacgtactgaccttgaactgcgc

SEQ ID NO: 464258 - DNA, 25 bp, Homo sapien
tagtgtcggccttctctaatcccac

SEQ ID NO: 464259 - DNA, 25 bp, Homo sapien
gagccaagatcatcgtctggtgatg

SEQ ID NO: 464260 - DNA, 25 bp, Homo sapien
attaagaacatatcatggctgggca

SEQ ID NO: 464261 - DNA, 25 bp, Homo sapien
ggtgatgacgatgcaccactgcacc

SEQ ID NO: 464262 - DNA, 25 bp, Homo sapien
tattgttggtacaactggatatcta

SEQ ID NO: 464263 - DNA, 25 bp, Homo sapien
aggacagtctctgtaataaatattg

SEQ ID NO: 464264 - DNA, 25 bp, Homo sapien
catgtacagtaccatactgtcagaa

SEQ ID NO: 464265 - DNA, 25 bp, Homo sapien
gatatcagtctcttacctttcacca

SEQ ID NO: 464266 - DNA, 25 bp, Homo sapien
ccaacaagggctctgttacagctat

SEQ ID NO: 464267 - DNA, 25 bp, Homo sapien
aattggaagaaacctacatgctcgt

SEQ ID NO: 464268 - DNA, 25 bp, Homo sapien
gacagcttataattcaaggacccaa

SEQ ID NO: 464269 - DNA, 25 bp, Homo sapien
tgagcagatacaccaaaggcagttt

SEQ ID NO: 464270 - DNA, 25 bp, Homo sapien
tgctgtaactttgcagtacattttg

SEQ ID NO: 464271 - DNA, 25 bp, Homo sapien
gttgctgtaactttgcagtacattt

SEQ ID NO: 464272 - DNA, 25 bp, Homo sapien
ttgctgtaactttgcagtacatttt

SEQ ID NO: 464273 - DNA, 25 bp, Homo sapien
ttcactgtctcttattaaactgtac

SEQ ID NO: 464274 - DNA, 25 bp, Homo sapien
aatttcactgtctcttattaaactg

SEQ ID NO: 464275 - DNA, 25 bp, Homo sapien
tttcactgtctcttattaaactgta

SEQ ID NO: 464276 - DNA, 25 bp, Homo sapien
atttcactgtctcttattaaactgt

SEQ ID NO: 464277 - DNA, 25 bp, Homo sapien
tttatcttccatagagtagggaaag

SEQ ID NO: 464278 - DNA, 25 bp, Homo sapien
gtttttatcttccatagagtaggga

SEQ ID NO: 464279 - DNA, 25 bp, Homo sapien
tttttatcttccatagagtagggaa

SEQ ID NO: 464280 - DNA, 25 bp, Homo sapien
tatcttccatagagtagggaaagac

SEQ ID NO: 464281 - DNA, 25 bp, Homo sapien
tggcacaggcgatgtgtaggaaaaa

SEQ ID NO: 464282 - DNA, 25 bp, Homo sapien
tcatgtctggtgcttcaagtggcac

SEQ ID NO: 464283 - DNA, 25 bp, Homo sapien
ccatattggttttcttcaatgatta

SEQ ID NO: 464284 - DNA, 25 bp, Homo sapien
cagagctctagatatagaagtgcca

SEQ ID NO: 464285 - DNA, 25 bp, Homo sapien
tgtgttctgagatttgccaacagat

SEQ ID NO: 464286 - DNA, 25 bp, Homo sapien
tctgagatttgccaacagatgaact

SEQ ID NO: 464287 - DNA, 25 bp, Homo sapien
gatttgccaacagatgaactagcct

SEQ ID NO: 464288 - DNA, 25 bp, Homo sapien
caacagatgaactagccttgcaatc

SEQ ID NO: 464289 - DNA, 25 bp, Homo sapien
ccttttaaagtagatcttcatcatc

SEQ ID NO: 464290 - DNA, 25 bp, Homo sapien
ttcacacagccagcgcaccttttaa

SEQ ID NO: 464291 - DNA, 25 bp, Homo sapien
catcatctccaagatactaaatgca

SEQ ID NO: 464292 - DNA, 25 bp, Homo sapien
gatactaaatgcaccattctctatc

SEQ ID NO: 464293 - DNA, 25 bp, Homo sapien
agaacacgactaattcctgaaattc

SEQ ID NO: 464294 - DNA, 25 bp, Homo sapien
tccaaaagaacacgactaattcctg

SEQ ID NO: 464295 - DNA, 25 bp, Homo sapien
tttagaattgactgtttcactttgc

SEQ ID NO: 464296 - DNA, 25 bp, Homo sapien
ttgtctccaaaagaacacgactaat

SEQ ID NO: 464297 - DNA, 25 bp, Homo sapien
tggccatctgcaattgatgcatagc

SEQ ID NO: 464298 - DNA, 25 bp, Homo sapien
tctgttcatgcccattttgctggaa

SEQ ID NO: 464299 - DNA, 25 bp, Homo sapien
tatttggcaagcagtggctctggcc

SEQ ID NO: 464300 - DNA, 25 bp, Homo sapien
gttttgttaatcactcccaacggca

SEQ ID NO: 464301 - DNA, 25 bp, Homo sapien
tatccatgtacagttgaacaaaaac

SEQ ID NO: 464302 - DNA, 25 bp, Homo sapien
aacaacaagtgttacaagaagatcg

SEQ ID NO: 464303 - DNA, 25 bp, Homo sapien
caccaagtccttcgaaataatttag

SEQ ID NO: 464304 - DNA, 25 bp, Homo sapien
gcagattaaacatagagaactttat

SEQ ID NO: 464305 - DNA, 25 bp, Homo sapien
tgtgtcccaaggacttctataactg

SEQ ID NO: 464306 - DNA, 25 bp, Homo sapien
gacttctataactgtcctcccttct

SEQ ID NO: 464307 - DNA, 25 bp, Homo sapien
cctatgccttatcttgtgtcccaag

SEQ ID NO: 464308 - DNA, 25 bp, Homo sapien
aaaactcaactcatacctatgcctt

SEQ ID NO: 464309 - DNA, 25 bp, Homo sapien
gcaattttccagctatcaaagtgcc

SEQ ID NO: 464310 - DNA, 25 bp, Homo sapien
cattccttgcttcacctcatcagtg

SEQ ID NO: 464311 - DNA, 25 bp, Homo sapien
tatcaaagtgcctgagagctttcag

SEQ ID NO: 464312 - DNA, 25 bp, Homo sapien
tcagatgcttttagtttcggagaag

SEQ ID NO: 464313 - DNA, 25 bp, Homo sapien
tcagaaaagactgggcgcgttcagg

SEQ ID NO: 464314 - DNA, 25 bp, Homo sapien
gatcagaaaagactgggcgcgttca

SEQ ID NO: 464315 - DNA, 25 bp, Homo sapien
caagatcagaaaagactgggcgcgt

SEQ ID NO: 464316 - DNA, 25 bp, Homo sapien
ttccaagatcagaaaagactgggcg

SEQ ID NO: 464317 - DNA, 25 bp, Homo sapien
caagtctaacatctgagggctgtca

SEQ ID NO: 464318 - DNA, 25 bp, Homo sapien
tggctgccctaggaagtgtatcatc

SEQ ID NO: 464319 - DNA, 25 bp, Homo sapien
gcagagaccgttctttcagttcagg

SEQ ID NO: 464320 - DNA, 25 bp, Homo sapien
tcgagttattagatgatggctgccc

SEQ ID NO: 464321 - DNA, 25 bp, Homo sapien
tgtaagctatttttggagaatccat

SEQ ID NO: 464322 - DNA, 25 bp, Homo sapien
tttgtggagttaatggctctgatgc

SEQ ID NO: 464323 - DNA, 25 bp, Homo sapien
ggaccagtcttgttccatttggttg

SEQ ID NO: 464324 - DNA, 25 bp, Homo sapien
gctctgatgcatattttctggacca

SEQ ID NO: 464325 - DNA, 25 bp, Homo sapien
ttctgtgtagcaattactgacctcg

SEQ ID NO: 464326 - DNA, 25 bp, Homo sapien
tgtagcaattactgacctcgctgtc

SEQ ID NO: 464327 - DNA, 25 bp, Homo sapien
tctcatgccatgcaattctgtgtag

SEQ ID NO: 464328 - DNA, 25 bp, Homo sapien
gccatgcaattctgtgtagcaatta

SEQ ID NO: 464329 - DNA, 25 bp, Homo sapien
tcaatttgcaaattacaggtctgct

SEQ ID NO: 464330 - DNA, 25 bp, Homo sapien
atttgcaaattacaggtctgctacc

SEQ ID NO: 464331 - DNA, 25 bp, Homo sapien
aatttgcaaattacaggtctgctac

SEQ ID NO: 464332 - DNA, 25 bp, Homo sapien
gaaaaggccactgcagtgcattttc

SEQ ID NO: 464333 - DNA, 25 bp, Homo sapien
gatgagaccaagtaattagctcagg

SEQ ID NO: 464334 - DNA, 25 bp, Homo sapien
gaccaagtaattagctcaggccatg

SEQ ID NO: 464335 - DNA, 25 bp, Homo sapien
cctccatcctttacacatagaaaac

SEQ ID NO: 464336 - DNA, 25 bp, Homo sapien
tccatttagatgagaccaagtaatt

SEQ ID NO: 464337 - DNA, 25 bp, Homo sapien
tatactctacgtcagcaaagtgcag

SEQ ID NO: 464338 - DNA, 25 bp, Homo sapien
aaaccctcagtgttggaacagtgcc

SEQ ID NO: 464339 - DNA, 25 bp, Homo sapien
tattctagttggagcgagcatcatc

SEQ ID NO: 464340 - DNA, 25 bp, Homo sapien
caataagcagggttaacagacacac

SEQ ID NO: 464341 - DNA, 25 bp, Homo sapien
caccagttgcagcagtcaaacgtca

SEQ ID NO: 464342 - DNA, 25 bp, Homo sapien
gcagtcaaacgtcatctatctgtat

SEQ ID NO: 464343 - DNA, 25 bp, Homo sapien
tgcagcagtcaaacgtcatctatct

SEQ ID NO: 464344 - DNA, 25 bp, Homo sapien
atctgtatatcaagataaattatga

SEQ ID NO: 464345 - DNA, 25 bp, Homo sapien
gaaatcggccttaatcttattgatg

SEQ ID NO: 464346 - DNA, 25 bp, Homo sapien
acttctgttgagaaatcggccttaa

SEQ ID NO: 464347 - DNA, 25 bp, Homo sapien
tccataacttctgttgagaaatcgg

SEQ ID NO: 464348 - DNA, 25 bp, Homo sapien
tctgttgagaaatcggccttaatct

SEQ ID NO: 464349 - DNA, 25 bp, Homo sapien
tgcagaggaggtataaagtcatgca

SEQ ID NO: 464350 - DNA, 25 bp, Homo sapien
catgcaaatggataagatttcaaga

SEQ ID NO: 464351 - DNA, 25 bp, Homo sapien
ctgtatgcagaggaggtataaagtc

SEQ ID NO: 464352 - DNA, 25 bp, Homo sapien
aagaaaaaggtaggctctgagtttg

SEQ ID NO: 464353 - DNA, 25 bp, Homo sapien
aagtggcttgtctatctggaataca

SEQ ID NO: 464354 - DNA, 25 bp, Homo sapien
ggaattgaaaagtggcttgtctatc

SEQ ID NO: 464355 - DNA, 25 bp, Homo sapien
aaaagtggcttgtctatctggaata

SEQ ID NO: 464356 - DNA, 25 bp, Homo sapien
attgaaaagtggcttgtctatctgg

SEQ ID NO: 464357 - DNA, 25 bp, Homo sapien
ctgtatattctagtacatcatttat

SEQ ID NO: 464358 - DNA, 25 bp, Homo sapien
ccgctgtatattctagtacatcatt

SEQ ID NO: 464359 - DNA, 25 bp, Homo sapien
cgctgtatattctagtacatcattt

SEQ ID NO: 464360 - DNA, 25 bp, Homo sapien
aaccgctgtatattctagtacatca

SEQ ID NO: 464361 - DNA, 25 bp, Homo sapien
tcaaagatatcaacaaccacagacg

SEQ ID NO: 464362 - DNA, 25 bp, Homo sapien
accacagacgtatacacccgacaag

SEQ ID NO: 464363 - DNA, 25 bp, Homo sapien
tgcaattcttatcaagtaaaaatac

SEQ ID NO: 464364 - DNA, 25 bp, Homo sapien
tacacttgcaattcttatcaagtaa

SEQ ID NO: 464365 - DNA, 25 bp, Homo sapien
tcttgctccaccatagaatcagcca

SEQ ID NO: 464366 - DNA, 25 bp, Homo sapien
aatgctccagactcgtgtgtatttc

SEQ ID NO: 464367 - DNA, 25 bp, Homo sapien
ttactctggcactacgaaatgctcc

SEQ ID NO: 464368 - DNA, 25 bp, Homo sapien
ttccaagctgacagagcaaacgagt

SEQ ID NO: 464369 - DNA, 25 bp, Homo sapien
ctacaaaggtaactgtggcccaact

SEQ ID NO: 464370 - DNA, 25 bp, Homo sapien
cccattgctgttgcagaggttgatg

SEQ ID NO: 464371 - DNA, 25 bp, Homo sapien
aagtaattctacctgcccattgctg

SEQ ID NO: 464372 - DNA, 25 bp, Homo sapien
tttccgctgctttggcctacaaagg

SEQ ID NO: 464373 - DNA, 25 bp, Homo sapien
tattactgagaatgagcatcatctc

SEQ ID NO: 464374 - DNA, 25 bp, Homo sapien
tcctagagactcatgatttagccac

SEQ ID NO: 464375 - DNA, 25 bp, Homo sapien
aatgagcatcatctcaatcaaggcc

SEQ ID NO: 464376 - DNA, 25 bp, Homo sapien
gaaacatcttatatttggcagctgc

SEQ ID NO: 464377 - DNA, 25 bp, Homo sapien
tggaataccttccttgtcattcaca

SEQ ID NO: 464378 - DNA, 25 bp, Homo sapien
ctggaataccttccttgtcattcac

SEQ ID NO: 464379 - DNA, 25 bp, Homo sapien
gaataccttccttgtcattcacata

SEQ ID NO: 464380 - DNA, 25 bp, Homo sapien
taccttccttgtcattcacatacat

SEQ ID NO: 464381 - DNA, 25 bp, Homo sapien
acatcatttggggtcacgtaataac

SEQ ID NO: 464382 - DNA, 25 bp, Homo sapien
taataactatgtggagaacctctct

SEQ ID NO: 464383 - DNA, 25 bp, Homo sapien
tatgtggagaacctctctctaacat

SEQ ID NO: 464384 - DNA, 25 bp, Homo sapien
gggtcacgtaataactatgtggaga

SEQ ID NO: 464385 - DNA, 25 bp, Homo sapien
catgtgttcgttggccgcataatgt

SEQ ID NO: 464386 - DNA, 25 bp, Homo sapien
ttcatgtgttcgttggccgcataat

SEQ ID NO: 464387 - DNA, 25 bp, Homo sapien
atcgccattctaactagcatcaggt

SEQ ID NO: 464388 - DNA, 25 bp, Homo sapien
gtgttcgttggccgcataatgtctt

SEQ ID NO: 464389 - DNA, 25 bp, Homo sapien
cttattacttgataataagaagaca

SEQ ID NO: 464390 - DNA, 25 bp, Homo sapien
agtgttggtgataatatagataagt

SEQ ID NO: 464391 - DNA, 25 bp, Homo sapien
ataaactcatggtatgattgttgac

SEQ ID NO: 464392 - DNA, 25 bp, Homo sapien
tcatggtatgattgttgacactatt

SEQ ID NO: 464393 - DNA, 25 bp, Homo sapien
gctatagtagtcaatggtgttagta

SEQ ID NO: 464394 - DNA, 25 bp, Homo sapien
aacaaagattggctatagtagtcaa

SEQ ID NO: 464395 - DNA, 25 bp, Homo sapien
aaacaaagattggctatagtagtca

SEQ ID NO: 464396 - DNA, 25 bp, Homo sapien
tagtagtcaatggtgttagtaatca

SEQ ID NO: 464397 - DNA, 25 bp, Homo sapien
aagaaagttgtctggaaagagcatg

SEQ ID NO: 464398 - DNA, 25 bp, Homo sapien
aaattctgaattaaatttgccctgc

SEQ ID NO: 464399 - DNA, 25 bp, Homo sapien
aagagcatgaggttgttggaaattc

SEQ ID NO: 464400 - DNA, 25 bp, Homo sapien
tggagaagaaagttgtctggaaaga

SEQ ID NO: 464401 - DNA, 25 bp, Homo sapien
tagaagacaatagggagagctgact

SEQ ID NO: 464402 - DNA, 25 bp, Homo sapien
tcttcttccttatgcattctgtgtc

SEQ ID NO: 464403 - DNA, 25 bp, Homo sapien
gtttagaagacaatagggagagctg

SEQ ID NO: 464404 - DNA, 25 bp, Homo sapien
tatcttcttccttatgcattctgtg

SEQ ID NO: 464405 - DNA, 25 bp, Homo sapien
tctgttactgctaattgggtggata

SEQ ID NO: 464406 - DNA, 25 bp, Homo sapien
taagctcttcggttgcataccttta

SEQ ID NO: 464407 - DNA, 25 bp, Homo sapien
tttgaaggataattcaccacccagc

SEQ ID NO: 464408 - DNA, 25 bp, Homo sapien
tggactagtcctgcctttcggaaat

SEQ ID NO: 464409 - DNA, 25 bp, Homo sapien
cttattctgtaatctttaatggcaa

SEQ ID NO: 464410 - DNA, 25 bp, Homo sapien
gccatagactattttgtagcaacct

SEQ ID NO: 464411 - DNA, 25 bp, Homo sapien
tcatttgggattatctggtgagagc

SEQ ID NO: 464412 - DNA, 25 bp, Homo sapien
acagctgcaaacaatttgcctttat

SEQ ID NO: 464413 - DNA, 25 bp, Homo sapien
aatcatatcgctgatccaaattcac

SEQ ID NO: 464414 - DNA, 25 bp, Homo sapien
ttttcacacgtatcccaactggaga

SEQ ID NO: 464415 - DNA, 25 bp, Homo sapien
caactggagaaaattgttcattggc

SEQ ID NO: 464416 - DNA, 25 bp, Homo sapien
gttcattggctacacaacaaaaatc

SEQ ID NO: 464417 - DNA, 25 bp, Homo sapien
gcatattgtattcctatcttcattc

SEQ ID NO: 464418 - DNA, 25 bp, Homo sapien
tgctctggcgatggccgcagttacc

SEQ ID NO: 464419 - DNA, 25 bp, Homo sapien
ggcgatggccgcagttacccaggct

SEQ ID NO: 464420 - DNA, 25 bp, Homo sapien
ctgctctggcgatggccgcagttac

SEQ ID NO: 464421 - DNA, 25 bp, Homo sapien
ttggagtcttcaaatgttattttct

SEQ ID NO: 464422 - DNA, 25 bp, Homo sapien
tattttctgttgtttattaagttca

SEQ ID NO: 464423 - DNA, 25 bp, Homo sapien
agtcttcaaatgttattttctgttg

SEQ ID NO: 464424 - DNA, 25 bp, Homo sapien
caaatgttattttctgttgtttatt

SEQ ID NO: 464425 - DNA, 25 bp, Homo sapien
ttagcaagcgttcagtcagagtctt

SEQ ID NO: 464426 - DNA, 25 bp, Homo sapien
agcgttcagtcagagtcttgatgtg

SEQ ID NO: 464427 - DNA, 25 bp, Homo sapien
cgttcagtcagagtcttgatgtgat

SEQ ID NO: 464428 - DNA, 25 bp, Homo sapien
ctttagcaagcgttcagtcagagtc

SEQ ID NO: 464429 - DNA, 25 bp, Homo sapien
cttcaagatcgtttgcttgctttct

SEQ ID NO: 464430 - DNA, 25 bp, Homo sapien
ttcttcaagatcgtttgcttgcttt

SEQ ID NO: 464431 - DNA, 25 bp, Homo sapien
tcttcaagatcgtttgcttgctttc

SEQ ID NO: 464432 - DNA, 25 bp, Homo sapien
tcttcttcaagatcgtttgcttgct

SEQ ID NO: 464433 - DNA, 25 bp, Homo sapien
aacaattatcgtgtgcttctttcta

SEQ ID NO: 464434 - DNA, 25 bp, Homo sapien
tatcgtgtgcttctttctaatggta

SEQ ID NO: 464435 - DNA, 25 bp, Homo sapien
aattatcgtgtgcttctttctaatg

SEQ ID NO: 464436 - DNA, 25 bp, Homo sapien
ttatcgtgtgcttctttctaatggt

SEQ ID NO: 464437 - DNA, 25 bp, Homo sapien
ggaccctccaacaaagatggaagat

SEQ ID NO: 464438 - DNA, 25 bp, Homo sapien
agcaaaggtgagagtctcagtggac

SEQ ID NO: 464439 - DNA, 25 bp, Homo sapien
agtggaccctccaacaaagatggaa

SEQ ID NO: 464440 - DNA, 25 bp, Homo sapien
tctcagtggaccctccaacaaagat

SEQ ID NO: 464441 - DNA, 25 bp, Homo sapien
ccatggaggtgacaggaacccagtg

SEQ ID NO: 464442 - DNA, 25 bp, Homo sapien
ccagggccagtcacttcatttccag

SEQ ID NO: 464443 - DNA, 25 bp, Homo sapien
ccagagcgtctagcataattagaat

SEQ ID NO: 464444 - DNA, 25 bp, Homo sapien
tctgctggtccagagcgtctagcat

SEQ ID NO: 464445 - DNA, 25 bp, Homo sapien
aacccctcggtggatagacatttct

SEQ ID NO: 464446 - DNA, 25 bp, Homo sapien
cactctatcttcagaatgtgggggt

SEQ ID NO: 464447 - DNA, 25 bp, Homo sapien
tcactctatcttcagaatgtggggg

SEQ ID NO: 464448 - DNA, 25 bp, Homo sapien
tctatcttcagaatgtgggggtggt

SEQ ID NO: 464449 - DNA, 25 bp, Homo sapien
ttgaaggcagactcaaccctgaagg

SEQ ID NO: 464450 - DNA, 25 bp, Homo sapien
tttgaaggcagactcaaccctgaag

SEQ ID NO: 464451 - DNA, 25 bp, Homo sapien
tcatttgaaggcagactcaaccctg

SEQ ID NO: 464452 - DNA, 25 bp, Homo sapien
ggctcatttgaaggcagactcaacc

SEQ ID NO: 464453 - DNA, 25 bp, Homo sapien
aaattatatcccaaagtggttcatg

SEQ ID NO: 464454 - DNA, 25 bp, Homo sapien
catgattaaactacagctcttgact

SEQ ID NO: 464455 - DNA, 25 bp, Homo sapien
tacttaggcaatgtttttgcatcta

SEQ ID NO: 464456 - DNA, 25 bp, Homo sapien
gcatctactagaagattatgcatta

SEQ ID NO: 464457 - DNA, 25 bp, Homo sapien
tagatatccctcgtcaaggacgcag

SEQ ID NO: 464458 - DNA, 25 bp, Homo sapien
caatttgccgaagtgggttaccagt

SEQ ID NO: 464459 - DNA, 25 bp, Homo sapien
gatgagatcagaagatgcagtagct

SEQ ID NO: 464460 - DNA, 25 bp, Homo sapien
gcagtagctgctctcactccagcaa

SEQ ID NO: 464461 - DNA, 25 bp, Homo sapien
aactaattgctaattgagcaattac

SEQ ID NO: 464462 - DNA, 25 bp, Homo sapien
tagacgtcggctttctcattttaag

SEQ ID NO: 464463 - DNA, 25 bp, Homo sapien
tgagcaattactctatcatgttgca

SEQ ID NO: 464464 - DNA, 25 bp, Homo sapien
atttttgaggagtagacgtcggctt

SEQ ID NO: 464465 - DNA, 25 bp, Homo sapien
ttctcactatcaattacagtctcaa

SEQ ID NO: 464466 - DNA, 25 bp, Homo sapien
agactcactcgatcttgtcttttag

SEQ ID NO: 464467 - DNA, 25 bp, Homo sapien
cagactcactcgatcttgtctttta

SEQ ID NO: 464468 - DNA, 25 bp, Homo sapien
tctgtgttggggtctctttctcact

SEQ ID NO: 464469 - DNA, 25 bp, Homo sapien
tcactattatcaaatctgtcagaac

SEQ ID NO: 464470 - DNA, 25 bp, Homo sapien
gggttaagaagtaaatgctcatgat

SEQ ID NO: 464471 - DNA, 25 bp, Homo sapien
ttctgcttcacaggggtcactgctg

SEQ ID NO: 464472 - DNA, 25 bp, Homo sapien
tgatagtcactgttgcagaccctga

SEQ ID NO: 464473 - DNA, 25 bp, Homo sapien
cacttcgaggagacaaggcaatgtt

SEQ ID NO: 464474 - DNA, 25 bp, Homo sapien
tgtttctcccatagacaggtgagcg

SEQ ID NO: 464475 - DNA, 25 bp, Homo sapien
atgctgcacttcgaggagacaaggc

SEQ ID NO: 464476 - DNA, 25 bp, Homo sapien
caggtgagcgagttaatgaggacaa

SEQ ID NO: 464477 - DNA, 25 bp, Homo sapien
tcatgttgcggattgctctttttgt

SEQ ID NO: 464478 - DNA, 25 bp, Homo sapien
tgcggattgctctttttgttcaaca

SEQ ID NO: 464479 - DNA, 25 bp, Homo sapien
ggattgctctttttgttcaacagta

SEQ ID NO: 464480 - DNA, 25 bp, Homo sapien
tgctctttttgttcaacagtaagtt

SEQ ID NO: 464481 - DNA, 25 bp, Homo sapien
ttatgtactcaagtgtgctactgat

SEQ ID NO: 464482 - DNA, 25 bp, Homo sapien
tatgtactcaagtgtgctactgatt

SEQ ID NO: 464483 - DNA, 25 bp, Homo sapien
gtaggtttaagacactacatgaatc

SEQ ID NO: 464484 - DNA, 25 bp, Homo sapien
agacactacatgaatccttaaaggt

SEQ ID NO: 464485 - DNA, 25 bp, Homo sapien
ctgagtgtaggtttaagacactaca

SEQ ID NO: 464486 - DNA, 25 bp, Homo sapien
ggtttaagacactacatgaatcctt

SEQ ID NO: 464487 - DNA, 25 bp, Homo sapien
gcatcccccatttaaggtttctaga

SEQ ID NO: 464488 - DNA, 25 bp, Homo sapien
cacatgcaggggaaaccatttggat

SEQ ID NO: 464489 - DNA, 25 bp, Homo sapien
ccacagaggaatgggtcagaacagc

SEQ ID NO: 464490 - DNA, 25 bp, Homo sapien
gagacgacagtagggctccaaattg

SEQ ID NO: 464491 - DNA, 25 bp, Homo sapien
tcttttactgccatcatttcgtttt

SEQ ID NO: 464492 - DNA, 25 bp, Homo sapien
cctatgtcttttactgccatcattt

SEQ ID NO: 464493 - DNA, 25 bp, Homo sapien
catcatttcgttttttatacattcc

SEQ ID NO: 464494 - DNA, 25 bp, Homo sapien
tgccatcatttcgttttttatacat

SEQ ID NO: 464495 - DNA, 25 bp, Homo sapien
gaataagcttgtaggaatcagcaga

SEQ ID NO: 464496 - DNA, 25 bp, Homo sapien
ctctttcttgatgaagtaataaaaa

SEQ ID NO: 464497 - DNA, 25 bp, Homo sapien
aactctaataattcaaatccgcttg

SEQ ID NO: 464498 - DNA, 25 bp, Homo sapien
ttcaaatccgcttgaaataacctct

SEQ ID NO: 464499 - DNA, 25 bp, Homo sapien
aatgggaatcaatggtgaaagcttc

SEQ ID NO: 464500 - DNA, 25 bp, Homo sapien
caggcaatccccaggacaatgagga

SEQ ID NO: 464501 - DNA, 25 bp, Homo sapien
gaacaatctgtacaagcccctatat

SEQ ID NO: 464502 - DNA, 25 bp, Homo sapien
tgaaagcttcaagaggacaatcagg

SEQ ID NO: 464503 - DNA, 25 bp, Homo sapien
aatcctggcaatcttcaccttttgt

SEQ ID NO: 464504 - DNA, 25 bp, Homo sapien
gattttatcttgaatgaaaggagac

SEQ ID NO: 464505 - DNA, 25 bp, Homo sapien
aaggaagctgattagtaattcagat

SEQ ID NO: 464506 - DNA, 25 bp, Homo sapien
ggagactgatagttggaatcctggc

SEQ ID NO: 464507 - DNA, 25 bp, Homo sapien
aacagatgctttggtggtggttcct

SEQ ID NO: 464508 - DNA, 25 bp, Homo sapien
tgtcagtgccaaagtgaacagatgc

SEQ ID NO: 464509 - DNA, 25 bp, Homo sapien
tcagtgccaaagtgaacagatgctt

SEQ ID NO: 464510 - DNA, 25 bp, Homo sapien
cttgtcagtgccaaagtgaacagat

SEQ ID NO: 464511 - DNA, 25 bp, Homo sapien
acttcagctatccagaaacaaggaa

SEQ ID NO: 464512 - DNA, 25 bp, Homo sapien
gaaggcttgcttatgtagtccgact

SEQ ID NO: 464513 - DNA, 25 bp, Homo sapien
cacagagtcttagctatggaaggct

SEQ ID NO: 464514 - DNA, 25 bp, Homo sapien
tagaccgttgtgagaagacattact

SEQ ID NO: 464515 - DNA, 25 bp, Homo sapien
tttcttcctgaccgctgtctttcat

SEQ ID NO: 464516 - DNA, 25 bp, Homo sapien
ttttcttcctgaccgctgtctttca

SEQ ID NO: 464517 - DNA, 25 bp, Homo sapien
actgtaggctgatctcgttcttgca

SEQ ID NO: 464518 - DNA, 25 bp, Homo sapien
tctttggctctggaccccaatcctc

SEQ ID NO: 464519 - DNA, 25 bp, Homo sapien
tacatcccagtctgtactgtaggct

SEQ ID NO: 464520 - DNA, 25 bp, Homo sapien
gctcagggatctgagggtacatccc

SEQ ID NO: 464521 - DNA, 25 bp, Homo sapien
catcaaaaattgttctaacggtagg

SEQ ID NO: 464522 - DNA, 25 bp, Homo sapien
tattgcaatggtcaagttcactcat

SEQ ID NO: 464523 - DNA, 25 bp, Homo sapien
tatggaaactattgcaatggtcaag

SEQ ID NO: 464524 - DNA, 25 bp, Homo sapien
cggtagggaagcgattatggaaact

SEQ ID NO: 464525 - DNA, 25 bp, Homo sapien
gtatacgatcctcatgaatggcagt

SEQ ID NO: 464526 - DNA, 25 bp, Homo sapien
ctgtatacgatcctcatgaatggca

SEQ ID NO: 464527 - DNA, 25 bp, Homo sapien
ggctgcttcttgcattcaaaccaat

SEQ ID NO: 464528 - DNA, 25 bp, Homo sapien
atacgatcctcatgaatggcagttg

SEQ ID NO: 464529 - DNA, 25 bp, Homo sapien
ctgaatagaaaccttgtacttttca

SEQ ID NO: 464530 - DNA, 25 bp, Homo sapien
ctaagtatgggaggaatagtgagtg

SEQ ID NO: 464531 - DNA, 25 bp, Homo sapien
aagtatgggaggaatagtgagtgtt

SEQ ID NO: 464532 - DNA, 25 bp, Homo sapien
agtatgggaggaatagtgagtgttc

SEQ ID NO: 464533 - DNA, 25 bp, Homo sapien
taagtatgggaggaatagtgagtgt

SEQ ID NO: 464534 - DNA, 25 bp, Homo sapien
tccaactagaaaacagaggtccctg

SEQ ID NO: 464535 - DNA, 25 bp, Homo sapien
gaataacaactggttcagcaacagc

SEQ ID NO: 464536 - DNA, 25 bp, Homo sapien
ccttggtgagggagcagttatcttc

SEQ ID NO: 464537 - DNA, 25 bp, Homo sapien
tgtggtccagattgtcccctgtgac

SEQ ID NO: 464538 - DNA, 25 bp, Homo sapien
ggtgctaatgtttccataagagatg

SEQ ID NO: 464539 - DNA, 25 bp, Homo sapien
gctgtcataagaccatgaaagacta

SEQ ID NO: 464540 - DNA, 25 bp, Homo sapien
taaaatttgcctatagtgacatgat

SEQ ID NO: 464541 - DNA, 25 bp, Homo sapien
gttcttgcgcctagtaaacacagaa

SEQ ID NO: 464542 - DNA, 25 bp, Homo sapien
tgacctttgaggaaaggcaacatag

SEQ ID NO: 464543 - DNA, 25 bp, Homo sapien
gtgacctttgaggaaaggcaacata

SEQ ID NO: 464544 - DNA, 25 bp, Homo sapien
atgtaaatagtcactggtccactgg

SEQ ID NO: 464545 - DNA, 25 bp, Homo sapien
cttgttcctccaccttatgtatagc

SEQ ID NO: 464546 - DNA, 25 bp, Homo sapien
cagagatttatactgtccttgttcc

SEQ ID NO: 464547 - DNA, 25 bp, Homo sapien
ttacttagtgtacagagatttatac

SEQ ID NO: 464548 - DNA, 25 bp, Homo sapien
ctacgtagctaagctcaatacctgg

SEQ ID NO: 464549 - DNA, 25 bp, Homo sapien
gctaagctcaatacctggatcccat

SEQ ID NO: 464550 - DNA, 25 bp, Homo sapien
cctggatcccatgagctctcacatt

SEQ ID NO: 464551 - DNA, 25 bp, Homo sapien
acctggatcccatgagctctcacat

SEQ ID NO: 464552 - DNA, 25 bp, Homo sapien
ctttttttcaccataagcaccagct

SEQ ID NO: 464553 - DNA, 25 bp, Homo sapien
tataagtaaatctataggcaggcaa

SEQ ID NO: 464554 - DNA, 25 bp, Homo sapien
agtaaatctataggcaggcaactgc

SEQ ID NO: 464555 - DNA, 25 bp, Homo sapien
gctgttaagggctcaagagagtcac

SEQ ID NO: 464556 - DNA, 25 bp, Homo sapien
cttattaatcttccacagattactg

SEQ ID NO: 464557 - DNA, 25 bp, Homo sapien
aaataatctggtcataattagtcac

SEQ ID NO: 464558 - DNA, 25 bp, Homo sapien
tatttctgtgatatgccacgtagga

SEQ ID NO: 464559 - DNA, 25 bp, Homo sapien
gatttagtaccgctacatgtaacca

SEQ ID NO: 464560 - DNA, 25 bp, Homo sapien
gtccatacttatcttggcgattatc

SEQ ID NO: 464561 - DNA, 25 bp, Homo sapien
catacttatcttggcgattatcaga

SEQ ID NO: 464562 - DNA, 25 bp, Homo sapien
cttatcttggcgattatcagaatta

SEQ ID NO: 464563 - DNA, 25 bp, Homo sapien
atcttggcgattatcagaattattc

SEQ ID NO: 464564 - DNA, 25 bp, Homo sapien
ttatgcctatccacagggaactgct

SEQ ID NO: 464565 - DNA, 25 bp, Homo sapien
gctgcttagaactgctattatccca

SEQ ID NO: 464566 - DNA, 25 bp, Homo sapien
tgaccttatgcctatccacagggaa

SEQ ID NO: 464567 - DNA, 25 bp, Homo sapien
ccttatgcctatccacagggaactg

SEQ ID NO: 464568 - DNA, 25 bp, Homo sapien
tatcttgtaggtagatcctttggtt

SEQ ID NO: 464569 - DNA, 25 bp, Homo sapien
ttaagtgggcaaatcataggttcga

SEQ ID NO: 464570 - DNA, 25 bp, Homo sapien
tgagagtgcaaaccctgaaaagcct

SEQ ID NO: 464571 - DNA, 25 bp, Homo sapien
tctgaagggtgcaagcgagactgga

SEQ ID NO: 464572 - DNA, 25 bp, Homo sapien
caattgggagagcaatgaagttaaa

SEQ ID NO: 464573 - DNA, 25 bp, Homo sapien
ggaaagctttaattgcagttgccat

SEQ ID NO: 464574 - DNA, 25 bp, Homo sapien
gtcaaaagctcctttgcaattggga

SEQ ID NO: 464575 - DNA, 25 bp, Homo sapien
gcagttgccattaaatgaacacaaa

SEQ ID NO: 464576 - DNA, 25 bp, Homo sapien
caatttctgagttagagctctgata

SEQ ID NO: 464577 - DNA, 25 bp, Homo sapien
catggccacatagcaaatgaagtgc

SEQ ID NO: 464578 - DNA, 25 bp, Homo sapien
acaatttctgagttagagctctgat

SEQ ID NO: 464579 - DNA, 25 bp, Homo sapien
agccatggccacatagcaaatgaag

SEQ ID NO: 464580 - DNA, 25 bp, Homo sapien
gtttctgtgcatgccaaagcacaca

SEQ ID NO: 464581 - DNA, 25 bp, Homo sapien
tctgtgcatgccaaagcacacattc

SEQ ID NO: 464582 - DNA, 25 bp, Homo sapien
catgccaaagcacacattcttctaa

SEQ ID NO: 464583 - DNA, 25 bp, Homo sapien
tgtgtgtttctgtgcatgccaaagc

SEQ ID NO: 464584 - DNA, 25 bp, Homo sapien
cagctttgtagccatacttggaaca

SEQ ID NO: 464585 - DNA, 25 bp, Homo sapien
cttggaacatgtggctcctatggtt

SEQ ID NO: 464586 - DNA, 25 bp, Homo sapien
ctcttcagctttgtagccatacttg

SEQ ID NO: 464587 - DNA, 25 bp, Homo sapien
tgtagccatacttggaacatgtggc

SEQ ID NO: 464588 - DNA, 25 bp, Homo sapien
ttgtggtctgtggataaggtaagga

SEQ ID NO: 464589 - DNA, 25 bp, Homo sapien
tctctgtgggttagggtttgtggtc

SEQ ID NO: 464590 - DNA, 25 bp, Homo sapien
aaagactgaattatcctcctgcatc

SEQ ID NO: 464591 - DNA, 25 bp, Homo sapien
cactgatttaatagcctaaagactg

SEQ ID NO: 464592 - DNA, 25 bp, Homo sapien
ttgtaggtttcaggaaagtgtctta

SEQ ID NO: 464593 - DNA, 25 bp, Homo sapien
tgtaggtttcaggaaagtgtcttat

SEQ ID NO: 464594 - DNA, 25 bp, Homo sapien
ttctcttgtacaattttcgtcagca

SEQ ID NO: 464595 - DNA, 25 bp, Homo sapien
aaattctcttgtacaattttcgtca

SEQ ID NO: 464596 - DNA, 25 bp, Homo sapien
cttgtacaattttcgtcagcatcca

SEQ ID NO: 464597 - DNA, 25 bp, Homo sapien
tcttgtacaattttcgtcagcatcc

SEQ ID NO: 464598 - DNA, 25 bp, Homo sapien
tgttccaatcaattcgtagattttc

SEQ ID NO: 464599 - DNA, 25 bp, Homo sapien
ccaatcaattcgtagattttccact

SEQ ID NO: 464600 - DNA, 25 bp, Homo sapien
tataattcctaggattgttccaatc

SEQ ID NO: 464601 - DNA, 25 bp, Homo sapien
tgtcctgttataattcctaggattg

SEQ ID NO: 464602 - DNA, 25 bp, Homo sapien
ctgaaggcactttcttctgcactcc

SEQ ID NO: 464603 - DNA, 25 bp, Homo sapien
tttcacgaaatttactctggggaga

SEQ ID NO: 464604 - DNA, 25 bp, Homo sapien
cacgaaatttactctggggagacct

SEQ ID NO: 464605 - DNA, 25 bp, Homo sapien
aaggcactttcttctgcactcctca

SEQ ID NO: 464606 - DNA, 25 bp, Homo sapien
cttggctttaatctcccttcagcat

SEQ ID NO: 464607 - DNA, 25 bp, Homo sapien
cccttcagcatccctttcagccttt

SEQ ID NO: 464608 - DNA, 25 bp, Homo sapien
tcagcatccctttcagcctttttct

SEQ ID NO: 464609 - DNA, 25 bp, Homo sapien
ttggctttaatctcccttcagcatc

SEQ ID NO: 464610 - DNA, 25 bp, Homo sapien
caggtttagcagacagctttgtgat

SEQ ID NO: 464611 - DNA, 25 bp, Homo sapien
ggtctgcgttagcatctccatgttc

SEQ ID NO: 464612 - DNA, 25 bp, Homo sapien
atgttctgcagggttatctcccttc

SEQ ID NO: 464613 - DNA, 25 bp, Homo sapien
agctttccgtgcctggtctgcgtta

SEQ ID NO: 464614 - DNA, 25 bp, Homo sapien
tgttctgcagggttatctcccttct

SEQ ID NO: 464615 - DNA, 25 bp, Homo sapien
tcagaagcacacagttaccaaaaat

SEQ ID NO: 464616 - DNA, 25 bp, Homo sapien
cacacagttaccaaaaatgcacaca

SEQ ID NO: 464617 - DNA, 25 bp, Homo sapien
agcacacagttaccaaaaatgcaca

SEQ ID NO: 464618 - DNA, 25 bp, Homo sapien
cacagttaccaaaaatgcacacact

SEQ ID NO: 464619 - DNA, 25 bp, Homo sapien
tcctccttcccatgagtctgatgtc

SEQ ID NO: 464620 - DNA, 25 bp, Homo sapien
gacttcagcatctctcatcaacctg

SEQ ID NO: 464621 - DNA, 25 bp, Homo sapien
cttcagcatctctcatcaacctggt

SEQ ID NO: 464622 - DNA, 25 bp, Homo sapien
gagtctgatgtctgacttcagcatc

SEQ ID NO: 464623 - DNA, 25 bp, Homo sapien
caatgacaataggaaatgctctgag

SEQ ID NO: 464624 - DNA, 25 bp, Homo sapien
tccagtgtcaggtatagatttagcc

SEQ ID NO: 464625 - DNA, 25 bp, Homo sapien
tgacgtatggatttaacctggaaca

SEQ ID NO: 464626 - DNA, 25 bp, Homo sapien
aacattgtccaatgtgacgtatgga

SEQ ID NO: 464627 - DNA, 25 bp, Homo sapien
tgattccaaatctgtgcacagctat

SEQ ID NO: 464628 - DNA, 25 bp, Homo sapien
caaatctgtgcacagctatagccat

SEQ ID NO: 464629 - DNA, 25 bp, Homo sapien
ttccaaatctgtgcacagctatagc

SEQ ID NO: 464630 - DNA, 25 bp, Homo sapien
gttgattccaaatctgtgcacagct

SEQ ID NO: 464631 - DNA, 25 bp, Homo sapien
ctccctgtgggcctaggcctagagg

SEQ ID NO: 464632 - DNA, 25 bp, Homo sapien
tgtgggcctaggcctagaggcatca

SEQ ID NO: 464633 - DNA, 25 bp, Homo sapien
attctttctccctgtgggcctaggc

SEQ ID NO: 464634 - DNA, 25 bp, Homo sapien
ggcctaggcctagaggcatcagcag

SEQ ID NO: 464635 - DNA, 25 bp, Homo sapien
ttttctatctgcatgttggagtgtc

SEQ ID NO: 464636 - DNA, 25 bp, Homo sapien
tcagtacagaagtaagtgcttgtct

SEQ ID NO: 464637 - DNA, 25 bp, Homo sapien
gccagcaggcttggtagattattaa

SEQ ID NO: 464638 - DNA, 25 bp, Homo sapien
gagaaacctatgttatcagtacaga

SEQ ID NO: 464639 - DNA, 25 bp, Homo sapien
tccatgtttctatgttcagtggaca

SEQ ID NO: 464640 - DNA, 25 bp, Homo sapien
ggtttgaccgtccagcatcatttaa

SEQ ID NO: 464641 - DNA, 25 bp, Homo sapien
tgaaagaattatctatgcatgctgt

SEQ ID NO: 464642 - DNA, 25 bp, Homo sapien
tcatttaacagtgctgatcatatcc

SEQ ID NO: 464643 - DNA, 25 bp, Homo sapien
gatatgctctaataacactggtgac

SEQ ID NO: 464644 - DNA, 25 bp, Homo sapien
ttggataccagttcagtagggcaga

SEQ ID NO: 464645 - DNA, 25 bp, Homo sapien
ggtgacatcacctacatcaataggt

SEQ ID NO: 464646 - DNA, 25 bp, Homo sapien
ttctatggtaggcacagtccttttg

SEQ ID NO: 464647 - DNA, 25 bp, Homo sapien
gccagagccagcagtgttaagtttc

SEQ ID NO: 464648 - DNA, 25 bp, Homo sapien
tcctgccagagccagcagtgttaag

SEQ ID NO: 464649 - DNA, 25 bp, Homo sapien
cagagccagcagtgttaagtttcat

SEQ ID NO: 464650 - DNA, 25 bp, Homo sapien
ctgccagagccagcagtgttaagtt

SEQ ID NO: 464651 - DNA, 25 bp, Homo sapien
gattgtctggtaatgtaacagcgtt

SEQ ID NO: 464652 - DNA, 25 bp, Homo sapien
tctaatgttgatagcttgccagaca

SEQ ID NO: 464653 - DNA, 25 bp, Homo sapien
ggactactagctattgtatgctgga

SEQ ID NO: 464654 - DNA, 25 bp, Homo sapien
tacctttcacagaggctgatgctaa

SEQ ID NO: 464655 - DNA, 25 bp, Homo sapien
cttggaatgaggcaaagtttttggt

SEQ ID NO: 464656 - DNA, 25 bp, Homo sapien
ttctctggagaaacaccctctcaac

SEQ ID NO: 464657 - DNA, 25 bp, Homo sapien
tcaacctttagtgcagcttggaatg

SEQ ID NO: 464658 - DNA, 25 bp, Homo sapien
tcaattttagtacatcgagtcacca

SEQ ID NO: 464659 - DNA, 25 bp, Homo sapien
ccatattgcagcactgttgttgctg

SEQ ID NO: 464660 - DNA, 25 bp, Homo sapien
cagcactgttgttgctggcttaata

SEQ ID NO: 464661 - DNA, 25 bp, Homo sapien
tattgcagcactgttgttgctggct

SEQ ID NO: 464662 - DNA, 25 bp, Homo sapien
tgcagcactgttgttgctggcttaa

SEQ ID NO: 464663 - DNA, 25 bp, Homo sapien
gagtctatgaatccacatcaaattg

SEQ ID NO: 464664 - DNA, 25 bp, Homo sapien
ggctttgttgcctgatttatcccat

SEQ ID NO: 464665 - DNA, 25 bp, Homo sapien
gcatctggtcctggctgtacttctg

SEQ ID NO: 464666 - DNA, 25 bp, Homo sapien
ttttctgcagtgatcaggtttttca

SEQ ID NO: 464667 - DNA, 25 bp, Homo sapien
tttggaagttacttcctctatgtga

SEQ ID NO: 464668 - DNA, 25 bp, Homo sapien
catcattagaacttttggaagttac

SEQ ID NO: 464669 - DNA, 25 bp, Homo sapien
atcattagaacttttggaagttact

SEQ ID NO: 464670 - DNA, 25 bp, Homo sapien
gcataggatactgtccaatttttat

SEQ ID NO: 464671 - DNA, 25 bp, Homo sapien
tagagctgcctacaaatttaccact

SEQ ID NO: 464672 - DNA, 25 bp, Homo sapien
gaatgtgtgcttctaaggctataca

SEQ ID NO: 464673 - DNA, 25 bp, Homo sapien
gcattttgaggtcatgtaattgagt

SEQ ID NO: 464674 - DNA, 25 bp, Homo sapien
cccgggagcatgagacagctgaata

SEQ ID NO: 464675 - DNA, 25 bp, Homo sapien
cttccttgtttcccgggagcatgag

SEQ ID NO: 464676 - DNA, 25 bp, Homo sapien
cagctgaatacctggggtgaatcag

SEQ ID NO: 464677 - DNA, 25 bp, Homo sapien
cttgtttcccgggagcatgagacag

SEQ ID NO: 464678 - DNA, 25 bp, Homo sapien
cagtctgctgtcttaccggttgaaa

SEQ ID NO: 464679 - DNA, 25 bp, Homo sapien
ctatctccgtgactgttccacagag

SEQ ID NO: 464680 - DNA, 25 bp, Homo sapien
ctacagggcaaagaatgaacttgca

SEQ ID NO: 464681 - DNA, 25 bp, Homo sapien
ggcaacaaaagagtgaggactccaa

SEQ ID NO: 464682 - DNA, 25 bp, Homo sapien
cattaaaatcctgcttaagagacct

SEQ ID NO: 464683 - DNA, 25 bp, Homo sapien
gggatgctacgggaaagaagagttc

SEQ ID NO: 464684 - DNA, 25 bp, Homo sapien
tgattgtgtcggatatgatttgctc

SEQ ID NO: 464685 - DNA, 25 bp, Homo sapien
ttctgctgaaaagagctattgattg

SEQ ID NO: 464686 - DNA, 25 bp, Homo sapien
gaaaagagctattgattgtgtcgga

SEQ ID NO: 464687 - DNA, 25 bp, Homo sapien
tttataaaaccatgcttcttattgc

SEQ ID NO: 464688 - DNA, 25 bp, Homo sapien
atgccaggttgttccggagagtgga

SEQ ID NO: 464689 - DNA, 25 bp, Homo sapien
ctatgccaggttgttccggagagtg

SEQ ID NO: 464690 - DNA, 25 bp, Homo sapien
tatgccaggttgttccggagagtgg

SEQ ID NO: 464691 - DNA, 25 bp, Homo sapien
tttaaggctgcagcattggctgtag

SEQ ID NO: 464692 - DNA, 25 bp, Homo sapien
taaggctgcagcattggctgtagtt

SEQ ID NO: 464693 - DNA, 25 bp, Homo sapien
tcagatttaaggctgcagcattggc

SEQ ID NO: 464694 - DNA, 25 bp, Homo sapien
gatttaaggctgcagcattggctgt

SEQ ID NO: 464695 - DNA, 25 bp, Homo sapien
tcaacaatctgatgagagtcgaaag

SEQ ID NO: 464696 - DNA, 25 bp, Homo sapien
tgccaccatcaacaatctgatgaga

SEQ ID NO: 464697 - DNA, 25 bp, Homo sapien
tgggcttaagtgttcagctgccacc

SEQ ID NO: 464698 - DNA, 25 bp, Homo sapien
tgagagtcgaaagagtactacagat

SEQ ID NO: 464699 - DNA, 25 bp, Homo sapien
gggatgtagcaaagtcagttgcctg

SEQ ID NO: 464700 - DNA, 25 bp, Homo sapien
tgtagcaaagtcagttgcctggtag

SEQ ID NO: 464701 - DNA, 25 bp, Homo sapien
agcccaaggggatgtagcaaagtca

SEQ ID NO: 464702 - DNA, 25 bp, Homo sapien
cccaaggggatgtagcaaagtcagt

SEQ ID NO: 464703 - DNA, 25 bp, Homo sapien
ttcaggttggtttcttttaggatga

SEQ ID NO: 464704 - DNA, 25 bp, Homo sapien
ttaggtttccaagccgaacaatgaa

SEQ ID NO: 464705 - DNA, 25 bp, Homo sapien
ggtgaagcatccagaagctaagctc

SEQ ID NO: 464706 - DNA, 25 bp, Homo sapien
accccttgtagtccaaaaggtgcat

SEQ ID NO: 464707 - DNA, 25 bp, Homo sapien
tggcagactgggttaaccccttgta

SEQ ID NO: 464708 - DNA, 25 bp, Homo sapien
ggattaattttactggcagcggcat

SEQ ID NO: 464709 - DNA, 25 bp, Homo sapien
atccttattacttgccttgtcttgt

SEQ ID NO: 464710 - DNA, 25 bp, Homo sapien
ttgccttgtcttgtcctaaatccat

SEQ ID NO: 464711 - DNA, 25 bp, Homo sapien
tattacttgccttgtcttgtcctaa

SEQ ID NO: 464712 - DNA, 25 bp, Homo sapien
tacttgccttgtcttgtcctaaatc

SEQ ID NO: 464713 - DNA, 25 bp, Homo sapien
tgtcgtcaatgatgcttgccatctg

SEQ ID NO: 464714 - DNA, 25 bp, Homo sapien
taattttccatttaggagcctcctg

SEQ ID NO: 464715 - DNA, 25 bp, Homo sapien
ccccatgcttgataacttcatggcc

SEQ ID NO: 464716 - DNA, 25 bp, Homo sapien
cagctgaacattggcagagcactcc

SEQ ID NO: 464717 - DNA, 25 bp, Homo sapien
taactgctactgagtgggcttgcct

SEQ ID NO: 464718 - DNA, 25 bp, Homo sapien
cctaactgctactgagtgggcttgc

SEQ ID NO: 464719 - DNA, 25 bp, Homo sapien
gtgggcttgcctgttctgattccac

SEQ ID NO: 464720 - DNA, 25 bp, Homo sapien
cctctgcctaactgctactgagtgg

SEQ ID NO: 464721 - DNA, 25 bp, Homo sapien
tttcggactgtgaattaaatcccag

SEQ ID NO: 464722 - DNA, 25 bp, Homo sapien
gcataattgcacattcggaacaggg

SEQ ID NO: 464723 - DNA, 25 bp, Homo sapien
tgtttcacctcgcaccacaaagaga

SEQ ID NO: 464724 - DNA, 25 bp, Homo sapien
tactcctagagaaatagagcatggc

SEQ ID NO: 464725 - DNA, 25 bp, Homo sapien
ggtgatatcattctccactggggta

SEQ ID NO: 464726 - DNA, 25 bp, Homo sapien
tcaccagcagtgttacatttcacac

SEQ ID NO: 464727 - DNA, 25 bp, Homo sapien
gactgtcaccagcagtgttacattt

SEQ ID NO: 464728 - DNA, 25 bp, Homo sapien
gccactgcattggtgatatcattct

SEQ ID NO: 464729 - DNA, 25 bp, Homo sapien
caacagctggcagataaatcttcca

SEQ ID NO: 464730 - DNA, 25 bp, Homo sapien
gaggtggcccatgccatctctattt

SEQ ID NO: 464731 - DNA, 25 bp, Homo sapien
tggtataaaggtagttgcctcttga

SEQ ID NO: 464732 - DNA, 25 bp, Homo sapien
cagctacctgcattatggcctcggt

SEQ ID NO: 464733 - DNA, 25 bp, Homo sapien
ctctaacctggagggtgattctgct

SEQ ID NO: 464734 - DNA, 25 bp, Homo sapien
tcctctaacctggagggtgattctg

SEQ ID NO: 464735 - DNA, 25 bp, Homo sapien
tgtcctctaacctggagggtgattc

SEQ ID NO: 464736 - DNA, 25 bp, Homo sapien
tgccacttctccatactcacctctg

SEQ ID NO: 464737 - DNA, 25 bp, Homo sapien
ttcttcttaactccggtactgtcaa

SEQ ID NO: 464738 - DNA, 25 bp, Homo sapien
cttcttcttaactccggtactgtca

SEQ ID NO: 464739 - DNA, 25 bp, Homo sapien
ttcttaactccggtactgtcaagag

SEQ ID NO: 464740 - DNA, 25 bp, Homo sapien
tcttcttaactccggtactgtcaag

SEQ ID NO: 464741 - DNA, 25 bp, Homo sapien
attcctgttgcctgactcccagatg

SEQ ID NO: 464742 - DNA, 25 bp, Homo sapien
ctggaaaccgttatctgtgaactca

SEQ ID NO: 464743 - DNA, 25 bp, Homo sapien
atgtgtcaaatttagccacctggaa

SEQ ID NO: 464744 - DNA, 25 bp, Homo sapien
agccacctggaaaccgttatctgtg

SEQ ID NO: 464745 - DNA, 25 bp, Homo sapien
tgcaaagctgcaaaggattgagcac

SEQ ID NO: 464746 - DNA, 25 bp, Homo sapien
tctgcaaagctgcaaaggattgagc

SEQ ID NO: 464747 - DNA, 25 bp, Homo sapien
ctctctgcaaagctgcaaaggattg

SEQ ID NO: 464748 - DNA, 25 bp, Homo sapien
ctctgcaaagctgcaaaggattgag

SEQ ID NO: 464749 - DNA, 25 bp, Homo sapien
cataggggctatggaataaacaaaa

SEQ ID NO: 464750 - DNA, 25 bp, Homo sapien
aaagatagaagtggtaatacggtga

SEQ ID NO: 464751 - DNA, 25 bp, Homo sapien
gtacaagagtttgatcagcctcaat

SEQ ID NO: 464752 - DNA, 25 bp, Homo sapien
aatttccctatctgtgataggagag

SEQ ID NO: 464753 - DNA, 25 bp, Homo sapien
ggtgaattttcatagatcctctcca

SEQ ID NO: 464754 - DNA, 25 bp, Homo sapien
tcttctgttccttgtatatccctac

SEQ ID NO: 464755 - DNA, 25 bp, Homo sapien
tagatcctctccatcaattcatttt

SEQ ID NO: 464756 - DNA, 25 bp, Homo sapien
gatatggttccgttcactggtgaat

SEQ ID NO: 464757 - DNA, 25 bp, Homo sapien
atcctgcatttggctccctctgagc

SEQ ID NO: 464758 - DNA, 25 bp, Homo sapien
ggttctggcctatcatgtaatcctg

SEQ ID NO: 464759 - DNA, 25 bp, Homo sapien
atggcccaggttctggcctatcatg

SEQ ID NO: 464760 - DNA, 25 bp, Homo sapien
gcctggtagaccatggcccaggttc

SEQ ID NO: 464761 - DNA, 25 bp, Homo sapien
gacatgcattcatttgactggcagc

SEQ ID NO: 464762 - DNA, 25 bp, Homo sapien
ttgtttggcggttgatgaatccttg

SEQ ID NO: 464763 - DNA, 25 bp, Homo sapien
cctctttgtttggcggttgatgaat

SEQ ID NO: 464764 - DNA, 25 bp, Homo sapien
tgtttggcggttgatgaatccttgg

SEQ ID NO: 464765 - DNA, 25 bp, Homo sapien
ctttgtttggcggttgatgaatcct

SEQ ID NO: 464766 - DNA, 25 bp, Homo sapien
tgctgaagctgcagattttggtgtc

SEQ ID NO: 464767 - DNA, 25 bp, Homo sapien
gaagctgcagattttggtgtcattg

SEQ ID NO: 464768 - DNA, 25 bp, Homo sapien
ctgaagctgcagattttggtgtcat

SEQ ID NO: 464769 - DNA, 25 bp, Homo sapien
aagctgctgaagctgcagattttgg

SEQ ID NO: 464770 - DNA, 25 bp, Homo sapien
ataacataagcacactgaaaatcca

SEQ ID NO: 464771 - DNA, 25 bp, Homo sapien
cagtgcagcatgtagtcatccaata

SEQ ID NO: 464772 - DNA, 25 bp, Homo sapien
agtcatccaataattataacataag

SEQ ID NO: 464773 - DNA, 25 bp, Homo sapien
taattgaaatggcagtgcagcatgt

SEQ ID NO: 464774 - DNA, 25 bp, Homo sapien
ccagtgatttcataaagagtcccct

SEQ ID NO: 464775 - DNA, 25 bp, Homo sapien
acagtgcaggagttaacagtttctt

SEQ ID NO: 464776 - DNA, 25 bp, Homo sapien
aagtgagtttttggtggctttgtga

SEQ ID NO: 464777 - DNA, 25 bp, Homo sapien
ttggtaagtattttacaacagtgca

SEQ ID NO: 464778 - DNA, 25 bp, Homo sapien
taggctccaacatgccacgtgctgc

SEQ ID NO: 464779 - DNA, 25 bp, Homo sapien
ttcttaggctccaacatgccacgtg

SEQ ID NO: 464780 - DNA, 25 bp, Homo sapien
tcttaggctccaacatgccacgtgc

SEQ ID NO: 464781 - DNA, 25 bp, Homo sapien
ccttcttaggctccaacatgccacg

SEQ ID NO: 464782 - DNA, 25 bp, Homo sapien
gcatcactcacaaaagtgggaggta

SEQ ID NO: 464783 - DNA, 25 bp, Homo sapien
caggttggaagcagcgacgtgctcc

SEQ ID NO: 464784 - DNA, 25 bp, Homo sapien
ctggcacagtactccccttgagttt

SEQ ID NO: 464785 - DNA, 25 bp, Homo sapien
ccacaattgagataggcaggttgga

SEQ ID NO: 464786 - DNA, 25 bp, Homo sapien
gatgaattgacggatcttaaactcc

SEQ ID NO: 464787 - DNA, 25 bp, Homo sapien
gtgggatgaattgacggatcttaaa

SEQ ID NO: 464788 - DNA, 25 bp, Homo sapien
aattgacggatcttaaactccttga

SEQ ID NO: 464789 - DNA, 25 bp, Homo sapien
tgaattgacggatcttaaactcctt

SEQ ID NO: 464790 - DNA, 25 bp, Homo sapien
ccaaagtctttgctatgcaaatcaa

SEQ ID NO: 464791 - DNA, 25 bp, Homo sapien
cactgatgctttgtttccatgcccc

SEQ ID NO: 464792 - DNA, 25 bp, Homo sapien
ccatgcccccaaagtctttgctatg

SEQ ID NO: 464793 - DNA, 25 bp, Homo sapien
ctgatgctttgtttccatgccccca

SEQ ID NO: 464794 - DNA, 25 bp, Homo sapien
ggagatcttaatgcgtcccaggagg

SEQ ID NO: 464795 - DNA, 25 bp, Homo sapien
gacaatgatggagctactgcctgag

SEQ ID NO: 464796 - DNA, 25 bp, Homo sapien
gcaggattgtttgcctagccaggct

SEQ ID NO: 464797 - DNA, 25 bp, Homo sapien
gtaattttgccagaggccagcccaa

SEQ ID NO: 464798 - DNA, 25 bp, Homo sapien
atggctcctgtccaggataaccagt

SEQ ID NO: 464799 - DNA, 25 bp, Homo sapien
gttgattggaggtatattgctgagt

SEQ ID NO: 464800 - DNA, 25 bp, Homo sapien
cctgtccaggataaccagtgctcat

SEQ ID NO: 464801 - DNA, 25 bp, Homo sapien
cagtggttgattggaggtatattgc

SEQ ID NO: 464802 - DNA, 25 bp, Homo sapien
ttgctgtgtgtccttagagaaaaca

SEQ ID NO: 464803 - DNA, 25 bp, Homo sapien
gcctcccactaacttgctgtgtgtc

SEQ ID NO: 464804 - DNA, 25 bp, Homo sapien
gtgtgtccttagagaaaacattcag

SEQ ID NO: 464805 - DNA, 25 bp, Homo sapien
ctgtgtgtccttagagaaaacattc

SEQ ID NO: 464806 - DNA, 25 bp, Homo sapien
cctccaggaagctgatcagttttgc

SEQ ID NO: 464807 - DNA, 25 bp, Homo sapien
agtaccctgacagctccagagagtg

SEQ ID NO: 464808 - DNA, 25 bp, Homo sapien
cagagagtgggcccacctccaggaa

SEQ ID NO: 464809 - DNA, 25 bp, Homo sapien
tccaggaagctgatcagttttgctc

SEQ ID NO: 464810 - DNA, 25 bp, Homo sapien
tgtggttgaagcatataaatcctgt

SEQ ID NO: 464811 - DNA, 25 bp, Homo sapien
tatgtcttgggatcaaacacttgag

SEQ ID NO: 464812 - DNA, 25 bp, Homo sapien
ccttgttgagttcccaagggagctg

SEQ ID NO: 464813 - DNA, 25 bp, Homo sapien
gagaactggtccataaagtacccaa

SEQ ID NO: 464814 - DNA, 25 bp, Homo sapien
gaagtctcctacgattttatgtctc

SEQ ID NO: 464815 - DNA, 25 bp, Homo sapien
ctacgattttatgtctccctgtgca

SEQ ID NO: 464816 - DNA, 25 bp, Homo sapien
ggcaaacatgaagtctcctacgatt

SEQ ID NO: 464817 - DNA, 25 bp, Homo sapien
aaggcaaacatgaagtctcctacga

SEQ ID NO: 464818 - DNA, 25 bp, Homo sapien
taacagcggcgctttccccacaggt

SEQ ID NO: 464819 - DNA, 25 bp, Homo sapien
gatttcagcagaaatattaacagcg

SEQ ID NO: 464820 - DNA, 25 bp, Homo sapien
gcagaaatattaacagcggcgcttt

SEQ ID NO: 464821 - DNA, 25 bp, Homo sapien
tgggcagtgcgggatgcctctgatc

SEQ ID NO: 464822 - DNA, 25 bp, Homo sapien
ttacagctgaataagacaaagcctc

SEQ ID NO: 464823 - DNA, 25 bp, Homo sapien
agctgaataagacaaagcctccatt

SEQ ID NO: 464824 - DNA, 25 bp, Homo sapien
tttacagctgaataagacaaagcct

SEQ ID NO: 464825 - DNA, 25 bp, Homo sapien
caaagaggaatgaccttcagttgca

SEQ ID NO: 464826 - DNA, 25 bp, Homo sapien
tggtgctccacagatcaggtcaggg

SEQ ID NO: 464827 - DNA, 25 bp, Homo sapien
gaagacagaacggagttcaccttcc

SEQ ID NO: 464828 - DNA, 25 bp, Homo sapien
caaggaattatattagcctctgggc

SEQ ID NO: 464829 - DNA, 25 bp, Homo sapien
gcttgaagcagtctatttgggagta

SEQ ID NO: 464830 - DNA, 25 bp, Homo sapien
gtagacaatgcctgttcctaaggct

SEQ ID NO: 464831 - DNA, 25 bp, Homo sapien
ggctgcatagccgtcctctcggtaa

SEQ ID NO: 464832 - DNA, 25 bp, Homo sapien
ctccggttccggcaccatgcaaagt

SEQ ID NO: 464833 - DNA, 25 bp, Homo sapien
tgctgggctgttagaacaggctgac

SEQ ID NO: 464834 - DNA, 25 bp, Homo sapien
tagaacaggctgacctggactaagg

SEQ ID NO: 464835 - DNA, 25 bp, Homo sapien
ggctgttagaacaggctgacctgga

SEQ ID NO: 464836 - DNA, 25 bp, Homo sapien
acaggctgacctggactaaggactt

SEQ ID NO: 464837 - DNA, 25 bp, Homo sapien
aaattacaggcagctcctactgttc

SEQ ID NO: 464838 - DNA, 25 bp, Homo sapien
tgaatttagtggctcagcataaaga

SEQ ID NO: 464839 - DNA, 25 bp, Homo sapien
tactgttcccttcttcgactcccac

SEQ ID NO: 464840 - DNA, 25 bp, Homo sapien
gtggttttcagcctccagtgaattt

SEQ ID NO: 464841 - DNA, 25 bp, Homo sapien
tgaggtgttgatccagggctgttca

SEQ ID NO: 464842 - DNA, 25 bp, Homo sapien
cagttgctgattcttatcagggtta

SEQ ID NO: 464843 - DNA, 25 bp, Homo sapien
gactgttgtgggtagacctaggtcc

SEQ ID NO: 464844 - DNA, 25 bp, Homo sapien
gattcagtaggatagtcccagaaag

SEQ ID NO: 464845 - DNA, 25 bp, Homo sapien
tccatcgttttaatgtagcaaagca

SEQ ID NO: 464846 - DNA, 25 bp, Homo sapien
tatactcagaacccttggcatccaa

SEQ ID NO: 464847 - DNA, 25 bp, Homo sapien
atactcagaacccttggcatccaaa

SEQ ID NO: 464848 - DNA, 25 bp, Homo sapien
ctcagaacccttggcatccaaattg

SEQ ID NO: 464849 - DNA, 25 bp, Homo sapien
tactcagaacccttggcatccaaat

SEQ ID NO: 464850 - DNA, 25 bp, Homo sapien
tctcttagaggaacttcagctctct

SEQ ID NO: 464851 - DNA, 25 bp, Homo sapien
ttctcttagaggaacttcagctctc

SEQ ID NO: 464852 - DNA, 25 bp, Homo sapien
tctcagttgctttcttctgacttac

SEQ ID NO: 464853 - DNA, 25 bp, Homo sapien
tccttctcagttgctttcttctgac

SEQ ID NO: 464854 - DNA, 25 bp, Homo sapien
ctcctccttctcagttgctttcttc

SEQ ID NO: 464855 - DNA, 25 bp, Homo sapien
cctccttctcagttgctttcttctg

SEQ ID NO: 464856 - DNA, 25 bp, Homo sapien
gactctgaataagccggaactgttt

SEQ ID NO: 464857 - DNA, 25 bp, Homo sapien
gggaaaatccattgaatctcagaga

SEQ ID NO: 464858 - DNA, 25 bp, Homo sapien
cagagatgcctgtgcttgcaaatta

SEQ ID NO: 464859 - DNA, 25 bp, Homo sapien
gagcatccctctaggattgaaggaa

SEQ ID NO: 464860 - DNA, 25 bp, Homo sapien
cttcagggatcacaataggagattc

SEQ ID NO: 464861 - DNA, 25 bp, Homo sapien
cacctgctgttgatggttgataaag

SEQ ID NO: 464862 - DNA, 25 bp, Homo sapien
taggagattcacgtgccctgacagg

SEQ ID NO: 464863 - DNA, 25 bp, Homo sapien
tctgagagccattctgcgaggctgc

SEQ ID NO: 464864 - DNA, 25 bp, Homo sapien
actgggatgcaaatcaccaaatcct

SEQ ID NO: 464865 - DNA, 25 bp, Homo sapien
gaaggccttaactgatatcatgtca

SEQ ID NO: 464866 - DNA, 25 bp, Homo sapien
ccttcttaacactgggatgcaaatc

SEQ ID NO: 464867 - DNA, 25 bp, Homo sapien
ttcttcccaagtaaactggaatctg

SEQ ID NO: 464868 - DNA, 25 bp, Homo sapien
tctgtttggcactgttgaaggtcta

SEQ ID NO: 464869 - DNA, 25 bp, Homo sapien
gaaggtctagtttattgagccaaga

SEQ ID NO: 464870 - DNA, 25 bp, Homo sapien
ggtgatccagggcagtcaacgtctg

SEQ ID NO: 464871 - DNA, 25 bp, Homo sapien
caacgtctgtttggcactgttgaag

SEQ ID NO: 464872 - DNA, 25 bp, Homo sapien
caggaggagcactcatctttggtct

SEQ ID NO: 464873 - DNA, 25 bp, Homo sapien
ggaggagcactcatctttggtcttc

SEQ ID NO: 464874 - DNA, 25 bp, Homo sapien
aggaggagcactcatctttggtctt

SEQ ID NO: 464875 - DNA, 25 bp, Homo sapien
gaggagcactcatctttggtcttct

SEQ ID NO: 464876 - DNA, 25 bp, Homo sapien
agtccgcattgccagcctggttgtg

SEQ ID NO: 464877 - DNA, 25 bp, Homo sapien
agtttttgaatgtgaccttgtgttg

SEQ ID NO: 464878 - DNA, 25 bp, Homo sapien
gcattgccagcctggttgtgcccta

SEQ ID NO: 464879 - DNA, 25 bp, Homo sapien
ggcctgcctcccatatgcctctgaa

SEQ ID NO: 464880 - DNA, 25 bp, Homo sapien
ggaactatgcccagagaaacttcag

SEQ ID NO: 464881 - DNA, 25 bp, Homo sapien
tgaccccagcgatctcacaggatag

SEQ ID NO: 464882 - DNA, 25 bp, Homo sapien
tctgaagtagaacctcccactggag

SEQ ID NO: 464883 - DNA, 25 bp, Homo sapien
cactgtgtgatatgtagcaggtgca

SEQ ID NO: 464884 - DNA, 25 bp, Homo sapien
ttctgagacttcctgattttcaatg

SEQ ID NO: 464885 - DNA, 25 bp, Homo sapien
gacttcctgattttcaatgattcta

SEQ ID NO: 464886 - DNA, 25 bp, Homo sapien
gattctactctggatggttgaaaat

SEQ ID NO: 464887 - DNA, 25 bp, Homo sapien
tcaatgattctactctggatggttg

SEQ ID NO: 464888 - DNA, 25 bp, Homo sapien
caacacaagatactgtccgttcata

SEQ ID NO: 464889 - DNA, 25 bp, Homo sapien
tgtgtgtttccctcaacacaagata

SEQ ID NO: 464890 - DNA, 25 bp, Homo sapien
cacttaggctgttgacaataatcat

SEQ ID NO: 464891 - DNA, 25 bp, Homo sapien
tactgtccgttcatattcacttagg

SEQ ID NO: 464892 - DNA, 25 bp, Homo sapien
ttgattatggtgacactccaaccca

SEQ ID NO: 464893 - DNA, 25 bp, Homo sapien
acaggagtttattgattatggtgac

SEQ ID NO: 464894 - DNA, 25 bp, Homo sapien
ttatggtgacactccaacccaaacc

SEQ ID NO: 464895 - DNA, 25 bp, Homo sapien
cacaggagtttattgattatggtga

SEQ ID NO: 464896 - DNA, 25 bp, Homo sapien
ggtcactactttgccctcttctggg

SEQ ID NO: 464897 - DNA, 25 bp, Homo sapien
gactctgctgtatctcttgggcacc

SEQ ID NO: 464898 - DNA, 25 bp, Homo sapien
tctggtaggcattgcagccacttct

SEQ ID NO: 464899 - DNA, 25 bp, Homo sapien
tgggcaccactttgtctaccaggaa

SEQ ID NO: 464900 - DNA, 25 bp, Homo sapien
aacaagtggaattttggactgtggg

SEQ ID NO: 464901 - DNA, 25 bp, Homo sapien
tgtgggcagaaaaggagtaaggcat

SEQ ID NO: 464902 - DNA, 25 bp, Homo sapien
tctacttcaggataaatactgactt

SEQ ID NO: 464903 - DNA, 25 bp, Homo sapien
ttcaacaagtggaattttggactgt

SEQ ID NO: 464904 - DNA, 25 bp, Homo sapien
tctgtatgttgtcaaagaggatcgc

SEQ ID NO: 464905 - DNA, 25 bp, Homo sapien
tatgttgtcaaagaggatcgctttg

SEQ ID NO: 464906 - DNA, 25 bp, Homo sapien
tttgttctgtatgttgtcaaagagg

SEQ ID NO: 464907 - DNA, 25 bp, Homo sapien
tgttctgtatgttgtcaaagaggat

SEQ ID NO: 464908 - DNA, 25 bp, Homo sapien
aggcccctgggaacgaaatgatatt

SEQ ID NO: 464909 - DNA, 25 bp, Homo sapien
actagggctaggtcattttgggtgc

SEQ ID NO: 464910 - DNA, 25 bp, Homo sapien
gccgtggcaccagaatgatcttata

SEQ ID NO: 464911 - DNA, 25 bp, Homo sapien
gaaacttctcatactgaggaggccc

SEQ ID NO: 464912 - DNA, 25 bp, Homo sapien
tcattcctcatcgtgaagcaaggct

SEQ ID NO: 464913 - DNA, 25 bp, Homo sapien
caggtgctccagtttggttgcttcg

SEQ ID NO: 464914 - DNA, 25 bp, Homo sapien
tgagggcacagctacggccatcgca

SEQ ID NO: 464915 - DNA, 25 bp, Homo sapien
tgaagaagtacttgtcctccaggat

SEQ ID NO: 464916 - DNA, 25 bp, Homo sapien
tccagtggcacgacataatagcagt

SEQ ID NO: 464917 - DNA, 25 bp, Homo sapien
tactcagaagtgtacggcagaggcc

SEQ ID NO: 464918 - DNA, 25 bp, Homo sapien
taatagcagtgccaggtagtcacca

SEQ ID NO: 464919 - DNA, 25 bp, Homo sapien
tcttggagaacttagggccctcact

SEQ ID NO: 464920 - DNA, 25 bp, Homo sapien
catttggataagaggcaatttttgt

SEQ ID NO: 464921 - DNA, 25 bp, Homo sapien
ttagtagtaagctgtgtgttttgga

SEQ ID NO: 464922 - DNA, 25 bp, Homo sapien
ctttgattagtagtaagctgtgtgt

SEQ ID NO: 464923 - DNA, 25 bp, Homo sapien
ttcatcatttggataagaggcaatt

SEQ ID NO: 464924 - DNA, 25 bp, Homo sapien
tttcgggtcctctgacagtggtcgc

SEQ ID NO: 464925 - DNA, 25 bp, Homo sapien
gatgaacagcttgtcagaccctctg

SEQ ID NO: 464926 - DNA, 25 bp, Homo sapien
ccctctgcgtttggaagactcttga

SEQ ID NO: 464927 - DNA, 25 bp, Homo sapien
tgaccggcagttgacaggaatttcg

SEQ ID NO: 464928 - DNA, 25 bp, Homo sapien
tctactagggtgagttggaccttgg

SEQ ID NO: 464929 - DNA, 25 bp, Homo sapien
tgtggttcctttgctataagctgca

SEQ ID NO: 464930 - DNA, 25 bp, Homo sapien
tttgatgtttgtgttgatgtggaca

SEQ ID NO: 464931 - DNA, 25 bp, Homo sapien
gtcagctctactagggtgagttgga

SEQ ID NO: 464932 - DNA, 25 bp, Homo sapien
tcaaggacgctattaagcatgagga

SEQ ID NO: 464933 - DNA, 25 bp, Homo sapien
gcctgcagaaaccaaatgccctgtt

SEQ ID NO: 464934 - DNA, 25 bp, Homo sapien
tggcccagatacagcacaaggaaag

SEQ ID NO: 464935 - DNA, 25 bp, Homo sapien
tcctgggaagctacacctttgctac

SEQ ID NO: 464936 - DNA, 25 bp, Homo sapien
gcagtgtgtccttaagaaaatacca

SEQ ID NO: 464937 - DNA, 25 bp, Homo sapien
tatgtaaggaaatgactggtgaccc

SEQ ID NO: 464938 - DNA, 25 bp, Homo sapien
taattgggatctatatactaccagc

SEQ ID NO: 464939 - DNA, 25 bp, Homo sapien
taaggcaattgagcacataacgaaa

SEQ ID NO: 464940 - DNA, 25 bp, Homo sapien
cagtcttctcgtttcttactcagaa

SEQ ID NO: 464941 - DNA, 25 bp, Homo sapien
gtcttctcgtttcttactcagaatt

SEQ ID NO: 464942 - DNA, 25 bp, Homo sapien
agcagtcttctcgtttcttactcag

SEQ ID NO: 464943 - DNA, 25 bp, Homo sapien
atagcagtcttctcgtttcttactc

SEQ ID NO: 464944 - DNA, 25 bp, Homo sapien
tcagtcagggaagtagggggatgta

SEQ ID NO: 464945 - DNA, 25 bp, Homo sapien
aatatagaccttatttggtgtcggg

SEQ ID NO: 464946 - DNA, 25 bp, Homo sapien
aagaattccagacacagccaataat

SEQ ID NO: 464947 - DNA, 25 bp, Homo sapien
cagccaataatatagaccttatttg

SEQ ID NO: 464948 - DNA, 25 bp, Homo sapien
ccagggtgcacatctttaaagacat

SEQ ID NO: 464949 - DNA, 25 bp, Homo sapien
accaggaatattagactgtctccct

SEQ ID NO: 464950 - DNA, 25 bp, Homo sapien
gtaaatatcagctacaaccaggaat

SEQ ID NO: 464951 - DNA, 25 bp, Homo sapien
taaagtgggcctttaatgggatggc

SEQ ID NO: 464952 - DNA, 25 bp, Homo sapien
tgttaagaatgttgcttttacagtt

SEQ ID NO: 464953 - DNA, 25 bp, Homo sapien
tgccaaggcgagagattgacaatct

SEQ ID NO: 464954 - DNA, 25 bp, Homo sapien
agagggctaccgctttgggacaaga

SEQ ID NO: 464955 - DNA, 25 bp, Homo sapien
gccagccacgtttcggcagttgtgt

SEQ ID NO: 464956 - DNA, 25 bp, Homo sapien
gctttgggacaagaagccagccacg

SEQ ID NO: 464957 - DNA, 25 bp, Homo sapien
taaattacttaaccaggtgccagcg

SEQ ID NO: 464958 - DNA, 25 bp, Homo sapien
taaacttggagcttagtagaaacgc

SEQ ID NO: 464959 - DNA, 25 bp, Homo sapien
cagctgttcaatgttttgagaccag

SEQ ID NO: 464960 - DNA, 25 bp, Homo sapien
ggtgccagcgtactacatttaatgt

SEQ ID NO: 464961 - DNA, 25 bp, Homo sapien
ggcagttccagtgtacttcaccaga

SEQ ID NO: 464962 - DNA, 25 bp, Homo sapien
ccacatgaatgtcttggtcacaggc

SEQ ID NO: 464963 - DNA, 25 bp, Homo sapien
atgtcttggtcacaggcagttccag

SEQ ID NO: 464964 - DNA, 25 bp, Homo sapien
ttccagtgtacttcaccagaaacat

SEQ ID NO: 464965 - DNA, 25 bp, Homo sapien
tcacagctactgtaatcttactaga

SEQ ID NO: 464966 - DNA, 25 bp, Homo sapien
tgtgcctgctcacagctactgtaat

SEQ ID NO: 464967 - DNA, 25 bp, Homo sapien
cattattccaactcttatctctgtg

SEQ ID NO: 464968 - DNA, 25 bp, Homo sapien
agagttctttctggtcattattcca

SEQ ID NO: 464969 - DNA, 25 bp, Homo sapien
ttggtattcacttctttgagcactg

SEQ ID NO: 464970 - DNA, 25 bp, Homo sapien
tgggttggaaaatgctgaattggaa

SEQ ID NO: 464971 - DNA, 25 bp, Homo sapien
gggaagtgtcgtattccataccaca

SEQ ID NO: 464972 - DNA, 25 bp, Homo sapien
gaacatggtgctcatttagtgatga

SEQ ID NO: 464973 - DNA, 25 bp, Homo sapien
gaatgacttgagctttagtggccaa

SEQ ID NO: 464974 - DNA, 25 bp, Homo sapien
aagtgacatgactcctcagaggcaa

SEQ ID NO: 464975 - DNA, 25 bp, Homo sapien
ttgtcggtgtaagacagcagcggct

SEQ ID NO: 464976 - DNA, 25 bp, Homo sapien
gccaaagcggattgtagcaactcag

SEQ ID NO: 464977 - DNA, 25 bp, Homo sapien
tcttgtgtggacagcaggacagtca

SEQ ID NO: 464978 - DNA, 25 bp, Homo sapien
tcattcttgtgtggacagcaggaca

SEQ ID NO: 464979 - DNA, 25 bp, Homo sapien
ttgtgtggacagcaggacagtcact

SEQ ID NO: 464980 - DNA, 25 bp, Homo sapien
attcttgtgtggacagcaggacagt

SEQ ID NO: 464981 - DNA, 25 bp, Homo sapien
gcagtacactcttctcagccaaagc

SEQ ID NO: 464982 - DNA, 25 bp, Homo sapien
gcagggcgaatgctaattgtagcca

SEQ ID NO: 464983 - DNA, 25 bp, Homo sapien
tttgtgccatgaagcgagagcctga

SEQ ID NO: 464984 - DNA, 25 bp, Homo sapien
cagccaaagccctatgttgtctggg

SEQ ID NO: 464985 - DNA, 25 bp, Homo sapien
aagctgaacaccgcctattactctt

SEQ ID NO: 464986 - DNA, 25 bp, Homo sapien
tggaagctgaacaccgcctattact

SEQ ID NO: 464987 - DNA, 25 bp, Homo sapien
ggaagctgaacaccgcctattactc

SEQ ID NO: 464988 - DNA, 25 bp, Homo sapien
gctgaacaccgcctattactcttca

SEQ ID NO: 464989 - DNA, 25 bp, Homo sapien
tgagctcccatctgataacacctgt

SEQ ID NO: 464990 - DNA, 25 bp, Homo sapien
tgtttgaacagaagtggatgcagac

SEQ ID NO: 464991 - DNA, 25 bp, Homo sapien
gatgcagacagtaattgagggaaaa

SEQ ID NO: 464992 - DNA, 25 bp, Homo sapien
tcttccttaaagtcatagtctctgg

SEQ ID NO: 464993 - DNA, 25 bp, Homo sapien
atatgaaagcataggtgcagagcac

SEQ ID NO: 464994 - DNA, 25 bp, Homo sapien
ccggggaatgggatatgaaagcata

SEQ ID NO: 464995 - DNA, 25 bp, Homo sapien
gaatgggatatgaaagcataggtgc

SEQ ID NO: 464996 - DNA, 25 bp, Homo sapien
tgggatatgaaagcataggtgcaga

SEQ ID NO: 464997 - DNA, 25 bp, Homo sapien
tttggtcttactggatctctcaagc

SEQ ID NO: 464998 - DNA, 25 bp, Homo sapien
tcttactggatctctcaagctggaa

SEQ ID NO: 464999 - DNA, 25 bp, Homo sapien
ctgggatagtctttggtcttactgg

SEQ ID NO: 465000 - DNA, 25 bp, Homo sapien
gtctttggtcttactggatctctca

SEQ ID NO: 465001 - DNA, 25 bp, Homo sapien
taaggagtaaaatcaaatctcttaa

SEQ ID NO: 465002 - DNA, 25 bp, Homo sapien
gaacacagttaaccgcttcccatct

SEQ ID NO: 465003 - DNA, 25 bp, Homo sapien
aaatcaaatctcttaatgtcaccca

SEQ ID NO: 465004 - DNA, 25 bp, Homo sapien
gttgctaaagttccagctgtgaaca

SEQ ID NO: 465005 - DNA, 25 bp, Homo sapien
tattacagaccactgggacacagag

SEQ ID NO: 465006 - DNA, 25 bp, Homo sapien
gattctcagttctccgttttgaagg

SEQ ID NO: 465007 - DNA, 25 bp, Homo sapien
gggcacctagtttatgccacatggg

SEQ ID NO: 465008 - DNA, 25 bp, Homo sapien
ccacatgggtcaggaaaggattctc

SEQ ID NO: 465009 - DNA, 25 bp, Homo sapien
tggatctgggaaataatcagcaatc

SEQ ID NO: 465010 - DNA, 25 bp, Homo sapien
ggatctgggaaataatcagcaatca

SEQ ID NO: 465011 - DNA, 25 bp, Homo sapien
aatggatctgggaaataatcagcaa

SEQ ID NO: 465012 - DNA, 25 bp, Homo sapien
atggatctgggaaataatcagcaat

SEQ ID NO: 465013 - DNA, 25 bp, Homo sapien
cacggccacttctagcttagctgca

SEQ ID NO: 465014 - DNA, 25 bp, Homo sapien
tcacacggccacttctagcttagct

SEQ ID NO: 465015 - DNA, 25 bp, Homo sapien
acggccacttctagcttagctgcag

SEQ ID NO: 465016 - DNA, 25 bp, Homo sapien
ggccacttctagcttagctgcaggg

SEQ ID NO: 465017 - DNA, 25 bp, Homo sapien
gcttcttgaaaggtatgcggctcat

SEQ ID NO: 465018 - DNA, 25 bp, Homo sapien
ggctcataaaaagcaaccagcagga

SEQ ID NO: 465019 - DNA, 25 bp, Homo sapien
tatagaaccaagatgaattcctgag

SEQ ID NO: 465020 - DNA, 25 bp, Homo sapien
tcttgcttagcacacgatctcagga

SEQ ID NO: 465021 - DNA, 25 bp, Homo sapien
tgaatgccacctgatgtcccatctt

SEQ ID NO: 465022 - DNA, 25 bp, Homo sapien
gaatgccacctgatgtcccatcttc

SEQ ID NO: 465023 - DNA, 25 bp, Homo sapien
taactctctgactaggtatcccgga

SEQ ID NO: 465024 - DNA, 25 bp, Homo sapien
ctctgactaggtatcccggatttct

SEQ ID NO: 465025 - DNA, 25 bp, Homo sapien
ttctacctctaactctctgactagg

SEQ ID NO: 465026 - DNA, 25 bp, Homo sapien
taggtatcccggatttctcggaatc

SEQ ID NO: 465027 - DNA, 25 bp, Homo sapien
ggactggtcaagtagacaggtctac

SEQ ID NO: 465028 - DNA, 25 bp, Homo sapien
cctgagtccaacatactttgtttga

SEQ ID NO: 465029 - DNA, 25 bp, Homo sapien
tgttacattcacgtatctccctgag

SEQ ID NO: 465030 - DNA, 25 bp, Homo sapien
agaattcaaaactatggccgggtgc

SEQ ID NO: 465031 - DNA, 25 bp, Homo sapien
tactagttagaaagattaaggtgaa

SEQ ID NO: 465032 - DNA, 25 bp, Homo sapien
tacttgacttagaggctggcagagg

SEQ ID NO: 465033 - DNA, 25 bp, Homo sapien
tctaactttagccttgagattcaag

SEQ ID NO: 465034 - DNA, 25 bp, Homo sapien
ggtgaaaaggtgatcattttttgca

SEQ ID NO: 465035 - DNA, 25 bp, Homo sapien
catagatcaagcaaaactagaagag

SEQ ID NO: 465036 - DNA, 25 bp, Homo sapien
tcaggtgtgtgcatagatgccctcc

SEQ ID NO: 465037 - DNA, 25 bp, Homo sapien
ggaggactactgtatctaaaaagtc

SEQ ID NO: 465038 - DNA, 25 bp, Homo sapien
tacgagttggtgatagaaacatttg

SEQ ID NO: 465039 - DNA, 25 bp, Homo sapien
catacatgataggttagggccagag

SEQ ID NO: 465040 - DNA, 25 bp, Homo sapien
tgtgaaatcagagtatgctcctatt

SEQ ID NO: 465041 - DNA, 25 bp, Homo sapien
tatttcacctttcatacatgatagg

SEQ ID NO: 465042 - DNA, 25 bp, Homo sapien
tcagagtatgctcctatttcacctt

SEQ ID NO: 465043 - DNA, 25 bp, Homo sapien
tagtcatgctgtgtgcgtccagatg

SEQ ID NO: 465044 - DNA, 25 bp, Homo sapien
gcgtccagatgttgggcgtcctaca

SEQ ID NO: 465045 - DNA, 25 bp, Homo sapien
ggtggctgctcagcactagtagtca

SEQ ID NO: 465046 - DNA, 25 bp, Homo sapien
agatgttgggcgtcctacacgagga

SEQ ID NO: 465047 - DNA, 25 bp, Homo sapien
ggttttatctctgatacagctttct

SEQ ID NO: 465048 - DNA, 25 bp, Homo sapien
tttaatgtctttgtgcatatgccct

SEQ ID NO: 465049 - DNA, 25 bp, Homo sapien
ttaatgtctttgtgcatatgccctc

SEQ ID NO: 465050 - DNA, 25 bp, Homo sapien
tatctctgatacagctttctctgtt

SEQ ID NO: 465051 - DNA, 25 bp, Homo sapien
tagcctggatttctacccacagatg

SEQ ID NO: 465052 - DNA, 25 bp, Homo sapien
tatcaaaaagcaaagtgggtagcct

SEQ ID NO: 465053 - DNA, 25 bp, Homo sapien
catggtgagcataatgaggcagtcc

SEQ ID NO: 465054 - DNA, 25 bp, Homo sapien
ccactggagctgtgtcataggaagc

SEQ ID NO: 465055 - DNA, 25 bp, Homo sapien
aattcattcatgagctgaaaatggg

SEQ ID NO: 465056 - DNA, 25 bp, Homo sapien
aggaattcattcatgagctgaaaat

SEQ ID NO: 465057 - DNA, 25 bp, Homo sapien
tctctccgagtgtctttgaccagca

SEQ ID NO: 465058 - DNA, 25 bp, Homo sapien
catgcctggagtctctccgagtgtc

SEQ ID NO: 465059 - DNA, 25 bp, Homo sapien
gaacttacacaattcatttcctgcc

SEQ ID NO: 465060 - DNA, 25 bp, Homo sapien
ccgaatttcgtaccacttcacctga

SEQ ID NO: 465061 - DNA, 25 bp, Homo sapien
cacttcacctgatcttcttttgaac

SEQ ID NO: 465062 - DNA, 25 bp, Homo sapien
catttcctgccgttggatggtgaat

SEQ ID NO: 465063 - DNA, 25 bp, Homo sapien
tagcctggacaactttgttaaggtg

SEQ ID NO: 465064 - DNA, 25 bp, Homo sapien
tattatttgtggtgttagcctggac

SEQ ID NO: 465065 - DNA, 25 bp, Homo sapien
aaaggatatctgcacagtcttaaag

SEQ ID NO: 465066 - DNA, 25 bp, Homo sapien
tatttcccctctataattaaggaga

SEQ ID NO: 465067 - DNA, 25 bp, Homo sapien
tggaattctgttacctgtgtctgac

SEQ ID NO: 465068 - DNA, 25 bp, Homo sapien
taagattacaggagtactagaggtc

SEQ ID NO: 465069 - DNA, 25 bp, Homo sapien
tgtgtctgacctacttaacccttcc

SEQ ID NO: 465070 - DNA, 25 bp, Homo sapien
gcctggctcaagaatttgaccatag

SEQ ID NO: 465071 - DNA, 25 bp, Homo sapien
aacagtggcctgcattggaagaaaa

SEQ ID NO: 465072 - DNA, 25 bp, Homo sapien
aaatggaagggtcaagaaactggag

SEQ ID NO: 465073 - DNA, 25 bp, Homo sapien
gagagactagtaagatttgccataa

SEQ ID NO: 465074 - DNA, 25 bp, Homo sapien
tttactgagggtgataggcagaagt

SEQ ID NO: 465075 - DNA, 25 bp, Homo sapien
cccgtctggactcttgaatttgctg

SEQ ID NO: 465076 - DNA, 25 bp, Homo sapien
gtgagtttctccagtcccgtctgga

SEQ ID NO: 465077 - DNA, 25 bp, Homo sapien
aattgataggtaagtgttctctgga

SEQ ID NO: 465078 - DNA, 25 bp, Homo sapien
gatttcctgccctattgacttctct

SEQ ID NO: 465079 - DNA, 25 bp, Homo sapien
agaaacacaattctcagatcagttt

SEQ ID NO: 465080 - DNA, 25 bp, Homo sapien
ggtgtagaaagaaacacaattctca

SEQ ID NO: 465081 - DNA, 25 bp, Homo sapien
tattgttttggtgtagaaagaaaca

SEQ ID NO: 465082 - DNA, 25 bp, Homo sapien
ttctcagatcagttttccagctcct

SEQ ID NO: 465083 - DNA, 25 bp, Homo sapien
taacgctgatctctcgttggctctc

SEQ ID NO: 465084 - DNA, 25 bp, Homo sapien
tccttaacgctgatctctcgttggc

SEQ ID NO: 465085 - DNA, 25 bp, Homo sapien
tctccttaacgctgatctctcgttg

SEQ ID NO: 465086 - DNA, 25 bp, Homo sapien
tgctgtggacacttgaatgatgcct

SEQ ID NO: 465087 - DNA, 25 bp, Homo sapien
ccactgcatagatttttcaaccccc

SEQ ID NO: 465088 - DNA, 25 bp, Homo sapien
ctctggggatggcattaggaaactg

SEQ ID NO: 465089 - DNA, 25 bp, Homo sapien
ctggggatggcattaggaaactgcc

SEQ ID NO: 465090 - DNA, 25 bp, Homo sapien
actgcatagatttttcaacccccat

SEQ ID NO: 465091 - DNA, 25 bp, Homo sapien
tccatctgactgtgagtctcctgag

SEQ ID NO: 465092 - DNA, 25 bp, Homo sapien
gattcgtccatctgactgtgagtct

SEQ ID NO: 465093 - DNA, 25 bp, Homo sapien
tgactgtgagtctcctgaggccctg

SEQ ID NO: 465094 - DNA, 25 bp, Homo sapien
ctcacatctgattcgtccatctgac

SEQ ID NO: 465095 - DNA, 25 bp, Homo sapien
tctaatcaagctggccgtcacaaag

SEQ ID NO: 465096 - DNA, 25 bp, Homo sapien
cactaggcatagctccactgttgat

SEQ ID NO: 465097 - DNA, 25 bp, Homo sapien
cagccaagcctagaacctcataatt

SEQ ID NO: 465098 - DNA, 25 bp, Homo sapien
gacatacatgtccttggtccgtgca

SEQ ID NO: 465099 - DNA, 25 bp, Homo sapien
agcagctggctgtcccatcatagtt

SEQ ID NO: 465100 - DNA, 25 bp, Homo sapien
cagcagctggctgtcccatcatagt

SEQ ID NO: 465101 - DNA, 25 bp, Homo sapien
tcagcagctggctgtcccatcatag

SEQ ID NO: 465102 - DNA, 25 bp, Homo sapien
catttttgaattctttgctccataa

SEQ ID NO: 465103 - DNA, 25 bp, Homo sapien
gcttaaatcattgctgaagtctcct

SEQ ID NO: 465104 - DNA, 25 bp, Homo sapien
tacagaaattggtgtgttcataacc

SEQ ID NO: 465105 - DNA, 25 bp, Homo sapien
cagttgcttgagcttgtggctggac

SEQ ID NO: 465106 - DNA, 25 bp, Homo sapien
tgtttgaatggtgcgataatcaacc

SEQ ID NO: 465107 - DNA, 25 bp, Homo sapien
cagtcttccaaaaatggctatattt

SEQ ID NO: 465108 - DNA, 25 bp, Homo sapien
gttttgtcccaatctcctatactta

SEQ ID NO: 465109 - DNA, 25 bp, Homo sapien
aatctcctatacttaagaaccttgg

SEQ ID NO: 465110 - DNA, 25 bp, Homo sapien
tcctatacttaagaaccttggctgc

SEQ ID NO: 465111 - DNA, 25 bp, Homo sapien
gtctatatctgcgaccattcttcat

SEQ ID NO: 465112 - DNA, 25 bp, Homo sapien
gttttcctagagcttgctgtaattg

SEQ ID NO: 465113 - DNA, 25 bp, Homo sapien
tgtaattgtctatatctgcgaccat

SEQ ID NO: 465114 - DNA, 25 bp, Homo sapien
tcctagagcttgctgtaattgtcta

SEQ ID NO: 465115 - DNA, 25 bp, Homo sapien
tgtagatgaagtagtgaactgttat

SEQ ID NO: 465116 - DNA, 25 bp, Homo sapien
gatgaagtagtgaactgttataaac

SEQ ID NO: 465117 - DNA, 25 bp, Homo sapien
ggatgtagatgaagtagtgaactgt

SEQ ID NO: 465118 - DNA, 25 bp, Homo sapien
cttgaggatgtagatgaagtagtga

SEQ ID NO: 465119 - DNA, 25 bp, Homo sapien
tagactgaggagttcacagatagcc

SEQ ID NO: 465120 - DNA, 25 bp, Homo sapien
tttaatgcgattgatgatgttttgc

SEQ ID NO: 465121 - DNA, 25 bp, Homo sapien
gctgaggaagatatgtgtagactga

SEQ ID NO: 465122 - DNA, 25 bp, Homo sapien
cattattggatttaatagtggaaaa

SEQ ID NO: 465123 - DNA, 25 bp, Homo sapien
gagtaaaacctgttgtcgatccctc

SEQ ID NO: 465124 - DNA, 25 bp, Homo sapien
agcttccagcttgcggcttgctgag

SEQ ID NO: 465125 - DNA, 25 bp, Homo sapien
cttgcggcttgctgagtggccacct

SEQ ID NO: 465126 - DNA, 25 bp, Homo sapien
taaaacctgttgtcgatccctcagc

SEQ ID NO: 465127 - DNA, 25 bp, Homo sapien
ccgacttcagcggttgggctaggct

SEQ ID NO: 465128 - DNA, 25 bp, Homo sapien
tcattgatccggcggcgcgggattg

SEQ ID NO: 465129 - DNA, 25 bp, Homo sapien
cacgggtggcgggagttttcagatg

SEQ ID NO: 465130 - DNA, 25 bp, Homo sapien
gggattggccagtcccgggccaaca

SEQ ID NO: 465131 - DNA, 25 bp, Homo sapien
gtccccggcgcttctccaaatctga

SEQ ID NO: 465132 - DNA, 25 bp, Homo sapien
gaaatccaggccgatgacttcctcc

SEQ ID NO: 465133 - DNA, 25 bp, Homo sapien
tccttaaggtgagcggcctggaccg

SEQ ID NO: 465134 - DNA, 25 bp, Homo sapien
aaatctgacgccactctgcgtcctt

SEQ ID NO: 465135 - DNA, 25 bp, Homo sapien
catgggctaagggtgtaaccagtac

SEQ ID NO: 465136 - DNA, 25 bp, Homo sapien
tcaataatgcatgggctaagggtgt

SEQ ID NO: 465137 - DNA, 25 bp, Homo sapien
ttcttcgatgaactttcaataatgc

SEQ ID NO: 465138 - DNA, 25 bp, Homo sapien
gctaagggtgtaaccagtacaccca

SEQ ID NO: 465139 - DNA, 25 bp, Homo sapien
aggcaaagtcaaaagtcagatttgc

SEQ ID NO: 465140 - DNA, 25 bp, Homo sapien
caggacaacgttgaccttgatttgg

SEQ ID NO: 465141 - DNA, 25 bp, Homo sapien
gatttggaggatgcagccaggtcat

SEQ ID NO: 465142 - DNA, 25 bp, Homo sapien
ttgatttggaggatgcagccaggtc

SEQ ID NO: 465143 - DNA, 25 bp, Homo sapien
cccatcatctcaggacaacgttgac

SEQ ID NO: 465144 - DNA, 25 bp, Homo sapien
tgtcttcagtctctgagggaaatgt

SEQ ID NO: 465145 - DNA, 25 bp, Homo sapien
ttgttcggtaggtgcatgtcttcag

SEQ ID NO: 465146 - DNA, 25 bp, Homo sapien
tctgctgaaaggttggcgtactttg

SEQ ID NO: 465147 - DNA, 25 bp, Homo sapien
tggcgtactttgttcggtaggtgca

SEQ ID NO: 465148 - DNA, 25 bp, Homo sapien
gcaaaccctttctgctgttgtctgg

SEQ ID NO: 465149 - DNA, 25 bp, Homo sapien
caaaccctttctgctgttgtctgga

SEQ ID NO: 465150 - DNA, 25 bp, Homo sapien
ctttctgacagctgaaactgtaaaa

SEQ ID NO: 465151 - DNA, 25 bp, Homo sapien
tgtgtgcaaaccgtaagtgaaattc

SEQ ID NO: 465152 - DNA, 25 bp, Homo sapien
acaggttgtcccacaagtcctgtgt

SEQ ID NO: 465153 - DNA, 25 bp, Homo sapien
attccaggatcacaggttgtcccac

SEQ ID NO: 465154 - DNA, 25 bp, Homo sapien
cagctccacggatgctggaggtggt

SEQ ID NO: 465155 - DNA, 25 bp, Homo sapien
cctcgaatctagcaaagccaaaggg

SEQ ID NO: 465156 - DNA, 25 bp, Homo sapien
aattcctggaatgcctatttctgtc

SEQ ID NO: 465157 - DNA, 25 bp, Homo sapien
ttgtcaagcaccctcgaatctagca

SEQ ID NO: 465158 - DNA, 25 bp, Homo sapien
caaagggcttgaaattcctggaatg

SEQ ID NO: 465159 - DNA, 25 bp, Homo sapien
aagggaagcccatcagactaacagt

SEQ ID NO: 465160 - DNA, 25 bp, Homo sapien
gccagaagagagtggaggccaatat

SEQ ID NO: 465161 - DNA, 25 bp, Homo sapien
agagagaaaggtcggattaccgaca

SEQ ID NO: 465162 - DNA, 25 bp, Homo sapien
ggatctctcagcagaaactctacaa

SEQ ID NO: 465163 - DNA, 25 bp, Homo sapien
cttgagacttatgcaaggataagcg

SEQ ID NO: 465164 - DNA, 25 bp, Homo sapien
ttgagacttatgcaaggataagcgg

SEQ ID NO: 465165 - DNA, 25 bp, Homo sapien
aggataagcggaactcagaagtgac

SEQ ID NO: 465166 - DNA, 25 bp, Homo sapien
gcaaggataagcggaactcagaagt

SEQ ID NO: 465167 - DNA, 25 bp, Homo sapien
cttcggtacgcgaatatattcagat

SEQ ID NO: 465168 - DNA, 25 bp, Homo sapien
cggtacgcgaatatattcagatatc

SEQ ID NO: 465169 - DNA, 25 bp, Homo sapien
tcggtacgcgaatatattcagatat

SEQ ID NO: 465170 - DNA, 25 bp, Homo sapien
gtacgcgaatatattcagatatctt

SEQ ID NO: 465171 - DNA, 25 bp, Homo sapien
catcgtcttccgatggtatttcaat

SEQ ID NO: 465172 - DNA, 25 bp, Homo sapien
ccatcgtcttccgatggtatttcaa

SEQ ID NO: 465173 - DNA, 25 bp, Homo sapien
cgtcccatcgtcttccgatggtatt

SEQ ID NO: 465174 - DNA, 25 bp, Homo sapien
tcccatcgtcttccgatggtatttc

SEQ ID NO: 465175 - DNA, 25 bp, Homo sapien
gacactggatttctgtagcgaagcc

SEQ ID NO: 465176 - DNA, 25 bp, Homo sapien
actggatttctgtagcgaagcccac

SEQ ID NO: 465177 - DNA, 25 bp, Homo sapien
ctgagacactggatttctgtagcga

SEQ ID NO: 465178 - DNA, 25 bp, Homo sapien
gatttctgtagcgaagcccacacac

SEQ ID NO: 465179 - DNA, 25 bp, Homo sapien
ctttaggatagttgacaacatacac

SEQ ID NO: 465180 - DNA, 25 bp, Homo sapien
gatagttgacaacatacaccagatt

SEQ ID NO: 465181 - DNA, 25 bp, Homo sapien
taggatagttgacaacatacaccag

SEQ ID NO: 465182 - DNA, 25 bp, Homo sapien
tttaggatagttgacaacatacacc

SEQ ID NO: 465183 - DNA, 25 bp, Homo sapien
tgaatgaccagtgttagtatctttc

SEQ ID NO: 465184 - DNA, 25 bp, Homo sapien
ccagtgttagtatctttcttgacct

SEQ ID NO: 465185 - DNA, 25 bp, Homo sapien
aaacgaagccaaacctctttgaatg

SEQ ID NO: 465186 - DNA, 25 bp, Homo sapien
tgcgacccaacactactaaatcaga

SEQ ID NO: 465187 - DNA, 25 bp, Homo sapien
cagttaccacccactatgtcatcaa

SEQ ID NO: 465188 - DNA, 25 bp, Homo sapien
ttgatgacatagtgggtggtaactg

SEQ ID NO: 465189 - DNA, 25 bp, Homo sapien
cgtccatctatcatatgtagctgtg

SEQ ID NO: 465190 - DNA, 25 bp, Homo sapien
catgcttctcaaaggcttatctggg

SEQ ID NO: 465191 - DNA, 25 bp, Homo sapien
tatctgggctttgcttagaattggg

SEQ ID NO: 465192 - DNA, 25 bp, Homo sapien
gggaagtttacagtcacaccatcgt

SEQ ID NO: 465193 - DNA, 25 bp, Homo sapien
agaactgccgcagctcatctgcaat

SEQ ID NO: 465194 - DNA, 25 bp, Homo sapien
aagaactgccgcagctcatctgcaa

SEQ ID NO: 465195 - DNA, 25 bp, Homo sapien
gaactgccgcagctcatctgcaatc

SEQ ID NO: 465196 - DNA, 25 bp, Homo sapien
aggcaaacgtcctgaatggcttgag

SEQ ID NO: 465197 - DNA, 25 bp, Homo sapien
ggcaaacgtcctgaatggcttgagg

SEQ ID NO: 465198 - DNA, 25 bp, Homo sapien
gcaaacgtcctgaatggcttgagga

SEQ ID NO: 465199 - DNA, 25 bp, Homo sapien
gattgtttcccaaaatagctccacc

SEQ ID NO: 465200 - DNA, 25 bp, Homo sapien
cttgattgtttcccaaaatagctcc

SEQ ID NO: 465201 - DNA, 25 bp, Homo sapien
tcccaaaatagctccaccccctcta

SEQ ID NO: 465202 - DNA, 25 bp, Homo sapien
tgattgtttcccaaaatagctccac

SEQ ID NO: 465203 - DNA, 25 bp, Homo sapien
cccaactgctttgtagcactgcctg

SEQ ID NO: 465204 - DNA, 25 bp, Homo sapien
ctaacatgcatatcataccccaact

SEQ ID NO: 465205 - DNA, 25 bp, Homo sapien
gctgaatgcacccaagtttatccca

SEQ ID NO: 465206 - DNA, 25 bp, Homo sapien
catcatggttggatttatgctgaat

SEQ ID NO: 465207 - DNA, 25 bp, Homo sapien
tgcaccagaattagaaccactatag

SEQ ID NO: 465208 - DNA, 25 bp, Homo sapien
actgcccgaccctgcatttgatgct

SEQ ID NO: 465209 - DNA, 25 bp, Homo sapien
tacccgatgggcctgactggttctg

SEQ ID NO: 465210 - DNA, 25 bp, Homo sapien
tagaaccactataggagttatttcc

SEQ ID NO: 465211 - DNA, 25 bp, Homo sapien
ctatatcaaccaaccacaaccccac

SEQ ID NO: 465212 - DNA, 25 bp, Homo sapien
tcaaccaaccacaaccccactgtct

SEQ ID NO: 465213 - DNA, 25 bp, Homo sapien
tatcaaccaaccacaaccccactgt

SEQ ID NO: 465214 - DNA, 25 bp, Homo sapien
atatcaaccaaccacaaccccactg

SEQ ID NO: 465215 - DNA, 25 bp, Homo sapien
aaactcatttaaggtcttccaacag

SEQ ID NO: 465216 - DNA, 25 bp, Homo sapien
tttagttcacatcaccacacttaca

SEQ ID NO: 465217 - DNA, 25 bp, Homo sapien
ttaagccttccattaaactgcaaag

SEQ ID NO: 465218 - DNA, 25 bp, Homo sapien
tcttcaactttaagccttccattaa

SEQ ID NO: 465219 - DNA, 25 bp, Homo sapien
ttaaactgcaaagcttgatgtcagc

SEQ ID NO: 465220 - DNA, 25 bp, Homo sapien
cttccattaaactgcaaagcttgat

SEQ ID NO: 465221 - DNA, 25 bp, Homo sapien
gaaaattcatctagctttccaaaat

SEQ ID NO: 465222 - DNA, 25 bp, Homo sapien
gtagaaaattcatctagctttccaa

SEQ ID NO: 465223 - DNA, 25 bp, Homo sapien
ttcatctagctttccaaaattgttt

SEQ ID NO: 465224 - DNA, 25 bp, Homo sapien
gccagtagaaaattcatctagcttt

SEQ ID NO: 465225 - DNA, 25 bp, Homo sapien
ttccgcttgttccatagccactgtt

SEQ ID NO: 465226 - DNA, 25 bp, Homo sapien
tagcttccgcttgttccatagccac

SEQ ID NO: 465227 - DNA, 25 bp, Homo sapien
cactgttccacaaggctcatgagga

SEQ ID NO: 465228 - DNA, 25 bp, Homo sapien
gccactgttccacaaggctcatgag

SEQ ID NO: 465229 - DNA, 25 bp, Homo sapien
tccccatcatgtacagtctgcaagt

SEQ ID NO: 465230 - DNA, 25 bp, Homo sapien
ggctaatgaattttgctgcaaccaa

SEQ ID NO: 465231 - DNA, 25 bp, Homo sapien
tgatttttctttaggtcacctttca

SEQ ID NO: 465232 - DNA, 25 bp, Homo sapien
ctgcaagttgttggactgacaagca

SEQ ID NO: 465233 - DNA, 25 bp, Homo sapien
tctggaacaatcatctcccgcaact

SEQ ID NO: 465234 - DNA, 25 bp, Homo sapien
cgcaactgtataggccataatagct

SEQ ID NO: 465235 - DNA, 25 bp, Homo sapien
ggatgtgacatgagggcaaactctc

SEQ ID NO: 465236 - DNA, 25 bp, Homo sapien
cacaaatggaaggatgtgacatgag

SEQ ID NO: 465237 - DNA, 25 bp, Homo sapien
tcagcagcagcaaccaggcagacac

SEQ ID NO: 465238 - DNA, 25 bp, Homo sapien
gtcagcagcagcaaccaggcagaca

SEQ ID NO: 465239 - DNA, 25 bp, Homo sapien
cacagcgtcagcagcagcaaccagg

SEQ ID NO: 465240 - DNA, 25 bp, Homo sapien
agcgtcagcagcagcaaccaggcag

SEQ ID NO: 465241 - DNA, 25 bp, Homo sapien
gactattacctggtgtattcccatt

SEQ ID NO: 465242 - DNA, 25 bp, Homo sapien
tcccattaactgacaatgtaaactt

SEQ ID NO: 465243 - DNA, 25 bp, Homo sapien
tcccctgagagctcatgactattac

SEQ ID NO: 465244 - DNA, 25 bp, Homo sapien
gaaaaggcttcgagattatcccctg

SEQ ID NO: 465245 - DNA, 25 bp, Homo sapien
aactgctgattgacctggtgatgaa

SEQ ID NO: 465246 - DNA, 25 bp, Homo sapien
tgaagtggaggatatgaccatatgc

SEQ ID NO: 465247 - DNA, 25 bp, Homo sapien
attaaagagcaactgctgattgacc

SEQ ID NO: 465248 - DNA, 25 bp, Homo sapien
gatgaagtggaggatatgaccatat

SEQ ID NO: 465249 - DNA, 25 bp, Homo sapien
ctccattccagcctagaaatatctc

SEQ ID NO: 465250 - DNA, 25 bp, Homo sapien
attccagcctagaaatatctctgtc

SEQ ID NO: 465251 - DNA, 25 bp, Homo sapien
ttccagcctagaaatatctctgtca

SEQ ID NO: 465252 - DNA, 25 bp, Homo sapien
gctgtccacctctctactctctggg

SEQ ID NO: 465253 - DNA, 25 bp, Homo sapien
gagatcttgatttcctcgcttctgc

SEQ ID NO: 465254 - DNA, 25 bp, Homo sapien
ccctggtgtgagatcttgatttcct

SEQ ID NO: 465255 - DNA, 25 bp, Homo sapien
cccctgatgtcggagccctggtgtg

SEQ ID NO: 465256 - DNA, 25 bp, Homo sapien
ccatgatggcctcttcagggagact

SEQ ID NO: 465257 - DNA, 25 bp, Homo sapien
catgatggcctcttcagggagactc

SEQ ID NO: 465258 - DNA, 25 bp, Homo sapien
caatgggaataccagtcaacaggtt

SEQ ID NO: 465259 - DNA, 25 bp, Homo sapien
gatggcctcttcagggagactctcc

SEQ ID NO: 465260 - DNA, 25 bp, Homo sapien
ctgtgctccacagataagatgggtg

SEQ ID NO: 465261 - DNA, 25 bp, Homo sapien
tgctccacagataagatgggtgtcc

SEQ ID NO: 465262 - DNA, 25 bp, Homo sapien
gctccacagataagatgggtgtcca

SEQ ID NO: 465263 - DNA, 25 bp, Homo sapien
ggggaaaatatgcaggagagcaaaa

SEQ ID NO: 465264 - DNA, 25 bp, Homo sapien
aggcttaggaggcagcctgcagagg

SEQ ID NO: 465265 - DNA, 25 bp, Homo sapien
aggaggcagcctgcagaggactgac

SEQ ID NO: 465266 - DNA, 25 bp, Homo sapien
ctgaggcttaggaggcagcctgcag

SEQ ID NO: 465267 - DNA, 25 bp, Homo sapien
taggaggcagcctgcagaggactga

SEQ ID NO: 465268 - DNA, 25 bp, Homo sapien
gattgagctgccctgtagcatcaca

SEQ ID NO: 465269 - DNA, 25 bp, Homo sapien
tgtagcatcacaggcagaaaacgca

SEQ ID NO: 465270 - DNA, 25 bp, Homo sapien
tgagattgagctgccctgtagcatc

SEQ ID NO: 465271 - DNA, 25 bp, Homo sapien
gtagcatcacaggcagaaaacgcag

SEQ ID NO: 465272 - DNA, 25 bp, Homo sapien
attgtggttagcaacatctttggtt

SEQ ID NO: 465273 - DNA, 25 bp, Homo sapien
ggttcaatcatatacacagctttgc

SEQ ID NO: 465274 - DNA, 25 bp, Homo sapien
cacagctttgcagtttagagcatca

SEQ ID NO: 465275 - DNA, 25 bp, Homo sapien
tagagcatcagacataatgtttttc

SEQ ID NO: 465276 - DNA, 25 bp, Homo sapien
tgaatttccttgtaatgtgcttcac

SEQ ID NO: 465277 - DNA, 25 bp, Homo sapien
ttgaatttccttgtaatgtgcttca

SEQ ID NO: 465278 - DNA, 25 bp, Homo sapien
gaaccaatggggatggattgtgatg

SEQ ID NO: 465279 - DNA, 25 bp, Homo sapien
ggaaccaatggggatggattgtgat

SEQ ID NO: 465280 - DNA, 25 bp, Homo sapien
aggaaccaatggggatggattgtga

SEQ ID NO: 465281 - DNA, 25 bp, Homo sapien
gatgtggtacttatgagcttcagca

SEQ ID NO: 465282 - DNA, 25 bp, Homo sapien
gaccacaaccttctaactgatgcgg

SEQ ID NO: 465283 - DNA, 25 bp, Homo sapien
gaaggctctcatgttgaccacaacc

SEQ ID NO: 465284 - DNA, 25 bp, Homo sapien
aaatccatcttgttccccttgtgaa

SEQ ID NO: 465285 - DNA, 25 bp, Homo sapien
gatggaaccaaagcattgtgaacat

SEQ ID NO: 465286 - DNA, 25 bp, Homo sapien
ttgaatagcagttagctgttttcac

SEQ ID NO: 465287 - DNA, 25 bp, Homo sapien
caaatgaagctatgaaagaagtgtc

SEQ ID NO: 465288 - DNA, 25 bp, Homo sapien
ggtggcactcgatatagttttctag

SEQ ID NO: 465289 - DNA, 25 bp, Homo sapien
cagcaacaaacatagtttgtggttt

SEQ ID NO: 465290 - DNA, 25 bp, Homo sapien
atacagcaacaaacatagtttgtgg

SEQ ID NO: 465291 - DNA, 25 bp, Homo sapien
aacaaacatagtttgtggtttgcag

SEQ ID NO: 465292 - DNA, 25 bp, Homo sapien
gcaacaaacatagtttgtggtttgc

SEQ ID NO: 465293 - DNA, 25 bp, Homo sapien
aacagggttgaggaacagacactat

SEQ ID NO: 465294 - DNA, 25 bp, Homo sapien
ccaaacaagaaactgcatggaacag

SEQ ID NO: 465295 - DNA, 25 bp, Homo sapien
acccaaacaagaaactgcatggaac

SEQ ID NO: 465296 - DNA, 25 bp, Homo sapien
gaacagacactatactgtcctctcc

SEQ ID NO: 465297 - DNA, 25 bp, Homo sapien
tgcggcgtcccgtattgcggggaaa

SEQ ID NO: 465298 - DNA, 25 bp, Homo sapien
aggcttctaaggggcagcgtcccca

SEQ ID NO: 465299 - DNA, 25 bp, Homo sapien
ctctgcggcgtcccgtattgcgggg

SEQ ID NO: 465300 - DNA, 25 bp, Homo sapien
ggcttctaaggggcagcgtccccat

SEQ ID NO: 465301 - DNA, 25 bp, Homo sapien
gagaggaacaggcggaagggtacgc

SEQ ID NO: 465302 - DNA, 25 bp, Homo sapien
ggtacgcgggcccaagaggcgctcc

SEQ ID NO: 465303 - DNA, 25 bp, Homo sapien
ccaagaggcgctccctaaaagtttg

SEQ ID NO: 465304 - DNA, 25 bp, Homo sapien
ggcgctccctaaaagtttgctccac

SEQ ID NO: 465305 - DNA, 25 bp, Homo sapien
accgcgcgattgggcgtccgtgact

SEQ ID NO: 465306 - DNA, 25 bp, Homo sapien
cgcgcgattgggcgtccgtgactca

SEQ ID NO: 465307 - DNA, 25 bp, Homo sapien
ctaccgcgcgattgggcgtccgtga

SEQ ID NO: 465308 - DNA, 25 bp, Homo sapien
gcgcgattgggcgtccgtgactcac

SEQ ID NO: 465309 - DNA, 25 bp, Homo sapien
gctctgtactgccagatctggcaac

SEQ ID NO: 465310 - DNA, 25 bp, Homo sapien
ctgagtgggcatgcgcgccgccgtc

SEQ ID NO: 465311 - DNA, 25 bp, Homo sapien
ccttcgcccgcgctgtagagggctg

SEQ ID NO: 465312 - DNA, 25 bp, Homo sapien
tactgccagatctggcaaccacagc

SEQ ID NO: 465313 - DNA, 25 bp, Homo sapien
taaaaaggtcacgttgcgggcagca

SEQ ID NO: 465314 - DNA, 25 bp, Homo sapien
gtgaaaatgccctggtcagcccaag

SEQ ID NO: 465315 - DNA, 25 bp, Homo sapien
ggcagatcgagttgccccagtcgga

SEQ ID NO: 465316 - DNA, 25 bp, Homo sapien
cagtcggacaccacagtgaaaatgc

SEQ ID NO: 465317 - DNA, 25 bp, Homo sapien
agtgtggcgtttgcagcgcccacag

SEQ ID NO: 465318 - DNA, 25 bp, Homo sapien
ttggaaagtcgcgaggaggttcttc

SEQ ID NO: 465319 - DNA, 25 bp, Homo sapien
acaggcggccacctcagagagggca

SEQ ID NO: 465320 - DNA, 25 bp, Homo sapien
tcttcgtagagcaaaagtgtggcgt

SEQ ID NO: 465321 - DNA, 25 bp, Homo sapien
agtcaggacggttcagggactttgc

SEQ ID NO: 465322 - DNA, 25 bp, Homo sapien
caggacggttcagggactttgcctc

SEQ ID NO: 465323 - DNA, 25 bp, Homo sapien
ctggagtcaggacggttcagggact

SEQ ID NO: 465324 - DNA, 25 bp, Homo sapien
gacggttcagggactttgcctcttc

SEQ ID NO: 465325 - DNA, 25 bp, Homo sapien
ggcgcttccgcgtgcgggttccgct

SEQ ID NO: 465326 - DNA, 25 bp, Homo sapien
cgccgcgttttctgagcggccgtag

SEQ ID NO: 465327 - DNA, 25 bp, Homo sapien
gtgcggccggcgcttccgcgtgcgg

SEQ ID NO: 465328 - DNA, 25 bp, Homo sapien
tgcgggttccgctcgccgcgttttc

SEQ ID NO: 465329 - DNA, 25 bp, Homo sapien
ggtgatggggaggcctcctacttga

SEQ ID NO: 465330 - DNA, 25 bp, Homo sapien
caacccgcctgggacaacgccgcgc

SEQ ID NO: 465331 - DNA, 25 bp, Homo sapien
ccgcctgggacaacgccgcgccggc

SEQ ID NO: 465332 - DNA, 25 bp, Homo sapien
cctgggacaacgccgcgccggccac

SEQ ID NO: 465333 - DNA, 25 bp, Homo sapien
acccgcctgggacaacgccgcgccg

SEQ ID NO: 465334 - DNA, 25 bp, Homo sapien
ggcagccggcgggactcgccactta

SEQ ID NO: 465335 - DNA, 25 bp, Homo sapien
gcagccggcgggactcgccacttac

SEQ ID NO: 465336 - DNA, 25 bp, Homo sapien
tctttcacgaaccatatagatcttg

SEQ ID NO: 465337 - DNA, 25 bp, Homo sapien
gttctgcaaaacaataagcgcttcc

SEQ ID NO: 465338 - DNA, 25 bp, Homo sapien
ggtgtataataacacaagtgccttt

SEQ ID NO: 465339 - DNA, 25 bp, Homo sapien
gcacagttgtgattatatccctcta

SEQ ID NO: 465340 - DNA, 25 bp, Homo sapien
ttacagagaacctacaatctggtgc

SEQ ID NO: 465341 - DNA, 25 bp, Homo sapien
tcttgacaatccagataaggagaaa

SEQ ID NO: 465342 - DNA, 25 bp, Homo sapien
cctacaatctggtgcatttcttgac

SEQ ID NO: 465343 - DNA, 25 bp, Homo sapien
ttcttgacaatccagataaggagaa

SEQ ID NO: 465344 - DNA, 25 bp, Homo sapien
attgcactctagcctgggcaacaag

SEQ ID NO: 465345 - DNA, 25 bp, Homo sapien
ctgggcaacaagagtgaaactccgt

SEQ ID NO: 465346 - DNA, 25 bp, Homo sapien
tgaggcaggagaacctgggaggtgg

SEQ ID NO: 465347 - DNA, 25 bp, Homo sapien
ggttgcgacgaaccaagatcgcgcc

SEQ ID NO: 465348 - DNA, 25 bp, Homo sapien
tcgcagtttacagtatcagcagaag

SEQ ID NO: 465349 - DNA, 25 bp, Homo sapien
ttttcgcagtttacagtatcagcag

SEQ ID NO: 465350 - DNA, 25 bp, Homo sapien
atttttcgcagtttacagtatcagc

SEQ ID NO: 465351 - DNA, 25 bp, Homo sapien
tcatttttcgcagtttacagtatca

SEQ ID NO: 465352 - DNA, 25 bp, Homo sapien
ttagtagaccatttcaaaacacctg

SEQ ID NO: 465353 - DNA, 25 bp, Homo sapien
gaggcagccctattcatactagtca

SEQ ID NO: 465354 - DNA, 25 bp, Homo sapien
tgtccaagtgtgataggaatgctca

SEQ ID NO: 465355 - DNA, 25 bp, Homo sapien
gatttactaatttatgaggcagccc

SEQ ID NO: 465356 - DNA, 25 bp, Homo sapien
caatatttctagtccaatgtcaccc

SEQ ID NO: 465357 - DNA, 25 bp, Homo sapien
tttcctaccagtcaatccatgctat

SEQ ID NO: 465358 - DNA, 25 bp, Homo sapien
tattatgaatcctccacctgtgtag

SEQ ID NO: 465359 - DNA, 25 bp, Homo sapien
tattctttgaaatcagacttaccca

SEQ ID NO: 465360 - DNA, 25 bp, Homo sapien
taaacactacactgactactgcact

SEQ ID NO: 465361 - DNA, 25 bp, Homo sapien
actgactactgcactcatagcattg

SEQ ID NO: 465362 - DNA, 25 bp, Homo sapien
taatgccctaaacactacactgact

SEQ ID NO: 465363 - DNA, 25 bp, Homo sapien
gcactcatagcattgctgcctacaa

SEQ ID NO: 465364 - DNA, 25 bp, Homo sapien
tcctgttgaagctaagaccctgaag

SEQ ID NO: 465365 - DNA, 25 bp, Homo sapien
gactatcagctagctaattgtgaaa

SEQ ID NO: 465366 - DNA, 25 bp, Homo sapien
tgtttgatataaagatcactcaggg

SEQ ID NO: 465367 - DNA, 25 bp, Homo sapien
tacttgaaagcaccactagatgaca

SEQ ID NO: 465368 - DNA, 25 bp, Homo sapien
ttcacgtcgtgttcagaagtcactt

SEQ ID NO: 465369 - DNA, 25 bp, Homo sapien
cgtcgtgttcagaagtcacttggca

SEQ ID NO: 465370 - DNA, 25 bp, Homo sapien
cacgtcgtgttcagaagtcacttgg

SEQ ID NO: 465371 - DNA, 25 bp, Homo sapien
cgtgttcagaagtcacttggcatat

SEQ ID NO: 465372 - DNA, 25 bp, Homo sapien
tggaccttgagagaagagaattatc

SEQ ID NO: 465373 - DNA, 25 bp, Homo sapien
ctggtggaccttgagagaagagaat

SEQ ID NO: 465374 - DNA, 25 bp, Homo sapien
gagaagagaattatcatcaattccc

SEQ ID NO: 465375 - DNA, 25 bp, Homo sapien
accttgagagaagagaattatcatc

SEQ ID NO: 465376 - DNA, 25 bp, Homo sapien
aattcgtctctacccatacccatgg

SEQ ID NO: 465377 - DNA, 25 bp, Homo sapien
ttaaaaggatccaagactgctagtc

SEQ ID NO: 465378 - DNA, 25 bp, Homo sapien
ggtaccatcaccattgcagacattc

SEQ ID NO: 465379 - DNA, 25 bp, Homo sapien
gagatctaactcaagctcatttttg

SEQ ID NO: 465380 - DNA, 25 bp, Homo sapien
gtctggagagcttgtgcaagcttca

SEQ ID NO: 465381 - DNA, 25 bp, Homo sapien
tggagagcttgtgcaagcttcaatg

SEQ ID NO: 465382 - DNA, 25 bp, Homo sapien
ttacattgactttgtctggagagct

SEQ ID NO: 465383 - DNA, 25 bp, Homo sapien
tgtcatttacattgactttgtctgg

SEQ ID NO: 465384 - DNA, 25 bp, Homo sapien
cctttccactattgatgtcactggg

SEQ ID NO: 465385 - DNA, 25 bp, Homo sapien
tgtcactggggaggaatttcttgcc

SEQ ID NO: 465386 - DNA, 25 bp, Homo sapien
tacctttccactattgatgtcactg

SEQ ID NO: 465387 - DNA, 25 bp, Homo sapien
tttctacctttccactattgatgtc

SEQ ID NO: 465388 - DNA, 25 bp, Homo sapien
tagtgactgattctagagtcatgca

SEQ ID NO: 465389 - DNA, 25 bp, Homo sapien
tctagagtcatgcatttatagtcat

SEQ ID NO: 465390 - DNA, 25 bp, Homo sapien
tagtaagtaacggatcagtagtgac

SEQ ID NO: 465391 - DNA, 25 bp, Homo sapien
tatagtcatcattaatggtaaaatg

SEQ ID NO: 465392 - DNA, 25 bp, Homo sapien
tgacagatctatcagctctccattc

SEQ ID NO: 465393 - DNA, 25 bp, Homo sapien
gatgacagatctatcagctctccat

SEQ ID NO: 465394 - DNA, 25 bp, Homo sapien
gacagatctatcagctctccattct

SEQ ID NO: 465395 - DNA, 25 bp, Homo sapien
ctgatgacagatctatcagctctcc

SEQ ID NO: 465396 - DNA, 25 bp, Homo sapien
tttgcaaaacacatggaccttcgag

SEQ ID NO: 465397 - DNA, 25 bp, Homo sapien
cagcaacattgcgaattttttgaat

SEQ ID NO: 465398 - DNA, 25 bp, Homo sapien
ggtgcagcaacattgcgaatttttt

SEQ ID NO: 465399 - DNA, 25 bp, Homo sapien
tttggtgcagcaacattgcgaattt

SEQ ID NO: 465400 - DNA, 25 bp, Homo sapien
tactgctgtgcaacttatatgacca

SEQ ID NO: 465401 - DNA, 25 bp, Homo sapien
aacttatatgaccatcagtcatctg

SEQ ID NO: 465402 - DNA, 25 bp, Homo sapien
tttgacatataactaaattctactg

SEQ ID NO: 465403 - DNA, 25 bp, Homo sapien
catataactaaattctactgctgtg

SEQ ID NO: 465404 - DNA, 25 bp, Homo sapien
caattgaatagcaccttcaacattc

SEQ ID NO: 465405 - DNA, 25 bp, Homo sapien
agttattccaattgaatagcacctt

SEQ ID NO: 465406 - DNA, 25 bp, Homo sapien
tccaattgaatagcaccttcaacat

SEQ ID NO: 465407 - DNA, 25 bp, Homo sapien
tattccaattgaatagcaccttcaa

SEQ ID NO: 465408 - DNA, 25 bp, Homo sapien
gttttcgtccattccattgggcatg

SEQ ID NO: 465409 - DNA, 25 bp, Homo sapien
ctaaagtcaatcacaaacctccctg

SEQ ID NO: 465410 - DNA, 25 bp, Homo sapien
attgggcatggctctaaaagattct

SEQ ID NO: 465411 - DNA, 25 bp, Homo sapien
ggtttggaaaatcattcccaatgat

SEQ ID NO: 465412 - DNA, 25 bp, Homo sapien
gcttcaatgatgagtgaagagcata

SEQ ID NO: 465413 - DNA, 25 bp, Homo sapien
gctgcttcaatgatgagtgaagagc

SEQ ID NO: 465414 - DNA, 25 bp, Homo sapien
cttcaatgatgagtgaagagcatac

SEQ ID NO: 465415 - DNA, 25 bp, Homo sapien
ctgcttcaatgatgagtgaagagca

SEQ ID NO: 465416 - DNA, 25 bp, Homo sapien
gctgccatttttacggcaccaaaag

SEQ ID NO: 465417 - DNA, 25 bp, Homo sapien
agctgccatttttacggcaccaaaa

SEQ ID NO: 465418 - DNA, 25 bp, Homo sapien
tgccatttttacggcaccaaaagta

SEQ ID NO: 465419 - DNA, 25 bp, Homo sapien
ctgccatttttacggcaccaaaagt

SEQ ID NO: 465420 - DNA, 25 bp, Homo sapien
gcacctggtttatcccatctagaga

SEQ ID NO: 465421 - DNA, 25 bp, Homo sapien
aaagtagaaacaagcaccgcagaga

SEQ ID NO: 465422 - DNA, 25 bp, Homo sapien
gtaacacatccgtattagcacctgg

SEQ ID NO: 465423 - DNA, 25 bp, Homo sapien
catctagagagttgtttcaccttcc

SEQ ID NO: 465424 - DNA, 25 bp, Homo sapien
tgctagttttcctagcagcatttat

SEQ ID NO: 465425 - DNA, 25 bp, Homo sapien
gagactatccttttgccaatgtatg

SEQ ID NO: 465426 - DNA, 25 bp, Homo sapien
atgcccagccacatttaggttgatt

SEQ ID NO: 465427 - DNA, 25 bp, Homo sapien
gtatatggtgagagacgggaatttc

SEQ ID NO: 465428 - DNA, 25 bp, Homo sapien
tcttctcacatacagcaagaagtac

SEQ ID NO: 465429 - DNA, 25 bp, Homo sapien
gcaagaagtactgcaaatagtactt

SEQ ID NO: 465430 - DNA, 25 bp, Homo sapien
tctcacatacagcaagaagtactgc

SEQ ID NO: 465431 - DNA, 25 bp, Homo sapien
catacagcaagaagtactgcaaata

SEQ ID NO: 465432 - DNA, 25 bp, Homo sapien
gtaactcccatttctcaataaggtg

SEQ ID NO: 465433 - DNA, 25 bp, Homo sapien
tctcaataaggtgttccacttcacc

SEQ ID NO: 465434 - DNA, 25 bp, Homo sapien
caatgcctgagagcttaactttagt

SEQ ID NO: 465435 - DNA, 25 bp, Homo sapien
accaagaactgtggtgttagagtca

SEQ ID NO: 465436 - DNA, 25 bp, Homo sapien
ttgatctgggtctaaaagcacaggg

SEQ ID NO: 465437 - DNA, 25 bp, Homo sapien
gtctaaaagcacagggatgatttgg

SEQ ID NO: 465438 - DNA, 25 bp, Homo sapien
atcatttgatctgggtctaaaagca

SEQ ID NO: 465439 - DNA, 25 bp, Homo sapien
tctgggtctaaaagcacagggatga

SEQ ID NO: 465440 - DNA, 25 bp, Homo sapien
cagaggaagcatctcacaaaaccaa

SEQ ID NO: 465441 - DNA, 25 bp, Homo sapien
tagaaaggaactactcaaacctgat

SEQ ID NO: 465442 - DNA, 25 bp, Homo sapien
tcatctcaattgacgcagaggaagc

SEQ ID NO: 465443 - DNA, 25 bp, Homo sapien
tttagccagggctaaataaggcaag

SEQ ID NO: 465444 - DNA, 25 bp, Homo sapien
caaaaggcggtggtccaccttcagt

SEQ ID NO: 465445 - DNA, 25 bp, Homo sapien
aggcacaaaaggcggtggtccacct

SEQ ID NO: 465446 - DNA, 25 bp, Homo sapien
cacaaaaggcggtggtccaccttca

SEQ ID NO: 465447 - DNA, 25 bp, Homo sapien
gcacaaaaggcggtggtccaccttc

SEQ ID NO: 465448 - DNA, 25 bp, Homo sapien
acaccataggacttcacactttctt

SEQ ID NO: 465449 - DNA, 25 bp, Homo sapien
gatcacaccataggacttcacactt

SEQ ID NO: 465450 - DNA, 25 bp, Homo sapien
catggatcacaccataggacttcac

SEQ ID NO: 465451 - DNA, 25 bp, Homo sapien
tcaacatggatcacaccataggact

SEQ ID NO: 465452 - DNA, 25 bp, Homo sapien
ttccttgctctttgcaacttcagca

SEQ ID NO: 465453 - DNA, 25 bp, Homo sapien
cattatcatttgtaggtttgacagg

SEQ ID NO: 465454 - DNA, 25 bp, Homo sapien
aatagcagccgtcctttgcttttca

SEQ ID NO: 465455 - DNA, 25 bp, Homo sapien
aagttctctgctatccacttggaca

SEQ ID NO: 465456 - DNA, 25 bp, Homo sapien
ggaatactcttgctcagataaccaa

SEQ ID NO: 465457 - DNA, 25 bp, Homo sapien
tgcaaccaagtctgaacacagcagc

SEQ ID NO: 465458 - DNA, 25 bp, Homo sapien
ttacaatagtttacagggccctaca

SEQ ID NO: 465459 - DNA, 25 bp, Homo sapien
agttaattctcgtacctccttcaag

SEQ ID NO: 465460 - DNA, 25 bp, Homo sapien
acttccctatttcggttaccagcag

SEQ ID NO: 465461 - DNA, 25 bp, Homo sapien
cagttctctatagacaccttcatgt

SEQ ID NO: 465462 - DNA, 25 bp, Homo sapien
tttcggttaccagcagcattcatat

SEQ ID NO: 465463 - DNA, 25 bp, Homo sapien
tattgagattacttctagcaccacc

SEQ ID NO: 465464 - DNA, 25 bp, Homo sapien
tttagttaagaagcactgtgctgag

SEQ ID NO: 465465 - DNA, 25 bp, Homo sapien
cctttagttaagaagcactgtgctg

SEQ ID NO: 465466 - DNA, 25 bp, Homo sapien
gatccgctgcttgcttcagagccgg

SEQ ID NO: 465467 - DNA, 25 bp, Homo sapien
ctgagagatccgctgcttgcttcag

SEQ ID NO: 465468 - DNA, 25 bp, Homo sapien
gctgatagcccacagataaggcaag

SEQ ID NO: 465469 - DNA, 25 bp, Homo sapien
caaggaagaatctgtatgatatgtg

SEQ ID NO: 465470 - DNA, 25 bp, Homo sapien
gggttgtgccttgagtattctctga

SEQ ID NO: 465471 - DNA, 25 bp, Homo sapien
ccacagataaggcaaggcataaact

SEQ ID NO: 465472 - DNA, 25 bp, Homo sapien
ccatttccgttatgtgcttcagagc

SEQ ID NO: 465473 - DNA, 25 bp, Homo sapien
gaggaggacccataacaggtttctg

SEQ ID NO: 465474 - DNA, 25 bp, Homo sapien
gcttgcctcgatgcttccttactga

SEQ ID NO: 465475 - DNA, 25 bp, Homo sapien
aagtacgttcagtgctgcttctaag

SEQ ID NO: 465476 - DNA, 25 bp, Homo sapien
aaatcaaataatgtgcttggtgctg

SEQ ID NO: 465477 - DNA, 25 bp, Homo sapien
agatcttattcgccccctgcctttt

SEQ ID NO: 465478 - DNA, 25 bp, Homo sapien
agaaatcaaataatgtgcttggtgc

SEQ ID NO: 465479 - DNA, 25 bp, Homo sapien
tcatcttcagatcttattcgccccc

SEQ ID NO: 465480 - DNA, 25 bp, Homo sapien
gatgatctgtattgtccctgatgaa

SEQ ID NO: 465481 - DNA, 25 bp, Homo sapien
tgacaggtcctgctggcttaatagg

SEQ ID NO: 465482 - DNA, 25 bp, Homo sapien
ccagatcttcgtttgggcccactat

SEQ ID NO: 465483 - DNA, 25 bp, Homo sapien
tattttatcatcacagggtacagct

SEQ ID NO: 465484 - DNA, 25 bp, Homo sapien
ctttggaacccttttgagtcacatt

SEQ ID NO: 465485 - DNA, 25 bp, Homo sapien
gaggcaaaaggagttttaaatatga

SEQ ID NO: 465486 - DNA, 25 bp, Homo sapien
tataaagggcaatatttgagggaaa

SEQ ID NO: 465487 - DNA, 25 bp, Homo sapien
caactggtattgtctataaagggca

SEQ ID NO: 465488 - DNA, 25 bp, Homo sapien
gagggcttcaacttctgcccggtaa

SEQ ID NO: 465489 - DNA, 25 bp, Homo sapien
catacccgaagaatggagggcttca

SEQ ID NO: 465490 - DNA, 25 bp, Homo sapien
tagcacctcttcatagtttccgtag

SEQ ID NO: 465491 - DNA, 25 bp, Homo sapien
gcttgatattgctcagtagcacctc

SEQ ID NO: 465492 - DNA, 25 bp, Homo sapien
agagatttgaatttgacagctgctg

SEQ ID NO: 465493 - DNA, 25 bp, Homo sapien
tgacattgcacatccaacagagatt

SEQ ID NO: 465494 - DNA, 25 bp, Homo sapien
taagggcacctatttccaaagcata

SEQ ID NO: 465495 - DNA, 25 bp, Homo sapien
cacagctttgacataacatttggta

SEQ ID NO: 465496 - DNA, 25 bp, Homo sapien
cataataaatagcaaaccaggactc

SEQ ID NO: 465497 - DNA, 25 bp, Homo sapien
tcaatctttgactgctatggctaaa

SEQ ID NO: 465498 - DNA, 25 bp, Homo sapien
tagccatcatatgagaacctctcag

SEQ ID NO: 465499 - DNA, 25 bp, Homo sapien
gaaaacaatgtacccttcaatgatg

SEQ ID NO: 465500 - DNA, 25 bp, Homo sapien
caggaccaaacacctctgaatagaa

SEQ ID NO: 465501 - DNA, 25 bp, Homo sapien
cactaaatgagctgtacacctgata

SEQ ID NO: 465502 - DNA, 25 bp, Homo sapien
tgctgtagttcagaacagaatcact

SEQ ID NO: 465503 - DNA, 25 bp, Homo sapien
tcaaggataaagcaatgaggactct

SEQ ID NO: 465504 - DNA, 25 bp, Homo sapien
agaaataccagaatctccaaaagat

SEQ ID NO: 465505 - DNA, 25 bp, Homo sapien
ttcataaaacgtcaacaaccacttg

SEQ ID NO: 465506 - DNA, 25 bp, Homo sapien
catgatccagagatgtctgttatag

SEQ ID NO: 465507 - DNA, 25 bp, Homo sapien
tagtaacctacgcaaattcataaaa

SEQ ID NO: 465508 - DNA, 25 bp, Homo sapien
tgagattgatagctcttcattttaa

SEQ ID NO: 465509 - DNA, 25 bp, Homo sapien
tttatctttaaactaatatggaata

SEQ ID NO: 465510 - DNA, 25 bp, Homo sapien
cattttaaagtacgctaacatgaaa

SEQ ID NO: 465511 - DNA, 25 bp, Homo sapien
aacttgagattgatagctcttcatt

SEQ ID NO: 465512 - DNA, 25 bp, Homo sapien
gccaatgctagcttaacgacagaaa

SEQ ID NO: 465513 - DNA, 25 bp, Homo sapien
ggactataggttcataccacctcac

SEQ ID NO: 465514 - DNA, 25 bp, Homo sapien
catagatcactgcaagcttgaagtc

SEQ ID NO: 465515 - DNA, 25 bp, Homo sapien
tggcttagactaggttattgtggaa

SEQ ID NO: 465516 - DNA, 25 bp, Homo sapien
cagtatggccaagtacaaagcaagc

SEQ ID NO: 465517 - DNA, 25 bp, Homo sapien
catttgagcactagtcctgagttgg

SEQ ID NO: 465518 - DNA, 25 bp, Homo sapien
ttatgagaaccaccaccagtatggc

SEQ ID NO: 465519 - DNA, 25 bp, Homo sapien
tcagggcatacaaaagatcaaccag

SEQ ID NO: 465520 - DNA, 25 bp, Homo sapien
gaatggcaaaagtggtgaacaatgt

SEQ ID NO: 465521 - DNA, 25 bp, Homo sapien
tggttatactttgccatttatgtga

SEQ ID NO: 465522 - DNA, 25 bp, Homo sapien
gcaacctcaaagtatagtaattctc

SEQ ID NO: 465523 - DNA, 25 bp, Homo sapien
agtggtgaacaatgtcatgagattt

SEQ ID NO: 465524 - DNA, 25 bp, Homo sapien
gataaagcacagtgtctgaaaatgt

SEQ ID NO: 465525 - DNA, 25 bp, Homo sapien
ataaagcacagtgtctgaaaatgtt

SEQ ID NO: 465526 - DNA, 25 bp, Homo sapien
caggataaagcacagtgtctgaaaa

SEQ ID NO: 465527 - DNA, 25 bp, Homo sapien
tcaggataaagcacagtgtctgaaa

SEQ ID NO: 465528 - DNA, 25 bp, Homo sapien
ttgcccactccccttctctcaaagg

SEQ ID NO: 465529 - DNA, 25 bp, Homo sapien
ctcaaaggccaagcagagcagatat

SEQ ID NO: 465530 - DNA, 25 bp, Homo sapien
gtaatttgcccaagaccagccttgc

SEQ ID NO: 465531 - DNA, 25 bp, Homo sapien
ctgaagcaggggcaaaaagggaggt

SEQ ID NO: 465532 - DNA, 25 bp, Homo sapien
cctcctgtgcatttccagctcccct

SEQ ID NO: 465533 - DNA, 25 bp, Homo sapien
actcctcctgtgcatttccagctcc

SEQ ID NO: 465534 - DNA, 25 bp, Homo sapien
ctcctgtgcatttccagctcccctg

SEQ ID NO: 465535 - DNA, 25 bp, Homo sapien
tcctcctgtgcatttccagctcccc

SEQ ID NO: 465536 - DNA, 25 bp, Homo sapien
ttctttgatgtttctaagcacataa

SEQ ID NO: 465537 - DNA, 25 bp, Homo sapien
gacttccctctgccaaaatctttct

SEQ ID NO: 465538 - DNA, 25 bp, Homo sapien
caaaatctttctcctcaacactgtc

SEQ ID NO: 465539 - DNA, 25 bp, Homo sapien
tcatgcattagagattctttgatgt

SEQ ID NO: 465540 - DNA, 25 bp, Homo sapien
aatatgtgttatattcttctcgttc

SEQ ID NO: 465541 - DNA, 25 bp, Homo sapien
atatgtgttatattcttctcgttca

SEQ ID NO: 465542 - DNA, 25 bp, Homo sapien
aaatatgtgttatattcttctcgtt

SEQ ID NO: 465543 - DNA, 25 bp, Homo sapien
tatgtgttatattcttctcgttcaa

SEQ ID NO: 465544 - DNA, 25 bp, Homo sapien
tacttctatcaccttgaaaagtacc

SEQ ID NO: 465545 - DNA, 25 bp, Homo sapien
cattctcacccttatagtttgtgag

SEQ ID NO: 465546 - DNA, 25 bp, Homo sapien
ccttgaaaagtaccagctgatacct

SEQ ID NO: 465547 - DNA, 25 bp, Homo sapien
gctgatacctctaaccactacattt

SEQ ID NO: 465548 - DNA, 25 bp, Homo sapien
tacagacaaccttggtgcccatggg

SEQ ID NO: 465549 - DNA, 25 bp, Homo sapien
gcctcagctcttattctctatgaag

SEQ ID NO: 465550 - DNA, 25 bp, Homo sapien
tactgaactttaccaattatccttg

SEQ ID NO: 465551 - DNA, 25 bp, Homo sapien
tgcccatgggagtcatgtattatta

SEQ ID NO: 465552 - DNA, 25 bp, Homo sapien
catgcctagcccactttatcttata

SEQ ID NO: 465553 - DNA, 25 bp, Homo sapien
cagtgtactctgcaatagtccttga

SEQ ID NO: 465554 - DNA, 25 bp, Homo sapien
gtcataactttgtgaagagccagtg

SEQ ID NO: 465555 - DNA, 25 bp, Homo sapien
taacagaatttgtatagtagtcaca

SEQ ID NO: 465556 - DNA, 25 bp, Homo sapien
gatagagagatcaccagagtaagac

SEQ ID NO: 465557 - DNA, 25 bp, Homo sapien
tatatctaccagttcaaggagtagc

SEQ ID NO: 465558 - DNA, 25 bp, Homo sapien
ttcttactgagtgggtatatctacc

SEQ ID NO: 465559 - DNA, 25 bp, Homo sapien
tgtccccatctgatgaaatctccag

SEQ ID NO: 465560 - DNA, 25 bp, Homo sapien
agtttgatcgtaggtgccttcttcc

SEQ ID NO: 465561 - DNA, 25 bp, Homo sapien
ccgagtggatcgtcttggctggcca

SEQ ID NO: 465562 - DNA, 25 bp, Homo sapien
aaactgttgggttggccgagtggat

SEQ ID NO: 465563 - DNA, 25 bp, Homo sapien
gaactccagagtttgatcgtaggtg

SEQ ID NO: 465564 - DNA, 25 bp, Homo sapien
taattggacttatatgcttaacatg

SEQ ID NO: 465565 - DNA, 25 bp, Homo sapien
gacttatatgcttaacatgaatttc

SEQ ID NO: 465566 - DNA, 25 bp, Homo sapien
tggacttatatgcttaacatgaatt

SEQ ID NO: 465567 - DNA, 25 bp, Homo sapien
attggacttatatgcttaacatgaa

SEQ ID NO: 465568 - DNA, 25 bp, Homo sapien
ggatcatttattggagagactatca

SEQ ID NO: 465569 - DNA, 25 bp, Homo sapien
gtaggaatctagtttcattcatcca

SEQ ID NO: 465570 - DNA, 25 bp, Homo sapien
ccagtgttgtcatctacgagtgtca

SEQ ID NO: 465571 - DNA, 25 bp, Homo sapien
gagactatcatcactccaatgtatg

SEQ ID NO: 465572 - DNA, 25 bp, Homo sapien
accacaatgaggaagtatatgtgtg

SEQ ID NO: 465573 - DNA, 25 bp, Homo sapien
tgaagctgtccttagtatttggctc

SEQ ID NO: 465574 - DNA, 25 bp, Homo sapien
ccacaatgaggaagtatatgtgtgt

SEQ ID NO: 465575 - DNA, 25 bp, Homo sapien
gctgtccttagtatttggctcaagt

SEQ ID NO: 465576 - DNA, 25 bp, Homo sapien
aatggaccagtgcaatagcttctta

SEQ ID NO: 465577 - DNA, 25 bp, Homo sapien
catgcaactctaaccaatgtttgaa

SEQ ID NO: 465578 - DNA, 25 bp, Homo sapien
acagcaggacatgcaactctaacca

SEQ ID NO: 465579 - DNA, 25 bp, Homo sapien
caatgtttgaatggaccagtgcaat

SEQ ID NO: 465580 - DNA, 25 bp, Homo sapien
gctgatctgtcttacaaaggcttcc

SEQ ID NO: 465581 - DNA, 25 bp, Homo sapien
ctgctgatctgtcttacaaaggctt

SEQ ID NO: 465582 - DNA, 25 bp, Homo sapien
tgctgatctgtcttacaaaggcttc

SEQ ID NO: 465583 - DNA, 25 bp, Homo sapien
gactagtggagttcctgcggctgca

SEQ ID NO: 465584 - DNA, 25 bp, Homo sapien
tgcagtctgccaatgaaccacgtct

SEQ ID NO: 465585 - DNA, 25 bp, Homo sapien
tctgactaacacgtgaaactgggaa

SEQ ID NO: 465586 - DNA, 25 bp, Homo sapien
catgacagcgtgcttaggcagggac

SEQ ID NO: 465587 - DNA, 25 bp, Homo sapien
cagtcactggctcgtttcttcacaa

SEQ ID NO: 465588 - DNA, 25 bp, Homo sapien
caccacagctacttattctgaagag

SEQ ID NO: 465589 - DNA, 25 bp, Homo sapien
aaggtatttgcttaatttaactcag

SEQ ID NO: 465590 - DNA, 25 bp, Homo sapien
gaaggtctgtcaacaggtttccacc

SEQ ID NO: 465591 - DNA, 25 bp, Homo sapien
ttgcggtcagctgaactaggcatgg

SEQ ID NO: 465592 - DNA, 25 bp, Homo sapien
gggcttagccatgatgttagctatg

SEQ ID NO: 465593 - DNA, 25 bp, Homo sapien
gctgaactaggcatgggcttagcca

SEQ ID NO: 465594 - DNA, 25 bp, Homo sapien
catgggcttagccatgatgttagct

SEQ ID NO: 465595 - DNA, 25 bp, Homo sapien
agggcagccaaggttagcacggggc

SEQ ID NO: 465596 - DNA, 25 bp, Homo sapien
ggcagccaaggttagcacggggcat

SEQ ID NO: 465597 - DNA, 25 bp, Homo sapien
gggcagccaaggttagcacggggca

SEQ ID NO: 465598 - DNA, 25 bp, Homo sapien
gctttgctaactcatggcctggtgc

SEQ ID NO: 465599 - DNA, 25 bp, Homo sapien
gaggctgaagaaagcgccgctcaaa

SEQ ID NO: 465600 - DNA, 25 bp, Homo sapien
cttggaaatacagggctcagccaga

SEQ ID NO: 465601 - DNA, 25 bp, Homo sapien
cagtgccggctttgcgctttgctaa

SEQ ID NO: 465602 - DNA, 25 bp, Homo sapien
gatcactataactactccctgcctg

SEQ ID NO: 465603 - DNA, 25 bp, Homo sapien
atcactataactactccctgcctgt

SEQ ID NO: 465604 - DNA, 25 bp, Homo sapien
cactataactactccctgcctgtcc

SEQ ID NO: 465605 - DNA, 25 bp, Homo sapien
tcactataactactccctgcctgtc

SEQ ID NO: 465606 - DNA, 25 bp, Homo sapien
tttcccattcaaatcctaaccagga

SEQ ID NO: 465607 - DNA, 25 bp, Homo sapien
cagacaagatcagacacatccagga

SEQ ID NO: 465608 - DNA, 25 bp, Homo sapien
tcagacaagatcagacacatccagg

SEQ ID NO: 465609 - DNA, 25 bp, Homo sapien
ttcaaatcctaaccaggatcaaccc

SEQ ID NO: 465610 - DNA, 25 bp, Homo sapien
tagcccaacatagaagaaactgtac

SEQ ID NO: 465611 - DNA, 25 bp, Homo sapien
ccctatgcgaactgttagcccaaca

SEQ ID NO: 465612 - DNA, 25 bp, Homo sapien
gttagcccaacatagaagaaactgt

SEQ ID NO: 465613 - DNA, 25 bp, Homo sapien
agccaaaactccctatgcgaactgt

SEQ ID NO: 465614 - DNA, 25 bp, Homo sapien
accagtgtggctgtgattcacagag

SEQ ID NO: 465615 - DNA, 25 bp, Homo sapien
gagcccttccatgtggaaccagtgt

SEQ ID NO: 465616 - DNA, 25 bp, Homo sapien
gagggagcatggagcccttccatgt

SEQ ID NO: 465617 - DNA, 25 bp, Homo sapien
gacagcgctgttgtggccaccctgg

SEQ ID NO: 465618 - DNA, 25 bp, Homo sapien
ctttccactgaggatctgagcagcc

SEQ ID NO: 465619 - DNA, 25 bp, Homo sapien
tgtttctcccaagcccttgagctaa

SEQ ID NO: 465620 - DNA, 25 bp, Homo sapien
ggctgagggacagcactttgtttct

SEQ ID NO: 465621 - DNA, 25 bp, Homo sapien
actgaggatctgagcagcccaggct

SEQ ID NO: 465622 - DNA, 25 bp, Homo sapien
gtgcttccccgtgatgtcctgagaa

SEQ ID NO: 465623 - DNA, 25 bp, Homo sapien
tgtgcttccccgtgatgtcctgaga

SEQ ID NO: 465624 - DNA, 25 bp, Homo sapien
tgcttccccgtgatgtcctgagaac

SEQ ID NO: 465625 - DNA, 25 bp, Homo sapien
aactctgacactcctgaagaaacag

SEQ ID NO: 465626 - DNA, 25 bp, Homo sapien
taaacctcttattgtagaagggagc

SEQ ID NO: 465627 - DNA, 25 bp, Homo sapien
cctcttattgtagaagggagcaatg

SEQ ID NO: 465628 - DNA, 25 bp, Homo sapien
ggcactaaacctcttattgtagaag

SEQ ID NO: 465629 - DNA, 25 bp, Homo sapien
cttattgtagaagggagcaatgtca

SEQ ID NO: 465630 - DNA, 25 bp, Homo sapien
tcacagcgtttttgtagcacttggt

SEQ ID NO: 465631 - DNA, 25 bp, Homo sapien
cagtgaagctctaattggtaccaag

SEQ ID NO: 465632 - DNA, 25 bp, Homo sapien
aagcagcaggaccttcgtcgaaagt

SEQ ID NO: 465633 - DNA, 25 bp, Homo sapien
tgttcagattcctcgtcacagcgtt

SEQ ID NO: 465634 - DNA, 25 bp, Homo sapien
acagacttgggctgagttagggaga

SEQ ID NO: 465635 - DNA, 25 bp, Homo sapien
cagacttgggctgagttagggagaa

SEQ ID NO: 465636 - DNA, 25 bp, Homo sapien
gagttagggagaagtacaagaagga

SEQ ID NO: 465637 - DNA, 25 bp, Homo sapien
agacttgggctgagttagggagaag

SEQ ID NO: 465638 - DNA, 25 bp, Homo sapien
caccacgtgccgcaactgagtttct

SEQ ID NO: 465639 - DNA, 25 bp, Homo sapien
cacgtgccgcaactgagtttcttgg

SEQ ID NO: 465640 - DNA, 25 bp, Homo sapien
caactgagtttcttgggtaatctct

SEQ ID NO: 465641 - DNA, 25 bp, Homo sapien
tgccgcaactgagtttcttgggtaa

SEQ ID NO: 465642 - DNA, 25 bp, Homo sapien
tcatcggagacatggcattccaagg

SEQ ID NO: 465643 - DNA, 25 bp, Homo sapien
ggtacagggaggcacaaatactttg

SEQ ID NO: 465644 - DNA, 25 bp, Homo sapien
cagctctacaacatgtaaggtgagg

SEQ ID NO: 465645 - DNA, 25 bp, Homo sapien
cattccaaggaagcttgggaccaca

SEQ ID NO: 465646 - DNA, 25 bp, Homo sapien
gagctagagttaggagcaaagacca

SEQ ID NO: 465647 - DNA, 25 bp, Homo sapien
tcagaaccgagctagagttaggagc

SEQ ID NO: 465648 - DNA, 25 bp, Homo sapien
gaaatccaggtagagtattctcttc

SEQ ID NO: 465649 - DNA, 25 bp, Homo sapien
gaaccgagctagagttaggagcaaa

SEQ ID NO: 465650 - DNA, 25 bp, Homo sapien
cgccatcctaagctagatgctgata

SEQ ID NO: 465651 - DNA, 25 bp, Homo sapien
gatgctgataacagcctccatttcc

SEQ ID NO: 465652 - DNA, 25 bp, Homo sapien
gctagatgctgataacagcctccat

SEQ ID NO: 465653 - DNA, 25 bp, Homo sapien
gcttggctcgccatcctaagctaga

SEQ ID NO: 465654 - DNA, 25 bp, Homo sapien
catgtgagttgcacctgagagccat

SEQ ID NO: 465655 - DNA, 25 bp, Homo sapien
ccatgtgagttgcacctgagagcca

SEQ ID NO: 465656 - DNA, 25 bp, Homo sapien
ctccatgtgagttgcacctgagagc

SEQ ID NO: 465657 - DNA, 25 bp, Homo sapien
tccatgtgagttgcacctgagagcc

SEQ ID NO: 465658 - DNA, 25 bp, Homo sapien
tgtaactaaattgttactatactta

SEQ ID NO: 465659 - DNA, 25 bp, Homo sapien
gaaatggaagtaactatgtaactaa

SEQ ID NO: 465660 - DNA, 25 bp, Homo sapien
ctaaattgttactatacttagaact

SEQ ID NO: 465661 - DNA, 25 bp, Homo sapien
taactaaattgttactatacttaga

SEQ ID NO: 465662 - DNA, 25 bp, Homo sapien
tcaaatttactattgagaaacatat

SEQ ID NO: 465663 - DNA, 25 bp, Homo sapien
catataaaagtcaccaacttttgta

SEQ ID NO: 465664 - DNA, 25 bp, Homo sapien
acattcactctaagcaaaacatgac

SEQ ID NO: 465665 - DNA, 25 bp, Homo sapien
tgactggtcacactaaaatggtgtt

SEQ ID NO: 465666 - DNA, 25 bp, Homo sapien
ccactccccattgcaggcttctgag

SEQ ID NO: 465667 - DNA, 25 bp, Homo sapien
gccccactccccattgcaggcttct

SEQ ID NO: 465668 - DNA, 25 bp, Homo sapien
cactccccattgcaggcttctgagc

SEQ ID NO: 465669 - DNA, 25 bp, Homo sapien
cagatcacagtaccccagttgaata

SEQ ID NO: 465670 - DNA, 25 bp, Homo sapien
tccttttcctccaagttgcggctcc

SEQ ID NO: 465671 - DNA, 25 bp, Homo sapien
ctgccagatcacagtaccccagttg

SEQ ID NO: 465672 - DNA, 25 bp, Homo sapien
tccaagttgcggctcccctttcact

SEQ ID NO: 465673 - DNA, 25 bp, Homo sapien
catgtataccaattggttagctccc

SEQ ID NO: 465674 - DNA, 25 bp, Homo sapien
tcctcccatcttttggagtctctga

SEQ ID NO: 465675 - DNA, 25 bp, Homo sapien
gtgtcaccatcacactaatactgta

SEQ ID NO: 465676 - DNA, 25 bp, Homo sapien
ttttgcgtagtgctgaagtctggcc

SEQ ID NO: 465677 - DNA, 25 bp, Homo sapien
tgttctgactgccactttcagtctt

SEQ ID NO: 465678 - DNA, 25 bp, Homo sapien
gtcttcactcgcctttgttcctgac

SEQ ID NO: 465679 - DNA, 25 bp, Homo sapien
ttcctgacttggtggtcttgttccc

SEQ ID NO: 465680 - DNA, 25 bp, Homo sapien
gttcctgacttggtggtcttgttcc

SEQ ID NO: 465681 - DNA, 25 bp, Homo sapien
ggtgatgtgtttgcaacagtaaaag

SEQ ID NO: 465682 - DNA, 25 bp, Homo sapien
gacgttgatgcgtggaagaattctg

SEQ ID NO: 465683 - DNA, 25 bp, Homo sapien
ccaacattcatagagtgcgggacgt

SEQ ID NO: 465684 - DNA, 25 bp, Homo sapien
gtagaccaagagtcaacttccagct

SEQ ID NO: 465685 - DNA, 25 bp, Homo sapien
tgaaaccgtacatcaggcaatggat

SEQ ID NO: 465686 - DNA, 25 bp, Homo sapien
cttctcagaggacaagttctaagct

SEQ ID NO: 465687 - DNA, 25 bp, Homo sapien
ggacaagttctaagcttctttggct

SEQ ID NO: 465688 - DNA, 25 bp, Homo sapien
ccagtagcaaatagccttctcagag

SEQ ID NO: 465689 - DNA, 25 bp, Homo sapien
taaaatcagagcaaagacagcccgg

SEQ ID NO: 465690 - DNA, 25 bp, Homo sapien
aattgagtccatagtgtttcagtcc

SEQ ID NO: 465691 - DNA, 25 bp, Homo sapien
taaggaccccatttagtgcagcaca

SEQ ID NO: 465692 - DNA, 25 bp, Homo sapien
acagcccgggatgctctaaggaccc

SEQ ID NO: 465693 - DNA, 25 bp, Homo sapien
tgagtaactggataagaggccttgc

SEQ ID NO: 465694 - DNA, 25 bp, Homo sapien
agggatccctttttcggtctagcag

SEQ ID NO: 465695 - DNA, 25 bp, Homo sapien
tacaatgtcgtgatgcacctggctc

SEQ ID NO: 465696 - DNA, 25 bp, Homo sapien
tgaaactatgatgccccatgagggt

SEQ ID NO: 465697 - DNA, 25 bp, Homo sapien
tccagggtcctaggtgcagctgaag

SEQ ID NO: 465698 - DNA, 25 bp, Homo sapien
taactactgatagataggaagccct

SEQ ID NO: 465699 - DNA, 25 bp, Homo sapien
gagagtctactcaacatggcacagg

SEQ ID NO: 465700 - DNA, 25 bp, Homo sapien
gggcatgcaggtataacactcactt

SEQ ID NO: 465701 - DNA, 25 bp, Homo sapien
cctgtgtaaagcgtgaactcgaggc

SEQ ID NO: 465702 - DNA, 25 bp, Homo sapien
caagacgcaaaatgtttctgtgctc

SEQ ID NO: 465703 - DNA, 25 bp, Homo sapien
ccttttgggtccaagacgcaaaatg

SEQ ID NO: 465704 - DNA, 25 bp, Homo sapien
cgaggctttactaaggacacaagtt

SEQ ID NO: 465705 - DNA, 25 bp, Homo sapien
tcctctattgaagcagagattaaca

SEQ ID NO: 465706 - DNA, 25 bp, Homo sapien
cacctcctctattgaagcagagatt

SEQ ID NO: 465707 - DNA, 25 bp, Homo sapien
cctcctctattgaagcagagattaa

SEQ ID NO: 465708 - DNA, 25 bp, Homo sapien
cttagagaataaggccacattttca

SEQ ID NO: 465709 - DNA, 25 bp, Homo sapien
tcctcaggattaacgcagagcctgt

SEQ ID NO: 465710 - DNA, 25 bp, Homo sapien
cattcctcaggattaacgcagagcc

SEQ ID NO: 465711 - DNA, 25 bp, Homo sapien
ggattaacgcagagcctgtaccttg

SEQ ID NO: 465712 - DNA, 25 bp, Homo sapien
tcccacattcctcaggattaacgca

SEQ ID NO: 465713 - DNA, 25 bp, Homo sapien
aagactggtgaatatggacattcac

SEQ ID NO: 465714 - DNA, 25 bp, Homo sapien
tggtgaatatggacattcacaaggc

SEQ ID NO: 465715 - DNA, 25 bp, Homo sapien
tgtggaatatgggaagcaaagactg

SEQ ID NO: 465716 - DNA, 25 bp, Homo sapien
tgttcctcctctgatctatgagtat

SEQ ID NO: 465717 - DNA, 25 bp, Homo sapien
agctataaacactattgcactcaga

SEQ ID NO: 465718 - DNA, 25 bp, Homo sapien
tgggaccaattagctataaacacta

SEQ ID NO: 465719 - DNA, 25 bp, Homo sapien
taactggttgggaccaattagctat

SEQ ID NO: 465720 - DNA, 25 bp, Homo sapien
ttagctataaacactattgcactca

SEQ ID NO: 465721 - DNA, 25 bp, Homo sapien
gtctgttgggcaattcctaagaatg

SEQ ID NO: 465722 - DNA, 25 bp, Homo sapien
tctctgcagtttgggtgtttgattt

SEQ ID NO: 465723 - DNA, 25 bp, Homo sapien
cagccagggtctgttgggcaattcc

SEQ ID NO: 465724 - DNA, 25 bp, Homo sapien
cattgcaaccctggattctctgcag

SEQ ID NO: 465725 - DNA, 25 bp, Homo sapien
tccattatcccagcagtatccacag

SEQ ID NO: 465726 - DNA, 25 bp, Homo sapien
tccacagcaagtgttcacaaatgct

SEQ ID NO: 465727 - DNA, 25 bp, Homo sapien
aatgctttttgactgacagttactt

SEQ ID NO: 465728 - DNA, 25 bp, Homo sapien
gaagcaccataagaggctataggat

SEQ ID NO: 465729 - DNA, 25 bp, Homo sapien
cacttgctatcttgcatattgattt

SEQ ID NO: 465730 - DNA, 25 bp, Homo sapien
ctatcttgcatattgatttgtaact

SEQ ID NO: 465731 - DNA, 25 bp, Homo sapien
tctgactgatgcacttgctatcttg

SEQ ID NO: 465732 - DNA, 25 bp, Homo sapien
ctctgactgatgcacttgctatctt

SEQ ID NO: 465733 - DNA, 25 bp, Homo sapien
gaggccatggaatcccctgatgtca

SEQ ID NO: 465734 - DNA, 25 bp, Homo sapien
tccaaacacaagtgtgagagaagcc

SEQ ID NO: 465735 - DNA, 25 bp, Homo sapien
aagccagaggccatggaatcccctg

SEQ ID NO: 465736 - DNA, 25 bp, Homo sapien
cagaggccatggaatcccctgatgt

SEQ ID NO: 465737 - DNA, 25 bp, Homo sapien
ctttcatcaataaacccataagggc

SEQ ID NO: 465738 - DNA, 25 bp, Homo sapien
catcaataaacccataagggcttta

SEQ ID NO: 465739 - DNA, 25 bp, Homo sapien
ataaacccataagggctttagagct

SEQ ID NO: 465740 - DNA, 25 bp, Homo sapien
caataaacccataagggctttagag

SEQ ID NO: 465741 - DNA, 25 bp, Homo sapien
tgtttcccaaacttgtgccagcttt

SEQ ID NO: 465742 - DNA, 25 bp, Homo sapien
gtttcccaaacttgtgccagctttc

SEQ ID NO: 465743 - DNA, 25 bp, Homo sapien
cactcaagggtggtacacgagcttc

SEQ ID NO: 465744 - DNA, 25 bp, Homo sapien
catcactcaagggtggtacacgagc

SEQ ID NO: 465745 - DNA, 25 bp, Homo sapien
caagggtggtacacgagcttctgct

SEQ ID NO: 465746 - DNA, 25 bp, Homo sapien
ctcaagggtggtacacgagcttctg

SEQ ID NO: 465747 - DNA, 25 bp, Homo sapien
ccaaacgttcgcctccagcaaagaa

SEQ ID NO: 465748 - DNA, 25 bp, Homo sapien
ggtaggtgttgaagcttgtccttga

SEQ ID NO: 465749 - DNA, 25 bp, Homo sapien
tgaagcttgtccttgatccaaacgt

SEQ ID NO: 465750 - DNA, 25 bp, Homo sapien
ttgatccaaacgttcgcctccagca

SEQ ID NO: 465751 - DNA, 25 bp, Homo sapien
tgctcgtgctaaatcctggcctcta

SEQ ID NO: 465752 - DNA, 25 bp, Homo sapien
tatgtggtctagctatcctgttcag

SEQ ID NO: 465753 - DNA, 25 bp, Homo sapien
aggatggaccttacagattactgcc

SEQ ID NO: 465754 - DNA, 25 bp, Homo sapien
ggttctggaatcaaactgctcgtgc

SEQ ID NO: 465755 - DNA, 25 bp, Homo sapien
gacagtgagagactttaataccaca

SEQ ID NO: 465756 - DNA, 25 bp, Homo sapien
taataccacactgaaaatactagac

SEQ ID NO: 465757 - DNA, 25 bp, Homo sapien
aatactagacagatcattgagacaa

SEQ ID NO: 465758 - DNA, 25 bp, Homo sapien
gacacttatactcccacaacaatga

SEQ ID NO: 465759 - DNA, 25 bp, Homo sapien
gaggaagagacctacatttaacttg

SEQ ID NO: 465760 - DNA, 25 bp, Homo sapien
tgtgcctacttgaggtgatctctcc

SEQ ID NO: 465761 - DNA, 25 bp, Homo sapien
caatcagctttagccatagtaaagg

SEQ ID NO: 465762 - DNA, 25 bp, Homo sapien
tcccagcagtagagattggaggaaa

SEQ ID NO: 465763 - DNA, 25 bp, Homo sapien
cctgatgcaaggttcaaggtgccat

SEQ ID NO: 465764 - DNA, 25 bp, Homo sapien
accctcgtgaatggatcgatgccat

SEQ ID NO: 465765 - DNA, 25 bp, Homo sapien
cctgatggagggaggttagtccttt

SEQ ID NO: 465766 - DNA, 25 bp, Homo sapien
ccaccctcgtgaatggatcgatgcc

SEQ ID NO: 465767 - DNA, 25 bp, Homo sapien
ggaagtcgattgcagtcctcaccag

SEQ ID NO: 465768 - DNA, 25 bp, Homo sapien
aggacacagtgtaccagccttctgg

SEQ ID NO: 465769 - DNA, 25 bp, Homo sapien
tagaaacctaatcccactgcaacag

SEQ ID NO: 465770 - DNA, 25 bp, Homo sapien
cattcatgctgtaatcaaagggctt

SEQ ID NO: 465771 - DNA, 25 bp, Homo sapien
ccttttgtacaaagagttgtcctgg

SEQ ID NO: 465772 - DNA, 25 bp, Homo sapien
agagttgtcctggagtctctttgcc

SEQ ID NO: 465773 - DNA, 25 bp, Homo sapien
cctggagtctctttgccagatgttt

SEQ ID NO: 465774 - DNA, 25 bp, Homo sapien
cagccagccggtcctcatttccctt

SEQ ID NO: 465775 - DNA, 25 bp, Homo sapien
cttggctctccgtctctgtggctga

SEQ ID NO: 465776 - DNA, 25 bp, Homo sapien
gacaacccagtcagactggaaagaa

SEQ ID NO: 465777 - DNA, 25 bp, Homo sapien
ctgtggctgactattcatgtaaaac

SEQ ID NO: 465778 - DNA, 25 bp, Homo sapien
tctccagtgaaactgacaacccagt

SEQ ID NO: 465779 - DNA, 25 bp, Homo sapien
ccaatgcacgatcccctttggtagt

SEQ ID NO: 465780 - DNA, 25 bp, Homo sapien
taatgtagtgttcttaaagaggaaa

SEQ ID NO: 465781 - DNA, 25 bp, Homo sapien
gactgcagcgctcaaggaaaacttc

SEQ ID NO: 465782 - DNA, 25 bp, Homo sapien
tcaaaatcatatctggagagccatg

SEQ ID NO: 465783 - DNA, 25 bp, Homo sapien
tacctgtaacaagttctgtgagcca

SEQ ID NO: 465784 - DNA, 25 bp, Homo sapien
caagtgtggtctttaacctggatcc

SEQ ID NO: 465785 - DNA, 25 bp, Homo sapien
tcctaatgcagacgctcatggcaaa

SEQ ID NO: 465786 - DNA, 25 bp, Homo sapien
caaggagccctttgagacggcagtc

SEQ ID NO: 465787 - DNA, 25 bp, Homo sapien
agatgcatgtaatcacggacctatt

SEQ ID NO: 465788 - DNA, 25 bp, Homo sapien
acatttgaacgagttttggagatgc

SEQ ID NO: 465789 - DNA, 25 bp, Homo sapien
atgaagactctttgaacatttgaac

SEQ ID NO: 465790 - DNA, 25 bp, Homo sapien
tgcatgtaatcacggacctattcat

SEQ ID NO: 465791 - DNA, 25 bp, Homo sapien
tcaggaaccacaacaaagtaaaata

SEQ ID NO: 465792 - DNA, 25 bp, Homo sapien
caacccaacagtaactattggaagc

SEQ ID NO: 465793 - DNA, 25 bp, Homo sapien
aatcgaagacctgggtcaattcctg

SEQ ID NO: 465794 - DNA, 25 bp, Homo sapien
tcagatctaaaaatcgaagacctgg

SEQ ID NO: 465795 - DNA, 25 bp, Homo sapien
tgagcagcacaacccaacagtaact

SEQ ID NO: 465796 - DNA, 25 bp, Homo sapien
gaagacaccaaggtttcctctgctc

SEQ ID NO: 465797 - DNA, 25 bp, Homo sapien
cagttggaagacaccaaggtttcct

SEQ ID NO: 465798 - DNA, 25 bp, Homo sapien
ttggaagacaccaaggtttcctctg

SEQ ID NO: 465799 - DNA, 25 bp, Homo sapien
agacaccaaggtttcctctgctcct

SEQ ID NO: 465800 - DNA, 25 bp, Homo sapien
aacaatgtatgccatagggtctgtt

SEQ ID NO: 465801 - DNA, 25 bp, Homo sapien
cccagtttgctgttcccaatatatc

SEQ ID NO: 465802 - DNA, 25 bp, Homo sapien
tatgccatagggtctgtttgttggg

SEQ ID NO: 465803 - DNA, 25 bp, Homo sapien
tgttcccaatatatcttctgttcaa

SEQ ID NO: 465804 - DNA, 25 bp, Homo sapien
cagaggagtattgcactcttctgaa

SEQ ID NO: 465805 - DNA, 25 bp, Homo sapien
tatttgagtatcagaggagtattgc

SEQ ID NO: 465806 - DNA, 25 bp, Homo sapien
gagtattgcactcttctgaatgaga

SEQ ID NO: 465807 - DNA, 25 bp, Homo sapien
tgagtatcagaggagtattgcactc

SEQ ID NO: 465808 - DNA, 25 bp, Homo sapien
caaatgcaagaacaacagaatctag

SEQ ID NO: 465809 - DNA, 25 bp, Homo sapien
tcagttctgactcccgtctagcaag

SEQ ID NO: 465810 - DNA, 25 bp, Homo sapien
ggcacagaagatttgtacaaatgca

SEQ ID NO: 465811 - DNA, 25 bp, Homo sapien
tcccgtctagcaaggcacagcctga

SEQ ID NO: 465812 - DNA, 25 bp, Homo sapien
gacctgaggtcataggcagatcttt

SEQ ID NO: 465813 - DNA, 25 bp, Homo sapien
gaggacctgaggtcataggcagatc

SEQ ID NO: 465814 - DNA, 25 bp, Homo sapien
ggacctgaggtcataggcagatctt

SEQ ID NO: 465815 - DNA, 25 bp, Homo sapien
cctgaggtcataggcagatctttct

SEQ ID NO: 465816 - DNA, 25 bp, Homo sapien
gtctacggggcttctgaggcgatca

SEQ ID NO: 465817 - DNA, 25 bp, Homo sapien
gggcttctgaggcgatcaggcagcg

SEQ ID NO: 465818 - DNA, 25 bp, Homo sapien
tactgtgagagttacttaaagctcg

SEQ ID NO: 465819 - DNA, 25 bp, Homo sapien
gcttctgaggcgatcaggcagcgtc

SEQ ID NO: 465820 - DNA, 25 bp, Homo sapien
ctggcgggcagagtgggggtcacaa

SEQ ID NO: 465821 - DNA, 25 bp, Homo sapien
ggaaccggccatctggatgtgtacg

SEQ ID NO: 465822 - DNA, 25 bp, Homo sapien
accggccatctggatgtgtacgtgc

SEQ ID NO: 465823 - DNA, 25 bp, Homo sapien
aaggtgctcaataggggagcttttg

SEQ ID NO: 465824 - DNA, 25 bp, Homo sapien
ttcttctcccactttaaaagcttca

SEQ ID NO: 465825 - DNA, 25 bp, Homo sapien
ccactttaaaagcttcagctttttg

SEQ ID NO: 465826 - DNA, 25 bp, Homo sapien
tctcccactttaaaagcttcagctt

SEQ ID NO: 465827 - DNA, 25 bp, Homo sapien
ctttaaaagcttcagctttttgcat

SEQ ID NO: 465828 - DNA, 25 bp, Homo sapien
ggtactgcaagatgtgggaaaataa

SEQ ID NO: 465829 - DNA, 25 bp, Homo sapien
tctagggtactgcaagatgtgggaa

SEQ ID NO: 465830 - DNA, 25 bp, Homo sapien
tgatgaatgatgtcatggtcacatg

SEQ ID NO: 465831 - DNA, 25 bp, Homo sapien
ttactgtagaactctagggtactgc

SEQ ID NO: 465832 - DNA, 25 bp, Homo sapien
gccaaccacagtagccaaaggatcc

SEQ ID NO: 465833 - DNA, 25 bp, Homo sapien
gcagaattcagttctatgcagtaga

SEQ ID NO: 465834 - DNA, 25 bp, Homo sapien
aaagtccaggacaatatggctcagc

SEQ ID NO: 465835 - DNA, 25 bp, Homo sapien
aaatgtctctactgttaagggctga

SEQ ID NO: 465836 - DNA, 25 bp, Homo sapien
tactaacaggctgataggtttggat

SEQ ID NO: 465837 - DNA, 25 bp, Homo sapien
gttctgagacaaatgacctacctag

SEQ ID NO: 465838 - DNA, 25 bp, Homo sapien
aaatgacctacctagctgcttggcc

SEQ ID NO: 465839 - DNA, 25 bp, Homo sapien
caaagatggaattatagcaagaatt

SEQ ID NO: 465840 - DNA, 25 bp, Homo sapien
tcagatgcccctagttgctgcttcc

SEQ ID NO: 465841 - DNA, 25 bp, Homo sapien
ggtaattcccagagcaattcagatg

SEQ ID NO: 465842 - DNA, 25 bp, Homo sapien
tgtagcatgaacaataaaagccacc

SEQ ID NO: 465843 - DNA, 25 bp, Homo sapien
ctctaacacactgccttgggaatcc

SEQ ID NO: 465844 - DNA, 25 bp, Homo sapien
ttcggtattacagcaatgttgcagg

SEQ ID NO: 465845 - DNA, 25 bp, Homo sapien
cattcacttggagaacagaattcac

SEQ ID NO: 465846 - DNA, 25 bp, Homo sapien
gaaggcagtgccttgactctccaga

SEQ ID NO: 465847 - DNA, 25 bp, Homo sapien
gtaggaatatgctttctgttgctca

SEQ ID NO: 465848 - DNA, 25 bp, Homo sapien
tgaaagtcttgctttgcgaaggacc

SEQ ID NO: 465849 - DNA, 25 bp, Homo sapien
aagtcttgctttgcgaaggacctga

SEQ ID NO: 465850 - DNA, 25 bp, Homo sapien
acagaggcttggagttgggtctgaa

SEQ ID NO: 465851 - DNA, 25 bp, Homo sapien
cagaggcttggagttgggtctgaaa

SEQ ID NO: 465852 - DNA, 25 bp, Homo sapien
tccagcttgggagaactaacgtgaa

SEQ ID NO: 465853 - DNA, 25 bp, Homo sapien
ttagtctgtgcgtattacaagcaaa

SEQ ID NO: 465854 - DNA, 25 bp, Homo sapien
ccgacctgtagctcttccataagca

SEQ ID NO: 465855 - DNA, 25 bp, Homo sapien
cattgtgctgtacacagggataaaa

SEQ ID NO: 465856 - DNA, 25 bp, Homo sapien
cattggctgaatacttcgaggcttc

SEQ ID NO: 465857 - DNA, 25 bp, Homo sapien
tccattggctgaatacttcgaggct

SEQ ID NO: 465858 - DNA, 25 bp, Homo sapien
ttggctgaatacttcgaggcttcag

SEQ ID NO: 465859 - DNA, 25 bp, Homo sapien
ctccattggctgaatacttcgaggc

SEQ ID NO: 465860 - DNA, 25 bp, Homo sapien
agccaaatggctgtaggtatcccat

SEQ ID NO: 465861 - DNA, 25 bp, Homo sapien
tcaaagccaaatggctgtaggtatc

SEQ ID NO: 465862 - DNA, 25 bp, Homo sapien
ggagggaatcaaagccaaatggctg

SEQ ID NO: 465863 - DNA, 25 bp, Homo sapien
gggaatcaaagccaaatggctgtag

SEQ ID NO: 465864 - DNA, 25 bp, Homo sapien
gggaagtatgcatggaagcaccaag

SEQ ID NO: 465865 - DNA, 25 bp, Homo sapien
ccaggggaagtatgcatggaagcac

SEQ ID NO: 465866 - DNA, 25 bp, Homo sapien
ggggaagtatgcatggaagcaccaa

SEQ ID NO: 465867 - DNA, 25 bp, Homo sapien
caggggaagtatgcatggaagcacc

SEQ ID NO: 465868 - DNA, 25 bp, Homo sapien
tattgcatattgacagcaatatccc

SEQ ID NO: 465869 - DNA, 25 bp, Homo sapien
cccagtggctgatttattgataata

SEQ ID NO: 465870 - DNA, 25 bp, Homo sapien
gaacatttcgcgtcataaagtccaa

SEQ ID NO: 465871 - DNA, 25 bp, Homo sapien
gtccaaacaatatacactgagttca

SEQ ID NO: 465872 - DNA, 25 bp, Homo sapien
accattttctctcaggtactgtgct

SEQ ID NO: 465873 - DNA, 25 bp, Homo sapien
tactgtgctccattgcaagtgatag

SEQ ID NO: 465874 - DNA, 25 bp, Homo sapien
actgtgctccattgcaagtgataga

SEQ ID NO: 465875 - DNA, 25 bp, Homo sapien
aggtactgtgctccattgcaagtga

SEQ ID NO: 465876 - DNA, 25 bp, Homo sapien
gaaaatcagcaggaagcttggcaat

SEQ ID NO: 465877 - DNA, 25 bp, Homo sapien
gctacatcctcaattgcaagaaaat

SEQ ID NO: 465878 - DNA, 25 bp, Homo sapien
gcctgcagctcgtgggccctctgta

SEQ ID NO: 465879 - DNA, 25 bp, Homo sapien
tcttttgccgttaacatggtgaagt

SEQ ID NO: 465880 - DNA, 25 bp, Homo sapien
taaaatgaacgcctttagcaagagg

SEQ ID NO: 465881 - DNA, 25 bp, Homo sapien
actgtaaaatgaacgcctttagcaa

SEQ ID NO: 465882 - DNA, 25 bp, Homo sapien
ctgtaaaatgaacgcctttagcaag

SEQ ID NO: 465883 - DNA, 25 bp, Homo sapien
aatgaacgcctttagcaagagggaa

SEQ ID NO: 465884 - DNA, 25 bp, Homo sapien
tggcataaagctgtaactgttttca

SEQ ID NO: 465885 - DNA, 25 bp, Homo sapien
aagctgtaactgttttcagggtcct

SEQ ID NO: 465886 - DNA, 25 bp, Homo sapien
gactggcataaagctgtaactgttt

SEQ ID NO: 465887 - DNA, 25 bp, Homo sapien
ctgttgactggcataaagctgtaac

SEQ ID NO: 465888 - DNA, 25 bp, Homo sapien
actctagcctgtgcatgttgttgta

SEQ ID NO: 465889 - DNA, 25 bp, Homo sapien
tgcttctttcggtcctgtaggctcc

SEQ ID NO: 465890 - DNA, 25 bp, Homo sapien
ggtttatgcctattcgaattatgta

SEQ ID NO: 465891 - DNA, 25 bp, Homo sapien
tcctgaacaaatctagagcctgctt

SEQ ID NO: 465892 - DNA, 25 bp, Homo sapien
ggtacttctcttccgatgttgtgag

SEQ ID NO: 465893 - DNA, 25 bp, Homo sapien
gcggtacttctcttccgatgttgtg

SEQ ID NO: 465894 - DNA, 25 bp, Homo sapien
tcagcggtacttctcttccgatgtt

SEQ ID NO: 465895 - DNA, 25 bp, Homo sapien
cagcggtacttctcttccgatgttg

SEQ ID NO: 465896 - DNA, 25 bp, Homo sapien
tttcattataactgccaattttcaa

SEQ ID NO: 465897 - DNA, 25 bp, Homo sapien
ttcattataactgccaattttcaaa

SEQ ID NO: 465898 - DNA, 25 bp, Homo sapien
ttcatccctctcatttactaaaatg

SEQ ID NO: 465899 - DNA, 25 bp, Homo sapien
tcttggtgttctatagattccttca

SEQ ID NO: 465900 - DNA, 25 bp, Homo sapien
tgttctatagattccttcatccctc

SEQ ID NO: 465901 - DNA, 25 bp, Homo sapien
caaaataatcttccattcttggtgt

SEQ ID NO: 465902 - DNA, 25 bp, Homo sapien
gagtcccagtgttctactttccaga

SEQ ID NO: 465903 - DNA, 25 bp, Homo sapien
aatctatcttacagtgtgtgtgagc

SEQ ID NO: 465904 - DNA, 25 bp, Homo sapien
tattcatttgacttaggcatgccat

SEQ ID NO: 465905 - DNA, 25 bp, Homo sapien
tagcacatgctttaaaagactcaag

SEQ ID NO: 465906 - DNA, 25 bp, Homo sapien
gaaagacagttttgtcccacagtgt

SEQ ID NO: 465907 - DNA, 25 bp, Homo sapien
taaatgtacctccagttaagacgct

SEQ ID NO: 465908 - DNA, 25 bp, Homo sapien
tcacatcacttctgcgggtttctag

SEQ ID NO: 465909 - DNA, 25 bp, Homo sapien
tggtttgcctaatactgactctcag

SEQ ID NO: 465910 - DNA, 25 bp, Homo sapien
ggagactccatggcaacagttacca

SEQ ID NO: 465911 - DNA, 25 bp, Homo sapien
aatggtgcttggcaggtggagactc

SEQ ID NO: 465912 - DNA, 25 bp, Homo sapien
tggtgcttggcaggtggagactcca

SEQ ID NO: 465913 - DNA, 25 bp, Homo sapien
gagactccatggcaacagttaccat

SEQ ID NO: 465914 - DNA, 25 bp, Homo sapien
agttgaggcccaacaatggccacaa

SEQ ID NO: 465915 - DNA, 25 bp, Homo sapien
gttgaggcccaacaatggccacaat

SEQ ID NO: 465916 - DNA, 25 bp, Homo sapien
gaggcccaacaatggccacaataat

SEQ ID NO: 465917 - DNA, 25 bp, Homo sapien
ggaagttgaggcccaacaatggcca

SEQ ID NO: 465918 - DNA, 25 bp, Homo sapien
tgtacatgtgcaagttggctcctgg

SEQ ID NO: 465919 - DNA, 25 bp, Homo sapien
tattgtacgatgtcgaggtctgtgg

SEQ ID NO: 465920 - DNA, 25 bp, Homo sapien
tcaccgggtactgggaatattgccc

SEQ ID NO: 465921 - DNA, 25 bp, Homo sapien
ggaccaactgtattgcttgttgaaa

SEQ ID NO: 465922 - DNA, 25 bp, Homo sapien
tcaaacaatatactctaaattatgg

SEQ ID NO: 465923 - DNA, 25 bp, Homo sapien
tctatttggtttctatagggagaat

SEQ ID NO: 465924 - DNA, 25 bp, Homo sapien
cagaatatcatcaggtaacataatg

SEQ ID NO: 465925 - DNA, 25 bp, Homo sapien
tatatagaagatagagccaattgga

SEQ ID NO: 465926 - DNA, 25 bp, Homo sapien
taaacactgtcttgagtcctcacag

SEQ ID NO: 465927 - DNA, 25 bp, Homo sapien
gtgtgtaattgaccagcaggcaagt

SEQ ID NO: 465928 - DNA, 25 bp, Homo sapien
tgtcacacttcaggataccacttag

SEQ ID NO: 465929 - DNA, 25 bp, Homo sapien
acagttctcatctccttagtcaagg

SEQ ID NO: 465930 - DNA, 25 bp, Homo sapien
tatgtctcttcagtaaattatagac

SEQ ID NO: 465931 - DNA, 25 bp, Homo sapien
taataatatgtctcttcagtaaatt

SEQ ID NO: 465932 - DNA, 25 bp, Homo sapien
aattatagacaaaaagcaggaccat

SEQ ID NO: 465933 - DNA, 25 bp, Homo sapien
gtaaattatagacaaaaagcaggac

SEQ ID NO: 465934 - DNA, 25 bp, Homo sapien
ttctatgaaccctttcaacttggta

SEQ ID NO: 465935 - DNA, 25 bp, Homo sapien
cttctatgaaccctttcaacttggt

SEQ ID NO: 465936 - DNA, 25 bp, Homo sapien
tcttctatgaaccctttcaacttgg

SEQ ID NO: 465937 - DNA, 25 bp, Homo sapien
cttcttctatgaaccctttcaactt

SEQ ID NO: 465938 - DNA, 25 bp, Homo sapien
gccaagctgtgccagatgtcagtca

SEQ ID NO: 465939 - DNA, 25 bp, Homo sapien
taaagggctggttgttttagagatg

SEQ ID NO: 465940 - DNA, 25 bp, Homo sapien
tgaagttcctgcttgagtccactgc

SEQ ID NO: 465941 - DNA, 25 bp, Homo sapien
gatgctcccttaagcttgccaagct

SEQ ID NO: 465942 - DNA, 25 bp, Homo sapien
tagcaaacgctcctacacatgtggg

SEQ ID NO: 465943 - DNA, 25 bp, Homo sapien
gataagggatgactctctgggatcc

SEQ ID NO: 465944 - DNA, 25 bp, Homo sapien
gacatagctttctggaggaagacca

SEQ ID NO: 465945 - DNA, 25 bp, Homo sapien
gattgtatggtgatagagacatagc

SEQ ID NO: 465946 - DNA, 25 bp, Homo sapien
tagcaactgagattcctctatccca

SEQ ID NO: 465947 - DNA, 25 bp, Homo sapien
cactcatgggtcctgctgctagcaa

SEQ ID NO: 465948 - DNA, 25 bp, Homo sapien
tttctagtcttcccactacatgcca

SEQ ID NO: 465949 - DNA, 25 bp, Homo sapien
agaccttacacactgaaaaaagaat

SEQ ID NO: 465950 - DNA, 25 bp, Homo sapien
aaggacacactggtttgtcatagca

SEQ ID NO: 465951 - DNA, 25 bp, Homo sapien
taaaaggacacactggtttgtcata

SEQ ID NO: 465952 - DNA, 25 bp, Homo sapien
ggacacactggtttgtcatagcagt

SEQ ID NO: 465953 - DNA, 25 bp, Homo sapien
aaaggacacactggtttgtcatagc

SEQ ID NO: 465954 - DNA, 25 bp, Homo sapien
agtaggtatagttcttctgaaatcc

SEQ ID NO: 465955 - DNA, 25 bp, Homo sapien
tctgagtagccctcacttttggagt

SEQ ID NO: 465956 - DNA, 25 bp, Homo sapien
cctggcggttgtgttaatttaattg

SEQ ID NO: 465957 - DNA, 25 bp, Homo sapien
ggctgtttctcctactgagtaggta

SEQ ID NO: 465958 - DNA, 25 bp, Homo sapien
ttggaattaccactgttaaaggatc

SEQ ID NO: 465959 - DNA, 25 bp, Homo sapien
taacatagttcctattgttgaggct

SEQ ID NO: 465960 - DNA, 25 bp, Homo sapien
gtagaaggcaatagcacccagcagc

SEQ ID NO: 465961 - DNA, 25 bp, Homo sapien
ctattgttgaggctatttttactcc

SEQ ID NO: 465962 - DNA, 25 bp, Homo sapien
tttttactcccgctctttgatgagt

SEQ ID NO: 465963 - DNA, 25 bp, Homo sapien
taaacaatgtgaagcatgacaccag

SEQ ID NO: 465964 - DNA, 25 bp, Homo sapien
ttaaacaatgtgaagcatgacacca

SEQ ID NO: 465965 - DNA, 25 bp, Homo sapien
cagactttttctggttgttcaactc

SEQ ID NO: 465966 - DNA, 25 bp, Homo sapien
gcaagctgtgcagctccacagactt

SEQ ID NO: 465967 - DNA, 25 bp, Homo sapien
acagcctacgttgtccagtggaggc

SEQ ID NO: 465968 - DNA, 25 bp, Homo sapien
caggacagcctacgttgtccagtgg

SEQ ID NO: 465969 - DNA, 25 bp, Homo sapien
tttcacaggacagcctacgttgtcc

SEQ ID NO: 465970 - DNA, 25 bp, Homo sapien
gtttcacaggacagcctacgttgtc

SEQ ID NO: 465971 - DNA, 25 bp, Homo sapien
ccaaaaagccagtaggatatgtcag

SEQ ID NO: 465972 - DNA, 25 bp, Homo sapien
tatgatgaactcagataccttgccc

SEQ ID NO: 465973 - DNA, 25 bp, Homo sapien
gccccagagtgatagtgaagatatc

SEQ ID NO: 465974 - DNA, 25 bp, Homo sapien
tagaactaaagcttgtatgatgaac

SEQ ID NO: 465975 - DNA, 25 bp, Homo sapien
tccttctcaggccttcgataatcat

SEQ ID NO: 465976 - DNA, 25 bp, Homo sapien
tcgataatcattagttttgagtgtg

SEQ ID NO: 465977 - DNA, 25 bp, Homo sapien
ccttcgataatcattagttttgagt

SEQ ID NO: 465978 - DNA, 25 bp, Homo sapien
agacccctctattctctcctgtgat

SEQ ID NO: 465979 - DNA, 25 bp, Homo sapien
tatctcttttgctcacaaacttcat

SEQ ID NO: 465980 - DNA, 25 bp, Homo sapien
ataaaataatttgacccatgaaatc

SEQ ID NO: 465981 - DNA, 25 bp, Homo sapien
tttgacccatgaaatcttatctctt

SEQ ID NO: 465982 - DNA, 25 bp, Homo sapien
cttcatcatctggatccttataaaa

SEQ ID NO: 465983 - DNA, 25 bp, Homo sapien
tgatctaaatggaagactagaacaa

SEQ ID NO: 465984 - DNA, 25 bp, Homo sapien
cctgatctaaatggaagactagaac

SEQ ID NO: 465985 - DNA, 25 bp, Homo sapien
tctaaatggaagactagaacaaaca

SEQ ID NO: 465986 - DNA, 25 bp, Homo sapien
ctaaatggaagactagaacaaacat

SEQ ID NO: 465987 - DNA, 25 bp, Homo sapien
ctaaaagaatacaagcccactgtgt

SEQ ID NO: 465988 - DNA, 25 bp, Homo sapien
ttctaaaagaatacaagcccactgt

SEQ ID NO: 465989 - DNA, 25 bp, Homo sapien
gtgtcagcagttgtatcaggcccac

SEQ ID NO: 465990 - DNA, 25 bp, Homo sapien
tatcaggcccacatgaatgaacttt

SEQ ID NO: 465991 - DNA, 25 bp, Homo sapien
gggtgaaaggacttagactgtgatc

SEQ ID NO: 465992 - DNA, 25 bp, Homo sapien
ctagcaaatagagcctgttgcaaac

SEQ ID NO: 465993 - DNA, 25 bp, Homo sapien
gatccattgtgagagctgactagca

SEQ ID NO: 465994 - DNA, 25 bp, Homo sapien
aggacttagactgtgatccattgtg

SEQ ID NO: 465995 - DNA, 25 bp, Homo sapien
tacaagtcgttcatctaaacagcag

SEQ ID NO: 465996 - DNA, 25 bp, Homo sapien
tccaggatccaaatgggctacttga

SEQ ID NO: 465997 - DNA, 25 bp, Homo sapien
ggctacttgaaatatctacaagtcg

SEQ ID NO: 465998 - DNA, 25 bp, Homo sapien
gcatcattacaagagctaattgctc

SEQ ID NO: 465999 - DNA, 25 bp, Homo sapien
aacgtcagtgctgcatgcattattt

SEQ ID NO: 466000 - DNA, 25 bp, Homo sapien
ctccaacgtcagtgctgcatgcatt

SEQ ID NO: 466001 - DNA, 25 bp, Homo sapien
tccaacgtcagtgctgcatgcatta

SEQ ID NO: 466002 - DNA, 25 bp, Homo sapien
ccaacgtcagtgctgcatgcattat

SEQ ID NO: 466003 - DNA, 25 bp, Homo sapien
acattcccccgcctcataattatct

SEQ ID NO: 466004 - DNA, 25 bp, Homo sapien
tctacattcccccgcctcataatta

SEQ ID NO: 466005 - DNA, 25 bp, Homo sapien
ttcccccgcctcataattatcttcc

SEQ ID NO: 466006 - DNA, 25 bp, Homo sapien
cttctctacattcccccgcctcata

SEQ ID NO: 466007 - DNA, 25 bp, Homo sapien
tcacgttgtttcatagatcattaga

SEQ ID NO: 466008 - DNA, 25 bp, Homo sapien
cacgttgtttcatagatcattagaa

SEQ ID NO: 466009 - DNA, 25 bp, Homo sapien
tgagaacggaagtcaaaagctagtg

SEQ ID NO: 466010 - DNA, 25 bp, Homo sapien
tcttgaaatatgaggtgaagttgag

SEQ ID NO: 466011 - DNA, 25 bp, Homo sapien
tgggtccttggtgctatcatgagat

SEQ ID NO: 466012 - DNA, 25 bp, Homo sapien
ttggcgggacagttagtgaaagatc

SEQ ID NO: 466013 - DNA, 25 bp, Homo sapien
tgttccagctctaaaagatttcccc

SEQ ID NO: 466014 - DNA, 25 bp, Homo sapien
tcctgctgtaaacgccgtgttccag

SEQ ID NO: 466015 - DNA, 25 bp, Homo sapien
cagggcttcccattcaagtattggc

SEQ ID NO: 466016 - DNA, 25 bp, Homo sapien
tgtccccagtgtaaagaatcagtag

SEQ ID NO: 466017 - DNA, 25 bp, Homo sapien
cactgtaatcccagtgagaggtgac

SEQ ID NO: 466018 - DNA, 25 bp, Homo sapien
tcccagtgagaggtgacaatgtgtt

SEQ ID NO: 466019 - DNA, 25 bp, Homo sapien
ctgtaatcccagtgagaggtgacaa

SEQ ID NO: 466020 - DNA, 25 bp, Homo sapien
gtaatcccagtgagaggtgacaatg

SEQ ID NO: 466021 - DNA, 25 bp, Homo sapien
actaaagggagactataataattct

SEQ ID NO: 466022 - DNA, 25 bp, Homo sapien
ttttcttaatgatattcaggaacta

SEQ ID NO: 466023 - DNA, 25 bp, Homo sapien
gactataataattctggcatttttg

SEQ ID NO: 466024 - DNA, 25 bp, Homo sapien
cttaatgatattcaggaactaaagg

SEQ ID NO: 466025 - DNA, 25 bp, Homo sapien
tgctactgacatttcggaggtatgg

SEQ ID NO: 466026 - DNA, 25 bp, Homo sapien
gccagaaatacttagcattactgag

SEQ ID NO: 466027 - DNA, 25 bp, Homo sapien
ctgagatgggactttttatagccga

SEQ ID NO: 466028 - DNA, 25 bp, Homo sapien
gatataacggcagatgtgtcaggca

SEQ ID NO: 466029 - DNA, 25 bp, Homo sapien
tatacttagatgttttagggaaatg

SEQ ID NO: 466030 - DNA, 25 bp, Homo sapien
tagccctggaactcttctaagagta

SEQ ID NO: 466031 - DNA, 25 bp, Homo sapien
aatagttattcatagccctggaact

SEQ ID NO: 466032 - DNA, 25 bp, Homo sapien
agggaaatgaagtaaattcactgtg

SEQ ID NO: 466033 - DNA, 25 bp, Homo sapien
gaaaactcagcccatgcttcggatg

SEQ ID NO: 466034 - DNA, 25 bp, Homo sapien
ctggctctctgggttaggcttgata

SEQ ID NO: 466035 - DNA, 25 bp, Homo sapien
tgcacatcccttgttgaaaactcag

SEQ ID NO: 466036 - DNA, 25 bp, Homo sapien
gcttcggatggctgatccccttcaa

SEQ ID NO: 466037 - DNA, 25 bp, Homo sapien
cattatccctacacagggcattttc

SEQ ID NO: 466038 - DNA, 25 bp, Homo sapien
ggttgcttgaaagcctttgtctgga

SEQ ID NO: 466039 - DNA, 25 bp, Homo sapien
tagattaatattcattatccctaca

SEQ ID NO: 466040 - DNA, 25 bp, Homo sapien
tctcctgtggttgcttgaaagcctt

SEQ ID NO: 466041 - DNA, 25 bp, Homo sapien
ctccagtgtccacgtttttgtacat

SEQ ID NO: 466042 - DNA, 25 bp, Homo sapien
tctccagtgtccacgtttttgtaca

SEQ ID NO: 466043 - DNA, 25 bp, Homo sapien
atctccagtgtccacgtttttgtac

SEQ ID NO: 466044 - DNA, 25 bp, Homo sapien
tatctccagtgtccacgtttttgta

SEQ ID NO: 466045 - DNA, 25 bp, Homo sapien
tgatactccgaatggctcctgtgag

SEQ ID NO: 466046 - DNA, 25 bp, Homo sapien
tcatatagtgccagaggttcagctc

SEQ ID NO: 466047 - DNA, 25 bp, Homo sapien
tgtgggctccccgtgaagatttcca

SEQ ID NO: 466048 - DNA, 25 bp, Homo sapien
tttgcaccagttgctgcactcagtg

SEQ ID NO: 466049 - DNA, 25 bp, Homo sapien
ctgtgccaaagtgtttgcatttcaa

SEQ ID NO: 466050 - DNA, 25 bp, Homo sapien
catctgtgccaaagtgtttgcattt

SEQ ID NO: 466051 - DNA, 25 bp, Homo sapien
tcctacatctgtgccaaagtgtttg

SEQ ID NO: 466052 - DNA, 25 bp, Homo sapien
tatatcctacatctgtgccaaagtg

SEQ ID NO: 466053 - DNA, 25 bp, Homo sapien
taccgctgtaacagttggctgtcta

SEQ ID NO: 466054 - DNA, 25 bp, Homo sapien
tgacaaagaggagcactgaacattg

SEQ ID NO: 466055 - DNA, 25 bp, Homo sapien
tgaggacacattaccgctgtaacag

SEQ ID NO: 466056 - DNA, 25 bp, Homo sapien
tctaataagctggaatatttcatca

SEQ ID NO: 466057 - DNA, 25 bp, Homo sapien
gatgatgaggatcaatggcactgag

SEQ ID NO: 466058 - DNA, 25 bp, Homo sapien
aacatggatggccaaggactgagat

SEQ ID NO: 466059 - DNA, 25 bp, Homo sapien
cagtagcaggagttagagtttttcc

SEQ ID NO: 466060 - DNA, 25 bp, Homo sapien
caagatcagccacgtaaaccagcaa

SEQ ID NO: 466061 - DNA, 25 bp, Homo sapien
ctaattccatattctcaatggcttc

SEQ ID NO: 466062 - DNA, 25 bp, Homo sapien
tcactaattccatattctcaatggc

SEQ ID NO: 466063 - DNA, 25 bp, Homo sapien
ttccatattctcaatggcttctgca

SEQ ID NO: 466064 - DNA, 25 bp, Homo sapien
ccatattctcaatggcttctgcaag

SEQ ID NO: 466065 - DNA, 25 bp, Homo sapien
catttatgtctaagtcaatattcat

SEQ ID NO: 466066 - DNA, 25 bp, Homo sapien
ttgtttactctgttggagatatatt

SEQ ID NO: 466067 - DNA, 25 bp, Homo sapien
actctgttggagatatatttaggag

SEQ ID NO: 466068 - DNA, 25 bp, Homo sapien
aaggacaagtttcctaatctcttgt

SEQ ID NO: 466069 - DNA, 25 bp, Homo sapien
gacaagtttcctaatctcttgttta

SEQ ID NO: 466070 - DNA, 25 bp, Homo sapien
gctggtgtcgcctcaaaacagagta

SEQ ID NO: 466071 - DNA, 25 bp, Homo sapien
gaatggcggtgctactcaaacttta

SEQ ID NO: 466072 - DNA, 25 bp, Homo sapien
caaggattgagaggtagaaaactac

SEQ ID NO: 466073 - DNA, 25 bp, Homo sapien
tgatgattccgaaaatgtggctggt

SEQ ID NO: 466074 - DNA, 25 bp, Homo sapien
ccagccatgacctctaattctctta

SEQ ID NO: 466075 - DNA, 25 bp, Homo sapien
ccttttgacatatccccacaaattg

SEQ ID NO: 466076 - DNA, 25 bp, Homo sapien
caggttactgccttttgacatatcc

SEQ ID NO: 466077 - DNA, 25 bp, Homo sapien
caaattggccatgaaagctgtttcc

SEQ ID NO: 466078 - DNA, 25 bp, Homo sapien
gagcctgtaaccttcatagaaaggg

SEQ ID NO: 466079 - DNA, 25 bp, Homo sapien
tcatcatgaaagcagatatagagcc

SEQ ID NO: 466080 - DNA, 25 bp, Homo sapien
gaaagcagatatagagcctgtaacc

SEQ ID NO: 466081 - DNA, 25 bp, Homo sapien
tagacaaatgtcatcatgaaagcag

SEQ ID NO: 466082 - DNA, 25 bp, Homo sapien
gacaggttcaacttggtgcagggtt

SEQ ID NO: 466083 - DNA, 25 bp, Homo sapien
tagacagactgctacgctgctcttc

SEQ ID NO: 466084 - DNA, 25 bp, Homo sapien
ggatgacacgatccctgggttcagc

SEQ ID NO: 466085 - DNA, 25 bp, Homo sapien
gttcaccatctcaaagggatcggag

SEQ ID NO: 466086 - DNA, 25 bp, Homo sapien
tgcagccatggtgccaattaggaga

SEQ ID NO: 466087 - DNA, 25 bp, Homo sapien
gacatatcgtctaactggcgccaga

SEQ ID NO: 466088 - DNA, 25 bp, Homo sapien
gatggctgctcctctctaggcagtg

SEQ ID NO: 466089 - DNA, 25 bp, Homo sapien
gcatctagatccagcccttgaacct

SEQ ID NO: 466090 - DNA, 25 bp, Homo sapien
cagtagtgctcttgtacatttccct

SEQ ID NO: 466091 - DNA, 25 bp, Homo sapien
tcacaaaatgtatagttgtctcttc

SEQ ID NO: 466092 - DNA, 25 bp, Homo sapien
gctggacttcttcagtagtgctctt

SEQ ID NO: 466093 - DNA, 25 bp, Homo sapien
tgtacatttcccttcagcatcacaa

SEQ ID NO: 466094 - DNA, 25 bp, Homo sapien
tctcgcaatgaaaccatctgcagcc

SEQ ID NO: 466095 - DNA, 25 bp, Homo sapien
ggcacattcttctctcgcaatgaaa

SEQ ID NO: 466096 - DNA, 25 bp, Homo sapien
acattcttctctcgcaatgaaacca

SEQ ID NO: 466097 - DNA, 25 bp, Homo sapien
tcttctctcgcaatgaaaccatctg

SEQ ID NO: 466098 - DNA, 25 bp, Homo sapien
gatatacttatgttaatgacggtca

SEQ ID NO: 466099 - DNA, 25 bp, Homo sapien
ttcaaggtcgcatcataaatttcca

SEQ ID NO: 466100 - DNA, 25 bp, Homo sapien
aacatcttcaaggtcgcatcataaa

SEQ ID NO: 466101 - DNA, 25 bp, Homo sapien
tttccacatgtgatacagatatact

SEQ ID NO: 466102 - DNA, 25 bp, Homo sapien
ttagtattgtgtcccaacacagctc

SEQ ID NO: 466103 - DNA, 25 bp, Homo sapien
gtactcaaggctcttattaaaactc

SEQ ID NO: 466104 - DNA, 25 bp, Homo sapien
caatctgggcaaatgagtactcaag

SEQ ID NO: 466105 - DNA, 25 bp, Homo sapien
ctcttagtattgtgtcccaacacag

SEQ ID NO: 466106 - DNA, 25 bp, Homo sapien
caaaggtggtgtgcttaatctaacc

SEQ ID NO: 466107 - DNA, 25 bp, Homo sapien
ttcaaatgctggcacacagcatcag

SEQ ID NO: 466108 - DNA, 25 bp, Homo sapien
tctaacctgaactgaagtagaatgt

SEQ ID NO: 466109 - DNA, 25 bp, Homo sapien
taactagaattccatttcgtggtcc

SEQ ID NO: 466110 - DNA, 25 bp, Homo sapien
ttttttctttttagctgctctacac

SEQ ID NO: 466111 - DNA, 25 bp, Homo sapien
tctttttagctgctctacacttcat

SEQ ID NO: 466112 - DNA, 25 bp, Homo sapien
tttttctttttagctgctctacact

SEQ ID NO: 466113 - DNA, 25 bp, Homo sapien
tttctttttagctgctctacacttc

SEQ ID NO: 466114 - DNA, 25 bp, Homo sapien
tctgagtatgtaaatacgtaagccc

SEQ ID NO: 466115 - DNA, 25 bp, Homo sapien
gaatttccttcaaatagaatggcgc

SEQ ID NO: 466116 - DNA, 25 bp, Homo sapien
gaatggcgcagtttcagatgttctc

SEQ ID NO: 466117 - DNA, 25 bp, Homo sapien
tcactagttcatccagaaagagaat

SEQ ID NO: 466118 - DNA, 25 bp, Homo sapien
tacattagggctgccatcatttcca

SEQ ID NO: 466119 - DNA, 25 bp, Homo sapien
ttacattagggctgccatcatttcc

SEQ ID NO: 466120 - DNA, 25 bp, Homo sapien
ttagggctgccatcatttccatgtt

SEQ ID NO: 466121 - DNA, 25 bp, Homo sapien
gggctgccatcatttccatgtttac

SEQ ID NO: 466122 - DNA, 25 bp, Homo sapien
taaaccgaaatcatattgtattaac

SEQ ID NO: 466123 - DNA, 25 bp, Homo sapien
tttaaaccgaaatcatattgtatta

SEQ ID NO: 466124 - DNA, 25 bp, Homo sapien
aaaccgaaatcatattgtattaaca

SEQ ID NO: 466125 - DNA, 25 bp, Homo sapien
aaccgaaatcatattgtattaacag

SEQ ID NO: 466126 - DNA, 25 bp, Homo sapien
taatcctacccatatgcttcacaac

SEQ ID NO: 466127 - DNA, 25 bp, Homo sapien
tctttcagtaatcctacccatatgc

SEQ ID NO: 466128 - DNA, 25 bp, Homo sapien
agtaatcctacccatatgcttcaca

SEQ ID NO: 466129 - DNA, 25 bp, Homo sapien
tcagtaatcctacccatatgcttca

SEQ ID NO: 466130 - DNA, 25 bp, Homo sapien
gccttcgcagaagtaaagcttccag

SEQ ID NO: 466131 - DNA, 25 bp, Homo sapien
ccttcgcagaagtaaagcttccagt

SEQ ID NO: 466132 - DNA, 25 bp, Homo sapien
gcagaagtaaagcttccagtttatc

SEQ ID NO: 466133 - DNA, 25 bp, Homo sapien
ttcgcagaagtaaagcttccagttt

SEQ ID NO: 466134 - DNA, 25 bp, Homo sapien
ggatattttcctggtggtgcttgtg

SEQ ID NO: 466135 - DNA, 25 bp, Homo sapien
taataacgtgtgatacaaagggata

SEQ ID NO: 466136 - DNA, 25 bp, Homo sapien
tgcttgtgatgttaacgttaatgat

SEQ ID NO: 466137 - DNA, 25 bp, Homo sapien
tcatttgaataataacgtgtgatac

SEQ ID NO: 466138 - DNA, 25 bp, Homo sapien
actgaatagtattgctagacttacg

SEQ ID NO: 466139 - DNA, 25 bp, Homo sapien
ggaaactgaatagtattgctagact

SEQ ID NO: 466140 - DNA, 25 bp, Homo sapien
gaatagtattgctagacttacgatt

SEQ ID NO: 466141 - DNA, 25 bp, Homo sapien
aatggaaactgaatagtattgctag

SEQ ID NO: 466142 - DNA, 25 bp, Homo sapien
ttttcttccgttttatcattgattc

SEQ ID NO: 466143 - DNA, 25 bp, Homo sapien
tctttttcttccgttttatcattga

SEQ ID NO: 466144 - DNA, 25 bp, Homo sapien
tcatctttttcttccgttttatcat

SEQ ID NO: 466145 - DNA, 25 bp, Homo sapien
tcttccgttttatcattgattctgt

SEQ ID NO: 466146 - DNA, 25 bp, Homo sapien
tgacaggccccagttagttttgttc

SEQ ID NO: 466147 - DNA, 25 bp, Homo sapien
tcagcttctgcttataagttagaac

SEQ ID NO: 466148 - DNA, 25 bp, Homo sapien
ctgacaggccccagttagttttgtt

SEQ ID NO: 466149 - DNA, 25 bp, Homo sapien
ttcagcttctgcttataagttagaa

SEQ ID NO: 466150 - DNA, 25 bp, Homo sapien
ctttcactccattagtgactgccag

SEQ ID NO: 466151 - DNA, 25 bp, Homo sapien
tcactccattagtgactgccagatt

SEQ ID NO: 466152 - DNA, 25 bp, Homo sapien
ctccattagtgactgccagattcat

SEQ ID NO: 466153 - DNA, 25 bp, Homo sapien
actccattagtgactgccagattca

SEQ ID NO: 466154 - DNA, 25 bp, Homo sapien
caatttttgataacagaaggtcttt

SEQ ID NO: 466155 - DNA, 25 bp, Homo sapien
gctaacagcttggatttagcatcaa

SEQ ID NO: 466156 - DNA, 25 bp, Homo sapien
tcagcacactcagtgtggtgcagta

SEQ ID NO: 466157 - DNA, 25 bp, Homo sapien
cagtgtggtgcagtacaatggcaac

SEQ ID NO: 466158 - DNA, 25 bp, Homo sapien
catgtagggcttggcagctttctcc

SEQ ID NO: 466159 - DNA, 25 bp, Homo sapien
cagctttctcctttcctgggttaag

SEQ ID NO: 466160 - DNA, 25 bp, Homo sapien
ttagggtagttctcatgtagggctt

SEQ ID NO: 466161 - DNA, 25 bp, Homo sapien
tagttctcatgtagggcttggcagc

SEQ ID NO: 466162 - DNA, 25 bp, Homo sapien
ctccttcacatctgggaggtatttt

SEQ ID NO: 466163 - DNA, 25 bp, Homo sapien
cttcacatctgggaggtattttgcc

SEQ ID NO: 466164 - DNA, 25 bp, Homo sapien
cacatctgggaggtattttgccatc

SEQ ID NO: 466165 - DNA, 25 bp, Homo sapien
catctgggaggtattttgccatctt

SEQ ID NO: 466166 - DNA, 25 bp, Homo sapien
ttacagaataattaactcctagtaa

SEQ ID NO: 466167 - DNA, 25 bp, Homo sapien
cagaataattaactcctagtaaaat

SEQ ID NO: 466168 - DNA, 25 bp, Homo sapien
tttacagaataattaactcctagta

SEQ ID NO: 466169 - DNA, 25 bp, Homo sapien
tacagaataattaactcctagtaaa

SEQ ID NO: 466170 - DNA, 25 bp, Homo sapien
taattgtcaaactcaccaaggttga

SEQ ID NO: 466171 - DNA, 25 bp, Homo sapien
caaggttgaaatgaaggaaaaaatg

SEQ ID NO: 466172 - DNA, 25 bp, Homo sapien
tcagcagaaactatacaagccagag

SEQ ID NO: 466173 - DNA, 25 bp, Homo sapien
gaccattgatgctaggaagaaactg

SEQ ID NO: 466174 - DNA, 25 bp, Homo sapien
cacagaactatagataaaggacacg

SEQ ID NO: 466175 - DNA, 25 bp, Homo sapien
tattataagcacaatacaattctgg

SEQ ID NO: 466176 - DNA, 25 bp, Homo sapien
aaatccagcaaccttataattgtta

SEQ ID NO: 466177 - DNA, 25 bp, Homo sapien
taaagcatgcttttgttaatatagc

SEQ ID NO: 466178 - DNA, 25 bp, Homo sapien
atatagtaatattttccgtagagga

SEQ ID NO: 466179 - DNA, 25 bp, Homo sapien
ggtattctatatacctagaactata

SEQ ID NO: 466180 - DNA, 25 bp, Homo sapien
ttttccgtagaggatataatcaaat

SEQ ID NO: 466181 - DNA, 25 bp, Homo sapien
tgttcttcgaggctcaattagcctt

SEQ ID NO: 466182 - DNA, 25 bp, Homo sapien
gttgcgggctacacccacactaaga

SEQ ID NO: 466183 - DNA, 25 bp, Homo sapien
ttagaggtgccagttgcgggctaca

SEQ ID NO: 466184 - DNA, 25 bp, Homo sapien
taagattagccaaagtggccactga

SEQ ID NO: 466185 - DNA, 25 bp, Homo sapien
cgggctacacccacactaagattag

SEQ ID NO: 466186 - DNA, 25 bp, Homo sapien
cgtgtttgtttattaacttatggag

SEQ ID NO: 466187 - DNA, 25 bp, Homo sapien
gctgctcccgtgactttgtagacca

SEQ ID NO: 466188 - DNA, 25 bp, Homo sapien
tgtttattaacttatggagccagac

SEQ ID NO: 466189 - DNA, 25 bp, Homo sapien
tggagccagacatctgctgctcccg

SEQ ID NO: 466190 - DNA, 25 bp, Homo sapien
ttcttcgccttgtactcagactcaa

SEQ ID NO: 466191 - DNA, 25 bp, Homo sapien
aaacctattcttcgccttgtactca

SEQ ID NO: 466192 - DNA, 25 bp, Homo sapien
tgtgttaaacctattcttcgccttg

SEQ ID NO: 466193 - DNA, 25 bp, Homo sapien
cctctacctgtgttaaacctattct

SEQ ID NO: 466194 - DNA, 25 bp, Homo sapien
gtcctagctgcttgggaagttgaga

SEQ ID NO: 466195 - DNA, 25 bp, Homo sapien
tagctgcttgggaagttgagatggg

SEQ ID NO: 466196 - DNA, 25 bp, Homo sapien
ctatagtcctagctgcttgggaagt

SEQ ID NO: 466197 - DNA, 25 bp, Homo sapien
atagtcctagctgcttgggaagttg

SEQ ID NO: 466198 - DNA, 25 bp, Homo sapien
accactgcagcgtacgttcattagc

SEQ ID NO: 466199 - DNA, 25 bp, Homo sapien
ccaggattgctctcaattagtcatt

SEQ ID NO: 466200 - DNA, 25 bp, Homo sapien
ttgagttcctcaataacctctcgtg

SEQ ID NO: 466201 - DNA, 25 bp, Homo sapien
atagaatggtctatgttgagttcct

SEQ ID NO: 466202 - DNA, 25 bp, Homo sapien
gggctgaagaagattcagtaggttt

SEQ ID NO: 466203 - DNA, 25 bp, Homo sapien
tttaagtcgaatgggaacggcctca

SEQ ID NO: 466204 - DNA, 25 bp, Homo sapien
cattgtatttgtcatgtgatgtagg

SEQ ID NO: 466205 - DNA, 25 bp, Homo sapien
tcagtaggtttaagtcgaatgggaa

SEQ ID NO: 466206 - DNA, 25 bp, Homo sapien
aacactgatgattcaagaaacgcca

SEQ ID NO: 466207 - DNA, 25 bp, Homo sapien
cctaaggaaggcatacatacagtca

SEQ ID NO: 466208 - DNA, 25 bp, Homo sapien
cctggtatgccttataatatttacg

SEQ ID NO: 466209 - DNA, 25 bp, Homo sapien
caaaatctagataatctgctgatga

SEQ ID NO: 466210 - DNA, 25 bp, Homo sapien
tcatatcttccattgatccagatgg

SEQ ID NO: 466211 - DNA, 25 bp, Homo sapien
catatcttccattgatccagatggt

SEQ ID NO: 466212 - DNA, 25 bp, Homo sapien
atatcttccattgatccagatggtc

SEQ ID NO: 466213 - DNA, 25 bp, Homo sapien
tctgtatctagatcatacatgtatg

SEQ ID NO: 466214 - DNA, 25 bp, Homo sapien
gtatctagatcatacatgtatgtgc

SEQ ID NO: 466215 - DNA, 25 bp, Homo sapien
tctcccttgtaaaacatgggttctg

SEQ ID NO: 466216 - DNA, 25 bp, Homo sapien
taaaacatgggttctgtatctagat

SEQ ID NO: 466217 - DNA, 25 bp, Homo sapien
attactggaacgcgggaggtggtgg

SEQ ID NO: 466218 - DNA, 25 bp, Homo sapien
aggtggtggctatagtgagctgaaa

SEQ ID NO: 466219 - DNA, 25 bp, Homo sapien
aattactggaacgcgggaggtggtg

SEQ ID NO: 466220 - DNA, 25 bp, Homo sapien
gaggtggtggctatagtgagctgaa

SEQ ID NO: 466221 - DNA, 25 bp, Homo sapien
tgccaggaaaccagtgtcccagtct

SEQ ID NO: 466222 - DNA, 25 bp, Homo sapien
caggaccaatggagctttgctaagg

SEQ ID NO: 466223 - DNA, 25 bp, Homo sapien
tgtccctacaccagcattgttgagt

SEQ ID NO: 466224 - DNA, 25 bp, Homo sapien
tgtgctgctatgaccccatgggttg

SEQ ID NO: 466225 - DNA, 25 bp, Homo sapien
tctaagcttctggtaactgccggcg

SEQ ID NO: 466226 - DNA, 25 bp, Homo sapien
caacatgttgacaggccaggacttg

SEQ ID NO: 466227 - DNA, 25 bp, Homo sapien
gaggttcttcgcttgtacatctgtc

SEQ ID NO: 466228 - DNA, 25 bp, Homo sapien
gatgatgatccttccctaactctaa

SEQ ID NO: 466229 - DNA, 25 bp, Homo sapien
aaagtgagcttgttagtttgctcag

SEQ ID NO: 466230 - DNA, 25 bp, Homo sapien
gttctccactgaggagttgtgttat

SEQ ID NO: 466231 - DNA, 25 bp, Homo sapien
tgttatgggaccaaaagattgttct

SEQ ID NO: 466232 - DNA, 25 bp, Homo sapien
tataagcctgtagacattatattag

SEQ ID NO: 466233 - DNA, 25 bp, Homo sapien
tcaatttacgaatgacaagtgtcca

SEQ ID NO: 466234 - DNA, 25 bp, Homo sapien
acaagccttgtctgatgtcccaaag

SEQ ID NO: 466235 - DNA, 25 bp, Homo sapien
cacatttccagttgatgattttgcc

SEQ ID NO: 466236 - DNA, 25 bp, Homo sapien
caagtgtccagttagtttagtgaaa

SEQ ID NO: 466237 - DNA, 25 bp, Homo sapien
ctggcctttcttccaccactaagtg

SEQ ID NO: 466238 - DNA, 25 bp, Homo sapien
tccaccactaagtgcaccaagatac

SEQ ID NO: 466239 - DNA, 25 bp, Homo sapien
tactggcctttcttccaccactaag

SEQ ID NO: 466240 - DNA, 25 bp, Homo sapien
caccactaagtgcaccaagatactg

SEQ ID NO: 466241 - DNA, 25 bp, Homo sapien
ttgttgaaggtatcaatgagaagga

SEQ ID NO: 466242 - DNA, 25 bp, Homo sapien
gtagattggctttcattggagttgc

SEQ ID NO: 466243 - DNA, 25 bp, Homo sapien
gctctcttggtagattggctttcat

SEQ ID NO: 466244 - DNA, 25 bp, Homo sapien
tttgcaagctctcttggtagattgg

SEQ ID NO: 466245 - DNA, 25 bp, Homo sapien
gaagtgagagcacatccttggctat

SEQ ID NO: 466246 - DNA, 25 bp, Homo sapien
tttttgacaaattccctgaggcatg

SEQ ID NO: 466247 - DNA, 25 bp, Homo sapien
caactgttatccaccatctaggcag

SEQ ID NO: 466248 - DNA, 25 bp, Homo sapien
taaattttgacactcagccagacag

SEQ ID NO: 466249 - DNA, 25 bp, Homo sapien
tttcatctatagaaactcttttcat

SEQ ID NO: 466250 - DNA, 25 bp, Homo sapien
attttcatctatagaaactcttttc

SEQ ID NO: 466251 - DNA, 25 bp, Homo sapien
ttttcatctatagaaactcttttca

SEQ ID NO: 466252 - DNA, 25 bp, Homo sapien
ctggtctttctcattaatctggtac

SEQ ID NO: 466253 - DNA, 25 bp, Homo sapien
cattaatctggtactctccaatttg

SEQ ID NO: 466254 - DNA, 25 bp, Homo sapien
ctctccaatttgttgttgattgact

SEQ ID NO: 466255 - DNA, 25 bp, Homo sapien
ttgattgactcaaacacattttcat

SEQ ID NO: 466256 - DNA, 25 bp, Homo sapien
gctcttatcaactattcctctatca

SEQ ID NO: 466257 - DNA, 25 bp, Homo sapien
ttccaaagacgtcaggaattgaggc

SEQ ID NO: 466258 - DNA, 25 bp, Homo sapien
ctgctgcctgtgaattcacttcact

SEQ ID NO: 466259 - DNA, 25 bp, Homo sapien
tctatcatatttacacacagattcc

SEQ ID NO: 466260 - DNA, 25 bp, Homo sapien
agctttggtgagataaagctcatgc

SEQ ID NO: 466261 - DNA, 25 bp, Homo sapien
ggtgagataaagctcatgctctgtg

SEQ ID NO: 466262 - DNA, 25 bp, Homo sapien
gatcttggggaactgagtcattttg

SEQ ID NO: 466263 - DNA, 25 bp, Homo sapien
ttgatggcatttgcggcaggcaagc

SEQ ID NO: 466264 - DNA, 25 bp, Homo sapien
cacctgctgtagtacctcatcatgc

SEQ ID NO: 466265 - DNA, 25 bp, Homo sapien
gctgtagtacctcatcatgcttttg

SEQ ID NO: 466266 - DNA, 25 bp, Homo sapien
cctcatcatgcttttggagcgtttc

SEQ ID NO: 466267 - DNA, 25 bp, Homo sapien
agagccacctgctgtagtacctcat

SEQ ID NO: 466268 - DNA, 25 bp, Homo sapien
atttgtctttttcttcatgttccat

SEQ ID NO: 466269 - DNA, 25 bp, Homo sapien
tgatttgtctttttcttcatgttcc

SEQ ID NO: 466270 - DNA, 25 bp, Homo sapien
actgatttgtctttttcttcatgtt

SEQ ID NO: 466271 - DNA, 25 bp, Homo sapien
cttgttctactgatttgtctttttc

SEQ ID NO: 466272 - DNA, 25 bp, Homo sapien
gctgcttgatgctatctgggaggac

SEQ ID NO: 466273 - DNA, 25 bp, Homo sapien
tatgacaagtgagcggtctggcatc

SEQ ID NO: 466274 - DNA, 25 bp, Homo sapien
ggcaacagcgtgatttgagctctac

SEQ ID NO: 466275 - DNA, 25 bp, Homo sapien
gctgtcacagcgaagtctcatcatg

SEQ ID NO: 466276 - DNA, 25 bp, Homo sapien
caatcttcagctctgataaaggcat

SEQ ID NO: 466277 - DNA, 25 bp, Homo sapien
gttcaatcttcagctctgataaagg

SEQ ID NO: 466278 - DNA, 25 bp, Homo sapien
tcaatcttcagctctgataaaggca

SEQ ID NO: 466279 - DNA, 25 bp, Homo sapien
aagttcaatcttcagctctgataaa

SEQ ID NO: 466280 - DNA, 25 bp, Homo sapien
tttcatattggtaatgaacatagtg

SEQ ID NO: 466281 - DNA, 25 bp, Homo sapien
ttcatattggtaatgaacatagtgt

SEQ ID NO: 466282 - DNA, 25 bp, Homo sapien
atttcatattggtaatgaacatagt

SEQ ID NO: 466283 - DNA, 25 bp, Homo sapien
ctttgacccctgaaactggattgct

SEQ ID NO: 466284 - DNA, 25 bp, Homo sapien
ccgagcatctgctttgtgttaaagc

SEQ ID NO: 466285 - DNA, 25 bp, Homo sapien
gcatctgctttgtgttaaagcccat

SEQ ID NO: 466286 - DNA, 25 bp, Homo sapien
ccctgtttccgagcatctgctttgt

SEQ ID NO: 466287 - DNA, 25 bp, Homo sapien
gagcatctgctttgtgttaaagccc

SEQ ID NO: 466288 - DNA, 25 bp, Homo sapien
cagatataaggtttttttgacatgt

SEQ ID NO: 466289 - DNA, 25 bp, Homo sapien
gacatgtttgttgaagacttggcat

SEQ ID NO: 466290 - DNA, 25 bp, Homo sapien
tgtttttcttatcagatataaggtt

SEQ ID NO: 466291 - DNA, 25 bp, Homo sapien
ttttttgacatgtttgttgaagact

SEQ ID NO: 466292 - DNA, 25 bp, Homo sapien
gtttaggcacttcttgctatctagg

SEQ ID NO: 466293 - DNA, 25 bp, Homo sapien
taggcacttcttgctatctaggtgg

SEQ ID NO: 466294 - DNA, 25 bp, Homo sapien
tctgagtttaggcacttcttgctat

SEQ ID NO: 466295 - DNA, 25 bp, Homo sapien
cacttcttgctatctaggtggttca

SEQ ID NO: 466296 - DNA, 25 bp, Homo sapien
tctcatatgacagtcccaagtggaa

SEQ ID NO: 466297 - DNA, 25 bp, Homo sapien
caaatccttgtgagttagcatcata

SEQ ID NO: 466298 - DNA, 25 bp, Homo sapien
taattgcagttatattggtaggtgc

SEQ ID NO: 466299 - DNA, 25 bp, Homo sapien
ttggtaggtgctgaaagttctgtat

SEQ ID NO: 466300 - DNA, 25 bp, Homo sapien
tcagtcatctgattcagtgaaatct

SEQ ID NO: 466301 - DNA, 25 bp, Homo sapien
gtcatctgattcagtgaaatctgta

SEQ ID NO: 466302 - DNA, 25 bp, Homo sapien
cagtcatctgattcagtgaaatctg

SEQ ID NO: 466303 - DNA, 25 bp, Homo sapien
catctgattcagtgaaatctgtaga

SEQ ID NO: 466304 - DNA, 25 bp, Homo sapien
agtgaaatgcgctgccaaagagctt

SEQ ID NO: 466305 - DNA, 25 bp, Homo sapien
ctacagtgaaatgcgctgccaaaga

SEQ ID NO: 466306 - DNA, 25 bp, Homo sapien
tcaggaattttacagaagctttctt

SEQ ID NO: 466307 - DNA, 25 bp, Homo sapien
cagtgaaatgcgctgccaaagagct

SEQ ID NO: 466308 - DNA, 25 bp, Homo sapien
gattgagtcctgagtcgggccacag

SEQ ID NO: 466309 - DNA, 25 bp, Homo sapien
aaattcaggatcaagaatgattgag

SEQ ID NO: 466310 - DNA, 25 bp, Homo sapien
ttgagtcctgagtcgggccacagac

SEQ ID NO: 466311 - DNA, 25 bp, Homo sapien
tcaggatcaagaatgattgagtcct

SEQ ID NO: 466312 - DNA, 25 bp, Homo sapien
tattaccacatgaatgttacttgca

SEQ ID NO: 466313 - DNA, 25 bp, Homo sapien
ccacatgaatgttacttgcatcttt

SEQ ID NO: 466314 - DNA, 25 bp, Homo sapien
gtcctttacttctctcctaatcaat

SEQ ID NO: 466315 - DNA, 25 bp, Homo sapien
cctttacttctctcctaatcaatgt

SEQ ID NO: 466316 - DNA, 25 bp, Homo sapien
cagagtactgaacattgccctgcat

SEQ ID NO: 466317 - DNA, 25 bp, Homo sapien
tgtcaatgggttattgaaagcccct

SEQ ID NO: 466318 - DNA, 25 bp, Homo sapien
gcttttctctcgttgtgtgtaccta

SEQ ID NO: 466319 - DNA, 25 bp, Homo sapien
gccccttggtaatgatttccattgg

SEQ ID NO: 466320 - DNA, 25 bp, Homo sapien
agacccccttggagcacatattgcc

SEQ ID NO: 466321 - DNA, 25 bp, Homo sapien
tatggatagatccagtgcctgagag

SEQ ID NO: 466322 - DNA, 25 bp, Homo sapien
gcacatattgcctatggatagatcc

SEQ ID NO: 466323 - DNA, 25 bp, Homo sapien
tattgcctatggatagatccagtgc

SEQ ID NO: 466324 - DNA, 25 bp, Homo sapien
tactcttacttaactcattctgtga

SEQ ID NO: 466325 - DNA, 25 bp, Homo sapien
acagatgtacaaaaaagatctggta

SEQ ID NO: 466326 - DNA, 25 bp, Homo sapien
atgtacaaaaaagatctggtaccaa

SEQ ID NO: 466327 - DNA, 25 bp, Homo sapien
ggaggaagtactcttacttaactca

SEQ ID NO: 466328 - DNA, 25 bp, Homo sapien
caagtttcatatacagtttatccat

SEQ ID NO: 466329 - DNA, 25 bp, Homo sapien
catatgctgttgtaagtaccaggga

SEQ ID NO: 466330 - DNA, 25 bp, Homo sapien
tggagaccagagatcaataactatt

SEQ ID NO: 466331 - DNA, 25 bp, Homo sapien
tttattgatgggacaaagcccacag

SEQ ID NO: 466332 - DNA, 25 bp, Homo sapien
gggacagggcattaagaaaagagac

SEQ ID NO: 466333 - DNA, 25 bp, Homo sapien
tcctgtttagtccccatgtgtcctg

SEQ ID NO: 466334 - DNA, 25 bp, Homo sapien
tcttctacatctagttttctgctat

SEQ ID NO: 466335 - DNA, 25 bp, Homo sapien
catctagttttctgctatctgatct

SEQ ID NO: 466336 - DNA, 25 bp, Homo sapien
taaaatgcttattagcaaactttct

SEQ ID NO: 466337 - DNA, 25 bp, Homo sapien
ctacatctagttttctgctatctga

SEQ ID NO: 466338 - DNA, 25 bp, Homo sapien
caatttagcaatagtgcttcctgga

SEQ ID NO: 466339 - DNA, 25 bp, Homo sapien
taccagctggcatctaggactggct

SEQ ID NO: 466340 - DNA, 25 bp, Homo sapien
taggactggcttaaatttcaggtaa

SEQ ID NO: 466341 - DNA, 25 bp, Homo sapien
tgtcctctgtcagtaccaattccag

SEQ ID NO: 466342 - DNA, 25 bp, Homo sapien
ctatataggcaaggtactcggtaca

SEQ ID NO: 466343 - DNA, 25 bp, Homo sapien
cagtatcaggaaaaggatatgcact

SEQ ID NO: 466344 - DNA, 25 bp, Homo sapien
tgaaatgtgtcctgacagctaaggc

SEQ ID NO: 466345 - DNA, 25 bp, Homo sapien
cagctaaggcacagacgtattcttc

SEQ ID NO: 466346 - DNA, 25 bp, Homo sapien
ggacacccatcgcaggggtggtcag

SEQ ID NO: 466347 - DNA, 25 bp, Homo sapien
aattcaccaatacacaatcagtaaa

SEQ ID NO: 466348 - DNA, 25 bp, Homo sapien
gagagccagcaccaattcaccaata

SEQ ID NO: 466349 - DNA, 25 bp, Homo sapien
acacccatcgcaggggtggtcaggc

SEQ ID NO: 466350 - DNA, 25 bp, Homo sapien
ggtcggtggcctatgtctctaaaca

SEQ ID NO: 466351 - DNA, 25 bp, Homo sapien
gcaactcccctgctagtgaggcggg

SEQ ID NO: 466352 - DNA, 25 bp, Homo sapien
tggaagggggatcctaacaacagca

SEQ ID NO: 466353 - DNA, 25 bp, Homo sapien
atgaggtcggtggcctatgtctcta

SEQ ID NO: 466354 - DNA, 25 bp, Homo sapien
gggtccgaaggcacccaggaacaga

SEQ ID NO: 466355 - DNA, 25 bp, Homo sapien
ccgaaggcacccaggaacagaaaga

SEQ ID NO: 466356 - DNA, 25 bp, Homo sapien
gacaggggtccgaaggcacccagga

SEQ ID NO: 466357 - DNA, 25 bp, Homo sapien
cgacaggggtccgaaggcacccagg

SEQ ID NO: 466358 - DNA, 25 bp, Homo sapien
gtgggtgatgcaacccccgtgacga

SEQ ID NO: 466359 - DNA, 25 bp, Homo sapien
ttggaacctccatcgcagggtgggt

SEQ ID NO: 466360 - DNA, 25 bp, Homo sapien
cttaggaccaccatcgcagaaggcg

SEQ ID NO: 466361 - DNA, 25 bp, Homo sapien
agaaggcggaggtaccacccacgag

SEQ ID NO: 466362 - DNA, 25 bp, Homo sapien
cctggctcttgggacccccatcgca

SEQ ID NO: 466363 - DNA, 25 bp, Homo sapien
aggaacccccgcgaggcagggactg

SEQ ID NO: 466364 - DNA, 25 bp, Homo sapien
cccctggctcttgggacccccatcg

SEQ ID NO: 466365 - DNA, 25 bp, Homo sapien
tggctcttgggacccccatcgcagg

SEQ ID NO: 466366 - DNA, 25 bp, Homo sapien
ttggaatctactatagcctaagagc

SEQ ID NO: 466367 - DNA, 25 bp, Homo sapien
actatagcctaagagccgaaggcag

SEQ ID NO: 466368 - DNA, 25 bp, Homo sapien
tctactatagcctaagagccgaagg

SEQ ID NO: 466369 - DNA, 25 bp, Homo sapien
ggttatttggaatctactatagcct

SEQ ID NO: 466370 - DNA, 25 bp, Homo sapien
tttactatccgacaggtgtcagaac

SEQ ID NO: 466371 - DNA, 25 bp, Homo sapien
tatccgacaggtgtcagaacgcagc

SEQ ID NO: 466372 - DNA, 25 bp, Homo sapien
ccgacaggtgtcagaacgcagcccg

SEQ ID NO: 466373 - DNA, 25 bp, Homo sapien
tactatccgacaggtgtcagaacgc

SEQ ID NO: 466374 - DNA, 25 bp, Homo sapien
tgacacttgggaccgccatcgcagg

SEQ ID NO: 466375 - DNA, 25 bp, Homo sapien
gaggcacccatcgagaggcgagtac

SEQ ID NO: 466376 - DNA, 25 bp, Homo sapien
cgagccgaggagtgacagccacccc

SEQ ID NO: 466377 - DNA, 25 bp, Homo sapien
catcgagaggcgagtacagagagcc

SEQ ID NO: 466378 - DNA, 25 bp, Homo sapien
gagccagcccctcttcctcagctgg

SEQ ID NO: 466379 - DNA, 25 bp, Homo sapien
aaaaaaggcgggaactgagagccag

SEQ ID NO: 466380 - DNA, 25 bp, Homo sapien
aaaggcgggaactgagagccagccc

SEQ ID NO: 466381 - DNA, 25 bp, Homo sapien
gccagcccctcttcctcagctggct

SEQ ID NO: 466382 - DNA, 25 bp, Homo sapien
gcatcctggaagcaggtcatttgta

SEQ ID NO: 466383 - DNA, 25 bp, Homo sapien
agttgtgcagctgggcgtctaaaac

SEQ ID NO: 466384 - DNA, 25 bp, Homo sapien
tttccgcatcctggaagcaggtcat

SEQ ID NO: 466385 - DNA, 25 bp, Homo sapien
tccgcatcctggaagcaggtcattt

SEQ ID NO: 466386 - DNA, 25 bp, Homo sapien
ccttatactgcccacgtgatgatga

SEQ ID NO: 466387 - DNA, 25 bp, Homo sapien
aggccttatactgcccacgtgatga

SEQ ID NO: 466388 - DNA, 25 bp, Homo sapien
agaaggccttatactgcccacgtga

SEQ ID NO: 466389 - DNA, 25 bp, Homo sapien
gcccacgtgatgatgaaacactcag

SEQ ID NO: 466390 - DNA, 25 bp, Homo sapien
acagataagaagatacggagattgg

SEQ ID NO: 466391 - DNA, 25 bp, Homo sapien
gatacggagattggacggtgctgct

SEQ ID NO: 466392 - DNA, 25 bp, Homo sapien
taagaagatacggagattggacggt

SEQ ID NO: 466393 - DNA, 25 bp, Homo sapien
ggagattggacggtgctgctgtgcg

SEQ ID NO: 466394 - DNA, 25 bp, Homo sapien
tagtcattacacaatcccaggctgt

SEQ ID NO: 466395 - DNA, 25 bp, Homo sapien
cattaggcagttgatggtaacacat

SEQ ID NO: 466396 - DNA, 25 bp, Homo sapien
taatcaacataccacagtggctgaa

SEQ ID NO: 466397 - DNA, 25 bp, Homo sapien
aaagcaaagggacatcaagacaata

SEQ ID NO: 466398 - DNA, 25 bp, Homo sapien
cacacagttgatttagacaggagaa

SEQ ID NO: 466399 - DNA, 25 bp, Homo sapien
gagtttgtgtcaatctatatccata

SEQ ID NO: 466400 - DNA, 25 bp, Homo sapien
taatacaaaagactggtacactttg

SEQ ID NO: 466401 - DNA, 25 bp, Homo sapien
tagaaaccacacagttgatttagac

SEQ ID NO: 466402 - DNA, 25 bp, Homo sapien
ttattgtcctttatccaccactgag

SEQ ID NO: 466403 - DNA, 25 bp, Homo sapien
ttgtcctttatccaccactgagctc

SEQ ID NO: 466404 - DNA, 25 bp, Homo sapien
tgagctctcatctttaccacttaat

SEQ ID NO: 466405 - DNA, 25 bp, Homo sapien
tttatccaccactgagctctcatct

SEQ ID NO: 466406 - DNA, 25 bp, Homo sapien
ggaatgcttcaaagatgtgtgtgtc

SEQ ID NO: 466407 - DNA, 25 bp, Homo sapien
tgcttcaaagatgtgtgtgtcatct

SEQ ID NO: 466408 - DNA, 25 bp, Homo sapien
gggccatgctagttttctctctatt

SEQ ID NO: 466409 - DNA, 25 bp, Homo sapien
atggaatgcttcaaagatgtgtgtg

SEQ ID NO: 466410 - DNA, 25 bp, Homo sapien
taaagcatctgctgaccattaggct

SEQ ID NO: 466411 - DNA, 25 bp, Homo sapien
tcgactagagctgataagacagcca

SEQ ID NO: 466412 - DNA, 25 bp, Homo sapien
caagattatcgctgatgaagacctg

SEQ ID NO: 466413 - DNA, 25 bp, Homo sapien
gggatgtactaatgcaacaggcaaa

SEQ ID NO: 466414 - DNA, 25 bp, Homo sapien
ggccataggatccacggtgtcatct

SEQ ID NO: 466415 - DNA, 25 bp, Homo sapien
tatgactgtgttaatgatcataaca

SEQ ID NO: 466416 - DNA, 25 bp, Homo sapien
ccataggatccacggtgtcatctga

SEQ ID NO: 466417 - DNA, 25 bp, Homo sapien
taggatccacggtgtcatctgactg

SEQ ID NO: 466418 - DNA, 25 bp, Homo sapien
tccaatctccgtgtcttcttaactg

SEQ ID NO: 466419 - DNA, 25 bp, Homo sapien
aatctccgtgtcttcttaactgttc

SEQ ID NO: 466420 - DNA, 25 bp, Homo sapien
accgtccaatctccgtgtcttctta

SEQ ID NO: 466421 - DNA, 25 bp, Homo sapien
gcagcaccgtccaatctccgtgtct

SEQ ID NO: 466422 - DNA, 25 bp, Homo sapien
tttctcagtgttttagacgcccagt

SEQ ID NO: 466423 - DNA, 25 bp, Homo sapien
cgtgggcagtataaggccttctcca

SEQ ID NO: 466424 - DNA, 25 bp, Homo sapien
ttcatcatcacgtgggcagtataag

SEQ ID NO: 466425 - DNA, 25 bp, Homo sapien
gttttagacgcccagttgcacaact

SEQ ID NO: 466426 - DNA, 25 bp, Homo sapien
tacagtcacatagcacgtaatgaag

SEQ ID NO: 466427 - DNA, 25 bp, Homo sapien
tctgccctctagtgatgctgtagcc

SEQ ID NO: 466428 - DNA, 25 bp, Homo sapien
cactgcatataggatggtggttcca

SEQ ID NO: 466429 - DNA, 25 bp, Homo sapien
ttaagtgtaaaagatcctcaggctg

SEQ ID NO: 466430 - DNA, 25 bp, Homo sapien
gtctctgaactcctgcttatccatg

SEQ ID NO: 466431 - DNA, 25 bp, Homo sapien
tctccgctcaccctcatattttttc

SEQ ID NO: 466432 - DNA, 25 bp, Homo sapien
tcctcgcccacaataataacagagc

SEQ ID NO: 466433 - DNA, 25 bp, Homo sapien
tgcatcctcgcccacaataataaca

SEQ ID NO: 466434 - DNA, 25 bp, Homo sapien
ttgataactgctagatcagaaaatg

SEQ ID NO: 466435 - DNA, 25 bp, Homo sapien
tgataactgctagatcagaaaatga

SEQ ID NO: 466436 - DNA, 25 bp, Homo sapien
gaaaatgaatatgcctttctcactg

SEQ ID NO: 466437 - DNA, 25 bp, Homo sapien
tttgataactgctagatcagaaaat

SEQ ID NO: 466438 - DNA, 25 bp, Homo sapien
cgaatcaggttcccaatccagtagt

SEQ ID NO: 466439 - DNA, 25 bp, Homo sapien
aatcaggttcccaatccagtagttt

SEQ ID NO: 466440 - DNA, 25 bp, Homo sapien
gcccgaatcaggttcccaatccagt

SEQ ID NO: 466441 - DNA, 25 bp, Homo sapien
gggcccgaatcaggttcccaatcca

SEQ ID NO: 466442 - DNA, 25 bp, Homo sapien
ctgtagaaacaggactactttctaa

SEQ ID NO: 466443 - DNA, 25 bp, Homo sapien
tgtagaaacaggactactttctaat

SEQ ID NO: 466444 - DNA, 25 bp, Homo sapien
tgttcctcttagcaatgtagctaag

SEQ ID NO: 466445 - DNA, 25 bp, Homo sapien
acagctatgtgagcattcatctcca

SEQ ID NO: 466446 - DNA, 25 bp, Homo sapien
gtagctaagtgatttatcacagcta

SEQ ID NO: 466447 - DNA, 25 bp, Homo sapien
ccctgaggttgtgctgtatttgtaa

SEQ ID NO: 466448 - DNA, 25 bp, Homo sapien
tctgtgtggatggacaacaacttat

SEQ ID NO: 466449 - DNA, 25 bp, Homo sapien
tatggatttatttccctgttcgctg

SEQ ID NO: 466450 - DNA, 25 bp, Homo sapien
tatttccctgttcgctgtgcttctg

SEQ ID NO: 466451 - DNA, 25 bp, Homo sapien
tgtatattggatgcctttctgtgtg

SEQ ID NO: 466452 - DNA, 25 bp, Homo sapien
cattcataagcaaggtcatggagga

SEQ ID NO: 466453 - DNA, 25 bp, Homo sapien
tcatagccacaagagatattactgc

SEQ ID NO: 466454 - DNA, 25 bp, Homo sapien
gcacaacttttgttcactaaggaga

SEQ ID NO: 466455 - DNA, 25 bp, Homo sapien
ccatggaaatcgatgaggacggcct

SEQ ID NO: 466456 - DNA, 25 bp, Homo sapien
ttaggtaacaggtctgcagatcaca

SEQ ID NO: 466457 - DNA, 25 bp, Homo sapien
taacttcaatatatgggtccctcaa

SEQ ID NO: 466458 - DNA, 25 bp, Homo sapien
gcagcattttagctaggtctcatga

SEQ ID NO: 466459 - DNA, 25 bp, Homo sapien
gcagatcacaagatacctgttgaga

SEQ ID NO: 466460 - DNA, 25 bp, Homo sapien
tgtgaaaacatggttgtagattctc

SEQ ID NO: 466461 - DNA, 25 bp, Homo sapien
tccacaagttctggtttgctaatcc

SEQ ID NO: 466462 - DNA, 25 bp, Homo sapien
ctggtttgctaatcctcaactgaaa

SEQ ID NO: 466463 - DNA, 25 bp, Homo sapien
caagttctggtttgctaatcctcaa

SEQ ID NO: 466464 - DNA, 25 bp, Homo sapien
agtgtttatcttcactgaatccaga

SEQ ID NO: 466465 - DNA, 25 bp, Homo sapien
ttggcaatgacagaccgtggacacg

SEQ ID NO: 466466 - DNA, 25 bp, Homo sapien
gactacagttgacttggcaatgaca

SEQ ID NO: 466467 - DNA, 25 bp, Homo sapien
atttgagccaattagaatctatctc

SEQ ID NO: 466468 - DNA, 25 bp, Homo sapien
taatatgcctttgaccgctgactac

SEQ ID NO: 466469 - DNA, 25 bp, Homo sapien
gcactaacaggttgaggtagtgcac

SEQ ID NO: 466470 - DNA, 25 bp, Homo sapien
tagttacaaaacctattgaatcttc

SEQ ID NO: 466471 - DNA, 25 bp, Homo sapien
gttacaaaacctattgaatcttcaa

SEQ ID NO: 466472 - DNA, 25 bp, Homo sapien
atctgttgcactaacaggttgaggt

SEQ ID NO: 466473 - DNA, 25 bp, Homo sapien
gtttatcatgtatattggtctacag

SEQ ID NO: 466474 - DNA, 25 bp, Homo sapien
gtataaaacccatttgaccatggtg

SEQ ID NO: 466475 - DNA, 25 bp, Homo sapien
tgttggggtgataatggcttcttag

SEQ ID NO: 466476 - DNA, 25 bp, Homo sapien
tctatgtttatcatgtatattggtc

SEQ ID NO: 466477 - DNA, 25 bp, Homo sapien
aaataagaatcatgatcctgaggaa

SEQ ID NO: 466478 - DNA, 25 bp, Homo sapien
tatcattggcttgacagaattattt

SEQ ID NO: 466479 - DNA, 25 bp, Homo sapien
cccaatccctactcataactgatga

SEQ ID NO: 466480 - DNA, 25 bp, Homo sapien
tgtttctcttattatcattggcttg

SEQ ID NO: 466481 - DNA, 25 bp, Homo sapien
caagcatattgtcatcagactatcc

SEQ ID NO: 466482 - DNA, 25 bp, Homo sapien
ctcagagaactgctaaaagatacat

SEQ ID NO: 466483 - DNA, 25 bp, Homo sapien
ctgctaaaagatacattgcaaaact

SEQ ID NO: 466484 - DNA, 25 bp, Homo sapien
tatccaaagtcaacaggaaggaaga

SEQ ID NO: 466485 - DNA, 25 bp, Homo sapien
aattatccagtctattcaagtacaa

SEQ ID NO: 466486 - DNA, 25 bp, Homo sapien
ggaaggcacatgtatcattgaagat

SEQ ID NO: 466487 - DNA, 25 bp, Homo sapien
gtatgtctagttaatcaccatccca

SEQ ID NO: 466488 - DNA, 25 bp, Homo sapien
catccttgccaatacatgatatcca

SEQ ID NO: 466489 - DNA, 25 bp, Homo sapien
gtctctagtcttattgccatccatc

SEQ ID NO: 466490 - DNA, 25 bp, Homo sapien
tcagctctaacacactttgcttatg

SEQ ID NO: 466491 - DNA, 25 bp, Homo sapien
cagatgctgcatatcggtcatgtag

SEQ ID NO: 466492 - DNA, 25 bp, Homo sapien
ggtcatgtagtcttgtattcttcca

SEQ ID NO: 466493 - DNA, 25 bp, Homo sapien
cagagccttagaggtcctcagtgtc

SEQ ID NO: 466494 - DNA, 25 bp, Homo sapien
agagccttagaggtcctcagtgtcc

SEQ ID NO: 466495 - DNA, 25 bp, Homo sapien
tacagagccttagaggtcctcagtg

SEQ ID NO: 466496 - DNA, 25 bp, Homo sapien
ctacagagccttagaggtcctcagt

SEQ ID NO: 466497 - DNA, 25 bp, Homo sapien
gcagtagtatagttaccttccaggt

SEQ ID NO: 466498 - DNA, 25 bp, Homo sapien
aggcagtagtatagttaccttccag

SEQ ID NO: 466499 - DNA, 25 bp, Homo sapien
gtagtatagttaccttccaggtggc

SEQ ID NO: 466500 - DNA, 25 bp, Homo sapien
taaggcagtagtatagttaccttcc

SEQ ID NO: 466501 - DNA, 25 bp, Homo sapien
tggctccaaattcaatcctactggg

SEQ ID NO: 466502 - DNA, 25 bp, Homo sapien
aattcaatcctactggggccctcgg

SEQ ID NO: 466503 - DNA, 25 bp, Homo sapien
gctggctccaaattcaatcctactg

SEQ ID NO: 466504 - DNA, 25 bp, Homo sapien
cctgctggctccaaattcaatccta

SEQ ID NO: 466505 - DNA, 25 bp, Homo sapien
ctaaggcaattcttcctgtcctcag

SEQ ID NO: 466506 - DNA, 25 bp, Homo sapien
aacaatagcaccaacactaaggcaa

SEQ ID NO: 466507 - DNA, 25 bp, Homo sapien
ggcttcgtctggttttgtgcaatgg

SEQ ID NO: 466508 - DNA, 25 bp, Homo sapien
atggcttcgtctggttttgtgcaat

SEQ ID NO: 466509 - DNA, 25 bp, Homo sapien
catccctctagtgtgtatgcaggct

SEQ ID NO: 466510 - DNA, 25 bp, Homo sapien
gagggttgccatcacacagtcgaat

SEQ ID NO: 466511 - DNA, 25 bp, Homo sapien
tggaaagacttctactgagaccttg

SEQ ID NO: 466512 - DNA, 25 bp, Homo sapien
ttacttccttatcagcgcttgcagc

SEQ ID NO: 466513 - DNA, 25 bp, Homo sapien
ctttgtctcattgaaaggcgtatta

SEQ ID NO: 466514 - DNA, 25 bp, Homo sapien
tctcattgaaaggcgtattactcat

SEQ ID NO: 466515 - DNA, 25 bp, Homo sapien
ttgtctcattgaaaggcgtattact

SEQ ID NO: 466516 - DNA, 25 bp, Homo sapien
tgtctcattgaaaggcgtattactc

SEQ ID NO: 466517 - DNA, 25 bp, Homo sapien
tccaactttccactatgtaggagct

SEQ ID NO: 466518 - DNA, 25 bp, Homo sapien
cagataatatgtcttgtttcacaac

SEQ ID NO: 466519 - DNA, 25 bp, Homo sapien
tgtaggagctccacacagataatat

SEQ ID NO: 466520 - DNA, 25 bp, Homo sapien
cacaactttgaagaatgccagaaac

SEQ ID NO: 466521 - DNA, 25 bp, Homo sapien
tgccgcttggatatggtgagagact

SEQ ID NO: 466522 - DNA, 25 bp, Homo sapien
ccttaatgacaagcacacactggtg

SEQ ID NO: 466523 - DNA, 25 bp, Homo sapien
gcacacactggtgccgcttggatat

SEQ ID NO: 466524 - DNA, 25 bp, Homo sapien
cttggatatggtgagagactgtagc

SEQ ID NO: 466525 - DNA, 25 bp, Homo sapien
acagttcataacagatgttgaacaa

SEQ ID NO: 466526 - DNA, 25 bp, Homo sapien
cagttcataacagatgttgaacaaa

SEQ ID NO: 466527 - DNA, 25 bp, Homo sapien
ggatgcctcattgaaagtttctcca

SEQ ID NO: 466528 - DNA, 25 bp, Homo sapien
tgtcagacatcccactgagccttcc

SEQ ID NO: 466529 - DNA, 25 bp, Homo sapien
gtggatgcctcattgaaagtttctc

SEQ ID NO: 466530 - DNA, 25 bp, Homo sapien
atgcctcattgaaagtttctccatg

SEQ ID NO: 466531 - DNA, 25 bp, Homo sapien
tgcgtggcttgattgaatttacagt

SEQ ID NO: 466532 - DNA, 25 bp, Homo sapien
tgctgactgccatgccattgtgcgt

SEQ ID NO: 466533 - DNA, 25 bp, Homo sapien
tctgctgactgccatgccattgtgc

SEQ ID NO: 466534 - DNA, 25 bp, Homo sapien
tgccattgtgcgtggcttgattgaa

SEQ ID NO: 466535 - DNA, 25 bp, Homo sapien
gctttgacagattcaagagtcctgt

SEQ ID NO: 466536 - DNA, 25 bp, Homo sapien
tttgacagattcaagagtcctgtca

SEQ ID NO: 466537 - DNA, 25 bp, Homo sapien
ctttgacagattcaagagtcctgtc

SEQ ID NO: 466538 - DNA, 25 bp, Homo sapien
tgacagattcaagagtcctgtcatg

SEQ ID NO: 466539 - DNA, 25 bp, Homo sapien
gtcttcagttgccattatctgcatt

SEQ ID NO: 466540 - DNA, 25 bp, Homo sapien
cattgtcttcagttgccattatctg

SEQ ID NO: 466541 - DNA, 25 bp, Homo sapien
ctagagaacagtccttctttgctca

SEQ ID NO: 466542 - DNA, 25 bp, Homo sapien
ttgtcttcagttgccattatctgca

SEQ ID NO: 466543 - DNA, 25 bp, Homo sapien
gagaaggttgtgttttgtgttggta

SEQ ID NO: 466544 - DNA, 25 bp, Homo sapien
ttgtgttggtaatgtgttaaagcct

SEQ ID NO: 466545 - DNA, 25 bp, Homo sapien
cagaggaagaccagtgatgcttggt

SEQ ID NO: 466546 - DNA, 25 bp, Homo sapien
ttggtaatgtgttaaagcctccagt

SEQ ID NO: 466547 - DNA, 25 bp, Homo sapien
agcctccttcatcatgtacctccat

SEQ ID NO: 466548 - DNA, 25 bp, Homo sapien
cagcctccttcatcatgtacctcca

SEQ ID NO: 466549 - DNA, 25 bp, Homo sapien
ggctgtagcaattccaggattttta

SEQ ID NO: 466550 - DNA, 25 bp, Homo sapien
gctgtagcaattccaggatttttat

SEQ ID NO: 466551 - DNA, 25 bp, Homo sapien
tggtacagtttcccaataatgtttg

SEQ ID NO: 466552 - DNA, 25 bp, Homo sapien
tacagtttcccaataatgtttgtct

SEQ ID NO: 466553 - DNA, 25 bp, Homo sapien
cagtttcccaataatgtttgtcttc

SEQ ID NO: 466554 - DNA, 25 bp, Homo sapien
gtttcccaataatgtttgtcttcat

SEQ ID NO: 466555 - DNA, 25 bp, Homo sapien
cctcacaggtgataaatgaggacat

SEQ ID NO: 466556 - DNA, 25 bp, Homo sapien
taaggatccattagagataaaacac

SEQ ID NO: 466557 - DNA, 25 bp, Homo sapien
tgcgtaatatctggaatgcagaggg

SEQ ID NO: 466558 - DNA, 25 bp, Homo sapien
gggatataataaggatccattagag

SEQ ID NO: 466559 - DNA, 25 bp, Homo sapien
tgcacttttatccactgcgtaatat

SEQ ID NO: 466560 - DNA, 25 bp, Homo sapien
ctgcagagggtatgtagagagcacg

SEQ ID NO: 466561 - DNA, 25 bp, Homo sapien
gtagggactcagtgggcatatcaag

SEQ ID NO: 466562 - DNA, 25 bp, Homo sapien
cacgaaggtagggactcagtgggca

SEQ ID NO: 466563 - DNA, 25 bp, Homo sapien
tgtagagagcacgaaggtagggact

SEQ ID NO: 466564 - DNA, 25 bp, Homo sapien
tgcttgtagtttatgggaagctgaa

SEQ ID NO: 466565 - DNA, 25 bp, Homo sapien
cttgttggtggaaagtgggtagaca

SEQ ID NO: 466566 - DNA, 25 bp, Homo sapien
tgtggctgttttaaactaagcttgt

SEQ ID NO: 466567 - DNA, 25 bp, Homo sapien
aagctgtccctgacaattaaagtgt

SEQ ID NO: 466568 - DNA, 25 bp, Homo sapien
ccctgacaattaaagtgtggctgtt

SEQ ID NO: 466569 - DNA, 25 bp, Homo sapien
gttcatctaatgtttgtaaccagtg

SEQ ID NO: 466570 - DNA, 25 bp, Homo sapien
tctccttgttgtttgcctgttcatc

SEQ ID NO: 466571 - DNA, 25 bp, Homo sapien
cagtgagagtctatggaaatatttg

SEQ ID NO: 466572 - DNA, 25 bp, Homo sapien
ttgttttctgatataggcatccctc

SEQ ID NO: 466573 - DNA, 25 bp, Homo sapien
aagaggcattgcaatcacctgttct

SEQ ID NO: 466574 - DNA, 25 bp, Homo sapien
ggcattgcaatcacctgttctttca

SEQ ID NO: 466575 - DNA, 25 bp, Homo sapien
gaggcattgcaatcacctgttcttt

SEQ ID NO: 466576 - DNA, 25 bp, Homo sapien
tgaagaggcattgcaatcacctgtt

SEQ ID NO: 466577 - DNA, 25 bp, Homo sapien
atctcacagcctttagtaaaccaag

SEQ ID NO: 466578 - DNA, 25 bp, Homo sapien
aaatctcacagcctttagtaaacca

SEQ ID NO: 466579 - DNA, 25 bp, Homo sapien
tgtccttcttcctgaaatctcacag

SEQ ID NO: 466580 - DNA, 25 bp, Homo sapien
tcttgtccttcttcctgaaatctca

SEQ ID NO: 466581 - DNA, 25 bp, Homo sapien
aagttacaccaattgctagcttcaa

SEQ ID NO: 466582 - DNA, 25 bp, Homo sapien
tcttgatcttctagggaagttacac

SEQ ID NO: 466583 - DNA, 25 bp, Homo sapien
tgtgttcttgatcttctagggaagt

SEQ ID NO: 466584 - DNA, 25 bp, Homo sapien
cttctagggaagttacaccaattgc

SEQ ID NO: 466585 - DNA, 25 bp, Homo sapien
aataggctctagtgctcattgttcc

SEQ ID NO: 466586 - DNA, 25 bp, Homo sapien
tgttgctgcaaacgtcacgtacatt

SEQ ID NO: 466587 - DNA, 25 bp, Homo sapien
catgtggactcaatgattagctgcc

SEQ ID NO: 466588 - DNA, 25 bp, Homo sapien
taatttctcaagaccgcctctaaag

SEQ ID NO: 466589 - DNA, 25 bp, Homo sapien
tacgtgaatcatgaccatcaaacat

SEQ ID NO: 466590 - DNA, 25 bp, Homo sapien
agttctttaacagaatcggcagtgt

SEQ ID NO: 466591 - DNA, 25 bp, Homo sapien
tcatgatctgtctccaccctgttat

SEQ ID NO: 466592 - DNA, 25 bp, Homo sapien
cttttgagggtttctctacgtgaat

SEQ ID NO: 466593 - DNA, 25 bp, Homo sapien
gctctttaatgtcaaaacagtgttc

SEQ ID NO: 466594 - DNA, 25 bp, Homo sapien
aatctgttgctctttaatgtcaaaa

SEQ ID NO: 466595 - DNA, 25 bp, Homo sapien
ttcgcattgtagctgaatctgttgc

SEQ ID NO: 466596 - DNA, 25 bp, Homo sapien
aaacgtggaaacaaattcgcattgt

SEQ ID NO: 466597 - DNA, 25 bp, Homo sapien
ctaagtgaaccaccgttatagttat

SEQ ID NO: 466598 - DNA, 25 bp, Homo sapien
ccaccgttatagttattttatcact

SEQ ID NO: 466599 - DNA, 25 bp, Homo sapien
tacgtctaagtgaaccaccgttata

SEQ ID NO: 466600 - DNA, 25 bp, Homo sapien
cgtctaagtgaaccaccgttatagt

SEQ ID NO: 466601 - DNA, 25 bp, Homo sapien
ctttcgaatcatattcctctaatac

SEQ ID NO: 466602 - DNA, 25 bp, Homo sapien
caacacctttatatgctgtatggat

SEQ ID NO: 466603 - DNA, 25 bp, Homo sapien
tttctccttcattcttataacattg

SEQ ID NO: 466604 - DNA, 25 bp, Homo sapien
cctcaacacctttatatgctgtatg

SEQ ID NO: 466605 - DNA, 25 bp, Homo sapien
aacattgaaagcagttcctcctcca

SEQ ID NO: 466606 - DNA, 25 bp, Homo sapien
tccataacaataccagtagacatga

SEQ ID NO: 466607 - DNA, 25 bp, Homo sapien
cctgacgactctgtgtccataacaa

SEQ ID NO: 466608 - DNA, 25 bp, Homo sapien
gactatggaaagtgcctgacgactc

SEQ ID NO: 466609 - DNA, 25 bp, Homo sapien
tgtgtccataacaataccagtagac

SEQ ID NO: 466610 - DNA, 25 bp, Homo sapien
taggaagcagttcatcagccaaacc

SEQ ID NO: 466611 - DNA, 25 bp, Homo sapien
ctctaggaagcagttcatcagccaa

SEQ ID NO: 466612 - DNA, 25 bp, Homo sapien
catcagccaaacctccagaattgaa

SEQ ID NO: 466613 - DNA, 25 bp, Homo sapien
gccaaacctccagaattgaaaacac

SEQ ID NO: 466614 - DNA, 25 bp, Homo sapien
atgctgatacctgtacatgtgagga

SEQ ID NO: 466615 - DNA, 25 bp, Homo sapien
atacctgtacatgtgaggataacac

SEQ ID NO: 466616 - DNA, 25 bp, Homo sapien
tgccccccaaaattatgctgatacc

SEQ ID NO: 466617 - DNA, 25 bp, Homo sapien
tgatacctgtacatgtgaggataac

SEQ ID NO: 466618 - DNA, 25 bp, Homo sapien
ccagcttcttttgtgcagggatttc

SEQ ID NO: 466619 - DNA, 25 bp, Homo sapien
cagcttcttttgtgcagggatttca

SEQ ID NO: 466620 - DNA, 25 bp, Homo sapien
gcggctccttcagattcaatcctaa

SEQ ID NO: 466621 - DNA, 25 bp, Homo sapien
atttccaccacagcggctccttcag

SEQ ID NO: 466622 - DNA, 25 bp, Homo sapien
taaccatatcccagagggtatctgc

SEQ ID NO: 466623 - DNA, 25 bp, Homo sapien
tctgctttgttcagtactaaccata

SEQ ID NO: 466624 - DNA, 25 bp, Homo sapien
tatctgccaagaagtgagttttggc

SEQ ID NO: 466625 - DNA, 25 bp, Homo sapien
tcagtactaaccatatcccagaggg

SEQ ID NO: 466626 - DNA, 25 bp, Homo sapien
gaacatatagcctactctgttttgc

SEQ ID NO: 466627 - DNA, 25 bp, Homo sapien
ccttggcaatccgaacatatagcct

SEQ ID NO: 466628 - DNA, 25 bp, Homo sapien
caatccgaacatatagcctactctg

SEQ ID NO: 466629 - DNA, 25 bp, Homo sapien
attccttggcaatccgaacatatag

SEQ ID NO: 466630 - DNA, 25 bp, Homo sapien
tgaaggttcttctagatttaacacc

SEQ ID NO: 466631 - DNA, 25 bp, Homo sapien
aatgaaggttcttctagatttaaca

SEQ ID NO: 466632 - DNA, 25 bp, Homo sapien
gaaggttcttctagatttaacacca

SEQ ID NO: 466633 - DNA, 25 bp, Homo sapien
aaggttcttctagatttaacaccat

SEQ ID NO: 466634 - DNA, 25 bp, Homo sapien
gctcagcatccgcaacactgccgat

SEQ ID NO: 466635 - DNA, 25 bp, Homo sapien
agcatccgcaacactgccgatctcc

SEQ ID NO: 466636 - DNA, 25 bp, Homo sapien
gagtgctcagcatccgcaacactgc

SEQ ID NO: 466637 - DNA, 25 bp, Homo sapien
tcagcatccgcaacactgccgatct

SEQ ID NO: 466638 - DNA, 25 bp, Homo sapien
tgtggcagtcaattgcttgctttct

SEQ ID NO: 466639 - DNA, 25 bp, Homo sapien
tatttgtactaaatcgtatttatgc

SEQ ID NO: 466640 - DNA, 25 bp, Homo sapien
gtactaaatcgtatttatgcttatc

SEQ ID NO: 466641 - DNA, 25 bp, Homo sapien
tgtactaaatcgtatttatgcttat

SEQ ID NO: 466642 - DNA, 25 bp, Homo sapien
tttgtactaaatcgtatttatgctt

SEQ ID NO: 466643 - DNA, 25 bp, Homo sapien
tttgtgttgcaaaattttccctctc

SEQ ID NO: 466644 - DNA, 25 bp, Homo sapien
tgtattgtgattgtagccactggct

SEQ ID NO: 466645 - DNA, 25 bp, Homo sapien
ccctctcttattgaatgtacttctg

SEQ ID NO: 466646 - DNA, 25 bp, Homo sapien
gaagcttaacctctgctaacacagt

SEQ ID NO: 466647 - DNA, 25 bp, Homo sapien
attcctgaggtccaattcactgtca

SEQ ID NO: 466648 - DNA, 25 bp, Homo sapien
ctgcttagttaagccagggccgctc

SEQ ID NO: 466649 - DNA, 25 bp, Homo sapien
tttagaatctcctgcttagttaagc

SEQ ID NO: 466650 - DNA, 25 bp, Homo sapien
aattcctgaggtccaattcactgtc

SEQ ID NO: 466651 - DNA, 25 bp, Homo sapien
gcacatcatgtaattaggaacagct

SEQ ID NO: 466652 - DNA, 25 bp, Homo sapien
attaggaacagctttcacatcagta

SEQ ID NO: 466653 - DNA, 25 bp, Homo sapien
ttaggaacagctttcacatcagtat

SEQ ID NO: 466654 - DNA, 25 bp, Homo sapien
ttgagcacatcatgtaattaggaac

SEQ ID NO: 466655 - DNA, 25 bp, Homo sapien
gagtatccgtctctctgagcatcag

SEQ ID NO: 466656 - DNA, 25 bp, Homo sapien
tcatgcctggattatcatggatcag

SEQ ID NO: 466657 - DNA, 25 bp, Homo sapien
gattatcatggatcagatcttcctg

SEQ ID NO: 466658 - DNA, 25 bp, Homo sapien
ggatcagatcttcctgcaaacagca

SEQ ID NO: 466659 - DNA, 25 bp, Homo sapien
taatcattaggtcacagcactgttg

SEQ ID NO: 466660 - DNA, 25 bp, Homo sapien
gccatttggcctaagatacaagcaa

SEQ ID NO: 466661 - DNA, 25 bp, Homo sapien
ggaatatttccctcattcatgtgtg

SEQ ID NO: 466662 - DNA, 25 bp, Homo sapien
gttgtaagctctttcatgacgcata

SEQ ID NO: 466663 - DNA, 25 bp, Homo sapien
agtccataagagaacactctgagag

SEQ ID NO: 466664 - DNA, 25 bp, Homo sapien
gagaacactctgagagaaccgtcat

SEQ ID NO: 466665 - DNA, 25 bp, Homo sapien
agaaaagtccataagagaacactct

SEQ ID NO: 466666 - DNA, 25 bp, Homo sapien
cataagagaacactctgagagaacc

SEQ ID NO: 466667 - DNA, 25 bp, Homo sapien
ttgaagccggtactatgacaccatg

SEQ ID NO: 466668 - DNA, 25 bp, Homo sapien
gacttactgatgcaattcttgacca

SEQ ID NO: 466669 - DNA, 25 bp, Homo sapien
taaagcaaatggattcattgcctga

SEQ ID NO: 466670 - DNA, 25 bp, Homo sapien
ttcttgaccacaagctcactgcttt

SEQ ID NO: 466671 - DNA, 25 bp, Homo sapien
gctatatgtattgcacagatctgcc

SEQ ID NO: 466672 - DNA, 25 bp, Homo sapien
gaaggcaataagtaccattggtggc

SEQ ID NO: 466673 - DNA, 25 bp, Homo sapien
tggtggccttgatactaactgcagc

SEQ ID NO: 466674 - DNA, 25 bp, Homo sapien
tcgtaggaagagatgcccaaaagag

SEQ ID NO: 466675 - DNA, 25 bp, Homo sapien
ttactttccatgtttggatgccgta

SEQ ID NO: 466676 - DNA, 25 bp, Homo sapien
actttccatgtttggatgccgtacc

SEQ ID NO: 466677 - DNA, 25 bp, Homo sapien
tttggatgccgtaccccccatctgg

SEQ ID NO: 466678 - DNA, 25 bp, Homo sapien
tttccatgtttggatgccgtacccc

SEQ ID NO: 466679 - DNA, 25 bp, Homo sapien
tctatctgttcttctcccaaggtac

SEQ ID NO: 466680 - DNA, 25 bp, Homo sapien
attagtttctatctgttcttctccc

SEQ ID NO: 466681 - DNA, 25 bp, Homo sapien
ttctatctgttcttctcccaaggta

SEQ ID NO: 466682 - DNA, 25 bp, Homo sapien
ttaattagtttctatctgttcttct

SEQ ID NO: 466683 - DNA, 25 bp, Homo sapien
ccttattctcacttggcaactgtat

SEQ ID NO: 466684 - DNA, 25 bp, Homo sapien
ttggcaactgtattacagaggccat

SEQ ID NO: 466685 - DNA, 25 bp, Homo sapien
cttggcaactgtattacagaggcca

SEQ ID NO: 466686 - DNA, 25 bp, Homo sapien
ctaccttattctcacttggcaactg

SEQ ID NO: 466687 - DNA, 25 bp, Homo sapien
cttctatggcaaaaactcccgcaaa

SEQ ID NO: 466688 - DNA, 25 bp, Homo sapien
tatggcaaaaactcccgcaaaagcc

SEQ ID NO: 466689 - DNA, 25 bp, Homo sapien
tctatggcaaaaactcccgcaaaag

SEQ ID NO: 466690 - DNA, 25 bp, Homo sapien
atggcaaaaactcccgcaaaagcca

SEQ ID NO: 466691 - DNA, 25 bp, Homo sapien
gaatcatagaccaattggtttagca

SEQ ID NO: 466692 - DNA, 25 bp, Homo sapien
tgagtgaatcatagaccaattggtt

SEQ ID NO: 466693 - DNA, 25 bp, Homo sapien
gatagcccagagtgagtgaatcata

SEQ ID NO: 466694 - DNA, 25 bp, Homo sapien
ccagagtgagtgaatcatagaccaa

SEQ ID NO: 466695 - DNA, 25 bp, Homo sapien
gtttagctccaacagacttaaagtg

SEQ ID NO: 466696 - DNA, 25 bp, Homo sapien
tcaaattcagtatttatatcattga

SEQ ID NO: 466697 - DNA, 25 bp, Homo sapien
ttcagtatttatatcattgaacttc

SEQ ID NO: 466698 - DNA, 25 bp, Homo sapien
atgagaactgaattgtccttcaaat

SEQ ID NO: 466699 - DNA, 25 bp, Homo sapien
gtttactgattataacatagtttac

SEQ ID NO: 466700 - DNA, 25 bp, Homo sapien
tgtttactgattataacatagttta

SEQ ID NO: 466701 - DNA, 25 bp, Homo sapien
taattcccattatcgatgtccagaa

SEQ ID NO: 466702 - DNA, 25 bp, Homo sapien
taaatctttagtcaagcttgagtca

SEQ ID NO: 466703 - DNA, 25 bp, Homo sapien
aatgatagccattctgaaagccatt

SEQ ID NO: 466704 - DNA, 25 bp, Homo sapien
tatgcgtgtttgctgcttgtatgtc

SEQ ID NO: 466705 - DNA, 25 bp, Homo sapien
cagctttctacttaggtctaattgt

SEQ ID NO: 466706 - DNA, 25 bp, Homo sapien
tgccacacgtaacacagagcatcag

SEQ ID NO: 466707 - DNA, 25 bp, Homo sapien
cagtaggagatttgctaataggagt

SEQ ID NO: 466708 - DNA, 25 bp, Homo sapien
ggtctaattgtctattgctggatat

SEQ ID NO: 466709 - DNA, 25 bp, Homo sapien
tttgtggtaaagtctgtggtcagcc

SEQ ID NO: 466710 - DNA, 25 bp, Homo sapien
ttgtggtaaagtctgtggtcagccc

SEQ ID NO: 466711 - DNA, 25 bp, Homo sapien
tgtggtaaagtctgtggtcagccca

SEQ ID NO: 466712 - DNA, 25 bp, Homo sapien
ccaacagaatcatacaaaggcccat

SEQ ID NO: 466713 - DNA, 25 bp, Homo sapien
cagcactggttggccccaggctgta

SEQ ID NO: 466714 - DNA, 25 bp, Homo sapien
tccctctaaaatctccagcactggt

SEQ ID NO: 466715 - DNA, 25 bp, Homo sapien
ccctcagcaatagggggagaggtaa

SEQ ID NO: 466716 - DNA, 25 bp, Homo sapien
ctaatctttttgacctctgactcca

SEQ ID NO: 466717 - DNA, 25 bp, Homo sapien
ttttgacctctgactccatttttcc

SEQ ID NO: 466718 - DNA, 25 bp, Homo sapien
tctttttgacctctgactccatttt

SEQ ID NO: 466719 - DNA, 25 bp, Homo sapien
atctttttgacctctgactccattt

SEQ ID NO: 466720 - DNA, 25 bp, Homo sapien
aggacccatccaaaggtcttcggca

SEQ ID NO: 466721 - DNA, 25 bp, Homo sapien
catccaaaggtcttcggcatcaaaa

SEQ ID NO: 466722 - DNA, 25 bp, Homo sapien
gagtccggagtgaacctctagcaaa

SEQ ID NO: 466723 - DNA, 25 bp, Homo sapien
ctcaggcaaacagagtccggagtga

SEQ ID NO: 466724 - DNA, 25 bp, Homo sapien
ttagcatcagggtttgtgtggaaga

SEQ ID NO: 466725 - DNA, 25 bp, Homo sapien
gtttgtgtggaagagttcccctcca

SEQ ID NO: 466726 - DNA, 25 bp, Homo sapien
tcagggtttgtgtggaagagttccc

SEQ ID NO: 466727 - DNA, 25 bp, Homo sapien
ttgtgtggaagagttcccctccaca

SEQ ID NO: 466728 - DNA, 25 bp, Homo sapien
gttatcatgttctctggttgactag

SEQ ID NO: 466729 - DNA, 25 bp, Homo sapien
ggttatcatgttctctggttgacta

SEQ ID NO: 466730 - DNA, 25 bp, Homo sapien
caggttatcatgttctctggttgac

SEQ ID NO: 466731 - DNA, 25 bp, Homo sapien
aggttatcatgttctctggttgact

SEQ ID NO: 466732 - DNA, 25 bp, Homo sapien
acttcttcatcaataaagatctcca

SEQ ID NO: 466733 - DNA, 25 bp, Homo sapien
cttcttcatcaataaagatctccat

SEQ ID NO: 466734 - DNA, 25 bp, Homo sapien
catatactgctataacttcttcatc

SEQ ID NO: 466735 - DNA, 25 bp, Homo sapien
gactgtgcagctattatcacatgca

SEQ ID NO: 466736 - DNA, 25 bp, Homo sapien
ctagttccataactccctgctgcat

SEQ ID NO: 466737 - DNA, 25 bp, Homo sapien
agttccataactccctgctgcattc

SEQ ID NO: 466738 - DNA, 25 bp, Homo sapien
attccatgactgtgcagctattatc

SEQ ID NO: 466739 - DNA, 25 bp, Homo sapien
tggctcctcagagataactatatcg

SEQ ID NO: 466740 - DNA, 25 bp, Homo sapien
tataacaagtaagcaactccagagt

SEQ ID NO: 466741 - DNA, 25 bp, Homo sapien
ccacatagctcagttgaaattgcct

SEQ ID NO: 466742 - DNA, 25 bp, Homo sapien
tctggtaactacaagatgtggctcc

SEQ ID NO: 466743 - DNA, 25 bp, Homo sapien
gaagctgctctccttcgctgaaaac

SEQ ID NO: 466744 - DNA, 25 bp, Homo sapien
tcttcacctgcattgatttatctct

SEQ ID NO: 466745 - DNA, 25 bp, Homo sapien
acactgatttgtactgaagctgctc

SEQ ID NO: 466746 - DNA, 25 bp, Homo sapien
taaacactgatttgtactgaagctg

SEQ ID NO: 466747 - DNA, 25 bp, Homo sapien
acttacaagggatggaagtaccact

SEQ ID NO: 466748 - DNA, 25 bp, Homo sapien
gaagtaccacttcgaagagaactac

SEQ ID NO: 466749 - DNA, 25 bp, Homo sapien
gcaagaaaagacttcgacaaaattc

SEQ ID NO: 466750 - DNA, 25 bp, Homo sapien
gactcaatatcgtgaaagtggtcat

SEQ ID NO: 466751 - DNA, 25 bp, Homo sapien
tctgtatctcctctatctttatttt

SEQ ID NO: 466752 - DNA, 25 bp, Homo sapien
acaaacaataataaagtagttatgc

SEQ ID NO: 466753 - DNA, 25 bp, Homo sapien
tacaaacaataataaagtagttatg

SEQ ID NO: 466754 - DNA, 25 bp, Homo sapien
tcatcttctgtatctcctctatctt

SEQ ID NO: 466755 - DNA, 25 bp, Homo sapien
ccaagtcacaggtggaatatgtagc

SEQ ID NO: 466756 - DNA, 25 bp, Homo sapien
tgtagctacttgtggcctgaatgcg

SEQ ID NO: 466757 - DNA, 25 bp, Homo sapien
ggcctgaatgcgttttgcttcttca

SEQ ID NO: 466758 - DNA, 25 bp, Homo sapien
cacaggtggaatatgtagctacttg

SEQ ID NO: 466759 - DNA, 25 bp, Homo sapien
tggctggataatcccgagaagctcg

SEQ ID NO: 466760 - DNA, 25 bp, Homo sapien
cacaaattgttaccaagtaattcac

SEQ ID NO: 466761 - DNA, 25 bp, Homo sapien
gagaagctcgaaacaagtttgggac

SEQ ID NO: 466762 - DNA, 25 bp, Homo sapien
tcaatgggtggcaatcgactcagaa

SEQ ID NO: 466763 - DNA, 25 bp, Homo sapien
cataaaacgattactcttaattcta

SEQ ID NO: 466764 - DNA, 25 bp, Homo sapien
aaaacgattactcttaattctatat

SEQ ID NO: 466765 - DNA, 25 bp, Homo sapien
taaaacgattactcttaattctata

SEQ ID NO: 466766 - DNA, 25 bp, Homo sapien
ccataaaacgattactcttaattct

SEQ ID NO: 466767 - DNA, 25 bp, Homo sapien
cttaaccctaacttcaattgctcca

SEQ ID NO: 466768 - DNA, 25 bp, Homo sapien
accctaacttcaattgctccagctg

SEQ ID NO: 466769 - DNA, 25 bp, Homo sapien
taaccctaacttcaattgctccagc

SEQ ID NO: 466770 - DNA, 25 bp, Homo sapien
cctaacttcaattgctccagctgtt

SEQ ID NO: 466771 - DNA, 25 bp, Homo sapien
taccaccaattctagatatgccagc

SEQ ID NO: 466772 - DNA, 25 bp, Homo sapien
tctagatatgccagcccttcaagca

SEQ ID NO: 466773 - DNA, 25 bp, Homo sapien
tcgttgcttgcctgatggagtgatc

SEQ ID NO: 466774 - DNA, 25 bp, Homo sapien
atttcatctggtcttcgttgcttgc

SEQ ID NO: 466775 - DNA, 25 bp, Homo sapien
tgtttcttgagcaaactttcaagca

SEQ ID NO: 466776 - DNA, 25 bp, Homo sapien
tgtcaaatatgcatggtgtttcttg

SEQ ID NO: 466777 - DNA, 25 bp, Homo sapien
gtttcttgagcaaactttcaagcaa

SEQ ID NO: 466778 - DNA, 25 bp, Homo sapien
aatatgcatggtgtttcttgagcaa

SEQ ID NO: 466779 - DNA, 25 bp, Homo sapien
tctgcagtaattgcaatgtaagttg

SEQ ID NO: 466780 - DNA, 25 bp, Homo sapien
gcttggacttttctgccactttacc

SEQ ID NO: 466781 - DNA, 25 bp, Homo sapien
ttggacttttctgccactttaccaa

SEQ ID NO: 466782 - DNA, 25 bp, Homo sapien
tgtaagttggatgtatggttctgct

SEQ ID NO: 466783 - DNA, 25 bp, Homo sapien
cagccttgcataaaatgatctgtag

SEQ ID NO: 466784 - DNA, 25 bp, Homo sapien
caaaggtgtgaactacttcaaggaa

SEQ ID NO: 466785 - DNA, 25 bp, Homo sapien
gctgaacaggagcaatagcaaaggt

SEQ ID NO: 466786 - DNA, 25 bp, Homo sapien
aaggtgtgaactacttcaaggaagt

SEQ ID NO: 466787 - DNA, 25 bp, Homo sapien
ttcaatagaatttcaagctcaatag

SEQ ID NO: 466788 - DNA, 25 bp, Homo sapien
caatagaatttcaagctcaataggc

SEQ ID NO: 466789 - DNA, 25 bp, Homo sapien
cattttcaatagaatttcaagctca

SEQ ID NO: 466790 - DNA, 25 bp, Homo sapien
atagaatttcaagctcaataggcat

SEQ ID NO: 466791 - DNA, 25 bp, Homo sapien
cgaacctgactgaacatttccctgc

SEQ ID NO: 466792 - DNA, 25 bp, Homo sapien
ccaaccattgaaggcctgtgatatt

SEQ ID NO: 466793 - DNA, 25 bp, Homo sapien
ttccctgcaacccaaccattgaagg

SEQ ID NO: 466794 - DNA, 25 bp, Homo sapien
tcccactgaaagacccatagcacag

SEQ ID NO: 466795 - DNA, 25 bp, Homo sapien
ctgaatccacgttatttgtagatgc

SEQ ID NO: 466796 - DNA, 25 bp, Homo sapien
tttgaaggactttgtcagcaaggca

SEQ ID NO: 466797 - DNA, 25 bp, Homo sapien
tagttttggctaccacatgttattc

SEQ ID NO: 466798 - DNA, 25 bp, Homo sapien
tttttgaccagtggcaaggtcttcc

SEQ ID NO: 466799 - DNA, 25 bp, Homo sapien
tgtctctgttactgacccaaggttg

SEQ ID NO: 466800 - DNA, 25 bp, Homo sapien
tcacccagctaaaggtaggatatga

SEQ ID NO: 466801 - DNA, 25 bp, Homo sapien
taataagacttaggtgaggaacgtg

SEQ ID NO: 466802 - DNA, 25 bp, Homo sapien
taaaaacgcttctttggcatagctc

SEQ ID NO: 466803 - DNA, 25 bp, Homo sapien
tctgctaagtcctgtagctctggga

SEQ ID NO: 466804 - DNA, 25 bp, Homo sapien
tatgctgcctacttgagacaccact

SEQ ID NO: 466805 - DNA, 25 bp, Homo sapien
ctttatgtagaagcttggtgctgcc

SEQ ID NO: 466806 - DNA, 25 bp, Homo sapien
tgtgttatacatgtgaagagccagg

SEQ ID NO: 466807 - DNA, 25 bp, Homo sapien
gcttgcctgcatctagttgtaacat

SEQ ID NO: 466808 - DNA, 25 bp, Homo sapien
tgtagccagcacttgtgcttgcctg

SEQ ID NO: 466809 - DNA, 25 bp, Homo sapien
tcacctttcgtatgtagccagcact

SEQ ID NO: 466810 - DNA, 25 bp, Homo sapien
tgtgcttgcctgcatctagttgtaa

SEQ ID NO: 466811 - DNA, 25 bp, Homo sapien
agaccacgttcaatgacaaaactga

SEQ ID NO: 466812 - DNA, 25 bp, Homo sapien
tggtagagaccacgttcaatgacaa

SEQ ID NO: 466813 - DNA, 25 bp, Homo sapien
tagagaccacgttcaatgacaaaac

SEQ ID NO: 466814 - DNA, 25 bp, Homo sapien
ggtagagaccacgttcaatgacaaa

SEQ ID NO: 466815 - DNA, 25 bp, Homo sapien
tctcctgaggcaaagaaaaccgact

SEQ ID NO: 466816 - DNA, 25 bp, Homo sapien
cctgaggcaaagaaaaccgacttga

SEQ ID NO: 466817 - DNA, 25 bp, Homo sapien
aagaatgaggaatttcagagtaggt

SEQ ID NO: 466818 - DNA, 25 bp, Homo sapien
aatcatactggaaaatagtttctcc

SEQ ID NO: 466819 - DNA, 25 bp, Homo sapien
gctggatttgttcataaggtctgaa

SEQ ID NO: 466820 - DNA, 25 bp, Homo sapien
gctaccctggtgcatttaacaaaat

SEQ ID NO: 466821 - DNA, 25 bp, Homo sapien
tttcaatatcctggaaagtgtgcaa

SEQ ID NO: 466822 - DNA, 25 bp, Homo sapien
tgataaaatacctagcatctacccc

SEQ ID NO: 466823 - DNA, 25 bp, Homo sapien
tctccatcaaatttagaagcagcta

SEQ ID NO: 466824 - DNA, 25 bp, Homo sapien
cacattgcagactttcaaatgcatg

SEQ ID NO: 466825 - DNA, 25 bp, Homo sapien
tgcaacagccacttgaagttttgcc

SEQ ID NO: 466826 - DNA, 25 bp, Homo sapien
caacaacttaattgagtaattttct

SEQ ID NO: 466827 - DNA, 25 bp, Homo sapien
ggggcattgccctgtttctctacac

SEQ ID NO: 466828 - DNA, 25 bp, Homo sapien
cgagtatcgtccactgtctggggca

SEQ ID NO: 466829 - DNA, 25 bp, Homo sapien
aattcctgaactttgtgcttttgcc

SEQ ID NO: 466830 - DNA, 25 bp, Homo sapien
ctgcaggcatatgcctcagtggcta

SEQ ID NO: 466831 - DNA, 25 bp, Homo sapien
ccatagagtaaggagatcttgcatc

SEQ ID NO: 466832 - DNA, 25 bp, Homo sapien
gagtaaggagatcttgcatcttttc

SEQ ID NO: 466833 - DNA, 25 bp, Homo sapien
ataaaccatagagtaaggagatctt

SEQ ID NO: 466834 - DNA, 25 bp, Homo sapien
aaggagatcttgcatcttttcttcc

SEQ ID NO: 466835 - DNA, 25 bp, Homo sapien
aatttgcccccttgtgactcttcac

SEQ ID NO: 466836 - DNA, 25 bp, Homo sapien
ttaaatcgttttctaatgatatgca

SEQ ID NO: 466837 - DNA, 25 bp, Homo sapien
tgatatgcattataaggggtttaac

SEQ ID NO: 466838 - DNA, 25 bp, Homo sapien
ctttggaatttgcccccttgtgact

SEQ ID NO: 466839 - DNA, 25 bp, Homo sapien
cagataagattttctggatccatca

SEQ ID NO: 466840 - DNA, 25 bp, Homo sapien
agcaagttgccagataagattttct

SEQ ID NO: 466841 - DNA, 25 bp, Homo sapien
aataacagcaagttgccagataaga

SEQ ID NO: 466842 - DNA, 25 bp, Homo sapien
tgaaaataacagcaagttgccagat

SEQ ID NO: 466843 - DNA, 25 bp, Homo sapien
tctttcctttcttcttcatcatcag

SEQ ID NO: 466844 - DNA, 25 bp, Homo sapien
ttctttcctttcttcttcatcatca

SEQ ID NO: 466845 - DNA, 25 bp, Homo sapien
tttcttctttcctttcttcttcatc

SEQ ID NO: 466846 - DNA, 25 bp, Homo sapien
tcttctttcctttcttcttcatcat

SEQ ID NO: 466847 - DNA, 25 bp, Homo sapien
tggctaaatggatataaaagttgag

SEQ ID NO: 466848 - DNA, 25 bp, Homo sapien
taaacaattacagcaatctctgggt

SEQ ID NO: 466849 - DNA, 25 bp, Homo sapien
aaaagttgagtggagaattctgagg

SEQ ID NO: 466850 - DNA, 25 bp, Homo sapien
tggatataaaagttgagtggagaat

SEQ ID NO: 466851 - DNA, 25 bp, Homo sapien
cctagagtagtcataggaaccatga

SEQ ID NO: 466852 - DNA, 25 bp, Homo sapien
tttcagataagagaacttgaatcct

SEQ ID NO: 466853 - DNA, 25 bp, Homo sapien
agtcataggaaccatgaatggctac

SEQ ID NO: 466854 - DNA, 25 bp, Homo sapien
gagaacttgaatcctagagtagtca

SEQ ID NO: 466855 - DNA, 25 bp, Homo sapien
gaacaaggctctatttcacaatcaa

SEQ ID NO: 466856 - DNA, 25 bp, Homo sapien
ctctatctgggcttcctctaagaag

SEQ ID NO: 466857 - DNA, 25 bp, Homo sapien
ggcttcctctaagaagataatggaa

SEQ ID NO: 466858 - DNA, 25 bp, Homo sapien
gaagataatggaacaaggctctatt

SEQ ID NO: 466859 - DNA, 25 bp, Homo sapien
caaaagataatgtccactggataag

SEQ ID NO: 466860 - DNA, 25 bp, Homo sapien
aatgcaatggcacaacttgctgagc

SEQ ID NO: 466861 - DNA, 25 bp, Homo sapien
caactgcaacgatgacgaataacaa

SEQ ID NO: 466862 - DNA, 25 bp, Homo sapien
cagataattgacattgctggctacc

SEQ ID NO: 466863 - DNA, 25 bp, Homo sapien
tactgtttgcttaaatggattagga

SEQ ID NO: 466864 - DNA, 25 bp, Homo sapien
tacaggatcaagaatttcattaatc

SEQ ID NO: 466865 - DNA, 25 bp, Homo sapien
gcttaaatggattaggataagcatt

SEQ ID NO: 466866 - DNA, 25 bp, Homo sapien
tcaagaatttgtaggtctagttaca

SEQ ID NO: 466867 - DNA, 25 bp, Homo sapien
aagacatcataaaagctttgaaaat

SEQ ID NO: 466868 - DNA, 25 bp, Homo sapien
aatgtgaagcagcataaaagacatc

SEQ ID NO: 466869 - DNA, 25 bp, Homo sapien
ttgtatttgttgtccctcttcttcc

SEQ ID NO: 466870 - DNA, 25 bp, Homo sapien
catgaagttttaggcaatcggggaa

SEQ ID NO: 466871 - DNA, 25 bp, Homo sapien
tacatgaagttttaggcaatcgggg

SEQ ID NO: 466872 - DNA, 25 bp, Homo sapien
acatgaagttttaggcaatcgggga

SEQ ID NO: 466873 - DNA, 25 bp, Homo sapien
atgaagttttaggcaatcggggaag

SEQ ID NO: 466874 - DNA, 25 bp, Homo sapien
cttagaagatctgggctgatctttt

SEQ ID NO: 466875 - DNA, 25 bp, Homo sapien
cttttttcttagaagatctgggctg

SEQ ID NO: 466876 - DNA, 25 bp, Homo sapien
ttttcttagaagatctgggctgatc

SEQ ID NO: 466877 - DNA, 25 bp, Homo sapien
gaagatctgggctgatcttttattc

SEQ ID NO: 466878 - DNA, 25 bp, Homo sapien
agtcgagttgatgggtagtgtctgg

SEQ ID NO: 466879 - DNA, 25 bp, Homo sapien
atggataattaattcaggcccagga

SEQ ID NO: 466880 - DNA, 25 bp, Homo sapien
ataattaattcaggcccaggagtcg

SEQ ID NO: 466881 - DNA, 25 bp, Homo sapien
ttcaggcccaggagtcgagttgatg

SEQ ID NO: 466882 - DNA, 25 bp, Homo sapien
catcacatgacgtcagctttttgct

SEQ ID NO: 466883 - DNA, 25 bp, Homo sapien
ctttattaggaccatcacatgacgt

SEQ ID NO: 466884 - DNA, 25 bp, Homo sapien
ggaccatcacatgacgtcagctttt

SEQ ID NO: 466885 - DNA, 25 bp, Homo sapien
taattgtctgtgcattacaagtgac

SEQ ID NO: 466886 - DNA, 25 bp, Homo sapien
actttgtttggagctcaagactctg

SEQ ID NO: 466887 - DNA, 25 bp, Homo sapien
agctccactttgtttggagctcaag

SEQ ID NO: 466888 - DNA, 25 bp, Homo sapien
ttggagctcaagactctgacctgtt

SEQ ID NO: 466889 - DNA, 25 bp, Homo sapien
gactctgacctgtttcaaagcaata

SEQ ID NO: 466890 - DNA, 25 bp, Homo sapien
tggctatgagcagccaagcaccatt

SEQ ID NO: 466891 - DNA, 25 bp, Homo sapien
cggagatcatctaaacttggcttaa

SEQ ID NO: 466892 - DNA, 25 bp, Homo sapien
gacttaagtgcactcggagatcatc

SEQ ID NO: 466893 - DNA, 25 bp, Homo sapien
gctgccccgctttgtcctttgtgaa

SEQ ID NO: 466894 - DNA, 25 bp, Homo sapien
tgtctctagctctgaataaccagat

SEQ ID NO: 466895 - DNA, 25 bp, Homo sapien
tagctctgaataaccagatttatac

SEQ ID NO: 466896 - DNA, 25 bp, Homo sapien
gaataaccagatttataccacgtct

SEQ ID NO: 466897 - DNA, 25 bp, Homo sapien
agtgtctctagctctgaataaccag

SEQ ID NO: 466898 - DNA, 25 bp, Homo sapien
ttcctgagtaaagggtggtctctca

SEQ ID NO: 466899 - DNA, 25 bp, Homo sapien
atacaaagaagtattccggttcctg

SEQ ID NO: 466900 - DNA, 25 bp, Homo sapien
caaagaagtattccggttcctgagt

SEQ ID NO: 466901 - DNA, 25 bp, Homo sapien
tccaccgatacaaagaagtattccg

SEQ ID NO: 466902 - DNA, 25 bp, Homo sapien
cccaactccctttgaggacaggatg

SEQ ID NO: 466903 - DNA, 25 bp, Homo sapien
ccccaactccctttgaggacaggat

SEQ ID NO: 466904 - DNA, 25 bp, Homo sapien
gtgttaggggagaatgagcttgcat

SEQ ID NO: 466905 - DNA, 25 bp, Homo sapien
gattaaggagtgtgttaggggagaa

SEQ ID NO: 466906 - DNA, 25 bp, Homo sapien
aggagtgtgttaggggagaatgagc

SEQ ID NO: 466907 - DNA, 25 bp, Homo sapien
agtgtgttaggggagaatgagcttg

SEQ ID NO: 466908 - DNA, 25 bp, Homo sapien
tgcttccatgaacacaaattggacc

SEQ ID NO: 466909 - DNA, 25 bp, Homo sapien
tcttccagatatgcggaatgcttcc

SEQ ID NO: 466910 - DNA, 25 bp, Homo sapien
tatgttaatcagtaaccgctttgga

SEQ ID NO: 466911 - DNA, 25 bp, Homo sapien
ttggagtgcgttcatccctgttagc

SEQ ID NO: 466912 - DNA, 25 bp, Homo sapien
tctgcttgaagtcctgccaaggctg

SEQ ID NO: 466913 - DNA, 25 bp, Homo sapien
gctgctgcaaccaccattggacctg

SEQ ID NO: 466914 - DNA, 25 bp, Homo sapien
ggtgacagggtatctcaagtaatcc

SEQ ID NO: 466915 - DNA, 25 bp, Homo sapien
caagtaatccagacaaactgagcag

SEQ ID NO: 466916 - DNA, 25 bp, Homo sapien
gaatagcttggaaatttctatcatc

SEQ ID NO: 466917 - DNA, 25 bp, Homo sapien
cagatgggtagtgctcctgaaatgc

SEQ ID NO: 466918 - DNA, 25 bp, Homo sapien
tcaaaatctggttgtacttgctcaa

SEQ ID NO: 466919 - DNA, 25 bp, Homo sapien
tgagagaacagggtacatagcactt

SEQ ID NO: 466920 - DNA, 25 bp, Homo sapien
tatgggcctctggtagccccggtag

SEQ ID NO: 466921 - DNA, 25 bp, Homo sapien
tctctatgggcctctggtagccccg

SEQ ID NO: 466922 - DNA, 25 bp, Homo sapien
tgagaaacagccttctctatgggcc

SEQ ID NO: 466923 - DNA, 25 bp, Homo sapien
aacagccttctctatgggcctctgg

SEQ ID NO: 466924 - DNA, 25 bp, Homo sapien
ctttcaggtgcttaaattcagagga

SEQ ID NO: 466925 - DNA, 25 bp, Homo sapien
tttcaggtgcttaaattcagaggat

SEQ ID NO: 466926 - DNA, 25 bp, Homo sapien
gaaagcactgccccttgctcacatt

SEQ ID NO: 466927 - DNA, 25 bp, Homo sapien
tgcatggagtttctgttcgatatct

SEQ ID NO: 466928 - DNA, 25 bp, Homo sapien
ccacctccttttgtagaccgtagag

SEQ ID NO: 466929 - DNA, 25 bp, Homo sapien
ttcctctgccagccttgaaagcact

SEQ ID NO: 466930 - DNA, 25 bp, Homo sapien
cccaggatccatttgggcttgacat

SEQ ID NO: 466931 - DNA, 25 bp, Homo sapien
tgactcaaatccttcagaacccaga

SEQ ID NO: 466932 - DNA, 25 bp, Homo sapien
gttgcagagctacaaactgtggagg

SEQ ID NO: 466933 - DNA, 25 bp, Homo sapien
atagctcagccaactcacagtccgg

SEQ ID NO: 466934 - DNA, 25 bp, Homo sapien
tttccatggccatagtctcctgctt

SEQ ID NO: 466935 - DNA, 25 bp, Homo sapien
ttccatggccatagtctcctgcttc

SEQ ID NO: 466936 - DNA, 25 bp, Homo sapien
gcttgggcaccacattaccgtaatt

SEQ ID NO: 466937 - DNA, 25 bp, Homo sapien
tttctctagtactctttgcttgggc

SEQ ID NO: 466938 - DNA, 25 bp, Homo sapien
tagtgcgggtttcagcagagcccag

SEQ ID NO: 466939 - DNA, 25 bp, Homo sapien
catacagctgtagaaatagtgcggg

SEQ ID NO: 466940 - DNA, 25 bp, Homo sapien
ttaacagagatgtccgtcatacaca

SEQ ID NO: 466941 - DNA, 25 bp, Homo sapien
tggttgggattatcccatacagctg

SEQ ID NO: 466942 - DNA, 25 bp, Homo sapien
gttactttgcatgagggcaaaccaa

SEQ ID NO: 466943 - DNA, 25 bp, Homo sapien
tattattaatgaggagttttggcag

SEQ ID NO: 466944 - DNA, 25 bp, Homo sapien
ttactttgcatgagggcaaaccaac

SEQ ID NO: 466945 - DNA, 25 bp, Homo sapien
attattaatgaggagttttggcagt

SEQ ID NO: 466946 - DNA, 25 bp, Homo sapien
gtcttgacacacattgttcaaacaa

SEQ ID NO: 466947 - DNA, 25 bp, Homo sapien
gtttctgtgttagtagtctgtcttg

SEQ ID NO: 466948 - DNA, 25 bp, Homo sapien
gtctgtcttgacacacattgttcaa

SEQ ID NO: 466949 - DNA, 25 bp, Homo sapien
caatctcaagcacttgtgtttaaaa

SEQ ID NO: 466950 - DNA, 25 bp, Homo sapien
gagataagcattaaacctattgtgc

SEQ ID NO: 466951 - DNA, 25 bp, Homo sapien
tgtgctgttaacaacgttagtggac

SEQ ID NO: 466952 - DNA, 25 bp, Homo sapien
tctgtgttttatggttgcttctgtc

SEQ ID NO: 466953 - DNA, 25 bp, Homo sapien
gactgctatacttgacattatactg

SEQ ID NO: 466954 - DNA, 25 bp, Homo sapien
actgcaattcccctcttaaaatgtg

SEQ ID NO: 466955 - DNA, 25 bp, Homo sapien
caaacgattcttagaggtacatttc

SEQ ID NO: 466956 - DNA, 25 bp, Homo sapien
tgccataactttttgcatgcacata

SEQ ID NO: 466957 - DNA, 25 bp, Homo sapien
tcttctctgtaagccagtcatcaaa

SEQ ID NO: 466958 - DNA, 25 bp, Homo sapien
tgccactaaagtgtaaccctcaagg

SEQ ID NO: 466959 - DNA, 25 bp, Homo sapien
aagtctcatagctttcttgccaagg

SEQ ID NO: 466960 - DNA, 25 bp, Homo sapien
gagtaactgaaacaaccagaggatc

SEQ ID NO: 466961 - DNA, 25 bp, Homo sapien
acattgtgcttcaggtaaagtctca

SEQ ID NO: 466962 - DNA, 25 bp, Homo sapien
ttagcacttctaaatgcctcagaag

SEQ ID NO: 466963 - DNA, 25 bp, Homo sapien
aatgcctcagaagtttggaaggaaa

SEQ ID NO: 466964 - DNA, 25 bp, Homo sapien
attctttcctaggtaagccaaggag

SEQ ID NO: 466965 - DNA, 25 bp, Homo sapien
atgcctcagaagtttggaaggaaat

SEQ ID NO: 466966 - DNA, 25 bp, Homo sapien
ttcttgtttctggttgtctccatct

SEQ ID NO: 466967 - DNA, 25 bp, Homo sapien
ctccatctcctttgaatgggcacag

SEQ ID NO: 466968 - DNA, 25 bp, Homo sapien
tgtttctggttgtctccatctcctt

SEQ ID NO: 466969 - DNA, 25 bp, Homo sapien
tctccatctcctttgaatgggcaca

SEQ ID NO: 466970 - DNA, 25 bp, Homo sapien
gctagaccagtcttgtgcggcaaag

SEQ ID NO: 466971 - DNA, 25 bp, Homo sapien
acattgacaatacgggcctccggaa

SEQ ID NO: 466972 - DNA, 25 bp, Homo sapien
cttgtgcggcaaagcttacttgaca

SEQ ID NO: 466973 - DNA, 25 bp, Homo sapien
tgccaaaagccagattattgctaga

SEQ ID NO: 466974 - DNA, 25 bp, Homo sapien
ccagaggatgttggggaatggagtt

SEQ ID NO: 466975 - DNA, 25 bp, Homo sapien
atggagttagacaatctattctcac

SEQ ID NO: 466976 - DNA, 25 bp, Homo sapien
acagtccagaggatgttggggaatg

SEQ ID NO: 466977 - DNA, 25 bp, Homo sapien
aatggagttagacaatctattctca

SEQ ID NO: 466978 - DNA, 25 bp, Homo sapien
cataaaagctacaactgtggccacg

SEQ ID NO: 466979 - DNA, 25 bp, Homo sapien
tctaatatagtttcagacagttgca

SEQ ID NO: 466980 - DNA, 25 bp, Homo sapien
tagtttcagacagttgcatatatga

SEQ ID NO: 466981 - DNA, 25 bp, Homo sapien
caactgtggccacgctgagggttga

SEQ ID NO: 466982 - DNA, 25 bp, Homo sapien
gagcacaaccaaatcccagcatata

SEQ ID NO: 466983 - DNA, 25 bp, Homo sapien
tcactttctggagcacaaccaaatc

SEQ ID NO: 466984 - DNA, 25 bp, Homo sapien
cattatagctcagtgctgttgccct

SEQ ID NO: 466985 - DNA, 25 bp, Homo sapien
ctcattatagctcagtgctgttgcc

SEQ ID NO: 466986 - DNA, 25 bp, Homo sapien
gcctggcccttttgaatgttcagga

SEQ ID NO: 466987 - DNA, 25 bp, Homo sapien
tcttgaagggcctcgttgcctggcc

SEQ ID NO: 466988 - DNA, 25 bp, Homo sapien
actgattaatcagcatgccgccttc

SEQ ID NO: 466989 - DNA, 25 bp, Homo sapien
gattgagtctgtcatgctttggaaa

SEQ ID NO: 466990 - DNA, 25 bp, Homo sapien
tatcaggtgataccattctccaaga

SEQ ID NO: 466991 - DNA, 25 bp, Homo sapien
tctccaagaatgaggtgattaggac

SEQ ID NO: 466992 - DNA, 25 bp, Homo sapien
cctagaagaccccagaaatgtgaca

SEQ ID NO: 466993 - DNA, 25 bp, Homo sapien
gatgcaggtaagctggtaagcctag

SEQ ID NO: 466994 - DNA, 25 bp, Homo sapien
cattggcagttgtacaattatgctc

SEQ ID NO: 466995 - DNA, 25 bp, Homo sapien
tcagagcctctatttgacttgagtc

SEQ ID NO: 466996 - DNA, 25 bp, Homo sapien
tgacttgagtctgccgttcgcattg

SEQ ID NO: 466997 - DNA, 25 bp, Homo sapien
gaatttgttagcatcagagcctcta

SEQ ID NO: 466998 - DNA, 25 bp, Homo sapien
aacaagtgtaagagggggctgtatt

SEQ ID NO: 466999 - DNA, 25 bp, Homo sapien
caagtgtaagagggggctgtatttt

SEQ ID NO: 467000 - DNA, 25 bp, Homo sapien
tgaacaagtgtaagagggggctgta

SEQ ID NO: 467001 - DNA, 25 bp, Homo sapien
ctgaacaagtgtaagagggggctgt

SEQ ID NO: 467002 - DNA, 25 bp, Homo sapien
tccaagacagaaccttgtcgttctg

SEQ ID NO: 467003 - DNA, 25 bp, Homo sapien
ctagcaaatagcatgtaggaaggta

SEQ ID NO: 467004 - DNA, 25 bp, Homo sapien
cacttttgtgatgtgatgagctagc

SEQ ID NO: 467005 - DNA, 25 bp, Homo sapien
cctgcctgctgtagcggcttcactt

SEQ ID NO: 467006 - DNA, 25 bp, Homo sapien
accatgttctctagaggtagcacat

SEQ ID NO: 467007 - DNA, 25 bp, Homo sapien
tttctgatatccagtgcacatattc

SEQ ID NO: 467008 - DNA, 25 bp, Homo sapien
tctgatatccagtgcacatattctt

SEQ ID NO: 467009 - DNA, 25 bp, Homo sapien
ttctgatatccagtgcacatattct

SEQ ID NO: 467010 - DNA, 25 bp, Homo sapien
ctagtttcggtgctggtgacaaatt

SEQ ID NO: 467011 - DNA, 25 bp, Homo sapien
ttggagaaatctagtttcggtgctg

SEQ ID NO: 467012 - DNA, 25 bp, Homo sapien
gaaatctagtttcggtgctggtgac

SEQ ID NO: 467013 - DNA, 25 bp, Homo sapien
aatctagtttcggtgctggtgacaa

SEQ ID NO: 467014 - DNA, 25 bp, Homo sapien
tctgaaactgagcatgtgaagctgc

SEQ ID NO: 467015 - DNA, 25 bp, Homo sapien
ctgaaactgagcatgtgaagctgct

SEQ ID NO: 467016 - DNA, 25 bp, Homo sapien
aaatctgaaactgagcatgtgaagc

SEQ ID NO: 467017 - DNA, 25 bp, Homo sapien
aatctgaaactgagcatgtgaagct

SEQ ID NO: 467018 - DNA, 25 bp, Homo sapien
ttccacttcataggctctgtaatgc

SEQ ID NO: 467019 - DNA, 25 bp, Homo sapien
aggctctgtaatgctaagtacgatc

SEQ ID NO: 467020 - DNA, 25 bp, Homo sapien
tgcattccacttcataggctctgta

SEQ ID NO: 467021 - DNA, 25 bp, Homo sapien
ctgtaatgctaagtacgatcaagat

SEQ ID NO: 467022 - DNA, 25 bp, Homo sapien
gaggaagatcgataaaggtatattc

SEQ ID NO: 467023 - DNA, 25 bp, Homo sapien
aagaggaagatcgataaaggtatat

SEQ ID NO: 467024 - DNA, 25 bp, Homo sapien
ggaagatcgataaaggtatattctc

SEQ ID NO: 467025 - DNA, 25 bp, Homo sapien
gtaaagaggaagatcgataaaggta

SEQ ID NO: 467026 - DNA, 25 bp, Homo sapien
gtacagtctctgtgttggatgcatt

SEQ ID NO: 467027 - DNA, 25 bp, Homo sapien
gaatctgtgtgtttccgtgaagcca

SEQ ID NO: 467028 - DNA, 25 bp, Homo sapien
gctgtgtagctgatatatgcaatgc

SEQ ID NO: 467029 - DNA, 25 bp, Homo sapien
aattatgcttgtggttgatcttgtg

SEQ ID NO: 467030 - DNA, 25 bp, Homo sapien
gagagtaagaatggcttagtctccg

SEQ ID NO: 467031 - DNA, 25 bp, Homo sapien
tattaattcttaatgtgctggagag

SEQ ID NO: 467032 - DNA, 25 bp, Homo sapien
caacagagtaattctgatcaaaagg

SEQ ID NO: 467033 - DNA, 25 bp, Homo sapien
taatcctctcagtatatgttgggta

SEQ ID NO: 467034 - DNA, 25 bp, Homo sapien
aggaaaatgtgatggttttcctcat

SEQ ID NO: 467035 - DNA, 25 bp, Homo sapien
tttgaggaaaatgtgatggttttcc

SEQ ID NO: 467036 - DNA, 25 bp, Homo sapien
ctttgaggaaaatgtgatggttttc

SEQ ID NO: 467037 - DNA, 25 bp, Homo sapien
tgaggaaaatgtgatggttttcctc

SEQ ID NO: 467038 - DNA, 25 bp, Homo sapien
tcataaaacagtgactgcgtttatc

SEQ ID NO: 467039 - DNA, 25 bp, Homo sapien
tcttaatgggctgctttgcatcgta

SEQ ID NO: 467040 - DNA, 25 bp, Homo sapien
tgcatcgtattctgggttaaacact

SEQ ID NO: 467041 - DNA, 25 bp, Homo sapien
tcgtattctgggttaaacacttgaa

SEQ ID NO: 467042 - DNA, 25 bp, Homo sapien
tacaaatccataattcgtgtgccag

SEQ ID NO: 467043 - DNA, 25 bp, Homo sapien
tggtggtgatgtaataggaacttcc

SEQ ID NO: 467044 - DNA, 25 bp, Homo sapien
caggacattgttgtattggtgaagg

SEQ ID NO: 467045 - DNA, 25 bp, Homo sapien
caattgtcccttgaaataaagatac

SEQ ID NO: 467046 - DNA, 25 bp, Homo sapien
gtatttctctgaactatctctctcc

SEQ ID NO: 467047 - DNA, 25 bp, Homo sapien
cagcgtcggctctttctagctcagg

SEQ ID NO: 467048 - DNA, 25 bp, Homo sapien
tattgggacacattggcttgatttc

SEQ ID NO: 467049 - DNA, 25 bp, Homo sapien
tgagcaattctaggtcattaggtcg

SEQ ID NO: 467050 - DNA, 25 bp, Homo sapien
ttgattttctagggcactcatttgg

SEQ ID NO: 467051 - DNA, 25 bp, Homo sapien
cctgggctttgtaataccaattgca

SEQ ID NO: 467052 - DNA, 25 bp, Homo sapien
tcatctttgcttcacgatttatcac

SEQ ID NO: 467053 - DNA, 25 bp, Homo sapien
tgctgagtttttatacttgtgccac

SEQ ID NO: 467054 - DNA, 25 bp, Homo sapien
tcctgaggcttcagcaatatagcag

SEQ ID NO: 467055 - DNA, 25 bp, Homo sapien
gtttgtacaattgcactattgcggg

SEQ ID NO: 467056 - DNA, 25 bp, Homo sapien
cagtagagtagtttccttctgtggg

SEQ ID NO: 467057 - DNA, 25 bp, Homo sapien
ttagcaagatgccagtactttgttt

SEQ ID NO: 467058 - DNA, 25 bp, Homo sapien
gatactgtactgctgaaaattacac

SEQ ID NO: 467059 - DNA, 25 bp, Homo sapien
tagctatgcattcagttatcctcat

SEQ ID NO: 467060 - DNA, 25 bp, Homo sapien
gcttgatagctatgcattcagttat

SEQ ID NO: 467061 - DNA, 25 bp, Homo sapien
cacatgcttgatagctatgcattca

SEQ ID NO: 467062 - DNA, 25 bp, Homo sapien
ataaacacatgcttgatagctatgc

SEQ ID NO: 467063 - DNA, 25 bp, Homo sapien
ctaatgagccctgaagactcagggg

SEQ ID NO: 467064 - DNA, 25 bp, Homo sapien
tgcatcattggctgactaatgagcc

SEQ ID NO: 467065 - DNA, 25 bp, Homo sapien
tgactaatgagccctgaagactcag

SEQ ID NO: 467066 - DNA, 25 bp, Homo sapien
atgcatcattggctgactaatgagc

SEQ ID NO: 467067 - DNA, 25 bp, Homo sapien
ggcagtaaggagctgttcagactca

SEQ ID NO: 467068 - DNA, 25 bp, Homo sapien
ctgtattcaaccactgggcagtaag

SEQ ID NO: 467069 - DNA, 25 bp, Homo sapien
tattcaaccactgggcagtaaggag

SEQ ID NO: 467070 - DNA, 25 bp, Homo sapien
ctgttcagactcagtagatggccct

SEQ ID NO: 467071 - DNA, 25 bp, Homo sapien
gaatgtttattctggctcacttagt

SEQ ID NO: 467072 - DNA, 25 bp, Homo sapien
tatgagaccatagttatagacgtgg

SEQ ID NO: 467073 - DNA, 25 bp, Homo sapien
gcaaaattgacatgccatcatctaa

SEQ ID NO: 467074 - DNA, 25 bp, Homo sapien
ggtatcatggttaaaacatcactag

SEQ ID NO: 467075 - DNA, 25 bp, Homo sapien
tgctattggctaagaatgacatcct

SEQ ID NO: 467076 - DNA, 25 bp, Homo sapien
tctagaagttcttaatgctattggc

SEQ ID NO: 467077 - DNA, 25 bp, Homo sapien
gttcaacagcacttgtgccctgatt

SEQ ID NO: 467078 - DNA, 25 bp, Homo sapien
ttaccttcgactgctgaaaatgttc

SEQ ID NO: 467079 - DNA, 25 bp, Homo sapien
gaacttttgccccaaggagtcttga

SEQ ID NO: 467080 - DNA, 25 bp, Homo sapien
tcttttacagttagcgcctgccctc

SEQ ID NO: 467081 - DNA, 25 bp, Homo sapien
gaggaactgactgtgtactagggca

SEQ ID NO: 467082 - DNA, 25 bp, Homo sapien
tccagagtggtctgaagggaaccca

SEQ ID NO: 467083 - DNA, 25 bp, Homo sapien
tggtccaatggagtccacacacagg

SEQ ID NO: 467084 - DNA, 25 bp, Homo sapien
gataaacccggcacatgctgtgaag

SEQ ID NO: 467085 - DNA, 25 bp, Homo sapien
gaagtgttcgggttgaaggctcatt

SEQ ID NO: 467086 - DNA, 25 bp, Homo sapien
gctcattcttctgtggtccaatgga

SEQ ID NO: 467087 - DNA, 25 bp, Homo sapien
agaggtgactgagcagaagttagat

SEQ ID NO: 467088 - DNA, 25 bp, Homo sapien
gaggtgactgagcagaagttagata

SEQ ID NO: 467089 - DNA, 25 bp, Homo sapien
gtgactgagcagaagttagataagg

SEQ ID NO: 467090 - DNA, 25 bp, Homo sapien
ctacaggtagaatgcagaggtgact

SEQ ID NO: 467091 - DNA, 25 bp, Homo sapien
tcttgtagaattccggacttctgga

SEQ ID NO: 467092 - DNA, 25 bp, Homo sapien
atgattcttgtagaattccggactt

SEQ ID NO: 467093 - DNA, 25 bp, Homo sapien
tgtagaattccggacttctggaatg

SEQ ID NO: 467094 - DNA, 25 bp, Homo sapien
gaattccggacttctggaatgatgt

SEQ ID NO: 467095 - DNA, 25 bp, Homo sapien
aatttacggatctattttggaggca

SEQ ID NO: 467096 - DNA, 25 bp, Homo sapien
caatcaagtgataagagcctaagtg

SEQ ID NO: 467097 - DNA, 25 bp, Homo sapien
aaaaggactcaaggatgactcaggt

SEQ ID NO: 467098 - DNA, 25 bp, Homo sapien
ccaacaggacttgctgatagattcc

SEQ ID NO: 467099 - DNA, 25 bp, Homo sapien
aagggtaatgatagacgatgttctg

SEQ ID NO: 467100 - DNA, 25 bp, Homo sapien
ctgtggtaagggagagtaggactaa

SEQ ID NO: 467101 - DNA, 25 bp, Homo sapien
tgttctgtcgaaagggctgtggtaa

SEQ ID NO: 467102 - DNA, 25 bp, Homo sapien
tgtaccaaacatattttagcccctg

SEQ ID NO: 467103 - DNA, 25 bp, Homo sapien
ttctttatctcatacagcaacaaaa

SEQ ID NO: 467104 - DNA, 25 bp, Homo sapien
tctttatctcatacagcaacaaaac

SEQ ID NO: 467105 - DNA, 25 bp, Homo sapien
cttctttatctcatacagcaacaaa

SEQ ID NO: 467106 - DNA, 25 bp, Homo sapien
tcttctttatctcatacagcaacaa

SEQ ID NO: 467107 - DNA, 25 bp, Homo sapien
tttacccagtctcccagaatatcaa

SEQ ID NO: 467108 - DNA, 25 bp, Homo sapien
tacccagtctcccagaatatcaaag

SEQ ID NO: 467109 - DNA, 25 bp, Homo sapien
tcctttacccagtctcccagaatat

SEQ ID NO: 467110 - DNA, 25 bp, Homo sapien
cttcctttacccagtctcccagaat

SEQ ID NO: 467111 - DNA, 25 bp, Homo sapien
agaaacaactattgttataacttct

SEQ ID NO: 467112 - DNA, 25 bp, Homo sapien
gttataacttcttttattctggtca

SEQ ID NO: 467113 - DNA, 25 bp, Homo sapien
cccctgaagaaacaactattgttat

SEQ ID NO: 467114 - DNA, 25 bp, Homo sapien
ctgaagaaacaactattgttataac

SEQ ID NO: 467115 - DNA, 25 bp, Homo sapien
cactcagataattggtggctatagt

SEQ ID NO: 467116 - DNA, 25 bp, Homo sapien
gatttgctcagaaatagaatgttaa

SEQ ID NO: 467117 - DNA, 25 bp, Homo sapien
taaggtgaaactgcggaactcagcc

SEQ ID NO: 467118 - DNA, 25 bp, Homo sapien
tgggggattgtacggactccttatc

SEQ ID NO: 467119 - DNA, 25 bp, Homo sapien
ggacagatcaaaaattccgaggcct

SEQ ID NO: 467120 - DNA, 25 bp, Homo sapien
ccgaggctccaactcagtgcgcagg

SEQ ID NO: 467121 - DNA, 25 bp, Homo sapien
gctggctagagtttccccagggacc

SEQ ID NO: 467122 - DNA, 25 bp, Homo sapien
catctaactgcagttaaggacgaag

SEQ ID NO: 467123 - DNA, 25 bp, Homo sapien
tgaagaggagagataacaatttggg

SEQ ID NO: 467124 - DNA, 25 bp, Homo sapien
aagccatttgttgcaagatattctg

SEQ ID NO: 467125 - DNA, 25 bp, Homo sapien
tatgctgagggagatatatttggcc

SEQ ID NO: 467126 - DNA, 25 bp, Homo sapien
cagagatcttatgaaatttgaacac

SEQ ID NO: 467127 - DNA, 25 bp, Homo sapien
tggtgtttacatttttatcttcaaa

SEQ ID NO: 467128 - DNA, 25 bp, Homo sapien
aagaatcgcttcaatactggatttc

SEQ ID NO: 467129 - DNA, 25 bp, Homo sapien
tggattccaaagaatcgcttcaata

SEQ ID NO: 467130 - DNA, 25 bp, Homo sapien
gattccaaagaatcgcttcaatact

SEQ ID NO: 467131 - DNA, 25 bp, Homo sapien
tccaaagaatcgcttcaatactgga

SEQ ID NO: 467132 - DNA, 25 bp, Homo sapien
agatatgcccaggagtgtaggatgt

SEQ ID NO: 467133 - DNA, 25 bp, Homo sapien
agtgtaggatgttgttccctgctcc

SEQ ID NO: 467134 - DNA, 25 bp, Homo sapien
gagtgtaggatgttgttccctgctc

SEQ ID NO: 467135 - DNA, 25 bp, Homo sapien
cactgttcgtcttccatacctcaag

SEQ ID NO: 467136 - DNA, 25 bp, Homo sapien
tacctcaagccccagcaggttatga

SEQ ID NO: 467137 - DNA, 25 bp, Homo sapien
gcaggttatgattcacttgaccatg

SEQ ID NO: 467138 - DNA, 25 bp, Homo sapien
catgtggtggtgtgttatcactttc

SEQ ID NO: 467139 - DNA, 25 bp, Homo sapien
atttccacggcatttcaccaggctg

SEQ ID NO: 467140 - DNA, 25 bp, Homo sapien
ccacggcatttcaccaggctggaag

SEQ ID NO: 467141 - DNA, 25 bp, Homo sapien
cacggcatttcaccaggctggaaga

SEQ ID NO: 467142 - DNA, 25 bp, Homo sapien
ggcatttcaccaggctggaagatac

SEQ ID NO: 467143 - DNA, 25 bp, Homo sapien
acttctggatgtgcccctgttgcca

SEQ ID NO: 467144 - DNA, 25 bp, Homo sapien
ctgacttctggatgtgcccctgttg

SEQ ID NO: 467145 - DNA, 25 bp, Homo sapien
gcctgctccacgtttgacctgctct

SEQ ID NO: 467146 - DNA, 25 bp, Homo sapien
tctctactccagcgaaaagcctgct

SEQ ID NO: 467147 - DNA, 25 bp, Homo sapien
tgctggagggatttcaacaggttct

SEQ ID NO: 467148 - DNA, 25 bp, Homo sapien
taggtacagtacttgcaggtttctg

SEQ ID NO: 467149 - DNA, 25 bp, Homo sapien
tgcattttgctggagggatttcaac

SEQ ID NO: 467150 - DNA, 25 bp, Homo sapien
aggtccatgggcctaggtacagtac

SEQ ID NO: 467151 - DNA, 25 bp, Homo sapien
gagcagtttttaggtgccatcaaag

SEQ ID NO: 467152 - DNA, 25 bp, Homo sapien
gtttttaggtgccatcaaagatgtg

SEQ ID NO: 467153 - DNA, 25 bp, Homo sapien
ggtgccatcaaagatgtgacattga

SEQ ID NO: 467154 - DNA, 25 bp, Homo sapien
gatgtgacattgatgagcaaaataa

SEQ ID NO: 467155 - DNA, 25 bp, Homo sapien
tccattttctgtcaagctggcacaa

SEQ ID NO: 467156 - DNA, 25 bp, Homo sapien
ggctccggctgctcattaggaaata

SEQ ID NO: 467157 - DNA, 25 bp, Homo sapien
gaaatactgctgtaacacctctgag

SEQ ID NO: 467158 - DNA, 25 bp, Homo sapien
tataggtgtatcagctcaagtaact

SEQ ID NO: 467159 - DNA, 25 bp, Homo sapien
tgtaacgttgtatttaaatgacaac

SEQ ID NO: 467160 - DNA, 25 bp, Homo sapien
cataacaggttgtaacgttgtattt

SEQ ID NO: 467161 - DNA, 25 bp, Homo sapien
tgtcataacaggttgtaacgttgta

SEQ ID NO: 467162 - DNA, 25 bp, Homo sapien
cttgggtgtcataacaggttgtaac

SEQ ID NO: 467163 - DNA, 25 bp, Homo sapien
tggatagtactgttttgtcaacagc

SEQ ID NO: 467164 - DNA, 25 bp, Homo sapien
aagtggatagtactgttttgtcaac

SEQ ID NO: 467165 - DNA, 25 bp, Homo sapien
tcaagtggatagtactgttttgtca

SEQ ID NO: 467166 - DNA, 25 bp, Homo sapien
tagtactgttttgtcaacagctcca

SEQ ID NO: 467167 - DNA, 25 bp, Homo sapien
ctttcctgacaccatttccattgtc

SEQ ID NO: 467168 - DNA, 25 bp, Homo sapien
ccagtgctacagcttttcattagta

SEQ ID NO: 467169 - DNA, 25 bp, Homo sapien
tgctacagcttttcattagtattct

SEQ ID NO: 467170 - DNA, 25 bp, Homo sapien
ggctctccagtgctacagcttttca

SEQ ID NO: 467171 - DNA, 25 bp, Homo sapien
tctgggctctccagtgctacagctt

SEQ ID NO: 467172 - DNA, 25 bp, Homo sapien
gtagcgatgctgaagcatgcagtca

SEQ ID NO: 467173 - DNA, 25 bp, Homo sapien
tgtagcgatgctgaagcatgcagtc

SEQ ID NO: 467174 - DNA, 25 bp, Homo sapien
ttatgtagcgatgctgaagcatgca

SEQ ID NO: 467175 - DNA, 25 bp, Homo sapien
tatgtagcgatgctgaagcatgcag

SEQ ID NO: 467176 - DNA, 25 bp, Homo sapien
cttcaagtgacaacgacgttagatt

SEQ ID NO: 467177 - DNA, 25 bp, Homo sapien
actttttgaatgaaaccactatggg

SEQ ID NO: 467178 - DNA, 25 bp, Homo sapien
accactatggggtactctaacacca

SEQ ID NO: 467179 - DNA, 25 bp, Homo sapien
tgacaacgacgttagattttcaaaa

SEQ ID NO: 467180 - DNA, 25 bp, Homo sapien
tgtgcagcatagcgcatttgtgaaa

SEQ ID NO: 467181 - DNA, 25 bp, Homo sapien
gcagcatagcgcatttgtgaaataa

SEQ ID NO: 467182 - DNA, 25 bp, Homo sapien
taaacccatctgtacagctgattaa

SEQ ID NO: 467183 - DNA, 25 bp, Homo sapien
aacccatctgtacagctgattaaaa

SEQ ID NO: 467184 - DNA, 25 bp, Homo sapien
taaaattcttctaattccaagtctg

SEQ ID NO: 467185 - DNA, 25 bp, Homo sapien
taaattcttaacaacatctgcagtt

SEQ ID NO: 467186 - DNA, 25 bp, Homo sapien
tcatcaataaaatgcttgtaaattc

SEQ ID NO: 467187 - DNA, 25 bp, Homo sapien
tccaagtctgtaggaattaaggatt

SEQ ID NO: 467188 - DNA, 25 bp, Homo sapien
ttgggtgataatggtggctgttatc

SEQ ID NO: 467189 - DNA, 25 bp, Homo sapien
cttaggtggaggttgggtgataatg

SEQ ID NO: 467190 - DNA, 25 bp, Homo sapien
gagattgttaaagccttaggtggag

SEQ ID NO: 467191 - DNA, 25 bp, Homo sapien
aatccacagagattgttaaagcctt

SEQ ID NO: 467192 - DNA, 25 bp, Homo sapien
tttggatactacagaatgacgagcc

SEQ ID NO: 467193 - DNA, 25 bp, Homo sapien
tagccatggatttaggatggcgttg

SEQ ID NO: 467194 - DNA, 25 bp, Homo sapien
gatggcgttgggacaagttggtgcc

SEQ ID NO: 467195 - DNA, 25 bp, Homo sapien
gagcctgaaaatgattagccatgga

SEQ ID NO: 467196 - DNA, 25 bp, Homo sapien
aatttgcactcatgggtgtgaggaa

SEQ ID NO: 467197 - DNA, 25 bp, Homo sapien
ttcaattcctaatgctcctgtcagg

SEQ ID NO: 467198 - DNA, 25 bp, Homo sapien
caaccagtgaaaagagttggtactg

SEQ ID NO: 467199 - DNA, 25 bp, Homo sapien
tactggtgaacagtcagtccccaca

SEQ ID NO: 467200 - DNA, 25 bp, Homo sapien
tcctgctgtcttcaggatgtgcaca

SEQ ID NO: 467201 - DNA, 25 bp, Homo sapien
tgctgtcttcaggatgtgcacaagc

SEQ ID NO: 467202 - DNA, 25 bp, Homo sapien
cctgctgtcttcaggatgtgcacaa

SEQ ID NO: 467203 - DNA, 25 bp, Homo sapien
cctcctgctgtcttcaggatgtgca

SEQ ID NO: 467204 - DNA, 25 bp, Homo sapien
aggacagctacactgtcagtataga

SEQ ID NO: 467205 - DNA, 25 bp, Homo sapien
aaacatagaatgttatgtaccagag

SEQ ID NO: 467206 - DNA, 25 bp, Homo sapien
aaataagaaggacagctacactgtc

SEQ ID NO: 467207 - DNA, 25 bp, Homo sapien
accagagacgtacagagtgagtgag

SEQ ID NO: 467208 - DNA, 25 bp, Homo sapien
tgtctggttttagcaaaagcagagg

SEQ ID NO: 467209 - DNA, 25 bp, Homo sapien
tacgctgaaatacaggagattggtg

SEQ ID NO: 467210 - DNA, 25 bp, Homo sapien
ggtgtttcttataagccatgggtaa

SEQ ID NO: 467211 - DNA, 25 bp, Homo sapien
catggatataggagatacgctgaaa

SEQ ID NO: 467212 - DNA, 25 bp, Homo sapien
aaagcggcacagttctcccatccca

SEQ ID NO: 467213 - DNA, 25 bp, Homo sapien
ttaaagcggcacagttctcccatcc

SEQ ID NO: 467214 - DNA, 25 bp, Homo sapien
cttaaagcggcacagttctcccatc

SEQ ID NO: 467215 - DNA, 25 bp, Homo sapien
taaagcggcacagttctcccatccc

SEQ ID NO: 467216 - DNA, 25 bp, Homo sapien
cattccctgtatgctaatgtgccag

SEQ ID NO: 467217 - DNA, 25 bp, Homo sapien
atgctaatgtgccagcaccaaggtc

SEQ ID NO: 467218 - DNA, 25 bp, Homo sapien
ctgacattccctgtatgctaatgtg

SEQ ID NO: 467219 - DNA, 25 bp, Homo sapien
ccctgtatgctaatgtgccagcacc

SEQ ID NO: 467220 - DNA, 25 bp, Homo sapien
ttccttccctgtagagtgatgcata

SEQ ID NO: 467221 - DNA, 25 bp, Homo sapien
cagctgtgcccaggcatctatgcag

SEQ ID NO: 467222 - DNA, 25 bp, Homo sapien
aacagctgtgcccaggcatctatgc

SEQ ID NO: 467223 - DNA, 25 bp, Homo sapien
ttccctgtagagtgatgcatactga

SEQ ID NO: 467224 - DNA, 25 bp, Homo sapien
gatgaatgacaggtatggagactcc

SEQ ID NO: 467225 - DNA, 25 bp, Homo sapien
tgaatgacaggtatggagactcctc

SEQ ID NO: 467226 - DNA, 25 bp, Homo sapien
aatgacaggtatggagactcctcca

SEQ ID NO: 467227 - DNA, 25 bp, Homo sapien
tttgatgaatgacaggtatggagac

SEQ ID NO: 467228 - DNA, 25 bp, Homo sapien
gttcaggagggtaacatggacagag

SEQ ID NO: 467229 - DNA, 25 bp, Homo sapien
gaacagtcgacttcacaaagctcat

SEQ ID NO: 467230 - DNA, 25 bp, Homo sapien
ctgaacagtcgacttcacaaagctc

SEQ ID NO: 467231 - DNA, 25 bp, Homo sapien
cagtcgacttcacaaagctcattta

SEQ ID NO: 467232 - DNA, 25 bp, Homo sapien
tgctgaaagtttgcaagctgacagc

SEQ ID NO: 467233 - DNA, 25 bp, Homo sapien
aagtttgcaagctgacagctttgga

SEQ ID NO: 467234 - DNA, 25 bp, Homo sapien
ctgaaagtttgcaagctgacagctt

SEQ ID NO: 467235 - DNA, 25 bp, Homo sapien
tctgctgaaagtttgcaagctgaca

SEQ ID NO: 467236 - DNA, 25 bp, Homo sapien
agacctctgtttcgctcttttgaag

SEQ ID NO: 467237 - DNA, 25 bp, Homo sapien
ctggaaatgccaaactgcttctttc

SEQ ID NO: 467238 - DNA, 25 bp, Homo sapien
gaaaatgtagcttttcatgcctgat

SEQ ID NO: 467239 - DNA, 25 bp, Homo sapien
gctgcttctaaagagttagacctct

SEQ ID NO: 467240 - DNA, 25 bp, Homo sapien
tataatcaagtctagctcctttagg

SEQ ID NO: 467241 - DNA, 25 bp, Homo sapien
tgccgctggcatcatatttgaaaaa

SEQ ID NO: 467242 - DNA, 25 bp, Homo sapien
tgaattatcaaagtcatcttgctgt

SEQ ID NO: 467243 - DNA, 25 bp, Homo sapien
cttgctgtttgaatgccgctggcat

SEQ ID NO: 467244 - DNA, 25 bp, Homo sapien
tcaagtggtgagagctgtctgattt

SEQ ID NO: 467245 - DNA, 25 bp, Homo sapien
tatgtgagagggatccaatatcaag

SEQ ID NO: 467246 - DNA, 25 bp, Homo sapien
gagctgtctgatttcctggacaata

SEQ ID NO: 467247 - DNA, 25 bp, Homo sapien
gatccaatatcaagtggtgagagct

SEQ ID NO: 467248 - DNA, 25 bp, Homo sapien
aaatcgatccatggttaaagctttt

SEQ ID NO: 467249 - DNA, 25 bp, Homo sapien
gaaacgtggtgtgaaaatcgatcca

SEQ ID NO: 467250 - DNA, 25 bp, Homo sapien
aatcgatccatggttaaagcttttc

SEQ ID NO: 467251 - DNA, 25 bp, Homo sapien
acgtggtgtgaaaatcgatccatgg

SEQ ID NO: 467252 - DNA, 25 bp, Homo sapien
gaagtgttcgtattccacagagtct

SEQ ID NO: 467253 - DNA, 25 bp, Homo sapien
cagagaagtgttcgtattccacaga

SEQ ID NO: 467254 - DNA, 25 bp, Homo sapien
tgttcgtattccacagagtcttcta

SEQ ID NO: 467255 - DNA, 25 bp, Homo sapien
atcagagaagtgttcgtattccaca

SEQ ID NO: 467256 - DNA, 25 bp, Homo sapien
aatacggttgttctccaacaaagag

SEQ ID NO: 467257 - DNA, 25 bp, Homo sapien
ccaacaaagagatatccattctgta

SEQ ID NO: 467258 - DNA, 25 bp, Homo sapien
gttctccaacaaagagatatccatt

SEQ ID NO: 467259 - DNA, 25 bp, Homo sapien
ggttgttctccaacaaagagatatc

SEQ ID NO: 467260 - DNA, 25 bp, Homo sapien
cctgtggaatattgccttctactaa

SEQ ID NO: 467261 - DNA, 25 bp, Homo sapien
tttgccctgtggaatattgccttct

SEQ ID NO: 467262 - DNA, 25 bp, Homo sapien
catcgtactttgtcggtattgaaaa

SEQ ID NO: 467263 - DNA, 25 bp, Homo sapien
tattgccttctactaatccaaatcc

SEQ ID NO: 467264 - DNA, 25 bp, Homo sapien
cactccataggactttgcaacataa

SEQ ID NO: 467265 - DNA, 25 bp, Homo sapien
cacttagtttaagagaatcgatggc

SEQ ID NO: 467266 - DNA, 25 bp, Homo sapien
gaggacttgacacaggcaacctacg

SEQ ID NO: 467267 - DNA, 25 bp, Homo sapien
gaaaatcttcacaagcattgaaatg

SEQ ID NO: 467268 - DNA, 25 bp, Homo sapien
ctgtttcctgttttacagcattcat

SEQ ID NO: 467269 - DNA, 25 bp, Homo sapien
catagtggatcctttatcacacatt

SEQ ID NO: 467270 - DNA, 25 bp, Homo sapien
aacatagtggatcctttatcacaca

SEQ ID NO: 467271 - DNA, 25 bp, Homo sapien
atggaacatagtggatcctttatca

SEQ ID NO: 467272 - DNA, 25 bp, Homo sapien
ggaacatagtggatcctttatcaca

SEQ ID NO: 467273 - DNA, 25 bp, Homo sapien
cccatcacgaaggtcattgtggtca

SEQ ID NO: 467274 - DNA, 25 bp, Homo sapien
tggtcatgcgcagctttgtaaggta

SEQ ID NO: 467275 - DNA, 25 bp, Homo sapien
gtcattgtggtcatgcgcagctttg

SEQ ID NO: 467276 - DNA, 25 bp, Homo sapien
ccccatcacgaaggtcattgtggtc

SEQ ID NO: 467277 - DNA, 25 bp, Homo sapien
tttgttgttgatgagaaggagggat

SEQ ID NO: 467278 - DNA, 25 bp, Homo sapien
gagaaggagggatatggataccagc

SEQ ID NO: 467279 - DNA, 25 bp, Homo sapien
cttgggcaataacttaataaagcct

SEQ ID NO: 467280 - DNA, 25 bp, Homo sapien
ggatatggataccagcatcaaaact

SEQ ID NO: 467281 - DNA, 25 bp, Homo sapien
ttcttgcagtcatgcagaaattgca

SEQ ID NO: 467282 - DNA, 25 bp, Homo sapien
ttgcagtcatgcagaaattgcaatt

SEQ ID NO: 467283 - DNA, 25 bp, Homo sapien
cttgtaaaatagcatactaaggaat

SEQ ID NO: 467284 - DNA, 25 bp, Homo sapien
gaaacttgtaaaatagcatactaag

SEQ ID NO: 467285 - DNA, 25 bp, Homo sapien
tttatcttgcaataggaaccatgga

SEQ ID NO: 467286 - DNA, 25 bp, Homo sapien
gctaggccagtgaggtacaatttaa

SEQ ID NO: 467287 - DNA, 25 bp, Homo sapien
caagtgcaagtaacctaaggcaagg

SEQ ID NO: 467288 - DNA, 25 bp, Homo sapien
caggcaagcaataattagtagaagg

SEQ ID NO: 467289 - DNA, 25 bp, Homo sapien
tagttatcgttagtcagtcaccctg

SEQ ID NO: 467290 - DNA, 25 bp, Homo sapien
caagcttgttaccatctgaaatttc

SEQ ID NO: 467291 - DNA, 25 bp, Homo sapien
caaatgagctatcctgatgcctggc

SEQ ID NO: 467292 - DNA, 25 bp, Homo sapien
aaattttgtaccagtcatgcaaatg

SEQ ID NO: 467293 - DNA, 25 bp, Homo sapien
accaaacttgagagataatgcccag

SEQ ID NO: 467294 - DNA, 25 bp, Homo sapien
aatatattcagatgagccttctgga

SEQ ID NO: 467295 - DNA, 25 bp, Homo sapien
taactggcaagttggagtcaaggac

SEQ ID NO: 467296 - DNA, 25 bp, Homo sapien
tctggtccagatgagatgtgtaact

SEQ ID NO: 467297 - DNA, 25 bp, Homo sapien
gtgactattcaccaatgtactccaa

SEQ ID NO: 467298 - DNA, 25 bp, Homo sapien
ggtgactattcaccaatgtactcca

SEQ ID NO: 467299 - DNA, 25 bp, Homo sapien
ctattcaccaatgtactccaactac

SEQ ID NO: 467300 - DNA, 25 bp, Homo sapien
gactattcaccaatgtactccaact

SEQ ID NO: 467301 - DNA, 25 bp, Homo sapien
ttgggggactctgccgtcccctctg

SEQ ID NO: 467302 - DNA, 25 bp, Homo sapien
tctgccccactaagcgtacacagcc

SEQ ID NO: 467303 - DNA, 25 bp, Homo sapien
tcccctctgccccactaagcgtaca

SEQ ID NO: 467304 - DNA, 25 bp, Homo sapien
taagcgtacacagccccgtctgttc

SEQ ID NO: 467305 - DNA, 25 bp, Homo sapien
gattcaatacagtggaaacccgcat

SEQ ID NO: 467306 - DNA, 25 bp, Homo sapien
tcctgatcatgactaaattcttaca

SEQ ID NO: 467307 - DNA, 25 bp, Homo sapien
ctgtgaggaaacatcaataagctga

SEQ ID NO: 467308 - DNA, 25 bp, Homo sapien
aacccgcatttttggacaagaactg

SEQ ID NO: 467309 - DNA, 25 bp, Homo sapien
tttatcagaggctcggtcaggtctg

SEQ ID NO: 467310 - DNA, 25 bp, Homo sapien
ggtcaggtctgttacatttcccctg

SEQ ID NO: 467311 - DNA, 25 bp, Homo sapien
caaaactaatgggactatagagaag

SEQ ID NO: 467312 - DNA, 25 bp, Homo sapien
tgcacatgggaacgggcacatccat

SEQ ID NO: 467313 - DNA, 25 bp, Homo sapien
tcatatctccagtataattcacaca

SEQ ID NO: 467314 - DNA, 25 bp, Homo sapien
gtaactcattattggctatcccttg

SEQ ID NO: 467315 - DNA, 25 bp, Homo sapien
tagtgtccaagaatggtaacatggg

SEQ ID NO: 467316 - DNA, 25 bp, Homo sapien
catgcctggctgtatcttaagtcat

SEQ ID NO: 467317 - DNA, 25 bp, Homo sapien
agttttgttctagcctttctaggag

SEQ ID NO: 467318 - DNA, 25 bp, Homo sapien
tgtgagttggaggtctgtattgggt

SEQ ID NO: 467319 - DNA, 25 bp, Homo sapien
ctagtacttgtatagtacagcaata

SEQ ID NO: 467320 - DNA, 25 bp, Homo sapien
tagtacagcaatataacataagcag

SEQ ID NO: 467321 - DNA, 25 bp, Homo sapien
tctgtattgggtaacttatggatga

SEQ ID NO: 467322 - DNA, 25 bp, Homo sapien
cactggaagtgcgagatactgtttc

SEQ ID NO: 467323 - DNA, 25 bp, Homo sapien
cacgtttcaaggtgagggttgtgct

SEQ ID NO: 467324 - DNA, 25 bp, Homo sapien
tctctaattaaagaccatcacctgg

SEQ ID NO: 467325 - DNA, 25 bp, Homo sapien
tgtagtgggctgagttaaacaggta

SEQ ID NO: 467326 - DNA, 25 bp, Homo sapien
acaacctgtggtctgtggttagcca

SEQ ID NO: 467327 - DNA, 25 bp, Homo sapien
ggcaacaacctgtggtctgtggtta

SEQ ID NO: 467328 - DNA, 25 bp, Homo sapien
caacaacctgtggtctgtggttagc

SEQ ID NO: 467329 - DNA, 25 bp, Homo sapien
caacctgtggtctgtggttagccat

SEQ ID NO: 467330 - DNA, 25 bp, Homo sapien
tcttcctgttggttgcttgtagtca

SEQ ID NO: 467331 - DNA, 25 bp, Homo sapien
ttcttcctgttggttgcttgtagtc

SEQ ID NO: 467332 - DNA, 25 bp, Homo sapien
cttcctgttggttgcttgtagtcat

SEQ ID NO: 467333 - DNA, 25 bp, Homo sapien
atgcaacgctaaaacatatagcaaa

SEQ ID NO: 467334 - DNA, 25 bp, Homo sapien
ttccatgcaacgctaaaacatatag

SEQ ID NO: 467335 - DNA, 25 bp, Homo sapien
ccatgcaacgctaaaacatatagca

SEQ ID NO: 467336 - DNA, 25 bp, Homo sapien
tccatgcaacgctaaaacatatagc

SEQ ID NO: 467337 - DNA, 25 bp, Homo sapien
ctgtagtatttcagtgttgtaatgt

SEQ ID NO: 467338 - DNA, 25 bp, Homo sapien
ttttgcttttaactcaagctgtcct

SEQ ID NO: 467339 - DNA, 25 bp, Homo sapien
ccctgtagtatttcagtgttgtaat

SEQ ID NO: 467340 - DNA, 25 bp, Homo sapien
aaccctgtagtatttcagtgttgta

SEQ ID NO: 467341 - DNA, 25 bp, Homo sapien
gcaccatatggatatctgcagcaca

SEQ ID NO: 467342 - DNA, 25 bp, Homo sapien
gggcagcaccatatggatatctgca

SEQ ID NO: 467343 - DNA, 25 bp, Homo sapien
gcttacttgtcatgtccatatgggc

SEQ ID NO: 467344 - DNA, 25 bp, Homo sapien
aagctctgatggaacggcttacttg

SEQ ID NO: 467345 - DNA, 25 bp, Homo sapien
cctatgtcctgtttcgtctgtgcta

SEQ ID NO: 467346 - DNA, 25 bp, Homo sapien
tcgtctgtgctatttgtggctttca

SEQ ID NO: 467347 - DNA, 25 bp, Homo sapien
ctgtttcgtctgtgctatttgtggc

SEQ ID NO: 467348 - DNA, 25 bp, Homo sapien
gctgtttcttgtcctatgtcctgtt

SEQ ID NO: 467349 - DNA, 25 bp, Homo sapien
ttcttgggaactacagagaaggctt

SEQ ID NO: 467350 - DNA, 25 bp, Homo sapien
tcttttgtcacatgactccaaagca

SEQ ID NO: 467351 - DNA, 25 bp, Homo sapien
aggttgtttgttctgttgacacttc

SEQ ID NO: 467352 - DNA, 25 bp, Homo sapien
actctgagcattggttgtatttgtt

SEQ ID NO: 467353 - DNA, 25 bp, Homo sapien
gttgacacttctgttatccactctg

SEQ ID NO: 467354 - DNA, 25 bp, Homo sapien
acacttctgttatccactctgagca

SEQ ID NO: 467355 - DNA, 25 bp, Homo sapien
gtggcagagggtaagggtgaggagc

SEQ ID NO: 467356 - DNA, 25 bp, Homo sapien
cagagggtaagggtgaggagctgca

SEQ ID NO: 467357 - DNA, 25 bp, Homo sapien
cagtggcagagggtaagggtgagga

SEQ ID NO: 467358 - DNA, 25 bp, Homo sapien
ggcagagggtaagggtgaggagctg

SEQ ID NO: 467359 - DNA, 25 bp, Homo sapien
tgaaggggcccttgttctgcttgag

SEQ ID NO: 467360 - DNA, 25 bp, Homo sapien
ttgcaagaccataaacacaggaatg

SEQ ID NO: 467361 - DNA, 25 bp, Homo sapien
ctagagattgcaagaccataaacac

SEQ ID NO: 467362 - DNA, 25 bp, Homo sapien
tgttctgcttgagtacaagcctatg

SEQ ID NO: 467363 - DNA, 25 bp, Homo sapien
tgtttagaatattctcggattgtag

SEQ ID NO: 467364 - DNA, 25 bp, Homo sapien
cggattgtaggtgtagtttgcctgt

SEQ ID NO: 467365 - DNA, 25 bp, Homo sapien
caacattaatatgtctggatgtcag

SEQ ID NO: 467366 - DNA, 25 bp, Homo sapien
gcaacattaatatgtctggatgtca

SEQ ID NO: 467367 - DNA, 25 bp, Homo sapien
ggtataacttattcaggctacaaat

SEQ ID NO: 467368 - DNA, 25 bp, Homo sapien
caacataaaatgtgatgctcagtga

SEQ ID NO: 467369 - DNA, 25 bp, Homo sapien
taattaggccgcattaaggaaagtg

SEQ ID NO: 467370 - DNA, 25 bp, Homo sapien
tcatagcatgggtacatagacaaca

SEQ ID NO: 467371 - DNA, 25 bp, Homo sapien
cttcattgactttgaatgaggcagg

SEQ ID NO: 467372 - DNA, 25 bp, Homo sapien
gaagtgtcactcagagatacttgca

SEQ ID NO: 467373 - DNA, 25 bp, Homo sapien
ttgactttgaatgaggcaggttgct

SEQ ID NO: 467374 - DNA, 25 bp, Homo sapien
gaatgcagcctgaagtgtcactcag

SEQ ID NO: 467375 - DNA, 25 bp, Homo sapien
aaagagttattgatgcagaatggat

SEQ ID NO: 467376 - DNA, 25 bp, Homo sapien
aatacagacactttgtaaagagtta

SEQ ID NO: 467377 - DNA, 25 bp, Homo sapien
tgtaaagagttattgatgcagaatg

SEQ ID NO: 467378 - DNA, 25 bp, Homo sapien
aaatacagacactttgtaaagagtt

SEQ ID NO: 467379 - DNA, 25 bp, Homo sapien
ggcaagcgtagactctctccaggga

SEQ ID NO: 467380 - DNA, 25 bp, Homo sapien
caaagaggtcactttaatgtaaggc

SEQ ID NO: 467381 - DNA, 25 bp, Homo sapien
tattaacacggctgtgaacatgagt

SEQ ID NO: 467382 - DNA, 25 bp, Homo sapien
ctgggccctgactgtttagattgta

SEQ ID NO: 467383 - DNA, 25 bp, Homo sapien
ctttcattgcattaaacgttaatat

SEQ ID NO: 467384 - DNA, 25 bp, Homo sapien
ttcattgcattaaacgttaatatcc

SEQ ID NO: 467385 - DNA, 25 bp, Homo sapien
gaaacccatgaagagatgtgcaaag

SEQ ID NO: 467386 - DNA, 25 bp, Homo sapien
cagacacccacaaccagaaacccat

SEQ ID NO: 467387 - DNA, 25 bp, Homo sapien
tcctcttggagttcagtggctctct

SEQ ID NO: 467388 - DNA, 25 bp, Homo sapien
cttggagttcagtggctctctttgg

SEQ ID NO: 467389 - DNA, 25 bp, Homo sapien
cctcttggagttcagtggctctctt

SEQ ID NO: 467390 - DNA, 25 bp, Homo sapien
ggagttcagtggctctctttggagc

SEQ ID NO: 467391 - DNA, 25 bp, Homo sapien
tctataataagagcagcacagactt

SEQ ID NO: 467392 - DNA, 25 bp, Homo sapien
gccttgtattgctataggagctccc

SEQ ID NO: 467393 - DNA, 25 bp, Homo sapien
ttttcctgacacaaaagaggctttg

SEQ ID NO: 467394 - DNA, 25 bp, Homo sapien
cgtgctcacctgacgaatgcagctt

SEQ ID NO: 467395 - DNA, 25 bp, Homo sapien
caacacaaacatccccatatgtatt

SEQ ID NO: 467396 - DNA, 25 bp, Homo sapien
atgtattcatgggtatagacctgct

SEQ ID NO: 467397 - DNA, 25 bp, Homo sapien
tatagacctgctgtctatttgaact

SEQ ID NO: 467398 - DNA, 25 bp, Homo sapien
attgtatagcccctgtttgttccag

SEQ ID NO: 467399 - DNA, 25 bp, Homo sapien
gagagtaataaaacttatcagctag

SEQ ID NO: 467400 - DNA, 25 bp, Homo sapien
cagctagctcaatcaaacacatcag

SEQ ID NO: 467401 - DNA, 25 bp, Homo sapien
acttatcagctagctcaatcaaaca

SEQ ID NO: 467402 - DNA, 25 bp, Homo sapien
taaaacttatcagctagctcaatca

SEQ ID NO: 467403 - DNA, 25 bp, Homo sapien
tgcacagaactttgtatcacctcca

SEQ ID NO: 467404 - DNA, 25 bp, Homo sapien
tatgtgcacagaactttgtatcacc

SEQ ID NO: 467405 - DNA, 25 bp, Homo sapien
tgtgcacagaactttgtatcacctc

SEQ ID NO: 467406 - DNA, 25 bp, Homo sapien
gtgcacagaactttgtatcacctcc

SEQ ID NO: 467407 - DNA, 25 bp, Homo sapien
catatccacttatagagctggcatc

SEQ ID NO: 467408 - DNA, 25 bp, Homo sapien
ttcatatccacttatagagctggca

SEQ ID NO: 467409 - DNA, 25 bp, Homo sapien
atatccacttatagagctggcatcc

SEQ ID NO: 467410 - DNA, 25 bp, Homo sapien
tcatatccacttatagagctggcat

SEQ ID NO: 467411 - DNA, 25 bp, Homo sapien
ttaatttccagtgttgttccctgtg

SEQ ID NO: 467412 - DNA, 25 bp, Homo sapien
gatagaatggtttagacaccaagca

SEQ ID NO: 467413 - DNA, 25 bp, Homo sapien
tccctgtgtcatttgatagaatggt

SEQ ID NO: 467414 - DNA, 25 bp, Homo sapien
gttgttaaacaagctgtatgcctta

SEQ ID NO: 467415 - DNA, 25 bp, Homo sapien
aattcacagagatctgaatgcggat

SEQ ID NO: 467416 - DNA, 25 bp, Homo sapien
ctccataaattcacagagatctgaa

SEQ ID NO: 467417 - DNA, 25 bp, Homo sapien
taaattcacagagatctgaatgcgg

SEQ ID NO: 467418 - DNA, 25 bp, Homo sapien
ccataaattcacagagatctgaatg

SEQ ID NO: 467419 - DNA, 25 bp, Homo sapien
tttggttcctgaaatgaaattgtgc

SEQ ID NO: 467420 - DNA, 25 bp, Homo sapien
ttttggttcctgaaatgaaattgtg

SEQ ID NO: 467421 - DNA, 25 bp, Homo sapien
gttcctgaaatgaaattgtgctttt

SEQ ID NO: 467422 - DNA, 25 bp, Homo sapien
tggttcctgaaatgaaattgtgctt

SEQ ID NO: 467423 - DNA, 25 bp, Homo sapien
tgaccatcatgttcagctttgatgc

SEQ ID NO: 467424 - DNA, 25 bp, Homo sapien
tcatggaacagcatgaccatcatgt

SEQ ID NO: 467425 - DNA, 25 bp, Homo sapien
gcatgaccatcatgttcagctttga

SEQ ID NO: 467426 - DNA, 25 bp, Homo sapien
atggaacagcatgaccatcatgttc

SEQ ID NO: 467427 - DNA, 25 bp, Homo sapien
aagaggcttttatatttactaggag

SEQ ID NO: 467428 - DNA, 25 bp, Homo sapien
agaggcttttatatttactaggagg

SEQ ID NO: 467429 - DNA, 25 bp, Homo sapien
acctggagagctcccttgactccaa

SEQ ID NO: 467430 - DNA, 25 bp, Homo sapien
gcaacctggagagctcccttgactc

SEQ ID NO: 467431 - DNA, 25 bp, Homo sapien
tacgggctgcttaatatcttccttg

SEQ ID NO: 467432 - DNA, 25 bp, Homo sapien
gctaagatcagtataggccctcctc

SEQ ID NO: 467433 - DNA, 25 bp, Homo sapien
caacttatctgcaatgcactgggag

SEQ ID NO: 467434 - DNA, 25 bp, Homo sapien
actttaacagtatcagccgggcgtg

SEQ ID NO: 467435 - DNA, 25 bp, Homo sapien
caaagaccttgtcatatgatccacg

SEQ ID NO: 467436 - DNA, 25 bp, Homo sapien
ccctatgtgaatgggttccctgaag

SEQ ID NO: 467437 - DNA, 25 bp, Homo sapien
ggtaactgtcctagaaagtccatgt

SEQ ID NO: 467438 - DNA, 25 bp, Homo sapien
taataaataactgctgtgatccagg

SEQ ID NO: 467439 - DNA, 25 bp, Homo sapien
gtgttaaaacactatctggtttcag

SEQ ID NO: 467440 - DNA, 25 bp, Homo sapien
tgttaaaacactatctggtttcaga

SEQ ID NO: 467441 - DNA, 25 bp, Homo sapien
taggacttttggaaaattgatcttc

SEQ ID NO: 467442 - DNA, 25 bp, Homo sapien
ggacttttggaaaattgatcttcat

SEQ ID NO: 467443 - DNA, 25 bp, Homo sapien
ctgttcttgaaaggagcctgctacg

SEQ ID NO: 467444 - DNA, 25 bp, Homo sapien
aaggagcctgctacgtacagcttca

SEQ ID NO: 467445 - DNA, 25 bp, Homo sapien
caccacttagtaatttatgtggata

SEQ ID NO: 467446 - DNA, 25 bp, Homo sapien
tgctacgtacagcttcaccacttag

SEQ ID NO: 467447 - DNA, 25 bp, Homo sapien
gaaggatcaagctggtagtacagcc

SEQ ID NO: 467448 - DNA, 25 bp, Homo sapien
tcatgtcgcttgtgctggccaggtg

SEQ ID NO: 467449 - DNA, 25 bp, Homo sapien
cactggtgcttgtctgttgccacaa

SEQ ID NO: 467450 - DNA, 25 bp, Homo sapien
gatggcactagggtatcatgtcgct

SEQ ID NO: 467451 - DNA, 25 bp, Homo sapien
ggtatcaggcgttaagtacaagcca

SEQ ID NO: 467452 - DNA, 25 bp, Homo sapien
tcagagggtcgctcgctttcagcgc

SEQ ID NO: 467453 - DNA, 25 bp, Homo sapien
gcccctcggaagcaaagttcgcagt

SEQ ID NO: 467454 - DNA, 25 bp, Homo sapien
gagattccaaattctgcggtcccca

SEQ ID NO: 467455 - DNA, 25 bp, Homo sapien
taacacagggttaggaatatgaccc

SEQ ID NO: 467456 - DNA, 25 bp, Homo sapien
tccttgcagtagaaaatacgctttg

SEQ ID NO: 467457 - DNA, 25 bp, Homo sapien
tgctactaatcaggtacaacacagg

SEQ ID NO: 467458 - DNA, 25 bp, Homo sapien
tatagctcaaatggcgtaattccca

SEQ ID NO: 467459 - DNA, 25 bp, Homo sapien
tgttagcatagccattaaggacacc

SEQ ID NO: 467460 - DNA, 25 bp, Homo sapien
gaatttctcccttacatgctttgca

SEQ ID NO: 467461 - DNA, 25 bp, Homo sapien
gcctcatcccctggtgagggacaaa

SEQ ID NO: 467462 - DNA, 25 bp, Homo sapien
caagtaatctgcaactagtccatag

SEQ ID NO: 467463 - DNA, 25 bp, Homo sapien
taatcgtagttttaatcttctcagc

SEQ ID NO: 467464 - DNA, 25 bp, Homo sapien
gaaccaagcgagattttcaccttct

SEQ ID NO: 467465 - DNA, 25 bp, Homo sapien
tgatcaagttcaggacaaattgttg

SEQ ID NO: 467466 - DNA, 25 bp, Homo sapien
caaatgagccacaggtgtataacag

SEQ ID NO: 467467 - DNA, 25 bp, Homo sapien
tgcggctagaagtaggtgaaactgt

SEQ ID NO: 467468 - DNA, 25 bp, Homo sapien
cattctgagacctcgttactttacc

SEQ ID NO: 467469 - DNA, 25 bp, Homo sapien
tcggaataaggacagtggttatcat

SEQ ID NO: 467470 - DNA, 25 bp, Homo sapien
cattgtggtttttgagttgcggcta

SEQ ID NO: 467471 - DNA, 25 bp, Homo sapien
taccactctcttcgacttcttcccc

SEQ ID NO: 467472 - DNA, 25 bp, Homo sapien
taaaatgcctagtgaagttctcttc

SEQ ID NO: 467473 - DNA, 25 bp, Homo sapien
caaactaagtagagtcctttggaga

SEQ ID NO: 467474 - DNA, 25 bp, Homo sapien
ggaaattatcccgatgaaagctgta

SEQ ID NO: 467475 - DNA, 25 bp, Homo sapien
caattaagttgcctaagagcagtgc

SEQ ID NO: 467476 - DNA, 25 bp, Homo sapien
ggacaattaagttgcctaagagcag

SEQ ID NO: 467477 - DNA, 25 bp, Homo sapien
ttaaggacaattaagttgcctaaga

SEQ ID NO: 467478 - DNA, 25 bp, Homo sapien
taagttgcctaagagcagtgcatgc

SEQ ID NO: 467479 - DNA, 25 bp, Homo sapien
gtttcaactcaagtcgccttgaaaa

SEQ ID NO: 467480 - DNA, 25 bp, Homo sapien
ctgtcctggtctgttgtttcaactc

SEQ ID NO: 467481 - DNA, 25 bp, Homo sapien
gccaattcttagttggtgaatgaaa

SEQ ID NO: 467482 - DNA, 25 bp, Homo sapien
ggctttagataaagcttgcatgcca

SEQ ID NO: 467483 - DNA, 25 bp, Homo sapien
cataaattaccatagtgtgttttgc

SEQ ID NO: 467484 - DNA, 25 bp, Homo sapien
gggcagccattatactcgctttctg

SEQ ID NO: 467485 - DNA, 25 bp, Homo sapien
taaattaccatagtgtgttttgctg

SEQ ID NO: 467486 - DNA, 25 bp, Homo sapien
tctataatttgattgggcagccatt

SEQ ID NO: 467487 - DNA, 25 bp, Homo sapien
ttcttttcaattattcccagcaaaa

SEQ ID NO: 467488 - DNA, 25 bp, Homo sapien
tcttttcaattattcccagcaaaaa

SEQ ID NO: 467489 - DNA, 25 bp, Homo sapien
acgatctcaaggtgacgtcccacag

SEQ ID NO: 467490 - DNA, 25 bp, Homo sapien
cgatctcaaggtgacgtcccacagt

SEQ ID NO: 467491 - DNA, 25 bp, Homo sapien
aacaaggaagccagttggagttcca

SEQ ID NO: 467492 - DNA, 25 bp, Homo sapien
caaaacctccaaagtcgtgaagcca

SEQ ID NO: 467493 - DNA, 25 bp, Homo sapien
tctgtgattaggaatgagaattagg

SEQ ID NO: 467494 - DNA, 25 bp, Homo sapien
ttgattctgtgattaggaatgagaa

SEQ ID NO: 467495 - DNA, 25 bp, Homo sapien
gattctgtgattaggaatgagaatt

SEQ ID NO: 467496 - DNA, 25 bp, Homo sapien
tgtgattaggaatgagaattaggtc

SEQ ID NO: 467497 - DNA, 25 bp, Homo sapien
agaaagccatttggcaaatagctct

SEQ ID NO: 467498 - DNA, 25 bp, Homo sapien
gctctttcagactagctcattgaaa

SEQ ID NO: 467499 - DNA, 25 bp, Homo sapien
ccatttggcaaatagctctttcaga

SEQ ID NO: 467500 - DNA, 25 bp, Homo sapien
tagctctttcagactagctcattga

SEQ ID NO: 467501 - DNA, 25 bp, Homo sapien
tttctctgccacatcgttctgccat

SEQ ID NO: 467502 - DNA, 25 bp, Homo sapien
tctgcgggcttgctggtctgcttct

SEQ ID NO: 467503 - DNA, 25 bp, Homo sapien
gataacttttggagcatgaacacag

SEQ ID NO: 467504 - DNA, 25 bp, Homo sapien
tgccatccttctgctggtctgcggg

SEQ ID NO: 467505 - DNA, 25 bp, Homo sapien
tagttaggagagaatcaatgcttct

SEQ ID NO: 467506 - DNA, 25 bp, Homo sapien
atagttaggagagaatcaatgcttc

SEQ ID NO: 467507 - DNA, 25 bp, Homo sapien
cacactcagcagaacaagggaccat

SEQ ID NO: 467508 - DNA, 25 bp, Homo sapien
gggcacactcagcagaacaagggac

SEQ ID NO: 467509 - DNA, 25 bp, Homo sapien
acagctgattgggagtctctgccga

SEQ ID NO: 467510 - DNA, 25 bp, Homo sapien
catagccggaacaaagaggatttct

SEQ ID NO: 467511 - DNA, 25 bp, Homo sapien
gattgggagtctctgccgaatgcca

SEQ ID NO: 467512 - DNA, 25 bp, Homo sapien
ggatttctatagatcaggctacagc

SEQ ID NO: 467513 - DNA, 25 bp, Homo sapien
gaagatttccagtgcaatcctgaga

SEQ ID NO: 467514 - DNA, 25 bp, Homo sapien
caaggactctgggaatctattggat

SEQ ID NO: 467515 - DNA, 25 bp, Homo sapien
tgtgtgtccatcgaaaaaccagtat

SEQ ID NO: 467516 - DNA, 25 bp, Homo sapien
gataaagcccacctctgtaactaag

SEQ ID NO: 467517 - DNA, 25 bp, Homo sapien
tgaactcaacacttgccccttaact

SEQ ID NO: 467518 - DNA, 25 bp, Homo sapien
gtttctctcctgaactcaacacttg

SEQ ID NO: 467519 - DNA, 25 bp, Homo sapien
gccaacagccttatccaatctattg

SEQ ID NO: 467520 - DNA, 25 bp, Homo sapien
tccaatctattgtcagtttctctcc

SEQ ID NO: 467521 - DNA, 25 bp, Homo sapien
cataacatagaataagttggagtcc

SEQ ID NO: 467522 - DNA, 25 bp, Homo sapien
catagaataagttggagtcctgagc

SEQ ID NO: 467523 - DNA, 25 bp, Homo sapien
aacatagaataagttggagtcctga

SEQ ID NO: 467524 - DNA, 25 bp, Homo sapien
agaataagttggagtcctgagcttg

SEQ ID NO: 467525 - DNA, 25 bp, Homo sapien
tcactacgaggagaaacctaatcaa

SEQ ID NO: 467526 - DNA, 25 bp, Homo sapien
tctcactacgaggagaaacctaatc

SEQ ID NO: 467527 - DNA, 25 bp, Homo sapien
gtctctcactacgaggagaaaccta

SEQ ID NO: 467528 - DNA, 25 bp, Homo sapien
tctctcactacgaggagaaacctaa

SEQ ID NO: 467529 - DNA, 25 bp, Homo sapien
gtctctggtagttactggtgcccat

SEQ ID NO: 467530 - DNA, 25 bp, Homo sapien
tgtctctggtagttactggtgccca

SEQ ID NO: 467531 - DNA, 25 bp, Homo sapien
tgtgtctctggtagttactggtgcc

SEQ ID NO: 467532 - DNA, 25 bp, Homo sapien
ctgaggttcagctgtgaggttttgt

SEQ ID NO: 467533 - DNA, 25 bp, Homo sapien
tcagctcaatgacataccaggcaaa

SEQ ID NO: 467534 - DNA, 25 bp, Homo sapien
aagcagcagagaatatgactctgga

SEQ ID NO: 467535 - DNA, 25 bp, Homo sapien
caggcaaattgtacttggttatcag

SEQ ID NO: 467536 - DNA, 25 bp, Homo sapien
tagattggtgttaaagggttcacag

SEQ ID NO: 467537 - DNA, 25 bp, Homo sapien
aatgtccagacactccagcgaaggt

SEQ ID NO: 467538 - DNA, 25 bp, Homo sapien
ggatcattccgtctcacatagctgc

SEQ ID NO: 467539 - DNA, 25 bp, Homo sapien
tgcaaataagcacagtttagcctcc

SEQ ID NO: 467540 - DNA, 25 bp, Homo sapien
catagctgcataaggtactacaggc

SEQ ID NO: 467541 - DNA, 25 bp, Homo sapien
gcgacccaacaagctatacaactat

SEQ ID NO: 467542 - DNA, 25 bp, Homo sapien
tgaccacaacactccacagctttaa

SEQ ID NO: 467543 - DNA, 25 bp, Homo sapien
tccctcaagagctagaccaagcact

SEQ ID NO: 467544 - DNA, 25 bp, Homo sapien
taaagtgtgctgatcaaagaggttg

SEQ ID NO: 467545 - DNA, 25 bp, Homo sapien
ggtcagtatgagacaccactttgga

SEQ ID NO: 467546 - DNA, 25 bp, Homo sapien
gatataccccgaacatgccacaagt

SEQ ID NO: 467547 - DNA, 25 bp, Homo sapien
cacaagtcctgcttaagttgctgga

SEQ ID NO: 467548 - DNA, 25 bp, Homo sapien
gccatattggtgttatctgcaggga

SEQ ID NO: 467549 - DNA, 25 bp, Homo sapien
ttcaccttcccatagccttccacct

SEQ ID NO: 467550 - DNA, 25 bp, Homo sapien
taagtctgacaagtgctttaacagc

SEQ ID NO: 467551 - DNA, 25 bp, Homo sapien
taacagcactatttatgtgttgctc

SEQ ID NO: 467552 - DNA, 25 bp, Homo sapien
ttcttgtctggtgattttatattca

SEQ ID NO: 467553 - DNA, 25 bp, Homo sapien
aattcttgtcccatagaattgctca

SEQ ID NO: 467554 - DNA, 25 bp, Homo sapien
gtcccatagaattgctcaaagttta

SEQ ID NO: 467555 - DNA, 25 bp, Homo sapien
gttattccaattcttgtcccataga

SEQ ID NO: 467556 - DNA, 25 bp, Homo sapien
tcttgtcccatagaattgctcaaag

SEQ ID NO: 467557 - DNA, 25 bp, Homo sapien
tacttctgattgatgagttttatca

SEQ ID NO: 467558 - DNA, 25 bp, Homo sapien
gtggagccattgagaaaccatcatc

SEQ ID NO: 467559 - DNA, 25 bp, Homo sapien
tcatcatggatctaatctgctcttc

SEQ ID NO: 467560 - DNA, 25 bp, Homo sapien
tatcataatacctagtggctgagga

SEQ ID NO: 467561 - DNA, 25 bp, Homo sapien
tttgtctccataacaggtatgaagg

SEQ ID NO: 467562 - DNA, 25 bp, Homo sapien
ttgtctccataacaggtatgaaggg

SEQ ID NO: 467563 - DNA, 25 bp, Homo sapien
tgtctccataacaggtatgaaggga

SEQ ID NO: 467564 - DNA, 25 bp, Homo sapien
ttcgccgtacctttatggtgaccat

SEQ ID NO: 467565 - DNA, 25 bp, Homo sapien
tttcgccgtacctttatggtgacca

SEQ ID NO: 467566 - DNA, 25 bp, Homo sapien
gaataatttacatgagtccagagta

SEQ ID NO: 467567 - DNA, 25 bp, Homo sapien
tcacagctttgacattcggtagaat

SEQ ID NO: 467568 - DNA, 25 bp, Homo sapien
ctttgacattcggtagaataattta

SEQ ID NO: 467569 - DNA, 25 bp, Homo sapien
cagctttgacattcggtagaataat

SEQ ID NO: 467570 - DNA, 25 bp, Homo sapien
tcattgaatatccagttcccatcta

SEQ ID NO: 467571 - DNA, 25 bp, Homo sapien
gctcattgaatatccagttcccatc

SEQ ID NO: 467572 - DNA, 25 bp, Homo sapien
ctgctcattgaatatccagttccca

SEQ ID NO: 467573 - DNA, 25 bp, Homo sapien
cattgaatatccagttcccatctag

SEQ ID NO: 467574 - DNA, 25 bp, Homo sapien
tgcctgcatttgctgaatcccactt

SEQ ID NO: 467575 - DNA, 25 bp, Homo sapien
catttgctgaatcccacttagccat

SEQ ID NO: 467576 - DNA, 25 bp, Homo sapien
ctgcatttgctgaatcccacttagc

SEQ ID NO: 467577 - DNA, 25 bp, Homo sapien
ctgtagggagctgcctgcatttgct

SEQ ID NO: 467578 - DNA, 25 bp, Homo sapien
taaattgcactatccttaagcaatg

SEQ ID NO: 467579 - DNA, 25 bp, Homo sapien
gcaccgatgaaattaatctgataaa

SEQ ID NO: 467580 - DNA, 25 bp, Homo sapien
tcacaggtcattgcaccgatgaaat

SEQ ID NO: 467581 - DNA, 25 bp, Homo sapien
tatccttaagcaatgcatcatcatc

SEQ ID NO: 467582 - DNA, 25 bp, Homo sapien
ctcttcttggttgtagctcaatctg

SEQ ID NO: 467583 - DNA, 25 bp, Homo sapien
tcttcttggttgtagctcaatctgt

SEQ ID NO: 467584 - DNA, 25 bp, Homo sapien
ttcttggttgtagctcaatctgtta

SEQ ID NO: 467585 - DNA, 25 bp, Homo sapien
cctcttcttggttgtagctcaatct

SEQ ID NO: 467586 - DNA, 25 bp, Homo sapien
gatagataagcgtaaggaaaaattc

SEQ ID NO: 467587 - DNA, 25 bp, Homo sapien
cttttgagtaatagttgaaatcttc

SEQ ID NO: 467588 - DNA, 25 bp, Homo sapien
taatagttgaaatcttctatgccag

SEQ ID NO: 467589 - DNA, 25 bp, Homo sapien
ccagaaataattagagcttgagctg

SEQ ID NO: 467590 - DNA, 25 bp, Homo sapien
ggccactttaactgttggctccagg

SEQ ID NO: 467591 - DNA, 25 bp, Homo sapien
cagggccacactatcacagacacaa

SEQ ID NO: 467592 - DNA, 25 bp, Homo sapien
gggccacactatcacagacacaatc

SEQ ID NO: 467593 - DNA, 25 bp, Homo sapien
gaggaagaggccactttaactgttg

SEQ ID NO: 467594 - DNA, 25 bp, Homo sapien
tcatcaaaatgaaccagaacaggat

SEQ ID NO: 467595 - DNA, 25 bp, Homo sapien
cttcatcaaaatgaaccagaacagg

SEQ ID NO: 467596 - DNA, 25 bp, Homo sapien
caaaatgaaccagaacaggatgctt

SEQ ID NO: 467597 - DNA, 25 bp, Homo sapien
atcaaaatgaaccagaacaggatgc

SEQ ID NO: 467598 - DNA, 25 bp, Homo sapien
ggtttgatgaagaaccacattgttc

SEQ ID NO: 467599 - DNA, 25 bp, Homo sapien
gagctgcagaggtttgatgaagaac

SEQ ID NO: 467600 - DNA, 25 bp, Homo sapien
tgatgaagaaccacattgttcttgt

SEQ ID NO: 467601 - DNA, 25 bp, Homo sapien
tgcagaggtttgatgaagaaccaca

SEQ ID NO: 467602 - DNA, 25 bp, Homo sapien
gttatgtgccctgaggagcgactcc

SEQ ID NO: 467603 - DNA, 25 bp, Homo sapien
aatgtgtaactcttgtcgttgaggt

SEQ ID NO: 467604 - DNA, 25 bp, Homo sapien
gagcgactcctgcttggagatattc

SEQ ID NO: 467605 - DNA, 25 bp, Homo sapien
tattcatagtcagaggaaatcagga

SEQ ID NO: 467606 - DNA, 25 bp, Homo sapien
tcccgtgttcttggaaatgcatata

SEQ ID NO: 467607 - DNA, 25 bp, Homo sapien
tgaaaacaaaatccctagacaaatg

SEQ ID NO: 467608 - DNA, 25 bp, Homo sapien
tctcagcaacataataccaagtgaa

SEQ ID NO: 467609 - DNA, 25 bp, Homo sapien
taaaatgagtatagctttcccgtgt

SEQ ID NO: 467610 - DNA, 25 bp, Homo sapien
aaagatctgatgactgtagatgtgc

SEQ ID NO: 467611 - DNA, 25 bp, Homo sapien
tattcggttgtattggtctatgtgc

SEQ ID NO: 467612 - DNA, 25 bp, Homo sapien
aacacgagagtgcagataactctgc

SEQ ID NO: 467613 - DNA, 25 bp, Homo sapien
tggttgtgcattctcatctacagta

SEQ ID NO: 467614 - DNA, 25 bp, Homo sapien
taaggtgctatagcactctctagca

SEQ ID NO: 467615 - DNA, 25 bp, Homo sapien
cctcacagttgccaacatcataaac

SEQ ID NO: 467616 - DNA, 25 bp, Homo sapien
tccctccacacatggtataaggtgc

SEQ ID NO: 467617 - DNA, 25 bp, Homo sapien
cagttgcgtgagctgacaaggcacc

SEQ ID NO: 467618 - DNA, 25 bp, Homo sapien
tgttcatgcacactgctaatccaag

SEQ ID NO: 467619 - DNA, 25 bp, Homo sapien
ttagccttagttctccactgctggg

SEQ ID NO: 467620 - DNA, 25 bp, Homo sapien
agccactcttgcctttagccttagt

SEQ ID NO: 467621 - DNA, 25 bp, Homo sapien
cagaggcactgtggaggactccaac

SEQ ID NO: 467622 - DNA, 25 bp, Homo sapien
ctggcctcaagattcagcatggcca

SEQ ID NO: 467623 - DNA, 25 bp, Homo sapien
tcaccactgagaacatcgacagcgg

SEQ ID NO: 467624 - DNA, 25 bp, Homo sapien
cacagctttgccaccaaaagatcca

SEQ ID NO: 467625 - DNA, 25 bp, Homo sapien
tttcaccactaaagactctgcagca

SEQ ID NO: 467626 - DNA, 25 bp, Homo sapien
agatccagtcgtctgcctttgcagg

SEQ ID NO: 467627 - DNA, 25 bp, Homo sapien
catccatatttgatcttccaagacc

SEQ ID NO: 467628 - DNA, 25 bp, Homo sapien
tccatatttgatcttccaagacctg

SEQ ID NO: 467629 - DNA, 25 bp, Homo sapien
catatttgatcttccaagacctgca

SEQ ID NO: 467630 - DNA, 25 bp, Homo sapien
tcatccatatttgatcttccaagac

SEQ ID NO: 467631 - DNA, 25 bp, Homo sapien
aatcacagtataactgcccaccttc

SEQ ID NO: 467632 - DNA, 25 bp, Homo sapien
agcagccaatgtcctgcaatctgtg

SEQ ID NO: 467633 - DNA, 25 bp, Homo sapien
tcacagtataactgcccaccttcat

SEQ ID NO: 467634 - DNA, 25 bp, Homo sapien
agaatcacagtataactgcccacct

SEQ ID NO: 467635 - DNA, 25 bp, Homo sapien
ctaagattcctggtattgctgtgtt

SEQ ID NO: 467636 - DNA, 25 bp, Homo sapien
taagattcctggtattgctgtgttc

SEQ ID NO: 467637 - DNA, 25 bp, Homo sapien
gctgatttggccaactgggattgta

SEQ ID NO: 467638 - DNA, 25 bp, Homo sapien
tttagcactcattggcacatgcaag

SEQ ID NO: 467639 - DNA, 25 bp, Homo sapien
tatctcaaacttagaaccaagccct

SEQ ID NO: 467640 - DNA, 25 bp, Homo sapien
tgtacaatgtgtctataccaatatg

SEQ ID NO: 467641 - DNA, 25 bp, Homo sapien
aaactgttttattgacacctccgca

SEQ ID NO: 467642 - DNA, 25 bp, Homo sapien
cacctccgcattgataagattttgc

SEQ ID NO: 467643 - DNA, 25 bp, Homo sapien
tgctcatgaatagaactatcattgg

SEQ ID NO: 467644 - DNA, 25 bp, Homo sapien
ctatcattggaagcagataagtgca

SEQ ID NO: 467645 - DNA, 25 bp, Homo sapien
ccatggctctgtgtgacttggacac

SEQ ID NO: 467646 - DNA, 25 bp, Homo sapien
tgtgagattccatggctctgtgtga

SEQ ID NO: 467647 - DNA, 25 bp, Homo sapien
attccatggctctgtgtgacttgga

SEQ ID NO: 467648 - DNA, 25 bp, Homo sapien
gagattccatggctctgtgtgactt

SEQ ID NO: 467649 - DNA, 25 bp, Homo sapien
accagatacatggaccgggacaacc

SEQ ID NO: 467650 - DNA, 25 bp, Homo sapien
cgggacaacccagcgaggacgggct

SEQ ID NO: 467651 - DNA, 25 bp, Homo sapien
atacatggaccgggacaacccagcg

SEQ ID NO: 467652 - DNA, 25 bp, Homo sapien
cagatacatggaccgggacaaccca

SEQ ID NO: 467653 - DNA, 25 bp, Homo sapien
gaaggtgaattgtaacacaatctaa

SEQ ID NO: 467654 - DNA, 25 bp, Homo sapien
ccaaaactaagaagacagagaggtg

SEQ ID NO: 467655 - DNA, 25 bp, Homo sapien
aaaactaagaagacagagaggtgag

SEQ ID NO: 467656 - DNA, 25 bp, Homo sapien
acaccaaaactaagaagacagagag

SEQ ID NO: 467657 - DNA, 25 bp, Homo sapien
ctgagatggctcacagacaaaatta

SEQ ID NO: 467658 - DNA, 25 bp, Homo sapien
aagctgagatggctcacagacaaaa

SEQ ID NO: 467659 - DNA, 25 bp, Homo sapien
gagaagctgagatggctcacagaca

SEQ ID NO: 467660 - DNA, 25 bp, Homo sapien
agaagctgagatggctcacagacaa

SEQ ID NO: 467661 - DNA, 25 bp, Homo sapien
ccagagggcgctttgaatgtctctg

SEQ ID NO: 467662 - DNA, 25 bp, Homo sapien
agagggcgctttgaatgtctctgtt

SEQ ID NO: 467663 - DNA, 25 bp, Homo sapien
caccacaccactcctggggggtggt

SEQ ID NO: 467664 - DNA, 25 bp, Homo sapien
tcactgacgccaccacaccactcct

SEQ ID NO: 467665 - DNA, 25 bp, Homo sapien
tgagattcgactgttctgctgcgca

SEQ ID NO: 467666 - DNA, 25 bp, Homo sapien
catgagattcgactgttctgctgcg

SEQ ID NO: 467667 - DNA, 25 bp, Homo sapien
ggatggaacagatcatgagattcga

SEQ ID NO: 467668 - DNA, 25 bp, Homo sapien
aaggatggaacagatcatgagattc

SEQ ID NO: 467669 - DNA, 25 bp, Homo sapien
ttgtatatgacgcatatcagcctct

SEQ ID NO: 467670 - DNA, 25 bp, Homo sapien
tttgtatatgacgcatatcagcctc

SEQ ID NO: 467671 - DNA, 25 bp, Homo sapien
tgtatatgacgcatatcagcctctt

SEQ ID NO: 467672 - DNA, 25 bp, Homo sapien
ccatctgcccacggcactctcctgt

SEQ ID NO: 467673 - DNA, 25 bp, Homo sapien
tgcccacggcactctcctgtttgtc

SEQ ID NO: 467674 - DNA, 25 bp, Homo sapien
atctgcccacggcactctcctgttt

SEQ ID NO: 467675 - DNA, 25 bp, Homo sapien
tctgcccacggcactctcctgtttg

SEQ ID NO: 467676 - DNA, 25 bp, Homo sapien
tttatgactcctttgaggaagttga

SEQ ID NO: 467677 - DNA, 25 bp, Homo sapien
accccgaatttatgactcctttgag

SEQ ID NO: 467678 - DNA, 25 bp, Homo sapien
ccccgaatttatgactcctttgagg

SEQ ID NO: 467679 - DNA, 25 bp, Homo sapien
atgactcctttgaggaagttgagag

SEQ ID NO: 467680 - DNA, 25 bp, Homo sapien
ccagcgaggaccggctgtcattctg

SEQ ID NO: 467681 - DNA, 25 bp, Homo sapien
gcccagcgaggaccggctgtcattc

SEQ ID NO: 467682 - DNA, 25 bp, Homo sapien
agcccagcgaggaccggctgtcatt

SEQ ID NO: 467683 - DNA, 25 bp, Homo sapien
agcgaggaccggctgtcattctgga

SEQ ID NO: 467684 - DNA, 25 bp, Homo sapien
ggatgatgagcaggttccccagcac

SEQ ID NO: 467685 - DNA, 25 bp, Homo sapien
ctgacggccaggatgatgagcaggt

SEQ ID NO: 467686 - DNA, 25 bp, Homo sapien
caggatgatgagcaggttccccagc

SEQ ID NO: 467687 - DNA, 25 bp, Homo sapien
gccaggatgatgagcaggttcccca

SEQ ID NO: 467688 - DNA, 25 bp, Homo sapien
ctgtgagactggatgtccacagtca

SEQ ID NO: 467689 - DNA, 25 bp, Homo sapien
tgtgagactggatgtccacagtcat

SEQ ID NO: 467690 - DNA, 25 bp, Homo sapien
ctgctgtgagactggatgtccacag

SEQ ID NO: 467691 - DNA, 25 bp, Homo sapien
tcaggaacatgtctctcttccatgc

SEQ ID NO: 467692 - DNA, 25 bp, Homo sapien
caaaactagaaagccacagaaacac

SEQ ID NO: 467693 - DNA, 25 bp, Homo sapien
aaagccacagaaacacgggttcatg

SEQ ID NO: 467694 - DNA, 25 bp, Homo sapien
catgatggctgaatgatatagaggg

SEQ ID NO: 467695 - DNA, 25 bp, Homo sapien
gaaacacgggttcatgatggctgaa

SEQ ID NO: 467696 - DNA, 25 bp, Homo sapien
agttgcgcagctggacgtctaaaag

SEQ ID NO: 467697 - DNA, 25 bp, Homo sapien
caatcaagttgcgcagctggacgtc

SEQ ID NO: 467698 - DNA, 25 bp, Homo sapien
tcaagttgcgcagctggacgtctaa

SEQ ID NO: 467699 - DNA, 25 bp, Homo sapien
caagttgcgcagctggacgtctaaa

SEQ ID NO: 467700 - DNA, 25 bp, Homo sapien
atcagcaaaccactgacaggtgaga

SEQ ID NO: 467701 - DNA, 25 bp, Homo sapien
ataaaatcagcaaaccactgacagg

SEQ ID NO: 467702 - DNA, 25 bp, Homo sapien
cagcaaaccactgacaggtgagaca

SEQ ID NO: 467703 - DNA, 25 bp, Homo sapien
aaaatcagcaaaccactgacaggtg

SEQ ID NO: 467704 - DNA, 25 bp, Homo sapien
ggccactgcagcctttctcggggaa

SEQ ID NO: 467705 - DNA, 25 bp, Homo sapien
gccgccgcaggacacttttaatatc

SEQ ID NO: 467706 - DNA, 25 bp, Homo sapien
actgaggccactgcagcctttctcg

SEQ ID NO: 467707 - DNA, 25 bp, Homo sapien
ttagaccgtgctgctgtgcggccgc

SEQ ID NO: 467708 - DNA, 25 bp, Homo sapien
cattagaggtttcatgccatggtct

SEQ ID NO: 467709 - DNA, 25 bp, Homo sapien
tgctctatcattagaggtttcatgc

SEQ ID NO: 467710 - DNA, 25 bp, Homo sapien
tctaagatcgtaagagtttgaattt

SEQ ID NO: 467711 - DNA, 25 bp, Homo sapien
tgtaattctctaagatcgtaagagt

SEQ ID NO: 467712 - DNA, 25 bp, Homo sapien
tcttttgtagaaccatctgtgctgt

SEQ ID NO: 467713 - DNA, 25 bp, Homo sapien
attctcatcaacagagattgaggac

SEQ ID NO: 467714 - DNA, 25 bp, Homo sapien
caacagagattgaggactgacttac

SEQ ID NO: 467715 - DNA, 25 bp, Homo sapien
ttttgtagaaccatctgtgctgtat

SEQ ID NO: 467716 - DNA, 25 bp, Homo sapien
aaccgttgaagacaggttaatgacg

SEQ ID NO: 467717 - DNA, 25 bp, Homo sapien
tcttttctgagggatcttctgtaac

SEQ ID NO: 467718 - DNA, 25 bp, Homo sapien
tcttctgtaaccgttgaagacaggt

SEQ ID NO: 467719 - DNA, 25 bp, Homo sapien
gagggatcttctgtaaccgttgaag

SEQ ID NO: 467720 - DNA, 25 bp, Homo sapien
tgaggatgtgttgcagtacaaatct

SEQ ID NO: 467721 - DNA, 25 bp, Homo sapien
tgaaaagcagctgctaataagtccc

SEQ ID NO: 467722 - DNA, 25 bp, Homo sapien
ctgagttggcgggtaaggattccac

SEQ ID NO: 467723 - DNA, 25 bp, Homo sapien
gcagaactaacgagatattgaccac

SEQ ID NO: 467724 - DNA, 25 bp, Homo sapien
ctagtgcaaacatgcattataattc

SEQ ID NO: 467725 - DNA, 25 bp, Homo sapien
gcaaacatgcattataattcgtggg

SEQ ID NO: 467726 - DNA, 25 bp, Homo sapien
tagtgcaaacatgcattataattcg

SEQ ID NO: 467727 - DNA, 25 bp, Homo sapien
gtgcaaacatgcattataattcgtg

SEQ ID NO: 467728 - DNA, 25 bp, Homo sapien
aattccaaaagtaagcacactgctg

SEQ ID NO: 467729 - DNA, 25 bp, Homo sapien
tagagcagatactgttaatgtctca

SEQ ID NO: 467730 - DNA, 25 bp, Homo sapien
cttttctctggatgaacgacctcta

SEQ ID NO: 467731 - DNA, 25 bp, Homo sapien
tatctctttcataaggtagagcaga

SEQ ID NO: 467732 - DNA, 25 bp, Homo sapien
ctttctgccctttagtcttggacat

SEQ ID NO: 467733 - DNA, 25 bp, Homo sapien
cacactttccatgtgttcttcattc

SEQ ID NO: 467734 - DNA, 25 bp, Homo sapien
tctttctgccctttagtcttggaca

SEQ ID NO: 467735 - DNA, 25 bp, Homo sapien
tcacactttccatgtgttcttcatt

SEQ ID NO: 467736 - DNA, 25 bp, Homo sapien
tgaagcaaatccacagctacgttaa

SEQ ID NO: 467737 - DNA, 25 bp, Homo sapien
tctgatttcgtgcattaaaagcagg

SEQ ID NO: 467738 - DNA, 25 bp, Homo sapien
aaaagtaagtacataataccctctg

SEQ ID NO: 467739 - DNA, 25 bp, Homo sapien
aagcaggttattcaactgaagcaaa

SEQ ID NO: 467740 - DNA, 25 bp, Homo sapien
ttactcatttctattttgtcaatca

SEQ ID NO: 467741 - DNA, 25 bp, Homo sapien
tgctttcatgtcctcaattctatct

SEQ ID NO: 467742 - DNA, 25 bp, Homo sapien
tttcatgtcctcaattctatctaca

SEQ ID NO: 467743 - DNA, 25 bp, Homo sapien
ttcctctgctttcatgtcctcaatt

SEQ ID NO: 467744 - DNA, 25 bp, Homo sapien
cttcctctgctttcatgtcctcaat

SEQ ID NO: 467745 - DNA, 25 bp, Homo sapien
accaggagggcctgtttacaaggag

SEQ ID NO: 467746 - DNA, 25 bp, Homo sapien
tatttaccaggagggcctgtttaca

SEQ ID NO: 467747 - DNA, 25 bp, Homo sapien
ttacaaggagactaaaattgccttc

SEQ ID NO: 467748 - DNA, 25 bp, Homo sapien
caggagggcctgtttacaaggagac

SEQ ID NO: 467749 - DNA, 25 bp, Homo sapien
aagtagacgaaggtcaggaacatca

SEQ ID NO: 467750 - DNA, 25 bp, Homo sapien
tcctctctggcacaggatagatgag

SEQ ID NO: 467751 - DNA, 25 bp, Homo sapien
taagcggagtcttgaggtccctcac

SEQ ID NO: 467752 - DNA, 25 bp, Homo sapien
gatagatgagatctctaagcggagt

SEQ ID NO: 467753 - DNA, 25 bp, Homo sapien
ttttcaaatatgaagaagatcaaca

SEQ ID NO: 467754 - DNA, 25 bp, Homo sapien
ttcaaatatgaagaagatcaacaat

SEQ ID NO: 467755 - DNA, 25 bp, Homo sapien
tgccaaggacaaaacggcccctctg

SEQ ID NO: 467756 - DNA, 25 bp, Homo sapien
gctccattactgtctgcctgttctt

SEQ ID NO: 467757 - DNA, 25 bp, Homo sapien
cagtgggggctttcttatcttccct

SEQ ID NO: 467758 - DNA, 25 bp, Homo sapien
aacaaacaggatgtctcagtggggg

SEQ ID NO: 467759 - DNA, 25 bp, Homo sapien
ctcagtgggggctttcttatcttcc

SEQ ID NO: 467760 - DNA, 25 bp, Homo sapien
ctaacaaacaggatgtctcagtggg

SEQ ID NO: 467761 - DNA, 25 bp, Homo sapien
taggatacaagcaggtaaagtatcc

SEQ ID NO: 467762 - DNA, 25 bp, Homo sapien
acctttaggatacaagcaggtaaag

SEQ ID NO: 467763 - DNA, 25 bp, Homo sapien
gatacaagcaggtaaagtatccctg

SEQ ID NO: 467764 - DNA, 25 bp, Homo sapien
gcaggtaaagtatccctgctgctca

SEQ ID NO: 467765 - DNA, 25 bp, Homo sapien
gagactaggtgaacagtgtcaaaaa

SEQ ID NO: 467766 - DNA, 25 bp, Homo sapien
aggtgagactaggtgaacagtgtca

SEQ ID NO: 467767 - DNA, 25 bp, Homo sapien
agattttatgaacatctggttgagg

SEQ ID NO: 467768 - DNA, 25 bp, Homo sapien
acatctggttgaggtgagactaggt

SEQ ID NO: 467769 - DNA, 25 bp, Homo sapien
tatccacatcgctttatttctgcca

SEQ ID NO: 467770 - DNA, 25 bp, Homo sapien
aaagctaatacttttcaatgatgac

SEQ ID NO: 467771 - DNA, 25 bp, Homo sapien
atccacatcgctttatttctgccaa

SEQ ID NO: 467772 - DNA, 25 bp, Homo sapien
ttatccacatcgctttatttctgcc

SEQ ID NO: 467773 - DNA, 25 bp, Homo sapien
cttcatccaatgtgtgtgacaactc

SEQ ID NO: 467774 - DNA, 25 bp, Homo sapien
tccaatgtgtgtgacaactcagaca

SEQ ID NO: 467775 - DNA, 25 bp, Homo sapien
catccaatgtgtgtgacaactcaga

SEQ ID NO: 467776 - DNA, 25 bp, Homo sapien
ccaatgtgtgtgacaactcagacat

SEQ ID NO: 467777 - DNA, 25 bp, Homo sapien
ttcagatatatcacaagtcagtcta

SEQ ID NO: 467778 - DNA, 25 bp, Homo sapien
ctaacatgtattgttcaaattcaga

SEQ ID NO: 467779 - DNA, 25 bp, Homo sapien
taccataacaacatgaatcataact

SEQ ID NO: 467780 - DNA, 25 bp, Homo sapien
caaattcagatatatcacaagtcag

SEQ ID NO: 467781 - DNA, 25 bp, Homo sapien
aagcttctatgtctattaccaggca

SEQ ID NO: 467782 - DNA, 25 bp, Homo sapien
aggccatagacaccaggctctaagc

SEQ ID NO: 467783 - DNA, 25 bp, Homo sapien
gacaccaggctctaagcttctatgt

SEQ ID NO: 467784 - DNA, 25 bp, Homo sapien
caggctctaagcttctatgtctatt

SEQ ID NO: 467785 - DNA, 25 bp, Homo sapien
catccttacggcattttagaagcat

SEQ ID NO: 467786 - DNA, 25 bp, Homo sapien
tttaagcctatcatccttacggcat

SEQ ID NO: 467787 - DNA, 25 bp, Homo sapien
taagcctatcatccttacggcattt

SEQ ID NO: 467788 - DNA, 25 bp, Homo sapien
ctatcatccttacggcattttagaa

SEQ ID NO: 467789 - DNA, 25 bp, Homo sapien
cacagtgtcatcagacttgttctga

SEQ ID NO: 467790 - DNA, 25 bp, Homo sapien
tcctctgaacacagtgtcatcagac

SEQ ID NO: 467791 - DNA, 25 bp, Homo sapien
gtaattcctctgaacacagtgtcat

SEQ ID NO: 467792 - DNA, 25 bp, Homo sapien
tgaacacagtgtcatcagacttgtt

SEQ ID NO: 467793 - DNA, 25 bp, Homo sapien
atttgtccccttcgcatctcatcat

SEQ ID NO: 467794 - DNA, 25 bp, Homo sapien
agattttggtttggacacatcccag

SEQ ID NO: 467795 - DNA, 25 bp, Homo sapien
cctctcatcctcagtaagattttgg

SEQ ID NO: 467796 - DNA, 25 bp, Homo sapien
tagttataccaattcaactgtctct

SEQ ID NO: 467797 - DNA, 25 bp, Homo sapien
tctggtttttcaacaccagaaatct

SEQ ID NO: 467798 - DNA, 25 bp, Homo sapien
ttttcaacaccagaaatctgcttcc

SEQ ID NO: 467799 - DNA, 25 bp, Homo sapien
tgacccaatacctcatctggttttt

SEQ ID NO: 467800 - DNA, 25 bp, Homo sapien
ttcaacaccagaaatctgcttcctg

SEQ ID NO: 467801 - DNA, 25 bp, Homo sapien
tctctgctgctataaactctcactt

SEQ ID NO: 467802 - DNA, 25 bp, Homo sapien
tagactgacagcgttgacagctcca

SEQ ID NO: 467803 - DNA, 25 bp, Homo sapien
aaatggtgagcttatcatgagaatg

SEQ ID NO: 467804 - DNA, 25 bp, Homo sapien
gacagctccagatcttgtatgggaa

SEQ ID NO: 467805 - DNA, 25 bp, Homo sapien
ccaatgctaatatgccaaaggctct

SEQ ID NO: 467806 - DNA, 25 bp, Homo sapien
gacagtctgggtccatgaaactttg

SEQ ID NO: 467807 - DNA, 25 bp, Homo sapien
tggattgtgccaaagctaaaggact

SEQ ID NO: 467808 - DNA, 25 bp, Homo sapien
ctgataaacaggaccaaatttccct

SEQ ID NO: 467809 - DNA, 25 bp, Homo sapien
ctcagcatcaactggtgagttattc

SEQ ID NO: 467810 - DNA, 25 bp, Homo sapien
cagattcctgggcaatagccaatgg

SEQ ID NO: 467811 - DNA, 25 bp, Homo sapien
tggtttttggcccagcaaatagaaa

SEQ ID NO: 467812 - DNA, 25 bp, Homo sapien
tagccaatggtcttggtttttggcc

SEQ ID NO: 467813 - DNA, 25 bp, Homo sapien
tttacttatgtgagtaaatcattaa

SEQ ID NO: 467814 - DNA, 25 bp, Homo sapien
atttacttatgtgagtaaatcatta

SEQ ID NO: 467815 - DNA, 25 bp, Homo sapien
atggaagccccatttacttaaacag

SEQ ID NO: 467816 - DNA, 25 bp, Homo sapien
agttgaaacagagaataaaagtcat

SEQ ID NO: 467817 - DNA, 25 bp, Homo sapien
cagaagttgaaacagagaataaaag

SEQ ID NO: 467818 - DNA, 25 bp, Homo sapien
aagttgaaacagagaataaaagtca

SEQ ID NO: 467819 - DNA, 25 bp, Homo sapien
gaagttgaaacagagaataaaagtc

SEQ ID NO: 467820 - DNA, 25 bp, Homo sapien
atgctgagcatttttggcacgagca

SEQ ID NO: 467821 - DNA, 25 bp, Homo sapien
ttgatgccctgagcatcctttactt

SEQ ID NO: 467822 - DNA, 25 bp, Homo sapien
ctgagcatttttggcacgagcattt

SEQ ID NO: 467823 - DNA, 25 bp, Homo sapien
gatgccctgagcatcctttacttct

SEQ ID NO: 467824 - DNA, 25 bp, Homo sapien
ctaaaatgaaggttgaccaaggtca

SEQ ID NO: 467825 - DNA, 25 bp, Homo sapien
caaatatggcaaagatatgctgatc

SEQ ID NO: 467826 - DNA, 25 bp, Homo sapien
gatatgctgatcatcaactctttcc

SEQ ID NO: 467827 - DNA, 25 bp, Homo sapien
aggttgaccaaggtcaaatatggca

SEQ ID NO: 467828 - DNA, 25 bp, Homo sapien
tcttcctcgtatgtcagtgttcttt

SEQ ID NO: 467829 - DNA, 25 bp, Homo sapien
tttttgcctctgaccataattgcat

SEQ ID NO: 467830 - DNA, 25 bp, Homo sapien
ttttcttcctcgtatgtcagtgttc

SEQ ID NO: 467831 - DNA, 25 bp, Homo sapien
tctttttgcctctgaccataattgc

SEQ ID NO: 467832 - DNA, 25 bp, Homo sapien
tgctccccgagggtagtgtatgggt

SEQ ID NO: 467833 - DNA, 25 bp, Homo sapien
tacaagggagccagcactgataaag

SEQ ID NO: 467834 - DNA, 25 bp, Homo sapien
tagcagcaaaggaaagtttattcag

SEQ ID NO: 467835 - DNA, 25 bp, Homo sapien
tgtatgggttagttgtatagggtct

SEQ ID NO: 467836 - DNA, 25 bp, Homo sapien
tcaacttccggttgccagctgcttt

SEQ ID NO: 467837 - DNA, 25 bp, Homo sapien
cttactccacattcgttgacagact

SEQ ID NO: 467838 - DNA, 25 bp, Homo sapien
gcaacttctgatcttgggtaaccaa

SEQ ID NO: 467839 - DNA, 25 bp, Homo sapien
tgagacttgtaagagattcccctgg

SEQ ID NO: 467840 - DNA, 25 bp, Homo sapien
tgttaataggctctccattgatggc

SEQ ID NO: 467841 - DNA, 25 bp, Homo sapien
gatggcttgtcccagagtactgtta

SEQ ID NO: 467842 - DNA, 25 bp, Homo sapien
gggcagaaactgaaatagcgtgcat

SEQ ID NO: 467843 - DNA, 25 bp, Homo sapien
ctctctgacactagtctgtgggctg

SEQ ID NO: 467844 - DNA, 25 bp, Homo sapien
tttctgatcttcctccgtgagctct

SEQ ID NO: 467845 - DNA, 25 bp, Homo sapien
agggcagaaactgaaatagcgtgca

SEQ ID NO: 467846 - DNA, 25 bp, Homo sapien
tcttgatggtattaacagtcctacg

SEQ ID NO: 467847 - DNA, 25 bp, Homo sapien
cttcttgatggtattaacagtccta

SEQ ID NO: 467848 - DNA, 25 bp, Homo sapien
ttgatggtattaacagtcctacggg

SEQ ID NO: 467849 - DNA, 25 bp, Homo sapien
gatggtattaacagtcctacgggaa

SEQ ID NO: 467850 - DNA, 25 bp, Homo sapien
agtccttgcgactagtgttttatcc

SEQ ID NO: 467851 - DNA, 25 bp, Homo sapien
tgaactgcttttatcttggcggtat

SEQ ID NO: 467852 - DNA, 25 bp, Homo sapien
caatctttcttagaacatgcatgaa

SEQ ID NO: 467853 - DNA, 25 bp, Homo sapien
cattctccataattggtttgagttt

SEQ ID NO: 467854 - DNA, 25 bp, Homo sapien
ggattcgatgatcaggccagaggca

SEQ ID NO: 467855 - DNA, 25 bp, Homo sapien
tggcattgcacatacctctgtttat

SEQ ID NO: 467856 - DNA, 25 bp, Homo sapien
tagcccacattctgggtagtaccga

SEQ ID NO: 467857 - DNA, 25 bp, Homo sapien
tggctaaagatcagcaatgcatgtg

SEQ ID NO: 467858 - DNA, 25 bp, Homo sapien
aacaaggtcatttggtctttgatat

SEQ ID NO: 467859 - DNA, 25 bp, Homo sapien
aaccaattctatgaacaaggtcatt

SEQ ID NO: 467860 - DNA, 25 bp, Homo sapien
ggtctttgatatgcttcttccctct

SEQ ID NO: 467861 - DNA, 25 bp, Homo sapien
aaaaccaattctatgaacaaggtca

SEQ ID NO: 467862 - DNA, 25 bp, Homo sapien
cacatctgctgaagatggtcgactt

SEQ ID NO: 467863 - DNA, 25 bp, Homo sapien
agtgtaagttgaccgatttcttcag

SEQ ID NO: 467864 - DNA, 25 bp, Homo sapien
cactttgctagtgtaagttgaccga

SEQ ID NO: 467865 - DNA, 25 bp, Homo sapien
gaagatggtcgactttcttttatgt

SEQ ID NO: 467866 - DNA, 25 bp, Homo sapien
tcaacattcaactgcatatagcaga

SEQ ID NO: 467867 - DNA, 25 bp, Homo sapien
caacattcaactgcatatagcagag

SEQ ID NO: 467868 - DNA, 25 bp, Homo sapien
aacattcaactgcatatagcagagg

SEQ ID NO: 467869 - DNA, 25 bp, Homo sapien
tctactatgtttgtgaatccccaga

SEQ ID NO: 467870 - DNA, 25 bp, Homo sapien
caaaatgcgtctaggtttcaaggtt

SEQ ID NO: 467871 - DNA, 25 bp, Homo sapien
gaaatgaactctatgactagcccta

SEQ ID NO: 467872 - DNA, 25 bp, Homo sapien
gagtcatgtctctaaatcggtgtgt

SEQ ID NO: 467873 - DNA, 25 bp, Homo sapien
ttctgaagcatgtctaataacactg

SEQ ID NO: 467874 - DNA, 25 bp, Homo sapien
gacaaacattctgaagcatgtctaa

SEQ ID NO: 467875 - DNA, 25 bp, Homo sapien
aaggacaaacattctgaagcatgtc

SEQ ID NO: 467876 - DNA, 25 bp, Homo sapien
taatgtcaaggacaaacattctgaa

SEQ ID NO: 467877 - DNA, 25 bp, Homo sapien
cgtttatacatttcctgctgcagtc

SEQ ID NO: 467878 - DNA, 25 bp, Homo sapien
gagatgattcatcctacccgataat

SEQ ID NO: 467879 - DNA, 25 bp, Homo sapien
tcttgccaaaatacgctaaagtcac

SEQ ID NO: 467880 - DNA, 25 bp, Homo sapien
gtgctgaagcctccattcttgccaa

SEQ ID NO: 467881 - DNA, 25 bp, Homo sapien
tttaatgagctgcaggacgtagccc

SEQ ID NO: 467882 - DNA, 25 bp, Homo sapien
tttcccagcagtaaatgtcctccga

SEQ ID NO: 467883 - DNA, 25 bp, Homo sapien
tgtcctccgatcttaccacctggga

SEQ ID NO: 467884 - DNA, 25 bp, Homo sapien
cctggttacagccacatgggtggaa

SEQ ID NO: 467885 - DNA, 25 bp, Homo sapien
atcaatctgatatggaatgaaacct

SEQ ID NO: 467886 - DNA, 25 bp, Homo sapien
tcctaatgaagcagattgtcaatcc

SEQ ID NO: 467887 - DNA, 25 bp, Homo sapien
gtcaatccaaacctataaccattgt

SEQ ID NO: 467888 - DNA, 25 bp, Homo sapien
acctataaccattgttgtttgaaag

SEQ ID NO: 467889 - DNA, 25 bp, Homo sapien
tggctatatagcgaattacttcaaa

SEQ ID NO: 467890 - DNA, 25 bp, Homo sapien
tagtttctttggctatatagcgaat

SEQ ID NO: 467891 - DNA, 25 bp, Homo sapien
acatactttgaaattgtgagcaaat

SEQ ID NO: 467892 - DNA, 25 bp, Homo sapien
gcgaattacttcaaaacatactttg

SEQ ID NO: 467893 - DNA, 25 bp, Homo sapien
cctatcaaggtctataattggtgga

SEQ ID NO: 467894 - DNA, 25 bp, Homo sapien
tggagatctcatggacatttgttag

SEQ ID NO: 467895 - DNA, 25 bp, Homo sapien
aaatactggccaccaagaaagcaag

SEQ ID NO: 467896 - DNA, 25 bp, Homo sapien
caaaggtgccaaagttgttgtggga

SEQ ID NO: 467897 - DNA, 25 bp, Homo sapien
agctttctgttgcaacaagtcacat

SEQ ID NO: 467898 - DNA, 25 bp, Homo sapien
tctgttgcaacaagtcacattcttc

SEQ ID NO: 467899 - DNA, 25 bp, Homo sapien
tgttgcaacaagtcacattcttctt

SEQ ID NO: 467900 - DNA, 25 bp, Homo sapien
tttctgttgcaacaagtcacattct

SEQ ID NO: 467901 - DNA, 25 bp, Homo sapien
tcagctggaggctgccgacccccgc

SEQ ID NO: 467902 - DNA, 25 bp, Homo sapien
ctggaggctgccgacccccgcgtcc

SEQ ID NO: 467903 - DNA, 25 bp, Homo sapien
ggaggctgccgacccccgcgtccca

SEQ ID NO: 467904 - DNA, 25 bp, Homo sapien
agctggaggctgccgacccccgcgt

SEQ ID NO: 467905 - DNA, 25 bp, Homo sapien
aaggtgatgaggagcaccggcaccc

SEQ ID NO: 467906 - DNA, 25 bp, Homo sapien
tagtaggaccagatgaccacgaagg

SEQ ID NO: 467907 - DNA, 25 bp, Homo sapien
agcgagacagcgtccagggcgccat

SEQ ID NO: 467908 - DNA, 25 bp, Homo sapien
cagcccatgacgcagtggcagcagc

SEQ ID NO: 467909 - DNA, 25 bp, Homo sapien
aacacggtctttccattttcttcat

SEQ ID NO: 467910 - DNA, 25 bp, Homo sapien
ccattttcttcatttccaaaaatag

SEQ ID NO: 467911 - DNA, 25 bp, Homo sapien
catttccaaaaatagtaaacacgca

SEQ ID NO: 467912 - DNA, 25 bp, Homo sapien
tcttcatttccaaaaatagtaaaca

SEQ ID NO: 467913 - DNA, 25 bp, Homo sapien
tcatccaataggaccatacaaacat

SEQ ID NO: 467914 - DNA, 25 bp, Homo sapien
tggacaagtagaattctttggaggg

SEQ ID NO: 467915 - DNA, 25 bp, Homo sapien
gggggaagcaggagatgtgaaaatt

SEQ ID NO: 467916 - DNA, 25 bp, Homo sapien
cagaattggacaagtagaattcttt

SEQ ID NO: 467917 - DNA, 25 bp, Homo sapien
tttcagaattggacaagtagaattc

SEQ ID NO: 467918 - DNA, 25 bp, Homo sapien
gtttttgaaactggcgtggtacaga

SEQ ID NO: 467919 - DNA, 25 bp, Homo sapien
tagtttttgaaactggcgtggtaca

SEQ ID NO: 467920 - DNA, 25 bp, Homo sapien
ttttgaaactggcgtggtacagata

SEQ ID NO: 467921 - DNA, 25 bp, Homo sapien
agtttttgaaactggcgtggtacag

SEQ ID NO: 467922 - DNA, 25 bp, Homo sapien
acacagttattcacccaaggacagt

SEQ ID NO: 467923 - DNA, 25 bp, Homo sapien
cacagttattcacccaaggacagtg

SEQ ID NO: 467924 - DNA, 25 bp, Homo sapien
tattgtatctaagagagaaaccatt

SEQ ID NO: 467925 - DNA, 25 bp, Homo sapien
caatttttattgtatctaagagaga

SEQ ID NO: 467926 - DNA, 25 bp, Homo sapien
ggtccacatgaaaatgtgggtgcag

SEQ ID NO: 467927 - DNA, 25 bp, Homo sapien
aggtccacatgaaaatgtgggtgca

SEQ ID NO: 467928 - DNA, 25 bp, Homo sapien
cttctggcatactcattctggtttg

SEQ ID NO: 467929 - DNA, 25 bp, Homo sapien
ttctggcatactcattctggtttgt

SEQ ID NO: 467930 - DNA, 25 bp, Homo sapien
cattctggtttgtaacagaagcttg

SEQ ID NO: 467931 - DNA, 25 bp, Homo sapien
tggcctgagtaaggcactactgaaa

SEQ ID NO: 467932 - DNA, 25 bp, Homo sapien
aaaggcttccagttggcctgagtaa

SEQ ID NO: 467933 - DNA, 25 bp, Homo sapien
tccagttggcctgagtaaggcacta

SEQ ID NO: 467934 - DNA, 25 bp, Homo sapien
aaaaggcttccagttggcctgagta

SEQ ID NO: 467935 - DNA, 25 bp, Homo sapien
ggaatgaccgagactattataagag

SEQ ID NO: 467936 - DNA, 25 bp, Homo sapien
taggtcattgtcgatggaatgaccg

SEQ ID NO: 467937 - DNA, 25 bp, Homo sapien
gagactattataagagtcagctgtc

SEQ ID NO: 467938 - DNA, 25 bp, Homo sapien
caaacacatcacaagtacatgagtc

SEQ ID NO: 467939 - DNA, 25 bp, Homo sapien
gtaccagtacattattgatcttata

SEQ ID NO: 467940 - DNA, 25 bp, Homo sapien
taatctcataaagaagtaccagtac

SEQ ID NO: 467941 - DNA, 25 bp, Homo sapien
taagaaaacaaacgtcagttgctgt

SEQ ID NO: 467942 - DNA, 25 bp, Homo sapien
cgtcagttgctgtttacaggtttcc

SEQ ID NO: 467943 - DNA, 25 bp, Homo sapien
gaggtacttgggtgtgtccccgaca

SEQ ID NO: 467944 - DNA, 25 bp, Homo sapien
cagtatctggaaacccacgtatgga

SEQ ID NO: 467945 - DNA, 25 bp, Homo sapien
caaagagacgttaagtattggagcc

SEQ ID NO: 467946 - DNA, 25 bp, Homo sapien
ggatcacccttatcgaaaacagttg

SEQ ID NO: 467947 - DNA, 25 bp, Homo sapien
agctcaatgtactattcattaggaa

SEQ ID NO: 467948 - DNA, 25 bp, Homo sapien
tcattaggaagaattctcttgccca

SEQ ID NO: 467949 - DNA, 25 bp, Homo sapien
ctcttgcccattgatcctcatggtc

SEQ ID NO: 467950 - DNA, 25 bp, Homo sapien
tctcttgcccattgatcctcatggt

SEQ ID NO: 467951 - DNA, 25 bp, Homo sapien
tttttcagcagtcccatggattcta

SEQ ID NO: 467952 - DNA, 25 bp, Homo sapien
ttttcagcagtcccatggattctat

SEQ ID NO: 467953 - DNA, 25 bp, Homo sapien
tggtttttcagcagtcccatggatt

SEQ ID NO: 467954 - DNA, 25 bp, Homo sapien
ttcatgctctggtcatgttgcggca

SEQ ID NO: 467955 - DNA, 25 bp, Homo sapien
tcagatcttcataaggggcatgcca

SEQ ID NO: 467956 - DNA, 25 bp, Homo sapien
caataactctttcatgctctggtca

SEQ ID NO: 467957 - DNA, 25 bp, Homo sapien
ggcatgccaagttctcccaataact

SEQ ID NO: 467958 - DNA, 25 bp, Homo sapien
gcttttcttagatccatctgcattt

SEQ ID NO: 467959 - DNA, 25 bp, Homo sapien
aactctgcttttcttagatccatct

SEQ ID NO: 467960 - DNA, 25 bp, Homo sapien
tctgcttttcttagatccatctgca

SEQ ID NO: 467961 - DNA, 25 bp, Homo sapien
actctgcttttcttagatccatctg

SEQ ID NO: 467962 - DNA, 25 bp, Homo sapien
tcactcacgttcagaaaacatgctc

SEQ ID NO: 467963 - DNA, 25 bp, Homo sapien
ttcactcacgttcagaaaacatgct

SEQ ID NO: 467964 - DNA, 25 bp, Homo sapien
cccaatgttcttcactcacgttcag

SEQ ID NO: 467965 - DNA, 25 bp, Homo sapien
cactcacgttcagaaaacatgctct

SEQ ID NO: 467966 - DNA, 25 bp, Homo sapien
ctaaaagaagagaggtacagagtcc

SEQ ID NO: 467967 - DNA, 25 bp, Homo sapien
cacttgcagataattccgtaggtgc

SEQ ID NO: 467968 - DNA, 25 bp, Homo sapien
tccaggcacttgcagataattccgt

SEQ ID NO: 467969 - DNA, 25 bp, Homo sapien
tacagagtccgactgaaactcagca

SEQ ID NO: 467970 - DNA, 25 bp, Homo sapien
tgtaaagtccaaaatgattttgatc

SEQ ID NO: 467971 - DNA, 25 bp, Homo sapien
ctgtaaagtccaaaatgattttgat

SEQ ID NO: 467972 - DNA, 25 bp, Homo sapien
taaagtccaaaatgattttgatcat

SEQ ID NO: 467973 - DNA, 25 bp, Homo sapien
gtaaagtccaaaatgattttgatca

SEQ ID NO: 467974 - DNA, 25 bp, Homo sapien
ttccttatattcaattgattggttt

SEQ ID NO: 467975 - DNA, 25 bp, Homo sapien
cttccttatattcaattgattggtt

SEQ ID NO: 467976 - DNA, 25 bp, Homo sapien
ctggaaaggagtaagaataaggaga

SEQ ID NO: 467977 - DNA, 25 bp, Homo sapien
gagtcaatcgtgttctttcccacca

SEQ ID NO: 467978 - DNA, 25 bp, Homo sapien
gaattacaggagtcaatcgtgttct

SEQ ID NO: 467979 - DNA, 25 bp, Homo sapien
tacaggagtcaatcgtgttctttcc

SEQ ID NO: 467980 - DNA, 25 bp, Homo sapien
ggaaagtactgattaaagtatgaac

SEQ ID NO: 467981 - DNA, 25 bp, Homo sapien
gcatagtccatagagaatgaagcca

SEQ ID NO: 467982 - DNA, 25 bp, Homo sapien
tatgaactgcggtattcctgtgcct

SEQ ID NO: 467983 - DNA, 25 bp, Homo sapien
ttccttccgcagagatcaatggagc

SEQ ID NO: 467984 - DNA, 25 bp, Homo sapien
gtaataatgtgacaaacgagcatgc

SEQ ID NO: 467985 - DNA, 25 bp, Homo sapien
tgacaaacgagcatgcagcctgcac

SEQ ID NO: 467986 - DNA, 25 bp, Homo sapien
cagcaagtaataatgtgacaaacga

SEQ ID NO: 467987 - DNA, 25 bp, Homo sapien
aagtgacagcaagtaataatgtgac

SEQ ID NO: 467988 - DNA, 25 bp, Homo sapien
ttagcctttgagctcctattgtgtg

SEQ ID NO: 467989 - DNA, 25 bp, Homo sapien
attagcctttgagctcctattgtgt

SEQ ID NO: 467990 - DNA, 25 bp, Homo sapien
cattagcctttgagctcctattgtg

SEQ ID NO: 467991 - DNA, 25 bp, Homo sapien
tcattagcctttgagctcctattgt

SEQ ID NO: 467992 - DNA, 25 bp, Homo sapien
caaacaccctacttaattcatattt

SEQ ID NO: 467993 - DNA, 25 bp, Homo sapien
gaactcccaagacggtggtgagcca

SEQ ID NO: 467994 - DNA, 25 bp, Homo sapien
actcccaagacggtggtgagccact

SEQ ID NO: 467995 - DNA, 25 bp, Homo sapien
aactcccaagacggtggtgagccac

SEQ ID NO: 467996 - DNA, 25 bp, Homo sapien
ggcttcctgtaagacataaaccaca

SEQ ID NO: 467997 - DNA, 25 bp, Homo sapien
ttcaagggtggtgcttattagttgg

SEQ ID NO: 467998 - DNA, 25 bp, Homo sapien
aatgctgggatagggaggtagactc

SEQ ID NO: 467999 - DNA, 25 bp, Homo sapien
agtcgtttctttcttgacatctgag

SEQ ID NO: 468000 - DNA, 25 bp, Homo sapien
caggcatgaaggttatttgttgtaa

SEQ ID NO: 468001 - DNA, 25 bp, Homo sapien
aaaaagtttttgcaggcatgaaggt

SEQ ID NO: 468002 - DNA, 25 bp, Homo sapien
tgtaatattggctctattcttcata

SEQ ID NO: 468003 - DNA, 25 bp, Homo sapien
atttgttgtaatattggctctattc

SEQ ID NO: 468004 - DNA, 25 bp, Homo sapien
tgaagactcagtagaccaagttgaa

SEQ ID NO: 468005 - DNA, 25 bp, Homo sapien
agacaggcgttaaacatcacaagca

SEQ ID NO: 468006 - DNA, 25 bp, Homo sapien
agctcagtcaccagtattgaagact

SEQ ID NO: 468007 - DNA, 25 bp, Homo sapien
tagaccaagttgaaaagacaggcgt

SEQ ID NO: 468008 - DNA, 25 bp, Homo sapien
taacataccattcctgatagtggtc

SEQ ID NO: 468009 - DNA, 25 bp, Homo sapien
cattcctgatagtggtcaccttcta

SEQ ID NO: 468010 - DNA, 25 bp, Homo sapien
tgttaacataccattcctgatagtg

SEQ ID NO: 468011 - DNA, 25 bp, Homo sapien
gatagtggtcaccttctagttcagc

SEQ ID NO: 468012 - DNA, 25 bp, Homo sapien
caatatctttcaaacagttcccaat

SEQ ID NO: 468013 - DNA, 25 bp, Homo sapien
caaacagttcccaatatgtcagcat

SEQ ID NO: 468014 - DNA, 25 bp, Homo sapien
catttgagtcattccactaacacgg

SEQ ID NO: 468015 - DNA, 25 bp, Homo sapien
atttgagtcattccactaacacgga

SEQ ID NO: 468016 - DNA, 25 bp, Homo sapien
aatttcctcaccctgacatgtcctg

SEQ ID NO: 468017 - DNA, 25 bp, Homo sapien
tagtgaaaggtccagctaccccaat

SEQ ID NO: 468018 - DNA, 25 bp, Homo sapien
tagaagttctattcacatggtgcaa

SEQ ID NO: 468019 - DNA, 25 bp, Homo sapien
cttatttaaatccagcaactaaaag

SEQ ID NO: 468020 - DNA, 25 bp, Homo sapien
tctaaggctcaggtatctggaaggg

SEQ ID NO: 468021 - DNA, 25 bp, Homo sapien
tcagggtctttcacgcagcactagt

SEQ ID NO: 468022 - DNA, 25 bp, Homo sapien
tatgggtgaggtacatttctacggg

SEQ ID NO: 468023 - DNA, 25 bp, Homo sapien
tccagttctgggttataaattgccc

SEQ ID NO: 468024 - DNA, 25 bp, Homo sapien
ttgtgatccaattagtccatggtcc

SEQ ID NO: 468025 - DNA, 25 bp, Homo sapien
gtttgcttgtgatccaattagtcca

SEQ ID NO: 468026 - DNA, 25 bp, Homo sapien
tgcttgtgatccaattagtccatgg

SEQ ID NO: 468027 - DNA, 25 bp, Homo sapien
tttcagtttgcttgtgatccaatta

SEQ ID NO: 468028 - DNA, 25 bp, Homo sapien
tggctcttcgcaggtgccatgatag

SEQ ID NO: 468029 - DNA, 25 bp, Homo sapien
caaacacctgggtagataagctaaa

SEQ ID NO: 468030 - DNA, 25 bp, Homo sapien
ctatgctcccctggctagagtgcga

SEQ ID NO: 468031 - DNA, 25 bp, Homo sapien
tttttgatcaaggtgaccccaatct

SEQ ID NO: 468032 - DNA, 25 bp, Homo sapien
tgtgataccgtggacataacatggg

SEQ ID NO: 468033 - DNA, 25 bp, Homo sapien
taagggcaacgttacatagagtaca

SEQ ID NO: 468034 - DNA, 25 bp, Homo sapien
caaagttgttgcgtgtcatagttca

SEQ ID NO: 468035 - DNA, 25 bp, Homo sapien
tgcctcctgcaaactagtaacctga

SEQ ID NO: 468036 - DNA, 25 bp, Homo sapien
gctgcaggataaatgtaaggcaatc

SEQ ID NO: 468037 - DNA, 25 bp, Homo sapien
tgctgcaggataaatgtaaggcaat

SEQ ID NO: 468038 - DNA, 25 bp, Homo sapien
ttgctgcaggataaatgtaaggcaa

SEQ ID NO: 468039 - DNA, 25 bp, Homo sapien
tagatctacttttggttccttggga

SEQ ID NO: 468040 - DNA, 25 bp, Homo sapien
cacactactatgaggaaatacctga

SEQ ID NO: 468041 - DNA, 25 bp, Homo sapien
gataccctgtagtgagattgttgaa

SEQ ID NO: 468042 - DNA, 25 bp, Homo sapien
taacaatcataacagaatggagagc

SEQ ID NO: 468043 - DNA, 25 bp, Homo sapien
gattatgacagatgccttatgctgg

SEQ ID NO: 468044 - DNA, 25 bp, Homo sapien
gtctcctacaaacggccttggcaca

SEQ ID NO: 468045 - DNA, 25 bp, Homo sapien
tggagtctcctacaaacggccttgg

SEQ ID NO: 468046 - DNA, 25 bp, Homo sapien
aggaggcagcggaactccccaaggt

SEQ ID NO: 468047 - DNA, 25 bp, Homo sapien
tgagtttgaacagccacgatgagga

SEQ ID NO: 468048 - DNA, 25 bp, Homo sapien
tatgggcactatctgtgacacggac

SEQ ID NO: 468049 - DNA, 25 bp, Homo sapien
ggtatcccaaccaaggacactgagg

SEQ ID NO: 468050 - DNA, 25 bp, Homo sapien
gacacggacctcaagaatcccatgg

SEQ ID NO: 468051 - DNA, 25 bp, Homo sapien
gagttcttcatctggagcacaatgg

SEQ ID NO: 468052 - DNA, 25 bp, Homo sapien
tgagttcttcatctggagcacaatg

SEQ ID NO: 468053 - DNA, 25 bp, Homo sapien
agttcttcatctggagcacaatgga

SEQ ID NO: 468054 - DNA, 25 bp, Homo sapien
ctgagttcttcatctggagcacaat

SEQ ID NO: 468055 - DNA, 25 bp, Homo sapien
agcaaaactgatggtactgtgcatc

SEQ ID NO: 468056 - DNA, 25 bp, Homo sapien
cagagagcaaaactgatggtactgt

SEQ ID NO: 468057 - DNA, 25 bp, Homo sapien
acagactaggagcataccacagaga

SEQ ID NO: 468058 - DNA, 25 bp, Homo sapien
taggagcataccacagagagcaaaa

SEQ ID NO: 468059 - DNA, 25 bp, Homo sapien
cgttgtgggagatgtttctaccatg

SEQ ID NO: 468060 - DNA, 25 bp, Homo sapien
atgagtcgttgtgggagatgtttct

SEQ ID NO: 468061 - DNA, 25 bp, Homo sapien
atccagaagatgagtcgttgtggga

SEQ ID NO: 468062 - DNA, 25 bp, Homo sapien
tgtgggagatgtttctaccatgagc

SEQ ID NO: 468063 - DNA, 25 bp, Homo sapien
catgttatttggcttctggtctcca

SEQ ID NO: 468064 - DNA, 25 bp, Homo sapien
ttctgttgtagtgaggagcctcatg

SEQ ID NO: 468065 - DNA, 25 bp, Homo sapien
ctggtctccatctgcgtttgtctgc

SEQ ID NO: 468066 - DNA, 25 bp, Homo sapien
agtgaggagcctcatgttatttggc

SEQ ID NO: 468067 - DNA, 25 bp, Homo sapien
ttcttccttaaaacagtgtgaggct

SEQ ID NO: 468068 - DNA, 25 bp, Homo sapien
taaaacagtgtgaggctgccaaact

SEQ ID NO: 468069 - DNA, 25 bp, Homo sapien
ccttaaaacagtgtgaggctgccaa

SEQ ID NO: 468070 - DNA, 25 bp, Homo sapien
ttccttaaaacagtgtgaggctgcc

SEQ ID NO: 468071 - DNA, 25 bp, Homo sapien
aaatgtggtagagtaacctcctgcc

SEQ ID NO: 468072 - DNA, 25 bp, Homo sapien
gagttcccatcttccggaaatgtgg

SEQ ID NO: 468073 - DNA, 25 bp, Homo sapien
agggcaagagtaatggcaacaggta

SEQ ID NO: 468074 - DNA, 25 bp, Homo sapien
gtagagtaacctcctgccaactggg

SEQ ID NO: 468075 - DNA, 25 bp, Homo sapien
tgagaactccaatactccctttgct

SEQ ID NO: 468076 - DNA, 25 bp, Homo sapien
tctcttcttggcatattcacacagg

SEQ ID NO: 468077 - DNA, 25 bp, Homo sapien
cgggtatcttggagtaagttgagaa

SEQ ID NO: 468078 - DNA, 25 bp, Homo sapien
caggccagtgacactattacagaca

SEQ ID NO: 468079 - DNA, 25 bp, Homo sapien
atgcactttgattttctagtcgttt

SEQ ID NO: 468080 - DNA, 25 bp, Homo sapien
tatgcactttgattttctagtcgtt

SEQ ID NO: 468081 - DNA, 25 bp, Homo sapien
tgcactttgattttctagtcgttta

SEQ ID NO: 468082 - DNA, 25 bp, Homo sapien
atatgcactttgattttctagtcgt

SEQ ID NO: 468083 - DNA, 25 bp, Homo sapien
ggccttgaatgctgttcaaacaaga

SEQ ID NO: 468084 - DNA, 25 bp, Homo sapien
tataatctgggtgaatgtcagagtc

SEQ ID NO: 468085 - DNA, 25 bp, Homo sapien
tacaggagattctggcaatgccacg

SEQ ID NO: 468086 - DNA, 25 bp, Homo sapien
gccacgataatgaaagcagtcactt

SEQ ID NO: 468087 - DNA, 25 bp, Homo sapien
ccaagtcattgctgacttgaccatg

SEQ ID NO: 468088 - DNA, 25 bp, Homo sapien
gacttgaccatgtcagcatgaggca

SEQ ID NO: 468089 - DNA, 25 bp, Homo sapien
tccaaaatccgaataacccaagtca

SEQ ID NO: 468090 - DNA, 25 bp, Homo sapien
gcatgaggcataaatattggtttct

SEQ ID NO: 468091 - DNA, 25 bp, Homo sapien
tacttttgccatttctcttcttttc

SEQ ID NO: 468092 - DNA, 25 bp, Homo sapien
ttgccatttctcttcttttcattca

SEQ ID NO: 468093 - DNA, 25 bp, Homo sapien
tgccatttctcttcttttcattcat

SEQ ID NO: 468094 - DNA, 25 bp, Homo sapien
taatttacttttgccatttctcttc

SEQ ID NO: 468095 - DNA, 25 bp, Homo sapien
tccactgaataatatttcctatctc

SEQ ID NO: 468096 - DNA, 25 bp, Homo sapien
tacaatgaagaaacctagccacaaa

SEQ ID NO: 468097 - DNA, 25 bp, Homo sapien
tttttatactcaactctcctcctgg

SEQ ID NO: 468098 - DNA, 25 bp, Homo sapien
aatagtttttctgtgtgagcatgga

SEQ ID NO: 468099 - DNA, 25 bp, Homo sapien
cacgcacatattatcatggtattca

SEQ ID NO: 468100 - DNA, 25 bp, Homo sapien
cagctgcatcaagaggctagctctc

SEQ ID NO: 468101 - DNA, 25 bp, Homo sapien
gcatcaagaggctagctctcaccat

SEQ ID NO: 468102 - DNA, 25 bp, Homo sapien
gtgacagctgcatcaagaggctagc

SEQ ID NO: 468103 - DNA, 25 bp, Homo sapien
gctgcatcaagaggctagctctcac

SEQ ID NO: 468104 - DNA, 25 bp, Homo sapien
tagttgtaaatgcaatggcactcag

SEQ ID NO: 468105 - DNA, 25 bp, Homo sapien
tgattagttgtaaatgcaatggcac

SEQ ID NO: 468106 - DNA, 25 bp, Homo sapien
taaatgcaatggcactcagaccagc

SEQ ID NO: 468107 - DNA, 25 bp, Homo sapien
ttgtaaatgcaatggcactcagacc

SEQ ID NO: 468108 - DNA, 25 bp, Homo sapien
gaaagtgcccaatattcctttctga

SEQ ID NO: 468109 - DNA, 25 bp, Homo sapien
gatacatcttttatagaaagtgccc

SEQ ID NO: 468110 - DNA, 25 bp, Homo sapien
tttcctagccaaggatatcaataag

SEQ ID NO: 468111 - DNA, 25 bp, Homo sapien
taaccctgaaatacttcagagaaca

SEQ ID NO: 468112 - DNA, 25 bp, Homo sapien
tatgtaggagagtgaaattttccag

SEQ ID NO: 468113 - DNA, 25 bp, Homo sapien
gaatcactatttacagcatctggag

SEQ ID NO: 468114 - DNA, 25 bp, Homo sapien
tactgagtgtctgtccaaaggaaac

SEQ ID NO: 468115 - DNA, 25 bp, Homo sapien
taccattcagtccagcaatccagct

SEQ ID NO: 468116 - DNA, 25 bp, Homo sapien
tactgtacacgtggttggcaatgaa

SEQ ID NO: 468117 - DNA, 25 bp, Homo sapien
cagactagctagaggaggcagtatc

SEQ ID NO: 468118 - DNA, 25 bp, Homo sapien
gaaatgcacgggttttacagactag

SEQ ID NO: 468119 - DNA, 25 bp, Homo sapien
tgaagagatagaggagtgcccaagt

SEQ ID NO: 468120 - DNA, 25 bp, Homo sapien
gatttagatccactcctctggattc

SEQ ID NO: 468121 - DNA, 25 bp, Homo sapien
ctctggattcttggtaagtagaacc

SEQ ID NO: 468122 - DNA, 25 bp, Homo sapien
ttaacccctacaagatttagatcca

SEQ ID NO: 468123 - DNA, 25 bp, Homo sapien
ggtaagtagaaccataccaattcat

SEQ ID NO: 468124 - DNA, 25 bp, Homo sapien
gtgccctgggaatcatagataaaag

SEQ ID NO: 468125 - DNA, 25 bp, Homo sapien
ctgggttatctgtgccctgggaatc

SEQ ID NO: 468126 - DNA, 25 bp, Homo sapien
ggaatcatagataaaaggtacagct

SEQ ID NO: 468127 - DNA, 25 bp, Homo sapien
gataaaaggtacagcttctgctctc

SEQ ID NO: 468128 - DNA, 25 bp, Homo sapien
agtgagcagggcatattggattacc

SEQ ID NO: 468129 - DNA, 25 bp, Homo sapien
gctgctttattagctctagcgcttc

SEQ ID NO: 468130 - DNA, 25 bp, Homo sapien
tagcgcttccactgagaatgttttg

SEQ ID NO: 468131 - DNA, 25 bp, Homo sapien
tgtttcacctgagtcaatgctttgg

SEQ ID NO: 468132 - DNA, 25 bp, Homo sapien
caggctctgggcgaaaagacttcga

SEQ ID NO: 468133 - DNA, 25 bp, Homo sapien
tcctggaccacacgaaaaagggctg

SEQ ID NO: 468134 - DNA, 25 bp, Homo sapien
aaagtggagccagacaactctagcc

SEQ ID NO: 468135 - DNA, 25 bp, Homo sapien
gaagcacattctgcgactccgctgg

SEQ ID NO: 468136 - DNA, 25 bp, Homo sapien
tcagcttttggcgtcccagtcctgc

SEQ ID NO: 468137 - DNA, 25 bp, Homo sapien
ataacacggggctctcgcgcgggca

SEQ ID NO: 468138 - DNA, 25 bp, Homo sapien
agcttttggcgtcccagtcctgcct

SEQ ID NO: 468139 - DNA, 25 bp, Homo sapien
cgcgggcatcgaggattctcagctt

SEQ ID NO: 468140 - DNA, 25 bp, Homo sapien
ttctcgtgcattggtcttgaacttc

SEQ ID NO: 468141 - DNA, 25 bp, Homo sapien
ccttctgccttctactatgtgtgtt

SEQ ID NO: 468142 - DNA, 25 bp, Homo sapien
ttctctttagaccaaattctcgtgc

SEQ ID NO: 468143 - DNA, 25 bp, Homo sapien
atgtgtgttcagagcaagaagattc

SEQ ID NO: 468144 - DNA, 25 bp, Homo sapien
tacatacatccttctaggatttttg

SEQ ID NO: 468145 - DNA, 25 bp, Homo sapien
catacatccttctaggatttttgtc

SEQ ID NO: 468146 - DNA, 25 bp, Homo sapien
catccttctaggatttttgtcattg

SEQ ID NO: 468147 - DNA, 25 bp, Homo sapien
cctatacatacatccttctaggatt

SEQ ID NO: 468148 - DNA, 25 bp, Homo sapien
tagtcttggattatgccagatatat

SEQ ID NO: 468149 - DNA, 25 bp, Homo sapien
cacttgtcgtaaatagtcttggatt

SEQ ID NO: 468150 - DNA, 25 bp, Homo sapien
gtaaatagtcttggattatgccaga

SEQ ID NO: 468151 - DNA, 25 bp, Homo sapien
tgtcgtaaatagtcttggattatgc

SEQ ID NO: 468152 - DNA, 25 bp, Homo sapien
taaactgagacagatacgtgtcacg

SEQ ID NO: 468153 - DNA, 25 bp, Homo sapien
tacacatgtattgggaagagcaggg

SEQ ID NO: 468154 - DNA, 25 bp, Homo sapien
tcctgcttatggtatgtgtgtgccc

SEQ ID NO: 468155 - DNA, 25 bp, Homo sapien
gagatgttcatagcatagactagga

SEQ ID NO: 468156 - DNA, 25 bp, Homo sapien
taatgtccctaagtattttcaatgc

SEQ ID NO: 468157 - DNA, 25 bp, Homo sapien
cagcttgcattgagtttacagaaca

SEQ ID NO: 468158 - DNA, 25 bp, Homo sapien
taggagttaggtgtcgcatagtgaa

SEQ ID NO: 468159 - DNA, 25 bp, Homo sapien
catataggtatgtgccatgcaaacg

SEQ ID NO: 468160 - DNA, 25 bp, Homo sapien
cagactcaaggtgtgctcctccttt

SEQ ID NO: 468161 - DNA, 25 bp, Homo sapien
ctcaaggtgtgctcctcctttatcc

SEQ ID NO: 468162 - DNA, 25 bp, Homo sapien
atcttttcccgtttcagactcaagg

SEQ ID NO: 468163 - DNA, 25 bp, Homo sapien
ggatatcttttcccgtttcagactc

SEQ ID NO: 468164 - DNA, 25 bp, Homo sapien
ggaattgggaatagggcttcagcca

SEQ ID NO: 468165 - DNA, 25 bp, Homo sapien
gacccagggtctagccaaggaattg

SEQ ID NO: 468166 - DNA, 25 bp, Homo sapien
aggttttctaacatgaaggacccag

SEQ ID NO: 468167 - DNA, 25 bp, Homo sapien
taatctctccgtggaagctgggagt

SEQ ID NO: 468168 - DNA, 25 bp, Homo sapien
caaagggcatcacaatatcatgctg

SEQ ID NO: 468169 - DNA, 25 bp, Homo sapien
tgtcttccatgactactgatggaag

SEQ ID NO: 468170 - DNA, 25 bp, Homo sapien
aaaaatgtaatacacaaagggcatc

SEQ ID NO: 468171 - DNA, 25 bp, Homo sapien
gtaatacacaaagggcatcacaata

SEQ ID NO: 468172 - DNA, 25 bp, Homo sapien
aggaaccatctgcagatctcatgca

SEQ ID NO: 468173 - DNA, 25 bp, Homo sapien
gcagatctcatgcaaacgtctaaaa

SEQ ID NO: 468174 - DNA, 25 bp, Homo sapien
aatatgtctgcggtttgtaagtcct

SEQ ID NO: 468175 - DNA, 25 bp, Homo sapien
caaacgtctaaaaatatgtctgcgg

SEQ ID NO: 468176 - DNA, 25 bp, Homo sapien
gcccctcataattgtatccatagtg

SEQ ID NO: 468177 - DNA, 25 bp, Homo sapien
tttgttgcccctcataattgtatcc

SEQ ID NO: 468178 - DNA, 25 bp, Homo sapien
gacaattagagtttgttgcccctca

SEQ ID NO: 468179 - DNA, 25 bp, Homo sapien
aggacaattagagtttgttgcccct

SEQ ID NO: 468180 - DNA, 25 bp, Homo sapien
tttataatacatcctgcagtcctga

SEQ ID NO: 468181 - DNA, 25 bp, Homo sapien
cttccatactgatttgtgagtaagt

SEQ ID NO: 468182 - DNA, 25 bp, Homo sapien
catactgatttgtgagtaagttttg

SEQ ID NO: 468183 - DNA, 25 bp, Homo sapien
gatttgtgagtaagttttgatttcc

SEQ ID NO: 468184 - DNA, 25 bp, Homo sapien
tttggcagcagtatgatgccacttc

SEQ ID NO: 468185 - DNA, 25 bp, Homo sapien
acataatcttccctcctatgtcatc

SEQ ID NO: 468186 - DNA, 25 bp, Homo sapien
agaattaaaagtactctgtccaaat

SEQ ID NO: 468187 - DNA, 25 bp, Homo sapien
gcagtatgatgccacttccgatttt

SEQ ID NO: 468188 - DNA, 25 bp, Homo sapien
ctttcatcatgtagaagtttaagta

SEQ ID NO: 468189 - DNA, 25 bp, Homo sapien
ttcatcatgtagaagtttaagtatt

SEQ ID NO: 468190 - DNA, 25 bp, Homo sapien
tttcatcatgtagaagtttaagtat

SEQ ID NO: 468191 - DNA, 25 bp, Homo sapien
catatccgagatcatgtggagtgga

SEQ ID NO: 468192 - DNA, 25 bp, Homo sapien
ttaacaacgttaggcctctgtttca

SEQ ID NO: 468193 - DNA, 25 bp, Homo sapien
catgtggagtggattgggcttctcc

SEQ ID NO: 468194 - DNA, 25 bp, Homo sapien
tctgtttcatatccgagatcatgtg

SEQ ID NO: 468195 - DNA, 25 bp, Homo sapien
ccagcccagagctttacttggcaat

SEQ ID NO: 468196 - DNA, 25 bp, Homo sapien
ttgaagtagcgctaaattccagccc

SEQ ID NO: 468197 - DNA, 25 bp, Homo sapien
cttgaagtagcgctaaattccagcc

SEQ ID NO: 468198 - DNA, 25 bp, Homo sapien
tgcttgaagtagcgctaaattccag

SEQ ID NO: 468199 - DNA, 25 bp, Homo sapien
aaaacccgaggctgtcttatcatgt

SEQ ID NO: 468200 - DNA, 25 bp, Homo sapien
gcacagtgtaagcaatcaataacct

SEQ ID NO: 468201 - DNA, 25 bp, Homo sapien
cttatcatgttgttttgcatcatcg

SEQ ID NO: 468202 - DNA, 25 bp, Homo sapien
tcgttatccgacacccctgggaaga

SEQ ID NO: 468203 - DNA, 25 bp, Homo sapien
tccttttgcgtagtcccaatgtcta

SEQ ID NO: 468204 - DNA, 25 bp, Homo sapien
ctgtcttgtagtttgtcttcaaaaa

SEQ ID NO: 468205 - DNA, 25 bp, Homo sapien
tcatcttccttttgcgtagtcccaa

SEQ ID NO: 468206 - DNA, 25 bp, Homo sapien
cgtagtcccaatgtctaaatatttc

SEQ ID NO: 468207 - DNA, 25 bp, Homo sapien
tggcagccacatccttaatttgagc

SEQ ID NO: 468208 - DNA, 25 bp, Homo sapien
catctactaggtaccgccttaaatc

SEQ ID NO: 468209 - DNA, 25 bp, Homo sapien
gcgttcttgaggttctggcagccac

SEQ ID NO: 468210 - DNA, 25 bp, Homo sapien
aatcttccagcgttcttgaggttct

SEQ ID NO: 468211 - DNA, 25 bp, Homo sapien
ttggactttctcatgtttatacctc

SEQ ID NO: 468212 - DNA, 25 bp, Homo sapien
ggactttctcatgtttatacctcat

SEQ ID NO: 468213 - DNA, 25 bp, Homo sapien
cttggactttctcatgtttatacct

SEQ ID NO: 468214 - DNA, 25 bp, Homo sapien
tggactttctcatgtttatacctca

SEQ ID NO: 468215 - DNA, 25 bp, Homo sapien
gtcatattgttccagcgtcgctgca

SEQ ID NO: 468216 - DNA, 25 bp, Homo sapien
tggtcatattgttccagcgtcgctg

SEQ ID NO: 468217 - DNA, 25 bp, Homo sapien
tcctggtcatattgttccagcgtcg

SEQ ID NO: 468218 - DNA, 25 bp, Homo sapien
cctggtcatattgttccagcgtcgc

SEQ ID NO: 468219 - DNA, 25 bp, Homo sapien
tgtgcaggggccgtgctattctcct

SEQ ID NO: 468220 - DNA, 25 bp, Homo sapien
tgcaggggccgtgctattctcctct

SEQ ID NO: 468221 - DNA, 25 bp, Homo sapien
gggccgtgctattctcctctgtatc

SEQ ID NO: 468222 - DNA, 25 bp, Homo sapien
gccgtgctattctcctctgtatcat

SEQ ID NO: 468223 - DNA, 25 bp, Homo sapien
attatcccacaaatgatcacttgca

SEQ ID NO: 468224 - DNA, 25 bp, Homo sapien
gtctggaatgattaaattatcccac

SEQ ID NO: 468225 - DNA, 25 bp, Homo sapien
gaatgaatctatattcttcaaaaca

SEQ ID NO: 468226 - DNA, 25 bp, Homo sapien
tattatcatcccgtaaatctgttaa

SEQ ID NO: 468227 - DNA, 25 bp, Homo sapien
gtgtatttacattttcgtctttgtc

SEQ ID NO: 468228 - DNA, 25 bp, Homo sapien
tacattttcgtctttgtctataact

SEQ ID NO: 468229 - DNA, 25 bp, Homo sapien
gtatttacattttcgtctttgtcta

SEQ ID NO: 468230 - DNA, 25 bp, Homo sapien
tatccctgagagtgtatttacattt

SEQ ID NO: 468231 - DNA, 25 bp, Homo sapien
cagagggacaagtgctaatgaccca

SEQ ID NO: 468232 - DNA, 25 bp, Homo sapien
tgctaatgacccaaatgtgctctgt

SEQ ID NO: 468233 - DNA, 25 bp, Homo sapien
tcacattatattgtatatcctccat

SEQ ID NO: 468234 - DNA, 25 bp, Homo sapien
tgctctgtctatggcatgacctctt

SEQ ID NO: 468235 - DNA, 25 bp, Homo sapien
tgcccagacatagcacagagacttc

SEQ ID NO: 468236 - DNA, 25 bp, Homo sapien
tggaagctgccactatagataaaga

SEQ ID NO: 468237 - DNA, 25 bp, Homo sapien
gggcctgaggtgcacagtattgact

SEQ ID NO: 468238 - DNA, 25 bp, Homo sapien
gaacttctctctagggcttggatac

SEQ ID NO: 468239 - DNA, 25 bp, Homo sapien
gtgtccctgtagaacatgaagatgt

SEQ ID NO: 468240 - DNA, 25 bp, Homo sapien
tagaaaaatgagttgctgactgcct

SEQ ID NO: 468241 - DNA, 25 bp, Homo sapien
gcctctaaacaggtcagcatgaatt

SEQ ID NO: 468242 - DNA, 25 bp, Homo sapien
gaaaagctgggttgcactgctagcc

SEQ ID NO: 468243 - DNA, 25 bp, Homo sapien
gagtataagactagtacccagggac

SEQ ID NO: 468244 - DNA, 25 bp, Homo sapien
gtttcataaaatgggacagctgatt

SEQ ID NO: 468245 - DNA, 25 bp, Homo sapien
ttttcattaattcagcccatagttc

SEQ ID NO: 468246 - DNA, 25 bp, Homo sapien
tgctctgcaaaattgaccactctag

SEQ ID NO: 468247 - DNA, 25 bp, Homo sapien
gcggcgtttgagtccgccattggca

SEQ ID NO: 468248 - DNA, 25 bp, Homo sapien
gtttgagtccgccattggcaagctg

SEQ ID NO: 468249 - DNA, 25 bp, Homo sapien
tcagcggcgtttgagtccgccattg

SEQ ID NO: 468250 - DNA, 25 bp, Homo sapien
cggcgtttgagtccgccattggcaa

SEQ ID NO: 468251 - DNA, 25 bp, Homo sapien
gagatatgcagccatacacactgtg

SEQ ID NO: 468252 - DNA, 25 bp, Homo sapien
gatatgcagccatacacactgtgca

SEQ ID NO: 468253 - DNA, 25 bp, Homo sapien
tttgagatatgcagccatacacact

SEQ ID NO: 468254 - DNA, 25 bp, Homo sapien
atatgcagccatacacactgtgcat

SEQ ID NO: 468255 - DNA, 25 bp, Homo sapien
cttgcctctcaaaactaaagaaatc

SEQ ID NO: 468256 - DNA, 25 bp, Homo sapien
ttgaagatttccgacagcacactct

SEQ ID NO: 468257 - DNA, 25 bp, Homo sapien
tgttttgaagatttccgacagcaca

SEQ ID NO: 468258 - DNA, 25 bp, Homo sapien
ttccgacagcacactctgatttctg

SEQ ID NO: 468259 - DNA, 25 bp, Homo sapien
tccacatctgtctcctcgaggtggc

SEQ ID NO: 468260 - DNA, 25 bp, Homo sapien
ggtggcagttgtacttccttcccca

SEQ ID NO: 468261 - DNA, 25 bp, Homo sapien
gaaacgactgaggatgtctccacat

SEQ ID NO: 468262 - DNA, 25 bp, Homo sapien
catcaccagctaatgtatttgttct

SEQ ID NO: 468263 - DNA, 25 bp, Homo sapien
tcatatgtgcatcaagaggtccatc

SEQ ID NO: 468264 - DNA, 25 bp, Homo sapien
gaggtccatcagcattcatatgtcc

SEQ ID NO: 468265 - DNA, 25 bp, Homo sapien
caggtccatcaacatgcatatgtcc

SEQ ID NO: 468266 - DNA, 25 bp, Homo sapien
ggttcatcaacactaatatgtccat

SEQ ID NO: 468267 - DNA, 25 bp, Homo sapien
caatacacatactttactggaaaag

SEQ ID NO: 468268 - DNA, 25 bp, Homo sapien
tacacatactttactggaaaaggtg

SEQ ID NO: 468269 - DNA, 25 bp, Homo sapien
cacatactttactggaaaaggtgct

SEQ ID NO: 468270 - DNA, 25 bp, Homo sapien
acatactttactggaaaaggtgctt

SEQ ID NO: 468271 - DNA, 25 bp, Homo sapien
catagaacgctatttcactataatg

SEQ ID NO: 468272 - DNA, 25 bp, Homo sapien
cactataatgatagcttagtgcatt

SEQ ID NO: 468273 - DNA, 25 bp, Homo sapien
tagtgcattagcaggtactttgatc

SEQ ID NO: 468274 - DNA, 25 bp, Homo sapien
aaaggacacatcatagaacgctatt

SEQ ID NO: 468275 - DNA, 25 bp, Homo sapien
gttcccttatttggcacaatgatag

SEQ ID NO: 468276 - DNA, 25 bp, Homo sapien
catttagcgacagcttttgttccct

SEQ ID NO: 468277 - DNA, 25 bp, Homo sapien
caattcgtgtatcgtaactattaag

SEQ ID NO: 468278 - DNA, 25 bp, Homo sapien
aagagtactgtaacccatttagcga

SEQ ID NO: 468279 - DNA, 25 bp, Homo sapien
cacagttcatacctggataaaataa

SEQ ID NO: 468280 - DNA, 25 bp, Homo sapien
aatacaaggtctagtaggacacagt

SEQ ID NO: 468281 - DNA, 25 bp, Homo sapien
ggataaaataagagtagtaggcata

SEQ ID NO: 468282 - DNA, 25 bp, Homo sapien
gtccatataaatacaaggtctagta

SEQ ID NO: 468283 - DNA, 25 bp, Homo sapien
tccctataagtggaaggctttcaga

SEQ ID NO: 468284 - DNA, 25 bp, Homo sapien
gcctaaagatgtggtagtcatcatc

SEQ ID NO: 468285 - DNA, 25 bp, Homo sapien
gctctgatcagaggaatgttcccta

SEQ ID NO: 468286 - DNA, 25 bp, Homo sapien
aagatatcctatgagcaccagcatg

SEQ ID NO: 468287 - DNA, 25 bp, Homo sapien
tcagaccgcttcctgcgagtatggc

SEQ ID NO: 468288 - DNA, 25 bp, Homo sapien
taggtaatgtctcatagtggtttcg

SEQ ID NO: 468289 - DNA, 25 bp, Homo sapien
tatggcttgtcgatgatattcttca

SEQ ID NO: 468290 - DNA, 25 bp, Homo sapien
gactcaagaaacctggcagcttcca

SEQ ID NO: 468291 - DNA, 25 bp, Homo sapien
gcattggtagtaacgagtgtgtgaa

SEQ ID NO: 468292 - DNA, 25 bp, Homo sapien
aacatggcagttttgcgaggagcat

SEQ ID NO: 468293 - DNA, 25 bp, Homo sapien
tagttattgctaagccagagaatga

SEQ ID NO: 468294 - DNA, 25 bp, Homo sapien
ttgcgaggagcattggtagtaacga

SEQ ID NO: 468295 - DNA, 25 bp, Homo sapien
cagacgcatagcatacagttgtaga

SEQ ID NO: 468296 - DNA, 25 bp, Homo sapien
gagaggcaaggaccgccagacgcat

SEQ ID NO: 468297 - DNA, 25 bp, Homo sapien
ctgtggtataagaaggagaggcaag

SEQ ID NO: 468298 - DNA, 25 bp, Homo sapien
gtagaacagtcaagacacagctcat

SEQ ID NO: 468299 - DNA, 25 bp, Homo sapien
cctttatactatggccaggtggacg

SEQ ID NO: 468300 - DNA, 25 bp, Homo sapien
gggattccgccttgcattgtttgcc

SEQ ID NO: 468301 - DNA, 25 bp, Homo sapien
aggtggacgaagatgcccggctttc

SEQ ID NO: 468302 - DNA, 25 bp, Homo sapien
gtgggtacccatttggctggacaca

SEQ ID NO: 468303 - DNA, 25 bp, Homo sapien
ggactgccgagtcagctttggcggg

SEQ ID NO: 468304 - DNA, 25 bp, Homo sapien
tgccgagtcagctttggcggggtcc

SEQ ID NO: 468305 - DNA, 25 bp, Homo sapien
caggactgccgagtcagctttggcg

SEQ ID NO: 468306 - DNA, 25 bp, Homo sapien
ccgagtcagctttggcggggtccct

SEQ ID NO: 468307 - DNA, 25 bp, Homo sapien
acaaaggtgcctgatgtccctatgc

SEQ ID NO: 468308 - DNA, 25 bp, Homo sapien
cacagggcgtattggcagcctctgg

SEQ ID NO: 468309 - DNA, 25 bp, Homo sapien
ctgcacagggcgtattggcagcctc

SEQ ID NO: 468310 - DNA, 25 bp, Homo sapien
actgttgagggtgcacaaaggtgcc

SEQ ID NO: 468311 - DNA, 25 bp, Homo sapien
acttccttcccacagaagtggcact

SEQ ID NO: 468312 - DNA, 25 bp, Homo sapien
ttccttcccacagaagtggcactgg

SEQ ID NO: 468313 - DNA, 25 bp, Homo sapien
cttcccacagaagtggcactggact

SEQ ID NO: 468314 - DNA, 25 bp, Homo sapien
tccttcccacagaagtggcactgga

SEQ ID NO: 468315 - DNA, 25 bp, Homo sapien
tttatagtcagttcttcatccagca

SEQ ID NO: 468316 - DNA, 25 bp, Homo sapien
cccagttgtcccatttatagtcagt

SEQ ID NO: 468317 - DNA, 25 bp, Homo sapien
ttatagtcagttcttcatccagcat

SEQ ID NO: 468318 - DNA, 25 bp, Homo sapien
tttcccagttgtcccatttatagtc

SEQ ID NO: 468319 - DNA, 25 bp, Homo sapien
aggcccacagtgatggtctgaacag

SEQ ID NO: 468320 - DNA, 25 bp, Homo sapien
tgccacgcagggcttcagtctgcag

SEQ ID NO: 468321 - DNA, 25 bp, Homo sapien
ctgctggtgacacccctgccacgca

SEQ ID NO: 468322 - DNA, 25 bp, Homo sapien
cagcctttggcgtgagacacttgtg

SEQ ID NO: 468323 - DNA, 25 bp, Homo sapien
ctaagtcttcgggaaggagagacat

SEQ ID NO: 468324 - DNA, 25 bp, Homo sapien
tcttgatggaggggccccctgtcag

SEQ ID NO: 468325 - DNA, 25 bp, Homo sapien
tgatggaggggccccctgtcagctc

SEQ ID NO: 468326 - DNA, 25 bp, Homo sapien
ttgatggaggggccccctgtcagct

SEQ ID NO: 468327 - DNA, 25 bp, Homo sapien
cttcttgatggaggggccccctgtc

SEQ ID NO: 468328 - DNA, 25 bp, Homo sapien
gggagcagcatgtgcgttcaaactt

SEQ ID NO: 468329 - DNA, 25 bp, Homo sapien
catgtgcgttcaaacttggcctgca

SEQ ID NO: 468330 - DNA, 25 bp, Homo sapien
agcagcatgtgcgttcaaacttggc

SEQ ID NO: 468331 - DNA, 25 bp, Homo sapien
agcatgtgcgttcaaacttggcctg

SEQ ID NO: 468332 - DNA, 25 bp, Homo sapien
tccctggtgacgtcctgttatttgg

SEQ ID NO: 468333 - DNA, 25 bp, Homo sapien
tggtgacgtcctgttatttggctgg

SEQ ID NO: 468334 - DNA, 25 bp, Homo sapien
cctggtgacgtcctgttatttggct

SEQ ID NO: 468335 - DNA, 25 bp, Homo sapien
gtgacgtcctgttatttggctggtc

SEQ ID NO: 468336 - DNA, 25 bp, Homo sapien
ctggagaggccgtcattgatagtgg

SEQ ID NO: 468337 - DNA, 25 bp, Homo sapien
tggagaggccgtcattgatagtggt

SEQ ID NO: 468338 - DNA, 25 bp, Homo sapien
ccacagggccgtggtccatgatgtt

SEQ ID NO: 468339 - DNA, 25 bp, Homo sapien
accacagggccgtggtccatgatgt

SEQ ID NO: 468340 - DNA, 25 bp, Homo sapien
ggcccagctctggtaggtgttctgc

SEQ ID NO: 468341 - DNA, 25 bp, Homo sapien
ccagctctggtaggtgttctgctga

SEQ ID NO: 468342 - DNA, 25 bp, Homo sapien
tgttctgctgagtaagaccgactgc

SEQ ID NO: 468343 - DNA, 25 bp, Homo sapien
aggtgttctgctgagtaagaccgac

SEQ ID NO: 468344 - DNA, 25 bp, Homo sapien
gcccacgccaatggggctaggcgac

SEQ ID NO: 468345 - DNA, 25 bp, Homo sapien
agcccacgccaatggggctaggcga

SEQ ID NO: 468346 - DNA, 25 bp, Homo sapien
tgagcccacgccaatggggctaggc

SEQ ID NO: 468347 - DNA, 25 bp, Homo sapien
ctgagcccacgccaatggggctagg

SEQ ID NO: 468348 - DNA, 25 bp, Homo sapien
tgtagccacggggagcgggtaagtc

SEQ ID NO: 468349 - DNA, 25 bp, Homo sapien
cacggggagcgggtaagtcctgcct

SEQ ID NO: 468350 - DNA, 25 bp, Homo sapien
gtaagtcctgcctcgctggcgtgcc

SEQ ID NO: 468351 - DNA, 25 bp, Homo sapien
cagtcagtgtgtagccacggggagc

SEQ ID NO: 468352 - DNA, 25 bp, Homo sapien
cagtttcctgttgaggatccgggcc

SEQ ID NO: 468353 - DNA, 25 bp, Homo sapien
gtggctgtcgctgtggggccccgga

SEQ ID NO: 468354 - DNA, 25 bp, Homo sapien
tccttcacggcatactccagcagtt

SEQ ID NO: 468355 - DNA, 25 bp, Homo sapien
gtgtccctcagcgagtggctgtcgc

SEQ ID NO: 468356 - DNA, 25 bp, Homo sapien
cgactgtttgctggcctctcggaac

SEQ ID NO: 468357 - DNA, 25 bp, Homo sapien
tctctagggatcgaactagtgcaga

SEQ ID NO: 468358 - DNA, 25 bp, Homo sapien
caggtctctagggatcgaactagtg

SEQ ID NO: 468359 - DNA, 25 bp, Homo sapien
ggcgactgtttgctggcctctcgga

SEQ ID NO: 468360 - DNA, 25 bp, Homo sapien
atggcgatggtgtggttgtgcaaaa

SEQ ID NO: 468361 - DNA, 25 bp, Homo sapien
cgatggtgtggttgtgcaaaagaca

SEQ ID NO: 468362 - DNA, 25 bp, Homo sapien
catcatgatgtggcttctcctcgga

SEQ ID NO: 468363 - DNA, 25 bp, Homo sapien
tgtggttgtgcaaaagacagtgaat

SEQ ID NO: 468364 - DNA, 25 bp, Homo sapien
cagtttcacaggttgaacattcagc

SEQ ID NO: 468365 - DNA, 25 bp, Homo sapien
tcagtttcacaggttgaacattcag

SEQ ID NO: 468366 - DNA, 25 bp, Homo sapien
ttcacaggttgaacattcagcagct

SEQ ID NO: 468367 - DNA, 25 bp, Homo sapien
gtttcacaggttgaacattcagcag

SEQ ID NO: 468368 - DNA, 25 bp, Homo sapien
caatattgcagtacagaattatgca

SEQ ID NO: 468369 - DNA, 25 bp, Homo sapien
gtacaatattgcagtacagaattat

SEQ ID NO: 468370 - DNA, 25 bp, Homo sapien
tatgcaaactaaaaggcatttccac

SEQ ID NO: 468371 - DNA, 25 bp, Homo sapien
tattgcagtacagaattatgcaaac

SEQ ID NO: 468372 - DNA, 25 bp, Homo sapien
gagtaaagagtaactggtaataatg

SEQ ID NO: 468373 - DNA, 25 bp, Homo sapien
agcacggcactgaaacaacagtgga

SEQ ID NO: 468374 - DNA, 25 bp, Homo sapien
cactgaaacaacagtggaagtctgc

SEQ ID NO: 468375 - DNA, 25 bp, Homo sapien
caagcacggcactgaaacaacagtg

SEQ ID NO: 468376 - DNA, 25 bp, Homo sapien
ctgaaacaacagtggaagtctgcat

SEQ ID NO: 468377 - DNA, 25 bp, Homo sapien
gctgcattccagacagttgttaagg

SEQ ID NO: 468378 - DNA, 25 bp, Homo sapien
cattccagacagttgttaaggcatt

SEQ ID NO: 468379 - DNA, 25 bp, Homo sapien
ggctgcattccagacagttgttaag

SEQ ID NO: 468380 - DNA, 25 bp, Homo sapien
tgcattccagacagttgttaaggca

SEQ ID NO: 468381 - DNA, 25 bp, Homo sapien
cacttaattgcaatatttgtgacca

SEQ ID NO: 468382 - DNA, 25 bp, Homo sapien
agattgtacgcttttaaattctgtg

SEQ ID NO: 468383 - DNA, 25 bp, Homo sapien
ttgtgaccatattattgaactgaat

SEQ ID NO: 468384 - DNA, 25 bp, Homo sapien
gattttctgtatatgcacttaattg

SEQ ID NO: 468385 - DNA, 25 bp, Homo sapien
ctcctagcagctgaatcgtttctct

SEQ ID NO: 468386 - DNA, 25 bp, Homo sapien
agtgcccactccgggtaagtttcat

SEQ ID NO: 468387 - DNA, 25 bp, Homo sapien
cagagtgcccactccgggtaagttt

SEQ ID NO: 468388 - DNA, 25 bp, Homo sapien
gagtgcccactccgggtaagtttca

SEQ ID NO: 468389 - DNA, 25 bp, Homo sapien
ccagagtgcccactccgggtaagtt

SEQ ID NO: 468390 - DNA, 25 bp, Homo sapien
tctgccaaaagattcaatacaaaca

SEQ ID NO: 468391 - DNA, 25 bp, Homo sapien
gggatagtaaatctaaggcctgtat

SEQ ID NO: 468392 - DNA, 25 bp, Homo sapien
tgccaaaagattcaatacaaacagc

SEQ ID NO: 468393 - DNA, 25 bp, Homo sapien
taaatctaaggcctgtatctctgcc

SEQ ID NO: 468394 - DNA, 25 bp, Homo sapien
gccatagtgggcttgatatgccacc

SEQ ID NO: 468395 - DNA, 25 bp, Homo sapien
gatctgtggaacgagacagccatag

SEQ ID NO: 468396 - DNA, 25 bp, Homo sapien
tgttcagacatctccacaatggtgc

SEQ ID NO: 468397 - DNA, 25 bp, Homo sapien
gcaaccaatcaggtaaggccaatct

SEQ ID NO: 468398 - DNA, 25 bp, Homo sapien
cttcagaataaaatgaacgagcatt

SEQ ID NO: 468399 - DNA, 25 bp, Homo sapien
ttcagaataaaatgaacgagcattt

SEQ ID NO: 468400 - DNA, 25 bp, Homo sapien
ctgtataacgtcctggttcacaagt

SEQ ID NO: 468401 - DNA, 25 bp, Homo sapien
tgtataacgtcctggttcacaagtg

SEQ ID NO: 468402 - DNA, 25 bp, Homo sapien
tcttcaggctgaaacacaggtgctg

SEQ ID NO: 468403 - DNA, 25 bp, Homo sapien
ctgtgcccattcttcaggctgaaac

SEQ ID NO: 468404 - DNA, 25 bp, Homo sapien
tgtgcccattcttcaggctgaaaca

SEQ ID NO: 468405 - DNA, 25 bp, Homo sapien
cattcttcaggctgaaacacaggtg

SEQ ID NO: 468406 - DNA, 25 bp, Homo sapien
tctgttcaataaagcatacagtgcc

SEQ ID NO: 468407 - DNA, 25 bp, Homo sapien
tacagtgcctgctgttcggagtact

SEQ ID NO: 468408 - DNA, 25 bp, Homo sapien
catgtgtacacgataaggcttgtta

SEQ ID NO: 468409 - DNA, 25 bp, Homo sapien
ttgagaacataagcagacacaggca

SEQ ID NO: 468410 - DNA, 25 bp, Homo sapien
gtgatagcctgaaagttatcaagct

SEQ ID NO: 468411 - DNA, 25 bp, Homo sapien
gcctctgcatctttccactaagact

SEQ ID NO: 468412 - DNA, 25 bp, Homo sapien
cactaagactggaaagcgaagtatc

SEQ ID NO: 468413 - DNA, 25 bp, Homo sapien
tatcttaacaatctgtgctccctgc

SEQ ID NO: 468414 - DNA, 25 bp, Homo sapien
tccattttctcaagtctcacctcca

SEQ ID NO: 468415 - DNA, 25 bp, Homo sapien
cattttctcaagtctcacctccaat

SEQ ID NO: 468416 - DNA, 25 bp, Homo sapien
tttctcaagtctcacctccaattct

SEQ ID NO: 468417 - DNA, 25 bp, Homo sapien
tcaagtctcacctccaattcttctt

SEQ ID NO: 468418 - DNA, 25 bp, Homo sapien
tcattactaaacactggaagcagaa

SEQ ID NO: 468419 - DNA, 25 bp, Homo sapien
taataaccagtcaacaaggtggtgg

SEQ ID NO: 468420 - DNA, 25 bp, Homo sapien
ctttattgggaggatccaaagcacc

SEQ ID NO: 468421 - DNA, 25 bp, Homo sapien
tacacttgcagagaactacgattag

SEQ ID NO: 468422 - DNA, 25 bp, Homo sapien
aacagttaccagcaggagacagagg

SEQ ID NO: 468423 - DNA, 25 bp, Homo sapien
cagaggcaaacaatggctttaaata

SEQ ID NO: 468424 - DNA, 25 bp, Homo sapien
tattaatgtttctgttctcacaaat

SEQ ID NO: 468425 - DNA, 25 bp, Homo sapien
aaatattgtaattgttcttgtatca

SEQ ID NO: 468426 - DNA, 25 bp, Homo sapien
ggatacagaataccagccaccatct

SEQ ID NO: 468427 - DNA, 25 bp, Homo sapien
cagccaccatctgttcaaaatgcct

SEQ ID NO: 468428 - DNA, 25 bp, Homo sapien
gattaatgaatggtgaggctccgtg

SEQ ID NO: 468429 - DNA, 25 bp, Homo sapien
cagttgtaaggggatgcaggataca

SEQ ID NO: 468430 - DNA, 25 bp, Homo sapien
tatgtgtgtaatttagttgctgtgc

SEQ ID NO: 468431 - DNA, 25 bp, Homo sapien
atgtgtgtaatttagttgctgtgct

SEQ ID NO: 468432 - DNA, 25 bp, Homo sapien
tgaccaaaacatcataggtaacctc

SEQ ID NO: 468433 - DNA, 25 bp, Homo sapien
tcataggtaacctctcgtcctccat

SEQ ID NO: 468434 - DNA, 25 bp, Homo sapien
cacagtgaccaaaacatcataggta

SEQ ID NO: 468435 - DNA, 25 bp, Homo sapien
cagaaggttgaggcaagagccacag

SEQ ID NO: 468436 - DNA, 25 bp, Homo sapien
ccaaggtcctttgtaggctggagtg

SEQ ID NO: 468437 - DNA, 25 bp, Homo sapien
cagagttttactatgagtggtcagc

SEQ ID NO: 468438 - DNA, 25 bp, Homo sapien
ggtcagctgaagtcccactagttag

SEQ ID NO: 468439 - DNA, 25 bp, Homo sapien
cagccattcattgggcagttatcaa

SEQ ID NO: 468440 - DNA, 25 bp, Homo sapien
tagttcatgtctctccggacatgct

SEQ ID NO: 468441 - DNA, 25 bp, Homo sapien
ggcttgaaaccgaacagctccttct

SEQ ID NO: 468442 - DNA, 25 bp, Homo sapien
atatctggcttgaaaccgaacagct

SEQ ID NO: 468443 - DNA, 25 bp, Homo sapien
ctttagttcatgtctctccggacat

SEQ ID NO: 468444 - DNA, 25 bp, Homo sapien
tccaagaattcaggggggtgtatag

SEQ ID NO: 468445 - DNA, 25 bp, Homo sapien
ttgtccaagaattcaggggggtgta

SEQ ID NO: 468446 - DNA, 25 bp, Homo sapien
gtatagggatgacttgtttcagttc

SEQ ID NO: 468447 - DNA, 25 bp, Homo sapien
gggtgtatagggatgacttgtttca

SEQ ID NO: 468448 - DNA, 25 bp, Homo sapien
cactgtgggccttacagatctcaga

SEQ ID NO: 468449 - DNA, 25 bp, Homo sapien
tttggtgagctatctctgcagagcc

SEQ ID NO: 468450 - DNA, 25 bp, Homo sapien
aagaaaaaggagaggtaatcacaat

SEQ ID NO: 468451 - DNA, 25 bp, Homo sapien
gctttctgacactgtgggccttaca

SEQ ID NO: 468452 - DNA, 25 bp, Homo sapien
cagtttgtcatctgtcttggataac

SEQ ID NO: 468453 - DNA, 25 bp, Homo sapien
ccattaaccgttcttgttatccaag

SEQ ID NO: 468454 - DNA, 25 bp, Homo sapien
tcttgttatccaagacagtttgtca

SEQ ID NO: 468455 - DNA, 25 bp, Homo sapien
aagttgcagactccatccaatgcca

SEQ ID NO: 468456 - DNA, 25 bp, Homo sapien
agtatattcatacctctcttggtag

SEQ ID NO: 468457 - DNA, 25 bp, Homo sapien
gatcttccgtttattgctcctacca

SEQ ID NO: 468458 - DNA, 25 bp, Homo sapien
ggtaccgatccttggagatcttccg

SEQ ID NO: 468459 - DNA, 25 bp, Homo sapien
ggtagacataggtttgctcttgcct

SEQ ID NO: 468460 - DNA, 25 bp, Homo sapien
gacttgaggatagcggccacttttc

SEQ ID NO: 468461 - DNA, 25 bp, Homo sapien
tgctcttccttgttaaacatgaggg

SEQ ID NO: 468462 - DNA, 25 bp, Homo sapien
gagatgacttgaggatagcggccac

SEQ ID NO: 468463 - DNA, 25 bp, Homo sapien
gaggatagcggccacttttcatttg

SEQ ID NO: 468464 - DNA, 25 bp, Homo sapien
gaatgtccatcatgatatacaaggg

SEQ ID NO: 468465 - DNA, 25 bp, Homo sapien
tgatatacaagggactgaacaccat

SEQ ID NO: 468466 - DNA, 25 bp, Homo sapien
ctgcagctgaacgttaataagaatg

SEQ ID NO: 468467 - DNA, 25 bp, Homo sapien
aacgttaataagaatgtccatcatg

SEQ ID NO: 468468 - DNA, 25 bp, Homo sapien
tctcttgctccacccttttgggtag

SEQ ID NO: 468469 - DNA, 25 bp, Homo sapien
ctacttctgctctctatagaagcgc

SEQ ID NO: 468470 - DNA, 25 bp, Homo sapien
tacttccattgtctgctcttatctc

SEQ ID NO: 468471 - DNA, 25 bp, Homo sapien
tgctctctatagaagcgctacttcc

SEQ ID NO: 468472 - DNA, 25 bp, Homo sapien
gactgatcatctcaggcatgaccga

SEQ ID NO: 468473 - DNA, 25 bp, Homo sapien
tataaacacctatggccaatccagg

SEQ ID NO: 468474 - DNA, 25 bp, Homo sapien
tctagattccaagactagcatcagc

SEQ ID NO: 468475 - DNA, 25 bp, Homo sapien
tagggtgtacatctgaaacactccc

SEQ ID NO: 468476 - DNA, 25 bp, Homo sapien
acctgatgaccctctatgaatgaag

SEQ ID NO: 468477 - DNA, 25 bp, Homo sapien
cctgatgaccctctatgaatgaaga

SEQ ID NO: 468478 - DNA, 25 bp, Homo sapien
atcatagaatttttcacctgatgac

SEQ ID NO: 468479 - DNA, 25 bp, Homo sapien
tgatgaccctctatgaatgaagagc

SEQ ID NO: 468480 - DNA, 25 bp, Homo sapien
gatgtagatattaccagccttggaa

SEQ ID NO: 468481 - DNA, 25 bp, Homo sapien
tagatggtcaattgtacagggcgga

SEQ ID NO: 468482 - DNA, 25 bp, Homo sapien
gcctagtgctcctgtgaaagtcatt

SEQ ID NO: 468483 - DNA, 25 bp, Homo sapien
gatgccaaatttaagcagggtccaa

SEQ ID NO: 468484 - DNA, 25 bp, Homo sapien
cataagtgacttgtggacgtgttcc

SEQ ID NO: 468485 - DNA, 25 bp, Homo sapien
tatttcacgggaacagaactcaggc

SEQ ID NO: 468486 - DNA, 25 bp, Homo sapien
ggacgtgttcctgagaaaacaccaa

SEQ ID NO: 468487 - DNA, 25 bp, Homo sapien
agcaaatgtgctttcggcttggcac

SEQ ID NO: 468488 - DNA, 25 bp, Homo sapien
tgttctgggattcacagggttggat

SEQ ID NO: 468489 - DNA, 25 bp, Homo sapien
aagcacattattaatacggtaatgg

SEQ ID NO: 468490 - DNA, 25 bp, Homo sapien
cacagggttggataccctcgttata

SEQ ID NO: 468491 - DNA, 25 bp, Homo sapien
cacttgtgacaatactggctgttct

SEQ ID NO: 468492 - DNA, 25 bp, Homo sapien
gccatataatgtaccgaaataaact

SEQ ID NO: 468493 - DNA, 25 bp, Homo sapien
tcaattttggttgagtgccatataa

SEQ ID NO: 468494 - DNA, 25 bp, Homo sapien
gctcattggcaaaaagctctgctgc

SEQ ID NO: 468495 - DNA, 25 bp, Homo sapien
aataaactgtcaacatacactgccg

SEQ ID NO: 468496 - DNA, 25 bp, Homo sapien
tacaaatcaatttcagtttgcatgc

SEQ ID NO: 468497 - DNA, 25 bp, Homo sapien
actgcctttccgcaaatttctacac

SEQ ID NO: 468498 - DNA, 25 bp, Homo sapien
caaaatgacattactgcctttccgc

SEQ ID NO: 468499 - DNA, 25 bp, Homo sapien
tgatacactgccaaaatgacattac

SEQ ID NO: 468500 - DNA, 25 bp, Homo sapien
ttgatgtttgcttctaataaggtac

SEQ ID NO: 468501 - DNA, 25 bp, Homo sapien
tagttttcttgatgtttgcttctaa

SEQ ID NO: 468502 - DNA, 25 bp, Homo sapien
ctagttttcttgatgtttgcttcta

SEQ ID NO: 468503 - DNA, 25 bp, Homo sapien
ttcttgatgtttgcttctaataagg

SEQ ID NO: 468504 - DNA, 25 bp, Homo sapien
tacttccctgtcaaagttgattgct

SEQ ID NO: 468505 - DNA, 25 bp, Homo sapien
gaagagagtgtctgggttgtaataa

SEQ ID NO: 468506 - DNA, 25 bp, Homo sapien
tttggtacttccctgtcaaagttga

SEQ ID NO: 468507 - DNA, 25 bp, Homo sapien
cctgtcaaagttgattgctttctcc

SEQ ID NO: 468508 - DNA, 25 bp, Homo sapien
ggaacattggtgcatctcatgattc

SEQ ID NO: 468509 - DNA, 25 bp, Homo sapien
aacagaaggctgtcaggtatcagga

SEQ ID NO: 468510 - DNA, 25 bp, Homo sapien
gaacattggtgcatctcatgattcc

SEQ ID NO: 468511 - DNA, 25 bp, Homo sapien
tgattccagctggattcaacagaag

SEQ ID NO: 468512 - DNA, 25 bp, Homo sapien
ccttcttccatactattcttaattg

SEQ ID NO: 468513 - DNA, 25 bp, Homo sapien
atactattcttaattgttatcccca

SEQ ID NO: 468514 - DNA, 25 bp, Homo sapien
tccatactattcttaattgttatcc

SEQ ID NO: 468515 - DNA, 25 bp, Homo sapien
tccttcttccatactattcttaatt

SEQ ID NO: 468516 - DNA, 25 bp, Homo sapien
cataagtttacattcctggtagcca

SEQ ID NO: 468517 - DNA, 25 bp, Homo sapien
gaaactgggcttgttgatgccccaa

SEQ ID NO: 468518 - DNA, 25 bp, Homo sapien
tggtagccattaccataattgaggg

SEQ ID NO: 468519 - DNA, 25 bp, Homo sapien
tggcagaagaggatgcaacctgaag

SEQ ID NO: 468520 - DNA, 25 bp, Homo sapien
ttttatatctcggaagccttttgat

SEQ ID NO: 468521 - DNA, 25 bp, Homo sapien
ggcagaataagatggttttatatct

SEQ ID NO: 468522 - DNA, 25 bp, Homo sapien
cagacaaagcaattcagacagaaca

SEQ ID NO: 468523 - DNA, 25 bp, Homo sapien
tatatctcggaagccttttgattta

SEQ ID NO: 468524 - DNA, 25 bp, Homo sapien
tctatcaatggttaaaaccatagag

SEQ ID NO: 468525 - DNA, 25 bp, Homo sapien
aatctatcaatggttaaaaccatag

SEQ ID NO: 468526 - DNA, 25 bp, Homo sapien
ggcatgtaaatatttccttgaagaa

SEQ ID NO: 468527 - DNA, 25 bp, Homo sapien
cagtttgataaactgttggcatgta

SEQ ID NO: 468528 - DNA, 25 bp, Homo sapien
tatttgaaacactcccttaattcca

SEQ ID NO: 468529 - DNA, 25 bp, Homo sapien
cttgatgttgctgctcttgttattt

SEQ ID NO: 468530 - DNA, 25 bp, Homo sapien
tacaacaagtatcctcatgatttga

SEQ ID NO: 468531 - DNA, 25 bp, Homo sapien
caagtatcctcatgatttgagtcat

SEQ ID NO: 468532 - DNA, 25 bp, Homo sapien
tggaatcagaaagcatttggccacg

SEQ ID NO: 468533 - DNA, 25 bp, Homo sapien
tttggccacggcaaactgccctctg

SEQ ID NO: 468534 - DNA, 25 bp, Homo sapien
aatggttgaggaggtagatttactg

SEQ ID NO: 468535 - DNA, 25 bp, Homo sapien
ttctctaaatcctcgcataaatggt

SEQ ID NO: 468536 - DNA, 25 bp, Homo sapien
caactggatgggatggttgtcccat

SEQ ID NO: 468537 - DNA, 25 bp, Homo sapien
aactatatacaactggatgggatgg

SEQ ID NO: 468538 - DNA, 25 bp, Homo sapien
tatacaactggatgggatggttgtc

SEQ ID NO: 468539 - DNA, 25 bp, Homo sapien
actctctgtaactatatacaactgg

SEQ ID NO: 468540 - DNA, 25 bp, Homo sapien
ctatttgctgactccccgttctgtg

SEQ ID NO: 468541 - DNA, 25 bp, Homo sapien
tgactccccgttctgtggacttcct

SEQ ID NO: 468542 - DNA, 25 bp, Homo sapien
tgtggacttcctgtcccctctatat

SEQ ID NO: 468543 - DNA, 25 bp, Homo sapien
tctatattcttgcatacaaaattca

SEQ ID NO: 468544 - DNA, 25 bp, Homo sapien
gagcacaagggattcttttcctagt

SEQ ID NO: 468545 - DNA, 25 bp, Homo sapien
tcagctgtatgttaagagagactct

SEQ ID NO: 468546 - DNA, 25 bp, Homo sapien
tgcagtctttaaaggattacaacac

SEQ ID NO: 468547 - DNA, 25 bp, Homo sapien
gacttgtgtcaagctttttgcatca

SEQ ID NO: 468548 - DNA, 25 bp, Homo sapien
tctatgaagtacgacatgatttaac

SEQ ID NO: 468549 - DNA, 25 bp, Homo sapien
tatgaagtacgacatgatttaacat

SEQ ID NO: 468550 - DNA, 25 bp, Homo sapien
caatatttctatgaagtacgacatg

SEQ ID NO: 468551 - DNA, 25 bp, Homo sapien
tatttctatgaagtacgacatgatt

SEQ ID NO: 468552 - DNA, 25 bp, Homo sapien
aataatctctcttttgccgctcatt

SEQ ID NO: 468553 - DNA, 25 bp, Homo sapien
tgccgctcatttttgcaaagtcttc

SEQ ID NO: 468554 - DNA, 25 bp, Homo sapien
taatctctcttttgccgctcatttt

SEQ ID NO: 468555 - DNA, 25 bp, Homo sapien
ttgccgctcatttttgcaaagtctt

SEQ ID NO: 468556 - DNA, 25 bp, Homo sapien
ttcctttcgttgtcttatcaaatat

SEQ ID NO: 468557 - DNA, 25 bp, Homo sapien
ggttatgacttgacaaagatccttc

SEQ ID NO: 468558 - DNA, 25 bp, Homo sapien
atcaaatatcacatgaatcattaac

SEQ ID NO: 468559 - DNA, 25 bp, Homo sapien
gaggggttatgacttgacaaagatc

SEQ ID NO: 468560 - DNA, 25 bp, Homo sapien
caaatgggactggaataagcttttt

SEQ ID NO: 468561 - DNA, 25 bp, Homo sapien
agtcaaatgggactggaataagctt

SEQ ID NO: 468562 - DNA, 25 bp, Homo sapien
tgggactggaataagctttttctcc

SEQ ID NO: 468563 - DNA, 25 bp, Homo sapien
agcagtggagtcaaatgggactgga

SEQ ID NO: 468564 - DNA, 25 bp, Homo sapien
atatttgcatgggtctaatttgcat

SEQ ID NO: 468565 - DNA, 25 bp, Homo sapien
aaatatttgcatgggtctaatttgc

SEQ ID NO: 468566 - DNA, 25 bp, Homo sapien
tatttgcatgggtctaatttgcata

SEQ ID NO: 468567 - DNA, 25 bp, Homo sapien
taaaatatttgcatgggtctaattt

SEQ ID NO: 468568 - DNA, 25 bp, Homo sapien
taagtgacccgccaagaaagataaa

SEQ ID NO: 468569 - DNA, 25 bp, Homo sapien
tctaagtttaagtgacccgccaaga

SEQ ID NO: 468570 - DNA, 25 bp, Homo sapien
tttaagtgacccgccaagaaagata

SEQ ID NO: 468571 - DNA, 25 bp, Homo sapien
agtgacccgccaagaaagataaagt

SEQ ID NO: 468572 - DNA, 25 bp, Homo sapien
ctaaacatagtcttgagaatatctt

SEQ ID NO: 468573 - DNA, 25 bp, Homo sapien
atttctcttgatactaaacatagtc

SEQ ID NO: 468574 - DNA, 25 bp, Homo sapien
tttctcttgatactaaacatagtct

SEQ ID NO: 468575 - DNA, 25 bp, Homo sapien
ttctcttgatactaaacatagtctt

SEQ ID NO: 468576 - DNA, 25 bp, Homo sapien
tccagtagttgaaccttgtccaaga

SEQ ID NO: 468577 - DNA, 25 bp, Homo sapien
tagttgaaccttgtccaagaatgag

SEQ ID NO: 468578 - DNA, 25 bp, Homo sapien
tgtccaagaatgagctcacattccc

SEQ ID NO: 468579 - DNA, 25 bp, Homo sapien
ttttccagtagttgaaccttgtcca

SEQ ID NO: 468580 - DNA, 25 bp, Homo sapien
cagtctcattagagactgcatttaa

SEQ ID NO: 468581 - DNA, 25 bp, Homo sapien
ggcttataaagttactcattaatgt

SEQ ID NO: 468582 - DNA, 25 bp, Homo sapien
ctatggcactgtaaactcagtctca

SEQ ID NO: 468583 - DNA, 25 bp, Homo sapien
ttgttgtatctccacagctttttca

SEQ ID NO: 468584 - DNA, 25 bp, Homo sapien
ctcctgaaagaattgatggatagga

SEQ ID NO: 468585 - DNA, 25 bp, Homo sapien
tctaataagttattacaacgtgtgc

SEQ ID NO: 468586 - DNA, 25 bp, Homo sapien
aattgatggataggatatgatgtca

SEQ ID NO: 468587 - DNA, 25 bp, Homo sapien
taagttattacaacgtgtgcagagc

SEQ ID NO: 468588 - DNA, 25 bp, Homo sapien
gtttttgctcaatctgctctggaga

SEQ ID NO: 468589 - DNA, 25 bp, Homo sapien
ctaatgtttttgctcaatctgctct

SEQ ID NO: 468590 - DNA, 25 bp, Homo sapien
caagtgcttggcagacgtctgtgcg

SEQ ID NO: 468591 - DNA, 25 bp, Homo sapien
cgtctgtgcgttttgatgggcaggg

SEQ ID NO: 468592 - DNA, 25 bp, Homo sapien
tctccagagtggattgacattcgcc

SEQ ID NO: 468593 - DNA, 25 bp, Homo sapien
tttctccagagtggattgacattcg

SEQ ID NO: 468594 - DNA, 25 bp, Homo sapien
tccagagtggattgacattcgccat

SEQ ID NO: 468595 - DNA, 25 bp, Homo sapien
tttttctccagagtggattgacatt

SEQ ID NO: 468596 - DNA, 25 bp, Homo sapien
ttccttgctgttcttccttcatctc

SEQ ID NO: 468597 - DNA, 25 bp, Homo sapien
ttttccttgctgttcttccttcatc

SEQ ID NO: 468598 - DNA, 25 bp, Homo sapien
ttttttccttgctgttcttccttca

SEQ ID NO: 468599 - DNA, 25 bp, Homo sapien
cttccttcatctctatatcccttgg

SEQ ID NO: 468600 - DNA, 25 bp, Homo sapien
gaaagctttgaagagccctacagga

SEQ ID NO: 468601 - DNA, 25 bp, Homo sapien
ggcttttcacagaaagctttgaaga

SEQ ID NO: 468602 - DNA, 25 bp, Homo sapien
tgtattccacattcaggcttttcac

SEQ ID NO: 468603 - DNA, 25 bp, Homo sapien
ggaccaaccgaatgtaattgataca

SEQ ID NO: 468604 - DNA, 25 bp, Homo sapien
gagtacactcttcacctacagtgct

SEQ ID NO: 468605 - DNA, 25 bp, Homo sapien
ttccacacttgcatgagtacactct

SEQ ID NO: 468606 - DNA, 25 bp, Homo sapien
ttcacctacagtgctttgttcgtac

SEQ ID NO: 468607 - DNA, 25 bp, Homo sapien
tgttctgttttctgtggagaccttc

SEQ ID NO: 468608 - DNA, 25 bp, Homo sapien
tgtttgttacacatacatgaggaat

SEQ ID NO: 468609 - DNA, 25 bp, Homo sapien
gagataaacacaacttgaaaggaca

SEQ ID NO: 468610 - DNA, 25 bp, Homo sapien
gatgtgtgattgcatgatgatgtac

SEQ ID NO: 468611 - DNA, 25 bp, Homo sapien
aatggaacagagtgacctttgaaac

SEQ ID NO: 468612 - DNA, 25 bp, Homo sapien
gccactgtccaagcctatgtctata

SEQ ID NO: 468613 - DNA, 25 bp, Homo sapien
tgtccaagcctatgtctatatcaag

SEQ ID NO: 468614 - DNA, 25 bp, Homo sapien
caagcctatgtctatatcaagagaa

SEQ ID NO: 468615 - DNA, 25 bp, Homo sapien
cactgtccaagcctatgtctatatc

SEQ ID NO: 468616 - DNA, 25 bp, Homo sapien
tcagaagacagatccatataataga

SEQ ID NO: 468617 - DNA, 25 bp, Homo sapien
cagaagacagatccatataatagag

SEQ ID NO: 468618 - DNA, 25 bp, Homo sapien
caccatcaactgcttccacctgctt

SEQ ID NO: 468619 - DNA, 25 bp, Homo sapien
ccatcaactgcttccacctgctttt

SEQ ID NO: 468620 - DNA, 25 bp, Homo sapien
caactgcttccacctgcttttccat

SEQ ID NO: 468621 - DNA, 25 bp, Homo sapien
atcaactgcttccacctgcttttcc

SEQ ID NO: 468622 - DNA, 25 bp, Homo sapien
tgaagtcataaattggagatgggtc

SEQ ID NO: 468623 - DNA, 25 bp, Homo sapien
ggtcaacatcaggtaaccaaggaaa

SEQ ID NO: 468624 - DNA, 25 bp, Homo sapien
ccaaggaaaaatgggatgttcacat

SEQ ID NO: 468625 - DNA, 25 bp, Homo sapien
aaatgggatgttcacattggtgaca

SEQ ID NO: 468626 - DNA, 25 bp, Homo sapien
taggttgatgatggagcttaaatga

SEQ ID NO: 468627 - DNA, 25 bp, Homo sapien
cttgtaggttgatgatggagcttaa

SEQ ID NO: 468628 - DNA, 25 bp, Homo sapien
tgatggagcttaaatgagatgttgt

SEQ ID NO: 468629 - DNA, 25 bp, Homo sapien
tgagatgttgttataaatgctagac

SEQ ID NO: 468630 - DNA, 25 bp, Homo sapien
gagcattgtgatttgtggatagaac

SEQ ID NO: 468631 - DNA, 25 bp, Homo sapien
gagagcattgtgatttgtggataga

SEQ ID NO: 468632 - DNA, 25 bp, Homo sapien
gctgagagcattgtgatttgtggat

SEQ ID NO: 468633 - DNA, 25 bp, Homo sapien
ctgctgagagcattgtgatttgtgg

SEQ ID NO: 468634 - DNA, 25 bp, Homo sapien
ctgctaggtggaatagggttgggtg

SEQ ID NO: 468635 - DNA, 25 bp, Homo sapien
atgttcagattcaaaggtggccaag

SEQ ID NO: 468636 - DNA, 25 bp, Homo sapien
tgagctctgcagttgctgtatcatg

SEQ ID NO: 468637 - DNA, 25 bp, Homo sapien
gctctgcagttgctgtatcatgttt

SEQ ID NO: 468638 - DNA, 25 bp, Homo sapien
tcgtcgcctctcttgagctctgcag

SEQ ID NO: 468639 - DNA, 25 bp, Homo sapien
tctttctctcttctcgtcgcctctc

SEQ ID NO: 468640 - DNA, 25 bp, Homo sapien
aaattttctagttttacatcttcag

SEQ ID NO: 468641 - DNA, 25 bp, Homo sapien
gcggctgcgaacaccgtttgtatgt

SEQ ID NO: 468642 - DNA, 25 bp, Homo sapien
gtggcggctgcgaacaccgtttgta

SEQ ID NO: 468643 - DNA, 25 bp, Homo sapien
gctgcgaacaccgtttgtatgtgtt

SEQ ID NO: 468644 - DNA, 25 bp, Homo sapien
gcgaacaccgtttgtatgtgttttc

SEQ ID NO: 468645 - DNA, 25 bp, Homo sapien
gccgtggtacagagacctccttact

SEQ ID NO: 468646 - DNA, 25 bp, Homo sapien
tgctttgtacgagccgtggtacaga

SEQ ID NO: 468647 - DNA, 25 bp, Homo sapien
cgggcagtctgctttgtacgagccg

SEQ ID NO: 468648 - DNA, 25 bp, Homo sapien
gagccgtggtacagagacctcctta

SEQ ID NO: 468649 - DNA, 25 bp, Homo sapien
tgttacgatgaggtttcttcacccc

SEQ ID NO: 468650 - DNA, 25 bp, Homo sapien
tcacccctccagtagagggcgcact

SEQ ID NO: 468651 - DNA, 25 bp, Homo sapien
ctgttacgatgaggtttcttcaccc

SEQ ID NO: 468652 - DNA, 25 bp, Homo sapien
tcttcacccctccagtagagggcgc

SEQ ID NO: 468653 - DNA, 25 bp, Homo sapien
gacttctgataacgtctaacttcac

SEQ ID NO: 468654 - DNA, 25 bp, Homo sapien
tgataacgtctaacttcacggagcg

SEQ ID NO: 468655 - DNA, 25 bp, Homo sapien
tctgataacgtctaacttcacggag

SEQ ID NO: 468656 - DNA, 25 bp, Homo sapien
gaagggaagtctgcgaatcagaagt

SEQ ID NO: 468657 - DNA, 25 bp, Homo sapien
tactgagcaatttctcgcaccagac

SEQ ID NO: 468658 - DNA, 25 bp, Homo sapien
taagcacgttctccacgtatgcggc

SEQ ID NO: 468659 - DNA, 25 bp, Homo sapien
cgttctccacgtatgcggcgtgcta

SEQ ID NO: 468660 - DNA, 25 bp, Homo sapien
caccgatagctgcgctctggaagcg

SEQ ID NO: 468661 - DNA, 25 bp, Homo sapien
tctactgtatgataaaaatgctaca

SEQ ID NO: 468662 - DNA, 25 bp, Homo sapien
ctactgtatgataaaaatgctacaa

SEQ ID NO: 468663 - DNA, 25 bp, Homo sapien
gctgaaagtgttcacaaggtgtcca

SEQ ID NO: 468664 - DNA, 25 bp, Homo sapien
gtgagccaataagctgaaagtgttc

SEQ ID NO: 468665 - DNA, 25 bp, Homo sapien
ttgtgagccaataagctgaaagtgt

SEQ ID NO: 468666 - DNA, 25 bp, Homo sapien
agctgaaagtgttcacaaggtgtcc

SEQ ID NO: 468667 - DNA, 25 bp, Homo sapien
ccatgcctacctaggataaagttta

SEQ ID NO: 468668 - DNA, 25 bp, Homo sapien
cttataaagtagacatagtaagaga

SEQ ID NO: 468669 - DNA, 25 bp, Homo sapien
tagaacaagtataaccatacactgt

SEQ ID NO: 468670 - DNA, 25 bp, Homo sapien
cttgcaagtgtgatagtacctaacc

SEQ ID NO: 468671 - DNA, 25 bp, Homo sapien
gcagcctcagcctagtattccagga

SEQ ID NO: 468672 - DNA, 25 bp, Homo sapien
ttcaagcttgaaaggacaggtgcca

SEQ ID NO: 468673 - DNA, 25 bp, Homo sapien
taaacaacgcttttaaggcactatg

SEQ ID NO: 468674 - DNA, 25 bp, Homo sapien
caactctgtggttccggtagtttat

SEQ ID NO: 468675 - DNA, 25 bp, Homo sapien
gctcttagagttcttcatatactca

SEQ ID NO: 468676 - DNA, 25 bp, Homo sapien
tcaactctatgttgtctcaaaggcc

SEQ ID NO: 468677 - DNA, 25 bp, Homo sapien
tattcgtggccaaaggatcaactct

SEQ ID NO: 468678 - DNA, 25 bp, Homo sapien
catatactcagtacgcacattaatt

SEQ ID NO: 468679 - DNA, 25 bp, Homo sapien
tccctgccatgggttctcataaagt

SEQ ID NO: 468680 - DNA, 25 bp, Homo sapien
tgccatgggttctcataaagtgtgc

SEQ ID NO: 468681 - DNA, 25 bp, Homo sapien
ttaagccatgaatccacagggaaga

SEQ ID NO: 468682 - DNA, 25 bp, Homo sapien
agttgcacccaggtatgtttctctt

SEQ ID NO: 468683 - DNA, 25 bp, Homo sapien
ttttcccttgccaaattccagttca

SEQ ID NO: 468684 - DNA, 25 bp, Homo sapien
gctcagggctactccttccccaaag

SEQ ID NO: 468685 - DNA, 25 bp, Homo sapien
ctttcatgaccaagtgttcagggag

SEQ ID NO: 468686 - DNA, 25 bp, Homo sapien
gccaaattccagttcactttcatga

SEQ ID NO: 468687 - DNA, 25 bp, Homo sapien
cttctgtgtacaagtaatttaaaga

SEQ ID NO: 468688 - DNA, 25 bp, Homo sapien
taacttcttgatattcaagtctcat

SEQ ID NO: 468689 - DNA, 25 bp, Homo sapien
ccatccatagctgctaacttcttga

SEQ ID NO: 468690 - DNA, 25 bp, Homo sapien
atagcttcacccatccatagctgct

SEQ ID NO: 468691 - DNA, 25 bp, Homo sapien
ttcccatagcttcacccatccatag

SEQ ID NO: 468692 - DNA, 25 bp, Homo sapien
agtctcgaattccaagttccatttg

SEQ ID NO: 468693 - DNA, 25 bp, Homo sapien
gagttccctcaaaggctacctgctc

SEQ ID NO: 468694 - DNA, 25 bp, Homo sapien
aaaggctacctgctccaaaactatc

SEQ ID NO: 468695 - DNA, 25 bp, Homo sapien
cgaattccaagttccatttgtgttc

SEQ ID NO: 468696 - DNA, 25 bp, Homo sapien
cagggccacattagagtgaacttca

SEQ ID NO: 468697 - DNA, 25 bp, Homo sapien
tcaacagatgactgacgcagcagaa

SEQ ID NO: 468698 - DNA, 25 bp, Homo sapien
gggcagatttgtaacctccttccat

SEQ ID NO: 468699 - DNA, 25 bp, Homo sapien
cagtgaatgctctggggatcaggca

SEQ ID NO: 468700 - DNA, 25 bp, Homo sapien
gagctgtctgttgtggtattcatca

SEQ ID NO: 468701 - DNA, 25 bp, Homo sapien
tatattgcagcgagatattgatctg

SEQ ID NO: 468702 - DNA, 25 bp, Homo sapien
cactgtgtagactaatatcagctcc

SEQ ID NO: 468703 - DNA, 25 bp, Homo sapien
cctcatctgtaatacactgtgtaga

SEQ ID NO: 468704 - DNA, 25 bp, Homo sapien
aaaggcttacattgtgaggactcat

SEQ ID NO: 468705 - DNA, 25 bp, Homo sapien
gagggactatcctgaactgcttgat

SEQ ID NO: 468706 - DNA, 25 bp, Homo sapien
gcattttaatgcagatttgagggac

SEQ ID NO: 468707 - DNA, 25 bp, Homo sapien
tctcactagtgcctcataagggccc

SEQ ID NO: 468708 - DNA, 25 bp, Homo sapien
aaactcattctttgcatctgagcca

SEQ ID NO: 468709 - DNA, 25 bp, Homo sapien
ctcattctttgcatctgagccataa

SEQ ID NO: 468710 - DNA, 25 bp, Homo sapien
caaactcattctttgcatctgagcc

SEQ ID NO: 468711 - DNA, 25 bp, Homo sapien
actcattctttgcatctgagccata

SEQ ID NO: 468712 - DNA, 25 bp, Homo sapien
tccaaagatatattctcaatgataa

SEQ ID NO: 468713 - DNA, 25 bp, Homo sapien
ttgattacatatttctttgaagtac

SEQ ID NO: 468714 - DNA, 25 bp, Homo sapien
accgtgttatttgtaatgccctgca

SEQ ID NO: 468715 - DNA, 25 bp, Homo sapien
gcactaatatagagaagaggtttcc

SEQ ID NO: 468716 - DNA, 25 bp, Homo sapien
gttctcagctcacaatatagtagga

SEQ ID NO: 468717 - DNA, 25 bp, Homo sapien
ggatgtttttgaagcacccacaata

SEQ ID NO: 468718 - DNA, 25 bp, Homo sapien
tctcaccaacaagatttgaggcctt

SEQ ID NO: 468719 - DNA, 25 bp, Homo sapien
tgtagttcgcattgaagaaaaaggc

SEQ ID NO: 468720 - DNA, 25 bp, Homo sapien
tgtttgctgcccttgcattatttac

SEQ ID NO: 468721 - DNA, 25 bp, Homo sapien
aaagtgtgttgtcctaaatgctagc

SEQ ID NO: 468722 - DNA, 25 bp, Homo sapien
gactaagttcagtgcctagtaaggg

SEQ ID NO: 468723 - DNA, 25 bp, Homo sapien
tttaagactgtagcgcagacccaca

SEQ ID NO: 468724 - DNA, 25 bp, Homo sapien
tttgacattgcagaagagtttccag

SEQ ID NO: 468725 - DNA, 25 bp, Homo sapien
taaggggtgcgtgctaaatttgaca

SEQ ID NO: 468726 - DNA, 25 bp, Homo sapien
gatggagcggcatataaacactccc

SEQ ID NO: 468727 - DNA, 25 bp, Homo sapien
gatatttctggtaagtatgaaaaaa

SEQ ID NO: 468728 - DNA, 25 bp, Homo sapien
ttttgcctactgaattgtaaagcag

SEQ ID NO: 468729 - DNA, 25 bp, Homo sapien
atcctccagatggagcggcatataa

SEQ ID NO: 468730 - DNA, 25 bp, Homo sapien
cattgccagtagtcataatgcctac

SEQ ID NO: 468731 - DNA, 25 bp, Homo sapien
tacattctgcacctatgccataagc

SEQ ID NO: 468732 - DNA, 25 bp, Homo sapien
gcctactgcatttgtaactcagacc

SEQ ID NO: 468733 - DNA, 25 bp, Homo sapien
tgcatttgtagattcatagcttcaa

SEQ ID NO: 468734 - DNA, 25 bp, Homo sapien
tcattatttgggtcattctttgaat

SEQ ID NO: 468735 - DNA, 25 bp, Homo sapien
cttccaagtcaatcagtgatgattt

SEQ ID NO: 468736 - DNA, 25 bp, Homo sapien
aagacttcattatttgggtcattct

SEQ ID NO: 468737 - DNA, 25 bp, Homo sapien
gacttcattatttgggtcattcttt

SEQ ID NO: 468738 - DNA, 25 bp, Homo sapien
ttgccatcttggcattgaaggctat

SEQ ID NO: 468739 - DNA, 25 bp, Homo sapien
gccatcttggcattgaaggctatat

SEQ ID NO: 468740 - DNA, 25 bp, Homo sapien
tcttggcattgaaggctatattctt

SEQ ID NO: 468741 - DNA, 25 bp, Homo sapien
caattaggttgcacgtttattttgt

SEQ ID NO: 468742 - DNA, 25 bp, Homo sapien
ggcgcttctgctattatggaatcat

SEQ ID NO: 468743 - DNA, 25 bp, Homo sapien
tcactcccttgttctcagctcattc

SEQ ID NO: 468744 - DNA, 25 bp, Homo sapien
ggtctgctggcgcttctgctattat

SEQ ID NO: 468745 - DNA, 25 bp, Homo sapien
gctggcgcttctgctattatggaat

SEQ ID NO: 468746 - DNA, 25 bp, Homo sapien
ccagaaatgaacctgaaagactggg

SEQ ID NO: 468747 - DNA, 25 bp, Homo sapien
cagtataagcataaggcaacagccg

SEQ ID NO: 468748 - DNA, 25 bp, Homo sapien
ggataaggaacaccagaaatgaacc

SEQ ID NO: 468749 - DNA, 25 bp, Homo sapien
gcaacagccgtagtgatgtctggat

SEQ ID NO: 468750 - DNA, 25 bp, Homo sapien
catgtaccatactgctctccgggaa

SEQ ID NO: 468751 - DNA, 25 bp, Homo sapien
tctccgggaagcaaaatggttgcac

SEQ ID NO: 468752 - DNA, 25 bp, Homo sapien
tttgatttatcacttctgacattag

SEQ ID NO: 468753 - DNA, 25 bp, Homo sapien
tctgacattagcatgtaccatactg

SEQ ID NO: 468754 - DNA, 25 bp, Homo sapien
agagagcatggtcgttttattgtaa

SEQ ID NO: 468755 - DNA, 25 bp, Homo sapien
gattataaatcaccccagggtcgct

SEQ ID NO: 468756 - DNA, 25 bp, Homo sapien
tgtggacagggtttcacaagattat

SEQ ID NO: 468757 - DNA, 25 bp, Homo sapien
ctctgttcccaccataaagagagca

SEQ ID NO: 468758 - DNA, 25 bp, Homo sapien
gacccactccgcttataactagcaa

SEQ ID NO: 468759 - DNA, 25 bp, Homo sapien
gagacccactccgcttataactagc

SEQ ID NO: 468760 - DNA, 25 bp, Homo sapien
cccactccgcttataactagcaaaa

SEQ ID NO: 468761 - DNA, 25 bp, Homo sapien
agacccactccgcttataactagca

SEQ ID NO: 468762 - DNA, 25 bp, Homo sapien
gccgccaggagtcagtgtgctgttc

SEQ ID NO: 468763 - DNA, 25 bp, Homo sapien
gtgctgttctcgctttgtgtacata

SEQ ID NO: 468764 - DNA, 25 bp, Homo sapien
tctcgctttgtgtacataagcgcat

SEQ ID NO: 468765 - DNA, 25 bp, Homo sapien
tgccgccaggagtcagtgtgctgtt

SEQ ID NO: 468766 - DNA, 25 bp, Homo sapien
atctttgagaggtacagcatcacat

SEQ ID NO: 468767 - DNA, 25 bp, Homo sapien
catgccgctgtttccgtgcgccgga

SEQ ID NO: 468768 - DNA, 25 bp, Homo sapien
cggagtgaaccttccccagataact

SEQ ID NO: 468769 - DNA, 25 bp, Homo sapien
ctaaatctttgagaggtacagcatc

SEQ ID NO: 468770 - DNA, 25 bp, Homo sapien
ggtcttgaatatgtgatcgtaagca

SEQ ID NO: 468771 - DNA, 25 bp, Homo sapien
gaatatgtgatcgtaagcatactca

SEQ ID NO: 468772 - DNA, 25 bp, Homo sapien
cttgaatatgtgatcgtaagcatac

SEQ ID NO: 468773 - DNA, 25 bp, Homo sapien
tttctggtcttgaatatgtgatcgt

SEQ ID NO: 468774 - DNA, 25 bp, Homo sapien
caggatgatggattgctatgtttaa

SEQ ID NO: 468775 - DNA, 25 bp, Homo sapien
tgatggattgctatgtttaatacat

SEQ ID NO: 468776 - DNA, 25 bp, Homo sapien
taatacatttgagcttttgtctgtc

SEQ ID NO: 468777 - DNA, 25 bp, Homo sapien
ctgcaggatgatggattgctatgtt

SEQ ID NO: 468778 - DNA, 25 bp, Homo sapien
gcagcgggtagtcactgcctctgaa

SEQ ID NO: 468779 - DNA, 25 bp, Homo sapien
tgaactgtcaggactccagcctttg

SEQ ID NO: 468780 - DNA, 25 bp, Homo sapien
gggtggtcgcgaagagcaaggaagg

SEQ ID NO: 468781 - DNA, 25 bp, Homo sapien
agcctttgttaagcagcgggtagtc

SEQ ID NO: 468782 - DNA, 25 bp, Homo sapien
aaagcacagacttctcattgactgg

SEQ ID NO: 468783 - DNA, 25 bp, Homo sapien
accttatcctgttgtccttgaaatt

SEQ ID NO: 468784 - DNA, 25 bp, Homo sapien
gatcactcaagatgagttcacacca

SEQ ID NO: 468785 - DNA, 25 bp, Homo sapien
ttaaagtaaagcagagtggtgtgcc

SEQ ID NO: 468786 - DNA, 25 bp, Homo sapien
ttcacatctgttcctgtcaaagtgg

SEQ ID NO: 468787 - DNA, 25 bp, Homo sapien
tacccttgggaaatctcttgatcag

SEQ ID NO: 468788 - DNA, 25 bp, Homo sapien
ggtgctaagataccggtcacccagc

SEQ ID NO: 468789 - DNA, 25 bp, Homo sapien
caagagggaattgggccgataataa

SEQ ID NO: 468790 - DNA, 25 bp, Homo sapien
gtggaacaagttcgcatcctgaggg

SEQ ID NO: 468791 - DNA, 25 bp, Homo sapien
tccagccaggagtgaaccgctgcaa

SEQ ID NO: 468792 - DNA, 25 bp, Homo sapien
caggaaggacttcgagaccctctac

SEQ ID NO: 468793 - DNA, 25 bp, Homo sapien
tacggtctacaccaagctgaagcgg

SEQ ID NO: 468794 - DNA, 25 bp, Homo sapien
ttttgtgcgttcctctccagagcgc

SEQ ID NO: 468795 - DNA, 25 bp, Homo sapien
ccccggagaggactcgcatttcgac

SEQ ID NO: 468796 - DNA, 25 bp, Homo sapien
tgcgctcgctctttattaccttcac

SEQ ID NO: 468797 - DNA, 25 bp, Homo sapien
ttcgacttgcgggacacttttgtgc

SEQ ID NO: 468798 - DNA, 25 bp, Homo sapien
gagacatgcaatctaacggtagtag

SEQ ID NO: 468799 - DNA, 25 bp, Homo sapien
tccccgcggacgaaatggaatgtga

SEQ ID NO: 468800 - DNA, 25 bp, Homo sapien
ccaaaacgcgtggagatggatccta

SEQ ID NO: 468801 - DNA, 25 bp, Homo sapien
caggctcctctttaagttggcgggc

SEQ ID NO: 468802 - DNA, 25 bp, Homo sapien
ggccatagaagtgtgctcaaattga

SEQ ID NO: 468803 - DNA, 25 bp, Homo sapien
gatttgtgttatggctggactggaa

SEQ ID NO: 468804 - DNA, 25 bp, Homo sapien
taaggctatttgtgccgggtgtgct

SEQ ID NO: 468805 - DNA, 25 bp, Homo sapien
gagaaatgcactctattgttaaggc

SEQ ID NO: 468806 - DNA, 25 bp, Homo sapien
tgggtaattcatcaccaagctctct

SEQ ID NO: 468807 - DNA, 25 bp, Homo sapien
aaaggcttgagagagtcacttggca

SEQ ID NO: 468808 - DNA, 25 bp, Homo sapien
gcagtgcgtctgagttaaaaaggct

SEQ ID NO: 468809 - DNA, 25 bp, Homo sapien
ctgtgcttgattagagaatgcatcc

SEQ ID NO: 468810 - DNA, 25 bp, Homo sapien
cgaggcatgctaaatgttgagcaaa

SEQ ID NO: 468811 - DNA, 25 bp, Homo sapien
tttattttatcccatcgaggcatgc

SEQ ID NO: 468812 - DNA, 25 bp, Homo sapien
gcctgacccaagtcaactccttgaa

SEQ ID NO: 468813 - DNA, 25 bp, Homo sapien
aaacagctttgcatccggcacaagt

SEQ ID NO: 468814 - DNA, 25 bp, Homo sapien
ccaagatgacccaataagaattctt

SEQ ID NO: 468815 - DNA, 25 bp, Homo sapien
tgctggagttagaagcagtgtgcat

SEQ ID NO: 468816 - DNA, 25 bp, Homo sapien
tccaagatgacccaataagaattct

SEQ ID NO: 468817 - DNA, 25 bp, Homo sapien
ggatttgtgtctttgggtgctggag

SEQ ID NO: 468818 - DNA, 25 bp, Homo sapien
ttagctcccaatctgaggacattgc

SEQ ID NO: 468819 - DNA, 25 bp, Homo sapien
gctcccaatctgaggacattgctgt

SEQ ID NO: 468820 - DNA, 25 bp, Homo sapien
ggctgaagagaagtggtggagttaa

SEQ ID NO: 468821 - DNA, 25 bp, Homo sapien
caatctgaggacattgctgtccttt

SEQ ID NO: 468822 - DNA, 25 bp, Homo sapien
ggtgcatgccgatccaccgcagtat

SEQ ID NO: 468823 - DNA, 25 bp, Homo sapien
tttggtaccactaaagtccatgccc

SEQ ID NO: 468824 - DNA, 25 bp, Homo sapien
aaagcacctacgctatgatactgag

SEQ ID NO: 468825 - DNA, 25 bp, Homo sapien
tgtttgccagaagcaatcgagacca

SEQ ID NO: 468826 - DNA, 25 bp, Homo sapien
tacggtaattttcatgggccggaga

SEQ ID NO: 468827 - DNA, 25 bp, Homo sapien
tagcagtgctcaccataatttggaa

SEQ ID NO: 468828 - DNA, 25 bp, Homo sapien
aaagggcagatttggtaagcaggtc

SEQ ID NO: 468829 - DNA, 25 bp, Homo sapien
tatgtgaaggcctaacgatgtgttg

SEQ ID NO: 468830 - DNA, 25 bp, Homo sapien
catcagatagtgtgttctatcctcc

SEQ ID NO: 468831 - DNA, 25 bp, Homo sapien
ggtacagttgagcaaactgaacatc

SEQ ID NO: 468832 - DNA, 25 bp, Homo sapien
gttttgattctctagggtacagttg

SEQ ID NO: 468833 - DNA, 25 bp, Homo sapien
ggtcatattctgggaataaattagg

SEQ ID NO: 468834 - DNA, 25 bp, Homo sapien
ccactcatgcctctaacatttcttt

SEQ ID NO: 468835 - DNA, 25 bp, Homo sapien
gccaatcaacgtggcacttattaaa

SEQ ID NO: 468836 - DNA, 25 bp, Homo sapien
agcctacttagagaacgccaatcaa

SEQ ID NO: 468837 - DNA, 25 bp, Homo sapien
gagtcctgttacaacagatctttaa

SEQ ID NO: 468838 - DNA, 25 bp, Homo sapien
taacaagagtcctgttacaacagat

SEQ ID NO: 468839 - DNA, 25 bp, Homo sapien
taatacactgcttgcaccaaaggtc

SEQ ID NO: 468840 - DNA, 25 bp, Homo sapien
aaagtttctttagacagccattgtg

SEQ ID NO: 468841 - DNA, 25 bp, Homo sapien
tgtgttaaaccatgcattcagttgt

SEQ ID NO: 468842 - DNA, 25 bp, Homo sapien
ccattgtgtgggaacatgatgtcaa

SEQ ID NO: 468843 - DNA, 25 bp, Homo sapien
aaaatctcatctataccttcagctg

SEQ ID NO: 468844 - DNA, 25 bp, Homo sapien
cttcagctgtatatgcaaggcattc

SEQ ID NO: 468845 - DNA, 25 bp, Homo sapien
tagagctcctgcttgtacatatccc

SEQ ID NO: 468846 - DNA, 25 bp, Homo sapien
cctgaagaggagtttaccacacata

SEQ ID NO: 468847 - DNA, 25 bp, Homo sapien
aactgttttcacatgatagctcagg

SEQ ID NO: 468848 - DNA, 25 bp, Homo sapien
tttcacatgatagctcagggactca

SEQ ID NO: 468849 - DNA, 25 bp, Homo sapien
cacatgatagctcagggactcagac

SEQ ID NO: 468850 - DNA, 25 bp, Homo sapien
ggcaactgttttcacatgatagctc

SEQ ID NO: 468851 - DNA, 25 bp, Homo sapien
tacccactccttcgtgtcggtgaca

SEQ ID NO: 468852 - DNA, 25 bp, Homo sapien
tcagaggatcctcatgtggagcctg

SEQ ID NO: 468853 - DNA, 25 bp, Homo sapien
tagtctcggtgagagagtctgaagc

SEQ ID NO: 468854 - DNA, 25 bp, Homo sapien
gaagacgtgatatttggaactgctg

SEQ ID NO: 468855 - DNA, 25 bp, Homo sapien
atccacgtcctactcaggcctgccc

SEQ ID NO: 468856 - DNA, 25 bp, Homo sapien
cagattccaaggcaatctcccatcc

SEQ ID NO: 468857 - DNA, 25 bp, Homo sapien
ccagattccaaggcaatctcccatc

SEQ ID NO: 468858 - DNA, 25 bp, Homo sapien
atctcccatccacgtcctactcagg

SEQ ID NO: 468859 - DNA, 25 bp, Homo sapien
aagcaggtggttcatggaggtcctg

SEQ ID NO: 468860 - DNA, 25 bp, Homo sapien
agcaggtggttcatggaggtcctga

SEQ ID NO: 468861 - DNA, 25 bp, Homo sapien
cctgattccagactgatgaagagag

SEQ ID NO: 468862 - DNA, 25 bp, Homo sapien
tgattccagactgatgaagagagct

SEQ ID NO: 468863 - DNA, 25 bp, Homo sapien
aaaaacacaagagcttgctgagtac

SEQ ID NO: 468864 - DNA, 25 bp, Homo sapien
ctgctgatatattctctccatactg

SEQ ID NO: 468865 - DNA, 25 bp, Homo sapien
tattctctccatactgggacttcct

SEQ ID NO: 468866 - DNA, 25 bp, Homo sapien
tcaacacttagaggtctgacttaac

SEQ ID NO: 468867 - DNA, 25 bp, Homo sapien
ccggttgcagggatgaatgtctttg

SEQ ID NO: 468868 - DNA, 25 bp, Homo sapien
gaccttctgctttggccggttgcag

SEQ ID NO: 468869 - DNA, 25 bp, Homo sapien
tctgacttaaccagaccttctgctt

SEQ ID NO: 468870 - DNA, 25 bp, Homo sapien
ggtagcccacgtattttgatgtctc

SEQ ID NO: 468871 - DNA, 25 bp, Homo sapien
atctttcaggtagcccacgtatttt

SEQ ID NO: 468872 - DNA, 25 bp, Homo sapien
tggcttcccaatgttgtagctggaa

SEQ ID NO: 468873 - DNA, 25 bp, Homo sapien
ggcttcccaatgttgtagctggaat

SEQ ID NO: 468874 - DNA, 25 bp, Homo sapien
tttctcagaagacatcggcggcggt

SEQ ID NO: 468875 - DNA, 25 bp, Homo sapien
cattgggcaactgaatatcacccct

SEQ ID NO: 468876 - DNA, 25 bp, Homo sapien
gcggcggtaacaatagcattcatag

SEQ ID NO: 468877 - DNA, 25 bp, Homo sapien
atagcattcatagtcattgggcaac

SEQ ID NO: 468878 - DNA, 25 bp, Homo sapien
tacaccagaaacatgcaagtcttgc

SEQ ID NO: 468879 - DNA, 25 bp, Homo sapien
caagtaactcactgaacacatccgg

SEQ ID NO: 468880 - DNA, 25 bp, Homo sapien
atccggttgcccaactcaccaaggt

SEQ ID NO: 468881 - DNA, 25 bp, Homo sapien
caatcttacgttcccatttcaagta

SEQ ID NO: 468882 - DNA, 25 bp, Homo sapien
aaaccttcagtttattgatgcctcc

SEQ ID NO: 468883 - DNA, 25 bp, Homo sapien
cttcagtttattgatgcctccttca

SEQ ID NO: 468884 - DNA, 25 bp, Homo sapien
aaaaaccttcagtttattgatgcct

SEQ ID NO: 468885 - DNA, 25 bp, Homo sapien
aaccttcagtttattgatgcctcct

SEQ ID NO: 468886 - DNA, 25 bp, Homo sapien
tggagatttctagttgtcagctttg

SEQ ID NO: 468887 - DNA, 25 bp, Homo sapien
aagagatggattgtacaagttggag

SEQ ID NO: 468888 - DNA, 25 bp, Homo sapien
gttgtcagctttggctctccgatga

SEQ ID NO: 468889 - DNA, 25 bp, Homo sapien
aaaaaagagatggattgtacaagtt

SEQ ID NO: 468890 - DNA, 25 bp, Homo sapien
caaaatgaccaaacacaggtaaata

SEQ ID NO: 468891 - DNA, 25 bp, Homo sapien
ggaagttgtacttcgtagttcacta

SEQ ID NO: 468892 - DNA, 25 bp, Homo sapien
tatattatagaagtagaagtaaggg

SEQ ID NO: 468893 - DNA, 25 bp, Homo sapien
tgtacttcgtagttcactacacggc

SEQ ID NO: 468894 - DNA, 25 bp, Homo sapien
gtcctcccaagaagcttctatcttt

SEQ ID NO: 468895 - DNA, 25 bp, Homo sapien
agtcctcccaagaagcttctatctt

SEQ ID NO: 468896 - DNA, 25 bp, Homo sapien
cagtcctcccaagaagcttctatct

SEQ ID NO: 468897 - DNA, 25 bp, Homo sapien
tcctcccaagaagcttctatcttta

SEQ ID NO: 468898 - DNA, 25 bp, Homo sapien
tagtaggagttgctggccagaccca

SEQ ID NO: 468899 - DNA, 25 bp, Homo sapien
ggccagacccatagtcttgacgtca

SEQ ID NO: 468900 - DNA, 25 bp, Homo sapien
ttctactctgtagtaggagttgctg

SEQ ID NO: 468901 - DNA, 25 bp, Homo sapien
gagttgctggccagacccatagtct

SEQ ID NO: 468902 - DNA, 25 bp, Homo sapien
cttatttaatgaatcaactctgttg

SEQ ID NO: 468903 - DNA, 25 bp, Homo sapien
ttatttaatgaatcaactctgttgt

SEQ ID NO: 468904 - DNA, 25 bp, Homo sapien
cgtatggatgcctggcttgttgaaa

SEQ ID NO: 468905 - DNA, 25 bp, Homo sapien
ttaaatgggccacttctgtaggtcg

SEQ ID NO: 468906 - DNA, 25 bp, Homo sapien
aattctccaggttggcccaagatgg

SEQ ID NO: 468907 - DNA, 25 bp, Homo sapien
tgctccttgattaggggcgttaaca

SEQ ID NO: 468908 - DNA, 25 bp, Homo sapien
agcatccaggttattgttcattggc

SEQ ID NO: 468909 - DNA, 25 bp, Homo sapien
ttgagcatccaggttattgttcatt

SEQ ID NO: 468910 - DNA, 25 bp, Homo sapien
gagcatccaggttattgttcattgg

SEQ ID NO: 468911 - DNA, 25 bp, Homo sapien
cctttgagcatccaggttattgttc

SEQ ID NO: 468912 - DNA, 25 bp, Homo sapien
acaggactcttgtcacaaacagaga

SEQ ID NO: 468913 - DNA, 25 bp, Homo sapien
cagagactgacaagccaatctttgg

SEQ ID NO: 468914 - DNA, 25 bp, Homo sapien
gcaaaccattgagcaacatgaacag

SEQ ID NO: 468915 - DNA, 25 bp, Homo sapien
catgtaggataattattgtctggga

SEQ ID NO: 468916 - DNA, 25 bp, Homo sapien
caccaggattgtacataattccatc

SEQ ID NO: 468917 - DNA, 25 bp, Homo sapien
gtacataattccatcaaaacatgca

SEQ ID NO: 468918 - DNA, 25 bp, Homo sapien
aaaacatgcacactgggctggctcc

SEQ ID NO: 468919 - DNA, 25 bp, Homo sapien
attccatcaaaacatgcacactggg

SEQ ID NO: 468920 - DNA, 25 bp, Homo sapien
caacataggggtgctttgagaaagc

SEQ ID NO: 468921 - DNA, 25 bp, Homo sapien
tgacggatagtcttgctaccagcat

SEQ ID NO: 468922 - DNA, 25 bp, Homo sapien
tgatccagatgtgacggatagtctt

SEQ ID NO: 468923 - DNA, 25 bp, Homo sapien
aacatctaaggccatcttgatccag

SEQ ID NO: 468924 - DNA, 25 bp, Homo sapien
cttctgcatacgtataaattctgtt

SEQ ID NO: 468925 - DNA, 25 bp, Homo sapien
ttaaaagtgtcaatggagactgcaa

SEQ ID NO: 468926 - DNA, 25 bp, Homo sapien
aaaagtgtcaatggagactgcaata

SEQ ID NO: 468927 - DNA, 25 bp, Homo sapien
tgcatacgtataaattctgttattc

SEQ ID NO: 468928 - DNA, 25 bp, Homo sapien
gataatataggacatctccatgcat

SEQ ID NO: 468929 - DNA, 25 bp, Homo sapien
agatcgtcagtaaaagtctcttggg

SEQ ID NO: 468930 - DNA, 25 bp, Homo sapien
tagcaaattccgtgacagtgtaaca

SEQ ID NO: 468931 - DNA, 25 bp, Homo sapien
tctcttgggccaatgagtagtagca

SEQ ID NO: 468932 - DNA, 25 bp, Homo sapien
tgggtaattcctcatgatgtcgaag

SEQ ID NO: 468933 - DNA, 25 bp, Homo sapien
ccataaccgatctggaaagacagtt

SEQ ID NO: 468934 - DNA, 25 bp, Homo sapien
tactgagctaactattggaggaatg

SEQ ID NO: 468935 - DNA, 25 bp, Homo sapien
catgatgtcgaagataatgtcttcc

SEQ ID NO: 468936 - DNA, 25 bp, Homo sapien
tcagttggcataacttgaatatgtc

SEQ ID NO: 468937 - DNA, 25 bp, Homo sapien
ctttttctccagttatcactgcgcc

SEQ ID NO: 468938 - DNA, 25 bp, Homo sapien
ttatcactgcgccaaccagctttca

SEQ ID NO: 468939 - DNA, 25 bp, Homo sapien
cttgaatatgtcttgccttagctga

SEQ ID NO: 468940 - DNA, 25 bp, Homo sapien
tatctcttcctgtgggcggctgtct

SEQ ID NO: 468941 - DNA, 25 bp, Homo sapien
gcatgtctgccagtgtacctccgta

SEQ ID NO: 468942 - DNA, 25 bp, Homo sapien
ggacaatttagccaccgcatgtctg

SEQ ID NO: 468943 - DNA, 25 bp, Homo sapien
tatgtgaaataataaccttgctgcc

SEQ ID NO: 468944 - DNA, 25 bp, Homo sapien
cctgagaatgcccaaattgatcctt

SEQ ID NO: 468945 - DNA, 25 bp, Homo sapien
cccaaactcagttctaggacctgag

SEQ ID NO: 468946 - DNA, 25 bp, Homo sapien
gaatgcccaaattgatccttatcca

SEQ ID NO: 468947 - DNA, 25 bp, Homo sapien
tctaggacctgagaatgcccaaatt

SEQ ID NO: 468948 - DNA, 25 bp, Homo sapien
ccagacaggtcagcaaaaatcagaa

SEQ ID NO: 468949 - DNA, 25 bp, Homo sapien
atagtgtatgcaaactgtgaaaagc

SEQ ID NO: 468950 - DNA, 25 bp, Homo sapien
gccagacaggtcagcaaaaatcaga

SEQ ID NO: 468951 - DNA, 25 bp, Homo sapien
cacagccaggtttgtgaatagtgta

SEQ ID NO: 468952 - DNA, 25 bp, Homo sapien
tcccagagacctagataaatgtcat

SEQ ID NO: 468953 - DNA, 25 bp, Homo sapien
tcaccatccatgatcgattgtagat

SEQ ID NO: 468954 - DNA, 25 bp, Homo sapien
tcagtagccaataaagacatcacca

SEQ ID NO: 468955 - DNA, 25 bp, Homo sapien
gatcgattgtagatggactccaccc

SEQ ID NO: 468956 - DNA, 25 bp, Homo sapien
cagggaatctcttgaagcttgccca

SEQ ID NO: 468957 - DNA, 25 bp, Homo sapien
ctgctgctctgaggtatagaatcag

SEQ ID NO: 468958 - DNA, 25 bp, Homo sapien
tatgtgtccataaatttccttcagt

SEQ ID NO: 468959 - DNA, 25 bp, Homo sapien
gcttgcccatgacctggagcttctt

SEQ ID NO: 468960 - DNA, 25 bp, Homo sapien
gacacaactggcctgacttgtagtt

SEQ ID NO: 468961 - DNA, 25 bp, Homo sapien
ggagaaagttcctacaaaatcgagc

SEQ ID NO: 468962 - DNA, 25 bp, Homo sapien
acttgtagttctgttggttcttgga

SEQ ID NO: 468963 - DNA, 25 bp, Homo sapien
gcaatccgtcagtttcagctggcct

SEQ ID NO: 468964 - DNA, 25 bp, Homo sapien
aacttaatctcgtcatattgttgag

SEQ ID NO: 468965 - DNA, 25 bp, Homo sapien
cttaatctcgtcatattgttgagat

SEQ ID NO: 468966 - DNA, 25 bp, Homo sapien
taaacttaatctcgtcatattgttg

SEQ ID NO: 468967 - DNA, 25 bp, Homo sapien
cttaaacttaatctcgtcatattgt

SEQ ID NO: 468968 - DNA, 25 bp, Homo sapien
cgcttttcacttcatagcctgacaa

SEQ ID NO: 468969 - DNA, 25 bp, Homo sapien
ttcaaagtactgaattggaaagtac

SEQ ID NO: 468970 - DNA, 25 bp, Homo sapien
aaagtactgaatcgggtccagaggt

SEQ ID NO: 468971 - DNA, 25 bp, Homo sapien
cacatatgacataccacagtcgctt

SEQ ID NO: 468972 - DNA, 25 bp, Homo sapien
gccccaactaaagatttgtctgaac

SEQ ID NO: 468973 - DNA, 25 bp, Homo sapien
caattaactgatcttccttttcgtc

SEQ ID NO: 468974 - DNA, 25 bp, Homo sapien
ttttcgtcctgccagaagactaagc

SEQ ID NO: 468975 - DNA, 25 bp, Homo sapien
agcagccccacaagtccttcctctt

SEQ ID NO: 468976 - DNA, 25 bp, Homo sapien
tctgacagcctcttccgcaaaagat

SEQ ID NO: 468977 - DNA, 25 bp, Homo sapien
ccaagattgtcagccattgatgcaa

SEQ ID NO: 468978 - DNA, 25 bp, Homo sapien
tgacacctcagaataggcttctggc

SEQ ID NO: 468979 - DNA, 25 bp, Homo sapien
gacctgaatctgctttgacacctca

SEQ ID NO: 468980 - DNA, 25 bp, Homo sapien
agagtcacaggcatttgtagaacta

SEQ ID NO: 468981 - DNA, 25 bp, Homo sapien
tcactgagcttgagtgaaagtatgg

SEQ ID NO: 468982 - DNA, 25 bp, Homo sapien
gagtgaaagtatggtactgagaaat

SEQ ID NO: 468983 - DNA, 25 bp, Homo sapien
tcacaggcatttgtagaactaacat

SEQ ID NO: 468984 - DNA, 25 bp, Homo sapien
tgtctctcttggctcttgaaacatg

SEQ ID NO: 468985 - DNA, 25 bp, Homo sapien
cttgtctctcttggctcttgaaaca

SEQ ID NO: 468986 - DNA, 25 bp, Homo sapien
gtctctcttggctcttgaaacatga

SEQ ID NO: 468987 - DNA, 25 bp, Homo sapien
tctctcttggctcttgaaacatgag

SEQ ID NO: 468988 - DNA, 25 bp, Homo sapien
ttatcgagtctttgataaagtcctt

SEQ ID NO: 468989 - DNA, 25 bp, Homo sapien
ttattatagaatttccttcagttct

SEQ ID NO: 468990 - DNA, 25 bp, Homo sapien
ttgcattgaccacaggcttatcgag

SEQ ID NO: 468991 - DNA, 25 bp, Homo sapien
tgcagtatattgcatcttttccctg

SEQ ID NO: 468992 - DNA, 25 bp, Homo sapien
cttctccattaggggaaaaccagtg

SEQ ID NO: 468993 - DNA, 25 bp, Homo sapien
gtctgccgctaactcttctccatta

SEQ ID NO: 468994 - DNA, 25 bp, Homo sapien
tctgccgctaactcttctccattag

SEQ ID NO: 468995 - DNA, 25 bp, Homo sapien
agctccactggctcttgcccatttg

SEQ ID NO: 468996 - DNA, 25 bp, Homo sapien
ttgattcatgcttatactctgtgtc

SEQ ID NO: 468997 - DNA, 25 bp, Homo sapien
caatgactgtaccagttgaccctgt

SEQ ID NO: 468998 - DNA, 25 bp, Homo sapien
aaggtagtgaaaccaccatccacac

SEQ ID NO: 468999 - DNA, 25 bp, Homo sapien
ttttccatttctacaactttgagca

SEQ ID NO: 469000 - DNA, 25 bp, Homo sapien
aattactagtaaatctttcagtcag

SEQ ID NO: 469001 - DNA, 25 bp, Homo sapien
ttggtgactaaattactagtaaatc

SEQ ID NO: 469002 - DNA, 25 bp, Homo sapien
ctagtaaatctttcagtcaggtttt

SEQ ID NO: 469003 - DNA, 25 bp, Homo sapien
gcagggttttcatgcacagcatgca

SEQ ID NO: 469004 - DNA, 25 bp, Homo sapien
taaaaatctgcaagccctttgagag

SEQ ID NO: 469005 - DNA, 25 bp, Homo sapien
tttgaaaccactctttggtgcaggg

SEQ ID NO: 469006 - DNA, 25 bp, Homo sapien
cacaaatgatggttttaggaccaaa

SEQ ID NO: 469007 - DNA, 25 bp, Homo sapien
tcaccagaggaaatcagagtagtgg

SEQ ID NO: 469008 - DNA, 25 bp, Homo sapien
gcgtaattggcagggacaactccag

SEQ ID NO: 469009 - DNA, 25 bp, Homo sapien
gactgaatggtgagagaactgagca

SEQ ID NO: 469010 - DNA, 25 bp, Homo sapien
ggcagacctcttgggactagaacca

SEQ ID NO: 469011 - DNA, 25 bp, Homo sapien
ctcgccagtcttggtgattgcggaa

SEQ ID NO: 469012 - DNA, 25 bp, Homo sapien
tagagaaaagctgtcctcgccagtc

SEQ ID NO: 469013 - DNA, 25 bp, Homo sapien
gaatacatcctaatctccttctgga

SEQ ID NO: 469014 - DNA, 25 bp, Homo sapien
catttatccagaggtgttcctggat

SEQ ID NO: 469015 - DNA, 25 bp, Homo sapien
gattaagttcccactgtcctactgg

SEQ ID NO: 469016 - DNA, 25 bp, Homo sapien
tccaagattaagttcccactgtcct

SEQ ID NO: 469017 - DNA, 25 bp, Homo sapien
taaatccaagattaagttcccactg

SEQ ID NO: 469018 - DNA, 25 bp, Homo sapien
ccataaatccaagattaagttccca

SEQ ID NO: 469019 - DNA, 25 bp, Homo sapien
agagatcttggctagcaagtgccat

SEQ ID NO: 469020 - DNA, 25 bp, Homo sapien
gggtcccctagattcagatcatgaa

SEQ ID NO: 469021 - DNA, 25 bp, Homo sapien
ctgggtcccctagattcagatcatg

SEQ ID NO: 469022 - DNA, 25 bp, Homo sapien
ggaagagatcttggctagcaagtgc

SEQ ID NO: 469023 - DNA, 25 bp, Homo sapien
tattttgttaggaggtatcttatcg

SEQ ID NO: 469024 - DNA, 25 bp, Homo sapien
gaggtatcttatcgaccttgttgtc

SEQ ID NO: 469025 - DNA, 25 bp, Homo sapien
aactcctgattttagtgttaccaag

SEQ ID NO: 469026 - DNA, 25 bp, Homo sapien
cctctttctgaactacctctgatag

SEQ ID NO: 469027 - DNA, 25 bp, Homo sapien
ggctttctttgccaaacaggcgtat

SEQ ID NO: 469028 - DNA, 25 bp, Homo sapien
tcagagcactccgagctccttgttt

SEQ ID NO: 469029 - DNA, 25 bp, Homo sapien
caggcgtatgtataagtatgtggct

SEQ ID NO: 469030 - DNA, 25 bp, Homo sapien
gtggctttatcactctgcctcagag

SEQ ID NO: 469031 - DNA, 25 bp, Homo sapien
tgctcttgttcacttggcaaatgtc

SEQ ID NO: 469032 - DNA, 25 bp, Homo sapien
gcaaaacttgctctgctcttgttca

SEQ ID NO: 469033 - DNA, 25 bp, Homo sapien
gtttgcaaaacttgctctgctcttg

SEQ ID NO: 469034 - DNA, 25 bp, Homo sapien
cttgtttgcaaaacttgctctgctc

SEQ ID NO: 469035 - DNA, 25 bp, Homo sapien
tactcgtgcgttgaaaaaatcagca

SEQ ID NO: 469036 - DNA, 25 bp, Homo sapien
agtctcaggttcagggtgcttggac

SEQ ID NO: 469037 - DNA, 25 bp, Homo sapien
ggacgtcttgtcatattcacaaaga

SEQ ID NO: 469038 - DNA, 25 bp, Homo sapien
cacatggagtctgtatactcgtgcg

SEQ ID NO: 469039 - DNA, 25 bp, Homo sapien
tatcagggtgaaaagaacttcggat

SEQ ID NO: 469040 - DNA, 25 bp, Homo sapien
tcatataagcacaaggaaacccaat

SEQ ID NO: 469041 - DNA, 25 bp, Homo sapien
tgctcagaatcatatagctgctgct

SEQ ID NO: 469042 - DNA, 25 bp, Homo sapien
gctgcttctcctcatgttgggtatt

SEQ ID NO: 469043 - DNA, 25 bp, Homo sapien
cttttgcattttattagcagataat

SEQ ID NO: 469044 - DNA, 25 bp, Homo sapien
attagcagataatcagtacagcatg

SEQ ID NO: 469045 - DNA, 25 bp, Homo sapien
agcagataatcagtacagcatgacc

SEQ ID NO: 469046 - DNA, 25 bp, Homo sapien
taatcagtacagcatgaccctattc

SEQ ID NO: 469047 - DNA, 25 bp, Homo sapien
aaccctggagcttgacatgtcagtg

SEQ ID NO: 469048 - DNA, 25 bp, Homo sapien
ttaataagacgagggttggtggaca

SEQ ID NO: 469049 - DNA, 25 bp, Homo sapien
gacaaccctggagcttgacatgtca

SEQ ID NO: 469050 - DNA, 25 bp, Homo sapien
ttatgatgcgacattaataagacga

SEQ ID NO: 469051 - DNA, 25 bp, Homo sapien
aacattctttctttgaggtctgaag

SEQ ID NO: 469052 - DNA, 25 bp, Homo sapien
acattctttctttgaggtctgaagg

SEQ ID NO: 469053 - DNA, 25 bp, Homo sapien
taacattctttctttgaggtctgaa

SEQ ID NO: 469054 - DNA, 25 bp, Homo sapien
gcttaagtatggactgacaaagatg

SEQ ID NO: 469055 - DNA, 25 bp, Homo sapien
aagatgaatgaacctccttattgtt

SEQ ID NO: 469056 - DNA, 25 bp, Homo sapien
gttgcattaataggatagttagagt

SEQ ID NO: 469057 - DNA, 25 bp, Homo sapien
tagtaatcataagtgatgcttagcc

SEQ ID NO: 469058 - DNA, 25 bp, Homo sapien
ctgctgaacgagctattttatgata

SEQ ID NO: 469059 - DNA, 25 bp, Homo sapien
aactctctaacaagtttaacaatga

SEQ ID NO: 469060 - DNA, 25 bp, Homo sapien
acaatgagtgaggattcagactttg

SEQ ID NO: 469061 - DNA, 25 bp, Homo sapien
caagtttaacaatgagtgaggattc

SEQ ID NO: 469062 - DNA, 25 bp, Homo sapien
tttcaattctgataaatatttcagt

SEQ ID NO: 469063 - DNA, 25 bp, Homo sapien
cttttgtttcaattctgataaatat

SEQ ID NO: 469064 - DNA, 25 bp, Homo sapien
tcaattctgataaatatttcagttc

SEQ ID NO: 469065 - DNA, 25 bp, Homo sapien
aattctgataaatatttcagttctc

SEQ ID NO: 469066 - DNA, 25 bp, Homo sapien
tgttacaaagactgagcacttgtaa

SEQ ID NO: 469067 - DNA, 25 bp, Homo sapien
gctgttacaaagactgagcacttgt

SEQ ID NO: 469068 - DNA, 25 bp, Homo sapien
acaaagactgagcacttgtaactgc

SEQ ID NO: 469069 - DNA, 25 bp, Homo sapien
ttacaaagactgagcacttgtaact

SEQ ID NO: 469070 - DNA, 25 bp, Homo sapien
ggctaggccatgtttcccagacttg

SEQ ID NO: 469071 - DNA, 25 bp, Homo sapien
gctaggccatgtttcccagacttgc

SEQ ID NO: 469072 - DNA, 25 bp, Homo sapien
tctggcttgaactaggtgtgctggt

SEQ ID NO: 469073 - DNA, 25 bp, Homo sapien
tggcttgaactaggtgtgctggtgg

SEQ ID NO: 469074 - DNA, 25 bp, Homo sapien
tctctggcttgaactaggtgtgctg

SEQ ID NO: 469075 - DNA, 25 bp, Homo sapien
cctctctggcttgaactaggtgtgc

SEQ ID NO: 469076 - DNA, 25 bp, Homo sapien
tgcatccagcggagcagactgagtg

SEQ ID NO: 469077 - DNA, 25 bp, Homo sapien
cggagcagactgagtgtctcctcac

SEQ ID NO: 469078 - DNA, 25 bp, Homo sapien
tatattcctgcatccagcggagcag

SEQ ID NO: 469079 - DNA, 25 bp, Homo sapien
gcatcctatattcctgcatccagcg

SEQ ID NO: 469080 - DNA, 25 bp, Homo sapien
tgaagcttagtttccggaagaagaa

SEQ ID NO: 469081 - DNA, 25 bp, Homo sapien
gcattaattggcacttctgttggca

SEQ ID NO: 469082 - DNA, 25 bp, Homo sapien
tgggctgtagtgagagaattatcct

SEQ ID NO: 469083 - DNA, 25 bp, Homo sapien
tgttggcagcatcagccgagaggct

SEQ ID NO: 469084 - DNA, 25 bp, Homo sapien
tatcctctcatcctgggaagcggcc

SEQ ID NO: 469085 - DNA, 25 bp, Homo sapien
agtaggtgcccatatcagaaaagtc

SEQ ID NO: 469086 - DNA, 25 bp, Homo sapien
tatgatggctgtttgatggcctata

SEQ ID NO: 469087 - DNA, 25 bp, Homo sapien
ctgacagtcattaatatatgatggc

SEQ ID NO: 469088 - DNA, 25 bp, Homo sapien
tgatggcctatatgagtaggtgccc

SEQ ID NO: 469089 - DNA, 25 bp, Homo sapien
cattatctcttggaagggatgtgcc

SEQ ID NO: 469090 - DNA, 25 bp, Homo sapien
tgttcgcaggaatattgtttgctcc

SEQ ID NO: 469091 - DNA, 25 bp, Homo sapien
tgcaattgaagcttcagggacactt

SEQ ID NO: 469092 - DNA, 25 bp, Homo sapien
cagaatgtgatggtctgttcgcagg

SEQ ID NO: 469093 - DNA, 25 bp, Homo sapien
ttattatcaaacagcccttctgtga

SEQ ID NO: 469094 - DNA, 25 bp, Homo sapien
aacagcccttctgtgatagactgct

SEQ ID NO: 469095 - DNA, 25 bp, Homo sapien
tatcaaacagcccttctgtgataga

SEQ ID NO: 469096 - DNA, 25 bp, Homo sapien
atcaaacagcccttctgtgatagac

SEQ ID NO: 469097 - DNA, 25 bp, Homo sapien
tcctgtggtgttgttatatcaggta

SEQ ID NO: 469098 - DNA, 25 bp, Homo sapien
tcagcgacaagcagattcatgacaa

SEQ ID NO: 469099 - DNA, 25 bp, Homo sapien
catgacaatcattagtttcctgtgg

SEQ ID NO: 469100 - DNA, 25 bp, Homo sapien
ttttcatcaggactgctggtgaaat

SEQ ID NO: 469101 - DNA, 25 bp, Homo sapien
caaacgctccactatttcaatactg

SEQ ID NO: 469102 - DNA, 25 bp, Homo sapien
gcaagcagtgtaggaatgcacacat

SEQ ID NO: 469103 - DNA, 25 bp, Homo sapien
atggagcaggacaaacgctccacta

SEQ ID NO: 469104 - DNA, 25 bp, Homo sapien
ctggcaagcagtgtaggaatgcaca

SEQ ID NO: 469105 - DNA, 25 bp, Homo sapien
aaatatccctgtcattcttcaccag

SEQ ID NO: 469106 - DNA, 25 bp, Homo sapien
gctgcttcaatcaggtaaatatccc

SEQ ID NO: 469107 - DNA, 25 bp, Homo sapien
tctggagctcttcccaaggattctc

SEQ ID NO: 469108 - DNA, 25 bp, Homo sapien
tcaccagtgtatcatcaacttccag

SEQ ID NO: 469109 - DNA, 25 bp, Homo sapien
gttgcactgctcaattgtaagttct

SEQ ID NO: 469110 - DNA, 25 bp, Homo sapien
gagttgcactgctcaattgtaagtt

SEQ ID NO: 469111 - DNA, 25 bp, Homo sapien
taagttctttattaggggcagtcat

SEQ ID NO: 469112 - DNA, 25 bp, Homo sapien
gcactgctcaattgtaagttcttta

SEQ ID NO: 469113 - DNA, 25 bp, Homo sapien
ctatttctgctttgataggaagaca

SEQ ID NO: 469114 - DNA, 25 bp, Homo sapien
tctcctctcttctgatcatctattt

SEQ ID NO: 469115 - DNA, 25 bp, Homo sapien
tctgctttgataggaagacatatta

SEQ ID NO: 469116 - DNA, 25 bp, Homo sapien
tttctcctctcttctgatcatctat

SEQ ID NO: 469117 - DNA, 25 bp, Homo sapien
ggttctgagatcaaccatagctggg

SEQ ID NO: 469118 - DNA, 25 bp, Homo sapien
taattgtgtgcgtctcctcatcaga

SEQ ID NO: 469119 - DNA, 25 bp, Homo sapien
ccagctgattgtgtggagtatggtc

SEQ ID NO: 469120 - DNA, 25 bp, Homo sapien
tttgaagtagccagacacctatgcc

SEQ ID NO: 469121 - DNA, 25 bp, Homo sapien
tagtgtagacttggctccagatggc

SEQ ID NO: 469122 - DNA, 25 bp, Homo sapien
cagtgcctgaaaggtagtaacgcta

SEQ ID NO: 469123 - DNA, 25 bp, Homo sapien
taactatggctgatgaccagactgg

SEQ ID NO: 469124 - DNA, 25 bp, Homo sapien
ggatttgaacactggctctaatgaa

SEQ ID NO: 469125 - DNA, 25 bp, Homo sapien
cactgccactggttcaacaagatga

SEQ ID NO: 469126 - DNA, 25 bp, Homo sapien
caaaagctttgttcagacagtttaa

SEQ ID NO: 469127 - DNA, 25 bp, Homo sapien
aatcctctgtgctgtacaacatcca

SEQ ID NO: 469128 - DNA, 25 bp, Homo sapien
cattcaatagtctgacatgcaaaag

SEQ ID NO: 469129 - DNA, 25 bp, Homo sapien
aggaggaaatagctgatttaaatgc

SEQ ID NO: 469130 - DNA, 25 bp, Homo sapien
tgtcagttgccaaagaaattgttac

SEQ ID NO: 469131 - DNA, 25 bp, Homo sapien
gaaatagctgatttaaatgcctgct

SEQ ID NO: 469132 - DNA, 25 bp, Homo sapien
ctgctgtcagttgccaaagaaattg

SEQ ID NO: 469133 - DNA, 25 bp, Homo sapien
cagataagattgtatccgagtaggg

SEQ ID NO: 469134 - DNA, 25 bp, Homo sapien
taccacggcaatttcccagataaga

SEQ ID NO: 469135 - DNA, 25 bp, Homo sapien
gaccctgtggatctacactcagcac

SEQ ID NO: 469136 - DNA, 25 bp, Homo sapien
tgacagctgtgacgaataccacggc

SEQ ID NO: 469137 - DNA, 25 bp, Homo sapien
tataacccgagccatagagtaactt

SEQ ID NO: 469138 - DNA, 25 bp, Homo sapien
tgtacgaatggctctctcgtgctga

SEQ ID NO: 469139 - DNA, 25 bp, Homo sapien
gagtaacttctttaggactgtacga

SEQ ID NO: 469140 - DNA, 25 bp, Homo sapien
tctctcgtgctgacccagctctgag

SEQ ID NO: 469141 - DNA, 25 bp, Homo sapien
ctggagaacgtatatcaggtgcctc

SEQ ID NO: 469142 - DNA, 25 bp, Homo sapien
agaacgtatatcaggtgcctctctt

SEQ ID NO: 469143 - DNA, 25 bp, Homo sapien
gcctggagaacgtatatcaggtgcc

SEQ ID NO: 469144 - DNA, 25 bp, Homo sapien
tggagaacgtatatcaggtgcctct

SEQ ID NO: 469145 - DNA, 25 bp, Homo sapien
cctgaagagtaaccattcccttgat

SEQ ID NO: 469146 - DNA, 25 bp, Homo sapien
gtctcaactcttagagtacttaatg

SEQ ID NO: 469147 - DNA, 25 bp, Homo sapien
gtaacacctgaagagtaaccattcc

SEQ ID NO: 469148 - DNA, 25 bp, Homo sapien
tcttgtagatttcgcatatacgtgg

SEQ ID NO: 469149 - DNA, 25 bp, Homo sapien
catgaacttatagggaataggctcc

SEQ ID NO: 469150 - DNA, 25 bp, Homo sapien
ccatgaacttatagggaataggctc

SEQ ID NO: 469151 - DNA, 25 bp, Homo sapien
tgaacttatagggaataggctccag

SEQ ID NO: 469152 - DNA, 25 bp, Homo sapien
aacttatagggaataggctccagca

SEQ ID NO: 469153 - DNA, 25 bp, Homo sapien
tatcagatgtgtttacatcacatct

SEQ ID NO: 469154 - DNA, 25 bp, Homo sapien
tgaagattgcattgtagttgagaat

SEQ ID NO: 469155 - DNA, 25 bp, Homo sapien
taatgctttggcattgctatgttca

SEQ ID NO: 469156 - DNA, 25 bp, Homo sapien
aagctctgcaagagggtttgaagat

SEQ ID NO: 469157 - DNA, 25 bp, Homo sapien
aacccctggtcccaatgaatatgac

SEQ ID NO: 469158 - DNA, 25 bp, Homo sapien
gaaaaattactactaccatggacca

SEQ ID NO: 469159 - DNA, 25 bp, Homo sapien
tagatcctaacccaataattggtgg

SEQ ID NO: 469160 - DNA, 25 bp, Homo sapien
tccagaagaggcatgttgaggtcct

SEQ ID NO: 469161 - DNA, 25 bp, Homo sapien
tattaaggagcttcgcaaggctact

SEQ ID NO: 469162 - DNA, 25 bp, Homo sapien
aactctgtctatttgtgtacggctt

SEQ ID NO: 469163 - DNA, 25 bp, Homo sapien
cccagaagctttatcatcggttatt

SEQ ID NO: 469164 - DNA, 25 bp, Homo sapien
tgaacaaggaattaacccagaagct

SEQ ID NO: 469165 - DNA, 25 bp, Homo sapien
cgcgcgaatgccgcgccccctctat

SEQ ID NO: 469166 - DNA, 25 bp, Homo sapien
gcgcgaatgccgcgccccctctatc

SEQ ID NO: 469167 - DNA, 25 bp, Homo sapien
gcgtccctctcgcgcgaatgccgcg

SEQ ID NO: 469168 - DNA, 25 bp, Homo sapien
tccctctcgcgcgaatgccgcgccc

SEQ ID NO: 469169 - DNA, 25 bp, Homo sapien
ccaagatctttggtagggacctgcc

SEQ ID NO: 469170 - DNA, 25 bp, Homo sapien
ccatggacggtgagtttccgttgcg

SEQ ID NO: 469171 - DNA, 25 bp, Homo sapien
ccttagtgccccaaacggcatcttc

SEQ ID NO: 469172 - DNA, 25 bp, Homo sapien
gttgcgctccctttaccttgcgtgc

SEQ ID NO: 469173 - DNA, 25 bp, Homo sapien
cgcgaaccagccaatcgcacggagg

SEQ ID NO: 469174 - DNA, 25 bp, Homo sapien
caatcgcacggaggccgcgtaggaa

SEQ ID NO: 469175 - DNA, 25 bp, Homo sapien
aattcgaatggcaactcctcgctcc

SEQ ID NO: 469176 - DNA, 25 bp, Homo sapien
ctcgctccacgttccgcgcagagga

SEQ ID NO: 469177 - DNA, 25 bp, Homo sapien
tccccgcttccgcgctgtcttgggc

SEQ ID NO: 469178 - DNA, 25 bp, Homo sapien
ccagggcacggggcttgtgagcgac

SEQ ID NO: 469179 - DNA, 25 bp, Homo sapien
accagggcacggggcttgtgagcga

SEQ ID NO: 469180 - DNA, 25 bp, Homo sapien
aactccccgcttccgcgctgtcttg

SEQ ID NO: 469181 - DNA, 25 bp, Homo sapien
cttccacgacaggcatagactcttt

SEQ ID NO: 469182 - DNA, 25 bp, Homo sapien
cagcttccacgacaggcatagactc

SEQ ID NO: 469183 - DNA, 25 bp, Homo sapien
gcttccacgacaggcatagactctt

SEQ ID NO: 469184 - DNA, 25 bp, Homo sapien
tgcgtacaaaacgaagcccccagta

SEQ ID NO: 469185 - DNA, 25 bp, Homo sapien
gcttccctggatggagtgcgaagga

SEQ ID NO: 469186 - DNA, 25 bp, Homo sapien
gaaggttgagatgcagccggcttcc

SEQ ID NO: 469187 - DNA, 25 bp, Homo sapien
accctacgtggccactctttctggt

SEQ ID NO: 469188 - DNA, 25 bp, Homo sapien
gcaggcaagtcaggagctgggaaaa

SEQ ID NO: 469189 - DNA, 25 bp, Homo sapien
cgagagtttgttcatggagattaga

SEQ ID NO: 469190 - DNA, 25 bp, Homo sapien
actggcgagagtttgttcatggaga

SEQ ID NO: 469191 - DNA, 25 bp, Homo sapien
aaacagaaggactggcgagagtttg

SEQ ID NO: 469192 - DNA, 25 bp, Homo sapien
aaggactggcgagagtttgttcatg

SEQ ID NO: 469193 - DNA, 25 bp, Homo sapien
taaacactagtcaggaataacttac

SEQ ID NO: 469194 - DNA, 25 bp, Homo sapien
tgtaaacactagtcaggaataactt

SEQ ID NO: 469195 - DNA, 25 bp, Homo sapien
gttgtaaacactagtcaggaataac

SEQ ID NO: 469196 - DNA, 25 bp, Homo sapien
tagttgtaaacactagtcaggaata

SEQ ID NO: 469197 - DNA, 25 bp, Homo sapien
gaaagtttgtgacccatacatcgga

SEQ ID NO: 469198 - DNA, 25 bp, Homo sapien
tgtctggcccctaacagaaagtttg

SEQ ID NO: 469199 - DNA, 25 bp, Homo sapien
tgtgcctaatgatcctaacttgttc

SEQ ID NO: 469200 - DNA, 25 bp, Homo sapien
tgttcacagtgtaatccctgcttag

SEQ ID NO: 469201 - DNA, 25 bp, Homo sapien
gagcttatgagtaaaggcaaactaa

SEQ ID NO: 469202 - DNA, 25 bp, Homo sapien
aaagtgagcttatgagtaaaggcaa

SEQ ID NO: 469203 - DNA, 25 bp, Homo sapien
aggcaaactaaaatagttcatcaaa

SEQ ID NO: 469204 - DNA, 25 bp, Homo sapien
agtgagcttatgagtaaaggcaaac

SEQ ID NO: 469205 - DNA, 25 bp, Homo sapien
aagcttgacgatgaatatcttctgg

SEQ ID NO: 469206 - DNA, 25 bp, Homo sapien
gctagttgatcaatagaccatctaa

SEQ ID NO: 469207 - DNA, 25 bp, Homo sapien
tgggtctatttctacaggatttatt

SEQ ID NO: 469208 - DNA, 25 bp, Homo sapien
cgagaatgacttaagtataaagctt

SEQ ID NO: 469209 - DNA, 25 bp, Homo sapien
tcaggactggtcacctacatggcca

SEQ ID NO: 469210 - DNA, 25 bp, Homo sapien
tacatggccaagactcacctgctta

SEQ ID NO: 469211 - DNA, 25 bp, Homo sapien
tgctacttcatcagagggacttcaa

SEQ ID NO: 469212 - DNA, 25 bp, Homo sapien
atcactgtggccaaatactctagag

SEQ ID NO: 469213 - DNA, 25 bp, Homo sapien
tttttcacatatagacttgctcatg

SEQ ID NO: 469214 - DNA, 25 bp, Homo sapien
acttgctcatggcttaataaagctt

SEQ ID NO: 469215 - DNA, 25 bp, Homo sapien
gacgcgatctcatgctttttgtggc

SEQ ID NO: 469216 - DNA, 25 bp, Homo sapien
tcccctctatatgtccacatgctct

SEQ ID NO: 469217 - DNA, 25 bp, Homo sapien
gtcttttgtcttccacatctttatc

SEQ ID NO: 469218 - DNA, 25 bp, Homo sapien
tcttcaatggctttttgtcttttgt

SEQ ID NO: 469219 - DNA, 25 bp, Homo sapien
tttttgtcttttgtcttccacatct

SEQ ID NO: 469220 - DNA, 25 bp, Homo sapien
ctcttcaatggctttttgtcttttg

SEQ ID NO: 469221 - DNA, 25 bp, Homo sapien
ggtaactatgctgttgctaagagaa

SEQ ID NO: 469222 - DNA, 25 bp, Homo sapien
tatggaaaatcaagcagtgtcacac

SEQ ID NO: 469223 - DNA, 25 bp, Homo sapien
caaagcctctgacttactaggtcca

SEQ ID NO: 469224 - DNA, 25 bp, Homo sapien
aaaaggaggatgcagtatgagaacg

SEQ ID NO: 469225 - DNA, 25 bp, Homo sapien
agtccaaggagagggtacgatgaca

SEQ ID NO: 469226 - DNA, 25 bp, Homo sapien
aatgacattgtgaaagctgtttccc

SEQ ID NO: 469227 - DNA, 25 bp, Homo sapien
tttcccttcatgatcagtccaagga

SEQ ID NO: 469228 - DNA, 25 bp, Homo sapien
tttactggaatgacattgtgaaagc

SEQ ID NO: 469229 - DNA, 25 bp, Homo sapien
ttttattcatatcatttttagtaca

SEQ ID NO: 469230 - DNA, 25 bp, Homo sapien
tattcatatcatttttagtacactc

SEQ ID NO: 469231 - DNA, 25 bp, Homo sapien
ttattcatatcatttttagtacact

SEQ ID NO: 469232 - DNA, 25 bp, Homo sapien
ttcatatcatttttagtacactcac

SEQ ID NO: 469233 - DNA, 25 bp, Homo sapien
taaccatcattataactgacattca

SEQ ID NO: 469234 - DNA, 25 bp, Homo sapien
tctatggatcctctataaccatcat

SEQ ID NO: 469235 - DNA, 25 bp, Homo sapien
gacattcacaatagtcatgaagaaa

SEQ ID NO: 469236 - DNA, 25 bp, Homo sapien
tttcttcatctatggatcctctata

SEQ ID NO: 469237 - DNA, 25 bp, Homo sapien
gctaaagtcattaacaactcatctc

SEQ ID NO: 469238 - DNA, 25 bp, Homo sapien
taaagtcattaacaactcatctcta

SEQ ID NO: 469239 - DNA, 25 bp, Homo sapien
caaaatactgctaaagtcattaaca

SEQ ID NO: 469240 - DNA, 25 bp, Homo sapien
tactgctaaagtcattaacaactca

SEQ ID NO: 469241 - DNA, 25 bp, Homo sapien
ggagagtcactatttatgttagtgc

SEQ ID NO: 469242 - DNA, 25 bp, Homo sapien
ttttccaactggagagtcactattt

SEQ ID NO: 469243 - DNA, 25 bp, Homo sapien
caactggagagtcactatttatgtt

SEQ ID NO: 469244 - DNA, 25 bp, Homo sapien
ttccaactggagagtcactatttat

SEQ ID NO: 469245 - DNA, 25 bp, Homo sapien
agagacagcaatgtctgacaagcag

SEQ ID NO: 469246 - DNA, 25 bp, Homo sapien
ggaagagacagcaatgtctgacaag

SEQ ID NO: 469247 - DNA, 25 bp, Homo sapien
caggaagagacagcaatgtctgaca

SEQ ID NO: 469248 - DNA, 25 bp, Homo sapien
gaagagacagcaatgtctgacaagc

SEQ ID NO: 469249 - DNA, 25 bp, Homo sapien
gaagccgaaggtaaggagtcggaga

SEQ ID NO: 469250 - DNA, 25 bp, Homo sapien
gaggtttccaggagattgatctgca

SEQ ID NO: 469251 - DNA, 25 bp, Homo sapien
gattgatctgcaaattcatcagctc

SEQ ID NO: 469252 - DNA, 25 bp, Homo sapien
gcttccgttcccatctaaaaacagc

SEQ ID NO: 469253 - DNA, 25 bp, Homo sapien
ctagtgatgtttgaacaccactgtg

SEQ ID NO: 469254 - DNA, 25 bp, Homo sapien
tctagtgatgtttgaacaccactgt

SEQ ID NO: 469255 - DNA, 25 bp, Homo sapien
ctctagtgatgtttgaacaccactg

SEQ ID NO: 469256 - DNA, 25 bp, Homo sapien
ctgcaaggggctcctacactttaca

SEQ ID NO: 469257 - DNA, 25 bp, Homo sapien
gggctcctacactttacaggagaca

SEQ ID NO: 469258 - DNA, 25 bp, Homo sapien
ggctcctacactttacaggagacaa

SEQ ID NO: 469259 - DNA, 25 bp, Homo sapien
caaggggctcctacactttacagga

SEQ ID NO: 469260 - DNA, 25 bp, Homo sapien
gaagaaataggcgaaggactagtta

SEQ ID NO: 469261 - DNA, 25 bp, Homo sapien
gagagtggagtctctcctatctgaa

SEQ ID NO: 469262 - DNA, 25 bp, Homo sapien
ttcaattggtgagaaagtgggtgaa

SEQ ID NO: 469263 - DNA, 25 bp, Homo sapien
ggactagttatgcttcccaagctgt

SEQ ID NO: 469264 - DNA, 25 bp, Homo sapien
taaggacttctgatacacggattag

SEQ ID NO: 469265 - DNA, 25 bp, Homo sapien
gcagccatctatataaggacttctg

SEQ ID NO: 469266 - DNA, 25 bp, Homo sapien
gatacacggattagttatcccatta

SEQ ID NO: 469267 - DNA, 25 bp, Homo sapien
ccaatttttaattggcgagcagcca

SEQ ID NO: 469268 - DNA, 25 bp, Homo sapien
cactgaggtccgatactgagtacca

SEQ ID NO: 469269 - DNA, 25 bp, Homo sapien
tccatggcgggtgatgagacatctg

SEQ ID NO: 469270 - DNA, 25 bp, Homo sapien
cgtaggtgtattccagcagcatcca

SEQ ID NO: 469271 - DNA, 25 bp, Homo sapien
tagaagcctcattactaaactgccg

SEQ ID NO: 469272 - DNA, 25 bp, Homo sapien
caaaatcagtcatgggtaaactgcc

SEQ ID NO: 469273 - DNA, 25 bp, Homo sapien
tttcaatactgaaggcaatgccact

SEQ ID NO: 469274 - DNA, 25 bp, Homo sapien
caagtggtctcatctgctatctcta

SEQ ID NO: 469275 - DNA, 25 bp, Homo sapien
tcaaccggctccttaatccaagtgg

SEQ ID NO: 469276 - DNA, 25 bp, Homo sapien
tggagagtagaaagaccagccttgc

SEQ ID NO: 469277 - DNA, 25 bp, Homo sapien
tagtaccgaacgcatttcaaaagtg

SEQ ID NO: 469278 - DNA, 25 bp, Homo sapien
aatgagcggctattacgtgacgggt

SEQ ID NO: 469279 - DNA, 25 bp, Homo sapien
ttggaaagctagtgggacctaaaca

SEQ ID NO: 469280 - DNA, 25 bp, Homo sapien
gagctgggctataaactgaaatctg

SEQ ID NO: 469281 - DNA, 25 bp, Homo sapien
aaatctgccattacggtttcccaag

SEQ ID NO: 469282 - DNA, 25 bp, Homo sapien
catggtctctggtacttgaaaagga

SEQ ID NO: 469283 - DNA, 25 bp, Homo sapien
gttactgcggctactcctatcaggg

SEQ ID NO: 469284 - DNA, 25 bp, Homo sapien
tacagactagcctagaaacggcact

SEQ ID NO: 469285 - DNA, 25 bp, Homo sapien
gcttactactagaggtcatgttcca

SEQ ID NO: 469286 - DNA, 25 bp, Homo sapien
tgatgaagatgtgagacctaagtcc

SEQ ID NO: 469287 - DNA, 25 bp, Homo sapien
gccctccctgcaagttaggatcaga

SEQ ID NO: 469288 - DNA, 25 bp, Homo sapien
tctgcgtattatagccactatccat

SEQ ID NO: 469289 - DNA, 25 bp, Homo sapien
cagtaactttctgccccaactgtat

SEQ ID NO: 469290 - DNA, 25 bp, Homo sapien
tccataatattgcttccacaattct

SEQ ID NO: 469291 - DNA, 25 bp, Homo sapien
gcttgagatttactctcaacttcac

SEQ ID NO: 469292 - DNA, 25 bp, Homo sapien
ctaaaagcacgtttctttagctgaa

SEQ ID NO: 469293 - DNA, 25 bp, Homo sapien
aaaagcacgtttctttagctgaact

SEQ ID NO: 469294 - DNA, 25 bp, Homo sapien
taaaagcacgtttctttagctgaac

SEQ ID NO: 469295 - DNA, 25 bp, Homo sapien
gctgttttcatccaacacctctgtg

SEQ ID NO: 469296 - DNA, 25 bp, Homo sapien
actgctgcattgaaaagggcttgct

SEQ ID NO: 469297 - DNA, 25 bp, Homo sapien
tgctgttttcatccaacacctctgt

SEQ ID NO: 469298 - DNA, 25 bp, Homo sapien
ctatggactgctgcattgaaaaggg

SEQ ID NO: 469299 - DNA, 25 bp, Homo sapien
tgcgaggaactcttaagcttagtct

SEQ ID NO: 469300 - DNA, 25 bp, Homo sapien
gagggaaagctaagcatgttacttg

SEQ ID NO: 469301 - DNA, 25 bp, Homo sapien
tgttcctatgtcagtaagcccttga

SEQ ID NO: 469302 - DNA, 25 bp, Homo sapien
tcctgtgcacaacgatatatgcgag

SEQ ID NO: 469303 - DNA, 25 bp, Homo sapien
cattgaccctgtaagataggagcac

SEQ ID NO: 469304 - DNA, 25 bp, Homo sapien
tggaaaggatgtccctaccctaggc

SEQ ID NO: 469305 - DNA, 25 bp, Homo sapien
tacttcacaggcctatgccctacgg

SEQ ID NO: 469306 - DNA, 25 bp, Homo sapien
taaattcagtgctaccagtaaggct

SEQ ID NO: 469307 - DNA, 25 bp, Homo sapien
cacagggcggcaggatgaaaatgac

SEQ ID NO: 469308 - DNA, 25 bp, Homo sapien
tatcagcccagatcaagtagtgaca

SEQ ID NO: 469309 - DNA, 25 bp, Homo sapien
tgcaggtcagcagtaaggtttcaag

SEQ ID NO: 469310 - DNA, 25 bp, Homo sapien
cataacgcggcacattttctgcagg

SEQ ID NO: 469311 - DNA, 25 bp, Homo sapien
tgggctgtgagctttactacctgag

SEQ ID NO: 469312 - DNA, 25 bp, Homo sapien
tatgattgataatggcacctacctc

SEQ ID NO: 469313 - DNA, 25 bp, Homo sapien
cattagattcccattggagcgccag

SEQ ID NO: 469314 - DNA, 25 bp, Homo sapien
gactccctaggtttggatccctctg

SEQ ID NO: 469315 - DNA, 25 bp, Homo sapien
tcggaagcacaaggttgcaggccct

SEQ ID NO: 469316 - DNA, 25 bp, Homo sapien
cacacgttgtgaggtggcgtccaga

SEQ ID NO: 469317 - DNA, 25 bp, Homo sapien
ttccgaggagcggaaagcaacacac

SEQ ID NO: 469318 - DNA, 25 bp, Homo sapien
gaagtcaactctcccggatgttccg

SEQ ID NO: 469319 - DNA, 25 bp, Homo sapien
gaactatactaagatcggcctccct

SEQ ID NO: 469320 - DNA, 25 bp, Homo sapien
taagccccaaacttggcagctcggg

SEQ ID NO: 469321 - DNA, 25 bp, Homo sapien
gggactgcctatacactcggcgtga

SEQ ID NO: 469322 - DNA, 25 bp, Homo sapien
tctcctcgattacaaagggcccgag

SEQ ID NO: 469323 - DNA, 25 bp, Homo sapien
tcacgtctgagttggtcagggaaac

SEQ ID NO: 469324 - DNA, 25 bp, Homo sapien
tcatggactgtattaaagagagact

SEQ ID NO: 469325 - DNA, 25 bp, Homo sapien
tattaggcaatttagtgcatcccaa

SEQ ID NO: 469326 - DNA, 25 bp, Homo sapien
tcctaatatgaagtcagccttcgag

SEQ ID NO: 469327 - DNA, 25 bp, Homo sapien
tattattatggatcagttttcttct

SEQ ID NO: 469328 - DNA, 25 bp, Homo sapien
tttattattatggatcagttttctt

SEQ ID NO: 469329 - DNA, 25 bp, Homo sapien
ttattatggatcagttttcttctct

SEQ ID NO: 469330 - DNA, 25 bp, Homo sapien
attattatggatcagttttcttctc

SEQ ID NO: 469331 - DNA, 25 bp, Homo sapien
tcttttcgttcaattagctgcctgg

SEQ ID NO: 469332 - DNA, 25 bp, Homo sapien
catcatagttttctgggatagctca

SEQ ID NO: 469333 - DNA, 25 bp, Homo sapien
tgattctgactttgccctctcgctc

SEQ ID NO: 469334 - DNA, 25 bp, Homo sapien
actttcaaattgtcgatcatcatag

SEQ ID NO: 469335 - DNA, 25 bp, Homo sapien
aataaagcatatagaacacaaaatt

SEQ ID NO: 469336 - DNA, 25 bp, Homo sapien
agaacacaaaatttaaacctgatct

SEQ ID NO: 469337 - DNA, 25 bp, Homo sapien
atatagaacacaaaatttaaacctg

SEQ ID NO: 469338 - DNA, 25 bp, Homo sapien
tagaacacaaaatttaaacctgatc

SEQ ID NO: 469339 - DNA, 25 bp, Homo sapien
aaacacaatgttttccaagattaca

SEQ ID NO: 469340 - DNA, 25 bp, Homo sapien
caggtgatcccaactgacagataaa

SEQ ID NO: 469341 - DNA, 25 bp, Homo sapien
ccaccatgctgtccaatagatctct

SEQ ID NO: 469342 - DNA, 25 bp, Homo sapien
caatgttttccaagattacaatgtc

SEQ ID NO: 469343 - DNA, 25 bp, Homo sapien
actgttacatgttgagcatcccaaa

SEQ ID NO: 469344 - DNA, 25 bp, Homo sapien
ggatgctcaactggtctaacacaaa

SEQ ID NO: 469345 - DNA, 25 bp, Homo sapien
taagaaacaacctgtatcacgagga

SEQ ID NO: 469346 - DNA, 25 bp, Homo sapien
cataggtggcctacaaagcataaaa

SEQ ID NO: 469347 - DNA, 25 bp, Homo sapien
tgaagtgcatcattaagtttctcct

SEQ ID NO: 469348 - DNA, 25 bp, Homo sapien
agtgcatcattaagtttctcctcca

SEQ ID NO: 469349 - DNA, 25 bp, Homo sapien
ctggtgaagtgcatcattaagtttc

SEQ ID NO: 469350 - DNA, 25 bp, Homo sapien
ctgcttctggtgaagtgcatcatta

SEQ ID NO: 469351 - DNA, 25 bp, Homo sapien
tggttgtctaatctcaatgttagta

SEQ ID NO: 469352 - DNA, 25 bp, Homo sapien
gaaaagccaattggttgtctaatct

SEQ ID NO: 469353 - DNA, 25 bp, Homo sapien
aaagccaattggttgtctaatctca

SEQ ID NO: 469354 - DNA, 25 bp, Homo sapien
gccaattggttgtctaatctcaatg

SEQ ID NO: 469355 - DNA, 25 bp, Homo sapien
tctgtcaactcaaagtcacgcaggt

SEQ ID NO: 469356 - DNA, 25 bp, Homo sapien
caggaatagaaagctgatcttcagg

SEQ ID NO: 469357 - DNA, 25 bp, Homo sapien
ttagctgaagatttgtctcttctag

SEQ ID NO: 469358 - DNA, 25 bp, Homo sapien
ggtttcgacgaacatctccagcttt

SEQ ID NO: 469359 - DNA, 25 bp, Homo sapien
tactgctcactccacactaggtgct

SEQ ID NO: 469360 - DNA, 25 bp, Homo sapien
ccctcaagggccagatgatttataa

SEQ ID NO: 469361 - DNA, 25 bp, Homo sapien
agacagtcattaatggaccctagcc

SEQ ID NO: 469362 - DNA, 25 bp, Homo sapien
tacaaaactacaacaagacagtcat

SEQ ID NO: 469363 - DNA, 25 bp, Homo sapien
cttaatggattcactagctcataga

SEQ ID NO: 469364 - DNA, 25 bp, Homo sapien
gattcactagctcatagaagcgaac

SEQ ID NO: 469365 - DNA, 25 bp, Homo sapien
tcacttgtagttcacagatttcctt

SEQ ID NO: 469366 - DNA, 25 bp, Homo sapien
ttcacttgtagttcacagatttcct

SEQ ID NO: 469367 - DNA, 25 bp, Homo sapien
caccagcaatcaaaaccatacaaac

SEQ ID NO: 469368 - DNA, 25 bp, Homo sapien
cttcccaccagcaatcaaaaccata

SEQ ID NO: 469369 - DNA, 25 bp, Homo sapien
tcccaccagcaatcaaaaccataca

SEQ ID NO: 469370 - DNA, 25 bp, Homo sapien
cagaaaaagccgaagcttcttccca

SEQ ID NO: 469371 - DNA, 25 bp, Homo sapien
taaaagctcaactataggatacgtc

SEQ ID NO: 469372 - DNA, 25 bp, Homo sapien
gagatcccctgcatagcttggccta

SEQ ID NO: 469373 - DNA, 25 bp, Homo sapien
ttatggcacctgcaagagatcccct

SEQ ID NO: 469374 - DNA, 25 bp, Homo sapien
tatgcgtcatctaaggatacacagc

SEQ ID NO: 469375 - DNA, 25 bp, Homo sapien
tacctgcacgttgtgcctatgtacc

SEQ ID NO: 469376 - DNA, 25 bp, Homo sapien
tgtaggactctactcatatgacgaa

SEQ ID NO: 469377 - DNA, 25 bp, Homo sapien
cgtaacactacctgcacgttgtgcc

SEQ ID NO: 469378 - DNA, 25 bp, Homo sapien
cacaaaggggcaaatactgtaggac

SEQ ID NO: 469379 - DNA, 25 bp, Homo sapien
tagaagcaattcaggtatctattta

SEQ ID NO: 469380 - DNA, 25 bp, Homo sapien
aagaggtagaagcaattcaggtatc

SEQ ID NO: 469381 - DNA, 25 bp, Homo sapien
cctgactgtgaaagacaattgtgga

SEQ ID NO: 469382 - DNA, 25 bp, Homo sapien
tgactgtgaaagacaattgtggaag

SEQ ID NO: 469383 - DNA, 25 bp, Homo sapien
aactccggacttgaagtaaaagatg

SEQ ID NO: 469384 - DNA, 25 bp, Homo sapien
tgaatacttaagatgaacctcaaga

SEQ ID NO: 469385 - DNA, 25 bp, Homo sapien
gcagattcactaatgccttacactg

SEQ ID NO: 469386 - DNA, 25 bp, Homo sapien
tagctgagttgcatgtgatcaacca

SEQ ID NO: 469387 - DNA, 25 bp, Homo sapien
catgaacccgccacattagaatctt

SEQ ID NO: 469388 - DNA, 25 bp, Homo sapien
gggtttcccgatgttcaggtcttga

SEQ ID NO: 469389 - DNA, 25 bp, Homo sapien
attatagcagtgagtcatggtgccc

SEQ ID NO: 469390 - DNA, 25 bp, Homo sapien
agtgtccatgaacccgccacattag

SEQ ID NO: 469391 - DNA, 25 bp, Homo sapien
gaacgaagttatcatggtatctctg

SEQ ID NO: 469392 - DNA, 25 bp, Homo sapien
tagatactccaaaacatatctgtgg

SEQ ID NO: 469393 - DNA, 25 bp, Homo sapien
gagttttcccgtgccatcatgtagt

SEQ ID NO: 469394 - DNA, 25 bp, Homo sapien
ggcttagaaacactatgcagatcaa

SEQ ID NO: 469395 - DNA, 25 bp, Homo sapien
gtctgctaattctaaggccaaacgt

SEQ ID NO: 469396 - DNA, 25 bp, Homo sapien
catagttctcttgacggtagtcacc

SEQ ID NO: 469397 - DNA, 25 bp, Homo sapien
gaacttcagagtagttttttcgatc

SEQ ID NO: 469398 - DNA, 25 bp, Homo sapien
ggccaaacgttgacatctaatttga

SEQ ID NO: 469399 - DNA, 25 bp, Homo sapien
cataatgggagtagaaatgacaatc

SEQ ID NO: 469400 - DNA, 25 bp, Homo sapien
gcaaattcacatacggtattatgca

SEQ ID NO: 469401 - DNA, 25 bp, Homo sapien
ggcataatgccatatacataagaaa

SEQ ID NO: 469402 - DNA, 25 bp, Homo sapien
cacagctctcatggatttaaagctc

SEQ ID NO: 469403 - DNA, 25 bp, Homo sapien
gagccaaggctctattaccataatg

SEQ ID NO: 469404 - DNA, 25 bp, Homo sapien
tatgcggctacaaaatggtcattct

SEQ ID NO: 469405 - DNA, 25 bp, Homo sapien
cagaggctagctgcatcatagaatg

SEQ ID NO: 469406 - DNA, 25 bp, Homo sapien
ggcacttgggcaggaatactacaga

SEQ ID NO: 469407 - DNA, 25 bp, Homo sapien
tcaaaccctctctcttgttaatata

SEQ ID NO: 469408 - DNA, 25 bp, Homo sapien
tacagacatgacacgctgtaaccag

SEQ ID NO: 469409 - DNA, 25 bp, Homo sapien
tcatatttattcaaaccctctctct

SEQ ID NO: 469410 - DNA, 25 bp, Homo sapien
catgacacgctgtaaccagcttggt

SEQ ID NO: 469411 - DNA, 25 bp, Homo sapien
tgataattcacttcgttcttttgtt

SEQ ID NO: 469412 - DNA, 25 bp, Homo sapien
ttctcctaagctcaattacttcctg

SEQ ID NO: 469413 - DNA, 25 bp, Homo sapien
ctcttttgataattcacttcgttct

SEQ ID NO: 469414 - DNA, 25 bp, Homo sapien
tgtttgaatcatgtgagaggcttca

SEQ ID NO: 469415 - DNA, 25 bp, Homo sapien
ggcgatcctcttcatgagcacagcg

SEQ ID NO: 469416 - DNA, 25 bp, Homo sapien
gcgaacactaagctccatgttttgg

SEQ ID NO: 469417 - DNA, 25 bp, Homo sapien
catgttttggcgattaagatattct

SEQ ID NO: 469418 - DNA, 25 bp, Homo sapien
tgcagtaaagtaacagtttgctcta

SEQ ID NO: 469419 - DNA, 25 bp, Homo sapien
taggcaggactacatgtgcttgaca

SEQ ID NO: 469420 - DNA, 25 bp, Homo sapien
gaaggcaggaccaaaacatagggag

SEQ ID NO: 469421 - DNA, 25 bp, Homo sapien
tggcacaatcatgtaaccccgaact

SEQ ID NO: 469422 - DNA, 25 bp, Homo sapien
catagggagtctgattgaagggcat

SEQ ID NO: 469423 - DNA, 25 bp, Homo sapien
tagttcatcatgtagtttattttca

SEQ ID NO: 469424 - DNA, 25 bp, Homo sapien
tgttctagttcatcatgtagtttat

SEQ ID NO: 469425 - DNA, 25 bp, Homo sapien
ttttctcgttcatacatttccctag

SEQ ID NO: 469426 - DNA, 25 bp, Homo sapien
ggcatttcgaagttgatcaatttct

SEQ ID NO: 469427 - DNA, 25 bp, Homo sapien
tatggcccacagtatataacatgct

SEQ ID NO: 469428 - DNA, 25 bp, Homo sapien
caacctggtgcactttttagaataa

SEQ ID NO: 469429 - DNA, 25 bp, Homo sapien
tatccgtagcatgtacaagctaacg

SEQ ID NO: 469430 - DNA, 25 bp, Homo sapien
tttagaagtccaaaccaagcgtata

SEQ ID NO: 469431 - DNA, 25 bp, Homo sapien
ctgcattctttagcaaaacgcagca

SEQ ID NO: 469432 - DNA, 25 bp, Homo sapien
aacctgcattctttagcaaaacgca

SEQ ID NO: 469433 - DNA, 25 bp, Homo sapien
tgcattctttagcaaaacgcagcat

SEQ ID NO: 469434 - DNA, 25 bp, Homo sapien
cctgcattctttagcaaaacgcagc

SEQ ID NO: 469435 - DNA, 25 bp, Homo sapien
catacagaatatgagtagggagtca

SEQ ID NO: 469436 - DNA, 25 bp, Homo sapien
gagagctcatatacctagcctcaag

SEQ ID NO: 469437 - DNA, 25 bp, Homo sapien
aaagccagggctttttacatcatgc

SEQ ID NO: 469438 - DNA, 25 bp, Homo sapien
cctaagaggaccataagttgaatcc

SEQ ID NO: 469439 - DNA, 25 bp, Homo sapien
ttttcagccacagcattatcccttg

SEQ ID NO: 469440 - DNA, 25 bp, Homo sapien
tccttttcagccatcactgctcgtt

SEQ ID NO: 469441 - DNA, 25 bp, Homo sapien
atcactgctcgttccttttcagcca

SEQ ID NO: 469442 - DNA, 25 bp, Homo sapien
tgtctaagagctgatcgtgtttttc

SEQ ID NO: 469443 - DNA, 25 bp, Homo sapien
gtgaaaaattcgttggaaagatatc

SEQ ID NO: 469444 - DNA, 25 bp, Homo sapien
cacaacaacactaaattggacaaat

SEQ ID NO: 469445 - DNA, 25 bp, Homo sapien
aagtttcacaacaacactaaattgg

SEQ ID NO: 469446 - DNA, 25 bp, Homo sapien
ttggaaagatatcaacttgtgaaga

SEQ ID NO: 469447 - DNA, 25 bp, Homo sapien
atttaaccatctccaacacttcagg

SEQ ID NO: 469448 - DNA, 25 bp, Homo sapien
taatataatcaaagcaactcagtat

SEQ ID NO: 469449 - DNA, 25 bp, Homo sapien
taaagagcctaatataatcaaagca

SEQ ID NO: 469450 - DNA, 25 bp, Homo sapien
ttcttatgtcctccccttgcagaaa

SEQ ID NO: 469451 - DNA, 25 bp, Homo sapien
tcaaatccactgtgaggctaaaaac

SEQ ID NO: 469452 - DNA, 25 bp, Homo sapien
aaagatcatcctaagaattgcctcc

SEQ ID NO: 469453 - DNA, 25 bp, Homo sapien
tgcctcccatgcacaagcaaacatt

SEQ ID NO: 469454 - DNA, 25 bp, Homo sapien
tgctatataatagaccacaatgtgg

SEQ ID NO: 469455 - DNA, 25 bp, Homo sapien
ttattagcatagtaaccttaagagg

SEQ ID NO: 469456 - DNA, 25 bp, Homo sapien
aacaacttcacgtttgatattctaa

SEQ ID NO: 469457 - DNA, 25 bp, Homo sapien
tgaggtaagtcagtattattcatac

SEQ ID NO: 469458 - DNA, 25 bp, Homo sapien
cattaacaacttcacgtttgatatt

SEQ ID NO: 469459 - DNA, 25 bp, Homo sapien
aatggttatgacactctaaagaaag

SEQ ID NO: 469460 - DNA, 25 bp, Homo sapien
gaatggttatgacactctaaagaaa

SEQ ID NO: 469461 - DNA, 25 bp, Homo sapien
cagaatggttatgacactctaaaga

SEQ ID NO: 469462 - DNA, 25 bp, Homo sapien
agaatggttatgacactctaaagaa

SEQ ID NO: 469463 - DNA, 25 bp, Homo sapien
ctcttgcagaagttgaacacgctca

SEQ ID NO: 469464 - DNA, 25 bp, Homo sapien
ttcacattccaattgacactgtgtg

SEQ ID NO: 469465 - DNA, 25 bp, Homo sapien
tgacactgtgtgagatttcttgctg

SEQ ID NO: 469466 - DNA, 25 bp, Homo sapien
tgtactaagttgtagttctctgtac

SEQ ID NO: 469467 - DNA, 25 bp, Homo sapien
atataaatcttgtacttagggagtt

SEQ ID NO: 469468 - DNA, 25 bp, Homo sapien
cttagggagtttacatgccatgcta

SEQ ID NO: 469469 - DNA, 25 bp, Homo sapien
cttgtacttagggagtttacatgcc

SEQ ID NO: 469470 - DNA, 25 bp, Homo sapien
aatcttgtacttagggagtttacat

SEQ ID NO: 469471 - DNA, 25 bp, Homo sapien
gaagttcagtaatgcgtttttcaga

SEQ ID NO: 469472 - DNA, 25 bp, Homo sapien
tctcataaatgtctagccttgcttg

SEQ ID NO: 469473 - DNA, 25 bp, Homo sapien
tagccttgcttgatgctctgagttc

SEQ ID NO: 469474 - DNA, 25 bp, Homo sapien
ctgtgcttgaagttcagtaatgcgt

SEQ ID NO: 469475 - DNA, 25 bp, Homo sapien
ttttggctgttgtgggaacattagc

SEQ ID NO: 469476 - DNA, 25 bp, Homo sapien
acattagcaccatagccgtaggaaa

SEQ ID NO: 469477 - DNA, 25 bp, Homo sapien
gctgttgtgggaacattagcaccat

SEQ ID NO: 469478 - DNA, 25 bp, Homo sapien
ctttgctttagtcgtcttttggctg

SEQ ID NO: 469479 - DNA, 25 bp, Homo sapien
tgaattctcaaacgctctgatgaag

SEQ ID NO: 469480 - DNA, 25 bp, Homo sapien
tatcctgcactgagttagatagaga

SEQ ID NO: 469481 - DNA, 25 bp, Homo sapien
cattttcttagtgtacaatgtctct

SEQ ID NO: 469482 - DNA, 25 bp, Homo sapien
aataagatgtagttggcacggcgtg

SEQ ID NO: 469483 - DNA, 25 bp, Homo sapien
ttagatgacctgagaagcacttcct

SEQ ID NO: 469484 - DNA, 25 bp, Homo sapien
taaaaagagcgcaaagccaccgctt

SEQ ID NO: 469485 - DNA, 25 bp, Homo sapien
gatatctagccttactttcccgtca

SEQ ID NO: 469486 - DNA, 25 bp, Homo sapien
tcagaaatgtatcagaccctaacct

SEQ ID NO: 469487 - DNA, 25 bp, Homo sapien
gaaagctgtgttacttggtcctttc

SEQ ID NO: 469488 - DNA, 25 bp, Homo sapien
attgaagcactcttcttgccaagtg

SEQ ID NO: 469489 - DNA, 25 bp, Homo sapien
ttacttggtcctttcgatgttccag

SEQ ID NO: 469490 - DNA, 25 bp, Homo sapien
gctgtgttacttggtcctttcgatg

SEQ ID NO: 469491 - DNA, 25 bp, Homo sapien
aaatacaagctaggcttgctcacgc

SEQ ID NO: 469492 - DNA, 25 bp, Homo sapien
tccacacaacgaaatgttactcagt

SEQ ID NO: 469493 - DNA, 25 bp, Homo sapien
actgtggtacttccacacaacgaaa

SEQ ID NO: 469494 - DNA, 25 bp, Homo sapien
aagtctaggaaatacaagctaggct

SEQ ID NO: 469495 - DNA, 25 bp, Homo sapien
tctgtatatgctgggtacatgcaca

SEQ ID NO: 469496 - DNA, 25 bp, Homo sapien
cagatctagattgtttagggccaca

SEQ ID NO: 469497 - DNA, 25 bp, Homo sapien
cactcctagcagttgttagaggcag

SEQ ID NO: 469498 - DNA, 25 bp, Homo sapien
cagaagaatgggtcaggcaactcaa

SEQ ID NO: 469499 - DNA, 25 bp, Homo sapien
ggttggagcacccacaaaaagtcca

SEQ ID NO: 469500 - DNA, 25 bp, Homo sapien
tgaaaagttgtagacactgccagcc

SEQ ID NO: 469501 - DNA, 25 bp, Homo sapien
gtagatctactaacaccttgcactg

SEQ ID NO: 469502 - DNA, 25 bp, Homo sapien
gctgaaccatgcaaagccacaaggg

SEQ ID NO: 469503 - DNA, 25 bp, Homo sapien
tcactactatcatcagcatctgaga

SEQ ID NO: 469504 - DNA, 25 bp, Homo sapien
agtgaacctgctcacaaatccagca

SEQ ID NO: 469505 - DNA, 25 bp, Homo sapien
taagaaaccataaagtcacatcccc

SEQ ID NO: 469506 - DNA, 25 bp, Homo sapien
taaggaactcagagtcttcacactg

SEQ ID NO: 469507 - DNA, 25 bp, Homo sapien
gaagctacacagttttccatattgg

SEQ ID NO: 469508 - DNA, 25 bp, Homo sapien
tccaggttgtgtgaatgccgttatt

SEQ ID NO: 469509 - DNA, 25 bp, Homo sapien
tcatagcttagctgtgacttgtaag

SEQ ID NO: 469510 - DNA, 25 bp, Homo sapien
cttgtaagtgagagcgtatgatgtt

SEQ ID NO: 469511 - DNA, 25 bp, Homo sapien
ggcaggatctagaagcctgttttac

SEQ ID NO: 469512 - DNA, 25 bp, Homo sapien
catagttcactgcagagcttgttaa

SEQ ID NO: 469513 - DNA, 25 bp, Homo sapien
cacttcagtctctcaggtggctaaa

SEQ ID NO: 469514 - DNA, 25 bp, Homo sapien
tacttaatcacaacctctgagggca

SEQ ID NO: 469515 - DNA, 25 bp, Homo sapien
gaactgaccctgactgaataaactg

SEQ ID NO: 469516 - DNA, 25 bp, Homo sapien
aagttctactaacctgtataaccag

SEQ ID NO: 469517 - DNA, 25 bp, Homo sapien
aattaaatcaaacaattgccttggc

SEQ ID NO: 469518 - DNA, 25 bp, Homo sapien
ggtggcagggaataactaagaacat

SEQ ID NO: 469519 - DNA, 25 bp, Homo sapien
gacagaattcctaactattctatga

SEQ ID NO: 469520 - DNA, 25 bp, Homo sapien
ggtactctatagttggataatcaca

SEQ ID NO: 469521 - DNA, 25 bp, Homo sapien
gtgtcagcaagctcctactttggta

SEQ ID NO: 469522 - DNA, 25 bp, Homo sapien
actatttggcgataaacgtctagcc

SEQ ID NO: 469523 - DNA, 25 bp, Homo sapien
tttatccattgatctcttgatgaat

SEQ ID NO: 469524 - DNA, 25 bp, Homo sapien
tcataatgttgaatagctaccactt

SEQ ID NO: 469525 - DNA, 25 bp, Homo sapien
tcctggccctagaaacctgtatctt

SEQ ID NO: 469526 - DNA, 25 bp, Homo sapien
tttaatggtaaataatagtccactg

SEQ ID NO: 469527 - DNA, 25 bp, Homo sapien
tgagtctggtttaatagcgaattgg

SEQ ID NO: 469528 - DNA, 25 bp, Homo sapien
ccgtcagtgaatcaatcttagaatc

SEQ ID NO: 469529 - DNA, 25 bp, Homo sapien
tctctctgacgcactgattcaatga

SEQ ID NO: 469530 - DNA, 25 bp, Homo sapien
caagttgtgcaatagattccgtcag

SEQ ID NO: 469531 - DNA, 25 bp, Homo sapien
caaataaaagatttgtagatggttt

SEQ ID NO: 469532 - DNA, 25 bp, Homo sapien
ttcaaataaaagatttgtagatggt

SEQ ID NO: 469533 - DNA, 25 bp, Homo sapien
tcaaataaaagatttgtagatggtt

SEQ ID NO: 469534 - DNA, 25 bp, Homo sapien
attcaaataaaagatttgtagatgg

SEQ ID NO: 469535 - DNA, 25 bp, Homo sapien
ttgaaatgccatttgcttcgagtag

SEQ ID NO: 469536 - DNA, 25 bp, Homo sapien
gaaggaatgtgggtatacagaactg

SEQ ID NO: 469537 - DNA, 25 bp, Homo sapien
aagcccaggataattccactctagg

SEQ ID NO: 469538 - DNA, 25 bp, Homo sapien
cagcctgatgtgtatttaaagccca

SEQ ID NO: 469539 - DNA, 25 bp, Homo sapien
tgtaagcacatctatcttgaatggt

SEQ ID NO: 469540 - DNA, 25 bp, Homo sapien
atacaaagcttctatgagtgactca

SEQ ID NO: 469541 - DNA, 25 bp, Homo sapien
tggtatattacacccataattgtta

SEQ ID NO: 469542 - DNA, 25 bp, Homo sapien
aaacaaatctccttgtaagcacatc

SEQ ID NO: 469543 - DNA, 25 bp, Homo sapien
cctctgaggagacggactagatgca

SEQ ID NO: 469544 - DNA, 25 bp, Homo sapien
tagagtctccaaagcatggtaagga

SEQ ID NO: 469545 - DNA, 25 bp, Homo sapien
gacttttagagttaggcgccagaga

SEQ ID NO: 469546 - DNA, 25 bp, Homo sapien
ccaagtaatcgagaaggaagcatca

SEQ ID NO: 469547 - DNA, 25 bp, Homo sapien
tcttcgtctgtagtaaagctgactt

SEQ ID NO: 469548 - DNA, 25 bp, Homo sapien
gattcttcgtctgtagtaaagctga

SEQ ID NO: 469549 - DNA, 25 bp, Homo sapien
tgccatttgattcttcgtctgtagt

SEQ ID NO: 469550 - DNA, 25 bp, Homo sapien
tttgattcttcgtctgtagtaaagc

SEQ ID NO: 469551 - DNA, 25 bp, Homo sapien
aatgaacatgcacaactgggatcca

SEQ ID NO: 469552 - DNA, 25 bp, Homo sapien
gacgagaggcacactaaggaaatta

SEQ ID NO: 469553 - DNA, 25 bp, Homo sapien
tagttactaactgccatgggcaagc

SEQ ID NO: 469554 - DNA, 25 bp, Homo sapien
tacattgataaagaagacgagaggc

SEQ ID NO: 469555 - DNA, 25 bp, Homo sapien
caaactgggttacatccatataatg

SEQ ID NO: 469556 - DNA, 25 bp, Homo sapien
tattattgtaactgagaaaagccag

SEQ ID NO: 469557 - DNA, 25 bp, Homo sapien
tagatgtatgtacaggctcacacct

SEQ ID NO: 469558 - DNA, 25 bp, Homo sapien
aaatacacccgtggttgatagggct

SEQ ID NO: 469559 - DNA, 25 bp, Homo sapien
gaatgtaattctggatcagtctagt

SEQ ID NO: 469560 - DNA, 25 bp, Homo sapien
ggtgctaagtgctgctaaagaaaaa

SEQ ID NO: 469561 - DNA, 25 bp, Homo sapien
aaggaatataaaggtaatgccagtc

SEQ ID NO: 469562 - DNA, 25 bp, Homo sapien
tccatcttctatgtttacacctggg

SEQ ID NO: 469563 - DNA, 25 bp, Homo sapien
cactgctatattaattctcacagaa

SEQ ID NO: 469564 - DNA, 25 bp, Homo sapien
gtgcccagtctcaaatgatagataa

SEQ ID NO: 469565 - DNA, 25 bp, Homo sapien
ttcctaagtgctgggtacaggtagg

SEQ ID NO: 469566 - DNA, 25 bp, Homo sapien
caggaacactgctatattaattctc

SEQ ID NO: 469567 - DNA, 25 bp, Homo sapien
gaacttcttatgaagtggattgcct

SEQ ID NO: 469568 - DNA, 25 bp, Homo sapien
gaaatgtccctgaaatcttccgaga

SEQ ID NO: 469569 - DNA, 25 bp, Homo sapien
taagtatgaaccgaaagagtgacac

SEQ ID NO: 469570 - DNA, 25 bp, Homo sapien
tccgagaaatcgcaaagaacatatg

SEQ ID NO: 469571 - DNA, 25 bp, Homo sapien
tatggtgtctaacagaattatgact

SEQ ID NO: 469572 - DNA, 25 bp, Homo sapien
cgggatcagtgacttaagtttacaa

SEQ ID NO: 469573 - DNA, 25 bp, Homo sapien
cagccttctcttagtgtcagctcct

SEQ ID NO: 469574 - DNA, 25 bp, Homo sapien
taatattgtctcctggccaccaaat

SEQ ID NO: 469575 - DNA, 25 bp, Homo sapien
cactggttttcagagtatgactcac

SEQ ID NO: 469576 - DNA, 25 bp, Homo sapien
tatcctccacttagagcactggttt

SEQ ID NO: 469577 - DNA, 25 bp, Homo sapien
gaccctggcctttactatttcagta

SEQ ID NO: 469578 - DNA, 25 bp, Homo sapien
gcatcaacttcagactttaaaccct

SEQ ID NO: 469579 - DNA, 25 bp, Homo sapien
tagagcttcgtttcattctggcagt

SEQ ID NO: 469580 - DNA, 25 bp, Homo sapien
ttctggcagttctagcctaggcctg

SEQ ID NO: 469581 - DNA, 25 bp, Homo sapien
caatctctgtgtacgtggatgcgat

SEQ ID NO: 469582 - DNA, 25 bp, Homo sapien
tagcaggatttaccctaaggttctc

SEQ ID NO: 469583 - DNA, 25 bp, Homo sapien
ttttctactgagtggtcattttctt

SEQ ID NO: 469584 - DNA, 25 bp, Homo sapien
tttttcagttgattgccttggccca

SEQ ID NO: 469585 - DNA, 25 bp, Homo sapien
tctttatatgttagggaaattagcc

SEQ ID NO: 469586 - DNA, 25 bp, Homo sapien
tttgtctttaatatgagtggcaatt

SEQ ID NO: 469587 - DNA, 25 bp, Homo sapien
tgcatcttaacgagaatctgtttca

SEQ ID NO: 469588 - DNA, 25 bp, Homo sapien
tctgattttctgtcacatgttttgg

SEQ ID NO: 469589 - DNA, 25 bp, Homo sapien
gtcttcatgctctttaggcacattc

SEQ ID NO: 469590 - DNA, 25 bp, Homo sapien
agagtgttggtttaggtgtaaatat

SEQ ID NO: 469591 - DNA, 25 bp, Homo sapien
tattgtcttcatgctctttaggcac

SEQ ID NO: 469592 - DNA, 25 bp, Homo sapien
tagaaaatggattaatgcaaatcct

SEQ ID NO: 469593 - DNA, 25 bp, Homo sapien
aatgcaaatccttcaaggtcttttc

SEQ ID NO: 469594 - DNA, 25 bp, Homo sapien
tatactatcatctataagataggta

SEQ ID NO: 469595 - DNA, 25 bp, Homo sapien
tatttttagctaacaatgcatttca

SEQ ID NO: 469596 - DNA, 25 bp, Homo sapien
tgtacatatcagtggtattacttac

SEQ ID NO: 469597 - DNA, 25 bp, Homo sapien
acatatcagtggtattacttacatt

SEQ ID NO: 469598 - DNA, 25 bp, Homo sapien
atgtacatatcagtggtattactta

SEQ ID NO: 469599 - DNA, 25 bp, Homo sapien
gtacatatcagtggtattacttaca

SEQ ID NO: 469600 - DNA, 25 bp, Homo sapien
gaagggagaccttgttgagaactga

SEQ ID NO: 469601 - DNA, 25 bp, Homo sapien
cctcccactgctggaaacggaaggg

SEQ ID NO: 469602 - DNA, 25 bp, Homo sapien
ttgataaagccccagcagggtagct

SEQ ID NO: 469603 - DNA, 25 bp, Homo sapien
tactgtaagaactaggtcaagcttc

SEQ ID NO: 469604 - DNA, 25 bp, Homo sapien
tcttttgtttcttagaccactcagg

SEQ ID NO: 469605 - DNA, 25 bp, Homo sapien
tttgtttcttagaccactcaggtgc

SEQ ID NO: 469606 - DNA, 25 bp, Homo sapien
tgtttcttagaccactcaggtgctt

SEQ ID NO: 469607 - DNA, 25 bp, Homo sapien
catcttttgtttcttagaccactca

SEQ ID NO: 469608 - DNA, 25 bp, Homo sapien
atataatggtctacaggtgcttccc

SEQ ID NO: 469609 - DNA, 25 bp, Homo sapien
aaatgctgagtacacgattaagctg

SEQ ID NO: 469610 - DNA, 25 bp, Homo sapien
taatattagttcaaataaacattgt

SEQ ID NO: 469611 - DNA, 25 bp, Homo sapien
cttcaggagtatataatggtctaca

SEQ ID NO: 469612 - DNA, 25 bp, Homo sapien
taaagtatattgattgttctttaca

SEQ ID NO: 469613 - DNA, 25 bp, Homo sapien
aagtatattgattgttctttacaca

SEQ ID NO: 469614 - DNA, 25 bp, Homo sapien
aaaaataaagtatattgattgttct

SEQ ID NO: 469615 - DNA, 25 bp, Homo sapien
gtatattgattgttctttacacatt

SEQ ID NO: 469616 - DNA, 25 bp, Homo sapien
aatggaatagcagactttctgccag

SEQ ID NO: 469617 - DNA, 25 bp, Homo sapien
gcttttgaagtacctcgtagtggac

SEQ ID NO: 469618 - DNA, 25 bp, Homo sapien
cgtagtggacttcacaaatgattct

SEQ ID NO: 469619 - DNA, 25 bp, Homo sapien
ggtatctgaccaccattactgggct

SEQ ID NO: 469620 - DNA, 25 bp, Homo sapien
ggatgatgaaagtaaacttcctttg

SEQ ID NO: 469621 - DNA, 25 bp, Homo sapien
ctttggtgcttgaggtatcatagaa

SEQ ID NO: 469622 - DNA, 25 bp, Homo sapien
ggtgcttgaggtatcatagaattct

SEQ ID NO: 469623 - DNA, 25 bp, Homo sapien
gatgaaagtaaacttcctttggtgc

SEQ ID NO: 469624 - DNA, 25 bp, Homo sapien
tgttaaatctaagaggcccacagga

SEQ ID NO: 469625 - DNA, 25 bp, Homo sapien
cacccgagtttccatcctagatagg

SEQ ID NO: 469626 - DNA, 25 bp, Homo sapien
gaatgccactggagaagcacctttt

SEQ ID NO: 469627 - DNA, 25 bp, Homo sapien
cacaggagtctaccacaaagctata

SEQ ID NO: 469628 - DNA, 25 bp, Homo sapien
gaaggccagttaggagactaccgaa

SEQ ID NO: 469629 - DNA, 25 bp, Homo sapien
gacatactgtgctcttatacctcaa

SEQ ID NO: 469630 - DNA, 25 bp, Homo sapien
aaaatccattctttgctgcggagaa

SEQ ID NO: 469631 - DNA, 25 bp, Homo sapien
gactaccgaagaatcctagggagga

SEQ ID NO: 469632 - DNA, 25 bp, Homo sapien
caaaaattcgtagctgtggacatca

SEQ ID NO: 469633 - DNA, 25 bp, Homo sapien
tcagtgccgcacaagtaaagacctg

SEQ ID NO: 469634 - DNA, 25 bp, Homo sapien
gttctaagctctgaggataccagca

SEQ ID NO: 469635 - DNA, 25 bp, Homo sapien
tgaggtccctagcatcatagctttg

SEQ ID NO: 469636 - DNA, 25 bp, Homo sapien
accagtcacatgggacgatgaagac

SEQ ID NO: 469637 - DNA, 25 bp, Homo sapien
ccaccagtcacatgggacgatgaag

SEQ ID NO: 469638 - DNA, 25 bp, Homo sapien
caccagtcacatgggacgatgaaga

SEQ ID NO: 469639 - DNA, 25 bp, Homo sapien
gaggattagccctgccttctagtaa

SEQ ID NO: 469640 - DNA, 25 bp, Homo sapien
gaagccgcaatttgagaggagacca

SEQ ID NO: 469641 - DNA, 25 bp, Homo sapien
tcaattcctttatgtccagctgagc

SEQ ID NO: 469642 - DNA, 25 bp, Homo sapien
ggctgctgcctagtgcaatgctgta

SEQ ID NO: 469643 - DNA, 25 bp, Homo sapien
gacaagcaatacttggtgaacccca

SEQ ID NO: 469644 - DNA, 25 bp, Homo sapien
ccccaacaaatcgagtggccctgta

SEQ ID NO: 469645 - DNA, 25 bp, Homo sapien
tcctagggtcccacacaaaatagac

SEQ ID NO: 469646 - DNA, 25 bp, Homo sapien
tcgagtggccctgtagggaacaaat

SEQ ID NO: 469647 - DNA, 25 bp, Homo sapien
aaatataaatgcctggaaccaagtt

SEQ ID NO: 469648 - DNA, 25 bp, Homo sapien
gagagactgggattgctttttccac

SEQ ID NO: 469649 - DNA, 25 bp, Homo sapien
gcgtattgtagcttaaactgcacag

SEQ ID NO: 469650 - DNA, 25 bp, Homo sapien
tctgactcgaaacatgataggcaag

SEQ ID NO: 469651 - DNA, 25 bp, Homo sapien
gacagattgggctggcggagccggg

SEQ ID NO: 469652 - DNA, 25 bp, Homo sapien
ctgacagattgggctggcggagccg

SEQ ID NO: 469653 - DNA, 25 bp, Homo sapien
agggaagtagcggagcgggtggaat

SEQ ID NO: 469654 - DNA, 25 bp, Homo sapien
gcggagggaagtagcggagcgggtg

SEQ ID NO: 469655 - DNA, 25 bp, Homo sapien
agggcggccgcgcagtttgtacaca

SEQ ID NO: 469656 - DNA, 25 bp, Homo sapien
ggccacgagcttcgcgcgcagggcg

SEQ ID NO: 469657 - DNA, 25 bp, Homo sapien
gccgcgcagtttgtacacaacttct

SEQ ID NO: 469658 - DNA, 25 bp, Homo sapien
cctctcgggccacgagcttcgcgcg

SEQ ID NO: 469659 - DNA, 25 bp, Homo sapien
ctatgagcagggagagaggcagcca

SEQ ID NO: 469660 - DNA, 25 bp, Homo sapien
gaggcagccagggccccgcctccgt

SEQ ID NO: 469661 - DNA, 25 bp, Homo sapien
gagagaggcagccagggccccgcct

SEQ ID NO: 469662 - DNA, 25 bp, Homo sapien
cagccagggccccgcctccgtcggc

SEQ ID NO: 469663 - DNA, 25 bp, Homo sapien
cagcgccgccgcgaatcccgaggcc

SEQ ID NO: 469664 - DNA, 25 bp, Homo sapien
gcggggcccgatcgcctgattggca

SEQ ID NO: 469665 - DNA, 25 bp, Homo sapien
ggcccgatcgcctgattggcagcgc

SEQ ID NO: 469666 - DNA, 25 bp, Homo sapien
tgacgcccgcctctatttcacccaa

SEQ ID NO: 469667 - DNA, 25 bp, Homo sapien
gagagaaccgcgagcgcacgtacct

SEQ ID NO: 469668 - DNA, 25 bp, Homo sapien
gagcgcacgtacctgccccgcgact

SEQ ID NO: 469669 - DNA, 25 bp, Homo sapien
agagaaccgcgagcgcacgtacctg

SEQ ID NO: 469670 - DNA, 25 bp, Homo sapien
acgtacctgccccgcgactactgac

SEQ ID NO: 469671 - DNA, 25 bp, Homo sapien
gctcttccacacgtaaacgccaacg

SEQ ID NO: 469672 - DNA, 25 bp, Homo sapien
tttcgggtggactcctcagacagcg

SEQ ID NO: 469673 - DNA, 25 bp, Homo sapien
ggcagttttcgaaggcgcgcacgaa

SEQ ID NO: 469674 - DNA, 25 bp, Homo sapien
aaagcaaaactcttccgctcttcca

SEQ ID NO: 469675 - DNA, 25 bp, Homo sapien
tcccacctcgcccacgctggcttgg

SEQ ID NO: 469676 - DNA, 25 bp, Homo sapien
gcccacgctggcttgggtcggcgag

SEQ ID NO: 469677 - DNA, 25 bp, Homo sapien
cttgggtcggcgagctcagcgcggg

SEQ ID NO: 469678 - DNA, 25 bp, Homo sapien
ctccaggcgcgggtcgggcgcactt

SEQ ID NO: 469679 - DNA, 25 bp, Homo sapien
cggcttgagctgcgcgaacaccggc

SEQ ID NO: 469680 - DNA, 25 bp, Homo sapien
caccggctcgtcctgcggcgccggc

SEQ ID NO: 469681 - DNA, 25 bp, Homo sapien
cccaggcgggcgctcatgctcagca

SEQ ID NO: 469682 - DNA, 25 bp, Homo sapien
tgagctgcgcgaacaccggctcgtc

SEQ ID NO: 469683 - DNA, 25 bp, Homo sapien
gcgggcggtggtgcgcgtgcttcag

SEQ ID NO: 469684 - DNA, 25 bp, Homo sapien
gcttcagctcctcgccggggaagag

SEQ ID NO: 469685 - DNA, 25 bp, Homo sapien
cgcctgcgggcggtggtgcgcgtgc

SEQ ID NO: 469686 - DNA, 25 bp, Homo sapien
cgcgggccggattcgcggcgcccag

SEQ ID NO: 469687 - DNA, 25 bp, Homo sapien
tcattttccaaacgcggcccgcaat

SEQ ID NO: 469688 - DNA, 25 bp, Homo sapien
tgagccaccgggtatgaaaccttgg

SEQ ID NO: 469689 - DNA, 25 bp, Homo sapien
gaaaaataagcgctccgacacaacc

SEQ ID NO: 469690 - DNA, 25 bp, Homo sapien
ggcccgcaatcgcttctaaagcagg

SEQ ID NO: 469691 - DNA, 25 bp, Homo sapien
aaaattaacgctctcatcatgtgag

SEQ ID NO: 469692 - DNA, 25 bp, Homo sapien
gggtttcccggatagacatgattta

SEQ ID NO: 469693 - DNA, 25 bp, Homo sapien
aataaaaattaacgctctcatcatg

SEQ ID NO: 469694 - DNA, 25 bp, Homo sapien
cgctctcatcatgtgagtcacatct

SEQ ID NO: 469695 - DNA, 25 bp, Homo sapien
caatccctgtgtaaggtactagggc

SEQ ID NO: 469696 - DNA, 25 bp, Homo sapien
tactagggcaaactcctcagtgttg

SEQ ID NO: 469697 - DNA, 25 bp, Homo sapien
tataaaatgcataatccacctgatt

SEQ ID NO: 469698 - DNA, 25 bp, Homo sapien
tctcgggaagaacgaacaatcggcg

SEQ ID NO: 469699 - DNA, 25 bp, Homo sapien
gaagaactggtctacgactgaggca

SEQ ID NO: 469700 - DNA, 25 bp, Homo sapien
tgaggcactgtctcgtctatacttt

SEQ ID NO: 469701 - DNA, 25 bp, Homo sapien
tcatgttgatactgtaaggtaaccc

SEQ ID NO: 469702 - DNA, 25 bp, Homo sapien
tgtcagggaggaagacgttcatgtt

SEQ ID NO: 469703 - DNA, 25 bp, Homo sapien
atggcaacaggttctgtcttgatgt

SEQ ID NO: 469704 - DNA, 25 bp, Homo sapien
tggcaacaggttctgtcttgatgtg

SEQ ID NO: 469705 - DNA, 25 bp, Homo sapien
ggcaacaggttctgtcttgatgtgt

SEQ ID NO: 469706 - DNA, 25 bp, Homo sapien
gatccggtgtattcagtagctggta

SEQ ID NO: 469707 - DNA, 25 bp, Homo sapien
ggatgcgtcgtttctccaaatcggg

SEQ ID NO: 469708 - DNA, 25 bp, Homo sapien
tctggacttccaggctctgagcttg

SEQ ID NO: 469709 - DNA, 25 bp, Homo sapien
gaactgggcatatctagatccggtg

SEQ ID NO: 469710 - DNA, 25 bp, Homo sapien
tgcttcaaccaggtaagagcacata

SEQ ID NO: 469711 - DNA, 25 bp, Homo sapien
gttgaaaagggcacgcgcgtgcaca

SEQ ID NO: 469712 - DNA, 25 bp, Homo sapien
catgaggttgaaaagggcacgcgcg

SEQ ID NO: 469713 - DNA, 25 bp, Homo sapien
tctattgatgcttcaaccaggtaag

SEQ ID NO: 469714 - DNA, 25 bp, Homo sapien
taaatgagaagacttggtataaact

SEQ ID NO: 469715 - DNA, 25 bp, Homo sapien
ttaaatgagaagacttggtataaac

SEQ ID NO: 469716 - DNA, 25 bp, Homo sapien
aatgagaagacttggtataaacttt

SEQ ID NO: 469717 - DNA, 25 bp, Homo sapien
tgagaagacttggtataaacttttg

SEQ ID NO: 469718 - DNA, 25 bp, Homo sapien
tctgaaccaagcctgtgctgaaaag

SEQ ID NO: 469719 - DNA, 25 bp, Homo sapien
tagtgagggaacatcaccggccttc

SEQ ID NO: 469720 - DNA, 25 bp, Homo sapien
ttatgcagtacactccaaatgggaa

SEQ ID NO: 469721 - DNA, 25 bp, Homo sapien
taatcaactctgagcggtgacaggg

SEQ ID NO: 469722 - DNA, 25 bp, Homo sapien
catagtaacatctagcctcgggaga

SEQ ID NO: 469723 - DNA, 25 bp, Homo sapien
gggagattcaagtcctcacactaat

SEQ ID NO: 469724 - DNA, 25 bp, Homo sapien
aaacagcccgctcatttcatagata

SEQ ID NO: 469725 - DNA, 25 bp, Homo sapien
tgcaaccatattcctcttagggctc

SEQ ID NO: 469726 - DNA, 25 bp, Homo sapien
caggtcaagttcctgaatcgcaggt

SEQ ID NO: 469727 - DNA, 25 bp, Homo sapien
gattaaatgtatttgccggcaggtc

SEQ ID NO: 469728 - DNA, 25 bp, Homo sapien
tcagatatgggtttgactacatccc

SEQ ID NO: 469729 - DNA, 25 bp, Homo sapien
tcgcaggtataagcattcagggcac

SEQ ID NO: 469730 - DNA, 25 bp, Homo sapien
tttgttgtcatgataaccactctga

SEQ ID NO: 469731 - DNA, 25 bp, Homo sapien
gaagttgtaggattaaccaagtcag

SEQ ID NO: 469732 - DNA, 25 bp, Homo sapien
aacagacgacatgaaagtggtccca

SEQ ID NO: 469733 - DNA, 25 bp, Homo sapien
ggattgctgtgccatacttcctctc

SEQ ID NO: 469734 - DNA, 25 bp, Homo sapien
aatgccaaaacgttctttcagtgag

SEQ ID NO: 469735 - DNA, 25 bp, Homo sapien
ccttctgaaagggaggaacctcaga

SEQ ID NO: 469736 - DNA, 25 bp, Homo sapien
taatgctccccaaagcttgccagct

SEQ ID NO: 469737 - DNA, 25 bp, Homo sapien
tcagtgagcattaactagcagttcc

SEQ ID NO: 469738 - DNA, 25 bp, Homo sapien
aatagtctggtactgataacttcac

SEQ ID NO: 469739 - DNA, 25 bp, Homo sapien
gattgaagcaaaatagtctggtact

SEQ ID NO: 469740 - DNA, 25 bp, Homo sapien
ccttttgcagattgaagcaaaatag

SEQ ID NO: 469741 - DNA, 25 bp, Homo sapien
aagcaaaatagtctggtactgataa

SEQ ID NO: 469742 - DNA, 25 bp, Homo sapien
caagtacaaaacgaatcagtgccct

SEQ ID NO: 469743 - DNA, 25 bp, Homo sapien
tataggactaatggctgtaaggtgg

SEQ ID NO: 469744 - DNA, 25 bp, Homo sapien
aaatgactagatgagcctgagtggc

SEQ ID NO: 469745 - DNA, 25 bp, Homo sapien
tggccaagcgaaagaaggaaagctc

SEQ ID NO: 469746 - DNA, 25 bp, Homo sapien
ggtaaagcggcctgcttgtaatgca

SEQ ID NO: 469747 - DNA, 25 bp, Homo sapien
aacaaaggaggtaaagcggcctgct

SEQ ID NO: 469748 - DNA, 25 bp, Homo sapien
ctgtgacaacgaacaaaggaggtaa

SEQ ID NO: 469749 - DNA, 25 bp, Homo sapien
caaaggaggtaaagcggcctgcttg

SEQ ID NO: 469750 - DNA, 25 bp, Homo sapien
ggtcagctcatccgatcgcgcgaac

SEQ ID NO: 469751 - DNA, 25 bp, Homo sapien
gatcgcgcgaacctccagtcgcagc

SEQ ID NO: 469752 - DNA, 25 bp, Homo sapien
gggcttggcgcctgtgtgcttccgg

SEQ ID NO: 469753 - DNA, 25 bp, Homo sapien
ttggcgcctgtgtgcttccggtagt

SEQ ID NO: 469754 - DNA, 25 bp, Homo sapien
agcgcgagaagctgcggttgcacac

SEQ ID NO: 469755 - DNA, 25 bp, Homo sapien
tttaaccaacagtactgcacgagcg

SEQ ID NO: 469756 - DNA, 25 bp, Homo sapien
gatggtgcctaggtaaaaacgctgc

SEQ ID NO: 469757 - DNA, 25 bp, Homo sapien
tatgtgaaaacgacaccctaagtcc

SEQ ID NO: 469758 - DNA, 25 bp, Homo sapien
ttacccatgttgagacgtggctgcc

SEQ ID NO: 469759 - DNA, 25 bp, Homo sapien
gtggtgagatcttggcccacctcca

SEQ ID NO: 469760 - DNA, 25 bp, Homo sapien
ctcctgagttgaagcgattcttctg

SEQ ID NO: 469761 - DNA, 25 bp, Homo sapien
actagagacaaggtttcaccatgtt

SEQ ID NO: 469762 - DNA, 25 bp, Homo sapien
ttctgcctcagacccccgagtagct

SEQ ID NO: 469763 - DNA, 25 bp, Homo sapien
cagtaatctgctgtaaagctgcaat

SEQ ID NO: 469764 - DNA, 25 bp, Homo sapien
taaagctgcaatcccagtggtaaag

SEQ ID NO: 469765 - DNA, 25 bp, Homo sapien
gccagccaccacacagtaatctgct

SEQ ID NO: 469766 - DNA, 25 bp, Homo sapien
tcccagtggtaaagtactttgccat

SEQ ID NO: 469767 - DNA, 25 bp, Homo sapien
gattcactatgtgcaatagccccat

SEQ ID NO: 469768 - DNA, 25 bp, Homo sapien
tctgcacgacgccagtgtagacatg

SEQ ID NO: 469769 - DNA, 25 bp, Homo sapien
ggaaggaagatttcacgccagcatt

SEQ ID NO: 469770 - DNA, 25 bp, Homo sapien
tcctgattttggagcttagcatggc

SEQ ID NO: 469771 - DNA, 25 bp, Homo sapien
tgatggtgatgtgttcaacgacaga

SEQ ID NO: 469772 - DNA, 25 bp, Homo sapien
tttttgatggtgatgtgttcaacga

SEQ ID NO: 469773 - DNA, 25 bp, Homo sapien
tttgatggtgatgtgttcaacgaca

SEQ ID NO: 469774 - DNA, 25 bp, Homo sapien
gatggtgatgtgttcaacgacagaa

SEQ ID NO: 469775 - DNA, 25 bp, Homo sapien
tgctcaatctctttatttagtggca

SEQ ID NO: 469776 - DNA, 25 bp, Homo sapien
tcttgcttatagaaattggatctta

SEQ ID NO: 469777 - DNA, 25 bp, Homo sapien
agtctgatcttgcttatagaaattg

SEQ ID NO: 469778 - DNA, 25 bp, Homo sapien
caatctctttatttagtggcacaca

SEQ ID NO: 469779 - DNA, 25 bp, Homo sapien
ccaagacactgtctcggagtcgcat

SEQ ID NO: 469780 - DNA, 25 bp, Homo sapien
tcatgcccctcgatgtgggaagcca

SEQ ID NO: 469781 - DNA, 25 bp, Homo sapien
ggccaagacactgtctcggagtcgc

SEQ ID NO: 469782 - DNA, 25 bp, Homo sapien
ctgagaggcaagtcatgcccctcga

SEQ ID NO: 469783 - DNA, 25 bp, Homo sapien
gatggcaggcctattaggtccagag

SEQ ID NO: 469784 - DNA, 25 bp, Homo sapien
tacagtgtgtgagcctaataaatgg

SEQ ID NO: 469785 - DNA, 25 bp, Homo sapien
tattgttcctgaggacagaccaaaa

SEQ ID NO: 469786 - DNA, 25 bp, Homo sapien
tttgaaggacatagagatttgcagc

SEQ ID NO: 469787 - DNA, 25 bp, Homo sapien
ctcccaatgtatatgctgctgctga

SEQ ID NO: 469788 - DNA, 25 bp, Homo sapien
tcccaatgtatatgctgctgctgaa

SEQ ID NO: 469789 - DNA, 25 bp, Homo sapien
cccaatgtatatgctgctgctgaag

SEQ ID NO: 469790 - DNA, 25 bp, Homo sapien
ttggctacaatactgtcactgcatg

SEQ ID NO: 469791 - DNA, 25 bp, Homo sapien
gcaataattactcctggataaacct

SEQ ID NO: 469792 - DNA, 25 bp, Homo sapien
acaatactgtcactgcatgaagctc

SEQ ID NO: 469793 - DNA, 25 bp, Homo sapien
caattagcaataattactcctggat

SEQ ID NO: 469794 - DNA, 25 bp, Homo sapien
ccaggacaggacaaggtagtgatca

SEQ ID NO: 469795 - DNA, 25 bp, Homo sapien
gacttacacagtctcccaggacagg

SEQ ID NO: 469796 - DNA, 25 bp, Homo sapien
gaaacagtgggcaaacctgagagca

SEQ ID NO: 469797 - DNA, 25 bp, Homo sapien
tgtaacctggcccaaactactcaga

SEQ ID NO: 469798 - DNA, 25 bp, Homo sapien
tttttcactactatggctacaagaa

SEQ ID NO: 469799 - DNA, 25 bp, Homo sapien
tagattggccaaagtttttcactac

SEQ ID NO: 469800 - DNA, 25 bp, Homo sapien
tggctacaagaatggaccctagcat

SEQ ID NO: 469801 - DNA, 25 bp, Homo sapien
ctccaccaggtgaacatactcctta

SEQ ID NO: 469802 - DNA, 25 bp, Homo sapien
gaagtcctcacataagacattgtgt

SEQ ID NO: 469803 - DNA, 25 bp, Homo sapien
tatcataaagtggatgaagaaagac

SEQ ID NO: 469804 - DNA, 25 bp, Homo sapien
tggagacttaggtggccccgagaag

SEQ ID NO: 469805 - DNA, 25 bp, Homo sapien
cataaagtggatgaagaaagactgc

SEQ ID NO: 469806 - DNA, 25 bp, Homo sapien
cctggtgaagggcttgacctgactg

SEQ ID NO: 469807 - DNA, 25 bp, Homo sapien
tcccgcagcagtagacctggtgaag

SEQ ID NO: 469808 - DNA, 25 bp, Homo sapien
actgctggtaacaggaggactgctg

SEQ ID NO: 469809 - DNA, 25 bp, Homo sapien
agtcccgcagcagtagacctggtga

SEQ ID NO: 469810 - DNA, 25 bp, Homo sapien
cttcctggactttgagggtgaagag

SEQ ID NO: 469811 - DNA, 25 bp, Homo sapien
gagggtgaagagatatctatgaaac

SEQ ID NO: 469812 - DNA, 25 bp, Homo sapien
tcctggactttgagggtgaagagat

SEQ ID NO: 469813 - DNA, 25 bp, Homo sapien
gggcttcctactgactctgttcagg

SEQ ID NO: 469814 - DNA, 25 bp, Homo sapien
ggaagtcgatctgtcactgactggg

SEQ ID NO: 469815 - DNA, 25 bp, Homo sapien
caaggaagtcgatctgtcactgact

SEQ ID NO: 469816 - DNA, 25 bp, Homo sapien
gtcgatctgtcactgactgggaaca

SEQ ID NO: 469817 - DNA, 25 bp, Homo sapien
aacaaggaagtcgatctgtcactga

SEQ ID NO: 469818 - DNA, 25 bp, Homo sapien
tgttcattcactcctttggcacgcc

SEQ ID NO: 469819 - DNA, 25 bp, Homo sapien
gccagtgccagggtatcccattgtt

SEQ ID NO: 469820 - DNA, 25 bp, Homo sapien
gttattaaaacacccgccagtgcca

SEQ ID NO: 469821 - DNA, 25 bp, Homo sapien
tcgtggagacgagcgattgcctgcc

SEQ ID NO: 469822 - DNA, 25 bp, Homo sapien
agctgttcccagcttattcttcttg

SEQ ID NO: 469823 - DNA, 25 bp, Homo sapien
gagctgttcccagcttattcttctt

SEQ ID NO: 469824 - DNA, 25 bp, Homo sapien
gaactgggctccaaatgttgctttc

SEQ ID NO: 469825 - DNA, 25 bp, Homo sapien
ctcagaactgggctccaaatgttgc

SEQ ID NO: 469826 - DNA, 25 bp, Homo sapien
tagctgcaattgaagagtctgctgc

SEQ ID NO: 469827 - DNA, 25 bp, Homo sapien
caattgaatcttgctgtacagtgtc

SEQ ID NO: 469828 - DNA, 25 bp, Homo sapien
gcattttgcaattgagcccattata

SEQ ID NO: 469829 - DNA, 25 bp, Homo sapien
tacagtgtcctgcaacttcatagct

SEQ ID NO: 469830 - DNA, 25 bp, Homo sapien
cccaaaccatgagctagtccagggt

SEQ ID NO: 469831 - DNA, 25 bp, Homo sapien
cacccaaaccatgagctagtccagg

SEQ ID NO: 469832 - DNA, 25 bp, Homo sapien
caaaccatgagctagtccagggttt

SEQ ID NO: 469833 - DNA, 25 bp, Homo sapien
aaccatgagctagtccagggttttc

SEQ ID NO: 469834 - DNA, 25 bp, Homo sapien
gagcttctgctccggtgtttggcaa

SEQ ID NO: 469835 - DNA, 25 bp, Homo sapien
gcttctgctccggtgtttggcaatc

SEQ ID NO: 469836 - DNA, 25 bp, Homo sapien
ttgagcttctgctccggtgtttggc

SEQ ID NO: 469837 - DNA, 25 bp, Homo sapien
tgagcttctgctccggtgtttggca

SEQ ID NO: 469838 - DNA, 25 bp, Homo sapien
cgtgcggtctgcaagtacatgccac

SEQ ID NO: 469839 - DNA, 25 bp, Homo sapien
caatgaagctttcgtatttcgagtt

SEQ ID NO: 469840 - DNA, 25 bp, Homo sapien
gatgaatccatctcatactgaatca

SEQ ID NO: 469841 - DNA, 25 bp, Homo sapien
cacctgagcaagacgtcaatgaagc

SEQ ID NO: 469842 - DNA, 25 bp, Homo sapien
tcctctccatctatacaaactctac

SEQ ID NO: 469843 - DNA, 25 bp, Homo sapien
ctcctctccatctatacaaactcta

SEQ ID NO: 469844 - DNA, 25 bp, Homo sapien
tggccaaacgccatgattctttctg

SEQ ID NO: 469845 - DNA, 25 bp, Homo sapien
tgaaagaacgtctctcattttccca

SEQ ID NO: 469846 - DNA, 25 bp, Homo sapien
cattttcccattattggttcctgtt

SEQ ID NO: 469847 - DNA, 25 bp, Homo sapien
ttctttctgaaagaacgtctctcat

SEQ ID NO: 469848 - DNA, 25 bp, Homo sapien
tctcattcattatcagtaagggttt

SEQ ID NO: 469849 - DNA, 25 bp, Homo sapien
tcattcattatcagtaagggtttct

SEQ ID NO: 469850 - DNA, 25 bp, Homo sapien
cattcattatcagtaagggtttctt

SEQ ID NO: 469851 - DNA, 25 bp, Homo sapien
tcattatcagtaagggtttcttcat

SEQ ID NO: 469852 - DNA, 25 bp, Homo sapien
tgtgccttttttggcaatctttatc

SEQ ID NO: 469853 - DNA, 25 bp, Homo sapien
catgtcatattcaaagtttctgtct

SEQ ID NO: 469854 - DNA, 25 bp, Homo sapien
tgccttttttggcaatctttatcat

SEQ ID NO: 469855 - DNA, 25 bp, Homo sapien
ctttgtgccttttttggcaatcttt

SEQ ID NO: 469856 - DNA, 25 bp, Homo sapien
tctgcagctttatggcccttcttgg

SEQ ID NO: 469857 - DNA, 25 bp, Homo sapien
cctgctggccttcattcagactttc

SEQ ID NO: 469858 - DNA, 25 bp, Homo sapien
ttatggcccttcttggttcggctga

SEQ ID NO: 469859 - DNA, 25 bp, Homo sapien
tggccttcattcagactttccctga

SEQ ID NO: 469860 - DNA, 25 bp, Homo sapien
atgtttctaaggtgcattgaggtcc

SEQ ID NO: 469861 - DNA, 25 bp, Homo sapien
aggtccttgatggaaggcgctccat

SEQ ID NO: 469862 - DNA, 25 bp, Homo sapien
gatgtttctaaggtgcattgaggtc

SEQ ID NO: 469863 - DNA, 25 bp, Homo sapien
gaggtccttgatggaaggcgctcca

SEQ ID NO: 469864 - DNA, 25 bp, Homo sapien
ctttaactgtaaaattgtggccatg

SEQ ID NO: 469865 - DNA, 25 bp, Homo sapien
tatttacctccattacagaagggct

SEQ ID NO: 469866 - DNA, 25 bp, Homo sapien
tggccatggatatttacctccatta

SEQ ID NO: 469867 - DNA, 25 bp, Homo sapien
actgtaaaattgtggccatggatat

SEQ ID NO: 469868 - DNA, 25 bp, Homo sapien
tatgaaggcgtaacccaaactcatc

SEQ ID NO: 469869 - DNA, 25 bp, Homo sapien
tccttctatgaaggcgtaacccaaa

SEQ ID NO: 469870 - DNA, 25 bp, Homo sapien
tgcctccttctatgaaggcgtaacc

SEQ ID NO: 469871 - DNA, 25 bp, Homo sapien
tcagtgcctccttctatgaaggcgt

SEQ ID NO: 469872 - DNA, 25 bp, Homo sapien
taagcctgggatcacccgatcacaa

SEQ ID NO: 469873 - DNA, 25 bp, Homo sapien
catcctggagtctgttgcaagtggg

SEQ ID NO: 469874 - DNA, 25 bp, Homo sapien
aagtgggccacttggtgacaagcaa

SEQ ID NO: 469875 - DNA, 25 bp, Homo sapien
gaagagctttctcgcacagtccacc

SEQ ID NO: 469876 - DNA, 25 bp, Homo sapien
caaagaccgcctactattatagtag

SEQ ID NO: 469877 - DNA, 25 bp, Homo sapien
tatagtagttaccaaacaaactaca

SEQ ID NO: 469878 - DNA, 25 bp, Homo sapien
cacaaaaggactaatgaaagctcta

SEQ ID NO: 469879 - DNA, 25 bp, Homo sapien
ccacaaaaatagattgaataaggat

SEQ ID NO: 469880 - DNA, 25 bp, Homo sapien
taggtggatgcctttaagatacaac

SEQ ID NO: 469881 - DNA, 25 bp, Homo sapien
ggtgtcgaaaaaataggtggatgcc

SEQ ID NO: 469882 - DNA, 25 bp, Homo sapien
tttgcttccactcgaaaaagaatgg

SEQ ID NO: 469883 - DNA, 25 bp, Homo sapien
tgaccaacggccctgaactttccac

SEQ ID NO: 469884 - DNA, 25 bp, Homo sapien
tagttggtcaatgcaagtacacaac

SEQ ID NO: 469885 - DNA, 25 bp, Homo sapien
ttggtcaatgcaagtacacaacatt

SEQ ID NO: 469886 - DNA, 25 bp, Homo sapien
gtagcctagttggtcaatgcaagta

SEQ ID NO: 469887 - DNA, 25 bp, Homo sapien
gcctagttggtcaatgcaagtacac

SEQ ID NO: 469888 - DNA, 25 bp, Homo sapien
ctgttgttgtttttatgcaagctag

SEQ ID NO: 469889 - DNA, 25 bp, Homo sapien
agtgaattcactatgggatcaagag

SEQ ID NO: 469890 - DNA, 25 bp, Homo sapien
tcctagtgaattcactatgggatca

SEQ ID NO: 469891 - DNA, 25 bp, Homo sapien
agctagcccttgtgcctggatttca

SEQ ID NO: 469892 - DNA, 25 bp, Homo sapien
catagtgtaaactggtattactcat

SEQ ID NO: 469893 - DNA, 25 bp, Homo sapien
tgttccagacactccgtagctgctg

SEQ ID NO: 469894 - DNA, 25 bp, Homo sapien
tagctgctgaacacgaagacggcac

SEQ ID NO: 469895 - DNA, 25 bp, Homo sapien
gatgggtctctagtgtttgtcaaga

SEQ ID NO: 469896 - DNA, 25 bp, Homo sapien
gcactccactgggatgacctttgat

SEQ ID NO: 469897 - DNA, 25 bp, Homo sapien
tcagggggcaccaaatgaggatact

SEQ ID NO: 469898 - DNA, 25 bp, Homo sapien
agctgtaaatatggcaatatgggtg

SEQ ID NO: 469899 - DNA, 25 bp, Homo sapien
cattctcttctgtttagcctggccc

SEQ ID NO: 469900 - DNA, 25 bp, Homo sapien
cagtgcatagtgtttaagctgtaaa

SEQ ID NO: 469901 - DNA, 25 bp, Homo sapien
taacattcattaagagacccataaa

SEQ ID NO: 469902 - DNA, 25 bp, Homo sapien
tcagcaacaccttgataacagtcca

SEQ ID NO: 469903 - DNA, 25 bp, Homo sapien
ccttgataacagtccattaagtgag

SEQ ID NO: 469904 - DNA, 25 bp, Homo sapien
taacagtccattaagtgagatctgc

SEQ ID NO: 469905 - DNA, 25 bp, Homo sapien
gtgagatctgctgatagtaagcccc

SEQ ID NO: 469906 - DNA, 25 bp, Homo sapien
tcattcagtatcattgcttgctcct

SEQ ID NO: 469907 - DNA, 25 bp, Homo sapien
ctctttgctcagtaacctcaccact

SEQ ID NO: 469908 - DNA, 25 bp, Homo sapien
acacatcattcagtatcattgcttg

SEQ ID NO: 469909 - DNA, 25 bp, Homo sapien
tttgctcagtaacctcaccactcat

SEQ ID NO: 469910 - DNA, 25 bp, Homo sapien
aagtgagccagttcttgggaaccca

SEQ ID NO: 469911 - DNA, 25 bp, Homo sapien
agtgagccagttcttgggaacccag

SEQ ID NO: 469912 - DNA, 25 bp, Homo sapien
caaagtgagccagttcttgggaacc

SEQ ID NO: 469913 - DNA, 25 bp, Homo sapien
cacaaagtgagccagttcttgggaa

SEQ ID NO: 469914 - DNA, 25 bp, Homo sapien
tatgctgtgccctcgatggtttgga

SEQ ID NO: 469915 - DNA, 25 bp, Homo sapien
cactggtgggcagtatctgctgggc

SEQ ID NO: 469916 - DNA, 25 bp, Homo sapien
gacatcaagtgtgcttatgctgtgc

SEQ ID NO: 469917 - DNA, 25 bp, Homo sapien
tggataactctgacatcaagtgtgc

SEQ ID NO: 469918 - DNA, 25 bp, Homo sapien
tggctgaggacggcccatgctccat

SEQ ID NO: 469919 - DNA, 25 bp, Homo sapien
tcatggcagtaaggcacagttgagg

SEQ ID NO: 469920 - DNA, 25 bp, Homo sapien
gcctggaaatatagtccccagtttg

SEQ ID NO: 469921 - DNA, 25 bp, Homo sapien
ggatgccacgtcttgtggcctcagt

SEQ ID NO: 469922 - DNA, 25 bp, Homo sapien
ctagtgagttcttcggaagcctgga

SEQ ID NO: 469923 - DNA, 25 bp, Homo sapien
catcagaaactcaagtttgcaagaa

SEQ ID NO: 469924 - DNA, 25 bp, Homo sapien
tgtttatttgaagggcagacaggag

SEQ ID NO: 469925 - DNA, 25 bp, Homo sapien
aatgtttatttgaagggcagacagg

SEQ ID NO: 469926 - DNA, 25 bp, Homo sapien
agtttgcaagaaatccctttgggag

SEQ ID NO: 469927 - DNA, 25 bp, Homo sapien
gggggtgggagatgtcttcagcagc

SEQ ID NO: 469928 - DNA, 25 bp, Homo sapien
ggggtgggagatgtcttcagcagcc

SEQ ID NO: 469929 - DNA, 25 bp, Homo sapien
gggtgggagatgtcttcagcagcca

SEQ ID NO: 469930 - DNA, 25 bp, Homo sapien
cttgaagagcactctcagaatggtt

SEQ ID NO: 469931 - DNA, 25 bp, Homo sapien
gaaaggcacatgttgagattcgatc

SEQ ID NO: 469932 - DNA, 25 bp, Homo sapien
gagattcgatcaaagggttttgcca

SEQ ID NO: 469933 - DNA, 25 bp, Homo sapien
ttataacttgaagagcactctcaga

SEQ ID NO: 469934 - DNA, 25 bp, Homo sapien
gaccaagtggtacgttctaatcagg

SEQ ID NO: 469935 - DNA, 25 bp, Homo sapien
gatggcaaccgctcttcaacaggtg

SEQ ID NO: 469936 - DNA, 25 bp, Homo sapien
ttatactgagaacccctgtcacgtg

SEQ ID NO: 469937 - DNA, 25 bp, Homo sapien
tggatgtcctctcaagttactctgg

SEQ ID NO: 469938 - DNA, 25 bp, Homo sapien
gccatagcacaattaacaaaatcgt

SEQ ID NO: 469939 - DNA, 25 bp, Homo sapien
aattggcctggctatactagaaagc

SEQ ID NO: 469940 - DNA, 25 bp, Homo sapien
taccagttgtgccactaatgttctt

SEQ ID NO: 469941 - DNA, 25 bp, Homo sapien
caaaatcgtgaaattaaccttgaca

SEQ ID NO: 469942 - DNA, 25 bp, Homo sapien
caaggaggacggcttatgccgtgaa

SEQ ID NO: 469943 - DNA, 25 bp, Homo sapien
gtccttccgtgggaattctctcaat

SEQ ID NO: 469944 - DNA, 25 bp, Homo sapien
ggcttatgccgtgaacactactgag

SEQ ID NO: 469945 - DNA, 25 bp, Homo sapien
gcatgaagcaaggaggacggcttat

SEQ ID NO: 469946 - DNA, 25 bp, Homo sapien
tcagttataatccattgcccatggg

SEQ ID NO: 469947 - DNA, 25 bp, Homo sapien
gaattgtgctctatccagagcttcc

SEQ ID NO: 469948 - DNA, 25 bp, Homo sapien
tctattgactggactgagaaacagg

SEQ ID NO: 469949 - DNA, 25 bp, Homo sapien
aaacaacaaaggcatccaattgctg

SEQ ID NO: 469950 - DNA, 25 bp, Homo sapien
aattgggctaattcatgataaataa

SEQ ID NO: 469951 - DNA, 25 bp, Homo sapien
aaaactgaattgggctaattcatga

SEQ ID NO: 469952 - DNA, 25 bp, Homo sapien
ctgaattgggctaattcatgataaa

SEQ ID NO: 469953 - DNA, 25 bp, Homo sapien
catgataaataatctctggggtatt

SEQ ID NO: 469954 - DNA, 25 bp, Homo sapien
tggatatagagctccagtgagagtt

SEQ ID NO: 469955 - DNA, 25 bp, Homo sapien
taatagtcttattgataaagtaact

SEQ ID NO: 469956 - DNA, 25 bp, Homo sapien
agtaattctgattttcataagcaca

SEQ ID NO: 469957 - DNA, 25 bp, Homo sapien
gcacatatgaatattcagttatttg

SEQ ID NO: 469958 - DNA, 25 bp, Homo sapien
gaaccatggtaggtactaaggacac

SEQ ID NO: 469959 - DNA, 25 bp, Homo sapien
cattaggtgcgaagaaccatggtag

SEQ ID NO: 469960 - DNA, 25 bp, Homo sapien
ggtaggtactaaggacacaaagatg

SEQ ID NO: 469961 - DNA, 25 bp, Homo sapien
tgaaattccattaggtgcgaagaac

SEQ ID NO: 469962 - DNA, 25 bp, Homo sapien
cttgcaaataccaagaaataattca

SEQ ID NO: 469963 - DNA, 25 bp, Homo sapien
tgcaaataccaagaaataattcagt

SEQ ID NO: 469964 - DNA, 25 bp, Homo sapien
gcaaataccaagaaataattcagtc

SEQ ID NO: 469965 - DNA, 25 bp, Homo sapien
aaataccaagaaataattcagtcat

SEQ ID NO: 469966 - DNA, 25 bp, Homo sapien
actcccatatctgttttaaactccg

SEQ ID NO: 469967 - DNA, 25 bp, Homo sapien
tctaaagatcccttttccgtagagc

SEQ ID NO: 469968 - DNA, 25 bp, Homo sapien
tcttccttgggttttgcatcggtaa

SEQ ID NO: 469969 - DNA, 25 bp, Homo sapien
tccttgttaggatcgatgcacattt

SEQ ID NO: 469970 - DNA, 25 bp, Homo sapien
ttgagattcctgacaactttgacca

SEQ ID NO: 469971 - DNA, 25 bp, Homo sapien
gactacattgacagccttgaactcc

SEQ ID NO: 469972 - DNA, 25 bp, Homo sapien
tgtctgggatcttgttccctcttct

SEQ ID NO: 469973 - DNA, 25 bp, Homo sapien
ctgacaactttgaccagcttctctg

SEQ ID NO: 469974 - DNA, 25 bp, Homo sapien
ctggcagcagaagaagtaacgggca

SEQ ID NO: 469975 - DNA, 25 bp, Homo sapien
aatccgatgccacaggagagaacac

SEQ ID NO: 469976 - DNA, 25 bp, Homo sapien
catttctgcatcgaatccgatgcca

SEQ ID NO: 469977 - DNA, 25 bp, Homo sapien
ggcactggaattcaaggcttccatg

SEQ ID NO: 469978 - DNA, 25 bp, Homo sapien
aggaataggagctgatgagtacaca

SEQ ID NO: 469979 - DNA, 25 bp, Homo sapien
ctgttaaaagaactttggttgagct

SEQ ID NO: 469980 - DNA, 25 bp, Homo sapien
gaggaataggagctgatgagtacac

SEQ ID NO: 469981 - DNA, 25 bp, Homo sapien
aactttggttgagctggaggaatag

SEQ ID NO: 469982 - DNA, 25 bp, Homo sapien
tggagattatagaacattgtacagt

SEQ ID NO: 469983 - DNA, 25 bp, Homo sapien
actctaaataacttgtgtccatcag

SEQ ID NO: 469984 - DNA, 25 bp, Homo sapien
tgtggagaatacattactgttcagt

SEQ ID NO: 469985 - DNA, 25 bp, Homo sapien
caaagctgcatgcacctgtgtatgt

SEQ ID NO: 469986 - DNA, 25 bp, Homo sapien
ctgcgatggcaggggctgtcacaga

SEQ ID NO: 469987 - DNA, 25 bp, Homo sapien
tgcgatggcaggggctgtcacagat

SEQ ID NO: 469988 - DNA, 25 bp, Homo sapien
cgatggcaggggctgtcacagatct

SEQ ID NO: 469989 - DNA, 25 bp, Homo sapien
gatggcaggggctgtcacagatctt

SEQ ID NO: 469990 - DNA, 25 bp, Homo sapien
tgaatgctagaacggacatcatccc

SEQ ID NO: 469991 - DNA, 25 bp, Homo sapien
tgcgagggacgttgcacctggttcc

SEQ ID NO: 469992 - DNA, 25 bp, Homo sapien
catactccttttgggtgtggcatca

SEQ ID NO: 469993 - DNA, 25 bp, Homo sapien
gcacgtcttgtgatctgcgagggac

SEQ ID NO: 469994 - DNA, 25 bp, Homo sapien
tgcgaggggttgtaagcaggtcaga

SEQ ID NO: 469995 - DNA, 25 bp, Homo sapien
ctgtgcgaggggttgtaagcaggtc

SEQ ID NO: 469996 - DNA, 25 bp, Homo sapien
ggggttgtaagcaggtcagagaggg

SEQ ID NO: 469997 - DNA, 25 bp, Homo sapien
cgaggggttgtaagcaggtcagaga

SEQ ID NO: 469998 - DNA, 25 bp, Homo sapien
taggagcatctaagttgagaacagc

SEQ ID NO: 469999 - DNA, 25 bp, Homo sapien
gagaacagctattctagagagtgtc

SEQ ID NO: 470000 - DNA, 25 bp, Homo sapien
ttctaatgttaaggccttggatctg

SEQ ID NO: 470001 - DNA, 25 bp, Homo sapien
ctagagagtgtcttaaagttctttc

SEQ ID NO: 470002 - DNA, 25 bp, Homo sapien
acaggaagggcatctctgtgatcaa

SEQ ID NO: 470003 - DNA, 25 bp, Homo sapien
tgatcaatggtataacacttcccca

SEQ ID NO: 470004 - DNA, 25 bp, Homo sapien
ctgtgatcaatggtataacacttcc

SEQ ID NO: 470005 - DNA, 25 bp, Homo sapien
gagtaacaggaagggcatctctgtg

SEQ ID NO: 470006 - DNA, 25 bp, Homo sapien
gcatttctcgatctcctctaagcat

SEQ ID NO: 470007 - DNA, 25 bp, Homo sapien
gacctgagtcgctgaggtcctccag

SEQ ID NO: 470008 - DNA, 25 bp, Homo sapien
tccagatcacctgcggcgttgttgt

SEQ ID NO: 470009 - DNA, 25 bp, Homo sapien
tgcggccctccttggactggacctg

SEQ ID NO: 470010 - DNA, 25 bp, Homo sapien
cagaagggtaagatgggcccaaacg

SEQ ID NO: 470011 - DNA, 25 bp, Homo sapien
tcaaatagaggttagccaagctgac

SEQ ID NO: 470012 - DNA, 25 bp, Homo sapien
actcgttggaacagaagggtaagat

SEQ ID NO: 470013 - DNA, 25 bp, Homo sapien
ccaagctgacaagatttctcgggga

SEQ ID NO: 470014 - DNA, 25 bp, Homo sapien
gtagaacagtggtactctcagatag

SEQ ID NO: 470015 - DNA, 25 bp, Homo sapien
gaatatgcacataatctcccaccca

SEQ ID NO: 470016 - DNA, 25 bp, Homo sapien
gaaaaccactggctaatagcatgaa

SEQ ID NO: 470017 - DNA, 25 bp, Homo sapien
aattggcacaagcactttgaagagc

SEQ ID NO: 470018 - DNA, 25 bp, Homo sapien
catgggctgtaaaaagctcctggaa

SEQ ID NO: 470019 - DNA, 25 bp, Homo sapien
gatgtcccttttcgaaggccagtca

SEQ ID NO: 470020 - DNA, 25 bp, Homo sapien
tatgtagtctaaatgaccagctcgg

SEQ ID NO: 470021 - DNA, 25 bp, Homo sapien
gaccagctcggtctacagatgtccc

SEQ ID NO: 470022 - DNA, 25 bp, Homo sapien
gcatgctcccatagttaaagcagag

SEQ ID NO: 470023 - DNA, 25 bp, Homo sapien
gattattactattgtgtgacctgga

SEQ ID NO: 470024 - DNA, 25 bp, Homo sapien
actttccagtcgactgcagcgcggg

SEQ ID NO: 470025 - DNA, 25 bp, Homo sapien
tgtaacccatgtgaaatacttcgtg

SEQ ID NO: 470026 - DNA, 25 bp, Homo sapien
catgggtgccccttcagccaaggta

SEQ ID NO: 470027 - DNA, 25 bp, Homo sapien
ctctgagctatggtagtggcagtgt

SEQ ID NO: 470028 - DNA, 25 bp, Homo sapien
tatcggtggcaaatctgtatgggtc

SEQ ID NO: 470029 - DNA, 25 bp, Homo sapien
gaaaatgcctactcttacctccgat

SEQ ID NO: 470030 - DNA, 25 bp, Homo sapien
gagagtaaatcatggcgccccacat

SEQ ID NO: 470031 - DNA, 25 bp, Homo sapien
gacttggccatgattgctatcggtg

SEQ ID NO: 470032 - DNA, 25 bp, Homo sapien
tcttcattgatcttactcgaagttg

SEQ ID NO: 470033 - DNA, 25 bp, Homo sapien
cgaagttgagaacatgtattttgac

SEQ ID NO: 470034 - DNA, 25 bp, Homo sapien
gagaacatgtattttgactctgaga

SEQ ID NO: 470035 - DNA, 25 bp, Homo sapien
gatcttactcgaagttgagaacatg

SEQ ID NO: 470036 - DNA, 25 bp, Homo sapien
agtcagaagactgggcatattcatc

SEQ ID NO: 470037 - DNA, 25 bp, Homo sapien
caacaacactcctcaagtcagaaga

SEQ ID NO: 470038 - DNA, 25 bp, Homo sapien
gaagactgggcatattcatcttttt

SEQ ID NO: 470039 - DNA, 25 bp, Homo sapien
caagtcagaagactgggcatattca

SEQ ID NO: 470040 - DNA, 25 bp, Homo sapien
tctgttcctaatacttccttctgtc

SEQ ID NO: 470041 - DNA, 25 bp, Homo sapien
ctatctgttcctaatacttccttct

SEQ ID NO: 470042 - DNA, 25 bp, Homo sapien
tgttcctaatacttccttctgtctt

SEQ ID NO: 470043 - DNA, 25 bp, Homo sapien
tatctgttcctaatacttccttctg

SEQ ID NO: 470044 - DNA, 25 bp, Homo sapien
aaagcacttgggtgttgactggctg

SEQ ID NO: 470045 - DNA, 25 bp, Homo sapien
tgtaatagggcccagacacatgccc

SEQ ID NO: 470046 - DNA, 25 bp, Homo sapien
gaaaaggcttgatggacttgcccta

SEQ ID NO: 470047 - DNA, 25 bp, Homo sapien
tctatagggccataaaacatgtcct

SEQ ID NO: 470048 - DNA, 25 bp, Homo sapien
agcagcctcggggacatagcaagga

SEQ ID NO: 470049 - DNA, 25 bp, Homo sapien
ctggcaggtgccaagccataagctt

SEQ ID NO: 470050 - DNA, 25 bp, Homo sapien
ctcggggacatagcaaggagacatt

SEQ ID NO: 470051 - DNA, 25 bp, Homo sapien
tggcaggtgccaagccataagcttc

SEQ ID NO: 470052 - DNA, 25 bp, Homo sapien
tgtgaaaaatctgaacatcggtgat

SEQ ID NO: 470053 - DNA, 25 bp, Homo sapien
tgatatttgcagactggtgagctgc

SEQ ID NO: 470054 - DNA, 25 bp, Homo sapien
tatcccgtaagtccttcttctggtg

SEQ ID NO: 470055 - DNA, 25 bp, Homo sapien
taagtccttcttctggtggtaacat

SEQ ID NO: 470056 - DNA, 25 bp, Homo sapien
ggtggcctaaatcagcctgggaagt

SEQ ID NO: 470057 - DNA, 25 bp, Homo sapien
cattaagggtgccatgggtggccta

SEQ ID NO: 470058 - DNA, 25 bp, Homo sapien
gcagagcatgaaggcacactaatgt

SEQ ID NO: 470059 - DNA, 25 bp, Homo sapien
gaagacttgagagggcgcagacaat

SEQ ID NO: 470060 - DNA, 25 bp, Homo sapien
aacgtgatatttgtgcttgttagca

SEQ ID NO: 470061 - DNA, 25 bp, Homo sapien
ttgctatgcaaggcatttcgggcca

SEQ ID NO: 470062 - DNA, 25 bp, Homo sapien
atctcctggaaagtgaacgtgatat

SEQ ID NO: 470063 - DNA, 25 bp, Homo sapien
aagacccttgtataaatatcattgc

SEQ ID NO: 470064 - DNA, 25 bp, Homo sapien
gattttggttcgctttatcactgac

SEQ ID NO: 470065 - DNA, 25 bp, Homo sapien
tcagttgggaggctaagcgtaccgc

SEQ ID NO: 470066 - DNA, 25 bp, Homo sapien
ctgactcgaacccatttccaaatga

SEQ ID NO: 470067 - DNA, 25 bp, Homo sapien
tattcaggggaactagagggagcca

SEQ ID NO: 470068 - DNA, 25 bp, Homo sapien
tctatgtgggacacattgcatcaca

SEQ ID NO: 470069 - DNA, 25 bp, Homo sapien
tgtgttctagttttcccatggcaga

SEQ ID NO: 470070 - DNA, 25 bp, Homo sapien
ggctctttcctatcaacgtgtctgt

SEQ ID NO: 470071 - DNA, 25 bp, Homo sapien
ggcactggtgcctatattcaaggct

SEQ ID NO: 470072 - DNA, 25 bp, Homo sapien
gattcttcaggtgccttctgaacaa

SEQ ID NO: 470073 - DNA, 25 bp, Homo sapien
gtgaggattcttcaggtgccttctg

SEQ ID NO: 470074 - DNA, 25 bp, Homo sapien
ttcaggtgccttctgaacaaagggc

SEQ ID NO: 470075 - DNA, 25 bp, Homo sapien
ctgtgaggattcttcaggtgccttc

SEQ ID NO: 470076 - DNA, 25 bp, Homo sapien
ggtcagggagttaatatatagtgga

SEQ ID NO: 470077 - DNA, 25 bp, Homo sapien
gaagctctacatgtaaatattggtg

SEQ ID NO: 470078 - DNA, 25 bp, Homo sapien
cagacataaaaagacgaatattgta

SEQ ID NO: 470079 - DNA, 25 bp, Homo sapien
tctgttaggatgatgaagaagctct

SEQ ID NO: 470080 - DNA, 25 bp, Homo sapien
aataaacctgaacttgcactgatga

SEQ ID NO: 470081 - DNA, 25 bp, Homo sapien
aaacctgaacttgcactgatgatgt

SEQ ID NO: 470082 - DNA, 25 bp, Homo sapien
taaacctgaacttgcactgatgatg

SEQ ID NO: 470083 - DNA, 25 bp, Homo sapien
ataaacctgaacttgcactgatgat

SEQ ID NO: 470084 - DNA, 25 bp, Homo sapien
tacatccctcagcatgcatagattc

SEQ ID NO: 470085 - DNA, 25 bp, Homo sapien
tccctcagcatgcatagattctatc

SEQ ID NO: 470086 - DNA, 25 bp, Homo sapien
gcatagattctatctgaatttctcc

SEQ ID NO: 470087 - DNA, 25 bp, Homo sapien
tcagcatgcatagattctatctgaa

SEQ ID NO: 470088 - DNA, 25 bp, Homo sapien
cagagcttatgtgagctttccagtc

SEQ ID NO: 470089 - DNA, 25 bp, Homo sapien
tcgtgggttgccacggcagagctta

SEQ ID NO: 470090 - DNA, 25 bp, Homo sapien
catcgacgtgtttcatctaattggg

SEQ ID NO: 470091 - DNA, 25 bp, Homo sapien
gctttccagtcgtgcttcctcatca

SEQ ID NO: 470092 - DNA, 25 bp, Homo sapien
tcttgtaaaaggtcaacgtgagtga

SEQ ID NO: 470093 - DNA, 25 bp, Homo sapien
ctcttgtaaaaggtcaacgtgagtg

SEQ ID NO: 470094 - DNA, 25 bp, Homo sapien
tctgtttgaggtatggaaaaatatt

SEQ ID NO: 470095 - DNA, 25 bp, Homo sapien
catttgggtctgtttgaggtatgga

SEQ ID NO: 470096 - DNA, 25 bp, Homo sapien
tttgaaagcagacttaacagcggta

SEQ ID NO: 470097 - DNA, 25 bp, Homo sapien
gcagacttaacagcggtatttaact

SEQ ID NO: 470098 - DNA, 25 bp, Homo sapien
tgtcatggccctcaattgtgtgcat

SEQ ID NO: 470099 - DNA, 25 bp, Homo sapien
ctggatccctgccatgtctttttgt

SEQ ID NO: 470100 - DNA, 25 bp, Homo sapien
gtctttttgtcatggccctcaattg

SEQ ID NO: 470101 - DNA, 25 bp, Homo sapien
ggatccctgccatgtctttttgtca

SEQ ID NO: 470102 - DNA, 25 bp, Homo sapien
gacaagctttaacgctttccataag

SEQ ID NO: 470103 - DNA, 25 bp, Homo sapien
aacgctttccataaggtcgtaatgc

SEQ ID NO: 470104 - DNA, 25 bp, Homo sapien
agctttaacgctttccataaggtcg

SEQ ID NO: 470105 - DNA, 25 bp, Homo sapien
taacgctttccataaggtcgtaatg

SEQ ID NO: 470106 - DNA, 25 bp, Homo sapien
gaaagctctcgtaagggtagtagct

SEQ ID NO: 470107 - DNA, 25 bp, Homo sapien
ctgaaagctctcgtaagggtagtag

SEQ ID NO: 470108 - DNA, 25 bp, Homo sapien
aagctctcgtaagggtagtagcttt

SEQ ID NO: 470109 - DNA, 25 bp, Homo sapien
tctcgtaagggtagtagcttttcca

SEQ ID NO: 470110 - DNA, 25 bp, Homo sapien
cctgcggctcagaaccatattaata

SEQ ID NO: 470111 - DNA, 25 bp, Homo sapien
ggaatagtttatcaacctgcggctc

SEQ ID NO: 470112 - DNA, 25 bp, Homo sapien
tagctgggtgcagtagaccggttcc

SEQ ID NO: 470113 - DNA, 25 bp, Homo sapien
tactggaaacctaacatgtgaaccc

SEQ ID NO: 470114 - DNA, 25 bp, Homo sapien
aaatgggccatagttgatgtcatcg

SEQ ID NO: 470115 - DNA, 25 bp, Homo sapien
tgatgtcatcgttaacctgcttgca

SEQ ID NO: 470116 - DNA, 25 bp, Homo sapien
gctgtctccaaagtttgataggaga

SEQ ID NO: 470117 - DNA, 25 bp, Homo sapien
ctttaggtttggtttggaagcatgc

SEQ ID NO: 470118 - DNA, 25 bp, Homo sapien
tcatggtctttttaagccatgcgtg

SEQ ID NO: 470119 - DNA, 25 bp, Homo sapien
tttttaagccatgcgtgttggcaaa

SEQ ID NO: 470120 - DNA, 25 bp, Homo sapien
taagccatgcgtgttggcaaataag

SEQ ID NO: 470121 - DNA, 25 bp, Homo sapien
tggtctttttaagccatgcgtgttg

SEQ ID NO: 470122 - DNA, 25 bp, Homo sapien
cacttactccctgccaaaatgttta

SEQ ID NO: 470123 - DNA, 25 bp, Homo sapien
gaagcttaatgaagacgttgctcct

SEQ ID NO: 470124 - DNA, 25 bp, Homo sapien
catcttacagatccttgcatgctca

SEQ ID NO: 470125 - DNA, 25 bp, Homo sapien
ctcacaccagtatgtggcacttact

SEQ ID NO: 470126 - DNA, 25 bp, Homo sapien
ctaggcataaatccaagcctctctg

SEQ ID NO: 470127 - DNA, 25 bp, Homo sapien
gtagtctttccatgacgtggcagtt

SEQ ID NO: 470128 - DNA, 25 bp, Homo sapien
gcataaatccaagcctctctgtgcc

SEQ ID NO: 470129 - DNA, 25 bp, Homo sapien
tcatccaggcctctgcatgcgtatc

SEQ ID NO: 470130 - DNA, 25 bp, Homo sapien
cccagacaaaaacgttacatgccaa

SEQ ID NO: 470131 - DNA, 25 bp, Homo sapien
ccagacaaaaacgttacatgccaaa

SEQ ID NO: 470132 - DNA, 25 bp, Homo sapien
gcccccagacaaaaacgttacatgc

SEQ ID NO: 470133 - DNA, 25 bp, Homo sapien
ccccagacaaaaacgttacatgcca

SEQ ID NO: 470134 - DNA, 25 bp, Homo sapien
agggacagagcatttccaaattacc

SEQ ID NO: 470135 - DNA, 25 bp, Homo sapien
aggagggacagagcatttccaaatt

SEQ ID NO: 470136 - DNA, 25 bp, Homo sapien
tcagaaatctaatgtagaacagtct

SEQ ID NO: 470137 - DNA, 25 bp, Homo sapien
gaacagtcttttgaggagggacaga

SEQ ID NO: 470138 - DNA, 25 bp, Homo sapien
gcagctgtttccaggtcatattcag

SEQ ID NO: 470139 - DNA, 25 bp, Homo sapien
cagctgtttccaggtcatattcagc

SEQ ID NO: 470140 - DNA, 25 bp, Homo sapien
ttccaggtcatattcagctgtttta

SEQ ID NO: 470141 - DNA, 25 bp, Homo sapien
aggtgatccttgtagctgcaaaaca

SEQ ID NO: 470142 - DNA, 25 bp, Homo sapien
tgggccgtgcttgaatgagacagtt

SEQ ID NO: 470143 - DNA, 25 bp, Homo sapien
gccgagaccaacaggtgatccttgt

SEQ ID NO: 470144 - DNA, 25 bp, Homo sapien
cccagtttggctggacgccgagacc

SEQ ID NO: 470145 - DNA, 25 bp, Homo sapien
aaattagccattacaggtggcgcat

SEQ ID NO: 470146 - DNA, 25 bp, Homo sapien
gctctttaacactgctctgcgtaca

SEQ ID NO: 470147 - DNA, 25 bp, Homo sapien
taagaggatgggaatttcaaggtct

SEQ ID NO: 470148 - DNA, 25 bp, Homo sapien
ggcctgtgtgtagccggatgataca

SEQ ID NO: 470149 - DNA, 25 bp, Homo sapien
taaatcaatccaactgcctgtcctg

SEQ ID NO: 470150 - DNA, 25 bp, Homo sapien
ttcacaaagatggtacgatttataa

SEQ ID NO: 470151 - DNA, 25 bp, Homo sapien
caaagatggtacgatttataaaagg

SEQ ID NO: 470152 - DNA, 25 bp, Homo sapien
aactgtgtccggtttgccagtcatt

SEQ ID NO: 470153 - DNA, 25 bp, Homo sapien
actgtgtccggtttgccagtcatta

SEQ ID NO: 470154 - DNA, 25 bp, Homo sapien
tgagagtactacagcatgatgccga

SEQ ID NO: 470155 - DNA, 25 bp, Homo sapien
ccaaatagcatgttgcgaggaatca

SEQ ID NO: 470156 - DNA, 25 bp, Homo sapien
ttgatgattgtattctctggtccac

SEQ ID NO: 470157 - DNA, 25 bp, Homo sapien
catgtttagtacattctgccaacca

SEQ ID NO: 470158 - DNA, 25 bp, Homo sapien
tgagttggaaattcatgctttgatg

SEQ ID NO: 470159 - DNA, 25 bp, Homo sapien
gacctatgtgcatcttttctaatac

SEQ ID NO: 470160 - DNA, 25 bp, Homo sapien
ctgtccttttacctggaccgcaggg

SEQ ID NO: 470161 - DNA, 25 bp, Homo sapien
ggaccgcagggttagatttcagccc

SEQ ID NO: 470162 - DNA, 25 bp, Homo sapien
tctgtgtatacgtgtttatcaaccg

SEQ ID NO: 470163 - DNA, 25 bp, Homo sapien
ttcttgatggaaacgtgttcagggt

SEQ ID NO: 470164 - DNA, 25 bp, Homo sapien
tgtgaagatgtacacaagaaatatg

SEQ ID NO: 470165 - DNA, 25 bp, Homo sapien
tgtggcccgcacagtaactcttgtg

SEQ ID NO: 470166 - DNA, 25 bp, Homo sapien
tggtctgaccaaacaaactccaatg

SEQ ID NO: 470167 - DNA, 25 bp, Homo sapien
cattctagttcgtggaaacctcacc

SEQ ID NO: 470168 - DNA, 25 bp, Homo sapien
cagccttcacagagactagccaatt

SEQ ID NO: 470169 - DNA, 25 bp, Homo sapien
gcccaaggaagtcataccattctag

SEQ ID NO: 470170 - DNA, 25 bp, Homo sapien
gcctctgtttccaggagaggtagga

SEQ ID NO: 470171 - DNA, 25 bp, Homo sapien
tctgtttccaggagaggtaggaaaa

SEQ ID NO: 470172 - DNA, 25 bp, Homo sapien
aagagagatttctctccacttcacc

SEQ ID NO: 470173 - DNA, 25 bp, Homo sapien
gaggtaggaaaagagagatttctct

SEQ ID NO: 470174 - DNA, 25 bp, Homo sapien
gtcacttgccccagaaaagacctaa

SEQ ID NO: 470175 - DNA, 25 bp, Homo sapien
tgagggagttgctgtcacttgcccc

SEQ ID NO: 470176 - DNA, 25 bp, Homo sapien
catactccagcgaagtgaacccagt

SEQ ID NO: 470177 - DNA, 25 bp, Homo sapien
ttgtcccgtacaccatctgccagat

SEQ ID NO: 470178 - DNA, 25 bp, Homo sapien
cctggaaagctgctgaagactgaag

SEQ ID NO: 470179 - DNA, 25 bp, Homo sapien
aacctggaaagctgctgaagactga

SEQ ID NO: 470180 - DNA, 25 bp, Homo sapien
tccctaccccacagacttttgtgaa

SEQ ID NO: 470181 - DNA, 25 bp, Homo sapien
ctccctaccccacagacttttgtga

SEQ ID NO: 470182 - DNA, 25 bp, Homo sapien
aaactatgtcccgtctgcttgctca

SEQ ID NO: 470183 - DNA, 25 bp, Homo sapien
tactgaagtctaaacgtctccttgc

SEQ ID NO: 470184 - DNA, 25 bp, Homo sapien
tctctcactaactcgggcagccttt

SEQ ID NO: 470185 - DNA, 25 bp, Homo sapien
gcctccaagtaggttcagccaatgg

SEQ ID NO: 470186 - DNA, 25 bp, Homo sapien
ccacctcctttccccaccctgtcat

SEQ ID NO: 470187 - DNA, 25 bp, Homo sapien
tccacctcctttccccaccctgtca

SEQ ID NO: 470188 - DNA, 25 bp, Homo sapien
gatggcatgacttttgtttacccca

SEQ ID NO: 470189 - DNA, 25 bp, Homo sapien
catgacttttgtttaccccatcttc

SEQ ID NO: 470190 - DNA, 25 bp, Homo sapien
gtgatggcatgacttttgtttaccc

SEQ ID NO: 470191 - DNA, 25 bp, Homo sapien
ggcatgacttttgtttaccccatct

SEQ ID NO: 470192 - DNA, 25 bp, Homo sapien
gcatccattccctgatgtcagacat

SEQ ID NO: 470193 - DNA, 25 bp, Homo sapien
cagcatccattccctgatgtcagac

SEQ ID NO: 470194 - DNA, 25 bp, Homo sapien
agcatccattccctgatgtcagaca

SEQ ID NO: 470195 - DNA, 25 bp, Homo sapien
gatacacttcatagtctggtccggc

SEQ ID NO: 470196 - DNA, 25 bp, Homo sapien
ttgtgttcagtctcccagtggccat

SEQ ID NO: 470197 - DNA, 25 bp, Homo sapien
gagagattattgtcctccaagtcac

SEQ ID NO: 470198 - DNA, 25 bp, Homo sapien
tcgttcttgctgctggtggccttag

SEQ ID NO: 470199 - DNA, 25 bp, Homo sapien
gacattgaaatcacatgatagtctc

SEQ ID NO: 470200 - DNA, 25 bp, Homo sapien
tcctagagatagctaacatttctga

SEQ ID NO: 470201 - DNA, 25 bp, Homo sapien
gctcgtacaatggtaataaactcag

SEQ ID NO: 470202 - DNA, 25 bp, Homo sapien
tttctgataatacattccttggcct

SEQ ID NO: 470203 - DNA, 25 bp, Homo sapien
tgctaaaccaaccctgggagttaca

SEQ ID NO: 470204 - DNA, 25 bp, Homo sapien
cactttcctgctaaaccaaccctgg

SEQ ID NO: 470205 - DNA, 25 bp, Homo sapien
gaaaccaccattatggctcccagtg

SEQ ID NO: 470206 - DNA, 25 bp, Homo sapien
tgctgaactacacgcatcactgtta

SEQ ID NO: 470207 - DNA, 25 bp, Homo sapien
gctcccagtgctgtcatttggcctt

SEQ ID NO: 470208 - DNA, 25 bp, Homo sapien
ttttagtctgacaagcctggtattc

SEQ ID NO: 470209 - DNA, 25 bp, Homo sapien
gaagaaatgtgcttctactgtcccc

SEQ ID NO: 470210 - DNA, 25 bp, Homo sapien
cagatgagccctaatcagagctggt

SEQ ID NO: 470211 - DNA, 25 bp, Homo sapien
cacaatttgggttatactggcaggg

SEQ ID NO: 470212 - DNA, 25 bp, Homo sapien
aactgtaatggtgattgctctgagg

SEQ ID NO: 470213 - DNA, 25 bp, Homo sapien
tgtagaagatgcagacatcccaatt

SEQ ID NO: 470214 - DNA, 25 bp, Homo sapien
tagaagatgcagacatcccaattcc

SEQ ID NO: 470215 - DNA, 25 bp, Homo sapien
agatgcagacatcccaattcctcat

SEQ ID NO: 470216 - DNA, 25 bp, Homo sapien
agtgtagaagatgcagacatcccaa

SEQ ID NO: 470217 - DNA, 25 bp, Homo sapien
cttcaaaataaccgctgacaccatt

SEQ ID NO: 470218 - DNA, 25 bp, Homo sapien
accgctgacaccatttactgctttg

SEQ ID NO: 470219 - DNA, 25 bp, Homo sapien
aaataaccgctgacaccatttactg

SEQ ID NO: 470220 - DNA, 25 bp, Homo sapien
taaccgctgacaccatttactgctt

SEQ ID NO: 470221 - DNA, 25 bp, Homo sapien
tatgaccaggagtatctgtagaatg

SEQ ID NO: 470222 - DNA, 25 bp, Homo sapien
ctgaaatacaggaatgatctgttta

SEQ ID NO: 470223 - DNA, 25 bp, Homo sapien
tgatctgtttatgaccaggagtatc

SEQ ID NO: 470224 - DNA, 25 bp, Homo sapien
tatctgtagaatgtctaacatagac

SEQ ID NO: 470225 - DNA, 25 bp, Homo sapien
gctgagatgttaagctcatcttcag

SEQ ID NO: 470226 - DNA, 25 bp, Homo sapien
catgggtgctgagatgttaagctca

SEQ ID NO: 470227 - DNA, 25 bp, Homo sapien
ggtgctgagatgttaagctcatctt

SEQ ID NO: 470228 - DNA, 25 bp, Homo sapien
gagatgttaagctcatcttcagtcc

SEQ ID NO: 470229 - DNA, 25 bp, Homo sapien
aatttaacattctttcaccatcagc

SEQ ID NO: 470230 - DNA, 25 bp, Homo sapien
ctttcaccatcagcaattttgcaaa

SEQ ID NO: 470231 - DNA, 25 bp, Homo sapien
aaatttaacattctttcaccatcag

SEQ ID NO: 470232 - DNA, 25 bp, Homo sapien
caccatcagcaattttgcaaaataa

SEQ ID NO: 470233 - DNA, 25 bp, Homo sapien
tttggctttgacagcatccttcttg

SEQ ID NO: 470234 - DNA, 25 bp, Homo sapien
ggctttgacagcatccttcttgtaa

SEQ ID NO: 470235 - DNA, 25 bp, Homo sapien
gctttgacagcatccttcttgtaac

SEQ ID NO: 470236 - DNA, 25 bp, Homo sapien
tggctttgacagcatccttcttgta

SEQ ID NO: 470237 - DNA, 25 bp, Homo sapien
gcttgtcggtaacacagcacatgct

SEQ ID NO: 470238 - DNA, 25 bp, Homo sapien
cttgcttgtcggtaacacagcacat

SEQ ID NO: 470239 - DNA, 25 bp, Homo sapien
tgcttgtcggtaacacagcacatgc

SEQ ID NO: 470240 - DNA, 25 bp, Homo sapien
ttgcttgtcggtaacacagcacatg

SEQ ID NO: 470241 - DNA, 25 bp, Homo sapien
tccttctgctctaaattatctatta

SEQ ID NO: 470242 - DNA, 25 bp, Homo sapien
cagtaatataccacagttccttctg

SEQ ID NO: 470243 - DNA, 25 bp, Homo sapien
tctgctctaaattatctattaagat

SEQ ID NO: 470244 - DNA, 25 bp, Homo sapien
agtaatataccacagttccttctgc

SEQ ID NO: 470245 - DNA, 25 bp, Homo sapien
agactccggagagtcgagggctggc

SEQ ID NO: 470246 - DNA, 25 bp, Homo sapien
ccggagagtcgagggctggccggct

SEQ ID NO: 470247 - DNA, 25 bp, Homo sapien
atggtggtaagccaagctggctgct

SEQ ID NO: 470248 - DNA, 25 bp, Homo sapien
cagtgacacattaggatttgagatc

SEQ ID NO: 470249 - DNA, 25 bp, Homo sapien
catagctaaattagcccagctcagg

SEQ ID NO: 470250 - DNA, 25 bp, Homo sapien
ttccacaatgtctctgttgggacct

SEQ ID NO: 470251 - DNA, 25 bp, Homo sapien
tgttgggaccttcaataaggtgttc

SEQ ID NO: 470252 - DNA, 25 bp, Homo sapien
cagggaggagctgttactgagattc

SEQ ID NO: 470253 - DNA, 25 bp, Homo sapien
gacatcaaacccacttgtaagtcca

SEQ ID NO: 470254 - DNA, 25 bp, Homo sapien
ctgacatcaaacccacttgtaagtc

SEQ ID NO: 470255 - DNA, 25 bp, Homo sapien
acatcaaacccacttgtaagtccat

SEQ ID NO: 470256 - DNA, 25 bp, Homo sapien
tgacatcaaacccacttgtaagtcc

SEQ ID NO: 470257 - DNA, 25 bp, Homo sapien
tgaaacccactagccagagttgctt

SEQ ID NO: 470258 - DNA, 25 bp, Homo sapien
tgtagcagtgccaaagtaccctgtg

SEQ ID NO: 470259 - DNA, 25 bp, Homo sapien
gtaccctgtgctttgaggatctcta

SEQ ID NO: 470260 - DNA, 25 bp, Homo sapien
tgcacagttctaggcttacacagct

SEQ ID NO: 470261 - DNA, 25 bp, Homo sapien
tgtcctgttgtggtgggctgtgagc

SEQ ID NO: 470262 - DNA, 25 bp, Homo sapien
tcctgttgtggtgggctgtgagctg

SEQ ID NO: 470263 - DNA, 25 bp, Homo sapien
catgtcctgttgtggtgggctgtga

SEQ ID NO: 470264 - DNA, 25 bp, Homo sapien
ctgttgtggtgggctgtgagctggc

SEQ ID NO: 470265 - DNA, 25 bp, Homo sapien
tcactgcatggaccacgcagaaggg

SEQ ID NO: 470266 - DNA, 25 bp, Homo sapien
gggatggatcgtaaacagccatgta

SEQ ID NO: 470267 - DNA, 25 bp, Homo sapien
tagatacaagcgcaagatctttggc

SEQ ID NO: 470268 - DNA, 25 bp, Homo sapien
gcttggcctacacatcctatcactg

SEQ ID NO: 470269 - DNA, 25 bp, Homo sapien
ggggcctgtttgccagcagtccttt

SEQ ID NO: 470270 - DNA, 25 bp, Homo sapien
ggcctgtttgccagcagtccttttg

SEQ ID NO: 470271 - DNA, 25 bp, Homo sapien
gtccttttggatgtgggataaatgg

SEQ ID NO: 470272 - DNA, 25 bp, Homo sapien
ccttttggatgtgggataaatggta

SEQ ID NO: 470273 - DNA, 25 bp, Homo sapien
gtagtgaaaggtccgtgctgacatc

SEQ ID NO: 470274 - DNA, 25 bp, Homo sapien
tgggtagtgaaaggtccgtgctgac

SEQ ID NO: 470275 - DNA, 25 bp, Homo sapien
gtgaaaggtccgtgctgacatcact

SEQ ID NO: 470276 - DNA, 25 bp, Homo sapien
ggatgggtagtgaaaggtccgtgct

SEQ ID NO: 470277 - DNA, 25 bp, Homo sapien
gccgcttgacaatgagaagctggaa

SEQ ID NO: 470278 - DNA, 25 bp, Homo sapien
cacatggagagtcgttagagccagg

SEQ ID NO: 470279 - DNA, 25 bp, Homo sapien
gggaaaatgaaaggccgcttgacaa

SEQ ID NO: 470280 - DNA, 25 bp, Homo sapien
gattgagagcaaacacatggagagt

SEQ ID NO: 470281 - DNA, 25 bp, Homo sapien
tgttttgtacgtttccagtttgcca

SEQ ID NO: 470282 - DNA, 25 bp, Homo sapien
atggcttttacaactgttttgtacg

SEQ ID NO: 470283 - DNA, 25 bp, Homo sapien
tatggcttttacaactgttttgtac

SEQ ID NO: 470284 - DNA, 25 bp, Homo sapien
gaagtactattctctcctattgtga

SEQ ID NO: 470285 - DNA, 25 bp, Homo sapien
ggaaagtgaagtactattctctcct

SEQ ID NO: 470286 - DNA, 25 bp, Homo sapien
cctattgtgagaggcatctcttttc

SEQ ID NO: 470287 - DNA, 25 bp, Homo sapien
actattctctcctattgtgagaggc

SEQ ID NO: 470288 - DNA, 25 bp, Homo sapien
taagagtttaacttttaggagatca

SEQ ID NO: 470289 - DNA, 25 bp, Homo sapien
gaaagcatgtgttaaagttagggag

SEQ ID NO: 470290 - DNA, 25 bp, Homo sapien
ggtggtggtaatcgacactaagagt

SEQ ID NO: 470291 - DNA, 25 bp, Homo sapien
agttagggaggctcttggaagatac

SEQ ID NO: 470292 - DNA, 25 bp, Homo sapien
gcaatttgctcacccataacgggct

SEQ ID NO: 470293 - DNA, 25 bp, Homo sapien
aatggtccagtttggcaatttgctc

SEQ ID NO: 470294 - DNA, 25 bp, Homo sapien
ttggcaatttgctcacccataacgg

SEQ ID NO: 470295 - DNA, 25 bp, Homo sapien
ttcctcagaaaaatggtccagtttg

SEQ ID NO: 470296 - DNA, 25 bp, Homo sapien
tgcgcccagccttccattccatatt

SEQ ID NO: 470297 - DNA, 25 bp, Homo sapien
cgcccagccttccattccatatttt

SEQ ID NO: 470298 - DNA, 25 bp, Homo sapien
gcgcccagccttccattccatattt

SEQ ID NO: 470299 - DNA, 25 bp, Homo sapien
ttttcttggcatggtctttaggtga

SEQ ID NO: 470300 - DNA, 25 bp, Homo sapien
gaaaaccatgagacttgtcagtcct

SEQ ID NO: 470301 - DNA, 25 bp, Homo sapien
ggtctggatcttgatggtaatggaa

SEQ ID NO: 470302 - DNA, 25 bp, Homo sapien
cacagctgtgtagtagcagacgtcg

SEQ ID NO: 470303 - DNA, 25 bp, Homo sapien
gaagaactaagagtctcttcagagg

SEQ ID NO: 470304 - DNA, 25 bp, Homo sapien
tttgaagaactaagagtctcttcag

SEQ ID NO: 470305 - DNA, 25 bp, Homo sapien
aagaactaagagtctcttcagagga

SEQ ID NO: 470306 - DNA, 25 bp, Homo sapien
catcctcaggttgaaaaaccttctt

SEQ ID NO: 470307 - DNA, 25 bp, Homo sapien
atcctcaggttgaaaaaccttcttg

SEQ ID NO: 470308 - DNA, 25 bp, Homo sapien
cacatcctcaggttgaaaaaccttc

SEQ ID NO: 470309 - DNA, 25 bp, Homo sapien
acatcctcaggttgaaaaaccttct

SEQ ID NO: 470310 - DNA, 25 bp, Homo sapien
tagcttctgcattaactatggcatg

SEQ ID NO: 470311 - DNA, 25 bp, Homo sapien
cattagcttctgcattaactatggc

SEQ ID NO: 470312 - DNA, 25 bp, Homo sapien
gcttctgcattaactatggcatgaa

SEQ ID NO: 470313 - DNA, 25 bp, Homo sapien
tgcattaactatggcatgaagaact

SEQ ID NO: 470314 - DNA, 25 bp, Homo sapien
ataacaggattttaatcatcctgac

SEQ ID NO: 470315 - DNA, 25 bp, Homo sapien
cataacaggattttaatcatcctga

SEQ ID NO: 470316 - DNA, 25 bp, Homo sapien
tcataacaggattttaatcatcctg

SEQ ID NO: 470317 - DNA, 25 bp, Homo sapien
tctctctcactgatacttttacaag

SEQ ID NO: 470318 - DNA, 25 bp, Homo sapien
cagtgtgcagagtttttctctctca

SEQ ID NO: 470319 - DNA, 25 bp, Homo sapien
cctcttcagtgtgcagagtttttct

SEQ ID NO: 470320 - DNA, 25 bp, Homo sapien
tcactgatacttttacaaggtagtt

SEQ ID NO: 470321 - DNA, 25 bp, Homo sapien
cgatgttctgatgtgtgtgatgctg

SEQ ID NO: 470322 - DNA, 25 bp, Homo sapien
tgttctgatgtgtgtgatgctgtat

SEQ ID NO: 470323 - DNA, 25 bp, Homo sapien
gatgtgtgtgatgctgtattatcat

SEQ ID NO: 470324 - DNA, 25 bp, Homo sapien
cttcttcatcgcgatgttctgatgt

SEQ ID NO: 470325 - DNA, 25 bp, Homo sapien
ttggacgtatcttgactgtccgtgg

SEQ ID NO: 470326 - DNA, 25 bp, Homo sapien
gacgtatcttgactgtccgtggtaa

SEQ ID NO: 470327 - DNA, 25 bp, Homo sapien
tcttgactgtccgtggtaagagcca

SEQ ID NO: 470328 - DNA, 25 bp, Homo sapien
aatttcctttggacgtatcttgact

SEQ ID NO: 470329 - DNA, 25 bp, Homo sapien
cctgaactgggttgaggatagcctc

SEQ ID NO: 470330 - DNA, 25 bp, Homo sapien
tctggcaagtatctgcaggtgtctg

SEQ ID NO: 470331 - DNA, 25 bp, Homo sapien
agctcatgctcaatgcttctttctg

SEQ ID NO: 470332 - DNA, 25 bp, Homo sapien
gagttctcaggtacacccatgtttt

SEQ ID NO: 470333 - DNA, 25 bp, Homo sapien
tggcagctcatcatggctggtctct

SEQ ID NO: 470334 - DNA, 25 bp, Homo sapien
ttgtatctggcagctcatcatggct

SEQ ID NO: 470335 - DNA, 25 bp, Homo sapien
gctcatcatggctggtctctctgtc

SEQ ID NO: 470336 - DNA, 25 bp, Homo sapien
atctggcagctcatcatggctggtc

SEQ ID NO: 470337 - DNA, 25 bp, Homo sapien
gattgagattctaactccagttaga

SEQ ID NO: 470338 - DNA, 25 bp, Homo sapien
gagattctaactccagttagaatcc

SEQ ID NO: 470339 - DNA, 25 bp, Homo sapien
ttgagattctaactccagttagaat

SEQ ID NO: 470340 - DNA, 25 bp, Homo sapien
attgagattctaactccagttagaa

SEQ ID NO: 470341 - DNA, 25 bp, Homo sapien
tctccatctctgtctactgcttgct

SEQ ID NO: 470342 - DNA, 25 bp, Homo sapien
cttcataaaacctctgtgaggggct

SEQ ID NO: 470343 - DNA, 25 bp, Homo sapien
ttcataaaacctctgtgaggggctc

SEQ ID NO: 470344 - DNA, 25 bp, Homo sapien
tctctgtctactgcttgctcccctt

SEQ ID NO: 470345 - DNA, 25 bp, Homo sapien
tcgtacagtctgaaacccacagatg

SEQ ID NO: 470346 - DNA, 25 bp, Homo sapien
gcttcagtcgactttttgagaataa

SEQ ID NO: 470347 - DNA, 25 bp, Homo sapien
tttgagaataacatcgtacagtctg

SEQ ID NO: 470348 - DNA, 25 bp, Homo sapien
cagatgttgggttccatatttcctc

SEQ ID NO: 470349 - DNA, 25 bp, Homo sapien
aagaaaacaagtgttcataatattc

SEQ ID NO: 470350 - DNA, 25 bp, Homo sapien
gaaaacaagtgttcataatattcac

SEQ ID NO: 470351 - DNA, 25 bp, Homo sapien
ttaagaaaacaagtgttcataatat

SEQ ID NO: 470352 - DNA, 25 bp, Homo sapien
agaaaacaagtgttcataatattca

SEQ ID NO: 470353 - DNA, 25 bp, Homo sapien
tacatggcattttggtaactagaag

SEQ ID NO: 470354 - DNA, 25 bp, Homo sapien
tccaggtgcatcagtcagtatgatt

SEQ ID NO: 470355 - DNA, 25 bp, Homo sapien
ctggacagttggttaagcggaagtt

SEQ ID NO: 470356 - DNA, 25 bp, Homo sapien
tgaggtactcggtctgctcagagag

SEQ ID NO: 470357 - DNA, 25 bp, Homo sapien
ctgatccttcaagaaggactgatta

SEQ ID NO: 470358 - DNA, 25 bp, Homo sapien
ctgtctgatccttcaagaaggactg

SEQ ID NO: 470359 - DNA, 25 bp, Homo sapien
gtctgatccttcaagaaggactgat

SEQ ID NO: 470360 - DNA, 25 bp, Homo sapien
tgtctgatccttcaagaaggactga

SEQ ID NO: 470361 - DNA, 25 bp, Homo sapien
tcatttcgtaccagaggctttctga

SEQ ID NO: 470362 - DNA, 25 bp, Homo sapien
gaatgtttgcacacccaatggagga

SEQ ID NO: 470363 - DNA, 25 bp, Homo sapien
tgaatgtttgcacacccaatggagg

SEQ ID NO: 470364 - DNA, 25 bp, Homo sapien
ctggttggtcatttcgtaccagagg

SEQ ID NO: 470365 - DNA, 25 bp, Homo sapien
gagcagttttatgcccacagcaaaa

SEQ ID NO: 470366 - DNA, 25 bp, Homo sapien
taaaggttgctttgttttagagcag

SEQ ID NO: 470367 - DNA, 25 bp, Homo sapien
tgtgagccaccacgtctgggttttt

SEQ ID NO: 470368 - DNA, 25 bp, Homo sapien
tttagagcagttttatgcccacagc

SEQ ID NO: 470369 - DNA, 25 bp, Homo sapien
ctgccagcgtgcctccatgctgcgt

SEQ ID NO: 470370 - DNA, 25 bp, Homo sapien
agcgtgcctccatgctgcgtgctct

SEQ ID NO: 470371 - DNA, 25 bp, Homo sapien
ccatgctgcgtgctctctctcccct

SEQ ID NO: 470372 - DNA, 25 bp, Homo sapien
cccctccacactctgtgtacttggt

SEQ ID NO: 470373 - DNA, 25 bp, Homo sapien
cgtgctgcactgctgatgatatttc

SEQ ID NO: 470374 - DNA, 25 bp, Homo sapien
tgcactgctgatgatatttcttggc

SEQ ID NO: 470375 - DNA, 25 bp, Homo sapien
gctgcactgctgatgatatttcttg

SEQ ID NO: 470376 - DNA, 25 bp, Homo sapien
tccgtgctgcactgctgatgatatt

SEQ ID NO: 470377 - DNA, 25 bp, Homo sapien
ttaggagaatattagtgactgccag

SEQ ID NO: 470378 - DNA, 25 bp, Homo sapien
cccgctctgctgtgttagatttaga

SEQ ID NO: 470379 - DNA, 25 bp, Homo sapien
gacccgctctgctgtgttagattta

SEQ ID NO: 470380 - DNA, 25 bp, Homo sapien
tgccagtgggcaacatatccctgct

SEQ ID NO: 470381 - DNA, 25 bp, Homo sapien
tgtacttggccctggggatgtactg

SEQ ID NO: 470382 - DNA, 25 bp, Homo sapien
tgaatgtaatggtgacccaactccc

SEQ ID NO: 470383 - DNA, 25 bp, Homo sapien
tccctgtggactctgcagcttatga

SEQ ID NO: 470384 - DNA, 25 bp, Homo sapien
taatggtgacccaactccctgtgga

SEQ ID NO: 470385 - DNA, 25 bp, Homo sapien
tttaatacagattcaatatcagaca

SEQ ID NO: 470386 - DNA, 25 bp, Homo sapien
taaaattcttgctcatatttttgct

SEQ ID NO: 470387 - DNA, 25 bp, Homo sapien
gctcatatttttgctagttccaggg

SEQ ID NO: 470388 - DNA, 25 bp, Homo sapien
ttaatacagattcaatatcagacaa

SEQ ID NO: 470389 - DNA, 25 bp, Homo sapien
tacagttggccctctttattcgtgg

SEQ ID NO: 470390 - DNA, 25 bp, Homo sapien
ccatgaattgtgtcccaagtgtgac

SEQ ID NO: 470391 - DNA, 25 bp, Homo sapien
tactgctgtactgctgcatggaagg

SEQ ID NO: 470392 - DNA, 25 bp, Homo sapien
tattcgtgggttctgcattaaggga

SEQ ID NO: 470393 - DNA, 25 bp, Homo sapien
gggagaatcagtcctgcttttgttg

SEQ ID NO: 470394 - DNA, 25 bp, Homo sapien
ttcacgttagatgctcccctacggg

SEQ ID NO: 470395 - DNA, 25 bp, Homo sapien
tagttggtgttcacgttagatgctc

SEQ ID NO: 470396 - DNA, 25 bp, Homo sapien
gctgtctgcaagaactttgaaaact

SEQ ID NO: 470397 - DNA, 25 bp, Homo sapien
tgctggcatgaatagtgctcctggt

SEQ ID NO: 470398 - DNA, 25 bp, Homo sapien
gctggccggtggctgttattttcaa

SEQ ID NO: 470399 - DNA, 25 bp, Homo sapien
agtgcctggtccatgcaagtagcca

SEQ ID NO: 470400 - DNA, 25 bp, Homo sapien
tctctggtcgtaatgatgtgtaact

SEQ ID NO: 470401 - DNA, 25 bp, Homo sapien
gaagggcgatgctgttgcaaagcaa

SEQ ID NO: 470402 - DNA, 25 bp, Homo sapien
agcaagtgtttttctacccctagtg

SEQ ID NO: 470403 - DNA, 25 bp, Homo sapien
gcaaagcaagtagcgtcggtcggat

SEQ ID NO: 470404 - DNA, 25 bp, Homo sapien
ttgccatcccaaatcagaccgtatt

SEQ ID NO: 470405 - DNA, 25 bp, Homo sapien
gctgggccccggggtaattcgatgc

SEQ ID NO: 470406 - DNA, 25 bp, Homo sapien
ctgggccccggggtaattcgatgcg

SEQ ID NO: 470407 - DNA, 25 bp, Homo sapien
cccaagcgcctctccggtttcctga

SEQ ID NO: 470408 - DNA, 25 bp, Homo sapien
cctctccggtttcctgagctgcggg

SEQ ID NO: 470409 - DNA, 25 bp, Homo sapien
gcctctccggtttcctgagctgcgg

SEQ ID NO: 470410 - DNA, 25 bp, Homo sapien
agcgcctctccggtttcctgagctg

SEQ ID NO: 470411 - DNA, 25 bp, Homo sapien
tttctcgcggctcggcgcgagtcct

SEQ ID NO: 470412 - DNA, 25 bp, Homo sapien
aaagaggagactttctcgcggctcg

SEQ ID NO: 470413 - DNA, 25 bp, Homo sapien
cgctctgacacaaaagaggagactt

SEQ ID NO: 470414 - DNA, 25 bp, Homo sapien
ctaagcctgtctggcgcgctctgac

SEQ ID NO: 470415 - DNA, 25 bp, Homo sapien
ggcttatgccataggaaggcagtgc

SEQ ID NO: 470416 - DNA, 25 bp, Homo sapien
gactctagatactaaccttgaccta

SEQ ID NO: 470417 - DNA, 25 bp, Homo sapien
actctcctaacaagcccgtggctta

SEQ ID NO: 470418 - DNA, 25 bp, Homo sapien
ccacacagggtatccagactctaga

SEQ ID NO: 470419 - DNA, 25 bp, Homo sapien
agtatcagctaaatccttcctccag

SEQ ID NO: 470420 - DNA, 25 bp, Homo sapien
tgccctttagcagcgggatcactct

SEQ ID NO: 470421 - DNA, 25 bp, Homo sapien
cactctgctgtagttccacagctga

SEQ ID NO: 470422 - DNA, 25 bp, Homo sapien
gcactgtgagcttgtgagtatcagc

SEQ ID NO: 470423 - DNA, 25 bp, Homo sapien
ccagccggtcagttctactgccaat

SEQ ID NO: 470424 - DNA, 25 bp, Homo sapien
gcttccatcctctggtatgcctgaa

SEQ ID NO: 470425 - DNA, 25 bp, Homo sapien
ggtatgcctgaatctaccatccacc

SEQ ID NO: 470426 - DNA, 25 bp, Homo sapien
ggtcagttctactgccaataaacat

SEQ ID NO: 470427 - DNA, 25 bp, Homo sapien
gttaaaattaatgccctgcttggca

SEQ ID NO: 470428 - DNA, 25 bp, Homo sapien
aaaactaatagttcccactgctgaa

SEQ ID NO: 470429 - DNA, 25 bp, Homo sapien
gactgtcaaactagcaattggaacc

SEQ ID NO: 470430 - DNA, 25 bp, Homo sapien
caagctgaattgtctgacttgccag

SEQ ID NO: 470431 - DNA, 25 bp, Homo sapien
tctttctgccagttgacttgtatgt

SEQ ID NO: 470432 - DNA, 25 bp, Homo sapien
cttgtatgtgcaccgaaaagttggc

SEQ ID NO: 470433 - DNA, 25 bp, Homo sapien
tagctgtccagcataatcaagagct

SEQ ID NO: 470434 - DNA, 25 bp, Homo sapien
cttttagctgtccagcataatcaag

SEQ ID NO: 470435 - DNA, 25 bp, Homo sapien
acatgtccttatcaaccatcttctt

SEQ ID NO: 470436 - DNA, 25 bp, Homo sapien
aaacatgtccttatcaaccatcttc

SEQ ID NO: 470437 - DNA, 25 bp, Homo sapien
aaaaacatgtccttatcaaccatct

SEQ ID NO: 470438 - DNA, 25 bp, Homo sapien
ctgaaaaacatgtccttatcaacca

SEQ ID NO: 470439 - DNA, 25 bp, Homo sapien
tgtatgttgcactccatattctctc

SEQ ID NO: 470440 - DNA, 25 bp, Homo sapien
tcctgaaagcatgtatgttgcactc

SEQ ID NO: 470441 - DNA, 25 bp, Homo sapien
gaaagcatgtatgttgcactccata

SEQ ID NO: 470442 - DNA, 25 bp, Homo sapien
gccccttactacaaaggagagtgga

SEQ ID NO: 470443 - DNA, 25 bp, Homo sapien
ccttcctcttattgtacctacgctg

SEQ ID NO: 470444 - DNA, 25 bp, Homo sapien
cctacgctgttgtacattaacctgt

SEQ ID NO: 470445 - DNA, 25 bp, Homo sapien
tcatcagaatctctatgggcggtgc

SEQ ID NO: 470446 - DNA, 25 bp, Homo sapien
gcccaattttcagggatgccgtcct

SEQ ID NO: 470447 - DNA, 25 bp, Homo sapien
tcttaggaagatccaagctggctgc

SEQ ID NO: 470448 - DNA, 25 bp, Homo sapien
tccaaagacaacatatacattatgt

SEQ ID NO: 470449 - DNA, 25 bp, Homo sapien
tggaggctcccaaacttgtatatga

SEQ ID NO: 470450 - DNA, 25 bp, Homo sapien
tgtatatgttgggatagtcagggct

SEQ ID NO: 470451 - DNA, 25 bp, Homo sapien
agaaagcaagtgaccactgagtcca

SEQ ID NO: 470452 - DNA, 25 bp, Homo sapien
acctctggatacatctgccttcacg

SEQ ID NO: 470453 - DNA, 25 bp, Homo sapien
tacatctgccttcacgagttgacaa

SEQ ID NO: 470454 - DNA, 25 bp, Homo sapien
tcaacgaggttacaaacatcatcta

SEQ ID NO: 470455 - DNA, 25 bp, Homo sapien
tgttaacgtgaatttaatgccttgg

SEQ ID NO: 470456 - DNA, 25 bp, Homo sapien
ggtaatttatatcaagtatccaaac

SEQ ID NO: 470457 - DNA, 25 bp, Homo sapien
ctgcatgtacttgttaacgtgaatt

SEQ ID NO: 470458 - DNA, 25 bp, Homo sapien
taatgccttggtaatttatatcaag

SEQ ID NO: 470459 - DNA, 25 bp, Homo sapien
cgtgcataagtgtgcagagatcctc

SEQ ID NO: 470460 - DNA, 25 bp, Homo sapien
tctgacttctaaatgcacacgtgca

SEQ ID NO: 470461 - DNA, 25 bp, Homo sapien
gatttctgatggaaacgccactgag

SEQ ID NO: 470462 - DNA, 25 bp, Homo sapien
gatctttgccatctgtccggtgttt

SEQ ID NO: 470463 - DNA, 25 bp, Homo sapien
ttttgatacccttcttcttcagcat

SEQ ID NO: 470464 - DNA, 25 bp, Homo sapien
ctttttgatacccttcttcttcagc

SEQ ID NO: 470465 - DNA, 25 bp, Homo sapien
tttttgatacccttcttcttcagca

SEQ ID NO: 470466 - DNA, 25 bp, Homo sapien
ttctttttgatacccttcttcttca

SEQ ID NO: 470467 - DNA, 25 bp, Homo sapien
tccagcattccctccaatagtctca

SEQ ID NO: 470468 - DNA, 25 bp, Homo sapien
tccctccaatagtctcatggttcta

SEQ ID NO: 470469 - DNA, 25 bp, Homo sapien
cctccaatagtctcatggttctaac

SEQ ID NO: 470470 - DNA, 25 bp, Homo sapien
gcattccctccaatagtctcatggt

SEQ ID NO: 470471 - DNA, 25 bp, Homo sapien
atctctgaacgccagtcagccaact

SEQ ID NO: 470472 - DNA, 25 bp, Homo sapien
ggaacctatctctgaacgccagtca

SEQ ID NO: 470473 - DNA, 25 bp, Homo sapien
gccaactggggagccaaatctttct

SEQ ID NO: 470474 - DNA, 25 bp, Homo sapien
tctgaacgccagtcagccaactggg

SEQ ID NO: 470475 - DNA, 25 bp, Homo sapien
catctgcgttcttggccacacccat

SEQ ID NO: 470476 - DNA, 25 bp, Homo sapien
tgccatctgcgttcttggccacacc

SEQ ID NO: 470477 - DNA, 25 bp, Homo sapien
gccatctgcgttcttggccacaccc

SEQ ID NO: 470478 - DNA, 25 bp, Homo sapien
ctgccatctgcgttcttggccacac

SEQ ID NO: 470479 - DNA, 25 bp, Homo sapien
caccaccaccaatgtgttgaagtgc

SEQ ID NO: 470480 - DNA, 25 bp, Homo sapien
tagctttaccctactgattcgctgg

SEQ ID NO: 470481 - DNA, 25 bp, Homo sapien
tttaccctactgattcgctggtggg

SEQ ID NO: 470482 - DNA, 25 bp, Homo sapien
tgttgaagtgctagctttaccctac

SEQ ID NO: 470483 - DNA, 25 bp, Homo sapien
caaatcttgcctgtgtttcgaccgc

SEQ ID NO: 470484 - DNA, 25 bp, Homo sapien
gatgcctcatgggttagctgcttaa

SEQ ID NO: 470485 - DNA, 25 bp, Homo sapien
gacaattccataaggcaaaatgttc

SEQ ID NO: 470486 - DNA, 25 bp, Homo sapien
gcttaagtagataagatgtcacgga

SEQ ID NO: 470487 - DNA, 25 bp, Homo sapien
ctcagattttcagccgcttccaggt

SEQ ID NO: 470488 - DNA, 25 bp, Homo sapien
tagcctggacaccaatcatgacatt

SEQ ID NO: 470489 - DNA, 25 bp, Homo sapien
gactctcgggagttaactcagtcca

SEQ ID NO: 470490 - DNA, 25 bp, Homo sapien
tctataactaggaaaactggccctg

SEQ ID NO: 470491 - DNA, 25 bp, Homo sapien
cctatggctgcataggaaaatggtt

SEQ ID NO: 470492 - DNA, 25 bp, Homo sapien
tgtaccgttttcctatggctgcata

SEQ ID NO: 470493 - DNA, 25 bp, Homo sapien
cagctgaatttcagtgtcgtgtttg

SEQ ID NO: 470494 - DNA, 25 bp, Homo sapien
tcagtgtcgtgtttgtaccgttttc

SEQ ID NO: 470495 - DNA, 25 bp, Homo sapien
gacagaccttttggagtaggcaaca

SEQ ID NO: 470496 - DNA, 25 bp, Homo sapien
tcactgagagagatatgatcccgcg

SEQ ID NO: 470497 - DNA, 25 bp, Homo sapien
taggccaggtctaggagtgcagcaa

SEQ ID NO: 470498 - DNA, 25 bp, Homo sapien
aaaatcatggtatcgggccccacag

SEQ ID NO: 470499 - DNA, 25 bp, Homo sapien
aggcccatcaagggcactgccgtgg

SEQ ID NO: 470500 - DNA, 25 bp, Homo sapien
gcccatcaagggcactgccgtgggc

SEQ ID NO: 470501 - DNA, 25 bp, Homo sapien
gaggcccatcaagggcactgccgtg

SEQ ID NO: 470502 - DNA, 25 bp, Homo sapien
cagaggcccatcaagggcactgccg

SEQ ID NO: 470503 - DNA, 25 bp, Homo sapien
aacccacaatactaccaggcatgta

SEQ ID NO: 470504 - DNA, 25 bp, Homo sapien
cctcctacccttgtctccatcagct

SEQ ID NO: 470505 - DNA, 25 bp, Homo sapien
taagatacagcttgccccaacctat

SEQ ID NO: 470506 - DNA, 25 bp, Homo sapien
tactaccaggcatgtaagatacagc

SEQ ID NO: 470507 - DNA, 25 bp, Homo sapien
ctcaccagagataaactggcagctg

SEQ ID NO: 470508 - DNA, 25 bp, Homo sapien
tacctgaagtaggaatagacctcac

SEQ ID NO: 470509 - DNA, 25 bp, Homo sapien
ggaatagacctcaccagagataaac

SEQ ID NO: 470510 - DNA, 25 bp, Homo sapien
tccagaaaactacctgaagtaggaa

SEQ ID NO: 470511 - DNA, 25 bp, Homo sapien
agttaaaccacactttgccaatatg

SEQ ID NO: 470512 - DNA, 25 bp, Homo sapien
gttaaaccacactttgccaatatgc

SEQ ID NO: 470513 - DNA, 25 bp, Homo sapien
taaaccacactttgccaatatgcat

SEQ ID NO: 470514 - DNA, 25 bp, Homo sapien
aagttaaaccacactttgccaatat

SEQ ID NO: 470515 - DNA, 25 bp, Homo sapien
tttcagatgatccctggtgtttggg

SEQ ID NO: 470516 - DNA, 25 bp, Homo sapien
ttactaaggttgactgagctgaact

SEQ ID NO: 470517 - DNA, 25 bp, Homo sapien
tgaactttcagatgatccctggtgt

SEQ ID NO: 470518 - DNA, 25 bp, Homo sapien
cttactaaggttgactgagctgaac

SEQ ID NO: 470519 - DNA, 25 bp, Homo sapien
cctaaactcctccggtaattgactg

SEQ ID NO: 470520 - DNA, 25 bp, Homo sapien
ctaaactcctccggtaattgactga

SEQ ID NO: 470521 - DNA, 25 bp, Homo sapien
taaactcctccggtaattgactgac

SEQ ID NO: 470522 - DNA, 25 bp, Homo sapien
tgcacatgctgttgtgcagtcaccc

SEQ ID NO: 470523 - DNA, 25 bp, Homo sapien
gtcacccatagatctgaatttccat

SEQ ID NO: 470524 - DNA, 25 bp, Homo sapien
caggaggtgcgtccccatcacactg

SEQ ID NO: 470525 - DNA, 25 bp, Homo sapien
agcctctcaggaggtgcgtccccat

SEQ ID NO: 470526 - DNA, 25 bp, Homo sapien
taaaactcatcgtctgtgtttggct

SEQ ID NO: 470527 - DNA, 25 bp, Homo sapien
cccataaaactcatcgtctgtgttt

SEQ ID NO: 470528 - DNA, 25 bp, Homo sapien
ctcgcttgtctgccgtttataatcc

SEQ ID NO: 470529 - DNA, 25 bp, Homo sapien
gcttgtctgccgtttataatcccat

SEQ ID NO: 470530 - DNA, 25 bp, Homo sapien
aaccttttcacgcagaggggtggag

SEQ ID NO: 470531 - DNA, 25 bp, Homo sapien
aataagaggcaggtataagtatgac

SEQ ID NO: 470532 - DNA, 25 bp, Homo sapien
cattgaaatacagtctcattggcgg

SEQ ID NO: 470533 - DNA, 25 bp, Homo sapien
tcctctgtgtgctggttactgctct

SEQ ID NO: 470534 - DNA, 25 bp, Homo sapien
acagcagatgacacctgcccaattt

SEQ ID NO: 470535 - DNA, 25 bp, Homo sapien
aacagcagatgacacctgcccaatt

SEQ ID NO: 470536 - DNA, 25 bp, Homo sapien
tcacagtctacttctatatccatct

SEQ ID NO: 470537 - DNA, 25 bp, Homo sapien
gaacagcagatgacacctgcccaat

SEQ ID NO: 470538 - DNA, 25 bp, Homo sapien
ttggacaaatatagtagactgaggg

SEQ ID NO: 470539 - DNA, 25 bp, Homo sapien
gagggccctcatggaattgaattct

SEQ ID NO: 470540 - DNA, 25 bp, Homo sapien
acaaatatagtagactgagggccct

SEQ ID NO: 470541 - DNA, 25 bp, Homo sapien
tgagggccctcatggaattgaattc

SEQ ID NO: 470542 - DNA, 25 bp, Homo sapien
tctttgaggttgctctaactgtaat

SEQ ID NO: 470543 - DNA, 25 bp, Homo sapien
tccgttctttgaggttgctctaact

SEQ ID NO: 470544 - DNA, 25 bp, Homo sapien
agaattccgttctttgaggttgctc

SEQ ID NO: 470545 - DNA, 25 bp, Homo sapien
cttgttgagaattccgttctttgag

SEQ ID NO: 470546 - DNA, 25 bp, Homo sapien
cctccattggcccaaataatacttg

SEQ ID NO: 470547 - DNA, 25 bp, Homo sapien
gaactgctggcgctgaagaaacaga

SEQ ID NO: 470548 - DNA, 25 bp, Homo sapien
gccctccattggcccaaataatact

SEQ ID NO: 470549 - DNA, 25 bp, Homo sapien
tcctgaactgctggcgctgaagaaa

SEQ ID NO: 470550 - DNA, 25 bp, Homo sapien
gagctgcagccagtgtactcactag

SEQ ID NO: 470551 - DNA, 25 bp, Homo sapien
cagccagtgtactcactaggcttgg

SEQ ID NO: 470552 - DNA, 25 bp, Homo sapien
cttgggttccgaaaaatcacagcat

SEQ ID NO: 470553 - DNA, 25 bp, Homo sapien
tactcactaggcttgggttccgaaa

SEQ ID NO: 470554 - DNA, 25 bp, Homo sapien
caaaatgatgggatcttagagtcaa

SEQ ID NO: 470555 - DNA, 25 bp, Homo sapien
tagtgtgaaggcttttactccccag

SEQ ID NO: 470556 - DNA, 25 bp, Homo sapien
tgggctgggttatcagagaattgta

SEQ ID NO: 470557 - DNA, 25 bp, Homo sapien
tcagcagagagatcatttgtttctg

SEQ ID NO: 470558 - DNA, 25 bp, Homo sapien
ggtaaattctgagatcgtttatgtg

SEQ ID NO: 470559 - DNA, 25 bp, Homo sapien
taaattctgagatcgtttatgtgct

SEQ ID NO: 470560 - DNA, 25 bp, Homo sapien
aattctgagatcgtttatgtgctgt

SEQ ID NO: 470561 - DNA, 25 bp, Homo sapien
tctgagatcgtttatgtgctgtgtt

SEQ ID NO: 470562 - DNA, 25 bp, Homo sapien
ggacagcagacagagtatggaagct

SEQ ID NO: 470563 - DNA, 25 bp, Homo sapien
tgtgttttggcagggagccatgtta

SEQ ID NO: 470564 - DNA, 25 bp, Homo sapien
gaagaaccgaaagaccacaaagagc

SEQ ID NO: 470565 - DNA, 25 bp, Homo sapien
taggagatggttcttggctacatcg

SEQ ID NO: 470566 - DNA, 25 bp, Homo sapien
tcttatccagcaccttggttgcaaa

SEQ ID NO: 470567 - DNA, 25 bp, Homo sapien
tctctctcttatccagcaccttggt

SEQ ID NO: 470568 - DNA, 25 bp, Homo sapien
gtgcttgggctctgtcgccactggg

SEQ ID NO: 470569 - DNA, 25 bp, Homo sapien
ttgggctctgtcgccactgggccca

SEQ ID NO: 470570 - DNA, 25 bp, Homo sapien
gcaatgttgtcagcaaacaaggtaa

SEQ ID NO: 470571 - DNA, 25 bp, Homo sapien
cttgccaagcgaattaatatacatg

SEQ ID NO: 470572 - DNA, 25 bp, Homo sapien
tcagcattttaagcacttgaagagc

SEQ ID NO: 470573 - DNA, 25 bp, Homo sapien
tcaaaacggaatgccctgcaagagt

SEQ ID NO: 470574 - DNA, 25 bp, Homo sapien
ggtttttgctaaggaattcagctgc

SEQ ID NO: 470575 - DNA, 25 bp, Homo sapien
ctttgctgattgcaggtttttgcta

SEQ ID NO: 470576 - DNA, 25 bp, Homo sapien
ggtaatattaactctgaagtagctt

SEQ ID NO: 470577 - DNA, 25 bp, Homo sapien
tattaactctgaagtagctttcttc

SEQ ID NO: 470578 - DNA, 25 bp, Homo sapien
caagcacttattctcatggccagca

SEQ ID NO: 470579 - DNA, 25 bp, Homo sapien
tattaagtgctgaaaatatacccac

SEQ ID NO: 470580 - DNA, 25 bp, Homo sapien
ggtgaataatccctgcataagcatg

SEQ ID NO: 470581 - DNA, 25 bp, Homo sapien
tctgtgtgatcaaatgaggtttcca

SEQ ID NO: 470582 - DNA, 25 bp, Homo sapien
gatttatgtcttccatccaattttc

SEQ ID NO: 470583 - DNA, 25 bp, Homo sapien
taagatttatgtcttccatccaatt

SEQ ID NO: 470584 - DNA, 25 bp, Homo sapien
agatttatgtcttccatccaatttt

SEQ ID NO: 470585 - DNA, 25 bp, Homo sapien
aagatttatgtcttccatccaattt

SEQ ID NO: 470586 - DNA, 25 bp, Homo sapien
ctcggtgtcctgcactttcctccct

SEQ ID NO: 470587 - DNA, 25 bp, Homo sapien
gtgtcctgcactttcctccctcaag

SEQ ID NO: 470588 - DNA, 25 bp, Homo sapien
tgtcctgcactttcctccctcaagt

SEQ ID NO: 470589 - DNA, 25 bp, Homo sapien
agcccagtaggtaaggcttcagtga

SEQ ID NO: 470590 - DNA, 25 bp, Homo sapien
gcccagtaggtaaggcttcagtgag

SEQ ID NO: 470591 - DNA, 25 bp, Homo sapien
tgagcccagtaggtaaggcttcagt

SEQ ID NO: 470592 - DNA, 25 bp, Homo sapien
ttgagcccagtaggtaaggcttcag

SEQ ID NO: 470593 - DNA, 25 bp, Homo sapien
tatcagcaccgcagtgttgagaggt

SEQ ID NO: 470594 - DNA, 25 bp, Homo sapien
ctccacattcctaattatcaggaag

SEQ ID NO: 470595 - DNA, 25 bp, Homo sapien
cattcctaattatcaggaagtgtca

SEQ ID NO: 470596 - DNA, 25 bp, Homo sapien
tgcagggaggtatcaagtttctata

SEQ ID NO: 470597 - DNA, 25 bp, Homo sapien
gttgttagtggtcaatgtgtgactt

SEQ ID NO: 470598 - DNA, 25 bp, Homo sapien
aagacattggaaagggaacaccatg

SEQ ID NO: 470599 - DNA, 25 bp, Homo sapien
tagtggtcaatgtgtgacttccaga

SEQ ID NO: 470600 - DNA, 25 bp, Homo sapien
cagaaagacattggaaagggaacac

SEQ ID NO: 470601 - DNA, 25 bp, Homo sapien
tagaggttcaggaacattctaatat

SEQ ID NO: 470602 - DNA, 25 bp, Homo sapien
gaggttcaggaacattctaatatat

SEQ ID NO: 470603 - DNA, 25 bp, Homo sapien
taagccttttagaggttcaggaaca

SEQ ID NO: 470604 - DNA, 25 bp, Homo sapien
ccttttagaggttcaggaacattct

SEQ ID NO: 470605 - DNA, 25 bp, Homo sapien
cttggttgctgatcttgttcacata

SEQ ID NO: 470606 - DNA, 25 bp, Homo sapien
catatgacagcttttgagggctttg

SEQ ID NO: 470607 - DNA, 25 bp, Homo sapien
catacacaataggaacatatgacag

SEQ ID NO: 470608 - DNA, 25 bp, Homo sapien
ggttgctgatcttgttcacatagat

SEQ ID NO: 470609 - DNA, 25 bp, Homo sapien
ggtaatttgatgctcatttgcccaa

SEQ ID NO: 470610 - DNA, 25 bp, Homo sapien
gtaatttgatgctcatttgcccaac

SEQ ID NO: 470611 - DNA, 25 bp, Homo sapien
caataccaacgagattctagccaca

SEQ ID NO: 470612 - DNA, 25 bp, Homo sapien
aataccaacgagattctagccacag

SEQ ID NO: 470613 - DNA, 25 bp, Homo sapien
tgcaataccaacgagattctagcca

SEQ ID NO: 470614 - DNA, 25 bp, Homo sapien
gcaataccaacgagattctagccac

SEQ ID NO: 470615 - DNA, 25 bp, Homo sapien
tctgggcctcttcgagtacatgccc

SEQ ID NO: 470616 - DNA, 25 bp, Homo sapien
gcctcttcgagtacatgccccaaac

SEQ ID NO: 470617 - DNA, 25 bp, Homo sapien
tgggcctcttcgagtacatgcccca

SEQ ID NO: 470618 - DNA, 25 bp, Homo sapien
ggcctcttcgagtacatgccccaaa

SEQ ID NO: 470619 - DNA, 25 bp, Homo sapien
gaatcagaacctggaaagcgatgag

SEQ ID NO: 470620 - DNA, 25 bp, Homo sapien
ggttcagctagatgggaatcagaac

SEQ ID NO: 470621 - DNA, 25 bp, Homo sapien
acaggtaggttcagctagatgggaa

SEQ ID NO: 470622 - DNA, 25 bp, Homo sapien
acctggaaagcgatgagcagctgga

SEQ ID NO: 470623 - DNA, 25 bp, Homo sapien
catgagttcctaatctctttaacta

SEQ ID NO: 470624 - DNA, 25 bp, Homo sapien
tgagttcctaatctctttaactatc

SEQ ID NO: 470625 - DNA, 25 bp, Homo sapien
atgagttcctaatctctttaactat

SEQ ID NO: 470626 - DNA, 25 bp, Homo sapien
gaagtcaaaagcaccttcaccatcc

SEQ ID NO: 470627 - DNA, 25 bp, Homo sapien
agtcaaaagcaccttcaccatccat

SEQ ID NO: 470628 - DNA, 25 bp, Homo sapien
gtgaagtcaaaagcaccttcaccat

SEQ ID NO: 470629 - DNA, 25 bp, Homo sapien
actgtgaagtcaaaagcaccttcac

SEQ ID NO: 470630 - DNA, 25 bp, Homo sapien
gcattatgaatttgaattcagaatc

SEQ ID NO: 470631 - DNA, 25 bp, Homo sapien
aatcagctttgccctgtggttctgt

SEQ ID NO: 470632 - DNA, 25 bp, Homo sapien
ctaaatcagctttgccctgtggttc

SEQ ID NO: 470633 - DNA, 25 bp, Homo sapien
cttaaaaaactcatctaaatcagct

SEQ ID NO: 470634 - DNA, 25 bp, Homo sapien
atctaaatcagctttgccctgtggt

SEQ ID NO: 470635 - DNA, 25 bp, Homo sapien
catcagactgataactgaagctgga

SEQ ID NO: 470636 - DNA, 25 bp, Homo sapien
agctgcaactgggagtctgggtggc

SEQ ID NO: 470637 - DNA, 25 bp, Homo sapien
gtggcggtctctaccgggcagccat

SEQ ID NO: 470638 - DNA, 25 bp, Homo sapien
atcccacccatcagactgataactg

SEQ ID NO: 470639 - DNA, 25 bp, Homo sapien
cttggctctcagtatagttagtcat

SEQ ID NO: 470640 - DNA, 25 bp, Homo sapien
cgttccgtctttctagacacaggtg

SEQ ID NO: 470641 - DNA, 25 bp, Homo sapien
aatgagttcccgctgcaaaacttgg

SEQ ID NO: 470642 - DNA, 25 bp, Homo sapien
acttggcgttccgtctttctagaca

SEQ ID NO: 470643 - DNA, 25 bp, Homo sapien
gctgcaaaacttggcgttccgtctt

SEQ ID NO: 470644 - DNA, 25 bp, Homo sapien
aaaccccgtggtcttcctcagtcat

SEQ ID NO: 470645 - DNA, 25 bp, Homo sapien
cttcctcagtcatggcattgagctc

SEQ ID NO: 470646 - DNA, 25 bp, Homo sapien
ggtcttcctcagtcatggcattgag

SEQ ID NO: 470647 - DNA, 25 bp, Homo sapien
cccgtggtcttcctcagtcatggca

SEQ ID NO: 470648 - DNA, 25 bp, Homo sapien
gtagaggtgaacaattggaatgaag

SEQ ID NO: 470649 - DNA, 25 bp, Homo sapien
ctacagtagaggtgaacaattggaa

SEQ ID NO: 470650 - DNA, 25 bp, Homo sapien
gaggtgaacaattggaatgaagaat

SEQ ID NO: 470651 - DNA, 25 bp, Homo sapien
cagtagaggtgaacaattggaatga

SEQ ID NO: 470652 - DNA, 25 bp, Homo sapien
tacattccttcatgtctccggcagg

SEQ ID NO: 470653 - DNA, 25 bp, Homo sapien
gatgttgcgattatcctcccgtaca

SEQ ID NO: 470654 - DNA, 25 bp, Homo sapien
tgcagtgcacggcaacttccttaag

SEQ ID NO: 470655 - DNA, 25 bp, Homo sapien
agaattgggttgatgatgttgcgat

SEQ ID NO: 470656 - DNA, 25 bp, Homo sapien
ctgacatatactgctgctgactacc

SEQ ID NO: 470657 - DNA, 25 bp, Homo sapien
atatactgctgctgactaccaagtg

SEQ ID NO: 470658 - DNA, 25 bp, Homo sapien
gactaccaagtgagttgttcagtga

SEQ ID NO: 470659 - DNA, 25 bp, Homo sapien
gctgctgactaccaagtgagttgtt

SEQ ID NO: 470660 - DNA, 25 bp, Homo sapien
ttccagatccaactggttgaatcag

SEQ ID NO: 470661 - DNA, 25 bp, Homo sapien
tccaactggttgaatcagtcttgga

SEQ ID NO: 470662 - DNA, 25 bp, Homo sapien
tttatccccttccagatccaactgg

SEQ ID NO: 470663 - DNA, 25 bp, Homo sapien
atgaaaatcaagcagccacacagcc

SEQ ID NO: 470664 - DNA, 25 bp, Homo sapien
tagccatgtccgagtggtgcagcac

SEQ ID NO: 470665 - DNA, 25 bp, Homo sapien
aaattgaacaaggacttctgaggcc

SEQ ID NO: 470666 - DNA, 25 bp, Homo sapien
gacctaataactacctgacgatggg

SEQ ID NO: 470667 - DNA, 25 bp, Homo sapien
tcactacagctatgaaaggcccctc

SEQ ID NO: 470668 - DNA, 25 bp, Homo sapien
ggatctcagtgcagtttcgctgagt

SEQ ID NO: 470669 - DNA, 25 bp, Homo sapien
cagtttcgctgagtttgaagacatt

SEQ ID NO: 470670 - DNA, 25 bp, Homo sapien
tcagtgcagtttcgctgagtttgaa

SEQ ID NO: 470671 - DNA, 25 bp, Homo sapien
tcaacctggatctcagtgcagtttc

SEQ ID NO: 470672 - DNA, 25 bp, Homo sapien
aaataacttcttcaatgtaggccag

SEQ ID NO: 470673 - DNA, 25 bp, Homo sapien
taacttcttcaatgtaggccagttc

SEQ ID NO: 470674 - DNA, 25 bp, Homo sapien
cttcttcaatgtaggccagttctaa

SEQ ID NO: 470675 - DNA, 25 bp, Homo sapien
ttcaatgtaggccagttctaaattt

SEQ ID NO: 470676 - DNA, 25 bp, Homo sapien
ggtaagtcatcaatatcaggacaga

SEQ ID NO: 470677 - DNA, 25 bp, Homo sapien
ggtggtcttttagcagattctccaa

SEQ ID NO: 470678 - DNA, 25 bp, Homo sapien
gggagattctcttgtggattccaca

SEQ ID NO: 470679 - DNA, 25 bp, Homo sapien
ctaagaaagcatcctgaagaaggtg

SEQ ID NO: 470680 - DNA, 25 bp, Homo sapien
catcaacctatcataaagcggcggg

SEQ ID NO: 470681 - DNA, 25 bp, Homo sapien
caagggaacgattgagcatctgaca

SEQ ID NO: 470682 - DNA, 25 bp, Homo sapien
tgatgcagacttcgcagggatggac

SEQ ID NO: 470683 - DNA, 25 bp, Homo sapien
tcccactagggattactgaagagcc

SEQ ID NO: 470684 - DNA, 25 bp, Homo sapien
cagcctggtactctttctctactcc

SEQ ID NO: 470685 - DNA, 25 bp, Homo sapien
ctactccacttttactggaacccat

SEQ ID NO: 470686 - DNA, 25 bp, Homo sapien
ttctctactccacttttactggaac

SEQ ID NO: 470687 - DNA, 25 bp, Homo sapien
agcctggtactctttctctactcca

SEQ ID NO: 470688 - DNA, 25 bp, Homo sapien
tacatcggcagatgggtaaacccta

SEQ ID NO: 470689 - DNA, 25 bp, Homo sapien
gaaagtccaccatatcctacatcgg

SEQ ID NO: 470690 - DNA, 25 bp, Homo sapien
ggtaaaaggagttcagacatcccat

SEQ ID NO: 470691 - DNA, 25 bp, Homo sapien
tggtcactactaccaggtaaaagga

SEQ ID NO: 470692 - DNA, 25 bp, Homo sapien
tatcttgctcacttgcagaagggct

SEQ ID NO: 470693 - DNA, 25 bp, Homo sapien
gcactgaagtgggtttatcttgctc

SEQ ID NO: 470694 - DNA, 25 bp, Homo sapien
tctaccacccattctagatttccct

SEQ ID NO: 470695 - DNA, 25 bp, Homo sapien
ggagctcaaagctgtttaactctgg

SEQ ID NO: 470696 - DNA, 25 bp, Homo sapien
tggatctttccagccgaagtaatat

SEQ ID NO: 470697 - DNA, 25 bp, Homo sapien
cagcagctttgaccagcagaaattg

SEQ ID NO: 470698 - DNA, 25 bp, Homo sapien
gacgagaaagaatattcgtagacag

SEQ ID NO: 470699 - DNA, 25 bp, Homo sapien
gaaattgccagtataagatcaagga

SEQ ID NO: 470700 - DNA, 25 bp, Homo sapien
tattgcaacaagagtgtgggtgtga

SEQ ID NO: 470701 - DNA, 25 bp, Homo sapien
cataaagtaggcctattacaattgt

SEQ ID NO: 470702 - DNA, 25 bp, Homo sapien
tacaattgtgtaactatgaacaggc

SEQ ID NO: 470703 - DNA, 25 bp, Homo sapien
tgaggcatgattgcaacttctcaac

SEQ ID NO: 470704 - DNA, 25 bp, Homo sapien
ctttgcgctactctaacggcccaaa

SEQ ID NO: 470705 - DNA, 25 bp, Homo sapien
tctaacggcccaaacatgagcagag

SEQ ID NO: 470706 - DNA, 25 bp, Homo sapien
cggcccaaacatgagcagagctgag

SEQ ID NO: 470707 - DNA, 25 bp, Homo sapien
gctgaggaacttcttggtcttctgg

SEQ ID NO: 470708 - DNA, 25 bp, Homo sapien
acacaagaaccccacacactccgtt

SEQ ID NO: 470709 - DNA, 25 bp, Homo sapien
gatgaatattacttgtggcaaagca

SEQ ID NO: 470710 - DNA, 25 bp, Homo sapien
aagaaccccacacactccgttgtct

SEQ ID NO: 470711 - DNA, 25 bp, Homo sapien
aggatgaatattacttgtggcaaag

SEQ ID NO: 470712 - DNA, 25 bp, Homo sapien
cctttagcaaaagaaaaaacagcat

SEQ ID NO: 470713 - DNA, 25 bp, Homo sapien
gcaaaagaaaaaacagcattgctca

SEQ ID NO: 470714 - DNA, 25 bp, Homo sapien
ttagcaaaagaaaaaacagcattgc

SEQ ID NO: 470715 - DNA, 25 bp, Homo sapien
caaaagaaaaaacagcattgctcat

SEQ ID NO: 470716 - DNA, 25 bp, Homo sapien
gggacaggaacagccagaactcttg

SEQ ID NO: 470717 - DNA, 25 bp, Homo sapien
gacaggaacagccagaactcttggt

SEQ ID NO: 470718 - DNA, 25 bp, Homo sapien
ggaacagccagaactcttggtgaca

SEQ ID NO: 470719 - DNA, 25 bp, Homo sapien
caggaacagccagaactcttggtga

SEQ ID NO: 470720 - DNA, 25 bp, Homo sapien
gaaagcggtgtgttgaccttctgat

SEQ ID NO: 470721 - DNA, 25 bp, Homo sapien
taccgatcagttgttcgtatctggg

SEQ ID NO: 470722 - DNA, 25 bp, Homo sapien
gggatattgagcaggacatcctagt

SEQ ID NO: 470723 - DNA, 25 bp, Homo sapien
tcctagttatctttgcaaggtggca

SEQ ID NO: 470724 - DNA, 25 bp, Homo sapien
ttcctgcaaaatatatgatgaactt

SEQ ID NO: 470725 - DNA, 25 bp, Homo sapien
cttgtatactgggatttttcctgca

SEQ ID NO: 470726 - DNA, 25 bp, Homo sapien
ctgcaaaatatatgatgaactttcc

SEQ ID NO: 470727 - DNA, 25 bp, Homo sapien
ttgtatactgggatttttcctgcaa

SEQ ID NO: 470728 - DNA, 25 bp, Homo sapien
ctgattgaggacaacactgaaaaag

SEQ ID NO: 470729 - DNA, 25 bp, Homo sapien
attgaggacaacactgaaaaaggga

SEQ ID NO: 470730 - DNA, 25 bp, Homo sapien
gattgaggacaacactgaaaaaggg

SEQ ID NO: 470731 - DNA, 25 bp, Homo sapien
tgattgaggacaacactgaaaaagg

SEQ ID NO: 470732 - DNA, 25 bp, Homo sapien
gggtgaagctggatgcctttatctg

SEQ ID NO: 470733 - DNA, 25 bp, Homo sapien
aaattgtgggtgaagctggatgcct

SEQ ID NO: 470734 - DNA, 25 bp, Homo sapien
gaaattgtgggtgaagctggatgcc

SEQ ID NO: 470735 - DNA, 25 bp, Homo sapien
gaagctggatgcctttatctgatta

SEQ ID NO: 470736 - DNA, 25 bp, Homo sapien
gagatggtattcaacattagctggc

SEQ ID NO: 470737 - DNA, 25 bp, Homo sapien
gatggtattcaacattagctggcca

SEQ ID NO: 470738 - DNA, 25 bp, Homo sapien
aggccccaggagatggtattcaaca

SEQ ID NO: 470739 - DNA, 25 bp, Homo sapien
ccaggagatggtattcaacattagc

SEQ ID NO: 470740 - DNA, 25 bp, Homo sapien
gactggtgtcgctcattccctgtgc

SEQ ID NO: 470741 - DNA, 25 bp, Homo sapien
gcctctgccctgtgtatcggtgtag

SEQ ID NO: 470742 - DNA, 25 bp, Homo sapien
aaattagaggcggtaagccctgcct

SEQ ID NO: 470743 - DNA, 25 bp, Homo sapien
tatcggtgtagagactggtgtcgct

SEQ ID NO: 470744 - DNA, 25 bp, Homo sapien
agacaggcagtagttcgaccaggtg

SEQ ID NO: 470745 - DNA, 25 bp, Homo sapien
gcagacaggcagtagttcgaccagg

SEQ ID NO: 470746 - DNA, 25 bp, Homo sapien
caggcagtagttcgaccaggtggat

SEQ ID NO: 470747 - DNA, 25 bp, Homo sapien
cagtagttcgaccaggtggatttct

SEQ ID NO: 470748 - DNA, 25 bp, Homo sapien
tctggcagaccctgagagcagctgt

SEQ ID NO: 470749 - DNA, 25 bp, Homo sapien
catcggcatatttcccagcaggctg

SEQ ID NO: 470750 - DNA, 25 bp, Homo sapien
caaactcccgctcatcggcatattt

SEQ ID NO: 470751 - DNA, 25 bp, Homo sapien
agcaggctgtaacgtggctctggca

SEQ ID NO: 470752 - DNA, 25 bp, Homo sapien
gttgagcagcacgaaatgtaattct

SEQ ID NO: 470753 - DNA, 25 bp, Homo sapien
ctatctatcccgctcaagttgagca

SEQ ID NO: 470754 - DNA, 25 bp, Homo sapien
agcagcacgaaatgtaattcttgtc

SEQ ID NO: 470755 - DNA, 25 bp, Homo sapien
tatcccgctcaagttgagcagcacg

SEQ ID NO: 470756 - DNA, 25 bp, Homo sapien
gggtaacgcacacttaacactacat

SEQ ID NO: 470757 - DNA, 25 bp, Homo sapien
tgcagcagggggtaacgcacactta

SEQ ID NO: 470758 - DNA, 25 bp, Homo sapien
accaactcgtggagtgtttccatgc

SEQ ID NO: 470759 - DNA, 25 bp, Homo sapien
gcttcttgaccaactcgtggagtgt

SEQ ID NO: 470760 - DNA, 25 bp, Homo sapien
tccagtttcctattcttgtcttttg

SEQ ID NO: 470761 - DNA, 25 bp, Homo sapien
attccagtttcctattcttgtcttt

SEQ ID NO: 470762 - DNA, 25 bp, Homo sapien
tcttgtcttttgtaccagaaactat

SEQ ID NO: 470763 - DNA, 25 bp, Homo sapien
ttcctattcttgtcttttgtaccag

SEQ ID NO: 470764 - DNA, 25 bp, Homo sapien
ggattcaataatgggctgaagtttt

SEQ ID NO: 470765 - DNA, 25 bp, Homo sapien
cagaagactgccttgttgccggggt

SEQ ID NO: 470766 - DNA, 25 bp, Homo sapien
tgccggggtcaaaagagttggcaat

SEQ ID NO: 470767 - DNA, 25 bp, Homo sapien
gagtcatgatctgatgcacgaagcc

SEQ ID NO: 470768 - DNA, 25 bp, Homo sapien
gggtcctgttcacgatgccaactat

SEQ ID NO: 470769 - DNA, 25 bp, Homo sapien
tactcctccctgactcatcgtttga

SEQ ID NO: 470770 - DNA, 25 bp, Homo sapien
accccacatggttgatgccaatcac

SEQ ID NO: 470771 - DNA, 25 bp, Homo sapien
ggttgatgccaatcacctcagggtt

SEQ ID NO: 470772 - DNA, 25 bp, Homo sapien
aacaggtagtggctataagggcaca

SEQ ID NO: 470773 - DNA, 25 bp, Homo sapien
tctccgtagtattggcgatcgggcc

SEQ ID NO: 470774 - DNA, 25 bp, Homo sapien
gaaatcctccaataggcacaacagg

SEQ ID NO: 470775 - DNA, 25 bp, Homo sapien
ggcacatgttgttgcgtctccgtag

SEQ ID NO: 470776 - DNA, 25 bp, Homo sapien
gtgctctccattgttaatctgtaca

SEQ ID NO: 470777 - DNA, 25 bp, Homo sapien
caccctgggcagaacacctttcagt

SEQ ID NO: 470778 - DNA, 25 bp, Homo sapien
aactcttgacatggagtccctgcac

SEQ ID NO: 470779 - DNA, 25 bp, Homo sapien
tgtgccagactgagggttatgtgct

SEQ ID NO: 470780 - DNA, 25 bp, Homo sapien
gaagggtgtcgcatccaagaagagc

SEQ ID NO: 470781 - DNA, 25 bp, Homo sapien
tccttgggccaaagcctgcatgtgg

SEQ ID NO: 470782 - DNA, 25 bp, Homo sapien
acggctgtcaggtcacgtgctctca

SEQ ID NO: 470783 - DNA, 25 bp, Homo sapien
taattatgacaatgccctgggaccc

SEQ ID NO: 470784 - DNA, 25 bp, Homo sapien
caactactacatgatatgtctgatt

SEQ ID NO: 470785 - DNA, 25 bp, Homo sapien
tttgtgtgtgacaactcctctgact

SEQ ID NO: 470786 - DNA, 25 bp, Homo sapien
tcaactactacatgatatgtctgat

SEQ ID NO: 470787 - DNA, 25 bp, Homo sapien
gtgtgtgacaactcctctgactccc

SEQ ID NO: 470788 - DNA, 25 bp, Homo sapien
tgtggcattcttctacaggggttga

SEQ ID NO: 470789 - DNA, 25 bp, Homo sapien
caaagaccaatcagtgacccacata

SEQ ID NO: 470790 - DNA, 25 bp, Homo sapien
aagaccaatcagtgacccacatagg

SEQ ID NO: 470791 - DNA, 25 bp, Homo sapien
gaccaaagaccaatcagtgacccac

SEQ ID NO: 470792 - DNA, 25 bp, Homo sapien
ctccctgccacgatttgaggtctcc

SEQ ID NO: 470793 - DNA, 25 bp, Homo sapien
cctctctcagttttagtgaggtgaa

SEQ ID NO: 470794 - DNA, 25 bp, Homo sapien
tttagtgaggtgaatgcctggagtt

SEQ ID NO: 470795 - DNA, 25 bp, Homo sapien
tgaatgcctggagttaagcctaggg

SEQ ID NO: 470796 - DNA, 25 bp, Homo sapien
tcattcctgctgtaccactcttggc

SEQ ID NO: 470797 - DNA, 25 bp, Homo sapien
cttcccgctttatattctgtttgcc

SEQ ID NO: 470798 - DNA, 25 bp, Homo sapien
cgctttatattctgtttgccagagt

SEQ ID NO: 470799 - DNA, 25 bp, Homo sapien
cccgctttatattctgtttgccaga

SEQ ID NO: 470800 - DNA, 25 bp, Homo sapien
caggatgtctgttgcatttcacagg

SEQ ID NO: 470801 - DNA, 25 bp, Homo sapien
tcaggatgtctgttgcatttcacag

SEQ ID NO: 470802 - DNA, 25 bp, Homo sapien
taaggcatagggagaatcctatttt

SEQ ID NO: 470803 - DNA, 25 bp, Homo sapien
ggtgaaggtagattaaggcataggg

SEQ ID NO: 470804 - DNA, 25 bp, Homo sapien
gactccatcatacatcaaaccatca

SEQ ID NO: 470805 - DNA, 25 bp, Homo sapien
tctgactccatcatacatcaaacca

SEQ ID NO: 470806 - DNA, 25 bp, Homo sapien
tgacagtttcttcccctaactgcag

SEQ ID NO: 470807 - DNA, 25 bp, Homo sapien
tgggcttaggcaatgtcacttccgc

SEQ ID NO: 470808 - DNA, 25 bp, Homo sapien
gggtagcccatggacaattcctgag

SEQ ID NO: 470809 - DNA, 25 bp, Homo sapien
taaatggtcttttagcaacagctac

SEQ ID NO: 470810 - DNA, 25 bp, Homo sapien
aattccatgtataatatctgagcca

SEQ ID NO: 470811 - DNA, 25 bp, Homo sapien
aatatctgagccaacattaggtcac

SEQ ID NO: 470812 - DNA, 25 bp, Homo sapien
tatgtctaattgtgcatcatattct

SEQ ID NO: 470813 - DNA, 25 bp, Homo sapien
tcagtagagatcatcatgagtatcc

SEQ ID NO: 470814 - DNA, 25 bp, Homo sapien
gcattttcttccgtagaatgctcct

SEQ ID NO: 470815 - DNA, 25 bp, Homo sapien
agtaggcatggtgttttgaagcatc

SEQ ID NO: 470816 - DNA, 25 bp, Homo sapien
ggtgcaaaattttccgttcttgctg

SEQ ID NO: 470817 - DNA, 25 bp, Homo sapien
aaattttccgttcttgctggattct

SEQ ID NO: 470818 - DNA, 25 bp, Homo sapien
atagtcaatgattgtctcaaacatt

SEQ ID NO: 470819 - DNA, 25 bp, Homo sapien
ttctctcctgtactaatagtcaatg

SEQ ID NO: 470820 - DNA, 25 bp, Homo sapien
tcctgtactaatagtcaatgattgt

SEQ ID NO: 470821 - DNA, 25 bp, Homo sapien
tgtactaatagtcaatgattgtctc

SEQ ID NO: 470822 - DNA, 25 bp, Homo sapien
tgcagcatgccaaagtatgttatac

SEQ ID NO: 470823 - DNA, 25 bp, Homo sapien
tacataaccgctgcatcaaatgaag

SEQ ID NO: 470824 - DNA, 25 bp, Homo sapien
gattgtggatttcgctttctgccca

SEQ ID NO: 470825 - DNA, 25 bp, Homo sapien
tgatgtcaaacaaccagacctttgc

SEQ ID NO: 470826 - DNA, 25 bp, Homo sapien
gagatggctcatttgggaacttttc

SEQ ID NO: 470827 - DNA, 25 bp, Homo sapien
ctgagatggctcatttgggaacttt

SEQ ID NO: 470828 - DNA, 25 bp, Homo sapien
catttgggaacttttctttctccat

SEQ ID NO: 470829 - DNA, 25 bp, Homo sapien
gctcatttgggaacttttctttctc

SEQ ID NO: 470830 - DNA, 25 bp, Homo sapien
cgtttctgtccatgtgcttccttaa

SEQ ID NO: 470831 - DNA, 25 bp, Homo sapien
ccattattacatattgtcatgtaac

SEQ ID NO: 470832 - DNA, 25 bp, Homo sapien
tgtatacgtaggaagaggtgtcacg

SEQ ID NO: 470833 - DNA, 25 bp, Homo sapien
tacatattgtcatgtaacaagtcac

SEQ ID NO: 470834 - DNA, 25 bp, Homo sapien
tgactgcagattttgcccataaaaa

SEQ ID NO: 470835 - DNA, 25 bp, Homo sapien
gaagcacaacttttatgagactctt

SEQ ID NO: 470836 - DNA, 25 bp, Homo sapien
aaggtcaagttcaatcctgatggct

SEQ ID NO: 470837 - DNA, 25 bp, Homo sapien
aaaataactctgatgtggcttgaag

SEQ ID NO: 470838 - DNA, 25 bp, Homo sapien
gaaatgacatatatgtgagatacat

SEQ ID NO: 470839 - DNA, 25 bp, Homo sapien
gtctcaaaagccttataccaaagaa

SEQ ID NO: 470840 - DNA, 25 bp, Homo sapien
ctgggtcactgtaaagagtctcaaa

SEQ ID NO: 470841 - DNA, 25 bp, Homo sapien
tatgtgagatacatacgttcctcca

SEQ ID NO: 470842 - DNA, 25 bp, Homo sapien
ttatagatctggcatttattgtaaa

SEQ ID NO: 470843 - DNA, 25 bp, Homo sapien
tttctccatatttatagatctggca

SEQ ID NO: 470844 - DNA, 25 bp, Homo sapien
caaatactaagtattggttttgatc

SEQ ID NO: 470845 - DNA, 25 bp, Homo sapien
aatactaagtattggttttgatctg

SEQ ID NO: 470846 - DNA, 25 bp, Homo sapien
tatctttttccttaagtgtgctcat

SEQ ID NO: 470847 - DNA, 25 bp, Homo sapien
ctctgagaattgtcttaagactatc

SEQ ID NO: 470848 - DNA, 25 bp, Homo sapien
agactatctttttccttaagtgtgc

SEQ ID NO: 470849 - DNA, 25 bp, Homo sapien
tctgagaattgtcttaagactatct

SEQ ID NO: 470850 - DNA, 25 bp, Homo sapien
tgctgaatgaaactgttttgaaatt

SEQ ID NO: 470851 - DNA, 25 bp, Homo sapien
ttactcagttgctgaatgaaactgt

SEQ ID NO: 470852 - DNA, 25 bp, Homo sapien
gttgctgaatgaaactgttttgaaa

SEQ ID NO: 470853 - DNA, 25 bp, Homo sapien
cagttgctgaatgaaactgttttga

SEQ ID NO: 470854 - DNA, 25 bp, Homo sapien
gcaggacacattgctccaattttgg

SEQ ID NO: 470855 - DNA, 25 bp, Homo sapien
ggttctgaacataatgagcctgcat

SEQ ID NO: 470856 - DNA, 25 bp, Homo sapien
caggacacattgctccaattttggt

SEQ ID NO: 470857 - DNA, 25 bp, Homo sapien
tatgagtaataggaagtgatccagc

SEQ ID NO: 470858 - DNA, 25 bp, Homo sapien
taaaaagacacacgtttaatgggca

SEQ ID NO: 470859 - DNA, 25 bp, Homo sapien
tgtaaataaccctgttatgagtaat

SEQ ID NO: 470860 - DNA, 25 bp, Homo sapien
acgtttaatgggcaattcctggtgg

SEQ ID NO: 470861 - DNA, 25 bp, Homo sapien
tggttttcgaagaactctggagccc

SEQ ID NO: 470862 - DNA, 25 bp, Homo sapien
tctggagccctgtgtgttggtgggc

SEQ ID NO: 470863 - DNA, 25 bp, Homo sapien
ttctggtggttttcgaagaactctg

SEQ ID NO: 470864 - DNA, 25 bp, Homo sapien
agccctgtgtgttggtgggcaaaga

SEQ ID NO: 470865 - DNA, 25 bp, Homo sapien
tgactttttcgacatggtagtaaaa

SEQ ID NO: 470866 - DNA, 25 bp, Homo sapien
tgtgactttttcgacatggtagtaa

SEQ ID NO: 470867 - DNA, 25 bp, Homo sapien
catgtgactttttcgacatggtagt

SEQ ID NO: 470868 - DNA, 25 bp, Homo sapien
agcatgtgactttttcgacatggta

SEQ ID NO: 470869 - DNA, 25 bp, Homo sapien
tagtatggattgttttgaaaaccag

SEQ ID NO: 470870 - DNA, 25 bp, Homo sapien
cagtctgagtcactagacacaggac

SEQ ID NO: 470871 - DNA, 25 bp, Homo sapien
gaggttgctgatagactgcttcatt

SEQ ID NO: 470872 - DNA, 25 bp, Homo sapien
tcatagtaggccacgggtcgctagg

SEQ ID NO: 470873 - DNA, 25 bp, Homo sapien
aaatacagccttgccaccctcaaga

SEQ ID NO: 470874 - DNA, 25 bp, Homo sapien
tacacagtcaaatacagccttgcca

SEQ ID NO: 470875 - DNA, 25 bp, Homo sapien
tggtacacagtcaaatacagccttg

SEQ ID NO: 470876 - DNA, 25 bp, Homo sapien
aatggtacacagtcaaatacagcct

SEQ ID NO: 470877 - DNA, 25 bp, Homo sapien
gcagagcccctggtacagtgtgaaa

SEQ ID NO: 470878 - DNA, 25 bp, Homo sapien
gagcccctggtacagtgtgaaaaca

SEQ ID NO: 470879 - DNA, 25 bp, Homo sapien
gaagcagagcccctggtacagtgtg

SEQ ID NO: 470880 - DNA, 25 bp, Homo sapien
gcccctggtacagtgtgaaaacaaa

SEQ ID NO: 470881 - DNA, 25 bp, Homo sapien
tgactccggtagtcctttagaatgc

SEQ ID NO: 470882 - DNA, 25 bp, Homo sapien
ttgactccggtagtcctttagaatg

SEQ ID NO: 470883 - DNA, 25 bp, Homo sapien
cttgactccggtagtcctttagaat

SEQ ID NO: 470884 - DNA, 25 bp, Homo sapien
aagaggcctggagtgttgatgacaa

SEQ ID NO: 470885 - DNA, 25 bp, Homo sapien
ctggactgcccatcattgtaatgag

SEQ ID NO: 470886 - DNA, 25 bp, Homo sapien
gggtatcaatatgcccaactgccaa

SEQ ID NO: 470887 - DNA, 25 bp, Homo sapien
ccaatcccttaagttgtagtagagg

SEQ ID NO: 470888 - DNA, 25 bp, Homo sapien
atttgtagttccttgatagcttcat

SEQ ID NO: 470889 - DNA, 25 bp, Homo sapien
agttccttgatagcttcataatctg

SEQ ID NO: 470890 - DNA, 25 bp, Homo sapien
gtagttccttgatagcttcataatc

SEQ ID NO: 470891 - DNA, 25 bp, Homo sapien
ttgtagttccttgatagcttcataa

SEQ ID NO: 470892 - DNA, 25 bp, Homo sapien
gggcagcaacgtcatccttacctac

SEQ ID NO: 470893 - DNA, 25 bp, Homo sapien
tgagggcagcaacgtcatccttacc

SEQ ID NO: 470894 - DNA, 25 bp, Homo sapien
aatgagggcagcaacgtcatcctta

SEQ ID NO: 470895 - DNA, 25 bp, Homo sapien
caaaatgagggcagcaacgtcatcc

SEQ ID NO: 470896 - DNA, 25 bp, Homo sapien
gcagttccctcttcggtctgctgca

SEQ ID NO: 470897 - DNA, 25 bp, Homo sapien
catctggcagttccctcttcggtct

SEQ ID NO: 470898 - DNA, 25 bp, Homo sapien
agttccctcttcggtctgctgcacc

SEQ ID NO: 470899 - DNA, 25 bp, Homo sapien
tggcagttccctcttcggtctgctg

SEQ ID NO: 470900 - DNA, 25 bp, Homo sapien
caggcagcagaatcaaattccccac

SEQ ID NO: 470901 - DNA, 25 bp, Homo sapien
tcaggcagcagaatcaaattcccca

SEQ ID NO: 470902 - DNA, 25 bp, Homo sapien
tgggcaaaggctatgaggtatgttc

SEQ ID NO: 470903 - DNA, 25 bp, Homo sapien
ggaagaaggacattgcaggtgtatc

SEQ ID NO: 470904 - DNA, 25 bp, Homo sapien
caggtgtatcgaccagcatgggcaa

SEQ ID NO: 470905 - DNA, 25 bp, Homo sapien
agcatgggcaaaggctatgaggtat

SEQ ID NO: 470906 - DNA, 25 bp, Homo sapien
gaactgttccctgcgtaagacttag

SEQ ID NO: 470907 - DNA, 25 bp, Homo sapien
gaccgtgatggatactcaagctctg

SEQ ID NO: 470908 - DNA, 25 bp, Homo sapien
tgtgtgacaaccctaacatcccaac

SEQ ID NO: 470909 - DNA, 25 bp, Homo sapien
caaccaagatgtaacggatggaccg

SEQ ID NO: 470910 - DNA, 25 bp, Homo sapien
gagattatggacaattttggcttga

SEQ ID NO: 470911 - DNA, 25 bp, Homo sapien
cctgaacagcagctctacgactggg

SEQ ID NO: 470912 - DNA, 25 bp, Homo sapien
cattacagctgccaactttggtctt

SEQ ID NO: 470913 - DNA, 25 bp, Homo sapien
gggactgcagatcttaccctgaaca

SEQ ID NO: 470914 - DNA, 25 bp, Homo sapien
aactggttttggcatggggtcatga

SEQ ID NO: 470915 - DNA, 25 bp, Homo sapien
catgattaacatatttgcatgatta

SEQ ID NO: 470916 - DNA, 25 bp, Homo sapien
gcatgattattgctggcacagagca

SEQ ID NO: 470917 - DNA, 25 bp, Homo sapien
ctgaatcatggacagttcacttttt

SEQ ID NO: 470918 - DNA, 25 bp, Homo sapien
aattgcatgtaaattccattgagac

SEQ ID NO: 470919 - DNA, 25 bp, Homo sapien
gagactcactgctccggaggttagg

SEQ ID NO: 470920 - DNA, 25 bp, Homo sapien
ttcccagtatatttgccaaagagct

SEQ ID NO: 470921 - DNA, 25 bp, Homo sapien
cattttcaatctggatcttcccagt

SEQ ID NO: 470922 - DNA, 25 bp, Homo sapien
gctgtactcatctatatgcagtgac

SEQ ID NO: 470923 - DNA, 25 bp, Homo sapien
actgaagaccctagagcttgtgcca

SEQ ID NO: 470924 - DNA, 25 bp, Homo sapien
tagagcttgtgccaagagctccttc

SEQ ID NO: 470925 - DNA, 25 bp, Homo sapien
tgacggtctgtgttcccgacatgag

SEQ ID NO: 470926 - DNA, 25 bp, Homo sapien
ttcagggaccagagtgagatgattt

SEQ ID NO: 470927 - DNA, 25 bp, Homo sapien
ttacagttgctgtgaattcagggac

SEQ ID NO: 470928 - DNA, 25 bp, Homo sapien
gctgtgaattcagggaccagagtga

SEQ ID NO: 470929 - DNA, 25 bp, Homo sapien
ccagagtgagatgattttgttagca

SEQ ID NO: 470930 - DNA, 25 bp, Homo sapien
ttggcagcagctctatgctgacttt

SEQ ID NO: 470931 - DNA, 25 bp, Homo sapien
aagttctgcttagcttttacagatc

SEQ ID NO: 470932 - DNA, 25 bp, Homo sapien
cttggcagcagctctatgctgactt

SEQ ID NO: 470933 - DNA, 25 bp, Homo sapien
ccaagctctgtgagaatgtaaagtt

SEQ ID NO: 470934 - DNA, 25 bp, Homo sapien
tcacactgctcagtgtctgattgtc

SEQ ID NO: 470935 - DNA, 25 bp, Homo sapien
agtgtctgattgtccaccctgggca

SEQ ID NO: 470936 - DNA, 25 bp, Homo sapien
tcagtgtctgattgtccaccctggg

SEQ ID NO: 470937 - DNA, 25 bp, Homo sapien
gtctgattgtccaccctgggcatcc

SEQ ID NO: 470938 - DNA, 25 bp, Homo sapien
tgtgctgtcttcctcatatggccta

SEQ ID NO: 470939 - DNA, 25 bp, Homo sapien
tcttcctcatatggcctaggctctg

SEQ ID NO: 470940 - DNA, 25 bp, Homo sapien
tgctgtcttcctcatatggcctagg

SEQ ID NO: 470941 - DNA, 25 bp, Homo sapien
cctcatatggcctaggctctgctac

SEQ ID NO: 470942 - DNA, 25 bp, Homo sapien
gcaccaaccctgaagcacaggcact

SEQ ID NO: 470943 - DNA, 25 bp, Homo sapien
tgtatcctgcaccaaccctgaagca

SEQ ID NO: 470944 - DNA, 25 bp, Homo sapien
cttgtatcctgcaccaaccctgaag

SEQ ID NO: 470945 - DNA, 25 bp, Homo sapien
accaaccctgaagcacaggcacttc

SEQ ID NO: 470946 - DNA, 25 bp, Homo sapien
agaagttctgggctaaagacccaag

SEQ ID NO: 470947 - DNA, 25 bp, Homo sapien
ctgggctaaagacccaagagccttt

SEQ ID NO: 470948 - DNA, 25 bp, Homo sapien
gggctaaagacccaagagcctttca

SEQ ID NO: 470949 - DNA, 25 bp, Homo sapien
agttctgggctaaagacccaagagc

SEQ ID NO: 470950 - DNA, 25 bp, Homo sapien
tttgtgactaaatggacaggcacag

SEQ ID NO: 470951 - DNA, 25 bp, Homo sapien
tagtagcagactacacatgcttagc

SEQ ID NO: 470952 - DNA, 25 bp, Homo sapien
caaaggagccctcagtttgtgacta

SEQ ID NO: 470953 - DNA, 25 bp, Homo sapien
tacttgagagtctgagaatcacttg

SEQ ID NO: 470954 - DNA, 25 bp, Homo sapien
gcctcgatttcagcgtttgatattg

SEQ ID NO: 470955 - DNA, 25 bp, Homo sapien
actgcctcgatttcagcgtttgata

SEQ ID NO: 470956 - DNA, 25 bp, Homo sapien
gatttcagcgtttgatattgatcta

SEQ ID NO: 470957 - DNA, 25 bp, Homo sapien
attactgcctcgatttcagcgtttg

SEQ ID NO: 470958 - DNA, 25 bp, Homo sapien
tgctccctgtattagctctgtcaga

SEQ ID NO: 470959 - DNA, 25 bp, Homo sapien
tattgtgggatcaacagcatgctcc

SEQ ID NO: 470960 - DNA, 25 bp, Homo sapien
tctgtcagaactatgggtccttcca

SEQ ID NO: 470961 - DNA, 25 bp, Homo sapien
tgagcgtctgcctaatggttgctgg

SEQ ID NO: 470962 - DNA, 25 bp, Homo sapien
aatctccgtggaaaattggctgtca

SEQ ID NO: 470963 - DNA, 25 bp, Homo sapien
ggctgtcacatggaacgagatatat

SEQ ID NO: 470964 - DNA, 25 bp, Homo sapien
cctggaataagatgtaactgctgta

SEQ ID NO: 470965 - DNA, 25 bp, Homo sapien
tatatactaactgattttgccgtgc

SEQ ID NO: 470966 - DNA, 25 bp, Homo sapien
gtgacagccagtatcccaagactag

SEQ ID NO: 470967 - DNA, 25 bp, Homo sapien
ggtaatcaggttctaggtcctctca

SEQ ID NO: 470968 - DNA, 25 bp, Homo sapien
tctattagaaacctcgcattgctgc

SEQ ID NO: 470969 - DNA, 25 bp, Homo sapien
aagggtcattcacccgtgggtctca

SEQ ID NO: 470970 - DNA, 25 bp, Homo sapien
gctgataacacttttccgtttctgt

SEQ ID NO: 470971 - DNA, 25 bp, Homo sapien
tggattctggaaactggccacttcc

SEQ ID NO: 470972 - DNA, 25 bp, Homo sapien
ctttactgtgacaattagaactgcc

SEQ ID NO: 470973 - DNA, 25 bp, Homo sapien
gaactgccttctataagctgataac

SEQ ID NO: 470974 - DNA, 25 bp, Homo sapien
cctgaggtactcttctaccacttct

SEQ ID NO: 470975 - DNA, 25 bp, Homo sapien
cagggcctgaggtactcttctacca

SEQ ID NO: 470976 - DNA, 25 bp, Homo sapien
gggcctgaggtactcttctaccact

SEQ ID NO: 470977 - DNA, 25 bp, Homo sapien
acagggcctgaggtactcttctacc

SEQ ID NO: 470978 - DNA, 25 bp, Homo sapien
tctaatggcccacaccttcagactg

SEQ ID NO: 470979 - DNA, 25 bp, Homo sapien
gagttagagacagaattcctagagc

SEQ ID NO: 470980 - DNA, 25 bp, Homo sapien
ccttctgcagactgtcggctcctgg

SEQ ID NO: 470981 - DNA, 25 bp, Homo sapien
tcttgcttctaatggcccacacctt

SEQ ID NO: 470982 - DNA, 25 bp, Homo sapien
cgttcccaggctggtaacagagtcc

SEQ ID NO: 470983 - DNA, 25 bp, Homo sapien
gctggtaacagagtccgtgtattca

SEQ ID NO: 470984 - DNA, 25 bp, Homo sapien
tccgtgtattcattggaactttgcc

SEQ ID NO: 470985 - DNA, 25 bp, Homo sapien
aacagagtccgtgtattcattggaa

SEQ ID NO: 470986 - DNA, 25 bp, Homo sapien
ttatttgaatccgagccccactgag

SEQ ID NO: 470987 - DNA, 25 bp, Homo sapien
aggtgtcttcagaccttggtgttct

SEQ ID NO: 470988 - DNA, 25 bp, Homo sapien
ttccccttcttccacaagtaatgct

SEQ ID NO: 470989 - DNA, 25 bp, Homo sapien
gaccagagttcccttatttgaatcc

SEQ ID NO: 470990 - DNA, 25 bp, Homo sapien
ctcctctgaggatgaccgtggctgc

SEQ ID NO: 470991 - DNA, 25 bp, Homo sapien
atgaccgtggctgctacaatcgctt

SEQ ID NO: 470992 - DNA, 25 bp, Homo sapien
ccgtggctgctacaatcgcttttgt

SEQ ID NO: 470993 - DNA, 25 bp, Homo sapien
tctcctctgaggatgaccgtggctg

SEQ ID NO: 470994 - DNA, 25 bp, Homo sapien
tcccatggaagcagatggtgctgcc

SEQ ID NO: 470995 - DNA, 25 bp, Homo sapien
ggagacagttgtccacagcttggca

SEQ ID NO: 470996 - DNA, 25 bp, Homo sapien
taaagctgccaaccaaatgcctggg

SEQ ID NO: 470997 - DNA, 25 bp, Homo sapien
catctgggctttgagtgctgtccag

SEQ ID NO: 470998 - DNA, 25 bp, Homo sapien
gtatacagctttaggcccctcccca

SEQ ID NO: 470999 - DNA, 25 bp, Homo sapien
ccagtctgttttccatagccgtcaa

SEQ ID NO: 471000 - DNA, 25 bp, Homo sapien
ttccatagccgtcaatgttttctac

SEQ ID NO: 471001 - DNA, 25 bp, Homo sapien
tgctctgtgccgtggggtatacagc

SEQ ID NO: 471002 - DNA, 25 bp, Homo sapien
tcacattaatcacccgtaaggatgc

SEQ ID NO: 471003 - DNA, 25 bp, Homo sapien
gtagcagcagccagaaagagatagg

SEQ ID NO: 471004 - DNA, 25 bp, Homo sapien
ttttctataataggctcatcagaag

SEQ ID NO: 471005 - DNA, 25 bp, Homo sapien
cacatattgtaatcaagttccctaa

SEQ ID NO: 471006 - DNA, 25 bp, Homo sapien
gaggatagaagaagtttccccaggc

SEQ ID NO: 471007 - DNA, 25 bp, Homo sapien
tatctctcagtgagggagaagagcc

SEQ ID NO: 471008 - DNA, 25 bp, Homo sapien
gatctcccagttgttattggaccaa

SEQ ID NO: 471009 - DNA, 25 bp, Homo sapien
gagatcaatacactgacacagcagg

SEQ ID NO: 471010 - DNA, 25 bp, Homo sapien
gaatggagcctttcaattctgctgc

SEQ ID NO: 471011 - DNA, 25 bp, Homo sapien
aactgtcaattcactgagctgtggc

SEQ ID NO: 471012 - DNA, 25 bp, Homo sapien
gacccgccagggtgaaacatgaaat

SEQ ID NO: 471013 - DNA, 25 bp, Homo sapien
taacggaactgagagaaccaccaaa

SEQ ID NO: 471014 - DNA, 25 bp, Homo sapien
attccatgtacaaagccatctgcgt

SEQ ID NO: 471015 - DNA, 25 bp, Homo sapien
tgcgtggctaacctcagtgtcaata

SEQ ID NO: 471016 - DNA, 25 bp, Homo sapien
ctaacctcagtgtcaataggacaga

SEQ ID NO: 471017 - DNA, 25 bp, Homo sapien
atctgcgtggctaacctcagtgtca

SEQ ID NO: 471018 - DNA, 25 bp, Homo sapien
tcttgttaatggaagaggtgacctt

SEQ ID NO: 471019 - DNA, 25 bp, Homo sapien
tctctgtcagcacttaaccggcaag

SEQ ID NO: 471020 - DNA, 25 bp, Homo sapien
ttttgagggtctaaccctgtctgct

SEQ ID NO: 471021 - DNA, 25 bp, Homo sapien
ccttagcccttatcaagtgacatca

SEQ ID NO: 471022 - DNA, 25 bp, Homo sapien
catttgctgtaagctaatgttacca

SEQ ID NO: 471023 - DNA, 25 bp, Homo sapien
tgtaagctaatgttaccacgaggcc

SEQ ID NO: 471024 - DNA, 25 bp, Homo sapien
taccacgaggccagtgttgggataa

SEQ ID NO: 471025 - DNA, 25 bp, Homo sapien
gctaatgttaccacgaggccagtgt

SEQ ID NO: 471026 - DNA, 25 bp, Homo sapien
gtaccactctctttgaacagttttg

SEQ ID NO: 471027 - DNA, 25 bp, Homo sapien
tgacattacggtcattttcatggca

SEQ ID NO: 471028 - DNA, 25 bp, Homo sapien
ttaccagaagcactcgtaccactct

SEQ ID NO: 471029 - DNA, 25 bp, Homo sapien
ccatcttcttgtggataattaccag

SEQ ID NO: 471030 - DNA, 25 bp, Homo sapien
acaatttcattttccgtgtagacac

SEQ ID NO: 471031 - DNA, 25 bp, Homo sapien
ccgtgtagacacgagcttctctcat

SEQ ID NO: 471032 - DNA, 25 bp, Homo sapien
cattttccgtgtagacacgagcttc

SEQ ID NO: 471033 - DNA, 25 bp, Homo sapien
tggacaacataaagagttcctttta

SEQ ID NO: 471034 - DNA, 25 bp, Homo sapien
gtatagctttatctcaactctggcc

SEQ ID NO: 471035 - DNA, 25 bp, Homo sapien
cttttaatcagaaaccaggtgctaa

SEQ ID NO: 471036 - DNA, 25 bp, Homo sapien
acttaccatggatcaagcattggga

SEQ ID NO: 471037 - DNA, 25 bp, Homo sapien
tagtagaccaagagaaataagttcc

SEQ ID NO: 471038 - DNA, 25 bp, Homo sapien
cacatgtagatttaggaagagatga

SEQ ID NO: 471039 - DNA, 25 bp, Homo sapien
atgacttgattttggtttatctgca

SEQ ID NO: 471040 - DNA, 25 bp, Homo sapien
taggaagagatgatgtacaaaacaa

SEQ ID NO: 471041 - DNA, 25 bp, Homo sapien
gtttcacatgtagatttaggaagag

SEQ ID NO: 471042 - DNA, 25 bp, Homo sapien
aagtgcttcaaaatatgtgatgtga

SEQ ID NO: 471043 - DNA, 25 bp, Homo sapien
tgcttcaaaatatgtgatgtgaaaa

SEQ ID NO: 471044 - DNA, 25 bp, Homo sapien
aaaagtgcttcaaaatatgtgatgt

SEQ ID NO: 471045 - DNA, 25 bp, Homo sapien
caaaaagtgcttcaaaatatgtgat

SEQ ID NO: 471046 - DNA, 25 bp, Homo sapien
cctgtgttattcttcagaataggta

SEQ ID NO: 471047 - DNA, 25 bp, Homo sapien
gaaggtatgtggacaagttgtaaca

SEQ ID NO: 471048 - DNA, 25 bp, Homo sapien
tagagtgcaaatgttgatataatcc

SEQ ID NO: 471049 - DNA, 25 bp, Homo sapien
agaataggtacatagagtgcaaatg

SEQ ID NO: 471050 - DNA, 25 bp, Homo sapien
ttgtccttcgtcagttaccttgtca

SEQ ID NO: 471051 - DNA, 25 bp, Homo sapien
gtttttagcttccagggctggatat

SEQ ID NO: 471052 - DNA, 25 bp, Homo sapien
taaatgatgtccagcagagcacggt

SEQ ID NO: 471053 - DNA, 25 bp, Homo sapien
tgttctcagttaaaccctgttccat

SEQ ID NO: 471054 - DNA, 25 bp, Homo sapien
gcctccatttgtgcttacataccat

SEQ ID NO: 471055 - DNA, 25 bp, Homo sapien
tagaaccaaagtgttgcctccattt

SEQ ID NO: 471056 - DNA, 25 bp, Homo sapien
ggatagctcatccattggcgttttt

SEQ ID NO: 471057 - DNA, 25 bp, Homo sapien
aatctctcaggcaatctccttcata

SEQ ID NO: 471058 - DNA, 25 bp, Homo sapien
cttactttgcttatcttatacttaa

SEQ ID NO: 471059 - DNA, 25 bp, Homo sapien
cagtgtgcccttgaatccatacagt

SEQ ID NO: 471060 - DNA, 25 bp, Homo sapien
caattactttatgggtgtgatgcac

SEQ ID NO: 471061 - DNA, 25 bp, Homo sapien
tgacttgttatagctcagtgtgccc

SEQ ID NO: 471062 - DNA, 25 bp, Homo sapien
tgatgcaccgatggtagccaaggaa

SEQ ID NO: 471063 - DNA, 25 bp, Homo sapien
tcacagtgtgcaattttgaggattc

SEQ ID NO: 471064 - DNA, 25 bp, Homo sapien
actcttaagaggcttacagggaata

SEQ ID NO: 471065 - DNA, 25 bp, Homo sapien
cttaagaggcttacagggaatagca

SEQ ID NO: 471066 - DNA, 25 bp, Homo sapien
ctctgtgtggtacaatatgtaaatg

SEQ ID NO: 471067 - DNA, 25 bp, Homo sapien
taaacgaagaggacacgtggcagga

SEQ ID NO: 471068 - DNA, 25 bp, Homo sapien
tattgggtttgcatctacttctggc

SEQ ID NO: 471069 - DNA, 25 bp, Homo sapien
actgacagagtcaagaaggcctgag

SEQ ID NO: 471070 - DNA, 25 bp, Homo sapien
gggtaggcgtaaggcaatccaacac

SEQ ID NO: 471071 - DNA, 25 bp, Homo sapien
ttcatggacagagatatatactttg

SEQ ID NO: 471072 - DNA, 25 bp, Homo sapien
tacctagtctccattaaatttggca

SEQ ID NO: 471073 - DNA, 25 bp, Homo sapien
tgaataactgtccttgaggtttacc

SEQ ID NO: 471074 - DNA, 25 bp, Homo sapien
taaaaattacaagtagttcatggac

SEQ ID NO: 471075 - DNA, 25 bp, Homo sapien
gatgatgaagtactttgtggtatag

SEQ ID NO: 471076 - DNA, 25 bp, Homo sapien
gatagatactacttctattcactga

SEQ ID NO: 471077 - DNA, 25 bp, Homo sapien
attcagattaggcatccatttccag

SEQ ID NO: 471078 - DNA, 25 bp, Homo sapien
ggttactatttttaagcaggctgag

SEQ ID NO: 471079 - DNA, 25 bp, Homo sapien
caattcaccagtattgaagcagact

SEQ ID NO: 471080 - DNA, 25 bp, Homo sapien
gagtatctagttatctaacggctga

SEQ ID NO: 471081 - DNA, 25 bp, Homo sapien
gaataacgtgtaatcttgtaaccaa

SEQ ID NO: 471082 - DNA, 25 bp, Homo sapien
taaaatccacaccaaaggactatgt

SEQ ID NO: 471083 - DNA, 25 bp, Homo sapien
tcacatgttagcacagatacctgac

SEQ ID NO: 471084 - DNA, 25 bp, Homo sapien
gaatgttctagcagtatatcccaaa

SEQ ID NO: 471085 - DNA, 25 bp, Homo sapien
tagctttggcccttgccaggtaagg

SEQ ID NO: 471086 - DNA, 25 bp, Homo sapien
gaaatacttggtctagcaagcggaa

SEQ ID NO: 471087 - DNA, 25 bp, Homo sapien
gaaacaagatagaaggcacctgcac

SEQ ID NO: 471088 - DNA, 25 bp, Homo sapien
taccatgatgaaaacagccccaaac

SEQ ID NO: 471089 - DNA, 25 bp, Homo sapien
atggagttgaggtccccaagacaga

SEQ ID NO: 471090 - DNA, 25 bp, Homo sapien
tgacaagcgatgaagtaccatgatg

SEQ ID NO: 471091 - DNA, 25 bp, Homo sapien
gatgtattgccttgtctcgaatgca

SEQ ID NO: 471092 - DNA, 25 bp, Homo sapien
tatccccagcttttcttcgttgaag

SEQ ID NO: 471093 - DNA, 25 bp, Homo sapien
taaatggctatctagagtcaagact

SEQ ID NO: 471094 - DNA, 25 bp, Homo sapien
tcttgttgctaggagtgcacctgct

SEQ ID NO: 471095 - DNA, 25 bp, Homo sapien
ttagtagagtaaccgaatgtcttgt

SEQ ID NO: 471096 - DNA, 25 bp, Homo sapien
taattgttgcatgtgggcccttttg

SEQ ID NO: 471097 - DNA, 25 bp, Homo sapien
tgaggtatagttgtagtgtccatgg

SEQ ID NO: 471098 - DNA, 25 bp, Homo sapien
gatggtgcagtggtatttgcatcac

SEQ ID NO: 471099 - DNA, 25 bp, Homo sapien
tatggccccttaaatatgtgcttgc

SEQ ID NO: 471100 - DNA, 25 bp, Homo sapien
taaagttaaggacctcgagatgcag

SEQ ID NO: 471101 - DNA, 25 bp, Homo sapien
aggaggactcaacccgctattgccg

SEQ ID NO: 471102 - DNA, 25 bp, Homo sapien
ccacaaggctgggaatttgcatgtc

SEQ ID NO: 471103 - DNA, 25 bp, Homo sapien
gagtaggtctttatccatgggtgaa

SEQ ID NO: 471104 - DNA, 25 bp, Homo sapien
gccctgcatgcctgaaacagactct

SEQ ID NO: 471105 - DNA, 25 bp, Homo sapien
aaggcagttcagtctgctggtttgg

SEQ ID NO: 471106 - DNA, 25 bp, Homo sapien
ttggtttattttagccctgcatgcc

SEQ ID NO: 471107 - DNA, 25 bp, Homo sapien
acagctgtcaaatcaattgcacggc

SEQ ID NO: 471108 - DNA, 25 bp, Homo sapien
tggtgggcaagtgtaaccatcccca

SEQ ID NO: 471109 - DNA, 25 bp, Homo sapien
tcaaatcaattgcacggctgctggt

SEQ ID NO: 471110 - DNA, 25 bp, Homo sapien
ggtgggcaagtgtaaccatccccat

SEQ ID NO: 471111 - DNA, 25 bp, Homo sapien
atcattactgctctgaaggttggct

SEQ ID NO: 471112 - DNA, 25 bp, Homo sapien
tggctgtgttccatcaaagaccaaa

SEQ ID NO: 471113 - DNA, 25 bp, Homo sapien
ggagggggcctactgtcatcattac

SEQ ID NO: 471114 - DNA, 25 bp, Homo sapien
ctcttaggatgcaggagtgtatagg

SEQ ID NO: 471115 - DNA, 25 bp, Homo sapien
catttttagttatctgaagcttttt

SEQ ID NO: 471116 - DNA, 25 bp, Homo sapien
ccttttcattcttcatagctaacct

SEQ ID NO: 471117 - DNA, 25 bp, Homo sapien
tcctttagaaactctgtgacaattc

SEQ ID NO: 471118 - DNA, 25 bp, Homo sapien
tatgttcctttagaaactctgtgac

SEQ ID NO: 471119 - DNA, 25 bp, Homo sapien
tctgtgacaattcttgccttttcat

SEQ ID NO: 471120 - DNA, 25 bp, Homo sapien
gaatcacggatgtagagacagggaa

SEQ ID NO: 471121 - DNA, 25 bp, Homo sapien
tcctggtctctgcagttgtggtagc

SEQ ID NO: 471122 - DNA, 25 bp, Homo sapien
gcgaagttgactggaaaaagcctcc

SEQ ID NO: 471123 - DNA, 25 bp, Homo sapien
gcctccctgttagtttggattgaca

SEQ ID NO: 471124 - DNA, 25 bp, Homo sapien
tacctgcacatggttgtgtgcccag

SEQ ID NO: 471125 - DNA, 25 bp, Homo sapien
tcacactgagcgagatcttacctgc

SEQ ID NO: 471126 - DNA, 25 bp, Homo sapien
caaggaatttaagtccacaggagca

SEQ ID NO: 471127 - DNA, 25 bp, Homo sapien
caggagcagattaatgtctactggc

SEQ ID NO: 471128 - DNA, 25 bp, Homo sapien
aatcgcagtcaaatccttaaccggt

SEQ ID NO: 471129 - DNA, 25 bp, Homo sapien
agttctcaatcgcagtcaaatcctt

SEQ ID NO: 471130 - DNA, 25 bp, Homo sapien
tcaatcgcagtcaaatccttaaccg

SEQ ID NO: 471131 - DNA, 25 bp, Homo sapien
cgcagtcaaatccttaaccggtttg

SEQ ID NO: 471132 - DNA, 25 bp, Homo sapien
gacgaccccgagtcgcagatggcct

SEQ ID NO: 471133 - DNA, 25 bp, Homo sapien
taaggaccgactgaggtttggctgc

SEQ ID NO: 471134 - DNA, 25 bp, Homo sapien
agatggcctgccacgttttccgcgc

SEQ ID NO: 471135 - DNA, 25 bp, Homo sapien
ctgatcaaggcgcagcccgacgacc

SEQ ID NO: 471136 - DNA, 25 bp, Homo sapien
atatctcgcgcttcatccacaacag

SEQ ID NO: 471137 - DNA, 25 bp, Homo sapien
ccggcggtattcatcttcgagcaca

SEQ ID NO: 471138 - DNA, 25 bp, Homo sapien
tattcatcttcgagcacaaggcgca

SEQ ID NO: 471139 - DNA, 25 bp, Homo sapien
agcacaaggcgcagcatatctcgcg

SEQ ID NO: 471140 - DNA, 25 bp, Homo sapien
agccgcgcccgtggaagtgctgcat

SEQ ID NO: 471141 - DNA, 25 bp, Homo sapien
ttggcacagtttcggcggcgccttc

SEQ ID NO: 471142 - DNA, 25 bp, Homo sapien
gaggaggatgcccatttaacccgcc

SEQ ID NO: 471143 - DNA, 25 bp, Homo sapien
tgcattcaggatgagccgttcccgc

SEQ ID NO: 471144 - DNA, 25 bp, Homo sapien
tgctgtatgtcctggtaggtgtagc

SEQ ID NO: 471145 - DNA, 25 bp, Homo sapien
tcagcgaacatggtcactgccttgt

SEQ ID NO: 471146 - DNA, 25 bp, Homo sapien
tacatgaggatatatccagtgctcc

SEQ ID NO: 471147 - DNA, 25 bp, Homo sapien
cagttcactgactctggtttgtctc

SEQ ID NO: 471148 - DNA, 25 bp, Homo sapien
catatgaacataggtaccagaagga

SEQ ID NO: 471149 - DNA, 25 bp, Homo sapien
cttggccatcagcatttgtgttcct

SEQ ID NO: 471150 - DNA, 25 bp, Homo sapien
gccaggtaggctaaatcattctcaa

SEQ ID NO: 471151 - DNA, 25 bp, Homo sapien
gggcacaatgcagccaggtgctttg

SEQ ID NO: 471152 - DNA, 25 bp, Homo sapien
atgtggtaagttctccatagtaaga

SEQ ID NO: 471153 - DNA, 25 bp, Homo sapien
tgagtccccaatgcctacagggaaa

SEQ ID NO: 471154 - DNA, 25 bp, Homo sapien
agtccccaatgcctacagggaaagt

SEQ ID NO: 471155 - DNA, 25 bp, Homo sapien
taagtgagttaatgtggtaagttct

SEQ ID NO: 471156 - DNA, 25 bp, Homo sapien
acagtgtcttgatggcagctctccg

SEQ ID NO: 471157 - DNA, 25 bp, Homo sapien
tgagtggaacttagcattgcacgcc

SEQ ID NO: 471158 - DNA, 25 bp, Homo sapien
ccatcaaggagttgtacaggctaaa

SEQ ID NO: 471159 - DNA, 25 bp, Homo sapien
ctgagaaacaaataggcaacccttt

SEQ ID NO: 471160 - DNA, 25 bp, Homo sapien
tcatgactgtaagctcagggctttg

SEQ ID NO: 471161 - DNA, 25 bp, Homo sapien
tattagaattaatgtgagagtcagc

SEQ ID NO: 471162 - DNA, 25 bp, Homo sapien
tgaagaaattacaggccagccatgg

SEQ ID NO: 471163 - DNA, 25 bp, Homo sapien
gagtcagcaaggtgattccattgtt

SEQ ID NO: 471164 - DNA, 25 bp, Homo sapien
gcttagttatatgatttagtgcatt

SEQ ID NO: 471165 - DNA, 25 bp, Homo sapien
tagtgcatttcgagtcaatctttca

SEQ ID NO: 471166 - DNA, 25 bp, Homo sapien
tttcgagtcaatctttcataagtca

SEQ ID NO: 471167 - DNA, 25 bp, Homo sapien
tatgatttagtgcatttcgagtcaa

SEQ ID NO: 471168 - DNA, 25 bp, Homo sapien
gttctctcgagtccgggccgcaagt

SEQ ID NO: 471169 - DNA, 25 bp, Homo sapien
gcaggacgtggaagcggaagcgctg

SEQ ID NO: 471170 - DNA, 25 bp, Homo sapien
ccgccgctggatgctaagtccgatg

SEQ ID NO: 471171 - DNA, 25 bp, Homo sapien
tgagttccaacctggaaggagagtg

SEQ ID NO: 471172 - DNA, 25 bp, Homo sapien
tatactcacctaacactttggcttg

SEQ ID NO: 471173 - DNA, 25 bp, Homo sapien
ccagctcgtgatgggcttagttgca

SEQ ID NO: 471174 - DNA, 25 bp, Homo sapien
catcgttatctaatggattgctgct

SEQ ID NO: 471175 - DNA, 25 bp, Homo sapien
gcagtgtccagctcgtgatgggctt

SEQ ID NO: 471176 - DNA, 25 bp, Homo sapien
ttctgagacagacgccaggtggcta

SEQ ID NO: 471177 - DNA, 25 bp, Homo sapien
gcagcgggtgtttctatatatccga

SEQ ID NO: 471178 - DNA, 25 bp, Homo sapien
cacggtgctgttgttcgtttgtcgg

SEQ ID NO: 471179 - DNA, 25 bp, Homo sapien
cttgtctgctcttgcgggaggcagc

SEQ ID NO: 471180 - DNA, 25 bp, Homo sapien
ggactcttccgagccgagccttgcc

SEQ ID NO: 471181 - DNA, 25 bp, Homo sapien
tcccctcacgcttggactcttccga

SEQ ID NO: 471182 - DNA, 25 bp, Homo sapien
cagggccgtaggtcaagtgtcatat

SEQ ID NO: 471183 - DNA, 25 bp, Homo sapien
ttgccgagcgctcgcgttctacgca

SEQ ID NO: 471184 - DNA, 25 bp, Homo sapien
aggagcgcctaaacaccaaaaagag

SEQ ID NO: 471185 - DNA, 25 bp, Homo sapien
ttgacctgggccctcccaacacacc

SEQ ID NO: 471186 - DNA, 25 bp, Homo sapien
tcccaacacaccgcccggaggagga

SEQ ID NO: 471187 - DNA, 25 bp, Homo sapien
cggaggaggagcgcctaaacaccaa

SEQ ID NO: 471188 - DNA, 25 bp, Homo sapien
agcggcagccagcgttgaccctcca

SEQ ID NO: 471189 - DNA, 25 bp, Homo sapien
gcggcagccagcgttgaccctccat

SEQ ID NO: 471190 - DNA, 25 bp, Homo sapien
cagcggcagccagcgttgaccctcc

SEQ ID NO: 471191 - DNA, 25 bp, Homo sapien
gcccacggcccagggctgccccgaa

SEQ ID NO: 471192 - DNA, 25 bp, Homo sapien
acggcccagggctgccccgaagcgc

SEQ ID NO: 471193 - DNA, 25 bp, Homo sapien
ccagggctgccccgaagcgcgccca

SEQ ID NO: 471194 - DNA, 25 bp, Homo sapien
gcccagggctgccccgaagcgcgcc

SEQ ID NO: 471195 - DNA, 25 bp, Homo sapien
gaggtcccgagcgacagacacctca

SEQ ID NO: 471196 - DNA, 25 bp, Homo sapien
gtccagcagggaagcggaccgagca

SEQ ID NO: 471197 - DNA, 25 bp, Homo sapien
gacagaaaagactccgaggtcccga

SEQ ID NO: 471198 - DNA, 25 bp, Homo sapien
ccagaatccctggaagcgtggaggt

SEQ ID NO: 471199 - DNA, 25 bp, Homo sapien
tttgcgaaaagtcaacatagattca

SEQ ID NO: 471200 - DNA, 25 bp, Homo sapien
gcagaaaaatcatttgcgaaaagtc

SEQ ID NO: 471201 - DNA, 25 bp, Homo sapien
tccctaagatagagagcaagacaga

SEQ ID NO: 471202 - DNA, 25 bp, Homo sapien
tctcagcaaactagggggaaaagag

SEQ ID NO: 471203 - DNA, 25 bp, Homo sapien
tacatcaacgaattgccagttagga

SEQ ID NO: 471204 - DNA, 25 bp, Homo sapien
gatgtagacctaattgtttaagaaa

SEQ ID NO: 471205 - DNA, 25 bp, Homo sapien
tgccagttaggatgtagacctaatt

SEQ ID NO: 471206 - DNA, 25 bp, Homo sapien
tccatatacatcaacgaattgccag

SEQ ID NO: 471207 - DNA, 25 bp, Homo sapien
agagaagtaagactgcacagactgg

SEQ ID NO: 471208 - DNA, 25 bp, Homo sapien
aagagaagtaagactgcacagactg

SEQ ID NO: 471209 - DNA, 25 bp, Homo sapien
caggcattgctgattgtttgcttca

SEQ ID NO: 471210 - DNA, 25 bp, Homo sapien
gtttgcaatagcatgaatcagtcca

SEQ ID NO: 471211 - DNA, 25 bp, Homo sapien
agtccaattgttccacaggcattgc

SEQ ID NO: 471212 - DNA, 25 bp, Homo sapien
tgatgtaacatcttgtccctgagat

SEQ ID NO: 471213 - DNA, 25 bp, Homo sapien
ttcttcagggctcattgacacagat

SEQ ID NO: 471214 - DNA, 25 bp, Homo sapien
cgttcttcagggctcattgacacag

SEQ ID NO: 471215 - DNA, 25 bp, Homo sapien
ttctccaggtatctggctcgttctt

SEQ ID NO: 471216 - DNA, 25 bp, Homo sapien
caggtatctggctcgttcttcaggg

SEQ ID NO: 471217 - DNA, 25 bp, Homo sapien
catctacaatcccacaaacttttgc

SEQ ID NO: 471218 - DNA, 25 bp, Homo sapien
tttgcccacatgagatcaaaacgga

SEQ ID NO: 471219 - DNA, 25 bp, Homo sapien
aatcccacaaacttttgcccacatg

SEQ ID NO: 471220 - DNA, 25 bp, Homo sapien
caaacttttgcccacatgagatcaa

SEQ ID NO: 471221 - DNA, 25 bp, Homo sapien
gagaaatgtggagcacaactcatgc

SEQ ID NO: 471222 - DNA, 25 bp, Homo sapien
gaattgctgtactgtgtaacccgta

SEQ ID NO: 471223 - DNA, 25 bp, Homo sapien
gatacacagggtactggcaggtata

SEQ ID NO: 471224 - DNA, 25 bp, Homo sapien
gtttaatcatgcagtttcagtcagc

SEQ ID NO: 471225 - DNA, 25 bp, Homo sapien
agtctgaccttcatgggcactggtc

SEQ ID NO: 471226 - DNA, 25 bp, Homo sapien
tggtctcatgagtaactcggatggc

SEQ ID NO: 471227 - DNA, 25 bp, Homo sapien
tctgaccttcatgggcactggtctc

SEQ ID NO: 471228 - DNA, 25 bp, Homo sapien
gggcactggtctcatgagtaactcg

SEQ ID NO: 471229 - DNA, 25 bp, Homo sapien
cagcatgcaataaggctcctgcctc

SEQ ID NO: 471230 - DNA, 25 bp, Homo sapien
agatttttcatttagtctacaaatc

SEQ ID NO: 471231 - DNA, 25 bp, Homo sapien
caaatctcagcatgcaataaggctc

SEQ ID NO: 471232 - DNA, 25 bp, Homo sapien
tctcagcatgcaataaggctcctgc

SEQ ID NO: 471233 - DNA, 25 bp, Homo sapien
gacactttagtggaagcccaaacca

SEQ ID NO: 471234 - DNA, 25 bp, Homo sapien
tccacggactattggtttcaggacc

SEQ ID NO: 471235 - DNA, 25 bp, Homo sapien
gggctggctcctcaattaatatgga

SEQ ID NO: 471236 - DNA, 25 bp, Homo sapien
gagtgaatacacagtcatccctcga

SEQ ID NO: 471237 - DNA, 25 bp, Homo sapien
tatcaaggacaagactttctcaggg

SEQ ID NO: 471238 - DNA, 25 bp, Homo sapien
tcctccagtggtagaagaacctgcc

SEQ ID NO: 471239 - DNA, 25 bp, Homo sapien
taggcttttgctcagaggctatgcc

SEQ ID NO: 471240 - DNA, 25 bp, Homo sapien
ttctacaggagagaagaatccaggc

SEQ ID NO: 471241 - DNA, 25 bp, Homo sapien
catggttacgtttgacccagggcag

SEQ ID NO: 471242 - DNA, 25 bp, Homo sapien
aatgatgaggccttcgttctgcagt

SEQ ID NO: 471243 - DNA, 25 bp, Homo sapien
tcgccagcgacgaagacggagagat

SEQ ID NO: 471244 - DNA, 25 bp, Homo sapien
tagacgtaagaagggtcgccagcga

SEQ ID NO: 471245 - DNA, 25 bp, Homo sapien
tgatgtttcaacagtgcagtgtaaa

SEQ ID NO: 471246 - DNA, 25 bp, Homo sapien
gcagtgtaaacagtctttgagtaaa

SEQ ID NO: 471247 - DNA, 25 bp, Homo sapien
tgttcccttaaagacttgaacttga

SEQ ID NO: 471248 - DNA, 25 bp, Homo sapien
taagatgtcaaaagagatgttccct

SEQ ID NO: 471249 - DNA, 25 bp, Homo sapien
ctaattcatagagatgcccatctac

SEQ ID NO: 471250 - DNA, 25 bp, Homo sapien
gatgcccatctacatgaactaatgc

SEQ ID NO: 471251 - DNA, 25 bp, Homo sapien
ctactttctcatctatacttggtgc

SEQ ID NO: 471252 - DNA, 25 bp, Homo sapien
atgcaataaaatgaagatctacttt

SEQ ID NO: 471253 - DNA, 25 bp, Homo sapien
gccccatctcataccaaaattttga

SEQ ID NO: 471254 - DNA, 25 bp, Homo sapien
tggttgaatctaccaatgcaagaac

SEQ ID NO: 471255 - DNA, 25 bp, Homo sapien
tgcacaatgtctacaatcatacagc

SEQ ID NO: 471256 - DNA, 25 bp, Homo sapien
ccttgacatactctacctaaatggt

SEQ ID NO: 471257 - DNA, 25 bp, Homo sapien
gatccatcaaagcaatcactgtggc

SEQ ID NO: 471258 - DNA, 25 bp, Homo sapien
ctttgagctcttcccataaatcatg

SEQ ID NO: 471259 - DNA, 25 bp, Homo sapien
ccaaaaatgttgtcaatcctctcaa

SEQ ID NO: 471260 - DNA, 25 bp, Homo sapien
cggacttcttggattacaaggtgca

SEQ ID NO: 471261 - DNA, 25 bp, Homo sapien
aagagagactatacagaaattaaaa

SEQ ID NO: 471262 - DNA, 25 bp, Homo sapien
aaagagagactatacagaaattaaa

SEQ ID NO: 471263 - DNA, 25 bp, Homo sapien
gctgaacttaacctcctgcgttcaa

SEQ ID NO: 471264 - DNA, 25 bp, Homo sapien
gctaataaactcagttatggctggg

SEQ ID NO: 471265 - DNA, 25 bp, Homo sapien
gacagggcctcacttatattcccca

SEQ ID NO: 471266 - DNA, 25 bp, Homo sapien
gcaacagcacctggcttaatatatg

SEQ ID NO: 471267 - DNA, 25 bp, Homo sapien
catctagtaatagacttggttgtta

SEQ ID NO: 471268 - DNA, 25 bp, Homo sapien
tctgaatatgcatctagtaatagac

SEQ ID NO: 471269 - DNA, 25 bp, Homo sapien
tgctaacccaaagtcaactgacaat

SEQ ID NO: 471270 - DNA, 25 bp, Homo sapien
acagccccttctacgattccatggt

SEQ ID NO: 471271 - DNA, 25 bp, Homo sapien
ctagtttcaccatggttaattggaa

SEQ ID NO: 471272 - DNA, 25 bp, Homo sapien
taataaagtttcatcactagtttca

SEQ ID NO: 471273 - DNA, 25 bp, Homo sapien
gtttcatcactagtttcaccatggt

SEQ ID NO: 471274 - DNA, 25 bp, Homo sapien
ctctaataaagtttcatcactagtt

SEQ ID NO: 471275 - DNA, 25 bp, Homo sapien
ctgcagaaagagcaatcgcattaaa

SEQ ID NO: 471276 - DNA, 25 bp, Homo sapien
ggtcgcgctccataaacttcttgca

SEQ ID NO: 471277 - DNA, 25 bp, Homo sapien
aaagagcaatcgcattaaatcttag

SEQ ID NO: 471278 - DNA, 25 bp, Homo sapien
tagttcatcagggtcgcgctccata

SEQ ID NO: 471279 - DNA, 25 bp, Homo sapien
gaaaatttagttgcaaataatacag

SEQ ID NO: 471280 - DNA, 25 bp, Homo sapien
ttttggtgtttccattattgacaag

SEQ ID NO: 471281 - DNA, 25 bp, Homo sapien
tcacataaagtttaatcatcaagtt

SEQ ID NO: 471282 - DNA, 25 bp, Homo sapien
caaaatttttgagttagtgtatggc

SEQ ID NO: 471283 - DNA, 25 bp, Homo sapien
gataaatccttcacaagaaaagagg

SEQ ID NO: 471284 - DNA, 25 bp, Homo sapien
gcacctttaacctggagcaaaaata

SEQ ID NO: 471285 - DNA, 25 bp, Homo sapien
gatggaaattgtgcctagtatccca

SEQ ID NO: 471286 - DNA, 25 bp, Homo sapien
aagaggaggaaagcattgcaccttt

SEQ ID NO: 471287 - DNA, 25 bp, Homo sapien
taaagactcaattgaagcccttcct

SEQ ID NO: 471288 - DNA, 25 bp, Homo sapien
tattcctctcccaaaaagatataga

SEQ ID NO: 471289 - DNA, 25 bp, Homo sapien
aactctgtgttttggcccaactcta

SEQ ID NO: 471290 - DNA, 25 bp, Homo sapien
tatacccgagtaatggctattcctc

SEQ ID NO: 471291 - DNA, 25 bp, Homo sapien
tagtgtctccacgagttttcacaca

SEQ ID NO: 471292 - DNA, 25 bp, Homo sapien
aagagtcctgcaaagttagtgtttc

SEQ ID NO: 471293 - DNA, 25 bp, Homo sapien
tgtctgttccacaagggactaccac

SEQ ID NO: 471294 - DNA, 25 bp, Homo sapien
aaagaaggctagctctaagtgctgc

SEQ ID NO: 471295 - DNA, 25 bp, Homo sapien
tgattacacacttttctaagtggtt

SEQ ID NO: 471296 - DNA, 25 bp, Homo sapien
acttaacttcagtcatggatttaaa

SEQ ID NO: 471297 - DNA, 25 bp, Homo sapien
ctgattacacacttttctaagtggt

SEQ ID NO: 471298 - DNA, 25 bp, Homo sapien
gacaactcagagtaagtgccaagaa

SEQ ID NO: 471299 - DNA, 25 bp, Homo sapien
tttcataacgcagccacttagtggg

SEQ ID NO: 471300 - DNA, 25 bp, Homo sapien
tccccaactgggttctagaaaatca

SEQ ID NO: 471301 - DNA, 25 bp, Homo sapien
taaaccatttccgagtcacagaaga

SEQ ID NO: 471302 - DNA, 25 bp, Homo sapien
ctgtaaaacgtgaaaatatggcata

SEQ ID NO: 471303 - DNA, 25 bp, Homo sapien
acatatcagttgcctccaaatttcc

SEQ ID NO: 471304 - DNA, 25 bp, Homo sapien
gagaacatcataggacatccaactg

SEQ ID NO: 471305 - DNA, 25 bp, Homo sapien
tccagagctccgagctctgttctct

SEQ ID NO: 471306 - DNA, 25 bp, Homo sapien
ttaatgagaatagtccttcctgaat

SEQ ID NO: 471307 - DNA, 25 bp, Homo sapien
taatgagaatagtccttcctgaatt

SEQ ID NO: 471308 - DNA, 25 bp, Homo sapien
cttaatgagaatagtccttcctgaa

SEQ ID NO: 471309 - DNA, 25 bp, Homo sapien
tggaggaccatctgtactttagaat

SEQ ID NO: 471310 - DNA, 25 bp, Homo sapien
taagtacggttttggctaaatgtgc

SEQ ID NO: 471311 - DNA, 25 bp, Homo sapien
tcatcgtagtcaaaaaatcgtaagt

SEQ ID NO: 471312 - DNA, 25 bp, Homo sapien
gaggaaacaacccatacattagagg

SEQ ID NO: 471313 - DNA, 25 bp, Homo sapien
ctgagaagggatagatgagaagccc

SEQ ID NO: 471314 - DNA, 25 bp, Homo sapien
tattcagacaagaaggttcaattcc

SEQ ID NO: 471315 - DNA, 25 bp, Homo sapien
cccagtggacaaaggcaagggtcct

SEQ ID NO: 471316 - DNA, 25 bp, Homo sapien
gaagctactggattgttaactgaga

SEQ ID NO: 471317 - DNA, 25 bp, Homo sapien
tatgaggacttgcttcacaggagga

SEQ ID NO: 471318 - DNA, 25 bp, Homo sapien
ggaggacttgctacttgctgcccag

SEQ ID NO: 471319 - DNA, 25 bp, Homo sapien
tatatgcacagaatgagtaacggcg

SEQ ID NO: 471320 - DNA, 25 bp, Homo sapien
taacggcggtagacacagagatgcc

SEQ ID NO: 471321 - DNA, 25 bp, Homo sapien
gctcaaatcaggtctccacaaagga

SEQ ID NO: 471322 - DNA, 25 bp, Homo sapien
cacccttcgtggtttgaggacactc

SEQ ID NO: 471323 - DNA, 25 bp, Homo sapien
ttgatgatcgccctcgcggtgagcg

SEQ ID NO: 471324 - DNA, 25 bp, Homo sapien
tgcgcgggtctttttcacaccagtg

SEQ ID NO: 471325 - DNA, 25 bp, Homo sapien
ggccagctgagcccgctacccgctc

SEQ ID NO: 471326 - DNA, 25 bp, Homo sapien
gccagctgagcccgctacccgctct

SEQ ID NO: 471327 - DNA, 25 bp, Homo sapien
cagccccgacgacagtttggacttc

SEQ ID NO: 471328 - DNA, 25 bp, Homo sapien
gcaggacgcgggaagcgaagcgggt

SEQ ID NO: 471329 - DNA, 25 bp, Homo sapien
gacgacagtttggacttcaaaagtc

SEQ ID NO: 471330 - DNA, 25 bp, Homo sapien
ctgaaagcgacccaaggcccgcggg

SEQ ID NO: 471331 - DNA, 25 bp, Homo sapien
aacctacacgaacgtgaagacctgg

SEQ ID NO: 471332 - DNA, 25 bp, Homo sapien
tttgttgcgctctgcagttcgttaa

SEQ ID NO: 471333 - DNA, 25 bp, Homo sapien
gcagttcgttaaggtctcgaaccta

SEQ ID NO: 471334 - DNA, 25 bp, Homo sapien
ggctctagttccctttgttgcgctc

SEQ ID NO: 471335 - DNA, 25 bp, Homo sapien
ctcagcgaacgccacggagcagttg

SEQ ID NO: 471336 - DNA, 25 bp, Homo sapien
gcgaacgccacggagcagttggcct

SEQ ID NO: 471337 - DNA, 25 bp, Homo sapien
ctgagcctcagcgaacgccacggag

SEQ ID NO: 471338 - DNA, 25 bp, Homo sapien
acgccacggagcagttggcctctgc

SEQ ID NO: 471339 - DNA, 25 bp, Homo sapien
gcgacgaccgccccgaggcagtcaa

SEQ ID NO: 471340 - DNA, 25 bp, Homo sapien
acgaccgccccgaggcagtcaacac

SEQ ID NO: 471341 - DNA, 25 bp, Homo sapien
ctcgcgacgaccgccccgaggcagt

SEQ ID NO: 471342 - DNA, 25 bp, Homo sapien
gacgaccgccccgaggcagtcaaca

SEQ ID NO: 471343 - DNA, 25 bp, Homo sapien
tagggcagcgccaatctaagcggga

SEQ ID NO: 471344 - DNA, 25 bp, Homo sapien
cagcttgttcacgtcggctgggtcg

SEQ ID NO: 471345 - DNA, 25 bp, Homo sapien
ccaaaagtgcacaagcaaaccagct

SEQ ID NO: 471346 - DNA, 25 bp, Homo sapien
ataagatgcaggagcggcagaaccc

SEQ ID NO: 471347 - DNA, 25 bp, Homo sapien
cgagggaatgcacccgagagccctg

SEQ ID NO: 471348 - DNA, 25 bp, Homo sapien
cgagccagggcggactgcgctgctc

SEQ ID NO: 471349 - DNA, 25 bp, Homo sapien
cactgaatacactggcttctcaggt

SEQ ID NO: 471350 - DNA, 25 bp, Homo sapien
cacttctaggcaccccgagggaatg

SEQ ID NO: 471351 - DNA, 25 bp, Homo sapien
ctaggagaagttttaaggatttgtg

SEQ ID NO: 471352 - DNA, 25 bp, Homo sapien
aggagaagttttaaggatttgtgct

SEQ ID NO: 471353 - DNA, 25 bp, Homo sapien
tctctaagcctaggagaagttttaa

SEQ ID NO: 471354 - DNA, 25 bp, Homo sapien
cctctttctctaagcctaggagaag

SEQ ID NO: 471355 - DNA, 25 bp, Homo sapien
tgaataaatcggcatactccctggg

SEQ ID NO: 471356 - DNA, 25 bp, Homo sapien
aaagagagctagagcaatgcaccga

SEQ ID NO: 471357 - DNA, 25 bp, Homo sapien
ccaaagcactctcggcatccagaga

SEQ ID NO: 471358 - DNA, 25 bp, Homo sapien
gaaagacaagaaccaacacagattg

SEQ ID NO: 471359 - DNA, 25 bp, Homo sapien
ccacgcatcaactttctgattcagg

SEQ ID NO: 471360 - DNA, 25 bp, Homo sapien
gctgtccaccatgtctgcacttatt

SEQ ID NO: 471361 - DNA, 25 bp, Homo sapien
gcttcctgtagctttgctgtccacc

SEQ ID NO: 471362 - DNA, 25 bp, Homo sapien
tctgattcaggtcaagaaggacctt

SEQ ID NO: 471363 - DNA, 25 bp, Homo sapien
aatcaaaatcgatatccagtatttg

SEQ ID NO: 471364 - DNA, 25 bp, Homo sapien
tcagcaccttccatactaagtagac

SEQ ID NO: 471365 - DNA, 25 bp, Homo sapien
taagtagactactagcttcactgtc

SEQ ID NO: 471366 - DNA, 25 bp, Homo sapien
tggtcttaggtcttgtaattcttac

SEQ ID NO: 471367 - DNA, 25 bp, Homo sapien
taccagaattgcaagtgtaagttca

SEQ ID NO: 471368 - DNA, 25 bp, Homo sapien
aattatctgttgacttatggtacca

SEQ ID NO: 471369 - DNA, 25 bp, Homo sapien
tgttgacttatggtaccagaattgc

SEQ ID NO: 471370 - DNA, 25 bp, Homo sapien
tcatgatggcaagttgtgaattatc

SEQ ID NO: 471371 - DNA, 25 bp, Homo sapien
gactatcttagcttcagcatgggag

SEQ ID NO: 471372 - DNA, 25 bp, Homo sapien
tgcccgcagtttacaggacaaagtg

SEQ ID NO: 471373 - DNA, 25 bp, Homo sapien
cagatagacctggatcccaaaggga

SEQ ID NO: 471374 - DNA, 25 bp, Homo sapien
cacagtaaggctttgcccgcagttt

SEQ ID NO: 471375 - DNA, 25 bp, Homo sapien
tacaagaacgagactttgactcaaa

SEQ ID NO: 471376 - DNA, 25 bp, Homo sapien
ctggggtacaagaacgagactttga

SEQ ID NO: 471377 - DNA, 25 bp, Homo sapien
ttactactgtacttcaatacatcca

SEQ ID NO: 471378 - DNA, 25 bp, Homo sapien
tagactagggagacataaatttcct

SEQ ID NO: 471379 - DNA, 25 bp, Homo sapien
cacattgcttagaaggttcattcct

SEQ ID NO: 471380 - DNA, 25 bp, Homo sapien
cattgcttagaaggttcattcctcc

SEQ ID NO: 471381 - DNA, 25 bp, Homo sapien
acattgcttagaaggttcattcctc

SEQ ID NO: 471382 - DNA, 25 bp, Homo sapien
ccatcaccatctgagagctttgctc

SEQ ID NO: 471383 - DNA, 25 bp, Homo sapien
tcccagaaaaggcacctgctctgta

SEQ ID NO: 471384 - DNA, 25 bp, Homo sapien
ccaccatcaccatctgagagctttg

SEQ ID NO: 471385 - DNA, 25 bp, Homo sapien
tgctctgtaaatcctgtccccatct

SEQ ID NO: 471386 - DNA, 25 bp, Homo sapien
tcctgtcatgaacagtttcacctag

SEQ ID NO: 471387 - DNA, 25 bp, Homo sapien
ctgcttcctgtcatgaacagtttca

SEQ ID NO: 471388 - DNA, 25 bp, Homo sapien
cttcctgtcatgaacagtttcacct

SEQ ID NO: 471389 - DNA, 25 bp, Homo sapien
gcttcctgtcatgaacagtttcacc

SEQ ID NO: 471390 - DNA, 25 bp, Homo sapien
tgaagacagaagtataggcaccttc

SEQ ID NO: 471391 - DNA, 25 bp, Homo sapien
attataggtgcaaccttgcaaagca

SEQ ID NO: 471392 - DNA, 25 bp, Homo sapien
cagcaactctggctatgaagacaga

SEQ ID NO: 471393 - DNA, 25 bp, Homo sapien
tgcctctggatgagtgagacacatg

SEQ ID NO: 471394 - DNA, 25 bp, Homo sapien
ccaatctgaatgtgtattggcattc

SEQ ID NO: 471395 - DNA, 25 bp, Homo sapien
tctcctcatgccaatctgaatgtgt

SEQ ID NO: 471396 - DNA, 25 bp, Homo sapien
ccgacctccttccagagtgtggcta

SEQ ID NO: 471397 - DNA, 25 bp, Homo sapien
agagtgtggctagctctctctgctt

SEQ ID NO: 471398 - DNA, 25 bp, Homo sapien
ccctgtgaattactaggaaaggcat

SEQ ID NO: 471399 - DNA, 25 bp, Homo sapien
ctccctgtgaattactaggaaaggc

SEQ ID NO: 471400 - DNA, 25 bp, Homo sapien
tccctgtgaattactaggaaaggca

SEQ ID NO: 471401 - DNA, 25 bp, Homo sapien
ctgtggtacagacgaaccacatcat

SEQ ID NO: 471402 - DNA, 25 bp, Homo sapien
aaccactgtggtacagacgaaccac

SEQ ID NO: 471403 - DNA, 25 bp, Homo sapien
tggtacagacgaaccacatcatgaa

SEQ ID NO: 471404 - DNA, 25 bp, Homo sapien
cactgtggtacagacgaaccacatc

SEQ ID NO: 471405 - DNA, 25 bp, Homo sapien
cagactggttatcagcaaaatgccc

SEQ ID NO: 471406 - DNA, 25 bp, Homo sapien
tttaagcagccatttaaaaggtgcc

SEQ ID NO: 471407 - DNA, 25 bp, Homo sapien
ccactaatgcgagtcagcaggcact

SEQ ID NO: 471408 - DNA, 25 bp, Homo sapien
gcaggcacttctctcgtttaacttt

SEQ ID NO: 471409 - DNA, 25 bp, Homo sapien
tcagttccagttctgatcgcataat

SEQ ID NO: 471410 - DNA, 25 bp, Homo sapien
ttctgatcgcataatccacatgact

SEQ ID NO: 471411 - DNA, 25 bp, Homo sapien
taatccacatgacttaaatcccaaa

SEQ ID NO: 471412 - DNA, 25 bp, Homo sapien
tccacatgacttaaatcccaaacat

SEQ ID NO: 471413 - DNA, 25 bp, Homo sapien
gcaaaagttataaatctacaaacca

SEQ ID NO: 471414 - DNA, 25 bp, Homo sapien
aatgtgaactcattcttatgttgag

SEQ ID NO: 471415 - DNA, 25 bp, Homo sapien
caaaacatagtgaaagtaggttgtt

SEQ ID NO: 471416 - DNA, 25 bp, Homo sapien
caacattgcaaaagttataaatcta

SEQ ID NO: 471417 - DNA, 25 bp, Homo sapien
gaagctgcatcttagcagataaatg

SEQ ID NO: 471418 - DNA, 25 bp, Homo sapien
aagaagctgcatcttagcagataaa

SEQ ID NO: 471419 - DNA, 25 bp, Homo sapien
tgtctgttttgccagatgcaacatc

SEQ ID NO: 471420 - DNA, 25 bp, Homo sapien
taaatgtctgttttgccagatgcaa

SEQ ID NO: 471421 - DNA, 25 bp, Homo sapien
tacctgcaattctgaacaagctaca

SEQ ID NO: 471422 - DNA, 25 bp, Homo sapien
taatatgcatgaaacacttagcact

SEQ ID NO: 471423 - DNA, 25 bp, Homo sapien
agattaaatgtacccatctcaaagg

SEQ ID NO: 471424 - DNA, 25 bp, Homo sapien
tagcacttgcctgacccaagacaag

SEQ ID NO: 471425 - DNA, 25 bp, Homo sapien
tctagagaggctcgaaaatcttttg

SEQ ID NO: 471426 - DNA, 25 bp, Homo sapien
agagaggctcgaaaatcttttgttt

SEQ ID NO: 471427 - DNA, 25 bp, Homo sapien
tttctagagaggctcgaaaatcttt

SEQ ID NO: 471428 - DNA, 25 bp, Homo sapien
ctagagaggctcgaaaatcttttgt

SEQ ID NO: 471429 - DNA, 25 bp, Homo sapien
ctggagtgcagtggtaccatctcca

SEQ ID NO: 471430 - DNA, 25 bp, Homo sapien
gcagtggtaccatctccactcactg

SEQ ID NO: 471431 - DNA, 25 bp, Homo sapien
gagtgcagtggtaccatctccactc

SEQ ID NO: 471432 - DNA, 25 bp, Homo sapien
agtgcagtggtaccatctccactca

SEQ ID NO: 471433 - DNA, 25 bp, Homo sapien
gccaagctgactttcaacttgacat

SEQ ID NO: 471434 - DNA, 25 bp, Homo sapien
tgccaagctgactttcaacttgaca

SEQ ID NO: 471435 - DNA, 25 bp, Homo sapien
aacacaaattctgctcattaagcat

SEQ ID NO: 471436 - DNA, 25 bp, Homo sapien
tcctctaaacacaaattctgctcat

SEQ ID NO: 471437 - DNA, 25 bp, Homo sapien
ttttcctctaaacacaaattctgct

SEQ ID NO: 471438 - DNA, 25 bp, Homo sapien
ctaaacacaaattctgctcattaag

SEQ ID NO: 471439 - DNA, 25 bp, Homo sapien
gtagacagtctattgatcttcttaa

SEQ ID NO: 471440 - DNA, 25 bp, Homo sapien
gacgccaggtttaagcttattaatc

SEQ ID NO: 471441 - DNA, 25 bp, Homo sapien
caatcctgctattggtgtagacagt

SEQ ID NO: 471442 - DNA, 25 bp, Homo sapien
ttgatcttcttaatgacgccaggtt

SEQ ID NO: 471443 - DNA, 25 bp, Homo sapien
ttgagtaaacactacacagcttccc

SEQ ID NO: 471444 - DNA, 25 bp, Homo sapien
ctttgagtaaacactacacagcttc

SEQ ID NO: 471445 - DNA, 25 bp, Homo sapien
tttgagtaaacactacacagcttcc

SEQ ID NO: 471446 - DNA, 25 bp, Homo sapien
gacaccaacaccactgttcacagga

SEQ ID NO: 471447 - DNA, 25 bp, Homo sapien
cagcaatagcctagtgacaccaaca

SEQ ID NO: 471448 - DNA, 25 bp, Homo sapien
tcattgtagcatccgtattaggcca

SEQ ID NO: 471449 - DNA, 25 bp, Homo sapien
catgtgtggcagcaatagcctagtg

SEQ ID NO: 471450 - DNA, 25 bp, Homo sapien
gcagtaatctacactttgatgtcag

SEQ ID NO: 471451 - DNA, 25 bp, Homo sapien
ttccagctttgcacggcaagcctca

SEQ ID NO: 471452 - DNA, 25 bp, Homo sapien
cctctttccagctttgcacggcaag

SEQ ID NO: 471453 - DNA, 25 bp, Homo sapien
caggacaagtgcctagccactgagc

SEQ ID NO: 471454 - DNA, 25 bp, Homo sapien
tataacttcgaagcttcaaagtcca

SEQ ID NO: 471455 - DNA, 25 bp, Homo sapien
caattacagtcagcaaaagaggcag

SEQ ID NO: 471456 - DNA, 25 bp, Homo sapien
gcctttcagtcctccagagcataca

SEQ ID NO: 471457 - DNA, 25 bp, Homo sapien
ctctctcagacaaaggttacaaatt

SEQ ID NO: 471458 - DNA, 25 bp, Homo sapien
ctgtgaaaagaagtggaaagtgatt

SEQ ID NO: 471459 - DNA, 25 bp, Homo sapien
tgtgaaaagaagtggaaagtgattg

SEQ ID NO: 471460 - DNA, 25 bp, Homo sapien
gtgaaaagaagtggaaagtgattgc

SEQ ID NO: 471461 - DNA, 25 bp, Homo sapien
tgataaatcctgtagatctccagga

SEQ ID NO: 471462 - DNA, 25 bp, Homo sapien
gacagtgactcgatttgataaatcc

SEQ ID NO: 471463 - DNA, 25 bp, Homo sapien
gatctccaggatggaaaagctgggc

SEQ ID NO: 471464 - DNA, 25 bp, Homo sapien
tgttcacaagctttcaagaaaacgt

SEQ ID NO: 471465 - DNA, 25 bp, Homo sapien
tctgcatgcttctcactacagctat

SEQ ID NO: 471466 - DNA, 25 bp, Homo sapien
tacagctataactacgtgacctcgc

SEQ ID NO: 471467 - DNA, 25 bp, Homo sapien
gacgaacttgtggtttccactgaaa

SEQ ID NO: 471468 - DNA, 25 bp, Homo sapien
acctcgcagtttcagtttgtcagta

SEQ ID NO: 471469 - DNA, 25 bp, Homo sapien
cattctcacaggtactacttaggca

SEQ ID NO: 471470 - DNA, 25 bp, Homo sapien
tctcacaggtactacttaggcacac

SEQ ID NO: 471471 - DNA, 25 bp, Homo sapien
ggcattctcacaggtactacttagg

SEQ ID NO: 471472 - DNA, 25 bp, Homo sapien
aggcattctcacaggtactacttag

SEQ ID NO: 471473 - DNA, 25 bp, Homo sapien
ggcttatccagcaggccaagacaga

SEQ ID NO: 471474 - DNA, 25 bp, Homo sapien
aagacagaatcagaccccagggctt

SEQ ID NO: 471475 - DNA, 25 bp, Homo sapien
tccacagcatgaaggcttatccagc

SEQ ID NO: 471476 - DNA, 25 bp, Homo sapien
gcttttttggatttgagggagtaga

SEQ ID NO: 471477 - DNA, 25 bp, Homo sapien
tgataagcatctagggacttctccc

SEQ ID NO: 471478 - DNA, 25 bp, Homo sapien
tcaaaacaattgacagccatcagta

SEQ ID NO: 471479 - DNA, 25 bp, Homo sapien
gaagtctagtgattggtcagccaaa

SEQ ID NO: 471480 - DNA, 25 bp, Homo sapien
acacagcttaattcaaagcaggtgc

SEQ ID NO: 471481 - DNA, 25 bp, Homo sapien
aactcatgagtgattctgtccccag

SEQ ID NO: 471482 - DNA, 25 bp, Homo sapien
ccagaacaactgcaactcatgagtg

SEQ ID NO: 471483 - DNA, 25 bp, Homo sapien
cctgctaccagaataagtatccgcc

SEQ ID NO: 471484 - DNA, 25 bp, Homo sapien
gagcagaggtaactgcccagttcaa

SEQ ID NO: 471485 - DNA, 25 bp, Homo sapien
ctgcccccacacccagcttccagcc

SEQ ID NO: 471486 - DNA, 25 bp, Homo sapien
cacacccagcttccagcccatgcct

SEQ ID NO: 471487 - DNA, 25 bp, Homo sapien
cccacacccagcttccagcccatgc

SEQ ID NO: 471488 - DNA, 25 bp, Homo sapien
cccccacacccagcttccagcccat

SEQ ID NO: 471489 - DNA, 25 bp, Homo sapien
ccccacgtgggagtaaagcttcata

SEQ ID NO: 471490 - DNA, 25 bp, Homo sapien
tgttcctctcacatgtcttagtacc

SEQ ID NO: 471491 - DNA, 25 bp, Homo sapien
tctttctcaaggtaccagcattctc

SEQ ID NO: 471492 - DNA, 25 bp, Homo sapien
tcatttgcaacgctggaaggcctga

SEQ ID NO: 471493 - DNA, 25 bp, Homo sapien
tagctccaaagttggataatttttc

SEQ ID NO: 471494 - DNA, 25 bp, Homo sapien
gacacctcagaatgaaatataagac

SEQ ID NO: 471495 - DNA, 25 bp, Homo sapien
tgcacgacacctcagaatgaaatat

SEQ ID NO: 471496 - DNA, 25 bp, Homo sapien
ggataatttttccacaacaaatatg

SEQ ID NO: 471497 - DNA, 25 bp, Homo sapien
ttttcactctcctgtcagtctcttc

SEQ ID NO: 471498 - DNA, 25 bp, Homo sapien
atttttcactctcctgtcagtctct

SEQ ID NO: 471499 - DNA, 25 bp, Homo sapien
tcactctcctgtcagtctcttcttg

SEQ ID NO: 471500 - DNA, 25 bp, Homo sapien
tttcactctcctgtcagtctcttct

SEQ ID NO: 471501 - DNA, 25 bp, Homo sapien
tcaaacgctttcaaattaagatggg

SEQ ID NO: 471502 - DNA, 25 bp, Homo sapien
cttcgtcagtgcttgtcctaaaaga

SEQ ID NO: 471503 - DNA, 25 bp, Homo sapien
gaccattatagtacgggttgctttg

SEQ ID NO: 471504 - DNA, 25 bp, Homo sapien
ccagccagtacaatgttatcaaaac

SEQ ID NO: 471505 - DNA, 25 bp, Homo sapien
gaaattctccacgttcaggacacca

SEQ ID NO: 471506 - DNA, 25 bp, Homo sapien
tgtcaatgacctcgagcccaaagag

SEQ ID NO: 471507 - DNA, 25 bp, Homo sapien
tcaacgtgatatcagaggagcagct

SEQ ID NO: 471508 - DNA, 25 bp, Homo sapien
gacaccagatgtcaccgtagccact

SEQ ID NO: 471509 - DNA, 25 bp, Homo sapien
aattccgaatctgtgtcactttcaa

SEQ ID NO: 471510 - DNA, 25 bp, Homo sapien
ttaaatgtaaattccgaatctgtgt

SEQ ID NO: 471511 - DNA, 25 bp, Homo sapien
taaattccgaatctgtgtcactttc

SEQ ID NO: 471512 - DNA, 25 bp, Homo sapien
aatgtaaattccgaatctgtgtcac

SEQ ID NO: 471513 - DNA, 25 bp, Homo sapien
attgaagggtaacgcagtctttggc

SEQ ID NO: 471514 - DNA, 25 bp, Homo sapien
gccgaaatccttcgatacgacatat

SEQ ID NO: 471515 - DNA, 25 bp, Homo sapien
gctggtacataggatggctgtctac

SEQ ID NO: 471516 - DNA, 25 bp, Homo sapien
cttctgtataaaccgggcttgccca

SEQ ID NO: 471517 - DNA, 25 bp, Homo sapien
gaaaagcatacgaaactcaataatc

SEQ ID NO: 471518 - DNA, 25 bp, Homo sapien
gaaatggcttcaagatatgtataac

SEQ ID NO: 471519 - DNA, 25 bp, Homo sapien
taacatcctaccatattcgaaaagc

SEQ ID NO: 471520 - DNA, 25 bp, Homo sapien
gacctagcaaatcatatgctgacat

SEQ ID NO: 471521 - DNA, 25 bp, Homo sapien
gaatctacggttggctaagtcatcc

SEQ ID NO: 471522 - DNA, 25 bp, Homo sapien
gctggatttgcaaaaccacactctg

SEQ ID NO: 471523 - DNA, 25 bp, Homo sapien
catggcaaacatatcagcaggagaa

SEQ ID NO: 471524 - DNA, 25 bp, Homo sapien
tcgtcagtccatatagccccatggc

SEQ ID NO: 471525 - DNA, 25 bp, Homo sapien
gccagatccaggacaagtatttctg

SEQ ID NO: 471526 - DNA, 25 bp, Homo sapien
aaatcagcagcataatagacagcca

SEQ ID NO: 471527 - DNA, 25 bp, Homo sapien
ggaagaggcacataacaaacaattt

SEQ ID NO: 471528 - DNA, 25 bp, Homo sapien
gcagcataatagacagccagatcca

SEQ ID NO: 471529 - DNA, 25 bp, Homo sapien
cctaggacaaagttattataacagc

SEQ ID NO: 471530 - DNA, 25 bp, Homo sapien
actcaaggatagctagatacacacg

SEQ ID NO: 471531 - DNA, 25 bp, Homo sapien
cacagctcctaggacaaagttatta

SEQ ID NO: 471532 - DNA, 25 bp, Homo sapien
ttataacagcatctcattttaactc

SEQ ID NO: 471533 - DNA, 25 bp, Homo sapien
aaccggttaagacactgtatgagca

SEQ ID NO: 471534 - DNA, 25 bp, Homo sapien
taagacactgtatgagcatttgtga

SEQ ID NO: 471535 - DNA, 25 bp, Homo sapien
cacagaacacaaatggcatgctttc

SEQ ID NO: 471536 - DNA, 25 bp, Homo sapien
tcaaaacatccaaccggttaagaca

SEQ ID NO: 471537 - DNA, 25 bp, Homo sapien
tcctcttccaaataacaagaggact

SEQ ID NO: 471538 - DNA, 25 bp, Homo sapien
ctttacaatgttgggtatgcttctt

SEQ ID NO: 471539 - DNA, 25 bp, Homo sapien
ataacaagaggactttgaagttcct

SEQ ID NO: 471540 - DNA, 25 bp, Homo sapien
caatgttgggtatgcttcttgtctt

SEQ ID NO: 471541 - DNA, 25 bp, Homo sapien
aaactgatcaaaagcattccctggg

SEQ ID NO: 471542 - DNA, 25 bp, Homo sapien
ttccctgggtttggcatgactggac

SEQ ID NO: 471543 - DNA, 25 bp, Homo sapien
tataccatggcttataagtttccct

SEQ ID NO: 471544 - DNA, 25 bp, Homo sapien
gactggactgagcttgcgcacataa

SEQ ID NO: 471545 - DNA, 25 bp, Homo sapien
cagatactagagaactaattagact

SEQ ID NO: 471546 - DNA, 25 bp, Homo sapien
ccgcagatactagagaactaattag

SEQ ID NO: 471547 - DNA, 25 bp, Homo sapien
ttccgcagatactagagaactaatt

SEQ ID NO: 471548 - DNA, 25 bp, Homo sapien
gatactagagaactaattagacttt

SEQ ID NO: 471549 - DNA, 25 bp, Homo sapien
ctaaaaacggtggcgcttctgtcag

SEQ ID NO: 471550 - DNA, 25 bp, Homo sapien
tctgtcagaacctgagtcctcatcc

SEQ ID NO: 471551 - DNA, 25 bp, Homo sapien
tggcgcttctgtcagaacctgagtc

SEQ ID NO: 471552 - DNA, 25 bp, Homo sapien
cagaacctgagtcctcatcctcaga

SEQ ID NO: 471553 - DNA, 25 bp, Homo sapien
ctgggctcatccgaagcactactgc

SEQ ID NO: 471554 - DNA, 25 bp, Homo sapien
cagcccgtttggtagctaattccag

SEQ ID NO: 471555 - DNA, 25 bp, Homo sapien
tccagcaagagtgaaggtctttggc

SEQ ID NO: 471556 - DNA, 25 bp, Homo sapien
tgggagtccggtgattttacagccc

SEQ ID NO: 471557 - DNA, 25 bp, Homo sapien
tcctgcgggttatgagccttgggcc

SEQ ID NO: 471558 - DNA, 25 bp, Homo sapien
tcttctgtgctggaattcggcgaac

SEQ ID NO: 471559 - DNA, 25 bp, Homo sapien
gaggcacggtagttcccagtttcca

SEQ ID NO: 471560 - DNA, 25 bp, Homo sapien
gccttgggccagaagtgggatcaat

SEQ ID NO: 471561 - DNA, 25 bp, Homo sapien
ttacacaagaccatccattacaagc

SEQ ID NO: 471562 - DNA, 25 bp, Homo sapien
agcaaaatccttgcagaaacacact

SEQ ID NO: 471563 - DNA, 25 bp, Homo sapien
tacacaagaccatccattacaagca

SEQ ID NO: 471564 - DNA, 25 bp, Homo sapien
caaaatccttgcagaaacacactct

SEQ ID NO: 471565 - DNA, 25 bp, Homo sapien
cacagtactgcttaagtcaaaggca

SEQ ID NO: 471566 - DNA, 25 bp, Homo sapien
gtatatacagtcttaaacaggccta

SEQ ID NO: 471567 - DNA, 25 bp, Homo sapien
gcgacatgcagagttgagcaacacg

SEQ ID NO: 471568 - DNA, 25 bp, Homo sapien
gcttcaaaatggcacgcgacatgca

SEQ ID NO: 471569 - DNA, 25 bp, Homo sapien
ccattctcaccataaatcttttgaa

SEQ ID NO: 471570 - DNA, 25 bp, Homo sapien
tgctcttagctagttcaggaattcc

SEQ ID NO: 471571 - DNA, 25 bp, Homo sapien
cccagtgccataattaaggaaccag

SEQ ID NO: 471572 - DNA, 25 bp, Homo sapien
taactgtacacctcttgcctgggca

SEQ ID NO: 471573 - DNA, 25 bp, Homo sapien
ggatatcccctaggcacttcaattg

SEQ ID NO: 471574 - DNA, 25 bp, Homo sapien
gacgcttcagtgatagtgtcacaga

SEQ ID NO: 471575 - DNA, 25 bp, Homo sapien
caaaaagactcatggttactacgga

SEQ ID NO: 471576 - DNA, 25 bp, Homo sapien
tccacctaaatttctacctagacgc

SEQ ID NO: 471577 - DNA, 25 bp, Homo sapien
ctacggaagttcacatgaccagact

SEQ ID NO: 471578 - DNA, 25 bp, Homo sapien
acatcttctgcgctgacatcactca

SEQ ID NO: 471579 - DNA, 25 bp, Homo sapien
tttgaacatcttctgcgctgacatc

SEQ ID NO: 471580 - DNA, 25 bp, Homo sapien
gcagctgacgcaagttttgaacatc

SEQ ID NO: 471581 - DNA, 25 bp, Homo sapien
ttttctgcatctcctcgtaacgcag

SEQ ID NO: 471582 - DNA, 25 bp, Homo sapien
gaaacatgtttcactggtaaggcca

SEQ ID NO: 471583 - DNA, 25 bp, Homo sapien
aacacgattgtgatggttacgcgca

SEQ ID NO: 471584 - DNA, 25 bp, Homo sapien
tatagccagcgtttctgtaccaagc

SEQ ID NO: 471585 - DNA, 25 bp, Homo sapien
caactggatgccaaggtgccctaat

SEQ ID NO: 471586 - DNA, 25 bp, Homo sapien
ctgcagcatttccttaaacgtctta

SEQ ID NO: 471587 - DNA, 25 bp, Homo sapien
tcttagagcttctcttagacttctc

SEQ ID NO: 471588 - DNA, 25 bp, Homo sapien
tctgcagatctgaagtgtaactttt

SEQ ID NO: 471589 - DNA, 25 bp, Homo sapien
tgtaactttttcgacgatctttcca

SEQ ID NO: 471590 - DNA, 25 bp, Homo sapien
ctttgagaaggaagctgaatttcag

SEQ ID NO: 471591 - DNA, 25 bp, Homo sapien
atttcagttgttacacggtcctctc

SEQ ID NO: 471592 - DNA, 25 bp, Homo sapien
ccttcttgacggaactgtagacttt

SEQ ID NO: 471593 - DNA, 25 bp, Homo sapien
tgtgctccgtgaacgcagagaagac

SEQ ID NO: 471594 - DNA, 25 bp, Homo sapien
agatctggggagtgatgagattccc

SEQ ID NO: 471595 - DNA, 25 bp, Homo sapien
taacctgactgtatcagttttccgg

SEQ ID NO: 471596 - DNA, 25 bp, Homo sapien
tgtgaccacagatgttaacctgact

SEQ ID NO: 471597 - DNA, 25 bp, Homo sapien
gagccaaagggtcttggtgtgacca

SEQ ID NO: 471598 - DNA, 25 bp, Homo sapien
cctggtcttgggaaagagatgagaa

SEQ ID NO: 471599 - DNA, 25 bp, Homo sapien
gctgctacctctttctggctagata

SEQ ID NO: 471600 - DNA, 25 bp, Homo sapien
tcaagaccagatgtggaagacaatg

SEQ ID NO: 471601 - DNA, 25 bp, Homo sapien
aagccagttggcttgcgtccgggct

SEQ ID NO: 471602 - DNA, 25 bp, Homo sapien
gacttctctttgtggggagatttcc

SEQ ID NO: 471603 - DNA, 25 bp, Homo sapien
ttgagacttctctttgtggggagat

SEQ ID NO: 471604 - DNA, 25 bp, Homo sapien
tgggatcttgagacttctctttgtg

SEQ ID NO: 471605 - DNA, 25 bp, Homo sapien
ttgtggggagatttccccttctcca

SEQ ID NO: 471606 - DNA, 25 bp, Homo sapien
aacaaaacatgaaacgctggtatcc

SEQ ID NO: 471607 - DNA, 25 bp, Homo sapien
tggtatccggtgtccctggcaccca

SEQ ID NO: 471608 - DNA, 25 bp, Homo sapien
ccctggcacccacatggaggaaagt

SEQ ID NO: 471609 - DNA, 25 bp, Homo sapien
cgctggtatccggtgtccctggcac

SEQ ID NO: 471610 - DNA, 25 bp, Homo sapien
cccaggcgtctggtttatgctgatt

SEQ ID NO: 471611 - DNA, 25 bp, Homo sapien
tacgaagatcccaggaatatcccat

SEQ ID NO: 471612 - DNA, 25 bp, Homo sapien
ctgcttcaactgatgctacgaagat

SEQ ID NO: 471613 - DNA, 25 bp, Homo sapien
caaagtcaagactcttcccaggcgt

SEQ ID NO: 471614 - DNA, 25 bp, Homo sapien
tagcgcctcacatccatcactaggt

SEQ ID NO: 471615 - DNA, 25 bp, Homo sapien
tcctcccactcttttgaatcgttat

SEQ ID NO: 471616 - DNA, 25 bp, Homo sapien
ttgagccttagccatggcttcctcc

SEQ ID NO: 471617 - DNA, 25 bp, Homo sapien
tcactaggtgtccagtttcttgagc

SEQ ID NO: 471618 - DNA, 25 bp, Homo sapien
caaatgagtacacatagatgttgaa

SEQ ID NO: 471619 - DNA, 25 bp, Homo sapien
aagtcattgaatgcacatatatata

SEQ ID NO: 471620 - DNA, 25 bp, Homo sapien
aagatcaaatgagtacacatagatg

SEQ ID NO: 471621 - DNA, 25 bp, Homo sapien
tacacatagatgttgaagtggaaag

SEQ ID NO: 471622 - DNA, 25 bp, Homo sapien
ctggtgagattgagggttttatgcc

SEQ ID NO: 471623 - DNA, 25 bp, Homo sapien
tgccgtataaatggcagggaaggtt

SEQ ID NO: 471624 - DNA, 25 bp, Homo sapien
ggttttatgccgtataaatggcagg

SEQ ID NO: 471625 - DNA, 25 bp, Homo sapien
aattttggtagccatactggtgaga

SEQ ID NO: 471626 - DNA, 25 bp, Homo sapien
cggagaaatcagttgttacagatag

SEQ ID NO: 471627 - DNA, 25 bp, Homo sapien
atcaatccactttgtttcaggtgaa

SEQ ID NO: 471628 - DNA, 25 bp, Homo sapien
ctctgaaggctttcggagaaatcag

SEQ ID NO: 471629 - DNA, 25 bp, Homo sapien
tcaatccactttgtttcaggtgaac

SEQ ID NO: 471630 - DNA, 25 bp, Homo sapien
cttttgattcaaaagcattgctttc

SEQ ID NO: 471631 - DNA, 25 bp, Homo sapien
tcttggcagtctaggttcatggcag

SEQ ID NO: 471632 - DNA, 25 bp, Homo sapien
tgtgaaaacccagtcccattcttgg

SEQ ID NO: 471633 - DNA, 25 bp, Homo sapien
tgagtcactgcggaataggacccgg

SEQ ID NO: 471634 - DNA, 25 bp, Homo sapien
tatagtcccctagtcgtcatagagc

SEQ ID NO: 471635 - DNA, 25 bp, Homo sapien
tcaaaaaattgtgatcgccttttta

SEQ ID NO: 471636 - DNA, 25 bp, Homo sapien
tgacagacaaattgaagaggctcag

SEQ ID NO: 471637 - DNA, 25 bp, Homo sapien
taccacagaggtagacccatgaact

SEQ ID NO: 471638 - DNA, 25 bp, Homo sapien
gtttagaggtatacaaaggacacac

SEQ ID NO: 471639 - DNA, 25 bp, Homo sapien
gaaaagcctgatgaccctagggaaa

SEQ ID NO: 471640 - DNA, 25 bp, Homo sapien
agcattaggcaaacgtgacacggga

SEQ ID NO: 471641 - DNA, 25 bp, Homo sapien
cggagaatctcaaaacgcacctgtt

SEQ ID NO: 471642 - DNA, 25 bp, Homo sapien
gcatctcatagtttggcctaacagg

SEQ ID NO: 471643 - DNA, 25 bp, Homo sapien
taatgagccactttcgtaagcaagt

SEQ ID NO: 471644 - DNA, 25 bp, Homo sapien
tcaggaaccaccgaatcagagcttc

SEQ ID NO: 471645 - DNA, 25 bp, Homo sapien
atcaggaaccaccgaatcagagctt

SEQ ID NO: 471646 - DNA, 25 bp, Homo sapien
gatcccacacccagcgactcggggc

SEQ ID NO: 471647 - DNA, 25 bp, Homo sapien
ttccgctcctcctcttgatcccaca

SEQ ID NO: 471648 - DNA, 25 bp, Homo sapien
cgactcggggcactgatggttggaa

SEQ ID NO: 471649 - DNA, 25 bp, Homo sapien
tgccgcttccgctcctcctcttgat

SEQ ID NO: 471650 - DNA, 25 bp, Homo sapien
gtttctcctgctcacgttgatattt

SEQ ID NO: 471651 - DNA, 25 bp, Homo sapien
cctgtttggccctttgccactcttc

SEQ ID NO: 471652 - DNA, 25 bp, Homo sapien
ttctcctgctcacgttgatattttt

SEQ ID NO: 471653 - DNA, 25 bp, Homo sapien
tctcctgctcacgttgatatttttc

SEQ ID NO: 471654 - DNA, 25 bp, Homo sapien
ctaaacaggcatgttctaacactac

SEQ ID NO: 471655 - DNA, 25 bp, Homo sapien
aactaaacaggcatgttctaacact

SEQ ID NO: 471656 - DNA, 25 bp, Homo sapien
actaaacaggcatgttctaacacta

SEQ ID NO: 471657 - DNA, 25 bp, Homo sapien
aaactaaacaggcatgttctaacac

SEQ ID NO: 471658 - DNA, 25 bp, Homo sapien
ctgtttgagcttaggaccatcagtt

SEQ ID NO: 471659 - DNA, 25 bp, Homo sapien
gctgtttgagcttaggaccatcagt

SEQ ID NO: 471660 - DNA, 25 bp, Homo sapien
tgtttgagcttaggaccatcagttc

SEQ ID NO: 471661 - DNA, 25 bp, Homo sapien
tgtctgaagacttggacccttcact

SEQ ID NO: 471662 - DNA, 25 bp, Homo sapien
caagagagggctcccgtgtggtcag

SEQ ID NO: 471663 - DNA, 25 bp, Homo sapien
tctctgtctgaagacttggaccctt

SEQ ID NO: 471664 - DNA, 25 bp, Homo sapien
ctgaagacttggacccttcactcca

SEQ ID NO: 471665 - DNA, 25 bp, Homo sapien
tctctcaataacaagctgatcctgc

SEQ ID NO: 471666 - DNA, 25 bp, Homo sapien
tcaataacaagctgatcctgcggct

SEQ ID NO: 471667 - DNA, 25 bp, Homo sapien
caagctgatcctgcggcttctttcc

SEQ ID NO: 471668 - DNA, 25 bp, Homo sapien
taacaagctgatcctgcggcttctt

SEQ ID NO: 471669 - DNA, 25 bp, Homo sapien
tgtttcccgctctatctctgcctgg

SEQ ID NO: 471670 - DNA, 25 bp, Homo sapien
gatgtttcccgctctatctctgcct

SEQ ID NO: 471671 - DNA, 25 bp, Homo sapien
tctgactgatgtttcccgctctatc

SEQ ID NO: 471672 - DNA, 25 bp, Homo sapien
tgactgatgtttcccgctctatctc

SEQ ID NO: 471673 - DNA, 25 bp, Homo sapien
ctgtcaccaggaagaaaacctgaag

SEQ ID NO: 471674 - DNA, 25 bp, Homo sapien
ctgtctttggtatatcataggaatc

SEQ ID NO: 471675 - DNA, 25 bp, Homo sapien
tcttctgtctttggtatatcatagg

SEQ ID NO: 471676 - DNA, 25 bp, Homo sapien
aaacctgaagatgcttcttctgtct

SEQ ID NO: 471677 - DNA, 25 bp, Homo sapien
tatttgtggagtaatcatccagttc

SEQ ID NO: 471678 - DNA, 25 bp, Homo sapien
ttatttgtggagtaatcatccagtt

SEQ ID NO: 471679 - DNA, 25 bp, Homo sapien
taatcatccagttcagtagtagatc

SEQ ID NO: 471680 - DNA, 25 bp, Homo sapien
tcatccagttcagtagtagatctgg

SEQ ID NO: 471681 - DNA, 25 bp, Homo sapien
acatgataccacaaataagcaactc

SEQ ID NO: 471682 - DNA, 25 bp, Homo sapien
taacatgataccacaaataagcaac

SEQ ID NO: 471683 - DNA, 25 bp, Homo sapien
ataagcaactctgaaggagtttggg

SEQ ID NO: 471684 - DNA, 25 bp, Homo sapien
caaataagcaactctgaaggagttt

SEQ ID NO: 471685 - DNA, 25 bp, Homo sapien
gccgcctgcttatgcaaatcctgat

SEQ ID NO: 471686 - DNA, 25 bp, Homo sapien
tctccagcatggcaatgataggctg

SEQ ID NO: 471687 - DNA, 25 bp, Homo sapien
ttcatgtaaatgaccagccgcctgc

SEQ ID NO: 471688 - DNA, 25 bp, Homo sapien
cagtggctatccaacatgatgggca

SEQ ID NO: 471689 - DNA, 25 bp, Homo sapien
gcctgctatccaagagcttgcaatg

SEQ ID NO: 471690 - DNA, 25 bp, Homo sapien
taatccgattaatgacacaagccac

SEQ ID NO: 471691 - DNA, 25 bp, Homo sapien
ttattccggagattcacagttgcag

SEQ ID NO: 471692 - DNA, 25 bp, Homo sapien
gataacaaaggtcctaactgctcaa

SEQ ID NO: 471693 - DNA, 25 bp, Homo sapien
tagtgactggataaatcgcccatgg

SEQ ID NO: 471694 - DNA, 25 bp, Homo sapien
catggcagtgcagcttaaaatgtgg

SEQ ID NO: 471695 - DNA, 25 bp, Homo sapien
gctgacatgacccaagtgtgcatgg

SEQ ID NO: 471696 - DNA, 25 bp, Homo sapien
taaacgcacatatctctggctgaca

SEQ ID NO: 471697 - DNA, 25 bp, Homo sapien
tgattgacatcactagtgatcaggg

SEQ ID NO: 471698 - DNA, 25 bp, Homo sapien
gattgacatcactagtgatcaggga

SEQ ID NO: 471699 - DNA, 25 bp, Homo sapien
gatgattgacatcactagtgatcag

SEQ ID NO: 471700 - DNA, 25 bp, Homo sapien
gtgatgattgacatcactagtgatc

SEQ ID NO: 471701 - DNA, 25 bp, Homo sapien
caatttggtctaaatatttattgtt

SEQ ID NO: 471702 - DNA, 25 bp, Homo sapien
cccaatttggtctaaatatttattg

SEQ ID NO: 471703 - DNA, 25 bp, Homo sapien
ccaatttggtctaaatatttattgt

SEQ ID NO: 471704 - DNA, 25 bp, Homo sapien
tggatctcctctgtgaagaggtcat

SEQ ID NO: 471705 - DNA, 25 bp, Homo sapien
ttggatctcctctgtgaagaggtca

SEQ ID NO: 471706 - DNA, 25 bp, Homo sapien
cttggatctcctctgtgaagaggtc

SEQ ID NO: 471707 - DNA, 25 bp, Homo sapien
gctgtcggatccagctgttgtcatt

SEQ ID NO: 471708 - DNA, 25 bp, Homo sapien
tggcactgcgctgtcggatccagct

SEQ ID NO: 471709 - DNA, 25 bp, Homo sapien
ctctccaattctgctcctgatggta

SEQ ID NO: 471710 - DNA, 25 bp, Homo sapien
tctccaattctgctcctgatggtac

SEQ ID NO: 471711 - DNA, 25 bp, Homo sapien
tgcctcacagtaaagacaagaaacc

SEQ ID NO: 471712 - DNA, 25 bp, Homo sapien
gttcagcagccaagaaagttctaag

SEQ ID NO: 471713 - DNA, 25 bp, Homo sapien
cagaatgccccatccagatttgcaa

SEQ ID NO: 471714 - DNA, 25 bp, Homo sapien
cataatagtgcccagagcgttcgct

SEQ ID NO: 471715 - DNA, 25 bp, Homo sapien
gaaactacattgctcagagggtcag

SEQ ID NO: 471716 - DNA, 25 bp, Homo sapien
aagactgtacttcagtggcctccag

SEQ ID NO: 471717 - DNA, 25 bp, Homo sapien
caaaaaactatgtggagaggcccat

SEQ ID NO: 471718 - DNA, 25 bp, Homo sapien
gattacagctgctcaagtgtcccag

SEQ ID NO: 471719 - DNA, 25 bp, Homo sapien
tgatacattatcataaggagaaaga

SEQ ID NO: 471720 - DNA, 25 bp, Homo sapien
ccttccagaccttttctcacatatg

SEQ ID NO: 471721 - DNA, 25 bp, Homo sapien
ctaacccgcagaggtatccaccatt

SEQ ID NO: 471722 - DNA, 25 bp, Homo sapien
agaaaagtccttcctgtctcacgac

SEQ ID NO: 471723 - DNA, 25 bp, Homo sapien
tgtggactgccagagaggtagtttt

SEQ ID NO: 471724 - DNA, 25 bp, Homo sapien
gttacatgggtcaagtgaatgtcat

SEQ ID NO: 471725 - DNA, 25 bp, Homo sapien
tgttacatgggtcaagtgaatgtca

SEQ ID NO: 471726 - DNA, 25 bp, Homo sapien
aggtaatatgtggactgccagagag

SEQ ID NO: 471727 - DNA, 25 bp, Homo sapien
taggcacggtttgatgtggacacca

SEQ ID NO: 471728 - DNA, 25 bp, Homo sapien
gcgactaaagtcttgcacagaggaa

SEQ ID NO: 471729 - DNA, 25 bp, Homo sapien
gctgagagcctgactgtgaagctga

SEQ ID NO: 471730 - DNA, 25 bp, Homo sapien
cacacctgtggtggaggtcttcacg

SEQ ID NO: 471731 - DNA, 25 bp, Homo sapien
aatttgagaagcattcgtgagctgc

SEQ ID NO: 471732 - DNA, 25 bp, Homo sapien
acgatggagcatgcccggaaaagca

SEQ ID NO: 471733 - DNA, 25 bp, Homo sapien
catggaatggtattaagcaagcctt

SEQ ID NO: 471734 - DNA, 25 bp, Homo sapien
cacaggcaaatgagacgatggcaac

SEQ ID NO: 471735 - DNA, 25 bp, Homo sapien
gtcctctacgacctatttttctcag

SEQ ID NO: 471736 - DNA, 25 bp, Homo sapien
gaggctttgcaagtcctctacgacc

SEQ ID NO: 471737 - DNA, 25 bp, Homo sapien
ctcagagcaccaaaagggtggcccc

SEQ ID NO: 471738 - DNA, 25 bp, Homo sapien
tatttttcgccctctttcttgatca

SEQ ID NO: 471739 - DNA, 25 bp, Homo sapien
tctaactttgaaccatctccatggc

SEQ ID NO: 471740 - DNA, 25 bp, Homo sapien
taccagccaactaaagagtgccttg

SEQ ID NO: 471741 - DNA, 25 bp, Homo sapien
tctgagacccttgacacctattcac

SEQ ID NO: 471742 - DNA, 25 bp, Homo sapien
aagtcacactctgctattaacactg

SEQ ID NO: 471743 - DNA, 25 bp, Homo sapien
tagatgcagaacaagaatggaatgg

SEQ ID NO: 471744 - DNA, 25 bp, Homo sapien
gatgcagaacaagaatggaatggag

SEQ ID NO: 471745 - DNA, 25 bp, Homo sapien
ctagatgcagaacaagaatggaatg

SEQ ID NO: 471746 - DNA, 25 bp, Homo sapien
atgcagaacaagaatggaatggagg

SEQ ID NO: 471747 - DNA, 25 bp, Homo sapien
cccagaatgttattgcagtaggagc

SEQ ID NO: 471748 - DNA, 25 bp, Homo sapien
gtaggagcatatgcgcttcccactg

SEQ ID NO: 471749 - DNA, 25 bp, Homo sapien
cccagggactcgatgatcatggcgg

SEQ ID NO: 471750 - DNA, 25 bp, Homo sapien
ggactcgatgatcatggcggctcct

SEQ ID NO: 471751 - DNA, 25 bp, Homo sapien
aatgagcagaatgctacttctaagc

SEQ ID NO: 471752 - DNA, 25 bp, Homo sapien
atcagtcagctcaagaaagcttggg

SEQ ID NO: 471753 - DNA, 25 bp, Homo sapien
gtagattcaaatcaagaccgccaga

SEQ ID NO: 471754 - DNA, 25 bp, Homo sapien
aaaagaacatctacaatcagtcagc

SEQ ID NO: 471755 - DNA, 25 bp, Homo sapien
tcctgaggaagagcctccgaggtca

SEQ ID NO: 471756 - DNA, 25 bp, Homo sapien
gagcctccgaggtcacactcacagg

SEQ ID NO: 471757 - DNA, 25 bp, Homo sapien
agagcctccgaggtcacactcacag

SEQ ID NO: 471758 - DNA, 25 bp, Homo sapien
aagagcctccgaggtcacactcaca

SEQ ID NO: 471759 - DNA, 25 bp, Homo sapien
cagttggtggtttctgatcctgact

SEQ ID NO: 471760 - DNA, 25 bp, Homo sapien
gatagcagtcgttgcagtacagttg

SEQ ID NO: 471761 - DNA, 25 bp, Homo sapien
cagtacagttggtggtttctgatcc

SEQ ID NO: 471762 - DNA, 25 bp, Homo sapien
aatctgagatagcagtcgttgcagt

SEQ ID NO: 471763 - DNA, 25 bp, Homo sapien
aaaggcaagaaattttctctctgat

SEQ ID NO: 471764 - DNA, 25 bp, Homo sapien
ttttctctctgatttgctctcttac

SEQ ID NO: 471765 - DNA, 25 bp, Homo sapien
gcaagaaattttctctctgatttgc

SEQ ID NO: 471766 - DNA, 25 bp, Homo sapien
aagaaattttctctctgatttgctc

SEQ ID NO: 471767 - DNA, 25 bp, Homo sapien
tcttgaaacctggaatcctatggca

SEQ ID NO: 471768 - DNA, 25 bp, Homo sapien
aatcctatggcagtgaacttggagg

SEQ ID NO: 471769 - DNA, 25 bp, Homo sapien
gggaacacactacaattcttgaaac

SEQ ID NO: 471770 - DNA, 25 bp, Homo sapien
tctttgaagggaacacactacaatt

SEQ ID NO: 471771 - DNA, 25 bp, Homo sapien
gctgataccacttgtaacacccttt

SEQ ID NO: 471772 - DNA, 25 bp, Homo sapien
tgtcttgctgtagctatacacaaca

SEQ ID NO: 471773 - DNA, 25 bp, Homo sapien
cacatgcttagatgcaaagtagcat

SEQ ID NO: 471774 - DNA, 25 bp, Homo sapien
gaaacacatgttaccagcatcaagg

SEQ ID NO: 471775 - DNA, 25 bp, Homo sapien
tttacaatggtgattccagaaatca

SEQ ID NO: 471776 - DNA, 25 bp, Homo sapien
ccaccagtacatgcccagccttgac

SEQ ID NO: 471777 - DNA, 25 bp, Homo sapien
ccagtacatgcccagccttgacttt

SEQ ID NO: 471778 - DNA, 25 bp, Homo sapien
attttacaatggtgattccagaaat

SEQ ID NO: 471779 - DNA, 25 bp, Homo sapien
ggatacatagcagtcatcactcaga

SEQ ID NO: 471780 - DNA, 25 bp, Homo sapien
aaaagtgcttagattcagaaacgtg

SEQ ID NO: 471781 - DNA, 25 bp, Homo sapien
gaaacgtgaatattgccatctggga

SEQ ID NO: 471782 - DNA, 25 bp, Homo sapien
cactcttaggataaagctaggcaag

SEQ ID NO: 471783 - DNA, 25 bp, Homo sapien
tgcaacagtgctttcgtatggaggc

SEQ ID NO: 471784 - DNA, 25 bp, Homo sapien
cagtgctttcgtatggaggcttaca

SEQ ID NO: 471785 - DNA, 25 bp, Homo sapien
ttctatctgcaacagtgctttcgta

SEQ ID NO: 471786 - DNA, 25 bp, Homo sapien
ttatagatctacatgagcagcaacc

SEQ ID NO: 471787 - DNA, 25 bp, Homo sapien
gacttctagtatacaaaccatggtt

SEQ ID NO: 471788 - DNA, 25 bp, Homo sapien
aattgaacagaaaggctcaccagtt

SEQ ID NO: 471789 - DNA, 25 bp, Homo sapien
tcccttgtgctctcaagatgctgaa

SEQ ID NO: 471790 - DNA, 25 bp, Homo sapien
tggttctaccaagactacaatgctt

SEQ ID NO: 471791 - DNA, 25 bp, Homo sapien
ggcatagtttcgaaggtatacacca

SEQ ID NO: 471792 - DNA, 25 bp, Homo sapien
ttataggagtcgaagccagcagtgc

SEQ ID NO: 471793 - DNA, 25 bp, Homo sapien
gccaaacaatggagcactatgcaac

SEQ ID NO: 471794 - DNA, 25 bp, Homo sapien
tattcaaccactgcatattgagggc

SEQ ID NO: 471795 - DNA, 25 bp, Homo sapien
gaggtgacatacaacacactgggaa

SEQ ID NO: 471796 - DNA, 25 bp, Homo sapien
cacctctgaggcagatagggtagcc

SEQ ID NO: 471797 - DNA, 25 bp, Homo sapien
tgtatcagaacattgcagagcagaa

SEQ ID NO: 471798 - DNA, 25 bp, Homo sapien
aggcactgaaaactgggccagctac

SEQ ID NO: 471799 - DNA, 25 bp, Homo sapien
ggtaattccagcaatctactcctac

SEQ ID NO: 471800 - DNA, 25 bp, Homo sapien
cattttaacccatggtaattccagc

SEQ ID NO: 471801 - DNA, 25 bp, Homo sapien
aggagccccgggataatcatctaaa

SEQ ID NO: 471802 - DNA, 25 bp, Homo sapien
tcctacttttctcagaggagccccg

SEQ ID NO: 471803 - DNA, 25 bp, Homo sapien
ggaagggttgatctggtctctacag

SEQ ID NO: 471804 - DNA, 25 bp, Homo sapien
gaagggttgatctggtctctacagc

SEQ ID NO: 471805 - DNA, 25 bp, Homo sapien
cagccaggaaaatccgattcagaga

SEQ ID NO: 471806 - DNA, 25 bp, Homo sapien
ggaaaatccgattcagagaaggagc

SEQ ID NO: 471807 - DNA, 25 bp, Homo sapien
caccaccgcacttccagcgaaatca

SEQ ID NO: 471808 - DNA, 25 bp, Homo sapien
accaccgcacttccagcgaaatcat

SEQ ID NO: 471809 - DNA, 25 bp, Homo sapien
tccaccaccgcacttccagcgaaat

SEQ ID NO: 471810 - DNA, 25 bp, Homo sapien
cagtgaaattacgtaaccctgcttc

SEQ ID NO: 471811 - DNA, 25 bp, Homo sapien
atagcttgagccccctgggaggccg

SEQ ID NO: 471812 - DNA, 25 bp, Homo sapien
agcttgagccccctgggaggccgag

SEQ ID NO: 471813 - DNA, 25 bp, Homo sapien
ggatgcagtgagctgagaatgttcc

SEQ ID NO: 471814 - DNA, 25 bp, Homo sapien
ggatagcttgagccccctgggaggc

SEQ ID NO: 471815 - DNA, 25 bp, Homo sapien
cagactgaggatcgcagaggggaaa

SEQ ID NO: 471816 - DNA, 25 bp, Homo sapien
cagcacagactgaggatcgcagagg

SEQ ID NO: 471817 - DNA, 25 bp, Homo sapien
cacagactgaggatcgcagagggga

SEQ ID NO: 471818 - DNA, 25 bp, Homo sapien
gactgaggatcgcagaggggaaagg

SEQ ID NO: 471819 - DNA, 25 bp, Homo sapien
atgaaacaataaggtgtcggagggt

SEQ ID NO: 471820 - DNA, 25 bp, Homo sapien
ttttgaactgtgttctatgaaacaa

SEQ ID NO: 471821 - DNA, 25 bp, Homo sapien
tttttgaactgtgttctatgaaaca

SEQ ID NO: 471822 - DNA, 25 bp, Homo sapien
taaggtgtcggagggttctcaggac

SEQ ID NO: 471823 - DNA, 25 bp, Homo sapien
cttaggcaggctacataacctctgt

SEQ ID NO: 471824 - DNA, 25 bp, Homo sapien
gctgggtaaccttaggcaggctaca

SEQ ID NO: 471825 - DNA, 25 bp, Homo sapien
ttgctagctgggtaaccttaggcag

SEQ ID NO: 471826 - DNA, 25 bp, Homo sapien
gctttgccagttgctagctgggtaa

SEQ ID NO: 471827 - DNA, 25 bp, Homo sapien
gatttaaatcccaccttgatcagca

SEQ ID NO: 471828 - DNA, 25 bp, Homo sapien
gcaactgaacgtggcaagtatgaca

SEQ ID NO: 471829 - DNA, 25 bp, Homo sapien
ccccaggaggcacttaatatttgat

SEQ ID NO: 471830 - DNA, 25 bp, Homo sapien
tgtgaaatgatgcacctgatcggct

SEQ ID NO: 471831 - DNA, 25 bp, Homo sapien
gcattttcctagagtttctgtaagg

SEQ ID NO: 471832 - DNA, 25 bp, Homo sapien
tgaggcacgcagttctttaagaaat

SEQ ID NO: 471833 - DNA, 25 bp, Homo sapien
tcaagatgtttgtggttacagggag

SEQ ID NO: 471834 - DNA, 25 bp, Homo sapien
tctgtaaggacttgactctgaagca

SEQ ID NO: 471835 - DNA, 25 bp, Homo sapien
ctgatttctggccattgtgagtgat

SEQ ID NO: 471836 - DNA, 25 bp, Homo sapien
tgataggcttgctattctgcagcaa

SEQ ID NO: 471837 - DNA, 25 bp, Homo sapien
tgtaatgatcatttgttctgatttc

SEQ ID NO: 471838 - DNA, 25 bp, Homo sapien
ccattgtgagtgataggcttgctat

SEQ ID NO: 471839 - DNA, 25 bp, Homo sapien
cgtcattatgcgaattgtactggtc

SEQ ID NO: 471840 - DNA, 25 bp, Homo sapien
gggaaatggcaatcgtcattatgcg

SEQ ID NO: 471841 - DNA, 25 bp, Homo sapien
tgcgaattgtactggtctttttcaa

SEQ ID NO: 471842 - DNA, 25 bp, Homo sapien
gtactggtctttttcaatacttgaa

SEQ ID NO: 471843 - DNA, 25 bp, Homo sapien
cagtgtagacttcctactggcccat

SEQ ID NO: 471844 - DNA, 25 bp, Homo sapien
catctatggactcaaaaatcactgc

SEQ ID NO: 471845 - DNA, 25 bp, Homo sapien
agacttcctactggcccatctatgg

SEQ ID NO: 471846 - DNA, 25 bp, Homo sapien
tcctactggcccatctatggactca

SEQ ID NO: 471847 - DNA, 25 bp, Homo sapien
tctccagtggtttaaatcattcttt

SEQ ID NO: 471848 - DNA, 25 bp, Homo sapien
tttctccagtggtttaaatcattct

SEQ ID NO: 471849 - DNA, 25 bp, Homo sapien
tgctccttcctatcaactttattcc

SEQ ID NO: 471850 - DNA, 25 bp, Homo sapien
ctccttcctatcaactttattcctc

SEQ ID NO: 471851 - DNA, 25 bp, Homo sapien
caaggtaaattcactggaggagccc

SEQ ID NO: 471852 - DNA, 25 bp, Homo sapien
tagctgctagacactcgaacaagag

SEQ ID NO: 471853 - DNA, 25 bp, Homo sapien
tatgtttttccttgaccagcagagc

SEQ ID NO: 471854 - DNA, 25 bp, Homo sapien
ggttaatgaatgtcccagtcgggca

SEQ ID NO: 471855 - DNA, 25 bp, Homo sapien
tttgtcaccgaaataaaactgtggc

SEQ ID NO: 471856 - DNA, 25 bp, Homo sapien
tcattttaccagcttcggcccaagc

SEQ ID NO: 471857 - DNA, 25 bp, Homo sapien
ggcacttatgcccagatgcactcat

SEQ ID NO: 471858 - DNA, 25 bp, Homo sapien
gaacaaaagccgctcaatgggcaca

SEQ ID NO: 471859 - DNA, 25 bp, Homo sapien
gaaacaatctgttgcttgatatttc

SEQ ID NO: 471860 - DNA, 25 bp, Homo sapien
cgcaaggaaacaatctgttgcttga

SEQ ID NO: 471861 - DNA, 25 bp, Homo sapien
aagaatccctgtccgcaaggaaaca

SEQ ID NO: 471862 - DNA, 25 bp, Homo sapien
tccctgtccgcaaggaaacaatctg

SEQ ID NO: 471863 - DNA, 25 bp, Homo sapien
agaggtttggatccgactcacttcc

SEQ ID NO: 471864 - DNA, 25 bp, Homo sapien
ggtttggatccgactcacttccaca

SEQ ID NO: 471865 - DNA, 25 bp, Homo sapien
tgtagaggtttggatccgactcact

SEQ ID NO: 471866 - DNA, 25 bp, Homo sapien
tttggatccgactcacttccacagt

SEQ ID NO: 471867 - DNA, 25 bp, Homo sapien
cacatttcttgttgcggttcttttt

SEQ ID NO: 471868 - DNA, 25 bp, Homo sapien
tcacatttcttgttgcggttctttt

SEQ ID NO: 471869 - DNA, 25 bp, Homo sapien
aacatttgtgttatagtctacagcc

SEQ ID NO: 471870 - DNA, 25 bp, Homo sapien
ataacatttgtgttatagtctacag

SEQ ID NO: 471871 - DNA, 25 bp, Homo sapien
ttgtcagaacttataacatttgtgt

SEQ ID NO: 471872 - DNA, 25 bp, Homo sapien
catttgtgttatagtctacagccat

SEQ ID NO: 471873 - DNA, 25 bp, Homo sapien
tgtcacctcctgaagtacaccaatt

SEQ ID NO: 471874 - DNA, 25 bp, Homo sapien
tgggagctcgggacactttgtaacc

SEQ ID NO: 471875 - DNA, 25 bp, Homo sapien
cctgggagctcgggacactttgtaa

SEQ ID NO: 471876 - DNA, 25 bp, Homo sapien
cacctcctgaagtacaccaattgtc

SEQ ID NO: 471877 - DNA, 25 bp, Homo sapien
cagtggtatggagggtaattacagt

SEQ ID NO: 471878 - DNA, 25 bp, Homo sapien
tggccctgctgaacagtggtatgga

SEQ ID NO: 471879 - DNA, 25 bp, Homo sapien
ctgaacagtggtatggagggtaatt

SEQ ID NO: 471880 - DNA, 25 bp, Homo sapien
caactggccctgctgaacagtggta

SEQ ID NO: 471881 - DNA, 25 bp, Homo sapien
tgtatctgaaggattccccaaatac

SEQ ID NO: 471882 - DNA, 25 bp, Homo sapien
gtatctgaaggattccccaaataca

SEQ ID NO: 471883 - DNA, 25 bp, Homo sapien
aaagatttcaactcttccaggccca

SEQ ID NO: 471884 - DNA, 25 bp, Homo sapien
tctgatcactgttacaccaattgga

SEQ ID NO: 471885 - DNA, 25 bp, Homo sapien
tgagagctgtcacctaacaggacag

SEQ ID NO: 471886 - DNA, 25 bp, Homo sapien
gcccatcagggtatctgagcaaatg

SEQ ID NO: 471887 - DNA, 25 bp, Homo sapien
gagaagaagatgtaaagttcctcag

SEQ ID NO: 471888 - DNA, 25 bp, Homo sapien
taaagttcctcagatcctacctgtt

SEQ ID NO: 471889 - DNA, 25 bp, Homo sapien
agagaagaagatgtaaagttcctca

SEQ ID NO: 471890 - DNA, 25 bp, Homo sapien
gttcctcagatcctacctgttcaga

SEQ ID NO: 471891 - DNA, 25 bp, Homo sapien
agcatcacatcagcatttgtattcc

SEQ ID NO: 471892 - DNA, 25 bp, Homo sapien
atcacatcagcatttgtattcctgg

SEQ ID NO: 471893 - DNA, 25 bp, Homo sapien
cacatcagcatttgtattcctggac

SEQ ID NO: 471894 - DNA, 25 bp, Homo sapien
gcatcacatcagcatttgtattcct

SEQ ID NO: 471895 - DNA, 25 bp, Homo sapien
agggagagcaattagcagcagtagg

SEQ ID NO: 471896 - DNA, 25 bp, Homo sapien
gagggagagcaattagcagcagtag

SEQ ID NO: 471897 - DNA, 25 bp, Homo sapien
aaattagtgacaccatctgcctgtc

SEQ ID NO: 471898 - DNA, 25 bp, Homo sapien
taataatgtcataccacccaccttg

SEQ ID NO: 471899 - DNA, 25 bp, Homo sapien
caagacacacagaacaccatccaaa

SEQ ID NO: 471900 - DNA, 25 bp, Homo sapien
acaatccaaattagtgacaccatct

SEQ ID NO: 471901 - DNA, 25 bp, Homo sapien
ggactttccatcgtctgctgtcaga

SEQ ID NO: 471902 - DNA, 25 bp, Homo sapien
ttgaaccactaacgtcccttgagag

SEQ ID NO: 471903 - DNA, 25 bp, Homo sapien
gaggattccacagtagagagtcttg

SEQ ID NO: 471904 - DNA, 25 bp, Homo sapien
gagtcttggacgtccatccatcagg

SEQ ID NO: 471905 - DNA, 25 bp, Homo sapien
gaccacatatcaatatagtgtcttc

SEQ ID NO: 471906 - DNA, 25 bp, Homo sapien
tcttcaaccatgttgtacagaggta

SEQ ID NO: 471907 - DNA, 25 bp, Homo sapien
tacagaggtaggcagatggtctttt

SEQ ID NO: 471908 - DNA, 25 bp, Homo sapien
cttttacagcaaaatgaccacatat

SEQ ID NO: 471909 - DNA, 25 bp, Homo sapien
aaacaactgtggagtgtccaatcgg

SEQ ID NO: 471910 - DNA, 25 bp, Homo sapien
gtcattagaacagcatgtacctcag

SEQ ID NO: 471911 - DNA, 25 bp, Homo sapien
tccaatcggtgggttaatggtacaa

SEQ ID NO: 471912 - DNA, 25 bp, Homo sapien
tgtacctcagagtgcataacagctg

SEQ ID NO: 471913 - DNA, 25 bp, Homo sapien
atatagcactaatttccaggcactg

SEQ ID NO: 471914 - DNA, 25 bp, Homo sapien
ggcactgtactacgtattctaaaaa

SEQ ID NO: 471915 - DNA, 25 bp, Homo sapien
tattatatagcactaatttccaggc

SEQ ID NO: 471916 - DNA, 25 bp, Homo sapien
cactgtactacgtattctaaaaaca

SEQ ID NO: 471917 - DNA, 25 bp, Homo sapien
tgcttagcttctagccaaggcacat

SEQ ID NO: 471918 - DNA, 25 bp, Homo sapien
caatcctaatttgagagtgaacaca

SEQ ID NO: 471919 - DNA, 25 bp, Homo sapien
tggtatgccccaacaaaagttcatt

SEQ ID NO: 471920 - DNA, 25 bp, Homo sapien
taacctgggtagtagatccaataga

SEQ ID NO: 471921 - DNA, 25 bp, Homo sapien
tggtaaataattggtgtccagtacg

SEQ ID NO: 471922 - DNA, 25 bp, Homo sapien
gagtaccctgatgtctaccacagtg

SEQ ID NO: 471923 - DNA, 25 bp, Homo sapien
ccttaagtaattcctgagtaccctg

SEQ ID NO: 471924 - DNA, 25 bp, Homo sapien
agtggactatgattcttggtaagac

SEQ ID NO: 471925 - DNA, 25 bp, Homo sapien
gatgataacaatgatgctgatagtc

SEQ ID NO: 471926 - DNA, 25 bp, Homo sapien
cagtcacctagctccatgatgataa

SEQ ID NO: 471927 - DNA, 25 bp, Homo sapien
tgagctttctgcataatccaccagt

SEQ ID NO: 471928 - DNA, 25 bp, Homo sapien
tgcataatccaccagtcacctagct

SEQ ID NO: 471929 - DNA, 25 bp, Homo sapien
ctgccaacttgattggcaacacatc

SEQ ID NO: 471930 - DNA, 25 bp, Homo sapien
caacttgattggcaacacatcacta

SEQ ID NO: 471931 - DNA, 25 bp, Homo sapien
tggcaacacatcactacagtgctgt

SEQ ID NO: 471932 - DNA, 25 bp, Homo sapien
gattggcaacacatcactacagtgc

SEQ ID NO: 471933 - DNA, 25 bp, Homo sapien
caaaattgtcctccagcagttctga

SEQ ID NO: 471934 - DNA, 25 bp, Homo sapien
ttgtcctccagcagttctgagttgc

SEQ ID NO: 471935 - DNA, 25 bp, Homo sapien
cctccagcagttctgagttgcccat

SEQ ID NO: 471936 - DNA, 25 bp, Homo sapien
ctcaaaattgtcctccagcagttct

SEQ ID NO: 471937 - DNA, 25 bp, Homo sapien
gaaacatccctagagggcataggct

SEQ ID NO: 471938 - DNA, 25 bp, Homo sapien
tccctagagggcataggctccagcc

SEQ ID NO: 471939 - DNA, 25 bp, Homo sapien
agccacactggatcactagcctgtc

SEQ ID NO: 471940 - DNA, 25 bp, Homo sapien
ttatccatagtgaaacatccctaga

SEQ ID NO: 471941 - DNA, 25 bp, Homo sapien
tcttctaagaagtagtctaagaaat

SEQ ID NO: 471942 - DNA, 25 bp, Homo sapien
gaagtagtctaagaaattatactct

SEQ ID NO: 471943 - DNA, 25 bp, Homo sapien
tctcttctaagaagtagtctaagaa

SEQ ID NO: 471944 - DNA, 25 bp, Homo sapien
tctaagaagtagtctaagaaattat

SEQ ID NO: 471945 - DNA, 25 bp, Homo sapien
aagctattgcaagaaacactcactt

SEQ ID NO: 471946 - DNA, 25 bp, Homo sapien
tcaagctattgcaagaaacactcac

SEQ ID NO: 471947 - DNA, 25 bp, Homo sapien
caagctattgcaagaaacactcact

SEQ ID NO: 471948 - DNA, 25 bp, Homo sapien
ttcaagctattgcaagaaacactca

SEQ ID NO: 471949 - DNA, 25 bp, Homo sapien
atgaaaagggagaacatgctgagag

SEQ ID NO: 471950 - DNA, 25 bp, Homo sapien
acatgctgagaggtatgagggagac

SEQ ID NO: 471951 - DNA, 25 bp, Homo sapien
gagaacatgctgagaggtatgaggg

SEQ ID NO: 471952 - DNA, 25 bp, Homo sapien
tggatgaaaagggagaacatgctga

SEQ ID NO: 471953 - DNA, 25 bp, Homo sapien
caggagccttataggagtcatggag

SEQ ID NO: 471954 - DNA, 25 bp, Homo sapien
catggagtccataattctgaagaga

SEQ ID NO: 471955 - DNA, 25 bp, Homo sapien
ccataattctgaagagactttagcc

SEQ ID NO: 471956 - DNA, 25 bp, Homo sapien
gactttagcctcaaatttccactcc

SEQ ID NO: 471957 - DNA, 25 bp, Homo sapien
tcaatgttagattgacagatctgaa

SEQ ID NO: 471958 - DNA, 25 bp, Homo sapien
caggcttgttagatttttccgaaat

SEQ ID NO: 471959 - DNA, 25 bp, Homo sapien
gaagaaagtcagtagtaactcgaaa

SEQ ID NO: 471960 - DNA, 25 bp, Homo sapien
aatagttcgttatagataaatgtca

SEQ ID NO: 471961 - DNA, 25 bp, Homo sapien
gcttttgtatgtctgggaccatcgt

SEQ ID NO: 471962 - DNA, 25 bp, Homo sapien
ttcccttcatgtttgagagattttt

SEQ ID NO: 471963 - DNA, 25 bp, Homo sapien
gagcttttttctgggtactatcacc

SEQ ID NO: 471964 - DNA, 25 bp, Homo sapien
gatgagagtagtttacataacacag

SEQ ID NO: 471965 - DNA, 25 bp, Homo sapien
catagtggttttactactatggatg

SEQ ID NO: 471966 - DNA, 25 bp, Homo sapien
ttctatagcgttaagattcatatac

SEQ ID NO: 471967 - DNA, 25 bp, Homo sapien
tatgtacttggcagtttcattgctg

SEQ ID NO: 471968 - DNA, 25 bp, Homo sapien
ggacattaatctcttgtcagatgaa

SEQ ID NO: 471969 - DNA, 25 bp, Homo sapien
aagcaccttgaaaatagggcacaaa

SEQ ID NO: 471970 - DNA, 25 bp, Homo sapien
tctgctgagaatcacaatgtaagcc

SEQ ID NO: 471971 - DNA, 25 bp, Homo sapien
ctgatgactacatgtaatggtgaat

SEQ ID NO: 471972 - DNA, 25 bp, Homo sapien
tcaaatatcttgctagaccagtgaa

SEQ ID NO: 471973 - DNA, 25 bp, Homo sapien
ttagcttcacatctctccacgagca

SEQ ID NO: 471974 - DNA, 25 bp, Homo sapien
tctcgtccgtgtaagttatcagtga

SEQ ID NO: 471975 - DNA, 25 bp, Homo sapien
ggtttggatcgtatcatttttagct

SEQ ID NO: 471976 - DNA, 25 bp, Homo sapien
tccacgagcatctcgtccgtgtaag

SEQ ID NO: 471977 - DNA, 25 bp, Homo sapien
ggtcagttgtgaaccgagctagtgc

SEQ ID NO: 471978 - DNA, 25 bp, Homo sapien
tatgctaaagtagacttttggaagc

SEQ ID NO: 471979 - DNA, 25 bp, Homo sapien
taatgcccagatggtatgcttccca

SEQ ID NO: 471980 - DNA, 25 bp, Homo sapien
gacttttggaagctattgatgtttc

SEQ ID NO: 471981 - DNA, 25 bp, Homo sapien
taacaagataaccttctttagtgtc

SEQ ID NO: 471982 - DNA, 25 bp, Homo sapien
cagagtgagtaattcacattttatc

SEQ ID NO: 471983 - DNA, 25 bp, Homo sapien
cccagaaagactggggcctagaata

SEQ ID NO: 471984 - DNA, 25 bp, Homo sapien
gtgttctgcccctgataaatcagag

SEQ ID NO: 471985 - DNA, 25 bp, Homo sapien
acctgggaggttaccgtgttgatgc

SEQ ID NO: 471986 - DNA, 25 bp, Homo sapien
tcaacttggcagaagaaatcggtca

SEQ ID NO: 471987 - DNA, 25 bp, Homo sapien
cttggcagaagaaatcggtcaaaaa

SEQ ID NO: 471988 - DNA, 25 bp, Homo sapien
gaacaatcaacttggcagaagaaat

SEQ ID NO: 471989 - DNA, 25 bp, Homo sapien
aaaaaagaacaatcaacttggcaga

SEQ ID NO: 471990 - DNA, 25 bp, Homo sapien
attgaagataatcctaggttgaccc

SEQ ID NO: 471991 - DNA, 25 bp, Homo sapien
tgacccaacacaaacctggacacag

SEQ ID NO: 471992 - DNA, 25 bp, Homo sapien
gataatcctaggttgacccaacaca

SEQ ID NO: 471993 - DNA, 25 bp, Homo sapien
gctgtaatgactcttcccatcccca

SEQ ID NO: 471994 - DNA, 25 bp, Homo sapien
cctgtaaactcccattggaacaaga

SEQ ID NO: 471995 - DNA, 25 bp, Homo sapien
taaactcccattggaacaagagctt

SEQ ID NO: 471996 - DNA, 25 bp, Homo sapien
aactcccattggaacaagagctttc

SEQ ID NO: 471997 - DNA, 25 bp, Homo sapien
tgtaaactcccattggaacaagagc

SEQ ID NO: 471998 - DNA, 25 bp, Homo sapien
tgtaactatcattagtaacagaaac

SEQ ID NO: 471999 - DNA, 25 bp, Homo sapien
atgcagttgagtctctccctgtttt

SEQ ID NO: 472000 - DNA, 25 bp, Homo sapien
gaggaggaaccattctcacagaagt

SEQ ID NO: 472001 - DNA, 25 bp, Homo sapien
aaatgaatcccactacttttagagg

SEQ ID NO: 472002 - DNA, 25 bp, Homo sapien
ggtcaaggaccatatgtacatctcc

SEQ ID NO: 472003 - DNA, 25 bp, Homo sapien
gattgtatccgcaccaaggacaggt

SEQ ID NO: 472004 - DNA, 25 bp, Homo sapien
tgtaacttgtaggaggaatgtcagc

SEQ ID NO: 472005 - DNA, 25 bp, Homo sapien
ccaaggacagatccatgaaccagat

SEQ ID NO: 472006 - DNA, 25 bp, Homo sapien
agaccatataaaatagcctactgct

SEQ ID NO: 472007 - DNA, 25 bp, Homo sapien
gatatctgataatatagattccatt

SEQ ID NO: 472008 - DNA, 25 bp, Homo sapien
cttccaaactaagatatctgataat

SEQ ID NO: 472009 - DNA, 25 bp, Homo sapien
ccatataaaatagcctactgctttc

SEQ ID NO: 472010 - DNA, 25 bp, Homo sapien
ctagactttttctagcatcaggaag

SEQ ID NO: 472011 - DNA, 25 bp, Homo sapien
tagactttttctagcatcaggaaga

SEQ ID NO: 472012 - DNA, 25 bp, Homo sapien
aaaatttcgtcatggcctaagaggc

SEQ ID NO: 472013 - DNA, 25 bp, Homo sapien
gctttacgtgatatagctcgctgga

SEQ ID NO: 472014 - DNA, 25 bp, Homo sapien
tatgtcaagttcacgtgccactcag

SEQ ID NO: 472015 - DNA, 25 bp, Homo sapien
aacggacagtacttgattgctgggc

SEQ ID NO: 472016 - DNA, 25 bp, Homo sapien
ttggaaacatctggaccagctcggt

SEQ ID NO: 472017 - DNA, 25 bp, Homo sapien
gaaacatctggaccagctcggttct

SEQ ID NO: 472018 - DNA, 25 bp, Homo sapien
cagctcggttctgctctatccctgt

SEQ ID NO: 472019 - DNA, 25 bp, Homo sapien
tggaccagctcggttctgctctatc

SEQ ID NO: 472020 - DNA, 25 bp, Homo sapien
tcctagatgagaggttttgacaccc

SEQ ID NO: 472021 - DNA, 25 bp, Homo sapien
tcctcctgatttcctagatgagagg

SEQ ID NO: 472022 - DNA, 25 bp, Homo sapien
gatgagaggttttgacacccttctt

SEQ ID NO: 472023 - DNA, 25 bp, Homo sapien
gatttcctagatgagaggttttgac

SEQ ID NO: 472024 - DNA, 25 bp, Homo sapien
cttcccttaggattgaaagaaaatg

SEQ ID NO: 472025 - DNA, 25 bp, Homo sapien
ccttggcagatacaccaaataggat

SEQ ID NO: 472026 - DNA, 25 bp, Homo sapien
ccagggaattggaatgtacactttc

SEQ ID NO: 472027 - DNA, 25 bp, Homo sapien
attcagttcggccttttagtccagg

SEQ ID NO: 472028 - DNA, 25 bp, Homo sapien
cagagactagatattggtcatagaa

SEQ ID NO: 472029 - DNA, 25 bp, Homo sapien
tagaaacgtgaaagacgtgtagcca

SEQ ID NO: 472030 - DNA, 25 bp, Homo sapien
attggtcatagaaacgtgaaagacg

SEQ ID NO: 472031 - DNA, 25 bp, Homo sapien
catagaaacgtgaaagacgtgtagc

SEQ ID NO: 472032 - DNA, 25 bp, Homo sapien
tccattctgctccagttgagaactt

SEQ ID NO: 472033 - DNA, 25 bp, Homo sapien
aagatgacttgtgcaccagaatttc

SEQ ID NO: 472034 - DNA, 25 bp, Homo sapien
tcaatgatgtaggcagaaagtggaa

SEQ ID NO: 472035 - DNA, 25 bp, Homo sapien
gaaaaggtaagatgacttgtgcacc

SEQ ID NO: 472036 - DNA, 25 bp, Homo sapien
cgccccataggcagattcccttgcc

SEQ ID NO: 472037 - DNA, 25 bp, Homo sapien
cccataggcagattcccttgcccat

SEQ ID NO: 472038 - DNA, 25 bp, Homo sapien
tgcccatgctccacatactctccaa

SEQ ID NO: 472039 - DNA, 25 bp, Homo sapien
ccatgctccacatactctccaagtt

SEQ ID NO: 472040 - DNA, 25 bp, Homo sapien
ctgggtttctagatggcttcctgac

SEQ ID NO: 472041 - DNA, 25 bp, Homo sapien
gcctgggtttctagatggcttcctg

SEQ ID NO: 472042 - DNA, 25 bp, Homo sapien
tgggcctgggtttctagatggcttc

SEQ ID NO: 472043 - DNA, 25 bp, Homo sapien
agtgggcctgggtttctagatggct

SEQ ID NO: 472044 - DNA, 25 bp, Homo sapien
agcagatgccatcattttcaaagtt

SEQ ID NO: 472045 - DNA, 25 bp, Homo sapien
gggacagcagatgccatcattttca

SEQ ID NO: 472046 - DNA, 25 bp, Homo sapien
cttttgatgaggggacagcagatgc

SEQ ID NO: 472047 - DNA, 25 bp, Homo sapien
gacagcagatgccatcattttcaaa

SEQ ID NO: 472048 - DNA, 25 bp, Homo sapien
ctctatttgatgtggcaaggagacg

SEQ ID NO: 472049 - DNA, 25 bp, Homo sapien
ttggctatgatcagctctccaggcc

SEQ ID NO: 472050 - DNA, 25 bp, Homo sapien
ccaggccagccctcttttggttgag

SEQ ID NO: 472051 - DNA, 25 bp, Homo sapien
tcttttggttgaggagatcccagca

SEQ ID NO: 472052 - DNA, 25 bp, Homo sapien
tcccaggtcctcattagtgttatct

SEQ ID NO: 472053 - DNA, 25 bp, Homo sapien
taataacacttaacgtaagatctac

SEQ ID NO: 472054 - DNA, 25 bp, Homo sapien
tattttgtgtgataataacacttaa

SEQ ID NO: 472055 - DNA, 25 bp, Homo sapien
ttgaggtatgattggtatgagaagc

SEQ ID NO: 472056 - DNA, 25 bp, Homo sapien
tatgattggtatgagaagctttaca

SEQ ID NO: 472057 - DNA, 25 bp, Homo sapien
tcaggctggatacattgtttaccaa

SEQ ID NO: 472058 - DNA, 25 bp, Homo sapien
gaagagtgagcgtaacacaattcca

SEQ ID NO: 472059 - DNA, 25 bp, Homo sapien
tccagtaatccccaagaagagtgag

SEQ ID NO: 472060 - DNA, 25 bp, Homo sapien
tatatcaagtcatggagtgtacagt

SEQ ID NO: 472061 - DNA, 25 bp, Homo sapien
agggcacttattggccccttctgga

SEQ ID NO: 472062 - DNA, 25 bp, Homo sapien
gatctccttgctgagagttctactt

SEQ ID NO: 472063 - DNA, 25 bp, Homo sapien
ttagttcctcctttcagggcactta

SEQ ID NO: 472064 - DNA, 25 bp, Homo sapien
gtccatagcgtctatactttcctct

SEQ ID NO: 472065 - DNA, 25 bp, Homo sapien
acttgttgtttccagcaagtccaaa

SEQ ID NO: 472066 - DNA, 25 bp, Homo sapien
ttgttgtttccagcaagtccaaaac

SEQ ID NO: 472067 - DNA, 25 bp, Homo sapien
tagaatacacttgttgtttccagca

SEQ ID NO: 472068 - DNA, 25 bp, Homo sapien
tgggaattttagaatacacttgttg

SEQ ID NO: 472069 - DNA, 25 bp, Homo sapien
gaaaattacccacaaagtaggatga

SEQ ID NO: 472070 - DNA, 25 bp, Homo sapien
ttatcttggtccagttaacctttga

SEQ ID NO: 472071 - DNA, 25 bp, Homo sapien
catgctttccatgtatgagcgctta

SEQ ID NO: 472072 - DNA, 25 bp, Homo sapien
gaggaggaacagatacataaaatat

SEQ ID NO: 472073 - DNA, 25 bp, Homo sapien
taaagagttgggctaaatagtagat

SEQ ID NO: 472074 - DNA, 25 bp, Homo sapien
atagactaagtctctcaggctcaaa

SEQ ID NO: 472075 - DNA, 25 bp, Homo sapien
gatttctattctgggcagctttcca

SEQ ID NO: 472076 - DNA, 25 bp, Homo sapien
cactgccattggacctataattagg

SEQ ID NO: 472077 - DNA, 25 bp, Homo sapien
gtcctgatatttcctgatattgcca

SEQ ID NO: 472078 - DNA, 25 bp, Homo sapien
tataattaggatttctattctgggc

SEQ ID NO: 472079 - DNA, 25 bp, Homo sapien
tgtaactgaaatagaggtcttggag

SEQ ID NO: 472080 - DNA, 25 bp, Homo sapien
actgaaatagaggtcttggagcagc

SEQ ID NO: 472081 - DNA, 25 bp, Homo sapien
catgtaactgaaatagaggtcttgg

SEQ ID NO: 472082 - DNA, 25 bp, Homo sapien
taactgaaatagaggtcttggagca

SEQ ID NO: 472083 - DNA, 25 bp, Homo sapien
tttcagagggtcacaattgagactg

SEQ ID NO: 472084 - DNA, 25 bp, Homo sapien
ttctttcagagggtcacaattgaga

SEQ ID NO: 472085 - DNA, 25 bp, Homo sapien
tctttcagagggtcacaattgagac

SEQ ID NO: 472086 - DNA, 25 bp, Homo sapien
cagagggtcacaattgagactgtgt

SEQ ID NO: 472087 - DNA, 25 bp, Homo sapien
agaacaattgtgggagggaggattc

SEQ ID NO: 472088 - DNA, 25 bp, Homo sapien
caaagaacaattgtgggagggagga

SEQ ID NO: 472089 - DNA, 25 bp, Homo sapien
aagaacaattgtgggagggaggatt

SEQ ID NO: 472090 - DNA, 25 bp, Homo sapien
aaagaacaattgtgggagggaggat

SEQ ID NO: 472091 - DNA, 25 bp, Homo sapien
atgttctccaagtggaaaatgataa

SEQ ID NO: 472092 - DNA, 25 bp, Homo sapien
gatgttctccaagtggaaaatgata

SEQ ID NO: 472093 - DNA, 25 bp, Homo sapien
tgttctccaagtggaaaatgataac

SEQ ID NO: 472094 - DNA, 25 bp, Homo sapien
ttcattgacgtctgggagataaggg

SEQ ID NO: 472095 - DNA, 25 bp, Homo sapien
catggcatgtgcatcataaacattc

SEQ ID NO: 472096 - DNA, 25 bp, Homo sapien
ggaggaacaacttggtgtcatttgt

SEQ ID NO: 472097 - DNA, 25 bp, Homo sapien
cattcattgacgtctgggagataag

SEQ ID NO: 472098 - DNA, 25 bp, Homo sapien
tcactcttctcagtggatctgtagc

SEQ ID NO: 472099 - DNA, 25 bp, Homo sapien
aggaatttgacacagtttcctcctt

SEQ ID NO: 472100 - DNA, 25 bp, Homo sapien
agccatgtctggtacaaagtaggaa

SEQ ID NO: 472101 - DNA, 25 bp, Homo sapien
agtggatctgtagccatgtctggta

SEQ ID NO: 472102 - DNA, 25 bp, Homo sapien
gcttttgccgtcagcctcggctgca

SEQ ID NO: 472103 - DNA, 25 bp, Homo sapien
ataaggtacaatacaattgagaagc

SEQ ID NO: 472104 - DNA, 25 bp, Homo sapien
ctgcatagagtctctttttgccaga

SEQ ID NO: 472105 - DNA, 25 bp, Homo sapien
aacagccatcctccacggcaggact

SEQ ID NO: 472106 - DNA, 25 bp, Homo sapien
gttcacctccacatgacacataacc

SEQ ID NO: 472107 - DNA, 25 bp, Homo sapien
ttcacctccacatgacacataacca

SEQ ID NO: 472108 - DNA, 25 bp, Homo sapien
tcacctccacatgacacataaccat

SEQ ID NO: 472109 - DNA, 25 bp, Homo sapien
agtgctctcaaggccatagcacttc

SEQ ID NO: 472110 - DNA, 25 bp, Homo sapien
tgctctcaaggccatagcacttcat

SEQ ID NO: 472111 - DNA, 25 bp, Homo sapien
cagtgctctcaaggccatagcactt

SEQ ID NO: 472112 - DNA, 25 bp, Homo sapien
gtgctctcaaggccatagcacttca

SEQ ID NO: 472113 - DNA, 25 bp, Homo sapien
ttttggaaggtctggacccatgaag

SEQ ID NO: 472114 - DNA, 25 bp, Homo sapien
tggaaggtctggacccatgaagaga

SEQ ID NO: 472115 - DNA, 25 bp, Homo sapien
tttggaaggtctggacccatgaaga

SEQ ID NO: 472116 - DNA, 25 bp, Homo sapien
agttttggaaggtctggacccatga

SEQ ID NO: 472117 - DNA, 25 bp, Homo sapien
gggctgttagccatgaaagccacac

SEQ ID NO: 472118 - DNA, 25 bp, Homo sapien
agtcattgtatggggactggggctg

SEQ ID NO: 472119 - DNA, 25 bp, Homo sapien
ggggctgttagccatgaaagccaca

SEQ ID NO: 472120 - DNA, 25 bp, Homo sapien
cattttatattctcggtgaggagga

SEQ ID NO: 472121 - DNA, 25 bp, Homo sapien
tcttcgtacactggcaactctgtct

SEQ ID NO: 472122 - DNA, 25 bp, Homo sapien
gtagtggtgaatggctcttcgtaca

SEQ ID NO: 472123 - DNA, 25 bp, Homo sapien
cattcctccttctaggtagtggtga

SEQ ID NO: 472124 - DNA, 25 bp, Homo sapien
ctttgaaatttgacgccagtgaaaa

SEQ ID NO: 472125 - DNA, 25 bp, Homo sapien
gctttgaaatttgacgccagtgaaa

SEQ ID NO: 472126 - DNA, 25 bp, Homo sapien
tttgaaatttgacgccagtgaaaaa

SEQ ID NO: 472127 - DNA, 25 bp, Homo sapien
ttgaaatttgacgccagtgaaaaac

SEQ ID NO: 472128 - DNA, 25 bp, Homo sapien
ctttcgatcattcctcatttctgtt

SEQ ID NO: 472129 - DNA, 25 bp, Homo sapien
ttactttcgatcattcctcatttct

SEQ ID NO: 472130 - DNA, 25 bp, Homo sapien
atcattatctcagattcatgctgct

SEQ ID NO: 472131 - DNA, 25 bp, Homo sapien
tgctgtggggttgctgtattttctc

SEQ ID NO: 472132 - DNA, 25 bp, Homo sapien
gttttctgcaggtttcagtaggatc

SEQ ID NO: 472133 - DNA, 25 bp, Homo sapien
ttttctgcaggtttcagtaggatca

SEQ ID NO: 472134 - DNA, 25 bp, Homo sapien
agttttctgcaggtttcagtaggat

SEQ ID NO: 472135 - DNA, 25 bp, Homo sapien
tcctctccagctaatgatctgttag

SEQ ID NO: 472136 - DNA, 25 bp, Homo sapien
ctctccagctaatgatctgttagcc

SEQ ID NO: 472137 - DNA, 25 bp, Homo sapien
cctctccagctaatgatctgttagc

SEQ ID NO: 472138 - DNA, 25 bp, Homo sapien
tgatcaccaaatcctgagggtaaag

SEQ ID NO: 472139 - DNA, 25 bp, Homo sapien
ctttgccagattcttgtttcttcca

SEQ ID NO: 472140 - DNA, 25 bp, Homo sapien
tcaatcatcatatatatagcatgag

SEQ ID NO: 472141 - DNA, 25 bp, Homo sapien
cacatttaggaatcttgtagtccat

SEQ ID NO: 472142 - DNA, 25 bp, Homo sapien
ccaaaattttcagcatgacatttgc

SEQ ID NO: 472143 - DNA, 25 bp, Homo sapien
ctttccctaaagcaattgccaaaat

SEQ ID NO: 472144 - DNA, 25 bp, Homo sapien
gcaattgccaaaattttcagcatga

SEQ ID NO: 472145 - DNA, 25 bp, Homo sapien
gcatgacatttgcattgtggaaagg

SEQ ID NO: 472146 - DNA, 25 bp, Homo sapien
ctcacagcaggaatagcgttcaact

SEQ ID NO: 472147 - DNA, 25 bp, Homo sapien
aggaatagcgttcaacttctcagcc

SEQ ID NO: 472148 - DNA, 25 bp, Homo sapien
tatttccagggtcagtatactaaat

SEQ ID NO: 472149 - DNA, 25 bp, Homo sapien
ctcagcctttatttccagggtcagt

SEQ ID NO: 472150 - DNA, 25 bp, Homo sapien
tcctgagtgtggtcctacttgcatc

SEQ ID NO: 472151 - DNA, 25 bp, Homo sapien
tctcctgagtgtggtcctacttgca

SEQ ID NO: 472152 - DNA, 25 bp, Homo sapien
ggtcctacttgcatcaatttcatca

SEQ ID NO: 472153 - DNA, 25 bp, Homo sapien
gagtgtggtcctacttgcatcaatt

SEQ ID NO: 472154 - DNA, 25 bp, Homo sapien
gcaggtgtcagatgtaacagtgcag

SEQ ID NO: 472155 - DNA, 25 bp, Homo sapien
gtgtcagatgtaacagtgcagtctg

SEQ ID NO: 472156 - DNA, 25 bp, Homo sapien
ctccagctgagggtacggcgcagat

SEQ ID NO: 472157 - DNA, 25 bp, Homo sapien
tacggcgcagattttgcaggtgtca

SEQ ID NO: 472158 - DNA, 25 bp, Homo sapien
ctcctttcaggcacacacgcttagg

SEQ ID NO: 472159 - DNA, 25 bp, Homo sapien
cacacgcttaggtaggttaatatta

SEQ ID NO: 472160 - DNA, 25 bp, Homo sapien
tttcaggcacacacgcttaggtagg

SEQ ID NO: 472161 - DNA, 25 bp, Homo sapien
caggcacacacgcttaggtaggtta

SEQ ID NO: 472162 - DNA, 25 bp, Homo sapien
tgccagaggctccttttgacttctg

SEQ ID NO: 472163 - DNA, 25 bp, Homo sapien
ctgccagaggctccttttgacttct

SEQ ID NO: 472164 - DNA, 25 bp, Homo sapien
tttgacttctgttccataccttcat

SEQ ID NO: 472165 - DNA, 25 bp, Homo sapien
ccttttgacttctgttccatacctt

SEQ ID NO: 472166 - DNA, 25 bp, Homo sapien
ctctcctgcaccatgtcaaacacac

SEQ ID NO: 472167 - DNA, 25 bp, Homo sapien
gattcttgggaagccagtccagtca

SEQ ID NO: 472168 - DNA, 25 bp, Homo sapien
cagtcatggaaactagaagcagaaa

SEQ ID NO: 472169 - DNA, 25 bp, Homo sapien
tcagtcatggaaactagaagcagaa

SEQ ID NO: 472170 - DNA, 25 bp, Homo sapien
tcatttaaagtcagcttctgagtag

SEQ ID NO: 472171 - DNA, 25 bp, Homo sapien
cacctaggtcatttaaagtcagctt

SEQ ID NO: 472172 - DNA, 25 bp, Homo sapien
aaagtcagcttctgagtagaattaa

SEQ ID NO: 472173 - DNA, 25 bp, Homo sapien
ttaaagtcagcttctgagtagaatt

SEQ ID NO: 472174 - DNA, 25 bp, Homo sapien
gagccttttccgtgtctatacttgg

SEQ ID NO: 472175 - DNA, 25 bp, Homo sapien
tcctggtacttgaaccacatagttc

SEQ ID NO: 472176 - DNA, 25 bp, Homo sapien
caaagctattttggacaccttggag

SEQ ID NO: 472177 - DNA, 25 bp, Homo sapien
cgacttgtcatgatggaacccctga

SEQ ID NO: 472178 - DNA, 25 bp, Homo sapien
gcagctttgcagattgacttacttg

SEQ ID NO: 472179 - DNA, 25 bp, Homo sapien
cacagattggtatagcctacagtac

SEQ ID NO: 472180 - DNA, 25 bp, Homo sapien
gcccattgatctagtggtgcaccag

SEQ ID NO: 472181 - DNA, 25 bp, Homo sapien
ggttcagcatatcttataaggcaca

SEQ ID NO: 472182 - DNA, 25 bp, Homo sapien
tgaaatggcttctacttcctaggac

SEQ ID NO: 472183 - DNA, 25 bp, Homo sapien
gaagtgccagcatatcctatcaggt

SEQ ID NO: 472184 - DNA, 25 bp, Homo sapien
gactaggatgaagaggataacagcc

SEQ ID NO: 472185 - DNA, 25 bp, Homo sapien
aacagccatggaggtgttatcatca

SEQ ID NO: 472186 - DNA, 25 bp, Homo sapien
atcatggtctaccataggaccccag

SEQ ID NO: 472187 - DNA, 25 bp, Homo sapien
tttgaacctcgtgcttccagtttgg

SEQ ID NO: 472188 - DNA, 25 bp, Homo sapien
ggaccccagctggcactaatgcaca

SEQ ID NO: 472189 - DNA, 25 bp, Homo sapien
ttgaacctcgtgcttccagtttggg

SEQ ID NO: 472190 - DNA, 25 bp, Homo sapien
gagagggcagcaatgtatttgagaa

SEQ ID NO: 472191 - DNA, 25 bp, Homo sapien
tgcagggggagtttcaatatcttgt

SEQ ID NO: 472192 - DNA, 25 bp, Homo sapien
caatatcttgtggatgggaaagtaa

SEQ ID NO: 472193 - DNA, 25 bp, Homo sapien
gagggcagcaatgtatttgagaaac

SEQ ID NO: 472194 - DNA, 25 bp, Homo sapien
gcccctagccttcagcgttgctgtt

SEQ ID NO: 472195 - DNA, 25 bp, Homo sapien
aggatgctggcacagcccctagcct

SEQ ID NO: 472196 - DNA, 25 bp, Homo sapien
ctgagcttttcagtgccccacatgc

SEQ ID NO: 472197 - DNA, 25 bp, Homo sapien
ggtcaacacccttttcgtcacactg

SEQ ID NO: 472198 - DNA, 25 bp, Homo sapien
tagaacagggatctactatggcatg

SEQ ID NO: 472199 - DNA, 25 bp, Homo sapien
tagaaccatgggctggcgtaatgag

SEQ ID NO: 472200 - DNA, 25 bp, Homo sapien
ttggtccctgcacttagaaccatgg

SEQ ID NO: 472201 - DNA, 25 bp, Homo sapien
ggcatgttccttaaatccaacctgg

SEQ ID NO: 472202 - DNA, 25 bp, Homo sapien
tgtggaagtgatatctccctcctgg

SEQ ID NO: 472203 - DNA, 25 bp, Homo sapien
tggaagtgatatctccctcctggaa

SEQ ID NO: 472204 - DNA, 25 bp, Homo sapien
cagtgtggaagtgatatctccctcc

SEQ ID NO: 472205 - DNA, 25 bp, Homo sapien
ggtagcagtgtggaagtgatatctc

SEQ ID NO: 472206 - DNA, 25 bp, Homo sapien
gaagctctgactgtgttacatgtga

SEQ ID NO: 472207 - DNA, 25 bp, Homo sapien
agtttgaggttgtggcctgcagcag

SEQ ID NO: 472208 - DNA, 25 bp, Homo sapien
gctctgactgtgttacatgtgacag

SEQ ID NO: 472209 - DNA, 25 bp, Homo sapien
gggcttgaagctctgactgtgttac

SEQ ID NO: 472210 - DNA, 25 bp, Homo sapien
gattatctccgcattcacaaagctt

SEQ ID NO: 472211 - DNA, 25 bp, Homo sapien
gacctgtggctagaatctgtctgca

SEQ ID NO: 472212 - DNA, 25 bp, Homo sapien
tctcttagggacttagctgtctctc

SEQ ID NO: 472213 - DNA, 25 bp, Homo sapien
gtgtctgaatatcattgccatcaag

SEQ ID NO: 472214 - DNA, 25 bp, Homo sapien
gctaaggctactgctttgctgctgc

SEQ ID NO: 472215 - DNA, 25 bp, Homo sapien
cttgcaagctcataagatttgtagg

SEQ ID NO: 472216 - DNA, 25 bp, Homo sapien
ttatctcctgctaaggctactgctt

SEQ ID NO: 472217 - DNA, 25 bp, Homo sapien
gatttgtaggacaggacaccattct

SEQ ID NO: 472218 - DNA, 25 bp, Homo sapien
ttgtggctgcataagtccccacgat

SEQ ID NO: 472219 - DNA, 25 bp, Homo sapien
ataagtccccacgatgtagttccag

SEQ ID NO: 472220 - DNA, 25 bp, Homo sapien
gagcctcagagaatgcccaactgaa

SEQ ID NO: 472221 - DNA, 25 bp, Homo sapien
ttgtccccatgttgattctgaggtg

SEQ ID NO: 472222 - DNA, 25 bp, Homo sapien
cttgggaagtcctgaatctagtcca

SEQ ID NO: 472223 - DNA, 25 bp, Homo sapien
tagaggaagcgccatggtttttccc

SEQ ID NO: 472224 - DNA, 25 bp, Homo sapien
ttggcattagaggaagcgccatggt

SEQ ID NO: 472225 - DNA, 25 bp, Homo sapien
tctagtccatggaggatattctctc

SEQ ID NO: 472226 - DNA, 25 bp, Homo sapien
atgttgttgatggaaactgtgggtt

SEQ ID NO: 472227 - DNA, 25 bp, Homo sapien
gacaggaaaggatgggatgttgttg

SEQ ID NO: 472228 - DNA, 25 bp, Homo sapien
ctaagaggttatcaattaaaggagc

SEQ ID NO: 472229 - DNA, 25 bp, Homo sapien
tgtgggttctaagaggttatcaatt

SEQ ID NO: 472230 - DNA, 25 bp, Homo sapien
ctctgtgctctgacatgaaactgca

SEQ ID NO: 472231 - DNA, 25 bp, Homo sapien
actgcagaattggagctgctccaac

SEQ ID NO: 472232 - DNA, 25 bp, Homo sapien
gctcatggcttcctgtttagcttcc

SEQ ID NO: 472233 - DNA, 25 bp, Homo sapien
tcagggaatgagctcatggcttcct

SEQ ID NO: 472234 - DNA, 25 bp, Homo sapien
tgtgagagccatggacagtaatgag

SEQ ID NO: 472235 - DNA, 25 bp, Homo sapien
gaccctgctggcctgttgtctgaga

SEQ ID NO: 472236 - DNA, 25 bp, Homo sapien
gcatgtcttgtagggcagaatcaca

SEQ ID NO: 472237 - DNA, 25 bp, Homo sapien
gagatgaggccattaactaagcatg

SEQ ID NO: 472238 - DNA, 25 bp, Homo sapien
tttttctggtgacattctttttctg

SEQ ID NO: 472239 - DNA, 25 bp, Homo sapien
ttctggtgacattctttttctgcta

SEQ ID NO: 472240 - DNA, 25 bp, Homo sapien
ctcatctatggcttcctttttctgg

SEQ ID NO: 472241 - DNA, 25 bp, Homo sapien
tcatctatggcttcctttttctggt

SEQ ID NO: 472242 - DNA, 25 bp, Homo sapien
tactctgatactctggccacatctg

SEQ ID NO: 472243 - DNA, 25 bp, Homo sapien
ggtactctgatactctggccacatc

SEQ ID NO: 472244 - DNA, 25 bp, Homo sapien
tcatttgtggaatcgattggtggta

SEQ ID NO: 472245 - DNA, 25 bp, Homo sapien
gaatcgattggtggtactctgatac

SEQ ID NO: 472246 - DNA, 25 bp, Homo sapien
gatcttaatttaggcacggtatcct

SEQ ID NO: 472247 - DNA, 25 bp, Homo sapien
cttggctgattgatagcgccagtgg

SEQ ID NO: 472248 - DNA, 25 bp, Homo sapien
gattgatagcgccagtgggagatct

SEQ ID NO: 472249 - DNA, 25 bp, Homo sapien
ggctcttggctgattgatagcgcca

SEQ ID NO: 472250 - DNA, 25 bp, Homo sapien
aaaagcatcacttagtcacctaggg

SEQ ID NO: 472251 - DNA, 25 bp, Homo sapien
gaagccgagattgaaatgtcacacc

SEQ ID NO: 472252 - DNA, 25 bp, Homo sapien
gaacttaatccacagggcaagaatg

SEQ ID NO: 472253 - DNA, 25 bp, Homo sapien
tcacaccggcaggatcaattagatg

SEQ ID NO: 472254 - DNA, 25 bp, Homo sapien
tggaagttcgaggagaagagtcaca

SEQ ID NO: 472255 - DNA, 25 bp, Homo sapien
tatggaagttcgaggagaagagtca

SEQ ID NO: 472256 - DNA, 25 bp, Homo sapien
gttgtatggaagttcgaggagaaga

SEQ ID NO: 472257 - DNA, 25 bp, Homo sapien
tgtatggaagttcgaggagaagagt

SEQ ID NO: 472258 - DNA, 25 bp, Homo sapien
ccatcatcttccaagttatgcaaaa

SEQ ID NO: 472259 - DNA, 25 bp, Homo sapien
ccccatcatcttccaagttatgcaa

SEQ ID NO: 472260 - DNA, 25 bp, Homo sapien
agttatgcaaaatgtcatctataga

SEQ ID NO: 472261 - DNA, 25 bp, Homo sapien
ttatgcaaaatgtcatctatagaca

SEQ ID NO: 472262 - DNA, 25 bp, Homo sapien
tttataggaaagagccctgcaggcc

SEQ ID NO: 472263 - DNA, 25 bp, Homo sapien
gcagcttgttggtcaatcttcatga

SEQ ID NO: 472264 - DNA, 25 bp, Homo sapien
taaacacgtctatacactaccagag

SEQ ID NO: 472265 - DNA, 25 bp, Homo sapien
gaaaaccagtacctagagactctgc

SEQ ID NO: 472266 - DNA, 25 bp, Homo sapien
taggcaaatcatacctggacaggtg

SEQ ID NO: 472267 - DNA, 25 bp, Homo sapien
caagtccagtacagattagaagcca

SEQ ID NO: 472268 - DNA, 25 bp, Homo sapien
catggttcactaactcaaaaggcag

SEQ ID NO: 472269 - DNA, 25 bp, Homo sapien
gagacgctgcatccaaatatggtga

SEQ ID NO: 472270 - DNA, 25 bp, Homo sapien
tatggagcggaacagacttcaacag

SEQ ID NO: 472271 - DNA, 25 bp, Homo sapien
catttaagtgaacgatttgattgtc

SEQ ID NO: 472272 - DNA, 25 bp, Homo sapien
tcaaagatggcgcagcctttaccag

SEQ ID NO: 472273 - DNA, 25 bp, Homo sapien
ttaccagtgttgttgggtatggagc

SEQ ID NO: 472274 - DNA, 25 bp, Homo sapien
tcatctgttagcagacagctggaac

SEQ ID NO: 472275 - DNA, 25 bp, Homo sapien
tgctgttcctttggctcacaacctc

SEQ ID NO: 472276 - DNA, 25 bp, Homo sapien
gttaatcctctgactttcaaaggcc

SEQ ID NO: 472277 - DNA, 25 bp, Homo sapien
tctcaatactggagagtataaggct

SEQ ID NO: 472278 - DNA, 25 bp, Homo sapien
tatcataatgttgtccaattccatc

SEQ ID NO: 472279 - DNA, 25 bp, Homo sapien
taactatatttaccacactgcagtg

SEQ ID NO: 472280 - DNA, 25 bp, Homo sapien
gagcattcgaaatgtactttcagcg

SEQ ID NO: 472281 - DNA, 25 bp, Homo sapien
cctcttgtctaactgtgcctttgta

SEQ ID NO: 472282 - DNA, 25 bp, Homo sapien
tcaaatattccctgttcctgagaag

SEQ ID NO: 472283 - DNA, 25 bp, Homo sapien
tgctggtcatcatctcgtggctgct

SEQ ID NO: 472284 - DNA, 25 bp, Homo sapien
gtaagaagtggtcgctgttacagcc

SEQ ID NO: 472285 - DNA, 25 bp, Homo sapien
taagaactctatgactactgccatc

SEQ ID NO: 472286 - DNA, 25 bp, Homo sapien
agatgcagtcaaagtcttttcagac

SEQ ID NO: 472287 - DNA, 25 bp, Homo sapien
tctctaaatgtaagaagagcagaaa

SEQ ID NO: 472288 - DNA, 25 bp, Homo sapien
tcaaccatctaatgctataaagatt

SEQ ID NO: 472289 - DNA, 25 bp, Homo sapien
acagaaatactagctactgttttcc

SEQ ID NO: 472290 - DNA, 25 bp, Homo sapien
tgtaagcctatcagagtcaatcctt

SEQ ID NO: 472291 - DNA, 25 bp, Homo sapien
tcaaaccagagccatatatatgtct

SEQ ID NO: 472292 - DNA, 25 bp, Homo sapien
gaaataggtctttgtatagccagaa

SEQ ID NO: 472293 - DNA, 25 bp, Homo sapien
tatttcaataaagccatgtaaggtg

SEQ ID NO: 472294 - DNA, 25 bp, Homo sapien
agataccattcaaataacctgggag

SEQ ID NO: 472295 - DNA, 25 bp, Homo sapien
gggttcatttgagtaagccctccaa

SEQ ID NO: 472296 - DNA, 25 bp, Homo sapien
tgttgccctaattaccatttgatga

SEQ ID NO: 472297 - DNA, 25 bp, Homo sapien
gcatgcatttacatatgttgcccta

SEQ ID NO: 472298 - DNA, 25 bp, Homo sapien
cactgtcttgtacataggcatctta

SEQ ID NO: 472299 - DNA, 25 bp, Homo sapien
taatggttagggacagtaaatctac

SEQ ID NO: 472300 - DNA, 25 bp, Homo sapien
cccgccccgcacattatttgaaaga

SEQ ID NO: 472301 - DNA, 25 bp, Homo sapien
cagggacgactgtcccctctaaagt

SEQ ID NO: 472302 - DNA, 25 bp, Homo sapien
tgagtttcttacatccttatcgagg

SEQ ID NO: 472303 - DNA, 25 bp, Homo sapien
tattaccccagtaatttgcatcagc

SEQ ID NO: 472304 - DNA, 25 bp, Homo sapien
tagactcatgtgatccaagctgtat

SEQ ID NO: 472305 - DNA, 25 bp, Homo sapien
tgtccatacagatgttacaaatcga

SEQ ID NO: 472306 - DNA, 25 bp, Homo sapien
gctcctgagtgcagcgcggcttcct

SEQ ID NO: 472307 - DNA, 25 bp, Homo sapien
cagcacacgtggattacccaacggg

SEQ ID NO: 472308 - DNA, 25 bp, Homo sapien
gaaggcggttgcagctcctgagtgc

SEQ ID NO: 472309 - DNA, 25 bp, Homo sapien
gctgagcgagcgtccgggttccggg

SEQ ID NO: 472310 - DNA, 25 bp, Homo sapien
cgacccggcactcgcctggagcgcg

SEQ ID NO: 472311 - DNA, 25 bp, Homo sapien
actggaactcaagggggcgcacagc

SEQ ID NO: 472312 - DNA, 25 bp, Homo sapien
gcgggcggagcgcactggaactcaa

SEQ ID NO: 472313 - DNA, 25 bp, Homo sapien
cgcgggccgcgacccggcactcgcc

SEQ ID NO: 472314 - DNA, 25 bp, Homo sapien
tgacacgacaaccaacgatggcagg

SEQ ID NO: 472315 - DNA, 25 bp, Homo sapien
tctccaggtttttcgcgtctctcta

SEQ ID NO: 472316 - DNA, 25 bp, Homo sapien
gctgcactgctggaagcgcccagtt

SEQ ID NO: 472317 - DNA, 25 bp, Homo sapien
ggcggctctttcgtctctccaggtt

SEQ ID NO: 472318 - DNA, 25 bp, Homo sapien
ttgaacaaaatctggctgcgctcgg

SEQ ID NO: 472319 - DNA, 25 bp, Homo sapien
gaacaaaatctggctgcgctcggac

SEQ ID NO: 472320 - DNA, 25 bp, Homo sapien
tgaacaaaatctggctgcgctcgga

SEQ ID NO: 472321 - DNA, 25 bp, Homo sapien
tcacttcgaagtgaagtgcctcgaa

SEQ ID NO: 472322 - DNA, 25 bp, Homo sapien
cccttcacttcgaagtgaagtgcct

SEQ ID NO: 472323 - DNA, 25 bp, Homo sapien
cttcgaagtgaagtgcctcgaaggc

SEQ ID NO: 472324 - DNA, 25 bp, Homo sapien
cttcacttcgaagtgaagtgcctcg

SEQ ID NO: 472325 - DNA, 25 bp, Homo sapien
ttcaacgaaggctgaatgggacccg

SEQ ID NO: 472326 - DNA, 25 bp, Homo sapien
tgttgtgagtctaagggcgcgattc

SEQ ID NO: 472327 - DNA, 25 bp, Homo sapien
gttagatctgcaactgttgtgagtc

SEQ ID NO: 472328 - DNA, 25 bp, Homo sapien
taagggcgcgattcaacgaaggctg

SEQ ID NO: 472329 - DNA, 25 bp, Homo sapien
tctccttctaaatgcaaaaagtcaa

SEQ ID NO: 472330 - DNA, 25 bp, Homo sapien
ttctaaatgcaaaaagtcaatgact

SEQ ID NO: 472331 - DNA, 25 bp, Homo sapien
gcaaaaagtcaatgacttctaaagc

SEQ ID NO: 472332 - DNA, 25 bp, Homo sapien
atgcaaaaagtcaatgacttctaaa

SEQ ID NO: 472333 - DNA, 25 bp, Homo sapien
cactctggatgtgggatatctctgt

SEQ ID NO: 472334 - DNA, 25 bp, Homo sapien
gcccaggtgcccacacattgatgat

SEQ ID NO: 472335 - DNA, 25 bp, Homo sapien
gatgatgttttaggcttgtctgccc

SEQ ID NO: 472336 - DNA, 25 bp, Homo sapien
ttttcagtgttaacagatgtcccca

SEQ ID NO: 472337 - DNA, 25 bp, Homo sapien
ttctgcttgccgtttggtgagtttt

SEQ ID NO: 472338 - DNA, 25 bp, Homo sapien
tctgcttgccgtttggtgagttttt

SEQ ID NO: 472339 - DNA, 25 bp, Homo sapien
tgcttgccgtttggtgagtttttgg

SEQ ID NO: 472340 - DNA, 25 bp, Homo sapien
tgccgtttggtgagtttttggttca

SEQ ID NO: 472341 - DNA, 25 bp, Homo sapien
gaactgaaattttttatcctctgct

SEQ ID NO: 472342 - DNA, 25 bp, Homo sapien
gagaactgaaattttttatcctctg

SEQ ID NO: 472343 - DNA, 25 bp, Homo sapien
aactgaaattttttatcctctgctg

SEQ ID NO: 472344 - DNA, 25 bp, Homo sapien
tgaaattttttatcctctgctgtcg

SEQ ID NO: 472345 - DNA, 25 bp, Homo sapien
catctgcagcactggtttatgatcg

SEQ ID NO: 472346 - DNA, 25 bp, Homo sapien
tcgatgctgagtagcatttctgtca

SEQ ID NO: 472347 - DNA, 25 bp, Homo sapien
tgcagcactggtttatgatcgatgc

SEQ ID NO: 472348 - DNA, 25 bp, Homo sapien
ggtttatgatcgatgctgagtagca

SEQ ID NO: 472349 - DNA, 25 bp, Homo sapien
tgggcagtgttagccagtctctttg

SEQ ID NO: 472350 - DNA, 25 bp, Homo sapien
tgtttgggcagtgttagccagtctc

SEQ ID NO: 472351 - DNA, 25 bp, Homo sapien
tttgggcagtgttagccagtctctt

SEQ ID NO: 472352 - DNA, 25 bp, Homo sapien
agattgtttgggcagtgttagccag

SEQ ID NO: 472353 - DNA, 25 bp, Homo sapien
cctttcctgcagttaacttagccat

SEQ ID NO: 472354 - DNA, 25 bp, Homo sapien
tgtagggaatgctcctgcctgatga

SEQ ID NO: 472355 - DNA, 25 bp, Homo sapien
tgctggtttcaatgacatccatatg

SEQ ID NO: 472356 - DNA, 25 bp, Homo sapien
ccatatgctcagatgtagggaatgc

SEQ ID NO: 472357 - DNA, 25 bp, Homo sapien
gtttcaatgacatccatatgctcag

SEQ ID NO: 472358 - DNA, 25 bp, Homo sapien
ccatcacaacttccaggatcaatgc

SEQ ID NO: 472359 - DNA, 25 bp, Homo sapien
ttgggcccatcacaacttccaggat

SEQ ID NO: 472360 - DNA, 25 bp, Homo sapien
gttgggcccatcacaacttccagga

SEQ ID NO: 472361 - DNA, 25 bp, Homo sapien
ggcccatcacaacttccaggatcaa

SEQ ID NO: 472362 - DNA, 25 bp, Homo sapien
gtcgtcagctgcatgtccatggctg

SEQ ID NO: 472363 - DNA, 25 bp, Homo sapien
gcatgtccatggctggatccagctt

SEQ ID NO: 472364 - DNA, 25 bp, Homo sapien
agctgcatgtccatggctggatcca

SEQ ID NO: 472365 - DNA, 25 bp, Homo sapien
tccatggctggatccagctttagta

SEQ ID NO: 472366 - DNA, 25 bp, Homo sapien
tgggaccagttgctatcagggagta

SEQ ID NO: 472367 - DNA, 25 bp, Homo sapien
cttaggataggatgaaacctggggt

SEQ ID NO: 472368 - DNA, 25 bp, Homo sapien
cagttgctatcagggagtaatgagg

SEQ ID NO: 472369 - DNA, 25 bp, Homo sapien
cctggggtgggaccagttgctatca

SEQ ID NO: 472370 - DNA, 25 bp, Homo sapien
tagcacctgttgtcaccaggtacca

SEQ ID NO: 472371 - DNA, 25 bp, Homo sapien
ggtaccaccgaagacctggactgaa

SEQ ID NO: 472372 - DNA, 25 bp, Homo sapien
ctggactgaacccaatagaaagtga

SEQ ID NO: 472373 - DNA, 25 bp, Homo sapien
taatggacagaggtaatagcacctg

SEQ ID NO: 472374 - DNA, 25 bp, Homo sapien
agaggagtaatttgtttgctggatg

SEQ ID NO: 472375 - DNA, 25 bp, Homo sapien
ttgtttgctggatgtctgactgcct

SEQ ID NO: 472376 - DNA, 25 bp, Homo sapien
tcgttgtaaagaagaggttcagttc

SEQ ID NO: 472377 - DNA, 25 bp, Homo sapien
ttcagttcaggaggagtgaaccaga

SEQ ID NO: 472378 - DNA, 25 bp, Homo sapien
tccatccatatgagaccgtgctgct

SEQ ID NO: 472379 - DNA, 25 bp, Homo sapien
tggaagtcctgaacagcaccctgtg

SEQ ID NO: 472380 - DNA, 25 bp, Homo sapien
tggcccctgaaggaacgaaacgtga

SEQ ID NO: 472381 - DNA, 25 bp, Homo sapien
cagctgtctgtggtccttgcgttca

SEQ ID NO: 472382 - DNA, 25 bp, Homo sapien
tgtcttatggaggaatgtgagactg

SEQ ID NO: 472383 - DNA, 25 bp, Homo sapien
caggggtgtcttatggaggaatgtg

SEQ ID NO: 472384 - DNA, 25 bp, Homo sapien
gggtgtcttatggaggaatgtgaga

SEQ ID NO: 472385 - DNA, 25 bp, Homo sapien
ccaggggtgtcttatggaggaatgt

SEQ ID NO: 472386 - DNA, 25 bp, Homo sapien
tgctccactacaagaaacccagttg

SEQ ID NO: 472387 - DNA, 25 bp, Homo sapien
acccagttgctcagatttagtttaa

SEQ ID NO: 472388 - DNA, 25 bp, Homo sapien
taaagagttttgctccactacaaga

SEQ ID NO: 472389 - DNA, 25 bp, Homo sapien
tacaagaaacccagttgctcagatt

SEQ ID NO: 472390 - DNA, 25 bp, Homo sapien
tcctctgaataacacgatctgtcag

SEQ ID NO: 472391 - DNA, 25 bp, Homo sapien
tcccactttcaagccatggattgct

SEQ ID NO: 472392 - DNA, 25 bp, Homo sapien
gctggctatgtgaaacacttccgta

SEQ ID NO: 472393 - DNA, 25 bp, Homo sapien
tgaaacacttccgtagtggttccca

SEQ ID NO: 472394 - DNA, 25 bp, Homo sapien
tcacaaaagcagcatatgtgggcgg

SEQ ID NO: 472395 - DNA, 25 bp, Homo sapien
aacagtgctggatatgttggaactg

SEQ ID NO: 472396 - DNA, 25 bp, Homo sapien
tgctggatatgttggaactgtagat

SEQ ID NO: 472397 - DNA, 25 bp, Homo sapien
atatgtgggcgggagcctgatgtct

SEQ ID NO: 472398 - DNA, 25 bp, Homo sapien
ccttggcgaaatgcagtaatcggcc

SEQ ID NO: 472399 - DNA, 25 bp, Homo sapien
gcagggtgccacgtgtcatcaaaat

SEQ ID NO: 472400 - DNA, 25 bp, Homo sapien
caggtcaaggccagaaaactttgga

SEQ ID NO: 472401 - DNA, 25 bp, Homo sapien
taatcggccttgcacttcaatacca

SEQ ID NO: 472402 - DNA, 25 bp, Homo sapien
gaaagggcctgtttacatactggac

SEQ ID NO: 472403 - DNA, 25 bp, Homo sapien
tcatgctccgaaactggaaagggcc

SEQ ID NO: 472404 - DNA, 25 bp, Homo sapien
tccagtgcccatagaaggtatcaga

SEQ ID NO: 472405 - DNA, 25 bp, Homo sapien
caagttgtccggagggtactccagc

SEQ ID NO: 472406 - DNA, 25 bp, Homo sapien
tgagaagtgtagttaacacagaaca

SEQ ID NO: 472407 - DNA, 25 bp, Homo sapien
ctttgagaagtgtagttaacacaga

SEQ ID NO: 472408 - DNA, 25 bp, Homo sapien
ctctggtggagagggtcctttgaga

SEQ ID NO: 472409 - DNA, 25 bp, Homo sapien
tcctttgagaagtgtagttaacaca

SEQ ID NO: 472410 - DNA, 25 bp, Homo sapien
gagagatttgtgatagaattattac

SEQ ID NO: 472411 - DNA, 25 bp, Homo sapien
gatttgtgatagaattattacatgc

SEQ ID NO: 472412 - DNA, 25 bp, Homo sapien
caggagagatttgtgatagaattat

SEQ ID NO: 472413 - DNA, 25 bp, Homo sapien
tcaggagagatttgtgatagaatta

SEQ ID NO: 472414 - DNA, 25 bp, Homo sapien
catgggttctagagccaaaatgcga

SEQ ID NO: 472415 - DNA, 25 bp, Homo sapien
gactgctttttacttcggcttgaca

SEQ ID NO: 472416 - DNA, 25 bp, Homo sapien
catgctcaaggctacatctagtgaa

SEQ ID NO: 472417 - DNA, 25 bp, Homo sapien
taataagccatggtctaggagatct

SEQ ID NO: 472418 - DNA, 25 bp, Homo sapien
gggaggaacaaagcaagcagaggct

SEQ ID NO: 472419 - DNA, 25 bp, Homo sapien
ggaacaaagcaagcagaggctgccc

SEQ ID NO: 472420 - DNA, 25 bp, Homo sapien
cagaggctgcccagaacaggcacag

SEQ ID NO: 472421 - DNA, 25 bp, Homo sapien
aacaggcacagagcactttcctcat

SEQ ID NO: 472422 - DNA, 25 bp, Homo sapien
cagtgtttgagaggccagtgtaagc

SEQ ID NO: 472423 - DNA, 25 bp, Homo sapien
tgtttgagaggccagtgtaagccag

SEQ ID NO: 472424 - DNA, 25 bp, Homo sapien
aagcctcatgttgggaccgatttct

SEQ ID NO: 472425 - DNA, 25 bp, Homo sapien
tcttgggtgcataatatctgtgagc

SEQ ID NO: 472426 - DNA, 25 bp, Homo sapien
cttaaataatcctgggtcgtcgtct

SEQ ID NO: 472427 - DNA, 25 bp, Homo sapien
ctgctctgtcggcagttctgtgaag

SEQ ID NO: 472428 - DNA, 25 bp, Homo sapien
gctttggagtagctcagagctgccc

SEQ ID NO: 472429 - DNA, 25 bp, Homo sapien
cctggatgggaaagactgctctgtc

SEQ ID NO: 472430 - DNA, 25 bp, Homo sapien
acttaaatttgaatggcaaggatgg

SEQ ID NO: 472431 - DNA, 25 bp, Homo sapien
tccagtagggaaagtaatgtttgct

SEQ ID NO: 472432 - DNA, 25 bp, Homo sapien
gaatatagacagatatacggaactt

SEQ ID NO: 472433 - DNA, 25 bp, Homo sapien
gaaaaagtttcctgctgtaccagaa

SEQ ID NO: 472434 - DNA, 25 bp, Homo sapien
aggaccgtgtggctctggccttcca

SEQ ID NO: 472435 - DNA, 25 bp, Homo sapien
ttttaatatcacccatgattgaagt

SEQ ID NO: 472436 - DNA, 25 bp, Homo sapien
tttaatatcacccatgattgaagtg

SEQ ID NO: 472437 - DNA, 25 bp, Homo sapien
taatatcacccatgattgaagtgtc

SEQ ID NO: 472438 - DNA, 25 bp, Homo sapien
gggggcagagatgcaaccccaaaaa

SEQ ID NO: 472439 - DNA, 25 bp, Homo sapien
ggcagagatgcaaccccaaaaagct

SEQ ID NO: 472440 - DNA, 25 bp, Homo sapien
tatgccactgtaattatacccttcc

SEQ ID NO: 472441 - DNA, 25 bp, Homo sapien
cctatgccactgtaattataccctt

SEQ ID NO: 472442 - DNA, 25 bp, Homo sapien
caggaacaccatagccagaggcccc

SEQ ID NO: 472443 - DNA, 25 bp, Homo sapien
aggaacaccatagccagaggcccct

SEQ ID NO: 472444 - DNA, 25 bp, Homo sapien
tcttgagtagtaatccttcaagttg

SEQ ID NO: 472445 - DNA, 25 bp, Homo sapien
cttgagtagtaatccttcaagttgg

SEQ ID NO: 472446 - DNA, 25 bp, Homo sapien
ctttcttgagtagtaatccttcaag

SEQ ID NO: 472447 - DNA, 25 bp, Homo sapien
ttcctttcttgagtagtaatccttc

SEQ ID NO: 472448 - DNA, 25 bp, Homo sapien
ttgatccatgttcatgtgcagaaat

SEQ ID NO: 472449 - DNA, 25 bp, Homo sapien
tttgatccatgttcatgtgcagaaa

SEQ ID NO: 472450 - DNA, 25 bp, Homo sapien
tgatccatgttcatgtgcagaaatc

SEQ ID NO: 472451 - DNA, 25 bp, Homo sapien
atttgatccatgttcatgtgcagaa

SEQ ID NO: 472452 - DNA, 25 bp, Homo sapien
cttccttctttgtaagtctgaagta

SEQ ID NO: 472453 - DNA, 25 bp, Homo sapien
tctccttccttctttgtaagtctga

SEQ ID NO: 472454 - DNA, 25 bp, Homo sapien
ccttctttgtaagtctgaagtaagc

SEQ ID NO: 472455 - DNA, 25 bp, Homo sapien
tttgtaaggttccactctctctcct

SEQ ID NO: 472456 - DNA, 25 bp, Homo sapien
ttttgtcactgagatggttcaaagt

SEQ ID NO: 472457 - DNA, 25 bp, Homo sapien
cactgagatggttcaaagtgagcca

SEQ ID NO: 472458 - DNA, 25 bp, Homo sapien
tgccaatgttgagtgcaactggcat

SEQ ID NO: 472459 - DNA, 25 bp, Homo sapien
ggttcaaagtgagccaatttgccaa

SEQ ID NO: 472460 - DNA, 25 bp, Homo sapien
tggaggtgaccgaggaactataccc

SEQ ID NO: 472461 - DNA, 25 bp, Homo sapien
ggaggtgaccgaggaactataccca

SEQ ID NO: 472462 - DNA, 25 bp, Homo sapien
gaggtgaccgaggaactatacccac

SEQ ID NO: 472463 - DNA, 25 bp, Homo sapien
gcaatgtcgctagtagtccaaggat

SEQ ID NO: 472464 - DNA, 25 bp, Homo sapien
tcagcaatgtcgctagtagtccaag

SEQ ID NO: 472465 - DNA, 25 bp, Homo sapien
aggtccctcagcaatgtcgctagta

SEQ ID NO: 472466 - DNA, 25 bp, Homo sapien
tccctcagcaatgtcgctagtagtc

SEQ ID NO: 472467 - DNA, 25 bp, Homo sapien
tcatgatcctgttccaactggtaca

SEQ ID NO: 472468 - DNA, 25 bp, Homo sapien
caaatcatgatcctgttccaactgg

SEQ ID NO: 472469 - DNA, 25 bp, Homo sapien
cccctctaataatgacaactgaatt

SEQ ID NO: 472470 - DNA, 25 bp, Homo sapien
ccctctaataatgacaactgaattt

SEQ ID NO: 472471 - DNA, 25 bp, Homo sapien
ggacaaggaagtacagactcaaatt

SEQ ID NO: 472472 - DNA, 25 bp, Homo sapien
ggaagtacagactcaaattgaacac

SEQ ID NO: 472473 - DNA, 25 bp, Homo sapien
tctgccatggaaactacactgattc

SEQ ID NO: 472474 - DNA, 25 bp, Homo sapien
gctttttacagactcttctcctctc

SEQ ID NO: 472475 - DNA, 25 bp, Homo sapien
gagaacttcagggtaagctgaaaca

SEQ ID NO: 472476 - DNA, 25 bp, Homo sapien
tagaagtggacataagaacaatgag

SEQ ID NO: 472477 - DNA, 25 bp, Homo sapien
aagtggacataagaacaatgagaac

SEQ ID NO: 472478 - DNA, 25 bp, Homo sapien
tgaaacaacttcacgcagtactacc

SEQ ID NO: 472479 - DNA, 25 bp, Homo sapien
aatgatggggcaattgaagaaatat

SEQ ID NO: 472480 - DNA, 25 bp, Homo sapien
tgatggggcaattgaagaaatattc

SEQ ID NO: 472481 - DNA, 25 bp, Homo sapien
atgatggggcaattgaagaaatatt

SEQ ID NO: 472482 - DNA, 25 bp, Homo sapien
cttaaagagagcttcgacgagttca

SEQ ID NO: 472483 - DNA, 25 bp, Homo sapien
tttcaatgtacttaaagagagcttc

SEQ ID NO: 472484 - DNA, 25 bp, Homo sapien
gagagcttcgacgagttcaaaagga

SEQ ID NO: 472485 - DNA, 25 bp, Homo sapien
tgtacttaaagagagcttcgacgag

SEQ ID NO: 472486 - DNA, 25 bp, Homo sapien
aatctgatactgatggcttccaaaa

SEQ ID NO: 472487 - DNA, 25 bp, Homo sapien
gaatctgatactgatggcttccaaa

SEQ ID NO: 472488 - DNA, 25 bp, Homo sapien
atctgatactgatggcttccaaaat

SEQ ID NO: 472489 - DNA, 25 bp, Homo sapien
ggccaattccaactagacatggaag

SEQ ID NO: 472490 - DNA, 25 bp, Homo sapien
tccaggccgtattcggccaggttgc

SEQ ID NO: 472491 - DNA, 25 bp, Homo sapien
aggagtcaacgacataaacatcatt

SEQ ID NO: 472492 - DNA, 25 bp, Homo sapien
tgttgtgagtagcaaagagtttcac

SEQ ID NO: 472493 - DNA, 25 bp, Homo sapien
gatagcatctcccacatagaaaata

SEQ ID NO: 472494 - DNA, 25 bp, Homo sapien
gcatctcccacatagaaaatacaca

SEQ ID NO: 472495 - DNA, 25 bp, Homo sapien
tagcatctcccacatagaaaataca

SEQ ID NO: 472496 - DNA, 25 bp, Homo sapien
catctcccacatagaaaatacacac

SEQ ID NO: 472497 - DNA, 25 bp, Homo sapien
aatggttgtagcccagccactttcc

SEQ ID NO: 472498 - DNA, 25 bp, Homo sapien
tcaatggttgtagcccagccacttt

SEQ ID NO: 472499 - DNA, 25 bp, Homo sapien
caatggttgtagcccagccactttc

SEQ ID NO: 472500 - DNA, 25 bp, Homo sapien
ttctagtatcatctccggcttggaa

SEQ ID NO: 472501 - DNA, 25 bp, Homo sapien
ctagtatcatctccggcttggaata

SEQ ID NO: 472502 - DNA, 25 bp, Homo sapien
agtatcatctccggcttggaatact

SEQ ID NO: 472503 - DNA, 25 bp, Homo sapien
attctagtatcatctccggcttgga

SEQ ID NO: 472504 - DNA, 25 bp, Homo sapien
aaaaggacaattaacagatgatttg

SEQ ID NO: 472505 - DNA, 25 bp, Homo sapien
gatgatttgtggataagtgcattac

SEQ ID NO: 472506 - DNA, 25 bp, Homo sapien
aaggacaattaacagatgatttgtg

SEQ ID NO: 472507 - DNA, 25 bp, Homo sapien
aaaggacaattaacagatgatttgt

SEQ ID NO: 472508 - DNA, 25 bp, Homo sapien
aaatgcaaagaagggagatgggtac

SEQ ID NO: 472509 - DNA, 25 bp, Homo sapien
caaagaagggagatgggtacttcat

SEQ ID NO: 472510 - DNA, 25 bp, Homo sapien
atgcaaagaagggagatgggtactt

SEQ ID NO: 472511 - DNA, 25 bp, Homo sapien
tgcaaagaagggagatgggtacttc

SEQ ID NO: 472512 - DNA, 25 bp, Homo sapien
agtcatgcctttagcagagatggct

SEQ ID NO: 472513 - DNA, 25 bp, Homo sapien
tcatgcctttagcagagatggctcg

SEQ ID NO: 472514 - DNA, 25 bp, Homo sapien
gagatatttgcagtttaatccagtc

SEQ ID NO: 472515 - DNA, 25 bp, Homo sapien
aggcaaagagaagcaactgtagtgg

SEQ ID NO: 472516 - DNA, 25 bp, Homo sapien
gcagtttaatccagtcatctgcaag

SEQ ID NO: 472517 - DNA, 25 bp, Homo sapien
tctgcaagcacaatctgcccatcag

SEQ ID NO: 472518 - DNA, 25 bp, Homo sapien
tgtactgccaatcataaggttgata

SEQ ID NO: 472519 - DNA, 25 bp, Homo sapien
ttcatttacggggtccaactggctg

SEQ ID NO: 472520 - DNA, 25 bp, Homo sapien
gatgatagcaggttgtttggttact

SEQ ID NO: 472521 - DNA, 25 bp, Homo sapien
ggtccaactggctgatgatagcagg

SEQ ID NO: 472522 - DNA, 25 bp, Homo sapien
ccttcactgccataactagaacctc

SEQ ID NO: 472523 - DNA, 25 bp, Homo sapien
ttcactgccataactagaacctccc

SEQ ID NO: 472524 - DNA, 25 bp, Homo sapien
gccttcactgccataactagaacct

SEQ ID NO: 472525 - DNA, 25 bp, Homo sapien
agccttcactgccataactagaacc

SEQ ID NO: 472526 - DNA, 25 bp, Homo sapien
ctctatagcctccaccaacacctgc

SEQ ID NO: 472527 - DNA, 25 bp, Homo sapien
aacacctgcaccatatcctgcccga

SEQ ID NO: 472528 - DNA, 25 bp, Homo sapien
atagcctccaccaacacctgcacca

SEQ ID NO: 472529 - DNA, 25 bp, Homo sapien
caacacctgcaccatatcctgcccg

SEQ ID NO: 472530 - DNA, 25 bp, Homo sapien
aaaaaaatgtcacacatagcatggc

SEQ ID NO: 472531 - DNA, 25 bp, Homo sapien
tggtatttctaagatagatcgttac

SEQ ID NO: 472532 - DNA, 25 bp, Homo sapien
caagccttaacagatgccaccttct

SEQ ID NO: 472533 - DNA, 25 bp, Homo sapien
ctaagatagatcgttacattttaca

SEQ ID NO: 472534 - DNA, 25 bp, Homo sapien
aaagtcatgcctttagcagagatgg

SEQ ID NO: 472535 - DNA, 25 bp, Homo sapien
gggtgactaaagtcatgcctttagc

SEQ ID NO: 472536 - DNA, 25 bp, Homo sapien
gactaaagtcatgcctttagcagag

SEQ ID NO: 472537 - DNA, 25 bp, Homo sapien
ctaaagtcatgcctttagcagagat

SEQ ID NO: 472538 - DNA, 25 bp, Homo sapien
cacagtatgatgtatgagggccaca

SEQ ID NO: 472539 - DNA, 25 bp, Homo sapien
acagtatgatgtatgagggccacag

SEQ ID NO: 472540 - DNA, 25 bp, Homo sapien
catacacagtatgatgtatgagggc

SEQ ID NO: 472541 - DNA, 25 bp, Homo sapien
tacacagtatgatgtatgagggcca

SEQ ID NO: 472542 - DNA, 25 bp, Homo sapien
tgcagggccttagaccgggactttc

SEQ ID NO: 472543 - DNA, 25 bp, Homo sapien
caattacccggcttttgaggagcct

SEQ ID NO: 472544 - DNA, 25 bp, Homo sapien
gattacatatgggactcagtaccct

SEQ ID NO: 472545 - DNA, 25 bp, Homo sapien
caatagtgcggaaatggctcgtcgt

SEQ ID NO: 472546 - DNA, 25 bp, Homo sapien
aggctgcacccagtacttccggagc

SEQ ID NO: 472547 - DNA, 25 bp, Homo sapien
ctgcgacgccggtgggaggagcatg

SEQ ID NO: 472548 - DNA, 25 bp, Homo sapien
gccccaagcgcaggttccggcgcat

SEQ ID NO: 472549 - DNA, 25 bp, Homo sapien
ttgcccctgcgcgtcagctccagag

SEQ ID NO: 472550 - DNA, 25 bp, Homo sapien
accgcgagccaaagcagcgccaggg

SEQ ID NO: 472551 - DNA, 25 bp, Homo sapien
ccccgccgcatctcggcgccctgtg

SEQ ID NO: 472552 - DNA, 25 bp, Homo sapien
tagggcaccggccagtggcgccggg

SEQ ID NO: 472553 - DNA, 25 bp, Homo sapien
cagcaccaggaagcgcgtccccgag

SEQ ID NO: 472554 - DNA, 25 bp, Homo sapien
tttgctctcaagtgcgctccgagcg

SEQ ID NO: 472555 - DNA, 25 bp, Homo sapien
cgtgacccgacacaaaccacggtga

SEQ ID NO: 472556 - DNA, 25 bp, Homo sapien
tgagtctgccgcaagtgaccagagg

SEQ ID NO: 472557 - DNA, 25 bp, Homo sapien
tcttccacgattcaggactgtcctg

SEQ ID NO: 472558 - DNA, 25 bp, Homo sapien
tgttccgcggtaataactaacgaca

SEQ ID NO: 472559 - DNA, 25 bp, Homo sapien
aaaccagagcgagttggtcgcccag

SEQ ID NO: 472560 - DNA, 25 bp, Homo sapien
gaaatcagctacttgtacccagaag

SEQ ID NO: 472561 - DNA, 25 bp, Homo sapien
ctaacgacagtgcatgatataaata

SEQ ID NO: 472562 - DNA, 25 bp, Homo sapien
gcacatttggtctccggtaggtacg

SEQ ID NO: 472563 - DNA, 25 bp, Homo sapien
ggaatgagtcctatgggcacacagg

SEQ ID NO: 472564 - DNA, 25 bp, Homo sapien
gaagactggatttcaggcctcgacg

SEQ ID NO: 472565 - DNA, 25 bp, Homo sapien
taaaagcactctgataaatacgggc

SEQ ID NO: 472566 - DNA, 25 bp, Homo sapien
tacttagcttgacaataaggatcag

SEQ ID NO: 472567 - DNA, 25 bp, Homo sapien
ggacagaaagtatacttagcttgac

SEQ ID NO: 472568 - DNA, 25 bp, Homo sapien
gataggtgagccagttggacagaaa

SEQ ID NO: 472569 - DNA, 25 bp, Homo sapien
tcaggttttggacggaagtcaaagc

SEQ ID NO: 472570 - DNA, 25 bp, Homo sapien
aggtctccatatttaaattcccata

SEQ ID NO: 472571 - DNA, 25 bp, Homo sapien
tgtaatcgaaaaacttcaatgtcat

SEQ ID NO: 472572 - DNA, 25 bp, Homo sapien
ggtctccatatttaaattcccatac

SEQ ID NO: 472573 - DNA, 25 bp, Homo sapien
tggggcttgtaatcgaaaaacttca

SEQ ID NO: 472574 - DNA, 25 bp, Homo sapien
ccttccaggagctaggtacaggagc

SEQ ID NO: 472575 - DNA, 25 bp, Homo sapien
caccaacatgatctaaagtcagcca

SEQ ID NO: 472576 - DNA, 25 bp, Homo sapien
ccaaatcattgaattaaccaaagtt

SEQ ID NO: 472577 - DNA, 25 bp, Homo sapien
taaatgtactaagacaaacaccaac

SEQ ID NO: 472578 - DNA, 25 bp, Homo sapien
gctttggccactacacccctatttg

SEQ ID NO: 472579 - DNA, 25 bp, Homo sapien
tgacacaaccatgggtccaggtaac

SEQ ID NO: 472580 - DNA, 25 bp, Homo sapien
gcctgcatgttatgtggacaagctg

SEQ ID NO: 472581 - DNA, 25 bp, Homo sapien
gcttagaataagtgtgaggagcccc

SEQ ID NO: 472582 - DNA, 25 bp, Homo sapien
ggcatccatttcaggtcggagatgg

SEQ ID NO: 472583 - DNA, 25 bp, Homo sapien
ggcagcgccttgattacaccagaaa

SEQ ID NO: 472584 - DNA, 25 bp, Homo sapien
gttgctacttgaactaatgtcccat

SEQ ID NO: 472585 - DNA, 25 bp, Homo sapien
cattccattgtgtagttcttgccag

SEQ ID NO: 472586 - DNA, 25 bp, Homo sapien
gatgcaatgatcaaatattgctata

SEQ ID NO: 472587 - DNA, 25 bp, Homo sapien
catttggtttttgatgcaatgatca

SEQ ID NO: 472588 - DNA, 25 bp, Homo sapien
ttcatttggtttttgatgcaatgat

SEQ ID NO: 472589 - DNA, 25 bp, Homo sapien
tttgatgcaatgatcaaatattgct

SEQ ID NO: 472590 - DNA, 25 bp, Homo sapien
tgaaagaaagaaccgctaatgatgg

SEQ ID NO: 472591 - DNA, 25 bp, Homo sapien
tattgttggtatggtttaaggcaca

SEQ ID NO: 472592 - DNA, 25 bp, Homo sapien
gaaccgctaatgatggacttttgta

SEQ ID NO: 472593 - DNA, 25 bp, Homo sapien
cacattgattagaaagtagcaggaa

SEQ ID NO: 472594 - DNA, 25 bp, Homo sapien
taatgcctaatagaactgggcccca

SEQ ID NO: 472595 - DNA, 25 bp, Homo sapien
catactccaggatggctaaccctct

SEQ ID NO: 472596 - DNA, 25 bp, Homo sapien
tatccttatgagacaagaatgcttc

SEQ ID NO: 472597 - DNA, 25 bp, Homo sapien
tgtcactgtgtgcaaacctctttgg

SEQ ID NO: 472598 - DNA, 25 bp, Homo sapien
ggatgcctgagtaaacaatggtttt

SEQ ID NO: 472599 - DNA, 25 bp, Homo sapien
aacttgattaagactggatgcctga

SEQ ID NO: 472600 - DNA, 25 bp, Homo sapien
aatgtggagcttcactgttgcaaag

SEQ ID NO: 472601 - DNA, 25 bp, Homo sapien
tcatttaagctatagtcaaagcgaa

SEQ ID NO: 472602 - DNA, 25 bp, Homo sapien
acaaaacaaagtcacctagtgaaca

SEQ ID NO: 472603 - DNA, 25 bp, Homo sapien
caaaacaaagtcacctagtgaacaa

SEQ ID NO: 472604 - DNA, 25 bp, Homo sapien
aacacaaatttggaacagtcgtagg

SEQ ID NO: 472605 - DNA, 25 bp, Homo sapien
atagttggtttctatgttcttgaac

SEQ ID NO: 472606 - DNA, 25 bp, Homo sapien
ttacattccatgtctcataataaat

SEQ ID NO: 472607 - DNA, 25 bp, Homo sapien
gtcgtaggaatcaaaccatgtctct

SEQ ID NO: 472608 - DNA, 25 bp, Homo sapien
gcaagagactcaacagaaattcttt

SEQ ID NO: 472609 - DNA, 25 bp, Homo sapien
ttcataggtaaaaaccaatattcaa

SEQ ID NO: 472610 - DNA, 25 bp, Homo sapien
tgtttctgataggtaaagggatttc

SEQ ID NO: 472611 - DNA, 25 bp, Homo sapien
tagaactgtttgtgcacaatcactg

SEQ ID NO: 472612 - DNA, 25 bp, Homo sapien
gagaaaaaagagcagtagaattaag

SEQ ID NO: 472613 - DNA, 25 bp, Homo sapien
aaaagagcagtagaattaaggtgtt

SEQ ID NO: 472614 - DNA, 25 bp, Homo sapien
gaaaaacagatgctggtgattggag

SEQ ID NO: 472615 - DNA, 25 bp, Homo sapien
aaaatcaccccctgaaaaacagatg

SEQ ID NO: 472616 - DNA, 25 bp, Homo sapien
gagatgttaatatgcagcaattctg

SEQ ID NO: 472617 - DNA, 25 bp, Homo sapien
agatgttaatatgcagcaattctgc

SEQ ID NO: 472618 - DNA, 25 bp, Homo sapien
tgagatgttaatatgcagcaattct

SEQ ID NO: 472619 - DNA, 25 bp, Homo sapien
ctgagatgttaatatgcagcaattc

SEQ ID NO: 472620 - DNA, 25 bp, Homo sapien
tgggtccaaaggtcctacataactg

SEQ ID NO: 472621 - DNA, 25 bp, Homo sapien
tatctatctgtaggaccctgggtcc

SEQ ID NO: 472622 - DNA, 25 bp, Homo sapien
tgaaaccaagatcacctaactcgct

SEQ ID NO: 472623 - DNA, 25 bp, Homo sapien
attctccatattaacaaaggctcgg

SEQ ID NO: 472624 - DNA, 25 bp, Homo sapien
tgaaggtatttttaaaatctgggca

SEQ ID NO: 472625 - DNA, 25 bp, Homo sapien
catctagaagcacaatcactccagt

SEQ ID NO: 472626 - DNA, 25 bp, Homo sapien
cactccagttatggtgtctaaacga

SEQ ID NO: 472627 - DNA, 25 bp, Homo sapien
taaagaacacaagccagttactagc

SEQ ID NO: 472628 - DNA, 25 bp, Homo sapien
tgccattcaatgtgacctgccaaac

SEQ ID NO: 472629 - DNA, 25 bp, Homo sapien
catgttcctgcataccccggttaga

SEQ ID NO: 472630 - DNA, 25 bp, Homo sapien
cagaaggtgcctgtttacccaaacg

SEQ ID NO: 472631 - DNA, 25 bp, Homo sapien
cattactactagctggatagccaga

SEQ ID NO: 472632 - DNA, 25 bp, Homo sapien
taaaggaccttgaaagcttgtctgg

SEQ ID NO: 472633 - DNA, 25 bp, Homo sapien
tatctgtacttatttcctcacagac

SEQ ID NO: 472634 - DNA, 25 bp, Homo sapien
ctatagtgcatccaattcagtcagc

SEQ ID NO: 472635 - DNA, 25 bp, Homo sapien
ctgtacttatttcctcacagaccag

SEQ ID NO: 472636 - DNA, 25 bp, Homo sapien
ctaaaagcctgtactatagtgcatc

SEQ ID NO: 472637 - DNA, 25 bp, Homo sapien
tcgacaggctaaaggaggcgtgaaa

SEQ ID NO: 472638 - DNA, 25 bp, Homo sapien
cattattataaggagtcgacaggct

SEQ ID NO: 472639 - DNA, 25 bp, Homo sapien
ctagatggtgataatgcacagatcc

SEQ ID NO: 472640 - DNA, 25 bp, Homo sapien
caattagcaggttaaagaggcagta

SEQ ID NO: 472641 - DNA, 25 bp, Homo sapien
aagttccaggtacagatatcctcat

SEQ ID NO: 472642 - DNA, 25 bp, Homo sapien
tgttttccctgcataaccaagttct

SEQ ID NO: 472643 - DNA, 25 bp, Homo sapien
cctgagtttggtagaagttcgtgtt

SEQ ID NO: 472644 - DNA, 25 bp, Homo sapien
tacaagaatctttgtctcttcaagg

SEQ ID NO: 472645 - DNA, 25 bp, Homo sapien
gcttttttcacataactattagaat

SEQ ID NO: 472646 - DNA, 25 bp, Homo sapien
acctcagtttcgcaaagtgatagga

SEQ ID NO: 472647 - DNA, 25 bp, Homo sapien
ttccaccacctcagtttcgcaaagt

SEQ ID NO: 472648 - DNA, 25 bp, Homo sapien
caccacctcagtttcgcaaagtgat

SEQ ID NO: 472649 - DNA, 25 bp, Homo sapien
gctctgattgtacaagaattacctg

SEQ ID NO: 472650 - DNA, 25 bp, Homo sapien
aaagtgatgatatgctctcctacag

SEQ ID NO: 472651 - DNA, 25 bp, Homo sapien
cggatggccttcttaagaataaagc

SEQ ID NO: 472652 - DNA, 25 bp, Homo sapien
aaagcggctcttttcagtggtgtga

SEQ ID NO: 472653 - DNA, 25 bp, Homo sapien
tatagaaggataatacagagccaag

SEQ ID NO: 472654 - DNA, 25 bp, Homo sapien
gaatgctttactagttctccttggt

SEQ ID NO: 472655 - DNA, 25 bp, Homo sapien
cacttagaagactgatagatgtcac

SEQ ID NO: 472656 - DNA, 25 bp, Homo sapien
tagggtcttcagttacacatacacc

SEQ ID NO: 472657 - DNA, 25 bp, Homo sapien
catcttggtagggtgtggtttcccg

SEQ ID NO: 472658 - DNA, 25 bp, Homo sapien
tgaagatgtgtggtggccgcctatc

SEQ ID NO: 472659 - DNA, 25 bp, Homo sapien
ggtttcccgacatgatgcccacttg

SEQ ID NO: 472660 - DNA, 25 bp, Homo sapien
tatagtttggagcagattcactggg

SEQ ID NO: 472661 - DNA, 25 bp, Homo sapien
gcatggacataagagtcacttagcc

SEQ ID NO: 472662 - DNA, 25 bp, Homo sapien
gaagcagtagttaagtgcatggaca

SEQ ID NO: 472663 - DNA, 25 bp, Homo sapien
taccaggtaatataaggtgcctctt

SEQ ID NO: 472664 - DNA, 25 bp, Homo sapien
cacttagcctgtgtttgtattgcag

SEQ ID NO: 472665 - DNA, 25 bp, Homo sapien
gctaactgtaatagcgttcctattt

SEQ ID NO: 472666 - DNA, 25 bp, Homo sapien
gaactaatttacactgccgctaact

SEQ ID NO: 472667 - DNA, 25 bp, Homo sapien
cactgccgctaactgtaatagcgtt

SEQ ID NO: 472668 - DNA, 25 bp, Homo sapien
tttacactgccgctaactgtaatag

SEQ ID NO: 472669 - DNA, 25 bp, Homo sapien
caccgtgcctgaccttgactgtctt

SEQ ID NO: 472670 - DNA, 25 bp, Homo sapien
accgtgcctgaccttgactgtcttt

SEQ ID NO: 472671 - DNA, 25 bp, Homo sapien
ccgtgcctgaccttgactgtctttt

SEQ ID NO: 472672 - DNA, 25 bp, Homo sapien
tagtgatcatactccccatttgagg

SEQ ID NO: 472673 - DNA, 25 bp, Homo sapien
ccatttgaggtaatgccaggctgtt

SEQ ID NO: 472674 - DNA, 25 bp, Homo sapien
ggtagagtagtgcatgcatcaccac

SEQ ID NO: 472675 - DNA, 25 bp, Homo sapien
taccactttacatagccactagcag

SEQ ID NO: 472676 - DNA, 25 bp, Homo sapien
taattgtgggatccgcccaatgggt

SEQ ID NO: 472677 - DNA, 25 bp, Homo sapien
gggttcaccttgtccgttgcccaga

SEQ ID NO: 472678 - DNA, 25 bp, Homo sapien
tatagtataagcttacttgatccca

SEQ ID NO: 472679 - DNA, 25 bp, Homo sapien
acagaaccgatttatcaagatggga

SEQ ID NO: 472680 - DNA, 25 bp, Homo sapien
tcgcttaagatagatgatactccag

SEQ ID NO: 472681 - DNA, 25 bp, Homo sapien
tgttcgtaaactccaaatccctgtc

SEQ ID NO: 472682 - DNA, 25 bp, Homo sapien
tctctcaaagtactagtggccaaca

SEQ ID NO: 472683 - DNA, 25 bp, Homo sapien
gtggccaacaatagtgatacactca

SEQ ID NO: 472684 - DNA, 25 bp, Homo sapien
tatcttagctccgattgagagctgc

SEQ ID NO: 472685 - DNA, 25 bp, Homo sapien
gaatgtgttagaccatgtattagcc

SEQ ID NO: 472686 - DNA, 25 bp, Homo sapien
cagttgtttaatcacagtagggaaa

SEQ ID NO: 472687 - DNA, 25 bp, Homo sapien
ttgtagtgagctaaggagtgccagt

SEQ ID NO: 472688 - DNA, 25 bp, Homo sapien
cagtcatatctcaacagttcaacag

SEQ ID NO: 472689 - DNA, 25 bp, Homo sapien
ttaatagtattgcatttctcacaga

SEQ ID NO: 472690 - DNA, 25 bp, Homo sapien
tttaatgtcgttaatgctggactgc

SEQ ID NO: 472691 - DNA, 25 bp, Homo sapien
caacagtcgtatctcccctttgaaa

SEQ ID NO: 472692 - DNA, 25 bp, Homo sapien
tattgcacatatgctaagacgtctt

SEQ ID NO: 472693 - DNA, 25 bp, Homo sapien
tccctgatcagtagggtatacgtaa

SEQ ID NO: 472694 - DNA, 25 bp, Homo sapien
tcatggcattaaggtcagaggcctc

SEQ ID NO: 472695 - DNA, 25 bp, Homo sapien
aagacgtctttgactgactttcatg

SEQ ID NO: 472696 - DNA, 25 bp, Homo sapien
tagcttgagcaatgaggcactgaaa

SEQ ID NO: 472697 - DNA, 25 bp, Homo sapien
tagccaggcgaaaaacttggtcaac

SEQ ID NO: 472698 - DNA, 25 bp, Homo sapien
ccatggagctcgcactctgtgggct

SEQ ID NO: 472699 - DNA, 25 bp, Homo sapien
caacttgtgttgagcggattcgcgt

SEQ ID NO: 472700 - DNA, 25 bp, Homo sapien
agcaggtaacggcggaggggcaggg

SEQ ID NO: 472701 - DNA, 25 bp, Homo sapien
tcgctgaggtagtctctcgcggcgc

SEQ ID NO: 472702 - DNA, 25 bp, Homo sapien
tgaacacagacagcgcgggactgag

SEQ ID NO: 472703 - DNA, 25 bp, Homo sapien
cagccagagccgcaaaggtggagcc

SEQ ID NO: 472704 - DNA, 25 bp, Homo sapien
accagcgcctcggatgcgggcggag

SEQ ID NO: 472705 - DNA, 25 bp, Homo sapien
agacataagcctgtaccactcctgg

SEQ ID NO: 472706 - DNA, 25 bp, Homo sapien
tggcctcacactgaacttcgacgta

SEQ ID NO: 472707 - DNA, 25 bp, Homo sapien
caagagtctggacatattgcgcagg

SEQ ID NO: 472708 - DNA, 25 bp, Homo sapien
gccgggattacaccaagctcgtctg

SEQ ID NO: 472709 - DNA, 25 bp, Homo sapien
cttgtttaggaggagaatagatcat

SEQ ID NO: 472710 - DNA, 25 bp, Homo sapien
gggtattcaataggtcaagtgtgcc

SEQ ID NO: 472711 - DNA, 25 bp, Homo sapien
tatttttcccagttggatcaatgtg

SEQ ID NO: 472712 - DNA, 25 bp, Homo sapien
cctaccatgccactgatcttgatga

SEQ ID NO: 472713 - DNA, 25 bp, Homo sapien
ttgatataaaagaatcgccatgccc

SEQ ID NO: 472714 - DNA, 25 bp, Homo sapien
tcattggcctgtgaagcattggaca

SEQ ID NO: 472715 - DNA, 25 bp, Homo sapien
tgcatgtggccattaccgtcattgg

SEQ ID NO: 472716 - DNA, 25 bp, Homo sapien
catgcccatggactaagaacgatgc

SEQ ID NO: 472717 - DNA, 25 bp, Homo sapien
cagagaaggcttcttaggggatatt

SEQ ID NO: 472718 - DNA, 25 bp, Homo sapien
tgagatcattgtgccctggagtggt

SEQ ID NO: 472719 - DNA, 25 bp, Homo sapien
cattgtgccctggagtggtcagaga

SEQ ID NO: 472720 - DNA, 25 bp, Homo sapien
gatattggactggagttagatctga

SEQ ID NO: 472721 - DNA, 25 bp, Homo sapien
cttcatcaggtatttggaaagctca

SEQ ID NO: 472722 - DNA, 25 bp, Homo sapien
gcatatcttcatcaggtatttggaa

SEQ ID NO: 472723 - DNA, 25 bp, Homo sapien
gtatttggaaagctcatctctggag

SEQ ID NO: 472724 - DNA, 25 bp, Homo sapien
tcatcaggtatttggaaagctcatc

SEQ ID NO: 472725 - DNA, 25 bp, Homo sapien
taatgagtcctctggccaatatagt

SEQ ID NO: 472726 - DNA, 25 bp, Homo sapien
atcagctaatgagtcctctggccaa

SEQ ID NO: 472727 - DNA, 25 bp, Homo sapien
gccaatatagtgttaatgcctgtca

SEQ ID NO: 472728 - DNA, 25 bp, Homo sapien
ctggccaatatagtgttaatgcctg

SEQ ID NO: 472729 - DNA, 25 bp, Homo sapien
tcagcctagttcatccatgtgtttc

SEQ ID NO: 472730 - DNA, 25 bp, Homo sapien
agcctatcttcaagtgtctactttg

SEQ ID NO: 472731 - DNA, 25 bp, Homo sapien
catccatgtgtttcaactgaattaa

SEQ ID NO: 472732 - DNA, 25 bp, Homo sapien
taatttatattctcttcagcctagt

SEQ ID NO: 472733 - DNA, 25 bp, Homo sapien
aagtctgctctacaattttctgctg

SEQ ID NO: 472734 - DNA, 25 bp, Homo sapien
ctttgacctatagtgtaatcagctt

SEQ ID NO: 472735 - DNA, 25 bp, Homo sapien
tctttttgtattactctggtggcac

SEQ ID NO: 472736 - DNA, 25 bp, Homo sapien
aaactctgctgatcaattcttccag

SEQ ID NO: 472737 - DNA, 25 bp, Homo sapien
cattacagcaaatggccctgaggta

SEQ ID NO: 472738 - DNA, 25 bp, Homo sapien
cagaccatctcagaccttatgatgt

SEQ ID NO: 472739 - DNA, 25 bp, Homo sapien
gaggtaattttggtatccacatatc

SEQ ID NO: 472740 - DNA, 25 bp, Homo sapien
tgtctctccccagcggcagttcatt

SEQ ID NO: 472741 - DNA, 25 bp, Homo sapien
aaccacttctctccatgatattctg

SEQ ID NO: 472742 - DNA, 25 bp, Homo sapien
ttttctagtatctttctttgaagtc

SEQ ID NO: 472743 - DNA, 25 bp, Homo sapien
gctttcaactggcttctgtgtaatg

SEQ ID NO: 472744 - DNA, 25 bp, Homo sapien
tcttgaactcatttaaccgtcattt

SEQ ID NO: 472745 - DNA, 25 bp, Homo sapien
aactgggctagttgagtgggcatcc

SEQ ID NO: 472746 - DNA, 25 bp, Homo sapien
ccaactgtgtggattactcgtcaga

SEQ ID NO: 472747 - DNA, 25 bp, Homo sapien
ggtgatatttgcctctctgttgaca

SEQ ID NO: 472748 - DNA, 25 bp, Homo sapien
cccttaggatcaaaatccaggaggc

SEQ ID NO: 472749 - DNA, 25 bp, Homo sapien
tcctgagccatagagaaatagagcg

SEQ ID NO: 472750 - DNA, 25 bp, Homo sapien
cagcctggctctaatgcctcaaaga

SEQ ID NO: 472751 - DNA, 25 bp, Homo sapien
tgttttgagggtccacagttcagac

SEQ ID NO: 472752 - DNA, 25 bp, Homo sapien
tatacacacttaacacatgcacgga

SEQ ID NO: 472753 - DNA, 25 bp, Homo sapien
tctaccccggattataatctcagca

SEQ ID NO: 472754 - DNA, 25 bp, Homo sapien
aatgaggacctgtgggatttaatcc

SEQ ID NO: 472755 - DNA, 25 bp, Homo sapien
ttagactgagtcatttctaccccgg

SEQ ID NO: 472756 - DNA, 25 bp, Homo sapien
tctcagcactgtatttgtcagtttg

SEQ ID NO: 472757 - DNA, 25 bp, Homo sapien
ggcatgacacactatatccatggag

SEQ ID NO: 472758 - DNA, 25 bp, Homo sapien
gtgttgtttactcagatggcttcag

SEQ ID NO: 472759 - DNA, 25 bp, Homo sapien
tctttaatgctagccaaggagtcag

SEQ ID NO: 472760 - DNA, 25 bp, Homo sapien
tccatgttggtgctagagtacagaa

SEQ ID NO: 472761 - DNA, 25 bp, Homo sapien
gctgccagtaaaacccggagaagtg

SEQ ID NO: 472762 - DNA, 25 bp, Homo sapien
gaaggaggtcgctgtctttgtagtc

SEQ ID NO: 472763 - DNA, 25 bp, Homo sapien
tgaagtcgaacgtcagtagctgaca

SEQ ID NO: 472764 - DNA, 25 bp, Homo sapien
gaagtggactacttcagattccgca

SEQ ID NO: 472765 - DNA, 25 bp, Homo sapien
cgatctgcagcgacggttcaggcga

SEQ ID NO: 472766 - DNA, 25 bp, Homo sapien
caaacacaagggctgcgtaaggcat

SEQ ID NO: 472767 - DNA, 25 bp, Homo sapien
taaggcattcggtagtagagctcgc

SEQ ID NO: 472768 - DNA, 25 bp, Homo sapien
gaagtaagggtgactccaaatgcct

SEQ ID NO: 472769 - DNA, 25 bp, Homo sapien
gatacccacagtctccagctattgg

SEQ ID NO: 472770 - DNA, 25 bp, Homo sapien
ctgtgggatacccacagtctccagc

SEQ ID NO: 472771 - DNA, 25 bp, Homo sapien
ctccagctattggagtctcctttcc

SEQ ID NO: 472772 - DNA, 25 bp, Homo sapien
gtgggatacccacagtctccagcta

SEQ ID NO: 472773 - DNA, 25 bp, Homo sapien
tttatggagaatgttatacatcctg

SEQ ID NO: 472774 - DNA, 25 bp, Homo sapien
tttctagcccaacagaaatagaatt

SEQ ID NO: 472775 - DNA, 25 bp, Homo sapien
cctgacactatttataagggtgaaa

SEQ ID NO: 472776 - DNA, 25 bp, Homo sapien
atagaattggaagtcatgtcaaaat

SEQ ID NO: 472777 - DNA, 25 bp, Homo sapien
tctttggagttacagtggacataaa

SEQ ID NO: 472778 - DNA, 25 bp, Homo sapien
cttatatttatgctagcagaacgct

SEQ ID NO: 472779 - DNA, 25 bp, Homo sapien
gctcacttacagacaattttggtga

SEQ ID NO: 472780 - DNA, 25 bp, Homo sapien
gacacagatgcttctatgattgttc

SEQ ID NO: 472781 - DNA, 25 bp, Homo sapien
gtattcgctccactgtcgctgcagc

SEQ ID NO: 472782 - DNA, 25 bp, Homo sapien
cagccaggtattcgctccactgtcg

SEQ ID NO: 472783 - DNA, 25 bp, Homo sapien
cactgtcgctgcagccaccgacatt

SEQ ID NO: 472784 - DNA, 25 bp, Homo sapien
cttcagccaggtattcgctccactg

SEQ ID NO: 472785 - DNA, 25 bp, Homo sapien
tcaatacttcaggagccgtgatccc

SEQ ID NO: 472786 - DNA, 25 bp, Homo sapien
aaattagagttcagggccctcccag

SEQ ID NO: 472787 - DNA, 25 bp, Homo sapien
gacatgacctcaacaatctgcggaa

SEQ ID NO: 472788 - DNA, 25 bp, Homo sapien
ccaatttgaatatgactagggcagc

SEQ ID NO: 472789 - DNA, 25 bp, Homo sapien
gctcccacccatgtttaccaatgga

SEQ ID NO: 472790 - DNA, 25 bp, Homo sapien
gcagacctcacccacacaacagtca

SEQ ID NO: 472791 - DNA, 25 bp, Homo sapien
taccaatggagagagcagagctggc

SEQ ID NO: 472792 - DNA, 25 bp, Homo sapien
catgtttaccaatggagagagcaga

SEQ ID NO: 472793 - DNA, 25 bp, Homo sapien
taacactcacaagggttggcctctt

SEQ ID NO: 472794 - DNA, 25 bp, Homo sapien
cactaacactcacaagggttggcct

SEQ ID NO: 472795 - DNA, 25 bp, Homo sapien
cactcacaagggttggcctcttgga

SEQ ID NO: 472796 - DNA, 25 bp, Homo sapien
tttcactaacactcacaagggttgg

SEQ ID NO: 472797 - DNA, 25 bp, Homo sapien
gtatcatcttccttatagtctttag

SEQ ID NO: 472798 - DNA, 25 bp, Homo sapien
ccttatagtctttagtgtagcaatg

SEQ ID NO: 472799 - DNA, 25 bp, Homo sapien
gtttatgtgacctgaggttgactgt

SEQ ID NO: 472800 - DNA, 25 bp, Homo sapien
tgacctgaggttgactgtccaagcc

SEQ ID NO: 472801 - DNA, 25 bp, Homo sapien
ggccagtacacatcgctggggagtt

SEQ ID NO: 472802 - DNA, 25 bp, Homo sapien
tggccagtacacatcgctggggagt

SEQ ID NO: 472803 - DNA, 25 bp, Homo sapien
gccagtacacatcgctggggagttc

SEQ ID NO: 472804 - DNA, 25 bp, Homo sapien
ttagggcaggaaagatcagctcagt

SEQ ID NO: 472805 - DNA, 25 bp, Homo sapien
tgtgtcaggtgccattctactggaa

SEQ ID NO: 472806 - DNA, 25 bp, Homo sapien
gatcagctcagtatttgggccaaga

SEQ ID NO: 472807 - DNA, 25 bp, Homo sapien
tccacaaaagtattgtgtcaggtgc

SEQ ID NO: 472808 - DNA, 25 bp, Homo sapien
gccagctggcttgtgtttcataagc

SEQ ID NO: 472809 - DNA, 25 bp, Homo sapien
gggcagccagctggcttgtgtttca

SEQ ID NO: 472810 - DNA, 25 bp, Homo sapien
tggcttgtgtttcataagccagttc

SEQ ID NO: 472811 - DNA, 25 bp, Homo sapien
gcagccagctggcttgtgtttcata

SEQ ID NO: 472812 - DNA, 25 bp, Homo sapien
gatagcttgcctgattgaatgcctc

SEQ ID NO: 472813 - DNA, 25 bp, Homo sapien
ttcaagctgcagtgattgggtgcca

SEQ ID NO: 472814 - DNA, 25 bp, Homo sapien
tgtgtttatcaaaggccagatcttc

SEQ ID NO: 472815 - DNA, 25 bp, Homo sapien
tccaaacatttcatctcgggaactg

SEQ ID NO: 472816 - DNA, 25 bp, Homo sapien
cccagtgagaggtaacagcatgctg

SEQ ID NO: 472817 - DNA, 25 bp, Homo sapien
tcccagtgagaggtaacagcatgct

SEQ ID NO: 472818 - DNA, 25 bp, Homo sapien
aatcccagtgagaggtaacagcatg

SEQ ID NO: 472819 - DNA, 25 bp, Homo sapien
gtaatcccagtgagaggtaacagca

SEQ ID NO: 472820 - DNA, 25 bp, Homo sapien
tgcccagtggtcaagctctttaata

SEQ ID NO: 472821 - DNA, 25 bp, Homo sapien
ggttcatcatgcaggaacttccaag

SEQ ID NO: 472822 - DNA, 25 bp, Homo sapien
tcctctcaagagtcagtccctggga

SEQ ID NO: 472823 - DNA, 25 bp, Homo sapien
gaacagaatgagaggtgtccctgtg

SEQ ID NO: 472824 - DNA, 25 bp, Homo sapien
agagtttattcagtggagtctcaac

SEQ ID NO: 472825 - DNA, 25 bp, Homo sapien
tctattgagcagaaaatcaggactt

SEQ ID NO: 472826 - DNA, 25 bp, Homo sapien
ggctaaccagcctgtagtgattccc

SEQ ID NO: 472827 - DNA, 25 bp, Homo sapien
gaaatgggaacctagagtttattca

SEQ ID NO: 472828 - DNA, 25 bp, Homo sapien
tggtagcctcagttcagctaactgg

SEQ ID NO: 472829 - DNA, 25 bp, Homo sapien
gaagcttccatgtaaagcctctaag

SEQ ID NO: 472830 - DNA, 25 bp, Homo sapien
ggtactgaggttatcctgagcttca

SEQ ID NO: 472831 - DNA, 25 bp, Homo sapien
gctgccaaatcagtgaaggcccctg

SEQ ID NO: 472832 - DNA, 25 bp, Homo sapien
cttccctgaatctatctcatactgg

SEQ ID NO: 472833 - DNA, 25 bp, Homo sapien
agaagtggcctgaagtggcctgaca

SEQ ID NO: 472834 - DNA, 25 bp, Homo sapien
tttctctcgtagtccagtgctggcc

SEQ ID NO: 472835 - DNA, 25 bp, Homo sapien
tactggatagcttgataacgtttca

SEQ ID NO: 472836 - DNA, 25 bp, Homo sapien
gcaacaacttgccataggacctgaa

SEQ ID NO: 472837 - DNA, 25 bp, Homo sapien
ggaaagacacactgctttgggtcaa

SEQ ID NO: 472838 - DNA, 25 bp, Homo sapien
tgtgaaagtatttcctgcaacaact

SEQ ID NO: 472839 - DNA, 25 bp, Homo sapien
ctcctatcctctaatgtgaaagtat

SEQ ID NO: 472840 - DNA, 25 bp, Homo sapien
agactgtgtagtatggaccatagga

SEQ ID NO: 472841 - DNA, 25 bp, Homo sapien
ccataggaggggcattcaagctcaa

SEQ ID NO: 472842 - DNA, 25 bp, Homo sapien
ggcattcaagctcaagtcagaagca

SEQ ID NO: 472843 - DNA, 25 bp, Homo sapien
actgtgtagtatggaccataggagg

SEQ ID NO: 472844 - DNA, 25 bp, Homo sapien
catttcctgtgggagacatttttct

SEQ ID NO: 472845 - DNA, 25 bp, Homo sapien
atttcctgtgggagacatttttctc

SEQ ID NO: 472846 - DNA, 25 bp, Homo sapien
tttttctcaaggtaacattggacat

SEQ ID NO: 472847 - DNA, 25 bp, Homo sapien
acatttttctcaaggtaacattgga

SEQ ID NO: 472848 - DNA, 25 bp, Homo sapien
atctgattggccagcatcaatctgg

SEQ ID NO: 472849 - DNA, 25 bp, Homo sapien
gcatcaatctgggctggcaagtcca

SEQ ID NO: 472850 - DNA, 25 bp, Homo sapien
ctgattggccagcatcaatctgggc

SEQ ID NO: 472851 - DNA, 25 bp, Homo sapien
cagcatcaatctgggctggcaagtc

SEQ ID NO: 472852 - DNA, 25 bp, Homo sapien
taatagtgtggagttgagcgtgggc

SEQ ID NO: 472853 - DNA, 25 bp, Homo sapien
gagcgtgggcttgttaacctgaaaa

SEQ ID NO: 472854 - DNA, 25 bp, Homo sapien
gttgagcgtgggcttgttaacctga

SEQ ID NO: 472855 - DNA, 25 bp, Homo sapien
ggagttgagcgtgggcttgttaacc

SEQ ID NO: 472856 - DNA, 25 bp, Homo sapien
tggttccctgagtggtgctcttcat

SEQ ID NO: 472857 - DNA, 25 bp, Homo sapien
tgctgcttccgtgtggttccctgag

SEQ ID NO: 472858 - DNA, 25 bp, Homo sapien
tcagggcgtttctttatccaactgt

SEQ ID NO: 472859 - DNA, 25 bp, Homo sapien
tcttttgttcacctcgtgaaaatcc

SEQ ID NO: 472860 - DNA, 25 bp, Homo sapien
atcatgggaattatgtcggttgagc

SEQ ID NO: 472861 - DNA, 25 bp, Homo sapien
ctgtccaatgcatcatgggaattat

SEQ ID NO: 472862 - DNA, 25 bp, Homo sapien
tgggaattatgtcggttgagcacca

SEQ ID NO: 472863 - DNA, 25 bp, Homo sapien
cggttgagcaccaccctaccgtaat

SEQ ID NO: 472864 - DNA, 25 bp, Homo sapien
caaagtgtcatcagaactgtaccga

SEQ ID NO: 472865 - DNA, 25 bp, Homo sapien
accgactaattgtagcttttggcac

SEQ ID NO: 472866 - DNA, 25 bp, Homo sapien
cagaactgtaccgactaattgtagc

SEQ ID NO: 472867 - DNA, 25 bp, Homo sapien
gcttttggcacatctctctcattta

SEQ ID NO: 472868 - DNA, 25 bp, Homo sapien
tatccaaggtattggccttatatgt

SEQ ID NO: 472869 - DNA, 25 bp, Homo sapien
ctattggttagttggttatccaagg

SEQ ID NO: 472870 - DNA, 25 bp, Homo sapien
ggtattggccttatatgttttagca

SEQ ID NO: 472871 - DNA, 25 bp, Homo sapien
ttagttggttatccaaggtattggc

SEQ ID NO: 472872 - DNA, 25 bp, Homo sapien
tcccatagttagtagatactggtac

SEQ ID NO: 472873 - DNA, 25 bp, Homo sapien
tttcccatagttagtagatactggt

SEQ ID NO: 472874 - DNA, 25 bp, Homo sapien
ttatacttgagcctttcccatagtt

SEQ ID NO: 472875 - DNA, 25 bp, Homo sapien
atacttgagcctttcccatagttag

SEQ ID NO: 472876 - DNA, 25 bp, Homo sapien
ccagtgatctaaacatggacatgct

SEQ ID NO: 472877 - DNA, 25 bp, Homo sapien
cagtgatctaaacatggacatgctc

SEQ ID NO: 472878 - DNA, 25 bp, Homo sapien
ctttgttacttccagtgatctaaac

SEQ ID NO: 472879 - DNA, 25 bp, Homo sapien
ttccagtgatctaaacatggacatg

SEQ ID NO: 472880 - DNA, 25 bp, Homo sapien
gctatggtgttggaggtgttggcat

SEQ ID NO: 472881 - DNA, 25 bp, Homo sapien
ggcattcaatgaaccgccaggttgc

SEQ ID NO: 472882 - DNA, 25 bp, Homo sapien
caggagtagtagcagaagtggatgc

SEQ ID NO: 472883 - DNA, 25 bp, Homo sapien
ttggcattcaatgaaccgccaggtt

SEQ ID NO: 472884 - DNA, 25 bp, Homo sapien
cctgtgctcgaggaggcattgtaac

SEQ ID NO: 472885 - DNA, 25 bp, Homo sapien
tcctgtgctcgaggaggcattgtaa

SEQ ID NO: 472886 - DNA, 25 bp, Homo sapien
ggttcctgtgctcgaggaggcattg

SEQ ID NO: 472887 - DNA, 25 bp, Homo sapien
ttcctgtgctcgaggaggcattgta

SEQ ID NO: 472888 - DNA, 25 bp, Homo sapien
tattggagggtgaacacctggttcc

SEQ ID NO: 472889 - DNA, 25 bp, Homo sapien
aggtattggagggtgaacacctggt

SEQ ID NO: 472890 - DNA, 25 bp, Homo sapien
aactgggctttggaggtattggagg

SEQ ID NO: 472891 - DNA, 25 bp, Homo sapien
gagaactgggctttggaggtattgg

SEQ ID NO: 472892 - DNA, 25 bp, Homo sapien
gtatatacacctggtttaggtggat

SEQ ID NO: 472893 - DNA, 25 bp, Homo sapien
tgtatatacacctggtttaggtgga

SEQ ID NO: 472894 - DNA, 25 bp, Homo sapien
ctgtatatacacctggtttaggtgg

SEQ ID NO: 472895 - DNA, 25 bp, Homo sapien
tctgtatatacacctggtttaggtg

SEQ ID NO: 472896 - DNA, 25 bp, Homo sapien
aagtggccactttgacgatgttatc

SEQ ID NO: 472897 - DNA, 25 bp, Homo sapien
tcacttctctgaagtgaagtggcca

SEQ ID NO: 472898 - DNA, 25 bp, Homo sapien
gacgatgttatcaagatcctgactc

SEQ ID NO: 472899 - DNA, 25 bp, Homo sapien
cactttgacgatgttatcaagatcc

SEQ ID NO: 472900 - DNA, 25 bp, Homo sapien
cataggtacactgattaattacagc

SEQ ID NO: 472901 - DNA, 25 bp, Homo sapien
cattgtgcaatgtacttgcacacgt

SEQ ID NO: 472902 - DNA, 25 bp, Homo sapien
gagtccacacataggtacactgatt

SEQ ID NO: 472903 - DNA, 25 bp, Homo sapien
cttgcacacgtagcttctagaaaac

SEQ ID NO: 472904 - DNA, 25 bp, Homo sapien
attttgatgagattatccaattctt

SEQ ID NO: 472905 - DNA, 25 bp, Homo sapien
gttcattttgatgagattatccaat

SEQ ID NO: 472906 - DNA, 25 bp, Homo sapien
ttcattttgatgagattatccaatt

SEQ ID NO: 472907 - DNA, 25 bp, Homo sapien
tgattcaaaacaagaagatacagcc

SEQ ID NO: 472908 - DNA, 25 bp, Homo sapien
ataaatgattcaaaacaagaagata

SEQ ID NO: 472909 - DNA, 25 bp, Homo sapien
aacaagaagatacagcctgggcaac

SEQ ID NO: 472910 - DNA, 25 bp, Homo sapien
tctctcttggcatatttcaagttat

SEQ ID NO: 472911 - DNA, 25 bp, Homo sapien
acaaacacaagccttgattattcat

SEQ ID NO: 472912 - DNA, 25 bp, Homo sapien
cacaaacacaagccttgattattca

SEQ ID NO: 472913 - DNA, 25 bp, Homo sapien
tgtgactcctgatctaaaacctcct

SEQ ID NO: 472914 - DNA, 25 bp, Homo sapien
cattattgccagaacaggataggaa

SEQ ID NO: 472915 - DNA, 25 bp, Homo sapien
gaaaaacacatctcgggatcctctg

SEQ ID NO: 472916 - DNA, 25 bp, Homo sapien
caacactagactcagtggagaccct

SEQ ID NO: 472917 - DNA, 25 bp, Homo sapien
gaagagactatcaagaccttgattc

SEQ ID NO: 472918 - DNA, 25 bp, Homo sapien
tttggatttgctctgaagagactat

SEQ ID NO: 472919 - DNA, 25 bp, Homo sapien
gatttgctctgaagagactatcaag

SEQ ID NO: 472920 - DNA, 25 bp, Homo sapien
tgctctgaagagactatcaagacct

SEQ ID NO: 472921 - DNA, 25 bp, Homo sapien
ttatctgtccgggtactcatataga

SEQ ID NO: 472922 - DNA, 25 bp, Homo sapien
tccgggtactcatatagatgagact

SEQ ID NO: 472923 - DNA, 25 bp, Homo sapien
catatagatgagactttcaaggctt

SEQ ID NO: 472924 - DNA, 25 bp, Homo sapien
gccatctttatctgtccgggtactc

SEQ ID NO: 472925 - DNA, 25 bp, Homo sapien
tgattaactttaatcggacttccaa

SEQ ID NO: 472926 - DNA, 25 bp, Homo sapien
ttgattaactttaatcggacttcca

SEQ ID NO: 472927 - DNA, 25 bp, Homo sapien
tcaatgtaactcaaatcagaggtcc

SEQ ID NO: 472928 - DNA, 25 bp, Homo sapien
cctactaggtctgatgggtcaaagc

SEQ ID NO: 472929 - DNA, 25 bp, Homo sapien
tacaagagttcactgccacaaagga

SEQ ID NO: 472930 - DNA, 25 bp, Homo sapien
aaaggcttctcaatgtggctctcgc

SEQ ID NO: 472931 - DNA, 25 bp, Homo sapien
ttagcaacagattcgagattttgtc

SEQ ID NO: 472932 - DNA, 25 bp, Homo sapien
tctgctcgttttattcatcctggca

SEQ ID NO: 472933 - DNA, 25 bp, Homo sapien
catcctggcattcactttagcaaca

SEQ ID NO: 472934 - DNA, 25 bp, Homo sapien
ggcattcactttagcaacagattcg

SEQ ID NO: 472935 - DNA, 25 bp, Homo sapien
gatgtggtgccctcaatatcacata

SEQ ID NO: 472936 - DNA, 25 bp, Homo sapien
gatcagggcaccagggattagacac

SEQ ID NO: 472937 - DNA, 25 bp, Homo sapien
gagaagccaaacaaagatgtggtgc

SEQ ID NO: 472938 - DNA, 25 bp, Homo sapien
ccaatatttagagacatctgttcag

SEQ ID NO: 472939 - DNA, 25 bp, Homo sapien
tttacttcagtagcattatcaaggt

SEQ ID NO: 472940 - DNA, 25 bp, Homo sapien
tgggatttacttcagtagcattatc

SEQ ID NO: 472941 - DNA, 25 bp, Homo sapien
tacttcagtagcattatcaaggtct

SEQ ID NO: 472942 - DNA, 25 bp, Homo sapien
gatttacttcagtagcattatcaag

SEQ ID NO: 472943 - DNA, 25 bp, Homo sapien
gtttcaggatccactttaataagcc

SEQ ID NO: 472944 - DNA, 25 bp, Homo sapien
ttgtttcaggatccactttaataag

SEQ ID NO: 472945 - DNA, 25 bp, Homo sapien
tttatttgtttcaggatccacttta

SEQ ID NO: 472946 - DNA, 25 bp, Homo sapien
ctttaataagcccatcaaggtcttt

SEQ ID NO: 472947 - DNA, 25 bp, Homo sapien
ttgatgagattatcaaggctctggc

SEQ ID NO: 472948 - DNA, 25 bp, Homo sapien
ttacttctctttacttcaggggtca

SEQ ID NO: 472949 - DNA, 25 bp, Homo sapien
gatgagattatcaaggctctggccc

SEQ ID NO: 472950 - DNA, 25 bp, Homo sapien
tctctttacttcaggggtcactttg

SEQ ID NO: 472951 - DNA, 25 bp, Homo sapien
tgttcctggatacactttgatgaag

SEQ ID NO: 472952 - DNA, 25 bp, Homo sapien
tcctggatacactttgatgaagtta

SEQ ID NO: 472953 - DNA, 25 bp, Homo sapien
cactttgatgaagttattaaggtct

SEQ ID NO: 472954 - DNA, 25 bp, Homo sapien
tttctgttcctggatacactttgat

SEQ ID NO: 472955 - DNA, 25 bp, Homo sapien
aatgaggctgtcgagactttggccc

SEQ ID NO: 472956 - DNA, 25 bp, Homo sapien
tttcaggagtcactttaatgaggct

SEQ ID NO: 472957 - DNA, 25 bp, Homo sapien
tcactttaatgaggctgtcgagact

SEQ ID NO: 472958 - DNA, 25 bp, Homo sapien
gagtcactttaatgaggctgtcgag

SEQ ID NO: 472959 - DNA, 25 bp, Homo sapien
ttgataagattttccaagtcttggt

SEQ ID NO: 472960 - DNA, 25 bp, Homo sapien
atcactttgataagattttccaagt

SEQ ID NO: 472961 - DNA, 25 bp, Homo sapien
ttttgtttgctgaagggatcacttt

SEQ ID NO: 472962 - DNA, 25 bp, Homo sapien
gtttgctgaagggatcactttgata

SEQ ID NO: 472963 - DNA, 25 bp, Homo sapien
aatatgttcatcaagaccttgttca

SEQ ID NO: 472964 - DNA, 25 bp, Homo sapien
tttttgacagctttggggctgacat

SEQ ID NO: 472965 - DNA, 25 bp, Homo sapien
catcagtgtttttgacagctttggg

SEQ ID NO: 472966 - DNA, 25 bp, Homo sapien
gggctgacattaatatgttcatcaa

SEQ ID NO: 472967 - DNA, 25 bp, Homo sapien
cttgatgagtttatcaagatcttgt

SEQ ID NO: 472968 - DNA, 25 bp, Homo sapien
ctttggttgtttgtgaaaatttcag

SEQ ID NO: 472969 - DNA, 25 bp, Homo sapien
caccttgatgagtttatcaagatct

SEQ ID NO: 472970 - DNA, 25 bp, Homo sapien
tcaccttgatgagtttatcaagatc

SEQ ID NO: 472971 - DNA, 25 bp, Homo sapien
tctgattactgcaggatttactttg

SEQ ID NO: 472972 - DNA, 25 bp, Homo sapien
gcaggatttactttgatgaggttag

SEQ ID NO: 472973 - DNA, 25 bp, Homo sapien
tgattactgcaggatttactttgat

SEQ ID NO: 472974 - DNA, 25 bp, Homo sapien
ctgattactgcaggatttactttga

SEQ ID NO: 472975 - DNA, 25 bp, Homo sapien
gagctgaaggtttcactttaataag

SEQ ID NO: 472976 - DNA, 25 bp, Homo sapien
agctgaaggtttcactttaataaga

SEQ ID NO: 472977 - DNA, 25 bp, Homo sapien
tagttcaaaaggaatatctgtcttt

SEQ ID NO: 472978 - DNA, 25 bp, Homo sapien
gcattaggcgttagttcaaaaggaa

SEQ ID NO: 472979 - DNA, 25 bp, Homo sapien
ggcattaggcgttagttcaaaagga

SEQ ID NO: 472980 - DNA, 25 bp, Homo sapien
ttaggcattaggcgttagttcaaaa

SEQ ID NO: 472981 - DNA, 25 bp, Homo sapien
gtgtgagtagttagtagtaaacacc

SEQ ID NO: 472982 - DNA, 25 bp, Homo sapien
ctggtgtgagtagttagtagtaaac

SEQ ID NO: 472983 - DNA, 25 bp, Homo sapien
aaatctataactggtgtgagtagtt

SEQ ID NO: 472984 - DNA, 25 bp, Homo sapien
taactggtgtgagtagttagtagta

SEQ ID NO: 472985 - DNA, 25 bp, Homo sapien
attcttgttttcagacacatgagaa

SEQ ID NO: 472986 - DNA, 25 bp, Homo sapien
cattcttgttttcagacacatgaga

SEQ ID NO: 472987 - DNA, 25 bp, Homo sapien
cctggcttcataagaatgggaagca

SEQ ID NO: 472988 - DNA, 25 bp, Homo sapien
cttgtggactggttgtgtagagcat

SEQ ID NO: 472989 - DNA, 25 bp, Homo sapien
tagagcattggtgaacccattgact

SEQ ID NO: 472990 - DNA, 25 bp, Homo sapien
gggaagcaattcttgtggactggtt

SEQ ID NO: 472991 - DNA, 25 bp, Homo sapien
ctattctccacatatgtccttgtgt

SEQ ID NO: 472992 - DNA, 25 bp, Homo sapien
tgtacacaacagtatcctgtggtcc

SEQ ID NO: 472993 - DNA, 25 bp, Homo sapien
catatgtccttgtgtacacaacagt

SEQ ID NO: 472994 - DNA, 25 bp, Homo sapien
acaacagtatcctgtggtcctgcct

SEQ ID NO: 472995 - DNA, 25 bp, Homo sapien
cctgacatgtattgaatttcctgga

SEQ ID NO: 472996 - DNA, 25 bp, Homo sapien
gacatgtattgaatttcctggatcc

SEQ ID NO: 472997 - DNA, 25 bp, Homo sapien
ctcctgacatgtattgaatttcctg

SEQ ID NO: 472998 - DNA, 25 bp, Homo sapien
catgtattgaatttcctggatcccc

SEQ ID NO: 472999 - DNA, 25 bp, Homo sapien
tcctgatatccatccttgggtgatt

SEQ ID NO: 473000 - DNA, 25 bp, Homo sapien
tccagagatattctcctgatatcca

SEQ ID NO: 473001 - DNA, 25 bp, Homo sapien
cagagatattctcctgatatccatc

SEQ ID NO: 473002 - DNA, 25 bp, Homo sapien
attttccagagatattctcctgata

SEQ ID NO: 473003 - DNA, 25 bp, Homo sapien
acatctgcatggctgtttgtaagcc

SEQ ID NO: 473004 - DNA, 25 bp, Homo sapien
catctgcatggctgtttgtaagcca

SEQ ID NO: 473005 - DNA, 25 bp, Homo sapien
catggctgtttgtaagccaagaagg

SEQ ID NO: 473006 - DNA, 25 bp, Homo sapien
tgcatggctgtttgtaagccaagaa

SEQ ID NO: 473007 - DNA, 25 bp, Homo sapien
gtgcacatatctctttcaatgacag

SEQ ID NO: 473008 - DNA, 25 bp, Homo sapien
cttaaagcaagtagaatggcagcaa

SEQ ID NO: 473009 - DNA, 25 bp, Homo sapien
ggttttcggcagtaagtgcacatat

SEQ ID NO: 473010 - DNA, 25 bp, Homo sapien
ggcagcaaatttgtaattcatctaa

SEQ ID NO: 473011 - DNA, 25 bp, Homo sapien
tccaaatactatcacccgcttgtag

SEQ ID NO: 473012 - DNA, 25 bp, Homo sapien
tccaaaggctgcttgcatatttcac

SEQ ID NO: 473013 - DNA, 25 bp, Homo sapien
tagcaaggttcacagtgtattgtct

SEQ ID NO: 473014 - DNA, 25 bp, Homo sapien
aaatccaaatactatcacccgcttg

SEQ ID NO: 473015 - DNA, 25 bp, Homo sapien
ttatgtgtgtgaccttattgaagac

SEQ ID NO: 473016 - DNA, 25 bp, Homo sapien
taattttgtacaagagttgatcttc

SEQ ID NO: 473017 - DNA, 25 bp, Homo sapien
gatcttcaatgtgaaagcttttcta

SEQ ID NO: 473018 - DNA, 25 bp, Homo sapien
tttattgctaactctagccagagac

SEQ ID NO: 473019 - DNA, 25 bp, Homo sapien
taatgcatcactcctttgacactgg

SEQ ID NO: 473020 - DNA, 25 bp, Homo sapien
tacaaataataggacagagatctgg

SEQ ID NO: 473021 - DNA, 25 bp, Homo sapien
caacatacggagcagggatggacct

SEQ ID NO: 473022 - DNA, 25 bp, Homo sapien
tcgggatgtcaatgtctacgaatcc

SEQ ID NO: 473023 - DNA, 25 bp, Homo sapien
attgatgttagtgaattatatttac

SEQ ID NO: 473024 - DNA, 25 bp, Homo sapien
tttacaaacacttcacataaagatt

SEQ ID NO: 473025 - DNA, 25 bp, Homo sapien
gacaaaattgatgttagtgaattat

SEQ ID NO: 473026 - DNA, 25 bp, Homo sapien
ttatatttacaaacacttcacataa

SEQ ID NO: 473027 - DNA, 25 bp, Homo sapien
taattatactagttcctcacatgat

SEQ ID NO: 473028 - DNA, 25 bp, Homo sapien
aataaaatctatagcttgagcagtt

SEQ ID NO: 473029 - DNA, 25 bp, Homo sapien
ttttctagaaacagttgctatatgc

SEQ ID NO: 473030 - DNA, 25 bp, Homo sapien
gaacagaggcatgaaattattacac

SEQ ID NO: 473031 - DNA, 25 bp, Homo sapien
tgcccctgacctcctaaatgatatt

SEQ ID NO: 473032 - DNA, 25 bp, Homo sapien
tatgcccatgggaaagaactttatc

SEQ ID NO: 473033 - DNA, 25 bp, Homo sapien
ttcagagttgttaacccttatgccc

SEQ ID NO: 473034 - DNA, 25 bp, Homo sapien
aacgtcagtatacagttgctttgcc

SEQ ID NO: 473035 - DNA, 25 bp, Homo sapien
gaagaatgcagaggtatagggccac

SEQ ID NO: 473036 - DNA, 25 bp, Homo sapien
tgggccctcagttaaggtatttctg

SEQ ID NO: 473037 - DNA, 25 bp, Homo sapien
tagtatacaggtcttgtgtacccca

SEQ ID NO: 473038 - DNA, 25 bp, Homo sapien
cacactcaggttcccgtattattaa

SEQ ID NO: 473039 - DNA, 25 bp, Homo sapien
taagatggtaatcaggagcctcgta

SEQ ID NO: 473040 - DNA, 25 bp, Homo sapien
taatcaggagcctcgtaaagcgcct

SEQ ID NO: 473041 - DNA, 25 bp, Homo sapien
agatggtaatcaggagcctcgtaaa

SEQ ID NO: 473042 - DNA, 25 bp, Homo sapien
tggtaatcaggagcctcgtaaagcg

SEQ ID NO: 473043 - DNA, 25 bp, Homo sapien
tgtaagtcttagagaaaagaagtct

SEQ ID NO: 473044 - DNA, 25 bp, Homo sapien
atttgtaagtcttagagaaaagaag

SEQ ID NO: 473045 - DNA, 25 bp, Homo sapien
gatggtcttttgggacaggaggaac

SEQ ID NO: 473046 - DNA, 25 bp, Homo sapien
cgtcttgtccgtgaggccttcccag

SEQ ID NO: 473047 - DNA, 25 bp, Homo sapien
tgacccttagtttcgtctgtgcaca

SEQ ID NO: 473048 - DNA, 25 bp, Homo sapien
gcaacctgctcgtcttgtccgtgag

SEQ ID NO: 473049 - DNA, 25 bp, Homo sapien
caaaatgggcaactcactaagtgta

SEQ ID NO: 473050 - DNA, 25 bp, Homo sapien
cctgaggctagagtccagctggacc

SEQ ID NO: 473051 - DNA, 25 bp, Homo sapien
tccctgaggctagagtccagctgga

SEQ ID NO: 473052 - DNA, 25 bp, Homo sapien
ggacgtccctgaggctagagtccag

SEQ ID NO: 473053 - DNA, 25 bp, Homo sapien
agcaggacgtccctgaggctagagt

SEQ ID NO: 473054 - DNA, 25 bp, Homo sapien
tcccatcagacgagaaagaacatct

SEQ ID NO: 473055 - DNA, 25 bp, Homo sapien
ccttcccatcagacgagaaagaaca

SEQ ID NO: 473056 - DNA, 25 bp, Homo sapien
ccatcagacgagaaagaacatctgg

SEQ ID NO: 473057 - DNA, 25 bp, Homo sapien
ttcccatcagacgagaaagaacatc

SEQ ID NO: 473058 - DNA, 25 bp, Homo sapien
gagccaagatgaagctactgcattc

SEQ ID NO: 473059 - DNA, 25 bp, Homo sapien
gcttgggggatgaagcgggaggatc

SEQ ID NO: 473060 - DNA, 25 bp, Homo sapien
gctgcttgggggatgaagcgggagg

SEQ ID NO: 473061 - DNA, 25 bp, Homo sapien
ccaagatgaagctactgcattccag

SEQ ID NO: 473062 - DNA, 25 bp, Homo sapien
tcattattgatctgtatagaatttg

SEQ ID NO: 473063 - DNA, 25 bp, Homo sapien
tttcaaagttttctacaaggctaca

SEQ ID NO: 473064 - DNA, 25 bp, Homo sapien
gtaaccaaaacagcatggtactggt

SEQ ID NO: 473065 - DNA, 25 bp, Homo sapien
acgccgcatgtctacaactatctga

SEQ ID NO: 473066 - DNA, 25 bp, Homo sapien
aataacgccgcatgtctacaactat

SEQ ID NO: 473067 - DNA, 25 bp, Homo sapien
gccactggctaacgaatcctataga

SEQ ID NO: 473068 - DNA, 25 bp, Homo sapien
tcctgccgcttggtgggacagtgaa

SEQ ID NO: 473069 - DNA, 25 bp, Homo sapien
tgacagcacttaatagccactggct

SEQ ID NO: 473070 - DNA, 25 bp, Homo sapien
cagaaaggctttgggaccatgccac

SEQ ID NO: 473071 - DNA, 25 bp, Homo sapien
gctccgcgttcaccaccggcccgga

SEQ ID NO: 473072 - DNA, 25 bp, Homo sapien
ctgacccctgccgaggcgcatttca

SEQ ID NO: 473073 - DNA, 25 bp, Homo sapien
tgacccctgccgaggcgcatttcac

SEQ ID NO: 473074 - DNA, 25 bp, Homo sapien
gggcgcctcgggtggctgcgccagg

SEQ ID NO: 473075 - DNA, 25 bp, Homo sapien
gcttgaagtagacgaagggcgcctc

SEQ ID NO: 473076 - DNA, 25 bp, Homo sapien
gaagaagcctgctgccggcttgaag

SEQ ID NO: 473077 - DNA, 25 bp, Homo sapien
accgcccgcgccgaagaagcctgct

SEQ ID NO: 473078 - DNA, 25 bp, Homo sapien
gctacgctctccagatccagcaatt

SEQ ID NO: 473079 - DNA, 25 bp, Homo sapien
ctcgtcccgccaggcggctacgctc

SEQ ID NO: 473080 - DNA, 25 bp, Homo sapien
tagtcgtcctcgtcccgccaggcgg

SEQ ID NO: 473081 - DNA, 25 bp, Homo sapien
cgccaggcggctacgctctccagat

SEQ ID NO: 473082 - DNA, 25 bp, Homo sapien
gaacagtaacagtcgcagacagagg

SEQ ID NO: 473083 - DNA, 25 bp, Homo sapien
tgcaacgcaaaagggcacacgactg

SEQ ID NO: 473084 - DNA, 25 bp, Homo sapien
aagagcacgcaaatcctgtccagcg

SEQ ID NO: 473085 - DNA, 25 bp, Homo sapien
aagagagatccatcactgcgcggct

SEQ ID NO: 473086 - DNA, 25 bp, Homo sapien
tcattccactccaagaaaagtcctc

SEQ ID NO: 473087 - DNA, 25 bp, Homo sapien
ctgttcattccactccaagaaaagt

SEQ ID NO: 473088 - DNA, 25 bp, Homo sapien
tccactccaagaaaagtcctcttta

SEQ ID NO: 473089 - DNA, 25 bp, Homo sapien
gttcattccactccaagaaaagtcc

SEQ ID NO: 473090 - DNA, 25 bp, Homo sapien
taagaattcaggttcacgatagcaa

SEQ ID NO: 473091 - DNA, 25 bp, Homo sapien
ccaatggccttctggagagctaagc

SEQ ID NO: 473092 - DNA, 25 bp, Homo sapien
tactctgtttgtactctggtgctgc

SEQ ID NO: 473093 - DNA, 25 bp, Homo sapien
gtatgcagttagctaatggctccca

SEQ ID NO: 473094 - DNA, 25 bp, Homo sapien
aattttaagagccttcaatctctgc

SEQ ID NO: 473095 - DNA, 25 bp, Homo sapien
aaacatcaacactaataagcacgat

SEQ ID NO: 473096 - DNA, 25 bp, Homo sapien
cacgatcaacgaatctttagttctc

SEQ ID NO: 473097 - DNA, 25 bp, Homo sapien
gagccttcaatctctgcaagtttta

SEQ ID NO: 473098 - DNA, 25 bp, Homo sapien
aagaaaatcaagtgattaagccaga

SEQ ID NO: 473099 - DNA, 25 bp, Homo sapien
ataaaaacagattagcaatgggata

SEQ ID NO: 473100 - DNA, 25 bp, Homo sapien
tcaagtgattaagccagatggaatg

SEQ ID NO: 473101 - DNA, 25 bp, Homo sapien
cagatggaatgacctacatctgtct

SEQ ID NO: 473102 - DNA, 25 bp, Homo sapien
ccctgaactggttgttctagttagc

SEQ ID NO: 473103 - DNA, 25 bp, Homo sapien
tcttccctgaactggttgttctagt

SEQ ID NO: 473104 - DNA, 25 bp, Homo sapien
gttcttccctgaactggttgttcta

SEQ ID NO: 473105 - DNA, 25 bp, Homo sapien
tccctgaactggttgttctagttag

SEQ ID NO: 473106 - DNA, 25 bp, Homo sapien
agaatctggctctgaatccatctga

SEQ ID NO: 473107 - DNA, 25 bp, Homo sapien
gagggtgtttgtgtccagaaattga

SEQ ID NO: 473108 - DNA, 25 bp, Homo sapien
ccagaatttattactggtctattca

SEQ ID NO: 473109 - DNA, 25 bp, Homo sapien
ttcctagtttattttcatagaggta

SEQ ID NO: 473110 - DNA, 25 bp, Homo sapien
tctctgatgaggtgaacgtctttga

SEQ ID NO: 473111 - DNA, 25 bp, Homo sapien
ggtgaacgtctttgaagagccaatg

SEQ ID NO: 473112 - DNA, 25 bp, Homo sapien
tatctaggacatgtctacaccactg

SEQ ID NO: 473113 - DNA, 25 bp, Homo sapien
ctcaggagttgggttatctaggaca

SEQ ID NO: 473114 - DNA, 25 bp, Homo sapien
acagggaacgtctcgctgcttccat

SEQ ID NO: 473115 - DNA, 25 bp, Homo sapien
ttgctccagtctaaagcacagggaa

SEQ ID NO: 473116 - DNA, 25 bp, Homo sapien
cttgctccagtctaaagcacaggga

SEQ ID NO: 473117 - DNA, 25 bp, Homo sapien
taaagcacagggaacgtctcgctgc

SEQ ID NO: 473118 - DNA, 25 bp, Homo sapien
gagttggagaatgtaaatgcacaca

SEQ ID NO: 473119 - DNA, 25 bp, Homo sapien
aatgtaaatgcacacactcacaatt

SEQ ID NO: 473120 - DNA, 25 bp, Homo sapien
tgtaaatgcacacactcacaattac

SEQ ID NO: 473121 - DNA, 25 bp, Homo sapien
aagagttggagaatgtaaatgcaca

SEQ ID NO: 473122 - DNA, 25 bp, Homo sapien
agttaactttataccaacagactgc

SEQ ID NO: 473123 - DNA, 25 bp, Homo sapien
gagaaagattattctattctaggct

SEQ ID NO: 473124 - DNA, 25 bp, Homo sapien
acctaatatttgagccattatctca

SEQ ID NO: 473125 - DNA, 25 bp, Homo sapien
catataagggggagacacctaatat

SEQ ID NO: 473126 - DNA, 25 bp, Homo sapien
gactgcatactcaaataagtggcca

SEQ ID NO: 473127 - DNA, 25 bp, Homo sapien
gcatactcaaataagtggccagtgt

SEQ ID NO: 473128 - DNA, 25 bp, Homo sapien
tgcatactcaaataagtggccagtg

SEQ ID NO: 473129 - DNA, 25 bp, Homo sapien
tgaagactgcatactcaaataagtg

SEQ ID NO: 473130 - DNA, 25 bp, Homo sapien
catactcaaattagtcaatcacaca

SEQ ID NO: 473131 - DNA, 25 bp, Homo sapien
gaagttcacaaaacagggtgcctcg

SEQ ID NO: 473132 - DNA, 25 bp, Homo sapien
tttaggtatagacctccatcttcag

SEQ ID NO: 473133 - DNA, 25 bp, Homo sapien
gaaagcaaacatcgttaggaccatc

SEQ ID NO: 473134 - DNA, 25 bp, Homo sapien
ccatagcatcaggtgttgagacaca

SEQ ID NO: 473135 - DNA, 25 bp, Homo sapien
tgctcttaggccatacagaacaggc

SEQ ID NO: 473136 - DNA, 25 bp, Homo sapien
tcagaaaaacgtgcagggctggaac

SEQ ID NO: 473137 - DNA, 25 bp, Homo sapien
gatatggccatagtgtgtcaacccc

SEQ ID NO: 473138 - DNA, 25 bp, Homo sapien
ggttaataatgcaacacacactagg

SEQ ID NO: 473139 - DNA, 25 bp, Homo sapien
gttaagcagcttttcccaatcggag

SEQ ID NO: 473140 - DNA, 25 bp, Homo sapien
tctcttctatgtaggtcaacttgac

SEQ ID NO: 473141 - DNA, 25 bp, Homo sapien
cacacactaggtagctgttctcaca

SEQ ID NO: 473142 - DNA, 25 bp, Homo sapien
cttgtctaattaatgtacttctccc

SEQ ID NO: 473143 - DNA, 25 bp, Homo sapien
ctcacttgtctaattaatgtacttc

SEQ ID NO: 473144 - DNA, 25 bp, Homo sapien
tgtctaattaatgtacttctcccct

SEQ ID NO: 473145 - DNA, 25 bp, Homo sapien
taattaatgtacttctcccctccaa

SEQ ID NO: 473146 - DNA, 25 bp, Homo sapien
gagaagagactccgccatcggctag

SEQ ID NO: 473147 - DNA, 25 bp, Homo sapien
aagagaagagactccgccatcggct

SEQ ID NO: 473148 - DNA, 25 bp, Homo sapien
agagaagagactccgccatcggcta

SEQ ID NO: 473149 - DNA, 25 bp, Homo sapien
gagaagctgggagtattaatgccat

SEQ ID NO: 473150 - DNA, 25 bp, Homo sapien
gggagtattaatgccattgctataa

SEQ ID NO: 473151 - DNA, 25 bp, Homo sapien
tgttttttcaggtgttagtattgct

SEQ ID NO: 473152 - DNA, 25 bp, Homo sapien
ataagggctgagtcttgcaacagga

SEQ ID NO: 473153 - DNA, 25 bp, Homo sapien
ttcatatataaacagtcagcaattt

SEQ ID NO: 473154 - DNA, 25 bp, Homo sapien
ccatctgcaggactgatatctatac

SEQ ID NO: 473155 - DNA, 25 bp, Homo sapien
catctgcaggactgatatctataca

SEQ ID NO: 473156 - DNA, 25 bp, Homo sapien
atctgcaggactgatatctatacat

SEQ ID NO: 473157 - DNA, 25 bp, Homo sapien
ggactgagtggggagcccctggaag

SEQ ID NO: 473158 - DNA, 25 bp, Homo sapien
gactgagtggggagcccctggaagt

SEQ ID NO: 473159 - DNA, 25 bp, Homo sapien
gagtggggagcccctggaagtgtaa

SEQ ID NO: 473160 - DNA, 25 bp, Homo sapien
ctggggactgagtggggagcccctg

SEQ ID NO: 473161 - DNA, 25 bp, Homo sapien
tcatcctccaattctgaagtactca

SEQ ID NO: 473162 - DNA, 25 bp, Homo sapien
tcctccaattctgaagtactcagct

SEQ ID NO: 473163 - DNA, 25 bp, Homo sapien
tactcagctcactgtcgatagatga

SEQ ID NO: 473164 - DNA, 25 bp, Homo sapien
ccaattctgaagtactcagctcact

SEQ ID NO: 473165 - DNA, 25 bp, Homo sapien
gacgagccatgatctgaacatcagt

SEQ ID NO: 473166 - DNA, 25 bp, Homo sapien
tttcttcttgcagacgagccatgat

SEQ ID NO: 473167 - DNA, 25 bp, Homo sapien
tcttgcagacgagccatgatctgaa

SEQ ID NO: 473168 - DNA, 25 bp, Homo sapien
cagtgaggtcctgtaatttatatcc

SEQ ID NO: 473169 - DNA, 25 bp, Homo sapien
gaacatcttggaagacgaggctgag

SEQ ID NO: 473170 - DNA, 25 bp, Homo sapien
tgaactcaatgacacactggaacta

SEQ ID NO: 473171 - DNA, 25 bp, Homo sapien
gaagtagaagcataatcttgcctga

SEQ ID NO: 473172 - DNA, 25 bp, Homo sapien
ggcttgaggtgaataatactgttgc

SEQ ID NO: 473173 - DNA, 25 bp, Homo sapien
tcaatactccttaatcaatgcccct

SEQ ID NO: 473174 - DNA, 25 bp, Homo sapien
caatgtgttaaaggagaacgaaact

SEQ ID NO: 473175 - DNA, 25 bp, Homo sapien
cagttagctatctgttcctattcaa

SEQ ID NO: 473176 - DNA, 25 bp, Homo sapien
gacttagggactagctaagcagtta

SEQ ID NO: 473177 - DNA, 25 bp, Homo sapien
taggttaggcatacttcttcggagc

SEQ ID NO: 473178 - DNA, 25 bp, Homo sapien
taatggcagttgtacttggcatccg

SEQ ID NO: 473179 - DNA, 25 bp, Homo sapien
tgactatttcgcacggtgaccggag

SEQ ID NO: 473180 - DNA, 25 bp, Homo sapien
gctccatgcaagcttgagtcaaaac

SEQ ID NO: 473181 - DNA, 25 bp, Homo sapien
gtaagtaatttataccacaggcact

SEQ ID NO: 473182 - DNA, 25 bp, Homo sapien
ggtaagtaatttataccacaggcac

SEQ ID NO: 473183 - DNA, 25 bp, Homo sapien
ctggtaagtaatttataccacaggc

SEQ ID NO: 473184 - DNA, 25 bp, Homo sapien
atactattcaactctaatggtgaaa

SEQ ID NO: 473185 - DNA, 25 bp, Homo sapien
cactgagagttccttatgttctggc

SEQ ID NO: 473186 - DNA, 25 bp, Homo sapien
ttctggcaatacgtcaggcactggg

SEQ ID NO: 473187 - DNA, 25 bp, Homo sapien
taaaatgagttgttagtcctctcgg

SEQ ID NO: 473188 - DNA, 25 bp, Homo sapien
cattgaataacagaggtaagcaccg

SEQ ID NO: 473189 - DNA, 25 bp, Homo sapien
catacatcttaagtctacagctcag

SEQ ID NO: 473190 - DNA, 25 bp, Homo sapien
agtctatgtaagatcctcccttagg

SEQ ID NO: 473191 - DNA, 25 bp, Homo sapien
tcttggttgacgaatcatctctaag

SEQ ID NO: 473192 - DNA, 25 bp, Homo sapien
gtctactgcactaacacaagatgtt

SEQ ID NO: 473193 - DNA, 25 bp, Homo sapien
cccgtttgcttgctagacattagga

SEQ ID NO: 473194 - DNA, 25 bp, Homo sapien
gaagagtccattatgcctgagagta

SEQ ID NO: 473195 - DNA, 25 bp, Homo sapien
cagaatataggttccagacagcact

SEQ ID NO: 473196 - DNA, 25 bp, Homo sapien
tattcatgtgagcaaccttctacca

SEQ ID NO: 473197 - DNA, 25 bp, Homo sapien
tttgcttcgaggcaggttactccca

SEQ ID NO: 473198 - DNA, 25 bp, Homo sapien
aacgaaggtcttgggagtgcactgc

SEQ ID NO: 473199 - DNA, 25 bp, Homo sapien
tgttgaagctgtcccggtgatggaa

SEQ ID NO: 473200 - DNA, 25 bp, Homo sapien
tactgctgccttgaacggttggact

SEQ ID NO: 473201 - DNA, 25 bp, Homo sapien
tcaagaagggaacatcatgaccaag

SEQ ID NO: 473202 - DNA, 25 bp, Homo sapien
tatctggcagtaggattatgggtca

SEQ ID NO: 473203 - DNA, 25 bp, Homo sapien
tgaccaagagctagactaaatgtcc

SEQ ID NO: 473204 - DNA, 25 bp, Homo sapien
taagctgataaagccccaggtgaat

SEQ ID NO: 473205 - DNA, 25 bp, Homo sapien
aatttccatccctcagagtgctgag

SEQ ID NO: 473206 - DNA, 25 bp, Homo sapien
ttccatccctcagagtgctgagtga

SEQ ID NO: 473207 - DNA, 25 bp, Homo sapien
tttccatccctcagagtgctgagtg

SEQ ID NO: 473208 - DNA, 25 bp, Homo sapien
ccaatttccatccctcagagtgctg

SEQ ID NO: 473209 - DNA, 25 bp, Homo sapien
ggttatctccttgcaatgcttcaaa

SEQ ID NO: 473210 - DNA, 25 bp, Homo sapien
tcaaaaagtattcaggtacagagca

SEQ ID NO: 473211 - DNA, 25 bp, Homo sapien
tctggtgactggtccattgagaaac

SEQ ID NO: 473212 - DNA, 25 bp, Homo sapien
gaaaatcaattgtggtacagtagca

SEQ ID NO: 473213 - DNA, 25 bp, Homo sapien
ccaaaacagcagtgtacacagtaac

SEQ ID NO: 473214 - DNA, 25 bp, Homo sapien
gaaagcattcattagtgcaaatgga

SEQ ID NO: 473215 - DNA, 25 bp, Homo sapien
tgaacattccaaaacagcagtgtac

SEQ ID NO: 473216 - DNA, 25 bp, Homo sapien
agtctttatttctgaacattccaaa

SEQ ID NO: 473217 - DNA, 25 bp, Homo sapien
tatgctgtacattcatgcatgacct

SEQ ID NO: 473218 - DNA, 25 bp, Homo sapien
taagtcaaagtccatttgtagccca

SEQ ID NO: 473219 - DNA, 25 bp, Homo sapien
tgcaaatcatccagagggctcattc

SEQ ID NO: 473220 - DNA, 25 bp, Homo sapien
tggtagcatctacacttggcctcct

SEQ ID NO: 473221 - DNA, 25 bp, Homo sapien
gctaccacactggttaccacactgg

SEQ ID NO: 473222 - DNA, 25 bp, Homo sapien
tagtgcagtgtgttagtggagccaa

SEQ ID NO: 473223 - DNA, 25 bp, Homo sapien
ctgttggtgcaaatgtggcaggcat

SEQ ID NO: 473224 - DNA, 25 bp, Homo sapien
tccccggaccacagttagtgcagtg

SEQ ID NO: 473225 - DNA, 25 bp, Homo sapien
gcatgatgatgcagccacgatgctg

SEQ ID NO: 473226 - DNA, 25 bp, Homo sapien
cagttccgcagtttatggtgtttct

SEQ ID NO: 473227 - DNA, 25 bp, Homo sapien
ccgcagtttatggtgtttctgttgc

SEQ ID NO: 473228 - DNA, 25 bp, Homo sapien
gcagaggtccccacatatggtccat

SEQ ID NO: 473229 - DNA, 25 bp, Homo sapien
aaaggtgacagttccgcagtttatg

SEQ ID NO: 473230 - DNA, 25 bp, Homo sapien
ctcagcaggatttcctaggtcatct

SEQ ID NO: 473231 - DNA, 25 bp, Homo sapien
ccagtaatgagcctgatgcaatcca

SEQ ID NO: 473232 - DNA, 25 bp, Homo sapien
tccagactcatctatctcagcagga

SEQ ID NO: 473233 - DNA, 25 bp, Homo sapien
tgttctcgacgtttatcaatccagt

SEQ ID NO: 473234 - DNA, 25 bp, Homo sapien
tcttgctgatgtttagtggaatctg

SEQ ID NO: 473235 - DNA, 25 bp, Homo sapien
gagccccgaaagcatgtcttgctga

SEQ ID NO: 473236 - DNA, 25 bp, Homo sapien
tccctcaacagtgtttcgagagccc

SEQ ID NO: 473237 - DNA, 25 bp, Homo sapien
ttagtggaatctgatgctctgcagc

SEQ ID NO: 473238 - DNA, 25 bp, Homo sapien
agcccgaccatgagactgatttttc

SEQ ID NO: 473239 - DNA, 25 bp, Homo sapien
cagtcaaagttaagaactactacta

SEQ ID NO: 473240 - DNA, 25 bp, Homo sapien
gaactactactataggctcagcaag

SEQ ID NO: 473241 - DNA, 25 bp, Homo sapien
gaacagtcaaagttaagaactacta

SEQ ID NO: 473242 - DNA, 25 bp, Homo sapien
actactactataggctcagcaagtg

SEQ ID NO: 473243 - DNA, 25 bp, Homo sapien
attgtaagagttgggttattaggca

SEQ ID NO: 473244 - DNA, 25 bp, Homo sapien
attacctttatattcacttgtccaa

SEQ ID NO: 473245 - DNA, 25 bp, Homo sapien
cttgtccaataaaactgataacagt

SEQ ID NO: 473246 - DNA, 25 bp, Homo sapien
gagttgggttattaggcatggtctc

SEQ ID NO: 473247 - DNA, 25 bp, Homo sapien
tgttgcaatactggcagcgcatcac

SEQ ID NO: 473248 - DNA, 25 bp, Homo sapien
cttcgtatgaagaacactggcacca

SEQ ID NO: 473249 - DNA, 25 bp, Homo sapien
cacacatttgggtacttagccagct

SEQ ID NO: 473250 - DNA, 25 bp, Homo sapien
tttctagatttcagatgttgagctc

SEQ ID NO: 473251 - DNA, 25 bp, Homo sapien
ttatgtttgcaatgcagctggcagg

SEQ ID NO: 473252 - DNA, 25 bp, Homo sapien
catattatgtttgcaatgcagctgg

SEQ ID NO: 473253 - DNA, 25 bp, Homo sapien
tattatgtttgcaatgcagctggca

SEQ ID NO: 473254 - DNA, 25 bp, Homo sapien
aactgcaaagagcatattatgtttg

SEQ ID NO: 473255 - DNA, 25 bp, Homo sapien
ccagttacagtacagttttccatga

SEQ ID NO: 473256 - DNA, 25 bp, Homo sapien
tacttccagttacagtacagttttc

SEQ ID NO: 473257 - DNA, 25 bp, Homo sapien
gttacagtacagttttccatgaaga

SEQ ID NO: 473258 - DNA, 25 bp, Homo sapien
ttccagttacagtacagttttccat

SEQ ID NO: 473259 - DNA, 25 bp, Homo sapien
tttcttggttcaccaagctgccaga

SEQ ID NO: 473260 - DNA, 25 bp, Homo sapien
tcttggttcaccaagctgccagaaa

SEQ ID NO: 473261 - DNA, 25 bp, Homo sapien
ttggttcaccaagctgccagaaaca

SEQ ID NO: 473262 - DNA, 25 bp, Homo sapien
ctttcttggttcaccaagctgccag

SEQ ID NO: 473263 - DNA, 25 bp, Homo sapien
tatgctttcaacagccaaggttctc

SEQ ID NO: 473264 - DNA, 25 bp, Homo sapien
gatacctaatgagccctggatgcta

SEQ ID NO: 473265 - DNA, 25 bp, Homo sapien
tcaagtaaggatccctgaaagaacc

SEQ ID NO: 473266 - DNA, 25 bp, Homo sapien
gcaattatgcattgggtgcctacca

SEQ ID NO: 473267 - DNA, 25 bp, Homo sapien
taagctccccaaggcaaaaactgca

SEQ ID NO: 473268 - DNA, 25 bp, Homo sapien
ctggtataccagataagatgtaagc

SEQ ID NO: 473269 - DNA, 25 bp, Homo sapien
ccagataagatgtaagctccccaag

SEQ ID NO: 473270 - DNA, 25 bp, Homo sapien
tgtttaccgttgtgttgtccttcat

SEQ ID NO: 473271 - DNA, 25 bp, Homo sapien
tctagtccaccatgatatgaaatac

SEQ ID NO: 473272 - DNA, 25 bp, Homo sapien
gactctcttctagtccaccatgata

SEQ ID NO: 473273 - DNA, 25 bp, Homo sapien
tgtacagggactctcttctagtcca

SEQ ID NO: 473274 - DNA, 25 bp, Homo sapien
tctcttctagtccaccatgatatga

SEQ ID NO: 473275 - DNA, 25 bp, Homo sapien
ccaccttgactgtgacgaagataga

SEQ ID NO: 473276 - DNA, 25 bp, Homo sapien
tgtgacgaagatagatacatatgac

SEQ ID NO: 473277 - DNA, 25 bp, Homo sapien
ccttgactgtgacgaagatagatac

SEQ ID NO: 473278 - DNA, 25 bp, Homo sapien
tttccaccatacaggggccaccttg

SEQ ID NO: 473279 - DNA, 25 bp, Homo sapien
acccctggatctccttcctgttcat

SEQ ID NO: 473280 - DNA, 25 bp, Homo sapien
aacccctggatctccttcctgttca

SEQ ID NO: 473281 - DNA, 25 bp, Homo sapien
caaaaacccctggatctccttcctg

SEQ ID NO: 473282 - DNA, 25 bp, Homo sapien
gccattatgtctaaggcagtttggg

SEQ ID NO: 473283 - DNA, 25 bp, Homo sapien
ctgccattatgtctaaggcagtttg

SEQ ID NO: 473284 - DNA, 25 bp, Homo sapien
ttaatacacagggttttccatgcgt

SEQ ID NO: 473285 - DNA, 25 bp, Homo sapien
aggaagagtgtcagcagtcgtctcg

SEQ ID NO: 473286 - DNA, 25 bp, Homo sapien
tgcgtgccctggttcctcagctgtc

SEQ ID NO: 473287 - DNA, 25 bp, Homo sapien
gcagtcgtctcgctgcagcagttct

SEQ ID NO: 473288 - DNA, 25 bp, Homo sapien
gtcagcaggtcggcagtagcagccc

SEQ ID NO: 473289 - DNA, 25 bp, Homo sapien
tctcagcattaaccccatcggcagg

SEQ ID NO: 473290 - DNA, 25 bp, Homo sapien
caggattaaccccatcatgcttcca

SEQ ID NO: 473291 - DNA, 25 bp, Homo sapien
catcggcaggattaaccccatcatg

SEQ ID NO: 473292 - DNA, 25 bp, Homo sapien
gatagcttacatatggccaaaggaa

SEQ ID NO: 473293 - DNA, 25 bp, Homo sapien
tagaaaaaggtgctatcgttcaact

SEQ ID NO: 473294 - DNA, 25 bp, Homo sapien
aacatgtttcctagtattaaggact

SEQ ID NO: 473295 - DNA, 25 bp, Homo sapien
tgctaatgtggatgtatgttcaaac

SEQ ID NO: 473296 - DNA, 25 bp, Homo sapien
tgctttttgagaccgtaagaacctc

SEQ ID NO: 473297 - DNA, 25 bp, Homo sapien
tagatgattaaatgagggcaggccc

SEQ ID NO: 473298 - DNA, 25 bp, Homo sapien
gagagatgccagtgacctcataata

SEQ ID NO: 473299 - DNA, 25 bp, Homo sapien
catagctttacgatggagagatgcc

SEQ ID NO: 473300 - DNA, 25 bp, Homo sapien
tatctgaggtcctgttgagagggac

SEQ ID NO: 473301 - DNA, 25 bp, Homo sapien
tgtcaggtccgattctccaacgcgt

SEQ ID NO: 473302 - DNA, 25 bp, Homo sapien
agtgagtgccaaggcggaaaatgtc

SEQ ID NO: 473303 - DNA, 25 bp, Homo sapien
tacagagagtcagagttgtcaagat

SEQ ID NO: 473304 - DNA, 25 bp, Homo sapien
gctgggtctccacaaagccttctga

SEQ ID NO: 473305 - DNA, 25 bp, Homo sapien
gaagagcgtttagagtctcgccaaa

SEQ ID NO: 473306 - DNA, 25 bp, Homo sapien
tggaaacctcaaaacatggcctgga

SEQ ID NO: 473307 - DNA, 25 bp, Homo sapien
gaaaactgtaatctctccgtggtga

SEQ ID NO: 473308 - DNA, 25 bp, Homo sapien
cctttttgcgatcagagagacagcc

SEQ ID NO: 473309 - DNA, 25 bp, Homo sapien
tgttctagagaagcagtataagcct

SEQ ID NO: 473310 - DNA, 25 bp, Homo sapien
aaatggataccatattgccagcagg

SEQ ID NO: 473311 - DNA, 25 bp, Homo sapien
tagaaatcttttagccagtatggcc

SEQ ID NO: 473312 - DNA, 25 bp, Homo sapien
gaccttggcaggtaatcagacattt

SEQ ID NO: 473313 - DNA, 25 bp, Homo sapien
gacattttctgcttgtgacacaatc

SEQ ID NO: 473314 - DNA, 25 bp, Homo sapien
aatgctggtatgtcaaaatgcggaa

SEQ ID NO: 473315 - DNA, 25 bp, Homo sapien
aaatgcggaattgcttcactgaacc

SEQ ID NO: 473316 - DNA, 25 bp, Homo sapien
agacaaataccaatatccacattaa

SEQ ID NO: 473317 - DNA, 25 bp, Homo sapien
aactgagttaaagaagttagctctc

SEQ ID NO: 473318 - DNA, 25 bp, Homo sapien
atatttacatggataactgagttaa

SEQ ID NO: 473319 - DNA, 25 bp, Homo sapien
tacatggataactgagttaaagaag

SEQ ID NO: 473320 - DNA, 25 bp, Homo sapien
tgcaaaccgcagagataatgacgcc

SEQ ID NO: 473321 - DNA, 25 bp, Homo sapien
caagtgcatgcgaaacggtcccaat

SEQ ID NO: 473322 - DNA, 25 bp, Homo sapien
caaggacccatcgagatcaaggaga

SEQ ID NO: 473323 - DNA, 25 bp, Homo sapien
gacagggccactccgcttttgcaaa

SEQ ID NO: 473324 - DNA, 25 bp, Homo sapien
gagttcggagctttgcctgggaccc

SEQ ID NO: 473325 - DNA, 25 bp, Homo sapien
tacttttgagcgtggatactggcga

SEQ ID NO: 473326 - DNA, 25 bp, Homo sapien
cactggcgcgcaaacttgagttact

SEQ ID NO: 473327 - DNA, 25 bp, Homo sapien
catcaggaaggagtttcgacccgcg

SEQ ID NO: 473328 - DNA, 25 bp, Homo sapien
gtgacacttggcattaaaagttcaa

SEQ ID NO: 473329 - DNA, 25 bp, Homo sapien
gcgtgataacttgcccttgatttgg

SEQ ID NO: 473330 - DNA, 25 bp, Homo sapien
catttgaagagcgtagaactctaac

SEQ ID NO: 473331 - DNA, 25 bp, Homo sapien
ccgggtgtcacatggtgcgtgataa

SEQ ID NO: 473332 - DNA, 25 bp, Homo sapien
ttatgtgcgaatttgatcctgccaa

SEQ ID NO: 473333 - DNA, 25 bp, Homo sapien
cctggtgtgacaaaatctctccgaa

SEQ ID NO: 473334 - DNA, 25 bp, Homo sapien
tgatcctgccaattatgatgataac

SEQ ID NO: 473335 - DNA, 25 bp, Homo sapien
ctgatggttcttgactctttattga

SEQ ID NO: 473336 - DNA, 25 bp, Homo sapien
cacaaggtatgtcatgtacagcaca

SEQ ID NO: 473337 - DNA, 25 bp, Homo sapien
gagtcaagctagaatacagaatggc

SEQ ID NO: 473338 - DNA, 25 bp, Homo sapien
tacattaatctgcagcttgaaaggc

SEQ ID NO: 473339 - DNA, 25 bp, Homo sapien
gaatgcagctgacctcgtagaaaca

SEQ ID NO: 473340 - DNA, 25 bp, Homo sapien
acccgaggctgagggtttgtgccct

SEQ ID NO: 473341 - DNA, 25 bp, Homo sapien
gatgaatacccgaggctgagggttt

SEQ ID NO: 473342 - DNA, 25 bp, Homo sapien
atgaatacccgaggctgagggtttg

SEQ ID NO: 473343 - DNA, 25 bp, Homo sapien
aatacccgaggctgagggtttgtgc

SEQ ID NO: 473344 - DNA, 25 bp, Homo sapien
ttatgcgaatcggatccaaacctcc

SEQ ID NO: 473345 - DNA, 25 bp, Homo sapien
cactgggatttatgcgaatcggatc

SEQ ID NO: 473346 - DNA, 25 bp, Homo sapien
tgctaccacactgggatttatgcga

SEQ ID NO: 473347 - DNA, 25 bp, Homo sapien
tgaagcagtaggaggcaggaaattc

SEQ ID NO: 473348 - DNA, 25 bp, Homo sapien
gatccattcccggtggtagagcctt

SEQ ID NO: 473349 - DNA, 25 bp, Homo sapien
tgtagctgcaatgacagaagaggac

SEQ ID NO: 473350 - DNA, 25 bp, Homo sapien
gtagagccttatcattcagtctggg

SEQ ID NO: 473351 - DNA, 25 bp, Homo sapien
gaatccagctggcattcatcgtccc

SEQ ID NO: 473352 - DNA, 25 bp, Homo sapien
tggatcttccaaatatttagaattc

SEQ ID NO: 473353 - DNA, 25 bp, Homo sapien
tttggatcttccaaatatttagaat

SEQ ID NO: 473354 - DNA, 25 bp, Homo sapien
ctatgtggaaaatttggatcttcca

SEQ ID NO: 473355 - DNA, 25 bp, Homo sapien
gtggaaaatttggatcttccaaata

SEQ ID NO: 473356 - DNA, 25 bp, Homo sapien
gtcttagaagcttggatggagttga

SEQ ID NO: 473357 - DNA, 25 bp, Homo sapien
caaggctaagataggtcttagaagc

SEQ ID NO: 473358 - DNA, 25 bp, Homo sapien
gcctgagttccacaagtgtagatca

SEQ ID NO: 473359 - DNA, 25 bp, Homo sapien
gtgtagatcagattctgaaattctt

SEQ ID NO: 473360 - DNA, 25 bp, Homo sapien
tttggcttcaaggaatagcaatgac

SEQ ID NO: 473361 - DNA, 25 bp, Homo sapien
cttttttggcttcaaggaatagcaa

SEQ ID NO: 473362 - DNA, 25 bp, Homo sapien
ggcttcaaggaatagcaatgacttc

SEQ ID NO: 473363 - DNA, 25 bp, Homo sapien
tagcaatgacttcaatggtgcttta

SEQ ID NO: 473364 - DNA, 25 bp, Homo sapien
ctggtggaagatccaacagtatctg

SEQ ID NO: 473365 - DNA, 25 bp, Homo sapien
tctgggagtaatggagttttctcgc

SEQ ID NO: 473366 - DNA, 25 bp, Homo sapien
ggagttttctcgcatggagttcaga

SEQ ID NO: 473367 - DNA, 25 bp, Homo sapien
ccaacagtatctgggagtaatggag

SEQ ID NO: 473368 - DNA, 25 bp, Homo sapien
ccatttatggagtatttgacaatga

SEQ ID NO: 473369 - DNA, 25 bp, Homo sapien
taaaatgcagttgctgttacacgaa

SEQ ID NO: 473370 - DNA, 25 bp, Homo sapien
tgtgttttccatagctgccattgca

SEQ ID NO: 473371 - DNA, 25 bp, Homo sapien
tacacagagaactgaaccccttctc

SEQ ID NO: 473372 - DNA, 25 bp, Homo sapien
aattaacaactcttcatggatgttg

SEQ ID NO: 473373 - DNA, 25 bp, Homo sapien
aactcttcatggatgttgcaactgc

SEQ ID NO: 473374 - DNA, 25 bp, Homo sapien
tgttgcaactgcctatattacttgg

SEQ ID NO: 473375 - DNA, 25 bp, Homo sapien
caactgcctatattacttggtatgg

SEQ ID NO: 473376 - DNA, 25 bp, Homo sapien
ggtagtctggtcatttgtctccagg

SEQ ID NO: 473377 - DNA, 25 bp, Homo sapien
tggtcatttgtctccaggtgcactt

SEQ ID NO: 473378 - DNA, 25 bp, Homo sapien
ttttatggtagtctggtcatttgtc

SEQ ID NO: 473379 - DNA, 25 bp, Homo sapien
gtaagtgaacataattaagcttctg

SEQ ID NO: 473380 - DNA, 25 bp, Homo sapien
tttatttggaatgtcctctcttcac

SEQ ID NO: 473381 - DNA, 25 bp, Homo sapien
tcattttatttggaatgtcctctct

SEQ ID NO: 473382 - DNA, 25 bp, Homo sapien
cattttatttggaatgtcctctctt

SEQ ID NO: 473383 - DNA, 25 bp, Homo sapien
atttggaatgtcctctcttcactct

SEQ ID NO: 473384 - DNA, 25 bp, Homo sapien
agatccagggaaaacttgacagttt

SEQ ID NO: 473385 - DNA, 25 bp, Homo sapien
aaacttgacagttttttgcttgcac

SEQ ID NO: 473386 - DNA, 25 bp, Homo sapien
ttgcttgcactcaatgcaggatcag

SEQ ID NO: 473387 - DNA, 25 bp, Homo sapien
gaaatgaaagcccaaagatccaggg

SEQ ID NO: 473388 - DNA, 25 bp, Homo sapien
tgtgatatcaaatgagccaggcagc

SEQ ID NO: 473389 - DNA, 25 bp, Homo sapien
gagagccctgctaaaactgttgtcc

SEQ ID NO: 473390 - DNA, 25 bp, Homo sapien
caatcagctgataatttggatgtga

SEQ ID NO: 473391 - DNA, 25 bp, Homo sapien
gcaaaagtccgcaacttcattctta

SEQ ID NO: 473392 - DNA, 25 bp, Homo sapien
accatagcagctcatccatacatct

SEQ ID NO: 473393 - DNA, 25 bp, Homo sapien
gggtcaccatagcagctcatccata

SEQ ID NO: 473394 - DNA, 25 bp, Homo sapien
tccattgggtcaccatagcagctca

SEQ ID NO: 473395 - DNA, 25 bp, Homo sapien
tctccatccattgggtcaccatagc

SEQ ID NO: 473396 - DNA, 25 bp, Homo sapien
caagatcaaagtaaacacgttggac

SEQ ID NO: 473397 - DNA, 25 bp, Homo sapien
caaaacatgaagacttgattggggt

SEQ ID NO: 473398 - DNA, 25 bp, Homo sapien
cgttggactttcaggaggaagagaa

SEQ ID NO: 473399 - DNA, 25 bp, Homo sapien
tagtaatcttcacaagatcaaagta

SEQ ID NO: 473400 - DNA, 25 bp, Homo sapien
cagagaacagggcaggctcctctga

SEQ ID NO: 473401 - DNA, 25 bp, Homo sapien
agggcaggctcctctgactggccat

SEQ ID NO: 473402 - DNA, 25 bp, Homo sapien
gagaacagggcaggctcctctgact

SEQ ID NO: 473403 - DNA, 25 bp, Homo sapien
acagggcaggctcctctgactggcc

SEQ ID NO: 473404 - DNA, 25 bp, Homo sapien
gagctgaatttcatagcttgtgaca

SEQ ID NO: 473405 - DNA, 25 bp, Homo sapien
tcaggaaaataccatgaaatttctg

SEQ ID NO: 473406 - DNA, 25 bp, Homo sapien
attgctgtgaatctctagcatcacc

SEQ ID NO: 473407 - DNA, 25 bp, Homo sapien
gaatctctagcatcacctcaggaaa

SEQ ID NO: 473408 - DNA, 25 bp, Homo sapien
ctgggatttcctccagaggatactc

SEQ ID NO: 473409 - DNA, 25 bp, Homo sapien
gggatttcctccagaggatactcac

SEQ ID NO: 473410 - DNA, 25 bp, Homo sapien
tgggatttcctccagaggatactca

SEQ ID NO: 473411 - DNA, 25 bp, Homo sapien
tctgggatttcctccagaggatact

SEQ ID NO: 473412 - DNA, 25 bp, Homo sapien
tgggcttcaagatggtaaaagcgta

SEQ ID NO: 473413 - DNA, 25 bp, Homo sapien
gcttcaagatggtaaaagcgtaatt

SEQ ID NO: 473414 - DNA, 25 bp, Homo sapien
tgcattgggcttcaagatggtaaaa

SEQ ID NO: 473415 - DNA, 25 bp, Homo sapien
ctacacacaggtgcattgggcttca

SEQ ID NO: 473416 - DNA, 25 bp, Homo sapien
ggagacaatatgtggtagggtggat

SEQ ID NO: 473417 - DNA, 25 bp, Homo sapien
gacaatatgtggtagggtggatcac

SEQ ID NO: 473418 - DNA, 25 bp, Homo sapien
agacaatatgtggtagggtggatca

SEQ ID NO: 473419 - DNA, 25 bp, Homo sapien
taggagacaatatgtggtagggtgg

SEQ ID NO: 473420 - DNA, 25 bp, Homo sapien
ctcctatgcttcgataggcctgtgt

SEQ ID NO: 473421 - DNA, 25 bp, Homo sapien
gcttcgataggcctgtgtcatgcaa

SEQ ID NO: 473422 - DNA, 25 bp, Homo sapien
tatgcttcgataggcctgtgtcatg

SEQ ID NO: 473423 - DNA, 25 bp, Homo sapien
ttcgataggcctgtgtcatgcaagg

SEQ ID NO: 473424 - DNA, 25 bp, Homo sapien
cagctcctggtacactattgagtac

SEQ ID NO: 473425 - DNA, 25 bp, Homo sapien
tacttgatcctgacacaccaaggaa

SEQ ID NO: 473426 - DNA, 25 bp, Homo sapien
cacaccaaggaaatataaagccctg

SEQ ID NO: 473427 - DNA, 25 bp, Homo sapien
ccctgatacgcaacgaggtgaaatc

SEQ ID NO: 473428 - DNA, 25 bp, Homo sapien
cagtcactactttatgtggagtcat

SEQ ID NO: 473429 - DNA, 25 bp, Homo sapien
taatttgcattgtaaatttacttaa

SEQ ID NO: 473430 - DNA, 25 bp, Homo sapien
tgcattgtaaatttacttaataaat

SEQ ID NO: 473431 - DNA, 25 bp, Homo sapien
ttgataatttgcattgtaaatttac

SEQ ID NO: 473432 - DNA, 25 bp, Homo sapien
tttgcattgtaaatttacttaataa

SEQ ID NO: 473433 - DNA, 25 bp, Homo sapien
tcggccctgacagatcttgatatcc

SEQ ID NO: 473434 - DNA, 25 bp, Homo sapien
gctcgcaggattaaaggcaagaacc

SEQ ID NO: 473435 - DNA, 25 bp, Homo sapien
cttgatatccaagagggagtctgct

SEQ ID NO: 473436 - DNA, 25 bp, Homo sapien
ggcaagaacctcaattagacactct

SEQ ID NO: 473437 - DNA, 25 bp, Homo sapien
tacatcgttatctcctggtgaactg

SEQ ID NO: 473438 - DNA, 25 bp, Homo sapien
tgaactgtgaccctaaacactttgg

SEQ ID NO: 473439 - DNA, 25 bp, Homo sapien
tgaccctaaacactttggaggccca

SEQ ID NO: 473440 - DNA, 25 bp, Homo sapien
cacaggacatccaatcagaaccatc

SEQ ID NO: 473441 - DNA, 25 bp, Homo sapien
ggagggaattgctccagccagcacc

SEQ ID NO: 473442 - DNA, 25 bp, Homo sapien
agccagcacccatgccaggggaaga

SEQ ID NO: 473443 - DNA, 25 bp, Homo sapien
ccggagggaattgctccagccagca

SEQ ID NO: 473444 - DNA, 25 bp, Homo sapien
agcacccatgccaggggaagagcgc

SEQ ID NO: 473445 - DNA, 25 bp, Homo sapien
tacccaagaggtaaaatattggcat

SEQ ID NO: 473446 - DNA, 25 bp, Homo sapien
gttcttgttatgaatcttctacaca

SEQ ID NO: 473447 - DNA, 25 bp, Homo sapien
ttgttcttgttatgaatcttctaca

SEQ ID NO: 473448 - DNA, 25 bp, Homo sapien
ctacacagaaagtacccaagaggta

SEQ ID NO: 473449 - DNA, 25 bp, Homo sapien
cagagtgaagcctagcactgcatct

SEQ ID NO: 473450 - DNA, 25 bp, Homo sapien
cactgcatctagttgccaaagcaca

SEQ ID NO: 473451 - DNA, 25 bp, Homo sapien
gccaaagcacaatcaatatggaagg

SEQ ID NO: 473452 - DNA, 25 bp, Homo sapien
gaaggagcggtattttatgattgga

SEQ ID NO: 473453 - DNA, 25 bp, Homo sapien
aattttcattgttgtgcatttcact

SEQ ID NO: 473454 - DNA, 25 bp, Homo sapien
tcacttttcgatactgaaaaccaaa

SEQ ID NO: 473455 - DNA, 25 bp, Homo sapien
aatgttccagtaacctcaggccatg

SEQ ID NO: 473456 - DNA, 25 bp, Homo sapien
accaaaaatgttccagtaacctcag

SEQ ID NO: 473457 - DNA, 25 bp, Homo sapien
ttcagaaattccgtcctgaaatggg

SEQ ID NO: 473458 - DNA, 25 bp, Homo sapien
tgggctttgcctgagaacgtgtctg

SEQ ID NO: 473459 - DNA, 25 bp, Homo sapien
cccactctccttgattagcatgaaa

SEQ ID NO: 473460 - DNA, 25 bp, Homo sapien
catgaaacattaatagggctttcag

SEQ ID NO: 473461 - DNA, 25 bp, Homo sapien
agaccacagggccatcgctttgtgg

SEQ ID NO: 473462 - DNA, 25 bp, Homo sapien
tggggattgaatgacaagaatgaca

SEQ ID NO: 473463 - DNA, 25 bp, Homo sapien
tcgctttgtggctggaattgatggc

SEQ ID NO: 473464 - DNA, 25 bp, Homo sapien
gaattgatggctctgtaagtacagt

SEQ ID NO: 473465 - DNA, 25 bp, Homo sapien
aaacagttgggtgtgagttataatc

SEQ ID NO: 473466 - DNA, 25 bp, Homo sapien
taatgaactggtcttgcaaatactg

SEQ ID NO: 473467 - DNA, 25 bp, Homo sapien
cagcatcttgtcaaccattgcatca

SEQ ID NO: 473468 - DNA, 25 bp, Homo sapien
gagcagccattagctataagccaga

SEQ ID NO: 473469 - DNA, 25 bp, Homo sapien
cataaactgtatttctctcctcttc

SEQ ID NO: 473470 - DNA, 25 bp, Homo sapien
ataaactgtatttctctcctcttcc

SEQ ID NO: 473471 - DNA, 25 bp, Homo sapien
taaactgtatttctctcctcttcca

SEQ ID NO: 473472 - DNA, 25 bp, Homo sapien
aaactgtatttctctcctcttccat

SEQ ID NO: 473473 - DNA, 25 bp, Homo sapien
gagagtagccagagtgaaatttgaa

SEQ ID NO: 473474 - DNA, 25 bp, Homo sapien
tagcaccaactgttaagtccaagag

SEQ ID NO: 473475 - DNA, 25 bp, Homo sapien
agtgaaatttgaactgaagtccagg

SEQ ID NO: 473476 - DNA, 25 bp, Homo sapien
ggaaagaagcaatgataatggcttg

SEQ ID NO: 473477 - DNA, 25 bp, Homo sapien
ttgcttgcttacattaggatgagga

SEQ ID NO: 473478 - DNA, 25 bp, Homo sapien
gcttacattaggatgaggaaaactt

SEQ ID NO: 473479 - DNA, 25 bp, Homo sapien
gaaccagaattctggttcattcaca

SEQ ID NO: 473480 - DNA, 25 bp, Homo sapien
ggttcattcacaaatgcaccccctt

SEQ ID NO: 473481 - DNA, 25 bp, Homo sapien
aatgcacccccttcgccatcaaaaa

SEQ ID NO: 473482 - DNA, 25 bp, Homo sapien
agaattctggttcattcacaaatgc

SEQ ID NO: 473483 - DNA, 25 bp, Homo sapien
tctctgctcaaggtctcagtgggtg

SEQ ID NO: 473484 - DNA, 25 bp, Homo sapien
tagccaatgtgacaggcctcttctg

SEQ ID NO: 473485 - DNA, 25 bp, Homo sapien
caaggtgttagccaatgtgacaggc

SEQ ID NO: 473486 - DNA, 25 bp, Homo sapien
tgaagtctctgctcaaggtctcagt

SEQ ID NO: 473487 - DNA, 25 bp, Homo sapien
ctgagtaagatagggtaaggatgcc

SEQ ID NO: 473488 - DNA, 25 bp, Homo sapien
taagatagggtaaggatgcctttac

SEQ ID NO: 473489 - DNA, 25 bp, Homo sapien
ttacaagattatgttcggagctcat

SEQ ID NO: 473490 - DNA, 25 bp, Homo sapien
tgcctttacaagattatgttcggag

SEQ ID NO: 473491 - DNA, 25 bp, Homo sapien
caggaacactctgagcattgtaatc

SEQ ID NO: 473492 - DNA, 25 bp, Homo sapien
catctccataccatcccagaaaagt

SEQ ID NO: 473493 - DNA, 25 bp, Homo sapien
taatcctgctcgacatttctcatca

SEQ ID NO: 473494 - DNA, 25 bp, Homo sapien
tctgagctatacagcatttcatctt

SEQ ID NO: 473495 - DNA, 25 bp, Homo sapien
gaggctcaccatattatgtagagga

SEQ ID NO: 473496 - DNA, 25 bp, Homo sapien
ctggatgaggctcaccatattatgt

SEQ ID NO: 473497 - DNA, 25 bp, Homo sapien
ttttttatagttctggacactgaaa

SEQ ID NO: 473498 - DNA, 25 bp, Homo sapien
tctggacactgaaaagtccaaggtt

SEQ ID NO: 473499 - DNA, 25 bp, Homo sapien
cagtttcccgggtcagctattagca

SEQ ID NO: 473500 - DNA, 25 bp, Homo sapien
gggaatgttgaagtttccaagcaca

SEQ ID NO: 473501 - DNA, 25 bp, Homo sapien
gctctgtgaaatccctttgcaggag

SEQ ID NO: 473502 - DNA, 25 bp, Homo sapien
tgaagcaaccatatggagcctgctg

SEQ ID NO: 473503 - DNA, 25 bp, Homo sapien
ccttcgggcgatgcagtagatgaga

SEQ ID NO: 473504 - DNA, 25 bp, Homo sapien
caatgctgttatcatcgaggccttc

SEQ ID NO: 473505 - DNA, 25 bp, Homo sapien
caggaagacacaccgcgggagactg

SEQ ID NO: 473506 - DNA, 25 bp, Homo sapien
caggtggtccaatggctccgagaca

SEQ ID NO: 473507 - DNA, 25 bp, Homo sapien
aatgtatcctgacagttcatagcta

SEQ ID NO: 473508 - DNA, 25 bp, Homo sapien
gacagttcatagctactcttaaaaa

SEQ ID NO: 473509 - DNA, 25 bp, Homo sapien
ctggagctgtcaggcttcatttcaa

SEQ ID NO: 473510 - DNA, 25 bp, Homo sapien
taaaaactgggcgaagcttttgcag

SEQ ID NO: 473511 - DNA, 25 bp, Homo sapien
gcatccttcatgcatttatgcctct

SEQ ID NO: 473512 - DNA, 25 bp, Homo sapien
attttcttggagcagtcaccgcttt

SEQ ID NO: 473513 - DNA, 25 bp, Homo sapien
gtcttgatcccgtccacagctgtca

SEQ ID NO: 473514 - DNA, 25 bp, Homo sapien
ggtgagccattgaaagagcccagat

SEQ ID NO: 473515 - DNA, 25 bp, Homo sapien
gatagaactgaaccctgaatgattc

SEQ ID NO: 473516 - DNA, 25 bp, Homo sapien
cctgtgttgagatagaactgaaccc

SEQ ID NO: 473517 - DNA, 25 bp, Homo sapien
ctgtggttgtggatacctgtgttga

SEQ ID NO: 473518 - DNA, 25 bp, Homo sapien
tggatacctgtgttgagatagaact

SEQ ID NO: 473519 - DNA, 25 bp, Homo sapien
aaagcccactctagagatgtgcttg

SEQ ID NO: 473520 - DNA, 25 bp, Homo sapien
tctcactgatagcaaaacgaccctt

SEQ ID NO: 473521 - DNA, 25 bp, Homo sapien
tcttaaagcccactctagagatgtg

SEQ ID NO: 473522 - DNA, 25 bp, Homo sapien
tcaccatctcactgatagcaaaacg

SEQ ID NO: 473523 - DNA, 25 bp, Homo sapien
tgtgacatcccttatttctttggct

SEQ ID NO: 473524 - DNA, 25 bp, Homo sapien
tgacaagcacataggtaaccaatat

SEQ ID NO: 473525 - DNA, 25 bp, Homo sapien
tttcattcacactgattgcgtatgg

SEQ ID NO: 473526 - DNA, 25 bp, Homo sapien
ttttttaagtggtgacaagcacata

SEQ ID NO: 473527 - DNA, 25 bp, Homo sapien
ttttctgagacggagttttgctctt

SEQ ID NO: 473528 - DNA, 25 bp, Homo sapien
tttctgagacggagttttgctcttg

SEQ ID NO: 473529 - DNA, 25 bp, Homo sapien
ctagcacagaaataaaagggttgtt

SEQ ID NO: 473530 - DNA, 25 bp, Homo sapien
cacagaaataaaagggttgttcaat

SEQ ID NO: 473531 - DNA, 25 bp, Homo sapien
gtatttgatgcaccaggtagcctgg

SEQ ID NO: 473532 - DNA, 25 bp, Homo sapien
ctggaggtcagaggtatttgatgca

SEQ ID NO: 473533 - DNA, 25 bp, Homo sapien
tcagctgctcgtgttgctctggagg

SEQ ID NO: 473534 - DNA, 25 bp, Homo sapien
ggtcagaggtatttgatgcaccagg

SEQ ID NO: 473535 - DNA, 25 bp, Homo sapien
cagaggaagtaactgtagctgggca

SEQ ID NO: 473536 - DNA, 25 bp, Homo sapien
caagatgagagaaagaatagccagg

SEQ ID NO: 473537 - DNA, 25 bp, Homo sapien
tatgtgtagcatgagctaggaccca

SEQ ID NO: 473538 - DNA, 25 bp, Homo sapien
cataatttcccaactgttgtcaggg

SEQ ID NO: 473539 - DNA, 25 bp, Homo sapien
caacacatattgccagacacagcag

SEQ ID NO: 473540 - DNA, 25 bp, Homo sapien
tcaacacatattgccagacacagca

SEQ ID NO: 473541 - DNA, 25 bp, Homo sapien
aacacatattgccagacacagcaga

SEQ ID NO: 473542 - DNA, 25 bp, Homo sapien
acacatattgccagacacagcagaa

SEQ ID NO: 473543 - DNA, 25 bp, Homo sapien
tgcttgctgccttcggaattcctca

SEQ ID NO: 473544 - DNA, 25 bp, Homo sapien
tatcttgtctctgacctttgtgttc

SEQ ID NO: 473545 - DNA, 25 bp, Homo sapien
gacaacagattcattattgtcttcc

SEQ ID NO: 473546 - DNA, 25 bp, Homo sapien
gctgccttcggaattcctcagataa

SEQ ID NO: 473547 - DNA, 25 bp, Homo sapien
tctttccattcacatagtcccactt

SEQ ID NO: 473548 - DNA, 25 bp, Homo sapien
tccattcacatagtcccacttggac

SEQ ID NO: 473549 - DNA, 25 bp, Homo sapien
atagtcccacttggaccctcgtcat

SEQ ID NO: 473550 - DNA, 25 bp, Homo sapien
tttccattcacatagtcccacttgg

SEQ ID NO: 473551 - DNA, 25 bp, Homo sapien
caataacttctccaccttagggata

SEQ ID NO: 473552 - DNA, 25 bp, Homo sapien
tagggatatttagccatctgcttct

SEQ ID NO: 473553 - DNA, 25 bp, Homo sapien
ccaccttagggatatttagccatct

SEQ ID NO: 473554 - DNA, 25 bp, Homo sapien
ttctccaccttagggatatttagcc

SEQ ID NO: 473555 - DNA, 25 bp, Homo sapien
caaatgacagtagaagtaattcccc

SEQ ID NO: 473556 - DNA, 25 bp, Homo sapien
tgtcttctccataaagcccgttgcc

SEQ ID NO: 473557 - DNA, 25 bp, Homo sapien
ctgtcctggctcctacaaatgacag

SEQ ID NO: 473558 - DNA, 25 bp, Homo sapien
ccgttgccagtgtcagtgcatgaaa

SEQ ID NO: 473559 - DNA, 25 bp, Homo sapien
cagatagtactgatagactctggtt

SEQ ID NO: 473560 - DNA, 25 bp, Homo sapien
gtttctagtgtgttgtagagcagag

SEQ ID NO: 473561 - DNA, 25 bp, Homo sapien
cacagatattgcataagggtttcag

SEQ ID NO: 473562 - DNA, 25 bp, Homo sapien
tggtttctagtgtgttgtagagcag

SEQ ID NO: 473563 - DNA, 25 bp, Homo sapien
caagatccattatttgaccattagg

SEQ ID NO: 473564 - DNA, 25 bp, Homo sapien
caataaaagttatgggtccccagct

SEQ ID NO: 473565 - DNA, 25 bp, Homo sapien
tctaatggccagataatggaccaca

SEQ ID NO: 473566 - DNA, 25 bp, Homo sapien
agctcataatggttggcaagatcca

SEQ ID NO: 473567 - DNA, 25 bp, Homo sapien
aatgttacacaattgtgttgaagac

SEQ ID NO: 473568 - DNA, 25 bp, Homo sapien
tgttacacaattgtgttgaagacac

SEQ ID NO: 473569 - DNA, 25 bp, Homo sapien
atgttacacaattgtgttgaagaca

SEQ ID NO: 473570 - DNA, 25 bp, Homo sapien
tataacataaatcatgtcttgttca

SEQ ID NO: 473571 - DNA, 25 bp, Homo sapien
taacataaatcatgtcttgttcacc

SEQ ID NO: 473572 - DNA, 25 bp, Homo sapien
acataaatcatgtcttgttcacctt

SEQ ID NO: 473573 - DNA, 25 bp, Homo sapien
caccatgccaggttaaggtttaagt

SEQ ID NO: 473574 - DNA, 25 bp, Homo sapien
tttctcaattaggaagcctccctgc

SEQ ID NO: 473575 - DNA, 25 bp, Homo sapien
cctgatggagagacgtgcatctgac

SEQ ID NO: 473576 - DNA, 25 bp, Homo sapien
gcagtaaacactggtggcaagtgac

SEQ ID NO: 473577 - DNA, 25 bp, Homo sapien
tggctgtgcctgtcatgtctctaaa

SEQ ID NO: 473578 - DNA, 25 bp, Homo sapien
gctatgctgcatgtcattaagtaat

SEQ ID NO: 473579 - DNA, 25 bp, Homo sapien
tatgctgcatgtcattaagtaatgc

SEQ ID NO: 473580 - DNA, 25 bp, Homo sapien
ggctatgctgcatgtcattaagtaa

SEQ ID NO: 473581 - DNA, 25 bp, Homo sapien
ttgggctatgctgcatgtcattaag

SEQ ID NO: 473582 - DNA, 25 bp, Homo sapien
acttgacatatgtggcatctctgcc

SEQ ID NO: 473583 - DNA, 25 bp, Homo sapien
tccaccactgaactgggtcgctcaa

SEQ ID NO: 473584 - DNA, 25 bp, Homo sapien
tccacaacctccataggattgtttc

SEQ ID NO: 473585 - DNA, 25 bp, Homo sapien
caacatgggtgttattgttcctgat

SEQ ID NO: 473586 - DNA, 25 bp, Homo sapien
aaccttgtagatggaataagtacat

SEQ ID NO: 473587 - DNA, 25 bp, Homo sapien
ccttgtagatggaataagtacattt

SEQ ID NO: 473588 - DNA, 25 bp, Homo sapien
gcaattgggaatttggcattctcag

SEQ ID NO: 473589 - DNA, 25 bp, Homo sapien
ggagttcacagccatcagcaatttc

SEQ ID NO: 473590 - DNA, 25 bp, Homo sapien
ttaacattctagggagttcacagcc

SEQ ID NO: 473591 - DNA, 25 bp, Homo sapien
caatgtaattttaggtgcaattggg

SEQ ID NO: 473592 - DNA, 25 bp, Homo sapien
gaatttctacaacattcgcttccag

SEQ ID NO: 473593 - DNA, 25 bp, Homo sapien
tccaactgaccagagcctaagctgt

SEQ ID NO: 473594 - DNA, 25 bp, Homo sapien
cctaagctgttttgggaactccttg

SEQ ID NO: 473595 - DNA, 25 bp, Homo sapien
tcctgaaggtggctaccccgatgtt

SEQ ID NO: 473596 - DNA, 25 bp, Homo sapien
agtatgactgggagtaaagcaggaa

SEQ ID NO: 473597 - DNA, 25 bp, Homo sapien
caggttagagagtaatctggattta

SEQ ID NO: 473598 - DNA, 25 bp, Homo sapien
tgtctgcaaatccaagtactttctt

SEQ ID NO: 473599 - DNA, 25 bp, Homo sapien
catttggctaactcagaagtatgac

SEQ ID NO: 473600 - DNA, 25 bp, Homo sapien
ggtacagagcatattctaggtctgt

SEQ ID NO: 473601 - DNA, 25 bp, Homo sapien
ggacaagagagcacaattgccaggt

SEQ ID NO: 473602 - DNA, 25 bp, Homo sapien
cacaattgccaggtacagagcatat

SEQ ID NO: 473603 - DNA, 25 bp, Homo sapien
ttcatggtattcttactgggacaag

SEQ ID NO: 473604 - DNA, 25 bp, Homo sapien
gggcactggacaattgcaagggcca

SEQ ID NO: 473605 - DNA, 25 bp, Homo sapien
ggcactggacaattgcaagggccat

SEQ ID NO: 473606 - DNA, 25 bp, Homo sapien
tgttaacgtcattggtggtcagccg

SEQ ID NO: 473607 - DNA, 25 bp, Homo sapien
gccgattaaattctttggctccaaa

SEQ ID NO: 473608 - DNA, 25 bp, Homo sapien
actgcttttcacaagaaaagaattc

SEQ ID NO: 473609 - DNA, 25 bp, Homo sapien
tggtgggcaagggttataagaacca

SEQ ID NO: 473610 - DNA, 25 bp, Homo sapien
acaaacccgcattggctcctttgct

SEQ ID NO: 473611 - DNA, 25 bp, Homo sapien
ggatcgtattatcccctgctgttcc

SEQ ID NO: 473612 - DNA, 25 bp, Homo sapien
aacccgcattggctcctttgctgat

SEQ ID NO: 473613 - DNA, 25 bp, Homo sapien
tgctgatagctgtgattgactgttg

SEQ ID NO: 473614 - DNA, 25 bp, Homo sapien
tactccacataattgaaattgaact

SEQ ID NO: 473615 - DNA, 25 bp, Homo sapien
ttaacctgagcgtcccttttcctca

SEQ ID NO: 473616 - DNA, 25 bp, Homo sapien
cttgtgttaacctgagcgtcccttt

SEQ ID NO: 473617 - DNA, 25 bp, Homo sapien
ttttcctcacttgggtccgatctcc

SEQ ID NO: 473618 - DNA, 25 bp, Homo sapien
cttgtcacagtcctgcatctccttg

SEQ ID NO: 473619 - DNA, 25 bp, Homo sapien
gaggtaggatgttcgagctatggta

SEQ ID NO: 473620 - DNA, 25 bp, Homo sapien
tcttgacccaaggacaatgctggaa

SEQ ID NO: 473621 - DNA, 25 bp, Homo sapien
ctccttggcaaggttgaggtaggat

SEQ ID NO: 473622 - DNA, 25 bp, Homo sapien
gaagtccagccttttgaacagaggg

SEQ ID NO: 473623 - DNA, 25 bp, Homo sapien
agtccagccttttgaacagagggac

SEQ ID NO: 473624 - DNA, 25 bp, Homo sapien
aaatttcagcttggcgatgatctgc

SEQ ID NO: 473625 - DNA, 25 bp, Homo sapien
aggaaatttcagcttggcgatgatc

SEQ ID NO: 473626 - DNA, 25 bp, Homo sapien
ttggtccaaaaactggatgagtttg

SEQ ID NO: 473627 - DNA, 25 bp, Homo sapien
caaaaactggatgagtttgtatttc

SEQ ID NO: 473628 - DNA, 25 bp, Homo sapien
ctggaaattgtataactgctgcttt

SEQ ID NO: 473629 - DNA, 25 bp, Homo sapien
taactgctgctttcaagggtttggt

SEQ ID NO: 473630 - DNA, 25 bp, Homo sapien
taggtcccaatcttacaaacatctc

SEQ ID NO: 473631 - DNA, 25 bp, Homo sapien
cactaggtgggcgatgcagcagcca

SEQ ID NO: 473632 - DNA, 25 bp, Homo sapien
tagctcacactactgccactaggtg

SEQ ID NO: 473633 - DNA, 25 bp, Homo sapien
tagatcttttgtccatagctcacac

SEQ ID NO: 473634 - DNA, 25 bp, Homo sapien
catagactagggaatcagaatgcct

SEQ ID NO: 473635 - DNA, 25 bp, Homo sapien
caagagtgagttagaccaagaggag

SEQ ID NO: 473636 - DNA, 25 bp, Homo sapien
ttagtgcaatgccaagctgcaatgc

SEQ ID NO: 473637 - DNA, 25 bp, Homo sapien
tttagccatccctgacagtgctgag

SEQ ID NO: 473638 - DNA, 25 bp, Homo sapien
tccactgtagtgagattggcttctt

SEQ ID NO: 473639 - DNA, 25 bp, Homo sapien
caagttccaagtccatttgactttc

SEQ ID NO: 473640 - DNA, 25 bp, Homo sapien
tgctgcggacactccatgcctattg

SEQ ID NO: 473641 - DNA, 25 bp, Homo sapien
ttcttgccatttgtctggccatggt

SEQ ID NO: 473642 - DNA, 25 bp, Homo sapien
cagggatctaatttactcagggagc

SEQ ID NO: 473643 - DNA, 25 bp, Homo sapien
ggaagttgccagttaaccatgacag

SEQ ID NO: 473644 - DNA, 25 bp, Homo sapien
gatcggtgcatcaacaatacagtgt

SEQ ID NO: 473645 - DNA, 25 bp, Homo sapien
tcttagtacagggagtgatgcagca

SEQ ID NO: 473646 - DNA, 25 bp, Homo sapien
tgctccttgaagtcccgcgcaggtt

SEQ ID NO: 473647 - DNA, 25 bp, Homo sapien
tgtctgaaaccttcgcgatggtccg

SEQ ID NO: 473648 - DNA, 25 bp, Homo sapien
cgcaggttccagttgagtttcggtg

SEQ ID NO: 473649 - DNA, 25 bp, Homo sapien
cggtgttcgcatgtttttcctcaga

SEQ ID NO: 473650 - DNA, 25 bp, Homo sapien
gcagtttcaaaccatcggcagagct

SEQ ID NO: 473651 - DNA, 25 bp, Homo sapien
tcttagcgccacgatgatagccacg

SEQ ID NO: 473652 - DNA, 25 bp, Homo sapien
tcaagtcagctttacgggaggacgg

SEQ ID NO: 473653 - DNA, 25 bp, Homo sapien
ttctatgcgccaaaatacaacaggg

SEQ ID NO: 473654 - DNA, 25 bp, Homo sapien
tgctcatcgtccactccccgttgag

SEQ ID NO: 473655 - DNA, 25 bp, Homo sapien
tctttccctctagcgacgtcctgct

SEQ ID NO: 473656 - DNA, 25 bp, Homo sapien
aagttgcatttagcgctcccagggg

SEQ ID NO: 473657 - DNA, 25 bp, Homo sapien
tctcaccagcaagtgaacatccttc

SEQ ID NO: 473658 - DNA, 25 bp, Homo sapien
atcaggcgcgctctccaaaagtgga

SEQ ID NO: 473659 - DNA, 25 bp, Homo sapien
agcgttcaccccagacagtgcggat

SEQ ID NO: 473660 - DNA, 25 bp, Homo sapien
tgcggatcctggcacaaaacctctc

SEQ ID NO: 473661 - DNA, 25 bp, Homo sapien
tcacgccaaccaacgaaggtctgct

SEQ ID NO: 473662 - DNA, 25 bp, Homo sapien
tgtggtccaagcaggaggttccaaa

SEQ ID NO: 473663 - DNA, 25 bp, Homo sapien
gaaagccctggaacgaagtgataag

SEQ ID NO: 473664 - DNA, 25 bp, Homo sapien
tcaaggcgatagtgccagaaagcag

SEQ ID NO: 473665 - DNA, 25 bp, Homo sapien
gatggatgctgcttaccttgacaaa

SEQ ID NO: 473666 - DNA, 25 bp, Homo sapien
aaaagttctcttgcagaactacaac

SEQ ID NO: 473667 - DNA, 25 bp, Homo sapien
ccaaatacagtagtaaactttgtct

SEQ ID NO: 473668 - DNA, 25 bp, Homo sapien
tatgccagagtagttacaatcaaga

SEQ ID NO: 473669 - DNA, 25 bp, Homo sapien
aatgtgggttatttgattatgccag

SEQ ID NO: 473670 - DNA, 25 bp, Homo sapien
tagagttaggcatcctgttttgggc

SEQ ID NO: 473671 - DNA, 25 bp, Homo sapien
aaagagtagtctgtcctcacaggca

SEQ ID NO: 473672 - DNA, 25 bp, Homo sapien
gaaatggaggctaactagttgcagt

SEQ ID NO: 473673 - DNA, 25 bp, Homo sapien
caattgccacagaagcaagtagggt

SEQ ID NO: 473674 - DNA, 25 bp, Homo sapien
tatagtcttgagtttcttgtccgca

SEQ ID NO: 473675 - DNA, 25 bp, Homo sapien
ggaactttctccacattagagcaaa

SEQ ID NO: 473676 - DNA, 25 bp, Homo sapien
gatagtagggacttgcctggctata

SEQ ID NO: 473677 - DNA, 25 bp, Homo sapien
gatgtgctagtaatgctctaacctt

SEQ ID NO: 473678 - DNA, 25 bp, Homo sapien
tcccatgcaaaagatccgctttgtt

SEQ ID NO: 473679 - DNA, 25 bp, Homo sapien
tgtgtatgtctaaaaaatcatattc

SEQ ID NO: 473680 - DNA, 25 bp, Homo sapien
catattatttcttgcctagcctgtt

SEQ ID NO: 473681 - DNA, 25 bp, Homo sapien
tagtatgttctctatagcctacctt

SEQ ID NO: 473682 - DNA, 25 bp, Homo sapien
tgttggcgggattctgaacgctgcc

SEQ ID NO: 473683 - DNA, 25 bp, Homo sapien
gctcagaccgtgcagaatgttacat

SEQ ID NO: 473684 - DNA, 25 bp, Homo sapien
atggattcatctgggcgcctttcgg

SEQ ID NO: 473685 - DNA, 25 bp, Homo sapien
tagcgcaccgtgattaatggattca

SEQ ID NO: 473686 - DNA, 25 bp, Homo sapien
aaaggagacttctccacaggatgcc

SEQ ID NO: 473687 - DNA, 25 bp, Homo sapien
ctgatccctacccttaaaggagact

SEQ ID NO: 473688 - DNA, 25 bp, Homo sapien
cccttaaaggagacttctccacagg

SEQ ID NO: 473689 - DNA, 25 bp, Homo sapien
gagacttctccacaggatgcccaca

SEQ ID NO: 473690 - DNA, 25 bp, Homo sapien
aagctagtaatcctgaaatcttccc

SEQ ID NO: 473691 - DNA, 25 bp, Homo sapien
gggcactctttcacccagccaattt

SEQ ID NO: 473692 - DNA, 25 bp, Homo sapien
gttgtccaagctagtaatcctgaaa

SEQ ID NO: 473693 - DNA, 25 bp, Homo sapien
ttgcatccccatgacaaagggcact

SEQ ID NO: 473694 - DNA, 25 bp, Homo sapien
ggctccttcactctatgctttaatt

SEQ ID NO: 473695 - DNA, 25 bp, Homo sapien
tccttcactctatgctttaattcct

SEQ ID NO: 473696 - DNA, 25 bp, Homo sapien
cttcactctatgctttaattccttc

SEQ ID NO: 473697 - DNA, 25 bp, Homo sapien
tgaggctccttcactctatgcttta

SEQ ID NO: 473698 - DNA, 25 bp, Homo sapien
ctttctgaaataaacttgttcccag

SEQ ID NO: 473699 - DNA, 25 bp, Homo sapien
tgaaataaacttgttcccagtctct

SEQ ID NO: 473700 - DNA, 25 bp, Homo sapien
aaataaacttgttcccagtctctca

SEQ ID NO: 473701 - DNA, 25 bp, Homo sapien
tctgaaataaacttgttcccagtct

SEQ ID NO: 473702 - DNA, 25 bp, Homo sapien
catcctggttatactgtagtttctg

SEQ ID NO: 473703 - DNA, 25 bp, Homo sapien
atcctggttatactgtagtttctgc

SEQ ID NO: 473704 - DNA, 25 bp, Homo sapien
gcatcctggttatactgtagtttct

SEQ ID NO: 473705 - DNA, 25 bp, Homo sapien
tccatggcaacacctatgggcattc

SEQ ID NO: 473706 - DNA, 25 bp, Homo sapien
tggcaacacctatgggcattccttt

SEQ ID NO: 473707 - DNA, 25 bp, Homo sapien
cttatagattcatatgtacatggcc

SEQ ID NO: 473708 - DNA, 25 bp, Homo sapien
tagactctcccagttttccatggca

SEQ ID NO: 473709 - DNA, 25 bp, Homo sapien
aagaatcttgcccttaacctgtttg

SEQ ID NO: 473710 - DNA, 25 bp, Homo sapien
ggcaagaatcttgcccttaacctgt

SEQ ID NO: 473711 - DNA, 25 bp, Homo sapien
cttaacctgtttgtttacaacaatg

SEQ ID NO: 473712 - DNA, 25 bp, Homo sapien
agaatcttgcccttaacctgtttgt

SEQ ID NO: 473713 - DNA, 25 bp, Homo sapien
ctcagctcttagagtgctttgtgtg

SEQ ID NO: 473714 - DNA, 25 bp, Homo sapien
agtgctttgtgtgctcaatacgcac

SEQ ID NO: 473715 - DNA, 25 bp, Homo sapien
gagtgctttgtgtgctcaatacgca

SEQ ID NO: 473716 - DNA, 25 bp, Homo sapien
agctcttagagtgctttgtgtgctc

SEQ ID NO: 473717 - DNA, 25 bp, Homo sapien
taattttccttcacgtgcttcagga

SEQ ID NO: 473718 - DNA, 25 bp, Homo sapien
ctccccatgggttctcacaaagtgc

SEQ ID NO: 473719 - DNA, 25 bp, Homo sapien
cccatgggttctcacaaagtgcact

SEQ ID NO: 473720 - DNA, 25 bp, Homo sapien
gggcttcagttgaacacaggtactt

SEQ ID NO: 473721 - DNA, 25 bp, Homo sapien
ccagtaggggattgatattggcaaa

SEQ ID NO: 473722 - DNA, 25 bp, Homo sapien
ctgaaagagaattctttgttagaac

SEQ ID NO: 473723 - DNA, 25 bp, Homo sapien
tgttagaaccaccagtaggggattg

SEQ ID NO: 473724 - DNA, 25 bp, Homo sapien
gaaagagaattctttgttagaacca

SEQ ID NO: 473725 - DNA, 25 bp, Homo sapien
aataacgggcttccccttgagagag

SEQ ID NO: 473726 - DNA, 25 bp, Homo sapien
gaggtaggccctagaaggtgcatcc

SEQ ID NO: 473727 - DNA, 25 bp, Homo sapien
catttcattgaggtgccattaggac

SEQ ID NO: 473728 - DNA, 25 bp, Homo sapien
tgtccaatcgctgaagtgccggcga

SEQ ID NO: 473729 - DNA, 25 bp, Homo sapien
acatttatacacagccctgattggt

SEQ ID NO: 473730 - DNA, 25 bp, Homo sapien
cctgattggttctgacacaggtgct

SEQ ID NO: 473731 - DNA, 25 bp, Homo sapien
gaaagccatggtttcgggctgtccc

SEQ ID NO: 473732 - DNA, 25 bp, Homo sapien
catggaggatgaggtttacaagccg

SEQ ID NO: 473733 - DNA, 25 bp, Homo sapien
cttatcgagagctttacaggctctg

SEQ ID NO: 473734 - DNA, 25 bp, Homo sapien
gcaacttgtaaagctgagggcggca

SEQ ID NO: 473735 - DNA, 25 bp, Homo sapien
ttgctcctcgcctctcttatcgaga

SEQ ID NO: 473736 - DNA, 25 bp, Homo sapien
gagggcggcagatttggcctcagat

SEQ ID NO: 473737 - DNA, 25 bp, Homo sapien
tgtggcctgaccgactgcctcctgc

SEQ ID NO: 473738 - DNA, 25 bp, Homo sapien
gcccatcgagtaagatgtagaactc

SEQ ID NO: 473739 - DNA, 25 bp, Homo sapien
gactcaggaagggtgcgttcattac

SEQ ID NO: 473740 - DNA, 25 bp, Homo sapien
gtgacaatagcccatcgagtaagat

SEQ ID NO: 473741 - DNA, 25 bp, Homo sapien
cctgtgccttgaactgccttccctt

SEQ ID NO: 473742 - DNA, 25 bp, Homo sapien
ccctgtgccttgaactgccttccct

SEQ ID NO: 473743 - DNA, 25 bp, Homo sapien
gtccctgtgccttgaactgccttcc

SEQ ID NO: 473744 - DNA, 25 bp, Homo sapien
aacattgtgattaatgcgcccgctc

SEQ ID NO: 473745 - DNA, 25 bp, Homo sapien
atcatgttctgcctttgttctgcgg

SEQ ID NO: 473746 - DNA, 25 bp, Homo sapien
tttgttctgcgggtccaggctgctt

SEQ ID NO: 473747 - DNA, 25 bp, Homo sapien
cattgtgattaatgcgcccgctccc

SEQ ID NO: 473748 - DNA, 25 bp, Homo sapien
tgggctccatgcctcattagcttgg

SEQ ID NO: 473749 - DNA, 25 bp, Homo sapien
ggaaaatggtgtgcttatcctgcaa

SEQ ID NO: 473750 - DNA, 25 bp, Homo sapien
tgatgatgtatggatccaggaggct

SEQ ID NO: 473751 - DNA, 25 bp, Homo sapien
tgcatattgcaatgagagctcccaa

SEQ ID NO: 473752 - DNA, 25 bp, Homo sapien
gtacacttcgtaattacctccatta

SEQ ID NO: 473753 - DNA, 25 bp, Homo sapien
gaaaaacataggtcccagcgaggga

SEQ ID NO: 473754 - DNA, 25 bp, Homo sapien
taaccactcggtacatttcggatat

SEQ ID NO: 473755 - DNA, 25 bp, Homo sapien
gaaatggttggcttgatttatccat

SEQ ID NO: 473756 - DNA, 25 bp, Homo sapien
tgttattagtctttaagaagatgat

SEQ ID NO: 473757 - DNA, 25 bp, Homo sapien
tagtttatattctccacctggttta

SEQ ID NO: 473758 - DNA, 25 bp, Homo sapien
tgtctgattcaatcttgcaattcag

SEQ ID NO: 473759 - DNA, 25 bp, Homo sapien
gaagatgattaagttgtctgattca

SEQ ID NO: 473760 - DNA, 25 bp, Homo sapien
tggttggagggaggaagagaggagc

SEQ ID NO: 473761 - DNA, 25 bp, Homo sapien
ctggttggagggaggaagagaggag

SEQ ID NO: 473762 - DNA, 25 bp, Homo sapien
ttggagggaggaagagaggagcagc

SEQ ID NO: 473763 - DNA, 25 bp, Homo sapien
ggagggaggaagagaggagcagcca

SEQ ID NO: 473764 - DNA, 25 bp, Homo sapien
tcagcttcccctgagttccacgggc

SEQ ID NO: 473765 - DNA, 25 bp, Homo sapien
cagcttcccctgagttccacgggct

SEQ ID NO: 473766 - DNA, 25 bp, Homo sapien
gtgattgttgcaccataaagtgctc

SEQ ID NO: 473767 - DNA, 25 bp, Homo sapien
tgtaattggcatacaggttcaaatt

SEQ ID NO: 473768 - DNA, 25 bp, Homo sapien
tgttgcaccataaagtgctccacag

SEQ ID NO: 473769 - DNA, 25 bp, Homo sapien
ttagattgctgtgtgtttaggaaag

SEQ ID NO: 473770 - DNA, 25 bp, Homo sapien
aaagccaattattaatgccagttcc

SEQ ID NO: 473771 - DNA, 25 bp, Homo sapien
gccaattattaatgccagttccacc

SEQ ID NO: 473772 - DNA, 25 bp, Homo sapien
ccaaagccaattattaatgccagtt

SEQ ID NO: 473773 - DNA, 25 bp, Homo sapien
agccaattattaatgccagttccac

SEQ ID NO: 473774 - DNA, 25 bp, Homo sapien
gatgaggcttcagtaccctggacac

SEQ ID NO: 473775 - DNA, 25 bp, Homo sapien
ggaagatgaggcttcagtaccctgg

SEQ ID NO: 473776 - DNA, 25 bp, Homo sapien
tgaggaagatgaggcttcagtaccc

SEQ ID NO: 473777 - DNA, 25 bp, Homo sapien
agatgaggcttcagtaccctggaca

SEQ ID NO: 473778 - DNA, 25 bp, Homo sapien
gtaatggctagagaattggctaaaa

SEQ ID NO: 473779 - DNA, 25 bp, Homo sapien
tcctcagctctcttcaataataact

SEQ ID NO: 473780 - DNA, 25 bp, Homo sapien
agtggtgataccatccccagcttct

SEQ ID NO: 473781 - DNA, 25 bp, Homo sapien
aattggctaaaaggcctacaccttg

SEQ ID NO: 473782 - DNA, 25 bp, Homo sapien
gctaaccttctcaaggccttctttg

SEQ ID NO: 473783 - DNA, 25 bp, Homo sapien
tttgctaaccttctcaaggccttct

SEQ ID NO: 473784 - DNA, 25 bp, Homo sapien
caaggccttctttgcagtagagcat

SEQ ID NO: 473785 - DNA, 25 bp, Homo sapien
tctcaaggccttctttgcagtagag

SEQ ID NO: 473786 - DNA, 25 bp, Homo sapien
gcaccagaaatgatgctaccaattt

SEQ ID NO: 473787 - DNA, 25 bp, Homo sapien
ttttcattgcaccagaaatgatgct

SEQ ID NO: 473788 - DNA, 25 bp, Homo sapien
tccatctttcactgtgagcacaacc

SEQ ID NO: 473789 - DNA, 25 bp, Homo sapien
ttcactgtgagcacaacctttctcc

SEQ ID NO: 473790 - DNA, 25 bp, Homo sapien
aaaaatgtagcctcaatcaaacttc

SEQ ID NO: 473791 - DNA, 25 bp, Homo sapien
tagcctcaatcaaacttcatgcctt

SEQ ID NO: 473792 - DNA, 25 bp, Homo sapien
tgtagcctcaatcaaacttcatgcc

SEQ ID NO: 473793 - DNA, 25 bp, Homo sapien
ggaaaaatgtagcctcaatcaaact

SEQ ID NO: 473794 - DNA, 25 bp, Homo sapien
cctattcaagatgagcgtacttaac

SEQ ID NO: 473795 - DNA, 25 bp, Homo sapien
aaaggcttaaggtaagcactggcaa

SEQ ID NO: 473796 - DNA, 25 bp, Homo sapien
taagctggctccgttgtcaccaaaa

SEQ ID NO: 473797 - DNA, 25 bp, Homo sapien
gcaattgtgaccaaaggcttaaggt

SEQ ID NO: 473798 - DNA, 25 bp, Homo sapien
ccctcttctccaaacactgcactac

SEQ ID NO: 473799 - DNA, 25 bp, Homo sapien
aattttcctgagtcatgaggctgag

SEQ ID NO: 473800 - DNA, 25 bp, Homo sapien
tttttcaatttaagctttgtcatct

SEQ ID NO: 473801 - DNA, 25 bp, Homo sapien
caatttaagctttgtcatcttttcc

SEQ ID NO: 473802 - DNA, 25 bp, Homo sapien
taatagcatagcatcatctttggcc

SEQ ID NO: 473803 - DNA, 25 bp, Homo sapien
ttcatatccactagttatgatatct

SEQ ID NO: 473804 - DNA, 25 bp, Homo sapien
tcatatccactagttatgatatcta

SEQ ID NO: 473805 - DNA, 25 bp, Homo sapien
tttcatatccactagttatgatatc

SEQ ID NO: 473806 - DNA, 25 bp, Homo sapien
cttttcatatccactagttatgata

SEQ ID NO: 473807 - DNA, 25 bp, Homo sapien
cgtcattagttggagttaatgagtc

SEQ ID NO: 473808 - DNA, 25 bp, Homo sapien
ttgtagcattaaggacatcggtaaa

SEQ ID NO: 473809 - DNA, 25 bp, Homo sapien
tcttgtctttcacctgaacatcact

SEQ ID NO: 473810 - DNA, 25 bp, Homo sapien
aaggacatcggtaaatctgtctttc

SEQ ID NO: 473811 - DNA, 25 bp, Homo sapien
tgtttgttgagtcaatgattccttt

SEQ ID NO: 473812 - DNA, 25 bp, Homo sapien
atgtttgttgagtcaatgattcctt

SEQ ID NO: 473813 - DNA, 25 bp, Homo sapien
cttagcattggtcattgaaggaatt

SEQ ID NO: 473814 - DNA, 25 bp, Homo sapien
cattcttagcattggtcattgaagg

SEQ ID NO: 473815 - DNA, 25 bp, Homo sapien
caaagtcattggaaggaactgcagc

SEQ ID NO: 473816 - DNA, 25 bp, Homo sapien
cagcctgtaggacgcagttgttcga

SEQ ID NO: 473817 - DNA, 25 bp, Homo sapien
cagaggacagccaatccttccaaag

SEQ ID NO: 473818 - DNA, 25 bp, Homo sapien
gttgttcgatgctccagatggttga

SEQ ID NO: 473819 - DNA, 25 bp, Homo sapien
tatataaaatggacgaatgccagcc

SEQ ID NO: 473820 - DNA, 25 bp, Homo sapien
tgttttgtcaagctgaccatgccct

SEQ ID NO: 473821 - DNA, 25 bp, Homo sapien
tatctctaacacaacatgcttattc

SEQ ID NO: 473822 - DNA, 25 bp, Homo sapien
caaaaggactggttgtgttccttgt

SEQ ID NO: 473823 - DNA, 25 bp, Homo sapien
cagggcagtatgacacaatgtgtaa

SEQ ID NO: 473824 - DNA, 25 bp, Homo sapien
caatgtgtaagccattggtgtcact

SEQ ID NO: 473825 - DNA, 25 bp, Homo sapien
aagtaactgaacagggcagtatgac

SEQ ID NO: 473826 - DNA, 25 bp, Homo sapien
gttggaggcctttgtgacacgagca

SEQ ID NO: 473827 - DNA, 25 bp, Homo sapien
tttgatcaaggttctcacaccagga

SEQ ID NO: 473828 - DNA, 25 bp, Homo sapien
ctgtgtatctggataattaatgaca

SEQ ID NO: 473829 - DNA, 25 bp, Homo sapien
atagggctgattccctccacagtga

SEQ ID NO: 473830 - DNA, 25 bp, Homo sapien
tgaaagaccatgtggcccagatcat

SEQ ID NO: 473831 - DNA, 25 bp, Homo sapien
atatcaatcaaaggcgagggtcccc

SEQ ID NO: 473832 - DNA, 25 bp, Homo sapien
catatcaatcaaaggcgagggtccc

SEQ ID NO: 473833 - DNA, 25 bp, Homo sapien
tccaagtgatgttcttgtcgcatgt

SEQ ID NO: 473834 - DNA, 25 bp, Homo sapien
tgttcttgtcgcatgtgctacagca

SEQ ID NO: 473835 - DNA, 25 bp, Homo sapien
tatgaagcccctttggtccaagtga

SEQ ID NO: 473836 - DNA, 25 bp, Homo sapien
gtcgcatgtgctacagcatttgcca

SEQ ID NO: 473837 - DNA, 25 bp, Homo sapien
caaactgggcaatctgatgactgac

SEQ ID NO: 473838 - DNA, 25 bp, Homo sapien
ctaacaaggcaccagccaggacaac

SEQ ID NO: 473839 - DNA, 25 bp, Homo sapien
agccaggacaaccacacctgtggtt

SEQ ID NO: 473840 - DNA, 25 bp, Homo sapien
cacacctgtggttccatctccaatt

SEQ ID NO: 473841 - DNA, 25 bp, Homo sapien
acctgtggttccatctccaatttca

SEQ ID NO: 473842 - DNA, 25 bp, Homo sapien
tctgctattctgattggatgaatac

SEQ ID NO: 473843 - DNA, 25 bp, Homo sapien
atacttcggtctggcaactcctggg

SEQ ID NO: 473844 - DNA, 25 bp, Homo sapien
ttctgattggatgaatacttcggtc

SEQ ID NO: 473845 - DNA, 25 bp, Homo sapien
tggatgaatacttcggtctggcaac

SEQ ID NO: 473846 - DNA, 25 bp, Homo sapien
agccatttgtcggtaacaattgttg

SEQ ID NO: 473847 - DNA, 25 bp, Homo sapien
ccatttgtcggtaacaattgttgac

SEQ ID NO: 473848 - DNA, 25 bp, Homo sapien
atctcagccatttgtcggtaacaat

SEQ ID NO: 473849 - DNA, 25 bp, Homo sapien
tcagccatttgtcggtaacaattgt

SEQ ID NO: 473850 - DNA, 25 bp, Homo sapien
tctgttaagggaggatggcattcac

SEQ ID NO: 473851 - DNA, 25 bp, Homo sapien
atctgttaagggaggatggcattca

SEQ ID NO: 473852 - DNA, 25 bp, Homo sapien
cttaatccgtttattgtcctccagg

SEQ ID NO: 473853 - DNA, 25 bp, Homo sapien
ttaatccgtttattgtcctccaggc

SEQ ID NO: 473854 - DNA, 25 bp, Homo sapien
taatccgtttattgtcctccaggct

SEQ ID NO: 473855 - DNA, 25 bp, Homo sapien
aatccgtttattgtcctccaggctg

SEQ ID NO: 473856 - DNA, 25 bp, Homo sapien
ctgtgggtgactgaaatacttgtcc

SEQ ID NO: 473857 - DNA, 25 bp, Homo sapien
gggtgactgaaatacttgtccacaa

SEQ ID NO: 473858 - DNA, 25 bp, Homo sapien
gactgaaatacttgtccacaatcac

SEQ ID NO: 473859 - DNA, 25 bp, Homo sapien
ctgaaatacttgtccacaatcacac

SEQ ID NO: 473860 - DNA, 25 bp, Homo sapien
ttggtttgggtagttcaaatggaca

SEQ ID NO: 473861 - DNA, 25 bp, Homo sapien
aatggacatgtgagaattacaatct

SEQ ID NO: 473862 - DNA, 25 bp, Homo sapien
gacatgtgagaattacaatcttggc

SEQ ID NO: 473863 - DNA, 25 bp, Homo sapien
tgggtagttcaaatggacatgtgag

SEQ ID NO: 473864 - DNA, 25 bp, Homo sapien
ctaggttagcaccagtctctttaat

SEQ ID NO: 473865 - DNA, 25 bp, Homo sapien
ggcaatcagttcaatttcaggtcct

SEQ ID NO: 473866 - DNA, 25 bp, Homo sapien
agctctgagaacttggtgatgatct

SEQ ID NO: 473867 - DNA, 25 bp, Homo sapien
tgatctgccctcctgttgtgatggc

SEQ ID NO: 473868 - DNA, 25 bp, Homo sapien
tcctggccatgagctctgagaactt

SEQ ID NO: 473869 - DNA, 25 bp, Homo sapien
ctcgatgaccagcattttatcctta

SEQ ID NO: 473870 - DNA, 25 bp, Homo sapien
aagggattgttttgcctcctcaata

SEQ ID NO: 473871 - DNA, 25 bp, Homo sapien
gttttgcctcctcaataatcatctt

SEQ ID NO: 473872 - DNA, 25 bp, Homo sapien
catgattatcacggatgaggttcca

SEQ ID NO: 473873 - DNA, 25 bp, Homo sapien
caaagcaccgtgaagggattgtttt

SEQ ID NO: 473874 - DNA, 25 bp, Homo sapien
tgttggcaagcgctctcatggcata

SEQ ID NO: 473875 - DNA, 25 bp, Homo sapien
ctccaacgtgttggcaagcgctctc

SEQ ID NO: 473876 - DNA, 25 bp, Homo sapien
acgtgttggcaagcgctctcatggc

SEQ ID NO: 473877 - DNA, 25 bp, Homo sapien
gggatgacctccaacgtgttggcaa

SEQ ID NO: 473878 - DNA, 25 bp, Homo sapien
gatgtaataaataaccgtagacgca

SEQ ID NO: 473879 - DNA, 25 bp, Homo sapien
gccaatcgaggtttctgtgacacgt

SEQ ID NO: 473880 - DNA, 25 bp, Homo sapien
tgtgacacgttattgcttcatataa

SEQ ID NO: 473881 - DNA, 25 bp, Homo sapien
cgtagacgcatcacaagacatccat

SEQ ID NO: 473882 - DNA, 25 bp, Homo sapien
tcatactgcatcacccctgtgggtc

SEQ ID NO: 473883 - DNA, 25 bp, Homo sapien
ccaatgtaaccaactgcacgtgcag

SEQ ID NO: 473884 - DNA, 25 bp, Homo sapien
tcagggttgtgtttatagccagcaa

SEQ ID NO: 473885 - DNA, 25 bp, Homo sapien
aaaattgtagattcctcaggcccag

SEQ ID NO: 473886 - DNA, 25 bp, Homo sapien
ttttgtaataatagctagcagtcat

SEQ ID NO: 473887 - DNA, 25 bp, Homo sapien
aatgcaatccggtatttttgtaata

SEQ ID NO: 473888 - DNA, 25 bp, Homo sapien
atgcaatccggtatttttgtaataa

SEQ ID NO: 473889 - DNA, 25 bp, Homo sapien
atttttgtaataatagctagcagtc

SEQ ID NO: 473890 - DNA, 25 bp, Homo sapien
catggaaaagatgaagtgggtaggt

SEQ ID NO: 473891 - DNA, 25 bp, Homo sapien
cagaggacagccattagatgccagt

SEQ ID NO: 473892 - DNA, 25 bp, Homo sapien
gaaaagtcttaggaactggacctga

SEQ ID NO: 473893 - DNA, 25 bp, Homo sapien
gccagtaggatccagaagcagcgac

SEQ ID NO: 473894 - DNA, 25 bp, Homo sapien
ctgccttttcatctgactcctgtgg

SEQ ID NO: 473895 - DNA, 25 bp, Homo sapien
cttttcatctgactcctgtggtcat

SEQ ID NO: 473896 - DNA, 25 bp, Homo sapien
tgccttttcatctgactcctgtggt

SEQ ID NO: 473897 - DNA, 25 bp, Homo sapien
ttcatctgactcctgtggtcatttc

SEQ ID NO: 473898 - DNA, 25 bp, Homo sapien
ctgagtctgcgacagtgactctctt

SEQ ID NO: 473899 - DNA, 25 bp, Homo sapien
tgcgacagtgactctcttatcttca

SEQ ID NO: 473900 - DNA, 25 bp, Homo sapien
gtaagcctctattgagccatttagt

SEQ ID NO: 473901 - DNA, 25 bp, Homo sapien
caaatctgtaactgagtctgcgaca

SEQ ID NO: 473902 - DNA, 25 bp, Homo sapien
tcatggtccctggatctggaaatct

SEQ ID NO: 473903 - DNA, 25 bp, Homo sapien
cttcatggtccctggatctggaaat

SEQ ID NO: 473904 - DNA, 25 bp, Homo sapien
ttcatggtccctggatctggaaatc

SEQ ID NO: 473905 - DNA, 25 bp, Homo sapien
ttctcttctgcagataatgcagtga

SEQ ID NO: 473906 - DNA, 25 bp, Homo sapien
cttctcttctgcagataatgcagtg

SEQ ID NO: 473907 - DNA, 25 bp, Homo sapien
gcatttgttgtcaagtgctttgcga

SEQ ID NO: 473908 - DNA, 25 bp, Homo sapien
caagtgcggcatgactcagtgcaca

SEQ ID NO: 473909 - DNA, 25 bp, Homo sapien
agggacaggctcaagcaccgcttag

SEQ ID NO: 473910 - DNA, 25 bp, Homo sapien
tatcggggtgcccaaatatgggtcc

SEQ ID NO: 473911 - DNA, 25 bp, Homo sapien
caatttagggtgataatgtaggaca

SEQ ID NO: 473912 - DNA, 25 bp, Homo sapien
gatcactttatttgcagattcagaa

SEQ ID NO: 473913 - DNA, 25 bp, Homo sapien
catcataggcaaggtgaaatagaaa

SEQ ID NO: 473914 - DNA, 25 bp, Homo sapien
gaaatagaaagtcgaagaaatcatc

SEQ ID NO: 473915 - DNA, 25 bp, Homo sapien
aggaggggctatgaagaacatagta

SEQ ID NO: 473916 - DNA, 25 bp, Homo sapien
tttgaggaggggctatgaagaacat

SEQ ID NO: 473917 - DNA, 25 bp, Homo sapien
tgaggaggggctatgaagaacatag

SEQ ID NO: 473918 - DNA, 25 bp, Homo sapien
atttgaggaggggctatgaagaaca

SEQ ID NO: 473919 - DNA, 25 bp, Homo sapien
taggtctacaagtgagcactggctc

SEQ ID NO: 473920 - DNA, 25 bp, Homo sapien
cactgtgtaggatacagttaggtct

SEQ ID NO: 473921 - DNA, 25 bp, Homo sapien
taggatacagttaggtctacaagtg

SEQ ID NO: 473922 - DNA, 25 bp, Homo sapien
cctatggacactgtgtaggatacag

SEQ ID NO: 473923 - DNA, 25 bp, Homo sapien
gccacagaggcatccatcccgttta

SEQ ID NO: 473924 - DNA, 25 bp, Homo sapien
cagaggcatccatcccgtttagatg

SEQ ID NO: 473925 - DNA, 25 bp, Homo sapien
atcccgtttagatggcatgttaccc

SEQ ID NO: 473926 - DNA, 25 bp, Homo sapien
gatggcatgttaccctgcaggagag

SEQ ID NO: 473927 - DNA, 25 bp, Homo sapien
gtttgagttatagcaatttgggtat

SEQ ID NO: 473928 - DNA, 25 bp, Homo sapien
tgatgacatcataaattctaccgct

SEQ ID NO: 473929 - DNA, 25 bp, Homo sapien
tgatttaaggattaggtagcttggg

SEQ ID NO: 473930 - DNA, 25 bp, Homo sapien
tgttgttgctaatcttgtcccaacg

SEQ ID NO: 473931 - DNA, 25 bp, Homo sapien
gaggctgtgagggatatagagcagg

SEQ ID NO: 473932 - DNA, 25 bp, Homo sapien
gagggatatagagcagggtcacaaa

SEQ ID NO: 473933 - DNA, 25 bp, Homo sapien
ggtcacaaaagcatcatgagaggta

SEQ ID NO: 473934 - DNA, 25 bp, Homo sapien
agaggtaggaatgtagtaagaccaa

SEQ ID NO: 473935 - DNA, 25 bp, Homo sapien
ggcaacgagtgtcattgcaaaggac

SEQ ID NO: 473936 - DNA, 25 bp, Homo sapien
tggcaacgagtgtcattgcaaagga

SEQ ID NO: 473937 - DNA, 25 bp, Homo sapien
tatgtcgaggagaaatgctcatctg

SEQ ID NO: 473938 - DNA, 25 bp, Homo sapien
aatctacagcgcaaactggatctcg

SEQ ID NO: 473939 - DNA, 25 bp, Homo sapien
tctttgctgtaacgaccttctggtg

SEQ ID NO: 473940 - DNA, 25 bp, Homo sapien
tcgtccaactttgcacaagtcgtct

SEQ ID NO: 473941 - DNA, 25 bp, Homo sapien
tcctctaggttatacatctttgaac

SEQ ID NO: 473942 - DNA, 25 bp, Homo sapien
cctgatattttgatcctgtccttgc

SEQ ID NO: 473943 - DNA, 25 bp, Homo sapien
ctgtccttgccggagagccacaaag

SEQ ID NO: 473944 - DNA, 25 bp, Homo sapien
gtccttgccggagagccacaaagca

SEQ ID NO: 473945 - DNA, 25 bp, Homo sapien
ctttttcacccctgatattttgatc

SEQ ID NO: 473946 - DNA, 25 bp, Homo sapien
tttggccccaaaagattgtggagag

SEQ ID NO: 473947 - DNA, 25 bp, Homo sapien
ggccccaaaagattgtggagagaaa

SEQ ID NO: 473948 - DNA, 25 bp, Homo sapien
tctttggccccaaaagattgtggag

SEQ ID NO: 473949 - DNA, 25 bp, Homo sapien
cttctttggccccaaaagattgtgg

SEQ ID NO: 473950 - DNA, 25 bp, Homo sapien
taagcaggtttagcaggtatgagtt

SEQ ID NO: 473951 - DNA, 25 bp, Homo sapien
cattaagcaggtttagcaggtatga

SEQ ID NO: 473952 - DNA, 25 bp, Homo sapien
ttagcaggtatgagtttgatgtaga

SEQ ID NO: 473953 - DNA, 25 bp, Homo sapien
caggtttagcaggtatgagtttgat

SEQ ID NO: 473954 - DNA, 25 bp, Homo sapien
ttatctttcgttgcctcgatagaca

SEQ ID NO: 473955 - DNA, 25 bp, Homo sapien
aatttaatgaggagtgacagacagg

SEQ ID NO: 473956 - DNA, 25 bp, Homo sapien
gaactttagtacaagggaaagcaga

SEQ ID NO: 473957 - DNA, 25 bp, Homo sapien
gacagacaggtgaactgattccata

SEQ ID NO: 473958 - DNA, 25 bp, Homo sapien
tctacttgtggaagtaccaggactc

SEQ ID NO: 473959 - DNA, 25 bp, Homo sapien
cagtctacttgtggaagtaccagga

SEQ ID NO: 473960 - DNA, 25 bp, Homo sapien
atctccagtctacttgtggaagtac

SEQ ID NO: 473961 - DNA, 25 bp, Homo sapien
tacttgtggaagtaccaggactcca

SEQ ID NO: 473962 - DNA, 25 bp, Homo sapien
gaagggcaattccggatctggcatc

SEQ ID NO: 473963 - DNA, 25 bp, Homo sapien
tgaagggcaattccggatctggcat

SEQ ID NO: 473964 - DNA, 25 bp, Homo sapien
aagggcaattccggatctggcatct

SEQ ID NO: 473965 - DNA, 25 bp, Homo sapien
ttgaagggcaattccggatctggca

SEQ ID NO: 473966 - DNA, 25 bp, Homo sapien
tagactcgacatgttggaggaaaaa

SEQ ID NO: 473967 - DNA, 25 bp, Homo sapien
caaccaaatgaggtatgcctatgat

SEQ ID NO: 473968 - DNA, 25 bp, Homo sapien
gattaaattgtgatggagccatacc

SEQ ID NO: 473969 - DNA, 25 bp, Homo sapien
cattggaacagatatgtagactcga

SEQ ID NO: 473970 - DNA, 25 bp, Homo sapien
tctatggcagaactcatggggtttc

SEQ ID NO: 473971 - DNA, 25 bp, Homo sapien
taggctgcggatgaaactaactgag

SEQ ID NO: 473972 - DNA, 25 bp, Homo sapien
cactgaagtaatgtttttctatggc

SEQ ID NO: 473973 - DNA, 25 bp, Homo sapien
tctatagacccgttctgagggggaa

SEQ ID NO: 473974 - DNA, 25 bp, Homo sapien
aagtcatcccctactgcttgcttga

SEQ ID NO: 473975 - DNA, 25 bp, Homo sapien
tttataaacaagtcatcccctactg

SEQ ID NO: 473976 - DNA, 25 bp, Homo sapien
catcccctactgcttgcttgacaaa

SEQ ID NO: 473977 - DNA, 25 bp, Homo sapien
atctggtgtttctaatgaaagtgac

SEQ ID NO: 473978 - DNA, 25 bp, Homo sapien
cagaatgtgtcataacaggggtcct

SEQ ID NO: 473979 - DNA, 25 bp, Homo sapien
cagtgtcagaatgtgtcataacagg

SEQ ID NO: 473980 - DNA, 25 bp, Homo sapien
agtgtcagaatgtgtcataacaggg

SEQ ID NO: 473981 - DNA, 25 bp, Homo sapien
tgtgtcataacaggggtcctccttt

SEQ ID NO: 473982 - DNA, 25 bp, Homo sapien
tattgaagtgatgttgatagtatca

SEQ ID NO: 473983 - DNA, 25 bp, Homo sapien
cattcttctcgagttggaaacagga

SEQ ID NO: 473984 - DNA, 25 bp, Homo sapien
tgccctgggtgatggatttttcctc

SEQ ID NO: 473985 - DNA, 25 bp, Homo sapien
ttttcctctgactaatcgctgtcac

SEQ ID NO: 473986 - DNA, 25 bp, Homo sapien
taaatctatcaagtagctacaccac

SEQ ID NO: 473987 - DNA, 25 bp, Homo sapien
catagattgttcttgagtcgtgcac

SEQ ID NO: 473988 - DNA, 25 bp, Homo sapien
ttaaggatagctgaggtagaaatag

SEQ ID NO: 473989 - DNA, 25 bp, Homo sapien
gcaaattagattagctatataccta

SEQ ID NO: 473990 - DNA, 25 bp, Homo sapien
caaaagcaagaagtgcaggaaagag

SEQ ID NO: 473991 - DNA, 25 bp, Homo sapien
tactattgaggtagagagacattaa

SEQ ID NO: 473992 - DNA, 25 bp, Homo sapien
tcattgtcagataattgaagtaaat

SEQ ID NO: 473993 - DNA, 25 bp, Homo sapien
gttggatttattgcccaggcacttc

SEQ ID NO: 473994 - DNA, 25 bp, Homo sapien
agcacaggctttccagcaaaaagct

SEQ ID NO: 473995 - DNA, 25 bp, Homo sapien
ctgcagcacaggctttccagcaaaa

SEQ ID NO: 473996 - DNA, 25 bp, Homo sapien
cacaggctttccagcaaaaagctcc

SEQ ID NO: 473997 - DNA, 25 bp, Homo sapien
caggctttccagcaaaaagctcctt

SEQ ID NO: 473998 - DNA, 25 bp, Homo sapien
tacattggagtcatgatgaaagtgt

SEQ ID NO: 473999 - DNA, 25 bp, Homo sapien
tgatgttgtaaagattgcataatac

SEQ ID NO: 474000 - DNA, 25 bp, Homo sapien
gcataatacattggagtcatgatga

SEQ ID NO: 474001 - DNA, 25 bp, Homo sapien
gtaaagattgcataatacattggag

SEQ ID NO: 474002 - DNA, 25 bp, Homo sapien
tcgtcttttcaaaaagacacaggga

SEQ ID NO: 474003 - DNA, 25 bp, Homo sapien
gacacagggagacttgctagactaa

SEQ ID NO: 474004 - DNA, 25 bp, Homo sapien
catattagagagattgccttcattg

SEQ ID NO: 474005 - DNA, 25 bp, Homo sapien
ggagacttgctagactaaagccgac

SEQ ID NO: 474006 - DNA, 25 bp, Homo sapien
tgattccacaggttaggcttctttt

SEQ ID NO: 474007 - DNA, 25 bp, Homo sapien
ttgattccacaggttaggcttcttt

SEQ ID NO: 474008 - DNA, 25 bp, Homo sapien
cactagcatggcttcagggatacct

SEQ ID NO: 474009 - DNA, 25 bp, Homo sapien
catccctgcaaggtatcctcactag

SEQ ID NO: 474010 - DNA, 25 bp, Homo sapien
agggatacctgatacatatggctcc

SEQ ID NO: 474011 - DNA, 25 bp, Homo sapien
cctgagttacagttgggtctggcat

SEQ ID NO: 474012 - DNA, 25 bp, Homo sapien
tgtgttaattgattcccatgtttag

SEQ ID NO: 474013 - DNA, 25 bp, Homo sapien
ttaattgattcccatgtttagtacc

SEQ ID NO: 474014 - DNA, 25 bp, Homo sapien
ccatgtttagtaccaggcgttgtac

SEQ ID NO: 474015 - DNA, 25 bp, Homo sapien
tagtaccaggcgttgtacaaactgc

SEQ ID NO: 474016 - DNA, 25 bp, Homo sapien
gcaggcctttaggaagaggacacag

SEQ ID NO: 474017 - DNA, 25 bp, Homo sapien
agaggacacagctctaaaagactca

SEQ ID NO: 474018 - DNA, 25 bp, Homo sapien
ctctaaaagactcagggtctcaaca

SEQ ID NO: 474019 - DNA, 25 bp, Homo sapien
cagcagcaggcctttaggaagagga

SEQ ID NO: 474020 - DNA, 25 bp, Homo sapien
ctatggctaattgccagacttgtca

SEQ ID NO: 474021 - DNA, 25 bp, Homo sapien
ggctaattgccagacttgtcagaaa

SEQ ID NO: 474022 - DNA, 25 bp, Homo sapien
tcctatggctaattgccagacttgt

SEQ ID NO: 474023 - DNA, 25 bp, Homo sapien
atggctaattgccagacttgtcaga

SEQ ID NO: 474024 - DNA, 25 bp, Homo sapien
ctgcttctgcatggtagcctgccat

SEQ ID NO: 474025 - DNA, 25 bp, Homo sapien
tctgcttctgcatggtagcctgcca

SEQ ID NO: 474026 - DNA, 25 bp, Homo sapien
ccattaaaccgaattcttgtgtttg

SEQ ID NO: 474027 - DNA, 25 bp, Homo sapien
cattaaaccgaattcttgtgtttgt

SEQ ID NO: 474028 - DNA, 25 bp, Homo sapien
atctcccattaaaccgaattcttgt

SEQ ID NO: 474029 - DNA, 25 bp, Homo sapien
ctcccattaaaccgaattcttgtgt

SEQ ID NO: 474030 - DNA, 25 bp, Homo sapien
tgaggaactctccaaaactagaaac

SEQ ID NO: 474031 - DNA, 25 bp, Homo sapien
ggaggagtaagtttttgtatcacaa

SEQ ID NO: 474032 - DNA, 25 bp, Homo sapien
tggagaatgataccccactgagact

SEQ ID NO: 474033 - DNA, 25 bp, Homo sapien
ctgagactttgtagttgtaacaatg

SEQ ID NO: 474034 - DNA, 25 bp, Homo sapien
gggcttgaggaagtactcttcgaaa

SEQ ID NO: 474035 - DNA, 25 bp, Homo sapien
gtggactggagctctataaaagacc

SEQ ID NO: 474036 - DNA, 25 bp, Homo sapien
tcttgtagggaattggcatctggaa

SEQ ID NO: 474037 - DNA, 25 bp, Homo sapien
gataataggtcagggcttttcagtg

SEQ ID NO: 474038 - DNA, 25 bp, Homo sapien
ttgatacactattgatacagatagc

SEQ ID NO: 474039 - DNA, 25 bp, Homo sapien
tattttgatacactattgatacaga

SEQ ID NO: 474040 - DNA, 25 bp, Homo sapien
tgcattattttgatacactattgat

SEQ ID NO: 474041 - DNA, 25 bp, Homo sapien
tacactattgatacagatagctaat

SEQ ID NO: 474042 - DNA, 25 bp, Homo sapien
tctctggtcacaaaacccatgacca

SEQ ID NO: 474043 - DNA, 25 bp, Homo sapien
ggtagttcttaatagttcagtgtct

SEQ ID NO: 474044 - DNA, 25 bp, Homo sapien
gcactgtacaccaggggtttcataa

SEQ ID NO: 474045 - DNA, 25 bp, Homo sapien
ttcttaatagttcagtgtctgtgag

SEQ ID NO: 474046 - DNA, 25 bp, Homo sapien
aaattgcttgatgctctagctgggc

SEQ ID NO: 474047 - DNA, 25 bp, Homo sapien
ggaagctcagatcatttcatacgga

SEQ ID NO: 474048 - DNA, 25 bp, Homo sapien
agaataatccaaggtgtcaggtagc

SEQ ID NO: 474049 - DNA, 25 bp, Homo sapien
gagcaattcaattggctgtcgaggg

SEQ ID NO: 474050 - DNA, 25 bp, Homo sapien
tgagtctcaggttctaaggatttct

SEQ ID NO: 474051 - DNA, 25 bp, Homo sapien
tattttctgctgagatctcacggca

SEQ ID NO: 474052 - DNA, 25 bp, Homo sapien
tcacggcactggacatcatcctgtg

SEQ ID NO: 474053 - DNA, 25 bp, Homo sapien
ctaataacttagcacaaatggcagc

SEQ ID NO: 474054 - DNA, 25 bp, Homo sapien
catgctgctgagagttatgagtcct

SEQ ID NO: 474055 - DNA, 25 bp, Homo sapien
tgctgctgagagttatgagtcctga

SEQ ID NO: 474056 - DNA, 25 bp, Homo sapien
ctgctgagagttatgagtcctgact

SEQ ID NO: 474057 - DNA, 25 bp, Homo sapien
gctgagagttatgagtcctgacttc

SEQ ID NO: 474058 - DNA, 25 bp, Homo sapien
ggtgtcacttgactggcataggcca

SEQ ID NO: 474059 - DNA, 25 bp, Homo sapien
cagataagttcccaaattcttctcc

SEQ ID NO: 474060 - DNA, 25 bp, Homo sapien
tggcataggccagataagttcccaa

SEQ ID NO: 474061 - DNA, 25 bp, Homo sapien
cattttggtgtcacttgactggcat

SEQ ID NO: 474062 - DNA, 25 bp, Homo sapien
gacacttagagtgggggaatgggta

SEQ ID NO: 474063 - DNA, 25 bp, Homo sapien
cacttagagtgggggaatgggtaag

SEQ ID NO: 474064 - DNA, 25 bp, Homo sapien
aggggacacttagagtgggggaatg

SEQ ID NO: 474065 - DNA, 25 bp, Homo sapien
ctcagaggggacacttagagtgggg

SEQ ID NO: 474066 - DNA, 25 bp, Homo sapien
caacagcgtggagatggttcctctc

SEQ ID NO: 474067 - DNA, 25 bp, Homo sapien
caatactacaggcacaacagcgtgg

SEQ ID NO: 474068 - DNA, 25 bp, Homo sapien
ggaggacctggtgccccaatactac

SEQ ID NO: 474069 - DNA, 25 bp, Homo sapien
catgcctaggacagtggaaagtgca

SEQ ID NO: 474070 - DNA, 25 bp, Homo sapien
ggagataaagttctcacactcaatt

SEQ ID NO: 474071 - DNA, 25 bp, Homo sapien
ccaaagtgttgaacttctgcctggg

SEQ ID NO: 474072 - DNA, 25 bp, Homo sapien
ggcacgaagtaccaaagtgttgaac

SEQ ID NO: 474073 - DNA, 25 bp, Homo sapien
ttcttagtgaaaggcctgaggcacg

SEQ ID NO: 474074 - DNA, 25 bp, Homo sapien
gaaacagtgaacgtaggccatggtg

SEQ ID NO: 474075 - DNA, 25 bp, Homo sapien
gagaagttgtagtgagacagcagac

SEQ ID NO: 474076 - DNA, 25 bp, Homo sapien
gcagacgtgttattccgctgaattc

SEQ ID NO: 474077 - DNA, 25 bp, Homo sapien
tgtagggctgctccatatcccagaa

SEQ ID NO: 474078 - DNA, 25 bp, Homo sapien
gcttgtgtgactttacagacataaa

SEQ ID NO: 474079 - DNA, 25 bp, Homo sapien
ctttatgccatatgacagagtagaa

SEQ ID NO: 474080 - DNA, 25 bp, Homo sapien
gactttacagacataaatgatttta

SEQ ID NO: 474081 - DNA, 25 bp, Homo sapien
tccactttatgccatatgacagagt

SEQ ID NO: 474082 - DNA, 25 bp, Homo sapien
ttaggctccaggacactacctcaaa

SEQ ID NO: 474083 - DNA, 25 bp, Homo sapien
taccaccttgaaagtgcaagcagct

SEQ ID NO: 474084 - DNA, 25 bp, Homo sapien
gaaagtgcaagcagcttaggctcca

SEQ ID NO: 474085 - DNA, 25 bp, Homo sapien
ccataaataccaccttgaaagtgca

SEQ ID NO: 474086 - DNA, 25 bp, Homo sapien
tgtttgcctagaaagttgccccgcc

SEQ ID NO: 474087 - DNA, 25 bp, Homo sapien
aatgtagtgctcctgctgtgtttgc

SEQ ID NO: 474088 - DNA, 25 bp, Homo sapien
tttgctttgctacactgtacagcca

SEQ ID NO: 474089 - DNA, 25 bp, Homo sapien
caatgtgagtagaaatgctgatttg

SEQ ID NO: 474090 - DNA, 25 bp, Homo sapien
cctccttttgtgatccagcttgctg

SEQ ID NO: 474091 - DNA, 25 bp, Homo sapien
tatctttgtaggaattattagagcc

SEQ ID NO: 474092 - DNA, 25 bp, Homo sapien
tagggctttgggtcttttgctatct

SEQ ID NO: 474093 - DNA, 25 bp, Homo sapien
gagcaaagtcttgagatgctagggc

SEQ ID NO: 474094 - DNA, 25 bp, Homo sapien
ctttgtaggaattattagagccaga

SEQ ID NO: 474095 - DNA, 25 bp, Homo sapien
ctccttgtgcctttggagcttcccc

SEQ ID NO: 474096 - DNA, 25 bp, Homo sapien
agaggagggcgaggatcatggggca

SEQ ID NO: 474097 - DNA, 25 bp, Homo sapien
caggtcctggtcagatccacagctc

SEQ ID NO: 474098 - DNA, 25 bp, Homo sapien
ccttgtgcctttggagcttcccctc

SEQ ID NO: 474099 - DNA, 25 bp, Homo sapien
catgctgtgtctacaacttaaggcc

SEQ ID NO: 474100 - DNA, 25 bp, Homo sapien
acttaaggccatttcttccaggtag

SEQ ID NO: 474101 - DNA, 25 bp, Homo sapien
gataatatcctcagtttggttcttt

SEQ ID NO: 474102 - DNA, 25 bp, Homo sapien
tagtagatgcaatatgtacagccac

SEQ ID NO: 474103 - DNA, 25 bp, Homo sapien
gcctttcctcacacatagacacatt

SEQ ID NO: 474104 - DNA, 25 bp, Homo sapien
aacaccccagttttgatgtattatt

SEQ ID NO: 474105 - DNA, 25 bp, Homo sapien
tcctcacacatagacacattctgta

SEQ ID NO: 474106 - DNA, 25 bp, Homo sapien
catagacacattctgtacaacaccc

SEQ ID NO: 474107 - DNA, 25 bp, Homo sapien
agaactgtgctgaccaaaactggat

SEQ ID NO: 474108 - DNA, 25 bp, Homo sapien
gagtgacttcccagaagaggaccta

SEQ ID NO: 474109 - DNA, 25 bp, Homo sapien
ctgctcctcagaaaattcgtgtgag

SEQ ID NO: 474110 - DNA, 25 bp, Homo sapien
ggatgataaccttgggaacagcttg

SEQ ID NO: 474111 - DNA, 25 bp, Homo sapien
atgatgtgggcctggaaatgagatt

SEQ ID NO: 474112 - DNA, 25 bp, Homo sapien
gggcctggaaatgagatttgactgc

SEQ ID NO: 474113 - DNA, 25 bp, Homo sapien
tcagatgatgtgggcctggaaatga

SEQ ID NO: 474114 - DNA, 25 bp, Homo sapien
tgtgggcctggaaatgagatttgac

SEQ ID NO: 474115 - DNA, 25 bp, Homo sapien
tcataaaacttcaccatgaatttgt

SEQ ID NO: 474116 - DNA, 25 bp, Homo sapien
ataaaacttcaccatgaatttgttt

SEQ ID NO: 474117 - DNA, 25 bp, Homo sapien
cataaaacttcaccatgaatttgtt

SEQ ID NO: 474118 - DNA, 25 bp, Homo sapien
accgtgcccatgggccaatgcgcat

SEQ ID NO: 474119 - DNA, 25 bp, Homo sapien
gcccaccgtgcccatgggccaatgc

SEQ ID NO: 474120 - DNA, 25 bp, Homo sapien
tagcacagcccaccgtgcccatggg

SEQ ID NO: 474121 - DNA, 25 bp, Homo sapien
ctgagtagcacagcccaccgtgccc

SEQ ID NO: 474122 - DNA, 25 bp, Homo sapien
acttctgtcccacgtgtgttcacac

SEQ ID NO: 474123 - DNA, 25 bp, Homo sapien
tgcagttcagctgatctaccctagg

SEQ ID NO: 474124 - DNA, 25 bp, Homo sapien
ctaccctagggtcaactgagaagat

SEQ ID NO: 474125 - DNA, 25 bp, Homo sapien
ttctgtcccacgtgtgttcacactg

SEQ ID NO: 474126 - DNA, 25 bp, Homo sapien
tccctgctctttgagtggagcgaaa

SEQ ID NO: 474127 - DNA, 25 bp, Homo sapien
tcattctcagaaggctaaacctgtt

SEQ ID NO: 474128 - DNA, 25 bp, Homo sapien
cgaaagcaattggttaagctgtagc

SEQ ID NO: 474129 - DNA, 25 bp, Homo sapien
taaactcaatttcggtggactgttg

SEQ ID NO: 474130 - DNA, 25 bp, Homo sapien
gaatatgatgcagaatgcccttaca

SEQ ID NO: 474131 - DNA, 25 bp, Homo sapien
tataaaagtggtctgtgctgagtca

SEQ ID NO: 474132 - DNA, 25 bp, Homo sapien
ctcaagtgtcttaggaaaaagtcat

SEQ ID NO: 474133 - DNA, 25 bp, Homo sapien
aaggcagttaatttggctagaatcc

SEQ ID NO: 474134 - DNA, 25 bp, Homo sapien
cattccagatggtgatctacccttc

SEQ ID NO: 474135 - DNA, 25 bp, Homo sapien
tgcatatgctagaactctacctgtg

SEQ ID NO: 474136 - DNA, 25 bp, Homo sapien
gaggacaatgaatctcgttcttgga

SEQ ID NO: 474137 - DNA, 25 bp, Homo sapien
gtggatgactcattacttcaagatg

SEQ ID NO: 474138 - DNA, 25 bp, Homo sapien
aacagtgtataatccagctgctttg

SEQ ID NO: 474139 - DNA, 25 bp, Homo sapien
catctactggcctaacaaaaacagt

SEQ ID NO: 474140 - DNA, 25 bp, Homo sapien
ggctgcacagaaaaccttacttgtt

SEQ ID NO: 474141 - DNA, 25 bp, Homo sapien
aacagtagtgctttaaagttgagtc

SEQ ID NO: 474142 - DNA, 25 bp, Homo sapien
tattgtcaggcctgcttttactctg

SEQ ID NO: 474143 - DNA, 25 bp, Homo sapien
aataattaggttgacaattggtctg

SEQ ID NO: 474144 - DNA, 25 bp, Homo sapien
acaatatcttacagacatagagtct

SEQ ID NO: 474145 - DNA, 25 bp, Homo sapien
gagtcttaatatctgttctatgaaa

SEQ ID NO: 474146 - DNA, 25 bp, Homo sapien
tctttgtgttggagtcctcaggacc

SEQ ID NO: 474147 - DNA, 25 bp, Homo sapien
tgcttaattcccctagcagtgaact

SEQ ID NO: 474148 - DNA, 25 bp, Homo sapien
aacacatgggaattaggcaagctcc

SEQ ID NO: 474149 - DNA, 25 bp, Homo sapien
gaaaaggtgtatgaggccaagtcca

SEQ ID NO: 474150 - DNA, 25 bp, Homo sapien
tctgtgacccgggtgctttttacat

SEQ ID NO: 474151 - DNA, 25 bp, Homo sapien
tgtgcctggcctcaatactgtttat

SEQ ID NO: 474152 - DNA, 25 bp, Homo sapien
gatccatccgccctagcaaaatatg

SEQ ID NO: 474153 - DNA, 25 bp, Homo sapien
tcttcttagttggtttggatgccac

SEQ ID NO: 474154 - DNA, 25 bp, Homo sapien
catacagaggaccaagggtaagctg

SEQ ID NO: 474155 - DNA, 25 bp, Homo sapien
cattgtaattaccaaacgacctctg

SEQ ID NO: 474156 - DNA, 25 bp, Homo sapien
cagtgtgcaagatatagtaggtaac

SEQ ID NO: 474157 - DNA, 25 bp, Homo sapien
tacttcatggttttggacttactcc

SEQ ID NO: 474158 - DNA, 25 bp, Homo sapien
cacatcatgtatgggaagacgtgag

SEQ ID NO: 474159 - DNA, 25 bp, Homo sapien
caacaagttggacaagtaggtaggg

SEQ ID NO: 474160 - DNA, 25 bp, Homo sapien
taacatctaaagagaagggaccatg

SEQ ID NO: 474161 - DNA, 25 bp, Homo sapien
gggctatttcacattggtcaaggaa

SEQ ID NO: 474162 - DNA, 25 bp, Homo sapien
agattcaggatacccccgagagcct

SEQ ID NO: 474163 - DNA, 25 bp, Homo sapien
gagcctgagtcgagctttattttat

SEQ ID NO: 474164 - DNA, 25 bp, Homo sapien
tttcccgttatatatagaccgtctc

SEQ ID NO: 474165 - DNA, 25 bp, Homo sapien
gtccacctcgcttccagattcagga

SEQ ID NO: 474166 - DNA, 25 bp, Homo sapien
tggcagtgggagataggcggaccca

SEQ ID NO: 474167 - DNA, 25 bp, Homo sapien
tatccgggggatatctctttgcagg

SEQ ID NO: 474168 - DNA, 25 bp, Homo sapien
gagtatccgggggatatctctttgc

SEQ ID NO: 474169 - DNA, 25 bp, Homo sapien
ggagataggcggacccagagatctg

SEQ ID NO: 474170 - DNA, 25 bp, Homo sapien
tcgaggcactcaagtcctggctcag

SEQ ID NO: 474171 - DNA, 25 bp, Homo sapien
cgggcggaggagtgtgacgggcctt

SEQ ID NO: 474172 - DNA, 25 bp, Homo sapien
atgatcattgaaaacttcgaggcac

SEQ ID NO: 474173 - DNA, 25 bp, Homo sapien
ccttagggccgctgtggatggtttc

SEQ ID NO: 474174 - DNA, 25 bp, Homo sapien
cgcgcttccggtctgggtagatttg

SEQ ID NO: 474175 - DNA, 25 bp, Homo sapien
ttgagctgcccttcgccttcgcttt

SEQ ID NO: 474176 - DNA, 25 bp, Homo sapien
tgaatcgttcccattgagctgccct

SEQ ID NO: 474177 - DNA, 25 bp, Homo sapien
ttcgacgtagccaacaagcacctgg

SEQ ID NO: 474178 - DNA, 25 bp, Homo sapien
aaatcgaactacagcactcgacccg

SEQ ID NO: 474179 - DNA, 25 bp, Homo sapien
ggtctttatatcataaaggtaagca

SEQ ID NO: 474180 - DNA, 25 bp, Homo sapien
tctgaagtcagcggtcttttcctcc

SEQ ID NO: 474181 - DNA, 25 bp, Homo sapien
gcaagcaacgcacacacgcaaaaat

SEQ ID NO: 474182 - DNA, 25 bp, Homo sapien
cagttcatggaacgtagaccctttg

SEQ ID NO: 474183 - DNA, 25 bp, Homo sapien
gctggaaactacctgagagacgtga

SEQ ID NO: 474184 - DNA, 25 bp, Homo sapien
tgttggacaagacactaatcctctg

SEQ ID NO: 474185 - DNA, 25 bp, Homo sapien
gcacgcgggagtgtacgctctcaaa

SEQ ID NO: 474186 - DNA, 25 bp, Homo sapien
tgatcccagtttacaacatcagtaa

SEQ ID NO: 474187 - DNA, 25 bp, Homo sapien
gtaattgctcaagcgtttcctcttg

SEQ ID NO: 474188 - DNA, 25 bp, Homo sapien
gatacgataccatgtatgtcttctg

SEQ ID NO: 474189 - DNA, 25 bp, Homo sapien
tgccttgcctgggatacgataccat

SEQ ID NO: 474190 - DNA, 25 bp, Homo sapien
tggagatggagtcataattaatcat

SEQ ID NO: 474191 - DNA, 25 bp, Homo sapien
cacatccataaacagttccacagca

SEQ ID NO: 474192 - DNA, 25 bp, Homo sapien
ataaccacatccataaacagttcca

SEQ ID NO: 474193 - DNA, 25 bp, Homo sapien
tgtcctcatttgacagtttgtatgg

SEQ ID NO: 474194 - DNA, 25 bp, Homo sapien
tcatttgacagtttgtatgggagac

SEQ ID NO: 474195 - DNA, 25 bp, Homo sapien
gacagactgtcacctaggttacggg

SEQ ID NO: 474196 - DNA, 25 bp, Homo sapien
acaagagaacctgccatgtgctatc

SEQ ID NO: 474197 - DNA, 25 bp, Homo sapien
ccaaggattcttgactctgagctga

SEQ ID NO: 474198 - DNA, 25 bp, Homo sapien
gacaggtgagtgaacccaaggattc

SEQ ID NO: 474199 - DNA, 25 bp, Homo sapien
aacacacagaggctactccatcagc

SEQ ID NO: 474200 - DNA, 25 bp, Homo sapien
ttttgtgtccaccattatgactgac

SEQ ID NO: 474201 - DNA, 25 bp, Homo sapien
ttgctccagcctattttgaatcagg

SEQ ID NO: 474202 - DNA, 25 bp, Homo sapien
gaaattgtaggagacaatacacggt

SEQ ID NO: 474203 - DNA, 25 bp, Homo sapien
aacaaacgccaatgatgttttcagc

SEQ ID NO: 474204 - DNA, 25 bp, Homo sapien
ctgaacaaacgccaatgatgttttc

SEQ ID NO: 474205 - DNA, 25 bp, Homo sapien
ttcagcagtagtttcatagaagcat

SEQ ID NO: 474206 - DNA, 25 bp, Homo sapien
ccaaactgaacaaacgccaatgatg

SEQ ID NO: 474207 - DNA, 25 bp, Homo sapien
tcattctataaacttgggcaacttg

SEQ ID NO: 474208 - DNA, 25 bp, Homo sapien
gggcaacttgaagcttaatttcctc

SEQ ID NO: 474209 - DNA, 25 bp, Homo sapien
caacctctgccattgactcattcta

SEQ ID NO: 474210 - DNA, 25 bp, Homo sapien
tctgccattgactcattctataaac

SEQ ID NO: 474211 - DNA, 25 bp, Homo sapien
ttggaaaagtccttgcacacgtcca

SEQ ID NO: 474212 - DNA, 25 bp, Homo sapien
ttgcacacgtccagaccccaatttt

SEQ ID NO: 474213 - DNA, 25 bp, Homo sapien
gaaaagtccttgcacacgtccagac

SEQ ID NO: 474214 - DNA, 25 bp, Homo sapien
gcacacgtccagaccccaattttgt

SEQ ID NO: 474215 - DNA, 25 bp, Homo sapien
caaggatttggctcaagggaggcaa

SEQ ID NO: 474216 - DNA, 25 bp, Homo sapien
gggagcaagtcgtgaacctacttcc

SEQ ID NO: 474217 - DNA, 25 bp, Homo sapien
cttcctataggccttggcaaggatt

SEQ ID NO: 474218 - DNA, 25 bp, Homo sapien
agagtccccaacacaggtcaaggtc

SEQ ID NO: 474219 - DNA, 25 bp, Homo sapien
catggtgtggataaggactcctgca

SEQ ID NO: 474220 - DNA, 25 bp, Homo sapien
ctatgaagaggtcccacatggtgtg

SEQ ID NO: 474221 - DNA, 25 bp, Homo sapien
gaggacactcgaacatctatgaaga

SEQ ID NO: 474222 - DNA, 25 bp, Homo sapien
gggaaagccagtggccatgccatga

SEQ ID NO: 474223 - DNA, 25 bp, Homo sapien
tgaatgtgagctgtacctaacgact

SEQ ID NO: 474224 - DNA, 25 bp, Homo sapien
tactggagtctctacccacaaaggt

SEQ ID NO: 474225 - DNA, 25 bp, Homo sapien
taggtgggcaaggagtcaattctct

SEQ ID NO: 474226 - DNA, 25 bp, Homo sapien
tacatctcctatctaaagacaggcc

SEQ ID NO: 474227 - DNA, 25 bp, Homo sapien
tattattatttatgctcctcaggta

SEQ ID NO: 474228 - DNA, 25 bp, Homo sapien
tctgtgatatcatagtggtaacctg

SEQ ID NO: 474229 - DNA, 25 bp, Homo sapien
ggtaatttacatcgactgcatctgt

SEQ ID NO: 474230 - DNA, 25 bp, Homo sapien
gggacatttacacaataactggcaa

SEQ ID NO: 474231 - DNA, 25 bp, Homo sapien
gcaccacaacaggtacaggaggatt

SEQ ID NO: 474232 - DNA, 25 bp, Homo sapien
caagtagagtgcagaatcacctggg

SEQ ID NO: 474233 - DNA, 25 bp, Homo sapien
cgcctggcccatatgcatagtttga

SEQ ID NO: 474234 - DNA, 25 bp, Homo sapien
aaagcaaaggtgtttctagtcaggg

SEQ ID NO: 474235 - DNA, 25 bp, Homo sapien
aaattgaatagctgagtgcagatga

SEQ ID NO: 474236 - DNA, 25 bp, Homo sapien
taaattgaatagctgagtgcagatg

SEQ ID NO: 474237 - DNA, 25 bp, Homo sapien
ctcctgagggagtataagtagctat

SEQ ID NO: 474238 - DNA, 25 bp, Homo sapien
aaagttagataagactcagttggca

SEQ ID NO: 474239 - DNA, 25 bp, Homo sapien
gaaatagacatattgctcctgaggg

SEQ ID NO: 474240 - DNA, 25 bp, Homo sapien
cagttggcaatatcgtgaggaaata

SEQ ID NO: 474241 - DNA, 25 bp, Homo sapien
cctgaccaaaagttagcatcataat

SEQ ID NO: 474242 - DNA, 25 bp, Homo sapien
aagtctgccaactctcatcgctata

SEQ ID NO: 474243 - DNA, 25 bp, Homo sapien
gaaaattatacttatccctgaccaa

SEQ ID NO: 474244 - DNA, 25 bp, Homo sapien
attattgtactctagctactgaaaa

SEQ ID NO: 474245 - DNA, 25 bp, Homo sapien
tttccgccctcaggataaaggtcac

SEQ ID NO: 474246 - DNA, 25 bp, Homo sapien
ctgatacaacaataaggtcactata

SEQ ID NO: 474247 - DNA, 25 bp, Homo sapien
gcttcaccattagcaacatattctg

SEQ ID NO: 474248 - DNA, 25 bp, Homo sapien
taagaaagttgcctgatttccgccc

SEQ ID NO: 474249 - DNA, 25 bp, Homo sapien
taggttgtcaacctgtcgagtgggc

SEQ ID NO: 474250 - DNA, 25 bp, Homo sapien
tagaacacctgaggacaggtcgccc

SEQ ID NO: 474251 - DNA, 25 bp, Homo sapien
agtgcgccttctcaccacacagaga

SEQ ID NO: 474252 - DNA, 25 bp, Homo sapien
tatacacttggctcctacgcatgta

SEQ ID NO: 474253 - DNA, 25 bp, Homo sapien
ccgcgccgccagtgggagggtatag

SEQ ID NO: 474254 - DNA, 25 bp, Homo sapien
cgagacctccgcgttggtcgcggtt

SEQ ID NO: 474255 - DNA, 25 bp, Homo sapien
tattgagcatgctcggaccgctcgc

SEQ ID NO: 474256 - DNA, 25 bp, Homo sapien
ccggctcgggatccggcttccgaga

SEQ ID NO: 474257 - DNA, 25 bp, Homo sapien
gagggagtcttctccgtgctcagct

SEQ ID NO: 474258 - DNA, 25 bp, Homo sapien
gcccagtccccggctggtggtgatc

SEQ ID NO: 474259 - DNA, 25 bp, Homo sapien
tggtagcgcccagtccccggctggt

SEQ ID NO: 474260 - DNA, 25 bp, Homo sapien
cagtccccggctggtggtgatccat

SEQ ID NO: 474261 - DNA, 25 bp, Homo sapien
ctggtagcgcccagtccccggctgg

SEQ ID NO: 474262 - DNA, 25 bp, Homo sapien
actctcgggacgccgcggcgggagg

SEQ ID NO: 474263 - DNA, 25 bp, Homo sapien
aagggactctcgggacgccgcggcg

SEQ ID NO: 474264 - DNA, 25 bp, Homo sapien
ggactctcgggacgccgcggcggga

SEQ ID NO: 474265 - DNA, 25 bp, Homo sapien
gaggcacaggaggccgggaactcac

SEQ ID NO: 474266 - DNA, 25 bp, Homo sapien
agggtttcgaaggagtcctaggcag

SEQ ID NO: 474267 - DNA, 25 bp, Homo sapien
tgcgggtgaggagctaagcagactt

SEQ ID NO: 474268 - DNA, 25 bp, Homo sapien
gagggcgtctcacagcggggctaag

SEQ ID NO: 474269 - DNA, 25 bp, Homo sapien
agtgagaaattaaaacggatacaag

SEQ ID NO: 474270 - DNA, 25 bp, Homo sapien
caggtatgtgaagtcagccccattt

SEQ ID NO: 474271 - DNA, 25 bp, Homo sapien
tcaccttccgggcaggtatgtgaag

SEQ ID NO: 474272 - DNA, 25 bp, Homo sapien
gacaatcgactagaatgtctcagga

SEQ ID NO: 474273 - DNA, 25 bp, Homo sapien
tttccagtagacaatcgactagaat

SEQ ID NO: 474274 - DNA, 25 bp, Homo sapien
tagaatgacatgctacctagctgca

SEQ ID NO: 474275 - DNA, 25 bp, Homo sapien
cagagagacaagatcagcattatgg

SEQ ID NO: 474276 - DNA, 25 bp, Homo sapien
tgacaaggttaacgagcagagagac

SEQ ID NO: 474277 - DNA, 25 bp, Homo sapien
cacagttaagctggaaaaccttgta

SEQ ID NO: 474278 - DNA, 25 bp, Homo sapien
catcaaaagggtgtacactgacaac

SEQ ID NO: 474279 - DNA, 25 bp, Homo sapien
tcccaagttgttgagaaaagctgat

SEQ ID NO: 474280 - DNA, 25 bp, Homo sapien
ttgaaaaacgctttccatactggga

SEQ ID NO: 474281 - DNA, 25 bp, Homo sapien
caaaccaattgaaaatggaagcctc

SEQ ID NO: 474282 - DNA, 25 bp, Homo sapien
cagctgcaagccaagtcaacttcgt

SEQ ID NO: 474283 - DNA, 25 bp, Homo sapien
tgatgaccctgagcatcactgctag

SEQ ID NO: 474284 - DNA, 25 bp, Homo sapien
tagaatgtggtctagcagctgcaag

SEQ ID NO: 474285 - DNA, 25 bp, Homo sapien
caactcaagtggtttattgctccag

SEQ ID NO: 474286 - DNA, 25 bp, Homo sapien
caaaaggctatatgtcctaagaccc

SEQ ID NO: 474287 - DNA, 25 bp, Homo sapien
tgactaaacgtcagtagaagattcc

SEQ ID NO: 474288 - DNA, 25 bp, Homo sapien
gatatagatgaaagctctcccgagg

SEQ ID NO: 474289 - DNA, 25 bp, Homo sapien
tggcccgaaaacagagacatacgat

SEQ ID NO: 474290 - DNA, 25 bp, Homo sapien
gtcttgattaccatatatctatagt

SEQ ID NO: 474291 - DNA, 25 bp, Homo sapien
tattgagttggctacactgaatctg

SEQ ID NO: 474292 - DNA, 25 bp, Homo sapien
gggatctagctgttccagcaccatt

SEQ ID NO: 474293 - DNA, 25 bp, Homo sapien
tgctttactgtgttgcctttactcc

SEQ ID NO: 474294 - DNA, 25 bp, Homo sapien
tgaatggcactacatccctcaaagc

SEQ ID NO: 474295 - DNA, 25 bp, Homo sapien
gatatctacagttgagtggtccagt

SEQ ID NO: 474296 - DNA, 25 bp, Homo sapien
tcccagtgagtaagatttataagcc

SEQ ID NO: 474297 - DNA, 25 bp, Homo sapien
taagggtgctaatcctcacatctct

SEQ ID NO: 474298 - DNA, 25 bp, Homo sapien
gtagagctgaagtcttgctatgtta

SEQ ID NO: 474299 - DNA, 25 bp, Homo sapien
gctcaagcaatacccctgtgttggc

SEQ ID NO: 474300 - DNA, 25 bp, Homo sapien
tgggctcaagcaatacccctgtgtt

SEQ ID NO: 474301 - DNA, 25 bp, Homo sapien
acccaggctggccttgaactcctgg

SEQ ID NO: 474302 - DNA, 25 bp, Homo sapien
ccagcatgtatccactttaaggtga

SEQ ID NO: 474303 - DNA, 25 bp, Homo sapien
aacacagatatgatgttggttgcca

SEQ ID NO: 474304 - DNA, 25 bp, Homo sapien
agaggttacaatgattcataagggc

SEQ ID NO: 474305 - DNA, 25 bp, Homo sapien
gaaagtcaagtacataaacacagat

SEQ ID NO: 474306 - DNA, 25 bp, Homo sapien
cactcttctgtattttttccaagtt

SEQ ID NO: 474307 - DNA, 25 bp, Homo sapien
tcactcttctgtattttttccaagt

SEQ ID NO: 474308 - DNA, 25 bp, Homo sapien
ttttcactcttctgtattttttcca

SEQ ID NO: 474309 - DNA, 25 bp, Homo sapien
ttcactcttctgtattttttccaag

SEQ ID NO: 474310 - DNA, 25 bp, Homo sapien
gttctccaatggttctatttgacat

SEQ ID NO: 474311 - DNA, 25 bp, Homo sapien
taatcatgttctccaatggttctat

SEQ ID NO: 474312 - DNA, 25 bp, Homo sapien
catgttctccaatggttctatttga

SEQ ID NO: 474313 - DNA, 25 bp, Homo sapien
ttcttaatcatgttctccaatggtt

SEQ ID NO: 474314 - DNA, 25 bp, Homo sapien
ggtactctctaacaatccaatcagt

SEQ ID NO: 474315 - DNA, 25 bp, Homo sapien
gccaaaatcctcataggcttgtaaa

SEQ ID NO: 474316 - DNA, 25 bp, Homo sapien
tataacaaccaacacactgaaggat

SEQ ID NO: 474317 - DNA, 25 bp, Homo sapien
aatggtcaagtctggcatgtgactg

SEQ ID NO: 474318 - DNA, 25 bp, Homo sapien
gagggaagcggactgctcgagctca

SEQ ID NO: 474319 - DNA, 25 bp, Homo sapien
ttgaatgtgatgtagcaaaatgaac

SEQ ID NO: 474320 - DNA, 25 bp, Homo sapien
aggctgagggaagcggactgctcga

SEQ ID NO: 474321 - DNA, 25 bp, Homo sapien
caatttgaatgtgatgtagcaaaat

SEQ ID NO: 474322 - DNA, 25 bp, Homo sapien
ttttgtcacaaagctagtatacata

SEQ ID NO: 474323 - DNA, 25 bp, Homo sapien
tttgtcacaaagctagtatacatac

SEQ ID NO: 474324 - DNA, 25 bp, Homo sapien
attttgtcacaaagctagtatacat

SEQ ID NO: 474325 - DNA, 25 bp, Homo sapien
tatagccgatgattctgagttatcc

SEQ ID NO: 474326 - DNA, 25 bp, Homo sapien
cacaatctgcggtgctgggtttgaa

SEQ ID NO: 474327 - DNA, 25 bp, Homo sapien
aagtaggtggctgctctatagccga

SEQ ID NO: 474328 - DNA, 25 bp, Homo sapien
tgaagacgcagcctgcacaatctgc

SEQ ID NO: 474329 - DNA, 25 bp, Homo sapien
cttcatcgtatgtaggaagagaggt

SEQ ID NO: 474330 - DNA, 25 bp, Homo sapien
aagagaggtagcaacgctataggga

SEQ ID NO: 474331 - DNA, 25 bp, Homo sapien
ggaggtggcacgggataaaactcac

SEQ ID NO: 474332 - DNA, 25 bp, Homo sapien
cttctcagcttcatcgtatgtagga

SEQ ID NO: 474333 - DNA, 25 bp, Homo sapien
tcatctcttggtggacactcttcct

SEQ ID NO: 474334 - DNA, 25 bp, Homo sapien
gaagtcatctcttggtggacactct

SEQ ID NO: 474335 - DNA, 25 bp, Homo sapien
tgaagtcatctcttggtggacactc

SEQ ID NO: 474336 - DNA, 25 bp, Homo sapien
agtcatctcttggtggacactcttc

SEQ ID NO: 474337 - DNA, 25 bp, Homo sapien
aaatgccatcattccccactctgag

SEQ ID NO: 474338 - DNA, 25 bp, Homo sapien
atgaaaatgccatcattccccactc

SEQ ID NO: 474339 - DNA, 25 bp, Homo sapien
tgccagcatgaaaatgccatcattc

SEQ ID NO: 474340 - DNA, 25 bp, Homo sapien
agcatgaaaatgccatcattcccca

SEQ ID NO: 474341 - DNA, 25 bp, Homo sapien
tattggtgatacagaaggataaaca

SEQ ID NO: 474342 - DNA, 25 bp, Homo sapien
taccttccagctatggtattggtga

SEQ ID NO: 474343 - DNA, 25 bp, Homo sapien
caataaggatccatttgatcaagga

SEQ ID NO: 474344 - DNA, 25 bp, Homo sapien
ggccaaatccgcagatagcaccata

SEQ ID NO: 474345 - DNA, 25 bp, Homo sapien
caagaaatatccaccaaagccaata

SEQ ID NO: 474346 - DNA, 25 bp, Homo sapien
gaaatatccaccaaagccaatactg

SEQ ID NO: 474347 - DNA, 25 bp, Homo sapien
aagaaatatccaccaaagccaatac

SEQ ID NO: 474348 - DNA, 25 bp, Homo sapien
agaaatatccaccaaagccaatact

SEQ ID NO: 474349 - DNA, 25 bp, Homo sapien
caatagtaaagttacctgacgcact

SEQ ID NO: 474350 - DNA, 25 bp, Homo sapien
ctgagaaggttgaaataatatggat

SEQ ID NO: 474351 - DNA, 25 bp, Homo sapien
tcaatttgttaagcctagatgtacc

SEQ ID NO: 474352 - DNA, 25 bp, Homo sapien
acaagatcctcttggcttaaggaat

SEQ ID NO: 474353 - DNA, 25 bp, Homo sapien
tgacttttagataattaacaaatcc

SEQ ID NO: 474354 - DNA, 25 bp, Homo sapien
ctgacttttagataattaacaaatc

SEQ ID NO: 474355 - DNA, 25 bp, Homo sapien
ttctgacttttagataattaacaaa

SEQ ID NO: 474356 - DNA, 25 bp, Homo sapien
tgccatactttcagacatgtttctg

SEQ ID NO: 474357 - DNA, 25 bp, Homo sapien
tgaatacataaagggaataggcaga

SEQ ID NO: 474358 - DNA, 25 bp, Homo sapien
ttcaataagctgactgttagcagta

SEQ ID NO: 474359 - DNA, 25 bp, Homo sapien
taaaaatcatgaatacacattaggc

SEQ ID NO: 474360 - DNA, 25 bp, Homo sapien
taggcatttaatatgtatctggcaa

SEQ ID NO: 474361 - DNA, 25 bp, Homo sapien
caatggcatttacaagctggaagac

SEQ ID NO: 474362 - DNA, 25 bp, Homo sapien
tgactggacttaactgctacaactt

SEQ ID NO: 474363 - DNA, 25 bp, Homo sapien
taagaaaggaatgtcgggttgatgc

SEQ ID NO: 474364 - DNA, 25 bp, Homo sapien
tgtcaggtcagaagtcaatggcatt

SEQ ID NO: 474365 - DNA, 25 bp, Homo sapien
tcctttctaataatcagcactgcag

SEQ ID NO: 474366 - DNA, 25 bp, Homo sapien
taaaggacatttggtattcccacat

SEQ ID NO: 474367 - DNA, 25 bp, Homo sapien
gaactgccagatgagtctaagagcc

SEQ ID NO: 474368 - DNA, 25 bp, Homo sapien
gatgggcaatcctaaaaatgcagct

SEQ ID NO: 474369 - DNA, 25 bp, Homo sapien
aaattccagttataatagtggctac

SEQ ID NO: 474370 - DNA, 25 bp, Homo sapien
caagttaatcctaaagtcataaagc

SEQ ID NO: 474371 - DNA, 25 bp, Homo sapien
gaatagttagatgtaccttttagta

SEQ ID NO: 474372 - DNA, 25 bp, Homo sapien
caattttataaggtccatatagctg

SEQ ID NO: 474373 - DNA, 25 bp, Homo sapien
aactgttttatttatcaaagacaat

SEQ ID NO: 474374 - DNA, 25 bp, Homo sapien
ctgttttatttatcaaagacaatga

SEQ ID NO: 474375 - DNA, 25 bp, Homo sapien
gttttatttatcaaagacaatgaaa

SEQ ID NO: 474376 - DNA, 25 bp, Homo sapien
tgttttatttatcaaagacaatgaa

SEQ ID NO: 474377 - DNA, 25 bp, Homo sapien
tgtgaacaacttagaaggcatgtct

SEQ ID NO: 474378 - DNA, 25 bp, Homo sapien
ccatgctactgtcttacttcaaggg

SEQ ID NO: 474379 - DNA, 25 bp, Homo sapien
cactgtggcaataataactggctcc

SEQ ID NO: 474380 - DNA, 25 bp, Homo sapien
gaacacttttgagagtacgatgagg

SEQ ID NO: 474381 - DNA, 25 bp, Homo sapien
aaattaaaccacaatctgtctcctg

SEQ ID NO: 474382 - DNA, 25 bp, Homo sapien
tgcaaccccaacctaatttcacaag

SEQ ID NO: 474383 - DNA, 25 bp, Homo sapien
tcacagtcatgataatatgcgaatc

SEQ ID NO: 474384 - DNA, 25 bp, Homo sapien
cataaacagtttagtgaggtcacag

SEQ ID NO: 474385 - DNA, 25 bp, Homo sapien
tgacatcatagagcacaggctcatc

SEQ ID NO: 474386 - DNA, 25 bp, Homo sapien
ctgacatcatagagcacaggctcat

SEQ ID NO: 474387 - DNA, 25 bp, Homo sapien
tctctagaagcgactgggaagtact

SEQ ID NO: 474388 - DNA, 25 bp, Homo sapien
agttttgttggtggtcaatgtggac

SEQ ID NO: 474389 - DNA, 25 bp, Homo sapien
caatgtggacagctcggaatgacct

SEQ ID NO: 474390 - DNA, 25 bp, Homo sapien
gaatgacctttgagatagttgttga

SEQ ID NO: 474391 - DNA, 25 bp, Homo sapien
tgctagcaaataggtgtaagtagtc

SEQ ID NO: 474392 - DNA, 25 bp, Homo sapien
ataggtgtaagtagtcccagacttt

SEQ ID NO: 474393 - DNA, 25 bp, Homo sapien
tagcaaataggtgtaagtagtccca

SEQ ID NO: 474394 - DNA, 25 bp, Homo sapien
caaataggtgtaagtagtcccagac

SEQ ID NO: 474395 - DNA, 25 bp, Homo sapien
gctctttttatgtgttcagcacagc

SEQ ID NO: 474396 - DNA, 25 bp, Homo sapien
tgtccggacacttttcacctcatca

SEQ ID NO: 474397 - DNA, 25 bp, Homo sapien
tatacaggtctcatcctgtccggac

SEQ ID NO: 474398 - DNA, 25 bp, Homo sapien
ggtcactacttcatggttctctgga

SEQ ID NO: 474399 - DNA, 25 bp, Homo sapien
tgcttacccttaagtaaacacatgt

SEQ ID NO: 474400 - DNA, 25 bp, Homo sapien
tatagagcattctgggtgggcataa

SEQ ID NO: 474401 - DNA, 25 bp, Homo sapien
gccactcagtaagcattcagttagt

SEQ ID NO: 474402 - DNA, 25 bp, Homo sapien
tgggcataagcattgagcagaatcc

SEQ ID NO: 474403 - DNA, 25 bp, Homo sapien
tctggctactgttgaaagcactgac

SEQ ID NO: 474404 - DNA, 25 bp, Homo sapien
ccagtgtcgtacaggccacgattta

SEQ ID NO: 474405 - DNA, 25 bp, Homo sapien
gaaattcagcttgactatcagagcc

SEQ ID NO: 474406 - DNA, 25 bp, Homo sapien
agcactgacatcatattccatccag

SEQ ID NO: 474407 - DNA, 25 bp, Homo sapien
aatctgttaagagacctaacacagg

SEQ ID NO: 474408 - DNA, 25 bp, Homo sapien
ccacaaatggttgggctattcctgg

SEQ ID NO: 474409 - DNA, 25 bp, Homo sapien
gttctataattcaatctgttaagag

SEQ ID NO: 474410 - DNA, 25 bp, Homo sapien
cctgggcctcctctagttctataat

SEQ ID NO: 474411 - DNA, 25 bp, Homo sapien
cactggtctggatgggtcactccag

SEQ ID NO: 474412 - DNA, 25 bp, Homo sapien
aaggcattgaccactggtctggatg

SEQ ID NO: 474413 - DNA, 25 bp, Homo sapien
aagtaataggactgactgggatgag

SEQ ID NO: 474414 - DNA, 25 bp, Homo sapien
tcaaaagtaataggactgactggga

SEQ ID NO: 474415 - DNA, 25 bp, Homo sapien
gcagttaatgcagtattcctcctct

SEQ ID NO: 474416 - DNA, 25 bp, Homo sapien
ggtgaagcagttaatgcagtattcc

SEQ ID NO: 474417 - DNA, 25 bp, Homo sapien
gaagcagttaatgcagtattcctcc

SEQ ID NO: 474418 - DNA, 25 bp, Homo sapien
cctcctcttggctaaaagttttcat

SEQ ID NO: 474419 - DNA, 25 bp, Homo sapien
tggcatggaattgtccctgaggtaa

SEQ ID NO: 474420 - DNA, 25 bp, Homo sapien
tccctgaagatgtcctaaaagctat

SEQ ID NO: 474421 - DNA, 25 bp, Homo sapien
ggtttttgccatagacactgcattt

SEQ ID NO: 474422 - DNA, 25 bp, Homo sapien
ttctatcttccccaaagtcctggca

SEQ ID NO: 474423 - DNA, 25 bp, Homo sapien
aaactcactagaaagggaagacctg

SEQ ID NO: 474424 - DNA, 25 bp, Homo sapien
aactcactagaaagggaagacctgc

SEQ ID NO: 474425 - DNA, 25 bp, Homo sapien
gactaaactcactagaaagggaaga

SEQ ID NO: 474426 - DNA, 25 bp, Homo sapien
agactaaactcactagaaagggaag

SEQ ID NO: 474427 - DNA, 25 bp, Homo sapien
tgctaccacaaaatggtacaggctc

SEQ ID NO: 474428 - DNA, 25 bp, Homo sapien
acttttctgtggtgccattgcccct

SEQ ID NO: 474429 - DNA, 25 bp, Homo sapien
gaatccctagttcctcttactggag

SEQ ID NO: 474430 - DNA, 25 bp, Homo sapien
ctggcccagtcatgcattcaactag

SEQ ID NO: 474431 - DNA, 25 bp, Homo sapien
ttccctgccctggctgcacattgca

SEQ ID NO: 474432 - DNA, 25 bp, Homo sapien
tttccctgccctggctgcacattgc

SEQ ID NO: 474433 - DNA, 25 bp, Homo sapien
tccctgccctggctgcacattgcat

SEQ ID NO: 474434 - DNA, 25 bp, Homo sapien
ccaggtcaacaagggttctgaccat

SEQ ID NO: 474435 - DNA, 25 bp, Homo sapien
cctagcatcggccccatctcttctc

SEQ ID NO: 474436 - DNA, 25 bp, Homo sapien
tcagtcaatgtgaatcagggtcctc

SEQ ID NO: 474437 - DNA, 25 bp, Homo sapien
cagggtcctcttcaggtgacgtgtg

SEQ ID NO: 474438 - DNA, 25 bp, Homo sapien
tgtggactcattgtcaagatattcg

SEQ ID NO: 474439 - DNA, 25 bp, Homo sapien
gtttatcatcactctctacatttgg

SEQ ID NO: 474440 - DNA, 25 bp, Homo sapien
tccgactggaatttagagaatcttt

SEQ ID NO: 474441 - DNA, 25 bp, Homo sapien
gctggaccttccaattccgactgga

SEQ ID NO: 474442 - DNA, 25 bp, Homo sapien
ctggaatttagagaatcttttggcc

SEQ ID NO: 474443 - DNA, 25 bp, Homo sapien
cagtcaaatgaattgctaagatctc

SEQ ID NO: 474444 - DNA, 25 bp, Homo sapien
cccatattcccaagtgaaacaccat

SEQ ID NO: 474445 - DNA, 25 bp, Homo sapien
tggccagagccttgtcccatattcc

SEQ ID NO: 474446 - DNA, 25 bp, Homo sapien
gctttgtgcctttggccagagcctt

SEQ ID NO: 474447 - DNA, 25 bp, Homo sapien
gagccttgtcccatattcccaagtg

SEQ ID NO: 474448 - DNA, 25 bp, Homo sapien
tgtaatgtcccagacagcccatctg

SEQ ID NO: 474449 - DNA, 25 bp, Homo sapien
tccttatagaacttgaccttgaccc

SEQ ID NO: 474450 - DNA, 25 bp, Homo sapien
tctgaagaatttgagacctgagctc

SEQ ID NO: 474451 - DNA, 25 bp, Homo sapien
tgtctgacatccaattatcgaagga

SEQ ID NO: 474452 - DNA, 25 bp, Homo sapien
taagatcggcggatatgtcgagtgt

SEQ ID NO: 474453 - DNA, 25 bp, Homo sapien
tatgtcgagtgtaaggtcattgtgg

SEQ ID NO: 474454 - DNA, 25 bp, Homo sapien
tcattgtggagcgtgtccagtggaa

SEQ ID NO: 474455 - DNA, 25 bp, Homo sapien
caaaggaaaggtagacgacgataag

SEQ ID NO: 474456 - DNA, 25 bp, Homo sapien
ggataaaggttccaaatctgtcata

SEQ ID NO: 474457 - DNA, 25 bp, Homo sapien
tctgtcataaatgatacttgcccaa

SEQ ID NO: 474458 - DNA, 25 bp, Homo sapien
ttggcttggtttagtccgacttgga

SEQ ID NO: 474459 - DNA, 25 bp, Homo sapien
tctgattcatagaagaaaattgcca

SEQ ID NO: 474460 - DNA, 25 bp, Homo sapien
gactcttcaaaaggataccacatag

SEQ ID NO: 474461 - DNA, 25 bp, Homo sapien
cttcgactcttcaaaaggataccac

SEQ ID NO: 474462 - DNA, 25 bp, Homo sapien
ctcttcaaaaggataccacatagcc

SEQ ID NO: 474463 - DNA, 25 bp, Homo sapien
tcgactcttcaaaaggataccacat

SEQ ID NO: 474464 - DNA, 25 bp, Homo sapien
gacataattgagattgaactctaac

SEQ ID NO: 474465 - DNA, 25 bp, Homo sapien
agaaacaagcgttactttccgcagc

SEQ ID NO: 474466 - DNA, 25 bp, Homo sapien
gaactctaaccaattcagaaacaag

SEQ ID NO: 474467 - DNA, 25 bp, Homo sapien
ttaacactgcagtcatacagaaggg

SEQ ID NO: 474468 - DNA, 25 bp, Homo sapien
ctccaaacccctggcgtagaggcaa

SEQ ID NO: 474469 - DNA, 25 bp, Homo sapien
gaaattaggctttgtgtgggtggag

SEQ ID NO: 474470 - DNA, 25 bp, Homo sapien
tagaggcaacaccttctgtggccat

SEQ ID NO: 474471 - DNA, 25 bp, Homo sapien
gcagaattgaatgtgatcctgtgca

SEQ ID NO: 474472 - DNA, 25 bp, Homo sapien
ctctcttacaggctctcctactttt

SEQ ID NO: 474473 - DNA, 25 bp, Homo sapien
tctcttacaggctctcctacttttc

SEQ ID NO: 474474 - DNA, 25 bp, Homo sapien
ctcttacaggctctcctacttttcc

SEQ ID NO: 474475 - DNA, 25 bp, Homo sapien
gctctcttacaggctctcctacttt

SEQ ID NO: 474476 - DNA, 25 bp, Homo sapien
aacacactgtggcactgaaatactc

SEQ ID NO: 474477 - DNA, 25 bp, Homo sapien
caaacacactgtggcactgaaatac

SEQ ID NO: 474478 - DNA, 25 bp, Homo sapien
aaacacactgtggcactgaaatact

SEQ ID NO: 474479 - DNA, 25 bp, Homo sapien
tcaaacacactgtggcactgaaata

SEQ ID NO: 474480 - DNA, 25 bp, Homo sapien
caatgtacaaattagttggaggtga

SEQ ID NO: 474481 - DNA, 25 bp, Homo sapien
aaaatgtaagcagaggtctgcaagg

SEQ ID NO: 474482 - DNA, 25 bp, Homo sapien
gaataaggtcttcgtaggctggtcc

SEQ ID NO: 474483 - DNA, 25 bp, Homo sapien
gcttatctgaggctcttgacttcca

SEQ ID NO: 474484 - DNA, 25 bp, Homo sapien
gttacaactattccaggaagctata

SEQ ID NO: 474485 - DNA, 25 bp, Homo sapien
ttatgcccagatttagcaggttttt

SEQ ID NO: 474486 - DNA, 25 bp, Homo sapien
aatggataagtagttacaactattc

SEQ ID NO: 474487 - DNA, 25 bp, Homo sapien
gttgtggctggaaaaatggataagt

SEQ ID NO: 474488 - DNA, 25 bp, Homo sapien
tctcctccccacactccaccttcca

SEQ ID NO: 474489 - DNA, 25 bp, Homo sapien
cttctctcctccccacactccacct

SEQ ID NO: 474490 - DNA, 25 bp, Homo sapien
tctctcctccccacactccaccttc

SEQ ID NO: 474491 - DNA, 25 bp, Homo sapien
ctcctccccacactccaccttccat

SEQ ID NO: 474492 - DNA, 25 bp, Homo sapien
aaaggcccacacaagaaagccacag

SEQ ID NO: 474493 - DNA, 25 bp, Homo sapien
ctagcaaaggcccacacaagaaagc

SEQ ID NO: 474494 - DNA, 25 bp, Homo sapien
tagcaaaggcccacacaagaaagcc

SEQ ID NO: 474495 - DNA, 25 bp, Homo sapien
gcaaaggcccacacaagaaagccac

SEQ ID NO: 474496 - DNA, 25 bp, Homo sapien
ttgctgccacctataggcccaatct

SEQ ID NO: 474497 - DNA, 25 bp, Homo sapien
ccacctataggcccaatctcaagag

SEQ ID NO: 474498 - DNA, 25 bp, Homo sapien
agttgctgccacctataggcccaat

SEQ ID NO: 474499 - DNA, 25 bp, Homo sapien
tgccacctataggcccaatctcaag

SEQ ID NO: 474500 - DNA, 25 bp, Homo sapien
gccaaagtggagtttagcagtcacc

SEQ ID NO: 474501 - DNA, 25 bp, Homo sapien
ggataaccaatctgaccacagcagt

SEQ ID NO: 474502 - DNA, 25 bp, Homo sapien
gagtagaattttccctgcaagttcc

SEQ ID NO: 474503 - DNA, 25 bp, Homo sapien
tatagaatgttcaagcccctacacc

SEQ ID NO: 474504 - DNA, 25 bp, Homo sapien
tagagattgtatcacagcaaaaccg

SEQ ID NO: 474505 - DNA, 25 bp, Homo sapien
tctagtcatggtacgaaagcactga

SEQ ID NO: 474506 - DNA, 25 bp, Homo sapien
tacttcatttcaggcgataccgtcc

SEQ ID NO: 474507 - DNA, 25 bp, Homo sapien
caaagccttgcaatgccttagagca

SEQ ID NO: 474508 - DNA, 25 bp, Homo sapien
tcgataccccagaccaacgtggata

SEQ ID NO: 474509 - DNA, 25 bp, Homo sapien
cagtaaatagatgtgtggattcaga

SEQ ID NO: 474510 - DNA, 25 bp, Homo sapien
tgctctgactttggcttttgcagct

SEQ ID NO: 474511 - DNA, 25 bp, Homo sapien
tggatataggcagccctttatgtct

SEQ ID NO: 474512 - DNA, 25 bp, Homo sapien
attgcaggtgttgaagccagatctg

SEQ ID NO: 474513 - DNA, 25 bp, Homo sapien
tccacttgtcacctacacaaattgc

SEQ ID NO: 474514 - DNA, 25 bp, Homo sapien
ttcatcaaagatccacttgtcacct

SEQ ID NO: 474515 - DNA, 25 bp, Homo sapien
cctacacaaattgcaggtgttgaag

SEQ ID NO: 474516 - DNA, 25 bp, Homo sapien
gacaggcctgagctctaacaagtag

SEQ ID NO: 474517 - DNA, 25 bp, Homo sapien
gcatgcatgcattcgtctgacccac

SEQ ID NO: 474518 - DNA, 25 bp, Homo sapien
gccaccatttgtgctaagtagctga

SEQ ID NO: 474519 - DNA, 25 bp, Homo sapien
ggagatgaacgctctaactgccacc

SEQ ID NO: 474520 - DNA, 25 bp, Homo sapien
taataccgtctatcccatttgattg

SEQ ID NO: 474521 - DNA, 25 bp, Homo sapien
gtatgtgctgtaataccgtctatcc

SEQ ID NO: 474522 - DNA, 25 bp, Homo sapien
gctgtaataccgtctatcccatttg

SEQ ID NO: 474523 - DNA, 25 bp, Homo sapien
cgtctatcccatttgattgcaatca

SEQ ID NO: 474524 - DNA, 25 bp, Homo sapien
taatcgcttctacactccccttgaa

SEQ ID NO: 474525 - DNA, 25 bp, Homo sapien
attatcatcagagactaatcgcttc

SEQ ID NO: 474526 - DNA, 25 bp, Homo sapien
agagactaatcgcttctacactccc

SEQ ID NO: 474527 - DNA, 25 bp, Homo sapien
catcagagactaatcgcttctacac

SEQ ID NO: 474528 - DNA, 25 bp, Homo sapien
gagggtgttcacgtctgctcagcat

SEQ ID NO: 474529 - DNA, 25 bp, Homo sapien
gcatttgtaaggagctaaagtctca

SEQ ID NO: 474530 - DNA, 25 bp, Homo sapien
aaaggatcttcctacaaggcagagg

SEQ ID NO: 474531 - DNA, 25 bp, Homo sapien
taataggactcatcaatctcccagg

SEQ ID NO: 474532 - DNA, 25 bp, Homo sapien
cacacccaaatcccagtcacactga

SEQ ID NO: 474533 - DNA, 25 bp, Homo sapien
cccaaatcccagtcacactgagcca

SEQ ID NO: 474534 - DNA, 25 bp, Homo sapien
ccaaatcccagtcacactgagccat

SEQ ID NO: 474535 - DNA, 25 bp, Homo sapien
cacccaaatcccagtcacactgagc

SEQ ID NO: 474536 - DNA, 25 bp, Homo sapien
tgttcgtaagctcccaaatatcgta

SEQ ID NO: 474537 - DNA, 25 bp, Homo sapien
tattccaagcgtagctgtgagagac

SEQ ID NO: 474538 - DNA, 25 bp, Homo sapien
tagcctggcactgccaactaattcc

SEQ ID NO: 474539 - DNA, 25 bp, Homo sapien
gagagacactgtcatggcccacttg

SEQ ID NO: 474540 - DNA, 25 bp, Homo sapien
ttggcattagtatagtgaagtgcag

SEQ ID NO: 474541 - DNA, 25 bp, Homo sapien
tattttagttttgcggagacaaaga

SEQ ID NO: 474542 - DNA, 25 bp, Homo sapien
gttttgcggagacaaagaataccac

SEQ ID NO: 474543 - DNA, 25 bp, Homo sapien
agttctccccacgttggcattagta

SEQ ID NO: 474544 - DNA, 25 bp, Homo sapien
ctaaatatgaccagctctgaccttg

SEQ ID NO: 474545 - DNA, 25 bp, Homo sapien
gcgaaggttgttagaggattgtttc

SEQ ID NO: 474546 - DNA, 25 bp, Homo sapien
gcaaagcgaaggttgttagaggatt

SEQ ID NO: 474547 - DNA, 25 bp, Homo sapien
gtttcctaaatatgaccagctctga

SEQ ID NO: 474548 - DNA, 25 bp, Homo sapien
cccaggggtgtctcagtctctggtc

SEQ ID NO: 474549 - DNA, 25 bp, Homo sapien
ggtgtctcagtctctggtcattatg

SEQ ID NO: 474550 - DNA, 25 bp, Homo sapien
gtctctggtcattatgcccttttaa

SEQ ID NO: 474551 - DNA, 25 bp, Homo sapien
tctcagtctctggtcattatgccct

SEQ ID NO: 474552 - DNA, 25 bp, Homo sapien
ctttttgggtcgccaagattctcat

SEQ ID NO: 474553 - DNA, 25 bp, Homo sapien
gcctgcatacacctctttgttcttt

SEQ ID NO: 474554 - DNA, 25 bp, Homo sapien
cctgcatacacctctttgttctttc

SEQ ID NO: 474555 - DNA, 25 bp, Homo sapien
tcctctactataaagaagtccccat

SEQ ID NO: 474556 - DNA, 25 bp, Homo sapien
gatatagggacggtcttcactgcca

SEQ ID NO: 474557 - DNA, 25 bp, Homo sapien
tagctggctccccagaatactccag

SEQ ID NO: 474558 - DNA, 25 bp, Homo sapien
gccaccggatccataccgaatcttg

SEQ ID NO: 474559 - DNA, 25 bp, Homo sapien
gctcacttccagaggattcaacctt

SEQ ID NO: 474560 - DNA, 25 bp, Homo sapien
ttctttagatttcctggcttcctgc

SEQ ID NO: 474561 - DNA, 25 bp, Homo sapien
accagctcacttccagaggattcaa

SEQ ID NO: 474562 - DNA, 25 bp, Homo sapien
ttccagaggattcaaccttttccca

SEQ ID NO: 474563 - DNA, 25 bp, Homo sapien
aacagtggcaataacaggaactttt

SEQ ID NO: 474564 - DNA, 25 bp, Homo sapien
tccagctttagctttgtccacagag

SEQ ID NO: 474565 - DNA, 25 bp, Homo sapien
ataaacagtggcaataacaggaact

SEQ ID NO: 474566 - DNA, 25 bp, Homo sapien
tgttccttccagctttagctttgtc

SEQ ID NO: 474567 - DNA, 25 bp, Homo sapien
ggagagagccataatgtacatgctt

SEQ ID NO: 474568 - DNA, 25 bp, Homo sapien
ttgtaaccaagaggccaaccatcca

SEQ ID NO: 474569 - DNA, 25 bp, Homo sapien
tttctcatatccagttccaggcaag

SEQ ID NO: 474570 - DNA, 25 bp, Homo sapien
agataattcacagatcttaattcaa

SEQ ID NO: 474571 - DNA, 25 bp, Homo sapien
taatcaccgtcttcttcataaatgc

SEQ ID NO: 474572 - DNA, 25 bp, Homo sapien
ggtagagaatttgggaatgaataag

SEQ ID NO: 474573 - DNA, 25 bp, Homo sapien
ttgggaatgaataagtaatcaccgt

SEQ ID NO: 474574 - DNA, 25 bp, Homo sapien
aatgcctaaataagggcctgataaa

SEQ ID NO: 474575 - DNA, 25 bp, Homo sapien
gctaattccagtgttgcacaaagat

SEQ ID NO: 474576 - DNA, 25 bp, Homo sapien
cagagcccatggttcgatggcagct

SEQ ID NO: 474577 - DNA, 25 bp, Homo sapien
gctcagcagaccagttccaactctt

SEQ ID NO: 474578 - DNA, 25 bp, Homo sapien
gagcctttgctcagcagaccagttc

SEQ ID NO: 474579 - DNA, 25 bp, Homo sapien
atcctgaagggtgttttctaacttg

SEQ ID NO: 474580 - DNA, 25 bp, Homo sapien
caccaatcaaatgtagatttgttct

SEQ ID NO: 474581 - DNA, 25 bp, Homo sapien
tggagtttctgccaagagatctgct

SEQ ID NO: 474582 - DNA, 25 bp, Homo sapien
ttgtggagtttctgccaagagatct

SEQ ID NO: 474583 - DNA, 25 bp, Homo sapien
catttcctccccttaagagcacctt

SEQ ID NO: 474584 - DNA, 25 bp, Homo sapien
tgttgttaataccacctcgctctaa

SEQ ID NO: 474585 - DNA, 25 bp, Homo sapien
ccttcactactgagcactccttgtt

SEQ ID NO: 474586 - DNA, 25 bp, Homo sapien
ccacctcgctctaattgttcatgca

SEQ ID NO: 474587 - DNA, 25 bp, Homo sapien
gcttctgtgggctagttctgcctgt

SEQ ID NO: 474588 - DNA, 25 bp, Homo sapien
tatcttggcaaaaggagtcttggac

SEQ ID NO: 474589 - DNA, 25 bp, Homo sapien
cctgtgcaccatgatgatgtgagtt

SEQ ID NO: 474590 - DNA, 25 bp, Homo sapien
gagtcttggaccagctttgaccaac

SEQ ID NO: 474591 - DNA, 25 bp, Homo sapien
gtctcagcacgatctctgcaggcca

SEQ ID NO: 474592 - DNA, 25 bp, Homo sapien
cacatgtctcagcacgatctctgca

SEQ ID NO: 474593 - DNA, 25 bp, Homo sapien
tcagcacgatctctgcaggccatga

SEQ ID NO: 474594 - DNA, 25 bp, Homo sapien
agccacacatgtctcagcacgatct

SEQ ID NO: 474595 - DNA, 25 bp, Homo sapien
gcaagacagaagtgttaggagagct

SEQ ID NO: 474596 - DNA, 25 bp, Homo sapien
tctgtgtgggatatacttggatccc

SEQ ID NO: 474597 - DNA, 25 bp, Homo sapien
tggcccttgatagcctgaagtggta

SEQ ID NO: 474598 - DNA, 25 bp, Homo sapien
taaacgcgaatgacggcaagacaga

SEQ ID NO: 474599 - DNA, 25 bp, Homo sapien
tgccaccagtatgccaccagtatac

SEQ ID NO: 474600 - DNA, 25 bp, Homo sapien
ctctgtgtctcatccaacatgccac

SEQ ID NO: 474601 - DNA, 25 bp, Homo sapien
aacatgccaccagtatgccaccagt

SEQ ID NO: 474602 - DNA, 25 bp, Homo sapien
tatgccaccagtatacaatgcagca

SEQ ID NO: 474603 - DNA, 25 bp, Homo sapien
tccaggaacactggagctagtgacc

SEQ ID NO: 474604 - DNA, 25 bp, Homo sapien
aggaacactggagctagtgacccac

SEQ ID NO: 474605 - DNA, 25 bp, Homo sapien
taacgtattgggaaatccaggaaca

SEQ ID NO: 474606 - DNA, 25 bp, Homo sapien
ccctgctgctccctaacgtattggg

SEQ ID NO: 474607 - DNA, 25 bp, Homo sapien
tgtccctaagtccctcctgttgctc

SEQ ID NO: 474608 - DNA, 25 bp, Homo sapien
gttgctctgctatgaagtatgggca

SEQ ID NO: 474609 - DNA, 25 bp, Homo sapien
tgttgctctgctatgaagtatgggc

SEQ ID NO: 474610 - DNA, 25 bp, Homo sapien
tcctgttgctctgctatgaagtatg

SEQ ID NO: 474611 - DNA, 25 bp, Homo sapien
tggccagtaacttagcttcctcagt

SEQ ID NO: 474612 - DNA, 25 bp, Homo sapien
atggccagtaacttagcttcctcag

SEQ ID NO: 474613 - DNA, 25 bp, Homo sapien
tcactgccattaagcttatatttat

SEQ ID NO: 474614 - DNA, 25 bp, Homo sapien
gacttgtcttcgctgacattaatac

SEQ ID NO: 474615 - DNA, 25 bp, Homo sapien
gtcttcgctgacattaatacattca

SEQ ID NO: 474616 - DNA, 25 bp, Homo sapien
cttcatagacttgtcttcgctgaca

SEQ ID NO: 474617 - DNA, 25 bp, Homo sapien
ttccatgacaagaggaagcatggtt

SEQ ID NO: 474618 - DNA, 25 bp, Homo sapien
gtttgttccagatttagtctcttcc

SEQ ID NO: 474619 - DNA, 25 bp, Homo sapien
tctggaaatggagaatagaaagttt

SEQ ID NO: 474620 - DNA, 25 bp, Homo sapien
tctgtggcctttggcaagactctta

SEQ ID NO: 474621 - DNA, 25 bp, Homo sapien
agaaaaaaaaaggcaagatgaccat

SEQ ID NO: 474622 - DNA, 25 bp, Homo sapien
gaaaaaaaaaggcaagatgaccata

SEQ ID NO: 474623 - DNA, 25 bp, Homo sapien
aatttgattgactaatcctggctct

SEQ ID NO: 474624 - DNA, 25 bp, Homo sapien
taatttgattgactaatcctggctc

SEQ ID NO: 474625 - DNA, 25 bp, Homo sapien
ttaatttgattgactaatcctggct

SEQ ID NO: 474626 - DNA, 25 bp, Homo sapien
atttgattgactaatcctggctctt

SEQ ID NO: 474627 - DNA, 25 bp, Homo sapien
caggagcaaattgagccattaggtg

SEQ ID NO: 474628 - DNA, 25 bp, Homo sapien
gacattgtagcggtctcaaaaccca

SEQ ID NO: 474629 - DNA, 25 bp, Homo sapien
tttgcaaagcacagacttagcaggg

SEQ ID NO: 474630 - DNA, 25 bp, Homo sapien
tactcttactgaaatgttggccaag

SEQ ID NO: 474631 - DNA, 25 bp, Homo sapien
tgatttatccaactcttaaccgaaa

SEQ ID NO: 474632 - DNA, 25 bp, Homo sapien
cgaaattttctcacccacctgtggc

SEQ ID NO: 474633 - DNA, 25 bp, Homo sapien
accgaaattttctcacccacctgtg

SEQ ID NO: 474634 - DNA, 25 bp, Homo sapien
tctgatttatccaactcttaaccga

SEQ ID NO: 474635 - DNA, 25 bp, Homo sapien
cataatagttgctccttagctttac

SEQ ID NO: 474636 - DNA, 25 bp, Homo sapien
ggacggatttatgctcctccagcat

SEQ ID NO: 474637 - DNA, 25 bp, Homo sapien
ttctttatgccattttcgagttgtg

SEQ ID NO: 474638 - DNA, 25 bp, Homo sapien
aggaaggaagtattgactatcttca

SEQ ID NO: 474639 - DNA, 25 bp, Homo sapien
gttgtggggacggatttatgctcct

SEQ ID NO: 474640 - DNA, 25 bp, Homo sapien
gaatatcccacaggcaaaactggag

SEQ ID NO: 474641 - DNA, 25 bp, Homo sapien
agacagtggttgtctgtaatcatca

SEQ ID NO: 474642 - DNA, 25 bp, Homo sapien
tggaatatcccacaggcaaaactgg

SEQ ID NO: 474643 - DNA, 25 bp, Homo sapien
tggagacagtggttgtctgtaatca

SEQ ID NO: 474644 - DNA, 25 bp, Homo sapien
agacattcacagtcgcctcttctgg

SEQ ID NO: 474645 - DNA, 25 bp, Homo sapien
aaggcccaggccacataagggcaga

SEQ ID NO: 474646 - DNA, 25 bp, Homo sapien
cgttcgtggagatagacagacattc

SEQ ID NO: 474647 - DNA, 25 bp, Homo sapien
ttgccttatcccagaccaggccagg

SEQ ID NO: 474648 - DNA, 25 bp, Homo sapien
ctgaaactgctgtgaacttctttac

SEQ ID NO: 474649 - DNA, 25 bp, Homo sapien
gctgtgaacttctttacataatatt

SEQ ID NO: 474650 - DNA, 25 bp, Homo sapien
tgtggcttctatctctctctgtttc

SEQ ID NO: 474651 - DNA, 25 bp, Homo sapien
cttgtggcttctatctctctctgtt

SEQ ID NO: 474652 - DNA, 25 bp, Homo sapien
cttcagtgctatcaacaggtgtgag

SEQ ID NO: 474653 - DNA, 25 bp, Homo sapien
tcactggggacatgtgagaaattct

SEQ ID NO: 474654 - DNA, 25 bp, Homo sapien
cagtgctatcaacaggtgtgagaga

SEQ ID NO: 474655 - DNA, 25 bp, Homo sapien
ctggggacatgtgagaaattctgaa

SEQ ID NO: 474656 - DNA, 25 bp, Homo sapien
ctgtgttcatgttggtcgctatcat

SEQ ID NO: 474657 - DNA, 25 bp, Homo sapien
gatcaagagcgccaaactctctgaa

SEQ ID NO: 474658 - DNA, 25 bp, Homo sapien
tctctgaagtcagctagcatatagt

SEQ ID NO: 474659 - DNA, 25 bp, Homo sapien
tagcatatagtcatacaaagtcagc

SEQ ID NO: 474660 - DNA, 25 bp, Homo sapien
gcccttgcagatatgctcttgatca

SEQ ID NO: 474661 - DNA, 25 bp, Homo sapien
tgcatgcaccttgttcccacagtga

SEQ ID NO: 474662 - DNA, 25 bp, Homo sapien
gtgatcctccattcatagctccagt

SEQ ID NO: 474663 - DNA, 25 bp, Homo sapien
ctgcatgcaccttgttcccacagtg

SEQ ID NO: 474664 - DNA, 25 bp, Homo sapien
gatcctccattcatagctccagttg

SEQ ID NO: 474665 - DNA, 25 bp, Homo sapien
tggatagtgacaagagtgcaaaagc

SEQ ID NO: 474666 - DNA, 25 bp, Homo sapien
tctacagcgcgatcaccagttttgt

SEQ ID NO: 474667 - DNA, 25 bp, Homo sapien
tcagatacaattgttcgctggctcc

SEQ ID NO: 474668 - DNA, 25 bp, Homo sapien
aattttccccagttgctctacagcg

SEQ ID NO: 474669 - DNA, 25 bp, Homo sapien
caattgtgatctcgagctgtaaggc

SEQ ID NO: 474670 - DNA, 25 bp, Homo sapien
tcacacaatattccaaaaagcaatt

SEQ ID NO: 474671 - DNA, 25 bp, Homo sapien
gaagtttaatgttaagcatctggca

SEQ ID NO: 474672 - DNA, 25 bp, Homo sapien
taaggcactggcatccacttggaaa

SEQ ID NO: 474673 - DNA, 25 bp, Homo sapien
caagtcttttaatgtgtcatacaca

SEQ ID NO: 474674 - DNA, 25 bp, Homo sapien
ccatcaagtcttttaatgtgtcata

SEQ ID NO: 474675 - DNA, 25 bp, Homo sapien
tacacactttgtgccttcacctctt

SEQ ID NO: 474676 - DNA, 25 bp, Homo sapien
ttttaatgtgtcatacacactttgt

SEQ ID NO: 474677 - DNA, 25 bp, Homo sapien
cctgcagcaccaatctttcaggttt

SEQ ID NO: 474678 - DNA, 25 bp, Homo sapien
cacctgcagcaccaatctttcaggt

SEQ ID NO: 474679 - DNA, 25 bp, Homo sapien
agcaccaatctttcaggttttgcca

SEQ ID NO: 474680 - DNA, 25 bp, Homo sapien
acctgcagcaccaatctttcaggtt

SEQ ID NO: 474681 - DNA, 25 bp, Homo sapien
tgaccctttgcagcctttacttaga

SEQ ID NO: 474682 - DNA, 25 bp, Homo sapien
tggtaagtctgaccctttgcagcct

SEQ ID NO: 474683 - DNA, 25 bp, Homo sapien
gcaccgtttcgtcttctggtaagtc

SEQ ID NO: 474684 - DNA, 25 bp, Homo sapien
gggctcccttaaagtcactgaaaca

SEQ ID NO: 474685 - DNA, 25 bp, Homo sapien
ctgagtacctaggtacctctgtaat

SEQ ID NO: 474686 - DNA, 25 bp, Homo sapien
tacctaggtacctctgtaatgctcc

SEQ ID NO: 474687 - DNA, 25 bp, Homo sapien
tacctctgtaatgctccttgatcac

SEQ ID NO: 474688 - DNA, 25 bp, Homo sapien
taggtacctctgtaatgctccttga

SEQ ID NO: 474689 - DNA, 25 bp, Homo sapien
tatggtcaacatcaaaaagtttggg

SEQ ID NO: 474690 - DNA, 25 bp, Homo sapien
tggaagatgtatggtcaacatcaaa

SEQ ID NO: 474691 - DNA, 25 bp, Homo sapien
tgtatggtcaacatcaaaaagtttg

SEQ ID NO: 474692 - DNA, 25 bp, Homo sapien
tcaaatggaagatgtatggtcaaca

SEQ ID NO: 474693 - DNA, 25 bp, Homo sapien
caagagataacggataagtataagg

SEQ ID NO: 474694 - DNA, 25 bp, Homo sapien
tctgagagcatataccgggctgaac

SEQ ID NO: 474695 - DNA, 25 bp, Homo sapien
gattgtgatacaagagataacggat

SEQ ID NO: 474696 - DNA, 25 bp, Homo sapien
tgagagcatataccgggctgaacct

SEQ ID NO: 474697 - DNA, 25 bp, Homo sapien
tggtggagaggaccaggggcagaat

SEQ ID NO: 474698 - DNA, 25 bp, Homo sapien
ggtggagaggaccaggggcagaatg

SEQ ID NO: 474699 - DNA, 25 bp, Homo sapien
ctggtggagaggaccaggggcagaa

SEQ ID NO: 474700 - DNA, 25 bp, Homo sapien
aagtccatgggccttagtgctgtca

SEQ ID NO: 474701 - DNA, 25 bp, Homo sapien
tccagtctggtaaatcatcagcttt

SEQ ID NO: 474702 - DNA, 25 bp, Homo sapien
cttcaagtccatgggccttagtgct

SEQ ID NO: 474703 - DNA, 25 bp, Homo sapien
ctggtaaatcatcagcttttaggtg

SEQ ID NO: 474704 - DNA, 25 bp, Homo sapien
tagtcggagaccttgcacatggcat

SEQ ID NO: 474705 - DNA, 25 bp, Homo sapien
tagaagcctgtgcatggatggacca

SEQ ID NO: 474706 - DNA, 25 bp, Homo sapien
ttctagtgtctaagtcaatgccggg

SEQ ID NO: 474707 - DNA, 25 bp, Homo sapien
caagctaccttgttagatgggcaca

SEQ ID NO: 474708 - DNA, 25 bp, Homo sapien
tgaaggctcctctgtatgacctcct

SEQ ID NO: 474709 - DNA, 25 bp, Homo sapien
gttggaaaggtcctctgcagctcct

SEQ ID NO: 474710 - DNA, 25 bp, Homo sapien
tcctctgtatgacctcctcacataa

SEQ ID NO: 474711 - DNA, 25 bp, Homo sapien
aggttggaaaggtcctctgcagctc

SEQ ID NO: 474712 - DNA, 25 bp, Homo sapien
tatctggagccacatactgaaaacc

SEQ ID NO: 474713 - DNA, 25 bp, Homo sapien
tactgaaaacccgatcacaacagct

SEQ ID NO: 474714 - DNA, 25 bp, Homo sapien
ggagccacatactgaaaacccgatc

SEQ ID NO: 474715 - DNA, 25 bp, Homo sapien
aaaacccgatcacaacagctgctct

SEQ ID NO: 474716 - DNA, 25 bp, Homo sapien
tgaatgcgctcaatctcgtctaaat

SEQ ID NO: 474717 - DNA, 25 bp, Homo sapien
tcaactgcgattaacttactggcgt

SEQ ID NO: 474718 - DNA, 25 bp, Homo sapien
taaaagatctctcactagggctaaa

SEQ ID NO: 474719 - DNA, 25 bp, Homo sapien
tgacctcaaatagatgcatagcttg

SEQ ID NO: 474720 - DNA, 25 bp, Homo sapien
aggagcatacaattcctcagacacc

SEQ ID NO: 474721 - DNA, 25 bp, Homo sapien
tggcaatttccgaaaggatttagaa

SEQ ID NO: 474722 - DNA, 25 bp, Homo sapien
ctcagacaccgggaggtctgacagt

SEQ ID NO: 474723 - DNA, 25 bp, Homo sapien
tcaaactggcaatttccgaaaggat

SEQ ID NO: 474724 - DNA, 25 bp, Homo sapien
tgtttagctaatacaactggggcac

SEQ ID NO: 474725 - DNA, 25 bp, Homo sapien
tttcttgtgatattggagacagcca

SEQ ID NO: 474726 - DNA, 25 bp, Homo sapien
tttgatttgaaggttccatcagcag

SEQ ID NO: 474727 - DNA, 25 bp, Homo sapien
taaagtcatactgtttcttgtgata

SEQ ID NO: 474728 - DNA, 25 bp, Homo sapien
tggaactgagagtacaaatgcctgt

SEQ ID NO: 474729 - DNA, 25 bp, Homo sapien
gagagtacaaatgcctgttgtcaag

SEQ ID NO: 474730 - DNA, 25 bp, Homo sapien
aaatgcctgttgtcaaggaactcac

SEQ ID NO: 474731 - DNA, 25 bp, Homo sapien
ttttgtccatggaactgagagtaca

SEQ ID NO: 474732 - DNA, 25 bp, Homo sapien
tagggctaggtgtcagccagatttc

SEQ ID NO: 474733 - DNA, 25 bp, Homo sapien
ctaggtgtcagccagatttcaacga

SEQ ID NO: 474734 - DNA, 25 bp, Homo sapien
ccagatttcaacgagcaacaggttt

SEQ ID NO: 474735 - DNA, 25 bp, Homo sapien
ttatgattagggctaggtgtcagcc

SEQ ID NO: 474736 - DNA, 25 bp, Homo sapien
gataaggagtggtagctcttttttg

SEQ ID NO: 474737 - DNA, 25 bp, Homo sapien
tggtagctcttttttgggcatcagc

SEQ ID NO: 474738 - DNA, 25 bp, Homo sapien
tagctcttttttgggcatcagcttt

SEQ ID NO: 474739 - DNA, 25 bp, Homo sapien
ggtgggagataaggagtggtagctc

SEQ ID NO: 474740 - DNA, 25 bp, Homo sapien
tattttagagtgatacctaatagaa

SEQ ID NO: 474741 - DNA, 25 bp, Homo sapien
tagaaattaggcttaggaccttgag

SEQ ID NO: 474742 - DNA, 25 bp, Homo sapien
gcttaggaccttgagttcatagctg

SEQ ID NO: 474743 - DNA, 25 bp, Homo sapien
gagtgatacctaatagaaattaggc

SEQ ID NO: 474744 - DNA, 25 bp, Homo sapien
cagggccaggactaaaaagcagaga

SEQ ID NO: 474745 - DNA, 25 bp, Homo sapien
ttagcaggggataccgctcaggcag

SEQ ID NO: 474746 - DNA, 25 bp, Homo sapien
cagagacacgctttgtggggttagc

SEQ ID NO: 474747 - DNA, 25 bp, Homo sapien
ctgcggtcagtaggggcacatgact

SEQ ID NO: 474748 - DNA, 25 bp, Homo sapien
caggcttttagcatgaagttgcaca

SEQ ID NO: 474749 - DNA, 25 bp, Homo sapien
catgaagttgcacaggaacagaaac

SEQ ID NO: 474750 - DNA, 25 bp, Homo sapien
tgtatcctccctctaaagacaggct

SEQ ID NO: 474751 - DNA, 25 bp, Homo sapien
gatctaagaatagcttgtacatggc

SEQ ID NO: 474752 - DNA, 25 bp, Homo sapien
tcacacttgtacgtgaacttgcatc

SEQ ID NO: 474753 - DNA, 25 bp, Homo sapien
cacacttgtacgtgaacttgcatct

SEQ ID NO: 474754 - DNA, 25 bp, Homo sapien
acacttgtacgtgaacttgcatctg

SEQ ID NO: 474755 - DNA, 25 bp, Homo sapien
aatctaattgagagtcatgagggac

SEQ ID NO: 474756 - DNA, 25 bp, Homo sapien
tctaattgagagtcatgagggactg

SEQ ID NO: 474757 - DNA, 25 bp, Homo sapien
aaataatctaattgagagtcatgag

SEQ ID NO: 474758 - DNA, 25 bp, Homo sapien
atctaattgagagtcatgagggact

SEQ ID NO: 474759 - DNA, 25 bp, Homo sapien
tctaaagcaaagttgtggtttggca

SEQ ID NO: 474760 - DNA, 25 bp, Homo sapien
acttgaggagctctttctaaagcaa

SEQ ID NO: 474761 - DNA, 25 bp, Homo sapien
gcaagtagccaatcatttggacagt

SEQ ID NO: 474762 - DNA, 25 bp, Homo sapien
tctcaatgattgtcttaactttcct

SEQ ID NO: 474763 - DNA, 25 bp, Homo sapien
taaccagctttacaatcattgtaca

SEQ ID NO: 474764 - DNA, 25 bp, Homo sapien
aactcacagctgattctgaaactct

SEQ ID NO: 474765 - DNA, 25 bp, Homo sapien
atcccctactagttgacaccttgaa

SEQ ID NO: 474766 - DNA, 25 bp, Homo sapien
tagccaaacatatcccctactagtt

SEQ ID NO: 474767 - DNA, 25 bp, Homo sapien
cactgtgataaaggatctccaagct

SEQ ID NO: 474768 - DNA, 25 bp, Homo sapien
aactctgggtggacctcggaaagca

SEQ ID NO: 474769 - DNA, 25 bp, Homo sapien
ggacatcagcattaacttaggtctg

SEQ ID NO: 474770 - DNA, 25 bp, Homo sapien
cctaatattctgcatagtctctgca

SEQ ID NO: 474771 - DNA, 25 bp, Homo sapien
attcattgtcatttgggtggggcac

SEQ ID NO: 474772 - DNA, 25 bp, Homo sapien
gattcattgtcatttgggtggggca

SEQ ID NO: 474773 - DNA, 25 bp, Homo sapien
tcattgtcatttgggtggggcacct

SEQ ID NO: 474774 - DNA, 25 bp, Homo sapien
ttcattgtcatttgggtggggcacc

SEQ ID NO: 474775 - DNA, 25 bp, Homo sapien
aaagagcagcgttgtcttctgccat

SEQ ID NO: 474776 - DNA, 25 bp, Homo sapien
ctgctggggacggtgttggggcaca

SEQ ID NO: 474777 - DNA, 25 bp, Homo sapien
gagaggcgataaactaagtgaaagc

SEQ ID NO: 474778 - DNA, 25 bp, Homo sapien
agagaggcgataaactaagtgaaag

SEQ ID NO: 474779 - DNA, 25 bp, Homo sapien
tggggatcgtaagcaggggggcagc

SEQ ID NO: 474780 - DNA, 25 bp, Homo sapien
ctgtctgagtctggggatcgtaagc

SEQ ID NO: 474781 - DNA, 25 bp, Homo sapien
gcggcccccgcctgtctgagtctgg

SEQ ID NO: 474782 - DNA, 25 bp, Homo sapien
ccgcctgtctgagtctggggatcgt

SEQ ID NO: 474783 - DNA, 25 bp, Homo sapien
ggctccttggggctggaaggcagtt

SEQ ID NO: 474784 - DNA, 25 bp, Homo sapien
gggcggagtggctccttggggctgg

SEQ ID NO: 474785 - DNA, 25 bp, Homo sapien
ctccttggggctggaaggcagttct

SEQ ID NO: 474786 - DNA, 25 bp, Homo sapien
ctgggggcggagtggctccttgggg

SEQ ID NO: 474787 - DNA, 25 bp, Homo sapien
tggcagtgggcggcgtgacctctgc

SEQ ID NO: 474788 - DNA, 25 bp, Homo sapien
ctggcagtgggcggcgtgacctctg

SEQ ID NO: 474789 - DNA, 25 bp, Homo sapien
tgtgcgtcctggctgcgtgtctcag

SEQ ID NO: 474790 - DNA, 25 bp, Homo sapien
tcagtgcagcgtggagtcgccgtgt

SEQ ID NO: 474791 - DNA, 25 bp, Homo sapien
cagggctttcgtgctcgcagtgtcg

SEQ ID NO: 474792 - DNA, 25 bp, Homo sapien
tgtgtgcgtgggttggacttgtgcg

SEQ ID NO: 474793 - DNA, 25 bp, Homo sapien
aaggagataggcgtgtgcagattac

SEQ ID NO: 474794 - DNA, 25 bp, Homo sapien
tgtgcagattacaggcaatgccccc

SEQ ID NO: 474795 - DNA, 25 bp, Homo sapien
agattacaggcaatgcccccttcgg

SEQ ID NO: 474796 - DNA, 25 bp, Homo sapien
aggagataggcgtgtgcagattaca

SEQ ID NO: 474797 - DNA, 25 bp, Homo sapien
agaaagtcatcaagcggtcgcgatc

SEQ ID NO: 474798 - DNA, 25 bp, Homo sapien
agtcatcaagcggtcgcgatcattt

SEQ ID NO: 474799 - DNA, 25 bp, Homo sapien
tcaagcggtcgcgatcattttccat

SEQ ID NO: 474800 - DNA, 25 bp, Homo sapien
tcatcaagcggtcgcgatcattttc

SEQ ID NO: 474801 - DNA, 25 bp, Homo sapien
cgaaccccggagtgttcatcagcgg

SEQ ID NO: 474802 - DNA, 25 bp, Homo sapien
gaaaaaagtttgcatcgagactgga

SEQ ID NO: 474803 - DNA, 25 bp, Homo sapien
ccgattgctcggaagttggtctaaa

SEQ ID NO: 474804 - DNA, 25 bp, Homo sapien
aaaagaggaaatactccgcgtgcgc

SEQ ID NO: 474805 - DNA, 25 bp, Homo sapien
tatcctctgggacaacaactgctct

SEQ ID NO: 474806 - DNA, 25 bp, Homo sapien
tgagtgaatgtagccccgcggagcc

SEQ ID NO: 474807 - DNA, 25 bp, Homo sapien
tgacgccatttactgctgccgcggc

SEQ ID NO: 474808 - DNA, 25 bp, Homo sapien
gctgggaccggatgcgatatatcct

SEQ ID NO: 474809 - DNA, 25 bp, Homo sapien
cgcccggaaataacgcatgccactt

SEQ ID NO: 474810 - DNA, 25 bp, Homo sapien
ggccagcgcccggaaataacgcatg

SEQ ID NO: 474811 - DNA, 25 bp, Homo sapien
gaaataacgcatgccacttcccttg

SEQ ID NO: 474812 - DNA, 25 bp, Homo sapien
ggacgtaggccagcgcccggaaata

SEQ ID NO: 474813 - DNA, 25 bp, Homo sapien
ctagccttgcacacccaggctttga

SEQ ID NO: 474814 - DNA, 25 bp, Homo sapien
tagccttgcacacccaggctttgac

SEQ ID NO: 474815 - DNA, 25 bp, Homo sapien
agccttgcacacccaggctttgacc

SEQ ID NO: 474816 - DNA, 25 bp, Homo sapien
gaagcgacggcgttgctttcacctg

SEQ ID NO: 474817 - DNA, 25 bp, Homo sapien
tctgctcgagagacttgctggccgc

SEQ ID NO: 474818 - DNA, 25 bp, Homo sapien
tatcttcgcaaagttcctgcagcgc

SEQ ID NO: 474819 - DNA, 25 bp, Homo sapien
taaaaagccgccatcgagtgcagga

SEQ ID NO: 474820 - DNA, 25 bp, Homo sapien
gtcacttccattcgaatttgactga

SEQ ID NO: 474821 - DNA, 25 bp, Homo sapien
ggcagtcacttccattcgaatttga

SEQ ID NO: 474822 - DNA, 25 bp, Homo sapien
ccctttgtctggcagtcacttccat

SEQ ID NO: 474823 - DNA, 25 bp, Homo sapien
gctgtgagcactgtccatcatcccg

SEQ ID NO: 474824 - DNA, 25 bp, Homo sapien
atcttttactaagggctttaagcat

SEQ ID NO: 474825 - DNA, 25 bp, Homo sapien
tactaagggctttaagcatttagaa

SEQ ID NO: 474826 - DNA, 25 bp, Homo sapien
ttactaagggctttaagcatttaga

SEQ ID NO: 474827 - DNA, 25 bp, Homo sapien
ctgggagtagggagtaattaatcaa

SEQ ID NO: 474828 - DNA, 25 bp, Homo sapien
tagggagtaattaatcaactgcggt

SEQ ID NO: 474829 - DNA, 25 bp, Homo sapien
taattaatcaactgcggtatccatc

SEQ ID NO: 474830 - DNA, 25 bp, Homo sapien
taatcaactgcggtatccatcccat

SEQ ID NO: 474831 - DNA, 25 bp, Homo sapien
gctgtgttacaccactggagaagcc

SEQ ID NO: 474832 - DNA, 25 bp, Homo sapien
gagaagccatgtaggaatattccct

SEQ ID NO: 474833 - DNA, 25 bp, Homo sapien
cttcaggggaactgagcgatggcca

SEQ ID NO: 474834 - DNA, 25 bp, Homo sapien
agccatgtaggaatattcccttcag

SEQ ID NO: 474835 - DNA, 25 bp, Homo sapien
cacaagacagaaacgggctacaggg

SEQ ID NO: 474836 - DNA, 25 bp, Homo sapien
taaacgcaagagaggatagcacaag

SEQ ID NO: 474837 - DNA, 25 bp, Homo sapien
tgctggaacccaacgtagcctcatg

SEQ ID NO: 474838 - DNA, 25 bp, Homo sapien
actttggaaccacctgagaagcggc

SEQ ID NO: 474839 - DNA, 25 bp, Homo sapien
gcagtttagaaaaagctccaccaat

SEQ ID NO: 474840 - DNA, 25 bp, Homo sapien
gacaattttgcctctatccaggaag

SEQ ID NO: 474841 - DNA, 25 bp, Homo sapien
gatgtggaaaccaagaccctaggca

SEQ ID NO: 474842 - DNA, 25 bp, Homo sapien
gaagccaggaactagaactctgcat

SEQ ID NO: 474843 - DNA, 25 bp, Homo sapien
gttaacctctactgggctctctctg

SEQ ID NO: 474844 - DNA, 25 bp, Homo sapien
gatatttgctgactctcaggtaaca

SEQ ID NO: 474845 - DNA, 25 bp, Homo sapien
ggcactgcttgatgaggaccatgga

SEQ ID NO: 474846 - DNA, 25 bp, Homo sapien
caggtaacaggttatccagctgctg

SEQ ID NO: 474847 - DNA, 25 bp, Homo sapien
acagggttgaattatacctggcacc

SEQ ID NO: 474848 - DNA, 25 bp, Homo sapien
cgtgtcctagccttactgaatggtg

SEQ ID NO: 474849 - DNA, 25 bp, Homo sapien
gagccagactcctgtgacttgagat

SEQ ID NO: 474850 - DNA, 25 bp, Homo sapien
aataatgctaacctgacagggttga

SEQ ID NO: 474851 - DNA, 25 bp, Homo sapien
tatttttcaacaagaacttctgctt

SEQ ID NO: 474852 - DNA, 25 bp, Homo sapien
caacaagaacttctgctttgccaaa

SEQ ID NO: 474853 - DNA, 25 bp, Homo sapien
tagcaaccctgaagtaaagacagga

SEQ ID NO: 474854 - DNA, 25 bp, Homo sapien
gcaaccctgaagtaaagacaggata

SEQ ID NO: 474855 - DNA, 25 bp, Homo sapien
cagttacaactagggtgaagatgaa

SEQ ID NO: 474856 - DNA, 25 bp, Homo sapien
taagaattcctcactgcttctaaga

SEQ ID NO: 474857 - DNA, 25 bp, Homo sapien
gagagtcgacctacaatatcagtta

SEQ ID NO: 474858 - DNA, 25 bp, Homo sapien
tggaaattgagagtcgacctacaat

SEQ ID NO: 474859 - DNA, 25 bp, Homo sapien
tgtcctcttcaaaccaatgagtcat

SEQ ID NO: 474860 - DNA, 25 bp, Homo sapien
caggatccttcgccagcagcacagt

SEQ ID NO: 474861 - DNA, 25 bp, Homo sapien
ggcacaagtacatcaagtcctctgt

SEQ ID NO: 474862 - DNA, 25 bp, Homo sapien
tcctctcaggcacaagtacatcaag

SEQ ID NO: 474863 - DNA, 25 bp, Homo sapien
cacagtcttgctattggtgaaagat

SEQ ID NO: 474864 - DNA, 25 bp, Homo sapien
ttacatctcatactccagacattct

SEQ ID NO: 474865 - DNA, 25 bp, Homo sapien
cagacattctgagttctctcttggc

SEQ ID NO: 474866 - DNA, 25 bp, Homo sapien
tgccatattcccttaagctacacag

SEQ ID NO: 474867 - DNA, 25 bp, Homo sapien
tcctaagggaacactcagaatactt

SEQ ID NO: 474868 - DNA, 25 bp, Homo sapien
gggtataaggagcatgattatttcc

SEQ ID NO: 474869 - DNA, 25 bp, Homo sapien
aatcctaagggaacactcagaatac

SEQ ID NO: 474870 - DNA, 25 bp, Homo sapien
cctaatagaagtgggtataaggagc

SEQ ID NO: 474871 - DNA, 25 bp, Homo sapien
ttctgtcattgtcatgcacatagga

SEQ ID NO: 474872 - DNA, 25 bp, Homo sapien
tgaggggagttcactgcagccagtc

SEQ ID NO: 474873 - DNA, 25 bp, Homo sapien
tcagaccaaacttacgttgtgaggg

SEQ ID NO: 474874 - DNA, 25 bp, Homo sapien
ctgtctttcttgatgtaggaatagc

SEQ ID NO: 474875 - DNA, 25 bp, Homo sapien
taggaatagccttgtcaactctcag

SEQ ID NO: 474876 - DNA, 25 bp, Homo sapien
aggttttggtagcaatcatggtggt

SEQ ID NO: 474877 - DNA, 25 bp, Homo sapien
cagtggttgaggaggttttggtagc

SEQ ID NO: 474878 - DNA, 25 bp, Homo sapien
tggtggatacagtgacagtgggcat

SEQ ID NO: 474879 - DNA, 25 bp, Homo sapien
tgaagttgtggaggtaattccgatg

SEQ ID NO: 474880 - DNA, 25 bp, Homo sapien
tgagaggtaaggtggtaggctaaat

SEQ ID NO: 474881 - DNA, 25 bp, Homo sapien
tacacactgataatgactgggagaa

SEQ ID NO: 474882 - DNA, 25 bp, Homo sapien
tttatcacttctcagatgatcttta

SEQ ID NO: 474883 - DNA, 25 bp, Homo sapien
tgggattttgggtgctctccaccac

SEQ ID NO: 474884 - DNA, 25 bp, Homo sapien
gcaatgcaattctggcttgaatgaa

SEQ ID NO: 474885 - DNA, 25 bp, Homo sapien
tgctgtctcagccacattaaggctg

SEQ ID NO: 474886 - DNA, 25 bp, Homo sapien
tgaagaaacatagcgacaaactggc

SEQ ID NO: 474887 - DNA, 25 bp, Homo sapien
cctagttagacacactggatttgga

SEQ ID NO: 474888 - DNA, 25 bp, Homo sapien
tggagacatcattggacaccaccat

SEQ ID NO: 474889 - DNA, 25 bp, Homo sapien
gaaaaagtccagctgcgtggagaca

SEQ ID NO: 474890 - DNA, 25 bp, Homo sapien
ccaaaagagcatccaagaaaaagtc

SEQ ID NO: 474891 - DNA, 25 bp, Homo sapien
gaaatctctgtggattcaatgtcaa

SEQ ID NO: 474892 - DNA, 25 bp, Homo sapien
tgccagcctcgctgctagggacaga

SEQ ID NO: 474893 - DNA, 25 bp, Homo sapien
ttcgccgcccgatgcagccttggct

SEQ ID NO: 474894 - DNA, 25 bp, Homo sapien
tgctagggacagattccattcccag

SEQ ID NO: 474895 - DNA, 25 bp, Homo sapien
cctgggtacactgccctcttcgccg

SEQ ID NO: 474896 - DNA, 25 bp, Homo sapien
cacggcctgaggagcgttctcctgg

SEQ ID NO: 474897 - DNA, 25 bp, Homo sapien
cctgaggagcgttctcctgggcgtc

SEQ ID NO: 474898 - DNA, 25 bp, Homo sapien
cccacggtcgggcacagacgcttca

SEQ ID NO: 474899 - DNA, 25 bp, Homo sapien
cagcagcacggcctgaggagcgttc

SEQ ID NO: 474900 - DNA, 25 bp, Homo sapien
cacatcctcaatgcagcgtgacctg

SEQ ID NO: 474901 - DNA, 25 bp, Homo sapien
gacggaggacgacaagataagcaca

SEQ ID NO: 474902 - DNA, 25 bp, Homo sapien
gaggcaaacggcgtctcctagcgct

SEQ ID NO: 474903 - DNA, 25 bp, Homo sapien
gccacaccaaggagtccccaccttg

SEQ ID NO: 474904 - DNA, 25 bp, Homo sapien
aaaagttgggctatagcaccaaatg

SEQ ID NO: 474905 - DNA, 25 bp, Homo sapien
ttttgaacagatccacgaagacccc

SEQ ID NO: 474906 - DNA, 25 bp, Homo sapien
tcatgatctcttttgaacagatcca

SEQ ID NO: 474907 - DNA, 25 bp, Homo sapien
ttgggctatagcaccaaatgtttca

SEQ ID NO: 474908 - DNA, 25 bp, Homo sapien
gtcacagggatgcgggcccaaacag

SEQ ID NO: 474909 - DNA, 25 bp, Homo sapien
agggatgcgggcccaaacagcatca

SEQ ID NO: 474910 - DNA, 25 bp, Homo sapien
ggatgcgggcccaaacagcatcacc

SEQ ID NO: 474911 - DNA, 25 bp, Homo sapien
acagggatgcgggcccaaacagcat

SEQ ID NO: 474912 - DNA, 25 bp, Homo sapien
tgtgagcagtatctgaaaccataac

SEQ ID NO: 474913 - DNA, 25 bp, Homo sapien
ggaacagtaccatgaacttcacact

SEQ ID NO: 474914 - DNA, 25 bp, Homo sapien
tatcgcataggacttgcctaggtca

SEQ ID NO: 474915 - DNA, 25 bp, Homo sapien
caagcttagcacatgaggcagggca

SEQ ID NO: 474916 - DNA, 25 bp, Homo sapien
gatattgacccgtgaaatggacttt

SEQ ID NO: 474917 - DNA, 25 bp, Homo sapien
ggcatctgactaggattctgatatt

SEQ ID NO: 474918 - DNA, 25 bp, Homo sapien
ggcaatttttgagaattccctgagc

SEQ ID NO: 474919 - DNA, 25 bp, Homo sapien
catgttcttactctagagcagtttg

SEQ ID NO: 474920 - DNA, 25 bp, Homo sapien
tggtgagcgcatagaggtgcagcaa

SEQ ID NO: 474921 - DNA, 25 bp, Homo sapien
actccacactttctcgagtcatttt

SEQ ID NO: 474922 - DNA, 25 bp, Homo sapien
tctgaggagctacattcagagttgg

SEQ ID NO: 474923 - DNA, 25 bp, Homo sapien
gttgggtcctgaacctctcactgct

SEQ ID NO: 474924 - DNA, 25 bp, Homo sapien
tgtatcttggccgaaacaatctccc

SEQ ID NO: 474925 - DNA, 25 bp, Homo sapien
tacagtcctcctatatgaataaaag

SEQ ID NO: 474926 - DNA, 25 bp, Homo sapien
ttggcagtcttagccgcctctgtaa

SEQ ID NO: 474927 - DNA, 25 bp, Homo sapien
tgtacttcggaggtcagctgcttgg

SEQ ID NO: 474928 - DNA, 25 bp, Homo sapien
tcttcttattcaagtgtgtctggaa

SEQ ID NO: 474929 - DNA, 25 bp, Homo sapien
taatagccttgcaatacaggcccct

SEQ ID NO: 474930 - DNA, 25 bp, Homo sapien
tcccccactgcgatgggggtcccaa

SEQ ID NO: 474931 - DNA, 25 bp, Homo sapien
ccccactgcgatgggggtcccaaga

SEQ ID NO: 474932 - DNA, 25 bp, Homo sapien
ccactgcgatgggggtcccaagagc

SEQ ID NO: 474933 - DNA, 25 bp, Homo sapien
cttgcgggggtgcctcccccactgc

SEQ ID NO: 474934 - DNA, 25 bp, Homo sapien
ttgtagtatcatttaccttttccat

SEQ ID NO: 474935 - DNA, 25 bp, Homo sapien
gaaggagagggctctatttgtagat

SEQ ID NO: 474936 - DNA, 25 bp, Homo sapien
tgtagatgtgctagcaaagtgcctg

SEQ ID NO: 474937 - DNA, 25 bp, Homo sapien
ttatgaaaggctggcgagctctaag

SEQ ID NO: 474938 - DNA, 25 bp, Homo sapien
tggcgagctctaagatgaaagagga

SEQ ID NO: 474939 - DNA, 25 bp, Homo sapien
ccaaatctttgttattgttgagcat

SEQ ID NO: 474940 - DNA, 25 bp, Homo sapien
attttccaaatctttgttattgttg

SEQ ID NO: 474941 - DNA, 25 bp, Homo sapien
tttccaaatctttgttattgttgag

SEQ ID NO: 474942 - DNA, 25 bp, Homo sapien
cttattttccaaatctttgttattg

SEQ ID NO: 474943 - DNA, 25 bp, Homo sapien
gctgttgggaattattaaagggctg

SEQ ID NO: 474944 - DNA, 25 bp, Homo sapien
tccagttggcacataacatctgttt

SEQ ID NO: 474945 - DNA, 25 bp, Homo sapien
ggtggtctacatatgcctgctagca

SEQ ID NO: 474946 - DNA, 25 bp, Homo sapien
taaagggctgaacacgaagcaaggc

SEQ ID NO: 474947 - DNA, 25 bp, Homo sapien
atgctaacctgagcataataatttc

SEQ ID NO: 474948 - DNA, 25 bp, Homo sapien
attttcttcactatgacaaagcctc

SEQ ID NO: 474949 - DNA, 25 bp, Homo sapien
ttttcttcactatgacaaagcctct

SEQ ID NO: 474950 - DNA, 25 bp, Homo sapien
tcatgctaacctgagcataataatt

SEQ ID NO: 474951 - DNA, 25 bp, Homo sapien
tcaacacaagttttctagacaactc

SEQ ID NO: 474952 - DNA, 25 bp, Homo sapien
aacacaagttttctagacaactctc

SEQ ID NO: 474953 - DNA, 25 bp, Homo sapien
caacacaagttttctagacaactct

SEQ ID NO: 474954 - DNA, 25 bp, Homo sapien
acacaagttttctagacaactctct

SEQ ID NO: 474955 - DNA, 25 bp, Homo sapien
gaaaaatattgtgtacaaaaagcag

SEQ ID NO: 474956 - DNA, 25 bp, Homo sapien
gattactcctttacagcatatgaac

SEQ ID NO: 474957 - DNA, 25 bp, Homo sapien
caatttacttaactttatgcttatc

SEQ ID NO: 474958 - DNA, 25 bp, Homo sapien
gcatatgaactttgctaaataagtc

SEQ ID NO: 474959 - DNA, 25 bp, Homo sapien
tataatttgtttaacgtctgagtgt

SEQ ID NO: 474960 - DNA, 25 bp, Homo sapien
ctatccatctgtagtaaatatctgc

SEQ ID NO: 474961 - DNA, 25 bp, Homo sapien
tatccatctgtagtaaatatctgca

SEQ ID NO: 474962 - DNA, 25 bp, Homo sapien
ttaacgtctgagtgtgaccttttat

SEQ ID NO: 474963 - DNA, 25 bp, Homo sapien
ccttgctccacttgtcagtctccgg

SEQ ID NO: 474964 - DNA, 25 bp, Homo sapien
tgccccttgctccacttgtcagtct

SEQ ID NO: 474965 - DNA, 25 bp, Homo sapien
cccactgccccttgctccacttgtc

SEQ ID NO: 474966 - DNA, 25 bp, Homo sapien
cactgccccttgctccacttgtcag

SEQ ID NO: 474967 - DNA, 25 bp, Homo sapien
tcaattctatcgtgatctccagtag

SEQ ID NO: 474968 - DNA, 25 bp, Homo sapien
taatcaggtcactaatgcacttaca

SEQ ID NO: 474969 - DNA, 25 bp, Homo sapien
tctggttgaggaagcaacgtcttgc

SEQ ID NO: 474970 - DNA, 25 bp, Homo sapien
tactaatgtgctcttctcaactctg

SEQ ID NO: 474971 - DNA, 25 bp, Homo sapien
tcagtaggctcattgaatacgagca

SEQ ID NO: 474972 - DNA, 25 bp, Homo sapien
aaagtcagtaggctcattgaatacg

SEQ ID NO: 474973 - DNA, 25 bp, Homo sapien
ttcatcaaagtcagtaggctcattg

SEQ ID NO: 474974 - DNA, 25 bp, Homo sapien
gtcttcatcaaagtcagtaggctca

SEQ ID NO: 474975 - DNA, 25 bp, Homo sapien
catagactttatctccctactctca

SEQ ID NO: 474976 - DNA, 25 bp, Homo sapien
agccttcatagactttatctcccta

SEQ ID NO: 474977 - DNA, 25 bp, Homo sapien
ttcatagactttatctccctactct

SEQ ID NO: 474978 - DNA, 25 bp, Homo sapien
tagactttatctccctactctcatc

SEQ ID NO: 474979 - DNA, 25 bp, Homo sapien
ccactactccaacttgtcttaattc

SEQ ID NO: 474980 - DNA, 25 bp, Homo sapien
tgcttgccaccttccactactccaa

SEQ ID NO: 474981 - DNA, 25 bp, Homo sapien
ttgcagtatatactgtgttcctcat

SEQ ID NO: 474982 - DNA, 25 bp, Homo sapien
gccaccttccactactccaacttgt

SEQ ID NO: 474983 - DNA, 25 bp, Homo sapien
cagctgagtgtggtaaatcctccag

SEQ ID NO: 474984 - DNA, 25 bp, Homo sapien
cctccagtaggagtatatgacactg

SEQ ID NO: 474985 - DNA, 25 bp, Homo sapien
tcagctgagtgtggtaaatcctcca

SEQ ID NO: 474986 - DNA, 25 bp, Homo sapien
ctgagtgtggtaaatcctccagtag

SEQ ID NO: 474987 - DNA, 25 bp, Homo sapien
aaattaaagtgggataacatatatt

SEQ ID NO: 474988 - DNA, 25 bp, Homo sapien
taaagtgggataacatatattaaaa

SEQ ID NO: 474989 - DNA, 25 bp, Homo sapien
aagtgggataacatatattaaaaat

SEQ ID NO: 474990 - DNA, 25 bp, Homo sapien
cattgcgcccagcctaataatagta

SEQ ID NO: 474991 - DNA, 25 bp, Homo sapien
tgtcatcaatcaagctattagcaaa

SEQ ID NO: 474992 - DNA, 25 bp, Homo sapien
tgaccatctgaatcccacagacttt

SEQ ID NO: 474993 - DNA, 25 bp, Homo sapien
ctgccttcctgtcatcaatcaagct

SEQ ID NO: 474994 - DNA, 25 bp, Homo sapien
cattgaccatctgaatcccacagac

SEQ ID NO: 474995 - DNA, 25 bp, Homo sapien
atcatgagtgaacttgccatttgat

SEQ ID NO: 474996 - DNA, 25 bp, Homo sapien
tcatgagtgaacttgccatttgatg

SEQ ID NO: 474997 - DNA, 25 bp, Homo sapien
acaattatgcttattgagtgatcta

SEQ ID NO: 474998 - DNA, 25 bp, Homo sapien
ctttaacaattatgcttattgagtg

SEQ ID NO: 474999 - DNA, 25 bp, Homo sapien
tgcttattgagtgatctatgtgcat

SEQ ID NO: 475000 - DNA, 25 bp, Homo sapien
ttatgcttattgagtgatctatgtg

SEQ ID NO: 475001 - DNA, 25 bp, Homo sapien
gttttatgggggcagttaatctcaa

SEQ ID NO: 475002 - DNA, 25 bp, Homo sapien
cagttaatctcaaagaaatggctga

SEQ ID NO: 475003 - DNA, 25 bp, Homo sapien
ctgagagaaactgcaccagattcat

SEQ ID NO: 475004 - DNA, 25 bp, Homo sapien
agaaatggctgagagaaactgcacc

SEQ ID NO: 475005 - DNA, 25 bp, Homo sapien
tggtgaggcccagggtggtagtggc

SEQ ID NO: 475006 - DNA, 25 bp, Homo sapien
cttgctgaagacaggaatacagggg

SEQ ID NO: 475007 - DNA, 25 bp, Homo sapien
ccaatccaaccatcaaaattaacat

SEQ ID NO: 475008 - DNA, 25 bp, Homo sapien
tccaaccatcaaaattaacatctgc

SEQ ID NO: 475009 - DNA, 25 bp, Homo sapien
gccaaaaataagagcctgggtattc

SEQ ID NO: 475010 - DNA, 25 bp, Homo sapien
gctcttgtattctactcttttcacg

SEQ ID NO: 475011 - DNA, 25 bp, Homo sapien
ctccagggaggcctaattttatctt

SEQ ID NO: 475012 - DNA, 25 bp, Homo sapien
taggaatgatagtgaccatctcccc

SEQ ID NO: 475013 - DNA, 25 bp, Homo sapien
ccctcatacagaacagtgccttgta

SEQ ID NO: 475014 - DNA, 25 bp, Homo sapien
aacagcacagtatctcccagctcat

SEQ ID NO: 475015 - DNA, 25 bp, Homo sapien
ctgccagccagttaagtccctcata

SEQ ID NO: 475016 - DNA, 25 bp, Homo sapien
gccttgtatagcacaagtggcttga

SEQ ID NO: 475017 - DNA, 25 bp, Homo sapien
atccattcatgtatctgggattttc

SEQ ID NO: 475018 - DNA, 25 bp, Homo sapien
aatccattcatgtatctgggatttt

SEQ ID NO: 475019 - DNA, 25 bp, Homo sapien
ccattcatgtatctgggattttcca

SEQ ID NO: 475020 - DNA, 25 bp, Homo sapien
tccattcatgtatctgggattttcc

SEQ ID NO: 475021 - DNA, 25 bp, Homo sapien
tgatgaaagcatatttttgcactgt

SEQ ID NO: 475022 - DNA, 25 bp, Homo sapien
ctgttgttaaatattacttctgttc

SEQ ID NO: 475023 - DNA, 25 bp, Homo sapien
tattacttctgttccatcttttatg

SEQ ID NO: 475024 - DNA, 25 bp, Homo sapien
ttttatgttcttgatgaaagcatat

SEQ ID NO: 475025 - DNA, 25 bp, Homo sapien
ttccaaaacgcaatagcagtaccat

SEQ ID NO: 475026 - DNA, 25 bp, Homo sapien
ctgtttttccaaaacgcaatagcag

SEQ ID NO: 475027 - DNA, 25 bp, Homo sapien
ttttccaaaacgcaatagcagtacc

SEQ ID NO: 475028 - DNA, 25 bp, Homo sapien
gtttttccaaaacgcaatagcagta

SEQ ID NO: 475029 - DNA, 25 bp, Homo sapien
caagatgaacgtactgtttctgact

SEQ ID NO: 475030 - DNA, 25 bp, Homo sapien
tatgttccaacccttaagctattaa

SEQ ID NO: 475031 - DNA, 25 bp, Homo sapien
tataagctggctcataaatttgttg

SEQ ID NO: 475032 - DNA, 25 bp, Homo sapien
aaatttgttgaaatctgtggacatc

SEQ ID NO: 475033 - DNA, 25 bp, Homo sapien
cagaggccggatgtttgcagttgct

SEQ ID NO: 475034 - DNA, 25 bp, Homo sapien
agaggccggatgtttgcagttgctg

SEQ ID NO: 475035 - DNA, 25 bp, Homo sapien
gaagtttgttcctatcaattggccc

SEQ ID NO: 475036 - DNA, 25 bp, Homo sapien
tcaattggccctttatacctctcac

SEQ ID NO: 475037 - DNA, 25 bp, Homo sapien
agtttgttcctatcaattggccctt

SEQ ID NO: 475038 - DNA, 25 bp, Homo sapien
tatcaattggccctttatacctctc

SEQ ID NO: 475039 - DNA, 25 bp, Homo sapien
ctttcctgggatgggaaagagccat

SEQ ID NO: 475040 - DNA, 25 bp, Homo sapien
attggcagttgttccgaaactgctg

SEQ ID NO: 475041 - DNA, 25 bp, Homo sapien
agttgttccgaaactgctgacaaga

SEQ ID NO: 475042 - DNA, 25 bp, Homo sapien
tccgaaactgctgacaagacatagt

SEQ ID NO: 475043 - DNA, 25 bp, Homo sapien
caagacatagtactatctcttcaat

SEQ ID NO: 475044 - DNA, 25 bp, Homo sapien
ttaagggaactcatcatcctgaagg

SEQ ID NO: 475045 - DNA, 25 bp, Homo sapien
gataatactggactcacccagggct

SEQ ID NO: 475046 - DNA, 25 bp, Homo sapien
tcctgaaggaaaggatagaagcctg

SEQ ID NO: 475047 - DNA, 25 bp, Homo sapien
agacttctaagctgtatcacttcag

SEQ ID NO: 475048 - DNA, 25 bp, Homo sapien
gactaagcagggagctaagaccact

SEQ ID NO: 475049 - DNA, 25 bp, Homo sapien
caagtatatactcagccacattggc

SEQ ID NO: 475050 - DNA, 25 bp, Homo sapien
tataaaacctagtgacagacgtgca

SEQ ID NO: 475051 - DNA, 25 bp, Homo sapien
gaaacagcacaagaatttgggcacc

SEQ ID NO: 475052 - DNA, 25 bp, Homo sapien
taggaattattcgtactgaatgtgt

SEQ ID NO: 475053 - DNA, 25 bp, Homo sapien
gtattcctattttctacgttctcaa

SEQ ID NO: 475054 - DNA, 25 bp, Homo sapien
tactgctaggttaacccagtttgaa

SEQ ID NO: 475055 - DNA, 25 bp, Homo sapien
aatgaatagcacactactgctaggt

SEQ ID NO: 475056 - DNA, 25 bp, Homo sapien
gtagtactcatcttttgatgtagac

SEQ ID NO: 475057 - DNA, 25 bp, Homo sapien
cctgtctctgcaaatccctcttgag

SEQ ID NO: 475058 - DNA, 25 bp, Homo sapien
tacctcagtcttagtactgtggagg

SEQ ID NO: 475059 - DNA, 25 bp, Homo sapien
agtcatctgcattgtagtactcatc

SEQ ID NO: 475060 - DNA, 25 bp, Homo sapien
acaatctctgtcagtctcttgctgc

SEQ ID NO: 475061 - DNA, 25 bp, Homo sapien
agacaatctctgtcagtctcttgct

SEQ ID NO: 475062 - DNA, 25 bp, Homo sapien
gaggagacctggcatccaacatccc

SEQ ID NO: 475063 - DNA, 25 bp, Homo sapien
catttaaatcatgggcattcacctg

SEQ ID NO: 475064 - DNA, 25 bp, Homo sapien
tattgcgctacctcggcacatagaa

SEQ ID NO: 475065 - DNA, 25 bp, Homo sapien
tgttccttcctcttagagacccatg

SEQ ID NO: 475066 - DNA, 25 bp, Homo sapien
catagaagatgctattgttccttcc

SEQ ID NO: 475067 - DNA, 25 bp, Homo sapien
gataaagatttctccgaagcaaatg

SEQ ID NO: 475068 - DNA, 25 bp, Homo sapien
cttttgatccacttgaacagagttc

SEQ ID NO: 475069 - DNA, 25 bp, Homo sapien
tggcttttgatccacttgaacagag

SEQ ID NO: 475070 - DNA, 25 bp, Homo sapien
gtgcctaattttgaccttgatggct

SEQ ID NO: 475071 - DNA, 25 bp, Homo sapien
ttttgaccttgatggcttttgatcc

SEQ ID NO: 475072 - DNA, 25 bp, Homo sapien
cccagatggactgaagaagcgaata

SEQ ID NO: 475073 - DNA, 25 bp, Homo sapien
caaaggctgtgatggctgtacaata

SEQ ID NO: 475074 - DNA, 25 bp, Homo sapien
tgtatcacagggatggagtccccaa

SEQ ID NO: 475075 - DNA, 25 bp, Homo sapien
cctgctttggtcatgtaagacgtgc

SEQ ID NO: 475076 - DNA, 25 bp, Homo sapien
aaatgcctgaaactggtaactgaag

SEQ ID NO: 475077 - DNA, 25 bp, Homo sapien
tcagacgcataggtaaatgcctgaa

SEQ ID NO: 475078 - DNA, 25 bp, Homo sapien
aactggtaactgaaggctatactgc

SEQ ID NO: 475079 - DNA, 25 bp, Homo sapien
ctgaaggctatactgctaacagctg

SEQ ID NO: 475080 - DNA, 25 bp, Homo sapien
taaggctgagttaaccatgtgggca

SEQ ID NO: 475081 - DNA, 25 bp, Homo sapien
cgtcctcagcttttgccagattgtg

SEQ ID NO: 475082 - DNA, 25 bp, Homo sapien
cccgtattttgtcgagttgctccag

SEQ ID NO: 475083 - DNA, 25 bp, Homo sapien
tgtaaccaccacacttgctagcttg

SEQ ID NO: 475084 - DNA, 25 bp, Homo sapien
attcatagtggaagagattttggca

SEQ ID NO: 475085 - DNA, 25 bp, Homo sapien
gaccacaattcatagtggaagagat

SEQ ID NO: 475086 - DNA, 25 bp, Homo sapien
tctgacaacttatagagattcactt

SEQ ID NO: 475087 - DNA, 25 bp, Homo sapien
atttctggatcaaagaccacaattc

SEQ ID NO: 475088 - DNA, 25 bp, Homo sapien
tattgtggacacatcaaaaattctg

SEQ ID NO: 475089 - DNA, 25 bp, Homo sapien
tgtctgtaagtgagacccattggta

SEQ ID NO: 475090 - DNA, 25 bp, Homo sapien
gaatcagtacaacagcggtagccaa

SEQ ID NO: 475091 - DNA, 25 bp, Homo sapien
ccaaatctaagaaatggcatgtcct

SEQ ID NO: 475092 - DNA, 25 bp, Homo sapien
tcttcatgattccatcattgtagat

SEQ ID NO: 475093 - DNA, 25 bp, Homo sapien
taatcattcacagtagtttctataa

SEQ ID NO: 475094 - DNA, 25 bp, Homo sapien
tttcaaggaatgaatctatgtctcc

SEQ ID NO: 475095 - DNA, 25 bp, Homo sapien
tacattgttaggacactgtaataaa

SEQ ID NO: 475096 - DNA, 25 bp, Homo sapien
ctaaattggatttgtttgtgtatcc

SEQ ID NO: 475097 - DNA, 25 bp, Homo sapien
gatttgtttgtgtatccaactccca

SEQ ID NO: 475098 - DNA, 25 bp, Homo sapien
taatggggagagtgctaaattggat

SEQ ID NO: 475099 - DNA, 25 bp, Homo sapien
aattggatttgtttgtgtatccaac

SEQ ID NO: 475100 - DNA, 25 bp, Homo sapien
gaaattgaggttcagatcttatttt

SEQ ID NO: 475101 - DNA, 25 bp, Homo sapien
atcagattgtgacttcccaatagaa

SEQ ID NO: 475102 - DNA, 25 bp, Homo sapien
cctgtatgaaattgaggttcagatc

SEQ ID NO: 475103 - DNA, 25 bp, Homo sapien
ttttaatcagattgtgacttcccaa

SEQ ID NO: 475104 - DNA, 25 bp, Homo sapien
tataggcaaagtctatcagagccct

SEQ ID NO: 475105 - DNA, 25 bp, Homo sapien
ttcaataatataggcaaagtctatc

SEQ ID NO: 475106 - DNA, 25 bp, Homo sapien
aggcaaagtctatcagagccctcat

SEQ ID NO: 475107 - DNA, 25 bp, Homo sapien
aataatataggcaaagtctatcaga

SEQ ID NO: 475108 - DNA, 25 bp, Homo sapien
tgtaaacgagacatcgcttgaaaag

SEQ ID NO: 475109 - DNA, 25 bp, Homo sapien
taaacgagacatcgcttgaaaaggc

SEQ ID NO: 475110 - DNA, 25 bp, Homo sapien
ctgcctgtaaacgagacatcgcttg

SEQ ID NO: 475111 - DNA, 25 bp, Homo sapien
cctgtaaacgagacatcgcttgaaa

SEQ ID NO: 475112 - DNA, 25 bp, Homo sapien
aaagtccattatgcactgtttggct

SEQ ID NO: 475113 - DNA, 25 bp, Homo sapien
cgaaagtccattatgcactgtttgg

SEQ ID NO: 475114 - DNA, 25 bp, Homo sapien
tcacgaaagtccattatgcactgtt

SEQ ID NO: 475115 - DNA, 25 bp, Homo sapien
gctttgattagcagggggcatttca

SEQ ID NO: 475116 - DNA, 25 bp, Homo sapien
agctaatgctgctaaagagaatagc

SEQ ID NO: 475117 - DNA, 25 bp, Homo sapien
ttagctaatgctgctaaagagaata

SEQ ID NO: 475118 - DNA, 25 bp, Homo sapien
tagctaatgctgctaaagagaatag

SEQ ID NO: 475119 - DNA, 25 bp, Homo sapien
agtaaaaaacctttcgatagagcat

SEQ ID NO: 475120 - DNA, 25 bp, Homo sapien
ctgtgtcaaaggtattctgggcagt

SEQ ID NO: 475121 - DNA, 25 bp, Homo sapien
tcaaaggtattctgggcagtttatc

SEQ ID NO: 475122 - DNA, 25 bp, Homo sapien
tagtaaaaaacctttcgatagagca

SEQ ID NO: 475123 - DNA, 25 bp, Homo sapien
gcacgtatgcttaaacagatggaca

SEQ ID NO: 475124 - DNA, 25 bp, Homo sapien
gtttagctgcctggcacgtatgctt

SEQ ID NO: 475125 - DNA, 25 bp, Homo sapien
gtcgttctgtaagtttagctgcctg

SEQ ID NO: 475126 - DNA, 25 bp, Homo sapien
gggcctgactggtcgttctgtaagt

SEQ ID NO: 475127 - DNA, 25 bp, Homo sapien
ggctgagaagtctcattatctgcca

SEQ ID NO: 475128 - DNA, 25 bp, Homo sapien
gaagtctcattatctgccacctgca

SEQ ID NO: 475129 - DNA, 25 bp, Homo sapien
agtctcattatctgccacctgcaag

SEQ ID NO: 475130 - DNA, 25 bp, Homo sapien
ctgagaagtctcattatctgccacc

SEQ ID NO: 475131 - DNA, 25 bp, Homo sapien
gaaatccaagtttaaaaagtcatca

SEQ ID NO: 475132 - DNA, 25 bp, Homo sapien
tgaaatccaagtttaaaaagtcatc

SEQ ID NO: 475133 - DNA, 25 bp, Homo sapien
tccaagtttaaaaagtcatcatacc

SEQ ID NO: 475134 - DNA, 25 bp, Homo sapien
aagtttaaaaagtcatcataccaca

SEQ ID NO: 475135 - DNA, 25 bp, Homo sapien
tttagtaggttagcctcactctgca

SEQ ID NO: 475136 - DNA, 25 bp, Homo sapien
ggaactccaaaatgccaatctctgt

SEQ ID NO: 475137 - DNA, 25 bp, Homo sapien
ctctgtgaattttagtaggttagcc

SEQ ID NO: 475138 - DNA, 25 bp, Homo sapien
tctgaacaactcctggtgttcgtgg

SEQ ID NO: 475139 - DNA, 25 bp, Homo sapien
tatatgtgctacagaggcaagtacc

SEQ ID NO: 475140 - DNA, 25 bp, Homo sapien
ttatttgaaggcgtcttctttgatc

SEQ ID NO: 475141 - DNA, 25 bp, Homo sapien
tatttgaaggcgtcttctttgatcc

SEQ ID NO: 475142 - DNA, 25 bp, Homo sapien
atttgaaggcgtcttctttgatcct

SEQ ID NO: 475143 - DNA, 25 bp, Homo sapien
ctaacgtttgggtccctgatcttca

SEQ ID NO: 475144 - DNA, 25 bp, Homo sapien
aacgtttgggtccctgatcttcatc

SEQ ID NO: 475145 - DNA, 25 bp, Homo sapien
tctaacgtttgggtccctgatcttc

SEQ ID NO: 475146 - DNA, 25 bp, Homo sapien
taacgtttgggtccctgatcttcat

SEQ ID NO: 475147 - DNA, 25 bp, Homo sapien
gctatgaaatcagccattccaatgg

SEQ ID NO: 475148 - DNA, 25 bp, Homo sapien
tcctgatacgtggaatagctcatac

SEQ ID NO: 475149 - DNA, 25 bp, Homo sapien
tttcagcttgtataacccatatgca

SEQ ID NO: 475150 - DNA, 25 bp, Homo sapien
cacacatgtggatcaaatgaaggta

SEQ ID NO: 475151 - DNA, 25 bp, Homo sapien
tagtagaagtggctcatcataaaag

SEQ ID NO: 475152 - DNA, 25 bp, Homo sapien
tattcatttagtagaagtggctcat

SEQ ID NO: 475153 - DNA, 25 bp, Homo sapien
tcataaaagtcttcattctcattat

SEQ ID NO: 475154 - DNA, 25 bp, Homo sapien
tttagtagaagtggctcatcataaa

SEQ ID NO: 475155 - DNA, 25 bp, Homo sapien
ttcctttaaaatgaactgcttatcc

SEQ ID NO: 475156 - DNA, 25 bp, Homo sapien
agtatcatatagttctctgctcttg

SEQ ID NO: 475157 - DNA, 25 bp, Homo sapien
cctttaaaatgaactgcttatccat

SEQ ID NO: 475158 - DNA, 25 bp, Homo sapien
ttctttagctttagtatcatatagt

SEQ ID NO: 475159 - DNA, 25 bp, Homo sapien
atggcttaaactccaggtggaggtt

SEQ ID NO: 475160 - DNA, 25 bp, Homo sapien
gggcgtagtggtggacatgtgtaat

SEQ ID NO: 475161 - DNA, 25 bp, Homo sapien
gagaatggcttaaactccaggtgga

SEQ ID NO: 475162 - DNA, 25 bp, Homo sapien
gcaggagaatggcttaaactccagg

SEQ ID NO: 475163 - DNA, 25 bp, Homo sapien
gctgaagttctagtctgtcactgac

SEQ ID NO: 475164 - DNA, 25 bp, Homo sapien
caatgaaggaatactgcaaacgttt

SEQ ID NO: 475165 - DNA, 25 bp, Homo sapien
tacagttgtcattttcggtagctgg

SEQ ID NO: 475166 - DNA, 25 bp, Homo sapien
gagccatgtggaagaataaagtacc

SEQ ID NO: 475167 - DNA, 25 bp, Homo sapien
gaaacaatgcggttgtactgtccat

SEQ ID NO: 475168 - DNA, 25 bp, Homo sapien
cagtggaaacaatgcggttgtactg

SEQ ID NO: 475169 - DNA, 25 bp, Homo sapien
tggaaacaatgcggttgtactgtcc

SEQ ID NO: 475170 - DNA, 25 bp, Homo sapien
agtggaaacaatgcggttgtactgt

SEQ ID NO: 475171 - DNA, 25 bp, Homo sapien
gtcatgcagagagtttgccgtttaa

SEQ ID NO: 475172 - DNA, 25 bp, Homo sapien
ctctccagtcatgcagagagtttgc

SEQ ID NO: 475173 - DNA, 25 bp, Homo sapien
tccagtcatgcagagagtttgccgt

SEQ ID NO: 475174 - DNA, 25 bp, Homo sapien
tggccctttaccctctccagtcatg

SEQ ID NO: 475175 - DNA, 25 bp, Homo sapien
gtggcagatgtggtgcttgtaaaac

SEQ ID NO: 475176 - DNA, 25 bp, Homo sapien
ggcagatgtggtgcttgtaaaactg

SEQ ID NO: 475177 - DNA, 25 bp, Homo sapien
tgtgtggcagatgtggtgcttgtaa

SEQ ID NO: 475178 - DNA, 25 bp, Homo sapien
agatgtggtgcttgtaaaactgctc

SEQ ID NO: 475179 - DNA, 25 bp, Homo sapien
gaaagcccttagcagatgtgggccc

SEQ ID NO: 475180 - DNA, 25 bp, Homo sapien
catgggatgacacggcatgaaagcc

SEQ ID NO: 475181 - DNA, 25 bp, Homo sapien
tgtctttcctcatgggatgacacgg

SEQ ID NO: 475182 - DNA, 25 bp, Homo sapien
gatgacacggcatgaaagcccttag

SEQ ID NO: 475183 - DNA, 25 bp, Homo sapien
aaaggttaaccttatctgccaaatg

SEQ ID NO: 475184 - DNA, 25 bp, Homo sapien
gccttgtaataaaagaactgtttgc

SEQ ID NO: 475185 - DNA, 25 bp, Homo sapien
ggttaaccttatctgccaaatgagt

SEQ ID NO: 475186 - DNA, 25 bp, Homo sapien
tgtttgcatttgcagagaacaggat

SEQ ID NO: 475187 - DNA, 25 bp, Homo sapien
gaaacctagaagttcatatagtgtc

SEQ ID NO: 475188 - DNA, 25 bp, Homo sapien
ctgaaaggcgggaagatcctagaat

SEQ ID NO: 475189 - DNA, 25 bp, Homo sapien
atttgtatctagatgtgtcactttt

SEQ ID NO: 475190 - DNA, 25 bp, Homo sapien
catatagtgtcaaagtggaaaagca

SEQ ID NO: 475191 - DNA, 25 bp, Homo sapien
caccttgcaattcgataattgctta

SEQ ID NO: 475192 - DNA, 25 bp, Homo sapien
cattactactggacagagtttaata

SEQ ID NO: 475193 - DNA, 25 bp, Homo sapien
tgtcagcatagctccacattactac

SEQ ID NO: 475194 - DNA, 25 bp, Homo sapien
taattgcttaagtggccgcttgtca

SEQ ID NO: 475195 - DNA, 25 bp, Homo sapien
caaatcaccacaattgttgttcccc

SEQ ID NO: 475196 - DNA, 25 bp, Homo sapien
tcaccacaattgttgttcccccagg

SEQ ID NO: 475197 - DNA, 25 bp, Homo sapien
aatcaccacaattgttgttccccca

SEQ ID NO: 475198 - DNA, 25 bp, Homo sapien
caccacaattgttgttcccccaggg

SEQ ID NO: 475199 - DNA, 25 bp, Homo sapien
aattcccatctttgataactctgtg

SEQ ID NO: 475200 - DNA, 25 bp, Homo sapien
tacccaagctcagatcaaagtgatg

SEQ ID NO: 475201 - DNA, 25 bp, Homo sapien
ctctcctctatgccatttaggttac

SEQ ID NO: 475202 - DNA, 25 bp, Homo sapien
ccatttaggttacccaagctcagat

SEQ ID NO: 475203 - DNA, 25 bp, Homo sapien
tctggtgagatcatgtatggtaccg

SEQ ID NO: 475204 - DNA, 25 bp, Homo sapien
gatcattttgagtctgtgtggtgca

SEQ ID NO: 475205 - DNA, 25 bp, Homo sapien
atttgttggctcatctagctggaca

SEQ ID NO: 475206 - DNA, 25 bp, Homo sapien
tatggtaccgtaagaatcccagctt

SEQ ID NO: 475207 - DNA, 25 bp, Homo sapien
tgaagttctgaaaccacctggtctt

SEQ ID NO: 475208 - DNA, 25 bp, Homo sapien
tatgaagttctgaaaccacctggtc

SEQ ID NO: 475209 - DNA, 25 bp, Homo sapien
atgaagttctgaaaccacctggtct

SEQ ID NO: 475210 - DNA, 25 bp, Homo sapien
gctatcatccgtgctgtgcccagga

SEQ ID NO: 475211 - DNA, 25 bp, Homo sapien
cctgtatgcctgtaaacacttggca

SEQ ID NO: 475212 - DNA, 25 bp, Homo sapien
tgcccaggatggttgcaccgcttgt

SEQ ID NO: 475213 - DNA, 25 bp, Homo sapien
gcctggcaagaattttactggtgta

SEQ ID NO: 475214 - DNA, 25 bp, Homo sapien
ccttcttcgagaataagctggctgc

SEQ ID NO: 475215 - DNA, 25 bp, Homo sapien
gactaactgagagcataaatgggct

SEQ ID NO: 475216 - DNA, 25 bp, Homo sapien
agctggctgctggactcattcttga

SEQ ID NO: 475217 - DNA, 25 bp, Homo sapien
ggtgttggcccatattaacagctac

SEQ ID NO: 475218 - DNA, 25 bp, Homo sapien
gctgtggccaatagcttagctgtat

SEQ ID NO: 475219 - DNA, 25 bp, Homo sapien
gagtagacaatccatgactggcatt

SEQ ID NO: 475220 - DNA, 25 bp, Homo sapien
cattgctggtatctgcaccatgtgg

SEQ ID NO: 475221 - DNA, 25 bp, Homo sapien
tatggtctagtagctgagtggcctc

SEQ ID NO: 475222 - DNA, 25 bp, Homo sapien
tagaatgagcaccaaacttgatgtc

SEQ ID NO: 475223 - DNA, 25 bp, Homo sapien
tgtaagtaatttgccgtagaaacat

SEQ ID NO: 475224 - DNA, 25 bp, Homo sapien
taacatggctgaattattagttctc

SEQ ID NO: 475225 - DNA, 25 bp, Homo sapien
caaaatcttgtgtatttagttcaat

SEQ ID NO: 475226 - DNA, 25 bp, Homo sapien
tccttgttgatataacagtgcctac

SEQ ID NO: 475227 - DNA, 25 bp, Homo sapien
ggattctttccttgttgatataaca

SEQ ID NO: 475228 - DNA, 25 bp, Homo sapien
tcaggattctttccttgttgatata

SEQ ID NO: 475229 - DNA, 25 bp, Homo sapien
tctttccttgttgatataacagtgc

SEQ ID NO: 475230 - DNA, 25 bp, Homo sapien
agcattcactgtggcctgtttagta

SEQ ID NO: 475231 - DNA, 25 bp, Homo sapien
tataaaagtgtgactcatgctactg

SEQ ID NO: 475232 - DNA, 25 bp, Homo sapien
gaggatgtgaaagaatcactcaact

SEQ ID NO: 475233 - DNA, 25 bp, Homo sapien
cactgtggcctgtttagtagattca

SEQ ID NO: 475234 - DNA, 25 bp, Homo sapien
tggaacttggtgaaggccatgaatg

SEQ ID NO: 475235 - DNA, 25 bp, Homo sapien
acttggtgaaggccatgaatggatg

SEQ ID NO: 475236 - DNA, 25 bp, Homo sapien
gaacttggtgaaggccatgaatgga

SEQ ID NO: 475237 - DNA, 25 bp, Homo sapien
ctggaacttggtgaaggccatgaat

SEQ ID NO: 475238 - DNA, 25 bp, Homo sapien
catgttaagggtaaggtctgattcc

SEQ ID NO: 475239 - DNA, 25 bp, Homo sapien
ctgccatgttaagggtaaggtctga

SEQ ID NO: 475240 - DNA, 25 bp, Homo sapien
gccatgttaagggtaaggtctgatt

SEQ ID NO: 475241 - DNA, 25 bp, Homo sapien
tctgccatgttaagggtaaggtctg

SEQ ID NO: 475242 - DNA, 25 bp, Homo sapien
gcttccttcctatgcgtacttttgc

SEQ ID NO: 475243 - DNA, 25 bp, Homo sapien
gctttactctgggaatctgttttga

SEQ ID NO: 475244 - DNA, 25 bp, Homo sapien
cttcctatgcgtacttttgctttac

SEQ ID NO: 475245 - DNA, 25 bp, Homo sapien
gaagcaatgagtacaacagtaatga

SEQ ID NO: 475246 - DNA, 25 bp, Homo sapien
ggatgagaaacgtatactcactctt

SEQ ID NO: 475247 - DNA, 25 bp, Homo sapien
taaggtagtagaggaagatctccaa

SEQ ID NO: 475248 - DNA, 25 bp, Homo sapien
aaattcatcaggatacgtcaggatg

SEQ ID NO: 475249 - DNA, 25 bp, Homo sapien
tttccccaccatataaggtagtaga

SEQ ID NO: 475250 - DNA, 25 bp, Homo sapien
caatataagggttttgaccatggga

SEQ ID NO: 475251 - DNA, 25 bp, Homo sapien
gaggtacgtttgagcatcatctgcc

SEQ ID NO: 475252 - DNA, 25 bp, Homo sapien
gctatttatagtgaggcctgtgaca

SEQ ID NO: 475253 - DNA, 25 bp, Homo sapien
tctggaacttgaggccctgaggctt

SEQ ID NO: 475254 - DNA, 25 bp, Homo sapien
tgtaattgcttttgacctaccttga

SEQ ID NO: 475255 - DNA, 25 bp, Homo sapien
gatggtctgcattgtagtctgtgtc

SEQ ID NO: 475256 - DNA, 25 bp, Homo sapien
tggtgctggcctaaagatctagaac

SEQ ID NO: 475257 - DNA, 25 bp, Homo sapien
tatatcacttagcatttgtagatgg

SEQ ID NO: 475258 - DNA, 25 bp, Homo sapien
agacaacatctgaatcttgattttt

SEQ ID NO: 475259 - DNA, 25 bp, Homo sapien
gagacaacatctgaatcttgatttt

SEQ ID NO: 475260 - DNA, 25 bp, Homo sapien
ggcatgagcttgcttattaactgaa

SEQ ID NO: 475261 - DNA, 25 bp, Homo sapien
aagctatcatactaaatgctccttc

SEQ ID NO: 475262 - DNA, 25 bp, Homo sapien
ataggcatgagcttgcttattaact

SEQ ID NO: 475263 - DNA, 25 bp, Homo sapien
gcagaaaaagctatcatactaaatg

SEQ ID NO: 475264 - DNA, 25 bp, Homo sapien
cggcgagcaaggaggaacaatgcaa

SEQ ID NO: 475265 - DNA, 25 bp, Homo sapien
ggcgagcaaggaggaacaatgcaaa

SEQ ID NO: 475266 - DNA, 25 bp, Homo sapien
tggcgtctacggctgcgtctgacat

SEQ ID NO: 475267 - DNA, 25 bp, Homo sapien
tgatttcggagctggcgtctacggc

SEQ ID NO: 475268 - DNA, 25 bp, Homo sapien
ccttgatggtgatttcggagctggc

SEQ ID NO: 475269 - DNA, 25 bp, Homo sapien
ctttaagtccttgatggtgatttcg

SEQ ID NO: 475270 - DNA, 25 bp, Homo sapien
attagcattcccgttagcaggggcg

SEQ ID NO: 475271 - DNA, 25 bp, Homo sapien
attttctgcctcttccacaacttcc

SEQ ID NO: 475272 - DNA, 25 bp, Homo sapien
cattcccgttagcaggggcgtctct

SEQ ID NO: 475273 - DNA, 25 bp, Homo sapien
ttttcctcattagcattcccgttag

SEQ ID NO: 475274 - DNA, 25 bp, Homo sapien
ccgcttgcccgtaggtgactcagct

SEQ ID NO: 475275 - DNA, 25 bp, Homo sapien
gcccgcttgcccgtaggtgactcag

SEQ ID NO: 475276 - DNA, 25 bp, Homo sapien
ctgcccgcttgcccgtaggtgactc

SEQ ID NO: 475277 - DNA, 25 bp, Homo sapien
gcttgcccgtaggtgactcagcttc

SEQ ID NO: 475278 - DNA, 25 bp, Homo sapien
atcctcgtcggtcttctgcttcttg

SEQ ID NO: 475279 - DNA, 25 bp, Homo sapien
ctagtcatcctcgtcggtcttctgc

SEQ ID NO: 475280 - DNA, 25 bp, Homo sapien
tcatcctcgtcggtcttctgcttct

SEQ ID NO: 475281 - DNA, 25 bp, Homo sapien
agtcatcctcgtcggtcttctgctt

SEQ ID NO: 475282 - DNA, 25 bp, Homo sapien
gacagaacgctcccaaggctggttt

SEQ ID NO: 475283 - DNA, 25 bp, Homo sapien
ctttcatcttcatgattgaaaatgt

SEQ ID NO: 475284 - DNA, 25 bp, Homo sapien
tgattgaaaatgtctactaaacctt

SEQ ID NO: 475285 - DNA, 25 bp, Homo sapien
tgtctactaaacctttaatgggata

SEQ ID NO: 475286 - DNA, 25 bp, Homo sapien
cttcatgattgaaaatgtctactaa

SEQ ID NO: 475287 - DNA, 25 bp, Homo sapien
tcttttctcgctgtattcttcaaca

SEQ ID NO: 475288 - DNA, 25 bp, Homo sapien
ctcttttctcgctgtattcttcaac

SEQ ID NO: 475289 - DNA, 25 bp, Homo sapien
gtatcttctgtgtcacacctctcaa

SEQ ID NO: 475290 - DNA, 25 bp, Homo sapien
tccatagttaccttcacatatctcc

SEQ ID NO: 475291 - DNA, 25 bp, Homo sapien
catcacaatagagttattggaaggg

SEQ ID NO: 475292 - DNA, 25 bp, Homo sapien
aaatgcaaaagtctggtgggagatc

SEQ ID NO: 475293 - DNA, 25 bp, Homo sapien
ttacagtaagtggttccatatgatc

SEQ ID NO: 475294 - DNA, 25 bp, Homo sapien
gcataggcactagaaaggcttgaaa

SEQ ID NO: 475295 - DNA, 25 bp, Homo sapien
ctttagcataggcactagaaaggct

SEQ ID NO: 475296 - DNA, 25 bp, Homo sapien
ttagcataggcactagaaaggcttg

SEQ ID NO: 475297 - DNA, 25 bp, Homo sapien
tagcataggcactagaaaggcttga

SEQ ID NO: 475298 - DNA, 25 bp, Homo sapien
atattaaaatctatagcccagaatg

SEQ ID NO: 475299 - DNA, 25 bp, Homo sapien
tccataattgtcttggttatagatg

SEQ ID NO: 475300 - DNA, 25 bp, Homo sapien
gtccgtattgatatcgagttgcata

SEQ ID NO: 475301 - DNA, 25 bp, Homo sapien
tatttctgatggtccgtattgatat

SEQ ID NO: 475302 - DNA, 25 bp, Homo sapien
tctgagactagacgactggacttac

SEQ ID NO: 475303 - DNA, 25 bp, Homo sapien
tactgacactgatggagatctccag

SEQ ID NO: 475304 - DNA, 25 bp, Homo sapien
gctgagcaaaaccacctgacttagg

SEQ ID NO: 475305 - DNA, 25 bp, Homo sapien
tgtgtttgtcgtaagccctctaagc

SEQ ID NO: 475306 - DNA, 25 bp, Homo sapien
ttgagttctaagtaggtcactctgc

SEQ ID NO: 475307 - DNA, 25 bp, Homo sapien
tctaagtaggtcactctgccaaagg

SEQ ID NO: 475308 - DNA, 25 bp, Homo sapien
gagttctaagtaggtcactctgcca

SEQ ID NO: 475309 - DNA, 25 bp, Homo sapien
taacttgagttctaagtaggtcact

SEQ ID NO: 475310 - DNA, 25 bp, Homo sapien
ttaggttgcttgagatgcacacaca

SEQ ID NO: 475311 - DNA, 25 bp, Homo sapien
agcaagcaccactaacctgaaaccg

SEQ ID NO: 475312 - DNA, 25 bp, Homo sapien
gaaaaacaagcctgcgtccagggga

SEQ ID NO: 475313 - DNA, 25 bp, Homo sapien
tagggtcatgcttgtcatgaagaaa

SEQ ID NO: 475314 - DNA, 25 bp, Homo sapien
aaagttgtagagaaagtgttccaga

SEQ ID NO: 475315 - DNA, 25 bp, Homo sapien
agtgttccagaagagtccactgaat

SEQ ID NO: 475316 - DNA, 25 bp, Homo sapien
gagaaagtgttccagaagagtccac

SEQ ID NO: 475317 - DNA, 25 bp, Homo sapien
agttgtagagaaagtgttccagaag

SEQ ID NO: 475318 - DNA, 25 bp, Homo sapien
aaggcacacaatccactactggaaa

SEQ ID NO: 475319 - DNA, 25 bp, Homo sapien
taaggcacacaatccactactggaa

SEQ ID NO: 475320 - DNA, 25 bp, Homo sapien
ttaaggcacacaatccactactgga

SEQ ID NO: 475321 - DNA, 25 bp, Homo sapien
ggcacacaatccactactggaaaat

SEQ ID NO: 475322 - DNA, 25 bp, Homo sapien
tcctgagtatctttgggatagacat

SEQ ID NO: 475323 - DNA, 25 bp, Homo sapien
tttagaaactgtcttctttcctctc

SEQ ID NO: 475324 - DNA, 25 bp, Homo sapien
taccgatacctttctccagatgcac

SEQ ID NO: 475325 - DNA, 25 bp, Homo sapien
gtgagcaggaaggataccgatacct

SEQ ID NO: 475326 - DNA, 25 bp, Homo sapien
gaagtagacaggactttgagttgtc

SEQ ID NO: 475327 - DNA, 25 bp, Homo sapien
aggaagtagacaggactttgagttg

SEQ ID NO: 475328 - DNA, 25 bp, Homo sapien
tagacaggactttgagttgtcttct

SEQ ID NO: 475329 - DNA, 25 bp, Homo sapien
aagtagacaggactttgagttgtct

SEQ ID NO: 475330 - DNA, 25 bp, Homo sapien
aatcttaaagactttctctgagaaa

SEQ ID NO: 475331 - DNA, 25 bp, Homo sapien
tggtaaatcttaaagactttctctg

SEQ ID NO: 475332 - DNA, 25 bp, Homo sapien
taaatcttaaagactttctctgaga

SEQ ID NO: 475333 - DNA, 25 bp, Homo sapien
tcttaaagactttctctgagaaatc

SEQ ID NO: 475334 - DNA, 25 bp, Homo sapien
caccaagtatcctaggcaggtctgc

SEQ ID NO: 475335 - DNA, 25 bp, Homo sapien
caagtatcctaggcaggtctgcatt

SEQ ID NO: 475336 - DNA, 25 bp, Homo sapien
aacaccaagtatcctaggcaggtct

SEQ ID NO: 475337 - DNA, 25 bp, Homo sapien
ccaagtatcctaggcaggtctgcat

SEQ ID NO: 475338 - DNA, 25 bp, Homo sapien
tggtgtctgagacatagtgcagcca

SEQ ID NO: 475339 - DNA, 25 bp, Homo sapien
tgaaacagctcatcatggtgaggat

SEQ ID NO: 475340 - DNA, 25 bp, Homo sapien
aagtggccacagcttgggtgtcggg

SEQ ID NO: 475341 - DNA, 25 bp, Homo sapien
catcatggtgaggattctggtgtct

SEQ ID NO: 475342 - DNA, 25 bp, Homo sapien
cattgaagttgtaattgaacatcac

SEQ ID NO: 475343 - DNA, 25 bp, Homo sapien
aatatgacctacaaatctttcataa

SEQ ID NO: 475344 - DNA, 25 bp, Homo sapien
tgaacatcacattcttaatatgacc

SEQ ID NO: 475345 - DNA, 25 bp, Homo sapien
tgctctccaactccttgtgagtcat

SEQ ID NO: 475346 - DNA, 25 bp, Homo sapien
cttacatcaactatcacttcttcat

SEQ ID NO: 475347 - DNA, 25 bp, Homo sapien
tcttctatcgtaggggatagtccca

SEQ ID NO: 475348 - DNA, 25 bp, Homo sapien
tacatcaactatcacttcttcatgt

SEQ ID NO: 475349 - DNA, 25 bp, Homo sapien
tcttcatgttcttctatcgtagggg

SEQ ID NO: 475350 - DNA, 25 bp, Homo sapien
acaaatgcctatgccttgcaaggta

SEQ ID NO: 475351 - DNA, 25 bp, Homo sapien
ggtaataggaacttcttctagatct

SEQ ID NO: 475352 - DNA, 25 bp, Homo sapien
atctttctaaaccatacattctcgg

SEQ ID NO: 475353 - DNA, 25 bp, Homo sapien
catacattctcggataagtaaccca

SEQ ID NO: 475354 - DNA, 25 bp, Homo sapien
gccaaagaatgcaggtatccaacta

SEQ ID NO: 475355 - DNA, 25 bp, Homo sapien
tctggcttccagaatcataagagac

SEQ ID NO: 475356 - DNA, 25 bp, Homo sapien
gtatccaactagaagtagaaagagc

SEQ ID NO: 475357 - DNA, 25 bp, Homo sapien
gaaagagcatggaaactaattctct

SEQ ID NO: 475358 - DNA, 25 bp, Homo sapien
ggcatcccgtgggatggattgaaac

SEQ ID NO: 475359 - DNA, 25 bp, Homo sapien
ccgtgggatggattgaaacagctga

SEQ ID NO: 475360 - DNA, 25 bp, Homo sapien
ctgaatgggcatcccgtgggatgga

SEQ ID NO: 475361 - DNA, 25 bp, Homo sapien
tggattgaaacagctgattggttca

SEQ ID NO: 475362 - DNA, 25 bp, Homo sapien
ctttaatactgtccgacacagtggc

SEQ ID NO: 475363 - DNA, 25 bp, Homo sapien
catcacaaaggggagactcaaagca

SEQ ID NO: 475364 - DNA, 25 bp, Homo sapien
tgtaagacacaaacaagaaaggtag

SEQ ID NO: 475365 - DNA, 25 bp, Homo sapien
gactcaaagcatagatgtaagacac

SEQ ID NO: 475366 - DNA, 25 bp, Homo sapien
cttccattggcaaacactctgcttt

SEQ ID NO: 475367 - DNA, 25 bp, Homo sapien
ttccattggcaaacactctgctttt

SEQ ID NO: 475368 - DNA, 25 bp, Homo sapien
tccattggcaaacactctgcttttc

SEQ ID NO: 475369 - DNA, 25 bp, Homo sapien
catattgactctcaggaagcggcca

SEQ ID NO: 475370 - DNA, 25 bp, Homo sapien
cagtagacgataaaacttcaagtgc

SEQ ID NO: 475371 - DNA, 25 bp, Homo sapien
aaagagctggttgactgttaggatc

SEQ ID NO: 475372 - DNA, 25 bp, Homo sapien
tcaagtgcttcccactttcattggt

SEQ ID NO: 475373 - DNA, 25 bp, Homo sapien
tgtttctcttgtaagtttggaggcc

SEQ ID NO: 475374 - DNA, 25 bp, Homo sapien
tctcagtgaaagtgcaaattaatag

SEQ ID NO: 475375 - DNA, 25 bp, Homo sapien
tgcaaattaatagaaggtcatacat

SEQ ID NO: 475376 - DNA, 25 bp, Homo sapien
tgtaagtttggaggccggataattc

SEQ ID NO: 475377 - DNA, 25 bp, Homo sapien
ttagtagagtgtaagacgataaaca

SEQ ID NO: 475378 - DNA, 25 bp, Homo sapien
gacaaatagtttttgctagtttgtg

SEQ ID NO: 475379 - DNA, 25 bp, Homo sapien
gagtgtaagacgataaacaggtatt

SEQ ID NO: 475380 - DNA, 25 bp, Homo sapien
ggtatttcatcatcggacaaatagt

SEQ ID NO: 475381 - DNA, 25 bp, Homo sapien
tgtaaattgctgtgacttttttaaa

SEQ ID NO: 475382 - DNA, 25 bp, Homo sapien
ctgtaaattgctgtgacttttttaa

SEQ ID NO: 475383 - DNA, 25 bp, Homo sapien
aacaaatatattgttgtgctgagaa

SEQ ID NO: 475384 - DNA, 25 bp, Homo sapien
ctgaagttcaccataagttttattg

SEQ ID NO: 475385 - DNA, 25 bp, Homo sapien
gagaatactttgtctgaagttcacc

SEQ ID NO: 475386 - DNA, 25 bp, Homo sapien
gtgctgagaatactttgtctgaagt

SEQ ID NO: 475387 - DNA, 25 bp, Homo sapien
tcccagctttactgatgcaaaaggc

SEQ ID NO: 475388 - DNA, 25 bp, Homo sapien
ccagctttactgatgcaaaaggcct

SEQ ID NO: 475389 - DNA, 25 bp, Homo sapien
agctttactgatgcaaaaggccttc

SEQ ID NO: 475390 - DNA, 25 bp, Homo sapien
cccagctttactgatgcaaaaggcc

SEQ ID NO: 475391 - DNA, 25 bp, Homo sapien
ctggttgtcgagcttgctcaatttt

SEQ ID NO: 475392 - DNA, 25 bp, Homo sapien
acaattctggttgtcgagcttgctc

SEQ ID NO: 475393 - DNA, 25 bp, Homo sapien
aagtctgacccacaattctggttgt

SEQ ID NO: 475394 - DNA, 25 bp, Homo sapien
gacccacaattctggttgtcgagct

SEQ ID NO: 475395 - DNA, 25 bp, Homo sapien
atcattggtacagctcccatagctt

SEQ ID NO: 475396 - DNA, 25 bp, Homo sapien
tcctttttccacatagtgctctcca

SEQ ID NO: 475397 - DNA, 25 bp, Homo sapien
cctttttccacatagtgctctccac

SEQ ID NO: 475398 - DNA, 25 bp, Homo sapien
tcattggtacagctcccatagcttc

SEQ ID NO: 475399 - DNA, 25 bp, Homo sapien
tggaccacagaaaatccaaatattt

SEQ ID NO: 475400 - DNA, 25 bp, Homo sapien
cacctccttcaatttatttgcagtt

SEQ ID NO: 475401 - DNA, 25 bp, Homo sapien
ccaaatatttttgccacctccttca

SEQ ID NO: 475402 - DNA, 25 bp, Homo sapien
ttggaccacagaaaatccaaatatt

SEQ ID NO: 475403 - DNA, 25 bp, Homo sapien
gataccatataaggcaatacattgc

SEQ ID NO: 475404 - DNA, 25 bp, Homo sapien
gatgtcaaaattataattacttgct

SEQ ID NO: 475405 - DNA, 25 bp, Homo sapien
taagaatcttaacgtatatacccag

SEQ ID NO: 475406 - DNA, 25 bp, Homo sapien
tatatatcatggttagatgtcaaaa

SEQ ID NO: 475407 - DNA, 25 bp, Homo sapien
aatatcccttctcttgtaacaagtg

SEQ ID NO: 475408 - DNA, 25 bp, Homo sapien
catcttaacctctctatttgggcca

SEQ ID NO: 475409 - DNA, 25 bp, Homo sapien
ggactataatctcattgacggcagc

SEQ ID NO: 475410 - DNA, 25 bp, Homo sapien
tatagcacctcattgaaagttctca

SEQ ID NO: 475411 - DNA, 25 bp, Homo sapien
cattgatccttctatttccagtata

SEQ ID NO: 475412 - DNA, 25 bp, Homo sapien
catactgtgtggaaatatgtaacaa

SEQ ID NO: 475413 - DNA, 25 bp, Homo sapien
gaaataagtgtggattttgcacgag

SEQ ID NO: 475414 - DNA, 25 bp, Homo sapien
tactaatatgtttagctacttcaat

SEQ ID NO: 475415 - DNA, 25 bp, Homo sapien
tgtgcttgagcaaaactgttatttc

SEQ ID NO: 475416 - DNA, 25 bp, Homo sapien
gtgcttgagcaaaactgttatttcc

SEQ ID NO: 475417 - DNA, 25 bp, Homo sapien
ctgtgcttgagcaaaactgttattt

SEQ ID NO: 475418 - DNA, 25 bp, Homo sapien
gcttgagcaaaactgttatttccac

SEQ ID NO: 475419 - DNA, 25 bp, Homo sapien
caaatgcagcaatattgtttatcat

SEQ ID NO: 475420 - DNA, 25 bp, Homo sapien
ctttttggcctcaacaaggccattt

SEQ ID NO: 475421 - DNA, 25 bp, Homo sapien
cctttttggcctcaacaaggccatt

SEQ ID NO: 475422 - DNA, 25 bp, Homo sapien
tcatcctgaaaacgctgggtgcaag

SEQ ID NO: 475423 - DNA, 25 bp, Homo sapien
tcctttaactacatttgctatttta

SEQ ID NO: 475424 - DNA, 25 bp, Homo sapien
aaaacgctgggtgcaagatatttta

SEQ ID NO: 475425 - DNA, 25 bp, Homo sapien
aagctcatcctgaaaacgctgggtg

SEQ ID NO: 475426 - DNA, 25 bp, Homo sapien
taggattatgagaaactcctgaaga

SEQ ID NO: 475427 - DNA, 25 bp, Homo sapien
gattatgagaaactcctgaagagat

SEQ ID NO: 475428 - DNA, 25 bp, Homo sapien
ggattatgagaaactcctgaagaga

SEQ ID NO: 475429 - DNA, 25 bp, Homo sapien
cataggattatgagaaactcctgaa

SEQ ID NO: 475430 - DNA, 25 bp, Homo sapien
tggtgaatacgaccaggcttctggt

SEQ ID NO: 475431 - DNA, 25 bp, Homo sapien
cagctgcgggttggtggctcagaga

SEQ ID NO: 475432 - DNA, 25 bp, Homo sapien
taggcatagtttgtggtcaatgtca

SEQ ID NO: 475433 - DNA, 25 bp, Homo sapien
acttgcggggtggtgaatacgacca

SEQ ID NO: 475434 - DNA, 25 bp, Homo sapien
gtggagctttgccagcgtggcatcc

SEQ ID NO: 475435 - DNA, 25 bp, Homo sapien
caaagattccggaattggagcagtt

SEQ ID NO: 475436 - DNA, 25 bp, Homo sapien
gaattggagcagttaggccaccctt

SEQ ID NO: 475437 - DNA, 25 bp, Homo sapien
tgataaacaaagattccggaattgg

SEQ ID NO: 475438 - DNA, 25 bp, Homo sapien
ttaggccacccttagtctggtgctg

SEQ ID NO: 475439 - DNA, 25 bp, Homo sapien
taagatgcaacagctgattatatgt

SEQ ID NO: 475440 - DNA, 25 bp, Homo sapien
cttgcacagaagtaagatgcaacag

SEQ ID NO: 475441 - DNA, 25 bp, Homo sapien
gaagtaagatgcaacagctgattat

SEQ ID NO: 475442 - DNA, 25 bp, Homo sapien
cacagaagtaagatgcaacagctga

SEQ ID NO: 475443 - DNA, 25 bp, Homo sapien
tgttgttgcccagatgcttaaaaaa

SEQ ID NO: 475444 - DNA, 25 bp, Homo sapien
gttcagtaagacttggtctccactg

SEQ ID NO: 475445 - DNA, 25 bp, Homo sapien
gtaagacttggtctccactgtcaaa

SEQ ID NO: 475446 - DNA, 25 bp, Homo sapien
gttgcccagatgcttaaaaaatgtg

SEQ ID NO: 475447 - DNA, 25 bp, Homo sapien
tataaatgaacagcaggtgttttct

SEQ ID NO: 475448 - DNA, 25 bp, Homo sapien
gggaggtaggagtatatagtgatgt

SEQ ID NO: 475449 - DNA, 25 bp, Homo sapien
tgatgttgcttaggttataaatgaa

SEQ ID NO: 475450 - DNA, 25 bp, Homo sapien
gtatatagtgatgttgcttaggtta

SEQ ID NO: 475451 - DNA, 25 bp, Homo sapien
gatgagaaacgctggataagtcact

SEQ ID NO: 475452 - DNA, 25 bp, Homo sapien
ggatcatgggactcgcttttgacat

SEQ ID NO: 475453 - DNA, 25 bp, Homo sapien
aattccatgatttggctccttccag

SEQ ID NO: 475454 - DNA, 25 bp, Homo sapien
tgttcttccaaggatacaaaaggct

SEQ ID NO: 475455 - DNA, 25 bp, Homo sapien
ttgatgtcaaaggaatctggtccca

SEQ ID NO: 475456 - DNA, 25 bp, Homo sapien
caaatactctggattgtttgtgtcc

SEQ ID NO: 475457 - DNA, 25 bp, Homo sapien
ttctttgccaaatactctggattgt

SEQ ID NO: 475458 - DNA, 25 bp, Homo sapien
tttgccaaatactctggattgtttg

SEQ ID NO: 475459 - DNA, 25 bp, Homo sapien
tgccaaatactctggattgtttgtg

SEQ ID NO: 475460 - DNA, 25 bp, Homo sapien
ctgggaagcagttcctatggataac

SEQ ID NO: 475461 - DNA, 25 bp, Homo sapien
ggcaaagagagtgaggacattgtct

SEQ ID NO: 475462 - DNA, 25 bp, Homo sapien
agagtgaggacattgtctccatttc

SEQ ID NO: 475463 - DNA, 25 bp, Homo sapien
agttcctatggataactcttcaggg

SEQ ID NO: 475464 - DNA, 25 bp, Homo sapien
tggagaaaatgttatagccttccat

SEQ ID NO: 475465 - DNA, 25 bp, Homo sapien
ctaaattggagaaaatgttatagcc

SEQ ID NO: 475466 - DNA, 25 bp, Homo sapien
aaattggagaaaatgttatagcctt

SEQ ID NO: 475467 - DNA, 25 bp, Homo sapien
attggagaaaatgttatagccttcc

SEQ ID NO: 475468 - DNA, 25 bp, Homo sapien
gctctgggtgatattcattgccttc

SEQ ID NO: 475469 - DNA, 25 bp, Homo sapien
tattcattgccttcacggattttta

SEQ ID NO: 475470 - DNA, 25 bp, Homo sapien
attgccttcacggatttttactttg

SEQ ID NO: 475471 - DNA, 25 bp, Homo sapien
aggctctgggtgatattcattgcct

SEQ ID NO: 475472 - DNA, 25 bp, Homo sapien
tagtaatgtatacgcagaaatactc

SEQ ID NO: 475473 - DNA, 25 bp, Homo sapien
taatgtatacgcagaaatactcaat

SEQ ID NO: 475474 - DNA, 25 bp, Homo sapien
ttggagatgaaaggctctcttttga

SEQ ID NO: 475475 - DNA, 25 bp, Homo sapien
gaaatactcaattggagatgaaagg

SEQ ID NO: 475476 - DNA, 25 bp, Homo sapien
tccagacgtatctttgatttattca

SEQ ID NO: 475477 - DNA, 25 bp, Homo sapien
gtttccagacgtatctttgatttat

SEQ ID NO: 475478 - DNA, 25 bp, Homo sapien
agtttccagacgtatctttgattta

SEQ ID NO: 475479 - DNA, 25 bp, Homo sapien
tcaaagtcactctcattagtttcca

SEQ ID NO: 475480 - DNA, 25 bp, Homo sapien
ctctgagaaatttcctgtgtcagac

SEQ ID NO: 475481 - DNA, 25 bp, Homo sapien
cactctctggacatgcctggatcct

SEQ ID NO: 475482 - DNA, 25 bp, Homo sapien
tgagaaatttcctgtgtcagacttt

SEQ ID NO: 475483 - DNA, 25 bp, Homo sapien
tctggacatgcctggatcctctgag

SEQ ID NO: 475484 - DNA, 25 bp, Homo sapien
gctttctctttagaatcctcaccta

SEQ ID NO: 475485 - DNA, 25 bp, Homo sapien
ttgctttctctttagaatcctcacc

SEQ ID NO: 475486 - DNA, 25 bp, Homo sapien
tttctctttagaatcctcacctaca

SEQ ID NO: 475487 - DNA, 25 bp, Homo sapien
tctttagaatcctcacctacatttt

SEQ ID NO: 475488 - DNA, 25 bp, Homo sapien
tgaagctgaatttgcactctcagat

SEQ ID NO: 475489 - DNA, 25 bp, Homo sapien
taagggctcagtcatacaaaacaac

SEQ ID NO: 475490 - DNA, 25 bp, Homo sapien
tatttctgacagactgacaagtgga

SEQ ID NO: 475491 - DNA, 25 bp, Homo sapien
gagatcccgtgacttccttcttggt

SEQ ID NO: 475492 - DNA, 25 bp, Homo sapien
tgtcagaacaccagagtttaggctc

SEQ ID NO: 475493 - DNA, 25 bp, Homo sapien
tgacaaaataagaaagttctttcac

SEQ ID NO: 475494 - DNA, 25 bp, Homo sapien
caaaataagaaagttctttcacttg

SEQ ID NO: 475495 - DNA, 25 bp, Homo sapien
aataagaaagttctttcacttgcat

SEQ ID NO: 475496 - DNA, 25 bp, Homo sapien
atatgacaaaataagaaagttcttt

SEQ ID NO: 475497 - DNA, 25 bp, Homo sapien
cagcaggctccggatccatgtaatc

SEQ ID NO: 475498 - DNA, 25 bp, Homo sapien
tgtaatcacctctcagaaatgctcg

SEQ ID NO: 475499 - DNA, 25 bp, Homo sapien
tcgccctggtgcatcctcagtaaaa

SEQ ID NO: 475500 - DNA, 25 bp, Homo sapien
tgacgagcattgacgagcactgtga

SEQ ID NO: 475501 - DNA, 25 bp, Homo sapien
gcctccatagtcttctctttctgaa

SEQ ID NO: 475502 - DNA, 25 bp, Homo sapien
tttgcctccatagtcttctctttct

SEQ ID NO: 475503 - DNA, 25 bp, Homo sapien
cctttgcctccatagtcttctcttt

SEQ ID NO: 475504 - DNA, 25 bp, Homo sapien
cctcctttgcctccatagtcttctc

SEQ ID NO: 475505 - DNA, 25 bp, Homo sapien
tctacccatgaggacaataattatc

SEQ ID NO: 475506 - DNA, 25 bp, Homo sapien
tacccatgaggacaataattatcac

SEQ ID NO: 475507 - DNA, 25 bp, Homo sapien
ctacccatgaggacaataattatca

SEQ ID NO: 475508 - DNA, 25 bp, Homo sapien
ttgaatggggaatcttgcttgttca

SEQ ID NO: 475509 - DNA, 25 bp, Homo sapien
cacagcattgaatggggaatcttgc

SEQ ID NO: 475510 - DNA, 25 bp, Homo sapien
tttcacagcattgaatggggaatct

SEQ ID NO: 475511 - DNA, 25 bp, Homo sapien
gcattgaatggggaatcttgcttgt

SEQ ID NO: 475512 - DNA, 25 bp, Homo sapien
acaagcacgtatttgtttgccccgt

SEQ ID NO: 475513 - DNA, 25 bp, Homo sapien
ttttaaccaccaaatgaccacaagc

SEQ ID NO: 475514 - DNA, 25 bp, Homo sapien
taaccaccaaatgaccacaagcacg

SEQ ID NO: 475515 - DNA, 25 bp, Homo sapien
tgtttgccccgttgggctggtggaa

SEQ ID NO: 475516 - DNA, 25 bp, Homo sapien
gcaaagactgctgaatcagcctgga

SEQ ID NO: 475517 - DNA, 25 bp, Homo sapien
ctgcaaagactgctgaatcagcctg

SEQ ID NO: 475518 - DNA, 25 bp, Homo sapien
agactgctgaatcagcctggaccat

SEQ ID NO: 475519 - DNA, 25 bp, Homo sapien
aaagactgctgaatcagcctggacc

SEQ ID NO: 475520 - DNA, 25 bp, Homo sapien
gagattccactttctggatccccca

SEQ ID NO: 475521 - DNA, 25 bp, Homo sapien
cggtatctcctgctctcttagcctg

SEQ ID NO: 475522 - DNA, 25 bp, Homo sapien
cttagcctgagttcttggtgagatt

SEQ ID NO: 475523 - DNA, 25 bp, Homo sapien
gcctgagttcttggtgagattccac

SEQ ID NO: 475524 - DNA, 25 bp, Homo sapien
caatggtataaggtggtgactgaaa

SEQ ID NO: 475525 - DNA, 25 bp, Homo sapien
aaatcagcagtcctgttaacaacca

SEQ ID NO: 475526 - DNA, 25 bp, Homo sapien
taaggtggtgactgaaagattgtat

SEQ ID NO: 475527 - DNA, 25 bp, Homo sapien
cccttgttgcttttgcaatggtata

SEQ ID NO: 475528 - DNA, 25 bp, Homo sapien
ctatggtccatcacaagaagagtct

SEQ ID NO: 475529 - DNA, 25 bp, Homo sapien
acagatggtcctttgaacctctcag

SEQ ID NO: 475530 - DNA, 25 bp, Homo sapien
aagagataggacagatggtcctttg

SEQ ID NO: 475531 - DNA, 25 bp, Homo sapien
gacagatggtcctttgaacctctca

SEQ ID NO: 475532 - DNA, 25 bp, Homo sapien
ggacagatggtcctttgaacctctc

SEQ ID NO: 475533 - DNA, 25 bp, Homo sapien
tggtgggggatcctgcttttgtccc

SEQ ID NO: 475534 - DNA, 25 bp, Homo sapien
tctcatggctcaagacttgcacttc

SEQ ID NO: 475535 - DNA, 25 bp, Homo sapien
attttctcatggctcaagacttgca

SEQ ID NO: 475536 - DNA, 25 bp, Homo sapien
tgttgtgtttgactctcattaggga

SEQ ID NO: 475537 - DNA, 25 bp, Homo sapien
gcaattttctcatggctcaagactt

SEQ ID NO: 475538 - DNA, 25 bp, Homo sapien
tgttgaactaagagaactgtatccc

SEQ ID NO: 475539 - DNA, 25 bp, Homo sapien
aacgtcgtgcaaggagctctctgaa

SEQ ID NO: 475540 - DNA, 25 bp, Homo sapien
ccactaatgcatatatggctttacc

SEQ ID NO: 475541 - DNA, 25 bp, Homo sapien
cccttcctctgaataccgactatga

SEQ ID NO: 475542 - DNA, 25 bp, Homo sapien
gcagtaggaagactagaggaaataa

SEQ ID NO: 475543 - DNA, 25 bp, Homo sapien
caagcagtaggaagactagaggaaa

SEQ ID NO: 475544 - DNA, 25 bp, Homo sapien
agtttccttgaaggataggtgggca

SEQ ID NO: 475545 - DNA, 25 bp, Homo sapien
aaataaagccccaacagacagaggt

SEQ ID NO: 475546 - DNA, 25 bp, Homo sapien
ctttctcatgttttggatagttcca

SEQ ID NO: 475547 - DNA, 25 bp, Homo sapien
ggatagttccaatataacgttgtag

SEQ ID NO: 475548 - DNA, 25 bp, Homo sapien
gttccaatataacgttgtagtcttg

SEQ ID NO: 475549 - DNA, 25 bp, Homo sapien
tataacgttgtagtcttgtcgcaca

SEQ ID NO: 475550 - DNA, 25 bp, Homo sapien
actttttccatgcaccggcgagttt

SEQ ID NO: 475551 - DNA, 25 bp, Homo sapien
atgcaccggcgagtttttctatccc

SEQ ID NO: 475552 - DNA, 25 bp, Homo sapien
actcaagcctgggttgctcctttct

SEQ ID NO: 475553 - DNA, 25 bp, Homo sapien
ctcaagcctgggttgctcctttctc

SEQ ID NO: 475554 - DNA, 25 bp, Homo sapien
gagtatatggcaatatcttggtgca

SEQ ID NO: 475555 - DNA, 25 bp, Homo sapien
ccctcaataaagtcgataattgtgt

SEQ ID NO: 475556 - DNA, 25 bp, Homo sapien
ctatgtccgggtacattcagagtat

SEQ ID NO: 475557 - DNA, 25 bp, Homo sapien
gtgttttgttcaagaccctcaataa

SEQ ID NO: 475558 - DNA, 25 bp, Homo sapien
gactttccagttcacaaatggcttg

SEQ ID NO: 475559 - DNA, 25 bp, Homo sapien
caaatggcttgaggtgaaaaacagt

SEQ ID NO: 475560 - DNA, 25 bp, Homo sapien
atggcccatatctttgaacttcctt

SEQ ID NO: 475561 - DNA, 25 bp, Homo sapien
ggcccatatctttgaacttccttca

SEQ ID NO: 475562 - DNA, 25 bp, Homo sapien
gccaggtgcaatatgatacagacat

SEQ ID NO: 475563 - DNA, 25 bp, Homo sapien
ttggccaggtgcaatatgatacaga

SEQ ID NO: 475564 - DNA, 25 bp, Homo sapien
ccttccgggacagatatagcagtga

SEQ ID NO: 475565 - DNA, 25 bp, Homo sapien
ttccccttccgggacagatatagca

SEQ ID NO: 475566 - DNA, 25 bp, Homo sapien
gctttagttctccatggctagttgt

SEQ ID NO: 475567 - DNA, 25 bp, Homo sapien
tagagaatagaacaagttttgcttc

SEQ ID NO: 475568 - DNA, 25 bp, Homo sapien
gttttgcttcaatggtgagctttag

SEQ ID NO: 475569 - DNA, 25 bp, Homo sapien
ttccccgtggttagtggatattgcc

SEQ ID NO: 475570 - DNA, 25 bp, Homo sapien
gaagctaacgatctttgtatttcta

SEQ ID NO: 475571 - DNA, 25 bp, Homo sapien
tttgtatttctatactgagtcacac

SEQ ID NO: 475572 - DNA, 25 bp, Homo sapien
gagtgtcattgaagctaacgatctt

SEQ ID NO: 475573 - DNA, 25 bp, Homo sapien
cattgaagctaacgatctttgtatt

SEQ ID NO: 475574 - DNA, 25 bp, Homo sapien
atcctctctaatttttccttcacac

SEQ ID NO: 475575 - DNA, 25 bp, Homo sapien
cctctctaatttttccttcacacac

SEQ ID NO: 475576 - DNA, 25 bp, Homo sapien
ttccttcacacacttactgctagag

SEQ ID NO: 475577 - DNA, 25 bp, Homo sapien
tccttcacacacttactgctagaga

SEQ ID NO: 475578 - DNA, 25 bp, Homo sapien
ttgccacgattattttctcccagga

SEQ ID NO: 475579 - DNA, 25 bp, Homo sapien
gatgtgagtacttgcaaacatgtgc

SEQ ID NO: 475580 - DNA, 25 bp, Homo sapien
tttctcccaggaatcaggttcttga

SEQ ID NO: 475581 - DNA, 25 bp, Homo sapien
taaaggtagaaaattgccacgatta

SEQ ID NO: 475582 - DNA, 25 bp, Homo sapien
actgtgatcacgtgtccggaaaggc

SEQ ID NO: 475583 - DNA, 25 bp, Homo sapien
gactgtgatcacgtgtccggaaagg

SEQ ID NO: 475584 - DNA, 25 bp, Homo sapien
ctaaggtgctttgtctctgggatct

SEQ ID NO: 475585 - DNA, 25 bp, Homo sapien
tgtgatcacgtgtccggaaaggctg

SEQ ID NO: 475586 - DNA, 25 bp, Homo sapien
ccatagtaattggtcaactgttgca

SEQ ID NO: 475587 - DNA, 25 bp, Homo sapien
gctgactgcttcaaatatataacca

SEQ ID NO: 475588 - DNA, 25 bp, Homo sapien
tatataaccatagtaattggtcaac

SEQ ID NO: 475589 - DNA, 25 bp, Homo sapien
gattctccggggctgactgcttcaa

SEQ ID NO: 475590 - DNA, 25 bp, Homo sapien
attttggagagtacaatctctccaa

SEQ ID NO: 475591 - DNA, 25 bp, Homo sapien
ttttggagagtacaatctctccaaa

SEQ ID NO: 475592 - DNA, 25 bp, Homo sapien
aattttggagagtacaatctctcca

SEQ ID NO: 475593 - DNA, 25 bp, Homo sapien
caattttggagagtacaatctctcc

SEQ ID NO: 475594 - DNA, 25 bp, Homo sapien
actctataggagattggaaggcata

SEQ ID NO: 475595 - DNA, 25 bp, Homo sapien
ttactctataggagattggaaggca

SEQ ID NO: 475596 - DNA, 25 bp, Homo sapien
taggagattggaaggcatagggaaa

SEQ ID NO: 475597 - DNA, 25 bp, Homo sapien
tctataggagattggaaggcatagg

SEQ ID NO: 475598 - DNA, 25 bp, Homo sapien
catgtctgaaccctagtctaagcca

SEQ ID NO: 475599 - DNA, 25 bp, Homo sapien
cccagacgcctcctttttatttgcg

SEQ ID NO: 475600 - DNA, 25 bp, Homo sapien
gggtcatcctatcagaaggaaaaag

SEQ ID NO: 475601 - DNA, 25 bp, Homo sapien
gaaagtccgatctctataaacacag

SEQ ID NO: 475602 - DNA, 25 bp, Homo sapien
cttgtgaatgttggtgttgttgaat

SEQ ID NO: 475603 - DNA, 25 bp, Homo sapien
gttggtgttgttgaatatttgacat

SEQ ID NO: 475604 - DNA, 25 bp, Homo sapien
tgtgaatgttggtgttgttgaatat

SEQ ID NO: 475605 - DNA, 25 bp, Homo sapien
ggtgttgttgaatatttgacattca

SEQ ID NO: 475606 - DNA, 25 bp, Homo sapien
tggccgcttgatattgtgctggcat

SEQ ID NO: 475607 - DNA, 25 bp, Homo sapien
tgcaagtgttttggccgcttgatat

SEQ ID NO: 475608 - DNA, 25 bp, Homo sapien
gccttgcaagtgttttggccgcttg

SEQ ID NO: 475609 - DNA, 25 bp, Homo sapien
gtgttttggccgcttgatattgtgc

SEQ ID NO: 475610 - DNA, 25 bp, Homo sapien
tccctggtgcactagctgttttgtg

SEQ ID NO: 475611 - DNA, 25 bp, Homo sapien
cattacgggctacataaaaactgcg

SEQ ID NO: 475612 - DNA, 25 bp, Homo sapien
aaaggtgctgtctggtccttgcctg

SEQ ID NO: 475613 - DNA, 25 bp, Homo sapien
catgcaatggaagtttggcagtgca

SEQ ID NO: 475614 - DNA, 25 bp, Homo sapien
tgcctcattagtggatccagaacta

SEQ ID NO: 475615 - DNA, 25 bp, Homo sapien
ctggtggactccagcccagaggcat

SEQ ID NO: 475616 - DNA, 25 bp, Homo sapien
gcctcttctagtgtgcagtagctga

SEQ ID NO: 475617 - DNA, 25 bp, Homo sapien
tcagcctatttgaacaacctggatt

SEQ ID NO: 475618 - DNA, 25 bp, Homo sapien
ccttagagatctcattttgaaccat

SEQ ID NO: 475619 - DNA, 25 bp, Homo sapien
gtgaagactgtcctagcacagtttg

SEQ ID NO: 475620 - DNA, 25 bp, Homo sapien
aaatgtgaagactgtcctagcacag

SEQ ID NO: 475621 - DNA, 25 bp, Homo sapien
agactgtcctagcacagtttgcaga

SEQ ID NO: 475622 - DNA, 25 bp, Homo sapien
gaagactgtcctagcacagtttgca

SEQ ID NO: 475623 - DNA, 25 bp, Homo sapien
ccccagctctcatctgtagtgaaca

SEQ ID NO: 475624 - DNA, 25 bp, Homo sapien
catctgtagtgaacactttgcattc

SEQ ID NO: 475625 - DNA, 25 bp, Homo sapien
ccttcttcccatattgctccccagc

SEQ ID NO: 475626 - DNA, 25 bp, Homo sapien
gctctcatctgtagtgaacactttg

SEQ ID NO: 475627 - DNA, 25 bp, Homo sapien
catgaatagttatggtgattctgaa

SEQ ID NO: 475628 - DNA, 25 bp, Homo sapien
ctatgaacaagggattaattgcctg

SEQ ID NO: 475629 - DNA, 25 bp, Homo sapien
tctgatggttgaaagaactgaagct

SEQ ID NO: 475630 - DNA, 25 bp, Homo sapien
tacttgatgtatctctagcatatgc

SEQ ID NO: 475631 - DNA, 25 bp, Homo sapien
gggtgtctcatcagtaaaagtaaaa

SEQ ID NO: 475632 - DNA, 25 bp, Homo sapien
aatttagattcttcaccagtaagct

SEQ ID NO: 475633 - DNA, 25 bp, Homo sapien
tcttcaccagtaagcttgatcttgg

SEQ ID NO: 475634 - DNA, 25 bp, Homo sapien
ggtgtctcatcagtaaaagtaaaac

SEQ ID NO: 475635 - DNA, 25 bp, Homo sapien
cagcagcttagtctggttcctgttc

SEQ ID NO: 475636 - DNA, 25 bp, Homo sapien
gcagcttagtctggttcctgttcaa

SEQ ID NO: 475637 - DNA, 25 bp, Homo sapien
cagcttagtctggttcctgttcaac

SEQ ID NO: 475638 - DNA, 25 bp, Homo sapien
agcttagtctggttcctgttcaact

SEQ ID NO: 475639 - DNA, 25 bp, Homo sapien
ctcctgctctagctcctgttcctct

SEQ ID NO: 475640 - DNA, 25 bp, Homo sapien
ttcctcctcctgctctagctcctgt

SEQ ID NO: 475641 - DNA, 25 bp, Homo sapien
tcctcctgctctagctcctgttcct

SEQ ID NO: 475642 - DNA, 25 bp, Homo sapien
tcattgttcctcctcctgctctagc

SEQ ID NO: 475643 - DNA, 25 bp, Homo sapien
agaaagtgcgttgcagacctttttc

SEQ ID NO: 475644 - DNA, 25 bp, Homo sapien
ttctgtaaagtgactgccaaatgtg

SEQ ID NO: 475645 - DNA, 25 bp, Homo sapien
agtgactgccaaatgtgatcttatt

SEQ ID NO: 475646 - DNA, 25 bp, Homo sapien
ctgtttcatagaaagtgcgttgcag

SEQ ID NO: 475647 - DNA, 25 bp, Homo sapien
gggcatcaaagccactgaagcattc

SEQ ID NO: 475648 - DNA, 25 bp, Homo sapien
aatggatcccagaaagcggctattt

SEQ ID NO: 475649 - DNA, 25 bp, Homo sapien
gctggatagtgacataagggcatca

SEQ ID NO: 475650 - DNA, 25 bp, Homo sapien
tcatgaacaaagtggagtcatcaac

SEQ ID NO: 475651 - DNA, 25 bp, Homo sapien
cagattcttgggcaatgtcttaaac

SEQ ID NO: 475652 - DNA, 25 bp, Homo sapien
taggcattctaaagtttactcagaa

SEQ ID NO: 475653 - DNA, 25 bp, Homo sapien
taatgtgttaatagatatgctcaga

SEQ ID NO: 475654 - DNA, 25 bp, Homo sapien
aatagcaccctacatatttcttagg

SEQ ID NO: 475655 - DNA, 25 bp, Homo sapien
cacatcacacttgggaagaacattg

SEQ ID NO: 475656 - DNA, 25 bp, Homo sapien
ttgggaagaacattgacatttctca

SEQ ID NO: 475657 - DNA, 25 bp, Homo sapien
gtccacatcacacttgggaagaaca

SEQ ID NO: 475658 - DNA, 25 bp, Homo sapien
acacttgggaagaacattgacattt

SEQ ID NO: 475659 - DNA, 25 bp, Homo sapien
atgcaaggcacttgagagaaaagga

SEQ ID NO: 475660 - DNA, 25 bp, Homo sapien
ggcacttgagagaaaaggacaatca

SEQ ID NO: 475661 - DNA, 25 bp, Homo sapien
ctcctttaggtttgttcagtgttat

SEQ ID NO: 475662 - DNA, 25 bp, Homo sapien
tactccctggacacaaggtttctga

SEQ ID NO: 475663 - DNA, 25 bp, Homo sapien
tccctggacacaaggtttctgaatg

SEQ ID NO: 475664 - DNA, 25 bp, Homo sapien
tgttcagtgttatactccctggaca

SEQ ID NO: 475665 - DNA, 25 bp, Homo sapien
tgcccataggaaaagtccaataatg

SEQ ID NO: 475666 - DNA, 25 bp, Homo sapien
gcccataggaaaagtccaataatgt

SEQ ID NO: 475667 - DNA, 25 bp, Homo sapien
ccataggaaaagtccaataatgtaa

SEQ ID NO: 475668 - DNA, 25 bp, Homo sapien
cttgcccataggaaaagtccaataa

SEQ ID NO: 475669 - DNA, 25 bp, Homo sapien
gcaagatggaggcttgctttcacaa

SEQ ID NO: 475670 - DNA, 25 bp, Homo sapien
tagagttaaaatccttggccaggga

SEQ ID NO: 475671 - DNA, 25 bp, Homo sapien
tcaaaaaatattcgatccaagcgct

SEQ ID NO: 475672 - DNA, 25 bp, Homo sapien
catctgggagaaaagtttaagctta

SEQ ID NO: 475673 - DNA, 25 bp, Homo sapien
cattgttgccggactttttcttagg

SEQ ID NO: 475674 - DNA, 25 bp, Homo sapien
caggtactctctgcaaggccggaat

SEQ ID NO: 475675 - DNA, 25 bp, Homo sapien
tatacatatttgaccagcatacaga

SEQ ID NO: 475676 - DNA, 25 bp, Homo sapien
gaattccctgctagagtgcttccag

SEQ ID NO: 475677 - DNA, 25 bp, Homo sapien
tagagtatcacaaccaatggtgcca

SEQ ID NO: 475678 - DNA, 25 bp, Homo sapien
tcatctgtgtttggagtacatgcag

SEQ ID NO: 475679 - DNA, 25 bp, Homo sapien
tagttaaagcaagaagccattgtga

SEQ ID NO: 475680 - DNA, 25 bp, Homo sapien
tacttatgaaatcctggtggcccta

SEQ ID NO: 475681 - DNA, 25 bp, Homo sapien
cagtaaattgaataaagctgcccgg

SEQ ID NO: 475682 - DNA, 25 bp, Homo sapien
caccagcagtatatcagtagcaatg

SEQ ID NO: 475683 - DNA, 25 bp, Homo sapien
ctggctgcagggacaatattttcta

SEQ ID NO: 475684 - DNA, 25 bp, Homo sapien
tctacgaacctttgagttaccagga

SEQ ID NO: 475685 - DNA, 25 bp, Homo sapien
tattaccatgttatgaatctcaggc

SEQ ID NO: 475686 - DNA, 25 bp, Homo sapien
taccatgttatgaatctcaggcact

SEQ ID NO: 475687 - DNA, 25 bp, Homo sapien
atctcaggcacttgtgcatttgcaa

SEQ ID NO: 475688 - DNA, 25 bp, Homo sapien
ttattaccatgttatgaatctcagg

SEQ ID NO: 475689 - DNA, 25 bp, Homo sapien
cataggagtaacatttggctctggc

SEQ ID NO: 475690 - DNA, 25 bp, Homo sapien
cattcgaatgtacaaaattaagggc

SEQ ID NO: 475691 - DNA, 25 bp, Homo sapien
ggtgatagtatgttctacgcagaaa

SEQ ID NO: 475692 - DNA, 25 bp, Homo sapien
gaaaaaacaccttgacattcgaatg

SEQ ID NO: 475693 - DNA, 25 bp, Homo sapien
ctccatacatgtgagaagttctgaa

SEQ ID NO: 475694 - DNA, 25 bp, Homo sapien
gtaaaagtaaacggcaaacatctgc

SEQ ID NO: 475695 - DNA, 25 bp, Homo sapien
aagtaaacggcaaacatctgctgaa

SEQ ID NO: 475696 - DNA, 25 bp, Homo sapien
aaaagtaaacggcaaacatctgctg

SEQ ID NO: 475697 - DNA, 25 bp, Homo sapien
aaagtaaacggcaaacatctgctga

SEQ ID NO: 475698 - DNA, 25 bp, Homo sapien
tcaaggagaagcatgtagggtaata

SEQ ID NO: 475699 - DNA, 25 bp, Homo sapien
catgtagggtaataacaggtgcttc

SEQ ID NO: 475700 - DNA, 25 bp, Homo sapien
gagaagcatgtagggtaataacagg

SEQ ID NO: 475701 - DNA, 25 bp, Homo sapien
aagcatgtagggtaataacaggtgc

SEQ ID NO: 475702 - DNA, 25 bp, Homo sapien
tcagggggttgctgatacaccagcc

SEQ ID NO: 475703 - DNA, 25 bp, Homo sapien
tactgtcacaacctggccagatgtg

SEQ ID NO: 475704 - DNA, 25 bp, Homo sapien
ggtgaggaaagttgtggccaagcct

SEQ ID NO: 475705 - DNA, 25 bp, Homo sapien
gacctgctccgaattttgagtgcca

SEQ ID NO: 475706 - DNA, 25 bp, Homo sapien
cacttactgagttggtgggtcaggg

SEQ ID NO: 475707 - DNA, 25 bp, Homo sapien
cacaggcttgaaagtgcctgatccc

SEQ ID NO: 475708 - DNA, 25 bp, Homo sapien
agcagcctcccagccgcagcttcag

SEQ ID NO: 475709 - DNA, 25 bp, Homo sapien
cctcccagccgcagcttcagaccat

SEQ ID NO: 475710 - DNA, 25 bp, Homo sapien
tcctctgtagtcctatatatcctga

SEQ ID NO: 475711 - DNA, 25 bp, Homo sapien
tatatcctgagctggctcataacta

SEQ ID NO: 475712 - DNA, 25 bp, Homo sapien
gcatctacgttgtgacccacttttt

SEQ ID NO: 475713 - DNA, 25 bp, Homo sapien
ccactttttgttccataactaggat

SEQ ID NO: 475714 - DNA, 25 bp, Homo sapien
attgcttgctcatcatcagtgtccc

SEQ ID NO: 475715 - DNA, 25 bp, Homo sapien
tgcttgctcatcatcagtgtcccat

SEQ ID NO: 475716 - DNA, 25 bp, Homo sapien
ttgcttgctcatcatcagtgtccca

SEQ ID NO: 475717 - DNA, 25 bp, Homo sapien
gagttactgtgaactgcaacaaggg

SEQ ID NO: 475718 - DNA, 25 bp, Homo sapien
caagctattaaatgatgcggaaact

SEQ ID NO: 475719 - DNA, 25 bp, Homo sapien
caggtaagcctttaggcacgaagtt

SEQ ID NO: 475720 - DNA, 25 bp, Homo sapien
gcagcatccgtttttaactaaacag

SEQ ID NO: 475721 - DNA, 25 bp, Homo sapien
gataaaagtacaatgtgcttcaggg

SEQ ID NO: 475722 - DNA, 25 bp, Homo sapien
aagtacaatgtgcttcagggtcacc

SEQ ID NO: 475723 - DNA, 25 bp, Homo sapien
gggataaaagtacaatgtgcttcag

SEQ ID NO: 475724 - DNA, 25 bp, Homo sapien
taaaagtacaatgtgcttcagggtc

SEQ ID NO: 475725 - DNA, 25 bp, Homo sapien
tacggattgtggaagagaagcatgt

SEQ ID NO: 475726 - DNA, 25 bp, Homo sapien
catgttgaaggcaaataacatagcc

SEQ ID NO: 475727 - DNA, 25 bp, Homo sapien
catagcctctactttcagtgtaaaa

SEQ ID NO: 475728 - DNA, 25 bp, Homo sapien
cagtgtaaaatgctgggaagatgtg

SEQ ID NO: 475729 - DNA, 25 bp, Homo sapien
acacaatagactgaagcatatggac

SEQ ID NO: 475730 - DNA, 25 bp, Homo sapien
atctcttcttagatcaagacacaat

SEQ ID NO: 475731 - DNA, 25 bp, Homo sapien
gacacaatagactgaagcatatgga

SEQ ID NO: 475732 - DNA, 25 bp, Homo sapien
ggctcattgcgtctaagtcttctta

SEQ ID NO: 475733 - DNA, 25 bp, Homo sapien
ggggctcattgcgtctaagtcttct

SEQ ID NO: 475734 - DNA, 25 bp, Homo sapien
gctcattgcgtctaagtcttcttag

SEQ ID NO: 475735 - DNA, 25 bp, Homo sapien
tctggggctcattgcgtctaagtct

SEQ ID NO: 475736 - DNA, 25 bp, Homo sapien
tcttcccagggtgcttcgtgcctca

SEQ ID NO: 475737 - DNA, 25 bp, Homo sapien
gctgaatactttacatcagccagct

SEQ ID NO: 475738 - DNA, 25 bp, Homo sapien
tcagctgaatactttacatcagcca

SEQ ID NO: 475739 - DNA, 25 bp, Homo sapien
agctgccgaacctcttcccagggtg

SEQ ID NO: 475740 - DNA, 25 bp, Homo sapien
tttattcccccttgagtttcaatgc

SEQ ID NO: 475741 - DNA, 25 bp, Homo sapien
acacgattaattgacatgtttattc

SEQ ID NO: 475742 - DNA, 25 bp, Homo sapien
gagtttcaatgccatttcggatata

SEQ ID NO: 475743 - DNA, 25 bp, Homo sapien
ttaaacacgattaattgacatgttt

SEQ ID NO: 475744 - DNA, 25 bp, Homo sapien
ttcaagataccttttcaccttagtg

SEQ ID NO: 475745 - DNA, 25 bp, Homo sapien
ccttagtgaacttagagtaggccaa

SEQ ID NO: 475746 - DNA, 25 bp, Homo sapien
gtgaacttagagtaggccaagcaga

SEQ ID NO: 475747 - DNA, 25 bp, Homo sapien
tcaccttagtgaacttagagtaggc

SEQ ID NO: 475748 - DNA, 25 bp, Homo sapien
ttattgtccaattggatttctctag

SEQ ID NO: 475749 - DNA, 25 bp, Homo sapien
tgttgcagttccacgtgaaggaaca

SEQ ID NO: 475750 - DNA, 25 bp, Homo sapien
tctgtatggcagtctgtagacaccc

SEQ ID NO: 475751 - DNA, 25 bp, Homo sapien
ctaaagtagggtgttgcagttccac

SEQ ID NO: 475752 - DNA, 25 bp, Homo sapien
tagaatcgggtaggagttgccagaa

SEQ ID NO: 475753 - DNA, 25 bp, Homo sapien
tctcttggtctagaatcgggtagga

SEQ ID NO: 475754 - DNA, 25 bp, Homo sapien
agaagttctgttcatgcaaggtaac

SEQ ID NO: 475755 - DNA, 25 bp, Homo sapien
ttattctcttggtctagaatcgggt

SEQ ID NO: 475756 - DNA, 25 bp, Homo sapien
gattcaatgatcatccaggaccaca

SEQ ID NO: 475757 - DNA, 25 bp, Homo sapien
cctgtggtaatctaagaagatactt

SEQ ID NO: 475758 - DNA, 25 bp, Homo sapien
gatgagacgtatgtatactctgcag

SEQ ID NO: 475759 - DNA, 25 bp, Homo sapien
ggcctaaaatatggctcatcctgta

SEQ ID NO: 475760 - DNA, 25 bp, Homo sapien
ctctatattcttcaaagcagagacc

SEQ ID NO: 475761 - DNA, 25 bp, Homo sapien
tctatattcttcaaagcagagacca

SEQ ID NO: 475762 - DNA, 25 bp, Homo sapien
ctatattcttcaaagcagagaccat

SEQ ID NO: 475763 - DNA, 25 bp, Homo sapien
tggtgcatagttctattgcagcaca

SEQ ID NO: 475764 - DNA, 25 bp, Homo sapien
aggtaagcaaattggtgcatagttc

SEQ ID NO: 475765 - DNA, 25 bp, Homo sapien
acacttcacattgcatttgattgtt

SEQ ID NO: 475766 - DNA, 25 bp, Homo sapien
ctattgcagcacacttcacattgca

SEQ ID NO: 475767 - DNA, 25 bp, Homo sapien
aaaggtgtcgcaggttttttctgag

SEQ ID NO: 475768 - DNA, 25 bp, Homo sapien
catggtgaatcttagtgaaactgaa

SEQ ID NO: 475769 - DNA, 25 bp, Homo sapien
tgaacttggatacaaccagccacta

SEQ ID NO: 475770 - DNA, 25 bp, Homo sapien
cagttttaggaaaggtgtcgcaggt

SEQ ID NO: 475771 - DNA, 25 bp, Homo sapien
aagacaggagctcatagaggataga

SEQ ID NO: 475772 - DNA, 25 bp, Homo sapien
gaagacaggagctcatagaggatag

SEQ ID NO: 475773 - DNA, 25 bp, Homo sapien
caggagctcatagaggatagatgca

SEQ ID NO: 475774 - DNA, 25 bp, Homo sapien
gacaggagctcatagaggatagatg

SEQ ID NO: 475775 - DNA, 25 bp, Homo sapien
tgagcccactggtgcagagccagcc

SEQ ID NO: 475776 - DNA, 25 bp, Homo sapien
aaggaacctggactgacagcaaaca

SEQ ID NO: 475777 - DNA, 25 bp, Homo sapien
gctaacaagctatcctaagtgcgtc

SEQ ID NO: 475778 - DNA, 25 bp, Homo sapien
caaggcttctattggtcaacagggc

SEQ ID NO: 475779 - DNA, 25 bp, Homo sapien
gaaggccccaggctagcagtatggt

SEQ ID NO: 475780 - DNA, 25 bp, Homo sapien
tagagatccaaccagcatatagcat

SEQ ID NO: 475781 - DNA, 25 bp, Homo sapien
tattagatccatagtcgaatgtttt

SEQ ID NO: 475782 - DNA, 25 bp, Homo sapien
gatccatagtcgaatgttttaatta

SEQ ID NO: 475783 - DNA, 25 bp, Homo sapien
ctattattagatccatagtcgaatg

SEQ ID NO: 475784 - DNA, 25 bp, Homo sapien
tagatccatagtcgaatgttttaat

SEQ ID NO: 475785 - DNA, 25 bp, Homo sapien
ggagcatgaattagcagtcctttca

SEQ ID NO: 475786 - DNA, 25 bp, Homo sapien
aatatgggagcatgaattagcagtc

SEQ ID NO: 475787 - DNA, 25 bp, Homo sapien
tgaattagcagtcctttcatacttt

SEQ ID NO: 475788 - DNA, 25 bp, Homo sapien
tatgggagcatgaattagcagtcct

SEQ ID NO: 475789 - DNA, 25 bp, Homo sapien
ctaagaccaacagataagtcttatc

SEQ ID NO: 475790 - DNA, 25 bp, Homo sapien
gttcctaagaccaacagataagtct

SEQ ID NO: 475791 - DNA, 25 bp, Homo sapien
cagataagtcttatcctttaaaaat

SEQ ID NO: 475792 - DNA, 25 bp, Homo sapien
accaacagataagtcttatccttta

SEQ ID NO: 475793 - DNA, 25 bp, Homo sapien
atctagtttaaagctgagtgaaagc

SEQ ID NO: 475794 - DNA, 25 bp, Homo sapien
ggatgaggctgctaataaaggtaaa

SEQ ID NO: 475795 - DNA, 25 bp, Homo sapien
gcctttccattcgataaagagttgg

SEQ ID NO: 475796 - DNA, 25 bp, Homo sapien
tattggcctgtatagatgaatctgg

SEQ ID NO: 475797 - DNA, 25 bp, Homo sapien
ttgtattggtaggaaaacgcctgct

SEQ ID NO: 475798 - DNA, 25 bp, Homo sapien
tagttaactcgaggtgaaaaatgcc

SEQ ID NO: 475799 - DNA, 25 bp, Homo sapien
gaccaaattgagctgatctgctagc

SEQ ID NO: 475800 - DNA, 25 bp, Homo sapien
tatatacctgagtgcgaggctgcca

SEQ ID NO: 475801 - DNA, 25 bp, Homo sapien
attaagagggctcgggcattggtat

SEQ ID NO: 475802 - DNA, 25 bp, Homo sapien
gcaatgagtgtgattaagagggctc

SEQ ID NO: 475803 - DNA, 25 bp, Homo sapien
cattggtatatgatgtgtttgtggc

SEQ ID NO: 475804 - DNA, 25 bp, Homo sapien
gataatttgggtactgcagacagct

SEQ ID NO: 475805 - DNA, 25 bp, Homo sapien
ttgaggctatgatctgaagttgggc

SEQ ID NO: 475806 - DNA, 25 bp, Homo sapien
gaagcctaggatagttgtgcccaga

SEQ ID NO: 475807 - DNA, 25 bp, Homo sapien
gcatggcgcattgaggttgaataaa

SEQ ID NO: 475808 - DNA, 25 bp, Homo sapien
aactgtgagctttatatggagaggc

SEQ ID NO: 475809 - DNA, 25 bp, Homo sapien
tactccagttgcattgaaatctcct

SEQ ID NO: 475810 - DNA, 25 bp, Homo sapien
atcacgaaatgtgttcggtaatttc

SEQ ID NO: 475811 - DNA, 25 bp, Homo sapien
atccttgttactccagttgcattga

SEQ ID NO: 475812 - DNA, 25 bp, Homo sapien
tcctttatcacgaaatgtgttcggt

SEQ ID NO: 475813 - DNA, 25 bp, Homo sapien
caaccccaaactttgcttcttgagg

SEQ ID NO: 475814 - DNA, 25 bp, Homo sapien
tcatccttcaaccccaaactttgct

SEQ ID NO: 475815 - DNA, 25 bp, Homo sapien
catccttcaaccccaaactttgctt

SEQ ID NO: 475816 - DNA, 25 bp, Homo sapien
cttcaaccccaaactttgcttcttg

SEQ ID NO: 475817 - DNA, 25 bp, Homo sapien
tgtaatctcaggtcttccggagtct

SEQ ID NO: 475818 - DNA, 25 bp, Homo sapien
ctgtaatctcaggtcttccggagtc

SEQ ID NO: 475819 - DNA, 25 bp, Homo sapien
taatctcaggtcttccggagtctga

SEQ ID NO: 475820 - DNA, 25 bp, Homo sapien
atctcaggtcttccggagtctgagg

SEQ ID NO: 475821 - DNA, 25 bp, Homo sapien
tatccatttctattcatcattgtac

SEQ ID NO: 475822 - DNA, 25 bp, Homo sapien
cacaagtgtttctgctttatccatt

SEQ ID NO: 475823 - DNA, 25 bp, Homo sapien
tggaattgagaataacacaagtgtt

SEQ ID NO: 475824 - DNA, 25 bp, Homo sapien
tctattcatcattgtactggatacc

SEQ ID NO: 475825 - DNA, 25 bp, Homo sapien
aataccaccatgatccatttcttgg

SEQ ID NO: 475826 - DNA, 25 bp, Homo sapien
tactcccataagtcttcctacaaag

SEQ ID NO: 475827 - DNA, 25 bp, Homo sapien
gaagtctcggatcagaataccacca

SEQ ID NO: 475828 - DNA, 25 bp, Homo sapien
cagttttggaatctagaagtctcgg

SEQ ID NO: 475829 - DNA, 25 bp, Homo sapien
ctgctaacatgtgggcttctagatt

SEQ ID NO: 475830 - DNA, 25 bp, Homo sapien
tgctaacatgtgggcttctagattc

SEQ ID NO: 475831 - DNA, 25 bp, Homo sapien
aacactggaattcaccagaaaagtg

SEQ ID NO: 475832 - DNA, 25 bp, Homo sapien
cactggaattcaccagaaaagtgac

SEQ ID NO: 475833 - DNA, 25 bp, Homo sapien
aagaaagaacactggaattcaccag

SEQ ID NO: 475834 - DNA, 25 bp, Homo sapien
aaagaacactggaattcaccagaaa

SEQ ID NO: 475835 - DNA, 25 bp, Homo sapien
tacacattacaccacgtgtgtccaa

SEQ ID NO: 475836 - DNA, 25 bp, Homo sapien
caggcagggactagaagtaatgaga

SEQ ID NO: 475837 - DNA, 25 bp, Homo sapien
tttatttcattaagccactgggatt

SEQ ID NO: 475838 - DNA, 25 bp, Homo sapien
gattttactcaattgacaggcaggg

SEQ ID NO: 475839 - DNA, 25 bp, Homo sapien
ggtttcctcaattgtgatataggta

SEQ ID NO: 475840 - DNA, 25 bp, Homo sapien
cctgggcctggtctatttaatatct

SEQ ID NO: 475841 - DNA, 25 bp, Homo sapien
tcatgactcccagtataacagtaag

SEQ ID NO: 475842 - DNA, 25 bp, Homo sapien
tgagcaattcacaacgaattttctc

SEQ ID NO: 475843 - DNA, 25 bp, Homo sapien
tgataatgccaactagctctgaaga

SEQ ID NO: 475844 - DNA, 25 bp, Homo sapien
gaagggtctacctctgtcacactgg

SEQ ID NO: 475845 - DNA, 25 bp, Homo sapien
ttcaaaaatgggatgctcagccagc

SEQ ID NO: 475846 - DNA, 25 bp, Homo sapien
cagccagcctggtgtaatgcaaata

SEQ ID NO: 475847 - DNA, 25 bp, Homo sapien
aacaattttgagcaatatggagagt

SEQ ID NO: 475848 - DNA, 25 bp, Homo sapien
acaattttgagcaatatggagagtc

SEQ ID NO: 475849 - DNA, 25 bp, Homo sapien
cttggctaaagagaatgtaagacat

SEQ ID NO: 475850 - DNA, 25 bp, Homo sapien
aagagaatgtaagacatgtgtaaag

SEQ ID NO: 475851 - DNA, 25 bp, Homo sapien
gctaaagagaatgtaagacatgtgt

SEQ ID NO: 475852 - DNA, 25 bp, Homo sapien
tggctaaagagaatgtaagacatgt

SEQ ID NO: 475853 - DNA, 25 bp, Homo sapien
ctgagctcgtcaaggagcgcttttt

SEQ ID NO: 475854 - DNA, 25 bp, Homo sapien
caaggagcgctttttggagttaacg

SEQ ID NO: 475855 - DNA, 25 bp, Homo sapien
gctttttggagttaacgcgtgtcgc

SEQ ID NO: 475856 - DNA, 25 bp, Homo sapien
ttttggagttaacgcgtgtcgccat

SEQ ID NO: 475857 - DNA, 25 bp, Homo sapien
tcttgagtcactttattcgaactac

SEQ ID NO: 475858 - DNA, 25 bp, Homo sapien
tagcgaacggtggtgtcagcaataa

SEQ ID NO: 475859 - DNA, 25 bp, Homo sapien
taacaccagcaatgggaaacccatg

SEQ ID NO: 475860 - DNA, 25 bp, Homo sapien
aaagatgtgccaaagcttagttctc

SEQ ID NO: 475861 - DNA, 25 bp, Homo sapien
gaaacccatgcaatgcgttcagctt

SEQ ID NO: 475862 - DNA, 25 bp, Homo sapien
tcattgccacacagaagtgctccat

SEQ ID NO: 475863 - DNA, 25 bp, Homo sapien
gctgctaaaccatgcatatgttcat

SEQ ID NO: 475864 - DNA, 25 bp, Homo sapien
tgctgctaaaccatgcatatgttca

SEQ ID NO: 475865 - DNA, 25 bp, Homo sapien
gtagtacttgaatacgatcagcatc

SEQ ID NO: 475866 - DNA, 25 bp, Homo sapien
tgtagtacttgaatacgatcagcat

SEQ ID NO: 475867 - DNA, 25 bp, Homo sapien
aatccaggtaagctgtagggctaag

SEQ ID NO: 475868 - DNA, 25 bp, Homo sapien
ctgtagtacttgaatacgatcagca

SEQ ID NO: 475869 - DNA, 25 bp, Homo sapien
gaaatgtccacctccaaaatcagag

SEQ ID NO: 475870 - DNA, 25 bp, Homo sapien
ctccaaaatcagaggtgggcagctc

SEQ ID NO: 475871 - DNA, 25 bp, Homo sapien
ggcagctcatttgaatcttctgtgg

SEQ ID NO: 475872 - DNA, 25 bp, Homo sapien
tgataccctttagcagaggtaaatc

SEQ ID NO: 475873 - DNA, 25 bp, Homo sapien
ggctaatagtacttgtagcttcttc

SEQ ID NO: 475874 - DNA, 25 bp, Homo sapien
aatagtacttgtagcttcttcaagt

SEQ ID NO: 475875 - DNA, 25 bp, Homo sapien
taatagtacttgtagcttcttcaag

SEQ ID NO: 475876 - DNA, 25 bp, Homo sapien
gtacttgtagcttcttcaagtttac

SEQ ID NO: 475877 - DNA, 25 bp, Homo sapien
tcaagccccatggataggtgtttgc

SEQ ID NO: 475878 - DNA, 25 bp, Homo sapien
ctctgtactcaatcaagccccatgg

SEQ ID NO: 475879 - DNA, 25 bp, Homo sapien
ccacaatgactccaagacgttgttc

SEQ ID NO: 475880 - DNA, 25 bp, Homo sapien
gactccaagacgttgttcttctgct

SEQ ID NO: 475881 - DNA, 25 bp, Homo sapien
gcaggtaacaaatagcaggtatctt

SEQ ID NO: 475882 - DNA, 25 bp, Homo sapien
caaatagcaggtatcttagtctgag

SEQ ID NO: 475883 - DNA, 25 bp, Homo sapien
gcaggtatcttagtctgagtatata

SEQ ID NO: 475884 - DNA, 25 bp, Homo sapien
aactgcaggtaacaaatagcaggta

SEQ ID NO: 475885 - DNA, 25 bp, Homo sapien
cacagcaaacggtggtgaaagccag

SEQ ID NO: 475886 - DNA, 25 bp, Homo sapien
attatgggtgcaaaattagtggtgg

SEQ ID NO: 475887 - DNA, 25 bp, Homo sapien
ggcaagcttcggatgcacagcaaac

SEQ ID NO: 475888 - DNA, 25 bp, Homo sapien
cagggtctaaggtcaattatgggtg

SEQ ID NO: 475889 - DNA, 25 bp, Homo sapien
atatgaatacattcagctacgtagc

SEQ ID NO: 475890 - DNA, 25 bp, Homo sapien
tggggccagccatatgaatacattc

SEQ ID NO: 475891 - DNA, 25 bp, Homo sapien
gatttggggccagccatatgaatac

SEQ ID NO: 475892 - DNA, 25 bp, Homo sapien
gaatacattcagctacgtagcacat

SEQ ID NO: 475893 - DNA, 25 bp, Homo sapien
tgtaggaggtccatagtagctgcag

SEQ ID NO: 475894 - DNA, 25 bp, Homo sapien
ggtaactgcatggtatttggtggcc

SEQ ID NO: 475895 - DNA, 25 bp, Homo sapien
ctttgagtctctggtagcacctctg

SEQ ID NO: 475896 - DNA, 25 bp, Homo sapien
tctctggtagcacctctgattacag

SEQ ID NO: 475897 - DNA, 25 bp, Homo sapien
tacatgtaatgcatttaccctttac

SEQ ID NO: 475898 - DNA, 25 bp, Homo sapien
aatgcatttaccctttacaacatca

SEQ ID NO: 475899 - DNA, 25 bp, Homo sapien
tgtaatgcatttaccctttacaaca

SEQ ID NO: 475900 - DNA, 25 bp, Homo sapien
tgcatttaccctttacaacatcaca

SEQ ID NO: 475901 - DNA, 25 bp, Homo sapien
tggttgatggaaacactgtgaaagt

SEQ ID NO: 475902 - DNA, 25 bp, Homo sapien
tgaaagtcactgttgaacatgcaga

SEQ ID NO: 475903 - DNA, 25 bp, Homo sapien
gggaggagacccgtcatggtggttg

SEQ ID NO: 475904 - DNA, 25 bp, Homo sapien
atggtggttgatggaaacactgtga

SEQ ID NO: 475905 - DNA, 25 bp, Homo sapien
gagtttgatggaattagaatgctca

SEQ ID NO: 475906 - DNA, 25 bp, Homo sapien
gaattagaatgctcatcagaaatgc

SEQ ID NO: 475907 - DNA, 25 bp, Homo sapien
taacagatccagtatgtgagtttga

SEQ ID NO: 475908 - DNA, 25 bp, Homo sapien
caattaacaaatggcaagagtccac

SEQ ID NO: 475909 - DNA, 25 bp, Homo sapien
cagtatgattaaccagcatttgctg

SEQ ID NO: 475910 - DNA, 25 bp, Homo sapien
tgctgagataatcaccagaaacatg

SEQ ID NO: 475911 - DNA, 25 bp, Homo sapien
tttgctgagataatcaccagaaaca

SEQ ID NO: 475912 - DNA, 25 bp, Homo sapien
atttgctgagataatcaccagaaac

SEQ ID NO: 475913 - DNA, 25 bp, Homo sapien
tggtatcccggccaatggtagtacc

SEQ ID NO: 475914 - DNA, 25 bp, Homo sapien
tagtaccgtcctaggcagctggatt

SEQ ID NO: 475915 - DNA, 25 bp, Homo sapien
tagagtcccgtattggtatcccggc

SEQ ID NO: 475916 - DNA, 25 bp, Homo sapien
agttactagagtcccgtattggtat

SEQ ID NO: 475917 - DNA, 25 bp, Homo sapien
aatgggaatgagatcaagttctcct

SEQ ID NO: 475918 - DNA, 25 bp, Homo sapien
tgggaatgagatcaagttctcctgg

SEQ ID NO: 475919 - DNA, 25 bp, Homo sapien
ctcctggttggcatggccctttcct

SEQ ID NO: 475920 - DNA, 25 bp, Homo sapien
ggaatgggaatgagatcaagttctc

SEQ ID NO: 475921 - DNA, 25 bp, Homo sapien
cactgagtttagtactgaagaatgt

SEQ ID NO: 475922 - DNA, 25 bp, Homo sapien
tgctttggtcagacactcaaacttg

SEQ ID NO: 475923 - DNA, 25 bp, Homo sapien
taaaacagccgcaataggatcttgc

SEQ ID NO: 475924 - DNA, 25 bp, Homo sapien
tgaagaatgtgtctataaaacagcc

SEQ ID NO: 475925 - DNA, 25 bp, Homo sapien
ctcctccaggaacgtctttcaaatt

SEQ ID NO: 475926 - DNA, 25 bp, Homo sapien
cctcctccaggaacgtctttcaaat

SEQ ID NO: 475927 - DNA, 25 bp, Homo sapien
gcctcctccaggaacgtctttcaaa

SEQ ID NO: 475928 - DNA, 25 bp, Homo sapien
tgggcttactggggtctatgtctat

SEQ ID NO: 475929 - DNA, 25 bp, Homo sapien
ggcttactggggtctatgtctatct

SEQ ID NO: 475930 - DNA, 25 bp, Homo sapien
agtgggcttactggggtctatgtct

SEQ ID NO: 475931 - DNA, 25 bp, Homo sapien
cttactggggtctatgtctatcttc

SEQ ID NO: 475932 - DNA, 25 bp, Homo sapien
tctgaaagttgtacatgccaatttc

SEQ ID NO: 475933 - DNA, 25 bp, Homo sapien
ttctgaaagttgtacatgccaattt

SEQ ID NO: 475934 - DNA, 25 bp, Homo sapien
ctgaaagttgtacatgccaatttct

SEQ ID NO: 475935 - DNA, 25 bp, Homo sapien
agttttgctgccctgattgatgtct

SEQ ID NO: 475936 - DNA, 25 bp, Homo sapien
ttagaaaatccagtactagttttgc

SEQ ID NO: 475937 - DNA, 25 bp, Homo sapien
tcctttaggatacatttagaaaatc

SEQ ID NO: 475938 - DNA, 25 bp, Homo sapien
ccctgattgatgtcttcataggtag

SEQ ID NO: 475939 - DNA, 25 bp, Homo sapien
ggtaacaagccccagcaagtagcat

SEQ ID NO: 475940 - DNA, 25 bp, Homo sapien
aagagttttctgtggcgtctgagga

SEQ ID NO: 475941 - DNA, 25 bp, Homo sapien
tatggccctccataggaatgtccat

SEQ ID NO: 475942 - DNA, 25 bp, Homo sapien
tcccatgacatgctgacagggcttg

SEQ ID NO: 475943 - DNA, 25 bp, Homo sapien
tattcaattggcagacactttcaag

SEQ ID NO: 475944 - DNA, 25 bp, Homo sapien
gcaacagcaacgacagctgtattca

SEQ ID NO: 475945 - DNA, 25 bp, Homo sapien
taatccaaagtagcacattaaagca

SEQ ID NO: 475946 - DNA, 25 bp, Homo sapien
aagaagtgaccccatgctgatacag

SEQ ID NO: 475947 - DNA, 25 bp, Homo sapien
ccacaaaataaagaataaggttcat

SEQ ID NO: 475948 - DNA, 25 bp, Homo sapien
ccttcataaataataaatgccacaa

SEQ ID NO: 475949 - DNA, 25 bp, Homo sapien
cataaataataaatgccacaaaata

SEQ ID NO: 475950 - DNA, 25 bp, Homo sapien
ctcatatttcccttcataaataata

SEQ ID NO: 475951 - DNA, 25 bp, Homo sapien
ctcttccccagaagtatggtaaata

SEQ ID NO: 475952 - DNA, 25 bp, Homo sapien
tggtgactctctcataggagttagt

SEQ ID NO: 475953 - DNA, 25 bp, Homo sapien
tctcataggagttagtgctggacag

SEQ ID NO: 475954 - DNA, 25 bp, Homo sapien
tccccagaagtatggtaaataaaca

SEQ ID NO: 475955 - DNA, 25 bp, Homo sapien
agtccaacgctatctcgacactagg

SEQ ID NO: 475956 - DNA, 25 bp, Homo sapien
cgctatctcgacactaggatgatac

SEQ ID NO: 475957 - DNA, 25 bp, Homo sapien
ccaacgctatctcgacactaggatg

SEQ ID NO: 475958 - DNA, 25 bp, Homo sapien
tcagtccaacgctatctcgacacta

SEQ ID NO: 475959 - DNA, 25 bp, Homo sapien
ttggccacaaatcctgtgaacacca

SEQ ID NO: 475960 - DNA, 25 bp, Homo sapien
ggccacaaatcctgtgaacaccaag

SEQ ID NO: 475961 - DNA, 25 bp, Homo sapien
gccacaaatcctgtgaacaccaaga

SEQ ID NO: 475962 - DNA, 25 bp, Homo sapien
atcttggccacaaatcctgtgaaca

SEQ ID NO: 475963 - DNA, 25 bp, Homo sapien
ttgccagtttggggatgtgtaggac

SEQ ID NO: 475964 - DNA, 25 bp, Homo sapien
caaatttaggagatgactatttatg

SEQ ID NO: 475965 - DNA, 25 bp, Homo sapien
aatttaggagatgactatttatggc

SEQ ID NO: 475966 - DNA, 25 bp, Homo sapien
tttaggagatgactatttatggcca

SEQ ID NO: 475967 - DNA, 25 bp, Homo sapien
ttaggagatgactatttatggccat

SEQ ID NO: 475968 - DNA, 25 bp, Homo sapien
gatatgctatgccacagtggacagg

SEQ ID NO: 475969 - DNA, 25 bp, Homo sapien
cagtggacaggtaaatacaaatgat

SEQ ID NO: 475970 - DNA, 25 bp, Homo sapien
ggagaggtagatatgctatgccaca

SEQ ID NO: 475971 - DNA, 25 bp, Homo sapien
tacaaatgatcctttcgctgccttc

SEQ ID NO: 475972 - DNA, 25 bp, Homo sapien
gaacctcactattgacaaggccaca

SEQ ID NO: 475973 - DNA, 25 bp, Homo sapien
taagttgccacttttaagaacctca

SEQ ID NO: 475974 - DNA, 25 bp, Homo sapien
ctgagagttcaccaggtatataaaa

SEQ ID NO: 475975 - DNA, 25 bp, Homo sapien
taaaagcggcatcaatctctgccac

SEQ ID NO: 475976 - DNA, 25 bp, Homo sapien
gggatcaggagtaggacctatgcaa

SEQ ID NO: 475977 - DNA, 25 bp, Homo sapien
tgcagtgggatcaggagtaggacct

SEQ ID NO: 475978 - DNA, 25 bp, Homo sapien
caggagtaggacctatgcaagattt

SEQ ID NO: 475979 - DNA, 25 bp, Homo sapien
cagtgggatcaggagtaggacctat

SEQ ID NO: 475980 - DNA, 25 bp, Homo sapien
tccagaatgaggtgtcatcaggatg

SEQ ID NO: 475981 - DNA, 25 bp, Homo sapien
acaggagaacactcttacaaccttt

SEQ ID NO: 475982 - DNA, 25 bp, Homo sapien
ttacaacctttggaactccagaatg

SEQ ID NO: 475983 - DNA, 25 bp, Homo sapien
attttgtactccacacaggagaaca

SEQ ID NO: 475984 - DNA, 25 bp, Homo sapien
gcagcaaatgtgatcccctcagaga

SEQ ID NO: 475985 - DNA, 25 bp, Homo sapien
catggtagcagcaaatgtgatcccc

SEQ ID NO: 475986 - DNA, 25 bp, Homo sapien
ggtagcagcaaatgtgatcccctca

SEQ ID NO: 475987 - DNA, 25 bp, Homo sapien
ctcatggtagcagcaaatgtgatcc

SEQ ID NO: 475988 - DNA, 25 bp, Homo sapien
ggctgtacaagatgcatgctgtcca

SEQ ID NO: 475989 - DNA, 25 bp, Homo sapien
ggtactgacagagtaacgacccact

SEQ ID NO: 475990 - DNA, 25 bp, Homo sapien
taagggagccagcatatgcagaaac

SEQ ID NO: 475991 - DNA, 25 bp, Homo sapien
gagtgtaccaagacgttcatgagga

SEQ ID NO: 475992 - DNA, 25 bp, Homo sapien
tttttcttctttatagctctcttca

SEQ ID NO: 475993 - DNA, 25 bp, Homo sapien
tctttttcttctttatagctctctt

SEQ ID NO: 475994 - DNA, 25 bp, Homo sapien
ctttttcttctttatagctctcttc

SEQ ID NO: 475995 - DNA, 25 bp, Homo sapien
ttttcttctttatagctctcttcat

SEQ ID NO: 475996 - DNA, 25 bp, Homo sapien
ctttcaaactctacccgtttgtatg

SEQ ID NO: 475997 - DNA, 25 bp, Homo sapien
tcacgatttgattggttccttgatc

SEQ ID NO: 475998 - DNA, 25 bp, Homo sapien
ctctacccgtttgtatggcaataaa

SEQ ID NO: 475999 - DNA, 25 bp, Homo sapien
ccttgatgtcacgatttgattggtt

SEQ ID NO: 476000 - DNA, 25 bp, Homo sapien
taaaggcgtcgcgtctgcagttgct

SEQ ID NO: 476001 - DNA, 25 bp, Homo sapien
gaacctgcagaccttagcgctgagc

SEQ ID NO: 476002 - DNA, 25 bp, Homo sapien
tgattccagaatatgatcccacagg

SEQ ID NO: 476003 - DNA, 25 bp, Homo sapien
cagcgagactcattcctgaagagca

SEQ ID NO: 476004 - DNA, 25 bp, Homo sapien
ttactctgacttgggaagttagggc

SEQ ID NO: 476005 - DNA, 25 bp, Homo sapien
cactgagccaagtactgtgggagca

SEQ ID NO: 476006 - DNA, 25 bp, Homo sapien
gagtaccaagtagtaagcattcaca

SEQ ID NO: 476007 - DNA, 25 bp, Homo sapien
gacatttgacctgtgtcctgaatga

SEQ ID NO: 476008 - DNA, 25 bp, Homo sapien
tcaatgtcctgtgagcgttctataa

SEQ ID NO: 476009 - DNA, 25 bp, Homo sapien
tcctgtgagcgttctataaggtaca

SEQ ID NO: 476010 - DNA, 25 bp, Homo sapien
gtttcaaggacctcaatgtcctgtg

SEQ ID NO: 476011 - DNA, 25 bp, Homo sapien
tagaagtttcaaggacctcaatgtc

SEQ ID NO: 476012 - DNA, 25 bp, Homo sapien
gatttcaagtcacagtgtagaagca

SEQ ID NO: 476013 - DNA, 25 bp, Homo sapien
cagtggatagcttcccctgtaccat

SEQ ID NO: 476014 - DNA, 25 bp, Homo sapien
tttgtctggtagtcacctttgtcaa

SEQ ID NO: 476015 - DNA, 25 bp, Homo sapien
cagtttggatgatctagtttttgtc

SEQ ID NO: 476016 - DNA, 25 bp, Homo sapien
ttgcaaacacagattcaactgagtt

SEQ ID NO: 476017 - DNA, 25 bp, Homo sapien
agtcactgcaggctgctcaaaatct

SEQ ID NO: 476018 - DNA, 25 bp, Homo sapien
gggagatatagtgccccattcagtc

SEQ ID NO: 476019 - DNA, 25 bp, Homo sapien
ccttctgggagatatagtgccccat

SEQ ID NO: 476020 - DNA, 25 bp, Homo sapien
ctgcaggctgctcaaaatctgggat

SEQ ID NO: 476021 - DNA, 25 bp, Homo sapien
tatgtttcttcccaaatatttggca

SEQ ID NO: 476022 - DNA, 25 bp, Homo sapien
cttcccaaatatttggcacactcac

SEQ ID NO: 476023 - DNA, 25 bp, Homo sapien
tgtttcttcccaaatatttggcaca

SEQ ID NO: 476024 - DNA, 25 bp, Homo sapien
tttcttcccaaatatttggcacact

SEQ ID NO: 476025 - DNA, 25 bp, Homo sapien
gatgacaaggtcatgttcagagatg

SEQ ID NO: 476026 - DNA, 25 bp, Homo sapien
ggtagaactttgattgccatcaatt

SEQ ID NO: 476027 - DNA, 25 bp, Homo sapien
aggtcatgttcagagatgccaagag

SEQ ID NO: 476028 - DNA, 25 bp, Homo sapien
cattggtagaactttgattgccatc

SEQ ID NO: 476029 - DNA, 25 bp, Homo sapien
aagtaaagcggactgaccctttgct

SEQ ID NO: 476030 - DNA, 25 bp, Homo sapien
agtaaagcggactgaccctttgctt

SEQ ID NO: 476031 - DNA, 25 bp, Homo sapien
gatgacttgacattcatggttgaaa

SEQ ID NO: 476032 - DNA, 25 bp, Homo sapien
gtagcaaaccttcacattgaaaaga

SEQ ID NO: 476033 - DNA, 25 bp, Homo sapien
tcctctgtgacagctggatagctga

SEQ ID NO: 476034 - DNA, 25 bp, Homo sapien
gtgtttcttattcggcagtagcaaa

SEQ ID NO: 476035 - DNA, 25 bp, Homo sapien
tgcctcgaccccacgttagttttca

SEQ ID NO: 476036 - DNA, 25 bp, Homo sapien
ccaggccgcaggagtggtcgtgcca

SEQ ID NO: 476037 - DNA, 25 bp, Homo sapien
agtggtcgtgccagccgacagcggg

SEQ ID NO: 476038 - DNA, 25 bp, Homo sapien
gccgacagcgggctggtgcctcgac

SEQ ID NO: 476039 - DNA, 25 bp, Homo sapien
tgttatgtccataacataggctgac

SEQ ID NO: 476040 - DNA, 25 bp, Homo sapien
ctctctttcataaggtcgctaattc

SEQ ID NO: 476041 - DNA, 25 bp, Homo sapien
gacccaatggtacataaatgttatg

SEQ ID NO: 476042 - DNA, 25 bp, Homo sapien
cataacataggctgacaattgattc

SEQ ID NO: 476043 - DNA, 25 bp, Homo sapien
ttaaggtacagtggctgataaacca

SEQ ID NO: 476044 - DNA, 25 bp, Homo sapien
cagacactaattggaacggttttgg

SEQ ID NO: 476045 - DNA, 25 bp, Homo sapien
ttggaaccaccttcaattcctgttg

SEQ ID NO: 476046 - DNA, 25 bp, Homo sapien
cctgttgtcctgttttaaggtacag

SEQ ID NO: 476047 - DNA, 25 bp, Homo sapien
ctccaaagatcatttgctgcttgtc

SEQ ID NO: 476048 - DNA, 25 bp, Homo sapien
cttgccttcaatggctaggattcca

SEQ ID NO: 476049 - DNA, 25 bp, Homo sapien
caatggctaggattccacatcttct

SEQ ID NO: 476050 - DNA, 25 bp, Homo sapien
ccttcaatggctaggattccacatc

SEQ ID NO: 476051 - DNA, 25 bp, Homo sapien
aaggaccttaggtagcaaagtgcta

SEQ ID NO: 476052 - DNA, 25 bp, Homo sapien
tctagtctgactacgggcaattctc

SEQ ID NO: 476053 - DNA, 25 bp, Homo sapien
tatatcaggtgcaacaattatcagc

SEQ ID NO: 476054 - DNA, 25 bp, Homo sapien
tagaaaataggttgggccactgcca

SEQ ID NO: 476055 - DNA, 25 bp, Homo sapien
aacgtttctggaaatccggagtgag

SEQ ID NO: 476056 - DNA, 25 bp, Homo sapien
aagcactcaatactccctgttttgg

SEQ ID NO: 476057 - DNA, 25 bp, Homo sapien
gagatttggagaatctgttgaccac

SEQ ID NO: 476058 - DNA, 25 bp, Homo sapien
tttaaatatagctgagcaagcactc

SEQ ID NO: 476059 - DNA, 25 bp, Homo sapien
acttgaatgagcatgtaaaagtatg

SEQ ID NO: 476060 - DNA, 25 bp, Homo sapien
ttatcaacttttcgatggtaacttg

SEQ ID NO: 476061 - DNA, 25 bp, Homo sapien
taacttgaatgagcatgtaaaagta

SEQ ID NO: 476062 - DNA, 25 bp, Homo sapien
cttttcgatggtaacttgaatgagc

SEQ ID NO: 476063 - DNA, 25 bp, Homo sapien
ttgcctatgccccgccttctgaagg

SEQ ID NO: 476064 - DNA, 25 bp, Homo sapien
ctttatcatgttcttgcctatgccc

SEQ ID NO: 476065 - DNA, 25 bp, Homo sapien
aggatgatgtcatagaaaagcagga

SEQ ID NO: 476066 - DNA, 25 bp, Homo sapien
gccccgccttctgaaggatgatgtc

SEQ ID NO: 476067 - DNA, 25 bp, Homo sapien
actgcctgtcaaatagtattctgtt

SEQ ID NO: 476068 - DNA, 25 bp, Homo sapien
tgcctgtcaaatagtattctgtttc

SEQ ID NO: 476069 - DNA, 25 bp, Homo sapien
tgtcaaatagtattctgtttcatca

SEQ ID NO: 476070 - DNA, 25 bp, Homo sapien
gcctgtcaaatagtattctgtttca

SEQ ID NO: 476071 - DNA, 25 bp, Homo sapien
ttccggtcaggagccaagatggtac

SEQ ID NO: 476072 - DNA, 25 bp, Homo sapien
tgtctgcttgtcaccgtaactgctc

SEQ ID NO: 476073 - DNA, 25 bp, Homo sapien
caagaaggatctgagtgtgttccgg

SEQ ID NO: 476074 - DNA, 25 bp, Homo sapien
tgatcacctcacataggcaagaagg

SEQ ID NO: 476075 - DNA, 25 bp, Homo sapien
tctctatagaaatagtctgagccat

SEQ ID NO: 476076 - DNA, 25 bp, Homo sapien
cagtcaacaaaatctctatagaaat

SEQ ID NO: 476077 - DNA, 25 bp, Homo sapien
gtcaacaaaatctctatagaaatag

SEQ ID NO: 476078 - DNA, 25 bp, Homo sapien
aaaatctctatagaaatagtctgag

SEQ ID NO: 476079 - DNA, 25 bp, Homo sapien
ggcaaccagattgggctctttgtaa

SEQ ID NO: 476080 - DNA, 25 bp, Homo sapien
tgtatcatacattccattgagcaga

SEQ ID NO: 476081 - DNA, 25 bp, Homo sapien
gtgtataatttcatgccaaaccagt

SEQ ID NO: 476082 - DNA, 25 bp, Homo sapien
tgtacactctactgtggcaaccaga

SEQ ID NO: 476083 - DNA, 25 bp, Homo sapien
tcagtaccgtatcaaggattatttc

SEQ ID NO: 476084 - DNA, 25 bp, Homo sapien
ttttctgaccacatagcattccttt

SEQ ID NO: 476085 - DNA, 25 bp, Homo sapien
cagcaaatagtcacatacacaaatg

SEQ ID NO: 476086 - DNA, 25 bp, Homo sapien
cgtgagctggcaagatgaataaaaa

SEQ ID NO: 476087 - DNA, 25 bp, Homo sapien
acttcagcaactgggaatcacagaa

SEQ ID NO: 476088 - DNA, 25 bp, Homo sapien
gagccccatggttcatgtctataga

SEQ ID NO: 476089 - DNA, 25 bp, Homo sapien
ggttcttgttcttcaccgcaggaga

SEQ ID NO: 476090 - DNA, 25 bp, Homo sapien
tagaagtccatcctttggtccaaag

SEQ ID NO: 476091 - DNA, 25 bp, Homo sapien
taacccatctagatcttcgtggaaa

SEQ ID NO: 476092 - DNA, 25 bp, Homo sapien
caagtgcctttagcaagctcaacag

SEQ ID NO: 476093 - DNA, 25 bp, Homo sapien
ccatggactggaaaacctggaattc

SEQ ID NO: 476094 - DNA, 25 bp, Homo sapien
tatcacagtgattgaaccaagtgcc

SEQ ID NO: 476095 - DNA, 25 bp, Homo sapien
cccacagagcccttatgtgtttaga

SEQ ID NO: 476096 - DNA, 25 bp, Homo sapien
tgtttagagccaatataccaccctg

SEQ ID NO: 476097 - DNA, 25 bp, Homo sapien
taccaccctgagacgataaaactat

SEQ ID NO: 476098 - DNA, 25 bp, Homo sapien
ctagcagctagcaggaaattgtgcc

SEQ ID NO: 476099 - DNA, 25 bp, Homo sapien
gctcttcgcctctctgcaagacatt

SEQ ID NO: 476100 - DNA, 25 bp, Homo sapien
ttctccgagagcacaacaccaaatt

SEQ ID NO: 476101 - DNA, 25 bp, Homo sapien
gagcacaacaccaaattcagggaaa

SEQ ID NO: 476102 - DNA, 25 bp, Homo sapien
tctgcaagacatttctccgagagca

SEQ ID NO: 476103 - DNA, 25 bp, Homo sapien
taacaaggaaaccatagatttagga

SEQ ID NO: 476104 - DNA, 25 bp, Homo sapien
ggaaaagagatttgagtgaccaaaa

SEQ ID NO: 476105 - DNA, 25 bp, Homo sapien
tatgcatttatgacacacattaagg

SEQ ID NO: 476106 - DNA, 25 bp, Homo sapien
gagaccggttgattattgccataaa

SEQ ID NO: 476107 - DNA, 25 bp, Homo sapien
caatctctagcttattatttagctc

SEQ ID NO: 476108 - DNA, 25 bp, Homo sapien
ttcccacaacagcaatctctagctt

SEQ ID NO: 476109 - DNA, 25 bp, Homo sapien
agacattatgtttcccacaacagca

SEQ ID NO: 476110 - DNA, 25 bp, Homo sapien
tgctaaatggcttagcagacattat

SEQ ID NO: 476111 - DNA, 25 bp, Homo sapien
ggattacttctagcaacagttttag

SEQ ID NO: 476112 - DNA, 25 bp, Homo sapien
tgacggacttccttggaagccgaaa

SEQ ID NO: 476113 - DNA, 25 bp, Homo sapien
cagttttagctgtgttattctgacg

SEQ ID NO: 476114 - DNA, 25 bp, Homo sapien
tctaattccctcatgtagtctatgg

SEQ ID NO: 476115 - DNA, 25 bp, Homo sapien
ttttagcattaaaaacaatttcaca

SEQ ID NO: 476116 - DNA, 25 bp, Homo sapien
aaacaatttcacatttatttttgtg

SEQ ID NO: 476117 - DNA, 25 bp, Homo sapien
gcattaaaaacaatttcacatttat

SEQ ID NO: 476118 - DNA, 25 bp, Homo sapien
caatttcacatttatttttgtgcat

SEQ ID NO: 476119 - DNA, 25 bp, Homo sapien
aggtactgcaggtgaatttcctcag

SEQ ID NO: 476120 - DNA, 25 bp, Homo sapien
caggtactgcaggtgaatttcctca

SEQ ID NO: 476121 - DNA, 25 bp, Homo sapien
ggtactgcaggtgaatttcctcagg

SEQ ID NO: 476122 - DNA, 25 bp, Homo sapien
tcaggaagactgtgctttacttttg

SEQ ID NO: 476123 - DNA, 25 bp, Homo sapien
caggaagactgtgctttacttttgt

SEQ ID NO: 476124 - DNA, 25 bp, Homo sapien
aggaagactgtgctttacttttgtc

SEQ ID NO: 476125 - DNA, 25 bp, Homo sapien
gatccattcactgaagccctctccc

SEQ ID NO: 476126 - DNA, 25 bp, Homo sapien
ccacattgttgcatgtgatccattc

SEQ ID NO: 476127 - DNA, 25 bp, Homo sapien
tctccctctggcaatataacaactt

SEQ ID NO: 476128 - DNA, 25 bp, Homo sapien
tgtctcaaattccacttcctggtgt

SEQ ID NO: 476129 - DNA, 25 bp, Homo sapien
taatgttaatatcacctgccaaata

SEQ ID NO: 476130 - DNA, 25 bp, Homo sapien
ttttagaagagtatatttgattagc

SEQ ID NO: 476131 - DNA, 25 bp, Homo sapien
caagctgatttagaaccaaagtcat

SEQ ID NO: 476132 - DNA, 25 bp, Homo sapien
tatattttggatatgcagacacgac

SEQ ID NO: 476133 - DNA, 25 bp, Homo sapien
tcaattaattcctgaagaggtgtca

SEQ ID NO: 476134 - DNA, 25 bp, Homo sapien
cctaaacaaacacttgagaataaat

SEQ ID NO: 476135 - DNA, 25 bp, Homo sapien
agtacttaagaaagtgttgaagtag

SEQ ID NO: 476136 - DNA, 25 bp, Homo sapien
catccttatcagtcagattgagctc

SEQ ID NO: 476137 - DNA, 25 bp, Homo sapien
acacttttgcagctcccatcgtaaa

SEQ ID NO: 476138 - DNA, 25 bp, Homo sapien
gcacacttttgcagctcccatcgta

SEQ ID NO: 476139 - DNA, 25 bp, Homo sapien
acttttgcagctcccatcgtaaaac

SEQ ID NO: 476140 - DNA, 25 bp, Homo sapien
aagcacacttttgcagctcccatcg

SEQ ID NO: 476141 - DNA, 25 bp, Homo sapien
aattcttagctgtacttgacaggag

SEQ ID NO: 476142 - DNA, 25 bp, Homo sapien
tcttagctgtacttgacaggagcac

SEQ ID NO: 476143 - DNA, 25 bp, Homo sapien
caggaattcttagctgtacttgaca

SEQ ID NO: 476144 - DNA, 25 bp, Homo sapien
gctgtacttgacaggagcacattta

SEQ ID NO: 476145 - DNA, 25 bp, Homo sapien
ttcagcagcaatccatcaaaagata

SEQ ID NO: 476146 - DNA, 25 bp, Homo sapien
tcagcagcaatccatcaaaagataa

SEQ ID NO: 476147 - DNA, 25 bp, Homo sapien
cagcagcaatccatcaaaagataaa

SEQ ID NO: 476148 - DNA, 25 bp, Homo sapien
cttcagcagcaatccatcaaaagat

SEQ ID NO: 476149 - DNA, 25 bp, Homo sapien
atttgttgtgttattgatagctgca

SEQ ID NO: 476150 - DNA, 25 bp, Homo sapien
gttgagtacatagttatttgttgtg

SEQ ID NO: 476151 - DNA, 25 bp, Homo sapien
tattgatagctgcatctagtcttac

SEQ ID NO: 476152 - DNA, 25 bp, Homo sapien
atttcttcaactgggtgttgagtac

SEQ ID NO: 476153 - DNA, 25 bp, Homo sapien
tttgtattattaccaatgttgcagc

SEQ ID NO: 476154 - DNA, 25 bp, Homo sapien
gatgcgtgcaccagtaacattaccg

SEQ ID NO: 476155 - DNA, 25 bp, Homo sapien
gagctagacgcagtctccggaacct

SEQ ID NO: 476156 - DNA, 25 bp, Homo sapien
ctagttcagccaccgaagggagcta

SEQ ID NO: 476157 - DNA, 25 bp, Homo sapien
cgatacaacacctttatctgtcgta

SEQ ID NO: 476158 - DNA, 25 bp, Homo sapien
cacctttatctgtcgtatatgagac

SEQ ID NO: 476159 - DNA, 25 bp, Homo sapien
tcactagatgctttcgatacaacac

SEQ ID NO: 476160 - DNA, 25 bp, Homo sapien
tctgtcgtatatgagacaaatataa

SEQ ID NO: 476161 - DNA, 25 bp, Homo sapien
agcaggatggacacaaagacataac

SEQ ID NO: 476162 - DNA, 25 bp, Homo sapien
ttggaagcaggatggacacaaagac

SEQ ID NO: 476163 - DNA, 25 bp, Homo sapien
caatgtaatttggaagcaggatgga

SEQ ID NO: 476164 - DNA, 25 bp, Homo sapien
gatggacacaaagacataacttgaa

SEQ ID NO: 476165 - DNA, 25 bp, Homo sapien
accaaatggccgtaacagcagatta

SEQ ID NO: 476166 - DNA, 25 bp, Homo sapien
gacaagtgacctctaataactgcaa

SEQ ID NO: 476167 - DNA, 25 bp, Homo sapien
ctaaattagtagaagcgcagtggtc

SEQ ID NO: 476168 - DNA, 25 bp, Homo sapien
taaatgccgaagtagttcatgtgac

SEQ ID NO: 476169 - DNA, 25 bp, Homo sapien
agttagggagagtttgtttgtctgt

SEQ ID NO: 476170 - DNA, 25 bp, Homo sapien
agcatagatttcctttgcataggtc

SEQ ID NO: 476171 - DNA, 25 bp, Homo sapien
ctttcatgactttagcatcaatttg

SEQ ID NO: 476172 - DNA, 25 bp, Homo sapien
tgtttgtctgtttagctatcttcat

SEQ ID NO: 476173 - DNA, 25 bp, Homo sapien
gacccattataacaaggttctctgt

SEQ ID NO: 476174 - DNA, 25 bp, Homo sapien
tataacaaggttctctgttctggcc

SEQ ID NO: 476175 - DNA, 25 bp, Homo sapien
aggttctctgttctggccgtgctca

SEQ ID NO: 476176 - DNA, 25 bp, Homo sapien
cattctgactggacagacccattat

SEQ ID NO: 476177 - DNA, 25 bp, Homo sapien
ttggagtgtggagggcacttccgaa

SEQ ID NO: 476178 - DNA, 25 bp, Homo sapien
agtgtggagggcacttccgaagttt

SEQ ID NO: 476179 - DNA, 25 bp, Homo sapien
cttgtttggagtgtggagggcactt

SEQ ID NO: 476180 - DNA, 25 bp, Homo sapien
agttttgattcttagatcctttgga

SEQ ID NO: 476181 - DNA, 25 bp, Homo sapien
atgggaatgctctcctcctgaacag

SEQ ID NO: 476182 - DNA, 25 bp, Homo sapien
agcccatttcaaaaattcccttcag

SEQ ID NO: 476183 - DNA, 25 bp, Homo sapien
gatatgcctaccagataaagcaatg

SEQ ID NO: 476184 - DNA, 25 bp, Homo sapien
tcagtaactcccgtttcaaacaata

SEQ ID NO: 476185 - DNA, 25 bp, Homo sapien
cactgcttgtatattgtgcttcttc

SEQ ID NO: 476186 - DNA, 25 bp, Homo sapien
aatgaggtaggttctgctcttgcct

SEQ ID NO: 476187 - DNA, 25 bp, Homo sapien
agggaatgaggtaggttctgctctt

SEQ ID NO: 476188 - DNA, 25 bp, Homo sapien
gttctctagtcggaacaagcaccac

SEQ ID NO: 476189 - DNA, 25 bp, Homo sapien
cttttcttagtaacatccaggattc

SEQ ID NO: 476190 - DNA, 25 bp, Homo sapien
ttagtaacatccaggattctcctag

SEQ ID NO: 476191 - DNA, 25 bp, Homo sapien
gtaacatccaggattctcctagggg

SEQ ID NO: 476192 - DNA, 25 bp, Homo sapien
tcttagtaacatccaggattctcct

SEQ ID NO: 476193 - DNA, 25 bp, Homo sapien
tctgcctgctcatgcaatactatca

SEQ ID NO: 476194 - DNA, 25 bp, Homo sapien
tatctgcctgctcatgcaatactat

SEQ ID NO: 476195 - DNA, 25 bp, Homo sapien
acttatctgcctgctcatgcaatac

SEQ ID NO: 476196 - DNA, 25 bp, Homo sapien
ttatctgcctgctcatgcaatacta

SEQ ID NO: 476197 - DNA, 25 bp, Homo sapien
aatcttcctgtttttaggtagcatg

SEQ ID NO: 476198 - DNA, 25 bp, Homo sapien
taggtagcatgataataatatcctc

SEQ ID NO: 476199 - DNA, 25 bp, Homo sapien
aatatcctccattatctgcacaaaa

SEQ ID NO: 476200 - DNA, 25 bp, Homo sapien
aaagggaaagtagcagaatgtagta

SEQ ID NO: 476201 - DNA, 25 bp, Homo sapien
tttgaagctcagttatacatgcata

SEQ ID NO: 476202 - DNA, 25 bp, Homo sapien
tttttgaagctcagttatacatgca

SEQ ID NO: 476203 - DNA, 25 bp, Homo sapien
tgaagctcagttatacatgcatagt

SEQ ID NO: 476204 - DNA, 25 bp, Homo sapien
tatacatgcatagtactgggttact

SEQ ID NO: 476205 - DNA, 25 bp, Homo sapien
cagaaaatgatcgactggtttatct

SEQ ID NO: 476206 - DNA, 25 bp, Homo sapien
aaatgatcgactggtttatctgaag

SEQ ID NO: 476207 - DNA, 25 bp, Homo sapien
gaaaatgatcgactggtttatctga

SEQ ID NO: 476208 - DNA, 25 bp, Homo sapien
ttacagaaaatgatcgactggttta

SEQ ID NO: 476209 - DNA, 25 bp, Homo sapien
acagatcagtgtaaacaagatcgca

SEQ ID NO: 476210 - DNA, 25 bp, Homo sapien
taaacaagatcgcatcataagccat

SEQ ID NO: 476211 - DNA, 25 bp, Homo sapien
aagatcgcatcataagccatttcgg

SEQ ID NO: 476212 - DNA, 25 bp, Homo sapien
tcagtgtaaacaagatcgcatcata

SEQ ID NO: 476213 - DNA, 25 bp, Homo sapien
atcaaagtttattaacacattcaca

SEQ ID NO: 476214 - DNA, 25 bp, Homo sapien
caaagtttattaacacattcacacc

SEQ ID NO: 476215 - DNA, 25 bp, Homo sapien
gtttattaacacattcacaccttgt

SEQ ID NO: 476216 - DNA, 25 bp, Homo sapien
tgggaaatcaaagtttattaacaca

SEQ ID NO: 476217 - DNA, 25 bp, Homo sapien
tgaccaaagcgacctgatcttccaa

SEQ ID NO: 476218 - DNA, 25 bp, Homo sapien
ccaaagcgacctgatcttccaatac

SEQ ID NO: 476219 - DNA, 25 bp, Homo sapien
gaccaaagcgacctgatcttccaat

SEQ ID NO: 476220 - DNA, 25 bp, Homo sapien
gatgaccaaagcgacctgatcttcc

SEQ ID NO: 476221 - DNA, 25 bp, Homo sapien
caaacgagccgtctgtagtttgtca

SEQ ID NO: 476222 - DNA, 25 bp, Homo sapien
ccgtctgtagtttgtcaaagcatgc

SEQ ID NO: 476223 - DNA, 25 bp, Homo sapien
gagccgtctgtagtttgtcaaagca

SEQ ID NO: 476224 - DNA, 25 bp, Homo sapien
agatccaaacgagccgtctgtagtt

SEQ ID NO: 476225 - DNA, 25 bp, Homo sapien
aatcaggttcatactaacattgaaa

SEQ ID NO: 476226 - DNA, 25 bp, Homo sapien
atttttgaaccttataaattcagca

SEQ ID NO: 476227 - DNA, 25 bp, Homo sapien
aaaaagctgtgccatttattgtcgg

SEQ ID NO: 476228 - DNA, 25 bp, Homo sapien
tcaagatgttaccataatttttgaa

SEQ ID NO: 476229 - DNA, 25 bp, Homo sapien
tgactgtaacactactacaactgcc

SEQ ID NO: 476230 - DNA, 25 bp, Homo sapien
gaaaattcaacctgcatgtcactga

SEQ ID NO: 476231 - DNA, 25 bp, Homo sapien
caacctgcatgtcactgactgtaac

SEQ ID NO: 476232 - DNA, 25 bp, Homo sapien
aagagaagctctccatgaaaattca

SEQ ID NO: 476233 - DNA, 25 bp, Homo sapien
gaggcaggcaaactgactaggaact

SEQ ID NO: 476234 - DNA, 25 bp, Homo sapien
cattgcttttaaggaactggcccac

SEQ ID NO: 476235 - DNA, 25 bp, Homo sapien
aaatctttacggcaagttggcaggc

SEQ ID NO: 476236 - DNA, 25 bp, Homo sapien
caagtatggctttcgtggttcagtc

SEQ ID NO: 476237 - DNA, 25 bp, Homo sapien
aagtgcaatgttatattccatgtgc

SEQ ID NO: 476238 - DNA, 25 bp, Homo sapien
gaagtgcaatgttatattccatgtg

SEQ ID NO: 476239 - DNA, 25 bp, Homo sapien
gtgcaatgttatattccatgtgcat

SEQ ID NO: 476240 - DNA, 25 bp, Homo sapien
cagaagtgcaatgttatattccatg

SEQ ID NO: 476241 - DNA, 25 bp, Homo sapien
tccgaaaagctatggatgaaataaa

SEQ ID NO: 476242 - DNA, 25 bp, Homo sapien
catagtatgcgttgtcatcaccgtc

SEQ ID NO: 476243 - DNA, 25 bp, Homo sapien
gcagaattctggtccgaaaagctat

SEQ ID NO: 476244 - DNA, 25 bp, Homo sapien
gaaacatagtatgcgttgtcatcac

SEQ ID NO: 476245 - DNA, 25 bp, Homo sapien
tctcataggtatcatattctgctag

SEQ ID NO: 476246 - DNA, 25 bp, Homo sapien
tatttctcataggtatcatattctg

SEQ ID NO: 476247 - DNA, 25 bp, Homo sapien
aggtatcatattctgctagagatgc

SEQ ID NO: 476248 - DNA, 25 bp, Homo sapien
cataggtatcatattctgctagaga

SEQ ID NO: 476249 - DNA, 25 bp, Homo sapien
ctttcccagttatgtggctgctgta

SEQ ID NO: 476250 - DNA, 25 bp, Homo sapien
tctgcctttcccagttatgtggctg

SEQ ID NO: 476251 - DNA, 25 bp, Homo sapien
tcccagttatgtggctgctgtatca

SEQ ID NO: 476252 - DNA, 25 bp, Homo sapien
gacgcaggcaagtctgcctttccca

SEQ ID NO: 476253 - DNA, 25 bp, Homo sapien
gaggacactacgtctgagtctctct

SEQ ID NO: 476254 - DNA, 25 bp, Homo sapien
cctgtcaaagaggacactacgtctg

SEQ ID NO: 476255 - DNA, 25 bp, Homo sapien
ggctgttgctcactagaatcagagc

SEQ ID NO: 476256 - DNA, 25 bp, Homo sapien
ctctctggctgttgctcactagaat

SEQ ID NO: 476257 - DNA, 25 bp, Homo sapien
tatcgtttggaaatattgtgacaac

SEQ ID NO: 476258 - DNA, 25 bp, Homo sapien
tcatatagctggcaccgtgatatcg

SEQ ID NO: 476259 - DNA, 25 bp, Homo sapien
ggcaccgtgatatcgtttggaaata

SEQ ID NO: 476260 - DNA, 25 bp, Homo sapien
tattgtgacaactttagtatgtcct

SEQ ID NO: 476261 - DNA, 25 bp, Homo sapien
cagagtagaggtagatttatggttt

SEQ ID NO: 476262 - DNA, 25 bp, Homo sapien
gagtagaggtagatttatggtttgg

SEQ ID NO: 476263 - DNA, 25 bp, Homo sapien
ccagagtagaggtagatttatggtt

SEQ ID NO: 476264 - DNA, 25 bp, Homo sapien
gccagagtagaggtagatttatggt

SEQ ID NO: 476265 - DNA, 25 bp, Homo sapien
tctggctgcttgtatagggaaaagc

SEQ ID NO: 476266 - DNA, 25 bp, Homo sapien
ttgtatagggaaaagcagtggatgc

SEQ ID NO: 476267 - DNA, 25 bp, Homo sapien
ctgcatctggctgcttgtataggga

SEQ ID NO: 476268 - DNA, 25 bp, Homo sapien
tggatgctgaatggatcttgcccct

SEQ ID NO: 476269 - DNA, 25 bp, Homo sapien
gactaaacttagcaggattaccaag

SEQ ID NO: 476270 - DNA, 25 bp, Homo sapien
ggcaatgactaaacttagcaggatt

SEQ ID NO: 476271 - DNA, 25 bp, Homo sapien
ccaggcaatgactaaacttagcagg

SEQ ID NO: 476272 - DNA, 25 bp, Homo sapien
caatgactaaacttagcaggattac

SEQ ID NO: 476273 - DNA, 25 bp, Homo sapien
tcaataatctctactagttcataaa

SEQ ID NO: 476274 - DNA, 25 bp, Homo sapien
aataatctctactagttcataaaaa

SEQ ID NO: 476275 - DNA, 25 bp, Homo sapien
ataatctctactagttcataaaaac

SEQ ID NO: 476276 - DNA, 25 bp, Homo sapien
caataatctctactagttcataaaa

SEQ ID NO: 476277 - DNA, 25 bp, Homo sapien
gatcgatttattgtttgctgaaaac

SEQ ID NO: 476278 - DNA, 25 bp, Homo sapien
cttcaatttgccattgatcgattta

SEQ ID NO: 476279 - DNA, 25 bp, Homo sapien
ttagttcatatactgaaggagcacg

SEQ ID NO: 476280 - DNA, 25 bp, Homo sapien
aaacaaatgccttaaagccagctga

SEQ ID NO: 476281 - DNA, 25 bp, Homo sapien
taggattgcatccaaatctttgctg

SEQ ID NO: 476282 - DNA, 25 bp, Homo sapien
tttgctgccgtgaaagtagcaccat

SEQ ID NO: 476283 - DNA, 25 bp, Homo sapien
cgacgttagctccaataggattgca

SEQ ID NO: 476284 - DNA, 25 bp, Homo sapien
cagacactgttttcacgacgttagc

SEQ ID NO: 476285 - DNA, 25 bp, Homo sapien
actaaaatcagagcagaactgaagg

SEQ ID NO: 476286 - DNA, 25 bp, Homo sapien
aaaagctagcagaaggccagaaata

SEQ ID NO: 476287 - DNA, 25 bp, Homo sapien
tgaaggaaatagagacacaaaaaac

SEQ ID NO: 476288 - DNA, 25 bp, Homo sapien
tagaaaagcaagagcaaacacattc

SEQ ID NO: 476289 - DNA, 25 bp, Homo sapien
ttaatagaaaaagagatccaaagga

SEQ ID NO: 476290 - DNA, 25 bp, Homo sapien
ccaaaggagaagtgatgtgttcttc

SEQ ID NO: 476291 - DNA, 25 bp, Homo sapien
aaggagaagtgatgtgttcttccaa

SEQ ID NO: 476292 - DNA, 25 bp, Homo sapien
tagaaaaagagatccaaaggagaag

SEQ ID NO: 476293 - DNA, 25 bp, Homo sapien
taaacatgtaccttcactgctgaaa

SEQ ID NO: 476294 - DNA, 25 bp, Homo sapien
gtggataaacatgtaccttcactgc

SEQ ID NO: 476295 - DNA, 25 bp, Homo sapien
tgtggataaacatgtaccttcactg

SEQ ID NO: 476296 - DNA, 25 bp, Homo sapien
tggttccacctccatttttagagcc

SEQ ID NO: 476297 - DNA, 25 bp, Homo sapien
cacctccatttttagagcccagctt

SEQ ID NO: 476298 - DNA, 25 bp, Homo sapien
cctccatttttagagcccagcttgt

SEQ ID NO: 476299 - DNA, 25 bp, Homo sapien
tattggttccacctccatttttaga

SEQ ID NO: 476300 - DNA, 25 bp, Homo sapien
agatacccagtagccaccacaaggg

SEQ ID NO: 476301 - DNA, 25 bp, Homo sapien
ggtggccatggtgtcttcactggct

SEQ ID NO: 476302 - DNA, 25 bp, Homo sapien
ggtgacggacagagtgagataccca

SEQ ID NO: 476303 - DNA, 25 bp, Homo sapien
cagtttcatgtcataccatttagaa

SEQ ID NO: 476304 - DNA, 25 bp, Homo sapien
catttctaggtagactgcctgtgga

SEQ ID NO: 476305 - DNA, 25 bp, Homo sapien
tgccttgtggaacttaatgctgaaa

SEQ ID NO: 476306 - DNA, 25 bp, Homo sapien
gaagttgctccatggcactgattca

SEQ ID NO: 476307 - DNA, 25 bp, Homo sapien
gatgaaccaacaacctaaactggtg

SEQ ID NO: 476308 - DNA, 25 bp, Homo sapien
gatgtcttggtcacaatcaacctct

SEQ ID NO: 476309 - DNA, 25 bp, Homo sapien
tctaagataagggaggtctagcgct

SEQ ID NO: 476310 - DNA, 25 bp, Homo sapien
ctagcgcttatggtcaggaagaaac

SEQ ID NO: 476311 - DNA, 25 bp, Homo sapien
gggtcagggtaagaattcgcaatgt

SEQ ID NO: 476312 - DNA, 25 bp, Homo sapien
ggataactaatccaagaaataactg

SEQ ID NO: 476313 - DNA, 25 bp, Homo sapien
taaaataataggtcagcttgtctgc

SEQ ID NO: 476314 - DNA, 25 bp, Homo sapien
caatgtaagtgggaacttctggcat

SEQ ID NO: 476315 - DNA, 25 bp, Homo sapien
aaatagagtccttctgcaacaaccc

SEQ ID NO: 476316 - DNA, 25 bp, Homo sapien
ctgggaagtagcagcggtaccaaat

SEQ ID NO: 476317 - DNA, 25 bp, Homo sapien
tagcagcggtaccaaattgattaga

SEQ ID NO: 476318 - DNA, 25 bp, Homo sapien
gaagtagcagcggtaccaaattgat

SEQ ID NO: 476319 - DNA, 25 bp, Homo sapien
caaattgattagatcccaagttttc

SEQ ID NO: 476320 - DNA, 25 bp, Homo sapien
agtaggggatgaatagtcatcacaa

SEQ ID NO: 476321 - DNA, 25 bp, Homo sapien
gtaggggatgaatagtcatcacaaa

SEQ ID NO: 476322 - DNA, 25 bp, Homo sapien
aggggcagccggcaaacttgctaac

SEQ ID NO: 476323 - DNA, 25 bp, Homo sapien
taaaaccgtggcatactaacatagt

SEQ ID NO: 476324 - DNA, 25 bp, Homo sapien
tcttgtgatactaagggaaaaaggc

SEQ ID NO: 476325 - DNA, 25 bp, Homo sapien
gaatacatttgtgcttacccgaggt

SEQ ID NO: 476326 - DNA, 25 bp, Homo sapien
ccgcgattttgtctgttgaacagta

SEQ ID NO: 476327 - DNA, 25 bp, Homo sapien
ctcttgctttcggtcattgtgttca

SEQ ID NO: 476328 - DNA, 25 bp, Homo sapien
ctttcggtcattgtgttcacggcct

SEQ ID NO: 476329 - DNA, 25 bp, Homo sapien
tgctttcggtcattgtgttcacggc

SEQ ID NO: 476330 - DNA, 25 bp, Homo sapien
ttctctcttgctttcggtcattgtg

SEQ ID NO: 476331 - DNA, 25 bp, Homo sapien
aacaatgtcattttagctagcactt

SEQ ID NO: 476332 - DNA, 25 bp, Homo sapien
gctagcactttgtcaaggaaagtaa

SEQ ID NO: 476333 - DNA, 25 bp, Homo sapien
ataatgtgcggcctgaaacaatgtc

SEQ ID NO: 476334 - DNA, 25 bp, Homo sapien
gttgctgactaaattgacatctgta

SEQ ID NO: 476335 - DNA, 25 bp, Homo sapien
taacgaaagcctttgaggcatacat

SEQ ID NO: 476336 - DNA, 25 bp, Homo sapien
atgaagacgacacccttgaagtcaa

SEQ ID NO: 476337 - DNA, 25 bp, Homo sapien
acaagaacaataacgaaagcctttg

SEQ ID NO: 476338 - DNA, 25 bp, Homo sapien
tttggtaatgaagacgacacccttg

SEQ ID NO: 476339 - DNA, 25 bp, Homo sapien
tggtgaaacaaggcttttgtggttc

SEQ ID NO: 476340 - DNA, 25 bp, Homo sapien
gcttttgtggttctccttcagggcc

SEQ ID NO: 476341 - DNA, 25 bp, Homo sapien
ggcttttgtggttctccttcagggc

SEQ ID NO: 476342 - DNA, 25 bp, Homo sapien
cttggggggatttgcttttcgatgt

SEQ ID NO: 476343 - DNA, 25 bp, Homo sapien
tcgatgtatgttttagaattgactt

SEQ ID NO: 476344 - DNA, 25 bp, Homo sapien
tcttggttgcttggggggatttgct

SEQ ID NO: 476345 - DNA, 25 bp, Homo sapien
gggatttgcttttcgatgtatgttt

SEQ ID NO: 476346 - DNA, 25 bp, Homo sapien
gccaactcatttctggctgattttc

SEQ ID NO: 476347 - DNA, 25 bp, Homo sapien
ggctgattttctccaatgaggggtg

SEQ ID NO: 476348 - DNA, 25 bp, Homo sapien
ccaactcatttctggctgattttct

SEQ ID NO: 476349 - DNA, 25 bp, Homo sapien
tctggctgattttctccaatgaggg

SEQ ID NO: 476350 - DNA, 25 bp, Homo sapien
tgaacctcacgagctgtgtcctgtg

SEQ ID NO: 476351 - DNA, 25 bp, Homo sapien
cagggtgagtgaacctcacgagctg

SEQ ID NO: 476352 - DNA, 25 bp, Homo sapien
tgagtgaacctcacgagctgtgtcc

SEQ ID NO: 476353 - DNA, 25 bp, Homo sapien
catcacagggtgagtgaacctcacg

SEQ ID NO: 476354 - DNA, 25 bp, Homo sapien
gccaagtgtgaacattttgccctca

SEQ ID NO: 476355 - DNA, 25 bp, Homo sapien
tctgtgtgccaagtgtgaacatttt

SEQ ID NO: 476356 - DNA, 25 bp, Homo sapien
catacactttctctgctctattact

SEQ ID NO: 476357 - DNA, 25 bp, Homo sapien
attttgccctcatacactttctctg

SEQ ID NO: 476358 - DNA, 25 bp, Homo sapien
ctctgctctgtggataaagttttca

SEQ ID NO: 476359 - DNA, 25 bp, Homo sapien
atcaactgctgaacaaggaagacct

SEQ ID NO: 476360 - DNA, 25 bp, Homo sapien
taagcaaattaaaatcaactgctga

SEQ ID NO: 476361 - DNA, 25 bp, Homo sapien
tgtggataaagttttcattaagcaa

SEQ ID NO: 476362 - DNA, 25 bp, Homo sapien
tcttattaaaaacggagtgtcacaa

SEQ ID NO: 476363 - DNA, 25 bp, Homo sapien
ttccctgtgttttgagcggctgacc

SEQ ID NO: 476364 - DNA, 25 bp, Homo sapien
tgctttggtcaatgaggagccctag

SEQ ID NO: 476365 - DNA, 25 bp, Homo sapien
tgagctccacctagtagcatccttg

SEQ ID NO: 476366 - DNA, 25 bp, Homo sapien
agatggctttttcagttgttaccgt

SEQ ID NO: 476367 - DNA, 25 bp, Homo sapien
tggctttttcagttgttaccgtcat

SEQ ID NO: 476368 - DNA, 25 bp, Homo sapien
ttccaagatggctttttcagttgtt

SEQ ID NO: 476369 - DNA, 25 bp, Homo sapien
ctgtgtttccaagatggctttttca

SEQ ID NO: 476370 - DNA, 25 bp, Homo sapien
tccttcaaagacacattgattttgc

SEQ ID NO: 476371 - DNA, 25 bp, Homo sapien
gacaaatactggagacacgtattgc

SEQ ID NO: 476372 - DNA, 25 bp, Homo sapien
atactggagacacgtattgctttcc

SEQ ID NO: 476373 - DNA, 25 bp, Homo sapien
ttcagacaaatactggagacacgta

SEQ ID NO: 476374 - DNA, 25 bp, Homo sapien
ctgctgctttaacgagtgtgatttc

SEQ ID NO: 476375 - DNA, 25 bp, Homo sapien
tgctgctttaacgagtgtgatttca

SEQ ID NO: 476376 - DNA, 25 bp, Homo sapien
tgctttaacgagtgtgatttcagaa

SEQ ID NO: 476377 - DNA, 25 bp, Homo sapien
gctgctttaacgagtgtgatttcag

SEQ ID NO: 476378 - DNA, 25 bp, Homo sapien
ttctgtgaagtcaccaatcacaaac

SEQ ID NO: 476379 - DNA, 25 bp, Homo sapien
cttctgtgaagtcaccaatcacaaa

SEQ ID NO: 476380 - DNA, 25 bp, Homo sapien
ttaattagacttctcagcatgtgcc

SEQ ID NO: 476381 - DNA, 25 bp, Homo sapien
ctccaagttcttgggataaaactgc

SEQ ID NO: 476382 - DNA, 25 bp, Homo sapien
tccaagttcttgggataaaactgca

SEQ ID NO: 476383 - DNA, 25 bp, Homo sapien
ccaagttcttgggataaaactgcat

SEQ ID NO: 476384 - DNA, 25 bp, Homo sapien
tctgtcctgccatcactaaatactg

SEQ ID NO: 476385 - DNA, 25 bp, Homo sapien
taattcccgttatagccttcagtgg

SEQ ID NO: 476386 - DNA, 25 bp, Homo sapien
agtggcactctggaaatatatctgc

SEQ ID NO: 476387 - DNA, 25 bp, Homo sapien
gggtagaggccaagattcctcagtg

SEQ ID NO: 476388 - DNA, 25 bp, Homo sapien
ttgcctcctaatgagtaactctctg

SEQ ID NO: 476389 - DNA, 25 bp, Homo sapien
cttgcctcctaatgagtaactctct

SEQ ID NO: 476390 - DNA, 25 bp, Homo sapien
tgcctcctaatgagtaactctctgc

SEQ ID NO: 476391 - DNA, 25 bp, Homo sapien
gcctcctaatgagtaactctctgct

SEQ ID NO: 476392 - DNA, 25 bp, Homo sapien
cagatgtcttggtcatcacacgact

SEQ ID NO: 476393 - DNA, 25 bp, Homo sapien
tcccccttgttatttatcacaagag

SEQ ID NO: 476394 - DNA, 25 bp, Homo sapien
ccccagatgtcttggtcatcacacg

SEQ ID NO: 476395 - DNA, 25 bp, Homo sapien
actgccccccagatgtcttggtcat

SEQ ID NO: 476396 - DNA, 25 bp, Homo sapien
catgacacagcaatggaatgtggag

SEQ ID NO: 476397 - DNA, 25 bp, Homo sapien
gaggagggaaaaccaccagcacgca

SEQ ID NO: 476398 - DNA, 25 bp, Homo sapien
tgctcagtgaggcacagcttcccac

SEQ ID NO: 476399 - DNA, 25 bp, Homo sapien
caggcaggagaaacgcagcaagtgc

SEQ ID NO: 476400 - DNA, 25 bp, Homo sapien
aagattgccacatttaagttcttgg

SEQ ID NO: 476401 - DNA, 25 bp, Homo sapien
atcacagccgatttctgagcaatga

SEQ ID NO: 476402 - DNA, 25 bp, Homo sapien
tctgagcaatgaggcgatgcacatt

SEQ ID NO: 476403 - DNA, 25 bp, Homo sapien
ggcgatgcacattgtaacagagctg

SEQ ID NO: 476404 - DNA, 25 bp, Homo sapien
tatacatgttcagctacatttcaat

SEQ ID NO: 476405 - DNA, 25 bp, Homo sapien
tgatgtcactgtctacctccagggt

SEQ ID NO: 476406 - DNA, 25 bp, Homo sapien
cagggtcgacactttctggatttta

SEQ ID NO: 476407 - DNA, 25 bp, Homo sapien
tccagggtgacagtcttgccagtga

SEQ ID NO: 476408 - DNA, 25 bp, Homo sapien
ctgctggtctggaggatgtcttctt

SEQ ID NO: 476409 - DNA, 25 bp, Homo sapien
gtactttggcagggatggattcata

SEQ ID NO: 476410 - DNA, 25 bp, Homo sapien
caattattatctggtactttggcag

SEQ ID NO: 476411 - DNA, 25 bp, Homo sapien
tggtactttggcagggatggattca

SEQ ID NO: 476412 - DNA, 25 bp, Homo sapien
ggtactttggcagggatggattcat

SEQ ID NO: 476413 - DNA, 25 bp, Homo sapien
tccttcttctgagcattgacagcta

SEQ ID NO: 476414 - DNA, 25 bp, Homo sapien
cattagtgcataagctttttatgag

SEQ ID NO: 476415 - DNA, 25 bp, Homo sapien
tacatccctgtaagaataactaggt

SEQ ID NO: 476416 - DNA, 25 bp, Homo sapien
tgtcagtatttgcacagcactttgt

SEQ ID NO: 476417 - DNA, 25 bp, Homo sapien
tgtacttacgcaaaatacatccctg

SEQ ID NO: 476418 - DNA, 25 bp, Homo sapien
aagcctctccagggggcgctcttaa

SEQ ID NO: 476419 - DNA, 25 bp, Homo sapien
agcctctccagggggcgctcttaac

SEQ ID NO: 476420 - DNA, 25 bp, Homo sapien
taagcctctccagggggcgctctta

SEQ ID NO: 476421 - DNA, 25 bp, Homo sapien
ttaagcctctccagggggcgctctt

SEQ ID NO: 476422 - DNA, 25 bp, Homo sapien
tttggtagatagagattgcaatgcc

SEQ ID NO: 476423 - DNA, 25 bp, Homo sapien
tatgacgacaccagatggcaaacag

SEQ ID NO: 476424 - DNA, 25 bp, Homo sapien
ctgggtaatacatcagatagtttgg

SEQ ID NO: 476425 - DNA, 25 bp, Homo sapien
cctcctccaagttcactgggtaata

SEQ ID NO: 476426 - DNA, 25 bp, Homo sapien
taatgatactttgatcggatcgctt

SEQ ID NO: 476427 - DNA, 25 bp, Homo sapien
tgtaccccatctaccctcgtgccaa

SEQ ID NO: 476428 - DNA, 25 bp, Homo sapien
tgatactttgatcggatcgcttcca

SEQ ID NO: 476429 - DNA, 25 bp, Homo sapien
taccctcgtgccaagtttggcaata

SEQ ID NO: 476430 - DNA, 25 bp, Homo sapien
ctgtgaaacagcacaagccagccga

SEQ ID NO: 476431 - DNA, 25 bp, Homo sapien
acagcacaagccagccgaacaggat

SEQ ID NO: 476432 - DNA, 25 bp, Homo sapien
gccagccgaacaggatggtgaatga

SEQ ID NO: 476433 - DNA, 25 bp, Homo sapien
cacaagccagccgaacaggatggtg

SEQ ID NO: 476434 - DNA, 25 bp, Homo sapien
gttttgctctggcgcagctctccag

SEQ ID NO: 476435 - DNA, 25 bp, Homo sapien
tgcaatctcagactgtgtgacccac

SEQ ID NO: 476436 - DNA, 25 bp, Homo sapien
ggacactgccagtctgtcagcattg

SEQ ID NO: 476437 - DNA, 25 bp, Homo sapien
tgcaaggttgggtaacagcaggtcc

SEQ ID NO: 476438 - DNA, 25 bp, Homo sapien
gaaaatagggcatgagatggttttc

SEQ ID NO: 476439 - DNA, 25 bp, Homo sapien
aacagcagactgaaaatagggcatg

SEQ ID NO: 476440 - DNA, 25 bp, Homo sapien
cagactgaaaatagggcatgagatg

SEQ ID NO: 476441 - DNA, 25 bp, Homo sapien
ctgaaaatagggcatgagatggttt

SEQ ID NO: 476442 - DNA, 25 bp, Homo sapien
cactcccccagaagactatttaaat

SEQ ID NO: 476443 - DNA, 25 bp, Homo sapien
cctgccagcgttgtacactgaactg

SEQ ID NO: 476444 - DNA, 25 bp, Homo sapien
ccagaagactatttaaataatccat

SEQ ID NO: 476445 - DNA, 25 bp, Homo sapien
ttcctctacccactcccccagaaga

SEQ ID NO: 476446 - DNA, 25 bp, Homo sapien
aaggttcccagttagtggtgcaaag

SEQ ID NO: 476447 - DNA, 25 bp, Homo sapien
gtgaaatctcattggcctctactgc

SEQ ID NO: 476448 - DNA, 25 bp, Homo sapien
cccagttagtggtgcaaagaggact

SEQ ID NO: 476449 - DNA, 25 bp, Homo sapien
ccagttagtggtgcaaagaggactg

SEQ ID NO: 476450 - DNA, 25 bp, Homo sapien
ggccatttgtggtaccgttggtaga

SEQ ID NO: 476451 - DNA, 25 bp, Homo sapien
ctagatgagctgaccagctctataa

SEQ ID NO: 476452 - DNA, 25 bp, Homo sapien
gaccagctctataacaagctacatc

SEQ ID NO: 476453 - DNA, 25 bp, Homo sapien
tgtggtaccgttggtagaagaaaca

SEQ ID NO: 476454 - DNA, 25 bp, Homo sapien
gggaacacgtgaagcaaaggaactc

SEQ ID NO: 476455 - DNA, 25 bp, Homo sapien
tacagtgagcgcttttgggaagaaa

SEQ ID NO: 476456 - DNA, 25 bp, Homo sapien
tgtcactgtcatggatctcgggctg

SEQ ID NO: 476457 - DNA, 25 bp, Homo sapien
tccaaccatgttctgtccaaataca

SEQ ID NO: 476458 - DNA, 25 bp, Homo sapien
tgcacttgagctcccagtggacatc

SEQ ID NO: 476459 - DNA, 25 bp, Homo sapien
taaatcgttcaaggtgtgcactggg

SEQ ID NO: 476460 - DNA, 25 bp, Homo sapien
gggttgagcttcctgtccgtgacca

SEQ ID NO: 476461 - DNA, 25 bp, Homo sapien
ggacatcattgtgcaccagagtaag

SEQ ID NO: 476462 - DNA, 25 bp, Homo sapien
aaaatcctgaagaagctaagaaact

SEQ ID NO: 476463 - DNA, 25 bp, Homo sapien
taagaaacttccatctcttgttccc

SEQ ID NO: 476464 - DNA, 25 bp, Homo sapien
catttaatttttggatgatctccac

SEQ ID NO: 476465 - DNA, 25 bp, Homo sapien
ttaaaccaattatgcaaaaatcctg

SEQ ID NO: 476466 - DNA, 25 bp, Homo sapien
gccattgcaaagacagttgaccttg

SEQ ID NO: 476467 - DNA, 25 bp, Homo sapien
cactttacgttttttgtcagtgttg

SEQ ID NO: 476468 - DNA, 25 bp, Homo sapien
tgagccggaaccttggaggctaatt

SEQ ID NO: 476469 - DNA, 25 bp, Homo sapien
gaaataggatgcagtagatgctgac

SEQ ID NO: 476470 - DNA, 25 bp, Homo sapien
acattggttgggacttggagagccc

SEQ ID NO: 476471 - DNA, 25 bp, Homo sapien
gaaagtgtgcagatattgagcctaa

SEQ ID NO: 476472 - DNA, 25 bp, Homo sapien
cacggaattccctctggtgatcgaa

SEQ ID NO: 476473 - DNA, 25 bp, Homo sapien
gatcgaatctcatgcaaggaaagtg

SEQ ID NO: 476474 - DNA, 25 bp, Homo sapien
tgcacagatgtacggcaagctttgc

SEQ ID NO: 476475 - DNA, 25 bp, Homo sapien
catggaagcaaattgatcctggcct

SEQ ID NO: 476476 - DNA, 25 bp, Homo sapien
gcagcagtctgtttagtcacagtga

SEQ ID NO: 476477 - DNA, 25 bp, Homo sapien
taccagctaccagtcatggcagcag

SEQ ID NO: 476478 - DNA, 25 bp, Homo sapien
attggctaaggatttgagggcctct

SEQ ID NO: 476479 - DNA, 25 bp, Homo sapien
tcttggaattggctaaggatttgag

SEQ ID NO: 476480 - DNA, 25 bp, Homo sapien
gaattggctaaggatttgagggcct

SEQ ID NO: 476481 - DNA, 25 bp, Homo sapien
ctctttcttggaattggctaaggat

SEQ ID NO: 476482 - DNA, 25 bp, Homo sapien
aacagcccaagaactaaacattgac

SEQ ID NO: 476483 - DNA, 25 bp, Homo sapien
gaactaaacattgacaccagcctca

SEQ ID NO: 476484 - DNA, 25 bp, Homo sapien
cccaagaactaaacattgacaccag

SEQ ID NO: 476485 - DNA, 25 bp, Homo sapien
caagaactaaacattgacaccagcc

SEQ ID NO: 476486 - DNA, 25 bp, Homo sapien
ataaattatacagcattgttgagtt

SEQ ID NO: 476487 - DNA, 25 bp, Homo sapien
gataaattatacagcattgttgagt

SEQ ID NO: 476488 - DNA, 25 bp, Homo sapien
agataaattatacagcattgttgag

SEQ ID NO: 476489 - DNA, 25 bp, Homo sapien
aagtatgtattaggactgaagagtt

SEQ ID NO: 476490 - DNA, 25 bp, Homo sapien
taagtatgtattaggactgaagagt

SEQ ID NO: 476491 - DNA, 25 bp, Homo sapien
ctaagtatgtattaggactgaagag

SEQ ID NO: 476492 - DNA, 25 bp, Homo sapien
ttgctctcacaattcatgtcagtgt

SEQ ID NO: 476493 - DNA, 25 bp, Homo sapien
ctggactgcacctgcaaaaccagct

SEQ ID NO: 476494 - DNA, 25 bp, Homo sapien
tgctctcacaattcatgtcagtgtt

SEQ ID NO: 476495 - DNA, 25 bp, Homo sapien
tttccaggtgtcatgttggtcacta

SEQ ID NO: 476496 - DNA, 25 bp, Homo sapien
tccaggtgtcatgttggtcactatt

SEQ ID NO: 476497 - DNA, 25 bp, Homo sapien
caggtgtcatgttggtcactattca

SEQ ID NO: 476498 - DNA, 25 bp, Homo sapien
atttccaggtgtcatgttggtcact

SEQ ID NO: 476499 - DNA, 25 bp, Homo sapien
catgtaccgcatattgccagtgaca

SEQ ID NO: 476500 - DNA, 25 bp, Homo sapien
tttgaccacatgatactgaccagca

SEQ ID NO: 476501 - DNA, 25 bp, Homo sapien
ctttgatcatgtaccgcatattgcc

SEQ ID NO: 476502 - DNA, 25 bp, Homo sapien
gatactgaccagcaagtttaggttg

SEQ ID NO: 476503 - DNA, 25 bp, Homo sapien
ctgccgaggagacctccaacattgc

SEQ ID NO: 476504 - DNA, 25 bp, Homo sapien
aggcaatttctctgccgaggagacc

SEQ ID NO: 476505 - DNA, 25 bp, Homo sapien
aaaggcaatttctctgccgaggaga

SEQ ID NO: 476506 - DNA, 25 bp, Homo sapien
gccgaggagacctccaacattgcca

SEQ ID NO: 476507 - DNA, 25 bp, Homo sapien
gcagctggaagacggtgtgatatcc

SEQ ID NO: 476508 - DNA, 25 bp, Homo sapien
agagcagctggaagacggtgtgata

SEQ ID NO: 476509 - DNA, 25 bp, Homo sapien
gctggaagacggtgtgatatccctt

SEQ ID NO: 476510 - DNA, 25 bp, Homo sapien
tggaagacggtgtgatatcccttct

SEQ ID NO: 476511 - DNA, 25 bp, Homo sapien
ttgagcaccaacctgtttggtcaac

SEQ ID NO: 476512 - DNA, 25 bp, Homo sapien
tttgctgaaatcttgagcaccaacc

SEQ ID NO: 476513 - DNA, 25 bp, Homo sapien
ttgctgaaatcttgagcaccaacct

SEQ ID NO: 476514 - DNA, 25 bp, Homo sapien
ctgtttggtcaacagtaatataacc

SEQ ID NO: 476515 - DNA, 25 bp, Homo sapien
tttgtttttgatctccctcgctttc

SEQ ID NO: 476516 - DNA, 25 bp, Homo sapien
ttcttgtaagaaacacctgttggca

SEQ ID NO: 476517 - DNA, 25 bp, Homo sapien
cctgttggcatatctttttgtgtta

SEQ ID NO: 476518 - DNA, 25 bp, Homo sapien
tttgatctccctcgctttcttgctt

SEQ ID NO: 476519 - DNA, 25 bp, Homo sapien
ggtcatgtacaagatcagtgctcca

SEQ ID NO: 476520 - DNA, 25 bp, Homo sapien
aataggcccaaaagagaactcttgg

SEQ ID NO: 476521 - DNA, 25 bp, Homo sapien
ccatagaagctggtgcatttcagga

SEQ ID NO: 476522 - DNA, 25 bp, Homo sapien
catttggagaagttgttagaagctt

SEQ ID NO: 476523 - DNA, 25 bp, Homo sapien
ttcctccagcccaatcttgcttcca

SEQ ID NO: 476524 - DNA, 25 bp, Homo sapien
ctatccacactttctattcgtgtta

SEQ ID NO: 476525 - DNA, 25 bp, Homo sapien
gtgtaatactatcatagccattatc

SEQ ID NO: 476526 - DNA, 25 bp, Homo sapien
ccacactttctattcgtgttacttt

SEQ ID NO: 476527 - DNA, 25 bp, Homo sapien
ctcttggtgtatcgcctttctttga

SEQ ID NO: 476528 - DNA, 25 bp, Homo sapien
ttggtgtatcgcctttctttgaggt

SEQ ID NO: 476529 - DNA, 25 bp, Homo sapien
gatctcttggtgtatcgcctttctt

SEQ ID NO: 476530 - DNA, 25 bp, Homo sapien
ggtgtatcgcctttctttgaggtat

SEQ ID NO: 476531 - DNA, 25 bp, Homo sapien
ctcggtttccacatcgaggttggaa

SEQ ID NO: 476532 - DNA, 25 bp, Homo sapien
caactctctaacatgggcctcggtt

SEQ ID NO: 476533 - DNA, 25 bp, Homo sapien
tacaaggagattacagtgttgtgca

SEQ ID NO: 476534 - DNA, 25 bp, Homo sapien
gcacatgttctggtacaaggagatt

SEQ ID NO: 476535 - DNA, 25 bp, Homo sapien
tttagaggctgaggttcttcatatt

SEQ ID NO: 476536 - DNA, 25 bp, Homo sapien
tctcaggatataaatctaagctttg

SEQ ID NO: 476537 - DNA, 25 bp, Homo sapien
cacactgaaaaacattgagccaccg

SEQ ID NO: 476538 - DNA, 25 bp, Homo sapien
gctctcgagtagctgtccctacagg

SEQ ID NO: 476539 - DNA, 25 bp, Homo sapien
ctttcaatggccacaacattttgtt

SEQ ID NO: 476540 - DNA, 25 bp, Homo sapien
tcaatggccacaacattttgtttga

SEQ ID NO: 476541 - DNA, 25 bp, Homo sapien
ttcaatggccacaacattttgtttg

SEQ ID NO: 476542 - DNA, 25 bp, Homo sapien
caatggccacaacattttgtttgat

SEQ ID NO: 476543 - DNA, 25 bp, Homo sapien
aatttctgagtagattttcactaaa

SEQ ID NO: 476544 - DNA, 25 bp, Homo sapien
ttttcagaataattgtattggccaa

SEQ ID NO: 476545 - DNA, 25 bp, Homo sapien
gttgtctgatctacattatattctg

SEQ ID NO: 476546 - DNA, 25 bp, Homo sapien
tagcaatttgttcgtctgtatcttc

SEQ ID NO: 476547 - DNA, 25 bp, Homo sapien
gatttgtatccttctgccttgctgt

SEQ ID NO: 476548 - DNA, 25 bp, Homo sapien
ctttctgctcctctgatttgtatcc

SEQ ID NO: 476549 - DNA, 25 bp, Homo sapien
tctgctcctctgatttgtatccttc

SEQ ID NO: 476550 - DNA, 25 bp, Homo sapien
tatccttctgccttgctgtaattca

SEQ ID NO: 476551 - DNA, 25 bp, Homo sapien
tttcttgcacctttccgcactcaga

SEQ ID NO: 476552 - DNA, 25 bp, Homo sapien
tgcacctttccgcactcagatgtat

SEQ ID NO: 476553 - DNA, 25 bp, Homo sapien
atggcaaaatcagatgcagtttcag

SEQ ID NO: 476554 - DNA, 25 bp, Homo sapien
ctttccgcactcagatgtatgattc

SEQ ID NO: 476555 - DNA, 25 bp, Homo sapien
ggccacggtatagcagttccattgc

SEQ ID NO: 476556 - DNA, 25 bp, Homo sapien
cattgcatgaattgtagctgtctga

SEQ ID NO: 476557 - DNA, 25 bp, Homo sapien
tgtctgatctggtgatgctctctta

SEQ ID NO: 476558 - DNA, 25 bp, Homo sapien
ccatctgtcaaactcaaggccacgg

SEQ ID NO: 476559 - DNA, 25 bp, Homo sapien
ctgtgatctgtatgaccttggcgag

SEQ ID NO: 476560 - DNA, 25 bp, Homo sapien
tagcttgatcactgccagaagtttt

SEQ ID NO: 476561 - DNA, 25 bp, Homo sapien
ccttggcgagatagcttgatcactg

SEQ ID NO: 476562 - DNA, 25 bp, Homo sapien
tctgtatgaccttggcgagatagct

SEQ ID NO: 476563 - DNA, 25 bp, Homo sapien
agacttctttgaatcatcaagaggg

SEQ ID NO: 476564 - DNA, 25 bp, Homo sapien
ttgtagctgttgcagcccaagactt

SEQ ID NO: 476565 - DNA, 25 bp, Homo sapien
tgtagctgttgcagcccaagacttc

SEQ ID NO: 476566 - DNA, 25 bp, Homo sapien
cttctttgaatcatcaagagggttc

SEQ ID NO: 476567 - DNA, 25 bp, Homo sapien
cttcttcttgcagcgcacactgtac

SEQ ID NO: 476568 - DNA, 25 bp, Homo sapien
cgcacactgtacatggtagtgaggg

SEQ ID NO: 476569 - DNA, 25 bp, Homo sapien
tgagggggcgagcaaaggtggcacc

SEQ ID NO: 476570 - DNA, 25 bp, Homo sapien
ggcccctcggctgctccagcgaagg

SEQ ID NO: 476571 - DNA, 25 bp, Homo sapien
tcctcctcgccgtcttcaccacatt

SEQ ID NO: 476572 - DNA, 25 bp, Homo sapien
ggctctcctcctcgccgtcttcacc

SEQ ID NO: 476573 - DNA, 25 bp, Homo sapien
tctcctcctcgccgtcttcaccaca

SEQ ID NO: 476574 - DNA, 25 bp, Homo sapien
tcggctctcctcctcgccgtcttca

SEQ ID NO: 476575 - DNA, 25 bp, Homo sapien
ggggcaactttctccgacccagctg

SEQ ID NO: 476576 - DNA, 25 bp, Homo sapien
gccatctgcatagggggcaactttc

SEQ ID NO: 476577 - DNA, 25 bp, Homo sapien
gcatagggggcaactttctccgacc

SEQ ID NO: 476578 - DNA, 25 bp, Homo sapien
gcaactttctccgacccagctgtgg

SEQ ID NO: 476579 - DNA, 25 bp, Homo sapien
ctccaaggcccagtcatcatagcca

SEQ ID NO: 476580 - DNA, 25 bp, Homo sapien
cactaggtttctcaagcccaggcag

SEQ ID NO: 476581 - DNA, 25 bp, Homo sapien
aggagactgcgagcagcgcagtccc

SEQ ID NO: 476582 - DNA, 25 bp, Homo sapien
gcagggcgaggagactgcgagcagc

SEQ ID NO: 476583 - DNA, 25 bp, Homo sapien
agcgacgctaccaaaccgcatcttt

SEQ ID NO: 476584 - DNA, 25 bp, Homo sapien
gctaccaaaccgcatctttaagcca

SEQ ID NO: 476585 - DNA, 25 bp, Homo sapien
gacgctaccaaaccgcatctttaag

SEQ ID NO: 476586 - DNA, 25 bp, Homo sapien
ccaaaccgcatctttaagccactga

SEQ ID NO: 476587 - DNA, 25 bp, Homo sapien
cagcgcttcccggagagcgccctgc

SEQ ID NO: 476588 - DNA, 25 bp, Homo sapien
gcgccctgcgaccacttctcattga

SEQ ID NO: 476589 - DNA, 25 bp, Homo sapien
agagcgccctgcgaccacttctcat

SEQ ID NO: 476590 - DNA, 25 bp, Homo sapien
cggagagcgccctgcgaccacttct

SEQ ID NO: 476591 - DNA, 25 bp, Homo sapien
taaataccccgtggtgctcaaaggc

SEQ ID NO: 476592 - DNA, 25 bp, Homo sapien
catagaataactccgggctcagcct

SEQ ID NO: 476593 - DNA, 25 bp, Homo sapien
taatggagcgcatgtcggtctcagc

SEQ ID NO: 476594 - DNA, 25 bp, Homo sapien
aattaacacagacaagggcaccgac

SEQ ID NO: 476595 - DNA, 25 bp, Homo sapien
cggtgatgcacgtgcgcgtgtgggt

SEQ ID NO: 476596 - DNA, 25 bp, Homo sapien
gcgggcccgcggtgatgcacgtgcg

SEQ ID NO: 476597 - DNA, 25 bp, Homo sapien
ggcagcgcgggcccgcggtgatgca

SEQ ID NO: 476598 - DNA, 25 bp, Homo sapien
tgcgcgtgtgggtggccgcccgtgc

SEQ ID NO: 476599 - DNA, 25 bp, Homo sapien
atgtattcatacacgtggcccgcgg

SEQ ID NO: 476600 - DNA, 25 bp, Homo sapien
tttttgcacatgtggcccagtgggt

SEQ ID NO: 476601 - DNA, 25 bp, Homo sapien
gcaggtctttgtaatcctctacgga

SEQ ID NO: 476602 - DNA, 25 bp, Homo sapien
ctctacggagttgccctctcgggag

SEQ ID NO: 476603 - DNA, 25 bp, Homo sapien
gctgcaggtggtggttgctgctgta

SEQ ID NO: 476604 - DNA, 25 bp, Homo sapien
tgcagctgcagctgcggcgggggct

SEQ ID NO: 476605 - DNA, 25 bp, Homo sapien
tgcaggtggtggttgctgctgtagg

SEQ ID NO: 476606 - DNA, 25 bp, Homo sapien
tgctgctgcaggtggtggttgctgc

SEQ ID NO: 476607 - DNA, 25 bp, Homo sapien
tccgcaagtggtggctttcccgcct

SEQ ID NO: 476608 - DNA, 25 bp, Homo sapien
gggctccgcaagtggtggctttccc

SEQ ID NO: 476609 - DNA, 25 bp, Homo sapien
tcccggggctcgatggtgctgacgc

SEQ ID NO: 476610 - DNA, 25 bp, Homo sapien
tgctgacgctgtaggcggggctccg

SEQ ID NO: 476611 - DNA, 25 bp, Homo sapien
gatattccgggaggctattgccggc

SEQ ID NO: 476612 - DNA, 25 bp, Homo sapien
aatgcccctgtaaaagcggtcggcg

SEQ ID NO: 476613 - DNA, 25 bp, Homo sapien
tgtagagcaccggttcccgtagcct

SEQ ID NO: 476614 - DNA, 25 bp, Homo sapien
tccggttgggttctacaaagacagc

SEQ ID NO: 476615 - DNA, 25 bp, Homo sapien
ttagaactggctaaacgtggtctgt

SEQ ID NO: 476616 - DNA, 25 bp, Homo sapien
agaactggctaaacgtggtctgttt

SEQ ID NO: 476617 - DNA, 25 bp, Homo sapien
tggctaaacgtggtctgtttttcca

SEQ ID NO: 476618 - DNA, 25 bp, Homo sapien
tagaactggctaaacgtggtctgtt

SEQ ID NO: 476619 - DNA, 25 bp, Homo sapien
gaaatgcagatcctaatacagtgtg

SEQ ID NO: 476620 - DNA, 25 bp, Homo sapien
gaagctgagaaatcccgtgccaagg

SEQ ID NO: 476621 - DNA, 25 bp, Homo sapien
ccatgatttggtcttctgaggtgcc

SEQ ID NO: 476622 - DNA, 25 bp, Homo sapien
tggatctgtacaaatgcaactgggt

SEQ ID NO: 476623 - DNA, 25 bp, Homo sapien
tatattgcccagaactaagtcatta

SEQ ID NO: 476624 - DNA, 25 bp, Homo sapien
taaggttgaggaagtgatactgaca

SEQ ID NO: 476625 - DNA, 25 bp, Homo sapien
tggaggattccactttacatttata

SEQ ID NO: 476626 - DNA, 25 bp, Homo sapien
aagagtaagatagaaatgaaccacc

SEQ ID NO: 476627 - DNA, 25 bp, Homo sapien
gattttccaaattatacctgtcatc

SEQ ID NO: 476628 - DNA, 25 bp, Homo sapien
gttttggtcttaattctatcggatc

SEQ ID NO: 476629 - DNA, 25 bp, Homo sapien
tggagagtttgagaatttcattaca

SEQ ID NO: 476630 - DNA, 25 bp, Homo sapien
tacttcctgtaggtatatatctatt

SEQ ID NO: 476631 - DNA, 25 bp, Homo sapien
aaccgggatcatattcgttgaaaat

SEQ ID NO: 476632 - DNA, 25 bp, Homo sapien
cgggatcatattcgttgaaaatgcc

SEQ ID NO: 476633 - DNA, 25 bp, Homo sapien
gatcatattcgttgaaaatgcctga

SEQ ID NO: 476634 - DNA, 25 bp, Homo sapien
catattcgttgaaaatgcctgaaaa

SEQ ID NO: 476635 - DNA, 25 bp, Homo sapien
cagaactccttaaagctaacataag

SEQ ID NO: 476636 - DNA, 25 bp, Homo sapien
tgacagatactaagttcagaactcc

SEQ ID NO: 476637 - DNA, 25 bp, Homo sapien
tacacgtctaacaacaacgttgagg

SEQ ID NO: 476638 - DNA, 25 bp, Homo sapien
tacccaaaattcctagaagattatc

SEQ ID NO: 476639 - DNA, 25 bp, Homo sapien
ggcgcctggtcccacgattacttct

SEQ ID NO: 476640 - DNA, 25 bp, Homo sapien
gcctggtcccacgattacttcttgc

SEQ ID NO: 476641 - DNA, 25 bp, Homo sapien
ggtcccacgattacttcttgccttg

SEQ ID NO: 476642 - DNA, 25 bp, Homo sapien
acggcgcctggtcccacgattactt

SEQ ID NO: 476643 - DNA, 25 bp, Homo sapien
tcagagctcaaagtaatgtaaccat

SEQ ID NO: 476644 - DNA, 25 bp, Homo sapien
caatgtaccgtgataaagcctttaa

SEQ ID NO: 476645 - DNA, 25 bp, Homo sapien
tttaaagagaggtcacaatgtaccg

SEQ ID NO: 476646 - DNA, 25 bp, Homo sapien
ctagttatgaacaattagaacaatg

SEQ ID NO: 476647 - DNA, 25 bp, Homo sapien
cattttttgcccaagctcatagtaa

SEQ ID NO: 476648 - DNA, 25 bp, Homo sapien
taaagctctgatatctagtagttgg

SEQ ID NO: 476649 - DNA, 25 bp, Homo sapien
gattaaatcccctatcaatggacac

SEQ ID NO: 476650 - DNA, 25 bp, Homo sapien
gaacagtggaatgccaaaatacatt

SEQ ID NO: 476651 - DNA, 25 bp, Homo sapien
ttgataaaacgagcaaccctccctg

SEQ ID NO: 476652 - DNA, 25 bp, Homo sapien
tgatatctcacatggcttcttggca

SEQ ID NO: 476653 - DNA, 25 bp, Homo sapien
caaaagataagtttgctgcaccagt

SEQ ID NO: 476654 - DNA, 25 bp, Homo sapien
aaacacatgctgaacaacggagaca

SEQ ID NO: 476655 - DNA, 25 bp, Homo sapien
ttgaaaagctaaccagcgaaccgga

SEQ ID NO: 476656 - DNA, 25 bp, Homo sapien
aaaaatccactgtgctaatctgctc

SEQ ID NO: 476657 - DNA, 25 bp, Homo sapien
aaagtggtactcaagtggaagatgc

SEQ ID NO: 476658 - DNA, 25 bp, Homo sapien
taatctgctcttaacggtaatgaaa

SEQ ID NO: 476659 - DNA, 25 bp, Homo sapien
catagtggtgttagacaaggtttcc

SEQ ID NO: 476660 - DNA, 25 bp, Homo sapien
ccccactagattaaggtcccatgtt

SEQ ID NO: 476661 - DNA, 25 bp, Homo sapien
taaagctcagaaggcagctattcca

SEQ ID NO: 476662 - DNA, 25 bp, Homo sapien
tctgcttatatctaccatagtggtg

SEQ ID NO: 476663 - DNA, 25 bp, Homo sapien
gattttcgatcttgagcataggctg

SEQ ID NO: 476664 - DNA, 25 bp, Homo sapien
aaatggttactttgtgccctaggtg

SEQ ID NO: 476665 - DNA, 25 bp, Homo sapien
tgtattaggagccaagaagagtgtc

SEQ ID NO: 476666 - DNA, 25 bp, Homo sapien
gatttcgtacgttcttcacacactg

SEQ ID NO: 476667 - DNA, 25 bp, Homo sapien
tatgtcaagtagcttttgatgctcc

SEQ ID NO: 476668 - DNA, 25 bp, Homo sapien
ggctatgtcaagtagcttttgatgc

SEQ ID NO: 476669 - DNA, 25 bp, Homo sapien
ctggctatgtcaagtagcttttgat

SEQ ID NO: 476670 - DNA, 25 bp, Homo sapien
tgtcaagtagcttttgatgctccat

SEQ ID NO: 476671 - DNA, 25 bp, Homo sapien
ttcttcaatatgatgctctgtgatt

SEQ ID NO: 476672 - DNA, 25 bp, Homo sapien
acattcttcaatatgatgctctgtg

SEQ ID NO: 476673 - DNA, 25 bp, Homo sapien
cattcttcaatatgatgctctgtga

SEQ ID NO: 476674 - DNA, 25 bp, Homo sapien
cacattcttcaatatgatgctctgt

SEQ ID NO: 476675 - DNA, 25 bp, Homo sapien
tagcaaacgtgtggtagccagcaag

SEQ ID NO: 476676 - DNA, 25 bp, Homo sapien
gtcagtttagcaaacgtgtggtagc

SEQ ID NO: 476677 - DNA, 25 bp, Homo sapien
aaacgtgtggtagccagcaagcaag

SEQ ID NO: 476678 - DNA, 25 bp, Homo sapien
tttagcaaacgtgtggtagccagca

SEQ ID NO: 476679 - DNA, 25 bp, Homo sapien
gctaagtaagcctacaaaatactac

SEQ ID NO: 476680 - DNA, 25 bp, Homo sapien
actagaattgtaagtggtgttttgc

SEQ ID NO: 476681 - DNA, 25 bp, Homo sapien
tattacctatgcaacaaaaatgaca

SEQ ID NO: 476682 - DNA, 25 bp, Homo sapien
cctttgaaaggtgaatgtttgtaga

SEQ ID NO: 476683 - DNA, 25 bp, Homo sapien
cctgaagatgacgaggatgaaaacc

SEQ ID NO: 476684 - DNA, 25 bp, Homo sapien
caacctgaagatgacgaggatgaaa

SEQ ID NO: 476685 - DNA, 25 bp, Homo sapien
aagatgacgaggatgaaaacctttc

SEQ ID NO: 476686 - DNA, 25 bp, Homo sapien
ctgaagatgacgaggatgaaaacct

SEQ ID NO: 476687 - DNA, 25 bp, Homo sapien
taaccaaaagttctattcacctcaa

SEQ ID NO: 476688 - DNA, 25 bp, Homo sapien
ataaccaaaagttctattcacctca

SEQ ID NO: 476689 - DNA, 25 bp, Homo sapien
cattttacccgatgagtaccctagg

SEQ ID NO: 476690 - DNA, 25 bp, Homo sapien
taccctagggcttagagactactaa

SEQ ID NO: 476691 - DNA, 25 bp, Homo sapien
tatgcagcctgtaaattatacccat

SEQ ID NO: 476692 - DNA, 25 bp, Homo sapien
taataacaattacacgcagcagaaa

SEQ ID NO: 476693 - DNA, 25 bp, Homo sapien
tagtgagagatctggtgctaaaagc

SEQ ID NO: 476694 - DNA, 25 bp, Homo sapien
cagcttgagctataggaaaagttcc

SEQ ID NO: 476695 - DNA, 25 bp, Homo sapien
tcacgttagccaaggcatacagggc

SEQ ID NO: 476696 - DNA, 25 bp, Homo sapien
tacaaaatgattaggaggacgtgat

SEQ ID NO: 476697 - DNA, 25 bp, Homo sapien
tggtgactaattcatgactaaactg

SEQ ID NO: 476698 - DNA, 25 bp, Homo sapien
tctgtggatctttgactttgttgcc

SEQ ID NO: 476699 - DNA, 25 bp, Homo sapien
tgttgccacttttacggtacaagct

SEQ ID NO: 476700 - DNA, 25 bp, Homo sapien
ggtacaagctgacttcgcggatctg

SEQ ID NO: 476701 - DNA, 25 bp, Homo sapien
attttcaatgctcttgacatgatgt

SEQ ID NO: 476702 - DNA, 25 bp, Homo sapien
gctttttactgcctattttcaatgc

SEQ ID NO: 476703 - DNA, 25 bp, Homo sapien
tcaatgctcttgacatgatgtactt

SEQ ID NO: 476704 - DNA, 25 bp, Homo sapien
tttcaatgctcttgacatgatgtac

SEQ ID NO: 476705 - DNA, 25 bp, Homo sapien
atcatcatccttcttgagacttggg

SEQ ID NO: 476706 - DNA, 25 bp, Homo sapien
tccttcttgagacttgggtagagaa

SEQ ID NO: 476707 - DNA, 25 bp, Homo sapien
catccttcttgagacttgggtagag

SEQ ID NO: 476708 - DNA, 25 bp, Homo sapien
catcatccttcttgagacttgggta

SEQ ID NO: 476709 - DNA, 25 bp, Homo sapien
gctcttcaatggcacaacagtgggc

SEQ ID NO: 476710 - DNA, 25 bp, Homo sapien
caatggcacaacagtgggccatgaa

SEQ ID NO: 476711 - DNA, 25 bp, Homo sapien
gtagatgtagccaagctcttcaatg

SEQ ID NO: 476712 - DNA, 25 bp, Homo sapien
caggaagattttacgtagatgtagc

SEQ ID NO: 476713 - DNA, 25 bp, Homo sapien
aatgactggcaatttatctccatca

SEQ ID NO: 476714 - DNA, 25 bp, Homo sapien
aattgctaagattattgaaaatgac

SEQ ID NO: 476715 - DNA, 25 bp, Homo sapien
tttgcatcagtagaatatcggctcc

SEQ ID NO: 476716 - DNA, 25 bp, Homo sapien
tctttaacactcagtgaatgagggt

SEQ ID NO: 476717 - DNA, 25 bp, Homo sapien
atactgcttataaggtgaaaaatgc

SEQ ID NO: 476718 - DNA, 25 bp, Homo sapien
cataagctctccgtttcgtatctgt

SEQ ID NO: 476719 - DNA, 25 bp, Homo sapien
gctgcacacagatgtaatactgctt

SEQ ID NO: 476720 - DNA, 25 bp, Homo sapien
tttcttgtcaggcagatgttctgtg

SEQ ID NO: 476721 - DNA, 25 bp, Homo sapien
ctgtgttataagtatagaatccgta

SEQ ID NO: 476722 - DNA, 25 bp, Homo sapien
tcattaagcagtcctgcttacattc

SEQ ID NO: 476723 - DNA, 25 bp, Homo sapien
ttaagcagtcctgcttacattccaa

SEQ ID NO: 476724 - DNA, 25 bp, Homo sapien
gaatccgtattgctcatcattaagc

SEQ ID NO: 476725 - DNA, 25 bp, Homo sapien
tgggtgtggatgattcgatactaac

SEQ ID NO: 476726 - DNA, 25 bp, Homo sapien
ggatgattcgatactaaccaaagaa

SEQ ID NO: 476727 - DNA, 25 bp, Homo sapien
taggagtgccacaaacatgagatgg

SEQ ID NO: 476728 - DNA, 25 bp, Homo sapien
tcacttcctactctgacctcaagtt

SEQ ID NO: 476729 - DNA, 25 bp, Homo sapien
taatttgtatgaacaattcagacca

SEQ ID NO: 476730 - DNA, 25 bp, Homo sapien
ggcaagttttgatttgtctcgtaaa

SEQ ID NO: 476731 - DNA, 25 bp, Homo sapien
ttcagaccaagaggcaagttttgat

SEQ ID NO: 476732 - DNA, 25 bp, Homo sapien
gatttgtctcgtaaattcacctttg

SEQ ID NO: 476733 - DNA, 25 bp, Homo sapien
cataaacccaggacttaattgtggt

SEQ ID NO: 476734 - DNA, 25 bp, Homo sapien
taattgtggtccagctatcatcagc

SEQ ID NO: 476735 - DNA, 25 bp, Homo sapien
taatacgtatgatattgacttgttc

SEQ ID NO: 476736 - DNA, 25 bp, Homo sapien
tacaatgtacaaaccagtaatacgt

SEQ ID NO: 476737 - DNA, 25 bp, Homo sapien
tgggttgtctcctcatcactatctc

SEQ ID NO: 476738 - DNA, 25 bp, Homo sapien
gttgtctcctcatcactatctctta

SEQ ID NO: 476739 - DNA, 25 bp, Homo sapien
ttaaaactccacacgggctcaccat

SEQ ID NO: 476740 - DNA, 25 bp, Homo sapien
attaaaactccacacgggctcacca

SEQ ID NO: 476741 - DNA, 25 bp, Homo sapien
ctaaaagcaactcaggatggtcaat

SEQ ID NO: 476742 - DNA, 25 bp, Homo sapien
ggcgctttcagctcgcttcttagat

SEQ ID NO: 476743 - DNA, 25 bp, Homo sapien
tatgagggcgctttcagctcgcttc

SEQ ID NO: 476744 - DNA, 25 bp, Homo sapien
gaagatgaactgtatgagggcgctt

SEQ ID NO: 476745 - DNA, 25 bp, Homo sapien
tagaagacgatggaaacagtttctc

SEQ ID NO: 476746 - DNA, 25 bp, Homo sapien
cacaaaccaactctgtagaagacga

SEQ ID NO: 476747 - DNA, 25 bp, Homo sapien
ttctgcaaacagttagacaatggtg

SEQ ID NO: 476748 - DNA, 25 bp, Homo sapien
taaactttagatgaaagtggtccac

SEQ ID NO: 476749 - DNA, 25 bp, Homo sapien
atgtagacctttgaactcgcacatc

SEQ ID NO: 476750 - DNA, 25 bp, Homo sapien
aaagaagatagccatttctagatct

SEQ ID NO: 476751 - DNA, 25 bp, Homo sapien
tcttcatagaagtcctcaaccctca

SEQ ID NO: 476752 - DNA, 25 bp, Homo sapien
ctcgtattgcaaaatgtagaccttt

SEQ ID NO: 476753 - DNA, 25 bp, Homo sapien
tcttgctgctattccctcataaaat

SEQ ID NO: 476754 - DNA, 25 bp, Homo sapien
gctcatatgggctgccacatcgtaa

SEQ ID NO: 476755 - DNA, 25 bp, Homo sapien
ggctgccacatcgtaaacaagctgg

SEQ ID NO: 476756 - DNA, 25 bp, Homo sapien
gtaaacaagctggattattcctcct

SEQ ID NO: 476757 - DNA, 25 bp, Homo sapien
taggatgctcatatgggctgccaca

SEQ ID NO: 476758 - DNA, 25 bp, Homo sapien
catttttgaaacttcttcctgttat

SEQ ID NO: 476759 - DNA, 25 bp, Homo sapien
ggcacatttttgaataaacagtaat

SEQ ID NO: 476760 - DNA, 25 bp, Homo sapien
taataaccgtatctaaatgtgatat

SEQ ID NO: 476761 - DNA, 25 bp, Homo sapien
agaaggcacatttttgaataaacag

SEQ ID NO: 476762 - DNA, 25 bp, Homo sapien
gctttcaaagcttctgtgtcagata

SEQ ID NO: 476763 - DNA, 25 bp, Homo sapien
ttttcttgtctcataccagttgcta

SEQ ID NO: 476764 - DNA, 25 bp, Homo sapien
cagtggctacgattttcagtgattt

SEQ ID NO: 476765 - DNA, 25 bp, Homo sapien
aactgctgctcctaaatatgaataa

SEQ ID NO: 476766 - DNA, 25 bp, Homo sapien
ctgacaggcatcgtacccattgccg

SEQ ID NO: 476767 - DNA, 25 bp, Homo sapien
gacaggcatcgtacccattgccgta

SEQ ID NO: 476768 - DNA, 25 bp, Homo sapien
catcgtacccattgccgtaggaggc

SEQ ID NO: 476769 - DNA, 25 bp, Homo sapien
aggcatcgtacccattgccgtagga

SEQ ID NO: 476770 - DNA, 25 bp, Homo sapien
gaggtgagcagttctagtggctatt

SEQ ID NO: 476771 - DNA, 25 bp, Homo sapien
cagttctagtggctattctttcaca

SEQ ID NO: 476772 - DNA, 25 bp, Homo sapien
tgtctctccacgaggtgagcagttc

SEQ ID NO: 476773 - DNA, 25 bp, Homo sapien
tgtctgtctctccacgaggtgagca

SEQ ID NO: 476774 - DNA, 25 bp, Homo sapien
tccccaaggaaggccatgtggagcg

SEQ ID NO: 476775 - DNA, 25 bp, Homo sapien
gaccatggtccacgttacccaactg

SEQ ID NO: 476776 - DNA, 25 bp, Homo sapien
accagtcccgggcaaggaccatggt

SEQ ID NO: 476777 - DNA, 25 bp, Homo sapien
ggttgccagcggcagtctgtgggaa

SEQ ID NO: 476778 - DNA, 25 bp, Homo sapien
tcctgccatcgggatgatgatgttt

SEQ ID NO: 476779 - DNA, 25 bp, Homo sapien
gggatgatgatgtttagctccaaca

SEQ ID NO: 476780 - DNA, 25 bp, Homo sapien
tcgggatgatgatgtttagctccaa

SEQ ID NO: 476781 - DNA, 25 bp, Homo sapien
ccatcgggatgatgatgtttagctc

SEQ ID NO: 476782 - DNA, 25 bp, Homo sapien
gatttccatatcgacatccaaatag

SEQ ID NO: 476783 - DNA, 25 bp, Homo sapien
aaaagcccaagtctgcataaaactt

SEQ ID NO: 476784 - DNA, 25 bp, Homo sapien
gaaggcccaatcctttcactcaggc

SEQ ID NO: 476785 - DNA, 25 bp, Homo sapien
cataaaactttagtccatgatttcc

SEQ ID NO: 476786 - DNA, 25 bp, Homo sapien
caatcaaggtaatggatgtgttcaa

SEQ ID NO: 476787 - DNA, 25 bp, Homo sapien
ggacatatgcaaacacccgtaatac

SEQ ID NO: 476788 - DNA, 25 bp, Homo sapien
caaattttgaagtgcacaacaccat

SEQ ID NO: 476789 - DNA, 25 bp, Homo sapien
caaagttgccttgtgtccgagtgtg

SEQ ID NO: 476790 - DNA, 25 bp, Homo sapien
tctaaaaagtatagctttgatccct

SEQ ID NO: 476791 - DNA, 25 bp, Homo sapien
tacagcatggaaactctagttaata

SEQ ID NO: 476792 - DNA, 25 bp, Homo sapien
gtgaaatctgaaaacgctgaactcg

SEQ ID NO: 476793 - DNA, 25 bp, Homo sapien
taaaggttcagcgatacagggtaag

SEQ ID NO: 476794 - DNA, 25 bp, Homo sapien
gttccattacaaattgcttactcat

SEQ ID NO: 476795 - DNA, 25 bp, Homo sapien
ctggttccattacaaattgcttact

SEQ ID NO: 476796 - DNA, 25 bp, Homo sapien
ggttccattacaaattgcttactca

SEQ ID NO: 476797 - DNA, 25 bp, Homo sapien
tggttccattacaaattgcttactc

SEQ ID NO: 476798 - DNA, 25 bp, Homo sapien
ccgggccactgggaagtaatcagat

SEQ ID NO: 476799 - DNA, 25 bp, Homo sapien
caatctggaagacagcccttcgcca

SEQ ID NO: 476800 - DNA, 25 bp, Homo sapien
ccttcgccaaagtcaaatatgctgt

SEQ ID NO: 476801 - DNA, 25 bp, Homo sapien
catgccccgtgagaatttggaagtc

SEQ ID NO: 476802 - DNA, 25 bp, Homo sapien
gtttttgtcagtattcgcatggttt

SEQ ID NO: 476803 - DNA, 25 bp, Homo sapien
actacaagcacaaccccccagacac

SEQ ID NO: 476804 - DNA, 25 bp, Homo sapien
tttttgtcagtattcgcatggttta

SEQ ID NO: 476805 - DNA, 25 bp, Homo sapien
ttactacaagcacaaccccccagac

SEQ ID NO: 476806 - DNA, 25 bp, Homo sapien
ccagttgctatatcgcttatccata

SEQ ID NO: 476807 - DNA, 25 bp, Homo sapien
gctatatcgcttatccatagaatta

SEQ ID NO: 476808 - DNA, 25 bp, Homo sapien
tggagatccagttgctatatcgctt

SEQ ID NO: 476809 - DNA, 25 bp, Homo sapien
cgcttatccatagaattaatttgtc

SEQ ID NO: 476810 - DNA, 25 bp, Homo sapien
acatattgccagtacttagtctccc

SEQ ID NO: 476811 - DNA, 25 bp, Homo sapien
gttggcatgtaacatattgccagta

SEQ ID NO: 476812 - DNA, 25 bp, Homo sapien
tgccagtacttagtctccccgtgtg

SEQ ID NO: 476813 - DNA, 25 bp, Homo sapien
tagtctccccgtgtgctcctgtgct

SEQ ID NO: 476814 - DNA, 25 bp, Homo sapien
gcatttccggaaaacaccagtacag

SEQ ID NO: 476815 - DNA, 25 bp, Homo sapien
tcagacattagctaagggctgcccc

SEQ ID NO: 476816 - DNA, 25 bp, Homo sapien
gcccctgaggagatgtaaattcgca

SEQ ID NO: 476817 - DNA, 25 bp, Homo sapien
gcacgtttgtaatattaagtcccac

SEQ ID NO: 476818 - DNA, 25 bp, Homo sapien
gactctggggttatcctccaatgca

SEQ ID NO: 476819 - DNA, 25 bp, Homo sapien
tgtgctttaccctttggtgactctg

SEQ ID NO: 476820 - DNA, 25 bp, Homo sapien
ggtgactctggggttatcctccaat

SEQ ID NO: 476821 - DNA, 25 bp, Homo sapien
tgtgtgctttaccctttggtgactc

SEQ ID NO: 476822 - DNA, 25 bp, Homo sapien
atgccttccattgctctatcatctc

SEQ ID NO: 476823 - DNA, 25 bp, Homo sapien
taatcaatcacgcacacctgtaatg

SEQ ID NO: 476824 - DNA, 25 bp, Homo sapien
tgtttttcatctcccgttgaactgg

SEQ ID NO: 476825 - DNA, 25 bp, Homo sapien
cattgctctatcatctcctgttgtt

SEQ ID NO: 476826 - DNA, 25 bp, Homo sapien
gcagacagcagagttcattgggcat

SEQ ID NO: 476827 - DNA, 25 bp, Homo sapien
ctggcagacagcagagttcattggg

SEQ ID NO: 476828 - DNA, 25 bp, Homo sapien
ggcagacagcagagttcattgggca

SEQ ID NO: 476829 - DNA, 25 bp, Homo sapien
tggcagacagcagagttcattgggc

SEQ ID NO: 476830 - DNA, 25 bp, Homo sapien
ctccacaagtcctagagagattcct

SEQ ID NO: 476831 - DNA, 25 bp, Homo sapien
tgaaaattcttcactgagatcctgg

SEQ ID NO: 476832 - DNA, 25 bp, Homo sapien
caagtcctagagagattcctctgtc

SEQ ID NO: 476833 - DNA, 25 bp, Homo sapien
cttgggtgaaaattcttcactgaga

SEQ ID NO: 476834 - DNA, 25 bp, Homo sapien
gcaggtctcatgtctttctgcctca

SEQ ID NO: 476835 - DNA, 25 bp, Homo sapien
ttttagcatagcaggtctcatgtct

SEQ ID NO: 476836 - DNA, 25 bp, Homo sapien
gcatagcaggtctcatgtctttctg

SEQ ID NO: 476837 - DNA, 25 bp, Homo sapien
tagcatagcaggtctcatgtctttc

SEQ ID NO: 476838 - DNA, 25 bp, Homo sapien
tttcctctgataaacctgctgtctc

SEQ ID NO: 476839 - DNA, 25 bp, Homo sapien
aaacctgctgtctcttaagtccaga

SEQ ID NO: 476840 - DNA, 25 bp, Homo sapien
ctcttaagtccagagttccttcggt

SEQ ID NO: 476841 - DNA, 25 bp, Homo sapien
cctttcctctgataaacctgctgtc

SEQ ID NO: 476842 - DNA, 25 bp, Homo sapien
ccttatgttcaggtttatccaaatg

SEQ ID NO: 476843 - DNA, 25 bp, Homo sapien
accttatgttcaggtttatccaaat

SEQ ID NO: 476844 - DNA, 25 bp, Homo sapien
taaaccttatgttcaggtttatcca

SEQ ID NO: 476845 - DNA, 25 bp, Homo sapien
agtgctgacagtcatgcaaaagcag

SEQ ID NO: 476846 - DNA, 25 bp, Homo sapien
cagtgctgacagtcatgcaaaagca

SEQ ID NO: 476847 - DNA, 25 bp, Homo sapien
tggcagtgctgacagtcatgcaaaa

SEQ ID NO: 476848 - DNA, 25 bp, Homo sapien
tttggatggcagtgctgacagtcat

SEQ ID NO: 476849 - DNA, 25 bp, Homo sapien
taaggagaccattatatttgtgaag

SEQ ID NO: 476850 - DNA, 25 bp, Homo sapien
ggcagctctgtgataagtgttgaat

SEQ ID NO: 476851 - DNA, 25 bp, Homo sapien
taactcttttaggtgctttgacatc

SEQ ID NO: 476852 - DNA, 25 bp, Homo sapien
tgaagaatactgctaaatctaaatg

SEQ ID NO: 476853 - DNA, 25 bp, Homo sapien
agtgttctgcccttggatctccaaa

SEQ ID NO: 476854 - DNA, 25 bp, Homo sapien
tgaggatccatatctgatgagcgtc

SEQ ID NO: 476855 - DNA, 25 bp, Homo sapien
tcgcaaggtagtgaagggcatcgca

SEQ ID NO: 476856 - DNA, 25 bp, Homo sapien
ctcctgagggccgtgatccaattac

SEQ ID NO: 476857 - DNA, 25 bp, Homo sapien
ctggcagatgcgcaccatatgactc

SEQ ID NO: 476858 - DNA, 25 bp, Homo sapien
tatgactccgatcttgttaaatgta

SEQ ID NO: 476859 - DNA, 25 bp, Homo sapien
gcaccatatgactccgatcttgtta

SEQ ID NO: 476860 - DNA, 25 bp, Homo sapien
gatgcgcaccatatgactccgatct

SEQ ID NO: 476861 - DNA, 25 bp, Homo sapien
catggtcaggttaaactaacacttc

SEQ ID NO: 476862 - DNA, 25 bp, Homo sapien
tgccacatggtcaggttaaactaac

SEQ ID NO: 476863 - DNA, 25 bp, Homo sapien
gcatatctggctttctgccacatgg

SEQ ID NO: 476864 - DNA, 25 bp, Homo sapien
tgcatatctggctttctgccacatg

SEQ ID NO: 476865 - DNA, 25 bp, Homo sapien
tcatttatttgacacaaaacatctt

SEQ ID NO: 476866 - DNA, 25 bp, Homo sapien
taaattccaggagcaccaatgaaag

SEQ ID NO: 476867 - DNA, 25 bp, Homo sapien
taagccagggaacattccagaggtc

SEQ ID NO: 476868 - DNA, 25 bp, Homo sapien
gcaaaaaggcttcgataagccaggg

SEQ ID NO: 476869 - DNA, 25 bp, Homo sapien
tccagaggtcggtagatagcaagat

SEQ ID NO: 476870 - DNA, 25 bp, Homo sapien
acctttcttggtctaggctcattcc

SEQ ID NO: 476871 - DNA, 25 bp, Homo sapien
tatttgacccaacaaaacttgtcac

SEQ ID NO: 476872 - DNA, 25 bp, Homo sapien
catgagcagtcgctgtatttgaccc

SEQ ID NO: 476873 - DNA, 25 bp, Homo sapien
cccttggtgatgtcctcttgtatta

SEQ ID NO: 476874 - DNA, 25 bp, Homo sapien
cagctctggttgagaatttgtattc

SEQ ID NO: 476875 - DNA, 25 bp, Homo sapien
ggaccagaacaattatactcatcat

SEQ ID NO: 476876 - DNA, 25 bp, Homo sapien
taagatagctcccaaggaccagaac

SEQ ID NO: 476877 - DNA, 25 bp, Homo sapien
tataaacagctagtagcttcagaga

SEQ ID NO: 476878 - DNA, 25 bp, Homo sapien
gagtgatttaaggtaagttattaca

SEQ ID NO: 476879 - DNA, 25 bp, Homo sapien
tgttccagaaccagtatgagcagtc

SEQ ID NO: 476880 - DNA, 25 bp, Homo sapien
tctctggaacggaatgaaggctgaa

SEQ ID NO: 476881 - DNA, 25 bp, Homo sapien
ggagtattgtctctcacaggctcta

SEQ ID NO: 476882 - DNA, 25 bp, Homo sapien
ggtagaaactctaggtgccagacca

SEQ ID NO: 476883 - DNA, 25 bp, Homo sapien
tttctgatctagagccacacctttc

SEQ ID NO: 476884 - DNA, 25 bp, Homo sapien
ctcttctatttcaatggtgtctcca

SEQ ID NO: 476885 - DNA, 25 bp, Homo sapien
cacttcttagtattctccatgtgag

SEQ ID NO: 476886 - DNA, 25 bp, Homo sapien
tttccagatattgtggccacactcc

SEQ ID NO: 476887 - DNA, 25 bp, Homo sapien
gcagcttcattttgagtgcactaag

SEQ ID NO: 476888 - DNA, 25 bp, Homo sapien
cagcagcttcattttgagtgcacta

SEQ ID NO: 476889 - DNA, 25 bp, Homo sapien
cagcttcattttgagtgcactaaga

SEQ ID NO: 476890 - DNA, 25 bp, Homo sapien
gacagcagcttcattttgagtgcac

SEQ ID NO: 476891 - DNA, 25 bp, Homo sapien
agagaattgtgatttgagatgcagt

SEQ ID NO: 476892 - DNA, 25 bp, Homo sapien
aatgttgattaaagagaattgtgat

SEQ ID NO: 476893 - DNA, 25 bp, Homo sapien
ccactatgctgcaatgttgattaaa

SEQ ID NO: 476894 - DNA, 25 bp, Homo sapien
tgtgatttgagatgcagtattgcta

SEQ ID NO: 476895 - DNA, 25 bp, Homo sapien
gagtatttgtggatttcaattttct

SEQ ID NO: 476896 - DNA, 25 bp, Homo sapien
agagtatttgtggatttcaattttc

SEQ ID NO: 476897 - DNA, 25 bp, Homo sapien
tgcaaattccccaataactttattc

SEQ ID NO: 476898 - DNA, 25 bp, Homo sapien
tgtaacccgaaatgactctcagcat

SEQ ID NO: 476899 - DNA, 25 bp, Homo sapien
ccagtgattgtggactgggaagctt

SEQ ID NO: 476900 - DNA, 25 bp, Homo sapien
taagtatgaccaagtatgatctggg

SEQ ID NO: 476901 - DNA, 25 bp, Homo sapien
ctgtggtgtgctcttggttccaagc

SEQ ID NO: 476902 - DNA, 25 bp, Homo sapien
tgtggtgtgctcttggttccaagca

SEQ ID NO: 476903 - DNA, 25 bp, Homo sapien
gtggtgtgctcttggttccaagcat

SEQ ID NO: 476904 - DNA, 25 bp, Homo sapien
gtttgttgacatcaacttttcgagt

SEQ ID NO: 476905 - DNA, 25 bp, Homo sapien
tcttcttcgttgttaatggtggctg

SEQ ID NO: 476906 - DNA, 25 bp, Homo sapien
catcaacttttcgagttattttatc

SEQ ID NO: 476907 - DNA, 25 bp, Homo sapien
attttatcttcttcgttgttaatgg

SEQ ID NO: 476908 - DNA, 25 bp, Homo sapien
aaaactgacttctgccatgaaagca

SEQ ID NO: 476909 - DNA, 25 bp, Homo sapien
tgacttctgccatgaaagcaacaac

SEQ ID NO: 476910 - DNA, 25 bp, Homo sapien
caacaactactggaatcagggccag

SEQ ID NO: 476911 - DNA, 25 bp, Homo sapien
aacaactactggaatcagggccaga

SEQ ID NO: 476912 - DNA, 25 bp, Homo sapien
tacagggacctgtatggttgatgag

SEQ ID NO: 476913 - DNA, 25 bp, Homo sapien
ttttagtttgtgtagctgtggcaga

SEQ ID NO: 476914 - DNA, 25 bp, Homo sapien
ctatgtaatgatacagggacctgta

SEQ ID NO: 476915 - DNA, 25 bp, Homo sapien
ggttgatgaggcttaagattttagt

SEQ ID NO: 476916 - DNA, 25 bp, Homo sapien
gaaatgtggctctacttagaaagtc

SEQ ID NO: 476917 - DNA, 25 bp, Homo sapien
tctgccttgactaggagcaaaaccc

SEQ ID NO: 476918 - DNA, 25 bp, Homo sapien
gggtttctcacatcccagtgaattg

SEQ ID NO: 476919 - DNA, 25 bp, Homo sapien
tagcactgaaaccttgcgggacttc

SEQ ID NO: 476920 - DNA, 25 bp, Homo sapien
ttctgcaggtagagtttgaactagg

SEQ ID NO: 476921 - DNA, 25 bp, Homo sapien
cttctgcaggtagagtttgaactag

SEQ ID NO: 476922 - DNA, 25 bp, Homo sapien
taggatgagaataagaaattccctg

SEQ ID NO: 476923 - DNA, 25 bp, Homo sapien
tgaactaggatgagaataagaaatt

SEQ ID NO: 476924 - DNA, 25 bp, Homo sapien
aaatttttgaagtcatcactcacat

SEQ ID NO: 476925 - DNA, 25 bp, Homo sapien
gaagtcatcactcacattctttcag

SEQ ID NO: 476926 - DNA, 25 bp, Homo sapien
ttgaagtcatcactcacattctttc

SEQ ID NO: 476927 - DNA, 25 bp, Homo sapien
tttttgaagtcatcactcacattct

SEQ ID NO: 476928 - DNA, 25 bp, Homo sapien
cttcaactttataagagcctgaaat

SEQ ID NO: 476929 - DNA, 25 bp, Homo sapien
gaataccatgagcaattgtgtgagt

SEQ ID NO: 476930 - DNA, 25 bp, Homo sapien
gagcctgaaataagaataccatgag

SEQ ID NO: 476931 - DNA, 25 bp, Homo sapien
tataagagcctgaaataagaatacc

SEQ ID NO: 476932 - DNA, 25 bp, Homo sapien
gaataatcaactaattgctgaagca

SEQ ID NO: 476933 - DNA, 25 bp, Homo sapien
aataatcaactaattgctgaagcaa

SEQ ID NO: 476934 - DNA, 25 bp, Homo sapien
agaataatcaactaattgctgaagc

SEQ ID NO: 476935 - DNA, 25 bp, Homo sapien
acagaataatcaactaattgctgaa

SEQ ID NO: 476936 - DNA, 25 bp, Homo sapien
ttccttttggaactaagcctgtgta

SEQ ID NO: 476937 - DNA, 25 bp, Homo sapien
tggaactaagcctgtgtacagagag

SEQ ID NO: 476938 - DNA, 25 bp, Homo sapien
tcatctcttctacgttgtctgatct

SEQ ID NO: 476939 - DNA, 25 bp, Homo sapien
gatcttatctggtaggtctcttcca

SEQ ID NO: 476940 - DNA, 25 bp, Homo sapien
agggccatgggaagtgctagtctgg

SEQ ID NO: 476941 - DNA, 25 bp, Homo sapien
tcatttctaccaggcagtgaggccc

SEQ ID NO: 476942 - DNA, 25 bp, Homo sapien
ttaggctgcaccgtctgtagagaat

SEQ ID NO: 476943 - DNA, 25 bp, Homo sapien
tagtctgggagatattaggctgcac

SEQ ID NO: 476944 - DNA, 25 bp, Homo sapien
ccaggatttaacgatgagataccag

SEQ ID NO: 476945 - DNA, 25 bp, Homo sapien
catgcagagaactactggtgaggac

SEQ ID NO: 476946 - DNA, 25 bp, Homo sapien
aaaaattttgaacttggccgtgcag

SEQ ID NO: 476947 - DNA, 25 bp, Homo sapien
tgggtgctctcttgctgaatgggcc

SEQ ID NO: 476948 - DNA, 25 bp, Homo sapien
aaaaaatccactccagatttagaag

SEQ ID NO: 476949 - DNA, 25 bp, Homo sapien
gaagagatggcacagcagttgaaaa

SEQ ID NO: 476950 - DNA, 25 bp, Homo sapien
cagaaatagccaattgaacaaaaac

SEQ ID NO: 476951 - DNA, 25 bp, Homo sapien
tcatctcagaaatagccaattgaac

SEQ ID NO: 476952 - DNA, 25 bp, Homo sapien
aatgtgagtattcagtatgtcttca

SEQ ID NO: 476953 - DNA, 25 bp, Homo sapien
agaaaatgtgagtattcagtatgtc

SEQ ID NO: 476954 - DNA, 25 bp, Homo sapien
gagtattcagtatgtcttcacccat

SEQ ID NO: 476955 - DNA, 25 bp, Homo sapien
tgtgagtattcagtatgtcttcacc

SEQ ID NO: 476956 - DNA, 25 bp, Homo sapien
agcaagctttctcctggtagccata

SEQ ID NO: 476957 - DNA, 25 bp, Homo sapien
caaagggcattcattactgggtctc

SEQ ID NO: 476958 - DNA, 25 bp, Homo sapien
actgggtctccttcagacaactgaa

SEQ ID NO: 476959 - DNA, 25 bp, Homo sapien
accaacaagcaagctttctcctggt

SEQ ID NO: 476960 - DNA, 25 bp, Homo sapien
actgctgccagaacaataaccaagg

SEQ ID NO: 476961 - DNA, 25 bp, Homo sapien
ggctctcaggatcctccataacacc

SEQ ID NO: 476962 - DNA, 25 bp, Homo sapien
cttgaagtccaatacaggctctcag

SEQ ID NO: 476963 - DNA, 25 bp, Homo sapien
gctctcaggatcctccataacacct

SEQ ID NO: 476964 - DNA, 25 bp, Homo sapien
attcccaattggacaatgccttcac

SEQ ID NO: 476965 - DNA, 25 bp, Homo sapien
tattcccaattggacaatgccttca

SEQ ID NO: 476966 - DNA, 25 bp, Homo sapien
ttatattcccaattggacaatgcct

SEQ ID NO: 476967 - DNA, 25 bp, Homo sapien
tatattcccaattggacaatgcctt

SEQ ID NO: 476968 - DNA, 25 bp, Homo sapien
tccaagatcgccacaagcaagtctc

SEQ ID NO: 476969 - DNA, 25 bp, Homo sapien
caaccatacttttgtgcaacagtgg

SEQ ID NO: 476970 - DNA, 25 bp, Homo sapien
tgggatccagcaaaaacagtgttag

SEQ ID NO: 476971 - DNA, 25 bp, Homo sapien
cattacatctcacaactatatggaa

SEQ ID NO: 476972 - DNA, 25 bp, Homo sapien
gtaactcagaaagccgatagcagtg

SEQ ID NO: 476973 - DNA, 25 bp, Homo sapien
cagaaagccgatagcagtgattctc

SEQ ID NO: 476974 - DNA, 25 bp, Homo sapien
ctcagaaagccgatagcagtgattc

SEQ ID NO: 476975 - DNA, 25 bp, Homo sapien
aactcagaaagccgatagcagtgat

SEQ ID NO: 476976 - DNA, 25 bp, Homo sapien
tattcctactaacgatgtgcaaggg

SEQ ID NO: 476977 - DNA, 25 bp, Homo sapien
tcattgccacctgtgcctactggac

SEQ ID NO: 476978 - DNA, 25 bp, Homo sapien
taatggcggctctaatttctattcc

SEQ ID NO: 476979 - DNA, 25 bp, Homo sapien
gaaccattgtggatgtgtgaccaga

SEQ ID NO: 476980 - DNA, 25 bp, Homo sapien
ttccatagtgattggttcagctctg

SEQ ID NO: 476981 - DNA, 25 bp, Homo sapien
ccatagtgattggttcagctctgca

SEQ ID NO: 476982 - DNA, 25 bp, Homo sapien
tttccatagtgattggttcagctct

SEQ ID NO: 476983 - DNA, 25 bp, Homo sapien
tccatagtgattggttcagctctgc

SEQ ID NO: 476984 - DNA, 25 bp, Homo sapien
gctgtagtgtggtgtcgcctgttca

SEQ ID NO: 476985 - DNA, 25 bp, Homo sapien
catggagaattaatgctgctgtagt

SEQ ID NO: 476986 - DNA, 25 bp, Homo sapien
atgctgctgtagtgtggtgtcgcct

SEQ ID NO: 476987 - DNA, 25 bp, Homo sapien
aaatttcagtgtgtcatggagaatt

SEQ ID NO: 476988 - DNA, 25 bp, Homo sapien
gcagttccaaggccagtctcaactt

SEQ ID NO: 476989 - DNA, 25 bp, Homo sapien
agttccaaggccagtctcaacttct

SEQ ID NO: 476990 - DNA, 25 bp, Homo sapien
ttgcagttccaaggccagtctcaac

SEQ ID NO: 476991 - DNA, 25 bp, Homo sapien
ttttgcagttccaaggccagtctca

SEQ ID NO: 476992 - DNA, 25 bp, Homo sapien
gagagtatctgagaataagagtctg

SEQ ID NO: 476993 - DNA, 25 bp, Homo sapien
aagtctgcagagctataccttccct

SEQ ID NO: 476994 - DNA, 25 bp, Homo sapien
tagttcttaagcttaaagatgcaag

SEQ ID NO: 476995 - DNA, 25 bp, Homo sapien
taccttccctctggtatctggaact

SEQ ID NO: 476996 - DNA, 25 bp, Homo sapien
gccccattaatctcacaccagtttt

SEQ ID NO: 476997 - DNA, 25 bp, Homo sapien
tgcccagtaatgactgcagcttgtg

SEQ ID NO: 476998 - DNA, 25 bp, Homo sapien
gttttccaacatcaccataactgcc

SEQ ID NO: 476999 - DNA, 25 bp, Homo sapien
cagcatttctgtcaggctccgcccc

SEQ ID NO: 477000 - DNA, 25 bp, Homo sapien
acatccaaagtaacgtttgatcaaa

SEQ ID NO: 477001 - DNA, 25 bp, Homo sapien
gaaacatccaaagtaacgtttgatc

SEQ ID NO: 477002 - DNA, 25 bp, Homo sapien
cagaaacatccaaagtaacgtttga

SEQ ID NO: 477003 - DNA, 25 bp, Homo sapien
aaacatccaaagtaacgtttgatca

SEQ ID NO: 477004 - DNA, 25 bp, Homo sapien
gaccctcagtaatgttttagccgta

SEQ ID NO: 477005 - DNA, 25 bp, Homo sapien
tgtcaccaggttttagggctcataa

SEQ ID NO: 477006 - DNA, 25 bp, Homo sapien
tttctatcacaacacaaagcgaggg

SEQ ID NO: 477007 - DNA, 25 bp, Homo sapien
ccatcttctcatacaggcagttcca

SEQ ID NO: 477008 - DNA, 25 bp, Homo sapien
attctttgaaagcttttcctatctc

SEQ ID NO: 477009 - DNA, 25 bp, Homo sapien
tctttgaaagcttttcctatctctt

SEQ ID NO: 477010 - DNA, 25 bp, Homo sapien
tgaaagcttttcctatctcttcatc

SEQ ID NO: 477011 - DNA, 25 bp, Homo sapien
cttggatataattctttgaaagctt

SEQ ID NO: 477012 - DNA, 25 bp, Homo sapien
tgtcatccattttacaagtgcgtta

SEQ ID NO: 477013 - DNA, 25 bp, Homo sapien
gcgttattgtctctcacagcagaga

SEQ ID NO: 477014 - DNA, 25 bp, Homo sapien
cttcttgtctcatttgaaatatgca

SEQ ID NO: 477015 - DNA, 25 bp, Homo sapien
tatgcatagggctttatgtcatcca

SEQ ID NO: 477016 - DNA, 25 bp, Homo sapien
gttccaggttcctggggaggcctca

SEQ ID NO: 477017 - DNA, 25 bp, Homo sapien
ctcacaatcatggtggaaggtgaaa

SEQ ID NO: 477018 - DNA, 25 bp, Homo sapien
ttccaggttcctggggaggcctcac

SEQ ID NO: 477019 - DNA, 25 bp, Homo sapien
tcacaatcatggtggaaggtgaaag

SEQ ID NO: 477020 - DNA, 25 bp, Homo sapien
cttgtgagaaggaacgaggtgccca

SEQ ID NO: 477021 - DNA, 25 bp, Homo sapien
gagaaggaacgaggtgcccagtttc

SEQ ID NO: 477022 - DNA, 25 bp, Homo sapien
gtcagtgaggtcactgaaaatgcag

SEQ ID NO: 477023 - DNA, 25 bp, Homo sapien
gcccagtttccagtcagtgaggtca

SEQ ID NO: 477024 - DNA, 25 bp, Homo sapien
aatagctgccaataggcatccccag

SEQ ID NO: 477025 - DNA, 25 bp, Homo sapien
tctctgtcttccaggtaatagctgc

SEQ ID NO: 477026 - DNA, 25 bp, Homo sapien
catccccagagggagatcagtagga

SEQ ID NO: 477027 - DNA, 25 bp, Homo sapien
gaggtcaaggtaaatgttagccatc

SEQ ID NO: 477028 - DNA, 25 bp, Homo sapien
gcttgtcatcttcttgttctacaat

SEQ ID NO: 477029 - DNA, 25 bp, Homo sapien
cattttccactgaagtgaaccatac

SEQ ID NO: 477030 - DNA, 25 bp, Homo sapien
ttcaggaagacatctaattgcttgt

SEQ ID NO: 477031 - DNA, 25 bp, Homo sapien
tcttgttctacaattaacaccattt

SEQ ID NO: 477032 - DNA, 25 bp, Homo sapien
gagcattgttcagacgtcactctgg

SEQ ID NO: 477033 - DNA, 25 bp, Homo sapien
tgtagcaaccctctttgggagcaga

SEQ ID NO: 477034 - DNA, 25 bp, Homo sapien
tgggagcagacatgaagatcttgtt

SEQ ID NO: 477035 - DNA, 25 bp, Homo sapien
gaattaaattgagggaagctaagaa

SEQ ID NO: 477036 - DNA, 25 bp, Homo sapien
taaaggaggattttgcagtcatcgc

SEQ ID NO: 477037 - DNA, 25 bp, Homo sapien
tgaaatgtggctatctcccttctgt

SEQ ID NO: 477038 - DNA, 25 bp, Homo sapien
tctttggacatttctgaagaatttc

SEQ ID NO: 477039 - DNA, 25 bp, Homo sapien
cagtcagatttgtaagtccataatt

SEQ ID NO: 477040 - DNA, 25 bp, Homo sapien
acggaagacttaattatggttactg

SEQ ID NO: 477041 - DNA, 25 bp, Homo sapien
cttcattccaatgccaaatacggaa

SEQ ID NO: 477042 - DNA, 25 bp, Homo sapien
caatgccaaatacggaagacttaat

SEQ ID NO: 477043 - DNA, 25 bp, Homo sapien
gacttaattatggttactgtgccca

SEQ ID NO: 477044 - DNA, 25 bp, Homo sapien
tggttgactgcatctttggatgagt

SEQ ID NO: 477045 - DNA, 25 bp, Homo sapien
gactgcatctttggatgagtaagga

SEQ ID NO: 477046 - DNA, 25 bp, Homo sapien
tgagtaaggagaagtaaatagaagg

SEQ ID NO: 477047 - DNA, 25 bp, Homo sapien
ggatgagtaaggagaagtaaataga

SEQ ID NO: 477048 - DNA, 25 bp, Homo sapien
ccaatttatctctgcttatagccat

SEQ ID NO: 477049 - DNA, 25 bp, Homo sapien
cattaaattattgactcgttttgtt

SEQ ID NO: 477050 - DNA, 25 bp, Homo sapien
cagcaacttgagccaatttatctct

SEQ ID NO: 477051 - DNA, 25 bp, Homo sapien
tgatgttggcaagtttgctttgatt

SEQ ID NO: 477052 - DNA, 25 bp, Homo sapien
tgattacacgggattgggcaatagc

SEQ ID NO: 477053 - DNA, 25 bp, Homo sapien
gaatttgcctcttagcctgttgtgc

SEQ ID NO: 477054 - DNA, 25 bp, Homo sapien
gcctgagcattagaacggatctgga

SEQ ID NO: 477055 - DNA, 25 bp, Homo sapien
aataatgacttttcagaggatgggc

SEQ ID NO: 477056 - DNA, 25 bp, Homo sapien
atattccacaggttccaacttctcc

SEQ ID NO: 477057 - DNA, 25 bp, Homo sapien
gaatattccacaggttccaacttct

SEQ ID NO: 477058 - DNA, 25 bp, Homo sapien
ctgctgcaaagccagaatattccac

SEQ ID NO: 477059 - DNA, 25 bp, Homo sapien
gctgcaaagccagaatattccacag

SEQ ID NO: 477060 - DNA, 25 bp, Homo sapien
acagcccttgccgatcaagtaagtg

SEQ ID NO: 477061 - DNA, 25 bp, Homo sapien
gctatttcagcatcgcctctgcctt

SEQ ID NO: 477062 - DNA, 25 bp, Homo sapien
ttgccgatcaagtaagtggagcctg

SEQ ID NO: 477063 - DNA, 25 bp, Homo sapien
aaaacaggctatttcagcatcgcct

SEQ ID NO: 477064 - DNA, 25 bp, Homo sapien
tcagtgaggaggtaggacaatgacc

SEQ ID NO: 477065 - DNA, 25 bp, Homo sapien
aacagactaagatgcctaacggagg

SEQ ID NO: 477066 - DNA, 25 bp, Homo sapien
tccaacagtattgtgctaggcatga

SEQ ID NO: 477067 - DNA, 25 bp, Homo sapien
gatgcatctgcctgatcttggactt

SEQ ID NO: 477068 - DNA, 25 bp, Homo sapien
attcacttcccctcacattctccat

SEQ ID NO: 477069 - DNA, 25 bp, Homo sapien
cattcacttcccctcacattctcca

SEQ ID NO: 477070 - DNA, 25 bp, Homo sapien
cccattcacttcccctcacattctc

SEQ ID NO: 477071 - DNA, 25 bp, Homo sapien
ccattcacttcccctcacattctcc

SEQ ID NO: 477072 - DNA, 25 bp, Homo sapien
gccaaatggcaaacgcagcaaaatg

SEQ ID NO: 477073 - DNA, 25 bp, Homo sapien
aacgcagcaaaatggaacttgctga

SEQ ID NO: 477074 - DNA, 25 bp, Homo sapien
gctgaagttgtatcataagtaactt

SEQ ID NO: 477075 - DNA, 25 bp, Homo sapien
attaaaacggccaatataaagcctg

SEQ ID NO: 477076 - DNA, 25 bp, Homo sapien
caggtgtattgggagtaaaatgttc

SEQ ID NO: 477077 - DNA, 25 bp, Homo sapien
ggtgtattgggagtaaaatgttcta

SEQ ID NO: 477078 - DNA, 25 bp, Homo sapien
attttcctgtggctagtggtaaaca

SEQ ID NO: 477079 - DNA, 25 bp, Homo sapien
tcctgtggctagtggtaaacatttc

SEQ ID NO: 477080 - DNA, 25 bp, Homo sapien
gcctaatctagagacaggccttaat

SEQ ID NO: 477081 - DNA, 25 bp, Homo sapien
gaagtcctactccatcaaacacatg

SEQ ID NO: 477082 - DNA, 25 bp, Homo sapien
aggcgtgttgaaagctgaaataagc

SEQ ID NO: 477083 - DNA, 25 bp, Homo sapien
aaacagatttatgctaacatggagg

SEQ ID NO: 477084 - DNA, 25 bp, Homo sapien
cattgtgcccagaattggttccttc

SEQ ID NO: 477085 - DNA, 25 bp, Homo sapien
tagatagcgctttatgtgcaggaaa

SEQ ID NO: 477086 - DNA, 25 bp, Homo sapien
gatggatccagctctgcaactagaa

SEQ ID NO: 477087 - DNA, 25 bp, Homo sapien
ggaaaatggtactggatgcatgact

SEQ ID NO: 477088 - DNA, 25 bp, Homo sapien
aggcctgtttctaggccatgagaca

SEQ ID NO: 477089 - DNA, 25 bp, Homo sapien
gcaaggttacaagccatgcaggtaa

SEQ ID NO: 477090 - DNA, 25 bp, Homo sapien
tctacttcagaactcggaacctgcg

SEQ ID NO: 477091 - DNA, 25 bp, Homo sapien
catgattgctggtttgcacggtaaa

SEQ ID NO: 477092 - DNA, 25 bp, Homo sapien
tgcgtaacgccattttgtacagcac

SEQ ID NO: 477093 - DNA, 25 bp, Homo sapien
tcaaaaggtatcacaatgatgccat

SEQ ID NO: 477094 - DNA, 25 bp, Homo sapien
caaaaggtatcacaatgatgccatc

SEQ ID NO: 477095 - DNA, 25 bp, Homo sapien
ttcaaaaggtatcacaatgatgcca

SEQ ID NO: 477096 - DNA, 25 bp, Homo sapien
tctccattaagtaaccaaagggcaa

SEQ ID NO: 477097 - DNA, 25 bp, Homo sapien
tcaaactacattcactaggcacaag

SEQ ID NO: 477098 - DNA, 25 bp, Homo sapien
cagtgcaagctgaccaaatcttttc

SEQ ID NO: 477099 - DNA, 25 bp, Homo sapien
cacaaggtcatttataatgctctcc

SEQ ID NO: 477100 - DNA, 25 bp, Homo sapien
tttgtgctcgccctgatcactaata

SEQ ID NO: 477101 - DNA, 25 bp, Homo sapien
taggagtgtcaggataaaatagatc

SEQ ID NO: 477102 - DNA, 25 bp, Homo sapien
ccaggtgcagtctgacagcccttag

SEQ ID NO: 477103 - DNA, 25 bp, Homo sapien
tggtagctcttcgtgtaggagtgtc

SEQ ID NO: 477104 - DNA, 25 bp, Homo sapien
tacttgaacgcggggaacctggtga

SEQ ID NO: 477105 - DNA, 25 bp, Homo sapien
tcaggatacttgaacgcggggaacc

SEQ ID NO: 477106 - DNA, 25 bp, Homo sapien
ttagtaacaatggacaaatgtttca

SEQ ID NO: 477107 - DNA, 25 bp, Homo sapien
atgtttcaggatacttgaacgcggg

SEQ ID NO: 477108 - DNA, 25 bp, Homo sapien
ctgtgtaagtaatagtaggtcttca

SEQ ID NO: 477109 - DNA, 25 bp, Homo sapien
cttcaataatgcttgttgttactga

SEQ ID NO: 477110 - DNA, 25 bp, Homo sapien
ttcaataatgcttgttgttactgac

SEQ ID NO: 477111 - DNA, 25 bp, Homo sapien
ctctgctgactagaaaggctcgatg

SEQ ID NO: 477112 - DNA, 25 bp, Homo sapien
cttttgcttctcaagattatctaaa

SEQ ID NO: 477113 - DNA, 25 bp, Homo sapien
tctgaatgtcattattccagctatc

SEQ ID NO: 477114 - DNA, 25 bp, Homo sapien
cgatgaatttcgaacttttgcttct

SEQ ID NO: 477115 - DNA, 25 bp, Homo sapien
tcctgaagggcagccggacagcttc

SEQ ID NO: 477116 - DNA, 25 bp, Homo sapien
tatgggaggaagagaatgatttgtt

SEQ ID NO: 477117 - DNA, 25 bp, Homo sapien
atatgggaggaagagaatgatttgt

SEQ ID NO: 477118 - DNA, 25 bp, Homo sapien
gcatcctgaagggcagccggacagc

SEQ ID NO: 477119 - DNA, 25 bp, Homo sapien
tcttggagactgatactgctttgca

SEQ ID NO: 477120 - DNA, 25 bp, Homo sapien
taaaccaactgaatgtgtggacttt

SEQ ID NO: 477121 - DNA, 25 bp, Homo sapien
gaaaagatttcagctacgtttctta

SEQ ID NO: 477122 - DNA, 25 bp, Homo sapien
ttgtcactacgttcacctgttgagc

SEQ ID NO: 477123 - DNA, 25 bp, Homo sapien
gatttgggctccagatgttgctgat

SEQ ID NO: 477124 - DNA, 25 bp, Homo sapien
cagatgttgctgatgcagttggatg

SEQ ID NO: 477125 - DNA, 25 bp, Homo sapien
gatggtcacccacagtcttatcacc

SEQ ID NO: 477126 - DNA, 25 bp, Homo sapien
gttggatggtcacccacagtcttat

SEQ ID NO: 477127 - DNA, 25 bp, Homo sapien
ggttcaaaatctgacacactcacga

SEQ ID NO: 477128 - DNA, 25 bp, Homo sapien
gatgaaggccaccacattagtgata

SEQ ID NO: 477129 - DNA, 25 bp, Homo sapien
tcccaagatctacagtcagcaggct

SEQ ID NO: 477130 - DNA, 25 bp, Homo sapien
tttgtgaactcagtaagtgccgtgc

SEQ ID NO: 477131 - DNA, 25 bp, Homo sapien
atttctcgagttgcccacgtgtcag

SEQ ID NO: 477132 - DNA, 25 bp, Homo sapien
tcaatgaatttctcgagttgcccac

SEQ ID NO: 477133 - DNA, 25 bp, Homo sapien
gcacataaagtcgttcatgatagaa

SEQ ID NO: 477134 - DNA, 25 bp, Homo sapien
aaggcacataaagtcgttcatgata

SEQ ID NO: 477135 - DNA, 25 bp, Homo sapien
gcagaagatgtagcaaagatttcat

SEQ ID NO: 477136 - DNA, 25 bp, Homo sapien
ttaaactgtcttgtgctactaccgc

SEQ ID NO: 477137 - DNA, 25 bp, Homo sapien
cacagaagcagtcgtgatgtgagcc

SEQ ID NO: 477138 - DNA, 25 bp, Homo sapien
gctcttcaagccacaaaagttttca

SEQ ID NO: 477139 - DNA, 25 bp, Homo sapien
tcagctagaaaccagcttctccagc

SEQ ID NO: 477140 - DNA, 25 bp, Homo sapien
aaatcatttccagttggaagaaggg

SEQ ID NO: 477141 - DNA, 25 bp, Homo sapien
tctcagctagaaaccagcttctcca

SEQ ID NO: 477142 - DNA, 25 bp, Homo sapien
ctgtaaaatcatttccagttggaag

SEQ ID NO: 477143 - DNA, 25 bp, Homo sapien
tgtacaagaaaccatccttcccagg

SEQ ID NO: 477144 - DNA, 25 bp, Homo sapien
ttaacaaatgggtaggctgccagga

SEQ ID NO: 477145 - DNA, 25 bp, Homo sapien
ttcccaggccatgttaacaaatggg

SEQ ID NO: 477146 - DNA, 25 bp, Homo sapien
gccatgttaacaaatgggtaggctg

SEQ ID NO: 477147 - DNA, 25 bp, Homo sapien
agggaaaaggcaacatccctcacag

SEQ ID NO: 477148 - DNA, 25 bp, Homo sapien
acagggaaaaggcaacatccctcac

SEQ ID NO: 477149 - DNA, 25 bp, Homo sapien
ggtaagggaacaatcagagttatag

SEQ ID NO: 477150 - DNA, 25 bp, Homo sapien
ttgggtaagggaacaatcagagtta

SEQ ID NO: 477151 - DNA, 25 bp, Homo sapien
gtaagggaacaatcagagttatagt

SEQ ID NO: 477152 - DNA, 25 bp, Homo sapien
gggtaagggaacaatcagagttata

SEQ ID NO: 477153 - DNA, 25 bp, Homo sapien
tgaaacacatagctaaaagtggcaa

SEQ ID NO: 477154 - DNA, 25 bp, Homo sapien
aaacacacagccgtaatgaaacaca

SEQ ID NO: 477155 - DNA, 25 bp, Homo sapien
ggttttacaacacaaggggcacaca

SEQ ID NO: 477156 - DNA, 25 bp, Homo sapien
gccgtaatgaaacacatagctaaaa

SEQ ID NO: 477157 - DNA, 25 bp, Homo sapien
tggccctggtcccttaattgataac

SEQ ID NO: 477158 - DNA, 25 bp, Homo sapien
ggtcccttaattgataacgctcctc

SEQ ID NO: 477159 - DNA, 25 bp, Homo sapien
cccttaattgataacgctcctccat

SEQ ID NO: 477160 - DNA, 25 bp, Homo sapien
cctggtcccttaattgataacgctc

SEQ ID NO: 477161 - DNA, 25 bp, Homo sapien
tttcaatgccccttcggtaatgtta

SEQ ID NO: 477162 - DNA, 25 bp, Homo sapien
tcaatgccccttcggtaatgttatt

SEQ ID NO: 477163 - DNA, 25 bp, Homo sapien
tctttcaatgccccttcggtaatgt

SEQ ID NO: 477164 - DNA, 25 bp, Homo sapien
tatctttcaatgccccttcggtaat

SEQ ID NO: 477165 - DNA, 25 bp, Homo sapien
tctttccacagccatttgtgctttc

SEQ ID NO: 477166 - DNA, 25 bp, Homo sapien
catgtcctctgctaaatcttcgtct

SEQ ID NO: 477167 - DNA, 25 bp, Homo sapien
cacagccatttgtgctttcctagct

SEQ ID NO: 477168 - DNA, 25 bp, Homo sapien
tcagagtcagtgaaaaaccctcctg

SEQ ID NO: 477169 - DNA, 25 bp, Homo sapien
cagtttatttcttgcacttcagctt

SEQ ID NO: 477170 - DNA, 25 bp, Homo sapien
gtttatttcttgcacttcagcttct

SEQ ID NO: 477171 - DNA, 25 bp, Homo sapien
cactctggcgttttcaactgcagaa

SEQ ID NO: 477172 - DNA, 25 bp, Homo sapien
cttttgtcactctggcgttttcaac

SEQ ID NO: 477173 - DNA, 25 bp, Homo sapien
taaaataagcgtagatgaggcccct

SEQ ID NO: 477174 - DNA, 25 bp, Homo sapien
gaagattaaaataagcgtagatgag

SEQ ID NO: 477175 - DNA, 25 bp, Homo sapien
tcaatttaatgcaatgagcccattg

SEQ ID NO: 477176 - DNA, 25 bp, Homo sapien
caatgagcccattgaatgtcaggcc

SEQ ID NO: 477177 - DNA, 25 bp, Homo sapien
gcatactcattatctctggaccaca

SEQ ID NO: 477178 - DNA, 25 bp, Homo sapien
taatttgtactaaagtgtgaaccat

SEQ ID NO: 477179 - DNA, 25 bp, Homo sapien
tctctggaccacaaactataatcca

SEQ ID NO: 477180 - DNA, 25 bp, Homo sapien
tgtgaaccatatgtcgtgcatactc

SEQ ID NO: 477181 - DNA, 25 bp, Homo sapien
ctttgcatggtagccaacactaagt

SEQ ID NO: 477182 - DNA, 25 bp, Homo sapien
tggtagccaacactaagtgtcctgt

SEQ ID NO: 477183 - DNA, 25 bp, Homo sapien
gcatggtagccaacactaagtgtcc

SEQ ID NO: 477184 - DNA, 25 bp, Homo sapien
tagccaacactaagtgtcctgttga

SEQ ID NO: 477185 - DNA, 25 bp, Homo sapien
agtagcattgtgagcatgtactgag

SEQ ID NO: 477186 - DNA, 25 bp, Homo sapien
gaagtagcattgtgagcatgtactg

SEQ ID NO: 477187 - DNA, 25 bp, Homo sapien
gagcatgtactgagagtgactgaag

SEQ ID NO: 477188 - DNA, 25 bp, Homo sapien
aagtagcattgtgagcatgtactga

SEQ ID NO: 477189 - DNA, 25 bp, Homo sapien
caaatgatctggtaagagctgaatg

SEQ ID NO: 477190 - DNA, 25 bp, Homo sapien
caatggctgaatgtagctgtggaaa

SEQ ID NO: 477191 - DNA, 25 bp, Homo sapien
caatcctacagaagacaatggctga

SEQ ID NO: 477192 - DNA, 25 bp, Homo sapien
gaataggagtaaggagagagcccca

SEQ ID NO: 477193 - DNA, 25 bp, Homo sapien
gccacctggagataaaactccccat

SEQ ID NO: 477194 - DNA, 25 bp, Homo sapien
ccttaggccacctggagataaaact

SEQ ID NO: 477195 - DNA, 25 bp, Homo sapien
taccaggtagtgccttaggccacct

SEQ ID NO: 477196 - DNA, 25 bp, Homo sapien
ggtagtgccttaggccacctggaga

SEQ ID NO: 477197 - DNA, 25 bp, Homo sapien
tattctcccccgactgttccagaaa

SEQ ID NO: 477198 - DNA, 25 bp, Homo sapien
ttattctcccccgactgttccagaa

SEQ ID NO: 477199 - DNA, 25 bp, Homo sapien
tcaacattcccaaagtccgtgacat

SEQ ID NO: 477200 - DNA, 25 bp, Homo sapien
ttccagaaacatcaacattcccaaa

SEQ ID NO: 477201 - DNA, 25 bp, Homo sapien
ccacaaaccacagaacactagcgac

SEQ ID NO: 477202 - DNA, 25 bp, Homo sapien
cacagaacactagcgaccaccagaa

SEQ ID NO: 477203 - DNA, 25 bp, Homo sapien
gcaagaccaagtgaagatggaggca

SEQ ID NO: 477204 - DNA, 25 bp, Homo sapien
agactggagctgtgctgccacaaac

SEQ ID NO: 477205 - DNA, 25 bp, Homo sapien
gaaggctctgtattctggtcaacta

SEQ ID NO: 477206 - DNA, 25 bp, Homo sapien
ctaaacctgttctgctgtggaggct

SEQ ID NO: 477207 - DNA, 25 bp, Homo sapien
tattccggagctgaactaaacctgt

SEQ ID NO: 477208 - DNA, 25 bp, Homo sapien
ggtcaactaccgctctattccggag

SEQ ID NO: 477209 - DNA, 25 bp, Homo sapien
gatatcatttactcggccataatcc

SEQ ID NO: 477210 - DNA, 25 bp, Homo sapien
atatcatttactcggccataatcca

SEQ ID NO: 477211 - DNA, 25 bp, Homo sapien
tatcatttactcggccataatccat

SEQ ID NO: 477212 - DNA, 25 bp, Homo sapien
cttgttgtacaacatattctgccaa

SEQ ID NO: 477213 - DNA, 25 bp, Homo sapien
ccaactggcaccaacaatagacggc

SEQ ID NO: 477214 - DNA, 25 bp, Homo sapien
actggcaccaacaatagacggcctt

SEQ ID NO: 477215 - DNA, 25 bp, Homo sapien
tggcaccaacaatagacggccttac

SEQ ID NO: 477216 - DNA, 25 bp, Homo sapien
caactggcaccaacaatagacggcc

SEQ ID NO: 477217 - DNA, 25 bp, Homo sapien
gacgcgcattgttcaaagaattcct

SEQ ID NO: 477218 - DNA, 25 bp, Homo sapien
gaataccaggctgccacaagactgt

SEQ ID NO: 477219 - DNA, 25 bp, Homo sapien
ccagtggaaatgattagtgctatct

SEQ ID NO: 477220 - DNA, 25 bp, Homo sapien
catggtattaaacttcaccccagtg

SEQ ID NO: 477221 - DNA, 25 bp, Homo sapien
cagcaatccagtaatgatataaaag

SEQ ID NO: 477222 - DNA, 25 bp, Homo sapien
tctgaaggcctgttcgagaggattc

SEQ ID NO: 477223 - DNA, 25 bp, Homo sapien
attggaggttagatttacattgggc

SEQ ID NO: 477224 - DNA, 25 bp, Homo sapien
ggccttatggcttacagcaatccag

SEQ ID NO: 477225 - DNA, 25 bp, Homo sapien
caagtaacatcacagctttgtgaag

SEQ ID NO: 477226 - DNA, 25 bp, Homo sapien
atcacagctttgtgaagatgaatta

SEQ ID NO: 477227 - DNA, 25 bp, Homo sapien
tcaagtaacatcacagctttgtgaa

SEQ ID NO: 477228 - DNA, 25 bp, Homo sapien
cagctttgtgaagatgaattattgt

SEQ ID NO: 477229 - DNA, 25 bp, Homo sapien
tgtaactgccgtacatcaatattga

SEQ ID NO: 477230 - DNA, 25 bp, Homo sapien
aatgtaactgccgtacatcaatatt

SEQ ID NO: 477231 - DNA, 25 bp, Homo sapien
gtaactgccgtacatcaatattgaa

SEQ ID NO: 477232 - DNA, 25 bp, Homo sapien
tccaaacccaagaattacttgtgaa

SEQ ID NO: 477233 - DNA, 25 bp, Homo sapien
atgtacttctcagttcccatgcagt

SEQ ID NO: 477234 - DNA, 25 bp, Homo sapien
tgtacttctcagttcccatgcagta

SEQ ID NO: 477235 - DNA, 25 bp, Homo sapien
catcttcaagcaaagagttgttctc

SEQ ID NO: 477236 - DNA, 25 bp, Homo sapien
ggcaattggaatttgcaggtaacat

SEQ ID NO: 477237 - DNA, 25 bp, Homo sapien
tatgacagctacttgttgagacctt

SEQ ID NO: 477238 - DNA, 25 bp, Homo sapien
ggacacttttatcttttaggcacaa

SEQ ID NO: 477239 - DNA, 25 bp, Homo sapien
tgcttacattaacccaagggaatat

SEQ ID NO: 477240 - DNA, 25 bp, Homo sapien
catacctttatttggttggctaatt

SEQ ID NO: 477241 - DNA, 25 bp, Homo sapien
aagggtattgttgtattacatacct

SEQ ID NO: 477242 - DNA, 25 bp, Homo sapien
cactactgttttactcagagttaca

SEQ ID NO: 477243 - DNA, 25 bp, Homo sapien
taatgggcttgaccagaaatactgc

SEQ ID NO: 477244 - DNA, 25 bp, Homo sapien
gtaatgggcttgaccagaaatactg

SEQ ID NO: 477245 - DNA, 25 bp, Homo sapien
gagagtgatgttactactggtgtga

SEQ ID NO: 477246 - DNA, 25 bp, Homo sapien
ctgttcctgggttgatgagagtgat

SEQ ID NO: 477247 - DNA, 25 bp, Homo sapien
actctccatttgctgcacaagccag

SEQ ID NO: 477248 - DNA, 25 bp, Homo sapien
tccatttgctgcacaagccagctgc

SEQ ID NO: 477249 - DNA, 25 bp, Homo sapien
tgctgcacaagccagctgcataggc

SEQ ID NO: 477250 - DNA, 25 bp, Homo sapien
gggaatggcaacactctccatttgc

SEQ ID NO: 477251 - DNA, 25 bp, Homo sapien
agggcacagcgtaagctgagattac

SEQ ID NO: 477252 - DNA, 25 bp, Homo sapien
gcagggcacagcgtaagctgagatt

SEQ ID NO: 477253 - DNA, 25 bp, Homo sapien
gagccacagggttctggaaaattta

SEQ ID NO: 477254 - DNA, 25 bp, Homo sapien
tgagccacagggttctggaaaattt

SEQ ID NO: 477255 - DNA, 25 bp, Homo sapien
caaagcagccacctgcgtacaaacc

SEQ ID NO: 477256 - DNA, 25 bp, Homo sapien
tggctcgaccgggtactgccaaatt

SEQ ID NO: 477257 - DNA, 25 bp, Homo sapien
tataacacggaaacagccaaagcag

SEQ ID NO: 477258 - DNA, 25 bp, Homo sapien
gatggtggccggttttggtccagga

SEQ ID NO: 477259 - DNA, 25 bp, Homo sapien
cctggcggctgcatagacgatggcc

SEQ ID NO: 477260 - DNA, 25 bp, Homo sapien
tggcggctgcatagacgatggccgc

SEQ ID NO: 477261 - DNA, 25 bp, Homo sapien
gggcccctggcggctgcatagacga

SEQ ID NO: 477262 - DNA, 25 bp, Homo sapien
ggcccctggcggctgcatagacgat

SEQ ID NO: 477263 - DNA, 25 bp, Homo sapien
catgccgcccaggaagctggtagag

SEQ ID NO: 477264 - DNA, 25 bp, Homo sapien
cccatgccgcccaggaagctggtag

SEQ ID NO: 477265 - DNA, 25 bp, Homo sapien
tggtagagcgggacacggagatccg

SEQ ID NO: 477266 - DNA, 25 bp, Homo sapien
gctggtagagcgggacacggagatc

SEQ ID NO: 477267 - DNA, 25 bp, Homo sapien
caaatcccccgccatcctcatggcc

SEQ ID NO: 477268 - DNA, 25 bp, Homo sapien
aaatcccccgccatcctcatggcca

SEQ ID NO: 477269 - DNA, 25 bp, Homo sapien
ccaaatcccccgccatcctcatggc

SEQ ID NO: 477270 - DNA, 25 bp, Homo sapien
cggattttgctcttcaggattttgc

SEQ ID NO: 477271 - DNA, 25 bp, Homo sapien
ttcagcttcgggttctcagtctcca

SEQ ID NO: 477272 - DNA, 25 bp, Homo sapien
aggattttgctcttcagcttcgggt

SEQ ID NO: 477273 - DNA, 25 bp, Homo sapien
cccggattttgctcttcaggatttt

SEQ ID NO: 477274 - DNA, 25 bp, Homo sapien
acctcagcagactgtgtgatgacca

SEQ ID NO: 477275 - DNA, 25 bp, Homo sapien
gctcatcgtattgggccgaatgtct

SEQ ID NO: 477276 - DNA, 25 bp, Homo sapien
gcgatttgggggcttctatctccat

SEQ ID NO: 477277 - DNA, 25 bp, Homo sapien
tgtctccctgctacagctgagtgac

SEQ ID NO: 477278 - DNA, 25 bp, Homo sapien
cagcaggatggcattgagctgcccc

SEQ ID NO: 477279 - DNA, 25 bp, Homo sapien
tgcagcaggatggcattgagctgcc

SEQ ID NO: 477280 - DNA, 25 bp, Homo sapien
gcaggatggcattgagctgccccat

SEQ ID NO: 477281 - DNA, 25 bp, Homo sapien
aggtgcagcaggatggcattgagct

SEQ ID NO: 477282 - DNA, 25 bp, Homo sapien
tcttcccgtcttccagtgggctgca

SEQ ID NO: 477283 - DNA, 25 bp, Homo sapien
tgattgaagttcttcccgtcttcca

SEQ ID NO: 477284 - DNA, 25 bp, Homo sapien
ttcttcccgtcttccagtgggctgc

SEQ ID NO: 477285 - DNA, 25 bp, Homo sapien
catcaccatgattgaagttcttccc

SEQ ID NO: 477286 - DNA, 25 bp, Homo sapien
caaagagttcattgtgttgtaaatg

SEQ ID NO: 477287 - DNA, 25 bp, Homo sapien
ctgtggtacactttccaattagact

SEQ ID NO: 477288 - DNA, 25 bp, Homo sapien
tttcaaagagttcattgtgttgtaa

SEQ ID NO: 477289 - DNA, 25 bp, Homo sapien
tagacttgtagttcctttcaaagag

SEQ ID NO: 477290 - DNA, 25 bp, Homo sapien
tcagctggctaattgctaccaaacc

SEQ ID NO: 477291 - DNA, 25 bp, Homo sapien
aagagcttttgattttagtcatgac

SEQ ID NO: 477292 - DNA, 25 bp, Homo sapien
tgtattgcctcattgggaggaaatg

SEQ ID NO: 477293 - DNA, 25 bp, Homo sapien
ctgaccctagtctttgtattgcctc

SEQ ID NO: 477294 - DNA, 25 bp, Homo sapien
gaaccatacattccaactgtctgaa

SEQ ID NO: 477295 - DNA, 25 bp, Homo sapien
tattccaacatagacagatgctgaa

SEQ ID NO: 477296 - DNA, 25 bp, Homo sapien
agagctttgcgctcacagccaaggg

SEQ ID NO: 477297 - DNA, 25 bp, Homo sapien
tcagtgccttagtcccagatttaga

SEQ ID NO: 477298 - DNA, 25 bp, Homo sapien
gaatggacttagaggtacggacaac

SEQ ID NO: 477299 - DNA, 25 bp, Homo sapien
ttgtactgcccagacagagtaggcc

SEQ ID NO: 477300 - DNA, 25 bp, Homo sapien
gaggttgccttcgttgccacggtgc

SEQ ID NO: 477301 - DNA, 25 bp, Homo sapien
gtaacagtctccagttgatctatgg

SEQ ID NO: 477302 - DNA, 25 bp, Homo sapien
cagtggtcaggagcgcttggtaggg

SEQ ID NO: 477303 - DNA, 25 bp, Homo sapien
ccccaaactcagattctgtctccat

SEQ ID NO: 477304 - DNA, 25 bp, Homo sapien
tccccaaactcagattctgtctcca

SEQ ID NO: 477305 - DNA, 25 bp, Homo sapien
ttccccaaactcagattctgtctcc

SEQ ID NO: 477306 - DNA, 25 bp, Homo sapien
actcatcctcttcagacaattcttc

SEQ ID NO: 477307 - DNA, 25 bp, Homo sapien
tcactcatcctcttcagacaattct

SEQ ID NO: 477308 - DNA, 25 bp, Homo sapien
tcatcctcttcagacaattcttcca

SEQ ID NO: 477309 - DNA, 25 bp, Homo sapien
catcctcttcagacaattcttccat

SEQ ID NO: 477310 - DNA, 25 bp, Homo sapien
tgggtcctttctgggctcatcacta

SEQ ID NO: 477311 - DNA, 25 bp, Homo sapien
gctgtgatcaggctaatgagtccct

SEQ ID NO: 477312 - DNA, 25 bp, Homo sapien
tgttctcaccacaaacaaggtatgt

SEQ ID NO: 477313 - DNA, 25 bp, Homo sapien
gcttggccttcccatgttgtgacca

SEQ ID NO: 477314 - DNA, 25 bp, Homo sapien
gcacacttctgtggacctttgtcca

SEQ ID NO: 477315 - DNA, 25 bp, Homo sapien
tgtaagttccgcaattgatataagc

SEQ ID NO: 477316 - DNA, 25 bp, Homo sapien
tgtagccatctcagtaatgctgttt

SEQ ID NO: 477317 - DNA, 25 bp, Homo sapien
tatggcaactttcagtagctagtga

SEQ ID NO: 477318 - DNA, 25 bp, Homo sapien
tgctgctcacataataagcctagag

SEQ ID NO: 477319 - DNA, 25 bp, Homo sapien
ttatatggaagtcccttgctggtgc

SEQ ID NO: 477320 - DNA, 25 bp, Homo sapien
cagcacaggtattactgggctaaca

SEQ ID NO: 477321 - DNA, 25 bp, Homo sapien
caagccctatttttgagtactagtc

SEQ ID NO: 477322 - DNA, 25 bp, Homo sapien
ttccatgaagcattatgttatttac

SEQ ID NO: 477323 - DNA, 25 bp, Homo sapien
tccatgaagcattatgttatttact

SEQ ID NO: 477324 - DNA, 25 bp, Homo sapien
tgaacagcaacccagacaccatcgg

SEQ ID NO: 477325 - DNA, 25 bp, Homo sapien
tgaaacgtggagtttgaacagcaac

SEQ ID NO: 477326 - DNA, 25 bp, Homo sapien
gtttgaacagcaacccagacaccat

SEQ ID NO: 477327 - DNA, 25 bp, Homo sapien
gagtttgaacagcaacccagacacc

SEQ ID NO: 477328 - DNA, 25 bp, Homo sapien
tccatacactgttttatcgagttag

SEQ ID NO: 477329 - DNA, 25 bp, Homo sapien
catacactgttttatcgagttagct

SEQ ID NO: 477330 - DNA, 25 bp, Homo sapien
tggaaacttcctaattccatacact

SEQ ID NO: 477331 - DNA, 25 bp, Homo sapien
ttcttggaaacttcctaattccata

SEQ ID NO: 477332 - DNA, 25 bp, Homo sapien
ttatttctaggagaattgagatttc

SEQ ID NO: 477333 - DNA, 25 bp, Homo sapien
tataagtattagaacttctgttggt

SEQ ID NO: 477334 - DNA, 25 bp, Homo sapien
tttcctgtgtttcagtataagtatt

SEQ ID NO: 477335 - DNA, 25 bp, Homo sapien
tatttctaggagaattgagatttca

SEQ ID NO: 477336 - DNA, 25 bp, Homo sapien
gaactttgaaagtcttgtcactggg

SEQ ID NO: 477337 - DNA, 25 bp, Homo sapien
atgagctcaggcagctctattggca

SEQ ID NO: 477338 - DNA, 25 bp, Homo sapien
cagctctattggcattagtctctct

SEQ ID NO: 477339 - DNA, 25 bp, Homo sapien
gtcactggggtagaatcattctctg

SEQ ID NO: 477340 - DNA, 25 bp, Homo sapien
ataatagttacccaactctgagctc

SEQ ID NO: 477341 - DNA, 25 bp, Homo sapien
ttaaatttatgccagtgcataatag

SEQ ID NO: 477342 - DNA, 25 bp, Homo sapien
ccagtgcataatagttacccaactc

SEQ ID NO: 477343 - DNA, 25 bp, Homo sapien
tgcataatagttacccaactctgag

SEQ ID NO: 477344 - DNA, 25 bp, Homo sapien
tacaaagagccctagtggaacatac

SEQ ID NO: 477345 - DNA, 25 bp, Homo sapien
tctagtgcctatcgcagacccaggt

SEQ ID NO: 477346 - DNA, 25 bp, Homo sapien
tatttcgcgatgctaccttctagtg

SEQ ID NO: 477347 - DNA, 25 bp, Homo sapien
gagtgcttagggtaggcttccacag

SEQ ID NO: 477348 - DNA, 25 bp, Homo sapien
ttaatatatgctaaaatcttgatca

SEQ ID NO: 477349 - DNA, 25 bp, Homo sapien
taatatatgctaaaatcttgatcat

SEQ ID NO: 477350 - DNA, 25 bp, Homo sapien
tttatgccgaatttgttcctttctg

SEQ ID NO: 477351 - DNA, 25 bp, Homo sapien
catcgatgagcttggattccgtatc

SEQ ID NO: 477352 - DNA, 25 bp, Homo sapien
tgagcttggattccgtatctttttt

SEQ ID NO: 477353 - DNA, 25 bp, Homo sapien
tcgatgagcttggattccgtatctt

SEQ ID NO: 477354 - DNA, 25 bp, Homo sapien
agcagctgagacacacgctgagctt

SEQ ID NO: 477355 - DNA, 25 bp, Homo sapien
agctgagacacacgctgagcttctt

SEQ ID NO: 477356 - DNA, 25 bp, Homo sapien
gctgagcttcttgagtttatcaggt

SEQ ID NO: 477357 - DNA, 25 bp, Homo sapien
gagtttatcaggtattgttttcttc

SEQ ID NO: 477358 - DNA, 25 bp, Homo sapien
tcagagtctaacatgcagtcttgtc

SEQ ID NO: 477359 - DNA, 25 bp, Homo sapien
tatgactgaattgaccagaagccat

SEQ ID NO: 477360 - DNA, 25 bp, Homo sapien
ccagccaggaatacatcttatgact

SEQ ID NO: 477361 - DNA, 25 bp, Homo sapien
taacttcagagtctaacatgcagtc

SEQ ID NO: 477362 - DNA, 25 bp, Homo sapien
tcttggaagtcacagtaagctcctc

SEQ ID NO: 477363 - DNA, 25 bp, Homo sapien
gagaagtgcttcatgccacaacatc

SEQ ID NO: 477364 - DNA, 25 bp, Homo sapien
cagtaagctcctcttgcctgtagga

SEQ ID NO: 477365 - DNA, 25 bp, Homo sapien
tgctttcggtggagggactacttga

SEQ ID NO: 477366 - DNA, 25 bp, Homo sapien
tgctgctgtactgtccaaactcctc

SEQ ID NO: 477367 - DNA, 25 bp, Homo sapien
gctgctgtactgtccaaactcctca

SEQ ID NO: 477368 - DNA, 25 bp, Homo sapien
ctgctgctgtactgtccaaactcct

SEQ ID NO: 477369 - DNA, 25 bp, Homo sapien
tggcacccctccactaacaatttgg

SEQ ID NO: 477370 - DNA, 25 bp, Homo sapien
ttgatggcaagcttacaagtgaggg

SEQ ID NO: 477371 - DNA, 25 bp, Homo sapien
tgaatctgctttcactccctggcac

SEQ ID NO: 477372 - DNA, 25 bp, Homo sapien
ggcaccataactgtgtttgctgaat

SEQ ID NO: 477373 - DNA, 25 bp, Homo sapien
tctaaacttggttgactgcatttcc

SEQ ID NO: 477374 - DNA, 25 bp, Homo sapien
taatatctaaacttggttgactgca

SEQ ID NO: 477375 - DNA, 25 bp, Homo sapien
ctaaacttggttgactgcatttcca

SEQ ID NO: 477376 - DNA, 25 bp, Homo sapien
tatctaaacttggttgactgcattt

SEQ ID NO: 477377 - DNA, 25 bp, Homo sapien
tcaaggtagtaatctttctccataa

SEQ ID NO: 477378 - DNA, 25 bp, Homo sapien
ttcaaggtagtaatctttctccata

SEQ ID NO: 477379 - DNA, 25 bp, Homo sapien
tttcaaggtagtaatctttctccat

SEQ ID NO: 477380 - DNA, 25 bp, Homo sapien
atttcgagtttgttatccaattccg

SEQ ID NO: 477381 - DNA, 25 bp, Homo sapien
caaactatttcgagtttgttatcca

SEQ ID NO: 477382 - DNA, 25 bp, Homo sapien
cgagtttgttatccaattccgtttg

SEQ ID NO: 477383 - DNA, 25 bp, Homo sapien
tttgttatccaattccgtttggtca

SEQ ID NO: 477384 - DNA, 25 bp, Homo sapien
tcattcttgcaaaatggcttttaca

SEQ ID NO: 477385 - DNA, 25 bp, Homo sapien
ggcttttacatctctaagcattata

SEQ ID NO: 477386 - DNA, 25 bp, Homo sapien
tacatctctaagcattatacgtgtg

SEQ ID NO: 477387 - DNA, 25 bp, Homo sapien
agcactcattctcattcttgcaaaa

SEQ ID NO: 477388 - DNA, 25 bp, Homo sapien
tcccttttctagtcttcacctcatt

SEQ ID NO: 477389 - DNA, 25 bp, Homo sapien
ttcccttttctagtcttcacctcat

SEQ ID NO: 477390 - DNA, 25 bp, Homo sapien
tttcccttttctagtcttcacctca

SEQ ID NO: 477391 - DNA, 25 bp, Homo sapien
ctcttcaacaaagacaattttccct

SEQ ID NO: 477392 - DNA, 25 bp, Homo sapien
taaaaactcgaactgtgtctcaggc

SEQ ID NO: 477393 - DNA, 25 bp, Homo sapien
tacaggaggagtgcaaatcagccat

SEQ ID NO: 477394 - DNA, 25 bp, Homo sapien
tgtgctcccacggacttacaggtgc

SEQ ID NO: 477395 - DNA, 25 bp, Homo sapien
tagcctacgctcattatcctctgga

SEQ ID NO: 477396 - DNA, 25 bp, Homo sapien
gatccttaggtaataagatgctaag

SEQ ID NO: 477397 - DNA, 25 bp, Homo sapien
ttgacactacttatcttgttgaaga

SEQ ID NO: 477398 - DNA, 25 bp, Homo sapien
ggtaataagatgctaagcgagtggc

SEQ ID NO: 477399 - DNA, 25 bp, Homo sapien
ttaacattataccatttatccactt

SEQ ID NO: 477400 - DNA, 25 bp, Homo sapien
tctctgggttattcataacagtggc

SEQ ID NO: 477401 - DNA, 25 bp, Homo sapien
taacagtggcatatattccacgctg

SEQ ID NO: 477402 - DNA, 25 bp, Homo sapien
aacttccttggatcattaaacgtgg

SEQ ID NO: 477403 - DNA, 25 bp, Homo sapien
tccacgctgtctatgatgttttaac

SEQ ID NO: 477404 - DNA, 25 bp, Homo sapien
taattctgaaatccagtaagatctg

SEQ ID NO: 477405 - DNA, 25 bp, Homo sapien
ccttaacttgacacaaatatgaatc

SEQ ID NO: 477406 - DNA, 25 bp, Homo sapien
ctgaaatccagtaagatctgaagtc

SEQ ID NO: 477407 - DNA, 25 bp, Homo sapien
gtccaatgaagccttaacttgacac

SEQ ID NO: 477408 - DNA, 25 bp, Homo sapien
tacttttgtatacacagtctcaggt

SEQ ID NO: 477409 - DNA, 25 bp, Homo sapien
ctcaggttcagaggcaccactgact

SEQ ID NO: 477410 - DNA, 25 bp, Homo sapien
ctctacttttgtatacacagtctca

SEQ ID NO: 477411 - DNA, 25 bp, Homo sapien
gactgtgctcctcatgttctgatga

SEQ ID NO: 477412 - DNA, 25 bp, Homo sapien
gctgcgtctgtgcaactgacttcat

SEQ ID NO: 477413 - DNA, 25 bp, Homo sapien
ggctgtgagtccactgtataccagg

SEQ ID NO: 477414 - DNA, 25 bp, Homo sapien
aagaggctgtgagtccactgtatac

SEQ ID NO: 477415 - DNA, 25 bp, Homo sapien
cacgggtgttctgggaaattattag

SEQ ID NO: 477416 - DNA, 25 bp, Homo sapien
tgtttgacaattgaaagtggagccc

SEQ ID NO: 477417 - DNA, 25 bp, Homo sapien
tttgacaattgaaagtggagcccac

SEQ ID NO: 477418 - DNA, 25 bp, Homo sapien
tgacaattgaaagtggagcccactc

SEQ ID NO: 477419 - DNA, 25 bp, Homo sapien
attgtttgacaattgaaagtggagc

SEQ ID NO: 477420 - DNA, 25 bp, Homo sapien
tttcttgtccacttcatccacatcg

SEQ ID NO: 477421 - DNA, 25 bp, Homo sapien
ttccaagcaggagggtcgtggataa

SEQ ID NO: 477422 - DNA, 25 bp, Homo sapien
gcttttcttgtccacttcatccaca

SEQ ID NO: 477423 - DNA, 25 bp, Homo sapien
gcaggagggtcgtggataaaaacac

SEQ ID NO: 477424 - DNA, 25 bp, Homo sapien
gaacatgtgctatgcagcagttcta

SEQ ID NO: 477425 - DNA, 25 bp, Homo sapien
aataaatgagcagcaaagtaaatgc

SEQ ID NO: 477426 - DNA, 25 bp, Homo sapien
gagtcattgtgtagcttctaacttg

SEQ ID NO: 477427 - DNA, 25 bp, Homo sapien
tcttgacttacataagccatatgaa

SEQ ID NO: 477428 - DNA, 25 bp, Homo sapien
tcagccccagtgtggagggtgaggt

SEQ ID NO: 477429 - DNA, 25 bp, Homo sapien
cagccccagtgtggagggtgaggtc

SEQ ID NO: 477430 - DNA, 25 bp, Homo sapien
gttttaactgttaggatttcagcca

SEQ ID NO: 477431 - DNA, 25 bp, Homo sapien
tgttggaagggcacagttttaactg

SEQ ID NO: 477432 - DNA, 25 bp, Homo sapien
cacagttttaactgttaggatttca

SEQ ID NO: 477433 - DNA, 25 bp, Homo sapien
agacttgttggaagggcacagtttt

SEQ ID NO: 477434 - DNA, 25 bp, Homo sapien
tctttatttgaaccctataccaata

SEQ ID NO: 477435 - DNA, 25 bp, Homo sapien
cctataccaatatctgttgatcaat

SEQ ID NO: 477436 - DNA, 25 bp, Homo sapien
gaaccctataccaatatctgttgat

SEQ ID NO: 477437 - DNA, 25 bp, Homo sapien
atttgaaccctataccaatatctgt

SEQ ID NO: 477438 - DNA, 25 bp, Homo sapien
ttataatttgaacaccatcatggcc

SEQ ID NO: 477439 - DNA, 25 bp, Homo sapien
ggagaactgtcaacatgaatccttg

SEQ ID NO: 477440 - DNA, 25 bp, Homo sapien
catcatggccattcccaatgggaga

SEQ ID NO: 477441 - DNA, 25 bp, Homo sapien
aatccttgataagaacatgaggact

SEQ ID NO: 477442 - DNA, 25 bp, Homo sapien
taacacgtctacattcatcagtcct

SEQ ID NO: 477443 - DNA, 25 bp, Homo sapien
tcaggatccatctttaggtggtaac

SEQ ID NO: 477444 - DNA, 25 bp, Homo sapien
taacggctaccttattataccagag

SEQ ID NO: 477445 - DNA, 25 bp, Homo sapien
agtcctctgctatatataacggcta

SEQ ID NO: 477446 - DNA, 25 bp, Homo sapien
gcagtgggtgtgaccattagcttcc

SEQ ID NO: 477447 - DNA, 25 bp, Homo sapien
caggcctttgagcaccattatttcc

SEQ ID NO: 477448 - DNA, 25 bp, Homo sapien
ttcaggcctttgagcaccattattt

SEQ ID NO: 477449 - DNA, 25 bp, Homo sapien
aggcctttgagcaccattatttccc

SEQ ID NO: 477450 - DNA, 25 bp, Homo sapien
cgtgcatgctcaagacagccagttg

SEQ ID NO: 477451 - DNA, 25 bp, Homo sapien
ccttgatcgcaccagaacaggtagt

SEQ ID NO: 477452 - DNA, 25 bp, Homo sapien
ttccctgcattagaacccgagcctt

SEQ ID NO: 477453 - DNA, 25 bp, Homo sapien
aacaggtagtggaccgaccacacca

SEQ ID NO: 477454 - DNA, 25 bp, Homo sapien
gccctgccgaccacgaattacattg

SEQ ID NO: 477455 - DNA, 25 bp, Homo sapien
gcaaatcactgctctaggctaattt

SEQ ID NO: 477456 - DNA, 25 bp, Homo sapien
tgaaaacattgtgccctgccgacca

SEQ ID NO: 477457 - DNA, 25 bp, Homo sapien
acaggtgcaaatcactgctctaggc

SEQ ID NO: 477458 - DNA, 25 bp, Homo sapien
actgaagtatgaccgcttctctgaa

SEQ ID NO: 477459 - DNA, 25 bp, Homo sapien
ctggactggtggctttgcatgtata

SEQ ID NO: 477460 - DNA, 25 bp, Homo sapien
tcaactgaagtatgaccgcttctct

SEQ ID NO: 477461 - DNA, 25 bp, Homo sapien
tatttctcgttttccttgacactgg

SEQ ID NO: 477462 - DNA, 25 bp, Homo sapien
taggcagccccagttttgttttgct

SEQ ID NO: 477463 - DNA, 25 bp, Homo sapien
ctggtgtgctgttctcgacatacta

SEQ ID NO: 477464 - DNA, 25 bp, Homo sapien
actgtcttctactaggcagccccag

SEQ ID NO: 477465 - DNA, 25 bp, Homo sapien
catactacctcaggttttggcaaat

SEQ ID NO: 477466 - DNA, 25 bp, Homo sapien
aaaaggattgtggtgtcatggaaga

SEQ ID NO: 477467 - DNA, 25 bp, Homo sapien
aaggattgtggtgtcatggaagaga

SEQ ID NO: 477468 - DNA, 25 bp, Homo sapien
aaaggattgtggtgtcatggaagag

SEQ ID NO: 477469 - DNA, 25 bp, Homo sapien
ggattgtggtgtcatggaagagaga

SEQ ID NO: 477470 - DNA, 25 bp, Homo sapien
acatctccctgaaagtggagtctat

SEQ ID NO: 477471 - DNA, 25 bp, Homo sapien
cctggctacttagttttggtacact

SEQ ID NO: 477472 - DNA, 25 bp, Homo sapien
caaatgacatgatataccggaaaga

SEQ ID NO: 477473 - DNA, 25 bp, Homo sapien
tatcacactggtcataaacatcaaa

SEQ ID NO: 477474 - DNA, 25 bp, Homo sapien
tacagaaatattagaggagtctctg

SEQ ID NO: 477475 - DNA, 25 bp, Homo sapien
catacagaaatattagaggagtctc

SEQ ID NO: 477476 - DNA, 25 bp, Homo sapien
cagaaatattagaggagtctctggt

SEQ ID NO: 477477 - DNA, 25 bp, Homo sapien
ttccatacagaaatattagaggagt

SEQ ID NO: 477478 - DNA, 25 bp, Homo sapien
tagagttcagtgttctgctgcctgg

SEQ ID NO: 477479 - DNA, 25 bp, Homo sapien
cagttggtaagtagacttctgcaga

SEQ ID NO: 477480 - DNA, 25 bp, Homo sapien
tgcactgagatgtacttatggagga

SEQ ID NO: 477481 - DNA, 25 bp, Homo sapien
taaggtgaaaggatgcaaaggtgtt

SEQ ID NO: 477482 - DNA, 25 bp, Homo sapien
agtgcttcattcattgcatagaagg

SEQ ID NO: 477483 - DNA, 25 bp, Homo sapien
gtgcttcattcattgcatagaaggg

SEQ ID NO: 477484 - DNA, 25 bp, Homo sapien
gaatgataaaggcttcactaaagta

SEQ ID NO: 477485 - DNA, 25 bp, Homo sapien
aaggcttcactaaagtagactttca

SEQ ID NO: 477486 - DNA, 25 bp, Homo sapien
tattttttaggatacagtgcgatgc

SEQ ID NO: 477487 - DNA, 25 bp, Homo sapien
gggtgcacccaaatagcactgatta

SEQ ID NO: 477488 - DNA, 25 bp, Homo sapien
tagtaaatgggaagcctaccactgc

SEQ ID NO: 477489 - DNA, 25 bp, Homo sapien
ttcaaaggagatttcacgccccatg

SEQ ID NO: 477490 - DNA, 25 bp, Homo sapien
ctctttctgtcaaagatcttcctac

SEQ ID NO: 477491 - DNA, 25 bp, Homo sapien
ctttctgtcaaagatcttcctactt

SEQ ID NO: 477492 - DNA, 25 bp, Homo sapien
tctgtcaaagatcttcctactttta

SEQ ID NO: 477493 - DNA, 25 bp, Homo sapien
tttctgtcaaagatcttcctacttt

SEQ ID NO: 477494 - DNA, 25 bp, Homo sapien
tagtgcagagtgtcttgacccagca

SEQ ID NO: 477495 - DNA, 25 bp, Homo sapien
gagccttggtaccagtctccatatc

SEQ ID NO: 477496 - DNA, 25 bp, Homo sapien
aattatcacagggagttgaaaccac

SEQ ID NO: 477497 - DNA, 25 bp, Homo sapien
gaagagtggcagtacctgcagcaag

SEQ ID NO: 477498 - DNA, 25 bp, Homo sapien
cagggtctctgaatagactgaagag

SEQ ID NO: 477499 - DNA, 25 bp, Homo sapien
agctcgttgactccccacagctcgt

SEQ ID NO: 477500 - DNA, 25 bp, Homo sapien
gctcgttgactccatattccagggt

SEQ ID NO: 477501 - DNA, 25 bp, Homo sapien
gataatcttcattcatcagttgtcc

SEQ ID NO: 477502 - DNA, 25 bp, Homo sapien
tcttggcgaggtatgttcacattca

SEQ ID NO: 477503 - DNA, 25 bp, Homo sapien
tgtgggatatgcttgcacattgagg

SEQ ID NO: 477504 - DNA, 25 bp, Homo sapien
tcgacggatgccttcataacgtgca

SEQ ID NO: 477505 - DNA, 25 bp, Homo sapien
tttgcagatactcacacttcgattg

SEQ ID NO: 477506 - DNA, 25 bp, Homo sapien
gctagcttcttccagtaagagagct

SEQ ID NO: 477507 - DNA, 25 bp, Homo sapien
ggcgcattagtttccatcaatccga

SEQ ID NO: 477508 - DNA, 25 bp, Homo sapien
agagagctggcgcattagtttccat

SEQ ID NO: 477509 - DNA, 25 bp, Homo sapien
tcaatccgactcctgtgtctaccat

SEQ ID NO: 477510 - DNA, 25 bp, Homo sapien
tccataactgatagagttgactttg

SEQ ID NO: 477511 - DNA, 25 bp, Homo sapien
aactgatagagttgactttgcttct

SEQ ID NO: 477512 - DNA, 25 bp, Homo sapien
cttccataactgatagagttgactt

SEQ ID NO: 477513 - DNA, 25 bp, Homo sapien
cataactgatagagttgactttgct

SEQ ID NO: 477514 - DNA, 25 bp, Homo sapien
cttgataaatcttagaggataaggt

SEQ ID NO: 477515 - DNA, 25 bp, Homo sapien
tttcttgataaatcttagaggataa

SEQ ID NO: 477516 - DNA, 25 bp, Homo sapien
tgataaatcttagaggataaggtgg

SEQ ID NO: 477517 - DNA, 25 bp, Homo sapien
tcttgataaatcttagaggataagg

SEQ ID NO: 477518 - DNA, 25 bp, Homo sapien
tactgtgattcagagagctgagatt

SEQ ID NO: 477519 - DNA, 25 bp, Homo sapien
tgattcagagagctgagatttggac

SEQ ID NO: 477520 - DNA, 25 bp, Homo sapien
gattcagagagctgagatttggact

SEQ ID NO: 477521 - DNA, 25 bp, Homo sapien
ctcagtactgtgattcagagagctg

SEQ ID NO: 477522 - DNA, 25 bp, Homo sapien
gagctgtagggtaggcaagagcctc

SEQ ID NO: 477523 - DNA, 25 bp, Homo sapien
ggccacaattctcaggggtccagtt

SEQ ID NO: 477524 - DNA, 25 bp, Homo sapien
atgttcttgctagcttttccatctt

SEQ ID NO: 477525 - DNA, 25 bp, Homo sapien
ccctgcttgaggcatacccgcatgt

SEQ ID NO: 477526 - DNA, 25 bp, Homo sapien
tgcagtgttgcgatctctgcagtct

SEQ ID NO: 477527 - DNA, 25 bp, Homo sapien
cagtgttgcgatctctgcagtctct

SEQ ID NO: 477528 - DNA, 25 bp, Homo sapien
caggctcctgggtagctgaaattac

SEQ ID NO: 477529 - DNA, 25 bp, Homo sapien
gtgttgcgatctctgcagtctctgc

SEQ ID NO: 477530 - DNA, 25 bp, Homo sapien
caatcacaagttatgaacatgggaa

SEQ ID NO: 477531 - DNA, 25 bp, Homo sapien
atcacaagttatgaacatgggaaat

SEQ ID NO: 477532 - DNA, 25 bp, Homo sapien
agttatgaacatgggaaatgtgtca

SEQ ID NO: 477533 - DNA, 25 bp, Homo sapien
aagttatgaacatgggaaatgtgtc

SEQ ID NO: 477534 - DNA, 25 bp, Homo sapien
tgttggtgcctctcataaaactccg

SEQ ID NO: 477535 - DNA, 25 bp, Homo sapien
ggcattgggcacataacttatctag

SEQ ID NO: 477536 - DNA, 25 bp, Homo sapien
ggacatgtaccttttgctcaagagc

SEQ ID NO: 477537 - DNA, 25 bp, Homo sapien
agggtctctcgcaatctgattctag

SEQ ID NO: 477538 - DNA, 25 bp, Homo sapien
gaaagaggcctaattgttcaccaga

SEQ ID NO: 477539 - DNA, 25 bp, Homo sapien
caaagagtagaccaaacagacttgt

SEQ ID NO: 477540 - DNA, 25 bp, Homo sapien
taaattgcattatgttacaggaccc

SEQ ID NO: 477541 - DNA, 25 bp, Homo sapien
tcttccagctaattactccaggcca

SEQ ID NO: 477542 - DNA, 25 bp, Homo sapien
gcacttaattcctcatagagaagga

SEQ ID NO: 477543 - DNA, 25 bp, Homo sapien
acaaggctgccaaggattttgccag

SEQ ID NO: 477544 - DNA, 25 bp, Homo sapien
tggtttctaacctctcatgagcact

SEQ ID NO: 477545 - DNA, 25 bp, Homo sapien
aggaaatagtcatgctgtagaatcc

SEQ ID NO: 477546 - DNA, 25 bp, Homo sapien
tctccaatattatggctccttaggg

SEQ ID NO: 477547 - DNA, 25 bp, Homo sapien
cttctctccaatattatggctcctt

SEQ ID NO: 477548 - DNA, 25 bp, Homo sapien
tagctctccagtttggtgagactgc

SEQ ID NO: 477549 - DNA, 25 bp, Homo sapien
ggttggactccaagttttagctctc

SEQ ID NO: 477550 - DNA, 25 bp, Homo sapien
tggcaaatctttgtaagttccccat

SEQ ID NO: 477551 - DNA, 25 bp, Homo sapien
tttcagagggcttgcagacttctgc

SEQ ID NO: 477552 - DNA, 25 bp, Homo sapien
ttgtggcaaatctttgtaagttccc

SEQ ID NO: 477553 - DNA, 25 bp, Homo sapien
ttctgttgggtttcagagggcttgc

SEQ ID NO: 477554 - DNA, 25 bp, Homo sapien
caccatctgggtatgacacagggaa

SEQ ID NO: 477555 - DNA, 25 bp, Homo sapien
gcaccatctgggtatgacacaggga

SEQ ID NO: 477556 - DNA, 25 bp, Homo sapien
agggcaccatctgggtatgacacag

SEQ ID NO: 477557 - DNA, 25 bp, Homo sapien
ggcaccatctgggtatgacacaggg

SEQ ID NO: 477558 - DNA, 25 bp, Homo sapien
ctaattgtccggtagaactgccaat

SEQ ID NO: 477559 - DNA, 25 bp, Homo sapien
aggcagctgtaaggcccccaaatgg

SEQ ID NO: 477560 - DNA, 25 bp, Homo sapien
ccccaaatggcatactgtcatttct

SEQ ID NO: 477561 - DNA, 25 bp, Homo sapien
ctgacataaatgtaagttctgccac

SEQ ID NO: 477562 - DNA, 25 bp, Homo sapien
ctgtcatttctagctgacataaatg

SEQ ID NO: 477563 - DNA, 25 bp, Homo sapien
ctgacgttgcgttgtccatggtcac

SEQ ID NO: 477564 - DNA, 25 bp, Homo sapien
tgacgttgcgttgtccatggtcacc

SEQ ID NO: 477565 - DNA, 25 bp, Homo sapien
gacgttgcgttgtccatggtcaccg

SEQ ID NO: 477566 - DNA, 25 bp, Homo sapien
ctcgccgtttccccgtgggagtctg

SEQ ID NO: 477567 - DNA, 25 bp, Homo sapien
gggaccaccaatgccgggctcgccg

SEQ ID NO: 477568 - DNA, 25 bp, Homo sapien
tgagctgggtgagatccggccagcg

SEQ ID NO: 477569 - DNA, 25 bp, Homo sapien
cagttgtgaacgcagattgtccgtt

SEQ ID NO: 477570 - DNA, 25 bp, Homo sapien
tatgccatatgaaagacagatcctc

SEQ ID NO: 477571 - DNA, 25 bp, Homo sapien
ttctgtcttcgaggcactgaagggc

SEQ ID NO: 477572 - DNA, 25 bp, Homo sapien
cacacaaacagcttcgggtagaggt

SEQ ID NO: 477573 - DNA, 25 bp, Homo sapien
tctacagaaaagagggcaatcttgc

SEQ ID NO: 477574 - DNA, 25 bp, Homo sapien
gactcctccgaccataagtgttatg

SEQ ID NO: 477575 - DNA, 25 bp, Homo sapien
aagtgttatggaatcaggttccctc

SEQ ID NO: 477576 - DNA, 25 bp, Homo sapien
agaggtgactcctccgaccataagt

SEQ ID NO: 477577 - DNA, 25 bp, Homo sapien
caatgggggattctttttggtgatg

SEQ ID NO: 477578 - DNA, 25 bp, Homo sapien
tcagtaaccttacagcagctggaga

SEQ ID NO: 477579 - DNA, 25 bp, Homo sapien
taatctctaaggtaaggcagttctc

SEQ ID NO: 477580 - DNA, 25 bp, Homo sapien
tcagaggcaaactcggaaactcact

SEQ ID NO: 477581 - DNA, 25 bp, Homo sapien
gagagagcccacaacacctgaattg

SEQ ID NO: 477582 - DNA, 25 bp, Homo sapien
agcatcttcaaagatgaagtattgg

SEQ ID NO: 477583 - DNA, 25 bp, Homo sapien
tgaagtattggattttaaatcccca

SEQ ID NO: 477584 - DNA, 25 bp, Homo sapien
gatgaagtattggattttaaatccc

SEQ ID NO: 477585 - DNA, 25 bp, Homo sapien
ttttaaatccccaaactgctgaatc

SEQ ID NO: 477586 - DNA, 25 bp, Homo sapien
tggctctccacttcgtatgaattcc

SEQ ID NO: 477587 - DNA, 25 bp, Homo sapien
tatgaattccgctaggaatatttca

SEQ ID NO: 477588 - DNA, 25 bp, Homo sapien
agccccttgacgctgagagtccctc

SEQ ID NO: 477589 - DNA, 25 bp, Homo sapien
cacttcgtatgaattccgctaggaa

SEQ ID NO: 477590 - DNA, 25 bp, Homo sapien
ttaggaaacttgtcaatcacagtca

SEQ ID NO: 477591 - DNA, 25 bp, Homo sapien
ggtttaggaaacttgtcaatcacag

SEQ ID NO: 477592 - DNA, 25 bp, Homo sapien
agtggtttaggaaacttgtcaatca

SEQ ID NO: 477593 - DNA, 25 bp, Homo sapien
tttaggaaacttgtcaatcacagtc

SEQ ID NO: 477594 - DNA, 25 bp, Homo sapien
gaagaaccgctttgaacactacaaa

SEQ ID NO: 477595 - DNA, 25 bp, Homo sapien
tcttttagttagcaccttgaatatt

SEQ ID NO: 477596 - DNA, 25 bp, Homo sapien
tagttcttttagttagcaccttgaa

SEQ ID NO: 477597 - DNA, 25 bp, Homo sapien
tcttgctctcaaatgaagaaccgct

SEQ ID NO: 477598 - DNA, 25 bp, Homo sapien
gaacttcccaattcatggtctgtga

SEQ ID NO: 477599 - DNA, 25 bp, Homo sapien
aacaccctcgccatgatttctgcaa

SEQ ID NO: 477600 - DNA, 25 bp, Homo sapien
tatcttccagcttacttcttcacgg

SEQ ID NO: 477601 - DNA, 25 bp, Homo sapien
gagtatagtttcttcgaacttccca

SEQ ID NO: 477602 - DNA, 25 bp, Homo sapien
gggcactgagttgtaagcaaaactg

SEQ ID NO: 477603 - DNA, 25 bp, Homo sapien
ctaggacaggaattggtaagggctt

SEQ ID NO: 477604 - DNA, 25 bp, Homo sapien
tgtgttagcactggactgctgccca

SEQ ID NO: 477605 - DNA, 25 bp, Homo sapien
cctgatccatcagacctagtgcact

SEQ ID NO: 477606 - DNA, 25 bp, Homo sapien
attcatgaattgagtcccgtagaaa

SEQ ID NO: 477607 - DNA, 25 bp, Homo sapien
tgctgcaatttccagtgagtactct

SEQ ID NO: 477608 - DNA, 25 bp, Homo sapien
tactctatggcaattagattgttca

SEQ ID NO: 477609 - DNA, 25 bp, Homo sapien
catgaattgagtcccgtagaaaccc

SEQ ID NO: 477610 - DNA, 25 bp, Homo sapien
cctcttcttctggactgtaactgtt

SEQ ID NO: 477611 - DNA, 25 bp, Homo sapien
tcctcttcttctggactgtaactgt

SEQ ID NO: 477612 - DNA, 25 bp, Homo sapien
gaagccagatgaaagctattgggtc

SEQ ID NO: 477613 - DNA, 25 bp, Homo sapien
ccaagtgatagtgcacagcggccag

SEQ ID NO: 477614 - DNA, 25 bp, Homo sapien
ggtcatggcccctggaacaattatt

SEQ ID NO: 477615 - DNA, 25 bp, Homo sapien
ctttcccaagtgatagtgcacagcg

SEQ ID NO: 477616 - DNA, 25 bp, Homo sapien
ccctgatagtgcttaatgagcagtg

SEQ ID NO: 477617 - DNA, 25 bp, Homo sapien
cctgatagtgcttaatgagcagtgt

SEQ ID NO: 477618 - DNA, 25 bp, Homo sapien
accctgatagtgcttaatgagcagt

SEQ ID NO: 477619 - DNA, 25 bp, Homo sapien
aaccctgatagtgcttaatgagcag

SEQ ID NO: 477620 - DNA, 25 bp, Homo sapien
agttcatcaaattggggccatgggg

SEQ ID NO: 477621 - DNA, 25 bp, Homo sapien
ccatggggaacgcaaaggtgatatt

SEQ ID NO: 477622 - DNA, 25 bp, Homo sapien
gcaaaggtgatattaggatgagaag

SEQ ID NO: 477623 - DNA, 25 bp, Homo sapien
gggaacgcaaaggtgatattaggat

SEQ ID NO: 477624 - DNA, 25 bp, Homo sapien
accatgtgggtgaatgaagggcggc

SEQ ID NO: 477625 - DNA, 25 bp, Homo sapien
ggcggctcccgcctcaacgtaaata

SEQ ID NO: 477626 - DNA, 25 bp, Homo sapien
tcaacgtaaatacggacaagcccca

SEQ ID NO: 477627 - DNA, 25 bp, Homo sapien
cctcattagcataaaaaacaaagta

SEQ ID NO: 477628 - DNA, 25 bp, Homo sapien
tgcgctttactacgaccggaggccc

SEQ ID NO: 477629 - DNA, 25 bp, Homo sapien
ctgcgctttactacgaccggaggcc

SEQ ID NO: 477630 - DNA, 25 bp, Homo sapien
gcccgcctgcgctttactacgaccg

SEQ ID NO: 477631 - DNA, 25 bp, Homo sapien
cgcctgcgctttactacgaccggag

SEQ ID NO: 477632 - DNA, 25 bp, Homo sapien
ccgtgcagcccgccccgcaggaaca

SEQ ID NO: 477633 - DNA, 25 bp, Homo sapien
ccccgtgcagcccgccccgcaggaa

SEQ ID NO: 477634 - DNA, 25 bp, Homo sapien
cgtgcagcccgccccgcaggaacat

SEQ ID NO: 477635 - DNA, 25 bp, Homo sapien
cccgtgcagcccgccccgcaggaac

SEQ ID NO: 477636 - DNA, 25 bp, Homo sapien
gcctaagccgggaacaatcggcggc

SEQ ID NO: 477637 - DNA, 25 bp, Homo sapien
aggcctaagccgggaacaatcggcg

SEQ ID NO: 477638 - DNA, 25 bp, Homo sapien
ccgaggcctaagccgggaacaatcg

SEQ ID NO: 477639 - DNA, 25 bp, Homo sapien
cagtcgccgccatgtcccccgccct

SEQ ID NO: 477640 - DNA, 25 bp, Homo sapien
aaagtgcccgccacgctcatggagc

SEQ ID NO: 477641 - DNA, 25 bp, Homo sapien
cagcacatgtcgcacaagggggagc

SEQ ID NO: 477642 - DNA, 25 bp, Homo sapien
cacgctcatggagcccgggccggca

SEQ ID NO: 477643 - DNA, 25 bp, Homo sapien
cccgagactgcaaagtgcccgccac

SEQ ID NO: 477644 - DNA, 25 bp, Homo sapien
cctcgtggctgcaagccgggataaa

SEQ ID NO: 477645 - DNA, 25 bp, Homo sapien
gctgcaagccgggataaagagttgt

SEQ ID NO: 477646 - DNA, 25 bp, Homo sapien
cccaatcaagacctcgtggctgcaa

SEQ ID NO: 477647 - DNA, 25 bp, Homo sapien
caagccgggataaagagttgtttct

SEQ ID NO: 477648 - DNA, 25 bp, Homo sapien
tttcagcaagtattctcagaaaagc

SEQ ID NO: 477649 - DNA, 25 bp, Homo sapien
cagcaagtattctcagaaaagctac

SEQ ID NO: 477650 - DNA, 25 bp, Homo sapien
ggtgcagttaggtccacgtgtatga

SEQ ID NO: 477651 - DNA, 25 bp, Homo sapien
gaaaagctactggtgcagttaggtc

SEQ ID NO: 477652 - DNA, 25 bp, Homo sapien
tatatttcgtaaactgcataagcca

SEQ ID NO: 477653 - DNA, 25 bp, Homo sapien
tcagtcaattgtagcagaacgtaaa

SEQ ID NO: 477654 - DNA, 25 bp, Homo sapien
gcaaatccgtacttaatgagttagt

SEQ ID NO: 477655 - DNA, 25 bp, Homo sapien
tactctctaagaaaccaatcctatt

SEQ ID NO: 477656 - DNA, 25 bp, Homo sapien
ctcctcttctggcttccacttagca

SEQ ID NO: 477657 - DNA, 25 bp, Homo sapien
tcctcctcttctggcttccacttag

SEQ ID NO: 477658 - DNA, 25 bp, Homo sapien
tcttctggcttccacttagcaaata

SEQ ID NO: 477659 - DNA, 25 bp, Homo sapien
cctcttctggcttccacttagcaaa

SEQ ID NO: 477660 - DNA, 25 bp, Homo sapien
ggaaatcttcacatccacgtggcaa

SEQ ID NO: 477661 - DNA, 25 bp, Homo sapien
tagaggaaatcttcacatccacgtg

SEQ ID NO: 477662 - DNA, 25 bp, Homo sapien
cttttagaggaaatcttcacatcca

SEQ ID NO: 477663 - DNA, 25 bp, Homo sapien
tcttcacatccacgtggcaaaacat

SEQ ID NO: 477664 - DNA, 25 bp, Homo sapien
cccaaatggattgacacatagagaa

SEQ ID NO: 477665 - DNA, 25 bp, Homo sapien
tacagaaggcaatcataaccaacca

SEQ ID NO: 477666 - DNA, 25 bp, Homo sapien
ccatccaactagcactggaagtggt

SEQ ID NO: 477667 - DNA, 25 bp, Homo sapien
taaaggcaatttagtccatgtgtac

SEQ ID NO: 477668 - DNA, 25 bp, Homo sapien
taattatctcaaagatatgaggtcc

SEQ ID NO: 477669 - DNA, 25 bp, Homo sapien
tgaggtccatttagacacgtattta

SEQ ID NO: 477670 - DNA, 25 bp, Homo sapien
aattcagcataatccctaatgggga

SEQ ID NO: 477671 - DNA, 25 bp, Homo sapien
actctaacaactataaaccatacaa

SEQ ID NO: 477672 - DNA, 25 bp, Homo sapien
ataatgctacaagtgccttcactgc

SEQ ID NO: 477673 - DNA, 25 bp, Homo sapien
accataatgctacaagtgccttcac

SEQ ID NO: 477674 - DNA, 25 bp, Homo sapien
gtcaccataatgctacaagtgcctt

SEQ ID NO: 477675 - DNA, 25 bp, Homo sapien
tcaccataatgctacaagtgccttc

SEQ ID NO: 477676 - DNA, 25 bp, Homo sapien
ctgcactttaaagcccaacttggct

SEQ ID NO: 477677 - DNA, 25 bp, Homo sapien
agcaggccctgcactttaaagccca

SEQ ID NO: 477678 - DNA, 25 bp, Homo sapien
gccctgcactttaaagcccaacttg

SEQ ID NO: 477679 - DNA, 25 bp, Homo sapien
aaagcactcaacatcagcaggccct

SEQ ID NO: 477680 - DNA, 25 bp, Homo sapien
tagggcagtagatgctaatctactt

SEQ ID NO: 477681 - DNA, 25 bp, Homo sapien
tattggatgaatacataacttctta

SEQ ID NO: 477682 - DNA, 25 bp, Homo sapien
cacctatatacttgcttggcttgaa

SEQ ID NO: 477683 - DNA, 25 bp, Homo sapien
tgcttggcttgaattattggatgaa

SEQ ID NO: 477684 - DNA, 25 bp, Homo sapien
attaaaacacctatatacttgcttg

SEQ ID NO: 477685 - DNA, 25 bp, Homo sapien
tcttcttgtagtgcaactatgcaaa

SEQ ID NO: 477686 - DNA, 25 bp, Homo sapien
gcatagatttgcacaactacattct

SEQ ID NO: 477687 - DNA, 25 bp, Homo sapien
cattcttcttgtagtgcaactatgc

SEQ ID NO: 477688 - DNA, 25 bp, Homo sapien
actatgcaaaactaacagaggactg

SEQ ID NO: 477689 - DNA, 25 bp, Homo sapien
gtcacatcagatagaccaggcagat

SEQ ID NO: 477690 - DNA, 25 bp, Homo sapien
gaagctgtcacatcagatagaccag

SEQ ID NO: 477691 - DNA, 25 bp, Homo sapien
catcgacacaataaaagtacacaaa

SEQ ID NO: 477692 - DNA, 25 bp, Homo sapien
ggcagattctacatcgacacaataa

SEQ ID NO: 477693 - DNA, 25 bp, Homo sapien
cagtactttaagtgctcataatgca

SEQ ID NO: 477694 - DNA, 25 bp, Homo sapien
gcagtactttaagtgctcataatgc

SEQ ID NO: 477695 - DNA, 25 bp, Homo sapien
tacctgcactataagcactttagtg

SEQ ID NO: 477696 - DNA, 25 bp, Homo sapien
tgcagtagataactaaacactacct

SEQ ID NO: 477697 - DNA, 25 bp, Homo sapien
acaggacagtttgattgggcgacag

SEQ ID NO: 477698 - DNA, 25 bp, Homo sapien
cgacaggccgaagctggagttctac

SEQ ID NO: 477699 - DNA, 25 bp, Homo sapien
ttgattgggcgacaggccgaagctg

SEQ ID NO: 477700 - DNA, 25 bp, Homo sapien
aacaggacagtttgattgggcgaca

SEQ ID NO: 477701 - DNA, 25 bp, Homo sapien
agcagaatatcacacagctggatgc

SEQ ID NO: 477702 - DNA, 25 bp, Homo sapien
cactaccacagtcagttttgcatgg

SEQ ID NO: 477703 - DNA, 25 bp, Homo sapien
tggatgcaaacctgcaaaactaacc

SEQ ID NO: 477704 - DNA, 25 bp, Homo sapien
cagttttgcatggatttgcacagca

SEQ ID NO: 477705 - DNA, 25 bp, Homo sapien
tgagtttcccttacttttctacaga

SEQ ID NO: 477706 - DNA, 25 bp, Homo sapien
agcattgcaaccgatcccaacctgt

SEQ ID NO: 477707 - DNA, 25 bp, Homo sapien
gcaataccatacagaaacacagcat

SEQ ID NO: 477708 - DNA, 25 bp, Homo sapien
gaaacacagcattgcaaccgatccc

SEQ ID NO: 477709 - DNA, 25 bp, Homo sapien
aaccgatcccaacctgtgtagaaag

SEQ ID NO: 477710 - DNA, 25 bp, Homo sapien
aaaaaattgctagtgtatctcccca

SEQ ID NO: 477711 - DNA, 25 bp, Homo sapien
caaagtctggcttacgtagggagta

SEQ ID NO: 477712 - DNA, 25 bp, Homo sapien
gtttaagtcttggtcttgcgcccag

SEQ ID NO: 477713 - DNA, 25 bp, Homo sapien
aatgctgggtaaaacactaactgcc

SEQ ID NO: 477714 - DNA, 25 bp, Homo sapien
agtctggcttgtagttagacaggtc

SEQ ID NO: 477715 - DNA, 25 bp, Homo sapien
gtctggcttgtagttagacaggtct

SEQ ID NO: 477716 - DNA, 25 bp, Homo sapien
gacaaactatgcaaaactgtcaatt

SEQ ID NO: 477717 - DNA, 25 bp, Homo sapien
taaagttagacaaactatgcaaaac

SEQ ID NO: 477718 - DNA, 25 bp, Homo sapien
aattaaacagtgtatcattaaatac

SEQ ID NO: 477719 - DNA, 25 bp, Homo sapien
gacactgagttgttctccaggaagt

SEQ ID NO: 477720 - DNA, 25 bp, Homo sapien
actgctcagttgagaggctcttaat

SEQ ID NO: 477721 - DNA, 25 bp, Homo sapien
ttactgctcagttgagaggctctta

SEQ ID NO: 477722 - DNA, 25 bp, Homo sapien
ctttactgctcagttgagaggctct

SEQ ID NO: 477723 - DNA, 25 bp, Homo sapien
gctcagttgagaggctcttaattct

SEQ ID NO: 477724 - DNA, 25 bp, Homo sapien
tacagaactaggcacatctcaatgt

SEQ ID NO: 477725 - DNA, 25 bp, Homo sapien
gaagtctcaagtgggcatgatgatc

SEQ ID NO: 477726 - DNA, 25 bp, Homo sapien
tctgtgcagattgagctctccttac

SEQ ID NO: 477727 - DNA, 25 bp, Homo sapien
taaatgcgctagaactcaaacagcc

SEQ ID NO: 477728 - DNA, 25 bp, Homo sapien
acaaaaacgccataaaaactgcgat

SEQ ID NO: 477729 - DNA, 25 bp, Homo sapien
tactgagggtcaactatgctaaaac

SEQ ID NO: 477730 - DNA, 25 bp, Homo sapien
ctttgagggctggtcagaacatacc

SEQ ID NO: 477731 - DNA, 25 bp, Homo sapien
agaatttggtatgcactgagggtcc

SEQ ID NO: 477732 - DNA, 25 bp, Homo sapien
tcttgtgttactggccatagacagg

SEQ ID NO: 477733 - DNA, 25 bp, Homo sapien
tgtggtttccccattctgaaggttg

SEQ ID NO: 477734 - DNA, 25 bp, Homo sapien
tccataaactggcacttaaataccg

SEQ ID NO: 477735 - DNA, 25 bp, Homo sapien
gaaggttgactgataaggacctaca

SEQ ID NO: 477736 - DNA, 25 bp, Homo sapien
tctggctaatgaggttttagaccct

SEQ ID NO: 477737 - DNA, 25 bp, Homo sapien
tgctggtacagtttccagttggaga

SEQ ID NO: 477738 - DNA, 25 bp, Homo sapien
gctggtacagtttccagttggagat

SEQ ID NO: 477739 - DNA, 25 bp, Homo sapien
tggagattgctgggtcaggcaccat

SEQ ID NO: 477740 - DNA, 25 bp, Homo sapien
ggtacagtttccagttggagattgc

SEQ ID NO: 477741 - DNA, 25 bp, Homo sapien
gggctctttgaacccctcaagagct

SEQ ID NO: 477742 - DNA, 25 bp, Homo sapien
ggattcagggcaagcaggagactct

SEQ ID NO: 477743 - DNA, 25 bp, Homo sapien
gcaagcaggagactctgcttcccaa

SEQ ID NO: 477744 - DNA, 25 bp, Homo sapien
acccaggttttctatgtggggctct

SEQ ID NO: 477745 - DNA, 25 bp, Homo sapien
aagagtaatgagatgaagccaaaga

SEQ ID NO: 477746 - DNA, 25 bp, Homo sapien
gagtaatgagatgaagccaaagatt

SEQ ID NO: 477747 - DNA, 25 bp, Homo sapien
taaagagtaatgagatgaagccaaa

SEQ ID NO: 477748 - DNA, 25 bp, Homo sapien
gctctgcctgcaggcaatgacagta

SEQ ID NO: 477749 - DNA, 25 bp, Homo sapien
tatacataataacaactctgtccag

SEQ ID NO: 477750 - DNA, 25 bp, Homo sapien
gacaagatccatgacatcctacaca

SEQ ID NO: 477751 - DNA, 25 bp, Homo sapien
catgtcccacttctgtaccgtctgt

SEQ ID NO: 477752 - DNA, 25 bp, Homo sapien
gtgcatatttgttacctggcctctt

SEQ ID NO: 477753 - DNA, 25 bp, Homo sapien
ttgagtgatactcccctgaaatctc

SEQ ID NO: 477754 - DNA, 25 bp, Homo sapien
tctcctctagtgaagatagtaatgg

SEQ ID NO: 477755 - DNA, 25 bp, Homo sapien
caggagaaaattgagtgatactccc

SEQ ID NO: 477756 - DNA, 25 bp, Homo sapien
gaaatctcctctagtgaagatagta

SEQ ID NO: 477757 - DNA, 25 bp, Homo sapien
tctaagccgttggttgcacaataaa

SEQ ID NO: 477758 - DNA, 25 bp, Homo sapien
aagttggatgtcagcccgagctgcc

SEQ ID NO: 477759 - DNA, 25 bp, Homo sapien
aaccaagttggatgtcagcccgagc

SEQ ID NO: 477760 - DNA, 25 bp, Homo sapien
tctctccctccgatgtaggctctaa

SEQ ID NO: 477761 - DNA, 25 bp, Homo sapien
agtatggaaagattgtctggaagcc

SEQ ID NO: 477762 - DNA, 25 bp, Homo sapien
ccaccaagtatggaaagattgtctg

SEQ ID NO: 477763 - DNA, 25 bp, Homo sapien
gtatggaaagattgtctggaagcca

SEQ ID NO: 477764 - DNA, 25 bp, Homo sapien
ccaagtatggaaagattgtctggaa

SEQ ID NO: 477765 - DNA, 25 bp, Homo sapien
ctgggatgtgcccgctcgctgcgct

SEQ ID NO: 477766 - DNA, 25 bp, Homo sapien
cccgctcgctgcgctccgcggaagc

SEQ ID NO: 477767 - DNA, 25 bp, Homo sapien
gcccggctcggctcgcagcagctaa

SEQ ID NO: 477768 - DNA, 25 bp, Homo sapien
cccggctcggctcgcagcagctaac

SEQ ID NO: 477769 - DNA, 25 bp, Homo sapien
ctgcagacgtggaagacacagcggc

SEQ ID NO: 477770 - DNA, 25 bp, Homo sapien
cagttagctcttcccggaggaggcc

SEQ ID NO: 477771 - DNA, 25 bp, Homo sapien
ggcttcacctgggagcagttagctc

SEQ ID NO: 477772 - DNA, 25 bp, Homo sapien
ggcgaagaaaactagtggagccgca

SEQ ID NO: 477773 - DNA, 25 bp, Homo sapien
gaacttcttcgcaggtctgcacgcc

SEQ ID NO: 477774 - DNA, 25 bp, Homo sapien
tctgcacgccctcgctgcgggcgga

SEQ ID NO: 477775 - DNA, 25 bp, Homo sapien
gaggaggcagcgaaagcccacgggc

SEQ ID NO: 477776 - DNA, 25 bp, Homo sapien
ctgcccgcggcgaatccggcagccc

SEQ ID NO: 477777 - DNA, 25 bp, Homo sapien
tttctcaatgattgcagcactattc

SEQ ID NO: 477778 - DNA, 25 bp, Homo sapien
tctgtaattggagttaagtaaaaga

SEQ ID NO: 477779 - DNA, 25 bp, Homo sapien
gaatggtaaaaggcgggctaagtca

SEQ ID NO: 477780 - DNA, 25 bp, Homo sapien
actggttttctcaatgattgcagca

SEQ ID NO: 477781 - DNA, 25 bp, Homo sapien
tgagattgagtttgtcagaatttgt

SEQ ID NO: 477782 - DNA, 25 bp, Homo sapien
caaagtatttggagttgagattgag

SEQ ID NO: 477783 - DNA, 25 bp, Homo sapien
gattgagtttgtcagaatttgtagg

SEQ ID NO: 477784 - DNA, 25 bp, Homo sapien
caaagctatctgtcttacaaagtat

SEQ ID NO: 477785 - DNA, 25 bp, Homo sapien
gaagtaggctatctctgcaataatg

SEQ ID NO: 477786 - DNA, 25 bp, Homo sapien
gccatcaggctcgtgctgcttgtga

SEQ ID NO: 477787 - DNA, 25 bp, Homo sapien
tgacatgctgggagatcaaggcccc

SEQ ID NO: 477788 - DNA, 25 bp, Homo sapien
tctctgcaataatgacatgctggga

SEQ ID NO: 477789 - DNA, 25 bp, Homo sapien
gcagccgcatttcgagatattagaa

SEQ ID NO: 477790 - DNA, 25 bp, Homo sapien
gaaactgctgcatatcctggcgagc

SEQ ID NO: 477791 - DNA, 25 bp, Homo sapien
catcttcctggtgcaacatgtaggc

SEQ ID NO: 477792 - DNA, 25 bp, Homo sapien
gaaactttaatgtagagctggacgt

SEQ ID NO: 477793 - DNA, 25 bp, Homo sapien
atttgctgtatatctgctctcagtg

SEQ ID NO: 477794 - DNA, 25 bp, Homo sapien
ggtgcattgtccctatgcacatggc

SEQ ID NO: 477795 - DNA, 25 bp, Homo sapien
attgtccctatgcacatggctattg

SEQ ID NO: 477796 - DNA, 25 bp, Homo sapien
gcattgtccctatgcacatggctat

SEQ ID NO: 477797 - DNA, 25 bp, Homo sapien
gcagggtgcattgtccctatgcaca

SEQ ID NO: 477798 - DNA, 25 bp, Homo sapien
cagtgctcctctacttgtactttct

SEQ ID NO: 477799 - DNA, 25 bp, Homo sapien
ctcctctacttgtactttctcccta

SEQ ID NO: 477800 - DNA, 25 bp, Homo sapien
ctctacttgtactttctccctaggc

SEQ ID NO: 477801 - DNA, 25 bp, Homo sapien
tcagtgctcctctacttgtactttc

SEQ ID NO: 477802 - DNA, 25 bp, Homo sapien
tactgcacagttgtctggtaactaa

SEQ ID NO: 477803 - DNA, 25 bp, Homo sapien
gcgtgtaaagcaaggacccggttca

SEQ ID NO: 477804 - DNA, 25 bp, Homo sapien
tgaaatactggcagtcctcatactg

SEQ ID NO: 477805 - DNA, 25 bp, Homo sapien
tggtaactaagatcaatgcaggcgt

SEQ ID NO: 477806 - DNA, 25 bp, Homo sapien
taattacttcagacacttttacatg

SEQ ID NO: 477807 - DNA, 25 bp, Homo sapien
gactcgctccagtttcttacagagg

SEQ ID NO: 477808 - DNA, 25 bp, Homo sapien
tgtttgcaagcagctaatcttaaag

SEQ ID NO: 477809 - DNA, 25 bp, Homo sapien
tagtccaactggaaagactcgctcc

SEQ ID NO: 477810 - DNA, 25 bp, Homo sapien
gccaagatgaaccaagcctcgatca

SEQ ID NO: 477811 - DNA, 25 bp, Homo sapien
tgctttcagccatatgcctctgaga

SEQ ID NO: 477812 - DNA, 25 bp, Homo sapien
gcctcgatcagccaaaccttaatgg

SEQ ID NO: 477813 - DNA, 25 bp, Homo sapien
tctgcttggactcagaggtcagagc

SEQ ID NO: 477814 - DNA, 25 bp, Homo sapien
tgggtagatgtcaagatgctgcgaa

SEQ ID NO: 477815 - DNA, 25 bp, Homo sapien
caatagtgccatgttgaaaaagcca

SEQ ID NO: 477816 - DNA, 25 bp, Homo sapien
ttatcagcacaagataggtcaactg

SEQ ID NO: 477817 - DNA, 25 bp, Homo sapien
caatgtaacactgggtgaagtagcc

SEQ ID NO: 477818 - DNA, 25 bp, Homo sapien
gagaccaaacggtgccagagataag

SEQ ID NO: 477819 - DNA, 25 bp, Homo sapien
tgcaccttgcttcatacgaaaaatg

SEQ ID NO: 477820 - DNA, 25 bp, Homo sapien
gagataagacccctaagatcactac

SEQ ID NO: 477821 - DNA, 25 bp, Homo sapien
aaccaattgctgtggcatatgcacc

SEQ ID NO: 477822 - DNA, 25 bp, Homo sapien
caaattgtcaactgcagggtaatgt

SEQ ID NO: 477823 - DNA, 25 bp, Homo sapien
ttcattggtaaaggccaattcatca

SEQ ID NO: 477824 - DNA, 25 bp, Homo sapien
taaagcagcagggtcgggtaggaat

SEQ ID NO: 477825 - DNA, 25 bp, Homo sapien
taggaattggaatgagcccagcgga

SEQ ID NO: 477826 - DNA, 25 bp, Homo sapien
gctccaaagataccaagatcaagag

SEQ ID NO: 477827 - DNA, 25 bp, Homo sapien
taattgagcaaggtttatcctgcct

SEQ ID NO: 477828 - DNA, 25 bp, Homo sapien
catggcaagctggtatcaaagttag

SEQ ID NO: 477829 - DNA, 25 bp, Homo sapien
agatcaagagacagctagccttaga

SEQ ID NO: 477830 - DNA, 25 bp, Homo sapien
tgagtccaagaattggtgtcacgtt

SEQ ID NO: 477831 - DNA, 25 bp, Homo sapien
ctccagaatcaactcgctgagtcca

SEQ ID NO: 477832 - DNA, 25 bp, Homo sapien
ctctccagaatcaactcgctgagtc

SEQ ID NO: 477833 - DNA, 25 bp, Homo sapien
ctgagtccaagaattggtgtcacgt

SEQ ID NO: 477834 - DNA, 25 bp, Homo sapien
ctaaagacaagctttatctgacata

SEQ ID NO: 477835 - DNA, 25 bp, Homo sapien
ttcactggctcctatctttaatgag

SEQ ID NO: 477836 - DNA, 25 bp, Homo sapien
taacctgcccaatatacaaatcctc

SEQ ID NO: 477837 - DNA, 25 bp, Homo sapien
cgtactctagagttaaccaaaatga

SEQ ID NO: 477838 - DNA, 25 bp, Homo sapien
tccagctttggctaaaagtaaacag

SEQ ID NO: 477839 - DNA, 25 bp, Homo sapien
tgtaattaggaaacaagcaacacaa

SEQ ID NO: 477840 - DNA, 25 bp, Homo sapien
gaatgtgagtttctatcactgcccc

SEQ ID NO: 477841 - DNA, 25 bp, Homo sapien
gaaagctggaatactatcttaatgt

SEQ ID NO: 477842 - DNA, 25 bp, Homo sapien
tatctttcagggatacttgggtttg

SEQ ID NO: 477843 - DNA, 25 bp, Homo sapien
gattttaggcctacagctactgagg

SEQ ID NO: 477844 - DNA, 25 bp, Homo sapien
attagctcagctgaccccacatgtg

SEQ ID NO: 477845 - DNA, 25 bp, Homo sapien
gaaggtgacccaaaaacagccagtg

SEQ ID NO: 477846 - DNA, 25 bp, Homo sapien
tgaggtactttgctcccacttggag

SEQ ID NO: 477847 - DNA, 25 bp, Homo sapien
ttacaggtctgttccgccacatgcg

SEQ ID NO: 477848 - DNA, 25 bp, Homo sapien
gctgaaggtcaaaccacagaatgtt

SEQ ID NO: 477849 - DNA, 25 bp, Homo sapien
tatccctcagctggcagtatcctaa

SEQ ID NO: 477850 - DNA, 25 bp, Homo sapien
tgggagaggactgcagttacccctg

SEQ ID NO: 477851 - DNA, 25 bp, Homo sapien
gcaaggcattaataggcatctgcat

SEQ ID NO: 477852 - DNA, 25 bp, Homo sapien
taatgagcctaggaataccttaggg

SEQ ID NO: 477853 - DNA, 25 bp, Homo sapien
gatataaatcttcctacagacccag

SEQ ID NO: 477854 - DNA, 25 bp, Homo sapien
caatgctgccagtcatagatcacac

SEQ ID NO: 477855 - DNA, 25 bp, Homo sapien
tgaccaacatctgtctgcccaatgt

SEQ ID NO: 477856 - DNA, 25 bp, Homo sapien
atctaccctcggcaattttcaagca

SEQ ID NO: 477857 - DNA, 25 bp, Homo sapien
tcctacactgctatgactgacaata

SEQ ID NO: 477858 - DNA, 25 bp, Homo sapien
gctaccttgatataagatagatctc

SEQ ID NO: 477859 - DNA, 25 bp, Homo sapien
caactgaatctgctaagtgtgacat

SEQ ID NO: 477860 - DNA, 25 bp, Homo sapien
caggaggcgatgacaggagatttct

SEQ ID NO: 477861 - DNA, 25 bp, Homo sapien
cagcgtggtcctgatgctgctaatc

SEQ ID NO: 477862 - DNA, 25 bp, Homo sapien
gcttcagctgagtttggccagcagg

SEQ ID NO: 477863 - DNA, 25 bp, Homo sapien
ttgtacaccaacttcagtaacactg

SEQ ID NO: 477864 - DNA, 25 bp, Homo sapien
gggttgtacaccaacttcagtaaca

SEQ ID NO: 477865 - DNA, 25 bp, Homo sapien
tgataatccactaccctcaggccag

SEQ ID NO: 477866 - DNA, 25 bp, Homo sapien
tacaccaacttcagtaacactgatg

SEQ ID NO: 477867 - DNA, 25 bp, Homo sapien
tagggacacggtacaagcattttgg

SEQ ID NO: 477868 - DNA, 25 bp, Homo sapien
aagtcccctgaacagccctagatag

SEQ ID NO: 477869 - DNA, 25 bp, Homo sapien
gctgcagtcacaaagcacccataag

SEQ ID NO: 477870 - DNA, 25 bp, Homo sapien
gagtggacactatggttctacctgc

SEQ ID NO: 477871 - DNA, 25 bp, Homo sapien
gtcctggaagatgaaaatctacaag

SEQ ID NO: 477872 - DNA, 25 bp, Homo sapien
acaagcctggcagctagcatattca

SEQ ID NO: 477873 - DNA, 25 bp, Homo sapien
aaatctacaagcctggcagctagca

SEQ ID NO: 477874 - DNA, 25 bp, Homo sapien
ctggcagctagcatattcagaggca

SEQ ID NO: 477875 - DNA, 25 bp, Homo sapien
catgtgatatcgaccgccagagcaa

SEQ ID NO: 477876 - DNA, 25 bp, Homo sapien
tcatgtgatatcgaccgccagagca

SEQ ID NO: 477877 - DNA, 25 bp, Homo sapien
tgcattacaaccagatctccaggtg

SEQ ID NO: 477878 - DNA, 25 bp, Homo sapien
catttgggccaatgatcacctggaa

SEQ ID NO: 477879 - DNA, 25 bp, Homo sapien
taccagaggacttgtcagaagtgca

SEQ ID NO: 477880 - DNA, 25 bp, Homo sapien
catcagtgctatccaaagtgtgtca

SEQ ID NO: 477881 - DNA, 25 bp, Homo sapien
gataaaagggcctgcatactttcac

SEQ ID NO: 477882 - DNA, 25 bp, Homo sapien
tatgtgctgctagctgatactgtag

SEQ ID NO: 477883 - DNA, 25 bp, Homo sapien
tgtgaaacagaaacacgcatgtgca

SEQ ID NO: 477884 - DNA, 25 bp, Homo sapien
tattccagcaactgtaatacatgca

SEQ ID NO: 477885 - DNA, 25 bp, Homo sapien
taattcattcagaattgtaccattg

SEQ ID NO: 477886 - DNA, 25 bp, Homo sapien
aattcattcagaattgtaccattgt

SEQ ID NO: 477887 - DNA, 25 bp, Homo sapien
gaaacacgatactgttggaccctct

SEQ ID NO: 477888 - DNA, 25 bp, Homo sapien
aacccagaaacacgatactgttgga

SEQ ID NO: 477889 - DNA, 25 bp, Homo sapien
tccaaacccagaaacacgatactgt

SEQ ID NO: 477890 - DNA, 25 bp, Homo sapien
gatactgttggaccctctgaaccct

SEQ ID NO: 477891 - DNA, 25 bp, Homo sapien
tgaagaactcctgaaccgaagcagc

SEQ ID NO: 477892 - DNA, 25 bp, Homo sapien
tattgcatcttcaggagggctctgc

SEQ ID NO: 477893 - DNA, 25 bp, Homo sapien
tacaaggcttagtgagcgccaggcc

SEQ ID NO: 477894 - DNA, 25 bp, Homo sapien
tgtggattaagctccgccatgtgcg

SEQ ID NO: 477895 - DNA, 25 bp, Homo sapien
gcttcaccaaggtctgcttagggcc

SEQ ID NO: 477896 - DNA, 25 bp, Homo sapien
ctgcttcaccaaggtctgcttaggg

SEQ ID NO: 477897 - DNA, 25 bp, Homo sapien
tgcttcaccaaggtctgcttagggc

SEQ ID NO: 477898 - DNA, 25 bp, Homo sapien
tttaggaaacataaacctgattcta

SEQ ID NO: 477899 - DNA, 25 bp, Homo sapien
ggaaacataaacctgattctaatac

SEQ ID NO: 477900 - DNA, 25 bp, Homo sapien
acataaacctgattctaatactttg

SEQ ID NO: 477901 - DNA, 25 bp, Homo sapien
taaacctgattctaatactttgaga

SEQ ID NO: 477902 - DNA, 25 bp, Homo sapien
tatgtaatactgatcctgggggccc

SEQ ID NO: 477903 - DNA, 25 bp, Homo sapien
gggggccccatgaccagcagaggca

SEQ ID NO: 477904 - DNA, 25 bp, Homo sapien
gcagcaatgccgtgggagcttagcc

SEQ ID NO: 477905 - DNA, 25 bp, Homo sapien
gctgtatgtaatactgatcctgggg

SEQ ID NO: 477906 - DNA, 25 bp, Homo sapien
gccatggagttctggcaatttgagg

SEQ ID NO: 477907 - DNA, 25 bp, Homo sapien
tggcaatttgaggtgactcatcaga

SEQ ID NO: 477908 - DNA, 25 bp, Homo sapien
tggccatggagttctggcaatttga

SEQ ID NO: 477909 - DNA, 25 bp, Homo sapien
ccatggagttctggcaatttgaggt

SEQ ID NO: 477910 - DNA, 25 bp, Homo sapien
ctgaagtactgcatgtactttaata

SEQ ID NO: 477911 - DNA, 25 bp, Homo sapien
tgaagtactgcatgtactttaatag

SEQ ID NO: 477912 - DNA, 25 bp, Homo sapien
tccaccattctgatcaagtatttgt

SEQ ID NO: 477913 - DNA, 25 bp, Homo sapien
tagttgctcctagcccatatcactt

SEQ ID NO: 477914 - DNA, 25 bp, Homo sapien
tgtcacttagctgactttccccatt

SEQ ID NO: 477915 - DNA, 25 bp, Homo sapien
ttgaaatgactctcttagttgctcc

SEQ ID NO: 477916 - DNA, 25 bp, Homo sapien
tcttctgttggcaagcgtctcttca

SEQ ID NO: 477917 - DNA, 25 bp, Homo sapien
cagggcggccacaaatcctatttac

SEQ ID NO: 477918 - DNA, 25 bp, Homo sapien
ttgctctgatcaaaagaacaacggg

SEQ ID NO: 477919 - DNA, 25 bp, Homo sapien
ctttgtgtgggtgttcttacagggc

SEQ ID NO: 477920 - DNA, 25 bp, Homo sapien
ctgaactcattgctcattacagaaa

SEQ ID NO: 477921 - DNA, 25 bp, Homo sapien
aaactgtgacgtaaagataggcacc

SEQ ID NO: 477922 - DNA, 25 bp, Homo sapien
tgtgacgtaaagataggcacctttc

SEQ ID NO: 477923 - DNA, 25 bp, Homo sapien
cgtaaagataggcacctttctcaaa

SEQ ID NO: 477924 - DNA, 25 bp, Homo sapien
tctgcagcagctaattcattagcac

SEQ ID NO: 477925 - DNA, 25 bp, Homo sapien
cagctagacctccatagaatgacct

SEQ ID NO: 477926 - DNA, 25 bp, Homo sapien
tagcacaaagctgatcagctagacc

SEQ ID NO: 477927 - DNA, 25 bp, Homo sapien
gaatgacctgtacagtcgaaggctg

SEQ ID NO: 477928 - DNA, 25 bp, Homo sapien
aggttttcacagaccacataaaata

SEQ ID NO: 477929 - DNA, 25 bp, Homo sapien
ctagtaggttttcacagaccacata

SEQ ID NO: 477930 - DNA, 25 bp, Homo sapien
tagtaggttttcacagaccacataa

SEQ ID NO: 477931 - DNA, 25 bp, Homo sapien
gtaggttttcacagaccacataaaa

SEQ ID NO: 477932 - DNA, 25 bp, Homo sapien
taccagtttgagattccaagtccct

SEQ ID NO: 477933 - DNA, 25 bp, Homo sapien
cagtgaggtgctagacatgaaaagc

SEQ ID NO: 477934 - DNA, 25 bp, Homo sapien
ccaagtacatggaaaagggtgctaa

SEQ ID NO: 477935 - DNA, 25 bp, Homo sapien
caagaacaagggacaatagatggca

SEQ ID NO: 477936 - DNA, 25 bp, Homo sapien
ataattacagtctgtgaattaaggg

SEQ ID NO: 477937 - DNA, 25 bp, Homo sapien
tgagaaacagccgaaagagcttcag

SEQ ID NO: 477938 - DNA, 25 bp, Homo sapien
aatacctaaagtagtgatggtctcg

SEQ ID NO: 477939 - DNA, 25 bp, Homo sapien
tatattatccttcaacaagtcatat

SEQ ID NO: 477940 - DNA, 25 bp, Homo sapien
cacatattcacgagaatttttcaca

SEQ ID NO: 477941 - DNA, 25 bp, Homo sapien
tgtccacttcttaccagattaatat

SEQ ID NO: 477942 - DNA, 25 bp, Homo sapien
aaaacgaatgaactatttcctaatg

SEQ ID NO: 477943 - DNA, 25 bp, Homo sapien
tatgtcacatattcacgagaatttt

SEQ ID NO: 477944 - DNA, 25 bp, Homo sapien
aatatgtataacctgttataacgac

SEQ ID NO: 477945 - DNA, 25 bp, Homo sapien
tataacgacatagcataattggttc

SEQ ID NO: 477946 - DNA, 25 bp, Homo sapien
actataacatctggtgacatatgga

SEQ ID NO: 477947 - DNA, 25 bp, Homo sapien
gatttcccttcattagtattaacta

SEQ ID NO: 477948 - DNA, 25 bp, Homo sapien
cattaattatctcagccagtactgg

SEQ ID NO: 477949 - DNA, 25 bp, Homo sapien
ggtatgccatgaaccaaatactgag

SEQ ID NO: 477950 - DNA, 25 bp, Homo sapien
tctcaataatattaagtgggaaggg

SEQ ID NO: 477951 - DNA, 25 bp, Homo sapien
tacttatgccagatgtgatccatca

SEQ ID NO: 477952 - DNA, 25 bp, Homo sapien
gtgcatttgtagtgccttccatatt

SEQ ID NO: 477953 - DNA, 25 bp, Homo sapien
agcctcgattataggcccttttatg

SEQ ID NO: 477954 - DNA, 25 bp, Homo sapien
tgctcaagcctcgattataggccct

SEQ ID NO: 477955 - DNA, 25 bp, Homo sapien
tctctgattgctcaagcctcgatta

SEQ ID NO: 477956 - DNA, 25 bp, Homo sapien
ttcactcttgcagacaaccctcagg

SEQ ID NO: 477957 - DNA, 25 bp, Homo sapien
aatcaaggctcaggacaagaattgc

SEQ ID NO: 477958 - DNA, 25 bp, Homo sapien
cctcaggagtgataaatcaaggctc

SEQ ID NO: 477959 - DNA, 25 bp, Homo sapien
tcttgcagacaaccctcaggagtga

SEQ ID NO: 477960 - DNA, 25 bp, Homo sapien
gaggttcaccatcaccaactgtcat

SEQ ID NO: 477961 - DNA, 25 bp, Homo sapien
ctgctttggtattttcagagtgttt

SEQ ID NO: 477962 - DNA, 25 bp, Homo sapien
cagaggttcaccatcaccaactgtc

SEQ ID NO: 477963 - DNA, 25 bp, Homo sapien
ttcagagtgttttcccttcacagac

SEQ ID NO: 477964 - DNA, 25 bp, Homo sapien
ggtattaatatgagaacagccattt

SEQ ID NO: 477965 - DNA, 25 bp, Homo sapien
catatatgctttgctactgtactcc

SEQ ID NO: 477966 - DNA, 25 bp, Homo sapien
gaaccacaattgaggtattaatatg

SEQ ID NO: 477967 - DNA, 25 bp, Homo sapien
ctgtactccttagcctacactctgg

SEQ ID NO: 477968 - DNA, 25 bp, Homo sapien
gtcagtgtttacatactctgtcccc

SEQ ID NO: 477969 - DNA, 25 bp, Homo sapien
ctatcccttcggaacctttcctcag

SEQ ID NO: 477970 - DNA, 25 bp, Homo sapien
ccccatgtctggaaagttctatccc

SEQ ID NO: 477971 - DNA, 25 bp, Homo sapien
gatttctgccaggtccgtcagtgtt

SEQ ID NO: 477972 - DNA, 25 bp, Homo sapien
cgttctcctttctcagtcctttcat

SEQ ID NO: 477973 - DNA, 25 bp, Homo sapien
ccgttctcctttctcagtcctttca

SEQ ID NO: 477974 - DNA, 25 bp, Homo sapien
tggccaatctccccttcatccttca

SEQ ID NO: 477975 - DNA, 25 bp, Homo sapien
agagacatttggccaatctcccctt

SEQ ID NO: 477976 - DNA, 25 bp, Homo sapien
gagacatttggccaatctccccttc

SEQ ID NO: 477977 - DNA, 25 bp, Homo sapien
ccaatctccccttcatccttcatac

SEQ ID NO: 477978 - DNA, 25 bp, Homo sapien
tcttgctgaattatacatatgtcca

SEQ ID NO: 477979 - DNA, 25 bp, Homo sapien
taccaggtcttgctgaattatacat

SEQ ID NO: 477980 - DNA, 25 bp, Homo sapien
tttgttaccaggtcttgctgaatta

SEQ ID NO: 477981 - DNA, 25 bp, Homo sapien
caggtcttgctgaattatacatatg

SEQ ID NO: 477982 - DNA, 25 bp, Homo sapien
ttatcaataatctgatttatcacag

SEQ ID NO: 477983 - DNA, 25 bp, Homo sapien
tatcaataatctgatttatcacagg

SEQ ID NO: 477984 - DNA, 25 bp, Homo sapien
attatggctgacttacttccatatt

SEQ ID NO: 477985 - DNA, 25 bp, Homo sapien
ttttgctattatggctgacttactt

SEQ ID NO: 477986 - DNA, 25 bp, Homo sapien
tatggctgacttacttccatattct

SEQ ID NO: 477987 - DNA, 25 bp, Homo sapien
atttttgctattatggctgacttac

SEQ ID NO: 477988 - DNA, 25 bp, Homo sapien
tgcattgctaattcaaaatcaagaa

SEQ ID NO: 477989 - DNA, 25 bp, Homo sapien
ctactgcattgctaattcaaaatca

SEQ ID NO: 477990 - DNA, 25 bp, Homo sapien
ctgcattgctaattcaaaatcaaga

SEQ ID NO: 477991 - DNA, 25 bp, Homo sapien
actgcattgctaattcaaaatcaag

SEQ ID NO: 477992 - DNA, 25 bp, Homo sapien
tcatagtatctatccatttgcatag

SEQ ID NO: 477993 - DNA, 25 bp, Homo sapien
gtaatagttgctcctacaaaaacag

SEQ ID NO: 477994 - DNA, 25 bp, Homo sapien
cccatctgccgtagttttggcaaag

SEQ ID NO: 477995 - DNA, 25 bp, Homo sapien
taagtgaccctaccacgttaggctc

SEQ ID NO: 477996 - DNA, 25 bp, Homo sapien
ctgtcacgtaacatgcaatctgagg

SEQ ID NO: 477997 - DNA, 25 bp, Homo sapien
tgcaatctgaggtgttagggataat

SEQ ID NO: 477998 - DNA, 25 bp, Homo sapien
taacatgcaatctgaggtgttaggg

SEQ ID NO: 477999 - DNA, 25 bp, Homo sapien
tcacgtaacatgcaatctgaggtgt

SEQ ID NO: 478000 - DNA, 25 bp, Homo sapien
gccttaaggcatttggcattcccat

SEQ ID NO: 478001 - DNA, 25 bp, Homo sapien
cagtaagccttaaggcatttggcat

SEQ ID NO: 478002 - DNA, 25 bp, Homo sapien
ctgcagtaagccttaaggcatttgg

SEQ ID NO: 478003 - DNA, 25 bp, Homo sapien
taagccttaaggcatttggcattcc

SEQ ID NO: 478004 - DNA, 25 bp, Homo sapien
tatcaaattctccaaagggtgaagc

SEQ ID NO: 478005 - DNA, 25 bp, Homo sapien
ccatgatatcaaattctccaaaggg

SEQ ID NO: 478006 - DNA, 25 bp, Homo sapien
ggtgaagccaagaggttcctgttag

SEQ ID NO: 478007 - DNA, 25 bp, Homo sapien
attctccaaagggtgaagccaagag

SEQ ID NO: 478008 - DNA, 25 bp, Homo sapien
ggaatatttagtgttgcacacagtg

SEQ ID NO: 478009 - DNA, 25 bp, Homo sapien
aaatatctgtctaaaaagggtgtct

SEQ ID NO: 478010 - DNA, 25 bp, Homo sapien
gacatgttgcacagtcataaaatag

SEQ ID NO: 478011 - DNA, 25 bp, Homo sapien
ctgttgagtgaagtatgaccattga

SEQ ID NO: 478012 - DNA, 25 bp, Homo sapien
ataacaggttgaacaaaaagaggca

SEQ ID NO: 478013 - DNA, 25 bp, Homo sapien
ttcccaaatgtgtttagctcaaaat

SEQ ID NO: 478014 - DNA, 25 bp, Homo sapien
gatccattgcacctagcgctaaaag

SEQ ID NO: 478015 - DNA, 25 bp, Homo sapien
caaagtatgtttgcatagaattctc

SEQ ID NO: 478016 - DNA, 25 bp, Homo sapien
taataggtttaagtgtctgaaggcc

SEQ ID NO: 478017 - DNA, 25 bp, Homo sapien
tcacagcgctgatcttccagattgc

SEQ ID NO: 478018 - DNA, 25 bp, Homo sapien
aatcgtgaccaatcagaaattgtgc

SEQ ID NO: 478019 - DNA, 25 bp, Homo sapien
catcatgatatcagatggctgctct

SEQ ID NO: 478020 - DNA, 25 bp, Homo sapien
tacaacaagggaacagaacagaagc

SEQ ID NO: 478021 - DNA, 25 bp, Homo sapien
ttcaagtgccacaacccaaagaggg

SEQ ID NO: 478022 - DNA, 25 bp, Homo sapien
taaaatcctacaggcagggccctat

SEQ ID NO: 478023 - DNA, 25 bp, Homo sapien
tgtagcaactagaatatggccacct

SEQ ID NO: 478024 - DNA, 25 bp, Homo sapien
taaagtacagtttgtggcaggcact

SEQ ID NO: 478025 - DNA, 25 bp, Homo sapien
aggaatggtgaaagccaatacagct

SEQ ID NO: 478026 - DNA, 25 bp, Homo sapien
ggaatggtgaaagccaatacagcta

SEQ ID NO: 478027 - DNA, 25 bp, Homo sapien
ttaaagtacagtttgtggcaggcac

SEQ ID NO: 478028 - DNA, 25 bp, Homo sapien
tatgtagttttccttttgtaggaga

SEQ ID NO: 478029 - DNA, 25 bp, Homo sapien
gaggcaagaatcttaatataccact

SEQ ID NO: 478030 - DNA, 25 bp, Homo sapien
tgaggcaagaatcttaatataccac

SEQ ID NO: 478031 - DNA, 25 bp, Homo sapien
ctgaggcaagaatcttaatatacca

SEQ ID NO: 478032 - DNA, 25 bp, Homo sapien
gcttcactgactacttccgacatgg

SEQ ID NO: 478033 - DNA, 25 bp, Homo sapien
gaattctcactactttgtccgctta

SEQ ID NO: 478034 - DNA, 25 bp, Homo sapien
tccgacatggaattctcactacttt

SEQ ID NO: 478035 - DNA, 25 bp, Homo sapien
tgtccgcttatctgcttatgagctg

SEQ ID NO: 478036 - DNA, 25 bp, Homo sapien
tttctccttctatatacccacattg

SEQ ID NO: 478037 - DNA, 25 bp, Homo sapien
tatacccacattgattctctgtctt

SEQ ID NO: 478038 - DNA, 25 bp, Homo sapien
gattctctgtcttggaaattgcttg

SEQ ID NO: 478039 - DNA, 25 bp, Homo sapien
ttgcttgcctgtaagcacgacacat

SEQ ID NO: 478040 - DNA, 25 bp, Homo sapien
tcattctggattcatatcaaaccag

SEQ ID NO: 478041 - DNA, 25 bp, Homo sapien
ttctggattcatatcaaaccagggt

SEQ ID NO: 478042 - DNA, 25 bp, Homo sapien
ctggattcatatcaaaccagggtcc

SEQ ID NO: 478043 - DNA, 25 bp, Homo sapien
cattctggattcatatcaaaccagg

SEQ ID NO: 478044 - DNA, 25 bp, Homo sapien
gggcatgttacgtaggcattagcag

SEQ ID NO: 478045 - DNA, 25 bp, Homo sapien
gcattagcagtacagccctcattat

SEQ ID NO: 478046 - DNA, 25 bp, Homo sapien
taaaataattgcaccaacgtaaagc

SEQ ID NO: 478047 - DNA, 25 bp, Homo sapien
attatgcactcgttggacagcagcg

SEQ ID NO: 478048 - DNA, 25 bp, Homo sapien
gccaggccgcctctgaggttttaaa

SEQ ID NO: 478049 - DNA, 25 bp, Homo sapien
ggttgcactatccaaatgtccagcc

SEQ ID NO: 478050 - DNA, 25 bp, Homo sapien
tgtaacagcgcttgtcaaccttggt

SEQ ID NO: 478051 - DNA, 25 bp, Homo sapien
caaccttggttgcactatccaaatg

SEQ ID NO: 478052 - DNA, 25 bp, Homo sapien
tgttgtattcataggaattacttta

SEQ ID NO: 478053 - DNA, 25 bp, Homo sapien
ggttttattgagaattatgctgatt

SEQ ID NO: 478054 - DNA, 25 bp, Homo sapien
gctctcaaactgctatcttgatttt

SEQ ID NO: 478055 - DNA, 25 bp, Homo sapien
ggtgctctcaaactgctatcttgat

SEQ ID NO: 478056 - DNA, 25 bp, Homo sapien
tttgaaccagtcaaaacatcctatg

SEQ ID NO: 478057 - DNA, 25 bp, Homo sapien
cagcatgaatgtctgcctatatatt

SEQ ID NO: 478058 - DNA, 25 bp, Homo sapien
catttgtatgagaaccattattgtc

SEQ ID NO: 478059 - DNA, 25 bp, Homo sapien
caagtttcataaagtcaattctgga

SEQ ID NO: 478060 - DNA, 25 bp, Homo sapien
cattatgagtactggaatttaggac

SEQ ID NO: 478061 - DNA, 25 bp, Homo sapien
taattaccaccacaaagactatctc

SEQ ID NO: 478062 - DNA, 25 bp, Homo sapien
gaacacaagacatataggattaggg

SEQ ID NO: 478063 - DNA, 25 bp, Homo sapien
gggtgcaccacaatcagcccatagc

SEQ ID NO: 478064 - DNA, 25 bp, Homo sapien
ctggaagccagctctagttctgaag

SEQ ID NO: 478065 - DNA, 25 bp, Homo sapien
ggaagccagctctagttctgaagct

SEQ ID NO: 478066 - DNA, 25 bp, Homo sapien
gccagctctagttctgaagctgctg

SEQ ID NO: 478067 - DNA, 25 bp, Homo sapien
aagccagctctagttctgaagctgc

SEQ ID NO: 478068 - DNA, 25 bp, Homo sapien
aaagacaaactcttcacttggccac

SEQ ID NO: 478069 - DNA, 25 bp, Homo sapien
acaaactcttcacttggccactatc

SEQ ID NO: 478070 - DNA, 25 bp, Homo sapien
tcccatttaaaaggagccatgaata

SEQ ID NO: 478071 - DNA, 25 bp, Homo sapien
gacaaactcttcacttggccactat

SEQ ID NO: 478072 - DNA, 25 bp, Homo sapien
agtttcggacatctgagcctttgag

SEQ ID NO: 478073 - DNA, 25 bp, Homo sapien
cttcagaagtttcggacatctgagc

SEQ ID NO: 478074 - DNA, 25 bp, Homo sapien
cagaagtttcggacatctgagcctt

SEQ ID NO: 478075 - DNA, 25 bp, Homo sapien
ctcttcagaagtttcggacatctga

SEQ ID NO: 478076 - DNA, 25 bp, Homo sapien
gttcccacttgtcaggtttgggtga

SEQ ID NO: 478077 - DNA, 25 bp, Homo sapien
gtttgggtgatctaccctgtaacaa

SEQ ID NO: 478078 - DNA, 25 bp, Homo sapien
aagaagttcccacttgtcaggtttg

SEQ ID NO: 478079 - DNA, 25 bp, Homo sapien
actgacttgttcaaccatgcctcca

SEQ ID NO: 478080 - DNA, 25 bp, Homo sapien
cataagaacacatctttatcgcatt

SEQ ID NO: 478081 - DNA, 25 bp, Homo sapien
tcataagaacacatctttatcgcat

SEQ ID NO: 478082 - DNA, 25 bp, Homo sapien
tgagtacgatgtatactgctcagat

SEQ ID NO: 478083 - DNA, 25 bp, Homo sapien
tcatcctggcttcacgtcacgtcat

SEQ ID NO: 478084 - DNA, 25 bp, Homo sapien
tctcattcatagtgggacctaagct

SEQ ID NO: 478085 - DNA, 25 bp, Homo sapien
cacagcaacctagatgaaattggag

SEQ ID NO: 478086 - DNA, 25 bp, Homo sapien
gcaggttatatactccatgatcaag

SEQ ID NO: 478087 - DNA, 25 bp, Homo sapien
cctcatgtttggaggcactgtggca

SEQ ID NO: 478088 - DNA, 25 bp, Homo sapien
tctggctagaactctatactctgtg

SEQ ID NO: 478089 - DNA, 25 bp, Homo sapien
taatccgatgtcattctgatgcagg

SEQ ID NO: 478090 - DNA, 25 bp, Homo sapien
tcatgtagatcccaagaatccccag

SEQ ID NO: 478091 - DNA, 25 bp, Homo sapien
ccaagttcatttcaagaggtgcaga

SEQ ID NO: 478092 - DNA, 25 bp, Homo sapien
taagactgagataccttcctgtgtg

SEQ ID NO: 478093 - DNA, 25 bp, Homo sapien
tctggatttctgtgataggccctta

SEQ ID NO: 478094 - DNA, 25 bp, Homo sapien
gtgtaaagttccatagatggtcctc

SEQ ID NO: 478095 - DNA, 25 bp, Homo sapien
ctccatgaagcctattactttagtg

SEQ ID NO: 478096 - DNA, 25 bp, Homo sapien
tttccagtgtacttcctccatgaag

SEQ ID NO: 478097 - DNA, 25 bp, Homo sapien
tccatagatggtcctctcaaaaata

SEQ ID NO: 478098 - DNA, 25 bp, Homo sapien
gaacggtgtcatgaacagtgtcagc

SEQ ID NO: 478099 - DNA, 25 bp, Homo sapien
taggacaatgaaaatcacctgtaac

SEQ ID NO: 478100 - DNA, 25 bp, Homo sapien
taaaagcactatctactcactgtag

SEQ ID NO: 478101 - DNA, 25 bp, Homo sapien
gctgaaggtgtattttacacgcacc

SEQ ID NO: 478102 - DNA, 25 bp, Homo sapien
tctgagctctcatttctagtaggtt

SEQ ID NO: 478103 - DNA, 25 bp, Homo sapien
catagcacttagcatgatatatagc

SEQ ID NO: 478104 - DNA, 25 bp, Homo sapien
gagaaacaatgggatacaatacaca

SEQ ID NO: 478105 - DNA, 25 bp, Homo sapien
taaaacttaacaatatcaccccagc

SEQ ID NO: 478106 - DNA, 25 bp, Homo sapien
tgactcattatacccatcagatgtc

SEQ ID NO: 478107 - DNA, 25 bp, Homo sapien
tcggcctcccatacttatggcgatc

SEQ ID NO: 478108 - DNA, 25 bp, Homo sapien
tgtatctacttaaattgactcatta

SEQ ID NO: 478109 - DNA, 25 bp, Homo sapien
gcgatcggaattttcttaacactga

SEQ ID NO: 478110 - DNA, 25 bp, Homo sapien
tgaatgagctcttcgcaggagcgga

SEQ ID NO: 478111 - DNA, 25 bp, Homo sapien
agagttcactcgcttttgttgcacg

SEQ ID NO: 478112 - DNA, 25 bp, Homo sapien
tctgaagatagaaacgggagtgtac

SEQ ID NO: 478113 - DNA, 25 bp, Homo sapien
cactgctgtctgtggtgcgactcac

SEQ ID NO: 478114 - DNA, 25 bp, Homo sapien
ggctatttgcttctcactcacttga

SEQ ID NO: 478115 - DNA, 25 bp, Homo sapien
ttaatgaccatatcctccagtgtgc

SEQ ID NO: 478116 - DNA, 25 bp, Homo sapien
taaatgggcactaaaactgcctgtg

SEQ ID NO: 478117 - DNA, 25 bp, Homo sapien
tggcctctgagaaagattaccgtct

SEQ ID NO: 478118 - DNA, 25 bp, Homo sapien
gcttcctggattgacaacattctgt

SEQ ID NO: 478119 - DNA, 25 bp, Homo sapien
gtcacacattgttgccagagggtaa

SEQ ID NO: 478120 - DNA, 25 bp, Homo sapien
tgttggtttccgaagtctgggcaga

SEQ ID NO: 478121 - DNA, 25 bp, Homo sapien
cgcagaattgttgtgggaactctca

SEQ ID NO: 478122 - DNA, 25 bp, Homo sapien
tggccaaaagcccagaatgtgccct

SEQ ID NO: 478123 - DNA, 25 bp, Homo sapien
cctgggccacacctgataatttatg

SEQ ID NO: 478124 - DNA, 25 bp, Homo sapien
tgttatttatagtgggctgcctggg

SEQ ID NO: 478125 - DNA, 25 bp, Homo sapien
tgctgtaagaaaggcttggccaaaa

SEQ ID NO: 478126 - DNA, 25 bp, Homo sapien
gaagtaagcgtgatgtctgcctgat

SEQ ID NO: 478127 - DNA, 25 bp, Homo sapien
ccagacttactatagtcaagaggaa

SEQ ID NO: 478128 - DNA, 25 bp, Homo sapien
tggtagaaccagtgcctcaggatgc

SEQ ID NO: 478129 - DNA, 25 bp, Homo sapien
aaagcttatttctagcatgactcag

SEQ ID NO: 478130 - DNA, 25 bp, Homo sapien
tcacctggagggcttattaaaatgc

SEQ ID NO: 478131 - DNA, 25 bp, Homo sapien
aaatttgtgcctcagaatcacctgg

SEQ ID NO: 478132 - DNA, 25 bp, Homo sapien
aaaatgcagattgctggggctctct

SEQ ID NO: 478133 - DNA, 25 bp, Homo sapien
tctcaaatttgtgcctcagaatcac

SEQ ID NO: 478134 - DNA, 25 bp, Homo sapien
gggatttggtatcaatctgttaatt

SEQ ID NO: 478135 - DNA, 25 bp, Homo sapien
gaggtgaagacgacaaacattttga

SEQ ID NO: 478136 - DNA, 25 bp, Homo sapien
taggaacagacgaaacctttctcac

SEQ ID NO: 478137 - DNA, 25 bp, Homo sapien
agattgagcctatctaattcaggag

SEQ ID NO: 478138 - DNA, 25 bp, Homo sapien
tctgggagagccacaaaggatgtgc

SEQ ID NO: 478139 - DNA, 25 bp, Homo sapien
caaagtcaagatattccagagccat

SEQ ID NO: 478140 - DNA, 25 bp, Homo sapien
tagcttctaaggatagtgctgtgcc

SEQ ID NO: 478141 - DNA, 25 bp, Homo sapien
tcttgagcaaggtttcatcctggcc

SEQ ID NO: 478142 - DNA, 25 bp, Homo sapien
gctagaggcttcatagtcaatatac

SEQ ID NO: 478143 - DNA, 25 bp, Homo sapien
tacacttaaaggctagctagaggct

SEQ ID NO: 478144 - DNA, 25 bp, Homo sapien
tgataacgtctttataaccatggag

SEQ ID NO: 478145 - DNA, 25 bp, Homo sapien
gaagcactgtatcaaggaggtgccc

SEQ ID NO: 478146 - DNA, 25 bp, Homo sapien
tattccaattctttacccgtgatgc

SEQ ID NO: 478147 - DNA, 25 bp, Homo sapien
tagagaatagctacctcaaagacat

SEQ ID NO: 478148 - DNA, 25 bp, Homo sapien
taaggagctagtatatgagccatag

SEQ ID NO: 478149 - DNA, 25 bp, Homo sapien
tatgtattttccactgaaaggtgac

SEQ ID NO: 478150 - DNA, 25 bp, Homo sapien
taagtctcaaacaaatacaggcttg

SEQ ID NO: 478151 - DNA, 25 bp, Homo sapien
caggcttgtagcgaggatcatttcc

SEQ ID NO: 478152 - DNA, 25 bp, Homo sapien
gcaataggctcccaattggtcctgt

SEQ ID NO: 478153 - DNA, 25 bp, Homo sapien
tgacaataacctagcccaagccatg

SEQ ID NO: 478154 - DNA, 25 bp, Homo sapien
tgtgagtggtttgggagtacaaaaa

SEQ ID NO: 478155 - DNA, 25 bp, Homo sapien
ttcagagttctctgagtaagaacat

SEQ ID NO: 478156 - DNA, 25 bp, Homo sapien
gtttcagagttctctgagtaagaac

SEQ ID NO: 478157 - DNA, 25 bp, Homo sapien
taaatgcattgtgtgagtggtttgg

SEQ ID NO: 478158 - DNA, 25 bp, Homo sapien
tgtgtgaggtccaaacccttcagag

SEQ ID NO: 478159 - DNA, 25 bp, Homo sapien
tctagtctggttaaaacgctcactc

SEQ ID NO: 478160 - DNA, 25 bp, Homo sapien
ttcagaaactggcaaaatactcccc

SEQ ID NO: 478161 - DNA, 25 bp, Homo sapien
tatcctctttgcaatgccatggctg

SEQ ID NO: 478162 - DNA, 25 bp, Homo sapien
caagacctattctggtacctgtaca

SEQ ID NO: 478163 - DNA, 25 bp, Homo sapien
gatcctcccataagaataaaaggag

SEQ ID NO: 478164 - DNA, 25 bp, Homo sapien
tacctgtacatttcaaagccgtaag

SEQ ID NO: 478165 - DNA, 25 bp, Homo sapien
gagaaaatagaggagttagttacaa

SEQ ID NO: 478166 - DNA, 25 bp, Homo sapien
tggtaaggcttcacatcctcgctga

SEQ ID NO: 478167 - DNA, 25 bp, Homo sapien
gtactgaatccttgatagccaccat

SEQ ID NO: 478168 - DNA, 25 bp, Homo sapien
ggcaatgctgcttggtcagtactga

SEQ ID NO: 478169 - DNA, 25 bp, Homo sapien
tcctcgctgatcagctgcttttggt

SEQ ID NO: 478170 - DNA, 25 bp, Homo sapien
gacactagggtctgatgtcaaaggc

SEQ ID NO: 478171 - DNA, 25 bp, Homo sapien
aacaagaacacatgaagggtaaatc

SEQ ID NO: 478172 - DNA, 25 bp, Homo sapien
cattccagactgatgacaaacaccc

SEQ ID NO: 478173 - DNA, 25 bp, Homo sapien
tgccaatggcccctggacactaggg

SEQ ID NO: 478174 - DNA, 25 bp, Homo sapien
gccataactaaagctctgcacttac

SEQ ID NO: 478175 - DNA, 25 bp, Homo sapien
cacttactatatgcatgacctgtac

SEQ ID NO: 478176 - DNA, 25 bp, Homo sapien
atttagccagatctagtgttagctc

SEQ ID NO: 478177 - DNA, 25 bp, Homo sapien
tttatgccctaaatttagccagatc

SEQ ID NO: 478178 - DNA, 25 bp, Homo sapien
acaagctattctgcctgctccagca

SEQ ID NO: 478179 - DNA, 25 bp, Homo sapien
atgaaacaagctattctgcctgctc

SEQ ID NO: 478180 - DNA, 25 bp, Homo sapien
ttatgttagctactgcagaaatgaa

SEQ ID NO: 478181 - DNA, 25 bp, Homo sapien
gaaacaagctattctgcctgctcca

SEQ ID NO: 478182 - DNA, 25 bp, Homo sapien
tcagaaatttaaggtcataagccct

SEQ ID NO: 478183 - DNA, 25 bp, Homo sapien
ccctgacatagtttgtggcataagc

SEQ ID NO: 478184 - DNA, 25 bp, Homo sapien
ttaaggtcataagccctgacatagt

SEQ ID NO: 478185 - DNA, 25 bp, Homo sapien
tagtttgtggcataagccagtagag

SEQ ID NO: 478186 - DNA, 25 bp, Homo sapien
taattagagattcgacatgtaccga

SEQ ID NO: 478187 - DNA, 25 bp, Homo sapien
taatttaagtgaccctgagctatga

SEQ ID NO: 478188 - DNA, 25 bp, Homo sapien
caagccactatggaatgtcctggag

SEQ ID NO: 478189 - DNA, 25 bp, Homo sapien
accatggcccacacctgagttaggt

SEQ ID NO: 478190 - DNA, 25 bp, Homo sapien
tatacctggagtaatgaagcacaac

SEQ ID NO: 478191 - DNA, 25 bp, Homo sapien
caaccgtggcttaaatcaggctgct

SEQ ID NO: 478192 - DNA, 25 bp, Homo sapien
taataaaagttgtggcagtctggca

SEQ ID NO: 478193 - DNA, 25 bp, Homo sapien
tctggcaaagatctgcaaccgtggc

SEQ ID NO: 478194 - DNA, 25 bp, Homo sapien
tacagcaaggcaggtatcaaaatct

SEQ ID NO: 478195 - DNA, 25 bp, Homo sapien
gatataatttgatggcatgtgcccc

SEQ ID NO: 478196 - DNA, 25 bp, Homo sapien
gaggctcaatggtgtgtaagcagca

SEQ ID NO: 478197 - DNA, 25 bp, Homo sapien
ttgggaagacaagggcgataaagcc

SEQ ID NO: 478198 - DNA, 25 bp, Homo sapien
aaaggcaagaatcttatcctcctct

SEQ ID NO: 478199 - DNA, 25 bp, Homo sapien
cacccactaagtcccattttccact

SEQ ID NO: 478200 - DNA, 25 bp, Homo sapien
ctctttagctgcctgcatctcagta

SEQ ID NO: 478201 - DNA, 25 bp, Homo sapien
cctgcatctcagtactcaagtgctc

SEQ ID NO: 478202 - DNA, 25 bp, Homo sapien
ggcagtaacctgcaagcatttttat

SEQ ID NO: 478203 - DNA, 25 bp, Homo sapien
ttcatcaagcaatagttcaagcctc

SEQ ID NO: 478204 - DNA, 25 bp, Homo sapien
aatggtgtgtgattaggcagtaacc

SEQ ID NO: 478205 - DNA, 25 bp, Homo sapien
tatgatacgaagatctgagatttgg

SEQ ID NO: 478206 - DNA, 25 bp, Homo sapien
ggtgaataatgcaatcctcctgcta

SEQ ID NO: 478207 - DNA, 25 bp, Homo sapien
taagtaggtggagactttagcccat

SEQ ID NO: 478208 - DNA, 25 bp, Homo sapien
taagcagtttctgtcaaggctcaga

SEQ ID NO: 478209 - DNA, 25 bp, Homo sapien
caaatactgtcacaacggactagga

SEQ ID NO: 478210 - DNA, 25 bp, Homo sapien
gcaccaggtgtttaaactcgcttga

SEQ ID NO: 478211 - DNA, 25 bp, Homo sapien
taccctgcagactaaacaaaacgtg

SEQ ID NO: 478212 - DNA, 25 bp, Homo sapien
gaaatgtctgtaggagcccagtgca

SEQ ID NO: 478213 - DNA, 25 bp, Homo sapien
cagccgattatgtcatgcagaaaag

SEQ ID NO: 478214 - DNA, 25 bp, Homo sapien
ggtagtgctaccttccttacataag

SEQ ID NO: 478215 - DNA, 25 bp, Homo sapien
gctatcacaggtaccatagactggg

SEQ ID NO: 478216 - DNA, 25 bp, Homo sapien
atagactgggtggttcatgaaaaac

SEQ ID NO: 478217 - DNA, 25 bp, Homo sapien
gaggaccctctttcatattgcagaa

SEQ ID NO: 478218 - DNA, 25 bp, Homo sapien
taacacaagtgttggactcatcaga

SEQ ID NO: 478219 - DNA, 25 bp, Homo sapien
cactaataggcctctgaagcatgta

SEQ ID NO: 478220 - DNA, 25 bp, Homo sapien
caacacagtgcaaagagtcaaggta

SEQ ID NO: 478221 - DNA, 25 bp, Homo sapien
tgcacgccctgcatgtgtatcatgg

SEQ ID NO: 478222 - DNA, 25 bp, Homo sapien
aacattgtcgggtgaccatatatca

SEQ ID NO: 478223 - DNA, 25 bp, Homo sapien
attgtcgggtgaccatatatcatct

SEQ ID NO: 478224 - DNA, 25 bp, Homo sapien
tcaaacattgtcgggtgaccatata

SEQ ID NO: 478225 - DNA, 25 bp, Homo sapien
cattgtcgggtgaccatatatcatc

SEQ ID NO: 478226 - DNA, 25 bp, Homo sapien
gagtcactggactatgatgaccatt

SEQ ID NO: 478227 - DNA, 25 bp, Homo sapien
ccagaggactatgtatgccacctga

SEQ ID NO: 478228 - DNA, 25 bp, Homo sapien
tagcacctgctaagatcattgatat

SEQ ID NO: 478229 - DNA, 25 bp, Homo sapien
tgtcttagaagcaaattaactggtc

SEQ ID NO: 478230 - DNA, 25 bp, Homo sapien
ggaacctatacatctcttgagagga

SEQ ID NO: 478231 - DNA, 25 bp, Homo sapien
tatacatctcttgagaggagagaga

SEQ ID NO: 478232 - DNA, 25 bp, Homo sapien
aaaggaaaggaacctatacatctct

SEQ ID NO: 478233 - DNA, 25 bp, Homo sapien
aaatttgcactcattgaaatacaga

SEQ ID NO: 478234 - DNA, 25 bp, Homo sapien
gagaaaaggtaatcctcatacactg

SEQ ID NO: 478235 - DNA, 25 bp, Homo sapien
ccaagatctagaagcaacctgcatg

SEQ ID NO: 478236 - DNA, 25 bp, Homo sapien
gaacagcttgggtgttcctcacaaa

SEQ ID NO: 478237 - DNA, 25 bp, Homo sapien
atgtatattagtaccaccactgtgg

SEQ ID NO: 478238 - DNA, 25 bp, Homo sapien
gacctcacagtaggcacttctacag

SEQ ID NO: 478239 - DNA, 25 bp, Homo sapien
tctacagtgcccaatagcattagct

SEQ ID NO: 478240 - DNA, 25 bp, Homo sapien
ggtataatacttttcctgaggctca

SEQ ID NO: 478241 - DNA, 25 bp, Homo sapien
gattatgctgagtccaaatccatgc

SEQ ID NO: 478242 - DNA, 25 bp, Homo sapien
cagaactgccttgaacatatggatg

SEQ ID NO: 478243 - DNA, 25 bp, Homo sapien
ttaaactacataacacatcacccat

SEQ ID NO: 478244 - DNA, 25 bp, Homo sapien
gagttaccagaactgccttgaacat

SEQ ID NO: 478245 - DNA, 25 bp, Homo sapien
ctgagagttaccagaactgccttga

SEQ ID NO: 478246 - DNA, 25 bp, Homo sapien
catcaaccagcctgcagcttctaag

SEQ ID NO: 478247 - DNA, 25 bp, Homo sapien
tcataagtgtttgactagaactgta

SEQ ID NO: 478248 - DNA, 25 bp, Homo sapien
catgttggccttgcatttgtcctca

SEQ ID NO: 478249 - DNA, 25 bp, Homo sapien
aatccaggttgaacatccccaatcc

SEQ ID NO: 478250 - DNA, 25 bp, Homo sapien
tctggtgaccgctacaggttggtcc

SEQ ID NO: 478251 - DNA, 25 bp, Homo sapien
ttccacacgatgctttatgatgtca

SEQ ID NO: 478252 - DNA, 25 bp, Homo sapien
gcttgaccaagggattaatctcttc

SEQ ID NO: 478253 - DNA, 25 bp, Homo sapien
gagactcttccggaagcttgaccaa

SEQ ID NO: 478254 - DNA, 25 bp, Homo sapien
tattattccatcttaaagatgacaa

SEQ ID NO: 478255 - DNA, 25 bp, Homo sapien
gtattattccatcttaaagatgaca

SEQ ID NO: 478256 - DNA, 25 bp, Homo sapien
ttattccatcttaaagatgacaaaa

SEQ ID NO: 478257 - DNA, 25 bp, Homo sapien
tattccatcttaaagatgacaaaac

SEQ ID NO: 478258 - DNA, 25 bp, Homo sapien
gcctaccactaaagaacagctgctg

SEQ ID NO: 478259 - DNA, 25 bp, Homo sapien
cagctacgtacttgggtcagtgaga

SEQ ID NO: 478260 - DNA, 25 bp, Homo sapien
gatgtcctgagtagacctagaccag

SEQ ID NO: 478261 - DNA, 25 bp, Homo sapien
aggcttctggcactttggtactcaa

SEQ ID NO: 478262 - DNA, 25 bp, Homo sapien
tagattgatttgttgcctgactgta

SEQ ID NO: 478263 - DNA, 25 bp, Homo sapien
taaggcaacaaattcacaggtctgg

SEQ ID NO: 478264 - DNA, 25 bp, Homo sapien
ggctcactcaactcttatgactaca

SEQ ID NO: 478265 - DNA, 25 bp, Homo sapien
tatgactacactgaactcacccagg

SEQ ID NO: 478266 - DNA, 25 bp, Homo sapien
caatgagacttgttggtggaaagga

SEQ ID NO: 478267 - DNA, 25 bp, Homo sapien
catgtggacataagacacgtttgaa

SEQ ID NO: 478268 - DNA, 25 bp, Homo sapien
tgtgtcaggcacaagctgctacgca

SEQ ID NO: 478269 - DNA, 25 bp, Homo sapien
ctgctacgcacccaacatcaggaat

SEQ ID NO: 478270 - DNA, 25 bp, Homo sapien
ctaaagagagtagccttttatcatt

SEQ ID NO: 478271 - DNA, 25 bp, Homo sapien
tccttctaaagagagtagcctttta

SEQ ID NO: 478272 - DNA, 25 bp, Homo sapien
aagagagtagccttttatcattttt

SEQ ID NO: 478273 - DNA, 25 bp, Homo sapien
cttctaaagagagtagccttttatc

SEQ ID NO: 478274 - DNA, 25 bp, Homo sapien
tccaaatagtctcctgagaaaacca

SEQ ID NO: 478275 - DNA, 25 bp, Homo sapien
cattctgttaactgcatggagatga

SEQ ID NO: 478276 - DNA, 25 bp, Homo sapien
tggagatgataaaactacatgcaaa

SEQ ID NO: 478277 - DNA, 25 bp, Homo sapien
ataacatggttgtcatttgtccaaa

SEQ ID NO: 478278 - DNA, 25 bp, Homo sapien
taaactttggggtcacgtgcagcac

SEQ ID NO: 478279 - DNA, 25 bp, Homo sapien
cacaactctcagcaagctacttagc

SEQ ID NO: 478280 - DNA, 25 bp, Homo sapien
cgtgcagcacttaaatagtttggaa

SEQ ID NO: 478281 - DNA, 25 bp, Homo sapien
tctcagtgtagtaactaatttcaag

SEQ ID NO: 478282 - DNA, 25 bp, Homo sapien
atcgagaatatttagacgaatggac

SEQ ID NO: 478283 - DNA, 25 bp, Homo sapien
ctgggatcgagaatatttagacgaa

SEQ ID NO: 478284 - DNA, 25 bp, Homo sapien
ggatcgagaatatttagacgaatgg

SEQ ID NO: 478285 - DNA, 25 bp, Homo sapien
taactgggatcgagaatatttagac

SEQ ID NO: 478286 - DNA, 25 bp, Homo sapien
tagaatgtctcctttgcatgaggca

SEQ ID NO: 478287 - DNA, 25 bp, Homo sapien
ggatgccgtatcaccatactgttaa

SEQ ID NO: 478288 - DNA, 25 bp, Homo sapien
tcattgcgcccatgttgaagtgagc

SEQ ID NO: 478289 - DNA, 25 bp, Homo sapien
cccaacagatgaaggtgagtatgcc

SEQ ID NO: 478290 - DNA, 25 bp, Homo sapien
cgttctctagaacagcacaccaagt

SEQ ID NO: 478291 - DNA, 25 bp, Homo sapien
ggatccgaaccccaagatatctctt

SEQ ID NO: 478292 - DNA, 25 bp, Homo sapien
gttttacattggagcagacactgac

SEQ ID NO: 478293 - DNA, 25 bp, Homo sapien
gacaaatcaatatgacctgggtgtg

SEQ ID NO: 478294 - DNA, 25 bp, Homo sapien
tgaaatatgcacatcttgggaaatg

SEQ ID NO: 478295 - DNA, 25 bp, Homo sapien
tatatgtatttatgcggcacatgag

SEQ ID NO: 478296 - DNA, 25 bp, Homo sapien
gaaatgggtttccaatttgtagagc

SEQ ID NO: 478297 - DNA, 25 bp, Homo sapien
ggtattgagattacaccatatgaag

SEQ ID NO: 478298 - DNA, 25 bp, Homo sapien
tcttctgtagtatctcagatcataa

SEQ ID NO: 478299 - DNA, 25 bp, Homo sapien
taggaggagttaactatatactttg

SEQ ID NO: 478300 - DNA, 25 bp, Homo sapien
gaggagttaactatatactttgtaa

SEQ ID NO: 478301 - DNA, 25 bp, Homo sapien
cattagtattaggaggagttaacta

SEQ ID NO: 478302 - DNA, 25 bp, Homo sapien
tttaatcacaggtgtatctacttac

SEQ ID NO: 478303 - DNA, 25 bp, Homo sapien
tacccatggtgtatcttactgtgtt

SEQ ID NO: 478304 - DNA, 25 bp, Homo sapien
gtcctttaatcactggtatatctcc

SEQ ID NO: 478305 - DNA, 25 bp, Homo sapien
gtctattaatatgtgagttgaaatc

SEQ ID NO: 478306 - DNA, 25 bp, Homo sapien
tagaatagtcaacatctcctgctcc

SEQ ID NO: 478307 - DNA, 25 bp, Homo sapien
tcctgctcctgttgctatcaaatgc

SEQ ID NO: 478308 - DNA, 25 bp, Homo sapien
tcctgaaggttctccactagaatag

SEQ ID NO: 478309 - DNA, 25 bp, Homo sapien
tatcaaatgcactcttttatcgttg

SEQ ID NO: 478310 - DNA, 25 bp, Homo sapien
tagatgcacgtgagatatccaaggg

SEQ ID NO: 478311 - DNA, 25 bp, Homo sapien
caggcactttggtaggaacttggaa

SEQ ID NO: 478312 - DNA, 25 bp, Homo sapien
taaccaaggcagtacagtgagagtg

SEQ ID NO: 478313 - DNA, 25 bp, Homo sapien
gatgcagtaccttccattcgtgtgg

SEQ ID NO: 478314 - DNA, 25 bp, Homo sapien
taaattttgcaatcgattagctaaa

SEQ ID NO: 478315 - DNA, 25 bp, Homo sapien
actaaattttgcaatcgattagcta

SEQ ID NO: 478316 - DNA, 25 bp, Homo sapien
aaattttgcaatcgattagctaaat

SEQ ID NO: 478317 - DNA, 25 bp, Homo sapien
attttgcaatcgattagctaaattt

SEQ ID NO: 478318 - DNA, 25 bp, Homo sapien
aggatttagcattcttttcagccat

SEQ ID NO: 478319 - DNA, 25 bp, Homo sapien
ctgtgatgaggatttagcattcttt

SEQ ID NO: 478320 - DNA, 25 bp, Homo sapien
gatgaggatttagcattcttttcag

SEQ ID NO: 478321 - DNA, 25 bp, Homo sapien
tgaggatttagcattcttttcagcc

SEQ ID NO: 478322 - DNA, 25 bp, Homo sapien
ccctgagttgacgagtactctgccc

SEQ ID NO: 478323 - DNA, 25 bp, Homo sapien
tgagatgtaaaccttttttcatgaa

SEQ ID NO: 478324 - DNA, 25 bp, Homo sapien
tgagttgacgagtactctgcccctt

SEQ ID NO: 478325 - DNA, 25 bp, Homo sapien
attgctgagatgtaaaccttttttc

SEQ ID NO: 478326 - DNA, 25 bp, Homo sapien
tcttacataccctctgagaaggaca

SEQ ID NO: 478327 - DNA, 25 bp, Homo sapien
ccctctgagaaggacattcattcct

SEQ ID NO: 478328 - DNA, 25 bp, Homo sapien
ttgcacatgctcgttcccattctga

SEQ ID NO: 478329 - DNA, 25 bp, Homo sapien
tccttccatcagagtatgcttcagt

SEQ ID NO: 478330 - DNA, 25 bp, Homo sapien
ctagagggctaacagtgatggtttc

SEQ ID NO: 478331 - DNA, 25 bp, Homo sapien
tcatatacaagcagtggctccttgg

SEQ ID NO: 478332 - DNA, 25 bp, Homo sapien
tatacaagcagtggctccttggctt

SEQ ID NO: 478333 - DNA, 25 bp, Homo sapien
acagtgatggtttcatatacaagca

SEQ ID NO: 478334 - DNA, 25 bp, Homo sapien
ccatgtttctagatgaacaaaggac

SEQ ID NO: 478335 - DNA, 25 bp, Homo sapien
cctgacattggccaagccgacgata

SEQ ID NO: 478336 - DNA, 25 bp, Homo sapien
ggaaagtgaggtagccatcatggct

SEQ ID NO: 478337 - DNA, 25 bp, Homo sapien
aacaaaggacatctgggcagcatcc

SEQ ID NO: 478338 - DNA, 25 bp, Homo sapien
ccccacaatctccatgtgtagacat

SEQ ID NO: 478339 - DNA, 25 bp, Homo sapien
cttattatgtgcttgaaattcccca

SEQ ID NO: 478340 - DNA, 25 bp, Homo sapien
tatgtgcttgaaattccccacaatc

SEQ ID NO: 478341 - DNA, 25 bp, Homo sapien
gtgcttgaaattccccacaatctcc

SEQ ID NO: 478342 - DNA, 25 bp, Homo sapien
tatccctgttacctagcaaagcatg

SEQ ID NO: 478343 - DNA, 25 bp, Homo sapien
taatgacgctttggctaacaatggg

SEQ ID NO: 478344 - DNA, 25 bp, Homo sapien
tatagagcacaaataaccgttaggc

SEQ ID NO: 478345 - DNA, 25 bp, Homo sapien
taatgcaagagaataccactggtct

SEQ ID NO: 478346 - DNA, 25 bp, Homo sapien
catctctgctttgagctggagaatt

SEQ ID NO: 478347 - DNA, 25 bp, Homo sapien
aaggtacttgatgtataagtgcagc

SEQ ID NO: 478348 - DNA, 25 bp, Homo sapien
cctgcatttgttggactggcacatt

SEQ ID NO: 478349 - DNA, 25 bp, Homo sapien
gctgctgctaatgaactcattcatc

SEQ ID NO: 478350 - DNA, 25 bp, Homo sapien
gcaaacaccaggattatttcactta

SEQ ID NO: 478351 - DNA, 25 bp, Homo sapien
tcacttatgttgtgtttatcattca

SEQ ID NO: 478352 - DNA, 25 bp, Homo sapien
aaacaccaggattatttcacttatg

SEQ ID NO: 478353 - DNA, 25 bp, Homo sapien
ccaggattatttcacttatgttgtg

SEQ ID NO: 478354 - DNA, 25 bp, Homo sapien
gaaatggctcagttgcacttaatag

SEQ ID NO: 478355 - DNA, 25 bp, Homo sapien
tgcaggacaagaccataaatgaatg

SEQ ID NO: 478356 - DNA, 25 bp, Homo sapien
tataccataattgactcatgactgg

SEQ ID NO: 478357 - DNA, 25 bp, Homo sapien
tgcaaagagttgtgctacagtgaga

SEQ ID NO: 478358 - DNA, 25 bp, Homo sapien
tgctctgcagcgtcacagctgctaa

SEQ ID NO: 478359 - DNA, 25 bp, Homo sapien
tactaatgctacagcttgaagatct

SEQ ID NO: 478360 - DNA, 25 bp, Homo sapien
ggctggcagcagctactaatgctac

SEQ ID NO: 478361 - DNA, 25 bp, Homo sapien
tcttgatttctcactgatacttggc

SEQ ID NO: 478362 - DNA, 25 bp, Homo sapien
gcaaaaccgctgcaattcagctgta

SEQ ID NO: 478363 - DNA, 25 bp, Homo sapien
tcctctgagtaagaacttcgcaaaa

SEQ ID NO: 478364 - DNA, 25 bp, Homo sapien
tgtagtctgaagacctcctctgagt

SEQ ID NO: 478365 - DNA, 25 bp, Homo sapien
caaccatgtccattcgtcaaaatca

SEQ ID NO: 478366 - DNA, 25 bp, Homo sapien
caggggagcctggatccctttgcct

SEQ ID NO: 478367 - DNA, 25 bp, Homo sapien
ttaccccacaggtaactcttcttga

SEQ ID NO: 478368 - DNA, 25 bp, Homo sapien
ctgttgctggaatgcggtgtatctg

SEQ ID NO: 478369 - DNA, 25 bp, Homo sapien
tgcggtgtatctggctccctccatt

SEQ ID NO: 478370 - DNA, 25 bp, Homo sapien
tgtccaaagtcatagtacagggtga

SEQ ID NO: 478371 - DNA, 25 bp, Homo sapien
tacacaaaagcagggacacacgtat

SEQ ID NO: 478372 - DNA, 25 bp, Homo sapien
tctactccggttaagtcttctgcca

SEQ ID NO: 478373 - DNA, 25 bp, Homo sapien
cacattctgtacttgcagaccctgg

SEQ ID NO: 478374 - DNA, 25 bp, Homo sapien
gattcagtcgccactgcacatcctg

SEQ ID NO: 478375 - DNA, 25 bp, Homo sapien
tacatcactgaagttcatatcatct

SEQ ID NO: 478376 - DNA, 25 bp, Homo sapien
ttatcagagtgaatgtcatagattc

SEQ ID NO: 478377 - DNA, 25 bp, Homo sapien
tgtgtctaaagtactgccagtgtct

SEQ ID NO: 478378 - DNA, 25 bp, Homo sapien
atcccgggaagtaacatcaccacac

SEQ ID NO: 478379 - DNA, 25 bp, Homo sapien
aatcccgggaagtaacatcaccaca

SEQ ID NO: 478380 - DNA, 25 bp, Homo sapien
caaatcccgggaagtaacatcacca

SEQ ID NO: 478381 - DNA, 25 bp, Homo sapien
cagtggctaagttacagtgggtcaa

SEQ ID NO: 478382 - DNA, 25 bp, Homo sapien
gaagagtctcttgaatatgcatgca

SEQ ID NO: 478383 - DNA, 25 bp, Homo sapien
tattccaggcatatgcagagagaga

SEQ ID NO: 478384 - DNA, 25 bp, Homo sapien
tattggagatattcctagagcaagc

SEQ ID NO: 478385 - DNA, 25 bp, Homo sapien
gtgtcttgtttacgtctttgtcaga

SEQ ID NO: 478386 - DNA, 25 bp, Homo sapien
ggctgtgtcttgtttacgtctttgt

SEQ ID NO: 478387 - DNA, 25 bp, Homo sapien
tgtgtcttgtttacgtctttgtcag

SEQ ID NO: 478388 - DNA, 25 bp, Homo sapien
cttgtttacgtctttgtcagaagtc

SEQ ID NO: 478389 - DNA, 25 bp, Homo sapien
gaaagagcttattaacctcagtcct

SEQ ID NO: 478390 - DNA, 25 bp, Homo sapien
ttagtgagaagataaccatgcagac

SEQ ID NO: 478391 - DNA, 25 bp, Homo sapien
tcattcagaataagagacgtctagg

SEQ ID NO: 478392 - DNA, 25 bp, Homo sapien
atacaatagtgatgtagcctgctca

SEQ ID NO: 478393 - DNA, 25 bp, Homo sapien
tacagaggcccagataacatgctcc

SEQ ID NO: 478394 - DNA, 25 bp, Homo sapien
gaggcccagataacatgctcctatg

SEQ ID NO: 478395 - DNA, 25 bp, Homo sapien
cagaggcccagataacatgctccta

SEQ ID NO: 478396 - DNA, 25 bp, Homo sapien
acagaggcccagataacatgctcct

SEQ ID NO: 478397 - DNA, 25 bp, Homo sapien
tcttgctgaatgacagagcattttc

SEQ ID NO: 478398 - DNA, 25 bp, Homo sapien
ttcttgctgaatgacagagcatttt

SEQ ID NO: 478399 - DNA, 25 bp, Homo sapien
cttgctgaatgacagagcattttct

SEQ ID NO: 478400 - DNA, 25 bp, Homo sapien
tagatatagataaatgtgtacatgt

SEQ ID NO: 478401 - DNA, 25 bp, Homo sapien
tataaatttattgcagttaaccatc

SEQ ID NO: 478402 - DNA, 25 bp, Homo sapien
ttaaccatctgtgatgaaattctca

SEQ ID NO: 478403 - DNA, 25 bp, Homo sapien
gcattcaatcacacccatactataa

SEQ ID NO: 478404 - DNA, 25 bp, Homo sapien
ctcactactaagggtaaggtcttct

SEQ ID NO: 478405 - DNA, 25 bp, Homo sapien
atcaggagttctaccaggaacaagt

SEQ ID NO: 478406 - DNA, 25 bp, Homo sapien
atgtgcaagatcaggagttctacca

SEQ ID NO: 478407 - DNA, 25 bp, Homo sapien
tcatgtgcaagatcaggagttctac

SEQ ID NO: 478408 - DNA, 25 bp, Homo sapien
caggagttctaccaggaacaagtgc

SEQ ID NO: 478409 - DNA, 25 bp, Homo sapien
tgcagaattgcagccacaaaataga

SEQ ID NO: 478410 - DNA, 25 bp, Homo sapien
ctgttgcagaattgcagccacaaaa

SEQ ID NO: 478411 - DNA, 25 bp, Homo sapien
gaattgcagccacaaaatagaccgc

SEQ ID NO: 478412 - DNA, 25 bp, Homo sapien
cagaattgcagccacaaaatagacc

SEQ ID NO: 478413 - DNA, 25 bp, Homo sapien
tttctgtaggacaccagctaccagg

SEQ ID NO: 478414 - DNA, 25 bp, Homo sapien
ccctttgacaggcagaacagttgta

SEQ ID NO: 478415 - DNA, 25 bp, Homo sapien
gattagaaacggtgtgttccactga

SEQ ID NO: 478416 - DNA, 25 bp, Homo sapien
gctgctgctacagcgatgtttctgt

SEQ ID NO: 478417 - DNA, 25 bp, Homo sapien
tcaggagttctaacatgaacaagcg

SEQ ID NO: 478418 - DNA, 25 bp, Homo sapien
taacatgaacaagcgctgaatgtgc

SEQ ID NO: 478419 - DNA, 25 bp, Homo sapien
tgaacaagcgctgaatgtgcgtagc

SEQ ID NO: 478420 - DNA, 25 bp, Homo sapien
tcatgtgcaagatcaggagttctaa

SEQ ID NO: 478421 - DNA, 25 bp, Homo sapien
gcgagatctttaatatgccatatgg

SEQ ID NO: 478422 - DNA, 25 bp, Homo sapien
ttagctagatttattaggcgagatc

SEQ ID NO: 478423 - DNA, 25 bp, Homo sapien
tattaggcgagatctttaatatgcc

SEQ ID NO: 478424 - DNA, 25 bp, Homo sapien
tatgccatatggcagcttggctctt

SEQ ID NO: 478425 - DNA, 25 bp, Homo sapien
cttcaggttgtgctcttatgtacga

SEQ ID NO: 478426 - DNA, 25 bp, Homo sapien
tctgctgcagaaggtaatggtatga

SEQ ID NO: 478427 - DNA, 25 bp, Homo sapien
tttgaggtagtcaaagggagcagac

SEQ ID NO: 478428 - DNA, 25 bp, Homo sapien
tgtacgagttagatttttgcattgc

SEQ ID NO: 478429 - DNA, 25 bp, Homo sapien
gaagtattactttatcttgcagtgc

SEQ ID NO: 478430 - DNA, 25 bp, Homo sapien
atataccatttctagcatcgctcgt

SEQ ID NO: 478431 - DNA, 25 bp, Homo sapien
tctatgcggtttggagattgctttc

SEQ ID NO: 478432 - DNA, 25 bp, Homo sapien
tgtaccaggagcctatgagtttgcc

SEQ ID NO: 478433 - DNA, 25 bp, Homo sapien
ctcttgagattactgaaggttttgc

SEQ ID NO: 478434 - DNA, 25 bp, Homo sapien
catagcctcttgagattactgaagg

SEQ ID NO: 478435 - DNA, 25 bp, Homo sapien
tgcctacatagcctcttgagattac

SEQ ID NO: 478436 - DNA, 25 bp, Homo sapien
aatttttgcctacatagcctcttga

SEQ ID NO: 478437 - DNA, 25 bp, Homo sapien
tgcatctgtagaaactaggaaaatc

SEQ ID NO: 478438 - DNA, 25 bp, Homo sapien
tgtagaaactaggaaaatccagtcc

SEQ ID NO: 478439 - DNA, 25 bp, Homo sapien
ctcttgcatctgtagaaactaggaa

SEQ ID NO: 478440 - DNA, 25 bp, Homo sapien
tttggctcttgcatctgtagaaact

SEQ ID NO: 478441 - DNA, 25 bp, Homo sapien
ctgagtttcaaaagtcaacatccag

SEQ ID NO: 478442 - DNA, 25 bp, Homo sapien
tgagtttcaaaagtcaacatccagg

SEQ ID NO: 478443 - DNA, 25 bp, Homo sapien
gagtttcaaaagtcaacatccaggc

SEQ ID NO: 478444 - DNA, 25 bp, Homo sapien
tttttgaagggtgaacactgacaac

SEQ ID NO: 478445 - DNA, 25 bp, Homo sapien
ttacatttttgaagggtgaacactg

SEQ ID NO: 478446 - DNA, 25 bp, Homo sapien
tcactgcttgaattctgcttcctag

SEQ ID NO: 478447 - DNA, 25 bp, Homo sapien
ttcactgcttgaattctgcttccta

SEQ ID NO: 478448 - DNA, 25 bp, Homo sapien
tcagaggtatccatgtgccccttac

SEQ ID NO: 478449 - DNA, 25 bp, Homo sapien
gaggtatccatgtgccccttacaga

SEQ ID NO: 478450 - DNA, 25 bp, Homo sapien
ccatgccagtttcatgtgtttgcct

SEQ ID NO: 478451 - DNA, 25 bp, Homo sapien
tctgtgaaatatatcatcatccatg

SEQ ID NO: 478452 - DNA, 25 bp, Homo sapien
tccacaggctgcaaatcaccaaact

SEQ ID NO: 478453 - DNA, 25 bp, Homo sapien
tttcacgagattgtgcttggcttcc

SEQ ID NO: 478454 - DNA, 25 bp, Homo sapien
tttccaacgtctaagctttcacgag

SEQ ID NO: 478455 - DNA, 25 bp, Homo sapien
tgttcaccttatgaggaacacaatg

SEQ ID NO: 478456 - DNA, 25 bp, Homo sapien
cagtattttggactctcttgaggac

SEQ ID NO: 478457 - DNA, 25 bp, Homo sapien
ccttgtagtaagtggtcagctgcct

SEQ ID NO: 478458 - DNA, 25 bp, Homo sapien
tagccttggattgctccacggtgag

SEQ ID NO: 478459 - DNA, 25 bp, Homo sapien
gatcagtcttctctcgttggaccaa

SEQ ID NO: 478460 - DNA, 25 bp, Homo sapien
attcagatacttgcaatgatagttt

SEQ ID NO: 478461 - DNA, 25 bp, Homo sapien
cttcttaaattcagatacttgcaat

SEQ ID NO: 478462 - DNA, 25 bp, Homo sapien
ttaaattcagatacttgcaatgata

SEQ ID NO: 478463 - DNA, 25 bp, Homo sapien
ttcagatacttgcaatgatagtttt

SEQ ID NO: 478464 - DNA, 25 bp, Homo sapien
tgattgggtgaagggttagtacttg

SEQ ID NO: 478465 - DNA, 25 bp, Homo sapien
taaaatcagactgtagtttgctttc

SEQ ID NO: 478466 - DNA, 25 bp, Homo sapien
ctgctgggtcccctttgattgggtg

SEQ ID NO: 478467 - DNA, 25 bp, Homo sapien
tggacttacagttaatcttctggaa

SEQ ID NO: 478468 - DNA, 25 bp, Homo sapien
tgggtcactctatctttaaggcctg

SEQ ID NO: 478469 - DNA, 25 bp, Homo sapien
ttgggtcactctatctttaaggcct

SEQ ID NO: 478470 - DNA, 25 bp, Homo sapien
agaccacctacacccatgtggagag

SEQ ID NO: 478471 - DNA, 25 bp, Homo sapien
ccacagaaccgacggcctttgtaag

SEQ ID NO: 478472 - DNA, 25 bp, Homo sapien
tcaggtatttaacgccacgatttca

SEQ ID NO: 478473 - DNA, 25 bp, Homo sapien
ttcaggataggtcctgaaaacaact

SEQ ID NO: 478474 - DNA, 25 bp, Homo sapien
ttcactattttaccttggtcagctc

SEQ ID NO: 478475 - DNA, 25 bp, Homo sapien
cttaaatggtgcactaggaaccacc

SEQ ID NO: 478476 - DNA, 25 bp, Homo sapien
tgttcatttggagtggaagctgagc

SEQ ID NO: 478477 - DNA, 25 bp, Homo sapien
gttgttgcccatacacatgctggag

SEQ ID NO: 478478 - DNA, 25 bp, Homo sapien
gagctgcctgaaagactggtggaaa

SEQ ID NO: 478479 - DNA, 25 bp, Homo sapien
tgtttggtcataagaaagggtagga

SEQ ID NO: 478480 - DNA, 25 bp, Homo sapien
taatctagtggtatatggaagtcaa

SEQ ID NO: 478481 - DNA, 25 bp, Homo sapien
cacatacatcccagttagaagccat

SEQ ID NO: 478482 - DNA, 25 bp, Homo sapien
tattcattggctatagtcacataca

SEQ ID NO: 478483 - DNA, 25 bp, Homo sapien
agagctcctgaaactactaagatag

SEQ ID NO: 478484 - DNA, 25 bp, Homo sapien
tggaggatcgggaaagctaacaacc

SEQ ID NO: 478485 - DNA, 25 bp, Homo sapien
tcagaggtgcataaagggacataat

SEQ ID NO: 478486 - DNA, 25 bp, Homo sapien
taatggacgcactaaagtcagctgg

SEQ ID NO: 478487 - DNA, 25 bp, Homo sapien
ccgaaattcacaggccgagtcaaag

SEQ ID NO: 478488 - DNA, 25 bp, Homo sapien
tcagagctgcaatccgagttccgag

SEQ ID NO: 478489 - DNA, 25 bp, Homo sapien
gatctcttcctagtcggtagaaagg

SEQ ID NO: 478490 - DNA, 25 bp, Homo sapien
gagcctgtgagagtcctcctgaaat

SEQ ID NO: 478491 - DNA, 25 bp, Homo sapien
ccccagatggaaacggtgcaatcaa

SEQ ID NO: 478492 - DNA, 25 bp, Homo sapien
gcaacatacaaatccagctcggtaa

SEQ ID NO: 478493 - DNA, 25 bp, Homo sapien
cgatggcaagccaacaagggctggc

SEQ ID NO: 478494 - DNA, 25 bp, Homo sapien
tctggactgcgctcagcaaactttt

SEQ ID NO: 478495 - DNA, 25 bp, Homo sapien
gggatgtccgccaggctgaatccct

SEQ ID NO: 478496 - DNA, 25 bp, Homo sapien
gtacgcctggcggacctctccgcag

SEQ ID NO: 478497 - DNA, 25 bp, Homo sapien
tgaatcccttggcaccgtacgcctg

SEQ ID NO: 478498 - DNA, 25 bp, Homo sapien
tcacagccccgatccaagaaggcat

SEQ ID NO: 478499 - DNA, 25 bp, Homo sapien
aaggcgccactcagactgtggcgct

SEQ ID NO: 478500 - DNA, 25 bp, Homo sapien
cgggagtggagaaggcgccactcag

SEQ ID NO: 478501 - DNA, 25 bp, Homo sapien
gagtggagaaggcgccactcagact

SEQ ID NO: 478502 - DNA, 25 bp, Homo sapien
tggagaaggcgccactcagactgtg

SEQ ID NO: 478503 - DNA, 25 bp, Homo sapien
tataccaataatgaccaagcttaga

SEQ ID NO: 478504 - DNA, 25 bp, Homo sapien
gccaatgatatgttcctatacctaa

SEQ ID NO: 478505 - DNA, 25 bp, Homo sapien
tcagtggcactgctatataccaata

SEQ ID NO: 478506 - DNA, 25 bp, Homo sapien
ggttacaaggccaacccatgcaaat

SEQ ID NO: 478507 - DNA, 25 bp, Homo sapien
cagcgaaagtggttccattcctctc

SEQ ID NO: 478508 - DNA, 25 bp, Homo sapien
gcagcgaaagtggttccattcctct

SEQ ID NO: 478509 - DNA, 25 bp, Homo sapien
agcgaaagtggttccattcctctct

SEQ ID NO: 478510 - DNA, 25 bp, Homo sapien
tgcagcgaaagtggttccattcctc

SEQ ID NO: 478511 - DNA, 25 bp, Homo sapien
tgcttcgtgggccaaactagaaggg

SEQ ID NO: 478512 - DNA, 25 bp, Homo sapien
gacgcccacgtgaaaatctgctagc

SEQ ID NO: 478513 - DNA, 25 bp, Homo sapien
tgctagctaactcaggagatggcca

SEQ ID NO: 478514 - DNA, 25 bp, Homo sapien
gaaagaagctcccaagcgagatttg

SEQ ID NO: 478515 - DNA, 25 bp, Homo sapien
tctgccgcccaggcctgaatgcagt

SEQ ID NO: 478516 - DNA, 25 bp, Homo sapien
ctctgccgcccaggcctgaatgcag

SEQ ID NO: 478517 - DNA, 25 bp, Homo sapien
tccgcctctggggttcacctcctgc

SEQ ID NO: 478518 - DNA, 25 bp, Homo sapien
ctctggggttcacctcctgcctcaa

SEQ ID NO: 478519 - DNA, 25 bp, Homo sapien
caggctcctgtaagagcagcggatt

SEQ ID NO: 478520 - DNA, 25 bp, Homo sapien
gctccataaataaggctcccttgtg

SEQ ID NO: 478521 - DNA, 25 bp, Homo sapien
gcagcggattggaaacatcctggct

SEQ ID NO: 478522 - DNA, 25 bp, Homo sapien
ctgcagcacagaactggcgaggcac

SEQ ID NO: 478523 - DNA, 25 bp, Homo sapien
ttctggaattcactcatttcatcac

SEQ ID NO: 478524 - DNA, 25 bp, Homo sapien
gttctggaattcactcatttcatca

SEQ ID NO: 478525 - DNA, 25 bp, Homo sapien
tagttctggaattcactcatttcat

SEQ ID NO: 478526 - DNA, 25 bp, Homo sapien
ctagttctggaattcactcatttca

SEQ ID NO: 478527 - DNA, 25 bp, Homo sapien
atgctcctagttccagagattcatc

SEQ ID NO: 478528 - DNA, 25 bp, Homo sapien
tgctcctagttccagagattcatca

SEQ ID NO: 478529 - DNA, 25 bp, Homo sapien
tccctatggataccgagggatatct

SEQ ID NO: 478530 - DNA, 25 bp, Homo sapien
gcagtggtgcataatccctaaggag

SEQ ID NO: 478531 - DNA, 25 bp, Homo sapien
gttttcagtgtaccattaaactcac

SEQ ID NO: 478532 - DNA, 25 bp, Homo sapien
ttaccacagctattttctgcagtgg

SEQ ID NO: 478533 - DNA, 25 bp, Homo sapien
tactgggtcttacgaactcaacctc

SEQ ID NO: 478534 - DNA, 25 bp, Homo sapien
ttgtattaatgaacgtactgggtct

SEQ ID NO: 478535 - DNA, 25 bp, Homo sapien
caaaatattcatgcccgaatgccct

SEQ ID NO: 478536 - DNA, 25 bp, Homo sapien
caacaggcccttaactctgacattt

SEQ ID NO: 478537 - DNA, 25 bp, Homo sapien
tcaaggaagctcatatgcacgtgct

SEQ ID NO: 478538 - DNA, 25 bp, Homo sapien
tgtaagttactctagggctgcgaaa

SEQ ID NO: 478539 - DNA, 25 bp, Homo sapien
gacaatcgtaactaatgctccccag

SEQ ID NO: 478540 - DNA, 25 bp, Homo sapien
tttacgtagcaagaaaggctccatc

SEQ ID NO: 478541 - DNA, 25 bp, Homo sapien
gttctttgccaataatgaaaattgg

SEQ ID NO: 478542 - DNA, 25 bp, Homo sapien
tttgttctttgccaataatgaaaat

SEQ ID NO: 478543 - DNA, 25 bp, Homo sapien
tgggtgttttgttctttgccaataa

SEQ ID NO: 478544 - DNA, 25 bp, Homo sapien
ttgggtgttttgttctttgccaata

SEQ ID NO: 478545 - DNA, 25 bp, Homo sapien
taagcaacttcgagacaggcaatgc

SEQ ID NO: 478546 - DNA, 25 bp, Homo sapien
aatgcatgaactaccttacacaggc

SEQ ID NO: 478547 - DNA, 25 bp, Homo sapien
gaagcattgagaagagtctgggcca

SEQ ID NO: 478548 - DNA, 25 bp, Homo sapien
cacattgctgtgctatggatgcagg

SEQ ID NO: 478549 - DNA, 25 bp, Homo sapien
tagaaccaaacatagtgccaaggct

SEQ ID NO: 478550 - DNA, 25 bp, Homo sapien
aactttggatggctacgactcctga

SEQ ID NO: 478551 - DNA, 25 bp, Homo sapien
tcaaggaacgcatctggcggctgaa

SEQ ID NO: 478552 - DNA, 25 bp, Homo sapien
tgaactcccggcctagaagaaacat

SEQ ID NO: 478553 - DNA, 25 bp, Homo sapien
gaagagtaattaacatggtggtccc

SEQ ID NO: 478554 - DNA, 25 bp, Homo sapien
tcacctctcctagtcaagcacatat

SEQ ID NO: 478555 - DNA, 25 bp, Homo sapien
gagagtaactctgggaactatgaag

SEQ ID NO: 478556 - DNA, 25 bp, Homo sapien
gtcaagcacatatattggtcctaaa

SEQ ID NO: 478557 - DNA, 25 bp, Homo sapien
ctgccaaaatcaaatgggcactgga

SEQ ID NO: 478558 - DNA, 25 bp, Homo sapien
tcctcatggctcaccaacacagact

SEQ ID NO: 478559 - DNA, 25 bp, Homo sapien
aaatcaaatgggcactggagtattc

SEQ ID NO: 478560 - DNA, 25 bp, Homo sapien
ccaaaatcaaatgggcactggagta

SEQ ID NO: 478561 - DNA, 25 bp, Homo sapien
gaagcacatgcctcctagagatgac

SEQ ID NO: 478562 - DNA, 25 bp, Homo sapien
acccagttggtgttggatcccagct

SEQ ID NO: 478563 - DNA, 25 bp, Homo sapien
gaagaccgtccactagtcaaggcat

SEQ ID NO: 478564 - DNA, 25 bp, Homo sapien
ggctcttcacgtgttgctccaagga

SEQ ID NO: 478565 - DNA, 25 bp, Homo sapien
aaacagaaagtagagaatgatcctg

SEQ ID NO: 478566 - DNA, 25 bp, Homo sapien
aaagtagagaatgatcctgttgtgg

SEQ ID NO: 478567 - DNA, 25 bp, Homo sapien
ggatttcaagaatctgaagttgagg

SEQ ID NO: 478568 - DNA, 25 bp, Homo sapien
cagaaagtagagaatgatcctgttg

SEQ ID NO: 478569 - DNA, 25 bp, Homo sapien
taatttccttggctatggacggagg

SEQ ID NO: 478570 - DNA, 25 bp, Homo sapien
gagaagagtctcgaataagctgctc

SEQ ID NO: 478571 - DNA, 25 bp, Homo sapien
cagaaaaggtatgtttgacgggaca

SEQ ID NO: 478572 - DNA, 25 bp, Homo sapien
cgggacaagaggacatgagtatgac

SEQ ID NO: 478573 - DNA, 25 bp, Homo sapien
gcttccgcacttcctcacattgcca

SEQ ID NO: 478574 - DNA, 25 bp, Homo sapien
gcacttcctcacattgccaattgct

SEQ ID NO: 478575 - DNA, 25 bp, Homo sapien
aactggcttccgcacttcctcacat

SEQ ID NO: 478576 - DNA, 25 bp, Homo sapien
tcctcacattgccaattgctgtcct

SEQ ID NO: 478577 - DNA, 25 bp, Homo sapien
caagctgtataaactgtgggtgtct

SEQ ID NO: 478578 - DNA, 25 bp, Homo sapien
gtaggtttcacgctggctccagttg

SEQ ID NO: 478579 - DNA, 25 bp, Homo sapien
caaagggccaccactcaagctgtat

SEQ ID NO: 478580 - DNA, 25 bp, Homo sapien
gaacacatagctccaaagctgaaat

SEQ ID NO: 478581 - DNA, 25 bp, Homo sapien
tgtctagcgaggcaatcaaccagtg

SEQ ID NO: 478582 - DNA, 25 bp, Homo sapien
gatagaggtaagtcaaacgcctagt

SEQ ID NO: 478583 - DNA, 25 bp, Homo sapien
taacacctacagctttttagtgcag

SEQ ID NO: 478584 - DNA, 25 bp, Homo sapien
tttagtgcaggctcagaatatgaca

SEQ ID NO: 478585 - DNA, 25 bp, Homo sapien
gggttcgagactatcccagccaaga

SEQ ID NO: 478586 - DNA, 25 bp, Homo sapien
tgaagaagaatcaataggccaggca

SEQ ID NO: 478587 - DNA, 25 bp, Homo sapien
gttcgagactatcccagccaagatg

SEQ ID NO: 478588 - DNA, 25 bp, Homo sapien
agtgaagaagaatcaataggccagg

SEQ ID NO: 478589 - DNA, 25 bp, Homo sapien
tgggatacccaaatgaaacaccgtg

SEQ ID NO: 478590 - DNA, 25 bp, Homo sapien
gcaaggcctatctaagtcattcacg

SEQ ID NO: 478591 - DNA, 25 bp, Homo sapien
tctcccaaggactcaatctgcaagg

SEQ ID NO: 478592 - DNA, 25 bp, Homo sapien
tcttcaaactaaggatggtaacacg

SEQ ID NO: 478593 - DNA, 25 bp, Homo sapien
gaatggttgaatcagcataactcca

SEQ ID NO: 478594 - DNA, 25 bp, Homo sapien
gaattttaccattaatggccactgg

SEQ ID NO: 478595 - DNA, 25 bp, Homo sapien
gtataaaaccttgagccaaatatgg

SEQ ID NO: 478596 - DNA, 25 bp, Homo sapien
cttttcagctaatgggatggctcca

SEQ ID NO: 478597 - DNA, 25 bp, Homo sapien
cactttcactgcacagattggcaga

SEQ ID NO: 478598 - DNA, 25 bp, Homo sapien
gacgattccgattctctaagtggtt

SEQ ID NO: 478599 - DNA, 25 bp, Homo sapien
tactttccgctcagtaggagacact

SEQ ID NO: 478600 - DNA, 25 bp, Homo sapien
cacaaccttatacttgacgattccg

SEQ ID NO: 478601 - DNA, 25 bp, Homo sapien
attttataggctctggtatccgtgg

SEQ ID NO: 478602 - DNA, 25 bp, Homo sapien
tgggctacagtaaaatgacctctca

SEQ ID NO: 478603 - DNA, 25 bp, Homo sapien
cacagcacacaatagaattctcata

SEQ ID NO: 478604 - DNA, 25 bp, Homo sapien
tatccgtggaccatactaacttttg

SEQ ID NO: 478605 - DNA, 25 bp, Homo sapien
gaggcccataccctagaactcaagc

SEQ ID NO: 478606 - DNA, 25 bp, Homo sapien
ggtcacggagttaaaggcttccaca

SEQ ID NO: 478607 - DNA, 25 bp, Homo sapien
gaccaaacactgcacaatagatcca

SEQ ID NO: 478608 - DNA, 25 bp, Homo sapien
aaagcgagtaagattccagaggaca

SEQ ID NO: 478609 - DNA, 25 bp, Homo sapien
cattttctctgtttgagcgggaaac

SEQ ID NO: 478610 - DNA, 25 bp, Homo sapien
gaaactcatcttggttcctagggcc

SEQ ID NO: 478611 - DNA, 25 bp, Homo sapien
tcctagggcctatgtatggcaagaa

SEQ ID NO: 478612 - DNA, 25 bp, Homo sapien
tctcttgcaacctgtagataatggc

SEQ ID NO: 478613 - DNA, 25 bp, Homo sapien
taagtgcctgacagtactcgagcag

SEQ ID NO: 478614 - DNA, 25 bp, Homo sapien
gagcatcctgacagcagagattatg

SEQ ID NO: 478615 - DNA, 25 bp, Homo sapien
tctcaccttggatgggtttacagcc

SEQ ID NO: 478616 - DNA, 25 bp, Homo sapien
caaagggttacattcagaggaacca

SEQ ID NO: 478617 - DNA, 25 bp, Homo sapien
tcaatgagcatagagtcagggacca

SEQ ID NO: 478618 - DNA, 25 bp, Homo sapien
tgcatggggtgtctttgctagagtc

SEQ ID NO: 478619 - DNA, 25 bp, Homo sapien
gacaaatcaatgagcatagagtcag

SEQ ID NO: 478620 - DNA, 25 bp, Homo sapien
aatgtgtgcgccaatattgcatggg

SEQ ID NO: 478621 - DNA, 25 bp, Homo sapien
gaatacatccgtgttagccaagtgt

SEQ ID NO: 478622 - DNA, 25 bp, Homo sapien
gaaaggcgtgttctccaactgtcat

SEQ ID NO: 478623 - DNA, 25 bp, Homo sapien
tttctggatcatgcccacctcggag

SEQ ID NO: 478624 - DNA, 25 bp, Homo sapien
acttgccccggcttatgaaaggcgg

SEQ ID NO: 478625 - DNA, 25 bp, Homo sapien
ggattgaacttgagccctccttggg

SEQ ID NO: 478626 - DNA, 25 bp, Homo sapien
tcaggtctcaggaacgcaataggct

SEQ ID NO: 478627 - DNA, 25 bp, Homo sapien
gcaataggcttgaggtaacactgga

SEQ ID NO: 478628 - DNA, 25 bp, Homo sapien
caagccctttcctagatgccaggga

SEQ ID NO: 478629 - DNA, 25 bp, Homo sapien
ccttccagctactttagctctaaga

SEQ ID NO: 478630 - DNA, 25 bp, Homo sapien
cagtcacgagtatttctagcagtaa

SEQ ID NO: 478631 - DNA, 25 bp, Homo sapien
tagcagtaattagtatttctaccca

SEQ ID NO: 478632 - DNA, 25 bp, Homo sapien
tttattcagtcacgagtatttctag

SEQ ID NO: 478633 - DNA, 25 bp, Homo sapien
tgccaagtgctattccaggtaccag

SEQ ID NO: 478634 - DNA, 25 bp, Homo sapien
taggtatactacgaggtacatgaga

SEQ ID NO: 478635 - DNA, 25 bp, Homo sapien
cactgtggtctggtcccactggatt

SEQ ID NO: 478636 - DNA, 25 bp, Homo sapien
caggtaccaggaatacggcagcaaa

SEQ ID NO: 478637 - DNA, 25 bp, Homo sapien
tagtgtcagcacacaagacttgctc

SEQ ID NO: 478638 - DNA, 25 bp, Homo sapien
gtttgcttcaacagtcagacaggac

SEQ ID NO: 478639 - DNA, 25 bp, Homo sapien
gataaaaccttgcacataatcctgt

SEQ ID NO: 478640 - DNA, 25 bp, Homo sapien
tatgcacctaatgaacacccacatg

SEQ ID NO: 478641 - DNA, 25 bp, Homo sapien
cttgtgactacactgtgtggcacat

SEQ ID NO: 478642 - DNA, 25 bp, Homo sapien
tctgcgcacttatgtctgactgcac

SEQ ID NO: 478643 - DNA, 25 bp, Homo sapien
tgctccacgtctgtagccactaaga

SEQ ID NO: 478644 - DNA, 25 bp, Homo sapien
gactgcactaagtggttctttctca

SEQ ID NO: 478645 - DNA, 25 bp, Homo sapien
atggagcttcccaagtcatttcctc

SEQ ID NO: 478646 - DNA, 25 bp, Homo sapien
tactaatggagcttcccaagtcatt

SEQ ID NO: 478647 - DNA, 25 bp, Homo sapien
tctactaatggagcttcccaagtca

SEQ ID NO: 478648 - DNA, 25 bp, Homo sapien
ctaatggagcttcccaagtcatttc

SEQ ID NO: 478649 - DNA, 25 bp, Homo sapien
ctcttaacagctgatgggatgctga

SEQ ID NO: 478650 - DNA, 25 bp, Homo sapien
tcttaacagctgatgggatgctgat

SEQ ID NO: 478651 - DNA, 25 bp, Homo sapien
gctgtgctatgtagtagctgaaccg

SEQ ID NO: 478652 - DNA, 25 bp, Homo sapien
tgtgccattatgtctgtgggccatg

SEQ ID NO: 478653 - DNA, 25 bp, Homo sapien
gaggctccaggcataatatcagtct

SEQ ID NO: 478654 - DNA, 25 bp, Homo sapien
gctgaaccgaaacaacataagactg

SEQ ID NO: 478655 - DNA, 25 bp, Homo sapien
catcatggcagaacgtatgggctag

SEQ ID NO: 478656 - DNA, 25 bp, Homo sapien
tttaccactgagaattggcatgcag

SEQ ID NO: 478657 - DNA, 25 bp, Homo sapien
gcctccagcatgtctgtcagataga

SEQ ID NO: 478658 - DNA, 25 bp, Homo sapien
taaatgggcaagcagaagtgtgact

SEQ ID NO: 478659 - DNA, 25 bp, Homo sapien
ccttggccctatgtgcagaatcatg

SEQ ID NO: 478660 - DNA, 25 bp, Homo sapien
gaactcctccaaggcaactcgatga

SEQ ID NO: 478661 - DNA, 25 bp, Homo sapien
ttatttatgaacagcggcatgcaca

SEQ ID NO: 478662 - DNA, 25 bp, Homo sapien
tcattaatgctcaggctatcagact

SEQ ID NO: 478663 - DNA, 25 bp, Homo sapien
gtatccagattacgttactcagtct

SEQ ID NO: 478664 - DNA, 25 bp, Homo sapien
caagacatttattactggatgggac

SEQ ID NO: 478665 - DNA, 25 bp, Homo sapien
caaatgttaatgcaagtatccagat

SEQ ID NO: 478666 - DNA, 25 bp, Homo sapien
tacagaggcaagtctcctatttata

SEQ ID NO: 478667 - DNA, 25 bp, Homo sapien
tctactccttccacagaagtacgca

SEQ ID NO: 478668 - DNA, 25 bp, Homo sapien
ggaagtgttggagctcctagcagct

SEQ ID NO: 478669 - DNA, 25 bp, Homo sapien
agcttctactccttccacagaagta

SEQ ID NO: 478670 - DNA, 25 bp, Homo sapien
cagccactaaaaagtgggaagtgtt

SEQ ID NO: 478671 - DNA, 25 bp, Homo sapien
cattttcatttcaggaatgaatcct

SEQ ID NO: 478672 - DNA, 25 bp, Homo sapien
tccattttcatttcaggaatgaatc

SEQ ID NO: 478673 - DNA, 25 bp, Homo sapien
tcataaagatgcaccttccattttc

SEQ ID NO: 478674 - DNA, 25 bp, Homo sapien
ttttcatttcaggaatgaatcctcc

SEQ ID NO: 478675 - DNA, 25 bp, Homo sapien
acaggtctactgttaaagtccgttg

SEQ ID NO: 478676 - DNA, 25 bp, Homo sapien
tgtaagaaaaccactagtgcatgga

SEQ ID NO: 478677 - DNA, 25 bp, Homo sapien
catggagatccttgggttgtactgc

SEQ ID NO: 478678 - DNA, 25 bp, Homo sapien
tctctgaactcgtctatgtaagaaa

SEQ ID NO: 478679 - DNA, 25 bp, Homo sapien
caacttttacagaagctagaatcca

SEQ ID NO: 478680 - DNA, 25 bp, Homo sapien
agtgtcatgtcggtagaaaatttgc

SEQ ID NO: 478681 - DNA, 25 bp, Homo sapien
gggcaatcctgattagagtctgtca

SEQ ID NO: 478682 - DNA, 25 bp, Homo sapien
ttcaagtcttatctatacccagggc

SEQ ID NO: 478683 - DNA, 25 bp, Homo sapien
caaagaagtcgctttgtggagcttc

SEQ ID NO: 478684 - DNA, 25 bp, Homo sapien
aagttgccccaaatgagatggctgg

SEQ ID NO: 478685 - DNA, 25 bp, Homo sapien
cacaaactgtcctatgtctagaagg

SEQ ID NO: 478686 - DNA, 25 bp, Homo sapien
tttcataagcacctgaaattggagc

SEQ ID NO: 478687 - DNA, 25 bp, Homo sapien
gcaaacgtccatgaaacacagatct

SEQ ID NO: 478688 - DNA, 25 bp, Homo sapien
tgcaggggccaaatactgtggctac

SEQ ID NO: 478689 - DNA, 25 bp, Homo sapien
tcgcaaacgtccatgaaacacagat

SEQ ID NO: 478690 - DNA, 25 bp, Homo sapien
tttcgcaaacgtccatgaaacacag

SEQ ID NO: 478691 - DNA, 25 bp, Homo sapien
ctggtcttctggtctaccagatgag

SEQ ID NO: 478692 - DNA, 25 bp, Homo sapien
gtctaccagatgagttgtgacggcc

SEQ ID NO: 478693 - DNA, 25 bp, Homo sapien
ctaccagatgagttgtgacggccat

SEQ ID NO: 478694 - DNA, 25 bp, Homo sapien
tctggtctaccagatgagttgtgac

SEQ ID NO: 478695 - DNA, 25 bp, Homo sapien
aaccagaacaactgaagagccagat

SEQ ID NO: 478696 - DNA, 25 bp, Homo sapien
ttgaaaccagaacaactgaagagcc

SEQ ID NO: 478697 - DNA, 25 bp, Homo sapien
caactgaagagccagatgtccagct

SEQ ID NO: 478698 - DNA, 25 bp, Homo sapien
cagaacaactgaagagccagatgtc

SEQ ID NO: 478699 - DNA, 25 bp, Homo sapien
ttatcgtgcttgatgttgctcagcc

SEQ ID NO: 478700 - DNA, 25 bp, Homo sapien
tcgagcttgcccttcaaatttaaat

SEQ ID NO: 478701 - DNA, 25 bp, Homo sapien
tacttgtacaattgtcaaatcgagc

SEQ ID NO: 478702 - DNA, 25 bp, Homo sapien
ttgcttgtaggtttgcttccaagct

SEQ ID NO: 478703 - DNA, 25 bp, Homo sapien
cctccaaatatagttctacactcat

SEQ ID NO: 478704 - DNA, 25 bp, Homo sapien
ctcctccaaatatagttctacactc

SEQ ID NO: 478705 - DNA, 25 bp, Homo sapien
cctcctccaaatatagttctacact

SEQ ID NO: 478706 - DNA, 25 bp, Homo sapien
tcctccaaatatagttctacactca

SEQ ID NO: 478707 - DNA, 25 bp, Homo sapien
tcttgagtgtgacatgttgtacaag

SEQ ID NO: 478708 - DNA, 25 bp, Homo sapien
ttttcaggtgtaatttctaacacat

SEQ ID NO: 478709 - DNA, 25 bp, Homo sapien
tccacatggattaatgtcttgagtg

SEQ ID NO: 478710 - DNA, 25 bp, Homo sapien
gtgtgacatgttgtacaaggctttc

SEQ ID NO: 478711 - DNA, 25 bp, Homo sapien
tcagataggagccaccagcacttct

SEQ ID NO: 478712 - DNA, 25 bp, Homo sapien
gcttccaatctgctgctaagtttga

SEQ ID NO: 478713 - DNA, 25 bp, Homo sapien
tttcaacctcttccatggcaaagaa

SEQ ID NO: 478714 - DNA, 25 bp, Homo sapien
aaaatgcctccggattttagcctat

SEQ ID NO: 478715 - DNA, 25 bp, Homo sapien
tagtcctagagcctgaatggtatct

SEQ ID NO: 478716 - DNA, 25 bp, Homo sapien
tagagcctgaatggtatcttatctg

SEQ ID NO: 478717 - DNA, 25 bp, Homo sapien
ttagaagatgccaaaaacttcatat

SEQ ID NO: 478718 - DNA, 25 bp, Homo sapien
gatgtttttagtcctagagcctgaa

SEQ ID NO: 478719 - DNA, 25 bp, Homo sapien
aagaaggtgtgatcagaataatcaa

SEQ ID NO: 478720 - DNA, 25 bp, Homo sapien
ggtgtgatcagaataatcaagggat

SEQ ID NO: 478721 - DNA, 25 bp, Homo sapien
ggatgagcatagaagaaggtgtgat

SEQ ID NO: 478722 - DNA, 25 bp, Homo sapien
tcagaataatcaagggataaagcat

SEQ ID NO: 478723 - DNA, 25 bp, Homo sapien
caatagggtgaaatcatcccccaag

SEQ ID NO: 478724 - DNA, 25 bp, Homo sapien
ttcccaatagggtgaaatcatcccc

SEQ ID NO: 478725 - DNA, 25 bp, Homo sapien
agggtgaaatcatcccccaaggagg

SEQ ID NO: 478726 - DNA, 25 bp, Homo sapien
tagggtgaaatcatcccccaaggag

SEQ ID NO: 478727 - DNA, 25 bp, Homo sapien
atgcttgcccagatgttcattttca

SEQ ID NO: 478728 - DNA, 25 bp, Homo sapien
tcactacaagatgctgaggtgacag

SEQ ID NO: 478729 - DNA, 25 bp, Homo sapien
tcccaaatgcttgcccagatgttca

SEQ ID NO: 478730 - DNA, 25 bp, Homo sapien
gaaatgtgattctgccagatcccac

SEQ ID NO: 478731 - DNA, 25 bp, Homo sapien
ccacctttttacagagctcttcaca

SEQ ID NO: 478732 - DNA, 25 bp, Homo sapien
tagggcacttgaagtgaatgccagt

SEQ ID NO: 478733 - DNA, 25 bp, Homo sapien
gccagtgagttccttgggtccccac

SEQ ID NO: 478734 - DNA, 25 bp, Homo sapien
ttgaagtgaatgccagtgagttcct

SEQ ID NO: 478735 - DNA, 25 bp, Homo sapien
ctgggccacagcacatcagtgtatc

SEQ ID NO: 478736 - DNA, 25 bp, Homo sapien
atccccatgaactctatctgggcca

SEQ ID NO: 478737 - DNA, 25 bp, Homo sapien
agccatccccatgaactctatctgg

SEQ ID NO: 478738 - DNA, 25 bp, Homo sapien
cacatcagtgtatctaacattccaa

SEQ ID NO: 478739 - DNA, 25 bp, Homo sapien
gtggtgcagcatgtatattcctgag

SEQ ID NO: 478740 - DNA, 25 bp, Homo sapien
tggtgcagcatgtatattcctgagg

SEQ ID NO: 478741 - DNA, 25 bp, Homo sapien
tgcagcatgtatattcctgaggaca

SEQ ID NO: 478742 - DNA, 25 bp, Homo sapien
ggtgcagcatgtatattcctgagga

SEQ ID NO: 478743 - DNA, 25 bp, Homo sapien
aaagtggtgcgcacaaaatggcttg

SEQ ID NO: 478744 - DNA, 25 bp, Homo sapien
cacaaggttttcaaattcgagtttg

SEQ ID NO: 478745 - DNA, 25 bp, Homo sapien
gctttgttggcttaacttgtcttcc

SEQ ID NO: 478746 - DNA, 25 bp, Homo sapien
caaatttcttatgcctggacacaaa

SEQ ID NO: 478747 - DNA, 25 bp, Homo sapien
tacgtgtagaccagaccagaacaaa

SEQ ID NO: 478748 - DNA, 25 bp, Homo sapien
gacagactttgtggacttgcataca

SEQ ID NO: 478749 - DNA, 25 bp, Homo sapien
tgcatgagcacatcttagaacagcc

SEQ ID NO: 478750 - DNA, 25 bp, Homo sapien
gtttagagtcaagcctgcatgagca

SEQ ID NO: 478751 - DNA, 25 bp, Homo sapien
gaatctgctggtaccaaatcccaga

SEQ ID NO: 478752 - DNA, 25 bp, Homo sapien
taagcacactatgcagttgaaccag

SEQ ID NO: 478753 - DNA, 25 bp, Homo sapien
caagaacccttctggtagaactggt

SEQ ID NO: 478754 - DNA, 25 bp, Homo sapien
cactgaagatcaggcctcactggag

SEQ ID NO: 478755 - DNA, 25 bp, Homo sapien
aactccctaaagactcatcaaccag

SEQ ID NO: 478756 - DNA, 25 bp, Homo sapien
gaaactatacacaacccagaatagt

SEQ ID NO: 478757 - DNA, 25 bp, Homo sapien
aaactatacacaacccagaatagtc

SEQ ID NO: 478758 - DNA, 25 bp, Homo sapien
tagcaaagaacaacagctgctgctg

SEQ ID NO: 478759 - DNA, 25 bp, Homo sapien
tcagaaacacgctgtagcaaagaac

SEQ ID NO: 478760 - DNA, 25 bp, Homo sapien
gctgctgctgaatcccaatccacaa

SEQ ID NO: 478761 - DNA, 25 bp, Homo sapien
gctgctgaatcccaatccacaaagc

SEQ ID NO: 478762 - DNA, 25 bp, Homo sapien
tcctgttaaactgggatcctgcctc

SEQ ID NO: 478763 - DNA, 25 bp, Homo sapien
gatcgctgttggtggctatatctcc

SEQ ID NO: 478764 - DNA, 25 bp, Homo sapien
tacttgtggcatctataactaggtc

SEQ ID NO: 478765 - DNA, 25 bp, Homo sapien
caggctccagacgtttttcttgaca

SEQ ID NO: 478766 - DNA, 25 bp, Homo sapien
tgataaatatctcaagtgcctagaa

SEQ ID NO: 478767 - DNA, 25 bp, Homo sapien
tatagtgttcatcacataccatctg

SEQ ID NO: 478768 - DNA, 25 bp, Homo sapien
tataatataacctatccaagcaggg

SEQ ID NO: 478769 - DNA, 25 bp, Homo sapien
gctatttacgatcttggcaccacat

SEQ ID NO: 478770 - DNA, 25 bp, Homo sapien
tcttcgatgctgttatctcagaatg

SEQ ID NO: 478771 - DNA, 25 bp, Homo sapien
gatctatgtttcttcgatgctgtta

SEQ ID NO: 478772 - DNA, 25 bp, Homo sapien
ctttgatctatgtttcttcgatgct

SEQ ID NO: 478773 - DNA, 25 bp, Homo sapien
tatgtttcttcgatgctgttatctc

SEQ ID NO: 478774 - DNA, 25 bp, Homo sapien
acaagaggcttgtaagacagtcaag

SEQ ID NO: 478775 - DNA, 25 bp, Homo sapien
gagtactgagagcaggactccacgg

SEQ ID NO: 478776 - DNA, 25 bp, Homo sapien
gacagtcaagtcgagtactgagagc

SEQ ID NO: 478777 - DNA, 25 bp, Homo sapien
caggactccacggaatttttgccta

SEQ ID NO: 478778 - DNA, 25 bp, Homo sapien
cagctgttaatgtgaaaccccaaga

SEQ ID NO: 478779 - DNA, 25 bp, Homo sapien
caaatatattaaacagagctgcaga

SEQ ID NO: 478780 - DNA, 25 bp, Homo sapien
tatgaatatgatagcttgatcctgc

SEQ ID NO: 478781 - DNA, 25 bp, Homo sapien
tgaagaggctttgtagaactcaacc

SEQ ID NO: 478782 - DNA, 25 bp, Homo sapien
taacctattctccttaggtctctga

SEQ ID NO: 478783 - DNA, 25 bp, Homo sapien
tcttagagcctgcataagcgtagag

SEQ ID NO: 478784 - DNA, 25 bp, Homo sapien
aggtgggtttcagatgattaatatc

SEQ ID NO: 478785 - DNA, 25 bp, Homo sapien
tttagcaggagagcataacctattc

SEQ ID NO: 478786 - DNA, 25 bp, Homo sapien
tgattaacgtcaaatggccaacaag

SEQ ID NO: 478787 - DNA, 25 bp, Homo sapien
taccaaataacagcctaggttgcag

SEQ ID NO: 478788 - DNA, 25 bp, Homo sapien
gcacttctaaaacaggcccaaggga

SEQ ID NO: 478789 - DNA, 25 bp, Homo sapien
caacttgtgaggctatagggagaca

SEQ ID NO: 478790 - DNA, 25 bp, Homo sapien
tcatccattggaacaggcatgctgc

SEQ ID NO: 478791 - DNA, 25 bp, Homo sapien
taaattgaggaacaactgtacggtc

SEQ ID NO: 478792 - DNA, 25 bp, Homo sapien
caacattacgttgtcgaggatcaac

SEQ ID NO: 478793 - DNA, 25 bp, Homo sapien
tgataccaacccaaatactagctga

SEQ ID NO: 478794 - DNA, 25 bp, Homo sapien
ctgtatatctgagctatcaaaaacc

SEQ ID NO: 478795 - DNA, 25 bp, Homo sapien
tccaccatcattctgccatgtctcc

SEQ ID NO: 478796 - DNA, 25 bp, Homo sapien
tagagagatactcagtaatgacggg

SEQ ID NO: 478797 - DNA, 25 bp, Homo sapien
cctgttagagagatactcagtaatg

SEQ ID NO: 478798 - DNA, 25 bp, Homo sapien
cactacctgttagagagatactcag

SEQ ID NO: 478799 - DNA, 25 bp, Homo sapien
tacattccttcttacttctctgttt

SEQ ID NO: 478800 - DNA, 25 bp, Homo sapien
ttctttataatcctctcacacacca

SEQ ID NO: 478801 - DNA, 25 bp, Homo sapien
tctgtttctttataatcctctcaca

SEQ ID NO: 478802 - DNA, 25 bp, Homo sapien
ttataatcctctcacacaccacctc

SEQ ID NO: 478803 - DNA, 25 bp, Homo sapien
tgtcctcattcagcagccatatgac

SEQ ID NO: 478804 - DNA, 25 bp, Homo sapien
ttggtggctcaaccaggaagtgctc

SEQ ID NO: 478805 - DNA, 25 bp, Homo sapien
aattggtggctcaaccaggaagtgc

SEQ ID NO: 478806 - DNA, 25 bp, Homo sapien
cctcattcagcagccatatgacagg

SEQ ID NO: 478807 - DNA, 25 bp, Homo sapien
aaattaaaagcacccacaaatgtgg

SEQ ID NO: 478808 - DNA, 25 bp, Homo sapien
tgttctacacaactgatgaatcact

SEQ ID NO: 478809 - DNA, 25 bp, Homo sapien
tgtaacctcataaagaatagatcta

SEQ ID NO: 478810 - DNA, 25 bp, Homo sapien
ctatccaggtttatcaaaactggga

SEQ ID NO: 478811 - DNA, 25 bp, Homo sapien
agtctgaaggtcctgtttttcatag

SEQ ID NO: 478812 - DNA, 25 bp, Homo sapien
agagtctgaaggtcctgtttttcat

SEQ ID NO: 478813 - DNA, 25 bp, Homo sapien
gagtctgaaggtcctgtttttcata

SEQ ID NO: 478814 - DNA, 25 bp, Homo sapien
tagagtctgaaggtcctgtttttca

SEQ ID NO: 478815 - DNA, 25 bp, Homo sapien
ggaatccaaggaggtaggatctcac

SEQ ID NO: 478816 - DNA, 25 bp, Homo sapien
ctgggaatccaaggaggtaggatct

SEQ ID NO: 478817 - DNA, 25 bp, Homo sapien
acacaatgaattgatcatttggata

SEQ ID NO: 478818 - DNA, 25 bp, Homo sapien
caacacaaaggccacaacacaatga

SEQ ID NO: 478819 - DNA, 25 bp, Homo sapien
cagggatggaactgaacctggaaag

SEQ ID NO: 478820 - DNA, 25 bp, Homo sapien
ggagagaatggactgtctgcaagct

SEQ ID NO: 478821 - DNA, 25 bp, Homo sapien
cctggaaagccaccacacagaatgc

SEQ ID NO: 478822 - DNA, 25 bp, Homo sapien
agaatgcatctggagagaatggact

SEQ ID NO: 478823 - DNA, 25 bp, Homo sapien
taaagacacagcaactctcacatac

SEQ ID NO: 478824 - DNA, 25 bp, Homo sapien
tagttaaagacacagcaactctcac

SEQ ID NO: 478825 - DNA, 25 bp, Homo sapien
tcattaccgttaatagttaaagaca

SEQ ID NO: 478826 - DNA, 25 bp, Homo sapien
gcaactctcacatacccactgtcag

SEQ ID NO: 478827 - DNA, 25 bp, Homo sapien
tgacatgcgttttggaaaaggatcc

SEQ ID NO: 478828 - DNA, 25 bp, Homo sapien
gacatgcgttttggaaaaggatcca

SEQ ID NO: 478829 - DNA, 25 bp, Homo sapien
tgaaaataggtgcaaactcttttac

SEQ ID NO: 478830 - DNA, 25 bp, Homo sapien
ggcttgcagattaagtgaaaatagg

SEQ ID NO: 478831 - DNA, 25 bp, Homo sapien
tcttcataacatactgaagctgatg

SEQ ID NO: 478832 - DNA, 25 bp, Homo sapien
cagagttgtaatgaaaacacgtttt

SEQ ID NO: 478833 - DNA, 25 bp, Homo sapien
tgctgcttacacaaactataatctg

SEQ ID NO: 478834 - DNA, 25 bp, Homo sapien
gactgttatgtaatgtggaaacgcc

SEQ ID NO: 478835 - DNA, 25 bp, Homo sapien
gactatttctttagacggctttgaa

SEQ ID NO: 478836 - DNA, 25 bp, Homo sapien
taattcctctgcctacaaaaagtca

SEQ ID NO: 478837 - DNA, 25 bp, Homo sapien
catatggtcagtagaacacgtaggg

SEQ ID NO: 478838 - DNA, 25 bp, Homo sapien
caaggactaccggattgaaatgagg

SEQ ID NO: 478839 - DNA, 25 bp, Homo sapien
catcattacggaacagatttctggc

SEQ ID NO: 478840 - DNA, 25 bp, Homo sapien
gatttctggcaacggatgacattaa

SEQ ID NO: 478841 - DNA, 25 bp, Homo sapien
ctttccaccttgtgccatagacatt

SEQ ID NO: 478842 - DNA, 25 bp, Homo sapien
caataacctcagtgaagacatatcc

SEQ ID NO: 478843 - DNA, 25 bp, Homo sapien
gcacatatcttttctcccttataag

SEQ ID NO: 478844 - DNA, 25 bp, Homo sapien
caccttgtgccatagacatttcagc

SEQ ID NO: 478845 - DNA, 25 bp, Homo sapien
taattcaggttccttagatcttgcc

SEQ ID NO: 478846 - DNA, 25 bp, Homo sapien
gttaattcaggttccttagatcttg

SEQ ID NO: 478847 - DNA, 25 bp, Homo sapien
ttaattcaggttccttagatcttgc

SEQ ID NO: 478848 - DNA, 25 bp, Homo sapien
ttacaccgccttgccttatcaaagg

SEQ ID NO: 478849 - DNA, 25 bp, Homo sapien
taccactctgtttcaagagggacat

SEQ ID NO: 478850 - DNA, 25 bp, Homo sapien
gcaggaatactctgctaaaactcag

SEQ ID NO: 478851 - DNA, 25 bp, Homo sapien
ttatccttgttggatcctgcaggaa

SEQ ID NO: 478852 - DNA, 25 bp, Homo sapien
cctacaagattatgcctcatggcag

SEQ ID NO: 478853 - DNA, 25 bp, Homo sapien
gaaaagggattgttcgtataagtca

SEQ ID NO: 478854 - DNA, 25 bp, Homo sapien
tccagtgcaagaaatacacttgtat

SEQ ID NO: 478855 - DNA, 25 bp, Homo sapien
ggcaagctacttagaaatccagtgc

SEQ ID NO: 478856 - DNA, 25 bp, Homo sapien
tgttaccatccacaggcacttgcac

SEQ ID NO: 478857 - DNA, 25 bp, Homo sapien
ctgtcctgcaaaaatgttagcctga

SEQ ID NO: 478858 - DNA, 25 bp, Homo sapien
tacacagaggtaccaagcgaattga

SEQ ID NO: 478859 - DNA, 25 bp, Homo sapien
cacatgtagtgaacttagggaagct

SEQ ID NO: 478860 - DNA, 25 bp, Homo sapien
tgggccacccacagtgtaatgcctg

SEQ ID NO: 478861 - DNA, 25 bp, Homo sapien
tagagaaactatcccctgtagggat

SEQ ID NO: 478862 - DNA, 25 bp, Homo sapien
aaagtgatttatgtggtcctctggc

SEQ ID NO: 478863 - DNA, 25 bp, Homo sapien
aacccttgtaattagtcatgtgacc

SEQ ID NO: 478864 - DNA, 25 bp, Homo sapien
ccagagactggtttgtgtgtacgca

SEQ ID NO: 478865 - DNA, 25 bp, Homo sapien
tgtgtacgcataagggtccagtcgc

SEQ ID NO: 478866 - DNA, 25 bp, Homo sapien
gagacgttgcgttgctcctgggaca

SEQ ID NO: 478867 - DNA, 25 bp, Homo sapien
ccttcagggcagctatgtccagaga

SEQ ID NO: 478868 - DNA, 25 bp, Homo sapien
gaatgtgccttctaaaatcagttgt

SEQ ID NO: 478869 - DNA, 25 bp, Homo sapien
tgtggaatgccgcttacacccttcc

SEQ ID NO: 478870 - DNA, 25 bp, Homo sapien
agaggatgctgtggaatgccgctta

SEQ ID NO: 478871 - DNA, 25 bp, Homo sapien
cagaaactgaatgtgccttctaaaa

SEQ ID NO: 478872 - DNA, 25 bp, Homo sapien
catgctcagcctagacgatttcatt

SEQ ID NO: 478873 - DNA, 25 bp, Homo sapien
tcaattattaggaactacttagtac

SEQ ID NO: 478874 - DNA, 25 bp, Homo sapien
tgctcagcctagacgatttcatttt

SEQ ID NO: 478875 - DNA, 25 bp, Homo sapien
aatatttcaattattaggaactact

SEQ ID NO: 478876 - DNA, 25 bp, Homo sapien
gcctgattcactacacaagatgtga

SEQ ID NO: 478877 - DNA, 25 bp, Homo sapien
caaggatcatatctgcctgattcac

SEQ ID NO: 478878 - DNA, 25 bp, Homo sapien
tgatatcttggacagatttggcagg

SEQ ID NO: 478879 - DNA, 25 bp, Homo sapien
ttctgtgtacatcacaaggatcata

SEQ ID NO: 478880 - DNA, 25 bp, Homo sapien
tacttaagttatgcacaataagcat

SEQ ID NO: 478881 - DNA, 25 bp, Homo sapien
cttcaagagtacttaagttatgcac

SEQ ID NO: 478882 - DNA, 25 bp, Homo sapien
caagagtacttaagttatgcacaat

SEQ ID NO: 478883 - DNA, 25 bp, Homo sapien
gagtacttaagttatgcacaataag

SEQ ID NO: 478884 - DNA, 25 bp, Homo sapien
atcagtaaaacctgtagcaatatca

SEQ ID NO: 478885 - DNA, 25 bp, Homo sapien
cagtaaaacctgtagcaatatcagc

SEQ ID NO: 478886 - DNA, 25 bp, Homo sapien
acacaagtaatgcatcctggatgct

SEQ ID NO: 478887 - DNA, 25 bp, Homo sapien
aacacaagtaatgcatcctggatgc

SEQ ID NO: 478888 - DNA, 25 bp, Homo sapien
ccatggctggataacaaatgacacc

SEQ ID NO: 478889 - DNA, 25 bp, Homo sapien
gaagaagtctatcagttatccatgg

SEQ ID NO: 478890 - DNA, 25 bp, Homo sapien
caaggttgatccgaattgctgggaa

SEQ ID NO: 478891 - DNA, 25 bp, Homo sapien
tacaggtgcttcacccttaggagta

SEQ ID NO: 478892 - DNA, 25 bp, Homo sapien
ctgtctggaagttgagaatgccaag

SEQ ID NO: 478893 - DNA, 25 bp, Homo sapien
catttaacatgtgactgtctgggcc

SEQ ID NO: 478894 - DNA, 25 bp, Homo sapien
gggcccctgagagccttccataata

SEQ ID NO: 478895 - DNA, 25 bp, Homo sapien
gaaattcctcacatacatctctagt

SEQ ID NO: 478896 - DNA, 25 bp, Homo sapien
tctgtggaatcctgtacacgacccc

SEQ ID NO: 478897 - DNA, 25 bp, Homo sapien
ttttccatagtgaaacatgctctga

SEQ ID NO: 478898 - DNA, 25 bp, Homo sapien
tatcttcttcagttacgtacacaag

SEQ ID NO: 478899 - DNA, 25 bp, Homo sapien
tccgtgtagatctacccactcattt

SEQ ID NO: 478900 - DNA, 25 bp, Homo sapien
tactaagcagctaccaaatgcctgg

SEQ ID NO: 478901 - DNA, 25 bp, Homo sapien
tattcttgcaaagtagccaactctg

SEQ ID NO: 478902 - DNA, 25 bp, Homo sapien
taggtaaaatcatgcgcctcacaag

SEQ ID NO: 478903 - DNA, 25 bp, Homo sapien
gcactgtggcatatgctgtgaacca

SEQ ID NO: 478904 - DNA, 25 bp, Homo sapien
tattaaagggcatgtcaagccacac

SEQ ID NO: 478905 - DNA, 25 bp, Homo sapien
ttgacttacataaggagagccctgc

SEQ ID NO: 478906 - DNA, 25 bp, Homo sapien
tatgtggtcctctacttactcggaa

SEQ ID NO: 478907 - DNA, 25 bp, Homo sapien
gacgaacatgagctctgaaacatca

SEQ ID NO: 478908 - DNA, 25 bp, Homo sapien
ctgcctgttgttccaggatcttctg

SEQ ID NO: 478909 - DNA, 25 bp, Homo sapien
cacagcccctttgagtcagagagag

SEQ ID NO: 478910 - DNA, 25 bp, Homo sapien
ttgtgtgtgcaagccaacttctgcc

SEQ ID NO: 478911 - DNA, 25 bp, Homo sapien
ttcataaagctaacctgcagagtgc

SEQ ID NO: 478912 - DNA, 25 bp, Homo sapien
gatgcatgcactattttggccctca

SEQ ID NO: 478913 - DNA, 25 bp, Homo sapien
taagttgctctgctggcaagttgta

SEQ ID NO: 478914 - DNA, 25 bp, Homo sapien
tgatgaatctgatgccagtatagcc

SEQ ID NO: 478915 - DNA, 25 bp, Homo sapien
gcaagttgtactttcatcccattcc

SEQ ID NO: 478916 - DNA, 25 bp, Homo sapien
ctcttgtaagactcaatgcttgtta

SEQ ID NO: 478917 - DNA, 25 bp, Homo sapien
caagcatgaatcatggtgcctgact

SEQ ID NO: 478918 - DNA, 25 bp, Homo sapien
tctccagctatctacgaaattgatg

SEQ ID NO: 478919 - DNA, 25 bp, Homo sapien
gatgcttctcaaatcgtgatctacg

SEQ ID NO: 478920 - DNA, 25 bp, Homo sapien
cagaacagctgtttgatagttcccc

SEQ ID NO: 478921 - DNA, 25 bp, Homo sapien
tgacatctaatcacccggagcctgt

SEQ ID NO: 478922 - DNA, 25 bp, Homo sapien
gcatcagggcaaatctcatacagtt

SEQ ID NO: 478923 - DNA, 25 bp, Homo sapien
tcaggttccgccctaggcaaaggga

SEQ ID NO: 478924 - DNA, 25 bp, Homo sapien
cagaaacggatgaaactggtgtgca

SEQ ID NO: 478925 - DNA, 25 bp, Homo sapien
tttttcagggaaggtatagcatgtc

SEQ ID NO: 478926 - DNA, 25 bp, Homo sapien
agcatgtctgtagcggagaattcac

SEQ ID NO: 478927 - DNA, 25 bp, Homo sapien
aattggacaaaatatcatctgccgc

SEQ ID NO: 478928 - DNA, 25 bp, Homo sapien
tggtagactgacctaattttacagg

SEQ ID NO: 478929 - DNA, 25 bp, Homo sapien
aacataatcagttttataggccaca

SEQ ID NO: 478930 - DNA, 25 bp, Homo sapien
tatgcacattgcttacagatggaat

SEQ ID NO: 478931 - DNA, 25 bp, Homo sapien
gaaaatcacacaattccagttcaca

SEQ ID NO: 478932 - DNA, 25 bp, Homo sapien
tacagatggaataacttgcaaaaac

SEQ ID NO: 478933 - DNA, 25 bp, Homo sapien
aagtgaaacgggagaagagcaatgt

SEQ ID NO: 478934 - DNA, 25 bp, Homo sapien
tgttcctctaaattgcttgtcatta

SEQ ID NO: 478935 - DNA, 25 bp, Homo sapien
gtttcttgttcctctaaattgcttg

SEQ ID NO: 478936 - DNA, 25 bp, Homo sapien
caatgtggcaagaagtgtaaagccc

SEQ ID NO: 478937 - DNA, 25 bp, Homo sapien
ctaacacccaaaagagatctttcct

SEQ ID NO: 478938 - DNA, 25 bp, Homo sapien
ctgaatttgtccacaaatctttaaa

SEQ ID NO: 478939 - DNA, 25 bp, Homo sapien
tctgaatttgtccacaaatctttaa

SEQ ID NO: 478940 - DNA, 25 bp, Homo sapien
cttaaatctcacctttctataatcc

SEQ ID NO: 478941 - DNA, 25 bp, Homo sapien
ttctgccacatatgagcctgcagat

SEQ ID NO: 478942 - DNA, 25 bp, Homo sapien
tgccacatatgagcctgcagatacc

SEQ ID NO: 478943 - DNA, 25 bp, Homo sapien
tctgccacatatgagcctgcagata

SEQ ID NO: 478944 - DNA, 25 bp, Homo sapien
ccacatatgagcctgcagatacctc

SEQ ID NO: 478945 - DNA, 25 bp, Homo sapien
catacacttggttcttattgatgtc

SEQ ID NO: 478946 - DNA, 25 bp, Homo sapien
cttattgatgtcaggagttagagat

SEQ ID NO: 478947 - DNA, 25 bp, Homo sapien
cttggttcttattgatgtcaggagt

SEQ ID NO: 478948 - DNA, 25 bp, Homo sapien
tggttcttattgatgtcaggagtta

SEQ ID NO: 478949 - DNA, 25 bp, Homo sapien
gggccctgactttgttcagcaatct

SEQ ID NO: 478950 - DNA, 25 bp, Homo sapien
atctcaatggaaagacaagttagag

SEQ ID NO: 478951 - DNA, 25 bp, Homo sapien
tctcaatggaaagacaagttagaga

SEQ ID NO: 478952 - DNA, 25 bp, Homo sapien
gactttgttcagcaatctcaatgga

SEQ ID NO: 478953 - DNA, 25 bp, Homo sapien
catgtacagcatgccataggtccgt

SEQ ID NO: 478954 - DNA, 25 bp, Homo sapien
tcagctgaaacatccgttccaggag

SEQ ID NO: 478955 - DNA, 25 bp, Homo sapien
tgaaggcgcgggtaacctgaatctt

SEQ ID NO: 478956 - DNA, 25 bp, Homo sapien
ggagccgagcccaaaagtcattgag

SEQ ID NO: 478957 - DNA, 25 bp, Homo sapien
gcaccattggtactaaaagcttctc

SEQ ID NO: 478958 - DNA, 25 bp, Homo sapien
ccttaaaaccctgatcagaaatatc

SEQ ID NO: 478959 - DNA, 25 bp, Homo sapien
caaatgatcatagttgcaacgtgcc

SEQ ID NO: 478960 - DNA, 25 bp, Homo sapien
aattttcaaaccacatagaatggct

SEQ ID NO: 478961 - DNA, 25 bp, Homo sapien
tgtcctgaacaataacttgtctcca

SEQ ID NO: 478962 - DNA, 25 bp, Homo sapien
tactcattagtccttcctaatccag

SEQ ID NO: 478963 - DNA, 25 bp, Homo sapien
catgaaggaatttggccacattgac

SEQ ID NO: 478964 - DNA, 25 bp, Homo sapien
taatccagtaatacaggtgtcagca

SEQ ID NO: 478965 - DNA, 25 bp, Homo sapien
tattacggattttactgacagtgca

SEQ ID NO: 478966 - DNA, 25 bp, Homo sapien
ggcacagccctccaatagaaaagta

SEQ ID NO: 478967 - DNA, 25 bp, Homo sapien
caaaagcagatatcctctacacagg

SEQ ID NO: 478968 - DNA, 25 bp, Homo sapien
ggactgacctcacaagtgccttaaa

SEQ ID NO: 478969 - DNA, 25 bp, Homo sapien
tcagaaacctctatagtgcgctgat

SEQ ID NO: 478970 - DNA, 25 bp, Homo sapien
tagtgcgctgatattgcaccaggga

SEQ ID NO: 478971 - DNA, 25 bp, Homo sapien
tattgcaccagggaacatcctcata

SEQ ID NO: 478972 - DNA, 25 bp, Homo sapien
gcaccagggaacatcctcataacat

SEQ ID NO: 478973 - DNA, 25 bp, Homo sapien
gaagctaccactctgttgggtaaca

SEQ ID NO: 478974 - DNA, 25 bp, Homo sapien
tgggaaggcccactgtatggtacaa

SEQ ID NO: 478975 - DNA, 25 bp, Homo sapien
catcaggtattcaggcagggcacta

SEQ ID NO: 478976 - DNA, 25 bp, Homo sapien
catctacaatgtctttcgagctgga

SEQ ID NO: 478977 - DNA, 25 bp, Homo sapien
ctcctgctgcccttgtgtaattctt

SEQ ID NO: 478978 - DNA, 25 bp, Homo sapien
ctcgtctctgtgtaactcctgctgc

SEQ ID NO: 478979 - DNA, 25 bp, Homo sapien
gggtcccacaacaagacatggattc

SEQ ID NO: 478980 - DNA, 25 bp, Homo sapien
ccatacaggctttggacctgggtcc

SEQ ID NO: 478981 - DNA, 25 bp, Homo sapien
cacaacccgtagtcagaatgtcctg

SEQ ID NO: 478982 - DNA, 25 bp, Homo sapien
cagatggactgctggccataagcca

SEQ ID NO: 478983 - DNA, 25 bp, Homo sapien
ccagatggactggtccccagatgga

SEQ ID NO: 478984 - DNA, 25 bp, Homo sapien
gacttatgctatggagtggacccca

SEQ ID NO: 478985 - DNA, 25 bp, Homo sapien
gtcaagacctccctatggcactggg

SEQ ID NO: 478986 - DNA, 25 bp, Homo sapien
gaaagtactgtatctcagcctgggc

SEQ ID NO: 478987 - DNA, 25 bp, Homo sapien
tctgtaggaatgaacgatgaccatc

SEQ ID NO: 478988 - DNA, 25 bp, Homo sapien
ggaagttgatcaaaaaagtgccctc

SEQ ID NO: 478989 - DNA, 25 bp, Homo sapien
aaacctttgacttttcgctgactgc

SEQ ID NO: 478990 - DNA, 25 bp, Homo sapien
gctgagtactataaacgtgtttcca

SEQ ID NO: 478991 - DNA, 25 bp, Homo sapien
tatcacccttagataaaagcaagag

SEQ ID NO: 478992 - DNA, 25 bp, Homo sapien
tggccatagcaaactccaagtagag

SEQ ID NO: 478993 - DNA, 25 bp, Homo sapien
tgcagaggggacttgattgagcaaa

SEQ ID NO: 478994 - DNA, 25 bp, Homo sapien
ggggacttgattgagcaaatctttc

SEQ ID NO: 478995 - DNA, 25 bp, Homo sapien
ggacttgattgagcaaatctttctc

SEQ ID NO: 478996 - DNA, 25 bp, Homo sapien
cagaggggacttgattgagcaaatc

SEQ ID NO: 478997 - DNA, 25 bp, Homo sapien
tgattaatctgcttaggtacaggac

SEQ ID NO: 478998 - DNA, 25 bp, Homo sapien
taaatcaaatgttacagtccgctga

SEQ ID NO: 478999 - DNA, 25 bp, Homo sapien
tggaaattggtttgatatgctgctg

SEQ ID NO: 479000 - DNA, 25 bp, Homo sapien
aacaacaataggcttcatgcacagt

SEQ ID NO: 479001 - DNA, 25 bp, Homo sapien
tgaataagtaagctatgagcataac

SEQ ID NO: 479002 - DNA, 25 bp, Homo sapien
tgagcataactcttactgagataaa

SEQ ID NO: 479003 - DNA, 25 bp, Homo sapien
tacttttgaataagtaagctatgag

SEQ ID NO: 479004 - DNA, 25 bp, Homo sapien
gaggaaaataagcataatacttttg

SEQ ID NO: 479005 - DNA, 25 bp, Homo sapien
gtcactgcacttaacctcatcctgt

SEQ ID NO: 479006 - DNA, 25 bp, Homo sapien
cactgcacttaacctcatcctgtaa
